(19) United States
(12) Patent Application Publication
(10) Pub. No.: US 2007/0111227 A1
(43) Pub. Date: May 17, 2007

(54) Small regulatory RNAs and methods of use

(76) Inventors: Pamela J. Green, Newark, DE (US); Blake Meyers, Wilmington, DE (US); Cheng Lu, Newark, DE (US); Shivakundan Singh Tej, Herndon, VA (US); Frederic F. Souret, Newark, DE (US)

Correspondence Address: MCCARTER & ENGLISH, LLP;BASIL S. KRIKELIS, CITIZENS BANK CENTER, 919 N. MARKET STREET, SUITE 1800, WILMINGTON, DE, 19801, US

(21) Appl. No.: 11/495,951

(22) Filed: Jul. 28, 2006

Related U.S. Application Data
(60) Provisional application No. 60/703,215, filed on Jul. 28, 2005.
(60) Provisional application No. 60/772,666, filed on Feb. 13, 2006.

(51) Int. Cl. C12Q 1/68; G06F 19/00; C40B 40/08

(52) U.S. Cl. 435/6; 702/20

(57) ABSTRACT

The present invention relates to unique small ribonucleic acid molecules, for example siRNAs and miRNAs, identified and isolated using MPSS. Specifically, the invention is directed to the identification of a library of unique small RNA sequences from Arabidopsis thaliana. In another aspect, the small RNA sequences themselves are useful for performing biological functions, such as for example, RNA interference.

### CROSS-REFERENCE TO RELATED APPLICATIONS

[0001] Under 35 U.S.C. § 119(e) this application claims the benefit of U.S. Provisional Application No. 60/703,215, filed Jul. 28, 2005; and U.S. Provisional Application No. 60/772,666, filed Feb. 13, 2006, which are hereby incorporated by reference in their entirety and for all purposes.

### RELATED FEDERALLY SPONSORED RESEARCH

[0002] The work described in this application was sponsored by the NSF SGER under Contract Number 0439186; with additional support from the NSF Plant Genome Program Grant Number 0321437 (B.C.M) DOE DE-FG02-04ER15541 (P.J.G.) and NIH P20RR16472-04.

### SEQUENCE LISTING

[0003] The instant application contains a “lengthy” Sequence Listing of SEQ ID NOs: 1-185,413 which has been submitted via CD-Rs in lieu of a printed paper copy, and is hereby incorporated by reference in its entirety. Said CD-R, recorded on Jul. 28, 2006, is labeled “CRF”, “Copy 1” and “Copy 2”, respectively, and each contains only one identical 27.5 MB file (99689009. APP).

### FIELD OF THE INVENTION

[0004] The present invention relates generally to the isolation and identification of small ribonucleic acids (RNAs) from an organism and methods for their use. In particular the invention relates to novel small inhibitory RNAs (siRNAs), microRNAs (miRNAs), tiny RNAs or combinations thereof from an organism, for example, Arabidopsis thaliana. In a related aspect the invention relates to methods of using the small RNAs disclosed herein.

### BACKGROUND

[0005] Small ribonucleic acid (RNA) molecules are short RNA sequences (e.g., 15 to 30 nucleotides in size, but generally 21-24 nucleotides in size) that are produced by nearly all eukaryotes (e.g., fungi, plants, and animals). However, rather than encoding a protein, small RNAs function to reduce the mRNA abundance or protein abundance of the gene which is the “target.” In certain instances small RNAs can also result in target gene regulation by affecting chromatin structure. The two major types of small RNAs are known as small interfering RNAs (siRNAs) and microRNAs (miRNAs). Both types of molecules are processed from double-stranded RNA by RNase III enzymes called DICERs. Although relatively short in length, 15 to 30 nucleotides, small RNAs typically correspond to a single location in the host genome.

[0006] Small RNAs do not necessarily demonstrate perfect base pair complementarity with their target RNA. This phenomena allows for a single small RNA to interact with multiple targets such as those encoded by members of a gene family that share short regions of similarity. Therefore, although small RNAs may not match perfectly to their targets (i.e., they contain one or more base-pair mismatches) they retain the ability to direct cleavage or inhibit translation of the target mRNAs.

[0007] While similar in size, the biogenesis and function of siRNAs and miRNAs can be substantially different. For instance, siRNAs are processed from longer double-stranded RNA molecules and represent both strands of the RNA. In addition, siRNAs are incorporated into a multi-protein complex known as the RNA-induced silencing complex (RISC), where they can act as guides to target and degrade complementary mRNA molecules. In some systems, siRNAs can also trigger transcriptional silencing by guiding nuclear complexes that target either histone modifications or DNA methylation or both.

[0008] MicroRNA molecules, on the other hand, originate from distinct genomic loci predicted to encode transcripts that form ‘hairpin’ structures. These small RNAs, which are derived from one strand of the hairpin, guide the RISC (or a similar RNA-protein complex) to specific RNAs, such as mRNAs by forming base-pairing interactions. Like siRNA, miRNAs can induce cleavage and accelerate degradation of the mRNA targets. A second mechanism by which miRNAs affect gene function is to reduce or prevent mRNA translation and thereby limit protein production.

[0009] However, not all small RNAs fit precisely into these two categories. For example, trans-acting siRNAs (ta-siRNAs), recently found in plants, are technically siRNAs because they require the action of an RNA-dependent RNA polymerase to generate their double-stranded RNA precursors. After the ta-siRNAs are formed by cleavage of the double-stranded RNA by a DICER enzyme, they act like miRNAs to silence genes in trans that usually have little resemblance to the genes from which they derive (Vasquez et al, 2004; Peragine et al., 2004). Work in plants also led to a new model for the evolution of miRNA genes from inverted duplication of target genes. Founder genes formed by these initial inversions are thought to produce siRNAs that are replaced by miRNA as the sequence of the founder genes diverges (Allen et al., 2004).

[0010] As indicated above, small RNAs have many roles in organisms. For example, miRNAs are critical for development in both plants and animals. The first miRNAs were discovered for their role in the development of the nematode Caenorhabditis elegans (Lee at al., 1993). Numerous diverse examples have emerged subsequently including important roles of miRNAs in brain development in vertebrates and flower development in plants. Other studies have associated miRNA metabolism with cancer, and other human diseases. Small RNAs have also been associated with stress responses, hormonal responses, reproductive development, and small RNA metabolism. Endogenous siRNAs are also thought to function in part to protect the genome against damage or invasion by mobile genetic elements such as retro-transposons and viruses, which produce aberrant RNA or dsRNA in the host cell when they become active. It is well known however, that small RNA function can have profound effects on cellular physiology as well as the overall phenotype. Yet, these and other numerous examples likely represent only a subset of the roles of these molecules in eukaryotes. In theory they could regulate any gene so they could contribute to any biological function in an organism. Conversely, inhibiting elevating, or otherwise modulating the level of a given small RNA is a means of creating new advantageous traits. For example, modulating the expression of certain genes in a plant could affect its tolerance to pesticides, temperature, or soil conditions.

[0011] Currently, the typical method for the isolation and identification of small RNAs involves cloning, either as single molecules or “concatamers,” and subsequent sequencing by standard methods. Using this approach, a modest number of small RNA sequences have been identified from, for example, human, Drosophila melanogaster, mouse, Caenorhabditis elegans, and Arabidopsis thaliana. Obviously, these methods do not sequence deeply enough to sample the full complexity of small RNAs in plant and animal systems. While modern microarray-based methods for the quantification of small RNA abundance offer advantages of scale, they are relatively new, and their sensitivity and specificity have yet to be fully characterized. Therefore, most current analyses rely on RNA gel blots or assays with oligonucleotide probes that only detect individual or closely related small RNA sequences.

[0012] Recently, we demonstrated a method of performing massively parallel signature sequencing™ (“MPSS”) to sequence more than two million small RNAs from seedlings and the inflorescence stage of the model plant Arabidopsis thaliana. This method is the subject of U.S. patent application Ser. Nos. 11/204,903, which is incorporated herein by reference in its entirety. This technique allows for the efficient identification and isolation of many hundreds of thousands of individual sequences, the generation of a “library” of small RNAs. The abundance or frequency of occurrence of each distinct sequence from a small RNA “library” is indicative of the quantity in the original tissue from which the RNA was obtained. Moreover, by comparison of the signature sequences, which are typically 17-20 nucleotides in length, to a genomic DNA database it is possible to determine the locations on the DNA that serve as sources for the small RNAs. Comparisons to genome annotations, cDNA databases, and other data can often be used to identify the larger RNA precursors of the small RNAs. Most significantly, MPSS provides the ability to address small RNA biology on a genome-wide scale.

[0013] While, MPSS provides extraordinary depth, sequencing a half million or more molecules per library, utilizing another parallel sequencing approach, the 454 technology Margulies, M., et al., 2005. Genome sequencing in microfabricated high-density picolitre reactors. Nature 437: 376-380, provides longer reads and thereby provides information about length. Both methods provide quantitative data based on the frequency of the molecules that are sequenced. However, without identification, it is impossible to discover the functional significance of a given small RNA.

[0014] Interestingly, the small RNA population in plants may be among the most complex because, in addition to producing microRNAs (miRNAs) that play critical role in various developmental, stress, and signaling responses Chen, X., et al., 2005. MicroRNA Biogenesis and Function In Plants. FEBS Lett 579: 5923-5931; Zhang, B., et al., 2006, Conservation and Divergence of Plant MicroRNA Genes. Plant J 46: 243-259, plants also produce a complex set of small interfering RNAs (siRNAs); Vaucheret, H., et al., 2006, AGO1 Homeostasis Entails Coexpression of MIR168 and AGO1 and Preferential Stabilization of miR168 by AGO1. Mol Cell 22: 129-136. Among the approximately 77,000 different small RNAs that have been sequenced from Arabidopsis, it is likely that miRNAs account for less than 10%, so the non-redundant set of siRNAs must number more than 70,000 Lu, C., et al., 2005, Elucidation of the Small RNA Component of the Transcriptome. Science 309: 1567-1569. Most of these siRNAs match to repeated sequences such as transposons and retrotransposons. Thus, in cereals and other plant species with larger genomes and correspondingly higher contents of repeated DNA, the complexity of siRNAs is expected to be far greater.

[0015] While the ‘upstream’ biochemical steps that produce small RNAs have been relatively well characterized much remains to be understood about the complexity, abundance, targeting, and regulatory function of small RNAs. Because the search for these small RNAs has only occurred in the last 5 to 7 years, and because no methods prior to our invention permitted the large-scale characterization of these molecules (see U.S. Ser. No. 11/204,903), their ‘downstream’ role in many aspects of biology, and commercial utility has been poorly explored.

[0016] In addition to the transcriptional or post-transcriptional gene regulatory mechanisms that are mediated by small RNAs made within an organism (endogenous small RNAs), small RNAs can also be useful for purposes of RNA interference (RNAi). RNAi refers to the specific silencing of genes which bear substantial homology in nucleic acid sequence to small RNAs that are introduced or engineered to be produced within an organism, cell, or cell-free experimental system. RNAi is a process that appears to be conserved in eukaryotic cells across evolutionary lines, and involves some of the same cellular components and mechanisms involved in the small RNA mediated gene regulation mechanisms. For example, U.S. Pat. No. 7,022,828 to McSwiggen, which is incorporated herein by reference in its entirety, is one of the first patents to describe a small RNA molecule useful as an RNAi therapeutic for modulating immune responses in an animal.

[0017] In addition to therapeutic uses, there exists an overwhelming need for agents having agricultural applications, for example, to modify disease and pesticide resistance, and/or enhance plant growth, nutritional value, abundance, etc . . . . As such, the present invention relates to small RNA compositions and methods for the preparation and use thereof, for example, for agricultural use.

### SUMMARY OF THE INVENTION

[0018] The present invention relates to unique small ribonucleic acid molecules, for example siRNAs and miRNAs, identified and isolated using MPSS. Specifically, the invention is directed to the identification of approximately 185,409 unique small RNA sequences from Arabidopsis thaliana (SEQ ID NOS. 1-185,409). In one aspect the invention includes nucleic acids, for example, small RNAs, of from about 15 to about 30 nucleotides in length. In certain preferred embodiments the nucleic acids identified using MPSS are about 17 nucleotides in length. These nucleic acids can be extended with genomic sequence to 21-24 nucleotides in length in order to, for example, determine the entire biologically active or full sequence.

[0019] The present invention further relates to a method for genome-scale identification of small RNAs in an organism. Related is the development of a genome-wide library of small RNA sequences of an organism.

[0020] Another object of this invention includes the identification of a nucleic acid signature sequence using MPSS that corresponds to at least 15 nucleotides of a small RNA followed by a method for extending such signature sequence to the full length small RNA sequence and/or its mRNA precursor by comparing the signature sequence to a genomic sequence database.

[0021] It is a further aspect of the invention to determine, by performing the signature sequence-genomic comparison, one or more discrete locations within the genome where sequence identity is 100%.

[0022] Another aspect of the present invention relates to the generation of a library of small RNA molecules identified and/or isolated from an organism. In certain aspects the invention relates to signature sequences and full length small RNA molecules identified and/or isolated from Arabidopsis thaliana. While in other aspects, it is related to a library of signature sequences relating to the small RNAs identified, and/or isolated from an organism.

[0023] A specific alternative embodiment of the invention includes a library comprising a plurality of sequences selected from the group consisting of SEQ ID NOs: 1-185,413.

[0024] Another embodiment of the present invention includes a small RNA comprising a sequence complementary to a sequence selected from the group consisting of SEQ ID NOs: 1-185,413.

[0025] Another embodiment of the present invention includes includes a library comprising a plurality of signature sequences selected from the group consisting of SEQ ID NOs: 1-185,396.

[0026] A further aspect of the invention relates to the creation of a database containing, in silico, the sequences of the small RNA molecules identified and/or isolated according to the method of the invention.

[0027] Yet another aspect of the present invention relates to the creation of genome-wide small RNA libraries for at least two species, and identifying small RNAs with sequence homology conserved across the species.

[0028] It is an additional object of the invention to provide small RNA sequences useful for creating a microarray platform for the identification of differentially regulated small RNAs under any number of conditions.

[0029] It is still another object of the invention to provide small RNA sequences useful for “teaching” or training a computer program or algorithm to predict and design small RNA molecules for study or therapeutic applications.

[0030] In yet a further object, the invention relates to a vector comprising an RNA sequence and/or transgene that contains at least one recombinant small RNA molecule of the invention. In yet a further object, the invention relates to a vector comprising a DNA sequence and/or transgene that contains recombinant DNA corresponding to a small RNA molecule of the invention. In a related aspect the invention relates to a cell, cell line, or recombinant organism that contains at least one small RNA of the invention, either alone, from its natural precursor and/or in a suitable vector.

[0031] In another aspect, the small RNA sequences themselves are useful for performing biological functions, such as for example, RNA interference, gene knockdown or knockout, generating expression mutants, modulating cell growth, differentiation, signaling or a combination thereof for purposes of, for example, experimentation, generating a therapeutic, therapeutic discovery, or generating a novel biological strain. As such, in certain embodiments the invention comprises an isolated small RNA molecule that down-regulates a plant gene, for example, an Arabidopsis thaliana gene, comprising a nucleic acid having at least 75% homology to a member selected from the group consisting of SEQ ID NO. 185,396-185,409 [See Table 13 miR771-miR183], and wherein the nucleic acid is sufficiently complementary to the plant gene to down-regulate the plant gene by RNA interference.

[0032] In one embodiment, the invention comprises a small RNA molecule that down-regulates expression of an NBS-LRR disease resistance gene via RNA interference (RNAi). In a preferred embodiment, the small RNA molecule comprises a nucleic acid having at least 75% homology to SEQ ID NO. 185,398.

[0033] In another embodiment, the invention comprises a small RNA molecule that down-regulates expression of a DNA (cytosine-5)-methyltransferase gene via RNAi. In a preferred embodiment, the small RNA molecule comprises a nucleic acid having at least 75% homology to SEQ ID NO. 185,399.

[0034] In another embodiment, the invention comprises a small RNA molecule that down-regulates expression of an F-box family gene via RNAi. In a preferred embodiment, the small RNA molecule comprises a nucleic acid having at least 75% homology to SEQ ID NO. 185,400.

[0035] In another embodiment, the invention comprises a small RNA molecule that down-regulates expression of a galactosidyltransferase gene via RNAi. In a preferred embodiment, the small RNA molecule comprises a nucleic acid having at least 75% homology to SEQ ID NO. 185,401.

[0036] In another embodiment, the invention comprises a small RNA molecule that down-regulates expression of a SET domain-containing gene via RNAi. In a preferred embodiment, the small RNA molecule comprises a nucleic acid having at least 75% homology to SEQ ID NO. 185,404.

[0037] In another embodiment, the invention comprises a small RNA molecule that down-regulates expression of an S-locus protein kinase gene via RNAi. In a preferred embodiment, the small RNA molecule comprises a nucleic acid having at least 75% homology to SEQ ID NO. 185,405.

[0038] In another embodiment, the invention comprises a small RNA molecule that down-regulates expression of an Extra-large G-Protein-related gene via RNAi. In a preferred embodiment, the small RNA molecule comprises a nucleic acid having at least 75% homology to SEQ ID NO. 185,409.

[0039] In still another aspect the invention relates to an expression vector comprising a nucleic acid sequence encoding a nucleic acid having at least 75% homology to a member selected from the group consisting of SEQ ID NO. 1-185,409, wherein the expression vector comprises a transcription initiation region; a transcription termination region; and wherein said nucleic acid sequence is operably linked to said initiation region and said termination region. In a preferred embodiment, the expression vector comprises a nucleic acid selected from the group consisting of SEQ ID NO. 185,397-185,409.

[0040] These potential uses are given by way of non-limiting example, and are not intended in any way to narrow or limit the scope of the present invention. Other uses will be apparent to those of ordinary skill in the art and are considered as being within the general scope of the present invention.

### DESCRIPTION OF THE DRAWINGS

[0041] FIG. 1 provides a small RNA inflorescence library showing numerous chromosomal locations within Arabidopsis of small RNAs.

[0042] FIG. 2 shows the plotted distribution of small RNAs disposed across all five Arabidopsis chromosomes.

[0043] FIG. 3 depicts the small RNA matching classes of genomic features with categories of genomic features being indicated on the X-axis. Stippled bars indicate the total number of basepairs of the Arabidopsis genome that are found in each category, with the scale indicated on the Y-axis to the right.

[0044] FIG. 4 sets forth differential miRNA and siRNA blots, specifically RNA gel blots of low molecular weight RNA isolated from inflorescence tissues (I) and 2-week-old seedlings (S) were probed with labeled oligonucleotides.

[0045] FIG. 5 (A)-(B). A five-way Venn diagram of selection criteria for small RNAs. (A) The number of distinct signatures matching the criteria is indicated in each cell; small numbers in upper right corners are used in (B) for additional descriptions.

[0046] FIG. 6 (A)-(C). Small RNAs or clusters common to wildtype and rdr2. Venn diagrams representing genome-matched rdr2 454 and MPSS sequences from Table 9. (A) A comparison of distinct signatures in the MPSS libraries indicates 19% of rdr2 sequences were also found in wildtype. (B) A comparison of distinct signatures in the 454 libraries indicates 21% of rdr2 sequences were also found in wildtype. (C) A comparison of genomic clusters of MPSS signatures indicates 93% of small RNA clusters represented in rdr2 were also found in wildtype. For this analysis, clusters contained at least three small RNAs across both libraries; this cutoff was chosen arbitrarily to remove clusters with only one or two small RNAs that could be background. Most of the rdr2-only clusters are low abundance miRNAs or other “real” sequences that were not detected due to depth of coverage in the wildtype library.

[0047] FIG. 7. Use of rdr2 sequences to select miRNA candidates from previously identified wildtype small RNAs. Five-way Venn diagram of selection criteria for miRNAs. The number of distinct rdr2 MPSS signatures matching the criteria is indicated in each box numbered in upper right; only rdr2 signatures also found in the wildtype library are represented. The figure excludes 13,153 distinct signatures that did not pass any of the criteria (of which 1,583 were found in both rdr2 and wildtype inflorescence libraries) and 54 matching to the criteria in the Venn which were present in rdr2 but not wildtype inflorescence (these 54 are included in FIG. 12). The paired, sparse, abundance filters, and AtSet1 and AtSet2 filters are described elsewhere but represent potential hairpin structures typical of miRNA precursors, and conservation of those structures in rice, respectively.

[0048] FIG. 8. Novel miRNAs identified from Venn analysis of rdr2 sequences. Small RNAs were selected for validation by RNA gel blots, as described in the text. Low molecular weight RNA isolated from inflorescence tissues was probed with labeled oligonucleotides. The lanes in the blots include the following samples: wildtype, rdr2, rdr6, dcl1-7, and dcl2/3/4. The normalized abundance level from the MPSS data for rdr2 and wildtype is listed to the right of the identifier for each small RNA. The reason for the apparent increases in abundance in rdr2 versus wildtype in the blots is not clear; approximately equal amounts of RNA were loaded. It does not appear to be due to RDR2-dependent small RNAs in the 5′ flanking regions, although for miR775, the most extreme case, there is an overlapping small RNA that is largely RDR2-dependent that might interfere with miR775 production in wildtype.

[0049] FIG. 9 (A)-(D). Small RNA size distribution in mutants evaluated with 454 sequencing. In each plot, grey indicates wildtype, light blue is rdr2, green is dcl1-7, dark blue is rdr6 and red is the dcl2/3/4 triple mutant. (A) Number of distinct signatures versus size. (B) Total abundance of sequences versus size. (C) Number of distinct versus size, with known miRNAs removed. (D) Total abundance versus size, with known miRNAs removed.

[0050] FIG. 10 (A)-(B). RDR2-independent small RNAs from regions with ta-siRNA-like features. (A) The locus that includes small49 exhibits 21-nt phasing and accumulation characteristics in mutants similar to those of ta-siRNAs. Image of the MPSS web viewer for the intergenic region that contains small49 in the position indicated; an RNA gel blot of small49; a plot of the Y-axis indicating the small RNA abundance in the rdr2 mutant as measured by MPSS (in TPQ) and the X-axis indicating nucleotide position on Chr. 1, with the “697” indicating position 25,282,697. (B) The blot shows that small58 also has ta-siRNA-like accumulation features; images as described in (A), with the 0 position in the X-axis of the plot indicating nucleotide 13,295,900 on Chr. 4.

[0051] FIG. 11 (A)-(C). Comparison of MPSS and 454 sequence data for rdr2. Venn diagram representing genome-matched rdr2 454 and MPSS sequences from Table 9. To compare the different length 454 and MPSS sequences for the center of the Venn diagram, 454 signatures were counted if an MPSS signature was contained anywhere within the sequence. Because the MPSS signatures are shorter, some match to more than one 454 sequence. “wt” indicates wildtype. (B) Abundance plot for rdr2 454 and MPSS data (genome-matched sequences only). The dotplots indicate the correlation among abundance levels for genome-matching sequences identified by both technologies for both wildtype (wt, on left) and rdr2 (on right). In order to visualize the distribution at the lower expression levels, a small number of higher abundance data points are not shown. The abundance of each distinct 17 nt MPSS signature was compared to the sum of abundance of all 454 sequences with the same first 17 nt. (C) Histograms illustrate the number of distinct sequences in each technology for both wildtype and rdr2 inflorescence libraries. For the two plots of MPSS data, the X-axis indicates a range of the normalized abundance for the distinct signatures (TPQ), whereas for the two 454 plots, the X-axis represents raw values. Compared to the corresponding wildtype libraries, a higher proportion of small RNAs were sequenced multiple times from rdr2 with both 454 and MPSS indicating that the rdr2 sequencing is closer to saturation.

[0052] FIG. 12 (A)-(B) Distribution of rdr2 and wildtype small RNAs among different genomic features. Histograms of matches to genomic features for wildtype and rdr2 MPSS libraries. Wildtype data is indicated by grey bars, rdr2 data is indicated by black bars. These data are enumerated in Table 11. (A) The number of distinct signatures corresponding to each class of genomic feature. (B) The sum of the abundances (in TPQ) corresponding to the distinct signatures in each class of genomic feature.

[0053] FIG. 13 (A)-(I) Potential secondary structures of new miRNA precursors. Secondary structures were predicted for the nine new miRNAs. These structures were predicted using mFOLD (http://www.bioinfo.rpi.edu/applications/mfold/). The miRNA sequences identified by MPSS analysis are indicated with curly braces. The RNA gel blots for these small RNAs are shown in FIG. 8. (A) Genomic region encoding miR771. The region is on Chr. 3 between AT3G53010 and AT3G53020. (B) Genomic region encoding miR772. The region is on Chr.1 between AT1G12290 and AT1G12300. (C) Genomic region encoding miR773. The region is on Chr.1 between AT1G35500 and AT1G35510. (D) Genomic region encoding miR774. The region is on Chr.1 between AT1G60070 and AT1G60075. (E) Genomic region encoding miR775. The region is on Chr. 1 between AT1G78200 and AT1G78210. (F) Genomic region encoding miR776. The region is on Chr. 1 between AT1G61730 and AT1G61740. (G) Genomic region encoding miR777. The region is on Chr. 1 between AT1G70640 and AT1G70650. (H) Genomic region encoding miR778. The region is on Chr. 2 between AT2G41610 and AT2G41620. (I) Genomic region encoding miR779. The region is on Chr. 2 between AT2G22490 and AT2G22500.

[0054] FIG. 14 (A)-(D). Predicted targets of new miRNAs. Targets were predicted using the method described by Jones-Rhoades and Bartel (2004). The mRNA target is shown above and the miRNA below in each alignment; matches are indicated with vertical lines, mismatches are unmarked and G-U wobbles are indicated with a circle; grey text indicates nucleotides flanking the target site; for experimentally validated targets, the arrow indicates a site verified by 5′ RACE, with the number of cloned RACE products sequenced shown above. In this algorithm, each mismatch is given a score of 1, each wobble (G:U mismatch) is given a score of 0.5, and each bulge is given a score of 2. Only targets with a penalty score of less than or equal to 1.5 are shown in this figure; a complete list of targets scoring 2.5 or less is shown in Table 13.

[0055] FIG. 15. Foldback sequences are sources of numerous rdr2-independent small RNAs. Inverted repeats are predicted to form “foldback” hairpin structures that are the source of numerous small RNAs in the rdr2 libraries. Although the difference in the length of the repeat unit is statistically significant between the RDR2-dependent and RDR2-independent sets, some RDR2-independent inverted repeats are quite short (see lower examples). This figure shows views from our website; small RNAs are black triangles, inverted repeats are orange shaded regions. Open triangles indicate a match to more than one location in the genome; most small RNAs in these inverted repeats match twice, once in each arm of the repeat. Small57 may be an evolving miRNA locus. This locus is the same as ASRP1729

[0056] FIG. 16 (A)-(C). The A. thaliana gene encoding SRK contains an inverted repeat that is the source of RDR2-independent small RNAs. (A) An image of the A. thaliana SRK locus, with the inverted repeat shown in orange, exons of SRK (At4g21370) indicated as blue boxes, and the annotated adjacent gene (At4g21366) shown in red. (B) An RNA gel blot of small85 from the SRK locus. (C) A total of 963 nt of sequence from the inverted repeat spanning At4g21370 and At4g21366 was analyzed using mFold. This sequence is predicted to form a near-perfect double-stranded RNA of 390 bp. Small RNAs were identified by MPSS that matched throughout the stem structure but were absent from the loops

[0057] FIG. 17 Enrichment of small RNAs at the TAS1a locus in rdr2 compared to wildtype. Bars indicate the abundance of the small RNAs (MPSS data, in TPQ) found at each position within the locus; bars above the center line indicate the upper strand, bars below the center line indicate the bottom strand. Red bars indicate small RNAs in wildtype and black bars indicate small RNAs in rdr2. Due to limited space, non-expressed sites have been removed. The upper and lower boxes are in logarithmic scale to indicate the most abundant small RNAs. The position within the locus is indicated near the bottom, with the zero position indicating the functional ta-siRNA which is identified by the MPSS signature TTCTMGTCCMCATAG found at 6169 TPQ in rdr2, corresponding to Ser. No. 11,729,063 bp on Chr. 2.

[0058] FIG. 18 Correlation of miRNA gene abundances in the rdr2 and the dcl2/3/4 triple mutant. The figure is based on the 454 data for these mutant lines shown in Table 10. Due to the plot scale and its abundance, miR172 is not shown. The diagonal line indicates the trend line for the data. The high-abundance miRNA genes are marked for reference. X- and Y-axis values are raw abundances.

[0059] FIG. 19 contains Table 1 from Example 1.

[0060] FIG. 20 contains Table 2 from Example 1.

[0061] FIG. 21 contains Table 3 from Example 1.

### DESCRIPTION OF THE INVENTION

[0062] As used herein, the term “small RNA” refers to those RNA molecules that are larger than about 10 nucleic acids in length but less than about 50 nucleotides, and is used generally to refer to siRNAs, miRNAs, and other small or tiny RNAs. Small RNAs may be produced in an intact form or following processing from a larger molecule. Small RNA molecules are generally “noncoding” and exert their function as RNAs.

[0063] As used herein, the term “nucleic acid” is used in a general sense to refer at least one of ribonucleic acid (RNA), ribonucleotide, deoxyribonucleic acid (DNA), deoxyribonucleotide, nucleic acid analog, synthetic nucleotide analogs, nucleic acid conjugates, for example peptide nucleic acids or locked nucleic acids, nucleic acid derivatives, polymeric forms thereof, and includes either single- or double-stranded forms. Also, unless expressly limited, the term “nucleic acid” includes known analogues of natural nucleotides that have similar binding properties as the reference nucleic acid. In addition, a particular nucleotide or nucleic acid sequence includes conservative variations based on the nucleotides adenine (“A”), guanine (“G”), cytosine (“C”), thymine (“T”), uracil (“U”), and inosine (“I”).

[0064] Previously we presented a method for the isolation of small RNA from Arabidopsis. (U.S. application Ser. No. 11/204,903) This method allowed for an increase in the number of distinct small RNA sequences known by more than an order of magnitude. The present invention relates generally to the isolation and identification of small ribonucleic acids (RNAs), for example, small inhibitory RNAs (siRNAs), microRNAs (miRNAs), tiny RNAs or combinations thereof from an organism using the process disclosed in the above patent applications. The present invention is directed to identification of small RNAs from the flowering plant Arabidopsis thaliana. We have identified approximately 185,396 unique nucleic acid signature sequences (SEQ ID NOS. 1-185,396) from Arabidopsis thaliana.

[0065] In a preferred embodiment, SEQ ID NOS 1-185,396 are referred to as signature sequences. Generally, these signature sequences do not always correspond to the full length, endogenously or biologically functional small RNA sequence. In a preferred embodiment, the present invention relates to a method for determining the full length small RNA sequence and/or its mRNA precursor by comparing the signature sequence, for example a 17-mer, to a high quality genomic sequence database, for example by BLAST or other sequence comparing algorithm. By performing the signature sequence-genomic comparison, one or more discrete locations within the genome can be identified where sequence identity is 100%. The full length small RNA can therefore be determined by extending the 17-mer signature sequence in either the 5′ or 3′ direction upon which direction the molecule is sequenced from. In certain aspects of this embodiment, the signature sequence is extended in the 3′ direction for a suitable number of nucleotides. More particularly, the signature sequence is extended in the 3′ direction by from about 1 to about 13 bases. It is generally accepted that the major type of siRNAs (chromatin siRNAs) in plants are about 24 nucleotides, and miRNAs are typically about 21 nucleotides in length. Therefore, in a particularly preferred embodiment the 17 nucleotide signature sequence would be extended about 7 bases in the case of a siRNA, or about 4 bases in the case of a miRNA. However, one of ordinary skill in the art will recognize that the precise number of nucleotides selected to extend the signature sequence to a full length small RNA will depend on a number of considerations, such as for example, whether the small RNA appears to be a siRNA or a miRNA, whether the small RNA appears to be located within a cluster, and the like.

[0066] A method of extending the signature sequences identified using MPSS to their full functional length through the use of a high quality genomic database for the organism of interest is preferably used. Generally stated, the method comprises the steps of: (a) providing a high quality genomic DNA database; (b) providing identification of small RNA signature sequences of from about 15 to about 20 nucleotides in length; (c) comparing the small RNA signature sequences to the genomic database, for example, by using a string (text)-searching program or a sequence identity algorithm such as BLAST; (d) identifying the genomic regions that indicate identity with the signature sequence; and (e) extending the signature sequence in the 3′ direction by from 1 to about 13 nucleotides to obtain the full sequence of the biologically active molecule. This method allows for the identification of the full length small RNA or the small RNA source or precursor without performing tedious cloning steps that are not sensitive enough to clone the majority of low abundance small RNAs.

[0067] In a preferred embodiment the present invention encompasses nucleic acid molecules, for example, single or double stranded small RNAs, siRNAs, miRNAs, tiny RNAs, analogs, precursor molecules of DNA or RNA, and combinations thereof, isolated from the plant, Arabidopsis thaliana, that are associated with physiological regulatory mechanisms. In yet another of the preferred embodiments, the small RNAs of the present invention preferably have a length of from about 15 to about 30 nucleotides, but may be provided as a precursor with a length of from about 16-100 nucleotides.

[0068] In a particular preferred embodiment, the present invention relates to the small RNAs SEQ ID NOS 1-185,413, and sequences containing at least about 75% homology to those sequences. The present invention also relates to any sequence having the same biological activity as any of SEQ ID NOS 1-185,413, and, alternatively, covers any sequence that is adjacent to or overlaps the target site by at least about 75% homology. In another of the preferred embodiments the present invention encompasses nucleic acid sequences which hybridize under stringent conditions with the nucleic acid sequences listed in SEQ ID NOS 1-185,413.

[0069] In another of the preferred embodiments the invention encompasses a nucleic acid molecule that contains at least one modified nucleic acid or non-naturally occurring nucleotide analog. It is contemplated that the modified or non-naturally occurring nucleic acid or nucleotide analog may be placed anywhere along the length of the sequence, for example, at the 5′-end, or the 3′end.

[0070] In still another preferred embodiment the present invention encompasses a recombinant expression or cloning vector, for example a bacterial plasmid-derived vector, or viral vector, comprising a small RNA molecule of the invention, SEQ. ID: 1-185,413. The vector may be an RNA or DNA vector adapted for use in a suitable system or organism, or a combination thereof under suitable conditions. The vector preferably results in the transcription of the small RNA molecule or cluster of small RNA molecules as such, a precursor or primary transcript thereof, which is further processed to the desired small RNA molecule. A “cluster” refers to more than one small RNA that match to nearby genomic sequences. In an aspect of this embodiment, the small RNAs of the invention may be delivered by any suitable means known to those in the art, including for example, T-DNA mediated transformation, particle bombardment, electroporation, receptor-mediated gene therapy, recombinant virus gene therapy, liposome mediated gene transfer, calcium phosphate mediated gene transfer, polyamine conjugated nucleic acid gene transfer, and the like.

[0071] In still another aspect the invention relates to an expression vector comprising a nucleic acid sequence encoding a nucleic acid having at least 75% homology to a member selected from the group consisting of SEQ ID NO. 1-185,413, wherein the expression vector comprises a transcription initiation region; a transcription termination region; and wherein said nucleic acid sequence is operably linked to said initiation region and said termination region. In a preferred embodiment, the expression vector comprises a nucleic acid selected from the group consisting of SEQ ID NO. 185,397-185,413.

[0072] The invention is further directed to the development of a library of small RNAs from a particular organism comprising a plurality of sequences identified using the method of the invention. In a preferred embodiment, the library consists of virtually all small RNA sequences of a particular organism, or at least all of those small RNA sequences that are consistently expressed throughout all tissues of said organism. It is contemplated herein that SEQ ID NOs: 1-185,396 are the signature sequences for the small RNA sequences of the organism Arabidopsis thaliana that are most consistently expressed throughout the tissues of this plant. In a preferred embodiment, therefore, the invention relates to a library consisting of a plurality of small RNA sequences selected from SEQ ID NOs: 1-185,396. The invention is further directed to a library consisting of the full length sequences identified from SEQ ID NOs: 1-185,396. Alternatively stated, the invention is directed to the creation of a database containing, in silico, the sequences of the small RNA molecules identified and isolated according to the method of the invention.

[0073] The invention is also directed to the isolation and identification of individual full length small RNA molecules from Arabidopsis thaliana. Upon such identification, biological function of the small RNA molecule can be tested using a variety of methods known in the art. Once biological activity of a small RNA has been identified, specific functional aspects of the organism can be purposefully addressed. For example, contemplated herein is a method of changing or introducing a phenotypic trait of an organism by increasing or decreasing the function or level of one or more small RNAs, which impact their ability to silence target genes or regions of the genome they target. In a related embodiment the invention includes a method for performing RNA interference (RNAi) comprising the delivery of an effective amount of at least one small RNA sequence of the invention, in a suitable form that results in gene knockdown, knock-up, or knockout. In other related embodiments, multiple small RNAs of the invention may be delivered, for example a siRNA cluster, to affect a gene, family of genes, or signaling pathway that results in an altered trait. Some specific aspects of this embodiment include, for example overproduction of a small RNA to make plants more resistant to salt stress comprising the steps of (a) selecting a small RNA randomly or based on a characteristic, for example, being induced when plants are treated with the plant hormone ABA that controls responses to salt and other stresses; (b) overproducing the small RNA resulting in plants to create salt-resistant traits. Another example would include modulation of the expression of certain genes in a plant that would affect its tolerance to pesticides, temperatures or soil condition.

[0074] More detailed examples of this embodiment include use of a small RNA of the invention that could identify a small RNA source gene that could in turn be inactivated to accomplish the control of a process such as the control of nutrient uptake or content. The term “nutrient uptake” is intended to describe nutrient uptake that helps the plant grow more efficiently or in difficult growing conditions, for example. The term “nutrient content” is intended to describe the nutrients produced in the plant, such as, for example, lysine, vitamin A, vitamin C, etc. This method comprises, (a) predicting targets of the small RNA that may silence nutrient genes involved in the uptake of nutrients or production of genes that would affect nutrient content; (b) choosing such a small RNA and identify insertion mutants from public collections that have insertions in the source gene or near the DNA (genomic match) for the small RNA; and (c) testing if these mutants have altered or improved nutrient uptake or content.

[0075] In yet another example of this embodiment, a small RNA of the invention can be used to create a therapeutic or viral resistance trait using knowledge from natural small RNAs. This method comprises, (a) using small RNA sequence characteristics (e.g. siRNA sequences) to refine computer programs currently used to design dsRNA sequences to be used for RNAi against the RNA from for example, a harmful virus or other plant pathogen such as bacterial, fungal, nematode, or parasitic plant; (b) building a dsRNA gene that in the plant will make small RNA with optimized design that will be complementary to the virus or other pathogen RNA; and (c) introducing this gene into the plant to test if it works better to control viral or pathogen infection than others designed without using the natural small RNAs to train the computer program.

[0076] In certain embodiments, the invention relates to the use of the full length small RNA sequences of the invention themselves are useful for performing biological functions, such as for example, RNA interference, gene knockdown or knockout, generating expression mutants, modulating cell growth, differentiation, signaling or a combination thereof for purposes of, for example, experimentation, generating a therapeutic, therapeutic discovery, or generating a novel biological strain. As such, in certain embodiments the invention comprises an isolated small RNA molecule that down-regulates a plant gene, for example, an Arabidopsis thaliana gene, comprising a nucleic acid having at least 75% homology to a member selected from the group consisting of SEQ ID NO. 185,397-185,409 [See Table 13], and wherein the nucleic acid is sufficiently complementary to the plant gene to down-regulate the plant gene by RNA interference.

[0077] In one embodiment, the invention comprises a small RNA molecule that down-regulates expression of an NBS-LRR disease resistance gene via RNA interference (RNAi). In a preferred embodiment, the small RNA molecule comprises a nucleic acid having at least 75% homology to SEQ ID NO. 185,398.

[0078] In another embodiment, the invention comprises a small RNA molecule that down-regulates expression of a DNA (cytosine-5)-methyltransferase gene via RNAi. In a preferred embodiment, the small RNA molecule comprises a nucleic acid having at least 75% homology to SEQ ID NO. 185,399.

[0079] In another embodiment, the invention comprises a small RNA molecule that down-regulates expression of an F-box family gene via RNAi. In a preferred embodiment, the small RNA molecule comprises a nucleic acid having at least 75% homology to SEQ ID NO. 185,400.

[0080] In another embodiment, the invention comprises a small RNA molecule that down-regulates expression of a galactosidyltransferase gene via RNAi. In a preferred embodiment, the small RNA molecule comprises a nucleic acid having at least 75% homology to SEQ ID NO. 185,401.

[0081] In another embodiment, the invention comprises a small RNA molecule that down-regulates expression of a SET domain-containing gene via RNAi. In a preferred embodiment, the small RNA molecule comprises a nucleic acid having at least 75% homology to SEQ ID NO. 185,404.

[0082] In another embodiment, the invention comprises a small RNA molecule that down-regulates expression of an S-locus protein kinase gene via RNAi. In a preferred embodiment, the small RNA molecule comprises a nucleic acid having at least 75% homology to SEQ ID NO. 185,405.

[0083] In another embodiment, the invention comprises a small RNA molecule that down-regulates expression of an Extra-large G-Protein-related gene via RNAi. In a preferred embodiment, the small RNA molecule comprises a nucleic acid having at least 75% homology to SEQ ID NO. 185,409.

[0084] In yet another embodiment, the small RNAs of the invention can be used in a method of performing cross-species analysis of small RNAs. This method includes taking one or more of the small RNA SEQ ID NOS 1-185,413, from Arabidopsis thaliana, and performing a sequence identity comparison, for example, using BLAST analysis, with a genomic-wide library of small RNA isolated from another species, for example, another eukaryote such as another plant species, fungi, yeast or a mammal, and isolating those small RNAs that display conservation over at least part of the small RNA sequence. In a related embodiment, the invention comprises taking one or more of the small RNA SEQ ID NOS 1-185,413, from Arabidopsis thaliana, and performing a sequence identity comparison, for example using BLAST analysis, with a genomic library from another species, for example, another eukaryote such as another plant species, fungi, yeast, or mammal, and identifying those small RNAs that display conservation over at least part of the small RNA sequence. Generally, a nucleotide sequence demonstrating at least 30% homology is considered homologous. This can provide useful information about target genes, small RNA precursors, as well as small RNA regulation and control over phenotypic traits. Several algorithms have been proposed for performing this analysis, such as by Rhoades, M., et al., 2002, Prediction of Plant MicroRNA Targets. Cell 110: 513-520; Lewis B P, et al. Prediction of Mammalian MicroRNA Targets. Cell 2003, 115:787-798; and Wang, X, et al., 2004, Prediction and Identification of Arabidopsis thaliana MicroRNAs and their mRNA Targets. Genome Biol 5: R65, which are incorporated herein by reference in their entirety. In a related aspect, one or more small RNA sequences of SEQ ID NOS. 1-185,413 can be used to generate a database useful for comparison with small RNA from other plant species isolated under varying conditions, other developmental states, other organisms or the like. In still another related aspect, one or more small RNA sequences, of SEQ ID NOS. 1-185,413 comprise a microarray, for example a DNA chip, to allow for high-throughput analysis of differential regulation of the small RNAs in the library.

[0085] In certain embodiments the small RNAs of the invention can be useful for experimental or therapeutic applications. For example, quantitative measurements of small RNA sequences identified according to this method would be useful for understanding processes such as cell differentiation, gene expression, cell signaling responses and pathways, and disease state cell processes.

[0086] Alternatively, identified small RNAs can be useful for determining genes and RNA molecules that are critical for development, growth, and maintenance of an organism by identifying small RNA molecules that have been evolutionarily conserved across species. For instance, genome-wide small RNA libraries could be created for at least two species, and small RNAs with sequence homology conserved across the species can be identified. In certain instances, the small RNAs can be used to identify those molecules unique to a species. In other instances the small RNAs of the invention can be used to predict the endogenous mRNA or noncoding RNA targets of miRNAs or other trans-acting small RNAs such as siRNAs. Basic strategies and algorithms for performing these predictions have been published by Rhoades, M., et al., 2002, Prediction of Plant MicroRNA Targets. Cell 110: 513-520; Lewis B P, et al. Prediction of Mammalian MicroRNA Targets. Cell 2003, 115:787-798; and Wang, X, et al., 2004, Prediction and Identification of Arabidopsis thaliana MicroRNAs and their mRNA Targets. Genome Biol 5: R65, which are incorporated herein by reference in their entirety.

[0087] In certain aspects of the preferred embodiments miRNA targets can be found with the assistance of computer algorithms designed for that, or by looking at the RNA levels for all genes of an organism, for example Arabidopsis, with DNA microarrays, and sequence comparisons for regions complementary to the small RNAs. In other aspects of this embodiment, siRNA targets are determined by identifying the siRNA source, because often times the siRNAs cause the corresponding DNA to be silenced at the chromatin level by methylation. Targets can be identified with sequences having as low as 75% homology to SEQ ID NOS. 1-185,413 in accordance with the rules for mismatch analysis, etc. as described in the references above. In some aspects, the small RNAs identified can be used to identify genomic sequences with perfect or near perfect matches that are targeted for chromatin modification or other forms of regulation by the small RNAs. Alternatively, the creation of an in silico series of variants of the natural small RNAs could be used to create variant small RNA genes with different target specificity, whilst preserving the flanking sequences such as hairpin-like structures.

[0088] Other embodiments include small RNA sequences that can be used to create a microarray platform, for example, nucleic acid “chips,” polymeric microspheres or beads, and the like for the identification of differentially regulated small RNAs under any number of conditions, for example, treatment with a chemical compound, developmental stage, disease condition, and the like. In related embodiments, small RNA sequences can be used for “teaching” or training a computer program or algorithm to predict and design small RNA molecules for study or therapeutic applications. The small RNA sequences can also provide information that can be used to design better double-stranded RNA for RNAi strategies.

[0089] In alternate embodiments, a small RNA sequence and/or transgene that contains at least one recombinant small RNA molecule can be incorporated into a vector. The vector may be, for example, a plasmid vector or a bacterial vector or a viral vector, as an RNA or DNA molecule or modified RNA molecule suitable for expression or function in a particular cell, for example, a prokaryotic cell, a eukaryotic cell, a primary cell, or a cell line. Relatedly, the invention relates to a cell, cell line, or recombinant organism that contains at least one small RNA of the invention, either alone, from its natural precursor and/or in a suitable vector.

[0090] The small RNA sequences themselves can also be useful for performing biological functions, such as for example, RNA interference, gene knockdown or knockout, generating expression mutants, modulating cell growth, differentiation, signaling or a combination thereof for purposes of, for example, experimentation, generating a therapeutic, therapeutic discovery, or generating a novel biological strain. As described earlier, the small RNAs can be used to change or introduce phenotypic traits by increasing or decreasing the function or level of one or more small RNAs, which impact their ability to silence target genes or regions of the genome they target. In some cases, multiple small RNAs, for example, a cluster of siRNAs, might be used at one time to regulate one or more targets to create a desired or advantageous trait. As such, the present invention also relates to a transgene or vector comprising, encoding, or facilitating the production of multiple small RNAs or a small RNA cluster.

[0091] In another of the preferred embodiments, the small RNAs of the invention, SEQ ID NOS 1-185,413 comprise a “teaching” set of sequences for a computer algorithm to improve and enhance in silico design and prediction confidences of small RNAs, their genes, or precursors. In addition, a library of the small RNAs of the invention can be used to design algorithms that are better able to predict and design sequences for use in RNAi.

[0092] In yet another embodiment, the invention includes a kit comprising one or more small RNAs of the invention. In a preferred embodiment, the kit includes a library of small RNAs. The invention also relates to the diagnostic, trait improvement, such as crop improvement, therapeutic, or prophylactic use of the small RNA sequences. For example, detection of any one of the small RNAs of SEQ ID: 1-185,413 may be used to determine or classify a particular condition, classify a cell or tissue type, or developmental stage.

[0093] In another embodiment of the present invention the small RNA of the invention may be used as starting materials for the manufacture of sequence-modified small RNA molecules, which may contain nucleic acid modifications in order to modify the target-specificity of the small RNA.

[0094] It will be understood by those of ordinary skill that the compositions of the present invention may be used in any suitable form, for example, a solution, a spray, a powder, an injectable solution, an ointment, tablet, suspension, emulsion, and the like; combined with any suitable carrier that increases the stability, facilitates uptake or both, for example, a liposome, a cation, and the like; or administered in any suitable way, for example, by transfection, infection, injection, or topical delivery.

[0095] It is understood that the examples and embodiments described herein are for illustrative purposes only and that various modifications or changes in light thereof will be suggested to persons skilled in the art and are included within the spirit and purview of this application and are considered within the scope of the appended claims. All publications, patents, and patent applications cited herein are hereby incorporated by reference in their entirety for all purposes.

[0096] As will be understood by one of ordinary skill in the art, the techniques described and hereby incorporated into the present invention are generally applicable and may be varied in any number of ways without departing from the general scope of the invention. Also, additional advantages and features of the present invention will be recognized by those of skill in the art in view of the description and the following examples. The examples provided herein are provided for illustrative purposes only and are in no way considered to be limiting to the present invention. For example, the relative quantities of the ingredients may be varied to achieve different desired effects, additional ingredients may be added, and/or similar ingredients may be substituted for one or more of the ingredients described.

### EXAMPLE 1

[0097] Adaptation of MPSS for small RNA analysis. To investigate the full complexity of small RNAs, we modified and customized the MPSS vectors and procedures to adapt the MPSS methodology for the sequencing of these molecules. We sought to take advantage of the power of MPSS to sequence hundreds of thousands of molecules per sequencing run. Prior applications of MPSS made use of the poly(A) tail of mRNAs to facilitate cDNA synthesis and sequenced only molecules with a 5′ terminal sequence of ‘GATC’ or ‘CATG’, generated by a restriction enzyme like DpnII or NlaIII. Because most small RNAs are unlikely to begin with these restriction sites or contain a poly(A), the MPSS cloning vectors were adapted to initiate sequencing from the first nucleotide, regardless of the sequence. An overview of the method is shown in Supplementary FIG. 1. Briefly, small RNA molecules are isolated by size fractionation on a polyacrylamide gel, RNA adapters are sequentially ligated to the 5′ and 3′ ends, and reverse transcriptase is used to generate the first strand of cDNA which is amplified and used as the template for MPSS. Shown in FIG. 1 is a small RNAs map to numerous chromosomal locations. (A) Shows the small RNAs from the inflorescence library arrayed on Arabidopsis chromosome 1. Vertical lines indicate the location and abundance of a small RNA on the top or bottom strand. The height of the vertical lines indicates the abundance of the small RNA, with the maximum height indicating >25 transcripts per quarter million (TPQ) and red bars indicating >125 TPQ. (B) shows a pericentromeric region from Chr. 1, in which the Arabidopsis small RNAs are shown as black triangles above or below the double-stranded chromosomes. The red or blue boxes indicate exons on top or bottom strands, respectively. Colored triangles indicate the location of mRNA MPSS signatures. Hollow triangles indicate signatures mapping to more than one location in the genome. Retrotransposon-related sequences identified by RepeatMasker are highlighted in pink, and this entire region was found to be repetitive, including spaces between annotated retrotransposons indicated as thin yellow bars. (C) shows a typical genic region; most small RNAs map to intergenic regions which are often unannotated transposon-related sequences (yellow shading indicates DNA transposon-related sequences identified by RepeatMasker). (D) shows an intergenic region of Chr. 5; the orange box indicates small RNAs and mRNA MPSS signatures that correspond to mir172.

[0098] Genome-wide analysis of small RNAs in Arabidopsis. Pericentromeric heterochromatin is known to be a rich source of small RNAs due to a high concentration of transposable elements. We examined the distribution of small RNAs on the five Arabidopsis chromosomes and we compared this distribution to that of repeats and mRNA abundance data (FIGS. 1A, 1B, and 2). The small RNAs from both libraries were highly concentrated in the pericentromeric regions of each chromosome, but matches could be found throughout the length of the chromosomes. In contrast, mRNA levels, as detected by MPSS analysis of similar tissues, were greatest in the euchromatic regions (FIG. 2). FIG. 2 shows the distribution of small RNAs across Arabidopsis chromosomes. The five Arabidopsis chromosomes are indicated in panels A to E. Distributions were plotted as a moving average of 10 adjacent bins of 100 kb genomic sequence. The x-axis indicates the position on each chromosome in megabases. For the 100 kb bins, the left y-axis indicates either the average number of matching small RNA signatures or the sum of the abundance of mRNA MPSS signatures (in transcripts per million, TPM) (23). The right y-axis indicates the number of nucleotides identified as a repeat by RepeatMasker in each 100 kb bin (green lines). The average number of matching small RNAs was calculated across the chromosomes from the inflorescence (dark blue lines) and seedling (red lines) libraries, respectively. Relative transcription of mRNA was measured by MPSS on mRNA from inflorescence (thin blue lines) and seedling (thin black lines) libraries; these libraries were produced for unrelated experiments with slightly different growth conditions (see Materials and Methods available as supporting material). The boundaries of the pericentromeric regions are delineated by the points at which the repeats exceed approximately 20,000 bp per 100 kb. Repeats and small RNAs co-localized to the pericentromeric heterochromatic regions, as illustrated by the extensive coverage of such sequences by small RNAs in a representative region of Chromosome 1 (FIG. 1B). Although FIGS. 1B, 1C and 1D show views from our web site, the small RNA data for specific genomic locations, including the examples we describe, are best examined and interpreted by using the website (http://mpss.udel.edu/); the site provides detailed information about each signature that can be accessed by clicking on the corresponding triangle.

[0099] Table 1 (See FIG. 19) show the genomic localization of small RNA signatures and clusters. Indeed, more than half of the genomic sequences matching the small RNAs in the two libraries were transposons or retrotransposons (Table 1A). The corresponding small RNA signatures were predominantly found at moderate abundances (11 to 100 TPQ, transcripts per quarter million). However, they represented less than half the number of distinct small RNAs (FIG. 3) because more than 80% of these predicted siRNAs were matched multiple locations in the genome. The small proportion of single-site matches apparently target specific mobile elements or unique regions of such elements. In each library, at least two-thirds of the total set of transposon-related sequences in the Arabidopsis genome had matches to small RNAs. Similarly, small RNAs matched to 66% of the total annotated pseudogenes (Table 1A) and these RNAs were of moderate abundance and had multiple matches in the genome. On a per megabase basis, pseudogenes matched the greatest number of small RNAs in both libraries, suggesting that these sequences are the subject of substantial RNA-mediated gene silencing (FIG. 3). Specifically, FIG. 3 depicts the small RNA matching classes of genomic features with categories of genomic features being indicated on the X-axis. Stippled bars indicate the total number of basepairs of the Arabidopsis genome that are found in each category, with the scale indicated on the Y-axis to the right. Retrotransposon and transposon categories are based on RepeatMasker results. Within each category, the grey vertical bar indicates the total number of distinct small RNAs matched from the inflorescence library and the black vertical bar indicates the total number of distinct small RNAs matched from the seedling library; the scale for distinct small RNAs is indicated on the Y-axis to the left.

[0100] The relative number of distinct small RNAs per megabase of sequence was lower for genes than for any other genomic sequence (FIG. 3; Tables 1A and B). Only 7% of annotated genes had matches in the seedling library and more than twice this number in the inflorescence library, and in both cases, approximately two-thirds of the genes that were matched had relatively few small RNAs (1 to 10 TPQ). These low-abundance signatures could represent perfectly matched miRNAs, or siRNAs targeted to silenced genes, unannotated pseudogenes, unannotated repeats, or other unknown sources of siRNAs (FIG. 1C). In Table 2 (See FIG. 20), the classification of genes perfectly matched by small RNA clusters is shown. We determined the number of genes in different GO functional categories matched by small RNAs to address whether any functional class of genes was over-represented (Table 2). The small RNAs were well distributed among the broad range of cellular processes and molecular functions; reflecting the diversity of small RNAs, approximately half as many genes matched in seedlings as in inflorescence. To assess whether the small RNAs that match to genes could be derived from degradation products of longer mRNAs, we compared mRNA and small RNA MPSS data for highly expressed genes. Highly expressed genes like rubisco subunits and chlorophyll a/b binding protein matched small RNAs that comprised less than 0.1% of the total, suggesting a low rate of contamination by degradation products (data not shown).

[0101] The number of distinct small RNAs that matched to intergenic regions exceeded the numbers that matched to genes, pseudogenes, transposons, or retrotransposons (FIG. 3), an observation that cannot be explained by the fraction of the genome that these entities comprise. The diversity of intergenic small RNAs was approximately four-fold greater in inflorescence than seedling (FIG. 3; Table 1A and B). Small RNAs in the intergenic regions potentially represent either miRNAs or siRNAs from unannotated repeats. Some intergenic small RNAs could be derived from tandem or inverted genomic repeats; measured across the genome, we observed a good correlation between the quality of the repeat and the number of small RNAs (tandem repeats, R=0.5986; inverted repeats, R=0.4955). These analyses also demonstrated that the inflorescence small RNAs were consistently at least three-fold more complex than seedling small RNAs, with the most pronounced difference in complexity in the intergenic regions (FIG. 3).

[0102] Previous studies have demonstrated that miRNAs monitored with “sensor” transgenes can lead to the production of secondary siRNAs that match the sensor mRNA outside the sequence originally targeted. This production of secondary siRNAs is known as transitivity. We examined 61 known or predicted targets of Arabidopsis miRNAs for evidence of transitivity. Only four targets (At1 g62670, At1 g63080, At1 g63150, and At1 g63400), all of which encode pentatricopeptide (PPR) repeat-containing proteins, matched substantial numbers of small RNAs, and these were primarily in repeated regions within each gene. Most targets had no matching small RNAs other than miRNAs, or the only matching small RNAs were few, of very low abundance, or corresponded to repeats. This indicates that transitivity by miRNAs is of little biological significance in seedlings or inflorescence and is likely a transgene phenomenon as hypothesized previously.

[0103] One of the characteristics of siRNAs is that multiple siRNAs are cleaved from the same dsRNA precursor, and these can derive from either strand. Thus, the population of precursors from a given region leads to the production of numerous siRNAs that will be particularly abundant for repetitive sequences if the repeats are all sources of siRNAs. Despite the 21-24 nucleotide size of these small RNAs, the presumably stochastic nature of this process is unlikely to lead to regular pattern or periodicity in most genomic regions; we saw no evidence of a regular 21 to 24 nucleotide pattern of small RNAs when measured across the genome (data not shown). However, repetitive sources of siRNAs should produce dense clusters of small RNAs. In contrast, miRNAs are produced from cleavage at specific sites of a precursor, usually resulting in one prominent miRNA and sometimes a low abundance miRNA* from a specific region. As a consequence, comparing the absence or total abundance of individual small RNA sequences across libraries is less informative for siRNAs than it is for miRNAs. In order to compare siRNA abundances, we developed a proximity-based algorithm to build clusters of small RNAs, with the goal of comparing across libraries the presence, absence or total abundance of small RNAs in the clusters with overlapping genomic locations (see Methods). The characteristics of these clusters may help differentiate novel miRNAs from siRNAs, as sparse clusters may characterize miRNAs and dense clusters may characterize siRNAs.

[0104] Genes matched by small RNAs contained an average of one sparse cluster (Table 1C). In contrast, many transposons contained more than one cluster, and typically these were dense clusters. In the intergenic, unannotated regions of the Arabidopsis genome, more than 4,300 clusters of small RNAs were identified in the inflorescence library alone, suggesting a previously unrecognized transcriptional activity for a large proportion of the intergenic space. We also found that a high proportion of dense clusters overlapped the 5′ end of annotated genes and transposable elements, possibly representing siRNA-silenced promoters (Table 1C). The edges of these and other dense clusters likely represent the boundary of biologically-defined silenced sequences and may help refine genomic annotations.

[0105] Our analysis may underestimate the functional impact of small RNAs because we utilized perfectly matching signatures, and it is known that small RNAs are active against imperfectly-matched targets. Table 3 (See FIG. 21) provides our mismatch analysis of small RNA MPSS signatures. We examined the effects of a one-base difference (OBD) between the signature and a genomic match for this dataset (Table 3). With these mismatches, many small RNAs match in a highly degenerate manner. Of the thousands of signatures from sparse clusters of small RNAs matching genes or IGRs, more than two-thirds of the OBD matches were to other genes or IGRs containing few small RNAs. This pattern of OBD matches was consistent with that observed for signatures derived from known miRNAs. In contrast, the majority of the most repetitive signatures from dense clusters had OBD matches to regions already contained within dense clusters of perfectly matching small RNAs. If all mismatching small RNAs are as active as those with perfect matches, the level of small RNA-based transcriptional and genomic regulation is far more extensive than already suggested by our analyses based on perfect matches. In particular, large families of repetitive elements would be silenced by such numerous siRNAs and it is unlikely that they would be active under normal developmental or environmental conditions. As observed in other species, only low copy and unusual mobile elements are likely to escape silencing and retain transcriptional activity; we determined that 289 annotated Arabidopsis transposons lack small RNAs, most of which had relatively few homologs in this genome, and only a small proportion of which had expression data in mRNA MPSS libraries.

[0106] Differential accumulation of small RNAs. We next examined the differences in the small RNA populations isolated from the inflorescence and seedling libraries. Of particular interest were small RNAs that showed differences in accumulation indicative of tissue-specific regulation. A set of small RNAs matching to approximately 17% of 4,063 genes was found in only one of the two libraries (Table 4), and of these genes, four times as many were specific to inflorescence as to seedling. Comparison of clusters across the libraries demonstrated that the proportion of sparse clusters that are tissue-specific (11%) is lower than that of genes, and only 7% of dense clusters were tissue specific (Table 4). Most of the dense clusters varied only 1- to 10-fold between libraries, suggesting that these dense clusters may not be developmentally regulated, at least in these two diverse tissues. Interestingly, the genes with the most abundant seedling-specific small RNAs were PAIL and PAI2 (At1g07780 and At5g05590) which are known to be strongly regulated by epigenetic events in other Arabidopsis ecotypes. Some repetitive sequences also demonstrated tissue-specific regulation; for example, both At1 g77095, a copia-like retrotransposon, and TR2558, the tandem repeat downstream of At4g04990, specifically matched small RNAs that were found only in the inflorescence library. It was a general pattern that the inflorescence library contained more diverse small RNAs and these small RNAs matched more genes in a tissue-specific manner than the seedling library. This could reflect a greater variety of specialized cell types in the inflorescence tissue, or an increased use of small RNAs in all cell types within the inflorescence.

TABLE 4
Differential or constant clusters or genes in two libraries.

| | | | | | Higher in | | Higher in | |
|---|---|---|---|---|---|---|---|---|
| | | Total in | | | inflorescence | | seedling | |
| | | both | | Tissue | 10X to | | 10X to | |
| Type | | libraries^{a} | Undifferentiated^{b} | specific^{c} | 100X | >100X | 100X | >100X |
| Gene - complete^{d} | | 4,063 | 3,280 | 690 | 62 | 2 | 28 | 1 |
| Clusters | sparse | 16,213 | 13,873 | 1,844 | 291 | 2 | 201 | 2 |
| | moderate | 1,778 | 1,377 | 260 | 128 | 0 | 13 | 0 |
| | dense | 2,517 | 2,197 | 180 | 121 | 17 | 2 | 0 |

| | | | | | | | |
|---|---|---|---|---|---|---|---|
| Total clusters | 20,508 | 17,447 | 2,284 | 540 | 19 | 216 | 2 |

Clusters containing signatures matching to tRNAs, rRNAs, snRNAs or snoRNAs were not considered. For each library, the number of clusters or genes was calculated by the fold difference of the sum of abundances for all signatures comparing inflorescence and seedling.
^{a}The total number of genes or clusters matched by the two libraries. This includes values in columns to the right, plus all of the genes or clusters that were specific to only one of the two libraries; fold differences could not be calculated for tissue-specific genes or clusters.
^{b}This category includes small RNAs with 1X to 10X difference between the two libraries, or <10 TPQ in both libraries.
^{c}This category includes only genes or clusters that had no small RNAs in one library and small RNAs totaling ≧10 TPQ in the other library.
^{d}The complete list of genes and abundance values used in this calculation is provided in Supplemental File 2. Signatures were grouped by genes independent of the clusters. Therefore, each column contains a unique set of gene IDs.

[0107] The small RNA MPSS data clearly represent a mixture of both miRNAs and siRNAs. One source of siRNAs may be antisense transcripts that could form dsRNA with sense transcripts. Several groups have reported an abundance of antisense transcripts in Arabidopsis. If this dsRNA is formed, it could be degraded to form siRNAs that could decrease sense RNA abundance. Alternatively, interference by RNA polymerase II transcription activity on the antisense strand could restrict sense-strand transcription. Among the genes with mRNA MPSS data, about 10% also had matching small RNA signatures in libraries made from similar developmental stages (Table 5). However, we found a similarly low proportion of genes with both antisense mRNAs and small RNAs. This suggests that antisense transcripts may regulate gene activity predominantly by transcriptional interference, rather than through the production of dsRNA and small RNAs. Consistent with this, the mRNA level of genes with antisense transcripts was approximately the same whether or not they matched to small RNAs (data not shown).

TABLE 5
Comparison of small RNA and mRNA expression data.

| | | | | | | | |
|---|---|---|---|---|---|---|---|
| | | mRNA | Small | mRNA (+) | mRNA (+) | mRNA (−) | mRNA (−) |
| Tissue | Region | (+)^{a} | (+)^{b} | Small (+) | Small (−) | Small (−) | Small (+) |

A. Using mRNA MPSS signatures with single or unique matches to the genome.

| | | | | | | | |
|---|---|---|---|---|---|---|---|
| Inflorescence | Genes | 10,597 | 4,195 | 1,119 | 9,478 | 12,162 | 3,076 |
| | Genes with antisense | 1,937 | — | 228 | 1,709 | — | 3,967 |
| | IGRs | 186 | 2,865 | 33 | 153 | 20,417 | 2,832 |
| Seedling | Genes | 7,647 | 2,283 | 563 | 7,084 | 16,468 | 1,720 |
| | Genes with antisense | 3,073 | — | 265 | 2,808 | — | 2,018 |
| | IGRs | 133 | 1,630 | 16 | 117 | 21,688 | 1,614 |

B. Using all mRNA MPSS signatures.

| Inflorescence | Genes | 12,535 | 4,195 | 1,428 | 11,107 | 10,533 | 2,767 |
|---|---|---|---|---|---|---|---|
| | Genes with antisense | 2,542 | — | 327 | 2,215 | — | 3,868 |
| | IGRs | 490 | 2,865 | 131 | 359 | 20,211 | 2,734 |
| Seedling | Genes | 8,715 | 2,283 | 724 | 7,991 | 15,561 | 1,559 |
| | Genes with antisense | 3,603 | — | 314 | 3,289 | — | 1,969 |
| | IGRs | 300 | 1,630 | 49 | 251 | 21,554 | 1,581 |
| Values were calculated using the 25,835 genes and pseudogenes (removing genes classified as t/sn/sno/rRNAs, retrotransposons and transposons) and 23,435 IGRs in the TIGR version 5.0 annotation. For small RNA data, signatures were clustered by gene ID and intergenic region. | | | | | | | |
| ^{a}The “+” for mRNA MPSS indicates the presence of a signature uniquely matching to a gene and expressed at levels considered “significant” and “reliable” (Meyers et al., 2004, Gen. Research 14: 1641). This publication also describes the classification system used for mRNA MPSS signatures (Class 1 to 7), which indicate whether the signatures match in an intron, exon or intergenic region and specify the strand that is matched. For genes with antisense | | | | | | | |
| # expression, we used the sum of the Class 1/2/5/7 signatures for sense strand expression, Class 3/6 for antisense expression, and for IGRs, the presence of a Class 4 signature. | | | | | | | |

^{b}Small RNA presence in genes was based on the presence of any number of signatures at any abundance level, and included matches within the gene or UTRs. Signatures from both strands were summed. Because many pseudogenes are expressed, this set was included with genes in this analysis, and therefore the total numbers for genes in this table are higher than those of Supplemental Table 3A, which considers genes and pseudogenes separately.

[0108] We combined several computational and experimental approaches to separate siRNAs from miRNAs. Initially we compared our data with a previous study that predicted miRNAs by filtering whole genome data for sequences that form hairpin-like secondary structures, exhibited conservation with rice, and had other characteristics (AtSet1, AtSet2, and AtSet3 to AtSet6, respectively, described in ref. 48). Most of the matches between our experimental data and their predictions were found with only folding and conservation as filters, and their additional filters removed relatively few small RNAs (Table 6). The results of this comparison were consistent with Arabidopsis miRNAs numbering in the hundreds, but this approach was rudimentary.

TABLE 6
Experimental and computational data comparisons
identify potential miRNAs.

| | | | Both | |
|---|---|---|---|---|
| | | Both sets, exact | sets, ±4 bp | Both sets, any |
| Dataset^{a} | Tissue^{b} | match^{c} | match^{c} | overlap^{c} |
| AtSet1 | Inflorescence | 444/479 | 686/2,554 | 1,506/6,945 |
| (389,648) | Seedling | 178/214 | 253/1,009 | 551/2,697 |
| | Both | 791/892 | 1,158/4,593 | 2,406/12,289 |
| AtSet2 | Inflorescence | 37/43 | 64/121 | 99/152 |
| (3,851) | Seedling | 22/36 | 32/52 | 44/74 |
| | Both | 107/140 | 166/538 | 216/698 |
| AtSet3 | Inflorescence | 37/42 | 63/118 | 95/144 |
| (2,588) | Seedling | 22/36 | 32/50 | 43/68 |
| | Both | 106/138 | 164/524 | 210/672 |
| AtSet4 | Inflorescence | 36/41 | 58/110 | 82/128 |
| (2,506) | Seedling | 22/36 | 32/49 | 41/64 |
| | Both | 105/137 | 159/514 | 195/650 |
| AtSet5 | Inflorescence | 17/32 | 41/78 | 45/72 |
| (1,145) | Seedling | 16/27 | 23/35 | 27/37 |
| | Both | 85/109 | 123/417 | 132/504 |
| AtSet6 | Inflorescence | 13/15 | 24/15 | 24/12 |
| (278) | Seedling | 10/11 | 17/5 | 21/2 |
| | Both | 61/69 | 90/208 | 94/222 |
| ^{a}Numbers under each AtSet# indicate the number of sequences in each dataset defined by Jones-Rhoades and Bartel (2004, Mol. Cell 14: 787). Each set is a subset of the previous group of sequences. Briefly, AtSet1 sequences folded into hairpins, AtSet2 is conserved in rice, and the additional AtSet#s indicate miRNA-specific filters as described (Jones-Rhoades and Bartel, 2004). | | | | |
| ^{b}Tissue indicates signatures that were found in only one of the two libraries or were found in both libraries. | | | | |
| ^{c}Indicates the number of Arabidopsis sequences that were overlapping in both the small RNA MPSS data (17-base signatures) and the Jones-Rhoades and Bartel (2004) computational predictions (20-base sequences). The first number in each cell indicates the number of distinct small RNA signatures that matched, while the second number indicates the number of distinct AtSet# 20-mers that were matched. “Exact match” indicates the | | | | |
| # 5′ end was identical for both sequences; the comparison in the “±4 bp match” allowed up to four nucleotides of difference in the 5′ end; “any overlap” indicated the 20-mer and small RNA signature had at least one nucleotide of overlap, based on the location of the genomic match. | | | | |

[0109] We developed a less exclusionary approach to enrich for miRNAs present in the small RNA MPSS data based on an overlapping set of filters. This method allowed us to implement and use multiple data filters in parallel and showed the numbers of small RNAs passing a subset of the filters (FIG. 5A). FIG. 5 is a five-way Venn diagram of selection criteria for small RNAs. A) The number of distinct signatures matching the criteria is indicated in each cell; small numbers in upper right corners are used in B for additional descriptions. The figure excludes 39,622 distinct signatures that did not pass any of the criteria (i.e. the majority of those in moderate or dense clusters). “Paired” indicates that two small RNAs or “sets” of small RNAs were located within 20-180 nt on the same strand, with a difference in abundance of 1:10 or greater; a “set” was defined as the consensus sequence of two or more overlapping signatures with 5′ ends within two nucleotides of each other. “Sparse cluster” is defined in the text. “Abundance” indicates the normalized abundance level in one of the libraries was equal or greater than 25 TPQ. Small RNA signatures in the AtSet1 and AtSet2 groups were present in one of the two libraries and when mapped in the genome, overlapped by at least one nucleotide with the mapped 20-nt sequences defined in Jones-Rhoades and Bartel (39). B) RNA gel blots were used to confirm new miRNA candidates identified using filters in the Venn diagram in part A. Small RNAs in the top row of blots were from box 3 of the Venn diagram. In the bottom row of blots, small RNAs #43 and #41 were from box 2, and small RNAs #52 and #51 were from box 9. Other designations are as indicated in FIG. 4. The ethidium bromide stained gels of the 5S/tRNA are indicated below each blot. The five-way Venn diagram in FIG. 5A shows that most known miRNAs were located in sparse clusters and a large percentage of the known miRNAs were captured by our abundance filter. The “paired” filter designed to identify small RNAs near another small RNA that could be a miRNA* identified many additional known miRNAs (Table 7). The contents of box #3, retained by all three filters, and box #9 retained by the sparse and abundance filters, represent good candidates for novel miRNAs and representatives of both were examined by RNA gel blots in FIG. 5B and folding predictions in FIG. 4. FIG. 4 sets forth differential miRNA and siRNA blots. RNA gel blots of low molecular weight RNA isolated from inflorescence tissues (I) and 2-week-old seedlings (S) were probed with labeled oligonucleotides. The blots also included RNA from inflorescence tissues of the rdr2 mutant (Im). The normalized abundance level from the MPSS data for each small RNA is listed above the blots and ethidium bromide staining of the 5S/tRNA region of the gels is shown below.

TABLE 7
Small RNAs in groups defined by five-way filters.

| | | | | Known | | 10-100 | Signatures | Signatures |
|---|---|---|---|---|---|---|---|---|
| | Distinct | Present in | Known | miRNA | 1-10 fold | fold | only in | only in |
| Group | signatures | AtSet6^{a} | miRNAs^{b} | families^{b} | difference | difference | inflorescence | seedling |
| 1 | 958 | — | 0 | 0 | 69 | 7 | 749 | 133 |
| 2 | 37 | — | 0 | 0 | 12 | 1 | 7 | 17 |
| 3 | 15 | — | 2 | 2 | 8 | 2 | 2 | 3 |
| 4 | 70 | — | 2 | 2 | 9 | 3 | 42 | 16 |
| 5 | 35 | 26 | 23 | 15 | 24 | 6 | 4 | 1 |
| 6 | 42 | 14 | 14 | 11 | 7 | 0 | 20 | 15 |
| 7 | 24,705 | — | 1 | 1 | 513 | 34 | 18,515 | 5,643 |
| 8 | 204 | — | 1 | 1 | 47 | 18 | 34 | 105 |
| 9 | 32 | — | 2 | 2 | 12 | 5 | 7 | 8 |
| 10 | 627 | — | 1 | 1 | 34 | 5 | 444 | 144 |
| 11 | 48 | 37 | 28 | 16 | 32 | 3 | 9 | 4 |
| 12 | 61 | 25 | 29 | 14 | 7 | 0 | 39 | 15 |
| 13 | 311 | — | 0 | 0 | 113 | 43 | 29 | 126 |
| 14 | 26 | — | 0 | 0 | 13 | 5 | 2 | 6 |
| 15 | 944 | — | 0 | 0 | 75 | 6 | 626 | 237 |
| 16 | 13 | 11 | 5 | 2 | 11 | 2 | 0 | 0 |
| 17 | 38 | 8 | 6 | 3 | 2 | 1 | 28 | 7 |

The small RNAs and groups are as described in FIG. 5A.
^{a}AtSet6 is a set of candidate miRNAs defined by Jones and Bartel (2004, Mol. Cell 14: 787).
^{b}Includes all perfect matches of small RNA signatures to miRNAs including matches with annotated 5′ ends. Some signatures match to multiple genomic locations, so the same known miRNAs may be matched by multiple groups; therefore, the total number of known miRNAs and miRNA families is less than the sum of these columns.

[0110] The large number of small RNA sequences obtained by MPSS identified more than 10-fold more small RNAs than previously described. However, this data did not reveal if we had achieved saturation of the small RNAs. Therefore, we carried out a second sequencing run on the seedling library that yielded 802,978 signatures matching to 20,379 genomic locations. Of these, 7,549 genomic matches were not identified in the first run (Table 8B) and they corresponded to 838 genes and 3,287 clusters not previously identified. Therefore, our analysis was not saturating and numerous Arabidopsis small RNAs remain to be identified. In maize and other large genomes, small RNAs are likely to be even more diverse due to the generation of diverse siRNAs from repetitive sequences that comprise the bulk of the genome. This may require even deeper sequencing of small RNAs in order to achieve saturation, although the siRNAs matching to the large families of repetitive sequences may be less interesting than small RNAs matching genes.

TABLE 8
Summary statistics for small RNA MPSS libraries.

| | | | | |
|---|---|---|---|---|
| | | Signatures | Distinct | Genome |
| # | Library | Sequenced^{a} | Signatures^{b} | Matches^{c} |

A. Inflorescence and seedling signatures.

| | | | | |
|---|---|---|---|---|
| 1 | Inflorescence | 721,044 | 67,528 | 56,920 |
| 2 | Seedling | 686,124 | 27,833 | 17,101 |

| | | | |
|---|---|---|---|
| Total of #1 and #2 | 1,407,168 | 91,445 | 70,633 |

B. Additional signatures from a second sequencing run from seedlings.

| | | | | |
|---|---|---|---|---|
| 3 | Seedling | 802,978 | 33,640 | 20,379 |
| 4 | Combined | 1,489,102 | 42,062 | 24,650 |
| | Seedling | | | |

| | | | |
|---|---|---|---|
| Total of all libraries | 2,210,146 | 104,800 | 77,434 |

^{a}The signatures sequenced for each library reflects the sum of two sequencing reactions.
^{b}“Distinct” refers to the number of different sequences found within the set. “Total” refers to the union of the different libraries.
^{c}Distinct signatures that perfectly match to at least one location in the genome, and includes signatures matching to tRNAs, rRNAs, snRNAs or snoRNAs.

[0111] Our data indicate that the small RNA component of the genome and its regulatory role is more extensive and complex than previously demonstrated. For example, many regions of the genome considered inactive or featureless were found in our analyses to be sites of considerable small RNA activity. In plants or any other organism that utilizes small RNAs as an endogenous regulatory mechanism, it should be possible to develop a more complete picture of gene and small RNA regulation by combining small RNA MPSS data from diverse samples with the genomic sequence and mRNA transcript data. For example, the small RNA MPSS data can add a new level of analysis to studies of molecular systems biology. Additional experiments, such as the analysis of small RNAs metabolism mutants, should lead to a better understanding of the sources, biological activities, turnover rates, and signaling pathways for the full range of small RNAs that we have described.

### EXAMPLE 2

[0112] Sequencing of Arabidopsis rdr2 mutants by MPSS and 454. Previous reports have indicated that rdr2 mutants show a dramatic reduction in endogenous siRNAs and a corresponding increase in miRNAs, Xie, Z., et al. 2004, Genetic and Functional Diversification of Small RNA Pathways in Plants. PLoS Biol 2: E104. It was reasoned that deep sequencing in this mutant would reveal the full complement of miRNAs in Arabidopsis. Two methods were utilized for the high-throughout sequencing of small RNAs, Meyers, B., et al., 2006, Sweating the Small Stuff: microRNA Discovery in Plants. Curr Opin Biotechnol 17: 139-146, including Massively Parallel Signature Sequencing Lu, C., et al., 2005, Elucidation of the Small RNA Component of the Transcriptome. Science 309: 1567-1569, and the 454 technology, Margulies, M. et al., 2005, Genome Sequencing in Microfabricated High-Density Picolitre Reactors. Nature 437: 376-380.

[0113] MPSS provides extraordinary depth, sequencing a half million or more molecules per library, while 454 has longer reads and thereby provides information about length. Both methods provide quantitative data based on the frequency of the molecules that were sequenced. The small RNA molecules were isolated by size fractionation, sequentially ligated to RNA adapters at the 5′ and 3′ ends, and used to make cDNA template for sequencing. Libraries were generated using mixed stage inflorescences, which are known to be a rich source of small RNAs Lu, C., et al., 2005, Elucidation of the Small RNA Component of the Transcriptome. Science 309: 1567-1569. MPSS produced 915,856 17-nucleotide signatures from rdr2 (Table 9), which is comparable to the 721,044 signatures previously obtained for wildtype Arabidopsis inflorescence. However, the rdr2 complexity was reduced by more than 80% compared to wildtype in terms of sequence diversity (9,066 different genome-matched sequences in rdr2 compared to 56,920 in wildtype). This dramatic difference was despite the larger total number of sequencing reads.

TABLE 9
Summary statistics of MPSS and 454 libraries of rdr2
and wildtype inflorescence.

| | | | | |
|---|---|---|---|---|
| | | Signatures | Distinct | Genome |
| # | Library | Sequenced^{a} | Signatures^{b} | Matches^{c} |

A. MPSS libraries.

| | | | | |
|---|---|---|---|---|
| 1 | Wildtype (FLR) | 721,044 | 67,528 | 56,920 |
| 2 | rdr2 | 915,856 | 15,325 | 9,066 |

| | | | |
|---|---|---|---|
| Total of #1 and #2 | 1,636,900 | 80,741 | 64,274 |

B. 454 libraries.

| | | | | |
|---|---|---|---|---|
| 3 | Wildtype(Col-0) | 11,631 | 9,323 | 5,713 |
| 4 | rdr2 | 7,134 | 2,003 | 686 |

| | | | |
|---|---|---|---|
| Total of #3 and #4 | 18,765 | 11,064 | 6,253 |

^{a}The signatures sequenced for each library reflects the sum of two sequencing reactions. “Total” is the sum of the different libraries. Numbers for the 454 data indicate only those sequences for which both 5′ and 3′ adapters were identified and removed, and the insert was ≧15 bp in length.
^{b}“Distinct” refers to the number of different sequences found within the set. “Total” is the union of the libraries.
^{c}Distinct signatures are counted that perfectly match to at least one location in the genome, and includes signatures matching to tRNAs, rRNAs, snRNAs or snoRNAs. “Total” is the union of the libraries.

[0114] Similarly, the 454 sequencing data demonstrated a reduced complexity for rdr2 small RNAs. Using 454, 11,631 small RNAs from wildtype inflorescence were sequenced (5,713 distinct, genome-matching) and 7,134 from rdr2 (686 distinct, genome-matching). The rdr2 diversity was less than 13% that of wildtype, although in the case of the 454 data, fewer small RNAs were sequenced than with MPSS. The MPSS and 454 data correlated much better for the rdr2 mutant than the wildtype, probably because the reduced complexity of rdr2 allowed a more saturating level of sampling for even low levels of sequences (FIG. 11).

[0115] Because rdr2 is known to lack many heterochromatic siRNAs Xie, Z., et al., 2004, Genetic and Functional Diversification of Small RNA Pathways in Plants. PLoS Biol 2: E104, wildtype and rdr2 sequences were compared to determine if the small RNAs remaining in rdr2 are primarily a subset of those in wildtype. As measured by both MPSS and 454, approximately 20% of the rdr2 small RNAs were also observed in the wildtype library (FIGS. 6A and 6B). While not being bound by any particular theory, it is hypothesized that this low level of similarity was the largely the result of different siRNAs that represent the same regions. Therefore, it was determined whether the genomic loci generating small RNAs in rdr2 were the same as wildtype. To do this, we clustered the small RNAs in both rdr2 and wildtype using a proximity-based algorithm RNAs Lu, C., et al., 2005, Elucidation of the Small RNA Component of the Transcriptome. Science 309: 1567-1569 and compared clusters across the two libraries for the MPSS data. This analysis demonstrated that nearly all of the clusters (93%) containing at least three small RNAs that were detected in rdr2 were also detected in the wildtype inflorescence (FIG. 6C). Therefore, most of the small-RNA producing loci in rdr2 are also producing small RNAs in wildtype inflorescences. Most of the rdr2-only clusters were low abundance sequences that may not have been detected in wildtype due to the complexity of wildtype small RNAs and an unsaturated sample size.

[0116] Next, the population of miRNAs in the rdr2 mutant was examined and compared to wildtype. The most obvious trend was the expected enrichment of nearly all miRNAs in rdr2 compared to the wildtype (Tables 10 and 12). The overall enrichment of miRNAs in rdr2 was 1.8-fold, based on the proportion of small RNAs represented by known miRNAs (Table 11), a level similar to the 2.2-fold enrichment reported for a low level of sequencing. Eight miRNAs were enriched more than 5-fold in rdr2, including miR158, miR163, miR171, miR172, miR173, miR393, miR399, and miR402 (Table 10). The most abundant miRNA in rdr2 was miR172. This miRNA was also the most abundant in a dcl2/3/4 triple mutant Henderson, I. R., et al., 2006. Dissecting Arabidopsis DICER function in small RNA processing, gene silencing, and DNA methylation pafterning. Nat Genet In press., which, as discussed below, has a small RNA profile similar to rdr2. Both of these mutants lack many common siRNAs, and perhaps this indirectly and positively impacts miR172 abundance. At the other extreme, miR167 had a lower abundance in rdr2 than wildtype, and this was also observed in dcl2/3/4. Across the remaining miRNAs, relatively few qualitative differences were observed in terms of miRNAs that were present or absent (Tables 10 and 12). For example, the MPSS data showed that only two known miRNA families were present in rdr2 that had not been detected in wildtype inflorescence (miR157, miR400), while only miR395 was observed in wildtype but not the rdr2 454 library (and this may be due to the low sampling depth of the 454 data). Fourteen known miRNAs were never observed in either wildtype or rdr2 libraries (Table 10 and 12); this could indicate that these miRNAs are not expressed in the tissues or conditions that we sampled, some of these are not bona fide miRNAs as previously suggested, or sequence-based biases in cloning and/or sequencing steps led to their absence.

TABLE 10
miRNA families matched by small RNAs from rdr2 and wildtype inflorescence.

| | MPSS wt | MPSS rdr2 | 454 wt | 454 rdr2 | 454 dcl2/3/4 | 454 rdr6 | 454 dcl1-7 |
|---|---|---|---|---|---|---|---|
| miRNA | (TPQ) | (TPQ) | (raw) | (raw) | (raw) | (raw) | (raw) |
| miR156 | 45 | 976 | 1 | 9 | 1 | 11 | 1 |
| miR157 | 0 | 684 | 2 | 4 | 4 | 38 | 0 |
| miR158 | 74 | 3247 | 3 | 8 | 8 | 71 | 0 |
| miR159 | 61 | 82 | 246 | 281 | 452 | 398 | 41 |
| miR160 | 597 | 1389 | 4 | 5 | 16 | 11 | 2 |
| miR161 | 913 | 4248 | 22 | 54 | 73 | 208 | 36 |
| miR162 | 275 | 918 | 4 | 6 | 21 | 15 | 2 |
| miR163 | 74 | 15044 | 52 | 210 | 233 | 82 | 0 |
| miR164 | 467 | 1560 | 3 | 6 | 11 | 2 | 0 |
| miR165 | 1037 | 1059 | 10 | 25 | 55 | 38 | 5 |
| miR166 | 10620 | 3993 | 135 | 174 | 441 | 263 | 16 |
| miR167 | 59561 | 11061 | 172 | 134 | 331 | 1270 | 2 |
| miR168 | 2267 | 2091 | 8 | 2 | 37 | 17 | 36 |
| miR169 | 7650 | 14488 | 121 | 264 | 20 | 519 | 2 |
| miR170 | 15704 | 10180 | 52 | 98 | 61 | 122 | 0 |
| miR171 | 313 | 6477 | 76 | 89 | 97 | 28 | 10 |
| miR172 | 1920 | 93582 | 534 | 2100 | 1921 | 329 | 33 |
| miR173 | 518 | 4010 | 9 | 44 | 19 | 44 | 0 |
| miR319 | 372 | 433 | 8 | 25 | 16 | 8 | 0 |
| miR390 | 11349 | 17445 | 25 | 158 | 84 | 7 | 0 |
| miR393 | 49 | 972 | 4 | 8 | 10 | 31 | 0 |
| miR394 | 80 | 382 | 1 | 3 | 3 | 3 | 1 |
| miR395 | 13 | 23 | 1 | 0 | 0 | 0 | 0 |
| miR396 | 820 | 1611 | 9 | 5 | 52 | 28 | 4 |
| miR397 | 0 | 0 | 0 | 0 | 2 | 0 | 0 |
| miR398 | 111 | 228 | 1 | 2 | 35 | 18 | 0 |
| miR399 | 9 | 91 | 0 | 0 | 1 | 7 | 0 |
| miR400 | 0 | 109 | 0 | 0 | 0 | 16 | 1 |
| miR401 | 0 | 0 | 0 | 0 | 0 | 0 | 0 |
| miR402 | 6 | 123 | 0 | 0 | 0 | 0 | 0 |
| miR403 | 73 | 306 | 2 | 2 | 2 | 4 | 0 |
| miR404 | 0 | 0 | 0 | 0 | 0 | 0 | 0 |
| miR405 | 0 | 0 | 0 | 0 | 0 | 0 | 0 |
| miR406 | 0 | 0 | 0 | 0 | 0 | 0 | 0 |
| miR407 | 0 | 0 | 0 | 0 | 0 | 0 | 0 |
| miR408 | 381 | 115 | 1 | 1 | 9 | 1 | 3 |
| miR413 | 0 | 0 | 0 | 0 | 0 | 0 | 0 |
| miR414 | 0 | 0 | 0 | 0 | 0 | 0 | 0 |
| miR415 | 0 | 0 | 0 | 0 | 0 | 0 | 0 |
| miR416 | 0 | 0 | 0 | 0 | 0 | 0 | 0 |
| miR417 | 0 | 0 | 0 | 0 | 0 | 0 | 0 |
| miR418 | 0 | 0 | 0 | 0 | 0 | 0 | 0 |
| miR419 | 0 | 0 | 0 | 0 | 0 | 0 | 0 |
| miR420 | 0 | 0 | 0 | 0 | 0 | 0 | 0 |
| miR426 | 0 | 0 | 0 | 0 | 0 | 0 | 0 |
| miR447 | 0 | 0 | 0 | 0 | 0 | 0 | 0 |
| TOTAL FROM | | | 7488 | 4573 | 6214 | 6441 | 8663 |
| GENOME^{a} | | | | | | | |

“wt” indicates wildtype.
Values indicate TPQ (MPSS) or raw (454) abundance for perfect matches to known miRNAs with matches located within one nucleotide of the annotated 5′ end of the miRNA. Loci with the same name were combined for this analysis; sequences matching individual loci are described in Table S1.
^{a}Because the 454 values are raw values and not normalized, this row indicates the number of genome-matching small RNAs sequenced in each 454 library as a reference for the miRNA abundance.

[0117] TABLE 11
Small RNAs from MPSS libraries matching different types of repeats.

| | Wildtype | | rdr2 | |
|---|---|---|---|---|
| | #distinct | Sum of | #distinct | Sum of |
| Type | signatures | abundance^{c} | signatures | abundance^{c} |
| Known miRNA | 60 | 114,732 | 75 | 196,194 |
| Known ta-siRNA | 77 | 1,002 | 415 | 22,130 |
| locus | | | | |
| Gene | 11,455 | 135,340 | 3,350 | 185,367 |
| Pseudogene | 1,936 | 8,846 | 53 | 349 |
| Intergenic regions | 30,632 | 240,505 | 3,583 | 252,315 |
| Tandem repeats | 9,423 | 42,229 | 1,050 | 18,244 |
| Inverted repeats | 3,851 | 24,069 | 2,252 | 21,688 |
| Retrotransposons^{a} | 11,533 | 42,769 | 189 | 1,905 |
| Transposon^{a} | 8,737 | 33,198 | 119 | 2,943 |
| Centromeric^{b} | 5,200 | 21,615 | 80 | 431 |
| rRNA, tRNA, | 1,622 | — | 258 | — |
| snoRNA or snRNA | | | | |

^{a}Numbers of retrotransposons and transposons include sequences annotated as genes in the TIGR annotation as well as those intergenic regions identified as retrotransposons and transposons by low stringency analysis with RepeatMasker.
^{b}Centromeric repeats were defined based on regions matching the 180 bp centromeric repeats by BLAST analysis with an E-value <e⁻¹⁰.
^{c}“Sum of abundance” is the sum of TPQ-normalized abundances for all locations of all matching signatures. Signatures with multiple matches in the genome were counted for each type of genomic region in which they matched. Values are not indicated for the type “rRNA, tRNA, snoRNA or snRNA” because the abundances for these signatures were excluded from our analysis and were not normalized.

[0118] TABLE 12
Known miRNAs sequences from wildtype and rdr2.

| MPSS | | 454 | | | | |
|---|---|---|---|---|---|---|
| rdr2 | FLR | rdr2 | Col0 | rdr6 | dcl2/3/4 | dcl1-7 |

A. Perfect matches to known miRNAs.
Columns from left to right indicate the name and family member
of the known miRNA name, the normalized abundance in TPQ
in the rdr2 and wildtype inflorescence (FLR) MPSS libraries,
and the raw abundance in the 454 libraries including the rdr2
mutant, wildtype inflorescence (Col-0), rdr6, dcl2/3/4,
and dcl1-7.

| | | | | | | | |
|---|---|---|---|---|---|---|---|
| mir_id | | | | | | | |
| miR156a | 492 | 45 | 5 | 0 | 10 | 0 | 0 |
| miR156b | 492 | 45 | 6 | 0 | 10 | 0 | 0 |
| miR156c | 492 | 45 | 5 | 0 | 10 | 0 | 0 |
| miR156d | 492 | 45 | 5 | 0 | 10 | 0 | 0 |
| miR156e | 492 | 45 | 5 | 0 | 10 | 0 | 0 |
| miR156f | 492 | 45 | 5 | 0 | 10 | 0 | 0 |
| miR156g | 0 | 0 | 0 | 0 | 0 | 0 | 0 |
| miR156h | 173 | 0 | 0 | 0 | 0 | 1 | 0 |
| miR157a | 531 | 0 | 3 | 1 | 36 | 3 | 0 |
| miR157b | 531 | 0 | 3 | 1 | 36 | 3 | 0 |
| miR157c | 531 | 0 | 3 | 2 | 37 | 3 | 0 |
| miR157d | 4 | 0 | 0 | 0 | 0 | 0 | 0 |
| miR158a | 3107 | 64 | 7 | 3 | 67 | 6 | 0 |
| miR158b | 10 | 0 | 0 | 0 | 0 | 0 | 0 |
| miR159a | 0 | 0 | 233 | 205 | 322 | 377 | 38 |
| miR159b | 0 | 0 | 61 | 48 | 112 | 103 | 13 |
| miR159c | 0 | 0 | 3 | 4 | 38 | 11 | 10 |
| miR160a | 1373 | 596 | 5 | 4 | 10 | 15 | 1 |
| miR160b | 1373 | 596 | 5 | 4 | 10 | 15 | 1 |
| miR160c | 1373 | 596 | 5 | 4 | 10 | 15 | 1 |
| miR161 | 2695 | 16 | 31 | 9 | 133 | 38 | 22 |
| miR162a | 893 | 271 | 5 | 4 | 15 | 20 | 2 |
| miR162b | 893 | 271 | 5 | 4 | 15 | 20 | 2 |
| miR163 | 14955 | 45 | 209 | 52 | 82 | 232 | 0 |
| miR164a | 1560 | 465 | 6 | 3 | 2 | 11 | 0 |
| miR164b | 1560 | 465 | 6 | 3 | 2 | 8 | 0 |
| miR164c | 1560 | 465 | 1 | 1 | 0 | 0 | 0 |
| miR165a | 326 | 410 | 25 | 9 | 38 | 53 | 5 |
| miR165b | 326 | 410 | 20 | 8 | 27 | 53 | 5 |
| miR166a | 2083 | 8546 | 156 | 123 | 258 | 408 | 14 |
| miR166b | 2083 | 8546 | 156 | 123 | 258 | 408 | 14 |
| miR166c | 2083 | 8546 | 156 | 123 | 258 | 408 | 14 |
| miR166d | 2083 | 8546 | 156 | 123 | 258 | 408 | 14 |
| miR166e | 2083 | 8546 | 153 | 126 | 219 | 407 | 12 |
| miR166f | 2083 | 8546 | 153 | 126 | 219 | 407 | 12 |
| miR166g | 2083 | 8546 | 153 | 126 | 219 | 407 | 12 |
| miR167a | 11039 | 59392 | 127 | 156 | 1235 | 331 | 2 |
| miR167b | 11039 | 59392 | 116 | 161 | 1238 | 253 | 2 |
| miR167c | 12 | 16 | 0 | 0 | 0 | 0 | 0 |
| miR167d | 11039 | 59392 | 10 | 10 | 175 | 14 | 0 |
| miR168a | 2025 | 2205 | 2 | 8 | 17 | 37 | 36 |
| miR168b | 2025 | 2205 | 2 | 8 | 17 | 37 | 36 |
| miR169a | 10905 | 4485 | 41 | 18 | 249 | 9 | 0 |
| miR169b | 10905 | 4485 | 4 | 2 | 21 | 1 | 0 |
| miR169c | 10905 | 4485 | 4 | 2 | 23 | 1 | 0 |
| miR169d | 621 | 611 | 8 | 2 | 2 | 4 | 1 |
| miR169e | 621 | 611 | 8 | 2 | 2 | 4 | 1 |
| miR169f | 621 | 611 | 8 | 2 | 2 | 4 | 1 |
| miR169g | 621 | 611 | 8 | 2 | 2 | 4 | 2 |
| miR169h | 2653 | 2091 | 176 | 77 | 193 | 6 | 0 |
| miR169i | 2653 | 2091 | 196 | 86 | 237 | 6 | 0 |
| miR169j | 2653 | 2091 | 197 | 88 | 237 | 6 | 0 |
| miR169k | 2653 | 2091 | 176 | 77 | 193 | 6 | 0 |
| miR169l | 2653 | 2091 | 197 | 88 | 237 | 6 | 0 |
| miR169m | 2653 | 2091 | 177 | 86 | 203 | 6 | 0 |
| miR169n | 2653 | 2091 | 197 | 88 | 237 | 6 | 0 |
| miR170 | 10180 | 15603 | 96 | 51 | 119 | 61 | 0 |
| miR171a | 3220 | 30 | 66 | 73 | 19 | 72 | 2 |
| miR171b | 3257 | 84 | 23 | 3 | 7 | 23 | 8 |
| miR171c | 3257 | 84 | 23 | 3 | 7 | 23 | 8 |
| miR172a | 92371 | 1873 | 1712 | 410 | 324 | 1516 | 10 |
| miR172b | 92371 | 1873 | 1712 | 410 | 324 | 1516 | 10 |
| miR172c | 92371 | 1873 | 548 | 118 | 7 | 502 | 22 |
| miR172d | 92371 | 1873 | 548 | 118 | 7 | 502 | 22 |
| miR172e | 1101 | 47 | 42 | 25 | 3 | 77 | 1 |
| miR173 | 4009 | 509 | 40 | 8 | 43 | 17 | 0 |
| miR319a | 301 | 367 | 8 | 1 | 2 | 7 | 0 |
| miR319b | 301 | 367 | 8 | 1 | 2 | 7 | 0 |
| miR319c | 301 | 367 | 10 | 6 | 3 | 4 | 0 |
| miR390a | 16637 | 11038 | 141 | 23 | 6 | 67 | 0 |
| miR390b | 16637 | 11038 | 141 | 23 | 6 | 67 | 0 |
| miR393a | 972 | 45 | 8 | 4 | 30 | 10 | 0 |
| miR393b | 972 | 45 | 8 | 4 | 30 | 10 | 0 |
| miR394a | 333 | 69 | 3 | 1 | 3 | 3 | 1 |
| miR394b | 333 | 69 | 3 | 1 | 3 | 3 | 1 |
| miR395a | 2 | 0 | 0 | 1 | 0 | 0 | 0 |
| miR395b | 21 | 13 | 0 | 0 | 0 | 0 | 0 |
| miR395c | 21 | 13 | 0 | 0 | 0 | 0 | 0 |
| miR395d | 2 | 0 | 0 | 1 | 0 | 0 | 0 |
| miR395e | 2 | 0 | 0 | 1 | 0 | 0 | 0 |
| miR395f | 21 | 13 | 0 | 0 | 0 | 0 | 0 |
| miR396a | 1611 | 819 | 1 | 1 | 7 | 6 | 3 |
| miR396b | 1611 | 819 | 4 | 9 | 20 | 46 | 1 |
| miR397a | 0 | 0 | 0 | 0 | 0 | 1 | 0 |
| miR397b | 0 | 0 | 0 | 0 | 0 | 1 | 0 |
| miR398a | 228 | 111 | 0 | 0 | 1 | 1 | 0 |
| miR398b | 228 | 111 | 2 | 1 | 18 | 35 | 0 |
| miR398c | 228 | 111 | 2 | 1 | 18 | 35 | 0 |
| miR399a | 3 | 0 | 0 | 0 | 1 | 0 | 0 |
| miR399b | 87 | 9 | 0 | 0 | 3 | 1 | 0 |
| miR399c | 87 | 9 | 0 | 0 | 3 | 1 | 0 |
| miR399d | 3 | 0 | 0 | 0 | 0 | 0 | 0 |
| miR399e | 3 | 0 | 0 | 0 | 0 | 0 | 0 |
| miR399f | 3 | 0 | 0 | 0 | 2 | 0 | 0 |
| miR400 | 109 | 0 | 0 | 0 | 16 | 0 | 1 |
| miR401 | 0 | 0 | 0 | 0 | 0 | 0 | 0 |
| miR402 | 117 | 6 | 0 | 0 | 0 | 0 | 0 |
| miR403 | 306 | 73 | 2 | 2 | 4 | 2 | 0 |
| miR404 | 0 | 0 | 0 | 0 | 0 | 0 | 0 |
| miR405a | 0 | 0 | 0 | 0 | 0 | 0 | 0 |
| miR405b | 0 | 0 | 0 | 0 | 0 | 0 | 0 |
| miR405d | 0 | 0 | 0 | 0 | 0 | 0 | 0 |
| miR406 | 0 | 0 | 0 | 0 | 0 | 0 | 0 |
| miR407 | 0 | 0 | 0 | 0 | 0 | 0 | 0 |
| miR408 | 12 | 0 | 1 | 0 | 1 | 6 | 3 |
| miR413 | 0 | 0 | 0 | 0 | 0 | 0 | 0 |
| miR414 | 0 | 0 | 0 | 0 | 0 | 0 | 0 |
| miR415 | 0 | 0 | 0 | 0 | 0 | 0 | 0 |
| miR416 | 0 | 0 | 0 | 0 | 0 | 0 | 0 |
| miR417 | 0 | 0 | 0 | 0 | 0 | 0 | 0 |
| miR418 | 0 | 0 | 0 | 0 | 0 | 0 | 0 |
| miR419 | 0 | 0 | 0 | 0 | 0 | 0 | 0 |
| miR420 | 0 | 0 | 0 | 0 | 0 | 0 | 0 |
| miR426 | 0 | 0 | 0 | 0 | 0 | 0 | 0 |
| miR447a | 0 | 0 | 0 | 0 | 0 | 0 | 0 |
| miR447b | 0 | 0 | 0 | 0 | 0 | 0 | 0 |
| miR447c | 0 | 0 | 0 | 0 | 0 | 0 | 0 |

B. Known miRNAs sequences from wildtype and rdr2
allowing for small differences in start sites.
This is a version of the table above in part (A), but allowing
small RNAs that match in up to the +2 to −2 positions
compared to the annotated miRNA.

| | | | | | | | |
|---|---|---|---|---|---|---|---|
| miRNA | | | | | | | |
| miR156a | 496 | 45 | 5 | 0 | 10 | 0 | 0 |
| miR156b | 496 | 45 | 6 | 0 | 10 | 0 | 0 |
| miR156c | 496 | 45 | 5 | 0 | 10 | 0 | 0 |
| miR156d | 787 | 45 | 8 | 0 | 11 | 0 | 1 |
| miR156e | 493 | 45 | 5 | 0 | 10 | 0 | 0 |
| miR156f | 493 | 45 | 5 | 0 | 10 | 0 | 0 |
| miR156g | 1 | 0 | 0 | 0 | 0 | 0 | 0 |
| miR156h | 187 | 0 | 0 | 1 | 0 | 1 | 0 |
| miR157a | 535 | 0 | 3 | 1 | 36 | 3 | 0 |
| miR157b | 535 | 0 | 3 | 1 | 36 | 3 | 0 |
| miR157c | 535 | 0 | 3 | 2 | 37 | 3 | 0 |
| miR157d | 153 | 0 | 1 | 0 | 1 | 1 | 0 |
| miR158a | 3241 | 64 | 8 | 3 | 73 | 8 | 0 |
| miR158b | 10 | 10 | 0 | 0 | 4 | 0 | 0 |
| miR159a | 105 | 64 | 237 | 207 | 324 | 382 | 38 |
| miR159b | 105 | 64 | 61 | 48 | 114 | 103 | 13 |
| miR159c | 54 | 11 | 3 | 4 | 38 | 11 | 10 |
| miR160a | 1387 | 597 | 5 | 4 | 11 | 16 | 2 |
| miR160b | 1375 | 596 | 5 | 4 | 10 | 15 | 1 |
| miR160c | 1387 | 597 | 5 | 4 | 11 | 16 | 2 |
| miR161 | 4248 | 913 | 54 | 22 | 212 | 73 | 37 |
| miR162a | 932 | 275 | 6 | 4 | 15 | 21 | 2 |
| miR162b | 932 | 275 | 6 | 4 | 15 | 21 | 2 |
| miR163 | 15092 | 83 | 210 | 52 | 82 | 234 | 0 |
| miR164a | 1560 | 467 | 6 | 3 | 2 | 11 | 0 |
| miR164b | 1560 | 467 | 6 | 3 | 2 | 8 | 0 |
| miR164c | 1560 | 467 | 1 | 1 | 0 | 0 | 0 |
| miR165a | 395 | 642 | 25 | 10 | 38 | 55 | 5 |
| miR165b | 997 | 854 | 20 | 8 | 27 | 53 | 5 |
| miR166a | 3270 | 10059 | 168 | 131 | 263 | 432 | 14 |
| miR166b | 2762 | 9214 | 164 | 124 | 260 | 416 | 15 |
| miR166c | 2159 | 9005 | 159 | 123 | 259 | 408 | 14 |
| miR166d | 2159 | 9005 | 159 | 123 | 259 | 408 | 14 |
| miR166e | 2762 | 9214 | 161 | 127 | 221 | 415 | 13 |
| miR166f | 2760 | 9166 | 161 | 127 | 221 | 415 | 13 |
| miR166g | 2159 | 9005 | 156 | 126 | 220 | 407 | 12 |
| miR167a | 11039 | 59519 | 129 | 157 | 1244 | 331 | 2 |
| miR167b | 11039 | 59519 | 118 | 162 | 1249 | 253 | 2 |
| miR167c | 12 | 45 | 0 | 0 | 1 | 0 | 0 |
| miR167d | 11049 | 59574 | 10 | 10 | 179 | 14 | 0 |
| miR168a | 2100 | 2267 | 2 | 8 | 17 | 37 | 36 |
| miR168b | 2100 | 2267 | 2 | 8 | 17 | 37 | 36 |
| miR169a | 11243 | 4892 | 47 | 19 | 256 | 9 | 0 |
| miR169b | 11243 | 4892 | 6 | 2 | 22 | 1 | 0 |
| miR169c | 11140 | 4842 | 4 | 2 | 24 | 1 | 0 |
| miR169d | 921 | 1063 | 13 | 3 | 5 | 4 | 1 |
| miR169e | 921 | 1063 | 13 | 3 | 5 | 4 | 1 |
| miR169f | 921 | 1063 | 10 | 3 | 3 | 4 | 1 |
| miR169g | 919 | 1063 | 10 | 3 | 3 | 4 | 2 |
| miR169h | 2931 | 2455 | 181 | 77 | 195 | 6 | 0 |
| miR169i | 2931 | 2455 | 202 | 86 | 240 | 6 | 0 |
| miR169j | 2895 | 2455 | 201 | 88 | 240 | 6 | 0 |
| miR169k | 2931 | 2455 | 181 | 77 | 195 | 6 | 0 |
| miR169l | 2888 | 2448 | 201 | 88 | 240 | 6 | 0 |
| miR169m | 2931 | 2455 | 182 | 86 | 205 | 6 | 0 |
| miR169n | 2895 | 2455 | 201 | 88 | 240 | 6 | 0 |
| miR170 | 10180 | 15704 | 98 | 52 | 122 | 61 | 0 |
| miR171a | 3220 | 288 | 66 | 73 | 21 | 74 | 2 |
| miR171b | 3257 | 88 | 23 | 3 | 7 | 23 | 8 |
| miR171c | 3257 | 88 | 23 | 3 | 7 | 23 | 8 |
| miR172a | 92487 | 1894 | 1732 | 413 | 326 | 1537 | 10 |
| miR172b | 92487 | 1894 | 1732 | 413 | 326 | 1537 | 10 |
| miR172c | 92487 | 1894 | 551 | 118 | 7 | 504 | 22 |
| miR172d | 92487 | 1894 | 551 | 118 | 7 | 504 | 22 |
| miR172e | 1178 | 68 | 54 | 28 | 5 | 95 | 1 |
| miR173 | 4010 | 519 | 44 | 9 | 44 | 19 | 0 |
| miR319a | 395 | 532 | 11 | 2 | 2 | 12 | 0 |
| miR319b | 301 | 372 | 10 | 2 | 2 | 7 | 0 |
| miR319c | 427 | 372 | 16 | 6 | 6 | 9 | 0 |
| miR390a | 17445 | 11349 | 158 | 25 | 7 | 84 | 0 |
| miR390b | 17445 | 11349 | 158 | 25 | 7 | 84 | 0 |
| miR393a | 972 | 49 | 8 | 4 | 31 | 10 | 0 |
| miR393b | 972 | 49 | 8 | 4 | 31 | 10 | 0 |
| miR394a | 396 | 80 | 3 | 1 | 3 | 3 | 1 |
| miR394b | 396 | 80 | 3 | 1 | 3 | 3 | 1 |
| miR395a | 2 | 0 | 0 | 1 | 0 | 0 | 0 |
| miR395b | 21 | 13 | 0 | 0 | 0 | 0 | 0 |
| miR395c | 21 | 13 | 0 | 0 | 0 | 0 | 0 |
| miR395d | 2 | 0 | 0 | 1 | 0 | 0 | 0 |
| miR395e | 2 | 0 | 0 | 1 | 0 | 0 | 0 |
| miR395f | 21 | 13 | 0 | 0 | 0 | 0 | 0 |
| miR396a | 1611 | 820 | 1 | 1 | 8 | 6 | 3 |
| miR396b | 1611 | 819 | 4 | 9 | 20 | 46 | 1 |
| miR397a | 0 | 0 | 0 | 0 | 0 | 1 | 0 |
| miR397b | 0 | 0 | 0 | 0 | 0 | 1 | 0 |
| miR398a | 228 | 111 | 0 | 0 | 1 | 1 | 0 |
| miR398b | 228 | 111 | 2 | 1 | 18 | 35 | 0 |
| miR398c | 228 | 111 | 2 | 1 | 18 | 35 | 0 |
| miR399a | 4 | 0 | 0 | 0 | 1 | 0 | 0 |
| miR399b | 87 | 9 | 0 | 0 | 3 | 1 | 0 |
| miR399c | 87 | 9 | 0 | 0 | 3 | 1 | 0 |
| miR399d | 4 | 0 | 0 | 0 | 0 | 0 | 0 |
| miR399e | 4 | 0 | 0 | 0 | 0 | 0 | 0 |
| miR399f | 4 | 0 | 0 | 0 | 3 | 0 | 0 |
| miR400 | 109 | 0 | 0 | 0 | 16 | 0 | 1 |
| miR401 | 0 | 0 | 0 | 0 | 0 | 0 | 0 |
| miR402 | 123 | 6 | 0 | 0 | 0 | 0 | 0 |
| miR403 | 307 | 73 | 2 | 2 | 4 | 2 | 0 |
| miR404 | 0 | 0 | 0 | 0 | 0 | 0 | 0 |
| miR405a | 0 | 0 | 0 | 0 | 0 | 0 | 0 |
| miR405b | 0 | 0 | 0 | 0 | 0 | 0 | 0 |
| miR405d | 0 | 0 | 0 | 0 | 0 | 0 | 0 |
| miR406 | 0 | 0 | 0 | 0 | 0 | 0 | 0 |
| miR407 | 0 | 0 | 0 | 0 | 0 | 0 | 0 |
| miR408 | 115 | 385 | 1 | 1 | 1 | 9 | 3 |
| miR413 | 0 | 0 | 0 | 0 | 0 | 0 | 0 |
| miR414 | 0 | 0 | 0 | 0 | 0 | 0 | 0 |
| miR415 | 0 | 0 | 0 | 0 | 0 | 0 | 0 |
| miR416 | 0 | 0 | 0 | 0 | 0 | 0 | 0 |
| miR417 | 0 | 0 | 0 | 0 | 0 | 0 | 0 |
| miR418 | 0 | 0 | 0 | 0 | 0 | 0 | 0 |
| miR419 | 0 | 0 | 0 | 0 | 0 | 0 | 0 |
| miR420 | 0 | 0 | 0 | 0 | 0 | 0 | 0 |
| miR426 | 0 | 0 | 0 | 0 | 0 | 0 | 0 |
| miR447a | 0 | 0 | 0 | 0 | 0 | 0 | 0 |
| miR447b | 0 | 0 | 0 | 0 | 0 | 0 | 0 |
| miR447c | 0 | 0 | 0 | 0 | 0 | 0 | 0 |

[0119] The rdr2 small RNAs showed a much more limited distribution on the Arabidopsis chromosomes compared to wildtype, due to their reduced complexity. The small RNAs from the rdr2 mutant did not show a pericentromeric concentration, which is a noticeable contrast with wildtype small RNAs; this is consistent with a loss of heterochromatic siRNAs in rdr2. However, there were many more loci matching small RNAs in rdr2 than are represented by the 117 known miRNA loci. This could indicate that many miRNAs, ta-siRNAs or other RDR2-independent small RNAs have yet to be described. As a first step to determine the nature of these RDR2-independent small RNAs, the relationship between rdr2 small RNAs and different genomic regions was examined. Compared to wildtype, small RNAs were reduced in rdr2 in each class of genomic sequence that we investigated (Table 11 and FIG. 12). Based on the normalized abundances, there was a proportionally greater reduction in small RNAs associated with pseudogenes, transposons and retrotransposons, compared to genes and unclassified intergenic regions, consistent with a loss of heterochromatic siRNAs (Table 11, FIG. 12). Small RNAs in the intergenic regions potentially represent unannotated miRNAs, or siRNAs from unannotated repeats such as tandem or inverted genomic repeats. Inverted repeats showed one of the lowest reductions in small RNAs in rdr2, while small RNAs from tandem repeats were fewer but still well-represented.

### EXAMPLE 3

[0120] Experimental Validation of Novel miRNAs.

[0121] As a first step towards the identification of novel miRNAs, rdr2 MPSS sequences were compared with previously-identified wildtype small RNAs in a five-way Venn diagram (FIG. 7). Among those small RNAs that are present in both libraries, the sequences were chosen for further analysis from boxes 3-6 and 9-12; these sequences matched genomic regions that can form hairpin structures and they passed the sparse cluster filter typical of miRNAs. Eliminating known miRNA genes (101 sequences) and transposons (eight sequences) resulted in a set of 54 small RNA sequences and a total of 31 candidate genomic loci. Because most of the novel candidate miRNAs were sequenced by MPSS multiple times and all were independently detected in two different samples (rdr2 and wildtype), they represent good candidates for novel Arabidopsis miRNAs that are expressed at low levels, may not be conserved between plant species, and have not been described as miRNAs by previous approaches or experiments.

[0122] As a complementary experimental approach to validate candidate miRNAs, the expression of candidate miRNAs in different genetic backgrounds was evaluated by RNA gel blot analysis of low molecular weight RNA isolated from inflorescence tissues. Canonical miRNAs generally require DCL1 (not DCL2, 3 or 4), but not RDR2 or RDR6, while 21 nt siRNAs from ta-siRNA loci require DCL1, DCL4 and RDR6 but not RDR2. Arabidopsis mutants with defects in Dicer and RdRp genes, therefore, are important tools to distinguish among different classes of small RNAs. Of the 31 candidate hairpin-forming genomic loci from the Venn diagram, we conducted RNA gel blot analysis of 13 from boxes containing small RNA signatures with an MPSS abundance of ≧40 transcripts per quarter-million (TPQ), including three small RNAs that we previously predicted to be miRNAs. Bands within the size range of 21 to 24 nt expected for mature miRNAs were observed for 12 of 13 candidates that we tested, and of these, nine small RNAs had genetic requirements similar to those of typical, known miRNAs (FIG. 8; Table 13A); our blots indicated the small RNAs are present in inflorescence tissue of wildtype, rdr2, rdr6, and a dcl2/3/4 triple mutant, but are absent in dcl1-7. Furthermore, these nine small RNAs can form stable fold-back structures with the flanking genomic sequence, which is typical of a miRNA precursor, and contain the sequenced small RNA within one arm of the hairpin (FIG. 13). Like the majority of known miRNAs, the first 5′ nucleotide of these new miRNAs was predominantly a uracil residue. Based on the mutant analysis and folding, these are new miRNAs. We focused on boxes 3, 9, and 10 (FIG. 7) to identify new miRNAs because sequences in these boxes lacked a match in AtSet2 indicating that the Arabidopsis hairpin sequences were not well conserved with rice. Thus, it is not surprising that among these nine new Arabidopsis miRNAs, five do not have identifiable homologs in rice or Medicago truncatula based on sequence rather than hairpin comparisons. Like other non-conserved miRNAs, such as miR161 and miR163, these five miRNAs are represented by single loci rather than multigene families.

TABLE 13
New miRNAs and other rdr2-independent small RNAs identified by deep sequencing.

| | Wildtype | rdr2 | | | | | | Venn |
|---|---|---|---|---|---|---|---|---|
| | MPSS | MPSS | RNA gel blot results | | | | | position |
| Sequence | (TPQ) | (TPQ) | wt | rdr2 | rdr6 | dcl1-7 | dcl2/3/4 | in FIG. 3 |

A. New miRNAs.

| | | | | | | | | | |
|---|---|---|---|---|---|---|---|---|---|
| miRNA | | | | | | | | | |
| miR771a | TGAGCCTCTGTGGTAGCCCTC | 225 | 669 | + | + | + | − | + | 3 |
| miR772a | TTTTTCCTACTCCGCCCATAC | 7 | 60 | + | + | + | − | + | 9 |
| miR773a | TTTGCTTCCAGCTTTTGTCTC | 98 | 432 | + | + | + | − | + | 9 |
| miR774 | TTGGTTACCCATATGGCCATC | 79 | 242 | + | + | + | − | + | 9 |
| miR775 | TTCGATGTCTAGCAGTGCCAA | 270 | 1196 | − | + | + | − | + | 9 |
| miR776 | TCTAAGTCTTCTATTGATGTT | 7 | 456 | +^{a} | + | + | − | + | 10 |
| miR777 | TACGCATTGAGTTTCGTTGCT | 13 | 62 | + | + | + | − | + | 10 |
| miR778 | TGGCTTGGTTTATGTACACCG | 5 | 40 | + | + | + | − | + | 10 |
| miR779 | TTCTGCTATGTTGCTGCTCAT | 5 | 45 | + | + | + | − | + | 10 |

B. Other RDR2-independent small RNAs.

| | | | | | | | | | |
|---|---|---|---|---|---|---|---|---|---|
| small | | | | | | | | | |
| ID | | | | | | | | | |
| small49 | AGGACCATTGCGGTTGTGCAA | 57 | 343 | + | + | − | − | − | 9 |
| small57 | TGCGGGAAGCATTTGCACATG | 23 | 227 | + | + | +^{b} | + | − | 9 |
| small58 | TACCGCAAGATCAAAGTTCAC | 0 | 17 | +^{b} | + | − | − | − | 10 |
| small62 | CAACTCCAGGATTGGACCAGT | 0 | 47 | − | − | − | − | − | 10 |

See FIG. 8 for RNA gel blot analyses of these sequences.
^{a}Indicates that this small RNA was previously reported as a potential miRNA (Lu et al., 2005), but was not previously
confirmed or submitted to the miRNA registry.
^{b}Indicates the bands for these small RNAs in the indicated background were weak.

C: New miRNAs

| | | Wildtype | rdr2 | | | | | |
|---|---|---|---|---|---|---|---|---|
| | | MPSS | MPSS | RNA gel blot results | | | | |
| miRNA | Sequence | (TPQ) | (TPQ) | wt | rdr2 | rdr6 | dcl1-7 | dcl2/3/4 |
| miR780 | TTTCTTCGTGAATATCTGGCA | 5 | 134 | + | + | + | − | + |
| miR781 | TTAGAGTTTTCTGGATACTTA | 0 | 77 | +^{a} | + | + | − | + |
| miR782 | ACAAACACCTTGGATGTTCTT | 6 | 16 | + | + | + | − | + |
| miR783 | AAGCTTTGCTCGTTCATGTTC | 0 | 35 | + | + | + | − | + |

^{a}Indicates the band for these small RNAs in the indicated background were weak.

D: Predicted targets of the new miRNAs

| | | | # of | Target |
|---|---|---|---|---|
| Small RNA | Target Family^{a} | Target Gene IDs (score) | Targets | Site |
| miR780 | | None | 1 | ORF |
| miR781 | n.a. | At1g26960 (2), At5g23480 (2.5), At1g44900 (2.5) | 3 | ORF |
| miR782 | n.a. | At5g33405 (2.5) | 1 | ORF |
| miR783 | Extra-large G-protein-related | At4g01090 (2) | 1 | ORF |

^{a}“n.a.” indicates “not applicable” because the targets were hypothetical proteins or too diverse to predominantly
represent a single family

Below is a listing of the above sequences including SEQ ID NOs:

| miRNA | Sequence | SEQ ID NO. |
|---|---|---|
| miR771 | TGAGCCTCTGTGGTAGCCCTC | SEQ ID NO: 185,397 |
| miR772 | TTTTTCCTACTCCGCCCATAC | SEQ ID NO: 185,398 |
| miR773 | TTTGCTTCCAGCTTTTGTCTC | SEQ ID NO: 185,399 |
| miR774 | TTGGTTACCCATATGGCCATC | SEQ ID NO: 185,400 |
| miR775 | TTCGATGTCTAGCAGTGCCAA | SEQ ID NO: 185,401 |
| miR776 | TCTAAGTCTTCTATTGATGTT | SEQ ID NO: 185,402 |
| miR777 | TACGCATTGAGTTTCGTTGCT | SEQ ID NO: 185,403 |
| miR778 | TGGCTTGGTTTATGTACACGC | SEQ ID NO: 185,404 |
| miR779 | TTCTGCTATGTTGCTGCTCAT | SEQ ID NO: 185,405 |
| miR780 | TTTCTTCGTGAATATCTGGCA | SEQ ID NO: 185,406 |
| miR781 | TTAGAGTTTTCTGGATACTTA | SEQ ID NO: 185,407 |
| miR782 | ACAAACACCTTGGATGTTCTT | SEQ ID NO: 185,408 |
| miR783 | AAGCTTTGCTCGTTCATGTTC | SEQ ID NO: 185,409 |
| small49 | AGGACCATTGCGGTTGTGCAA | SEQ ID NO: 185,410 |
| small57 | TGCGGGAAGCATTTGCACATG | SEQ ID NO: 185,411 |
| small58 | TACCGCAAGATCAAAGTTCAC | SEQ ID NO: 185,412 |
| small62 | CAACTCCAGGATTGGACCAGT | SEQ ID NO: 185,413 |

[0123] Plant miRNAs function in the regulation of gene expression either by inducing cleavage of their mRNA targets or by translational repression. Therefore, to characterize the function of the new miRNAs identified, regulatory targets were predicted using an algorithm similar to the one described by Jones-Rhoades and Bartel (2004). In general, cleavage is predominant and can be experimentally assessed using a modified 5′-RACE approach to validate these mRNA targets. Targets were predicted with a penalty score of 2.5 or better for seven of the nine new miRNAs (Table 14A), using the 21 nt sequence derived from the 17 nt MPSS tag plus four adjacent nucleotides from the matching genomic location. The new Arabidopsis miRNA genes are expressed at relatively low abundances as demonstrated by the MPSS data and RNA gel blots (FIG. 8), and most of them were also absent or marginally represented in other small RNA libraries sequenced by traditional methods. Consequently, mapping of cleavage products generated from these new miRNAs may be challenging due to the low and/or differential expression of the predicted target mRNAs.

TABLE 14
Predicted targets of new miRNAs and ta-siRNAs.

| | | | | |
|---|---|---|---|---|
| | | | # of | Target |
| Small RNA | Target Family^{a} | Target Gene IDs (score) | Targets | Site |

A. Predicted targets of new miRNAs.

| | | | | |
|---|---|---|---|---|
| miR772 | NBS-LRR disease | At1g51480 (1), At5g43740 (1), At1g12290 | 12 | ORF |
| | resistance genes | (1.5), At1g12210 (1.5), At5g63020 (1.5), | | |
| | | At4g14610 (2), At4g10780 (2), At1g12220 | | |
| | | (2), At1g15890 (2), At1g12280 (2.5), | | |
| | | At5g47260 (2.5), At5g05400 (2.5), | | |
| miR773 | DNA (cytosine-5-)- | At4g14140 (2), At4g08990 (2.5) | 6 | ORF |
| | methyltransferase | | | |
| | and others | At4g05390 (2), At3g15330 (2.5), | | |
| | | At3g16230 (2.5) | | |
| | | At2g22730 (2) | | UTR ? |
| miR774 | F-box family genes | At3g19890 (1), At3g17490 (2) | 2 | ORF |
| miR775 | galactosyltransferase | At1g53290 (2) | 1 | ORF |
| | family gene | | | |
| miR776 | | At5g62310 (1.5) | 2 | ORF |
| | | At1g08760 (1.5) | | UTR ? |
| miR778 | SET domain- | At2g22740 (1.5), At2g35160 (2.5) | 2 | ORF |
| | containing genes | | | |
| miR779 | S-locus protein | At2g19130 (2.5) | 1 | UTR? |
| | kinase | | | |
| miR771 | | None | | |
| miR777 | | None | | |

Score is based on the system described by Jones-Rhoades and Bartel (2004). The number of predicted
targets is based on a cut-off score of 2.5.

B. Predicted targets of new ta-siRNAs.

| | | | | |
|---|---|---|---|---|
| Small49 | n.a. | At4g00600 (3) | 2 | ORF |
| | | At4g00610 (3) | | UTR? |
| Small58 | n.a. | At2g39980 (3) | 9 | UTR? |
| | | At5g20200 (3) | | ORF |

As above, the score is based on the system described by Jones-Rhoades and Bartel (2004), but the
number of predicted targets is based on a cut-off score of 3.
^{a}“n.a.” indicates “not applicable” because the targets were too diverse to predominantly
represent a single family.

[0124] Three new miRNA targets were verified among which two have a predicted role in plant defense responses. Two transcripts encoding the CC-NBS-LRR class of putative disease resistance proteins (At5g43740 and At1 g51480) were experimentally validated as in vivo targets of miR772 (FIG. 14A). The predicted target site for miR772 (SEQ ID NO. 185,398) is the region encoding the P-loop domain which is highly conserved in this class of CC-NBS-LRR disease resistance proteins. Because of this conservation, miR772 is predicted to target at least 10 more relatives of this gene family (Table 14A); the targeting of multiple members of a gene family by a miRNA has previously been reported for several known miRNAs. Interestingly, two additional cleavage sites in At1 g51480 were mapped, one 31 nt upstream and the other 16 nt downstream of the expected miR772 cleavage site (data not shown). This may result from the activities of other small RNAs that have not yet been identified. MiR773 (SEQ ID NO. 185,399), miR774 (SEQ ID NO. 185,400), and miR778 (SEQ ID NO. 185,404) were also predicted to target several members of a gene family; for instance, miR774 is predicted to target transcripts for two genes that encode F-box proteins (FIG. 14B; Table 14A). Notably, several other F-box mRNAs are known targets of miRNA394 and 396, and target validation assays indicated that the mRNA for another member of this extended gene family (At3g19890) is being cleaved by miR774 (FIG. 14B). Although multiple attempts failed to confirm miR778 and miR773-mediated cleavage, the cleavage products of the transcripts predicted to be targets of these miRNAs may be detected in the future, under different conditions that elevate their abundance, for example. These predicted targets include components associated with silencing: two putative SU(VAR)3-9 like histone methyltransferase (SUVH5 and SUVH6) transcripts that are potential targets of miR778 and members of the family of DNA (cytosine-5)-methyltransferases that are potentially targeted by miR773. Previous reports have described miRNA targets involved in silencing, including DCL1 and Argonaute1 (AGO1), targets of miR162 and miR168, respectively.

### EXAMPLE 4

[0125] Other RDR2-independent small RNAs in Arabidopsis. A significant number of Arabidopsis endogenous siRNAs match to various kind of repeats. Xie et al. have shown the requirement of RDR2 and DCL3 for the biosynthesis of a subset of repeat-associated siRNAs. However, considering the presence of multiple RdRps in Arabidopsis and the diversity of repeats, it is unclear which populations of siRNAs generated from repeat sequences are dependent on RDR2 activity. The RDR2-dependent and RDR2-independent inverted and tandem repeats were separately characterized; these repeats are known to be sources of small RNAs. The RDR2-dependent inverted repeat set, comprising a total of 461 genomic locations, were defined as those for which: 1) the sum of abundance is ≧10 TPQ in wildtype; 2) the sum of abundance is at least 10-fold higher in wildtype than in rdr2. Similarly, a repeat was considered to be RDR2-independent only if the sum of abundance from the repeat is ≧10 TPQ and not down-regulated (rdr2/wt≧1) in rdr2. As shown in Table 15, 55 loci were found for this set (12% of the total). The repeat score of the RDR2-independent set was significantly higher than that of the RDR2-dependent set (Mann-Whitney Test: P−value=0.0048). One of the primary determinants of the score is the length of the repeat, suggesting that the RDR2-dependence of inverted repeats may be based on their length. This is consistent with a previous study suggesting that for some inverted repeats, RDR2 may contribute to the formation or stability of a complex that contains active DCL3. For genomic loci that contain long inverted duplications and can form extensive dsRNA structures (“foldbacks”), RDR2 is most likely dispensable for siRNA production (Table 15). One hypothesis is that one or more Dicers can efficiently process long dsRNA precursors even in the absence of RDR2. In agreement with this, closer examination of some RDR2-independent inverted repeats revealed that these loci usually showed complex patterns of siRNA accumulation with different size classes affected by different Dicer mutants (FIG. 15).

[0126] A potential foldback structure in the S-receptor kinase gene (SRK) was identified as one of the most strongly expressed RDR2-independent siRNA-producing regions (FIG. 16). The large number of sequenced small RNAs matching to this stem-loop suggests that it is a substrate for Dicer cleavage. The observation that small85, from this locus, is still evident in the dcl1-7 and dcl2/3/4 mutants but not in a quadruple dcl1/2/3/4 mutant (data not shown) suggests the involvement of multiple Dicers (FIG. 16). Functional copies of SRK and a gene called SCR are important for self-incompatibility in Brassica and Arabidopsis species (such as A. lyrata). Loss of this self-incompatibility system in Arabidopsis thaliana is one of the key factors that led to the selection of A. thaliana as a model system for plants. Suggested explanations for this loss include the fragmented SCR gene or the alternatively spliced SRK transcripts that contain premature nonsense codons that are present in A. thaliana. These data suggest that the SRK gene may be silenced by an inverted-repeat, and these small RNAs may have played a previously-unknown role in the loss of SRK function in A. thaliana.

[0127] Unlike inverted repeats from which dsRNA is readily generated simply by folding of a single RNA, tandem repeats should require an RdRp to form dsRNA structures. Indeed, tandem repeats show a higher overall dependence on RDR2 than inverted repeats (Table 15). Our RDR2-dependent tandem repeat set contained 3491 genomic locations whereas the RDR2-independent tandem repeat set contained only 82 loci (2% of the total). Interestingly, the average length of the tandem repeat unit in RDR2-dependent set is significantly larger than that of the RDR2-independent set (Mann-Whitney Test: P−value=0.0001). Therefore, high quality and long tandem repeats generally appear to require RDR2 to generate dsRNAs and sustain siRNA production. Other RdRps probably facilitate dsRNA production from these short tandem repeats because the Arabidopsis genome contains six RdRp homologs. Without being limited by any particular theory, one likely hypothesis is that different RdRps could function redundantly on tandem repeats.

TABLE 15
RDR2-dependent and RDR2-independent repeats from MPSS libraries.
A. Inverted repeats.

| | | % | | |
|---|---|---|---|---|
| | Score | of Similarity | Gap^{a} | Size |
| RDR2- | 799.4 ± 34.0 | 86.4 ± 0.45 | 5.7 ± 0.4 | 405 ± 17 |
| dependent | | | | |
| RDR2- | 1595.7 ± 232.7 | 86.7 ± 1.5 | 7.1 ± 1.1 | 713 ± 86 |
| independent | | | | |

B. Tandem repeats.

| | | % | | |
|---|---|---|---|---|
| | Score | of Similarity | Count^{b} | Size^{c} |
| RDR2- | 129.8 ± 8.1 | 84.1 ± 0.1 | 3.7 ± 0.06 | 101.4 ± 3.4 |
| dependent | | | | |
| RDR2- | 44.1 ± 12.0 | 81.6 ± 0.9 | 5.1 ± 0.73 | 32.8 ± 4.3 |
| independent | | | | |
| In each case, RDR2-dependent is defined as the sum of abundance is ≧10 TPQ in wild type and the sum of abundance is at least 10-fold higher in wildtype than in rdr2; RDR2-independent is defined as the sum of abundance from the repeat is ≧10 TPQ in rdr2 and the small RNAs are not down-regulated in rdr2 (rdr2/wt ≧1). Mean values for each category are indicated followed by standard error (±). The score was determined by the programs Einverted or Etandem, and represents | | | | |
| # a composite of length and identity for each set of repeats. The complete set of inverted and tandem repeat data is provided in Supplemental File 1. | | | | |

^{a}“Gap” indicates the average gap between arms of the inverted repeat (in nucleotides).
^{b}“Count” refers to the number of tandem repeats.
^{c}“Size” indicates the average length of the repeats at each locus (in nucleotides).

[0128] Known ta-siRNA loci were the most enriched small RNA sources in the rdr2 background. For the four previously characterized ta-siRNA loci, the sum of small RNA abundance was at least 20-fold higher in rdr2 than in wildtype based on the MPSS data (Table 16A and FIG. 17). This greatly exceeds the 1.8 fold for enrichment of total miRNA abundance mentioned earlier. Using known ta-siRNAs as reference, a set of filters to enrich for new ta-siRNAs was developed. Four filters were designed and applied to identify genomic locations representing potential ta-siRNA loci: 1) the cluster contains at least 10 distinct signatures; 2) the sum of abundance for the cluster is ≧100 TPQ; 3) the sum of abundance is at least 10-fold higher in rdr2 than in wild type; 4) the cluster does not match to known miRNAs, ta-siRNAs, transposons, retrotransposons or centromere repeats. These filters generated 28 potential ta-siRNA loci (Table 17). Interestingly, among these, 14 loci (50% of the filter output) corresponded to different members of the PPR gene family, a group of genes known to be targeted by miRNAs, ta-siRNAs and siRNAs. Seven of the 14 remaining candidate loci were further examined by RNA gel blotting. We found two candidates (small49, small58) displaying typical ta-siRNA expression patterns (present in rdr2 but very low in rdr6, dcl1 and dcl2/3/4) (Table 13B and FIG. 10). Furthermore, a clear 21 nt phased pattern was observed at the locus containing small49, consistent with Dicer activity (FIG. 10). With this low stringency filtering protocol that captures all known ta-siRNA loci, relatively few loci were found which had ta-siRNA characteristics. Therefore, we interpret these data as an indication that ta-siRNA genes are rare in the Arabidopsis genome. This result is consistent with the observation that mutations that block ta-siRNA production have a relatively weak phenotype. However, it is also possible that other ta-siRNAs were expressed at very low levels or not at all under these sampling conditions.

TABLE 16
Representation of known ta-siRNA loci in small RNA libraries.
A. MPSS libraries.

| ta- | | start | end | | Sum of | Sum of |
|---|---|---|---|---|---|---|
| siRNA | | coordinates | coordinates | # distinct | abundance | abundance |
| locus | chromosome | (bp) | (bp) | signatures^{a} | in wildtype | in rdr2 |
| TAS1a | 2 | 11728344 | 11729168 | 94 | 115 | 7633 |
| TAS1b | 1 | 18552926 | 18553725 | 63 | 217 | 13115 |
| TAS1c | 2 | 16544582 | 16545150 | 126 | 349 | 10456 |
| TAS2 | 2 | 16546598 | 16547391 | 92 | 457 | 8027 |
| TAS3 | 3 | 5862059 | 5862369 | 81 | 66 | 2094 |

B. 454 libraries.

| ta-siRNA | Wildtype | | | | |
|---|---|---|---|---|---|
| locus | (Col-0) | rdr2 | rdr6 | dcl1-7 | dcl2/3/4 |
| TAS1a | 12 | 41 | 4 | 0 | 0 |
| TAS1b | 7 | 37 | 1 | 0 | 0 |
| TAS1c | 32 | 72 | 3 | 0 | 0 |
| TAS2 | 28 | 71 | 1 | 0 | 0 |
| TAS3 | 13 | 11 | 1 | 5 | 0 |

^{a}The number of distinct signatures was calculated as the sum of distinct signatures in the wildtype and rdr2 libraries.

[0129] TABLE 17
Genomic loci with features of ta-siRNA loci.

| | | | | | | rdr2/ | |
|---|---|---|---|---|---|---|---|
| Chr. # | start | end | hits | rdr2 | wildtype | wildtype | comments^{a} |
| 1 | 4182124 | 4182323 | 11 | 147 | 7 | 21.00 | *** |
| 1 | 4354497 | 4355226 | 20 | 188 | 0 | 188.00 | PPR gene family |
| 1 | 4368786 | 4369099 | 13 | 1028 | 58 | 17.72 | |
| 1 | 5297877 | 5298129 | 65 | 302 | 22 | 13.73 | |
| 1 | 23181100 | 23182270 | 43 | 177 | 1 | 177.00 | PPR gene family |
| 1 | 23208490 | 23209751 | 55 | 563 | 51 | 11.04 | PPR gene family |
| 1 | 23279171 | 23280268 | 19 | 148 | 6 | 24.67 | PPR gene family |
| 1 | 23303291 | 23304571 | 130 | 842 | 70 | 12.03 | PPR gene family |
| 1 | 23305811 | 23307450 | 88 | 740 | 35 | 21.14 | PPR gene family |
| 1 | 23310777 | 23312267 | 105 | 437 | 34 | 12.85 | PPR gene family |
| 1 | 23389058 | 23390321 | 51 | 476 | 81 | 5.88 | PPR gene family |
| 1 | 23392690 | 23393912 | 121 | 901 | 107 | 8.42 | PPR gene family |
| 1 | 23417056 | 23418359 | 134 | 779 | 89 | 8.75 | PPR gene family |
| 1 | 23423630 | 23424830 | 79 | 859 | 50 | 17.18 | PPR gene family |
| 1 | 23493873 | 23495043 | 45 | 172 | 1 | 172.00 | PPR gene family |
| 1 | 23511578 | 23512642 | 96 | 616 | 27 | 22.81 | PPR gene family |
| 1 | 23590850 | 23591523 | 14 | 292 | 6 | 48.67 | PPR gene family |
| 1 | 25282658 | 25283382 | 30 | 713 | 105 | 6.79 | ***^{b} |
| 2 | 819173 | 823134 | 183 | 627 | 34 | 18.44 | *** |
| 2 | 7198149 | 7198613 | 61 | 282 | 13 | 21.69 | |
| 2 | 17231588 | 17231885 | 26 | 127 | 10 | 12.70 | *** |
| 4 | 1318892 | 1319151 | 27 | 133 | 8 | 16.63 | |
| 4 | 11383503 | 11384499 | 78 | 164 | 24 | 6.83 | *** |
| 4 | 13295428 | 13296124 | 16 | 230 | 14 | 16.43 | ***^{b} |
| 5 | 897027 | 897335 | 18 | 517 | 35 | 14.77 | *** |
| 5 | 15774898 | 15775413 | 50 | 282 | 21 | 13.43 | |
| 5 | 16656600 | 16658007 | 36 | 121 | 2 | 60.50 | |
| 5 | 20151669 | 20151865 | 42 | 525 | 46 | 11.41 | |

The filters used to identify these loci are as follows: 1) The sum of abundance in rdr2 ≧ 100. 2) The number of distinct small RNAs in rdr2 ≧ 10. 3) The ratio of rdr2/wt ≧ 5. 4) The loci do not correspond to miRNAs, known ta-siRNAs, transposons, retrotransposons, or centromeric repeats. “Hits” indicates the number of distinct small RNAs found at each locus in both rdr2 and wildtype.
^{a}PPR gene families are noted because they have been described as strong sources of small RNAs (Lu et al., 2005).
*** indicates that RNA gel blots were performed using a small RNA sequence selected from this locus (data not shown), which was confirmed to have the expression pattern of a canonical ts-siRNA (present in wildtype, enriched in rdr2, absent in rdr6, dcl1-7 and dcl2/3/4).
^{b}These loci also showed phasing similar to known ta-siRNAs, and are shown in more detail, along with the RNA gel blot, in FIG. 10.

### EXAMPLE 5

[0130] Small RNA size distribution in rdr2 and the small RNA populations in other mutants. The enrichment of miRNAs and loss of heterochromatic siRNAs in rdr2 should correlate with a shift in the sizes of the small RNA population. Canonical miRNAs are 21 nt while canonical heterochromatic siRNAs are 24 nt. Because the MPSS sequence data is limited to 17 nucleotides for small RNAs, we used the 454 sequence data to determine the size distribution of the small RNAs. As an additional comparison to wildtype and rdr2 inflorescences, small RNAs from the inflorescence of the Arabidopsis mutants rdr6 and dcl1-7 were also sequenced, and compared these to data we recently obtained for dcl2/3/4. All of these mutants are altered in important genes for small RNA biogenesis. The size distribution based on both distinct sequences and total abundances was assessed (FIG. 9). Both rdr2 and the dcl2/3/4 triple mutant showed a similar pattern of 24 nt siRNA reduction and 21 nt miRNA enrichment (FIGS. 9A and 9B). The increase in 21-mers in both mutants reflects an enrichment of miRNAs and is consistent with previous reports (Table 2, FIGS. 9A and 9B). In contrast to miRNAs, 21 nt siRNAs from known ta-siRNA loci can be readily identified from rdr2, but were absent in dcl2/3/4 (Table 16B), consistent with previous observation that DCL4 is required for ta-siRNA production. Nevertheless, a strong correlation between the 454 data of rdr2 and dcl2/3/4/was observed (R²=0.92 for all small RNAs present in both libraries; R²=0.95 for miRNAs, FIG. 18) In contrast, the dcl1-7 mutant demonstrated lower proportion of 21 nt small RNAs compared to wildtype (FIG. 9B), and most of this difference can be attributed to a substantial reduction in known miRNAs (Table 2, FIGS. 9B and 9D). This is consistent with the known reduction in the miRNA complement of dcl1-7. Both the wildtype and rdr6 mutant have substantial peaks at both 21 and 24 nt, as expected. However, analysis of ta-siRNA abundance in the rdr6 mutants has revealed that indeed very few ta-siRNAs were detected in the absence of RDR6 (Table 16B).

[0131] Even the modest depth of the 454 sequencing was sufficient to identify differential effects of specific mutants on the accumulation on miRNA families. Although DCL1 appears to be the only Dicer protein responsible for miRNA biogenesis in Arabidopsis, some miRNAs are affected less than others by the dcl1-7 mutant. The most extreme case was miR168 which did not decrease at all in dcl1-7 based on the 454 data (Table 10). These results are in agreement with Vaucheret et al., who reported no decrease in miR168 levels in three different dcl1 partial loss-of-function mutants. This fits well with the model that miR168 levels are not limited by DCL1 activity but are instead controlled by a feedback loop involving AGO1, the target of miR168; AGO1 is hypothesized to both stabilize miR168 and also slice its own mRNA using miR168 as a guide. The accumulation of miR159 and miR165/166 has also been reported to be somewhat less sensitive to dcl mutations than other miRNAs tested and we also observed these subtleties. Finally, members of the miR161 family, and miR408 are known to be rather insensitive to the dcl1-7 allele and the dcl1-9 allele respectively, results quite consistent with our 454 data. Based on the close recapitulation of published observations with this dcl1 data, it seems likely that other differential accumulation characteristics resulting from this data set represent regulatory characteristics of biological significance. These would include miR167, which is down-regulated in rdr2 compared to wild type, and miR172 which is of particularly high abundance in rdr2 and dcl2/3/4 (Table 10). Another miRNA with unusual characteristics is miR169. This miRNA is an outlier in the correlation of rdr2 and dcl2/3/4 (FIG. 18), having a very low accumulation in rdr2, with high accumulation in dcl2/3/4. Given that miR169 is also increased in rdr6 and encoded by a tandem array of genes, these accumulation results may be due to a secondary level of control by an siRNA-mediated pathway.

[0132] Prior experimental and computational efforts over the last several years have resulted in the identification of 117 miRNA genes in Arabidopsis which can be grouped into 42 families. The miRNAs SEQ ID NO: 185,397-185,409 all represent new families that presumably escaped previous discovery because of their low abundance. These new miRNAs increase the total number of Arabidopsis miRNA families by 25%. Eight of the newly described miRNAs are found only in Arabidopsis. For non-conserved miRNAs, it is more difficult to confidently predict targets because the conservation of the target site cannot be used as a filter to remove false positives. Therefore, a highly stringent score (≦2.5) was applied in target prediction. Potential regulatory targets were found for 10 of the 13 miRNAs. Some of the biological roles of the newly confirmed or predicted targets resemble those of previously identified Arabidopsis miRNAs. At least three of these are bona fide because we could map the cleavage products and we predict that others were simply beneath our threshold of detection. MiR774 (SEQ ID NO. 185,400) targets the mRNA of at least one F-box protein. Combined with six previously identified F-box genes, there are at least seven F-box mRNAs targeted by miRNAs, suggesting that the protein degradation machinery is subject to considerable miRNA regulation. Our observation that miR773 (SEQ ID NO. 185,399) mediates the cleavage of at least two, and potentially more, members of the CC-NBS-LRR class of putative disease resistance proteins suggests a previously unknown role of miRNAs in plant defense. As new and more sensitive methods for verifying miRNA targets are developed, it will be exciting to see if some of the other interesting putative targets such as the methytransferases in FIG. 14 can be verified. While, our target predictions focused on protein-coding genes, at least two miRNAs (mir173 and mir390) target precursors of ta-siRNAs; consequently, there may be additional targets for some of these new miRNAs that have not yet been identified.

[0133] RDR2-independent siRNAs. Tandem repeats are prone to epigenetic silencing mediated by RNA interference. Previous studies have shown that several siRNAs corresponding to tandem repeats in the Arabidopsis genome were absent in rdr2. It has been proposed that tandem repeats can sustain RdRp activity because the first round siRNAs can randomly initiate subsequent rounds of siRNA production and perpetuate the siRNA pool. While this model has not been proven, it is substantiated by our MPSS data indicating that almost all the tandem repeats in the Arabidopsis genome required RDR2 activity to generate siRNAs. However, for some of these tandem repeats, the small RNAs were significantly higher in rdr2 than in wildtype. Something about these tandem repeats, perhaps their relatively low quality, may allow these sequences to be silenced independently of RDR2. In this case, other components of the siRNA biogenesis machinery must be involved in the recognition and generation of siRNAs from these specific loci. This suggests that the biogenesis pathway for repeat-associated siRNAs is more complex than initially believed and the production of some repeat-associated siRNAs does not require RDR2 activity.

[0134] siRNA accumulation from inverted-repeat loci is dependent on RDR2 and DCL3. While DCL3 clearly functions as the ribonuclease to process dsRNA precursors, it is unclear why RDR2 is essential to this pathway. Another example is siRNA production from constructs used for inverted-repeat post-transcriptional gene silencing (IR-PTGS, typically used for RNAi). Although widely-used as a research tool, IR-PTGS remains one of the least understood plant RNA silencing processes. Until recently, no mutant defective in this pathway had been recovered, and IR-transgene induced siRNA accumulation is not affected by single gene mutations. Our analysis of rdr2 by MPSS may provide an explanation for these apparently contradictory observations. In agreement with previous studies, the majority of endogenous inverted-repeats, such as the siRNA02 locus, did not accumulate siRNAs in the absence of RDR2. However, we also identified a group of inverted-repeats which produced siRNAs independently of RDR2. One difference between RDR2-dependent and RDR2-independent inverted repeats is that the latter set tends to have a higher repeat score and larger size of repeat unit. Although it is difficult to rule out alternative hypotheses completely, the simplest interpretation of the data is that RDR2 and DCL3 are required for only a subset of inverted-repeats, generally with low scores and relatively short repeat units. In the case of longer and higher scoring inverted repeats, RDR2 activity (and probably DCL3) may not be required, similar to IR-transgenes. One likely scenario is that the high quality dsRNA structures generated from long inverted repeats are subject to the activity of different Dicers. Consistent with this model, recent analyses of combinatorial Dicer knockout mutants indicated that the functions of different Arabidopsis Dicer proteins are highly redundant.

[0135] The combined deep profiling data from MPSS and full-length sequencing of small RNAs from different genotypes by 454 demonstrate that small RNA sequence libraries are a rich and novel source of data that have yet to be fully exploited in Arabidopsis or any other organism. As sequencing costs drop with the advent of new short-read sequencing technologies, the approaches that we have implemented for the analysis of Arabidopsis mutants are likely to be more broadly applied for experimental investigation of different conditions, mutants, and organisms.

Methods

[0136] Plant growth. All plant material was from Arabidopsis ecotype Col-0. The rdr2, rdr6, dcl1-7, and dcl2/3/4 mutants have been described previously. Inflorescence tissue was harvested from plants grown in soil in a growth chamber with 16 hours of light for 5 weeks. Floral tissue included the inflorescence meristem and early stage floral buds (up to Stage 11/12). Total RNA was isolated using Trizol reagents (Invitrogen, Carlsbad, Calif.). Seedlings were grown at 23° C. under the same 16 hour long day conditions and were harvested after two weeks. Inflorescence and seedling material was harvested approximately at eight hours into the subjective day.

[0137] RNA gel blot analysis. Blot hybridization analysis was performed as described. Total RNA was extracted using Trizol (Invitrogen, Carlsbad, Calif.). High molecular weight (HMW) RNA was precipitated with 5% PEG8000 and 0.5M NaCl. The low molecular weight (LMW) RNA which remained in the supernatant was precipitated with ethanol. LMW RNA was resolved on 15% polyacrylamide gels, blotted to Zeta-Probe GT genomic blotting membrane (Bio-Rad Laboratories, Hercules, Calif.) for 2 hrs at 400 mA, and UV cross-linked. Radiolabeled probes for specific small RNAs were made by end-labeling synthetic DNA oligos (IDT, Coralville, Iowa) with γ-³²P-dATP using T4 polynucleotide kinase (USB, Cleveland, Ohio). Blots were prehybridized and hybridized using ULTRAhyb-Oligo buffer (Ambion, Austin, Tex.). Blots were washed at 42° C. with 2×SSC/0.5% SDS. All blots shown are representative of at least two independent experiments. Locked nucleic acid (LNA) probes were used as indicated in the figure legends; these probes were used when the hybridization signal was not detectable using regular oligonucleotides. LNA oligos were obtained from Sigma-Proligo (St. Louis, Mo.). Hybridization conditions were as described.

[0138] MPSS and 454 data generation and analysis. All MPSS sequencing and analysis was performed essentially as described. The small RNA libraries were constructed as previously described. The raw and normalized MPSS data are available at http://mpss.udel.edu/at. 454 analysis was performed essentially as described. Adapter sequences were identified and removed using local alignments. The summary statistics of the rdr2 and wildtype 454 libraries are described in the text; the dcl1-7 and rdr6 libraries included 12,060 and 16,856 adapter-trimmed small RNA inserts, respectively, and the dcl2/3/4 triple mutant 454 library has recently been described.

[0139] MPSS signatures were compared to the TIGR annotation version 5.0 and assigned signatures to each location at which a perfect match was found. The number of matches was recorded as the “hits”. As previously described, we merged the MPSS sequencing runs and calculated a single abundance normalized to “transcripts per quarter million” (TPQ) after the removal of rRNAs, tRNAs, snoRNAs, or snRNAs signatures. Clustering of small RNAs was based on the previously described proximity-based algorithm, with the same setting of a 500 bp window for the clusters that was used in our prior analysis. Repeat analysis was also performed as described previously using a combination of programs including RepeatMasker (http://www.repeatmasker.org/), Einverted and Etandem.

[0140] A proximity-based algorithm to clusters of small RNA was developed. The clusters were dependent on only the distance between small RNAs and were independent of annotated genomic features such as genes. This facilitated the comparison of clusters across libraries while removing the bias that the annotation might introduce. The optimal cluster size was determined by comparing the results of clustering based on joining signatures within 100, 250 or 500 bp of each other for each library (Table 17A and 17B). Clusters joining small RNAs within 500 bp of each other were used because this size reduced the number of single, unclustered signatures by approximately two-thirds in each library. The exceptionally high average abundance for certain cluster sizes was due to several specific small RNAs such as miRNAs with high abundances. Based on the number of distinct small RNAs contained within each cluster and not the abundance of the signatures, the clusters were then classified in the arbitrarily assigned categories of sparse (1 to 10 signatures), moderate (11 to 25 signatures), or dense (more than 25 signatures).

TABLE 17
Determination of optimal cluster size for small RNA analysis.
A. Inflorescence library^{a}.

| distinct | 100 bp | | | 250 bp | | | 500 bp | | |
|---|---|---|---|---|---|---|---|---|---|
| sigs in | | sig/100 bp | TPQ/sig | | sig/100 bp | TPQ/sig | | sig/100 bp | TPQ/sig |
| clusters | # clusters | avg (std) | avg (std) | # clusters | avg (std) | avg (std) | # clusters | avg (std) | avg (std) |
| 1 | 23,226 | 6 (0) | 3 (9) | 12,589 | 6 (0) | 3 (10) | 7,341 | 6 (0) | 4 (13) |
| 2 | 7,698 | 8 (11) | 4 (13) | 4,402 | 6 (9) | 4 (18) | 2,696 | 5 (9) | 5 (22) |
| 3 | 4,068 | 7 (6) | 4 (14) | 2,509 | 5 (6) | 4 (18) | 1,608 | 4 (5) | 4 (23) |
| 4 | 2,327 | 8 (7) | 5 (27) | 1,641 | 4 (6) | 5 (29) | 1,133 | 3 (5) | 6 (35) |
| 5 | 1,625 | 8 (7) | 7 (85) | 1,173 | 5 (6) | 8 (98) | 857 | 4 (6) | 9 (114) |
| 6 | 1,134 | 9 (9) | 4 (8 ) | 792 | 5 (6) | 4 (6) | 590 | 3 (5) | 4 (7) |
| 7 | 908 | 9 (8) | 23 (402) | 711 | 5 (6) | 28 (453) | 521 | 4 (5) | 37 (529) |
| 8 | 627 | 8 (7) | 21 (308) | 530 | 4 (5) | 22 (334) | 398 | 3 (4) | 9 (88) |
| 9 | 535 | 9 (8) | 9 (68) | 468 | 5 (6) | 9 (72) | 329 | 4 (6) | 32 (376) |
| 10 | 446 | 9 (7) | 8 (66) | 375 | 5 (5) | 9 (77) | 320 | 4 (5) | 10 (83) |
| 11 | 447 | 11 (10) | 9 (56) | 332 | 6 (8) | 9 (65) | 252 | 4 (6) | 10 (74) |
| 12 | 313 | 11 (9) | 13 (79) | 297 | 6 (7) | 12 (81) | 218 | 4 (5) | 12 (79) |
| 13 | 304 | 10 (9) | 5 (9) | 254 | 6 (8) | 4 (3) | 189 | 3 (5) | 8 (51) |
| 14 | 231 | 10 (8) | 6 (15) | 203 | 6 (7) | 6 (15) | 151 | 4 (5) | 6 (17) |
| 15 | 239 | 10 (8) | 5 (3) | 190 | 6 (7) | 6 (24) | 169 | 4 (6) | 6 (25) |
| 16 | 219 | 11 (11) | 6 (14) | 194 | 8 (11) | 8 (32) | 139 | 4 (7) | 8 (37) |
| 17 | 178 | 10 (8) | 6 (9) | 170 | 7 (8) | 5 (9) | 126 | 4 (5) | 4 (2) |
| 18 | 198 | 10 (7) | 7 (12) | 150 | 6 (5) | 5 (4) | 119 | 4 (6) | 5 (5) |
| 19 | 158 | 10 (7) | 8 (14) | 137 | 6 (5) | 5 (9) | 99 | 4 (4) | 4 (2) |
| 20 | 147 | 11 (7) | 8 (16) | 139 | 6 (6) | 7 (14) | 97 | 4 (5) | 6 (14) |
| 21 | 106 | 9 (5) | 7 (15) | 112 | 5 (3) | 7 (15) | 84 | 4 (3) | 7 (14) |
| 22 | 106 | 10 (7) | 6 (9) | 111 | 6 (6) | 5 (9) | 90 | 4 (6) | 6 (10) |
| 23 | 106 | 10 (6) | 6 (12) | 98 | 6 (6) | 6 (12) | 84 | 4 (4) | 8 (18) |
| 24 | 91 | 9 (6) | 6 (4) | 76 | 6 (6) | 4 (2) | 84 | 4 (6) | 4 (3) |
| 25 | 83 | 12 (10) | 8 (15) | 81 | 7 (8) | 7 (14) | 70 | 4 (5) | 7 (13) |
| 26 | 75 | 13 (11) | 12 (21) | 78 | 9 (11) | 11 (19) | 70 | 5 (6) | 9 (18) |
| 27 | 63 | 12 (11) | 9 (17) | 72 | 8 (8) | 9 (16) | 78 | 5 (7) | 7 (14) |
| 28 | 65 | 11 (10) | 8 (15) | 59 | 8 (5) | 7 (12) | 64 | 5 (5) | 7 (12) |
| 29 | 64 | 12 (8) | 9 (12) | 64 | 8 (7) | 7 (12) | 53 | 5 (4) | 7 (13) |
| 30 | 56 | 11 (7) | 10 (15) | 58 | 7 (6) | 8 (14) | 56 | 5 (5) | 4 (2) |
| >30 | 1,154 | 13 (7) | 8 (9) | 1,180 | 8 (7) | 7 (10) | 1,302 | 5 (5) | 6 (10) |
| TOTAL | 46,997 | | | 29,245 | | | 19,387 | | |

B. Seedling library^{b}.

| distinct | 100 bp | | | 250 bp | | | 500 bp | | |
|---|---|---|---|---|---|---|---|---|---|
| sigs in | | sig/100 bp | TPM/sig | | sig/100 bp | TPM/sig | | sig/100 bp | TPM/sig |
| clusters | # clusters | avg (std) | avg (std) | # clusters | avg (std) | avg (std) | # clusters | avg (std) | avg (std) |
| 1 | 15,302 | 6 (0) | 6 (38) | 9,097 | 6 (0) | 6 (48) | 5,810 | 6 (0) | 7 (60) |
| 2 | 4,900 | 8 (8) | 6 (16) | 3,261 | 5 (7) | 6 (17) | 2,148 | 5 (7) | 7 (20) |
| 3 | 2,271 | 8 (7) | 8 (34) | 1,666 | 5 (7) | 8 (40) | 1,169 | 4 (7) | 9 (48) |
| 4 | 1,226 | 8 (7) | 23 (227) | 1,072 | 6 (7) | 19 (232) | 733 | 4 (7) | 24 (281) |
| 5 | 752 | 9 (8) | 38 (673) | 727 | 5 (6) | 38 (685) | 536 | 4 (6) | 13 (89) |
| 6 | 536 | 10 (8) | 55 (686) | 491 | 6 (7) | 58 (716) | 398 | 4 (7) | 69 (795) |
| 7 | 390 | 11 (10) | 70 (712) | 363 | 6 (8) | 50 (693) | 274 | 4 (7) | 109 (1121) |
| 8 | 314 | 12 (9) | 13 (40) | 320 | 7 (8) | 17 (96) | 248 | 5 (7) | 18 (109) |
| 9 | 267 | 11 (9) | 20 (49) | 265 | 7 (7) | 30 (209) | 214 | 4 (5) | 28 (232) |
| 10 | 193 | 12 (10) | 21 (98) | 209 | 8 (9) | 24 (134) | 173 | 5 (6) | 25 (147) |
| 11 | 164 | 13 (11) | 28 (208) | 197 | 7 (10) | 23 (190) | 144 | 5 (7) | 26 (222) |
| 12 | 145 | 12 (11) | 11 (8) | 146 | 7 (9) | 10 (8) | 136 | 4 (5) | 9 (8) |
| 13 | 124 | 12 (10) | 15 (16) | 113 | 7 (9) | 12 (12) | 127 | 3 (5) | 9 (7) |
| 14 | 110 | 10 (9) | 12 (10) | 111 | 5 (5) | 10 (7) | 109 | 4 (4) | 9 (5) |
| 15 | 105 | 14 (12) | 14 (11) | 98 | 8 (10) | 12 (13) | 95 | 5 (7) | 9 (7) |
| 16 | 79 | 17 (15) | 16 (15) | 88 | 7 (7) | 22 (73) | 93 | 5 (6) | 20 (71) |
| 17 | 81 | 12 (8) | 15 (13) | 84 | 7 (8) | 12 (11) | 86 | 5 (8) | 10 (8) |
| 18 | 52 | 15 (15) | 16 (16) | 62 | 6 (8) | 21 (57) | 66 | 4 (7) | 18 (54) |
| 19 | 69 | 15 (16) | 15 (14) | 67 | 7 (6) | 11 (9) | 65 | 4 (4) | 11 (12) |
| 20 | 53 | 14 (12) | 20 (16) | 62 | 7 (8) | 13 (9) | 64 | 3 (3) | 10 (7) |
| 21 | 50 | 16 (14) | 19 (16) | 61 | 10 (10) | 19 (17) | 61 | 6 (7) | 13 (9) |
| 22 | 45 | 17 (16) | 22 (21) | 61 | 8 (10) | 16 (18) | 47 | 5 (6) | 15 (17) |
| 23 | 41 | 13 (11) | 22 (19) | 47 | 8 (10) | 16 (17) | 59 | 4 (4) | 12 (11) |
| 24 | 23 | 14 (10) | 17 (14) | 33 | 6 (5) | 13 (15) | 31 | 5 (5) | 14 (16) |
| 25 | 31 | 19 (13) | 23 (20) | 52 | 8 (10) | 16 (17) | 44 | 6 (8) | 15 (17) |
| 26 | 18 | 16 (12) | 26 (21) | 42 | 7 (10) | 16 (15) | 42 | 6 (10) | 14 (15) |
| 27 | 24 | 18 (15) | 22 (17) | 29 | 6 (5) | 13 (14) | 32 | 4 (4) | 13 (13) |
| 28 | 27 | 15 (13) | 25 (18) | 28 | 9 (9) | 17 (14) | 30 | 4 (4) | 16 (17) |
| 29 | 26 | 36 (28) | 32 (16) | 22 | 9 (11) | 17 (15) | 26 | 5 (5) | 14 (13) |
| 30 | 18 | 23 (20) | 31 (14) | 23 | 7 (6) | 15 (15) | 22 | 3 (3) | 12 (11) |
| >30 | 457 | 21 (14) | 31 (12) | 441 | 14 (10) | 25 (14) | 413 | 5 (6) | 14 (12) |
| TOTAL | 27,893 | | | 19,338 | | | 13,495 | | |

Excludes clusters containing any signatures matching to annotated rRNAs, tRNAs, snoRNAs, and snRNAs.
^{a}Includes 239,745 distinct signatures.
^{b}Includes 106,088 distinct signatures.

[0141] Repeats in the Arabidopsis genome were identified using a combination of programs. For the identification of transposons and retrotransposons, we utilized a dataset comprised of those sequences annotated by TIGR (version 5.0) augmented with the results of RepeatMasker™. For tandem and inverted repeats, we used the programs Einverted and Etandem.

[0142] While most Arabidopsis miRNAs have been identified by traditional cloning and sequencing of small RNAs, it is unlikely that these screens are saturating for rare or tissue-specific miRNAs. The need for additional methods of miRNA identification led to the development of bioinformatics methods for the prediction of miRNAs. Most of these computer algorithms rely on evolutionary conservation of miRNA sequences between different species, and therefore are limited to the detection of only conserved miRNAs, although at least one analysis has relied only on intra-genomic comparisons. Even these predictions ultimately require either high-throughput or highly sensitive methods for validation. With MPSS and other high-throughput sequencing technologies, the sequencing of small RNAs is no longer a limiting factor in the discovery of novel miRNAs. However, by combining these approaches with mutants in which miRNAs are significantly enriched compared with wild type, such as rdr2 and dcl2/3/4, we can efficiently delineate the small RNAs as miRNAs, siRNAs, or other categories. Even at relatively low sampling depths, many known miRNAs were observed and their abundance was measured. Compared to wildtype, the MPSS data for rdr2 was dramatically simplified and “cleaned up” of siRNAs, making miRNA candidates much easier to identify. 454 analysis indicated that the rdr2 and dcl2/3/4 triple mutants are most similar in their small RNA profiles, consistent with the idea that these genes may be in the same pathway involved in heterochromatic siRNA production and a mutant of either type (rdr2 and dcl2/3/4) enriches for miRNAs.

[0143] The following references are incorporated herein by reference in their entirety.

### REFERENCES

[0144] 1. Bartel, B. & Bartel, D. P. MicroRNAs: at the root of plant development? Plant Physiol 132, 709-17 (2003).
[0145] 2. Carrington, 3. C. & Ambros, V. Role of microRNAs in plant and animal development. Science 301, 336-8 (2003).
[0146] 3. Meister, G. & Tuschl, T. Mechanisms of gene silencing by double-stranded RNA. Nature 431, 343-9 (2004).
[0147] 4. Baulcombe, D. RNA silencing in plants. Nature 431, 356-63 (2004).
[0148] 5. Bernstein, E., Caudy, A. A., Hammond, S. M. & Hannon, G. J. Role for a bidentate ribonuclease in the initiation step of RNA interference. Nature 409, 363-6 (2001).
[0149] 6. Grishok, A. et al. Genes and mechanisms related to RNA interference regulate expression of the small temporal RNAs that control C. elegans developmental timing. Cell 106, 23-34 (2001).
[0150] 7. Ketting, R. F. et al. Dicer functions in RNA interference and in synthesis of small RNA involved in developmental timing in C. elegans. Genes Dev 15, 2654-9 (2001).
[0151] 8. Hutvagner, G. et al. A cellular function for the RNA-interference enzyme Dicer in the maturation of the let-7 small temporal RNA. Science 293, 834-8 (2001).
[0152] 9. Lee, Y. S. et al. Distinct roles for Drosophila Dicer-1 and Dicer-2 in the siRNA/miRNA silencing pathways. Cell 117, 69-81 (2004).
[0153] 10. Mallory, A. C. &Vaucheret, H. MicroRNAs: something important between the genes. Curr Opin Plant Biol 7, 120-5 (2004).
[0154] 11. Bartel, D. P. MicroRNAs: genomics, biogenesis, mechanism, and function. Cell 116, 281-97 (2004).
[0155] 12. Xie, Z. et al. Genetic and Functional Diversification of Small RNA Pathways in Plants. PLoS Biol 2, E104 (2004).
[0156] 13. Hannon, G. J. RNA interference. Nature 418, 244-51 (2002).
[0157] 14. Verdel, A. et al. RNAi-mediated targeting of heterochromatin by the RITS complex. Science 303, 672-6 (2004).
[0158] 15. Schwarz, D. S. et al. Asymmetry in the assembly of the RNAI enzyme complex. Cell 115, 199-208 (2003).
[0159] 16. Tang, G., Reinhart, B. J., Bartel, D. P. & Zamore, P. D. A biochemical framework for RNA silencing in plants. Genes Dev 17, 49-63 (2003).
[0160] 17. Llave, C., Xie, Z., Kasschau, K. D. & Carrington, J. C. Cleavage of Scarecrow-like mRNA targets directed by a class of Arabidopsis miRNA. Science 297, 2053-6 (2002).
[0161] 18. Aukerman, M. J. & Sakai, H. Regulation of flowering time and floral organ identity by a MicroRNA and its APETALA2-like target genes. Plant Cell 15, 2730-41 (2003).
[0162] 19. Chen, X. A microRNA as a translational repressor of APETALA2 in Arabidopsis flower development. Science 303, 2022-5 (2004).
[0163] 20. Vella, M. C., Choi, E. Y., Lin, S. Y., Reinert, K. & Slack, F. J. The C. elegans microRNA let-7 binds to imperfect let-7 complementary sites from the lin-41 3′UTR. Genes Dev 18, 132-7 (2004).
[0164] 21. Reinhart, B. I., Weinstein, E. G., Rhoades, M. W., Bartel, B. & Bartel, D. P. MicroRNAs in plants. Genes Dev. 16, 1616-1626 (2002).
[0165] 22. Aravin, A. A. et al. The small RNA profile during Drosophila melanogaster development. Dev Cell 5, 337-50 (2003).
[0166] 23. Lagos-Quintana, M., Rauhut, R., Lendeckel, W. & Tuschl, T. Identification of novel genes coding for small expressed RNAs. Science 294, 853-8 (2001).
[0167] 24. Llave, C., Kasschau, K. D., Rector, M. A. & Carrington, I. C. Endogenous and silencing-associated small RNAs in plants. Plant Cell 14, 1605-19 (2002).
[0168] 25. Krichevsky, A. M., King, K. S., Donahue, C. P., Khrapko, K. & Kosik, K. S. A microRNA array reveals extensive regulation of microRNAs during brain development. Rna 9, 1274-81 (2003).
[0169] 26. Barad, O. et al. MicroRNA expression detected by oligonucleotide microarrays: system establishment and expression profiling in human tissues. Genome Res 14, 2486-94 (2004).
[0170] 27. Babak, T., Zhang, W., Morris, Q., Blencowe, B. J. & Hughes, T. R. Probing microRNAs with microarrays: tissue specificity and functional inference. Rna 10, 1813-9 (2004).
[0171] 28. Allawi, H. T. et al. Quantitation of microRNAs using a modified Invader assay. Rna 10, 1153-61 (2004).
[0172] 29. Brenner, S. et al. Gene expression analysis by massively parallel signature sequencing (MPSS) on microbead arrays. Nat Biotechnol 18, 630-4 (2000).
[0173] 30. Hamilton, A. J. & Baulcombe, D. C. A species of small antisense RNA in posttranscriptional gene silencing in plants. Science 286, 950-2 (1999).
[0174] 31. Brenner, S. et al. In vitro cloning of complex mixtures of DNA on microbeads: physical separation of differentially expressed cDNAs. Proc Natl Acad Sci USA 97, 1665-70 (2000).
[0175] 32. Wortman, 1. R. et al. Annotation of the Arabidopsis genome. Plant Physiol 132, 461-8 (2003).
[0176] 33. Meyers, B. C. et al. The Use of MPSS for Whole-Genome Transcriptional Analysis in Arabidopsis. Genome Res 14, 1641-53 (2004).
[0177] 34. Park, W., Li, J., Song, R., Messing, J. & Chen, X. CARPEL FACTORY, a Dicer homolog, and HEN1, a novel protein, act in microRNA metabolism in Arabidopsis thaliana. Curr Biol 12, 1484-95 (2002).
[0178] 35. Sunkar, R. & Zhu, J. K. Novel and stress-regulated microRNAs and other small RNAs from Arabidopsis. Plant Cell 16, 2001-19 (2004).
[0179] 36. Sijen, T. & Plasterk, R. H. Transposon silencing in the Caenorhabditis elegans germ line by natural RNAi. Nature 426, 310-4 (2003).
[0180] 37. Lippman, Z. & Martienssen, R. The role of RNA interference in heterochromatic silencing. Nature 431, 364-70 (2004).
[0181] 38. Parizotto, E. A., Dunoyer, P., Rahm, N., Himber, C. & Voinnet, O. In vivo investigation of the transcription, processing, endonucleolytic activity, and functional relevance of the spatial distribution of a plant miRNA. Genes Dev 18, 2237-42 (2004).
[0182] 39. Zamore, P. D., Tuschl, T., Sharp, P. A. & Bartel, D. P. RNAi: double-stranded RNA directs the ATP-dependent cleavage of mRNA at 21 to 23 nucleotide intervals. Cell 101, 25-33 (2000).
[0183] 40. Jackson, A. L. & Linsley, P. S. Noise amidst the silence: off-target effects of siRNAs? Trends Genet 20, 521-4 (2004).
[0184] 41. Lim, L. P. et al. Microarray analysis shows that some microRNAs downregulate large numbers of target mRNAs. Nature 433, 769-73 (2005).
[0185] 42. Meyers, B. C., Tingey, S. V. & Morgante, M. Abundance, distribution, and transcriptional activity of repetitive elements in the maize genome. Genome Res 11, 1660-76 (2001).
[0186] 43. Meyers, B. C. et al. Analysis of the transcriptional complexity of Arabidopsis by massively parallel signature sequencing. Nat Biotechnol 22, 1006-1011 (2004).
[0187] 44. Melquist, S., Luff, B. & Bender, J. Arabidopsis PAI gene arrangements, cytosine methylation and expression. Genetics 153, 401-13 (1999).
[0188] 45. Yamada, K. et al. Empirical analysis of transcriptional activity in the Arabidopsis genome. Science 302, 842-6 (2003).
[0189] 46. Eszterhas, S. K., Bouhassira, E. E., Martin, D. I. & Fiering, S. Transcriptional interference by independently regulated genes occurs in any relative arrangement of the genes and is influenced by chromosomal integration position. Mol Cell Biol 22, 469-79 (2002).
[0190] 47. Ambros, V. et al. A uniform system for microRNA annotation. RNA 9, 277-9 (2003).
[0191] 48. Lim, L. P. et al. The microRNAs of Caenorhabditis elegans. Genes Dev 17, 991-1008 (2003).
[0192] 49. Lai, E. C., Tomancak, P., Williams, R. W. & Rubin, G. M. Computational identification of Drosophila microRNA genes. Genome Biol 4, R42 (2003).
[0193] 50. Adai, A. et al. Computational prediction of miRNAs in Arabidopsis thaliana. Genome Res 15, 78-91 (2005).
[0194] 51. Jones-Rhoades, M. W. & Bartel, D. P. Computational identification of plant microRNAs and their targets, including a stress-induced miRNA. Mol Cell 14, 787-99 (2004).
[0195] 52. Bonnet, E., Wuyts, J., Rouze, P. &Van de Peer, Y. Detection of 91 potential conserved plant microRNAs in Arabidopsis thaliana and Oryza sativa identifies important target genes. Proc Natl Acad Sci USA 101, 11511-6 (2004).
[0196] 53. Ruvkun, G. Molecular biology. Glimpses of a tiny RNA world. Science 294, 797-9 (2001).
[0197] 54. Peragine, A., Yoshikawa, M., Wu, G., Albrecht, H. L. & Poethig, R. S. SGS3 and SGS2/SDE1/RDR6 are required for juvenile development and the production of trans-acting siRNAs in Arabidopsis. Genes Dev 18, 2368-79 (2004).
[0198] 55. Vazquez, F. et al. Endogenous trans-acting siRNAs regulate the accumulation of Arabidopsis mRNAs. Mol Cell 16, 69-79 (2004).
[0199] 56. Rice, P., Longden, I. & Bleasby, A. EMBOSS: the European Molecular Biology Open Software Suite. Trends Genet 16, 276-7 (2000).
[0200] 57. Jones-Rhoades, M. W. & Bartel, D. P. Computational identification of plant microRNAs and their targets, including a stress-induced miRNA. Mol Cell 14, 787-99 (2004).
[0201] 58. Adai, A., C. Johnson, S. Mlotshwa, S. Archer-Evans, V. Manocha, V. Vance, and V. Sundaresan. 2005. Computational prediction of miRNAs in Arabidopsis thaliana. Genome Res 15: 78-91.
[0202] 59. Allen, E., Z. Xie, A. M. Gustafson, and J. C. Carrington. 2005. microRNA-directed phasing during trans-acting siRNA biogenesis in plants. Cell 121: 207-221.
[0203] 60. Allen, E., Z. Xie, A. M. Gustafson, G. H. Sung, J. W. Spatafora, and J. C. Carrington. 2004. Evolution of microRNA genes by inverted duplication of target gene sequences in Arabidopsis thaliana. Nat Genet 36: 1282-1290.
[0204] 61. Ambros, V., B. Bartel, D. P. Bartel, C. B. Burge, J. C. Carrington, X. Chen, G. Dreyfuss, S. R. Eddy, S. Griffiths-Jones, M. Marshall, M. Matzke, G. Ruvkun, and T. Tuschl. 2003. A uniform system for microRNA annotation. RNA 9: 277-279.
[0205] 62. Arazi, T., M. Talmor-Neiman, R. Stav, M. Riese, P. Huijser, and D. C. Baulcombe. 2005. Cloning and characterization of micro-RNAs from moss. Plant J 43: 837-848.
[0206] 63. Axtell, M. J. and D. P. Bartel. 2005. Antiquity of microRNAs and their targets in land plants. Plant Cell 17: 1658-1673.
[0207] 64. Bentwich, I., A. Avniel, Y. Karov, R. Aharonov, S. Gilad, O. Barad, A. Barzilai, P. Einat, U. Einav, E. Meiri, E. Sharon, Y. Spector, and Z. Bentwich. 2005. Identification of hundreds of conserved and nonconserved human microRNAs. Nat Genet37: 766-770.
[0208] 65. Bonnet, E., J. Wuyts, P. Rouze, and Y. Van de Peer. 2004. Detection of 91 potential conserved plant microRNAs in Arabidopsis thaliana and Oryza sativa identifies important target genes. Proc Natl Acad Sci USA 101: 11511-11516.
[0209] 66. Borsani, O., J. Zhu, P. E. Verslues, R. Sunkar, and J. K. Zhu. 2005. Endogenous siRNAs Derived from a Pair of Natural cis-Antisense Transcripts Regulate Salt Tolerance in Arabidopsis. Cell 123: 1279-1291.
[0210] 67. Brenner, S., M. Johnson, J. Bridgham, G. Golda, D. H. Lloyd, D. Johnson, S. Luo, S. McCurdy, M. Foy, M. Ewan, R. Roth, D. George, S. Eletr, G. Albrecht, E. Vermaas, S. R. Williams, K. Moon, T. Burcham, M. Pallas, R. B. DuBridge, J. Kirchner, K. Fearon, J. Mao, and K. Corcoran. 2000a. Gene expression analysis by massively parallel signature sequencing (MPSS) on microbead arrays. Nat Biotechnol 18: 630-634.
[0211] 68. Brenner, S., S. R. Williams, E. H. Vermaas, T. Storck, K. Moon, C. McCollum, J. I. Mao, S. Luo, J. J. Kirchner, S. Eletr, R. B. DuBridge, T. Burcham, and G. Albrecht. 2000b. In vitro cloning of complex mixtures of DNA on microbeads: physical separation of differentially expressed cDNAs. Proc NatlAcad Sci USA 97:1665-1670.
[0212] 69. Brodersen, P. and O. Voinnet. 2006. The diversity of RNA silencing pathways in plants. Trends Genet In Press.
[0213] 70. Chen, X. 2005. microRNA biogenesis and function in plants. FEBS Lett 579: 5923-5931.
[0214] 71. Gasciolli, V., A. C. Mallory, D. P. Bartel, and H. Vaucheret. 2005. Partially redundant functions of Arabidopsis DICER-like enzymes and a role for DCL4 in producing trans-acting siRNAs. Curr Biol 15: 1494-1500.
[0215] 72. Grad, Y., J. Aach, G. D. Hayes, B. J. Reinhart, G. M. Church, G. Ruvkun, and J. Kim. 2003. Computational and experimental identification of C. elegans microRNAs. Mol Cell 11: 1253-1263.
[0216] 73. Grundhoff, A., C. S. Sullivan, and D. Ganem. 2006. A combined computational and microarray-based approach identifies novel microRNAs encoded by human gamma-herpesviruses. RNA 12: 733-750.
[0217] 74. Gustafson, A. M., E. Allen, S. Givan, D. Smith, J. C. Carrington, and K. D. Kasschau. 2005. ASRP: the Arabidopsis Small RNA Project Database. Nucleic Acids Res 33: D637-640.
[0218] 75. Henderson, I. R., X. Zhang, C. Lu, L. Johnson, B. C. Meyers, P. J. Green, and S. E. Jacobsen. 2006. Dissecting Arabidopsis DICER function in small RNA processing, gene silencing, and DNA methylation patterning. Nat Genet In press.
[0219] 76. Jones-Rhoades, M. W. and D. P. Bartel. 2004. Computational identification of plant microRNAs and their targets, including a stress-induced miRNA. Mol Cell 14: 787-799.
[0220] 77. Jones-Rhoades, M. W., D. P. Bartel, and B. Bartel. 2006. MicroRNAs and their regulatory roles in plants. Annu Rev Plant Biol 57: 19-53.
[0221] 78. Kasschau, K. D., Z. Xie, E. Allen, C. Llave, E. J. Chapman, K. A. Krizan, and J. C. Carrington. 2003. P1/HC-Pro, a viral suppressor of RNA silencing, interferes with Arabidopsis development and miRNA function. Dev Cell 4: 205-217.
[0222] 79. Kurihara, Y., Y. Takashi, and Y. Watanabe. 2006. The interaction between DCL1 and HYL1 is important for efficient and precise processing of pri-miRNA in plant microRNA biogenesis. RNA 12: 206-212.
[0223] 80. Kusaba, M., K. Dwyer, J. Hendershot, J. Vrebalov, J. B. Nasrallah, and M. E. Nasrallah. 2001. Self-incompatibility in the genus Arabidopsis: characterization of the S locus in the outcrossing A. lyrata and its autogamous relative A. thaliana. Plant Cell 13: 627-643.
[0224] 81. Lippman, Z. and R. Martienssen. 2004. The role of RNA interference in heterochromatic silencing. Nature 431: 364-370.
[0225] 82. Llave, C., K. D. Kasschau, M. A. Rector, and J. C. Carrington. 2002a. Endogenous and silencing-associated small RNAs in plants. Plant Cell 14: 1605-1619.
[0226] 83. Llave, C., Z. Xie, K. D. Kasschau, and J. C. Carrington. 2002b. Cleavage of Scarecrow-like mRNA targets directed by a class of Arabidopsis miRNA. Science 297: 2053-2056.
[0227] 84. Lu, C., S. S. Tej, S. Luo, C. D. Haudenschild, B. C. Meyers, and P. J. Green. 2005. Elucidation of the small RNA component of the transcriptome. Science 309: 1567-1569.
[0228] 85. Margulies, M., M. Egholm, W. E. Altman, S. Attiya, J. S. Bader, L. A. Bemben, J. Berka, M. S. Braverman, Y. J. Chen, Z. Chen, S. B. Dewell, L. Du, J. M. Fierro, X. V. Gomes, B. C. Godwin, W. He, S. Helgesen, C. H. Ho, G. P. Irzyk, S. C. Jando, M. L. Alenquer, T. P. Jarvie, K. B. Jirage, J. B. Kim, J. R. Knight, J. R. Lanza, J. H. Leamon, S. M. Lefkowitz, M. Lei, J. Li, K. L. Lohman, H. Lu, V. B. Makhijani, K. E. McDade, M. P. McKenna, E. W. Myers, E. Nickerson, J. R. Nobile, R. Plant, B. P. Puc, M. T. Ronan, G. T. Roth, G. J. Sarkis, J. F. Simons, J. W. Simpson, M. Srinivasan, K. R. Tartaro, A. Tomasz, K. A. Vogt, G. A. Volkmer, S. H. Wang, Y. Wang, M. P. Weiner, P. Yu, R. F. Begley, and J. M. Rothberg. 2005. Genome sequencing in microfabricated high-density picolitre reactors. Nature 437: 376-380.
[0229] 86. Martienssen, R. A. 2003. Maintenance of heterochromatin by RNA interference of tandem repeats. Nat Genet 35: 213-214.
[0230] 87. May, B. P., Z. B. Lippman, Y. Fang, D. L. Spector, and R. A. Martienssen. 2005. Differential Regulation of Strand-Specific Transcripts from Arabidopsis Centromeric Satellite Repeats. PLoS Genet 1: e79.
[0231] 88. Meyers, B. C., A. Kozik, A. Griego, H. Kuang, and R. W. Michelmore. 2003. Genome-wide analysis of NBS-LRR-encoding genes in Arabidopsis. Plant Cell 15: 809-834.
[0232] 89. Meyers, B. C., F. F. Souret, C. Lu, and P. J. Green. 2006. Sweating the small stuff: microRNA discovery in plants. Curr Opin Biotechnol 17: 139-146.
[0233] 90. Meyers, B. C., S. S. Tej, T. H. Vu, C. D. Haudenschild, V. Agrawal, S. B. Edberg, H. Ghazal, and S. Decola. 2004. The use of MPSS for whole-genome transcriptional analysis in Arabidopsis. Genome Res 14:1641-1653.
[0234] 91. Nasrallah, M. E., P. Liu, and J. B. Nasrallah. 2002. Generation of self-incompatible Arabidopsis thaliana by transfer of two S locus genes from A. lyrata. Science 297: 247-249.
[0235] 92. Naumann, K., A. Fischer, I Hofmann, V. Krauss, S. Phalke, K. Irmler, G. Hause, A. C. Aurich, R. Dorn, T. Jenuwein, and G. Reuter. 2005. Pivotal role of AtSUVH2 in heterochromatic histone methylation and gene silencing in Arabidopsis. EMBO J. 24: 1418-1429.
[0236] 93. Park, W., J. Li, R. Song, J. Messing, and X. Chen. 2002. CARPEL FACTORY, a Dicer homolog, and HEN1, a novel protein, act in microRNA metabolism in Arabidopsis thaliana. Curr Biol 12: 1484-1495.
[0237] 94. Peragine, A., M. Yoshikawa, G. Wu, H. L. Albrecht, and R. S. Poethig. 2004. SGS3 and SGS2/SDE1/RDR6 are required for juvenile development and the production of trans-acting siRNAs in Arabidopsis. Genes Dev 18: 2368-2379.
[0238] 95. Redei, G. P. 1975. Arabidopsis as a genetic tool. Annu Rev Genet 9: 111-127.
[0239] 96. Reinhart, B. J., E. G. Weinstein, M. W. Rhoades, B. Bartel, and D. P. Bartel. 2002. MicroRNAs in plants. Genes Dev. 16:1616-1626.
[0240] 97. Rhoades, M. W., B. J. Reinhart, L. P. Lim, C. B. Burge, B. Bartel, and D. P. Bartel. 2002. Prediction of plant microRNA targets. Cell 110: 513-520.
[0241] 98. Rice, P., I. Longden, and A. Bleasby. 2000. EMBOSS: the European Molecular Biology Open Software Suite. Trends Genet 16: 276-277.
[0242] 99. Sunkar, R. and J. K. Zhu. 2004. Novel and stress-regulated microRNAs and other small RNAs from Arabidopsis. Plant Cell 16: 2001-2019.
[0243] 100. Valoczi, A., C. Hornyik, N. Varga, J. Burgyan, S. Kauppinen, and Z. Havelda. 2004. Sensitive and specific detection of microRNAs by northern blot analysis using LNA-modified oligonucleotide probes. Nucleic Acids Res 32: el 75.
[0244] 101. Vaucheret, H. 2006. Post-transcriptional small RNA pathways in plants: mechanisms and regulations. Genes Dev 20: 759-771.
[0245] 102. Vaucheret, H., A. C. Mallory, and D. P. Bartel. 2006. AGO1 homeostasis entails coexpression of MIR168 and AGO1 and preferential stabilization of miR168 by AGO1. Mol Cell 22: 129-136.
[0246] 103. Vaucheret, H., F. Vazquez, P. Crete, and D. P. Bartel. 2004. The action of ARGONAUTE1 in the miRNA pathway and its regulation by the miRNA pathway are crucial for plant development. Genes Dev 18: 1187-1197.
[0247] 104. Vazquez, F., H. Vaucheret, R. Rajagopalan, C. Lepers, V. Gasciolli, A. C. Mallory, J. L. Hilbert, D. P. Bartel, and P. Crete. 2004. Endogenous trans-acting siRNAs regulate the accumulation of Arabidopsis mRNAs. Mol Cell 16: 69-79.
[0248] 105. Wang, X. J., J. L. Reyes, N. H. Chua, and T. Gaasterland. 2004. Prediction and identification of Arabidopsis thaliana microRNAs and their mRNA targets. Genome Biol 5: R65.
[0249] 106. Wassenegger, M. and G. Krczal. 2006. Nomenclature and functions of RNA-directed RNA polymerases. Trends Plant Sci 11: 142-151.

[0250] 107. Wortman, J. R., B. J. Haas, L. I. Hannick, R. K. Smith, Jr., R. Maiti, C. M. Ronning, A. P. Chan, C. Yu, M. Ayele, C. A. Whitelaw, O. R. White, and C. D. Town. 2003. Annotation of the Arabidopsis genome. Plant Physiol 132: 461-468.
[0251] 108. Xie, Z., E. Allen, N. Fahlgren, A. Calamar, S. A. Givan, and J. C. Carrington. 2005a. Expression of Arabidopsis MIRNA Genes. Plant Physiol 138: 2145-2154.
[0252] 109. Xie, Z., E. Allen, A. Wilken, and J. C. Carrington. 2005b. DICER-LIKE 4 functions in trans-acting small interfering RNA biogenesis and vegetative phase change in Arabidopsis thaliana. Proc Natl Acad Sci USA 102:12984-12989.
[0253] 110. Xie, Z., L. K. Johansen, A. M. Gustafson, K. D. Kasschau, A. D. Lellis, D. Zilberman, S. E. Jacobsen, and J. C. Carrington. 2004. Genetic and functional diversification of small RNA pathways in plants. PLoS Biol 2: E104.
[0254] 111. Xie, Z., K. D. Kasschau, and J. C. Carrington. 2003. Negative feedback regulation of Dicer-Like1 in Arabidopsis by microRNA-guided mRNA degradation. Curr Biol 13: 784-789.
[0255] 112. Yoshikawa, M., A. Peragine, M. Y. Park, and R. S. Poethig. 2005. A pathway for the biogenesis of trans-acting siRNAs in Arabidopsis. Genes Dev 19: 2164-2175.
[0256] 113. Yu, D., B. Fan, S. A. MacFarlane, and Z. Chen. 2003. Analysis of the involvement of an inducible Arabidopsis RNA-dependent RNA polymerase in antiviral defense. Mol Plant Microbe Interact 16: 206-216.
[0257] 114. Zhang, B., X. Pan, C. H. Cannon, G. P. Cobb, and T. A. Anderson. 2006. Conservation and divergence of plant microRNA genes. Plant J 46: 243-259.

The application's sequence listing, which the Patent Office published only in electronic form, follows.

SEQUENCE LISTING (185413 sequences)

SEQ ID NO: 1 - DNA, 17 bp, Arabidopsis thaliana
aaaaaaaaaaacaggga

SEQ ID NO: 2 - DNA, 17 bp, Arabidopsis thaliana
aaaaaaaaaattttgct

SEQ ID NO: 3 - DNA, 17 bp, Arabidopsis thaliana
aaaaaaaaatcggatca

SEQ ID NO: 4 - DNA, 17 bp, Arabidopsis thaliana
aaaaaaaacctggtcgg

SEQ ID NO: 5 - DNA, 17 bp, Arabidopsis thaliana
aaaaaaaccacagttgc

SEQ ID NO: 6 - DNA, 17 bp, Arabidopsis thaliana
aaaaaaacccacggcac

SEQ ID NO: 7 - DNA, 17 bp, Arabidopsis thaliana
aaaaaaacccgcggcac

SEQ ID NO: 8 - DNA, 17 bp, Arabidopsis thaliana
aaaaaaacgagttggcc

SEQ ID NO: 9 - DNA, 17 bp, Arabidopsis thaliana
aaaaaaacgctgagaag

SEQ ID NO: 10 - DNA, 17 bp, Arabidopsis thaliana
aaaaaaacgcttggctg

SEQ ID NO: 11 - DNA, 17 bp, Arabidopsis thaliana
aaaaaaacgttgacccg

SEQ ID NO: 12 - DNA, 17 bp, Arabidopsis thaliana
aaaaaaactcatcatgg

SEQ ID NO: 13 - DNA, 17 bp, Arabidopsis thaliana
aaaaaaactctaccccg

SEQ ID NO: 14 - DNA, 17 bp, Arabidopsis thaliana
aaaaaaactgagaaaat

SEQ ID NO: 15 - DNA, 17 bp, Arabidopsis thaliana
aaaaaaagtctgtcagt

SEQ ID NO: 16 - DNA, 17 bp, Arabidopsis thaliana
aaaaaaagtgaacgacc

SEQ ID NO: 17 - DNA, 17 bp, Arabidopsis thaliana
aaaaaaattagcggatc

SEQ ID NO: 18 - DNA, 17 bp, Arabidopsis thaliana
aaaaaacaaattgtttc

SEQ ID NO: 19 - DNA, 17 bp, Arabidopsis thaliana
aaaaaacaactgattta

SEQ ID NO: 20 - DNA, 17 bp, Arabidopsis thaliana
aaaaaacagagctctct

SEQ ID NO: 21 - DNA, 17 bp, Arabidopsis thaliana
aaaaaacagggcttctt

SEQ ID NO: 22 - DNA, 17 bp, Arabidopsis thaliana
aaaaaacaggttttgcc

SEQ ID NO: 23 - DNA, 17 bp, Arabidopsis thaliana
aaaaaacagtctccggc

SEQ ID NO: 24 - DNA, 17 bp, Arabidopsis thaliana
aaaaaacagtgcggctt

SEQ ID NO: 25 - DNA, 17 bp, Arabidopsis thaliana
aaaaaacatttccgtgg

SEQ ID NO: 26 - DNA, 17 bp, Arabidopsis thaliana
aaaaaaccaagggcttg

SEQ ID NO: 27 - DNA, 17 bp, Arabidopsis thaliana
aaaaaaccacagttgct

SEQ ID NO: 28 - DNA, 17 bp, Arabidopsis thaliana
aaaaaaccacggcgtag

SEQ ID NO: 29 - DNA, 17 bp, Arabidopsis thaliana
aaaaaacccccaatgaa

SEQ ID NO: 30 - DNA, 17 bp, Arabidopsis thaliana
aaaaaacccgtgatttt

SEQ ID NO: 31 - DNA, 17 bp, Arabidopsis thaliana
aaaaaaccgactctgag

SEQ ID NO: 32 - DNA, 17 bp, Arabidopsis thaliana
aaaaaacggttaccgtc

SEQ ID NO: 33 - DNA, 17 bp, Arabidopsis thaliana
aaaaaacggtttgcaga

SEQ ID NO: 34 - DNA, 17 bp, Arabidopsis thaliana
aaaaaactatgtacgga

SEQ ID NO: 35 - DNA, 17 bp, Arabidopsis thaliana
aaaaaactgcagtatcc

SEQ ID NO: 36 - DNA, 17 bp, Arabidopsis thaliana
aaaaaactggattaggg

SEQ ID NO: 37 - DNA, 17 bp, Arabidopsis thaliana
aaaaaactgttcatgtg

SEQ ID NO: 38 - DNA, 17 bp, Arabidopsis thaliana
aaaaaacttaattcttc

SEQ ID NO: 39 - DNA, 17 bp, Arabidopsis thaliana
aaaaaacttcagccgcc

SEQ ID NO: 40 - DNA, 17 bp, Arabidopsis thaliana
aaaaaacttctcaggat

SEQ ID NO: 41 - DNA, 17 bp, Arabidopsis thaliana
aaaaaagagagtttctt

SEQ ID NO: 42 - DNA, 17 bp, Arabidopsis thaliana
aaaaaagagtttttcga

SEQ ID NO: 43 - DNA, 17 bp, Arabidopsis thaliana
aaaaaagatacggatcg

SEQ ID NO: 44 - DNA, 17 bp, Arabidopsis thaliana
aaaaaagattgagccga

SEQ ID NO: 45 - DNA, 17 bp, Arabidopsis thaliana
aaaaaagcagatctcac

SEQ ID NO: 46 - DNA, 17 bp, Arabidopsis thaliana
aaaaaagccatctggtg

SEQ ID NO: 47 - DNA, 17 bp, Arabidopsis thaliana
aaaaaagcccctcaccc

SEQ ID NO: 48 - DNA, 17 bp, Arabidopsis thaliana
aaaaaagccctgttttg

SEQ ID NO: 49 - DNA, 17 bp, Arabidopsis thaliana
aaaaaagccgactttcc

SEQ ID NO: 50 - DNA, 17 bp, Arabidopsis thaliana
aaaaaagcgtcgtgctg

SEQ ID NO: 51 - DNA, 17 bp, Arabidopsis thaliana
aaaaaagctaaagtgtt

SEQ ID NO: 52 - DNA, 17 bp, Arabidopsis thaliana
aaaaaagctacagcacg

SEQ ID NO: 53 - DNA, 17 bp, Arabidopsis thaliana
aaaaaagctgcttgatc

SEQ ID NO: 54 - DNA, 17 bp, Arabidopsis thaliana
aaaaaaggaaagacgct

SEQ ID NO: 55 - DNA, 17 bp, Arabidopsis thaliana
aaaaaaggaacaatcca

SEQ ID NO: 56 - DNA, 17 bp, Arabidopsis thaliana
aaaaaaggatgaacgac

SEQ ID NO: 57 - DNA, 17 bp, Arabidopsis thaliana
aaaaaaggcaattgcct

SEQ ID NO: 58 - DNA, 17 bp, Arabidopsis thaliana
aaaaaaggccggtttgt

SEQ ID NO: 59 - DNA, 17 bp, Arabidopsis thaliana
aaaaaagggctgcagat

SEQ ID NO: 60 - DNA, 17 bp, Arabidopsis thaliana
aaaaaagggtaaacgac

SEQ ID NO: 61 - DNA, 17 bp, Arabidopsis thaliana
aaaaaaggtctgcagat

SEQ ID NO: 62 - DNA, 17 bp, Arabidopsis thaliana
aaaaaagtagcctggta

SEQ ID NO: 63 - DNA, 17 bp, Arabidopsis thaliana
aaaaaagtagcctggtg

SEQ ID NO: 64 - DNA, 17 bp, Arabidopsis thaliana
aaaaaagtcactcgagg

SEQ ID NO: 65 - DNA, 17 bp, Arabidopsis thaliana
aaaaaagtgatagagct

SEQ ID NO: 66 - DNA, 17 bp, Arabidopsis thaliana
aaaaaagttctttgcag

SEQ ID NO: 67 - DNA, 17 bp, Arabidopsis thaliana
aaaaaagttgacaagtg

SEQ ID NO: 68 - DNA, 17 bp, Arabidopsis thaliana
aaaaaagttgactgaac

SEQ ID NO: 69 - DNA, 17 bp, Arabidopsis thaliana
aaaaaagttgacttgcg

SEQ ID NO: 70 - DNA, 17 bp, Arabidopsis thaliana
aaaaaagtttcaaggca

SEQ ID NO: 71 - DNA, 17 bp, Arabidopsis thaliana
aaaaaataacgcaggtg

SEQ ID NO: 72 - DNA, 17 bp, Arabidopsis thaliana
aaaaaatactgaccaac

SEQ ID NO: 73 - DNA, 17 bp, Arabidopsis thaliana
aaaaaatatctgcaaat

SEQ ID NO: 74 - DNA, 17 bp, Arabidopsis thaliana
aaaaaatcgagggattg

SEQ ID NO: 75 - DNA, 17 bp, Arabidopsis thaliana
aaaaaatcgttcaggtt

SEQ ID NO: 76 - DNA, 17 bp, Arabidopsis thaliana
aaaaaatctactggaag

SEQ ID NO: 77 - DNA, 17 bp, Arabidopsis thaliana
aaaaaatctataaaagc

SEQ ID NO: 78 - DNA, 17 bp, Arabidopsis thaliana
aaaaaatctctcagatg

SEQ ID NO: 79 - DNA, 17 bp, Arabidopsis thaliana
aaaaaatctgtcgcagt

SEQ ID NO: 80 - DNA, 17 bp, Arabidopsis thaliana
aaaaaatgatgtcgatc

SEQ ID NO: 81 - DNA, 17 bp, Arabidopsis thaliana
aaaaaatgcgtgtgtct

SEQ ID NO: 82 - DNA, 17 bp, Arabidopsis thaliana
aaaaaatgctacatctt

SEQ ID NO: 83 - DNA, 17 bp, Arabidopsis thaliana
aaaaaatgctacttttt

SEQ ID NO: 84 - DNA, 17 bp, Arabidopsis thaliana
aaaaaatggacgaattt

SEQ ID NO: 85 - DNA, 17 bp, Arabidopsis thaliana
aaaaaatgggtgaacga

SEQ ID NO: 86 - DNA, 17 bp, Arabidopsis thaliana
aaaaaatgttagtgcac

SEQ ID NO: 87 - DNA, 17 bp, Arabidopsis thaliana
aaaaaatgttgcttttc

SEQ ID NO: 88 - DNA, 17 bp, Arabidopsis thaliana
aaaaaattaatcctggt

SEQ ID NO: 89 - DNA, 17 bp, Arabidopsis thaliana
aaaaaattccgaattgt

SEQ ID NO: 90 - DNA, 17 bp, Arabidopsis thaliana
aaaaaattctacttcac

SEQ ID NO: 91 - DNA, 17 bp, Arabidopsis thaliana
aaaaaattggaaccgaa

SEQ ID NO: 92 - DNA, 17 bp, Arabidopsis thaliana
aaaaaatttggaccatt

SEQ ID NO: 93 - DNA, 17 bp, Arabidopsis thaliana
aaaaaatttttcggtcc

SEQ ID NO: 94 - DNA, 17 bp, Arabidopsis thaliana
aaaaacaaaacacggga

SEQ ID NO: 95 - DNA, 17 bp, Arabidopsis thaliana
aaaaacaaaacgttgac

SEQ ID NO: 96 - DNA, 17 bp, Arabidopsis thaliana
aaaaacaaacagatctt

SEQ ID NO: 97 - DNA, 17 bp, Arabidopsis thaliana
aaaaacaaagacggtga

SEQ ID NO: 98 - DNA, 17 bp, Arabidopsis thaliana
aaaaacaaaggctcatg

SEQ ID NO: 99 - DNA, 17 bp, Arabidopsis thaliana
aaaaacaaatctgtcaa

SEQ ID NO: 100 - DNA, 17 bp, Arabidopsis thaliana
aaaaacaaggaaaagcg

SEQ ID NO: 101 - DNA, 17 bp, Arabidopsis thaliana
aaaaacacaaaccaaaa

SEQ ID NO: 102 - DNA, 17 bp, Arabidopsis thaliana
aaaaacacagttgggag

SEQ ID NO: 103 - DNA, 17 bp, Arabidopsis thaliana
aaaaacaccgtacgcgg

SEQ ID NO: 104 - DNA, 17 bp, Arabidopsis thaliana
aaaaacaggcactttcc

SEQ ID NO: 105 - DNA, 17 bp, Arabidopsis thaliana
aaaaacagggcttcttg

SEQ ID NO: 106 - DNA, 17 bp, Arabidopsis thaliana
aaaaacagggctttttg

SEQ ID NO: 107 - DNA, 17 bp, Arabidopsis thaliana
aaaaacagtccgcagat

SEQ ID NO: 108 - DNA, 17 bp, Arabidopsis thaliana
aaaaacagtcgcagcga

SEQ ID NO: 109 - DNA, 17 bp, Arabidopsis thaliana
aaaaacagttggtgtag

SEQ ID NO: 110 - DNA, 17 bp, Arabidopsis thaliana
aaaaacatcgccaactc

SEQ ID NO: 111 - DNA, 17 bp, Arabidopsis thaliana
aaaaacatcgtccgtga

SEQ ID NO: 112 - DNA, 17 bp, Arabidopsis thaliana
aaaaacatgccacttat

SEQ ID NO: 113 - DNA, 17 bp, Arabidopsis thaliana
aaaaacatgccacttgt

SEQ ID NO: 114 - DNA, 17 bp, Arabidopsis thaliana
aaaaacatggtcaacgg

SEQ ID NO: 115 - DNA, 17 bp, Arabidopsis thaliana
aaaaacatggtccggtt

SEQ ID NO: 116 - DNA, 17 bp, Arabidopsis thaliana
aaaaaccacacccggcc

SEQ ID NO: 117 - DNA, 17 bp, Arabidopsis thaliana
aaaaaccagcaagcccc

SEQ ID NO: 118 - DNA, 17 bp, Arabidopsis thaliana
aaaaaccattgctggac

SEQ ID NO: 119 - DNA, 17 bp, Arabidopsis thaliana
aaaaacccaagctctgt

SEQ ID NO: 120 - DNA, 17 bp, Arabidopsis thaliana
aaaaaccccggcacgaa

SEQ ID NO: 121 - DNA, 17 bp, Arabidopsis thaliana
aaaaacccctgggaccg

SEQ ID NO: 122 - DNA, 17 bp, Arabidopsis thaliana
aaaaacccgacctccaa

SEQ ID NO: 123 - DNA, 17 bp, Arabidopsis thaliana
aaaaacccgattgtttt

SEQ ID NO: 124 - DNA, 17 bp, Arabidopsis thaliana
aaaaacccgcagcggac

SEQ ID NO: 125 - DNA, 17 bp, Arabidopsis thaliana
aaaaacccgtccctcca

SEQ ID NO: 126 - DNA, 17 bp, Arabidopsis thaliana
aaaaaccgatcccggcg

SEQ ID NO: 127 - DNA, 17 bp, Arabidopsis thaliana
aaaaaccgatggagcga

SEQ ID NO: 128 - DNA, 17 bp, Arabidopsis thaliana
aaaaaccgggtcaatcc

SEQ ID NO: 129 - DNA, 17 bp, Arabidopsis thaliana
aaaaaccgggttggggc

SEQ ID NO: 130 - DNA, 17 bp, Arabidopsis thaliana
aaaaaccggtctgtgat

SEQ ID NO: 131 - DNA, 17 bp, Arabidopsis thaliana
aaaaaccggtctgtggt

SEQ ID NO: 132 - DNA, 17 bp, Arabidopsis thaliana
aaaaaccgtcatttttt

SEQ ID NO: 133 - DNA, 17 bp, Arabidopsis thaliana
aaaaaccgtccatcctt

SEQ ID NO: 134 - DNA, 17 bp, Arabidopsis thaliana
aaaaaccgttgcacaag

SEQ ID NO: 135 - DNA, 17 bp, Arabidopsis thaliana
aaaaacctaaaaaattt

SEQ ID NO: 136 - DNA, 17 bp, Arabidopsis thaliana
aaaaacctacgcttgcc

SEQ ID NO: 137 - DNA, 17 bp, Arabidopsis thaliana
aaaaacctcaactttgg

SEQ ID NO: 138 - DNA, 17 bp, Arabidopsis thaliana
aaaaacctcagtgatgg

SEQ ID NO: 139 - DNA, 17 bp, Arabidopsis thaliana
aaaaacctcggacattg

SEQ ID NO: 140 - DNA, 17 bp, Arabidopsis thaliana
aaaaaccttggaaagtg

SEQ ID NO: 141 - DNA, 17 bp, Arabidopsis thaliana
aaaaaccttgtaaaggg

SEQ ID NO: 142 - DNA, 17 bp, Arabidopsis thaliana
aaaaacctttccatttc

SEQ ID NO: 143 - DNA, 17 bp, Arabidopsis thaliana
aaaaacgaaagacacct

SEQ ID NO: 144 - DNA, 17 bp, Arabidopsis thaliana
aaaaacgaccggaaccc

SEQ ID NO: 145 - DNA, 17 bp, Arabidopsis thaliana
aaaaacgacctgtgtcc

SEQ ID NO: 146 - DNA, 17 bp, Arabidopsis thaliana
aaaaacgacgccgtttt

SEQ ID NO: 147 - DNA, 17 bp, Arabidopsis thaliana
aaaaacgacggtgatgt

SEQ ID NO: 148 - DNA, 17 bp, Arabidopsis thaliana
aaaaacgacgtcgtttt

SEQ ID NO: 149 - DNA, 17 bp, Arabidopsis thaliana
aaaaacgactctcggca

SEQ ID NO: 150 - DNA, 17 bp, Arabidopsis thaliana
aaaaacgagagcgttta

SEQ ID NO: 151 - DNA, 17 bp, Arabidopsis thaliana
aaaaacgatctgtgaca

SEQ ID NO: 152 - DNA, 17 bp, Arabidopsis thaliana
aaaaacgcaaacccgtg

SEQ ID NO: 153 - DNA, 17 bp, Arabidopsis thaliana
aaaaacgcaatgtcgac

SEQ ID NO: 154 - DNA, 17 bp, Arabidopsis thaliana
aaaaacgcgtgacaatt

SEQ ID NO: 155 - DNA, 17 bp, Arabidopsis thaliana
aaaaacgcgtttctaat

SEQ ID NO: 156 - DNA, 17 bp, Arabidopsis thaliana
aaaaacgctatcgtata

SEQ ID NO: 157 - DNA, 17 bp, Arabidopsis thaliana
aaaaacgctgcgtttgc

SEQ ID NO: 158 - DNA, 17 bp, Arabidopsis thaliana
aaaaacgctggccattc

SEQ ID NO: 159 - DNA, 17 bp, Arabidopsis thaliana
aaaaacgcttggcgtat

SEQ ID NO: 160 - DNA, 17 bp, Arabidopsis thaliana
aaaaacggaacttatca

SEQ ID NO: 161 - DNA, 17 bp, Arabidopsis thaliana
aaaaacggcaagatacc

SEQ ID NO: 162 - DNA, 17 bp, Arabidopsis thaliana
aaaaacggcttagaccc

SEQ ID NO: 163 - DNA, 17 bp, Arabidopsis thaliana
aaaaacggcttaggccc

SEQ ID NO: 164 - DNA, 17 bp, Arabidopsis thaliana
aaaaacgggccattctt

SEQ ID NO: 165 - DNA, 17 bp, Arabidopsis thaliana
aaaaacggtcggcagat

SEQ ID NO: 166 - DNA, 17 bp, Arabidopsis thaliana
aaaaacggtctgatcca

SEQ ID NO: 167 - DNA, 17 bp, Arabidopsis thaliana
aaaaacggttaccgtcg

SEQ ID NO: 168 - DNA, 17 bp, Arabidopsis thaliana
aaaaacggttcgtagtt

SEQ ID NO: 169 - DNA, 17 bp, Arabidopsis thaliana
aaaaacggtttatggtt

SEQ ID NO: 170 - DNA, 17 bp, Arabidopsis thaliana
aaaaacggtttccaccc

SEQ ID NO: 171 - DNA, 17 bp, Arabidopsis thaliana
aaaaacggtttgcagat

SEQ ID NO: 172 - DNA, 17 bp, Arabidopsis thaliana
aaaaacgtaccgttgag

SEQ ID NO: 173 - DNA, 17 bp, Arabidopsis thaliana
aaaaacgtcaggcttag

SEQ ID NO: 174 - DNA, 17 bp, Arabidopsis thaliana
aaaaacgtcgtttattg

SEQ ID NO: 175 - DNA, 17 bp, Arabidopsis thaliana
aaaaacgtgattattcg

SEQ ID NO: 176 - DNA, 17 bp, Arabidopsis thaliana
aaaaacgttgatcagcc

SEQ ID NO: 177 - DNA, 17 bp, Arabidopsis thaliana
aaaaacgttgatccggc

SEQ ID NO: 178 - DNA, 17 bp, Arabidopsis thaliana
aaaaactaaactacgtt

SEQ ID NO: 179 - DNA, 17 bp, Arabidopsis thaliana
aaaaactaaactcgtga

SEQ ID NO: 180 - DNA, 17 bp, Arabidopsis thaliana
aaaaactaaatcgtcct

SEQ ID NO: 181 - DNA, 17 bp, Arabidopsis thaliana
aaaaactaaccggattt

SEQ ID NO: 182 - DNA, 17 bp, Arabidopsis thaliana
aaaaactaacctgccat

SEQ ID NO: 183 - DNA, 17 bp, Arabidopsis thaliana
aaaaactaacgcatgct

SEQ ID NO: 184 - DNA, 17 bp, Arabidopsis thaliana
aaaaactaagcccaaaa

SEQ ID NO: 185 - DNA, 17 bp, Arabidopsis thaliana
aaaaactaagcctacgg

SEQ ID NO: 186 - DNA, 17 bp, Arabidopsis thaliana
aaaaactaatctggttt

SEQ ID NO: 187 - DNA, 17 bp, Arabidopsis thaliana
aaaaactacatcttggt

SEQ ID NO: 188 - DNA, 17 bp, Arabidopsis thaliana
aaaaactacattcggac

SEQ ID NO: 189 - DNA, 17 bp, Arabidopsis thaliana
aaaaactacgggggttg

SEQ ID NO: 190 - DNA, 17 bp, Arabidopsis thaliana
aaaaactacttgtggct

SEQ ID NO: 191 - DNA, 17 bp, Arabidopsis thaliana
aaaaactagaggcactt

SEQ ID NO: 192 - DNA, 17 bp, Arabidopsis thaliana
aaaaactagccgggtgt

SEQ ID NO: 193 - DNA, 17 bp, Arabidopsis thaliana
aaaaactagttttggcg

SEQ ID NO: 194 - DNA, 17 bp, Arabidopsis thaliana
aaaaactatccaactta

SEQ ID NO: 195 - DNA, 17 bp, Arabidopsis thaliana
aaaaactatttccgtgt

SEQ ID NO: 196 - DNA, 17 bp, Arabidopsis thaliana
aaaaactcagttttgct

SEQ ID NO: 197 - DNA, 17 bp, Arabidopsis thaliana
aaaaactcattgcagac

SEQ ID NO: 198 - DNA, 17 bp, Arabidopsis thaliana
aaaaactccattagttg

SEQ ID NO: 199 - DNA, 17 bp, Arabidopsis thaliana
aaaaactcctagtgctg

SEQ ID NO: 200 - DNA, 17 bp, Arabidopsis thaliana
aaaaactcgccattaac

SEQ ID NO: 201 - DNA, 17 bp, Arabidopsis thaliana
aaaaactcgtaggctat

SEQ ID NO: 202 - DNA, 17 bp, Arabidopsis thaliana
aaaaactcgtgttgctt

SEQ ID NO: 203 - DNA, 17 bp, Arabidopsis thaliana
aaaaactctcggacttt

SEQ ID NO: 204 - DNA, 17 bp, Arabidopsis thaliana
aaaaactctgattttag

SEQ ID NO: 205 - DNA, 17 bp, Arabidopsis thaliana
aaaaactgaaaggtctt

SEQ ID NO: 206 - DNA, 17 bp, Arabidopsis thaliana
aaaaactgacatagctc

SEQ ID NO: 207 - DNA, 17 bp, Arabidopsis thaliana
aaaaactgacccacatc

SEQ ID NO: 208 - DNA, 17 bp, Arabidopsis thaliana
aaaaactgacctttttg

SEQ ID NO: 209 - DNA, 17 bp, Arabidopsis thaliana
aaaaactgagctgtcct

SEQ ID NO: 210 - DNA, 17 bp, Arabidopsis thaliana
aaaaactgattggcgat

SEQ ID NO: 211 - DNA, 17 bp, Arabidopsis thaliana
aaaaactgccaggattg

SEQ ID NO: 212 - DNA, 17 bp, Arabidopsis thaliana
aaaaactgctgagatgt

SEQ ID NO: 213 - DNA, 17 bp, Arabidopsis thaliana
aaaaactggatctgtgg

SEQ ID NO: 214 - DNA, 17 bp, Arabidopsis thaliana
aaaaactggatggagat

SEQ ID NO: 215 - DNA, 17 bp, Arabidopsis thaliana
aaaaactggatggctgg

SEQ ID NO: 216 - DNA, 17 bp, Arabidopsis thaliana
aaaaactgtccgtacgg

SEQ ID NO: 217 - DNA, 17 bp, Arabidopsis thaliana
aaaaactgtcgatgtgt

SEQ ID NO: 218 - DNA, 17 bp, Arabidopsis thaliana
aaaaactgttcatgtga

SEQ ID NO: 219 - DNA, 17 bp, Arabidopsis thaliana
aaaaactgttgcagatc

SEQ ID NO: 220 - DNA, 17 bp, Arabidopsis thaliana
aaaaacttagctgacca

SEQ ID NO: 221 - DNA, 17 bp, Arabidopsis thaliana
aaaaacttctatctttg

SEQ ID NO: 222 - DNA, 17 bp, Arabidopsis thaliana
aaaaacttctgttgtgg

SEQ ID NO: 223 - DNA, 17 bp, Arabidopsis thaliana
aaaaacttggtccgcag

SEQ ID NO: 224 - DNA, 17 bp, Arabidopsis thaliana
aaaaactttcatggtgt

SEQ ID NO: 225 - DNA, 17 bp, Arabidopsis thaliana
aaaaagaacttacgact

SEQ ID NO: 226 - DNA, 17 bp, Arabidopsis thaliana
aaaaagaatctgtgcag

SEQ ID NO: 227 - DNA, 17 bp, Arabidopsis thaliana
aaaaagacacaaccgtt

SEQ ID NO: 228 - DNA, 17 bp, Arabidopsis thaliana
aaaaagacatcactgtc

SEQ ID NO: 229 - DNA, 17 bp, Arabidopsis thaliana
aaaaagaccactggatt

SEQ ID NO: 230 - DNA, 17 bp, Arabidopsis thaliana
aaaaagaccgaccctag

SEQ ID NO: 231 - DNA, 17 bp, Arabidopsis thaliana
aaaaagacgcggattct

SEQ ID NO: 232 - DNA, 17 bp, Arabidopsis thaliana
aaaaagacggcctctct

SEQ ID NO: 233 - DNA, 17 bp, Arabidopsis thaliana
aaaaagacggttactcg

SEQ ID NO: 234 - DNA, 17 bp, Arabidopsis thaliana
aaaaagacggttcctcg

SEQ ID NO: 235 - DNA, 17 bp, Arabidopsis thaliana
aaaaagactgcgctagg

SEQ ID NO: 236 - DNA, 17 bp, Arabidopsis thaliana
aaaaagacttcagtcat

SEQ ID NO: 237 - DNA, 17 bp, Arabidopsis thaliana
aaaaagacttcgttggc

SEQ ID NO: 238 - DNA, 17 bp, Arabidopsis thaliana
aaaaagacttgcccggg

SEQ ID NO: 239 - DNA, 17 bp, Arabidopsis thaliana
aaaaagagccagaggtt

SEQ ID NO: 240 - DNA, 17 bp, Arabidopsis thaliana
aaaaagataaattgtca

SEQ ID NO: 241 - DNA, 17 bp, Arabidopsis thaliana
aaaaagataaattgtcc

SEQ ID NO: 242 - DNA, 17 bp, Arabidopsis thaliana
aaaaagataaattgttc

SEQ ID NO: 243 - DNA, 17 bp, Arabidopsis thaliana
aaaaagatagcagatcc

SEQ ID NO: 244 - DNA, 17 bp, Arabidopsis thaliana
aaaaagatagtctctcg

SEQ ID NO: 245 - DNA, 17 bp, Arabidopsis thaliana
aaaaagatcaactttgg

SEQ ID NO: 246 - DNA, 17 bp, Arabidopsis thaliana
aaaaagatcatctctgc

SEQ ID NO: 247 - DNA, 17 bp, Arabidopsis thaliana
aaaaagatctgtcttct

SEQ ID NO: 248 - DNA, 17 bp, Arabidopsis thaliana
aaaaagatgtggcagcc

SEQ ID NO: 249 - DNA, 17 bp, Arabidopsis thaliana
aaaaagattcactggat

SEQ ID NO: 250 - DNA, 17 bp, Arabidopsis thaliana
aaaaagattggctggtt

SEQ ID NO: 251 - DNA, 17 bp, Arabidopsis thaliana
aaaaagattttcctagg

SEQ ID NO: 252 - DNA, 17 bp, Arabidopsis thaliana
aaaaagcaacgtcgctg

SEQ ID NO: 253 - DNA, 17 bp, Arabidopsis thaliana
aaaaagcacatgagatt

SEQ ID NO: 254 - DNA, 17 bp, Arabidopsis thaliana
aaaaagcatgttgtaat

SEQ ID NO: 255 - DNA, 17 bp, Arabidopsis thaliana
aaaaagccatagccagt

SEQ ID NO: 256 - DNA, 17 bp, Arabidopsis thaliana
aaaaagcccgatgatgg

SEQ ID NO: 257 - DNA, 17 bp, Arabidopsis thaliana
aaaaagccgcagtcagc

SEQ ID NO: 258 - DNA, 17 bp, Arabidopsis thaliana
aaaaagcctctgacgct

SEQ ID NO: 259 - DNA, 17 bp, Arabidopsis thaliana
aaaaagccttgtgcgac

SEQ ID NO: 260 - DNA, 17 bp, Arabidopsis thaliana
aaaaagcgacacccggg

SEQ ID NO: 261 - DNA, 17 bp, Arabidopsis thaliana
aaaaagcgccctcagat

SEQ ID NO: 262 - DNA, 17 bp, Arabidopsis thaliana
aaaaagcgctggagtgt

SEQ ID NO: 263 - DNA, 17 bp, Arabidopsis thaliana
aaaaagctattgttgag

SEQ ID NO: 264 - DNA, 17 bp, Arabidopsis thaliana
aaaaagctccgtaccgg

SEQ ID NO: 265 - DNA, 17 bp, Arabidopsis thaliana
aaaaagctccgtttgca

SEQ ID NO: 266 - DNA, 17 bp, Arabidopsis thaliana
aaaaagctcggattgcg

SEQ ID NO: 267 - DNA, 17 bp, Arabidopsis thaliana
aaaaagctcgtagttga

SEQ ID NO: 268 - DNA, 17 bp, Arabidopsis thaliana
aaaaagctgataccgct

SEQ ID NO: 269 - DNA, 17 bp, Arabidopsis thaliana
aaaaagctgcttgatcc

SEQ ID NO: 270 - DNA, 17 bp, Arabidopsis thaliana
aaaaagcttaccggccg

SEQ ID NO: 271 - DNA, 17 bp, Arabidopsis thaliana
aaaaagcttcttcgcga

SEQ ID NO: 272 - DNA, 17 bp, Arabidopsis thaliana
aaaaaggacagtcagat

SEQ ID NO: 273 - DNA, 17 bp, Arabidopsis thaliana
aaaaaggaccagacact

SEQ ID NO: 274 - DNA, 17 bp, Arabidopsis thaliana
aaaaaggaccatgggtt

SEQ ID NO: 275 - DNA, 17 bp, Arabidopsis thaliana
aaaaaggactgctccgg

SEQ ID NO: 276 - DNA, 17 bp, Arabidopsis thaliana
aaaaaggatgaccagct

SEQ ID NO: 277 - DNA, 17 bp, Arabidopsis thaliana
aaaaaggcaattgcctc

SEQ ID NO: 278 - DNA, 17 bp, Arabidopsis thaliana
aaaaaggcccccaattg

SEQ ID NO: 279 - DNA, 17 bp, Arabidopsis thaliana
aaaaaggccgttttcgt

SEQ ID NO: 280 - DNA, 17 bp, Arabidopsis thaliana
aaaaaggcctaagtgtg

SEQ ID NO: 281 - DNA, 17 bp, Arabidopsis thaliana
aaaaaggcgtaagactt

SEQ ID NO: 282 - DNA, 17 bp, Arabidopsis thaliana
aaaaaggctgcactggc

SEQ ID NO: 283 - DNA, 17 bp, Arabidopsis thaliana
aaaaaggctgcgcacct

SEQ ID NO: 284 - DNA, 17 bp, Arabidopsis thaliana
aaaaaggctgtaacaac

SEQ ID NO: 285 - DNA, 17 bp, Arabidopsis thaliana
aaaaaggcttccatagc

SEQ ID NO: 286 - DNA, 17 bp, Arabidopsis thaliana
aaaaaggcttcctctag

SEQ ID NO: 287 - DNA, 17 bp, Arabidopsis thaliana
aaaaaggcttttgttca

SEQ ID NO: 288 - DNA, 17 bp, Arabidopsis thaliana
aaaaagggacgaaagca

SEQ ID NO: 289 - DNA, 17 bp, Arabidopsis thaliana
aaaaagggcaaatacac

SEQ ID NO: 290 - DNA, 17 bp, Arabidopsis thaliana
aaaaagggcaaatccac

SEQ ID NO: 291 - DNA, 17 bp, Arabidopsis thaliana
aaaaagggctttgctcc

SEQ ID NO: 292 - DNA, 17 bp, Arabidopsis thaliana
aaaaaggggtgaacgac

SEQ ID NO: 293 - DNA, 17 bp, Arabidopsis thaliana
aaaaagggtagtgtgca

SEQ ID NO: 294 - DNA, 17 bp, Arabidopsis thaliana
aaaaagggtcgcctgaa

SEQ ID NO: 295 - DNA, 17 bp, Arabidopsis thaliana
aaaaagggtttcagtca

SEQ ID NO: 296 - DNA, 17 bp, Arabidopsis thaliana
aaaaagggtttctcgcc

SEQ ID NO: 297 - DNA, 17 bp, Arabidopsis thaliana
aaaaagggtttgcatgg

SEQ ID NO: 298 - DNA, 17 bp, Arabidopsis thaliana
aaaaaggtaaattgtca

SEQ ID NO: 299 - DNA, 17 bp, Arabidopsis thaliana
aaaaaggtacagcgtct

SEQ ID NO: 300 - DNA, 17 bp, Arabidopsis thaliana
aaaaaggtatcacatgc

SEQ ID NO: 301 - DNA, 17 bp, Arabidopsis thaliana
aaaaaggtattttggac

SEQ ID NO: 302 - DNA, 17 bp, Arabidopsis thaliana
aaaaaggtcagtgacaa

SEQ ID NO: 303 - DNA, 17 bp, Arabidopsis thaliana
aaaaaggtccagtccca

SEQ ID NO: 304 - DNA, 17 bp, Arabidopsis thaliana
aaaaaggtctgcagatg

SEQ ID NO: 305 - DNA, 17 bp, Arabidopsis thaliana
aaaaaggtgaacagcct

SEQ ID NO: 306 - DNA, 17 bp, Arabidopsis thaliana
aaaaaggtgaccgacgc

SEQ ID NO: 307 - DNA, 17 bp, Arabidopsis thaliana
aaaaaggtgtggacaag

SEQ ID NO: 308 - DNA, 17 bp, Arabidopsis thaliana
aaaaagtagttatcgct

SEQ ID NO: 309 - DNA, 17 bp, Arabidopsis thaliana
aaaaagtcactcgaggc

SEQ ID NO: 310 - DNA, 17 bp, Arabidopsis thaliana
aaaaagtcagacgtttc

SEQ ID NO: 311 - DNA, 17 bp, Arabidopsis thaliana
aaaaagtcccacatcgg

SEQ ID NO: 312 - DNA, 17 bp, Arabidopsis thaliana
aaaaagtccgaccaatt

SEQ ID NO: 313 - DNA, 17 bp, Arabidopsis thaliana
aaaaagtccgggggtaa

SEQ ID NO: 314 - DNA, 17 bp, Arabidopsis thaliana
aaaaagtccgggggtga

SEQ ID NO: 315 - DNA, 17 bp, Arabidopsis thaliana
aaaaagtctagcaagta

SEQ ID NO: 316 - DNA, 17 bp, Arabidopsis thaliana
aaaaagtctagctttcc

SEQ ID NO: 317 - DNA, 17 bp, Arabidopsis thaliana
aaaaagtctctcttgtg

SEQ ID NO: 318 - DNA, 17 bp, Arabidopsis thaliana
aaaaagtctgtcaacca

SEQ ID NO: 319 - DNA, 17 bp, Arabidopsis thaliana
aaaaagtgaacgacctg

SEQ ID NO: 320 - DNA, 17 bp, Arabidopsis thaliana
aaaaagtgactacatcg

SEQ ID NO: 321 - DNA, 17 bp, Arabidopsis thaliana
aaaaagtgactgctgat

SEQ ID NO: 322 - DNA, 17 bp, Arabidopsis thaliana
aaaaagtgcaatcaaca

SEQ ID NO: 323 - DNA, 17 bp, Arabidopsis thaliana
aaaaagtggccaaacaa

SEQ ID NO: 324 - DNA, 17 bp, Arabidopsis thaliana
aaaaagtggcctcttta

SEQ ID NO: 325 - DNA, 17 bp, Arabidopsis thaliana
aaaaagtggcttctgag

SEQ ID NO: 326 - DNA, 17 bp, Arabidopsis thaliana
aaaaagtgtccacgtca

SEQ ID NO: 327 - DNA, 17 bp, Arabidopsis thaliana
aaaaagtgtctacagct

SEQ ID NO: 328 - DNA, 17 bp, Arabidopsis thaliana
aaaaagtgtttccttag

SEQ ID NO: 329 - DNA, 17 bp, Arabidopsis thaliana
aaaaagttaagctgagg

SEQ ID NO: 330 - DNA, 17 bp, Arabidopsis thaliana
aaaaagttactaggcct

SEQ ID NO: 331 - DNA, 17 bp, Arabidopsis thaliana
aaaaagttatgcggttt

SEQ ID NO: 332 - DNA, 17 bp, Arabidopsis thaliana
aaaaagttcaagaattt

SEQ ID NO: 333 - DNA, 17 bp, Arabidopsis thaliana
aaaaagttcacacgaac

SEQ ID NO: 334 - DNA, 17 bp, Arabidopsis thaliana
aaaaagttcatagtagc

SEQ ID NO: 335 - DNA, 17 bp, Arabidopsis thaliana
aaaaagttccacctctt

SEQ ID NO: 336 - DNA, 17 bp, Arabidopsis thaliana
aaaaagttctttgcaga

SEQ ID NO: 337 - DNA, 17 bp, Arabidopsis thaliana
aaaaagttgaaaaggct

SEQ ID NO: 338 - DNA, 17 bp, Arabidopsis thaliana
aaaaagttgaggctatt

SEQ ID NO: 339 - DNA, 17 bp, Arabidopsis thaliana
aaaaagtttcttcgtca

SEQ ID NO: 340 - DNA, 17 bp, Arabidopsis thaliana
aaaaagtttgctgctta

SEQ ID NO: 341 - DNA, 17 bp, Arabidopsis thaliana
aaaaagtttggcggaaa

SEQ ID NO: 342 - DNA, 17 bp, Arabidopsis thaliana
aaaaataaattgttccc

SEQ ID NO: 343 - DNA, 17 bp, Arabidopsis thaliana
aaaaataactctatgat

SEQ ID NO: 344 - DNA, 17 bp, Arabidopsis thaliana
aaaaatacccgcagaag

SEQ ID NO: 345 - DNA, 17 bp, Arabidopsis thaliana
aaaaatacccggagaag

SEQ ID NO: 346 - DNA, 17 bp, Arabidopsis thaliana
aaaaataccctcaagac

SEQ ID NO: 347 - DNA, 17 bp, Arabidopsis thaliana
aaaaatacctcgacgcc

SEQ ID NO: 348 - DNA, 17 bp, Arabidopsis thaliana
aaaaatacgtggccaga

SEQ ID NO: 349 - DNA, 17 bp, Arabidopsis thaliana
aaaaatactttgaccgg

SEQ ID NO: 350 - DNA, 17 bp, Arabidopsis thaliana
aaaaatagctacttgtc

SEQ ID NO: 351 - DNA, 17 bp, Arabidopsis thaliana
aaaaatagctcgacgcc

SEQ ID NO: 352 - DNA, 17 bp, Arabidopsis thaliana
aaaaataggagtaacga

SEQ ID NO: 353 - DNA, 17 bp, Arabidopsis thaliana
aaaaataggagtaacgt

SEQ ID NO: 354 - DNA, 17 bp, Arabidopsis thaliana
aaaaatatctgcaaatg

SEQ ID NO: 355 - DNA, 17 bp, Arabidopsis thaliana
aaaaatcaaactggagc

SEQ ID NO: 356 - DNA, 17 bp, Arabidopsis thaliana
aaaaatcacatttgttt

SEQ ID NO: 357 - DNA, 17 bp, Arabidopsis thaliana
aaaaatcacgggacggg

SEQ ID NO: 358 - DNA, 17 bp, Arabidopsis thaliana
aaaaatcactcgaccac

SEQ ID NO: 359 - DNA, 17 bp, Arabidopsis thaliana
aaaaatcagcggatcga

SEQ ID NO: 360 - DNA, 17 bp, Arabidopsis thaliana
aaaaatcaggcttgggc

SEQ ID NO: 361 - DNA, 17 bp, Arabidopsis thaliana
aaaaatcatcagtttgc

SEQ ID NO: 362 - DNA, 17 bp, Arabidopsis thaliana
aaaaatcatccttgcgc

SEQ ID NO: 363 - DNA, 17 bp, Arabidopsis thaliana
aaaaatcatcgttgggc

SEQ ID NO: 364 - DNA, 17 bp, Arabidopsis thaliana
aaaaatccaccagttga

SEQ ID NO: 365 - DNA, 17 bp, Arabidopsis thaliana
aaaaatccctggtcgcg

SEQ ID NO: 366 - DNA, 17 bp, Arabidopsis thaliana
aaaaatccgaatagatc

SEQ ID NO: 367 - DNA, 17 bp, Arabidopsis thaliana
aaaaatccgctgagatt

SEQ ID NO: 368 - DNA, 17 bp, Arabidopsis thaliana
aaaaatcctcgcagttc

SEQ ID NO: 369 - DNA, 17 bp, Arabidopsis thaliana
aaaaatcctctcatttg

SEQ ID NO: 370 - DNA, 17 bp, Arabidopsis thaliana
aaaaatcgaccaacggt

SEQ ID NO: 371 - DNA, 17 bp, Arabidopsis thaliana
aaaaatcgacttacggt

SEQ ID NO: 372 - DNA, 17 bp, Arabidopsis thaliana
aaaaatcggcggaggag

SEQ ID NO: 373 - DNA, 17 bp, Arabidopsis thaliana
aaaaatcggctcgtact

SEQ ID NO: 374 - DNA, 17 bp, Arabidopsis thaliana
aaaaatcggtttctgct

SEQ ID NO: 375 - DNA, 17 bp, Arabidopsis thaliana
aaaaatcgtcacgaggt

SEQ ID NO: 376 - DNA, 17 bp, Arabidopsis thaliana
aaaaatcgttgaccggt

SEQ ID NO: 377 - DNA, 17 bp, Arabidopsis thaliana
aaaaatctcagttagtt

SEQ ID NO: 378 - DNA, 17 bp, Arabidopsis thaliana
aaaaatctcccaaaatc

SEQ ID NO: 379 - DNA, 17 bp, Arabidopsis thaliana
aaaaatctctcaatcgt

SEQ ID NO: 380 - DNA, 17 bp, Arabidopsis thaliana
aaaaatctctcgactgt

SEQ ID NO: 381 - DNA, 17 bp, Arabidopsis thaliana
aaaaatctgactgagtt

SEQ ID NO: 382 - DNA, 17 bp, Arabidopsis thaliana
aaaaatctgttgaggcc

SEQ ID NO: 383 - DNA, 17 bp, Arabidopsis thaliana
aaaaatcttgctccata

SEQ ID NO: 384 - DNA, 17 bp, Arabidopsis thaliana
aaaaatgaactgtctcc

SEQ ID NO: 385 - DNA, 17 bp, Arabidopsis thaliana
aaaaatgaactgtgtcc

SEQ ID NO: 386 - DNA, 17 bp, Arabidopsis thaliana
aaaaatgaattgtctcc

SEQ ID NO: 387 - DNA, 17 bp, Arabidopsis thaliana
aaaaatgaattgtcttc

SEQ ID NO: 388 - DNA, 17 bp, Arabidopsis thaliana
aaaaatgaccaaaccaa

SEQ ID NO: 389 - DNA, 17 bp, Arabidopsis thaliana
aaaaatgaccaaattac

SEQ ID NO: 390 - DNA, 17 bp, Arabidopsis thaliana
aaaaatgaccagctttc

SEQ ID NO: 391 - DNA, 17 bp, Arabidopsis thaliana
aaaaatgacctaaatga

SEQ ID NO: 392 - DNA, 17 bp, Arabidopsis thaliana
aaaaatgacgacattgt

SEQ ID NO: 393 - DNA, 17 bp, Arabidopsis thaliana
aaaaatgactcatccgt

SEQ ID NO: 394 - DNA, 17 bp, Arabidopsis thaliana
aaaaatgaggaggtttt

SEQ ID NO: 395 - DNA, 17 bp, Arabidopsis thaliana
aaaaatgatgtcgatcg

SEQ ID NO: 396 - DNA, 17 bp, Arabidopsis thaliana
aaaaatgcagcctcatg

SEQ ID NO: 397 - DNA, 17 bp, Arabidopsis thaliana
aaaaatgcattcaggtc

SEQ ID NO: 398 - DNA, 17 bp, Arabidopsis thaliana
aaaaatgcattcgagtc

SEQ ID NO: 399 - DNA, 17 bp, Arabidopsis thaliana
aaaaatgcattcggatc

SEQ ID NO: 400 - DNA, 17 bp, Arabidopsis thaliana
aaaaatgcattcggctc

SEQ ID NO: 401 - DNA, 17 bp, Arabidopsis thaliana
aaaaatgcattcgggtc

SEQ ID NO: 402 - DNA, 17 bp, Arabidopsis thaliana
aaaaatgccatgtcaga

SEQ ID NO: 403 - DNA, 17 bp, Arabidopsis thaliana
aaaaatgcggttcggtt

SEQ ID NO: 404 - DNA, 17 bp, Arabidopsis thaliana
aaaaatgctacatcttg

SEQ ID NO: 405 - DNA, 17 bp, Arabidopsis thaliana
aaaaatgctacttcttg

SEQ ID NO: 406 - DNA, 17 bp, Arabidopsis thaliana
aaaaatgctcttttctg

SEQ ID NO: 407 - DNA, 17 bp, Arabidopsis thaliana
aaaaatgctgagagtaa

SEQ ID NO: 408 - DNA, 17 bp, Arabidopsis thaliana
aaaaatggaccgattgt

SEQ ID NO: 409 - DNA, 17 bp, Arabidopsis thaliana
aaaaatggatccgccca

SEQ ID NO: 410 - DNA, 17 bp, Arabidopsis thaliana
aaaaatggatctgacca

SEQ ID NO: 411 - DNA, 17 bp, Arabidopsis thaliana
aaaaatggatctggcca

SEQ ID NO: 412 - DNA, 17 bp, Arabidopsis thaliana
aaaaatgggtcgggttg

SEQ ID NO: 413 - DNA, 17 bp, Arabidopsis thaliana
aaaaatggtagttttgc

SEQ ID NO: 414 - DNA, 17 bp, Arabidopsis thaliana
aaaaatggtcggattgc

SEQ ID NO: 415 - DNA, 17 bp, Arabidopsis thaliana
aaaaatggtctgcagat

SEQ ID NO: 416 - DNA, 17 bp, Arabidopsis thaliana
aaaaatggtgtggttcg

SEQ ID NO: 417 - DNA, 17 bp, Arabidopsis thaliana
aaaaatggttcaaaatt

SEQ ID NO: 418 - DNA, 17 bp, Arabidopsis thaliana
aaaaatggttgcttacg

SEQ ID NO: 419 - DNA, 17 bp, Arabidopsis thaliana
aaaaatgtaggatccac

SEQ ID NO: 420 - DNA, 17 bp, Arabidopsis thaliana
aaaaatgtgtttggagt

SEQ ID NO: 421 - DNA, 17 bp, Arabidopsis thaliana
aaaaatgttgaccggtc

SEQ ID NO: 422 - DNA, 17 bp, Arabidopsis thaliana
aaaaatgttgaccggtt

SEQ ID NO: 423 - DNA, 17 bp, Arabidopsis thaliana
aaaaatgttggtcatcc

SEQ ID NO: 424 - DNA, 17 bp, Arabidopsis thaliana
aaaaatgtttgattgtg

SEQ ID NO: 425 - DNA, 17 bp, Arabidopsis thaliana
aaaaatgtttgcgcagc

SEQ ID NO: 426 - DNA, 17 bp, Arabidopsis thaliana
aaaaattaaccggattt

SEQ ID NO: 427 - DNA, 17 bp, Arabidopsis thaliana
aaaaattaatcctggtc

SEQ ID NO: 428 - DNA, 17 bp, Arabidopsis thaliana
aaaaattagaccgcttt

SEQ ID NO: 429 - DNA, 17 bp, Arabidopsis thaliana
aaaaattaggagaccac

SEQ ID NO: 430 - DNA, 17 bp, Arabidopsis thaliana
aaaaattatccagcagt

SEQ ID NO: 431 - DNA, 17 bp, Arabidopsis thaliana
aaaaattcatcttagtg

SEQ ID NO: 432 - DNA, 17 bp, Arabidopsis thaliana
aaaaattcattttcatg

SEQ ID NO: 433 - DNA, 17 bp, Arabidopsis thaliana
aaaaattccacttcacg

SEQ ID NO: 434 - DNA, 17 bp, Arabidopsis thaliana
aaaaattggctcgtttg

SEQ ID NO: 435 - DNA, 17 bp, Arabidopsis thaliana
aaaaattgggagatatc

SEQ ID NO: 436 - DNA, 17 bp, Arabidopsis thaliana
aaaaattgggagatgtc

SEQ ID NO: 437 - DNA, 17 bp, Arabidopsis thaliana
aaaaatttcaccaaata

SEQ ID NO: 438 - DNA, 17 bp, Arabidopsis thaliana
aaaaatttcaccgaata

SEQ ID NO: 439 - DNA, 17 bp, Arabidopsis thaliana
aaaaatttcacgtgtcg

SEQ ID NO: 440 - DNA, 17 bp, Arabidopsis thaliana
aaaaatttcatgtacac

SEQ ID NO: 441 - DNA, 17 bp, Arabidopsis thaliana
aaaaatttgcgagggaa

SEQ ID NO: 442 - DNA, 17 bp, Arabidopsis thaliana
aaaaatttggcccacgt

SEQ ID NO: 443 - DNA, 17 bp, Arabidopsis thaliana
aaaaatttggtccttcc

SEQ ID NO: 444 - DNA, 17 bp, Arabidopsis thaliana
aaaaatttgtacagctt

SEQ ID NO: 445 - DNA, 17 bp, Arabidopsis thaliana
aaaacaaaagacttcgg

SEQ ID NO: 446 - DNA, 17 bp, Arabidopsis thaliana
aaaacaaaccctaaccg

SEQ ID NO: 447 - DNA, 17 bp, Arabidopsis thaliana
aaaacaaagcattgcga

SEQ ID NO: 448 - DNA, 17 bp, Arabidopsis thaliana
aaaacaaaggtcacctg

SEQ ID NO: 449 - DNA, 17 bp, Arabidopsis thaliana
aaaacaaatgtggcagt

SEQ ID NO: 450 - DNA, 17 bp, Arabidopsis thaliana
aaaacaacacgagtagt

SEQ ID NO: 451 - DNA, 17 bp, Arabidopsis thaliana
aaaacaaccgtcgatta

SEQ ID NO: 452 - DNA, 17 bp, Arabidopsis thaliana
aaaacaacctggcctct

SEQ ID NO: 453 - DNA, 17 bp, Arabidopsis thaliana
aaaacaactctgtcatg

SEQ ID NO: 454 - DNA, 17 bp, Arabidopsis thaliana
aaaacaactttctcaca

SEQ ID NO: 455 - DNA, 17 bp, Arabidopsis thaliana
aaaacaactttctgacc

SEQ ID NO: 456 - DNA, 17 bp, Arabidopsis thaliana
aaaacaagattccgatg

SEQ ID NO: 457 - DNA, 17 bp, Arabidopsis thaliana
aaaacaaggatgttttc

SEQ ID NO: 458 - DNA, 17 bp, Arabidopsis thaliana
aaaacaagggcctggat

SEQ ID NO: 459 - DNA, 17 bp, Arabidopsis thaliana
aaaacaaggttgatgag

SEQ ID NO: 460 - DNA, 17 bp, Arabidopsis thaliana
aaaacaagtagtgctac

SEQ ID NO: 461 - DNA, 17 bp, Arabidopsis thaliana
aaaacacactgcactgc

SEQ ID NO: 462 - DNA, 17 bp, Arabidopsis thaliana
aaaacacaggcacgcag

SEQ ID NO: 463 - DNA, 17 bp, Arabidopsis thaliana
aaaacacatcacttacc

SEQ ID NO: 464 - DNA, 17 bp, Arabidopsis thaliana
aaaacacatccgaacga

SEQ ID NO: 465 - DNA, 17 bp, Arabidopsis thaliana
aaaacaccgcgacgttt

SEQ ID NO: 466 - DNA, 17 bp, Arabidopsis thaliana
aaaacacggttttacgg

SEQ ID NO: 467 - DNA, 17 bp, Arabidopsis thaliana
aaaacactcgaccaaca

SEQ ID NO: 468 - DNA, 17 bp, Arabidopsis thaliana
aaaacactggccattcg

SEQ ID NO: 469 - DNA, 17 bp, Arabidopsis thaliana
aaaacactgttgcggta

SEQ ID NO: 470 - DNA, 17 bp, Arabidopsis thaliana
aaaacactttgtcctga

SEQ ID NO: 471 - DNA, 17 bp, Arabidopsis thaliana
aaaacagaatgattcac

SEQ ID NO: 472 - DNA, 17 bp, Arabidopsis thaliana
aaaacagacacaatggc

SEQ ID NO: 473 - DNA, 17 bp, Arabidopsis thaliana
aaaacagacccatccat

SEQ ID NO: 474 - DNA, 17 bp, Arabidopsis thaliana
aaaacagcactctacgt

SEQ ID NO: 475 - DNA, 17 bp, Arabidopsis thaliana
aaaacagcactggacta

SEQ ID NO: 476 - DNA, 17 bp, Arabidopsis thaliana
aaaacagcctcgagtga

SEQ ID NO: 477 - DNA, 17 bp, Arabidopsis thaliana
aaaacagcgacctataa

SEQ ID NO: 478 - DNA, 17 bp, Arabidopsis thaliana
aaaacagcggttaccat

SEQ ID NO: 479 - DNA, 17 bp, Arabidopsis thaliana
aaaacagctccagcaat

SEQ ID NO: 480 - DNA, 17 bp, Arabidopsis thaliana
aaaacagcttccagctt

SEQ ID NO: 481 - DNA, 17 bp, Arabidopsis thaliana
aaaacaggacttagctc

SEQ ID NO: 482 - DNA, 17 bp, Arabidopsis thaliana
aaaacagggacgattct

SEQ ID NO: 483 - DNA, 17 bp, Arabidopsis thaliana
aaaacagggggcatttc

SEQ ID NO: 484 - DNA, 17 bp, Arabidopsis thaliana
aaaacaggggttgtacc

SEQ ID NO: 485 - DNA, 17 bp, Arabidopsis thaliana
aaaacaggtaactcact

SEQ ID NO: 486 - DNA, 17 bp, Arabidopsis thaliana
aaaacaggtgcaattct

SEQ ID NO: 487 - DNA, 17 bp, Arabidopsis thaliana
aaaacaggttccctcaa

SEQ ID NO: 488 - DNA, 17 bp, Arabidopsis thaliana
aaaacaggtttgcggga

SEQ ID NO: 489 - DNA, 17 bp, Arabidopsis thaliana
aaaacaggttttgcggg

SEQ ID NO: 490 - DNA, 17 bp, Arabidopsis thaliana
aaaacagtaacagagac

SEQ ID NO: 491 - DNA, 17 bp, Arabidopsis thaliana
aaaacagtccattacaa

SEQ ID NO: 492 - DNA, 17 bp, Arabidopsis thaliana
aaaacagtccgcagatg

SEQ ID NO: 493 - DNA, 17 bp, Arabidopsis thaliana
aaaacagtcgcagcgac

SEQ ID NO: 494 - DNA, 17 bp, Arabidopsis thaliana
aaaacagtcgctttgtg

SEQ ID NO: 495 - DNA, 17 bp, Arabidopsis thaliana
aaaacagtctctttgtg

SEQ ID NO: 496 - DNA, 17 bp, Arabidopsis thaliana
aaaacagtgaaaagtga

SEQ ID NO: 497 - DNA, 17 bp, Arabidopsis thaliana
aaaacagttgacaaaaa

SEQ ID NO: 498 - DNA, 17 bp, Arabidopsis thaliana
aaaacagtttgtgctat

SEQ ID NO: 499 - DNA, 17 bp, Arabidopsis thaliana
aaaacataaacccgtga

SEQ ID NO: 500 - DNA, 17 bp, Arabidopsis thaliana
aaaacataaccgttttg

SEQ ID NO: 501 - DNA, 17 bp, Arabidopsis thaliana
aaaacataatagccccg

SEQ ID NO: 502 - DNA, 17 bp, Arabidopsis thaliana
aaaacatagccacacgt

SEQ ID NO: 503 - DNA, 17 bp, Arabidopsis thaliana
aaaacatagtcaacggg

SEQ ID NO: 504 - DNA, 17 bp, Arabidopsis thaliana
aaaacatatagggctta

SEQ ID NO: 505 - DNA, 17 bp, Arabidopsis thaliana
aaaacatcaataagttg

SEQ ID NO: 506 - DNA, 17 bp, Arabidopsis thaliana
aaaacatccaaactaat

SEQ ID NO: 507 - DNA, 17 bp, Arabidopsis thaliana
aaaacatcgccacacgt

SEQ ID NO: 508 - DNA, 17 bp, Arabidopsis thaliana
aaaacatcgctctgcca

SEQ ID NO: 509 - DNA, 17 bp, Arabidopsis thaliana
aaaacatcggggcattc

SEQ ID NO: 510 - DNA, 17 bp, Arabidopsis thaliana
aaaacatctacttaatg

SEQ ID NO: 511 - DNA, 17 bp, Arabidopsis thaliana
aaaacatgagaaattag

SEQ ID NO: 512 - DNA, 17 bp, Arabidopsis thaliana
aaaacatgagaaattcg

SEQ ID NO: 513 - DNA, 17 bp, Arabidopsis thaliana
aaaacatgatcaacgga

SEQ ID NO: 514 - DNA, 17 bp, Arabidopsis thaliana
aaaacatgattattcgt

SEQ ID NO: 515 - DNA, 17 bp, Arabidopsis thaliana
aaaacatgattttgcgg

SEQ ID NO: 516 - DNA, 17 bp, Arabidopsis thaliana
aaaacatgccacttgta

SEQ ID NO: 517 - DNA, 17 bp, Arabidopsis thaliana
aaaacatggaagaatca

SEQ ID NO: 518 - DNA, 17 bp, Arabidopsis thaliana
aaaacatggatcagctt

SEQ ID NO: 519 - DNA, 17 bp, Arabidopsis thaliana
aaaacatggctttgcga

SEQ ID NO: 520 - DNA, 17 bp, Arabidopsis thaliana
aaaacatgggttgactt

SEQ ID NO: 521 - DNA, 17 bp, Arabidopsis thaliana
aaaacatggtcaaaggg

SEQ ID NO: 522 - DNA, 17 bp, Arabidopsis thaliana
aaaacatggtcaacggg

SEQ ID NO: 523 - DNA, 17 bp, Arabidopsis thaliana
aaaacatggttcggttc

SEQ ID NO: 524 - DNA, 17 bp, Arabidopsis thaliana
aaaacatgtgtcacatg

SEQ ID NO: 525 - DNA, 17 bp, Arabidopsis thaliana
aaaacattatcgctgtg

SEQ ID NO: 526 - DNA, 17 bp, Arabidopsis thaliana
aaaacattctcaaggga

SEQ ID NO: 527 - DNA, 17 bp, Arabidopsis thaliana
aaaacattgagccaaat

SEQ ID NO: 528 - DNA, 17 bp, Arabidopsis thaliana
aaaacattggttgtggc

SEQ ID NO: 529 - DNA, 17 bp, Arabidopsis thaliana
aaaacatttgttttgcg

SEQ ID NO: 530 - DNA, 17 bp, Arabidopsis thaliana
aaaacattttctctggc

SEQ ID NO: 531 - DNA, 17 bp, Arabidopsis thaliana
aaaacattttctttggc

SEQ ID NO: 532 - DNA, 17 bp, Arabidopsis thaliana
aaaaccaaaaggtgtgg

SEQ ID NO: 533 - DNA, 17 bp, Arabidopsis thaliana
aaaaccaaaggtgaatt

SEQ ID NO: 534 - DNA, 17 bp, Arabidopsis thaliana
aaaaccaaatctctcgg

SEQ ID NO: 535 - DNA, 17 bp, Arabidopsis thaliana
aaaaccaacaggtttac

SEQ ID NO: 536 - DNA, 17 bp, Arabidopsis thaliana
aaaaccaactgcaactg

SEQ ID NO: 537 - DNA, 17 bp, Arabidopsis thaliana
aaaaccaactgctgtgc

SEQ ID NO: 538 - DNA, 17 bp, Arabidopsis thaliana
aaaaccaagggcttttg

SEQ ID NO: 539 - DNA, 17 bp, Arabidopsis thaliana
aaaaccaataggaccaa

SEQ ID NO: 540 - DNA, 17 bp, Arabidopsis thaliana
aaaaccacagttgctta

SEQ ID NO: 541 - DNA, 17 bp, Arabidopsis thaliana
aaaaccacatctacttc

SEQ ID NO: 542 - DNA, 17 bp, Arabidopsis thaliana
aaaaccaccagttgcaa

SEQ ID NO: 543 - DNA, 17 bp, Arabidopsis thaliana
aaaaccacgttttggca

SEQ ID NO: 544 - DNA, 17 bp, Arabidopsis thaliana
aaaaccagaagtgatgt

SEQ ID NO: 545 - DNA, 17 bp, Arabidopsis thaliana
aaaaccagaggtggatc

SEQ ID NO: 546 - DNA, 17 bp, Arabidopsis thaliana
aaaaccaggcgatttgt

SEQ ID NO: 547 - DNA, 17 bp, Arabidopsis thaliana
aaaaccatagaccatgg

SEQ ID NO: 548 - DNA, 17 bp, Arabidopsis thaliana
aaaaccatcaccgcctg

SEQ ID NO: 549 - DNA, 17 bp, Arabidopsis thaliana
aaaaccatcggatcgat

SEQ ID NO: 550 - DNA, 17 bp, Arabidopsis thaliana
aaaaccatcggctggcg

SEQ ID NO: 551 - DNA, 17 bp, Arabidopsis thaliana
aaaaccatctacctctg

SEQ ID NO: 552 - DNA, 17 bp, Arabidopsis thaliana
aaaaccatctagtggga

SEQ ID NO: 553 - DNA, 17 bp, Arabidopsis thaliana
aaaaccatctctattgg

SEQ ID NO: 554 - DNA, 17 bp, Arabidopsis thaliana
aaaaccatgcctctctc

SEQ ID NO: 555 - DNA, 17 bp, Arabidopsis thaliana
aaaaccatggtttagtt

SEQ ID NO: 556 - DNA, 17 bp, Arabidopsis thaliana
aaaaccattttcaactg

SEQ ID NO: 557 - DNA, 17 bp, Arabidopsis thaliana
aaaacccaagtgaccac

SEQ ID NO: 558 - DNA, 17 bp, Arabidopsis thaliana
aaaacccacacccgacc

SEQ ID NO: 559 - DNA, 17 bp, Arabidopsis thaliana
aaaacccacaccggccg

SEQ ID NO: 560 - DNA, 17 bp, Arabidopsis thaliana
aaaacccacataaaatt

SEQ ID NO: 561 - DNA, 17 bp, Arabidopsis thaliana
aaaacccagagttgtgt

SEQ ID NO: 562 - DNA, 17 bp, Arabidopsis thaliana
aaaacccagcggggcaa

SEQ ID NO: 563 - DNA, 17 bp, Arabidopsis thaliana
aaaacccagtggactag

SEQ ID NO: 564 - DNA, 17 bp, Arabidopsis thaliana
aaaacccatgggtatcg

SEQ ID NO: 565 - DNA, 17 bp, Arabidopsis thaliana
aaaacccgaaaaactct

SEQ ID NO: 566 - DNA, 17 bp, Arabidopsis thaliana
aaaacccgacctccaat

SEQ ID NO: 567 - DNA, 17 bp, Arabidopsis thaliana
aaaacccgactaaataa

SEQ ID NO: 568 - DNA, 17 bp, Arabidopsis thaliana
aaaacccgatcgggaaa

SEQ ID NO: 569 - DNA, 17 bp, Arabidopsis thaliana
aaaacccgatcgggcca

SEQ ID NO: 570 - DNA, 17 bp, Arabidopsis thaliana
aaaacccgcaaacgcac

SEQ ID NO: 571 - DNA, 17 bp, Arabidopsis thaliana
aaaacccggcgccggca

SEQ ID NO: 572 - DNA, 17 bp, Arabidopsis thaliana
aaaacccggctgttctg

SEQ ID NO: 573 - DNA, 17 bp, Arabidopsis thaliana
aaaacccgtgggatggg

SEQ ID NO: 574 - DNA, 17 bp, Arabidopsis thaliana
aaaacccgtggttaact

SEQ ID NO: 575 - DNA, 17 bp, Arabidopsis thaliana
aaaacccgttctgccaa

SEQ ID NO: 576 - DNA, 17 bp, Arabidopsis thaliana
aaaaccctatcgactaa

SEQ ID NO: 577 - DNA, 17 bp, Arabidopsis thaliana
aaaaccctatcggctga

SEQ ID NO: 578 - DNA, 17 bp, Arabidopsis thaliana
aaaaccctcaactttgg

SEQ ID NO: 579 - DNA, 17 bp, Arabidopsis thaliana
aaaaccctcagctttgg

SEQ ID NO: 580 - DNA, 17 bp, Arabidopsis thaliana
aaaaccctgtgcctcag

SEQ ID NO: 581 - DNA, 17 bp, Arabidopsis thaliana
aaaaccctgtggagact

SEQ ID NO: 582 - DNA, 17 bp, Arabidopsis thaliana
aaaaccgaaaggtgcat

SEQ ID NO: 583 - DNA, 17 bp, Arabidopsis thaliana
aaaaccgaccaacggtg

SEQ ID NO: 584 - DNA, 17 bp, Arabidopsis thaliana
aaaaccgaccgctgggg

SEQ ID NO: 585 - DNA, 17 bp, Arabidopsis thaliana
aaaaccgacggagcgac

SEQ ID NO: 586 - DNA, 17 bp, Arabidopsis thaliana
aaaaccgactatcgttt

SEQ ID NO: 587 - DNA, 17 bp, Arabidopsis thaliana
aaaaccgacttagaaga

SEQ ID NO: 588 - DNA, 17 bp, Arabidopsis thaliana
aaaaccgactttgtgct

SEQ ID NO: 589 - DNA, 17 bp, Arabidopsis thaliana
aaaaccgagatctgatt

SEQ ID NO: 590 - DNA, 17 bp, Arabidopsis thaliana
aaaaccgaggatggtgt

SEQ ID NO: 591 - DNA, 17 bp, Arabidopsis thaliana
aaaaccgatcgttgcga

SEQ ID NO: 592 - DNA, 17 bp, Arabidopsis thaliana
aaaaccgatggagcggc

SEQ ID NO: 593 - DNA, 17 bp, Arabidopsis thaliana
aaaaccgcaacagatca

SEQ ID NO: 594 - DNA, 17 bp, Arabidopsis thaliana
aaaaccgcaaccgtcca

SEQ ID NO: 595 - DNA, 17 bp, Arabidopsis thaliana
aaaaccgcaaccgtccg

SEQ ID NO: 596 - DNA, 17 bp, Arabidopsis thaliana
aaaaccgcacccaaaac

SEQ ID NO: 597 - DNA, 17 bp, Arabidopsis thaliana
aaaaccgcaccgcaaca

SEQ ID NO: 598 - DNA, 17 bp, Arabidopsis thaliana
aaaaccgcactgaaaca

SEQ ID NO: 599 - DNA, 17 bp, Arabidopsis thaliana
aaaaccgcagcggacca

SEQ ID NO: 600 - DNA, 17 bp, Arabidopsis thaliana
aaaaccgcagggatttt

SEQ ID NO: 601 - DNA, 17 bp, Arabidopsis thaliana
aaaaccgccagacattg

SEQ ID NO: 602 - DNA, 17 bp, Arabidopsis thaliana
aaaaccgcggtttttag

SEQ ID NO: 603 - DNA, 17 bp, Arabidopsis thaliana
aaaaccgcgtacaacat

SEQ ID NO: 604 - DNA, 17 bp, Arabidopsis thaliana
aaaaccgctcgcctgcc

SEQ ID NO: 605 - DNA, 17 bp, Arabidopsis thaliana
aaaaccgcttcatgtca

SEQ ID NO: 606 - DNA, 17 bp, Arabidopsis thaliana
aaaaccggacaactcac

SEQ ID NO: 607 - DNA, 17 bp, Arabidopsis thaliana
aaaaccggatcgacttc

SEQ ID NO: 608 - DNA, 17 bp, Arabidopsis thaliana
aaaaccgggtgaatcca

SEQ ID NO: 609 - DNA, 17 bp, Arabidopsis thaliana
aaaaccgggtgacggga

SEQ ID NO: 610 - DNA, 17 bp, Arabidopsis thaliana
aaaaccggtggcttaat

SEQ ID NO: 611 - DNA, 17 bp, Arabidopsis thaliana
aaaaccggttggtactc

SEQ ID NO: 612 - DNA, 17 bp, Arabidopsis thaliana
aaaaccgtatcgcaaca

SEQ ID NO: 613 - DNA, 17 bp, Arabidopsis thaliana
aaaaccgtatcgtaaca

SEQ ID NO: 614 - DNA, 17 bp, Arabidopsis thaliana
aaaaccgtcaacggatc

SEQ ID NO: 615 - DNA, 17 bp, Arabidopsis thaliana
aaaaccgtctacagatt

SEQ ID NO: 616 - DNA, 17 bp, Arabidopsis thaliana
aaaaccgtgaattgacc

SEQ ID NO: 617 - DNA, 17 bp, Arabidopsis thaliana
aaaaccgttgcggaccg

SEQ ID NO: 618 - DNA, 17 bp, Arabidopsis thaliana
aaaaccgtttatagacc

SEQ ID NO: 619 - DNA, 17 bp, Arabidopsis thaliana
aaaacctaaagctctca

SEQ ID NO: 620 - DNA, 17 bp, Arabidopsis thaliana
aaaacctaaatgtgtgc

SEQ ID NO: 621 - DNA, 17 bp, Arabidopsis thaliana
aaaacctaaccattact

SEQ ID NO: 622 - DNA, 17 bp, Arabidopsis thaliana
aaaacctaagctcgttg

SEQ ID NO: 623 - DNA, 17 bp, Arabidopsis thaliana
aaaacctacattggttc

SEQ ID NO: 624 - DNA, 17 bp, Arabidopsis thaliana
aaaacctaccgtctctg

SEQ ID NO: 625 - DNA, 17 bp, Arabidopsis thaliana
aaaacctacttcttggt

SEQ ID NO: 626 - DNA, 17 bp, Arabidopsis thaliana
aaaacctagatttgtat

SEQ ID NO: 627 - DNA, 17 bp, Arabidopsis thaliana
aaaacctagcgccgctt

SEQ ID NO: 628 - DNA, 17 bp, Arabidopsis thaliana
aaaacctataatctttg

SEQ ID NO: 629 - DNA, 17 bp, Arabidopsis thaliana
aaaacctatgctttgtt

SEQ ID NO: 630 - DNA, 17 bp, Arabidopsis thaliana
aaaacctcaactttggc

SEQ ID NO: 631 - DNA, 17 bp, Arabidopsis thaliana
aaaacctcccgagaccc

SEQ ID NO: 632 - DNA, 17 bp, Arabidopsis thaliana
aaaacctccggccttct

SEQ ID NO: 633 - DNA, 17 bp, Arabidopsis thaliana
aaaacctcggacattgg

SEQ ID NO: 634 - DNA, 17 bp, Arabidopsis thaliana
aaaacctgaatagttag

SEQ ID NO: 635 - DNA, 17 bp, Arabidopsis thaliana
aaaacctgacccacatc

SEQ ID NO: 636 - DNA, 17 bp, Arabidopsis thaliana
aaaacctgacgggactt

SEQ ID NO: 637 - DNA, 17 bp, Arabidopsis thaliana
aaaacctgatagtttaa

SEQ ID NO: 638 - DNA, 17 bp, Arabidopsis thaliana
aaaacctgattgttccg

SEQ ID NO: 639 - DNA, 17 bp, Arabidopsis thaliana
aaaacctgcaacctaca

SEQ ID NO: 640 - DNA, 17 bp, Arabidopsis thaliana
aaaacctgcccaagctt

SEQ ID NO: 641 - DNA, 17 bp, Arabidopsis thaliana
aaaacctggaccttggt

SEQ ID NO: 642 - DNA, 17 bp, Arabidopsis thaliana
aaaacctggcagctcct

SEQ ID NO: 643 - DNA, 17 bp, Arabidopsis thaliana
aaaacctggttgggcca

SEQ ID NO: 644 - DNA, 17 bp, Arabidopsis thaliana
aaaaccttcattgatct

SEQ ID NO: 645 - DNA, 17 bp, Arabidopsis thaliana
aaaaccttggtctgtct

SEQ ID NO: 646 - DNA, 17 bp, Arabidopsis thaliana
aaaaccttgtgcccttg

SEQ ID NO: 647 - DNA, 17 bp, Arabidopsis thaliana
aaaacctttataaagtt

SEQ ID NO: 648 - DNA, 17 bp, Arabidopsis thaliana
aaaacgaaactgaaccg

SEQ ID NO: 649 - DNA, 17 bp, Arabidopsis thaliana
aaaacgaacagggcata

SEQ ID NO: 650 - DNA, 17 bp, Arabidopsis thaliana
aaaacgaacatctcatt

SEQ ID NO: 651 - DNA, 17 bp, Arabidopsis thaliana
aaaacgaatgaccagca

SEQ ID NO: 652 - DNA, 17 bp, Arabidopsis thaliana
aaaacgacatctatttt

SEQ ID NO: 653 - DNA, 17 bp, Arabidopsis thaliana
aaaacgaccaagtgtca

SEQ ID NO: 654 - DNA, 17 bp, Arabidopsis thaliana
aaaacgaccatttcaag

SEQ ID NO: 655 - DNA, 17 bp, Arabidopsis thaliana
aaaacgaccctcggcaa

SEQ ID NO: 656 - DNA, 17 bp, Arabidopsis thaliana
aaaacgacgacgtttgc

SEQ ID NO: 657 - DNA, 17 bp, Arabidopsis thaliana
aaaacgacggattctaa

SEQ ID NO: 658 - DNA, 17 bp, Arabidopsis thaliana
aaaacgacgtcattttg

SEQ ID NO: 659 - DNA, 17 bp, Arabidopsis thaliana
aaaacgacgtcgtctta

SEQ ID NO: 660 - DNA, 17 bp, Arabidopsis thaliana
aaaacgacgtcgtttta

SEQ ID NO: 661 - DNA, 17 bp, Arabidopsis thaliana
aaaacgacgtcgttttc

SEQ ID NO: 662 - DNA, 17 bp, Arabidopsis thaliana
aaaacgacgtcgttttg

SEQ ID NO: 663 - DNA, 17 bp, Arabidopsis thaliana
aaaacgacgtggtttta

SEQ ID NO: 664 - DNA, 17 bp, Arabidopsis thaliana
aaaacgactaatcggga

SEQ ID NO: 665 - DNA, 17 bp, Arabidopsis thaliana
aaaacgactctcagcaa

SEQ ID NO: 666 - DNA, 17 bp, Arabidopsis thaliana
aaaacgactctcggcaa

SEQ ID NO: 667 - DNA, 17 bp, Arabidopsis thaliana
aaaacgactctcggtaa

SEQ ID NO: 668 - DNA, 17 bp, Arabidopsis thaliana
aaaacgacttccggcaa

SEQ ID NO: 669 - DNA, 17 bp, Arabidopsis thaliana
aaaacgacttgtgtccc

SEQ ID NO: 670 - DNA, 17 bp, Arabidopsis thaliana
aaaacgagggtttacga

SEQ ID NO: 671 - DNA, 17 bp, Arabidopsis thaliana
aaaacgagttcatgtcc

SEQ ID NO: 672 - DNA, 17 bp, Arabidopsis thaliana
aaaacgagttttaccca

SEQ ID NO: 673 - DNA, 17 bp, Arabidopsis thaliana
aaaacgatatgtggtta

SEQ ID NO: 674 - DNA, 17 bp, Arabidopsis thaliana
aaaacgatccatttggt

SEQ ID NO: 675 - DNA, 17 bp, Arabidopsis thaliana
aaaacgatgacgccgct

SEQ ID NO: 676 - DNA, 17 bp, Arabidopsis thaliana
aaaacgattcgatctgt

SEQ ID NO: 677 - DNA, 17 bp, Arabidopsis thaliana
aaaacgattgcgtccag

SEQ ID NO: 678 - DNA, 17 bp, Arabidopsis thaliana
aaaacgcagcgtttgca

SEQ ID NO: 679 - DNA, 17 bp, Arabidopsis thaliana
aaaacgcagtcaccatt

SEQ ID NO: 680 - DNA, 17 bp, Arabidopsis thaliana
aaaacgcagttaccatt

SEQ ID NO: 681 - DNA, 17 bp, Arabidopsis thaliana
aaaacgcatgatccgct

SEQ ID NO: 682 - DNA, 17 bp, Arabidopsis thaliana
aaaacgccaggcatttg

SEQ ID NO: 683 - DNA, 17 bp, Arabidopsis thaliana
aaaacgcctctcggcaa

SEQ ID NO: 684 - DNA, 17 bp, Arabidopsis thaliana
aaaacgcgagtgacttg

SEQ ID NO: 685 - DNA, 17 bp, Arabidopsis thaliana
aaaacgcgcattacggt

SEQ ID NO: 686 - DNA, 17 bp, Arabidopsis thaliana
aaaacgcggattacggt

SEQ ID NO: 687 - DNA, 17 bp, Arabidopsis thaliana
aaaacgcggatttgtgg

SEQ ID NO: 688 - DNA, 17 bp, Arabidopsis thaliana
aaaacgcggtcaaaatg

SEQ ID NO: 689 - DNA, 17 bp, Arabidopsis thaliana
aaaacgcggtccaaatc

SEQ ID NO: 690 - DNA, 17 bp, Arabidopsis thaliana
aaaacgcggttaccatt

SEQ ID NO: 691 - DNA, 17 bp, Arabidopsis thaliana
aaaacgcgttgtatgcc

SEQ ID NO: 692 - DNA, 17 bp, Arabidopsis thaliana
aaaacgcgtttaagcgc

SEQ ID NO: 693 - DNA, 17 bp, Arabidopsis thaliana
aaaacgctgcgtttgcg

SEQ ID NO: 694 - DNA, 17 bp, Arabidopsis thaliana
aaaacgctgtatctgat

SEQ ID NO: 695 - DNA, 17 bp, Arabidopsis thaliana
aaaacgcttgtaaaacg

SEQ ID NO: 696 - DNA, 17 bp, Arabidopsis thaliana
aaaacggacaacttttg

SEQ ID NO: 697 - DNA, 17 bp, Arabidopsis thaliana
aaaacggagagaaattg

SEQ ID NO: 698 - DNA, 17 bp, Arabidopsis thaliana
aaaacggagcaaggcga

SEQ ID NO: 699 - DNA, 17 bp, Arabidopsis thaliana
aaaacggaggtgtacaa

SEQ ID NO: 700 - DNA, 17 bp, Arabidopsis thaliana
aaaacggagttcctaaa

SEQ ID NO: 701 - DNA, 17 bp, Arabidopsis thaliana
aaaacggatagaagcct

SEQ ID NO: 702 - DNA, 17 bp, Arabidopsis thaliana
aaaacggatttggaggg

SEQ ID NO: 703 - DNA, 17 bp, Arabidopsis thaliana
aaaacggcaagatacct

SEQ ID NO: 704 - DNA, 17 bp, Arabidopsis thaliana
aaaacggcataaaactg

SEQ ID NO: 705 - DNA, 17 bp, Arabidopsis thaliana
aaaacggcattatgacc

SEQ ID NO: 706 - DNA, 17 bp, Arabidopsis thaliana
aaaacggccgtgaaaga

SEQ ID NO: 707 - DNA, 17 bp, Arabidopsis thaliana
aaaacggcctagaccct

SEQ ID NO: 708 - DNA, 17 bp, Arabidopsis thaliana
aaaacggcgaagtatga

SEQ ID NO: 709 - DNA, 17 bp, Arabidopsis thaliana
aaaacggctcgactctt

SEQ ID NO: 710 - DNA, 17 bp, Arabidopsis thaliana
aaaacggctctcggcaa

SEQ ID NO: 711 - DNA, 17 bp, Arabidopsis thaliana
aaaacggcttagaccct

SEQ ID NO: 712 - DNA, 17 bp, Arabidopsis thaliana
aaaacggcttaggccct

SEQ ID NO: 713 - DNA, 17 bp, Arabidopsis thaliana
aaaacggcttggtcaac

SEQ ID NO: 714 - DNA, 17 bp, Arabidopsis thaliana
aaaacgggatgtcgttt

SEQ ID NO: 715 - DNA, 17 bp, Arabidopsis thaliana
aaaacgggccgcaacag

SEQ ID NO: 716 - DNA, 17 bp, Arabidopsis thaliana
aaaacgggcgatttcga

SEQ ID NO: 717 - DNA, 17 bp, Arabidopsis thaliana
aaaacgggctaagaatc

SEQ ID NO: 718 - DNA, 17 bp, Arabidopsis thaliana
aaaacgggtcggtttct

SEQ ID NO: 719 - DNA, 17 bp, Arabidopsis thaliana
aaaacgggttatttgtt

SEQ ID NO: 720 - DNA, 17 bp, Arabidopsis thaliana
aaaacgggtttgatgtg

SEQ ID NO: 721 - DNA, 17 bp, Arabidopsis thaliana
aaaacggtccaatttgg

SEQ ID NO: 722 - DNA, 17 bp, Arabidopsis thaliana
aaaacggtccacagtta

SEQ ID NO: 723 - DNA, 17 bp, Arabidopsis thaliana
aaaacggtccgtacttg

SEQ ID NO: 724 - DNA, 17 bp, Arabidopsis thaliana
aaaacggtcggcagatg

SEQ ID NO: 725 - DNA, 17 bp, Arabidopsis thaliana
aaaacggtctaatttgt

SEQ ID NO: 726 - DNA, 17 bp, Arabidopsis thaliana
aaaacggtctatttttg

SEQ ID NO: 727 - DNA, 17 bp, Arabidopsis thaliana
aaaacggtctggttacg

SEQ ID NO: 728 - DNA, 17 bp, Arabidopsis thaliana
aaaacggttaccgtcgg

SEQ ID NO: 729 - DNA, 17 bp, Arabidopsis thaliana
aaaacggttacttttct

SEQ ID NO: 730 - DNA, 17 bp, Arabidopsis thaliana
aaaacggttcgtagtta

SEQ ID NO: 731 - DNA, 17 bp, Arabidopsis thaliana
aaaacggttgcggttaa

SEQ ID NO: 732 - DNA, 17 bp, Arabidopsis thaliana
aaaacggtttgcagatg

SEQ ID NO: 733 - DNA, 17 bp, Arabidopsis thaliana
aaaacggtttgccactt

SEQ ID NO: 734 - DNA, 17 bp, Arabidopsis thaliana
aaaacgtaatctggcta

SEQ ID NO: 735 - DNA, 17 bp, Arabidopsis thaliana
aaaacgtcgcggtgttt

SEQ ID NO: 736 - DNA, 17 bp, Arabidopsis thaliana
aaaacgtctctcggcaa

SEQ ID NO: 737 - DNA, 17 bp, Arabidopsis thaliana
aaaacgtgatactattc

SEQ ID NO: 738 - DNA, 17 bp, Arabidopsis thaliana
aaaacgtgatcgctgga

SEQ ID NO: 739 - DNA, 17 bp, Arabidopsis thaliana
aaaacgtggtattacga

SEQ ID NO: 740 - DNA, 17 bp, Arabidopsis thaliana
aaaacgtgtaagactgc

SEQ ID NO: 741 - DNA, 17 bp, Arabidopsis thaliana
aaaacgttactgtcccc

SEQ ID NO: 742 - DNA, 17 bp, Arabidopsis thaliana
aaaactaaagatgttgt

SEQ ID NO: 743 - DNA, 17 bp, Arabidopsis thaliana
aaaactaaatcgtcctg

SEQ ID NO: 744 - DNA, 17 bp, Arabidopsis thaliana
aaaactaaccgaatcgg

SEQ ID NO: 745 - DNA, 17 bp, Arabidopsis thaliana
aaaactaaccggatttt

SEQ ID NO: 746 - DNA, 17 bp, Arabidopsis thaliana
aaaactaactgctgtgg

SEQ ID NO: 747 - DNA, 17 bp, Arabidopsis thaliana
aaaactaagcggatttt

SEQ ID NO: 748 - DNA, 17 bp, Arabidopsis thaliana
aaaactaagtccgaagc

SEQ ID NO: 749 - DNA, 17 bp, Arabidopsis thaliana
aaaactaagtccgcacc

SEQ ID NO: 750 - DNA, 17 bp, Arabidopsis thaliana
aaaactaagtccgcagc

SEQ ID NO: 751 - DNA, 17 bp, Arabidopsis thaliana
aaaactaagtccgcatc

SEQ ID NO: 752 - DNA, 17 bp, Arabidopsis thaliana
aaaactaagtccgtagc

SEQ ID NO: 753 - DNA, 17 bp, Arabidopsis thaliana
aaaactaagtttgtagc

SEQ ID NO: 754 - DNA, 17 bp, Arabidopsis thaliana
aaaactaatcactgtgg

SEQ ID NO: 755 - DNA, 17 bp, Arabidopsis thaliana
aaaactaatccgatttt

SEQ ID NO: 756 - DNA, 17 bp, Arabidopsis thaliana
aaaactaatctcgaagg

SEQ ID NO: 757 - DNA, 17 bp, Arabidopsis thaliana
aaaactaatctcgcagg

SEQ ID NO: 758 - DNA, 17 bp, Arabidopsis thaliana
aaaactaatctggtttg

SEQ ID NO: 759 - DNA, 17 bp, Arabidopsis thaliana
aaaactacactcggaca

SEQ ID NO: 760 - DNA, 17 bp, Arabidopsis thaliana
aaaactacatcttggta

SEQ ID NO: 761 - DNA, 17 bp, Arabidopsis thaliana
aaaactacatcttggtt

SEQ ID NO: 762 - DNA, 17 bp, Arabidopsis thaliana
aaaactaccccttctaa

SEQ ID NO: 763 - DNA, 17 bp, Arabidopsis thaliana
aaaactacggctaacta

SEQ ID NO: 764 - DNA, 17 bp, Arabidopsis thaliana
aaaactactgagtgctt

SEQ ID NO: 765 - DNA, 17 bp, Arabidopsis thaliana
aaaactacttgcagtgc

SEQ ID NO: 766 - DNA, 17 bp, Arabidopsis thaliana
aaaactacttgtggctg

SEQ ID NO: 767 - DNA, 17 bp, Arabidopsis thaliana
aaaactactttgtccgc

SEQ ID NO: 768 - DNA, 17 bp, Arabidopsis thaliana
aaaactagagagcaatc

SEQ ID NO: 769 - DNA, 17 bp, Arabidopsis thaliana
aaaactagagatgttgt

SEQ ID NO: 770 - DNA, 17 bp, Arabidopsis thaliana
aaaactagattcagctg

SEQ ID NO: 771 - DNA, 17 bp, Arabidopsis thaliana
aaaactagattttgacc

SEQ ID NO: 772 - DNA, 17 bp, Arabidopsis thaliana
aaaactagccccgcggt

SEQ ID NO: 773 - DNA, 17 bp, Arabidopsis thaliana
aaaactagccctgggca

SEQ ID NO: 774 - DNA, 17 bp, Arabidopsis thaliana
aaaactagccggatgtt

SEQ ID NO: 775 - DNA, 17 bp, Arabidopsis thaliana
aaaactagctaagggag

SEQ ID NO: 776 - DNA, 17 bp, Arabidopsis thaliana
aaaactagctctaacaa

SEQ ID NO: 777 - DNA, 17 bp, Arabidopsis thaliana
aaaactaggacggagct

SEQ ID NO: 778 - DNA, 17 bp, Arabidopsis thaliana
aaaactaggatcggtag

SEQ ID NO: 779 - DNA, 17 bp, Arabidopsis thaliana
aaaactaggcttgggcg

SEQ ID NO: 780 - DNA, 17 bp, Arabidopsis thaliana
aaaactagggaagaatt

SEQ ID NO: 781 - DNA, 17 bp, Arabidopsis thaliana
aaaactaggtgtagaca

SEQ ID NO: 782 - DNA, 17 bp, Arabidopsis thaliana
aaaactagttgcggtgc

SEQ ID NO: 783 - DNA, 17 bp, Arabidopsis thaliana
aaaactataagctgtgc

SEQ ID NO: 784 - DNA, 17 bp, Arabidopsis thaliana
aaaactatccttgcaag

SEQ ID NO: 785 - DNA, 17 bp, Arabidopsis thaliana
aaaactatctccgcggt

SEQ ID NO: 786 - DNA, 17 bp, Arabidopsis thaliana
aaaactatctcgggttt

SEQ ID NO: 787 - DNA, 17 bp, Arabidopsis thaliana
aaaactatggctcaacg

SEQ ID NO: 788 - DNA, 17 bp, Arabidopsis thaliana
aaaactatttccgtgtt

SEQ ID NO: 789 - DNA, 17 bp, Arabidopsis thaliana
aaaactatttgtcttcc

SEQ ID NO: 790 - DNA, 17 bp, Arabidopsis thaliana
aaaactattttcctggg

SEQ ID NO: 791 - DNA, 17 bp, Arabidopsis thaliana
aaaactcaaacccattt

SEQ ID NO: 792 - DNA, 17 bp, Arabidopsis thaliana
aaaactcaacttttcgg

SEQ ID NO: 793 - DNA, 17 bp, Arabidopsis thaliana
aaaactcaagatgtttg

SEQ ID NO: 794 - DNA, 17 bp, Arabidopsis thaliana
aaaactcacagtgattc

SEQ ID NO: 795 - DNA, 17 bp, Arabidopsis thaliana
aaaactcacagtgattg

SEQ ID NO: 796 - DNA, 17 bp, Arabidopsis thaliana
aaaactcacttaacatg

SEQ ID NO: 797 - DNA, 17 bp, Arabidopsis thaliana
aaaactcagagactaag

SEQ ID NO: 798 - DNA, 17 bp, Arabidopsis thaliana
aaaactcagatcgtgtt

SEQ ID NO: 799 - DNA, 17 bp, Arabidopsis thaliana
aaaactcagccgacggt

SEQ ID NO: 800 - DNA, 17 bp, Arabidopsis thaliana
aaaactcagtcccgact

SEQ ID NO: 801 - DNA, 17 bp, Arabidopsis thaliana
aaaactcagtctcaacc

SEQ ID NO: 802 - DNA, 17 bp, Arabidopsis thaliana
aaaactcatagcttgtg

SEQ ID NO: 803 - DNA, 17 bp, Arabidopsis thaliana
aaaactcatcttggttg

SEQ ID NO: 804 - DNA, 17 bp, Arabidopsis thaliana
aaaactcatgattgcag

SEQ ID NO: 805 - DNA, 17 bp, Arabidopsis thaliana
aaaactcatgtatgacc

SEQ ID NO: 806 - DNA, 17 bp, Arabidopsis thaliana
aaaactccaaccttgct

SEQ ID NO: 807 - DNA, 17 bp, Arabidopsis thaliana
aaaactccaaccttggt

SEQ ID NO: 808 - DNA, 17 bp, Arabidopsis thaliana
aaaactccagaccgttg

SEQ ID NO: 809 - DNA, 17 bp, Arabidopsis thaliana
aaaactccagccgccgc

SEQ ID NO: 810 - DNA, 17 bp, Arabidopsis thaliana
aaaactcccaattgctt

SEQ ID NO: 811 - DNA, 17 bp, Arabidopsis thaliana
aaaactcctggaactga

SEQ ID NO: 812 - DNA, 17 bp, Arabidopsis thaliana
aaaactcgcagtggcct

SEQ ID NO: 813 - DNA, 17 bp, Arabidopsis thaliana
aaaactcggaccaatcc

SEQ ID NO: 814 - DNA, 17 bp, Arabidopsis thaliana
aaaactcggccaactat

SEQ ID NO: 815 - DNA, 17 bp, Arabidopsis thaliana
aaaactcggttgcgatt

SEQ ID NO: 816 - DNA, 17 bp, Arabidopsis thaliana
aaaactcggttgcggtt

SEQ ID NO: 817 - DNA, 17 bp, Arabidopsis thaliana
aaaactcgtccatgaga

SEQ ID NO: 818 - DNA, 17 bp, Arabidopsis thaliana
aaaactcgtggctttct

SEQ ID NO: 819 - DNA, 17 bp, Arabidopsis thaliana
aaaactcgtgggatcat

SEQ ID NO: 820 - DNA, 17 bp, Arabidopsis thaliana
aaaactcgtgttgcttg

SEQ ID NO: 821 - DNA, 17 bp, Arabidopsis thaliana
aaaactctaccggctga

SEQ ID NO: 822 - DNA, 17 bp, Arabidopsis thaliana
aaaactctagtccgact

SEQ ID NO: 823 - DNA, 17 bp, Arabidopsis thaliana
aaaactctatcggctga

SEQ ID NO: 824 - DNA, 17 bp, Arabidopsis thaliana
aaaactctattgttgcg

SEQ ID NO: 825 - DNA, 17 bp, Arabidopsis thaliana
aaaactctcagggtctt

SEQ ID NO: 826 - DNA, 17 bp, Arabidopsis thaliana
aaaactctcgcaaccgc

SEQ ID NO: 827 - DNA, 17 bp, Arabidopsis thaliana
aaaactctctccagaaa

SEQ ID NO: 828 - DNA, 17 bp, Arabidopsis thaliana
aaaactctctgttttgc

SEQ ID NO: 829 - DNA, 17 bp, Arabidopsis thaliana
aaaactctgggcccact

SEQ ID NO: 830 - DNA, 17 bp, Arabidopsis thaliana
aaaactctgtttgacct

SEQ ID NO: 831 - DNA, 17 bp, Arabidopsis thaliana
aaaactctttcggctga

SEQ ID NO: 832 - DNA, 17 bp, Arabidopsis thaliana
aaaactctttggacttg

SEQ ID NO: 833 - DNA, 17 bp, Arabidopsis thaliana
aaaactgaaaaccatct

SEQ ID NO: 834 - DNA, 17 bp, Arabidopsis thaliana
aaaactgaagactctta

SEQ ID NO: 835 - DNA, 17 bp, Arabidopsis thaliana
aaaactgaagcgcctct

SEQ ID NO: 836 - DNA, 17 bp, Arabidopsis thaliana
aaaactgacccaaaccc

SEQ ID NO: 837 - DNA, 17 bp, Arabidopsis thaliana
aaaactgaccggatcac

SEQ ID NO: 838 - DNA, 17 bp, Arabidopsis thaliana
aaaactgaccggatcag

SEQ ID NO: 839 - DNA, 17 bp, Arabidopsis thaliana
aaaactgacggagccgg

SEQ ID NO: 840 - DNA, 17 bp, Arabidopsis thaliana
aaaactgactatcgttt

SEQ ID NO: 841 - DNA, 17 bp, Arabidopsis thaliana
aaaactgagaagtctcc

SEQ ID NO: 842 - DNA, 17 bp, Arabidopsis thaliana
aaaactgagactcagtc

SEQ ID NO: 843 - DNA, 17 bp, Arabidopsis thaliana
aaaactgagattacaga

SEQ ID NO: 844 - DNA, 17 bp, Arabidopsis thaliana
aaaactgagcactttag

SEQ ID NO: 845 - DNA, 17 bp, Arabidopsis thaliana
aaaactgagcacttttg

SEQ ID NO: 846 - DNA, 17 bp, Arabidopsis thaliana
aaaactgatacgacttt

SEQ ID NO: 847 - DNA, 17 bp, Arabidopsis thaliana
aaaactgatcgacggtt

SEQ ID NO: 848 - DNA, 17 bp, Arabidopsis thaliana
aaaactgatctggactg

SEQ ID NO: 849 - DNA, 17 bp, Arabidopsis thaliana
aaaactgatgattaggt

SEQ ID NO: 850 - DNA, 17 bp, Arabidopsis thaliana
aaaactgcaccgcaaca

SEQ ID NO: 851 - DNA, 17 bp, Arabidopsis thaliana
aaaactgcaccgcaata

SEQ ID NO: 852 - DNA, 17 bp, Arabidopsis thaliana
aaaactgcaccgcatta

SEQ ID NO: 853 - DNA, 17 bp, Arabidopsis thaliana
aaaactgcaccgcattt

SEQ ID NO: 854 - DNA, 17 bp, Arabidopsis thaliana
aaaactgcacttgttcc

SEQ ID NO: 855 - DNA, 17 bp, Arabidopsis thaliana
aaaactgccccttctaa

SEQ ID NO: 856 - DNA, 17 bp, Arabidopsis thaliana
aaaactgcctctaaggg

SEQ ID NO: 857 - DNA, 17 bp, Arabidopsis thaliana
aaaactgcgacatgtgc

SEQ ID NO: 858 - DNA, 17 bp, Arabidopsis thaliana
aaaactgcgtggcagag

SEQ ID NO: 859 - DNA, 17 bp, Arabidopsis thaliana
aaaactgctccggtcgg

SEQ ID NO: 860 - DNA, 17 bp, Arabidopsis thaliana
aaaactgctccttctag

SEQ ID NO: 861 - DNA, 17 bp, Arabidopsis thaliana
aaaactgctgatgtaag

SEQ ID NO: 862 - DNA, 17 bp, Arabidopsis thaliana
aaaactgcttctcgcct

SEQ ID NO: 863 - DNA, 17 bp, Arabidopsis thaliana
aaaactggaatcgttgc

SEQ ID NO: 864 - DNA, 17 bp, Arabidopsis thaliana
aaaactggatccaaagt

SEQ ID NO: 865 - DNA, 17 bp, Arabidopsis thaliana
aaaactggcgtgtgagt

SEQ ID NO: 866 - DNA, 17 bp, Arabidopsis thaliana
aaaactgggtcaatcca

SEQ ID NO: 867 - DNA, 17 bp, Arabidopsis thaliana
aaaactgggtcgcgtct

SEQ ID NO: 868 - DNA, 17 bp, Arabidopsis thaliana
aaaactggtaaaggctt

SEQ ID NO: 869 - DNA, 17 bp, Arabidopsis thaliana
aaaactggtcgtgtggt

SEQ ID NO: 870 - DNA, 17 bp, Arabidopsis thaliana
aaaactggtgattgttg

SEQ ID NO: 871 - DNA, 17 bp, Arabidopsis thaliana
aaaactggtgtcgatcg

SEQ ID NO: 872 - DNA, 17 bp, Arabidopsis thaliana
aaaactggttacaggca

SEQ ID NO: 873 - DNA, 17 bp, Arabidopsis thaliana
aaaactgtaaaccgacg

SEQ ID NO: 874 - DNA, 17 bp, Arabidopsis thaliana
aaaactgtagacatcag

SEQ ID NO: 875 - DNA, 17 bp, Arabidopsis thaliana
aaaactgtcaagttgag

SEQ ID NO: 876 - DNA, 17 bp, Arabidopsis thaliana
aaaactgtcacactacg

SEQ ID NO: 877 - DNA, 17 bp, Arabidopsis thaliana
aaaactgtcattttgcg

SEQ ID NO: 878 - DNA, 17 bp, Arabidopsis thaliana
aaaactgtctacagatc

SEQ ID NO: 879 - DNA, 17 bp, Arabidopsis thaliana
aaaactgtgcttcaatt

SEQ ID NO: 880 - DNA, 17 bp, Arabidopsis thaliana
aaaactgttacactgat

SEQ ID NO: 881 - DNA, 17 bp, Arabidopsis thaliana
aaaactgttcagacctg

SEQ ID NO: 882 - DNA, 17 bp, Arabidopsis thaliana
aaaactgttgactgctt

SEQ ID NO: 883 - DNA, 17 bp, Arabidopsis thaliana
aaaactgtttaggtctt

SEQ ID NO: 884 - DNA, 17 bp, Arabidopsis thaliana
aaaactgtttgtaagac

SEQ ID NO: 885 - DNA, 17 bp, Arabidopsis thaliana
aaaactgttttagggtc

SEQ ID NO: 886 - DNA, 17 bp, Arabidopsis thaliana
aaaacttaaaccgcaac

SEQ ID NO: 887 - DNA, 17 bp, Arabidopsis thaliana
aaaacttaaactcgtga

SEQ ID NO: 888 - DNA, 17 bp, Arabidopsis thaliana
aaaacttagagcacctc

SEQ ID NO: 889 - DNA, 17 bp, Arabidopsis thaliana
aaaacttagtggtggca

SEQ ID NO: 890 - DNA, 17 bp, Arabidopsis thaliana
aaaacttatgcgcttct

SEQ ID NO: 891 - DNA, 17 bp, Arabidopsis thaliana
aaaacttattccgtttg

SEQ ID NO: 892 - DNA, 17 bp, Arabidopsis thaliana
aaaacttcaaccgccgt

SEQ ID NO: 893 - DNA, 17 bp, Arabidopsis thaliana
aaaacttcacctttggc

SEQ ID NO: 894 - DNA, 17 bp, Arabidopsis thaliana
aaaacttcagatgtggg

SEQ ID NO: 895 - DNA, 17 bp, Arabidopsis thaliana
aaaacttcagcaaggac

SEQ ID NO: 896 - DNA, 17 bp, Arabidopsis thaliana
aaaacttcagccgccgc

SEQ ID NO: 897 - DNA, 17 bp, Arabidopsis thaliana
aaaacttccagacctgg

SEQ ID NO: 898 - DNA, 17 bp, Arabidopsis thaliana
aaaacttcgatttcggt

SEQ ID NO: 899 - DNA, 17 bp, Arabidopsis thaliana
aaaacttcgcctaggat

SEQ ID NO: 900 - DNA, 17 bp, Arabidopsis thaliana
aaaacttcgcttgttga

SEQ ID NO: 901 - DNA, 17 bp, Arabidopsis thaliana
aaaacttcggtcaatcc

SEQ ID NO: 902 - DNA, 17 bp, Arabidopsis thaliana
aaaacttcggttcgggt

SEQ ID NO: 903 - DNA, 17 bp, Arabidopsis thaliana
aaaacttctacaaggaa

SEQ ID NO: 904 - DNA, 17 bp, Arabidopsis thaliana
aaaacttctatctttga

SEQ ID NO: 905 - DNA, 17 bp, Arabidopsis thaliana
aaaacttctatctttgt

SEQ ID NO: 906 - DNA, 17 bp, Arabidopsis thaliana
aaaacttctcttgcata

SEQ ID NO: 907 - DNA, 17 bp, Arabidopsis thaliana
aaaacttcttcttggtg

SEQ ID NO: 908 - DNA, 17 bp, Arabidopsis thaliana
aaaacttgaccaagcgt

SEQ ID NO: 909 - DNA, 17 bp, Arabidopsis thaliana
aaaacttgagatctgcc

SEQ ID NO: 910 - DNA, 17 bp, Arabidopsis thaliana
aaaacttgctcactaag

SEQ ID NO: 911 - DNA, 17 bp, Arabidopsis thaliana
aaaacttgcttgtacca

SEQ ID NO: 912 - DNA, 17 bp, Arabidopsis thaliana
aaaacttggaatgtgat

SEQ ID NO: 913 - DNA, 17 bp, Arabidopsis thaliana
aaaacttggaccgcagc

SEQ ID NO: 914 - DNA, 17 bp, Arabidopsis thaliana
aaaacttggcatgtgat

SEQ ID NO: 915 - DNA, 17 bp, Arabidopsis thaliana
aaaacttggtccgcagc

SEQ ID NO: 916 - DNA, 17 bp, Arabidopsis thaliana
aaaacttggtctgaaca

SEQ ID NO: 917 - DNA, 17 bp, Arabidopsis thaliana
aaaacttggtctgaacc

SEQ ID NO: 918 - DNA, 17 bp, Arabidopsis thaliana
aaaacttggtctgtggt

SEQ ID NO: 919 - DNA, 17 bp, Arabidopsis thaliana
aaaacttgtcacggacc

SEQ ID NO: 920 - DNA, 17 bp, Arabidopsis thaliana
aaaacttgtctgctaac

SEQ ID NO: 921 - DNA, 17 bp, Arabidopsis thaliana
aaaacttgtgacgagaa

SEQ ID NO: 922 - DNA, 17 bp, Arabidopsis thaliana
aaaacttgtgactgctt

SEQ ID NO: 923 - DNA, 17 bp, Arabidopsis thaliana
aaaacttgttgtgcaac

SEQ ID NO: 924 - DNA, 17 bp, Arabidopsis thaliana
aaaactttaactgcgct

SEQ ID NO: 925 - DNA, 17 bp, Arabidopsis thaliana
aaaactttcaagttttg

SEQ ID NO: 926 - DNA, 17 bp, Arabidopsis thaliana
aaaactttccgcttcca

SEQ ID NO: 927 - DNA, 17 bp, Arabidopsis thaliana
aaaactttcctagactt

SEQ ID NO: 928 - DNA, 17 bp, Arabidopsis thaliana
aaaactttcgtgacgca

SEQ ID NO: 929 - DNA, 17 bp, Arabidopsis thaliana
aaaactttctactgagt

SEQ ID NO: 930 - DNA, 17 bp, Arabidopsis thaliana
aaaactttctctctgct

SEQ ID NO: 931 - DNA, 17 bp, Arabidopsis thaliana
aaaactttggcttgtat

SEQ ID NO: 932 - DNA, 17 bp, Arabidopsis thaliana
aaaactttgtccagcta

SEQ ID NO: 933 - DNA, 17 bp, Arabidopsis thaliana
aaaacttttccacactt

SEQ ID NO: 934 - DNA, 17 bp, Arabidopsis thaliana
aaaacttttggtaggaa

SEQ ID NO: 935 - DNA, 17 bp, Arabidopsis thaliana
aaaacttttgtccgctt

SEQ ID NO: 936 - DNA, 17 bp, Arabidopsis thaliana
aaaactttttcgacttc

SEQ ID NO: 937 - DNA, 17 bp, Arabidopsis thaliana
aaaacttttttgactca

SEQ ID NO: 938 - DNA, 17 bp, Arabidopsis thaliana
aaaagaaaaccgcagcg

SEQ ID NO: 939 - DNA, 17 bp, Arabidopsis thaliana
aaaagaaaaccgctgcg

SEQ ID NO: 940 - DNA, 17 bp, Arabidopsis thaliana
aaaagaaaatcgctgcg

SEQ ID NO: 941 - DNA, 17 bp, Arabidopsis thaliana
aaaagaaactctttgag

SEQ ID NO: 942 - DNA, 17 bp, Arabidopsis thaliana
aaaagaaagatctctcc

SEQ ID NO: 943 - DNA, 17 bp, Arabidopsis thaliana
aaaagaaagggttgcct

SEQ ID NO: 944 - DNA, 17 bp, Arabidopsis thaliana
aaaagaacgggctaagt

SEQ ID NO: 945 - DNA, 17 bp, Arabidopsis thaliana
aaaagaagacacgtgtc

SEQ ID NO: 946 - DNA, 17 bp, Arabidopsis thaliana
aaaagaagactaactct

SEQ ID NO: 947 - DNA, 17 bp, Arabidopsis thaliana
aaaagaagcggcaggcc

SEQ ID NO: 948 - DNA, 17 bp, Arabidopsis thaliana
aaaagaaggctaactct

SEQ ID NO: 949 - DNA, 17 bp, Arabidopsis thaliana
aaaagaatagccggcga

SEQ ID NO: 950 - DNA, 17 bp, Arabidopsis thaliana
aaaagaatctcagtgga

SEQ ID NO: 951 - DNA, 17 bp, Arabidopsis thaliana
aaaagaatgactgctcg

SEQ ID NO: 952 - DNA, 17 bp, Arabidopsis thaliana
aaaagaatggccggcgt

SEQ ID NO: 953 - DNA, 17 bp, Arabidopsis thaliana
aaaagaattgggacccg

SEQ ID NO: 954 - DNA, 17 bp, Arabidopsis thaliana
aaaagacaaaggccggc

SEQ ID NO: 955 - DNA, 17 bp, Arabidopsis thaliana
aaaagacactaccccag

SEQ ID NO: 956 - DNA, 17 bp, Arabidopsis thaliana
aaaagacagccgaacaa

SEQ ID NO: 957 - DNA, 17 bp, Arabidopsis thaliana
aaaagacagtgctaggc

SEQ ID NO: 958 - DNA, 17 bp, Arabidopsis thaliana
aaaagaccaaaatgatt

SEQ ID NO: 959 - DNA, 17 bp, Arabidopsis thaliana
aaaagaccacagactcc

SEQ ID NO: 960 - DNA, 17 bp, Arabidopsis thaliana
aaaagacgatcaacgaa

SEQ ID NO: 961 - DNA, 17 bp, Arabidopsis thaliana
aaaagacggttcgcagt

SEQ ID NO: 962 - DNA, 17 bp, Arabidopsis thaliana
aaaagactatgtccggg

SEQ ID NO: 963 - DNA, 17 bp, Arabidopsis thaliana
aaaagactgcgcattag

SEQ ID NO: 964 - DNA, 17 bp, Arabidopsis thaliana
aaaagactgcgctaggc

SEQ ID NO: 965 - DNA, 17 bp, Arabidopsis thaliana
aaaagactgcgggattt

SEQ ID NO: 966 - DNA, 17 bp, Arabidopsis thaliana
aaaagacttgtcaacac

SEQ ID NO: 967 - DNA, 17 bp, Arabidopsis thaliana
aaaagagaaggcaattt

SEQ ID NO: 968 - DNA, 17 bp, Arabidopsis thaliana
aaaagagaaggcacttt

SEQ ID NO: 969 - DNA, 17 bp, Arabidopsis thaliana
aaaagagacggtttgat

SEQ ID NO: 970 - DNA, 17 bp, Arabidopsis thaliana
aaaagagactggccgtt

SEQ ID NO: 971 - DNA, 17 bp, Arabidopsis thaliana
aaaagagcctcaacgga

SEQ ID NO: 972 - DNA, 17 bp, Arabidopsis thaliana
aaaagagcgacggaaaa

SEQ ID NO: 973 - DNA, 17 bp, Arabidopsis thaliana
aaaagagcgacgtttct

SEQ ID NO: 974 - DNA, 17 bp, Arabidopsis thaliana
aaaagagcggtgttggt

SEQ ID NO: 975 - DNA, 17 bp, Arabidopsis thaliana
aaaagagctaatcccga

SEQ ID NO: 976 - DNA, 17 bp, Arabidopsis thaliana
aaaagaggaattgtcgc

SEQ ID NO: 977 - DNA, 17 bp, Arabidopsis thaliana
aaaagaggcctttcatt

SEQ ID NO: 978 - DNA, 17 bp, Arabidopsis thaliana
aaaagagtatgcaaccg

SEQ ID NO: 979 - DNA, 17 bp, Arabidopsis thaliana
aaaagataaattgttcc

SEQ ID NO: 980 - DNA, 17 bp, Arabidopsis thaliana
aaaagataacgcaggtg

SEQ ID NO: 981 - DNA, 17 bp, Arabidopsis thaliana
aaaagatagtccggttc

SEQ ID NO: 982 - DNA, 17 bp, Arabidopsis thaliana
aaaagatagtttggaaa

SEQ ID NO: 983 - DNA, 17 bp, Arabidopsis thaliana
aaaagatcacgttgcgg

SEQ ID NO: 984 - DNA, 17 bp, Arabidopsis thaliana
aaaagatcagctgtttc

SEQ ID NO: 985 - DNA, 17 bp, Arabidopsis thaliana
aaaagatcctgctttgg

SEQ ID NO: 986 - DNA, 17 bp, Arabidopsis thaliana
aaaagatcggagattaa

SEQ ID NO: 987 - DNA, 17 bp, Arabidopsis thaliana
aaaagatctcacagaat

SEQ ID NO: 988 - DNA, 17 bp, Arabidopsis thaliana
aaaagatctcggtcggc

SEQ ID NO: 989 - DNA, 17 bp, Arabidopsis thaliana
aaaagatcttgaagcca

SEQ ID NO: 990 - DNA, 17 bp, Arabidopsis thaliana
aaaagatgactggcggc

SEQ ID NO: 991 - DNA, 17 bp, Arabidopsis thaliana
aaaagatggaccgcacg

SEQ ID NO: 992 - DNA, 17 bp, Arabidopsis thaliana
aaaagatggagatgttg

SEQ ID NO: 993 - DNA, 17 bp, Arabidopsis thaliana
aaaagatggcaaagtgc

SEQ ID NO: 994 - DNA, 17 bp, Arabidopsis thaliana
aaaagatgttgctggtt

SEQ ID NO: 995 - DNA, 17 bp, Arabidopsis thaliana
aaaagattcttcataga

SEQ ID NO: 996 - DNA, 17 bp, Arabidopsis thaliana
aaaagattgagccgagg

SEQ ID NO: 997 - DNA, 17 bp, Arabidopsis thaliana
aaaagattgggttgcag

SEQ ID NO: 998 - DNA, 17 bp, Arabidopsis thaliana
aaaagattgtcggctac

SEQ ID NO: 999 - DNA, 17 bp, Arabidopsis thaliana
aaaagattgtcgtgtac

SEQ ID NO: 1000 - DNA, 17 bp, Arabidopsis thaliana
aaaagatttccgacggc

SEQ ID NO: 1001 - DNA, 17 bp, Arabidopsis thaliana
aaaagatttgatgatcc

SEQ ID NO: 1002 - DNA, 17 bp, Arabidopsis thaliana
aaaagatttgctctcac

SEQ ID NO: 1003 - DNA, 17 bp, Arabidopsis thaliana
aaaagatttttatcgtt

SEQ ID NO: 1004 - DNA, 17 bp, Arabidopsis thaliana
aaaagattttttgctgc

SEQ ID NO: 1005 - DNA, 17 bp, Arabidopsis thaliana
aaaagcaaatcatcaag

SEQ ID NO: 1006 - DNA, 17 bp, Arabidopsis thaliana
aaaagcaacatgcgatc

SEQ ID NO: 1007 - DNA, 17 bp, Arabidopsis thaliana
aaaagcaactgctactt

SEQ ID NO: 1008 - DNA, 17 bp, Arabidopsis thaliana
aaaagcaccagctgctg

SEQ ID NO: 1009 - DNA, 17 bp, Arabidopsis thaliana
aaaagcactactactcc

SEQ ID NO: 1010 - DNA, 17 bp, Arabidopsis thaliana
aaaagcactcttgcaac

SEQ ID NO: 1011 - DNA, 17 bp, Arabidopsis thaliana
aaaagcagacgcagctc

SEQ ID NO: 1012 - DNA, 17 bp, Arabidopsis thaliana
aaaagcagagcggacag

SEQ ID NO: 1013 - DNA, 17 bp, Arabidopsis thaliana
aaaagcagctgtctatt

SEQ ID NO: 1014 - DNA, 17 bp, Arabidopsis thaliana
aaaagcaggcaagacgg

SEQ ID NO: 1015 - DNA, 17 bp, Arabidopsis thaliana
aaaagcaggccaaaaat

SEQ ID NO: 1016 - DNA, 17 bp, Arabidopsis thaliana
aaaagcagtgttgctgt

SEQ ID NO: 1017 - DNA, 17 bp, Arabidopsis thaliana
aaaagcagtttgtagtt

SEQ ID NO: 1018 - DNA, 17 bp, Arabidopsis thaliana
aaaagcatggatctgca

SEQ ID NO: 1019 - DNA, 17 bp, Arabidopsis thaliana
aaaagcattcttctaca

SEQ ID NO: 1020 - DNA, 17 bp, Arabidopsis thaliana
aaaagccaacgttcgat

SEQ ID NO: 1021 - DNA, 17 bp, Arabidopsis thaliana
aaaagccaatggcagcc

SEQ ID NO: 1022 - DNA, 17 bp, Arabidopsis thaliana
aaaagccacgtctgtca

SEQ ID NO: 1023 - DNA, 17 bp, Arabidopsis thaliana
aaaagccactacatccg

SEQ ID NO: 1024 - DNA, 17 bp, Arabidopsis thaliana
aaaagccagtgacagcc

SEQ ID NO: 1025 - DNA, 17 bp, Arabidopsis thaliana
aaaagccagtgagagcc

SEQ ID NO: 1026 - DNA, 17 bp, Arabidopsis thaliana
aaaagccagtggcagcc

SEQ ID NO: 1027 - DNA, 17 bp, Arabidopsis thaliana
aaaagccagtggcgcga

SEQ ID NO: 1028 - DNA, 17 bp, Arabidopsis thaliana
aaaagccattcgtaatt

SEQ ID NO: 1029 - DNA, 17 bp, Arabidopsis thaliana
aaaagcccaagtcttcg

SEQ ID NO: 1030 - DNA, 17 bp, Arabidopsis thaliana
aaaagcccgtggaggag

SEQ ID NO: 1031 - DNA, 17 bp, Arabidopsis thaliana
aaaagccctacattttt

SEQ ID NO: 1032 - DNA, 17 bp, Arabidopsis thaliana
aaaagcccttggttggg

SEQ ID NO: 1033 - DNA, 17 bp, Arabidopsis thaliana
aaaagccgaaccggtcc

SEQ ID NO: 1034 - DNA, 17 bp, Arabidopsis thaliana
aaaagccggagagtaca

SEQ ID NO: 1035 - DNA, 17 bp, Arabidopsis thaliana
aaaagccggcgattaac

SEQ ID NO: 1036 - DNA, 17 bp, Arabidopsis thaliana
aaaagcctcatcgcaat

SEQ ID NO: 1037 - DNA, 17 bp, Arabidopsis thaliana
aaaagcctccggttggg

SEQ ID NO: 1038 - DNA, 17 bp, Arabidopsis thaliana
aaaagcctctgacgctg

SEQ ID NO: 1039 - DNA, 17 bp, Arabidopsis thaliana
aaaagcctgaactttcg

SEQ ID NO: 1040 - DNA, 17 bp, Arabidopsis thaliana
aaaagcctgggctctat

SEQ ID NO: 1041 - DNA, 17 bp, Arabidopsis thaliana
aaaagcgaccggatatg

SEQ ID NO: 1042 - DNA, 17 bp, Arabidopsis thaliana
aaaagcgacggttcggt

SEQ ID NO: 1043 - DNA, 17 bp, Arabidopsis thaliana
aaaagcgagcaaccggc

SEQ ID NO: 1044 - DNA, 17 bp, Arabidopsis thaliana
aaaagcgagccattcct

SEQ ID NO: 1045 - DNA, 17 bp, Arabidopsis thaliana
aaaagcgatatgtggtt

SEQ ID NO: 1046 - DNA, 17 bp, Arabidopsis thaliana
aaaagcgcagcccgacc

SEQ ID NO: 1047 - DNA, 17 bp, Arabidopsis thaliana
aaaagcggaccactcat

SEQ ID NO: 1048 - DNA, 17 bp, Arabidopsis thaliana
aaaagcggctcgactct

SEQ ID NO: 1049 - DNA, 17 bp, Arabidopsis thaliana
aaaagcggctgagggaa

SEQ ID NO: 1050 - DNA, 17 bp, Arabidopsis thaliana
aaaagcggcttttctgg

SEQ ID NO: 1051 - DNA, 17 bp, Arabidopsis thaliana
aaaagcgggccactcat

SEQ ID NO: 1052 - DNA, 17 bp, Arabidopsis thaliana
aaaagcgggccattcct

SEQ ID NO: 1053 - DNA, 17 bp, Arabidopsis thaliana
aaaagcgggtggttgca

SEQ ID NO: 1054 - DNA, 17 bp, Arabidopsis thaliana
aaaagcggttatcagga

SEQ ID NO: 1055 - DNA, 17 bp, Arabidopsis thaliana
aaaagcggttatcagta

SEQ ID NO: 1056 - DNA, 17 bp, Arabidopsis thaliana
aaaagcgtcaggcttaa

SEQ ID NO: 1057 - DNA, 17 bp, Arabidopsis thaliana
aaaagcgttattacagt

SEQ ID NO: 1058 - DNA, 17 bp, Arabidopsis thaliana
aaaagcgttgatcggcc

SEQ ID NO: 1059 - DNA, 17 bp, Arabidopsis thaliana
aaaagcgtttaggactt

SEQ ID NO: 1060 - DNA, 17 bp, Arabidopsis thaliana
aaaagctaacaagacct

SEQ ID NO: 1061 - DNA, 17 bp, Arabidopsis thaliana
aaaagctgcgggagcag

SEQ ID NO: 1062 - DNA, 17 bp, Arabidopsis thaliana
aaaagctgcttgatccg

SEQ ID NO: 1063 - DNA, 17 bp, Arabidopsis thaliana
aaaagcttcatccgacg

SEQ ID NO: 1064 - DNA, 17 bp, Arabidopsis thaliana
aaaaggaaacccggttg

SEQ ID NO: 1065 - DNA, 17 bp, Arabidopsis thaliana
aaaaggaacttcttgag

SEQ ID NO: 1066 - DNA, 17 bp, Arabidopsis thaliana
aaaaggaatcgtcggag

SEQ ID NO: 1067 - DNA, 17 bp, Arabidopsis thaliana
aaaaggaatgcaactga

SEQ ID NO: 1068 - DNA, 17 bp, Arabidopsis thaliana
aaaaggacaaccacgct

SEQ ID NO: 1069 - DNA, 17 bp, Arabidopsis thaliana
aaaaggaccagacactt

SEQ ID NO: 1070 - DNA, 17 bp, Arabidopsis thaliana
aaaaggactgctccggt

SEQ ID NO: 1071 - DNA, 17 bp, Arabidopsis thaliana
aaaaggagacctcatcc

SEQ ID NO: 1072 - DNA, 17 bp, Arabidopsis thaliana
aaaaggagactccttgg

SEQ ID NO: 1073 - DNA, 17 bp, Arabidopsis thaliana
aaaaggagttttggact

SEQ ID NO: 1074 - DNA, 17 bp, Arabidopsis thaliana
aaaaggatatccgtcta

SEQ ID NO: 1075 - DNA, 17 bp, Arabidopsis thaliana
aaaaggattatcatcag

SEQ ID NO: 1076 - DNA, 17 bp, Arabidopsis thaliana
aaaaggattggctctga

SEQ ID NO: 1077 - DNA, 17 bp, Arabidopsis thaliana
aaaaggatttgaagtcg

SEQ ID NO: 1078 - DNA, 17 bp, Arabidopsis thaliana
aaaaggatttgacattt

SEQ ID NO: 1079 - DNA, 17 bp, Arabidopsis thaliana
aaaaggcacgccacgga

SEQ ID NO: 1080 - DNA, 17 bp, Arabidopsis thaliana
aaaaggcaggggaaata

SEQ ID NO: 1081 - DNA, 17 bp, Arabidopsis thaliana
aaaaggccccagagcaa

SEQ ID NO: 1082 - DNA, 17 bp, Arabidopsis thaliana
aaaaggcccccaattga

SEQ ID NO: 1083 - DNA, 17 bp, Arabidopsis thaliana
aaaaggccctgttcgtt

SEQ ID NO: 1084 - DNA, 17 bp, Arabidopsis thaliana
aaaaggcctataggtgt

SEQ ID NO: 1085 - DNA, 17 bp, Arabidopsis thaliana
aaaaggccttgctgtca

SEQ ID NO: 1086 - DNA, 17 bp, Arabidopsis thaliana
aaaaggcgaagaccctg

SEQ ID NO: 1087 - DNA, 17 bp, Arabidopsis thaliana
aaaaggcgattgcctca

SEQ ID NO: 1088 - DNA, 17 bp, Arabidopsis thaliana
aaaaggcggacaacaaa

SEQ ID NO: 1089 - DNA, 17 bp, Arabidopsis thaliana
aaaaggcggacaacaac

SEQ ID NO: 1090 - DNA, 17 bp, Arabidopsis thaliana
aaaaggctcagcccaca

SEQ ID NO: 1091 - DNA, 17 bp, Arabidopsis thaliana
aaaaggctgaggcaaat

SEQ ID NO: 1092 - DNA, 17 bp, Arabidopsis thaliana
aaaaggctgttcctgaa

SEQ ID NO: 1093 - DNA, 17 bp, Arabidopsis thaliana
aaaaggcttcctctagt

SEQ ID NO: 1094 - DNA, 17 bp, Arabidopsis thaliana
aaaaggcttgtaacgct

SEQ ID NO: 1095 - DNA, 17 bp, Arabidopsis thaliana
aaaaggcttttgttcac

SEQ ID NO: 1096 - DNA, 17 bp, Arabidopsis thaliana
aaaagggattgacctgc

SEQ ID NO: 1097 - DNA, 17 bp, Arabidopsis thaliana
aaaagggcacgtctgcc

SEQ ID NO: 1098 - DNA, 17 bp, Arabidopsis thaliana
aaaagggccaccatact

SEQ ID NO: 1099 - DNA, 17 bp, Arabidopsis thaliana
aaaaggggctcgctctc

SEQ ID NO: 1100 - DNA, 17 bp, Arabidopsis thaliana
aaaagggggttccccac

SEQ ID NO: 1101 - DNA, 17 bp, Arabidopsis thaliana
aaaagggtcaactgtta

SEQ ID NO: 1102 - DNA, 17 bp, Arabidopsis thaliana
aaaagggtcgcctgaat

SEQ ID NO: 1103 - DNA, 17 bp, Arabidopsis thaliana
aaaagggttgtgcttgt

SEQ ID NO: 1104 - DNA, 17 bp, Arabidopsis thaliana
aaaaggtaaaaaaaaaa

SEQ ID NO: 1105 - DNA, 17 bp, Arabidopsis thaliana
aaaaggtatcacatgcc

SEQ ID NO: 1106 - DNA, 17 bp, Arabidopsis thaliana
aaaaggtcaaaatttga

SEQ ID NO: 1107 - DNA, 17 bp, Arabidopsis thaliana
aaaaggtcaaaatttgg

SEQ ID NO: 1108 - DNA, 17 bp, Arabidopsis thaliana
aaaaggtcaaaattttg

SEQ ID NO: 1109 - DNA, 17 bp, Arabidopsis thaliana
aaaaggtcgacgcgggc

SEQ ID NO: 1110 - DNA, 17 bp, Arabidopsis thaliana
aaaaggtctgcagatgg

SEQ ID NO: 1111 - DNA, 17 bp, Arabidopsis thaliana
aaaaggtcttccgggat

SEQ ID NO: 1112 - DNA, 17 bp, Arabidopsis thaliana
aaaaggtgactccgacg

SEQ ID NO: 1113 - DNA, 17 bp, Arabidopsis thaliana
aaaaggtgcaccaccta

SEQ ID NO: 1114 - DNA, 17 bp, Arabidopsis thaliana
aaaaggtgcgtggtggt

SEQ ID NO: 1115 - DNA, 17 bp, Arabidopsis thaliana
aaaaggtgctcttgctt

SEQ ID NO: 1116 - DNA, 17 bp, Arabidopsis thaliana
aaaaggtggctaacgga

SEQ ID NO: 1117 - DNA, 17 bp, Arabidopsis thaliana
aaaaggtggtggcggct

SEQ ID NO: 1118 - DNA, 17 bp, Arabidopsis thaliana
aaaaggtggtgggactc

SEQ ID NO: 1119 - DNA, 17 bp, Arabidopsis thaliana
aaaaggtgttaggcgct

SEQ ID NO: 1120 - DNA, 17 bp, Arabidopsis thaliana
aaaaggttcacttcaag

SEQ ID NO: 1121 - DNA, 17 bp, Arabidopsis thaliana
aaaaggttctgagcgta

SEQ ID NO: 1122 - DNA, 17 bp, Arabidopsis thaliana
aaaaggttggaagatct

SEQ ID NO: 1123 - DNA, 17 bp, Arabidopsis thaliana
aaaagtaacgacagtcg

SEQ ID NO: 1124 - DNA, 17 bp, Arabidopsis thaliana
aaaagtaagaaaggagc

SEQ ID NO: 1125 - DNA, 17 bp, Arabidopsis thaliana
aaaagtaagggtccgat

SEQ ID NO: 1126 - DNA, 17 bp, Arabidopsis thaliana
aaaagtacagctagctg

SEQ ID NO: 1127 - DNA, 17 bp, Arabidopsis thaliana
aaaagtagcgacagccg

SEQ ID NO: 1128 - DNA, 17 bp, Arabidopsis thaliana
aaaagtagcgacagtcg

SEQ ID NO: 1129 - DNA, 17 bp, Arabidopsis thaliana
aaaagtagcgagagtcg

SEQ ID NO: 1130 - DNA, 17 bp, Arabidopsis thaliana
aaaagtaggagttcgtc

SEQ ID NO: 1131 - DNA, 17 bp, Arabidopsis thaliana
aaaagtagttatcgcta

SEQ ID NO: 1132 - DNA, 17 bp, Arabidopsis thaliana
aaaagtagttcaagcgt

SEQ ID NO: 1133 - DNA, 17 bp, Arabidopsis thaliana
aaaagtatcgcggacga

SEQ ID NO: 1134 - DNA, 17 bp, Arabidopsis thaliana
aaaagtatctcctatgc

SEQ ID NO: 1135 - DNA, 17 bp, Arabidopsis thaliana
aaaagtatggtcgcaag

SEQ ID NO: 1136 - DNA, 17 bp, Arabidopsis thaliana
aaaagtattcaccgccc

SEQ ID NO: 1137 - DNA, 17 bp, Arabidopsis thaliana
aaaagtattcggcgtgt

SEQ ID NO: 1138 - DNA, 17 bp, Arabidopsis thaliana
aaaagtcaaaatttggg

SEQ ID NO: 1139 - DNA, 17 bp, Arabidopsis thaliana
aaaagtcaaagtgaccg

SEQ ID NO: 1140 - DNA, 17 bp, Arabidopsis thaliana
aaaagtcaactctgcta

SEQ ID NO: 1141 - DNA, 17 bp, Arabidopsis thaliana
aaaagtcaactctgtta

SEQ ID NO: 1142 - DNA, 17 bp, Arabidopsis thaliana
aaaagtcacccgcaata

SEQ ID NO: 1143 - DNA, 17 bp, Arabidopsis thaliana
aaaagtcaccgtgtctc

SEQ ID NO: 1144 - DNA, 17 bp, Arabidopsis thaliana
aaaagtcacgatgaaaa

SEQ ID NO: 1145 - DNA, 17 bp, Arabidopsis thaliana
aaaagtcacggtgattg

SEQ ID NO: 1146 - DNA, 17 bp, Arabidopsis thaliana
aaaagtcactcgaggct

SEQ ID NO: 1147 - DNA, 17 bp, Arabidopsis thaliana
aaaagtcagaatcggcc

SEQ ID NO: 1148 - DNA, 17 bp, Arabidopsis thaliana
aaaagtcagtgaaagcc

SEQ ID NO: 1149 - DNA, 17 bp, Arabidopsis thaliana
aaaagtcagtgacagcc

SEQ ID NO: 1150 - DNA, 17 bp, Arabidopsis thaliana
aaaagtcattcagatga

SEQ ID NO: 1151 - DNA, 17 bp, Arabidopsis thaliana
aaaagtccaaggtcttc

SEQ ID NO: 1152 - DNA, 17 bp, Arabidopsis thaliana
aaaagtccatcggaaat

SEQ ID NO: 1153 - DNA, 17 bp, Arabidopsis thaliana
aaaagtcccgacgccgg

SEQ ID NO: 1154 - DNA, 17 bp, Arabidopsis thaliana
aaaagtcccttcctctc

SEQ ID NO: 1155 - DNA, 17 bp, Arabidopsis thaliana
aaaagtccggacactgt

SEQ ID NO: 1156 - DNA, 17 bp, Arabidopsis thaliana
aaaagtccgggggtgaa

SEQ ID NO: 1157 - DNA, 17 bp, Arabidopsis thaliana
aaaagtccggttgagaa

SEQ ID NO: 1158 - DNA, 17 bp, Arabidopsis thaliana
aaaagtccgtcttcaag

SEQ ID NO: 1159 - DNA, 17 bp, Arabidopsis thaliana
aaaagtcgcccaggaac

SEQ ID NO: 1160 - DNA, 17 bp, Arabidopsis thaliana
aaaagtcgccggaaaag

SEQ ID NO: 1161 - DNA, 17 bp, Arabidopsis thaliana
aaaagtcggatacttgc

SEQ ID NO: 1162 - DNA, 17 bp, Arabidopsis thaliana
aaaagtcgtatgggctt

SEQ ID NO: 1163 - DNA, 17 bp, Arabidopsis thaliana
aaaagtcgttaactaag

SEQ ID NO: 1164 - DNA, 17 bp, Arabidopsis thaliana
aaaagtctacatgtgtg

SEQ ID NO: 1165 - DNA, 17 bp, Arabidopsis thaliana
aaaagtctcatagtacg

SEQ ID NO: 1166 - DNA, 17 bp, Arabidopsis thaliana
aaaagtctctcatgtgc

SEQ ID NO: 1167 - DNA, 17 bp, Arabidopsis thaliana
aaaagtctctcctgtgc

SEQ ID NO: 1168 - DNA, 17 bp, Arabidopsis thaliana
aaaagtctctccttgct

SEQ ID NO: 1169 - DNA, 17 bp, Arabidopsis thaliana
aaaagtctgaaccactt

SEQ ID NO: 1170 - DNA, 17 bp, Arabidopsis thaliana
aaaagtctgcggaataa

SEQ ID NO: 1171 - DNA, 17 bp, Arabidopsis thaliana
aaaagtctgctgtcacc

SEQ ID NO: 1172 - DNA, 17 bp, Arabidopsis thaliana
aaaagtctgtcaccaat

SEQ ID NO: 1173 - DNA, 17 bp, Arabidopsis thaliana
aaaagtctgtcagttgg

SEQ ID NO: 1174 - DNA, 17 bp, Arabidopsis thaliana
aaaagtctgtgcgatat

SEQ ID NO: 1175 - DNA, 17 bp, Arabidopsis thaliana
aaaagtctttttgccct

SEQ ID NO: 1176 - DNA, 17 bp, Arabidopsis thaliana
aaaagtgaacgacctgt

SEQ ID NO: 1177 - DNA, 17 bp, Arabidopsis thaliana
aaaagtgaatgtggatg

SEQ ID NO: 1178 - DNA, 17 bp, Arabidopsis thaliana
aaaagtgaccaatcttt

SEQ ID NO: 1179 - DNA, 17 bp, Arabidopsis thaliana
aaaagtgaccagacaaa

SEQ ID NO: 1180 - DNA, 17 bp, Arabidopsis thaliana
aaaagtgaccagacata

SEQ ID NO: 1181 - DNA, 17 bp, Arabidopsis thaliana
aaaagtgactactttgc

SEQ ID NO: 1182 - DNA, 17 bp, Arabidopsis thaliana
aaaagtgagatctcaaa

SEQ ID NO: 1183 - DNA, 17 bp, Arabidopsis thaliana
aaaagtgatatgtagcc

SEQ ID NO: 1184 - DNA, 17 bp, Arabidopsis thaliana
aaaagtgcaatggagta

SEQ ID NO: 1185 - DNA, 17 bp, Arabidopsis thaliana
aaaagtgcagctcgaag

SEQ ID NO: 1186 - DNA, 17 bp, Arabidopsis thaliana
aaaagtgcattcaggtc

SEQ ID NO: 1187 - DNA, 17 bp, Arabidopsis thaliana
aaaagtgcattcggatc

SEQ ID NO: 1188 - DNA, 17 bp, Arabidopsis thaliana
aaaagtgcattcgggtc

SEQ ID NO: 1189 - DNA, 17 bp, Arabidopsis thaliana
aaaagtgccatcattcc

SEQ ID NO: 1190 - DNA, 17 bp, Arabidopsis thaliana
aaaagtgcctaaacatg

SEQ ID NO: 1191 - DNA, 17 bp, Arabidopsis thaliana
aaaagtgcctaaacgtg

SEQ ID NO: 1192 - DNA, 17 bp, Arabidopsis thaliana
aaaagtgcctcatccct

SEQ ID NO: 1193 - DNA, 17 bp, Arabidopsis thaliana
aaaagtgcggtgcgatt

SEQ ID NO: 1194 - DNA, 17 bp, Arabidopsis thaliana
aaaagtgcgttcggctc

SEQ ID NO: 1195 - DNA, 17 bp, Arabidopsis thaliana
aaaagtgcttcatccgt

SEQ ID NO: 1196 - DNA, 17 bp, Arabidopsis thaliana
aaaagtggaaagaccgc

SEQ ID NO: 1197 - DNA, 17 bp, Arabidopsis thaliana
aaaagtggaatgcgggc

SEQ ID NO: 1198 - DNA, 17 bp, Arabidopsis thaliana
aaaagtggatcaacgga

SEQ ID NO: 1199 - DNA, 17 bp, Arabidopsis thaliana
aaaagtggatcaacggc

SEQ ID NO: 1200 - DNA, 17 bp, Arabidopsis thaliana
aaaagtggccaactctc

SEQ ID NO: 1201 - DNA, 17 bp, Arabidopsis thaliana
aaaagtgggctggccca

SEQ ID NO: 1202 - DNA, 17 bp, Arabidopsis thaliana
aaaagtgggctgggcct

SEQ ID NO: 1203 - DNA, 17 bp, Arabidopsis thaliana
aaaagtgggtcaacggc

SEQ ID NO: 1204 - DNA, 17 bp, Arabidopsis thaliana
aaaagtgggtgattggt

SEQ ID NO: 1205 - DNA, 17 bp, Arabidopsis thaliana
aaaagtgggtttcttag

SEQ ID NO: 1206 - DNA, 17 bp, Arabidopsis thaliana
aaaagtggtaccaagct

SEQ ID NO: 1207 - DNA, 17 bp, Arabidopsis thaliana
aaaagtggtctcgacaa

SEQ ID NO: 1208 - DNA, 17 bp, Arabidopsis thaliana
aaaagtggtgtacaacc

SEQ ID NO: 1209 - DNA, 17 bp, Arabidopsis thaliana
aaaagtggttcatggtt

SEQ ID NO: 1210 - DNA, 17 bp, Arabidopsis thaliana
aaaagtgtcaacggtcg

SEQ ID NO: 1211 - DNA, 17 bp, Arabidopsis thaliana
aaaagtgtctaaaccgg

SEQ ID NO: 1212 - DNA, 17 bp, Arabidopsis thaliana
aaaagtgtctacagctt

SEQ ID NO: 1213 - DNA, 17 bp, Arabidopsis thaliana
aaaagtgtctgggcctt

SEQ ID NO: 1214 - DNA, 17 bp, Arabidopsis thaliana
aaaagtgtgatcgtgga

SEQ ID NO: 1215 - DNA, 17 bp, Arabidopsis thaliana
aaaagtgtgggcaaaag

SEQ ID NO: 1216 - DNA, 17 bp, Arabidopsis thaliana
aaaagtgtgtcacgata

SEQ ID NO: 1217 - DNA, 17 bp, Arabidopsis thaliana
aaaagtgttcaggtcac

SEQ ID NO: 1218 - DNA, 17 bp, Arabidopsis thaliana
aaaagtgttcgggtcac

SEQ ID NO: 1219 - DNA, 17 bp, Arabidopsis thaliana
aaaagtgttgctttcgg

SEQ ID NO: 1220 - DNA, 17 bp, Arabidopsis thaliana
aaaagtgtttactgctg

SEQ ID NO: 1221 - DNA, 17 bp, Arabidopsis thaliana
aaaagttaaatctgtaa

SEQ ID NO: 1222 - DNA, 17 bp, Arabidopsis thaliana
aaaagttaagctgaggt

SEQ ID NO: 1223 - DNA, 17 bp, Arabidopsis thaliana
aaaagttacagctacag

SEQ ID NO: 1224 - DNA, 17 bp, Arabidopsis thaliana
aaaagttaccacaggga

SEQ ID NO: 1225 - DNA, 17 bp, Arabidopsis thaliana
aaaagttagcgcttttt

SEQ ID NO: 1226 - DNA, 17 bp, Arabidopsis thaliana
aaaagttaggaccgtgt

SEQ ID NO: 1227 - DNA, 17 bp, Arabidopsis thaliana
aaaagttagtaactcac

SEQ ID NO: 1228 - DNA, 17 bp, Arabidopsis thaliana
aaaagttagtgacagcc

SEQ ID NO: 1229 - DNA, 17 bp, Arabidopsis thaliana
aaaagttagtggcagcc

SEQ ID NO: 1230 - DNA, 17 bp, Arabidopsis thaliana
aaaagttatccattgtg

SEQ ID NO: 1231 - DNA, 17 bp, Arabidopsis thaliana
aaaagttcaactgtttg

SEQ ID NO: 1232 - DNA, 17 bp, Arabidopsis thaliana
aaaagttcacgattttt

SEQ ID NO: 1233 - DNA, 17 bp, Arabidopsis thaliana
aaaagttcacggttaat

SEQ ID NO: 1234 - DNA, 17 bp, Arabidopsis thaliana
aaaagttcactgggatc

SEQ ID NO: 1235 - DNA, 17 bp, Arabidopsis thaliana
aaaagttcactggggtc

SEQ ID NO: 1236 - DNA, 17 bp, Arabidopsis thaliana
aaaagttccataccatc

SEQ ID NO: 1237 - DNA, 17 bp, Arabidopsis thaliana
aaaagttccatgtccat

SEQ ID NO: 1238 - DNA, 17 bp, Arabidopsis thaliana
aaaagttccattgtcct

SEQ ID NO: 1239 - DNA, 17 bp, Arabidopsis thaliana
aaaagttccattgtctt

SEQ ID NO: 1240 - DNA, 17 bp, Arabidopsis thaliana
aaaagttctttgcagac

SEQ ID NO: 1241 - DNA, 17 bp, Arabidopsis thaliana
aaaagttgactgaacag

SEQ ID NO: 1242 - DNA, 17 bp, Arabidopsis thaliana
aaaagttgactgaagag

SEQ ID NO: 1243 - DNA, 17 bp, Arabidopsis thaliana
aaaagttgagccttctc

SEQ ID NO: 1244 - DNA, 17 bp, Arabidopsis thaliana
aaaagttgatgtgtcag

SEQ ID NO: 1245 - DNA, 17 bp, Arabidopsis thaliana
aaaagttgccgaggccg

SEQ ID NO: 1246 - DNA, 17 bp, Arabidopsis thaliana
aaaagttgcgctttgac

SEQ ID NO: 1247 - DNA, 17 bp, Arabidopsis thaliana
aaaagttgcggttagac

SEQ ID NO: 1248 - DNA, 17 bp, Arabidopsis thaliana
aaaagttgcggttgaaa

SEQ ID NO: 1249 - DNA, 17 bp, Arabidopsis thaliana
aaaagttgctaactcag

SEQ ID NO: 1250 - DNA, 17 bp, Arabidopsis thaliana
aaaagttgctcttagac

SEQ ID NO: 1251 - DNA, 17 bp, Arabidopsis thaliana
aaaagttggaaaagtgc

SEQ ID NO: 1252 - DNA, 17 bp, Arabidopsis thaliana
aaaagttggccaactaa

SEQ ID NO: 1253 - DNA, 17 bp, Arabidopsis thaliana
aaaagttgtatggcagg

SEQ ID NO: 1254 - DNA, 17 bp, Arabidopsis thaliana
aaaagttgtccgtttgc

SEQ ID NO: 1255 - DNA, 17 bp, Arabidopsis thaliana
aaaagttgtctcatcgc

SEQ ID NO: 1256 - DNA, 17 bp, Arabidopsis thaliana
aaaagttgtctcgtcgc

SEQ ID NO: 1257 - DNA, 17 bp, Arabidopsis thaliana
aaaagttgtctctgcaa

SEQ ID NO: 1258 - DNA, 17 bp, Arabidopsis thaliana
aaaagttgtctcttcgc

SEQ ID NO: 1259 - DNA, 17 bp, Arabidopsis thaliana
aaaagttgtctggattt

SEQ ID NO: 1260 - DNA, 17 bp, Arabidopsis thaliana
aaaagttgtgtcgactc

SEQ ID NO: 1261 - DNA, 17 bp, Arabidopsis thaliana
aaaagttgttcgtttgc

SEQ ID NO: 1262 - DNA, 17 bp, Arabidopsis thaliana
aaaagtttaagcgtctg

SEQ ID NO: 1263 - DNA, 17 bp, Arabidopsis thaliana
aaaagtttatgcaagct

SEQ ID NO: 1264 - DNA, 17 bp, Arabidopsis thaliana
aaaagtttcatttgact

SEQ ID NO: 1265 - DNA, 17 bp, Arabidopsis thaliana
aaaagtttccgaggcat

SEQ ID NO: 1266 - DNA, 17 bp, Arabidopsis thaliana
aaaagtttcttcgtcgc

SEQ ID NO: 1267 - DNA, 17 bp, Arabidopsis thaliana
aaaagtttgacgagttt

SEQ ID NO: 1268 - DNA, 17 bp, Arabidopsis thaliana
aaaagtttgagcttgga

SEQ ID NO: 1269 - DNA, 17 bp, Arabidopsis thaliana
aaaagtttgcggttttg

SEQ ID NO: 1270 - DNA, 17 bp, Arabidopsis thaliana
aaaagtttgctgcttag

SEQ ID NO: 1271 - DNA, 17 bp, Arabidopsis thaliana
aaaagtttggacgttta

SEQ ID NO: 1272 - DNA, 17 bp, Arabidopsis thaliana
aaaagtttggacgtttg

SEQ ID NO: 1273 - DNA, 17 bp, Arabidopsis thaliana
aaaagtttggccgagtg

SEQ ID NO: 1274 - DNA, 17 bp, Arabidopsis thaliana
aaaagtttgtaccgaac

SEQ ID NO: 1275 - DNA, 17 bp, Arabidopsis thaliana
aaaagtttgtaccgacc

SEQ ID NO: 1276 - DNA, 17 bp, Arabidopsis thaliana
aaaagtttgtcttgtga

SEQ ID NO: 1277 - DNA, 17 bp, Arabidopsis thaliana
aaaagtttgtgaactca

SEQ ID NO: 1278 - DNA, 17 bp, Arabidopsis thaliana
aaaagtttgtgaattct

SEQ ID NO: 1279 - DNA, 17 bp, Arabidopsis thaliana
aaaagttttgactgcag

SEQ ID NO: 1280 - DNA, 17 bp, Arabidopsis thaliana
aaaagttttgcgctcta

SEQ ID NO: 1281 - DNA, 17 bp, Arabidopsis thaliana
aaaagttttgtcccacg

SEQ ID NO: 1282 - DNA, 17 bp, Arabidopsis thaliana
aaaataaaccgattgtc

SEQ ID NO: 1283 - DNA, 17 bp, Arabidopsis thaliana
aaaataaagttggtctg

SEQ ID NO: 1284 - DNA, 17 bp, Arabidopsis thaliana
aaaataaatccataaat

SEQ ID NO: 1285 - DNA, 17 bp, Arabidopsis thaliana
aaaataaatcctggagt

SEQ ID NO: 1286 - DNA, 17 bp, Arabidopsis thaliana
aaaataaattgtctctg

SEQ ID NO: 1287 - DNA, 17 bp, Arabidopsis thaliana
aaaataacagcatgcgg

SEQ ID NO: 1288 - DNA, 17 bp, Arabidopsis thaliana
aaaataaccaaattacc

SEQ ID NO: 1289 - DNA, 17 bp, Arabidopsis thaliana
aaaataaccaagtggtc

SEQ ID NO: 1290 - DNA, 17 bp, Arabidopsis thaliana
aaaataaccatggaccc

SEQ ID NO: 1291 - DNA, 17 bp, Arabidopsis thaliana
aaaataactatggacca

SEQ ID NO: 1292 - DNA, 17 bp, Arabidopsis thaliana
aaaataactatgggccc

SEQ ID NO: 1293 - DNA, 17 bp, Arabidopsis thaliana
aaaataatgcggtgcgg

SEQ ID NO: 1294 - DNA, 17 bp, Arabidopsis thaliana
aaaataattgtctccgc

SEQ ID NO: 1295 - DNA, 17 bp, Arabidopsis thaliana
aaaatacaaaagtttgc

SEQ ID NO: 1296 - DNA, 17 bp, Arabidopsis thaliana
aaaatacaatttttcaa

SEQ ID NO: 1297 - DNA, 17 bp, Arabidopsis thaliana
aaaataccccgcattcg

SEQ ID NO: 1298 - DNA, 17 bp, Arabidopsis thaliana
aaaataccgagtctcgg

SEQ ID NO: 1299 - DNA, 17 bp, Arabidopsis thaliana
aaaatacggggatgact

SEQ ID NO: 1300 - DNA, 17 bp, Arabidopsis thaliana
aaaatactatcacgggt

SEQ ID NO: 1301 - DNA, 17 bp, Arabidopsis thaliana
aaaatactgcgcattag

SEQ ID NO: 1302 - DNA, 17 bp, Arabidopsis thaliana
aaaatactggtgcagat

SEQ ID NO: 1303 - DNA, 17 bp, Arabidopsis thaliana
aaaatagacatgccgtt

SEQ ID NO: 1304 - DNA, 17 bp, Arabidopsis thaliana
aaaatagaccgtttttc

SEQ ID NO: 1305 - DNA, 17 bp, Arabidopsis thaliana
aaaatagagtgtcttga

SEQ ID NO: 1306 - DNA, 17 bp, Arabidopsis thaliana
aaaatagatcgcggttt

SEQ ID NO: 1307 - DNA, 17 bp, Arabidopsis thaliana
aaaatagatggcgaaaa

SEQ ID NO: 1308 - DNA, 17 bp, Arabidopsis thaliana
aaaatagcaggcgtgac

SEQ ID NO: 1309 - DNA, 17 bp, Arabidopsis thaliana
aaaatagccatagtgtc

SEQ ID NO: 1310 - DNA, 17 bp, Arabidopsis thaliana
aaaatagccatggtgtc

SEQ ID NO: 1311 - DNA, 17 bp, Arabidopsis thaliana
aaaatagcgatagttgc

SEQ ID NO: 1312 - DNA, 17 bp, Arabidopsis thaliana
aaaatagctacttgtcg

SEQ ID NO: 1313 - DNA, 17 bp, Arabidopsis thaliana
aaaatagctcatgccag

SEQ ID NO: 1314 - DNA, 17 bp, Arabidopsis thaliana
aaaatagctcgacgcca

SEQ ID NO: 1315 - DNA, 17 bp, Arabidopsis thaliana
aaaatagctcgacggca

SEQ ID NO: 1316 - DNA, 17 bp, Arabidopsis thaliana
aaaatagcttgacgcca

SEQ ID NO: 1317 - DNA, 17 bp, Arabidopsis thaliana
aaaataggcctgggcgt

SEQ ID NO: 1318 - DNA, 17 bp, Arabidopsis thaliana
aaaataggctgataggg

SEQ ID NO: 1319 - DNA, 17 bp, Arabidopsis thaliana
aaaatataagcctacct

SEQ ID NO: 1320 - DNA, 17 bp, Arabidopsis thaliana
aaaatatcactgctggg

SEQ ID NO: 1321 - DNA, 17 bp, Arabidopsis thaliana
aaaatatcagtggcagc

SEQ ID NO: 1322 - DNA, 17 bp, Arabidopsis thaliana
aaaatatccaacgggtc

SEQ ID NO: 1323 - DNA, 17 bp, Arabidopsis thaliana
aaaatatcctatcggct

SEQ ID NO: 1324 - DNA, 17 bp, Arabidopsis thaliana
aaaatatgctgagaacg

SEQ ID NO: 1325 - DNA, 17 bp, Arabidopsis thaliana
aaaatatgctgagagcg

SEQ ID NO: 1326 - DNA, 17 bp, Arabidopsis thaliana
aaaatattccgctgccc

SEQ ID NO: 1327 - DNA, 17 bp, Arabidopsis thaliana
aaaatattgaccgcggt

SEQ ID NO: 1328 - DNA, 17 bp, Arabidopsis thaliana
aaaatatttcggtgcgt

SEQ ID NO: 1329 - DNA, 17 bp, Arabidopsis thaliana
aaaatcaaaccgtttct

SEQ ID NO: 1330 - DNA, 17 bp, Arabidopsis thaliana
aaaatcaaatcaagccg

SEQ ID NO: 1331 - DNA, 17 bp, Arabidopsis thaliana
aaaatcaacgtccaagc

SEQ ID NO: 1332 - DNA, 17 bp, Arabidopsis thaliana
aaaatcaactctttggt

SEQ ID NO: 1333 - DNA, 17 bp, Arabidopsis thaliana
aaaatcaatgtccaagt

SEQ ID NO: 1334 - DNA, 17 bp, Arabidopsis thaliana
aaaatcacagggttaac

SEQ ID NO: 1335 - DNA, 17 bp, Arabidopsis thaliana
aaaatcacaggtttgca

SEQ ID NO: 1336 - DNA, 17 bp, Arabidopsis thaliana
aaaatcacgggtttacg

SEQ ID NO: 1337 - DNA, 17 bp, Arabidopsis thaliana
aaaatcactattgacgg

SEQ ID NO: 1338 - DNA, 17 bp, Arabidopsis thaliana
aaaatcactcgaccaca

SEQ ID NO: 1339 - DNA, 17 bp, Arabidopsis thaliana
aaaatcactcgaccgta

SEQ ID NO: 1340 - DNA, 17 bp, Arabidopsis thaliana
aaaatcacttcttggtt

SEQ ID NO: 1341 - DNA, 17 bp, Arabidopsis thaliana
aaaatcagacatccgag

SEQ ID NO: 1342 - DNA, 17 bp, Arabidopsis thaliana
aaaatcagagcgttttt

SEQ ID NO: 1343 - DNA, 17 bp, Arabidopsis thaliana
aaaatcagccaacccgg

SEQ ID NO: 1344 - DNA, 17 bp, Arabidopsis thaliana
aaaatcagcgactatcg

SEQ ID NO: 1345 - DNA, 17 bp, Arabidopsis thaliana
aaaatcatatgctactc

SEQ ID NO: 1346 - DNA, 17 bp, Arabidopsis thaliana
aaaatcatcaggcactt

SEQ ID NO: 1347 - DNA, 17 bp, Arabidopsis thaliana
aaaatcatgcaggttag

SEQ ID NO: 1348 - DNA, 17 bp, Arabidopsis thaliana
aaaatcatgggctgacc

SEQ ID NO: 1349 - DNA, 17 bp, Arabidopsis thaliana
aaaatcattcatctcta

SEQ ID NO: 1350 - DNA, 17 bp, Arabidopsis thaliana
aaaatcattgtttcacg

SEQ ID NO: 1351 - DNA, 17 bp, Arabidopsis thaliana
aaaatcatttgcggtct

SEQ ID NO: 1352 - DNA, 17 bp, Arabidopsis thaliana
aaaatcatttggtcaga

SEQ ID NO: 1353 - DNA, 17 bp, Arabidopsis thaliana
aaaatcattttttcggc

SEQ ID NO: 1354 - DNA, 17 bp, Arabidopsis thaliana
aaaatccacaagcccac

SEQ ID NO: 1355 - DNA, 17 bp, Arabidopsis thaliana
aaaatccaggaagtttt

SEQ ID NO: 1356 - DNA, 17 bp, Arabidopsis thaliana
aaaatccaggaggttct

SEQ ID NO: 1357 - DNA, 17 bp, Arabidopsis thaliana
aaaatccaggtggtccg

SEQ ID NO: 1358 - DNA, 17 bp, Arabidopsis thaliana
aaaatccaggtggtctg

SEQ ID NO: 1359 - DNA, 17 bp, Arabidopsis thaliana
aaaatccagtgacagcc

SEQ ID NO: 1360 - DNA, 17 bp, Arabidopsis thaliana
aaaatccagtgatgttg

SEQ ID NO: 1361 - DNA, 17 bp, Arabidopsis thaliana
aaaatccagtggcaacc

SEQ ID NO: 1362 - DNA, 17 bp, Arabidopsis thaliana
aaaatccagtggcagcc

SEQ ID NO: 1363 - DNA, 17 bp, Arabidopsis thaliana
aaaatccagtggcagct

SEQ ID NO: 1364 - DNA, 17 bp, Arabidopsis thaliana
aaaatccattactcggg

SEQ ID NO: 1365 - DNA, 17 bp, Arabidopsis thaliana
aaaatcccatcgataat

SEQ ID NO: 1366 - DNA, 17 bp, Arabidopsis thaliana
aaaatccccgcctagtc

SEQ ID NO: 1367 - DNA, 17 bp, Arabidopsis thaliana
aaaatcccgaactttgc

SEQ ID NO: 1368 - DNA, 17 bp, Arabidopsis thaliana
aaaatcccgagttgact

SEQ ID NO: 1369 - DNA, 17 bp, Arabidopsis thaliana
aaaatccgactaaaagc

SEQ ID NO: 1370 - DNA, 17 bp, Arabidopsis thaliana
aaaatccgccggtttgt

SEQ ID NO: 1371 - DNA, 17 bp, Arabidopsis thaliana
aaaatccgctgagattt

SEQ ID NO: 1372 - DNA, 17 bp, Arabidopsis thaliana
aaaatccgctggaacta

SEQ ID NO: 1373 - DNA, 17 bp, Arabidopsis thaliana
aaaatccgcttggcgat

SEQ ID NO: 1374 - DNA, 17 bp, Arabidopsis thaliana
aaaatccggaggaccaa

SEQ ID NO: 1375 - DNA, 17 bp, Arabidopsis thaliana
aaaatccggaggaccga

SEQ ID NO: 1376 - DNA, 17 bp, Arabidopsis thaliana
aaaatccgggttgactg

SEQ ID NO: 1377 - DNA, 17 bp, Arabidopsis thaliana
aaaatccggtctaagaa

SEQ ID NO: 1378 - DNA, 17 bp, Arabidopsis thaliana
aaaatccgtgcttgttc

SEQ ID NO: 1379 - DNA, 17 bp, Arabidopsis thaliana
aaaatccgttctgagcc

SEQ ID NO: 1380 - DNA, 17 bp, Arabidopsis thaliana
aaaatcctcagctttgg

SEQ ID NO: 1381 - DNA, 17 bp, Arabidopsis thaliana
aaaatcctccgcctaac

SEQ ID NO: 1382 - DNA, 17 bp, Arabidopsis thaliana
aaaatcctgagcttagt

SEQ ID NO: 1383 - DNA, 17 bp, Arabidopsis thaliana
aaaatcctggcccacgt

SEQ ID NO: 1384 - DNA, 17 bp, Arabidopsis thaliana
aaaatcgaccaacggtg

SEQ ID NO: 1385 - DNA, 17 bp, Arabidopsis thaliana
aaaatcgagtatgggcc

SEQ ID NO: 1386 - DNA, 17 bp, Arabidopsis thaliana
aaaatcgatgggtttga

SEQ ID NO: 1387 - DNA, 17 bp, Arabidopsis thaliana
aaaatcgccgacgaatt

SEQ ID NO: 1388 - DNA, 17 bp, Arabidopsis thaliana
aaaatcgctgcgatagc

SEQ ID NO: 1389 - DNA, 17 bp, Arabidopsis thaliana
aaaatcggactttgcag

SEQ ID NO: 1390 - DNA, 17 bp, Arabidopsis thaliana
aaaatcggagacttgcc

SEQ ID NO: 1391 - DNA, 17 bp, Arabidopsis thaliana
aaaatcggagatgttag

SEQ ID NO: 1392 - DNA, 17 bp, Arabidopsis thaliana
aaaatcggcagagaggg

SEQ ID NO: 1393 - DNA, 17 bp, Arabidopsis thaliana
aaaatcggcgaaggtca

SEQ ID NO: 1394 - DNA, 17 bp, Arabidopsis thaliana
aaaatcgggtctactca

SEQ ID NO: 1395 - DNA, 17 bp, Arabidopsis thaliana
aaaatcgggttgcggtt

SEQ ID NO: 1396 - DNA, 17 bp, Arabidopsis thaliana
aaaatcgggttgttgtt

SEQ ID NO: 1397 - DNA, 17 bp, Arabidopsis thaliana
aaaatcggttaagattc

SEQ ID NO: 1398 - DNA, 17 bp, Arabidopsis thaliana
aaaatcgtagaaaggat

SEQ ID NO: 1399 - DNA, 17 bp, Arabidopsis thaliana
aaaatcgtcaatcggct

SEQ ID NO: 1400 - DNA, 17 bp, Arabidopsis thaliana
aaaatcgtctgcgtcgt

SEQ ID NO: 1401 - DNA, 17 bp, Arabidopsis thaliana
aaaatcgtctggaatcg

SEQ ID NO: 1402 - DNA, 17 bp, Arabidopsis thaliana
aaaatcgtctggcgatc

SEQ ID NO: 1403 - DNA, 17 bp, Arabidopsis thaliana
aaaatcgttcaataacc

SEQ ID NO: 1404 - DNA, 17 bp, Arabidopsis thaliana
aaaatcgttgactggcc

SEQ ID NO: 1405 - DNA, 17 bp, Arabidopsis thaliana
aaaatctaaggtccagc

SEQ ID NO: 1406 - DNA, 17 bp, Arabidopsis thaliana
aaaatctaagtgttgag

SEQ ID NO: 1407 - DNA, 17 bp, Arabidopsis thaliana
aaaatctacatcttggt

SEQ ID NO: 1408 - DNA, 17 bp, Arabidopsis thaliana
aaaatctactgacagcc

SEQ ID NO: 1409 - DNA, 17 bp, Arabidopsis thaliana
aaaatctacttcttggg

SEQ ID NO: 1410 - DNA, 17 bp, Arabidopsis thaliana
aaaatctacttcttggt

SEQ ID NO: 1411 - DNA, 17 bp, Arabidopsis thaliana
aaaatctagtacgatcg

SEQ ID NO: 1412 - DNA, 17 bp, Arabidopsis thaliana
aaaatctagtggcagcc

SEQ ID NO: 1413 - DNA, 17 bp, Arabidopsis thaliana
aaaatctagttggttgt

SEQ ID NO: 1414 - DNA, 17 bp, Arabidopsis thaliana
aaaatctatttgtggtg

SEQ ID NO: 1415 - DNA, 17 bp, Arabidopsis thaliana
aaaatctcaagtcgcga

SEQ ID NO: 1416 - DNA, 17 bp, Arabidopsis thaliana
aaaatctcaatctgtct

SEQ ID NO: 1417 - DNA, 17 bp, Arabidopsis thaliana
aaaatctcaattcttcc

SEQ ID NO: 1418 - DNA, 17 bp, Arabidopsis thaliana
aaaatctcagctcagca

SEQ ID NO: 1419 - DNA, 17 bp, Arabidopsis thaliana
aaaatctcggatttacg

SEQ ID NO: 1420 - DNA, 17 bp, Arabidopsis thaliana
aaaatctcgggtttacg

SEQ ID NO: 1421 - DNA, 17 bp, Arabidopsis thaliana
aaaatctctcaggtgga

SEQ ID NO: 1422 - DNA, 17 bp, Arabidopsis thaliana
aaaatctgaagttcgca

SEQ ID NO: 1423 - DNA, 17 bp, Arabidopsis thaliana
aaaatctgaatactcgt

SEQ ID NO: 1424 - DNA, 17 bp, Arabidopsis thaliana
aaaatctgagtttgtga

SEQ ID NO: 1425 - DNA, 17 bp, Arabidopsis thaliana
aaaatctgatagttgct

SEQ ID NO: 1426 - DNA, 17 bp, Arabidopsis thaliana
aaaatctgccacatctt

SEQ ID NO: 1427 - DNA, 17 bp, Arabidopsis thaliana
aaaatctgccacatttt

SEQ ID NO: 1428 - DNA, 17 bp, Arabidopsis thaliana
aaaatctgccatatttt

SEQ ID NO: 1429 - DNA, 17 bp, Arabidopsis thaliana
aaaatctgccgttgagc

SEQ ID NO: 1430 - DNA, 17 bp, Arabidopsis thaliana
aaaatctgctgggcctc

SEQ ID NO: 1431 - DNA, 17 bp, Arabidopsis thaliana
aaaatctggctggacca

SEQ ID NO: 1432 - DNA, 17 bp, Arabidopsis thaliana
aaaatctggtcatgtgg

SEQ ID NO: 1433 - DNA, 17 bp, Arabidopsis thaliana
aaaatctggttgcggtt

SEQ ID NO: 1434 - DNA, 17 bp, Arabidopsis thaliana
aaaatctgtcagttggg

SEQ ID NO: 1435 - DNA, 17 bp, Arabidopsis thaliana
aaaatctgtgcgcttaa

SEQ ID NO: 1436 - DNA, 17 bp, Arabidopsis thaliana
aaaatctgtgcgcttta

SEQ ID NO: 1437 - DNA, 17 bp, Arabidopsis thaliana
aaaatctgtgttgaccg

SEQ ID NO: 1438 - DNA, 17 bp, Arabidopsis thaliana
aaaatctgtgttgtccg

SEQ ID NO: 1439 - DNA, 17 bp, Arabidopsis thaliana
aaaatctgttagttggg

SEQ ID NO: 1440 - DNA, 17 bp, Arabidopsis thaliana
aaaatctgttatgctta

SEQ ID NO: 1441 - DNA, 17 bp, Arabidopsis thaliana
aaaatctgttgaggcct

SEQ ID NO: 1442 - DNA, 17 bp, Arabidopsis thaliana
aaaatcttactagcagg

SEQ ID NO: 1443 - DNA, 17 bp, Arabidopsis thaliana
aaaatcttcaaagtgac

SEQ ID NO: 1444 - DNA, 17 bp, Arabidopsis thaliana
aaaatcttcagctgttg

SEQ ID NO: 1445 - DNA, 17 bp, Arabidopsis thaliana
aaaatcttctggggcaa

SEQ ID NO: 1446 - DNA, 17 bp, Arabidopsis thaliana
aaaatcttgatcgattt

SEQ ID NO: 1447 - DNA, 17 bp, Arabidopsis thaliana
aaaatcttgcccggtgt

SEQ ID NO: 1448 - DNA, 17 bp, Arabidopsis thaliana
aaaatctttctaatgtc

SEQ ID NO: 1449 - DNA, 17 bp, Arabidopsis thaliana
aaaatcttttggatctt

SEQ ID NO: 1450 - DNA, 17 bp, Arabidopsis thaliana
aaaatgaactgtcagac

SEQ ID NO: 1451 - DNA, 17 bp, Arabidopsis thaliana
aaaatgacagaaaccaa

SEQ ID NO: 1452 - DNA, 17 bp, Arabidopsis thaliana
aaaatgaccaatggtgg

SEQ ID NO: 1453 - DNA, 17 bp, Arabidopsis thaliana
aaaatgaccaccatttt

SEQ ID NO: 1454 - DNA, 17 bp, Arabidopsis thaliana
aaaatgacggatacttc

SEQ ID NO: 1455 - DNA, 17 bp, Arabidopsis thaliana
aaaatgacgtcgtttta

SEQ ID NO: 1456 - DNA, 17 bp, Arabidopsis thaliana
aaaatgacgtcgttttg

SEQ ID NO: 1457 - DNA, 17 bp, Arabidopsis thaliana
aaaatgactatatcgcg

SEQ ID NO: 1458 - DNA, 17 bp, Arabidopsis thaliana
aaaatgactctcggcaa

SEQ ID NO: 1459 - DNA, 17 bp, Arabidopsis thaliana
aaaatgacttaccacac

SEQ ID NO: 1460 - DNA, 17 bp, Arabidopsis thaliana
aaaatgacttttctcat

SEQ ID NO: 1461 - DNA, 17 bp, Arabidopsis thaliana
aaaatgagctgaccatg

SEQ ID NO: 1462 - DNA, 17 bp, Arabidopsis thaliana
aaaatgagttgttcaac

SEQ ID NO: 1463 - DNA, 17 bp, Arabidopsis thaliana
aaaatgatgtcgatcgt

SEQ ID NO: 1464 - DNA, 17 bp, Arabidopsis thaliana
aaaatgatgtgggtgct

SEQ ID NO: 1465 - DNA, 17 bp, Arabidopsis thaliana
aaaatgatttctgggtt

SEQ ID NO: 1466 - DNA, 17 bp, Arabidopsis thaliana
aaaatgcaaaatgttgg

SEQ ID NO: 1467 - DNA, 17 bp, Arabidopsis thaliana
aaaatgcaaataggatc

SEQ ID NO: 1468 - DNA, 17 bp, Arabidopsis thaliana
aaaatgcaaatgccgcc

SEQ ID NO: 1469 - DNA, 17 bp, Arabidopsis thaliana
aaaatgcaatcaacagg

SEQ ID NO: 1470 - DNA, 17 bp, Arabidopsis thaliana
aaaatgcagatccatgc

SEQ ID NO: 1471 - DNA, 17 bp, Arabidopsis thaliana
aaaatgcagcggtcgca

SEQ ID NO: 1472 - DNA, 17 bp, Arabidopsis thaliana
aaaatgcagctacagtt

SEQ ID NO: 1473 - DNA, 17 bp, Arabidopsis thaliana
aaaatgcaggcggtttg

SEQ ID NO: 1474 - DNA, 17 bp, Arabidopsis thaliana
aaaatgcaggtgacttg

SEQ ID NO: 1475 - DNA, 17 bp, Arabidopsis thaliana
aaaatgcagtcaccgtt

SEQ ID NO: 1476 - DNA, 17 bp, Arabidopsis thaliana
aaaatgcagtgtccgcc

SEQ ID NO: 1477 - DNA, 17 bp, Arabidopsis thaliana
aaaatgcattggattct

SEQ ID NO: 1478 - DNA, 17 bp, Arabidopsis thaliana
aaaatgccctttcttgc

SEQ ID NO: 1479 - DNA, 17 bp, Arabidopsis thaliana
aaaatgccgcactcgat

SEQ ID NO: 1480 - DNA, 17 bp, Arabidopsis thaliana
aaaatgccgccatgact

SEQ ID NO: 1481 - DNA, 17 bp, Arabidopsis thaliana
aaaatgccttgtacgtg

SEQ ID NO: 1482 - DNA, 17 bp, Arabidopsis thaliana
aaaatgcgccgacaacg

SEQ ID NO: 1483 - DNA, 17 bp, Arabidopsis thaliana
aaaatgcgggtttacga

SEQ ID NO: 1484 - DNA, 17 bp, Arabidopsis thaliana
aaaatgcgggtttatga

SEQ ID NO: 1485 - DNA, 17 bp, Arabidopsis thaliana
aaaatgcggtgcggttc

SEQ ID NO: 1486 - DNA, 17 bp, Arabidopsis thaliana
aaaatgcgttgccaaaa

SEQ ID NO: 1487 - DNA, 17 bp, Arabidopsis thaliana
aaaatgctacttcttgg

SEQ ID NO: 1488 - DNA, 17 bp, Arabidopsis thaliana
aaaatgctacttggttg

SEQ ID NO: 1489 - DNA, 17 bp, Arabidopsis thaliana
aaaatgctccgacgccg

SEQ ID NO: 1490 - DNA, 17 bp, Arabidopsis thaliana
aaaatgctcgatgtgtt

SEQ ID NO: 1491 - DNA, 17 bp, Arabidopsis thaliana
aaaatgctctgatacca

SEQ ID NO: 1492 - DNA, 17 bp, Arabidopsis thaliana
aaaatgctggtcattcg

SEQ ID NO: 1493 - DNA, 17 bp, Arabidopsis thaliana
aaaatgcttatgccact

SEQ ID NO: 1494 - DNA, 17 bp, Arabidopsis thaliana
aaaatgcttcatctggt

SEQ ID NO: 1495 - DNA, 17 bp, Arabidopsis thaliana
aaaatggaaccatgcct

SEQ ID NO: 1496 - DNA, 17 bp, Arabidopsis thaliana
aaaatggacatggagat

SEQ ID NO: 1497 - DNA, 17 bp, Arabidopsis thaliana
aaaatggacgaacgctc

SEQ ID NO: 1498 - DNA, 17 bp, Arabidopsis thaliana
aaaatggacgggcggcc

SEQ ID NO: 1499 - DNA, 17 bp, Arabidopsis thaliana
aaaatggatccgtaact

SEQ ID NO: 1500 - DNA, 17 bp, Arabidopsis thaliana
aaaatggatggcgctta

SEQ ID NO: 1501 - DNA, 17 bp, Arabidopsis thaliana
aaaatggattaaaccgc

SEQ ID NO: 1502 - DNA, 17 bp, Arabidopsis thaliana
aaaatggcaaagtcaac

SEQ ID NO: 1503 - DNA, 17 bp, Arabidopsis thaliana
aaaatggcaaatccaaa

SEQ ID NO: 1504 - DNA, 17 bp, Arabidopsis thaliana
aaaatggcaagacacct

SEQ ID NO: 1505 - DNA, 17 bp, Arabidopsis thaliana
aaaatggcaggaggctg

SEQ ID NO: 1506 - DNA, 17 bp, Arabidopsis thaliana
aaaatggcccattagct

SEQ ID NO: 1507 - DNA, 17 bp, Arabidopsis thaliana
aaaatggcccattccat

SEQ ID NO: 1508 - DNA, 17 bp, Arabidopsis thaliana
aaaatggcgtcttccga

SEQ ID NO: 1509 - DNA, 17 bp, Arabidopsis thaliana
aaaatggctgccactgg

SEQ ID NO: 1510 - DNA, 17 bp, Arabidopsis thaliana
aaaatggcttatccgta

SEQ ID NO: 1511 - DNA, 17 bp, Arabidopsis thaliana
aaaatggctttccggac

SEQ ID NO: 1512 - DNA, 17 bp, Arabidopsis thaliana
aaaatgggacacttcaa

SEQ ID NO: 1513 - DNA, 17 bp, Arabidopsis thaliana
aaaatgggagatgtccg

SEQ ID NO: 1514 - DNA, 17 bp, Arabidopsis thaliana
aaaatgggctatacatg

SEQ ID NO: 1515 - DNA, 17 bp, Arabidopsis thaliana
aaaatgggctgaccacg

SEQ ID NO: 1516 - DNA, 17 bp, Arabidopsis thaliana
aaaatgggctgaccatg

SEQ ID NO: 1517 - DNA, 17 bp, Arabidopsis thaliana
aaaatgggcttaccatg

SEQ ID NO: 1518 - DNA, 17 bp, Arabidopsis thaliana
aaaatggggccgaccta

SEQ ID NO: 1519 - DNA, 17 bp, Arabidopsis thaliana
aaaatgggtcaaaattc

SEQ ID NO: 1520 - DNA, 17 bp, Arabidopsis thaliana
aaaatgggtctgacatt

SEQ ID NO: 1521 - DNA, 17 bp, Arabidopsis thaliana
aaaatgggtgagtttta

SEQ ID NO: 1522 - DNA, 17 bp, Arabidopsis thaliana
aaaatgggtggtcccag

SEQ ID NO: 1523 - DNA, 17 bp, Arabidopsis thaliana
aaaatgggtttctctga

SEQ ID NO: 1524 - DNA, 17 bp, Arabidopsis thaliana
aaaatggtatgcagatg

SEQ ID NO: 1525 - DNA, 17 bp, Arabidopsis thaliana
aaaatggtccgcaaatg

SEQ ID NO: 1526 - DNA, 17 bp, Arabidopsis thaliana
aaaatggtctgaccacg

SEQ ID NO: 1527 - DNA, 17 bp, Arabidopsis thaliana
aaaatggtgtggtaagg

SEQ ID NO: 1528 - DNA, 17 bp, Arabidopsis thaliana
aaaatgtaggaccaaga

SEQ ID NO: 1529 - DNA, 17 bp, Arabidopsis thaliana
aaaatgtaggacccaga

SEQ ID NO: 1530 - DNA, 17 bp, Arabidopsis thaliana
aaaatgtatcagttcag

SEQ ID NO: 1531 - DNA, 17 bp, Arabidopsis thaliana
aaaatgtatttaggtgc

SEQ ID NO: 1532 - DNA, 17 bp, Arabidopsis thaliana
aaaatgtcacgggttca

SEQ ID NO: 1533 - DNA, 17 bp, Arabidopsis thaliana
aaaatgtccatcggcgg

SEQ ID NO: 1534 - DNA, 17 bp, Arabidopsis thaliana
aaaatgtcccacatcgg

SEQ ID NO: 1535 - DNA, 17 bp, Arabidopsis thaliana
aaaatgtcctttcttgc

SEQ ID NO: 1536 - DNA, 17 bp, Arabidopsis thaliana
aaaatgtcgtgcgccgt

SEQ ID NO: 1537 - DNA, 17 bp, Arabidopsis thaliana
aaaatgtctcgagaaat

SEQ ID NO: 1538 - DNA, 17 bp, Arabidopsis thaliana
aaaatgtcttttcttgc

SEQ ID NO: 1539 - DNA, 17 bp, Arabidopsis thaliana
aaaatgtgacacgttta

SEQ ID NO: 1540 - DNA, 17 bp, Arabidopsis thaliana
aaaatgtgagggccaac

SEQ ID NO: 1541 - DNA, 17 bp, Arabidopsis thaliana
aaaatgtggcagattct

SEQ ID NO: 1542 - DNA, 17 bp, Arabidopsis thaliana
aaaatgtgggcaaaagt

SEQ ID NO: 1543 - DNA, 17 bp, Arabidopsis thaliana
aaaatgtggttgaccca

SEQ ID NO: 1544 - DNA, 17 bp, Arabidopsis thaliana
aaaatgtgtggtggtcc

SEQ ID NO: 1545 - DNA, 17 bp, Arabidopsis thaliana
aaaatgttccgtgcttg

SEQ ID NO: 1546 - DNA, 17 bp, Arabidopsis thaliana
aaaatgttcgacggtcg

SEQ ID NO: 1547 - DNA, 17 bp, Arabidopsis thaliana
aaaatgttcgcagtctt

SEQ ID NO: 1548 - DNA, 17 bp, Arabidopsis thaliana
aaaatgttgcggatctg

SEQ ID NO: 1549 - DNA, 17 bp, Arabidopsis thaliana
aaaatgtttgcgggccc

SEQ ID NO: 1550 - DNA, 17 bp, Arabidopsis thaliana
aaaattaacgacaaatg

SEQ ID NO: 1551 - DNA, 17 bp, Arabidopsis thaliana
aaaattaaggcagtaga

SEQ ID NO: 1552 - DNA, 17 bp, Arabidopsis thaliana
aaaattaaggttagttc

SEQ ID NO: 1553 - DNA, 17 bp, Arabidopsis thaliana
aaaattacaggtttcgc

SEQ ID NO: 1554 - DNA, 17 bp, Arabidopsis thaliana
aaaattaccgttctggg

SEQ ID NO: 1555 - DNA, 17 bp, Arabidopsis thaliana
aaaattacgggtttacg

SEQ ID NO: 1556 - DNA, 17 bp, Arabidopsis thaliana
aaaattacttgattaga

SEQ ID NO: 1557 - DNA, 17 bp, Arabidopsis thaliana
aaaattagaccgctatg

SEQ ID NO: 1558 - DNA, 17 bp, Arabidopsis thaliana
aaaattagaccgctttg

SEQ ID NO: 1559 - DNA, 17 bp, Arabidopsis thaliana
aaaattagcggtgtact

SEQ ID NO: 1560 - DNA, 17 bp, Arabidopsis thaliana
aaaattaggaatgtcgg

SEQ ID NO: 1561 - DNA, 17 bp, Arabidopsis thaliana
aaaattataatcgcagg

SEQ ID NO: 1562 - DNA, 17 bp, Arabidopsis thaliana
aaaattatacatgtggc

SEQ ID NO: 1563 - DNA, 17 bp, Arabidopsis thaliana
aaaattatctgcttacg

SEQ ID NO: 1564 - DNA, 17 bp, Arabidopsis thaliana
aaaattatctgtcggtt

SEQ ID NO: 1565 - DNA, 17 bp, Arabidopsis thaliana
aaaattatgatcgctgg

SEQ ID NO: 1566 - DNA, 17 bp, Arabidopsis thaliana
aaaattcaacttggtgt

SEQ ID NO: 1567 - DNA, 17 bp, Arabidopsis thaliana
aaaattcagtggcagcc

SEQ ID NO: 1568 - DNA, 17 bp, Arabidopsis thaliana
aaaattcatcttcatgg

SEQ ID NO: 1569 - DNA, 17 bp, Arabidopsis thaliana
aaaattcatgggccaac

SEQ ID NO: 1570 - DNA, 17 bp, Arabidopsis thaliana
aaaattcatgggtcaac

SEQ ID NO: 1571 - DNA, 17 bp, Arabidopsis thaliana
aaaattccgaattgttg

SEQ ID NO: 1572 - DNA, 17 bp, Arabidopsis thaliana
aaaattccggaaccggg

SEQ ID NO: 1573 - DNA, 17 bp, Arabidopsis thaliana
aaaattcgcttatggtc

SEQ ID NO: 1574 - DNA, 17 bp, Arabidopsis thaliana
aaaattcgggataggag

SEQ ID NO: 1575 - DNA, 17 bp, Arabidopsis thaliana
aaaattcgggtcctcca

SEQ ID NO: 1576 - DNA, 17 bp, Arabidopsis thaliana
aaaattcggttcggttc

SEQ ID NO: 1577 - DNA, 17 bp, Arabidopsis thaliana
aaaattcgtattgaacc

SEQ ID NO: 1578 - DNA, 17 bp, Arabidopsis thaliana
aaaattcgtcggcgatt

SEQ ID NO: 1579 - DNA, 17 bp, Arabidopsis thaliana
aaaattcgtttgggttc

SEQ ID NO: 1580 - DNA, 17 bp, Arabidopsis thaliana
aaaattctcagatctcg

SEQ ID NO: 1581 - DNA, 17 bp, Arabidopsis thaliana
aaaattctcttaaccca

SEQ ID NO: 1582 - DNA, 17 bp, Arabidopsis thaliana
aaaattgaatacaagag

SEQ ID NO: 1583 - DNA, 17 bp, Arabidopsis thaliana
aaaattgacccatttaa

SEQ ID NO: 1584 - DNA, 17 bp, Arabidopsis thaliana
aaaattgaggtaatgct

SEQ ID NO: 1585 - DNA, 17 bp, Arabidopsis thaliana
aaaattgataccagcgc

SEQ ID NO: 1586 - DNA, 17 bp, Arabidopsis thaliana
aaaattgccatgctgac

SEQ ID NO: 1587 - DNA, 17 bp, Arabidopsis thaliana
aaaattgccatgtgtta

SEQ ID NO: 1588 - DNA, 17 bp, Arabidopsis thaliana
aaaattgccatttaccg

SEQ ID NO: 1589 - DNA, 17 bp, Arabidopsis thaliana
aaaattgcctaatctcg

SEQ ID NO: 1590 - DNA, 17 bp, Arabidopsis thaliana
aaaattgcgacgattgt

SEQ ID NO: 1591 - DNA, 17 bp, Arabidopsis thaliana
aaaattgcgccaagttg

SEQ ID NO: 1592 - DNA, 17 bp, Arabidopsis thaliana
aaaattgcggtcgctgg

SEQ ID NO: 1593 - DNA, 17 bp, Arabidopsis thaliana
aaaattgcggtcgctgt

SEQ ID NO: 1594 - DNA, 17 bp, Arabidopsis thaliana
aaaattgctgactcggc

SEQ ID NO: 1595 - DNA, 17 bp, Arabidopsis thaliana
aaaattggaatccttgg

SEQ ID NO: 1596 - DNA, 17 bp, Arabidopsis thaliana
aaaattggacaatggtt

SEQ ID NO: 1597 - DNA, 17 bp, Arabidopsis thaliana
aaaattggacccacgct

SEQ ID NO: 1598 - DNA, 17 bp, Arabidopsis thaliana
aaaattggctattgggc

SEQ ID NO: 1599 - DNA, 17 bp, Arabidopsis thaliana
aaaattggctattgtgc

SEQ ID NO: 1600 - DNA, 17 bp, Arabidopsis thaliana
aaaattggctgaatatt

SEQ ID NO: 1601 - DNA, 17 bp, Arabidopsis thaliana
aaaattggcttaggccc

SEQ ID NO: 1602 - DNA, 17 bp, Arabidopsis thaliana
aaaattgggctttggca

SEQ ID NO: 1603 - DNA, 17 bp, Arabidopsis thaliana
aaaattgggggtgtagc

SEQ ID NO: 1604 - DNA, 17 bp, Arabidopsis thaliana
aaaattggtccgactgg

SEQ ID NO: 1605 - DNA, 17 bp, Arabidopsis thaliana
aaaattggttgagttat

SEQ ID NO: 1606 - DNA, 17 bp, Arabidopsis thaliana
aaaattgtatctcgtcg

SEQ ID NO: 1607 - DNA, 17 bp, Arabidopsis thaliana
aaaattgtcacagggtt

SEQ ID NO: 1608 - DNA, 17 bp, Arabidopsis thaliana
aaaattgtctaatgtgc

SEQ ID NO: 1609 - DNA, 17 bp, Arabidopsis thaliana
aaaattgtgccggcttc

SEQ ID NO: 1610 - DNA, 17 bp, Arabidopsis thaliana
aaaattgtgcgaaagag

SEQ ID NO: 1611 - DNA, 17 bp, Arabidopsis thaliana
aaaattgtggttgctac

SEQ ID NO: 1612 - DNA, 17 bp, Arabidopsis thaliana
aaaattgtgttccttag

SEQ ID NO: 1613 - DNA, 17 bp, Arabidopsis thaliana
aaaattgttacccatgg

SEQ ID NO: 1614 - DNA, 17 bp, Arabidopsis thaliana
aaaattgttcccgcagt

SEQ ID NO: 1615 - DNA, 17 bp, Arabidopsis thaliana
aaaattgttggctgctc

SEQ ID NO: 1616 - DNA, 17 bp, Arabidopsis thaliana
aaaatttaaaagtatgt

SEQ ID NO: 1617 - DNA, 17 bp, Arabidopsis thaliana
aaaatttactgtggcct

SEQ ID NO: 1618 - DNA, 17 bp, Arabidopsis thaliana
aaaatttagcgtttcgt

SEQ ID NO: 1619 - DNA, 17 bp, Arabidopsis thaliana
aaaatttcaccggttta

SEQ ID NO: 1620 - DNA, 17 bp, Arabidopsis thaliana
aaaatttccattgtcct

SEQ ID NO: 1621 - DNA, 17 bp, Arabidopsis thaliana
aaaatttcccgccaaaa

SEQ ID NO: 1622 - DNA, 17 bp, Arabidopsis thaliana
aaaatttccgaatttaa

SEQ ID NO: 1623 - DNA, 17 bp, Arabidopsis thaliana
aaaatttccgaccagga

SEQ ID NO: 1624 - DNA, 17 bp, Arabidopsis thaliana
aaaatttcgtctcgcgg

SEQ ID NO: 1625 - DNA, 17 bp, Arabidopsis thaliana
aaaatttctgactttgg

SEQ ID NO: 1626 - DNA, 17 bp, Arabidopsis thaliana
aaaatttctgcaaggac

SEQ ID NO: 1627 - DNA, 17 bp, Arabidopsis thaliana
aaaatttgagaatttaa

SEQ ID NO: 1628 - DNA, 17 bp, Arabidopsis thaliana
aaaatttgccacataga

SEQ ID NO: 1629 - DNA, 17 bp, Arabidopsis thaliana
aaaatttgccacatttt

SEQ ID NO: 1630 - DNA, 17 bp, Arabidopsis thaliana
aaaatttgcctttattg

SEQ ID NO: 1631 - DNA, 17 bp, Arabidopsis thaliana
aaaatttgctgaatatt

SEQ ID NO: 1632 - DNA, 17 bp, Arabidopsis thaliana
aaaatttggcgggaaac

SEQ ID NO: 1633 - DNA, 17 bp, Arabidopsis thaliana
aaaatttggggtcgaca

SEQ ID NO: 1634 - DNA, 17 bp, Arabidopsis thaliana
aaaatttgggtgatatg

SEQ ID NO: 1635 - DNA, 17 bp, Arabidopsis thaliana
aaaatttgtggaagttg

SEQ ID NO: 1636 - DNA, 17 bp, Arabidopsis thaliana
aaaattttcagagtgtt

SEQ ID NO: 1637 - DNA, 17 bp, Arabidopsis thaliana
aaaattttgcggttttg

SEQ ID NO: 1638 - DNA, 17 bp, Arabidopsis thaliana
aaaattttgggttcgga

SEQ ID NO: 1639 - DNA, 17 bp, Arabidopsis thaliana
aaaattttgtctgactc

SEQ ID NO: 1640 - DNA, 17 bp, Arabidopsis thaliana
aaaatttttgactttgg

SEQ ID NO: 1641 - DNA, 17 bp, Arabidopsis thaliana
aaaatttttttgaacag

SEQ ID NO: 1642 - DNA, 17 bp, Arabidopsis thaliana
aaacaaaaaagatccac

SEQ ID NO: 1643 - DNA, 17 bp, Arabidopsis thaliana
aaacaaaaactatccaa

SEQ ID NO: 1644 - DNA, 17 bp, Arabidopsis thaliana
aaacaaaaagcggtctg

SEQ ID NO: 1645 - DNA, 17 bp, Arabidopsis thaliana
aaacaaaaaggcctaag

SEQ ID NO: 1646 - DNA, 17 bp, Arabidopsis thaliana
aaacaaaaagggtcgcc

SEQ ID NO: 1647 - DNA, 17 bp, Arabidopsis thaliana
aaacaaaaatgccatgt

SEQ ID NO: 1648 - DNA, 17 bp, Arabidopsis thaliana
aaacaaaaccacgtttt

SEQ ID NO: 1649 - DNA, 17 bp, Arabidopsis thaliana
aaacaaaacctataatc

SEQ ID NO: 1650 - DNA, 17 bp, Arabidopsis thaliana
aaacaaaaccttcctaa

SEQ ID NO: 1651 - DNA, 17 bp, Arabidopsis thaliana
aaacaaaacgactctcg

SEQ ID NO: 1652 - DNA, 17 bp, Arabidopsis thaliana
aaacaaaactactttgt

SEQ ID NO: 1653 - DNA, 17 bp, Arabidopsis thaliana
aaacaaaactattttcc

SEQ ID NO: 1654 - DNA, 17 bp, Arabidopsis thaliana
aaacaaaactcggttgc

SEQ ID NO: 1655 - DNA, 17 bp, Arabidopsis thaliana
aaacaaaacttcgcttg

SEQ ID NO: 1656 - DNA, 17 bp, Arabidopsis thaliana
aaacaaaacttggtctg

SEQ ID NO: 1657 - DNA, 17 bp, Arabidopsis thaliana
aaacaaaagtagcgaca

SEQ ID NO: 1658 - DNA, 17 bp, Arabidopsis thaliana
aaacaaaagttagtggc

SEQ ID NO: 1659 - DNA, 17 bp, Arabidopsis thaliana
aaacaaaataaccttgg

SEQ ID NO: 1660 - DNA, 17 bp, Arabidopsis thaliana
aaacaaaatagatcgcg

SEQ ID NO: 1661 - DNA, 17 bp, Arabidopsis thaliana
aaacaaaatccggagga

SEQ ID NO: 1662 - DNA, 17 bp, Arabidopsis thaliana
aaacaaaattaaatacc

SEQ ID NO: 1663 - DNA, 17 bp, Arabidopsis thaliana
aaacaaaattgcggtcg

SEQ ID NO: 1664 - DNA, 17 bp, Arabidopsis thaliana
aaacaaaattggaatcc

SEQ ID NO: 1665 - DNA, 17 bp, Arabidopsis thaliana
aaacaaacactcgacca

SEQ ID NO: 1666 - DNA, 17 bp, Arabidopsis thaliana
aaacaaacatcaacttc

SEQ ID NO: 1667 - DNA, 17 bp, Arabidopsis thaliana
aaacaaacatccgcagt

SEQ ID NO: 1668 - DNA, 17 bp, Arabidopsis thaliana
aaacaaaccaaaggtga

SEQ ID NO: 1669 - DNA, 17 bp, Arabidopsis thaliana
aaacaaaccaccttgtt

SEQ ID NO: 1670 - DNA, 17 bp, Arabidopsis thaliana
aaacaaaccacgagttt

SEQ ID NO: 1671 - DNA, 17 bp, Arabidopsis thaliana
aaacaaaccattggttg

SEQ ID NO: 1672 - DNA, 17 bp, Arabidopsis thaliana
aaacaaacccgtctgat

SEQ ID NO: 1673 - DNA, 17 bp, Arabidopsis thaliana
aaacaaacccgtttgta

SEQ ID NO: 1674 - DNA, 17 bp, Arabidopsis thaliana
aaacaaaccctaacgat

SEQ ID NO: 1675 - DNA, 17 bp, Arabidopsis thaliana
aaacaaaccctaccggc

SEQ ID NO: 1676 - DNA, 17 bp, Arabidopsis thaliana
aaacaaaccctactgat

SEQ ID NO: 1677 - DNA, 17 bp, Arabidopsis thaliana
aaacaaaccctatcgac

SEQ ID NO: 1678 - DNA, 17 bp, Arabidopsis thaliana
aaacaaaccgaactaaa

SEQ ID NO: 1679 - DNA, 17 bp, Arabidopsis thaliana
aaacaaaccgctgcgga

SEQ ID NO: 1680 - DNA, 17 bp, Arabidopsis thaliana
aaacaaaccggacggca

SEQ ID NO: 1681 - DNA, 17 bp, Arabidopsis thaliana
aaacaaacctcaagtga

SEQ ID NO: 1682 - DNA, 17 bp, Arabidopsis thaliana
aaacaaacctgcagatc

SEQ ID NO: 1683 - DNA, 17 bp, Arabidopsis thaliana
aaacaaacctgccacga

SEQ ID NO: 1684 - DNA, 17 bp, Arabidopsis thaliana
aaacaaacctgggccag

SEQ ID NO: 1685 - DNA, 17 bp, Arabidopsis thaliana
aaacaaaccttttagtg

SEQ ID NO: 1686 - DNA, 17 bp, Arabidopsis thaliana
aaacaaactaaaaccgt

SEQ ID NO: 1687 - DNA, 17 bp, Arabidopsis thaliana
aaacaaactaacagccc

SEQ ID NO: 1688 - DNA, 17 bp, Arabidopsis thaliana
aaacaaactaagtccgc

SEQ ID NO: 1689 - DNA, 17 bp, Arabidopsis thaliana
aaacaaactactttgtc

SEQ ID NO: 1690 - DNA, 17 bp, Arabidopsis thaliana
aaacaaactattcaggt

SEQ ID NO: 1691 - DNA, 17 bp, Arabidopsis thaliana
aaacaaactattctgcc

SEQ ID NO: 1692 - DNA, 17 bp, Arabidopsis thaliana
aaacaaactcccggttg

SEQ ID NO: 1693 - DNA, 17 bp, Arabidopsis thaliana
aaacaaactcgcggtgc

SEQ ID NO: 1694 - DNA, 17 bp, Arabidopsis thaliana
aaacaaactctatcggc

SEQ ID NO: 1695 - DNA, 17 bp, Arabidopsis thaliana
aaacaaacttagtgcgc

SEQ ID NO: 1696 - DNA, 17 bp, Arabidopsis thaliana
aaacaaacttcacatgt

SEQ ID NO: 1697 - DNA, 17 bp, Arabidopsis thaliana
aaacaaacttccagacc

SEQ ID NO: 1698 - DNA, 17 bp, Arabidopsis thaliana
aaacaaacttcgttgca

SEQ ID NO: 1699 - DNA, 17 bp, Arabidopsis thaliana
aaacaaacttgaagtcg

SEQ ID NO: 1700 - DNA, 17 bp, Arabidopsis thaliana
aaacaaacttggcatgt

SEQ ID NO: 1701 - DNA, 17 bp, Arabidopsis thaliana
aaacaaacttggccctg

SEQ ID NO: 1702 - DNA, 17 bp, Arabidopsis thaliana
aaacaaacttggtccgc

SEQ ID NO: 1703 - DNA, 17 bp, Arabidopsis thaliana
aaacaaacttgtgttga

SEQ ID NO: 1704 - DNA, 17 bp, Arabidopsis thaliana
aaacaaactttgatttt

SEQ ID NO: 1705 - DNA, 17 bp, Arabidopsis thaliana
aaacaaagaaattggac

SEQ ID NO: 1706 - DNA, 17 bp, Arabidopsis thaliana
aaacaaagattacgggt

SEQ ID NO: 1707 - DNA, 17 bp, Arabidopsis thaliana
aaacaaagattgcacgg

SEQ ID NO: 1708 - DNA, 17 bp, Arabidopsis thaliana
aaacaaagcaccaactt

SEQ ID NO: 1709 - DNA, 17 bp, Arabidopsis thaliana
aaacaaagcaccagttc

SEQ ID NO: 1710 - DNA, 17 bp, Arabidopsis thaliana
aaacaaagcattgcgat

SEQ ID NO: 1711 - DNA, 17 bp, Arabidopsis thaliana
aaacaaagccatctacg

SEQ ID NO: 1712 - DNA, 17 bp, Arabidopsis thaliana
aaacaaagcgggctacg

SEQ ID NO: 1713 - DNA, 17 bp, Arabidopsis thaliana
aaacaaagcggtctaat

SEQ ID NO: 1714 - DNA, 17 bp, Arabidopsis thaliana
aaacaaagcttagacca

SEQ ID NO: 1715 - DNA, 17 bp, Arabidopsis thaliana
aaacaaaggattatggc

SEQ ID NO: 1716 - DNA, 17 bp, Arabidopsis thaliana
aaacaaaggcagaaatt

SEQ ID NO: 1717 - DNA, 17 bp, Arabidopsis thaliana
aaacaaagttaagtcag

SEQ ID NO: 1718 - DNA, 17 bp, Arabidopsis thaliana
aaacaaagttcaaccgt

SEQ ID NO: 1719 - DNA, 17 bp, Arabidopsis thaliana
aaacaaagttccgtctg

SEQ ID NO: 1720 - DNA, 17 bp, Arabidopsis thaliana
aaacaaagttggccaac

SEQ ID NO: 1721 - DNA, 17 bp, Arabidopsis thaliana
aaacaaagttgttctgc

SEQ ID NO: 1722 - DNA, 17 bp, Arabidopsis thaliana
aaacaaataacttttga

SEQ ID NO: 1723 - DNA, 17 bp, Arabidopsis thaliana
aaacaaataacttttgg

SEQ ID NO: 1724 - DNA, 17 bp, Arabidopsis thaliana
aaacaaataccaggagg

SEQ ID NO: 1725 - DNA, 17 bp, Arabidopsis thaliana
aaacaaatagacctctt

SEQ ID NO: 1726 - DNA, 17 bp, Arabidopsis thaliana
aaacaaatcaccactca

SEQ ID NO: 1727 - DNA, 17 bp, Arabidopsis thaliana
aaacaaatcccggactg

SEQ ID NO: 1728 - DNA, 17 bp, Arabidopsis thaliana
aaacaaatccgcatatt

SEQ ID NO: 1729 - DNA, 17 bp, Arabidopsis thaliana
aaacaaatccggaggac

SEQ ID NO: 1730 - DNA, 17 bp, Arabidopsis thaliana
aaacaaatccgggtgcc

SEQ ID NO: 1731 - DNA, 17 bp, Arabidopsis thaliana
aaacaaatcgcgcgttt

SEQ ID NO: 1732 - DNA, 17 bp, Arabidopsis thaliana
aaacaaatctcagaaga

SEQ ID NO: 1733 - DNA, 17 bp, Arabidopsis thaliana
aaacaaatcttagtatc

SEQ ID NO: 1734 - DNA, 17 bp, Arabidopsis thaliana
aaacaaatcttgtcgcg

SEQ ID NO: 1735 - DNA, 17 bp, Arabidopsis thaliana
aaacaaatcttgtctcg

SEQ ID NO: 1736 - DNA, 17 bp, Arabidopsis thaliana
aaacaaatctttgatga

SEQ ID NO: 1737 - DNA, 17 bp, Arabidopsis thaliana
aaacaaatctttgcggg

SEQ ID NO: 1738 - DNA, 17 bp, Arabidopsis thaliana
aaacaaatgctaagcga

SEQ ID NO: 1739 - DNA, 17 bp, Arabidopsis thaliana
aaacaaatgctcagtta

SEQ ID NO: 1740 - DNA, 17 bp, Arabidopsis thaliana
aaacaaatgtcagtagc

SEQ ID NO: 1741 - DNA, 17 bp, Arabidopsis thaliana
aaacaaatgttcgactg

SEQ ID NO: 1742 - DNA, 17 bp, Arabidopsis thaliana
aaacaaattaacagcta

SEQ ID NO: 1743 - DNA, 17 bp, Arabidopsis thaliana
aaacaaattaccagcta

SEQ ID NO: 1744 - DNA, 17 bp, Arabidopsis thaliana
aaacaaattacgggttt

SEQ ID NO: 1745 - DNA, 17 bp, Arabidopsis thaliana
aaacaaattattccggt

SEQ ID NO: 1746 - DNA, 17 bp, Arabidopsis thaliana
aaacaaattcgccattt

SEQ ID NO: 1747 - DNA, 17 bp, Arabidopsis thaliana
aaacaaattgggactta

SEQ ID NO: 1748 - DNA, 17 bp, Arabidopsis thaliana
aaacaaatttccggata

SEQ ID NO: 1749 - DNA, 17 bp, Arabidopsis thaliana
aaacaaatttccgttaa

SEQ ID NO: 1750 - DNA, 17 bp, Arabidopsis thaliana
aaacaaatttggccgca

SEQ ID NO: 1751 - DNA, 17 bp, Arabidopsis thaliana
aaacaaatttgtatgta

SEQ ID NO: 1752 - DNA, 17 bp, Arabidopsis thaliana
aaacaaattttctgcat

SEQ ID NO: 1753 - DNA, 17 bp, Arabidopsis thaliana
aaacaacactggactat

SEQ ID NO: 1754 - DNA, 17 bp, Arabidopsis thaliana
aaacaacattcctcacg

SEQ ID NO: 1755 - DNA, 17 bp, Arabidopsis thaliana
aaacaacattcctcagg

SEQ ID NO: 1756 - DNA, 17 bp, Arabidopsis thaliana
aaacaacattcctcagt

SEQ ID NO: 1757 - DNA, 17 bp, Arabidopsis thaliana
aaacaacattcttcagg

SEQ ID NO: 1758 - DNA, 17 bp, Arabidopsis thaliana
aaacaacccacggtgcc

SEQ ID NO: 1759 - DNA, 17 bp, Arabidopsis thaliana
aaacaaccgagagcgag

SEQ ID NO: 1760 - DNA, 17 bp, Arabidopsis thaliana
aaacaacctctgcctag

SEQ ID NO: 1761 - DNA, 17 bp, Arabidopsis thaliana
aaacaacgaaaccgttt

SEQ ID NO: 1762 - DNA, 17 bp, Arabidopsis thaliana
aaacaacgggaatcatc

SEQ ID NO: 1763 - DNA, 17 bp, Arabidopsis thaliana
aaacaacgttcttcagg

SEQ ID NO: 1764 - DNA, 17 bp, Arabidopsis thaliana
aaacaactcgggtgcaa

SEQ ID NO: 1765 - DNA, 17 bp, Arabidopsis thaliana
aaacaactctgtcatgc

SEQ ID NO: 1766 - DNA, 17 bp, Arabidopsis thaliana
aaacaactgatttgggc

SEQ ID NO: 1767 - DNA, 17 bp, Arabidopsis thaliana
aaacaacttaccgtgca

SEQ ID NO: 1768 - DNA, 17 bp, Arabidopsis thaliana
aaacaacttaccgtgga

SEQ ID NO: 1769 - DNA, 17 bp, Arabidopsis thaliana
aaacaactttagttgcg

SEQ ID NO: 1770 - DNA, 17 bp, Arabidopsis thaliana
aaacaactttctcacag

SEQ ID NO: 1771 - DNA, 17 bp, Arabidopsis thaliana
aaacaacttttggtcgc

SEQ ID NO: 1772 - DNA, 17 bp, Arabidopsis thaliana
aaacaagaacttaggtg

SEQ ID NO: 1773 - DNA, 17 bp, Arabidopsis thaliana
aaacaagaagaatggtc

SEQ ID NO: 1774 - DNA, 17 bp, Arabidopsis thaliana
aaacaagaagagtgtgg

SEQ ID NO: 1775 - DNA, 17 bp, Arabidopsis thaliana
aaacaagagaacccaac

SEQ ID NO: 1776 - DNA, 17 bp, Arabidopsis thaliana
aaacaagattttaaccc

SEQ ID NO: 1777 - DNA, 17 bp, Arabidopsis thaliana
aaacaagcattgcgatg

SEQ ID NO: 1778 - DNA, 17 bp, Arabidopsis thaliana
aaacaagccgctacatg

SEQ ID NO: 1779 - DNA, 17 bp, Arabidopsis thaliana
aaacaagccgctacgtg

SEQ ID NO: 1780 - DNA, 17 bp, Arabidopsis thaliana
aaacaagcttcgctgac

SEQ ID NO: 1781 - DNA, 17 bp, Arabidopsis thaliana
aaacaaggaaaagtgcc

SEQ ID NO: 1782 - DNA, 17 bp, Arabidopsis thaliana
aaacaaggcttttgagt

SEQ ID NO: 1783 - DNA, 17 bp, Arabidopsis thaliana
aaacaagggctttttgt

SEQ ID NO: 1784 - DNA, 17 bp, Arabidopsis thaliana
aaacaaggttacatagg

SEQ ID NO: 1785 - DNA, 17 bp, Arabidopsis thaliana
aaacaagtaatcaggtc

SEQ ID NO: 1786 - DNA, 17 bp, Arabidopsis thaliana
aaacaagtccggaaccg

SEQ ID NO: 1787 - DNA, 17 bp, Arabidopsis thaliana
aaacaagtgtcttcgta

SEQ ID NO: 1788 - DNA, 17 bp, Arabidopsis thaliana
aaacaagtttcgtcaag

SEQ ID NO: 1789 - DNA, 17 bp, Arabidopsis thaliana
aaacaataggagaaatc

SEQ ID NO: 1790 - DNA, 17 bp, Arabidopsis thaliana
aaacaatatccctcggg

SEQ ID NO: 1791 - DNA, 17 bp, Arabidopsis thaliana
aaacaatcgcaaggctt

SEQ ID NO: 1792 - DNA, 17 bp, Arabidopsis thaliana
aaacaatctcggctggc

SEQ ID NO: 1793 - DNA, 17 bp, Arabidopsis thaliana
aaacaatgtagtggtca

SEQ ID NO: 1794 - DNA, 17 bp, Arabidopsis thaliana
aaacaatgtccgtgctg

SEQ ID NO: 1795 - DNA, 17 bp, Arabidopsis thaliana
aaacaatgtgataggcg

SEQ ID NO: 1796 - DNA, 17 bp, Arabidopsis thaliana
aaacaattctggagcag

SEQ ID NO: 1797 - DNA, 17 bp, Arabidopsis thaliana
aaacacaaaagccgaac

SEQ ID NO: 1798 - DNA, 17 bp, Arabidopsis thaliana
aaacacaaatggtggct

SEQ ID NO: 1799 - DNA, 17 bp, Arabidopsis thaliana
aaacacaatcagactag

SEQ ID NO: 1800 - DNA, 17 bp, Arabidopsis thaliana
aaacacaatgtgtatga

SEQ ID NO: 1801 - DNA, 17 bp, Arabidopsis thaliana
aaacacactgcattgcg

SEQ ID NO: 1802 - DNA, 17 bp, Arabidopsis thaliana
aaacacacttttgtccg

SEQ ID NO: 1803 - DNA, 17 bp, Arabidopsis thaliana
aaacacagcgggtgcgg

SEQ ID NO: 1804 - DNA, 17 bp, Arabidopsis thaliana
aaacacagctaggctac

SEQ ID NO: 1805 - DNA, 17 bp, Arabidopsis thaliana
aaacacaggtttaaata

SEQ ID NO: 1806 - DNA, 17 bp, Arabidopsis thaliana
aaacacagtcggtctca

SEQ ID NO: 1807 - DNA, 17 bp, Arabidopsis thaliana
aaacacagtttttcgat

SEQ ID NO: 1808 - DNA, 17 bp, Arabidopsis thaliana
aaacacataggctctga

SEQ ID NO: 1809 - DNA, 17 bp, Arabidopsis thaliana
aaacacatcctcggaag

SEQ ID NO: 1810 - DNA, 17 bp, Arabidopsis thaliana
aaacaccaacaggatct

SEQ ID NO: 1811 - DNA, 17 bp, Arabidopsis thaliana
aaacaccaacagggtgt

SEQ ID NO: 1812 - DNA, 17 bp, Arabidopsis thaliana
aaacaccaacaggtttg

SEQ ID NO: 1813 - DNA, 17 bp, Arabidopsis thaliana
aaacaccactatccaac

SEQ ID NO: 1814 - DNA, 17 bp, Arabidopsis thaliana
aaacaccatgtggtttt

SEQ ID NO: 1815 - DNA, 17 bp, Arabidopsis thaliana
aaacaccctgaccagac

SEQ ID NO: 1816 - DNA, 17 bp, Arabidopsis thaliana
aaacaccgcctcatcca

SEQ ID NO: 1817 - DNA, 17 bp, Arabidopsis thaliana
aaacaccgcctcatcta

SEQ ID NO: 1818 - DNA, 17 bp, Arabidopsis thaliana
aaacaccggttatgtgc

SEQ ID NO: 1819 - DNA, 17 bp, Arabidopsis thaliana
aaacacgactgtttggc

SEQ ID NO: 1820 - DNA, 17 bp, Arabidopsis thaliana
aaacacgctcttctcaa

SEQ ID NO: 1821 - DNA, 17 bp, Arabidopsis thaliana
aaacacggcgatgtagt

SEQ ID NO: 1822 - DNA, 17 bp, Arabidopsis thaliana
aaacacggttttacggg

SEQ ID NO: 1823 - DNA, 17 bp, Arabidopsis thaliana
aaacacgtctgcctggg

SEQ ID NO: 1824 - DNA, 17 bp, Arabidopsis thaliana
aaacacgtgtccttagc

SEQ ID NO: 1825 - DNA, 17 bp, Arabidopsis thaliana
aaacacgttgcttccac

SEQ ID NO: 1826 - DNA, 17 bp, Arabidopsis thaliana
aaacactacttgggcgt

SEQ ID NO: 1827 - DNA, 17 bp, Arabidopsis thaliana
aaacactatagcaagga

SEQ ID NO: 1828 - DNA, 17 bp, Arabidopsis thaliana
aaacactatggcctgtc

SEQ ID NO: 1829 - DNA, 17 bp, Arabidopsis thaliana
aaacactcgaccaacac

SEQ ID NO: 1830 - DNA, 17 bp, Arabidopsis thaliana
aaacactctgacactca

SEQ ID NO: 1831 - DNA, 17 bp, Arabidopsis thaliana
aaacactctgtggaaac

SEQ ID NO: 1832 - DNA, 17 bp, Arabidopsis thaliana
aaacactgctctatctg

SEQ ID NO: 1833 - DNA, 17 bp, Arabidopsis thaliana
aaacactggttcaattg

SEQ ID NO: 1834 - DNA, 17 bp, Arabidopsis thaliana
aaacacttcagtgcgtt

SEQ ID NO: 1835 - DNA, 17 bp, Arabidopsis thaliana
aaacacttggcatgtga

SEQ ID NO: 1836 - DNA, 17 bp, Arabidopsis thaliana
aaacactttctctctct

SEQ ID NO: 1837 - DNA, 17 bp, Arabidopsis thaliana
aaacactttgtcctgat

SEQ ID NO: 1838 - DNA, 17 bp, Arabidopsis thaliana
aaacagaatgttttgac

SEQ ID NO: 1839 - DNA, 17 bp, Arabidopsis thaliana
aaacagacacaatggct

SEQ ID NO: 1840 - DNA, 17 bp, Arabidopsis thaliana
aaacagacagtgtggtg

SEQ ID NO: 1841 - DNA, 17 bp, Arabidopsis thaliana
aaacagaccaagggccg

SEQ ID NO: 1842 - DNA, 17 bp, Arabidopsis thaliana
aaacagaccatcttcat

SEQ ID NO: 1843 - DNA, 17 bp, Arabidopsis thaliana
aaacagacccgaaaatc

SEQ ID NO: 1844 - DNA, 17 bp, Arabidopsis thaliana
aaacagagccacatccc

SEQ ID NO: 1845 - DNA, 17 bp, Arabidopsis thaliana
aaacagagccacatcct

SEQ ID NO: 1846 - DNA, 17 bp, Arabidopsis thaliana
aaacagagccgaccacc

SEQ ID NO: 1847 - DNA, 17 bp, Arabidopsis thaliana
aaacagagctctctgcc

SEQ ID NO: 1848 - DNA, 17 bp, Arabidopsis thaliana
aaacagagcttcagcta

SEQ ID NO: 1849 - DNA, 17 bp, Arabidopsis thaliana
aaacagagctttaagct

SEQ ID NO: 1850 - DNA, 17 bp, Arabidopsis thaliana
aaacagatctgatgata

SEQ ID NO: 1851 - DNA, 17 bp, Arabidopsis thaliana
aaacagattaaagcaga

SEQ ID NO: 1852 - DNA, 17 bp, Arabidopsis thaliana
aaacagatttgctggca

SEQ ID NO: 1853 - DNA, 17 bp, Arabidopsis thaliana
aaacagcaaggccactc

SEQ ID NO: 1854 - DNA, 17 bp, Arabidopsis thaliana
aaacagcaccggactat

SEQ ID NO: 1855 - DNA, 17 bp, Arabidopsis thaliana
aaacagcactggactat

SEQ ID NO: 1856 - DNA, 17 bp, Arabidopsis thaliana
aaacagccaagtgatca

SEQ ID NO: 1857 - DNA, 17 bp, Arabidopsis thaliana
aaacagccggatctgat

SEQ ID NO: 1858 - DNA, 17 bp, Arabidopsis thaliana
aaacagcctcgagtgac

SEQ ID NO: 1859 - DNA, 17 bp, Arabidopsis thaliana
aaacagctacgtctgcc

SEQ ID NO: 1860 - DNA, 17 bp, Arabidopsis thaliana
aaacagctatactcgac

SEQ ID NO: 1861 - DNA, 17 bp, Arabidopsis thaliana
aaacagctcaaacacgg

SEQ ID NO: 1862 - DNA, 17 bp, Arabidopsis thaliana
aaacagctcagggattc

SEQ ID NO: 1863 - DNA, 17 bp, Arabidopsis thaliana
aaacagctctttgctcc

SEQ ID NO: 1864 - DNA, 17 bp, Arabidopsis thaliana
aaacagctttcaggatt

SEQ ID NO: 1865 - DNA, 17 bp, Arabidopsis thaliana
aaacaggaccaaagtca

SEQ ID NO: 1866 - DNA, 17 bp, Arabidopsis thaliana
aaacaggaccaatggtc

SEQ ID NO: 1867 - DNA, 17 bp, Arabidopsis thaliana
aaacaggatcttggttc

SEQ ID NO: 1868 - DNA, 17 bp, Arabidopsis thaliana
aaacaggccacctgcca

SEQ ID NO: 1869 - DNA, 17 bp, Arabidopsis thaliana
aaacaggcttttccctg

SEQ ID NO: 1870 - DNA, 17 bp, Arabidopsis thaliana
aaacagggacgattctc

SEQ ID NO: 1871 - DNA, 17 bp, Arabidopsis thaliana
aaacagggattggctgc

SEQ ID NO: 1872 - DNA, 17 bp, Arabidopsis thaliana
aaacagggattggcttc

SEQ ID NO: 1873 - DNA, 17 bp, Arabidopsis thaliana
aaacagggcctatgttg

SEQ ID NO: 1874 - DNA, 17 bp, Arabidopsis thaliana
aaacagggctgagtatt

SEQ ID NO: 1875 - DNA, 17 bp, Arabidopsis thaliana
aaacaggggcagaggaa

SEQ ID NO: 1876 - DNA, 17 bp, Arabidopsis thaliana
aaacaggggtatttatg

SEQ ID NO: 1877 - DNA, 17 bp, Arabidopsis thaliana
aaacaggggtgactgaa

SEQ ID NO: 1878 - DNA, 17 bp, Arabidopsis thaliana
aaacagggttgagccct

SEQ ID NO: 1879 - DNA, 17 bp, Arabidopsis thaliana
aaacaggtctccaaggt

SEQ ID NO: 1880 - DNA, 17 bp, Arabidopsis thaliana
aaacaggtctgtgagcc

SEQ ID NO: 1881 - DNA, 17 bp, Arabidopsis thaliana
aaacaggtgtcgcataa

SEQ ID NO: 1882 - DNA, 17 bp, Arabidopsis thaliana
aaacaggtgtcggtcga

SEQ ID NO: 1883 - DNA, 17 bp, Arabidopsis thaliana
aaacaggttcaccggat

SEQ ID NO: 1884 - DNA, 17 bp, Arabidopsis thaliana
aaacaggtttaaataca

SEQ ID NO: 1885 - DNA, 17 bp, Arabidopsis thaliana
aaacaggttttaaacgc

SEQ ID NO: 1886 - DNA, 17 bp, Arabidopsis thaliana
aaacagtatgtaccggc

SEQ ID NO: 1887 - DNA, 17 bp, Arabidopsis thaliana
aaacagtcattttcggc

SEQ ID NO: 1888 - DNA, 17 bp, Arabidopsis thaliana
aaacagtccaagcccaa

SEQ ID NO: 1889 - DNA, 17 bp, Arabidopsis thaliana
aaacagtccctaggtgc

SEQ ID NO: 1890 - DNA, 17 bp, Arabidopsis thaliana
aaacagtccgcagatgg

SEQ ID NO: 1891 - DNA, 17 bp, Arabidopsis thaliana
aaacagtcgcagcgact

SEQ ID NO: 1892 - DNA, 17 bp, Arabidopsis thaliana
aaacagtcgcatcctgt

SEQ ID NO: 1893 - DNA, 17 bp, Arabidopsis thaliana
aaacagtcgctaggtgc

SEQ ID NO: 1894 - DNA, 17 bp, Arabidopsis thaliana
aaacagtcgtgttttta

SEQ ID NO: 1895 - DNA, 17 bp, Arabidopsis thaliana
aaacagtcgtttctcct

SEQ ID NO: 1896 - DNA, 17 bp, Arabidopsis thaliana
aaacagtctgaaagtga

SEQ ID NO: 1897 - DNA, 17 bp, Arabidopsis thaliana
aaacagtctgtgaaaaa

SEQ ID NO: 1898 - DNA, 17 bp, Arabidopsis thaliana
aaacagtctgtgaataa

SEQ ID NO: 1899 - DNA, 17 bp, Arabidopsis thaliana
aaacagtgaattgcggc

SEQ ID NO: 1900 - DNA, 17 bp, Arabidopsis thaliana
aaacagtggcactgggc

SEQ ID NO: 1901 - DNA, 17 bp, Arabidopsis thaliana
aaacagtggcgaatttg

SEQ ID NO: 1902 - DNA, 17 bp, Arabidopsis thaliana
aaacagtggtaactaag

SEQ ID NO: 1903 - DNA, 17 bp, Arabidopsis thaliana
aaacagtggttagggtt

SEQ ID NO: 1904 - DNA, 17 bp, Arabidopsis thaliana
aaacagttgaagactaa

SEQ ID NO: 1905 - DNA, 17 bp, Arabidopsis thaliana
aaacagttgatcgttta

SEQ ID NO: 1906 - DNA, 17 bp, Arabidopsis thaliana
aaacagttgatcgtttg

SEQ ID NO: 1907 - DNA, 17 bp, Arabidopsis thaliana
aaacagttgcgttgcaa

SEQ ID NO: 1908 - DNA, 17 bp, Arabidopsis thaliana
aaacagttgctctggtt

SEQ ID NO: 1909 - DNA, 17 bp, Arabidopsis thaliana
aaacagtttggactttc

SEQ ID NO: 1910 - DNA, 17 bp, Arabidopsis thaliana
aaacagtttgggcattc

SEQ ID NO: 1911 - DNA, 17 bp, Arabidopsis thaliana
aaacagtttgtgagtta

SEQ ID NO: 1912 - DNA, 17 bp, Arabidopsis thaliana
aaacagtttgtgagttt

SEQ ID NO: 1913 - DNA, 17 bp, Arabidopsis thaliana
aaacagttttaccttcg

SEQ ID NO: 1914 - DNA, 17 bp, Arabidopsis thaliana
aaacataaacagatttg

SEQ ID NO: 1915 - DNA, 17 bp, Arabidopsis thaliana
aaacataagaatggcac

SEQ ID NO: 1916 - DNA, 17 bp, Arabidopsis thaliana
aaacataaggattgcgg

SEQ ID NO: 1917 - DNA, 17 bp, Arabidopsis thaliana
aaacataatagccccgc

SEQ ID NO: 1918 - DNA, 17 bp, Arabidopsis thaliana
aaacataattatggagt

SEQ ID NO: 1919 - DNA, 17 bp, Arabidopsis thaliana
aaacataccttggttgc

SEQ ID NO: 1920 - DNA, 17 bp, Arabidopsis thaliana
aaacatagatattttga

SEQ ID NO: 1921 - DNA, 17 bp, Arabidopsis thaliana
aaacataggaccggcct

SEQ ID NO: 1922 - DNA, 17 bp, Arabidopsis thaliana
aaacatatccacctgcg

SEQ ID NO: 1923 - DNA, 17 bp, Arabidopsis thaliana
aaacatatccactcgcg

SEQ ID NO: 1924 - DNA, 17 bp, Arabidopsis thaliana
aaacatatccgcctgcc

SEQ ID NO: 1925 - DNA, 17 bp, Arabidopsis thaliana
aaacatatcgaacctgt

SEQ ID NO: 1926 - DNA, 17 bp, Arabidopsis thaliana
aaacatatcgctttcgc

SEQ ID NO: 1927 - DNA, 17 bp, Arabidopsis thaliana
aaacatcaacttcttat

SEQ ID NO: 1928 - DNA, 17 bp, Arabidopsis thaliana
aaacatcaactttttat

SEQ ID NO: 1929 - DNA, 17 bp, Arabidopsis thaliana
aaacatcaagggcatgc

SEQ ID NO: 1930 - DNA, 17 bp, Arabidopsis thaliana
aaacatcaagggcatgt

SEQ ID NO: 1931 - DNA, 17 bp, Arabidopsis thaliana
aaacatcaccgcggccg

SEQ ID NO: 1932 - DNA, 17 bp, Arabidopsis thaliana
aaacatcactaagtcta

SEQ ID NO: 1933 - DNA, 17 bp, Arabidopsis thaliana
aaacatcagcaaaggat

SEQ ID NO: 1934 - DNA, 17 bp, Arabidopsis thaliana
aaacatcagcagcgtca

SEQ ID NO: 1935 - DNA, 17 bp, Arabidopsis thaliana
aaacatcagtctacgca

SEQ ID NO: 1936 - DNA, 17 bp, Arabidopsis thaliana
aaacatcagtttatggt

SEQ ID NO: 1937 - DNA, 17 bp, Arabidopsis thaliana
aaacatcatccatatct

SEQ ID NO: 1938 - DNA, 17 bp, Arabidopsis thaliana
aaacatcattcctcagg

SEQ ID NO: 1939 - DNA, 17 bp, Arabidopsis thaliana
aaacatcattgtatggg

SEQ ID NO: 1940 - DNA, 17 bp, Arabidopsis thaliana
aaacatcccgtacgacc

SEQ ID NO: 1941 - DNA, 17 bp, Arabidopsis thaliana
aaacatccgcagttgct

SEQ ID NO: 1942 - DNA, 17 bp, Arabidopsis thaliana
aaacatccgttaagggg

SEQ ID NO: 1943 - DNA, 17 bp, Arabidopsis thaliana
aaacatccgttaaggtg

SEQ ID NO: 1944 - DNA, 17 bp, Arabidopsis thaliana
aaacatcctaccgttag

SEQ ID NO: 1945 - DNA, 17 bp, Arabidopsis thaliana
aaacatcctgcaaaact

SEQ ID NO: 1946 - DNA, 17 bp, Arabidopsis thaliana
aaacatcgccgctaagg

SEQ ID NO: 1947 - DNA, 17 bp, Arabidopsis thaliana
aaacatcgttcaggtgg

SEQ ID NO: 1948 - DNA, 17 bp, Arabidopsis thaliana
aaacatcgttggatgta

SEQ ID NO: 1949 - DNA, 17 bp, Arabidopsis thaliana
aaacatctaccttgccg

SEQ ID NO: 1950 - DNA, 17 bp, Arabidopsis thaliana
aaacatctaccttgcta

SEQ ID NO: 1951 - DNA, 17 bp, Arabidopsis thaliana
aaacatctcatcgtttg

SEQ ID NO: 1952 - DNA, 17 bp, Arabidopsis thaliana
aaacatctgaccgtttg

SEQ ID NO: 1953 - DNA, 17 bp, Arabidopsis thaliana
aaacatctgatcgacag

SEQ ID NO: 1954 - DNA, 17 bp, Arabidopsis thaliana
aaacatctgatcgtctg

SEQ ID NO: 1955 - DNA, 17 bp, Arabidopsis thaliana
aaacatctgatcgttta

SEQ ID NO: 1956 - DNA, 17 bp, Arabidopsis thaliana
aaacatctgatcgtttg

SEQ ID NO: 1957 - DNA, 17 bp, Arabidopsis thaliana
aaacatctgatcgtttt

SEQ ID NO: 1958 - DNA, 17 bp, Arabidopsis thaliana
aaacatctgcagcaact

SEQ ID NO: 1959 - DNA, 17 bp, Arabidopsis thaliana
aaacatctgcttggcct

SEQ ID NO: 1960 - DNA, 17 bp, Arabidopsis thaliana
aaacatctgttcgtttg

SEQ ID NO: 1961 - DNA, 17 bp, Arabidopsis thaliana
aaacatcttaccgttaa

SEQ ID NO: 1962 - DNA, 17 bp, Arabidopsis thaliana
aaacatcttaccgttag

SEQ ID NO: 1963 - DNA, 17 bp, Arabidopsis thaliana
aaacatcttaccgttcg

SEQ ID NO: 1964 - DNA, 17 bp, Arabidopsis thaliana
aaacatcttaccgtttg

SEQ ID NO: 1965 - DNA, 17 bp, Arabidopsis thaliana
aaacatcttgcgggcaa

SEQ ID NO: 1966 - DNA, 17 bp, Arabidopsis thaliana
aaacatctttgggtctg

SEQ ID NO: 1967 - DNA, 17 bp, Arabidopsis thaliana
aaacatgactgcttcca

SEQ ID NO: 1968 - DNA, 17 bp, Arabidopsis thaliana
aaacatgatgttatcgt

SEQ ID NO: 1969 - DNA, 17 bp, Arabidopsis thaliana
aaacatgcagcttcatt

SEQ ID NO: 1970 - DNA, 17 bp, Arabidopsis thaliana
aaacatgctcaagggta

SEQ ID NO: 1971 - DNA, 17 bp, Arabidopsis thaliana
aaacatgctcaagggtg

SEQ ID NO: 1972 - DNA, 17 bp, Arabidopsis thaliana
aaacatgctgctccttc

SEQ ID NO: 1973 - DNA, 17 bp, Arabidopsis thaliana
aaacatgggatgtagct

SEQ ID NO: 1974 - DNA, 17 bp, Arabidopsis thaliana
aaacatggtcaacaggt

SEQ ID NO: 1975 - DNA, 17 bp, Arabidopsis thaliana
aaacatggtcaacgggt

SEQ ID NO: 1976 - DNA, 17 bp, Arabidopsis thaliana
aaacatggtgcgcaacg

SEQ ID NO: 1977 - DNA, 17 bp, Arabidopsis thaliana
aaacatgtcagactcct

SEQ ID NO: 1978 - DNA, 17 bp, Arabidopsis thaliana
aaacatgtcttgaaccc

SEQ ID NO: 1979 - DNA, 17 bp, Arabidopsis thaliana
aaacatgtgacttacct

SEQ ID NO: 1980 - DNA, 17 bp, Arabidopsis thaliana
aaacatgtgcttggcct

SEQ ID NO: 1981 - DNA, 17 bp, Arabidopsis thaliana
aaacatgttatccagga

SEQ ID NO: 1982 - DNA, 17 bp, Arabidopsis thaliana
aaacattaaagtccagt

SEQ ID NO: 1983 - DNA, 17 bp, Arabidopsis thaliana
aaacattagtgacgcct

SEQ ID NO: 1984 - DNA, 17 bp, Arabidopsis thaliana
aaacattagtgccgcct

SEQ ID NO: 1985 - DNA, 17 bp, Arabidopsis thaliana
aaacattatcggctgat

SEQ ID NO: 1986 - DNA, 17 bp, Arabidopsis thaliana
aaacattcacatcctga

SEQ ID NO: 1987 - DNA, 17 bp, Arabidopsis thaliana
aaacattccaaactcgg

SEQ ID NO: 1988 - DNA, 17 bp, Arabidopsis thaliana
aaacattcctcagtatc

SEQ ID NO: 1989 - DNA, 17 bp, Arabidopsis thaliana
aaacattcgttgacacc

SEQ ID NO: 1990 - DNA, 17 bp, Arabidopsis thaliana
aaacattgcatagcgtg

SEQ ID NO: 1991 - DNA, 17 bp, Arabidopsis thaliana
aaacattggcttcgttt

SEQ ID NO: 1992 - DNA, 17 bp, Arabidopsis thaliana
aaacattggtctgcgca

SEQ ID NO: 1993 - DNA, 17 bp, Arabidopsis thaliana
aaacattgttgttgctg

SEQ ID NO: 1994 - DNA, 17 bp, Arabidopsis thaliana
aaacatttcgcaaacgg

SEQ ID NO: 1995 - DNA, 17 bp, Arabidopsis thaliana
aaacatttgctgtggcc

SEQ ID NO: 1996 - DNA, 17 bp, Arabidopsis thaliana
aaacatttgtatcctgc

SEQ ID NO: 1997 - DNA, 17 bp, Arabidopsis thaliana
aaaccaaaccgaacatt

SEQ ID NO: 1998 - DNA, 17 bp, Arabidopsis thaliana
aaaccaaacctgtccaa

SEQ ID NO: 1999 - DNA, 17 bp, Arabidopsis thaliana
aaaccaaactgtcacaa

SEQ ID NO: 2000 - DNA, 17 bp, Arabidopsis thaliana
aaaccaaagaccacgaa

SEQ ID NO: 2001 - DNA, 17 bp, Arabidopsis thaliana
aaaccaactgaaccaac

SEQ ID NO: 2002 - DNA, 17 bp, Arabidopsis thaliana
aaaccaactgctgtggg

SEQ ID NO: 2003 - DNA, 17 bp, Arabidopsis thaliana
aaaccaactttgtgctc

SEQ ID NO: 2004 - DNA, 17 bp, Arabidopsis thaliana
aaaccaagcattgcgat

SEQ ID NO: 2005 - DNA, 17 bp, Arabidopsis thaliana
aaaccaagccggttcga

SEQ ID NO: 2006 - DNA, 17 bp, Arabidopsis thaliana
aaaccaaggatgacttg

SEQ ID NO: 2007 - DNA, 17 bp, Arabidopsis thaliana
aaaccaagtagctgact

SEQ ID NO: 2008 - DNA, 17 bp, Arabidopsis thaliana
aaaccaatagactttag

SEQ ID NO: 2009 - DNA, 17 bp, Arabidopsis thaliana
aaaccaatgaccggtta

SEQ ID NO: 2010 - DNA, 17 bp, Arabidopsis thaliana
aaaccaatgtggggttg

SEQ ID NO: 2011 - DNA, 17 bp, Arabidopsis thaliana
aaaccaattgacccaag

SEQ ID NO: 2012 - DNA, 17 bp, Arabidopsis thaliana
aaaccaattgactcatc

SEQ ID NO: 2013 - DNA, 17 bp, Arabidopsis thaliana
aaaccaattggaccaag

SEQ ID NO: 2014 - DNA, 17 bp, Arabidopsis thaliana
aaaccaattggcccaag

SEQ ID NO: 2015 - DNA, 17 bp, Arabidopsis thaliana
aaaccaattgggccaag

SEQ ID NO: 2016 - DNA, 17 bp, Arabidopsis thaliana
aaaccacaaagaaccaa

SEQ ID NO: 2017 - DNA, 17 bp, Arabidopsis thaliana
aaaccacaaagaaccct

SEQ ID NO: 2018 - DNA, 17 bp, Arabidopsis thaliana
aaaccacaaccggatct

SEQ ID NO: 2019 - DNA, 17 bp, Arabidopsis thaliana
aaaccacaattgcttag

SEQ ID NO: 2020 - DNA, 17 bp, Arabidopsis thaliana
aaaccacacggactcta

SEQ ID NO: 2021 - DNA, 17 bp, Arabidopsis thaliana
aaaccacaggattctca

SEQ ID NO: 2022 - DNA, 17 bp, Arabidopsis thaliana
aaaccacagttgcttac

SEQ ID NO: 2023 - DNA, 17 bp, Arabidopsis thaliana
aaaccacagttgcttag

SEQ ID NO: 2024 - DNA, 17 bp, Arabidopsis thaliana
aaaccaccaggagtgga

SEQ ID NO: 2025 - DNA, 17 bp, Arabidopsis thaliana
aaaccaccatcgccgcc

SEQ ID NO: 2026 - DNA, 17 bp, Arabidopsis thaliana
aaaccaccttgttctgt

SEQ ID NO: 2027 - DNA, 17 bp, Arabidopsis thaliana
aaaccacgagtttggcc

SEQ ID NO: 2028 - DNA, 17 bp, Arabidopsis thaliana
aaaccacggatccggcg

SEQ ID NO: 2029 - DNA, 17 bp, Arabidopsis thaliana
aaaccactcgcttcaag

SEQ ID NO: 2030 - DNA, 17 bp, Arabidopsis thaliana
aaaccactcgggctcac

SEQ ID NO: 2031 - DNA, 17 bp, Arabidopsis thaliana
aaaccagaaagtgctct

SEQ ID NO: 2032 - DNA, 17 bp, Arabidopsis thaliana
aaaccagaaggagtgtt

SEQ ID NO: 2033 - DNA, 17 bp, Arabidopsis thaliana
aaaccagagaaaagcag

SEQ ID NO: 2034 - DNA, 17 bp, Arabidopsis thaliana
aaaccagagattctggg

SEQ ID NO: 2035 - DNA, 17 bp, Arabidopsis thaliana
aaaccagatcagccgat

SEQ ID NO: 2036 - DNA, 17 bp, Arabidopsis thaliana
aaaccagcaaccaattc

SEQ ID NO: 2037 - DNA, 17 bp, Arabidopsis thaliana
aaaccagcaggaccaac

SEQ ID NO: 2038 - DNA, 17 bp, Arabidopsis thaliana
aaaccagccacaaaaac

SEQ ID NO: 2039 - DNA, 17 bp, Arabidopsis thaliana
aaaccagccctgggcat

SEQ ID NO: 2040 - DNA, 17 bp, Arabidopsis thaliana
aaaccagcggcgccgtc

SEQ ID NO: 2041 - DNA, 17 bp, Arabidopsis thaliana
aaaccagcggtgggctt

SEQ ID NO: 2042 - DNA, 17 bp, Arabidopsis thaliana
aaaccaggactcgcaga

SEQ ID NO: 2043 - DNA, 17 bp, Arabidopsis thaliana
aaaccaggaggttcggg

SEQ ID NO: 2044 - DNA, 17 bp, Arabidopsis thaliana
aaaccaggctgtggctg

SEQ ID NO: 2045 - DNA, 17 bp, Arabidopsis thaliana
aaaccagtggatatgaa

SEQ ID NO: 2046 - DNA, 17 bp, Arabidopsis thaliana
aaaccatcaaaggtagc

SEQ ID NO: 2047 - DNA, 17 bp, Arabidopsis thaliana
aaaccatcagaggcaaa

SEQ ID NO: 2048 - DNA, 17 bp, Arabidopsis thaliana
aaaccatccatccttca

SEQ ID NO: 2049 - DNA, 17 bp, Arabidopsis thaliana
aaaccatccatccttga

SEQ ID NO: 2050 - DNA, 17 bp, Arabidopsis thaliana
aaaccatccatttgagg

SEQ ID NO: 2051 - DNA, 17 bp, Arabidopsis thaliana
aaaccatccgcaaagtg

SEQ ID NO: 2052 - DNA, 17 bp, Arabidopsis thaliana
aaaccatcggctggcgg

SEQ ID NO: 2053 - DNA, 17 bp, Arabidopsis thaliana
aaaccatctccatcggt

SEQ ID NO: 2054 - DNA, 17 bp, Arabidopsis thaliana
aaaccatctctattggg

SEQ ID NO: 2055 - DNA, 17 bp, Arabidopsis thaliana
aaaccatctggtccagg

SEQ ID NO: 2056 - DNA, 17 bp, Arabidopsis thaliana
aaaccatcttggacttt

SEQ ID NO: 2057 - DNA, 17 bp, Arabidopsis thaliana
aaaccatggagacggcg

SEQ ID NO: 2058 - DNA, 17 bp, Arabidopsis thaliana
aaaccatgtgggtggcg

SEQ ID NO: 2059 - DNA, 17 bp, Arabidopsis thaliana
aaaccattctctatcta

SEQ ID NO: 2060 - DNA, 17 bp, Arabidopsis thaliana
aaaccattgcgtcattg

SEQ ID NO: 2061 - DNA, 17 bp, Arabidopsis thaliana
aaaccattgggctaaag

SEQ ID NO: 2062 - DNA, 17 bp, Arabidopsis thaliana
aaaccatttgcagtgca

SEQ ID NO: 2063 - DNA, 17 bp, Arabidopsis thaliana
aaacccaaacttccttg

SEQ ID NO: 2064 - DNA, 17 bp, Arabidopsis thaliana
aaacccaaatggacccg

SEQ ID NO: 2065 - DNA, 17 bp, Arabidopsis thaliana
aaacccaacggcttggc

SEQ ID NO: 2066 - DNA, 17 bp, Arabidopsis thaliana
aaacccaactagaggcc

SEQ ID NO: 2067 - DNA, 17 bp, Arabidopsis thaliana
aaacccaactcaactca

SEQ ID NO: 2068 - DNA, 17 bp, Arabidopsis thaliana
aaacccaacttggttta

SEQ ID NO: 2069 - DNA, 17 bp, Arabidopsis thaliana
aaacccaagctgcgatt

SEQ ID NO: 2070 - DNA, 17 bp, Arabidopsis thaliana
aaacccaatctatcatt

SEQ ID NO: 2071 - DNA, 17 bp, Arabidopsis thaliana
aaacccacacccgaccg

SEQ ID NO: 2072 - DNA, 17 bp, Arabidopsis thaliana
aaacccacacctgaccg

SEQ ID NO: 2073 - DNA, 17 bp, Arabidopsis thaliana
aaacccaccaccctttc

SEQ ID NO: 2074 - DNA, 17 bp, Arabidopsis thaliana
aaacccacccacccacc

SEQ ID NO: 2075 - DNA, 17 bp, Arabidopsis thaliana
aaacccacggtataccg

SEQ ID NO: 2076 - DNA, 17 bp, Arabidopsis thaliana
aaacccactggctaccc

SEQ ID NO: 2077 - DNA, 17 bp, Arabidopsis thaliana
aaacccacttaaggatt

SEQ ID NO: 2078 - DNA, 17 bp, Arabidopsis thaliana
aaacccagcagtggttt

SEQ ID NO: 2079 - DNA, 17 bp, Arabidopsis thaliana
aaacccagcggggcaag

SEQ ID NO: 2080 - DNA, 17 bp, Arabidopsis thaliana
aaacccaggaccaacca

SEQ ID NO: 2081 - DNA, 17 bp, Arabidopsis thaliana
aaacccaggagagactc

SEQ ID NO: 2082 - DNA, 17 bp, Arabidopsis thaliana
aaacccagggctcaggc

SEQ ID NO: 2083 - DNA, 17 bp, Arabidopsis thaliana
aaacccaggtggtggtt

SEQ ID NO: 2084 - DNA, 17 bp, Arabidopsis thaliana
aaacccagtggtctgga

SEQ ID NO: 2085 - DNA, 17 bp, Arabidopsis thaliana
aaacccatcttcgctgt

SEQ ID NO: 2086 - DNA, 17 bp, Arabidopsis thaliana
aaacccatctttcgtgc

SEQ ID NO: 2087 - DNA, 17 bp, Arabidopsis thaliana
aaacccatgagcggccc

SEQ ID NO: 2088 - DNA, 17 bp, Arabidopsis thaliana
aaacccatgagcttatt

SEQ ID NO: 2089 - DNA, 17 bp, Arabidopsis thaliana
aaacccatggacaaaat

SEQ ID NO: 2090 - DNA, 17 bp, Arabidopsis thaliana
aaacccattgggacaaa

SEQ ID NO: 2091 - DNA, 17 bp, Arabidopsis thaliana
aaacccatttcttgtgt

SEQ ID NO: 2092 - DNA, 17 bp, Arabidopsis thaliana
aaaccccaaagacagcc

SEQ ID NO: 2093 - DNA, 17 bp, Arabidopsis thaliana
aaaccccaactaactga

SEQ ID NO: 2094 - DNA, 17 bp, Arabidopsis thaliana
aaaccccacagcagtta

SEQ ID NO: 2095 - DNA, 17 bp, Arabidopsis thaliana
aaaccccacttctgaca

SEQ ID NO: 2096 - DNA, 17 bp, Arabidopsis thaliana
aaaccccgaaaacaaaa

SEQ ID NO: 2097 - DNA, 17 bp, Arabidopsis thaliana
aaaccccgacttatgga

SEQ ID NO: 2098 - DNA, 17 bp, Arabidopsis thaliana
aaaccccggcagttggt

SEQ ID NO: 2099 - DNA, 17 bp, Arabidopsis thaliana
aaaccccgggtctgacg

SEQ ID NO: 2100 - DNA, 17 bp, Arabidopsis thaliana
aaaccccgttctcattg

SEQ ID NO: 2101 - DNA, 17 bp, Arabidopsis thaliana
aaacccctaagcggcgt

SEQ ID NO: 2102 - DNA, 17 bp, Arabidopsis thaliana
aaacccctaggaggtgc

SEQ ID NO: 2103 - DNA, 17 bp, Arabidopsis thaliana
aaacccctaggaggtgt

SEQ ID NO: 2104 - DNA, 17 bp, Arabidopsis thaliana
aaacccctgaggtattc

SEQ ID NO: 2105 - DNA, 17 bp, Arabidopsis thaliana
aaacccctggggtttct

SEQ ID NO: 2106 - DNA, 17 bp, Arabidopsis thaliana
aaacccgaaaaacctac

SEQ ID NO: 2107 - DNA, 17 bp, Arabidopsis thaliana
aaacccgaacatagcgc

SEQ ID NO: 2108 - DNA, 17 bp, Arabidopsis thaliana
aaacccgaataagtatc

SEQ ID NO: 2109 - DNA, 17 bp, Arabidopsis thaliana
aaacccgagaaaagcag

SEQ ID NO: 2110 - DNA, 17 bp, Arabidopsis thaliana
aaacccgagattttccc

SEQ ID NO: 2111 - DNA, 17 bp, Arabidopsis thaliana
aaacccgagatttttcc

SEQ ID NO: 2112 - DNA, 17 bp, Arabidopsis thaliana
aaacccgcatatttgcc

SEQ ID NO: 2113 - DNA, 17 bp, Arabidopsis thaliana
aaacccgcgatcaggga

SEQ ID NO: 2114 - DNA, 17 bp, Arabidopsis thaliana
aaacccgggccaactca

SEQ ID NO: 2115 - DNA, 17 bp, Arabidopsis thaliana
aaacccgtaatccccca

SEQ ID NO: 2116 - DNA, 17 bp, Arabidopsis thaliana
aaacccgtaatccctca

SEQ ID NO: 2117 - DNA, 17 bp, Arabidopsis thaliana
aaacccgtaatcctcca

SEQ ID NO: 2118 - DNA, 17 bp, Arabidopsis thaliana
aaacccgtaatcctcct

SEQ ID NO: 2119 - DNA, 17 bp, Arabidopsis thaliana
aaacccgtaattcccct

SEQ ID NO: 2120 - DNA, 17 bp, Arabidopsis thaliana
aaacccgtaattttccc

SEQ ID NO: 2121 - DNA, 17 bp, Arabidopsis thaliana
aaacccgtcaattctag

SEQ ID NO: 2122 - DNA, 17 bp, Arabidopsis thaliana
aaacccgtcccaccaat

SEQ ID NO: 2123 - DNA, 17 bp, Arabidopsis thaliana
aaacccgtcccgcaaaa

SEQ ID NO: 2124 - DNA, 17 bp, Arabidopsis thaliana
aaacccgtcccgccaaa

SEQ ID NO: 2125 - DNA, 17 bp, Arabidopsis thaliana
aaacccgtcccgccaac

SEQ ID NO: 2126 - DNA, 17 bp, Arabidopsis thaliana
aaacccgtcccgctaaa

SEQ ID NO: 2127 - DNA, 17 bp, Arabidopsis thaliana
aaacccgtccctccaaa

SEQ ID NO: 2128 - DNA, 17 bp, Arabidopsis thaliana
aaacccgtccctccaac

SEQ ID NO: 2129 - DNA, 17 bp, Arabidopsis thaliana
aaacccgtcctgacaaa

SEQ ID NO: 2130 - DNA, 17 bp, Arabidopsis thaliana
aaacccgtctgactcct

SEQ ID NO: 2131 - DNA, 17 bp, Arabidopsis thaliana
aaacccgtctgatagcg

SEQ ID NO: 2132 - DNA, 17 bp, Arabidopsis thaliana
aaacccgtgattttccc

SEQ ID NO: 2133 - DNA, 17 bp, Arabidopsis thaliana
aaacccgtgatttttcc

SEQ ID NO: 2134 - DNA, 17 bp, Arabidopsis thaliana
aaacccgtgattttttc

SEQ ID NO: 2135 - DNA, 17 bp, Arabidopsis thaliana
aaacccgtggatatccg

SEQ ID NO: 2136 - DNA, 17 bp, Arabidopsis thaliana
aaacccgtgggtatcag

SEQ ID NO: 2137 - DNA, 17 bp, Arabidopsis thaliana
aaacccgttccgctaac

SEQ ID NO: 2138 - DNA, 17 bp, Arabidopsis thaliana
aaacccgttctcccccc

SEQ ID NO: 2139 - DNA, 17 bp, Arabidopsis thaliana
aaacccgttctgccaaa

SEQ ID NO: 2140 - DNA, 17 bp, Arabidopsis thaliana
aaacccgtttgtaacca

SEQ ID NO: 2141 - DNA, 17 bp, Arabidopsis thaliana
aaaccctaaccgatttt

SEQ ID NO: 2142 - DNA, 17 bp, Arabidopsis thaliana
aaaccctaacgattctg

SEQ ID NO: 2143 - DNA, 17 bp, Arabidopsis thaliana
aaaccctaagaagtgtt

SEQ ID NO: 2144 - DNA, 17 bp, Arabidopsis thaliana
aaaccctaagatctcca

SEQ ID NO: 2145 - DNA, 17 bp, Arabidopsis thaliana
aaaccctaccggctaat

SEQ ID NO: 2146 - DNA, 17 bp, Arabidopsis thaliana
aaaccctactgattccc

SEQ ID NO: 2147 - DNA, 17 bp, Arabidopsis thaliana
aaaccctactgattccg

SEQ ID NO: 2148 - DNA, 17 bp, Arabidopsis thaliana
aaaccctagagtgtgcc

SEQ ID NO: 2149 - DNA, 17 bp, Arabidopsis thaliana
aaaccctagtgtcactg

SEQ ID NO: 2150 - DNA, 17 bp, Arabidopsis thaliana
aaaccctatcagctgat

SEQ ID NO: 2151 - DNA, 17 bp, Arabidopsis thaliana
aaaccctatcgactgat

SEQ ID NO: 2152 - DNA, 17 bp, Arabidopsis thaliana
aaaccctatcggctaat

SEQ ID NO: 2153 - DNA, 17 bp, Arabidopsis thaliana
aaaccctatcggctgat

SEQ ID NO: 2154 - DNA, 17 bp, Arabidopsis thaliana
aaaccctatcgggtgat

SEQ ID NO: 2155 - DNA, 17 bp, Arabidopsis thaliana
aaaccctattcgcagcc

SEQ ID NO: 2156 - DNA, 17 bp, Arabidopsis thaliana
aaaccctcaacttggcc

SEQ ID NO: 2157 - DNA, 17 bp, Arabidopsis thaliana
aaaccctcaactttggc

SEQ ID NO: 2158 - DNA, 17 bp, Arabidopsis thaliana
aaaccctcccatgatcc

SEQ ID NO: 2159 - DNA, 17 bp, Arabidopsis thaliana
aaaccctcccgcctcaa

SEQ ID NO: 2160 - DNA, 17 bp, Arabidopsis thaliana
aaaccctcttgccactg

SEQ ID NO: 2161 - DNA, 17 bp, Arabidopsis thaliana
aaaccctgacctggatt

SEQ ID NO: 2162 - DNA, 17 bp, Arabidopsis thaliana
aaaccctgagtgtcggc

SEQ ID NO: 2163 - DNA, 17 bp, Arabidopsis thaliana
aaaccctgctctgctat

SEQ ID NO: 2164 - DNA, 17 bp, Arabidopsis thaliana
aaaccctggtgtcatca

SEQ ID NO: 2165 - DNA, 17 bp, Arabidopsis thaliana
aaacccttagaccattt

SEQ ID NO: 2166 - DNA, 17 bp, Arabidopsis thaliana
aaacccttcatcgcttc

SEQ ID NO: 2167 - DNA, 17 bp, Arabidopsis thaliana
aaacccttgcagcatct

SEQ ID NO: 2168 - DNA, 17 bp, Arabidopsis thaliana
aaacccttgctggactt

SEQ ID NO: 2169 - DNA, 17 bp, Arabidopsis thaliana
aaaccctttgtcgctaa

SEQ ID NO: 2170 - DNA, 17 bp, Arabidopsis thaliana
aaaccgaaaccaactac

SEQ ID NO: 2171 - DNA, 17 bp, Arabidopsis thaliana
aaaccgaaaccaactgc

SEQ ID NO: 2172 - DNA, 17 bp, Arabidopsis thaliana
aaaccgaaaccaactgt

SEQ ID NO: 2173 - DNA, 17 bp, Arabidopsis thaliana
aaaccgaacaccgttca

SEQ ID NO: 2174 - DNA, 17 bp, Arabidopsis thaliana
aaaccgaactaaaccgg

SEQ ID NO: 2175 - DNA, 17 bp, Arabidopsis thaliana
aaaccgaatccaactgc

SEQ ID NO: 2176 - DNA, 17 bp, Arabidopsis thaliana
aaaccgaatggccagtg

SEQ ID NO: 2177 - DNA, 17 bp, Arabidopsis thaliana
aaaccgaattaaccgtt

SEQ ID NO: 2178 - DNA, 17 bp, Arabidopsis thaliana
aaaccgacagtgtgctg

SEQ ID NO: 2179 - DNA, 17 bp, Arabidopsis thaliana
aaaccgacccgaacccg

SEQ ID NO: 2180 - DNA, 17 bp, Arabidopsis thaliana
aaaccgacccgaataac

SEQ ID NO: 2181 - DNA, 17 bp, Arabidopsis thaliana
aaaccgaccgagccagt

SEQ ID NO: 2182 - DNA, 17 bp, Arabidopsis thaliana
aaaccgacgacggtcac

SEQ ID NO: 2183 - DNA, 17 bp, Arabidopsis thaliana
aaaccgacgttaaagtc

SEQ ID NO: 2184 - DNA, 17 bp, Arabidopsis thaliana
aaaccgactgatcttat

SEQ ID NO: 2185 - DNA, 17 bp, Arabidopsis thaliana
aaaccgagaccgctccg

SEQ ID NO: 2186 - DNA, 17 bp, Arabidopsis thaliana
aaaccgagaccttgtgc

SEQ ID NO: 2187 - DNA, 17 bp, Arabidopsis thaliana
aaaccgatcaccgagac

SEQ ID NO: 2188 - DNA, 17 bp, Arabidopsis thaliana
aaaccgatccatctttg

SEQ ID NO: 2189 - DNA, 17 bp, Arabidopsis thaliana
aaaccgatcccaactgt

SEQ ID NO: 2190 - DNA, 17 bp, Arabidopsis thaliana
aaaccgatccgcagttc

SEQ ID NO: 2191 - DNA, 17 bp, Arabidopsis thaliana
aaaccgatgaatttggc

SEQ ID NO: 2192 - DNA, 17 bp, Arabidopsis thaliana
aaaccgattgcccgcgg

SEQ ID NO: 2193 - DNA, 17 bp, Arabidopsis thaliana
aaaccgattgggcttta

SEQ ID NO: 2194 - DNA, 17 bp, Arabidopsis thaliana
aaaccgattgtccgtgg

SEQ ID NO: 2195 - DNA, 17 bp, Arabidopsis thaliana
aaaccgatttgcgtttt

SEQ ID NO: 2196 - DNA, 17 bp, Arabidopsis thaliana
aaaccgcaaaaacacgc

SEQ ID NO: 2197 - DNA, 17 bp, Arabidopsis thaliana
aaaccgcaaaaaccgca

SEQ ID NO: 2198 - DNA, 17 bp, Arabidopsis thaliana
aaaccgcaaacagatct

SEQ ID NO: 2199 - DNA, 17 bp, Arabidopsis thaliana
aaaccgcaaacggatct

SEQ ID NO: 2200 - DNA, 17 bp, Arabidopsis thaliana
aaaccgcaaccagatct

SEQ ID NO: 2201 - DNA, 17 bp, Arabidopsis thaliana
aaaccgcaaccggatct

SEQ ID NO: 2202 - DNA, 17 bp, Arabidopsis thaliana
aaaccgcaacctgatct

SEQ ID NO: 2203 - DNA, 17 bp, Arabidopsis thaliana
aaaccgcaacgggatct

SEQ ID NO: 2204 - DNA, 17 bp, Arabidopsis thaliana
aaaccgcaactggatct

SEQ ID NO: 2205 - DNA, 17 bp, Arabidopsis thaliana
aaaccgcaatcttatcc

SEQ ID NO: 2206 - DNA, 17 bp, Arabidopsis thaliana
aaaccgcaccgcacttc

SEQ ID NO: 2207 - DNA, 17 bp, Arabidopsis thaliana
aaaccgcaccgcacttt

SEQ ID NO: 2208 - DNA, 17 bp, Arabidopsis thaliana
aaaccgcaccgtacttt

SEQ ID NO: 2209 - DNA, 17 bp, Arabidopsis thaliana
aaaccgcactcaaaacc

SEQ ID NO: 2210 - DNA, 17 bp, Arabidopsis thaliana
aaaccgcagccggatct

SEQ ID NO: 2211 - DNA, 17 bp, Arabidopsis thaliana
aaaccgcagcggcttat

SEQ ID NO: 2212 - DNA, 17 bp, Arabidopsis thaliana
aaaccgcataggggcca

SEQ ID NO: 2213 - DNA, 17 bp, Arabidopsis thaliana
aaaccgcatttgttccg

SEQ ID NO: 2214 - DNA, 17 bp, Arabidopsis thaliana
aaaccgccacggactaa

SEQ ID NO: 2215 - DNA, 17 bp, Arabidopsis thaliana
aaaccgccccaccaatc

SEQ ID NO: 2216 - DNA, 17 bp, Arabidopsis thaliana
aaaccgccccgaaagtg

SEQ ID NO: 2217 - DNA, 17 bp, Arabidopsis thaliana
aaaccgcctaccgatat

SEQ ID NO: 2218 - DNA, 17 bp, Arabidopsis thaliana
aaaccgcctgcatttct

SEQ ID NO: 2219 - DNA, 17 bp, Arabidopsis thaliana
aaaccgcgaatgacgtg

SEQ ID NO: 2220 - DNA, 17 bp, Arabidopsis thaliana
aaaccgcgaccggatca

SEQ ID NO: 2221 - DNA, 17 bp, Arabidopsis thaliana
aaaccgcgatttaacag

SEQ ID NO: 2222 - DNA, 17 bp, Arabidopsis thaliana
aaaccgcgggttaaatc

SEQ ID NO: 2223 - DNA, 17 bp, Arabidopsis thaliana
aaaccgcgtctattcct

SEQ ID NO: 2224 - DNA, 17 bp, Arabidopsis thaliana
aaaccgctaatggatta

SEQ ID NO: 2225 - DNA, 17 bp, Arabidopsis thaliana
aaaccgctacggattag

SEQ ID NO: 2226 - DNA, 17 bp, Arabidopsis thaliana
aaaccgctcggttatgg

SEQ ID NO: 2227 - DNA, 17 bp, Arabidopsis thaliana
aaaccgctgcggaccaa

SEQ ID NO: 2228 - DNA, 17 bp, Arabidopsis thaliana
aaaccgctgcggaccat

SEQ ID NO: 2229 - DNA, 17 bp, Arabidopsis thaliana
aaaccgctgcggactta

SEQ ID NO: 2230 - DNA, 17 bp, Arabidopsis thaliana
aaaccgctttggcttgc

SEQ ID NO: 2231 - DNA, 17 bp, Arabidopsis thaliana
aaaccgggagcaggatc

SEQ ID NO: 2232 - DNA, 17 bp, Arabidopsis thaliana
aaaccgggtttgcttta

SEQ ID NO: 2233 - DNA, 17 bp, Arabidopsis thaliana
aaaccgtaaaaccacgt

SEQ ID NO: 2234 - DNA, 17 bp, Arabidopsis thaliana
aaaccgtaaaaggagag

SEQ ID NO: 2235 - DNA, 17 bp, Arabidopsis thaliana
aaaccgtaaagacttcg

SEQ ID NO: 2236 - DNA, 17 bp, Arabidopsis thaliana
aaaccgtactcaaaacc

SEQ ID NO: 2237 - DNA, 17 bp, Arabidopsis thaliana
aaaccgtatccgactgc

SEQ ID NO: 2238 - DNA, 17 bp, Arabidopsis thaliana
aaaccgtcacactacgg

SEQ ID NO: 2239 - DNA, 17 bp, Arabidopsis thaliana
aaaccgtcgttctaagc

SEQ ID NO: 2240 - DNA, 17 bp, Arabidopsis thaliana
aaaccgtctaagaacct

SEQ ID NO: 2241 - DNA, 17 bp, Arabidopsis thaliana
aaaccgtctatagacca

SEQ ID NO: 2242 - DNA, 17 bp, Arabidopsis thaliana
aaaccgtctttaaacaa

SEQ ID NO: 2243 - DNA, 17 bp, Arabidopsis thaliana
aaaccgtctttaaacta

SEQ ID NO: 2244 - DNA, 17 bp, Arabidopsis thaliana
aaaccgtgaggccaaac

SEQ ID NO: 2245 - DNA, 17 bp, Arabidopsis thaliana
aaaccgtgaggccaacc

SEQ ID NO: 2246 - DNA, 17 bp, Arabidopsis thaliana
aaaccgtgaggctaaac

SEQ ID NO: 2247 - DNA, 17 bp, Arabidopsis thaliana
aaaccgtgctgagtcag

SEQ ID NO: 2248 - DNA, 17 bp, Arabidopsis thaliana
aaaccgtggaagttcca

SEQ ID NO: 2249 - DNA, 17 bp, Arabidopsis thaliana
aaaccgtgtatggactg

SEQ ID NO: 2250 - DNA, 17 bp, Arabidopsis thaliana
aaaccgttgcggaccgt

SEQ ID NO: 2251 - DNA, 17 bp, Arabidopsis thaliana
aaaccgttttgtccgtt

SEQ ID NO: 2252 - DNA, 17 bp, Arabidopsis thaliana
aaacctaaaacaccgct

SEQ ID NO: 2253 - DNA, 17 bp, Arabidopsis thaliana
aaacctaaatactgacc

SEQ ID NO: 2254 - DNA, 17 bp, Arabidopsis thaliana
aaacctaaccattactg

SEQ ID NO: 2255 - DNA, 17 bp, Arabidopsis thaliana
aaacctaagactcgttg

SEQ ID NO: 2256 - DNA, 17 bp, Arabidopsis thaliana
aaacctaagagaagctc

SEQ ID NO: 2257 - DNA, 17 bp, Arabidopsis thaliana
aaacctaagagctttgg

SEQ ID NO: 2258 - DNA, 17 bp, Arabidopsis thaliana
aaacctaagatcgaggt

SEQ ID NO: 2259 - DNA, 17 bp, Arabidopsis thaliana
aaacctaagcagcaatt

SEQ ID NO: 2260 - DNA, 17 bp, Arabidopsis thaliana
aaacctaagcccaaaag

SEQ ID NO: 2261 - DNA, 17 bp, Arabidopsis thaliana
aaacctaagcgtaggtc

SEQ ID NO: 2262 - DNA, 17 bp, Arabidopsis thaliana
aaacctaagctcgttga

SEQ ID NO: 2263 - DNA, 17 bp, Arabidopsis thaliana
aaacctaaggctttgaa

SEQ ID NO: 2264 - DNA, 17 bp, Arabidopsis thaliana
aaacctaatcgattctc

SEQ ID NO: 2265 - DNA, 17 bp, Arabidopsis thaliana
aaacctaattttgcggc

SEQ ID NO: 2266 - DNA, 17 bp, Arabidopsis thaliana
aaacctacaacacctct

SEQ ID NO: 2267 - DNA, 17 bp, Arabidopsis thaliana
aaacctacacgcccaat

SEQ ID NO: 2268 - DNA, 17 bp, Arabidopsis thaliana
aaacctacgatctccga

SEQ ID NO: 2269 - DNA, 17 bp, Arabidopsis thaliana
aaacctactgcgttccg

SEQ ID NO: 2270 - DNA, 17 bp, Arabidopsis thaliana
aaacctagaacttccca

SEQ ID NO: 2271 - DNA, 17 bp, Arabidopsis thaliana
aaacctagaacttccct

SEQ ID NO: 2272 - DNA, 17 bp, Arabidopsis thaliana
aaacctagactctctcc

SEQ ID NO: 2273 - DNA, 17 bp, Arabidopsis thaliana
aaacctagagcacctct

SEQ ID NO: 2274 - DNA, 17 bp, Arabidopsis thaliana
aaacctagcggcctatc

SEQ ID NO: 2275 - DNA, 17 bp, Arabidopsis thaliana
aaacctagttgccgacg

SEQ ID NO: 2276 - DNA, 17 bp, Arabidopsis thaliana
aaacctatcaggacact

SEQ ID NO: 2277 - DNA, 17 bp, Arabidopsis thaliana
aaacctatgtcgctaag

SEQ ID NO: 2278 - DNA, 17 bp, Arabidopsis thaliana
aaacctatttgtggtgc

SEQ ID NO: 2279 - DNA, 17 bp, Arabidopsis thaliana
aaacctcaaacacacag

SEQ ID NO: 2280 - DNA, 17 bp, Arabidopsis thaliana
aaacctcaaagcaaaga

SEQ ID NO: 2281 - DNA, 17 bp, Arabidopsis thaliana
aaacctcaactttagcc

SEQ ID NO: 2282 - DNA, 17 bp, Arabidopsis thaliana
aaacctcaactttggcc

SEQ ID NO: 2283 - DNA, 17 bp, Arabidopsis thaliana
aaacctcaactttggtc

SEQ ID NO: 2284 - DNA, 17 bp, Arabidopsis thaliana
aaacctcaaggcctaat

SEQ ID NO: 2285 - DNA, 17 bp, Arabidopsis thaliana
aaacctcaagtgattct

SEQ ID NO: 2286 - DNA, 17 bp, Arabidopsis thaliana
aaacctcagtagtgctt

SEQ ID NO: 2287 - DNA, 17 bp, Arabidopsis thaliana
aaacctcagtctctaag

SEQ ID NO: 2288 - DNA, 17 bp, Arabidopsis thaliana
aaacctcatcagtggag

SEQ ID NO: 2289 - DNA, 17 bp, Arabidopsis thaliana
aaacctccatcggtttg

SEQ ID NO: 2290 - DNA, 17 bp, Arabidopsis thaliana
aaacctccgcctacgcc

SEQ ID NO: 2291 - DNA, 17 bp, Arabidopsis thaliana
aaacctcggaaggagtt

SEQ ID NO: 2292 - DNA, 17 bp, Arabidopsis thaliana
aaacctcggacattggt

SEQ ID NO: 2293 - DNA, 17 bp, Arabidopsis thaliana
aaacctcggcgtagcgc

SEQ ID NO: 2294 - DNA, 17 bp, Arabidopsis thaliana
aaacctcgggaggtggt

SEQ ID NO: 2295 - DNA, 17 bp, Arabidopsis thaliana
aaacctcggtaaactaa

SEQ ID NO: 2296 - DNA, 17 bp, Arabidopsis thaliana
aaacctctagctgcctc

SEQ ID NO: 2297 - DNA, 17 bp, Arabidopsis thaliana
aaacctctccatgggca

SEQ ID NO: 2298 - DNA, 17 bp, Arabidopsis thaliana
aaacctctctcactttc

SEQ ID NO: 2299 - DNA, 17 bp, Arabidopsis thaliana
aaacctcttcccaaggg

SEQ ID NO: 2300 - DNA, 17 bp, Arabidopsis thaliana
aaacctcttctcgggag

SEQ ID NO: 2301 - DNA, 17 bp, Arabidopsis thaliana
aaacctcttctgcggac

SEQ ID NO: 2302 - DNA, 17 bp, Arabidopsis thaliana
aaacctctttgcatgca

SEQ ID NO: 2303 - DNA, 17 bp, Arabidopsis thaliana
aaacctgattagacggc

SEQ ID NO: 2304 - DNA, 17 bp, Arabidopsis thaliana
aaacctgattgttccga

SEQ ID NO: 2305 - DNA, 17 bp, Arabidopsis thaliana
aaacctgattttgatta

SEQ ID NO: 2306 - DNA, 17 bp, Arabidopsis thaliana
aaacctgcaacctacag

SEQ ID NO: 2307 - DNA, 17 bp, Arabidopsis thaliana
aaacctgcagatctgct

SEQ ID NO: 2308 - DNA, 17 bp, Arabidopsis thaliana
aaacctgccacgaaaca

SEQ ID NO: 2309 - DNA, 17 bp, Arabidopsis thaliana
aaacctgccacgaaacg

SEQ ID NO: 2310 - DNA, 17 bp, Arabidopsis thaliana
aaacctgcgatagagtt

SEQ ID NO: 2311 - DNA, 17 bp, Arabidopsis thaliana
aaacctgcggttgcggc

SEQ ID NO: 2312 - DNA, 17 bp, Arabidopsis thaliana
aaacctggcatgtgata

SEQ ID NO: 2313 - DNA, 17 bp, Arabidopsis thaliana
aaacctggctctgatac

SEQ ID NO: 2314 - DNA, 17 bp, Arabidopsis thaliana
aaacctggctctgctac

SEQ ID NO: 2315 - DNA, 17 bp, Arabidopsis thaliana
aaacctgggtttggttc

SEQ ID NO: 2316 - DNA, 17 bp, Arabidopsis thaliana
aaacctggtggtcggaa

SEQ ID NO: 2317 - DNA, 17 bp, Arabidopsis thaliana
aaacctggttgacccga

SEQ ID NO: 2318 - DNA, 17 bp, Arabidopsis thaliana
aaacctgtaaggatttc

SEQ ID NO: 2319 - DNA, 17 bp, Arabidopsis thaliana
aaacctgtctaccaaaa

SEQ ID NO: 2320 - DNA, 17 bp, Arabidopsis thaliana
aaaccttagcagaggtc

SEQ ID NO: 2321 - DNA, 17 bp, Arabidopsis thaliana
aaaccttagtttattgc

SEQ ID NO: 2322 - DNA, 17 bp, Arabidopsis thaliana
aaaccttatcggctgat

SEQ ID NO: 2323 - DNA, 17 bp, Arabidopsis thaliana
aaaccttcaagggataa

SEQ ID NO: 2324 - DNA, 17 bp, Arabidopsis thaliana
aaaccttcaagtttgcg

SEQ ID NO: 2325 - DNA, 17 bp, Arabidopsis thaliana
aaaccttccgagttttg

SEQ ID NO: 2326 - DNA, 17 bp, Arabidopsis thaliana
aaaccttctactccgtt

SEQ ID NO: 2327 - DNA, 17 bp, Arabidopsis thaliana
aaaccttctattttccc

SEQ ID NO: 2328 - DNA, 17 bp, Arabidopsis thaliana
aaaccttgatgaggaaa

SEQ ID NO: 2329 - DNA, 17 bp, Arabidopsis thaliana
aaaccttgatgatttgc

SEQ ID NO: 2330 - DNA, 17 bp, Arabidopsis thaliana
aaaccttggaaattctt

SEQ ID NO: 2331 - DNA, 17 bp, Arabidopsis thaliana
aaaccttgttacgactt

SEQ ID NO: 2332 - DNA, 17 bp, Arabidopsis thaliana
aaacctttaaatcagac

SEQ ID NO: 2333 - DNA, 17 bp, Arabidopsis thaliana
aaacctttaagatccgg

SEQ ID NO: 2334 - DNA, 17 bp, Arabidopsis thaliana
aaacctttcaaaacctc

SEQ ID NO: 2335 - DNA, 17 bp, Arabidopsis thaliana
aaacctttccatttccg

SEQ ID NO: 2336 - DNA, 17 bp, Arabidopsis thaliana
aaacctttccgcatgca

SEQ ID NO: 2337 - DNA, 17 bp, Arabidopsis thaliana
aaacctttctagctcaa

SEQ ID NO: 2338 - DNA, 17 bp, Arabidopsis thaliana
aaacctttctgattctt

SEQ ID NO: 2339 - DNA, 17 bp, Arabidopsis thaliana
aaacctttgtcgctaaa

SEQ ID NO: 2340 - DNA, 17 bp, Arabidopsis thaliana
aaaccttttagtgtgat

SEQ ID NO: 2341 - DNA, 17 bp, Arabidopsis thaliana
aaaccttttgcaacaag

SEQ ID NO: 2342 - DNA, 17 bp, Arabidopsis thaliana
aaaccttttggcccatg

SEQ ID NO: 2343 - DNA, 17 bp, Arabidopsis thaliana
aaaccttttgttcccta

SEQ ID NO: 2344 - DNA, 17 bp, Arabidopsis thaliana
aaacgaaaacgactggt

SEQ ID NO: 2345 - DNA, 17 bp, Arabidopsis thaliana
aaacgaaaggtgcgtgg

SEQ ID NO: 2346 - DNA, 17 bp, Arabidopsis thaliana
aaacgaaattccaactt

SEQ ID NO: 2347 - DNA, 17 bp, Arabidopsis thaliana
aaacgaaattgacttgg

SEQ ID NO: 2348 - DNA, 17 bp, Arabidopsis thaliana
aaacgaacaaacagccc

SEQ ID NO: 2349 - DNA, 17 bp, Arabidopsis thaliana
aaacgaacaacatctca

SEQ ID NO: 2350 - DNA, 17 bp, Arabidopsis thaliana
aaacgaacagacagccc

SEQ ID NO: 2351 - DNA, 17 bp, Arabidopsis thaliana
aaacgaacagagccttg

SEQ ID NO: 2352 - DNA, 17 bp, Arabidopsis thaliana
aaacgaacaggaccgtt

SEQ ID NO: 2353 - DNA, 17 bp, Arabidopsis thaliana
aaacgaacaggcccctt

SEQ ID NO: 2354 - DNA, 17 bp, Arabidopsis thaliana
aaacgaacagggccgaa

SEQ ID NO: 2355 - DNA, 17 bp, Arabidopsis thaliana
aaacgaacattacgcgg

SEQ ID NO: 2356 - DNA, 17 bp, Arabidopsis thaliana
aaacgaacgttgttgcg

SEQ ID NO: 2357 - DNA, 17 bp, Arabidopsis thaliana
aaacgaagctccggttc

SEQ ID NO: 2358 - DNA, 17 bp, Arabidopsis thaliana
aaacgaattccaaaggg

SEQ ID NO: 2359 - DNA, 17 bp, Arabidopsis thaliana
aaacgaattctgggttt

SEQ ID NO: 2360 - DNA, 17 bp, Arabidopsis thaliana
aaacgacagcgtctcac

SEQ ID NO: 2361 - DNA, 17 bp, Arabidopsis thaliana
aaacgacatcccgttcg

SEQ ID NO: 2362 - DNA, 17 bp, Arabidopsis thaliana
aaacgacattgttccca

SEQ ID NO: 2363 - DNA, 17 bp, Arabidopsis thaliana
aaacgaccatttcctcc

SEQ ID NO: 2364 - DNA, 17 bp, Arabidopsis thaliana
aaacgaccctcggcaac

SEQ ID NO: 2365 - DNA, 17 bp, Arabidopsis thaliana
aaacgaccctggggtca

SEQ ID NO: 2366 - DNA, 17 bp, Arabidopsis thaliana
aaacgaccgcatacgaa

SEQ ID NO: 2367 - DNA, 17 bp, Arabidopsis thaliana
aaacgaccgttccgccg

SEQ ID NO: 2368 - DNA, 17 bp, Arabidopsis thaliana
aaacgacctcgacctct

SEQ ID NO: 2369 - DNA, 17 bp, Arabidopsis thaliana
aaacgacctgggttcct

SEQ ID NO: 2370 - DNA, 17 bp, Arabidopsis thaliana
aaacgacgaagtattta

SEQ ID NO: 2371 - DNA, 17 bp, Arabidopsis thaliana
aaacgacgaagtatttg

SEQ ID NO: 2372 - DNA, 17 bp, Arabidopsis thaliana
aaacgacgaatccgccg

SEQ ID NO: 2373 - DNA, 17 bp, Arabidopsis thaliana
aaacgacgaccgacttt

SEQ ID NO: 2374 - DNA, 17 bp, Arabidopsis thaliana
aaacgacgccgttttgg

SEQ ID NO: 2375 - DNA, 17 bp, Arabidopsis thaliana
aaacgacgcggattacg

SEQ ID NO: 2376 - DNA, 17 bp, Arabidopsis thaliana
aaacgacgctgcaggca

SEQ ID NO: 2377 - DNA, 17 bp, Arabidopsis thaliana
aaacgacggcgagtggc

SEQ ID NO: 2378 - DNA, 17 bp, Arabidopsis thaliana
aaacgacggcgtatttg

SEQ ID NO: 2379 - DNA, 17 bp, Arabidopsis thaliana
aaacgacggtaagtcag

SEQ ID NO: 2380 - DNA, 17 bp, Arabidopsis thaliana
aaacgacgtcattttga

SEQ ID NO: 2381 - DNA, 17 bp, Arabidopsis thaliana
aaacgacgtcgtttcgt

SEQ ID NO: 2382 - DNA, 17 bp, Arabidopsis thaliana
aaacgacgtcgtttgtc

SEQ ID NO: 2383 - DNA, 17 bp, Arabidopsis thaliana
aaacgacgttcttttgt

SEQ ID NO: 2384 - DNA, 17 bp, Arabidopsis thaliana
aaacgacgttgttttgg

SEQ ID NO: 2385 - DNA, 17 bp, Arabidopsis thaliana
aaacgactcagtattgg

SEQ ID NO: 2386 - DNA, 17 bp, Arabidopsis thaliana
aaacgactctcagcaac

SEQ ID NO: 2387 - DNA, 17 bp, Arabidopsis thaliana
aaacgactctcggaaac

SEQ ID NO: 2388 - DNA, 17 bp, Arabidopsis thaliana
aaacgactctcggacac

SEQ ID NO: 2389 - DNA, 17 bp, Arabidopsis thaliana
aaacgactctcggcaac

SEQ ID NO: 2390 - DNA, 17 bp, Arabidopsis thaliana
aaacgactctcggcaat

SEQ ID NO: 2391 - DNA, 17 bp, Arabidopsis thaliana
aaacgactctcggcacc

SEQ ID NO: 2392 - DNA, 17 bp, Arabidopsis thaliana
aaacgactgaattcccc

SEQ ID NO: 2393 - DNA, 17 bp, Arabidopsis thaliana
aaacgactgaatttccc

SEQ ID NO: 2394 - DNA, 17 bp, Arabidopsis thaliana
aaacgactgctaacgtc

SEQ ID NO: 2395 - DNA, 17 bp, Arabidopsis thaliana
aaacgacttcggcaacg

SEQ ID NO: 2396 - DNA, 17 bp, Arabidopsis thaliana
aaacgacttctgcagct

SEQ ID NO: 2397 - DNA, 17 bp, Arabidopsis thaliana
aaacgagaaaccaagca

SEQ ID NO: 2398 - DNA, 17 bp, Arabidopsis thaliana
aaacgagacaattccgt

SEQ ID NO: 2399 - DNA, 17 bp, Arabidopsis thaliana
aaacgagacagctactc

SEQ ID NO: 2400 - DNA, 17 bp, Arabidopsis thaliana
aaacgagaccacatttg

SEQ ID NO: 2401 - DNA, 17 bp, Arabidopsis thaliana
aaacgagactgtctcca

SEQ ID NO: 2402 - DNA, 17 bp, Arabidopsis thaliana
aaacgagagccgtccga

SEQ ID NO: 2403 - DNA, 17 bp, Arabidopsis thaliana
aaacgagagcgcttatc

SEQ ID NO: 2404 - DNA, 17 bp, Arabidopsis thaliana
aaacgagagtaatgaca

SEQ ID NO: 2405 - DNA, 17 bp, Arabidopsis thaliana
aaacgagagtcgtcggg

SEQ ID NO: 2406 - DNA, 17 bp, Arabidopsis thaliana
aaacgagattaaatgtt

SEQ ID NO: 2407 - DNA, 17 bp, Arabidopsis thaliana
aaacgagccaagcctga

SEQ ID NO: 2408 - DNA, 17 bp, Arabidopsis thaliana
aaacgagccaatcctga

SEQ ID NO: 2409 - DNA, 17 bp, Arabidopsis thaliana
aaacgagccaatctcga

SEQ ID NO: 2410 - DNA, 17 bp, Arabidopsis thaliana
aaacgagccaatttcga

SEQ ID NO: 2411 - DNA, 17 bp, Arabidopsis thaliana
aaacgagcttttaccct

SEQ ID NO: 2412 - DNA, 17 bp, Arabidopsis thaliana
aaacgaggaaaggctta

SEQ ID NO: 2413 - DNA, 17 bp, Arabidopsis thaliana
aaacgaggactctggtc

SEQ ID NO: 2414 - DNA, 17 bp, Arabidopsis thaliana
aaacgaggactcttgtc

SEQ ID NO: 2415 - DNA, 17 bp, Arabidopsis thaliana
aaacgagggatcacacc

SEQ ID NO: 2416 - DNA, 17 bp, Arabidopsis thaliana
aaacgagggcacgtctg

SEQ ID NO: 2417 - DNA, 17 bp, Arabidopsis thaliana
aaacgagtagaccttgt

SEQ ID NO: 2418 - DNA, 17 bp, Arabidopsis thaliana
aaacgagtctcggatct

SEQ ID NO: 2419 - DNA, 17 bp, Arabidopsis thaliana
aaacgagttcctagatc

SEQ ID NO: 2420 - DNA, 17 bp, Arabidopsis thaliana
aaacgagttggccagaa

SEQ ID NO: 2421 - DNA, 17 bp, Arabidopsis thaliana
aaacgagtttttaccct

SEQ ID NO: 2422 - DNA, 17 bp, Arabidopsis thaliana
aaacgatagtcggtttg

SEQ ID NO: 2423 - DNA, 17 bp, Arabidopsis thaliana
aaacgatagtcggtttt

SEQ ID NO: 2424 - DNA, 17 bp, Arabidopsis thaliana
aaacgatcagatgttta

SEQ ID NO: 2425 - DNA, 17 bp, Arabidopsis thaliana
aaacgatccacttggtt

SEQ ID NO: 2426 - DNA, 17 bp, Arabidopsis thaliana
aaacgatccatttggtt

SEQ ID NO: 2427 - DNA, 17 bp, Arabidopsis thaliana
aaacgatcggagatgtt

SEQ ID NO: 2428 - DNA, 17 bp, Arabidopsis thaliana
aaacgatcggatcttta

SEQ ID NO: 2429 - DNA, 17 bp, Arabidopsis thaliana
aaacgatcggatgttta

SEQ ID NO: 2430 - DNA, 17 bp, Arabidopsis thaliana
aaacgatcttcttatgt

SEQ ID NO: 2431 - DNA, 17 bp, Arabidopsis thaliana
aaacgatcttttaagct

SEQ ID NO: 2432 - DNA, 17 bp, Arabidopsis thaliana
aaacgatcttttgattg

SEQ ID NO: 2433 - DNA, 17 bp, Arabidopsis thaliana
aaacgatgaccattcgg

SEQ ID NO: 2434 - DNA, 17 bp, Arabidopsis thaliana
aaacgatgacctttttg

SEQ ID NO: 2435 - DNA, 17 bp, Arabidopsis thaliana
aaacgatgacgttcacg

SEQ ID NO: 2436 - DNA, 17 bp, Arabidopsis thaliana
aaacgatgccgaccaga

SEQ ID NO: 2437 - DNA, 17 bp, Arabidopsis thaliana
aaacgatgccgaccagg

SEQ ID NO: 2438 - DNA, 17 bp, Arabidopsis thaliana
aaacgatgccgaccagt

SEQ ID NO: 2439 - DNA, 17 bp, Arabidopsis thaliana
aaacgatggatactagg

SEQ ID NO: 2440 - DNA, 17 bp, Arabidopsis thaliana
aaacgatggtcggatct

SEQ ID NO: 2441 - DNA, 17 bp, Arabidopsis thaliana
aaacgattaggtcccga

SEQ ID NO: 2442 - DNA, 17 bp, Arabidopsis thaliana
aaacgattctcagcatt

SEQ ID NO: 2443 - DNA, 17 bp, Arabidopsis thaliana
aaacgattctcttacct

SEQ ID NO: 2444 - DNA, 17 bp, Arabidopsis thaliana
aaacgattgcgtccagt

SEQ ID NO: 2445 - DNA, 17 bp, Arabidopsis thaliana
aaacgattggcattttt

SEQ ID NO: 2446 - DNA, 17 bp, Arabidopsis thaliana
aaacgattgttttgcac

SEQ ID NO: 2447 - DNA, 17 bp, Arabidopsis thaliana
aaacgatttccaaatta

SEQ ID NO: 2448 - DNA, 17 bp, Arabidopsis thaliana
aaacgatttctctacca

SEQ ID NO: 2449 - DNA, 17 bp, Arabidopsis thaliana
aaacgattttgtcggtt

SEQ ID NO: 2450 - DNA, 17 bp, Arabidopsis thaliana
aaacgcaacaaaagcct

SEQ ID NO: 2451 - DNA, 17 bp, Arabidopsis thaliana
aaacgcaacaggtgcgg

SEQ ID NO: 2452 - DNA, 17 bp, Arabidopsis thaliana
aaacgcaacataccgac

SEQ ID NO: 2453 - DNA, 17 bp, Arabidopsis thaliana
aaacgcaaccgactcat

SEQ ID NO: 2454 - DNA, 17 bp, Arabidopsis thaliana
aaacgcaaccgtttgga

SEQ ID NO: 2455 - DNA, 17 bp, Arabidopsis thaliana
aaacgcaactgtttgga

SEQ ID NO: 2456 - DNA, 17 bp, Arabidopsis thaliana
aaacgcaagccagagag

SEQ ID NO: 2457 - DNA, 17 bp, Arabidopsis thaliana
aaacgcaatcgtttgga

SEQ ID NO: 2458 - DNA, 17 bp, Arabidopsis thaliana
aaacgcaatgtgatttc

SEQ ID NO: 2459 - DNA, 17 bp, Arabidopsis thaliana
aaacgcaattaccatct

SEQ ID NO: 2460 - DNA, 17 bp, Arabidopsis thaliana
aaacgcactacgggaag

SEQ ID NO: 2461 - DNA, 17 bp, Arabidopsis thaliana
aaacgcagatttgtggt

SEQ ID NO: 2462 - DNA, 17 bp, Arabidopsis thaliana
aaacgcagcgggtgcga

SEQ ID NO: 2463 - DNA, 17 bp, Arabidopsis thaliana
aaacgcagcgggtgcgg

SEQ ID NO: 2464 - DNA, 17 bp, Arabidopsis thaliana
aaacgcagcgtttgcag

SEQ ID NO: 2465 - DNA, 17 bp, Arabidopsis thaliana
aaacgcagcgtttgcga

SEQ ID NO: 2466 - DNA, 17 bp, Arabidopsis thaliana
aaacgcagcgtttgcgg

SEQ ID NO: 2467 - DNA, 17 bp, Arabidopsis thaliana
aaacgcagtgggtgcgg

SEQ ID NO: 2468 - DNA, 17 bp, Arabidopsis thaliana
aaacgcatcctgtagat

SEQ ID NO: 2469 - DNA, 17 bp, Arabidopsis thaliana
aaacgcattccaaaact

SEQ ID NO: 2470 - DNA, 17 bp, Arabidopsis thaliana
aaacgccacagctgctt

SEQ ID NO: 2471 - DNA, 17 bp, Arabidopsis thaliana
aaacgccacttaccggg

SEQ ID NO: 2472 - DNA, 17 bp, Arabidopsis thaliana
aaacgcccaggcctaat

SEQ ID NO: 2473 - DNA, 17 bp, Arabidopsis thaliana
aaacgccgagatcttcc

SEQ ID NO: 2474 - DNA, 17 bp, Arabidopsis thaliana
aaacgccgtcggatttg

SEQ ID NO: 2475 - DNA, 17 bp, Arabidopsis thaliana
aaacgccgttgagtcgc

SEQ ID NO: 2476 - DNA, 17 bp, Arabidopsis thaliana
aaacgcctaagtagtgt

SEQ ID NO: 2477 - DNA, 17 bp, Arabidopsis thaliana
aaacgcctagggtgcta

SEQ ID NO: 2478 - DNA, 17 bp, Arabidopsis thaliana
aaacgcctatttccgag

SEQ ID NO: 2479 - DNA, 17 bp, Arabidopsis thaliana
aaacgcctcgtgctctc

SEQ ID NO: 2480 - DNA, 17 bp, Arabidopsis thaliana
aaacgcctgcgtaccat

SEQ ID NO: 2481 - DNA, 17 bp, Arabidopsis thaliana
aaacgccttctgagcga

SEQ ID NO: 2482 - DNA, 17 bp, Arabidopsis thaliana
aaacgcgaattgtatca

SEQ ID NO: 2483 - DNA, 17 bp, Arabidopsis thaliana
aaacgcgattttgtggt

SEQ ID NO: 2484 - DNA, 17 bp, Arabidopsis thaliana
aaacgcggatatgtggt

SEQ ID NO: 2485 - DNA, 17 bp, Arabidopsis thaliana
aaacgcggattgtgtct

SEQ ID NO: 2486 - DNA, 17 bp, Arabidopsis thaliana
aaacgcggatttgtgct

SEQ ID NO: 2487 - DNA, 17 bp, Arabidopsis thaliana
aaacgcggatttgtggt

SEQ ID NO: 2488 - DNA, 17 bp, Arabidopsis thaliana
aaacgcggcggctgcag

SEQ ID NO: 2489 - DNA, 17 bp, Arabidopsis thaliana
aaacgcggcggctgcgg

SEQ ID NO: 2490 - DNA, 17 bp, Arabidopsis thaliana
aaacgcggtccaaatct

SEQ ID NO: 2491 - DNA, 17 bp, Arabidopsis thaliana
aaacgcgtctttgttgc

SEQ ID NO: 2492 - DNA, 17 bp, Arabidopsis thaliana
aaacgcgtttctgtgac

SEQ ID NO: 2493 - DNA, 17 bp, Arabidopsis thaliana
aaacgctacgtctcggg

SEQ ID NO: 2494 - DNA, 17 bp, Arabidopsis thaliana
aaacgctactgagaatt

SEQ ID NO: 2495 - DNA, 17 bp, Arabidopsis thaliana
aaacgctcaaccagtcg

SEQ ID NO: 2496 - DNA, 17 bp, Arabidopsis thaliana
aaacgctcaagcggtaa

SEQ ID NO: 2497 - DNA, 17 bp, Arabidopsis thaliana
aaacgctcaagtttggc

SEQ ID NO: 2498 - DNA, 17 bp, Arabidopsis thaliana
aaacgctcacgcccggt

SEQ ID NO: 2499 - DNA, 17 bp, Arabidopsis thaliana
aaacgctccactgctcg

SEQ ID NO: 2500 - DNA, 17 bp, Arabidopsis thaliana
aaacgctccgtctcggg

SEQ ID NO: 2501 - DNA, 17 bp, Arabidopsis thaliana
aaacgctcggaattgct

SEQ ID NO: 2502 - DNA, 17 bp, Arabidopsis thaliana
aaacgctcggattttca

SEQ ID NO: 2503 - DNA, 17 bp, Arabidopsis thaliana
aaacgctcggattttga

SEQ ID NO: 2504 - DNA, 17 bp, Arabidopsis thaliana
aaacgctcttgctcatc

SEQ ID NO: 2505 - DNA, 17 bp, Arabidopsis thaliana
aaacgctgactctgttt

SEQ ID NO: 2506 - DNA, 17 bp, Arabidopsis thaliana
aaacgctgagaagttgc

SEQ ID NO: 2507 - DNA, 17 bp, Arabidopsis thaliana
aaacgctgatggagatt

SEQ ID NO: 2508 - DNA, 17 bp, Arabidopsis thaliana
aaacgctgcatttgcgg

SEQ ID NO: 2509 - DNA, 17 bp, Arabidopsis thaliana
aaacgctgcgtttgcgg

SEQ ID NO: 2510 - DNA, 17 bp, Arabidopsis thaliana
aaacgctggccattcgg

SEQ ID NO: 2511 - DNA, 17 bp, Arabidopsis thaliana
aaacgctggcttactga

SEQ ID NO: 2512 - DNA, 17 bp, Arabidopsis thaliana
aaacgctgggacaacaa

SEQ ID NO: 2513 - DNA, 17 bp, Arabidopsis thaliana
aaacgcttcatgtcacc

SEQ ID NO: 2514 - DNA, 17 bp, Arabidopsis thaliana
aaacgcttctgccttgg

SEQ ID NO: 2515 - DNA, 17 bp, Arabidopsis thaliana
aaacgcttgcgggaagg

SEQ ID NO: 2516 - DNA, 17 bp, Arabidopsis thaliana
aaacgcttgtttccgac

SEQ ID NO: 2517 - DNA, 17 bp, Arabidopsis thaliana
aaacgctttctgattcg

SEQ ID NO: 2518 - DNA, 17 bp, Arabidopsis thaliana
aaacgcttttgtctctc

SEQ ID NO: 2519 - DNA, 17 bp, Arabidopsis thaliana
aaacggaatgatatgag

SEQ ID NO: 2520 - DNA, 17 bp, Arabidopsis thaliana
aaacggacatttctctt

SEQ ID NO: 2521 - DNA, 17 bp, Arabidopsis thaliana
aaacggaccaacccgtc

SEQ ID NO: 2522 - DNA, 17 bp, Arabidopsis thaliana
aaacggaccattcccgc

SEQ ID NO: 2523 - DNA, 17 bp, Arabidopsis thaliana
aaacggacggtgccgac

SEQ ID NO: 2524 - DNA, 17 bp, Arabidopsis thaliana
aaacggacggtgccgat

SEQ ID NO: 2525 - DNA, 17 bp, Arabidopsis thaliana
aaacggacggttgcggt

SEQ ID NO: 2526 - DNA, 17 bp, Arabidopsis thaliana
aaacggacgttgactgc

SEQ ID NO: 2527 - DNA, 17 bp, Arabidopsis thaliana
aaacggagaggcggagg

SEQ ID NO: 2528 - DNA, 17 bp, Arabidopsis thaliana
aaacggagcttctggaa

SEQ ID NO: 2529 - DNA, 17 bp, Arabidopsis thaliana
aaacggagttatctagt

SEQ ID NO: 2530 - DNA, 17 bp, Arabidopsis thaliana
aaacggatcccgaatat

SEQ ID NO: 2531 - DNA, 17 bp, Arabidopsis thaliana
aaacggatttgaagaag

SEQ ID NO: 2532 - DNA, 17 bp, Arabidopsis thaliana
aaacggatttgtccgcc

SEQ ID NO: 2533 - DNA, 17 bp, Arabidopsis thaliana
aaacggcacgcaggcct

SEQ ID NO: 2534 - DNA, 17 bp, Arabidopsis thaliana
aaacggcatagtgtgct

SEQ ID NO: 2535 - DNA, 17 bp, Arabidopsis thaliana
aaacggccaatcccttg

SEQ ID NO: 2536 - DNA, 17 bp, Arabidopsis thaliana
aaacggccacatacgaa

SEQ ID NO: 2537 - DNA, 17 bp, Arabidopsis thaliana
aaacggccgcatacgaa

SEQ ID NO: 2538 - DNA, 17 bp, Arabidopsis thaliana
aaacggcgaagtatgag

SEQ ID NO: 2539 - DNA, 17 bp, Arabidopsis thaliana
aaacggcgaatgtgttg

SEQ ID NO: 2540 - DNA, 17 bp, Arabidopsis thaliana
aaacggcgattattccg

SEQ ID NO: 2541 - DNA, 17 bp, Arabidopsis thaliana
aaacggcgggagtaact

SEQ ID NO: 2542 - DNA, 17 bp, Arabidopsis thaliana
aaacggcgtcgcaggag

SEQ ID NO: 2543 - DNA, 17 bp, Arabidopsis thaliana
aaacggctattgtgctc

SEQ ID NO: 2544 - DNA, 17 bp, Arabidopsis thaliana
aaacggctatttcacga

SEQ ID NO: 2545 - DNA, 17 bp, Arabidopsis thaliana
aaacggctcagaatgag

SEQ ID NO: 2546 - DNA, 17 bp, Arabidopsis thaliana
aaacggctgctaatacc

SEQ ID NO: 2547 - DNA, 17 bp, Arabidopsis thaliana
aaacggctgtttccgat

SEQ ID NO: 2548 - DNA, 17 bp, Arabidopsis thaliana
aaacgggaagtcctcgt

SEQ ID NO: 2549 - DNA, 17 bp, Arabidopsis thaliana
aaacgggacaaactagt

SEQ ID NO: 2550 - DNA, 17 bp, Arabidopsis thaliana
aaacgggacacgcaccg

SEQ ID NO: 2551 - DNA, 17 bp, Arabidopsis thaliana
aaacgggacgggtttga

SEQ ID NO: 2552 - DNA, 17 bp, Arabidopsis thaliana
aaacgggaggagatttc

SEQ ID NO: 2553 - DNA, 17 bp, Arabidopsis thaliana
aaacgggatgtcgtttc

SEQ ID NO: 2554 - DNA, 17 bp, Arabidopsis thaliana
aaacgggattccaatgt

SEQ ID NO: 2555 - DNA, 17 bp, Arabidopsis thaliana
aaacgggcctagcccct

SEQ ID NO: 2556 - DNA, 17 bp, Arabidopsis thaliana
aaacgggccttagttat

SEQ ID NO: 2557 - DNA, 17 bp, Arabidopsis thaliana
aaacgggcgatcacggt

SEQ ID NO: 2558 - DNA, 17 bp, Arabidopsis thaliana
aaacggggacaagatct

SEQ ID NO: 2559 - DNA, 17 bp, Arabidopsis thaliana
aaacggggttgtgggag

SEQ ID NO: 2560 - DNA, 17 bp, Arabidopsis thaliana
aaacgggtcggcgtgcg

SEQ ID NO: 2561 - DNA, 17 bp, Arabidopsis thaliana
aaacgggtcgtgttatc

SEQ ID NO: 2562 - DNA, 17 bp, Arabidopsis thaliana
aaacgggtttgctttga

SEQ ID NO: 2563 - DNA, 17 bp, Arabidopsis thaliana
aaacgggtttggtttga

SEQ ID NO: 2564 - DNA, 17 bp, Arabidopsis thaliana
aaacggtataccggagg

SEQ ID NO: 2565 - DNA, 17 bp, Arabidopsis thaliana
aaacggtcattgtgtcg

SEQ ID NO: 2566 - DNA, 17 bp, Arabidopsis thaliana
aaacggtccaatgggaa

SEQ ID NO: 2567 - DNA, 17 bp, Arabidopsis thaliana
aaacggtccaatttggt

SEQ ID NO: 2568 - DNA, 17 bp, Arabidopsis thaliana
aaacggtccagattaaa

SEQ ID NO: 2569 - DNA, 17 bp, Arabidopsis thaliana
aaacggtccgcctttgg

SEQ ID NO: 2570 - DNA, 17 bp, Arabidopsis thaliana
aaacggtcgcctagacg

SEQ ID NO: 2571 - DNA, 17 bp, Arabidopsis thaliana
aaacggtctaatccatg

SEQ ID NO: 2572 - DNA, 17 bp, Arabidopsis thaliana
aaacggtctgatccatt

SEQ ID NO: 2573 - DNA, 17 bp, Arabidopsis thaliana
aaacggtctttgactat

SEQ ID NO: 2574 - DNA, 17 bp, Arabidopsis thaliana
aaacggtgagagcaaat

SEQ ID NO: 2575 - DNA, 17 bp, Arabidopsis thaliana
aaacggtgcaacgacgg

SEQ ID NO: 2576 - DNA, 17 bp, Arabidopsis thaliana
aaacggttacggttaaa

SEQ ID NO: 2577 - DNA, 17 bp, Arabidopsis thaliana
aaacggttcgtttcgtg

SEQ ID NO: 2578 - DNA, 17 bp, Arabidopsis thaliana
aaacggttcttgaatgg

SEQ ID NO: 2579 - DNA, 17 bp, Arabidopsis thaliana
aaacggtttaccgatcc

SEQ ID NO: 2580 - DNA, 17 bp, Arabidopsis thaliana
aaacggtttgcagatgg

SEQ ID NO: 2581 - DNA, 17 bp, Arabidopsis thaliana
aaacggtttgccacttt

SEQ ID NO: 2582 - DNA, 17 bp, Arabidopsis thaliana
aaacggttttgtgcgct

SEQ ID NO: 2583 - DNA, 17 bp, Arabidopsis thaliana
aaacgtaaacccgtgat

SEQ ID NO: 2584 - DNA, 17 bp, Arabidopsis thaliana
aaacgtaaggccatctt

SEQ ID NO: 2585 - DNA, 17 bp, Arabidopsis thaliana
aaacgtaccaggaagga

SEQ ID NO: 2586 - DNA, 17 bp, Arabidopsis thaliana
aaacgtacctgcacttg

SEQ ID NO: 2587 - DNA, 17 bp, Arabidopsis thaliana
aaacgtagcgggtgcgg

SEQ ID NO: 2588 - DNA, 17 bp, Arabidopsis thaliana
aaacgtaggacgtgtcg

SEQ ID NO: 2589 - DNA, 17 bp, Arabidopsis thaliana
aaacgtatgattccacc

SEQ ID NO: 2590 - DNA, 17 bp, Arabidopsis thaliana
aaacgtcactagaaccg

SEQ ID NO: 2591 - DNA, 17 bp, Arabidopsis thaliana
aaacgtcactcgaaccg

SEQ ID NO: 2592 - DNA, 17 bp, Arabidopsis thaliana
aaacgtcactcgaatcg

SEQ ID NO: 2593 - DNA, 17 bp, Arabidopsis thaliana
aaacgtcattcgaaccg

SEQ ID NO: 2594 - DNA, 17 bp, Arabidopsis thaliana
aaacgtcattcgaatcg

SEQ ID NO: 2595 - DNA, 17 bp, Arabidopsis thaliana
aaacgtccaaagccgct

SEQ ID NO: 2596 - DNA, 17 bp, Arabidopsis thaliana
aaacgtcgcaagctagg

SEQ ID NO: 2597 - DNA, 17 bp, Arabidopsis thaliana
aaacgtcgcggtgtttt

SEQ ID NO: 2598 - DNA, 17 bp, Arabidopsis thaliana
aaacgtctgagttgctg

SEQ ID NO: 2599 - DNA, 17 bp, Arabidopsis thaliana
aaacgtctgcctgggtg

SEQ ID NO: 2600 - DNA, 17 bp, Arabidopsis thaliana
aaacgtctgttaggtac

SEQ ID NO: 2601 - DNA, 17 bp, Arabidopsis thaliana
aaacgtgattttacggt

SEQ ID NO: 2602 - DNA, 17 bp, Arabidopsis thaliana
aaacgtgatttttgcgg

SEQ ID NO: 2603 - DNA, 17 bp, Arabidopsis thaliana
aaacgtgcagggactaa

SEQ ID NO: 2604 - DNA, 17 bp, Arabidopsis thaliana
aaacgtgcgactgtgtt

SEQ ID NO: 2605 - DNA, 17 bp, Arabidopsis thaliana
aaacgtgcgggtattgg

SEQ ID NO: 2606 - DNA, 17 bp, Arabidopsis thaliana
aaacgtgctgacctaac

SEQ ID NO: 2607 - DNA, 17 bp, Arabidopsis thaliana
aaacgtgcttgggatag

SEQ ID NO: 2608 - DNA, 17 bp, Arabidopsis thaliana
aaacgtggcctaacagt

SEQ ID NO: 2609 - DNA, 17 bp, Arabidopsis thaliana
aaacgtggtctcttctc

SEQ ID NO: 2610 - DNA, 17 bp, Arabidopsis thaliana
aaacgtgtcacaatccc

SEQ ID NO: 2611 - DNA, 17 bp, Arabidopsis thaliana
aaacgttaacaattgcg

SEQ ID NO: 2612 - DNA, 17 bp, Arabidopsis thaliana
aaacgttaacacgatct

SEQ ID NO: 2613 - DNA, 17 bp, Arabidopsis thaliana
aaacgttacaacgtgcg

SEQ ID NO: 2614 - DNA, 17 bp, Arabidopsis thaliana
aaacgttactgtcccca

SEQ ID NO: 2615 - DNA, 17 bp, Arabidopsis thaliana
aaacgttagaccgacac

SEQ ID NO: 2616 - DNA, 17 bp, Arabidopsis thaliana
aaacgttatgcggtttg

SEQ ID NO: 2617 - DNA, 17 bp, Arabidopsis thaliana
aaacgttattcgaaccg

SEQ ID NO: 2618 - DNA, 17 bp, Arabidopsis thaliana
aaacgttattttccgcc

SEQ ID NO: 2619 - DNA, 17 bp, Arabidopsis thaliana
aaacgttcatctacctc

SEQ ID NO: 2620 - DNA, 17 bp, Arabidopsis thaliana
aaacgttccaagtgcat

SEQ ID NO: 2621 - DNA, 17 bp, Arabidopsis thaliana
aaacgttctcgcagttg

SEQ ID NO: 2622 - DNA, 17 bp, Arabidopsis thaliana
aaacgttctgccaaacc

SEQ ID NO: 2623 - DNA, 17 bp, Arabidopsis thaliana
aaacgttcttacctgac

SEQ ID NO: 2624 - DNA, 17 bp, Arabidopsis thaliana
aaacgttgacccgccat

SEQ ID NO: 2625 - DNA, 17 bp, Arabidopsis thaliana
aaacgttgacccgcctt

SEQ ID NO: 2626 - DNA, 17 bp, Arabidopsis thaliana
aaacgttgcaacgtgcg

SEQ ID NO: 2627 - DNA, 17 bp, Arabidopsis thaliana
aaacgttggaccggctc

SEQ ID NO: 2628 - DNA, 17 bp, Arabidopsis thaliana
aaacgttgtctaaagac

SEQ ID NO: 2629 - DNA, 17 bp, Arabidopsis thaliana
aaacgtttaacacgatc

SEQ ID NO: 2630 - DNA, 17 bp, Arabidopsis thaliana
aaacgtttaggataata

SEQ ID NO: 2631 - DNA, 17 bp, Arabidopsis thaliana
aaacgtttatggccacg

SEQ ID NO: 2632 - DNA, 17 bp, Arabidopsis thaliana
aaacgtttcccggctgg

SEQ ID NO: 2633 - DNA, 17 bp, Arabidopsis thaliana
aaacgtttctgaccctc

SEQ ID NO: 2634 - DNA, 17 bp, Arabidopsis thaliana
aaacgtttgctcaagtc

SEQ ID NO: 2635 - DNA, 17 bp, Arabidopsis thaliana
aaacgtttgttctgatg

SEQ ID NO: 2636 - DNA, 17 bp, Arabidopsis thaliana
aaacgtttttcgcggtg

SEQ ID NO: 2637 - DNA, 17 bp, Arabidopsis thaliana
aaactaaaaccatctct

SEQ ID NO: 2638 - DNA, 17 bp, Arabidopsis thaliana
aaactaaaaccgtagta

SEQ ID NO: 2639 - DNA, 17 bp, Arabidopsis thaliana
aaactaaaaccgtagtg

SEQ ID NO: 2640 - DNA, 17 bp, Arabidopsis thaliana
aaactaaacatcttctc

SEQ ID NO: 2641 - DNA, 17 bp, Arabidopsis thaliana
aaactaaaccagtgggt

SEQ ID NO: 2642 - DNA, 17 bp, Arabidopsis thaliana
aaactaaaccagtttag

SEQ ID NO: 2643 - DNA, 17 bp, Arabidopsis thaliana
aaactaaactgattgaa

SEQ ID NO: 2644 - DNA, 17 bp, Arabidopsis thaliana
aaactaaattaaacgag

SEQ ID NO: 2645 - DNA, 17 bp, Arabidopsis thaliana
aaactaacagcgtttga

SEQ ID NO: 2646 - DNA, 17 bp, Arabidopsis thaliana
aaactaaccatgggcgt

SEQ ID NO: 2647 - DNA, 17 bp, Arabidopsis thaliana
aaactaaccgcctaacg

SEQ ID NO: 2648 - DNA, 17 bp, Arabidopsis thaliana
aaactaaccgcgcctag

SEQ ID NO: 2649 - DNA, 17 bp, Arabidopsis thaliana
aaactaaccgcgcctat

SEQ ID NO: 2650 - DNA, 17 bp, Arabidopsis thaliana
aaactaaccttgagtca

SEQ ID NO: 2651 - DNA, 17 bp, Arabidopsis thaliana
aaactaactatgagcta

SEQ ID NO: 2652 - DNA, 17 bp, Arabidopsis thaliana
aaactaactgcggattg

SEQ ID NO: 2653 - DNA, 17 bp, Arabidopsis thaliana
aaactaactgctccagc

SEQ ID NO: 2654 - DNA, 17 bp, Arabidopsis thaliana
aaactaactgctgtggg

SEQ ID NO: 2655 - DNA, 17 bp, Arabidopsis thaliana
aaactaagaatggcatg

SEQ ID NO: 2656 - DNA, 17 bp, Arabidopsis thaliana
aaactaagataaggatt

SEQ ID NO: 2657 - DNA, 17 bp, Arabidopsis thaliana
aaactaagccgacgatt

SEQ ID NO: 2658 - DNA, 17 bp, Arabidopsis thaliana
aaactaaggctctgaat

SEQ ID NO: 2659 - DNA, 17 bp, Arabidopsis thaliana
aaactaagtccgcagcg

SEQ ID NO: 2660 - DNA, 17 bp, Arabidopsis thaliana
aaactaagtccgcatcg

SEQ ID NO: 2661 - DNA, 17 bp, Arabidopsis thaliana
aaactaagtccgcatta

SEQ ID NO: 2662 - DNA, 17 bp, Arabidopsis thaliana
aaactaagtccgcattg

SEQ ID NO: 2663 - DNA, 17 bp, Arabidopsis thaliana
aaactaagtctgtagca

SEQ ID NO: 2664 - DNA, 17 bp, Arabidopsis thaliana
aaactaagtctttagca

SEQ ID NO: 2665 - DNA, 17 bp, Arabidopsis thaliana
aaactaagtgtgcagtg

SEQ ID NO: 2666 - DNA, 17 bp, Arabidopsis thaliana
aaactaagttggatacc

SEQ ID NO: 2667 - DNA, 17 bp, Arabidopsis thaliana
aaactaagtttgcagcg

SEQ ID NO: 2668 - DNA, 17 bp, Arabidopsis thaliana
aaactaatacacgttca

SEQ ID NO: 2669 - DNA, 17 bp, Arabidopsis thaliana
aaactaatatcgttggt

SEQ ID NO: 2670 - DNA, 17 bp, Arabidopsis thaliana
aaactaatctcacgctt

SEQ ID NO: 2671 - DNA, 17 bp, Arabidopsis thaliana
aaactaatctctctccg

SEQ ID NO: 2672 - DNA, 17 bp, Arabidopsis thaliana
aaactaattctgcggtc

SEQ ID NO: 2673 - DNA, 17 bp, Arabidopsis thaliana
aaactaatttatccctg

SEQ ID NO: 2674 - DNA, 17 bp, Arabidopsis thaliana
aaactacaaatcggtgc

SEQ ID NO: 2675 - DNA, 17 bp, Arabidopsis thaliana
aaactacaatctaccac

SEQ ID NO: 2676 - DNA, 17 bp, Arabidopsis thaliana
aaactacaatctgccac

SEQ ID NO: 2677 - DNA, 17 bp, Arabidopsis thaliana
aaactacaatgcgatgt

SEQ ID NO: 2678 - DNA, 17 bp, Arabidopsis thaliana
aaactacaattgggttg

SEQ ID NO: 2679 - DNA, 17 bp, Arabidopsis thaliana
aaactacaattgggttt

SEQ ID NO: 2680 - DNA, 17 bp, Arabidopsis thaliana
aaactacactcggacac

SEQ ID NO: 2681 - DNA, 17 bp, Arabidopsis thaliana
aaactacatcttggttg

SEQ ID NO: 2682 - DNA, 17 bp, Arabidopsis thaliana
aaactacatgggggtac

SEQ ID NO: 2683 - DNA, 17 bp, Arabidopsis thaliana
aaactacattccaattt

SEQ ID NO: 2684 - DNA, 17 bp, Arabidopsis thaliana
aaactaccaatgcagac

SEQ ID NO: 2685 - DNA, 17 bp, Arabidopsis thaliana
aaactaccaggccgaag

SEQ ID NO: 2686 - DNA, 17 bp, Arabidopsis thaliana
aaactaccctcacaatg

SEQ ID NO: 2687 - DNA, 17 bp, Arabidopsis thaliana
aaactacgattctacga

SEQ ID NO: 2688 - DNA, 17 bp, Arabidopsis thaliana
aaactacgcttgatgtg

SEQ ID NO: 2689 - DNA, 17 bp, Arabidopsis thaliana
aaactacgggtcaggtt

SEQ ID NO: 2690 - DNA, 17 bp, Arabidopsis thaliana
aaactactcacagtttc

SEQ ID NO: 2691 - DNA, 17 bp, Arabidopsis thaliana
aaactactcagacctga

SEQ ID NO: 2692 - DNA, 17 bp, Arabidopsis thaliana
aaactactccagcccaa

SEQ ID NO: 2693 - DNA, 17 bp, Arabidopsis thaliana
aaactactcgaactcat

SEQ ID NO: 2694 - DNA, 17 bp, Arabidopsis thaliana
aaactactcgtgttgtt

SEQ ID NO: 2695 - DNA, 17 bp, Arabidopsis thaliana
aaactactgctggagtt

SEQ ID NO: 2696 - DNA, 17 bp, Arabidopsis thaliana
aaactactgtgaattgc

SEQ ID NO: 2697 - DNA, 17 bp, Arabidopsis thaliana
aaactactgtttgggga

SEQ ID NO: 2698 - DNA, 17 bp, Arabidopsis thaliana
aaactacttgaactttt

SEQ ID NO: 2699 - DNA, 17 bp, Arabidopsis thaliana
aaactacttgtggctgc

SEQ ID NO: 2700 - DNA, 17 bp, Arabidopsis thaliana
aaactactttgtccgct

SEQ ID NO: 2701 - DNA, 17 bp, Arabidopsis thaliana
aaactacttttcttggc

SEQ ID NO: 2702 - DNA, 17 bp, Arabidopsis thaliana
aaactagaaacgtgtct

SEQ ID NO: 2703 - DNA, 17 bp, Arabidopsis thaliana
aaactagaccatggtca

SEQ ID NO: 2704 - DNA, 17 bp, Arabidopsis thaliana
aaactagagaaactttg

SEQ ID NO: 2705 - DNA, 17 bp, Arabidopsis thaliana
aaactagaggaagcctt

SEQ ID NO: 2706 - DNA, 17 bp, Arabidopsis thaliana
aaactagagggcggcgg

SEQ ID NO: 2707 - DNA, 17 bp, Arabidopsis thaliana
aaactagatgttgtgag

SEQ ID NO: 2708 - DNA, 17 bp, Arabidopsis thaliana
aaactagattcagctga

SEQ ID NO: 2709 - DNA, 17 bp, Arabidopsis thaliana
aaactagattttagccc

SEQ ID NO: 2710 - DNA, 17 bp, Arabidopsis thaliana
aaactagattttatccc

SEQ ID NO: 2711 - DNA, 17 bp, Arabidopsis thaliana
aaactagccatgctgtt

SEQ ID NO: 2712 - DNA, 17 bp, Arabidopsis thaliana
aaactagccccgggcat

SEQ ID NO: 2713 - DNA, 17 bp, Arabidopsis thaliana
aaactagcttactgcgc

SEQ ID NO: 2714 - DNA, 17 bp, Arabidopsis thaliana
aaactaggattcctgcc

SEQ ID NO: 2715 - DNA, 17 bp, Arabidopsis thaliana
aaactaggcttgggcgt

SEQ ID NO: 2716 - DNA, 17 bp, Arabidopsis thaliana
aaactaggtaacttctc

SEQ ID NO: 2717 - DNA, 17 bp, Arabidopsis thaliana
aaactaggtgccgaact

SEQ ID NO: 2718 - DNA, 17 bp, Arabidopsis thaliana
aaactaggttaaatgtc

SEQ ID NO: 2719 - DNA, 17 bp, Arabidopsis thaliana
aaactaggttcacggcg

SEQ ID NO: 2720 - DNA, 17 bp, Arabidopsis thaliana
aaactaggttggcttat

SEQ ID NO: 2721 - DNA, 17 bp, Arabidopsis thaliana
aaactagtcccattggt

SEQ ID NO: 2722 - DNA, 17 bp, Arabidopsis thaliana
aaactagttcaaaattc

SEQ ID NO: 2723 - DNA, 17 bp, Arabidopsis thaliana
aaactagtttgtccgct

SEQ ID NO: 2724 - DNA, 17 bp, Arabidopsis thaliana
aaactataaccgaaaat

SEQ ID NO: 2725 - DNA, 17 bp, Arabidopsis thaliana
aaactatacttggctcg

SEQ ID NO: 2726 - DNA, 17 bp, Arabidopsis thaliana
aaactatagcggtgaac

SEQ ID NO: 2727 - DNA, 17 bp, Arabidopsis thaliana
aaactatagctcaacgt

SEQ ID NO: 2728 - DNA, 17 bp, Arabidopsis thaliana
aaactatccttgcaagt

SEQ ID NO: 2729 - DNA, 17 bp, Arabidopsis thaliana
aaactatcgagacatca

SEQ ID NO: 2730 - DNA, 17 bp, Arabidopsis thaliana
aaactatcgtggagctg

SEQ ID NO: 2731 - DNA, 17 bp, Arabidopsis thaliana
aaactatctcacgatga

SEQ ID NO: 2732 - DNA, 17 bp, Arabidopsis thaliana
aaactatcttcctgacg

SEQ ID NO: 2733 - DNA, 17 bp, Arabidopsis thaliana
aaactatcttcggccgt

SEQ ID NO: 2734 - DNA, 17 bp, Arabidopsis thaliana
aaactatgacccgttgc

SEQ ID NO: 2735 - DNA, 17 bp, Arabidopsis thaliana
aaactatgatgatggtg

SEQ ID NO: 2736 - DNA, 17 bp, Arabidopsis thaliana
aaactatgctttttcgt

SEQ ID NO: 2737 - DNA, 17 bp, Arabidopsis thaliana
aaactatggatacaagg

SEQ ID NO: 2738 - DNA, 17 bp, Arabidopsis thaliana
aaactatggcgcgtttg

SEQ ID NO: 2739 - DNA, 17 bp, Arabidopsis thaliana
aaactatggctaaaatc

SEQ ID NO: 2740 - DNA, 17 bp, Arabidopsis thaliana
aaactatggctcaacgt

SEQ ID NO: 2741 - DNA, 17 bp, Arabidopsis thaliana
aaactatggctcaatgt

SEQ ID NO: 2742 - DNA, 17 bp, Arabidopsis thaliana
aaactatggctccgaat

SEQ ID NO: 2743 - DNA, 17 bp, Arabidopsis thaliana
aaactatggcttgtgat

SEQ ID NO: 2744 - DNA, 17 bp, Arabidopsis thaliana
aaactatgggcctatcc

SEQ ID NO: 2745 - DNA, 17 bp, Arabidopsis thaliana
aaactatggtatagcgc

SEQ ID NO: 2746 - DNA, 17 bp, Arabidopsis thaliana
aaactatgtctaggtcc

SEQ ID NO: 2747 - DNA, 17 bp, Arabidopsis thaliana
aaactatgtctctttca

SEQ ID NO: 2748 - DNA, 17 bp, Arabidopsis thaliana
aaactattacgaacttt

SEQ ID NO: 2749 - DNA, 17 bp, Arabidopsis thaliana
aaactattagctcagtg

SEQ ID NO: 2750 - DNA, 17 bp, Arabidopsis thaliana
aaactattcaggttccg

SEQ ID NO: 2751 - DNA, 17 bp, Arabidopsis thaliana
aaactattctcatccaa

SEQ ID NO: 2752 - DNA, 17 bp, Arabidopsis thaliana
aaactattctgccgtga

SEQ ID NO: 2753 - DNA, 17 bp, Arabidopsis thaliana
aaactattgcgtttggt

SEQ ID NO: 2754 - DNA, 17 bp, Arabidopsis thaliana
aaactattggtcaacgt

SEQ ID NO: 2755 - DNA, 17 bp, Arabidopsis thaliana
aaactatttccatgttt

SEQ ID NO: 2756 - DNA, 17 bp, Arabidopsis thaliana
aaactatttccgtgttt

SEQ ID NO: 2757 - DNA, 17 bp, Arabidopsis thaliana
aaactatttcgattctc

SEQ ID NO: 2758 - DNA, 17 bp, Arabidopsis thaliana
aaactattttcctgggt

SEQ ID NO: 2759 - DNA, 17 bp, Arabidopsis thaliana
aaactatttttgagatt

SEQ ID NO: 2760 - DNA, 17 bp, Arabidopsis thaliana
aaactcaaaagtattca

SEQ ID NO: 2761 - DNA, 17 bp, Arabidopsis thaliana
aaactcaaacccgtctg

SEQ ID NO: 2762 - DNA, 17 bp, Arabidopsis thaliana
aaactcaaagcattttg

SEQ ID NO: 2763 - DNA, 17 bp, Arabidopsis thaliana
aaactcaaatacttcac

SEQ ID NO: 2764 - DNA, 17 bp, Arabidopsis thaliana
aaactcaacacctccat

SEQ ID NO: 2765 - DNA, 17 bp, Arabidopsis thaliana
aaactcaacgcttagat

SEQ ID NO: 2766 - DNA, 17 bp, Arabidopsis thaliana
aaactcaactaattctg

SEQ ID NO: 2767 - DNA, 17 bp, Arabidopsis thaliana
aaactcaatgtcgacta

SEQ ID NO: 2768 - DNA, 17 bp, Arabidopsis thaliana
aaactcactatttccga

SEQ ID NO: 2769 - DNA, 17 bp, Arabidopsis thaliana
aaactcactttgacgtc

SEQ ID NO: 2770 - DNA, 17 bp, Arabidopsis thaliana
aaactcagacgtggccg

SEQ ID NO: 2771 - DNA, 17 bp, Arabidopsis thaliana
aaactcaggacagacag

SEQ ID NO: 2772 - DNA, 17 bp, Arabidopsis thaliana
aaactcaggagagactc

SEQ ID NO: 2773 - DNA, 17 bp, Arabidopsis thaliana
aaactcaggagggatag

SEQ ID NO: 2774 - DNA, 17 bp, Arabidopsis thaliana
aaactcaggatggatag

SEQ ID NO: 2775 - DNA, 17 bp, Arabidopsis thaliana
aaactcaggcacctcac

SEQ ID NO: 2776 - DNA, 17 bp, Arabidopsis thaliana
aaactcaggcacttcac

SEQ ID NO: 2777 - DNA, 17 bp, Arabidopsis thaliana
aaactcagtgaagaagc

SEQ ID NO: 2778 - DNA, 17 bp, Arabidopsis thaliana
aaactcagtgccctcgt

SEQ ID NO: 2779 - DNA, 17 bp, Arabidopsis thaliana
aaactcagtgtcctcgt

SEQ ID NO: 2780 - DNA, 17 bp, Arabidopsis thaliana
aaactcatagccgacga

SEQ ID NO: 2781 - DNA, 17 bp, Arabidopsis thaliana
aaactcataggttgtat

SEQ ID NO: 2782 - DNA, 17 bp, Arabidopsis thaliana
aaactcatcatgggctt

SEQ ID NO: 2783 - DNA, 17 bp, Arabidopsis thaliana
aaactcatcgtcgaaga

SEQ ID NO: 2784 - DNA, 17 bp, Arabidopsis thaliana
aaactcatctccatcca

SEQ ID NO: 2785 - DNA, 17 bp, Arabidopsis thaliana
aaactcatgggcttgta

SEQ ID NO: 2786 - DNA, 17 bp, Arabidopsis thaliana
aaactccaaccttggtc

SEQ ID NO: 2787 - DNA, 17 bp, Arabidopsis thaliana
aaactccaagctatgac

SEQ ID NO: 2788 - DNA, 17 bp, Arabidopsis thaliana
aaactccaatctttctt

SEQ ID NO: 2789 - DNA, 17 bp, Arabidopsis thaliana
aaactccaggaaagctc

SEQ ID NO: 2790 - DNA, 17 bp, Arabidopsis thaliana
aaactccaggcctttac

SEQ ID NO: 2791 - DNA, 17 bp, Arabidopsis thaliana
aaactccattcgatatc

SEQ ID NO: 2792 - DNA, 17 bp, Arabidopsis thaliana
aaactcccgcaaacgca

SEQ ID NO: 2793 - DNA, 17 bp, Arabidopsis thaliana
aaactcccgcaaccgca

SEQ ID NO: 2794 - DNA, 17 bp, Arabidopsis thaliana
aaactcccggttggaga

SEQ ID NO: 2795 - DNA, 17 bp, Arabidopsis thaliana
aaactccctgagccagg

SEQ ID NO: 2796 - DNA, 17 bp, Arabidopsis thaliana
aaactccgaattctttt

SEQ ID NO: 2797 - DNA, 17 bp, Arabidopsis thaliana
aaactccggcgaagatg

SEQ ID NO: 2798 - DNA, 17 bp, Arabidopsis thaliana
aaactccggcgagacgt

SEQ ID NO: 2799 - DNA, 17 bp, Arabidopsis thaliana
aaactcctagcagatgg

SEQ ID NO: 2800 - DNA, 17 bp, Arabidopsis thaliana
aaactcctcccttccgc

SEQ ID NO: 2801 - DNA, 17 bp, Arabidopsis thaliana
aaactcctcggttgcgt

SEQ ID NO: 2802 - DNA, 17 bp, Arabidopsis thaliana
aaactcctcggttggcg

SEQ ID NO: 2803 - DNA, 17 bp, Arabidopsis thaliana
aaactcctggaactgac

SEQ ID NO: 2804 - DNA, 17 bp, Arabidopsis thaliana
aaactcctggcagacgc

SEQ ID NO: 2805 - DNA, 17 bp, Arabidopsis thaliana
aaactcctgggaccgta

SEQ ID NO: 2806 - DNA, 17 bp, Arabidopsis thaliana
aaactccttctgcatca

SEQ ID NO: 2807 - DNA, 17 bp, Arabidopsis thaliana
aaactcgaatacaacca

SEQ ID NO: 2808 - DNA, 17 bp, Arabidopsis thaliana
aaactcgaataccacca

SEQ ID NO: 2809 - DNA, 17 bp, Arabidopsis thaliana
aaactcgacatagattt

SEQ ID NO: 2810 - DNA, 17 bp, Arabidopsis thaliana
aaactcgacatggcaaa

SEQ ID NO: 2811 - DNA, 17 bp, Arabidopsis thaliana
aaactcgacattcagat

SEQ ID NO: 2812 - DNA, 17 bp, Arabidopsis thaliana
aaactcgaccccattcc

SEQ ID NO: 2813 - DNA, 17 bp, Arabidopsis thaliana
aaactcgacctgttggt

SEQ ID NO: 2814 - DNA, 17 bp, Arabidopsis thaliana
aaactcgacgcggtcca

SEQ ID NO: 2815 - DNA, 17 bp, Arabidopsis thaliana
aaactcgagacaaacaa

SEQ ID NO: 2816 - DNA, 17 bp, Arabidopsis thaliana
aaactcgagacagacag

SEQ ID NO: 2817 - DNA, 17 bp, Arabidopsis thaliana
aaactcgatcaaaatat

SEQ ID NO: 2818 - DNA, 17 bp, Arabidopsis thaliana
aaactcgatccaaaggt

SEQ ID NO: 2819 - DNA, 17 bp, Arabidopsis thaliana
aaactcgatcggactag

SEQ ID NO: 2820 - DNA, 17 bp, Arabidopsis thaliana
aaactcgatctttgacc

SEQ ID NO: 2821 - DNA, 17 bp, Arabidopsis thaliana
aaactcgatttagccgc

SEQ ID NO: 2822 - DNA, 17 bp, Arabidopsis thaliana
aaactcgcagtggcctc

SEQ ID NO: 2823 - DNA, 17 bp, Arabidopsis thaliana
aaactcgccccgctaac

SEQ ID NO: 2824 - DNA, 17 bp, Arabidopsis thaliana
aaactcgccccgctaag

SEQ ID NO: 2825 - DNA, 17 bp, Arabidopsis thaliana
aaactcgcggtgccacg

SEQ ID NO: 2826 - DNA, 17 bp, Arabidopsis thaliana
aaactcgctccgaggtg

SEQ ID NO: 2827 - DNA, 17 bp, Arabidopsis thaliana
aaactcgctctcgggtc

SEQ ID NO: 2828 - DNA, 17 bp, Arabidopsis thaliana
aaactcgctctgaggtg

SEQ ID NO: 2829 - DNA, 17 bp, Arabidopsis thaliana
aaactcgctgacctttt

SEQ ID NO: 2830 - DNA, 17 bp, Arabidopsis thaliana
aaactcgctgtgatttg

SEQ ID NO: 2831 - DNA, 17 bp, Arabidopsis thaliana
aaactcggaaatttgcg

SEQ ID NO: 2832 - DNA, 17 bp, Arabidopsis thaliana
aaactcggaactatctg

SEQ ID NO: 2833 - DNA, 17 bp, Arabidopsis thaliana
aaactcggaactatctt

SEQ ID NO: 2834 - DNA, 17 bp, Arabidopsis thaliana
aaactcggacattgcat

SEQ ID NO: 2835 - DNA, 17 bp, Arabidopsis thaliana
aaactcggacatttgca

SEQ ID NO: 2836 - DNA, 17 bp, Arabidopsis thaliana
aaactcggaccaatccg

SEQ ID NO: 2837 - DNA, 17 bp, Arabidopsis thaliana
aaactcggaccaggcag

SEQ ID NO: 2838 - DNA, 17 bp, Arabidopsis thaliana
aaactcggaccaggtaa

SEQ ID NO: 2839 - DNA, 17 bp, Arabidopsis thaliana
aaactcggaccaggtag

SEQ ID NO: 2840 - DNA, 17 bp, Arabidopsis thaliana
aaactcggagatttact

SEQ ID NO: 2841 - DNA, 17 bp, Arabidopsis thaliana
aaactcgggatgtccat

SEQ ID NO: 2842 - DNA, 17 bp, Arabidopsis thaliana
aaactcggtcagggtgg

SEQ ID NO: 2843 - DNA, 17 bp, Arabidopsis thaliana
aaactcggtccgaggtc

SEQ ID NO: 2844 - DNA, 17 bp, Arabidopsis thaliana
aaactcggtgacccagg

SEQ ID NO: 2845 - DNA, 17 bp, Arabidopsis thaliana
aaactcggtgcgctcgg

SEQ ID NO: 2846 - DNA, 17 bp, Arabidopsis thaliana
aaactcggtgtgtctgg

SEQ ID NO: 2847 - DNA, 17 bp, Arabidopsis thaliana
aaactcggttggtgctg

SEQ ID NO: 2848 - DNA, 17 bp, Arabidopsis thaliana
aaactcgtaatccctca

SEQ ID NO: 2849 - DNA, 17 bp, Arabidopsis thaliana
aaactcgtccatgcgtc

SEQ ID NO: 2850 - DNA, 17 bp, Arabidopsis thaliana
aaactcgtctaataggt

SEQ ID NO: 2851 - DNA, 17 bp, Arabidopsis thaliana
aaactcgtctatctcct

SEQ ID NO: 2852 - DNA, 17 bp, Arabidopsis thaliana
aaactcgtcttaccacc

SEQ ID NO: 2853 - DNA, 17 bp, Arabidopsis thaliana
aaactcgtggcttgctt

SEQ ID NO: 2854 - DNA, 17 bp, Arabidopsis thaliana
aaactcgtgggggttat

SEQ ID NO: 2855 - DNA, 17 bp, Arabidopsis thaliana
aaactcgtgttgcttga

SEQ ID NO: 2856 - DNA, 17 bp, Arabidopsis thaliana
aaactcgttagctacat

SEQ ID NO: 2857 - DNA, 17 bp, Arabidopsis thaliana
aaactctaacgattctg

SEQ ID NO: 2858 - DNA, 17 bp, Arabidopsis thaliana
aaactctaagagacgtt

SEQ ID NO: 2859 - DNA, 17 bp, Arabidopsis thaliana
aaactctactctggacg

SEQ ID NO: 2860 - DNA, 17 bp, Arabidopsis thaliana
aaactctactgcggtga

SEQ ID NO: 2861 - DNA, 17 bp, Arabidopsis thaliana
aaactctagaacttgga

SEQ ID NO: 2862 - DNA, 17 bp, Arabidopsis thaliana
aaactctatcgactgat

SEQ ID NO: 2863 - DNA, 17 bp, Arabidopsis thaliana
aaactctatcggctgag

SEQ ID NO: 2864 - DNA, 17 bp, Arabidopsis thaliana
aaactctatcggctgat

SEQ ID NO: 2865 - DNA, 17 bp, Arabidopsis thaliana
aaactctatcggttgat

SEQ ID NO: 2866 - DNA, 17 bp, Arabidopsis thaliana
aaactctatgcgggacc

SEQ ID NO: 2867 - DNA, 17 bp, Arabidopsis thaliana
aaactctattagctgat

SEQ ID NO: 2868 - DNA, 17 bp, Arabidopsis thaliana
aaactctattgttgcgt

SEQ ID NO: 2869 - DNA, 17 bp, Arabidopsis thaliana
aaactctatttgctgat

SEQ ID NO: 2870 - DNA, 17 bp, Arabidopsis thaliana
aaactctcatgtgctga

SEQ ID NO: 2871 - DNA, 17 bp, Arabidopsis thaliana
aaactctcgcaaacgca

SEQ ID NO: 2872 - DNA, 17 bp, Arabidopsis thaliana
aaactctcggtctaatt

SEQ ID NO: 2873 - DNA, 17 bp, Arabidopsis thaliana
aaactctcgtttcttct

SEQ ID NO: 2874 - DNA, 17 bp, Arabidopsis thaliana
aaactctctctaacttt

SEQ ID NO: 2875 - DNA, 17 bp, Arabidopsis thaliana
aaactctctgcgattgt

SEQ ID NO: 2876 - DNA, 17 bp, Arabidopsis thaliana
aaactctgaccacgtgg

SEQ ID NO: 2877 - DNA, 17 bp, Arabidopsis thaliana
aaactctgatcagtgtt

SEQ ID NO: 2878 - DNA, 17 bp, Arabidopsis thaliana
aaactctgcgatacacc

SEQ ID NO: 2879 - DNA, 17 bp, Arabidopsis thaliana
aaactctgggaagttgc

SEQ ID NO: 2880 - DNA, 17 bp, Arabidopsis thaliana
aaactctggtggaagcc

SEQ ID NO: 2881 - DNA, 17 bp, Arabidopsis thaliana
aaactctggttgtttag

SEQ ID NO: 2882 - DNA, 17 bp, Arabidopsis thaliana
aaactctgtagcgcagt

SEQ ID NO: 2883 - DNA, 17 bp, Arabidopsis thaliana
aaactctgtcaaattcc

SEQ ID NO: 2884 - DNA, 17 bp, Arabidopsis thaliana
aaactctgtgattgttt

SEQ ID NO: 2885 - DNA, 17 bp, Arabidopsis thaliana
aaactctgtggattctg

SEQ ID NO: 2886 - DNA, 17 bp, Arabidopsis thaliana
aaactcttaaccgatct

SEQ ID NO: 2887 - DNA, 17 bp, Arabidopsis thaliana
aaactcttaatcctcca

SEQ ID NO: 2888 - DNA, 17 bp, Arabidopsis thaliana
aaactcttatgatccgt

SEQ ID NO: 2889 - DNA, 17 bp, Arabidopsis thaliana
aaactcttcatccgaac

SEQ ID NO: 2890 - DNA, 17 bp, Arabidopsis thaliana
aaactcttcggctgatc

SEQ ID NO: 2891 - DNA, 17 bp, Arabidopsis thaliana
aaactcttggtgtatgc

SEQ ID NO: 2892 - DNA, 17 bp, Arabidopsis thaliana
aaactctttcggatcat

SEQ ID NO: 2893 - DNA, 17 bp, Arabidopsis thaliana
aaactctttcggctgat

SEQ ID NO: 2894 - DNA, 17 bp, Arabidopsis thaliana
aaactctttggattctg

SEQ ID NO: 2895 - DNA, 17 bp, Arabidopsis thaliana
aaactctttgttgtcag

SEQ ID NO: 2896 - DNA, 17 bp, Arabidopsis thaliana
aaactgaaaattttccg

SEQ ID NO: 2897 - DNA, 17 bp, Arabidopsis thaliana
aaactgaaaggtctttt

SEQ ID NO: 2898 - DNA, 17 bp, Arabidopsis thaliana
aaactgaaccgtaatca

SEQ ID NO: 2899 - DNA, 17 bp, Arabidopsis thaliana
aaactgaactgcttttt

SEQ ID NO: 2900 - DNA, 17 bp, Arabidopsis thaliana
aaactgaacttttcccg

SEQ ID NO: 2901 - DNA, 17 bp, Arabidopsis thaliana
aaactgaagaaccgttg

SEQ ID NO: 2902 - DNA, 17 bp, Arabidopsis thaliana
aaactgaagactcttat

SEQ ID NO: 2903 - DNA, 17 bp, Arabidopsis thaliana
aaactgaagcccttgag

SEQ ID NO: 2904 - DNA, 17 bp, Arabidopsis thaliana
aaactgaagcgcctctg

SEQ ID NO: 2905 - DNA, 17 bp, Arabidopsis thaliana
aaactgaagcgtctatc

SEQ ID NO: 2906 - DNA, 17 bp, Arabidopsis thaliana
aaactgaagtcggcccg

SEQ ID NO: 2907 - DNA, 17 bp, Arabidopsis thaliana
aaactgaatagaagatc

SEQ ID NO: 2908 - DNA, 17 bp, Arabidopsis thaliana
aaactgaattcagtggt

SEQ ID NO: 2909 - DNA, 17 bp, Arabidopsis thaliana
aaactgaattcgtcgag

SEQ ID NO: 2910 - DNA, 17 bp, Arabidopsis thaliana
aaactgacacatggctg

SEQ ID NO: 2911 - DNA, 17 bp, Arabidopsis thaliana
aaactgaccagaatcgt

SEQ ID NO: 2912 - DNA, 17 bp, Arabidopsis thaliana
aaactgaccatatcagc

SEQ ID NO: 2913 - DNA, 17 bp, Arabidopsis thaliana
aaactgaccatgttcta

SEQ ID NO: 2914 - DNA, 17 bp, Arabidopsis thaliana
aaactgacccaaaccca

SEQ ID NO: 2915 - DNA, 17 bp, Arabidopsis thaliana
aaactgacctagtttcc

SEQ ID NO: 2916 - DNA, 17 bp, Arabidopsis thaliana
aaactgactcagctaat

SEQ ID NO: 2917 - DNA, 17 bp, Arabidopsis thaliana
aaactgactgaggctcc

SEQ ID NO: 2918 - DNA, 17 bp, Arabidopsis thaliana
aaactgagaagctgctg

SEQ ID NO: 2919 - DNA, 17 bp, Arabidopsis thaliana
aaactgagacacttctt

SEQ ID NO: 2920 - DNA, 17 bp, Arabidopsis thaliana
aaactgagatgtagtct

SEQ ID NO: 2921 - DNA, 17 bp, Arabidopsis thaliana
aaactgagcctgcaaga

SEQ ID NO: 2922 - DNA, 17 bp, Arabidopsis thaliana
aaactgaggtaactgag

SEQ ID NO: 2923 - DNA, 17 bp, Arabidopsis thaliana
aaactgaggttgttgat

SEQ ID NO: 2924 - DNA, 17 bp, Arabidopsis thaliana
aaactgagtagaagagc

SEQ ID NO: 2925 - DNA, 17 bp, Arabidopsis thaliana
aaactgagtcgggtcaa

SEQ ID NO: 2926 - DNA, 17 bp, Arabidopsis thaliana
aaactgatacatctctc

SEQ ID NO: 2927 - DNA, 17 bp, Arabidopsis thaliana
aaactgatacgactcgg

SEQ ID NO: 2928 - DNA, 17 bp, Arabidopsis thaliana
aaactgatacgactttg

SEQ ID NO: 2929 - DNA, 17 bp, Arabidopsis thaliana
aaactgatcaattttcc

SEQ ID NO: 2930 - DNA, 17 bp, Arabidopsis thaliana
aaactgatcatctccat

SEQ ID NO: 2931 - DNA, 17 bp, Arabidopsis thaliana
aaactgatctagcagag

SEQ ID NO: 2932 - DNA, 17 bp, Arabidopsis thaliana
aaactgatctggactgc

SEQ ID NO: 2933 - DNA, 17 bp, Arabidopsis thaliana
aaactgatgattaggtg

SEQ ID NO: 2934 - DNA, 17 bp, Arabidopsis thaliana
aaactgattgaactttt

SEQ ID NO: 2935 - DNA, 17 bp, Arabidopsis thaliana
aaactgattgggtttcg

SEQ ID NO: 2936 - DNA, 17 bp, Arabidopsis thaliana
aaactgatttgtcggct

SEQ ID NO: 2937 - DNA, 17 bp, Arabidopsis thaliana
aaactgcaaagtggctt

SEQ ID NO: 2938 - DNA, 17 bp, Arabidopsis thaliana
aaactgcaaatgttgct

SEQ ID NO: 2939 - DNA, 17 bp, Arabidopsis thaliana
aaactgcaaggaagtgt

SEQ ID NO: 2940 - DNA, 17 bp, Arabidopsis thaliana
aaactgcaccgcaacag

SEQ ID NO: 2941 - DNA, 17 bp, Arabidopsis thaliana
aaactgcaccgcattct

SEQ ID NO: 2942 - DNA, 17 bp, Arabidopsis thaliana
aaactgcaccgcatttt

SEQ ID NO: 2943 - DNA, 17 bp, Arabidopsis thaliana
aaactgcacgagttgac

SEQ ID NO: 2944 - DNA, 17 bp, Arabidopsis thaliana
aaactgcacttgttccg

SEQ ID NO: 2945 - DNA, 17 bp, Arabidopsis thaliana
aaactgcagaaatcact

SEQ ID NO: 2946 - DNA, 17 bp, Arabidopsis thaliana
aaactgcagtatcctct

SEQ ID NO: 2947 - DNA, 17 bp, Arabidopsis thaliana
aaactgcatttaatgca

SEQ ID NO: 2948 - DNA, 17 bp, Arabidopsis thaliana
aaactgcctatatgcgc

SEQ ID NO: 2949 - DNA, 17 bp, Arabidopsis thaliana
aaactgcctcagtctac

SEQ ID NO: 2950 - DNA, 17 bp, Arabidopsis thaliana
aaactgcctgcatttct

SEQ ID NO: 2951 - DNA, 17 bp, Arabidopsis thaliana
aaactgcgaatggctca

SEQ ID NO: 2952 - DNA, 17 bp, Arabidopsis thaliana
aaactgcgacatgtgct

SEQ ID NO: 2953 - DNA, 17 bp, Arabidopsis thaliana
aaactgcgagatgtgtt

SEQ ID NO: 2954 - DNA, 17 bp, Arabidopsis thaliana
aaactgcgagttgtata

SEQ ID NO: 2955 - DNA, 17 bp, Arabidopsis thaliana
aaactgcgcagtagccg

SEQ ID NO: 2956 - DNA, 17 bp, Arabidopsis thaliana
aaactgcggcgtagtac

SEQ ID NO: 2957 - DNA, 17 bp, Arabidopsis thaliana
aaactgcggggatggaa

SEQ ID NO: 2958 - DNA, 17 bp, Arabidopsis thaliana
aaactgcggtaaacttg

SEQ ID NO: 2959 - DNA, 17 bp, Arabidopsis thaliana
aaactgcggttccacac

SEQ ID NO: 2960 - DNA, 17 bp, Arabidopsis thaliana
aaactgcggttccagac

SEQ ID NO: 2961 - DNA, 17 bp, Arabidopsis thaliana
aaactgcgtcaacctct

SEQ ID NO: 2962 - DNA, 17 bp, Arabidopsis thaliana
aaactgctcagacctgc

SEQ ID NO: 2963 - DNA, 17 bp, Arabidopsis thaliana
aaactgctcagacctgg

SEQ ID NO: 2964 - DNA, 17 bp, Arabidopsis thaliana
aaactgctccttctagt

SEQ ID NO: 2965 - DNA, 17 bp, Arabidopsis thaliana
aaactgctctttccgct

SEQ ID NO: 2966 - DNA, 17 bp, Arabidopsis thaliana
aaactgctgatgtaaga

SEQ ID NO: 2967 - DNA, 17 bp, Arabidopsis thaliana
aaactgctgcggaccat

SEQ ID NO: 2968 - DNA, 17 bp, Arabidopsis thaliana
aaactgctggaatctgt

SEQ ID NO: 2969 - DNA, 17 bp, Arabidopsis thaliana
aaactgcttggacttag

SEQ ID NO: 2970 - DNA, 17 bp, Arabidopsis thaliana
aaactggaaaacgtcca

SEQ ID NO: 2971 - DNA, 17 bp, Arabidopsis thaliana
aaactggactaccttcc

SEQ ID NO: 2972 - DNA, 17 bp, Arabidopsis thaliana
aaactggagatcacctg

SEQ ID NO: 2973 - DNA, 17 bp, Arabidopsis thaliana
aaactggaggctaattg

SEQ ID NO: 2974 - DNA, 17 bp, Arabidopsis thaliana
aaactggagtttggact

SEQ ID NO: 2975 - DNA, 17 bp, Arabidopsis thaliana
aaactggatcatttgga

SEQ ID NO: 2976 - DNA, 17 bp, Arabidopsis thaliana
aaactggatggagatgg

SEQ ID NO: 2977 - DNA, 17 bp, Arabidopsis thaliana
aaactggattaagcatg

SEQ ID NO: 2978 - DNA, 17 bp, Arabidopsis thaliana
aaactggcagaccgttg

SEQ ID NO: 2979 - DNA, 17 bp, Arabidopsis thaliana
aaactggcgatttcgag

SEQ ID NO: 2980 - DNA, 17 bp, Arabidopsis thaliana
aaactggcttaactcag

SEQ ID NO: 2981 - DNA, 17 bp, Arabidopsis thaliana
aaactggcttgtggcag

SEQ ID NO: 2982 - DNA, 17 bp, Arabidopsis thaliana
aaactgggcttcagggg

SEQ ID NO: 2983 - DNA, 17 bp, Arabidopsis thaliana
aaactgggtgttggtca

SEQ ID NO: 2984 - DNA, 17 bp, Arabidopsis thaliana
aaactggtcatatgccc

SEQ ID NO: 2985 - DNA, 17 bp, Arabidopsis thaliana
aaactggtgcaggagac

SEQ ID NO: 2986 - DNA, 17 bp, Arabidopsis thaliana
aaactggtgcaggagat

SEQ ID NO: 2987 - DNA, 17 bp, Arabidopsis thaliana
aaactggttacagtcat

SEQ ID NO: 2988 - DNA, 17 bp, Arabidopsis thaliana
aaactggttcggtcggt

SEQ ID NO: 2989 - DNA, 17 bp, Arabidopsis thaliana
aaactggttgatcggac

SEQ ID NO: 2990 - DNA, 17 bp, Arabidopsis thaliana
aaactggttgttgtctc

SEQ ID NO: 2991 - DNA, 17 bp, Arabidopsis thaliana
aaactggtttatgatct

SEQ ID NO: 2992 - DNA, 17 bp, Arabidopsis thaliana
aaactgtaagccggttg

SEQ ID NO: 2993 - DNA, 17 bp, Arabidopsis thaliana
aaactgtaatcccttca

SEQ ID NO: 2994 - DNA, 17 bp, Arabidopsis thaliana
aaactgtaggcggtcta

SEQ ID NO: 2995 - DNA, 17 bp, Arabidopsis thaliana
aaactgtagtagctaga

SEQ ID NO: 2996 - DNA, 17 bp, Arabidopsis thaliana
aaactgtatggagatgg

SEQ ID NO: 2997 - DNA, 17 bp, Arabidopsis thaliana
aaactgtcacacgtgat

SEQ ID NO: 2998 - DNA, 17 bp, Arabidopsis thaliana
aaactgtcacactacgg

SEQ ID NO: 2999 - DNA, 17 bp, Arabidopsis thaliana
aaactgtccatttccac

SEQ ID NO: 3000 - DNA, 17 bp, Arabidopsis thaliana
aaactgtcgactttgta

SEQ ID NO: 3001 - DNA, 17 bp, Arabidopsis thaliana
aaactgtcgcagtgata

SEQ ID NO: 3002 - DNA, 17 bp, Arabidopsis thaliana
aaactgtcgccctctga

SEQ ID NO: 3003 - DNA, 17 bp, Arabidopsis thaliana
aaactgtcgtagccgaa

SEQ ID NO: 3004 - DNA, 17 bp, Arabidopsis thaliana
aaactgtcgtcttcgtc

SEQ ID NO: 3005 - DNA, 17 bp, Arabidopsis thaliana
aaactgtctacagatca

SEQ ID NO: 3006 - DNA, 17 bp, Arabidopsis thaliana
aaactgtctcaacccat

SEQ ID NO: 3007 - DNA, 17 bp, Arabidopsis thaliana
aaactgtctcacgcgtg

SEQ ID NO: 3008 - DNA, 17 bp, Arabidopsis thaliana
aaactgtgcttctacga

SEQ ID NO: 3009 - DNA, 17 bp, Arabidopsis thaliana
aaactgtggaagaatct

SEQ ID NO: 3010 - DNA, 17 bp, Arabidopsis thaliana
aaactgtggaagcctct

SEQ ID NO: 3011 - DNA, 17 bp, Arabidopsis thaliana
aaactgtgtaaaatccg

SEQ ID NO: 3012 - DNA, 17 bp, Arabidopsis thaliana
aaactgtgtatggtggg

SEQ ID NO: 3013 - DNA, 17 bp, Arabidopsis thaliana
aaactgttagctcagtg

SEQ ID NO: 3014 - DNA, 17 bp, Arabidopsis thaliana
aaactgttgacggtgag

SEQ ID NO: 3015 - DNA, 17 bp, Arabidopsis thaliana
aaactgttgatgttctt

SEQ ID NO: 3016 - DNA, 17 bp, Arabidopsis thaliana
aaactgttgctggagat

SEQ ID NO: 3017 - DNA, 17 bp, Arabidopsis thaliana
aaactgttgttggagat

SEQ ID NO: 3018 - DNA, 17 bp, Arabidopsis thaliana
aaactgtttctgacatg

SEQ ID NO: 3019 - DNA, 17 bp, Arabidopsis thaliana
aaactgttttcccgttt

SEQ ID NO: 3020 - DNA, 17 bp, Arabidopsis thaliana
aaacttaaaccgcaaca

SEQ ID NO: 3021 - DNA, 17 bp, Arabidopsis thaliana
aaacttaaaccgcaacc

SEQ ID NO: 3022 - DNA, 17 bp, Arabidopsis thaliana
aaacttaaactcgtgat

SEQ ID NO: 3023 - DNA, 17 bp, Arabidopsis thaliana
aaacttaagcggtttgt

SEQ ID NO: 3024 - DNA, 17 bp, Arabidopsis thaliana
aaacttaagggcatctc

SEQ ID NO: 3025 - DNA, 17 bp, Arabidopsis thaliana
aaacttaaggtcaccga

SEQ ID NO: 3026 - DNA, 17 bp, Arabidopsis thaliana
aaacttaaggtcaccgg

SEQ ID NO: 3027 - DNA, 17 bp, Arabidopsis thaliana
aaacttaatcgttgacc

SEQ ID NO: 3028 - DNA, 17 bp, Arabidopsis thaliana
aaacttacaagaccaat

SEQ ID NO: 3029 - DNA, 17 bp, Arabidopsis thaliana
aaacttacaagatcggg

SEQ ID NO: 3030 - DNA, 17 bp, Arabidopsis thaliana
aaacttacaggtactac

SEQ ID NO: 3031 - DNA, 17 bp, Arabidopsis thaliana
aaacttaccaggtccag

SEQ ID NO: 3032 - DNA, 17 bp, Arabidopsis thaliana
aaacttaccttcgccgc

SEQ ID NO: 3033 - DNA, 17 bp, Arabidopsis thaliana
aaacttagagacttgtt

SEQ ID NO: 3034 - DNA, 17 bp, Arabidopsis thaliana
aaacttagaggtcgccg

SEQ ID NO: 3035 - DNA, 17 bp, Arabidopsis thaliana
aaacttagaggtcgcgt

SEQ ID NO: 3036 - DNA, 17 bp, Arabidopsis thaliana
aaacttagaggtcgcta

SEQ ID NO: 3037 - DNA, 17 bp, Arabidopsis thaliana
aaacttagaggttgccg

SEQ ID NO: 3038 - DNA, 17 bp, Arabidopsis thaliana
aaacttagcatgtgata

SEQ ID NO: 3039 - DNA, 17 bp, Arabidopsis thaliana
aaacttagccaccagtt

SEQ ID NO: 3040 - DNA, 17 bp, Arabidopsis thaliana
aaacttagccatttcca

SEQ ID NO: 3041 - DNA, 17 bp, Arabidopsis thaliana
aaacttaggaatccctt

SEQ ID NO: 3042 - DNA, 17 bp, Arabidopsis thaliana
aaacttaggcattggcg

SEQ ID NO: 3043 - DNA, 17 bp, Arabidopsis thaliana
aaacttagggggacaca

SEQ ID NO: 3044 - DNA, 17 bp, Arabidopsis thaliana
aaacttagtaactcacg

SEQ ID NO: 3045 - DNA, 17 bp, Arabidopsis thaliana
aaacttagtctttgctt

SEQ ID NO: 3046 - DNA, 17 bp, Arabidopsis thaliana
aaacttagtgcgcaacg

SEQ ID NO: 3047 - DNA, 17 bp, Arabidopsis thaliana
aaacttatatgtgcgaa

SEQ ID NO: 3048 - DNA, 17 bp, Arabidopsis thaliana
aaacttatgatccccat

SEQ ID NO: 3049 - DNA, 17 bp, Arabidopsis thaliana
aaacttatgttgcagct

SEQ ID NO: 3050 - DNA, 17 bp, Arabidopsis thaliana
aaacttatgtttgggtg

SEQ ID NO: 3051 - DNA, 17 bp, Arabidopsis thaliana
aaacttatttacaatgg

SEQ ID NO: 3052 - DNA, 17 bp, Arabidopsis thaliana
aaacttcaatcccggtc

SEQ ID NO: 3053 - DNA, 17 bp, Arabidopsis thaliana
aaacttcacatgtggcc

SEQ ID NO: 3054 - DNA, 17 bp, Arabidopsis thaliana
aaacttcaccatgttct

SEQ ID NO: 3055 - DNA, 17 bp, Arabidopsis thaliana
aaacttcacctttggcc

SEQ ID NO: 3056 - DNA, 17 bp, Arabidopsis thaliana
aaacttcagagcccata

SEQ ID NO: 3057 - DNA, 17 bp, Arabidopsis thaliana
aaacttcagatgtggga

SEQ ID NO: 3058 - DNA, 17 bp, Arabidopsis thaliana
aaacttcagattcttca

SEQ ID NO: 3059 - DNA, 17 bp, Arabidopsis thaliana
aaacttcagtcaattat

SEQ ID NO: 3060 - DNA, 17 bp, Arabidopsis thaliana
aaacttcatcattgaat

SEQ ID NO: 3061 - DNA, 17 bp, Arabidopsis thaliana
aaacttcatccgcttgc

SEQ ID NO: 3062 - DNA, 17 bp, Arabidopsis thaliana
aaacttcatggaacaga

SEQ ID NO: 3063 - DNA, 17 bp, Arabidopsis thaliana
aaacttcatgtgctgat

SEQ ID NO: 3064 - DNA, 17 bp, Arabidopsis thaliana
aaacttcattgtacatg

SEQ ID NO: 3065 - DNA, 17 bp, Arabidopsis thaliana
aaacttccagacctggg

SEQ ID NO: 3066 - DNA, 17 bp, Arabidopsis thaliana
aaacttccctcactctc

SEQ ID NO: 3067 - DNA, 17 bp, Arabidopsis thaliana
aaacttccgagggggaa

SEQ ID NO: 3068 - DNA, 17 bp, Arabidopsis thaliana
aaacttccgagggggac

SEQ ID NO: 3069 - DNA, 17 bp, Arabidopsis thaliana
aaacttccgatgtggga

SEQ ID NO: 3070 - DNA, 17 bp, Arabidopsis thaliana
aaacttcgattcaaatc

SEQ ID NO: 3071 - DNA, 17 bp, Arabidopsis thaliana
aaacttcgcctaggatt

SEQ ID NO: 3072 - DNA, 17 bp, Arabidopsis thaliana
aaacttcgcctagtgtc

SEQ ID NO: 3073 - DNA, 17 bp, Arabidopsis thaliana
aaacttcggaccgagcc

SEQ ID NO: 3074 - DNA, 17 bp, Arabidopsis thaliana
aaacttcgttgcactcg

SEQ ID NO: 3075 - DNA, 17 bp, Arabidopsis thaliana
aaacttctaacaatggc

SEQ ID NO: 3076 - DNA, 17 bp, Arabidopsis thaliana
aaacttctaatgtggga

SEQ ID NO: 3077 - DNA, 17 bp, Arabidopsis thaliana
aaacttctacaaaacgg

SEQ ID NO: 3078 - DNA, 17 bp, Arabidopsis thaliana
aaacttctctacatgca

SEQ ID NO: 3079 - DNA, 17 bp, Arabidopsis thaliana
aaacttctctaggagct

SEQ ID NO: 3080 - DNA, 17 bp, Arabidopsis thaliana
aaacttctctcgtcatg

SEQ ID NO: 3081 - DNA, 17 bp, Arabidopsis thaliana
aaacttctctgcatgca

SEQ ID NO: 3082 - DNA, 17 bp, Arabidopsis thaliana
aaacttctgtctggcct

SEQ ID NO: 3083 - DNA, 17 bp, Arabidopsis thaliana
aaacttcttgcagatgt

SEQ ID NO: 3084 - DNA, 17 bp, Arabidopsis thaliana
aaacttgaaagcgtcat

SEQ ID NO: 3085 - DNA, 17 bp, Arabidopsis thaliana
aaacttgaaggagaaga

SEQ ID NO: 3086 - DNA, 17 bp, Arabidopsis thaliana
aaacttgaagtcgggtt

SEQ ID NO: 3087 - DNA, 17 bp, Arabidopsis thaliana
aaacttgaatccagcgt

SEQ ID NO: 3088 - DNA, 17 bp, Arabidopsis thaliana
aaacttgaatcgaacta

SEQ ID NO: 3089 - DNA, 17 bp, Arabidopsis thaliana
aaacttgaccaagcgtt

SEQ ID NO: 3090 - DNA, 17 bp, Arabidopsis thaliana
aaacttgacctaactta

SEQ ID NO: 3091 - DNA, 17 bp, Arabidopsis thaliana
aaacttgactcatgtgc

SEQ ID NO: 3092 - DNA, 17 bp, Arabidopsis thaliana
aaacttgactctagtcc

SEQ ID NO: 3093 - DNA, 17 bp, Arabidopsis thaliana
aaacttgactgagaaat

SEQ ID NO: 3094 - DNA, 17 bp, Arabidopsis thaliana
aaacttgacttgagcca

SEQ ID NO: 3095 - DNA, 17 bp, Arabidopsis thaliana
aaacttgaggttggtta

SEQ ID NO: 3096 - DNA, 17 bp, Arabidopsis thaliana
aaacttgagttcacgcc

SEQ ID NO: 3097 - DNA, 17 bp, Arabidopsis thaliana
aaacttgatctgagaac

SEQ ID NO: 3098 - DNA, 17 bp, Arabidopsis thaliana
aaacttgatctgcaaca

SEQ ID NO: 3099 - DNA, 17 bp, Arabidopsis thaliana
aaacttgatgaatttct

SEQ ID NO: 3100 - DNA, 17 bp, Arabidopsis thaliana
aaacttgatgtggaacc

SEQ ID NO: 3101 - DNA, 17 bp, Arabidopsis thaliana
aaacttgattcatcagg

SEQ ID NO: 3102 - DNA, 17 bp, Arabidopsis thaliana
aaacttgattctctaat

SEQ ID NO: 3103 - DNA, 17 bp, Arabidopsis thaliana
aaacttgattggcaaat

SEQ ID NO: 3104 - DNA, 17 bp, Arabidopsis thaliana
aaacttgatttatgagg

SEQ ID NO: 3105 - DNA, 17 bp, Arabidopsis thaliana
aaacttgccaaccatat

SEQ ID NO: 3106 - DNA, 17 bp, Arabidopsis thaliana
aaacttgccatgtgata

SEQ ID NO: 3107 - DNA, 17 bp, Arabidopsis thaliana
aaacttgccgaagatgg

SEQ ID NO: 3108 - DNA, 17 bp, Arabidopsis thaliana
aaacttgcctatctagg

SEQ ID NO: 3109 - DNA, 17 bp, Arabidopsis thaliana
aaacttgcggatgttag

SEQ ID NO: 3110 - DNA, 17 bp, Arabidopsis thaliana
aaacttgctcactaagt

SEQ ID NO: 3111 - DNA, 17 bp, Arabidopsis thaliana
aaacttgctcccaagca

SEQ ID NO: 3112 - DNA, 17 bp, Arabidopsis thaliana
aaacttgctgaagatgg

SEQ ID NO: 3113 - DNA, 17 bp, Arabidopsis thaliana
aaacttggagcgaatct

SEQ ID NO: 3114 - DNA, 17 bp, Arabidopsis thaliana
aaacttggcatgcgata

SEQ ID NO: 3115 - DNA, 17 bp, Arabidopsis thaliana
aaacttggcatgtgata

SEQ ID NO: 3116 - DNA, 17 bp, Arabidopsis thaliana
aaacttggcatgtgatg

SEQ ID NO: 3117 - DNA, 17 bp, Arabidopsis thaliana
aaacttggcatgtggta

SEQ ID NO: 3118 - DNA, 17 bp, Arabidopsis thaliana
aaacttggcatgtgtgg

SEQ ID NO: 3119 - DNA, 17 bp, Arabidopsis thaliana
aaacttggcatttgata

SEQ ID NO: 3120 - DNA, 17 bp, Arabidopsis thaliana
aaacttggccctgttcg

SEQ ID NO: 3121 - DNA, 17 bp, Arabidopsis thaliana
aaacttggcctgtgata

SEQ ID NO: 3122 - DNA, 17 bp, Arabidopsis thaliana
aaacttggcgggaaaag

SEQ ID NO: 3123 - DNA, 17 bp, Arabidopsis thaliana
aaacttggctcggatgt

SEQ ID NO: 3124 - DNA, 17 bp, Arabidopsis thaliana
aaacttggcttgaggtt

SEQ ID NO: 3125 - DNA, 17 bp, Arabidopsis thaliana
aaacttggtcaaagggt

SEQ ID NO: 3126 - DNA, 17 bp, Arabidopsis thaliana
aaacttggtccacaacg

SEQ ID NO: 3127 - DNA, 17 bp, Arabidopsis thaliana
aaacttggtccacagcg

SEQ ID NO: 3128 - DNA, 17 bp, Arabidopsis thaliana
aaacttggtccgcagca

SEQ ID NO: 3129 - DNA, 17 bp, Arabidopsis thaliana
aaacttggtccgcagcc

SEQ ID NO: 3130 - DNA, 17 bp, Arabidopsis thaliana
aaacttggtccgcagcg

SEQ ID NO: 3131 - DNA, 17 bp, Arabidopsis thaliana
aaacttggtcctgagga

SEQ ID NO: 3132 - DNA, 17 bp, Arabidopsis thaliana
aaacttggtcctgcggg

SEQ ID NO: 3133 - DNA, 17 bp, Arabidopsis thaliana
aaacttggtctgcagcg

SEQ ID NO: 3134 - DNA, 17 bp, Arabidopsis thaliana
aaacttggtgcaggtcg

SEQ ID NO: 3135 - DNA, 17 bp, Arabidopsis thaliana
aaacttggtgcgcaacg

SEQ ID NO: 3136 - DNA, 17 bp, Arabidopsis thaliana
aaacttggttcgcagag

SEQ ID NO: 3137 - DNA, 17 bp, Arabidopsis thaliana
aaacttggttcgcagca

SEQ ID NO: 3138 - DNA, 17 bp, Arabidopsis thaliana
aaacttggtttacagcg

SEQ ID NO: 3139 - DNA, 17 bp, Arabidopsis thaliana
aaacttgtaagttgatt

SEQ ID NO: 3140 - DNA, 17 bp, Arabidopsis thaliana
aaacttgtatgtagata

SEQ ID NO: 3141 - DNA, 17 bp, Arabidopsis thaliana
aaacttgtcagctaaga

SEQ ID NO: 3142 - DNA, 17 bp, Arabidopsis thaliana
aaacttgtcatctgcag

SEQ ID NO: 3143 - DNA, 17 bp, Arabidopsis thaliana
aaacttgtcatgtgtca

SEQ ID NO: 3144 - DNA, 17 bp, Arabidopsis thaliana
aaacttgtccaaacttt

SEQ ID NO: 3145 - DNA, 17 bp, Arabidopsis thaliana
aaacttgtccacacctt

SEQ ID NO: 3146 - DNA, 17 bp, Arabidopsis thaliana
aaacttgtccagctagt

SEQ ID NO: 3147 - DNA, 17 bp, Arabidopsis thaliana
aaacttgtcgatcttca

SEQ ID NO: 3148 - DNA, 17 bp, Arabidopsis thaliana
aaacttgtcggcccaaa

SEQ ID NO: 3149 - DNA, 17 bp, Arabidopsis thaliana
aaacttgtctactattg

SEQ ID NO: 3150 - DNA, 17 bp, Arabidopsis thaliana
aaacttgtgctctaaaa

SEQ ID NO: 3151 - DNA, 17 bp, Arabidopsis thaliana
aaacttgtgggtatccg

SEQ ID NO: 3152 - DNA, 17 bp, Arabidopsis thaliana
aaacttgtgttgacccc

SEQ ID NO: 3153 - DNA, 17 bp, Arabidopsis thaliana
aaacttgtgttgacggt

SEQ ID NO: 3154 - DNA, 17 bp, Arabidopsis thaliana
aaacttgttatttctgc

SEQ ID NO: 3155 - DNA, 17 bp, Arabidopsis thaliana
aaacttgttcgcttcta

SEQ ID NO: 3156 - DNA, 17 bp, Arabidopsis thaliana
aaacttgttcgttgcaa

SEQ ID NO: 3157 - DNA, 17 bp, Arabidopsis thaliana
aaacttgttgagactgt

SEQ ID NO: 3158 - DNA, 17 bp, Arabidopsis thaliana
aaacttgttgggtttag

SEQ ID NO: 3159 - DNA, 17 bp, Arabidopsis thaliana
aaacttgttggttttta

SEQ ID NO: 3160 - DNA, 17 bp, Arabidopsis thaliana
aaactttaaagggtccg

SEQ ID NO: 3161 - DNA, 17 bp, Arabidopsis thaliana
aaactttaaccccggtc

SEQ ID NO: 3162 - DNA, 17 bp, Arabidopsis thaliana
aaactttcaagtttgcg

SEQ ID NO: 3163 - DNA, 17 bp, Arabidopsis thaliana
aaactttcagatccgag

SEQ ID NO: 3164 - DNA, 17 bp, Arabidopsis thaliana
aaactttcatgtgctga

SEQ ID NO: 3165 - DNA, 17 bp, Arabidopsis thaliana
aaactttccatggggac

SEQ ID NO: 3166 - DNA, 17 bp, Arabidopsis thaliana
aaactttccgtagagct

SEQ ID NO: 3167 - DNA, 17 bp, Arabidopsis thaliana
aaactttcctcatattg

SEQ ID NO: 3168 - DNA, 17 bp, Arabidopsis thaliana
aaactttcctttatggc

SEQ ID NO: 3169 - DNA, 17 bp, Arabidopsis thaliana
aaactttcgatttgtcg

SEQ ID NO: 3170 - DNA, 17 bp, Arabidopsis thaliana
aaactttctaaggcgga

SEQ ID NO: 3171 - DNA, 17 bp, Arabidopsis thaliana
aaactttctacactctc

SEQ ID NO: 3172 - DNA, 17 bp, Arabidopsis thaliana
aaactttctacggggac

SEQ ID NO: 3173 - DNA, 17 bp, Arabidopsis thaliana
aaactttctactgagta

SEQ ID NO: 3174 - DNA, 17 bp, Arabidopsis thaliana
aaactttctactttgct

SEQ ID NO: 3175 - DNA, 17 bp, Arabidopsis thaliana
aaactttctctcttttc

SEQ ID NO: 3176 - DNA, 17 bp, Arabidopsis thaliana
aaactttctgatccggt

SEQ ID NO: 3177 - DNA, 17 bp, Arabidopsis thaliana
aaactttctgtcttggc

SEQ ID NO: 3178 - DNA, 17 bp, Arabidopsis thaliana
aaactttgacccgccat

SEQ ID NO: 3179 - DNA, 17 bp, Arabidopsis thaliana
aaactttgactatggtt

SEQ ID NO: 3180 - DNA, 17 bp, Arabidopsis thaliana
aaactttgagagacgtt

SEQ ID NO: 3181 - DNA, 17 bp, Arabidopsis thaliana
aaactttgagagatgtt

SEQ ID NO: 3182 - DNA, 17 bp, Arabidopsis thaliana
aaactttgatagatttg

SEQ ID NO: 3183 - DNA, 17 bp, Arabidopsis thaliana
aaactttgatgaaattg

SEQ ID NO: 3184 - DNA, 17 bp, Arabidopsis thaliana
aaactttgattgcgtgg

SEQ ID NO: 3185 - DNA, 17 bp, Arabidopsis thaliana
aaactttgatttctcat

SEQ ID NO: 3186 - DNA, 17 bp, Arabidopsis thaliana
aaactttgcaacgtgcg

SEQ ID NO: 3187 - DNA, 17 bp, Arabidopsis thaliana
aaactttgcacatttct

SEQ ID NO: 3188 - DNA, 17 bp, Arabidopsis thaliana
aaactttgccatgaggg

SEQ ID NO: 3189 - DNA, 17 bp, Arabidopsis thaliana
aaactttgcgaattcac

SEQ ID NO: 3190 - DNA, 17 bp, Arabidopsis thaliana
aaactttgcggagtact

SEQ ID NO: 3191 - DNA, 17 bp, Arabidopsis thaliana
aaactttgctttgactt

SEQ ID NO: 3192 - DNA, 17 bp, Arabidopsis thaliana
aaactttggacaacatc

SEQ ID NO: 3193 - DNA, 17 bp, Arabidopsis thaliana
aaactttggactctgcc

SEQ ID NO: 3194 - DNA, 17 bp, Arabidopsis thaliana
aaactttggctgttaaa

SEQ ID NO: 3195 - DNA, 17 bp, Arabidopsis thaliana
aaactttggcttgtatg

SEQ ID NO: 3196 - DNA, 17 bp, Arabidopsis thaliana
aaactttggtgactaag

SEQ ID NO: 3197 - DNA, 17 bp, Arabidopsis thaliana
aaactttggttgacttt

SEQ ID NO: 3198 - DNA, 17 bp, Arabidopsis thaliana
aaactttggttgcggat

SEQ ID NO: 3199 - DNA, 17 bp, Arabidopsis thaliana
aaactttgtaccattga

SEQ ID NO: 3200 - DNA, 17 bp, Arabidopsis thaliana
aaactttgtacgccgca

SEQ ID NO: 3201 - DNA, 17 bp, Arabidopsis thaliana
aaactttgtccagctag

SEQ ID NO: 3202 - DNA, 17 bp, Arabidopsis thaliana
aaactttgttactttcc

SEQ ID NO: 3203 - DNA, 17 bp, Arabidopsis thaliana
aaactttgttcgagaaa

SEQ ID NO: 3204 - DNA, 17 bp, Arabidopsis thaliana
aaacttttatgaagcct

SEQ ID NO: 3205 - DNA, 17 bp, Arabidopsis thaliana
aaacttttatgccattt

SEQ ID NO: 3206 - DNA, 17 bp, Arabidopsis thaliana
aaacttttatgtaccgc

SEQ ID NO: 3207 - DNA, 17 bp, Arabidopsis thaliana
aaacttttcagacctaa

SEQ ID NO: 3208 - DNA, 17 bp, Arabidopsis thaliana
aaacttttcccacaaac

SEQ ID NO: 3209 - DNA, 17 bp, Arabidopsis thaliana
aaacttttcccgccatt

SEQ ID NO: 3210 - DNA, 17 bp, Arabidopsis thaliana
aaacttttccgaccatt

SEQ ID NO: 3211 - DNA, 17 bp, Arabidopsis thaliana
aaacttttctaacgggg

SEQ ID NO: 3212 - DNA, 17 bp, Arabidopsis thaliana
aaacttttctcgacgat

SEQ ID NO: 3213 - DNA, 17 bp, Arabidopsis thaliana
aaacttttgactgatta

SEQ ID NO: 3214 - DNA, 17 bp, Arabidopsis thaliana
aaacttttgagagtatg

SEQ ID NO: 3215 - DNA, 17 bp, Arabidopsis thaliana
aaacttttgttaccgac

SEQ ID NO: 3216 - DNA, 17 bp, Arabidopsis thaliana
aaactttttcctgggtg

SEQ ID NO: 3217 - DNA, 17 bp, Arabidopsis thaliana
aaactttttctgggtgg

SEQ ID NO: 3218 - DNA, 17 bp, Arabidopsis thaliana
aaactttttctgtcaac

SEQ ID NO: 3219 - DNA, 17 bp, Arabidopsis thaliana
aaactttttggtcattc

SEQ ID NO: 3220 - DNA, 17 bp, Arabidopsis thaliana
aaacttttttatgaacc

SEQ ID NO: 3221 - DNA, 17 bp, Arabidopsis thaliana
aaacttttttctgggtg

SEQ ID NO: 3222 - DNA, 17 bp, Arabidopsis thaliana
aaagaaaacggcgaatt

SEQ ID NO: 3223 - DNA, 17 bp, Arabidopsis thaliana
aaagaaaaggctcagag

SEQ ID NO: 3224 - DNA, 17 bp, Arabidopsis thaliana
aaagaaaaggtggtggc

SEQ ID NO: 3225 - DNA, 17 bp, Arabidopsis thaliana
aaagaaaatgccatttg

SEQ ID NO: 3226 - DNA, 17 bp, Arabidopsis thaliana
aaagaaaattgttacgg

SEQ ID NO: 3227 - DNA, 17 bp, Arabidopsis thaliana
aaagaaaatttcacggt

SEQ ID NO: 3228 - DNA, 17 bp, Arabidopsis thaliana
aaagaaaccaaagttcc

SEQ ID NO: 3229 - DNA, 17 bp, Arabidopsis thaliana
aaagaaaccatcaaagg

SEQ ID NO: 3230 - DNA, 17 bp, Arabidopsis thaliana
aaagaaaccgtcatatg

SEQ ID NO: 3231 - DNA, 17 bp, Arabidopsis thaliana
aaagaaactattctcaa

SEQ ID NO: 3232 - DNA, 17 bp, Arabidopsis thaliana
aaagaaagctacgtatt

SEQ ID NO: 3233 - DNA, 17 bp, Arabidopsis thaliana
aaagaaaggaaggagat

SEQ ID NO: 3234 - DNA, 17 bp, Arabidopsis thaliana
aaagaaaggactgccca

SEQ ID NO: 3235 - DNA, 17 bp, Arabidopsis thaliana
aaagaaagtcccacatc

SEQ ID NO: 3236 - DNA, 17 bp, Arabidopsis thaliana
aaagaaagtcgaatctg

SEQ ID NO: 3237 - DNA, 17 bp, Arabidopsis thaliana
aaagaaattccaacttc

SEQ ID NO: 3238 - DNA, 17 bp, Arabidopsis thaliana
aaagaaattggaccggg

SEQ ID NO: 3239 - DNA, 17 bp, Arabidopsis thaliana
aaagaaattgttaggtt

SEQ ID NO: 3240 - DNA, 17 bp, Arabidopsis thaliana
aaagaacacaaacccta

SEQ ID NO: 3241 - DNA, 17 bp, Arabidopsis thaliana
aaagaacatcacttgtg

SEQ ID NO: 3242 - DNA, 17 bp, Arabidopsis thaliana
aaagaaccaagctcaat

SEQ ID NO: 3243 - DNA, 17 bp, Arabidopsis thaliana
aaagaaccgtcgcctcg

SEQ ID NO: 3244 - DNA, 17 bp, Arabidopsis thaliana
aaagaacctgtccaccc

SEQ ID NO: 3245 - DNA, 17 bp, Arabidopsis thaliana
aaagaacggcggagctt

SEQ ID NO: 3246 - DNA, 17 bp, Arabidopsis thaliana
aaagaacgggctaagta

SEQ ID NO: 3247 - DNA, 17 bp, Arabidopsis thaliana
aaagaacgtacgtgttt

SEQ ID NO: 3248 - DNA, 17 bp, Arabidopsis thaliana
aaagaactgagtccgaa

SEQ ID NO: 3249 - DNA, 17 bp, Arabidopsis thaliana
aaagaacttacgactgc

SEQ ID NO: 3250 - DNA, 17 bp, Arabidopsis thaliana
aaagaagaccctgttaa

SEQ ID NO: 3251 - DNA, 17 bp, Arabidopsis thaliana
aaagaagaccctgttga

SEQ ID NO: 3252 - DNA, 17 bp, Arabidopsis thaliana
aaagaagagtgagactg

SEQ ID NO: 3253 - DNA, 17 bp, Arabidopsis thaliana
aaagaagatccggagtg

SEQ ID NO: 3254 - DNA, 17 bp, Arabidopsis thaliana
aaagaagcaacagtagc

SEQ ID NO: 3255 - DNA, 17 bp, Arabidopsis thaliana
aaagaagcaacatcgtg

SEQ ID NO: 3256 - DNA, 17 bp, Arabidopsis thaliana
aaagaagccatcatagc

SEQ ID NO: 3257 - DNA, 17 bp, Arabidopsis thaliana
aaagaagccgagtaagc

SEQ ID NO: 3258 - DNA, 17 bp, Arabidopsis thaliana
aaagaagccttgaaccg

SEQ ID NO: 3259 - DNA, 17 bp, Arabidopsis thaliana
aaagaagccttggtggt

SEQ ID NO: 3260 - DNA, 17 bp, Arabidopsis thaliana
aaagaagcggcaggccg

SEQ ID NO: 3261 - DNA, 17 bp, Arabidopsis thaliana
aaagaagcggtgatatg

SEQ ID NO: 3262 - DNA, 17 bp, Arabidopsis thaliana
aaagaagcttactgtga

SEQ ID NO: 3263 - DNA, 17 bp, Arabidopsis thaliana
aaagaaggcctctctcg

SEQ ID NO: 3264 - DNA, 17 bp, Arabidopsis thaliana
aaagaaggttaatgagc

SEQ ID NO: 3265 - DNA, 17 bp, Arabidopsis thaliana
aaagaaggtttgacccg

SEQ ID NO: 3266 - DNA, 17 bp, Arabidopsis thaliana
aaagaaggtttgcagat

SEQ ID NO: 3267 - DNA, 17 bp, Arabidopsis thaliana
aaagaagtgggacccgg

SEQ ID NO: 3268 - DNA, 17 bp, Arabidopsis thaliana
aaagaagttgtggaatt

SEQ ID NO: 3269 - DNA, 17 bp, Arabidopsis thaliana
aaagaatagtgcagaac

SEQ ID NO: 3270 - DNA, 17 bp, Arabidopsis thaliana
aaagaatatccgccggt

SEQ ID NO: 3271 - DNA, 17 bp, Arabidopsis thaliana
aaagaatcagtgtctgg

SEQ ID NO: 3272 - DNA, 17 bp, Arabidopsis thaliana
aaagaatcattcaggaa

SEQ ID NO: 3273 - DNA, 17 bp, Arabidopsis thaliana
aaagaatccaccataag

SEQ ID NO: 3274 - DNA, 17 bp, Arabidopsis thaliana
aaagaatccgcagacac

SEQ ID NO: 3275 - DNA, 17 bp, Arabidopsis thaliana
aaagaatccgcttttac

SEQ ID NO: 3276 - DNA, 17 bp, Arabidopsis thaliana
aaagaatccgtgtctgg

SEQ ID NO: 3277 - DNA, 17 bp, Arabidopsis thaliana
aaagaatcgctgtgcgc

SEQ ID NO: 3278 - DNA, 17 bp, Arabidopsis thaliana
aaagaatctacgttagc

SEQ ID NO: 3279 - DNA, 17 bp, Arabidopsis thaliana
aaagaatctgaccatga

SEQ ID NO: 3280 - DNA, 17 bp, Arabidopsis thaliana
aaagaatctgtgcaggt

SEQ ID NO: 3281 - DNA, 17 bp, Arabidopsis thaliana
aaagaatgcctcttcgt

SEQ ID NO: 3282 - DNA, 17 bp, Arabidopsis thaliana
aaagaatgctgaatccg

SEQ ID NO: 3283 - DNA, 17 bp, Arabidopsis thaliana
aaagaatgtcttgagag

SEQ ID NO: 3284 - DNA, 17 bp, Arabidopsis thaliana
aaagaatgtgccactaa

SEQ ID NO: 3285 - DNA, 17 bp, Arabidopsis thaliana
aaagaattcaaggtttg

SEQ ID NO: 3286 - DNA, 17 bp, Arabidopsis thaliana
aaagaattctgtcggcg

SEQ ID NO: 3287 - DNA, 17 bp, Arabidopsis thaliana
aaagaattctgttttgc

SEQ ID NO: 3288 - DNA, 17 bp, Arabidopsis thaliana
aaagaattggccgatca

SEQ ID NO: 3289 - DNA, 17 bp, Arabidopsis thaliana
aaagaattgggacccgg

SEQ ID NO: 3290 - DNA, 17 bp, Arabidopsis thaliana
aaagaatttggggtcca

SEQ ID NO: 3291 - DNA, 17 bp, Arabidopsis thaliana
aaagacaaagtgggctg

SEQ ID NO: 3292 - DNA, 17 bp, Arabidopsis thaliana
aaagacaagtgtcgccg

SEQ ID NO: 3293 - DNA, 17 bp, Arabidopsis thaliana
aaagacaccatcttcat

SEQ ID NO: 3294 - DNA, 17 bp, Arabidopsis thaliana
aaagacagcagatgtac

SEQ ID NO: 3295 - DNA, 17 bp, Arabidopsis thaliana
aaagacagcaggacggt

SEQ ID NO: 3296 - DNA, 17 bp, Arabidopsis thaliana
aaagacagttcatttgt

SEQ ID NO: 3297 - DNA, 17 bp, Arabidopsis thaliana
aaagacatagctggaac

SEQ ID NO: 3298 - DNA, 17 bp, Arabidopsis thaliana
aaagacatcactttgct

SEQ ID NO: 3299 - DNA, 17 bp, Arabidopsis thaliana
aaagacatcagcggtct

SEQ ID NO: 3300 - DNA, 17 bp, Arabidopsis thaliana
aaagacatcatgctgat

SEQ ID NO: 3301 - DNA, 17 bp, Arabidopsis thaliana
aaagacatccgaatgtg

SEQ ID NO: 3302 - DNA, 17 bp, Arabidopsis thaliana
aaagacatccgcagaaa

SEQ ID NO: 3303 - DNA, 17 bp, Arabidopsis thaliana
aaagacatgccatccag

SEQ ID NO: 3304 - DNA, 17 bp, Arabidopsis thaliana
aaagacattggacatat

SEQ ID NO: 3305 - DNA, 17 bp, Arabidopsis thaliana
aaagacattgggttttc

SEQ ID NO: 3306 - DNA, 17 bp, Arabidopsis thaliana
aaagaccaacaacttca

SEQ ID NO: 3307 - DNA, 17 bp, Arabidopsis thaliana
aaagaccaacgtggatc

SEQ ID NO: 3308 - DNA, 17 bp, Arabidopsis thaliana
aaagaccacgaacttgg

SEQ ID NO: 3309 - DNA, 17 bp, Arabidopsis thaliana
aaagaccagacctctga

SEQ ID NO: 3310 - DNA, 17 bp, Arabidopsis thaliana
aaagacccaagtgacag

SEQ ID NO: 3311 - DNA, 17 bp, Arabidopsis thaliana
aaagacccgagcgatct

SEQ ID NO: 3312 - DNA, 17 bp, Arabidopsis thaliana
aaagacccgggttcgat

SEQ ID NO: 3313 - DNA, 17 bp, Arabidopsis thaliana
aaagacccgttttcggt

SEQ ID NO: 3314 - DNA, 17 bp, Arabidopsis thaliana
aaagaccctatgaagct

SEQ ID NO: 3315 - DNA, 17 bp, Arabidopsis thaliana
aaagaccgtcggaatcg

SEQ ID NO: 3316 - DNA, 17 bp, Arabidopsis thaliana
aaagaccgtctgcagtt

SEQ ID NO: 3317 - DNA, 17 bp, Arabidopsis thaliana
aaagaccgtcttgtcat

SEQ ID NO: 3318 - DNA, 17 bp, Arabidopsis thaliana
aaagacgaacggtctac

SEQ ID NO: 3319 - DNA, 17 bp, Arabidopsis thaliana
aaagacgaatcatgagc

SEQ ID NO: 3320 - DNA, 17 bp, Arabidopsis thaliana
aaagacgaccgcaaaat

SEQ ID NO: 3321 - DNA, 17 bp, Arabidopsis thaliana
aaagacgacgatttgtg

SEQ ID NO: 3322 - DNA, 17 bp, Arabidopsis thaliana
aaagacgacggggctgg

SEQ ID NO: 3323 - DNA, 17 bp, Arabidopsis thaliana
aaagacgagtttgggtc

SEQ ID NO: 3324 - DNA, 17 bp, Arabidopsis thaliana
aaagacgatcaacgcag

SEQ ID NO: 3325 - DNA, 17 bp, Arabidopsis thaliana
aaagacgatctacgatg

SEQ ID NO: 3326 - DNA, 17 bp, Arabidopsis thaliana
aaagacgatttgtccgc

SEQ ID NO: 3327 - DNA, 17 bp, Arabidopsis thaliana
aaagacgcagaatgtgg

SEQ ID NO: 3328 - DNA, 17 bp, Arabidopsis thaliana
aaagacgctatgttttt

SEQ ID NO: 3329 - DNA, 17 bp, Arabidopsis thaliana
aaagacgcttctaccga

SEQ ID NO: 3330 - DNA, 17 bp, Arabidopsis thaliana
aaagacggagctctgtt

SEQ ID NO: 3331 - DNA, 17 bp, Arabidopsis thaliana
aaagacggccgcaaaat

SEQ ID NO: 3332 - DNA, 17 bp, Arabidopsis thaliana
aaagacgggtcatcaaa

SEQ ID NO: 3333 - DNA, 17 bp, Arabidopsis thaliana
aaagacggttcgagtga

SEQ ID NO: 3334 - DNA, 17 bp, Arabidopsis thaliana
aaagacggttcgcagtt

SEQ ID NO: 3335 - DNA, 17 bp, Arabidopsis thaliana
aaagacggtttgcagtg

SEQ ID NO: 3336 - DNA, 17 bp, Arabidopsis thaliana
aaagacgtggccagatg

SEQ ID NO: 3337 - DNA, 17 bp, Arabidopsis thaliana
aaagacgtgttgctcga

SEQ ID NO: 3338 - DNA, 17 bp, Arabidopsis thaliana
aaagactaatcgaacca

SEQ ID NO: 3339 - DNA, 17 bp, Arabidopsis thaliana
aaagactacctcttcat

SEQ ID NO: 3340 - DNA, 17 bp, Arabidopsis thaliana
aaagactaggtctatgc

SEQ ID NO: 3341 - DNA, 17 bp, Arabidopsis thaliana
aaagactcaaatggact

SEQ ID NO: 3342 - DNA, 17 bp, Arabidopsis thaliana
aaagactcatacggact

SEQ ID NO: 3343 - DNA, 17 bp, Arabidopsis thaliana
aaagactcatacgtggc

SEQ ID NO: 3344 - DNA, 17 bp, Arabidopsis thaliana
aaagactcatatcgcct

SEQ ID NO: 3345 - DNA, 17 bp, Arabidopsis thaliana
aaagactcatatggact

SEQ ID NO: 3346 - DNA, 17 bp, Arabidopsis thaliana
aaagactccagtcatac

SEQ ID NO: 3347 - DNA, 17 bp, Arabidopsis thaliana
aaagactccgctgccag

SEQ ID NO: 3348 - DNA, 17 bp, Arabidopsis thaliana
aaagactcgatggttca

SEQ ID NO: 3349 - DNA, 17 bp, Arabidopsis thaliana
aaagactcggcattcag

SEQ ID NO: 3350 - DNA, 17 bp, Arabidopsis thaliana
aaagactcggctgatta

SEQ ID NO: 3351 - DNA, 17 bp, Arabidopsis thaliana
aaagactctattttttc

SEQ ID NO: 3352 - DNA, 17 bp, Arabidopsis thaliana
aaagactctcagaatga

SEQ ID NO: 3353 - DNA, 17 bp, Arabidopsis thaliana
aaagactctcggcaaca

SEQ ID NO: 3354 - DNA, 17 bp, Arabidopsis thaliana
aaagactctcggcaacg

SEQ ID NO: 3355 - DNA, 17 bp, Arabidopsis thaliana
aaagactctggtgaaaa

SEQ ID NO: 3356 - DNA, 17 bp, Arabidopsis thaliana
aaagactcttacggacg

SEQ ID NO: 3357 - DNA, 17 bp, Arabidopsis thaliana
aaagactgctcctgctg

SEQ ID NO: 3358 - DNA, 17 bp, Arabidopsis thaliana
aaagactggatagtccg

SEQ ID NO: 3359 - DNA, 17 bp, Arabidopsis thaliana
aaagactggctatcacg

SEQ ID NO: 3360 - DNA, 17 bp, Arabidopsis thaliana
aaagacttcagtcatac

SEQ ID NO: 3361 - DNA, 17 bp, Arabidopsis thaliana
aaagacttcggtcaatc

SEQ ID NO: 3362 - DNA, 17 bp, Arabidopsis thaliana
aaagacttcgtgagcgc

SEQ ID NO: 3363 - DNA, 17 bp, Arabidopsis thaliana
aaagacttcgtgcgttt

SEQ ID NO: 3364 - DNA, 17 bp, Arabidopsis thaliana
aaagacttgttcgtttg

SEQ ID NO: 3365 - DNA, 17 bp, Arabidopsis thaliana
aaagacttttatggccg

SEQ ID NO: 3366 - DNA, 17 bp, Arabidopsis thaliana
aaagagaaccaatcggg

SEQ ID NO: 3367 - DNA, 17 bp, Arabidopsis thaliana
aaagagaactgctctcg

SEQ ID NO: 3368 - DNA, 17 bp, Arabidopsis thaliana
aaagagacaaagtgggc

SEQ ID NO: 3369 - DNA, 17 bp, Arabidopsis thaliana
aaagagacacattctaa

SEQ ID NO: 3370 - DNA, 17 bp, Arabidopsis thaliana
aaagagacacattctat

SEQ ID NO: 3371 - DNA, 17 bp, Arabidopsis thaliana
aaagagaccaccaggaa

SEQ ID NO: 3372 - DNA, 17 bp, Arabidopsis thaliana
aaagagacccgacccaa

SEQ ID NO: 3373 - DNA, 17 bp, Arabidopsis thaliana
aaagagacggcggttaa

SEQ ID NO: 3374 - DNA, 17 bp, Arabidopsis thaliana
aaagagactctgtcaag

SEQ ID NO: 3375 - DNA, 17 bp, Arabidopsis thaliana
aaagagagagaaccttc

SEQ ID NO: 3376 - DNA, 17 bp, Arabidopsis thaliana
aaagagagagagcattt

SEQ ID NO: 3377 - DNA, 17 bp, Arabidopsis thaliana
aaagagagccactgaat

SEQ ID NO: 3378 - DNA, 17 bp, Arabidopsis thaliana
aaagagagggtttgctt

SEQ ID NO: 3379 - DNA, 17 bp, Arabidopsis thaliana
aaagagatctcctctcg

SEQ ID NO: 3380 - DNA, 17 bp, Arabidopsis thaliana
aaagagatctttgcgcc

SEQ ID NO: 3381 - DNA, 17 bp, Arabidopsis thaliana
aaagagatgacggtcca

SEQ ID NO: 3382 - DNA, 17 bp, Arabidopsis thaliana
aaagagatgagaggcga

SEQ ID NO: 3383 - DNA, 17 bp, Arabidopsis thaliana
aaagagattacgggttt

SEQ ID NO: 3384 - DNA, 17 bp, Arabidopsis thaliana
aaagagccctggaaagc

SEQ ID NO: 3385 - DNA, 17 bp, Arabidopsis thaliana
aaagagccgcagttagc

SEQ ID NO: 3386 - DNA, 17 bp, Arabidopsis thaliana
aaagagcctaaatctgt

SEQ ID NO: 3387 - DNA, 17 bp, Arabidopsis thaliana
aaagagcctaagcaact

SEQ ID NO: 3388 - DNA, 17 bp, Arabidopsis thaliana
aaagagcgacggaaaat

SEQ ID NO: 3389 - DNA, 17 bp, Arabidopsis thaliana
aaagagcgacgtttctg

SEQ ID NO: 3390 - DNA, 17 bp, Arabidopsis thaliana
aaagagcgggagaacgg

SEQ ID NO: 3391 - DNA, 17 bp, Arabidopsis thaliana
aaagagcgtagagactc

SEQ ID NO: 3392 - DNA, 17 bp, Arabidopsis thaliana
aaagagcgtctcggcgg

SEQ ID NO: 3393 - DNA, 17 bp, Arabidopsis thaliana
aaagagctgtgttggaa

SEQ ID NO: 3394 - DNA, 17 bp, Arabidopsis thaliana
aaagaggccgccgagat

SEQ ID NO: 3395 - DNA, 17 bp, Arabidopsis thaliana
aaagaggcctagtaaaa

SEQ ID NO: 3396 - DNA, 17 bp, Arabidopsis thaliana
aaagaggcctttcattc

SEQ ID NO: 3397 - DNA, 17 bp, Arabidopsis thaliana
aaagaggcggttgttga

SEQ ID NO: 3398 - DNA, 17 bp, Arabidopsis thaliana
aaagaggctaagagttt

SEQ ID NO: 3399 - DNA, 17 bp, Arabidopsis thaliana
aaagaggctacgaaatt

SEQ ID NO: 3400 - DNA, 17 bp, Arabidopsis thaliana
aaagagggttcccacgg

SEQ ID NO: 3401 - DNA, 17 bp, Arabidopsis thaliana
aaagaggtgtcgtctat

SEQ ID NO: 3402 - DNA, 17 bp, Arabidopsis thaliana
aaagaggttccactgca

SEQ ID NO: 3403 - DNA, 17 bp, Arabidopsis thaliana
aaagagtcaccggttgc

SEQ ID NO: 3404 - DNA, 17 bp, Arabidopsis thaliana
aaagagtcgcagcgata

SEQ ID NO: 3405 - DNA, 17 bp, Arabidopsis thaliana
aaagagtcggcgtcgac

SEQ ID NO: 3406 - DNA, 17 bp, Arabidopsis thaliana
aaagagtggctcttgga

SEQ ID NO: 3407 - DNA, 17 bp, Arabidopsis thaliana
aaagagtgtggtctgac

SEQ ID NO: 3408 - DNA, 17 bp, Arabidopsis thaliana
aaagagttacgtccact

SEQ ID NO: 3409 - DNA, 17 bp, Arabidopsis thaliana
aaagagttacttcgctg

SEQ ID NO: 3410 - DNA, 17 bp, Arabidopsis thaliana
aaagagttccaccgacc

SEQ ID NO: 3411 - DNA, 17 bp, Arabidopsis thaliana
aaagagttttcgcacgc

SEQ ID NO: 3412 - DNA, 17 bp, Arabidopsis thaliana
aaagataaatggcagta

SEQ ID NO: 3413 - DNA, 17 bp, Arabidopsis thaliana
aaagataacgcaggtgt

SEQ ID NO: 3414 - DNA, 17 bp, Arabidopsis thaliana
aaagataagcagtaggt

SEQ ID NO: 3415 - DNA, 17 bp, Arabidopsis thaliana
aaagataagtttcgccg

SEQ ID NO: 3416 - DNA, 17 bp, Arabidopsis thaliana
aaagatacctggtgcct

SEQ ID NO: 3417 - DNA, 17 bp, Arabidopsis thaliana
aaagataccttgtgcct

SEQ ID NO: 3418 - DNA, 17 bp, Arabidopsis thaliana
aaagatactcggtctcg

SEQ ID NO: 3419 - DNA, 17 bp, Arabidopsis thaliana
aaagatactgggtcttc

SEQ ID NO: 3420 - DNA, 17 bp, Arabidopsis thaliana
aaagatagcaagtcctc

SEQ ID NO: 3421 - DNA, 17 bp, Arabidopsis thaliana
aaagatagccatgacga

SEQ ID NO: 3422 - DNA, 17 bp, Arabidopsis thaliana
aaagatagtttgcagtt

SEQ ID NO: 3423 - DNA, 17 bp, Arabidopsis thaliana
aaagatatcaaaggagc

SEQ ID NO: 3424 - DNA, 17 bp, Arabidopsis thaliana
aaagatatcgttgacca

SEQ ID NO: 3425 - DNA, 17 bp, Arabidopsis thaliana
aaagatatcgttgacta

SEQ ID NO: 3426 - DNA, 17 bp, Arabidopsis thaliana
aaagatatctccgggcg

SEQ ID NO: 3427 - DNA, 17 bp, Arabidopsis thaliana
aaagatatgtgcacttt

SEQ ID NO: 3428 - DNA, 17 bp, Arabidopsis thaliana
aaagatccctcccaacc

SEQ ID NO: 3429 - DNA, 17 bp, Arabidopsis thaliana
aaagatcgcacctcctg

SEQ ID NO: 3430 - DNA, 17 bp, Arabidopsis thaliana
aaagatcgcttgttttg

SEQ ID NO: 3431 - DNA, 17 bp, Arabidopsis thaliana
aaagatcggtcctcccg

SEQ ID NO: 3432 - DNA, 17 bp, Arabidopsis thaliana
aaagatcgtcgattcgg

SEQ ID NO: 3433 - DNA, 17 bp, Arabidopsis thaliana
aaagatcgtcggttcga

SEQ ID NO: 3434 - DNA, 17 bp, Arabidopsis thaliana
aaagatcgtctagcaga

SEQ ID NO: 3435 - DNA, 17 bp, Arabidopsis thaliana
aaagatctgagccatcc

SEQ ID NO: 3436 - DNA, 17 bp, Arabidopsis thaliana
aaagatctgtcttcttc

SEQ ID NO: 3437 - DNA, 17 bp, Arabidopsis thaliana
aaagatcttggaaagca

SEQ ID NO: 3438 - DNA, 17 bp, Arabidopsis thaliana
aaagatgagcaagagcg

SEQ ID NO: 3439 - DNA, 17 bp, Arabidopsis thaliana
aaagatgatgatctcgg

SEQ ID NO: 3440 - DNA, 17 bp, Arabidopsis thaliana
aaagatgattcaggcca

SEQ ID NO: 3441 - DNA, 17 bp, Arabidopsis thaliana
aaagatgattgtttgta

SEQ ID NO: 3442 - DNA, 17 bp, Arabidopsis thaliana
aaagatggatccgtggg

SEQ ID NO: 3443 - DNA, 17 bp, Arabidopsis thaliana
aaagatggcatgatgcc

SEQ ID NO: 3444 - DNA, 17 bp, Arabidopsis thaliana
aaagatggccgcaaaat

SEQ ID NO: 3445 - DNA, 17 bp, Arabidopsis thaliana
aaagatggctccagcct

SEQ ID NO: 3446 - DNA, 17 bp, Arabidopsis thaliana
aaagatggctcgtgttt

SEQ ID NO: 3447 - DNA, 17 bp, Arabidopsis thaliana
aaagatggtgaactata

SEQ ID NO: 3448 - DNA, 17 bp, Arabidopsis thaliana
aaagatggtgaactatg

SEQ ID NO: 3449 - DNA, 17 bp, Arabidopsis thaliana
aaagatgtatctggaca

SEQ ID NO: 3450 - DNA, 17 bp, Arabidopsis thaliana
aaagatgtcagagatga

SEQ ID NO: 3451 - DNA, 17 bp, Arabidopsis thaliana
aaagatgtccaacttgt

SEQ ID NO: 3452 - DNA, 17 bp, Arabidopsis thaliana
aaagatgtggcagccat

SEQ ID NO: 3453 - DNA, 17 bp, Arabidopsis thaliana
aaagatgtgtgctctcg

SEQ ID NO: 3454 - DNA, 17 bp, Arabidopsis thaliana
aaagattaagggtctcg

SEQ ID NO: 3455 - DNA, 17 bp, Arabidopsis thaliana
aaagattacatagtgag

SEQ ID NO: 3456 - DNA, 17 bp, Arabidopsis thaliana
aaagattacgggtttcg

SEQ ID NO: 3457 - DNA, 17 bp, Arabidopsis thaliana
aaagattactcaaattt

SEQ ID NO: 3458 - DNA, 17 bp, Arabidopsis thaliana
aaagattagggattgag

SEQ ID NO: 3459 - DNA, 17 bp, Arabidopsis thaliana
aaagattcaccgattca

SEQ ID NO: 3460 - DNA, 17 bp, Arabidopsis thaliana
aaagattccatcgattt

SEQ ID NO: 3461 - DNA, 17 bp, Arabidopsis thaliana
aaagattcccggtcgtg

SEQ ID NO: 3462 - DNA, 17 bp, Arabidopsis thaliana
aaagattccgacaactc

SEQ ID NO: 3463 - DNA, 17 bp, Arabidopsis thaliana
aaagattccgtctttcc

SEQ ID NO: 3464 - DNA, 17 bp, Arabidopsis thaliana
aaagattcctacggtcc

SEQ ID NO: 3465 - DNA, 17 bp, Arabidopsis thaliana
aaagattcctattagct

SEQ ID NO: 3466 - DNA, 17 bp, Arabidopsis thaliana
aaagattcgcggaatcg

SEQ ID NO: 3467 - DNA, 17 bp, Arabidopsis thaliana
aaagattcgggtggata

SEQ ID NO: 3468 - DNA, 17 bp, Arabidopsis thaliana
aaagattctctagtccg

SEQ ID NO: 3469 - DNA, 17 bp, Arabidopsis thaliana
aaagattctgcaagcga

SEQ ID NO: 3470 - DNA, 17 bp, Arabidopsis thaliana
aaagattctgcaagcgg

SEQ ID NO: 3471 - DNA, 17 bp, Arabidopsis thaliana
aaagattctgcttcaag

SEQ ID NO: 3472 - DNA, 17 bp, Arabidopsis thaliana
aaagattgattcgcctg

SEQ ID NO: 3473 - DNA, 17 bp, Arabidopsis thaliana
aaagattgcacggattc

SEQ ID NO: 3474 - DNA, 17 bp, Arabidopsis thaliana
aaagattgccaagattt

SEQ ID NO: 3475 - DNA, 17 bp, Arabidopsis thaliana
aaagattggagatgctg

SEQ ID NO: 3476 - DNA, 17 bp, Arabidopsis thaliana
aaagattgggctgcttc

SEQ ID NO: 3477 - DNA, 17 bp, Arabidopsis thaliana
aaagattgtctgccaga

SEQ ID NO: 3478 - DNA, 17 bp, Arabidopsis thaliana
aaagattgtgatgttga

SEQ ID NO: 3479 - DNA, 17 bp, Arabidopsis thaliana
aaagattgtgcgcgtag

SEQ ID NO: 3480 - DNA, 17 bp, Arabidopsis thaliana
aaagattgtgcggtcac

SEQ ID NO: 3481 - DNA, 17 bp, Arabidopsis thaliana
aaagattgttacgctcg

SEQ ID NO: 3482 - DNA, 17 bp, Arabidopsis thaliana
aaagattgttccagttg

SEQ ID NO: 3483 - DNA, 17 bp, Arabidopsis thaliana
aaagatttacgcgtctg

SEQ ID NO: 3484 - DNA, 17 bp, Arabidopsis thaliana
aaagatttagggatgaa

SEQ ID NO: 3485 - DNA, 17 bp, Arabidopsis thaliana
aaagatttgccagacag

SEQ ID NO: 3486 - DNA, 17 bp, Arabidopsis thaliana
aaagatttggctctgat

SEQ ID NO: 3487 - DNA, 17 bp, Arabidopsis thaliana
aaagatttgggccagaa

SEQ ID NO: 3488 - DNA, 17 bp, Arabidopsis thaliana
aaagattttccgcctta

SEQ ID NO: 3489 - DNA, 17 bp, Arabidopsis thaliana
aaagatttttggcttga

SEQ ID NO: 3490 - DNA, 17 bp, Arabidopsis thaliana
aaagatttttggcttgt

SEQ ID NO: 3491 - DNA, 17 bp, Arabidopsis thaliana
aaagcaaaataaccgaa

SEQ ID NO: 3492 - DNA, 17 bp, Arabidopsis thaliana
aaagcaaagaggttcca

SEQ ID NO: 3493 - DNA, 17 bp, Arabidopsis thaliana
aaagcaaagccctctcg

SEQ ID NO: 3494 - DNA, 17 bp, Arabidopsis thaliana
aaagcaaaggcccataa

SEQ ID NO: 3495 - DNA, 17 bp, Arabidopsis thaliana
aaagcaactgtctttcc

SEQ ID NO: 3496 - DNA, 17 bp, Arabidopsis thaliana
aaagcaagcctacgctc

SEQ ID NO: 3497 - DNA, 17 bp, Arabidopsis thaliana
aaagcaaggactatctt

SEQ ID NO: 3498 - DNA, 17 bp, Arabidopsis thaliana
aaagcaaggtgattgag

SEQ ID NO: 3499 - DNA, 17 bp, Arabidopsis thaliana
aaagcaagtcccccgaa

SEQ ID NO: 3500 - DNA, 17 bp, Arabidopsis thaliana
aaagcaagtccgactag

SEQ ID NO: 3501 - DNA, 17 bp, Arabidopsis thaliana
aaagcacacatcttcgt

SEQ ID NO: 3502 - DNA, 17 bp, Arabidopsis thaliana
aaagcacaggtcctagt

SEQ ID NO: 3503 - DNA, 17 bp, Arabidopsis thaliana
aaagcacattgagatcg

SEQ ID NO: 3504 - DNA, 17 bp, Arabidopsis thaliana
aaagcaccacgaggcgc

SEQ ID NO: 3505 - DNA, 17 bp, Arabidopsis thaliana
aaagcaccagttccggg

SEQ ID NO: 3506 - DNA, 17 bp, Arabidopsis thaliana
aaagcacgacttcctac

SEQ ID NO: 3507 - DNA, 17 bp, Arabidopsis thaliana
aaagcacgagcaacgaa

SEQ ID NO: 3508 - DNA, 17 bp, Arabidopsis thaliana
aaagcacggctcaggtg

SEQ ID NO: 3509 - DNA, 17 bp, Arabidopsis thaliana
aaagcacgtctgcctgg

SEQ ID NO: 3510 - DNA, 17 bp, Arabidopsis thaliana
aaagcactctgctgggc

SEQ ID NO: 3511 - DNA, 17 bp, Arabidopsis thaliana
aaagcactttcagggtt

SEQ ID NO: 3512 - DNA, 17 bp, Arabidopsis thaliana
aaagcagaaggactcga

SEQ ID NO: 3513 - DNA, 17 bp, Arabidopsis thaliana
aaagcagagactgcctg

SEQ ID NO: 3514 - DNA, 17 bp, Arabidopsis thaliana
aaagcagagatgagttc

SEQ ID NO: 3515 - DNA, 17 bp, Arabidopsis thaliana
aaagcagataaaatgtc

SEQ ID NO: 3516 - DNA, 17 bp, Arabidopsis thaliana
aaagcagatgtcgaaag

SEQ ID NO: 3517 - DNA, 17 bp, Arabidopsis thaliana
aaagcagcacataggcg

SEQ ID NO: 3518 - DNA, 17 bp, Arabidopsis thaliana
aaagcagcacatgggcg

SEQ ID NO: 3519 - DNA, 17 bp, Arabidopsis thaliana
aaagcagcggcggtggc

SEQ ID NO: 3520 - DNA, 17 bp, Arabidopsis thaliana
aaagcagcggctgtgtc

SEQ ID NO: 3521 - DNA, 17 bp, Arabidopsis thaliana
aaagcagctgtttcagc

SEQ ID NO: 3522 - DNA, 17 bp, Arabidopsis thaliana
aaagcaggattcagggt

SEQ ID NO: 3523 - DNA, 17 bp, Arabidopsis thaliana
aaagcaggttatgagat

SEQ ID NO: 3524 - DNA, 17 bp, Arabidopsis thaliana
aaagcagtcaggccctg

SEQ ID NO: 3525 - DNA, 17 bp, Arabidopsis thaliana
aaagcagtcttgcgaac

SEQ ID NO: 3526 - DNA, 17 bp, Arabidopsis thaliana
aaagcagtgatcgctgt

SEQ ID NO: 3527 - DNA, 17 bp, Arabidopsis thaliana
aaagcagtgccaaaatc

SEQ ID NO: 3528 - DNA, 17 bp, Arabidopsis thaliana
aaagcagtgtagcggtc

SEQ ID NO: 3529 - DNA, 17 bp, Arabidopsis thaliana
aaagcagtgtcttggag

SEQ ID NO: 3530 - DNA, 17 bp, Arabidopsis thaliana
aaagcagttggtgatgt

SEQ ID NO: 3531 - DNA, 17 bp, Arabidopsis thaliana
aaagcataaactctgga

SEQ ID NO: 3532 - DNA, 17 bp, Arabidopsis thaliana
aaagcatgaactctgga

SEQ ID NO: 3533 - DNA, 17 bp, Arabidopsis thaliana
aaagcatggattgttgc

SEQ ID NO: 3534 - DNA, 17 bp, Arabidopsis thaliana
aaagcatgtgcggttta

SEQ ID NO: 3535 - DNA, 17 bp, Arabidopsis thaliana
aaagcatgttaggttga

SEQ ID NO: 3536 - DNA, 17 bp, Arabidopsis thaliana
aaagcattccaaactcg

SEQ ID NO: 3537 - DNA, 17 bp, Arabidopsis thaliana
aaagcattctaggtctt

SEQ ID NO: 3538 - DNA, 17 bp, Arabidopsis thaliana
aaagcattcttctacaa

SEQ ID NO: 3539 - DNA, 17 bp, Arabidopsis thaliana
aaagcattgcgatggtc

SEQ ID NO: 3540 - DNA, 17 bp, Arabidopsis thaliana
aaagcattggttgtggc

SEQ ID NO: 3541 - DNA, 17 bp, Arabidopsis thaliana
aaagcatttcagtgtgt

SEQ ID NO: 3542 - DNA, 17 bp, Arabidopsis thaliana
aaagcatttgccaagga

SEQ ID NO: 3543 - DNA, 17 bp, Arabidopsis thaliana
aaagccaaaacgctccc

SEQ ID NO: 3544 - DNA, 17 bp, Arabidopsis thaliana
aaagccaaaacgctctc

SEQ ID NO: 3545 - DNA, 17 bp, Arabidopsis thaliana
aaagccaaacccgctag

SEQ ID NO: 3546 - DNA, 17 bp, Arabidopsis thaliana
aaagccaaccaataatg

SEQ ID NO: 3547 - DNA, 17 bp, Arabidopsis thaliana
aaagccaacgactcaca

SEQ ID NO: 3548 - DNA, 17 bp, Arabidopsis thaliana
aaagccacagtgtctct

SEQ ID NO: 3549 - DNA, 17 bp, Arabidopsis thaliana
aaagccaccatttgtgt

SEQ ID NO: 3550 - DNA, 17 bp, Arabidopsis thaliana
aaagccacggaagcctc

SEQ ID NO: 3551 - DNA, 17 bp, Arabidopsis thaliana
aaagccacgtctgtcag

SEQ ID NO: 3552 - DNA, 17 bp, Arabidopsis thaliana
aaagccactaaggatca

SEQ ID NO: 3553 - DNA, 17 bp, Arabidopsis thaliana
aaagccactacatccgg

SEQ ID NO: 3554 - DNA, 17 bp, Arabidopsis thaliana
aaagccactacatctgg

SEQ ID NO: 3555 - DNA, 17 bp, Arabidopsis thaliana
aaagccactcaggagag

SEQ ID NO: 3556 - DNA, 17 bp, Arabidopsis thaliana
aaagccagattaatttg

SEQ ID NO: 3557 - DNA, 17 bp, Arabidopsis thaliana
aaagccagcttctccat

SEQ ID NO: 3558 - DNA, 17 bp, Arabidopsis thaliana
aaagccataataaacgt

SEQ ID NO: 3559 - DNA, 17 bp, Arabidopsis thaliana
aaagccatagccagtga

SEQ ID NO: 3560 - DNA, 17 bp, Arabidopsis thaliana
aaagccatagtcagtga

SEQ ID NO: 3561 - DNA, 17 bp, Arabidopsis thaliana
aaagccatcatctcgag

SEQ ID NO: 3562 - DNA, 17 bp, Arabidopsis thaliana
aaagccatccggacgtg

SEQ ID NO: 3563 - DNA, 17 bp, Arabidopsis thaliana
aaagccatccgtccttc

SEQ ID NO: 3564 - DNA, 17 bp, Arabidopsis thaliana
aaagccatctacgccgg

SEQ ID NO: 3565 - DNA, 17 bp, Arabidopsis thaliana
aaagcccaaactttgac

SEQ ID NO: 3566 - DNA, 17 bp, Arabidopsis thaliana
aaagcccaaagacagcc

SEQ ID NO: 3567 - DNA, 17 bp, Arabidopsis thaliana
aaagcccaaagacagct

SEQ ID NO: 3568 - DNA, 17 bp, Arabidopsis thaliana
aaagcccaaagacagtc

SEQ ID NO: 3569 - DNA, 17 bp, Arabidopsis thaliana
aaagcccaaagagagcc

SEQ ID NO: 3570 - DNA, 17 bp, Arabidopsis thaliana
aaagcccaaagatagcc

SEQ ID NO: 3571 - DNA, 17 bp, Arabidopsis thaliana
aaagcccaaaggccgag

SEQ ID NO: 3572 - DNA, 17 bp, Arabidopsis thaliana
aaagcccaactgacaga

SEQ ID NO: 3573 - DNA, 17 bp, Arabidopsis thaliana
aaagcccaatgcttgtg

SEQ ID NO: 3574 - DNA, 17 bp, Arabidopsis thaliana
aaagcccaatggtcatg

SEQ ID NO: 3575 - DNA, 17 bp, Arabidopsis thaliana
aaagcccactgcggggc

SEQ ID NO: 3576 - DNA, 17 bp, Arabidopsis thaliana
aaagcccagagcgcaag

SEQ ID NO: 3577 - DNA, 17 bp, Arabidopsis thaliana
aaagcccagcggatata

SEQ ID NO: 3578 - DNA, 17 bp, Arabidopsis thaliana
aaagcccatccttcttg

SEQ ID NO: 3579 - DNA, 17 bp, Arabidopsis thaliana
aaagcccatctatttag

SEQ ID NO: 3580 - DNA, 17 bp, Arabidopsis thaliana
aaagcccgcgggctagc

SEQ ID NO: 3581 - DNA, 17 bp, Arabidopsis thaliana
aaagcccgtaacaattt

SEQ ID NO: 3582 - DNA, 17 bp, Arabidopsis thaliana
aaagccgacagagccga

SEQ ID NO: 3583 - DNA, 17 bp, Arabidopsis thaliana
aaagccgaccaccgatg

SEQ ID NO: 3584 - DNA, 17 bp, Arabidopsis thaliana
aaagccgacggacggac

SEQ ID NO: 3585 - DNA, 17 bp, Arabidopsis thaliana
aaagccgagagccgtgt

SEQ ID NO: 3586 - DNA, 17 bp, Arabidopsis thaliana
aaagccgagccgtggtg

SEQ ID NO: 3587 - DNA, 17 bp, Arabidopsis thaliana
aaagccgagggcacgtc

SEQ ID NO: 3588 - DNA, 17 bp, Arabidopsis thaliana
aaagccgccaaaagagc

SEQ ID NO: 3589 - DNA, 17 bp, Arabidopsis thaliana
aaagccgcgttctatgg

SEQ ID NO: 3590 - DNA, 17 bp, Arabidopsis thaliana
aaagccgctcgagtgac

SEQ ID NO: 3591 - DNA, 17 bp, Arabidopsis thaliana
aaagccgctggggcagc

SEQ ID NO: 3592 - DNA, 17 bp, Arabidopsis thaliana
aaagccgtcagactcac

SEQ ID NO: 3593 - DNA, 17 bp, Arabidopsis thaliana
aaagccgtcagattcag

SEQ ID NO: 3594 - DNA, 17 bp, Arabidopsis thaliana
aaagccgtccacatagg

SEQ ID NO: 3595 - DNA, 17 bp, Arabidopsis thaliana
aaagccgttcgatttcg

SEQ ID NO: 3596 - DNA, 17 bp, Arabidopsis thaliana
aaagcctaacttgtgtt

SEQ ID NO: 3597 - DNA, 17 bp, Arabidopsis thaliana
aaagcctaagcagtgtt

SEQ ID NO: 3598 - DNA, 17 bp, Arabidopsis thaliana
aaagcctaagtagagtt

SEQ ID NO: 3599 - DNA, 17 bp, Arabidopsis thaliana
aaagcctaatgacgggt

SEQ ID NO: 3600 - DNA, 17 bp, Arabidopsis thaliana
aaagcctatggggtcgc

SEQ ID NO: 3601 - DNA, 17 bp, Arabidopsis thaliana
aaagcctcccggacgtg

SEQ ID NO: 3602 - DNA, 17 bp, Arabidopsis thaliana
aaagcctccttggttca

SEQ ID NO: 3603 - DNA, 17 bp, Arabidopsis thaliana
aaagcctctgacgctgc

SEQ ID NO: 3604 - DNA, 17 bp, Arabidopsis thaliana
aaagcctctggtcattg

SEQ ID NO: 3605 - DNA, 17 bp, Arabidopsis thaliana
aaagcctcttccaatca

SEQ ID NO: 3606 - DNA, 17 bp, Arabidopsis thaliana
aaagcctcttcttcacg

SEQ ID NO: 3607 - DNA, 17 bp, Arabidopsis thaliana
aaagcctcttggacatg

SEQ ID NO: 3608 - DNA, 17 bp, Arabidopsis thaliana
aaagcctgacgagcaat

SEQ ID NO: 3609 - DNA, 17 bp, Arabidopsis thaliana
aaagcctgcctcgttgc

SEQ ID NO: 3610 - DNA, 17 bp, Arabidopsis thaliana
aaagcctggaaaaatta

SEQ ID NO: 3611 - DNA, 17 bp, Arabidopsis thaliana
aaagccttcatcggaga

SEQ ID NO: 3612 - DNA, 17 bp, Arabidopsis thaliana
aaagccttcctcgctat

SEQ ID NO: 3613 - DNA, 17 bp, Arabidopsis thaliana
aaagccttgtgcaatca

SEQ ID NO: 3614 - DNA, 17 bp, Arabidopsis thaliana
aaagccttgtgcgacga

SEQ ID NO: 3615 - DNA, 17 bp, Arabidopsis thaliana
aaagcctttctgactcg

SEQ ID NO: 3616 - DNA, 17 bp, Arabidopsis thaliana
aaagcgaagaaccttac

SEQ ID NO: 3617 - DNA, 17 bp, Arabidopsis thaliana
aaagcgacaccgtttaa

SEQ ID NO: 3618 - DNA, 17 bp, Arabidopsis thaliana
aaagcgacctgccagtt

SEQ ID NO: 3619 - DNA, 17 bp, Arabidopsis thaliana
aaagcgacggtaaccgg

SEQ ID NO: 3620 - DNA, 17 bp, Arabidopsis thaliana
aaagcgacggttcggtc

SEQ ID NO: 3621 - DNA, 17 bp, Arabidopsis thaliana
aaagcgactcattgtta

SEQ ID NO: 3622 - DNA, 17 bp, Arabidopsis thaliana
aaagcgactctcactgg

SEQ ID NO: 3623 - DNA, 17 bp, Arabidopsis thaliana
aaagcgactgttttgtg

SEQ ID NO: 3624 - DNA, 17 bp, Arabidopsis thaliana
aaagcgagaccatagat

SEQ ID NO: 3625 - DNA, 17 bp, Arabidopsis thaliana
aaagcgagagatcccgg

SEQ ID NO: 3626 - DNA, 17 bp, Arabidopsis thaliana
aaagcgagtcttcatag

SEQ ID NO: 3627 - DNA, 17 bp, Arabidopsis thaliana
aaagcgatatctagcgg

SEQ ID NO: 3628 - DNA, 17 bp, Arabidopsis thaliana
aaagcgatccaaagact

SEQ ID NO: 3629 - DNA, 17 bp, Arabidopsis thaliana
aaagcgctgtggagact

SEQ ID NO: 3630 - DNA, 17 bp, Arabidopsis thaliana
aaagcggattcaaatat

SEQ ID NO: 3631 - DNA, 17 bp, Arabidopsis thaliana
aaagcggcaggccgtgg

SEQ ID NO: 3632 - DNA, 17 bp, Arabidopsis thaliana
aaagcggcgcagcagag

SEQ ID NO: 3633 - DNA, 17 bp, Arabidopsis thaliana
aaagcggcgcagccaga

SEQ ID NO: 3634 - DNA, 17 bp, Arabidopsis thaliana
aaagcggctatcggttg

SEQ ID NO: 3635 - DNA, 17 bp, Arabidopsis thaliana
aaagcggctcaccctct

SEQ ID NO: 3636 - DNA, 17 bp, Arabidopsis thaliana
aaagcggctcgactctt

SEQ ID NO: 3637 - DNA, 17 bp, Arabidopsis thaliana
aaagcggcttttctggt

SEQ ID NO: 3638 - DNA, 17 bp, Arabidopsis thaliana
aaagcgggatgtccatg

SEQ ID NO: 3639 - DNA, 17 bp, Arabidopsis thaliana
aaagcgggccattcctc

SEQ ID NO: 3640 - DNA, 17 bp, Arabidopsis thaliana
aaagcgggccattcttc

SEQ ID NO: 3641 - DNA, 17 bp, Arabidopsis thaliana
aaagcgggctacgatat

SEQ ID NO: 3642 - DNA, 17 bp, Arabidopsis thaliana
aaagcgggctgtccatg

SEQ ID NO: 3643 - DNA, 17 bp, Arabidopsis thaliana
aaagcgggctgtctatg

SEQ ID NO: 3644 - DNA, 17 bp, Arabidopsis thaliana
aaagcgggtcatcttct

SEQ ID NO: 3645 - DNA, 17 bp, Arabidopsis thaliana
aaagcgggtcattcttc

SEQ ID NO: 3646 - DNA, 17 bp, Arabidopsis thaliana
aaagcggtatgtggttg

SEQ ID NO: 3647 - DNA, 17 bp, Arabidopsis thaliana
aaagcggtctaatttat

SEQ ID NO: 3648 - DNA, 17 bp, Arabidopsis thaliana
aaagcggtctaatttgt

SEQ ID NO: 3649 - DNA, 17 bp, Arabidopsis thaliana
aaagcggtctaattttt

SEQ ID NO: 3650 - DNA, 17 bp, Arabidopsis thaliana
aaagcggtgcggttttc

SEQ ID NO: 3651 - DNA, 17 bp, Arabidopsis thaliana
aaagcggttgtgtgact

SEQ ID NO: 3652 - DNA, 17 bp, Arabidopsis thaliana
aaagcgtcacggatctc

SEQ ID NO: 3653 - DNA, 17 bp, Arabidopsis thaliana
aaagcgtcactcgaacc

SEQ ID NO: 3654 - DNA, 17 bp, Arabidopsis thaliana
aaagcgtcctccaggca

SEQ ID NO: 3655 - DNA, 17 bp, Arabidopsis thaliana
aaagcgtcgggtctaag

SEQ ID NO: 3656 - DNA, 17 bp, Arabidopsis thaliana
aaagcgtcgtgctgcta

SEQ ID NO: 3657 - DNA, 17 bp, Arabidopsis thaliana
aaagcgtctggctctgt

SEQ ID NO: 3658 - DNA, 17 bp, Arabidopsis thaliana
aaagcgtctgtaggcgg

SEQ ID NO: 3659 - DNA, 17 bp, Arabidopsis thaliana
aaagcgtctgtaggtgg

SEQ ID NO: 3660 - DNA, 17 bp, Arabidopsis thaliana
aaagcgtctttggatcc

SEQ ID NO: 3661 - DNA, 17 bp, Arabidopsis thaliana
aaagcgtgaaggtgaaa

SEQ ID NO: 3662 - DNA, 17 bp, Arabidopsis thaliana
aaagcgtgctccgggcg

SEQ ID NO: 3663 - DNA, 17 bp, Arabidopsis thaliana
aaagcgtgtctgtttgc

SEQ ID NO: 3664 - DNA, 17 bp, Arabidopsis thaliana
aaagcgttattacagtg

SEQ ID NO: 3665 - DNA, 17 bp, Arabidopsis thaliana
aaagcgttattgtagtg

SEQ ID NO: 3666 - DNA, 17 bp, Arabidopsis thaliana
aaagcgttctaaccgtt

SEQ ID NO: 3667 - DNA, 17 bp, Arabidopsis thaliana
aaagcgtttgcgggagt

SEQ ID NO: 3668 - DNA, 17 bp, Arabidopsis thaliana
aaagcgtttgcggttgc

SEQ ID NO: 3669 - DNA, 17 bp, Arabidopsis thaliana
aaagctaaagactttta

SEQ ID NO: 3670 - DNA, 17 bp, Arabidopsis thaliana
aaagctaagttcccttt

SEQ ID NO: 3671 - DNA, 17 bp, Arabidopsis thaliana
aaagctacagcacgatt

SEQ ID NO: 3672 - DNA, 17 bp, Arabidopsis thaliana
aaagctacgacgctata

SEQ ID NO: 3673 - DNA, 17 bp, Arabidopsis thaliana
aaagctacgtctctctc

SEQ ID NO: 3674 - DNA, 17 bp, Arabidopsis thaliana
aaagctacgtcttggtt

SEQ ID NO: 3675 - DNA, 17 bp, Arabidopsis thaliana
aaagctacgttctggtt

SEQ ID NO: 3676 - DNA, 17 bp, Arabidopsis thaliana
aaagctactggatctga

SEQ ID NO: 3677 - DNA, 17 bp, Arabidopsis thaliana
aaagctactggcagctt

SEQ ID NO: 3678 - DNA, 17 bp, Arabidopsis thaliana
aaagctacttcttggtt

SEQ ID NO: 3679 - DNA, 17 bp, Arabidopsis thaliana
aaagctacttggttgtc

SEQ ID NO: 3680 - DNA, 17 bp, Arabidopsis thaliana
aaagctagctcaagagt

SEQ ID NO: 3681 - DNA, 17 bp, Arabidopsis thaliana
aaagctagtggcagtca

SEQ ID NO: 3682 - DNA, 17 bp, Arabidopsis thaliana
aaagctagttttggtcg

SEQ ID NO: 3683 - DNA, 17 bp, Arabidopsis thaliana
aaagctattgccgactt

SEQ ID NO: 3684 - DNA, 17 bp, Arabidopsis thaliana
aaagctcaaaatttggg

SEQ ID NO: 3685 - DNA, 17 bp, Arabidopsis thaliana
aaagctcacatagacct

SEQ ID NO: 3686 - DNA, 17 bp, Arabidopsis thaliana
aaagctcacgatgatgt

SEQ ID NO: 3687 - DNA, 17 bp, Arabidopsis thaliana
aaagctcagaccgtata

SEQ ID NO: 3688 - DNA, 17 bp, Arabidopsis thaliana
aaagctcagccctaagt

SEQ ID NO: 3689 - DNA, 17 bp, Arabidopsis thaliana
aaagctcaggagggata

SEQ ID NO: 3690 - DNA, 17 bp, Arabidopsis thaliana
aaagctcaggccgtagg

SEQ ID NO: 3691 - DNA, 17 bp, Arabidopsis thaliana
aaagctcaggctgcccg

SEQ ID NO: 3692 - DNA, 17 bp, Arabidopsis thaliana
aaagctcaggctgcgcg

SEQ ID NO: 3693 - DNA, 17 bp, Arabidopsis thaliana
aaagctcatctccatac

SEQ ID NO: 3694 - DNA, 17 bp, Arabidopsis thaliana
aaagctccaagtcccag

SEQ ID NO: 3695 - DNA, 17 bp, Arabidopsis thaliana
aaagctccagtttcaaa

SEQ ID NO: 3696 - DNA, 17 bp, Arabidopsis thaliana
aaagctcccaagggtgt

SEQ ID NO: 3697 - DNA, 17 bp, Arabidopsis thaliana
aaagctccgaagctgtg

SEQ ID NO: 3698 - DNA, 17 bp, Arabidopsis thaliana
aaagctccgaatggtga

SEQ ID NO: 3699 - DNA, 17 bp, Arabidopsis thaliana
aaagctccgtaatttga

SEQ ID NO: 3700 - DNA, 17 bp, Arabidopsis thaliana
aaagctccttgtgactg

SEQ ID NO: 3701 - DNA, 17 bp, Arabidopsis thaliana
aaagctcggctctctga

SEQ ID NO: 3702 - DNA, 17 bp, Arabidopsis thaliana
aaagctcggcttgttgc

SEQ ID NO: 3703 - DNA, 17 bp, Arabidopsis thaliana
aaagctcgggttcgtaa

SEQ ID NO: 3704 - DNA, 17 bp, Arabidopsis thaliana
aaagctcgtagttgaat

SEQ ID NO: 3705 - DNA, 17 bp, Arabidopsis thaliana
aaagctcgtttgattct

SEQ ID NO: 3706 - DNA, 17 bp, Arabidopsis thaliana
aaagctctccattgcca

SEQ ID NO: 3707 - DNA, 17 bp, Arabidopsis thaliana
aaagctctgactgtgac

SEQ ID NO: 3708 - DNA, 17 bp, Arabidopsis thaliana
aaagctctgtcagacca

SEQ ID NO: 3709 - DNA, 17 bp, Arabidopsis thaliana
aaagctctgtgctgctt

SEQ ID NO: 3710 - DNA, 17 bp, Arabidopsis thaliana
aaagctgacacctgtcc

SEQ ID NO: 3711 - DNA, 17 bp, Arabidopsis thaliana
aaagctgaccagagtcc

SEQ ID NO: 3712 - DNA, 17 bp, Arabidopsis thaliana
aaagctgaccctgattc

SEQ ID NO: 3713 - DNA, 17 bp, Arabidopsis thaliana
aaagctgacggatcatg

SEQ ID NO: 3714 - DNA, 17 bp, Arabidopsis thaliana
aaagctgagacccaacg

SEQ ID NO: 3715 - DNA, 17 bp, Arabidopsis thaliana
aaagctgagaggatgtg

SEQ ID NO: 3716 - DNA, 17 bp, Arabidopsis thaliana
aaagctgcaagagattg

SEQ ID NO: 3717 - DNA, 17 bp, Arabidopsis thaliana
aaagctgcgagtcctgg

SEQ ID NO: 3718 - DNA, 17 bp, Arabidopsis thaliana
aaagctgctaactcatc

SEQ ID NO: 3719 - DNA, 17 bp, Arabidopsis thaliana
aaagctgcttgatccgc

SEQ ID NO: 3720 - DNA, 17 bp, Arabidopsis thaliana
aaagctgggaattcatc

SEQ ID NO: 3721 - DNA, 17 bp, Arabidopsis thaliana
aaagctggtcattcggt

SEQ ID NO: 3722 - DNA, 17 bp, Arabidopsis thaliana
aaagctggttggcccaa

SEQ ID NO: 3723 - DNA, 17 bp, Arabidopsis thaliana
aaagctggtttgtctct

SEQ ID NO: 3724 - DNA, 17 bp, Arabidopsis thaliana
aaagctgtaagtgtcca

SEQ ID NO: 3725 - DNA, 17 bp, Arabidopsis thaliana
aaagctgtcattgtcgt

SEQ ID NO: 3726 - DNA, 17 bp, Arabidopsis thaliana
aaagctgtcctgtaggc

SEQ ID NO: 3727 - DNA, 17 bp, Arabidopsis thaliana
aaagctgtctcttgggc

SEQ ID NO: 3728 - DNA, 17 bp, Arabidopsis thaliana
aaagcttaaaatgctga

SEQ ID NO: 3729 - DNA, 17 bp, Arabidopsis thaliana
aaagcttaaagatcgtc

SEQ ID NO: 3730 - DNA, 17 bp, Arabidopsis thaliana
aaagcttagaccatctc

SEQ ID NO: 3731 - DNA, 17 bp, Arabidopsis thaliana
aaagcttagaccatctt

SEQ ID NO: 3732 - DNA, 17 bp, Arabidopsis thaliana
aaagcttagagatcgtc

SEQ ID NO: 3733 - DNA, 17 bp, Arabidopsis thaliana
aaagcttagaggtcgcc

SEQ ID NO: 3734 - DNA, 17 bp, Arabidopsis thaliana
aaagcttagaggttgtc

SEQ ID NO: 3735 - DNA, 17 bp, Arabidopsis thaliana
aaagcttaggatccgat

SEQ ID NO: 3736 - DNA, 17 bp, Arabidopsis thaliana
aaagcttatccccgtag

SEQ ID NO: 3737 - DNA, 17 bp, Arabidopsis thaliana
aaagcttcacagccaat

SEQ ID NO: 3738 - DNA, 17 bp, Arabidopsis thaliana
aaagcttcagtcattct

SEQ ID NO: 3739 - DNA, 17 bp, Arabidopsis thaliana
aaagcttcatccgacgt

SEQ ID NO: 3740 - DNA, 17 bp, Arabidopsis thaliana
aaagcttcatcgcaatg

SEQ ID NO: 3741 - DNA, 17 bp, Arabidopsis thaliana
aaagcttccatttttct

SEQ ID NO: 3742 - DNA, 17 bp, Arabidopsis thaliana
aaagcttccttgcttgt

SEQ ID NO: 3743 - DNA, 17 bp, Arabidopsis thaliana
aaagcttcggattctgg

SEQ ID NO: 3744 - DNA, 17 bp, Arabidopsis thaliana
aaagcttctggagcgac

SEQ ID NO: 3745 - DNA, 17 bp, Arabidopsis thaliana
aaagcttctgtggtatg

SEQ ID NO: 3746 - DNA, 17 bp, Arabidopsis thaliana
aaagcttcttgtgcccc

SEQ ID NO: 3747 - DNA, 17 bp, Arabidopsis thaliana
aaagcttcttgtgcccg

SEQ ID NO: 3748 - DNA, 17 bp, Arabidopsis thaliana
aaagcttgactgattcg

SEQ ID NO: 3749 - DNA, 17 bp, Arabidopsis thaliana
aaagcttgactgtgact

SEQ ID NO: 3750 - DNA, 17 bp, Arabidopsis thaliana
aaagcttgcccatagga

SEQ ID NO: 3751 - DNA, 17 bp, Arabidopsis thaliana
aaagcttgctcgacctt

SEQ ID NO: 3752 - DNA, 17 bp, Arabidopsis thaliana
aaagcttgcttcatcaa

SEQ ID NO: 3753 - DNA, 17 bp, Arabidopsis thaliana
aaagcttgtctgtaagt

SEQ ID NO: 3754 - DNA, 17 bp, Arabidopsis thaliana
aaagctttacgtctatc

SEQ ID NO: 3755 - DNA, 17 bp, Arabidopsis thaliana
aaagctttatcgaccac

SEQ ID NO: 3756 - DNA, 17 bp, Arabidopsis thaliana
aaagctttcataacctc

SEQ ID NO: 3757 - DNA, 17 bp, Arabidopsis thaliana
aaagctttcatggtgtg

SEQ ID NO: 3758 - DNA, 17 bp, Arabidopsis thaliana
aaagctttcgtcctttg

SEQ ID NO: 3759 - DNA, 17 bp, Arabidopsis thaliana
aaagctttctccgccgc

SEQ ID NO: 3760 - DNA, 17 bp, Arabidopsis thaliana
aaagctttggccgattg

SEQ ID NO: 3761 - DNA, 17 bp, Arabidopsis thaliana
aaagctttttttagatc

SEQ ID NO: 3762 - DNA, 17 bp, Arabidopsis thaliana
aaaggaaaagtttccgg

SEQ ID NO: 3763 - DNA, 17 bp, Arabidopsis thaliana
aaaggaaaccttctttt

SEQ ID NO: 3764 - DNA, 17 bp, Arabidopsis thaliana
aaaggaaactttttctt

SEQ ID NO: 3765 - DNA, 17 bp, Arabidopsis thaliana
aaaggaacctcgactga

SEQ ID NO: 3766 - DNA, 17 bp, Arabidopsis thaliana
aaaggaactcgttgctt

SEQ ID NO: 3767 - DNA, 17 bp, Arabidopsis thaliana
aaaggaagaaagtaaga

SEQ ID NO: 3768 - DNA, 17 bp, Arabidopsis thaliana
aaaggaagaacgtcgtg

SEQ ID NO: 3769 - DNA, 17 bp, Arabidopsis thaliana
aaaggaagaactcagcc

SEQ ID NO: 3770 - DNA, 17 bp, Arabidopsis thaliana
aaaggaagacaccaagg

SEQ ID NO: 3771 - DNA, 17 bp, Arabidopsis thaliana
aaaggaagtcagctggt

SEQ ID NO: 3772 - DNA, 17 bp, Arabidopsis thaliana
aaaggaattgacggaag

SEQ ID NO: 3773 - DNA, 17 bp, Arabidopsis thaliana
aaaggaattgtccgtcg

SEQ ID NO: 3774 - DNA, 17 bp, Arabidopsis thaliana
aaaggacacctttttcc

SEQ ID NO: 3775 - DNA, 17 bp, Arabidopsis thaliana
aaaggacatggaccgac

SEQ ID NO: 3776 - DNA, 17 bp, Arabidopsis thaliana
aaaggaccaccacattg

SEQ ID NO: 3777 - DNA, 17 bp, Arabidopsis thaliana
aaaggaccagacacttt

SEQ ID NO: 3778 - DNA, 17 bp, Arabidopsis thaliana
aaaggaccgacaccccc

SEQ ID NO: 3779 - DNA, 17 bp, Arabidopsis thaliana
aaaggaccgatcgtttg

SEQ ID NO: 3780 - DNA, 17 bp, Arabidopsis thaliana
aaaggaccggacctcgt

SEQ ID NO: 3781 - DNA, 17 bp, Arabidopsis thaliana
aaaggacctgtcccgac

SEQ ID NO: 3782 - DNA, 17 bp, Arabidopsis thaliana
aaaggacgacggagatg

SEQ ID NO: 3783 - DNA, 17 bp, Arabidopsis thaliana
aaaggacgatgactcgg

SEQ ID NO: 3784 - DNA, 17 bp, Arabidopsis thaliana
aaaggactctactcgat

SEQ ID NO: 3785 - DNA, 17 bp, Arabidopsis thaliana
aaaggacttgctgttat

SEQ ID NO: 3786 - DNA, 17 bp, Arabidopsis thaliana
aaaggagctcggctatt

SEQ ID NO: 3787 - DNA, 17 bp, Arabidopsis thaliana
aaaggagctggagtccc

SEQ ID NO: 3788 - DNA, 17 bp, Arabidopsis thaliana
aaaggaggtcagctggt

SEQ ID NO: 3789 - DNA, 17 bp, Arabidopsis thaliana
aaaggagtagccccaaa

SEQ ID NO: 3790 - DNA, 17 bp, Arabidopsis thaliana
aaaggagtccgacttga

SEQ ID NO: 3791 - DNA, 17 bp, Arabidopsis thaliana
aaaggagtttcatgcgc

SEQ ID NO: 3792 - DNA, 17 bp, Arabidopsis thaliana
aaaggatatccgtctat

SEQ ID NO: 3793 - DNA, 17 bp, Arabidopsis thaliana
aaaggatcagaccgtga

SEQ ID NO: 3794 - DNA, 17 bp, Arabidopsis thaliana
aaaggatcatctggccg

SEQ ID NO: 3795 - DNA, 17 bp, Arabidopsis thaliana
aaaggatcctcagcgca

SEQ ID NO: 3796 - DNA, 17 bp, Arabidopsis thaliana
aaaggatctgccactcg

SEQ ID NO: 3797 - DNA, 17 bp, Arabidopsis thaliana
aaaggatgggggggcag

SEQ ID NO: 3798 - DNA, 17 bp, Arabidopsis thaliana
aaaggatgtaagacgct

SEQ ID NO: 3799 - DNA, 17 bp, Arabidopsis thaliana
aaaggatgtgcttcaat

SEQ ID NO: 3800 - DNA, 17 bp, Arabidopsis thaliana
aaaggattatggccttc

SEQ ID NO: 3801 - DNA, 17 bp, Arabidopsis thaliana
aaaggattcatccgcta

SEQ ID NO: 3802 - DNA, 17 bp, Arabidopsis thaliana
aaaggattcattgctgg

SEQ ID NO: 3803 - DNA, 17 bp, Arabidopsis thaliana
aaaggattcggaatcgg

SEQ ID NO: 3804 - DNA, 17 bp, Arabidopsis thaliana
aaaggattctacccgcc

SEQ ID NO: 3805 - DNA, 17 bp, Arabidopsis thaliana
aaaggattctactcgac

SEQ ID NO: 3806 - DNA, 17 bp, Arabidopsis thaliana
aaaggattgcgggattt

SEQ ID NO: 3807 - DNA, 17 bp, Arabidopsis thaliana
aaaggattggctctgag

SEQ ID NO: 3808 - DNA, 17 bp, Arabidopsis thaliana
aaaggattgtgccacgt

SEQ ID NO: 3809 - DNA, 17 bp, Arabidopsis thaliana
aaaggattgtgttggtc

SEQ ID NO: 3810 - DNA, 17 bp, Arabidopsis thaliana
aaaggatttacgacggt

SEQ ID NO: 3811 - DNA, 17 bp, Arabidopsis thaliana
aaaggcaatcggcccgc

SEQ ID NO: 3812 - DNA, 17 bp, Arabidopsis thaliana
aaaggcaattgcctcaa

SEQ ID NO: 3813 - DNA, 17 bp, Arabidopsis thaliana
aaaggcacagattttgc

SEQ ID NO: 3814 - DNA, 17 bp, Arabidopsis thaliana
aaaggcaccctcaacaa

SEQ ID NO: 3815 - DNA, 17 bp, Arabidopsis thaliana
aaaggcacgtgtcgttg

SEQ ID NO: 3816 - DNA, 17 bp, Arabidopsis thaliana
aaaggcaggcggtctga

SEQ ID NO: 3817 - DNA, 17 bp, Arabidopsis thaliana
aaaggcaggtacatcgc

SEQ ID NO: 3818 - DNA, 17 bp, Arabidopsis thaliana
aaaggcaggttcatcgc

SEQ ID NO: 3819 - DNA, 17 bp, Arabidopsis thaliana
aaaggcatatgctttgt

SEQ ID NO: 3820 - DNA, 17 bp, Arabidopsis thaliana
aaaggcgaaccaaatct

SEQ ID NO: 3821 - DNA, 17 bp, Arabidopsis thaliana
aaaggcggacaacaaac

SEQ ID NO: 3822 - DNA, 17 bp, Arabidopsis thaliana
aaaggcggctgcgtcct

SEQ ID NO: 3823 - DNA, 17 bp, Arabidopsis thaliana
aaaggcggcttttctgg

SEQ ID NO: 3824 - DNA, 17 bp, Arabidopsis thaliana
aaaggcgggacccatac

SEQ ID NO: 3825 - DNA, 17 bp, Arabidopsis thaliana
aaaggcgtcacaaagaa

SEQ ID NO: 3826 - DNA, 17 bp, Arabidopsis thaliana
aaaggcgtcacagagat

SEQ ID NO: 3827 - DNA, 17 bp, Arabidopsis thaliana
aaaggcgtccattttgc

SEQ ID NO: 3828 - DNA, 17 bp, Arabidopsis thaliana
aaaggctaaaggtcacg

SEQ ID NO: 3829 - DNA, 17 bp, Arabidopsis thaliana
aaaggctaacacaagta

SEQ ID NO: 3830 - DNA, 17 bp, Arabidopsis thaliana
aaaggctacatcttggt

SEQ ID NO: 3831 - DNA, 17 bp, Arabidopsis thaliana
aaaggctacttggatag

SEQ ID NO: 3832 - DNA, 17 bp, Arabidopsis thaliana
aaaggctccagactggt

SEQ ID NO: 3833 - DNA, 17 bp, Arabidopsis thaliana
aaaggctccgaacctgt

SEQ ID NO: 3834 - DNA, 17 bp, Arabidopsis thaliana
aaaggctcgcagagaaa

SEQ ID NO: 3835 - DNA, 17 bp, Arabidopsis thaliana
aaaggctctcgggcgaa

SEQ ID NO: 3836 - DNA, 17 bp, Arabidopsis thaliana
aaaggctgccttgcttt

SEQ ID NO: 3837 - DNA, 17 bp, Arabidopsis thaliana
aaaggctgctttgcttt

SEQ ID NO: 3838 - DNA, 17 bp, Arabidopsis thaliana
aaaggctgtccgattaa

SEQ ID NO: 3839 - DNA, 17 bp, Arabidopsis thaliana
aaaggcttatgttgtgg

SEQ ID NO: 3840 - DNA, 17 bp, Arabidopsis thaliana
aaaggcttcaccagtcc

SEQ ID NO: 3841 - DNA, 17 bp, Arabidopsis thaliana
aaaggcttggaatcaca

SEQ ID NO: 3842 - DNA, 17 bp, Arabidopsis thaliana
aaaggcttgtaacgctc

SEQ ID NO: 3843 - DNA, 17 bp, Arabidopsis thaliana
aaaggctttgcattccg

SEQ ID NO: 3844 - DNA, 17 bp, Arabidopsis thaliana
aaagggaaaatcggcgg

SEQ ID NO: 3845 - DNA, 17 bp, Arabidopsis thaliana
aaagggaatgtgacacg

SEQ ID NO: 3846 - DNA, 17 bp, Arabidopsis thaliana
aaagggaatgtgccact

SEQ ID NO: 3847 - DNA, 17 bp, Arabidopsis thaliana
aaagggacgctcctgat

SEQ ID NO: 3848 - DNA, 17 bp, Arabidopsis thaliana
aaagggagttaccagct

SEQ ID NO: 3849 - DNA, 17 bp, Arabidopsis thaliana
aaagggatcctttcgcg

SEQ ID NO: 3850 - DNA, 17 bp, Arabidopsis thaliana
aaagggatgatgtgtag

SEQ ID NO: 3851 - DNA, 17 bp, Arabidopsis thaliana
aaagggattacgggttt

SEQ ID NO: 3852 - DNA, 17 bp, Arabidopsis thaliana
aaagggatttctgagaa

SEQ ID NO: 3853 - DNA, 17 bp, Arabidopsis thaliana
aaagggccactacactg

SEQ ID NO: 3854 - DNA, 17 bp, Arabidopsis thaliana
aaaggggcgccagagag

SEQ ID NO: 3855 - DNA, 17 bp, Arabidopsis thaliana
aaagggggtcgcagtga

SEQ ID NO: 3856 - DNA, 17 bp, Arabidopsis thaliana
aaagggtaaacgacctg

SEQ ID NO: 3857 - DNA, 17 bp, Arabidopsis thaliana
aaagggtaaacgacttg

SEQ ID NO: 3858 - DNA, 17 bp, Arabidopsis thaliana
aaagggtagtgaagccg

SEQ ID NO: 3859 - DNA, 17 bp, Arabidopsis thaliana
aaagggtccacgtgttt

SEQ ID NO: 3860 - DNA, 17 bp, Arabidopsis thaliana
aaagggtccgattggtg

SEQ ID NO: 3861 - DNA, 17 bp, Arabidopsis thaliana
aaagggtcgactctttg

SEQ ID NO: 3862 - DNA, 17 bp, Arabidopsis thaliana
aaagggtgcctcttcat

SEQ ID NO: 3863 - DNA, 17 bp, Arabidopsis thaliana
aaagggtggtccaagtc

SEQ ID NO: 3864 - DNA, 17 bp, Arabidopsis thaliana
aaagggtgtgaacgatc

SEQ ID NO: 3865 - DNA, 17 bp, Arabidopsis thaliana
aaagggttaatctcggt

SEQ ID NO: 3866 - DNA, 17 bp, Arabidopsis thaliana
aaagggttagggtcact

SEQ ID NO: 3867 - DNA, 17 bp, Arabidopsis thaliana
aaagggtttcaacaatc

SEQ ID NO: 3868 - DNA, 17 bp, Arabidopsis thaliana
aaagggtttttcctcag

SEQ ID NO: 3869 - DNA, 17 bp, Arabidopsis thaliana
aaaggtaaccgcgattt

SEQ ID NO: 3870 - DNA, 17 bp, Arabidopsis thaliana
aaaggtaagtcccaagt

SEQ ID NO: 3871 - DNA, 17 bp, Arabidopsis thaliana
aaaggtactcttctcgg

SEQ ID NO: 3872 - DNA, 17 bp, Arabidopsis thaliana
aaaggtatcacaggcca

SEQ ID NO: 3873 - DNA, 17 bp, Arabidopsis thaliana
aaaggtcaaaatttgga

SEQ ID NO: 3874 - DNA, 17 bp, Arabidopsis thaliana
aaaggtcaaaatttggg

SEQ ID NO: 3875 - DNA, 17 bp, Arabidopsis thaliana
aaaggtcaaaattttgg

SEQ ID NO: 3876 - DNA, 17 bp, Arabidopsis thaliana
aaaggtcaactgtccag

SEQ ID NO: 3877 - DNA, 17 bp, Arabidopsis thaliana
aaaggtcaccggttaga

SEQ ID NO: 3878 - DNA, 17 bp, Arabidopsis thaliana
aaaggtcaccggtttga

SEQ ID NO: 3879 - DNA, 17 bp, Arabidopsis thaliana
aaaggtcacgactgtgt

SEQ ID NO: 3880 - DNA, 17 bp, Arabidopsis thaliana
aaaggtcacttttttcc

SEQ ID NO: 3881 - DNA, 17 bp, Arabidopsis thaliana
aaaggtcatccgaaagt

SEQ ID NO: 3882 - DNA, 17 bp, Arabidopsis thaliana
aaaggtccatagctcag

SEQ ID NO: 3883 - DNA, 17 bp, Arabidopsis thaliana
aaaggtcccgcacagag

SEQ ID NO: 3884 - DNA, 17 bp, Arabidopsis thaliana
aaaggtccgtcttctca

SEQ ID NO: 3885 - DNA, 17 bp, Arabidopsis thaliana
aaaggtccgtcttcttg

SEQ ID NO: 3886 - DNA, 17 bp, Arabidopsis thaliana
aaaggtcctacacctct

SEQ ID NO: 3887 - DNA, 17 bp, Arabidopsis thaliana
aaaggtcgacgcggctc

SEQ ID NO: 3888 - DNA, 17 bp, Arabidopsis thaliana
aaaggtcgacgcgggct

SEQ ID NO: 3889 - DNA, 17 bp, Arabidopsis thaliana
aaaggtcggcacgtctg

SEQ ID NO: 3890 - DNA, 17 bp, Arabidopsis thaliana
aaaggtctccaaggtga

SEQ ID NO: 3891 - DNA, 17 bp, Arabidopsis thaliana
aaaggtctgtccgatca

SEQ ID NO: 3892 - DNA, 17 bp, Arabidopsis thaliana
aaaggtcttccgggatt

SEQ ID NO: 3893 - DNA, 17 bp, Arabidopsis thaliana
aaaggtcttttttcctc

SEQ ID NO: 3894 - DNA, 17 bp, Arabidopsis thaliana
aaaggtgacaaaaagat

SEQ ID NO: 3895 - DNA, 17 bp, Arabidopsis thaliana
aaaggtgaccgacgccg

SEQ ID NO: 3896 - DNA, 17 bp, Arabidopsis thaliana
aaaggtgacggcggtcg

SEQ ID NO: 3897 - DNA, 17 bp, Arabidopsis thaliana
aaaggtgagttagatct

SEQ ID NO: 3898 - DNA, 17 bp, Arabidopsis thaliana
aaaggtgcccgttctcg

SEQ ID NO: 3899 - DNA, 17 bp, Arabidopsis thaliana
aaaggtgcgaccatcgc

SEQ ID NO: 3900 - DNA, 17 bp, Arabidopsis thaliana
aaaggtgcgcataccac

SEQ ID NO: 3901 - DNA, 17 bp, Arabidopsis thaliana
aaaggtgcgtggtggtc

SEQ ID NO: 3902 - DNA, 17 bp, Arabidopsis thaliana
aaaggtgcgttggtcat

SEQ ID NO: 3903 - DNA, 17 bp, Arabidopsis thaliana
aaaggtgctaccggtta

SEQ ID NO: 3904 - DNA, 17 bp, Arabidopsis thaliana
aaaggtgctctaagaat

SEQ ID NO: 3905 - DNA, 17 bp, Arabidopsis thaliana
aaaggtggagcgatttg

SEQ ID NO: 3906 - DNA, 17 bp, Arabidopsis thaliana
aaaggtggctaactctc

SEQ ID NO: 3907 - DNA, 17 bp, Arabidopsis thaliana
aaaggtggctaactttc

SEQ ID NO: 3908 - DNA, 17 bp, Arabidopsis thaliana
aaaggtggtcgagtggt

SEQ ID NO: 3909 - DNA, 17 bp, Arabidopsis thaliana
aaaggtggttttcacgt

SEQ ID NO: 3910 - DNA, 17 bp, Arabidopsis thaliana
aaaggttagagcatcta

SEQ ID NO: 3911 - DNA, 17 bp, Arabidopsis thaliana
aaaggttatccaggtcc

SEQ ID NO: 3912 - DNA, 17 bp, Arabidopsis thaliana
aaaggttccatgtgaac

SEQ ID NO: 3913 - DNA, 17 bp, Arabidopsis thaliana
aaaggttctctcggcaa

SEQ ID NO: 3914 - DNA, 17 bp, Arabidopsis thaliana
aaaggttctgcagttcg

SEQ ID NO: 3915 - DNA, 17 bp, Arabidopsis thaliana
aaaggttctgggccaaa

SEQ ID NO: 3916 - DNA, 17 bp, Arabidopsis thaliana
aaaggttgactgtgttt

SEQ ID NO: 3917 - DNA, 17 bp, Arabidopsis thaliana
aaaggttgccggttcga

SEQ ID NO: 3918 - DNA, 17 bp, Arabidopsis thaliana
aaaggttgcgtgttacg

SEQ ID NO: 3919 - DNA, 17 bp, Arabidopsis thaliana
aaaggttggcaggatcg

SEQ ID NO: 3920 - DNA, 17 bp, Arabidopsis thaliana
aaaggttgtcaacaaga

SEQ ID NO: 3921 - DNA, 17 bp, Arabidopsis thaliana
aaaggttgtcaaccaga

SEQ ID NO: 3922 - DNA, 17 bp, Arabidopsis thaliana
aaaggtttatcctctca

SEQ ID NO: 3923 - DNA, 17 bp, Arabidopsis thaliana
aaaggtttatcctttca

SEQ ID NO: 3924 - DNA, 17 bp, Arabidopsis thaliana
aaaggtttccgacagca

SEQ ID NO: 3925 - DNA, 17 bp, Arabidopsis thaliana
aaaggtttgactgtttg

SEQ ID NO: 3926 - DNA, 17 bp, Arabidopsis thaliana
aaaggttttccccaaat

SEQ ID NO: 3927 - DNA, 17 bp, Arabidopsis thaliana
aaaggttttgcgttatt

SEQ ID NO: 3928 - DNA, 17 bp, Arabidopsis thaliana
aaagtaaactgtcacag

SEQ ID NO: 3929 - DNA, 17 bp, Arabidopsis thaliana
aaagtaacggatttgtc

SEQ ID NO: 3930 - DNA, 17 bp, Arabidopsis thaliana
aaagtaagactcagtgg

SEQ ID NO: 3931 - DNA, 17 bp, Arabidopsis thaliana
aaagtaatacccagtgg

SEQ ID NO: 3932 - DNA, 17 bp, Arabidopsis thaliana
aaagtaatttctcgtct

SEQ ID NO: 3933 - DNA, 17 bp, Arabidopsis thaliana
aaagtacaggtcggaaa

SEQ ID NO: 3934 - DNA, 17 bp, Arabidopsis thaliana
aaagtacgagtctcccg

SEQ ID NO: 3935 - DNA, 17 bp, Arabidopsis thaliana
aaagtacttcggtgcgt

SEQ ID NO: 3936 - DNA, 17 bp, Arabidopsis thaliana
aaagtagactgccgtag

SEQ ID NO: 3937 - DNA, 17 bp, Arabidopsis thaliana
aaagtagactgccgttg

SEQ ID NO: 3938 - DNA, 17 bp, Arabidopsis thaliana
aaagtagccgtcttgct

SEQ ID NO: 3939 - DNA, 17 bp, Arabidopsis thaliana
aaagtagcgacagtcgc

SEQ ID NO: 3940 - DNA, 17 bp, Arabidopsis thaliana
aaagtagggcgcttagg

SEQ ID NO: 3941 - DNA, 17 bp, Arabidopsis thaliana
aaagtagtgctagtgct

SEQ ID NO: 3942 - DNA, 17 bp, Arabidopsis thaliana
aaagtagtggagagcga

SEQ ID NO: 3943 - DNA, 17 bp, Arabidopsis thaliana
aaagtagttatcgctaa

SEQ ID NO: 3944 - DNA, 17 bp, Arabidopsis thaliana
aaagtatatcaaattca

SEQ ID NO: 3945 - DNA, 17 bp, Arabidopsis thaliana
aaagtatatgcgtttca

SEQ ID NO: 3946 - DNA, 17 bp, Arabidopsis thaliana
aaagtatccagagtttc

SEQ ID NO: 3947 - DNA, 17 bp, Arabidopsis thaliana
aaagtatgtgttttgct

SEQ ID NO: 3948 - DNA, 17 bp, Arabidopsis thaliana
aaagtattacggttttg

SEQ ID NO: 3949 - DNA, 17 bp, Arabidopsis thaliana
aaagtattcaccgccgc

SEQ ID NO: 3950 - DNA, 17 bp, Arabidopsis thaliana
aaagtattcatcgatct

SEQ ID NO: 3951 - DNA, 17 bp, Arabidopsis thaliana
aaagtattcatgctcat

SEQ ID NO: 3952 - DNA, 17 bp, Arabidopsis thaliana
aaagtattggaacgctg

SEQ ID NO: 3953 - DNA, 17 bp, Arabidopsis thaliana
aaagtatttcggtgcgt

SEQ ID NO: 3954 - DNA, 17 bp, Arabidopsis thaliana
aaagtcaaaacgctcaa

SEQ ID NO: 3955 - DNA, 17 bp, Arabidopsis thaliana
aaagtcaaatgtggttt

SEQ ID NO: 3956 - DNA, 17 bp, Arabidopsis thaliana
aaagtcaagatcagaat

SEQ ID NO: 3957 - DNA, 17 bp, Arabidopsis thaliana
aaagtcacaatcattag

SEQ ID NO: 3958 - DNA, 17 bp, Arabidopsis thaliana
aaagtcacatacaacct

SEQ ID NO: 3959 - DNA, 17 bp, Arabidopsis thaliana
aaagtcaccgtgtctct

SEQ ID NO: 3960 - DNA, 17 bp, Arabidopsis thaliana
aaagtcaccgtgtttct

SEQ ID NO: 3961 - DNA, 17 bp, Arabidopsis thaliana
aaagtcacgatggagta

SEQ ID NO: 3962 - DNA, 17 bp, Arabidopsis thaliana
aaagtcacggtgattgg

SEQ ID NO: 3963 - DNA, 17 bp, Arabidopsis thaliana
aaagtcacgttgattgg

SEQ ID NO: 3964 - DNA, 17 bp, Arabidopsis thaliana
aaagtcactcgacctgg

SEQ ID NO: 3965 - DNA, 17 bp, Arabidopsis thaliana
aaagtcactcggcctgg

SEQ ID NO: 3966 - DNA, 17 bp, Arabidopsis thaliana
aaagtcagatgtggttt

SEQ ID NO: 3967 - DNA, 17 bp, Arabidopsis thaliana
aaagtcaggtgccttct

SEQ ID NO: 3968 - DNA, 17 bp, Arabidopsis thaliana
aaagtcaggtgcctttt

SEQ ID NO: 3969 - DNA, 17 bp, Arabidopsis thaliana
aaagtcatcagcaaccg

SEQ ID NO: 3970 - DNA, 17 bp, Arabidopsis thaliana
aaagtcattcagatgga

SEQ ID NO: 3971 - DNA, 17 bp, Arabidopsis thaliana
aaagtccaccttattta

SEQ ID NO: 3972 - DNA, 17 bp, Arabidopsis thaliana
aaagtccagtgacagcc

SEQ ID NO: 3973 - DNA, 17 bp, Arabidopsis thaliana
aaagtccatttgattcc

SEQ ID NO: 3974 - DNA, 17 bp, Arabidopsis thaliana
aaagtcccaagtgcgag

SEQ ID NO: 3975 - DNA, 17 bp, Arabidopsis thaliana
aaagtcccgagttgaag

SEQ ID NO: 3976 - DNA, 17 bp, Arabidopsis thaliana
aaagtccctcgagttac

SEQ ID NO: 3977 - DNA, 17 bp, Arabidopsis thaliana
aaagtccggacactgtc

SEQ ID NO: 3978 - DNA, 17 bp, Arabidopsis thaliana
aaagtccgtatgagtct

SEQ ID NO: 3979 - DNA, 17 bp, Arabidopsis thaliana
aaagtcctaagcacggc

SEQ ID NO: 3980 - DNA, 17 bp, Arabidopsis thaliana
aaagtcctcatgttgca

SEQ ID NO: 3981 - DNA, 17 bp, Arabidopsis thaliana
aaagtcctcggtgtata

SEQ ID NO: 3982 - DNA, 17 bp, Arabidopsis thaliana
aaagtcctcgtgttgca

SEQ ID NO: 3983 - DNA, 17 bp, Arabidopsis thaliana
aaagtcctcttcaaggc

SEQ ID NO: 3984 - DNA, 17 bp, Arabidopsis thaliana
aaagtcctgcggaactg

SEQ ID NO: 3985 - DNA, 17 bp, Arabidopsis thaliana
aaagtcctgtgggactg

SEQ ID NO: 3986 - DNA, 17 bp, Arabidopsis thaliana
aaagtccttgtcgccga

SEQ ID NO: 3987 - DNA, 17 bp, Arabidopsis thaliana
aaagtcgataggcagtc

SEQ ID NO: 3988 - DNA, 17 bp, Arabidopsis thaliana
aaagtcgattggcagtc

SEQ ID NO: 3989 - DNA, 17 bp, Arabidopsis thaliana
aaagtcgcaggggagac

SEQ ID NO: 3990 - DNA, 17 bp, Arabidopsis thaliana
aaagtcgcatcctgtag

SEQ ID NO: 3991 - DNA, 17 bp, Arabidopsis thaliana
aaagtcgccacccctta

SEQ ID NO: 3992 - DNA, 17 bp, Arabidopsis thaliana
aaagtcgccagtatctc

SEQ ID NO: 3993 - DNA, 17 bp, Arabidopsis thaliana
aaagtcgccgccgttgt

SEQ ID NO: 3994 - DNA, 17 bp, Arabidopsis thaliana
aaagtcgctaatgctat

SEQ ID NO: 3995 - DNA, 17 bp, Arabidopsis thaliana
aaagtcgctccaaccgg

SEQ ID NO: 3996 - DNA, 17 bp, Arabidopsis thaliana
aaagtcgctctacattg

SEQ ID NO: 3997 - DNA, 17 bp, Arabidopsis thaliana
aaagtcggacacctaat

SEQ ID NO: 3998 - DNA, 17 bp, Arabidopsis thaliana
aaagtcggagctattgc

SEQ ID NO: 3999 - DNA, 17 bp, Arabidopsis thaliana
aaagtcggccattcggt

SEQ ID NO: 4000 - DNA, 17 bp, Arabidopsis thaliana
aaagtcgggacccatac

SEQ ID NO: 4001 - DNA, 17 bp, Arabidopsis thaliana
aaagtcggtctgttggg

SEQ ID NO: 4002 - DNA, 17 bp, Arabidopsis thaliana
aaagtcgtatgggcttc

SEQ ID NO: 4003 - DNA, 17 bp, Arabidopsis thaliana
aaagtcgtccattttgc

SEQ ID NO: 4004 - DNA, 17 bp, Arabidopsis thaliana
aaagtcgtgctatgttc

SEQ ID NO: 4005 - DNA, 17 bp, Arabidopsis thaliana
aaagtctaaagtctctc

SEQ ID NO: 4006 - DNA, 17 bp, Arabidopsis thaliana
aaagtctacatgtgtgg

SEQ ID NO: 4007 - DNA, 17 bp, Arabidopsis thaliana
aaagtctactgtagggt

SEQ ID NO: 4008 - DNA, 17 bp, Arabidopsis thaliana
aaagtctaggaagttct

SEQ ID NO: 4009 - DNA, 17 bp, Arabidopsis thaliana
aaagtctatcagttgtg

SEQ ID NO: 4010 - DNA, 17 bp, Arabidopsis thaliana
aaagtctatccatgtgg

SEQ ID NO: 4011 - DNA, 17 bp, Arabidopsis thaliana
aaagtctatcgtatcgg

SEQ ID NO: 4012 - DNA, 17 bp, Arabidopsis thaliana
aaagtctatctacttcc

SEQ ID NO: 4013 - DNA, 17 bp, Arabidopsis thaliana
aaagtctcaagattggt

SEQ ID NO: 4014 - DNA, 17 bp, Arabidopsis thaliana
aaagtctcggtaatcgc

SEQ ID NO: 4015 - DNA, 17 bp, Arabidopsis thaliana
aaagtctcgtgtgtcgt

SEQ ID NO: 4016 - DNA, 17 bp, Arabidopsis thaliana
aaagtctctacagccaa

SEQ ID NO: 4017 - DNA, 17 bp, Arabidopsis thaliana
aaagtctctcatgtttg

SEQ ID NO: 4018 - DNA, 17 bp, Arabidopsis thaliana
aaagtctgcaggcgatt

SEQ ID NO: 4019 - DNA, 17 bp, Arabidopsis thaliana
aaagtctgcaggtgatt

SEQ ID NO: 4020 - DNA, 17 bp, Arabidopsis thaliana
aaagtctgcatgtgtgg

SEQ ID NO: 4021 - DNA, 17 bp, Arabidopsis thaliana
aaagtctgtaatcttct

SEQ ID NO: 4022 - DNA, 17 bp, Arabidopsis thaliana
aaagtctgtcagttggg

SEQ ID NO: 4023 - DNA, 17 bp, Arabidopsis thaliana
aaagtctgtcgtacgct

SEQ ID NO: 4024 - DNA, 17 bp, Arabidopsis thaliana
aaagtctgtgatgttgg

SEQ ID NO: 4025 - DNA, 17 bp, Arabidopsis thaliana
aaagtcttacacgggtt

SEQ ID NO: 4026 - DNA, 17 bp, Arabidopsis thaliana
aaagtctttcctgtgtg

SEQ ID NO: 4027 - DNA, 17 bp, Arabidopsis thaliana
aaagtctttgtagcacc

SEQ ID NO: 4028 - DNA, 17 bp, Arabidopsis thaliana
aaagtcttttggttgga

SEQ ID NO: 4029 - DNA, 17 bp, Arabidopsis thaliana
aaagtgaaacatttgct

SEQ ID NO: 4030 - DNA, 17 bp, Arabidopsis thaliana
aaagtgaacgacctgtg

SEQ ID NO: 4031 - DNA, 17 bp, Arabidopsis thaliana
aaagtgaccgctggttt

SEQ ID NO: 4032 - DNA, 17 bp, Arabidopsis thaliana
aaagtgacgttgtaggt

SEQ ID NO: 4033 - DNA, 17 bp, Arabidopsis thaliana
aaagtgactacatcggg

SEQ ID NO: 4034 - DNA, 17 bp, Arabidopsis thaliana
aaagtgactgaccctaa

SEQ ID NO: 4035 - DNA, 17 bp, Arabidopsis thaliana
aaagtgagacaggttag

SEQ ID NO: 4036 - DNA, 17 bp, Arabidopsis thaliana
aaagtgagatatggttt

SEQ ID NO: 4037 - DNA, 17 bp, Arabidopsis thaliana
aaagtgagatgtggttt

SEQ ID NO: 4038 - DNA, 17 bp, Arabidopsis thaliana
aaagtgagcttgcttct

SEQ ID NO: 4039 - DNA, 17 bp, Arabidopsis thaliana
aaagtgaggatcaagcg

SEQ ID NO: 4040 - DNA, 17 bp, Arabidopsis thaliana
aaagtgagtcaacggct

SEQ ID NO: 4041 - DNA, 17 bp, Arabidopsis thaliana
aaagtgagtcaccaatg

SEQ ID NO: 4042 - DNA, 17 bp, Arabidopsis thaliana
aaagtgagtttgaggtt

SEQ ID NO: 4043 - DNA, 17 bp, Arabidopsis thaliana
aaagtgatcgctgtaat

SEQ ID NO: 4044 - DNA, 17 bp, Arabidopsis thaliana
aaagtgatctctctcta

SEQ ID NO: 4045 - DNA, 17 bp, Arabidopsis thaliana
aaagtgattctgattga

SEQ ID NO: 4046 - DNA, 17 bp, Arabidopsis thaliana
aaagtgcacatgtattg

SEQ ID NO: 4047 - DNA, 17 bp, Arabidopsis thaliana
aaagtgcaggtgttcac

SEQ ID NO: 4048 - DNA, 17 bp, Arabidopsis thaliana
aaagtgcagtgcggttc

SEQ ID NO: 4049 - DNA, 17 bp, Arabidopsis thaliana
aaagtgcattcgggtca

SEQ ID NO: 4050 - DNA, 17 bp, Arabidopsis thaliana
aaagtgcattggtcggc

SEQ ID NO: 4051 - DNA, 17 bp, Arabidopsis thaliana
aaagtgcccactctctc

SEQ ID NO: 4052 - DNA, 17 bp, Arabidopsis thaliana
aaagtgcctaaactctt

SEQ ID NO: 4053 - DNA, 17 bp, Arabidopsis thaliana
aaagtgcctacttttta

SEQ ID NO: 4054 - DNA, 17 bp, Arabidopsis thaliana
aaagtgcctccggaggt

SEQ ID NO: 4055 - DNA, 17 bp, Arabidopsis thaliana
aaagtgcgactgtgttc

SEQ ID NO: 4056 - DNA, 17 bp, Arabidopsis thaliana
aaagtgcgactgttttc

SEQ ID NO: 4057 - DNA, 17 bp, Arabidopsis thaliana
aaagtgcggctcgatca

SEQ ID NO: 4058 - DNA, 17 bp, Arabidopsis thaliana
aaagtgcggctggatca

SEQ ID NO: 4059 - DNA, 17 bp, Arabidopsis thaliana
aaagtgcggtgcggttc

SEQ ID NO: 4060 - DNA, 17 bp, Arabidopsis thaliana
aaagtgctcactttctc

SEQ ID NO: 4061 - DNA, 17 bp, Arabidopsis thaliana
aaagtgctctttttcaa

SEQ ID NO: 4062 - DNA, 17 bp, Arabidopsis thaliana
aaagtgctgatgtccgg

SEQ ID NO: 4063 - DNA, 17 bp, Arabidopsis thaliana
aaagtgcttcagattgg

SEQ ID NO: 4064 - DNA, 17 bp, Arabidopsis thaliana
aaagtggactgcctggt

SEQ ID NO: 4065 - DNA, 17 bp, Arabidopsis thaliana
aaagtggactggtccag

SEQ ID NO: 4066 - DNA, 17 bp, Arabidopsis thaliana
aaagtggactgtgataa

SEQ ID NO: 4067 - DNA, 17 bp, Arabidopsis thaliana
aaagtggacttctcccc

SEQ ID NO: 4068 - DNA, 17 bp, Arabidopsis thaliana
aaagtggagtgggacgg

SEQ ID NO: 4069 - DNA, 17 bp, Arabidopsis thaliana
aaagtggatcaacggct

SEQ ID NO: 4070 - DNA, 17 bp, Arabidopsis thaliana
aaagtggatcccgtcac

SEQ ID NO: 4071 - DNA, 17 bp, Arabidopsis thaliana
aaagtggatgagttgat

SEQ ID NO: 4072 - DNA, 17 bp, Arabidopsis thaliana
aaagtggcaaaccgttt

SEQ ID NO: 4073 - DNA, 17 bp, Arabidopsis thaliana
aaagtggcctctttcga

SEQ ID NO: 4074 - DNA, 17 bp, Arabidopsis thaliana
aaagtggcttctgaggt

SEQ ID NO: 4075 - DNA, 17 bp, Arabidopsis thaliana
aaagtgggagctattgc

SEQ ID NO: 4076 - DNA, 17 bp, Arabidopsis thaliana
aaagtgggctatgtctt

SEQ ID NO: 4077 - DNA, 17 bp, Arabidopsis thaliana
aaagtgggctcgtccaa

SEQ ID NO: 4078 - DNA, 17 bp, Arabidopsis thaliana
aaagtgggctggcccaa

SEQ ID NO: 4079 - DNA, 17 bp, Arabidopsis thaliana
aaagtgggctgggccaa

SEQ ID NO: 4080 - DNA, 17 bp, Arabidopsis thaliana
aaagtgggctgggcctt

SEQ ID NO: 4081 - DNA, 17 bp, Arabidopsis thaliana
aaagtgggctgggtcaa

SEQ ID NO: 4082 - DNA, 17 bp, Arabidopsis thaliana
aaagtgggtcaacggct

SEQ ID NO: 4083 - DNA, 17 bp, Arabidopsis thaliana
aaagtgggtcaatggct

SEQ ID NO: 4084 - DNA, 17 bp, Arabidopsis thaliana
aaagtgggtcagcgctc

SEQ ID NO: 4085 - DNA, 17 bp, Arabidopsis thaliana
aaagtggtacattgccg

SEQ ID NO: 4086 - DNA, 17 bp, Arabidopsis thaliana
aaagtggtatgatcggt

SEQ ID NO: 4087 - DNA, 17 bp, Arabidopsis thaliana
aaagtggtccaaattta

SEQ ID NO: 4088 - DNA, 17 bp, Arabidopsis thaliana
aaagtggttctaagctg

SEQ ID NO: 4089 - DNA, 17 bp, Arabidopsis thaliana
aaagtgtacctaacaga

SEQ ID NO: 4090 - DNA, 17 bp, Arabidopsis thaliana
aaagtgtaggttcgtct

SEQ ID NO: 4091 - DNA, 17 bp, Arabidopsis thaliana
aaagtgtcacaggtgat

SEQ ID NO: 4092 - DNA, 17 bp, Arabidopsis thaliana
aaagtgtccccaaggcg

SEQ ID NO: 4093 - DNA, 17 bp, Arabidopsis thaliana
aaagtgtcgcttcggag

SEQ ID NO: 4094 - DNA, 17 bp, Arabidopsis thaliana
aaagtgtctaaaccggc

SEQ ID NO: 4095 - DNA, 17 bp, Arabidopsis thaliana
aaagtgtcttcggaagt

SEQ ID NO: 4096 - DNA, 17 bp, Arabidopsis thaliana
aaagtgtcttcggaggt

SEQ ID NO: 4097 - DNA, 17 bp, Arabidopsis thaliana
aaagtgttccttaggcc

SEQ ID NO: 4098 - DNA, 17 bp, Arabidopsis thaliana
aaagtgttcggatcgcg

SEQ ID NO: 4099 - DNA, 17 bp, Arabidopsis thaliana
aaagtgttgctttcgga

SEQ ID NO: 4100 - DNA, 17 bp, Arabidopsis thaliana
aaagtgttgttcgtttg

SEQ ID NO: 4101 - DNA, 17 bp, Arabidopsis thaliana
aaagtgtttcagcttct

SEQ ID NO: 4102 - DNA, 17 bp, Arabidopsis thaliana
aaagtgtttgacccgct

SEQ ID NO: 4103 - DNA, 17 bp, Arabidopsis thaliana
aaagtgtttggaagcgg

SEQ ID NO: 4104 - DNA, 17 bp, Arabidopsis thaliana
aaagtgttttcattgct

SEQ ID NO: 4105 - DNA, 17 bp, Arabidopsis thaliana
aaagtgttttgcgatct

SEQ ID NO: 4106 - DNA, 17 bp, Arabidopsis thaliana
aaagttaaaaccatgga

SEQ ID NO: 4107 - DNA, 17 bp, Arabidopsis thaliana
aaagttaacagtgactt

SEQ ID NO: 4108 - DNA, 17 bp, Arabidopsis thaliana
aaagttaacagtgatcc

SEQ ID NO: 4109 - DNA, 17 bp, Arabidopsis thaliana
aaagttaactccaatct

SEQ ID NO: 4110 - DNA, 17 bp, Arabidopsis thaliana
aaagttaagaagtcgtc

SEQ ID NO: 4111 - DNA, 17 bp, Arabidopsis thaliana
aaagttaatcgtctgac

SEQ ID NO: 4112 - DNA, 17 bp, Arabidopsis thaliana
aaagttacaaacgaact

SEQ ID NO: 4113 - DNA, 17 bp, Arabidopsis thaliana
aaagttacagggagcat

SEQ ID NO: 4114 - DNA, 17 bp, Arabidopsis thaliana
aaagttaccaagcctgc

SEQ ID NO: 4115 - DNA, 17 bp, Arabidopsis thaliana
aaagttaccacagggat

SEQ ID NO: 4116 - DNA, 17 bp, Arabidopsis thaliana
aaagttaccaccattcg

SEQ ID NO: 4117 - DNA, 17 bp, Arabidopsis thaliana
aaagttaccgaacttaa

SEQ ID NO: 4118 - DNA, 17 bp, Arabidopsis thaliana
aaagttacctctcagct

SEQ ID NO: 4119 - DNA, 17 bp, Arabidopsis thaliana
aaagttacggctacgat

SEQ ID NO: 4120 - DNA, 17 bp, Arabidopsis thaliana
aaagttacgggacttcc

SEQ ID NO: 4121 - DNA, 17 bp, Arabidopsis thaliana
aaagttacgggacttcg

SEQ ID NO: 4122 - DNA, 17 bp, Arabidopsis thaliana
aaagttactgtttttcc

SEQ ID NO: 4123 - DNA, 17 bp, Arabidopsis thaliana
aaagttagatagtatag

SEQ ID NO: 4124 - DNA, 17 bp, Arabidopsis thaliana
aaagttagatcctttac

SEQ ID NO: 4125 - DNA, 17 bp, Arabidopsis thaliana
aaagttagcacctcgat

SEQ ID NO: 4126 - DNA, 17 bp, Arabidopsis thaliana
aaagttagctcatcgtg

SEQ ID NO: 4127 - DNA, 17 bp, Arabidopsis thaliana
aaagttaggaccttgtc

SEQ ID NO: 4128 - DNA, 17 bp, Arabidopsis thaliana
aaagttagtgtaggcct

SEQ ID NO: 4129 - DNA, 17 bp, Arabidopsis thaliana
aaagttagtttcgtgag

SEQ ID NO: 4130 - DNA, 17 bp, Arabidopsis thaliana
aaagttataggctgttg

SEQ ID NO: 4131 - DNA, 17 bp, Arabidopsis thaliana
aaagttatgcgctagga

SEQ ID NO: 4132 - DNA, 17 bp, Arabidopsis thaliana
aaagttattgttgactt

SEQ ID NO: 4133 - DNA, 17 bp, Arabidopsis thaliana
aaagttattttgtctgc

SEQ ID NO: 4134 - DNA, 17 bp, Arabidopsis thaliana
aaagttcaagtcgatct

SEQ ID NO: 4135 - DNA, 17 bp, Arabidopsis thaliana
aaagttcaccaagagaa

SEQ ID NO: 4136 - DNA, 17 bp, Arabidopsis thaliana
aaagttcacggttaatt

SEQ ID NO: 4137 - DNA, 17 bp, Arabidopsis thaliana
aaagttcacgtattgaa

SEQ ID NO: 4138 - DNA, 17 bp, Arabidopsis thaliana
aaagttcagagagcaag

SEQ ID NO: 4139 - DNA, 17 bp, Arabidopsis thaliana
aaagttcaggcccaaaa

SEQ ID NO: 4140 - DNA, 17 bp, Arabidopsis thaliana
aaagttcatgggttgag

SEQ ID NO: 4141 - DNA, 17 bp, Arabidopsis thaliana
aaagttcattggtcggc

SEQ ID NO: 4142 - DNA, 17 bp, Arabidopsis thaliana
aaagttccatacggcag

SEQ ID NO: 4143 - DNA, 17 bp, Arabidopsis thaliana
aaagttccattgtcctg

SEQ ID NO: 4144 - DNA, 17 bp, Arabidopsis thaliana
aaagttcccattggccg

SEQ ID NO: 4145 - DNA, 17 bp, Arabidopsis thaliana
aaagttccgactttaga

SEQ ID NO: 4146 - DNA, 17 bp, Arabidopsis thaliana
aaagttccggtgggttc

SEQ ID NO: 4147 - DNA, 17 bp, Arabidopsis thaliana
aaagttccgtctgcggg

SEQ ID NO: 4148 - DNA, 17 bp, Arabidopsis thaliana
aaagttcctacagcgaa

SEQ ID NO: 4149 - DNA, 17 bp, Arabidopsis thaliana
aaagttcgaatcctagg

SEQ ID NO: 4150 - DNA, 17 bp, Arabidopsis thaliana
aaagttcgacgcgggct

SEQ ID NO: 4151 - DNA, 17 bp, Arabidopsis thaliana
aaagttcgcactgaacc

SEQ ID NO: 4152 - DNA, 17 bp, Arabidopsis thaliana
aaagttcgctcgggttt

SEQ ID NO: 4153 - DNA, 17 bp, Arabidopsis thaliana
aaagttcggcttccttc

SEQ ID NO: 4154 - DNA, 17 bp, Arabidopsis thaliana
aaagttcggtgcgtttc

SEQ ID NO: 4155 - DNA, 17 bp, Arabidopsis thaliana
aaagttcggttcggttg

SEQ ID NO: 4156 - DNA, 17 bp, Arabidopsis thaliana
aaagttcgtactgaacc

SEQ ID NO: 4157 - DNA, 17 bp, Arabidopsis thaliana
aaagttcgtcgacgagt

SEQ ID NO: 4158 - DNA, 17 bp, Arabidopsis thaliana
aaagttcgtgatttttt

SEQ ID NO: 4159 - DNA, 17 bp, Arabidopsis thaliana
aaagttcgtgtccaacc

SEQ ID NO: 4160 - DNA, 17 bp, Arabidopsis thaliana
aaagttcgtgtctaacc

SEQ ID NO: 4161 - DNA, 17 bp, Arabidopsis thaliana
aaagttctcaaggcctt

SEQ ID NO: 4162 - DNA, 17 bp, Arabidopsis thaliana
aaagttctgagccaaat

SEQ ID NO: 4163 - DNA, 17 bp, Arabidopsis thaliana
aaagttctgttgaccga

SEQ ID NO: 4164 - DNA, 17 bp, Arabidopsis thaliana
aaagttctgttgaccgg

SEQ ID NO: 4165 - DNA, 17 bp, Arabidopsis thaliana
aaagttctgtttgggat

SEQ ID NO: 4166 - DNA, 17 bp, Arabidopsis thaliana
aaagttcttgcctggat

SEQ ID NO: 4167 - DNA, 17 bp, Arabidopsis thaliana
aaagttctttctaccgg

SEQ ID NO: 4168 - DNA, 17 bp, Arabidopsis thaliana
aaagttctttgcagacc

SEQ ID NO: 4169 - DNA, 17 bp, Arabidopsis thaliana
aaagttgaatctctgtg

SEQ ID NO: 4170 - DNA, 17 bp, Arabidopsis thaliana
aaagttgaccaagtctc

SEQ ID NO: 4171 - DNA, 17 bp, Arabidopsis thaliana
aaagttgacgctgaaat

SEQ ID NO: 4172 - DNA, 17 bp, Arabidopsis thaliana
aaagttgactatccacc

SEQ ID NO: 4173 - DNA, 17 bp, Arabidopsis thaliana
aaagttgactgaacagg

SEQ ID NO: 4174 - DNA, 17 bp, Arabidopsis thaliana
aaagttgacttccaaat

SEQ ID NO: 4175 - DNA, 17 bp, Arabidopsis thaliana
aaagttgagtaggatct

SEQ ID NO: 4176 - DNA, 17 bp, Arabidopsis thaliana
aaagttgattttggctt

SEQ ID NO: 4177 - DNA, 17 bp, Arabidopsis thaliana
aaagttgcattaaatgg

SEQ ID NO: 4178 - DNA, 17 bp, Arabidopsis thaliana
aaagttgcgagtccttg

SEQ ID NO: 4179 - DNA, 17 bp, Arabidopsis thaliana
aaagttgcggtttattt

SEQ ID NO: 4180 - DNA, 17 bp, Arabidopsis thaliana
aaagttgctaactcaaa

SEQ ID NO: 4181 - DNA, 17 bp, Arabidopsis thaliana
aaagttgctaactcagg

SEQ ID NO: 4182 - DNA, 17 bp, Arabidopsis thaliana
aaagttgctaactcata

SEQ ID NO: 4183 - DNA, 17 bp, Arabidopsis thaliana
aaagttgctaattcata

SEQ ID NO: 4184 - DNA, 17 bp, Arabidopsis thaliana
aaagttgctcttagact

SEQ ID NO: 4185 - DNA, 17 bp, Arabidopsis thaliana
aaagttgctgcgattgc

SEQ ID NO: 4186 - DNA, 17 bp, Arabidopsis thaliana
aaagttggacagaatcg

SEQ ID NO: 4187 - DNA, 17 bp, Arabidopsis thaliana
aaagttggccaacactc

SEQ ID NO: 4188 - DNA, 17 bp, Arabidopsis thaliana
aaagttggccaactctc

SEQ ID NO: 4189 - DNA, 17 bp, Arabidopsis thaliana
aaagttggccaactctt

SEQ ID NO: 4190 - DNA, 17 bp, Arabidopsis thaliana
aaagttggccaactttc

SEQ ID NO: 4191 - DNA, 17 bp, Arabidopsis thaliana
aaagttggccaattctc

SEQ ID NO: 4192 - DNA, 17 bp, Arabidopsis thaliana
aaagttggcgcattttt

SEQ ID NO: 4193 - DNA, 17 bp, Arabidopsis thaliana
aaagttgggcttttggt

SEQ ID NO: 4194 - DNA, 17 bp, Arabidopsis thaliana
aaagttgggtgtcggac

SEQ ID NO: 4195 - DNA, 17 bp, Arabidopsis thaliana
aaagttgggtgtgttgg

SEQ ID NO: 4196 - DNA, 17 bp, Arabidopsis thaliana
aaagttggtcaaccctc

SEQ ID NO: 4197 - DNA, 17 bp, Arabidopsis thaliana
aaagttggtcaactctc

SEQ ID NO: 4198 - DNA, 17 bp, Arabidopsis thaliana
aaagttggtctgcggcg

SEQ ID NO: 4199 - DNA, 17 bp, Arabidopsis thaliana
aaagttggtgaactctc

SEQ ID NO: 4200 - DNA, 17 bp, Arabidopsis thaliana
aaagttggtgtctctcc

SEQ ID NO: 4201 - DNA, 17 bp, Arabidopsis thaliana
aaagttgtcgctggttt

SEQ ID NO: 4202 - DNA, 17 bp, Arabidopsis thaliana
aaagttgtcggacctac

SEQ ID NO: 4203 - DNA, 17 bp, Arabidopsis thaliana
aaagttgtgtggatttt

SEQ ID NO: 4204 - DNA, 17 bp, Arabidopsis thaliana
aaagttgttaacgaggt

SEQ ID NO: 4205 - DNA, 17 bp, Arabidopsis thaliana
aaagttgttagctcgag

SEQ ID NO: 4206 - DNA, 17 bp, Arabidopsis thaliana
aaagttgttatcggtcg

SEQ ID NO: 4207 - DNA, 17 bp, Arabidopsis thaliana
aaagttgttcggagccg

SEQ ID NO: 4208 - DNA, 17 bp, Arabidopsis thaliana
aaagttgttcgtttgcc

SEQ ID NO: 4209 - DNA, 17 bp, Arabidopsis thaliana
aaagttgttctgcacca

SEQ ID NO: 4210 - DNA, 17 bp, Arabidopsis thaliana
aaagttgttgttgactg

SEQ ID NO: 4211 - DNA, 17 bp, Arabidopsis thaliana
aaagtttacggatgtgc

SEQ ID NO: 4212 - DNA, 17 bp, Arabidopsis thaliana
aaagtttagaggtcgtc

SEQ ID NO: 4213 - DNA, 17 bp, Arabidopsis thaliana
aaagtttaggagattgt

SEQ ID NO: 4214 - DNA, 17 bp, Arabidopsis thaliana
aaagtttaggatccaat

SEQ ID NO: 4215 - DNA, 17 bp, Arabidopsis thaliana
aaagtttataggctgtt

SEQ ID NO: 4216 - DNA, 17 bp, Arabidopsis thaliana
aaagtttatctgtgacg

SEQ ID NO: 4217 - DNA, 17 bp, Arabidopsis thaliana
aaagtttatgctttttt

SEQ ID NO: 4218 - DNA, 17 bp, Arabidopsis thaliana
aaagtttcaaaatagtg

SEQ ID NO: 4219 - DNA, 17 bp, Arabidopsis thaliana
aaagtttcatattgcac

SEQ ID NO: 4220 - DNA, 17 bp, Arabidopsis thaliana
aaagtttccacatcccc

SEQ ID NO: 4221 - DNA, 17 bp, Arabidopsis thaliana
aaagtttccatatgtga

SEQ ID NO: 4222 - DNA, 17 bp, Arabidopsis thaliana
aaagtttccgccttggg

SEQ ID NO: 4223 - DNA, 17 bp, Arabidopsis thaliana
aaagtttccttgactat

SEQ ID NO: 4224 - DNA, 17 bp, Arabidopsis thaliana
aaagtttcggtgcgggc

SEQ ID NO: 4225 - DNA, 17 bp, Arabidopsis thaliana
aaagtttcggttgacca

SEQ ID NO: 4226 - DNA, 17 bp, Arabidopsis thaliana
aaagtttctaactcata

SEQ ID NO: 4227 - DNA, 17 bp, Arabidopsis thaliana
aaagtttcttcgtcgca

SEQ ID NO: 4228 - DNA, 17 bp, Arabidopsis thaliana
aaagtttgaactctgga

SEQ ID NO: 4229 - DNA, 17 bp, Arabidopsis thaliana
aaagtttgagcttggaa

SEQ ID NO: 4230 - DNA, 17 bp, Arabidopsis thaliana
aaagtttgagcttggag

SEQ ID NO: 4231 - DNA, 17 bp, Arabidopsis thaliana
aaagtttgcccgtccgg

SEQ ID NO: 4232 - DNA, 17 bp, Arabidopsis thaliana
aaagtttgcgacggatt

SEQ ID NO: 4233 - DNA, 17 bp, Arabidopsis thaliana
aaagtttgcgcattttc

SEQ ID NO: 4234 - DNA, 17 bp, Arabidopsis thaliana
aaagtttgcgcctttgt

SEQ ID NO: 4235 - DNA, 17 bp, Arabidopsis thaliana
aaagtttgcggaagcgg

SEQ ID NO: 4236 - DNA, 17 bp, Arabidopsis thaliana
aaagtttggacgtttgg

SEQ ID NO: 4237 - DNA, 17 bp, Arabidopsis thaliana
aaagtttggctgcagag

SEQ ID NO: 4238 - DNA, 17 bp, Arabidopsis thaliana
aaagtttgggctctatc

SEQ ID NO: 4239 - DNA, 17 bp, Arabidopsis thaliana
aaagtttggtcccatga

SEQ ID NO: 4240 - DNA, 17 bp, Arabidopsis thaliana
aaagtttggtcccatgg

SEQ ID NO: 4241 - DNA, 17 bp, Arabidopsis thaliana
aaagtttgtaccgaacc

SEQ ID NO: 4242 - DNA, 17 bp, Arabidopsis thaliana
aaagtttgtccaaccgt

SEQ ID NO: 4243 - DNA, 17 bp, Arabidopsis thaliana
aaagtttgtcttgtgac

SEQ ID NO: 4244 - DNA, 17 bp, Arabidopsis thaliana
aaagtttgtgctgaacc

SEQ ID NO: 4245 - DNA, 17 bp, Arabidopsis thaliana
aaagttttcatgtatgc

SEQ ID NO: 4246 - DNA, 17 bp, Arabidopsis thaliana
aaagttttccatatggt

SEQ ID NO: 4247 - DNA, 17 bp, Arabidopsis thaliana
aaagttttctgcagtgg

SEQ ID NO: 4248 - DNA, 17 bp, Arabidopsis thaliana
aaagttttcttaggatg

SEQ ID NO: 4249 - DNA, 17 bp, Arabidopsis thaliana
aaagttttgctaagcac

SEQ ID NO: 4250 - DNA, 17 bp, Arabidopsis thaliana
aaagttttgctttcagt

SEQ ID NO: 4251 - DNA, 17 bp, Arabidopsis thaliana
aaagttttggctctatc

SEQ ID NO: 4252 - DNA, 17 bp, Arabidopsis thaliana
aaagttttggctgacac

SEQ ID NO: 4253 - DNA, 17 bp, Arabidopsis thaliana
aaagtttttcttcatgg

SEQ ID NO: 4254 - DNA, 17 bp, Arabidopsis thaliana
aaagtttttttgtttgg

SEQ ID NO: 4255 - DNA, 17 bp, Arabidopsis thaliana
aaataaaaaatttccgg

SEQ ID NO: 4256 - DNA, 17 bp, Arabidopsis thaliana
aaataaaagatcacgaa

SEQ ID NO: 4257 - DNA, 17 bp, Arabidopsis thaliana
aaataaacttggtccgc

SEQ ID NO: 4258 - DNA, 17 bp, Arabidopsis thaliana
aaataaatcctcaagtt

SEQ ID NO: 4259 - DNA, 17 bp, Arabidopsis thaliana
aaataaatcctggagtt

SEQ ID NO: 4260 - DNA, 17 bp, Arabidopsis thaliana
aaataaatctcaacgcg

SEQ ID NO: 4261 - DNA, 17 bp, Arabidopsis thaliana
aaataaatgctgagaat

SEQ ID NO: 4262 - DNA, 17 bp, Arabidopsis thaliana
aaataaattattctcgc

SEQ ID NO: 4263 - DNA, 17 bp, Arabidopsis thaliana
aaataaattgtctctgc

SEQ ID NO: 4264 - DNA, 17 bp, Arabidopsis thaliana
aaataaattgtttccgc

SEQ ID NO: 4265 - DNA, 17 bp, Arabidopsis thaliana
aaataacagtgaatccg

SEQ ID NO: 4266 - DNA, 17 bp, Arabidopsis thaliana
aaataaccaaatgttcg

SEQ ID NO: 4267 - DNA, 17 bp, Arabidopsis thaliana
aaataaccggctgtgtt

SEQ ID NO: 4268 - DNA, 17 bp, Arabidopsis thaliana
aaataaccttgactggc

SEQ ID NO: 4269 - DNA, 17 bp, Arabidopsis thaliana
aaataacgagtttgact

SEQ ID NO: 4270 - DNA, 17 bp, Arabidopsis thaliana
aaataacggtatgggga

SEQ ID NO: 4271 - DNA, 17 bp, Arabidopsis thaliana
aaataacggtccttggc

SEQ ID NO: 4272 - DNA, 17 bp, Arabidopsis thaliana
aaataacgtcctgccaa

SEQ ID NO: 4273 - DNA, 17 bp, Arabidopsis thaliana
aaataacgttacggctg

SEQ ID NO: 4274 - DNA, 17 bp, Arabidopsis thaliana
aaataacgttgtgtgga

SEQ ID NO: 4275 - DNA, 17 bp, Arabidopsis thaliana
aaataacgtttttacaa

SEQ ID NO: 4276 - DNA, 17 bp, Arabidopsis thaliana
aaataactatggaccac

SEQ ID NO: 4277 - DNA, 17 bp, Arabidopsis thaliana
aaataactatgggccca

SEQ ID NO: 4278 - DNA, 17 bp, Arabidopsis thaliana
aaataactttcgttttt

SEQ ID NO: 4279 - DNA, 17 bp, Arabidopsis thaliana
aaataagcactctacgt

SEQ ID NO: 4280 - DNA, 17 bp, Arabidopsis thaliana
aaataagcagattacca

SEQ ID NO: 4281 - DNA, 17 bp, Arabidopsis thaliana
aaataagctgagaacgc

SEQ ID NO: 4282 - DNA, 17 bp, Arabidopsis thaliana
aaataagctgctgagtg

SEQ ID NO: 4283 - DNA, 17 bp, Arabidopsis thaliana
aaataagtccaacacta

SEQ ID NO: 4284 - DNA, 17 bp, Arabidopsis thaliana
aaataagtcccaactac

SEQ ID NO: 4285 - DNA, 17 bp, Arabidopsis thaliana
aaataagtctcaactcc

SEQ ID NO: 4286 - DNA, 17 bp, Arabidopsis thaliana
aaataagttcaagttca

SEQ ID NO: 4287 - DNA, 17 bp, Arabidopsis thaliana
aaataagttgatgagtc

SEQ ID NO: 4288 - DNA, 17 bp, Arabidopsis thaliana
aaataataaatgttagt

SEQ ID NO: 4289 - DNA, 17 bp, Arabidopsis thaliana
aaataatcaccaacttt

SEQ ID NO: 4290 - DNA, 17 bp, Arabidopsis thaliana
aaataatccgaaagact

SEQ ID NO: 4291 - DNA, 17 bp, Arabidopsis thaliana
aaataatctgggtcagt

SEQ ID NO: 4292 - DNA, 17 bp, Arabidopsis thaliana
aaataatctgggtgcta

SEQ ID NO: 4293 - DNA, 17 bp, Arabidopsis thaliana
aaataatgtgctaacga

SEQ ID NO: 4294 - DNA, 17 bp, Arabidopsis thaliana
aaataattgtggctttc

SEQ ID NO: 4295 - DNA, 17 bp, Arabidopsis thaliana
aaatacaacatgcggtg

SEQ ID NO: 4296 - DNA, 17 bp, Arabidopsis thaliana
aaatacaagcattggag

SEQ ID NO: 4297 - DNA, 17 bp, Arabidopsis thaliana
aaatacactgaaaacgc

SEQ ID NO: 4298 - DNA, 17 bp, Arabidopsis thaliana
aaatacactgagaatgt

SEQ ID NO: 4299 - DNA, 17 bp, Arabidopsis thaliana
aaatacagacggcctga

SEQ ID NO: 4300 - DNA, 17 bp, Arabidopsis thaliana
aaatacagcgtttcttc

SEQ ID NO: 4301 - DNA, 17 bp, Arabidopsis thaliana
aaatacagctgagcagc

SEQ ID NO: 4302 - DNA, 17 bp, Arabidopsis thaliana
aaatacatgcgctttta

SEQ ID NO: 4303 - DNA, 17 bp, Arabidopsis thaliana
aaatacatgggctttta

SEQ ID NO: 4304 - DNA, 17 bp, Arabidopsis thaliana
aaatacatgttgcagct

SEQ ID NO: 4305 - DNA, 17 bp, Arabidopsis thaliana
aaataccaaacttttgt

SEQ ID NO: 4306 - DNA, 17 bp, Arabidopsis thaliana
aaataccaggaggttct

SEQ ID NO: 4307 - DNA, 17 bp, Arabidopsis thaliana
aaataccaggaggtttt

SEQ ID NO: 4308 - DNA, 17 bp, Arabidopsis thaliana
aaataccagtgtcacgt

SEQ ID NO: 4309 - DNA, 17 bp, Arabidopsis thaliana
aaataccgttttggctc

SEQ ID NO: 4310 - DNA, 17 bp, Arabidopsis thaliana
aaatacctgtgactcga

SEQ ID NO: 4311 - DNA, 17 bp, Arabidopsis thaliana
aaatacgccgtgaatac

SEQ ID NO: 4312 - DNA, 17 bp, Arabidopsis thaliana
aaatacgcgacggggta

SEQ ID NO: 4313 - DNA, 17 bp, Arabidopsis thaliana
aaatacgctgagaaagc

SEQ ID NO: 4314 - DNA, 17 bp, Arabidopsis thaliana
aaatacgctgttaacat

SEQ ID NO: 4315 - DNA, 17 bp, Arabidopsis thaliana
aaatacgctgttagcat

SEQ ID NO: 4316 - DNA, 17 bp, Arabidopsis thaliana
aaatacggaggaggcgg

SEQ ID NO: 4317 - DNA, 17 bp, Arabidopsis thaliana
aaatacgggacagtaga

SEQ ID NO: 4318 - DNA, 17 bp, Arabidopsis thaliana
aaatacggtgatttcgg

SEQ ID NO: 4319 - DNA, 17 bp, Arabidopsis thaliana
aaatacgtgaactttga

SEQ ID NO: 4320 - DNA, 17 bp, Arabidopsis thaliana
aaatactaccacgggtg

SEQ ID NO: 4321 - DNA, 17 bp, Arabidopsis thaliana
aaatactaggttatgaa

SEQ ID NO: 4322 - DNA, 17 bp, Arabidopsis thaliana
aaatactagtccgggtt

SEQ ID NO: 4323 - DNA, 17 bp, Arabidopsis thaliana
aaatactagtgacggct

SEQ ID NO: 4324 - DNA, 17 bp, Arabidopsis thaliana
aaatactatggattcgg

SEQ ID NO: 4325 - DNA, 17 bp, Arabidopsis thaliana
aaatactattgcacctg

SEQ ID NO: 4326 - DNA, 17 bp, Arabidopsis thaliana
aaatactccatatcgat

SEQ ID NO: 4327 - DNA, 17 bp, Arabidopsis thaliana
aaatactcctgggtgac

SEQ ID NO: 4328 - DNA, 17 bp, Arabidopsis thaliana
aaatactcgaacgggtc

SEQ ID NO: 4329 - DNA, 17 bp, Arabidopsis thaliana
aaatactgaccaaccgt

SEQ ID NO: 4330 - DNA, 17 bp, Arabidopsis thaliana
aaatactgcaatgccat

SEQ ID NO: 4331 - DNA, 17 bp, Arabidopsis thaliana
aaatactggctccgtat

SEQ ID NO: 4332 - DNA, 17 bp, Arabidopsis thaliana
aaatacttagtgaggcg

SEQ ID NO: 4333 - DNA, 17 bp, Arabidopsis thaliana
aaatacttggacccggt

SEQ ID NO: 4334 - DNA, 17 bp, Arabidopsis thaliana
aaatactttttcgggca

SEQ ID NO: 4335 - DNA, 17 bp, Arabidopsis thaliana
aaatagaattttggtct

SEQ ID NO: 4336 - DNA, 17 bp, Arabidopsis thaliana
aaatagaccaacgtgta

SEQ ID NO: 4337 - DNA, 17 bp, Arabidopsis thaliana
aaatagacccatgcgtc

SEQ ID NO: 4338 - DNA, 17 bp, Arabidopsis thaliana
aaatagaccgtttttcc

SEQ ID NO: 4339 - DNA, 17 bp, Arabidopsis thaliana
aaatagacctcttatgt

SEQ ID NO: 4340 - DNA, 17 bp, Arabidopsis thaliana
aaatagacgatcggttg

SEQ ID NO: 4341 - DNA, 17 bp, Arabidopsis thaliana
aaatagactcatcatcg

SEQ ID NO: 4342 - DNA, 17 bp, Arabidopsis thaliana
aaatagacttcaatcgg

SEQ ID NO: 4343 - DNA, 17 bp, Arabidopsis thaliana
aaatagactttcatcaa

SEQ ID NO: 4344 - DNA, 17 bp, Arabidopsis thaliana
aaatagagcctggtgtt

SEQ ID NO: 4345 - DNA, 17 bp, Arabidopsis thaliana
aaatagatcgcggtttt

SEQ ID NO: 4346 - DNA, 17 bp, Arabidopsis thaliana
aaatagatcggttcctg

SEQ ID NO: 4347 - DNA, 17 bp, Arabidopsis thaliana
aaatagattttgcggtt

SEQ ID NO: 4348 - DNA, 17 bp, Arabidopsis thaliana
aaatagcacaaaccctt

SEQ ID NO: 4349 - DNA, 17 bp, Arabidopsis thaliana
aaatagcgacggcgagt

SEQ ID NO: 4350 - DNA, 17 bp, Arabidopsis thaliana
aaatagcgactttcggt

SEQ ID NO: 4351 - DNA, 17 bp, Arabidopsis thaliana
aaatagcgatagtcgcc

SEQ ID NO: 4352 - DNA, 17 bp, Arabidopsis thaliana
aaatagctcagatttta

SEQ ID NO: 4353 - DNA, 17 bp, Arabidopsis thaliana
aaatagctcgacgccaa

SEQ ID NO: 4354 - DNA, 17 bp, Arabidopsis thaliana
aaatagctcgacgccag

SEQ ID NO: 4355 - DNA, 17 bp, Arabidopsis thaliana
aaataggagtggcaccg

SEQ ID NO: 4356 - DNA, 17 bp, Arabidopsis thaliana
aaataggccaacagaga

SEQ ID NO: 4357 - DNA, 17 bp, Arabidopsis thaliana
aaataggcgctcatttg

SEQ ID NO: 4358 - DNA, 17 bp, Arabidopsis thaliana
aaataggcggccttatg

SEQ ID NO: 4359 - DNA, 17 bp, Arabidopsis thaliana
aaataggcgggccttat

SEQ ID NO: 4360 - DNA, 17 bp, Arabidopsis thaliana
aaatagggattccatgc

SEQ ID NO: 4361 - DNA, 17 bp, Arabidopsis thaliana
aaatagggctgggttgg

SEQ ID NO: 4362 - DNA, 17 bp, Arabidopsis thaliana
aaataggtgtctgaggg

SEQ ID NO: 4363 - DNA, 17 bp, Arabidopsis thaliana
aaataggttacagtctt

SEQ ID NO: 4364 - DNA, 17 bp, Arabidopsis thaliana
aaatagtcacgctgtac

SEQ ID NO: 4365 - DNA, 17 bp, Arabidopsis thaliana
aaatagtcactatcaag

SEQ ID NO: 4366 - DNA, 17 bp, Arabidopsis thaliana
aaatagtcgcacctgta

SEQ ID NO: 4367 - DNA, 17 bp, Arabidopsis thaliana
aaatagtcgcttttcgc

SEQ ID NO: 4368 - DNA, 17 bp, Arabidopsis thaliana
aaatagtgagtttactc

SEQ ID NO: 4369 - DNA, 17 bp, Arabidopsis thaliana
aaatagttgaactacga

SEQ ID NO: 4370 - DNA, 17 bp, Arabidopsis thaliana
aaatagttgccaaaatc

SEQ ID NO: 4371 - DNA, 17 bp, Arabidopsis thaliana
aaatagttttttttcgg

SEQ ID NO: 4372 - DNA, 17 bp, Arabidopsis thaliana
aaatatcaacccgtggt

SEQ ID NO: 4373 - DNA, 17 bp, Arabidopsis thaliana
aaatatcaatcaagtga

SEQ ID NO: 4374 - DNA, 17 bp, Arabidopsis thaliana
aaatatcaccagtggcg

SEQ ID NO: 4375 - DNA, 17 bp, Arabidopsis thaliana
aaatatcaccgctgggc

SEQ ID NO: 4376 - DNA, 17 bp, Arabidopsis thaliana
aaatatcaggaggttct

SEQ ID NO: 4377 - DNA, 17 bp, Arabidopsis thaliana
aaatatcaggaggtttt

SEQ ID NO: 4378 - DNA, 17 bp, Arabidopsis thaliana
aaatatcagtggcagcc

SEQ ID NO: 4379 - DNA, 17 bp, Arabidopsis thaliana
aaatatccaatgcaatg

SEQ ID NO: 4380 - DNA, 17 bp, Arabidopsis thaliana
aaatatccacacccttc

SEQ ID NO: 4381 - DNA, 17 bp, Arabidopsis thaliana
aaatatccgatcagctt

SEQ ID NO: 4382 - DNA, 17 bp, Arabidopsis thaliana
aaatatcgactgtcgat

SEQ ID NO: 4383 - DNA, 17 bp, Arabidopsis thaliana
aaatatcgcgagggttg

SEQ ID NO: 4384 - DNA, 17 bp, Arabidopsis thaliana
aaatatcgttggcttaa

SEQ ID NO: 4385 - DNA, 17 bp, Arabidopsis thaliana
aaatatctccacatctc

SEQ ID NO: 4386 - DNA, 17 bp, Arabidopsis thaliana
aaatatctctgcggttt

SEQ ID NO: 4387 - DNA, 17 bp, Arabidopsis thaliana
aaatatctgccgactca

SEQ ID NO: 4388 - DNA, 17 bp, Arabidopsis thaliana
aaatatctggttcgggt

SEQ ID NO: 4389 - DNA, 17 bp, Arabidopsis thaliana
aaatatctgtggaaacg

SEQ ID NO: 4390 - DNA, 17 bp, Arabidopsis thaliana
aaatatcttcgcagact

SEQ ID NO: 4391 - DNA, 17 bp, Arabidopsis thaliana
aaatatcttcggatttt

SEQ ID NO: 4392 - DNA, 17 bp, Arabidopsis thaliana
aaatatgcagcacttag

SEQ ID NO: 4393 - DNA, 17 bp, Arabidopsis thaliana
aaatatgctgattcggc

SEQ ID NO: 4394 - DNA, 17 bp, Arabidopsis thaliana
aaatatggattagaccg

SEQ ID NO: 4395 - DNA, 17 bp, Arabidopsis thaliana
aaatatggctttacgag

SEQ ID NO: 4396 - DNA, 17 bp, Arabidopsis thaliana
aaatatggtgcactccg

SEQ ID NO: 4397 - DNA, 17 bp, Arabidopsis thaliana
aaatatggtgcactcct

SEQ ID NO: 4398 - DNA, 17 bp, Arabidopsis thaliana
aaatatgtcttaggatc

SEQ ID NO: 4399 - DNA, 17 bp, Arabidopsis thaliana
aaatatgtggagaaaat

SEQ ID NO: 4400 - DNA, 17 bp, Arabidopsis thaliana
aaatattaggattcatc

SEQ ID NO: 4401 - DNA, 17 bp, Arabidopsis thaliana
aaatattcggttatggt

SEQ ID NO: 4402 - DNA, 17 bp, Arabidopsis thaliana
aaatattgaatctgacg

SEQ ID NO: 4403 - DNA, 17 bp, Arabidopsis thaliana
aaatattgacagaggaa

SEQ ID NO: 4404 - DNA, 17 bp, Arabidopsis thaliana
aaatattgcactgagaa

SEQ ID NO: 4405 - DNA, 17 bp, Arabidopsis thaliana
aaatattgcattgcttg

SEQ ID NO: 4406 - DNA, 17 bp, Arabidopsis thaliana
aaatattgggccggacc

SEQ ID NO: 4407 - DNA, 17 bp, Arabidopsis thaliana
aaatattgggtcggacc

SEQ ID NO: 4408 - DNA, 17 bp, Arabidopsis thaliana
aaatattggtcaatcga

SEQ ID NO: 4409 - DNA, 17 bp, Arabidopsis thaliana
aaatattgtaacgttcc

SEQ ID NO: 4410 - DNA, 17 bp, Arabidopsis thaliana
aaatattgtccccgcga

SEQ ID NO: 4411 - DNA, 17 bp, Arabidopsis thaliana
aaatattgtgcgaccga

SEQ ID NO: 4412 - DNA, 17 bp, Arabidopsis thaliana
aaatattgtgttggcct

SEQ ID NO: 4413 - DNA, 17 bp, Arabidopsis thaliana
aaatatttcatctgcac

SEQ ID NO: 4414 - DNA, 17 bp, Arabidopsis thaliana
aaatatttgtagtctgc

SEQ ID NO: 4415 - DNA, 17 bp, Arabidopsis thaliana
aaatattttatcgaatt

SEQ ID NO: 4416 - DNA, 17 bp, Arabidopsis thaliana
aaatattttggccactc

SEQ ID NO: 4417 - DNA, 17 bp, Arabidopsis thaliana
aaatcaaacgaccaatt

SEQ ID NO: 4418 - DNA, 17 bp, Arabidopsis thaliana
aaatcaaactcaagatc

SEQ ID NO: 4419 - DNA, 17 bp, Arabidopsis thaliana
aaatcaaagatgtcgag

SEQ ID NO: 4420 - DNA, 17 bp, Arabidopsis thaliana
aaatcaaagtcctacgc

SEQ ID NO: 4421 - DNA, 17 bp, Arabidopsis thaliana
aaatcaaagtttttggg

SEQ ID NO: 4422 - DNA, 17 bp, Arabidopsis thaliana
aaatcaaatctgtcgcg

SEQ ID NO: 4423 - DNA, 17 bp, Arabidopsis thaliana
aaatcaacagtcccaaa

SEQ ID NO: 4424 - DNA, 17 bp, Arabidopsis thaliana
aaatcaaccaaatcctc

SEQ ID NO: 4425 - DNA, 17 bp, Arabidopsis thaliana
aaatcaaccgatctaca

SEQ ID NO: 4426 - DNA, 17 bp, Arabidopsis thaliana
aaatcaacgtcggatga

SEQ ID NO: 4427 - DNA, 17 bp, Arabidopsis thaliana
aaatcaactctttggtg

SEQ ID NO: 4428 - DNA, 17 bp, Arabidopsis thaliana
aaatcaactgagacact

SEQ ID NO: 4429 - DNA, 17 bp, Arabidopsis thaliana
aaatcaagcttcctgct

SEQ ID NO: 4430 - DNA, 17 bp, Arabidopsis thaliana
aaatcaaggttcctgct

SEQ ID NO: 4431 - DNA, 17 bp, Arabidopsis thaliana
aaatcaagtgctgtgtg

SEQ ID NO: 4432 - DNA, 17 bp, Arabidopsis thaliana
aaatcaagttattgggt

SEQ ID NO: 4433 - DNA, 17 bp, Arabidopsis thaliana
aaatcaagtttcctgct

SEQ ID NO: 4434 - DNA, 17 bp, Arabidopsis thaliana
aaatcacacaactcaat

SEQ ID NO: 4435 - DNA, 17 bp, Arabidopsis thaliana
aaatcacaggtttacgt

SEQ ID NO: 4436 - DNA, 17 bp, Arabidopsis thaliana
aaatcacaggtttatgt

SEQ ID NO: 4437 - DNA, 17 bp, Arabidopsis thaliana
aaatcacaggttttcgt

SEQ ID NO: 4438 - DNA, 17 bp, Arabidopsis thaliana
aaatcacaggttttggt

SEQ ID NO: 4439 - DNA, 17 bp, Arabidopsis thaliana
aaatcacagtatctggg

SEQ ID NO: 4440 - DNA, 17 bp, Arabidopsis thaliana
aaatcacagttgcttag

SEQ ID NO: 4441 - DNA, 17 bp, Arabidopsis thaliana
aaatcacagtttcagga

SEQ ID NO: 4442 - DNA, 17 bp, Arabidopsis thaliana
aaatcacatttgtttgg

SEQ ID NO: 4443 - DNA, 17 bp, Arabidopsis thaliana
aaatcaccaccacctcc

SEQ ID NO: 4444 - DNA, 17 bp, Arabidopsis thaliana
aaatcaccgagggtgca

SEQ ID NO: 4445 - DNA, 17 bp, Arabidopsis thaliana
aaatcaccgggactcgc

SEQ ID NO: 4446 - DNA, 17 bp, Arabidopsis thaliana
aaatcaccgggtcctga

SEQ ID NO: 4447 - DNA, 17 bp, Arabidopsis thaliana
aaatcacgaaaatgccc

SEQ ID NO: 4448 - DNA, 17 bp, Arabidopsis thaliana
aaatcacggggttacat

SEQ ID NO: 4449 - DNA, 17 bp, Arabidopsis thaliana
aaatcacgggtctatca

SEQ ID NO: 4450 - DNA, 17 bp, Arabidopsis thaliana
aaatcacgggttacgtt

SEQ ID NO: 4451 - DNA, 17 bp, Arabidopsis thaliana
aaatcacgggtttacgg

SEQ ID NO: 4452 - DNA, 17 bp, Arabidopsis thaliana
aaatcacgggtttacgt

SEQ ID NO: 4453 - DNA, 17 bp, Arabidopsis thaliana
aaatcacgggtttatgt

SEQ ID NO: 4454 - DNA, 17 bp, Arabidopsis thaliana
aaatcacgggtttgcgt

SEQ ID NO: 4455 - DNA, 17 bp, Arabidopsis thaliana
aaatcacgggttttcgt

SEQ ID NO: 4456 - DNA, 17 bp, Arabidopsis thaliana
aaatcacggttgttaac

SEQ ID NO: 4457 - DNA, 17 bp, Arabidopsis thaliana
aaatcactactggattt

SEQ ID NO: 4458 - DNA, 17 bp, Arabidopsis thaliana
aaatcactccttggttg

SEQ ID NO: 4459 - DNA, 17 bp, Arabidopsis thaliana
aaatcagacttgggtca

SEQ ID NO: 4460 - DNA, 17 bp, Arabidopsis thaliana
aaatcagcacatgagga

SEQ ID NO: 4461 - DNA, 17 bp, Arabidopsis thaliana
aaatcagccaggttgtt

SEQ ID NO: 4462 - DNA, 17 bp, Arabidopsis thaliana
aaatcagcccaactcgt

SEQ ID NO: 4463 - DNA, 17 bp, Arabidopsis thaliana
aaatcagccctttgtcg

SEQ ID NO: 4464 - DNA, 17 bp, Arabidopsis thaliana
aaatcagcgagtgcgat

SEQ ID NO: 4465 - DNA, 17 bp, Arabidopsis thaliana
aaatcagctgccggact

SEQ ID NO: 4466 - DNA, 17 bp, Arabidopsis thaliana
aaatcagcttcttgact

SEQ ID NO: 4467 - DNA, 17 bp, Arabidopsis thaliana
aaatcaggattgatgtt

SEQ ID NO: 4468 - DNA, 17 bp, Arabidopsis thaliana
aaatcaggatttcgtga

SEQ ID NO: 4469 - DNA, 17 bp, Arabidopsis thaliana
aaatcaggcagtccatg

SEQ ID NO: 4470 - DNA, 17 bp, Arabidopsis thaliana
aaatcaggcgaaccaac

SEQ ID NO: 4471 - DNA, 17 bp, Arabidopsis thaliana
aaatcaggttgcggttc

SEQ ID NO: 4472 - DNA, 17 bp, Arabidopsis thaliana
aaatcaggttgcggttg

SEQ ID NO: 4473 - DNA, 17 bp, Arabidopsis thaliana
aaatcagtcacttttgt

SEQ ID NO: 4474 - DNA, 17 bp, Arabidopsis thaliana
aaatcagtgacagattt

SEQ ID NO: 4475 - DNA, 17 bp, Arabidopsis thaliana
aaatcagtgacggcgaa

SEQ ID NO: 4476 - DNA, 17 bp, Arabidopsis thaliana
aaatcagtgctcacgct

SEQ ID NO: 4477 - DNA, 17 bp, Arabidopsis thaliana
aaatcagttatagtttg

SEQ ID NO: 4478 - DNA, 17 bp, Arabidopsis thaliana
aaatcagttctttgccg

SEQ ID NO: 4479 - DNA, 17 bp, Arabidopsis thaliana
aaatcataaacccgcat

SEQ ID NO: 4480 - DNA, 17 bp, Arabidopsis thaliana
aaatcataaatcagtcg

SEQ ID NO: 4481 - DNA, 17 bp, Arabidopsis thaliana
aaatcatatgactggtt

SEQ ID NO: 4482 - DNA, 17 bp, Arabidopsis thaliana
aaatcatatgctactcc

SEQ ID NO: 4483 - DNA, 17 bp, Arabidopsis thaliana
aaatcatattgaaccga

SEQ ID NO: 4484 - DNA, 17 bp, Arabidopsis thaliana
aaatcatccacggtttg

SEQ ID NO: 4485 - DNA, 17 bp, Arabidopsis thaliana
aaatcatcgttgggtat

SEQ ID NO: 4486 - DNA, 17 bp, Arabidopsis thaliana
aaatcatctctaccggc

SEQ ID NO: 4487 - DNA, 17 bp, Arabidopsis thaliana
aaatcatctctcaccaa

SEQ ID NO: 4488 - DNA, 17 bp, Arabidopsis thaliana
aaatcatctctcatcaa

SEQ ID NO: 4489 - DNA, 17 bp, Arabidopsis thaliana
aaatcatcttcatttgg

SEQ ID NO: 4490 - DNA, 17 bp, Arabidopsis thaliana
aaatcatgcaccattag

SEQ ID NO: 4491 - DNA, 17 bp, Arabidopsis thaliana
aaatcatgcggcagcgg

SEQ ID NO: 4492 - DNA, 17 bp, Arabidopsis thaliana
aaatcatggaggctttg

SEQ ID NO: 4493 - DNA, 17 bp, Arabidopsis thaliana
aaatcatgggttttcgt

SEQ ID NO: 4494 - DNA, 17 bp, Arabidopsis thaliana
aaatcatgtctcaatgc

SEQ ID NO: 4495 - DNA, 17 bp, Arabidopsis thaliana
aaatcatgtgaagacta

SEQ ID NO: 4496 - DNA, 17 bp, Arabidopsis thaliana
aaatcatgtgcggtgat

SEQ ID NO: 4497 - DNA, 17 bp, Arabidopsis thaliana
aaatcattcaatgccac

SEQ ID NO: 4498 - DNA, 17 bp, Arabidopsis thaliana
aaatcatttgcttggtc

SEQ ID NO: 4499 - DNA, 17 bp, Arabidopsis thaliana
aaatcatttgtctccgc

SEQ ID NO: 4500 - DNA, 17 bp, Arabidopsis thaliana
aaatccaaaaataaacc

SEQ ID NO: 4501 - DNA, 17 bp, Arabidopsis thaliana
aaatccaaccggtttac

SEQ ID NO: 4502 - DNA, 17 bp, Arabidopsis thaliana
aaatccaagtggctcta

SEQ ID NO: 4503 - DNA, 17 bp, Arabidopsis thaliana
aaatccaatctacaatt

SEQ ID NO: 4504 - DNA, 17 bp, Arabidopsis thaliana
aaatccacagcgctttg

SEQ ID NO: 4505 - DNA, 17 bp, Arabidopsis thaliana
aaatccaccaaaaaagt

SEQ ID NO: 4506 - DNA, 17 bp, Arabidopsis thaliana
aaatccacgctatgtct

SEQ ID NO: 4507 - DNA, 17 bp, Arabidopsis thaliana
aaatccacggaaagcca

SEQ ID NO: 4508 - DNA, 17 bp, Arabidopsis thaliana
aaatccacgtaaactaa

SEQ ID NO: 4509 - DNA, 17 bp, Arabidopsis thaliana
aaatccactaaaatatg

SEQ ID NO: 4510 - DNA, 17 bp, Arabidopsis thaliana
aaatccagacttctcat

SEQ ID NO: 4511 - DNA, 17 bp, Arabidopsis thaliana
aaatccagcagccgacc

SEQ ID NO: 4512 - DNA, 17 bp, Arabidopsis thaliana
aaatccagcgattttga

SEQ ID NO: 4513 - DNA, 17 bp, Arabidopsis thaliana
aaatccagcggcagcca

SEQ ID NO: 4514 - DNA, 17 bp, Arabidopsis thaliana
aaatccaggaagttttg

SEQ ID NO: 4515 - DNA, 17 bp, Arabidopsis thaliana
aaatccaggaggttcag

SEQ ID NO: 4516 - DNA, 17 bp, Arabidopsis thaliana
aaatccaggaggttctg

SEQ ID NO: 4517 - DNA, 17 bp, Arabidopsis thaliana
aaatccaggatggttca

SEQ ID NO: 4518 - DNA, 17 bp, Arabidopsis thaliana
aaatccaggtggtctgg

SEQ ID NO: 4519 - DNA, 17 bp, Arabidopsis thaliana
aaatccaggtttttggc

SEQ ID NO: 4520 - DNA, 17 bp, Arabidopsis thaliana
aaatccagtgatgttgg

SEQ ID NO: 4521 - DNA, 17 bp, Arabidopsis thaliana
aaatccatgaggttctg

SEQ ID NO: 4522 - DNA, 17 bp, Arabidopsis thaliana
aaatccatttgattccg

SEQ ID NO: 4523 - DNA, 17 bp, Arabidopsis thaliana
aaatcccaaactttcgc

SEQ ID NO: 4524 - DNA, 17 bp, Arabidopsis thaliana
aaatcccaaagtcatgt

SEQ ID NO: 4525 - DNA, 17 bp, Arabidopsis thaliana
aaatcccaacgattccc

SEQ ID NO: 4526 - DNA, 17 bp, Arabidopsis thaliana
aaatcccacagttgtca

SEQ ID NO: 4527 - DNA, 17 bp, Arabidopsis thaliana
aaatcccagtggcagcc

SEQ ID NO: 4528 - DNA, 17 bp, Arabidopsis thaliana
aaatccccacaggggag

SEQ ID NO: 4529 - DNA, 17 bp, Arabidopsis thaliana
aaatccccactagtgct

SEQ ID NO: 4530 - DNA, 17 bp, Arabidopsis thaliana
aaatccccctgtggttt

SEQ ID NO: 4531 - DNA, 17 bp, Arabidopsis thaliana
aaatcccgagcttcggt

SEQ ID NO: 4532 - DNA, 17 bp, Arabidopsis thaliana
aaatcccgctgccgctg

SEQ ID NO: 4533 - DNA, 17 bp, Arabidopsis thaliana
aaatcccggactgtatt

SEQ ID NO: 4534 - DNA, 17 bp, Arabidopsis thaliana
aaatcccggcggccgga

SEQ ID NO: 4535 - DNA, 17 bp, Arabidopsis thaliana
aaatcccggttaagctc

SEQ ID NO: 4536 - DNA, 17 bp, Arabidopsis thaliana
aaatccctccactgcat

SEQ ID NO: 4537 - DNA, 17 bp, Arabidopsis thaliana
aaatccctccggggaaa

SEQ ID NO: 4538 - DNA, 17 bp, Arabidopsis thaliana
aaatccctgatcgcggg

SEQ ID NO: 4539 - DNA, 17 bp, Arabidopsis thaliana
aaatccctggtcgaggg

SEQ ID NO: 4540 - DNA, 17 bp, Arabidopsis thaliana
aaatccgaaaaacccga

SEQ ID NO: 4541 - DNA, 17 bp, Arabidopsis thaliana
aaatccgaaaatagccc

SEQ ID NO: 4542 - DNA, 17 bp, Arabidopsis thaliana
aaatccgacagaaccgt

SEQ ID NO: 4543 - DNA, 17 bp, Arabidopsis thaliana
aaatccgactaaaagct

SEQ ID NO: 4544 - DNA, 17 bp, Arabidopsis thaliana
aaatccgcatattggcc

SEQ ID NO: 4545 - DNA, 17 bp, Arabidopsis thaliana
aaatccgctaaggagtg

SEQ ID NO: 4546 - DNA, 17 bp, Arabidopsis thaliana
aaatccgctgagatttc

SEQ ID NO: 4547 - DNA, 17 bp, Arabidopsis thaliana
aaatccgctttgctttg

SEQ ID NO: 4548 - DNA, 17 bp, Arabidopsis thaliana
aaatccggaaagtgcta

SEQ ID NO: 4549 - DNA, 17 bp, Arabidopsis thaliana
aaatccggaggaccgaa

SEQ ID NO: 4550 - DNA, 17 bp, Arabidopsis thaliana
aaatccggaggaccgag

SEQ ID NO: 4551 - DNA, 17 bp, Arabidopsis thaliana
aaatccggaggaccgat

SEQ ID NO: 4552 - DNA, 17 bp, Arabidopsis thaliana
aaatccggagtggctag

SEQ ID NO: 4553 - DNA, 17 bp, Arabidopsis thaliana
aaatccgggtgccgcct

SEQ ID NO: 4554 - DNA, 17 bp, Arabidopsis thaliana
aaatccggttactggac

SEQ ID NO: 4555 - DNA, 17 bp, Arabidopsis thaliana
aaatccggttactggat

SEQ ID NO: 4556 - DNA, 17 bp, Arabidopsis thaliana
aaatccggttttcatgg

SEQ ID NO: 4557 - DNA, 17 bp, Arabidopsis thaliana
aaatccgtcaacggttt

SEQ ID NO: 4558 - DNA, 17 bp, Arabidopsis thaliana
aaatccgtcagcgggtc

SEQ ID NO: 4559 - DNA, 17 bp, Arabidopsis thaliana
aaatccgtcagcggttt

SEQ ID NO: 4560 - DNA, 17 bp, Arabidopsis thaliana
aaatccgtcctgctaac

SEQ ID NO: 4561 - DNA, 17 bp, Arabidopsis thaliana
aaatccgtgattttccg

SEQ ID NO: 4562 - DNA, 17 bp, Arabidopsis thaliana
aaatcctaaaacccgaa

SEQ ID NO: 4563 - DNA, 17 bp, Arabidopsis thaliana
aaatcctacagaacgtg

SEQ ID NO: 4564 - DNA, 17 bp, Arabidopsis thaliana
aaatcctacagagtttg

SEQ ID NO: 4565 - DNA, 17 bp, Arabidopsis thaliana
aaatcctagaattgacg

SEQ ID NO: 4566 - DNA, 17 bp, Arabidopsis thaliana
aaatcctagaattgcat

SEQ ID NO: 4567 - DNA, 17 bp, Arabidopsis thaliana
aaatcctaggagttcct

SEQ ID NO: 4568 - DNA, 17 bp, Arabidopsis thaliana
aaatcctatcgactaat

SEQ ID NO: 4569 - DNA, 17 bp, Arabidopsis thaliana
aaatcctatcggctgat

SEQ ID NO: 4570 - DNA, 17 bp, Arabidopsis thaliana
aaatcctattctgtaag

SEQ ID NO: 4571 - DNA, 17 bp, Arabidopsis thaliana
aaatcctcagctttggc

SEQ ID NO: 4572 - DNA, 17 bp, Arabidopsis thaliana
aaatcctcggacccggt

SEQ ID NO: 4573 - DNA, 17 bp, Arabidopsis thaliana
aaatcctcggtcagttt

SEQ ID NO: 4574 - DNA, 17 bp, Arabidopsis thaliana
aaatcctctcagcgttt

SEQ ID NO: 4575 - DNA, 17 bp, Arabidopsis thaliana
aaatcctctcgttttta

SEQ ID NO: 4576 - DNA, 17 bp, Arabidopsis thaliana
aaatcctctggacgcaa

SEQ ID NO: 4577 - DNA, 17 bp, Arabidopsis thaliana
aaatcctctttagagac

SEQ ID NO: 4578 - DNA, 17 bp, Arabidopsis thaliana
aaatcctgagcttagtt

SEQ ID NO: 4579 - DNA, 17 bp, Arabidopsis thaliana
aaatcctgcagttggaa

SEQ ID NO: 4580 - DNA, 17 bp, Arabidopsis thaliana
aaatcctgctcatggct

SEQ ID NO: 4581 - DNA, 17 bp, Arabidopsis thaliana
aaatcctggactgtgtt

SEQ ID NO: 4582 - DNA, 17 bp, Arabidopsis thaliana
aaatcctggagttggga

SEQ ID NO: 4583 - DNA, 17 bp, Arabidopsis thaliana
aaatcctggttctgcac

SEQ ID NO: 4584 - DNA, 17 bp, Arabidopsis thaliana
aaatccttcttctacct

SEQ ID NO: 4585 - DNA, 17 bp, Arabidopsis thaliana
aaatccttgcgaacttg

SEQ ID NO: 4586 - DNA, 17 bp, Arabidopsis thaliana
aaatccttgcggacttg

SEQ ID NO: 4587 - DNA, 17 bp, Arabidopsis thaliana
aaatccttgcgggcttg

SEQ ID NO: 4588 - DNA, 17 bp, Arabidopsis thaliana
aaatccttgcgggcttt

SEQ ID NO: 4589 - DNA, 17 bp, Arabidopsis thaliana
aaatcgagtgtttttcc

SEQ ID NO: 4590 - DNA, 17 bp, Arabidopsis thaliana
aaatcgcaaagtttcgg

SEQ ID NO: 4591 - DNA, 17 bp, Arabidopsis thaliana
aaatcgcaaccagatct

SEQ ID NO: 4592 - DNA, 17 bp, Arabidopsis thaliana
aaatcgcaatgtcctcg

SEQ ID NO: 4593 - DNA, 17 bp, Arabidopsis thaliana
aaatcgcaccgcactcc

SEQ ID NO: 4594 - DNA, 17 bp, Arabidopsis thaliana
aaatcgcaccgcacttc

SEQ ID NO: 4595 - DNA, 17 bp, Arabidopsis thaliana
aaatcgcagtagctgag

SEQ ID NO: 4596 - DNA, 17 bp, Arabidopsis thaliana
aaatcgcagtagctggg

SEQ ID NO: 4597 - DNA, 17 bp, Arabidopsis thaliana
aaatcgcagtagttggg

SEQ ID NO: 4598 - DNA, 17 bp, Arabidopsis thaliana
aaatcgcagtggaccat

SEQ ID NO: 4599 - DNA, 17 bp, Arabidopsis thaliana
aaatcgcattcgcaggc

SEQ ID NO: 4600 - DNA, 17 bp, Arabidopsis thaliana
aaatcgccgtgttttgc

SEQ ID NO: 4601 - DNA, 17 bp, Arabidopsis thaliana
aaatcgcctatctcgtc

SEQ ID NO: 4602 - DNA, 17 bp, Arabidopsis thaliana
aaatcgcctgttttctt

SEQ ID NO: 4603 - DNA, 17 bp, Arabidopsis thaliana
aaatcgccttggtatgt

SEQ ID NO: 4604 - DNA, 17 bp, Arabidopsis thaliana
aaatcgcgttgactacg

SEQ ID NO: 4605 - DNA, 17 bp, Arabidopsis thaliana
aaatcgctctgttgacg

SEQ ID NO: 4606 - DNA, 17 bp, Arabidopsis thaliana
aaatcgctgaagaatct

SEQ ID NO: 4607 - DNA, 17 bp, Arabidopsis thaliana
aaatcgcttctaggtac

SEQ ID NO: 4608 - DNA, 17 bp, Arabidopsis thaliana
aaatcggagatgtgttg

SEQ ID NO: 4609 - DNA, 17 bp, Arabidopsis thaliana
aaatcggatacgactgg

SEQ ID NO: 4610 - DNA, 17 bp, Arabidopsis thaliana
aaatcggatgtctgcca

SEQ ID NO: 4611 - DNA, 17 bp, Arabidopsis thaliana
aaatcggatgtttccag

SEQ ID NO: 4612 - DNA, 17 bp, Arabidopsis thaliana
aaatcggattttctctc

SEQ ID NO: 4613 - DNA, 17 bp, Arabidopsis thaliana
aaatcggccggtttgga

SEQ ID NO: 4614 - DNA, 17 bp, Arabidopsis thaliana
aaatcgggctctatctg

SEQ ID NO: 4615 - DNA, 17 bp, Arabidopsis thaliana
aaatcgggctgctagtc

SEQ ID NO: 4616 - DNA, 17 bp, Arabidopsis thaliana
aaatcggggtgtccatg

SEQ ID NO: 4617 - DNA, 17 bp, Arabidopsis thaliana
aaatcggtcctgttaat

SEQ ID NO: 4618 - DNA, 17 bp, Arabidopsis thaliana
aaatcggtgttaatcgg

SEQ ID NO: 4619 - DNA, 17 bp, Arabidopsis thaliana
aaatcggttaccgcttt

SEQ ID NO: 4620 - DNA, 17 bp, Arabidopsis thaliana
aaatcggttcatgaatg

SEQ ID NO: 4621 - DNA, 17 bp, Arabidopsis thaliana
aaatcgtaagccgattc

SEQ ID NO: 4622 - DNA, 17 bp, Arabidopsis thaliana
aaatcgtaccgcatttt

SEQ ID NO: 4623 - DNA, 17 bp, Arabidopsis thaliana
aaatcgtaggcgctttt

SEQ ID NO: 4624 - DNA, 17 bp, Arabidopsis thaliana
aaatcgtatgcgggaac

SEQ ID NO: 4625 - DNA, 17 bp, Arabidopsis thaliana
aaatcgtcaatcggctg

SEQ ID NO: 4626 - DNA, 17 bp, Arabidopsis thaliana
aaatcgtccttatgcac

SEQ ID NO: 4627 - DNA, 17 bp, Arabidopsis thaliana
aaatcgtctaacctgta

SEQ ID NO: 4628 - DNA, 17 bp, Arabidopsis thaliana
aaatcgtctattcgtgg

SEQ ID NO: 4629 - DNA, 17 bp, Arabidopsis thaliana
aaatcgtctgcaagact

SEQ ID NO: 4630 - DNA, 17 bp, Arabidopsis thaliana
aaatcgtctggcgatct

SEQ ID NO: 4631 - DNA, 17 bp, Arabidopsis thaliana
aaatcgtctttaaacta

SEQ ID NO: 4632 - DNA, 17 bp, Arabidopsis thaliana
aaatcgtgcctagatct

SEQ ID NO: 4633 - DNA, 17 bp, Arabidopsis thaliana
aaatcgtggatcagttt

SEQ ID NO: 4634 - DNA, 17 bp, Arabidopsis thaliana
aaatcgttcaggttcgt

SEQ ID NO: 4635 - DNA, 17 bp, Arabidopsis thaliana
aaatcgttcgtctgact

SEQ ID NO: 4636 - DNA, 17 bp, Arabidopsis thaliana
aaatcgttgtggatatg

SEQ ID NO: 4637 - DNA, 17 bp, Arabidopsis thaliana
aaatcgtttcacagaga

SEQ ID NO: 4638 - DNA, 17 bp, Arabidopsis thaliana
aaatcgtttgtctgtcg

SEQ ID NO: 4639 - DNA, 17 bp, Arabidopsis thaliana
aaatctaaccggatttt

SEQ ID NO: 4640 - DNA, 17 bp, Arabidopsis thaliana
aaatctaacggctaata

SEQ ID NO: 4641 - DNA, 17 bp, Arabidopsis thaliana
aaatctaagatccgttc

SEQ ID NO: 4642 - DNA, 17 bp, Arabidopsis thaliana
aaatctaagtgttgact

SEQ ID NO: 4643 - DNA, 17 bp, Arabidopsis thaliana
aaatctaagtgttgagt

SEQ ID NO: 4644 - DNA, 17 bp, Arabidopsis thaliana
aaatctaatggactctc

SEQ ID NO: 4645 - DNA, 17 bp, Arabidopsis thaliana
aaatctaatttgacgcc

SEQ ID NO: 4646 - DNA, 17 bp, Arabidopsis thaliana
aaatctacaaaagtctt

SEQ ID NO: 4647 - DNA, 17 bp, Arabidopsis thaliana
aaatctacaggtttttt

SEQ ID NO: 4648 - DNA, 17 bp, Arabidopsis thaliana
aaatctaccttggattc

SEQ ID NO: 4649 - DNA, 17 bp, Arabidopsis thaliana
aaatctactgaaccatt

SEQ ID NO: 4650 - DNA, 17 bp, Arabidopsis thaliana
aaatctactgcgttccg

SEQ ID NO: 4651 - DNA, 17 bp, Arabidopsis thaliana
aaatctacttcttggtt

SEQ ID NO: 4652 - DNA, 17 bp, Arabidopsis thaliana
aaatctagactcagggg

SEQ ID NO: 4653 - DNA, 17 bp, Arabidopsis thaliana
aaatctagattatcttt

SEQ ID NO: 4654 - DNA, 17 bp, Arabidopsis thaliana
aaatctagcagtgtctg

SEQ ID NO: 4655 - DNA, 17 bp, Arabidopsis thaliana
aaatctagtggcagcca

SEQ ID NO: 4656 - DNA, 17 bp, Arabidopsis thaliana
aaatctagtggcagtcg

SEQ ID NO: 4657 - DNA, 17 bp, Arabidopsis thaliana
aaatctatacgtcagtc

SEQ ID NO: 4658 - DNA, 17 bp, Arabidopsis thaliana
aaatctatcatgcaact

SEQ ID NO: 4659 - DNA, 17 bp, Arabidopsis thaliana
aaatctatcgggtccga

SEQ ID NO: 4660 - DNA, 17 bp, Arabidopsis thaliana
aaatctatcttttgggc

SEQ ID NO: 4661 - DNA, 17 bp, Arabidopsis thaliana
aaatctatggtcgattt

SEQ ID NO: 4662 - DNA, 17 bp, Arabidopsis thaliana
aaatctatgtgttgagt

SEQ ID NO: 4663 - DNA, 17 bp, Arabidopsis thaliana
aaatctattgactgctt

SEQ ID NO: 4664 - DNA, 17 bp, Arabidopsis thaliana
aaatctatttcgttgtc

SEQ ID NO: 4665 - DNA, 17 bp, Arabidopsis thaliana
aaatctatttgaatccc

SEQ ID NO: 4666 - DNA, 17 bp, Arabidopsis thaliana
aaatctatttgtgccta

SEQ ID NO: 4667 - DNA, 17 bp, Arabidopsis thaliana
aaatctcaacctgaatc

SEQ ID NO: 4668 - DNA, 17 bp, Arabidopsis thaliana
aaatctcaactccagga

SEQ ID NO: 4669 - DNA, 17 bp, Arabidopsis thaliana
aaatctcaatcgcgggt

SEQ ID NO: 4670 - DNA, 17 bp, Arabidopsis thaliana
aaatctcacgagtcctt

SEQ ID NO: 4671 - DNA, 17 bp, Arabidopsis thaliana
aaatctcactatatgga

SEQ ID NO: 4672 - DNA, 17 bp, Arabidopsis thaliana
aaatctcagaagattca

SEQ ID NO: 4673 - DNA, 17 bp, Arabidopsis thaliana
aaatctcagtagctgag

SEQ ID NO: 4674 - DNA, 17 bp, Arabidopsis thaliana
aaatctcagtataaacc

SEQ ID NO: 4675 - DNA, 17 bp, Arabidopsis thaliana
aaatctcagtctaattc

SEQ ID NO: 4676 - DNA, 17 bp, Arabidopsis thaliana
aaatctcagtgcgtaag

SEQ ID NO: 4677 - DNA, 17 bp, Arabidopsis thaliana
aaatctcagttttcttc

SEQ ID NO: 4678 - DNA, 17 bp, Arabidopsis thaliana
aaatctcatagtgcggt

SEQ ID NO: 4679 - DNA, 17 bp, Arabidopsis thaliana
aaatctcatcgactgat

SEQ ID NO: 4680 - DNA, 17 bp, Arabidopsis thaliana
aaatctccatagccgga

SEQ ID NO: 4681 - DNA, 17 bp, Arabidopsis thaliana
aaatctcccaggtgaag

SEQ ID NO: 4682 - DNA, 17 bp, Arabidopsis thaliana
aaatctccggttgaata

SEQ ID NO: 4683 - DNA, 17 bp, Arabidopsis thaliana
aaatctccgtaggggtc

SEQ ID NO: 4684 - DNA, 17 bp, Arabidopsis thaliana
aaatctcctccccgtcg

SEQ ID NO: 4685 - DNA, 17 bp, Arabidopsis thaliana
aaatctcctgcacactt

SEQ ID NO: 4686 - DNA, 17 bp, Arabidopsis thaliana
aaatctcctgctaccag

SEQ ID NO: 4687 - DNA, 17 bp, Arabidopsis thaliana
aaatctccttgacgagc

SEQ ID NO: 4688 - DNA, 17 bp, Arabidopsis thaliana
aaatctcgccttatcta

SEQ ID NO: 4689 - DNA, 17 bp, Arabidopsis thaliana
aaatctcggatcagctt

SEQ ID NO: 4690 - DNA, 17 bp, Arabidopsis thaliana
aaatctcggggttacgt

SEQ ID NO: 4691 - DNA, 17 bp, Arabidopsis thaliana
aaatctcgggttacgtt

SEQ ID NO: 4692 - DNA, 17 bp, Arabidopsis thaliana
aaatctcgggtttacgt

SEQ ID NO: 4693 - DNA, 17 bp, Arabidopsis thaliana
aaatctcgtgcttttcg

SEQ ID NO: 4694 - DNA, 17 bp, Arabidopsis thaliana
aaatctcgtgctttttc

SEQ ID NO: 4695 - DNA, 17 bp, Arabidopsis thaliana
aaatctcgttcaagggg

SEQ ID NO: 4696 - DNA, 17 bp, Arabidopsis thaliana
aaatctcgttcaaggtg

SEQ ID NO: 4697 - DNA, 17 bp, Arabidopsis thaliana
aaatctctagttgagga

SEQ ID NO: 4698 - DNA, 17 bp, Arabidopsis thaliana
aaatctctatcgccgga

SEQ ID NO: 4699 - DNA, 17 bp, Arabidopsis thaliana
aaatctctcaggtgaaa

SEQ ID NO: 4700 - DNA, 17 bp, Arabidopsis thaliana
aaatctctccacattaa

SEQ ID NO: 4701 - DNA, 17 bp, Arabidopsis thaliana
aaatctctcgagtagaa

SEQ ID NO: 4702 - DNA, 17 bp, Arabidopsis thaliana
aaatctctcgatgacct

SEQ ID NO: 4703 - DNA, 17 bp, Arabidopsis thaliana
aaatctctcggatgttt

SEQ ID NO: 4704 - DNA, 17 bp, Arabidopsis thaliana
aaatctctctctctctc

SEQ ID NO: 4705 - DNA, 17 bp, Arabidopsis thaliana
aaatctctctgcatgca

SEQ ID NO: 4706 - DNA, 17 bp, Arabidopsis thaliana
aaatctctctgggagtg

SEQ ID NO: 4707 - DNA, 17 bp, Arabidopsis thaliana
aaatctctctttgttcg

SEQ ID NO: 4708 - DNA, 17 bp, Arabidopsis thaliana
aaatctctgctgtgctg

SEQ ID NO: 4709 - DNA, 17 bp, Arabidopsis thaliana
aaatctctggttttgca

SEQ ID NO: 4710 - DNA, 17 bp, Arabidopsis thaliana
aaatctctggttttgta

SEQ ID NO: 4711 - DNA, 17 bp, Arabidopsis thaliana
aaatctcttcaggagtt

SEQ ID NO: 4712 - DNA, 17 bp, Arabidopsis thaliana
aaatctcttgatttacc

SEQ ID NO: 4713 - DNA, 17 bp, Arabidopsis thaliana
aaatctcttgcacactt

SEQ ID NO: 4714 - DNA, 17 bp, Arabidopsis thaliana
aaatctctttgcatgca

SEQ ID NO: 4715 - DNA, 17 bp, Arabidopsis thaliana
aaatctctttggcggga

SEQ ID NO: 4716 - DNA, 17 bp, Arabidopsis thaliana
aaatctgaagactaatt

SEQ ID NO: 4717 - DNA, 17 bp, Arabidopsis thaliana
aaatctgacaagtggcg

SEQ ID NO: 4718 - DNA, 17 bp, Arabidopsis thaliana
aaatctgacatttttgt

SEQ ID NO: 4719 - DNA, 17 bp, Arabidopsis thaliana
aaatctgacggagccgc

SEQ ID NO: 4720 - DNA, 17 bp, Arabidopsis thaliana
aaatctgacttgtggca

SEQ ID NO: 4721 - DNA, 17 bp, Arabidopsis thaliana
aaatctgagttaaacgt

SEQ ID NO: 4722 - DNA, 17 bp, Arabidopsis thaliana
aaatctgatatcatacg

SEQ ID NO: 4723 - DNA, 17 bp, Arabidopsis thaliana
aaatctgcaatcgtcac

SEQ ID NO: 4724 - DNA, 17 bp, Arabidopsis thaliana
aaatctgcaattgctct

SEQ ID NO: 4725 - DNA, 17 bp, Arabidopsis thaliana
aaatctgcaggattaac

SEQ ID NO: 4726 - DNA, 17 bp, Arabidopsis thaliana
aaatctgcaggtttcgg

SEQ ID NO: 4727 - DNA, 17 bp, Arabidopsis thaliana
aaatctgccgttgagcg

SEQ ID NO: 4728 - DNA, 17 bp, Arabidopsis thaliana
aaatctgccttttttgc

SEQ ID NO: 4729 - DNA, 17 bp, Arabidopsis thaliana
aaatctgcgaaaatggt

SEQ ID NO: 4730 - DNA, 17 bp, Arabidopsis thaliana
aaatctgcgcctttgtg

SEQ ID NO: 4731 - DNA, 17 bp, Arabidopsis thaliana
aaatctgcgtgacatat

SEQ ID NO: 4732 - DNA, 17 bp, Arabidopsis thaliana
aaatctgcgtgacgtat

SEQ ID NO: 4733 - DNA, 17 bp, Arabidopsis thaliana
aaatctgctccgcctga

SEQ ID NO: 4734 - DNA, 17 bp, Arabidopsis thaliana
aaatctgctgcagcctt

SEQ ID NO: 4735 - DNA, 17 bp, Arabidopsis thaliana
aaatctgctgggcctca

SEQ ID NO: 4736 - DNA, 17 bp, Arabidopsis thaliana
aaatctgctgtgttcga

SEQ ID NO: 4737 - DNA, 17 bp, Arabidopsis thaliana
aaatctgcttagtggaa

SEQ ID NO: 4738 - DNA, 17 bp, Arabidopsis thaliana
aaatctgcttcgttcct

SEQ ID NO: 4739 - DNA, 17 bp, Arabidopsis thaliana
aaatctggatcctagct

SEQ ID NO: 4740 - DNA, 17 bp, Arabidopsis thaliana
aaatctggcccaagtcg

SEQ ID NO: 4741 - DNA, 17 bp, Arabidopsis thaliana
aaatctggcgatttcga

SEQ ID NO: 4742 - DNA, 17 bp, Arabidopsis thaliana
aaatctggctaagttcg

SEQ ID NO: 4743 - DNA, 17 bp, Arabidopsis thaliana
aaatctgggatggtgcc

SEQ ID NO: 4744 - DNA, 17 bp, Arabidopsis thaliana
aaatctgggtgagactc

SEQ ID NO: 4745 - DNA, 17 bp, Arabidopsis thaliana
aaatctgggtggtattt

SEQ ID NO: 4746 - DNA, 17 bp, Arabidopsis thaliana
aaatctggtcatgtggt

SEQ ID NO: 4747 - DNA, 17 bp, Arabidopsis thaliana
aaatctggttcttggca

SEQ ID NO: 4748 - DNA, 17 bp, Arabidopsis thaliana
aaatctggttgactcag

SEQ ID NO: 4749 - DNA, 17 bp, Arabidopsis thaliana
aaatctggttggtttca

SEQ ID NO: 4750 - DNA, 17 bp, Arabidopsis thaliana
aaatctgtaagttggcc

SEQ ID NO: 4751 - DNA, 17 bp, Arabidopsis thaliana
aaatctgtaggcacttc

SEQ ID NO: 4752 - DNA, 17 bp, Arabidopsis thaliana
aaatctgtagtccaacg

SEQ ID NO: 4753 - DNA, 17 bp, Arabidopsis thaliana
aaatctgtcagttgggc

SEQ ID NO: 4754 - DNA, 17 bp, Arabidopsis thaliana
aaatctgtctcgtctcg

SEQ ID NO: 4755 - DNA, 17 bp, Arabidopsis thaliana
aaatctgtgatcgataa

SEQ ID NO: 4756 - DNA, 17 bp, Arabidopsis thaliana
aaatctgtggagactgt

SEQ ID NO: 4757 - DNA, 17 bp, Arabidopsis thaliana
aaatctgtggctcttgt

SEQ ID NO: 4758 - DNA, 17 bp, Arabidopsis thaliana
aaatctgtgtagtcgct

SEQ ID NO: 4759 - DNA, 17 bp, Arabidopsis thaliana
aaatctgtgtctgttgt

SEQ ID NO: 4760 - DNA, 17 bp, Arabidopsis thaliana
aaatctgttagttgggc

SEQ ID NO: 4761 - DNA, 17 bp, Arabidopsis thaliana
aaatctgttatgctttg

SEQ ID NO: 4762 - DNA, 17 bp, Arabidopsis thaliana
aaatctgttatggttgc

SEQ ID NO: 4763 - DNA, 17 bp, Arabidopsis thaliana
aaatctgttgaatggca

SEQ ID NO: 4764 - DNA, 17 bp, Arabidopsis thaliana
aaatctgttgggttagt

SEQ ID NO: 4765 - DNA, 17 bp, Arabidopsis thaliana
aaatctgttggtgatca

SEQ ID NO: 4766 - DNA, 17 bp, Arabidopsis thaliana
aaatcttaaacttgtgt

SEQ ID NO: 4767 - DNA, 17 bp, Arabidopsis thaliana
aaatcttaatcgtctcg

SEQ ID NO: 4768 - DNA, 17 bp, Arabidopsis thaliana
aaatcttactagcaggt

SEQ ID NO: 4769 - DNA, 17 bp, Arabidopsis thaliana
aaatcttagtatctggg

SEQ ID NO: 4770 - DNA, 17 bp, Arabidopsis thaliana
aaatcttatcggctgtc

SEQ ID NO: 4771 - DNA, 17 bp, Arabidopsis thaliana
aaatcttcaaagtgaca

SEQ ID NO: 4772 - DNA, 17 bp, Arabidopsis thaliana
aaatcttcagcgctcga

SEQ ID NO: 4773 - DNA, 17 bp, Arabidopsis thaliana
aaatcttccggctaaat

SEQ ID NO: 4774 - DNA, 17 bp, Arabidopsis thaliana
aaatcttcggacgagtt

SEQ ID NO: 4775 - DNA, 17 bp, Arabidopsis thaliana
aaatcttcggactgtgg

SEQ ID NO: 4776 - DNA, 17 bp, Arabidopsis thaliana
aaatcttcgggttcgag

SEQ ID NO: 4777 - DNA, 17 bp, Arabidopsis thaliana
aaatcttcgggttcggt

SEQ ID NO: 4778 - DNA, 17 bp, Arabidopsis thaliana
aaatcttctcctaccac

SEQ ID NO: 4779 - DNA, 17 bp, Arabidopsis thaliana
aaatcttgaactctcgg

SEQ ID NO: 4780 - DNA, 17 bp, Arabidopsis thaliana
aaatcttgacaaacggc

SEQ ID NO: 4781 - DNA, 17 bp, Arabidopsis thaliana
aaatcttggagctacca

SEQ ID NO: 4782 - DNA, 17 bp, Arabidopsis thaliana
aaatcttgggtttacgt

SEQ ID NO: 4783 - DNA, 17 bp, Arabidopsis thaliana
aaatcttgggtttttgc

SEQ ID NO: 4784 - DNA, 17 bp, Arabidopsis thaliana
aaatcttggttagcgtt

SEQ ID NO: 4785 - DNA, 17 bp, Arabidopsis thaliana
aaatcttgtgtgagctt

SEQ ID NO: 4786 - DNA, 17 bp, Arabidopsis thaliana
aaatctttatttggacc

SEQ ID NO: 4787 - DNA, 17 bp, Arabidopsis thaliana
aaatctttccgatctta

SEQ ID NO: 4788 - DNA, 17 bp, Arabidopsis thaliana
aaatctttcggcttatc

SEQ ID NO: 4789 - DNA, 17 bp, Arabidopsis thaliana
aaatctttctgcatgca

SEQ ID NO: 4790 - DNA, 17 bp, Arabidopsis thaliana
aaatctttcttcgctag

SEQ ID NO: 4791 - DNA, 17 bp, Arabidopsis thaliana
aaatctttgatgacccg

SEQ ID NO: 4792 - DNA, 17 bp, Arabidopsis thaliana
aaatctttgcgggtttg

SEQ ID NO: 4793 - DNA, 17 bp, Arabidopsis thaliana
aaatctttgctctttgg

SEQ ID NO: 4794 - DNA, 17 bp, Arabidopsis thaliana
aaatctttgggttcggg

SEQ ID NO: 4795 - DNA, 17 bp, Arabidopsis thaliana
aaatctttggtgtgctt

SEQ ID NO: 4796 - DNA, 17 bp, Arabidopsis thaliana
aaatctttgtcaagacc

SEQ ID NO: 4797 - DNA, 17 bp, Arabidopsis thaliana
aaatcttttgcggttca

SEQ ID NO: 4798 - DNA, 17 bp, Arabidopsis thaliana
aaatctttttggtgcct

SEQ ID NO: 4799 - DNA, 17 bp, Arabidopsis thaliana
aaatgaaacatctgctg

SEQ ID NO: 4800 - DNA, 17 bp, Arabidopsis thaliana
aaatgaaatccgacgat

SEQ ID NO: 4801 - DNA, 17 bp, Arabidopsis thaliana
aaatgaaatgaactgtg

SEQ ID NO: 4802 - DNA, 17 bp, Arabidopsis thaliana
aaatgaaattgttcctc

SEQ ID NO: 4803 - DNA, 17 bp, Arabidopsis thaliana
aaatgaacaacttggtc

SEQ ID NO: 4804 - DNA, 17 bp, Arabidopsis thaliana
aaatgaacagacctcag

SEQ ID NO: 4805 - DNA, 17 bp, Arabidopsis thaliana
aaatgaacatctgatcc

SEQ ID NO: 4806 - DNA, 17 bp, Arabidopsis thaliana
aaatgaagtaatgcccg

SEQ ID NO: 4807 - DNA, 17 bp, Arabidopsis thaliana
aaatgaagtctctcggt

SEQ ID NO: 4808 - DNA, 17 bp, Arabidopsis thaliana
aaatgaatcagagacgc

SEQ ID NO: 4809 - DNA, 17 bp, Arabidopsis thaliana
aaatgaatggtcaccgt

SEQ ID NO: 4810 - DNA, 17 bp, Arabidopsis thaliana
aaatgaattgtctccgc

SEQ ID NO: 4811 - DNA, 17 bp, Arabidopsis thaliana
aaatgacagaaaccaag

SEQ ID NO: 4812 - DNA, 17 bp, Arabidopsis thaliana
aaatgaccgctacactg

SEQ ID NO: 4813 - DNA, 17 bp, Arabidopsis thaliana
aaatgaccggtcaacga

SEQ ID NO: 4814 - DNA, 17 bp, Arabidopsis thaliana
aaatgaccttcttaatt

SEQ ID NO: 4815 - DNA, 17 bp, Arabidopsis thaliana
aaatgacgatgactcgg

SEQ ID NO: 4816 - DNA, 17 bp, Arabidopsis thaliana
aaatgacggtccttggc

SEQ ID NO: 4817 - DNA, 17 bp, Arabidopsis thaliana
aaatgactatcaacctc

SEQ ID NO: 4818 - DNA, 17 bp, Arabidopsis thaliana
aaatgactatcaccctc

SEQ ID NO: 4819 - DNA, 17 bp, Arabidopsis thaliana
aaatgactgtcgtctag

SEQ ID NO: 4820 - DNA, 17 bp, Arabidopsis thaliana
aaatgactgtgtgaccg

SEQ ID NO: 4821 - DNA, 17 bp, Arabidopsis thaliana
aaatgagagttggaatg

SEQ ID NO: 4822 - DNA, 17 bp, Arabidopsis thaliana
aaatgagatggactaaa

SEQ ID NO: 4823 - DNA, 17 bp, Arabidopsis thaliana
aaatgagccacaatgga

SEQ ID NO: 4824 - DNA, 17 bp, Arabidopsis thaliana
aaatgagctgaccatgg

SEQ ID NO: 4825 - DNA, 17 bp, Arabidopsis thaliana
aaatgagctgtcaaagc

SEQ ID NO: 4826 - DNA, 17 bp, Arabidopsis thaliana
aaatgagctgtctcgct

SEQ ID NO: 4827 - DNA, 17 bp, Arabidopsis thaliana
aaatgaggactattgtc

SEQ ID NO: 4828 - DNA, 17 bp, Arabidopsis thaliana
aaatgagggttttttcg

SEQ ID NO: 4829 - DNA, 17 bp, Arabidopsis thaliana
aaatgaggttttctcct

SEQ ID NO: 4830 - DNA, 17 bp, Arabidopsis thaliana
aaatgagtctactccct

SEQ ID NO: 4831 - DNA, 17 bp, Arabidopsis thaliana
aaatgagttaccgactg

SEQ ID NO: 4832 - DNA, 17 bp, Arabidopsis thaliana
aaatgagttgatgagcc

SEQ ID NO: 4833 - DNA, 17 bp, Arabidopsis thaliana
aaatgagttgttcaacc

SEQ ID NO: 4834 - DNA, 17 bp, Arabidopsis thaliana
aaatgagtttcacaaat

SEQ ID NO: 4835 - DNA, 17 bp, Arabidopsis thaliana
aaatgagtttgcgccta

SEQ ID NO: 4836 - DNA, 17 bp, Arabidopsis thaliana
aaatgatatcagagtcc

SEQ ID NO: 4837 - DNA, 17 bp, Arabidopsis thaliana
aaatgatccacgacagt

SEQ ID NO: 4838 - DNA, 17 bp, Arabidopsis thaliana
aaatgatccatcaaatg

SEQ ID NO: 4839 - DNA, 17 bp, Arabidopsis thaliana
aaatgatccatcggatg

SEQ ID NO: 4840 - DNA, 17 bp, Arabidopsis thaliana
aaatgatccgctgaggt

SEQ ID NO: 4841 - DNA, 17 bp, Arabidopsis thaliana
aaatgatccgctgcggt

SEQ ID NO: 4842 - DNA, 17 bp, Arabidopsis thaliana
aaatgatccggacataa

SEQ ID NO: 4843 - DNA, 17 bp, Arabidopsis thaliana
aaatgatcgccgttaat

SEQ ID NO: 4844 - DNA, 17 bp, Arabidopsis thaliana
aaatgatctcaatgttc

SEQ ID NO: 4845 - DNA, 17 bp, Arabidopsis thaliana
aaatgatcttggctgtc

SEQ ID NO: 4846 - DNA, 17 bp, Arabidopsis thaliana
aaatgatcttgggtctt

SEQ ID NO: 4847 - DNA, 17 bp, Arabidopsis thaliana
aaatgatgatgacgatt

SEQ ID NO: 4848 - DNA, 17 bp, Arabidopsis thaliana
aaatgatgcataccagg

SEQ ID NO: 4849 - DNA, 17 bp, Arabidopsis thaliana
aaatgatggatgaagct

SEQ ID NO: 4850 - DNA, 17 bp, Arabidopsis thaliana
aaatgatgtcgatcgtc

SEQ ID NO: 4851 - DNA, 17 bp, Arabidopsis thaliana
aaatgatgtggtcgtgg

SEQ ID NO: 4852 - DNA, 17 bp, Arabidopsis thaliana
aaatgattaacagggac

SEQ ID NO: 4853 - DNA, 17 bp, Arabidopsis thaliana
aaatgattcctaaggat

SEQ ID NO: 4854 - DNA, 17 bp, Arabidopsis thaliana
aaatgattctacggttt

SEQ ID NO: 4855 - DNA, 17 bp, Arabidopsis thaliana
aaatgattgttgtgcgc

SEQ ID NO: 4856 - DNA, 17 bp, Arabidopsis thaliana
aaatgatttggccagct

SEQ ID NO: 4857 - DNA, 17 bp, Arabidopsis thaliana
aaatgcaaatgccgcca

SEQ ID NO: 4858 - DNA, 17 bp, Arabidopsis thaliana
aaatgccaatgacagcc

SEQ ID NO: 4859 - DNA, 17 bp, Arabidopsis thaliana
aaatgccagtggcaacc

SEQ ID NO: 4860 - DNA, 17 bp, Arabidopsis thaliana
aaatgccagtggcagcc

SEQ ID NO: 4861 - DNA, 17 bp, Arabidopsis thaliana
aaatgccagtggtagcc

SEQ ID NO: 4862 - DNA, 17 bp, Arabidopsis thaliana
aaatgccagtggtagcg

SEQ ID NO: 4863 - DNA, 17 bp, Arabidopsis thaliana
aaatgccatctccattg

SEQ ID NO: 4864 - DNA, 17 bp, Arabidopsis thaliana
aaatgcccgtcaacacg

SEQ ID NO: 4865 - DNA, 17 bp, Arabidopsis thaliana
aaatgccctgttgttga

SEQ ID NO: 4866 - DNA, 17 bp, Arabidopsis thaliana
aaatgccgccatgactc

SEQ ID NO: 4867 - DNA, 17 bp, Arabidopsis thaliana
aaatgccgtctctcgtg

SEQ ID NO: 4868 - DNA, 17 bp, Arabidopsis thaliana
aaatgcctcgcgaagca

SEQ ID NO: 4869 - DNA, 17 bp, Arabidopsis thaliana
aaatgcgaccaatctga

SEQ ID NO: 4870 - DNA, 17 bp, Arabidopsis thaliana
aaatgcgactccggcgt

SEQ ID NO: 4871 - DNA, 17 bp, Arabidopsis thaliana
aaatgcgagccgaacgg

SEQ ID NO: 4872 - DNA, 17 bp, Arabidopsis thaliana
aaatgcgagtggcagcc

SEQ ID NO: 4873 - DNA, 17 bp, Arabidopsis thaliana
aaatgcgatacttggtg

SEQ ID NO: 4874 - DNA, 17 bp, Arabidopsis thaliana
aaatgcgcagtattttg

SEQ ID NO: 4875 - DNA, 17 bp, Arabidopsis thaliana
aaatgcgggtttacgat

SEQ ID NO: 4876 - DNA, 17 bp, Arabidopsis thaliana
aaatgcggttcaagcga

SEQ ID NO: 4877 - DNA, 17 bp, Arabidopsis thaliana
aaatgcggttcaagcgg

SEQ ID NO: 4878 - DNA, 17 bp, Arabidopsis thaliana
aaatgcgtacttgctct

SEQ ID NO: 4879 - DNA, 17 bp, Arabidopsis thaliana
aaatgcgtctcaatggg

SEQ ID NO: 4880 - DNA, 17 bp, Arabidopsis thaliana
aaatgcgtctggcaatt

SEQ ID NO: 4881 - DNA, 17 bp, Arabidopsis thaliana
aaatgcgtcttttctca

SEQ ID NO: 4882 - DNA, 17 bp, Arabidopsis thaliana
aaatgcgtttcattccg

SEQ ID NO: 4883 - DNA, 17 bp, Arabidopsis thaliana
aaatgcgtttggcaatt

SEQ ID NO: 4884 - DNA, 17 bp, Arabidopsis thaliana
aaatgcgtttttggtca

SEQ ID NO: 4885 - DNA, 17 bp, Arabidopsis thaliana
aaatgctaaagtgatga

SEQ ID NO: 4886 - DNA, 17 bp, Arabidopsis thaliana
aaatgctaaattgatga

SEQ ID NO: 4887 - DNA, 17 bp, Arabidopsis thaliana
aaatgctaagcgaacgg

SEQ ID NO: 4888 - DNA, 17 bp, Arabidopsis thaliana
aaatgctaagtgatgag

SEQ ID NO: 4889 - DNA, 17 bp, Arabidopsis thaliana
aaatgctacaactgatt

SEQ ID NO: 4890 - DNA, 17 bp, Arabidopsis thaliana
aaatgctacttcttggt

SEQ ID NO: 4891 - DNA, 17 bp, Arabidopsis thaliana
aaatgctagtgacagcc

SEQ ID NO: 4892 - DNA, 17 bp, Arabidopsis thaliana
aaatgctagtggcagcc

SEQ ID NO: 4893 - DNA, 17 bp, Arabidopsis thaliana
aaatgctcagttacctc

SEQ ID NO: 4894 - DNA, 17 bp, Arabidopsis thaliana
aaatgctctcaaccatg

SEQ ID NO: 4895 - DNA, 17 bp, Arabidopsis thaliana
aaatgctctcagaattg

SEQ ID NO: 4896 - DNA, 17 bp, Arabidopsis thaliana
aaatgctctcgagttcc

SEQ ID NO: 4897 - DNA, 17 bp, Arabidopsis thaliana
aaatgctctgatctcca

SEQ ID NO: 4898 - DNA, 17 bp, Arabidopsis thaliana
aaatgctgagaatcgtt

SEQ ID NO: 4899 - DNA, 17 bp, Arabidopsis thaliana
aaatgcttatgccactg

SEQ ID NO: 4900 - DNA, 17 bp, Arabidopsis thaliana
aaatgcttttgcactct

SEQ ID NO: 4901 - DNA, 17 bp, Arabidopsis thaliana
aaatggacacttccgca

SEQ ID NO: 4902 - DNA, 17 bp, Arabidopsis thaliana
aaatggaccaccacact

SEQ ID NO: 4903 - DNA, 17 bp, Arabidopsis thaliana
aaatggaccattctttc

SEQ ID NO: 4904 - DNA, 17 bp, Arabidopsis thaliana
aaatggacccttcattg

SEQ ID NO: 4905 - DNA, 17 bp, Arabidopsis thaliana
aaatggactcgttatta

SEQ ID NO: 4906 - DNA, 17 bp, Arabidopsis thaliana
aaatggacttaaccgct

SEQ ID NO: 4907 - DNA, 17 bp, Arabidopsis thaliana
aaatggaggatcgatca

SEQ ID NO: 4908 - DNA, 17 bp, Arabidopsis thaliana
aaatggaggtcacagca

SEQ ID NO: 4909 - DNA, 17 bp, Arabidopsis thaliana
aaatggaggtttgcgga

SEQ ID NO: 4910 - DNA, 17 bp, Arabidopsis thaliana
aaatggatcctccagtt

SEQ ID NO: 4911 - DNA, 17 bp, Arabidopsis thaliana
aaatggatctggccaaa

SEQ ID NO: 4912 - DNA, 17 bp, Arabidopsis thaliana
aaatggatgacggttct

SEQ ID NO: 4913 - DNA, 17 bp, Arabidopsis thaliana
aaatggcaagacacctt

SEQ ID NO: 4914 - DNA, 17 bp, Arabidopsis thaliana
aaatggccatttttgaa

SEQ ID NO: 4915 - DNA, 17 bp, Arabidopsis thaliana
aaatggccctaattgac

SEQ ID NO: 4916 - DNA, 17 bp, Arabidopsis thaliana
aaatggccggtcaacaa

SEQ ID NO: 4917 - DNA, 17 bp, Arabidopsis thaliana
aaatggccgttcttagt

SEQ ID NO: 4918 - DNA, 17 bp, Arabidopsis thaliana
aaatggcggtgtggcaa

SEQ ID NO: 4919 - DNA, 17 bp, Arabidopsis thaliana
aaatggcggtttttcgg

SEQ ID NO: 4920 - DNA, 17 bp, Arabidopsis thaliana
aaatggctctctctatc

SEQ ID NO: 4921 - DNA, 17 bp, Arabidopsis thaliana
aaatggctgccaaaatg

SEQ ID NO: 4922 - DNA, 17 bp, Arabidopsis thaliana
aaatgggacggacctaa

SEQ ID NO: 4923 - DNA, 17 bp, Arabidopsis thaliana
aaatgggcctacatcgg

SEQ ID NO: 4924 - DNA, 17 bp, Arabidopsis thaliana
aaatgggcctatggttt

SEQ ID NO: 4925 - DNA, 17 bp, Arabidopsis thaliana
aaatgggcctgcgtttt

SEQ ID NO: 4926 - DNA, 17 bp, Arabidopsis thaliana
aaatgggcctgctgctt

SEQ ID NO: 4927 - DNA, 17 bp, Arabidopsis thaliana
aaatgggcgtattctcc

SEQ ID NO: 4928 - DNA, 17 bp, Arabidopsis thaliana
aaatgggctgaccacgg

SEQ ID NO: 4929 - DNA, 17 bp, Arabidopsis thaliana
aaatgggctgaccatgg

SEQ ID NO: 4930 - DNA, 17 bp, Arabidopsis thaliana
aaatgggctgatagggt

SEQ ID NO: 4931 - DNA, 17 bp, Arabidopsis thaliana
aaatgggcttaccatgg

SEQ ID NO: 4932 - DNA, 17 bp, Arabidopsis thaliana
aaatggggtgggttagc

SEQ ID NO: 4933 - DNA, 17 bp, Arabidopsis thaliana
aaatgggtatgcgggct

SEQ ID NO: 4934 - DNA, 17 bp, Arabidopsis thaliana
aaatgggtcacgggccg

SEQ ID NO: 4935 - DNA, 17 bp, Arabidopsis thaliana
aaatgggtcgtcgtcgt

SEQ ID NO: 4936 - DNA, 17 bp, Arabidopsis thaliana
aaatgggtctgacattg

SEQ ID NO: 4937 - DNA, 17 bp, Arabidopsis thaliana
aaatgggtgggttttac

SEQ ID NO: 4938 - DNA, 17 bp, Arabidopsis thaliana
aaatgggttgtccaaca

SEQ ID NO: 4939 - DNA, 17 bp, Arabidopsis thaliana
aaatggtagttttgcaa

SEQ ID NO: 4940 - DNA, 17 bp, Arabidopsis thaliana
aaatggtccaattggga

SEQ ID NO: 4941 - DNA, 17 bp, Arabidopsis thaliana
aaatggtccccggttgc

SEQ ID NO: 4942 - DNA, 17 bp, Arabidopsis thaliana
aaatggtccgcagtggg

SEQ ID NO: 4943 - DNA, 17 bp, Arabidopsis thaliana
aaatggtccgctgcggt

SEQ ID NO: 4944 - DNA, 17 bp, Arabidopsis thaliana
aaatggtccgtccatag

SEQ ID NO: 4945 - DNA, 17 bp, Arabidopsis thaliana
aaatggtcctcagtgaa

SEQ ID NO: 4946 - DNA, 17 bp, Arabidopsis thaliana
aaatggtcggaactgtt

SEQ ID NO: 4947 - DNA, 17 bp, Arabidopsis thaliana
aaatggtcggattgctg

SEQ ID NO: 4948 - DNA, 17 bp, Arabidopsis thaliana
aaatggtctccaacttt

SEQ ID NO: 4949 - DNA, 17 bp, Arabidopsis thaliana
aaatggtctctgaattc

SEQ ID NO: 4950 - DNA, 17 bp, Arabidopsis thaliana
aaatggtcttgacctct

SEQ ID NO: 4951 - DNA, 17 bp, Arabidopsis thaliana
aaatggtgaaaaccaca

SEQ ID NO: 4952 - DNA, 17 bp, Arabidopsis thaliana
aaatggtgatgttcgtt

SEQ ID NO: 4953 - DNA, 17 bp, Arabidopsis thaliana
aaatggtggagcgattt

SEQ ID NO: 4954 - DNA, 17 bp, Arabidopsis thaliana
aaatggtgtgaacgaag

SEQ ID NO: 4955 - DNA, 17 bp, Arabidopsis thaliana
aaatggtgtggttcgtt

SEQ ID NO: 4956 - DNA, 17 bp, Arabidopsis thaliana
aaatggttattgcccac

SEQ ID NO: 4957 - DNA, 17 bp, Arabidopsis thaliana
aaatggttcaccacaag

SEQ ID NO: 4958 - DNA, 17 bp, Arabidopsis thaliana
aaatgtaaccgtgattt

SEQ ID NO: 4959 - DNA, 17 bp, Arabidopsis thaliana
aaatgtaccatatgacc

SEQ ID NO: 4960 - DNA, 17 bp, Arabidopsis thaliana
aaatgtacctctaaagt

SEQ ID NO: 4961 - DNA, 17 bp, Arabidopsis thaliana
aaatgtatccgtttcgg

SEQ ID NO: 4962 - DNA, 17 bp, Arabidopsis thaliana
aaatgtcaatggcagcc

SEQ ID NO: 4963 - DNA, 17 bp, Arabidopsis thaliana
aaatgtcagccgtgtcg

SEQ ID NO: 4964 - DNA, 17 bp, Arabidopsis thaliana
aaatgtcagtagcagcc

SEQ ID NO: 4965 - DNA, 17 bp, Arabidopsis thaliana
aaatgtcagtcttgtgg

SEQ ID NO: 4966 - DNA, 17 bp, Arabidopsis thaliana
aaatgtcagtggcaacc

SEQ ID NO: 4967 - DNA, 17 bp, Arabidopsis thaliana
aaatgtcagtggcagcc

SEQ ID NO: 4968 - DNA, 17 bp, Arabidopsis thaliana
aaatgtcagtggcagcg

SEQ ID NO: 4969 - DNA, 17 bp, Arabidopsis thaliana
aaatgtcagtggcagct

SEQ ID NO: 4970 - DNA, 17 bp, Arabidopsis thaliana
aaatgtcatatccagtg

SEQ ID NO: 4971 - DNA, 17 bp, Arabidopsis thaliana
aaatgtcattcgaaccg

SEQ ID NO: 4972 - DNA, 17 bp, Arabidopsis thaliana
aaatgtcattcgaacta

SEQ ID NO: 4973 - DNA, 17 bp, Arabidopsis thaliana
aaatgtcattttcaagt

SEQ ID NO: 4974 - DNA, 17 bp, Arabidopsis thaliana
aaatgtcattttgctcc

SEQ ID NO: 4975 - DNA, 17 bp, Arabidopsis thaliana
aaatgtccgagtttcgc

SEQ ID NO: 4976 - DNA, 17 bp, Arabidopsis thaliana
aaatgtcctttcttgcg

SEQ ID NO: 4977 - DNA, 17 bp, Arabidopsis thaliana
aaatgtcgaccaatcgt

SEQ ID NO: 4978 - DNA, 17 bp, Arabidopsis thaliana
aaatgtcgattgtgcac

SEQ ID NO: 4979 - DNA, 17 bp, Arabidopsis thaliana
aaatgtcgtctttcgtg

SEQ ID NO: 4980 - DNA, 17 bp, Arabidopsis thaliana
aaatgtctatgtgattt

SEQ ID NO: 4981 - DNA, 17 bp, Arabidopsis thaliana
aaatgtctcaaagatcg

SEQ ID NO: 4982 - DNA, 17 bp, Arabidopsis thaliana
aaatgtctcttgtcgcc

SEQ ID NO: 4983 - DNA, 17 bp, Arabidopsis thaliana
aaatgtctgaaccacta

SEQ ID NO: 4984 - DNA, 17 bp, Arabidopsis thaliana
aaatgtctgaggagaca

SEQ ID NO: 4985 - DNA, 17 bp, Arabidopsis thaliana
aaatgtctgatgttgct

SEQ ID NO: 4986 - DNA, 17 bp, Arabidopsis thaliana
aaatgtgacacgtttag

SEQ ID NO: 4987 - DNA, 17 bp, Arabidopsis thaliana
aaatgtgaccaatcagg

SEQ ID NO: 4988 - DNA, 17 bp, Arabidopsis thaliana
aaatgtgataaccaccc

SEQ ID NO: 4989 - DNA, 17 bp, Arabidopsis thaliana
aaatgtgatggtgactc

SEQ ID NO: 4990 - DNA, 17 bp, Arabidopsis thaliana
aaatgtgatttggcgat

SEQ ID NO: 4991 - DNA, 17 bp, Arabidopsis thaliana
aaatgtgatttttgttt

SEQ ID NO: 4992 - DNA, 17 bp, Arabidopsis thaliana
aaatgtgccccagaaga

SEQ ID NO: 4993 - DNA, 17 bp, Arabidopsis thaliana
aaatgtggactctgaag

SEQ ID NO: 4994 - DNA, 17 bp, Arabidopsis thaliana
aaatgtggcgatttcga

SEQ ID NO: 4995 - DNA, 17 bp, Arabidopsis thaliana
aaatgtgtcataatcca

SEQ ID NO: 4996 - DNA, 17 bp, Arabidopsis thaliana
aaatgtgtcccaagttc

SEQ ID NO: 4997 - DNA, 17 bp, Arabidopsis thaliana
aaatgtgtgaccaattc

SEQ ID NO: 4998 - DNA, 17 bp, Arabidopsis thaliana
aaatgtgttcatgtcga

SEQ ID NO: 4999 - DNA, 17 bp, Arabidopsis thaliana
aaatgttaaggcggaca

SEQ ID NO: 5000 - DNA, 17 bp, Arabidopsis thaliana
aaatgttacctcaaaag

SEQ ID NO: 5001 - DNA, 17 bp, Arabidopsis thaliana
aaatgttacggatcata

SEQ ID NO: 5002 - DNA, 17 bp, Arabidopsis thaliana
aaatgttatagttgacc

SEQ ID NO: 5003 - DNA, 17 bp, Arabidopsis thaliana
aaatgttattgttgacc

SEQ ID NO: 5004 - DNA, 17 bp, Arabidopsis thaliana
aaatgttcaccaattgg

SEQ ID NO: 5005 - DNA, 17 bp, Arabidopsis thaliana
aaatgttcgactgtggt

SEQ ID NO: 5006 - DNA, 17 bp, Arabidopsis thaliana
aaatgttcggatcgcgg

SEQ ID NO: 5007 - DNA, 17 bp, Arabidopsis thaliana
aaatgttgaccggtcgt

SEQ ID NO: 5008 - DNA, 17 bp, Arabidopsis thaliana
aaatgttgcaacgtgcg

SEQ ID NO: 5009 - DNA, 17 bp, Arabidopsis thaliana
aaatgttgcggatctgg

SEQ ID NO: 5010 - DNA, 17 bp, Arabidopsis thaliana
aaatgttgcggcggagg

SEQ ID NO: 5011 - DNA, 17 bp, Arabidopsis thaliana
aaatgttggagtttgga

SEQ ID NO: 5012 - DNA, 17 bp, Arabidopsis thaliana
aaatgttgggcttaggc

SEQ ID NO: 5013 - DNA, 17 bp, Arabidopsis thaliana
aaatgttgtcttctcca

SEQ ID NO: 5014 - DNA, 17 bp, Arabidopsis thaliana
aaatgtttacgttcacg

SEQ ID NO: 5015 - DNA, 17 bp, Arabidopsis thaliana
aaatgtttatggccacg

SEQ ID NO: 5016 - DNA, 17 bp, Arabidopsis thaliana
aaatgtttccacagccg

SEQ ID NO: 5017 - DNA, 17 bp, Arabidopsis thaliana
aaatgttttcatttgct

SEQ ID NO: 5018 - DNA, 17 bp, Arabidopsis thaliana
aaatgtttttccataat

SEQ ID NO: 5019 - DNA, 17 bp, Arabidopsis thaliana
aaattaaacaggatccg

SEQ ID NO: 5020 - DNA, 17 bp, Arabidopsis thaliana
aaattaaaccgttttgt

SEQ ID NO: 5021 - DNA, 17 bp, Arabidopsis thaliana
aaattaaactcaaaaaa

SEQ ID NO: 5022 - DNA, 17 bp, Arabidopsis thaliana
aaattaaagcaaagtct

SEQ ID NO: 5023 - DNA, 17 bp, Arabidopsis thaliana
aaattaaccgtaaccgc

SEQ ID NO: 5024 - DNA, 17 bp, Arabidopsis thaliana
aaattacaacgaggact

SEQ ID NO: 5025 - DNA, 17 bp, Arabidopsis thaliana
aaattacacatgggccg

SEQ ID NO: 5026 - DNA, 17 bp, Arabidopsis thaliana
aaattacaggccacacc

SEQ ID NO: 5027 - DNA, 17 bp, Arabidopsis thaliana
aaattacaggtttagcc

SEQ ID NO: 5028 - DNA, 17 bp, Arabidopsis thaliana
aaattacaggtttcgcc

SEQ ID NO: 5029 - DNA, 17 bp, Arabidopsis thaliana
aaattaccatcacgatg

SEQ ID NO: 5030 - DNA, 17 bp, Arabidopsis thaliana
aaattacccaatcctga

SEQ ID NO: 5031 - DNA, 17 bp, Arabidopsis thaliana
aaattaccgtctgggat

SEQ ID NO: 5032 - DNA, 17 bp, Arabidopsis thaliana
aaattaccgtctgggta

SEQ ID NO: 5033 - DNA, 17 bp, Arabidopsis thaliana
aaattacgggattcggt

SEQ ID NO: 5034 - DNA, 17 bp, Arabidopsis thaliana
aaattacgggattcgtc

SEQ ID NO: 5035 - DNA, 17 bp, Arabidopsis thaliana
aaattacgggattcgtt

SEQ ID NO: 5036 - DNA, 17 bp, Arabidopsis thaliana
aaattacgggcttcggc

SEQ ID NO: 5037 - DNA, 17 bp, Arabidopsis thaliana
aaattacgggtttacgt

SEQ ID NO: 5038 - DNA, 17 bp, Arabidopsis thaliana
aaattacgggtttatgt

SEQ ID NO: 5039 - DNA, 17 bp, Arabidopsis thaliana
aaattacgggtttcggc

SEQ ID NO: 5040 - DNA, 17 bp, Arabidopsis thaliana
aaattacggttgtttcc

SEQ ID NO: 5041 - DNA, 17 bp, Arabidopsis thaliana
aaattactaccgggatc

SEQ ID NO: 5042 - DNA, 17 bp, Arabidopsis thaliana
aaattactcctaagtgt

SEQ ID NO: 5043 - DNA, 17 bp, Arabidopsis thaliana
aaattacttacaatgag

SEQ ID NO: 5044 - DNA, 17 bp, Arabidopsis thaliana
aaattacttggtagacg

SEQ ID NO: 5045 - DNA, 17 bp, Arabidopsis thaliana
aaattacttggttctct

SEQ ID NO: 5046 - DNA, 17 bp, Arabidopsis thaliana
aaattacttgtggctgc

SEQ ID NO: 5047 - DNA, 17 bp, Arabidopsis thaliana
aaattagaccgctatgt

SEQ ID NO: 5048 - DNA, 17 bp, Arabidopsis thaliana
aaattagaccgctttat

SEQ ID NO: 5049 - DNA, 17 bp, Arabidopsis thaliana
aaattagaccgctttct

SEQ ID NO: 5050 - DNA, 17 bp, Arabidopsis thaliana
aaattagaccgctttgt

SEQ ID NO: 5051 - DNA, 17 bp, Arabidopsis thaliana
aaattagaccgtttgtc

SEQ ID NO: 5052 - DNA, 17 bp, Arabidopsis thaliana
aaattagaccgttttgt

SEQ ID NO: 5053 - DNA, 17 bp, Arabidopsis thaliana
aaattagactaaggcat

SEQ ID NO: 5054 - DNA, 17 bp, Arabidopsis thaliana
aaattagagtgctcaaa

SEQ ID NO: 5055 - DNA, 17 bp, Arabidopsis thaliana
aaattagcgatgtgccg

SEQ ID NO: 5056 - DNA, 17 bp, Arabidopsis thaliana
aaattagcggtgtacag

SEQ ID NO: 5057 - DNA, 17 bp, Arabidopsis thaliana
aaattagcggtgtacta

SEQ ID NO: 5058 - DNA, 17 bp, Arabidopsis thaliana
aaattaggatcattcgt

SEQ ID NO: 5059 - DNA, 17 bp, Arabidopsis thaliana
aaattaggatcctgttc

SEQ ID NO: 5060 - DNA, 17 bp, Arabidopsis thaliana
aaattaggccgttttgt

SEQ ID NO: 5061 - DNA, 17 bp, Arabidopsis thaliana
aaattagggtaacagtg

SEQ ID NO: 5062 - DNA, 17 bp, Arabidopsis thaliana
aaattagggttacagtg

SEQ ID NO: 5063 - DNA, 17 bp, Arabidopsis thaliana
aaattagggttccgtcg

SEQ ID NO: 5064 - DNA, 17 bp, Arabidopsis thaliana
aaattagggttgttgct

SEQ ID NO: 5065 - DNA, 17 bp, Arabidopsis thaliana
aaattaggttccgtcga

SEQ ID NO: 5066 - DNA, 17 bp, Arabidopsis thaliana
aaattaggttttagttt

SEQ ID NO: 5067 - DNA, 17 bp, Arabidopsis thaliana
aaattagtcgtcttgag

SEQ ID NO: 5068 - DNA, 17 bp, Arabidopsis thaliana
aaattagtggaatcgcc

SEQ ID NO: 5069 - DNA, 17 bp, Arabidopsis thaliana
aaattagtggaatcggc

SEQ ID NO: 5070 - DNA, 17 bp, Arabidopsis thaliana
aaattatacgatctgga

SEQ ID NO: 5071 - DNA, 17 bp, Arabidopsis thaliana
aaattatagtcgtcacc

SEQ ID NO: 5072 - DNA, 17 bp, Arabidopsis thaliana
aaattatcagacctgca

SEQ ID NO: 5073 - DNA, 17 bp, Arabidopsis thaliana
aaattatccgctttgac

SEQ ID NO: 5074 - DNA, 17 bp, Arabidopsis thaliana
aaattatccttaaggtg

SEQ ID NO: 5075 - DNA, 17 bp, Arabidopsis thaliana
aaattatcgacgacgag

SEQ ID NO: 5076 - DNA, 17 bp, Arabidopsis thaliana
aaattatctgaacgggt

SEQ ID NO: 5077 - DNA, 17 bp, Arabidopsis thaliana
aaattatgggccaattc

SEQ ID NO: 5078 - DNA, 17 bp, Arabidopsis thaliana
aaattattcactggccg

SEQ ID NO: 5079 - DNA, 17 bp, Arabidopsis thaliana
aaattattggaccttgt

SEQ ID NO: 5080 - DNA, 17 bp, Arabidopsis thaliana
aaattatttcatctgca

SEQ ID NO: 5081 - DNA, 17 bp, Arabidopsis thaliana
aaattatttcctggatc

SEQ ID NO: 5082 - DNA, 17 bp, Arabidopsis thaliana
aaattcaaccaagcgcg

SEQ ID NO: 5083 - DNA, 17 bp, Arabidopsis thaliana
aaattcaactcaactgg

SEQ ID NO: 5084 - DNA, 17 bp, Arabidopsis thaliana
aaattcaagcgcaaaag

SEQ ID NO: 5085 - DNA, 17 bp, Arabidopsis thaliana
aaattcaaggcgtactg

SEQ ID NO: 5086 - DNA, 17 bp, Arabidopsis thaliana
aaattcaatgccagttc

SEQ ID NO: 5087 - DNA, 17 bp, Arabidopsis thaliana
aaattcaatggctaaga

SEQ ID NO: 5088 - DNA, 17 bp, Arabidopsis thaliana
aaattcaccttcttgtg

SEQ ID NO: 5089 - DNA, 17 bp, Arabidopsis thaliana
aaattcacggttaattt

SEQ ID NO: 5090 - DNA, 17 bp, Arabidopsis thaliana
aaattcactcctcttta

SEQ ID NO: 5091 - DNA, 17 bp, Arabidopsis thaliana
aaattcactggtcggga

SEQ ID NO: 5092 - DNA, 17 bp, Arabidopsis thaliana
aaattcagaaatttgcg

SEQ ID NO: 5093 - DNA, 17 bp, Arabidopsis thaliana
aaattcagagtgacgct

SEQ ID NO: 5094 - DNA, 17 bp, Arabidopsis thaliana
aaattcaggaggttctg

SEQ ID NO: 5095 - DNA, 17 bp, Arabidopsis thaliana
aaattcagggatactgg

SEQ ID NO: 5096 - DNA, 17 bp, Arabidopsis thaliana
aaattcagtgtgggctt

SEQ ID NO: 5097 - DNA, 17 bp, Arabidopsis thaliana
aaattcagtgtggggtt

SEQ ID NO: 5098 - DNA, 17 bp, Arabidopsis thaliana
aaattcatcatctggtc

SEQ ID NO: 5099 - DNA, 17 bp, Arabidopsis thaliana
aaattcatccgcttgtt

SEQ ID NO: 5100 - DNA, 17 bp, Arabidopsis thaliana
aaattcatcggtccgac

SEQ ID NO: 5101 - DNA, 17 bp, Arabidopsis thaliana
aaattcatcttagtggg

SEQ ID NO: 5102 - DNA, 17 bp, Arabidopsis thaliana
aaattcatcttgtggac

SEQ ID NO: 5103 - DNA, 17 bp, Arabidopsis thaliana
aaattcatctttgtgtg

SEQ ID NO: 5104 - DNA, 17 bp, Arabidopsis thaliana
aaattcatgggccaact

SEQ ID NO: 5105 - DNA, 17 bp, Arabidopsis thaliana
aaattcatggtggtgca

SEQ ID NO: 5106 - DNA, 17 bp, Arabidopsis thaliana
aaattcattctctggat

SEQ ID NO: 5107 - DNA, 17 bp, Arabidopsis thaliana
aaattccaactagtata

SEQ ID NO: 5108 - DNA, 17 bp, Arabidopsis thaliana
aaattccaacttccggt

SEQ ID NO: 5109 - DNA, 17 bp, Arabidopsis thaliana
aaattccaagtcctttg

SEQ ID NO: 5110 - DNA, 17 bp, Arabidopsis thaliana
aaattccacagtgttct

SEQ ID NO: 5111 - DNA, 17 bp, Arabidopsis thaliana
aaattccacttcacggg

SEQ ID NO: 5112 - DNA, 17 bp, Arabidopsis thaliana
aaattccagacctgggt

SEQ ID NO: 5113 - DNA, 17 bp, Arabidopsis thaliana
aaattccagcaacaagt

SEQ ID NO: 5114 - DNA, 17 bp, Arabidopsis thaliana
aaattccagcgtctacg

SEQ ID NO: 5115 - DNA, 17 bp, Arabidopsis thaliana
aaattcccagaattttt

SEQ ID NO: 5116 - DNA, 17 bp, Arabidopsis thaliana
aaattcccgtcatcgcc

SEQ ID NO: 5117 - DNA, 17 bp, Arabidopsis thaliana
aaattccctgagacttt

SEQ ID NO: 5118 - DNA, 17 bp, Arabidopsis thaliana
aaattccctgagccttt

SEQ ID NO: 5119 - DNA, 17 bp, Arabidopsis thaliana
aaattccgaacctatgg

SEQ ID NO: 5120 - DNA, 17 bp, Arabidopsis thaliana
aaattccgacaaaaatg

SEQ ID NO: 5121 - DNA, 17 bp, Arabidopsis thaliana
aaattccgcagtccggt

SEQ ID NO: 5122 - DNA, 17 bp, Arabidopsis thaliana
aaattccgggtttatcg

SEQ ID NO: 5123 - DNA, 17 bp, Arabidopsis thaliana
aaattccgtccaaggct

SEQ ID NO: 5124 - DNA, 17 bp, Arabidopsis thaliana
aaattcctccatcagcg

SEQ ID NO: 5125 - DNA, 17 bp, Arabidopsis thaliana
aaattcctctgttttcg

SEQ ID NO: 5126 - DNA, 17 bp, Arabidopsis thaliana
aaattcctggaactgta

SEQ ID NO: 5127 - DNA, 17 bp, Arabidopsis thaliana
aaattccttcgaggtgt

SEQ ID NO: 5128 - DNA, 17 bp, Arabidopsis thaliana
aaattcgaatttgactt

SEQ ID NO: 5129 - DNA, 17 bp, Arabidopsis thaliana
aaattcgacatcttctg

SEQ ID NO: 5130 - DNA, 17 bp, Arabidopsis thaliana
aaattcgacatcttctt

SEQ ID NO: 5131 - DNA, 17 bp, Arabidopsis thaliana
aaattcgacgacaaagt

SEQ ID NO: 5132 - DNA, 17 bp, Arabidopsis thaliana
aaattcgactacagagc

SEQ ID NO: 5133 - DNA, 17 bp, Arabidopsis thaliana
aaattcgactgattcgg

SEQ ID NO: 5134 - DNA, 17 bp, Arabidopsis thaliana
aaattcgatatccagta

SEQ ID NO: 5135 - DNA, 17 bp, Arabidopsis thaliana
aaattcgattgcgcaac

SEQ ID NO: 5136 - DNA, 17 bp, Arabidopsis thaliana
aaattcgccactgtttc

SEQ ID NO: 5137 - DNA, 17 bp, Arabidopsis thaliana
aaattcgccggcgattt

SEQ ID NO: 5138 - DNA, 17 bp, Arabidopsis thaliana
aaattcgccgtttactc

SEQ ID NO: 5139 - DNA, 17 bp, Arabidopsis thaliana
aaattcgccgttttctc

SEQ ID NO: 5140 - DNA, 17 bp, Arabidopsis thaliana
aaattcgcgttaagatg

SEQ ID NO: 5141 - DNA, 17 bp, Arabidopsis thaliana
aaattcgctacagttct

SEQ ID NO: 5142 - DNA, 17 bp, Arabidopsis thaliana
aaattcgcttatggtct

SEQ ID NO: 5143 - DNA, 17 bp, Arabidopsis thaliana
aaattcggatcaggttt

SEQ ID NO: 5144 - DNA, 17 bp, Arabidopsis thaliana
aaattcggatgtgcgta

SEQ ID NO: 5145 - DNA, 17 bp, Arabidopsis thaliana
aaattcggccaatccat

SEQ ID NO: 5146 - DNA, 17 bp, Arabidopsis thaliana
aaattcggcgggaaact

SEQ ID NO: 5147 - DNA, 17 bp, Arabidopsis thaliana
aaattcgggtcccactg

SEQ ID NO: 5148 - DNA, 17 bp, Arabidopsis thaliana
aaattcggtactgtgca

SEQ ID NO: 5149 - DNA, 17 bp, Arabidopsis thaliana
aaattcggtattgtgcg

SEQ ID NO: 5150 - DNA, 17 bp, Arabidopsis thaliana
aaattcgtcccaggtgg

SEQ ID NO: 5151 - DNA, 17 bp, Arabidopsis thaliana
aaattcgtcggcgattt

SEQ ID NO: 5152 - DNA, 17 bp, Arabidopsis thaliana
aaattcgttgattccgt

SEQ ID NO: 5153 - DNA, 17 bp, Arabidopsis thaliana
aaattcgttgggctcag

SEQ ID NO: 5154 - DNA, 17 bp, Arabidopsis thaliana
aaattcgtttgactgtc

SEQ ID NO: 5155 - DNA, 17 bp, Arabidopsis thaliana
aaattcgttttaatctc

SEQ ID NO: 5156 - DNA, 17 bp, Arabidopsis thaliana
aaattctaagatccacc

SEQ ID NO: 5157 - DNA, 17 bp, Arabidopsis thaliana
aaattctaaggccatga

SEQ ID NO: 5158 - DNA, 17 bp, Arabidopsis thaliana
aaattctacgacatcca

SEQ ID NO: 5159 - DNA, 17 bp, Arabidopsis thaliana
aaattctactgagtact

SEQ ID NO: 5160 - DNA, 17 bp, Arabidopsis thaliana
aaattctagccggttga

SEQ ID NO: 5161 - DNA, 17 bp, Arabidopsis thaliana
aaattctatcggctgat

SEQ ID NO: 5162 - DNA, 17 bp, Arabidopsis thaliana
aaattctcaaagcccta

SEQ ID NO: 5163 - DNA, 17 bp, Arabidopsis thaliana
aaattctcctggttctg

SEQ ID NO: 5164 - DNA, 17 bp, Arabidopsis thaliana
aaattctctcacagcag

SEQ ID NO: 5165 - DNA, 17 bp, Arabidopsis thaliana
aaattctctctacagtg

SEQ ID NO: 5166 - DNA, 17 bp, Arabidopsis thaliana
aaattctctgagtggtg

SEQ ID NO: 5167 - DNA, 17 bp, Arabidopsis thaliana
aaattctcttctacttt

SEQ ID NO: 5168 - DNA, 17 bp, Arabidopsis thaliana
aaattctctttgctgct

SEQ ID NO: 5169 - DNA, 17 bp, Arabidopsis thaliana
aaattctgagactgatc

SEQ ID NO: 5170 - DNA, 17 bp, Arabidopsis thaliana
aaattctgagccttgtt

SEQ ID NO: 5171 - DNA, 17 bp, Arabidopsis thaliana
aaattctgcacgtcgac

SEQ ID NO: 5172 - DNA, 17 bp, Arabidopsis thaliana
aaattctgcgtctcctt

SEQ ID NO: 5173 - DNA, 17 bp, Arabidopsis thaliana
aaattctggaataatgg

SEQ ID NO: 5174 - DNA, 17 bp, Arabidopsis thaliana
aaattctggcttatggg

SEQ ID NO: 5175 - DNA, 17 bp, Arabidopsis thaliana
aaattctggggctggac

SEQ ID NO: 5176 - DNA, 17 bp, Arabidopsis thaliana
aaattctgtttgggaga

SEQ ID NO: 5177 - DNA, 17 bp, Arabidopsis thaliana
aaattcttgcgggcttg

SEQ ID NO: 5178 - DNA, 17 bp, Arabidopsis thaliana
aaattctttctaatgcc

SEQ ID NO: 5179 - DNA, 17 bp, Arabidopsis thaliana
aaattctttggctctct

SEQ ID NO: 5180 - DNA, 17 bp, Arabidopsis thaliana
aaattgaagatatcttg

SEQ ID NO: 5181 - DNA, 17 bp, Arabidopsis thaliana
aaattgaccctcatcca

SEQ ID NO: 5182 - DNA, 17 bp, Arabidopsis thaliana
aaattgactatgtgcgg

SEQ ID NO: 5183 - DNA, 17 bp, Arabidopsis thaliana
aaattgatctctcttgc

SEQ ID NO: 5184 - DNA, 17 bp, Arabidopsis thaliana
aaattgattccttctcg

SEQ ID NO: 5185 - DNA, 17 bp, Arabidopsis thaliana
aaattgcaactatgtgg

SEQ ID NO: 5186 - DNA, 17 bp, Arabidopsis thaliana
aaattgcaggccacacc

SEQ ID NO: 5187 - DNA, 17 bp, Arabidopsis thaliana
aaattgcaggccacatc

SEQ ID NO: 5188 - DNA, 17 bp, Arabidopsis thaliana
aaattgcaggtcttctg

SEQ ID NO: 5189 - DNA, 17 bp, Arabidopsis thaliana
aaattgcagtcgcagcg

SEQ ID NO: 5190 - DNA, 17 bp, Arabidopsis thaliana
aaattgcatatctctgt

SEQ ID NO: 5191 - DNA, 17 bp, Arabidopsis thaliana
aaattgccgctttccct

SEQ ID NO: 5192 - DNA, 17 bp, Arabidopsis thaliana
aaattgccgttgactca

SEQ ID NO: 5193 - DNA, 17 bp, Arabidopsis thaliana
aaattgcgacaaactta

SEQ ID NO: 5194 - DNA, 17 bp, Arabidopsis thaliana
aaattgcgacgattgtg

SEQ ID NO: 5195 - DNA, 17 bp, Arabidopsis thaliana
aaattgcgagggatttg

SEQ ID NO: 5196 - DNA, 17 bp, Arabidopsis thaliana
aaattgcgatatcgtgg

SEQ ID NO: 5197 - DNA, 17 bp, Arabidopsis thaliana
aaattgcgatgatcgtg

SEQ ID NO: 5198 - DNA, 17 bp, Arabidopsis thaliana
aaattgcgcacaggccg

SEQ ID NO: 5199 - DNA, 17 bp, Arabidopsis thaliana
aaattgcgcacagtagc

SEQ ID NO: 5200 - DNA, 17 bp, Arabidopsis thaliana
aaattgcgccaaattgt

SEQ ID NO: 5201 - DNA, 17 bp, Arabidopsis thaliana
aaattgcgccaagttgt

SEQ ID NO: 5202 - DNA, 17 bp, Arabidopsis thaliana
aaattgcggaattcgtc

SEQ ID NO: 5203 - DNA, 17 bp, Arabidopsis thaliana
aaattgcggtcgctggt

SEQ ID NO: 5204 - DNA, 17 bp, Arabidopsis thaliana
aaattgcggttgcggtt

SEQ ID NO: 5205 - DNA, 17 bp, Arabidopsis thaliana
aaattgcgtgtagatct

SEQ ID NO: 5206 - DNA, 17 bp, Arabidopsis thaliana
aaattgcgttaccgtaa

SEQ ID NO: 5207 - DNA, 17 bp, Arabidopsis thaliana
aaattgcgtttttggcg

SEQ ID NO: 5208 - DNA, 17 bp, Arabidopsis thaliana
aaattgctcaaccgact

SEQ ID NO: 5209 - DNA, 17 bp, Arabidopsis thaliana
aaattgctcttgtagtg

SEQ ID NO: 5210 - DNA, 17 bp, Arabidopsis thaliana
aaattgcttccgacgat

SEQ ID NO: 5211 - DNA, 17 bp, Arabidopsis thaliana
aaattggaagctgctac

SEQ ID NO: 5212 - DNA, 17 bp, Arabidopsis thaliana
aaattggacagctgtca

SEQ ID NO: 5213 - DNA, 17 bp, Arabidopsis thaliana
aaattggaccgttttgt

SEQ ID NO: 5214 - DNA, 17 bp, Arabidopsis thaliana
aaattggatcagttttt

SEQ ID NO: 5215 - DNA, 17 bp, Arabidopsis thaliana
aaattggattacccatc

SEQ ID NO: 5216 - DNA, 17 bp, Arabidopsis thaliana
aaattggcaagtgtgcc

SEQ ID NO: 5217 - DNA, 17 bp, Arabidopsis thaliana
aaattggcctccaattt

SEQ ID NO: 5218 - DNA, 17 bp, Arabidopsis thaliana
aaattggcgggaaaatt

SEQ ID NO: 5219 - DNA, 17 bp, Arabidopsis thaliana
aaattggctattgggct

SEQ ID NO: 5220 - DNA, 17 bp, Arabidopsis thaliana
aaattggctgatattat

SEQ ID NO: 5221 - DNA, 17 bp, Arabidopsis thaliana
aaattggctgttactgg

SEQ ID NO: 5222 - DNA, 17 bp, Arabidopsis thaliana
aaattggcttaggccct

SEQ ID NO: 5223 - DNA, 17 bp, Arabidopsis thaliana
aaattgggacttattta

SEQ ID NO: 5224 - DNA, 17 bp, Arabidopsis thaliana
aaattgggctgggcttt

SEQ ID NO: 5225 - DNA, 17 bp, Arabidopsis thaliana
aaattgggtgacgtcaa

SEQ ID NO: 5226 - DNA, 17 bp, Arabidopsis thaliana
aaattggtaaagatctt

SEQ ID NO: 5227 - DNA, 17 bp, Arabidopsis thaliana
aaattggtaacgtccgg

SEQ ID NO: 5228 - DNA, 17 bp, Arabidopsis thaliana
aaattggtattgtcgga

SEQ ID NO: 5229 - DNA, 17 bp, Arabidopsis thaliana
aaattggtccgtcagtt

SEQ ID NO: 5230 - DNA, 17 bp, Arabidopsis thaliana
aaattggtctgtagcga

SEQ ID NO: 5231 - DNA, 17 bp, Arabidopsis thaliana
aaattggtctgtcagtt

SEQ ID NO: 5232 - DNA, 17 bp, Arabidopsis thaliana
aaattggtgataggtcg

SEQ ID NO: 5233 - DNA, 17 bp, Arabidopsis thaliana
aaattggtgcgtcggct

SEQ ID NO: 5234 - DNA, 17 bp, Arabidopsis thaliana
aaattggttgaccatgg

SEQ ID NO: 5235 - DNA, 17 bp, Arabidopsis thaliana
aaattggttgcaaagtg

SEQ ID NO: 5236 - DNA, 17 bp, Arabidopsis thaliana
aaattggttgcttgggc

SEQ ID NO: 5237 - DNA, 17 bp, Arabidopsis thaliana
aaattgtatctcgtcga

SEQ ID NO: 5238 - DNA, 17 bp, Arabidopsis thaliana
aaattgtatcttgggag

SEQ ID NO: 5239 - DNA, 17 bp, Arabidopsis thaliana
aaattgtcaccgcggtg

SEQ ID NO: 5240 - DNA, 17 bp, Arabidopsis thaliana
aaattgtccaattggag

SEQ ID NO: 5241 - DNA, 17 bp, Arabidopsis thaliana
aaattgtccccacggtg

SEQ ID NO: 5242 - DNA, 17 bp, Arabidopsis thaliana
aaattgtcccgctataa

SEQ ID NO: 5243 - DNA, 17 bp, Arabidopsis thaliana
aaattgtccgatgagga

SEQ ID NO: 5244 - DNA, 17 bp, Arabidopsis thaliana
aaattgtcctgcggtat

SEQ ID NO: 5245 - DNA, 17 bp, Arabidopsis thaliana
aaattgtcgggagggaa

SEQ ID NO: 5246 - DNA, 17 bp, Arabidopsis thaliana
aaattgtctccacggtg

SEQ ID NO: 5247 - DNA, 17 bp, Arabidopsis thaliana
aaattgtcttctcggtg

SEQ ID NO: 5248 - DNA, 17 bp, Arabidopsis thaliana
aaattgtgaactatcgg

SEQ ID NO: 5249 - DNA, 17 bp, Arabidopsis thaliana
aaattgtgaatgccgtt

SEQ ID NO: 5250 - DNA, 17 bp, Arabidopsis thaliana
aaattgtgactcagtac

SEQ ID NO: 5251 - DNA, 17 bp, Arabidopsis thaliana
aaattgtgactttgctt

SEQ ID NO: 5252 - DNA, 17 bp, Arabidopsis thaliana
aaattgtgcgaatttca

SEQ ID NO: 5253 - DNA, 17 bp, Arabidopsis thaliana
aaattgtggccgtcgtg

SEQ ID NO: 5254 - DNA, 17 bp, Arabidopsis thaliana
aaattgtggcttctttg

SEQ ID NO: 5255 - DNA, 17 bp, Arabidopsis thaliana
aaattgtggtacagtga

SEQ ID NO: 5256 - DNA, 17 bp, Arabidopsis thaliana
aaattgtggtgcggtcg

SEQ ID NO: 5257 - DNA, 17 bp, Arabidopsis thaliana
aaattgttctaacagta

SEQ ID NO: 5258 - DNA, 17 bp, Arabidopsis thaliana
aaattgttgaccggcca

SEQ ID NO: 5259 - DNA, 17 bp, Arabidopsis thaliana
aaattgtttccacggtg

SEQ ID NO: 5260 - DNA, 17 bp, Arabidopsis thaliana
aaattgtttctacttgg

SEQ ID NO: 5261 - DNA, 17 bp, Arabidopsis thaliana
aaattgtttctcgactt

SEQ ID NO: 5262 - DNA, 17 bp, Arabidopsis thaliana
aaatttaaactgttgag

SEQ ID NO: 5263 - DNA, 17 bp, Arabidopsis thaliana
aaatttaaggtgggtca

SEQ ID NO: 5264 - DNA, 17 bp, Arabidopsis thaliana
aaatttaatcgttgatc

SEQ ID NO: 5265 - DNA, 17 bp, Arabidopsis thaliana
aaatttacaaatgattt

SEQ ID NO: 5266 - DNA, 17 bp, Arabidopsis thaliana
aaatttaccgcagtttg

SEQ ID NO: 5267 - DNA, 17 bp, Arabidopsis thaliana
aaatttagagggtgtct

SEQ ID NO: 5268 - DNA, 17 bp, Arabidopsis thaliana
aaatttaggacgattca

SEQ ID NO: 5269 - DNA, 17 bp, Arabidopsis thaliana
aaatttagtcgtaactt

SEQ ID NO: 5270 - DNA, 17 bp, Arabidopsis thaliana
aaatttagtttgtgttc

SEQ ID NO: 5271 - DNA, 17 bp, Arabidopsis thaliana
aaatttatccatttttg

SEQ ID NO: 5272 - DNA, 17 bp, Arabidopsis thaliana
aaatttatttcgttgtc

SEQ ID NO: 5273 - DNA, 17 bp, Arabidopsis thaliana
aaatttcaaacggacat

SEQ ID NO: 5274 - DNA, 17 bp, Arabidopsis thaliana
aaatttcaacttgagac

SEQ ID NO: 5275 - DNA, 17 bp, Arabidopsis thaliana
aaatttcaccgttaaca

SEQ ID NO: 5276 - DNA, 17 bp, Arabidopsis thaliana
aaatttcacggccactt

SEQ ID NO: 5277 - DNA, 17 bp, Arabidopsis thaliana
aaatttcatcgtgatcc

SEQ ID NO: 5278 - DNA, 17 bp, Arabidopsis thaliana
aaatttcatcgtgatgg

SEQ ID NO: 5279 - DNA, 17 bp, Arabidopsis thaliana
aaatttccgatgtggga

SEQ ID NO: 5280 - DNA, 17 bp, Arabidopsis thaliana
aaatttccggatattct

SEQ ID NO: 5281 - DNA, 17 bp, Arabidopsis thaliana
aaatttccgtcccaccc

SEQ ID NO: 5282 - DNA, 17 bp, Arabidopsis thaliana
aaatttccgttaacgga

SEQ ID NO: 5283 - DNA, 17 bp, Arabidopsis thaliana
aaatttccgttaacggg

SEQ ID NO: 5284 - DNA, 17 bp, Arabidopsis thaliana
aaatttcctcaaggttg

SEQ ID NO: 5285 - DNA, 17 bp, Arabidopsis thaliana
aaatttcctttgagtct

SEQ ID NO: 5286 - DNA, 17 bp, Arabidopsis thaliana
aaatttcgacgaagact

SEQ ID NO: 5287 - DNA, 17 bp, Arabidopsis thaliana
aaatttcgacgaattat

SEQ ID NO: 5288 - DNA, 17 bp, Arabidopsis thaliana
aaatttcgagactgtga

SEQ ID NO: 5289 - DNA, 17 bp, Arabidopsis thaliana
aaatttcgatagggttc

SEQ ID NO: 5290 - DNA, 17 bp, Arabidopsis thaliana
aaatttcggttcggagc

SEQ ID NO: 5291 - DNA, 17 bp, Arabidopsis thaliana
aaatttcgtctagcggt

SEQ ID NO: 5292 - DNA, 17 bp, Arabidopsis thaliana
aaatttcgtctcgcggt

SEQ ID NO: 5293 - DNA, 17 bp, Arabidopsis thaliana
aaatttcgtgacattag

SEQ ID NO: 5294 - DNA, 17 bp, Arabidopsis thaliana
aaatttctctccaagcg

SEQ ID NO: 5295 - DNA, 17 bp, Arabidopsis thaliana
aaatttctgagtacatt

SEQ ID NO: 5296 - DNA, 17 bp, Arabidopsis thaliana
aaatttctggatcctta

SEQ ID NO: 5297 - DNA, 17 bp, Arabidopsis thaliana
aaatttctgggttctct

SEQ ID NO: 5298 - DNA, 17 bp, Arabidopsis thaliana
aaatttcttcatctgag

SEQ ID NO: 5299 - DNA, 17 bp, Arabidopsis thaliana
aaatttcttgccaccac

SEQ ID NO: 5300 - DNA, 17 bp, Arabidopsis thaliana
aaatttctttcgcgtct

SEQ ID NO: 5301 - DNA, 17 bp, Arabidopsis thaliana
aaatttgaacccaagtg

SEQ ID NO: 5302 - DNA, 17 bp, Arabidopsis thaliana
aaatttgaccattttgc

SEQ ID NO: 5303 - DNA, 17 bp, Arabidopsis thaliana
aaatttgacgacctctt

SEQ ID NO: 5304 - DNA, 17 bp, Arabidopsis thaliana
aaatttgacttatggtc

SEQ ID NO: 5305 - DNA, 17 bp, Arabidopsis thaliana
aaatttgacttgtggcc

SEQ ID NO: 5306 - DNA, 17 bp, Arabidopsis thaliana
aaatttgagtctggcag

SEQ ID NO: 5307 - DNA, 17 bp, Arabidopsis thaliana
aaatttgagtggtctgg

SEQ ID NO: 5308 - DNA, 17 bp, Arabidopsis thaliana
aaatttgatcgaatgtc

SEQ ID NO: 5309 - DNA, 17 bp, Arabidopsis thaliana
aaatttgatcgctgtcg

SEQ ID NO: 5310 - DNA, 17 bp, Arabidopsis thaliana
aaatttgcagaaggagt

SEQ ID NO: 5311 - DNA, 17 bp, Arabidopsis thaliana
aaatttgcagcggattg

SEQ ID NO: 5312 - DNA, 17 bp, Arabidopsis thaliana
aaatttgcagggagtat

SEQ ID NO: 5313 - DNA, 17 bp, Arabidopsis thaliana
aaatttgcagttaacca

SEQ ID NO: 5314 - DNA, 17 bp, Arabidopsis thaliana
aaatttgcataggtcgg

SEQ ID NO: 5315 - DNA, 17 bp, Arabidopsis thaliana
aaatttgccattgccca

SEQ ID NO: 5316 - DNA, 17 bp, Arabidopsis thaliana
aaatttgccgatgggga

SEQ ID NO: 5317 - DNA, 17 bp, Arabidopsis thaliana
aaatttgcgacgaccgt

SEQ ID NO: 5318 - DNA, 17 bp, Arabidopsis thaliana
aaatttgcgaggaagca

SEQ ID NO: 5319 - DNA, 17 bp, Arabidopsis thaliana
aaatttgcgagggatac

SEQ ID NO: 5320 - DNA, 17 bp, Arabidopsis thaliana
aaatttgcggggaccac

SEQ ID NO: 5321 - DNA, 17 bp, Arabidopsis thaliana
aaatttgcgtggttgcc

SEQ ID NO: 5322 - DNA, 17 bp, Arabidopsis thaliana
aaatttgctcagattgc

SEQ ID NO: 5323 - DNA, 17 bp, Arabidopsis thaliana
aaatttgcttaagggtg

SEQ ID NO: 5324 - DNA, 17 bp, Arabidopsis thaliana
aaatttggaatctgaac

SEQ ID NO: 5325 - DNA, 17 bp, Arabidopsis thaliana
aaatttggaatgtgctg

SEQ ID NO: 5326 - DNA, 17 bp, Arabidopsis thaliana
aaatttggaattattct

SEQ ID NO: 5327 - DNA, 17 bp, Arabidopsis thaliana
aaatttggagtcgacaa

SEQ ID NO: 5328 - DNA, 17 bp, Arabidopsis thaliana
aaatttggattatcgag

SEQ ID NO: 5329 - DNA, 17 bp, Arabidopsis thaliana
aaatttggcatgctcca

SEQ ID NO: 5330 - DNA, 17 bp, Arabidopsis thaliana
aaatttggccgcagttt

SEQ ID NO: 5331 - DNA, 17 bp, Arabidopsis thaliana
aaatttggctaaagttt

SEQ ID NO: 5332 - DNA, 17 bp, Arabidopsis thaliana
aaatttggctcagacaa

SEQ ID NO: 5333 - DNA, 17 bp, Arabidopsis thaliana
aaatttggctggaccag

SEQ ID NO: 5334 - DNA, 17 bp, Arabidopsis thaliana
aaatttggctttcagtt

SEQ ID NO: 5335 - DNA, 17 bp, Arabidopsis thaliana
aaatttggctttcggtt

SEQ ID NO: 5336 - DNA, 17 bp, Arabidopsis thaliana
aaatttggctttgctcg

SEQ ID NO: 5337 - DNA, 17 bp, Arabidopsis thaliana
aaatttgggacgattaa

SEQ ID NO: 5338 - DNA, 17 bp, Arabidopsis thaliana
aaatttgggacgattta

SEQ ID NO: 5339 - DNA, 17 bp, Arabidopsis thaliana
aaatttgggcattagca

SEQ ID NO: 5340 - DNA, 17 bp, Arabidopsis thaliana
aaatttgggcattatca

SEQ ID NO: 5341 - DNA, 17 bp, Arabidopsis thaliana
aaatttgggtgctgcgg

SEQ ID NO: 5342 - DNA, 17 bp, Arabidopsis thaliana
aaatttggtacactcga

SEQ ID NO: 5343 - DNA, 17 bp, Arabidopsis thaliana
aaatttggtcacacagt

SEQ ID NO: 5344 - DNA, 17 bp, Arabidopsis thaliana
aaatttggtccgcatca

SEQ ID NO: 5345 - DNA, 17 bp, Arabidopsis thaliana
aaatttggtccgtggcg

SEQ ID NO: 5346 - DNA, 17 bp, Arabidopsis thaliana
aaatttggtcctattgc

SEQ ID NO: 5347 - DNA, 17 bp, Arabidopsis thaliana
aaatttggtctgcagcg

SEQ ID NO: 5348 - DNA, 17 bp, Arabidopsis thaliana
aaatttggtctgtggcg

SEQ ID NO: 5349 - DNA, 17 bp, Arabidopsis thaliana
aaatttggttcggtttt

SEQ ID NO: 5350 - DNA, 17 bp, Arabidopsis thaliana
aaatttgtatgtagcca

SEQ ID NO: 5351 - DNA, 17 bp, Arabidopsis thaliana
aaatttgtcaggacgtg

SEQ ID NO: 5352 - DNA, 17 bp, Arabidopsis thaliana
aaatttgtccaatgggg

SEQ ID NO: 5353 - DNA, 17 bp, Arabidopsis thaliana
aaatttgtccgatgagg

SEQ ID NO: 5354 - DNA, 17 bp, Arabidopsis thaliana
aaatttgtccgatgggg

SEQ ID NO: 5355 - DNA, 17 bp, Arabidopsis thaliana
aaatttgtccgattagg

SEQ ID NO: 5356 - DNA, 17 bp, Arabidopsis thaliana
aaatttgtggaagttgc

SEQ ID NO: 5357 - DNA, 17 bp, Arabidopsis thaliana
aaatttgtggttcaatc

SEQ ID NO: 5358 - DNA, 17 bp, Arabidopsis thaliana
aaatttgttcccgcagt

SEQ ID NO: 5359 - DNA, 17 bp, Arabidopsis thaliana
aaatttgttgatcttgg

SEQ ID NO: 5360 - DNA, 17 bp, Arabidopsis thaliana
aaattttaacccgcgat

SEQ ID NO: 5361 - DNA, 17 bp, Arabidopsis thaliana
aaattttaatcttcgga

SEQ ID NO: 5362 - DNA, 17 bp, Arabidopsis thaliana
aaattttacaggtcaac

SEQ ID NO: 5363 - DNA, 17 bp, Arabidopsis thaliana
aaattttaggtcgttgt

SEQ ID NO: 5364 - DNA, 17 bp, Arabidopsis thaliana
aaattttatgattgtcg

SEQ ID NO: 5365 - DNA, 17 bp, Arabidopsis thaliana
aaattttattgacgcgc

SEQ ID NO: 5366 - DNA, 17 bp, Arabidopsis thaliana
aaattttatttcgggtc

SEQ ID NO: 5367 - DNA, 17 bp, Arabidopsis thaliana
aaattttcaaatactcg

SEQ ID NO: 5368 - DNA, 17 bp, Arabidopsis thaliana
aaattttcaagttgaga

SEQ ID NO: 5369 - DNA, 17 bp, Arabidopsis thaliana
aaattttcagctatact

SEQ ID NO: 5370 - DNA, 17 bp, Arabidopsis thaliana
aaattttcagcttacca

SEQ ID NO: 5371 - DNA, 17 bp, Arabidopsis thaliana
aaattttctacgccttg

SEQ ID NO: 5372 - DNA, 17 bp, Arabidopsis thaliana
aaattttgaagtcatgc

SEQ ID NO: 5373 - DNA, 17 bp, Arabidopsis thaliana
aaattttgacaaagtga

SEQ ID NO: 5374 - DNA, 17 bp, Arabidopsis thaliana
aaattttgacaaagtgg

SEQ ID NO: 5375 - DNA, 17 bp, Arabidopsis thaliana
aaattttgacaaattgt

SEQ ID NO: 5376 - DNA, 17 bp, Arabidopsis thaliana
aaattttgacccatttt

SEQ ID NO: 5377 - DNA, 17 bp, Arabidopsis thaliana
aaattttgcaccgatct

SEQ ID NO: 5378 - DNA, 17 bp, Arabidopsis thaliana
aaattttgccgtttaat

SEQ ID NO: 5379 - DNA, 17 bp, Arabidopsis thaliana
aaattttgcgtcagagt

SEQ ID NO: 5380 - DNA, 17 bp, Arabidopsis thaliana
aaattttgcgtcggagt

SEQ ID NO: 5381 - DNA, 17 bp, Arabidopsis thaliana
aaattttgcgtcggatt

SEQ ID NO: 5382 - DNA, 17 bp, Arabidopsis thaliana
aaattttgctacggatt

SEQ ID NO: 5383 - DNA, 17 bp, Arabidopsis thaliana
aaattttggacccacat

SEQ ID NO: 5384 - DNA, 17 bp, Arabidopsis thaliana
aaattttggagaaatct

SEQ ID NO: 5385 - DNA, 17 bp, Arabidopsis thaliana
aaattttggatcgggcc

SEQ ID NO: 5386 - DNA, 17 bp, Arabidopsis thaliana
aaattttggcaatagtt

SEQ ID NO: 5387 - DNA, 17 bp, Arabidopsis thaliana
aaattttggcgccaaaa

SEQ ID NO: 5388 - DNA, 17 bp, Arabidopsis thaliana
aaattttgggccacagc

SEQ ID NO: 5389 - DNA, 17 bp, Arabidopsis thaliana
aaattttggtaagtgcc

SEQ ID NO: 5390 - DNA, 17 bp, Arabidopsis thaliana
aaattttggtccgcagt

SEQ ID NO: 5391 - DNA, 17 bp, Arabidopsis thaliana
aaattttggttcggttt

SEQ ID NO: 5392 - DNA, 17 bp, Arabidopsis thaliana
aaattttgtctaatttg

SEQ ID NO: 5393 - DNA, 17 bp, Arabidopsis thaliana
aaattttgtctttttgt

SEQ ID NO: 5394 - DNA, 17 bp, Arabidopsis thaliana
aaatttttacaacacta

SEQ ID NO: 5395 - DNA, 17 bp, Arabidopsis thaliana
aaatttttagcgatcag

SEQ ID NO: 5396 - DNA, 17 bp, Arabidopsis thaliana
aaatttttccgatccga

SEQ ID NO: 5397 - DNA, 17 bp, Arabidopsis thaliana
aaatttttctataagtt

SEQ ID NO: 5398 - DNA, 17 bp, Arabidopsis thaliana
aaatttttggctttggt

SEQ ID NO: 5399 - DNA, 17 bp, Arabidopsis thaliana
aaatttttgttaaccga

SEQ ID NO: 5400 - DNA, 17 bp, Arabidopsis thaliana
aaatttttgttacactt

SEQ ID NO: 5401 - DNA, 17 bp, Arabidopsis thaliana
aaatttttgtttggcgg

SEQ ID NO: 5402 - DNA, 17 bp, Arabidopsis thaliana
aaattttttagctaaac

SEQ ID NO: 5403 - DNA, 17 bp, Arabidopsis thaliana
aaattttttccgtctgg

SEQ ID NO: 5404 - DNA, 17 bp, Arabidopsis thaliana
aaattttttcgtagaca

SEQ ID NO: 5405 - DNA, 17 bp, Arabidopsis thaliana
aacaaaaaacgtgatcg

SEQ ID NO: 5406 - DNA, 17 bp, Arabidopsis thaliana
aacaaaaatcattgtcg

SEQ ID NO: 5407 - DNA, 17 bp, Arabidopsis thaliana
aacaaaacaggtggatt

SEQ ID NO: 5408 - DNA, 17 bp, Arabidopsis thaliana
aacaaaaccccagtcca

SEQ ID NO: 5409 - DNA, 17 bp, Arabidopsis thaliana
aacaaaaccgtctacag

SEQ ID NO: 5410 - DNA, 17 bp, Arabidopsis thaliana
aacaaaacctgtgattt

SEQ ID NO: 5411 - DNA, 17 bp, Arabidopsis thaliana
aacaaaacgattccaga

SEQ ID NO: 5412 - DNA, 17 bp, Arabidopsis thaliana
aacaaaactcgtcttgg

SEQ ID NO: 5413 - DNA, 17 bp, Arabidopsis thaliana
aacaaaactctattgtt

SEQ ID NO: 5414 - DNA, 17 bp, Arabidopsis thaliana
aacaaaagacttcggtt

SEQ ID NO: 5415 - DNA, 17 bp, Arabidopsis thaliana
aacaaaagggtcaacta

SEQ ID NO: 5416 - DNA, 17 bp, Arabidopsis thaliana
aacaaaagtcccctctt

SEQ ID NO: 5417 - DNA, 17 bp, Arabidopsis thaliana
aacaaaagtcttgctcc

SEQ ID NO: 5418 - DNA, 17 bp, Arabidopsis thaliana
aacaaaataaggaatgc

SEQ ID NO: 5419 - DNA, 17 bp, Arabidopsis thaliana
aacaaaatagccgtgtt

SEQ ID NO: 5420 - DNA, 17 bp, Arabidopsis thaliana
aacaaaatattttccgc

SEQ ID NO: 5421 - DNA, 17 bp, Arabidopsis thaliana
aacaaaatccgaaagtc

SEQ ID NO: 5422 - DNA, 17 bp, Arabidopsis thaliana
aacaaaatctggtcatg

SEQ ID NO: 5423 - DNA, 17 bp, Arabidopsis thaliana
aacaaaatggttgtttc

SEQ ID NO: 5424 - DNA, 17 bp, Arabidopsis thaliana
aacaaaatgttggtcat

SEQ ID NO: 5425 - DNA, 17 bp, Arabidopsis thaliana
aacaaacaagtgtgttc

SEQ ID NO: 5426 - DNA, 17 bp, Arabidopsis thaliana
aacaaacacttggtggg

SEQ ID NO: 5427 - DNA, 17 bp, Arabidopsis thaliana
aacaaacagacaagctt

SEQ ID NO: 5428 - DNA, 17 bp, Arabidopsis thaliana
aacaaacagagccacat

SEQ ID NO: 5429 - DNA, 17 bp, Arabidopsis thaliana
aacaaaccagtcccttc

SEQ ID NO: 5430 - DNA, 17 bp, Arabidopsis thaliana
aacaaaccctaaagtca

SEQ ID NO: 5431 - DNA, 17 bp, Arabidopsis thaliana
aacaaacctcctgcagt

SEQ ID NO: 5432 - DNA, 17 bp, Arabidopsis thaliana
aacaaacctgcagatct

SEQ ID NO: 5433 - DNA, 17 bp, Arabidopsis thaliana
aacaaacctggagtcaa

SEQ ID NO: 5434 - DNA, 17 bp, Arabidopsis thaliana
aacaaacctgggccagt

SEQ ID NO: 5435 - DNA, 17 bp, Arabidopsis thaliana
aacaaacgaacggctgt

SEQ ID NO: 5436 - DNA, 17 bp, Arabidopsis thaliana
aacaaacgagttcctac

SEQ ID NO: 5437 - DNA, 17 bp, Arabidopsis thaliana
aacaaacgagttcttag

SEQ ID NO: 5438 - DNA, 17 bp, Arabidopsis thaliana
aacaaacgcaatgtgat

SEQ ID NO: 5439 - DNA, 17 bp, Arabidopsis thaliana
aacaaacgcaggaactc

SEQ ID NO: 5440 - DNA, 17 bp, Arabidopsis thaliana
aacaaacgggccttagt

SEQ ID NO: 5441 - DNA, 17 bp, Arabidopsis thaliana
aacaaacgtttgtggga

SEQ ID NO: 5442 - DNA, 17 bp, Arabidopsis thaliana
aacaaactatggctcaa

SEQ ID NO: 5443 - DNA, 17 bp, Arabidopsis thaliana
aacaaactctataccat

SEQ ID NO: 5444 - DNA, 17 bp, Arabidopsis thaliana
aacaaactctataccga

SEQ ID NO: 5445 - DNA, 17 bp, Arabidopsis thaliana
aacaaactctataccgg

SEQ ID NO: 5446 - DNA, 17 bp, Arabidopsis thaliana
aacaaactgcgaatggc

SEQ ID NO: 5447 - DNA, 17 bp, Arabidopsis thaliana
aacaaactgttcagacc

SEQ ID NO: 5448 - DNA, 17 bp, Arabidopsis thaliana
aacaaacttagggcctg

SEQ ID NO: 5449 - DNA, 17 bp, Arabidopsis thaliana
aacaaacttctctcgtc

SEQ ID NO: 5450 - DNA, 17 bp, Arabidopsis thaliana
aacaaacttgatctgcg

SEQ ID NO: 5451 - DNA, 17 bp, Arabidopsis thaliana
aacaaacttttgcccac

SEQ ID NO: 5452 - DNA, 17 bp, Arabidopsis thaliana
aacaaagaaaactcggt

SEQ ID NO: 5453 - DNA, 17 bp, Arabidopsis thaliana
aacaaagaattgggacc

SEQ ID NO: 5454 - DNA, 17 bp, Arabidopsis thaliana
aacaaagacgaacttga

SEQ ID NO: 5455 - DNA, 17 bp, Arabidopsis thaliana
aacaaagatgacatcgc

SEQ ID NO: 5456 - DNA, 17 bp, Arabidopsis thaliana
aacaaagattacccacg

SEQ ID NO: 5457 - DNA, 17 bp, Arabidopsis thaliana
aacaaagcagccgacac

SEQ ID NO: 5458 - DNA, 17 bp, Arabidopsis thaliana
aacaaagcattgcgatg

SEQ ID NO: 5459 - DNA, 17 bp, Arabidopsis thaliana
aacaaagcccactacag

SEQ ID NO: 5460 - DNA, 17 bp, Arabidopsis thaliana
aacaaagcctatggccg

SEQ ID NO: 5461 - DNA, 17 bp, Arabidopsis thaliana
aacaaagcgctgtggat

SEQ ID NO: 5462 - DNA, 17 bp, Arabidopsis thaliana
aacaaagcggacggact

SEQ ID NO: 5463 - DNA, 17 bp, Arabidopsis thaliana
aacaaagctacccttca

SEQ ID NO: 5464 - DNA, 17 bp, Arabidopsis thaliana
aacaaagctgtctactg

SEQ ID NO: 5465 - DNA, 17 bp, Arabidopsis thaliana
aacaaagcttccaaagt

SEQ ID NO: 5466 - DNA, 17 bp, Arabidopsis thaliana
aacaaagctttaatcac

SEQ ID NO: 5467 - DNA, 17 bp, Arabidopsis thaliana
aacaaaggattgcgatg

SEQ ID NO: 5468 - DNA, 17 bp, Arabidopsis thaliana
aacaaaggcattttggc

SEQ ID NO: 5469 - DNA, 17 bp, Arabidopsis thaliana
aacaaaggccccagagc

SEQ ID NO: 5470 - DNA, 17 bp, Arabidopsis thaliana
aacaaaggggtgtctgc

SEQ ID NO: 5471 - DNA, 17 bp, Arabidopsis thaliana
aacaaagggtgtcttga

SEQ ID NO: 5472 - DNA, 17 bp, Arabidopsis thaliana
aacaaaggtggcatatg

SEQ ID NO: 5473 - DNA, 17 bp, Arabidopsis thaliana
aacaaaggttcggatcg

SEQ ID NO: 5474 - DNA, 17 bp, Arabidopsis thaliana
aacaaagtattgcgatg

SEQ ID NO: 5475 - DNA, 17 bp, Arabidopsis thaliana
aacaaagtctacgctgt

SEQ ID NO: 5476 - DNA, 17 bp, Arabidopsis thaliana
aacaaagtctgggagac

SEQ ID NO: 5477 - DNA, 17 bp, Arabidopsis thaliana
aacaaagtctttctctt

SEQ ID NO: 5478 - DNA, 17 bp, Arabidopsis thaliana
aacaaagtggttcagaa

SEQ ID NO: 5479 - DNA, 17 bp, Arabidopsis thaliana
aacaaagttgtaaaagt

SEQ ID NO: 5480 - DNA, 17 bp, Arabidopsis thaliana
aacaaagtttgactcct

SEQ ID NO: 5481 - DNA, 17 bp, Arabidopsis thaliana
aacaaataagggcctga

SEQ ID NO: 5482 - DNA, 17 bp, Arabidopsis thaliana
aacaaatcacacggccg

SEQ ID NO: 5483 - DNA, 17 bp, Arabidopsis thaliana
aacaaatcagtggtcgg

SEQ ID NO: 5484 - DNA, 17 bp, Arabidopsis thaliana
aacaaatccgtcgcaac

SEQ ID NO: 5485 - DNA, 17 bp, Arabidopsis thaliana
aacaaatccttacgggc

SEQ ID NO: 5486 - DNA, 17 bp, Arabidopsis thaliana
aacaaatccttgcaggt

SEQ ID NO: 5487 - DNA, 17 bp, Arabidopsis thaliana
aacaaatccttgcgggc

SEQ ID NO: 5488 - DNA, 17 bp, Arabidopsis thaliana
aacaaatcgccgtgaac

SEQ ID NO: 5489 - DNA, 17 bp, Arabidopsis thaliana
aacaaatctacatgacg

SEQ ID NO: 5490 - DNA, 17 bp, Arabidopsis thaliana
aacaaatctactgacta

SEQ ID NO: 5491 - DNA, 17 bp, Arabidopsis thaliana
aacaaatctgtgtgaag

SEQ ID NO: 5492 - DNA, 17 bp, Arabidopsis thaliana
aacaaatctgttgaggc

SEQ ID NO: 5493 - DNA, 17 bp, Arabidopsis thaliana
aacaaatctttgcgggc

SEQ ID NO: 5494 - DNA, 17 bp, Arabidopsis thaliana
aacaaatgacgtggcaa

SEQ ID NO: 5495 - DNA, 17 bp, Arabidopsis thaliana
aacaaatgatggatctg

SEQ ID NO: 5496 - DNA, 17 bp, Arabidopsis thaliana
aacaaatgccagatttg

SEQ ID NO: 5497 - DNA, 17 bp, Arabidopsis thaliana
aacaaatgccttctacg

SEQ ID NO: 5498 - DNA, 17 bp, Arabidopsis thaliana
aacaaatgcttcatctg

SEQ ID NO: 5499 - DNA, 17 bp, Arabidopsis thaliana
aacaaatggtgcgctcg

SEQ ID NO: 5500 - DNA, 17 bp, Arabidopsis thaliana
aacaaatggtgcggtga

SEQ ID NO: 5501 - DNA, 17 bp, Arabidopsis thaliana
aacaaattaagcggcca

SEQ ID NO: 5502 - DNA, 17 bp, Arabidopsis thaliana
aacaaattacaccacat

SEQ ID NO: 5503 - DNA, 17 bp, Arabidopsis thaliana
aacaaattacatcacat

SEQ ID NO: 5504 - DNA, 17 bp, Arabidopsis thaliana
aacaaattcagagtgac

SEQ ID NO: 5505 - DNA, 17 bp, Arabidopsis thaliana
aacaaatttcttctaac

SEQ ID NO: 5506 - DNA, 17 bp, Arabidopsis thaliana
aacaaatttgctctcaa

SEQ ID NO: 5507 - DNA, 17 bp, Arabidopsis thaliana
aacaacaaagttgtcag

SEQ ID NO: 5508 - DNA, 17 bp, Arabidopsis thaliana
aacaacaaagttgtccg

SEQ ID NO: 5509 - DNA, 17 bp, Arabidopsis thaliana
aacaacaaccacttcag

SEQ ID NO: 5510 - DNA, 17 bp, Arabidopsis thaliana
aacaacaaccgattaaa

SEQ ID NO: 5511 - DNA, 17 bp, Arabidopsis thaliana
aacaacaatcagcactt

SEQ ID NO: 5512 - DNA, 17 bp, Arabidopsis thaliana
aacaacacgaacggacc

SEQ ID NO: 5513 - DNA, 17 bp, Arabidopsis thaliana
aacaacacgagtagctt

SEQ ID NO: 5514 - DNA, 17 bp, Arabidopsis thaliana
aacaacacgttgtgatg

SEQ ID NO: 5515 - DNA, 17 bp, Arabidopsis thaliana
aacaacagaggtctgca

SEQ ID NO: 5516 - DNA, 17 bp, Arabidopsis thaliana
aacaacagattctgcat

SEQ ID NO: 5517 - DNA, 17 bp, Arabidopsis thaliana
aacaacagctgcaaaat

SEQ ID NO: 5518 - DNA, 17 bp, Arabidopsis thaliana
aacaacagggcattttt

SEQ ID NO: 5519 - DNA, 17 bp, Arabidopsis thaliana
aacaacagtctcggctg

SEQ ID NO: 5520 - DNA, 17 bp, Arabidopsis thaliana
aacaacagtgctgacga

SEQ ID NO: 5521 - DNA, 17 bp, Arabidopsis thaliana
aacaacataaactatgg

SEQ ID NO: 5522 - DNA, 17 bp, Arabidopsis thaliana
aacaacatccaggctcg

SEQ ID NO: 5523 - DNA, 17 bp, Arabidopsis thaliana
aacaacatctcattcgg

SEQ ID NO: 5524 - DNA, 17 bp, Arabidopsis thaliana
aacaacattccggtttc

SEQ ID NO: 5525 - DNA, 17 bp, Arabidopsis thaliana
aacaacattcctcagga

SEQ ID NO: 5526 - DNA, 17 bp, Arabidopsis thaliana
aacaacatttgcaaagt

SEQ ID NO: 5527 - DNA, 17 bp, Arabidopsis thaliana
aacaaccacaaaccacc

SEQ ID NO: 5528 - DNA, 17 bp, Arabidopsis thaliana
aacaaccactaggattg

SEQ ID NO: 5529 - DNA, 17 bp, Arabidopsis thaliana
aacaaccactctttctt

SEQ ID NO: 5530 - DNA, 17 bp, Arabidopsis thaliana
aacaaccagtggacgca

SEQ ID NO: 5531 - DNA, 17 bp, Arabidopsis thaliana
aacaaccatgccaaatg

SEQ ID NO: 5532 - DNA, 17 bp, Arabidopsis thaliana
aacaacccacggtgcca

SEQ ID NO: 5533 - DNA, 17 bp, Arabidopsis thaliana
aacaacccgccccgtag

SEQ ID NO: 5534 - DNA, 17 bp, Arabidopsis thaliana
aacaacccgtcccgtgg

SEQ ID NO: 5535 - DNA, 17 bp, Arabidopsis thaliana
aacaaccctgatacgct

SEQ ID NO: 5536 - DNA, 17 bp, Arabidopsis thaliana
aacaaccggatcttaaa

SEQ ID NO: 5537 - DNA, 17 bp, Arabidopsis thaliana
aacaaccgtcgccgttc

SEQ ID NO: 5538 - DNA, 17 bp, Arabidopsis thaliana
aacaaccgtgatttcca

SEQ ID NO: 5539 - DNA, 17 bp, Arabidopsis thaliana
aacaacctcaacagatg

SEQ ID NO: 5540 - DNA, 17 bp, Arabidopsis thaliana
aacaacctgacgacggg

SEQ ID NO: 5541 - DNA, 17 bp, Arabidopsis thaliana
aacaaccttcctttgtt

SEQ ID NO: 5542 - DNA, 17 bp, Arabidopsis thaliana
aacaacgaatcaggagt

SEQ ID NO: 5543 - DNA, 17 bp, Arabidopsis thaliana
aacaacgaatggttcac

SEQ ID NO: 5544 - DNA, 17 bp, Arabidopsis thaliana
aacaacgaccataaaaa

SEQ ID NO: 5545 - DNA, 17 bp, Arabidopsis thaliana
aacaacgagattttaac

SEQ ID NO: 5546 - DNA, 17 bp, Arabidopsis thaliana
aacaacgatgagtttgg

SEQ ID NO: 5547 - DNA, 17 bp, Arabidopsis thaliana
aacaacgatggactgac

SEQ ID NO: 5548 - DNA, 17 bp, Arabidopsis thaliana
aacaacgattaaagcca

SEQ ID NO: 5549 - DNA, 17 bp, Arabidopsis thaliana
aacaacgcagaaagcaa

SEQ ID NO: 5550 - DNA, 17 bp, Arabidopsis thaliana
aacaacgcagttaagcg

SEQ ID NO: 5551 - DNA, 17 bp, Arabidopsis thaliana
aacaacgccagtgtggc

SEQ ID NO: 5552 - DNA, 17 bp, Arabidopsis thaliana
aacaacgccagtgtggg

SEQ ID NO: 5553 - DNA, 17 bp, Arabidopsis thaliana
aacaacgcttagggctt

SEQ ID NO: 5554 - DNA, 17 bp, Arabidopsis thaliana
aacaacgcttggtcaag

SEQ ID NO: 5555 - DNA, 17 bp, Arabidopsis thaliana
aacaacggcttcaccgc

SEQ ID NO: 5556 - DNA, 17 bp, Arabidopsis thaliana
aacaacgggaaagtggt

SEQ ID NO: 5557 - DNA, 17 bp, Arabidopsis thaliana
aacaacgggaatcatct

SEQ ID NO: 5558 - DNA, 17 bp, Arabidopsis thaliana
aacaacggggcaaatga

SEQ ID NO: 5559 - DNA, 17 bp, Arabidopsis thaliana
aacaacggtagtggctg

SEQ ID NO: 5560 - DNA, 17 bp, Arabidopsis thaliana
aacaacggtcgttatta

SEQ ID NO: 5561 - DNA, 17 bp, Arabidopsis thaliana
aacaacggttcaaaccg

SEQ ID NO: 5562 - DNA, 17 bp, Arabidopsis thaliana
aacaacgtcatctgcgt

SEQ ID NO: 5563 - DNA, 17 bp, Arabidopsis thaliana
aacaacgtccggcgaag

SEQ ID NO: 5564 - DNA, 17 bp, Arabidopsis thaliana
aacaacgttcatctagc

SEQ ID NO: 5565 - DNA, 17 bp, Arabidopsis thaliana
aacaacgttcgggtttg

SEQ ID NO: 5566 - DNA, 17 bp, Arabidopsis thaliana
aacaacgtttgtcttaa

SEQ ID NO: 5567 - DNA, 17 bp, Arabidopsis thaliana
aacaactacctcagcag

SEQ ID NO: 5568 - DNA, 17 bp, Arabidopsis thaliana
aacaactagattttaac

SEQ ID NO: 5569 - DNA, 17 bp, Arabidopsis thaliana
aacaactatgaccgtaa

SEQ ID NO: 5570 - DNA, 17 bp, Arabidopsis thaliana
aacaactcattcgtagc

SEQ ID NO: 5571 - DNA, 17 bp, Arabidopsis thaliana
aacaactcggccataac

SEQ ID NO: 5572 - DNA, 17 bp, Arabidopsis thaliana
aacaactcgtatgcggg

SEQ ID NO: 5573 - DNA, 17 bp, Arabidopsis thaliana
aacaactctagcagcca

SEQ ID NO: 5574 - DNA, 17 bp, Arabidopsis thaliana
aacaactctcctcttgg

SEQ ID NO: 5575 - DNA, 17 bp, Arabidopsis thaliana
aacaactctcggcaacg

SEQ ID NO: 5576 - DNA, 17 bp, Arabidopsis thaliana
aacaactctctgtgaga

SEQ ID NO: 5577 - DNA, 17 bp, Arabidopsis thaliana
aacaactgagggcctga

SEQ ID NO: 5578 - DNA, 17 bp, Arabidopsis thaliana
aacaactgatttgggcc

SEQ ID NO: 5579 - DNA, 17 bp, Arabidopsis thaliana
aacaactgcctttttgt

SEQ ID NO: 5580 - DNA, 17 bp, Arabidopsis thaliana
aacaactggatgaccta

SEQ ID NO: 5581 - DNA, 17 bp, Arabidopsis thaliana
aacaactggcggatcgc

SEQ ID NO: 5582 - DNA, 17 bp, Arabidopsis thaliana
aacaactggttgagcgt

SEQ ID NO: 5583 - DNA, 17 bp, Arabidopsis thaliana
aacaactggtttatttc

SEQ ID NO: 5584 - DNA, 17 bp, Arabidopsis thaliana
aacaactggtttgtgac

SEQ ID NO: 5585 - DNA, 17 bp, Arabidopsis thaliana
aacaacttaccgtggaa

SEQ ID NO: 5586 - DNA, 17 bp, Arabidopsis thaliana
aacaacttccaaaggac

SEQ ID NO: 5587 - DNA, 17 bp, Arabidopsis thaliana
aacaacttcggcctggt

SEQ ID NO: 5588 - DNA, 17 bp, Arabidopsis thaliana
aacaacttcgtcctggt

SEQ ID NO: 5589 - DNA, 17 bp, Arabidopsis thaliana
aacaacttgatgaccgg

SEQ ID NO: 5590 - DNA, 17 bp, Arabidopsis thaliana
aacaacttgatgggtgt

SEQ ID NO: 5591 - DNA, 17 bp, Arabidopsis thaliana
aacaacttggcgcaatc

SEQ ID NO: 5592 - DNA, 17 bp, Arabidopsis thaliana
aacaacttggcgcaatt

SEQ ID NO: 5593 - DNA, 17 bp, Arabidopsis thaliana
aacaacttgttgagtgt

SEQ ID NO: 5594 - DNA, 17 bp, Arabidopsis thaliana
aacaactttcccacatg

SEQ ID NO: 5595 - DNA, 17 bp, Arabidopsis thaliana
aacaactttctcacagg

SEQ ID NO: 5596 - DNA, 17 bp, Arabidopsis thaliana
aacaactttgagatcaa

SEQ ID NO: 5597 - DNA, 17 bp, Arabidopsis thaliana
aacaacttttcatgcgt

SEQ ID NO: 5598 - DNA, 17 bp, Arabidopsis thaliana
aacaacttttgatcgct

SEQ ID NO: 5599 - DNA, 17 bp, Arabidopsis thaliana
aacaacttttggaccga

SEQ ID NO: 5600 - DNA, 17 bp, Arabidopsis thaliana
aacaacttttggactga

SEQ ID NO: 5601 - DNA, 17 bp, Arabidopsis thaliana
aacaacttttggctgat

SEQ ID NO: 5602 - DNA, 17 bp, Arabidopsis thaliana
aacaacttttggtcgct

SEQ ID NO: 5603 - DNA, 17 bp, Arabidopsis thaliana
aacaagaaagcgacctc

SEQ ID NO: 5604 - DNA, 17 bp, Arabidopsis thaliana
aacaagaacttaggtga

SEQ ID NO: 5605 - DNA, 17 bp, Arabidopsis thaliana
aacaagacatgccactt

SEQ ID NO: 5606 - DNA, 17 bp, Arabidopsis thaliana
aacaagacccaagtgac

SEQ ID NO: 5607 - DNA, 17 bp, Arabidopsis thaliana
aacaagacgacaaaccg

SEQ ID NO: 5608 - DNA, 17 bp, Arabidopsis thaliana
aacaagactattaattc

SEQ ID NO: 5609 - DNA, 17 bp, Arabidopsis thaliana
aacaagagaacccaaca

SEQ ID NO: 5610 - DNA, 17 bp, Arabidopsis thaliana
aacaagatcaccatcac

SEQ ID NO: 5611 - DNA, 17 bp, Arabidopsis thaliana
aacaagatcatcacaga

SEQ ID NO: 5612 - DNA, 17 bp, Arabidopsis thaliana
aacaagatcgtcatcat

SEQ ID NO: 5613 - DNA, 17 bp, Arabidopsis thaliana
aacaagattctcggaga

SEQ ID NO: 5614 - DNA, 17 bp, Arabidopsis thaliana
aacaagcaaatgtgatc

SEQ ID NO: 5615 - DNA, 17 bp, Arabidopsis thaliana
aacaagcactctcacgt

SEQ ID NO: 5616 - DNA, 17 bp, Arabidopsis thaliana
aacaagcactttgtgtt

SEQ ID NO: 5617 - DNA, 17 bp, Arabidopsis thaliana
aacaagcagaatttcct

SEQ ID NO: 5618 - DNA, 17 bp, Arabidopsis thaliana
aacaagcagaattttcc

SEQ ID NO: 5619 - DNA, 17 bp, Arabidopsis thaliana
aacaagcagacagatca

SEQ ID NO: 5620 - DNA, 17 bp, Arabidopsis thaliana
aacaagcagactactca

SEQ ID NO: 5621 - DNA, 17 bp, Arabidopsis thaliana
aacaagcatttggatga

SEQ ID NO: 5622 - DNA, 17 bp, Arabidopsis thaliana
aacaagcatttggatgg

SEQ ID NO: 5623 - DNA, 17 bp, Arabidopsis thaliana
aacaagccaaagtgcct

SEQ ID NO: 5624 - DNA, 17 bp, Arabidopsis thaliana
aacaagcgaatgagtca

SEQ ID NO: 5625 - DNA, 17 bp, Arabidopsis thaliana
aacaagcgactcgggac

SEQ ID NO: 5626 - DNA, 17 bp, Arabidopsis thaliana
aacaagcgatcgatttt

SEQ ID NO: 5627 - DNA, 17 bp, Arabidopsis thaliana
aacaagcgcaaactgat

SEQ ID NO: 5628 - DNA, 17 bp, Arabidopsis thaliana
aacaagcgctctatcat

SEQ ID NO: 5629 - DNA, 17 bp, Arabidopsis thaliana
aacaagcgcttgaggac

SEQ ID NO: 5630 - DNA, 17 bp, Arabidopsis thaliana
aacaagcgggacctatg

SEQ ID NO: 5631 - DNA, 17 bp, Arabidopsis thaliana
aacaagcgtctggattt

SEQ ID NO: 5632 - DNA, 17 bp, Arabidopsis thaliana
aacaagcgtgtcaaatg

SEQ ID NO: 5633 - DNA, 17 bp, Arabidopsis thaliana
aacaagcgttctattct

SEQ ID NO: 5634 - DNA, 17 bp, Arabidopsis thaliana
aacaagctccgtctaat

SEQ ID NO: 5635 - DNA, 17 bp, Arabidopsis thaliana
aacaagctgcagaagtg

SEQ ID NO: 5636 - DNA, 17 bp, Arabidopsis thaliana
aacaagctgggtgttga

SEQ ID NO: 5637 - DNA, 17 bp, Arabidopsis thaliana
aacaagctgttggacca

SEQ ID NO: 5638 - DNA, 17 bp, Arabidopsis thaliana
aacaagcttgagggcgt

SEQ ID NO: 5639 - DNA, 17 bp, Arabidopsis thaliana
aacaaggatacaattct

SEQ ID NO: 5640 - DNA, 17 bp, Arabidopsis thaliana
aacaaggatcaggcatt

SEQ ID NO: 5641 - DNA, 17 bp, Arabidopsis thaliana
aacaaggatctctttct

SEQ ID NO: 5642 - DNA, 17 bp, Arabidopsis thaliana
aacaaggattgacgagt

SEQ ID NO: 5643 - DNA, 17 bp, Arabidopsis thaliana
aacaaggcaaagtgtct

SEQ ID NO: 5644 - DNA, 17 bp, Arabidopsis thaliana
aacaaggccatttctac

SEQ ID NO: 5645 - DNA, 17 bp, Arabidopsis thaliana
aacaaggccttatgacg

SEQ ID NO: 5646 - DNA, 17 bp, Arabidopsis thaliana
aacaaggctgcactggc

SEQ ID NO: 5647 - DNA, 17 bp, Arabidopsis thaliana
aacaaggcttatggcta

SEQ ID NO: 5648 - DNA, 17 bp, Arabidopsis thaliana
aacaaggcttgtgggcg

SEQ ID NO: 5649 - DNA, 17 bp, Arabidopsis thaliana
aacaaggcttttgagtt

SEQ ID NO: 5650 - DNA, 17 bp, Arabidopsis thaliana
aacaagggcctggattt

SEQ ID NO: 5651 - DNA, 17 bp, Arabidopsis thaliana
aacaagggttttaatgc

SEQ ID NO: 5652 - DNA, 17 bp, Arabidopsis thaliana
aacaaggtagccgtact

SEQ ID NO: 5653 - DNA, 17 bp, Arabidopsis thaliana
aacaaggtatttttcgg

SEQ ID NO: 5654 - DNA, 17 bp, Arabidopsis thaliana
aacaaggtcagtcatct

SEQ ID NO: 5655 - DNA, 17 bp, Arabidopsis thaliana
aacaaggttagatagtg

SEQ ID NO: 5656 - DNA, 17 bp, Arabidopsis thaliana
aacaaggttcaaattgt

SEQ ID NO: 5657 - DNA, 17 bp, Arabidopsis thaliana
aacaaggtttccgtagg

SEQ ID NO: 5658 - DNA, 17 bp, Arabidopsis thaliana
aacaagtaagaccatct

SEQ ID NO: 5659 - DNA, 17 bp, Arabidopsis thaliana
aacaagtaatcaggtcg

SEQ ID NO: 5660 - DNA, 17 bp, Arabidopsis thaliana
aacaagtagtttgggga

SEQ ID NO: 5661 - DNA, 17 bp, Arabidopsis thaliana
aacaagtccttttgatc

SEQ ID NO: 5662 - DNA, 17 bp, Arabidopsis thaliana
aacaagtcgcaggcatg

SEQ ID NO: 5663 - DNA, 17 bp, Arabidopsis thaliana
aacaagtcgctacgtca

SEQ ID NO: 5664 - DNA, 17 bp, Arabidopsis thaliana
aacaagtcgcttgacat

SEQ ID NO: 5665 - DNA, 17 bp, Arabidopsis thaliana
aacaagtctggtgaaac

SEQ ID NO: 5666 - DNA, 17 bp, Arabidopsis thaliana
aacaagtgactacatcg

SEQ ID NO: 5667 - DNA, 17 bp, Arabidopsis thaliana
aacaagtgcagtttgcg

SEQ ID NO: 5668 - DNA, 17 bp, Arabidopsis thaliana
aacaagtgcagttttgc

SEQ ID NO: 5669 - DNA, 17 bp, Arabidopsis thaliana
aacaagtgcgacggaat

SEQ ID NO: 5670 - DNA, 17 bp, Arabidopsis thaliana
aacaagtgcggcttgtg

SEQ ID NO: 5671 - DNA, 17 bp, Arabidopsis thaliana
aacaagtggcaatgagg

SEQ ID NO: 5672 - DNA, 17 bp, Arabidopsis thaliana
aacaagtgtgactgaca

SEQ ID NO: 5673 - DNA, 17 bp, Arabidopsis thaliana
aacaagttccttctgtc

SEQ ID NO: 5674 - DNA, 17 bp, Arabidopsis thaliana
aacaagtttcagcctgg

SEQ ID NO: 5675 - DNA, 17 bp, Arabidopsis thaliana
aacaagtttgcagtatg

SEQ ID NO: 5676 - DNA, 17 bp, Arabidopsis thaliana
aacaagttttgttgacc

SEQ ID NO: 5677 - DNA, 17 bp, Arabidopsis thaliana
aacaataccaccgactt

SEQ ID NO: 5678 - DNA, 17 bp, Arabidopsis thaliana
aacaataccctttcttt

SEQ ID NO: 5679 - DNA, 17 bp, Arabidopsis thaliana
aacaataccgggctctt

SEQ ID NO: 5680 - DNA, 17 bp, Arabidopsis thaliana
aacaatatccaatgcaa

SEQ ID NO: 5681 - DNA, 17 bp, Arabidopsis thaliana
aacaatatcccggattg

SEQ ID NO: 5682 - DNA, 17 bp, Arabidopsis thaliana
aacaatatctatccgga

SEQ ID NO: 5683 - DNA, 17 bp, Arabidopsis thaliana
aacaatatctccagaaa

SEQ ID NO: 5684 - DNA, 17 bp, Arabidopsis thaliana
aacaatatctcgcagcc

SEQ ID NO: 5685 - DNA, 17 bp, Arabidopsis thaliana
aacaatcaccggcgtta

SEQ ID NO: 5686 - DNA, 17 bp, Arabidopsis thaliana
aacaatcagacgaattt

SEQ ID NO: 5687 - DNA, 17 bp, Arabidopsis thaliana
aacaatcagcacacacc

SEQ ID NO: 5688 - DNA, 17 bp, Arabidopsis thaliana
aacaatcaggtcgctca

SEQ ID NO: 5689 - DNA, 17 bp, Arabidopsis thaliana
aacaatcaggttttttc

SEQ ID NO: 5690 - DNA, 17 bp, Arabidopsis thaliana
aacaatccaactttggt

SEQ ID NO: 5691 - DNA, 17 bp, Arabidopsis thaliana
aacaatccctcctcgcc

SEQ ID NO: 5692 - DNA, 17 bp, Arabidopsis thaliana
aacaatccgttaacgga

SEQ ID NO: 5693 - DNA, 17 bp, Arabidopsis thaliana
aacaatcgcaaggcttg

SEQ ID NO: 5694 - DNA, 17 bp, Arabidopsis thaliana
aacaatcgggttttttc

SEQ ID NO: 5695 - DNA, 17 bp, Arabidopsis thaliana
aacaatcgttcgggatg

SEQ ID NO: 5696 - DNA, 17 bp, Arabidopsis thaliana
aacaatctcggctggct

SEQ ID NO: 5697 - DNA, 17 bp, Arabidopsis thaliana
aacaatctctaggtttg

SEQ ID NO: 5698 - DNA, 17 bp, Arabidopsis thaliana
aacaatctgctgtttgc

SEQ ID NO: 5699 - DNA, 17 bp, Arabidopsis thaliana
aacaatgaactggaagt

SEQ ID NO: 5700 - DNA, 17 bp, Arabidopsis thaliana
aacaatgacagaatccg

SEQ ID NO: 5701 - DNA, 17 bp, Arabidopsis thaliana
aacaatgactcgtgtct

SEQ ID NO: 5702 - DNA, 17 bp, Arabidopsis thaliana
aacaatgagtcgattag

SEQ ID NO: 5703 - DNA, 17 bp, Arabidopsis thaliana
aacaatgagtcgatttg

SEQ ID NO: 5704 - DNA, 17 bp, Arabidopsis thaliana
aacaatgagtcgctttg

SEQ ID NO: 5705 - DNA, 17 bp, Arabidopsis thaliana
aacaatgccgtatccac

SEQ ID NO: 5706 - DNA, 17 bp, Arabidopsis thaliana
aacaatgcgttgcggtt

SEQ ID NO: 5707 - DNA, 17 bp, Arabidopsis thaliana
aacaatgctttgaagac

SEQ ID NO: 5708 - DNA, 17 bp, Arabidopsis thaliana
aacaatggaccagcgga

SEQ ID NO: 5709 - DNA, 17 bp, Arabidopsis thaliana
aacaatggactgccagg

SEQ ID NO: 5710 - DNA, 17 bp, Arabidopsis thaliana
aacaatggagcgcaggt

SEQ ID NO: 5711 - DNA, 17 bp, Arabidopsis thaliana
aacaatggagtcagtcg

SEQ ID NO: 5712 - DNA, 17 bp, Arabidopsis thaliana
aacaatggccgcttgat

SEQ ID NO: 5713 - DNA, 17 bp, Arabidopsis thaliana
aacaatggcgactcaac

SEQ ID NO: 5714 - DNA, 17 bp, Arabidopsis thaliana
aacaatggcgatgtcga

SEQ ID NO: 5715 - DNA, 17 bp, Arabidopsis thaliana
aacaatggcggcttgat

SEQ ID NO: 5716 - DNA, 17 bp, Arabidopsis thaliana
aacaatgggctatttgc

SEQ ID NO: 5717 - DNA, 17 bp, Arabidopsis thaliana
aacaatggtcactatgt

SEQ ID NO: 5718 - DNA, 17 bp, Arabidopsis thaliana
aacaatggtgatgggtc

SEQ ID NO: 5719 - DNA, 17 bp, Arabidopsis thaliana
aacaatgtccagtccat

SEQ ID NO: 5720 - DNA, 17 bp, Arabidopsis thaliana
aacaatgtccgtgctga

SEQ ID NO: 5721 - DNA, 17 bp, Arabidopsis thaliana
aacaatgtcggtgctga

SEQ ID NO: 5722 - DNA, 17 bp, Arabidopsis thaliana
aacaatgtgaccgtgat

SEQ ID NO: 5723 - DNA, 17 bp, Arabidopsis thaliana
aacaatgtgatgaacgc

SEQ ID NO: 5724 - DNA, 17 bp, Arabidopsis thaliana
aacaattgtctcatgga

SEQ ID NO: 5725 - DNA, 17 bp, Arabidopsis thaliana
aacacaaactttgacct

SEQ ID NO: 5726 - DNA, 17 bp, Arabidopsis thaliana
aacacaaatccgaaggt

SEQ ID NO: 5727 - DNA, 17 bp, Arabidopsis thaliana
aacacaaatccgacggt

SEQ ID NO: 5728 - DNA, 17 bp, Arabidopsis thaliana
aacacaaatggtggctt

SEQ ID NO: 5729 - DNA, 17 bp, Arabidopsis thaliana
aacacaacaacagccgt

SEQ ID NO: 5730 - DNA, 17 bp, Arabidopsis thaliana
aacacaagatgggtttt

SEQ ID NO: 5731 - DNA, 17 bp, Arabidopsis thaliana
aacacaaggctgcggaa

SEQ ID NO: 5732 - DNA, 17 bp, Arabidopsis thaliana
aacacaagttccgggag

SEQ ID NO: 5733 - DNA, 17 bp, Arabidopsis thaliana
aacacaagtttgattct

SEQ ID NO: 5734 - DNA, 17 bp, Arabidopsis thaliana
aacacaatcagactagg

SEQ ID NO: 5735 - DNA, 17 bp, Arabidopsis thaliana
aacacaatctactcaag

SEQ ID NO: 5736 - DNA, 17 bp, Arabidopsis thaliana
aacacaatgtgtatgat

SEQ ID NO: 5737 - DNA, 17 bp, Arabidopsis thaliana
aacacaattgcttaatg

SEQ ID NO: 5738 - DNA, 17 bp, Arabidopsis thaliana
aacacaatttccgccac

SEQ ID NO: 5739 - DNA, 17 bp, Arabidopsis thaliana
aacacaattttcaccag

SEQ ID NO: 5740 - DNA, 17 bp, Arabidopsis thaliana
aacacacacttcctgag

SEQ ID NO: 5741 - DNA, 17 bp, Arabidopsis thaliana
aacacacagcactgcgg

SEQ ID NO: 5742 - DNA, 17 bp, Arabidopsis thaliana
aacacacgattgtttac

SEQ ID NO: 5743 - DNA, 17 bp, Arabidopsis thaliana
aacacacgctggtctaa

SEQ ID NO: 5744 - DNA, 17 bp, Arabidopsis thaliana
aacacacgggagaccgg

SEQ ID NO: 5745 - DNA, 17 bp, Arabidopsis thaliana
aacacactaagttttaa

SEQ ID NO: 5746 - DNA, 17 bp, Arabidopsis thaliana
aacacactgcactgcgg

SEQ ID NO: 5747 - DNA, 17 bp, Arabidopsis thaliana
aacacacttggatacga

SEQ ID NO: 5748 - DNA, 17 bp, Arabidopsis thaliana
aacacagaagcgttgaa

SEQ ID NO: 5749 - DNA, 17 bp, Arabidopsis thaliana
aacacagatttggacaa

SEQ ID NO: 5750 - DNA, 17 bp, Arabidopsis thaliana
aacacagcccaggttgg

SEQ ID NO: 5751 - DNA, 17 bp, Arabidopsis thaliana
aacacagccggcgtgac

SEQ ID NO: 5752 - DNA, 17 bp, Arabidopsis thaliana
aacacaggaatcgccat

SEQ ID NO: 5753 - DNA, 17 bp, Arabidopsis thaliana
aacacaggcacgcaggc

SEQ ID NO: 5754 - DNA, 17 bp, Arabidopsis thaliana
aacacaggtctgtgcga

SEQ ID NO: 5755 - DNA, 17 bp, Arabidopsis thaliana
aacacaggtttaaaatg

SEQ ID NO: 5756 - DNA, 17 bp, Arabidopsis thaliana
aacacaggtttaaattg

SEQ ID NO: 5757 - DNA, 17 bp, Arabidopsis thaliana
aacacatacctgtgcag

SEQ ID NO: 5758 - DNA, 17 bp, Arabidopsis thaliana
aacacatatgtcaggag

SEQ ID NO: 5759 - DNA, 17 bp, Arabidopsis thaliana
aacacatccgttaggcg

SEQ ID NO: 5760 - DNA, 17 bp, Arabidopsis thaliana
aacacatcctcggaagc

SEQ ID NO: 5761 - DNA, 17 bp, Arabidopsis thaliana
aacacatcggttcttga

SEQ ID NO: 5762 - DNA, 17 bp, Arabidopsis thaliana
aacacatgtgggttgct

SEQ ID NO: 5763 - DNA, 17 bp, Arabidopsis thaliana
aacacattctcacggaa

SEQ ID NO: 5764 - DNA, 17 bp, Arabidopsis thaliana
aacacattctgagccgg

SEQ ID NO: 5765 - DNA, 17 bp, Arabidopsis thaliana
aacacattcttgccaac

SEQ ID NO: 5766 - DNA, 17 bp, Arabidopsis thaliana
aacacatttcgtgcttg

SEQ ID NO: 5767 - DNA, 17 bp, Arabidopsis thaliana
aacaccaaaatctccgt

SEQ ID NO: 5768 - DNA, 17 bp, Arabidopsis thaliana
aacaccaaagctcaaac

SEQ ID NO: 5769 - DNA, 17 bp, Arabidopsis thaliana
aacaccaacacactgtc

SEQ ID NO: 5770 - DNA, 17 bp, Arabidopsis thaliana
aacaccaacaggtttgg

SEQ ID NO: 5771 - DNA, 17 bp, Arabidopsis thaliana
aacaccaacgttcgttt

SEQ ID NO: 5772 - DNA, 17 bp, Arabidopsis thaliana
aacaccacactatctgt

SEQ ID NO: 5773 - DNA, 17 bp, Arabidopsis thaliana
aacaccaccaatgctgt

SEQ ID NO: 5774 - DNA, 17 bp, Arabidopsis thaliana
aacaccaggacactgat

SEQ ID NO: 5775 - DNA, 17 bp, Arabidopsis thaliana
aacaccatcttcaccag

SEQ ID NO: 5776 - DNA, 17 bp, Arabidopsis thaliana
aacaccattctcattaa

SEQ ID NO: 5777 - DNA, 17 bp, Arabidopsis thaliana
aacaccccgatttcagg

SEQ ID NO: 5778 - DNA, 17 bp, Arabidopsis thaliana
aacacccctagtcgatt

SEQ ID NO: 5779 - DNA, 17 bp, Arabidopsis thaliana
aacacccgcacgagttg

SEQ ID NO: 5780 - DNA, 17 bp, Arabidopsis thaliana
aacacccggtgtgcctc

SEQ ID NO: 5781 - DNA, 17 bp, Arabidopsis thaliana
aacacccgtcttgccaa

SEQ ID NO: 5782 - DNA, 17 bp, Arabidopsis thaliana
aacaccctgtgagacca

SEQ ID NO: 5783 - DNA, 17 bp, Arabidopsis thaliana
aacaccgagacttagtc

SEQ ID NO: 5784 - DNA, 17 bp, Arabidopsis thaliana
aacaccgagtgccgctc

SEQ ID NO: 5785 - DNA, 17 bp, Arabidopsis thaliana
aacaccgattcggattc

SEQ ID NO: 5786 - DNA, 17 bp, Arabidopsis thaliana
aacaccgattctgagtt

SEQ ID NO: 5787 - DNA, 17 bp, Arabidopsis thaliana
aacaccgcttagggctt

SEQ ID NO: 5788 - DNA, 17 bp, Arabidopsis thaliana
aacaccggacctcaatc

SEQ ID NO: 5789 - DNA, 17 bp, Arabidopsis thaliana
aacaccggaggcggaga

SEQ ID NO: 5790 - DNA, 17 bp, Arabidopsis thaliana
aacaccggattgggata

SEQ ID NO: 5791 - DNA, 17 bp, Arabidopsis thaliana
aacaccggatttcgtga

SEQ ID NO: 5792 - DNA, 17 bp, Arabidopsis thaliana
aacaccggccacttaca

SEQ ID NO: 5793 - DNA, 17 bp, Arabidopsis thaliana
aacaccggcgaatgatc

SEQ ID NO: 5794 - DNA, 17 bp, Arabidopsis thaliana
aacaccggcgcaatctt

SEQ ID NO: 5795 - DNA, 17 bp, Arabidopsis thaliana
aacaccggtggtcggct

SEQ ID NO: 5796 - DNA, 17 bp, Arabidopsis thaliana
aacaccggtggttggct

SEQ ID NO: 5797 - DNA, 17 bp, Arabidopsis thaliana
aacaccggttatgtgca

SEQ ID NO: 5798 - DNA, 17 bp, Arabidopsis thaliana
aacaccgtagcctccgg

SEQ ID NO: 5799 - DNA, 17 bp, Arabidopsis thaliana
aacaccgtccagtggcg

SEQ ID NO: 5800 - DNA, 17 bp, Arabidopsis thaliana
aacaccgtcttgtgagt

SEQ ID NO: 5801 - DNA, 17 bp, Arabidopsis thaliana
aacaccgtggcaagacc

SEQ ID NO: 5802 - DNA, 17 bp, Arabidopsis thaliana
aacacctaatcctcttg

SEQ ID NO: 5803 - DNA, 17 bp, Arabidopsis thaliana
aacacctattacaccag

SEQ ID NO: 5804 - DNA, 17 bp, Arabidopsis thaliana
aacacctattacagcag

SEQ ID NO: 5805 - DNA, 17 bp, Arabidopsis thaliana
aacacctccatctggga

SEQ ID NO: 5806 - DNA, 17 bp, Arabidopsis thaliana
aacacctgacctccctc

SEQ ID NO: 5807 - DNA, 17 bp, Arabidopsis thaliana
aacacctgcatcgagca

SEQ ID NO: 5808 - DNA, 17 bp, Arabidopsis thaliana
aacaccttaagtgtgtt

SEQ ID NO: 5809 - DNA, 17 bp, Arabidopsis thaliana
aacaccttagctcagtt

SEQ ID NO: 5810 - DNA, 17 bp, Arabidopsis thaliana
aacaccttctgggtgcg

SEQ ID NO: 5811 - DNA, 17 bp, Arabidopsis thaliana
aacacgaaaattccaaa

SEQ ID NO: 5812 - DNA, 17 bp, Arabidopsis thaliana
aacacgactctcggcaa

SEQ ID NO: 5813 - DNA, 17 bp, Arabidopsis thaliana
aacacgacttaaggtgt

SEQ ID NO: 5814 - DNA, 17 bp, Arabidopsis thaliana
aacacgagagagcggct

SEQ ID NO: 5815 - DNA, 17 bp, Arabidopsis thaliana
aacacgaggacttcccg

SEQ ID NO: 5816 - DNA, 17 bp, Arabidopsis thaliana
aacacgaggactttccg

SEQ ID NO: 5817 - DNA, 17 bp, Arabidopsis thaliana
aacacgaggatttcccg

SEQ ID NO: 5818 - DNA, 17 bp, Arabidopsis thaliana
aacacgagttggcccgg

SEQ ID NO: 5819 - DNA, 17 bp, Arabidopsis thaliana
aacacgatcatcgcaat

SEQ ID NO: 5820 - DNA, 17 bp, Arabidopsis thaliana
aacacgatccagacctt

SEQ ID NO: 5821 - DNA, 17 bp, Arabidopsis thaliana
aacacgatcgcctgcca

SEQ ID NO: 5822 - DNA, 17 bp, Arabidopsis thaliana
aacacgattggtcagca

SEQ ID NO: 5823 - DNA, 17 bp, Arabidopsis thaliana
aacacgcacacgggccg

SEQ ID NO: 5824 - DNA, 17 bp, Arabidopsis thaliana
aacacgcagaattcttt

SEQ ID NO: 5825 - DNA, 17 bp, Arabidopsis thaliana
aacacgccatcactatt

SEQ ID NO: 5826 - DNA, 17 bp, Arabidopsis thaliana
aacacgcggattacggt

SEQ ID NO: 5827 - DNA, 17 bp, Arabidopsis thaliana
aacacgcggcatgggtg

SEQ ID NO: 5828 - DNA, 17 bp, Arabidopsis thaliana
aacacgcggtaagatgt

SEQ ID NO: 5829 - DNA, 17 bp, Arabidopsis thaliana
aacacggaccaaggagt

SEQ ID NO: 5830 - DNA, 17 bp, Arabidopsis thaliana
aacacggcctatgtttg

SEQ ID NO: 5831 - DNA, 17 bp, Arabidopsis thaliana
aacacggctgacttaac

SEQ ID NO: 5832 - DNA, 17 bp, Arabidopsis thaliana
aacacggcttaaggacc

SEQ ID NO: 5833 - DNA, 17 bp, Arabidopsis thaliana
aacacggcttacggacc

SEQ ID NO: 5834 - DNA, 17 bp, Arabidopsis thaliana
aacacgggacaattttg

SEQ ID NO: 5835 - DNA, 17 bp, Arabidopsis thaliana
aacacgggcattgtgga

SEQ ID NO: 5836 - DNA, 17 bp, Arabidopsis thaliana
aacacggggaaacttac

SEQ ID NO: 5837 - DNA, 17 bp, Arabidopsis thaliana
aacacgggtttgacagg

SEQ ID NO: 5838 - DNA, 17 bp, Arabidopsis thaliana
aacacgggtttggcagg

SEQ ID NO: 5839 - DNA, 17 bp, Arabidopsis thaliana
aacacggttctgcacga

SEQ ID NO: 5840 - DNA, 17 bp, Arabidopsis thaliana
aacacggttttacgggt

SEQ ID NO: 5841 - DNA, 17 bp, Arabidopsis thaliana
aacacggtttttcgatt

SEQ ID NO: 5842 - DNA, 17 bp, Arabidopsis thaliana
aacacgtagtgtttcac

SEQ ID NO: 5843 - DNA, 17 bp, Arabidopsis thaliana
aacactaaaacttgtgt

SEQ ID NO: 5844 - DNA, 17 bp, Arabidopsis thaliana
aacactaaatcaccaaa

SEQ ID NO: 5845 - DNA, 17 bp, Arabidopsis thaliana
aacactaaatcaccaac

SEQ ID NO: 5846 - DNA, 17 bp, Arabidopsis thaliana
aacactaaatcaccatg

SEQ ID NO: 5847 - DNA, 17 bp, Arabidopsis thaliana
aacactaagtagatagg

SEQ ID NO: 5848 - DNA, 17 bp, Arabidopsis thaliana
aacactaatggcaacac

SEQ ID NO: 5849 - DNA, 17 bp, Arabidopsis thaliana
aacactaatggcaatgc

SEQ ID NO: 5850 - DNA, 17 bp, Arabidopsis thaliana
aacactacgaccgccca

SEQ ID NO: 5851 - DNA, 17 bp, Arabidopsis thaliana
aacactacgaccgctca

SEQ ID NO: 5852 - DNA, 17 bp, Arabidopsis thaliana
aacactacgggatttca

SEQ ID NO: 5853 - DNA, 17 bp, Arabidopsis thaliana
aacactactgaggcctt

SEQ ID NO: 5854 - DNA, 17 bp, Arabidopsis thaliana
aacactacttgcggtgc

SEQ ID NO: 5855 - DNA, 17 bp, Arabidopsis thaliana
aacactagataaggccc

SEQ ID NO: 5856 - DNA, 17 bp, Arabidopsis thaliana
aacactagatattgacc

SEQ ID NO: 5857 - DNA, 17 bp, Arabidopsis thaliana
aacactagctgctgtag

SEQ ID NO: 5858 - DNA, 17 bp, Arabidopsis thaliana
aacactaggactttcct

SEQ ID NO: 5859 - DNA, 17 bp, Arabidopsis thaliana
aacactaggataagacc

SEQ ID NO: 5860 - DNA, 17 bp, Arabidopsis thaliana
aacactaggatatgacc

SEQ ID NO: 5861 - DNA, 17 bp, Arabidopsis thaliana
aacactagtcaacgccg

SEQ ID NO: 5862 - DNA, 17 bp, Arabidopsis thaliana
aacactagtgtgagggc

SEQ ID NO: 5863 - DNA, 17 bp, Arabidopsis thaliana
aacactagttacagttg

SEQ ID NO: 5864 - DNA, 17 bp, Arabidopsis thaliana
aacactagtttgacact

SEQ ID NO: 5865 - DNA, 17 bp, Arabidopsis thaliana
aacactatgtggaggac

SEQ ID NO: 5866 - DNA, 17 bp, Arabidopsis thaliana
aacactattgcggtgca

SEQ ID NO: 5867 - DNA, 17 bp, Arabidopsis thaliana
aacactcaactaatctg

SEQ ID NO: 5868 - DNA, 17 bp, Arabidopsis thaliana
aacactcagcagcttat

SEQ ID NO: 5869 - DNA, 17 bp, Arabidopsis thaliana
aacactccccctgaccc

SEQ ID NO: 5870 - DNA, 17 bp, Arabidopsis thaliana
aacactccccctgatga

SEQ ID NO: 5871 - DNA, 17 bp, Arabidopsis thaliana
aacactccgatgggttt

SEQ ID NO: 5872 - DNA, 17 bp, Arabidopsis thaliana
aacactccgctgactgc

SEQ ID NO: 5873 - DNA, 17 bp, Arabidopsis thaliana
aacactcctcaggattg

SEQ ID NO: 5874 - DNA, 17 bp, Arabidopsis thaliana
aacactcgaccgttcac

SEQ ID NO: 5875 - DNA, 17 bp, Arabidopsis thaliana
aacactcgaggcttttt

SEQ ID NO: 5876 - DNA, 17 bp, Arabidopsis thaliana
aacactcgatcacatcc

SEQ ID NO: 5877 - DNA, 17 bp, Arabidopsis thaliana
aacactcgttgtgatct

SEQ ID NO: 5878 - DNA, 17 bp, Arabidopsis thaliana
aacactctagtccgact

SEQ ID NO: 5879 - DNA, 17 bp, Arabidopsis thaliana
aacactctcatccactc

SEQ ID NO: 5880 - DNA, 17 bp, Arabidopsis thaliana
aacactctcatccattg

SEQ ID NO: 5881 - DNA, 17 bp, Arabidopsis thaliana
aacactctccctgatga

SEQ ID NO: 5882 - DNA, 17 bp, Arabidopsis thaliana
aacactctcggcaacgg

SEQ ID NO: 5883 - DNA, 17 bp, Arabidopsis thaliana
aacactctctagacaac

SEQ ID NO: 5884 - DNA, 17 bp, Arabidopsis thaliana
aacactctctccatacg

SEQ ID NO: 5885 - DNA, 17 bp, Arabidopsis thaliana
aacactctctccatccg

SEQ ID NO: 5886 - DNA, 17 bp, Arabidopsis thaliana
aacactctgcgtttttg

SEQ ID NO: 5887 - DNA, 17 bp, Arabidopsis thaliana
aacactctgtcctggag

SEQ ID NO: 5888 - DNA, 17 bp, Arabidopsis thaliana
aacactcttgttcctgg

SEQ ID NO: 5889 - DNA, 17 bp, Arabidopsis thaliana
aacactgacctaccttc

SEQ ID NO: 5890 - DNA, 17 bp, Arabidopsis thaliana
aacactgagagctcttt

SEQ ID NO: 5891 - DNA, 17 bp, Arabidopsis thaliana
aacactgaggctggggc

SEQ ID NO: 5892 - DNA, 17 bp, Arabidopsis thaliana
aacactgaggtggtggt

SEQ ID NO: 5893 - DNA, 17 bp, Arabidopsis thaliana
aacactgagtcgctttg

SEQ ID NO: 5894 - DNA, 17 bp, Arabidopsis thaliana
aacactgatacttgcgt

SEQ ID NO: 5895 - DNA, 17 bp, Arabidopsis thaliana
aacactgatgctgacac

SEQ ID NO: 5896 - DNA, 17 bp, Arabidopsis thaliana
aacactgattaagatac

SEQ ID NO: 5897 - DNA, 17 bp, Arabidopsis thaliana
aacactgcccatctaag

SEQ ID NO: 5898 - DNA, 17 bp, Arabidopsis thaliana
aacactgctaattgccg

SEQ ID NO: 5899 - DNA, 17 bp, Arabidopsis thaliana
aacactgctactctaat

SEQ ID NO: 5900 - DNA, 17 bp, Arabidopsis thaliana
aacactggagtgagatg

SEQ ID NO: 5901 - DNA, 17 bp, Arabidopsis thaliana
aacactggatcggccca

SEQ ID NO: 5902 - DNA, 17 bp, Arabidopsis thaliana
aacactggccgtagttt

SEQ ID NO: 5903 - DNA, 17 bp, Arabidopsis thaliana
aacactggctaaaataa

SEQ ID NO: 5904 - DNA, 17 bp, Arabidopsis thaliana
aacactggctcggccca

SEQ ID NO: 5905 - DNA, 17 bp, Arabidopsis thaliana
aacactgggttcgccgc

SEQ ID NO: 5906 - DNA, 17 bp, Arabidopsis thaliana
aacactggttaccaatc

SEQ ID NO: 5907 - DNA, 17 bp, Arabidopsis thaliana
aacactgtctagatccg

SEQ ID NO: 5908 - DNA, 17 bp, Arabidopsis thaliana
aacactgtctagatctg

SEQ ID NO: 5909 - DNA, 17 bp, Arabidopsis thaliana
aacactgtggtgagtta

SEQ ID NO: 5910 - DNA, 17 bp, Arabidopsis thaliana
aacactgttgcgctgcc

SEQ ID NO: 5911 - DNA, 17 bp, Arabidopsis thaliana
aacactgttgcgctgcg

SEQ ID NO: 5912 - DNA, 17 bp, Arabidopsis thaliana
aacactgttgcggtgcg

SEQ ID NO: 5913 - DNA, 17 bp, Arabidopsis thaliana
aacacttactggcttgc

SEQ ID NO: 5914 - DNA, 17 bp, Arabidopsis thaliana
aacacttcaggtgttcg

SEQ ID NO: 5915 - DNA, 17 bp, Arabidopsis thaliana
aacacttcagtgcgttt

SEQ ID NO: 5916 - DNA, 17 bp, Arabidopsis thaliana
aacacttctatattggc

SEQ ID NO: 5917 - DNA, 17 bp, Arabidopsis thaliana
aacacttctgaatggtt

SEQ ID NO: 5918 - DNA, 17 bp, Arabidopsis thaliana
aacacttcttaacagct

SEQ ID NO: 5919 - DNA, 17 bp, Arabidopsis thaliana
aacacttcttcttttgg

SEQ ID NO: 5920 - DNA, 17 bp, Arabidopsis thaliana
aacacttcttcttttgt

SEQ ID NO: 5921 - DNA, 17 bp, Arabidopsis thaliana
aacacttgatcgtttga

SEQ ID NO: 5922 - DNA, 17 bp, Arabidopsis thaliana
aacacttgctttaattg

SEQ ID NO: 5923 - DNA, 17 bp, Arabidopsis thaliana
aacacttgctttttgga

SEQ ID NO: 5924 - DNA, 17 bp, Arabidopsis thaliana
aacacttggacttagcc

SEQ ID NO: 5925 - DNA, 17 bp, Arabidopsis thaliana
aacacttggcagggcgc

SEQ ID NO: 5926 - DNA, 17 bp, Arabidopsis thaliana
aacacttggtgcgttcc

SEQ ID NO: 5927 - DNA, 17 bp, Arabidopsis thaliana
aacacttggttcgtcga

SEQ ID NO: 5928 - DNA, 17 bp, Arabidopsis thaliana
aacacttgtatgcgctc

SEQ ID NO: 5929 - DNA, 17 bp, Arabidopsis thaliana
aacacttgtgtgcgagt

SEQ ID NO: 5930 - DNA, 17 bp, Arabidopsis thaliana
aacacttgttggttctg

SEQ ID NO: 5931 - DNA, 17 bp, Arabidopsis thaliana
aacacttgttgttggct

SEQ ID NO: 5932 - DNA, 17 bp, Arabidopsis thaliana
aacactttggtgcgttc

SEQ ID NO: 5933 - DNA, 17 bp, Arabidopsis thaliana
aacactttgtcctgatc

SEQ ID NO: 5934 - DNA, 17 bp, Arabidopsis thaliana
aacacttttagtaacgc

SEQ ID NO: 5935 - DNA, 17 bp, Arabidopsis thaliana
aacactttttgcggggt

SEQ ID NO: 5936 - DNA, 17 bp, Arabidopsis thaliana
aacagaaacaaaacgtt

SEQ ID NO: 5937 - DNA, 17 bp, Arabidopsis thaliana
aacagaaactgcgtcat

SEQ ID NO: 5938 - DNA, 17 bp, Arabidopsis thaliana
aacagaacacagtcgca

SEQ ID NO: 5939 - DNA, 17 bp, Arabidopsis thaliana
aacagaaccgaactggc

SEQ ID NO: 5940 - DNA, 17 bp, Arabidopsis thaliana
aacagaagctacagagt

SEQ ID NO: 5941 - DNA, 17 bp, Arabidopsis thaliana
aacagaatcactcatcc

SEQ ID NO: 5942 - DNA, 17 bp, Arabidopsis thaliana
aacagaattccagatga

SEQ ID NO: 5943 - DNA, 17 bp, Arabidopsis thaliana
aacagacaaggctgatt

SEQ ID NO: 5944 - DNA, 17 bp, Arabidopsis thaliana
aacagacaatgtggtgg

SEQ ID NO: 5945 - DNA, 17 bp, Arabidopsis thaliana
aacagacagtgccgacc

SEQ ID NO: 5946 - DNA, 17 bp, Arabidopsis thaliana
aacagacagtgtggtcg

SEQ ID NO: 5947 - DNA, 17 bp, Arabidopsis thaliana
aacagacagtgtggtgg

SEQ ID NO: 5948 - DNA, 17 bp, Arabidopsis thaliana
aacagaccgctggaccc

SEQ ID NO: 5949 - DNA, 17 bp, Arabidopsis thaliana
aacagaccgctggaccg

SEQ ID NO: 5950 - DNA, 17 bp, Arabidopsis thaliana
aacagacgactgaattc

SEQ ID NO: 5951 - DNA, 17 bp, Arabidopsis thaliana
aacagacgtggtgcgcc

SEQ ID NO: 5952 - DNA, 17 bp, Arabidopsis thaliana
aacagactcttcttgac

SEQ ID NO: 5953 - DNA, 17 bp, Arabidopsis thaliana
aacagactgtgcagtcg

SEQ ID NO: 5954 - DNA, 17 bp, Arabidopsis thaliana
aacagactgttcagacc

SEQ ID NO: 5955 - DNA, 17 bp, Arabidopsis thaliana
aacagactttttttttg

SEQ ID NO: 5956 - DNA, 17 bp, Arabidopsis thaliana
aacagagacatcactca

SEQ ID NO: 5957 - DNA, 17 bp, Arabidopsis thaliana
aacagagacctgtggat

SEQ ID NO: 5958 - DNA, 17 bp, Arabidopsis thaliana
aacagagacgattctcg

SEQ ID NO: 5959 - DNA, 17 bp, Arabidopsis thaliana
aacagagaggttttgcc

SEQ ID NO: 5960 - DNA, 17 bp, Arabidopsis thaliana
aacagagatactcgact

SEQ ID NO: 5961 - DNA, 17 bp, Arabidopsis thaliana
aacagagccagacgcag

SEQ ID NO: 5962 - DNA, 17 bp, Arabidopsis thaliana
aacagagcccacttgtg

SEQ ID NO: 5963 - DNA, 17 bp, Arabidopsis thaliana
aacagagctaggcaatt

SEQ ID NO: 5964 - DNA, 17 bp, Arabidopsis thaliana
aacagagcttcagccag

SEQ ID NO: 5965 - DNA, 17 bp, Arabidopsis thaliana
aacagagcttcgtgctg

SEQ ID NO: 5966 - DNA, 17 bp, Arabidopsis thaliana
aacagaggtccatgggt

SEQ ID NO: 5967 - DNA, 17 bp, Arabidopsis thaliana
aacagagtagccagcct

SEQ ID NO: 5968 - DNA, 17 bp, Arabidopsis thaliana
aacagagtccaaatggt

SEQ ID NO: 5969 - DNA, 17 bp, Arabidopsis thaliana
aacagagtcgataacag

SEQ ID NO: 5970 - DNA, 17 bp, Arabidopsis thaliana
aacagagtgtggaccac

SEQ ID NO: 5971 - DNA, 17 bp, Arabidopsis thaliana
aacagagttaaaccgaa

SEQ ID NO: 5972 - DNA, 17 bp, Arabidopsis thaliana
aacagagttccacttgt

SEQ ID NO: 5973 - DNA, 17 bp, Arabidopsis thaliana
aacagagttggtaggcc

SEQ ID NO: 5974 - DNA, 17 bp, Arabidopsis thaliana
aacagataggtttttct

SEQ ID NO: 5975 - DNA, 17 bp, Arabidopsis thaliana
aacagatcaagcccaac

SEQ ID NO: 5976 - DNA, 17 bp, Arabidopsis thaliana
aacagatccaatttgat

SEQ ID NO: 5977 - DNA, 17 bp, Arabidopsis thaliana
aacagatccctggacgg

SEQ ID NO: 5978 - DNA, 17 bp, Arabidopsis thaliana
aacagatccgcgggtcg

SEQ ID NO: 5979 - DNA, 17 bp, Arabidopsis thaliana
aacagatcctgaagcgg

SEQ ID NO: 5980 - DNA, 17 bp, Arabidopsis thaliana
aacagatcctgaagcgt

SEQ ID NO: 5981 - DNA, 17 bp, Arabidopsis thaliana
aacagatgacgtatttt

SEQ ID NO: 5982 - DNA, 17 bp, Arabidopsis thaliana
aacagatggatcattgc

SEQ ID NO: 5983 - DNA, 17 bp, Arabidopsis thaliana
aacagatggatcgctgc

SEQ ID NO: 5984 - DNA, 17 bp, Arabidopsis thaliana
aacagatggattgctgc

SEQ ID NO: 5985 - DNA, 17 bp, Arabidopsis thaliana
aacagatgtcgatactt

SEQ ID NO: 5986 - DNA, 17 bp, Arabidopsis thaliana
aacagatgttaagtcgc

SEQ ID NO: 5987 - DNA, 17 bp, Arabidopsis thaliana
aacagattacatggcca

SEQ ID NO: 5988 - DNA, 17 bp, Arabidopsis thaliana
aacagattcatccaact

SEQ ID NO: 5989 - DNA, 17 bp, Arabidopsis thaliana
aacagattctgcatggc

SEQ ID NO: 5990 - DNA, 17 bp, Arabidopsis thaliana
aacagattgaggtccag

SEQ ID NO: 5991 - DNA, 17 bp, Arabidopsis thaliana
aacagattgaggtccgg

SEQ ID NO: 5992 - DNA, 17 bp, Arabidopsis thaliana
aacagatttgaccatgg

SEQ ID NO: 5993 - DNA, 17 bp, Arabidopsis thaliana
aacagattttccaggaa

SEQ ID NO: 5994 - DNA, 17 bp, Arabidopsis thaliana
aacagattttggtgtgt

SEQ ID NO: 5995 - DNA, 17 bp, Arabidopsis thaliana
aacagcaaactgtatgt

SEQ ID NO: 5996 - DNA, 17 bp, Arabidopsis thaliana
aacagcactggactatg

SEQ ID NO: 5997 - DNA, 17 bp, Arabidopsis thaliana
aacagcagactctgatt

SEQ ID NO: 5998 - DNA, 17 bp, Arabidopsis thaliana
aacagcagccgcgactc

SEQ ID NO: 5999 - DNA, 17 bp, Arabidopsis thaliana
aacagcaggacgatcct

SEQ ID NO: 6000 - DNA, 17 bp, Arabidopsis thaliana
aacagcagttcaggcca

SEQ ID NO: 6001 - DNA, 17 bp, Arabidopsis thaliana
aacagcagttgcctcat

SEQ ID NO: 6002 - DNA, 17 bp, Arabidopsis thaliana
aacagccaacacacatt

SEQ ID NO: 6003 - DNA, 17 bp, Arabidopsis thaliana
aacagccaaggatgact

SEQ ID NO: 6004 - DNA, 17 bp, Arabidopsis thaliana
aacagccaatggcggag

SEQ ID NO: 6005 - DNA, 17 bp, Arabidopsis thaliana
aacagccagcccaccct

SEQ ID NO: 6006 - DNA, 17 bp, Arabidopsis thaliana
aacagccgggtcgataa

SEQ ID NO: 6007 - DNA, 17 bp, Arabidopsis thaliana
aacagcctctggtcgat

SEQ ID NO: 6008 - DNA, 17 bp, Arabidopsis thaliana
aacagccttttctatgg

SEQ ID NO: 6009 - DNA, 17 bp, Arabidopsis thaliana
aacagcgaactgctcga

SEQ ID NO: 6010 - DNA, 17 bp, Arabidopsis thaliana
aacagcgatgtgaagaa

SEQ ID NO: 6011 - DNA, 17 bp, Arabidopsis thaliana
aacagcgcgacattcct

SEQ ID NO: 6012 - DNA, 17 bp, Arabidopsis thaliana
aacagcgcgagcggtta

SEQ ID NO: 6013 - DNA, 17 bp, Arabidopsis thaliana
aacagcgcgatcagctc

SEQ ID NO: 6014 - DNA, 17 bp, Arabidopsis thaliana
aacagcgctcctaacaa

SEQ ID NO: 6015 - DNA, 17 bp, Arabidopsis thaliana
aacagcgctcctaacag

SEQ ID NO: 6016 - DNA, 17 bp, Arabidopsis thaliana
aacagcgctcctaactg

SEQ ID NO: 6017 - DNA, 17 bp, Arabidopsis thaliana
aacagcgcttaaagatg

SEQ ID NO: 6018 - DNA, 17 bp, Arabidopsis thaliana
aacagcggactgctcga

SEQ ID NO: 6019 - DNA, 17 bp, Arabidopsis thaliana
aacagcggaggtatcga

SEQ ID NO: 6020 - DNA, 17 bp, Arabidopsis thaliana
aacagcggcgaagaaag

SEQ ID NO: 6021 - DNA, 17 bp, Arabidopsis thaliana
aacagcggctcaacaac

SEQ ID NO: 6022 - DNA, 17 bp, Arabidopsis thaliana
aacagcggctcaacatc

SEQ ID NO: 6023 - DNA, 17 bp, Arabidopsis thaliana
aacagcggtcaagggga

SEQ ID NO: 6024 - DNA, 17 bp, Arabidopsis thaliana
aacagcggtgaagaaag

SEQ ID NO: 6025 - DNA, 17 bp, Arabidopsis thaliana
aacagcggtgattgatg

SEQ ID NO: 6026 - DNA, 17 bp, Arabidopsis thaliana
aacagcggtgtagcgcg

SEQ ID NO: 6027 - DNA, 17 bp, Arabidopsis thaliana
aacagcgtttgacgatg

SEQ ID NO: 6028 - DNA, 17 bp, Arabidopsis thaliana
aacagcgtttgatctct

SEQ ID NO: 6029 - DNA, 17 bp, Arabidopsis thaliana
aacagctgagaggtcac

SEQ ID NO: 6030 - DNA, 17 bp, Arabidopsis thaliana
aacagctggaaacggct

SEQ ID NO: 6031 - DNA, 17 bp, Arabidopsis thaliana
aacagctgtgacttagg

SEQ ID NO: 6032 - DNA, 17 bp, Arabidopsis thaliana
aacagcttgatcgtttt

SEQ ID NO: 6033 - DNA, 17 bp, Arabidopsis thaliana
aacagctttgcactatt

SEQ ID NO: 6034 - DNA, 17 bp, Arabidopsis thaliana
aacagctttgcattatt

SEQ ID NO: 6035 - DNA, 17 bp, Arabidopsis thaliana
aacaggaacagtcgggg

SEQ ID NO: 6036 - DNA, 17 bp, Arabidopsis thaliana
aacaggacaaggcaagt

SEQ ID NO: 6037 - DNA, 17 bp, Arabidopsis thaliana
aacaggacttggtattg

SEQ ID NO: 6038 - DNA, 17 bp, Arabidopsis thaliana
aacaggagattcgatta

SEQ ID NO: 6039 - DNA, 17 bp, Arabidopsis thaliana
aacaggatctgttctat

SEQ ID NO: 6040 - DNA, 17 bp, Arabidopsis thaliana
aacaggcaaggacttgg

SEQ ID NO: 6041 - DNA, 17 bp, Arabidopsis thaliana
aacaggcccagcccgcg

SEQ ID NO: 6042 - DNA, 17 bp, Arabidopsis thaliana
aacaggccgctttagga

SEQ ID NO: 6043 - DNA, 17 bp, Arabidopsis thaliana
aacaggcctcggtatcc

SEQ ID NO: 6044 - DNA, 17 bp, Arabidopsis thaliana
aacaggcgaaaggcaga

SEQ ID NO: 6045 - DNA, 17 bp, Arabidopsis thaliana
aacaggcggtgttgcga

SEQ ID NO: 6046 - DNA, 17 bp, Arabidopsis thaliana
aacaggcgttagcaggc

SEQ ID NO: 6047 - DNA, 17 bp, Arabidopsis thaliana
aacaggctctgttgttt

SEQ ID NO: 6048 - DNA, 17 bp, Arabidopsis thaliana
aacagggacagtcgggg

SEQ ID NO: 6049 - DNA, 17 bp, Arabidopsis thaliana
aacagggagattcttcg

SEQ ID NO: 6050 - DNA, 17 bp, Arabidopsis thaliana
aacagggaggtgatgga

SEQ ID NO: 6051 - DNA, 17 bp, Arabidopsis thaliana
aacagggattggcttct

SEQ ID NO: 6052 - DNA, 17 bp, Arabidopsis thaliana
aacagggcacgtctgcc

SEQ ID NO: 6053 - DNA, 17 bp, Arabidopsis thaliana
aacagggcataggtttt

SEQ ID NO: 6054 - DNA, 17 bp, Arabidopsis thaliana
aacagggcccacatatc

SEQ ID NO: 6055 - DNA, 17 bp, Arabidopsis thaliana
aacagggcttcttggac

SEQ ID NO: 6056 - DNA, 17 bp, Arabidopsis thaliana
aacaggggatcgctctc

SEQ ID NO: 6057 - DNA, 17 bp, Arabidopsis thaliana
aacagggtccttcatcg

SEQ ID NO: 6058 - DNA, 17 bp, Arabidopsis thaliana
aacagggtcttctgagt

SEQ ID NO: 6059 - DNA, 17 bp, Arabidopsis thaliana
aacagggtgccgcattg

SEQ ID NO: 6060 - DNA, 17 bp, Arabidopsis thaliana
aacagggttaaccttcc

SEQ ID NO: 6061 - DNA, 17 bp, Arabidopsis thaliana
aacagggttagatggta

SEQ ID NO: 6062 - DNA, 17 bp, Arabidopsis thaliana
aacagggtttcgcctgc

SEQ ID NO: 6063 - DNA, 17 bp, Arabidopsis thaliana
aacagggtttggcaatt

SEQ ID NO: 6064 - DNA, 17 bp, Arabidopsis thaliana
aacaggtacagtcgggg

SEQ ID NO: 6065 - DNA, 17 bp, Arabidopsis thaliana
aacaggtcagttacggg

SEQ ID NO: 6066 - DNA, 17 bp, Arabidopsis thaliana
aacaggtcatttgatga

SEQ ID NO: 6067 - DNA, 17 bp, Arabidopsis thaliana
aacaggtccgtcaagcc

SEQ ID NO: 6068 - DNA, 17 bp, Arabidopsis thaliana
aacaggtccgtgatgcc

SEQ ID NO: 6069 - DNA, 17 bp, Arabidopsis thaliana
aacaggtcgagtatcac

SEQ ID NO: 6070 - DNA, 17 bp, Arabidopsis thaliana
aacaggtcggttacggt

SEQ ID NO: 6071 - DNA, 17 bp, Arabidopsis thaliana
aacaggtctgtgatgcc

SEQ ID NO: 6072 - DNA, 17 bp, Arabidopsis thaliana
aacaggtctgtgatgtc

SEQ ID NO: 6073 - DNA, 17 bp, Arabidopsis thaliana
aacaggtctgtgattcc

SEQ ID NO: 6074 - DNA, 17 bp, Arabidopsis thaliana
aacaggtctgttatgcc

SEQ ID NO: 6075 - DNA, 17 bp, Arabidopsis thaliana
aacaggtgtggcctgca

SEQ ID NO: 6076 - DNA, 17 bp, Arabidopsis thaliana
aacaggtttccgatgag

SEQ ID NO: 6077 - DNA, 17 bp, Arabidopsis thaliana
aacaggtttggccccac

SEQ ID NO: 6078 - DNA, 17 bp, Arabidopsis thaliana
aacaggtttgtgcagtt

SEQ ID NO: 6079 - DNA, 17 bp, Arabidopsis thaliana
aacaggtttgtgtggct

SEQ ID NO: 6080 - DNA, 17 bp, Arabidopsis thaliana
aacaggtttgtgttgct

SEQ ID NO: 6081 - DNA, 17 bp, Arabidopsis thaliana
aacaggttttggtgtgt

SEQ ID NO: 6082 - DNA, 17 bp, Arabidopsis thaliana
aacaggtttttgttcag

SEQ ID NO: 6083 - DNA, 17 bp, Arabidopsis thaliana
aacagtaacttcggcac

SEQ ID NO: 6084 - DNA, 17 bp, Arabidopsis thaliana
aacagtaagtgccgcga

SEQ ID NO: 6085 - DNA, 17 bp, Arabidopsis thaliana
aacagtaatgcttccac

SEQ ID NO: 6086 - DNA, 17 bp, Arabidopsis thaliana
aacagtacgcagatggt

SEQ ID NO: 6087 - DNA, 17 bp, Arabidopsis thaliana
aacagtagcgccgaaac

SEQ ID NO: 6088 - DNA, 17 bp, Arabidopsis thaliana
aacagtagttttttctg

SEQ ID NO: 6089 - DNA, 17 bp, Arabidopsis thaliana
aacagtatcgcggacga

SEQ ID NO: 6090 - DNA, 17 bp, Arabidopsis thaliana
aacagtatcttagagtt

SEQ ID NO: 6091 - DNA, 17 bp, Arabidopsis thaliana
aacagtcactttcggcg

SEQ ID NO: 6092 - DNA, 17 bp, Arabidopsis thaliana
aacagtccctgtgatct

SEQ ID NO: 6093 - DNA, 17 bp, Arabidopsis thaliana
aacagtccgcagatggt

SEQ ID NO: 6094 - DNA, 17 bp, Arabidopsis thaliana
aacagtccttgtgatct

SEQ ID NO: 6095 - DNA, 17 bp, Arabidopsis thaliana
aacagtcgataactccg

SEQ ID NO: 6096 - DNA, 17 bp, Arabidopsis thaliana
aacagtcgctaggtgca

SEQ ID NO: 6097 - DNA, 17 bp, Arabidopsis thaliana
aacagtcgctgggtgca

SEQ ID NO: 6098 - DNA, 17 bp, Arabidopsis thaliana
aacagtcgtcggagaca

SEQ ID NO: 6099 - DNA, 17 bp, Arabidopsis thaliana
aacagtcgttttgcgag

SEQ ID NO: 6100 - DNA, 17 bp, Arabidopsis thaliana
aacagtctcggctggac

SEQ ID NO: 6101 - DNA, 17 bp, Arabidopsis thaliana
aacagtctggtggctca

SEQ ID NO: 6102 - DNA, 17 bp, Arabidopsis thaliana
aacagtgaaaccatcta

SEQ ID NO: 6103 - DNA, 17 bp, Arabidopsis thaliana
aacagtgacccggcccg

SEQ ID NO: 6104 - DNA, 17 bp, Arabidopsis thaliana
aacagtgagtcggatcc

SEQ ID NO: 6105 - DNA, 17 bp, Arabidopsis thaliana
aacagtgatgagtcagt

SEQ ID NO: 6106 - DNA, 17 bp, Arabidopsis thaliana
aacagtgatgatgaccg

SEQ ID NO: 6107 - DNA, 17 bp, Arabidopsis thaliana
aacagtgatggaccgac

SEQ ID NO: 6108 - DNA, 17 bp, Arabidopsis thaliana
aacagtggactggatag

SEQ ID NO: 6109 - DNA, 17 bp, Arabidopsis thaliana
aacagtggactggatga

SEQ ID NO: 6110 - DNA, 17 bp, Arabidopsis thaliana
aacagtggactggattg

SEQ ID NO: 6111 - DNA, 17 bp, Arabidopsis thaliana
aacagtggcactagtga

SEQ ID NO: 6112 - DNA, 17 bp, Arabidopsis thaliana
aacagtggcgaacacca

SEQ ID NO: 6113 - DNA, 17 bp, Arabidopsis thaliana
aacagtggcggtgccgg

SEQ ID NO: 6114 - DNA, 17 bp, Arabidopsis thaliana
aacagtgggaccggtgc

SEQ ID NO: 6115 - DNA, 17 bp, Arabidopsis thaliana
aacagtggtgcaaaagc

SEQ ID NO: 6116 - DNA, 17 bp, Arabidopsis thaliana
aacagtggtgcagaagc

SEQ ID NO: 6117 - DNA, 17 bp, Arabidopsis thaliana
aacagtggtttgcggct

SEQ ID NO: 6118 - DNA, 17 bp, Arabidopsis thaliana
aacagtggttttcggct

SEQ ID NO: 6119 - DNA, 17 bp, Arabidopsis thaliana
aacagtgtgtctaatat

SEQ ID NO: 6120 - DNA, 17 bp, Arabidopsis thaliana
aacagttaagtgtgctt

SEQ ID NO: 6121 - DNA, 17 bp, Arabidopsis thaliana
aacagttaatcaacagt

SEQ ID NO: 6122 - DNA, 17 bp, Arabidopsis thaliana
aacagttaggcttcgaa

SEQ ID NO: 6123 - DNA, 17 bp, Arabidopsis thaliana
aacagttatgagccatg

SEQ ID NO: 6124 - DNA, 17 bp, Arabidopsis thaliana
aacagttcaaagacgcg

SEQ ID NO: 6125 - DNA, 17 bp, Arabidopsis thaliana
aacagttcacggttaat

SEQ ID NO: 6126 - DNA, 17 bp, Arabidopsis thaliana
aacagttcaggtgaaaa

SEQ ID NO: 6127 - DNA, 17 bp, Arabidopsis thaliana
aacagttcgatctatga

SEQ ID NO: 6128 - DNA, 17 bp, Arabidopsis thaliana
aacagttgaaccttggg

SEQ ID NO: 6129 - DNA, 17 bp, Arabidopsis thaliana
aacagttgacctggggt

SEQ ID NO: 6130 - DNA, 17 bp, Arabidopsis thaliana
aacagttgcgtggtttt

SEQ ID NO: 6131 - DNA, 17 bp, Arabidopsis thaliana
aacagttgggaacaatg

SEQ ID NO: 6132 - DNA, 17 bp, Arabidopsis thaliana
aacagttggtgaccggt

SEQ ID NO: 6133 - DNA, 17 bp, Arabidopsis thaliana
aacagttggtttgtcac

SEQ ID NO: 6134 - DNA, 17 bp, Arabidopsis thaliana
aacagttgtatcttata

SEQ ID NO: 6135 - DNA, 17 bp, Arabidopsis thaliana
aacagttgtgtccgccc

SEQ ID NO: 6136 - DNA, 17 bp, Arabidopsis thaliana
aacagtttcatctgcgt

SEQ ID NO: 6137 - DNA, 17 bp, Arabidopsis thaliana
aacagtttgatgaagat

SEQ ID NO: 6138 - DNA, 17 bp, Arabidopsis thaliana
aacagtttgtaattgca

SEQ ID NO: 6139 - DNA, 17 bp, Arabidopsis thaliana
aacagtttgttgaccgg

SEQ ID NO: 6140 - DNA, 17 bp, Arabidopsis thaliana
aacagtttgttgactgg

SEQ ID NO: 6141 - DNA, 17 bp, Arabidopsis thaliana
aacagttttgaaatgcg

SEQ ID NO: 6142 - DNA, 17 bp, Arabidopsis thaliana
aacagttttgcactatt

SEQ ID NO: 6143 - DNA, 17 bp, Arabidopsis thaliana
aacagttttgtccgccc

SEQ ID NO: 6144 - DNA, 17 bp, Arabidopsis thaliana
aacataaacccgtaatt

SEQ ID NO: 6145 - DNA, 17 bp, Arabidopsis thaliana
aacataaacccgtgatt

SEQ ID NO: 6146 - DNA, 17 bp, Arabidopsis thaliana
aacataaacctccgcat

SEQ ID NO: 6147 - DNA, 17 bp, Arabidopsis thaliana
aacataaatataggccc

SEQ ID NO: 6148 - DNA, 17 bp, Arabidopsis thaliana
aacataacagagccgaa

SEQ ID NO: 6149 - DNA, 17 bp, Arabidopsis thaliana
aacataacttgtgattg

SEQ ID NO: 6150 - DNA, 17 bp, Arabidopsis thaliana
aacataacttttgccga

SEQ ID NO: 6151 - DNA, 17 bp, Arabidopsis thaliana
aacataagaactcaacg

SEQ ID NO: 6152 - DNA, 17 bp, Arabidopsis thaliana
aacatacctccagagat

SEQ ID NO: 6153 - DNA, 17 bp, Arabidopsis thaliana
aacatactgtaacggcc

SEQ ID NO: 6154 - DNA, 17 bp, Arabidopsis thaliana
aacatagaccgcaatgt

SEQ ID NO: 6155 - DNA, 17 bp, Arabidopsis thaliana
aacatagcaggatccct

SEQ ID NO: 6156 - DNA, 17 bp, Arabidopsis thaliana
aacatagcagggtccct

SEQ ID NO: 6157 - DNA, 17 bp, Arabidopsis thaliana
aacatagcgttcgataa

SEQ ID NO: 6158 - DNA, 17 bp, Arabidopsis thaliana
aacatagtcaacgggtg

SEQ ID NO: 6159 - DNA, 17 bp, Arabidopsis thaliana
aacatagttccgtccat

SEQ ID NO: 6160 - DNA, 17 bp, Arabidopsis thaliana
aacatagttggccgagt

SEQ ID NO: 6161 - DNA, 17 bp, Arabidopsis thaliana
aacatagttgtgaatga

SEQ ID NO: 6162 - DNA, 17 bp, Arabidopsis thaliana
aacatagttttgcggtt

SEQ ID NO: 6163 - DNA, 17 bp, Arabidopsis thaliana
aacatatccttacgggc

SEQ ID NO: 6164 - DNA, 17 bp, Arabidopsis thaliana
aacatatgaggtctttg

SEQ ID NO: 6165 - DNA, 17 bp, Arabidopsis thaliana
aacatatgggcgtacgc

SEQ ID NO: 6166 - DNA, 17 bp, Arabidopsis thaliana
aacatcaaaaccagact

SEQ ID NO: 6167 - DNA, 17 bp, Arabidopsis thaliana
aacatcaacatgatctc

SEQ ID NO: 6168 - DNA, 17 bp, Arabidopsis thaliana
aacatcaacttcatatg

SEQ ID NO: 6169 - DNA, 17 bp, Arabidopsis thaliana
aacatcaacttcttatg

SEQ ID NO: 6170 - DNA, 17 bp, Arabidopsis thaliana
aacatcaacttggccat

SEQ ID NO: 6171 - DNA, 17 bp, Arabidopsis thaliana
aacatcaagggcatgtt

SEQ ID NO: 6172 - DNA, 17 bp, Arabidopsis thaliana
aacatcaccctgcgccg

SEQ ID NO: 6173 - DNA, 17 bp, Arabidopsis thaliana
aacatcaccgccttggg

SEQ ID NO: 6174 - DNA, 17 bp, Arabidopsis thaliana
aacatcaccgctacggt

SEQ ID NO: 6175 - DNA, 17 bp, Arabidopsis thaliana
aacatcactacggttgg

SEQ ID NO: 6176 - DNA, 17 bp, Arabidopsis thaliana
aacatcactgcaagaac

SEQ ID NO: 6177 - DNA, 17 bp, Arabidopsis thaliana
aacatcactgcaagtac

SEQ ID NO: 6178 - DNA, 17 bp, Arabidopsis thaliana
aacatcactgcaagtat

SEQ ID NO: 6179 - DNA, 17 bp, Arabidopsis thaliana
aacatcacttgtcgatg

SEQ ID NO: 6180 - DNA, 17 bp, Arabidopsis thaliana
aacatcagacccaactt

SEQ ID NO: 6181 - DNA, 17 bp, Arabidopsis thaliana
aacatcagatgtgggac

SEQ ID NO: 6182 - DNA, 17 bp, Arabidopsis thaliana
aacatcagcctctattt

SEQ ID NO: 6183 - DNA, 17 bp, Arabidopsis thaliana
aacatcagcggcttagg

SEQ ID NO: 6184 - DNA, 17 bp, Arabidopsis thaliana
aacatcatgtggttttt

SEQ ID NO: 6185 - DNA, 17 bp, Arabidopsis thaliana
aacatcattcttcagga

SEQ ID NO: 6186 - DNA, 17 bp, Arabidopsis thaliana
aacatcatttgcggggc

SEQ ID NO: 6187 - DNA, 17 bp, Arabidopsis thaliana
aacatccaaagccctaa

SEQ ID NO: 6188 - DNA, 17 bp, Arabidopsis thaliana
aacatccaaggtcttgg

SEQ ID NO: 6189 - DNA, 17 bp, Arabidopsis thaliana
aacatccacgttgtgag

SEQ ID NO: 6190 - DNA, 17 bp, Arabidopsis thaliana
aacatccactcaaccac

SEQ ID NO: 6191 - DNA, 17 bp, Arabidopsis thaliana
aacatccactcacccac

SEQ ID NO: 6192 - DNA, 17 bp, Arabidopsis thaliana
aacatccactcgacccc

SEQ ID NO: 6193 - DNA, 17 bp, Arabidopsis thaliana
aacatccagattcttcc

SEQ ID NO: 6194 - DNA, 17 bp, Arabidopsis thaliana
aacatccagccaaaccc

SEQ ID NO: 6195 - DNA, 17 bp, Arabidopsis thaliana
aacatccaggcaaacca

SEQ ID NO: 6196 - DNA, 17 bp, Arabidopsis thaliana
aacatccaggcgaagca

SEQ ID NO: 6197 - DNA, 17 bp, Arabidopsis thaliana
aacatccatgagttaag

SEQ ID NO: 6198 - DNA, 17 bp, Arabidopsis thaliana
aacatcccgcaacgact

SEQ ID NO: 6199 - DNA, 17 bp, Arabidopsis thaliana
aacatcccgcacgaccc

SEQ ID NO: 6200 - DNA, 17 bp, Arabidopsis thaliana
aacatcccgtgcagtgg

SEQ ID NO: 6201 - DNA, 17 bp, Arabidopsis thaliana
aacatccgatcgtttga

SEQ ID NO: 6202 - DNA, 17 bp, Arabidopsis thaliana
aacatccgatgtgggac

SEQ ID NO: 6203 - DNA, 17 bp, Arabidopsis thaliana
aacatccgattggttga

SEQ ID NO: 6204 - DNA, 17 bp, Arabidopsis thaliana
aacatccgcagttgctg

SEQ ID NO: 6205 - DNA, 17 bp, Arabidopsis thaliana
aacatccgcttgcgtta

SEQ ID NO: 6206 - DNA, 17 bp, Arabidopsis thaliana
aacatccggcggatccc

SEQ ID NO: 6207 - DNA, 17 bp, Arabidopsis thaliana
aacatccggtcgctgcc

SEQ ID NO: 6208 - DNA, 17 bp, Arabidopsis thaliana
aacatcctgccaaaccc

SEQ ID NO: 6209 - DNA, 17 bp, Arabidopsis thaliana
aacatcctgctaaaccc

SEQ ID NO: 6210 - DNA, 17 bp, Arabidopsis thaliana
aacatccttccaaaccc

SEQ ID NO: 6211 - DNA, 17 bp, Arabidopsis thaliana
aacatccttcctttgcc

SEQ ID NO: 6212 - DNA, 17 bp, Arabidopsis thaliana
aacatcgacattgacct

SEQ ID NO: 6213 - DNA, 17 bp, Arabidopsis thaliana
aacatcgaccgtattgc

SEQ ID NO: 6214 - DNA, 17 bp, Arabidopsis thaliana
aacatcgaggtgtgacg

SEQ ID NO: 6215 - DNA, 17 bp, Arabidopsis thaliana
aacatcgctctgaggca

SEQ ID NO: 6216 - DNA, 17 bp, Arabidopsis thaliana
aacatcggacgtgtttt

SEQ ID NO: 6217 - DNA, 17 bp, Arabidopsis thaliana
aacatcggcgcttgttc

SEQ ID NO: 6218 - DNA, 17 bp, Arabidopsis thaliana
aacatcggggcaagacc

SEQ ID NO: 6219 - DNA, 17 bp, Arabidopsis thaliana
aacatcggtcaacgccg

SEQ ID NO: 6220 - DNA, 17 bp, Arabidopsis thaliana
aacatcggtggtcggct

SEQ ID NO: 6221 - DNA, 17 bp, Arabidopsis thaliana
aacatcgtagacaacgt

SEQ ID NO: 6222 - DNA, 17 bp, Arabidopsis thaliana
aacatcgtatggatttt

SEQ ID NO: 6223 - DNA, 17 bp, Arabidopsis thaliana
aacatcgtcatctgata

SEQ ID NO: 6224 - DNA, 17 bp, Arabidopsis thaliana
aacatcgtctacatcat

SEQ ID NO: 6225 - DNA, 17 bp, Arabidopsis thaliana
aacatcgtctttggcat

SEQ ID NO: 6226 - DNA, 17 bp, Arabidopsis thaliana
aacatcgttggccacca

SEQ ID NO: 6227 - DNA, 17 bp, Arabidopsis thaliana
aacatcgtttgacttga

SEQ ID NO: 6228 - DNA, 17 bp, Arabidopsis thaliana
aacatctaaggagtcag

SEQ ID NO: 6229 - DNA, 17 bp, Arabidopsis thaliana
aacatctaaggattttg

SEQ ID NO: 6230 - DNA, 17 bp, Arabidopsis thaliana
aacatctacagcttgtg

SEQ ID NO: 6231 - DNA, 17 bp, Arabidopsis thaliana
aacatctagatgatggg

SEQ ID NO: 6232 - DNA, 17 bp, Arabidopsis thaliana
aacatctagggattttg

SEQ ID NO: 6233 - DNA, 17 bp, Arabidopsis thaliana
aacatctatgtgttgtg

SEQ ID NO: 6234 - DNA, 17 bp, Arabidopsis thaliana
aacatctcacttccata

SEQ ID NO: 6235 - DNA, 17 bp, Arabidopsis thaliana
aacatctccagctaaca

SEQ ID NO: 6236 - DNA, 17 bp, Arabidopsis thaliana
aacatctccgcatgcac

SEQ ID NO: 6237 - DNA, 17 bp, Arabidopsis thaliana
aacatctcgaacgtcga

SEQ ID NO: 6238 - DNA, 17 bp, Arabidopsis thaliana
aacatctcgtgctgctg

SEQ ID NO: 6239 - DNA, 17 bp, Arabidopsis thaliana
aacatctctctaatgct

SEQ ID NO: 6240 - DNA, 17 bp, Arabidopsis thaliana
aacatctctgagtgccg

SEQ ID NO: 6241 - DNA, 17 bp, Arabidopsis thaliana
aacatctctgttctgtc

SEQ ID NO: 6242 - DNA, 17 bp, Arabidopsis thaliana
aacatctgatcgtttga

SEQ ID NO: 6243 - DNA, 17 bp, Arabidopsis thaliana
aacatctgatgtcaggg

SEQ ID NO: 6244 - DNA, 17 bp, Arabidopsis thaliana
aacatctgattggtcgt

SEQ ID NO: 6245 - DNA, 17 bp, Arabidopsis thaliana
aacatctgcacaggtat

SEQ ID NO: 6246 - DNA, 17 bp, Arabidopsis thaliana
aacatcttcttcgttgc

SEQ ID NO: 6247 - DNA, 17 bp, Arabidopsis thaliana
aacatcttgatgatgct

SEQ ID NO: 6248 - DNA, 17 bp, Arabidopsis thaliana
aacatcttgattgtcgg

SEQ ID NO: 6249 - DNA, 17 bp, Arabidopsis thaliana
aacatcttgccaaaccc

SEQ ID NO: 6250 - DNA, 17 bp, Arabidopsis thaliana
aacatcttgtgtcttgc

SEQ ID NO: 6251 - DNA, 17 bp, Arabidopsis thaliana
aacatctttccaaaccc

SEQ ID NO: 6252 - DNA, 17 bp, Arabidopsis thaliana
aacatctttggatcaac

SEQ ID NO: 6253 - DNA, 17 bp, Arabidopsis thaliana
aacatgaacccgtgatt

SEQ ID NO: 6254 - DNA, 17 bp, Arabidopsis thaliana
aacatgaattgactttg

SEQ ID NO: 6255 - DNA, 17 bp, Arabidopsis thaliana
aacatgactctggtgtt

SEQ ID NO: 6256 - DNA, 17 bp, Arabidopsis thaliana
aacatgacttgaaagaa

SEQ ID NO: 6257 - DNA, 17 bp, Arabidopsis thaliana
aacatgatctgcgtaca

SEQ ID NO: 6258 - DNA, 17 bp, Arabidopsis thaliana
aacatgatctttcgttg

SEQ ID NO: 6259 - DNA, 17 bp, Arabidopsis thaliana
aacatgatgttatcgtt

SEQ ID NO: 6260 - DNA, 17 bp, Arabidopsis thaliana
aacatgattattcgttg

SEQ ID NO: 6261 - DNA, 17 bp, Arabidopsis thaliana
aacatgatttgccaagt

SEQ ID NO: 6262 - DNA, 17 bp, Arabidopsis thaliana
aacatgcaatatggccg

SEQ ID NO: 6263 - DNA, 17 bp, Arabidopsis thaliana
aacatgcgatataccgc

SEQ ID NO: 6264 - DNA, 17 bp, Arabidopsis thaliana
aacatgcggacttgctc

SEQ ID NO: 6265 - DNA, 17 bp, Arabidopsis thaliana
aacatgcggatccgtgt

SEQ ID NO: 6266 - DNA, 17 bp, Arabidopsis thaliana
aacatgcggatttgctc

SEQ ID NO: 6267 - DNA, 17 bp, Arabidopsis thaliana
aacatgcggatttgctt

SEQ ID NO: 6268 - DNA, 17 bp, Arabidopsis thaliana
aacatgcggtacaacgc

SEQ ID NO: 6269 - DNA, 17 bp, Arabidopsis thaliana
aacatggatcgcgtcag

SEQ ID NO: 6270 - DNA, 17 bp, Arabidopsis thaliana
aacatggattccagcgt

SEQ ID NO: 6271 - DNA, 17 bp, Arabidopsis thaliana
aacatggcaacgcactg

SEQ ID NO: 6272 - DNA, 17 bp, Arabidopsis thaliana
aacatggcttcttggac

SEQ ID NO: 6273 - DNA, 17 bp, Arabidopsis thaliana
aacatggctttgcgatg

SEQ ID NO: 6274 - DNA, 17 bp, Arabidopsis thaliana
aacatgggcacgtgaca

SEQ ID NO: 6275 - DNA, 17 bp, Arabidopsis thaliana
aacatgggctagccctt

SEQ ID NO: 6276 - DNA, 17 bp, Arabidopsis thaliana
aacatgggctttaggtt

SEQ ID NO: 6277 - DNA, 17 bp, Arabidopsis thaliana
aacatgggtcggccggt

SEQ ID NO: 6278 - DNA, 17 bp, Arabidopsis thaliana
aacatggtcaacgggtg

SEQ ID NO: 6279 - DNA, 17 bp, Arabidopsis thaliana
aacatggttgcacttcg

SEQ ID NO: 6280 - DNA, 17 bp, Arabidopsis thaliana
aacatggttgtcatcaa

SEQ ID NO: 6281 - DNA, 17 bp, Arabidopsis thaliana
aacatgtaacgcgacct

SEQ ID NO: 6282 - DNA, 17 bp, Arabidopsis thaliana
aacatgtcattcggatg

SEQ ID NO: 6283 - DNA, 17 bp, Arabidopsis thaliana
aacatgtccagtggtgg

SEQ ID NO: 6284 - DNA, 17 bp, Arabidopsis thaliana
aacatgtccatctggat

SEQ ID NO: 6285 - DNA, 17 bp, Arabidopsis thaliana
aacatgtcctcgagggt

SEQ ID NO: 6286 - DNA, 17 bp, Arabidopsis thaliana
aacatgtgctaaaggct

SEQ ID NO: 6287 - DNA, 17 bp, Arabidopsis thaliana
aacatgtttcatgcgag

SEQ ID NO: 6288 - DNA, 17 bp, Arabidopsis thaliana
aacatgtttcatgcgat

SEQ ID NO: 6289 - DNA, 17 bp, Arabidopsis thaliana
aacatgtttccgacaag

SEQ ID NO: 6290 - DNA, 17 bp, Arabidopsis thaliana
aacatgtttgtgccaca

SEQ ID NO: 6291 - DNA, 17 bp, Arabidopsis thaliana
aacattagcttctcttt

SEQ ID NO: 6292 - DNA, 17 bp, Arabidopsis thaliana
aacattattaggtgctt

SEQ ID NO: 6293 - DNA, 17 bp, Arabidopsis thaliana
aacattattccgtaccg

SEQ ID NO: 6294 - DNA, 17 bp, Arabidopsis thaliana
aacattcaagtttgcat

SEQ ID NO: 6295 - DNA, 17 bp, Arabidopsis thaliana
aacattcaagtttgcga

SEQ ID NO: 6296 - DNA, 17 bp, Arabidopsis thaliana
aacattcaagtttgcgt

SEQ ID NO: 6297 - DNA, 17 bp, Arabidopsis thaliana
aacattcacaatccctg

SEQ ID NO: 6298 - DNA, 17 bp, Arabidopsis thaliana
aacattcagcgtgtact

SEQ ID NO: 6299 - DNA, 17 bp, Arabidopsis thaliana
aacattccaacagctct

SEQ ID NO: 6300 - DNA, 17 bp, Arabidopsis thaliana
aacattcctcaggatag

SEQ ID NO: 6301 - DNA, 17 bp, Arabidopsis thaliana
aacattcctcaggatta

SEQ ID NO: 6302 - DNA, 17 bp, Arabidopsis thaliana
aacattcctcaggattg

SEQ ID NO: 6303 - DNA, 17 bp, Arabidopsis thaliana
aacattcctcaggtttg

SEQ ID NO: 6304 - DNA, 17 bp, Arabidopsis thaliana
aacattcctcagttttg

SEQ ID NO: 6305 - DNA, 17 bp, Arabidopsis thaliana
aacattcggttatcggc

SEQ ID NO: 6306 - DNA, 17 bp, Arabidopsis thaliana
aacattcggttcttcac

SEQ ID NO: 6307 - DNA, 17 bp, Arabidopsis thaliana
aacattcgttgaccagg

SEQ ID NO: 6308 - DNA, 17 bp, Arabidopsis thaliana
aacattctaacgacgcg

SEQ ID NO: 6309 - DNA, 17 bp, Arabidopsis thaliana
aacattctctgcttagc

SEQ ID NO: 6310 - DNA, 17 bp, Arabidopsis thaliana
aacattctgtctaagct

SEQ ID NO: 6311 - DNA, 17 bp, Arabidopsis thaliana
aacattgaaatttctga

SEQ ID NO: 6312 - DNA, 17 bp, Arabidopsis thaliana
aacattgaccggcgttg

SEQ ID NO: 6313 - DNA, 17 bp, Arabidopsis thaliana
aacattgaccgtattgc

SEQ ID NO: 6314 - DNA, 17 bp, Arabidopsis thaliana
aacattgactttgatcc

SEQ ID NO: 6315 - DNA, 17 bp, Arabidopsis thaliana
aacattgagacggcgtg

SEQ ID NO: 6316 - DNA, 17 bp, Arabidopsis thaliana
aacattgagccagtttt

SEQ ID NO: 6317 - DNA, 17 bp, Arabidopsis thaliana
aacattgaggaatcgtt

SEQ ID NO: 6318 - DNA, 17 bp, Arabidopsis thaliana
aacattgccactttcca

SEQ ID NO: 6319 - DNA, 17 bp, Arabidopsis thaliana
aacattgccgaccctca

SEQ ID NO: 6320 - DNA, 17 bp, Arabidopsis thaliana
aacattgcgatggtccc

SEQ ID NO: 6321 - DNA, 17 bp, Arabidopsis thaliana
aacattgctctgaggca

SEQ ID NO: 6322 - DNA, 17 bp, Arabidopsis thaliana
aacattgcttggggcat

SEQ ID NO: 6323 - DNA, 17 bp, Arabidopsis thaliana
aacattggaggttctct

SEQ ID NO: 6324 - DNA, 17 bp, Arabidopsis thaliana
aacattggcaacccaag

SEQ ID NO: 6325 - DNA, 17 bp, Arabidopsis thaliana
aacattggtctgcgcag

SEQ ID NO: 6326 - DNA, 17 bp, Arabidopsis thaliana
aacattggtgctaagcg

SEQ ID NO: 6327 - DNA, 17 bp, Arabidopsis thaliana
aacattggtggcctatc

SEQ ID NO: 6328 - DNA, 17 bp, Arabidopsis thaliana
aacattggttgcgaaat

SEQ ID NO: 6329 - DNA, 17 bp, Arabidopsis thaliana
aacattgtcggatatgc

SEQ ID NO: 6330 - DNA, 17 bp, Arabidopsis thaliana
aacattgtcgtaagtgc

SEQ ID NO: 6331 - DNA, 17 bp, Arabidopsis thaliana
aacattgtgcagcgtat

SEQ ID NO: 6332 - DNA, 17 bp, Arabidopsis thaliana
aacattgtgcattctgt

SEQ ID NO: 6333 - DNA, 17 bp, Arabidopsis thaliana
aacattgtgcttgtcta

SEQ ID NO: 6334 - DNA, 17 bp, Arabidopsis thaliana
aacattgtggactgccc

SEQ ID NO: 6335 - DNA, 17 bp, Arabidopsis thaliana
aacattgtgtcctcctg

SEQ ID NO: 6336 - DNA, 17 bp, Arabidopsis thaliana
aacattgtgttccttag

SEQ ID NO: 6337 - DNA, 17 bp, Arabidopsis thaliana
aacattgtttcgtctcg

SEQ ID NO: 6338 - DNA, 17 bp, Arabidopsis thaliana
aacatttaagtctgctt

SEQ ID NO: 6339 - DNA, 17 bp, Arabidopsis thaliana
aacatttagggaatgtg

SEQ ID NO: 6340 - DNA, 17 bp, Arabidopsis thaliana
aacatttatgggacgtg

SEQ ID NO: 6341 - DNA, 17 bp, Arabidopsis thaliana
aacatttatttggaacc

SEQ ID NO: 6342 - DNA, 17 bp, Arabidopsis thaliana
aacatttccgtggttag

SEQ ID NO: 6343 - DNA, 17 bp, Arabidopsis thaliana
aacatttcgatcttgta

SEQ ID NO: 6344 - DNA, 17 bp, Arabidopsis thaliana
aacatttcggtgcgttt

SEQ ID NO: 6345 - DNA, 17 bp, Arabidopsis thaliana
aacatttctcatgattg

SEQ ID NO: 6346 - DNA, 17 bp, Arabidopsis thaliana
aacatttctgtgatgga

SEQ ID NO: 6347 - DNA, 17 bp, Arabidopsis thaliana
aacatttgccaaggatg

SEQ ID NO: 6348 - DNA, 17 bp, Arabidopsis thaliana
aacatttgcgaggaact

SEQ ID NO: 6349 - DNA, 17 bp, Arabidopsis thaliana
aacatttgctgtgtccc

SEQ ID NO: 6350 - DNA, 17 bp, Arabidopsis thaliana
aacatttggattgctgt

SEQ ID NO: 6351 - DNA, 17 bp, Arabidopsis thaliana
aacatttggcaaccaaa

SEQ ID NO: 6352 - DNA, 17 bp, Arabidopsis thaliana
aacatttggctgcagat

SEQ ID NO: 6353 - DNA, 17 bp, Arabidopsis thaliana
aacatttggggtacgat

SEQ ID NO: 6354 - DNA, 17 bp, Arabidopsis thaliana
aacatttgggtacccac

SEQ ID NO: 6355 - DNA, 17 bp, Arabidopsis thaliana
aacatttggtccgtcca

SEQ ID NO: 6356 - DNA, 17 bp, Arabidopsis thaliana
aacatttgtggtggttg

SEQ ID NO: 6357 - DNA, 17 bp, Arabidopsis thaliana
aacatttgtgtaaaatg

SEQ ID NO: 6358 - DNA, 17 bp, Arabidopsis thaliana
aacatttgtgtgaaacg

SEQ ID NO: 6359 - DNA, 17 bp, Arabidopsis thaliana
aacatttgtgtgaaact

SEQ ID NO: 6360 - DNA, 17 bp, Arabidopsis thaliana
aacatttgtgtgaaagg

SEQ ID NO: 6361 - DNA, 17 bp, Arabidopsis thaliana
aacatttgtgtgaaatg

SEQ ID NO: 6362 - DNA, 17 bp, Arabidopsis thaliana
aacatttgtgtggaacg

SEQ ID NO: 6363 - DNA, 17 bp, Arabidopsis thaliana
aacatttgttccgtcca

SEQ ID NO: 6364 - DNA, 17 bp, Arabidopsis thaliana
aacattttgcaacacta

SEQ ID NO: 6365 - DNA, 17 bp, Arabidopsis thaliana
aacattttggggtgttt

SEQ ID NO: 6366 - DNA, 17 bp, Arabidopsis thaliana
aacattttgtggactgg

SEQ ID NO: 6367 - DNA, 17 bp, Arabidopsis thaliana
aacattttgttgaccgg

SEQ ID NO: 6368 - DNA, 17 bp, Arabidopsis thaliana
aacattttgttgaggct

SEQ ID NO: 6369 - DNA, 17 bp, Arabidopsis thaliana
aacattttgttggtctg

SEQ ID NO: 6370 - DNA, 17 bp, Arabidopsis thaliana
aacatttttcggcccat

SEQ ID NO: 6371 - DNA, 17 bp, Arabidopsis thaliana
aaccaaaaaggtgtgga

SEQ ID NO: 6372 - DNA, 17 bp, Arabidopsis thaliana
aaccaaaaataaaatgt

SEQ ID NO: 6373 - DNA, 17 bp, Arabidopsis thaliana
aaccaaaacgacaggat

SEQ ID NO: 6374 - DNA, 17 bp, Arabidopsis thaliana
aaccaaaactaactgct

SEQ ID NO: 6375 - DNA, 17 bp, Arabidopsis thaliana
aaccaaaagacttggga

SEQ ID NO: 6376 - DNA, 17 bp, Arabidopsis thaliana
aaccaaaaggtgtggac

SEQ ID NO: 6377 - DNA, 17 bp, Arabidopsis thaliana
aaccaaaatcgtccttc

SEQ ID NO: 6378 - DNA, 17 bp, Arabidopsis thaliana
aaccaaaccccacagca

SEQ ID NO: 6379 - DNA, 17 bp, Arabidopsis thaliana
aaccaaacgagttccta

SEQ ID NO: 6380 - DNA, 17 bp, Arabidopsis thaliana
aaccaaactgttactgc

SEQ ID NO: 6381 - DNA, 17 bp, Arabidopsis thaliana
aaccaaagaaaaggggt

SEQ ID NO: 6382 - DNA, 17 bp, Arabidopsis thaliana
aaccaaagaggtgaata

SEQ ID NO: 6383 - DNA, 17 bp, Arabidopsis thaliana
aaccaaagataaaccgt

SEQ ID NO: 6384 - DNA, 17 bp, Arabidopsis thaliana
aaccaaagccagattaa

SEQ ID NO: 6385 - DNA, 17 bp, Arabidopsis thaliana
aaccaaagcttagagat

SEQ ID NO: 6386 - DNA, 17 bp, Arabidopsis thaliana
aaccaaaggcgaattct

SEQ ID NO: 6387 - DNA, 17 bp, Arabidopsis thaliana
aaccaaaggtcccacat

SEQ ID NO: 6388 - DNA, 17 bp, Arabidopsis thaliana
aaccaaagtcagaaatt

SEQ ID NO: 6389 - DNA, 17 bp, Arabidopsis thaliana
aaccaaagtgggagatt

SEQ ID NO: 6390 - DNA, 17 bp, Arabidopsis thaliana
aaccaaagttgtaaatg

SEQ ID NO: 6391 - DNA, 17 bp, Arabidopsis thaliana
aaccaaatccattcacg

SEQ ID NO: 6392 - DNA, 17 bp, Arabidopsis thaliana
aaccaaatccctaatga

SEQ ID NO: 6393 - DNA, 17 bp, Arabidopsis thaliana
aaccaaatccgaagtcc

SEQ ID NO: 6394 - DNA, 17 bp, Arabidopsis thaliana
aaccaaatctctcggat

SEQ ID NO: 6395 - DNA, 17 bp, Arabidopsis thaliana
aaccaaatctgtcactg

SEQ ID NO: 6396 - DNA, 17 bp, Arabidopsis thaliana
aaccaaatgaacgctcg

SEQ ID NO: 6397 - DNA, 17 bp, Arabidopsis thaliana
aaccaaatggccagcat

SEQ ID NO: 6398 - DNA, 17 bp, Arabidopsis thaliana
aaccaacaaatccttgc

SEQ ID NO: 6399 - DNA, 17 bp, Arabidopsis thaliana
aaccaacaaatctttgc

SEQ ID NO: 6400 - DNA, 17 bp, Arabidopsis thaliana
aaccaacaacagctgca

SEQ ID NO: 6401 - DNA, 17 bp, Arabidopsis thaliana
aaccaacaacccgtctt

SEQ ID NO: 6402 - DNA, 17 bp, Arabidopsis thaliana
aaccaacaacttttggt

SEQ ID NO: 6403 - DNA, 17 bp, Arabidopsis thaliana
aaccaacaagccggttt

SEQ ID NO: 6404 - DNA, 17 bp, Arabidopsis thaliana
aaccaacaaggttcaaa

SEQ ID NO: 6405 - DNA, 17 bp, Arabidopsis thaliana
aaccaacaatccgttaa

SEQ ID NO: 6406 - DNA, 17 bp, Arabidopsis thaliana
aaccaacacggggaaac

SEQ ID NO: 6407 - DNA, 17 bp, Arabidopsis thaliana
aaccaacactggagtga

SEQ ID NO: 6408 - DNA, 17 bp, Arabidopsis thaliana
aaccaacactggttacc

SEQ ID NO: 6409 - DNA, 17 bp, Arabidopsis thaliana
aaccaacagacagtgcc

SEQ ID NO: 6410 - DNA, 17 bp, Arabidopsis thaliana
aaccaacaggtcggtta

SEQ ID NO: 6411 - DNA, 17 bp, Arabidopsis thaliana
aaccaacatttcggtgc

SEQ ID NO: 6412 - DNA, 17 bp, Arabidopsis thaliana
aaccaaccaaatgaacg

SEQ ID NO: 6413 - DNA, 17 bp, Arabidopsis thaliana
aaccaaccaaggaggct

SEQ ID NO: 6414 - DNA, 17 bp, Arabidopsis thaliana
aaccaaccaagtccact

SEQ ID NO: 6415 - DNA, 17 bp, Arabidopsis thaliana
aaccaaccacgattaat

SEQ ID NO: 6416 - DNA, 17 bp, Arabidopsis thaliana
aaccaaccactaagcag

SEQ ID NO: 6417 - DNA, 17 bp, Arabidopsis thaliana
aaccaaccatatctggg

SEQ ID NO: 6418 - DNA, 17 bp, Arabidopsis thaliana
aaccaacccacccaccc

SEQ ID NO: 6419 - DNA, 17 bp, Arabidopsis thaliana
aaccaacccctatcagg

SEQ ID NO: 6420 - DNA, 17 bp, Arabidopsis thaliana
aaccaacccctgttttt

SEQ ID NO: 6421 - DNA, 17 bp, Arabidopsis thaliana
aaccaacccgagatggg

SEQ ID NO: 6422 - DNA, 17 bp, Arabidopsis thaliana
aaccaacccgtaatcca

SEQ ID NO: 6423 - DNA, 17 bp, Arabidopsis thaliana
aaccaacccgtcccgcc

SEQ ID NO: 6424 - DNA, 17 bp, Arabidopsis thaliana
aaccaaccctaacgatt

SEQ ID NO: 6425 - DNA, 17 bp, Arabidopsis thaliana
aaccaacccttcggcgg

SEQ ID NO: 6426 - DNA, 17 bp, Arabidopsis thaliana
aaccaaccgaatcagcc

SEQ ID NO: 6427 - DNA, 17 bp, Arabidopsis thaliana
aaccaaccgaatgaccg

SEQ ID NO: 6428 - DNA, 17 bp, Arabidopsis thaliana
aaccaaccgaatggccg

SEQ ID NO: 6429 - DNA, 17 bp, Arabidopsis thaliana
aaccaaccgaatggcgg

SEQ ID NO: 6430 - DNA, 17 bp, Arabidopsis thaliana
aaccaaccgagatttgt

SEQ ID NO: 6431 - DNA, 17 bp, Arabidopsis thaliana
aaccaaccgagcccgat

SEQ ID NO: 6432 - DNA, 17 bp, Arabidopsis thaliana
aaccaaccgatacagac

SEQ ID NO: 6433 - DNA, 17 bp, Arabidopsis thaliana
aaccaaccgcaaaaact

SEQ ID NO: 6434 - DNA, 17 bp, Arabidopsis thaliana
aaccaaccgcacccaaa

SEQ ID NO: 6435 - DNA, 17 bp, Arabidopsis thaliana
aaccaaccgcagtgttc

SEQ ID NO: 6436 - DNA, 17 bp, Arabidopsis thaliana
aaccaaccgctaccgcc

SEQ ID NO: 6437 - DNA, 17 bp, Arabidopsis thaliana
aaccaaccggatcttga

SEQ ID NO: 6438 - DNA, 17 bp, Arabidopsis thaliana
aaccaaccgtatgctgc

SEQ ID NO: 6439 - DNA, 17 bp, Arabidopsis thaliana
aaccaaccgtcctctag

SEQ ID NO: 6440 - DNA, 17 bp, Arabidopsis thaliana
aaccaaccgtgaactct

SEQ ID NO: 6441 - DNA, 17 bp, Arabidopsis thaliana
aaccaaccgtgactgat

SEQ ID NO: 6442 - DNA, 17 bp, Arabidopsis thaliana
aaccaaccgtgtgttgg

SEQ ID NO: 6443 - DNA, 17 bp, Arabidopsis thaliana
aaccaacctgaccgaat

SEQ ID NO: 6444 - DNA, 17 bp, Arabidopsis thaliana
aaccaacctgcggaagg

SEQ ID NO: 6445 - DNA, 17 bp, Arabidopsis thaliana
aaccaacctggcaaggg

SEQ ID NO: 6446 - DNA, 17 bp, Arabidopsis thaliana
aaccaacctgggtgatc

SEQ ID NO: 6447 - DNA, 17 bp, Arabidopsis thaliana
aaccaaccttcaagttt

SEQ ID NO: 6448 - DNA, 17 bp, Arabidopsis thaliana
aaccaaccttccctctg

SEQ ID NO: 6449 - DNA, 17 bp, Arabidopsis thaliana
aaccaaccttcttcttg

SEQ ID NO: 6450 - DNA, 17 bp, Arabidopsis thaliana
aaccaaccttgggatgg

SEQ ID NO: 6451 - DNA, 17 bp, Arabidopsis thaliana
aaccaacctttgacgat

SEQ ID NO: 6452 - DNA, 17 bp, Arabidopsis thaliana
aaccaacgacgatcttt

SEQ ID NO: 6453 - DNA, 17 bp, Arabidopsis thaliana
aaccaacgactctcggc

SEQ ID NO: 6454 - DNA, 17 bp, Arabidopsis thaliana
aaccaacgagacctcag

SEQ ID NO: 6455 - DNA, 17 bp, Arabidopsis thaliana
aaccaacgataacggct

SEQ ID NO: 6456 - DNA, 17 bp, Arabidopsis thaliana
aaccaacgcaagttgcg

SEQ ID NO: 6457 - DNA, 17 bp, Arabidopsis thaliana
aaccaacgcaatgtgat

SEQ ID NO: 6458 - DNA, 17 bp, Arabidopsis thaliana
aaccaacgcagatttgt

SEQ ID NO: 6459 - DNA, 17 bp, Arabidopsis thaliana
aaccaacgcaggtgtcc

SEQ ID NO: 6460 - DNA, 17 bp, Arabidopsis thaliana
aaccaacgccgacttct

SEQ ID NO: 6461 - DNA, 17 bp, Arabidopsis thaliana
aaccaacgccttctgag

SEQ ID NO: 6462 - DNA, 17 bp, Arabidopsis thaliana
aaccaacgcgggcttgt

SEQ ID NO: 6463 - DNA, 17 bp, Arabidopsis thaliana
aaccaacgcgtaaggtc

SEQ ID NO: 6464 - DNA, 17 bp, Arabidopsis thaliana
aaccaacgctgcagagt

SEQ ID NO: 6465 - DNA, 17 bp, Arabidopsis thaliana
aaccaacgctggcttac

SEQ ID NO: 6466 - DNA, 17 bp, Arabidopsis thaliana
aaccaacggacaaagcg

SEQ ID NO: 6467 - DNA, 17 bp, Arabidopsis thaliana
aaccaacggcttagacc

SEQ ID NO: 6468 - DNA, 17 bp, Arabidopsis thaliana
aaccaacggcttcaggg

SEQ ID NO: 6469 - DNA, 17 bp, Arabidopsis thaliana
aaccaacgggatgtcgt

SEQ ID NO: 6470 - DNA, 17 bp, Arabidopsis thaliana
aaccaacgggcagagcc

SEQ ID NO: 6471 - DNA, 17 bp, Arabidopsis thaliana
aaccaacgggtttggca

SEQ ID NO: 6472 - DNA, 17 bp, Arabidopsis thaliana
aaccaacggtgttggca

SEQ ID NO: 6473 - DNA, 17 bp, Arabidopsis thaliana
aaccaacggttcctcac

SEQ ID NO: 6474 - DNA, 17 bp, Arabidopsis thaliana
aaccaacgtagcactca

SEQ ID NO: 6475 - DNA, 17 bp, Arabidopsis thaliana
aaccaacgtcctatcaa

SEQ ID NO: 6476 - DNA, 17 bp, Arabidopsis thaliana
aaccaacgtcctgctaa

SEQ ID NO: 6477 - DNA, 17 bp, Arabidopsis thaliana
aaccaacgtcgcagggt

SEQ ID NO: 6478 - DNA, 17 bp, Arabidopsis thaliana
aaccaacgtcgcaggtt

SEQ ID NO: 6479 - DNA, 17 bp, Arabidopsis thaliana
aaccaacgtcgcggtgt

SEQ ID NO: 6480 - DNA, 17 bp, Arabidopsis thaliana
aaccaacgtctgagcgt

SEQ ID NO: 6481 - DNA, 17 bp, Arabidopsis thaliana
aaccaacgtcttttgga

SEQ ID NO: 6482 - DNA, 17 bp, Arabidopsis thaliana
aaccaacgtgagctggg

SEQ ID NO: 6483 - DNA, 17 bp, Arabidopsis thaliana
aaccaacgtgatgtgag

SEQ ID NO: 6484 - DNA, 17 bp, Arabidopsis thaliana
aaccaacgtgggtccgc

SEQ ID NO: 6485 - DNA, 17 bp, Arabidopsis thaliana
aaccaacgtgttcttgg

SEQ ID NO: 6486 - DNA, 17 bp, Arabidopsis thaliana
aaccaacgtgttcttgt

SEQ ID NO: 6487 - DNA, 17 bp, Arabidopsis thaliana
aaccaacgttccatatc

SEQ ID NO: 6488 - DNA, 17 bp, Arabidopsis thaliana
aaccaactagattttaa

SEQ ID NO: 6489 - DNA, 17 bp, Arabidopsis thaliana
aaccaactattgggacc

SEQ ID NO: 6490 - DNA, 17 bp, Arabidopsis thaliana
aaccaactcataggatt

SEQ ID NO: 6491 - DNA, 17 bp, Arabidopsis thaliana
aaccaactccaaacggt

SEQ ID NO: 6492 - DNA, 17 bp, Arabidopsis thaliana
aaccaactcccggttgg

SEQ ID NO: 6493 - DNA, 17 bp, Arabidopsis thaliana
aaccaactccgcagtta

SEQ ID NO: 6494 - DNA, 17 bp, Arabidopsis thaliana
aaccaactcgggattta

SEQ ID NO: 6495 - DNA, 17 bp, Arabidopsis thaliana
aaccaactcgttctgta

SEQ ID NO: 6496 - DNA, 17 bp, Arabidopsis thaliana
aaccaactctctgctcg

SEQ ID NO: 6497 - DNA, 17 bp, Arabidopsis thaliana
aaccaactctttggtgc

SEQ ID NO: 6498 - DNA, 17 bp, Arabidopsis thaliana
aaccaactgatcggtgc

SEQ ID NO: 6499 - DNA, 17 bp, Arabidopsis thaliana
aaccaactgctgaacta

SEQ ID NO: 6500 - DNA, 17 bp, Arabidopsis thaliana
aaccaactgctgtggag

SEQ ID NO: 6501 - DNA, 17 bp, Arabidopsis thaliana
aaccaactgctgtgggg

SEQ ID NO: 6502 - DNA, 17 bp, Arabidopsis thaliana
aaccaactggtacggac

SEQ ID NO: 6503 - DNA, 17 bp, Arabidopsis thaliana
aaccaactgtcggaacc

SEQ ID NO: 6504 - DNA, 17 bp, Arabidopsis thaliana
aaccaactgtttgtgat

SEQ ID NO: 6505 - DNA, 17 bp, Arabidopsis thaliana
aaccaacttagctgacc

SEQ ID NO: 6506 - DNA, 17 bp, Arabidopsis thaliana
aaccaacttccgatgtg

SEQ ID NO: 6507 - DNA, 17 bp, Arabidopsis thaliana
aaccaacttctataccg

SEQ ID NO: 6508 - DNA, 17 bp, Arabidopsis thaliana
aaccaacttgccgcagg

SEQ ID NO: 6509 - DNA, 17 bp, Arabidopsis thaliana
aaccaacttggtccgca

SEQ ID NO: 6510 - DNA, 17 bp, Arabidopsis thaliana
aaccaacttggtctgca

SEQ ID NO: 6511 - DNA, 17 bp, Arabidopsis thaliana
aaccaacttggtgcgca

SEQ ID NO: 6512 - DNA, 17 bp, Arabidopsis thaliana
aaccaactttcgggtgt

SEQ ID NO: 6513 - DNA, 17 bp, Arabidopsis thaliana
aaccaactttcgttgac

SEQ ID NO: 6514 - DNA, 17 bp, Arabidopsis thaliana
aaccaactttgccatgt

SEQ ID NO: 6515 - DNA, 17 bp, Arabidopsis thaliana
aaccaactttgctttgt

SEQ ID NO: 6516 - DNA, 17 bp, Arabidopsis thaliana
aaccaactttgtaggtt

SEQ ID NO: 6517 - DNA, 17 bp, Arabidopsis thaliana
aaccaactttgtccagc

SEQ ID NO: 6518 - DNA, 17 bp, Arabidopsis thaliana
aaccaacttttagaccg

SEQ ID NO: 6519 - DNA, 17 bp, Arabidopsis thaliana
aaccaacttttagatcg

SEQ ID NO: 6520 - DNA, 17 bp, Arabidopsis thaliana
aaccaagaaccaaggct

SEQ ID NO: 6521 - DNA, 17 bp, Arabidopsis thaliana
aaccaagaaggctttct

SEQ ID NO: 6522 - DNA, 17 bp, Arabidopsis thaliana
aaccaagacattggaga

SEQ ID NO: 6523 - DNA, 17 bp, Arabidopsis thaliana
aaccaagactcgattta

SEQ ID NO: 6524 - DNA, 17 bp, Arabidopsis thaliana
aaccaagactcgatttt

SEQ ID NO: 6525 - DNA, 17 bp, Arabidopsis thaliana
aaccaagagcgagttaa

SEQ ID NO: 6526 - DNA, 17 bp, Arabidopsis thaliana
aaccaagcagctcagga

SEQ ID NO: 6527 - DNA, 17 bp, Arabidopsis thaliana
aaccaagcatggtgacc

SEQ ID NO: 6528 - DNA, 17 bp, Arabidopsis thaliana
aaccaagcatggtgatc

SEQ ID NO: 6529 - DNA, 17 bp, Arabidopsis thaliana
aaccaagcattgcgatg

SEQ ID NO: 6530 - DNA, 17 bp, Arabidopsis thaliana
aaccaagcggtcgtgac

SEQ ID NO: 6531 - DNA, 17 bp, Arabidopsis thaliana
aaccaagcgtcgttagc

SEQ ID NO: 6532 - DNA, 17 bp, Arabidopsis thaliana
aaccaagcgttgactac

SEQ ID NO: 6533 - DNA, 17 bp, Arabidopsis thaliana
aaccaagctgagttgct

SEQ ID NO: 6534 - DNA, 17 bp, Arabidopsis thaliana
aaccaaggaggcgtccg

SEQ ID NO: 6535 - DNA, 17 bp, Arabidopsis thaliana
aaccaaggaggctttct

SEQ ID NO: 6536 - DNA, 17 bp, Arabidopsis thaliana
aaccaaggatgacttgc

SEQ ID NO: 6537 - DNA, 17 bp, Arabidopsis thaliana
aaccaagggcgttttta

SEQ ID NO: 6538 - DNA, 17 bp, Arabidopsis thaliana
aaccaaggtcctgctgc

SEQ ID NO: 6539 - DNA, 17 bp, Arabidopsis thaliana
aaccaaggttcagatca

SEQ ID NO: 6540 - DNA, 17 bp, Arabidopsis thaliana
aaccaagtagctgactc

SEQ ID NO: 6541 - DNA, 17 bp, Arabidopsis thaliana
aaccaagtccacttggc

SEQ ID NO: 6542 - DNA, 17 bp, Arabidopsis thaliana
aaccaagtcctgaggct

SEQ ID NO: 6543 - DNA, 17 bp, Arabidopsis thaliana
aaccaagtttcagaaaa

SEQ ID NO: 6544 - DNA, 17 bp, Arabidopsis thaliana
aaccaataccttggtac

SEQ ID NO: 6545 - DNA, 17 bp, Arabidopsis thaliana
aaccaatcagagccgat

SEQ ID NO: 6546 - DNA, 17 bp, Arabidopsis thaliana
aaccaatcatggagtga

SEQ ID NO: 6547 - DNA, 17 bp, Arabidopsis thaliana
aaccaatcatggagtgt

SEQ ID NO: 6548 - DNA, 17 bp, Arabidopsis thaliana
aaccaatcggacttttg

SEQ ID NO: 6549 - DNA, 17 bp, Arabidopsis thaliana
aaccaatcggcgtttgt

SEQ ID NO: 6550 - DNA, 17 bp, Arabidopsis thaliana
aaccaatcgggaactgt

SEQ ID NO: 6551 - DNA, 17 bp, Arabidopsis thaliana
aaccaatgctgacttag

SEQ ID NO: 6552 - DNA, 17 bp, Arabidopsis thaliana
aaccaatggagatggtc

SEQ ID NO: 6553 - DNA, 17 bp, Arabidopsis thaliana
aaccaatggttgtggac

SEQ ID NO: 6554 - DNA, 17 bp, Arabidopsis thaliana
aaccaatgtgacttagt

SEQ ID NO: 6555 - DNA, 17 bp, Arabidopsis thaliana
aaccaatgtgggtgctc

SEQ ID NO: 6556 - DNA, 17 bp, Arabidopsis thaliana
aaccaattcatcggatc

SEQ ID NO: 6557 - DNA, 17 bp, Arabidopsis thaliana
aaccaattgacagcaag

SEQ ID NO: 6558 - DNA, 17 bp, Arabidopsis thaliana
aaccaattggcaatagg

SEQ ID NO: 6559 - DNA, 17 bp, Arabidopsis thaliana
aaccacaaccgcaaccg

SEQ ID NO: 6560 - DNA, 17 bp, Arabidopsis thaliana
aaccacacggactctat

SEQ ID NO: 6561 - DNA, 17 bp, Arabidopsis thaliana
aaccacacgtggtcatt

SEQ ID NO: 6562 - DNA, 17 bp, Arabidopsis thaliana
aaccacagcatgatgat

SEQ ID NO: 6563 - DNA, 17 bp, Arabidopsis thaliana
aaccacagcttgacacc

SEQ ID NO: 6564 - DNA, 17 bp, Arabidopsis thaliana
aaccacagctttcttga

SEQ ID NO: 6565 - DNA, 17 bp, Arabidopsis thaliana
aaccacagtgttccgcg

SEQ ID NO: 6566 - DNA, 17 bp, Arabidopsis thaliana
aaccacagtgttgtcat

SEQ ID NO: 6567 - DNA, 17 bp, Arabidopsis thaliana
aaccacagttacggcga

SEQ ID NO: 6568 - DNA, 17 bp, Arabidopsis thaliana
aaccacagttatcaggt

SEQ ID NO: 6569 - DNA, 17 bp, Arabidopsis thaliana
aaccacagttgcttagg

SEQ ID NO: 6570 - DNA, 17 bp, Arabidopsis thaliana
aaccacatccggtctac

SEQ ID NO: 6571 - DNA, 17 bp, Arabidopsis thaliana
aaccacattacttttcc

SEQ ID NO: 6572 - DNA, 17 bp, Arabidopsis thaliana
aaccacatttgactttg

SEQ ID NO: 6573 - DNA, 17 bp, Arabidopsis thaliana
aaccaccaagtcctttc

SEQ ID NO: 6574 - DNA, 17 bp, Arabidopsis thaliana
aaccaccaatcgggagc

SEQ ID NO: 6575 - DNA, 17 bp, Arabidopsis thaliana
aaccaccactgagaccc

SEQ ID NO: 6576 - DNA, 17 bp, Arabidopsis thaliana
aaccaccatctttcttg

SEQ ID NO: 6577 - DNA, 17 bp, Arabidopsis thaliana
aaccaccatgctgttga

SEQ ID NO: 6578 - DNA, 17 bp, Arabidopsis thaliana
aaccacccaacgacaac

SEQ ID NO: 6579 - DNA, 17 bp, Arabidopsis thaliana
aaccacccgccgtctac

SEQ ID NO: 6580 - DNA, 17 bp, Arabidopsis thaliana
aaccaccctgactgttg

SEQ ID NO: 6581 - DNA, 17 bp, Arabidopsis thaliana
aaccaccgccggaactc

SEQ ID NO: 6582 - DNA, 17 bp, Arabidopsis thaliana
aaccaccggtgagcggt

SEQ ID NO: 6583 - DNA, 17 bp, Arabidopsis thaliana
aaccaccgtcgccgtcg

SEQ ID NO: 6584 - DNA, 17 bp, Arabidopsis thaliana
aaccacctcccgaggtt

SEQ ID NO: 6585 - DNA, 17 bp, Arabidopsis thaliana
aaccacctttcactttg

SEQ ID NO: 6586 - DNA, 17 bp, Arabidopsis thaliana
aaccacgaccggacgac

SEQ ID NO: 6587 - DNA, 17 bp, Arabidopsis thaliana
aaccacgagtaccaagt

SEQ ID NO: 6588 - DNA, 17 bp, Arabidopsis thaliana
aaccacgagttcggcct

SEQ ID NO: 6589 - DNA, 17 bp, Arabidopsis thaliana
aaccacgagtttggcct

SEQ ID NO: 6590 - DNA, 17 bp, Arabidopsis thaliana
aaccacgattaatcgaa

SEQ ID NO: 6591 - DNA, 17 bp, Arabidopsis thaliana
aaccacgatttccagat

SEQ ID NO: 6592 - DNA, 17 bp, Arabidopsis thaliana
aaccacgctgtctgatc

SEQ ID NO: 6593 - DNA, 17 bp, Arabidopsis thaliana
aaccacggtctatgctc

SEQ ID NO: 6594 - DNA, 17 bp, Arabidopsis thaliana
aaccacggtgtcggggg

SEQ ID NO: 6595 - DNA, 17 bp, Arabidopsis thaliana
aaccacggttcaatggc

SEQ ID NO: 6596 - DNA, 17 bp, Arabidopsis thaliana
aaccacgtcagcgcacc

SEQ ID NO: 6597 - DNA, 17 bp, Arabidopsis thaliana
aaccacgtctgcctggg

SEQ ID NO: 6598 - DNA, 17 bp, Arabidopsis thaliana
aaccacgttggatggat

SEQ ID NO: 6599 - DNA, 17 bp, Arabidopsis thaliana
aaccacgttggttgtga

SEQ ID NO: 6600 - DNA, 17 bp, Arabidopsis thaliana
aaccacgttttagccat

SEQ ID NO: 6601 - DNA, 17 bp, Arabidopsis thaliana
aaccactaagcagcaaa

SEQ ID NO: 6602 - DNA, 17 bp, Arabidopsis thaliana
aaccactaccgcccgca

SEQ ID NO: 6603 - DNA, 17 bp, Arabidopsis thaliana
aaccactatggcctgat

SEQ ID NO: 6604 - DNA, 17 bp, Arabidopsis thaliana
aaccactatggcctgct

SEQ ID NO: 6605 - DNA, 17 bp, Arabidopsis thaliana
aaccactcatggaagct

SEQ ID NO: 6606 - DNA, 17 bp, Arabidopsis thaliana
aaccactcattcgccgg

SEQ ID NO: 6607 - DNA, 17 bp, Arabidopsis thaliana
aaccactccatctattg

SEQ ID NO: 6608 - DNA, 17 bp, Arabidopsis thaliana
aaccactcgagctttgc

SEQ ID NO: 6609 - DNA, 17 bp, Arabidopsis thaliana
aaccactcgatatggct

SEQ ID NO: 6610 - DNA, 17 bp, Arabidopsis thaliana
aaccactcgatctcttt

SEQ ID NO: 6611 - DNA, 17 bp, Arabidopsis thaliana
aaccactcggcgtttgt

SEQ ID NO: 6612 - DNA, 17 bp, Arabidopsis thaliana
aaccactctcggcaacg

SEQ ID NO: 6613 - DNA, 17 bp, Arabidopsis thaliana
aaccactctgtagatgg

SEQ ID NO: 6614 - DNA, 17 bp, Arabidopsis thaliana
aaccactgatctcgcta

SEQ ID NO: 6615 - DNA, 17 bp, Arabidopsis thaliana
aaccactgctctatctg

SEQ ID NO: 6616 - DNA, 17 bp, Arabidopsis thaliana
aaccactgctctttgcg

SEQ ID NO: 6617 - DNA, 17 bp, Arabidopsis thaliana
aaccactgctgggtttg

SEQ ID NO: 6618 - DNA, 17 bp, Arabidopsis thaliana
aaccactgggtcaaggt

SEQ ID NO: 6619 - DNA, 17 bp, Arabidopsis thaliana
aaccactggtttcagcc

SEQ ID NO: 6620 - DNA, 17 bp, Arabidopsis thaliana
aaccacttcagctattg

SEQ ID NO: 6621 - DNA, 17 bp, Arabidopsis thaliana
aaccacttcctccaggg

SEQ ID NO: 6622 - DNA, 17 bp, Arabidopsis thaliana
aaccacttggcaatgcg

SEQ ID NO: 6623 - DNA, 17 bp, Arabidopsis thaliana
aaccactttcggcaacc

SEQ ID NO: 6624 - DNA, 17 bp, Arabidopsis thaliana
aaccactttgatgagcg

SEQ ID NO: 6625 - DNA, 17 bp, Arabidopsis thaliana
aaccagaagaggaagcc

SEQ ID NO: 6626 - DNA, 17 bp, Arabidopsis thaliana
aaccagaattcgattga

SEQ ID NO: 6627 - DNA, 17 bp, Arabidopsis thaliana
aaccagacccgggttcg

SEQ ID NO: 6628 - DNA, 17 bp, Arabidopsis thaliana
aaccagacctcagcccg

SEQ ID NO: 6629 - DNA, 17 bp, Arabidopsis thaliana
aaccagactttggatcc

SEQ ID NO: 6630 - DNA, 17 bp, Arabidopsis thaliana
aaccagaggtgctcttt

SEQ ID NO: 6631 - DNA, 17 bp, Arabidopsis thaliana
aaccagatcagccgata

SEQ ID NO: 6632 - DNA, 17 bp, Arabidopsis thaliana
aaccagatcccgaaaga

SEQ ID NO: 6633 - DNA, 17 bp, Arabidopsis thaliana
aaccagatctgaccaat

SEQ ID NO: 6634 - DNA, 17 bp, Arabidopsis thaliana
aaccagatgtgctgtat

SEQ ID NO: 6635 - DNA, 17 bp, Arabidopsis thaliana
aaccagattcctaattt

SEQ ID NO: 6636 - DNA, 17 bp, Arabidopsis thaliana
aaccagattcgagggcc

SEQ ID NO: 6637 - DNA, 17 bp, Arabidopsis thaliana
aaccagcaggtgctact

SEQ ID NO: 6638 - DNA, 17 bp, Arabidopsis thaliana
aaccagcaggtgttact

SEQ ID NO: 6639 - DNA, 17 bp, Arabidopsis thaliana
aaccagccctttgtcgc

SEQ ID NO: 6640 - DNA, 17 bp, Arabidopsis thaliana
aaccagcgacagcaacc

SEQ ID NO: 6641 - DNA, 17 bp, Arabidopsis thaliana
aaccagcgacaggcaaa

SEQ ID NO: 6642 - DNA, 17 bp, Arabidopsis thaliana
aaccagcgggtgcgata

SEQ ID NO: 6643 - DNA, 17 bp, Arabidopsis thaliana
aaccagctgtcatacag

SEQ ID NO: 6644 - DNA, 17 bp, Arabidopsis thaliana
aaccaggaaggtgtggc

SEQ ID NO: 6645 - DNA, 17 bp, Arabidopsis thaliana
aaccaggaatgccacta

SEQ ID NO: 6646 - DNA, 17 bp, Arabidopsis thaliana
aaccaggaatgtcactc

SEQ ID NO: 6647 - DNA, 17 bp, Arabidopsis thaliana
aaccaggacaatggaac

SEQ ID NO: 6648 - DNA, 17 bp, Arabidopsis thaliana
aaccaggactcgcagct

SEQ ID NO: 6649 - DNA, 17 bp, Arabidopsis thaliana
aaccaggagaatttctt

SEQ ID NO: 6650 - DNA, 17 bp, Arabidopsis thaliana
aaccaggaggttcgggg

SEQ ID NO: 6651 - DNA, 17 bp, Arabidopsis thaliana
aaccaggataccccggt

SEQ ID NO: 6652 - DNA, 17 bp, Arabidopsis thaliana
aaccaggctcctttgac

SEQ ID NO: 6653 - DNA, 17 bp, Arabidopsis thaliana
aaccaggctcgtggcgc

SEQ ID NO: 6654 - DNA, 17 bp, Arabidopsis thaliana
aaccagggccggttcta

SEQ ID NO: 6655 - DNA, 17 bp, Arabidopsis thaliana
aaccaggggcagaggag

SEQ ID NO: 6656 - DNA, 17 bp, Arabidopsis thaliana
aaccagggtttagggcc

SEQ ID NO: 6657 - DNA, 17 bp, Arabidopsis thaliana
aaccaggtccgatcatc

SEQ ID NO: 6658 - DNA, 17 bp, Arabidopsis thaliana
aaccaggttgaaccacg

SEQ ID NO: 6659 - DNA, 17 bp, Arabidopsis thaliana
aaccaggttggaccacg

SEQ ID NO: 6660 - DNA, 17 bp, Arabidopsis thaliana
aaccaggttggaccata

SEQ ID NO: 6661 - DNA, 17 bp, Arabidopsis thaliana
aaccaggttggaccatg

SEQ ID NO: 6662 - DNA, 17 bp, Arabidopsis thaliana
aaccaggttggactacg

SEQ ID NO: 6663 - DNA, 17 bp, Arabidopsis thaliana
aaccaggttgggctgcc

SEQ ID NO: 6664 - DNA, 17 bp, Arabidopsis thaliana
aaccagtcactaggtgg

SEQ ID NO: 6665 - DNA, 17 bp, Arabidopsis thaliana
aaccagtcagaggctca

SEQ ID NO: 6666 - DNA, 17 bp, Arabidopsis thaliana
aaccagtcgcatcctgt

SEQ ID NO: 6667 - DNA, 17 bp, Arabidopsis thaliana
aaccagtcgttcaaacc

SEQ ID NO: 6668 - DNA, 17 bp, Arabidopsis thaliana
aaccagtctcaccgttg

SEQ ID NO: 6669 - DNA, 17 bp, Arabidopsis thaliana
aaccagtcttctccgag

SEQ ID NO: 6670 - DNA, 17 bp, Arabidopsis thaliana
aaccagtgattaaaccg

SEQ ID NO: 6671 - DNA, 17 bp, Arabidopsis thaliana
aaccagtgatttgccgt

SEQ ID NO: 6672 - DNA, 17 bp, Arabidopsis thaliana
aaccagtgggaccttga

SEQ ID NO: 6673 - DNA, 17 bp, Arabidopsis thaliana
aaccagtgtcgtgccta

SEQ ID NO: 6674 - DNA, 17 bp, Arabidopsis thaliana
aaccagtgttcttttcc

SEQ ID NO: 6675 - DNA, 17 bp, Arabidopsis thaliana
aaccagtgttttcacgc

SEQ ID NO: 6676 - DNA, 17 bp, Arabidopsis thaliana
aaccagttatctcgtgg

SEQ ID NO: 6677 - DNA, 17 bp, Arabidopsis thaliana
aaccagttcagttggtt

SEQ ID NO: 6678 - DNA, 17 bp, Arabidopsis thaliana
aaccagttcccggaagg

SEQ ID NO: 6679 - DNA, 17 bp, Arabidopsis thaliana
aaccagttcgtattcta

SEQ ID NO: 6680 - DNA, 17 bp, Arabidopsis thaliana
aaccagttctgagaccc

SEQ ID NO: 6681 - DNA, 17 bp, Arabidopsis thaliana
aaccagttctgagaccg

SEQ ID NO: 6682 - DNA, 17 bp, Arabidopsis thaliana
aaccagttgcggttcta

SEQ ID NO: 6683 - DNA, 17 bp, Arabidopsis thaliana
aaccagttgcggtttta

SEQ ID NO: 6684 - DNA, 17 bp, Arabidopsis thaliana
aaccagttggaggttcc

SEQ ID NO: 6685 - DNA, 17 bp, Arabidopsis thaliana
aaccagttttgtggcag

SEQ ID NO: 6686 - DNA, 17 bp, Arabidopsis thaliana
aaccataaactgatgtt

SEQ ID NO: 6687 - DNA, 17 bp, Arabidopsis thaliana
aaccataagcgcccctt

SEQ ID NO: 6688 - DNA, 17 bp, Arabidopsis thaliana
aaccatagaatccgtgc

SEQ ID NO: 6689 - DNA, 17 bp, Arabidopsis thaliana
aaccatagacatgtaga

SEQ ID NO: 6690 - DNA, 17 bp, Arabidopsis thaliana
aaccatagaccgtgtgg

SEQ ID NO: 6691 - DNA, 17 bp, Arabidopsis thaliana
aaccatagttcaatcct

SEQ ID NO: 6692 - DNA, 17 bp, Arabidopsis thaliana
aaccatatcgcaacagt

SEQ ID NO: 6693 - DNA, 17 bp, Arabidopsis thaliana
aaccatatcggttaatc

SEQ ID NO: 6694 - DNA, 17 bp, Arabidopsis thaliana
aaccatatctgggagct

SEQ ID NO: 6695 - DNA, 17 bp, Arabidopsis thaliana
aaccatatgggtgttaa

SEQ ID NO: 6696 - DNA, 17 bp, Arabidopsis thaliana
aaccatattgggcctat

SEQ ID NO: 6697 - DNA, 17 bp, Arabidopsis thaliana
aaccatcactacagtcc

SEQ ID NO: 6698 - DNA, 17 bp, Arabidopsis thaliana
aaccatccatttgctca

SEQ ID NO: 6699 - DNA, 17 bp, Arabidopsis thaliana
aaccatccgccgtgggt

SEQ ID NO: 6700 - DNA, 17 bp, Arabidopsis thaliana
aaccatcctgtgatgta

SEQ ID NO: 6701 - DNA, 17 bp, Arabidopsis thaliana
aaccatcgacacacttg

SEQ ID NO: 6702 - DNA, 17 bp, Arabidopsis thaliana
aaccatcgcggtggcta

SEQ ID NO: 6703 - DNA, 17 bp, Arabidopsis thaliana
aaccatcggatcgattc

SEQ ID NO: 6704 - DNA, 17 bp, Arabidopsis thaliana
aaccatcggctggcaga

SEQ ID NO: 6705 - DNA, 17 bp, Arabidopsis thaliana
aaccatcggctggcgga

SEQ ID NO: 6706 - DNA, 17 bp, Arabidopsis thaliana
aaccatcggggccaggg

SEQ ID NO: 6707 - DNA, 17 bp, Arabidopsis thaliana
aaccatcgtactgttgc

SEQ ID NO: 6708 - DNA, 17 bp, Arabidopsis thaliana
aaccatcgtactgttgg

SEQ ID NO: 6709 - DNA, 17 bp, Arabidopsis thaliana
aaccatcgtgtccacgc

SEQ ID NO: 6710 - DNA, 17 bp, Arabidopsis thaliana
aaccatctacctctgcc

SEQ ID NO: 6711 - DNA, 17 bp, Arabidopsis thaliana
aaccatctagtcgtgtg

SEQ ID NO: 6712 - DNA, 17 bp, Arabidopsis thaliana
aaccatctccggtgaga

SEQ ID NO: 6713 - DNA, 17 bp, Arabidopsis thaliana
aaccatctctattgggg

SEQ ID NO: 6714 - DNA, 17 bp, Arabidopsis thaliana
aaccatctctggccggc

SEQ ID NO: 6715 - DNA, 17 bp, Arabidopsis thaliana
aaccatcttccgctgga

SEQ ID NO: 6716 - DNA, 17 bp, Arabidopsis thaliana
aaccatcttttctttcg

SEQ ID NO: 6717 - DNA, 17 bp, Arabidopsis thaliana
aaccatgactttcacta

SEQ ID NO: 6718 - DNA, 17 bp, Arabidopsis thaliana
aaccatgaggatgtgca

SEQ ID NO: 6719 - DNA, 17 bp, Arabidopsis thaliana
aaccatgagtcgataag

SEQ ID NO: 6720 - DNA, 17 bp, Arabidopsis thaliana
aaccatgagttacagca

SEQ ID NO: 6721 - DNA, 17 bp, Arabidopsis thaliana
aaccatgatgtgggcgt

SEQ ID NO: 6722 - DNA, 17 bp, Arabidopsis thaliana
aaccatgatttaaattt

SEQ ID NO: 6723 - DNA, 17 bp, Arabidopsis thaliana
aaccatgcaaatggctg

SEQ ID NO: 6724 - DNA, 17 bp, Arabidopsis thaliana
aaccatgcctagattgc

SEQ ID NO: 6725 - DNA, 17 bp, Arabidopsis thaliana
aaccatgctacttgact

SEQ ID NO: 6726 - DNA, 17 bp, Arabidopsis thaliana
aaccatgctatttgacc

SEQ ID NO: 6727 - DNA, 17 bp, Arabidopsis thaliana
aaccatggacccacgta

SEQ ID NO: 6728 - DNA, 17 bp, Arabidopsis thaliana
aaccatggacccacgtt

SEQ ID NO: 6729 - DNA, 17 bp, Arabidopsis thaliana
aaccatggagatcaaca

SEQ ID NO: 6730 - DNA, 17 bp, Arabidopsis thaliana
aaccatggaggatggta

SEQ ID NO: 6731 - DNA, 17 bp, Arabidopsis thaliana
aaccatggatcacgcta

SEQ ID NO: 6732 - DNA, 17 bp, Arabidopsis thaliana
aaccatgggcgcatccc

SEQ ID NO: 6733 - DNA, 17 bp, Arabidopsis thaliana
aaccatgggcgtatagt

SEQ ID NO: 6734 - DNA, 17 bp, Arabidopsis thaliana
aaccatgggcttgccat

SEQ ID NO: 6735 - DNA, 17 bp, Arabidopsis thaliana
aaccatggtgtgctgat

SEQ ID NO: 6736 - DNA, 17 bp, Arabidopsis thaliana
aaccatgtatttgcgct

SEQ ID NO: 6737 - DNA, 17 bp, Arabidopsis thaliana
aaccatgtcatgctcca

SEQ ID NO: 6738 - DNA, 17 bp, Arabidopsis thaliana
aaccatgtccgcttaag

SEQ ID NO: 6739 - DNA, 17 bp, Arabidopsis thaliana
aaccatgtccgcttacg

SEQ ID NO: 6740 - DNA, 17 bp, Arabidopsis thaliana
aaccatgtctaaatagg

SEQ ID NO: 6741 - DNA, 17 bp, Arabidopsis thaliana
aaccatgtgattttcaa

SEQ ID NO: 6742 - DNA, 17 bp, Arabidopsis thaliana
aaccattactggcaagt

SEQ ID NO: 6743 - DNA, 17 bp, Arabidopsis thaliana
aaccattactggccagt

SEQ ID NO: 6744 - DNA, 17 bp, Arabidopsis thaliana
aaccattagaccaagaa

SEQ ID NO: 6745 - DNA, 17 bp, Arabidopsis thaliana
aaccattagaccaagag

SEQ ID NO: 6746 - DNA, 17 bp, Arabidopsis thaliana
aaccattagatactgct

SEQ ID NO: 6747 - DNA, 17 bp, Arabidopsis thaliana
aaccattcgccgtgggt

SEQ ID NO: 6748 - DNA, 17 bp, Arabidopsis thaliana
aaccattctacagacta

SEQ ID NO: 6749 - DNA, 17 bp, Arabidopsis thaliana
aaccattcttgaaaaac

SEQ ID NO: 6750 - DNA, 17 bp, Arabidopsis thaliana
aaccattgaaccaagga

SEQ ID NO: 6751 - DNA, 17 bp, Arabidopsis thaliana
aaccattgaagttgctc

SEQ ID NO: 6752 - DNA, 17 bp, Arabidopsis thaliana
aaccattgatgaggttg

SEQ ID NO: 6753 - DNA, 17 bp, Arabidopsis thaliana
aaccattgcaaactcca

SEQ ID NO: 6754 - DNA, 17 bp, Arabidopsis thaliana
aaccattggaccaaagg

SEQ ID NO: 6755 - DNA, 17 bp, Arabidopsis thaliana
aaccattggaccaaggg

SEQ ID NO: 6756 - DNA, 17 bp, Arabidopsis thaliana
aaccattgggccaagga

SEQ ID NO: 6757 - DNA, 17 bp, Arabidopsis thaliana
aaccattgggccaaggg

SEQ ID NO: 6758 - DNA, 17 bp, Arabidopsis thaliana
aaccattgggccaagtg

SEQ ID NO: 6759 - DNA, 17 bp, Arabidopsis thaliana
aaccattggggttgctc

SEQ ID NO: 6760 - DNA, 17 bp, Arabidopsis thaliana
aaccattggtgtaccag

SEQ ID NO: 6761 - DNA, 17 bp, Arabidopsis thaliana
aaccattgtagctgtaa

SEQ ID NO: 6762 - DNA, 17 bp, Arabidopsis thaliana
aaccattgtccaatttt

SEQ ID NO: 6763 - DNA, 17 bp, Arabidopsis thaliana
aaccattgtcgtctttt

SEQ ID NO: 6764 - DNA, 17 bp, Arabidopsis thaliana
aaccattgttgacagaa

SEQ ID NO: 6765 - DNA, 17 bp, Arabidopsis thaliana
aaccatttattgcggac

SEQ ID NO: 6766 - DNA, 17 bp, Arabidopsis thaliana
aaccatttcacgagaat

SEQ ID NO: 6767 - DNA, 17 bp, Arabidopsis thaliana
aaccatttccagatcct

SEQ ID NO: 6768 - DNA, 17 bp, Arabidopsis thaliana
aaccatttcgcaagtgt

SEQ ID NO: 6769 - DNA, 17 bp, Arabidopsis thaliana
aaccatttctcgattta

SEQ ID NO: 6770 - DNA, 17 bp, Arabidopsis thaliana
aaccatttggacacgcc

SEQ ID NO: 6771 - DNA, 17 bp, Arabidopsis thaliana
aaccatttgggcaagta

SEQ ID NO: 6772 - DNA, 17 bp, Arabidopsis thaliana
aaccatttgggcaagtt

SEQ ID NO: 6773 - DNA, 17 bp, Arabidopsis thaliana
aaccatttggttggagc

SEQ ID NO: 6774 - DNA, 17 bp, Arabidopsis thaliana
aaccattttcagctttg

SEQ ID NO: 6775 - DNA, 17 bp, Arabidopsis thaliana
aaccattttcaggaaat

SEQ ID NO: 6776 - DNA, 17 bp, Arabidopsis thaliana
aaccattttcattggtg

SEQ ID NO: 6777 - DNA, 17 bp, Arabidopsis thaliana
aaccattttcgtgattt

SEQ ID NO: 6778 - DNA, 17 bp, Arabidopsis thaliana
aacccaaaagctaactt

SEQ ID NO: 6779 - DNA, 17 bp, Arabidopsis thaliana
aacccaaacccaactgg

SEQ ID NO: 6780 - DNA, 17 bp, Arabidopsis thaliana
aacccaaactcgttcca

SEQ ID NO: 6781 - DNA, 17 bp, Arabidopsis thaliana
aacccaaacttccttct

SEQ ID NO: 6782 - DNA, 17 bp, Arabidopsis thaliana
aacccaaacttccttgt

SEQ ID NO: 6783 - DNA, 17 bp, Arabidopsis thaliana
aacccaaattttaacct

SEQ ID NO: 6784 - DNA, 17 bp, Arabidopsis thaliana
aacccaacacctctatt

SEQ ID NO: 6785 - DNA, 17 bp, Arabidopsis thaliana
aacccaacagactgccg

SEQ ID NO: 6786 - DNA, 17 bp, Arabidopsis thaliana
aacccaacccccccccc

SEQ ID NO: 6787 - DNA, 17 bp, Arabidopsis thaliana
aacccaacccgaatagg

SEQ ID NO: 6788 - DNA, 17 bp, Arabidopsis thaliana
aacccaactagaggccc

SEQ ID NO: 6789 - DNA, 17 bp, Arabidopsis thaliana
aacccaactctgcctgg

SEQ ID NO: 6790 - DNA, 17 bp, Arabidopsis thaliana
aacccaactggacccca

SEQ ID NO: 6791 - DNA, 17 bp, Arabidopsis thaliana
aacccaactggacccga

SEQ ID NO: 6792 - DNA, 17 bp, Arabidopsis thaliana
aacccaactttccagag

SEQ ID NO: 6793 - DNA, 17 bp, Arabidopsis thaliana
aacccaagcccactgtt

SEQ ID NO: 6794 - DNA, 17 bp, Arabidopsis thaliana
aacccaaggatgacttg

SEQ ID NO: 6795 - DNA, 17 bp, Arabidopsis thaliana
aacccaagtccactgtt

SEQ ID NO: 6796 - DNA, 17 bp, Arabidopsis thaliana
aacccaagttcaatcct

SEQ ID NO: 6797 - DNA, 17 bp, Arabidopsis thaliana
aacccaagtttaagcct

SEQ ID NO: 6798 - DNA, 17 bp, Arabidopsis thaliana
aacccaataacaaatcc

SEQ ID NO: 6799 - DNA, 17 bp, Arabidopsis thaliana
aacccaatcaattgtct

SEQ ID NO: 6800 - DNA, 17 bp, Arabidopsis thaliana
aacccaatccacatcgg

SEQ ID NO: 6801 - DNA, 17 bp, Arabidopsis thaliana
aacccaatctactcgtt

SEQ ID NO: 6802 - DNA, 17 bp, Arabidopsis thaliana
aacccaatgtgatttct

SEQ ID NO: 6803 - DNA, 17 bp, Arabidopsis thaliana
aacccaattctacggat

SEQ ID NO: 6804 - DNA, 17 bp, Arabidopsis thaliana
aacccacaaagggtgtt

SEQ ID NO: 6805 - DNA, 17 bp, Arabidopsis thaliana
aacccacacccggccgg

SEQ ID NO: 6806 - DNA, 17 bp, Arabidopsis thaliana
aacccacaggtcccagg

SEQ ID NO: 6807 - DNA, 17 bp, Arabidopsis thaliana
aacccacattcccactt

SEQ ID NO: 6808 - DNA, 17 bp, Arabidopsis thaliana
aacccacgctaacccgg

SEQ ID NO: 6809 - DNA, 17 bp, Arabidopsis thaliana
aacccacggtataccgc

SEQ ID NO: 6810 - DNA, 17 bp, Arabidopsis thaliana
aacccacggtatatcgc

SEQ ID NO: 6811 - DNA, 17 bp, Arabidopsis thaliana
aacccacggtgccaccc

SEQ ID NO: 6812 - DNA, 17 bp, Arabidopsis thaliana
aacccacggtgccactc

SEQ ID NO: 6813 - DNA, 17 bp, Arabidopsis thaliana
aacccactctcgggtgc

SEQ ID NO: 6814 - DNA, 17 bp, Arabidopsis thaliana
aacccactttgcctctt

SEQ ID NO: 6815 - DNA, 17 bp, Arabidopsis thaliana
aacccagacccggtcgg

SEQ ID NO: 6816 - DNA, 17 bp, Arabidopsis thaliana
aacccagaccggtgtcc

SEQ ID NO: 6817 - DNA, 17 bp, Arabidopsis thaliana
aacccagagcgcattgg

SEQ ID NO: 6818 - DNA, 17 bp, Arabidopsis thaliana
aacccagatagtgaacc

SEQ ID NO: 6819 - DNA, 17 bp, Arabidopsis thaliana
aacccagcaggtgctcg

SEQ ID NO: 6820 - DNA, 17 bp, Arabidopsis thaliana
aacccagcagtctgaat

SEQ ID NO: 6821 - DNA, 17 bp, Arabidopsis thaliana
aacccagctttctcggc

SEQ ID NO: 6822 - DNA, 17 bp, Arabidopsis thaliana
aacccaggtggtgcgaa

SEQ ID NO: 6823 - DNA, 17 bp, Arabidopsis thaliana
aacccagtgacccagaa

SEQ ID NO: 6824 - DNA, 17 bp, Arabidopsis thaliana
aacccagtggtctggac

SEQ ID NO: 6825 - DNA, 17 bp, Arabidopsis thaliana
aacccagttagccattt

SEQ ID NO: 6826 - DNA, 17 bp, Arabidopsis thaliana
aacccagttctttgact

SEQ ID NO: 6827 - DNA, 17 bp, Arabidopsis thaliana
aacccagttgacccgat

SEQ ID NO: 6828 - DNA, 17 bp, Arabidopsis thaliana
aacccagttgacctggt

SEQ ID NO: 6829 - DNA, 17 bp, Arabidopsis thaliana
aacccagtttttgactc

SEQ ID NO: 6830 - DNA, 17 bp, Arabidopsis thaliana
aacccagttttttggtt

SEQ ID NO: 6831 - DNA, 17 bp, Arabidopsis thaliana
aacccatataggtttgc

SEQ ID NO: 6832 - DNA, 17 bp, Arabidopsis thaliana
aacccatccatatgcat

SEQ ID NO: 6833 - DNA, 17 bp, Arabidopsis thaliana
aacccatccgcaaggcg

SEQ ID NO: 6834 - DNA, 17 bp, Arabidopsis thaliana
aacccatcggcaagacg

SEQ ID NO: 6835 - DNA, 17 bp, Arabidopsis thaliana
aacccatctccatcggt

SEQ ID NO: 6836 - DNA, 17 bp, Arabidopsis thaliana
aacccatctgcgaggcg

SEQ ID NO: 6837 - DNA, 17 bp, Arabidopsis thaliana
aacccatctttcgtgca

SEQ ID NO: 6838 - DNA, 17 bp, Arabidopsis thaliana
aacccatgacctggtga

SEQ ID NO: 6839 - DNA, 17 bp, Arabidopsis thaliana
aacccatgatccagtga

SEQ ID NO: 6840 - DNA, 17 bp, Arabidopsis thaliana
aacccatggtacaccgc

SEQ ID NO: 6841 - DNA, 17 bp, Arabidopsis thaliana
aacccatggttcggtct

SEQ ID NO: 6842 - DNA, 17 bp, Arabidopsis thaliana
aacccatgtgggtggcg

SEQ ID NO: 6843 - DNA, 17 bp, Arabidopsis thaliana
aacccattatgttgcga

SEQ ID NO: 6844 - DNA, 17 bp, Arabidopsis thaliana
aacccattatgttgcta

SEQ ID NO: 6845 - DNA, 17 bp, Arabidopsis thaliana
aacccattctctcgtgc

SEQ ID NO: 6846 - DNA, 17 bp, Arabidopsis thaliana
aacccattggctaccca

SEQ ID NO: 6847 - DNA, 17 bp, Arabidopsis thaliana
aaccccagacctcttgg

SEQ ID NO: 6848 - DNA, 17 bp, Arabidopsis thaliana
aaccccagctgggctaa

SEQ ID NO: 6849 - DNA, 17 bp, Arabidopsis thaliana
aaccccagtccaattgt

SEQ ID NO: 6850 - DNA, 17 bp, Arabidopsis thaliana
aacccccagagacataa

SEQ ID NO: 6851 - DNA, 17 bp, Arabidopsis thaliana
aacccccgaactatatc

SEQ ID NO: 6852 - DNA, 17 bp, Arabidopsis thaliana
aacccccgatggtgcaa

SEQ ID NO: 6853 - DNA, 17 bp, Arabidopsis thaliana
aacccccttggcttaca

SEQ ID NO: 6854 - DNA, 17 bp, Arabidopsis thaliana
aaccccgacttatggaa

SEQ ID NO: 6855 - DNA, 17 bp, Arabidopsis thaliana
aaccccgcctaaatcgg

SEQ ID NO: 6856 - DNA, 17 bp, Arabidopsis thaliana
aaccccgctgatctgag

SEQ ID NO: 6857 - DNA, 17 bp, Arabidopsis thaliana
aaccccgggatcgtagg

SEQ ID NO: 6858 - DNA, 17 bp, Arabidopsis thaliana
aaccccggtctacatgt

SEQ ID NO: 6859 - DNA, 17 bp, Arabidopsis thaliana
aaccccgtaatccctcc

SEQ ID NO: 6860 - DNA, 17 bp, Arabidopsis thaliana
aacccctaaagctccaa

SEQ ID NO: 6861 - DNA, 17 bp, Arabidopsis thaliana
aacccctaaatgggcca

SEQ ID NO: 6862 - DNA, 17 bp, Arabidopsis thaliana
aacccctaagatgtgtt

SEQ ID NO: 6863 - DNA, 17 bp, Arabidopsis thaliana
aacccctaggaggtgtg

SEQ ID NO: 6864 - DNA, 17 bp, Arabidopsis thaliana
aacccctatcaggttct

SEQ ID NO: 6865 - DNA, 17 bp, Arabidopsis thaliana
aacccctgacgtgttcc

SEQ ID NO: 6866 - DNA, 17 bp, Arabidopsis thaliana
aacccctgggaccgtag

SEQ ID NO: 6867 - DNA, 17 bp, Arabidopsis thaliana
aacccctgttaagaccc

SEQ ID NO: 6868 - DNA, 17 bp, Arabidopsis thaliana
aacccctgtttttggtc

SEQ ID NO: 6869 - DNA, 17 bp, Arabidopsis thaliana
aacccctgttttttgtc

SEQ ID NO: 6870 - DNA, 17 bp, Arabidopsis thaliana
aaccccttccaggtata

SEQ ID NO: 6871 - DNA, 17 bp, Arabidopsis thaliana
aacccctttgtcgctaa

SEQ ID NO: 6872 - DNA, 17 bp, Arabidopsis thaliana
aacccgaaacgttgttt

SEQ ID NO: 6873 - DNA, 17 bp, Arabidopsis thaliana
aacccgaatcaggggga

SEQ ID NO: 6874 - DNA, 17 bp, Arabidopsis thaliana
aacccgacaaggtaaag

SEQ ID NO: 6875 - DNA, 17 bp, Arabidopsis thaliana
aacccgacccagacagt

SEQ ID NO: 6876 - DNA, 17 bp, Arabidopsis thaliana
aacccgacggtgtacgt

SEQ ID NO: 6877 - DNA, 17 bp, Arabidopsis thaliana
aacccgagatacaccgc

SEQ ID NO: 6878 - DNA, 17 bp, Arabidopsis thaliana
aacccgagatgggctga

SEQ ID NO: 6879 - DNA, 17 bp, Arabidopsis thaliana
aacccgagttcaggtct

SEQ ID NO: 6880 - DNA, 17 bp, Arabidopsis thaliana
aacccgagttcatgtct

SEQ ID NO: 6881 - DNA, 17 bp, Arabidopsis thaliana
aacccgagttgaagaca

SEQ ID NO: 6882 - DNA, 17 bp, Arabidopsis thaliana
aacccgatccacatcga

SEQ ID NO: 6883 - DNA, 17 bp, Arabidopsis thaliana
aacccgatccacatcgg

SEQ ID NO: 6884 - DNA, 17 bp, Arabidopsis thaliana
aacccgatccgcgtacc

SEQ ID NO: 6885 - DNA, 17 bp, Arabidopsis thaliana
aacccgatcctaaaggc

SEQ ID NO: 6886 - DNA, 17 bp, Arabidopsis thaliana
aacccgatcttgtaagc

SEQ ID NO: 6887 - DNA, 17 bp, Arabidopsis thaliana
aacccgatgatttgccc

SEQ ID NO: 6888 - DNA, 17 bp, Arabidopsis thaliana
aacccgcagagtcctga

SEQ ID NO: 6889 - DNA, 17 bp, Arabidopsis thaliana
aacccgcagcagctcct

SEQ ID NO: 6890 - DNA, 17 bp, Arabidopsis thaliana
aacccgcagtacaccga

SEQ ID NO: 6891 - DNA, 17 bp, Arabidopsis thaliana
aacccgcagtacaccgc

SEQ ID NO: 6892 - DNA, 17 bp, Arabidopsis thaliana
aacccgcagtacaccgt

SEQ ID NO: 6893 - DNA, 17 bp, Arabidopsis thaliana
aacccgcagtagaccgc

SEQ ID NO: 6894 - DNA, 17 bp, Arabidopsis thaliana
aacccgcagtataccgc

SEQ ID NO: 6895 - DNA, 17 bp, Arabidopsis thaliana
aacccgccatccgttgt

SEQ ID NO: 6896 - DNA, 17 bp, Arabidopsis thaliana
aacccgcctggatggct

SEQ ID NO: 6897 - DNA, 17 bp, Arabidopsis thaliana
aacccgcgaactgagga

SEQ ID NO: 6898 - DNA, 17 bp, Arabidopsis thaliana
aacccgcgacccagtga

SEQ ID NO: 6899 - DNA, 17 bp, Arabidopsis thaliana
aacccgcgacctcgtga

SEQ ID NO: 6900 - DNA, 17 bp, Arabidopsis thaliana
aacccgcgatataccgc

SEQ ID NO: 6901 - DNA, 17 bp, Arabidopsis thaliana
aacccgcggactggagc

SEQ ID NO: 6902 - DNA, 17 bp, Arabidopsis thaliana
aacccgcggtacatcgc

SEQ ID NO: 6903 - DNA, 17 bp, Arabidopsis thaliana
aacccgcggtacatttt

SEQ ID NO: 6904 - DNA, 17 bp, Arabidopsis thaliana
aacccgcggtagatttg

SEQ ID NO: 6905 - DNA, 17 bp, Arabidopsis thaliana
aacccgcggtataccgc

SEQ ID NO: 6906 - DNA, 17 bp, Arabidopsis thaliana
aacccgcggtgctatta

SEQ ID NO: 6907 - DNA, 17 bp, Arabidopsis thaliana
aacccgctgtacaccgc

SEQ ID NO: 6908 - DNA, 17 bp, Arabidopsis thaliana
aacccggcccaatgaga

SEQ ID NO: 6909 - DNA, 17 bp, Arabidopsis thaliana
aacccgggctcagacac

SEQ ID NO: 6910 - DNA, 17 bp, Arabidopsis thaliana
aacccgggctcagaccc

SEQ ID NO: 6911 - DNA, 17 bp, Arabidopsis thaliana
aacccggttaggattgt

SEQ ID NO: 6912 - DNA, 17 bp, Arabidopsis thaliana
aacccggttgacccgat

SEQ ID NO: 6913 - DNA, 17 bp, Arabidopsis thaliana
aacccggttgacccggt

SEQ ID NO: 6914 - DNA, 17 bp, Arabidopsis thaliana
aacccggtttaactctg

SEQ ID NO: 6915 - DNA, 17 bp, Arabidopsis thaliana
aacccgtaaggcgcaag

SEQ ID NO: 6916 - DNA, 17 bp, Arabidopsis thaliana
aacccgtaatccaccca

SEQ ID NO: 6917 - DNA, 17 bp, Arabidopsis thaliana
aacccgtaatcccccaa

SEQ ID NO: 6918 - DNA, 17 bp, Arabidopsis thaliana
aacccgtaatcccccag

SEQ ID NO: 6919 - DNA, 17 bp, Arabidopsis thaliana
aacccgtaatccctcca

SEQ ID NO: 6920 - DNA, 17 bp, Arabidopsis thaliana
aacccgtaatcccttaa

SEQ ID NO: 6921 - DNA, 17 bp, Arabidopsis thaliana
aacccgtaatcccttca

SEQ ID NO: 6922 - DNA, 17 bp, Arabidopsis thaliana
aacccgtaatctcttag

SEQ ID NO: 6923 - DNA, 17 bp, Arabidopsis thaliana
aacccgtaatttctcca

SEQ ID NO: 6924 - DNA, 17 bp, Arabidopsis thaliana
aacccgtcaattctagg

SEQ ID NO: 6925 - DNA, 17 bp, Arabidopsis thaliana
aacccgtcattctagga

SEQ ID NO: 6926 - DNA, 17 bp, Arabidopsis thaliana
aacccgtcccgccaacc

SEQ ID NO: 6927 - DNA, 17 bp, Arabidopsis thaliana
aacccgtcccgtgggac

SEQ ID NO: 6928 - DNA, 17 bp, Arabidopsis thaliana
aacccgtccgcaaggct

SEQ ID NO: 6929 - DNA, 17 bp, Arabidopsis thaliana
aacccgtcggctgtcag

SEQ ID NO: 6930 - DNA, 17 bp, Arabidopsis thaliana
aacccgtctgatagcgc

SEQ ID NO: 6931 - DNA, 17 bp, Arabidopsis thaliana
aacccgtctgcaaggct

SEQ ID NO: 6932 - DNA, 17 bp, Arabidopsis thaliana
aacccgtctgcactttc

SEQ ID NO: 6933 - DNA, 17 bp, Arabidopsis thaliana
aacccgtgaatatccga

SEQ ID NO: 6934 - DNA, 17 bp, Arabidopsis thaliana
aacccgtgacccggtaa

SEQ ID NO: 6935 - DNA, 17 bp, Arabidopsis thaliana
aacccgtgacccggtga

SEQ ID NO: 6936 - DNA, 17 bp, Arabidopsis thaliana
aacccgtgacctgaaca

SEQ ID NO: 6937 - DNA, 17 bp, Arabidopsis thaliana
aacccgtgatccgatga

SEQ ID NO: 6938 - DNA, 17 bp, Arabidopsis thaliana
aacccgtggatatccca

SEQ ID NO: 6939 - DNA, 17 bp, Arabidopsis thaliana
aacccgtggatatccga

SEQ ID NO: 6940 - DNA, 17 bp, Arabidopsis thaliana
aacccgtgggtatccga

SEQ ID NO: 6941 - DNA, 17 bp, Arabidopsis thaliana
aacccgtggtacaccgt

SEQ ID NO: 6942 - DNA, 17 bp, Arabidopsis thaliana
aacccgtggtccaaccc

SEQ ID NO: 6943 - DNA, 17 bp, Arabidopsis thaliana
aacccgtgtatcctttt

SEQ ID NO: 6944 - DNA, 17 bp, Arabidopsis thaliana
aacccgttcaggtttgg

SEQ ID NO: 6945 - DNA, 17 bp, Arabidopsis thaliana
aacccgttgcggtttaa

SEQ ID NO: 6946 - DNA, 17 bp, Arabidopsis thaliana
aacccgttttgttgcag

SEQ ID NO: 6947 - DNA, 17 bp, Arabidopsis thaliana
aaccctaaacgcaggcg

SEQ ID NO: 6948 - DNA, 17 bp, Arabidopsis thaliana
aaccctaacgattatgc

SEQ ID NO: 6949 - DNA, 17 bp, Arabidopsis thaliana
aaccctaacgattctgc

SEQ ID NO: 6950 - DNA, 17 bp, Arabidopsis thaliana
aaccctaatttcttcgc

SEQ ID NO: 6951 - DNA, 17 bp, Arabidopsis thaliana
aaccctaatttgttcag

SEQ ID NO: 6952 - DNA, 17 bp, Arabidopsis thaliana
aaccctacagcagttgg

SEQ ID NO: 6953 - DNA, 17 bp, Arabidopsis thaliana
aaccctacttccatcat

SEQ ID NO: 6954 - DNA, 17 bp, Arabidopsis thaliana
aaccctagatcaggttc

SEQ ID NO: 6955 - DNA, 17 bp, Arabidopsis thaliana
aaccctagctttctgtt

SEQ ID NO: 6956 - DNA, 17 bp, Arabidopsis thaliana
aaccctaggatctgaat

SEQ ID NO: 6957 - DNA, 17 bp, Arabidopsis thaliana
aaccctagggcttagat

SEQ ID NO: 6958 - DNA, 17 bp, Arabidopsis thaliana
aaccctagtcccaggag

SEQ ID NO: 6959 - DNA, 17 bp, Arabidopsis thaliana
aaccctatcagctgatc

SEQ ID NO: 6960 - DNA, 17 bp, Arabidopsis thaliana
aaccctatcgactgatc

SEQ ID NO: 6961 - DNA, 17 bp, Arabidopsis thaliana
aaccctatcggctgatc

SEQ ID NO: 6962 - DNA, 17 bp, Arabidopsis thaliana
aaccctatggtgataag

SEQ ID NO: 6963 - DNA, 17 bp, Arabidopsis thaliana
aaccctcaacttggcca

SEQ ID NO: 6964 - DNA, 17 bp, Arabidopsis thaliana
aaccctcaactttggcc

SEQ ID NO: 6965 - DNA, 17 bp, Arabidopsis thaliana
aaccctcaactttggct

SEQ ID NO: 6966 - DNA, 17 bp, Arabidopsis thaliana
aaccctcaagtggtgca

SEQ ID NO: 6967 - DNA, 17 bp, Arabidopsis thaliana
aaccctcagccccaccc

SEQ ID NO: 6968 - DNA, 17 bp, Arabidopsis thaliana
aaccctcagctttggcc

SEQ ID NO: 6969 - DNA, 17 bp, Arabidopsis thaliana
aaccctccctccctccc

SEQ ID NO: 6970 - DNA, 17 bp, Arabidopsis thaliana
aaccctcgccggaacta

SEQ ID NO: 6971 - DNA, 17 bp, Arabidopsis thaliana
aaccctcgtgtttagtt

SEQ ID NO: 6972 - DNA, 17 bp, Arabidopsis thaliana
aaccctcgttgtatgga

SEQ ID NO: 6973 - DNA, 17 bp, Arabidopsis thaliana
aaccctctactagttga

SEQ ID NO: 6974 - DNA, 17 bp, Arabidopsis thaliana
aaccctctactagttgg

SEQ ID NO: 6975 - DNA, 17 bp, Arabidopsis thaliana
aaccctctgtggctggc

SEQ ID NO: 6976 - DNA, 17 bp, Arabidopsis thaliana
aaccctgaagcgtgctc

SEQ ID NO: 6977 - DNA, 17 bp, Arabidopsis thaliana
aaccctgaccacgctac

SEQ ID NO: 6978 - DNA, 17 bp, Arabidopsis thaliana
aaccctgagttgtgtcg

SEQ ID NO: 6979 - DNA, 17 bp, Arabidopsis thaliana
aaccctgatacgcttgt

SEQ ID NO: 6980 - DNA, 17 bp, Arabidopsis thaliana
aaccctgcggaaggatc

SEQ ID NO: 6981 - DNA, 17 bp, Arabidopsis thaliana
aaccctgcggtgccgct

SEQ ID NO: 6982 - DNA, 17 bp, Arabidopsis thaliana
aaccctgcggtgctgcc

SEQ ID NO: 6983 - DNA, 17 bp, Arabidopsis thaliana
aaccctgcggtgctgct

SEQ ID NO: 6984 - DNA, 17 bp, Arabidopsis thaliana
aaccctgggtgttacga

SEQ ID NO: 6985 - DNA, 17 bp, Arabidopsis thaliana
aaccctggtaatccttg

SEQ ID NO: 6986 - DNA, 17 bp, Arabidopsis thaliana
aaccctgtagatggatc

SEQ ID NO: 6987 - DNA, 17 bp, Arabidopsis thaliana
aaccctgtctatatgag

SEQ ID NO: 6988 - DNA, 17 bp, Arabidopsis thaliana
aaccctgtggtgctgct

SEQ ID NO: 6989 - DNA, 17 bp, Arabidopsis thaliana
aacccttagtcctggga

SEQ ID NO: 6990 - DNA, 17 bp, Arabidopsis thaliana
aacccttattagatcca

SEQ ID NO: 6991 - DNA, 17 bp, Arabidopsis thaliana
aacccttcggcggggaa

SEQ ID NO: 6992 - DNA, 17 bp, Arabidopsis thaliana
aacccttgatggacttg

SEQ ID NO: 6993 - DNA, 17 bp, Arabidopsis thaliana
aacccttgctggacttg

SEQ ID NO: 6994 - DNA, 17 bp, Arabidopsis thaliana
aacccttggagagtgtt

SEQ ID NO: 6995 - DNA, 17 bp, Arabidopsis thaliana
aacccttgttcgcaggt

SEQ ID NO: 6996 - DNA, 17 bp, Arabidopsis thaliana
aaccctttcaccacgag

SEQ ID NO: 6997 - DNA, 17 bp, Arabidopsis thaliana
aaccctttctgcagttg

SEQ ID NO: 6998 - DNA, 17 bp, Arabidopsis thaliana
aaccctttggctcctgg

SEQ ID NO: 6999 - DNA, 17 bp, Arabidopsis thaliana
aaccctttgtactacct

SEQ ID NO: 7000 - DNA, 17 bp, Arabidopsis thaliana
aaccctttgtatgcttg

SEQ ID NO: 7001 - DNA, 17 bp, Arabidopsis thaliana
aaccctttgtcgctaag

SEQ ID NO: 7002 - DNA, 17 bp, Arabidopsis thaliana
aaccctttgtctattgg

SEQ ID NO: 7003 - DNA, 17 bp, Arabidopsis thaliana
aacccttttttgctttt

SEQ ID NO: 7004 - DNA, 17 bp, Arabidopsis thaliana
aaccgaaaaccctttct

SEQ ID NO: 7005 - DNA, 17 bp, Arabidopsis thaliana
aaccgaaaagtgtgtga

SEQ ID NO: 7006 - DNA, 17 bp, Arabidopsis thaliana
aaccgaaaccaactgct

SEQ ID NO: 7007 - DNA, 17 bp, Arabidopsis thaliana
aaccgaaaccgaatgga

SEQ ID NO: 7008 - DNA, 17 bp, Arabidopsis thaliana
aaccgaaagcattcagg

SEQ ID NO: 7009 - DNA, 17 bp, Arabidopsis thaliana
aaccgaaaggtgcatta

SEQ ID NO: 7010 - DNA, 17 bp, Arabidopsis thaliana
aaccgaaaggtttttgc

SEQ ID NO: 7011 - DNA, 17 bp, Arabidopsis thaliana
aaccgaaatcaagtgct

SEQ ID NO: 7012 - DNA, 17 bp, Arabidopsis thaliana
aaccgaaatgcctgatt

SEQ ID NO: 7013 - DNA, 17 bp, Arabidopsis thaliana
aaccgaacagggtaaaa

SEQ ID NO: 7014 - DNA, 17 bp, Arabidopsis thaliana
aaccgaacagggtctaa

SEQ ID NO: 7015 - DNA, 17 bp, Arabidopsis thaliana
aaccgaaccaggctgcg

SEQ ID NO: 7016 - DNA, 17 bp, Arabidopsis thaliana
aaccgaacccgaacgcc

SEQ ID NO: 7017 - DNA, 17 bp, Arabidopsis thaliana
aaccgaacccgaacgga

SEQ ID NO: 7018 - DNA, 17 bp, Arabidopsis thaliana
aaccgaacccgaacggc

SEQ ID NO: 7019 - DNA, 17 bp, Arabidopsis thaliana
aaccgaacccgggcgaa

SEQ ID NO: 7020 - DNA, 17 bp, Arabidopsis thaliana
aaccgaacggctatttg

SEQ ID NO: 7021 - DNA, 17 bp, Arabidopsis thaliana
aaccgaacgtgtgtgaa

SEQ ID NO: 7022 - DNA, 17 bp, Arabidopsis thaliana
aaccgaactctcagatc

SEQ ID NO: 7023 - DNA, 17 bp, Arabidopsis thaliana
aaccgaactgcacagtg

SEQ ID NO: 7024 - DNA, 17 bp, Arabidopsis thaliana
aaccgaagaccctaagg

SEQ ID NO: 7025 - DNA, 17 bp, Arabidopsis thaliana
aaccgaagatcgatcga

SEQ ID NO: 7026 - DNA, 17 bp, Arabidopsis thaliana
aaccgaagtggttatat

SEQ ID NO: 7027 - DNA, 17 bp, Arabidopsis thaliana
aaccgaatagctggcgt

SEQ ID NO: 7028 - DNA, 17 bp, Arabidopsis thaliana
aaccgaatcagccgata

SEQ ID NO: 7029 - DNA, 17 bp, Arabidopsis thaliana
aaccgaatcctataggc

SEQ ID NO: 7030 - DNA, 17 bp, Arabidopsis thaliana
aaccgaatctaataccc

SEQ ID NO: 7031 - DNA, 17 bp, Arabidopsis thaliana
aaccgaatgaccagcat

SEQ ID NO: 7032 - DNA, 17 bp, Arabidopsis thaliana
aaccgaatgaccagctt

SEQ ID NO: 7033 - DNA, 17 bp, Arabidopsis thaliana
aaccgaatgaccatctt

SEQ ID NO: 7034 - DNA, 17 bp, Arabidopsis thaliana
aaccgaatgaccgaccg

SEQ ID NO: 7035 - DNA, 17 bp, Arabidopsis thaliana
aaccgaatgaccgactt

SEQ ID NO: 7036 - DNA, 17 bp, Arabidopsis thaliana
aaccgaatgaccgatgt

SEQ ID NO: 7037 - DNA, 17 bp, Arabidopsis thaliana
aaccgaatgaccggcat

SEQ ID NO: 7038 - DNA, 17 bp, Arabidopsis thaliana
aaccgaatgaccggctt

SEQ ID NO: 7039 - DNA, 17 bp, Arabidopsis thaliana
aaccgaatgagagcttt

SEQ ID NO: 7040 - DNA, 17 bp, Arabidopsis thaliana
aaccgaatggccaacat

SEQ ID NO: 7041 - DNA, 17 bp, Arabidopsis thaliana
aaccgaatggccaacgt

SEQ ID NO: 7042 - DNA, 17 bp, Arabidopsis thaliana
aaccgaatggccagcat

SEQ ID NO: 7043 - DNA, 17 bp, Arabidopsis thaliana
aaccgaatggccagcgt

SEQ ID NO: 7044 - DNA, 17 bp, Arabidopsis thaliana
aaccgaatggccagtgt

SEQ ID NO: 7045 - DNA, 17 bp, Arabidopsis thaliana
aaccgaatggccatcat

SEQ ID NO: 7046 - DNA, 17 bp, Arabidopsis thaliana
aaccgaatggccgacac

SEQ ID NO: 7047 - DNA, 17 bp, Arabidopsis thaliana
aaccgaatggccgacct

SEQ ID NO: 7048 - DNA, 17 bp, Arabidopsis thaliana
aaccgaatggccgactt

SEQ ID NO: 7049 - DNA, 17 bp, Arabidopsis thaliana
aaccgaatggccggccc

SEQ ID NO: 7050 - DNA, 17 bp, Arabidopsis thaliana
aaccgaatggccggcgt

SEQ ID NO: 7051 - DNA, 17 bp, Arabidopsis thaliana
aaccgaatggccggctt

SEQ ID NO: 7052 - DNA, 17 bp, Arabidopsis thaliana
aaccgaatggccggtct

SEQ ID NO: 7053 - DNA, 17 bp, Arabidopsis thaliana
aaccgacaaatgtcttc

SEQ ID NO: 7054 - DNA, 17 bp, Arabidopsis thaliana
aaccgacaagtactatt

SEQ ID NO: 7055 - DNA, 17 bp, Arabidopsis thaliana
aaccgacatagatccgg

SEQ ID NO: 7056 - DNA, 17 bp, Arabidopsis thaliana
aaccgacatagcccagc

SEQ ID NO: 7057 - DNA, 17 bp, Arabidopsis thaliana
aaccgaccgaatggcca

SEQ ID NO: 7058 - DNA, 17 bp, Arabidopsis thaliana
aaccgaccgatcgtcta

SEQ ID NO: 7059 - DNA, 17 bp, Arabidopsis thaliana
aaccgaccgctcaccct

SEQ ID NO: 7060 - DNA, 17 bp, Arabidopsis thaliana
aaccgaccgctggggct

SEQ ID NO: 7061 - DNA, 17 bp, Arabidopsis thaliana
aaccgaccgtcagatag

SEQ ID NO: 7062 - DNA, 17 bp, Arabidopsis thaliana
aaccgacctcgactcga

SEQ ID NO: 7063 - DNA, 17 bp, Arabidopsis thaliana
aaccgacgacggtcaca

SEQ ID NO: 7064 - DNA, 17 bp, Arabidopsis thaliana
aaccgacgcggattacg

SEQ ID NO: 7065 - DNA, 17 bp, Arabidopsis thaliana
aaccgacgcttctggca

SEQ ID NO: 7066 - DNA, 17 bp, Arabidopsis thaliana
aaccgacggactggcag

SEQ ID NO: 7067 - DNA, 17 bp, Arabidopsis thaliana
aaccgacgtcggcaggg

SEQ ID NO: 7068 - DNA, 17 bp, Arabidopsis thaliana
aaccgacgtgttgatcg

SEQ ID NO: 7069 - DNA, 17 bp, Arabidopsis thaliana
aaccgacgttttctgct

SEQ ID NO: 7070 - DNA, 17 bp, Arabidopsis thaliana
aaccgacgtttttccgc

SEQ ID NO: 7071 - DNA, 17 bp, Arabidopsis thaliana
aaccgactaaccatatg

SEQ ID NO: 7072 - DNA, 17 bp, Arabidopsis thaliana
aaccgactaagctcgct

SEQ ID NO: 7073 - DNA, 17 bp, Arabidopsis thaliana
aaccgactatcgtttat

SEQ ID NO: 7074 - DNA, 17 bp, Arabidopsis thaliana
aaccgactatcgtttct

SEQ ID NO: 7075 - DNA, 17 bp, Arabidopsis thaliana
aaccgactatgaggacc

SEQ ID NO: 7076 - DNA, 17 bp, Arabidopsis thaliana
aaccgactctggttgtc

SEQ ID NO: 7077 - DNA, 17 bp, Arabidopsis thaliana
aaccgactcttcggatc

SEQ ID NO: 7078 - DNA, 17 bp, Arabidopsis thaliana
aaccgactcttggtata

SEQ ID NO: 7079 - DNA, 17 bp, Arabidopsis thaliana
aaccgactcttggtgta

SEQ ID NO: 7080 - DNA, 17 bp, Arabidopsis thaliana
aaccgactgaaccggcc

SEQ ID NO: 7081 - DNA, 17 bp, Arabidopsis thaliana
aaccgactgcgacgcct

SEQ ID NO: 7082 - DNA, 17 bp, Arabidopsis thaliana
aaccgactgttggtgta

SEQ ID NO: 7083 - DNA, 17 bp, Arabidopsis thaliana
aaccgacttcattttcg

SEQ ID NO: 7084 - DNA, 17 bp, Arabidopsis thaliana
aaccgacttctcgagga

SEQ ID NO: 7085 - DNA, 17 bp, Arabidopsis thaliana
aaccgacttctcgaggg

SEQ ID NO: 7086 - DNA, 17 bp, Arabidopsis thaliana
aaccgactttggtgaat

SEQ ID NO: 7087 - DNA, 17 bp, Arabidopsis thaliana
aaccgactttgtggttc

SEQ ID NO: 7088 - DNA, 17 bp, Arabidopsis thaliana
aaccgactttgtggttg

SEQ ID NO: 7089 - DNA, 17 bp, Arabidopsis thaliana
aaccgagaccccgttag

SEQ ID NO: 7090 - DNA, 17 bp, Arabidopsis thaliana
aaccgagaccttgtgct

SEQ ID NO: 7091 - DNA, 17 bp, Arabidopsis thaliana
aaccgagatgcctgatt

SEQ ID NO: 7092 - DNA, 17 bp, Arabidopsis thaliana
aaccgagattaaccaca

SEQ ID NO: 7093 - DNA, 17 bp, Arabidopsis thaliana
aaccgagatttgtgcgc

SEQ ID NO: 7094 - DNA, 17 bp, Arabidopsis thaliana
aaccgagcccgattgtg

SEQ ID NO: 7095 - DNA, 17 bp, Arabidopsis thaliana
aaccgagccgacggtat

SEQ ID NO: 7096 - DNA, 17 bp, Arabidopsis thaliana
aaccgaggcgcgtctat

SEQ ID NO: 7097 - DNA, 17 bp, Arabidopsis thaliana
aaccgagggcacgtcaa

SEQ ID NO: 7098 - DNA, 17 bp, Arabidopsis thaliana
aaccgagggcacgtctg

SEQ ID NO: 7099 - DNA, 17 bp, Arabidopsis thaliana
aaccgaggttaaagttt

SEQ ID NO: 7100 - DNA, 17 bp, Arabidopsis thaliana
aaccgagtccactccga

SEQ ID NO: 7101 - DNA, 17 bp, Arabidopsis thaliana
aaccgagtcgagatttg

SEQ ID NO: 7102 - DNA, 17 bp, Arabidopsis thaliana
aaccgagtctagcctat

SEQ ID NO: 7103 - DNA, 17 bp, Arabidopsis thaliana
aaccgatacagaccaac

SEQ ID NO: 7104 - DNA, 17 bp, Arabidopsis thaliana
aaccgatacagaccgac

SEQ ID NO: 7105 - DNA, 17 bp, Arabidopsis thaliana
aaccgataggtgccgga

SEQ ID NO: 7106 - DNA, 17 bp, Arabidopsis thaliana
aaccgatatgtccaaat

SEQ ID NO: 7107 - DNA, 17 bp, Arabidopsis thaliana
aaccgatcagcgatcgt

SEQ ID NO: 7108 - DNA, 17 bp, Arabidopsis thaliana
aaccgatccgaacgttg

SEQ ID NO: 7109 - DNA, 17 bp, Arabidopsis thaliana
aaccgatcctaactgct

SEQ ID NO: 7110 - DNA, 17 bp, Arabidopsis thaliana
aaccgatcgcatgttgc

SEQ ID NO: 7111 - DNA, 17 bp, Arabidopsis thaliana
aaccgatcggtcgtagc

SEQ ID NO: 7112 - DNA, 17 bp, Arabidopsis thaliana
aaccgatctactggttt

SEQ ID NO: 7113 - DNA, 17 bp, Arabidopsis thaliana
aaccgatctcccaggac

SEQ ID NO: 7114 - DNA, 17 bp, Arabidopsis thaliana
aaccgatcttcgttgcc

SEQ ID NO: 7115 - DNA, 17 bp, Arabidopsis thaliana
aaccgatgacgccgctt

SEQ ID NO: 7116 - DNA, 17 bp, Arabidopsis thaliana
aaccgatgcattcaact

SEQ ID NO: 7117 - DNA, 17 bp, Arabidopsis thaliana
aaccgatggttaagcaa

SEQ ID NO: 7118 - DNA, 17 bp, Arabidopsis thaliana
aaccgatgtagatggct

SEQ ID NO: 7119 - DNA, 17 bp, Arabidopsis thaliana
aaccgatgtcgtccagc

SEQ ID NO: 7120 - DNA, 17 bp, Arabidopsis thaliana
aaccgatgtgggacatt

SEQ ID NO: 7121 - DNA, 17 bp, Arabidopsis thaliana
aaccgattacggggttt

SEQ ID NO: 7122 - DNA, 17 bp, Arabidopsis thaliana
aaccgattcaactctag

SEQ ID NO: 7123 - DNA, 17 bp, Arabidopsis thaliana
aaccgattcaccgggtc

SEQ ID NO: 7124 - DNA, 17 bp, Arabidopsis thaliana
aaccgattcatcggatc

SEQ ID NO: 7125 - DNA, 17 bp, Arabidopsis thaliana
aaccgattccattattg

SEQ ID NO: 7126 - DNA, 17 bp, Arabidopsis thaliana
aaccgattctgtagcca

SEQ ID NO: 7127 - DNA, 17 bp, Arabidopsis thaliana
aaccgattcttggtatg

SEQ ID NO: 7128 - DNA, 17 bp, Arabidopsis thaliana
aaccgattgaccaacct

SEQ ID NO: 7129 - DNA, 17 bp, Arabidopsis thaliana
aaccgattgagctttgc

SEQ ID NO: 7130 - DNA, 17 bp, Arabidopsis thaliana
aaccgattgcagatgat

SEQ ID NO: 7131 - DNA, 17 bp, Arabidopsis thaliana
aaccgattgttcaaagc

SEQ ID NO: 7132 - DNA, 17 bp, Arabidopsis thaliana
aaccgattgttcagagc

SEQ ID NO: 7133 - DNA, 17 bp, Arabidopsis thaliana
aaccgattttcacccag

SEQ ID NO: 7134 - DNA, 17 bp, Arabidopsis thaliana
aaccgcaaaaactcgtg

SEQ ID NO: 7135 - DNA, 17 bp, Arabidopsis thaliana
aaccgcaacccgatctt

SEQ ID NO: 7136 - DNA, 17 bp, Arabidopsis thaliana
aaccgcaaccgcaaccg

SEQ ID NO: 7137 - DNA, 17 bp, Arabidopsis thaliana
aaccgcaaccgcacccg

SEQ ID NO: 7138 - DNA, 17 bp, Arabidopsis thaliana
aaccgcaaccggatctt

SEQ ID NO: 7139 - DNA, 17 bp, Arabidopsis thaliana
aaccgcaacctgatctt

SEQ ID NO: 7140 - DNA, 17 bp, Arabidopsis thaliana
aaccgcaactacatgcg

SEQ ID NO: 7141 - DNA, 17 bp, Arabidopsis thaliana
aaccgcaactcgatctt

SEQ ID NO: 7142 - DNA, 17 bp, Arabidopsis thaliana
aaccgcaagcactctga

SEQ ID NO: 7143 - DNA, 17 bp, Arabidopsis thaliana
aaccgcacaatctaata

SEQ ID NO: 7144 - DNA, 17 bp, Arabidopsis thaliana
aaccgcacagagttgat

SEQ ID NO: 7145 - DNA, 17 bp, Arabidopsis thaliana
aaccgcacccaaaaccg

SEQ ID NO: 7146 - DNA, 17 bp, Arabidopsis thaliana
aaccgcaccgcaacagt

SEQ ID NO: 7147 - DNA, 17 bp, Arabidopsis thaliana
aaccgcaccgcacttct

SEQ ID NO: 7148 - DNA, 17 bp, Arabidopsis thaliana
aaccgcaccgcacttgt

SEQ ID NO: 7149 - DNA, 17 bp, Arabidopsis thaliana
aaccgcaccgcattttt

SEQ ID NO: 7150 - DNA, 17 bp, Arabidopsis thaliana
aaccgcacgatctcgtc

SEQ ID NO: 7151 - DNA, 17 bp, Arabidopsis thaliana
aaccgcactgcaacagt

SEQ ID NO: 7152 - DNA, 17 bp, Arabidopsis thaliana
aaccgcagagatatttg

SEQ ID NO: 7153 - DNA, 17 bp, Arabidopsis thaliana
aaccgcagcggaccatc

SEQ ID NO: 7154 - DNA, 17 bp, Arabidopsis thaliana
aaccgcagcggaccatt

SEQ ID NO: 7155 - DNA, 17 bp, Arabidopsis thaliana
aaccgcagcgtacttct

SEQ ID NO: 7156 - DNA, 17 bp, Arabidopsis thaliana
aaccgcagctacattag

SEQ ID NO: 7157 - DNA, 17 bp, Arabidopsis thaliana
aaccgcagcttccattt

SEQ ID NO: 7158 - DNA, 17 bp, Arabidopsis thaliana
aaccgcaggctatgtta

SEQ ID NO: 7159 - DNA, 17 bp, Arabidopsis thaliana
aaccgcaggggtatttt

SEQ ID NO: 7160 - DNA, 17 bp, Arabidopsis thaliana
aaccgcaggtttctttg

SEQ ID NO: 7161 - DNA, 17 bp, Arabidopsis thaliana
aaccgcaggttttgttc

SEQ ID NO: 7162 - DNA, 17 bp, Arabidopsis thaliana
aaccgcagtgttctgcg

SEQ ID NO: 7163 - DNA, 17 bp, Arabidopsis thaliana
aaccgcatgatagtgtt

SEQ ID NO: 7164 - DNA, 17 bp, Arabidopsis thaliana
aaccgcatgtgttccgc

SEQ ID NO: 7165 - DNA, 17 bp, Arabidopsis thaliana
aaccgcattatgtgaca

SEQ ID NO: 7166 - DNA, 17 bp, Arabidopsis thaliana
aaccgcattgcaacatt

SEQ ID NO: 7167 - DNA, 17 bp, Arabidopsis thaliana
aaccgcatttgtaccgc

SEQ ID NO: 7168 - DNA, 17 bp, Arabidopsis thaliana
aaccgccaaaggccaag

SEQ ID NO: 7169 - DNA, 17 bp, Arabidopsis thaliana
aaccgcccgcaaccgca

SEQ ID NO: 7170 - DNA, 17 bp, Arabidopsis thaliana
aaccgcccgtccctccc

SEQ ID NO: 7171 - DNA, 17 bp, Arabidopsis thaliana
aaccgcccgtttccgca

SEQ ID NO: 7172 - DNA, 17 bp, Arabidopsis thaliana
aaccgccggaacacctt

SEQ ID NO: 7173 - DNA, 17 bp, Arabidopsis thaliana
aaccgccggctttgtat

SEQ ID NO: 7174 - DNA, 17 bp, Arabidopsis thaliana
aaccgccggttttgtat

SEQ ID NO: 7175 - DNA, 17 bp, Arabidopsis thaliana
aaccgccgtaagcagac

SEQ ID NO: 7176 - DNA, 17 bp, Arabidopsis thaliana
aaccgcctgtatcttat

SEQ ID NO: 7177 - DNA, 17 bp, Arabidopsis thaliana
aaccgccttgcggatgg

SEQ ID NO: 7178 - DNA, 17 bp, Arabidopsis thaliana
aaccgcgaaactcggac

SEQ ID NO: 7179 - DNA, 17 bp, Arabidopsis thaliana
aaccgcgaataatgatt

SEQ ID NO: 7180 - DNA, 17 bp, Arabidopsis thaliana
aaccgcggcacttttga

SEQ ID NO: 7181 - DNA, 17 bp, Arabidopsis thaliana
aaccgcgggagcaatga

SEQ ID NO: 7182 - DNA, 17 bp, Arabidopsis thaliana
aaccgcggtcgcactcg

SEQ ID NO: 7183 - DNA, 17 bp, Arabidopsis thaliana
aaccgcggttaccatgc

SEQ ID NO: 7184 - DNA, 17 bp, Arabidopsis thaliana
aaccgcggttagcgatt

SEQ ID NO: 7185 - DNA, 17 bp, Arabidopsis thaliana
aaccgcgtcgtgtagat

SEQ ID NO: 7186 - DNA, 17 bp, Arabidopsis thaliana
aaccgcgtctgtttcac

SEQ ID NO: 7187 - DNA, 17 bp, Arabidopsis thaliana
aaccgcgttcgtggggg

SEQ ID NO: 7188 - DNA, 17 bp, Arabidopsis thaliana
aaccgctaatgtgaact

SEQ ID NO: 7189 - DNA, 17 bp, Arabidopsis thaliana
aaccgctaccgcccgca

SEQ ID NO: 7190 - DNA, 17 bp, Arabidopsis thaliana
aaccgctaccgcccgta

SEQ ID NO: 7191 - DNA, 17 bp, Arabidopsis thaliana
aaccgctaccgccggca

SEQ ID NO: 7192 - DNA, 17 bp, Arabidopsis thaliana
aaccgctaccgcctgca

SEQ ID NO: 7193 - DNA, 17 bp, Arabidopsis thaliana
aaccgctaccgcgcaac

SEQ ID NO: 7194 - DNA, 17 bp, Arabidopsis thaliana
aaccgctaccgctcgca

SEQ ID NO: 7195 - DNA, 17 bp, Arabidopsis thaliana
aaccgctaccgtccaca

SEQ ID NO: 7196 - DNA, 17 bp, Arabidopsis thaliana
aaccgctaccgtctgca

SEQ ID NO: 7197 - DNA, 17 bp, Arabidopsis thaliana
aaccgctagacatcgct

SEQ ID NO: 7198 - DNA, 17 bp, Arabidopsis thaliana
aaccgctagatatcgct

SEQ ID NO: 7199 - DNA, 17 bp, Arabidopsis thaliana
aaccgctagatccgctc

SEQ ID NO: 7200 - DNA, 17 bp, Arabidopsis thaliana
aaccgctatacccctgg

SEQ ID NO: 7201 - DNA, 17 bp, Arabidopsis thaliana
aaccgctatcgactgcc

SEQ ID NO: 7202 - DNA, 17 bp, Arabidopsis thaliana
aaccgctatcggctgcc

SEQ ID NO: 7203 - DNA, 17 bp, Arabidopsis thaliana
aaccgctatcgtacccg

SEQ ID NO: 7204 - DNA, 17 bp, Arabidopsis thaliana
aaccgctcaactctact

SEQ ID NO: 7205 - DNA, 17 bp, Arabidopsis thaliana
aaccgctgacggattta

SEQ ID NO: 7206 - DNA, 17 bp, Arabidopsis thaliana
aaccgctgcggaccatc

SEQ ID NO: 7207 - DNA, 17 bp, Arabidopsis thaliana
aaccgctgcggacttag

SEQ ID NO: 7208 - DNA, 17 bp, Arabidopsis thaliana
aaccgctggactgattc

SEQ ID NO: 7209 - DNA, 17 bp, Arabidopsis thaliana
aaccgctggactgtcat

SEQ ID NO: 7210 - DNA, 17 bp, Arabidopsis thaliana
aaccgctgtctacgagt

SEQ ID NO: 7211 - DNA, 17 bp, Arabidopsis thaliana
aaccgcttaagtttgat

SEQ ID NO: 7212 - DNA, 17 bp, Arabidopsis thaliana
aaccgcttcataagttc

SEQ ID NO: 7213 - DNA, 17 bp, Arabidopsis thaliana
aaccgcttctgtttcac

SEQ ID NO: 7214 - DNA, 17 bp, Arabidopsis thaliana
aaccgcttgaaccgcat

SEQ ID NO: 7215 - DNA, 17 bp, Arabidopsis thaliana
aaccgcttgctgaggcg

SEQ ID NO: 7216 - DNA, 17 bp, Arabidopsis thaliana
aaccgcttgtctcgcac

SEQ ID NO: 7217 - DNA, 17 bp, Arabidopsis thaliana
aaccgctttcatatcca

SEQ ID NO: 7218 - DNA, 17 bp, Arabidopsis thaliana
aaccgctttcatattca

SEQ ID NO: 7219 - DNA, 17 bp, Arabidopsis thaliana
aaccgcttttcattcct

SEQ ID NO: 7220 - DNA, 17 bp, Arabidopsis thaliana
aaccggaaaaacctagg

SEQ ID NO: 7221 - DNA, 17 bp, Arabidopsis thaliana
aaccggaacccgcaaca

SEQ ID NO: 7222 - DNA, 17 bp, Arabidopsis thaliana
aaccggaacgctacgtc

SEQ ID NO: 7223 - DNA, 17 bp, Arabidopsis thaliana
aaccggaactgttttgt

SEQ ID NO: 7224 - DNA, 17 bp, Arabidopsis thaliana
aaccggaagccgggtta

SEQ ID NO: 7225 - DNA, 17 bp, Arabidopsis thaliana
aaccggaagcctggtta

SEQ ID NO: 7226 - DNA, 17 bp, Arabidopsis thaliana
aaccggaccatttgaca

SEQ ID NO: 7227 - DNA, 17 bp, Arabidopsis thaliana
aaccggaccgtattgtg

SEQ ID NO: 7228 - DNA, 17 bp, Arabidopsis thaliana
aaccggactaccctttg

SEQ ID NO: 7229 - DNA, 17 bp, Arabidopsis thaliana
aaccggactaccttctg

SEQ ID NO: 7230 - DNA, 17 bp, Arabidopsis thaliana
aaccggactatcttttg

SEQ ID NO: 7231 - DNA, 17 bp, Arabidopsis thaliana
aaccggactcgtcttgg

SEQ ID NO: 7232 - DNA, 17 bp, Arabidopsis thaliana
aaccggaggaccgagtg

SEQ ID NO: 7233 - DNA, 17 bp, Arabidopsis thaliana
aaccggaggtaatcatt

SEQ ID NO: 7234 - DNA, 17 bp, Arabidopsis thaliana
aaccggagtaaaccgaa

SEQ ID NO: 7235 - DNA, 17 bp, Arabidopsis thaliana
aaccggataagtgtgga

SEQ ID NO: 7236 - DNA, 17 bp, Arabidopsis thaliana
aaccggatcaaccatat

SEQ ID NO: 7237 - DNA, 17 bp, Arabidopsis thaliana
aaccggatcagccgata

SEQ ID NO: 7238 - DNA, 17 bp, Arabidopsis thaliana
aaccggatcttaaaggc

SEQ ID NO: 7239 - DNA, 17 bp, Arabidopsis thaliana
aaccggatcttgaaggc

SEQ ID NO: 7240 - DNA, 17 bp, Arabidopsis thaliana
aaccggatgtggatacc

SEQ ID NO: 7241 - DNA, 17 bp, Arabidopsis thaliana
aaccggattccggaggc

SEQ ID NO: 7242 - DNA, 17 bp, Arabidopsis thaliana
aaccggattttaaaggc

SEQ ID NO: 7243 - DNA, 17 bp, Arabidopsis thaliana
aaccggattttggatcc

SEQ ID NO: 7244 - DNA, 17 bp, Arabidopsis thaliana
aaccggattttggatct

SEQ ID NO: 7245 - DNA, 17 bp, Arabidopsis thaliana
aaccggcaacctctact

SEQ ID NO: 7246 - DNA, 17 bp, Arabidopsis thaliana
aaccggcaactgtatct

SEQ ID NO: 7247 - DNA, 17 bp, Arabidopsis thaliana
aaccggcccaaaaggga

SEQ ID NO: 7248 - DNA, 17 bp, Arabidopsis thaliana
aaccggcccgcagtaaa

SEQ ID NO: 7249 - DNA, 17 bp, Arabidopsis thaliana
aaccggccctggttgga

SEQ ID NO: 7250 - DNA, 17 bp, Arabidopsis thaliana
aaccggccgggtgtggg

SEQ ID NO: 7251 - DNA, 17 bp, Arabidopsis thaliana
aaccggccgtcagacaa

SEQ ID NO: 7252 - DNA, 17 bp, Arabidopsis thaliana
aaccggcctaaccctga

SEQ ID NO: 7253 - DNA, 17 bp, Arabidopsis thaliana
aaccggcctgttgttta

SEQ ID NO: 7254 - DNA, 17 bp, Arabidopsis thaliana
aaccggcctttgttgcg

SEQ ID NO: 7255 - DNA, 17 bp, Arabidopsis thaliana
aaccggcgacctctaag

SEQ ID NO: 7256 - DNA, 17 bp, Arabidopsis thaliana
aaccggcgattgtgacg

SEQ ID NO: 7257 - DNA, 17 bp, Arabidopsis thaliana
aaccggcgcaaaagatg

SEQ ID NO: 7258 - DNA, 17 bp, Arabidopsis thaliana
aaccggcggtacaccgc

SEQ ID NO: 7259 - DNA, 17 bp, Arabidopsis thaliana
aaccggcggtttttcta

SEQ ID NO: 7260 - DNA, 17 bp, Arabidopsis thaliana
aaccggctagttgagtc

SEQ ID NO: 7261 - DNA, 17 bp, Arabidopsis thaliana
aaccggctggtctggtc

SEQ ID NO: 7262 - DNA, 17 bp, Arabidopsis thaliana
aaccgggaagtcctcgt

SEQ ID NO: 7263 - DNA, 17 bp, Arabidopsis thaliana
aaccgggacatgattag

SEQ ID NO: 7264 - DNA, 17 bp, Arabidopsis thaliana
aaccgggagactcgtac

SEQ ID NO: 7265 - DNA, 17 bp, Arabidopsis thaliana
aaccgggaggtgtattc

SEQ ID NO: 7266 - DNA, 17 bp, Arabidopsis thaliana
aaccgggattaaccaca

SEQ ID NO: 7267 - DNA, 17 bp, Arabidopsis thaliana
aaccgggcagtccaggt

SEQ ID NO: 7268 - DNA, 17 bp, Arabidopsis thaliana
aaccgggctatcagagc

SEQ ID NO: 7269 - DNA, 17 bp, Arabidopsis thaliana
aaccgggggtcccagtt

SEQ ID NO: 7270 - DNA, 17 bp, Arabidopsis thaliana
aaccggggtgacagatt

SEQ ID NO: 7271 - DNA, 17 bp, Arabidopsis thaliana
aaccgggtaagttctaa

SEQ ID NO: 7272 - DNA, 17 bp, Arabidopsis thaliana
aaccgggtatgccatga

SEQ ID NO: 7273 - DNA, 17 bp, Arabidopsis thaliana
aaccgggtgcgacggat

SEQ ID NO: 7274 - DNA, 17 bp, Arabidopsis thaliana
aaccgggtggtcttttt

SEQ ID NO: 7275 - DNA, 17 bp, Arabidopsis thaliana
aaccgggttcagtttcg

SEQ ID NO: 7276 - DNA, 17 bp, Arabidopsis thaliana
aaccgggtttttcgtca

SEQ ID NO: 7277 - DNA, 17 bp, Arabidopsis thaliana
aaccggtaatccctcag

SEQ ID NO: 7278 - DNA, 17 bp, Arabidopsis thaliana
aaccggtccactaactc

SEQ ID NO: 7279 - DNA, 17 bp, Arabidopsis thaliana
aaccggtgatgtgtcgt

SEQ ID NO: 7280 - DNA, 17 bp, Arabidopsis thaliana
aaccggtggagaatcgg

SEQ ID NO: 7281 - DNA, 17 bp, Arabidopsis thaliana
aaccggtggctacttga

SEQ ID NO: 7282 - DNA, 17 bp, Arabidopsis thaliana
aaccggtgtatgcagat

SEQ ID NO: 7283 - DNA, 17 bp, Arabidopsis thaliana
aaccggtgtctcctcag

SEQ ID NO: 7284 - DNA, 17 bp, Arabidopsis thaliana
aaccggttaggattgtg

SEQ ID NO: 7285 - DNA, 17 bp, Arabidopsis thaliana
aaccggttcaccaggtc

SEQ ID NO: 7286 - DNA, 17 bp, Arabidopsis thaliana
aaccggttcaccgggtc

SEQ ID NO: 7287 - DNA, 17 bp, Arabidopsis thaliana
aaccggttcactgggtc

SEQ ID NO: 7288 - DNA, 17 bp, Arabidopsis thaliana
aaccggttcatcgggtc

SEQ ID NO: 7289 - DNA, 17 bp, Arabidopsis thaliana
aaccggttgaacccgcc

SEQ ID NO: 7290 - DNA, 17 bp, Arabidopsis thaliana
aaccggttgacagaaag

SEQ ID NO: 7291 - DNA, 17 bp, Arabidopsis thaliana
aaccggttgacagaatc

SEQ ID NO: 7292 - DNA, 17 bp, Arabidopsis thaliana
aaccggtttacagggcc

SEQ ID NO: 7293 - DNA, 17 bp, Arabidopsis thaliana
aaccggtttaccgggtc

SEQ ID NO: 7294 - DNA, 17 bp, Arabidopsis thaliana
aaccgtaaagcgtctgt

SEQ ID NO: 7295 - DNA, 17 bp, Arabidopsis thaliana
aaccgtaaatagtgaca

SEQ ID NO: 7296 - DNA, 17 bp, Arabidopsis thaliana
aaccgtaaatggtgaca

SEQ ID NO: 7297 - DNA, 17 bp, Arabidopsis thaliana
aaccgtaacagaacagg

SEQ ID NO: 7298 - DNA, 17 bp, Arabidopsis thaliana
aaccgtaaccgcccgca

SEQ ID NO: 7299 - DNA, 17 bp, Arabidopsis thaliana
aaccgtaaccgtatgtg

SEQ ID NO: 7300 - DNA, 17 bp, Arabidopsis thaliana
aaccgtaaccgtatttt

SEQ ID NO: 7301 - DNA, 17 bp, Arabidopsis thaliana
aaccgtaaccgtgatca

SEQ ID NO: 7302 - DNA, 17 bp, Arabidopsis thaliana
aaccgtaaccgtgatga

SEQ ID NO: 7303 - DNA, 17 bp, Arabidopsis thaliana
aaccgtaaccgtggtca

SEQ ID NO: 7304 - DNA, 17 bp, Arabidopsis thaliana
aaccgtaactgtgatca

SEQ ID NO: 7305 - DNA, 17 bp, Arabidopsis thaliana
aaccgtaagatcgagtt

SEQ ID NO: 7306 - DNA, 17 bp, Arabidopsis thaliana
aaccgtactaggaaaga

SEQ ID NO: 7307 - DNA, 17 bp, Arabidopsis thaliana
aaccgtactgcaacagt

SEQ ID NO: 7308 - DNA, 17 bp, Arabidopsis thaliana
aaccgtatatttcaaca

SEQ ID NO: 7309 - DNA, 17 bp, Arabidopsis thaliana
aaccgtatcagctgcta

SEQ ID NO: 7310 - DNA, 17 bp, Arabidopsis thaliana
aaccgtatcagtgatgt

SEQ ID NO: 7311 - DNA, 17 bp, Arabidopsis thaliana
aaccgtatcggtgatgt

SEQ ID NO: 7312 - DNA, 17 bp, Arabidopsis thaliana
aaccgtatgagtctttg

SEQ ID NO: 7313 - DNA, 17 bp, Arabidopsis thaliana
aaccgtatgctgccacg

SEQ ID NO: 7314 - DNA, 17 bp, Arabidopsis thaliana
aaccgtatgctgtcacg

SEQ ID NO: 7315 - DNA, 17 bp, Arabidopsis thaliana
aaccgtcactaggagtg

SEQ ID NO: 7316 - DNA, 17 bp, Arabidopsis thaliana
aaccgtcactcgaaccg

SEQ ID NO: 7317 - DNA, 17 bp, Arabidopsis thaliana
aaccgtcagaattcttg

SEQ ID NO: 7318 - DNA, 17 bp, Arabidopsis thaliana
aaccgtcagatttctta

SEQ ID NO: 7319 - DNA, 17 bp, Arabidopsis thaliana
aaccgtcagcggaacag

SEQ ID NO: 7320 - DNA, 17 bp, Arabidopsis thaliana
aaccgtcaggtctgttg

SEQ ID NO: 7321 - DNA, 17 bp, Arabidopsis thaliana
aaccgtcatatggtttt

SEQ ID NO: 7322 - DNA, 17 bp, Arabidopsis thaliana
aaccgtcattgactttg

SEQ ID NO: 7323 - DNA, 17 bp, Arabidopsis thaliana
aaccgtcattggagttg

SEQ ID NO: 7324 - DNA, 17 bp, Arabidopsis thaliana
aaccgtccctccaattc

SEQ ID NO: 7325 - DNA, 17 bp, Arabidopsis thaliana
aaccgtccgaccaaccg

SEQ ID NO: 7326 - DNA, 17 bp, Arabidopsis thaliana
aaccgtccgatctaatg

SEQ ID NO: 7327 - DNA, 17 bp, Arabidopsis thaliana
aaccgtcctctaggtgc

SEQ ID NO: 7328 - DNA, 17 bp, Arabidopsis thaliana
aaccgtcctctcggtcg

SEQ ID NO: 7329 - DNA, 17 bp, Arabidopsis thaliana
aaccgtcctctctgcaa

SEQ ID NO: 7330 - DNA, 17 bp, Arabidopsis thaliana
aaccgtcgattgaactg

SEQ ID NO: 7331 - DNA, 17 bp, Arabidopsis thaliana
aaccgtcgcgtaccaaa

SEQ ID NO: 7332 - DNA, 17 bp, Arabidopsis thaliana
aaccgtcggatttgtgt

SEQ ID NO: 7333 - DNA, 17 bp, Arabidopsis thaliana
aaccgtctaacggataa

SEQ ID NO: 7334 - DNA, 17 bp, Arabidopsis thaliana
aaccgtctagcggatga

SEQ ID NO: 7335 - DNA, 17 bp, Arabidopsis thaliana
aaccgtctcggccgcac

SEQ ID NO: 7336 - DNA, 17 bp, Arabidopsis thaliana
aaccgtctgcagattta

SEQ ID NO: 7337 - DNA, 17 bp, Arabidopsis thaliana
aaccgtctgcctgggtg

SEQ ID NO: 7338 - DNA, 17 bp, Arabidopsis thaliana
aaccgtctgcgggtctc

SEQ ID NO: 7339 - DNA, 17 bp, Arabidopsis thaliana
aaccgtctgcgggtctg

SEQ ID NO: 7340 - DNA, 17 bp, Arabidopsis thaliana
aaccgtctgtaacagtt

SEQ ID NO: 7341 - DNA, 17 bp, Arabidopsis thaliana
aaccgtctgtaggtggc

SEQ ID NO: 7342 - DNA, 17 bp, Arabidopsis thaliana
aaccgtcttctctatga

SEQ ID NO: 7343 - DNA, 17 bp, Arabidopsis thaliana
aaccgtgaaagcgtccc

SEQ ID NO: 7344 - DNA, 17 bp, Arabidopsis thaliana
aaccgtgaaagcgtggc

SEQ ID NO: 7345 - DNA, 17 bp, Arabidopsis thaliana
aaccgtgaactcgtgaa

SEQ ID NO: 7346 - DNA, 17 bp, Arabidopsis thaliana
aaccgtgaactcttgaa

SEQ ID NO: 7347 - DNA, 17 bp, Arabidopsis thaliana
aaccgtgaattcttgaa

SEQ ID NO: 7348 - DNA, 17 bp, Arabidopsis thaliana
aaccgtgacccggtgaa

SEQ ID NO: 7349 - DNA, 17 bp, Arabidopsis thaliana
aaccgtgactaatttgt

SEQ ID NO: 7350 - DNA, 17 bp, Arabidopsis thaliana
aaccgtgactgatatgt

SEQ ID NO: 7351 - DNA, 17 bp, Arabidopsis thaliana
aaccgtgactgatttat

SEQ ID NO: 7352 - DNA, 17 bp, Arabidopsis thaliana
aaccgtgactgatttgt

SEQ ID NO: 7353 - DNA, 17 bp, Arabidopsis thaliana
aaccgtgatcatgccta

SEQ ID NO: 7354 - DNA, 17 bp, Arabidopsis thaliana
aaccgtgatgattgctt

SEQ ID NO: 7355 - DNA, 17 bp, Arabidopsis thaliana
aaccgtgattaaacgcc

SEQ ID NO: 7356 - DNA, 17 bp, Arabidopsis thaliana
aaccgtgatttagacca

SEQ ID NO: 7357 - DNA, 17 bp, Arabidopsis thaliana
aaccgtgatttccagcc

SEQ ID NO: 7358 - DNA, 17 bp, Arabidopsis thaliana
aaccgtgcattccatgc

SEQ ID NO: 7359 - DNA, 17 bp, Arabidopsis thaliana
aaccgtgcctaggcatc

SEQ ID NO: 7360 - DNA, 17 bp, Arabidopsis thaliana
aaccgtgcggttaagtc

SEQ ID NO: 7361 - DNA, 17 bp, Arabidopsis thaliana
aaccgtgctaaccttgg

SEQ ID NO: 7362 - DNA, 17 bp, Arabidopsis thaliana
aaccgtgctctcggatc

SEQ ID NO: 7363 - DNA, 17 bp, Arabidopsis thaliana
aaccgtggcccatgtct

SEQ ID NO: 7364 - DNA, 17 bp, Arabidopsis thaliana
aaccgtggcctatcgat

SEQ ID NO: 7365 - DNA, 17 bp, Arabidopsis thaliana
aaccgtggtaatcaact

SEQ ID NO: 7366 - DNA, 17 bp, Arabidopsis thaliana
aaccgtggtcattagcg

SEQ ID NO: 7367 - DNA, 17 bp, Arabidopsis thaliana
aaccgtggtcattgcga

SEQ ID NO: 7368 - DNA, 17 bp, Arabidopsis thaliana
aaccgtgtcaattatga

SEQ ID NO: 7369 - DNA, 17 bp, Arabidopsis thaliana
aaccgtgtctgaatcga

SEQ ID NO: 7370 - DNA, 17 bp, Arabidopsis thaliana
aaccgtgtgttggaatg

SEQ ID NO: 7371 - DNA, 17 bp, Arabidopsis thaliana
aaccgttagataccgct

SEQ ID NO: 7372 - DNA, 17 bp, Arabidopsis thaliana
aaccgttagatcgattc

SEQ ID NO: 7373 - DNA, 17 bp, Arabidopsis thaliana
aaccgttcagaagtgca

SEQ ID NO: 7374 - DNA, 17 bp, Arabidopsis thaliana
aaccgttcagaagtgtt

SEQ ID NO: 7375 - DNA, 17 bp, Arabidopsis thaliana
aaccgttcagggtcgag

SEQ ID NO: 7376 - DNA, 17 bp, Arabidopsis thaliana
aaccgttccgctactgt

SEQ ID NO: 7377 - DNA, 17 bp, Arabidopsis thaliana
aaccgttcgccaggatt

SEQ ID NO: 7378 - DNA, 17 bp, Arabidopsis thaliana
aaccgttcgccgagagt

SEQ ID NO: 7379 - DNA, 17 bp, Arabidopsis thaliana
aaccgttgacaggttgc

SEQ ID NO: 7380 - DNA, 17 bp, Arabidopsis thaliana
aaccgttgattcgcaca

SEQ ID NO: 7381 - DNA, 17 bp, Arabidopsis thaliana
aaccgttgctgaccgcc

SEQ ID NO: 7382 - DNA, 17 bp, Arabidopsis thaliana
aaccgttgttggtatca

SEQ ID NO: 7383 - DNA, 17 bp, Arabidopsis thaliana
aaccgtttacccgtccg

SEQ ID NO: 7384 - DNA, 17 bp, Arabidopsis thaliana
aaccgtttgatgattgt

SEQ ID NO: 7385 - DNA, 17 bp, Arabidopsis thaliana
aaccgtttgccagtcca

SEQ ID NO: 7386 - DNA, 17 bp, Arabidopsis thaliana
aaccgtttggaccgtca

SEQ ID NO: 7387 - DNA, 17 bp, Arabidopsis thaliana
aacctaaacacgaatgg

SEQ ID NO: 7388 - DNA, 17 bp, Arabidopsis thaliana
aacctaaacggcgattt

SEQ ID NO: 7389 - DNA, 17 bp, Arabidopsis thaliana
aacctaaactaactgct

SEQ ID NO: 7390 - DNA, 17 bp, Arabidopsis thaliana
aacctaaaggcgggatt

SEQ ID NO: 7391 - DNA, 17 bp, Arabidopsis thaliana
aacctaaatcatcggat

SEQ ID NO: 7392 - DNA, 17 bp, Arabidopsis thaliana
aacctaacagcttctgc

SEQ ID NO: 7393 - DNA, 17 bp, Arabidopsis thaliana
aacctaaccgctaccgc

SEQ ID NO: 7394 - DNA, 17 bp, Arabidopsis thaliana
aacctaaccgctaccgt

SEQ ID NO: 7395 - DNA, 17 bp, Arabidopsis thaliana
aacctaaccgctgcccg

SEQ ID NO: 7396 - DNA, 17 bp, Arabidopsis thaliana
aacctaacctgtaccgc

SEQ ID NO: 7397 - DNA, 17 bp, Arabidopsis thaliana
aacctaactgctaccgc

SEQ ID NO: 7398 - DNA, 17 bp, Arabidopsis thaliana
aacctaagcacgttgat

SEQ ID NO: 7399 - DNA, 17 bp, Arabidopsis thaliana
aacctaagctcgttgat

SEQ ID NO: 7400 - DNA, 17 bp, Arabidopsis thaliana
aacctaaggccgacgga

SEQ ID NO: 7401 - DNA, 17 bp, Arabidopsis thaliana
aacctaagtgttgagtt

SEQ ID NO: 7402 - DNA, 17 bp, Arabidopsis thaliana
aacctaagttgggttgt

SEQ ID NO: 7403 - DNA, 17 bp, Arabidopsis thaliana
aacctaatccacatcgg

SEQ ID NO: 7404 - DNA, 17 bp, Arabidopsis thaliana
aacctaatcttgtaagc

SEQ ID NO: 7405 - DNA, 17 bp, Arabidopsis thaliana
aacctaattttgcggcc

SEQ ID NO: 7406 - DNA, 17 bp, Arabidopsis thaliana
aacctacaattgacact

SEQ ID NO: 7407 - DNA, 17 bp, Arabidopsis thaliana
aacctacacaattggac

SEQ ID NO: 7408 - DNA, 17 bp, Arabidopsis thaliana
aacctacacgagtgttc

SEQ ID NO: 7409 - DNA, 17 bp, Arabidopsis thaliana
aacctacagactgtgaa

SEQ ID NO: 7410 - DNA, 17 bp, Arabidopsis thaliana
aacctacagttagagcc

SEQ ID NO: 7411 - DNA, 17 bp, Arabidopsis thaliana
aacctacggtacaccgc

SEQ ID NO: 7412 - DNA, 17 bp, Arabidopsis thaliana
aacctacggtataccgc

SEQ ID NO: 7413 - DNA, 17 bp, Arabidopsis thaliana
aacctacgttgttcgtt

SEQ ID NO: 7414 - DNA, 17 bp, Arabidopsis thaliana
aacctactattgggatg

SEQ ID NO: 7415 - DNA, 17 bp, Arabidopsis thaliana
aacctacttcttggttg

SEQ ID NO: 7416 - DNA, 17 bp, Arabidopsis thaliana
aacctacttttggcatt

SEQ ID NO: 7417 - DNA, 17 bp, Arabidopsis thaliana
aacctagaagatacaca

SEQ ID NO: 7418 - DNA, 17 bp, Arabidopsis thaliana
aacctagactggcatgt

SEQ ID NO: 7419 - DNA, 17 bp, Arabidopsis thaliana
aacctagagtagtggtg

SEQ ID NO: 7420 - DNA, 17 bp, Arabidopsis thaliana
aacctagcccattagac

SEQ ID NO: 7421 - DNA, 17 bp, Arabidopsis thaliana
aacctaggaccaacgtg

SEQ ID NO: 7422 - DNA, 17 bp, Arabidopsis thaliana
aacctaggactaggtgt

SEQ ID NO: 7423 - DNA, 17 bp, Arabidopsis thaliana
aacctaggcatgggcgt

SEQ ID NO: 7424 - DNA, 17 bp, Arabidopsis thaliana
aacctagggagtctgcg

SEQ ID NO: 7425 - DNA, 17 bp, Arabidopsis thaliana
aacctagtcgatttttc

SEQ ID NO: 7426 - DNA, 17 bp, Arabidopsis thaliana
aacctagtctcaggagt

SEQ ID NO: 7427 - DNA, 17 bp, Arabidopsis thaliana
aacctataaggccatct

SEQ ID NO: 7428 - DNA, 17 bp, Arabidopsis thaliana
aacctataatcccctta

SEQ ID NO: 7429 - DNA, 17 bp, Arabidopsis thaliana
aacctatcacgtgatcc

SEQ ID NO: 7430 - DNA, 17 bp, Arabidopsis thaliana
aacctatcagctgatcc

SEQ ID NO: 7431 - DNA, 17 bp, Arabidopsis thaliana
aacctatgatctggtga

SEQ ID NO: 7432 - DNA, 17 bp, Arabidopsis thaliana
aacctatgccctgttcg

SEQ ID NO: 7433 - DNA, 17 bp, Arabidopsis thaliana
aacctatgctctacatt

SEQ ID NO: 7434 - DNA, 17 bp, Arabidopsis thaliana
aacctattagctcagtg

SEQ ID NO: 7435 - DNA, 17 bp, Arabidopsis thaliana
aacctattagctcagtt

SEQ ID NO: 7436 - DNA, 17 bp, Arabidopsis thaliana
aacctattattggttga

SEQ ID NO: 7437 - DNA, 17 bp, Arabidopsis thaliana
aacctattcctaggcgt

SEQ ID NO: 7438 - DNA, 17 bp, Arabidopsis thaliana
aacctattcggcgattt

SEQ ID NO: 7439 - DNA, 17 bp, Arabidopsis thaliana
aacctattggaaagtga

SEQ ID NO: 7440 - DNA, 17 bp, Arabidopsis thaliana
aacctatttggaaagtg

SEQ ID NO: 7441 - DNA, 17 bp, Arabidopsis thaliana
aacctcaaccagcttga

SEQ ID NO: 7442 - DNA, 17 bp, Arabidopsis thaliana
aacctcaactttggcca

SEQ ID NO: 7443 - DNA, 17 bp, Arabidopsis thaliana
aacctcacatgccttta

SEQ ID NO: 7444 - DNA, 17 bp, Arabidopsis thaliana
aacctcacattccatcg

SEQ ID NO: 7445 - DNA, 17 bp, Arabidopsis thaliana
aacctcagaggcggttt

SEQ ID NO: 7446 - DNA, 17 bp, Arabidopsis thaliana
aacctcagatataggaa

SEQ ID NO: 7447 - DNA, 17 bp, Arabidopsis thaliana
aacctcagcagcagagc

SEQ ID NO: 7448 - DNA, 17 bp, Arabidopsis thaliana
aacctcagctcaggcca

SEQ ID NO: 7449 - DNA, 17 bp, Arabidopsis thaliana
aacctcaggagggatag

SEQ ID NO: 7450 - DNA, 17 bp, Arabidopsis thaliana
aacctcagggaatgcct

SEQ ID NO: 7451 - DNA, 17 bp, Arabidopsis thaliana
aacctcaggtctaccag

SEQ ID NO: 7452 - DNA, 17 bp, Arabidopsis thaliana
aacctcagtaatttaac

SEQ ID NO: 7453 - DNA, 17 bp, Arabidopsis thaliana
aacctcagtccatatgt

SEQ ID NO: 7454 - DNA, 17 bp, Arabidopsis thaliana
aacctcagtcttctttt

SEQ ID NO: 7455 - DNA, 17 bp, Arabidopsis thaliana
aacctcataggtggagg

SEQ ID NO: 7456 - DNA, 17 bp, Arabidopsis thaliana
aacctcatctcctctat

SEQ ID NO: 7457 - DNA, 17 bp, Arabidopsis thaliana
aacctcatgaccacatt

SEQ ID NO: 7458 - DNA, 17 bp, Arabidopsis thaliana
aacctcatggtgctttg

SEQ ID NO: 7459 - DNA, 17 bp, Arabidopsis thaliana
aacctcattggagttgc

SEQ ID NO: 7460 - DNA, 17 bp, Arabidopsis thaliana
aacctccaccagatctg

SEQ ID NO: 7461 - DNA, 17 bp, Arabidopsis thaliana
aacctccatcagtttgc

SEQ ID NO: 7462 - DNA, 17 bp, Arabidopsis thaliana
aacctcccagaagtagc

SEQ ID NO: 7463 - DNA, 17 bp, Arabidopsis thaliana
aacctcccccccaaccc

SEQ ID NO: 7464 - DNA, 17 bp, Arabidopsis thaliana
aacctccctccgtatca

SEQ ID NO: 7465 - DNA, 17 bp, Arabidopsis thaliana
aacctccggcgagattt

SEQ ID NO: 7466 - DNA, 17 bp, Arabidopsis thaliana
aacctccgtcctcttca

SEQ ID NO: 7467 - DNA, 17 bp, Arabidopsis thaliana
aacctcctcaggacatg

SEQ ID NO: 7468 - DNA, 17 bp, Arabidopsis thaliana
aacctccttgttctgta

SEQ ID NO: 7469 - DNA, 17 bp, Arabidopsis thaliana
aacctcgaatggccaat

SEQ ID NO: 7470 - DNA, 17 bp, Arabidopsis thaliana
aacctcgactctgagct

SEQ ID NO: 7471 - DNA, 17 bp, Arabidopsis thaliana
aacctcgactgaggcgc

SEQ ID NO: 7472 - DNA, 17 bp, Arabidopsis thaliana
aacctcgactgattcgg

SEQ ID NO: 7473 - DNA, 17 bp, Arabidopsis thaliana
aacctcgaggccttgac

SEQ ID NO: 7474 - DNA, 17 bp, Arabidopsis thaliana
aacctcgcaagtgatca

SEQ ID NO: 7475 - DNA, 17 bp, Arabidopsis thaliana
aacctcgcacgtgtgaa

SEQ ID NO: 7476 - DNA, 17 bp, Arabidopsis thaliana
aacctcgcggaccactt

SEQ ID NO: 7477 - DNA, 17 bp, Arabidopsis thaliana
aacctcggcaacggata

SEQ ID NO: 7478 - DNA, 17 bp, Arabidopsis thaliana
aacctcggctactctat

SEQ ID NO: 7479 - DNA, 17 bp, Arabidopsis thaliana
aacctcggtccatatgt

SEQ ID NO: 7480 - DNA, 17 bp, Arabidopsis thaliana
aacctcggttggatgtt

SEQ ID NO: 7481 - DNA, 17 bp, Arabidopsis thaliana
aacctcggtttgtggca

SEQ ID NO: 7482 - DNA, 17 bp, Arabidopsis thaliana
aacctcggtttgtggct

SEQ ID NO: 7483 - DNA, 17 bp, Arabidopsis thaliana
aacctcgtcgtgggaat

SEQ ID NO: 7484 - DNA, 17 bp, Arabidopsis thaliana
aacctcgtgctagatat

SEQ ID NO: 7485 - DNA, 17 bp, Arabidopsis thaliana
aacctctaagcagacgg

SEQ ID NO: 7486 - DNA, 17 bp, Arabidopsis thaliana
aacctctacggcggcat

SEQ ID NO: 7487 - DNA, 17 bp, Arabidopsis thaliana
aacctctactgcggtga

SEQ ID NO: 7488 - DNA, 17 bp, Arabidopsis thaliana
aacctctaggattattg

SEQ ID NO: 7489 - DNA, 17 bp, Arabidopsis thaliana
aacctctcacgatttgg

SEQ ID NO: 7490 - DNA, 17 bp, Arabidopsis thaliana
aacctctccagccttcc

SEQ ID NO: 7491 - DNA, 17 bp, Arabidopsis thaliana
aacctctcctttcatgt

SEQ ID NO: 7492 - DNA, 17 bp, Arabidopsis thaliana
aacctctcgggacgcac

SEQ ID NO: 7493 - DNA, 17 bp, Arabidopsis thaliana
aacctctctggcttgaa

SEQ ID NO: 7494 - DNA, 17 bp, Arabidopsis thaliana
aacctctctggtttttg

SEQ ID NO: 7495 - DNA, 17 bp, Arabidopsis thaliana
aacctctgaaggaacga

SEQ ID NO: 7496 - DNA, 17 bp, Arabidopsis thaliana
aacctctgacggtccta

SEQ ID NO: 7497 - DNA, 17 bp, Arabidopsis thaliana
aacctctggaacctggg

SEQ ID NO: 7498 - DNA, 17 bp, Arabidopsis thaliana
aacctctggatcggatc

SEQ ID NO: 7499 - DNA, 17 bp, Arabidopsis thaliana
aacctctgtttctccga

SEQ ID NO: 7500 - DNA, 17 bp, Arabidopsis thaliana
aacctcttcccgcctgg

SEQ ID NO: 7501 - DNA, 17 bp, Arabidopsis thaliana
aacctcttctgttgtaa

SEQ ID NO: 7502 - DNA, 17 bp, Arabidopsis thaliana
aacctcttcttgtctct

SEQ ID NO: 7503 - DNA, 17 bp, Arabidopsis thaliana
aacctctttccttgttg

SEQ ID NO: 7504 - DNA, 17 bp, Arabidopsis thaliana
aacctgaaaacagagac

SEQ ID NO: 7505 - DNA, 17 bp, Arabidopsis thaliana
aacctgaaagatctcca

SEQ ID NO: 7506 - DNA, 17 bp, Arabidopsis thaliana
aacctgaaagatctcta

SEQ ID NO: 7507 - DNA, 17 bp, Arabidopsis thaliana
aacctgaagatgaagat

SEQ ID NO: 7508 - DNA, 17 bp, Arabidopsis thaliana
aacctgaccgaatggga

SEQ ID NO: 7509 - DNA, 17 bp, Arabidopsis thaliana
aacctgactacactacc

SEQ ID NO: 7510 - DNA, 17 bp, Arabidopsis thaliana
aacctgactacactatc

SEQ ID NO: 7511 - DNA, 17 bp, Arabidopsis thaliana
aacctgagacagtggac

SEQ ID NO: 7512 - DNA, 17 bp, Arabidopsis thaliana
aacctgagagagccatc

SEQ ID NO: 7513 - DNA, 17 bp, Arabidopsis thaliana
aacctgagctataggtg

SEQ ID NO: 7514 - DNA, 17 bp, Arabidopsis thaliana
aacctgagtcttcttct

SEQ ID NO: 7515 - DNA, 17 bp, Arabidopsis thaliana
aacctgatatcggctct

SEQ ID NO: 7516 - DNA, 17 bp, Arabidopsis thaliana
aacctgatccacatcga

SEQ ID NO: 7517 - DNA, 17 bp, Arabidopsis thaliana
aacctgatccacatcgg

SEQ ID NO: 7518 - DNA, 17 bp, Arabidopsis thaliana
aacctgatcgcagatag

SEQ ID NO: 7519 - DNA, 17 bp, Arabidopsis thaliana
aacctgatcgtagatag

SEQ ID NO: 7520 - DNA, 17 bp, Arabidopsis thaliana
aacctgatgcgggtcct

SEQ ID NO: 7521 - DNA, 17 bp, Arabidopsis thaliana
aacctgatgtggatccc

SEQ ID NO: 7522 - DNA, 17 bp, Arabidopsis thaliana
aacctgattcctgaggc

SEQ ID NO: 7523 - DNA, 17 bp, Arabidopsis thaliana
aacctgattgagatttg

SEQ ID NO: 7524 - DNA, 17 bp, Arabidopsis thaliana
aacctgatttgggagaa

SEQ ID NO: 7525 - DNA, 17 bp, Arabidopsis thaliana
aacctgcaacctacaga

SEQ ID NO: 7526 - DNA, 17 bp, Arabidopsis thaliana
aacctgcaagcaagcaa

SEQ ID NO: 7527 - DNA, 17 bp, Arabidopsis thaliana
aacctgcaagcgagcaa

SEQ ID NO: 7528 - DNA, 17 bp, Arabidopsis thaliana
aacctgcaattacagac

SEQ ID NO: 7529 - DNA, 17 bp, Arabidopsis thaliana
aacctgcagtataccgc

SEQ ID NO: 7530 - DNA, 17 bp, Arabidopsis thaliana
aacctgcagtataccgt

SEQ ID NO: 7531 - DNA, 17 bp, Arabidopsis thaliana
aacctgcatgggccatt

SEQ ID NO: 7532 - DNA, 17 bp, Arabidopsis thaliana
aacctgccaggtcaatg

SEQ ID NO: 7533 - DNA, 17 bp, Arabidopsis thaliana
aacctgccatctgacgt

SEQ ID NO: 7534 - DNA, 17 bp, Arabidopsis thaliana
aacctgcctagtcattc

SEQ ID NO: 7535 - DNA, 17 bp, Arabidopsis thaliana
aacctgcgaaaggatca

SEQ ID NO: 7536 - DNA, 17 bp, Arabidopsis thaliana
aacctgcggaaggatca

SEQ ID NO: 7537 - DNA, 17 bp, Arabidopsis thaliana
aacctgcggaaggatcg

SEQ ID NO: 7538 - DNA, 17 bp, Arabidopsis thaliana
aacctgcggagtaactt

SEQ ID NO: 7539 - DNA, 17 bp, Arabidopsis thaliana
aacctgcggatttttcg

SEQ ID NO: 7540 - DNA, 17 bp, Arabidopsis thaliana
aacctgcggtacaccgc

SEQ ID NO: 7541 - DNA, 17 bp, Arabidopsis thaliana
aacctgcggtacaccgt

SEQ ID NO: 7542 - DNA, 17 bp, Arabidopsis thaliana
aacctgcggtatgcggc

SEQ ID NO: 7543 - DNA, 17 bp, Arabidopsis thaliana
aacctgcggttgcggca

SEQ ID NO: 7544 - DNA, 17 bp, Arabidopsis thaliana
aacctgctaagaagcac

SEQ ID NO: 7545 - DNA, 17 bp, Arabidopsis thaliana
aacctgcttagtaggat

SEQ ID NO: 7546 - DNA, 17 bp, Arabidopsis thaliana
aacctgcttggcctgct

SEQ ID NO: 7547 - DNA, 17 bp, Arabidopsis thaliana
aacctggaatatgtcca

SEQ ID NO: 7548 - DNA, 17 bp, Arabidopsis thaliana
aacctggatataggcgg

SEQ ID NO: 7549 - DNA, 17 bp, Arabidopsis thaliana
aacctggcaagggggcg

SEQ ID NO: 7550 - DNA, 17 bp, Arabidopsis thaliana
aacctggctaaacctaa

SEQ ID NO: 7551 - DNA, 17 bp, Arabidopsis thaliana
aacctggctctgatacc

SEQ ID NO: 7552 - DNA, 17 bp, Arabidopsis thaliana
aacctggcttaagtcac

SEQ ID NO: 7553 - DNA, 17 bp, Arabidopsis thaliana
aacctggctttgatcga

SEQ ID NO: 7554 - DNA, 17 bp, Arabidopsis thaliana
aacctgggacgactgca

SEQ ID NO: 7555 - DNA, 17 bp, Arabidopsis thaliana
aacctgggctcctccgg

SEQ ID NO: 7556 - DNA, 17 bp, Arabidopsis thaliana
aacctgggtaatgctgc

SEQ ID NO: 7557 - DNA, 17 bp, Arabidopsis thaliana
aacctgggtgatctatc

SEQ ID NO: 7558 - DNA, 17 bp, Arabidopsis thaliana
aacctggtgtagatccc

SEQ ID NO: 7559 - DNA, 17 bp, Arabidopsis thaliana
aacctggtgtcggtccc

SEQ ID NO: 7560 - DNA, 17 bp, Arabidopsis thaliana
aacctggtgtcggtctc

SEQ ID NO: 7561 - DNA, 17 bp, Arabidopsis thaliana
aacctggtgtgggtcca

SEQ ID NO: 7562 - DNA, 17 bp, Arabidopsis thaliana
aacctggttgacccgat

SEQ ID NO: 7563 - DNA, 17 bp, Arabidopsis thaliana
aacctgtaaatccgttt

SEQ ID NO: 7564 - DNA, 17 bp, Arabidopsis thaliana
aacctgtagggtcccat

SEQ ID NO: 7565 - DNA, 17 bp, Arabidopsis thaliana
aacctgtagttcgcgat

SEQ ID NO: 7566 - DNA, 17 bp, Arabidopsis thaliana
aacctgtgacatctact

SEQ ID NO: 7567 - DNA, 17 bp, Arabidopsis thaliana
aacctgtgacccgaaca

SEQ ID NO: 7568 - DNA, 17 bp, Arabidopsis thaliana
aacctgtggatatccga

SEQ ID NO: 7569 - DNA, 17 bp, Arabidopsis thaliana
aacctgtggatatctga

SEQ ID NO: 7570 - DNA, 17 bp, Arabidopsis thaliana
aacctgtggctggattg

SEQ ID NO: 7571 - DNA, 17 bp, Arabidopsis thaliana
aacctgtgtgtcgctag

SEQ ID NO: 7572 - DNA, 17 bp, Arabidopsis thaliana
aacctgttcaccgttta

SEQ ID NO: 7573 - DNA, 17 bp, Arabidopsis thaliana
aacctgttcttcacaag

SEQ ID NO: 7574 - DNA, 17 bp, Arabidopsis thaliana
aacctgttcttcgctga

SEQ ID NO: 7575 - DNA, 17 bp, Arabidopsis thaliana
aaccttaaaactgatac

SEQ ID NO: 7576 - DNA, 17 bp, Arabidopsis thaliana
aaccttaaacttgagca

SEQ ID NO: 7577 - DNA, 17 bp, Arabidopsis thaliana
aaccttacaagatcggg

SEQ ID NO: 7578 - DNA, 17 bp, Arabidopsis thaliana
aaccttacatcgatgtc

SEQ ID NO: 7579 - DNA, 17 bp, Arabidopsis thaliana
aaccttaccgatttcag

SEQ ID NO: 7580 - DNA, 17 bp, Arabidopsis thaliana
aaccttacgtggattca

SEQ ID NO: 7581 - DNA, 17 bp, Arabidopsis thaliana
aaccttaggatgggtcg

SEQ ID NO: 7582 - DNA, 17 bp, Arabidopsis thaliana
aaccttaggcacgacac

SEQ ID NO: 7583 - DNA, 17 bp, Arabidopsis thaliana
aaccttataatgggcat

SEQ ID NO: 7584 - DNA, 17 bp, Arabidopsis thaliana
aaccttataggtcgctg

SEQ ID NO: 7585 - DNA, 17 bp, Arabidopsis thaliana
aaccttatcacttgtag

SEQ ID NO: 7586 - DNA, 17 bp, Arabidopsis thaliana
aaccttatcctaaaggc

SEQ ID NO: 7587 - DNA, 17 bp, Arabidopsis thaliana
aaccttatgcaagtgtt

SEQ ID NO: 7588 - DNA, 17 bp, Arabidopsis thaliana
aaccttatgggcatttg

SEQ ID NO: 7589 - DNA, 17 bp, Arabidopsis thaliana
aaccttatggtatctgc

SEQ ID NO: 7590 - DNA, 17 bp, Arabidopsis thaliana
aaccttatgtcaggacc

SEQ ID NO: 7591 - DNA, 17 bp, Arabidopsis thaliana
aaccttattaccaggac

SEQ ID NO: 7592 - DNA, 17 bp, Arabidopsis thaliana
aaccttcaaagttttga

SEQ ID NO: 7593 - DNA, 17 bp, Arabidopsis thaliana
aaccttcaaccttggcc

SEQ ID NO: 7594 - DNA, 17 bp, Arabidopsis thaliana
aaccttcaaggggtgtg

SEQ ID NO: 7595 - DNA, 17 bp, Arabidopsis thaliana
aaccttcaagtttgcgt

SEQ ID NO: 7596 - DNA, 17 bp, Arabidopsis thaliana
aaccttcaggttgtgtc

SEQ ID NO: 7597 - DNA, 17 bp, Arabidopsis thaliana
aaccttcatccaacgac

SEQ ID NO: 7598 - DNA, 17 bp, Arabidopsis thaliana
aaccttcatgtgctgat

SEQ ID NO: 7599 - DNA, 17 bp, Arabidopsis thaliana
aaccttccaccggaaga

SEQ ID NO: 7600 - DNA, 17 bp, Arabidopsis thaliana
aaccttccatttcatgt

SEQ ID NO: 7601 - DNA, 17 bp, Arabidopsis thaliana
aaccttcccacaggaca

SEQ ID NO: 7602 - DNA, 17 bp, Arabidopsis thaliana
aaccttccctctggccg

SEQ ID NO: 7603 - DNA, 17 bp, Arabidopsis thaliana
aaccttccgtttttcga

SEQ ID NO: 7604 - DNA, 17 bp, Arabidopsis thaliana
aaccttcgcctacggca

SEQ ID NO: 7605 - DNA, 17 bp, Arabidopsis thaliana
aaccttcgctttcttcg

SEQ ID NO: 7606 - DNA, 17 bp, Arabidopsis thaliana
aaccttcggacgtaact

SEQ ID NO: 7607 - DNA, 17 bp, Arabidopsis thaliana
aaccttcgtgtcttgtg

SEQ ID NO: 7608 - DNA, 17 bp, Arabidopsis thaliana
aaccttctcgctgtgaa

SEQ ID NO: 7609 - DNA, 17 bp, Arabidopsis thaliana
aaccttctgaactcagg

SEQ ID NO: 7610 - DNA, 17 bp, Arabidopsis thaliana
aaccttctgcagtaagc

SEQ ID NO: 7611 - DNA, 17 bp, Arabidopsis thaliana
aaccttcttggacaacg

SEQ ID NO: 7612 - DNA, 17 bp, Arabidopsis thaliana
aaccttctttgccgaat

SEQ ID NO: 7613 - DNA, 17 bp, Arabidopsis thaliana
aaccttgaagcaaactg

SEQ ID NO: 7614 - DNA, 17 bp, Arabidopsis thaliana
aaccttgaagccaaccg

SEQ ID NO: 7615 - DNA, 17 bp, Arabidopsis thaliana
aaccttgaatctgcatg

SEQ ID NO: 7616 - DNA, 17 bp, Arabidopsis thaliana
aaccttgactctagtcc

SEQ ID NO: 7617 - DNA, 17 bp, Arabidopsis thaliana
aaccttgagacggcgta

SEQ ID NO: 7618 - DNA, 17 bp, Arabidopsis thaliana
aaccttgagggttgcaa

SEQ ID NO: 7619 - DNA, 17 bp, Arabidopsis thaliana
aaccttgagtcacaata

SEQ ID NO: 7620 - DNA, 17 bp, Arabidopsis thaliana
aaccttgagtcacagta

SEQ ID NO: 7621 - DNA, 17 bp, Arabidopsis thaliana
aaccttgatgatttgct

SEQ ID NO: 7622 - DNA, 17 bp, Arabidopsis thaliana
aaccttgcaccggtgct

SEQ ID NO: 7623 - DNA, 17 bp, Arabidopsis thaliana
aaccttgcactttgtga

SEQ ID NO: 7624 - DNA, 17 bp, Arabidopsis thaliana
aaccttgccaatgtgca

SEQ ID NO: 7625 - DNA, 17 bp, Arabidopsis thaliana
aaccttgcgatgggtcg

SEQ ID NO: 7626 - DNA, 17 bp, Arabidopsis thaliana
aaccttggaccaaataa

SEQ ID NO: 7627 - DNA, 17 bp, Arabidopsis thaliana
aaccttggaccaaatag

SEQ ID NO: 7628 - DNA, 17 bp, Arabidopsis thaliana
aaccttggcaacccaag

SEQ ID NO: 7629 - DNA, 17 bp, Arabidopsis thaliana
aaccttggccggtgtat

SEQ ID NO: 7630 - DNA, 17 bp, Arabidopsis thaliana
aaccttggcgaccttaa

SEQ ID NO: 7631 - DNA, 17 bp, Arabidopsis thaliana
aaccttggctatgtctc

SEQ ID NO: 7632 - DNA, 17 bp, Arabidopsis thaliana
aaccttgggatggaccc

SEQ ID NO: 7633 - DNA, 17 bp, Arabidopsis thaliana
aaccttgggatgggccc

SEQ ID NO: 7634 - DNA, 17 bp, Arabidopsis thaliana
aaccttgggatgggccg

SEQ ID NO: 7635 - DNA, 17 bp, Arabidopsis thaliana
aaccttgggatggggcg

SEQ ID NO: 7636 - DNA, 17 bp, Arabidopsis thaliana
aaccttgggatgggtcc

SEQ ID NO: 7637 - DNA, 17 bp, Arabidopsis thaliana
aaccttgggatgggtcg

SEQ ID NO: 7638 - DNA, 17 bp, Arabidopsis thaliana
aaccttgggatgggtct

SEQ ID NO: 7639 - DNA, 17 bp, Arabidopsis thaliana
aaccttgggatgggttg

SEQ ID NO: 7640 - DNA, 17 bp, Arabidopsis thaliana
aaccttgggatggtcgg

SEQ ID NO: 7641 - DNA, 17 bp, Arabidopsis thaliana
aaccttgggtgccttga

SEQ ID NO: 7642 - DNA, 17 bp, Arabidopsis thaliana
aaccttggtcattagcg

SEQ ID NO: 7643 - DNA, 17 bp, Arabidopsis thaliana
aaccttggtctacatgt

SEQ ID NO: 7644 - DNA, 17 bp, Arabidopsis thaliana
aaccttggtgcaggtcg

SEQ ID NO: 7645 - DNA, 17 bp, Arabidopsis thaliana
aaccttgtagcagtacg

SEQ ID NO: 7646 - DNA, 17 bp, Arabidopsis thaliana
aaccttgtgccaggacc

SEQ ID NO: 7647 - DNA, 17 bp, Arabidopsis thaliana
aaccttgtggtcgtggg

SEQ ID NO: 7648 - DNA, 17 bp, Arabidopsis thaliana
aaccttgtggttctatc

SEQ ID NO: 7649 - DNA, 17 bp, Arabidopsis thaliana
aaccttgtgtcagaccc

SEQ ID NO: 7650 - DNA, 17 bp, Arabidopsis thaliana
aaccttgtgtcaggacc

SEQ ID NO: 7651 - DNA, 17 bp, Arabidopsis thaliana
aaccttgttcgtaacgc

SEQ ID NO: 7652 - DNA, 17 bp, Arabidopsis thaliana
aaccttgttgtggattt

SEQ ID NO: 7653 - DNA, 17 bp, Arabidopsis thaliana
aacctttaaacttcgcc

SEQ ID NO: 7654 - DNA, 17 bp, Arabidopsis thaliana
aacctttaagtttgcgt

SEQ ID NO: 7655 - DNA, 17 bp, Arabidopsis thaliana
aacctttaagtttgtgt

SEQ ID NO: 7656 - DNA, 17 bp, Arabidopsis thaliana
aacctttagaccgtgag

SEQ ID NO: 7657 - DNA, 17 bp, Arabidopsis thaliana
aacctttatggccttat

SEQ ID NO: 7658 - DNA, 17 bp, Arabidopsis thaliana
aacctttcaggattgtg

SEQ ID NO: 7659 - DNA, 17 bp, Arabidopsis thaliana
aacctttcattgtttgt

SEQ ID NO: 7660 - DNA, 17 bp, Arabidopsis thaliana
aacctttgaagtcgcct

SEQ ID NO: 7661 - DNA, 17 bp, Arabidopsis thaliana
aacctttgacgatttta

SEQ ID NO: 7662 - DNA, 17 bp, Arabidopsis thaliana
aacctttgatacgtagt

SEQ ID NO: 7663 - DNA, 17 bp, Arabidopsis thaliana
aacctttgatcgctgtc

SEQ ID NO: 7664 - DNA, 17 bp, Arabidopsis thaliana
aacctttgctttttggg

SEQ ID NO: 7665 - DNA, 17 bp, Arabidopsis thaliana
aacctttggacaacatc

SEQ ID NO: 7666 - DNA, 17 bp, Arabidopsis thaliana
aacctttggatcatggt

SEQ ID NO: 7667 - DNA, 17 bp, Arabidopsis thaliana
aacctttgggaagtgat

SEQ ID NO: 7668 - DNA, 17 bp, Arabidopsis thaliana
aacctttggggatggag

SEQ ID NO: 7669 - DNA, 17 bp, Arabidopsis thaliana
aacctttgtgctactac

SEQ ID NO: 7670 - DNA, 17 bp, Arabidopsis thaliana
aacctttgtgttttgtg

SEQ ID NO: 7671 - DNA, 17 bp, Arabidopsis thaliana
aaccttttgaaacccgc

SEQ ID NO: 7672 - DNA, 17 bp, Arabidopsis thaliana
aaccttttgacggcctt

SEQ ID NO: 7673 - DNA, 17 bp, Arabidopsis thaliana
aaccttttgacggcttt

SEQ ID NO: 7674 - DNA, 17 bp, Arabidopsis thaliana
aaccttttttgcaagtt

SEQ ID NO: 7675 - DNA, 17 bp, Arabidopsis thaliana
aacgaaaaaccccacgt

SEQ ID NO: 7676 - DNA, 17 bp, Arabidopsis thaliana
aacgaaaaacccgtgat

SEQ ID NO: 7677 - DNA, 17 bp, Arabidopsis thaliana
aacgaaaaaggcaattg

SEQ ID NO: 7678 - DNA, 17 bp, Arabidopsis thaliana
aacgaaaacttaacgac

SEQ ID NO: 7679 - DNA, 17 bp, Arabidopsis thaliana
aacgaaaaggcactttg

SEQ ID NO: 7680 - DNA, 17 bp, Arabidopsis thaliana
aacgaaaagtcaactct

SEQ ID NO: 7681 - DNA, 17 bp, Arabidopsis thaliana
aacgaaaatttaagagt

SEQ ID NO: 7682 - DNA, 17 bp, Arabidopsis thaliana
aacgaaacatagctcca

SEQ ID NO: 7683 - DNA, 17 bp, Arabidopsis thaliana
aacgaaaggtgcgtggt

SEQ ID NO: 7684 - DNA, 17 bp, Arabidopsis thaliana
aacgaaatccggtgcgt

SEQ ID NO: 7685 - DNA, 17 bp, Arabidopsis thaliana
aacgaaatgacgttcaa

SEQ ID NO: 7686 - DNA, 17 bp, Arabidopsis thaliana
aacgaaatgtgattgca

SEQ ID NO: 7687 - DNA, 17 bp, Arabidopsis thaliana
aacgaaatgttggtcat

SEQ ID NO: 7688 - DNA, 17 bp, Arabidopsis thaliana
aacgaaattaccttgct

SEQ ID NO: 7689 - DNA, 17 bp, Arabidopsis thaliana
aacgaaattgcccttga

SEQ ID NO: 7690 - DNA, 17 bp, Arabidopsis thaliana
aacgaacaactgcgaaa

SEQ ID NO: 7691 - DNA, 17 bp, Arabidopsis thaliana
aacgaacaacttttgat

SEQ ID NO: 7692 - DNA, 17 bp, Arabidopsis thaliana
aacgaacaacttttggt

SEQ ID NO: 7693 - DNA, 17 bp, Arabidopsis thaliana
aacgaacagaggcgata

SEQ ID NO: 7694 - DNA, 17 bp, Arabidopsis thaliana
aacgaacagatacaaag

SEQ ID NO: 7695 - DNA, 17 bp, Arabidopsis thaliana
aacgaacaggacctaag

SEQ ID NO: 7696 - DNA, 17 bp, Arabidopsis thaliana
aacgaacagggccaagg

SEQ ID NO: 7697 - DNA, 17 bp, Arabidopsis thaliana
aacgaacagggccataa

SEQ ID NO: 7698 - DNA, 17 bp, Arabidopsis thaliana
aacgaacagggccttac

SEQ ID NO: 7699 - DNA, 17 bp, Arabidopsis thaliana
aacgaacagttccgcat

SEQ ID NO: 7700 - DNA, 17 bp, Arabidopsis thaliana
aacgaacatgacctatg

SEQ ID NO: 7701 - DNA, 17 bp, Arabidopsis thaliana
aacgaacccaaagtcct

SEQ ID NO: 7702 - DNA, 17 bp, Arabidopsis thaliana
aacgaacccatgggcca

SEQ ID NO: 7703 - DNA, 17 bp, Arabidopsis thaliana
aacgaaccgacggggtc

SEQ ID NO: 7704 - DNA, 17 bp, Arabidopsis thaliana
aacgaacctgcggaagg

SEQ ID NO: 7705 - DNA, 17 bp, Arabidopsis thaliana
aacgaacgaatcttcga

SEQ ID NO: 7706 - DNA, 17 bp, Arabidopsis thaliana
aacgaacgagacctcaa

SEQ ID NO: 7707 - DNA, 17 bp, Arabidopsis thaliana
aacgaacgagacctcag

SEQ ID NO: 7708 - DNA, 17 bp, Arabidopsis thaliana
aacgaacgagtctacag

SEQ ID NO: 7709 - DNA, 17 bp, Arabidopsis thaliana
aacgaacgttgttgcgg

SEQ ID NO: 7710 - DNA, 17 bp, Arabidopsis thaliana
aacgaactgacaagaac

SEQ ID NO: 7711 - DNA, 17 bp, Arabidopsis thaliana
aacgaactgcagacaca

SEQ ID NO: 7712 - DNA, 17 bp, Arabidopsis thaliana
aacgaactgcagacacc

SEQ ID NO: 7713 - DNA, 17 bp, Arabidopsis thaliana
aacgaactgcagacact

SEQ ID NO: 7714 - DNA, 17 bp, Arabidopsis thaliana
aacgaagacaatggtta

SEQ ID NO: 7715 - DNA, 17 bp, Arabidopsis thaliana
aacgaagaccggtttga

SEQ ID NO: 7716 - DNA, 17 bp, Arabidopsis thaliana
aacgaagacgaagcggt

SEQ ID NO: 7717 - DNA, 17 bp, Arabidopsis thaliana
aacgaagactcttctgt

SEQ ID NO: 7718 - DNA, 17 bp, Arabidopsis thaliana
aacgaagactgtgatag

SEQ ID NO: 7719 - DNA, 17 bp, Arabidopsis thaliana
aacgaagcagtcaaatg

SEQ ID NO: 7720 - DNA, 17 bp, Arabidopsis thaliana
aacgaagcgctgcatgt

SEQ ID NO: 7721 - DNA, 17 bp, Arabidopsis thaliana
aacgaagcgtgcagcct

SEQ ID NO: 7722 - DNA, 17 bp, Arabidopsis thaliana
aacgaagggtagttaag

SEQ ID NO: 7723 - DNA, 17 bp, Arabidopsis thaliana
aacgaaggttactattg

SEQ ID NO: 7724 - DNA, 17 bp, Arabidopsis thaliana
aacgaagtacaattata

SEQ ID NO: 7725 - DNA, 17 bp, Arabidopsis thaliana
aacgaagtgactcaaat

SEQ ID NO: 7726 - DNA, 17 bp, Arabidopsis thaliana
aacgaagttggtcgtca

SEQ ID NO: 7727 - DNA, 17 bp, Arabidopsis thaliana
aacgaatcaagaattta

SEQ ID NO: 7728 - DNA, 17 bp, Arabidopsis thaliana
aacgaatcaagactttc

SEQ ID NO: 7729 - DNA, 17 bp, Arabidopsis thaliana
aacgaatctgatctgaa

SEQ ID NO: 7730 - DNA, 17 bp, Arabidopsis thaliana
aacgaatctggcgtgcc

SEQ ID NO: 7731 - DNA, 17 bp, Arabidopsis thaliana
aacgaatgataacggac

SEQ ID NO: 7732 - DNA, 17 bp, Arabidopsis thaliana
aacgaatggctactgct

SEQ ID NO: 7733 - DNA, 17 bp, Arabidopsis thaliana
aacgaatgttgcggtga

SEQ ID NO: 7734 - DNA, 17 bp, Arabidopsis thaliana
aacgaattcagactgtg

SEQ ID NO: 7735 - DNA, 17 bp, Arabidopsis thaliana
aacgacaacggctgtta

SEQ ID NO: 7736 - DNA, 17 bp, Arabidopsis thaliana
aacgacaagccctaatt

SEQ ID NO: 7737 - DNA, 17 bp, Arabidopsis thaliana
aacgacaaggcactgct

SEQ ID NO: 7738 - DNA, 17 bp, Arabidopsis thaliana
aacgacaatatcaaccg

SEQ ID NO: 7739 - DNA, 17 bp, Arabidopsis thaliana
aacgacacagagaccca

SEQ ID NO: 7740 - DNA, 17 bp, Arabidopsis thaliana
aacgacacgtgcctttg

SEQ ID NO: 7741 - DNA, 17 bp, Arabidopsis thaliana
aacgacacgtgtctctg

SEQ ID NO: 7742 - DNA, 17 bp, Arabidopsis thaliana
aacgacacttagtcacg

SEQ ID NO: 7743 - DNA, 17 bp, Arabidopsis thaliana
aacgacacttggttttt

SEQ ID NO: 7744 - DNA, 17 bp, Arabidopsis thaliana
aacgacagcgaccaaaa

SEQ ID NO: 7745 - DNA, 17 bp, Arabidopsis thaliana
aacgacagtctacgaag

SEQ ID NO: 7746 - DNA, 17 bp, Arabidopsis thaliana
aacgacatacttccgat

SEQ ID NO: 7747 - DNA, 17 bp, Arabidopsis thaliana
aacgacatcccgtttgt

SEQ ID NO: 7748 - DNA, 17 bp, Arabidopsis thaliana
aacgacatgattggtgt

SEQ ID NO: 7749 - DNA, 17 bp, Arabidopsis thaliana
aacgacatgccctaaat

SEQ ID NO: 7750 - DNA, 17 bp, Arabidopsis thaliana
aacgacatgtctatttt

SEQ ID NO: 7751 - DNA, 17 bp, Arabidopsis thaliana
aacgacatgtctgcttt

SEQ ID NO: 7752 - DNA, 17 bp, Arabidopsis thaliana
aacgacattgtgatagg

SEQ ID NO: 7753 - DNA, 17 bp, Arabidopsis thaliana
aacgacattgttcttgc

SEQ ID NO: 7754 - DNA, 17 bp, Arabidopsis thaliana
aacgaccaatcgcggtt

SEQ ID NO: 7755 - DNA, 17 bp, Arabidopsis thaliana
aacgaccaatcggaagc

SEQ ID NO: 7756 - DNA, 17 bp, Arabidopsis thaliana
aacgaccaggcttcatt

SEQ ID NO: 7757 - DNA, 17 bp, Arabidopsis thaliana
aacgaccagggatcagc

SEQ ID NO: 7758 - DNA, 17 bp, Arabidopsis thaliana
aacgaccatcgccggca

SEQ ID NO: 7759 - DNA, 17 bp, Arabidopsis thaliana
aacgaccatttcacgag

SEQ ID NO: 7760 - DNA, 17 bp, Arabidopsis thaliana
aacgacccagaaagcca

SEQ ID NO: 7761 - DNA, 17 bp, Arabidopsis thaliana
aacgaccccccccaccc

SEQ ID NO: 7762 - DNA, 17 bp, Arabidopsis thaliana
aacgacccccccccccc

SEQ ID NO: 7763 - DNA, 17 bp, Arabidopsis thaliana
aacgacccccgccaccc

SEQ ID NO: 7764 - DNA, 17 bp, Arabidopsis thaliana
aacgaccctcggcaacg

SEQ ID NO: 7765 - DNA, 17 bp, Arabidopsis thaliana
aacgacccttgctttag

SEQ ID NO: 7766 - DNA, 17 bp, Arabidopsis thaliana
aacgaccctttggttgg

SEQ ID NO: 7767 - DNA, 17 bp, Arabidopsis thaliana
aacgaccgacacggatg

SEQ ID NO: 7768 - DNA, 17 bp, Arabidopsis thaliana
aacgaccgacttttgct

SEQ ID NO: 7769 - DNA, 17 bp, Arabidopsis thaliana
aacgaccgcatacgaag

SEQ ID NO: 7770 - DNA, 17 bp, Arabidopsis thaliana
aacgaccgtaagttttg

SEQ ID NO: 7771 - DNA, 17 bp, Arabidopsis thaliana
aacgaccgtgatgtatt

SEQ ID NO: 7772 - DNA, 17 bp, Arabidopsis thaliana
aacgaccgttaactagt

SEQ ID NO: 7773 - DNA, 17 bp, Arabidopsis thaliana
aacgaccgttgttcggc

SEQ ID NO: 7774 - DNA, 17 bp, Arabidopsis thaliana
aacgaccgttgttctgc

SEQ ID NO: 7775 - DNA, 17 bp, Arabidopsis thaliana
aacgacctgccaaaccc

SEQ ID NO: 7776 - DNA, 17 bp, Arabidopsis thaliana
aacgacctgtgtaccat

SEQ ID NO: 7777 - DNA, 17 bp, Arabidopsis thaliana
aacgacctgtgtccccc

SEQ ID NO: 7778 - DNA, 17 bp, Arabidopsis thaliana
aacgacctgtgtgccat

SEQ ID NO: 7779 - DNA, 17 bp, Arabidopsis thaliana
aacgacctgtgtgccct

SEQ ID NO: 7780 - DNA, 17 bp, Arabidopsis thaliana
aacgaccttctctcttc

SEQ ID NO: 7781 - DNA, 17 bp, Arabidopsis thaliana
aacgacgaccagagtct

SEQ ID NO: 7782 - DNA, 17 bp, Arabidopsis thaliana
aacgacgaccgggtggg

SEQ ID NO: 7783 - DNA, 17 bp, Arabidopsis thaliana
aacgacgaccgggttag

SEQ ID NO: 7784 - DNA, 17 bp, Arabidopsis thaliana
aacgacgaccgggttgg

SEQ ID NO: 7785 - DNA, 17 bp, Arabidopsis thaliana
aacgacgacgaagcggt

SEQ ID NO: 7786 - DNA, 17 bp, Arabidopsis thaliana
aacgacgacgtatctgg

SEQ ID NO: 7787 - DNA, 17 bp, Arabidopsis thaliana
aacgacgactgggttgg

SEQ ID NO: 7788 - DNA, 17 bp, Arabidopsis thaliana
aacgacgatctttggcc

SEQ ID NO: 7789 - DNA, 17 bp, Arabidopsis thaliana
aacgacgccctacaacg

SEQ ID NO: 7790 - DNA, 17 bp, Arabidopsis thaliana
aacgacgccgttttagg

SEQ ID NO: 7791 - DNA, 17 bp, Arabidopsis thaliana
aacgacgccgttttgga

SEQ ID NO: 7792 - DNA, 17 bp, Arabidopsis thaliana
aacgacgccgttttggg

SEQ ID NO: 7793 - DNA, 17 bp, Arabidopsis thaliana
aacgacgcgggttcgat

SEQ ID NO: 7794 - DNA, 17 bp, Arabidopsis thaliana
aacgacgctctcttgac

SEQ ID NO: 7795 - DNA, 17 bp, Arabidopsis thaliana
aacgacgctctgcaacg

SEQ ID NO: 7796 - DNA, 17 bp, Arabidopsis thaliana
aacgacgcttggagata

SEQ ID NO: 7797 - DNA, 17 bp, Arabidopsis thaliana
aacgacggaacggcgga

SEQ ID NO: 7798 - DNA, 17 bp, Arabidopsis thaliana
aacgacggccacgtcat

SEQ ID NO: 7799 - DNA, 17 bp, Arabidopsis thaliana
aacgacggcgagtggca

SEQ ID NO: 7800 - DNA, 17 bp, Arabidopsis thaliana
aacgacggcgggtgaca

SEQ ID NO: 7801 - DNA, 17 bp, Arabidopsis thaliana
aacgacggcgggtggca

SEQ ID NO: 7802 - DNA, 17 bp, Arabidopsis thaliana
aacgacggtaagtcagc

SEQ ID NO: 7803 - DNA, 17 bp, Arabidopsis thaliana
aacgacgtattgatttt

SEQ ID NO: 7804 - DNA, 17 bp, Arabidopsis thaliana
aacgacgtcgcttcgat

SEQ ID NO: 7805 - DNA, 17 bp, Arabidopsis thaliana
aacgacgtcgtcttttt

SEQ ID NO: 7806 - DNA, 17 bp, Arabidopsis thaliana
aacgacgtcgttttcca

SEQ ID NO: 7807 - DNA, 17 bp, Arabidopsis thaliana
aacgacgtgcccaaaat

SEQ ID NO: 7808 - DNA, 17 bp, Arabidopsis thaliana
aacgactaatgcgggat

SEQ ID NO: 7809 - DNA, 17 bp, Arabidopsis thaliana
aacgactacagggttac

SEQ ID NO: 7810 - DNA, 17 bp, Arabidopsis thaliana
aacgactatcccggggg

SEQ ID NO: 7811 - DNA, 17 bp, Arabidopsis thaliana
aacgactattcggcgac

SEQ ID NO: 7812 - DNA, 17 bp, Arabidopsis thaliana
aacgactatttggcgac

SEQ ID NO: 7813 - DNA, 17 bp, Arabidopsis thaliana
aacgactcacggcaacg

SEQ ID NO: 7814 - DNA, 17 bp, Arabidopsis thaliana
aacgactcatttggatg

SEQ ID NO: 7815 - DNA, 17 bp, Arabidopsis thaliana
aacgactcccggcaacg

SEQ ID NO: 7816 - DNA, 17 bp, Arabidopsis thaliana
aacgactcggcaacgga

SEQ ID NO: 7817 - DNA, 17 bp, Arabidopsis thaliana
aacgactctaagaagcc

SEQ ID NO: 7818 - DNA, 17 bp, Arabidopsis thaliana
aacgactctaggaaacg

SEQ ID NO: 7819 - DNA, 17 bp, Arabidopsis thaliana
aacgactctaggcaacg

SEQ ID NO: 7820 - DNA, 17 bp, Arabidopsis thaliana
aacgactctatctttgt

SEQ ID NO: 7821 - DNA, 17 bp, Arabidopsis thaliana
aacgactctcgacaacg

SEQ ID NO: 7822 - DNA, 17 bp, Arabidopsis thaliana
aacgactctcgccaacg

SEQ ID NO: 7823 - DNA, 17 bp, Arabidopsis thaliana
aacgactctcggaaacg

SEQ ID NO: 7824 - DNA, 17 bp, Arabidopsis thaliana
aacgactctcggacgga

SEQ ID NO: 7825 - DNA, 17 bp, Arabidopsis thaliana
aacgactctcggcaaca

SEQ ID NO: 7826 - DNA, 17 bp, Arabidopsis thaliana
aacgactctcggcaacc

SEQ ID NO: 7827 - DNA, 17 bp, Arabidopsis thaliana
aacgactctcggcaacg

SEQ ID NO: 7828 - DNA, 17 bp, Arabidopsis thaliana
aacgactctcggcaact

SEQ ID NO: 7829 - DNA, 17 bp, Arabidopsis thaliana
aacgactctcggcaatg

SEQ ID NO: 7830 - DNA, 17 bp, Arabidopsis thaliana
aacgactctcggcacgg

SEQ ID NO: 7831 - DNA, 17 bp, Arabidopsis thaliana
aacgactctcggcatgg

SEQ ID NO: 7832 - DNA, 17 bp, Arabidopsis thaliana
aacgactctcgggaaca

SEQ ID NO: 7833 - DNA, 17 bp, Arabidopsis thaliana
aacgactctcggtaacg

SEQ ID NO: 7834 - DNA, 17 bp, Arabidopsis thaliana
aacgactctcggtgtca

SEQ ID NO: 7835 - DNA, 17 bp, Arabidopsis thaliana
aacgactctcgtcaacg

SEQ ID NO: 7836 - DNA, 17 bp, Arabidopsis thaliana
aacgactctctcaacgg

SEQ ID NO: 7837 - DNA, 17 bp, Arabidopsis thaliana
aacgactctggcaacga

SEQ ID NO: 7838 - DNA, 17 bp, Arabidopsis thaliana
aacgactctggcaacgg

SEQ ID NO: 7839 - DNA, 17 bp, Arabidopsis thaliana
aacgactctgttttgcc

SEQ ID NO: 7840 - DNA, 17 bp, Arabidopsis thaliana
aacgactcttggcaacg

SEQ ID NO: 7841 - DNA, 17 bp, Arabidopsis thaliana
aacgactcttggcgacg

SEQ ID NO: 7842 - DNA, 17 bp, Arabidopsis thaliana
aacgactgagtaaatgt

SEQ ID NO: 7843 - DNA, 17 bp, Arabidopsis thaliana
aacgactgcaacgtttg

SEQ ID NO: 7844 - DNA, 17 bp, Arabidopsis thaliana
aacgactgctacctatt

SEQ ID NO: 7845 - DNA, 17 bp, Arabidopsis thaliana
aacgactgctgttccca

SEQ ID NO: 7846 - DNA, 17 bp, Arabidopsis thaliana
aacgactggttgagcgt

SEQ ID NO: 7847 - DNA, 17 bp, Arabidopsis thaliana
aacgactgtgtaccgcg

SEQ ID NO: 7848 - DNA, 17 bp, Arabidopsis thaliana
aacgactgtgtggagtc

SEQ ID NO: 7849 - DNA, 17 bp, Arabidopsis thaliana
aacgactgtgttttagt

SEQ ID NO: 7850 - DNA, 17 bp, Arabidopsis thaliana
aacgactgttgttgcgt

SEQ ID NO: 7851 - DNA, 17 bp, Arabidopsis thaliana
aacgactgtttcaacca

SEQ ID NO: 7852 - DNA, 17 bp, Arabidopsis thaliana
aacgactgtttttgtat

SEQ ID NO: 7853 - DNA, 17 bp, Arabidopsis thaliana
aacgacttaccaagcca

SEQ ID NO: 7854 - DNA, 17 bp, Arabidopsis thaliana
aacgacttagctcagtg

SEQ ID NO: 7855 - DNA, 17 bp, Arabidopsis thaliana
aacgacttctggacacg

SEQ ID NO: 7856 - DNA, 17 bp, Arabidopsis thaliana
aacgacttgggcgctgt

SEQ ID NO: 7857 - DNA, 17 bp, Arabidopsis thaliana
aacgactttcaagttcg

SEQ ID NO: 7858 - DNA, 17 bp, Arabidopsis thaliana
aacgactttcggcaaca

SEQ ID NO: 7859 - DNA, 17 bp, Arabidopsis thaliana
aacgactttcggcaacc

SEQ ID NO: 7860 - DNA, 17 bp, Arabidopsis thaliana
aacgactttcggcaacg

SEQ ID NO: 7861 - DNA, 17 bp, Arabidopsis thaliana
aacgactttctctcttc

SEQ ID NO: 7862 - DNA, 17 bp, Arabidopsis thaliana
aacgacttttgagtcca

SEQ ID NO: 7863 - DNA, 17 bp, Arabidopsis thaliana
aacgacttttggtgtag

SEQ ID NO: 7864 - DNA, 17 bp, Arabidopsis thaliana
aacgagaaagcatagtt

SEQ ID NO: 7865 - DNA, 17 bp, Arabidopsis thaliana
aacgagaagtacatatg

SEQ ID NO: 7866 - DNA, 17 bp, Arabidopsis thaliana
aacgagaagtacatctg

SEQ ID NO: 7867 - DNA, 17 bp, Arabidopsis thaliana
aacgagacaccatttgt

SEQ ID NO: 7868 - DNA, 17 bp, Arabidopsis thaliana
aacgagacacgtccgtg

SEQ ID NO: 7869 - DNA, 17 bp, Arabidopsis thaliana
aacgagaccgagtatct

SEQ ID NO: 7870 - DNA, 17 bp, Arabidopsis thaliana
aacgagacctcagccaa

SEQ ID NO: 7871 - DNA, 17 bp, Arabidopsis thaliana
aacgagacctcagccta

SEQ ID NO: 7872 - DNA, 17 bp, Arabidopsis thaliana
aacgagacgtcgctgcc

SEQ ID NO: 7873 - DNA, 17 bp, Arabidopsis thaliana
aacgagagcgaatggac

SEQ ID NO: 7874 - DNA, 17 bp, Arabidopsis thaliana
aacgagagggctttgct

SEQ ID NO: 7875 - DNA, 17 bp, Arabidopsis thaliana
aacgagagtaaatgaca

SEQ ID NO: 7876 - DNA, 17 bp, Arabidopsis thaliana
aacgagagtcgtcggga

SEQ ID NO: 7877 - DNA, 17 bp, Arabidopsis thaliana
aacgagatccctgtcga

SEQ ID NO: 7878 - DNA, 17 bp, Arabidopsis thaliana
aacgagatcgggatctt

SEQ ID NO: 7879 - DNA, 17 bp, Arabidopsis thaliana
aacgagattcccactgt

SEQ ID NO: 7880 - DNA, 17 bp, Arabidopsis thaliana
aacgagcaggaacctac

SEQ ID NO: 7881 - DNA, 17 bp, Arabidopsis thaliana
aacgagcgaccgagtga

SEQ ID NO: 7882 - DNA, 17 bp, Arabidopsis thaliana
aacgagctcaaggtcgg

SEQ ID NO: 7883 - DNA, 17 bp, Arabidopsis thaliana
aacgagctgtgttggtc

SEQ ID NO: 7884 - DNA, 17 bp, Arabidopsis thaliana
aacgagctgttggtcca

SEQ ID NO: 7885 - DNA, 17 bp, Arabidopsis thaliana
aacgagcttagctggtg

SEQ ID NO: 7886 - DNA, 17 bp, Arabidopsis thaliana
aacgagcttggttgtgc

SEQ ID NO: 7887 - DNA, 17 bp, Arabidopsis thaliana
aacgagcttttgcttta

SEQ ID NO: 7888 - DNA, 17 bp, Arabidopsis thaliana
aacgagcttttgctttc

SEQ ID NO: 7889 - DNA, 17 bp, Arabidopsis thaliana
aacgaggactctgatag

SEQ ID NO: 7890 - DNA, 17 bp, Arabidopsis thaliana
aacgaggactctggtca

SEQ ID NO: 7891 - DNA, 17 bp, Arabidopsis thaliana
aacgaggactcttgtca

SEQ ID NO: 7892 - DNA, 17 bp, Arabidopsis thaliana
aacgaggactgcgatct

SEQ ID NO: 7893 - DNA, 17 bp, Arabidopsis thaliana
aacgaggactgctatag

SEQ ID NO: 7894 - DNA, 17 bp, Arabidopsis thaliana
aacgaggagttgttctg

SEQ ID NO: 7895 - DNA, 17 bp, Arabidopsis thaliana
aacgaggatccattgga

SEQ ID NO: 7896 - DNA, 17 bp, Arabidopsis thaliana
aacgaggcagcaaaaag

SEQ ID NO: 7897 - DNA, 17 bp, Arabidopsis thaliana
aacgaggctcctctatt

SEQ ID NO: 7898 - DNA, 17 bp, Arabidopsis thaliana
aacgaggctctgctcat

SEQ ID NO: 7899 - DNA, 17 bp, Arabidopsis thaliana
aacgaggcttggctgta

SEQ ID NO: 7900 - DNA, 17 bp, Arabidopsis thaliana
aacgagggaaagtttct

SEQ ID NO: 7901 - DNA, 17 bp, Arabidopsis thaliana
aacgagggagacttggt

SEQ ID NO: 7902 - DNA, 17 bp, Arabidopsis thaliana
aacgagggcacgtctgc

SEQ ID NO: 7903 - DNA, 17 bp, Arabidopsis thaliana
aacgagggcactgagct

SEQ ID NO: 7904 - DNA, 17 bp, Arabidopsis thaliana
aacgagggcgctgagtt

SEQ ID NO: 7905 - DNA, 17 bp, Arabidopsis thaliana
aacgaggtatccgtgct

SEQ ID NO: 7906 - DNA, 17 bp, Arabidopsis thaliana
aacgagtatttccagct

SEQ ID NO: 7907 - DNA, 17 bp, Arabidopsis thaliana
aacgagtcaccgctgtg

SEQ ID NO: 7908 - DNA, 17 bp, Arabidopsis thaliana
aacgagtctcacggtga

SEQ ID NO: 7909 - DNA, 17 bp, Arabidopsis thaliana
aacgagtcttcctgctg

SEQ ID NO: 7910 - DNA, 17 bp, Arabidopsis thaliana
aacgagtctttccacgt

SEQ ID NO: 7911 - DNA, 17 bp, Arabidopsis thaliana
aacgagtgcaacgtttg

SEQ ID NO: 7912 - DNA, 17 bp, Arabidopsis thaliana
aacgagttcacaccttg

SEQ ID NO: 7913 - DNA, 17 bp, Arabidopsis thaliana
aacgagttcacactttg

SEQ ID NO: 7914 - DNA, 17 bp, Arabidopsis thaliana
aacgagttcacgttcca

SEQ ID NO: 7915 - DNA, 17 bp, Arabidopsis thaliana
aacgagttcgattgtcc

SEQ ID NO: 7916 - DNA, 17 bp, Arabidopsis thaliana
aacgagttcgattgttc

SEQ ID NO: 7917 - DNA, 17 bp, Arabidopsis thaliana
aacgagttgactcagct

SEQ ID NO: 7918 - DNA, 17 bp, Arabidopsis thaliana
aacgataaaaaccaagt

SEQ ID NO: 7919 - DNA, 17 bp, Arabidopsis thaliana
aacgataacggtcctaa

SEQ ID NO: 7920 - DNA, 17 bp, Arabidopsis thaliana
aacgataaggcagtctt

SEQ ID NO: 7921 - DNA, 17 bp, Arabidopsis thaliana
aacgataatcttgtgtc

SEQ ID NO: 7922 - DNA, 17 bp, Arabidopsis thaliana
aacgatagacttgacgc

SEQ ID NO: 7923 - DNA, 17 bp, Arabidopsis thaliana
aacgatagagccacagc

SEQ ID NO: 7924 - DNA, 17 bp, Arabidopsis thaliana
aacgatagagccacagt

SEQ ID NO: 7925 - DNA, 17 bp, Arabidopsis thaliana
aacgatagtcggttttg

SEQ ID NO: 7926 - DNA, 17 bp, Arabidopsis thaliana
aacgatatgaatctgct

SEQ ID NO: 7927 - DNA, 17 bp, Arabidopsis thaliana
aacgatatgactcaaat

SEQ ID NO: 7928 - DNA, 17 bp, Arabidopsis thaliana
aacgatatttgggaact

SEQ ID NO: 7929 - DNA, 17 bp, Arabidopsis thaliana
aacgatcagatgttcac

SEQ ID NO: 7930 - DNA, 17 bp, Arabidopsis thaliana
aacgatcagatgtttac

SEQ ID NO: 7931 - DNA, 17 bp, Arabidopsis thaliana
aacgatcaggtgttcac

SEQ ID NO: 7932 - DNA, 17 bp, Arabidopsis thaliana
aacgatcaggtgtttac

SEQ ID NO: 7933 - DNA, 17 bp, Arabidopsis thaliana
aacgatcagtttgcgtt

SEQ ID NO: 7934 - DNA, 17 bp, Arabidopsis thaliana
aacgatccatttggttg

SEQ ID NO: 7935 - DNA, 17 bp, Arabidopsis thaliana
aacgatcggatctttac

SEQ ID NO: 7936 - DNA, 17 bp, Arabidopsis thaliana
aacgatcggatgtttac

SEQ ID NO: 7937 - DNA, 17 bp, Arabidopsis thaliana
aacgatctctctcctct

SEQ ID NO: 7938 - DNA, 17 bp, Arabidopsis thaliana
aacgatctggctgtgct

SEQ ID NO: 7939 - DNA, 17 bp, Arabidopsis thaliana
aacgatctgggcactgt

SEQ ID NO: 7940 - DNA, 17 bp, Arabidopsis thaliana
aacgatcttcgccacag

SEQ ID NO: 7941 - DNA, 17 bp, Arabidopsis thaliana
aacgatctttgactcgt

SEQ ID NO: 7942 - DNA, 17 bp, Arabidopsis thaliana
aacgatcttttaagcta

SEQ ID NO: 7943 - DNA, 17 bp, Arabidopsis thaliana
aacgatgaaagcctata

SEQ ID NO: 7944 - DNA, 17 bp, Arabidopsis thaliana
aacgatgacctttttga

SEQ ID NO: 7945 - DNA, 17 bp, Arabidopsis thaliana
aacgatgactggtggat

SEQ ID NO: 7946 - DNA, 17 bp, Arabidopsis thaliana
aacgatgagcgatttgg

SEQ ID NO: 7947 - DNA, 17 bp, Arabidopsis thaliana
aacgatgagtcgattta

SEQ ID NO: 7948 - DNA, 17 bp, Arabidopsis thaliana
aacgatgagtcgatttg

SEQ ID NO: 7949 - DNA, 17 bp, Arabidopsis thaliana
aacgatgagtcgatttt

SEQ ID NO: 7950 - DNA, 17 bp, Arabidopsis thaliana
aacgatgagtggatttg

SEQ ID NO: 7951 - DNA, 17 bp, Arabidopsis thaliana
aacgatgatgtccagtt

SEQ ID NO: 7952 - DNA, 17 bp, Arabidopsis thaliana
aacgatgattccaacta

SEQ ID NO: 7953 - DNA, 17 bp, Arabidopsis thaliana
aacgatgccgacaaggg

SEQ ID NO: 7954 - DNA, 17 bp, Arabidopsis thaliana
aacgatgccgaccagag

SEQ ID NO: 7955 - DNA, 17 bp, Arabidopsis thaliana
aacgatgccgaccaggg

SEQ ID NO: 7956 - DNA, 17 bp, Arabidopsis thaliana
aacgatgccgaccagtg

SEQ ID NO: 7957 - DNA, 17 bp, Arabidopsis thaliana
aacgatgcgtttgcggg

SEQ ID NO: 7958 - DNA, 17 bp, Arabidopsis thaliana
aacgatgctgatcaggg

SEQ ID NO: 7959 - DNA, 17 bp, Arabidopsis thaliana
aacgatggagaacaaac

SEQ ID NO: 7960 - DNA, 17 bp, Arabidopsis thaliana
aacgatggagatagaga

SEQ ID NO: 7961 - DNA, 17 bp, Arabidopsis thaliana
aacgatggctgtgatgg

SEQ ID NO: 7962 - DNA, 17 bp, Arabidopsis thaliana
aacgatgtacaattata

SEQ ID NO: 7963 - DNA, 17 bp, Arabidopsis thaliana
aacgatgtacaattgag

SEQ ID NO: 7964 - DNA, 17 bp, Arabidopsis thaliana
aacgatgtatgtagtcc

SEQ ID NO: 7965 - DNA, 17 bp, Arabidopsis thaliana
aacgatgtctactagcc

SEQ ID NO: 7966 - DNA, 17 bp, Arabidopsis thaliana
aacgatgttagaccggt

SEQ ID NO: 7967 - DNA, 17 bp, Arabidopsis thaliana
aacgattaccagaagat

SEQ ID NO: 7968 - DNA, 17 bp, Arabidopsis thaliana
aacgattacggggtttg

SEQ ID NO: 7969 - DNA, 17 bp, Arabidopsis thaliana
aacgattagtttggtgt

SEQ ID NO: 7970 - DNA, 17 bp, Arabidopsis thaliana
aacgattatttgcttgg

SEQ ID NO: 7971 - DNA, 17 bp, Arabidopsis thaliana
aacgattcattctgtgg

SEQ ID NO: 7972 - DNA, 17 bp, Arabidopsis thaliana
aacgattccaagtgcgg

SEQ ID NO: 7973 - DNA, 17 bp, Arabidopsis thaliana
aacgattccagttttca

SEQ ID NO: 7974 - DNA, 17 bp, Arabidopsis thaliana
aacgattccatattcgg

SEQ ID NO: 7975 - DNA, 17 bp, Arabidopsis thaliana
aacgattcccgattggc

SEQ ID NO: 7976 - DNA, 17 bp, Arabidopsis thaliana
aacgattcgatctgtta

SEQ ID NO: 7977 - DNA, 17 bp, Arabidopsis thaliana
aacgattcgctttgttc

SEQ ID NO: 7978 - DNA, 17 bp, Arabidopsis thaliana
aacgattcgtcttctga

SEQ ID NO: 7979 - DNA, 17 bp, Arabidopsis thaliana
aacgattctcattttcc

SEQ ID NO: 7980 - DNA, 17 bp, Arabidopsis thaliana
aacgattctggtcagtt

SEQ ID NO: 7981 - DNA, 17 bp, Arabidopsis thaliana
aacgattctgttagggt

SEQ ID NO: 7982 - DNA, 17 bp, Arabidopsis thaliana
aacgattgacttgacat

SEQ ID NO: 7983 - DNA, 17 bp, Arabidopsis thaliana
aacgattgcagggttcg

SEQ ID NO: 7984 - DNA, 17 bp, Arabidopsis thaliana
aacgattggaatttttt

SEQ ID NO: 7985 - DNA, 17 bp, Arabidopsis thaliana
aacgattgtggccagat

SEQ ID NO: 7986 - DNA, 17 bp, Arabidopsis thaliana
aacgattgtgggttcgt

SEQ ID NO: 7987 - DNA, 17 bp, Arabidopsis thaliana
aacgatttctcagggtc

SEQ ID NO: 7988 - DNA, 17 bp, Arabidopsis thaliana
aacgatttgtgtcagtg

SEQ ID NO: 7989 - DNA, 17 bp, Arabidopsis thaliana
aacgcaaaatgtgcccg

SEQ ID NO: 7990 - DNA, 17 bp, Arabidopsis thaliana
aacgcaacaaactcccc

SEQ ID NO: 7991 - DNA, 17 bp, Arabidopsis thaliana
aacgcaaccgcaaccgc

SEQ ID NO: 7992 - DNA, 17 bp, Arabidopsis thaliana
aacgcaactgtttggac

SEQ ID NO: 7993 - DNA, 17 bp, Arabidopsis thaliana
aacgcaagctgcttatt

SEQ ID NO: 7994 - DNA, 17 bp, Arabidopsis thaliana
aacgcaagttcccaccc

SEQ ID NO: 7995 - DNA, 17 bp, Arabidopsis thaliana
aacgcaagttgcgcccc

SEQ ID NO: 7996 - DNA, 17 bp, Arabidopsis thaliana
aacgcaagttgcgctcc

SEQ ID NO: 7997 - DNA, 17 bp, Arabidopsis thaliana
aacgcaagttgcgctgc

SEQ ID NO: 7998 - DNA, 17 bp, Arabidopsis thaliana
aacgcaatcgcagagca

SEQ ID NO: 7999 - DNA, 17 bp, Arabidopsis thaliana
aacgcaatcgtttggac

SEQ ID NO: 8000 - DNA, 17 bp, Arabidopsis thaliana
aacgcaatgtgattcct

SEQ ID NO: 8001 - DNA, 17 bp, Arabidopsis thaliana
aacgcaatgtgatttct

SEQ ID NO: 8002 - DNA, 17 bp, Arabidopsis thaliana
aacgcaccacgtcatcg

SEQ ID NO: 8003 - DNA, 17 bp, Arabidopsis thaliana
aacgcaccatcagtaat

SEQ ID NO: 8004 - DNA, 17 bp, Arabidopsis thaliana
aacgcaccgcactatga

SEQ ID NO: 8005 - DNA, 17 bp, Arabidopsis thaliana
aacgcacgtctgcctag

SEQ ID NO: 8006 - DNA, 17 bp, Arabidopsis thaliana
aacgcacgtctgcctgg

SEQ ID NO: 8007 - DNA, 17 bp, Arabidopsis thaliana
aacgcacgtcttcctgg

SEQ ID NO: 8008 - DNA, 17 bp, Arabidopsis thaliana
aacgcactcagacttta

SEQ ID NO: 8009 - DNA, 17 bp, Arabidopsis thaliana
aacgcacttcgccatcc

SEQ ID NO: 8010 - DNA, 17 bp, Arabidopsis thaliana
aacgcagaatgtctcgc

SEQ ID NO: 8011 - DNA, 17 bp, Arabidopsis thaliana
aacgcagatttgtggtt

SEQ ID NO: 8012 - DNA, 17 bp, Arabidopsis thaliana
aacgcagccagtaatag

SEQ ID NO: 8013 - DNA, 17 bp, Arabidopsis thaliana
aacgcagcgggtgcggt

SEQ ID NO: 8014 - DNA, 17 bp, Arabidopsis thaliana
aacgcagcggtgggctt

SEQ ID NO: 8015 - DNA, 17 bp, Arabidopsis thaliana
aacgcagcgtttgcgat

SEQ ID NO: 8016 - DNA, 17 bp, Arabidopsis thaliana
aacgcagcgtttgcggt

SEQ ID NO: 8017 - DNA, 17 bp, Arabidopsis thaliana
aacgcagctgagaaaac

SEQ ID NO: 8018 - DNA, 17 bp, Arabidopsis thaliana
aacgcaggtctgcatag

SEQ ID NO: 8019 - DNA, 17 bp, Arabidopsis thaliana
aacgcaggtgtcctaag

SEQ ID NO: 8020 - DNA, 17 bp, Arabidopsis thaliana
aacgcagtatgcggaac

SEQ ID NO: 8021 - DNA, 17 bp, Arabidopsis thaliana
aacgcagtcttgcgtac

SEQ ID NO: 8022 - DNA, 17 bp, Arabidopsis thaliana
aacgcagtgcctacatt

SEQ ID NO: 8023 - DNA, 17 bp, Arabidopsis thaliana
aacgcatcctgtagatg

SEQ ID NO: 8024 - DNA, 17 bp, Arabidopsis thaliana
aacgcatgaggtgtgtg

SEQ ID NO: 8025 - DNA, 17 bp, Arabidopsis thaliana
aacgcatgtggctttgt

SEQ ID NO: 8026 - DNA, 17 bp, Arabidopsis thaliana
aacgcattagccgtagt

SEQ ID NO: 8027 - DNA, 17 bp, Arabidopsis thaliana
aacgcattcaaatttgg

SEQ ID NO: 8028 - DNA, 17 bp, Arabidopsis thaliana
aacgcattcgcgcccca

SEQ ID NO: 8029 - DNA, 17 bp, Arabidopsis thaliana
aacgcattgtgaacatc

SEQ ID NO: 8030 - DNA, 17 bp, Arabidopsis thaliana
aacgcattgtttggttc

SEQ ID NO: 8031 - DNA, 17 bp, Arabidopsis thaliana
aacgcatttgcgcccca

SEQ ID NO: 8032 - DNA, 17 bp, Arabidopsis thaliana
aacgccaaccacgtttt

SEQ ID NO: 8033 - DNA, 17 bp, Arabidopsis thaliana
aacgccaatcctctgtt

SEQ ID NO: 8034 - DNA, 17 bp, Arabidopsis thaliana
aacgccaatgcggcaac

SEQ ID NO: 8035 - DNA, 17 bp, Arabidopsis thaliana
aacgccagattatttga

SEQ ID NO: 8036 - DNA, 17 bp, Arabidopsis thaliana
aacgccatagcgatgga

SEQ ID NO: 8037 - DNA, 17 bp, Arabidopsis thaliana
aacgccatcacttgctc

SEQ ID NO: 8038 - DNA, 17 bp, Arabidopsis thaliana
aacgccatgatttctgt

SEQ ID NO: 8039 - DNA, 17 bp, Arabidopsis thaliana
aacgccattatcagatt

SEQ ID NO: 8040 - DNA, 17 bp, Arabidopsis thaliana
aacgccatttgtcatat

SEQ ID NO: 8041 - DNA, 17 bp, Arabidopsis thaliana
aacgcccgtgcccacct

SEQ ID NO: 8042 - DNA, 17 bp, Arabidopsis thaliana
aacgcccgtgcccatta

SEQ ID NO: 8043 - DNA, 17 bp, Arabidopsis thaliana
aacgcccgttaactcgg

SEQ ID NO: 8044 - DNA, 17 bp, Arabidopsis thaliana
aacgccctgttcgtttc

SEQ ID NO: 8045 - DNA, 17 bp, Arabidopsis thaliana
aacgccgaagtcagtcg

SEQ ID NO: 8046 - DNA, 17 bp, Arabidopsis thaliana
aacgccgacttctcttc

SEQ ID NO: 8047 - DNA, 17 bp, Arabidopsis thaliana
aacgccgcagttttttc

SEQ ID NO: 8048 - DNA, 17 bp, Arabidopsis thaliana
aacgccgcatacgaagt

SEQ ID NO: 8049 - DNA, 17 bp, Arabidopsis thaliana
aacgccgccgacttgat

SEQ ID NO: 8050 - DNA, 17 bp, Arabidopsis thaliana
aacgccggaaggagaag

SEQ ID NO: 8051 - DNA, 17 bp, Arabidopsis thaliana
aacgccggaatttgacc

SEQ ID NO: 8052 - DNA, 17 bp, Arabidopsis thaliana
aacgccggacaccatct

SEQ ID NO: 8053 - DNA, 17 bp, Arabidopsis thaliana
aacgccggagtcaactg

SEQ ID NO: 8054 - DNA, 17 bp, Arabidopsis thaliana
aacgccggagttagtcg

SEQ ID NO: 8055 - DNA, 17 bp, Arabidopsis thaliana
aacgccggatttcgtct

SEQ ID NO: 8056 - DNA, 17 bp, Arabidopsis thaliana
aacgccggccattcggt

SEQ ID NO: 8057 - DNA, 17 bp, Arabidopsis thaliana
aacgccggcgagtatcg

SEQ ID NO: 8058 - DNA, 17 bp, Arabidopsis thaliana
aacgccggtccgccttt

SEQ ID NO: 8059 - DNA, 17 bp, Arabidopsis thaliana
aacgccggtctgcaggt

SEQ ID NO: 8060 - DNA, 17 bp, Arabidopsis thaliana
aacgccggtgaacgcct

SEQ ID NO: 8061 - DNA, 17 bp, Arabidopsis thaliana
aacgccgtagcctccgg

SEQ ID NO: 8062 - DNA, 17 bp, Arabidopsis thaliana
aacgccgtcccgtcaaa

SEQ ID NO: 8063 - DNA, 17 bp, Arabidopsis thaliana
aacgccgttgagtagct

SEQ ID NO: 8064 - DNA, 17 bp, Arabidopsis thaliana
aacgccgttgagtcgct

SEQ ID NO: 8065 - DNA, 17 bp, Arabidopsis thaliana
aacgccgttgagtcgtt

SEQ ID NO: 8066 - DNA, 17 bp, Arabidopsis thaliana
aacgccgttgtgtcact

SEQ ID NO: 8067 - DNA, 17 bp, Arabidopsis thaliana
aacgccgttttgcctct

SEQ ID NO: 8068 - DNA, 17 bp, Arabidopsis thaliana
aacgcctacgctagacg

SEQ ID NO: 8069 - DNA, 17 bp, Arabidopsis thaliana
aacgcctaggttccgcc

SEQ ID NO: 8070 - DNA, 17 bp, Arabidopsis thaliana
aacgcctattggaagaa

SEQ ID NO: 8071 - DNA, 17 bp, Arabidopsis thaliana
aacgcctctaagtcaga

SEQ ID NO: 8072 - DNA, 17 bp, Arabidopsis thaliana
aacgcctgacactttat

SEQ ID NO: 8073 - DNA, 17 bp, Arabidopsis thaliana
aacgcctgatgcactag

SEQ ID NO: 8074 - DNA, 17 bp, Arabidopsis thaliana
aacgcctgctaacgcct

SEQ ID NO: 8075 - DNA, 17 bp, Arabidopsis thaliana
aacgcctgttatcgact

SEQ ID NO: 8076 - DNA, 17 bp, Arabidopsis thaliana
aacgccttatgcgcaag

SEQ ID NO: 8077 - DNA, 17 bp, Arabidopsis thaliana
aacgccttcgtcgacta

SEQ ID NO: 8078 - DNA, 17 bp, Arabidopsis thaliana
aacgccttctgagcgct

SEQ ID NO: 8079 - DNA, 17 bp, Arabidopsis thaliana
aacgccttcttagcgct

SEQ ID NO: 8080 - DNA, 17 bp, Arabidopsis thaliana
aacgcgaaggtcgcagg

SEQ ID NO: 8081 - DNA, 17 bp, Arabidopsis thaliana
aacgcgaccaagacgag

SEQ ID NO: 8082 - DNA, 17 bp, Arabidopsis thaliana
aacgcgacctatacccg

SEQ ID NO: 8083 - DNA, 17 bp, Arabidopsis thaliana
aacgcgacctccccatc

SEQ ID NO: 8084 - DNA, 17 bp, Arabidopsis thaliana
aacgcgacctctaagct

SEQ ID NO: 8085 - DNA, 17 bp, Arabidopsis thaliana
aacgcgacgtcacggtg

SEQ ID NO: 8086 - DNA, 17 bp, Arabidopsis thaliana
aacgcgacttcgtgggg

SEQ ID NO: 8087 - DNA, 17 bp, Arabidopsis thaliana
aacgcgaggtcggtgca

SEQ ID NO: 8088 - DNA, 17 bp, Arabidopsis thaliana
aacgcgaggttggtgcg

SEQ ID NO: 8089 - DNA, 17 bp, Arabidopsis thaliana
aacgcgagtccgcattt

SEQ ID NO: 8090 - DNA, 17 bp, Arabidopsis thaliana
aacgcgatgaataattt

SEQ ID NO: 8091 - DNA, 17 bp, Arabidopsis thaliana
aacgcggaatgttagct

SEQ ID NO: 8092 - DNA, 17 bp, Arabidopsis thaliana
aacgcggacacaggtcg

SEQ ID NO: 8093 - DNA, 17 bp, Arabidopsis thaliana
aacgcggacacaggtgg

SEQ ID NO: 8094 - DNA, 17 bp, Arabidopsis thaliana
aacgcggactaattctg

SEQ ID NO: 8095 - DNA, 17 bp, Arabidopsis thaliana
aacgcggcgatccatag

SEQ ID NO: 8096 - DNA, 17 bp, Arabidopsis thaliana
aacgcgtaaggtctcac

SEQ ID NO: 8097 - DNA, 17 bp, Arabidopsis thaliana
aacgcgtcattgattca

SEQ ID NO: 8098 - DNA, 17 bp, Arabidopsis thaliana
aacgcgtcattgattcg

SEQ ID NO: 8099 - DNA, 17 bp, Arabidopsis thaliana
aacgcgtggtgtccggt

SEQ ID NO: 8100 - DNA, 17 bp, Arabidopsis thaliana
aacgcgttcccggcggc

SEQ ID NO: 8101 - DNA, 17 bp, Arabidopsis thaliana
aacgcgttccgaccagt

SEQ ID NO: 8102 - DNA, 17 bp, Arabidopsis thaliana
aacgcgttgcggacgaa

SEQ ID NO: 8103 - DNA, 17 bp, Arabidopsis thaliana
aacgcgttgtttacaag

SEQ ID NO: 8104 - DNA, 17 bp, Arabidopsis thaliana
aacgcgtttctaacaac

SEQ ID NO: 8105 - DNA, 17 bp, Arabidopsis thaliana
aacgctaaagtattctc

SEQ ID NO: 8106 - DNA, 17 bp, Arabidopsis thaliana
aacgctaaccaagcatc

SEQ ID NO: 8107 - DNA, 17 bp, Arabidopsis thaliana
aacgctaacctagattc

SEQ ID NO: 8108 - DNA, 17 bp, Arabidopsis thaliana
aacgctaacgattgctg

SEQ ID NO: 8109 - DNA, 17 bp, Arabidopsis thaliana
aacgctaactactgatg

SEQ ID NO: 8110 - DNA, 17 bp, Arabidopsis thaliana
aacgctacgattgactc

SEQ ID NO: 8111 - DNA, 17 bp, Arabidopsis thaliana
aacgctacttttatttt

SEQ ID NO: 8112 - DNA, 17 bp, Arabidopsis thaliana
aacgctataccgcggaa

SEQ ID NO: 8113 - DNA, 17 bp, Arabidopsis thaliana
aacgctataccgtaggt

SEQ ID NO: 8114 - DNA, 17 bp, Arabidopsis thaliana
aacgctcaactaatctg

SEQ ID NO: 8115 - DNA, 17 bp, Arabidopsis thaliana
aacgctcatgtccaaat

SEQ ID NO: 8116 - DNA, 17 bp, Arabidopsis thaliana
aacgctcccgattcggc

SEQ ID NO: 8117 - DNA, 17 bp, Arabidopsis thaliana
aacgctcctgaacaagt

SEQ ID NO: 8118 - DNA, 17 bp, Arabidopsis thaliana
aacgctcgggtgttcta

SEQ ID NO: 8119 - DNA, 17 bp, Arabidopsis thaliana
aacgctcgttaattcgg

SEQ ID NO: 8120 - DNA, 17 bp, Arabidopsis thaliana
aacgctctattttggca

SEQ ID NO: 8121 - DNA, 17 bp, Arabidopsis thaliana
aacgctctccagtaaca

SEQ ID NO: 8122 - DNA, 17 bp, Arabidopsis thaliana
aacgctctgagacttag

SEQ ID NO: 8123 - DNA, 17 bp, Arabidopsis thaliana
aacgctcttgctcatcc

SEQ ID NO: 8124 - DNA, 17 bp, Arabidopsis thaliana
aacgctcttgctcatct

SEQ ID NO: 8125 - DNA, 17 bp, Arabidopsis thaliana
aacgctcttggtccatt

SEQ ID NO: 8126 - DNA, 17 bp, Arabidopsis thaliana
aacgctgaagccaattt

SEQ ID NO: 8127 - DNA, 17 bp, Arabidopsis thaliana
aacgctgaatcgaaggg

SEQ ID NO: 8128 - DNA, 17 bp, Arabidopsis thaliana
aacgctgaccaatcgtg

SEQ ID NO: 8129 - DNA, 17 bp, Arabidopsis thaliana
aacgctgaccgtgctgc

SEQ ID NO: 8130 - DNA, 17 bp, Arabidopsis thaliana
aacgctgatggagattg

SEQ ID NO: 8131 - DNA, 17 bp, Arabidopsis thaliana
aacgctgatttcagtgc

SEQ ID NO: 8132 - DNA, 17 bp, Arabidopsis thaliana
aacgctgcagagtgtgg

SEQ ID NO: 8133 - DNA, 17 bp, Arabidopsis thaliana
aacgctgcagctcaatt

SEQ ID NO: 8134 - DNA, 17 bp, Arabidopsis thaliana
aacgctgcgtttgcggg

SEQ ID NO: 8135 - DNA, 17 bp, Arabidopsis thaliana
aacgctgctgaacaggt

SEQ ID NO: 8136 - DNA, 17 bp, Arabidopsis thaliana
aacgctggagttagtcg

SEQ ID NO: 8137 - DNA, 17 bp, Arabidopsis thaliana
aacgctggcttacaggc

SEQ ID NO: 8138 - DNA, 17 bp, Arabidopsis thaliana
aacgctggcttacaggt

SEQ ID NO: 8139 - DNA, 17 bp, Arabidopsis thaliana
aacgctgggacaacaac

SEQ ID NO: 8140 - DNA, 17 bp, Arabidopsis thaliana
aacgctggtaatttgca

SEQ ID NO: 8141 - DNA, 17 bp, Arabidopsis thaliana
aacgctggtcattcggt

SEQ ID NO: 8142 - DNA, 17 bp, Arabidopsis thaliana
aacgctggttgaatcac

SEQ ID NO: 8143 - DNA, 17 bp, Arabidopsis thaliana
aacgctgtcgagtggcc

SEQ ID NO: 8144 - DNA, 17 bp, Arabidopsis thaliana
aacgctgtctttgagct

SEQ ID NO: 8145 - DNA, 17 bp, Arabidopsis thaliana
aacgctgttgcctgttg

SEQ ID NO: 8146 - DNA, 17 bp, Arabidopsis thaliana
aacgctgttttatgccc

SEQ ID NO: 8147 - DNA, 17 bp, Arabidopsis thaliana
aacgcttagtcggggcc

SEQ ID NO: 8148 - DNA, 17 bp, Arabidopsis thaliana
aacgcttcagtggctag

SEQ ID NO: 8149 - DNA, 17 bp, Arabidopsis thaliana
aacgcttcccagattcc

SEQ ID NO: 8150 - DNA, 17 bp, Arabidopsis thaliana
aacgcttccggattcgt

SEQ ID NO: 8151 - DNA, 17 bp, Arabidopsis thaliana
aacgcttcctccaatca

SEQ ID NO: 8152 - DNA, 17 bp, Arabidopsis thaliana
aacgcttcggactgggc

SEQ ID NO: 8153 - DNA, 17 bp, Arabidopsis thaliana
aacgcttctgccttgga

SEQ ID NO: 8154 - DNA, 17 bp, Arabidopsis thaliana
aacgcttgaaactgcaa

SEQ ID NO: 8155 - DNA, 17 bp, Arabidopsis thaliana
aacgcttgacagtttca

SEQ ID NO: 8156 - DNA, 17 bp, Arabidopsis thaliana
aacgcttgaccctctgt

SEQ ID NO: 8157 - DNA, 17 bp, Arabidopsis thaliana
aacgcttgagaatcctg

SEQ ID NO: 8158 - DNA, 17 bp, Arabidopsis thaliana
aacgcttgcagagagaa

SEQ ID NO: 8159 - DNA, 17 bp, Arabidopsis thaliana
aacgcttgccaatttga

SEQ ID NO: 8160 - DNA, 17 bp, Arabidopsis thaliana
aacgcttgcgggaagga

SEQ ID NO: 8161 - DNA, 17 bp, Arabidopsis thaliana
aacgcttgcggtaagta

SEQ ID NO: 8162 - DNA, 17 bp, Arabidopsis thaliana
aacgcttgtaggcttac

SEQ ID NO: 8163 - DNA, 17 bp, Arabidopsis thaliana
aacgcttgtagtcttac

SEQ ID NO: 8164 - DNA, 17 bp, Arabidopsis thaliana
aacgcttgttagcgatt

SEQ ID NO: 8165 - DNA, 17 bp, Arabidopsis thaliana
aacgctttcagatttga

SEQ ID NO: 8166 - DNA, 17 bp, Arabidopsis thaliana
aacgctttcggacttga

SEQ ID NO: 8167 - DNA, 17 bp, Arabidopsis thaliana
aacgctttgaccatctg

SEQ ID NO: 8168 - DNA, 17 bp, Arabidopsis thaliana
aacgctttgatgtcatc

SEQ ID NO: 8169 - DNA, 17 bp, Arabidopsis thaliana
aacgctttggccgagtg

SEQ ID NO: 8170 - DNA, 17 bp, Arabidopsis thaliana
aacggaaaggtcgtgga

SEQ ID NO: 8171 - DNA, 17 bp, Arabidopsis thaliana
aacggaaatttaacggc

SEQ ID NO: 8172 - DNA, 17 bp, Arabidopsis thaliana
aacggaaatttcctatt

SEQ ID NO: 8173 - DNA, 17 bp, Arabidopsis thaliana
aacggaaccgaatcgcg

SEQ ID NO: 8174 - DNA, 17 bp, Arabidopsis thaliana
aacggaaccgaatcgtg

SEQ ID NO: 8175 - DNA, 17 bp, Arabidopsis thaliana
aacggaactgtaacgac

SEQ ID NO: 8176 - DNA, 17 bp, Arabidopsis thaliana
aacggaacttgtttcat

SEQ ID NO: 8177 - DNA, 17 bp, Arabidopsis thaliana
aacggaacttttccatt

SEQ ID NO: 8178 - DNA, 17 bp, Arabidopsis thaliana
aacggaagagttggagt

SEQ ID NO: 8179 - DNA, 17 bp, Arabidopsis thaliana
aacggaattcgtctcga

SEQ ID NO: 8180 - DNA, 17 bp, Arabidopsis thaliana
aacggacaaagcggtct

SEQ ID NO: 8181 - DNA, 17 bp, Arabidopsis thaliana
aacggacaactccttct

SEQ ID NO: 8182 - DNA, 17 bp, Arabidopsis thaliana
aacggacaattccttct

SEQ ID NO: 8183 - DNA, 17 bp, Arabidopsis thaliana
aacggacacttccttct

SEQ ID NO: 8184 - DNA, 17 bp, Arabidopsis thaliana
aacggacagaaactagt

SEQ ID NO: 8185 - DNA, 17 bp, Arabidopsis thaliana
aacggacagagacacag

SEQ ID NO: 8186 - DNA, 17 bp, Arabidopsis thaliana
aacggacagcagcttga

SEQ ID NO: 8187 - DNA, 17 bp, Arabidopsis thaliana
aacggaccaacccgtcg

SEQ ID NO: 8188 - DNA, 17 bp, Arabidopsis thaliana
aacggaccagactccca

SEQ ID NO: 8189 - DNA, 17 bp, Arabidopsis thaliana
aacggaccatctgcaga

SEQ ID NO: 8190 - DNA, 17 bp, Arabidopsis thaliana
aacggacccgccagtca

SEQ ID NO: 8191 - DNA, 17 bp, Arabidopsis thaliana
aacggaccgactatcat

SEQ ID NO: 8192 - DNA, 17 bp, Arabidopsis thaliana
aacggaccgggttctca

SEQ ID NO: 8193 - DNA, 17 bp, Arabidopsis thaliana
aacggacctctatcgct

SEQ ID NO: 8194 - DNA, 17 bp, Arabidopsis thaliana
aacggacctgatctagt

SEQ ID NO: 8195 - DNA, 17 bp, Arabidopsis thaliana
aacggacgacggacggc

SEQ ID NO: 8196 - DNA, 17 bp, Arabidopsis thaliana
aacggacggtgccgacc

SEQ ID NO: 8197 - DNA, 17 bp, Arabidopsis thaliana
aacggacgttgaattta

SEQ ID NO: 8198 - DNA, 17 bp, Arabidopsis thaliana
aacggacgtttctggac

SEQ ID NO: 8199 - DNA, 17 bp, Arabidopsis thaliana
aacggacgtttttgccc

SEQ ID NO: 8200 - DNA, 17 bp, Arabidopsis thaliana
aacggactaaaacacct

SEQ ID NO: 8201 - DNA, 17 bp, Arabidopsis thaliana
aacggactaaaacggct

SEQ ID NO: 8202 - DNA, 17 bp, Arabidopsis thaliana
aacggactaactcatag

SEQ ID NO: 8203 - DNA, 17 bp, Arabidopsis thaliana
aacggacttggcttgac

SEQ ID NO: 8204 - DNA, 17 bp, Arabidopsis thaliana
aacggactttggtattc

SEQ ID NO: 8205 - DNA, 17 bp, Arabidopsis thaliana
aacggagaattgtgttt

SEQ ID NO: 8206 - DNA, 17 bp, Arabidopsis thaliana
aacggagaggtcaaagt

SEQ ID NO: 8207 - DNA, 17 bp, Arabidopsis thaliana
aacggagatgtgattga

SEQ ID NO: 8208 - DNA, 17 bp, Arabidopsis thaliana
aacggaggcgtgcaaag

SEQ ID NO: 8209 - DNA, 17 bp, Arabidopsis thaliana
aacggaggtgtgcgaag

SEQ ID NO: 8210 - DNA, 17 bp, Arabidopsis thaliana
aacggaggtttgcgaag

SEQ ID NO: 8211 - DNA, 17 bp, Arabidopsis thaliana
aacggagttatcgaatg

SEQ ID NO: 8212 - DNA, 17 bp, Arabidopsis thaliana
aacggagttcattgtca

SEQ ID NO: 8213 - DNA, 17 bp, Arabidopsis thaliana
aacggatagatcacagc

SEQ ID NO: 8214 - DNA, 17 bp, Arabidopsis thaliana
aacggatagctgggcag

SEQ ID NO: 8215 - DNA, 17 bp, Arabidopsis thaliana
aacggatatctcggctc

SEQ ID NO: 8216 - DNA, 17 bp, Arabidopsis thaliana
aacggatatctgatcta

SEQ ID NO: 8217 - DNA, 17 bp, Arabidopsis thaliana
aacggatcaaatacgca

SEQ ID NO: 8218 - DNA, 17 bp, Arabidopsis thaliana
aacggatctctagttct

SEQ ID NO: 8219 - DNA, 17 bp, Arabidopsis thaliana
aacggatgataacagac

SEQ ID NO: 8220 - DNA, 17 bp, Arabidopsis thaliana
aacggatgataacggca

SEQ ID NO: 8221 - DNA, 17 bp, Arabidopsis thaliana
aacggatgataacggcc

SEQ ID NO: 8222 - DNA, 17 bp, Arabidopsis thaliana
aacggatggatcgctgc

SEQ ID NO: 8223 - DNA, 17 bp, Arabidopsis thaliana
aacggatgggtcggccg

SEQ ID NO: 8224 - DNA, 17 bp, Arabidopsis thaliana
aacggatggttgtgaaa

SEQ ID NO: 8225 - DNA, 17 bp, Arabidopsis thaliana
aacggatgtagggtcca

SEQ ID NO: 8226 - DNA, 17 bp, Arabidopsis thaliana
aacggatgtgcggatgt

SEQ ID NO: 8227 - DNA, 17 bp, Arabidopsis thaliana
aacggatgtgcggattt

SEQ ID NO: 8228 - DNA, 17 bp, Arabidopsis thaliana
aacggatgtggcctgca

SEQ ID NO: 8229 - DNA, 17 bp, Arabidopsis thaliana
aacggatgttctataac

SEQ ID NO: 8230 - DNA, 17 bp, Arabidopsis thaliana
aacggatgttctgtaaa

SEQ ID NO: 8231 - DNA, 17 bp, Arabidopsis thaliana
aacggatgttctgtaac

SEQ ID NO: 8232 - DNA, 17 bp, Arabidopsis thaliana
aacggatgttgcttgaa

SEQ ID NO: 8233 - DNA, 17 bp, Arabidopsis thaliana
aacggattcttctcaac

SEQ ID NO: 8234 - DNA, 17 bp, Arabidopsis thaliana
aacggattgaactccgg

SEQ ID NO: 8235 - DNA, 17 bp, Arabidopsis thaliana
aacggattggacctgtc

SEQ ID NO: 8236 - DNA, 17 bp, Arabidopsis thaliana
aacggattggcgggacg

SEQ ID NO: 8237 - DNA, 17 bp, Arabidopsis thaliana
aacggatttggatctgg

SEQ ID NO: 8238 - DNA, 17 bp, Arabidopsis thaliana
aacggcaaactggatgt

SEQ ID NO: 8239 - DNA, 17 bp, Arabidopsis thaliana
aacggcaacaaatgcgg

SEQ ID NO: 8240 - DNA, 17 bp, Arabidopsis thaliana
aacggcaacaatttttt

SEQ ID NO: 8241 - DNA, 17 bp, Arabidopsis thaliana
aacggcaaccttaattc

SEQ ID NO: 8242 - DNA, 17 bp, Arabidopsis thaliana
aacggcaagcctttaac

SEQ ID NO: 8243 - DNA, 17 bp, Arabidopsis thaliana
aacggcaaggagttggt

SEQ ID NO: 8244 - DNA, 17 bp, Arabidopsis thaliana
aacggcaattacggctg

SEQ ID NO: 8245 - DNA, 17 bp, Arabidopsis thaliana
aacggcaatttggtatt

SEQ ID NO: 8246 - DNA, 17 bp, Arabidopsis thaliana
aacggcacgtctgcctg

SEQ ID NO: 8247 - DNA, 17 bp, Arabidopsis thaliana
aacggcactgtggttca

SEQ ID NO: 8248 - DNA, 17 bp, Arabidopsis thaliana
aacggcacttccacatg

SEQ ID NO: 8249 - DNA, 17 bp, Arabidopsis thaliana
aacggcacttgcacatg

SEQ ID NO: 8250 - DNA, 17 bp, Arabidopsis thaliana
aacggcatagatttctc

SEQ ID NO: 8251 - DNA, 17 bp, Arabidopsis thaliana
aacggcatgtctattta

SEQ ID NO: 8252 - DNA, 17 bp, Arabidopsis thaliana
aacggcatgtctatttt

SEQ ID NO: 8253 - DNA, 17 bp, Arabidopsis thaliana
aacggcattcacaattt

SEQ ID NO: 8254 - DNA, 17 bp, Arabidopsis thaliana
aacggccaagattttaa

SEQ ID NO: 8255 - DNA, 17 bp, Arabidopsis thaliana
aacggccacatacgaag

SEQ ID NO: 8256 - DNA, 17 bp, Arabidopsis thaliana
aacggccacctacgaag

SEQ ID NO: 8257 - DNA, 17 bp, Arabidopsis thaliana
aacggccatttcatgag

SEQ ID NO: 8258 - DNA, 17 bp, Arabidopsis thaliana
aacggccgcatacaaag

SEQ ID NO: 8259 - DNA, 17 bp, Arabidopsis thaliana
aacggccgcatacacac

SEQ ID NO: 8260 - DNA, 17 bp, Arabidopsis thaliana
aacggccgcatacgaag

SEQ ID NO: 8261 - DNA, 17 bp, Arabidopsis thaliana
aacggccgcatacgaat

SEQ ID NO: 8262 - DNA, 17 bp, Arabidopsis thaliana
aacggccgcatacgagg

SEQ ID NO: 8263 - DNA, 17 bp, Arabidopsis thaliana
aacggccgttaactagt

SEQ ID NO: 8264 - DNA, 17 bp, Arabidopsis thaliana
aacggccgttcggcgga

SEQ ID NO: 8265 - DNA, 17 bp, Arabidopsis thaliana
aacggcctgttcaacga

SEQ ID NO: 8266 - DNA, 17 bp, Arabidopsis thaliana
aacggcgaaagcactct

SEQ ID NO: 8267 - DNA, 17 bp, Arabidopsis thaliana
aacggcgagcgaaccgg

SEQ ID NO: 8268 - DNA, 17 bp, Arabidopsis thaliana
aacggcgattcacataa

SEQ ID NO: 8269 - DNA, 17 bp, Arabidopsis thaliana
aacggcgccaaatttga

SEQ ID NO: 8270 - DNA, 17 bp, Arabidopsis thaliana
aacggcggagagaaacg

SEQ ID NO: 8271 - DNA, 17 bp, Arabidopsis thaliana
aacggcgggagtaacta

SEQ ID NO: 8272 - DNA, 17 bp, Arabidopsis thaliana
aacggcgtcacatcaga

SEQ ID NO: 8273 - DNA, 17 bp, Arabidopsis thaliana
aacggctactgtgcgca

SEQ ID NO: 8274 - DNA, 17 bp, Arabidopsis thaliana
aacggctactgtgctca

SEQ ID NO: 8275 - DNA, 17 bp, Arabidopsis thaliana
aacggctactgtgtgca

SEQ ID NO: 8276 - DNA, 17 bp, Arabidopsis thaliana
aacggctcaacgaaact

SEQ ID NO: 8277 - DNA, 17 bp, Arabidopsis thaliana
aacggctcagccggagg

SEQ ID NO: 8278 - DNA, 17 bp, Arabidopsis thaliana
aacggctcggtcaacaa

SEQ ID NO: 8279 - DNA, 17 bp, Arabidopsis thaliana
aacggctctatcacttt

SEQ ID NO: 8280 - DNA, 17 bp, Arabidopsis thaliana
aacggctctcggcaacg

SEQ ID NO: 8281 - DNA, 17 bp, Arabidopsis thaliana
aacggctctctccttca

SEQ ID NO: 8282 - DNA, 17 bp, Arabidopsis thaliana
aacggctctctcgggag

SEQ ID NO: 8283 - DNA, 17 bp, Arabidopsis thaliana
aacggctctctcgggcg

SEQ ID NO: 8284 - DNA, 17 bp, Arabidopsis thaliana
aacggctctctcggtag

SEQ ID NO: 8285 - DNA, 17 bp, Arabidopsis thaliana
aacggctctctcggtcg

SEQ ID NO: 8286 - DNA, 17 bp, Arabidopsis thaliana
aacggctgagttatgtt

SEQ ID NO: 8287 - DNA, 17 bp, Arabidopsis thaliana
aacggctgcatacgaag

SEQ ID NO: 8288 - DNA, 17 bp, Arabidopsis thaliana
aacggctgttagaccat

SEQ ID NO: 8289 - DNA, 17 bp, Arabidopsis thaliana
aacggcttagaccctgt

SEQ ID NO: 8290 - DNA, 17 bp, Arabidopsis thaliana
aacggcttaggccctgt

SEQ ID NO: 8291 - DNA, 17 bp, Arabidopsis thaliana
aacggcttagggcattc

SEQ ID NO: 8292 - DNA, 17 bp, Arabidopsis thaliana
aacggcttagtcttctt

SEQ ID NO: 8293 - DNA, 17 bp, Arabidopsis thaliana
aacggcttcagggaatt

SEQ ID NO: 8294 - DNA, 17 bp, Arabidopsis thaliana
aacggcttgctggggcg

SEQ ID NO: 8295 - DNA, 17 bp, Arabidopsis thaliana
aacggcttgcttctttg

SEQ ID NO: 8296 - DNA, 17 bp, Arabidopsis thaliana
aacggcttggtcaacga

SEQ ID NO: 8297 - DNA, 17 bp, Arabidopsis thaliana
aacggcttgtgccatgg

SEQ ID NO: 8298 - DNA, 17 bp, Arabidopsis thaliana
aacgggaaaaatgtcat

SEQ ID NO: 8299 - DNA, 17 bp, Arabidopsis thaliana
aacgggaagcatttgca

SEQ ID NO: 8300 - DNA, 17 bp, Arabidopsis thaliana
aacgggaagtcctcgtg

SEQ ID NO: 8301 - DNA, 17 bp, Arabidopsis thaliana
aacgggaccctacaggt

SEQ ID NO: 8302 - DNA, 17 bp, Arabidopsis thaliana
aacgggacgggtttgac

SEQ ID NO: 8303 - DNA, 17 bp, Arabidopsis thaliana
aacgggacgggtttgga

SEQ ID NO: 8304 - DNA, 17 bp, Arabidopsis thaliana
aacgggacgggtttggc

SEQ ID NO: 8305 - DNA, 17 bp, Arabidopsis thaliana
aacgggactacaaattc

SEQ ID NO: 8306 - DNA, 17 bp, Arabidopsis thaliana
aacgggactggtttgga

SEQ ID NO: 8307 - DNA, 17 bp, Arabidopsis thaliana
aacgggacttgtttcat

SEQ ID NO: 8308 - DNA, 17 bp, Arabidopsis thaliana
aacgggagtttgttgtg

SEQ ID NO: 8309 - DNA, 17 bp, Arabidopsis thaliana
aacgggatcaccaacgc

SEQ ID NO: 8310 - DNA, 17 bp, Arabidopsis thaliana
aacgggatgtcgtttcc

SEQ ID NO: 8311 - DNA, 17 bp, Arabidopsis thaliana
aacgggatgtcgtttct

SEQ ID NO: 8312 - DNA, 17 bp, Arabidopsis thaliana
aacgggatgtcgttttc

SEQ ID NO: 8313 - DNA, 17 bp, Arabidopsis thaliana
aacgggcagagccagcg

SEQ ID NO: 8314 - DNA, 17 bp, Arabidopsis thaliana
aacgggccgcaacagca

SEQ ID NO: 8315 - DNA, 17 bp, Arabidopsis thaliana
aacgggcgcatacgaag

SEQ ID NO: 8316 - DNA, 17 bp, Arabidopsis thaliana
aacgggcgcttgtacat

SEQ ID NO: 8317 - DNA, 17 bp, Arabidopsis thaliana
aacgggcgggcctttcc

SEQ ID NO: 8318 - DNA, 17 bp, Arabidopsis thaliana
aacgggcgttaacagtg

SEQ ID NO: 8319 - DNA, 17 bp, Arabidopsis thaliana
aacgggctccgcgttca

SEQ ID NO: 8320 - DNA, 17 bp, Arabidopsis thaliana
aacgggctcgggctcca

SEQ ID NO: 8321 - DNA, 17 bp, Arabidopsis thaliana
aacgggctggcccgcgt

SEQ ID NO: 8322 - DNA, 17 bp, Arabidopsis thaliana
aacgggcttcggcccag

SEQ ID NO: 8323 - DNA, 17 bp, Arabidopsis thaliana
aacgggcttggcagaat

SEQ ID NO: 8324 - DNA, 17 bp, Arabidopsis thaliana
aacggggagcaatgccg

SEQ ID NO: 8325 - DNA, 17 bp, Arabidopsis thaliana
aacggggatgggcgcgt

SEQ ID NO: 8326 - DNA, 17 bp, Arabidopsis thaliana
aacggggctaagcgatc

SEQ ID NO: 8327 - DNA, 17 bp, Arabidopsis thaliana
aacggggtcccagttcc

SEQ ID NO: 8328 - DNA, 17 bp, Arabidopsis thaliana
aacggggttaatcagcg

SEQ ID NO: 8329 - DNA, 17 bp, Arabidopsis thaliana
aacggggttagatggta

SEQ ID NO: 8330 - DNA, 17 bp, Arabidopsis thaliana
aacgggtaatttccgga

SEQ ID NO: 8331 - DNA, 17 bp, Arabidopsis thaliana
aacgggtaatttcctga

SEQ ID NO: 8332 - DNA, 17 bp, Arabidopsis thaliana
aacgggtacccgaatac

SEQ ID NO: 8333 - DNA, 17 bp, Arabidopsis thaliana
aacgggtacccgaatgc

SEQ ID NO: 8334 - DNA, 17 bp, Arabidopsis thaliana
aacgggtcaagctcatg

SEQ ID NO: 8335 - DNA, 17 bp, Arabidopsis thaliana
aacgggtcctaaactcc

SEQ ID NO: 8336 - DNA, 17 bp, Arabidopsis thaliana
aacgggtcctaaacttc

SEQ ID NO: 8337 - DNA, 17 bp, Arabidopsis thaliana
aacgggtcggacagaac

SEQ ID NO: 8338 - DNA, 17 bp, Arabidopsis thaliana
aacgggtctctggttcg

SEQ ID NO: 8339 - DNA, 17 bp, Arabidopsis thaliana
aacgggtctgttcacct

SEQ ID NO: 8340 - DNA, 17 bp, Arabidopsis thaliana
aacgggtgccgcctgca

SEQ ID NO: 8341 - DNA, 17 bp, Arabidopsis thaliana
aacgggtgcgtttgcgg

SEQ ID NO: 8342 - DNA, 17 bp, Arabidopsis thaliana
aacgggtgggacccacg

SEQ ID NO: 8343 - DNA, 17 bp, Arabidopsis thaliana
aacgggtgtcgcctgca

SEQ ID NO: 8344 - DNA, 17 bp, Arabidopsis thaliana
aacgggtgtggcctgca

SEQ ID NO: 8345 - DNA, 17 bp, Arabidopsis thaliana
aacgggtgtggcctgta

SEQ ID NO: 8346 - DNA, 17 bp, Arabidopsis thaliana
aacgggtgttacaaatt

SEQ ID NO: 8347 - DNA, 17 bp, Arabidopsis thaliana
aacgggtgttgtatcac

SEQ ID NO: 8348 - DNA, 17 bp, Arabidopsis thaliana
aacgggttattgaacga

SEQ ID NO: 8349 - DNA, 17 bp, Arabidopsis thaliana
aacgggttcctcccggc

SEQ ID NO: 8350 - DNA, 17 bp, Arabidopsis thaliana
aacgggttcgtgtccca

SEQ ID NO: 8351 - DNA, 17 bp, Arabidopsis thaliana
aacgggttcgtttcccg

SEQ ID NO: 8352 - DNA, 17 bp, Arabidopsis thaliana
aacgggttcttttattt

SEQ ID NO: 8353 - DNA, 17 bp, Arabidopsis thaliana
aacgggttgttgctggt

SEQ ID NO: 8354 - DNA, 17 bp, Arabidopsis thaliana
aacgggtttacgttttt

SEQ ID NO: 8355 - DNA, 17 bp, Arabidopsis thaliana
aacgggtttctaagttc

SEQ ID NO: 8356 - DNA, 17 bp, Arabidopsis thaliana
aacgggtttctaggttc

SEQ ID NO: 8357 - DNA, 17 bp, Arabidopsis thaliana
aacgggtttggaaggat

SEQ ID NO: 8358 - DNA, 17 bp, Arabidopsis thaliana
aacggtaatgttatcct

SEQ ID NO: 8359 - DNA, 17 bp, Arabidopsis thaliana
aacggtagttacggctg

SEQ ID NO: 8360 - DNA, 17 bp, Arabidopsis thaliana
aacggtataccacgggt

SEQ ID NO: 8361 - DNA, 17 bp, Arabidopsis thaliana
aacggtatctgctgcag

SEQ ID NO: 8362 - DNA, 17 bp, Arabidopsis thaliana
aacggtatttttggtgt

SEQ ID NO: 8363 - DNA, 17 bp, Arabidopsis thaliana
aacggtcaaatatgcgg

SEQ ID NO: 8364 - DNA, 17 bp, Arabidopsis thaliana
aacggtcaacctcgtcg

SEQ ID NO: 8365 - DNA, 17 bp, Arabidopsis thaliana
aacggtcacatctgctt

SEQ ID NO: 8366 - DNA, 17 bp, Arabidopsis thaliana
aacggtcacatgtcgcg

SEQ ID NO: 8367 - DNA, 17 bp, Arabidopsis thaliana
aacggtcagggcaacta

SEQ ID NO: 8368 - DNA, 17 bp, Arabidopsis thaliana
aacggtcatgactgtcc

SEQ ID NO: 8369 - DNA, 17 bp, Arabidopsis thaliana
aacggtcattaggcggg

SEQ ID NO: 8370 - DNA, 17 bp, Arabidopsis thaliana
aacggtccagaatcatc

SEQ ID NO: 8371 - DNA, 17 bp, Arabidopsis thaliana
aacggtccatgttctgc

SEQ ID NO: 8372 - DNA, 17 bp, Arabidopsis thaliana
aacggtcccaacttgag

SEQ ID NO: 8373 - DNA, 17 bp, Arabidopsis thaliana
aacggtccgatggaagc

SEQ ID NO: 8374 - DNA, 17 bp, Arabidopsis thaliana
aacggtccgtagatgat

SEQ ID NO: 8375 - DNA, 17 bp, Arabidopsis thaliana
aacggtcctgttcgttt

SEQ ID NO: 8376 - DNA, 17 bp, Arabidopsis thaliana
aacggtcgaggacttgt

SEQ ID NO: 8377 - DNA, 17 bp, Arabidopsis thaliana
aacggtcgattaagaca

SEQ ID NO: 8378 - DNA, 17 bp, Arabidopsis thaliana
aacggtcggacaaaact

SEQ ID NO: 8379 - DNA, 17 bp, Arabidopsis thaliana
aacggtcggatgtatgg

SEQ ID NO: 8380 - DNA, 17 bp, Arabidopsis thaliana
aacggtcggcagatggt

SEQ ID NO: 8381 - DNA, 17 bp, Arabidopsis thaliana
aacggtcggtacgctac

SEQ ID NO: 8382 - DNA, 17 bp, Arabidopsis thaliana
aacggtctgatccattg

SEQ ID NO: 8383 - DNA, 17 bp, Arabidopsis thaliana
aacggtctgatccgttg

SEQ ID NO: 8384 - DNA, 17 bp, Arabidopsis thaliana
aacggtgaaacttttac

SEQ ID NO: 8385 - DNA, 17 bp, Arabidopsis thaliana
aacggtgaagtagattg

SEQ ID NO: 8386 - DNA, 17 bp, Arabidopsis thaliana
aacggtgaatcgattcg

SEQ ID NO: 8387 - DNA, 17 bp, Arabidopsis thaliana
aacggtgaatcgattta

SEQ ID NO: 8388 - DNA, 17 bp, Arabidopsis thaliana
aacggtgaatcgatttg

SEQ ID NO: 8389 - DNA, 17 bp, Arabidopsis thaliana
aacggtgactagctcat

SEQ ID NO: 8390 - DNA, 17 bp, Arabidopsis thaliana
aacggtgactgcatttt

SEQ ID NO: 8391 - DNA, 17 bp, Arabidopsis thaliana
aacggtgactgcgtttt

SEQ ID NO: 8392 - DNA, 17 bp, Arabidopsis thaliana
aacggtgagaaccctaa

SEQ ID NO: 8393 - DNA, 17 bp, Arabidopsis thaliana
aacggtgagaaccctat

SEQ ID NO: 8394 - DNA, 17 bp, Arabidopsis thaliana
aacggtgagtcgattag

SEQ ID NO: 8395 - DNA, 17 bp, Arabidopsis thaliana
aacggtgagtcgattta

SEQ ID NO: 8396 - DNA, 17 bp, Arabidopsis thaliana
aacggtgagtcgatttg

SEQ ID NO: 8397 - DNA, 17 bp, Arabidopsis thaliana
aacggtgagtcgatttt

SEQ ID NO: 8398 - DNA, 17 bp, Arabidopsis thaliana
aacggtgagtctatgtg

SEQ ID NO: 8399 - DNA, 17 bp, Arabidopsis thaliana
aacggtgagtctatttg

SEQ ID NO: 8400 - DNA, 17 bp, Arabidopsis thaliana
aacggtgagtctcgcta

SEQ ID NO: 8401 - DNA, 17 bp, Arabidopsis thaliana
aacggtgatccatcgcc

SEQ ID NO: 8402 - DNA, 17 bp, Arabidopsis thaliana
aacggtgatgacaatga

SEQ ID NO: 8403 - DNA, 17 bp, Arabidopsis thaliana
aacggtgatggcacaac

SEQ ID NO: 8404 - DNA, 17 bp, Arabidopsis thaliana
aacggtgctcgcagtgg

SEQ ID NO: 8405 - DNA, 17 bp, Arabidopsis thaliana
aacggtggcacagatct

SEQ ID NO: 8406 - DNA, 17 bp, Arabidopsis thaliana
aacggtggtgcatggcc

SEQ ID NO: 8407 - DNA, 17 bp, Arabidopsis thaliana
aacggtggtgcccgaca

SEQ ID NO: 8408 - DNA, 17 bp, Arabidopsis thaliana
aacggtggtgttgtcga

SEQ ID NO: 8409 - DNA, 17 bp, Arabidopsis thaliana
aacggtggttaattagg

SEQ ID NO: 8410 - DNA, 17 bp, Arabidopsis thaliana
aacggtggttccttaac

SEQ ID NO: 8411 - DNA, 17 bp, Arabidopsis thaliana
aacggtggtttattaga

SEQ ID NO: 8412 - DNA, 17 bp, Arabidopsis thaliana
aacggtggtttattagg

SEQ ID NO: 8413 - DNA, 17 bp, Arabidopsis thaliana
aacggtgtccaatctgc

SEQ ID NO: 8414 - DNA, 17 bp, Arabidopsis thaliana
aacggtgtcgttatcga

SEQ ID NO: 8415 - DNA, 17 bp, Arabidopsis thaliana
aacggtgtcgttttgtt

SEQ ID NO: 8416 - DNA, 17 bp, Arabidopsis thaliana
aacggttacttttctgg

SEQ ID NO: 8417 - DNA, 17 bp, Arabidopsis thaliana
aacggttagtttttttg

SEQ ID NO: 8418 - DNA, 17 bp, Arabidopsis thaliana
aacggttcattcagaag

SEQ ID NO: 8419 - DNA, 17 bp, Arabidopsis thaliana
aacggttcattcagatc

SEQ ID NO: 8420 - DNA, 17 bp, Arabidopsis thaliana
aacggttcattcagatg

SEQ ID NO: 8421 - DNA, 17 bp, Arabidopsis thaliana
aacggttcctcacgagg

SEQ ID NO: 8422 - DNA, 17 bp, Arabidopsis thaliana
aacggttcctctcgtac

SEQ ID NO: 8423 - DNA, 17 bp, Arabidopsis thaliana
aacggttcgatcccgtc

SEQ ID NO: 8424 - DNA, 17 bp, Arabidopsis thaliana
aacggttcgcaaatggt

SEQ ID NO: 8425 - DNA, 17 bp, Arabidopsis thaliana
aacggttcggcttatgt

SEQ ID NO: 8426 - DNA, 17 bp, Arabidopsis thaliana
aacggttcgtgtcccac

SEQ ID NO: 8427 - DNA, 17 bp, Arabidopsis thaliana
aacggttctcttgaaat

SEQ ID NO: 8428 - DNA, 17 bp, Arabidopsis thaliana
aacggttgaaaggaact

SEQ ID NO: 8429 - DNA, 17 bp, Arabidopsis thaliana
aacggttgaaaggaatt

SEQ ID NO: 8430 - DNA, 17 bp, Arabidopsis thaliana
aacggttgaatgttaaa

SEQ ID NO: 8431 - DNA, 17 bp, Arabidopsis thaliana
aacggttgagtttgatt

SEQ ID NO: 8432 - DNA, 17 bp, Arabidopsis thaliana
aacggttgcatttgcaa

SEQ ID NO: 8433 - DNA, 17 bp, Arabidopsis thaliana
aacggttgctttcttgg

SEQ ID NO: 8434 - DNA, 17 bp, Arabidopsis thaliana
aacggttggcgagtgga

SEQ ID NO: 8435 - DNA, 17 bp, Arabidopsis thaliana
aacggttggctcggtgc

SEQ ID NO: 8436 - DNA, 17 bp, Arabidopsis thaliana
aacggttggtctgtatt

SEQ ID NO: 8437 - DNA, 17 bp, Arabidopsis thaliana
aacggttgtaattagtc

SEQ ID NO: 8438 - DNA, 17 bp, Arabidopsis thaliana
aacggttgtcggcacca

SEQ ID NO: 8439 - DNA, 17 bp, Arabidopsis thaliana
aacggttgtgatctttt

SEQ ID NO: 8440 - DNA, 17 bp, Arabidopsis thaliana
aacggttgttagcgatt

SEQ ID NO: 8441 - DNA, 17 bp, Arabidopsis thaliana
aacggtttagaccatct

SEQ ID NO: 8442 - DNA, 17 bp, Arabidopsis thaliana
aacggtttatcaaaccc

SEQ ID NO: 8443 - DNA, 17 bp, Arabidopsis thaliana
aacggtttattatccat

SEQ ID NO: 8444 - DNA, 17 bp, Arabidopsis thaliana
aacggtttattgtctgc

SEQ ID NO: 8445 - DNA, 17 bp, Arabidopsis thaliana
aacggtttcagatctaa

SEQ ID NO: 8446 - DNA, 17 bp, Arabidopsis thaliana
aacggtttccttcggct

SEQ ID NO: 8447 - DNA, 17 bp, Arabidopsis thaliana
aacggtttgataatggg

SEQ ID NO: 8448 - DNA, 17 bp, Arabidopsis thaliana
aacggtttgcagatggt

SEQ ID NO: 8449 - DNA, 17 bp, Arabidopsis thaliana
aacggtttggttctctt

SEQ ID NO: 8450 - DNA, 17 bp, Arabidopsis thaliana
aacggtttggtttcgga

SEQ ID NO: 8451 - DNA, 17 bp, Arabidopsis thaliana
aacggttttctgtcacc

SEQ ID NO: 8452 - DNA, 17 bp, Arabidopsis thaliana
aacggttttgtgcgctt

SEQ ID NO: 8453 - DNA, 17 bp, Arabidopsis thaliana
aacgtaaaccataattt

SEQ ID NO: 8454 - DNA, 17 bp, Arabidopsis thaliana
aacgtaaacccgagatt

SEQ ID NO: 8455 - DNA, 17 bp, Arabidopsis thaliana
aacgtaaacccgtaatt

SEQ ID NO: 8456 - DNA, 17 bp, Arabidopsis thaliana
aacgtaaacccgtgatt

SEQ ID NO: 8457 - DNA, 17 bp, Arabidopsis thaliana
aacgtaaatccgtgatt

SEQ ID NO: 8458 - DNA, 17 bp, Arabidopsis thaliana
aacgtaacaccaggcca

SEQ ID NO: 8459 - DNA, 17 bp, Arabidopsis thaliana
aacgtaacgtcctgcca

SEQ ID NO: 8460 - DNA, 17 bp, Arabidopsis thaliana
aacgtaatagcggccca

SEQ ID NO: 8461 - DNA, 17 bp, Arabidopsis thaliana
aacgtaatagcggctca

SEQ ID NO: 8462 - DNA, 17 bp, Arabidopsis thaliana
aacgtaatctggctaat

SEQ ID NO: 8463 - DNA, 17 bp, Arabidopsis thaliana
aacgtacactacaacgt

SEQ ID NO: 8464 - DNA, 17 bp, Arabidopsis thaliana
aacgtaccaccttgggc

SEQ ID NO: 8465 - DNA, 17 bp, Arabidopsis thaliana
aacgtactgccaaaccc

SEQ ID NO: 8466 - DNA, 17 bp, Arabidopsis thaliana
aacgtagactttcccgt

SEQ ID NO: 8467 - DNA, 17 bp, Arabidopsis thaliana
aacgtagattttgaatt

SEQ ID NO: 8468 - DNA, 17 bp, Arabidopsis thaliana
aacgtagcccaccgatc

SEQ ID NO: 8469 - DNA, 17 bp, Arabidopsis thaliana
aacgtagcgaaatgcga

SEQ ID NO: 8470 - DNA, 17 bp, Arabidopsis thaliana
aacgtagcgggtgcggt

SEQ ID NO: 8471 - DNA, 17 bp, Arabidopsis thaliana
aacgtagttcaccgtca

SEQ ID NO: 8472 - DNA, 17 bp, Arabidopsis thaliana
aacgtatagtttgctaa

SEQ ID NO: 8473 - DNA, 17 bp, Arabidopsis thaliana
aacgtatcaggagacca

SEQ ID NO: 8474 - DNA, 17 bp, Arabidopsis thaliana
aacgtatcaggcggacc

SEQ ID NO: 8475 - DNA, 17 bp, Arabidopsis thaliana
aacgtatcccaagcgac

SEQ ID NO: 8476 - DNA, 17 bp, Arabidopsis thaliana
aacgtatcccgatttgc

SEQ ID NO: 8477 - DNA, 17 bp, Arabidopsis thaliana
aacgtatccgcgcgcac

SEQ ID NO: 8478 - DNA, 17 bp, Arabidopsis thaliana
aacgtattggtattcta

SEQ ID NO: 8479 - DNA, 17 bp, Arabidopsis thaliana
aacgtcaaacaatcggc

SEQ ID NO: 8480 - DNA, 17 bp, Arabidopsis thaliana
aacgtcaaatggattta

SEQ ID NO: 8481 - DNA, 17 bp, Arabidopsis thaliana
aacgtcaaatggatttt

SEQ ID NO: 8482 - DNA, 17 bp, Arabidopsis thaliana
aacgtcaacaccttcgc

SEQ ID NO: 8483 - DNA, 17 bp, Arabidopsis thaliana
aacgtcaacctttcttc

SEQ ID NO: 8484 - DNA, 17 bp, Arabidopsis thaliana
aacgtcaagatggttga

SEQ ID NO: 8485 - DNA, 17 bp, Arabidopsis thaliana
aacgtcaccaccaccac

SEQ ID NO: 8486 - DNA, 17 bp, Arabidopsis thaliana
aacgtcaccgctacggt

SEQ ID NO: 8487 - DNA, 17 bp, Arabidopsis thaliana
aacgtcacgaccgcccc

SEQ ID NO: 8488 - DNA, 17 bp, Arabidopsis thaliana
aacgtcactcgaaccgg

SEQ ID NO: 8489 - DNA, 17 bp, Arabidopsis thaliana
aacgtcagactgattct

SEQ ID NO: 8490 - DNA, 17 bp, Arabidopsis thaliana
aacgtcagctcgtcttt

SEQ ID NO: 8491 - DNA, 17 bp, Arabidopsis thaliana
aacgtcaggcttaagat

SEQ ID NO: 8492 - DNA, 17 bp, Arabidopsis thaliana
aacgtcaggcttaatat

SEQ ID NO: 8493 - DNA, 17 bp, Arabidopsis thaliana
aacgtcatatctaagct

SEQ ID NO: 8494 - DNA, 17 bp, Arabidopsis thaliana
aacgtcatccggctcag

SEQ ID NO: 8495 - DNA, 17 bp, Arabidopsis thaliana
aacgtcatctacagctg

SEQ ID NO: 8496 - DNA, 17 bp, Arabidopsis thaliana
aacgtcatggagatttt

SEQ ID NO: 8497 - DNA, 17 bp, Arabidopsis thaliana
aacgtcattctcgacat

SEQ ID NO: 8498 - DNA, 17 bp, Arabidopsis thaliana
aacgtcatttatcacgg

SEQ ID NO: 8499 - DNA, 17 bp, Arabidopsis thaliana
aacgtccaaacccctaa

SEQ ID NO: 8500 - DNA, 17 bp, Arabidopsis thaliana
aacgtccaaagccgcta

SEQ ID NO: 8501 - DNA, 17 bp, Arabidopsis thaliana
aacgtccaagaacatca

SEQ ID NO: 8502 - DNA, 17 bp, Arabidopsis thaliana
aacgtccagccaaaccc

SEQ ID NO: 8503 - DNA, 17 bp, Arabidopsis thaliana
aacgtcccactctgtcg

SEQ ID NO: 8504 - DNA, 17 bp, Arabidopsis thaliana
aacgtcccagtctgtcg

SEQ ID NO: 8505 - DNA, 17 bp, Arabidopsis thaliana
aacgtcccgcaacgact

SEQ ID NO: 8506 - DNA, 17 bp, Arabidopsis thaliana
aacgtcccgtcaaaccc

SEQ ID NO: 8507 - DNA, 17 bp, Arabidopsis thaliana
aacgtccctgagttgag

SEQ ID NO: 8508 - DNA, 17 bp, Arabidopsis thaliana
aacgtccggactgtctc

SEQ ID NO: 8509 - DNA, 17 bp, Arabidopsis thaliana
aacgtccggtgcgcccc

SEQ ID NO: 8510 - DNA, 17 bp, Arabidopsis thaliana
aacgtccgttaaatccc

SEQ ID NO: 8511 - DNA, 17 bp, Arabidopsis thaliana
aacgtccgttaaatcct

SEQ ID NO: 8512 - DNA, 17 bp, Arabidopsis thaliana
aacgtccgttaacggtt

SEQ ID NO: 8513 - DNA, 17 bp, Arabidopsis thaliana
aacgtccgttaagtccc

SEQ ID NO: 8514 - DNA, 17 bp, Arabidopsis thaliana
aacgtccgttaattcct

SEQ ID NO: 8515 - DNA, 17 bp, Arabidopsis thaliana
aacgtccgttatcatcc

SEQ ID NO: 8516 - DNA, 17 bp, Arabidopsis thaliana
aacgtcctaccaaaccc

SEQ ID NO: 8517 - DNA, 17 bp, Arabidopsis thaliana
aacgtcctacctaacct

SEQ ID NO: 8518 - DNA, 17 bp, Arabidopsis thaliana
aacgtcctactagatgt

SEQ ID NO: 8519 - DNA, 17 bp, Arabidopsis thaliana
aacgtcctactagctgt

SEQ ID NO: 8520 - DNA, 17 bp, Arabidopsis thaliana
aacgtcctatcaaaccc

SEQ ID NO: 8521 - DNA, 17 bp, Arabidopsis thaliana
aacgtcctccctggaga

SEQ ID NO: 8522 - DNA, 17 bp, Arabidopsis thaliana
aacgtcctgccaaacac

SEQ ID NO: 8523 - DNA, 17 bp, Arabidopsis thaliana
aacgtcctgccaaaccc

SEQ ID NO: 8524 - DNA, 17 bp, Arabidopsis thaliana
aacgtcctgccaaacct

SEQ ID NO: 8525 - DNA, 17 bp, Arabidopsis thaliana
aacgtcctgccaaacgc

SEQ ID NO: 8526 - DNA, 17 bp, Arabidopsis thaliana
aacgtcctgccaaactc

SEQ ID NO: 8527 - DNA, 17 bp, Arabidopsis thaliana
aacgtcctgccaaactt

SEQ ID NO: 8528 - DNA, 17 bp, Arabidopsis thaliana
aacgtcctgccaaatcc

SEQ ID NO: 8529 - DNA, 17 bp, Arabidopsis thaliana
aacgtcctgccaaattc

SEQ ID NO: 8530 - DNA, 17 bp, Arabidopsis thaliana
aacgtcctgcccaaccc

SEQ ID NO: 8531 - DNA, 17 bp, Arabidopsis thaliana
aacgtcctgccgaaccc

SEQ ID NO: 8532 - DNA, 17 bp, Arabidopsis thaliana
aacgtcctgctaaaccc

SEQ ID NO: 8533 - DNA, 17 bp, Arabidopsis thaliana
aacgtcctgctaaactc

SEQ ID NO: 8534 - DNA, 17 bp, Arabidopsis thaliana
aacgtcctgctcaaccc

SEQ ID NO: 8535 - DNA, 17 bp, Arabidopsis thaliana
aacgtcctgtcaaaccc

SEQ ID NO: 8536 - DNA, 17 bp, Arabidopsis thaliana
aacgtcctgtcaaacct

SEQ ID NO: 8537 - DNA, 17 bp, Arabidopsis thaliana
aacgtcctgtcaacccg

SEQ ID NO: 8538 - DNA, 17 bp, Arabidopsis thaliana
aacgtccttccaaaccc

SEQ ID NO: 8539 - DNA, 17 bp, Arabidopsis thaliana
aacgtccttggaatgtg

SEQ ID NO: 8540 - DNA, 17 bp, Arabidopsis thaliana
aacgtcgaagtcttagg

SEQ ID NO: 8541 - DNA, 17 bp, Arabidopsis thaliana
aacgtcgatcagtaatg

SEQ ID NO: 8542 - DNA, 17 bp, Arabidopsis thaliana
aacgtcgcagggttttt

SEQ ID NO: 8543 - DNA, 17 bp, Arabidopsis thaliana
aacgtcgcaggtttttg

SEQ ID NO: 8544 - DNA, 17 bp, Arabidopsis thaliana
aacgtcgccggacgcca

SEQ ID NO: 8545 - DNA, 17 bp, Arabidopsis thaliana
aacgtcgccggacgccg

SEQ ID NO: 8546 - DNA, 17 bp, Arabidopsis thaliana
aacgtcgcggtgttttt

SEQ ID NO: 8547 - DNA, 17 bp, Arabidopsis thaliana
aacgtcggatgaagctt

SEQ ID NO: 8548 - DNA, 17 bp, Arabidopsis thaliana
aacgtcggctaatgggt

SEQ ID NO: 8549 - DNA, 17 bp, Arabidopsis thaliana
aacgtcggtgaaatcta

SEQ ID NO: 8550 - DNA, 17 bp, Arabidopsis thaliana
aacgtcgtcacaggaga

SEQ ID NO: 8551 - DNA, 17 bp, Arabidopsis thaliana
aacgtcgtctaatggat

SEQ ID NO: 8552 - DNA, 17 bp, Arabidopsis thaliana
aacgtcgtcttattcag

SEQ ID NO: 8553 - DNA, 17 bp, Arabidopsis thaliana
aacgtcgtcttgctcat

SEQ ID NO: 8554 - DNA, 17 bp, Arabidopsis thaliana
aacgtcgtgagacagtt

SEQ ID NO: 8555 - DNA, 17 bp, Arabidopsis thaliana
aacgtcgtgccaaaccc

SEQ ID NO: 8556 - DNA, 17 bp, Arabidopsis thaliana
aacgtcgtgtaaatttt

SEQ ID NO: 8557 - DNA, 17 bp, Arabidopsis thaliana
aacgtcgtgtagatttt

SEQ ID NO: 8558 - DNA, 17 bp, Arabidopsis thaliana
aacgtcgtgtggattta

SEQ ID NO: 8559 - DNA, 17 bp, Arabidopsis thaliana
aacgtcgtgtggatttt

SEQ ID NO: 8560 - DNA, 17 bp, Arabidopsis thaliana
aacgtcgtttcgcgaat

SEQ ID NO: 8561 - DNA, 17 bp, Arabidopsis thaliana
aacgtctaccgagacta

SEQ ID NO: 8562 - DNA, 17 bp, Arabidopsis thaliana
aacgtctaccgggctta

SEQ ID NO: 8563 - DNA, 17 bp, Arabidopsis thaliana
aacgtctacttacggca

SEQ ID NO: 8564 - DNA, 17 bp, Arabidopsis thaliana
aacgtctattccaacgt

SEQ ID NO: 8565 - DNA, 17 bp, Arabidopsis thaliana
aacgtctcaaaggacca

SEQ ID NO: 8566 - DNA, 17 bp, Arabidopsis thaliana
aacgtctccctgggtgt

SEQ ID NO: 8567 - DNA, 17 bp, Arabidopsis thaliana
aacgtctcgaatgacca

SEQ ID NO: 8568 - DNA, 17 bp, Arabidopsis thaliana
aacgtctcgggatttag

SEQ ID NO: 8569 - DNA, 17 bp, Arabidopsis thaliana
aacgtctcgggattttg

SEQ ID NO: 8570 - DNA, 17 bp, Arabidopsis thaliana
aacgtctcgggattttt

SEQ ID NO: 8571 - DNA, 17 bp, Arabidopsis thaliana
aacgtctctcggcaacg

SEQ ID NO: 8572 - DNA, 17 bp, Arabidopsis thaliana
aacgtctctgccttgga

SEQ ID NO: 8573 - DNA, 17 bp, Arabidopsis thaliana
aacgtctctttgagctg

SEQ ID NO: 8574 - DNA, 17 bp, Arabidopsis thaliana
aacgtctgagcgtgaat

SEQ ID NO: 8575 - DNA, 17 bp, Arabidopsis thaliana
aacgtctgaggcggatt

SEQ ID NO: 8576 - DNA, 17 bp, Arabidopsis thaliana
aacgtctgcaagactat

SEQ ID NO: 8577 - DNA, 17 bp, Arabidopsis thaliana
aacgtctgcctgggtgt

SEQ ID NO: 8578 - DNA, 17 bp, Arabidopsis thaliana
aacgtctgctaacgcct

SEQ ID NO: 8579 - DNA, 17 bp, Arabidopsis thaliana
aacgtctgctaacggcg

SEQ ID NO: 8580 - DNA, 17 bp, Arabidopsis thaliana
aacgtctgctctttttt

SEQ ID NO: 8581 - DNA, 17 bp, Arabidopsis thaliana
aacgtctggctgagttc

SEQ ID NO: 8582 - DNA, 17 bp, Arabidopsis thaliana
aacgtctggtgtctttt

SEQ ID NO: 8583 - DNA, 17 bp, Arabidopsis thaliana
aacgtctgtcagttggg

SEQ ID NO: 8584 - DNA, 17 bp, Arabidopsis thaliana
aacgtctgtttgtttgc

SEQ ID NO: 8585 - DNA, 17 bp, Arabidopsis thaliana
aacgtcttacgtcccat

SEQ ID NO: 8586 - DNA, 17 bp, Arabidopsis thaliana
aacgtcttgccaaaccc

SEQ ID NO: 8587 - DNA, 17 bp, Arabidopsis thaliana
aacgtcttgggattttg

SEQ ID NO: 8588 - DNA, 17 bp, Arabidopsis thaliana
aacgtcttgggattttt

SEQ ID NO: 8589 - DNA, 17 bp, Arabidopsis thaliana
aacgtctttatttctca

SEQ ID NO: 8590 - DNA, 17 bp, Arabidopsis thaliana
aacgtctttctacttgc

SEQ ID NO: 8591 - DNA, 17 bp, Arabidopsis thaliana
aacgtctttctactttc

SEQ ID NO: 8592 - DNA, 17 bp, Arabidopsis thaliana
aacgtcttttggacgct

SEQ ID NO: 8593 - DNA, 17 bp, Arabidopsis thaliana
aacgtgaacttccgaaa

SEQ ID NO: 8594 - DNA, 17 bp, Arabidopsis thaliana
aacgtgaattttctggc

SEQ ID NO: 8595 - DNA, 17 bp, Arabidopsis thaliana
aacgtgaccatgactca

SEQ ID NO: 8596 - DNA, 17 bp, Arabidopsis thaliana
aacgtgaccgagtttgt

SEQ ID NO: 8597 - DNA, 17 bp, Arabidopsis thaliana
aacgtgactcgaaccca

SEQ ID NO: 8598 - DNA, 17 bp, Arabidopsis thaliana
aacgtgagctgggatga

SEQ ID NO: 8599 - DNA, 17 bp, Arabidopsis thaliana
aacgtgagctgggatta

SEQ ID NO: 8600 - DNA, 17 bp, Arabidopsis thaliana
aacgtgagctggggtta

SEQ ID NO: 8601 - DNA, 17 bp, Arabidopsis thaliana
aacgtgagctgggttag

SEQ ID NO: 8602 - DNA, 17 bp, Arabidopsis thaliana
aacgtgagctgggttta

SEQ ID NO: 8603 - DNA, 17 bp, Arabidopsis thaliana
aacgtgatggtggctcg

SEQ ID NO: 8604 - DNA, 17 bp, Arabidopsis thaliana
aacgtgatgtgagtcca

SEQ ID NO: 8605 - DNA, 17 bp, Arabidopsis thaliana
aacgtgatgtgagtcta

SEQ ID NO: 8606 - DNA, 17 bp, Arabidopsis thaliana
aacgtgatgttggtcta

SEQ ID NO: 8607 - DNA, 17 bp, Arabidopsis thaliana
aacgtgattttacgggt

SEQ ID NO: 8608 - DNA, 17 bp, Arabidopsis thaliana
aacgtgcagagcggaaa

SEQ ID NO: 8609 - DNA, 17 bp, Arabidopsis thaliana
aacgtgcattcgggtca

SEQ ID NO: 8610 - DNA, 17 bp, Arabidopsis thaliana
aacgtgcattggtcggc

SEQ ID NO: 8611 - DNA, 17 bp, Arabidopsis thaliana
aacgtgcctcgaatcca

SEQ ID NO: 8612 - DNA, 17 bp, Arabidopsis thaliana
aacgtgccttgaactta

SEQ ID NO: 8613 - DNA, 17 bp, Arabidopsis thaliana
aacgtgcgaccgtgttc

SEQ ID NO: 8614 - DNA, 17 bp, Arabidopsis thaliana
aacgtgcgacggtattc

SEQ ID NO: 8615 - DNA, 17 bp, Arabidopsis thaliana
aacgtgcgacggtgttc

SEQ ID NO: 8616 - DNA, 17 bp, Arabidopsis thaliana
aacgtgcgactatgttc

SEQ ID NO: 8617 - DNA, 17 bp, Arabidopsis thaliana
aacgtgcgactgtaatc

SEQ ID NO: 8618 - DNA, 17 bp, Arabidopsis thaliana
aacgtgcgactgtattc

SEQ ID NO: 8619 - DNA, 17 bp, Arabidopsis thaliana
aacgtgcgactgtgtcc

SEQ ID NO: 8620 - DNA, 17 bp, Arabidopsis thaliana
aacgtgcgactgtgtga

SEQ ID NO: 8621 - DNA, 17 bp, Arabidopsis thaliana
aacgtgcgactgtgttc

SEQ ID NO: 8622 - DNA, 17 bp, Arabidopsis thaliana
aacgtgcgactgtgttg

SEQ ID NO: 8623 - DNA, 17 bp, Arabidopsis thaliana
aacgtgcgactgtgttt

SEQ ID NO: 8624 - DNA, 17 bp, Arabidopsis thaliana
aacgtgcgattcaacta

SEQ ID NO: 8625 - DNA, 17 bp, Arabidopsis thaliana
aacgtgcgattcaactg

SEQ ID NO: 8626 - DNA, 17 bp, Arabidopsis thaliana
aacgtgcgattgtgttc

SEQ ID NO: 8627 - DNA, 17 bp, Arabidopsis thaliana
aacgtgcgggtattggc

SEQ ID NO: 8628 - DNA, 17 bp, Arabidopsis thaliana
aacgtgcggtgcggttc

SEQ ID NO: 8629 - DNA, 17 bp, Arabidopsis thaliana
aacgtgcggttagtcca

SEQ ID NO: 8630 - DNA, 17 bp, Arabidopsis thaliana
aacgtgcggttattggc

SEQ ID NO: 8631 - DNA, 17 bp, Arabidopsis thaliana
aacgtgcggttcaacgg

SEQ ID NO: 8632 - DNA, 17 bp, Arabidopsis thaliana
aacgtgcggttcaactg

SEQ ID NO: 8633 - DNA, 17 bp, Arabidopsis thaliana
aacgtgctacacatcgg

SEQ ID NO: 8634 - DNA, 17 bp, Arabidopsis thaliana
aacgtgctgttaacggg

SEQ ID NO: 8635 - DNA, 17 bp, Arabidopsis thaliana
aacgtgctgttagacca

SEQ ID NO: 8636 - DNA, 17 bp, Arabidopsis thaliana
aacgtgcttcgaaccca

SEQ ID NO: 8637 - DNA, 17 bp, Arabidopsis thaliana
aacgtgcttttggagtc

SEQ ID NO: 8638 - DNA, 17 bp, Arabidopsis thaliana
aacgtggaccgtcactc

SEQ ID NO: 8639 - DNA, 17 bp, Arabidopsis thaliana
aacgtggactgccgaga

SEQ ID NO: 8640 - DNA, 17 bp, Arabidopsis thaliana
aacgtggagcgatttgt

SEQ ID NO: 8641 - DNA, 17 bp, Arabidopsis thaliana
aacgtggcattcttttt

SEQ ID NO: 8642 - DNA, 17 bp, Arabidopsis thaliana
aacgtggcattgaccgc

SEQ ID NO: 8643 - DNA, 17 bp, Arabidopsis thaliana
aacgtgggttcgcttct

SEQ ID NO: 8644 - DNA, 17 bp, Arabidopsis thaliana
aacgtgggtttacttgt

SEQ ID NO: 8645 - DNA, 17 bp, Arabidopsis thaliana
aacgtggtccatgcctt

SEQ ID NO: 8646 - DNA, 17 bp, Arabidopsis thaliana
aacgtggtccttcacta

SEQ ID NO: 8647 - DNA, 17 bp, Arabidopsis thaliana
aacgtggtctaagtagg

SEQ ID NO: 8648 - DNA, 17 bp, Arabidopsis thaliana
aacgtggtgattggtga

SEQ ID NO: 8649 - DNA, 17 bp, Arabidopsis thaliana
aacgtggttcaccaaca

SEQ ID NO: 8650 - DNA, 17 bp, Arabidopsis thaliana
aacgtggtttaacggtt

SEQ ID NO: 8651 - DNA, 17 bp, Arabidopsis thaliana
aacgtgtaaacgccgca

SEQ ID NO: 8652 - DNA, 17 bp, Arabidopsis thaliana
aacgtgtatcgaccatg

SEQ ID NO: 8653 - DNA, 17 bp, Arabidopsis thaliana
aacgtgtatgcggactt

SEQ ID NO: 8654 - DNA, 17 bp, Arabidopsis thaliana
aacgtgtatggccgttt

SEQ ID NO: 8655 - DNA, 17 bp, Arabidopsis thaliana
aacgtgtctcgaatcca

SEQ ID NO: 8656 - DNA, 17 bp, Arabidopsis thaliana
aacgtgtgtcgaatcca

SEQ ID NO: 8657 - DNA, 17 bp, Arabidopsis thaliana
aacgtgttcttggccca

SEQ ID NO: 8658 - DNA, 17 bp, Arabidopsis thaliana
aacgttaaccactattg

SEQ ID NO: 8659 - DNA, 17 bp, Arabidopsis thaliana
aacgttacaacgtgcga

SEQ ID NO: 8660 - DNA, 17 bp, Arabidopsis thaliana
aacgttacctgccagcc

SEQ ID NO: 8661 - DNA, 17 bp, Arabidopsis thaliana
aacgttacggctgagtg

SEQ ID NO: 8662 - DNA, 17 bp, Arabidopsis thaliana
aacgttacggctgagtt

SEQ ID NO: 8663 - DNA, 17 bp, Arabidopsis thaliana
aacgttaggaccttgtc

SEQ ID NO: 8664 - DNA, 17 bp, Arabidopsis thaliana
aacgttagggagtccgg

SEQ ID NO: 8665 - DNA, 17 bp, Arabidopsis thaliana
aacgttatcctaagcgc

SEQ ID NO: 8666 - DNA, 17 bp, Arabidopsis thaliana
aacgttatgacaatccc

SEQ ID NO: 8667 - DNA, 17 bp, Arabidopsis thaliana
aacgttatgcggtttga

SEQ ID NO: 8668 - DNA, 17 bp, Arabidopsis thaliana
aacgttattcgaaccga

SEQ ID NO: 8669 - DNA, 17 bp, Arabidopsis thaliana
aacgttattcgaaccgt

SEQ ID NO: 8670 - DNA, 17 bp, Arabidopsis thaliana
aacgttcatctagcaga

SEQ ID NO: 8671 - DNA, 17 bp, Arabidopsis thaliana
aacgttccagaacctat

SEQ ID NO: 8672 - DNA, 17 bp, Arabidopsis thaliana
aacgttccatatcggct

SEQ ID NO: 8673 - DNA, 17 bp, Arabidopsis thaliana
aacgttctccggatgtt

SEQ ID NO: 8674 - DNA, 17 bp, Arabidopsis thaliana
aacgttctgccaaacaa

SEQ ID NO: 8675 - DNA, 17 bp, Arabidopsis thaliana
aacgttctgccaaaccc

SEQ ID NO: 8676 - DNA, 17 bp, Arabidopsis thaliana
aacgttctgcgagagtt

SEQ ID NO: 8677 - DNA, 17 bp, Arabidopsis thaliana
aacgttctgctaaaccc

SEQ ID NO: 8678 - DNA, 17 bp, Arabidopsis thaliana
aacgttctgtcaaatcc

SEQ ID NO: 8679 - DNA, 17 bp, Arabidopsis thaliana
aacgttcttggctattg

SEQ ID NO: 8680 - DNA, 17 bp, Arabidopsis thaliana
aacgttgactagccatt

SEQ ID NO: 8681 - DNA, 17 bp, Arabidopsis thaliana
aacgttgagacgacatg

SEQ ID NO: 8682 - DNA, 17 bp, Arabidopsis thaliana
aacgttgcaacgtgcga

SEQ ID NO: 8683 - DNA, 17 bp, Arabidopsis thaliana
aacgttgcacctagcga

SEQ ID NO: 8684 - DNA, 17 bp, Arabidopsis thaliana
aacgttgccaaacccgt

SEQ ID NO: 8685 - DNA, 17 bp, Arabidopsis thaliana
aacgttgccaaactcgt

SEQ ID NO: 8686 - DNA, 17 bp, Arabidopsis thaliana
aacgttgcgccgaagtg

SEQ ID NO: 8687 - DNA, 17 bp, Arabidopsis thaliana
aacgttgctagaaattg

SEQ ID NO: 8688 - DNA, 17 bp, Arabidopsis thaliana
aacgttgctagacattg

SEQ ID NO: 8689 - DNA, 17 bp, Arabidopsis thaliana
aacgttggaccggctct

SEQ ID NO: 8690 - DNA, 17 bp, Arabidopsis thaliana
aacgttggaccggctgt

SEQ ID NO: 8691 - DNA, 17 bp, Arabidopsis thaliana
aacgttggatctactaa

SEQ ID NO: 8692 - DNA, 17 bp, Arabidopsis thaliana
aacgttggatgtttcta

SEQ ID NO: 8693 - DNA, 17 bp, Arabidopsis thaliana
aacgttggccaattgct

SEQ ID NO: 8694 - DNA, 17 bp, Arabidopsis thaliana
aacgttggcggctccca

SEQ ID NO: 8695 - DNA, 17 bp, Arabidopsis thaliana
aacgttggctttgtacc

SEQ ID NO: 8696 - DNA, 17 bp, Arabidopsis thaliana
aacgttggttacaatga

SEQ ID NO: 8697 - DNA, 17 bp, Arabidopsis thaliana
aacgttgtgaccatttc

SEQ ID NO: 8698 - DNA, 17 bp, Arabidopsis thaliana
aacgttgtgtggatttt

SEQ ID NO: 8699 - DNA, 17 bp, Arabidopsis thaliana
aacgttgtgttgacgaa

SEQ ID NO: 8700 - DNA, 17 bp, Arabidopsis thaliana
aacgttgtgttggctca

SEQ ID NO: 8701 - DNA, 17 bp, Arabidopsis thaliana
aacgttgttacaactag

SEQ ID NO: 8702 - DNA, 17 bp, Arabidopsis thaliana
aacgttgttgcggcacg

SEQ ID NO: 8703 - DNA, 17 bp, Arabidopsis thaliana
aacgttgtttaccgtaa

SEQ ID NO: 8704 - DNA, 17 bp, Arabidopsis thaliana
aacgtttaagtcgtgat

SEQ ID NO: 8705 - DNA, 17 bp, Arabidopsis thaliana
aacgtttactatgctgc

SEQ ID NO: 8706 - DNA, 17 bp, Arabidopsis thaliana
aacgtttagtaggggca

SEQ ID NO: 8707 - DNA, 17 bp, Arabidopsis thaliana
aacgtttagtcaaccat

SEQ ID NO: 8708 - DNA, 17 bp, Arabidopsis thaliana
aacgtttatggccacgt

SEQ ID NO: 8709 - DNA, 17 bp, Arabidopsis thaliana
aacgtttcaacagggtg

SEQ ID NO: 8710 - DNA, 17 bp, Arabidopsis thaliana
aacgtttccatctctcg

SEQ ID NO: 8711 - DNA, 17 bp, Arabidopsis thaliana
aacgtttcgggattttg

SEQ ID NO: 8712 - DNA, 17 bp, Arabidopsis thaliana
aacgtttctccactttt

SEQ ID NO: 8713 - DNA, 17 bp, Arabidopsis thaliana
aacgtttgaccggaacc

SEQ ID NO: 8714 - DNA, 17 bp, Arabidopsis thaliana
aacgtttgagagcctag

SEQ ID NO: 8715 - DNA, 17 bp, Arabidopsis thaliana
aacgtttgctctttgct

SEQ ID NO: 8716 - DNA, 17 bp, Arabidopsis thaliana
aacgtttggcagcctag

SEQ ID NO: 8717 - DNA, 17 bp, Arabidopsis thaliana
aacgtttggctaagttg

SEQ ID NO: 8718 - DNA, 17 bp, Arabidopsis thaliana
aacgtttgttccggtta

SEQ ID NO: 8719 - DNA, 17 bp, Arabidopsis thaliana
aacgtttgttgaagtta

SEQ ID NO: 8720 - DNA, 17 bp, Arabidopsis thaliana
aacgtttgttgaccagt

SEQ ID NO: 8721 - DNA, 17 bp, Arabidopsis thaliana
aacgtttgttggccggt

SEQ ID NO: 8722 - DNA, 17 bp, Arabidopsis thaliana
aacgtttgttggtcggt

SEQ ID NO: 8723 - DNA, 17 bp, Arabidopsis thaliana
aacgtttgttgtgtcca

SEQ ID NO: 8724 - DNA, 17 bp, Arabidopsis thaliana
aacgtttgttgtgtccg

SEQ ID NO: 8725 - DNA, 17 bp, Arabidopsis thaliana
aacgttttacggctgac

SEQ ID NO: 8726 - DNA, 17 bp, Arabidopsis thaliana
aacgttttcattaactt

SEQ ID NO: 8727 - DNA, 17 bp, Arabidopsis thaliana
aacgttttctcaccaaa

SEQ ID NO: 8728 - DNA, 17 bp, Arabidopsis thaliana
aacgttttgatcctagc

SEQ ID NO: 8729 - DNA, 17 bp, Arabidopsis thaliana
aacgttttgccaaaccc

SEQ ID NO: 8730 - DNA, 17 bp, Arabidopsis thaliana
aacgttttgccgttcca

SEQ ID NO: 8731 - DNA, 17 bp, Arabidopsis thaliana
aacgtttttacggttgc

SEQ ID NO: 8732 - DNA, 17 bp, Arabidopsis thaliana
aacgtttttactctctc

SEQ ID NO: 8733 - DNA, 17 bp, Arabidopsis thaliana
aacgtttttgggctttt

SEQ ID NO: 8734 - DNA, 17 bp, Arabidopsis thaliana
aactaaaccggaacagt

SEQ ID NO: 8735 - DNA, 17 bp, Arabidopsis thaliana
aactaaaccttcaatga

SEQ ID NO: 8736 - DNA, 17 bp, Arabidopsis thaliana
aactaaacgcttttgtc

SEQ ID NO: 8737 - DNA, 17 bp, Arabidopsis thaliana
aactaaactcccctgag

SEQ ID NO: 8738 - DNA, 17 bp, Arabidopsis thaliana
aactaaactcgtcaatt

SEQ ID NO: 8739 - DNA, 17 bp, Arabidopsis thaliana
aactaaacttgtcattt

SEQ ID NO: 8740 - DNA, 17 bp, Arabidopsis thaliana
aactaaagccacagctt

SEQ ID NO: 8741 - DNA, 17 bp, Arabidopsis thaliana
aactaacaaaatagcca

SEQ ID NO: 8742 - DNA, 17 bp, Arabidopsis thaliana
aactaaccattcgttca

SEQ ID NO: 8743 - DNA, 17 bp, Arabidopsis thaliana
aactaaccggattagcc

SEQ ID NO: 8744 - DNA, 17 bp, Arabidopsis thaliana
aactaaccgttgtttga

SEQ ID NO: 8745 - DNA, 17 bp, Arabidopsis thaliana
aactaaccttgccaatc

SEQ ID NO: 8746 - DNA, 17 bp, Arabidopsis thaliana
aactaacgccctagcct

SEQ ID NO: 8747 - DNA, 17 bp, Arabidopsis thaliana
aactaacgccgtagcct

SEQ ID NO: 8748 - DNA, 17 bp, Arabidopsis thaliana
aactaacggatcattat

SEQ ID NO: 8749 - DNA, 17 bp, Arabidopsis thaliana
aactaactgctgtggga

SEQ ID NO: 8750 - DNA, 17 bp, Arabidopsis thaliana
aactaactgctgtgggg

SEQ ID NO: 8751 - DNA, 17 bp, Arabidopsis thaliana
aactaagagagaagtga

SEQ ID NO: 8752 - DNA, 17 bp, Arabidopsis thaliana
aactaagaggttctgag

SEQ ID NO: 8753 - DNA, 17 bp, Arabidopsis thaliana
aactaagagtcccaata

SEQ ID NO: 8754 - DNA, 17 bp, Arabidopsis thaliana
aactaagattaaaggcc

SEQ ID NO: 8755 - DNA, 17 bp, Arabidopsis thaliana
aactaagattgtttagg

SEQ ID NO: 8756 - DNA, 17 bp, Arabidopsis thaliana
aactaagcctacggatc

SEQ ID NO: 8757 - DNA, 17 bp, Arabidopsis thaliana
aactaagcgggaagcta

SEQ ID NO: 8758 - DNA, 17 bp, Arabidopsis thaliana
aactaagcgttctcctt

SEQ ID NO: 8759 - DNA, 17 bp, Arabidopsis thaliana
aactaagcgttgactac

SEQ ID NO: 8760 - DNA, 17 bp, Arabidopsis thaliana
aactaagctggtgatat

SEQ ID NO: 8761 - DNA, 17 bp, Arabidopsis thaliana
aactaaggtcccgtttg

SEQ ID NO: 8762 - DNA, 17 bp, Arabidopsis thaliana
aactaagtccgcagcgg

SEQ ID NO: 8763 - DNA, 17 bp, Arabidopsis thaliana
aactaagtccgcattgg

SEQ ID NO: 8764 - DNA, 17 bp, Arabidopsis thaliana
aactaagtctcagagcg

SEQ ID NO: 8765 - DNA, 17 bp, Arabidopsis thaliana
aactaagtctcatctct

SEQ ID NO: 8766 - DNA, 17 bp, Arabidopsis thaliana
aactaagtctgcatcgc

SEQ ID NO: 8767 - DNA, 17 bp, Arabidopsis thaliana
aactaagtctgtagcag

SEQ ID NO: 8768 - DNA, 17 bp, Arabidopsis thaliana
aactaagtcttctttga

SEQ ID NO: 8769 - DNA, 17 bp, Arabidopsis thaliana
aactaagtgcatgattg

SEQ ID NO: 8770 - DNA, 17 bp, Arabidopsis thaliana
aactaagttagagtgta

SEQ ID NO: 8771 - DNA, 17 bp, Arabidopsis thaliana
aactaagttgggtaccc

SEQ ID NO: 8772 - DNA, 17 bp, Arabidopsis thaliana
aactaagtttagtcagc

SEQ ID NO: 8773 - DNA, 17 bp, Arabidopsis thaliana
aactaagtttgcagcgg

SEQ ID NO: 8774 - DNA, 17 bp, Arabidopsis thaliana
aactaataggattgtgg

SEQ ID NO: 8775 - DNA, 17 bp, Arabidopsis thaliana
aactaatatcgggtgtc

SEQ ID NO: 8776 - DNA, 17 bp, Arabidopsis thaliana
aactaatattacggatt

SEQ ID NO: 8777 - DNA, 17 bp, Arabidopsis thaliana
aactaatcacaagccgc

SEQ ID NO: 8778 - DNA, 17 bp, Arabidopsis thaliana
aactaatccaggactat

SEQ ID NO: 8779 - DNA, 17 bp, Arabidopsis thaliana
aactaatccattaacct

SEQ ID NO: 8780 - DNA, 17 bp, Arabidopsis thaliana
aactaatccattcaaca

SEQ ID NO: 8781 - DNA, 17 bp, Arabidopsis thaliana
aactaatccattgacct

SEQ ID NO: 8782 - DNA, 17 bp, Arabidopsis thaliana
aactaatccgtcagcag

SEQ ID NO: 8783 - DNA, 17 bp, Arabidopsis thaliana
aactaatcctgagcagg

SEQ ID NO: 8784 - DNA, 17 bp, Arabidopsis thaliana
aactaatcgctactgct

SEQ ID NO: 8785 - DNA, 17 bp, Arabidopsis thaliana
aactaatctcgcaggcc

SEQ ID NO: 8786 - DNA, 17 bp, Arabidopsis thaliana
aactaatctcggttgtc

SEQ ID NO: 8787 - DNA, 17 bp, Arabidopsis thaliana
aactaatctgtcagcgg

SEQ ID NO: 8788 - DNA, 17 bp, Arabidopsis thaliana
aactaatgagatttttg

SEQ ID NO: 8789 - DNA, 17 bp, Arabidopsis thaliana
aactaatgatggttccg

SEQ ID NO: 8790 - DNA, 17 bp, Arabidopsis thaliana
aactaatgctagggggt

SEQ ID NO: 8791 - DNA, 17 bp, Arabidopsis thaliana
aactaatggtggtgagc

SEQ ID NO: 8792 - DNA, 17 bp, Arabidopsis thaliana
aactaatgtccattgcg

SEQ ID NO: 8793 - DNA, 17 bp, Arabidopsis thaliana
aactaattaggctccga

SEQ ID NO: 8794 - DNA, 17 bp, Arabidopsis thaliana
aactaattcatgaccgc

SEQ ID NO: 8795 - DNA, 17 bp, Arabidopsis thaliana
aactaattctactctct

SEQ ID NO: 8796 - DNA, 17 bp, Arabidopsis thaliana
aactacaaccacttcta

SEQ ID NO: 8797 - DNA, 17 bp, Arabidopsis thaliana
aactacaaccagatttg

SEQ ID NO: 8798 - DNA, 17 bp, Arabidopsis thaliana
aactacagagacttgca

SEQ ID NO: 8799 - DNA, 17 bp, Arabidopsis thaliana
aactacagagttgcgtt

SEQ ID NO: 8800 - DNA, 17 bp, Arabidopsis thaliana
aactacagtcggtaacg

SEQ ID NO: 8801 - DNA, 17 bp, Arabidopsis thaliana
aactacatcagctgcac

SEQ ID NO: 8802 - DNA, 17 bp, Arabidopsis thaliana
aactacatcttggttat

SEQ ID NO: 8803 - DNA, 17 bp, Arabidopsis thaliana
aactacatcttggttgc

SEQ ID NO: 8804 - DNA, 17 bp, Arabidopsis thaliana
aactacatcttggttgt

SEQ ID NO: 8805 - DNA, 17 bp, Arabidopsis thaliana
aactacatgggggtacc

SEQ ID NO: 8806 - DNA, 17 bp, Arabidopsis thaliana
aactacatttgccacgt

SEQ ID NO: 8807 - DNA, 17 bp, Arabidopsis thaliana
aactacattttttccat

SEQ ID NO: 8808 - DNA, 17 bp, Arabidopsis thaliana
aactaccaggtaaacca

SEQ ID NO: 8809 - DNA, 17 bp, Arabidopsis thaliana
aactaccagtggattgg

SEQ ID NO: 8810 - DNA, 17 bp, Arabidopsis thaliana
aactacccggttcggta

SEQ ID NO: 8811 - DNA, 17 bp, Arabidopsis thaliana
aactacctaccgcatat

SEQ ID NO: 8812 - DNA, 17 bp, Arabidopsis thaliana
aactacctttcgggaga

SEQ ID NO: 8813 - DNA, 17 bp, Arabidopsis thaliana
aactacgaactatttgt

SEQ ID NO: 8814 - DNA, 17 bp, Arabidopsis thaliana
aactacgaatggcttga

SEQ ID NO: 8815 - DNA, 17 bp, Arabidopsis thaliana
aactacgatggccggct

SEQ ID NO: 8816 - DNA, 17 bp, Arabidopsis thaliana
aactacgcaatgccttt

SEQ ID NO: 8817 - DNA, 17 bp, Arabidopsis thaliana
aactacggaggtgatct

SEQ ID NO: 8818 - DNA, 17 bp, Arabidopsis thaliana
aactacggatcacgcga

SEQ ID NO: 8819 - DNA, 17 bp, Arabidopsis thaliana
aactacggtcctgtgac

SEQ ID NO: 8820 - DNA, 17 bp, Arabidopsis thaliana
aactacgtcctcttctc

SEQ ID NO: 8821 - DNA, 17 bp, Arabidopsis thaliana
aactactcatgttgctc

SEQ ID NO: 8822 - DNA, 17 bp, Arabidopsis thaliana
aactactgacgaatcat

SEQ ID NO: 8823 - DNA, 17 bp, Arabidopsis thaliana
aactactgatgactcag

SEQ ID NO: 8824 - DNA, 17 bp, Arabidopsis thaliana
aactactgatggctcaa

SEQ ID NO: 8825 - DNA, 17 bp, Arabidopsis thaliana
aactactgatggctcag

SEQ ID NO: 8826 - DNA, 17 bp, Arabidopsis thaliana
aactactgcaccaacgt

SEQ ID NO: 8827 - DNA, 17 bp, Arabidopsis thaliana
aactactggacccaggt

SEQ ID NO: 8828 - DNA, 17 bp, Arabidopsis thaliana
aactactggtgttgtta

SEQ ID NO: 8829 - DNA, 17 bp, Arabidopsis thaliana
aactactggttcaagta

SEQ ID NO: 8830 - DNA, 17 bp, Arabidopsis thaliana
aactactggttcaagtt

SEQ ID NO: 8831 - DNA, 17 bp, Arabidopsis thaliana
aactactgtgacattta

SEQ ID NO: 8832 - DNA, 17 bp, Arabidopsis thaliana
aactactgtgacatttt

SEQ ID NO: 8833 - DNA, 17 bp, Arabidopsis thaliana
aactacttctgtgtgta

SEQ ID NO: 8834 - DNA, 17 bp, Arabidopsis thaliana
aactacttgcggtgcgg

SEQ ID NO: 8835 - DNA, 17 bp, Arabidopsis thaliana
aactacttgtgcccagt

SEQ ID NO: 8836 - DNA, 17 bp, Arabidopsis thaliana
aactacttgtggctgca

SEQ ID NO: 8837 - DNA, 17 bp, Arabidopsis thaliana
aactactttcgcaactt

SEQ ID NO: 8838 - DNA, 17 bp, Arabidopsis thaliana
aactactttgtccgctt

SEQ ID NO: 8839 - DNA, 17 bp, Arabidopsis thaliana
aactacttttttggtcg

SEQ ID NO: 8840 - DNA, 17 bp, Arabidopsis thaliana
aactacttttttggtta

SEQ ID NO: 8841 - DNA, 17 bp, Arabidopsis thaliana
aactagacctcttatgt

SEQ ID NO: 8842 - DNA, 17 bp, Arabidopsis thaliana
aactagattcagctgag

SEQ ID NO: 8843 - DNA, 17 bp, Arabidopsis thaliana
aactagattctgacccg

SEQ ID NO: 8844 - DNA, 17 bp, Arabidopsis thaliana
aactagattttaacccc

SEQ ID NO: 8845 - DNA, 17 bp, Arabidopsis thaliana
aactagattttaatcca

SEQ ID NO: 8846 - DNA, 17 bp, Arabidopsis thaliana
aactagattttcaccca

SEQ ID NO: 8847 - DNA, 17 bp, Arabidopsis thaliana
aactagattttccctcc

SEQ ID NO: 8848 - DNA, 17 bp, Arabidopsis thaliana
aactagccgggtgttgg

SEQ ID NO: 8849 - DNA, 17 bp, Arabidopsis thaliana
aactagcgacagtcgcc

SEQ ID NO: 8850 - DNA, 17 bp, Arabidopsis thaliana
aactagcgcgtgatgct

SEQ ID NO: 8851 - DNA, 17 bp, Arabidopsis thaliana
aactagctacgtggagg

SEQ ID NO: 8852 - DNA, 17 bp, Arabidopsis thaliana
aactaggatttaacccg

SEQ ID NO: 8853 - DNA, 17 bp, Arabidopsis thaliana
aactaggccaacatcat

SEQ ID NO: 8854 - DNA, 17 bp, Arabidopsis thaliana
aactaggccaatacccg

SEQ ID NO: 8855 - DNA, 17 bp, Arabidopsis thaliana
aactaggcgtgggcatt

SEQ ID NO: 8856 - DNA, 17 bp, Arabidopsis thaliana
aactaggcttttaccct

SEQ ID NO: 8857 - DNA, 17 bp, Arabidopsis thaliana
aactagggaattggtcg

SEQ ID NO: 8858 - DNA, 17 bp, Arabidopsis thaliana
aactaggtgatcaactg

SEQ ID NO: 8859 - DNA, 17 bp, Arabidopsis thaliana
aactagtactcgattgg

SEQ ID NO: 8860 - DNA, 17 bp, Arabidopsis thaliana
aactagtcactttgcaa

SEQ ID NO: 8861 - DNA, 17 bp, Arabidopsis thaliana
aactagtcgcatcctgt

SEQ ID NO: 8862 - DNA, 17 bp, Arabidopsis thaliana
aactagtttgtcccgtt

SEQ ID NO: 8863 - DNA, 17 bp, Arabidopsis thaliana
aactataaacgcgtctt

SEQ ID NO: 8864 - DNA, 17 bp, Arabidopsis thaliana
aactataccgggttaca

SEQ ID NO: 8865 - DNA, 17 bp, Arabidopsis thaliana
aactatataggtcgaac

SEQ ID NO: 8866 - DNA, 17 bp, Arabidopsis thaliana
aactatcaacatgccgc

SEQ ID NO: 8867 - DNA, 17 bp, Arabidopsis thaliana
aactatcacccgttgct

SEQ ID NO: 8868 - DNA, 17 bp, Arabidopsis thaliana
aactatcaggtaaacca

SEQ ID NO: 8869 - DNA, 17 bp, Arabidopsis thaliana
aactatcagtccattgt

SEQ ID NO: 8870 - DNA, 17 bp, Arabidopsis thaliana
aactatcatactcgctg

SEQ ID NO: 8871 - DNA, 17 bp, Arabidopsis thaliana
aactatccatcctgagt

SEQ ID NO: 8872 - DNA, 17 bp, Arabidopsis thaliana
aactatccttctgattc

SEQ ID NO: 8873 - DNA, 17 bp, Arabidopsis thaliana
aactatcgagggttcga

SEQ ID NO: 8874 - DNA, 17 bp, Arabidopsis thaliana
aactatcgggacctctt

SEQ ID NO: 8875 - DNA, 17 bp, Arabidopsis thaliana
aactatctcgggtttga

SEQ ID NO: 8876 - DNA, 17 bp, Arabidopsis thaliana
aactatctctgcagctt

SEQ ID NO: 8877 - DNA, 17 bp, Arabidopsis thaliana
aactatctgtatcagcc

SEQ ID NO: 8878 - DNA, 17 bp, Arabidopsis thaliana
aactatctgtatcatcc

SEQ ID NO: 8879 - DNA, 17 bp, Arabidopsis thaliana
aactatcttcccaaaat

SEQ ID NO: 8880 - DNA, 17 bp, Arabidopsis thaliana
aactatgaaccagtcgt

SEQ ID NO: 8881 - DNA, 17 bp, Arabidopsis thaliana
aactatgaacgccctct

SEQ ID NO: 8882 - DNA, 17 bp, Arabidopsis thaliana
aactatgaccgtagcgg

SEQ ID NO: 8883 - DNA, 17 bp, Arabidopsis thaliana
aactatgactctcttaa

SEQ ID NO: 8884 - DNA, 17 bp, Arabidopsis thaliana
aactatgagaccatctt

SEQ ID NO: 8885 - DNA, 17 bp, Arabidopsis thaliana
aactatgagctacagtg

SEQ ID NO: 8886 - DNA, 17 bp, Arabidopsis thaliana
aactatgagtagggctg

SEQ ID NO: 8887 - DNA, 17 bp, Arabidopsis thaliana
aactatgagtatcttct

SEQ ID NO: 8888 - DNA, 17 bp, Arabidopsis thaliana
aactatgattcgcttgt

SEQ ID NO: 8889 - DNA, 17 bp, Arabidopsis thaliana
aactatgcctatgacgg

SEQ ID NO: 8890 - DNA, 17 bp, Arabidopsis thaliana
aactatgcctgagcgcg

SEQ ID NO: 8891 - DNA, 17 bp, Arabidopsis thaliana
aactatgcctgagcggg

SEQ ID NO: 8892 - DNA, 17 bp, Arabidopsis thaliana
aactatgccttcttcgc

SEQ ID NO: 8893 - DNA, 17 bp, Arabidopsis thaliana
aactatgcgagtgacga

SEQ ID NO: 8894 - DNA, 17 bp, Arabidopsis thaliana
aactatggaccaagcac

SEQ ID NO: 8895 - DNA, 17 bp, Arabidopsis thaliana
aactatggaccacgttg

SEQ ID NO: 8896 - DNA, 17 bp, Arabidopsis thaliana
aactatggactggacat

SEQ ID NO: 8897 - DNA, 17 bp, Arabidopsis thaliana
aactatggagttctgca

SEQ ID NO: 8898 - DNA, 17 bp, Arabidopsis thaliana
aactatggctaatgcgc

SEQ ID NO: 8899 - DNA, 17 bp, Arabidopsis thaliana
aactatggctcaacgtg

SEQ ID NO: 8900 - DNA, 17 bp, Arabidopsis thaliana
aactatggctggtgtta

SEQ ID NO: 8901 - DNA, 17 bp, Arabidopsis thaliana
aactatggcttgtgatg

SEQ ID NO: 8902 - DNA, 17 bp, Arabidopsis thaliana
aactatgggcccatgtt

SEQ ID NO: 8903 - DNA, 17 bp, Arabidopsis thaliana
aactatggtcgtaggcg

SEQ ID NO: 8904 - DNA, 17 bp, Arabidopsis thaliana
aactatggttgggactc

SEQ ID NO: 8905 - DNA, 17 bp, Arabidopsis thaliana
aactatgtctgccgtat

SEQ ID NO: 8906 - DNA, 17 bp, Arabidopsis thaliana
aactatgtgacggtggc

SEQ ID NO: 8907 - DNA, 17 bp, Arabidopsis thaliana
aactatgttcttgggtt

SEQ ID NO: 8908 - DNA, 17 bp, Arabidopsis thaliana
aactatgtttgtgtcga

SEQ ID NO: 8909 - DNA, 17 bp, Arabidopsis thaliana
aactatgttttgtccta

SEQ ID NO: 8910 - DNA, 17 bp, Arabidopsis thaliana
aactattactctcttaa

SEQ ID NO: 8911 - DNA, 17 bp, Arabidopsis thaliana
aactattactggctgcg

SEQ ID NO: 8912 - DNA, 17 bp, Arabidopsis thaliana
aactattcacaccacca

SEQ ID NO: 8913 - DNA, 17 bp, Arabidopsis thaliana
aactattcatagcccgc

SEQ ID NO: 8914 - DNA, 17 bp, Arabidopsis thaliana
aactattccatatcagt

SEQ ID NO: 8915 - DNA, 17 bp, Arabidopsis thaliana
aactattcgccgtcgtt

SEQ ID NO: 8916 - DNA, 17 bp, Arabidopsis thaliana
aactattcgccgtgggt

SEQ ID NO: 8917 - DNA, 17 bp, Arabidopsis thaliana
aactattctacagggac

SEQ ID NO: 8918 - DNA, 17 bp, Arabidopsis thaliana
aactattctcaatcggg

SEQ ID NO: 8919 - DNA, 17 bp, Arabidopsis thaliana
aactattgagaccgctt

SEQ ID NO: 8920 - DNA, 17 bp, Arabidopsis thaliana
aactattgagaccgttt

SEQ ID NO: 8921 - DNA, 17 bp, Arabidopsis thaliana
aactattgagcctgacc

SEQ ID NO: 8922 - DNA, 17 bp, Arabidopsis thaliana
aactattgattgcctgg

SEQ ID NO: 8923 - DNA, 17 bp, Arabidopsis thaliana
aactattgggacctcct

SEQ ID NO: 8924 - DNA, 17 bp, Arabidopsis thaliana
aactattgggccaacgg

SEQ ID NO: 8925 - DNA, 17 bp, Arabidopsis thaliana
aactattgggccaagga

SEQ ID NO: 8926 - DNA, 17 bp, Arabidopsis thaliana
aactattgggccaaggg

SEQ ID NO: 8927 - DNA, 17 bp, Arabidopsis thaliana
aactattgggcccaccc

SEQ ID NO: 8928 - DNA, 17 bp, Arabidopsis thaliana
aactattgggtcggacc

SEQ ID NO: 8929 - DNA, 17 bp, Arabidopsis thaliana
aactattggtgccgtga

SEQ ID NO: 8930 - DNA, 17 bp, Arabidopsis thaliana
aactattgtgtgttcac

SEQ ID NO: 8931 - DNA, 17 bp, Arabidopsis thaliana
aactatttcatacaggt

SEQ ID NO: 8932 - DNA, 17 bp, Arabidopsis thaliana
aactatttccgtgttta

SEQ ID NO: 8933 - DNA, 17 bp, Arabidopsis thaliana
aactatttcgggtctga

SEQ ID NO: 8934 - DNA, 17 bp, Arabidopsis thaliana
aactatttgacctgcac

SEQ ID NO: 8935 - DNA, 17 bp, Arabidopsis thaliana
aactatttgccaagggg

SEQ ID NO: 8936 - DNA, 17 bp, Arabidopsis thaliana
aactatttgcggtgcag

SEQ ID NO: 8937 - DNA, 17 bp, Arabidopsis thaliana
aactattttgacggagt

SEQ ID NO: 8938 - DNA, 17 bp, Arabidopsis thaliana
aactcaaaagccttgtt

SEQ ID NO: 8939 - DNA, 17 bp, Arabidopsis thaliana
aactcaaaagtattcac

SEQ ID NO: 8940 - DNA, 17 bp, Arabidopsis thaliana
aactcaaacatgtgctt

SEQ ID NO: 8941 - DNA, 17 bp, Arabidopsis thaliana
aactcaaactcgacatg

SEQ ID NO: 8942 - DNA, 17 bp, Arabidopsis thaliana
aactcaaactcgttcca

SEQ ID NO: 8943 - DNA, 17 bp, Arabidopsis thaliana
aactcaaaggattgaac

SEQ ID NO: 8944 - DNA, 17 bp, Arabidopsis thaliana
aactcaaaggattgcac

SEQ ID NO: 8945 - DNA, 17 bp, Arabidopsis thaliana
aactcaaaggattgtgc

SEQ ID NO: 8946 - DNA, 17 bp, Arabidopsis thaliana
aactcaaatctcatgcg

SEQ ID NO: 8947 - DNA, 17 bp, Arabidopsis thaliana
aactcaacagcattttg

SEQ ID NO: 8948 - DNA, 17 bp, Arabidopsis thaliana
aactcaaccttgccgtt

SEQ ID NO: 8949 - DNA, 17 bp, Arabidopsis thaliana
aactcaacgaaacttga

SEQ ID NO: 8950 - DNA, 17 bp, Arabidopsis thaliana
aactcaacgaatcaaga

SEQ ID NO: 8951 - DNA, 17 bp, Arabidopsis thaliana
aactcaacggaccgccc

SEQ ID NO: 8952 - DNA, 17 bp, Arabidopsis thaliana
aactcaactccttcatc

SEQ ID NO: 8953 - DNA, 17 bp, Arabidopsis thaliana
aactcaactggtccggt

SEQ ID NO: 8954 - DNA, 17 bp, Arabidopsis thaliana
aactcaagcggtatttg

SEQ ID NO: 8955 - DNA, 17 bp, Arabidopsis thaliana
aactcaaggtggagctt

SEQ ID NO: 8956 - DNA, 17 bp, Arabidopsis thaliana
aactcaaggtggctata

SEQ ID NO: 8957 - DNA, 17 bp, Arabidopsis thaliana
aactcaaggttgaacaa

SEQ ID NO: 8958 - DNA, 17 bp, Arabidopsis thaliana
aactcaatttgtgacaa

SEQ ID NO: 8959 - DNA, 17 bp, Arabidopsis thaliana
aactcaattttcggcgg

SEQ ID NO: 8960 - DNA, 17 bp, Arabidopsis thaliana
aactcacaagatcatga

SEQ ID NO: 8961 - DNA, 17 bp, Arabidopsis thaliana
aactcacaatagggcca

SEQ ID NO: 8962 - DNA, 17 bp, Arabidopsis thaliana
aactcacagctcacaat

SEQ ID NO: 8963 - DNA, 17 bp, Arabidopsis thaliana
aactcacctgccgaatc

SEQ ID NO: 8964 - DNA, 17 bp, Arabidopsis thaliana
aactcacgacgcactag

SEQ ID NO: 8965 - DNA, 17 bp, Arabidopsis thaliana
aactcacgctacacgtt

SEQ ID NO: 8966 - DNA, 17 bp, Arabidopsis thaliana
aactcactagcagagcc

SEQ ID NO: 8967 - DNA, 17 bp, Arabidopsis thaliana
aactcactcctcctgct

SEQ ID NO: 8968 - DNA, 17 bp, Arabidopsis thaliana
aactcactctaagtctt

SEQ ID NO: 8969 - DNA, 17 bp, Arabidopsis thaliana
aactcactttgatttct

SEQ ID NO: 8970 - DNA, 17 bp, Arabidopsis thaliana
aactcagaaaatttagg

SEQ ID NO: 8971 - DNA, 17 bp, Arabidopsis thaliana
aactcagaattagggtg

SEQ ID NO: 8972 - DNA, 17 bp, Arabidopsis thaliana
aactcagacatcgatct

SEQ ID NO: 8973 - DNA, 17 bp, Arabidopsis thaliana
aactcagacatcgatgt

SEQ ID NO: 8974 - DNA, 17 bp, Arabidopsis thaliana
aactcagagatctggcg

SEQ ID NO: 8975 - DNA, 17 bp, Arabidopsis thaliana
aactcagagtgccttgt

SEQ ID NO: 8976 - DNA, 17 bp, Arabidopsis thaliana
aactcagcagcaggtgg

SEQ ID NO: 8977 - DNA, 17 bp, Arabidopsis thaliana
aactcagcagtgtgatt

SEQ ID NO: 8978 - DNA, 17 bp, Arabidopsis thaliana
aactcagccctttgtcg

SEQ ID NO: 8979 - DNA, 17 bp, Arabidopsis thaliana
aactcagccgtaacgtc

SEQ ID NO: 8980 - DNA, 17 bp, Arabidopsis thaliana
aactcagccgtaactgc

SEQ ID NO: 8981 - DNA, 17 bp, Arabidopsis thaliana
aactcagcctctattgc

SEQ ID NO: 8982 - DNA, 17 bp, Arabidopsis thaliana
aactcagcgccttcttc

SEQ ID NO: 8983 - DNA, 17 bp, Arabidopsis thaliana
aactcagcgtttgcgga

SEQ ID NO: 8984 - DNA, 17 bp, Arabidopsis thaliana
aactcagctgactctgg

SEQ ID NO: 8985 - DNA, 17 bp, Arabidopsis thaliana
aactcagctgaggaatg

SEQ ID NO: 8986 - DNA, 17 bp, Arabidopsis thaliana
aactcagctgtattgcg

SEQ ID NO: 8987 - DNA, 17 bp, Arabidopsis thaliana
aactcaggacagacagt

SEQ ID NO: 8988 - DNA, 17 bp, Arabidopsis thaliana
aactcaggagggatagc

SEQ ID NO: 8989 - DNA, 17 bp, Arabidopsis thaliana
aactcaggatggatagc

SEQ ID NO: 8990 - DNA, 17 bp, Arabidopsis thaliana
aactcaggcaacggtat

SEQ ID NO: 8991 - DNA, 17 bp, Arabidopsis thaliana
aactcaggcacttcttc

SEQ ID NO: 8992 - DNA, 17 bp, Arabidopsis thaliana
aactcaggcgtaactgc

SEQ ID NO: 8993 - DNA, 17 bp, Arabidopsis thaliana
aactcagggacgttttt

SEQ ID NO: 8994 - DNA, 17 bp, Arabidopsis thaliana
aactcagggatgtccgg

SEQ ID NO: 8995 - DNA, 17 bp, Arabidopsis thaliana
aactcagggatgtgttt

SEQ ID NO: 8996 - DNA, 17 bp, Arabidopsis thaliana
aactcagggatgtttct

SEQ ID NO: 8997 - DNA, 17 bp, Arabidopsis thaliana
aactcaggtgatcgcga

SEQ ID NO: 8998 - DNA, 17 bp, Arabidopsis thaliana
aactcaggtgattgcga

SEQ ID NO: 8999 - DNA, 17 bp, Arabidopsis thaliana
aactcaggtgattgtga

SEQ ID NO: 9000 - DNA, 17 bp, Arabidopsis thaliana
aactcaggtgcattatc

SEQ ID NO: 9001 - DNA, 17 bp, Arabidopsis thaliana
aactcaggtgtggctgg

SEQ ID NO: 9002 - DNA, 17 bp, Arabidopsis thaliana
aactcaggttaatcagt

SEQ ID NO: 9003 - DNA, 17 bp, Arabidopsis thaliana
aactcagtcatcgatgt

SEQ ID NO: 9004 - DNA, 17 bp, Arabidopsis thaliana
aactcagtgcccagacc

SEQ ID NO: 9005 - DNA, 17 bp, Arabidopsis thaliana
aactcagtggtagagca

SEQ ID NO: 9006 - DNA, 17 bp, Arabidopsis thaliana
aactcagtgtccagacc

SEQ ID NO: 9007 - DNA, 17 bp, Arabidopsis thaliana
aactcagtgtccatacc

SEQ ID NO: 9008 - DNA, 17 bp, Arabidopsis thaliana
aactcagtgtccggacc

SEQ ID NO: 9009 - DNA, 17 bp, Arabidopsis thaliana
aactcagtttgagaccg

SEQ ID NO: 9010 - DNA, 17 bp, Arabidopsis thaliana
aactcagtttggaagca

SEQ ID NO: 9011 - DNA, 17 bp, Arabidopsis thaliana
aactcagtttggaggca

SEQ ID NO: 9012 - DNA, 17 bp, Arabidopsis thaliana
aactcagtttggagtca

SEQ ID NO: 9013 - DNA, 17 bp, Arabidopsis thaliana
aactcataagatcgtga

SEQ ID NO: 9014 - DNA, 17 bp, Arabidopsis thaliana
aactcataagatcgtgt

SEQ ID NO: 9015 - DNA, 17 bp, Arabidopsis thaliana
aactcataagattgtgc

SEQ ID NO: 9016 - DNA, 17 bp, Arabidopsis thaliana
aactcatagccgacgac

SEQ ID NO: 9017 - DNA, 17 bp, Arabidopsis thaliana
aactcatagccgacgat

SEQ ID NO: 9018 - DNA, 17 bp, Arabidopsis thaliana
aactcataggaccgtgc

SEQ ID NO: 9019 - DNA, 17 bp, Arabidopsis thaliana
aactcataggatcatgc

SEQ ID NO: 9020 - DNA, 17 bp, Arabidopsis thaliana
aactcataggatcgtcc

SEQ ID NO: 9021 - DNA, 17 bp, Arabidopsis thaliana
aactcataggatcgtgc

SEQ ID NO: 9022 - DNA, 17 bp, Arabidopsis thaliana
aactcataggatcgtgt

SEQ ID NO: 9023 - DNA, 17 bp, Arabidopsis thaliana
aactcataggatcgttc

SEQ ID NO: 9024 - DNA, 17 bp, Arabidopsis thaliana
aactcataggattggtg

SEQ ID NO: 9025 - DNA, 17 bp, Arabidopsis thaliana
aactcataggattgtgc

SEQ ID NO: 9026 - DNA, 17 bp, Arabidopsis thaliana
aactcataggattgttc

SEQ ID NO: 9027 - DNA, 17 bp, Arabidopsis thaliana
aactcatagggtcgtgc

SEQ ID NO: 9028 - DNA, 17 bp, Arabidopsis thaliana
aactcatcaagagccac

SEQ ID NO: 9029 - DNA, 17 bp, Arabidopsis thaliana
aactcatcacgggctgc

SEQ ID NO: 9030 - DNA, 17 bp, Arabidopsis thaliana
aactcatcacggtgcaa

SEQ ID NO: 9031 - DNA, 17 bp, Arabidopsis thaliana
aactcatccgctagacg

SEQ ID NO: 9032 - DNA, 17 bp, Arabidopsis thaliana
aactcatcctgttgtga

SEQ ID NO: 9033 - DNA, 17 bp, Arabidopsis thaliana
aactcatctccatccca

SEQ ID NO: 9034 - DNA, 17 bp, Arabidopsis thaliana
aactcatgaaccctaat

SEQ ID NO: 9035 - DNA, 17 bp, Arabidopsis thaliana
aactcatgagatcatgc

SEQ ID NO: 9036 - DNA, 17 bp, Arabidopsis thaliana
aactcatgatgacatga

SEQ ID NO: 9037 - DNA, 17 bp, Arabidopsis thaliana
aactcatgatgacatgt

SEQ ID NO: 9038 - DNA, 17 bp, Arabidopsis thaliana
aactcatgattacatgt

SEQ ID NO: 9039 - DNA, 17 bp, Arabidopsis thaliana
aactcatgattgcaggt

SEQ ID NO: 9040 - DNA, 17 bp, Arabidopsis thaliana
aactcatggtatcggcc

SEQ ID NO: 9041 - DNA, 17 bp, Arabidopsis thaliana
aactcatgtagctcagg

SEQ ID NO: 9042 - DNA, 17 bp, Arabidopsis thaliana
aactcatgtgatcgcga

SEQ ID NO: 9043 - DNA, 17 bp, Arabidopsis thaliana
aactcatgtggtttgac

SEQ ID NO: 9044 - DNA, 17 bp, Arabidopsis thaliana
aactcattctggctgct

SEQ ID NO: 9045 - DNA, 17 bp, Arabidopsis thaliana
aactcatttggctaagg

SEQ ID NO: 9046 - DNA, 17 bp, Arabidopsis thaliana
aactcattttccgttac

SEQ ID NO: 9047 - DNA, 17 bp, Arabidopsis thaliana
aactccaaacggtgtcg

SEQ ID NO: 9048 - DNA, 17 bp, Arabidopsis thaliana
aactccaactagtatga

SEQ ID NO: 9049 - DNA, 17 bp, Arabidopsis thaliana
aactccaaggactcgat

SEQ ID NO: 9050 - DNA, 17 bp, Arabidopsis thaliana
aactccaaggtcgttga

SEQ ID NO: 9051 - DNA, 17 bp, Arabidopsis thaliana
aactccaagtttgacca

SEQ ID NO: 9052 - DNA, 17 bp, Arabidopsis thaliana
aactccacgagttgtca

SEQ ID NO: 9053 - DNA, 17 bp, Arabidopsis thaliana
aactccacggttgtggt

SEQ ID NO: 9054 - DNA, 17 bp, Arabidopsis thaliana
aactccactgagattca

SEQ ID NO: 9055 - DNA, 17 bp, Arabidopsis thaliana
aactccaggatttattt

SEQ ID NO: 9056 - DNA, 17 bp, Arabidopsis thaliana
aactccaggctcaagtt

SEQ ID NO: 9057 - DNA, 17 bp, Arabidopsis thaliana
aactccagtgcttcaaa

SEQ ID NO: 9058 - DNA, 17 bp, Arabidopsis thaliana
aactccatgagttgaca

SEQ ID NO: 9059 - DNA, 17 bp, Arabidopsis thaliana
aactccatgtggtcagg

SEQ ID NO: 9060 - DNA, 17 bp, Arabidopsis thaliana
aactccattgatcttgg

SEQ ID NO: 9061 - DNA, 17 bp, Arabidopsis thaliana
aactccattgatctttg

SEQ ID NO: 9062 - DNA, 17 bp, Arabidopsis thaliana
aactcccaagttgcctc

SEQ ID NO: 9063 - DNA, 17 bp, Arabidopsis thaliana
aactcccagtggtaggt

SEQ ID NO: 9064 - DNA, 17 bp, Arabidopsis thaliana
aactcccatcaggtttc

SEQ ID NO: 9065 - DNA, 17 bp, Arabidopsis thaliana
aactcccgcaaacgcac

SEQ ID NO: 9066 - DNA, 17 bp, Arabidopsis thaliana
aactcccgcaaccgtaa

SEQ ID NO: 9067 - DNA, 17 bp, Arabidopsis thaliana
aactcccggagagacga

SEQ ID NO: 9068 - DNA, 17 bp, Arabidopsis thaliana
aactcccggtgccaacc

SEQ ID NO: 9069 - DNA, 17 bp, Arabidopsis thaliana
aactcccggttggaaat

SEQ ID NO: 9070 - DNA, 17 bp, Arabidopsis thaliana
aactcccggttggagat

SEQ ID NO: 9071 - DNA, 17 bp, Arabidopsis thaliana
aactcccgtggttgacg

SEQ ID NO: 9072 - DNA, 17 bp, Arabidopsis thaliana
aactcccgttggtgcga

SEQ ID NO: 9073 - DNA, 17 bp, Arabidopsis thaliana
aactccgaaaactacat

SEQ ID NO: 9074 - DNA, 17 bp, Arabidopsis thaliana
aactccgaggatttttt

SEQ ID NO: 9075 - DNA, 17 bp, Arabidopsis thaliana
aactccgatcgtgatct

SEQ ID NO: 9076 - DNA, 17 bp, Arabidopsis thaliana
aactccgatgtccacca

SEQ ID NO: 9077 - DNA, 17 bp, Arabidopsis thaliana
aactccgcagttaagcg

SEQ ID NO: 9078 - DNA, 17 bp, Arabidopsis thaliana
aactccgccattgtctc

SEQ ID NO: 9079 - DNA, 17 bp, Arabidopsis thaliana
aactccgccccgcagta

SEQ ID NO: 9080 - DNA, 17 bp, Arabidopsis thaliana
aactccgcgaagccgag

SEQ ID NO: 9081 - DNA, 17 bp, Arabidopsis thaliana
aactccggaacctaagt

SEQ ID NO: 9082 - DNA, 17 bp, Arabidopsis thaliana
aactccggagtggttgc

SEQ ID NO: 9083 - DNA, 17 bp, Arabidopsis thaliana
aactccggtggcttcgt

SEQ ID NO: 9084 - DNA, 17 bp, Arabidopsis thaliana
aactccgtcctgttgcc

SEQ ID NO: 9085 - DNA, 17 bp, Arabidopsis thaliana
aactccgtcgccggctg

SEQ ID NO: 9086 - DNA, 17 bp, Arabidopsis thaliana
aactccgtgattgtttg

SEQ ID NO: 9087 - DNA, 17 bp, Arabidopsis thaliana
aactccgtttgcttgtt

SEQ ID NO: 9088 - DNA, 17 bp, Arabidopsis thaliana
aactccgttttgcggtc

SEQ ID NO: 9089 - DNA, 17 bp, Arabidopsis thaliana
aactcctaaaatctggt

SEQ ID NO: 9090 - DNA, 17 bp, Arabidopsis thaliana
aactcctaggcgttcta

SEQ ID NO: 9091 - DNA, 17 bp, Arabidopsis thaliana
aactcctattggaccat

SEQ ID NO: 9092 - DNA, 17 bp, Arabidopsis thaliana
aactcctcatctcaagg

SEQ ID NO: 9093 - DNA, 17 bp, Arabidopsis thaliana
aactcctcggttggcgg

SEQ ID NO: 9094 - DNA, 17 bp, Arabidopsis thaliana
aactcctctgtggctgg

SEQ ID NO: 9095 - DNA, 17 bp, Arabidopsis thaliana
aactcctcttgctggcc

SEQ ID NO: 9096 - DNA, 17 bp, Arabidopsis thaliana
aactcctgaaattgggc

SEQ ID NO: 9097 - DNA, 17 bp, Arabidopsis thaliana
aactcctgagcagagag

SEQ ID NO: 9098 - DNA, 17 bp, Arabidopsis thaliana
aactcctggaactgact

SEQ ID NO: 9099 - DNA, 17 bp, Arabidopsis thaliana
aactcctgtggcgggcc

SEQ ID NO: 9100 - DNA, 17 bp, Arabidopsis thaliana
aactccttcggcgcctt

SEQ ID NO: 9101 - DNA, 17 bp, Arabidopsis thaliana
aactccttctaagagct

SEQ ID NO: 9102 - DNA, 17 bp, Arabidopsis thaliana
aactccttgtaagaact

SEQ ID NO: 9103 - DNA, 17 bp, Arabidopsis thaliana
aactccttgtaagactc

SEQ ID NO: 9104 - DNA, 17 bp, Arabidopsis thaliana
aactcctttgtcctgtt

SEQ ID NO: 9105 - DNA, 17 bp, Arabidopsis thaliana
aactcgaaaataccaag

SEQ ID NO: 9106 - DNA, 17 bp, Arabidopsis thaliana
aactcgaaaccaaatct

SEQ ID NO: 9107 - DNA, 17 bp, Arabidopsis thaliana
aactcgaatgtctgatt

SEQ ID NO: 9108 - DNA, 17 bp, Arabidopsis thaliana
aactcgacaaagtgaag

SEQ ID NO: 9109 - DNA, 17 bp, Arabidopsis thaliana
aactcgacaactaacgg

SEQ ID NO: 9110 - DNA, 17 bp, Arabidopsis thaliana
aactcgacggatcgcaa

SEQ ID NO: 9111 - DNA, 17 bp, Arabidopsis thaliana
aactcgacggatcgcag

SEQ ID NO: 9112 - DNA, 17 bp, Arabidopsis thaliana
aactcgacggatcgcat

SEQ ID NO: 9113 - DNA, 17 bp, Arabidopsis thaliana
aactcgacggatcgccc

SEQ ID NO: 9114 - DNA, 17 bp, Arabidopsis thaliana
aactcgacggatcgcct

SEQ ID NO: 9115 - DNA, 17 bp, Arabidopsis thaliana
aactcgacggatcgctt

SEQ ID NO: 9116 - DNA, 17 bp, Arabidopsis thaliana
aactcgactgaaaggct

SEQ ID NO: 9117 - DNA, 17 bp, Arabidopsis thaliana
aactcgactgcggcggc

SEQ ID NO: 9118 - DNA, 17 bp, Arabidopsis thaliana
aactcgagaaatggccg

SEQ ID NO: 9119 - DNA, 17 bp, Arabidopsis thaliana
aactcgagcagccactc

SEQ ID NO: 9120 - DNA, 17 bp, Arabidopsis thaliana
aactcgagcagccactt

SEQ ID NO: 9121 - DNA, 17 bp, Arabidopsis thaliana
aactcgagcaggcactc

SEQ ID NO: 9122 - DNA, 17 bp, Arabidopsis thaliana
aactcgatcttactcgg

SEQ ID NO: 9123 - DNA, 17 bp, Arabidopsis thaliana
aactcgattgtctcctc

SEQ ID NO: 9124 - DNA, 17 bp, Arabidopsis thaliana
aactcgcagacatcttc

SEQ ID NO: 9125 - DNA, 17 bp, Arabidopsis thaliana
aactcgcaggtaaggga

SEQ ID NO: 9126 - DNA, 17 bp, Arabidopsis thaliana
aactcgccatctttgtg

SEQ ID NO: 9127 - DNA, 17 bp, Arabidopsis thaliana
aactcgccccgctaagt

SEQ ID NO: 9128 - DNA, 17 bp, Arabidopsis thaliana
aactcgccgattaaccc

SEQ ID NO: 9129 - DNA, 17 bp, Arabidopsis thaliana
aactcgccgtccattgt

SEQ ID NO: 9130 - DNA, 17 bp, Arabidopsis thaliana
aactcgcctgcatgaag

SEQ ID NO: 9131 - DNA, 17 bp, Arabidopsis thaliana
aactcgccttagtcgag

SEQ ID NO: 9132 - DNA, 17 bp, Arabidopsis thaliana
aactcgcgaatagaaga

SEQ ID NO: 9133 - DNA, 17 bp, Arabidopsis thaliana
aactcgcgacccagtga

SEQ ID NO: 9134 - DNA, 17 bp, Arabidopsis thaliana
aactcgcgagatcatga

SEQ ID NO: 9135 - DNA, 17 bp, Arabidopsis thaliana
aactcgcgatcgagtga

SEQ ID NO: 9136 - DNA, 17 bp, Arabidopsis thaliana
aactcgcggatcttagt

SEQ ID NO: 9137 - DNA, 17 bp, Arabidopsis thaliana
aactcgcggattctatt

SEQ ID NO: 9138 - DNA, 17 bp, Arabidopsis thaliana
aactcgcggtacaccgt

SEQ ID NO: 9139 - DNA, 17 bp, Arabidopsis thaliana
aactcgcgtccgagctc

SEQ ID NO: 9140 - DNA, 17 bp, Arabidopsis thaliana
aactcgcgtctgagaaa

SEQ ID NO: 9141 - DNA, 17 bp, Arabidopsis thaliana
aactcgctaattccgtc

SEQ ID NO: 9142 - DNA, 17 bp, Arabidopsis thaliana
aactcgctccgaggtgc

SEQ ID NO: 9143 - DNA, 17 bp, Arabidopsis thaliana
aactcggaaatttgctt

SEQ ID NO: 9144 - DNA, 17 bp, Arabidopsis thaliana
aactcggaatcggtgtt

SEQ ID NO: 9145 - DNA, 17 bp, Arabidopsis thaliana
aactcggaattgaagac

SEQ ID NO: 9146 - DNA, 17 bp, Arabidopsis thaliana
aactcggacatttgcat

SEQ ID NO: 9147 - DNA, 17 bp, Arabidopsis thaliana
aactcggagatataatg

SEQ ID NO: 9148 - DNA, 17 bp, Arabidopsis thaliana
aactcggagttccagag

SEQ ID NO: 9149 - DNA, 17 bp, Arabidopsis thaliana
aactcggatatctgatt

SEQ ID NO: 9150 - DNA, 17 bp, Arabidopsis thaliana
aactcggatatgtgatt

SEQ ID NO: 9151 - DNA, 17 bp, Arabidopsis thaliana
aactcggatgtctgatt

SEQ ID NO: 9152 - DNA, 17 bp, Arabidopsis thaliana
aactcggatgtttgatt

SEQ ID NO: 9153 - DNA, 17 bp, Arabidopsis thaliana
aactcggattaggcaat

SEQ ID NO: 9154 - DNA, 17 bp, Arabidopsis thaliana
aactcggcaacccgtaa

SEQ ID NO: 9155 - DNA, 17 bp, Arabidopsis thaliana
aactcggcatagacttg

SEQ ID NO: 9156 - DNA, 17 bp, Arabidopsis thaliana
aactcggccaacgtggt

SEQ ID NO: 9157 - DNA, 17 bp, Arabidopsis thaliana
aactcggccaactatgt

SEQ ID NO: 9158 - DNA, 17 bp, Arabidopsis thaliana
aactcggcctgttggtg

SEQ ID NO: 9159 - DNA, 17 bp, Arabidopsis thaliana
aactcgggacacgggcg

SEQ ID NO: 9160 - DNA, 17 bp, Arabidopsis thaliana
aactcgggacagacagt

SEQ ID NO: 9161 - DNA, 17 bp, Arabidopsis thaliana
aactcgggacagatagt

SEQ ID NO: 9162 - DNA, 17 bp, Arabidopsis thaliana
aactcgggatttaatta

SEQ ID NO: 9163 - DNA, 17 bp, Arabidopsis thaliana
aactcgggcgcagaaaa

SEQ ID NO: 9164 - DNA, 17 bp, Arabidopsis thaliana
aactcgggctctaatgg

SEQ ID NO: 9165 - DNA, 17 bp, Arabidopsis thaliana
aactcggggtgtttcac

SEQ ID NO: 9166 - DNA, 17 bp, Arabidopsis thaliana
aactcgggttcggtcaa

SEQ ID NO: 9167 - DNA, 17 bp, Arabidopsis thaliana
aactcggtcagtccgac

SEQ ID NO: 9168 - DNA, 17 bp, Arabidopsis thaliana
aactcggtcattgtgtc

SEQ ID NO: 9169 - DNA, 17 bp, Arabidopsis thaliana
aactcggtctcaggcac

SEQ ID NO: 9170 - DNA, 17 bp, Arabidopsis thaliana
aactcggttaccaattt

SEQ ID NO: 9171 - DNA, 17 bp, Arabidopsis thaliana
aactcggttggtgctga

SEQ ID NO: 9172 - DNA, 17 bp, Arabidopsis thaliana
aactcgtacatcgccgc

SEQ ID NO: 9173 - DNA, 17 bp, Arabidopsis thaliana
aactcgtagatgggagg

SEQ ID NO: 9174 - DNA, 17 bp, Arabidopsis thaliana
aactcgtccatgcgtcg

SEQ ID NO: 9175 - DNA, 17 bp, Arabidopsis thaliana
aactcgtcccatgattt

SEQ ID NO: 9176 - DNA, 17 bp, Arabidopsis thaliana
aactcgtcgactaactc

SEQ ID NO: 9177 - DNA, 17 bp, Arabidopsis thaliana
aactcgtctattgacta

SEQ ID NO: 9178 - DNA, 17 bp, Arabidopsis thaliana
aactcgtctattgactg

SEQ ID NO: 9179 - DNA, 17 bp, Arabidopsis thaliana
aactcgtctcccgcact

SEQ ID NO: 9180 - DNA, 17 bp, Arabidopsis thaliana
aactcgtctgcattgtt

SEQ ID NO: 9181 - DNA, 17 bp, Arabidopsis thaliana
aactcgtgaaatggcca

SEQ ID NO: 9182 - DNA, 17 bp, Arabidopsis thaliana
aactcgtgaaatggccg

SEQ ID NO: 9183 - DNA, 17 bp, Arabidopsis thaliana
aactcgtgactcggtga

SEQ ID NO: 9184 - DNA, 17 bp, Arabidopsis thaliana
aactcgtgatctggtga

SEQ ID NO: 9185 - DNA, 17 bp, Arabidopsis thaliana
aactcgtgcagtttggt

SEQ ID NO: 9186 - DNA, 17 bp, Arabidopsis thaliana
aactcgtggaccatctg

SEQ ID NO: 9187 - DNA, 17 bp, Arabidopsis thaliana
aactcgtggatacacag

SEQ ID NO: 9188 - DNA, 17 bp, Arabidopsis thaliana
aactcgtggatacgcat

SEQ ID NO: 9189 - DNA, 17 bp, Arabidopsis thaliana
aactcgtggcacgaccc

SEQ ID NO: 9190 - DNA, 17 bp, Arabidopsis thaliana
aactcgtggcgccatct

SEQ ID NO: 9191 - DNA, 17 bp, Arabidopsis thaliana
aactcgtggctgaatgc

SEQ ID NO: 9192 - DNA, 17 bp, Arabidopsis thaliana
aactcgtgggacgattt

SEQ ID NO: 9193 - DNA, 17 bp, Arabidopsis thaliana
aactcgtggtatacagt

SEQ ID NO: 9194 - DNA, 17 bp, Arabidopsis thaliana
aactcgtggtgttgtct

SEQ ID NO: 9195 - DNA, 17 bp, Arabidopsis thaliana
aactcgtgtctctcatg

SEQ ID NO: 9196 - DNA, 17 bp, Arabidopsis thaliana
aactcgtgttgcttgac

SEQ ID NO: 9197 - DNA, 17 bp, Arabidopsis thaliana
aactcgttagttcgtgt

SEQ ID NO: 9198 - DNA, 17 bp, Arabidopsis thaliana
aactcgttccttgattt

SEQ ID NO: 9199 - DNA, 17 bp, Arabidopsis thaliana
aactcgttctgtaactg

SEQ ID NO: 9200 - DNA, 17 bp, Arabidopsis thaliana
aactcgttctttctcac

SEQ ID NO: 9201 - DNA, 17 bp, Arabidopsis thaliana
aactcgttgtaaagccc

SEQ ID NO: 9202 - DNA, 17 bp, Arabidopsis thaliana
aactcgtttcagagcac

SEQ ID NO: 9203 - DNA, 17 bp, Arabidopsis thaliana
aactcgtttttcaggaa

SEQ ID NO: 9204 - DNA, 17 bp, Arabidopsis thaliana
aactcgtttttcaggat

SEQ ID NO: 9205 - DNA, 17 bp, Arabidopsis thaliana
aactctaagttgtgcct

SEQ ID NO: 9206 - DNA, 17 bp, Arabidopsis thaliana
aactctaagttgtgtcc

SEQ ID NO: 9207 - DNA, 17 bp, Arabidopsis thaliana
aactctacagccctccc

SEQ ID NO: 9208 - DNA, 17 bp, Arabidopsis thaliana
aactctacatgtggtgc

SEQ ID NO: 9209 - DNA, 17 bp, Arabidopsis thaliana
aactctaccagactcaa

SEQ ID NO: 9210 - DNA, 17 bp, Arabidopsis thaliana
aactctacgagattcat

SEQ ID NO: 9211 - DNA, 17 bp, Arabidopsis thaliana
aactctactccgactaa

SEQ ID NO: 9212 - DNA, 17 bp, Arabidopsis thaliana
aactctactgcccggga

SEQ ID NO: 9213 - DNA, 17 bp, Arabidopsis thaliana
aactctactgcggtgac

SEQ ID NO: 9214 - DNA, 17 bp, Arabidopsis thaliana
aactctacttcaagtta

SEQ ID NO: 9215 - DNA, 17 bp, Arabidopsis thaliana
aactctacttcaagttc

SEQ ID NO: 9216 - DNA, 17 bp, Arabidopsis thaliana
aactctagaacttggat

SEQ ID NO: 9217 - DNA, 17 bp, Arabidopsis thaliana
aactctagaatttggat

SEQ ID NO: 9218 - DNA, 17 bp, Arabidopsis thaliana
aactctagagctagctt

SEQ ID NO: 9219 - DNA, 17 bp, Arabidopsis thaliana
aactctagcagattttg

SEQ ID NO: 9220 - DNA, 17 bp, Arabidopsis thaliana
aactctagctccgccta

SEQ ID NO: 9221 - DNA, 17 bp, Arabidopsis thaliana
aactctaggagaagctt

SEQ ID NO: 9222 - DNA, 17 bp, Arabidopsis thaliana
aactctaggatgtgttg

SEQ ID NO: 9223 - DNA, 17 bp, Arabidopsis thaliana
aactctagggttcatca

SEQ ID NO: 9224 - DNA, 17 bp, Arabidopsis thaliana
aactctagtgggaatga

SEQ ID NO: 9225 - DNA, 17 bp, Arabidopsis thaliana
aactctataggctaaac

SEQ ID NO: 9226 - DNA, 17 bp, Arabidopsis thaliana
aactctatatgaatcca

SEQ ID NO: 9227 - DNA, 17 bp, Arabidopsis thaliana
aactctatcgatccgat

SEQ ID NO: 9228 - DNA, 17 bp, Arabidopsis thaliana
aactctatcggctgatc

SEQ ID NO: 9229 - DNA, 17 bp, Arabidopsis thaliana
aactctatggtgtagtg

SEQ ID NO: 9230 - DNA, 17 bp, Arabidopsis thaliana
aactctcaaggaccctt

SEQ ID NO: 9231 - DNA, 17 bp, Arabidopsis thaliana
aactctcaagttgtgtg

SEQ ID NO: 9232 - DNA, 17 bp, Arabidopsis thaliana
aactctcagacttgagt

SEQ ID NO: 9233 - DNA, 17 bp, Arabidopsis thaliana
aactctcatctaccttt

SEQ ID NO: 9234 - DNA, 17 bp, Arabidopsis thaliana
aactctcatgggccgac

SEQ ID NO: 9235 - DNA, 17 bp, Arabidopsis thaliana
aactctcatgtgctgat

SEQ ID NO: 9236 - DNA, 17 bp, Arabidopsis thaliana
aactctccaatgtgcag

SEQ ID NO: 9237 - DNA, 17 bp, Arabidopsis thaliana
aactctccagctcgagc

SEQ ID NO: 9238 - DNA, 17 bp, Arabidopsis thaliana
aactctcccagacgcta

SEQ ID NO: 9239 - DNA, 17 bp, Arabidopsis thaliana
aactctccgaccatcgt

SEQ ID NO: 9240 - DNA, 17 bp, Arabidopsis thaliana
aactctcctgatcgatt

SEQ ID NO: 9241 - DNA, 17 bp, Arabidopsis thaliana
aactctccttttatccg

SEQ ID NO: 9242 - DNA, 17 bp, Arabidopsis thaliana
aactctcgaaagcgtaa

SEQ ID NO: 9243 - DNA, 17 bp, Arabidopsis thaliana
aactctcgaaagcgtag

SEQ ID NO: 9244 - DNA, 17 bp, Arabidopsis thaliana
aactctcgacttgactc

SEQ ID NO: 9245 - DNA, 17 bp, Arabidopsis thaliana
aactctcgagcttttga

SEQ ID NO: 9246 - DNA, 17 bp, Arabidopsis thaliana
aactctcgatttttgcg

SEQ ID NO: 9247 - DNA, 17 bp, Arabidopsis thaliana
aactctcggaggccgag

SEQ ID NO: 9248 - DNA, 17 bp, Arabidopsis thaliana
aactctcggttggagat

SEQ ID NO: 9249 - DNA, 17 bp, Arabidopsis thaliana
aactctcgttggaacta

SEQ ID NO: 9250 - DNA, 17 bp, Arabidopsis thaliana
aactctctagcaggtta

SEQ ID NO: 9251 - DNA, 17 bp, Arabidopsis thaliana
aactctctcattagctg

SEQ ID NO: 9252 - DNA, 17 bp, Arabidopsis thaliana
aactctctccatatgtg

SEQ ID NO: 9253 - DNA, 17 bp, Arabidopsis thaliana
aactctctccatttggg

SEQ ID NO: 9254 - DNA, 17 bp, Arabidopsis thaliana
aactctctccggcgttg

SEQ ID NO: 9255 - DNA, 17 bp, Arabidopsis thaliana
aactctctcctacaact

SEQ ID NO: 9256 - DNA, 17 bp, Arabidopsis thaliana
aactctctctaactttg

SEQ ID NO: 9257 - DNA, 17 bp, Arabidopsis thaliana
aactctctctaaggaac

SEQ ID NO: 9258 - DNA, 17 bp, Arabidopsis thaliana
aactctctgaagttgga

SEQ ID NO: 9259 - DNA, 17 bp, Arabidopsis thaliana
aactctctggttgtgaa

SEQ ID NO: 9260 - DNA, 17 bp, Arabidopsis thaliana
aactctcttccacaact

SEQ ID NO: 9261 - DNA, 17 bp, Arabidopsis thaliana
aactctcttcgggacgg

SEQ ID NO: 9262 - DNA, 17 bp, Arabidopsis thaliana
aactctgaatatttgca

SEQ ID NO: 9263 - DNA, 17 bp, Arabidopsis thaliana
aactctgactatttgca

SEQ ID NO: 9264 - DNA, 17 bp, Arabidopsis thaliana
aactctgagatgatggt

SEQ ID NO: 9265 - DNA, 17 bp, Arabidopsis thaliana
aactctgcaacgctaac

SEQ ID NO: 9266 - DNA, 17 bp, Arabidopsis thaliana
aactctgcagttaagcg

SEQ ID NO: 9267 - DNA, 17 bp, Arabidopsis thaliana
aactctgcattaggtga

SEQ ID NO: 9268 - DNA, 17 bp, Arabidopsis thaliana
aactctgctcagcacca

SEQ ID NO: 9269 - DNA, 17 bp, Arabidopsis thaliana
aactctggatacagtgg

SEQ ID NO: 9270 - DNA, 17 bp, Arabidopsis thaliana
aactctggatctggtga

SEQ ID NO: 9271 - DNA, 17 bp, Arabidopsis thaliana
aactctggcccaatgga

SEQ ID NO: 9272 - DNA, 17 bp, Arabidopsis thaliana
aactctggcttctgatc

SEQ ID NO: 9273 - DNA, 17 bp, Arabidopsis thaliana
aactctgggactgcctg

SEQ ID NO: 9274 - DNA, 17 bp, Arabidopsis thaliana
aactctgggtgtctctg

SEQ ID NO: 9275 - DNA, 17 bp, Arabidopsis thaliana
aactctggtacaggtgc

SEQ ID NO: 9276 - DNA, 17 bp, Arabidopsis thaliana
aactctggtgacactga

SEQ ID NO: 9277 - DNA, 17 bp, Arabidopsis thaliana
aactctggttgactcag

SEQ ID NO: 9278 - DNA, 17 bp, Arabidopsis thaliana
aactctgtagtccaacg

SEQ ID NO: 9279 - DNA, 17 bp, Arabidopsis thaliana
aactctgtgccagcagc

SEQ ID NO: 9280 - DNA, 17 bp, Arabidopsis thaliana
aactctgtgcgggacct

SEQ ID NO: 9281 - DNA, 17 bp, Arabidopsis thaliana
aactctgtgcggggcct

SEQ ID NO: 9282 - DNA, 17 bp, Arabidopsis thaliana
aactctgtggattctgc

SEQ ID NO: 9283 - DNA, 17 bp, Arabidopsis thaliana
aactctgtgtagagcac

SEQ ID NO: 9284 - DNA, 17 bp, Arabidopsis thaliana
aactctgtgtggtgtcc

SEQ ID NO: 9285 - DNA, 17 bp, Arabidopsis thaliana
aactctgttagcagaga

SEQ ID NO: 9286 - DNA, 17 bp, Arabidopsis thaliana
aactctgttcgcctccc

SEQ ID NO: 9287 - DNA, 17 bp, Arabidopsis thaliana
aactctgttcggatcct

SEQ ID NO: 9288 - DNA, 17 bp, Arabidopsis thaliana
aactctgttcggatctt

SEQ ID NO: 9289 - DNA, 17 bp, Arabidopsis thaliana
aactctgttctttgcgc

SEQ ID NO: 9290 - DNA, 17 bp, Arabidopsis thaliana
aactcttaaccgatctc

SEQ ID NO: 9291 - DNA, 17 bp, Arabidopsis thaliana
aactcttaagatcgtgc

SEQ ID NO: 9292 - DNA, 17 bp, Arabidopsis thaliana
aactcttaagatcgtgg

SEQ ID NO: 9293 - DNA, 17 bp, Arabidopsis thaliana
aactcttagaccgtgag

SEQ ID NO: 9294 - DNA, 17 bp, Arabidopsis thaliana
aactcttagcctctttc

SEQ ID NO: 9295 - DNA, 17 bp, Arabidopsis thaliana
aactcttaggattatgc

SEQ ID NO: 9296 - DNA, 17 bp, Arabidopsis thaliana
aactcttagttatgctt

SEQ ID NO: 9297 - DNA, 17 bp, Arabidopsis thaliana
aactcttatgtgtccag

SEQ ID NO: 9298 - DNA, 17 bp, Arabidopsis thaliana
aactcttccaaccaaaa

SEQ ID NO: 9299 - DNA, 17 bp, Arabidopsis thaliana
aactcttcccgaggccc

SEQ ID NO: 9300 - DNA, 17 bp, Arabidopsis thaliana
aactcttccgcgagatg

SEQ ID NO: 9301 - DNA, 17 bp, Arabidopsis thaliana
aactcttccggttaagc

SEQ ID NO: 9302 - DNA, 17 bp, Arabidopsis thaliana
aactcttcggccggtgc

SEQ ID NO: 9303 - DNA, 17 bp, Arabidopsis thaliana
aactcttctacggtgta

SEQ ID NO: 9304 - DNA, 17 bp, Arabidopsis thaliana
aactcttctcctccaga

SEQ ID NO: 9305 - DNA, 17 bp, Arabidopsis thaliana
aactcttgagctaactg

SEQ ID NO: 9306 - DNA, 17 bp, Arabidopsis thaliana
aactcttgagctagctt

SEQ ID NO: 9307 - DNA, 17 bp, Arabidopsis thaliana
aactcttgcgggagaag

SEQ ID NO: 9308 - DNA, 17 bp, Arabidopsis thaliana
aactcttggaagtgcct

SEQ ID NO: 9309 - DNA, 17 bp, Arabidopsis thaliana
aactcttggagctctgg

SEQ ID NO: 9310 - DNA, 17 bp, Arabidopsis thaliana
aactcttggtctgtacc

SEQ ID NO: 9311 - DNA, 17 bp, Arabidopsis thaliana
aactcttgttgattgga

SEQ ID NO: 9312 - DNA, 17 bp, Arabidopsis thaliana
aactctttcagtgttcc

SEQ ID NO: 9313 - DNA, 17 bp, Arabidopsis thaliana
aactctttccgcagtgc

SEQ ID NO: 9314 - DNA, 17 bp, Arabidopsis thaliana
aactctttcggctgatt

SEQ ID NO: 9315 - DNA, 17 bp, Arabidopsis thaliana
aactctttcttgtgtcg

SEQ ID NO: 9316 - DNA, 17 bp, Arabidopsis thaliana
aactctttctttgcgga

SEQ ID NO: 9317 - DNA, 17 bp, Arabidopsis thaliana
aactctttgagtttgag

SEQ ID NO: 9318 - DNA, 17 bp, Arabidopsis thaliana
aactctttgcgtatttg

SEQ ID NO: 9319 - DNA, 17 bp, Arabidopsis thaliana
aactctttggcttgaat

SEQ ID NO: 9320 - DNA, 17 bp, Arabidopsis thaliana
aactctttggtgcgttc

SEQ ID NO: 9321 - DNA, 17 bp, Arabidopsis thaliana
aactctttggtgcgttt

SEQ ID NO: 9322 - DNA, 17 bp, Arabidopsis thaliana
aactctttgtaagactt

SEQ ID NO: 9323 - DNA, 17 bp, Arabidopsis thaliana
aactcttttcaaaatct

SEQ ID NO: 9324 - DNA, 17 bp, Arabidopsis thaliana
aactctttttggctaat

SEQ ID NO: 9325 - DNA, 17 bp, Arabidopsis thaliana
aactctttttgtgcata

SEQ ID NO: 9326 - DNA, 17 bp, Arabidopsis thaliana
aactgaaaaagctgagg

SEQ ID NO: 9327 - DNA, 17 bp, Arabidopsis thaliana
aactgaaactgcaggtt

SEQ ID NO: 9328 - DNA, 17 bp, Arabidopsis thaliana
aactgaaccgcaccgtg

SEQ ID NO: 9329 - DNA, 17 bp, Arabidopsis thaliana
aactgaaccgcaccgtt

SEQ ID NO: 9330 - DNA, 17 bp, Arabidopsis thaliana
aactgaaccggaacagt

SEQ ID NO: 9331 - DNA, 17 bp, Arabidopsis thaliana
aactgaactttgacgct

SEQ ID NO: 9332 - DNA, 17 bp, Arabidopsis thaliana
aactgaagactcttatg

SEQ ID NO: 9333 - DNA, 17 bp, Arabidopsis thaliana
aactgaagagaaaccag

SEQ ID NO: 9334 - DNA, 17 bp, Arabidopsis thaliana
aactgaagcgtgtgtcg

SEQ ID NO: 9335 - DNA, 17 bp, Arabidopsis thaliana
aactgaaggtccgtagt

SEQ ID NO: 9336 - DNA, 17 bp, Arabidopsis thaliana
aactgaagttgacaact

SEQ ID NO: 9337 - DNA, 17 bp, Arabidopsis thaliana
aactgaatcacttggta

SEQ ID NO: 9338 - DNA, 17 bp, Arabidopsis thaliana
aactgaatcaggttgtt

SEQ ID NO: 9339 - DNA, 17 bp, Arabidopsis thaliana
aactgaatctgatctgc

SEQ ID NO: 9340 - DNA, 17 bp, Arabidopsis thaliana
aactgaatggtcggcct

SEQ ID NO: 9341 - DNA, 17 bp, Arabidopsis thaliana
aactgaattagcagacg

SEQ ID NO: 9342 - DNA, 17 bp, Arabidopsis thaliana
aactgacaagtggcgct

SEQ ID NO: 9343 - DNA, 17 bp, Arabidopsis thaliana
aactgacaatacctaac

SEQ ID NO: 9344 - DNA, 17 bp, Arabidopsis thaliana
aactgacactgagtgtc

SEQ ID NO: 9345 - DNA, 17 bp, Arabidopsis thaliana
aactgacagaaaactaa

SEQ ID NO: 9346 - DNA, 17 bp, Arabidopsis thaliana
aactgacagaaactctt

SEQ ID NO: 9347 - DNA, 17 bp, Arabidopsis thaliana
aactgaccatgttctac

SEQ ID NO: 9348 - DNA, 17 bp, Arabidopsis thaliana
aactgaccgatcagccg

SEQ ID NO: 9349 - DNA, 17 bp, Arabidopsis thaliana
aactgaccggatcagcc

SEQ ID NO: 9350 - DNA, 17 bp, Arabidopsis thaliana
aactgacgagtaagtgc

SEQ ID NO: 9351 - DNA, 17 bp, Arabidopsis thaliana
aactgacgccgccgatc

SEQ ID NO: 9352 - DNA, 17 bp, Arabidopsis thaliana
aactgacggacgtaagt

SEQ ID NO: 9353 - DNA, 17 bp, Arabidopsis thaliana
aactgacttcgtcgctg

SEQ ID NO: 9354 - DNA, 17 bp, Arabidopsis thaliana
aactgacttcttcttct

SEQ ID NO: 9355 - DNA, 17 bp, Arabidopsis thaliana
aactgagaaccagacat

SEQ ID NO: 9356 - DNA, 17 bp, Arabidopsis thaliana
aactgagaagaaatgat

SEQ ID NO: 9357 - DNA, 17 bp, Arabidopsis thaliana
aactgagaatgctttgg

SEQ ID NO: 9358 - DNA, 17 bp, Arabidopsis thaliana
aactgagaattgcgccg

SEQ ID NO: 9359 - DNA, 17 bp, Arabidopsis thaliana
aactgagacgagggaat

SEQ ID NO: 9360 - DNA, 17 bp, Arabidopsis thaliana
aactgagactcagtctg

SEQ ID NO: 9361 - DNA, 17 bp, Arabidopsis thaliana
aactgagatcgtggtct

SEQ ID NO: 9362 - DNA, 17 bp, Arabidopsis thaliana
aactgagatgtagtttt

SEQ ID NO: 9363 - DNA, 17 bp, Arabidopsis thaliana
aactgagatgtggtttt

SEQ ID NO: 9364 - DNA, 17 bp, Arabidopsis thaliana
aactgagcccttcacag

SEQ ID NO: 9365 - DNA, 17 bp, Arabidopsis thaliana
aactgagctaacgacac

SEQ ID NO: 9366 - DNA, 17 bp, Arabidopsis thaliana
aactgagctgtgaacgc

SEQ ID NO: 9367 - DNA, 17 bp, Arabidopsis thaliana
aactgagcttccctgtc

SEQ ID NO: 9368 - DNA, 17 bp, Arabidopsis thaliana
aactgagcttcttgtat

SEQ ID NO: 9369 - DNA, 17 bp, Arabidopsis thaliana
aactgagctttgcacga

SEQ ID NO: 9370 - DNA, 17 bp, Arabidopsis thaliana
aactgagcttttcccgc

SEQ ID NO: 9371 - DNA, 17 bp, Arabidopsis thaliana
aactgaggaatgttgtt

SEQ ID NO: 9372 - DNA, 17 bp, Arabidopsis thaliana
aactgaggcacatatta

SEQ ID NO: 9373 - DNA, 17 bp, Arabidopsis thaliana
aactgaggctgtatcga

SEQ ID NO: 9374 - DNA, 17 bp, Arabidopsis thaliana
aactgaggtgcttgctt

SEQ ID NO: 9375 - DNA, 17 bp, Arabidopsis thaliana
aactgagtggaaaacta

SEQ ID NO: 9376 - DNA, 17 bp, Arabidopsis thaliana
aactgagttgaggtagg

SEQ ID NO: 9377 - DNA, 17 bp, Arabidopsis thaliana
aactgagttttccagag

SEQ ID NO: 9378 - DNA, 17 bp, Arabidopsis thaliana
aactgatacgactttgt

SEQ ID NO: 9379 - DNA, 17 bp, Arabidopsis thaliana
aactgatagaccaaagg

SEQ ID NO: 9380 - DNA, 17 bp, Arabidopsis thaliana
aactgatcaactgcgct

SEQ ID NO: 9381 - DNA, 17 bp, Arabidopsis thaliana
aactgatcactgcaggt

SEQ ID NO: 9382 - DNA, 17 bp, Arabidopsis thaliana
aactgatcattattccc

SEQ ID NO: 9383 - DNA, 17 bp, Arabidopsis thaliana
aactgatccgaaaccga

SEQ ID NO: 9384 - DNA, 17 bp, Arabidopsis thaliana
aactgatcggtgctggt

SEQ ID NO: 9385 - DNA, 17 bp, Arabidopsis thaliana
aactgatgattaggtga

SEQ ID NO: 9386 - DNA, 17 bp, Arabidopsis thaliana
aactgatggcagtccag

SEQ ID NO: 9387 - DNA, 17 bp, Arabidopsis thaliana
aactgatgggcagaccg

SEQ ID NO: 9388 - DNA, 17 bp, Arabidopsis thaliana
aactgatgtcctccagg

SEQ ID NO: 9389 - DNA, 17 bp, Arabidopsis thaliana
aactgatgtgtactgtg

SEQ ID NO: 9390 - DNA, 17 bp, Arabidopsis thaliana
aactgatgtgtccaact

SEQ ID NO: 9391 - DNA, 17 bp, Arabidopsis thaliana
aactgatttcggccaat

SEQ ID NO: 9392 - DNA, 17 bp, Arabidopsis thaliana
aactgatttctgttgga

SEQ ID NO: 9393 - DNA, 17 bp, Arabidopsis thaliana
aactgatttggccatct

SEQ ID NO: 9394 - DNA, 17 bp, Arabidopsis thaliana
aactgatttgggcctga

SEQ ID NO: 9395 - DNA, 17 bp, Arabidopsis thaliana
aactgatttgtcggcga

SEQ ID NO: 9396 - DNA, 17 bp, Arabidopsis thaliana
aactgatttgtgtcgag

SEQ ID NO: 9397 - DNA, 17 bp, Arabidopsis thaliana
aactgattttccaagca

SEQ ID NO: 9398 - DNA, 17 bp, Arabidopsis thaliana
aactgcaaattctacgg

SEQ ID NO: 9399 - DNA, 17 bp, Arabidopsis thaliana
aactgcaactgtgcgat

SEQ ID NO: 9400 - DNA, 17 bp, Arabidopsis thaliana
aactgcaccgcactttt

SEQ ID NO: 9401 - DNA, 17 bp, Arabidopsis thaliana
aactgcacttcgtcaaa

SEQ ID NO: 9402 - DNA, 17 bp, Arabidopsis thaliana
aactgcagcggagattt

SEQ ID NO: 9403 - DNA, 17 bp, Arabidopsis thaliana
aactgcaggcacccctt

SEQ ID NO: 9404 - DNA, 17 bp, Arabidopsis thaliana
aactgcagtgggcaata

SEQ ID NO: 9405 - DNA, 17 bp, Arabidopsis thaliana
aactgcagttcgctctg

SEQ ID NO: 9406 - DNA, 17 bp, Arabidopsis thaliana
aactgcccatctaacta

SEQ ID NO: 9407 - DNA, 17 bp, Arabidopsis thaliana
aactgcccgtatagcag

SEQ ID NO: 9408 - DNA, 17 bp, Arabidopsis thaliana
aactgcccttgccatgg

SEQ ID NO: 9409 - DNA, 17 bp, Arabidopsis thaliana
aactgccgattgaatga

SEQ ID NO: 9410 - DNA, 17 bp, Arabidopsis thaliana
aactgccgtagacgttg

SEQ ID NO: 9411 - DNA, 17 bp, Arabidopsis thaliana
aactgcctaaaatcgct

SEQ ID NO: 9412 - DNA, 17 bp, Arabidopsis thaliana
aactgcctgggtgtcac

SEQ ID NO: 9413 - DNA, 17 bp, Arabidopsis thaliana
aactgcgaaaaagagtg

SEQ ID NO: 9414 - DNA, 17 bp, Arabidopsis thaliana
aactgcgaaagcatttg

SEQ ID NO: 9415 - DNA, 17 bp, Arabidopsis thaliana
aactgcgaactaactgc

SEQ ID NO: 9416 - DNA, 17 bp, Arabidopsis thaliana
aactgcgaagttctgat

SEQ ID NO: 9417 - DNA, 17 bp, Arabidopsis thaliana
aactgcgaatggctcat

SEQ ID NO: 9418 - DNA, 17 bp, Arabidopsis thaliana
aactgcgacagattttc

SEQ ID NO: 9419 - DNA, 17 bp, Arabidopsis thaliana
aactgcgacagattttt

SEQ ID NO: 9420 - DNA, 17 bp, Arabidopsis thaliana
aactgcgacatgtactc

SEQ ID NO: 9421 - DNA, 17 bp, Arabidopsis thaliana
aactgcgacatgtgctc

SEQ ID NO: 9422 - DNA, 17 bp, Arabidopsis thaliana
aactgcgagatgtgttt

SEQ ID NO: 9423 - DNA, 17 bp, Arabidopsis thaliana
aactgcgaggtcattgc

SEQ ID NO: 9424 - DNA, 17 bp, Arabidopsis thaliana
aactgcgagtcgtatat

SEQ ID NO: 9425 - DNA, 17 bp, Arabidopsis thaliana
aactgcgagttgtatgt

SEQ ID NO: 9426 - DNA, 17 bp, Arabidopsis thaliana
aactgcgatcagcgact

SEQ ID NO: 9427 - DNA, 17 bp, Arabidopsis thaliana
aactgcgatcatagtct

SEQ ID NO: 9428 - DNA, 17 bp, Arabidopsis thaliana
aactgcgcgctctgcct

SEQ ID NO: 9429 - DNA, 17 bp, Arabidopsis thaliana
aactgcggacgctctta

SEQ ID NO: 9430 - DNA, 17 bp, Arabidopsis thaliana
aactgcggagttctgat

SEQ ID NO: 9431 - DNA, 17 bp, Arabidopsis thaliana
aactgcggataaagtgc

SEQ ID NO: 9432 - DNA, 17 bp, Arabidopsis thaliana
aactgcggcaagtcgtg

SEQ ID NO: 9433 - DNA, 17 bp, Arabidopsis thaliana
aactgcggctgtggaca

SEQ ID NO: 9434 - DNA, 17 bp, Arabidopsis thaliana
aactgcggcttgctagg

SEQ ID NO: 9435 - DNA, 17 bp, Arabidopsis thaliana
aactgcggcttgctatg

SEQ ID NO: 9436 - DNA, 17 bp, Arabidopsis thaliana
aactgcgggcgctctta

SEQ ID NO: 9437 - DNA, 17 bp, Arabidopsis thaliana
aactgcgggcgtgtgta

SEQ ID NO: 9438 - DNA, 17 bp, Arabidopsis thaliana
aactgcggtaaacttgc

SEQ ID NO: 9439 - DNA, 17 bp, Arabidopsis thaliana
aactgcggtacgtgctg

SEQ ID NO: 9440 - DNA, 17 bp, Arabidopsis thaliana
aactgcggtgcggttta

SEQ ID NO: 9441 - DNA, 17 bp, Arabidopsis thaliana
aactgcggttagcgatt

SEQ ID NO: 9442 - DNA, 17 bp, Arabidopsis thaliana
aactgcggttttagatc

SEQ ID NO: 9443 - DNA, 17 bp, Arabidopsis thaliana
aactgcgtcatgtcacg

SEQ ID NO: 9444 - DNA, 17 bp, Arabidopsis thaliana
aactgcgttgaaatgtt

SEQ ID NO: 9445 - DNA, 17 bp, Arabidopsis thaliana
aactgcgttgccaaagt

SEQ ID NO: 9446 - DNA, 17 bp, Arabidopsis thaliana
aactgcgtttccaaagc

SEQ ID NO: 9447 - DNA, 17 bp, Arabidopsis thaliana
aactgcgtttccgaggt

SEQ ID NO: 9448 - DNA, 17 bp, Arabidopsis thaliana
aactgcgttttagagag

SEQ ID NO: 9449 - DNA, 17 bp, Arabidopsis thaliana
aactgctaccgcccgca

SEQ ID NO: 9450 - DNA, 17 bp, Arabidopsis thaliana
aactgctagataccgct

SEQ ID NO: 9451 - DNA, 17 bp, Arabidopsis thaliana
aactgctagattgctga

SEQ ID NO: 9452 - DNA, 17 bp, Arabidopsis thaliana
aactgctctccgtttgt

SEQ ID NO: 9453 - DNA, 17 bp, Arabidopsis thaliana
aactgctctgattgact

SEQ ID NO: 9454 - DNA, 17 bp, Arabidopsis thaliana
aactgctgaactattta

SEQ ID NO: 9455 - DNA, 17 bp, Arabidopsis thaliana
aactgctgatgtaagac

SEQ ID NO: 9456 - DNA, 17 bp, Arabidopsis thaliana
aactgctgcggtctttg

SEQ ID NO: 9457 - DNA, 17 bp, Arabidopsis thaliana
aactgctggagtgatga

SEQ ID NO: 9458 - DNA, 17 bp, Arabidopsis thaliana
aactgctggagtgctga

SEQ ID NO: 9459 - DNA, 17 bp, Arabidopsis thaliana
aactgctggattgctga

SEQ ID NO: 9460 - DNA, 17 bp, Arabidopsis thaliana
aactgctgtgcggtttg

SEQ ID NO: 9461 - DNA, 17 bp, Arabidopsis thaliana
aactgctgtggggtttg

SEQ ID NO: 9462 - DNA, 17 bp, Arabidopsis thaliana
aactgcttgatccgcac

SEQ ID NO: 9463 - DNA, 17 bp, Arabidopsis thaliana
aactgcttgatccgctg

SEQ ID NO: 9464 - DNA, 17 bp, Arabidopsis thaliana
aactgcttgtagcatgg

SEQ ID NO: 9465 - DNA, 17 bp, Arabidopsis thaliana
aactgcttgtcggaact

SEQ ID NO: 9466 - DNA, 17 bp, Arabidopsis thaliana
aactgcttgtggatgta

SEQ ID NO: 9467 - DNA, 17 bp, Arabidopsis thaliana
aactgcttgttaggatt

SEQ ID NO: 9468 - DNA, 17 bp, Arabidopsis thaliana
aactgctttgactgaat

SEQ ID NO: 9469 - DNA, 17 bp, Arabidopsis thaliana
aactggaacatgggatt

SEQ ID NO: 9470 - DNA, 17 bp, Arabidopsis thaliana
aactggaagaagctgac

SEQ ID NO: 9471 - DNA, 17 bp, Arabidopsis thaliana
aactggacaggcggccc

SEQ ID NO: 9472 - DNA, 17 bp, Arabidopsis thaliana
aactggaccatccgaat

SEQ ID NO: 9473 - DNA, 17 bp, Arabidopsis thaliana
aactggaccgcagtaac

SEQ ID NO: 9474 - DNA, 17 bp, Arabidopsis thaliana
aactggaccgcatggtc

SEQ ID NO: 9475 - DNA, 17 bp, Arabidopsis thaliana
aactggaccgcatggtt

SEQ ID NO: 9476 - DNA, 17 bp, Arabidopsis thaliana
aactggacgcggttgct

SEQ ID NO: 9477 - DNA, 17 bp, Arabidopsis thaliana
aactggacggccatgtg

SEQ ID NO: 9478 - DNA, 17 bp, Arabidopsis thaliana
aactggagagggttcta

SEQ ID NO: 9479 - DNA, 17 bp, Arabidopsis thaliana
aactggagatacccagg

SEQ ID NO: 9480 - DNA, 17 bp, Arabidopsis thaliana
aactggagcctccactg

SEQ ID NO: 9481 - DNA, 17 bp, Arabidopsis thaliana
aactggagttcgtcgca

SEQ ID NO: 9482 - DNA, 17 bp, Arabidopsis thaliana
aactggatagactgatg

SEQ ID NO: 9483 - DNA, 17 bp, Arabidopsis thaliana
aactggatcatctgact

SEQ ID NO: 9484 - DNA, 17 bp, Arabidopsis thaliana
aactggatcctacccga

SEQ ID NO: 9485 - DNA, 17 bp, Arabidopsis thaliana
aactggatcgagtatct

SEQ ID NO: 9486 - DNA, 17 bp, Arabidopsis thaliana
aactggatctgctttat

SEQ ID NO: 9487 - DNA, 17 bp, Arabidopsis thaliana
aactggatcttgtgagc

SEQ ID NO: 9488 - DNA, 17 bp, Arabidopsis thaliana
aactggatgaaataact

SEQ ID NO: 9489 - DNA, 17 bp, Arabidopsis thaliana
aactggattttggatcc

SEQ ID NO: 9490 - DNA, 17 bp, Arabidopsis thaliana
aactggcaaatggactg

SEQ ID NO: 9491 - DNA, 17 bp, Arabidopsis thaliana
aactggcaaatggattg

SEQ ID NO: 9492 - DNA, 17 bp, Arabidopsis thaliana
aactggcaggatggctc

SEQ ID NO: 9493 - DNA, 17 bp, Arabidopsis thaliana
aactggccaacgtttcc

SEQ ID NO: 9494 - DNA, 17 bp, Arabidopsis thaliana
aactggccacgacttca

SEQ ID NO: 9495 - DNA, 17 bp, Arabidopsis thaliana
aactggccagattgctc

SEQ ID NO: 9496 - DNA, 17 bp, Arabidopsis thaliana
aactggccgtgggttcc

SEQ ID NO: 9497 - DNA, 17 bp, Arabidopsis thaliana
aactggcctggttcact

SEQ ID NO: 9498 - DNA, 17 bp, Arabidopsis thaliana
aactggcgagacccaag

SEQ ID NO: 9499 - DNA, 17 bp, Arabidopsis thaliana
aactggcggttttgcga

SEQ ID NO: 9500 - DNA, 17 bp, Arabidopsis thaliana
aactggctcggactccc

SEQ ID NO: 9501 - DNA, 17 bp, Arabidopsis thaliana
aactggcttgtggcagc

SEQ ID NO: 9502 - DNA, 17 bp, Arabidopsis thaliana
aactgggaaggtgtggc

SEQ ID NO: 9503 - DNA, 17 bp, Arabidopsis thaliana
aactgggaatgtgatga

SEQ ID NO: 9504 - DNA, 17 bp, Arabidopsis thaliana
aactgggatgtgagatg

SEQ ID NO: 9505 - DNA, 17 bp, Arabidopsis thaliana
aactgggccaccaagtg

SEQ ID NO: 9506 - DNA, 17 bp, Arabidopsis thaliana
aactgggctgagttatc

SEQ ID NO: 9507 - DNA, 17 bp, Arabidopsis thaliana
aactgggtggtcgagta

SEQ ID NO: 9508 - DNA, 17 bp, Arabidopsis thaliana
aactgggtgtcgcattg

SEQ ID NO: 9509 - DNA, 17 bp, Arabidopsis thaliana
aactgggttcgagtccc

SEQ ID NO: 9510 - DNA, 17 bp, Arabidopsis thaliana
aactgggttttcttagg

SEQ ID NO: 9511 - DNA, 17 bp, Arabidopsis thaliana
aactgggtttttgattt

SEQ ID NO: 9512 - DNA, 17 bp, Arabidopsis thaliana
aactggtacggacaagg

SEQ ID NO: 9513 - DNA, 17 bp, Arabidopsis thaliana
aactggtctgtagcgat

SEQ ID NO: 9514 - DNA, 17 bp, Arabidopsis thaliana
aactggtctttgctgat

SEQ ID NO: 9515 - DNA, 17 bp, Arabidopsis thaliana
aactggtgaatactctg

SEQ ID NO: 9516 - DNA, 17 bp, Arabidopsis thaliana
aactggtgatcgatcaa

SEQ ID NO: 9517 - DNA, 17 bp, Arabidopsis thaliana
aactggtgattggtgtt

SEQ ID NO: 9518 - DNA, 17 bp, Arabidopsis thaliana
aactggtgcaggagatg

SEQ ID NO: 9519 - DNA, 17 bp, Arabidopsis thaliana
aactggtggagcgattt

SEQ ID NO: 9520 - DNA, 17 bp, Arabidopsis thaliana
aactggtggctaagttt

SEQ ID NO: 9521 - DNA, 17 bp, Arabidopsis thaliana
aactggtggtctgaggc

SEQ ID NO: 9522 - DNA, 17 bp, Arabidopsis thaliana
aactggtgtcgatcgac

SEQ ID NO: 9523 - DNA, 17 bp, Arabidopsis thaliana
aactggttcaatcagat

SEQ ID NO: 9524 - DNA, 17 bp, Arabidopsis thaliana
aactggttcaccggatc

SEQ ID NO: 9525 - DNA, 17 bp, Arabidopsis thaliana
aactggttcaccgggtc

SEQ ID NO: 9526 - DNA, 17 bp, Arabidopsis thaliana
aactggttcacctggtc

SEQ ID NO: 9527 - DNA, 17 bp, Arabidopsis thaliana
aactggttcatcgggtc

SEQ ID NO: 9528 - DNA, 17 bp, Arabidopsis thaliana
aactggttccggttgaa

SEQ ID NO: 9529 - DNA, 17 bp, Arabidopsis thaliana
aactggttcgtttccgg

SEQ ID NO: 9530 - DNA, 17 bp, Arabidopsis thaliana
aactggttgtagcaagg

SEQ ID NO: 9531 - DNA, 17 bp, Arabidopsis thaliana
aactggttgttgacctt

SEQ ID NO: 9532 - DNA, 17 bp, Arabidopsis thaliana
aactggtttcgcttcgg

SEQ ID NO: 9533 - DNA, 17 bp, Arabidopsis thaliana
aactgtaatcttatttc

SEQ ID NO: 9534 - DNA, 17 bp, Arabidopsis thaliana
aactgtaattttccagt

SEQ ID NO: 9535 - DNA, 17 bp, Arabidopsis thaliana
aactgtaccgcacttta

SEQ ID NO: 9536 - DNA, 17 bp, Arabidopsis thaliana
aactgtacgtcttcatt

SEQ ID NO: 9537 - DNA, 17 bp, Arabidopsis thaliana
aactgtagaatgtcgat

SEQ ID NO: 9538 - DNA, 17 bp, Arabidopsis thaliana
aactgtagacgtagtag

SEQ ID NO: 9539 - DNA, 17 bp, Arabidopsis thaliana
aactgtagcggaccaag

SEQ ID NO: 9540 - DNA, 17 bp, Arabidopsis thaliana
aactgtatcggtgatgt

SEQ ID NO: 9541 - DNA, 17 bp, Arabidopsis thaliana
aactgtatctgcaacca

SEQ ID NO: 9542 - DNA, 17 bp, Arabidopsis thaliana
aactgtcaagttgaggc

SEQ ID NO: 9543 - DNA, 17 bp, Arabidopsis thaliana
aactgtcacactacggg

SEQ ID NO: 9544 - DNA, 17 bp, Arabidopsis thaliana
aactgtcacactacgtg

SEQ ID NO: 9545 - DNA, 17 bp, Arabidopsis thaliana
aactgtcagttgggtct

SEQ ID NO: 9546 - DNA, 17 bp, Arabidopsis thaliana
aactgtccatcgtgatc

SEQ ID NO: 9547 - DNA, 17 bp, Arabidopsis thaliana
aactgtccgtacggata

SEQ ID NO: 9548 - DNA, 17 bp, Arabidopsis thaliana
aactgtcctggtgagat

SEQ ID NO: 9549 - DNA, 17 bp, Arabidopsis thaliana
aactgtcgatgggagtg

SEQ ID NO: 9550 - DNA, 17 bp, Arabidopsis thaliana
aactgtcgccgtcctga

SEQ ID NO: 9551 - DNA, 17 bp, Arabidopsis thaliana
aactgtcgctacttttg

SEQ ID NO: 9552 - DNA, 17 bp, Arabidopsis thaliana
aactgtcggaaccatgc

SEQ ID NO: 9553 - DNA, 17 bp, Arabidopsis thaliana
aactgtcggaggaggcg

SEQ ID NO: 9554 - DNA, 17 bp, Arabidopsis thaliana
aactgtcggatttgtgt

SEQ ID NO: 9555 - DNA, 17 bp, Arabidopsis thaliana
aactgtcggcttcctca

SEQ ID NO: 9556 - DNA, 17 bp, Arabidopsis thaliana
aactgtctccatttgct

SEQ ID NO: 9557 - DNA, 17 bp, Arabidopsis thaliana
aactgtctgagctagct

SEQ ID NO: 9558 - DNA, 17 bp, Arabidopsis thaliana
aactgtctgaggcaagt

SEQ ID NO: 9559 - DNA, 17 bp, Arabidopsis thaliana
aactgtctgtatggaca

SEQ ID NO: 9560 - DNA, 17 bp, Arabidopsis thaliana
aactgtcttagggggtt

SEQ ID NO: 9561 - DNA, 17 bp, Arabidopsis thaliana
aactgtcttgcttctgt

SEQ ID NO: 9562 - DNA, 17 bp, Arabidopsis thaliana
aactgtcttggtgggat

SEQ ID NO: 9563 - DNA, 17 bp, Arabidopsis thaliana
aactgtgaaactgcgaa

SEQ ID NO: 9564 - DNA, 17 bp, Arabidopsis thaliana
aactgtgacaggatgtt

SEQ ID NO: 9565 - DNA, 17 bp, Arabidopsis thaliana
aactgtgacgatagcaa

SEQ ID NO: 9566 - DNA, 17 bp, Arabidopsis thaliana
aactgtgactttgatta

SEQ ID NO: 9567 - DNA, 17 bp, Arabidopsis thaliana
aactgtgagtcgatttg

SEQ ID NO: 9568 - DNA, 17 bp, Arabidopsis thaliana
aactgtgcaacaactag

SEQ ID NO: 9569 - DNA, 17 bp, Arabidopsis thaliana
aactgtgcataaagtgc

SEQ ID NO: 9570 - DNA, 17 bp, Arabidopsis thaliana
aactgtgcgattggttg

SEQ ID NO: 9571 - DNA, 17 bp, Arabidopsis thaliana
aactgtgcggccatttt

SEQ ID NO: 9572 - DNA, 17 bp, Arabidopsis thaliana
aactgtgctagcaatgg

SEQ ID NO: 9573 - DNA, 17 bp, Arabidopsis thaliana
aactgtggagttctcta

SEQ ID NO: 9574 - DNA, 17 bp, Arabidopsis thaliana
aactgtggagttctctc

SEQ ID NO: 9575 - DNA, 17 bp, Arabidopsis thaliana
aactgtggatcaagcgt

SEQ ID NO: 9576 - DNA, 17 bp, Arabidopsis thaliana
aactgtggatgtggctc

SEQ ID NO: 9577 - DNA, 17 bp, Arabidopsis thaliana
aactgtggccaatagtt

SEQ ID NO: 9578 - DNA, 17 bp, Arabidopsis thaliana
aactgtgggagtactga

SEQ ID NO: 9579 - DNA, 17 bp, Arabidopsis thaliana
aactgtgggatacgggt

SEQ ID NO: 9580 - DNA, 17 bp, Arabidopsis thaliana
aactgtgggatttcgtt

SEQ ID NO: 9581 - DNA, 17 bp, Arabidopsis thaliana
aactgtggtccgttatc

SEQ ID NO: 9582 - DNA, 17 bp, Arabidopsis thaliana
aactgtggtgttgccaa

SEQ ID NO: 9583 - DNA, 17 bp, Arabidopsis thaliana
aactgtggttgtcgcta

SEQ ID NO: 9584 - DNA, 17 bp, Arabidopsis thaliana
aactgtgtcacggttaa

SEQ ID NO: 9585 - DNA, 17 bp, Arabidopsis thaliana
aactgtgtcactgttaa

SEQ ID NO: 9586 - DNA, 17 bp, Arabidopsis thaliana
aactgtgtctaggaatg

SEQ ID NO: 9587 - DNA, 17 bp, Arabidopsis thaliana
aactgtgtctgctgcgt

SEQ ID NO: 9588 - DNA, 17 bp, Arabidopsis thaliana
aactgtgtctttgtgcc

SEQ ID NO: 9589 - DNA, 17 bp, Arabidopsis thaliana
aactgtgtgacaccgcg

SEQ ID NO: 9590 - DNA, 17 bp, Arabidopsis thaliana
aactgtgtgacgactat

SEQ ID NO: 9591 - DNA, 17 bp, Arabidopsis thaliana
aactgtgtggaccgatg

SEQ ID NO: 9592 - DNA, 17 bp, Arabidopsis thaliana
aactgtgtgtataggtg

SEQ ID NO: 9593 - DNA, 17 bp, Arabidopsis thaliana
aactgtgttttctgaga

SEQ ID NO: 9594 - DNA, 17 bp, Arabidopsis thaliana
aactgttaaatcgaggt

SEQ ID NO: 9595 - DNA, 17 bp, Arabidopsis thaliana
aactgttaatatccgac

SEQ ID NO: 9596 - DNA, 17 bp, Arabidopsis thaliana
aactgttacctggatcg

SEQ ID NO: 9597 - DNA, 17 bp, Arabidopsis thaliana
aactgttcccaccacag

SEQ ID NO: 9598 - DNA, 17 bp, Arabidopsis thaliana
aactgttccgagactac

SEQ ID NO: 9599 - DNA, 17 bp, Arabidopsis thaliana
aactgttcgccaatatt

SEQ ID NO: 9600 - DNA, 17 bp, Arabidopsis thaliana
aactgttcggatcgcgg

SEQ ID NO: 9601 - DNA, 17 bp, Arabidopsis thaliana
aactgttctcctttccc

SEQ ID NO: 9602 - DNA, 17 bp, Arabidopsis thaliana
aactgttctggtgagat

SEQ ID NO: 9603 - DNA, 17 bp, Arabidopsis thaliana
aactgttgagattgcaa

SEQ ID NO: 9604 - DNA, 17 bp, Arabidopsis thaliana
aactgttggaaaacgac

SEQ ID NO: 9605 - DNA, 17 bp, Arabidopsis thaliana
aactgttggcttagctt

SEQ ID NO: 9606 - DNA, 17 bp, Arabidopsis thaliana
aactgttggttagcgtt

SEQ ID NO: 9607 - DNA, 17 bp, Arabidopsis thaliana
aactgttgtagtgacgg

SEQ ID NO: 9608 - DNA, 17 bp, Arabidopsis thaliana
aactgttgtcctggcgc

SEQ ID NO: 9609 - DNA, 17 bp, Arabidopsis thaliana
aactgttgttacaaaat

SEQ ID NO: 9610 - DNA, 17 bp, Arabidopsis thaliana
aactgtttaggtcttgc

SEQ ID NO: 9611 - DNA, 17 bp, Arabidopsis thaliana
aactgtttctcgccttc

SEQ ID NO: 9612 - DNA, 17 bp, Arabidopsis thaliana
aactgtttctggaacta

SEQ ID NO: 9613 - DNA, 17 bp, Arabidopsis thaliana
aactgtttctggaactg

SEQ ID NO: 9614 - DNA, 17 bp, Arabidopsis thaliana
aactgtttcttaggccc

SEQ ID NO: 9615 - DNA, 17 bp, Arabidopsis thaliana
aactgtttggaccattg

SEQ ID NO: 9616 - DNA, 17 bp, Arabidopsis thaliana
aactgtttgtattcttt

SEQ ID NO: 9617 - DNA, 17 bp, Arabidopsis thaliana
aactgtttgtgaatccg

SEQ ID NO: 9618 - DNA, 17 bp, Arabidopsis thaliana
aactgtttgtgattcca

SEQ ID NO: 9619 - DNA, 17 bp, Arabidopsis thaliana
aactgtttgtgattccg

SEQ ID NO: 9620 - DNA, 17 bp, Arabidopsis thaliana
aactgtttgtgattctg

SEQ ID NO: 9621 - DNA, 17 bp, Arabidopsis thaliana
aactgttttacatcaag

SEQ ID NO: 9622 - DNA, 17 bp, Arabidopsis thaliana
aactgttttgaccaaga

SEQ ID NO: 9623 - DNA, 17 bp, Arabidopsis thaliana
aactgttttttctaaac

SEQ ID NO: 9624 - DNA, 17 bp, Arabidopsis thaliana
aacttaaaccgcaaccc

SEQ ID NO: 9625 - DNA, 17 bp, Arabidopsis thaliana
aacttaaaccgcaaccg

SEQ ID NO: 9626 - DNA, 17 bp, Arabidopsis thaliana
aacttaaaccgcaacgg

SEQ ID NO: 9627 - DNA, 17 bp, Arabidopsis thaliana
aacttaaaccgcaactc

SEQ ID NO: 9628 - DNA, 17 bp, Arabidopsis thaliana
aacttaaaccgcaactg

SEQ ID NO: 9629 - DNA, 17 bp, Arabidopsis thaliana
aacttaaaccgcaatcc

SEQ ID NO: 9630 - DNA, 17 bp, Arabidopsis thaliana
aacttaaaccgcatatc

SEQ ID NO: 9631 - DNA, 17 bp, Arabidopsis thaliana
aacttaaatccgtaatt

SEQ ID NO: 9632 - DNA, 17 bp, Arabidopsis thaliana
aacttaacaggcgttcg

SEQ ID NO: 9633 - DNA, 17 bp, Arabidopsis thaliana
aacttaacgacccagaa

SEQ ID NO: 9634 - DNA, 17 bp, Arabidopsis thaliana
aacttaacgacgccaaa

SEQ ID NO: 9635 - DNA, 17 bp, Arabidopsis thaliana
aacttaagccgaattcc

SEQ ID NO: 9636 - DNA, 17 bp, Arabidopsis thaliana
aacttaagcgggactcg

SEQ ID NO: 9637 - DNA, 17 bp, Arabidopsis thaliana
aacttaagcgggactgg

SEQ ID NO: 9638 - DNA, 17 bp, Arabidopsis thaliana
aacttaagttgtcttct

SEQ ID NO: 9639 - DNA, 17 bp, Arabidopsis thaliana
aacttaatccacatcgg

SEQ ID NO: 9640 - DNA, 17 bp, Arabidopsis thaliana
aacttaattgttggttt

SEQ ID NO: 9641 - DNA, 17 bp, Arabidopsis thaliana
aacttaatttggctatg

SEQ ID NO: 9642 - DNA, 17 bp, Arabidopsis thaliana
aacttaccaggtccaga

SEQ ID NO: 9643 - DNA, 17 bp, Arabidopsis thaliana
aacttaccaggttcaga

SEQ ID NO: 9644 - DNA, 17 bp, Arabidopsis thaliana
aacttacgactgctctg

SEQ ID NO: 9645 - DNA, 17 bp, Arabidopsis thaliana
aacttactcaaatcgca

SEQ ID NO: 9646 - DNA, 17 bp, Arabidopsis thaliana
aacttactcgcggttag

SEQ ID NO: 9647 - DNA, 17 bp, Arabidopsis thaliana
aacttacttgcggttgc

SEQ ID NO: 9648 - DNA, 17 bp, Arabidopsis thaliana
aacttagaggtcgccgg

SEQ ID NO: 9649 - DNA, 17 bp, Arabidopsis thaliana
aacttagaggttgccgg

SEQ ID NO: 9650 - DNA, 17 bp, Arabidopsis thaliana
aacttagatggtaggac

SEQ ID NO: 9651 - DNA, 17 bp, Arabidopsis thaliana
aacttagcatttggcgg

SEQ ID NO: 9652 - DNA, 17 bp, Arabidopsis thaliana
aacttagcatttggcta

SEQ ID NO: 9653 - DNA, 17 bp, Arabidopsis thaliana
aacttagccaccagttc

SEQ ID NO: 9654 - DNA, 17 bp, Arabidopsis thaliana
aacttagccatttccat

SEQ ID NO: 9655 - DNA, 17 bp, Arabidopsis thaliana
aacttagccctgtttgt

SEQ ID NO: 9656 - DNA, 17 bp, Arabidopsis thaliana
aacttagccttgggagt

SEQ ID NO: 9657 - DNA, 17 bp, Arabidopsis thaliana
aacttagcgatggagat

SEQ ID NO: 9658 - DNA, 17 bp, Arabidopsis thaliana
aacttagctcgacatcg

SEQ ID NO: 9659 - DNA, 17 bp, Arabidopsis thaliana
aacttagctgaccatcc

SEQ ID NO: 9660 - DNA, 17 bp, Arabidopsis thaliana
aacttaggacatctcca

SEQ ID NO: 9661 - DNA, 17 bp, Arabidopsis thaliana
aacttagggccggctca

SEQ ID NO: 9662 - DNA, 17 bp, Arabidopsis thaliana
aacttagggcctgactg

SEQ ID NO: 9663 - DNA, 17 bp, Arabidopsis thaliana
aacttagggtcggcccg

SEQ ID NO: 9664 - DNA, 17 bp, Arabidopsis thaliana
aacttagtttaccgagg

SEQ ID NO: 9665 - DNA, 17 bp, Arabidopsis thaliana
aacttagtttccgtctg

SEQ ID NO: 9666 - DNA, 17 bp, Arabidopsis thaliana
aacttatagacatctgc

SEQ ID NO: 9667 - DNA, 17 bp, Arabidopsis thaliana
aacttatccgcagatgg

SEQ ID NO: 9668 - DNA, 17 bp, Arabidopsis thaliana
aacttatccgcttttac

SEQ ID NO: 9669 - DNA, 17 bp, Arabidopsis thaliana
aacttatcgtatgacct

SEQ ID NO: 9670 - DNA, 17 bp, Arabidopsis thaliana
aacttatggcagtccag

SEQ ID NO: 9671 - DNA, 17 bp, Arabidopsis thaliana
aacttattcatgggaat

SEQ ID NO: 9672 - DNA, 17 bp, Arabidopsis thaliana
aacttattggccttttg

SEQ ID NO: 9673 - DNA, 17 bp, Arabidopsis thaliana
aacttatttacaatgcc

SEQ ID NO: 9674 - DNA, 17 bp, Arabidopsis thaliana
aacttatttacaatggc

SEQ ID NO: 9675 - DNA, 17 bp, Arabidopsis thaliana
aacttatttacaatggt

SEQ ID NO: 9676 - DNA, 17 bp, Arabidopsis thaliana
aacttatttacagtggc

SEQ ID NO: 9677 - DNA, 17 bp, Arabidopsis thaliana
aacttatttacgatggc

SEQ ID NO: 9678 - DNA, 17 bp, Arabidopsis thaliana
aacttcaacttgccgca

SEQ ID NO: 9679 - DNA, 17 bp, Arabidopsis thaliana
aacttcaaggtggttgt

SEQ ID NO: 9680 - DNA, 17 bp, Arabidopsis thaliana
aacttcaagtctacccg

SEQ ID NO: 9681 - DNA, 17 bp, Arabidopsis thaliana
aacttcacatgtggcca

SEQ ID NO: 9682 - DNA, 17 bp, Arabidopsis thaliana
aacttcacctttggcca

SEQ ID NO: 9683 - DNA, 17 bp, Arabidopsis thaliana
aacttcacggccggctt

SEQ ID NO: 9684 - DNA, 17 bp, Arabidopsis thaliana
aacttcactaagtctat

SEQ ID NO: 9685 - DNA, 17 bp, Arabidopsis thaliana
aacttcagaagggtttt

SEQ ID NO: 9686 - DNA, 17 bp, Arabidopsis thaliana
aacttcagatgtgggac

SEQ ID NO: 9687 - DNA, 17 bp, Arabidopsis thaliana
aacttcagccctttgtc

SEQ ID NO: 9688 - DNA, 17 bp, Arabidopsis thaliana
aacttcagcgtatgtgg

SEQ ID NO: 9689 - DNA, 17 bp, Arabidopsis thaliana
aacttcagtggcaacag

SEQ ID NO: 9690 - DNA, 17 bp, Arabidopsis thaliana
aacttcagttactgtct

SEQ ID NO: 9691 - DNA, 17 bp, Arabidopsis thaliana
aacttcagttactgttc

SEQ ID NO: 9692 - DNA, 17 bp, Arabidopsis thaliana
aacttcagttgaccagt

SEQ ID NO: 9693 - DNA, 17 bp, Arabidopsis thaliana
aacttcagtttgccatt

SEQ ID NO: 9694 - DNA, 17 bp, Arabidopsis thaliana
aacttcatcaccagatc

SEQ ID NO: 9695 - DNA, 17 bp, Arabidopsis thaliana
aacttcatccggtttta

SEQ ID NO: 9696 - DNA, 17 bp, Arabidopsis thaliana
aacttcatctgaggcat

SEQ ID NO: 9697 - DNA, 17 bp, Arabidopsis thaliana
aacttcatctgtcggct

SEQ ID NO: 9698 - DNA, 17 bp, Arabidopsis thaliana
aacttcatcttggctgg

SEQ ID NO: 9699 - DNA, 17 bp, Arabidopsis thaliana
aacttcatggaccattg

SEQ ID NO: 9700 - DNA, 17 bp, Arabidopsis thaliana
aacttcatggttttttc

SEQ ID NO: 9701 - DNA, 17 bp, Arabidopsis thaliana
aacttcatgtcggtatg

SEQ ID NO: 9702 - DNA, 17 bp, Arabidopsis thaliana
aacttcatgtgctgatg

SEQ ID NO: 9703 - DNA, 17 bp, Arabidopsis thaliana
aacttcattaccagatt

SEQ ID NO: 9704 - DNA, 17 bp, Arabidopsis thaliana
aacttcattttgaaatg

SEQ ID NO: 9705 - DNA, 17 bp, Arabidopsis thaliana
aacttccaaagacttct

SEQ ID NO: 9706 - DNA, 17 bp, Arabidopsis thaliana
aacttccacgcttgcgc

SEQ ID NO: 9707 - DNA, 17 bp, Arabidopsis thaliana
aacttccactagtggac

SEQ ID NO: 9708 - DNA, 17 bp, Arabidopsis thaliana
aacttccacttacaggg

SEQ ID NO: 9709 - DNA, 17 bp, Arabidopsis thaliana
aacttccacttgcagtt

SEQ ID NO: 9710 - DNA, 17 bp, Arabidopsis thaliana
aacttccagacctggct

SEQ ID NO: 9711 - DNA, 17 bp, Arabidopsis thaliana
aacttccagacctggga

SEQ ID NO: 9712 - DNA, 17 bp, Arabidopsis thaliana
aacttccagacctgggt

SEQ ID NO: 9713 - DNA, 17 bp, Arabidopsis thaliana
aacttccaggtccagac

SEQ ID NO: 9714 - DNA, 17 bp, Arabidopsis thaliana
aacttcccagtgccaaa

SEQ ID NO: 9715 - DNA, 17 bp, Arabidopsis thaliana
aacttcccggctggtgc

SEQ ID NO: 9716 - DNA, 17 bp, Arabidopsis thaliana
aacttcccttggaccac

SEQ ID NO: 9717 - DNA, 17 bp, Arabidopsis thaliana
aacttccgaagggcaca

SEQ ID NO: 9718 - DNA, 17 bp, Arabidopsis thaliana
aacttccgatatgggac

SEQ ID NO: 9719 - DNA, 17 bp, Arabidopsis thaliana
aacttccgatctggccc

SEQ ID NO: 9720 - DNA, 17 bp, Arabidopsis thaliana
aacttccgatgtgggac

SEQ ID NO: 9721 - DNA, 17 bp, Arabidopsis thaliana
aacttccgatgtgggat

SEQ ID NO: 9722 - DNA, 17 bp, Arabidopsis thaliana
aacttccgtatgagcta

SEQ ID NO: 9723 - DNA, 17 bp, Arabidopsis thaliana
aacttccgtctagcctg

SEQ ID NO: 9724 - DNA, 17 bp, Arabidopsis thaliana
aacttcctactgagtaa

SEQ ID NO: 9725 - DNA, 17 bp, Arabidopsis thaliana
aacttcctcttcacgca

SEQ ID NO: 9726 - DNA, 17 bp, Arabidopsis thaliana
aacttcctgtgttcttc

SEQ ID NO: 9727 - DNA, 17 bp, Arabidopsis thaliana
aacttccttgtggcctc

SEQ ID NO: 9728 - DNA, 17 bp, Arabidopsis thaliana
aacttcgacagggatct

SEQ ID NO: 9729 - DNA, 17 bp, Arabidopsis thaliana
aacttcgaccacgtggt

SEQ ID NO: 9730 - DNA, 17 bp, Arabidopsis thaliana
aacttcgatgtcggctc

SEQ ID NO: 9731 - DNA, 17 bp, Arabidopsis thaliana
aacttcgattggaaatt

SEQ ID NO: 9732 - DNA, 17 bp, Arabidopsis thaliana
aacttcgcaaatagcca

SEQ ID NO: 9733 - DNA, 17 bp, Arabidopsis thaliana
aacttcgcacgttacga

SEQ ID NO: 9734 - DNA, 17 bp, Arabidopsis thaliana
aacttcgcccgcggcat

SEQ ID NO: 9735 - DNA, 17 bp, Arabidopsis thaliana
aacttcgcctagtgtct

SEQ ID NO: 9736 - DNA, 17 bp, Arabidopsis thaliana
aacttcgcctgcggcac

SEQ ID NO: 9737 - DNA, 17 bp, Arabidopsis thaliana
aacttcggagatcttct

SEQ ID NO: 9738 - DNA, 17 bp, Arabidopsis thaliana
aacttcggatttgaatg

SEQ ID NO: 9739 - DNA, 17 bp, Arabidopsis thaliana
aacttcgggaaaaggat

SEQ ID NO: 9740 - DNA, 17 bp, Arabidopsis thaliana
aacttcgggagaaggga

SEQ ID NO: 9741 - DNA, 17 bp, Arabidopsis thaliana
aacttcgggagaagggg

SEQ ID NO: 9742 - DNA, 17 bp, Arabidopsis thaliana
aacttcgggataagggg

SEQ ID NO: 9743 - DNA, 17 bp, Arabidopsis thaliana
aacttcgggcggcgatg

SEQ ID NO: 9744 - DNA, 17 bp, Arabidopsis thaliana
aacttcggttcgggtca

SEQ ID NO: 9745 - DNA, 17 bp, Arabidopsis thaliana
aacttcgtaggtggccg

SEQ ID NO: 9746 - DNA, 17 bp, Arabidopsis thaliana
aacttcgtatgcggccg

SEQ ID NO: 9747 - DNA, 17 bp, Arabidopsis thaliana
aacttcgtatgcggtcg

SEQ ID NO: 9748 - DNA, 17 bp, Arabidopsis thaliana
aacttcgtatgtggccg

SEQ ID NO: 9749 - DNA, 17 bp, Arabidopsis thaliana
aacttcgtccccagtgg

SEQ ID NO: 9750 - DNA, 17 bp, Arabidopsis thaliana
aacttcgtccgtcggct

SEQ ID NO: 9751 - DNA, 17 bp, Arabidopsis thaliana
aacttcgtccttcttag

SEQ ID NO: 9752 - DNA, 17 bp, Arabidopsis thaliana
aacttcgtcgttagtct

SEQ ID NO: 9753 - DNA, 17 bp, Arabidopsis thaliana
aacttcgtggtgtagtt

SEQ ID NO: 9754 - DNA, 17 bp, Arabidopsis thaliana
aacttcgttttggtcct

SEQ ID NO: 9755 - DNA, 17 bp, Arabidopsis thaliana
aacttctaagctccggc

SEQ ID NO: 9756 - DNA, 17 bp, Arabidopsis thaliana
aacttctataccgtgag

SEQ ID NO: 9757 - DNA, 17 bp, Arabidopsis thaliana
aacttctatggttggca

SEQ ID NO: 9758 - DNA, 17 bp, Arabidopsis thaliana
aacttctatttggatgt

SEQ ID NO: 9759 - DNA, 17 bp, Arabidopsis thaliana
aacttctcaggattcat

SEQ ID NO: 9760 - DNA, 17 bp, Arabidopsis thaliana
aacttctccggatttgt

SEQ ID NO: 9761 - DNA, 17 bp, Arabidopsis thaliana
aacttctcgaagaccgc

SEQ ID NO: 9762 - DNA, 17 bp, Arabidopsis thaliana
aacttctcggttttgct

SEQ ID NO: 9763 - DNA, 17 bp, Arabidopsis thaliana
aacttctcgtcacctaa

SEQ ID NO: 9764 - DNA, 17 bp, Arabidopsis thaliana
aacttctctaaactgat

SEQ ID NO: 9765 - DNA, 17 bp, Arabidopsis thaliana
aacttctctgcccagtt

SEQ ID NO: 9766 - DNA, 17 bp, Arabidopsis thaliana
aacttctgatgtgggac

SEQ ID NO: 9767 - DNA, 17 bp, Arabidopsis thaliana
aacttctggatctgatt

SEQ ID NO: 9768 - DNA, 17 bp, Arabidopsis thaliana
aacttctggtaacctca

SEQ ID NO: 9769 - DNA, 17 bp, Arabidopsis thaliana
aacttctggtgataatt

SEQ ID NO: 9770 - DNA, 17 bp, Arabidopsis thaliana
aacttctgtcgaaactg

SEQ ID NO: 9771 - DNA, 17 bp, Arabidopsis thaliana
aacttctgtcttccggc

SEQ ID NO: 9772 - DNA, 17 bp, Arabidopsis thaliana
aacttctgtggtagctg

SEQ ID NO: 9773 - DNA, 17 bp, Arabidopsis thaliana
aacttctgttgtggact

SEQ ID NO: 9774 - DNA, 17 bp, Arabidopsis thaliana
aacttctgtttgcccgt

SEQ ID NO: 9775 - DNA, 17 bp, Arabidopsis thaliana
aacttcttatccatcaa

SEQ ID NO: 9776 - DNA, 17 bp, Arabidopsis thaliana
aacttcttcaaccttct

SEQ ID NO: 9777 - DNA, 17 bp, Arabidopsis thaliana
aacttcttcggacggcc

SEQ ID NO: 9778 - DNA, 17 bp, Arabidopsis thaliana
aacttcttctaggctag

SEQ ID NO: 9779 - DNA, 17 bp, Arabidopsis thaliana
aacttcttcttgcttct

SEQ ID NO: 9780 - DNA, 17 bp, Arabidopsis thaliana
aacttcttgatttccga

SEQ ID NO: 9781 - DNA, 17 bp, Arabidopsis thaliana
aacttcttggttgtcgg

SEQ ID NO: 9782 - DNA, 17 bp, Arabidopsis thaliana
aacttcttgtgaacttg

SEQ ID NO: 9783 - DNA, 17 bp, Arabidopsis thaliana
aacttcttgtggacttg

SEQ ID NO: 9784 - DNA, 17 bp, Arabidopsis thaliana
aacttctttccaagtct

SEQ ID NO: 9785 - DNA, 17 bp, Arabidopsis thaliana
aacttctttccaagttt

SEQ ID NO: 9786 - DNA, 17 bp, Arabidopsis thaliana
aacttctttgtggaggc

SEQ ID NO: 9787 - DNA, 17 bp, Arabidopsis thaliana
aacttcttttgcctccc

SEQ ID NO: 9788 - DNA, 17 bp, Arabidopsis thaliana
aacttctttttgtgact

SEQ ID NO: 9789 - DNA, 17 bp, Arabidopsis thaliana
aacttgaactacgggtt

SEQ ID NO: 9790 - DNA, 17 bp, Arabidopsis thaliana
aacttgacacatcagca

SEQ ID NO: 9791 - DNA, 17 bp, Arabidopsis thaliana
aacttgacattcgccat

SEQ ID NO: 9792 - DNA, 17 bp, Arabidopsis thaliana
aacttgactaaagactc

SEQ ID NO: 9793 - DNA, 17 bp, Arabidopsis thaliana
aacttgactaaagatct

SEQ ID NO: 9794 - DNA, 17 bp, Arabidopsis thaliana
aacttgactcttagcta

SEQ ID NO: 9795 - DNA, 17 bp, Arabidopsis thaliana
aacttgacttgctttca

SEQ ID NO: 9796 - DNA, 17 bp, Arabidopsis thaliana
aacttgactttgccaac

SEQ ID NO: 9797 - DNA, 17 bp, Arabidopsis thaliana
aacttgagccgggcatt

SEQ ID NO: 9798 - DNA, 17 bp, Arabidopsis thaliana
aacttgatcgggttcgg

SEQ ID NO: 9799 - DNA, 17 bp, Arabidopsis thaliana
aacttgatctttccacc

SEQ ID NO: 9800 - DNA, 17 bp, Arabidopsis thaliana
aacttgatgtgcctctc

SEQ ID NO: 9801 - DNA, 17 bp, Arabidopsis thaliana
aacttgatgtggaacca

SEQ ID NO: 9802 - DNA, 17 bp, Arabidopsis thaliana
aacttgatgtgggacat

SEQ ID NO: 9803 - DNA, 17 bp, Arabidopsis thaliana
aacttgatgttgaatgc

SEQ ID NO: 9804 - DNA, 17 bp, Arabidopsis thaliana
aacttgattcgaggctc

SEQ ID NO: 9805 - DNA, 17 bp, Arabidopsis thaliana
aacttgcaccagtttcg

SEQ ID NO: 9806 - DNA, 17 bp, Arabidopsis thaliana
aacttgcagtataccgc

SEQ ID NO: 9807 - DNA, 17 bp, Arabidopsis thaliana
aacttgccaacttcctt

SEQ ID NO: 9808 - DNA, 17 bp, Arabidopsis thaliana
aacttgccgcaggtttt

SEQ ID NO: 9809 - DNA, 17 bp, Arabidopsis thaliana
aacttgccggatgttgg

SEQ ID NO: 9810 - DNA, 17 bp, Arabidopsis thaliana
aacttgccgttttcgct

SEQ ID NO: 9811 - DNA, 17 bp, Arabidopsis thaliana
aacttgcggacggtttt

SEQ ID NO: 9812 - DNA, 17 bp, Arabidopsis thaliana
aacttgcggtacaccac

SEQ ID NO: 9813 - DNA, 17 bp, Arabidopsis thaliana
aacttgctcagaatctg

SEQ ID NO: 9814 - DNA, 17 bp, Arabidopsis thaliana
aacttgctccatgacat

SEQ ID NO: 9815 - DNA, 17 bp, Arabidopsis thaliana
aacttgctccgcaacgg

SEQ ID NO: 9816 - DNA, 17 bp, Arabidopsis thaliana
aacttgctggaaggcca

SEQ ID NO: 9817 - DNA, 17 bp, Arabidopsis thaliana
aacttgcttgattgggt

SEQ ID NO: 9818 - DNA, 17 bp, Arabidopsis thaliana
aacttgcttgcttgggt

SEQ ID NO: 9819 - DNA, 17 bp, Arabidopsis thaliana
aacttgcttggtgcaga

SEQ ID NO: 9820 - DNA, 17 bp, Arabidopsis thaliana
aacttgcttgtaccagg

SEQ ID NO: 9821 - DNA, 17 bp, Arabidopsis thaliana
aacttggaatgacactt

SEQ ID NO: 9822 - DNA, 17 bp, Arabidopsis thaliana
aacttggacattgattt

SEQ ID NO: 9823 - DNA, 17 bp, Arabidopsis thaliana
aacttggaccaaaaccc

SEQ ID NO: 9824 - DNA, 17 bp, Arabidopsis thaliana
aacttggacccaggtat

SEQ ID NO: 9825 - DNA, 17 bp, Arabidopsis thaliana
aacttggaccgcagcgg

SEQ ID NO: 9826 - DNA, 17 bp, Arabidopsis thaliana
aacttggagcacaaagc

SEQ ID NO: 9827 - DNA, 17 bp, Arabidopsis thaliana
aacttggattactggag

SEQ ID NO: 9828 - DNA, 17 bp, Arabidopsis thaliana
aacttggcatgtgaccc

SEQ ID NO: 9829 - DNA, 17 bp, Arabidopsis thaliana
aacttggcatgtgatac

SEQ ID NO: 9830 - DNA, 17 bp, Arabidopsis thaliana
aacttggccattgaggt

SEQ ID NO: 9831 - DNA, 17 bp, Arabidopsis thaliana
aacttggccctgttcgt

SEQ ID NO: 9832 - DNA, 17 bp, Arabidopsis thaliana
aacttggccgcttgttg

SEQ ID NO: 9833 - DNA, 17 bp, Arabidopsis thaliana
aacttggcctgtgatac

SEQ ID NO: 9834 - DNA, 17 bp, Arabidopsis thaliana
aacttggcgcaatttgt

SEQ ID NO: 9835 - DNA, 17 bp, Arabidopsis thaliana
aacttggcgttcggtta

SEQ ID NO: 9836 - DNA, 17 bp, Arabidopsis thaliana
aacttggcgttgcaaat

SEQ ID NO: 9837 - DNA, 17 bp, Arabidopsis thaliana
aacttggctcggatgtg

SEQ ID NO: 9838 - DNA, 17 bp, Arabidopsis thaliana
aacttggctctgatacc

SEQ ID NO: 9839 - DNA, 17 bp, Arabidopsis thaliana
aacttgggacctacctt

SEQ ID NO: 9840 - DNA, 17 bp, Arabidopsis thaliana
aacttgggacttaccta

SEQ ID NO: 9841 - DNA, 17 bp, Arabidopsis thaliana
aacttgggacttacctt

SEQ ID NO: 9842 - DNA, 17 bp, Arabidopsis thaliana
aacttgggacttattta

SEQ ID NO: 9843 - DNA, 17 bp, Arabidopsis thaliana
aacttgggatgggtcgg

SEQ ID NO: 9844 - DNA, 17 bp, Arabidopsis thaliana
aacttgggcttgggcct

SEQ ID NO: 9845 - DNA, 17 bp, Arabidopsis thaliana
aacttgggtaaaggctg

SEQ ID NO: 9846 - DNA, 17 bp, Arabidopsis thaliana
aacttggtatgcgaaga

SEQ ID NO: 9847 - DNA, 17 bp, Arabidopsis thaliana
aacttggtcccgggcat

SEQ ID NO: 9848 - DNA, 17 bp, Arabidopsis thaliana
aacttggtccgcagcga

SEQ ID NO: 9849 - DNA, 17 bp, Arabidopsis thaliana
aacttggtccgcagcgg

SEQ ID NO: 9850 - DNA, 17 bp, Arabidopsis thaliana
aacttggtctgcagcgg

SEQ ID NO: 9851 - DNA, 17 bp, Arabidopsis thaliana
aacttggtgaaacttct

SEQ ID NO: 9852 - DNA, 17 bp, Arabidopsis thaliana
aacttggtgattcggca

SEQ ID NO: 9853 - DNA, 17 bp, Arabidopsis thaliana
aacttggtgcgcaacgg

SEQ ID NO: 9854 - DNA, 17 bp, Arabidopsis thaliana
aacttggtgtaacttct

SEQ ID NO: 9855 - DNA, 17 bp, Arabidopsis thaliana
aacttggtgtagatccc

SEQ ID NO: 9856 - DNA, 17 bp, Arabidopsis thaliana
aacttggtgtaggtctc

SEQ ID NO: 9857 - DNA, 17 bp, Arabidopsis thaliana
aacttggtgtgaatccc

SEQ ID NO: 9858 - DNA, 17 bp, Arabidopsis thaliana
aacttggtgtgaattcc

SEQ ID NO: 9859 - DNA, 17 bp, Arabidopsis thaliana
aacttggtgtgagtccc

SEQ ID NO: 9860 - DNA, 17 bp, Arabidopsis thaliana
aacttggtgtggatcct

SEQ ID NO: 9861 - DNA, 17 bp, Arabidopsis thaliana
aacttggtgtggatctt

SEQ ID NO: 9862 - DNA, 17 bp, Arabidopsis thaliana
aacttggtgtgtgtctc

SEQ ID NO: 9863 - DNA, 17 bp, Arabidopsis thaliana
aacttggttggctcagt

SEQ ID NO: 9864 - DNA, 17 bp, Arabidopsis thaliana
aacttggttggctcatt

SEQ ID NO: 9865 - DNA, 17 bp, Arabidopsis thaliana
aacttgtaatccttcca

SEQ ID NO: 9866 - DNA, 17 bp, Arabidopsis thaliana
aacttgtacagctttac

SEQ ID NO: 9867 - DNA, 17 bp, Arabidopsis thaliana
aacttgtacgggtgact

SEQ ID NO: 9868 - DNA, 17 bp, Arabidopsis thaliana
aacttgtcagctaacta

SEQ ID NO: 9869 - DNA, 17 bp, Arabidopsis thaliana
aacttgtcagctaagat

SEQ ID NO: 9870 - DNA, 17 bp, Arabidopsis thaliana
aacttgtcaggttggga

SEQ ID NO: 9871 - DNA, 17 bp, Arabidopsis thaliana
aacttgtccacaccttt

SEQ ID NO: 9872 - DNA, 17 bp, Arabidopsis thaliana
aacttgtccatttctgc

SEQ ID NO: 9873 - DNA, 17 bp, Arabidopsis thaliana
aacttgtcccttttcct

SEQ ID NO: 9874 - DNA, 17 bp, Arabidopsis thaliana
aacttgtcctttgggtt

SEQ ID NO: 9875 - DNA, 17 bp, Arabidopsis thaliana
aacttgtctctgcaagg

SEQ ID NO: 9876 - DNA, 17 bp, Arabidopsis thaliana
aacttgtctgactcctc

SEQ ID NO: 9877 - DNA, 17 bp, Arabidopsis thaliana
aacttgtctgactcctg

SEQ ID NO: 9878 - DNA, 17 bp, Arabidopsis thaliana
aacttgtcttgaggttt

SEQ ID NO: 9879 - DNA, 17 bp, Arabidopsis thaliana
aacttgtgctgggcgtt

SEQ ID NO: 9880 - DNA, 17 bp, Arabidopsis thaliana
aacttgtgcttactttc

SEQ ID NO: 9881 - DNA, 17 bp, Arabidopsis thaliana
aacttgtggatatccga

SEQ ID NO: 9882 - DNA, 17 bp, Arabidopsis thaliana
aacttgtggtcatttcc

SEQ ID NO: 9883 - DNA, 17 bp, Arabidopsis thaliana
aacttgtgtagaggtgg

SEQ ID NO: 9884 - DNA, 17 bp, Arabidopsis thaliana
aacttgtgtctgaggat

SEQ ID NO: 9885 - DNA, 17 bp, Arabidopsis thaliana
aacttgtgttccataga

SEQ ID NO: 9886 - DNA, 17 bp, Arabidopsis thaliana
aacttgtgttgaccgtt

SEQ ID NO: 9887 - DNA, 17 bp, Arabidopsis thaliana
aacttgttctccaacgt

SEQ ID NO: 9888 - DNA, 17 bp, Arabidopsis thaliana
aacttgttgattcgtaa

SEQ ID NO: 9889 - DNA, 17 bp, Arabidopsis thaliana
aacttgttgccaagcaa

SEQ ID NO: 9890 - DNA, 17 bp, Arabidopsis thaliana
aacttgttgccaagcac

SEQ ID NO: 9891 - DNA, 17 bp, Arabidopsis thaliana
aacttgtttttggatgt

SEQ ID NO: 9892 - DNA, 17 bp, Arabidopsis thaliana
aactttaaataggtagg

SEQ ID NO: 9893 - DNA, 17 bp, Arabidopsis thaliana
aactttaaccagcagtt

SEQ ID NO: 9894 - DNA, 17 bp, Arabidopsis thaliana
aactttaaccggtaaag

SEQ ID NO: 9895 - DNA, 17 bp, Arabidopsis thaliana
aactttaacgatgattc

SEQ ID NO: 9896 - DNA, 17 bp, Arabidopsis thaliana
aactttaacgtgctatt

SEQ ID NO: 9897 - DNA, 17 bp, Arabidopsis thaliana
aactttaactttggcca

SEQ ID NO: 9898 - DNA, 17 bp, Arabidopsis thaliana
aactttaatggaaaatg

SEQ ID NO: 9899 - DNA, 17 bp, Arabidopsis thaliana
aactttaatgtgccaat

SEQ ID NO: 9900 - DNA, 17 bp, Arabidopsis thaliana
aactttacagacaagtc

SEQ ID NO: 9901 - DNA, 17 bp, Arabidopsis thaliana
aactttacagcccaccc

SEQ ID NO: 9902 - DNA, 17 bp, Arabidopsis thaliana
aactttacatccagcaa

SEQ ID NO: 9903 - DNA, 17 bp, Arabidopsis thaliana
aactttacatgcggcca

SEQ ID NO: 9904 - DNA, 17 bp, Arabidopsis thaliana
aactttacgcgggtacg

SEQ ID NO: 9905 - DNA, 17 bp, Arabidopsis thaliana
aactttactttgtcgcg

SEQ ID NO: 9906 - DNA, 17 bp, Arabidopsis thaliana
aactttagaccgtgagg

SEQ ID NO: 9907 - DNA, 17 bp, Arabidopsis thaliana
aactttagagctaagga

SEQ ID NO: 9908 - DNA, 17 bp, Arabidopsis thaliana
aactttagcccagggcc

SEQ ID NO: 9909 - DNA, 17 bp, Arabidopsis thaliana
aactttaggtgcagagt

SEQ ID NO: 9910 - DNA, 17 bp, Arabidopsis thaliana
aactttagttgcgtctg

SEQ ID NO: 9911 - DNA, 17 bp, Arabidopsis thaliana
aactttatccaaagaca

SEQ ID NO: 9912 - DNA, 17 bp, Arabidopsis thaliana
aactttatggatcgacc

SEQ ID NO: 9913 - DNA, 17 bp, Arabidopsis thaliana
aactttatggctcagct

SEQ ID NO: 9914 - DNA, 17 bp, Arabidopsis thaliana
aactttcaaacagagtt

SEQ ID NO: 9915 - DNA, 17 bp, Arabidopsis thaliana
aactttcaagcgcaagc

SEQ ID NO: 9916 - DNA, 17 bp, Arabidopsis thaliana
aactttcaaggcaagag

SEQ ID NO: 9917 - DNA, 17 bp, Arabidopsis thaliana
aactttcaaggcccaag

SEQ ID NO: 9918 - DNA, 17 bp, Arabidopsis thaliana
aactttcaccaatttgc

SEQ ID NO: 9919 - DNA, 17 bp, Arabidopsis thaliana
aactttcacttcaccgg

SEQ ID NO: 9920 - DNA, 17 bp, Arabidopsis thaliana
aactttcacttgcgttt

SEQ ID NO: 9921 - DNA, 17 bp, Arabidopsis thaliana
aactttcagaaatgtca

SEQ ID NO: 9922 - DNA, 17 bp, Arabidopsis thaliana
aactttcagtttccaat

SEQ ID NO: 9923 - DNA, 17 bp, Arabidopsis thaliana
aactttcatatggttat

SEQ ID NO: 9924 - DNA, 17 bp, Arabidopsis thaliana
aactttcatgactatgg

SEQ ID NO: 9925 - DNA, 17 bp, Arabidopsis thaliana
aactttcatgtgctgat

SEQ ID NO: 9926 - DNA, 17 bp, Arabidopsis thaliana
aactttcattgacttgg

SEQ ID NO: 9927 - DNA, 17 bp, Arabidopsis thaliana
aactttccaaaaataga

SEQ ID NO: 9928 - DNA, 17 bp, Arabidopsis thaliana
aactttccctcgttcat

SEQ ID NO: 9929 - DNA, 17 bp, Arabidopsis thaliana
aactttccggcgacttt

SEQ ID NO: 9930 - DNA, 17 bp, Arabidopsis thaliana
aactttcctcatattgg

SEQ ID NO: 9931 - DNA, 17 bp, Arabidopsis thaliana
aactttccttgatcgtt

SEQ ID NO: 9932 - DNA, 17 bp, Arabidopsis thaliana
aactttcgaaatatcaa

SEQ ID NO: 9933 - DNA, 17 bp, Arabidopsis thaliana
aactttcgaaatctcaa

SEQ ID NO: 9934 - DNA, 17 bp, Arabidopsis thaliana
aactttcgaaatttcaa

SEQ ID NO: 9935 - DNA, 17 bp, Arabidopsis thaliana
aactttcgacaagtaat

SEQ ID NO: 9936 - DNA, 17 bp, Arabidopsis thaliana
aactttcgatggtagga

SEQ ID NO: 9937 - DNA, 17 bp, Arabidopsis thaliana
aactttcgatgtgggaa

SEQ ID NO: 9938 - DNA, 17 bp, Arabidopsis thaliana
aactttcgatgtgggac

SEQ ID NO: 9939 - DNA, 17 bp, Arabidopsis thaliana
aactttcggctcagaac

SEQ ID NO: 9940 - DNA, 17 bp, Arabidopsis thaliana
aactttcgggtgcagta

SEQ ID NO: 9941 - DNA, 17 bp, Arabidopsis thaliana
aactttcgggtgtagta

SEQ ID NO: 9942 - DNA, 17 bp, Arabidopsis thaliana
aactttcgtcccaatcg

SEQ ID NO: 9943 - DNA, 17 bp, Arabidopsis thaliana
aactttcgtctcgcacg

SEQ ID NO: 9944 - DNA, 17 bp, Arabidopsis thaliana
aactttcgttgactggc

SEQ ID NO: 9945 - DNA, 17 bp, Arabidopsis thaliana
aactttcgttgactttg

SEQ ID NO: 9946 - DNA, 17 bp, Arabidopsis thaliana
aactttcgtttcatgtg

SEQ ID NO: 9947 - DNA, 17 bp, Arabidopsis thaliana
aactttctacatgagtt

SEQ ID NO: 9948 - DNA, 17 bp, Arabidopsis thaliana
aactttctacggggaca

SEQ ID NO: 9949 - DNA, 17 bp, Arabidopsis thaliana
aactttctactaagtaa

SEQ ID NO: 9950 - DNA, 17 bp, Arabidopsis thaliana
aactttctactgaataa

SEQ ID NO: 9951 - DNA, 17 bp, Arabidopsis thaliana
aactttctactgagtaa

SEQ ID NO: 9952 - DNA, 17 bp, Arabidopsis thaliana
aactttctactgagtac

SEQ ID NO: 9953 - DNA, 17 bp, Arabidopsis thaliana
aactttctccacttgtg

SEQ ID NO: 9954 - DNA, 17 bp, Arabidopsis thaliana
aactttctccaggttcg

SEQ ID NO: 9955 - DNA, 17 bp, Arabidopsis thaliana
aactttctccagttgca

SEQ ID NO: 9956 - DNA, 17 bp, Arabidopsis thaliana
aactttctccgtcacca

SEQ ID NO: 9957 - DNA, 17 bp, Arabidopsis thaliana
aactttctcgccagctt

SEQ ID NO: 9958 - DNA, 17 bp, Arabidopsis thaliana
aactttctctcatcctt

SEQ ID NO: 9959 - DNA, 17 bp, Arabidopsis thaliana
aactttctctgtctttg

SEQ ID NO: 9960 - DNA, 17 bp, Arabidopsis thaliana
aactttctcttggcttc

SEQ ID NO: 9961 - DNA, 17 bp, Arabidopsis thaliana
aactttctgggtcacat

SEQ ID NO: 9962 - DNA, 17 bp, Arabidopsis thaliana
aactttctgtcaggtaa

SEQ ID NO: 9963 - DNA, 17 bp, Arabidopsis thaliana
aactttgaaggccgaag

SEQ ID NO: 9964 - DNA, 17 bp, Arabidopsis thaliana
aactttgaatcgcatgg

SEQ ID NO: 9965 - DNA, 17 bp, Arabidopsis thaliana
aactttgacacaccgtc

SEQ ID NO: 9966 - DNA, 17 bp, Arabidopsis thaliana
aactttgacacatcagc

SEQ ID NO: 9967 - DNA, 17 bp, Arabidopsis thaliana
aactttgacacatccac

SEQ ID NO: 9968 - DNA, 17 bp, Arabidopsis thaliana
aactttgacacatccgc

SEQ ID NO: 9969 - DNA, 17 bp, Arabidopsis thaliana
aactttgacataggcta

SEQ ID NO: 9970 - DNA, 17 bp, Arabidopsis thaliana
aactttgacatcatcag

SEQ ID NO: 9971 - DNA, 17 bp, Arabidopsis thaliana
aactttgacgtgaacct

SEQ ID NO: 9972 - DNA, 17 bp, Arabidopsis thaliana
aactttgactgcaaaga

SEQ ID NO: 9973 - DNA, 17 bp, Arabidopsis thaliana
aactttgactgtagaaa

SEQ ID NO: 9974 - DNA, 17 bp, Arabidopsis thaliana
aactttgagagatgttt

SEQ ID NO: 9975 - DNA, 17 bp, Arabidopsis thaliana
aactttgagggtttctc

SEQ ID NO: 9976 - DNA, 17 bp, Arabidopsis thaliana
aactttgatagccgcag

SEQ ID NO: 9977 - DNA, 17 bp, Arabidopsis thaliana
aactttgatccacatgc

SEQ ID NO: 9978 - DNA, 17 bp, Arabidopsis thaliana
aactttgatggctcatt

SEQ ID NO: 9979 - DNA, 17 bp, Arabidopsis thaliana
aactttgatttgaagtt

SEQ ID NO: 9980 - DNA, 17 bp, Arabidopsis thaliana
aactttgatttgtgatt

SEQ ID NO: 9981 - DNA, 17 bp, Arabidopsis thaliana
aactttgcaggctgtta

SEQ ID NO: 9982 - DNA, 17 bp, Arabidopsis thaliana
aactttgccatgaggga

SEQ ID NO: 9983 - DNA, 17 bp, Arabidopsis thaliana
aactttgccatgagggg

SEQ ID NO: 9984 - DNA, 17 bp, Arabidopsis thaliana
aactttgccatgtctga

SEQ ID NO: 9985 - DNA, 17 bp, Arabidopsis thaliana
aactttgccccgaggct

SEQ ID NO: 9986 - DNA, 17 bp, Arabidopsis thaliana
aactttgcgaattcaaa

SEQ ID NO: 9987 - DNA, 17 bp, Arabidopsis thaliana
aactttgcgaattcaca

SEQ ID NO: 9988 - DNA, 17 bp, Arabidopsis thaliana
aactttgcttaactctt

SEQ ID NO: 9989 - DNA, 17 bp, Arabidopsis thaliana
aactttgcttacagttt

SEQ ID NO: 9990 - DNA, 17 bp, Arabidopsis thaliana
aactttgcttcgtcggt

SEQ ID NO: 9991 - DNA, 17 bp, Arabidopsis thaliana
aactttgctttgtcgcg

SEQ ID NO: 9992 - DNA, 17 bp, Arabidopsis thaliana
aactttggaagcgagat

SEQ ID NO: 9993 - DNA, 17 bp, Arabidopsis thaliana
aactttggaccaaataa

SEQ ID NO: 9994 - DNA, 17 bp, Arabidopsis thaliana
aactttggaccaaatag

SEQ ID NO: 9995 - DNA, 17 bp, Arabidopsis thaliana
aactttggacctccagg

SEQ ID NO: 9996 - DNA, 17 bp, Arabidopsis thaliana
aactttggatggaactt

SEQ ID NO: 9997 - DNA, 17 bp, Arabidopsis thaliana
aactttggcagtttctc

SEQ ID NO: 9998 - DNA, 17 bp, Arabidopsis thaliana
aactttggctagatcca

SEQ ID NO: 9999 - DNA, 17 bp, Arabidopsis thaliana
aactttggctcaagtct

SEQ ID NO: 10000 - DNA, 17 bp, Arabidopsis thaliana
aactttggctcggttgt

SEQ ID NO: 10001 - DNA, 17 bp, Arabidopsis thaliana
aactttggctgctgcaa

SEQ ID NO: 10002 - DNA, 17 bp, Arabidopsis thaliana
aactttgggatgggtcg

SEQ ID NO: 10003 - DNA, 17 bp, Arabidopsis thaliana
aactttgggattggtgc

SEQ ID NO: 10004 - DNA, 17 bp, Arabidopsis thaliana
aactttggtaagctgag

SEQ ID NO: 10005 - DNA, 17 bp, Arabidopsis thaliana
aactttggtacaggtgc

SEQ ID NO: 10006 - DNA, 17 bp, Arabidopsis thaliana
aactttggtcgctggtt

SEQ ID NO: 10007 - DNA, 17 bp, Arabidopsis thaliana
aactttggtgactaaga

SEQ ID NO: 10008 - DNA, 17 bp, Arabidopsis thaliana
aactttggttagaaatc

SEQ ID NO: 10009 - DNA, 17 bp, Arabidopsis thaliana
aactttggttgctaaca

SEQ ID NO: 10010 - DNA, 17 bp, Arabidopsis thaliana
aactttgtaagcaagat

SEQ ID NO: 10011 - DNA, 17 bp, Arabidopsis thaliana
aactttgtaggtttctc

SEQ ID NO: 10012 - DNA, 17 bp, Arabidopsis thaliana
aactttgtatcgcgcac

SEQ ID NO: 10013 - DNA, 17 bp, Arabidopsis thaliana
aactttgtccagctagt

SEQ ID NO: 10014 - DNA, 17 bp, Arabidopsis thaliana
aactttgtgagcctcca

SEQ ID NO: 10015 - DNA, 17 bp, Arabidopsis thaliana
aactttgtgagggattt

SEQ ID NO: 10016 - DNA, 17 bp, Arabidopsis thaliana
aactttgtgggtttctc

SEQ ID NO: 10017 - DNA, 17 bp, Arabidopsis thaliana
aactttgttctttccct

SEQ ID NO: 10018 - DNA, 17 bp, Arabidopsis thaliana
aactttgttggatatgg

SEQ ID NO: 10019 - DNA, 17 bp, Arabidopsis thaliana
aactttgttgtaaagtc

SEQ ID NO: 10020 - DNA, 17 bp, Arabidopsis thaliana
aactttgtttaggtcga

SEQ ID NO: 10021 - DNA, 17 bp, Arabidopsis thaliana
aacttttaaaccgtgag

SEQ ID NO: 10022 - DNA, 17 bp, Arabidopsis thaliana
aacttttaaaggcccaa

SEQ ID NO: 10023 - DNA, 17 bp, Arabidopsis thaliana
aacttttacaaagtgct

SEQ ID NO: 10024 - DNA, 17 bp, Arabidopsis thaliana
aacttttaccaatttat

SEQ ID NO: 10025 - DNA, 17 bp, Arabidopsis thaliana
aacttttaccaatttgg

SEQ ID NO: 10026 - DNA, 17 bp, Arabidopsis thaliana
aacttttagacagtgag

SEQ ID NO: 10027 - DNA, 17 bp, Arabidopsis thaliana
aacttttagaccaagag

SEQ ID NO: 10028 - DNA, 17 bp, Arabidopsis thaliana
aacttttagaccatgag

SEQ ID NO: 10029 - DNA, 17 bp, Arabidopsis thaliana
aacttttagaccgtaag

SEQ ID NO: 10030 - DNA, 17 bp, Arabidopsis thaliana
aacttttagaccgtcac

SEQ ID NO: 10031 - DNA, 17 bp, Arabidopsis thaliana
aacttttagaccgtcag

SEQ ID NO: 10032 - DNA, 17 bp, Arabidopsis thaliana
aacttttagaccgtccc

SEQ ID NO: 10033 - DNA, 17 bp, Arabidopsis thaliana
aacttttagaccgtgaa

SEQ ID NO: 10034 - DNA, 17 bp, Arabidopsis thaliana
aacttttagaccgtgag

SEQ ID NO: 10035 - DNA, 17 bp, Arabidopsis thaliana
aacttttagaccgtgat

SEQ ID NO: 10036 - DNA, 17 bp, Arabidopsis thaliana
aacttttagaccgtgcg

SEQ ID NO: 10037 - DNA, 17 bp, Arabidopsis thaliana
aacttttagaccgtggg

SEQ ID NO: 10038 - DNA, 17 bp, Arabidopsis thaliana
aacttttagactgtgag

SEQ ID NO: 10039 - DNA, 17 bp, Arabidopsis thaliana
aacttttattagccgac

SEQ ID NO: 10040 - DNA, 17 bp, Arabidopsis thaliana
aacttttcagccagact

SEQ ID NO: 10041 - DNA, 17 bp, Arabidopsis thaliana
aacttttcaggtaacaa

SEQ ID NO: 10042 - DNA, 17 bp, Arabidopsis thaliana
aacttttcaggtaacat

SEQ ID NO: 10043 - DNA, 17 bp, Arabidopsis thaliana
aacttttcaggttgagg

SEQ ID NO: 10044 - DNA, 17 bp, Arabidopsis thaliana
aacttttcatgcgttgg

SEQ ID NO: 10045 - DNA, 17 bp, Arabidopsis thaliana
aacttttccacactttt

SEQ ID NO: 10046 - DNA, 17 bp, Arabidopsis thaliana
aacttttccactgactt

SEQ ID NO: 10047 - DNA, 17 bp, Arabidopsis thaliana
aacttttccattgactt

SEQ ID NO: 10048 - DNA, 17 bp, Arabidopsis thaliana
aacttttcccttttcca

SEQ ID NO: 10049 - DNA, 17 bp, Arabidopsis thaliana
aacttttccctttttta

SEQ ID NO: 10050 - DNA, 17 bp, Arabidopsis thaliana
aacttttcctaccattg

SEQ ID NO: 10051 - DNA, 17 bp, Arabidopsis thaliana
aacttttcctaggctag

SEQ ID NO: 10052 - DNA, 17 bp, Arabidopsis thaliana
aacttttcgcgctaagt

SEQ ID NO: 10053 - DNA, 17 bp, Arabidopsis thaliana
aacttttcggcgagtga

SEQ ID NO: 10054 - DNA, 17 bp, Arabidopsis thaliana
aacttttcggggcggtt

SEQ ID NO: 10055 - DNA, 17 bp, Arabidopsis thaliana
aacttttctccgaagga

SEQ ID NO: 10056 - DNA, 17 bp, Arabidopsis thaliana
aacttttctcttttcca

SEQ ID NO: 10057 - DNA, 17 bp, Arabidopsis thaliana
aacttttctgacacaag

SEQ ID NO: 10058 - DNA, 17 bp, Arabidopsis thaliana
aacttttgacaaatggc

SEQ ID NO: 10059 - DNA, 17 bp, Arabidopsis thaliana
aacttttgaccgcactc

SEQ ID NO: 10060 - DNA, 17 bp, Arabidopsis thaliana
aacttttgaccgctggc

SEQ ID NO: 10061 - DNA, 17 bp, Arabidopsis thaliana
aacttttgaccgctgtc

SEQ ID NO: 10062 - DNA, 17 bp, Arabidopsis thaliana
aacttttgatcgctgtc

SEQ ID NO: 10063 - DNA, 17 bp, Arabidopsis thaliana
aacttttgatcgctgtt

SEQ ID NO: 10064 - DNA, 17 bp, Arabidopsis thaliana
aacttttgatgttgcca

SEQ ID NO: 10065 - DNA, 17 bp, Arabidopsis thaliana
aacttttggactgagga

SEQ ID NO: 10066 - DNA, 17 bp, Arabidopsis thaliana
aacttttggaggcagat

SEQ ID NO: 10067 - DNA, 17 bp, Arabidopsis thaliana
aacttttggatgtcaca

SEQ ID NO: 10068 - DNA, 17 bp, Arabidopsis thaliana
aacttttggtcgctggc

SEQ ID NO: 10069 - DNA, 17 bp, Arabidopsis thaliana
aacttttggtcgctggt

SEQ ID NO: 10070 - DNA, 17 bp, Arabidopsis thaliana
aacttttggtcgctgtc

SEQ ID NO: 10071 - DNA, 17 bp, Arabidopsis thaliana
aacttttggtcgttgtc

SEQ ID NO: 10072 - DNA, 17 bp, Arabidopsis thaliana
aacttttggttaccaat

SEQ ID NO: 10073 - DNA, 17 bp, Arabidopsis thaliana
aacttttgtacgacgaa

SEQ ID NO: 10074 - DNA, 17 bp, Arabidopsis thaliana
aacttttgtgcaatgtc

SEQ ID NO: 10075 - DNA, 17 bp, Arabidopsis thaliana
aacttttgttgactttg

SEQ ID NO: 10076 - DNA, 17 bp, Arabidopsis thaliana
aacttttgtttacttgg

SEQ ID NO: 10077 - DNA, 17 bp, Arabidopsis thaliana
aactttttacactggtc

SEQ ID NO: 10078 - DNA, 17 bp, Arabidopsis thaliana
aactttttcaacggttg

SEQ ID NO: 10079 - DNA, 17 bp, Arabidopsis thaliana
aactttttcaccaaatc

SEQ ID NO: 10080 - DNA, 17 bp, Arabidopsis thaliana
aactttttcattaaact

SEQ ID NO: 10081 - DNA, 17 bp, Arabidopsis thaliana
aactttttccaattttc

SEQ ID NO: 10082 - DNA, 17 bp, Arabidopsis thaliana
aactttttccacaattt

SEQ ID NO: 10083 - DNA, 17 bp, Arabidopsis thaliana
aactttttccgggcata

SEQ ID NO: 10084 - DNA, 17 bp, Arabidopsis thaliana
aactttttctaacagct

SEQ ID NO: 10085 - DNA, 17 bp, Arabidopsis thaliana
aactttttctgtcaacc

SEQ ID NO: 10086 - DNA, 17 bp, Arabidopsis thaliana
aactttttcttcaactt

SEQ ID NO: 10087 - DNA, 17 bp, Arabidopsis thaliana
aactttttcttttggcc

SEQ ID NO: 10088 - DNA, 17 bp, Arabidopsis thaliana
aactttttgagtaatct

SEQ ID NO: 10089 - DNA, 17 bp, Arabidopsis thaliana
aactttttgagtttctc

SEQ ID NO: 10090 - DNA, 17 bp, Arabidopsis thaliana
aactttttgcggggaaa

SEQ ID NO: 10091 - DNA, 17 bp, Arabidopsis thaliana
aactttttgtgccaaat

SEQ ID NO: 10092 - DNA, 17 bp, Arabidopsis thaliana
aacttttttactgactt

SEQ ID NO: 10093 - DNA, 17 bp, Arabidopsis thaliana
aacttttttgactcacc

SEQ ID NO: 10094 - DNA, 17 bp, Arabidopsis thaliana
aacttttttgactgacc

SEQ ID NO: 10095 - DNA, 17 bp, Arabidopsis thaliana
aacttttttgcaaaacc

SEQ ID NO: 10096 - DNA, 17 bp, Arabidopsis thaliana
aacttttttgcgacgac

SEQ ID NO: 10097 - DNA, 17 bp, Arabidopsis thaliana
aacttttttgtagacgt

SEQ ID NO: 10098 - DNA, 17 bp, Arabidopsis thaliana
aactttttttggatagc

SEQ ID NO: 10099 - DNA, 17 bp, Arabidopsis thaliana
aagaaaaaagtcactcg

SEQ ID NO: 10100 - DNA, 17 bp, Arabidopsis thaliana
aagaaaaactacatctt

SEQ ID NO: 10101 - DNA, 17 bp, Arabidopsis thaliana
aagaaaaagtcagacgt

SEQ ID NO: 10102 - DNA, 17 bp, Arabidopsis thaliana
aagaaaaattatgatcg

SEQ ID NO: 10103 - DNA, 17 bp, Arabidopsis thaliana
aagaaaacaggcgttta

SEQ ID NO: 10104 - DNA, 17 bp, Arabidopsis thaliana
aagaaaacagtcgtcag

SEQ ID NO: 10105 - DNA, 17 bp, Arabidopsis thaliana
aagaaaaccgctgcgga

SEQ ID NO: 10106 - DNA, 17 bp, Arabidopsis thaliana
aagaaaaccgtgacgaa

SEQ ID NO: 10107 - DNA, 17 bp, Arabidopsis thaliana
aagaaaactttctggag

SEQ ID NO: 10108 - DNA, 17 bp, Arabidopsis thaliana
aagaaaatcataccagt

SEQ ID NO: 10109 - DNA, 17 bp, Arabidopsis thaliana
aagaaaatggcaattcg

SEQ ID NO: 10110 - DNA, 17 bp, Arabidopsis thaliana
aagaaaattcgtcggcg

SEQ ID NO: 10111 - DNA, 17 bp, Arabidopsis thaliana
aagaaacaacagaggtc

SEQ ID NO: 10112 - DNA, 17 bp, Arabidopsis thaliana
aagaaacaccgattctg

SEQ ID NO: 10113 - DNA, 17 bp, Arabidopsis thaliana
aagaaaccagaacatcc

SEQ ID NO: 10114 - DNA, 17 bp, Arabidopsis thaliana
aagaaacccgctcaagg

SEQ ID NO: 10115 - DNA, 17 bp, Arabidopsis thaliana
aagaaaccggagagaaa

SEQ ID NO: 10116 - DNA, 17 bp, Arabidopsis thaliana
aagaaaccttcgcttac

SEQ ID NO: 10117 - DNA, 17 bp, Arabidopsis thaliana
aagaaacgagctgttcg

SEQ ID NO: 10118 - DNA, 17 bp, Arabidopsis thaliana
aagaaacgggtcatctc

SEQ ID NO: 10119 - DNA, 17 bp, Arabidopsis thaliana
aagaaactagccccgcg

SEQ ID NO: 10120 - DNA, 17 bp, Arabidopsis thaliana
aagaaactagccgggtg

SEQ ID NO: 10121 - DNA, 17 bp, Arabidopsis thaliana
aagaaactgtgttttct

SEQ ID NO: 10122 - DNA, 17 bp, Arabidopsis thaliana
aagaaacttgagttctc

SEQ ID NO: 10123 - DNA, 17 bp, Arabidopsis thaliana
aagaaagaaggtccttg

SEQ ID NO: 10124 - DNA, 17 bp, Arabidopsis thaliana
aagaaagacccggggcc

SEQ ID NO: 10125 - DNA, 17 bp, Arabidopsis thaliana
aagaaagagtgtttgat

SEQ ID NO: 10126 - DNA, 17 bp, Arabidopsis thaliana
aagaaagatcgggttgc

SEQ ID NO: 10127 - DNA, 17 bp, Arabidopsis thaliana
aagaaagccatagccag

SEQ ID NO: 10128 - DNA, 17 bp, Arabidopsis thaliana
aagaaagccatctatgc

SEQ ID NO: 10129 - DNA, 17 bp, Arabidopsis thaliana
aagaaagctgggcatcc

SEQ ID NO: 10130 - DNA, 17 bp, Arabidopsis thaliana
aagaaagcttaatgtgt

SEQ ID NO: 10131 - DNA, 17 bp, Arabidopsis thaliana
aagaaagcttctctgct

SEQ ID NO: 10132 - DNA, 17 bp, Arabidopsis thaliana
aagaaagggttgccttc

SEQ ID NO: 10133 - DNA, 17 bp, Arabidopsis thaliana
aagaaaggtgaccgacg

SEQ ID NO: 10134 - DNA, 17 bp, Arabidopsis thaliana
aagaaaggttctagtgg

SEQ ID NO: 10135 - DNA, 17 bp, Arabidopsis thaliana
aagaaagtgcttttgcc

SEQ ID NO: 10136 - DNA, 17 bp, Arabidopsis thaliana
aagaaagttccggaggt

SEQ ID NO: 10137 - DNA, 17 bp, Arabidopsis thaliana
aagaaagttccggcggt

SEQ ID NO: 10138 - DNA, 17 bp, Arabidopsis thaliana
aagaaagttgatccacc

SEQ ID NO: 10139 - DNA, 17 bp, Arabidopsis thaliana
aagaaatacttggagtc

SEQ ID NO: 10140 - DNA, 17 bp, Arabidopsis thaliana
aagaaatcaatcgtttc

SEQ ID NO: 10141 - DNA, 17 bp, Arabidopsis thaliana
aagaaatcgatttcgtt

SEQ ID NO: 10142 - DNA, 17 bp, Arabidopsis thaliana
aagaaatctcgggatct

SEQ ID NO: 10143 - DNA, 17 bp, Arabidopsis thaliana
aagaaatctttgatgac

SEQ ID NO: 10144 - DNA, 17 bp, Arabidopsis thaliana
aagaaattagtgagcgt

SEQ ID NO: 10145 - DNA, 17 bp, Arabidopsis thaliana
aagaaattggcataagc

SEQ ID NO: 10146 - DNA, 17 bp, Arabidopsis thaliana
aagaaattttcacagaa

SEQ ID NO: 10147 - DNA, 17 bp, Arabidopsis thaliana
aagaacaaacgaaggca

SEQ ID NO: 10148 - DNA, 17 bp, Arabidopsis thaliana
aagaacaccaagtgatc

SEQ ID NO: 10149 - DNA, 17 bp, Arabidopsis thaliana
aagaacacctcctcctc

SEQ ID NO: 10150 - DNA, 17 bp, Arabidopsis thaliana
aagaacacgactgaaac

SEQ ID NO: 10151 - DNA, 17 bp, Arabidopsis thaliana
aagaacactatctcgac

SEQ ID NO: 10152 - DNA, 17 bp, Arabidopsis thaliana
aagaacactctttttcg

SEQ ID NO: 10153 - DNA, 17 bp, Arabidopsis thaliana
aagaacactctttttct

SEQ ID NO: 10154 - DNA, 17 bp, Arabidopsis thaliana
aagaacactttttgcgg

SEQ ID NO: 10155 - DNA, 17 bp, Arabidopsis thaliana
aagaacagacaatgtgg

SEQ ID NO: 10156 - DNA, 17 bp, Arabidopsis thaliana
aagaacagaggcctgcg

SEQ ID NO: 10157 - DNA, 17 bp, Arabidopsis thaliana
aagaacagagtcagatc

SEQ ID NO: 10158 - DNA, 17 bp, Arabidopsis thaliana
aagaacagagtcgtttt

SEQ ID NO: 10159 - DNA, 17 bp, Arabidopsis thaliana
aagaacatcatgtggtt

SEQ ID NO: 10160 - DNA, 17 bp, Arabidopsis thaliana
aagaacatctacttctg

SEQ ID NO: 10161 - DNA, 17 bp, Arabidopsis thaliana
aagaacatctccatcag

SEQ ID NO: 10162 - DNA, 17 bp, Arabidopsis thaliana
aagaacatcttcgttac

SEQ ID NO: 10163 - DNA, 17 bp, Arabidopsis thaliana
aagaacatggatcatca

SEQ ID NO: 10164 - DNA, 17 bp, Arabidopsis thaliana
aagaaccacagatgaaa

SEQ ID NO: 10165 - DNA, 17 bp, Arabidopsis thaliana
aagaaccatggatcacg

SEQ ID NO: 10166 - DNA, 17 bp, Arabidopsis thaliana
aagaaccatggcgatgt

SEQ ID NO: 10167 - DNA, 17 bp, Arabidopsis thaliana
aagaaccgaaatgactt

SEQ ID NO: 10168 - DNA, 17 bp, Arabidopsis thaliana
aagaaccggatcttaaa

SEQ ID NO: 10169 - DNA, 17 bp, Arabidopsis thaliana
aagaaccgtcgcctcgt

SEQ ID NO: 10170 - DNA, 17 bp, Arabidopsis thaliana
aagaacctccggagcta

SEQ ID NO: 10171 - DNA, 17 bp, Arabidopsis thaliana
aagaaccttaccagggc

SEQ ID NO: 10172 - DNA, 17 bp, Arabidopsis thaliana
aagaaccttctcatctg

SEQ ID NO: 10173 - DNA, 17 bp, Arabidopsis thaliana
aagaacgagcagaagct

SEQ ID NO: 10174 - DNA, 17 bp, Arabidopsis thaliana
aagaacgagccggaggc

SEQ ID NO: 10175 - DNA, 17 bp, Arabidopsis thaliana
aagaacgaggaaaggct

SEQ ID NO: 10176 - DNA, 17 bp, Arabidopsis thaliana
aagaacgcccaagacac

SEQ ID NO: 10177 - DNA, 17 bp, Arabidopsis thaliana
aagaacgctcgaatctg

SEQ ID NO: 10178 - DNA, 17 bp, Arabidopsis thaliana
aagaacgcttcgtcgtc

SEQ ID NO: 10179 - DNA, 17 bp, Arabidopsis thaliana
aagaacgcttggcgttt

SEQ ID NO: 10180 - DNA, 17 bp, Arabidopsis thaliana
aagaacggagtcagatc

SEQ ID NO: 10181 - DNA, 17 bp, Arabidopsis thaliana
aagaacgtcttgccaaa

SEQ ID NO: 10182 - DNA, 17 bp, Arabidopsis thaliana
aagaactaccgcagatt

SEQ ID NO: 10183 - DNA, 17 bp, Arabidopsis thaliana
aagaactagaattctaa

SEQ ID NO: 10184 - DNA, 17 bp, Arabidopsis thaliana
aagaactagataaggcc

SEQ ID NO: 10185 - DNA, 17 bp, Arabidopsis thaliana
aagaactaggtcttggg

SEQ ID NO: 10186 - DNA, 17 bp, Arabidopsis thaliana
aagaactagtgcgcagt

SEQ ID NO: 10187 - DNA, 17 bp, Arabidopsis thaliana
aagaactatggtttcgt

SEQ ID NO: 10188 - DNA, 17 bp, Arabidopsis thaliana
aagaactccctaatggt

SEQ ID NO: 10189 - DNA, 17 bp, Arabidopsis thaliana
aagaactcgtcgataaa

SEQ ID NO: 10190 - DNA, 17 bp, Arabidopsis thaliana
aagaactctctcggtcc

SEQ ID NO: 10191 - DNA, 17 bp, Arabidopsis thaliana
aagaactgctcctgatc

SEQ ID NO: 10192 - DNA, 17 bp, Arabidopsis thaliana
aagaactgtcaattggg

SEQ ID NO: 10193 - DNA, 17 bp, Arabidopsis thaliana
aagaactgtcttctttg

SEQ ID NO: 10194 - DNA, 17 bp, Arabidopsis thaliana
aagaacttaaaccgcaa

SEQ ID NO: 10195 - DNA, 17 bp, Arabidopsis thaliana
aagaacttaagccgcaa

SEQ ID NO: 10196 - DNA, 17 bp, Arabidopsis thaliana
aagaacttacgactgct

SEQ ID NO: 10197 - DNA, 17 bp, Arabidopsis thaliana
aagaacttaggtgatcc

SEQ ID NO: 10198 - DNA, 17 bp, Arabidopsis thaliana
aagaacttcaggattgt

SEQ ID NO: 10199 - DNA, 17 bp, Arabidopsis thaliana
aagaacttcatcaaact

SEQ ID NO: 10200 - DNA, 17 bp, Arabidopsis thaliana
aagaacttcggattcac

SEQ ID NO: 10201 - DNA, 17 bp, Arabidopsis thaliana
aagaacttctcaaaagc

SEQ ID NO: 10202 - DNA, 17 bp, Arabidopsis thaliana
aagaacttctctgactt

SEQ ID NO: 10203 - DNA, 17 bp, Arabidopsis thaliana
aagaacttgacaaccac

SEQ ID NO: 10204 - DNA, 17 bp, Arabidopsis thaliana
aagaactttggacagcc

SEQ ID NO: 10205 - DNA, 17 bp, Arabidopsis thaliana
aagaactttttgtagat

SEQ ID NO: 10206 - DNA, 17 bp, Arabidopsis thaliana
aagaagaactcctcaat

SEQ ID NO: 10207 - DNA, 17 bp, Arabidopsis thaliana
aagaagaatctacctca

SEQ ID NO: 10208 - DNA, 17 bp, Arabidopsis thaliana
aagaagacaccgggttg

SEQ ID NO: 10209 - DNA, 17 bp, Arabidopsis thaliana
aagaagacatctcacct

SEQ ID NO: 10210 - DNA, 17 bp, Arabidopsis thaliana
aagaagaccctgttgac

SEQ ID NO: 10211 - DNA, 17 bp, Arabidopsis thaliana
aagaagaccctgttgag

SEQ ID NO: 10212 - DNA, 17 bp, Arabidopsis thaliana
aagaagaccctgttgat

SEQ ID NO: 10213 - DNA, 17 bp, Arabidopsis thaliana
aagaagacgaagacgac

SEQ ID NO: 10214 - DNA, 17 bp, Arabidopsis thaliana
aagaagactttagtttg

SEQ ID NO: 10215 - DNA, 17 bp, Arabidopsis thaliana
aagaagatcaggtgatc

SEQ ID NO: 10216 - DNA, 17 bp, Arabidopsis thaliana
aagaagatccatagcca

SEQ ID NO: 10217 - DNA, 17 bp, Arabidopsis thaliana
aagaagatccgcagtgg

SEQ ID NO: 10218 - DNA, 17 bp, Arabidopsis thaliana
aagaagatcggctttgc

SEQ ID NO: 10219 - DNA, 17 bp, Arabidopsis thaliana
aagaagatcttctgcgg

SEQ ID NO: 10220 - DNA, 17 bp, Arabidopsis thaliana
aagaagatgtcgtctgt

SEQ ID NO: 10221 - DNA, 17 bp, Arabidopsis thaliana
aagaagattcatcggtg

SEQ ID NO: 10222 - DNA, 17 bp, Arabidopsis thaliana
aagaagcaatgacggta

SEQ ID NO: 10223 - DNA, 17 bp, Arabidopsis thaliana
aagaagcacaaggtctc

SEQ ID NO: 10224 - DNA, 17 bp, Arabidopsis thaliana
aagaagccctgtttttg

SEQ ID NO: 10225 - DNA, 17 bp, Arabidopsis thaliana
aagaagccgcagtcata

SEQ ID NO: 10226 - DNA, 17 bp, Arabidopsis thaliana
aagaagccttgaactat

SEQ ID NO: 10227 - DNA, 17 bp, Arabidopsis thaliana
aagaagcgagctgcgag

SEQ ID NO: 10228 - DNA, 17 bp, Arabidopsis thaliana
aagaagcgcgtttcaag

SEQ ID NO: 10229 - DNA, 17 bp, Arabidopsis thaliana
aagaagcgctctatcat

SEQ ID NO: 10230 - DNA, 17 bp, Arabidopsis thaliana
aagaagctgggatttca

SEQ ID NO: 10231 - DNA, 17 bp, Arabidopsis thaliana
aagaagcttagtgatcc

SEQ ID NO: 10232 - DNA, 17 bp, Arabidopsis thaliana
aagaagcttctcattgg

SEQ ID NO: 10233 - DNA, 17 bp, Arabidopsis thaliana
aagaaggagaaccgttg

SEQ ID NO: 10234 - DNA, 17 bp, Arabidopsis thaliana
aagaaggattgatctgc

SEQ ID NO: 10235 - DNA, 17 bp, Arabidopsis thaliana
aagaaggcaatcgcatc

SEQ ID NO: 10236 - DNA, 17 bp, Arabidopsis thaliana
aagaaggccaccggatt

SEQ ID NO: 10237 - DNA, 17 bp, Arabidopsis thaliana
aagaaggctaagcctag

SEQ ID NO: 10238 - DNA, 17 bp, Arabidopsis thaliana
aagaaggctagtgaatt

SEQ ID NO: 10239 - DNA, 17 bp, Arabidopsis thaliana
aagaaggctctgaagct

SEQ ID NO: 10240 - DNA, 17 bp, Arabidopsis thaliana
aagaaggctgctggcca

SEQ ID NO: 10241 - DNA, 17 bp, Arabidopsis thaliana
aagaaggctggccactt

SEQ ID NO: 10242 - DNA, 17 bp, Arabidopsis thaliana
aagaaggtccttgctcc

SEQ ID NO: 10243 - DNA, 17 bp, Arabidopsis thaliana
aagaaggtcgtgtctag

SEQ ID NO: 10244 - DNA, 17 bp, Arabidopsis thaliana
aagaaggtctccagctt

SEQ ID NO: 10245 - DNA, 17 bp, Arabidopsis thaliana
aagaaggtgtttgcgtg

SEQ ID NO: 10246 - DNA, 17 bp, Arabidopsis thaliana
aagaaggttctaggccg

SEQ ID NO: 10247 - DNA, 17 bp, Arabidopsis thaliana
aagaagtacttcggtgc

SEQ ID NO: 10248 - DNA, 17 bp, Arabidopsis thaliana
aagaagtcagttgggct

SEQ ID NO: 10249 - DNA, 17 bp, Arabidopsis thaliana
aagaagtccacattttg

SEQ ID NO: 10250 - DNA, 17 bp, Arabidopsis thaliana
aagaagtcggctgggcg

SEQ ID NO: 10251 - DNA, 17 bp, Arabidopsis thaliana
aagaagtgactacatca

SEQ ID NO: 10252 - DNA, 17 bp, Arabidopsis thaliana
aagaagtgactacatcg

SEQ ID NO: 10253 - DNA, 17 bp, Arabidopsis thaliana
aagaagtgacttttgtc

SEQ ID NO: 10254 - DNA, 17 bp, Arabidopsis thaliana
aagaagtgagacccggt

SEQ ID NO: 10255 - DNA, 17 bp, Arabidopsis thaliana
aagaagtgcacttactt

SEQ ID NO: 10256 - DNA, 17 bp, Arabidopsis thaliana
aagaagtgccctactct

SEQ ID NO: 10257 - DNA, 17 bp, Arabidopsis thaliana
aagaagtgcggtgcggt

SEQ ID NO: 10258 - DNA, 17 bp, Arabidopsis thaliana
aagaagtgggacccggt

SEQ ID NO: 10259 - DNA, 17 bp, Arabidopsis thaliana
aagaagtggtgcattga

SEQ ID NO: 10260 - DNA, 17 bp, Arabidopsis thaliana
aagaagtgttaacggtg

SEQ ID NO: 10261 - DNA, 17 bp, Arabidopsis thaliana
aagaagttcagcgggct

SEQ ID NO: 10262 - DNA, 17 bp, Arabidopsis thaliana
aagaagttcctttagcc

SEQ ID NO: 10263 - DNA, 17 bp, Arabidopsis thaliana
aagaagttctgcgggct

SEQ ID NO: 10264 - DNA, 17 bp, Arabidopsis thaliana
aagaagttgtccttcgg

SEQ ID NO: 10265 - DNA, 17 bp, Arabidopsis thaliana
aagaagtttcagacgca

SEQ ID NO: 10266 - DNA, 17 bp, Arabidopsis thaliana
aagaagtttcggacgct

SEQ ID NO: 10267 - DNA, 17 bp, Arabidopsis thaliana
aagaataatgtgaaccg

SEQ ID NO: 10268 - DNA, 17 bp, Arabidopsis thaliana
aagaatagagtcagatc

SEQ ID NO: 10269 - DNA, 17 bp, Arabidopsis thaliana
aagaatagtggtccgat

SEQ ID NO: 10270 - DNA, 17 bp, Arabidopsis thaliana
aagaatatccgccggtt

SEQ ID NO: 10271 - DNA, 17 bp, Arabidopsis thaliana
aagaatatcgatttctg

SEQ ID NO: 10272 - DNA, 17 bp, Arabidopsis thaliana
aagaatcaacgaactgc

SEQ ID NO: 10273 - DNA, 17 bp, Arabidopsis thaliana
aagaatcaccgcagatt

SEQ ID NO: 10274 - DNA, 17 bp, Arabidopsis thaliana
aagaatccataccgagg

SEQ ID NO: 10275 - DNA, 17 bp, Arabidopsis thaliana
aagaatccccaataaaa

SEQ ID NO: 10276 - DNA, 17 bp, Arabidopsis thaliana
aagaatcccgcctgacc

SEQ ID NO: 10277 - DNA, 17 bp, Arabidopsis thaliana
aagaatccttcgactcg

SEQ ID NO: 10278 - DNA, 17 bp, Arabidopsis thaliana
aagaatctgaattttgt

SEQ ID NO: 10279 - DNA, 17 bp, Arabidopsis thaliana
aagaatctgctcggatg

SEQ ID NO: 10280 - DNA, 17 bp, Arabidopsis thaliana
aagaatctgtgcaggtt

SEQ ID NO: 10281 - DNA, 17 bp, Arabidopsis thaliana
aagaatgacacatgtgt

SEQ ID NO: 10282 - DNA, 17 bp, Arabidopsis thaliana
aagaatgactaggcagg

SEQ ID NO: 10283 - DNA, 17 bp, Arabidopsis thaliana
aagaatgagacctccaa

SEQ ID NO: 10284 - DNA, 17 bp, Arabidopsis thaliana
aagaatgagtccagatt

SEQ ID NO: 10285 - DNA, 17 bp, Arabidopsis thaliana
aagaatgatgtccccta

SEQ ID NO: 10286 - DNA, 17 bp, Arabidopsis thaliana
aagaatgcccagcggat

SEQ ID NO: 10287 - DNA, 17 bp, Arabidopsis thaliana
aagaatgccgcaggaca

SEQ ID NO: 10288 - DNA, 17 bp, Arabidopsis thaliana
aagaatgccgctattca

SEQ ID NO: 10289 - DNA, 17 bp, Arabidopsis thaliana
aagaatgctcgtcgcgg

SEQ ID NO: 10290 - DNA, 17 bp, Arabidopsis thaliana
aagaatgctttttgtcg

SEQ ID NO: 10291 - DNA, 17 bp, Arabidopsis thaliana
aagaatggctccaatgt

SEQ ID NO: 10292 - DNA, 17 bp, Arabidopsis thaliana
aagaatgggatgtataa

SEQ ID NO: 10293 - DNA, 17 bp, Arabidopsis thaliana
aagaatgggctctatct

SEQ ID NO: 10294 - DNA, 17 bp, Arabidopsis thaliana
aagaatggtcggaaatg

SEQ ID NO: 10295 - DNA, 17 bp, Arabidopsis thaliana
aagaatggtggagcgaa

SEQ ID NO: 10296 - DNA, 17 bp, Arabidopsis thaliana
aagaatgtatcgtctgt

SEQ ID NO: 10297 - DNA, 17 bp, Arabidopsis thaliana
aagaatgtcctcgttgc

SEQ ID NO: 10298 - DNA, 17 bp, Arabidopsis thaliana
aagaatgtcctttcaac

SEQ ID NO: 10299 - DNA, 17 bp, Arabidopsis thaliana
aagaatgtctccagctt

SEQ ID NO: 10300 - DNA, 17 bp, Arabidopsis thaliana
aagaatgtgacagagct

SEQ ID NO: 10301 - DNA, 17 bp, Arabidopsis thaliana
aagaatgtggtacttag

SEQ ID NO: 10302 - DNA, 17 bp, Arabidopsis thaliana
aagaatgtgttgaccag

SEQ ID NO: 10303 - DNA, 17 bp, Arabidopsis thaliana
aagaatgtgttgtctgt

SEQ ID NO: 10304 - DNA, 17 bp, Arabidopsis thaliana
aagaatgttgaaaccaa

SEQ ID NO: 10305 - DNA, 17 bp, Arabidopsis thaliana
aagaattcgcggatttt

SEQ ID NO: 10306 - DNA, 17 bp, Arabidopsis thaliana
aagaattgatttgacca

SEQ ID NO: 10307 - DNA, 17 bp, Arabidopsis thaliana
aagaattgatttggcca

SEQ ID NO: 10308 - DNA, 17 bp, Arabidopsis thaliana
aagaattgtccaaaact

SEQ ID NO: 10309 - DNA, 17 bp, Arabidopsis thaliana
aagaattgtggctgaac

SEQ ID NO: 10310 - DNA, 17 bp, Arabidopsis thaliana
aagaatttgatgattta

SEQ ID NO: 10311 - DNA, 17 bp, Arabidopsis thaliana
aagaatttgccaagccg

SEQ ID NO: 10312 - DNA, 17 bp, Arabidopsis thaliana
aagacaaaagcagacac

SEQ ID NO: 10313 - DNA, 17 bp, Arabidopsis thaliana
aagacaaaagcagacgc

SEQ ID NO: 10314 - DNA, 17 bp, Arabidopsis thaliana
aagacaaatcccgagtc

SEQ ID NO: 10315 - DNA, 17 bp, Arabidopsis thaliana
aagacaaatgcatgctg

SEQ ID NO: 10316 - DNA, 17 bp, Arabidopsis thaliana
aagacaacgacacttta

SEQ ID NO: 10317 - DNA, 17 bp, Arabidopsis thaliana
aagacaacgagctcctt

SEQ ID NO: 10318 - DNA, 17 bp, Arabidopsis thaliana
aagacaacgctggcagg

SEQ ID NO: 10319 - DNA, 17 bp, Arabidopsis thaliana
aagacaagctgaccccg

SEQ ID NO: 10320 - DNA, 17 bp, Arabidopsis thaliana
aagacaagggatgtgtg

SEQ ID NO: 10321 - DNA, 17 bp, Arabidopsis thaliana
aagacaagtcttggatt

SEQ ID NO: 10322 - DNA, 17 bp, Arabidopsis thaliana
aagacaagtgctcctcc

SEQ ID NO: 10323 - DNA, 17 bp, Arabidopsis thaliana
aagacaatcagcacgga

SEQ ID NO: 10324 - DNA, 17 bp, Arabidopsis thaliana
aagacaattcactctct

SEQ ID NO: 10325 - DNA, 17 bp, Arabidopsis thaliana
aagacaattggcggttc

SEQ ID NO: 10326 - DNA, 17 bp, Arabidopsis thaliana
aagacacaaaattccaa

SEQ ID NO: 10327 - DNA, 17 bp, Arabidopsis thaliana
aagacacatctgctaat

SEQ ID NO: 10328 - DNA, 17 bp, Arabidopsis thaliana
aagacacatgcattttt

SEQ ID NO: 10329 - DNA, 17 bp, Arabidopsis thaliana
aagacaccatccgattt

SEQ ID NO: 10330 - DNA, 17 bp, Arabidopsis thaliana
aagacaccatcttcacc

SEQ ID NO: 10331 - DNA, 17 bp, Arabidopsis thaliana
aagacaccctttgttgc

SEQ ID NO: 10332 - DNA, 17 bp, Arabidopsis thaliana
aagacacctctatgccg

SEQ ID NO: 10333 - DNA, 17 bp, Arabidopsis thaliana
aagacaccttcttcacc

SEQ ID NO: 10334 - DNA, 17 bp, Arabidopsis thaliana
aagacaccttgtgtggc

SEQ ID NO: 10335 - DNA, 17 bp, Arabidopsis thaliana
aagacacgacttttctg

SEQ ID NO: 10336 - DNA, 17 bp, Arabidopsis thaliana
aagacacgtgtcgcaag

SEQ ID NO: 10337 - DNA, 17 bp, Arabidopsis thaliana
aagacactccatatttt

SEQ ID NO: 10338 - DNA, 17 bp, Arabidopsis thaliana
aagacagaatagacttt

SEQ ID NO: 10339 - DNA, 17 bp, Arabidopsis thaliana
aagacagactcactggt

SEQ ID NO: 10340 - DNA, 17 bp, Arabidopsis thaliana
aagacagatctttagcg

SEQ ID NO: 10341 - DNA, 17 bp, Arabidopsis thaliana
aagacagatttcaggtt

SEQ ID NO: 10342 - DNA, 17 bp, Arabidopsis thaliana
aagacagatttggaggg

SEQ ID NO: 10343 - DNA, 17 bp, Arabidopsis thaliana
aagacagatttggagtg

SEQ ID NO: 10344 - DNA, 17 bp, Arabidopsis thaliana
aagacagcaggacggtg

SEQ ID NO: 10345 - DNA, 17 bp, Arabidopsis thaliana
aagacagcaggatgatt

SEQ ID NO: 10346 - DNA, 17 bp, Arabidopsis thaliana
aagacagctgcagcaat

SEQ ID NO: 10347 - DNA, 17 bp, Arabidopsis thaliana
aagacagtggagctagc

SEQ ID NO: 10348 - DNA, 17 bp, Arabidopsis thaliana
aagacagtttaccgtgg

SEQ ID NO: 10349 - DNA, 17 bp, Arabidopsis thaliana
aagacatatgaacaagc

SEQ ID NO: 10350 - DNA, 17 bp, Arabidopsis thaliana
aagacatatgcgcctgc

SEQ ID NO: 10351 - DNA, 17 bp, Arabidopsis thaliana
aagacatcactgtcctg

SEQ ID NO: 10352 - DNA, 17 bp, Arabidopsis thaliana
aagacatcccagaacct

SEQ ID NO: 10353 - DNA, 17 bp, Arabidopsis thaliana
aagacatctctcatcat

SEQ ID NO: 10354 - DNA, 17 bp, Arabidopsis thaliana
aagacatgagtgtctcc

SEQ ID NO: 10355 - DNA, 17 bp, Arabidopsis thaliana
aagacatgcgacggtcg

SEQ ID NO: 10356 - DNA, 17 bp, Arabidopsis thaliana
aagacatgggccacggt

SEQ ID NO: 10357 - DNA, 17 bp, Arabidopsis thaliana
aagacatgggtgtctcc

SEQ ID NO: 10358 - DNA, 17 bp, Arabidopsis thaliana
aagacatgtcatttgta

SEQ ID NO: 10359 - DNA, 17 bp, Arabidopsis thaliana
aagacatgtcatttgtc

SEQ ID NO: 10360 - DNA, 17 bp, Arabidopsis thaliana
aagacatgtctattttg

SEQ ID NO: 10361 - DNA, 17 bp, Arabidopsis thaliana
aagacatgtgttggcaa

SEQ ID NO: 10362 - DNA, 17 bp, Arabidopsis thaliana
aagacattgcttgctaa

SEQ ID NO: 10363 - DNA, 17 bp, Arabidopsis thaliana
aagacattggacatatt

SEQ ID NO: 10364 - DNA, 17 bp, Arabidopsis thaliana
aagacattggcttgtcc

SEQ ID NO: 10365 - DNA, 17 bp, Arabidopsis thaliana
aagacatttggaggagg

SEQ ID NO: 10366 - DNA, 17 bp, Arabidopsis thaliana
aagaccaacatttcaca

SEQ ID NO: 10367 - DNA, 17 bp, Arabidopsis thaliana
aagaccaactctgtgtg

SEQ ID NO: 10368 - DNA, 17 bp, Arabidopsis thaliana
aagaccaagatcctcct

SEQ ID NO: 10369 - DNA, 17 bp, Arabidopsis thaliana
aagaccaagtctggacc

SEQ ID NO: 10370 - DNA, 17 bp, Arabidopsis thaliana
aagaccaatgcattgct

SEQ ID NO: 10371 - DNA, 17 bp, Arabidopsis thaliana
aagaccacactcttttt

SEQ ID NO: 10372 - DNA, 17 bp, Arabidopsis thaliana
aagaccacagggataac

SEQ ID NO: 10373 - DNA, 17 bp, Arabidopsis thaliana
aagaccaccattggaga

SEQ ID NO: 10374 - DNA, 17 bp, Arabidopsis thaliana
aagaccagccaagagtg

SEQ ID NO: 10375 - DNA, 17 bp, Arabidopsis thaliana
aagaccaggagcgtatc

SEQ ID NO: 10376 - DNA, 17 bp, Arabidopsis thaliana
aagaccaggagggatag

SEQ ID NO: 10377 - DNA, 17 bp, Arabidopsis thaliana
aagaccagtattagcat

SEQ ID NO: 10378 - DNA, 17 bp, Arabidopsis thaliana
aagaccagtctaagtag

SEQ ID NO: 10379 - DNA, 17 bp, Arabidopsis thaliana
aagaccagttttatccg

SEQ ID NO: 10380 - DNA, 17 bp, Arabidopsis thaliana
aagaccataagcgtgcc

SEQ ID NO: 10381 - DNA, 17 bp, Arabidopsis thaliana
aagaccatacccagcgg

SEQ ID NO: 10382 - DNA, 17 bp, Arabidopsis thaliana
aagaccatcctcattgg

SEQ ID NO: 10383 - DNA, 17 bp, Arabidopsis thaliana
aagaccatctccatcaa

SEQ ID NO: 10384 - DNA, 17 bp, Arabidopsis thaliana
aagaccatctccattgg

SEQ ID NO: 10385 - DNA, 17 bp, Arabidopsis thaliana
aagaccatctctatcaa

SEQ ID NO: 10386 - DNA, 17 bp, Arabidopsis thaliana
aagaccatctctattgg

SEQ ID NO: 10387 - DNA, 17 bp, Arabidopsis thaliana
aagaccatctctattgt

SEQ ID NO: 10388 - DNA, 17 bp, Arabidopsis thaliana
aagaccatctgcaatgg

SEQ ID NO: 10389 - DNA, 17 bp, Arabidopsis thaliana
aagaccatctgcattgc

SEQ ID NO: 10390 - DNA, 17 bp, Arabidopsis thaliana
aagaccatctttattgg

SEQ ID NO: 10391 - DNA, 17 bp, Arabidopsis thaliana
aagaccatgccaagcag

SEQ ID NO: 10392 - DNA, 17 bp, Arabidopsis thaliana
aagaccatgcccaccag

SEQ ID NO: 10393 - DNA, 17 bp, Arabidopsis thaliana
aagaccatgcccagcag

SEQ ID NO: 10394 - DNA, 17 bp, Arabidopsis thaliana
aagaccatgcccagcgg

SEQ ID NO: 10395 - DNA, 17 bp, Arabidopsis thaliana
aagaccatgtccatatg

SEQ ID NO: 10396 - DNA, 17 bp, Arabidopsis thaliana
aagaccatttccattag

SEQ ID NO: 10397 - DNA, 17 bp, Arabidopsis thaliana
aagacccactctaatgt

SEQ ID NO: 10398 - DNA, 17 bp, Arabidopsis thaliana
aagacccaggtctgttc

SEQ ID NO: 10399 - DNA, 17 bp, Arabidopsis thaliana
aagacccctcaccgtct

SEQ ID NO: 10400 - DNA, 17 bp, Arabidopsis thaliana
aagacccgactaaataa

SEQ ID NO: 10401 - DNA, 17 bp, Arabidopsis thaliana
aagacccgtagatggat

SEQ ID NO: 10402 - DNA, 17 bp, Arabidopsis thaliana
aagaccctattcaactt

SEQ ID NO: 10403 - DNA, 17 bp, Arabidopsis thaliana
aagaccctgttaagctt

SEQ ID NO: 10404 - DNA, 17 bp, Arabidopsis thaliana
aagaccctgttgacctt

SEQ ID NO: 10405 - DNA, 17 bp, Arabidopsis thaliana
aagaccctgttgagctt

SEQ ID NO: 10406 - DNA, 17 bp, Arabidopsis thaliana
aagaccctgtttgtttc

SEQ ID NO: 10407 - DNA, 17 bp, Arabidopsis thaliana
aagaccctttgtgtctt

SEQ ID NO: 10408 - DNA, 17 bp, Arabidopsis thaliana
aagaccgaagctagctc

SEQ ID NO: 10409 - DNA, 17 bp, Arabidopsis thaliana
aagaccgaccggagttc

SEQ ID NO: 10410 - DNA, 17 bp, Arabidopsis thaliana
aagaccgagccaaacag

SEQ ID NO: 10411 - DNA, 17 bp, Arabidopsis thaliana
aagaccgagttgtggat

SEQ ID NO: 10412 - DNA, 17 bp, Arabidopsis thaliana
aagaccgatcgactcta

SEQ ID NO: 10413 - DNA, 17 bp, Arabidopsis thaliana
aagaccgatcggtcatg

SEQ ID NO: 10414 - DNA, 17 bp, Arabidopsis thaliana
aagaccgccatcaacta

SEQ ID NO: 10415 - DNA, 17 bp, Arabidopsis thaliana
aagaccgcgacaggcag

SEQ ID NO: 10416 - DNA, 17 bp, Arabidopsis thaliana
aagaccgctcaacggca

SEQ ID NO: 10417 - DNA, 17 bp, Arabidopsis thaliana
aagaccgctcaacggcc

SEQ ID NO: 10418 - DNA, 17 bp, Arabidopsis thaliana
aagaccggagcagcgga

SEQ ID NO: 10419 - DNA, 17 bp, Arabidopsis thaliana
aagaccggagccgtcaa

SEQ ID NO: 10420 - DNA, 17 bp, Arabidopsis thaliana
aagaccggattcatcga

SEQ ID NO: 10421 - DNA, 17 bp, Arabidopsis thaliana
aagaccggctttctggc

SEQ ID NO: 10422 - DNA, 17 bp, Arabidopsis thaliana
aagaccggggaatgcgt

SEQ ID NO: 10423 - DNA, 17 bp, Arabidopsis thaliana
aagaccggggaatgtat

SEQ ID NO: 10424 - DNA, 17 bp, Arabidopsis thaliana
aagaccggtcgatgatc

SEQ ID NO: 10425 - DNA, 17 bp, Arabidopsis thaliana
aagaccggttggtgaag

SEQ ID NO: 10426 - DNA, 17 bp, Arabidopsis thaliana
aagaccggttttatccg

SEQ ID NO: 10427 - DNA, 17 bp, Arabidopsis thaliana
aagaccgtcagtgatgt

SEQ ID NO: 10428 - DNA, 17 bp, Arabidopsis thaliana
aagaccgtcccgaaagt

SEQ ID NO: 10429 - DNA, 17 bp, Arabidopsis thaliana
aagaccgtctgcagtta

SEQ ID NO: 10430 - DNA, 17 bp, Arabidopsis thaliana
aagaccgtgaggccaaa

SEQ ID NO: 10431 - DNA, 17 bp, Arabidopsis thaliana
aagaccgtgatctgagc

SEQ ID NO: 10432 - DNA, 17 bp, Arabidopsis thaliana
aagaccgtgccaaatag

SEQ ID NO: 10433 - DNA, 17 bp, Arabidopsis thaliana
aagaccgtgcccagcgg

SEQ ID NO: 10434 - DNA, 17 bp, Arabidopsis thaliana
aagaccgtggggtgatt

SEQ ID NO: 10435 - DNA, 17 bp, Arabidopsis thaliana
aagaccgtttgcagtta

SEQ ID NO: 10436 - DNA, 17 bp, Arabidopsis thaliana
aagaccgttttacccct

SEQ ID NO: 10437 - DNA, 17 bp, Arabidopsis thaliana
aagacctaactgacaga

SEQ ID NO: 10438 - DNA, 17 bp, Arabidopsis thaliana
aagacctaagttgagtt

SEQ ID NO: 10439 - DNA, 17 bp, Arabidopsis thaliana
aagacctcggcttcttt

SEQ ID NO: 10440 - DNA, 17 bp, Arabidopsis thaliana
aagacctcgtgctattg

SEQ ID NO: 10441 - DNA, 17 bp, Arabidopsis thaliana
aagacctctaattgtgc

SEQ ID NO: 10442 - DNA, 17 bp, Arabidopsis thaliana
aagacctgcagctcctc

SEQ ID NO: 10443 - DNA, 17 bp, Arabidopsis thaliana
aagacctgcagctgctc

SEQ ID NO: 10444 - DNA, 17 bp, Arabidopsis thaliana
aagaccttagctcagtt

SEQ ID NO: 10445 - DNA, 17 bp, Arabidopsis thaliana
aagaccttaggccaaga

SEQ ID NO: 10446 - DNA, 17 bp, Arabidopsis thaliana
aagaccttcaggttcat

SEQ ID NO: 10447 - DNA, 17 bp, Arabidopsis thaliana
aagaccttcttgcttga

SEQ ID NO: 10448 - DNA, 17 bp, Arabidopsis thaliana
aagaccttgctagagcc

SEQ ID NO: 10449 - DNA, 17 bp, Arabidopsis thaliana
aagaccttgctctctga

SEQ ID NO: 10450 - DNA, 17 bp, Arabidopsis thaliana
aagaccttggtccaatt

SEQ ID NO: 10451 - DNA, 17 bp, Arabidopsis thaliana
aagacctttgcttctct

SEQ ID NO: 10452 - DNA, 17 bp, Arabidopsis thaliana
aagacgaaaactctgtc

SEQ ID NO: 10453 - DNA, 17 bp, Arabidopsis thaliana
aagacgaactttttcgg

SEQ ID NO: 10454 - DNA, 17 bp, Arabidopsis thaliana
aagacgaagagcctctg

SEQ ID NO: 10455 - DNA, 17 bp, Arabidopsis thaliana
aagacgaaggccgcact

SEQ ID NO: 10456 - DNA, 17 bp, Arabidopsis thaliana
aagacgacaagtgtcag

SEQ ID NO: 10457 - DNA, 17 bp, Arabidopsis thaliana
aagacgaccgcaaaatt

SEQ ID NO: 10458 - DNA, 17 bp, Arabidopsis thaliana
aagacgacgacgaccca

SEQ ID NO: 10459 - DNA, 17 bp, Arabidopsis thaliana
aagacgacgaggttgat

SEQ ID NO: 10460 - DNA, 17 bp, Arabidopsis thaliana
aagacgacgtagacaac

SEQ ID NO: 10461 - DNA, 17 bp, Arabidopsis thaliana
aagacgacgttcccaaa

SEQ ID NO: 10462 - DNA, 17 bp, Arabidopsis thaliana
aagacgactactttgct

SEQ ID NO: 10463 - DNA, 17 bp, Arabidopsis thaliana
aagacgactataccgcc

SEQ ID NO: 10464 - DNA, 17 bp, Arabidopsis thaliana
aagacgactctcggcaa

SEQ ID NO: 10465 - DNA, 17 bp, Arabidopsis thaliana
aagacgactctcggggc

SEQ ID NO: 10466 - DNA, 17 bp, Arabidopsis thaliana
aagacgactgatcataa

SEQ ID NO: 10467 - DNA, 17 bp, Arabidopsis thaliana
aagacgagagagctcat

SEQ ID NO: 10468 - DNA, 17 bp, Arabidopsis thaliana
aagacgagcttctgcaa

SEQ ID NO: 10469 - DNA, 17 bp, Arabidopsis thaliana
aagacgagtccggttgt

SEQ ID NO: 10470 - DNA, 17 bp, Arabidopsis thaliana
aagacgagtgcaacttg

SEQ ID NO: 10471 - DNA, 17 bp, Arabidopsis thaliana
aagacgagttttgcggg

SEQ ID NO: 10472 - DNA, 17 bp, Arabidopsis thaliana
aagacgatcacgagtct

SEQ ID NO: 10473 - DNA, 17 bp, Arabidopsis thaliana
aagacgatcagataccg

SEQ ID NO: 10474 - DNA, 17 bp, Arabidopsis thaliana
aagacgatcagctatgg

SEQ ID NO: 10475 - DNA, 17 bp, Arabidopsis thaliana
aagacgatctacgatgt

SEQ ID NO: 10476 - DNA, 17 bp, Arabidopsis thaliana
aagacgatggtatccgc

SEQ ID NO: 10477 - DNA, 17 bp, Arabidopsis thaliana
aagacgatgtatttgcg

SEQ ID NO: 10478 - DNA, 17 bp, Arabidopsis thaliana
aagacgattccatacga

SEQ ID NO: 10479 - DNA, 17 bp, Arabidopsis thaliana
aagacgattgaccgaca

SEQ ID NO: 10480 - DNA, 17 bp, Arabidopsis thaliana
aagacgatttgaccggg

SEQ ID NO: 10481 - DNA, 17 bp, Arabidopsis thaliana
aagacgcaactcgatca

SEQ ID NO: 10482 - DNA, 17 bp, Arabidopsis thaliana
aagacgcaggaggtgag

SEQ ID NO: 10483 - DNA, 17 bp, Arabidopsis thaliana
aagacgcatttgacatg

SEQ ID NO: 10484 - DNA, 17 bp, Arabidopsis thaliana
aagacgccgtcgtttga

SEQ ID NO: 10485 - DNA, 17 bp, Arabidopsis thaliana
aagacgcctatgcaacc

SEQ ID NO: 10486 - DNA, 17 bp, Arabidopsis thaliana
aagacgcggattacggt

SEQ ID NO: 10487 - DNA, 17 bp, Arabidopsis thaliana
aagacgctcctcgtcag

SEQ ID NO: 10488 - DNA, 17 bp, Arabidopsis thaliana
aagacggacagtatggt

SEQ ID NO: 10489 - DNA, 17 bp, Arabidopsis thaliana
aagacggacccacatca

SEQ ID NO: 10490 - DNA, 17 bp, Arabidopsis thaliana
aagacggactaagcggc

SEQ ID NO: 10491 - DNA, 17 bp, Arabidopsis thaliana
aagacggatcatgtatt

SEQ ID NO: 10492 - DNA, 17 bp, Arabidopsis thaliana
aagacggatccaaccac

SEQ ID NO: 10493 - DNA, 17 bp, Arabidopsis thaliana
aagacggatctggaggg

SEQ ID NO: 10494 - DNA, 17 bp, Arabidopsis thaliana
aagacggatcttccact

SEQ ID NO: 10495 - DNA, 17 bp, Arabidopsis thaliana
aagacggatctttgtgg

SEQ ID NO: 10496 - DNA, 17 bp, Arabidopsis thaliana
aagacggatttgaaggg

SEQ ID NO: 10497 - DNA, 17 bp, Arabidopsis thaliana
aagacggatttggagga

SEQ ID NO: 10498 - DNA, 17 bp, Arabidopsis thaliana
aagacggatttggaggg

SEQ ID NO: 10499 - DNA, 17 bp, Arabidopsis thaliana
aagacggatttggagtg

SEQ ID NO: 10500 - DNA, 17 bp, Arabidopsis thaliana
aagacggatttggatgg

SEQ ID NO: 10501 - DNA, 17 bp, Arabidopsis thaliana
aagacggatttggtggg

SEQ ID NO: 10502 - DNA, 17 bp, Arabidopsis thaliana
aagacggattttgaggg

SEQ ID NO: 10503 - DNA, 17 bp, Arabidopsis thaliana
aagacggcattgtgaag

SEQ ID NO: 10504 - DNA, 17 bp, Arabidopsis thaliana
aagacgggagaggggtg

SEQ ID NO: 10505 - DNA, 17 bp, Arabidopsis thaliana
aagacgggattcacacc

SEQ ID NO: 10506 - DNA, 17 bp, Arabidopsis thaliana
aagacgggatttttgga

SEQ ID NO: 10507 - DNA, 17 bp, Arabidopsis thaliana
aagacgggcttctgcaa

SEQ ID NO: 10508 - DNA, 17 bp, Arabidopsis thaliana
aagacgggtttggcagg

SEQ ID NO: 10509 - DNA, 17 bp, Arabidopsis thaliana
aagacgggtttggcggg

SEQ ID NO: 10510 - DNA, 17 bp, Arabidopsis thaliana
aagacggtccgcagtta

SEQ ID NO: 10511 - DNA, 17 bp, Arabidopsis thaliana
aagacggttacatcgct

SEQ ID NO: 10512 - DNA, 17 bp, Arabidopsis thaliana
aagacggttcacagaat

SEQ ID NO: 10513 - DNA, 17 bp, Arabidopsis thaliana
aagacggttcgcagtta

SEQ ID NO: 10514 - DNA, 17 bp, Arabidopsis thaliana
aagacggtttgcagtgg

SEQ ID NO: 10515 - DNA, 17 bp, Arabidopsis thaliana
aagactaaaaaccgcgt

SEQ ID NO: 10516 - DNA, 17 bp, Arabidopsis thaliana
aagactaaaacgaacgg

SEQ ID NO: 10517 - DNA, 17 bp, Arabidopsis thaliana
aagactaaaatggcgcg

SEQ ID NO: 10518 - DNA, 17 bp, Arabidopsis thaliana
aagactaaacgtccttc

SEQ ID NO: 10519 - DNA, 17 bp, Arabidopsis thaliana
aagactaaactgtcgca

SEQ ID NO: 10520 - DNA, 17 bp, Arabidopsis thaliana
aagactaagtttggggg

SEQ ID NO: 10521 - DNA, 17 bp, Arabidopsis thaliana
aagactaatactgcgcc

SEQ ID NO: 10522 - DNA, 17 bp, Arabidopsis thaliana
aagactaatcaccattc

SEQ ID NO: 10523 - DNA, 17 bp, Arabidopsis thaliana
aagactaatcgaaccat

SEQ ID NO: 10524 - DNA, 17 bp, Arabidopsis thaliana
aagactaatggtgtttg

SEQ ID NO: 10525 - DNA, 17 bp, Arabidopsis thaliana
aagactacaagcgttgc

SEQ ID NO: 10526 - DNA, 17 bp, Arabidopsis thaliana
aagactacacgcagtta

SEQ ID NO: 10527 - DNA, 17 bp, Arabidopsis thaliana
aagactacattgcgcaa

SEQ ID NO: 10528 - DNA, 17 bp, Arabidopsis thaliana
aagactacgctaaccgc

SEQ ID NO: 10529 - DNA, 17 bp, Arabidopsis thaliana
aagactagatggggtat

SEQ ID NO: 10530 - DNA, 17 bp, Arabidopsis thaliana
aagactagattttcacc

SEQ ID NO: 10531 - DNA, 17 bp, Arabidopsis thaliana
aagactaggggtgtcaa

SEQ ID NO: 10532 - DNA, 17 bp, Arabidopsis thaliana
aagactaggtctatgcg

SEQ ID NO: 10533 - DNA, 17 bp, Arabidopsis thaliana
aagactaggtgagtgtc

SEQ ID NO: 10534 - DNA, 17 bp, Arabidopsis thaliana
aagactagtgtcgtatc

SEQ ID NO: 10535 - DNA, 17 bp, Arabidopsis thaliana
aagactatccacaatgc

SEQ ID NO: 10536 - DNA, 17 bp, Arabidopsis thaliana
aagactatcgtgggatc

SEQ ID NO: 10537 - DNA, 17 bp, Arabidopsis thaliana
aagactatctcgtggat

SEQ ID NO: 10538 - DNA, 17 bp, Arabidopsis thaliana
aagactatgatcccaag

SEQ ID NO: 10539 - DNA, 17 bp, Arabidopsis thaliana
aagactatgtccgggtt

SEQ ID NO: 10540 - DNA, 17 bp, Arabidopsis thaliana
aagactatgttcgcacc

SEQ ID NO: 10541 - DNA, 17 bp, Arabidopsis thaliana
aagactattttgcaatg

SEQ ID NO: 10542 - DNA, 17 bp, Arabidopsis thaliana
aagactcaacaactgca

SEQ ID NO: 10543 - DNA, 17 bp, Arabidopsis thaliana
aagactcaactgacaga

SEQ ID NO: 10544 - DNA, 17 bp, Arabidopsis thaliana
aagactcaagcttttgt

SEQ ID NO: 10545 - DNA, 17 bp, Arabidopsis thaliana
aagactcaatgatggtt

SEQ ID NO: 10546 - DNA, 17 bp, Arabidopsis thaliana
aagactcagatggactt

SEQ ID NO: 10547 - DNA, 17 bp, Arabidopsis thaliana
aagactcagcctcatcc

SEQ ID NO: 10548 - DNA, 17 bp, Arabidopsis thaliana
aagactcaggtggatac

SEQ ID NO: 10549 - DNA, 17 bp, Arabidopsis thaliana
aagactcaggtggatat

SEQ ID NO: 10550 - DNA, 17 bp, Arabidopsis thaliana
aagactcaggttttttg

SEQ ID NO: 10551 - DNA, 17 bp, Arabidopsis thaliana
aagactcatatggactt

SEQ ID NO: 10552 - DNA, 17 bp, Arabidopsis thaliana
aagactcatctggactt

SEQ ID NO: 10553 - DNA, 17 bp, Arabidopsis thaliana
aagactcatgagtgatc

SEQ ID NO: 10554 - DNA, 17 bp, Arabidopsis thaliana
aagactcatgtggactt

SEQ ID NO: 10555 - DNA, 17 bp, Arabidopsis thaliana
aagactccacgtctgcc

SEQ ID NO: 10556 - DNA, 17 bp, Arabidopsis thaliana
aagactccagcagttct

SEQ ID NO: 10557 - DNA, 17 bp, Arabidopsis thaliana
aagactccagtcttcgg

SEQ ID NO: 10558 - DNA, 17 bp, Arabidopsis thaliana
aagactcccgattgaga

SEQ ID NO: 10559 - DNA, 17 bp, Arabidopsis thaliana
aagactccgcaatgtta

SEQ ID NO: 10560 - DNA, 17 bp, Arabidopsis thaliana
aagactccgctaaccgc

SEQ ID NO: 10561 - DNA, 17 bp, Arabidopsis thaliana
aagactccgctctcatt

SEQ ID NO: 10562 - DNA, 17 bp, Arabidopsis thaliana
aagactccgtctacgga

SEQ ID NO: 10563 - DNA, 17 bp, Arabidopsis thaliana
aagactcgaaatgaatt

SEQ ID NO: 10564 - DNA, 17 bp, Arabidopsis thaliana
aagactcgacgacttgt

SEQ ID NO: 10565 - DNA, 17 bp, Arabidopsis thaliana
aagactcgatggttcac

SEQ ID NO: 10566 - DNA, 17 bp, Arabidopsis thaliana
aagactcgctcaactca

SEQ ID NO: 10567 - DNA, 17 bp, Arabidopsis thaliana
aagactcggaccgggta

SEQ ID NO: 10568 - DNA, 17 bp, Arabidopsis thaliana
aagactcggatgttctc

SEQ ID NO: 10569 - DNA, 17 bp, Arabidopsis thaliana
aagactcggctgattat

SEQ ID NO: 10570 - DNA, 17 bp, Arabidopsis thaliana
aagactcgggcccatgt

SEQ ID NO: 10571 - DNA, 17 bp, Arabidopsis thaliana
aagactcggtccgggta

SEQ ID NO: 10572 - DNA, 17 bp, Arabidopsis thaliana
aagactcgtgctgataa

SEQ ID NO: 10573 - DNA, 17 bp, Arabidopsis thaliana
aagactctaatcgtgga

SEQ ID NO: 10574 - DNA, 17 bp, Arabidopsis thaliana
aagactctcctacctga

SEQ ID NO: 10575 - DNA, 17 bp, Arabidopsis thaliana
aagactctgaagctggc

SEQ ID NO: 10576 - DNA, 17 bp, Arabidopsis thaliana
aagactctgcccctagg

SEQ ID NO: 10577 - DNA, 17 bp, Arabidopsis thaliana
aagactctggtcgtcat

SEQ ID NO: 10578 - DNA, 17 bp, Arabidopsis thaliana
aagactctggtcgtcgt

SEQ ID NO: 10579 - DNA, 17 bp, Arabidopsis thaliana
aagactctgtagcttct

SEQ ID NO: 10580 - DNA, 17 bp, Arabidopsis thaliana
aagactctgtttgtttc

SEQ ID NO: 10581 - DNA, 17 bp, Arabidopsis thaliana
aagactcttctgctgcg

SEQ ID NO: 10582 - DNA, 17 bp, Arabidopsis thaliana
aagactgaagactctta

SEQ ID NO: 10583 - DNA, 17 bp, Arabidopsis thaliana
aagactgagatacgcgt

SEQ ID NO: 10584 - DNA, 17 bp, Arabidopsis thaliana
aagactgagtatgagcc

SEQ ID NO: 10585 - DNA, 17 bp, Arabidopsis thaliana
aagactgagtgaaatgt

SEQ ID NO: 10586 - DNA, 17 bp, Arabidopsis thaliana
aagactgatttagaggg

SEQ ID NO: 10587 - DNA, 17 bp, Arabidopsis thaliana
aagactgcaccctgctt

SEQ ID NO: 10588 - DNA, 17 bp, Arabidopsis thaliana
aagactgcactatcgcg

SEQ ID NO: 10589 - DNA, 17 bp, Arabidopsis thaliana
aagactgcagaagtcgt

SEQ ID NO: 10590 - DNA, 17 bp, Arabidopsis thaliana
aagactgcctcttcatg

SEQ ID NO: 10591 - DNA, 17 bp, Arabidopsis thaliana
aagactgcctgatccgg

SEQ ID NO: 10592 - DNA, 17 bp, Arabidopsis thaliana
aagactgcgctaggctt

SEQ ID NO: 10593 - DNA, 17 bp, Arabidopsis thaliana
aagactgctgatccttg

SEQ ID NO: 10594 - DNA, 17 bp, Arabidopsis thaliana
aagactgctgctgaatc

SEQ ID NO: 10595 - DNA, 17 bp, Arabidopsis thaliana
aagactgcttcaacgac

SEQ ID NO: 10596 - DNA, 17 bp, Arabidopsis thaliana
aagactggaaatgtagt

SEQ ID NO: 10597 - DNA, 17 bp, Arabidopsis thaliana
aagactggcctacgatc

SEQ ID NO: 10598 - DNA, 17 bp, Arabidopsis thaliana
aagactggcctctttca

SEQ ID NO: 10599 - DNA, 17 bp, Arabidopsis thaliana
aagactggcttcaacac

SEQ ID NO: 10600 - DNA, 17 bp, Arabidopsis thaliana
aagactgggaagaagga

SEQ ID NO: 10601 - DNA, 17 bp, Arabidopsis thaliana
aagactgtcccgcaatg

SEQ ID NO: 10602 - DNA, 17 bp, Arabidopsis thaliana
aagactgtcgcaaaaga

SEQ ID NO: 10603 - DNA, 17 bp, Arabidopsis thaliana
aagactgtgacctttct

SEQ ID NO: 10604 - DNA, 17 bp, Arabidopsis thaliana
aagactgtgatcattga

SEQ ID NO: 10605 - DNA, 17 bp, Arabidopsis thaliana
aagactgtgctaggctc

SEQ ID NO: 10606 - DNA, 17 bp, Arabidopsis thaliana
aagactgtttcgcttga

SEQ ID NO: 10607 - DNA, 17 bp, Arabidopsis thaliana
aagacttaaaccgcaaa

SEQ ID NO: 10608 - DNA, 17 bp, Arabidopsis thaliana
aagacttaaaccgcaac

SEQ ID NO: 10609 - DNA, 17 bp, Arabidopsis thaliana
aagacttaaacgtcgac

SEQ ID NO: 10610 - DNA, 17 bp, Arabidopsis thaliana
aagacttaagaattcgc

SEQ ID NO: 10611 - DNA, 17 bp, Arabidopsis thaliana
aagacttaccgaggtga

SEQ ID NO: 10612 - DNA, 17 bp, Arabidopsis thaliana
aagacttacggaccaat

SEQ ID NO: 10613 - DNA, 17 bp, Arabidopsis thaliana
aagacttagcagtgagc

SEQ ID NO: 10614 - DNA, 17 bp, Arabidopsis thaliana
aagacttaggctgtgag

SEQ ID NO: 10615 - DNA, 17 bp, Arabidopsis thaliana
aagacttaggtggatgt

SEQ ID NO: 10616 - DNA, 17 bp, Arabidopsis thaliana
aagacttatttgcaatg

SEQ ID NO: 10617 - DNA, 17 bp, Arabidopsis thaliana
aagacttcggattcggt

SEQ ID NO: 10618 - DNA, 17 bp, Arabidopsis thaliana
aagacttcggttccggt

SEQ ID NO: 10619 - DNA, 17 bp, Arabidopsis thaliana
aagacttctggctcgct

SEQ ID NO: 10620 - DNA, 17 bp, Arabidopsis thaliana
aagacttgaagacaaag

SEQ ID NO: 10621 - DNA, 17 bp, Arabidopsis thaliana
aagacttgatgaaccaa

SEQ ID NO: 10622 - DNA, 17 bp, Arabidopsis thaliana
aagacttgatgaccctt

SEQ ID NO: 10623 - DNA, 17 bp, Arabidopsis thaliana
aagacttgcagaggtca

SEQ ID NO: 10624 - DNA, 17 bp, Arabidopsis thaliana
aagacttggaatcacac

SEQ ID NO: 10625 - DNA, 17 bp, Arabidopsis thaliana
aagacttggacatccac

SEQ ID NO: 10626 - DNA, 17 bp, Arabidopsis thaliana
aagacttggacatcctg

SEQ ID NO: 10627 - DNA, 17 bp, Arabidopsis thaliana
aagacttggctggctct

SEQ ID NO: 10628 - DNA, 17 bp, Arabidopsis thaliana
aagacttggtggatgtc

SEQ ID NO: 10629 - DNA, 17 bp, Arabidopsis thaliana
aagacttggtggatgtt

SEQ ID NO: 10630 - DNA, 17 bp, Arabidopsis thaliana
aagacttggtggcatgt

SEQ ID NO: 10631 - DNA, 17 bp, Arabidopsis thaliana
aagacttgtcatgatag

SEQ ID NO: 10632 - DNA, 17 bp, Arabidopsis thaliana
aagacttgtgctgataa

SEQ ID NO: 10633 - DNA, 17 bp, Arabidopsis thaliana
aagacttgtggatcacc

SEQ ID NO: 10634 - DNA, 17 bp, Arabidopsis thaliana
aagacttgttgatcgtt

SEQ ID NO: 10635 - DNA, 17 bp, Arabidopsis thaliana
aagactttatgatccat

SEQ ID NO: 10636 - DNA, 17 bp, Arabidopsis thaliana
aagactttcaggttcat

SEQ ID NO: 10637 - DNA, 17 bp, Arabidopsis thaliana
aagactttccgcttcca

SEQ ID NO: 10638 - DNA, 17 bp, Arabidopsis thaliana
aagactttcttgcttga

SEQ ID NO: 10639 - DNA, 17 bp, Arabidopsis thaliana
aagactttgaatggtta

SEQ ID NO: 10640 - DNA, 17 bp, Arabidopsis thaliana
aagactttgagttcggt

SEQ ID NO: 10641 - DNA, 17 bp, Arabidopsis thaliana
aagactttgatgtctgg

SEQ ID NO: 10642 - DNA, 17 bp, Arabidopsis thaliana
aagactttggcagtgca

SEQ ID NO: 10643 - DNA, 17 bp, Arabidopsis thaliana
aagactttggtcagcac

SEQ ID NO: 10644 - DNA, 17 bp, Arabidopsis thaliana
aagactttgttccagag

SEQ ID NO: 10645 - DNA, 17 bp, Arabidopsis thaliana
aagacttttccttggcg

SEQ ID NO: 10646 - DNA, 17 bp, Arabidopsis thaliana
aagacttttcgaccagg

SEQ ID NO: 10647 - DNA, 17 bp, Arabidopsis thaliana
aagacttttggcttttg

SEQ ID NO: 10648 - DNA, 17 bp, Arabidopsis thaliana
aagactttttcgggcat

SEQ ID NO: 10649 - DNA, 17 bp, Arabidopsis thaliana
aagacttttttgcttga

SEQ ID NO: 10650 - DNA, 17 bp, Arabidopsis thaliana
aagacttttttggtgga

SEQ ID NO: 10651 - DNA, 17 bp, Arabidopsis thaliana
aagagaaactacgtcct

SEQ ID NO: 10652 - DNA, 17 bp, Arabidopsis thaliana
aagagaaattttgggtg

SEQ ID NO: 10653 - DNA, 17 bp, Arabidopsis thaliana
aagagaaccctagatca

SEQ ID NO: 10654 - DNA, 17 bp, Arabidopsis thaliana
aagagaactgctctcgg

SEQ ID NO: 10655 - DNA, 17 bp, Arabidopsis thaliana
aagagaagaatctgctc

SEQ ID NO: 10656 - DNA, 17 bp, Arabidopsis thaliana
aagagaagacactattg

SEQ ID NO: 10657 - DNA, 17 bp, Arabidopsis thaliana
aagagaagattgtattg

SEQ ID NO: 10658 - DNA, 17 bp, Arabidopsis thaliana
aagagaagctccgctcc

SEQ ID NO: 10659 - DNA, 17 bp, Arabidopsis thaliana
aagagaagctctggttg

SEQ ID NO: 10660 - DNA, 17 bp, Arabidopsis thaliana
aagagaaggcacttagg

SEQ ID NO: 10661 - DNA, 17 bp, Arabidopsis thaliana
aagagaaggcacttggc

SEQ ID NO: 10662 - DNA, 17 bp, Arabidopsis thaliana
aagagaaggttcaggcg

SEQ ID NO: 10663 - DNA, 17 bp, Arabidopsis thaliana
aagagaagtgttttgcg

SEQ ID NO: 10664 - DNA, 17 bp, Arabidopsis thaliana
aagagaatgttgagtag

SEQ ID NO: 10665 - DNA, 17 bp, Arabidopsis thaliana
aagagacaaagtgggct

SEQ ID NO: 10666 - DNA, 17 bp, Arabidopsis thaliana
aagagacccagagttgg

SEQ ID NO: 10667 - DNA, 17 bp, Arabidopsis thaliana
aagagacctcctggtct

SEQ ID NO: 10668 - DNA, 17 bp, Arabidopsis thaliana
aagagacgattagatac

SEQ ID NO: 10669 - DNA, 17 bp, Arabidopsis thaliana
aagagacgattagatcc

SEQ ID NO: 10670 - DNA, 17 bp, Arabidopsis thaliana
aagagacgcggctaacc

SEQ ID NO: 10671 - DNA, 17 bp, Arabidopsis thaliana
aagagacgtttttggcc

SEQ ID NO: 10672 - DNA, 17 bp, Arabidopsis thaliana
aagagactactgatgga

SEQ ID NO: 10673 - DNA, 17 bp, Arabidopsis thaliana
aagagactctggatttc

SEQ ID NO: 10674 - DNA, 17 bp, Arabidopsis thaliana
aagagagaccattggtg

SEQ ID NO: 10675 - DNA, 17 bp, Arabidopsis thaliana
aagagagagaaatttgt

SEQ ID NO: 10676 - DNA, 17 bp, Arabidopsis thaliana
aagagagatctaatacc

SEQ ID NO: 10677 - DNA, 17 bp, Arabidopsis thaliana
aagagaggagttgtcgc

SEQ ID NO: 10678 - DNA, 17 bp, Arabidopsis thaliana
aagagaggggtgccttc

SEQ ID NO: 10679 - DNA, 17 bp, Arabidopsis thaliana
aagagaggtgctctagc

SEQ ID NO: 10680 - DNA, 17 bp, Arabidopsis thaliana
aagagagtctctgaaag

SEQ ID NO: 10681 - DNA, 17 bp, Arabidopsis thaliana
aagagagttggccaact

SEQ ID NO: 10682 - DNA, 17 bp, Arabidopsis thaliana
aagagatcgagtcgcgg

SEQ ID NO: 10683 - DNA, 17 bp, Arabidopsis thaliana
aagagatcgcctttgct

SEQ ID NO: 10684 - DNA, 17 bp, Arabidopsis thaliana
aagagatcgggtggttg

SEQ ID NO: 10685 - DNA, 17 bp, Arabidopsis thaliana
aagagatcgttggcgac

SEQ ID NO: 10686 - DNA, 17 bp, Arabidopsis thaliana
aagagatctccaacgat

SEQ ID NO: 10687 - DNA, 17 bp, Arabidopsis thaliana
aagagatctgtcttaat

SEQ ID NO: 10688 - DNA, 17 bp, Arabidopsis thaliana
aagagatcttaacatgc

SEQ ID NO: 10689 - DNA, 17 bp, Arabidopsis thaliana
aagagatcttgactgga

SEQ ID NO: 10690 - DNA, 17 bp, Arabidopsis thaliana
aagagatgtgttagccc

SEQ ID NO: 10691 - DNA, 17 bp, Arabidopsis thaliana
aagagatgtttcatcct

SEQ ID NO: 10692 - DNA, 17 bp, Arabidopsis thaliana
aagagattacgggtttt

SEQ ID NO: 10693 - DNA, 17 bp, Arabidopsis thaliana
aagagattctggaccta

SEQ ID NO: 10694 - DNA, 17 bp, Arabidopsis thaliana
aagagattctggggcga

SEQ ID NO: 10695 - DNA, 17 bp, Arabidopsis thaliana
aagagattgttcaatcg

SEQ ID NO: 10696 - DNA, 17 bp, Arabidopsis thaliana
aagagcaaccccattgg

SEQ ID NO: 10697 - DNA, 17 bp, Arabidopsis thaliana
aagagcaatgctgtatg

SEQ ID NO: 10698 - DNA, 17 bp, Arabidopsis thaliana
aagagcaatttcatcga

SEQ ID NO: 10699 - DNA, 17 bp, Arabidopsis thaliana
aagagcacacaactcca

SEQ ID NO: 10700 - DNA, 17 bp, Arabidopsis thaliana
aagagcacacggattct

SEQ ID NO: 10701 - DNA, 17 bp, Arabidopsis thaliana
aagagcacactatgccg

SEQ ID NO: 10702 - DNA, 17 bp, Arabidopsis thaliana
aagagcaccaccaacgg

SEQ ID NO: 10703 - DNA, 17 bp, Arabidopsis thaliana
aagagcaccaccatcga

SEQ ID NO: 10704 - DNA, 17 bp, Arabidopsis thaliana
aagagcacccacattgg

SEQ ID NO: 10705 - DNA, 17 bp, Arabidopsis thaliana
aagagcacctccaaagt

SEQ ID NO: 10706 - DNA, 17 bp, Arabidopsis thaliana
aagagcacgtccaacga

SEQ ID NO: 10707 - DNA, 17 bp, Arabidopsis thaliana
aagagcagaatcttctc

SEQ ID NO: 10708 - DNA, 17 bp, Arabidopsis thaliana
aagagcagagtcagaaa

SEQ ID NO: 10709 - DNA, 17 bp, Arabidopsis thaliana
aagagcagagtcagata

SEQ ID NO: 10710 - DNA, 17 bp, Arabidopsis thaliana
aagagcagagtcagatc

SEQ ID NO: 10711 - DNA, 17 bp, Arabidopsis thaliana
aagagcagcagcaatgg

SEQ ID NO: 10712 - DNA, 17 bp, Arabidopsis thaliana
aagagcagttacgtcac

SEQ ID NO: 10713 - DNA, 17 bp, Arabidopsis thaliana
aagagcatggtcatagg

SEQ ID NO: 10714 - DNA, 17 bp, Arabidopsis thaliana
aagagcatgtccattgc

SEQ ID NO: 10715 - DNA, 17 bp, Arabidopsis thaliana
aagagcatgttcattgc

SEQ ID NO: 10716 - DNA, 17 bp, Arabidopsis thaliana
aagagcattcttgatgg

SEQ ID NO: 10717 - DNA, 17 bp, Arabidopsis thaliana
aagagcatttccatcag

SEQ ID NO: 10718 - DNA, 17 bp, Arabidopsis thaliana
aagagcattttcgtgat

SEQ ID NO: 10719 - DNA, 17 bp, Arabidopsis thaliana
aagagccaacttgtatc

SEQ ID NO: 10720 - DNA, 17 bp, Arabidopsis thaliana
aagagccaatcacgact

SEQ ID NO: 10721 - DNA, 17 bp, Arabidopsis thaliana
aagagccaggcctcgag

SEQ ID NO: 10722 - DNA, 17 bp, Arabidopsis thaliana
aagagccaggcctcgat

SEQ ID NO: 10723 - DNA, 17 bp, Arabidopsis thaliana
aagagccaggcttcgat

SEQ ID NO: 10724 - DNA, 17 bp, Arabidopsis thaliana
aagagccggaggttcaa

SEQ ID NO: 10725 - DNA, 17 bp, Arabidopsis thaliana
aagagcctaaatctgtc

SEQ ID NO: 10726 - DNA, 17 bp, Arabidopsis thaliana
aagagcctcaacggaga

SEQ ID NO: 10727 - DNA, 17 bp, Arabidopsis thaliana
aagagcctcgcaaactg

SEQ ID NO: 10728 - DNA, 17 bp, Arabidopsis thaliana
aagagccttttcttcac

SEQ ID NO: 10729 - DNA, 17 bp, Arabidopsis thaliana
aagagcgaactccttgt

SEQ ID NO: 10730 - DNA, 17 bp, Arabidopsis thaliana
aagagcgatatagctat

SEQ ID NO: 10731 - DNA, 17 bp, Arabidopsis thaliana
aagagcgatatggatag

SEQ ID NO: 10732 - DNA, 17 bp, Arabidopsis thaliana
aagagcggacgccaacg

SEQ ID NO: 10733 - DNA, 17 bp, Arabidopsis thaliana
aagagcgggagaacggt

SEQ ID NO: 10734 - DNA, 17 bp, Arabidopsis thaliana
aagagcgggctacgata

SEQ ID NO: 10735 - DNA, 17 bp, Arabidopsis thaliana
aagagcgggttaagcag

SEQ ID NO: 10736 - DNA, 17 bp, Arabidopsis thaliana
aagagcgtctctccggg

SEQ ID NO: 10737 - DNA, 17 bp, Arabidopsis thaliana
aagagcgttgcaatggc

SEQ ID NO: 10738 - DNA, 17 bp, Arabidopsis thaliana
aagaggaagaggtttgt

SEQ ID NO: 10739 - DNA, 17 bp, Arabidopsis thaliana
aagaggagttgctaaga

SEQ ID NO: 10740 - DNA, 17 bp, Arabidopsis thaliana
aagaggatagttgttac

SEQ ID NO: 10741 - DNA, 17 bp, Arabidopsis thaliana
aagaggatgattctgcc

SEQ ID NO: 10742 - DNA, 17 bp, Arabidopsis thaliana
aagaggatgtacagagg

SEQ ID NO: 10743 - DNA, 17 bp, Arabidopsis thaliana
aagaggattgacttccc

SEQ ID NO: 10744 - DNA, 17 bp, Arabidopsis thaliana
aagaggcctttcattcc

SEQ ID NO: 10745 - DNA, 17 bp, Arabidopsis thaliana
aagaggcgttgcgtcta

SEQ ID NO: 10746 - DNA, 17 bp, Arabidopsis thaliana
aagaggctaagagtttg

SEQ ID NO: 10747 - DNA, 17 bp, Arabidopsis thaliana
aagaggctacgcagaac

SEQ ID NO: 10748 - DNA, 17 bp, Arabidopsis thaliana
aagaggctgcggacaga

SEQ ID NO: 10749 - DNA, 17 bp, Arabidopsis thaliana
aagaggctgttagggat

SEQ ID NO: 10750 - DNA, 17 bp, Arabidopsis thaliana
aagagggatgacgtgtg

SEQ ID NO: 10751 - DNA, 17 bp, Arabidopsis thaliana
aagagggatgtgcttgt

SEQ ID NO: 10752 - DNA, 17 bp, Arabidopsis thaliana
aagagggcacgtctgcc

SEQ ID NO: 10753 - DNA, 17 bp, Arabidopsis thaliana
aagaggggaaaggttcc

SEQ ID NO: 10754 - DNA, 17 bp, Arabidopsis thaliana
aagaggggtgtgcttgc

SEQ ID NO: 10755 - DNA, 17 bp, Arabidopsis thaliana
aagagggtgctgcaaac

SEQ ID NO: 10756 - DNA, 17 bp, Arabidopsis thaliana
aagagggttgtgtttgt

SEQ ID NO: 10757 - DNA, 17 bp, Arabidopsis thaliana
aagaggtacattgcggt

SEQ ID NO: 10758 - DNA, 17 bp, Arabidopsis thaliana
aagaggtcagttgggac

SEQ ID NO: 10759 - DNA, 17 bp, Arabidopsis thaliana
aagaggtcctggggttt

SEQ ID NO: 10760 - DNA, 17 bp, Arabidopsis thaliana
aagaggtcctgtggttt

SEQ ID NO: 10761 - DNA, 17 bp, Arabidopsis thaliana
aagaggtcgccggttcg

SEQ ID NO: 10762 - DNA, 17 bp, Arabidopsis thaliana
aagaggtcgtggcaatt

SEQ ID NO: 10763 - DNA, 17 bp, Arabidopsis thaliana
aagaggtctaggaaaat

SEQ ID NO: 10764 - DNA, 17 bp, Arabidopsis thaliana
aagaggtctgaggttcg

SEQ ID NO: 10765 - DNA, 17 bp, Arabidopsis thaliana
aagaggtctggcctgaa

SEQ ID NO: 10766 - DNA, 17 bp, Arabidopsis thaliana
aagaggtctggggttcg

SEQ ID NO: 10767 - DNA, 17 bp, Arabidopsis thaliana
aagaggtctggggtttg

SEQ ID NO: 10768 - DNA, 17 bp, Arabidopsis thaliana
aagaggtctttggttcg

SEQ ID NO: 10769 - DNA, 17 bp, Arabidopsis thaliana
aagaggtggagagaccc

SEQ ID NO: 10770 - DNA, 17 bp, Arabidopsis thaliana
aagaggtggtgtcgttt

SEQ ID NO: 10771 - DNA, 17 bp, Arabidopsis thaliana
aagaggtgtcgtctatc

SEQ ID NO: 10772 - DNA, 17 bp, Arabidopsis thaliana
aagaggtgttgcgttta

SEQ ID NO: 10773 - DNA, 17 bp, Arabidopsis thaliana
aagaggttacctgaatt

SEQ ID NO: 10774 - DNA, 17 bp, Arabidopsis thaliana
aagaggttcatagttca

SEQ ID NO: 10775 - DNA, 17 bp, Arabidopsis thaliana
aagaggttgccggttcg

SEQ ID NO: 10776 - DNA, 17 bp, Arabidopsis thaliana
aagaggttggccacagc

SEQ ID NO: 10777 - DNA, 17 bp, Arabidopsis thaliana
aagaggttgggctctgg

SEQ ID NO: 10778 - DNA, 17 bp, Arabidopsis thaliana
aagaggtttgcttttgt

SEQ ID NO: 10779 - DNA, 17 bp, Arabidopsis thaliana
aagagtacgacgtggtt

SEQ ID NO: 10780 - DNA, 17 bp, Arabidopsis thaliana
aagagtactgttcagga

SEQ ID NO: 10781 - DNA, 17 bp, Arabidopsis thaliana
aagagtcaagcttcttt

SEQ ID NO: 10782 - DNA, 17 bp, Arabidopsis thaliana
aagagtcagatttagcc

SEQ ID NO: 10783 - DNA, 17 bp, Arabidopsis thaliana
aagagtcatggcgcagg

SEQ ID NO: 10784 - DNA, 17 bp, Arabidopsis thaliana
aagagtcattaaatccg

SEQ ID NO: 10785 - DNA, 17 bp, Arabidopsis thaliana
aagagtccaccattgca

SEQ ID NO: 10786 - DNA, 17 bp, Arabidopsis thaliana
aagagtcccgtatgttg

SEQ ID NO: 10787 - DNA, 17 bp, Arabidopsis thaliana
aagagtcgagccgcttt

SEQ ID NO: 10788 - DNA, 17 bp, Arabidopsis thaliana
aagagtcggctaggcgg

SEQ ID NO: 10789 - DNA, 17 bp, Arabidopsis thaliana
aagagtcgtttgcggtt

SEQ ID NO: 10790 - DNA, 17 bp, Arabidopsis thaliana
aagagtgaacgacctgt

SEQ ID NO: 10791 - DNA, 17 bp, Arabidopsis thaliana
aagagtgacctgcatct

SEQ ID NO: 10792 - DNA, 17 bp, Arabidopsis thaliana
aagagtgccacttgtta

SEQ ID NO: 10793 - DNA, 17 bp, Arabidopsis thaliana
aagagtgcttgaaattg

SEQ ID NO: 10794 - DNA, 17 bp, Arabidopsis thaliana
aagagtgtctaaatgcg

SEQ ID NO: 10795 - DNA, 17 bp, Arabidopsis thaliana
aagagtgttgcggaatg

SEQ ID NO: 10796 - DNA, 17 bp, Arabidopsis thaliana
aagagttcacccctatt

SEQ ID NO: 10797 - DNA, 17 bp, Arabidopsis thaliana
aagagttcacggttaat

SEQ ID NO: 10798 - DNA, 17 bp, Arabidopsis thaliana
aagagttcattctccca

SEQ ID NO: 10799 - DNA, 17 bp, Arabidopsis thaliana
aagagttcattctccga

SEQ ID NO: 10800 - DNA, 17 bp, Arabidopsis thaliana
aagagttcgaatggtga

SEQ ID NO: 10801 - DNA, 17 bp, Arabidopsis thaliana
aagagttcgctaaaacc

SEQ ID NO: 10802 - DNA, 17 bp, Arabidopsis thaliana
aagagttctgttgaccg

SEQ ID NO: 10803 - DNA, 17 bp, Arabidopsis thaliana
aagagttgactgtttaa

SEQ ID NO: 10804 - DNA, 17 bp, Arabidopsis thaliana
aagagttgcaactggat

SEQ ID NO: 10805 - DNA, 17 bp, Arabidopsis thaliana
aagagttgcacctttcc

SEQ ID NO: 10806 - DNA, 17 bp, Arabidopsis thaliana
aagagttgccagtgctt

SEQ ID NO: 10807 - DNA, 17 bp, Arabidopsis thaliana
aagagttggctaacttt

SEQ ID NO: 10808 - DNA, 17 bp, Arabidopsis thaliana
aagagtttacggttaat

SEQ ID NO: 10809 - DNA, 17 bp, Arabidopsis thaliana
aagagtttaggttctga

SEQ ID NO: 10810 - DNA, 17 bp, Arabidopsis thaliana
aagagtttctctcagcc

SEQ ID NO: 10811 - DNA, 17 bp, Arabidopsis thaliana
aagagtttgatcctggc

SEQ ID NO: 10812 - DNA, 17 bp, Arabidopsis thaliana
aagagttttcgacgaca

SEQ ID NO: 10813 - DNA, 17 bp, Arabidopsis thaliana
aagagttttggacattt

SEQ ID NO: 10814 - DNA, 17 bp, Arabidopsis thaliana
aagataaattaattgcg

SEQ ID NO: 10815 - DNA, 17 bp, Arabidopsis thaliana
aagataacctactttgt

SEQ ID NO: 10816 - DNA, 17 bp, Arabidopsis thaliana
aagataacctgccatgt

SEQ ID NO: 10817 - DNA, 17 bp, Arabidopsis thaliana
aagataacgcaggtgtc

SEQ ID NO: 10818 - DNA, 17 bp, Arabidopsis thaliana
aagataactcgaatatt

SEQ ID NO: 10819 - DNA, 17 bp, Arabidopsis thaliana
aagataagcgccttagt

SEQ ID NO: 10820 - DNA, 17 bp, Arabidopsis thaliana
aagataagcttatgcca

SEQ ID NO: 10821 - DNA, 17 bp, Arabidopsis thaliana
aagatacaaggttgggg

SEQ ID NO: 10822 - DNA, 17 bp, Arabidopsis thaliana
aagatacaccaatggag

SEQ ID NO: 10823 - DNA, 17 bp, Arabidopsis thaliana
aagataccgcagtttgc

SEQ ID NO: 10824 - DNA, 17 bp, Arabidopsis thaliana
aagatactgtgactcaa

SEQ ID NO: 10825 - DNA, 17 bp, Arabidopsis thaliana
aagatagattggtcgat

SEQ ID NO: 10826 - DNA, 17 bp, Arabidopsis thaliana
aagataggttggtcgag

SEQ ID NO: 10827 - DNA, 17 bp, Arabidopsis thaliana
aagatagtctgctcgga

SEQ ID NO: 10828 - DNA, 17 bp, Arabidopsis thaliana
aagatagtggcccatcc

SEQ ID NO: 10829 - DNA, 17 bp, Arabidopsis thaliana
aagatagttcgctcaac

SEQ ID NO: 10830 - DNA, 17 bp, Arabidopsis thaliana
aagatatagtcgccttc

SEQ ID NO: 10831 - DNA, 17 bp, Arabidopsis thaliana
aagatcaaaaaaaacaa

SEQ ID NO: 10832 - DNA, 17 bp, Arabidopsis thaliana
aagatcaaaacctgcaa

SEQ ID NO: 10833 - DNA, 17 bp, Arabidopsis thaliana
aagatcaaacatcagca

SEQ ID NO: 10834 - DNA, 17 bp, Arabidopsis thaliana
aagatcaaacggggcga

SEQ ID NO: 10835 - DNA, 17 bp, Arabidopsis thaliana
aagatcaaaggtcttag

SEQ ID NO: 10836 - DNA, 17 bp, Arabidopsis thaliana
aagatcaactttggctg

SEQ ID NO: 10837 - DNA, 17 bp, Arabidopsis thaliana
aagatcaagatggactg

SEQ ID NO: 10838 - DNA, 17 bp, Arabidopsis thaliana
aagatcaagtgtatcct

SEQ ID NO: 10839 - DNA, 17 bp, Arabidopsis thaliana
aagatcaatcggttaag

SEQ ID NO: 10840 - DNA, 17 bp, Arabidopsis thaliana
aagatcaatctcagacc

SEQ ID NO: 10841 - DNA, 17 bp, Arabidopsis thaliana
aagatcaatggacgagc

SEQ ID NO: 10842 - DNA, 17 bp, Arabidopsis thaliana
aagatcacgaggttcac

SEQ ID NO: 10843 - DNA, 17 bp, Arabidopsis thaliana
aagatcacggagcaatc

SEQ ID NO: 10844 - DNA, 17 bp, Arabidopsis thaliana
aagatcactgccagact

SEQ ID NO: 10845 - DNA, 17 bp, Arabidopsis thaliana
aagatcacttgttggct

SEQ ID NO: 10846 - DNA, 17 bp, Arabidopsis thaliana
aagatcagagtagcccc

SEQ ID NO: 10847 - DNA, 17 bp, Arabidopsis thaliana
aagatcagccatgtttc

SEQ ID NO: 10848 - DNA, 17 bp, Arabidopsis thaliana
aagatcagctgtttcgt

SEQ ID NO: 10849 - DNA, 17 bp, Arabidopsis thaliana
aagatcagggacaagat

SEQ ID NO: 10850 - DNA, 17 bp, Arabidopsis thaliana
aagatcaggttgcgggt

SEQ ID NO: 10851 - DNA, 17 bp, Arabidopsis thaliana
aagatcaggttgcggtt

SEQ ID NO: 10852 - DNA, 17 bp, Arabidopsis thaliana
aagatcagtccgaaggc

SEQ ID NO: 10853 - DNA, 17 bp, Arabidopsis thaliana
aagatcagtcggttttg

SEQ ID NO: 10854 - DNA, 17 bp, Arabidopsis thaliana
aagatcagtgtcactag

SEQ ID NO: 10855 - DNA, 17 bp, Arabidopsis thaliana
aagatcagttgatgaag

SEQ ID NO: 10856 - DNA, 17 bp, Arabidopsis thaliana
aagatcatcacattccc

SEQ ID NO: 10857 - DNA, 17 bp, Arabidopsis thaliana
aagatcatcattggtag

SEQ ID NO: 10858 - DNA, 17 bp, Arabidopsis thaliana
aagatcatctctatcaa

SEQ ID NO: 10859 - DNA, 17 bp, Arabidopsis thaliana
aagatcatgtgtcagat

SEQ ID NO: 10860 - DNA, 17 bp, Arabidopsis thaliana
aagatcatgttcgcagt

SEQ ID NO: 10861 - DNA, 17 bp, Arabidopsis thaliana
aagatcatgttgcggat

SEQ ID NO: 10862 - DNA, 17 bp, Arabidopsis thaliana
aagatcatttccactga

SEQ ID NO: 10863 - DNA, 17 bp, Arabidopsis thaliana
aagatccaactaggagt

SEQ ID NO: 10864 - DNA, 17 bp, Arabidopsis thaliana
aagatccagcactttcg

SEQ ID NO: 10865 - DNA, 17 bp, Arabidopsis thaliana
aagatccagttgcgaat

SEQ ID NO: 10866 - DNA, 17 bp, Arabidopsis thaliana
aagatccagttgcggat

SEQ ID NO: 10867 - DNA, 17 bp, Arabidopsis thaliana
aagatccagttgcgggt

SEQ ID NO: 10868 - DNA, 17 bp, Arabidopsis thaliana
aagatccagttgcggtg

SEQ ID NO: 10869 - DNA, 17 bp, Arabidopsis thaliana
aagatccagttgcggtt

SEQ ID NO: 10870 - DNA, 17 bp, Arabidopsis thaliana
aagatcccatcccgaac

SEQ ID NO: 10871 - DNA, 17 bp, Arabidopsis thaliana
aagatccccctgccttc

SEQ ID NO: 10872 - DNA, 17 bp, Arabidopsis thaliana
aagatccctggacggac

SEQ ID NO: 10873 - DNA, 17 bp, Arabidopsis thaliana
aagatccgcaccgaacc

SEQ ID NO: 10874 - DNA, 17 bp, Arabidopsis thaliana
aagatccggagattgct

SEQ ID NO: 10875 - DNA, 17 bp, Arabidopsis thaliana
aagatccggagtggcta

SEQ ID NO: 10876 - DNA, 17 bp, Arabidopsis thaliana
aagatccgggcggttta

SEQ ID NO: 10877 - DNA, 17 bp, Arabidopsis thaliana
aagatccggttgcaggt

SEQ ID NO: 10878 - DNA, 17 bp, Arabidopsis thaliana
aagatccggttgcagtt

SEQ ID NO: 10879 - DNA, 17 bp, Arabidopsis thaliana
aagatccggttgcgatt

SEQ ID NO: 10880 - DNA, 17 bp, Arabidopsis thaliana
aagatccggttgcggat

SEQ ID NO: 10881 - DNA, 17 bp, Arabidopsis thaliana
aagatccggttgcggct

SEQ ID NO: 10882 - DNA, 17 bp, Arabidopsis thaliana
aagatccggttgcgggt

SEQ ID NO: 10883 - DNA, 17 bp, Arabidopsis thaliana
aagatccggttgcggta

SEQ ID NO: 10884 - DNA, 17 bp, Arabidopsis thaliana
aagatccggttgcggtg

SEQ ID NO: 10885 - DNA, 17 bp, Arabidopsis thaliana
aagatccggttgcggtt

SEQ ID NO: 10886 - DNA, 17 bp, Arabidopsis thaliana
aagatccggttgcgttt

SEQ ID NO: 10887 - DNA, 17 bp, Arabidopsis thaliana
aagatccggttgtgggt

SEQ ID NO: 10888 - DNA, 17 bp, Arabidopsis thaliana
aagatccgtttgcgggt

SEQ ID NO: 10889 - DNA, 17 bp, Arabidopsis thaliana
aagatccgtttgcggtt

SEQ ID NO: 10890 - DNA, 17 bp, Arabidopsis thaliana
aagatcctactcaactt

SEQ ID NO: 10891 - DNA, 17 bp, Arabidopsis thaliana
aagatcctcctgctttc

SEQ ID NO: 10892 - DNA, 17 bp, Arabidopsis thaliana
aagatcctcgtccatct

SEQ ID NO: 10893 - DNA, 17 bp, Arabidopsis thaliana
aagatcctggtgcggtt

SEQ ID NO: 10894 - DNA, 17 bp, Arabidopsis thaliana
aagatcctttccaacgt

SEQ ID NO: 10895 - DNA, 17 bp, Arabidopsis thaliana
aagatcgaatcgaaggc

SEQ ID NO: 10896 - DNA, 17 bp, Arabidopsis thaliana
aagatcgaccccggtgt

SEQ ID NO: 10897 - DNA, 17 bp, Arabidopsis thaliana
aagatcgaccgagatga

SEQ ID NO: 10898 - DNA, 17 bp, Arabidopsis thaliana
aagatcgagagttgttg

SEQ ID NO: 10899 - DNA, 17 bp, Arabidopsis thaliana
aagatcgaggttggaat

SEQ ID NO: 10900 - DNA, 17 bp, Arabidopsis thaliana
aagatcgagttgcggat

SEQ ID NO: 10901 - DNA, 17 bp, Arabidopsis thaliana
aagatcgagttgcggct

SEQ ID NO: 10902 - DNA, 17 bp, Arabidopsis thaliana
aagatcgagttgcggtg

SEQ ID NO: 10903 - DNA, 17 bp, Arabidopsis thaliana
aagatcgagttgcggtt

SEQ ID NO: 10904 - DNA, 17 bp, Arabidopsis thaliana
aagatcgcacctccgag

SEQ ID NO: 10905 - DNA, 17 bp, Arabidopsis thaliana
aagatcgcagggattcg

SEQ ID NO: 10906 - DNA, 17 bp, Arabidopsis thaliana
aagatcgccatttatta

SEQ ID NO: 10907 - DNA, 17 bp, Arabidopsis thaliana
aagatcgccctcaaagt

SEQ ID NO: 10908 - DNA, 17 bp, Arabidopsis thaliana
aagatcgctggttttgg

SEQ ID NO: 10909 - DNA, 17 bp, Arabidopsis thaliana
aagatcgctgtcatccg

SEQ ID NO: 10910 - DNA, 17 bp, Arabidopsis thaliana
aagatcggagtaggtgc

SEQ ID NO: 10911 - DNA, 17 bp, Arabidopsis thaliana
aagatcggcttgcggtt

SEQ ID NO: 10912 - DNA, 17 bp, Arabidopsis thaliana
aagatcgggcgtcttct

SEQ ID NO: 10913 - DNA, 17 bp, Arabidopsis thaliana
aagatcgggctttatct

SEQ ID NO: 10914 - DNA, 17 bp, Arabidopsis thaliana
aagatcgggttacgggg

SEQ ID NO: 10915 - DNA, 17 bp, Arabidopsis thaliana
aagatcgggttgcagat

SEQ ID NO: 10916 - DNA, 17 bp, Arabidopsis thaliana
aagatcgggttgcaggt

SEQ ID NO: 10917 - DNA, 17 bp, Arabidopsis thaliana
aagatcgggttgcagtg

SEQ ID NO: 10918 - DNA, 17 bp, Arabidopsis thaliana
aagatcgggttgcgatt

SEQ ID NO: 10919 - DNA, 17 bp, Arabidopsis thaliana
aagatcgggttgcggat

SEQ ID NO: 10920 - DNA, 17 bp, Arabidopsis thaliana
aagatcgggttgcggct

SEQ ID NO: 10921 - DNA, 17 bp, Arabidopsis thaliana
aagatcgggttgcggga

SEQ ID NO: 10922 - DNA, 17 bp, Arabidopsis thaliana
aagatcgggttgcgggt

SEQ ID NO: 10923 - DNA, 17 bp, Arabidopsis thaliana
aagatcgggttgcggtc

SEQ ID NO: 10924 - DNA, 17 bp, Arabidopsis thaliana
aagatcgggttgcggtg

SEQ ID NO: 10925 - DNA, 17 bp, Arabidopsis thaliana
aagatcgggttgcggtt

SEQ ID NO: 10926 - DNA, 17 bp, Arabidopsis thaliana
aagatcgggttggggtt

SEQ ID NO: 10927 - DNA, 17 bp, Arabidopsis thaliana
aagatcgggttgtggat

SEQ ID NO: 10928 - DNA, 17 bp, Arabidopsis thaliana
aagatcgggtttcgggt

SEQ ID NO: 10929 - DNA, 17 bp, Arabidopsis thaliana
aagatcggttgcggtct

SEQ ID NO: 10930 - DNA, 17 bp, Arabidopsis thaliana
aagatcgtaacttggct

SEQ ID NO: 10931 - DNA, 17 bp, Arabidopsis thaliana
aagatcgtcaggctctc

SEQ ID NO: 10932 - DNA, 17 bp, Arabidopsis thaliana
aagatcgtctttcaatt

SEQ ID NO: 10933 - DNA, 17 bp, Arabidopsis thaliana
aagatcgtggtctgcag

SEQ ID NO: 10934 - DNA, 17 bp, Arabidopsis thaliana
aagatcgtgttgcggtt

SEQ ID NO: 10935 - DNA, 17 bp, Arabidopsis thaliana
aagatctaagcaccaac

SEQ ID NO: 10936 - DNA, 17 bp, Arabidopsis thaliana
aagatctacaccgaaag

SEQ ID NO: 10937 - DNA, 17 bp, Arabidopsis thaliana
aagatctccaaggtgaa

SEQ ID NO: 10938 - DNA, 17 bp, Arabidopsis thaliana
aagatctccatcgcctg

SEQ ID NO: 10939 - DNA, 17 bp, Arabidopsis thaliana
aagatctcctgcacact

SEQ ID NO: 10940 - DNA, 17 bp, Arabidopsis thaliana
aagatctcgatggacga

SEQ ID NO: 10941 - DNA, 17 bp, Arabidopsis thaliana
aagatctcggtcggcca

SEQ ID NO: 10942 - DNA, 17 bp, Arabidopsis thaliana
aagatctgagccatccc

SEQ ID NO: 10943 - DNA, 17 bp, Arabidopsis thaliana
aagatctgatgaacgcg

SEQ ID NO: 10944 - DNA, 17 bp, Arabidopsis thaliana
aagatctgctcaggtcg

SEQ ID NO: 10945 - DNA, 17 bp, Arabidopsis thaliana
aagatctgctgtctgta

SEQ ID NO: 10946 - DNA, 17 bp, Arabidopsis thaliana
aagatctggtgatgagg

SEQ ID NO: 10947 - DNA, 17 bp, Arabidopsis thaliana
aagatctggttgcagct

SEQ ID NO: 10948 - DNA, 17 bp, Arabidopsis thaliana
aagatctggttgcagtt

SEQ ID NO: 10949 - DNA, 17 bp, Arabidopsis thaliana
aagatctggttgcggct

SEQ ID NO: 10950 - DNA, 17 bp, Arabidopsis thaliana
aagatctggttgcggtt

SEQ ID NO: 10951 - DNA, 17 bp, Arabidopsis thaliana
aagatctgtcattctac

SEQ ID NO: 10952 - DNA, 17 bp, Arabidopsis thaliana
aagatctgtgatccgtc

SEQ ID NO: 10953 - DNA, 17 bp, Arabidopsis thaliana
aagatcttacgcttctt

SEQ ID NO: 10954 - DNA, 17 bp, Arabidopsis thaliana
aagatcttatcaacgtc

SEQ ID NO: 10955 - DNA, 17 bp, Arabidopsis thaliana
aagatcttccaaggaaa

SEQ ID NO: 10956 - DNA, 17 bp, Arabidopsis thaliana
aagatcttggaaccaaa

SEQ ID NO: 10957 - DNA, 17 bp, Arabidopsis thaliana
aagatcttgttgcgggt

SEQ ID NO: 10958 - DNA, 17 bp, Arabidopsis thaliana
aagatcttgttgcggtg

SEQ ID NO: 10959 - DNA, 17 bp, Arabidopsis thaliana
aagatcttgttgcggtt

SEQ ID NO: 10960 - DNA, 17 bp, Arabidopsis thaliana
aagatctttgaccgaat

SEQ ID NO: 10961 - DNA, 17 bp, Arabidopsis thaliana
aagatctttggcgttac

SEQ ID NO: 10962 - DNA, 17 bp, Arabidopsis thaliana
aagatcttttgggttgg

SEQ ID NO: 10963 - DNA, 17 bp, Arabidopsis thaliana
aagatgaaacggacggt

SEQ ID NO: 10964 - DNA, 17 bp, Arabidopsis thaliana
aagatgaacggggctaa

SEQ ID NO: 10965 - DNA, 17 bp, Arabidopsis thaliana
aagatgacaagggattt

SEQ ID NO: 10966 - DNA, 17 bp, Arabidopsis thaliana
aagatgactgaacgcct

SEQ ID NO: 10967 - DNA, 17 bp, Arabidopsis thaliana
aagatgactggtgtgtg

SEQ ID NO: 10968 - DNA, 17 bp, Arabidopsis thaliana
aagatgagacttgtcat

SEQ ID NO: 10969 - DNA, 17 bp, Arabidopsis thaliana
aagatgagcggttcaac

SEQ ID NO: 10970 - DNA, 17 bp, Arabidopsis thaliana
aagatgaggttggcgag

SEQ ID NO: 10971 - DNA, 17 bp, Arabidopsis thaliana
aagatgatcctttgggg

SEQ ID NO: 10972 - DNA, 17 bp, Arabidopsis thaliana
aagatgccattgtctca

SEQ ID NO: 10973 - DNA, 17 bp, Arabidopsis thaliana
aagatgccgttagttaa

SEQ ID NO: 10974 - DNA, 17 bp, Arabidopsis thaliana
aagatgcggttgcggtt

SEQ ID NO: 10975 - DNA, 17 bp, Arabidopsis thaliana
aagatgctgtggtttcg

SEQ ID NO: 10976 - DNA, 17 bp, Arabidopsis thaliana
aagatgcttcacaagtc

SEQ ID NO: 10977 - DNA, 17 bp, Arabidopsis thaliana
aagatggagatgttggc

SEQ ID NO: 10978 - DNA, 17 bp, Arabidopsis thaliana
aagatggccatgttgcg

SEQ ID NO: 10979 - DNA, 17 bp, Arabidopsis thaliana
aagatggcccgatgttc

SEQ ID NO: 10980 - DNA, 17 bp, Arabidopsis thaliana
aagatggccgatcagtt

SEQ ID NO: 10981 - DNA, 17 bp, Arabidopsis thaliana
aagatggctcgagactt

SEQ ID NO: 10982 - DNA, 17 bp, Arabidopsis thaliana
aagatgggtttgcttgg

SEQ ID NO: 10983 - DNA, 17 bp, Arabidopsis thaliana
aagatggtcatgttgcg

SEQ ID NO: 10984 - DNA, 17 bp, Arabidopsis thaliana
aagatggtgaactatgc

SEQ ID NO: 10985 - DNA, 17 bp, Arabidopsis thaliana
aagatggtgccccttgg

SEQ ID NO: 10986 - DNA, 17 bp, Arabidopsis thaliana
aagatggtgtcttctcc

SEQ ID NO: 10987 - DNA, 17 bp, Arabidopsis thaliana
aagatgtaggacctttg

SEQ ID NO: 10988 - DNA, 17 bp, Arabidopsis thaliana
aagatgtatgctgctgt

SEQ ID NO: 10989 - DNA, 17 bp, Arabidopsis thaliana
aagatgtcagcagccaa

SEQ ID NO: 10990 - DNA, 17 bp, Arabidopsis thaliana
aagatgtccaacatata

SEQ ID NO: 10991 - DNA, 17 bp, Arabidopsis thaliana
aagatgtccaacttgtg

SEQ ID NO: 10992 - DNA, 17 bp, Arabidopsis thaliana
aagatgtccctgcggga

SEQ ID NO: 10993 - DNA, 17 bp, Arabidopsis thaliana
aagatgtcgtccagcgg

SEQ ID NO: 10994 - DNA, 17 bp, Arabidopsis thaliana
aagatgtcgtctgtcgt

SEQ ID NO: 10995 - DNA, 17 bp, Arabidopsis thaliana
aagatgtctaacgaact

SEQ ID NO: 10996 - DNA, 17 bp, Arabidopsis thaliana
aagatgtgcgttctcga

SEQ ID NO: 10997 - DNA, 17 bp, Arabidopsis thaliana
aagatgtgctgggttgg

SEQ ID NO: 10998 - DNA, 17 bp, Arabidopsis thaliana
aagatgtggcgtttcca

SEQ ID NO: 10999 - DNA, 17 bp, Arabidopsis thaliana
aagatgtgtctatgtgt

SEQ ID NO: 11000 - DNA, 17 bp, Arabidopsis thaliana
aagatgtgtggtggcca

SEQ ID NO: 11001 - DNA, 17 bp, Arabidopsis thaliana
aagatgttcagctacac

SEQ ID NO: 11002 - DNA, 17 bp, Arabidopsis thaliana
aagatgttctggccaca

SEQ ID NO: 11003 - DNA, 17 bp, Arabidopsis thaliana
aagattaaactcgaatc

SEQ ID NO: 11004 - DNA, 17 bp, Arabidopsis thaliana
aagattaaggagctacg

SEQ ID NO: 11005 - DNA, 17 bp, Arabidopsis thaliana
aagattaagggtctcgt

SEQ ID NO: 11006 - DNA, 17 bp, Arabidopsis thaliana
aagattaaggtcctgtt

SEQ ID NO: 11007 - DNA, 17 bp, Arabidopsis thaliana
aagattacaggttgcca

SEQ ID NO: 11008 - DNA, 17 bp, Arabidopsis thaliana
aagattagagcttctta

SEQ ID NO: 11009 - DNA, 17 bp, Arabidopsis thaliana
aagattagatcatcctc

SEQ ID NO: 11010 - DNA, 17 bp, Arabidopsis thaliana
aagattagcaagccaaa

SEQ ID NO: 11011 - DNA, 17 bp, Arabidopsis thaliana
aagattagcagctccct

SEQ ID NO: 11012 - DNA, 17 bp, Arabidopsis thaliana
aagattagcggatcgaa

SEQ ID NO: 11013 - DNA, 17 bp, Arabidopsis thaliana
aagattagctgacttcg

SEQ ID NO: 11014 - DNA, 17 bp, Arabidopsis thaliana
aagattagtaaccatgg

SEQ ID NO: 11015 - DNA, 17 bp, Arabidopsis thaliana
aagattagtgcttgcaa

SEQ ID NO: 11016 - DNA, 17 bp, Arabidopsis thaliana
aagattatacgtgcgtg

SEQ ID NO: 11017 - DNA, 17 bp, Arabidopsis thaliana
aagattatgccacgtgt

SEQ ID NO: 11018 - DNA, 17 bp, Arabidopsis thaliana
aagattatggctgttct

SEQ ID NO: 11019 - DNA, 17 bp, Arabidopsis thaliana
aagattatgtgccttca

SEQ ID NO: 11020 - DNA, 17 bp, Arabidopsis thaliana
aagattatttcctggat

SEQ ID NO: 11021 - DNA, 17 bp, Arabidopsis thaliana
aagattatttcttggat

SEQ ID NO: 11022 - DNA, 17 bp, Arabidopsis thaliana
aagattcaaggccagaa

SEQ ID NO: 11023 - DNA, 17 bp, Arabidopsis thaliana
aagattcaatcgcggtg

SEQ ID NO: 11024 - DNA, 17 bp, Arabidopsis thaliana
aagattcaatcgtgatc

SEQ ID NO: 11025 - DNA, 17 bp, Arabidopsis thaliana
aagattcaccgattctg

SEQ ID NO: 11026 - DNA, 17 bp, Arabidopsis thaliana
aagattcactggattgg

SEQ ID NO: 11027 - DNA, 17 bp, Arabidopsis thaliana
aagattcagatccgtct

SEQ ID NO: 11028 - DNA, 17 bp, Arabidopsis thaliana
aagattcagtttaatct

SEQ ID NO: 11029 - DNA, 17 bp, Arabidopsis thaliana
aagattcatgcaacgcc

SEQ ID NO: 11030 - DNA, 17 bp, Arabidopsis thaliana
aagattcatggctcaag

SEQ ID NO: 11031 - DNA, 17 bp, Arabidopsis thaliana
aagattccagaggagct

SEQ ID NO: 11032 - DNA, 17 bp, Arabidopsis thaliana
aagattccataatcacc

SEQ ID NO: 11033 - DNA, 17 bp, Arabidopsis thaliana
aagattccccgatttgt

SEQ ID NO: 11034 - DNA, 17 bp, Arabidopsis thaliana
aagattccgctatcgtg

SEQ ID NO: 11035 - DNA, 17 bp, Arabidopsis thaliana
aagattccggacctcgc

SEQ ID NO: 11036 - DNA, 17 bp, Arabidopsis thaliana
aagattccggctatcta

SEQ ID NO: 11037 - DNA, 17 bp, Arabidopsis thaliana
aagattcctaaagggcg

SEQ ID NO: 11038 - DNA, 17 bp, Arabidopsis thaliana
aagattcctctcaacgt

SEQ ID NO: 11039 - DNA, 17 bp, Arabidopsis thaliana
aagattcctctggattg

SEQ ID NO: 11040 - DNA, 17 bp, Arabidopsis thaliana
aagattcgcaatggcca

SEQ ID NO: 11041 - DNA, 17 bp, Arabidopsis thaliana
aagattcgcaatggccc

SEQ ID NO: 11042 - DNA, 17 bp, Arabidopsis thaliana
aagattcgcactggatt

SEQ ID NO: 11043 - DNA, 17 bp, Arabidopsis thaliana
aagattcgcctagggtc

SEQ ID NO: 11044 - DNA, 17 bp, Arabidopsis thaliana
aagattcgggatggctc

SEQ ID NO: 11045 - DNA, 17 bp, Arabidopsis thaliana
aagattcgtttgtcgtg

SEQ ID NO: 11046 - DNA, 17 bp, Arabidopsis thaliana
aagattctacacgctta

SEQ ID NO: 11047 - DNA, 17 bp, Arabidopsis thaliana
aagattctatgtttcgg

SEQ ID NO: 11048 - DNA, 17 bp, Arabidopsis thaliana
aagattctccggcgaga

SEQ ID NO: 11049 - DNA, 17 bp, Arabidopsis thaliana
aagattctgggccgaat

SEQ ID NO: 11050 - DNA, 17 bp, Arabidopsis thaliana
aagattctgttgcggtt

SEQ ID NO: 11051 - DNA, 17 bp, Arabidopsis thaliana
aagattctttctatcgc

SEQ ID NO: 11052 - DNA, 17 bp, Arabidopsis thaliana
aagattgaaaggttcac

SEQ ID NO: 11053 - DNA, 17 bp, Arabidopsis thaliana
aagattgaactgcttgt

SEQ ID NO: 11054 - DNA, 17 bp, Arabidopsis thaliana
aagattgaatctgtgat

SEQ ID NO: 11055 - DNA, 17 bp, Arabidopsis thaliana
aagattgacaaatagat

SEQ ID NO: 11056 - DNA, 17 bp, Arabidopsis thaliana
aagattgacaaattggt

SEQ ID NO: 11057 - DNA, 17 bp, Arabidopsis thaliana
aagattgaccaatcatc

SEQ ID NO: 11058 - DNA, 17 bp, Arabidopsis thaliana
aagattgaccaatctta

SEQ ID NO: 11059 - DNA, 17 bp, Arabidopsis thaliana
aagattgaggagcaggc

SEQ ID NO: 11060 - DNA, 17 bp, Arabidopsis thaliana
aagattgagtttggctc

SEQ ID NO: 11061 - DNA, 17 bp, Arabidopsis thaliana
aagattgatgatcacca

SEQ ID NO: 11062 - DNA, 17 bp, Arabidopsis thaliana
aagattgatgtaactgg

SEQ ID NO: 11063 - DNA, 17 bp, Arabidopsis thaliana
aagattgcaatcttcag

SEQ ID NO: 11064 - DNA, 17 bp, Arabidopsis thaliana
aagattgcctaaactct

SEQ ID NO: 11065 - DNA, 17 bp, Arabidopsis thaliana
aagattgctctcgtgcc

SEQ ID NO: 11066 - DNA, 17 bp, Arabidopsis thaliana
aagattgcttcagacct

SEQ ID NO: 11067 - DNA, 17 bp, Arabidopsis thaliana
aagattgcttcaggcct

SEQ ID NO: 11068 - DNA, 17 bp, Arabidopsis thaliana
aagattggctcgtttga

SEQ ID NO: 11069 - DNA, 17 bp, Arabidopsis thaliana
aagattgggttgcggtt

SEQ ID NO: 11070 - DNA, 17 bp, Arabidopsis thaliana
aagattggtctcgtgcc

SEQ ID NO: 11071 - DNA, 17 bp, Arabidopsis thaliana
aagattggttcttcgtg

SEQ ID NO: 11072 - DNA, 17 bp, Arabidopsis thaliana
aagattggttgcgttga

SEQ ID NO: 11073 - DNA, 17 bp, Arabidopsis thaliana
aagattgtccagggata

SEQ ID NO: 11074 - DNA, 17 bp, Arabidopsis thaliana
aagattgtctgccagac

SEQ ID NO: 11075 - DNA, 17 bp, Arabidopsis thaliana
aagattgtgccacgtgt

SEQ ID NO: 11076 - DNA, 17 bp, Arabidopsis thaliana
aagattgtgccatgtgt

SEQ ID NO: 11077 - DNA, 17 bp, Arabidopsis thaliana
aagattgtggtcccaga

SEQ ID NO: 11078 - DNA, 17 bp, Arabidopsis thaliana
aagattgtggtccgaga

SEQ ID NO: 11079 - DNA, 17 bp, Arabidopsis thaliana
aagattgtttagggctg

SEQ ID NO: 11080 - DNA, 17 bp, Arabidopsis thaliana
aagattgtttgatgagg

SEQ ID NO: 11081 - DNA, 17 bp, Arabidopsis thaliana
aagatttacgactggtt

SEQ ID NO: 11082 - DNA, 17 bp, Arabidopsis thaliana
aagatttactttctcag

SEQ ID NO: 11083 - DNA, 17 bp, Arabidopsis thaliana
aagatttagggaatgcc

SEQ ID NO: 11084 - DNA, 17 bp, Arabidopsis thaliana
aagatttagggatgaag

SEQ ID NO: 11085 - DNA, 17 bp, Arabidopsis thaliana
aagatttaggttagtta

SEQ ID NO: 11086 - DNA, 17 bp, Arabidopsis thaliana
aagatttcacccgtggt

SEQ ID NO: 11087 - DNA, 17 bp, Arabidopsis thaliana
aagatttcctttctcag

SEQ ID NO: 11088 - DNA, 17 bp, Arabidopsis thaliana
aagatttcgggtcaggt

SEQ ID NO: 11089 - DNA, 17 bp, Arabidopsis thaliana
aagatttcgggtcgggt

SEQ ID NO: 11090 - DNA, 17 bp, Arabidopsis thaliana
aagatttcgtcgcattg

SEQ ID NO: 11091 - DNA, 17 bp, Arabidopsis thaliana
aagatttcgtgttttgg

SEQ ID NO: 11092 - DNA, 17 bp, Arabidopsis thaliana
aagatttctctcgcagt

SEQ ID NO: 11093 - DNA, 17 bp, Arabidopsis thaliana
aagatttgaggcagtat

SEQ ID NO: 11094 - DNA, 17 bp, Arabidopsis thaliana
aagatttgatcctagcc

SEQ ID NO: 11095 - DNA, 17 bp, Arabidopsis thaliana
aagatttgcccttgcgg

SEQ ID NO: 11096 - DNA, 17 bp, Arabidopsis thaliana
aagatttggacccatgg

SEQ ID NO: 11097 - DNA, 17 bp, Arabidopsis thaliana
aagatttggacccatgt

SEQ ID NO: 11098 - DNA, 17 bp, Arabidopsis thaliana
aagatttggttgcggtt

SEQ ID NO: 11099 - DNA, 17 bp, Arabidopsis thaliana
aagatttgtgtagtaac

SEQ ID NO: 11100 - DNA, 17 bp, Arabidopsis thaliana
aagatttgtgttagtgg

SEQ ID NO: 11101 - DNA, 17 bp, Arabidopsis thaliana
aagatttgttgctggat

SEQ ID NO: 11102 - DNA, 17 bp, Arabidopsis thaliana
aagattttaggacagac

SEQ ID NO: 11103 - DNA, 17 bp, Arabidopsis thaliana
aagattttaggtcgggt

SEQ ID NO: 11104 - DNA, 17 bp, Arabidopsis thaliana
aagattttcgttatctt

SEQ ID NO: 11105 - DNA, 17 bp, Arabidopsis thaliana
aagattttgccaagtat

SEQ ID NO: 11106 - DNA, 17 bp, Arabidopsis thaliana
aagattttggaactgtc

SEQ ID NO: 11107 - DNA, 17 bp, Arabidopsis thaliana
aagattttggatcaggt

SEQ ID NO: 11108 - DNA, 17 bp, Arabidopsis thaliana
aagattttgttgggcct

SEQ ID NO: 11109 - DNA, 17 bp, Arabidopsis thaliana
aagatttttcggcttca

SEQ ID NO: 11110 - DNA, 17 bp, Arabidopsis thaliana
aagatttttgactgtga

SEQ ID NO: 11111 - DNA, 17 bp, Arabidopsis thaliana
aagatttttgcgtcaac

SEQ ID NO: 11112 - DNA, 17 bp, Arabidopsis thaliana
aagatttttgtgccggt

SEQ ID NO: 11113 - DNA, 17 bp, Arabidopsis thaliana
aagattttttggtccgt

SEQ ID NO: 11114 - DNA, 17 bp, Arabidopsis thaliana
aagcaaaccataaaggt

SEQ ID NO: 11115 - DNA, 17 bp, Arabidopsis thaliana
aagcaaacgaacaacct

SEQ ID NO: 11116 - DNA, 17 bp, Arabidopsis thaliana
aagcaaacgaacaactt

SEQ ID NO: 11117 - DNA, 17 bp, Arabidopsis thaliana
aagcaaacttctccagc

SEQ ID NO: 11118 - DNA, 17 bp, Arabidopsis thaliana
aagcaaagctgtcagtg

SEQ ID NO: 11119 - DNA, 17 bp, Arabidopsis thaliana
aagcaaagtcttcatgt

SEQ ID NO: 11120 - DNA, 17 bp, Arabidopsis thaliana
aagcaaattgaaacaca

SEQ ID NO: 11121 - DNA, 17 bp, Arabidopsis thaliana
aagcaaattgaaaccca

SEQ ID NO: 11122 - DNA, 17 bp, Arabidopsis thaliana
aagcaacaagacggtaa

SEQ ID NO: 11123 - DNA, 17 bp, Arabidopsis thaliana
aagcaacaagacggtac

SEQ ID NO: 11124 - DNA, 17 bp, Arabidopsis thaliana
aagcaacagacgacctg

SEQ ID NO: 11125 - DNA, 17 bp, Arabidopsis thaliana
aagcaacagactgtgca

SEQ ID NO: 11126 - DNA, 17 bp, Arabidopsis thaliana
aagcaacatccgctgat

SEQ ID NO: 11127 - DNA, 17 bp, Arabidopsis thaliana
aagcaaccagcaacttg

SEQ ID NO: 11128 - DNA, 17 bp, Arabidopsis thaliana
aagcaaccatcgagcag

SEQ ID NO: 11129 - DNA, 17 bp, Arabidopsis thaliana
aagcaaccctagggcaa

SEQ ID NO: 11130 - DNA, 17 bp, Arabidopsis thaliana
aagcaaccttggagcaa

SEQ ID NO: 11131 - DNA, 17 bp, Arabidopsis thaliana
aagcaacgaccagaact

SEQ ID NO: 11132 - DNA, 17 bp, Arabidopsis thaliana
aagcaacgtaagctgtc

SEQ ID NO: 11133 - DNA, 17 bp, Arabidopsis thaliana
aagcaacgtgccgctgc

SEQ ID NO: 11134 - DNA, 17 bp, Arabidopsis thaliana
aagcaactcctgcagcg

SEQ ID NO: 11135 - DNA, 17 bp, Arabidopsis thaliana
aagcaactctctgtgtt

SEQ ID NO: 11136 - DNA, 17 bp, Arabidopsis thaliana
aagcaactgaagctacg

SEQ ID NO: 11137 - DNA, 17 bp, Arabidopsis thaliana
aagcaactgtcgatact

SEQ ID NO: 11138 - DNA, 17 bp, Arabidopsis thaliana
aagcaactgtggttttc

SEQ ID NO: 11139 - DNA, 17 bp, Arabidopsis thaliana
aagcaacttgcatttct

SEQ ID NO: 11140 - DNA, 17 bp, Arabidopsis thaliana
aagcaagaacaggtttt

SEQ ID NO: 11141 - DNA, 17 bp, Arabidopsis thaliana
aagcaagaaccatcgat

SEQ ID NO: 11142 - DNA, 17 bp, Arabidopsis thaliana
aagcaagaaccatggat

SEQ ID NO: 11143 - DNA, 17 bp, Arabidopsis thaliana
aagcaagaagaatctac

SEQ ID NO: 11144 - DNA, 17 bp, Arabidopsis thaliana
aagcaagaagaccctgt

SEQ ID NO: 11145 - DNA, 17 bp, Arabidopsis thaliana
aagcaagacaacgctgg

SEQ ID NO: 11146 - DNA, 17 bp, Arabidopsis thaliana
aagcaagaccaccattg

SEQ ID NO: 11147 - DNA, 17 bp, Arabidopsis thaliana
aagcaagaccctgttga

SEQ ID NO: 11148 - DNA, 17 bp, Arabidopsis thaliana
aagcaagacgggcttct

SEQ ID NO: 11149 - DNA, 17 bp, Arabidopsis thaliana
aagcaagactaatcgaa

SEQ ID NO: 11150 - DNA, 17 bp, Arabidopsis thaliana
aagcaagactattgggc

SEQ ID NO: 11151 - DNA, 17 bp, Arabidopsis thaliana
aagcaagactcggctga

SEQ ID NO: 11152 - DNA, 17 bp, Arabidopsis thaliana
aagcaagactctggtcg

SEQ ID NO: 11153 - DNA, 17 bp, Arabidopsis thaliana
aagcaagactttagaca

SEQ ID NO: 11154 - DNA, 17 bp, Arabidopsis thaliana
aagcaagagatgtttca

SEQ ID NO: 11155 - DNA, 17 bp, Arabidopsis thaliana
aagcaagataacgcagg

SEQ ID NO: 11156 - DNA, 17 bp, Arabidopsis thaliana
aagcaagatcagctcga

SEQ ID NO: 11157 - DNA, 17 bp, Arabidopsis thaliana
aagcaagatcagggaca

SEQ ID NO: 11158 - DNA, 17 bp, Arabidopsis thaliana
aagcaagatccggttgc

SEQ ID NO: 11159 - DNA, 17 bp, Arabidopsis thaliana
aagcaagatccggttgt

SEQ ID NO: 11160 - DNA, 17 bp, Arabidopsis thaliana
aagcaagatcgggttgc

SEQ ID NO: 11161 - DNA, 17 bp, Arabidopsis thaliana
aagcaagatctcctgca

SEQ ID NO: 11162 - DNA, 17 bp, Arabidopsis thaliana
aagcaagatcttaaacc

SEQ ID NO: 11163 - DNA, 17 bp, Arabidopsis thaliana
aagcaagatcttcatgg

SEQ ID NO: 11164 - DNA, 17 bp, Arabidopsis thaliana
aagcaagatctttgacc

SEQ ID NO: 11165 - DNA, 17 bp, Arabidopsis thaliana
aagcaagattcaccgat

SEQ ID NO: 11166 - DNA, 17 bp, Arabidopsis thaliana
aagcaagattctatgtt

SEQ ID NO: 11167 - DNA, 17 bp, Arabidopsis thaliana
aagcaagattgtctgcc

SEQ ID NO: 11168 - DNA, 17 bp, Arabidopsis thaliana
aagcaagcaaagctgtc

SEQ ID NO: 11169 - DNA, 17 bp, Arabidopsis thaliana
aagcaagcactctacgc

SEQ ID NO: 11170 - DNA, 17 bp, Arabidopsis thaliana
aagcaagcactctgctg

SEQ ID NO: 11171 - DNA, 17 bp, Arabidopsis thaliana
aagcaagcacttgttgc

SEQ ID NO: 11172 - DNA, 17 bp, Arabidopsis thaliana
aagcaagcagcagatcg

SEQ ID NO: 11173 - DNA, 17 bp, Arabidopsis thaliana
aagcaagcatagttagc

SEQ ID NO: 11174 - DNA, 17 bp, Arabidopsis thaliana
aagcaagcattacgatg

SEQ ID NO: 11175 - DNA, 17 bp, Arabidopsis thaliana
aagcaagccagtgaaat

SEQ ID NO: 11176 - DNA, 17 bp, Arabidopsis thaliana
aagcaagcccaggttca

SEQ ID NO: 11177 - DNA, 17 bp, Arabidopsis thaliana
aagcaagcccgtcaatt

SEQ ID NO: 11178 - DNA, 17 bp, Arabidopsis thaliana
aagcaagcctacgctct

SEQ ID NO: 11179 - DNA, 17 bp, Arabidopsis thaliana
aagcaagcctcaacttt

SEQ ID NO: 11180 - DNA, 17 bp, Arabidopsis thaliana
aagcaagcctcttggtc

SEQ ID NO: 11181 - DNA, 17 bp, Arabidopsis thaliana
aagcaagccttgctctc

SEQ ID NO: 11182 - DNA, 17 bp, Arabidopsis thaliana
aagcaagcgaaacttag

SEQ ID NO: 11183 - DNA, 17 bp, Arabidopsis thaliana
aagcaagcgaggtaaac

SEQ ID NO: 11184 - DNA, 17 bp, Arabidopsis thaliana
aagcaagcgatctgccg

SEQ ID NO: 11185 - DNA, 17 bp, Arabidopsis thaliana
aagcaagcggatggggg

SEQ ID NO: 11186 - DNA, 17 bp, Arabidopsis thaliana
aagcaagcgggttgcaa

SEQ ID NO: 11187 - DNA, 17 bp, Arabidopsis thaliana
aagcaagcgtatcgtga

SEQ ID NO: 11188 - DNA, 17 bp, Arabidopsis thaliana
aagcaagcgtcaaatgc

SEQ ID NO: 11189 - DNA, 17 bp, Arabidopsis thaliana
aagcaagcgtcctcagc

SEQ ID NO: 11190 - DNA, 17 bp, Arabidopsis thaliana
aagcaagcgtttgcggt

SEQ ID NO: 11191 - DNA, 17 bp, Arabidopsis thaliana
aagcaagctaccgtgcg

SEQ ID NO: 11192 - DNA, 17 bp, Arabidopsis thaliana
aagcaagctcaaaattt

SEQ ID NO: 11193 - DNA, 17 bp, Arabidopsis thaliana
aagcaagctcaaactca

SEQ ID NO: 11194 - DNA, 17 bp, Arabidopsis thaliana
aagcaagctcaggaggg

SEQ ID NO: 11195 - DNA, 17 bp, Arabidopsis thaliana
aagcaagctcgtagttg

SEQ ID NO: 11196 - DNA, 17 bp, Arabidopsis thaliana
aagcaagctgattggcg

SEQ ID NO: 11197 - DNA, 17 bp, Arabidopsis thaliana
aagcaagctgcgcaatc

SEQ ID NO: 11198 - DNA, 17 bp, Arabidopsis thaliana
aagcaagcttagaggtc

SEQ ID NO: 11199 - DNA, 17 bp, Arabidopsis thaliana
aagcaagcttagcctag

SEQ ID NO: 11200 - DNA, 17 bp, Arabidopsis thaliana
aagcaagcttatgttct

SEQ ID NO: 11201 - DNA, 17 bp, Arabidopsis thaliana
aagcaagcttcgcgtag

SEQ ID NO: 11202 - DNA, 17 bp, Arabidopsis thaliana
aagcaagcttctcccgg

SEQ ID NO: 11203 - DNA, 17 bp, Arabidopsis thaliana
aagcaagctttgtgtta

SEQ ID NO: 11204 - DNA, 17 bp, Arabidopsis thaliana
aagcaaggaagtgtgct

SEQ ID NO: 11205 - DNA, 17 bp, Arabidopsis thaliana
aagcaaggacacgttta

SEQ ID NO: 11206 - DNA, 17 bp, Arabidopsis thaliana
aagcaaggacatgggcc

SEQ ID NO: 11207 - DNA, 17 bp, Arabidopsis thaliana
aagcaaggacctccgtg

SEQ ID NO: 11208 - DNA, 17 bp, Arabidopsis thaliana
aagcaaggacgggttgg

SEQ ID NO: 11209 - DNA, 17 bp, Arabidopsis thaliana
aagcaaggactatcttt

SEQ ID NO: 11210 - DNA, 17 bp, Arabidopsis thaliana
aagcaaggattatcgca

SEQ ID NO: 11211 - DNA, 17 bp, Arabidopsis thaliana
aagcaaggcaaagtgcc

SEQ ID NO: 11212 - DNA, 17 bp, Arabidopsis thaliana
aagcaaggcacgtctgc

SEQ ID NO: 11213 - DNA, 17 bp, Arabidopsis thaliana
aagcaaggcagccttta

SEQ ID NO: 11214 - DNA, 17 bp, Arabidopsis thaliana
aagcaaggccaatgact

SEQ ID NO: 11215 - DNA, 17 bp, Arabidopsis thaliana
aagcaaggcccatgttc

SEQ ID NO: 11216 - DNA, 17 bp, Arabidopsis thaliana
aagcaaggccctgttcg

SEQ ID NO: 11217 - DNA, 17 bp, Arabidopsis thaliana
aagcaaggctccagttt

SEQ ID NO: 11218 - DNA, 17 bp, Arabidopsis thaliana
aagcaaggctctgttcg

SEQ ID NO: 11219 - DNA, 17 bp, Arabidopsis thaliana
aagcaaggcttccttta

SEQ ID NO: 11220 - DNA, 17 bp, Arabidopsis thaliana
aagcaagggttaggtcc

SEQ ID NO: 11221 - DNA, 17 bp, Arabidopsis thaliana
aagcaaggtatgttggc

SEQ ID NO: 11222 - DNA, 17 bp, Arabidopsis thaliana
aagcaaggtctctccaa

SEQ ID NO: 11223 - DNA, 17 bp, Arabidopsis thaliana
aagcaaggtgcgctgga

SEQ ID NO: 11224 - DNA, 17 bp, Arabidopsis thaliana
aagcaaggtgtccacgg

SEQ ID NO: 11225 - DNA, 17 bp, Arabidopsis thaliana
aagcaaggttcacgggg

SEQ ID NO: 11226 - DNA, 17 bp, Arabidopsis thaliana
aagcaaggttgtcaacc

SEQ ID NO: 11227 - DNA, 17 bp, Arabidopsis thaliana
aagcaagtcaacacttc

SEQ ID NO: 11228 - DNA, 17 bp, Arabidopsis thaliana
aagcaagtcaagttcca

SEQ ID NO: 11229 - DNA, 17 bp, Arabidopsis thaliana
aagcaagtcaatccatg

SEQ ID NO: 11230 - DNA, 17 bp, Arabidopsis thaliana
aagcaagtccaccattt

SEQ ID NO: 11231 - DNA, 17 bp, Arabidopsis thaliana
aagcaagtcccaacttg

SEQ ID NO: 11232 - DNA, 17 bp, Arabidopsis thaliana
aagcaagtccggtgcca

SEQ ID NO: 11233 - DNA, 17 bp, Arabidopsis thaliana
aagcaagtcctcgtgtt

SEQ ID NO: 11234 - DNA, 17 bp, Arabidopsis thaliana
aagcaagtctctgcttc

SEQ ID NO: 11235 - DNA, 17 bp, Arabidopsis thaliana
aagcaagtctgattttg

SEQ ID NO: 11236 - DNA, 17 bp, Arabidopsis thaliana
aagcaagtctgtcagtt

SEQ ID NO: 11237 - DNA, 17 bp, Arabidopsis thaliana
aagcaagtgatgtcggt

SEQ ID NO: 11238 - DNA, 17 bp, Arabidopsis thaliana
aagcaagtgggctggcc

SEQ ID NO: 11239 - DNA, 17 bp, Arabidopsis thaliana
aagcaagtgttcctcga

SEQ ID NO: 11240 - DNA, 17 bp, Arabidopsis thaliana
aagcaagtgttgtggat

SEQ ID NO: 11241 - DNA, 17 bp, Arabidopsis thaliana
aagcaagttactcagtt

SEQ ID NO: 11242 - DNA, 17 bp, Arabidopsis thaliana
aagcaagttggtactga

SEQ ID NO: 11243 - DNA, 17 bp, Arabidopsis thaliana
aagcaagtttccgtcaa

SEQ ID NO: 11244 - DNA, 17 bp, Arabidopsis thaliana
aagcaagtttcgttgac

SEQ ID NO: 11245 - DNA, 17 bp, Arabidopsis thaliana
aagcaagtttctccgaa

SEQ ID NO: 11246 - DNA, 17 bp, Arabidopsis thaliana
aagcaagtttgtaatgt

SEQ ID NO: 11247 - DNA, 17 bp, Arabidopsis thaliana
aagcaagtttgttcacc

SEQ ID NO: 11248 - DNA, 17 bp, Arabidopsis thaliana
aagcaagttttgaagga

SEQ ID NO: 11249 - DNA, 17 bp, Arabidopsis thaliana
aagcaagttttgcagga

SEQ ID NO: 11250 - DNA, 17 bp, Arabidopsis thaliana
aagcaagttttgttgac

SEQ ID NO: 11251 - DNA, 17 bp, Arabidopsis thaliana
aagcaagttttgttgat

SEQ ID NO: 11252 - DNA, 17 bp, Arabidopsis thaliana
aagcaataaaatctgtc

SEQ ID NO: 11253 - DNA, 17 bp, Arabidopsis thaliana
aagcaatctgaattcag

SEQ ID NO: 11254 - DNA, 17 bp, Arabidopsis thaliana
aagcaatctgggcttga

SEQ ID NO: 11255 - DNA, 17 bp, Arabidopsis thaliana
aagcaatgtctaatggg

SEQ ID NO: 11256 - DNA, 17 bp, Arabidopsis thaliana
aagcaattcagtccata

SEQ ID NO: 11257 - DNA, 17 bp, Arabidopsis thaliana
aagcaattgtcgtaacg

SEQ ID NO: 11258 - DNA, 17 bp, Arabidopsis thaliana
aagcacaacgcggtaca

SEQ ID NO: 11259 - DNA, 17 bp, Arabidopsis thaliana
aagcacaaggtcgccac

SEQ ID NO: 11260 - DNA, 17 bp, Arabidopsis thaliana
aagcacaaggtctcggt

SEQ ID NO: 11261 - DNA, 17 bp, Arabidopsis thaliana
aagcacacttaactgcg

SEQ ID NO: 11262 - DNA, 17 bp, Arabidopsis thaliana
aagcacaggagggatag

SEQ ID NO: 11263 - DNA, 17 bp, Arabidopsis thaliana
aagcacataacgtgagt

SEQ ID NO: 11264 - DNA, 17 bp, Arabidopsis thaliana
aagcacatccctcttga

SEQ ID NO: 11265 - DNA, 17 bp, Arabidopsis thaliana
aagcacatcggtttcta

SEQ ID NO: 11266 - DNA, 17 bp, Arabidopsis thaliana
aagcacatctaccatct

SEQ ID NO: 11267 - DNA, 17 bp, Arabidopsis thaliana
aagcacatctattatct

SEQ ID NO: 11268 - DNA, 17 bp, Arabidopsis thaliana
aagcacatggcccgtta

SEQ ID NO: 11269 - DNA, 17 bp, Arabidopsis thaliana
aagcaccaactttgggt

SEQ ID NO: 11270 - DNA, 17 bp, Arabidopsis thaliana
aagcaccacaaattgcg

SEQ ID NO: 11271 - DNA, 17 bp, Arabidopsis thaliana
aagcaccagatagacca

SEQ ID NO: 11272 - DNA, 17 bp, Arabidopsis thaliana
aagcaccaggaccagac

SEQ ID NO: 11273 - DNA, 17 bp, Arabidopsis thaliana
aagcaccaggagtggag

SEQ ID NO: 11274 - DNA, 17 bp, Arabidopsis thaliana
aagcacccttaactgcg

SEQ ID NO: 11275 - DNA, 17 bp, Arabidopsis thaliana
aagcaccgagagtagtt

SEQ ID NO: 11276 - DNA, 17 bp, Arabidopsis thaliana
aagcaccggcggcacaa

SEQ ID NO: 11277 - DNA, 17 bp, Arabidopsis thaliana
aagcacctaactggaac

SEQ ID NO: 11278 - DNA, 17 bp, Arabidopsis thaliana
aagcacctcaaggactg

SEQ ID NO: 11279 - DNA, 17 bp, Arabidopsis thaliana
aagcacgaactttcgaa

SEQ ID NO: 11280 - DNA, 17 bp, Arabidopsis thaliana
aagcacgcttaaatgcg

SEQ ID NO: 11281 - DNA, 17 bp, Arabidopsis thaliana
aagcacgcttaactatg

SEQ ID NO: 11282 - DNA, 17 bp, Arabidopsis thaliana
aagcacgcttaactccg

SEQ ID NO: 11283 - DNA, 17 bp, Arabidopsis thaliana
aagcacgcttaactgcg

SEQ ID NO: 11284 - DNA, 17 bp, Arabidopsis thaliana
aagcacgcttaactgtg

SEQ ID NO: 11285 - DNA, 17 bp, Arabidopsis thaliana
aagcacggcggcggcgg

SEQ ID NO: 11286 - DNA, 17 bp, Arabidopsis thaliana
aagcacgggattatgcg

SEQ ID NO: 11287 - DNA, 17 bp, Arabidopsis thaliana
aagcacggtgcggttca

SEQ ID NO: 11288 - DNA, 17 bp, Arabidopsis thaliana
aagcacgtctgcctggg

SEQ ID NO: 11289 - DNA, 17 bp, Arabidopsis thaliana
aagcactaactttgggt

SEQ ID NO: 11290 - DNA, 17 bp, Arabidopsis thaliana
aagcactactttctttc

SEQ ID NO: 11291 - DNA, 17 bp, Arabidopsis thaliana
aagcactccacgctagg

SEQ ID NO: 11292 - DNA, 17 bp, Arabidopsis thaliana
aagcactcctcatccgt

SEQ ID NO: 11293 - DNA, 17 bp, Arabidopsis thaliana
aagcactcgaacccatg

SEQ ID NO: 11294 - DNA, 17 bp, Arabidopsis thaliana
aagcactctacgcagcg

SEQ ID NO: 11295 - DNA, 17 bp, Arabidopsis thaliana
aagcactctgctgggcc

SEQ ID NO: 11296 - DNA, 17 bp, Arabidopsis thaliana
aagcactgctctatctg

SEQ ID NO: 11297 - DNA, 17 bp, Arabidopsis thaliana
aagcactgctctttctg

SEQ ID NO: 11298 - DNA, 17 bp, Arabidopsis thaliana
aagcactgttcggtgcg

SEQ ID NO: 11299 - DNA, 17 bp, Arabidopsis thaliana
aagcactgtttcggtgc

SEQ ID NO: 11300 - DNA, 17 bp, Arabidopsis thaliana
aagcacttgctccttgc

SEQ ID NO: 11301 - DNA, 17 bp, Arabidopsis thaliana
aagcacttggcgagtaa

SEQ ID NO: 11302 - DNA, 17 bp, Arabidopsis thaliana
aagcacttgttgcttct

SEQ ID NO: 11303 - DNA, 17 bp, Arabidopsis thaliana
aagcactttctgattcc

SEQ ID NO: 11304 - DNA, 17 bp, Arabidopsis thaliana
aagcagacaagccaatc

SEQ ID NO: 11305 - DNA, 17 bp, Arabidopsis thaliana
aagcagacagagaacaa

SEQ ID NO: 11306 - DNA, 17 bp, Arabidopsis thaliana
aagcagacagatcaacg

SEQ ID NO: 11307 - DNA, 17 bp, Arabidopsis thaliana
aagcagactgagagctc

SEQ ID NO: 11308 - DNA, 17 bp, Arabidopsis thaliana
aagcagactgcggttac

SEQ ID NO: 11309 - DNA, 17 bp, Arabidopsis thaliana
aagcagagaaacaacct

SEQ ID NO: 11310 - DNA, 17 bp, Arabidopsis thaliana
aagcagagccgagcata

SEQ ID NO: 11311 - DNA, 17 bp, Arabidopsis thaliana
aagcagagggaattggc

SEQ ID NO: 11312 - DNA, 17 bp, Arabidopsis thaliana
aagcagatcttgctcct

SEQ ID NO: 11313 - DNA, 17 bp, Arabidopsis thaliana
aagcagattaccatcac

SEQ ID NO: 11314 - DNA, 17 bp, Arabidopsis thaliana
aagcagattaccatgac

SEQ ID NO: 11315 - DNA, 17 bp, Arabidopsis thaliana
aagcagcaacaggcaac

SEQ ID NO: 11316 - DNA, 17 bp, Arabidopsis thaliana
aagcagcagatccgagc

SEQ ID NO: 11317 - DNA, 17 bp, Arabidopsis thaliana
aagcagcagatcgatct

SEQ ID NO: 11318 - DNA, 17 bp, Arabidopsis thaliana
aagcagcagattgatct

SEQ ID NO: 11319 - DNA, 17 bp, Arabidopsis thaliana
aagcagccaccatttaa

SEQ ID NO: 11320 - DNA, 17 bp, Arabidopsis thaliana
aagcagccctttgtcgc

SEQ ID NO: 11321 - DNA, 17 bp, Arabidopsis thaliana
aagcagcctccttggtg

SEQ ID NO: 11322 - DNA, 17 bp, Arabidopsis thaliana
aagcagcgaccgactga

SEQ ID NO: 11323 - DNA, 17 bp, Arabidopsis thaliana
aagcagctactgtcatc

SEQ ID NO: 11324 - DNA, 17 bp, Arabidopsis thaliana
aagcagctcaggattgg

SEQ ID NO: 11325 - DNA, 17 bp, Arabidopsis thaliana
aagcagctcatcattgt

SEQ ID NO: 11326 - DNA, 17 bp, Arabidopsis thaliana
aagcagctccgacgccg

SEQ ID NO: 11327 - DNA, 17 bp, Arabidopsis thaliana
aagcagctgggccatta

SEQ ID NO: 11328 - DNA, 17 bp, Arabidopsis thaliana
aagcagctgttgagcca

SEQ ID NO: 11329 - DNA, 17 bp, Arabidopsis thaliana
aagcagctgttgagcct

SEQ ID NO: 11330 - DNA, 17 bp, Arabidopsis thaliana
aagcagctgtttacact

SEQ ID NO: 11331 - DNA, 17 bp, Arabidopsis thaliana
aagcaggacaatggaac

SEQ ID NO: 11332 - DNA, 17 bp, Arabidopsis thaliana
aagcaggacaatggact

SEQ ID NO: 11333 - DNA, 17 bp, Arabidopsis thaliana
aagcaggacaatggatc

SEQ ID NO: 11334 - DNA, 17 bp, Arabidopsis thaliana
aagcaggaccaaccagg

SEQ ID NO: 11335 - DNA, 17 bp, Arabidopsis thaliana
aagcaggaccgtggtgt

SEQ ID NO: 11336 - DNA, 17 bp, Arabidopsis thaliana
aagcaggactgtatcca

SEQ ID NO: 11337 - DNA, 17 bp, Arabidopsis thaliana
aagcaggagccctaccg

SEQ ID NO: 11338 - DNA, 17 bp, Arabidopsis thaliana
aagcaggaggagaagca

SEQ ID NO: 11339 - DNA, 17 bp, Arabidopsis thaliana
aagcaggaggatcttgg

SEQ ID NO: 11340 - DNA, 17 bp, Arabidopsis thaliana
aagcaggaggatttttc

SEQ ID NO: 11341 - DNA, 17 bp, Arabidopsis thaliana
aagcaggagggatagcg

SEQ ID NO: 11342 - DNA, 17 bp, Arabidopsis thaliana
aagcaggatcaaacata

SEQ ID NO: 11343 - DNA, 17 bp, Arabidopsis thaliana
aagcaggcattatcgaa

SEQ ID NO: 11344 - DNA, 17 bp, Arabidopsis thaliana
aagcaggcctattgcgt

SEQ ID NO: 11345 - DNA, 17 bp, Arabidopsis thaliana
aagcaggctcggcttag

SEQ ID NO: 11346 - DNA, 17 bp, Arabidopsis thaliana
aagcagggcaggccctg

SEQ ID NO: 11347 - DNA, 17 bp, Arabidopsis thaliana
aagcaggtaagctgtat

SEQ ID NO: 11348 - DNA, 17 bp, Arabidopsis thaliana
aagcaggtctctacata

SEQ ID NO: 11349 - DNA, 17 bp, Arabidopsis thaliana
aagcaggtctctccata

SEQ ID NO: 11350 - DNA, 17 bp, Arabidopsis thaliana
aagcaggtctttttggg

SEQ ID NO: 11351 - DNA, 17 bp, Arabidopsis thaliana
aagcaggttggcccatc

SEQ ID NO: 11352 - DNA, 17 bp, Arabidopsis thaliana
aagcaggtttgcccgag

SEQ ID NO: 11353 - DNA, 17 bp, Arabidopsis thaliana
aagcaggtttggccctt

SEQ ID NO: 11354 - DNA, 17 bp, Arabidopsis thaliana
aagcagtacatgcccta

SEQ ID NO: 11355 - DNA, 17 bp, Arabidopsis thaliana
aagcagtccgctctaac

SEQ ID NO: 11356 - DNA, 17 bp, Arabidopsis thaliana
aagcagtccgctcttac

SEQ ID NO: 11357 - DNA, 17 bp, Arabidopsis thaliana
aagcagtcgctttgtgc

SEQ ID NO: 11358 - DNA, 17 bp, Arabidopsis thaliana
aagcagtcggctactat

SEQ ID NO: 11359 - DNA, 17 bp, Arabidopsis thaliana
aagcagtcttgcgaaca

SEQ ID NO: 11360 - DNA, 17 bp, Arabidopsis thaliana
aagcagtgtagcggtca

SEQ ID NO: 11361 - DNA, 17 bp, Arabidopsis thaliana
aagcagtgttatcgccg

SEQ ID NO: 11362 - DNA, 17 bp, Arabidopsis thaliana
aagcagtgttccaagat

SEQ ID NO: 11363 - DNA, 17 bp, Arabidopsis thaliana
aagcagttcagtgcgaa

SEQ ID NO: 11364 - DNA, 17 bp, Arabidopsis thaliana
aagcagttcccggaagg

SEQ ID NO: 11365 - DNA, 17 bp, Arabidopsis thaliana
aagcagttccggtgccg

SEQ ID NO: 11366 - DNA, 17 bp, Arabidopsis thaliana
aagcagttggagctgtc

SEQ ID NO: 11367 - DNA, 17 bp, Arabidopsis thaliana
aagcagttttgttgtat

SEQ ID NO: 11368 - DNA, 17 bp, Arabidopsis thaliana
aagcataaactctggac

SEQ ID NO: 11369 - DNA, 17 bp, Arabidopsis thaliana
aagcataattcacttgg

SEQ ID NO: 11370 - DNA, 17 bp, Arabidopsis thaliana
aagcatactgggctgga

SEQ ID NO: 11371 - DNA, 17 bp, Arabidopsis thaliana
aagcataggatcgtgcc

SEQ ID NO: 11372 - DNA, 17 bp, Arabidopsis thaliana
aagcatagttagctaac

SEQ ID NO: 11373 - DNA, 17 bp, Arabidopsis thaliana
aagcatatttgcgacga

SEQ ID NO: 11374 - DNA, 17 bp, Arabidopsis thaliana
aagcatattttgggcca

SEQ ID NO: 11375 - DNA, 17 bp, Arabidopsis thaliana
aagcatattttgggtca

SEQ ID NO: 11376 - DNA, 17 bp, Arabidopsis thaliana
aagcatcctgtagatgg

SEQ ID NO: 11377 - DNA, 17 bp, Arabidopsis thaliana
aagcatctcaatttgcc

SEQ ID NO: 11378 - DNA, 17 bp, Arabidopsis thaliana
aagcatgttgcgcttca

SEQ ID NO: 11379 - DNA, 17 bp, Arabidopsis thaliana
aagcatgttgcgcttct

SEQ ID NO: 11380 - DNA, 17 bp, Arabidopsis thaliana
aagcattaatgaacttt

SEQ ID NO: 11381 - DNA, 17 bp, Arabidopsis thaliana
aagcattacgatggtcc

SEQ ID NO: 11382 - DNA, 17 bp, Arabidopsis thaliana
aagcattactcgaaccg

SEQ ID NO: 11383 - DNA, 17 bp, Arabidopsis thaliana
aagcattattcgtacgt

SEQ ID NO: 11384 - DNA, 17 bp, Arabidopsis thaliana
aagcattcactgtggtg

SEQ ID NO: 11385 - DNA, 17 bp, Arabidopsis thaliana
aagcattccaaactcgg

SEQ ID NO: 11386 - DNA, 17 bp, Arabidopsis thaliana
aagcattccttattttg

SEQ ID NO: 11387 - DNA, 17 bp, Arabidopsis thaliana
aagcattctatcgattg

SEQ ID NO: 11388 - DNA, 17 bp, Arabidopsis thaliana
aagcattctccactgcg

SEQ ID NO: 11389 - DNA, 17 bp, Arabidopsis thaliana
aagcattctccactgtg

SEQ ID NO: 11390 - DNA, 17 bp, Arabidopsis thaliana
aagcattgcgatggtcc

SEQ ID NO: 11391 - DNA, 17 bp, Arabidopsis thaliana
aagcattggctaacgtt

SEQ ID NO: 11392 - DNA, 17 bp, Arabidopsis thaliana
aagcattgggccatagg

SEQ ID NO: 11393 - DNA, 17 bp, Arabidopsis thaliana
aagcattgtcaggacgt

SEQ ID NO: 11394 - DNA, 17 bp, Arabidopsis thaliana
aagcattgtgtgcaaga

SEQ ID NO: 11395 - DNA, 17 bp, Arabidopsis thaliana
aagcatttctctaggcc

SEQ ID NO: 11396 - DNA, 17 bp, Arabidopsis thaliana
aagcatttgccaaggat

SEQ ID NO: 11397 - DNA, 17 bp, Arabidopsis thaliana
aagcatttgcggctgcg

SEQ ID NO: 11398 - DNA, 17 bp, Arabidopsis thaliana
aagcatttgcggttgcg

SEQ ID NO: 11399 - DNA, 17 bp, Arabidopsis thaliana
aagcatttgctgctgcg

SEQ ID NO: 11400 - DNA, 17 bp, Arabidopsis thaliana
aagcattttcgtgattt

SEQ ID NO: 11401 - DNA, 17 bp, Arabidopsis thaliana
aagccaaaaccggtcaa

SEQ ID NO: 11402 - DNA, 17 bp, Arabidopsis thaliana
aagccaaagtgccttct

SEQ ID NO: 11403 - DNA, 17 bp, Arabidopsis thaliana
aagccaaattagtcaca

SEQ ID NO: 11404 - DNA, 17 bp, Arabidopsis thaliana
aagccaaccattcaggg

SEQ ID NO: 11405 - DNA, 17 bp, Arabidopsis thaliana
aagccaacccacggagc

SEQ ID NO: 11406 - DNA, 17 bp, Arabidopsis thaliana
aagccaagactaggctc

SEQ ID NO: 11407 - DNA, 17 bp, Arabidopsis thaliana
aagccaagataggatga

SEQ ID NO: 11408 - DNA, 17 bp, Arabidopsis thaliana
aagccaagcaataacag

SEQ ID NO: 11409 - DNA, 17 bp, Arabidopsis thaliana
aagccaagcgtcgttag

SEQ ID NO: 11410 - DNA, 17 bp, Arabidopsis thaliana
aagccaaggagtctgac

SEQ ID NO: 11411 - DNA, 17 bp, Arabidopsis thaliana
aagccaaggatcaagcc

SEQ ID NO: 11412 - DNA, 17 bp, Arabidopsis thaliana
aagccaaggatgacttg

SEQ ID NO: 11413 - DNA, 17 bp, Arabidopsis thaliana
aagccaagggctaatcg

SEQ ID NO: 11414 - DNA, 17 bp, Arabidopsis thaliana
aagccaagggttcaatc

SEQ ID NO: 11415 - DNA, 17 bp, Arabidopsis thaliana
aagccaagtggccaagc

SEQ ID NO: 11416 - DNA, 17 bp, Arabidopsis thaliana
aagccaatcccagggaa

SEQ ID NO: 11417 - DNA, 17 bp, Arabidopsis thaliana
aagccaatctgtgatct

SEQ ID NO: 11418 - DNA, 17 bp, Arabidopsis thaliana
aagccaatggaactgaa

SEQ ID NO: 11419 - DNA, 17 bp, Arabidopsis thaliana
aagccaatgtgttcagc

SEQ ID NO: 11420 - DNA, 17 bp, Arabidopsis thaliana
aagccaatttgcagagc

SEQ ID NO: 11421 - DNA, 17 bp, Arabidopsis thaliana
aagccacagtgtctctc

SEQ ID NO: 11422 - DNA, 17 bp, Arabidopsis thaliana
aagccaccacgtgcgta

SEQ ID NO: 11423 - DNA, 17 bp, Arabidopsis thaliana
aagccaccgattccgac

SEQ ID NO: 11424 - DNA, 17 bp, Arabidopsis thaliana
aagccaccgtgcgctgg

SEQ ID NO: 11425 - DNA, 17 bp, Arabidopsis thaliana
aagccacgggcgaccca

SEQ ID NO: 11426 - DNA, 17 bp, Arabidopsis thaliana
aagccacgtctctcacg

SEQ ID NO: 11427 - DNA, 17 bp, Arabidopsis thaliana
aagccacgtctgtcagg

SEQ ID NO: 11428 - DNA, 17 bp, Arabidopsis thaliana
aagccactaggcttcgt

SEQ ID NO: 11429 - DNA, 17 bp, Arabidopsis thaliana
aagccactcggccatgt

SEQ ID NO: 11430 - DNA, 17 bp, Arabidopsis thaliana
aagccactcggcttttc

SEQ ID NO: 11431 - DNA, 17 bp, Arabidopsis thaliana
aagccactgcttctgaa

SEQ ID NO: 11432 - DNA, 17 bp, Arabidopsis thaliana
aagccactttgcagttt

SEQ ID NO: 11433 - DNA, 17 bp, Arabidopsis thaliana
aagccagaagttcgctg

SEQ ID NO: 11434 - DNA, 17 bp, Arabidopsis thaliana
aagccagacccaatgac

SEQ ID NO: 11435 - DNA, 17 bp, Arabidopsis thaliana
aagccagagcgtttttg

SEQ ID NO: 11436 - DNA, 17 bp, Arabidopsis thaliana
aagccagagtcgtagat

SEQ ID NO: 11437 - DNA, 17 bp, Arabidopsis thaliana
aagccagcaaaacaaag

SEQ ID NO: 11438 - DNA, 17 bp, Arabidopsis thaliana
aagccaggctatctcgc

SEQ ID NO: 11439 - DNA, 17 bp, Arabidopsis thaliana
aagccagtcctttgtga

SEQ ID NO: 11440 - DNA, 17 bp, Arabidopsis thaliana
aagccagtcttcacagt

SEQ ID NO: 11441 - DNA, 17 bp, Arabidopsis thaliana
aagccagtgaaatcttg

SEQ ID NO: 11442 - DNA, 17 bp, Arabidopsis thaliana
aagccagtgacagccat

SEQ ID NO: 11443 - DNA, 17 bp, Arabidopsis thaliana
aagccagttttggcttc

SEQ ID NO: 11444 - DNA, 17 bp, Arabidopsis thaliana
aagccataactagcagt

SEQ ID NO: 11445 - DNA, 17 bp, Arabidopsis thaliana
aagccatagccagtgac

SEQ ID NO: 11446 - DNA, 17 bp, Arabidopsis thaliana
aagccatctgacgagat

SEQ ID NO: 11447 - DNA, 17 bp, Arabidopsis thaliana
aagccatcttcttgagt

SEQ ID NO: 11448 - DNA, 17 bp, Arabidopsis thaliana
aagccatcttttatgct

SEQ ID NO: 11449 - DNA, 17 bp, Arabidopsis thaliana
aagccatgcgagccaca

SEQ ID NO: 11450 - DNA, 17 bp, Arabidopsis thaliana
aagccatggtggtgttg

SEQ ID NO: 11451 - DNA, 17 bp, Arabidopsis thaliana
aagccatgttttccgag

SEQ ID NO: 11452 - DNA, 17 bp, Arabidopsis thaliana
aagcccaaaattttctc

SEQ ID NO: 11453 - DNA, 17 bp, Arabidopsis thaliana
aagcccaaacggcacgc

SEQ ID NO: 11454 - DNA, 17 bp, Arabidopsis thaliana
aagcccaaagacagccc

SEQ ID NO: 11455 - DNA, 17 bp, Arabidopsis thaliana
aagcccaacaaaaagta

SEQ ID NO: 11456 - DNA, 17 bp, Arabidopsis thaliana
aagcccaactgacagac

SEQ ID NO: 11457 - DNA, 17 bp, Arabidopsis thaliana
aagcccaattgggactg

SEQ ID NO: 11458 - DNA, 17 bp, Arabidopsis thaliana
aagcccacaggtaggta

SEQ ID NO: 11459 - DNA, 17 bp, Arabidopsis thaliana
aagcccacaggtaggtt

SEQ ID NO: 11460 - DNA, 17 bp, Arabidopsis thaliana
aagcccacatctcagag

SEQ ID NO: 11461 - DNA, 17 bp, Arabidopsis thaliana
aagcccacccacccacc

SEQ ID NO: 11462 - DNA, 17 bp, Arabidopsis thaliana
aagcccactttgagccg

SEQ ID NO: 11463 - DNA, 17 bp, Arabidopsis thaliana
aagcccagaattttcag

SEQ ID NO: 11464 - DNA, 17 bp, Arabidopsis thaliana
aagcccagagtgcgtca

SEQ ID NO: 11465 - DNA, 17 bp, Arabidopsis thaliana
aagcccagcccgacctg

SEQ ID NO: 11466 - DNA, 17 bp, Arabidopsis thaliana
aagcccaggaggaatag

SEQ ID NO: 11467 - DNA, 17 bp, Arabidopsis thaliana
aagcccaggagggatag

SEQ ID NO: 11468 - DNA, 17 bp, Arabidopsis thaliana
aagcccaggttcacagg

SEQ ID NO: 11469 - DNA, 17 bp, Arabidopsis thaliana
aagcccaggttcacagt

SEQ ID NO: 11470 - DNA, 17 bp, Arabidopsis thaliana
aagcccatagctcagtg

SEQ ID NO: 11471 - DNA, 17 bp, Arabidopsis thaliana
aagcccatagtgtgtca

SEQ ID NO: 11472 - DNA, 17 bp, Arabidopsis thaliana
aagcccatattgtccgt

SEQ ID NO: 11473 - DNA, 17 bp, Arabidopsis thaliana
aagcccatcatcgagat

SEQ ID NO: 11474 - DNA, 17 bp, Arabidopsis thaliana
aagcccatcatctagat

SEQ ID NO: 11475 - DNA, 17 bp, Arabidopsis thaliana
aagcccatctcgggacg

SEQ ID NO: 11476 - DNA, 17 bp, Arabidopsis thaliana
aagcccatgggccgcct

SEQ ID NO: 11477 - DNA, 17 bp, Arabidopsis thaliana
aagcccatgggcgtccc

SEQ ID NO: 11478 - DNA, 17 bp, Arabidopsis thaliana
aagcccattgtaaaagt

SEQ ID NO: 11479 - DNA, 17 bp, Arabidopsis thaliana
aagcccccttggcccaa

SEQ ID NO: 11480 - DNA, 17 bp, Arabidopsis thaliana
aagcccctgagatcaac

SEQ ID NO: 11481 - DNA, 17 bp, Arabidopsis thaliana
aagcccctgtattttgt

SEQ ID NO: 11482 - DNA, 17 bp, Arabidopsis thaliana
aagcccgagtgagtcag

SEQ ID NO: 11483 - DNA, 17 bp, Arabidopsis thaliana
aagcccgatctgctgca

SEQ ID NO: 11484 - DNA, 17 bp, Arabidopsis thaliana
aagcccgcaagcaagaa

SEQ ID NO: 11485 - DNA, 17 bp, Arabidopsis thaliana
aagcccgcagcgatact

SEQ ID NO: 11486 - DNA, 17 bp, Arabidopsis thaliana
aagcccgctcaagacgt

SEQ ID NO: 11487 - DNA, 17 bp, Arabidopsis thaliana
aagcccgggcttttgat

SEQ ID NO: 11488 - DNA, 17 bp, Arabidopsis thaliana
aagcccgtaatcccttc

SEQ ID NO: 11489 - DNA, 17 bp, Arabidopsis thaliana
aagcccgtaatcctacc

SEQ ID NO: 11490 - DNA, 17 bp, Arabidopsis thaliana
aagcccgtaatcctctc

SEQ ID NO: 11491 - DNA, 17 bp, Arabidopsis thaliana
aagcccgtaatctcccc

SEQ ID NO: 11492 - DNA, 17 bp, Arabidopsis thaliana
aagcccgtaatctctca

SEQ ID NO: 11493 - DNA, 17 bp, Arabidopsis thaliana
aagcccgtaattcctcc

SEQ ID NO: 11494 - DNA, 17 bp, Arabidopsis thaliana
aagcccgtaatttccta

SEQ ID NO: 11495 - DNA, 17 bp, Arabidopsis thaliana
aagcccgtatcccacaa

SEQ ID NO: 11496 - DNA, 17 bp, Arabidopsis thaliana
aagcccgtcaattctag

SEQ ID NO: 11497 - DNA, 17 bp, Arabidopsis thaliana
aagcccgtcttctcagt

SEQ ID NO: 11498 - DNA, 17 bp, Arabidopsis thaliana
aagcccgtgatctctca

SEQ ID NO: 11499 - DNA, 17 bp, Arabidopsis thaliana
aagcccgtgcttttgat

SEQ ID NO: 11500 - DNA, 17 bp, Arabidopsis thaliana
aagcccgttcaagacgt

SEQ ID NO: 11501 - DNA, 17 bp, Arabidopsis thaliana
aagcccgttgcggattg

SEQ ID NO: 11502 - DNA, 17 bp, Arabidopsis thaliana
aagccctccttctagcg

SEQ ID NO: 11503 - DNA, 17 bp, Arabidopsis thaliana
aagccctgggtgcttgc

SEQ ID NO: 11504 - DNA, 17 bp, Arabidopsis thaliana
aagccctttggcccaat

SEQ ID NO: 11505 - DNA, 17 bp, Arabidopsis thaliana
aagccctttgtcgctaa

SEQ ID NO: 11506 - DNA, 17 bp, Arabidopsis thaliana
aagccgaaacaacgatt

SEQ ID NO: 11507 - DNA, 17 bp, Arabidopsis thaliana
aagccgaaacccgtaat

SEQ ID NO: 11508 - DNA, 17 bp, Arabidopsis thaliana
aagccgaaactcgtaat

SEQ ID NO: 11509 - DNA, 17 bp, Arabidopsis thaliana
aagccgaaacttgtaat

SEQ ID NO: 11510 - DNA, 17 bp, Arabidopsis thaliana
aagccgaaccgtttcgc

SEQ ID NO: 11511 - DNA, 17 bp, Arabidopsis thaliana
aagccgacaggataagc

SEQ ID NO: 11512 - DNA, 17 bp, Arabidopsis thaliana
aagccgaccaatgcaca

SEQ ID NO: 11513 - DNA, 17 bp, Arabidopsis thaliana
aagccgacccagattcg

SEQ ID NO: 11514 - DNA, 17 bp, Arabidopsis thaliana
aagccgacggcgcaatc

SEQ ID NO: 11515 - DNA, 17 bp, Arabidopsis thaliana
aagccgactctacttgc

SEQ ID NO: 11516 - DNA, 17 bp, Arabidopsis thaliana
aagccgagagccgtgtg

SEQ ID NO: 11517 - DNA, 17 bp, Arabidopsis thaliana
aagccgagcagtttctt

SEQ ID NO: 11518 - DNA, 17 bp, Arabidopsis thaliana
aagccgagctggggtca

SEQ ID NO: 11519 - DNA, 17 bp, Arabidopsis thaliana
aagccgagggctcaatc

SEQ ID NO: 11520 - DNA, 17 bp, Arabidopsis thaliana
aagccgagtccgctcgc

SEQ ID NO: 11521 - DNA, 17 bp, Arabidopsis thaliana
aagccgatccgagccgc

SEQ ID NO: 11522 - DNA, 17 bp, Arabidopsis thaliana
aagccgatctcatctga

SEQ ID NO: 11523 - DNA, 17 bp, Arabidopsis thaliana
aagccgattctaccttt

SEQ ID NO: 11524 - DNA, 17 bp, Arabidopsis thaliana
aagccgcaagacgttct

SEQ ID NO: 11525 - DNA, 17 bp, Arabidopsis thaliana
aagccgccgcagtgaga

SEQ ID NO: 11526 - DNA, 17 bp, Arabidopsis thaliana
aagccgccggcgcccga

SEQ ID NO: 11527 - DNA, 17 bp, Arabidopsis thaliana
aagccgcgttctatgga

SEQ ID NO: 11528 - DNA, 17 bp, Arabidopsis thaliana
aagccgctactcattcg

SEQ ID NO: 11529 - DNA, 17 bp, Arabidopsis thaliana
aagccgctcagccagtc

SEQ ID NO: 11530 - DNA, 17 bp, Arabidopsis thaliana
aagccgctcagccatgc

SEQ ID NO: 11531 - DNA, 17 bp, Arabidopsis thaliana
aagccgctccgattgga

SEQ ID NO: 11532 - DNA, 17 bp, Arabidopsis thaliana
aagccgtcaagctctac

SEQ ID NO: 11533 - DNA, 17 bp, Arabidopsis thaliana
aagccgtcactacaacg

SEQ ID NO: 11534 - DNA, 17 bp, Arabidopsis thaliana
aagccgtcagattcagg

SEQ ID NO: 11535 - DNA, 17 bp, Arabidopsis thaliana
aagccgtcagtgtccga

SEQ ID NO: 11536 - DNA, 17 bp, Arabidopsis thaliana
aagccgtcctttctctt

SEQ ID NO: 11537 - DNA, 17 bp, Arabidopsis thaliana
aagccgtctatgaccac

SEQ ID NO: 11538 - DNA, 17 bp, Arabidopsis thaliana
aagccgtctgatgtcaa

SEQ ID NO: 11539 - DNA, 17 bp, Arabidopsis thaliana
aagccgtctgcatttct

SEQ ID NO: 11540 - DNA, 17 bp, Arabidopsis thaliana
aagccgtgaggccaaac

SEQ ID NO: 11541 - DNA, 17 bp, Arabidopsis thaliana
aagccgtgtaagtatcc

SEQ ID NO: 11542 - DNA, 17 bp, Arabidopsis thaliana
aagccgttacgagcaat

SEQ ID NO: 11543 - DNA, 17 bp, Arabidopsis thaliana
aagccgttgagtcgtcg

SEQ ID NO: 11544 - DNA, 17 bp, Arabidopsis thaliana
aagccgttgatcaacct

SEQ ID NO: 11545 - DNA, 17 bp, Arabidopsis thaliana
aagcctaaacggcatat

SEQ ID NO: 11546 - DNA, 17 bp, Arabidopsis thaliana
aagcctaaaggccctac

SEQ ID NO: 11547 - DNA, 17 bp, Arabidopsis thaliana
aagcctaacatctcgga

SEQ ID NO: 11548 - DNA, 17 bp, Arabidopsis thaliana
aagcctaagtaacgttt

SEQ ID NO: 11549 - DNA, 17 bp, Arabidopsis thaliana
aagcctaagtagtcttt

SEQ ID NO: 11550 - DNA, 17 bp, Arabidopsis thaliana
aagcctaagtagtgttg

SEQ ID NO: 11551 - DNA, 17 bp, Arabidopsis thaliana
aagcctaagtagtgttt

SEQ ID NO: 11552 - DNA, 17 bp, Arabidopsis thaliana
aagcctaagtggtgttt

SEQ ID NO: 11553 - DNA, 17 bp, Arabidopsis thaliana
aagcctaattctttcat

SEQ ID NO: 11554 - DNA, 17 bp, Arabidopsis thaliana
aagcctaattttgtctc

SEQ ID NO: 11555 - DNA, 17 bp, Arabidopsis thaliana
aagcctacagtataccg

SEQ ID NO: 11556 - DNA, 17 bp, Arabidopsis thaliana
aagcctacctacggtat

SEQ ID NO: 11557 - DNA, 17 bp, Arabidopsis thaliana
aagcctacgctctggat

SEQ ID NO: 11558 - DNA, 17 bp, Arabidopsis thaliana
aagcctacttgcggtag

SEQ ID NO: 11559 - DNA, 17 bp, Arabidopsis thaliana
aagcctacttgcggtat

SEQ ID NO: 11560 - DNA, 17 bp, Arabidopsis thaliana
aagcctaggatgacttg

SEQ ID NO: 11561 - DNA, 17 bp, Arabidopsis thaliana
aagcctaggcgcgatta

SEQ ID NO: 11562 - DNA, 17 bp, Arabidopsis thaliana
aagcctagtgaaatcgt

SEQ ID NO: 11563 - DNA, 17 bp, Arabidopsis thaliana
aagcctatagctcagtg

SEQ ID NO: 11564 - DNA, 17 bp, Arabidopsis thaliana
aagcctatcgtctctat

SEQ ID NO: 11565 - DNA, 17 bp, Arabidopsis thaliana
aagcctatctgctcatt

SEQ ID NO: 11566 - DNA, 17 bp, Arabidopsis thaliana
aagcctatggggccgcc

SEQ ID NO: 11567 - DNA, 17 bp, Arabidopsis thaliana
aagcctatggggccgct

SEQ ID NO: 11568 - DNA, 17 bp, Arabidopsis thaliana
aagcctatggggtcgct

SEQ ID NO: 11569 - DNA, 17 bp, Arabidopsis thaliana
aagcctattctgcaagg

SEQ ID NO: 11570 - DNA, 17 bp, Arabidopsis thaliana
aagcctcaaatacacgg

SEQ ID NO: 11571 - DNA, 17 bp, Arabidopsis thaliana
aagcctcaactttcatt

SEQ ID NO: 11572 - DNA, 17 bp, Arabidopsis thaliana
aagcctcaggatgtgaa

SEQ ID NO: 11573 - DNA, 17 bp, Arabidopsis thaliana
aagcctcatgtgctgat

SEQ ID NO: 11574 - DNA, 17 bp, Arabidopsis thaliana
aagcctccaacgccggc

SEQ ID NO: 11575 - DNA, 17 bp, Arabidopsis thaliana
aagcctccagatttgcg

SEQ ID NO: 11576 - DNA, 17 bp, Arabidopsis thaliana
aagcctccggtggaaag

SEQ ID NO: 11577 - DNA, 17 bp, Arabidopsis thaliana
aagcctccttggttcaa

SEQ ID NO: 11578 - DNA, 17 bp, Arabidopsis thaliana
aagcctcgaccgccgaa

SEQ ID NO: 11579 - DNA, 17 bp, Arabidopsis thaliana
aagcctcgactgcatca

SEQ ID NO: 11580 - DNA, 17 bp, Arabidopsis thaliana
aagcctcgtgctgctag

SEQ ID NO: 11581 - DNA, 17 bp, Arabidopsis thaliana
aagcctctaacgactac

SEQ ID NO: 11582 - DNA, 17 bp, Arabidopsis thaliana
aagcctctacttacggt

SEQ ID NO: 11583 - DNA, 17 bp, Arabidopsis thaliana
aagcctctctgctcagc

SEQ ID NO: 11584 - DNA, 17 bp, Arabidopsis thaliana
aagcctctcttttcttt

SEQ ID NO: 11585 - DNA, 17 bp, Arabidopsis thaliana
aagcctctgacgctgcc

SEQ ID NO: 11586 - DNA, 17 bp, Arabidopsis thaliana
aagcctctgacgctgct

SEQ ID NO: 11587 - DNA, 17 bp, Arabidopsis thaliana
aagcctctgcttggatt

SEQ ID NO: 11588 - DNA, 17 bp, Arabidopsis thaliana
aagcctctggagctgcg

SEQ ID NO: 11589 - DNA, 17 bp, Arabidopsis thaliana
aagcctgacgctgctga

SEQ ID NO: 11590 - DNA, 17 bp, Arabidopsis thaliana
aagcctgcccaccctgg

SEQ ID NO: 11591 - DNA, 17 bp, Arabidopsis thaliana
aagcctgcctgactgtg

SEQ ID NO: 11592 - DNA, 17 bp, Arabidopsis thaliana
aagcctgctgatatgtt

SEQ ID NO: 11593 - DNA, 17 bp, Arabidopsis thaliana
aagcctgggtacttttt

SEQ ID NO: 11594 - DNA, 17 bp, Arabidopsis thaliana
aagcctggtccgagatc

SEQ ID NO: 11595 - DNA, 17 bp, Arabidopsis thaliana
aagcctggtctgtcctc

SEQ ID NO: 11596 - DNA, 17 bp, Arabidopsis thaliana
aagcctgtcttcgatcg

SEQ ID NO: 11597 - DNA, 17 bp, Arabidopsis thaliana
aagcctgttccaaatac

SEQ ID NO: 11598 - DNA, 17 bp, Arabidopsis thaliana
aagccttactttcagga

SEQ ID NO: 11599 - DNA, 17 bp, Arabidopsis thaliana
aagccttcacccagagc

SEQ ID NO: 11600 - DNA, 17 bp, Arabidopsis thaliana
aagccttctggccgagg

SEQ ID NO: 11601 - DNA, 17 bp, Arabidopsis thaliana
aagccttgatgattcga

SEQ ID NO: 11602 - DNA, 17 bp, Arabidopsis thaliana
aagccttgcgattgttt

SEQ ID NO: 11603 - DNA, 17 bp, Arabidopsis thaliana
aagccttgctctctttg

SEQ ID NO: 11604 - DNA, 17 bp, Arabidopsis thaliana
aagccttggtgactcga

SEQ ID NO: 11605 - DNA, 17 bp, Arabidopsis thaliana
aagccttgtctcaaact

SEQ ID NO: 11606 - DNA, 17 bp, Arabidopsis thaliana
aagccttgttctttgca

SEQ ID NO: 11607 - DNA, 17 bp, Arabidopsis thaliana
aagcctttaagatccgg

SEQ ID NO: 11608 - DNA, 17 bp, Arabidopsis thaliana
aagcctttagatccagt

SEQ ID NO: 11609 - DNA, 17 bp, Arabidopsis thaliana
aagcctttgtacacacc

SEQ ID NO: 11610 - DNA, 17 bp, Arabidopsis thaliana
aagcctttgtcgctaag

SEQ ID NO: 11611 - DNA, 17 bp, Arabidopsis thaliana
aagccttttctagaggc

SEQ ID NO: 11612 - DNA, 17 bp, Arabidopsis thaliana
aagccttttgggaccaa

SEQ ID NO: 11613 - DNA, 17 bp, Arabidopsis thaliana
aagccttttgggaccag

SEQ ID NO: 11614 - DNA, 17 bp, Arabidopsis thaliana
aagccttttgtgaccaa

SEQ ID NO: 11615 - DNA, 17 bp, Arabidopsis thaliana
aagcctttttcgtctcc

SEQ ID NO: 11616 - DNA, 17 bp, Arabidopsis thaliana
aagcgaaacttagaggt

SEQ ID NO: 11617 - DNA, 17 bp, Arabidopsis thaliana
aagcgaaagaaccgtcg

SEQ ID NO: 11618 - DNA, 17 bp, Arabidopsis thaliana
aagcgaaagcctatggg

SEQ ID NO: 11619 - DNA, 17 bp, Arabidopsis thaliana
aagcgaagaaccttacc

SEQ ID NO: 11620 - DNA, 17 bp, Arabidopsis thaliana
aagcgaagcccgcttta

SEQ ID NO: 11621 - DNA, 17 bp, Arabidopsis thaliana
aagcgaaggtatggttc

SEQ ID NO: 11622 - DNA, 17 bp, Arabidopsis thaliana
aagcgaaggttcaggcg

SEQ ID NO: 11623 - DNA, 17 bp, Arabidopsis thaliana
aagcgaagttttgaggt

SEQ ID NO: 11624 - DNA, 17 bp, Arabidopsis thaliana
aagcgaatggtgattgc

SEQ ID NO: 11625 - DNA, 17 bp, Arabidopsis thaliana
aagcgacagataacagg

SEQ ID NO: 11626 - DNA, 17 bp, Arabidopsis thaliana
aagcgacagattttttc

SEQ ID NO: 11627 - DNA, 17 bp, Arabidopsis thaliana
aagcgacctcgttgact

SEQ ID NO: 11628 - DNA, 17 bp, Arabidopsis thaliana
aagcgacgcatgcaccc

SEQ ID NO: 11629 - DNA, 17 bp, Arabidopsis thaliana
aagcgacgcatgcgccc

SEQ ID NO: 11630 - DNA, 17 bp, Arabidopsis thaliana
aagcgacgcatgctccc

SEQ ID NO: 11631 - DNA, 17 bp, Arabidopsis thaliana
aagcgacgcggattacg

SEQ ID NO: 11632 - DNA, 17 bp, Arabidopsis thaliana
aagcgacggagacaaca

SEQ ID NO: 11633 - DNA, 17 bp, Arabidopsis thaliana
aagcgacggatcgcatg

SEQ ID NO: 11634 - DNA, 17 bp, Arabidopsis thaliana
aagcgacggttcggtct

SEQ ID NO: 11635 - DNA, 17 bp, Arabidopsis thaliana
aagcgacggttggctgg

SEQ ID NO: 11636 - DNA, 17 bp, Arabidopsis thaliana
aagcgactccggtgctg

SEQ ID NO: 11637 - DNA, 17 bp, Arabidopsis thaliana
aagcgactgctttgtga

SEQ ID NO: 11638 - DNA, 17 bp, Arabidopsis thaliana
aagcgactgttcagatc

SEQ ID NO: 11639 - DNA, 17 bp, Arabidopsis thaliana
aagcgactgtttttgta

SEQ ID NO: 11640 - DNA, 17 bp, Arabidopsis thaliana
aagcgacttcagaatgg

SEQ ID NO: 11641 - DNA, 17 bp, Arabidopsis thaliana
aagcgagaacagtccga

SEQ ID NO: 11642 - DNA, 17 bp, Arabidopsis thaliana
aagcgagaatgtcggct

SEQ ID NO: 11643 - DNA, 17 bp, Arabidopsis thaliana
aagcgagacggacttga

SEQ ID NO: 11644 - DNA, 17 bp, Arabidopsis thaliana
aagcgagagccatccga

SEQ ID NO: 11645 - DNA, 17 bp, Arabidopsis thaliana
aagcgagagccgtccga

SEQ ID NO: 11646 - DNA, 17 bp, Arabidopsis thaliana
aagcgagatggagattc

SEQ ID NO: 11647 - DNA, 17 bp, Arabidopsis thaliana
aagcgagatggaggttc

SEQ ID NO: 11648 - DNA, 17 bp, Arabidopsis thaliana
aagcgagggcacgtctg

SEQ ID NO: 11649 - DNA, 17 bp, Arabidopsis thaliana
aagcgaggtccgtcacg

SEQ ID NO: 11650 - DNA, 17 bp, Arabidopsis thaliana
aagcgagtagaccttgt

SEQ ID NO: 11651 - DNA, 17 bp, Arabidopsis thaliana
aagcgagtagatcgtgt

SEQ ID NO: 11652 - DNA, 17 bp, Arabidopsis thaliana
aagcgagtcattcttca

SEQ ID NO: 11653 - DNA, 17 bp, Arabidopsis thaliana
aagcgagtcattgtatg

SEQ ID NO: 11654 - DNA, 17 bp, Arabidopsis thaliana
aagcgagtcttcatagg

SEQ ID NO: 11655 - DNA, 17 bp, Arabidopsis thaliana
aagcgagtttcgaatca

SEQ ID NO: 11656 - DNA, 17 bp, Arabidopsis thaliana
aagcgagtttgagacag

SEQ ID NO: 11657 - DNA, 17 bp, Arabidopsis thaliana
aagcgagtttgcaaaac

SEQ ID NO: 11658 - DNA, 17 bp, Arabidopsis thaliana
aagcgataagtgcactt

SEQ ID NO: 11659 - DNA, 17 bp, Arabidopsis thaliana
aagcgatcagctgaata

SEQ ID NO: 11660 - DNA, 17 bp, Arabidopsis thaliana
aagcgatccaggagtct

SEQ ID NO: 11661 - DNA, 17 bp, Arabidopsis thaliana
aagcgatcctatccgtg

SEQ ID NO: 11662 - DNA, 17 bp, Arabidopsis thaliana
aagcgatctcgagcacc

SEQ ID NO: 11663 - DNA, 17 bp, Arabidopsis thaliana
aagcgatctgccgaagc

SEQ ID NO: 11664 - DNA, 17 bp, Arabidopsis thaliana
aagcgatgggaaatcag

SEQ ID NO: 11665 - DNA, 17 bp, Arabidopsis thaliana
aagcgatgtgcgacatt

SEQ ID NO: 11666 - DNA, 17 bp, Arabidopsis thaliana
aagcgatgtgggacatt

SEQ ID NO: 11667 - DNA, 17 bp, Arabidopsis thaliana
aagcgattaaatttccg

SEQ ID NO: 11668 - DNA, 17 bp, Arabidopsis thaliana
aagcgattctttacggt

SEQ ID NO: 11669 - DNA, 17 bp, Arabidopsis thaliana
aagcgattgggttgtgt

SEQ ID NO: 11670 - DNA, 17 bp, Arabidopsis thaliana
aagcgattgtgggttcg

SEQ ID NO: 11671 - DNA, 17 bp, Arabidopsis thaliana
aagcgatttggaaattc

SEQ ID NO: 11672 - DNA, 17 bp, Arabidopsis thaliana
aagcgattttccggcgt

SEQ ID NO: 11673 - DNA, 17 bp, Arabidopsis thaliana
aagcgcaaaagttttta

SEQ ID NO: 11674 - DNA, 17 bp, Arabidopsis thaliana
aagcgcaacttatgcct

SEQ ID NO: 11675 - DNA, 17 bp, Arabidopsis thaliana
aagcgcaatctggtaat

SEQ ID NO: 11676 - DNA, 17 bp, Arabidopsis thaliana
aagcgcaatggatctct

SEQ ID NO: 11677 - DNA, 17 bp, Arabidopsis thaliana
aagcgcacagatctcga

SEQ ID NO: 11678 - DNA, 17 bp, Arabidopsis thaliana
aagcgcactcggacgga

SEQ ID NO: 11679 - DNA, 17 bp, Arabidopsis thaliana
aagcgcacttgggaggc

SEQ ID NO: 11680 - DNA, 17 bp, Arabidopsis thaliana
aagcgcagcccgacctg

SEQ ID NO: 11681 - DNA, 17 bp, Arabidopsis thaliana
aagcgcaggagggatag

SEQ ID NO: 11682 - DNA, 17 bp, Arabidopsis thaliana
aagcgcaggcttgaagt

SEQ ID NO: 11683 - DNA, 17 bp, Arabidopsis thaliana
aagcgccaaaaagttaa

SEQ ID NO: 11684 - DNA, 17 bp, Arabidopsis thaliana
aagcgccactgcagcgg

SEQ ID NO: 11685 - DNA, 17 bp, Arabidopsis thaliana
aagcgccagaagtatcg

SEQ ID NO: 11686 - DNA, 17 bp, Arabidopsis thaliana
aagcgccgatgtttgtg

SEQ ID NO: 11687 - DNA, 17 bp, Arabidopsis thaliana
aagcgcctatcagattt

SEQ ID NO: 11688 - DNA, 17 bp, Arabidopsis thaliana
aagcgccttatgtctca

SEQ ID NO: 11689 - DNA, 17 bp, Arabidopsis thaliana
aagcgccttcgggagtt

SEQ ID NO: 11690 - DNA, 17 bp, Arabidopsis thaliana
aagcgctaatcatttca

SEQ ID NO: 11691 - DNA, 17 bp, Arabidopsis thaliana
aagcgctagaagacttg

SEQ ID NO: 11692 - DNA, 17 bp, Arabidopsis thaliana
aagcgctatggaagtga

SEQ ID NO: 11693 - DNA, 17 bp, Arabidopsis thaliana
aagcgctctatcatcgt

SEQ ID NO: 11694 - DNA, 17 bp, Arabidopsis thaliana
aagcgctcttgcgaata

SEQ ID NO: 11695 - DNA, 17 bp, Arabidopsis thaliana
aagcgctgcaaccttgt

SEQ ID NO: 11696 - DNA, 17 bp, Arabidopsis thaliana
aagcgcttaagtgattt

SEQ ID NO: 11697 - DNA, 17 bp, Arabidopsis thaliana
aagcgcttatggcggtt

SEQ ID NO: 11698 - DNA, 17 bp, Arabidopsis thaliana
aagcgcttgcggctgcg

SEQ ID NO: 11699 - DNA, 17 bp, Arabidopsis thaliana
aagcgctttacttgcga

SEQ ID NO: 11700 - DNA, 17 bp, Arabidopsis thaliana
aagcgctttatgtctca

SEQ ID NO: 11701 - DNA, 17 bp, Arabidopsis thaliana
aagcgctttatgtctct

SEQ ID NO: 11702 - DNA, 17 bp, Arabidopsis thaliana
aagcgctttgcaaagta

SEQ ID NO: 11703 - DNA, 17 bp, Arabidopsis thaliana
aagcggaagacttctga

SEQ ID NO: 11704 - DNA, 17 bp, Arabidopsis thaliana
aagcggaattttgacga

SEQ ID NO: 11705 - DNA, 17 bp, Arabidopsis thaliana
aagcggacaaaaccgtc

SEQ ID NO: 11706 - DNA, 17 bp, Arabidopsis thaliana
aagcggacatctatcat

SEQ ID NO: 11707 - DNA, 17 bp, Arabidopsis thaliana
aagcggacgaattgaac

SEQ ID NO: 11708 - DNA, 17 bp, Arabidopsis thaliana
aagcggaggtggcaaaa

SEQ ID NO: 11709 - DNA, 17 bp, Arabidopsis thaliana
aagcggatctactaatg

SEQ ID NO: 11710 - DNA, 17 bp, Arabidopsis thaliana
aagcggatgaagtttga

SEQ ID NO: 11711 - DNA, 17 bp, Arabidopsis thaliana
aagcggatgggggcagg

SEQ ID NO: 11712 - DNA, 17 bp, Arabidopsis thaliana
aagcggattcgaaataa

SEQ ID NO: 11713 - DNA, 17 bp, Arabidopsis thaliana
aagcggatttccttttt

SEQ ID NO: 11714 - DNA, 17 bp, Arabidopsis thaliana
aagcggcaagtgacgaa

SEQ ID NO: 11715 - DNA, 17 bp, Arabidopsis thaliana
aagcggcagaccgtggc

SEQ ID NO: 11716 - DNA, 17 bp, Arabidopsis thaliana
aagcggcagactgtggc

SEQ ID NO: 11717 - DNA, 17 bp, Arabidopsis thaliana
aagcggcaggccgtggc

SEQ ID NO: 11718 - DNA, 17 bp, Arabidopsis thaliana
aagcggcctgactacac

SEQ ID NO: 11719 - DNA, 17 bp, Arabidopsis thaliana
aagcggcctggacctcc

SEQ ID NO: 11720 - DNA, 17 bp, Arabidopsis thaliana
aagcggcgacgtttctc

SEQ ID NO: 11721 - DNA, 17 bp, Arabidopsis thaliana
aagcggcgacttctatt

SEQ ID NO: 11722 - DNA, 17 bp, Arabidopsis thaliana
aagcggcggatggagag

SEQ ID NO: 11723 - DNA, 17 bp, Arabidopsis thaliana
aagcggcggcgatggtg

SEQ ID NO: 11724 - DNA, 17 bp, Arabidopsis thaliana
aagcggcggttatagga

SEQ ID NO: 11725 - DNA, 17 bp, Arabidopsis thaliana
aagcggcgtcagtgaac

SEQ ID NO: 11726 - DNA, 17 bp, Arabidopsis thaliana
aagcggctagagttttt

SEQ ID NO: 11727 - DNA, 17 bp, Arabidopsis thaliana
aagcggctgattcagat

SEQ ID NO: 11728 - DNA, 17 bp, Arabidopsis thaliana
aagcggcttcgctattt

SEQ ID NO: 11729 - DNA, 17 bp, Arabidopsis thaliana
aagcggcttgtcccttc

SEQ ID NO: 11730 - DNA, 17 bp, Arabidopsis thaliana
aagcgggaggtcttgag

SEQ ID NO: 11731 - DNA, 17 bp, Arabidopsis thaliana
aagcgggccattcttca

SEQ ID NO: 11732 - DNA, 17 bp, Arabidopsis thaliana
aagcgggccatttttcg

SEQ ID NO: 11733 - DNA, 17 bp, Arabidopsis thaliana
aagcgggctacgatatt

SEQ ID NO: 11734 - DNA, 17 bp, Arabidopsis thaliana
aagcgggctgtctatgt

SEQ ID NO: 11735 - DNA, 17 bp, Arabidopsis thaliana
aagcgggggaaccattc

SEQ ID NO: 11736 - DNA, 17 bp, Arabidopsis thaliana
aagcgggtcaaccggtc

SEQ ID NO: 11737 - DNA, 17 bp, Arabidopsis thaliana
aagcgggtcattcttca

SEQ ID NO: 11738 - DNA, 17 bp, Arabidopsis thaliana
aagcgggtctagcggat

SEQ ID NO: 11739 - DNA, 17 bp, Arabidopsis thaliana
aagcgggtgtaagatgt

SEQ ID NO: 11740 - DNA, 17 bp, Arabidopsis thaliana
aagcgggttgcaaggta

SEQ ID NO: 11741 - DNA, 17 bp, Arabidopsis thaliana
aagcgggtttcgggttc

SEQ ID NO: 11742 - DNA, 17 bp, Arabidopsis thaliana
aagcggtactcgaccag

SEQ ID NO: 11743 - DNA, 17 bp, Arabidopsis thaliana
aagcggtatcactcgca

SEQ ID NO: 11744 - DNA, 17 bp, Arabidopsis thaliana
aagcggtcaaagtcaag

SEQ ID NO: 11745 - DNA, 17 bp, Arabidopsis thaliana
aagcggtcctaaggtag

SEQ ID NO: 11746 - DNA, 17 bp, Arabidopsis thaliana
aagcggtcctggtgaat

SEQ ID NO: 11747 - DNA, 17 bp, Arabidopsis thaliana
aagcggtcgagtgcctt

SEQ ID NO: 11748 - DNA, 17 bp, Arabidopsis thaliana
aagcggtctaatttgtc

SEQ ID NO: 11749 - DNA, 17 bp, Arabidopsis thaliana
aagcggtctgactatcc

SEQ ID NO: 11750 - DNA, 17 bp, Arabidopsis thaliana
aagcggtgtatgcctcg

SEQ ID NO: 11751 - DNA, 17 bp, Arabidopsis thaliana
aagcggtgtcctcggtt

SEQ ID NO: 11752 - DNA, 17 bp, Arabidopsis thaliana
aagcggtgtggaccctc

SEQ ID NO: 11753 - DNA, 17 bp, Arabidopsis thaliana
aagcggtgttcgtagct

SEQ ID NO: 11754 - DNA, 17 bp, Arabidopsis thaliana
aagcggttatcaggagg

SEQ ID NO: 11755 - DNA, 17 bp, Arabidopsis thaliana
aagcggttcagtgcgat

SEQ ID NO: 11756 - DNA, 17 bp, Arabidopsis thaliana
aagcggttctagctacc

SEQ ID NO: 11757 - DNA, 17 bp, Arabidopsis thaliana
aagcggttcttgtgtag

SEQ ID NO: 11758 - DNA, 17 bp, Arabidopsis thaliana
aagcggttttggccggc

SEQ ID NO: 11759 - DNA, 17 bp, Arabidopsis thaliana
aagcggttttggtggaa

SEQ ID NO: 11760 - DNA, 17 bp, Arabidopsis thaliana
aagcgtaagtttaggct

SEQ ID NO: 11761 - DNA, 17 bp, Arabidopsis thaliana
aagcgtaatagaccttg

SEQ ID NO: 11762 - DNA, 17 bp, Arabidopsis thaliana
aagcgtacagattgcgt

SEQ ID NO: 11763 - DNA, 17 bp, Arabidopsis thaliana
aagcgtacagggtagag

SEQ ID NO: 11764 - DNA, 17 bp, Arabidopsis thaliana
aagcgtacttgcgagat

SEQ ID NO: 11765 - DNA, 17 bp, Arabidopsis thaliana
aagcgtatcaggtagag

SEQ ID NO: 11766 - DNA, 17 bp, Arabidopsis thaliana
aagcgtatcgtgacaca

SEQ ID NO: 11767 - DNA, 17 bp, Arabidopsis thaliana
aagcgtatcgtgacata

SEQ ID NO: 11768 - DNA, 17 bp, Arabidopsis thaliana
aagcgtcaaatgcaggc

SEQ ID NO: 11769 - DNA, 17 bp, Arabidopsis thaliana
aagcgtcacagaaggct

SEQ ID NO: 11770 - DNA, 17 bp, Arabidopsis thaliana
aagcgtcactagaaacg

SEQ ID NO: 11771 - DNA, 17 bp, Arabidopsis thaliana
aagcgtcactcaaatag

SEQ ID NO: 11772 - DNA, 17 bp, Arabidopsis thaliana
aagcgtcactcgaaccg

SEQ ID NO: 11773 - DNA, 17 bp, Arabidopsis thaliana
aagcgtcactcgaactg

SEQ ID NO: 11774 - DNA, 17 bp, Arabidopsis thaliana
aagcgtcactcgaatcg

SEQ ID NO: 11775 - DNA, 17 bp, Arabidopsis thaliana
aagcgtcactctgaatt

SEQ ID NO: 11776 - DNA, 17 bp, Arabidopsis thaliana
aagcgtcacttgaaccg

SEQ ID NO: 11777 - DNA, 17 bp, Arabidopsis thaliana
aagcgtcagtggttgtt

SEQ ID NO: 11778 - DNA, 17 bp, Arabidopsis thaliana
aagcgtcatggactttg

SEQ ID NO: 11779 - DNA, 17 bp, Arabidopsis thaliana
aagcgtcattgactttg

SEQ ID NO: 11780 - DNA, 17 bp, Arabidopsis thaliana
aagcgtcatttgaaccg

SEQ ID NO: 11781 - DNA, 17 bp, Arabidopsis thaliana
aagcgtcctcaacgacg

SEQ ID NO: 11782 - DNA, 17 bp, Arabidopsis thaliana
aagcgtcctcagcgacg

SEQ ID NO: 11783 - DNA, 17 bp, Arabidopsis thaliana
aagcgtcctcagtgacg

SEQ ID NO: 11784 - DNA, 17 bp, Arabidopsis thaliana
aagcgtcgacttcaaat

SEQ ID NO: 11785 - DNA, 17 bp, Arabidopsis thaliana
aagcgtcgtgctgctag

SEQ ID NO: 11786 - DNA, 17 bp, Arabidopsis thaliana
aagcgtcgtggacttct

SEQ ID NO: 11787 - DNA, 17 bp, Arabidopsis thaliana
aagcgtcgttcggaccg

SEQ ID NO: 11788 - DNA, 17 bp, Arabidopsis thaliana
aagcgtcgttcggtcgg

SEQ ID NO: 11789 - DNA, 17 bp, Arabidopsis thaliana
aagcgtcgttgcagagc

SEQ ID NO: 11790 - DNA, 17 bp, Arabidopsis thaliana
aagcgtctaacgatttc

SEQ ID NO: 11791 - DNA, 17 bp, Arabidopsis thaliana
aagcgtctactgtgaat

SEQ ID NO: 11792 - DNA, 17 bp, Arabidopsis thaliana
aagcgtctagggttttt

SEQ ID NO: 11793 - DNA, 17 bp, Arabidopsis thaliana
aagcgtctataggtggc

SEQ ID NO: 11794 - DNA, 17 bp, Arabidopsis thaliana
aagcgtctattccttgt

SEQ ID NO: 11795 - DNA, 17 bp, Arabidopsis thaliana
aagcgtctcccgtgagg

SEQ ID NO: 11796 - DNA, 17 bp, Arabidopsis thaliana
aagcgtctgagagatgt

SEQ ID NO: 11797 - DNA, 17 bp, Arabidopsis thaliana
aagcgtctgcctgggtg

SEQ ID NO: 11798 - DNA, 17 bp, Arabidopsis thaliana
aagcgtctggatagtcc

SEQ ID NO: 11799 - DNA, 17 bp, Arabidopsis thaliana
aagcgtctgtaggtgga

SEQ ID NO: 11800 - DNA, 17 bp, Arabidopsis thaliana
aagcgtctgtaggtggc

SEQ ID NO: 11801 - DNA, 17 bp, Arabidopsis thaliana
aagcgtcttgctgctag

SEQ ID NO: 11802 - DNA, 17 bp, Arabidopsis thaliana
aagcgtcttggactctg

SEQ ID NO: 11803 - DNA, 17 bp, Arabidopsis thaliana
aagcgtcttggactttg

SEQ ID NO: 11804 - DNA, 17 bp, Arabidopsis thaliana
aagcgtgactaagtgtc

SEQ ID NO: 11805 - DNA, 17 bp, Arabidopsis thaliana
aagcgtgacttacaagg

SEQ ID NO: 11806 - DNA, 17 bp, Arabidopsis thaliana
aagcgtgccccgagccg

SEQ ID NO: 11807 - DNA, 17 bp, Arabidopsis thaliana
aagcgtgcctaattagg

SEQ ID NO: 11808 - DNA, 17 bp, Arabidopsis thaliana
aagcgtgctacggctgg

SEQ ID NO: 11809 - DNA, 17 bp, Arabidopsis thaliana
aagcgtgcttcggctgg

SEQ ID NO: 11810 - DNA, 17 bp, Arabidopsis thaliana
aagcgtgcttgagctga

SEQ ID NO: 11811 - DNA, 17 bp, Arabidopsis thaliana
aagcgtgcttgggcgag

SEQ ID NO: 11812 - DNA, 17 bp, Arabidopsis thaliana
aagcgtgcttgggctgg

SEQ ID NO: 11813 - DNA, 17 bp, Arabidopsis thaliana
aagcgtgcttgggtgac

SEQ ID NO: 11814 - DNA, 17 bp, Arabidopsis thaliana
aagcgtggcatatcgat

SEQ ID NO: 11815 - DNA, 17 bp, Arabidopsis thaliana
aagcgtggcctatcgat

SEQ ID NO: 11816 - DNA, 17 bp, Arabidopsis thaliana
aagcgtggtcattgcga

SEQ ID NO: 11817 - DNA, 17 bp, Arabidopsis thaliana
aagcgtggtgggcccat

SEQ ID NO: 11818 - DNA, 17 bp, Arabidopsis thaliana
aagcgtgtcaaatgaga

SEQ ID NO: 11819 - DNA, 17 bp, Arabidopsis thaliana
aagcgtgtttggactgc

SEQ ID NO: 11820 - DNA, 17 bp, Arabidopsis thaliana
aagcgttaatgcaacaa

SEQ ID NO: 11821 - DNA, 17 bp, Arabidopsis thaliana
aagcgttactcgaaccg

SEQ ID NO: 11822 - DNA, 17 bp, Arabidopsis thaliana
aagcgttaggcgatagt

SEQ ID NO: 11823 - DNA, 17 bp, Arabidopsis thaliana
aagcgttatccggaatg

SEQ ID NO: 11824 - DNA, 17 bp, Arabidopsis thaliana
aagcgttattacagtgc

SEQ ID NO: 11825 - DNA, 17 bp, Arabidopsis thaliana
aagcgttattggtcgat

SEQ ID NO: 11826 - DNA, 17 bp, Arabidopsis thaliana
aagcgttcaatagaggc

SEQ ID NO: 11827 - DNA, 17 bp, Arabidopsis thaliana
aagcgttccaacacata

SEQ ID NO: 11828 - DNA, 17 bp, Arabidopsis thaliana
aagcgttcgcggttgcg

SEQ ID NO: 11829 - DNA, 17 bp, Arabidopsis thaliana
aagcgttctgatctgat

SEQ ID NO: 11830 - DNA, 17 bp, Arabidopsis thaliana
aagcgttcttggcaccc

SEQ ID NO: 11831 - DNA, 17 bp, Arabidopsis thaliana
aagcgttgacaacttac

SEQ ID NO: 11832 - DNA, 17 bp, Arabidopsis thaliana
aagcgttgataaggagc

SEQ ID NO: 11833 - DNA, 17 bp, Arabidopsis thaliana
aagcgttgatgtttgta

SEQ ID NO: 11834 - DNA, 17 bp, Arabidopsis thaliana
aagcgttgcagctccat

SEQ ID NO: 11835 - DNA, 17 bp, Arabidopsis thaliana
aagcgttggatcggatc

SEQ ID NO: 11836 - DNA, 17 bp, Arabidopsis thaliana
aagcgttggctgaattt

SEQ ID NO: 11837 - DNA, 17 bp, Arabidopsis thaliana
aagcgttgggagtgctc

SEQ ID NO: 11838 - DNA, 17 bp, Arabidopsis thaliana
aagcgttgtgcgtctta

SEQ ID NO: 11839 - DNA, 17 bp, Arabidopsis thaliana
aagcgtttaagatccgg

SEQ ID NO: 11840 - DNA, 17 bp, Arabidopsis thaliana
aagcgtttacagttgcg

SEQ ID NO: 11841 - DNA, 17 bp, Arabidopsis thaliana
aagcgtttgcggctgcg

SEQ ID NO: 11842 - DNA, 17 bp, Arabidopsis thaliana
aagcgtttgcggttacg

SEQ ID NO: 11843 - DNA, 17 bp, Arabidopsis thaliana
aagcgtttgcggttgca

SEQ ID NO: 11844 - DNA, 17 bp, Arabidopsis thaliana
aagcgtttgcggttgcg

SEQ ID NO: 11845 - DNA, 17 bp, Arabidopsis thaliana
aagcgtttgcggttgtg

SEQ ID NO: 11846 - DNA, 17 bp, Arabidopsis thaliana
aagcgtttgcggtttcg

SEQ ID NO: 11847 - DNA, 17 bp, Arabidopsis thaliana
aagcgtttgcgtttgtg

SEQ ID NO: 11848 - DNA, 17 bp, Arabidopsis thaliana
aagcgttttagactctt

SEQ ID NO: 11849 - DNA, 17 bp, Arabidopsis thaliana
aagcgtttttcacgatt

SEQ ID NO: 11850 - DNA, 17 bp, Arabidopsis thaliana
aagcgttttttacgatt

SEQ ID NO: 11851 - DNA, 17 bp, Arabidopsis thaliana
aagctaaaaacgggcgg

SEQ ID NO: 11852 - DNA, 17 bp, Arabidopsis thaliana
aagctaaaacctcagct

SEQ ID NO: 11853 - DNA, 17 bp, Arabidopsis thaliana
aagctaaaatccaggtg

SEQ ID NO: 11854 - DNA, 17 bp, Arabidopsis thaliana
aagctaaatgagctagc

SEQ ID NO: 11855 - DNA, 17 bp, Arabidopsis thaliana
aagctaaccgttgacag

SEQ ID NO: 11856 - DNA, 17 bp, Arabidopsis thaliana
aagctaacctagtccca

SEQ ID NO: 11857 - DNA, 17 bp, Arabidopsis thaliana
aagctaacgaaaaaggc

SEQ ID NO: 11858 - DNA, 17 bp, Arabidopsis thaliana
aagctaacgacacttgg

SEQ ID NO: 11859 - DNA, 17 bp, Arabidopsis thaliana
aagctaactctctcctt

SEQ ID NO: 11860 - DNA, 17 bp, Arabidopsis thaliana
aagctaactttcgttga

SEQ ID NO: 11861 - DNA, 17 bp, Arabidopsis thaliana
aagctaagcgaacggtg

SEQ ID NO: 11862 - DNA, 17 bp, Arabidopsis thaliana
aagctaagctaagatgc

SEQ ID NO: 11863 - DNA, 17 bp, Arabidopsis thaliana
aagctaagctgaacagc

SEQ ID NO: 11864 - DNA, 17 bp, Arabidopsis thaliana
aagctaagctgacggac

SEQ ID NO: 11865 - DNA, 17 bp, Arabidopsis thaliana
aagctaagctgctcctc

SEQ ID NO: 11866 - DNA, 17 bp, Arabidopsis thaliana
aagctaaggaggaaagg

SEQ ID NO: 11867 - DNA, 17 bp, Arabidopsis thaliana
aagctaagtagtgccat

SEQ ID NO: 11868 - DNA, 17 bp, Arabidopsis thaliana
aagctaagtgatccagg

SEQ ID NO: 11869 - DNA, 17 bp, Arabidopsis thaliana
aagctaagtggaaagca

SEQ ID NO: 11870 - DNA, 17 bp, Arabidopsis thaliana
aagctaagtgtgtgatg

SEQ ID NO: 11871 - DNA, 17 bp, Arabidopsis thaliana
aagctaagttacatctg

SEQ ID NO: 11872 - DNA, 17 bp, Arabidopsis thaliana
aagctaatgacacttga

SEQ ID NO: 11873 - DNA, 17 bp, Arabidopsis thaliana
aagctaatgacacttgg

SEQ ID NO: 11874 - DNA, 17 bp, Arabidopsis thaliana
aagctaatgtccgtaac

SEQ ID NO: 11875 - DNA, 17 bp, Arabidopsis thaliana
aagctaatttgtgaaac

SEQ ID NO: 11876 - DNA, 17 bp, Arabidopsis thaliana
aagctacagagacttgc

SEQ ID NO: 11877 - DNA, 17 bp, Arabidopsis thaliana
aagctacagagtcttcc

SEQ ID NO: 11878 - DNA, 17 bp, Arabidopsis thaliana
aagctacagttgaaacc

SEQ ID NO: 11879 - DNA, 17 bp, Arabidopsis thaliana
aagctaccaccctcgct

SEQ ID NO: 11880 - DNA, 17 bp, Arabidopsis thaliana
aagctaccactttgctc

SEQ ID NO: 11881 - DNA, 17 bp, Arabidopsis thaliana
aagctaccgaccgacca

SEQ ID NO: 11882 - DNA, 17 bp, Arabidopsis thaliana
aagctaccgtcgctgga

SEQ ID NO: 11883 - DNA, 17 bp, Arabidopsis thaliana
aagctaccgtgcctgga

SEQ ID NO: 11884 - DNA, 17 bp, Arabidopsis thaliana
aagctaccgtgcgcagg

SEQ ID NO: 11885 - DNA, 17 bp, Arabidopsis thaliana
aagctaccgtgcgctgg

SEQ ID NO: 11886 - DNA, 17 bp, Arabidopsis thaliana
aagctaccgtgtgctgg

SEQ ID NO: 11887 - DNA, 17 bp, Arabidopsis thaliana
aagctacctgcgctgga

SEQ ID NO: 11888 - DNA, 17 bp, Arabidopsis thaliana
aagctaccttgcgctgg

SEQ ID NO: 11889 - DNA, 17 bp, Arabidopsis thaliana
aagctacgtcctggttg

SEQ ID NO: 11890 - DNA, 17 bp, Arabidopsis thaliana
aagctacgtcttagtcg

SEQ ID NO: 11891 - DNA, 17 bp, Arabidopsis thaliana
aagctacgtggcggatg

SEQ ID NO: 11892 - DNA, 17 bp, Arabidopsis thaliana
aagctacgttctggtta

SEQ ID NO: 11893 - DNA, 17 bp, Arabidopsis thaliana
aagctactcaggtgagg

SEQ ID NO: 11894 - DNA, 17 bp, Arabidopsis thaliana
aagctactgttgagcct

SEQ ID NO: 11895 - DNA, 17 bp, Arabidopsis thaliana
aagctacttcttggttg

SEQ ID NO: 11896 - DNA, 17 bp, Arabidopsis thaliana
aagctagtccgctggtt

SEQ ID NO: 11897 - DNA, 17 bp, Arabidopsis thaliana
aagctagtcgcggtgtt

SEQ ID NO: 11898 - DNA, 17 bp, Arabidopsis thaliana
aagctatagtcgccttc

SEQ ID NO: 11899 - DNA, 17 bp, Arabidopsis thaliana
aagctatataggggggt

SEQ ID NO: 11900 - DNA, 17 bp, Arabidopsis thaliana
aagctatatgtaatcgc

SEQ ID NO: 11901 - DNA, 17 bp, Arabidopsis thaliana
aagctatctacatgtat

SEQ ID NO: 11902 - DNA, 17 bp, Arabidopsis thaliana
aagctatctgtgtgctt

SEQ ID NO: 11903 - DNA, 17 bp, Arabidopsis thaliana
aagctatctttgtgcca

SEQ ID NO: 11904 - DNA, 17 bp, Arabidopsis thaliana
aagctatgatttttctg

SEQ ID NO: 11905 - DNA, 17 bp, Arabidopsis thaliana
aagctatgcgtgagcga

SEQ ID NO: 11906 - DNA, 17 bp, Arabidopsis thaliana
aagctatggcaaaatca

SEQ ID NO: 11907 - DNA, 17 bp, Arabidopsis thaliana
aagctatgtgggtgatt

SEQ ID NO: 11908 - DNA, 17 bp, Arabidopsis thaliana
aagctattagctcagtg

SEQ ID NO: 11909 - DNA, 17 bp, Arabidopsis thaliana
aagctattcatcccttg

SEQ ID NO: 11910 - DNA, 17 bp, Arabidopsis thaliana
aagctattgaacccatg

SEQ ID NO: 11911 - DNA, 17 bp, Arabidopsis thaliana
aagctattgcttttgga

SEQ ID NO: 11912 - DNA, 17 bp, Arabidopsis thaliana
aagctattggtgatgaa

SEQ ID NO: 11913 - DNA, 17 bp, Arabidopsis thaliana
aagctattgttggtcga

SEQ ID NO: 11914 - DNA, 17 bp, Arabidopsis thaliana
aagctcaaactcacttt

SEQ ID NO: 11915 - DNA, 17 bp, Arabidopsis thaliana
aagctcaaactgcagga

SEQ ID NO: 11916 - DNA, 17 bp, Arabidopsis thaliana
aagctcaaagatcctac

SEQ ID NO: 11917 - DNA, 17 bp, Arabidopsis thaliana
aagctcaacagggtctt

SEQ ID NO: 11918 - DNA, 17 bp, Arabidopsis thaliana
aagctcaactgcgccga

SEQ ID NO: 11919 - DNA, 17 bp, Arabidopsis thaliana
aagctcaagagggatag

SEQ ID NO: 11920 - DNA, 17 bp, Arabidopsis thaliana
aagctcaagatcgacag

SEQ ID NO: 11921 - DNA, 17 bp, Arabidopsis thaliana
aagctcaagccataccg

SEQ ID NO: 11922 - DNA, 17 bp, Arabidopsis thaliana
aagctcaatcccaaaac

SEQ ID NO: 11923 - DNA, 17 bp, Arabidopsis thaliana
aagctcaatccttgtgt

SEQ ID NO: 11924 - DNA, 17 bp, Arabidopsis thaliana
aagctcaatgtccacat

SEQ ID NO: 11925 - DNA, 17 bp, Arabidopsis thaliana
aagctcaatttcttagg

SEQ ID NO: 11926 - DNA, 17 bp, Arabidopsis thaliana
aagctcacactatcagg

SEQ ID NO: 11927 - DNA, 17 bp, Arabidopsis thaliana
aagctcaccgctggact

SEQ ID NO: 11928 - DNA, 17 bp, Arabidopsis thaliana
aagctcacgagggagag

SEQ ID NO: 11929 - DNA, 17 bp, Arabidopsis thaliana
aagctcacgagggaggg

SEQ ID NO: 11930 - DNA, 17 bp, Arabidopsis thaliana
aagctcacttgcgagga

SEQ ID NO: 11931 - DNA, 17 bp, Arabidopsis thaliana
aagctcagaagggatag

SEQ ID NO: 11932 - DNA, 17 bp, Arabidopsis thaliana
aagctcagacatctgcg

SEQ ID NO: 11933 - DNA, 17 bp, Arabidopsis thaliana
aagctcagaccaatcgt

SEQ ID NO: 11934 - DNA, 17 bp, Arabidopsis thaliana
aagctcagcccgacctg

SEQ ID NO: 11935 - DNA, 17 bp, Arabidopsis thaliana
aagctcagcgacggacc

SEQ ID NO: 11936 - DNA, 17 bp, Arabidopsis thaliana
aagctcaggaaggatag

SEQ ID NO: 11937 - DNA, 17 bp, Arabidopsis thaliana
aagctcaggacggatag

SEQ ID NO: 11938 - DNA, 17 bp, Arabidopsis thaliana
aagctcaggagacatag

SEQ ID NO: 11939 - DNA, 17 bp, Arabidopsis thaliana
aagctcaggagagatag

SEQ ID NO: 11940 - DNA, 17 bp, Arabidopsis thaliana
aagctcaggagcattgc

SEQ ID NO: 11941 - DNA, 17 bp, Arabidopsis thaliana
aagctcaggagcgatag

SEQ ID NO: 11942 - DNA, 17 bp, Arabidopsis thaliana
aagctcaggaggaagag

SEQ ID NO: 11943 - DNA, 17 bp, Arabidopsis thaliana
aagctcaggaggaaggg

SEQ ID NO: 11944 - DNA, 17 bp, Arabidopsis thaliana
aagctcaggaggaatag

SEQ ID NO: 11945 - DNA, 17 bp, Arabidopsis thaliana
aagctcaggaggcatac

SEQ ID NO: 11946 - DNA, 17 bp, Arabidopsis thaliana
aagctcaggaggcatag

SEQ ID NO: 11947 - DNA, 17 bp, Arabidopsis thaliana
aagctcaggagggaaag

SEQ ID NO: 11948 - DNA, 17 bp, Arabidopsis thaliana
aagctcaggagggaagg

SEQ ID NO: 11949 - DNA, 17 bp, Arabidopsis thaliana
aagctcaggagggacag

SEQ ID NO: 11950 - DNA, 17 bp, Arabidopsis thaliana
aagctcaggagggaccc

SEQ ID NO: 11951 - DNA, 17 bp, Arabidopsis thaliana
aagctcaggagggagag

SEQ ID NO: 11952 - DNA, 17 bp, Arabidopsis thaliana
aagctcaggagggagcg

SEQ ID NO: 11953 - DNA, 17 bp, Arabidopsis thaliana
aagctcaggagggaggg

SEQ ID NO: 11954 - DNA, 17 bp, Arabidopsis thaliana
aagctcaggagggataa

SEQ ID NO: 11955 - DNA, 17 bp, Arabidopsis thaliana
aagctcaggagggatac

SEQ ID NO: 11956 - DNA, 17 bp, Arabidopsis thaliana
aagctcaggagggatag

SEQ ID NO: 11957 - DNA, 17 bp, Arabidopsis thaliana
aagctcaggagggatat

SEQ ID NO: 11958 - DNA, 17 bp, Arabidopsis thaliana
aagctcaggagggatcg

SEQ ID NO: 11959 - DNA, 17 bp, Arabidopsis thaliana
aagctcaggagggatgg

SEQ ID NO: 11960 - DNA, 17 bp, Arabidopsis thaliana
aagctcaggagggcgag

SEQ ID NO: 11961 - DNA, 17 bp, Arabidopsis thaliana
aagctcaggagggctaa

SEQ ID NO: 11962 - DNA, 17 bp, Arabidopsis thaliana
aagctcaggaggggtag

SEQ ID NO: 11963 - DNA, 17 bp, Arabidopsis thaliana
aagctcaggaggtatag

SEQ ID NO: 11964 - DNA, 17 bp, Arabidopsis thaliana
aagctcaggagtgatag

SEQ ID NO: 11965 - DNA, 17 bp, Arabidopsis thaliana
aagctcaggagtgttag

SEQ ID NO: 11966 - DNA, 17 bp, Arabidopsis thaliana
aagctcaggatggatag

SEQ ID NO: 11967 - DNA, 17 bp, Arabidopsis thaliana
aagctcaggattttgta

SEQ ID NO: 11968 - DNA, 17 bp, Arabidopsis thaliana
aagctcagggatagcgc

SEQ ID NO: 11969 - DNA, 17 bp, Arabidopsis thaliana
aagctcaggggggatag

SEQ ID NO: 11970 - DNA, 17 bp, Arabidopsis thaliana
aagctcagggtcctaag

SEQ ID NO: 11971 - DNA, 17 bp, Arabidopsis thaliana
aagctcaggtctgtgct

SEQ ID NO: 11972 - DNA, 17 bp, Arabidopsis thaliana
aagctcagtagggatag

SEQ ID NO: 11973 - DNA, 17 bp, Arabidopsis thaliana
aagctcagttgggtctt

SEQ ID NO: 11974 - DNA, 17 bp, Arabidopsis thaliana
aagctcagtttcagcac

SEQ ID NO: 11975 - DNA, 17 bp, Arabidopsis thaliana
aagctcagtttcagcga

SEQ ID NO: 11976 - DNA, 17 bp, Arabidopsis thaliana
aagctcagtttttgtgg

SEQ ID NO: 11977 - DNA, 17 bp, Arabidopsis thaliana
aagctcatagatttact

SEQ ID NO: 11978 - DNA, 17 bp, Arabidopsis thaliana
aagctcatctactcctg

SEQ ID NO: 11979 - DNA, 17 bp, Arabidopsis thaliana
aagctcatcttcagtaa

SEQ ID NO: 11980 - DNA, 17 bp, Arabidopsis thaliana
aagctcatgagggatag

SEQ ID NO: 11981 - DNA, 17 bp, Arabidopsis thaliana
aagctcatgtgctgatg

SEQ ID NO: 11982 - DNA, 17 bp, Arabidopsis thaliana
aagctcatgtgctgatt

SEQ ID NO: 11983 - DNA, 17 bp, Arabidopsis thaliana
aagctcatttccgcaag

SEQ ID NO: 11984 - DNA, 17 bp, Arabidopsis thaliana
aagctccaactccattt

SEQ ID NO: 11985 - DNA, 17 bp, Arabidopsis thaliana
aagctccacgagcccga

SEQ ID NO: 11986 - DNA, 17 bp, Arabidopsis thaliana
aagctccactttctacg

SEQ ID NO: 11987 - DNA, 17 bp, Arabidopsis thaliana
aagctccagaggaccag

SEQ ID NO: 11988 - DNA, 17 bp, Arabidopsis thaliana
aagctccagaggtaagt

SEQ ID NO: 11989 - DNA, 17 bp, Arabidopsis thaliana
aagctccaggaggtatc

SEQ ID NO: 11990 - DNA, 17 bp, Arabidopsis thaliana
aagctccaggatagcgt

SEQ ID NO: 11991 - DNA, 17 bp, Arabidopsis thaliana
aagctccctcaggttag

SEQ ID NO: 11992 - DNA, 17 bp, Arabidopsis thaliana
aagctcccttgttccaa

SEQ ID NO: 11993 - DNA, 17 bp, Arabidopsis thaliana
aagctccgaatggtgac

SEQ ID NO: 11994 - DNA, 17 bp, Arabidopsis thaliana
aagctccgaggtatcca

SEQ ID NO: 11995 - DNA, 17 bp, Arabidopsis thaliana
aagctccggctaggatc

SEQ ID NO: 11996 - DNA, 17 bp, Arabidopsis thaliana
aagctcctactgagggt

SEQ ID NO: 11997 - DNA, 17 bp, Arabidopsis thaliana
aagctccttttgcacct

SEQ ID NO: 11998 - DNA, 17 bp, Arabidopsis thaliana
aagctcgacaattgact

SEQ ID NO: 11999 - DNA, 17 bp, Arabidopsis thaliana
aagctcgagtacggtcc

SEQ ID NO: 12000 - DNA, 17 bp, Arabidopsis thaliana
aagctcgagttgcggtt

SEQ ID NO: 12001 - DNA, 17 bp, Arabidopsis thaliana
aagctcgatccagtccc

SEQ ID NO: 12002 - DNA, 17 bp, Arabidopsis thaliana
aagctcgatctttgacc

SEQ ID NO: 12003 - DNA, 17 bp, Arabidopsis thaliana
aagctcgattcgcagac

SEQ ID NO: 12004 - DNA, 17 bp, Arabidopsis thaliana
aagctcgatttcacagc

SEQ ID NO: 12005 - DNA, 17 bp, Arabidopsis thaliana
aagctcgatttcgttac

SEQ ID NO: 12006 - DNA, 17 bp, Arabidopsis thaliana
aagctcgatttgcagac

SEQ ID NO: 12007 - DNA, 17 bp, Arabidopsis thaliana
aagctcgcaggctcgtc

SEQ ID NO: 12008 - DNA, 17 bp, Arabidopsis thaliana
aagctcgcgacctatac

SEQ ID NO: 12009 - DNA, 17 bp, Arabidopsis thaliana
aagctcgctgtgctcaa

SEQ ID NO: 12010 - DNA, 17 bp, Arabidopsis thaliana
aagctcggaaatttgcg

SEQ ID NO: 12011 - DNA, 17 bp, Arabidopsis thaliana
aagctcggacaaagggg

SEQ ID NO: 12012 - DNA, 17 bp, Arabidopsis thaliana
aagctcggatgctttac

SEQ ID NO: 12013 - DNA, 17 bp, Arabidopsis thaliana
aagctcggcgaccctac

SEQ ID NO: 12014 - DNA, 17 bp, Arabidopsis thaliana
aagctcgggagggagag

SEQ ID NO: 12015 - DNA, 17 bp, Arabidopsis thaliana
aagctcgtagttgaacc

SEQ ID NO: 12016 - DNA, 17 bp, Arabidopsis thaliana
aagctcgtcttgtggcc

SEQ ID NO: 12017 - DNA, 17 bp, Arabidopsis thaliana
aagctcgtggagactgt

SEQ ID NO: 12018 - DNA, 17 bp, Arabidopsis thaliana
aagctcgtgttcaaatg

SEQ ID NO: 12019 - DNA, 17 bp, Arabidopsis thaliana
aagctcgtgttctaagt

SEQ ID NO: 12020 - DNA, 17 bp, Arabidopsis thaliana
aagctcgttgatcgtca

SEQ ID NO: 12021 - DNA, 17 bp, Arabidopsis thaliana
aagctcgttgattttca

SEQ ID NO: 12022 - DNA, 17 bp, Arabidopsis thaliana
aagctcgttggtccagc

SEQ ID NO: 12023 - DNA, 17 bp, Arabidopsis thaliana
aagctctaagatattct

SEQ ID NO: 12024 - DNA, 17 bp, Arabidopsis thaliana
aagctctaagctctgcg

SEQ ID NO: 12025 - DNA, 17 bp, Arabidopsis thaliana
aagctctaagtttgttc

SEQ ID NO: 12026 - DNA, 17 bp, Arabidopsis thaliana
aagctctacacgaatca

SEQ ID NO: 12027 - DNA, 17 bp, Arabidopsis thaliana
aagctctacgagatgtt

SEQ ID NO: 12028 - DNA, 17 bp, Arabidopsis thaliana
aagctctatctgctgct

SEQ ID NO: 12029 - DNA, 17 bp, Arabidopsis thaliana
aagctctatgagtctag

SEQ ID NO: 12030 - DNA, 17 bp, Arabidopsis thaliana
aagctctatttgctgct

SEQ ID NO: 12031 - DNA, 17 bp, Arabidopsis thaliana
aagctctcacacgagcg

SEQ ID NO: 12032 - DNA, 17 bp, Arabidopsis thaliana
aagctctcataagcctg

SEQ ID NO: 12033 - DNA, 17 bp, Arabidopsis thaliana
aagctctcatgtgtgta

SEQ ID NO: 12034 - DNA, 17 bp, Arabidopsis thaliana
aagctctcatgtgtgtg

SEQ ID NO: 12035 - DNA, 17 bp, Arabidopsis thaliana
aagctctcattgtgtgc

SEQ ID NO: 12036 - DNA, 17 bp, Arabidopsis thaliana
aagctctccatgcaaga

SEQ ID NO: 12037 - DNA, 17 bp, Arabidopsis thaliana
aagctctctgcagattt

SEQ ID NO: 12038 - DNA, 17 bp, Arabidopsis thaliana
aagctctgaccatgtat

SEQ ID NO: 12039 - DNA, 17 bp, Arabidopsis thaliana
aagctctgacggtgatc

SEQ ID NO: 12040 - DNA, 17 bp, Arabidopsis thaliana
aagctctgactgtgact

SEQ ID NO: 12041 - DNA, 17 bp, Arabidopsis thaliana
aagctctgcattgccat

SEQ ID NO: 12042 - DNA, 17 bp, Arabidopsis thaliana
aagctctgcgatttcaa

SEQ ID NO: 12043 - DNA, 17 bp, Arabidopsis thaliana
aagctctgcgatttttg

SEQ ID NO: 12044 - DNA, 17 bp, Arabidopsis thaliana
aagctctggttcggaca

SEQ ID NO: 12045 - DNA, 17 bp, Arabidopsis thaliana
aagctctgtctgcttag

SEQ ID NO: 12046 - DNA, 17 bp, Arabidopsis thaliana
aagctctgtgttgttcg

SEQ ID NO: 12047 - DNA, 17 bp, Arabidopsis thaliana
aagctctgttactcgtt

SEQ ID NO: 12048 - DNA, 17 bp, Arabidopsis thaliana
aagctctgtttccgtgg

SEQ ID NO: 12049 - DNA, 17 bp, Arabidopsis thaliana
aagctcttccgcggcta

SEQ ID NO: 12050 - DNA, 17 bp, Arabidopsis thaliana
aagctcttcgtgattat

SEQ ID NO: 12051 - DNA, 17 bp, Arabidopsis thaliana
aagctcttctaagttcg

SEQ ID NO: 12052 - DNA, 17 bp, Arabidopsis thaliana
aagctcttctactccgg

SEQ ID NO: 12053 - DNA, 17 bp, Arabidopsis thaliana
aagctcttctctgtttg

SEQ ID NO: 12054 - DNA, 17 bp, Arabidopsis thaliana
aagctcttgcgcaatca

SEQ ID NO: 12055 - DNA, 17 bp, Arabidopsis thaliana
aagctcttggctcattg

SEQ ID NO: 12056 - DNA, 17 bp, Arabidopsis thaliana
aagctctttcagtttct

SEQ ID NO: 12057 - DNA, 17 bp, Arabidopsis thaliana
aagctgaaactggtttg

SEQ ID NO: 12058 - DNA, 17 bp, Arabidopsis thaliana
aagctgaactatttttc

SEQ ID NO: 12059 - DNA, 17 bp, Arabidopsis thaliana
aagctgaacttgccttg

SEQ ID NO: 12060 - DNA, 17 bp, Arabidopsis thaliana
aagctgaaggatgtggt

SEQ ID NO: 12061 - DNA, 17 bp, Arabidopsis thaliana
aagctgaatcctggtcc

SEQ ID NO: 12062 - DNA, 17 bp, Arabidopsis thaliana
aagctgaccgtgtgaga

SEQ ID NO: 12063 - DNA, 17 bp, Arabidopsis thaliana
aagctgacgtcggacgc

SEQ ID NO: 12064 - DNA, 17 bp, Arabidopsis thaliana
aagctgagaacgccggc

SEQ ID NO: 12065 - DNA, 17 bp, Arabidopsis thaliana
aagctgagaatgcaatt

SEQ ID NO: 12066 - DNA, 17 bp, Arabidopsis thaliana
aagctgagactgtctca

SEQ ID NO: 12067 - DNA, 17 bp, Arabidopsis thaliana
aagctgagagcaacgct

SEQ ID NO: 12068 - DNA, 17 bp, Arabidopsis thaliana
aagctgagattacaacg

SEQ ID NO: 12069 - DNA, 17 bp, Arabidopsis thaliana
aagctgagccgcctcat

SEQ ID NO: 12070 - DNA, 17 bp, Arabidopsis thaliana
aagctgagggctgggct

SEQ ID NO: 12071 - DNA, 17 bp, Arabidopsis thaliana
aagctgagtcctggtcc

SEQ ID NO: 12072 - DNA, 17 bp, Arabidopsis thaliana
aagctgataccgctgtt

SEQ ID NO: 12073 - DNA, 17 bp, Arabidopsis thaliana
aagctgataccggtgtg

SEQ ID NO: 12074 - DNA, 17 bp, Arabidopsis thaliana
aagctgatcaccacgcc

SEQ ID NO: 12075 - DNA, 17 bp, Arabidopsis thaliana
aagctgatcctttgcat

SEQ ID NO: 12076 - DNA, 17 bp, Arabidopsis thaliana
aagctgatctagggttc

SEQ ID NO: 12077 - DNA, 17 bp, Arabidopsis thaliana
aagctgattggcgggat

SEQ ID NO: 12078 - DNA, 17 bp, Arabidopsis thaliana
aagctgattggcgtgat

SEQ ID NO: 12079 - DNA, 17 bp, Arabidopsis thaliana
aagctgatttgtcggct

SEQ ID NO: 12080 - DNA, 17 bp, Arabidopsis thaliana
aagctgcacgactcgta

SEQ ID NO: 12081 - DNA, 17 bp, Arabidopsis thaliana
aagctgcagagatagtt

SEQ ID NO: 12082 - DNA, 17 bp, Arabidopsis thaliana
aagctgcagatttcgat

SEQ ID NO: 12083 - DNA, 17 bp, Arabidopsis thaliana
aagctgcagcagatgac

SEQ ID NO: 12084 - DNA, 17 bp, Arabidopsis thaliana
aagctgcagccaagaat

SEQ ID NO: 12085 - DNA, 17 bp, Arabidopsis thaliana
aagctgcagtagcggtt

SEQ ID NO: 12086 - DNA, 17 bp, Arabidopsis thaliana
aagctgccagcatgaac

SEQ ID NO: 12087 - DNA, 17 bp, Arabidopsis thaliana
aagctgccagcatgatc

SEQ ID NO: 12088 - DNA, 17 bp, Arabidopsis thaliana
aagctgcgagtcctggt

SEQ ID NO: 12089 - DNA, 17 bp, Arabidopsis thaliana
aagctgcgatacttgtt

SEQ ID NO: 12090 - DNA, 17 bp, Arabidopsis thaliana
aagctgcgccactctga

SEQ ID NO: 12091 - DNA, 17 bp, Arabidopsis thaliana
aagctgcgggttgatct

SEQ ID NO: 12092 - DNA, 17 bp, Arabidopsis thaliana
aagctgcggtacaccgc

SEQ ID NO: 12093 - DNA, 17 bp, Arabidopsis thaliana
aagctgcggttgcgggc

SEQ ID NO: 12094 - DNA, 17 bp, Arabidopsis thaliana
aagctgctaagctatgg

SEQ ID NO: 12095 - DNA, 17 bp, Arabidopsis thaliana
aagctgctacaattgga

SEQ ID NO: 12096 - DNA, 17 bp, Arabidopsis thaliana
aagctgctatgaatcaa

SEQ ID NO: 12097 - DNA, 17 bp, Arabidopsis thaliana
aagctgctcatgctctt

SEQ ID NO: 12098 - DNA, 17 bp, Arabidopsis thaliana
aagctgctcatgttctt

SEQ ID NO: 12099 - DNA, 17 bp, Arabidopsis thaliana
aagctgctccggtgcag

SEQ ID NO: 12100 - DNA, 17 bp, Arabidopsis thaliana
aagctgctgagtgctga

SEQ ID NO: 12101 - DNA, 17 bp, Arabidopsis thaliana
aagctgctgagtgttgc

SEQ ID NO: 12102 - DNA, 17 bp, Arabidopsis thaliana
aagctgctgatgttacc

SEQ ID NO: 12103 - DNA, 17 bp, Arabidopsis thaliana
aagctgcttctggcgcg

SEQ ID NO: 12104 - DNA, 17 bp, Arabidopsis thaliana
aagctgcttggtgtttt

SEQ ID NO: 12105 - DNA, 17 bp, Arabidopsis thaliana
aagctggaaaagtcttg

SEQ ID NO: 12106 - DNA, 17 bp, Arabidopsis thaliana
aagctggaacggcgagg

SEQ ID NO: 12107 - DNA, 17 bp, Arabidopsis thaliana
aagctggaccgagagac

SEQ ID NO: 12108 - DNA, 17 bp, Arabidopsis thaliana
aagctggaccgcaggta

SEQ ID NO: 12109 - DNA, 17 bp, Arabidopsis thaliana
aagctggacttgcctct

SEQ ID NO: 12110 - DNA, 17 bp, Arabidopsis thaliana
aagctggacttggtatg

SEQ ID NO: 12111 - DNA, 17 bp, Arabidopsis thaliana
aagctggagaccttttt

SEQ ID NO: 12112 - DNA, 17 bp, Arabidopsis thaliana
aagctggagtagtcatt

SEQ ID NO: 12113 - DNA, 17 bp, Arabidopsis thaliana
aagctggcctcggatcg

SEQ ID NO: 12114 - DNA, 17 bp, Arabidopsis thaliana
aagctggcctgggttgt

SEQ ID NO: 12115 - DNA, 17 bp, Arabidopsis thaliana
aagctggcggacaaaag

SEQ ID NO: 12116 - DNA, 17 bp, Arabidopsis thaliana
aagctggctcgggatga

SEQ ID NO: 12117 - DNA, 17 bp, Arabidopsis thaliana
aagctggtggactgaat

SEQ ID NO: 12118 - DNA, 17 bp, Arabidopsis thaliana
aagctggtgtattcctt

SEQ ID NO: 12119 - DNA, 17 bp, Arabidopsis thaliana
aagctggttagctctga

SEQ ID NO: 12120 - DNA, 17 bp, Arabidopsis thaliana
aagctggttctggtgcg

SEQ ID NO: 12121 - DNA, 17 bp, Arabidopsis thaliana
aagctgtaacgaccgcg

SEQ ID NO: 12122 - DNA, 17 bp, Arabidopsis thaliana
aagctgtaagtcagact

SEQ ID NO: 12123 - DNA, 17 bp, Arabidopsis thaliana
aagctgtagatggatcc

SEQ ID NO: 12124 - DNA, 17 bp, Arabidopsis thaliana
aagctgtattgcaggtg

SEQ ID NO: 12125 - DNA, 17 bp, Arabidopsis thaliana
aagctgtcaatgttctt

SEQ ID NO: 12126 - DNA, 17 bp, Arabidopsis thaliana
aagctgtcgtcttcttg

SEQ ID NO: 12127 - DNA, 17 bp, Arabidopsis thaliana
aagctgtcttcactaac

SEQ ID NO: 12128 - DNA, 17 bp, Arabidopsis thaliana
aagctgtgatttcagac

SEQ ID NO: 12129 - DNA, 17 bp, Arabidopsis thaliana
aagctgtgcaaacgacc

SEQ ID NO: 12130 - DNA, 17 bp, Arabidopsis thaliana
aagctgtgccagcgtag

SEQ ID NO: 12131 - DNA, 17 bp, Arabidopsis thaliana
aagctgtgggatgtcaa

SEQ ID NO: 12132 - DNA, 17 bp, Arabidopsis thaliana
aagctgttaaggttcct

SEQ ID NO: 12133 - DNA, 17 bp, Arabidopsis thaliana
aagctgttcatcttcag

SEQ ID NO: 12134 - DNA, 17 bp, Arabidopsis thaliana
aagctgttccaaactat

SEQ ID NO: 12135 - DNA, 17 bp, Arabidopsis thaliana
aagctgttcgtttcact

SEQ ID NO: 12136 - DNA, 17 bp, Arabidopsis thaliana
aagctgttctctcgtgt

SEQ ID NO: 12137 - DNA, 17 bp, Arabidopsis thaliana
aagctgttggagccacg

SEQ ID NO: 12138 - DNA, 17 bp, Arabidopsis thaliana
aagctgttttcggttga

SEQ ID NO: 12139 - DNA, 17 bp, Arabidopsis thaliana
aagcttaaagatcgtcg

SEQ ID NO: 12140 - DNA, 17 bp, Arabidopsis thaliana
aagcttaaaggtcatcg

SEQ ID NO: 12141 - DNA, 17 bp, Arabidopsis thaliana
aagcttaacagtgcgat

SEQ ID NO: 12142 - DNA, 17 bp, Arabidopsis thaliana
aagcttaaccgtggagt

SEQ ID NO: 12143 - DNA, 17 bp, Arabidopsis thaliana
aagcttaagatcgagtt

SEQ ID NO: 12144 - DNA, 17 bp, Arabidopsis thaliana
aagcttaagattgggtt

SEQ ID NO: 12145 - DNA, 17 bp, Arabidopsis thaliana
aagcttaagcccgttct

SEQ ID NO: 12146 - DNA, 17 bp, Arabidopsis thaliana
aagcttaaggtcgccgg

SEQ ID NO: 12147 - DNA, 17 bp, Arabidopsis thaliana
aagcttaagtcaaatgt

SEQ ID NO: 12148 - DNA, 17 bp, Arabidopsis thaliana
aagcttacaagatcatt

SEQ ID NO: 12149 - DNA, 17 bp, Arabidopsis thaliana
aagcttacaagatcggg

SEQ ID NO: 12150 - DNA, 17 bp, Arabidopsis thaliana
aagcttacaagatgagg

SEQ ID NO: 12151 - DNA, 17 bp, Arabidopsis thaliana
aagcttacaagtgcggt

SEQ ID NO: 12152 - DNA, 17 bp, Arabidopsis thaliana
aagcttacctgcggtat

SEQ ID NO: 12153 - DNA, 17 bp, Arabidopsis thaliana
aagcttactccgacgac

SEQ ID NO: 12154 - DNA, 17 bp, Arabidopsis thaliana
aagcttagagaacgccg

SEQ ID NO: 12155 - DNA, 17 bp, Arabidopsis thaliana
aagcttagagatcgtcg

SEQ ID NO: 12156 - DNA, 17 bp, Arabidopsis thaliana
aagcttagaggtcgccg

SEQ ID NO: 12157 - DNA, 17 bp, Arabidopsis thaliana
aagcttagaggtcgtcg

SEQ ID NO: 12158 - DNA, 17 bp, Arabidopsis thaliana
aagcttagattgccatg

SEQ ID NO: 12159 - DNA, 17 bp, Arabidopsis thaliana
aagcttagcatgtcctg

SEQ ID NO: 12160 - DNA, 17 bp, Arabidopsis thaliana
aagcttagcctaggatc

SEQ ID NO: 12161 - DNA, 17 bp, Arabidopsis thaliana
aagcttagggcgtccct

SEQ ID NO: 12162 - DNA, 17 bp, Arabidopsis thaliana
aagcttagtgatggccg

SEQ ID NO: 12163 - DNA, 17 bp, Arabidopsis thaliana
aagcttatccagtaaat

SEQ ID NO: 12164 - DNA, 17 bp, Arabidopsis thaliana
aagcttatccgttgatc

SEQ ID NO: 12165 - DNA, 17 bp, Arabidopsis thaliana
aagcttatcgcgataca

SEQ ID NO: 12166 - DNA, 17 bp, Arabidopsis thaliana
aagcttatggggtcgct

SEQ ID NO: 12167 - DNA, 17 bp, Arabidopsis thaliana
aagcttatgtgaaaggc

SEQ ID NO: 12168 - DNA, 17 bp, Arabidopsis thaliana
aagcttatgttctccga

SEQ ID NO: 12169 - DNA, 17 bp, Arabidopsis thaliana
aagcttatgttctccgg

SEQ ID NO: 12170 - DNA, 17 bp, Arabidopsis thaliana
aagcttatttatcttgg

SEQ ID NO: 12171 - DNA, 17 bp, Arabidopsis thaliana
aagcttatttggaagaa

SEQ ID NO: 12172 - DNA, 17 bp, Arabidopsis thaliana
aagcttattttccctaa

SEQ ID NO: 12173 - DNA, 17 bp, Arabidopsis thaliana
aagcttcaaaaaatcat

SEQ ID NO: 12174 - DNA, 17 bp, Arabidopsis thaliana
aagcttcaaccgtctcc

SEQ ID NO: 12175 - DNA, 17 bp, Arabidopsis thaliana
aagcttcaagttggatc

SEQ ID NO: 12176 - DNA, 17 bp, Arabidopsis thaliana
aagcttcacaacttctg

SEQ ID NO: 12177 - DNA, 17 bp, Arabidopsis thaliana
aagcttcacctagggtt

SEQ ID NO: 12178 - DNA, 17 bp, Arabidopsis thaliana
aagcttcacgagcccga

SEQ ID NO: 12179 - DNA, 17 bp, Arabidopsis thaliana
aagcttcactgttccct

SEQ ID NO: 12180 - DNA, 17 bp, Arabidopsis thaliana
aagcttcagaagccatt

SEQ ID NO: 12181 - DNA, 17 bp, Arabidopsis thaliana
aagcttcatctatccga

SEQ ID NO: 12182 - DNA, 17 bp, Arabidopsis thaliana
aagcttcatggccagtg

SEQ ID NO: 12183 - DNA, 17 bp, Arabidopsis thaliana
aagcttcatgggttgcc

SEQ ID NO: 12184 - DNA, 17 bp, Arabidopsis thaliana
aagcttccaaccaagtt

SEQ ID NO: 12185 - DNA, 17 bp, Arabidopsis thaliana
aagcttcccaacctcgt

SEQ ID NO: 12186 - DNA, 17 bp, Arabidopsis thaliana
aagcttccgaagctgtg

SEQ ID NO: 12187 - DNA, 17 bp, Arabidopsis thaliana
aagcttccgcaaacgca

SEQ ID NO: 12188 - DNA, 17 bp, Arabidopsis thaliana
aagcttccgtagacact

SEQ ID NO: 12189 - DNA, 17 bp, Arabidopsis thaliana
aagcttcctgctcagct

SEQ ID NO: 12190 - DNA, 17 bp, Arabidopsis thaliana
aagcttcctgctcattc

SEQ ID NO: 12191 - DNA, 17 bp, Arabidopsis thaliana
aagcttcctgctcggct

SEQ ID NO: 12192 - DNA, 17 bp, Arabidopsis thaliana
aagcttcctggagttaa

SEQ ID NO: 12193 - DNA, 17 bp, Arabidopsis thaliana
aagcttcgaacttcccc

SEQ ID NO: 12194 - DNA, 17 bp, Arabidopsis thaliana
aagcttcgaatggtgat

SEQ ID NO: 12195 - DNA, 17 bp, Arabidopsis thaliana
aagcttcgaatgtgcag

SEQ ID NO: 12196 - DNA, 17 bp, Arabidopsis thaliana
aagcttcgacacataca

SEQ ID NO: 12197 - DNA, 17 bp, Arabidopsis thaliana
aagcttcgacttcttct

SEQ ID NO: 12198 - DNA, 17 bp, Arabidopsis thaliana
aagcttcgcctagggtc

SEQ ID NO: 12199 - DNA, 17 bp, Arabidopsis thaliana
aagcttcgcgtaggatc

SEQ ID NO: 12200 - DNA, 17 bp, Arabidopsis thaliana
aagcttcgcttagggtc

SEQ ID NO: 12201 - DNA, 17 bp, Arabidopsis thaliana
aagcttcggcggtgctc

SEQ ID NO: 12202 - DNA, 17 bp, Arabidopsis thaliana
aagcttcggctttccga

SEQ ID NO: 12203 - DNA, 17 bp, Arabidopsis thaliana
aagcttcgggttagaca

SEQ ID NO: 12204 - DNA, 17 bp, Arabidopsis thaliana
aagcttcgtctagggtc

SEQ ID NO: 12205 - DNA, 17 bp, Arabidopsis thaliana
aagcttcgtgctgctag

SEQ ID NO: 12206 - DNA, 17 bp, Arabidopsis thaliana
aagcttcgttccaaagt

SEQ ID NO: 12207 - DNA, 17 bp, Arabidopsis thaliana
aagcttcgttctgtccg

SEQ ID NO: 12208 - DNA, 17 bp, Arabidopsis thaliana
aagcttcgtttacggtc

SEQ ID NO: 12209 - DNA, 17 bp, Arabidopsis thaliana
aagcttctaacacctgg

SEQ ID NO: 12210 - DNA, 17 bp, Arabidopsis thaliana
aagcttctacaaaacgg

SEQ ID NO: 12211 - DNA, 17 bp, Arabidopsis thaliana
aagcttctagcagttgg

SEQ ID NO: 12212 - DNA, 17 bp, Arabidopsis thaliana
aagcttctcccggtttg

SEQ ID NO: 12213 - DNA, 17 bp, Arabidopsis thaliana
aagcttctgccgccttt

SEQ ID NO: 12214 - DNA, 17 bp, Arabidopsis thaliana
aagcttctggtcttggt

SEQ ID NO: 12215 - DNA, 17 bp, Arabidopsis thaliana
aagcttctgttttaccc

SEQ ID NO: 12216 - DNA, 17 bp, Arabidopsis thaliana
aagcttcttagactgtt

SEQ ID NO: 12217 - DNA, 17 bp, Arabidopsis thaliana
aagcttcttcttctgct

SEQ ID NO: 12218 - DNA, 17 bp, Arabidopsis thaliana
aagcttctttcacctgc

SEQ ID NO: 12219 - DNA, 17 bp, Arabidopsis thaliana
aagcttgaaaatcctca

SEQ ID NO: 12220 - DNA, 17 bp, Arabidopsis thaliana
aagcttgagaggtgtag

SEQ ID NO: 12221 - DNA, 17 bp, Arabidopsis thaliana
aagcttgaggatagtga

SEQ ID NO: 12222 - DNA, 17 bp, Arabidopsis thaliana
aagcttgatgacactga

SEQ ID NO: 12223 - DNA, 17 bp, Arabidopsis thaliana
aagcttgattctgatct

SEQ ID NO: 12224 - DNA, 17 bp, Arabidopsis thaliana
aagcttgatttatcaga

SEQ ID NO: 12225 - DNA, 17 bp, Arabidopsis thaliana
aagcttgcctttcaatc

SEQ ID NO: 12226 - DNA, 17 bp, Arabidopsis thaliana
aagcttgcggcttattt

SEQ ID NO: 12227 - DNA, 17 bp, Arabidopsis thaliana
aagcttgcggtgtcttg

SEQ ID NO: 12228 - DNA, 17 bp, Arabidopsis thaliana
aagcttgctatgggcta

SEQ ID NO: 12229 - DNA, 17 bp, Arabidopsis thaliana
aagcttggagctcggaa

SEQ ID NO: 12230 - DNA, 17 bp, Arabidopsis thaliana
aagcttggcgccgagct

SEQ ID NO: 12231 - DNA, 17 bp, Arabidopsis thaliana
aagcttggctccgcgga

SEQ ID NO: 12232 - DNA, 17 bp, Arabidopsis thaliana
aagcttgggatcgcacc

SEQ ID NO: 12233 - DNA, 17 bp, Arabidopsis thaliana
aagcttgggtactgttt

SEQ ID NO: 12234 - DNA, 17 bp, Arabidopsis thaliana
aagcttgggtctgggta

SEQ ID NO: 12235 - DNA, 17 bp, Arabidopsis thaliana
aagcttgggtctggtta

SEQ ID NO: 12236 - DNA, 17 bp, Arabidopsis thaliana
aagcttggtccgcagcg

SEQ ID NO: 12237 - DNA, 17 bp, Arabidopsis thaliana
aagcttggtgcaggtcg

SEQ ID NO: 12238 - DNA, 17 bp, Arabidopsis thaliana
aagcttgtacacaccgc

SEQ ID NO: 12239 - DNA, 17 bp, Arabidopsis thaliana
aagcttgtacttgcccc

SEQ ID NO: 12240 - DNA, 17 bp, Arabidopsis thaliana
aagcttgtagccatgtt

SEQ ID NO: 12241 - DNA, 17 bp, Arabidopsis thaliana
aagcttgtcgtgcgtta

SEQ ID NO: 12242 - DNA, 17 bp, Arabidopsis thaliana
aagcttgtctctcttca

SEQ ID NO: 12243 - DNA, 17 bp, Arabidopsis thaliana
aagcttgtctgccactg

SEQ ID NO: 12244 - DNA, 17 bp, Arabidopsis thaliana
aagcttgtgacggagcg

SEQ ID NO: 12245 - DNA, 17 bp, Arabidopsis thaliana
aagcttgtgacggagct

SEQ ID NO: 12246 - DNA, 17 bp, Arabidopsis thaliana
aagcttgtgcgatgaga

SEQ ID NO: 12247 - DNA, 17 bp, Arabidopsis thaliana
aagcttgtgctctcatc

SEQ ID NO: 12248 - DNA, 17 bp, Arabidopsis thaliana
aagcttgtggatggcga

SEQ ID NO: 12249 - DNA, 17 bp, Arabidopsis thaliana
aagcttgtggcttccct

SEQ ID NO: 12250 - DNA, 17 bp, Arabidopsis thaliana
aagcttgtgtactcgga

SEQ ID NO: 12251 - DNA, 17 bp, Arabidopsis thaliana
aagcttgttcgccactg

SEQ ID NO: 12252 - DNA, 17 bp, Arabidopsis thaliana
aagctttaaagatcggg

SEQ ID NO: 12253 - DNA, 17 bp, Arabidopsis thaliana
aagctttaagatcgggt

SEQ ID NO: 12254 - DNA, 17 bp, Arabidopsis thaliana
aagctttacatgtaggt

SEQ ID NO: 12255 - DNA, 17 bp, Arabidopsis thaliana
aagctttagccatagat

SEQ ID NO: 12256 - DNA, 17 bp, Arabidopsis thaliana
aagctttcaactcggtg

SEQ ID NO: 12257 - DNA, 17 bp, Arabidopsis thaliana
aagctttcaagatcggg

SEQ ID NO: 12258 - DNA, 17 bp, Arabidopsis thaliana
aagctttcaggaaatat

SEQ ID NO: 12259 - DNA, 17 bp, Arabidopsis thaliana
aagctttcatggtgtag

SEQ ID NO: 12260 - DNA, 17 bp, Arabidopsis thaliana
aagctttccagggctct

SEQ ID NO: 12261 - DNA, 17 bp, Arabidopsis thaliana
aagctttcgatcttcag

SEQ ID NO: 12262 - DNA, 17 bp, Arabidopsis thaliana
aagctttcggctcattc

SEQ ID NO: 12263 - DNA, 17 bp, Arabidopsis thaliana
aagctttctaagcccat

SEQ ID NO: 12264 - DNA, 17 bp, Arabidopsis thaliana
aagctttctagtctcgt

SEQ ID NO: 12265 - DNA, 17 bp, Arabidopsis thaliana
aagctttctttcgactt

SEQ ID NO: 12266 - DNA, 17 bp, Arabidopsis thaliana
aagctttgaatggttac

SEQ ID NO: 12267 - DNA, 17 bp, Arabidopsis thaliana
aagctttgacgcagtta

SEQ ID NO: 12268 - DNA, 17 bp, Arabidopsis thaliana
aagctttgacgctatgg

SEQ ID NO: 12269 - DNA, 17 bp, Arabidopsis thaliana
aagctttgactgcagag

SEQ ID NO: 12270 - DNA, 17 bp, Arabidopsis thaliana
aagctttgactgcgtag

SEQ ID NO: 12271 - DNA, 17 bp, Arabidopsis thaliana
aagctttgacttcatca

SEQ ID NO: 12272 - DNA, 17 bp, Arabidopsis thaliana
aagctttgagaagttgc

SEQ ID NO: 12273 - DNA, 17 bp, Arabidopsis thaliana
aagctttgatggtgtaa

SEQ ID NO: 12274 - DNA, 17 bp, Arabidopsis thaliana
aagctttgatggtgtag

SEQ ID NO: 12275 - DNA, 17 bp, Arabidopsis thaliana
aagctttgatggtttag

SEQ ID NO: 12276 - DNA, 17 bp, Arabidopsis thaliana
aagctttgattgaatcc

SEQ ID NO: 12277 - DNA, 17 bp, Arabidopsis thaliana
aagctttgattgtgcag

SEQ ID NO: 12278 - DNA, 17 bp, Arabidopsis thaliana
aagctttgcttaagcac

SEQ ID NO: 12279 - DNA, 17 bp, Arabidopsis thaliana
aagctttgcttaagcag

SEQ ID NO: 12280 - DNA, 17 bp, Arabidopsis thaliana
aagctttggaccctgcg

SEQ ID NO: 12281 - DNA, 17 bp, Arabidopsis thaliana
aagctttggggttttgg

SEQ ID NO: 12282 - DNA, 17 bp, Arabidopsis thaliana
aagctttgtaagtggaa

SEQ ID NO: 12283 - DNA, 17 bp, Arabidopsis thaliana
aagctttgtaccgtcgc

SEQ ID NO: 12284 - DNA, 17 bp, Arabidopsis thaliana
aagctttgtcgctaaga

SEQ ID NO: 12285 - DNA, 17 bp, Arabidopsis thaliana
aagctttgtctcaatcg

SEQ ID NO: 12286 - DNA, 17 bp, Arabidopsis thaliana
aagctttgtgttaccaa

SEQ ID NO: 12287 - DNA, 17 bp, Arabidopsis thaliana
aagctttgtgttaccat

SEQ ID NO: 12288 - DNA, 17 bp, Arabidopsis thaliana
aagcttttactgaactt

SEQ ID NO: 12289 - DNA, 17 bp, Arabidopsis thaliana
aagcttttaggttccgg

SEQ ID NO: 12290 - DNA, 17 bp, Arabidopsis thaliana
aagcttttatggtgtag

SEQ ID NO: 12291 - DNA, 17 bp, Arabidopsis thaliana
aagcttttccattgcca

SEQ ID NO: 12292 - DNA, 17 bp, Arabidopsis thaliana
aagcttttgcacggctt

SEQ ID NO: 12293 - DNA, 17 bp, Arabidopsis thaliana
aagcttttgccgtcttg

SEQ ID NO: 12294 - DNA, 17 bp, Arabidopsis thaliana
aagcttttgccgtcttt

SEQ ID NO: 12295 - DNA, 17 bp, Arabidopsis thaliana
aagcttttggtaggagt

SEQ ID NO: 12296 - DNA, 17 bp, Arabidopsis thaliana
aaggaaaaccccattca

SEQ ID NO: 12297 - DNA, 17 bp, Arabidopsis thaliana
aaggaaaagtgcctgaa

SEQ ID NO: 12298 - DNA, 17 bp, Arabidopsis thaliana
aaggaaaatgagtgtgt

SEQ ID NO: 12299 - DNA, 17 bp, Arabidopsis thaliana
aaggaaacctggttacg

SEQ ID NO: 12300 - DNA, 17 bp, Arabidopsis thaliana
aaggaaagaaggtgcca

SEQ ID NO: 12301 - DNA, 17 bp, Arabidopsis thaliana
aaggaaagagttggcca

SEQ ID NO: 12302 - DNA, 17 bp, Arabidopsis thaliana
aaggaaagcagacattt

SEQ ID NO: 12303 - DNA, 17 bp, Arabidopsis thaliana
aaggaaaggagaccttt

SEQ ID NO: 12304 - DNA, 17 bp, Arabidopsis thaliana
aaggaaaggagcaggtc

SEQ ID NO: 12305 - DNA, 17 bp, Arabidopsis thaliana
aaggaaagttgttcgga

SEQ ID NO: 12306 - DNA, 17 bp, Arabidopsis thaliana
aaggaacaacgacaaat

SEQ ID NO: 12307 - DNA, 17 bp, Arabidopsis thaliana
aaggaacggactgataa

SEQ ID NO: 12308 - DNA, 17 bp, Arabidopsis thaliana
aaggaacggatgtgttg

SEQ ID NO: 12309 - DNA, 17 bp, Arabidopsis thaliana
aaggaactgagtagcaa

SEQ ID NO: 12310 - DNA, 17 bp, Arabidopsis thaliana
aaggaagacttcagggg

SEQ ID NO: 12311 - DNA, 17 bp, Arabidopsis thaliana
aaggaagcctagtcatc

SEQ ID NO: 12312 - DNA, 17 bp, Arabidopsis thaliana
aaggaagcgccctgaag

SEQ ID NO: 12313 - DNA, 17 bp, Arabidopsis thaliana
aaggaagctccgatggt

SEQ ID NO: 12314 - DNA, 17 bp, Arabidopsis thaliana
aaggaagctgattggcg

SEQ ID NO: 12315 - DNA, 17 bp, Arabidopsis thaliana
aaggaagtctgtgagct

SEQ ID NO: 12316 - DNA, 17 bp, Arabidopsis thaliana
aaggaagtgcggactaa

SEQ ID NO: 12317 - DNA, 17 bp, Arabidopsis thaliana
aaggaagtgtgctgcga

SEQ ID NO: 12318 - DNA, 17 bp, Arabidopsis thaliana
aaggaagttgctgagtc

SEQ ID NO: 12319 - DNA, 17 bp, Arabidopsis thaliana
aaggaataagctcgtgc

SEQ ID NO: 12320 - DNA, 17 bp, Arabidopsis thaliana
aaggaatacaggacgat

SEQ ID NO: 12321 - DNA, 17 bp, Arabidopsis thaliana
aaggaataggtggcatt

SEQ ID NO: 12322 - DNA, 17 bp, Arabidopsis thaliana
aaggaatatccaggagg

SEQ ID NO: 12323 - DNA, 17 bp, Arabidopsis thaliana
aaggaatcaccccatca

SEQ ID NO: 12324 - DNA, 17 bp, Arabidopsis thaliana
aaggaatcgtcggaggt

SEQ ID NO: 12325 - DNA, 17 bp, Arabidopsis thaliana
aaggaatctgccagtcc

SEQ ID NO: 12326 - DNA, 17 bp, Arabidopsis thaliana
aaggaatgcagacccct

SEQ ID NO: 12327 - DNA, 17 bp, Arabidopsis thaliana
aaggaatgcagacctct

SEQ ID NO: 12328 - DNA, 17 bp, Arabidopsis thaliana
aaggaatgccactgcca

SEQ ID NO: 12329 - DNA, 17 bp, Arabidopsis thaliana
aaggaatgcttctgatt

SEQ ID NO: 12330 - DNA, 17 bp, Arabidopsis thaliana
aaggaatgtcgttcgga

SEQ ID NO: 12331 - DNA, 17 bp, Arabidopsis thaliana
aaggaattaacgacttt

SEQ ID NO: 12332 - DNA, 17 bp, Arabidopsis thaliana
aaggaattaacggggga

SEQ ID NO: 12333 - DNA, 17 bp, Arabidopsis thaliana
aaggaattcgtctatgc

SEQ ID NO: 12334 - DNA, 17 bp, Arabidopsis thaliana
aaggaattgacgggggc

SEQ ID NO: 12335 - DNA, 17 bp, Arabidopsis thaliana
aaggaattggctgcgag

SEQ ID NO: 12336 - DNA, 17 bp, Arabidopsis thaliana
aaggaattgtccgtcgt

SEQ ID NO: 12337 - DNA, 17 bp, Arabidopsis thaliana
aaggaattgtgtcttcg

SEQ ID NO: 12338 - DNA, 17 bp, Arabidopsis thaliana
aaggaattgttgtggtt

SEQ ID NO: 12339 - DNA, 17 bp, Arabidopsis thaliana
aaggaatttccagtttg

SEQ ID NO: 12340 - DNA, 17 bp, Arabidopsis thaliana
aaggaattttgactgcc

SEQ ID NO: 12341 - DNA, 17 bp, Arabidopsis thaliana
aaggaatttttcgggtc

SEQ ID NO: 12342 - DNA, 17 bp, Arabidopsis thaliana
aaggacaagatcagctg

SEQ ID NO: 12343 - DNA, 17 bp, Arabidopsis thaliana
aaggacaatccaaatgg

SEQ ID NO: 12344 - DNA, 17 bp, Arabidopsis thaliana
aaggacaatcccatatg

SEQ ID NO: 12345 - DNA, 17 bp, Arabidopsis thaliana
aaggacacatctctgga

SEQ ID NO: 12346 - DNA, 17 bp, Arabidopsis thaliana
aaggacacgtgtttgct

SEQ ID NO: 12347 - DNA, 17 bp, Arabidopsis thaliana
aaggacacgtttaagtg

SEQ ID NO: 12348 - DNA, 17 bp, Arabidopsis thaliana
aaggacagacgtgttga

SEQ ID NO: 12349 - DNA, 17 bp, Arabidopsis thaliana
aaggacagctcagtttt

SEQ ID NO: 12350 - DNA, 17 bp, Arabidopsis thaliana
aaggacagtcgggggca

SEQ ID NO: 12351 - DNA, 17 bp, Arabidopsis thaliana
aaggacagtctatcgtt

SEQ ID NO: 12352 - DNA, 17 bp, Arabidopsis thaliana
aaggacatctcaggccg

SEQ ID NO: 12353 - DNA, 17 bp, Arabidopsis thaliana
aaggacatgggccacgg

SEQ ID NO: 12354 - DNA, 17 bp, Arabidopsis thaliana
aaggacatgttcttgac

SEQ ID NO: 12355 - DNA, 17 bp, Arabidopsis thaliana
aaggaccaacaacatta

SEQ ID NO: 12356 - DNA, 17 bp, Arabidopsis thaliana
aaggaccaactgacaga

SEQ ID NO: 12357 - DNA, 17 bp, Arabidopsis thaliana
aaggaccaccacactgt

SEQ ID NO: 12358 - DNA, 17 bp, Arabidopsis thaliana
aaggaccacctcactat

SEQ ID NO: 12359 - DNA, 17 bp, Arabidopsis thaliana
aaggaccactagcgagt

SEQ ID NO: 12360 - DNA, 17 bp, Arabidopsis thaliana
aaggaccagcgacagca

SEQ ID NO: 12361 - DNA, 17 bp, Arabidopsis thaliana
aaggaccattgggcgtg

SEQ ID NO: 12362 - DNA, 17 bp, Arabidopsis thaliana
aaggaccccctggacca

SEQ ID NO: 12363 - DNA, 17 bp, Arabidopsis thaliana
aaggacccgatgcacta

SEQ ID NO: 12364 - DNA, 17 bp, Arabidopsis thaliana
aaggacccgttggatgg

SEQ ID NO: 12365 - DNA, 17 bp, Arabidopsis thaliana
aaggaccctctatgctg

SEQ ID NO: 12366 - DNA, 17 bp, Arabidopsis thaliana
aaggaccctgttgagct

SEQ ID NO: 12367 - DNA, 17 bp, Arabidopsis thaliana
aaggacccttaactgcg

SEQ ID NO: 12368 - DNA, 17 bp, Arabidopsis thaliana
aaggaccctttgtcgat

SEQ ID NO: 12369 - DNA, 17 bp, Arabidopsis thaliana
aaggaccgagtgccgct

SEQ ID NO: 12370 - DNA, 17 bp, Arabidopsis thaliana
aaggaccgcccaatatc

SEQ ID NO: 12371 - DNA, 17 bp, Arabidopsis thaliana
aaggacctccgtgggaa

SEQ ID NO: 12372 - DNA, 17 bp, Arabidopsis thaliana
aaggacctgacttcaat

SEQ ID NO: 12373 - DNA, 17 bp, Arabidopsis thaliana
aaggaccttttgtcgat

SEQ ID NO: 12374 - DNA, 17 bp, Arabidopsis thaliana
aaggacgaggcctccat

SEQ ID NO: 12375 - DNA, 17 bp, Arabidopsis thaliana
aaggacgattttggatt

SEQ ID NO: 12376 - DNA, 17 bp, Arabidopsis thaliana
aaggacgcacctctgat

SEQ ID NO: 12377 - DNA, 17 bp, Arabidopsis thaliana
aaggacgcacctctggt

SEQ ID NO: 12378 - DNA, 17 bp, Arabidopsis thaliana
aaggacgctcaagagtt

SEQ ID NO: 12379 - DNA, 17 bp, Arabidopsis thaliana
aaggacggacacgtgtg

SEQ ID NO: 12380 - DNA, 17 bp, Arabidopsis thaliana
aaggacggagctgtcga

SEQ ID NO: 12381 - DNA, 17 bp, Arabidopsis thaliana
aaggacggattggcggg

SEQ ID NO: 12382 - DNA, 17 bp, Arabidopsis thaliana
aaggacgggatacctag

SEQ ID NO: 12383 - DNA, 17 bp, Arabidopsis thaliana
aaggacgggatgcctag

SEQ ID NO: 12384 - DNA, 17 bp, Arabidopsis thaliana
aaggacgggttggcggg

SEQ ID NO: 12385 - DNA, 17 bp, Arabidopsis thaliana
aaggacgtgccggagtg

SEQ ID NO: 12386 - DNA, 17 bp, Arabidopsis thaliana
aaggacgttggactggt

SEQ ID NO: 12387 - DNA, 17 bp, Arabidopsis thaliana
aaggactaaagccaagg

SEQ ID NO: 12388 - DNA, 17 bp, Arabidopsis thaliana
aaggactaccattggac

SEQ ID NO: 12389 - DNA, 17 bp, Arabidopsis thaliana
aaggactcctttacgag

SEQ ID NO: 12390 - DNA, 17 bp, Arabidopsis thaliana
aaggactcgacgaattc

SEQ ID NO: 12391 - DNA, 17 bp, Arabidopsis thaliana
aaggactcgcaactttg

SEQ ID NO: 12392 - DNA, 17 bp, Arabidopsis thaliana
aaggactctcggcaacg

SEQ ID NO: 12393 - DNA, 17 bp, Arabidopsis thaliana
aaggactctcggcaccc

SEQ ID NO: 12394 - DNA, 17 bp, Arabidopsis thaliana
aaggactgaatggattg

SEQ ID NO: 12395 - DNA, 17 bp, Arabidopsis thaliana
aaggactgctccggtcg

SEQ ID NO: 12396 - DNA, 17 bp, Arabidopsis thaliana
aaggactgtaaccatct

SEQ ID NO: 12397 - DNA, 17 bp, Arabidopsis thaliana
aaggactgtttcccaaa

SEQ ID NO: 12398 - DNA, 17 bp, Arabidopsis thaliana
aaggacttcaacaaggg

SEQ ID NO: 12399 - DNA, 17 bp, Arabidopsis thaliana
aaggacttcagacttgt

SEQ ID NO: 12400 - DNA, 17 bp, Arabidopsis thaliana
aaggacttcccggaagg

SEQ ID NO: 12401 - DNA, 17 bp, Arabidopsis thaliana
aaggacttctctctcag

SEQ ID NO: 12402 - DNA, 17 bp, Arabidopsis thaliana
aaggacttgccttcgat

SEQ ID NO: 12403 - DNA, 17 bp, Arabidopsis thaliana
aaggacttgcgaatgaa

SEQ ID NO: 12404 - DNA, 17 bp, Arabidopsis thaliana
aaggacttgcgaatgag

SEQ ID NO: 12405 - DNA, 17 bp, Arabidopsis thaliana
aaggacttgctagcact

SEQ ID NO: 12406 - DNA, 17 bp, Arabidopsis thaliana
aaggacttggccacggg

SEQ ID NO: 12407 - DNA, 17 bp, Arabidopsis thaliana
aaggactttggagagct

SEQ ID NO: 12408 - DNA, 17 bp, Arabidopsis thaliana
aaggactttgggttcgt

SEQ ID NO: 12409 - DNA, 17 bp, Arabidopsis thaliana
aaggagaagttaccaaa

SEQ ID NO: 12410 - DNA, 17 bp, Arabidopsis thaliana
aaggagaatcttctggt

SEQ ID NO: 12411 - DNA, 17 bp, Arabidopsis thaliana
aaggagaatgagcagaa

SEQ ID NO: 12412 - DNA, 17 bp, Arabidopsis thaliana
aaggagacctctcctcc

SEQ ID NO: 12413 - DNA, 17 bp, Arabidopsis thaliana
aaggagactccggggaa

SEQ ID NO: 12414 - DNA, 17 bp, Arabidopsis thaliana
aaggagactccggtgaa

SEQ ID NO: 12415 - DNA, 17 bp, Arabidopsis thaliana
aaggagaggctttgccg

SEQ ID NO: 12416 - DNA, 17 bp, Arabidopsis thaliana
aaggagaggttgccacc

SEQ ID NO: 12417 - DNA, 17 bp, Arabidopsis thaliana
aaggagagtctctgaaa

SEQ ID NO: 12418 - DNA, 17 bp, Arabidopsis thaliana
aaggagatattggtgcg

SEQ ID NO: 12419 - DNA, 17 bp, Arabidopsis thaliana
aaggagattctcacatg

SEQ ID NO: 12420 - DNA, 17 bp, Arabidopsis thaliana
aaggagatttgtcacgt

SEQ ID NO: 12421 - DNA, 17 bp, Arabidopsis thaliana
aaggagcaacgataaac

SEQ ID NO: 12422 - DNA, 17 bp, Arabidopsis thaliana
aaggagcagatacagtt

SEQ ID NO: 12423 - DNA, 17 bp, Arabidopsis thaliana
aaggagcctaactctct

SEQ ID NO: 12424 - DNA, 17 bp, Arabidopsis thaliana
aaggagcctggtgctta

SEQ ID NO: 12425 - DNA, 17 bp, Arabidopsis thaliana
aaggagctgcttccact

SEQ ID NO: 12426 - DNA, 17 bp, Arabidopsis thaliana
aaggagctggatgtgct

SEQ ID NO: 12427 - DNA, 17 bp, Arabidopsis thaliana
aaggagctgtacgcctt

SEQ ID NO: 12428 - DNA, 17 bp, Arabidopsis thaliana
aaggaggaccgagtgcc

SEQ ID NO: 12429 - DNA, 17 bp, Arabidopsis thaliana
aaggaggcagcggggat

SEQ ID NO: 12430 - DNA, 17 bp, Arabidopsis thaliana
aaggaggcctatctgct

SEQ ID NO: 12431 - DNA, 17 bp, Arabidopsis thaliana
aaggaggcgatgaggtg

SEQ ID NO: 12432 - DNA, 17 bp, Arabidopsis thaliana
aaggaggcggttcagtt

SEQ ID NO: 12433 - DNA, 17 bp, Arabidopsis thaliana
aaggaggctaactctct

SEQ ID NO: 12434 - DNA, 17 bp, Arabidopsis thaliana
aaggaggctctctttga

SEQ ID NO: 12435 - DNA, 17 bp, Arabidopsis thaliana
aaggaggctgcttgaca

SEQ ID NO: 12436 - DNA, 17 bp, Arabidopsis thaliana
aaggagggagagggttc

SEQ ID NO: 12437 - DNA, 17 bp, Arabidopsis thaliana
aaggagggcacgtctgc

SEQ ID NO: 12438 - DNA, 17 bp, Arabidopsis thaliana
aaggaggttcgtctatg

SEQ ID NO: 12439 - DNA, 17 bp, Arabidopsis thaliana
aaggagtgaacctctct

SEQ ID NO: 12440 - DNA, 17 bp, Arabidopsis thaliana
aaggagtgctcctcaat

SEQ ID NO: 12441 - DNA, 17 bp, Arabidopsis thaliana
aaggagtgctgattgct

SEQ ID NO: 12442 - DNA, 17 bp, Arabidopsis thaliana
aaggagtgtatttcgtt

SEQ ID NO: 12443 - DNA, 17 bp, Arabidopsis thaliana
aaggagtgttaacggtg

SEQ ID NO: 12444 - DNA, 17 bp, Arabidopsis thaliana
aaggagttgttggaatg

SEQ ID NO: 12445 - DNA, 17 bp, Arabidopsis thaliana
aaggagtttgcgtgata

SEQ ID NO: 12446 - DNA, 17 bp, Arabidopsis thaliana
aaggagttttccaagtt

SEQ ID NO: 12447 - DNA, 17 bp, Arabidopsis thaliana
aaggataatcataccgt

SEQ ID NO: 12448 - DNA, 17 bp, Arabidopsis thaliana
aaggatacaattcttac

SEQ ID NO: 12449 - DNA, 17 bp, Arabidopsis thaliana
aaggatagttcactgtg

SEQ ID NO: 12450 - DNA, 17 bp, Arabidopsis thaliana
aaggatgacccgaaagt

SEQ ID NO: 12451 - DNA, 17 bp, Arabidopsis thaliana
aaggatgacggccgtgt

SEQ ID NO: 12452 - DNA, 17 bp, Arabidopsis thaliana
aaggatgatcaggagat

SEQ ID NO: 12453 - DNA, 17 bp, Arabidopsis thaliana
aaggatgctcgttggtt

SEQ ID NO: 12454 - DNA, 17 bp, Arabidopsis thaliana
aaggatgctctgcaacc

SEQ ID NO: 12455 - DNA, 17 bp, Arabidopsis thaliana
aaggatggactacagat

SEQ ID NO: 12456 - DNA, 17 bp, Arabidopsis thaliana
aaggatgggaagcctag

SEQ ID NO: 12457 - DNA, 17 bp, Arabidopsis thaliana
aaggatgggatagagta

SEQ ID NO: 12458 - DNA, 17 bp, Arabidopsis thaliana
aaggatgggggggcaga

SEQ ID NO: 12459 - DNA, 17 bp, Arabidopsis thaliana
aaggatggtgtcgctat

SEQ ID NO: 12460 - DNA, 17 bp, Arabidopsis thaliana
aaggatggttggatggc

SEQ ID NO: 12461 - DNA, 17 bp, Arabidopsis thaliana
aaggatgtagcgaagct

SEQ ID NO: 12462 - DNA, 17 bp, Arabidopsis thaliana
aaggatgtatcttacgc

SEQ ID NO: 12463 - DNA, 17 bp, Arabidopsis thaliana
aaggatgtcaactgggc

SEQ ID NO: 12464 - DNA, 17 bp, Arabidopsis thaliana
aaggatgtgtcgaagat

SEQ ID NO: 12465 - DNA, 17 bp, Arabidopsis thaliana
aaggatgttggctctct

SEQ ID NO: 12466 - DNA, 17 bp, Arabidopsis thaliana
aaggattaccgacattg

SEQ ID NO: 12467 - DNA, 17 bp, Arabidopsis thaliana
aaggattacgatggtcc

SEQ ID NO: 12468 - DNA, 17 bp, Arabidopsis thaliana
aaggattatcgcataga

SEQ ID NO: 12469 - DNA, 17 bp, Arabidopsis thaliana
aaggattcagccgtaac

SEQ ID NO: 12470 - DNA, 17 bp, Arabidopsis thaliana
aaggattcatccgctat

SEQ ID NO: 12471 - DNA, 17 bp, Arabidopsis thaliana
aaggattccaccaatgg

SEQ ID NO: 12472 - DNA, 17 bp, Arabidopsis thaliana
aaggattccttcaggga

SEQ ID NO: 12473 - DNA, 17 bp, Arabidopsis thaliana
aaggattcgctttgatc

SEQ ID NO: 12474 - DNA, 17 bp, Arabidopsis thaliana
aaggattcgttatgggc

SEQ ID NO: 12475 - DNA, 17 bp, Arabidopsis thaliana
aaggattcgttgacggc

SEQ ID NO: 12476 - DNA, 17 bp, Arabidopsis thaliana
aaggattgaacttgggt

SEQ ID NO: 12477 - DNA, 17 bp, Arabidopsis thaliana
aaggattgacagactga

SEQ ID NO: 12478 - DNA, 17 bp, Arabidopsis thaliana
aaggattgactatgaat

SEQ ID NO: 12479 - DNA, 17 bp, Arabidopsis thaliana
aaggattgccagataat

SEQ ID NO: 12480 - DNA, 17 bp, Arabidopsis thaliana
aaggattgcttctcctt

SEQ ID NO: 12481 - DNA, 17 bp, Arabidopsis thaliana
aaggattggaccagctg

SEQ ID NO: 12482 - DNA, 17 bp, Arabidopsis thaliana
aaggattggattcttgt

SEQ ID NO: 12483 - DNA, 17 bp, Arabidopsis thaliana
aaggattggctctgagg

SEQ ID NO: 12484 - DNA, 17 bp, Arabidopsis thaliana
aaggattgggcactttt

SEQ ID NO: 12485 - DNA, 17 bp, Arabidopsis thaliana
aaggattgttaacggtg

SEQ ID NO: 12486 - DNA, 17 bp, Arabidopsis thaliana
aaggatttacgtttttg

SEQ ID NO: 12487 - DNA, 17 bp, Arabidopsis thaliana
aaggatttccaggttgg

SEQ ID NO: 12488 - DNA, 17 bp, Arabidopsis thaliana
aaggatttgaatggtaa

SEQ ID NO: 12489 - DNA, 17 bp, Arabidopsis thaliana
aaggatttgacagtttc

SEQ ID NO: 12490 - DNA, 17 bp, Arabidopsis thaliana
aaggatttgttattggg

SEQ ID NO: 12491 - DNA, 17 bp, Arabidopsis thaliana
aaggattttcttcctcc

SEQ ID NO: 12492 - DNA, 17 bp, Arabidopsis thaliana
aaggattttggatttga

SEQ ID NO: 12493 - DNA, 17 bp, Arabidopsis thaliana
aaggattttggatttgg

SEQ ID NO: 12494 - DNA, 17 bp, Arabidopsis thaliana
aaggattttgggttcgg

SEQ ID NO: 12495 - DNA, 17 bp, Arabidopsis thaliana
aaggatttttccaagtt

SEQ ID NO: 12496 - DNA, 17 bp, Arabidopsis thaliana
aaggcaaaagcaaaggg

SEQ ID NO: 12497 - DNA, 17 bp, Arabidopsis thaliana
aaggcaaaccaaagtct

SEQ ID NO: 12498 - DNA, 17 bp, Arabidopsis thaliana
aaggcaaagtgggctgg

SEQ ID NO: 12499 - DNA, 17 bp, Arabidopsis thaliana
aaggcaaagtgtcttct

SEQ ID NO: 12500 - DNA, 17 bp, Arabidopsis thaliana
aaggcaaataccacatc

SEQ ID NO: 12501 - DNA, 17 bp, Arabidopsis thaliana
aaggcaaatggctgaac

SEQ ID NO: 12502 - DNA, 17 bp, Arabidopsis thaliana
aaggcaaattttagcgg

SEQ ID NO: 12503 - DNA, 17 bp, Arabidopsis thaliana
aaggcaacagaggaact

SEQ ID NO: 12504 - DNA, 17 bp, Arabidopsis thaliana
aaggcaaccaaccagaa

SEQ ID NO: 12505 - DNA, 17 bp, Arabidopsis thaliana
aaggcaacctgtgatca

SEQ ID NO: 12506 - DNA, 17 bp, Arabidopsis thaliana
aaggcaagggaatggcg

SEQ ID NO: 12507 - DNA, 17 bp, Arabidopsis thaliana
aaggcaagttgggaggg

SEQ ID NO: 12508 - DNA, 17 bp, Arabidopsis thaliana
aaggcaatcgtgtcaat

SEQ ID NO: 12509 - DNA, 17 bp, Arabidopsis thaliana
aaggcaatgacaggatt

SEQ ID NO: 12510 - DNA, 17 bp, Arabidopsis thaliana
aaggcaatggaaaattt

SEQ ID NO: 12511 - DNA, 17 bp, Arabidopsis thaliana
aaggcaattgcctcaag

SEQ ID NO: 12512 - DNA, 17 bp, Arabidopsis thaliana
aaggcacaaagcccctc

SEQ ID NO: 12513 - DNA, 17 bp, Arabidopsis thaliana
aaggcacagatccactg

SEQ ID NO: 12514 - DNA, 17 bp, Arabidopsis thaliana
aaggcacaggtttgttt

SEQ ID NO: 12515 - DNA, 17 bp, Arabidopsis thaliana
aaggcacattcccgatt

SEQ ID NO: 12516 - DNA, 17 bp, Arabidopsis thaliana
aaggcaccctacaggat

SEQ ID NO: 12517 - DNA, 17 bp, Arabidopsis thaliana
aaggcaccgccagtccg

SEQ ID NO: 12518 - DNA, 17 bp, Arabidopsis thaliana
aaggcaccggcttgcaa

SEQ ID NO: 12519 - DNA, 17 bp, Arabidopsis thaliana
aaggcacgtctgcctgg

SEQ ID NO: 12520 - DNA, 17 bp, Arabidopsis thaliana
aaggcacgtgtcgtggg

SEQ ID NO: 12521 - DNA, 17 bp, Arabidopsis thaliana
aaggcacgtgtcgttgg

SEQ ID NO: 12522 - DNA, 17 bp, Arabidopsis thaliana
aaggcacgttagaagaa

SEQ ID NO: 12523 - DNA, 17 bp, Arabidopsis thaliana
aaggcactcggcgggga

SEQ ID NO: 12524 - DNA, 17 bp, Arabidopsis thaliana
aaggcactctatggctc

SEQ ID NO: 12525 - DNA, 17 bp, Arabidopsis thaliana
aaggcacttggccgttc

SEQ ID NO: 12526 - DNA, 17 bp, Arabidopsis thaliana
aaggcactttggcttgt

SEQ ID NO: 12527 - DNA, 17 bp, Arabidopsis thaliana
aaggcacttttccaact

SEQ ID NO: 12528 - DNA, 17 bp, Arabidopsis thaliana
aaggcagatccgtttaa

SEQ ID NO: 12529 - DNA, 17 bp, Arabidopsis thaliana
aaggcagccaaggcttc

SEQ ID NO: 12530 - DNA, 17 bp, Arabidopsis thaliana
aaggcagccaatgcgtt

SEQ ID NO: 12531 - DNA, 17 bp, Arabidopsis thaliana
aaggcagccataacatc

SEQ ID NO: 12532 - DNA, 17 bp, Arabidopsis thaliana
aaggcagcctttaccca

SEQ ID NO: 12533 - DNA, 17 bp, Arabidopsis thaliana
aaggcaggctcttggaa

SEQ ID NO: 12534 - DNA, 17 bp, Arabidopsis thaliana
aaggcagggctagtgac

SEQ ID NO: 12535 - DNA, 17 bp, Arabidopsis thaliana
aaggcaggtccgttgat

SEQ ID NO: 12536 - DNA, 17 bp, Arabidopsis thaliana
aaggcaggtctgttgat

SEQ ID NO: 12537 - DNA, 17 bp, Arabidopsis thaliana
aaggcaggtttgcccga

SEQ ID NO: 12538 - DNA, 17 bp, Arabidopsis thaliana
aaggcagtctccttggc

SEQ ID NO: 12539 - DNA, 17 bp, Arabidopsis thaliana
aaggcatgccgtgaaat

SEQ ID NO: 12540 - DNA, 17 bp, Arabidopsis thaliana
aaggcatgggtgtggct

SEQ ID NO: 12541 - DNA, 17 bp, Arabidopsis thaliana
aaggcatggttggtcta

SEQ ID NO: 12542 - DNA, 17 bp, Arabidopsis thaliana
aaggcatgtctattttg

SEQ ID NO: 12543 - DNA, 17 bp, Arabidopsis thaliana
aaggcattccgtgaaat

SEQ ID NO: 12544 - DNA, 17 bp, Arabidopsis thaliana
aaggcatttatctcggg

SEQ ID NO: 12545 - DNA, 17 bp, Arabidopsis thaliana
aaggccaaacctgtctt

SEQ ID NO: 12546 - DNA, 17 bp, Arabidopsis thaliana
aaggccaaatgccctac

SEQ ID NO: 12547 - DNA, 17 bp, Arabidopsis thaliana
aaggccaacactatttt

SEQ ID NO: 12548 - DNA, 17 bp, Arabidopsis thaliana
aaggccaagtgtgagtc

SEQ ID NO: 12549 - DNA, 17 bp, Arabidopsis thaliana
aaggccaatgactcaag

SEQ ID NO: 12550 - DNA, 17 bp, Arabidopsis thaliana
aaggccaccatctccga

SEQ ID NO: 12551 - DNA, 17 bp, Arabidopsis thaliana
aaggccaccgtctccaa

SEQ ID NO: 12552 - DNA, 17 bp, Arabidopsis thaliana
aaggccaccgtctccac

SEQ ID NO: 12553 - DNA, 17 bp, Arabidopsis thaliana
aaggccacgagaccaca

SEQ ID NO: 12554 - DNA, 17 bp, Arabidopsis thaliana
aaggccagacttgttgc

SEQ ID NO: 12555 - DNA, 17 bp, Arabidopsis thaliana
aaggccagcacagggag

SEQ ID NO: 12556 - DNA, 17 bp, Arabidopsis thaliana
aaggccagggtgttgct

SEQ ID NO: 12557 - DNA, 17 bp, Arabidopsis thaliana
aaggccagtttctgatc

SEQ ID NO: 12558 - DNA, 17 bp, Arabidopsis thaliana
aaggccatcattctttg

SEQ ID NO: 12559 - DNA, 17 bp, Arabidopsis thaliana
aaggccatccgcggttc

SEQ ID NO: 12560 - DNA, 17 bp, Arabidopsis thaliana
aaggccatctacatcgg

SEQ ID NO: 12561 - DNA, 17 bp, Arabidopsis thaliana
aaggccatctcttgtct

SEQ ID NO: 12562 - DNA, 17 bp, Arabidopsis thaliana
aaggccatgttcgtttc

SEQ ID NO: 12563 - DNA, 17 bp, Arabidopsis thaliana
aaggcccaccatctaac

SEQ ID NO: 12564 - DNA, 17 bp, Arabidopsis thaliana
aaggcccagacactttt

SEQ ID NO: 12565 - DNA, 17 bp, Arabidopsis thaliana
aaggcccagacttttcc

SEQ ID NO: 12566 - DNA, 17 bp, Arabidopsis thaliana
aaggcccagcatatcca

SEQ ID NO: 12567 - DNA, 17 bp, Arabidopsis thaliana
aaggcccatcactaagc

SEQ ID NO: 12568 - DNA, 17 bp, Arabidopsis thaliana
aaggcccatcatcaaac

SEQ ID NO: 12569 - DNA, 17 bp, Arabidopsis thaliana
aaggcccatcatctaac

SEQ ID NO: 12570 - DNA, 17 bp, Arabidopsis thaliana
aaggcccatctatttag

SEQ ID NO: 12571 - DNA, 17 bp, Arabidopsis thaliana
aaggcccatgtccataa

SEQ ID NO: 12572 - DNA, 17 bp, Arabidopsis thaliana
aaggcccatgtccatta

SEQ ID NO: 12573 - DNA, 17 bp, Arabidopsis thaliana
aaggcccatgtccattc

SEQ ID NO: 12574 - DNA, 17 bp, Arabidopsis thaliana
aaggcccattagctcag

SEQ ID NO: 12575 - DNA, 17 bp, Arabidopsis thaliana
aaggcccatttaaagat

SEQ ID NO: 12576 - DNA, 17 bp, Arabidopsis thaliana
aaggccccagaactcca

SEQ ID NO: 12577 - DNA, 17 bp, Arabidopsis thaliana
aaggccccagagcaaac

SEQ ID NO: 12578 - DNA, 17 bp, Arabidopsis thaliana
aaggcccctaaatgacc

SEQ ID NO: 12579 - DNA, 17 bp, Arabidopsis thaliana
aaggcccctcactcttt

SEQ ID NO: 12580 - DNA, 17 bp, Arabidopsis thaliana
aaggcccgcctaaattg

SEQ ID NO: 12581 - DNA, 17 bp, Arabidopsis thaliana
aaggcccgcctatttag

SEQ ID NO: 12582 - DNA, 17 bp, Arabidopsis thaliana
aaggcccgcctcgttgc

SEQ ID NO: 12583 - DNA, 17 bp, Arabidopsis thaliana
aaggcccgtttgtttct

SEQ ID NO: 12584 - DNA, 17 bp, Arabidopsis thaliana
aaggccctatttgtttg

SEQ ID NO: 12585 - DNA, 17 bp, Arabidopsis thaliana
aaggccctcatctaaac

SEQ ID NO: 12586 - DNA, 17 bp, Arabidopsis thaliana
aaggccctgtctgtttg

SEQ ID NO: 12587 - DNA, 17 bp, Arabidopsis thaliana
aaggccctgttcgcttg

SEQ ID NO: 12588 - DNA, 17 bp, Arabidopsis thaliana
aaggccctgttcgtctc

SEQ ID NO: 12589 - DNA, 17 bp, Arabidopsis thaliana
aaggccctgttcgtttc

SEQ ID NO: 12590 - DNA, 17 bp, Arabidopsis thaliana
aaggccctgttcgtttg

SEQ ID NO: 12591 - DNA, 17 bp, Arabidopsis thaliana
aaggccctgtttgtttg

SEQ ID NO: 12592 - DNA, 17 bp, Arabidopsis thaliana
aaggccctttggtccat

SEQ ID NO: 12593 - DNA, 17 bp, Arabidopsis thaliana
aaggccctttgtcgcta

SEQ ID NO: 12594 - DNA, 17 bp, Arabidopsis thaliana
aaggccgagggcacgtc

SEQ ID NO: 12595 - DNA, 17 bp, Arabidopsis thaliana
aaggccgagttcgaaga

SEQ ID NO: 12596 - DNA, 17 bp, Arabidopsis thaliana
aaggccgatcgaagtaa

SEQ ID NO: 12597 - DNA, 17 bp, Arabidopsis thaliana
aaggccgattttggttc

SEQ ID NO: 12598 - DNA, 17 bp, Arabidopsis thaliana
aaggccgcaggttcaaa

SEQ ID NO: 12599 - DNA, 17 bp, Arabidopsis thaliana
aaggccgccgcagaaag

SEQ ID NO: 12600 - DNA, 17 bp, Arabidopsis thaliana
aaggccgcgagttcgtt

SEQ ID NO: 12601 - DNA, 17 bp, Arabidopsis thaliana
aaggccgctctacttca

SEQ ID NO: 12602 - DNA, 17 bp, Arabidopsis thaliana
aaggccggaactgtcag

SEQ ID NO: 12603 - DNA, 17 bp, Arabidopsis thaliana
aaggccggccctgttca

SEQ ID NO: 12604 - DNA, 17 bp, Arabidopsis thaliana
aaggccggggtggttga

SEQ ID NO: 12605 - DNA, 17 bp, Arabidopsis thaliana
aaggccggttcacagat

SEQ ID NO: 12606 - DNA, 17 bp, Arabidopsis thaliana
aaggccgtgctctgagt

SEQ ID NO: 12607 - DNA, 17 bp, Arabidopsis thaliana
aaggccgttcttgtctc

SEQ ID NO: 12608 - DNA, 17 bp, Arabidopsis thaliana
aaggcctaactacagac

SEQ ID NO: 12609 - DNA, 17 bp, Arabidopsis thaliana
aaggcctaactgacaga

SEQ ID NO: 12610 - DNA, 17 bp, Arabidopsis thaliana
aaggcctaactgacagc

SEQ ID NO: 12611 - DNA, 17 bp, Arabidopsis thaliana
aaggcctacaaatctct

SEQ ID NO: 12612 - DNA, 17 bp, Arabidopsis thaliana
aaggcctacgggtcctg

SEQ ID NO: 12613 - DNA, 17 bp, Arabidopsis thaliana
aaggcctataggtgtga

SEQ ID NO: 12614 - DNA, 17 bp, Arabidopsis thaliana
aaggcctcaatgacttg

SEQ ID NO: 12615 - DNA, 17 bp, Arabidopsis thaliana
aaggcctcagtgtgatt

SEQ ID NO: 12616 - DNA, 17 bp, Arabidopsis thaliana
aaggcctccagctgagt

SEQ ID NO: 12617 - DNA, 17 bp, Arabidopsis thaliana
aaggcctctaccgaacg

SEQ ID NO: 12618 - DNA, 17 bp, Arabidopsis thaliana
aaggcctctactgagtg

SEQ ID NO: 12619 - DNA, 17 bp, Arabidopsis thaliana
aaggcctcttgactcgt

SEQ ID NO: 12620 - DNA, 17 bp, Arabidopsis thaliana
aaggcctgcctaaatag

SEQ ID NO: 12621 - DNA, 17 bp, Arabidopsis thaliana
aaggcctgcctcgttgc

SEQ ID NO: 12622 - DNA, 17 bp, Arabidopsis thaliana
aaggcctgctgttgatc

SEQ ID NO: 12623 - DNA, 17 bp, Arabidopsis thaliana
aaggcctgttaactttg

SEQ ID NO: 12624 - DNA, 17 bp, Arabidopsis thaliana
aaggccttgggcgtcct

SEQ ID NO: 12625 - DNA, 17 bp, Arabidopsis thaliana
aaggccttgtgtcagga

SEQ ID NO: 12626 - DNA, 17 bp, Arabidopsis thaliana
aaggcgaacgatgacgg

SEQ ID NO: 12627 - DNA, 17 bp, Arabidopsis thaliana
aaggcgaacgccattaa

SEQ ID NO: 12628 - DNA, 17 bp, Arabidopsis thaliana
aaggcgaaggtcgttgc

SEQ ID NO: 12629 - DNA, 17 bp, Arabidopsis thaliana
aaggcgaagtccgtaat

SEQ ID NO: 12630 - DNA, 17 bp, Arabidopsis thaliana
aaggcgaattatgaatc

SEQ ID NO: 12631 - DNA, 17 bp, Arabidopsis thaliana
aaggcgacagacagact

SEQ ID NO: 12632 - DNA, 17 bp, Arabidopsis thaliana
aaggcgacattgtcccc

SEQ ID NO: 12633 - DNA, 17 bp, Arabidopsis thaliana
aaggcgacattgtgaag

SEQ ID NO: 12634 - DNA, 17 bp, Arabidopsis thaliana
aaggcgaccagcgacca

SEQ ID NO: 12635 - DNA, 17 bp, Arabidopsis thaliana
aaggcgaccgaagacga

SEQ ID NO: 12636 - DNA, 17 bp, Arabidopsis thaliana
aaggcgacctctcatcc

SEQ ID NO: 12637 - DNA, 17 bp, Arabidopsis thaliana
aaggcgagattagattt

SEQ ID NO: 12638 - DNA, 17 bp, Arabidopsis thaliana
aaggcgattaccctcat

SEQ ID NO: 12639 - DNA, 17 bp, Arabidopsis thaliana
aaggcgatttcgctacg

SEQ ID NO: 12640 - DNA, 17 bp, Arabidopsis thaliana
aaggcggaagctgcggg

SEQ ID NO: 12641 - DNA, 17 bp, Arabidopsis thaliana
aaggcggaccggccgac

SEQ ID NO: 12642 - DNA, 17 bp, Arabidopsis thaliana
aaggcggatcatattgc

SEQ ID NO: 12643 - DNA, 17 bp, Arabidopsis thaliana
aaggcggcagtgggttc

SEQ ID NO: 12644 - DNA, 17 bp, Arabidopsis thaliana
aaggcggcattgtgaag

SEQ ID NO: 12645 - DNA, 17 bp, Arabidopsis thaliana
aaggcggccctggtgta

SEQ ID NO: 12646 - DNA, 17 bp, Arabidopsis thaliana
aaggcggcctgactacc

SEQ ID NO: 12647 - DNA, 17 bp, Arabidopsis thaliana
aaggcggctattactta

SEQ ID NO: 12648 - DNA, 17 bp, Arabidopsis thaliana
aaggcggcttttctggt

SEQ ID NO: 12649 - DNA, 17 bp, Arabidopsis thaliana
aaggcgggacattcgtt

SEQ ID NO: 12650 - DNA, 17 bp, Arabidopsis thaliana
aaggcgggacccatacc

SEQ ID NO: 12651 - DNA, 17 bp, Arabidopsis thaliana
aaggcgggagtgtgaga

SEQ ID NO: 12652 - DNA, 17 bp, Arabidopsis thaliana
aaggcggtattgtgaag

SEQ ID NO: 12653 - DNA, 17 bp, Arabidopsis thaliana
aaggcggtccgaacgac

SEQ ID NO: 12654 - DNA, 17 bp, Arabidopsis thaliana
aaggcggtctaatttat

SEQ ID NO: 12655 - DNA, 17 bp, Arabidopsis thaliana
aaggcgtaacaatttta

SEQ ID NO: 12656 - DNA, 17 bp, Arabidopsis thaliana
aaggcgtaacgatctgg

SEQ ID NO: 12657 - DNA, 17 bp, Arabidopsis thaliana
aaggcgtaagaattgta

SEQ ID NO: 12658 - DNA, 17 bp, Arabidopsis thaliana
aaggcgtagactttgca

SEQ ID NO: 12659 - DNA, 17 bp, Arabidopsis thaliana
aaggcgtccattttgca

SEQ ID NO: 12660 - DNA, 17 bp, Arabidopsis thaliana
aaggcgtctgcagaggt

SEQ ID NO: 12661 - DNA, 17 bp, Arabidopsis thaliana
aaggcgtggcgaccttg

SEQ ID NO: 12662 - DNA, 17 bp, Arabidopsis thaliana
aaggcgttggcggtggt

SEQ ID NO: 12663 - DNA, 17 bp, Arabidopsis thaliana
aaggctaaacttcatgc

SEQ ID NO: 12664 - DNA, 17 bp, Arabidopsis thaliana
aaggctaaagagcgacc

SEQ ID NO: 12665 - DNA, 17 bp, Arabidopsis thaliana
aaggctaaaggtcacga

SEQ ID NO: 12666 - DNA, 17 bp, Arabidopsis thaliana
aaggctaaagtttccca

SEQ ID NO: 12667 - DNA, 17 bp, Arabidopsis thaliana
aaggctaaatacgggcg

SEQ ID NO: 12668 - DNA, 17 bp, Arabidopsis thaliana
aaggctaaatactcctg

SEQ ID NO: 12669 - DNA, 17 bp, Arabidopsis thaliana
aaggctaacttcgatgg

SEQ ID NO: 12670 - DNA, 17 bp, Arabidopsis thaliana
aaggctaagccatgttt

SEQ ID NO: 12671 - DNA, 17 bp, Arabidopsis thaliana
aaggctaagtagtgcag

SEQ ID NO: 12672 - DNA, 17 bp, Arabidopsis thaliana
aaggctaatcaccattc

SEQ ID NO: 12673 - DNA, 17 bp, Arabidopsis thaliana
aaggctaattttgctgc

SEQ ID NO: 12674 - DNA, 17 bp, Arabidopsis thaliana
aaggctacatcttggtt

SEQ ID NO: 12675 - DNA, 17 bp, Arabidopsis thaliana
aaggctacattttgctt

SEQ ID NO: 12676 - DNA, 17 bp, Arabidopsis thaliana
aaggctacctctttgag

SEQ ID NO: 12677 - DNA, 17 bp, Arabidopsis thaliana
aaggctactgtgattca

SEQ ID NO: 12678 - DNA, 17 bp, Arabidopsis thaliana
aaggctagacttgttgc

SEQ ID NO: 12679 - DNA, 17 bp, Arabidopsis thaliana
aaggctatagtgtggtc

SEQ ID NO: 12680 - DNA, 17 bp, Arabidopsis thaliana
aaggctatatgacggac

SEQ ID NO: 12681 - DNA, 17 bp, Arabidopsis thaliana
aaggctattcgtttgac

SEQ ID NO: 12682 - DNA, 17 bp, Arabidopsis thaliana
aaggctcaactgacaga

SEQ ID NO: 12683 - DNA, 17 bp, Arabidopsis thaliana
aaggctcaagtcactgt

SEQ ID NO: 12684 - DNA, 17 bp, Arabidopsis thaliana
aaggctcaatccagacc

SEQ ID NO: 12685 - DNA, 17 bp, Arabidopsis thaliana
aaggctccagtttcagg

SEQ ID NO: 12686 - DNA, 17 bp, Arabidopsis thaliana
aaggctccctatgatcg

SEQ ID NO: 12687 - DNA, 17 bp, Arabidopsis thaliana
aaggctccgaacctgta

SEQ ID NO: 12688 - DNA, 17 bp, Arabidopsis thaliana
aaggctccgaatgatga

SEQ ID NO: 12689 - DNA, 17 bp, Arabidopsis thaliana
aaggctccgaatggtga

SEQ ID NO: 12690 - DNA, 17 bp, Arabidopsis thaliana
aaggctccggatggtga

SEQ ID NO: 12691 - DNA, 17 bp, Arabidopsis thaliana
aaggctccgggtcctga

SEQ ID NO: 12692 - DNA, 17 bp, Arabidopsis thaliana
aaggctccggtgaacaa

SEQ ID NO: 12693 - DNA, 17 bp, Arabidopsis thaliana
aaggctcctctaagact

SEQ ID NO: 12694 - DNA, 17 bp, Arabidopsis thaliana
aaggctcgaacctgggt

SEQ ID NO: 12695 - DNA, 17 bp, Arabidopsis thaliana
aaggctcgagacacctt

SEQ ID NO: 12696 - DNA, 17 bp, Arabidopsis thaliana
aaggctcgcctaaatag

SEQ ID NO: 12697 - DNA, 17 bp, Arabidopsis thaliana
aaggctcgcttcggcgg

SEQ ID NO: 12698 - DNA, 17 bp, Arabidopsis thaliana
aaggctcgtatgatgaa

SEQ ID NO: 12699 - DNA, 17 bp, Arabidopsis thaliana
aaggctcgttgattgtt

SEQ ID NO: 12700 - DNA, 17 bp, Arabidopsis thaliana
aaggctcgttgctaagg

SEQ ID NO: 12701 - DNA, 17 bp, Arabidopsis thaliana
aaggctctatttcgtac

SEQ ID NO: 12702 - DNA, 17 bp, Arabidopsis thaliana
aaggctctcaccagcgg

SEQ ID NO: 12703 - DNA, 17 bp, Arabidopsis thaliana
aaggctctctctactgg

SEQ ID NO: 12704 - DNA, 17 bp, Arabidopsis thaliana
aaggctctgctgaattc

SEQ ID NO: 12705 - DNA, 17 bp, Arabidopsis thaliana
aaggctctggagcgtcc

SEQ ID NO: 12706 - DNA, 17 bp, Arabidopsis thaliana
aaggctctggggctaca

SEQ ID NO: 12707 - DNA, 17 bp, Arabidopsis thaliana
aaggctctggtcacttt

SEQ ID NO: 12708 - DNA, 17 bp, Arabidopsis thaliana
aaggctctggtctgcga

SEQ ID NO: 12709 - DNA, 17 bp, Arabidopsis thaliana
aaggctctgttcgcttc

SEQ ID NO: 12710 - DNA, 17 bp, Arabidopsis thaliana
aaggctctgttcgtttc

SEQ ID NO: 12711 - DNA, 17 bp, Arabidopsis thaliana
aaggctgactcgtgttt

SEQ ID NO: 12712 - DNA, 17 bp, Arabidopsis thaliana
aaggctgagggcgggct

SEQ ID NO: 12713 - DNA, 17 bp, Arabidopsis thaliana
aaggctgagtgaaatgt

SEQ ID NO: 12714 - DNA, 17 bp, Arabidopsis thaliana
aaggctgagttatcggt

SEQ ID NO: 12715 - DNA, 17 bp, Arabidopsis thaliana
aaggctgataggttgga

SEQ ID NO: 12716 - DNA, 17 bp, Arabidopsis thaliana
aaggctgatctatctcc

SEQ ID NO: 12717 - DNA, 17 bp, Arabidopsis thaliana
aaggctgatggattcat

SEQ ID NO: 12718 - DNA, 17 bp, Arabidopsis thaliana
aaggctgatttcccttg

SEQ ID NO: 12719 - DNA, 17 bp, Arabidopsis thaliana
aaggctgattttgaatc

SEQ ID NO: 12720 - DNA, 17 bp, Arabidopsis thaliana
aaggctgcactggctcg

SEQ ID NO: 12721 - DNA, 17 bp, Arabidopsis thaliana
aaggctgcattggattg

SEQ ID NO: 12722 - DNA, 17 bp, Arabidopsis thaliana
aaggctgccgcctgttc

SEQ ID NO: 12723 - DNA, 17 bp, Arabidopsis thaliana
aaggctgctctgctttc

SEQ ID NO: 12724 - DNA, 17 bp, Arabidopsis thaliana
aaggctgctttctttgg

SEQ ID NO: 12725 - DNA, 17 bp, Arabidopsis thaliana
aaggctggcactggttt

SEQ ID NO: 12726 - DNA, 17 bp, Arabidopsis thaliana
aaggctggcgattcgtt

SEQ ID NO: 12727 - DNA, 17 bp, Arabidopsis thaliana
aaggctggctcgggatg

SEQ ID NO: 12728 - DNA, 17 bp, Arabidopsis thaliana
aaggctggcttcactag

SEQ ID NO: 12729 - DNA, 17 bp, Arabidopsis thaliana
aaggctgggctcggggg

SEQ ID NO: 12730 - DNA, 17 bp, Arabidopsis thaliana
aaggctgtaaccgtatt

SEQ ID NO: 12731 - DNA, 17 bp, Arabidopsis thaliana
aaggctgtgaacccatc

SEQ ID NO: 12732 - DNA, 17 bp, Arabidopsis thaliana
aaggctgttagcctccc

SEQ ID NO: 12733 - DNA, 17 bp, Arabidopsis thaliana
aaggctgttgcgatttg

SEQ ID NO: 12734 - DNA, 17 bp, Arabidopsis thaliana
aaggcttacggtggata

SEQ ID NO: 12735 - DNA, 17 bp, Arabidopsis thaliana
aaggcttagagatcgtc

SEQ ID NO: 12736 - DNA, 17 bp, Arabidopsis thaliana
aaggcttattggacgat

SEQ ID NO: 12737 - DNA, 17 bp, Arabidopsis thaliana
aaggcttattggacggc

SEQ ID NO: 12738 - DNA, 17 bp, Arabidopsis thaliana
aaggcttcatctacaac

SEQ ID NO: 12739 - DNA, 17 bp, Arabidopsis thaliana
aaggcttccgtttggaa

SEQ ID NO: 12740 - DNA, 17 bp, Arabidopsis thaliana
aaggcttcctagaagat

SEQ ID NO: 12741 - DNA, 17 bp, Arabidopsis thaliana
aaggcttcctctagttt

SEQ ID NO: 12742 - DNA, 17 bp, Arabidopsis thaliana
aaggcttcctttacttc

SEQ ID NO: 12743 - DNA, 17 bp, Arabidopsis thaliana
aaggcttcgaatggaat

SEQ ID NO: 12744 - DNA, 17 bp, Arabidopsis thaliana
aaggcttcgaatggtga

SEQ ID NO: 12745 - DNA, 17 bp, Arabidopsis thaliana
aaggcttcttgagacaa

SEQ ID NO: 12746 - DNA, 17 bp, Arabidopsis thaliana
aaggcttgaacttgggt

SEQ ID NO: 12747 - DNA, 17 bp, Arabidopsis thaliana
aaggcttgaaggggaat

SEQ ID NO: 12748 - DNA, 17 bp, Arabidopsis thaliana
aaggcttgacatctacg

SEQ ID NO: 12749 - DNA, 17 bp, Arabidopsis thaliana
aaggcttgagtaacgca

SEQ ID NO: 12750 - DNA, 17 bp, Arabidopsis thaliana
aaggcttgcagagagaa

SEQ ID NO: 12751 - DNA, 17 bp, Arabidopsis thaliana
aaggcttgcagagggaa

SEQ ID NO: 12752 - DNA, 17 bp, Arabidopsis thaliana
aaggcttgcccaaacag

SEQ ID NO: 12753 - DNA, 17 bp, Arabidopsis thaliana
aaggcttgcggctacct

SEQ ID NO: 12754 - DNA, 17 bp, Arabidopsis thaliana
aaggcttgcttcatttt

SEQ ID NO: 12755 - DNA, 17 bp, Arabidopsis thaliana
aaggcttggaacaacac

SEQ ID NO: 12756 - DNA, 17 bp, Arabidopsis thaliana
aaggcttggaatcacac

SEQ ID NO: 12757 - DNA, 17 bp, Arabidopsis thaliana
aaggcttggaatcccac

SEQ ID NO: 12758 - DNA, 17 bp, Arabidopsis thaliana
aaggcttggctcaggcg

SEQ ID NO: 12759 - DNA, 17 bp, Arabidopsis thaliana
aaggcttggctcatgca

SEQ ID NO: 12760 - DNA, 17 bp, Arabidopsis thaliana
aaggcttgtaacgctct

SEQ ID NO: 12761 - DNA, 17 bp, Arabidopsis thaliana
aaggcttgtaatgggtg

SEQ ID NO: 12762 - DNA, 17 bp, Arabidopsis thaliana
aaggcttgttgcgaact

SEQ ID NO: 12763 - DNA, 17 bp, Arabidopsis thaliana
aaggcttgttttgtttg

SEQ ID NO: 12764 - DNA, 17 bp, Arabidopsis thaliana
aaggctttaggtgttac

SEQ ID NO: 12765 - DNA, 17 bp, Arabidopsis thaliana
aaggctttcacttggaa

SEQ ID NO: 12766 - DNA, 17 bp, Arabidopsis thaliana
aaggctttctgcgttca

SEQ ID NO: 12767 - DNA, 17 bp, Arabidopsis thaliana
aaggctttgaatagtta

SEQ ID NO: 12768 - DNA, 17 bp, Arabidopsis thaliana
aaggctttgaatggatg

SEQ ID NO: 12769 - DNA, 17 bp, Arabidopsis thaliana
aaggctttgaatgggta

SEQ ID NO: 12770 - DNA, 17 bp, Arabidopsis thaliana
aaggctttgaatggtta

SEQ ID NO: 12771 - DNA, 17 bp, Arabidopsis thaliana
aaggctttgacaaagtt

SEQ ID NO: 12772 - DNA, 17 bp, Arabidopsis thaliana
aaggctttgagatttcc

SEQ ID NO: 12773 - DNA, 17 bp, Arabidopsis thaliana
aaggctttgattgtgac

SEQ ID NO: 12774 - DNA, 17 bp, Arabidopsis thaliana
aaggctttgctcgatga

SEQ ID NO: 12775 - DNA, 17 bp, Arabidopsis thaliana
aaggctttggccgagtg

SEQ ID NO: 12776 - DNA, 17 bp, Arabidopsis thaliana
aagggaaactcaggaac

SEQ ID NO: 12777 - DNA, 17 bp, Arabidopsis thaliana
aagggaaatctgcagct

SEQ ID NO: 12778 - DNA, 17 bp, Arabidopsis thaliana
aagggaacccatacaaa

SEQ ID NO: 12779 - DNA, 17 bp, Arabidopsis thaliana
aagggaacgggcttggc

SEQ ID NO: 12780 - DNA, 17 bp, Arabidopsis thaliana
aagggaactctgtcgga

SEQ ID NO: 12781 - DNA, 17 bp, Arabidopsis thaliana
aagggaactgttctgct

SEQ ID NO: 12782 - DNA, 17 bp, Arabidopsis thaliana
aagggaagcttaaagct

SEQ ID NO: 12783 - DNA, 17 bp, Arabidopsis thaliana
aagggaaggcttgggcg

SEQ ID NO: 12784 - DNA, 17 bp, Arabidopsis thaliana
aagggaagtttttctac

SEQ ID NO: 12785 - DNA, 17 bp, Arabidopsis thaliana
aagggaatcgcacggtg

SEQ ID NO: 12786 - DNA, 17 bp, Arabidopsis thaliana
aagggacaaggggaatc

SEQ ID NO: 12787 - DNA, 17 bp, Arabidopsis thaliana
aagggaccgctccgtct

SEQ ID NO: 12788 - DNA, 17 bp, Arabidopsis thaliana
aagggacctctctcgtt

SEQ ID NO: 12789 - DNA, 17 bp, Arabidopsis thaliana
aagggacgtttttcctt

SEQ ID NO: 12790 - DNA, 17 bp, Arabidopsis thaliana
aagggactcgtcaatgc

SEQ ID NO: 12791 - DNA, 17 bp, Arabidopsis thaliana
aagggagacggcgcctt

SEQ ID NO: 12792 - DNA, 17 bp, Arabidopsis thaliana
aagggagattacgggct

SEQ ID NO: 12793 - DNA, 17 bp, Arabidopsis thaliana
aagggaggatgtccgag

SEQ ID NO: 12794 - DNA, 17 bp, Arabidopsis thaliana
aagggagtcgccgtcag

SEQ ID NO: 12795 - DNA, 17 bp, Arabidopsis thaliana
aagggagtctccacagg

SEQ ID NO: 12796 - DNA, 17 bp, Arabidopsis thaliana
aagggataatcagaccg

SEQ ID NO: 12797 - DNA, 17 bp, Arabidopsis thaliana
aagggatagtgccacaa

SEQ ID NO: 12798 - DNA, 17 bp, Arabidopsis thaliana
aagggatatagctttga

SEQ ID NO: 12799 - DNA, 17 bp, Arabidopsis thaliana
aagggatccaatcttgg

SEQ ID NO: 12800 - DNA, 17 bp, Arabidopsis thaliana
aagggatccactcttgg

SEQ ID NO: 12801 - DNA, 17 bp, Arabidopsis thaliana
aagggatcccttggtgc

SEQ ID NO: 12802 - DNA, 17 bp, Arabidopsis thaliana
aagggatcccttggttc

SEQ ID NO: 12803 - DNA, 17 bp, Arabidopsis thaliana
aagggatcctttggttc

SEQ ID NO: 12804 - DNA, 17 bp, Arabidopsis thaliana
aagggatctcctatgtc

SEQ ID NO: 12805 - DNA, 17 bp, Arabidopsis thaliana
aagggatcttcgctttg

SEQ ID NO: 12806 - DNA, 17 bp, Arabidopsis thaliana
aagggatcttgtgccgg

SEQ ID NO: 12807 - DNA, 17 bp, Arabidopsis thaliana
aagggatgagtctcacc

SEQ ID NO: 12808 - DNA, 17 bp, Arabidopsis thaliana
aagggatgttgcttata

SEQ ID NO: 12809 - DNA, 17 bp, Arabidopsis thaliana
aagggattcagacaaat

SEQ ID NO: 12810 - DNA, 17 bp, Arabidopsis thaliana
aagggatttctgagaac

SEQ ID NO: 12811 - DNA, 17 bp, Arabidopsis thaliana
aagggattttacgatac

SEQ ID NO: 12812 - DNA, 17 bp, Arabidopsis thaliana
aagggattttcaccgcg

SEQ ID NO: 12813 - DNA, 17 bp, Arabidopsis thaliana
aagggatttttgagaac

SEQ ID NO: 12814 - DNA, 17 bp, Arabidopsis thaliana
aagggcaactggctgct

SEQ ID NO: 12815 - DNA, 17 bp, Arabidopsis thaliana
aagggcaccaccaggag

SEQ ID NO: 12816 - DNA, 17 bp, Arabidopsis thaliana
aagggcacgtctgcctg

SEQ ID NO: 12817 - DNA, 17 bp, Arabidopsis thaliana
aagggcactgcagtctt

SEQ ID NO: 12818 - DNA, 17 bp, Arabidopsis thaliana
aagggcagaattgtcct

SEQ ID NO: 12819 - DNA, 17 bp, Arabidopsis thaliana
aagggcagttttgctaa

SEQ ID NO: 12820 - DNA, 17 bp, Arabidopsis thaliana
aagggcggcaagcctgc

SEQ ID NO: 12821 - DNA, 17 bp, Arabidopsis thaliana
aagggcggttcagattc

SEQ ID NO: 12822 - DNA, 17 bp, Arabidopsis thaliana
aagggctattagctcag

SEQ ID NO: 12823 - DNA, 17 bp, Arabidopsis thaliana
aagggctcagctgaatc

SEQ ID NO: 12824 - DNA, 17 bp, Arabidopsis thaliana
aagggctctatcattgg

SEQ ID NO: 12825 - DNA, 17 bp, Arabidopsis thaliana
aagggctgccttccgat

SEQ ID NO: 12826 - DNA, 17 bp, Arabidopsis thaliana
aagggctgcgtttcttg

SEQ ID NO: 12827 - DNA, 17 bp, Arabidopsis thaliana
aagggcttaactggttt

SEQ ID NO: 12828 - DNA, 17 bp, Arabidopsis thaliana
aagggcttagggcattc

SEQ ID NO: 12829 - DNA, 17 bp, Arabidopsis thaliana
aagggcttgattggttc

SEQ ID NO: 12830 - DNA, 17 bp, Arabidopsis thaliana
aagggcttgattggttt

SEQ ID NO: 12831 - DNA, 17 bp, Arabidopsis thaliana
aaggggaagccgagata

SEQ ID NO: 12832 - DNA, 17 bp, Arabidopsis thaliana
aaggggaatccgactgt

SEQ ID NO: 12833 - DNA, 17 bp, Arabidopsis thaliana
aaggggaatgtaccata

SEQ ID NO: 12834 - DNA, 17 bp, Arabidopsis thaliana
aaggggacacaggtcgt

SEQ ID NO: 12835 - DNA, 17 bp, Arabidopsis thaliana
aaggggactacgggatt

SEQ ID NO: 12836 - DNA, 17 bp, Arabidopsis thaliana
aaggggaggcttctact

SEQ ID NO: 12837 - DNA, 17 bp, Arabidopsis thaliana
aaggggattacgggttt

SEQ ID NO: 12838 - DNA, 17 bp, Arabidopsis thaliana
aaggggattcggattcg

SEQ ID NO: 12839 - DNA, 17 bp, Arabidopsis thaliana
aaggggatttctgctat

SEQ ID NO: 12840 - DNA, 17 bp, Arabidopsis thaliana
aagggggcgtggaggtc

SEQ ID NO: 12841 - DNA, 17 bp, Arabidopsis thaliana
aagggggcttccctctc

SEQ ID NO: 12842 - DNA, 17 bp, Arabidopsis thaliana
aagggggtccgagagct

SEQ ID NO: 12843 - DNA, 17 bp, Arabidopsis thaliana
aagggggttcccacgga

SEQ ID NO: 12844 - DNA, 17 bp, Arabidopsis thaliana
aaggggtatcgtctgtc

SEQ ID NO: 12845 - DNA, 17 bp, Arabidopsis thaliana
aaggggtcttctagtca

SEQ ID NO: 12846 - DNA, 17 bp, Arabidopsis thaliana
aaggggttagtcaaccc

SEQ ID NO: 12847 - DNA, 17 bp, Arabidopsis thaliana
aagggtaaaacgaaagc

SEQ ID NO: 12848 - DNA, 17 bp, Arabidopsis thaliana
aagggtacgtaggcagt

SEQ ID NO: 12849 - DNA, 17 bp, Arabidopsis thaliana
aagggtactcaggtcac

SEQ ID NO: 12850 - DNA, 17 bp, Arabidopsis thaliana
aagggtatcggctcgga

SEQ ID NO: 12851 - DNA, 17 bp, Arabidopsis thaliana
aagggtattatcgtcat

SEQ ID NO: 12852 - DNA, 17 bp, Arabidopsis thaliana
aagggtattatcgttat

SEQ ID NO: 12853 - DNA, 17 bp, Arabidopsis thaliana
aagggtcagaaggaatt

SEQ ID NO: 12854 - DNA, 17 bp, Arabidopsis thaliana
aagggtccggataatcg

SEQ ID NO: 12855 - DNA, 17 bp, Arabidopsis thaliana
aagggtcctcagcgacg

SEQ ID NO: 12856 - DNA, 17 bp, Arabidopsis thaliana
aagggtcgaaaggaatt

SEQ ID NO: 12857 - DNA, 17 bp, Arabidopsis thaliana
aagggtcgaatcttagc

SEQ ID NO: 12858 - DNA, 17 bp, Arabidopsis thaliana
aagggtcgaattccact

SEQ ID NO: 12859 - DNA, 17 bp, Arabidopsis thaliana
aagggtcgacgcgggct

SEQ ID NO: 12860 - DNA, 17 bp, Arabidopsis thaliana
aagggtcgactctttgg

SEQ ID NO: 12861 - DNA, 17 bp, Arabidopsis thaliana
aagggtcggaaggaatt

SEQ ID NO: 12862 - DNA, 17 bp, Arabidopsis thaliana
aagggtctcggccccga

SEQ ID NO: 12863 - DNA, 17 bp, Arabidopsis thaliana
aagggtctgaggtgctg

SEQ ID NO: 12864 - DNA, 17 bp, Arabidopsis thaliana
aagggtctgtcaggaca

SEQ ID NO: 12865 - DNA, 17 bp, Arabidopsis thaliana
aagggtgaacgaccagt

SEQ ID NO: 12866 - DNA, 17 bp, Arabidopsis thaliana
aagggtgaacgaccggt

SEQ ID NO: 12867 - DNA, 17 bp, Arabidopsis thaliana
aagggtgaacgacctgt

SEQ ID NO: 12868 - DNA, 17 bp, Arabidopsis thaliana
aagggtgaacgacttgt

SEQ ID NO: 12869 - DNA, 17 bp, Arabidopsis thaliana
aagggtgaacgatctgt

SEQ ID NO: 12870 - DNA, 17 bp, Arabidopsis thaliana
aagggtgacctcccggg

SEQ ID NO: 12871 - DNA, 17 bp, Arabidopsis thaliana
aagggtgattgcacaag

SEQ ID NO: 12872 - DNA, 17 bp, Arabidopsis thaliana
aagggtgcctaaccgcc

SEQ ID NO: 12873 - DNA, 17 bp, Arabidopsis thaliana
aagggtgcctcttcatg

SEQ ID NO: 12874 - DNA, 17 bp, Arabidopsis thaliana
aagggtgcttctgttcg

SEQ ID NO: 12875 - DNA, 17 bp, Arabidopsis thaliana
aagggtggtccaagtct

SEQ ID NO: 12876 - DNA, 17 bp, Arabidopsis thaliana
aagggtgtcggctcgga

SEQ ID NO: 12877 - DNA, 17 bp, Arabidopsis thaliana
aagggtgtgaacgatct

SEQ ID NO: 12878 - DNA, 17 bp, Arabidopsis thaliana
aagggttaggtcctttc

SEQ ID NO: 12879 - DNA, 17 bp, Arabidopsis thaliana
aagggttatttggtcat

SEQ ID NO: 12880 - DNA, 17 bp, Arabidopsis thaliana
aagggttcaaatcctgt

SEQ ID NO: 12881 - DNA, 17 bp, Arabidopsis thaliana
aagggttcctatctcgg

SEQ ID NO: 12882 - DNA, 17 bp, Arabidopsis thaliana
aagggttcctccacaag

SEQ ID NO: 12883 - DNA, 17 bp, Arabidopsis thaliana
aagggttcctccgcaag

SEQ ID NO: 12884 - DNA, 17 bp, Arabidopsis thaliana
aagggttcgaatgtttg

SEQ ID NO: 12885 - DNA, 17 bp, Arabidopsis thaliana
aagggttcgaggtgttg

SEQ ID NO: 12886 - DNA, 17 bp, Arabidopsis thaliana
aagggttcgagtgtgag

SEQ ID NO: 12887 - DNA, 17 bp, Arabidopsis thaliana
aagggttgcagcaggaa

SEQ ID NO: 12888 - DNA, 17 bp, Arabidopsis thaliana
aagggttgcctgaattt

SEQ ID NO: 12889 - DNA, 17 bp, Arabidopsis thaliana
aagggttgcgaggctta

SEQ ID NO: 12890 - DNA, 17 bp, Arabidopsis thaliana
aagggttgggactgctt

SEQ ID NO: 12891 - DNA, 17 bp, Arabidopsis thaliana
aagggtttaactggttt

SEQ ID NO: 12892 - DNA, 17 bp, Arabidopsis thaliana
aagggtttacagggatt

SEQ ID NO: 12893 - DNA, 17 bp, Arabidopsis thaliana
aagggtttctatactcg

SEQ ID NO: 12894 - DNA, 17 bp, Arabidopsis thaliana
aagggtttctcggatga

SEQ ID NO: 12895 - DNA, 17 bp, Arabidopsis thaliana
aagggtttgaatggtta

SEQ ID NO: 12896 - DNA, 17 bp, Arabidopsis thaliana
aagggtttgactggata

SEQ ID NO: 12897 - DNA, 17 bp, Arabidopsis thaliana
aagggttttggccaagt

SEQ ID NO: 12898 - DNA, 17 bp, Arabidopsis thaliana
aaggtaaaaatctggtg

SEQ ID NO: 12899 - DNA, 17 bp, Arabidopsis thaliana
aaggtaaaacggtaaat

SEQ ID NO: 12900 - DNA, 17 bp, Arabidopsis thaliana
aaggtaaaacggtaagt

SEQ ID NO: 12901 - DNA, 17 bp, Arabidopsis thaliana
aaggtaaagacccgttt

SEQ ID NO: 12902 - DNA, 17 bp, Arabidopsis thaliana
aaggtaaatcttgtctt

SEQ ID NO: 12903 - DNA, 17 bp, Arabidopsis thaliana
aaggtaagactcgggaa

SEQ ID NO: 12904 - DNA, 17 bp, Arabidopsis thaliana
aaggtaaggtctggtga

SEQ ID NO: 12905 - DNA, 17 bp, Arabidopsis thaliana
aaggtaaggttcacggg

SEQ ID NO: 12906 - DNA, 17 bp, Arabidopsis thaliana
aaggtaagtcccaagct

SEQ ID NO: 12907 - DNA, 17 bp, Arabidopsis thaliana
aaggtactcttctcgga

SEQ ID NO: 12908 - DNA, 17 bp, Arabidopsis thaliana
aaggtagccaaatgcct

SEQ ID NO: 12909 - DNA, 17 bp, Arabidopsis thaliana
aaggtagcggggaagcg

SEQ ID NO: 12910 - DNA, 17 bp, Arabidopsis thaliana
aaggtagctactccctc

SEQ ID NO: 12911 - DNA, 17 bp, Arabidopsis thaliana
aaggtagctcccaaggg

SEQ ID NO: 12912 - DNA, 17 bp, Arabidopsis thaliana
aaggtagcttgtctcgt

SEQ ID NO: 12913 - DNA, 17 bp, Arabidopsis thaliana
aaggtaggcggtctctt

SEQ ID NO: 12914 - DNA, 17 bp, Arabidopsis thaliana
aaggtaggtctaggcgt

SEQ ID NO: 12915 - DNA, 17 bp, Arabidopsis thaliana
aaggtagtccgataata

SEQ ID NO: 12916 - DNA, 17 bp, Arabidopsis thaliana
aaggtatcacatgcgaa

SEQ ID NO: 12917 - DNA, 17 bp, Arabidopsis thaliana
aaggtatccagatccca

SEQ ID NO: 12918 - DNA, 17 bp, Arabidopsis thaliana
aaggtatccatcaagcg

SEQ ID NO: 12919 - DNA, 17 bp, Arabidopsis thaliana
aaggtatcctgccagtc

SEQ ID NO: 12920 - DNA, 17 bp, Arabidopsis thaliana
aaggtatcggctctgat

SEQ ID NO: 12921 - DNA, 17 bp, Arabidopsis thaliana
aaggtatcgtctgttgt

SEQ ID NO: 12922 - DNA, 17 bp, Arabidopsis thaliana
aaggtatctcgcgcttg

SEQ ID NO: 12923 - DNA, 17 bp, Arabidopsis thaliana
aaggtatctctcgacga

SEQ ID NO: 12924 - DNA, 17 bp, Arabidopsis thaliana
aaggtatcttgccgttt

SEQ ID NO: 12925 - DNA, 17 bp, Arabidopsis thaliana
aaggtatgttaagaagg

SEQ ID NO: 12926 - DNA, 17 bp, Arabidopsis thaliana
aaggtatgttggcccgt

SEQ ID NO: 12927 - DNA, 17 bp, Arabidopsis thaliana
aaggtattgaactgact

SEQ ID NO: 12928 - DNA, 17 bp, Arabidopsis thaliana
aaggtatttagtccgct

SEQ ID NO: 12929 - DNA, 17 bp, Arabidopsis thaliana
aaggtcaaaatttggag

SEQ ID NO: 12930 - DNA, 17 bp, Arabidopsis thaliana
aaggtcaaaatttggga

SEQ ID NO: 12931 - DNA, 17 bp, Arabidopsis thaliana
aaggtcaaaatttgggg

SEQ ID NO: 12932 - DNA, 17 bp, Arabidopsis thaliana
aaggtcaaaatttgggt

SEQ ID NO: 12933 - DNA, 17 bp, Arabidopsis thaliana
aaggtcaaaattttgaa

SEQ ID NO: 12934 - DNA, 17 bp, Arabidopsis thaliana
aaggtcaaaattttgga

SEQ ID NO: 12935 - DNA, 17 bp, Arabidopsis thaliana
aaggtcaaaattttggt

SEQ ID NO: 12936 - DNA, 17 bp, Arabidopsis thaliana
aaggtcaaatactgcag

SEQ ID NO: 12937 - DNA, 17 bp, Arabidopsis thaliana
aaggtcaacaggtctca

SEQ ID NO: 12938 - DNA, 17 bp, Arabidopsis thaliana
aaggtcaccaatcttga

SEQ ID NO: 12939 - DNA, 17 bp, Arabidopsis thaliana
aaggtcactggcttatt

SEQ ID NO: 12940 - DNA, 17 bp, Arabidopsis thaliana
aaggtcaggagggatag

SEQ ID NO: 12941 - DNA, 17 bp, Arabidopsis thaliana
aaggtcagggcgttcca

SEQ ID NO: 12942 - DNA, 17 bp, Arabidopsis thaliana
aaggtcagtttcaagat

SEQ ID NO: 12943 - DNA, 17 bp, Arabidopsis thaliana
aaggtcatctccattgg

SEQ ID NO: 12944 - DNA, 17 bp, Arabidopsis thaliana
aaggtcatttgccgact

SEQ ID NO: 12945 - DNA, 17 bp, Arabidopsis thaliana
aaggtccaatggactat

SEQ ID NO: 12946 - DNA, 17 bp, Arabidopsis thaliana
aaggtccaggagaggct

SEQ ID NO: 12947 - DNA, 17 bp, Arabidopsis thaliana
aaggtccatgtccatta

SEQ ID NO: 12948 - DNA, 17 bp, Arabidopsis thaliana
aaggtccctgcaatgga

SEQ ID NO: 12949 - DNA, 17 bp, Arabidopsis thaliana
aaggtccgactttgtga

SEQ ID NO: 12950 - DNA, 17 bp, Arabidopsis thaliana
aaggtccgccgatttag

SEQ ID NO: 12951 - DNA, 17 bp, Arabidopsis thaliana
aaggtccgcctattgag

SEQ ID NO: 12952 - DNA, 17 bp, Arabidopsis thaliana
aaggtccgcctatttag

SEQ ID NO: 12953 - DNA, 17 bp, Arabidopsis thaliana
aaggtccggataatcgc

SEQ ID NO: 12954 - DNA, 17 bp, Arabidopsis thaliana
aaggtccggcgaagtga

SEQ ID NO: 12955 - DNA, 17 bp, Arabidopsis thaliana
aaggtccgtcgcgaagt

SEQ ID NO: 12956 - DNA, 17 bp, Arabidopsis thaliana
aaggtccgtcttcttga

SEQ ID NO: 12957 - DNA, 17 bp, Arabidopsis thaliana
aaggtcctgaacgatgt

SEQ ID NO: 12958 - DNA, 17 bp, Arabidopsis thaliana
aaggtcctgagagaatt

SEQ ID NO: 12959 - DNA, 17 bp, Arabidopsis thaliana
aaggtcctgatcgagca

SEQ ID NO: 12960 - DNA, 17 bp, Arabidopsis thaliana
aaggtcctgtttgtttg

SEQ ID NO: 12961 - DNA, 17 bp, Arabidopsis thaliana
aaggtccttcatctgct

SEQ ID NO: 12962 - DNA, 17 bp, Arabidopsis thaliana
aaggtcgaaatttggga

SEQ ID NO: 12963 - DNA, 17 bp, Arabidopsis thaliana
aaggtcgaatccgccaa

SEQ ID NO: 12964 - DNA, 17 bp, Arabidopsis thaliana
aaggtcgacgcgggctc

SEQ ID NO: 12965 - DNA, 17 bp, Arabidopsis thaliana
aaggtcgacgcgggctt

SEQ ID NO: 12966 - DNA, 17 bp, Arabidopsis thaliana
aaggtcgaggcgacggc

SEQ ID NO: 12967 - DNA, 17 bp, Arabidopsis thaliana
aaggtcgagggtgttga

SEQ ID NO: 12968 - DNA, 17 bp, Arabidopsis thaliana
aaggtcgagtgatagta

SEQ ID NO: 12969 - DNA, 17 bp, Arabidopsis thaliana
aaggtcgattttaccgg

SEQ ID NO: 12970 - DNA, 17 bp, Arabidopsis thaliana
aaggtcgccaaggtttt

SEQ ID NO: 12971 - DNA, 17 bp, Arabidopsis thaliana
aaggtcgccagccatca

SEQ ID NO: 12972 - DNA, 17 bp, Arabidopsis thaliana
aaggtcgccgtttatga

SEQ ID NO: 12973 - DNA, 17 bp, Arabidopsis thaliana
aaggtcgcctgcatttc

SEQ ID NO: 12974 - DNA, 17 bp, Arabidopsis thaliana
aaggtcgcgattcttcc

SEQ ID NO: 12975 - DNA, 17 bp, Arabidopsis thaliana
aaggtcgcgggttcgtg

SEQ ID NO: 12976 - DNA, 17 bp, Arabidopsis thaliana
aaggtcgcgtgttcgat

SEQ ID NO: 12977 - DNA, 17 bp, Arabidopsis thaliana
aaggtcggccattcggt

SEQ ID NO: 12978 - DNA, 17 bp, Arabidopsis thaliana
aaggtcggcgatacgct

SEQ ID NO: 12979 - DNA, 17 bp, Arabidopsis thaliana
aaggtcggtcgagtgaa

SEQ ID NO: 12980 - DNA, 17 bp, Arabidopsis thaliana
aaggtcggttagattta

SEQ ID NO: 12981 - DNA, 17 bp, Arabidopsis thaliana
aaggtcggttgatccgc

SEQ ID NO: 12982 - DNA, 17 bp, Arabidopsis thaliana
aaggtcggtttggtttt

SEQ ID NO: 12983 - DNA, 17 bp, Arabidopsis thaliana
aaggtcgtcattaggct

SEQ ID NO: 12984 - DNA, 17 bp, Arabidopsis thaliana
aaggtcgtctgcatttc

SEQ ID NO: 12985 - DNA, 17 bp, Arabidopsis thaliana
aaggtcgtgtctaggct

SEQ ID NO: 12986 - DNA, 17 bp, Arabidopsis thaliana
aaggtcgttcttctttt

SEQ ID NO: 12987 - DNA, 17 bp, Arabidopsis thaliana
aaggtctagcccaatca

SEQ ID NO: 12988 - DNA, 17 bp, Arabidopsis thaliana
aaggtctagcccactca

SEQ ID NO: 12989 - DNA, 17 bp, Arabidopsis thaliana
aaggtctatcgttgtgt

SEQ ID NO: 12990 - DNA, 17 bp, Arabidopsis thaliana
aaggtctcaaaggctca

SEQ ID NO: 12991 - DNA, 17 bp, Arabidopsis thaliana
aaggtctccagcttggc

SEQ ID NO: 12992 - DNA, 17 bp, Arabidopsis thaliana
aaggtctctccaaatgt

SEQ ID NO: 12993 - DNA, 17 bp, Arabidopsis thaliana
aaggtctctgctctgac

SEQ ID NO: 12994 - DNA, 17 bp, Arabidopsis thaliana
aaggtctctggttcgag

SEQ ID NO: 12995 - DNA, 17 bp, Arabidopsis thaliana
aaggtctgaggtctgag

SEQ ID NO: 12996 - DNA, 17 bp, Arabidopsis thaliana
aaggtctgaggttctgt

SEQ ID NO: 12997 - DNA, 17 bp, Arabidopsis thaliana
aaggtctgcctgggtgt

SEQ ID NO: 12998 - DNA, 17 bp, Arabidopsis thaliana
aaggtctgtctgggtat

SEQ ID NO: 12999 - DNA, 17 bp, Arabidopsis thaliana
aaggtcttacaaggtca

SEQ ID NO: 13000 - DNA, 17 bp, Arabidopsis thaliana
aaggtcttgcgagaaaa

SEQ ID NO: 13001 - DNA, 17 bp, Arabidopsis thaliana
aaggtcttggaggcgga

SEQ ID NO: 13002 - DNA, 17 bp, Arabidopsis thaliana
aaggtcttggaggtaga

SEQ ID NO: 13003 - DNA, 17 bp, Arabidopsis thaliana
aaggtcttgggtgccgc

SEQ ID NO: 13004 - DNA, 17 bp, Arabidopsis thaliana
aaggtctttgatctgca

SEQ ID NO: 13005 - DNA, 17 bp, Arabidopsis thaliana
aaggtctttgcccgttc

SEQ ID NO: 13006 - DNA, 17 bp, Arabidopsis thaliana
aaggtgaacagcctctg

SEQ ID NO: 13007 - DNA, 17 bp, Arabidopsis thaliana
aaggtgaacctgcggaa

SEQ ID NO: 13008 - DNA, 17 bp, Arabidopsis thaliana
aaggtgaacgatctgtg

SEQ ID NO: 13009 - DNA, 17 bp, Arabidopsis thaliana
aaggtgaatgcagatag

SEQ ID NO: 13010 - DNA, 17 bp, Arabidopsis thaliana
aaggtgaattgctgagt

SEQ ID NO: 13011 - DNA, 17 bp, Arabidopsis thaliana
aaggtgacacaggtcgt

SEQ ID NO: 13012 - DNA, 17 bp, Arabidopsis thaliana
aaggtgaccattggagc

SEQ ID NO: 13013 - DNA, 17 bp, Arabidopsis thaliana
aaggtgaccgacgccgg

SEQ ID NO: 13014 - DNA, 17 bp, Arabidopsis thaliana
aaggtgactgagaatga

SEQ ID NO: 13015 - DNA, 17 bp, Arabidopsis thaliana
aaggtgacttgaacccg

SEQ ID NO: 13016 - DNA, 17 bp, Arabidopsis thaliana
aaggtgagaggtggttg

SEQ ID NO: 13017 - DNA, 17 bp, Arabidopsis thaliana
aaggtgagattcgccta

SEQ ID NO: 13018 - DNA, 17 bp, Arabidopsis thaliana
aaggtgatgatgtggaa

SEQ ID NO: 13019 - DNA, 17 bp, Arabidopsis thaliana
aaggtgatttccacgtg

SEQ ID NO: 13020 - DNA, 17 bp, Arabidopsis thaliana
aaggtgcaactgacggt

SEQ ID NO: 13021 - DNA, 17 bp, Arabidopsis thaliana
aaggtgcagtacgaatc

SEQ ID NO: 13022 - DNA, 17 bp, Arabidopsis thaliana
aaggtgcattggtcggc

SEQ ID NO: 13023 - DNA, 17 bp, Arabidopsis thaliana
aaggtgcattgttcagc

SEQ ID NO: 13024 - DNA, 17 bp, Arabidopsis thaliana
aaggtgccgctggatca

SEQ ID NO: 13025 - DNA, 17 bp, Arabidopsis thaliana
aaggtgcgaggaactct

SEQ ID NO: 13026 - DNA, 17 bp, Arabidopsis thaliana
aaggtgcgcaccttgct

SEQ ID NO: 13027 - DNA, 17 bp, Arabidopsis thaliana
aaggtgcgcctggatca

SEQ ID NO: 13028 - DNA, 17 bp, Arabidopsis thaliana
aaggtgcggctccatca

SEQ ID NO: 13029 - DNA, 17 bp, Arabidopsis thaliana
aaggtgcggctcgatca

SEQ ID NO: 13030 - DNA, 17 bp, Arabidopsis thaliana
aaggtgcggctgcatca

SEQ ID NO: 13031 - DNA, 17 bp, Arabidopsis thaliana
aaggtgcggctggatca

SEQ ID NO: 13032 - DNA, 17 bp, Arabidopsis thaliana
aaggtgcggctgtatca

SEQ ID NO: 13033 - DNA, 17 bp, Arabidopsis thaliana
aaggtgcggcttgatca

SEQ ID NO: 13034 - DNA, 17 bp, Arabidopsis thaliana
aaggtgctacagagtga

SEQ ID NO: 13035 - DNA, 17 bp, Arabidopsis thaliana
aaggtgctgctatcgat

SEQ ID NO: 13036 - DNA, 17 bp, Arabidopsis thaliana
aaggtgctgctggatca

SEQ ID NO: 13037 - DNA, 17 bp, Arabidopsis thaliana
aaggtgctgttcgtttg

SEQ ID NO: 13038 - DNA, 17 bp, Arabidopsis thaliana
aaggtgcttgaactttg

SEQ ID NO: 13039 - DNA, 17 bp, Arabidopsis thaliana
aaggtggacattccggt

SEQ ID NO: 13040 - DNA, 17 bp, Arabidopsis thaliana
aaggtggagatacctaa

SEQ ID NO: 13041 - DNA, 17 bp, Arabidopsis thaliana
aaggtggaggtgctggg

SEQ ID NO: 13042 - DNA, 17 bp, Arabidopsis thaliana
aaggtggattgtttcta

SEQ ID NO: 13043 - DNA, 17 bp, Arabidopsis thaliana
aaggtggcagactggca

SEQ ID NO: 13044 - DNA, 17 bp, Arabidopsis thaliana
aaggtggctatagtttc

SEQ ID NO: 13045 - DNA, 17 bp, Arabidopsis thaliana
aaggtgggtccacccct

SEQ ID NO: 13046 - DNA, 17 bp, Arabidopsis thaliana
aaggtggtcttagatcg

SEQ ID NO: 13047 - DNA, 17 bp, Arabidopsis thaliana
aaggtggtgcttctcgt

SEQ ID NO: 13048 - DNA, 17 bp, Arabidopsis thaliana
aaggtggtggtggtgga

SEQ ID NO: 13049 - DNA, 17 bp, Arabidopsis thaliana
aaggtggtggtggtggt

SEQ ID NO: 13050 - DNA, 17 bp, Arabidopsis thaliana
aaggtggtgtccgacgt

SEQ ID NO: 13051 - DNA, 17 bp, Arabidopsis thaliana
aaggtggttcgtctatg

SEQ ID NO: 13052 - DNA, 17 bp, Arabidopsis thaliana
aaggtgtagtgatggcc

SEQ ID NO: 13053 - DNA, 17 bp, Arabidopsis thaliana
aaggtgtcacatgccaa

SEQ ID NO: 13054 - DNA, 17 bp, Arabidopsis thaliana
aaggtgtcatctctcgt

SEQ ID NO: 13055 - DNA, 17 bp, Arabidopsis thaliana
aaggtgtccatcaagcg

SEQ ID NO: 13056 - DNA, 17 bp, Arabidopsis thaliana
aaggtgtgattgccaga

SEQ ID NO: 13057 - DNA, 17 bp, Arabidopsis thaliana
aaggtgtggctggatca

SEQ ID NO: 13058 - DNA, 17 bp, Arabidopsis thaliana
aaggtgtggtaagttca

SEQ ID NO: 13059 - DNA, 17 bp, Arabidopsis thaliana
aaggtgttaggcgctaa

SEQ ID NO: 13060 - DNA, 17 bp, Arabidopsis thaliana
aaggtgttgaatggtga

SEQ ID NO: 13061 - DNA, 17 bp, Arabidopsis thaliana
aaggtgttgataaccga

SEQ ID NO: 13062 - DNA, 17 bp, Arabidopsis thaliana
aaggtgttgcctaggcc

SEQ ID NO: 13063 - DNA, 17 bp, Arabidopsis thaliana
aaggtgtttgcagccgt

SEQ ID NO: 13064 - DNA, 17 bp, Arabidopsis thaliana
aaggttaagacaaagtt

SEQ ID NO: 13065 - DNA, 17 bp, Arabidopsis thaliana
aaggttacacagcttgc

SEQ ID NO: 13066 - DNA, 17 bp, Arabidopsis thaliana
aaggttacatagggcct

SEQ ID NO: 13067 - DNA, 17 bp, Arabidopsis thaliana
aaggttaggactcttgc

SEQ ID NO: 13068 - DNA, 17 bp, Arabidopsis thaliana
aaggttaggcacgtgcc

SEQ ID NO: 13069 - DNA, 17 bp, Arabidopsis thaliana
aaggttagggacgtcga

SEQ ID NO: 13070 - DNA, 17 bp, Arabidopsis thaliana
aaggttagggtttcaca

SEQ ID NO: 13071 - DNA, 17 bp, Arabidopsis thaliana
aaggttatacgcactcg

SEQ ID NO: 13072 - DNA, 17 bp, Arabidopsis thaliana
aaggttatatcgtagat

SEQ ID NO: 13073 - DNA, 17 bp, Arabidopsis thaliana
aaggttatatggtgtga

SEQ ID NO: 13074 - DNA, 17 bp, Arabidopsis thaliana
aaggttatgatgaagac

SEQ ID NO: 13075 - DNA, 17 bp, Arabidopsis thaliana
aaggttatgccgttcgg

SEQ ID NO: 13076 - DNA, 17 bp, Arabidopsis thaliana
aaggttatgggactctc

SEQ ID NO: 13077 - DNA, 17 bp, Arabidopsis thaliana
aaggttattcgactagc

SEQ ID NO: 13078 - DNA, 17 bp, Arabidopsis thaliana
aaggttattcgattttt

SEQ ID NO: 13079 - DNA, 17 bp, Arabidopsis thaliana
aaggttcaagccatatt

SEQ ID NO: 13080 - DNA, 17 bp, Arabidopsis thaliana
aaggttcaagccggatt

SEQ ID NO: 13081 - DNA, 17 bp, Arabidopsis thaliana
aaggttcaagggctaaa

SEQ ID NO: 13082 - DNA, 17 bp, Arabidopsis thaliana
aaggttcacggggattt

SEQ ID NO: 13083 - DNA, 17 bp, Arabidopsis thaliana
aaggttcagatcacgca

SEQ ID NO: 13084 - DNA, 17 bp, Arabidopsis thaliana
aaggttcagatccgtct

SEQ ID NO: 13085 - DNA, 17 bp, Arabidopsis thaliana
aaggttcaggcagtgct

SEQ ID NO: 13086 - DNA, 17 bp, Arabidopsis thaliana
aaggttcatctggtgaa

SEQ ID NO: 13087 - DNA, 17 bp, Arabidopsis thaliana
aaggttcatgggttgag

SEQ ID NO: 13088 - DNA, 17 bp, Arabidopsis thaliana
aaggttccagatccagg

SEQ ID NO: 13089 - DNA, 17 bp, Arabidopsis thaliana
aaggttcgaatagttac

SEQ ID NO: 13090 - DNA, 17 bp, Arabidopsis thaliana
aaggttcgatttggaca

SEQ ID NO: 13091 - DNA, 17 bp, Arabidopsis thaliana
aaggttcgcaatggcca

SEQ ID NO: 13092 - DNA, 17 bp, Arabidopsis thaliana
aaggttcgtccacggag

SEQ ID NO: 13093 - DNA, 17 bp, Arabidopsis thaliana
aaggttcgtccgccatg

SEQ ID NO: 13094 - DNA, 17 bp, Arabidopsis thaliana
aaggttcgttgattgtt

SEQ ID NO: 13095 - DNA, 17 bp, Arabidopsis thaliana
aaggttctaatccttcc

SEQ ID NO: 13096 - DNA, 17 bp, Arabidopsis thaliana
aaggttctacttgtgtc

SEQ ID NO: 13097 - DNA, 17 bp, Arabidopsis thaliana
aaggttctaggccgaaa

SEQ ID NO: 13098 - DNA, 17 bp, Arabidopsis thaliana
aaggttctctcttattt

SEQ ID NO: 13099 - DNA, 17 bp, Arabidopsis thaliana
aaggttctggaggaaag

SEQ ID NO: 13100 - DNA, 17 bp, Arabidopsis thaliana
aaggttctgggccgaaa

SEQ ID NO: 13101 - DNA, 17 bp, Arabidopsis thaliana
aaggttctgggccgaag

SEQ ID NO: 13102 - DNA, 17 bp, Arabidopsis thaliana
aaggttcttgatccaat

SEQ ID NO: 13103 - DNA, 17 bp, Arabidopsis thaliana
aaggttcttgttagact

SEQ ID NO: 13104 - DNA, 17 bp, Arabidopsis thaliana
aaggttgaacaagcgtt

SEQ ID NO: 13105 - DNA, 17 bp, Arabidopsis thaliana
aaggttgacagacggag

SEQ ID NO: 13106 - DNA, 17 bp, Arabidopsis thaliana
aaggttgaccaactctc

SEQ ID NO: 13107 - DNA, 17 bp, Arabidopsis thaliana
aaggttgaccaagttcc

SEQ ID NO: 13108 - DNA, 17 bp, Arabidopsis thaliana
aaggttgaccgttgact

SEQ ID NO: 13109 - DNA, 17 bp, Arabidopsis thaliana
aaggttgagactcttgc

SEQ ID NO: 13110 - DNA, 17 bp, Arabidopsis thaliana
aaggttgcaactgccaa

SEQ ID NO: 13111 - DNA, 17 bp, Arabidopsis thaliana
aaggttgcagcgttttt

SEQ ID NO: 13112 - DNA, 17 bp, Arabidopsis thaliana
aaggttgcgtgttcgtt

SEQ ID NO: 13113 - DNA, 17 bp, Arabidopsis thaliana
aaggttgctatgcatgt

SEQ ID NO: 13114 - DNA, 17 bp, Arabidopsis thaliana
aaggttgcttttggttg

SEQ ID NO: 13115 - DNA, 17 bp, Arabidopsis thaliana
aaggttggaccgctcgg

SEQ ID NO: 13116 - DNA, 17 bp, Arabidopsis thaliana
aaggttggagaagaatt

SEQ ID NO: 13117 - DNA, 17 bp, Arabidopsis thaliana
aaggttggcagtatgct

SEQ ID NO: 13118 - DNA, 17 bp, Arabidopsis thaliana
aaggttggccaactctc

SEQ ID NO: 13119 - DNA, 17 bp, Arabidopsis thaliana
aaggttggccagactgc

SEQ ID NO: 13120 - DNA, 17 bp, Arabidopsis thaliana
aaggttggctaagtccg

SEQ ID NO: 13121 - DNA, 17 bp, Arabidopsis thaliana
aaggttggctcaacaag

SEQ ID NO: 13122 - DNA, 17 bp, Arabidopsis thaliana
aaggttgggactcttgc

SEQ ID NO: 13123 - DNA, 17 bp, Arabidopsis thaliana
aaggttggttagtgttt

SEQ ID NO: 13124 - DNA, 17 bp, Arabidopsis thaliana
aaggttgtcaaccagat

SEQ ID NO: 13125 - DNA, 17 bp, Arabidopsis thaliana
aaggttgtcaatccaaa

SEQ ID NO: 13126 - DNA, 17 bp, Arabidopsis thaliana
aaggttgtgcctcaaca

SEQ ID NO: 13127 - DNA, 17 bp, Arabidopsis thaliana
aaggtttaactatttgt

SEQ ID NO: 13128 - DNA, 17 bp, Arabidopsis thaliana
aaggtttacctggaaca

SEQ ID NO: 13129 - DNA, 17 bp, Arabidopsis thaliana
aaggtttagactgtttt

SEQ ID NO: 13130 - DNA, 17 bp, Arabidopsis thaliana
aaggtttagcgtcaggg

SEQ ID NO: 13131 - DNA, 17 bp, Arabidopsis thaliana
aaggtttagcgttcgag

SEQ ID NO: 13132 - DNA, 17 bp, Arabidopsis thaliana
aaggtttaggaagtcgg

SEQ ID NO: 13133 - DNA, 17 bp, Arabidopsis thaliana
aaggtttagtggacttc

SEQ ID NO: 13134 - DNA, 17 bp, Arabidopsis thaliana
aaggtttatagccttta

SEQ ID NO: 13135 - DNA, 17 bp, Arabidopsis thaliana
aaggtttcaccggagct

SEQ ID NO: 13136 - DNA, 17 bp, Arabidopsis thaliana
aaggtttccgtaggtga

SEQ ID NO: 13137 - DNA, 17 bp, Arabidopsis thaliana
aaggtttcctcaaagtc

SEQ ID NO: 13138 - DNA, 17 bp, Arabidopsis thaliana
aaggtttcctcgggccg

SEQ ID NO: 13139 - DNA, 17 bp, Arabidopsis thaliana
aaggtttcgaagatttg

SEQ ID NO: 13140 - DNA, 17 bp, Arabidopsis thaliana
aaggtttcgtcgaggct

SEQ ID NO: 13141 - DNA, 17 bp, Arabidopsis thaliana
aaggtttcttaagcgag

SEQ ID NO: 13142 - DNA, 17 bp, Arabidopsis thaliana
aaggtttgactgtttga

SEQ ID NO: 13143 - DNA, 17 bp, Arabidopsis thaliana
aaggtttgattgtgcag

SEQ ID NO: 13144 - DNA, 17 bp, Arabidopsis thaliana
aaggtttgctgctccca

SEQ ID NO: 13145 - DNA, 17 bp, Arabidopsis thaliana
aaggtttggaagcgact

SEQ ID NO: 13146 - DNA, 17 bp, Arabidopsis thaliana
aaggtttggcaggacgt

SEQ ID NO: 13147 - DNA, 17 bp, Arabidopsis thaliana
aaggttttaaaccgcaa

SEQ ID NO: 13148 - DNA, 17 bp, Arabidopsis thaliana
aaggttttcccttctat

SEQ ID NO: 13149 - DNA, 17 bp, Arabidopsis thaliana
aaggttttccggactaa

SEQ ID NO: 13150 - DNA, 17 bp, Arabidopsis thaliana
aaggttttccggagact

SEQ ID NO: 13151 - DNA, 17 bp, Arabidopsis thaliana
aaggttttccggaggct

SEQ ID NO: 13152 - DNA, 17 bp, Arabidopsis thaliana
aaggttttctcgtaccg

SEQ ID NO: 13153 - DNA, 17 bp, Arabidopsis thaliana
aaggttttctttcatcg

SEQ ID NO: 13154 - DNA, 17 bp, Arabidopsis thaliana
aaggttttctttgatct

SEQ ID NO: 13155 - DNA, 17 bp, Arabidopsis thaliana
aaggttttgattttgtg

SEQ ID NO: 13156 - DNA, 17 bp, Arabidopsis thaliana
aaggttttggttatgac

SEQ ID NO: 13157 - DNA, 17 bp, Arabidopsis thaliana
aagtaaaccttatcttc

SEQ ID NO: 13158 - DNA, 17 bp, Arabidopsis thaliana
aagtaaagatctcggtc

SEQ ID NO: 13159 - DNA, 17 bp, Arabidopsis thaliana
aagtaacatcctgctaa

SEQ ID NO: 13160 - DNA, 17 bp, Arabidopsis thaliana
aagtaaccagatctggt

SEQ ID NO: 13161 - DNA, 17 bp, Arabidopsis thaliana
aagtaaccgaatatccg

SEQ ID NO: 13162 - DNA, 17 bp, Arabidopsis thaliana
aagtaaccgaatatcct

SEQ ID NO: 13163 - DNA, 17 bp, Arabidopsis thaliana
aagtaacgctatgccac

SEQ ID NO: 13164 - DNA, 17 bp, Arabidopsis thaliana
aagtaacgtcctaccaa

SEQ ID NO: 13165 - DNA, 17 bp, Arabidopsis thaliana
aagtaacgtcctaccag

SEQ ID NO: 13166 - DNA, 17 bp, Arabidopsis thaliana
aagtaacgtcctaccta

SEQ ID NO: 13167 - DNA, 17 bp, Arabidopsis thaliana
aagtaacgtcctgccaa

SEQ ID NO: 13168 - DNA, 17 bp, Arabidopsis thaliana
aagtaacgtcctgctaa

SEQ ID NO: 13169 - DNA, 17 bp, Arabidopsis thaliana
aagtaacgtcctgtcaa

SEQ ID NO: 13170 - DNA, 17 bp, Arabidopsis thaliana
aagtaacgtcttgctaa

SEQ ID NO: 13171 - DNA, 17 bp, Arabidopsis thaliana
aagtaacgttctgccaa

SEQ ID NO: 13172 - DNA, 17 bp, Arabidopsis thaliana
aagtaagaccatctcca

SEQ ID NO: 13173 - DNA, 17 bp, Arabidopsis thaliana
aagtaagtcttctcact

SEQ ID NO: 13174 - DNA, 17 bp, Arabidopsis thaliana
aagtaagtctttttgcc

SEQ ID NO: 13175 - DNA, 17 bp, Arabidopsis thaliana
aagtaatccagagcagt

SEQ ID NO: 13176 - DNA, 17 bp, Arabidopsis thaliana
aagtaatcccttagccg

SEQ ID NO: 13177 - DNA, 17 bp, Arabidopsis thaliana
aagtaatctcctacgtt

SEQ ID NO: 13178 - DNA, 17 bp, Arabidopsis thaliana
aagtaatgcatatctta

SEQ ID NO: 13179 - DNA, 17 bp, Arabidopsis thaliana
aagtaatgcccgctgcc

SEQ ID NO: 13180 - DNA, 17 bp, Arabidopsis thaliana
aagtaatgtcttgccaa

SEQ ID NO: 13181 - DNA, 17 bp, Arabidopsis thaliana
aagtaatgttgtggctg

SEQ ID NO: 13182 - DNA, 17 bp, Arabidopsis thaliana
aagtaatgttgtgggtg

SEQ ID NO: 13183 - DNA, 17 bp, Arabidopsis thaliana
aagtaattttgggtccg

SEQ ID NO: 13184 - DNA, 17 bp, Arabidopsis thaliana
aagtaattttttccgat

SEQ ID NO: 13185 - DNA, 17 bp, Arabidopsis thaliana
aagtaattttttccttt

SEQ ID NO: 13186 - DNA, 17 bp, Arabidopsis thaliana
aagtacaatcgggaatg

SEQ ID NO: 13187 - DNA, 17 bp, Arabidopsis thaliana
aagtacacgggacgaga

SEQ ID NO: 13188 - DNA, 17 bp, Arabidopsis thaliana
aagtacactgttccggt

SEQ ID NO: 13189 - DNA, 17 bp, Arabidopsis thaliana
aagtacatacgaaagtt

SEQ ID NO: 13190 - DNA, 17 bp, Arabidopsis thaliana
aagtacatcggttcctg

SEQ ID NO: 13191 - DNA, 17 bp, Arabidopsis thaliana
aagtaccaggattcgct

SEQ ID NO: 13192 - DNA, 17 bp, Arabidopsis thaliana
aagtacccattgccgcg

SEQ ID NO: 13193 - DNA, 17 bp, Arabidopsis thaliana
aagtaccgcaggttaaa

SEQ ID NO: 13194 - DNA, 17 bp, Arabidopsis thaliana
aagtaccgctacagcta

SEQ ID NO: 13195 - DNA, 17 bp, Arabidopsis thaliana
aagtaccttgttccgca

SEQ ID NO: 13196 - DNA, 17 bp, Arabidopsis thaliana
aagtacgacaaaaggcc

SEQ ID NO: 13197 - DNA, 17 bp, Arabidopsis thaliana
aagtacgcagatcgcct

SEQ ID NO: 13198 - DNA, 17 bp, Arabidopsis thaliana
aagtacgcttagccggt

SEQ ID NO: 13199 - DNA, 17 bp, Arabidopsis thaliana
aagtactacagagtgga

SEQ ID NO: 13200 - DNA, 17 bp, Arabidopsis thaliana
aagtactcaggccgtct

SEQ ID NO: 13201 - DNA, 17 bp, Arabidopsis thaliana
aagtactccacaagtgc

SEQ ID NO: 13202 - DNA, 17 bp, Arabidopsis thaliana
aagtacttcggtgcgtt

SEQ ID NO: 13203 - DNA, 17 bp, Arabidopsis thaliana
aagtacttgtcttgtgt

SEQ ID NO: 13204 - DNA, 17 bp, Arabidopsis thaliana
aagtactttcgggcatt

SEQ ID NO: 13205 - DNA, 17 bp, Arabidopsis thaliana
aagtactttgccgctgc

SEQ ID NO: 13206 - DNA, 17 bp, Arabidopsis thaliana
aagtactttgggcattt

SEQ ID NO: 13207 - DNA, 17 bp, Arabidopsis thaliana
aagtacttttccggcat

SEQ ID NO: 13208 - DNA, 17 bp, Arabidopsis thaliana
aagtacttttcgggcat

SEQ ID NO: 13209 - DNA, 17 bp, Arabidopsis thaliana
aagtactttttcgggca

SEQ ID NO: 13210 - DNA, 17 bp, Arabidopsis thaliana
aagtactttttcgggcc

SEQ ID NO: 13211 - DNA, 17 bp, Arabidopsis thaliana
aagtactttttcgggcg

SEQ ID NO: 13212 - DNA, 17 bp, Arabidopsis thaliana
aagtacttttttgggca

SEQ ID NO: 13213 - DNA, 17 bp, Arabidopsis thaliana
aagtagactcggaacaa

SEQ ID NO: 13214 - DNA, 17 bp, Arabidopsis thaliana
aagtagcaagcgatgag

SEQ ID NO: 13215 - DNA, 17 bp, Arabidopsis thaliana
aagtagcgacagtcgcc

SEQ ID NO: 13216 - DNA, 17 bp, Arabidopsis thaliana
aagtaggcccaatccga

SEQ ID NO: 13217 - DNA, 17 bp, Arabidopsis thaliana
aagtaggcctccgtctg

SEQ ID NO: 13218 - DNA, 17 bp, Arabidopsis thaliana
aagtaggcctctgtctg

SEQ ID NO: 13219 - DNA, 17 bp, Arabidopsis thaliana
aagtaggttcgattcct

SEQ ID NO: 13220 - DNA, 17 bp, Arabidopsis thaliana
aagtagtcacaggacta

SEQ ID NO: 13221 - DNA, 17 bp, Arabidopsis thaliana
aagtagtcacaggactc

SEQ ID NO: 13222 - DNA, 17 bp, Arabidopsis thaliana
aagtagtcactttccaa

SEQ ID NO: 13223 - DNA, 17 bp, Arabidopsis thaliana
aagtagtcgcatcctgt

SEQ ID NO: 13224 - DNA, 17 bp, Arabidopsis thaliana
aagtagttcctgaggtg

SEQ ID NO: 13225 - DNA, 17 bp, Arabidopsis thaliana
aagtagttcgccggtga

SEQ ID NO: 13226 - DNA, 17 bp, Arabidopsis thaliana
aagtagttgattccttt

SEQ ID NO: 13227 - DNA, 17 bp, Arabidopsis thaliana
aagtagttgcggctgcg

SEQ ID NO: 13228 - DNA, 17 bp, Arabidopsis thaliana
aagtatatcagtgtagg

SEQ ID NO: 13229 - DNA, 17 bp, Arabidopsis thaliana
aagtatcactcgaacca

SEQ ID NO: 13230 - DNA, 17 bp, Arabidopsis thaliana
aagtatcagcattctgg

SEQ ID NO: 13231 - DNA, 17 bp, Arabidopsis thaliana
aagtatcagcctgtgac

SEQ ID NO: 13232 - DNA, 17 bp, Arabidopsis thaliana
aagtatccaaaatccga

SEQ ID NO: 13233 - DNA, 17 bp, Arabidopsis thaliana
aagtatccacttttggt

SEQ ID NO: 13234 - DNA, 17 bp, Arabidopsis thaliana
aagtatccatcctgagt

SEQ ID NO: 13235 - DNA, 17 bp, Arabidopsis thaliana
aagtatcctatcggctg

SEQ ID NO: 13236 - DNA, 17 bp, Arabidopsis thaliana
aagtatcgatcaagcca

SEQ ID NO: 13237 - DNA, 17 bp, Arabidopsis thaliana
aagtatcgtcgtcctgt

SEQ ID NO: 13238 - DNA, 17 bp, Arabidopsis thaliana
aagtatcgtttggatct

SEQ ID NO: 13239 - DNA, 17 bp, Arabidopsis thaliana
aagtatctccaagcatt

SEQ ID NO: 13240 - DNA, 17 bp, Arabidopsis thaliana
aagtatgaacgaatgaa

SEQ ID NO: 13241 - DNA, 17 bp, Arabidopsis thaliana
aagtatgaccacaatcc

SEQ ID NO: 13242 - DNA, 17 bp, Arabidopsis thaliana
aagtatggatcggacta

SEQ ID NO: 13243 - DNA, 17 bp, Arabidopsis thaliana
aagtatggtgcgggaga

SEQ ID NO: 13244 - DNA, 17 bp, Arabidopsis thaliana
aagtatggtgcggggga

SEQ ID NO: 13245 - DNA, 17 bp, Arabidopsis thaliana
aagtatgtcttctcgtt

SEQ ID NO: 13246 - DNA, 17 bp, Arabidopsis thaliana
aagtatgtgttttgctg

SEQ ID NO: 13247 - DNA, 17 bp, Arabidopsis thaliana
aagtattaggccggacc

SEQ ID NO: 13248 - DNA, 17 bp, Arabidopsis thaliana
aagtattattgactcca

SEQ ID NO: 13249 - DNA, 17 bp, Arabidopsis thaliana
aagtattcattttggca

SEQ ID NO: 13250 - DNA, 17 bp, Arabidopsis thaliana
aagtattcccgcctgtc

SEQ ID NO: 13251 - DNA, 17 bp, Arabidopsis thaliana
aagtattccgtcgattt

SEQ ID NO: 13252 - DNA, 17 bp, Arabidopsis thaliana
aagtattctgctcacga

SEQ ID NO: 13253 - DNA, 17 bp, Arabidopsis thaliana
aagtattgggccgaacc

SEQ ID NO: 13254 - DNA, 17 bp, Arabidopsis thaliana
aagtattgggccggacc

SEQ ID NO: 13255 - DNA, 17 bp, Arabidopsis thaliana
aagtattgttttgcgac

SEQ ID NO: 13256 - DNA, 17 bp, Arabidopsis thaliana
aagtatttgcggttgcg

SEQ ID NO: 13257 - DNA, 17 bp, Arabidopsis thaliana
aagtatttgcggttgtt

SEQ ID NO: 13258 - DNA, 17 bp, Arabidopsis thaliana
aagtattttgaactcgg

SEQ ID NO: 13259 - DNA, 17 bp, Arabidopsis thaliana
aagtattttttcgggca

SEQ ID NO: 13260 - DNA, 17 bp, Arabidopsis thaliana
aagtcaaacatggctat

SEQ ID NO: 13261 - DNA, 17 bp, Arabidopsis thaliana
aagtcaaacgatcagat

SEQ ID NO: 13262 - DNA, 17 bp, Arabidopsis thaliana
aagtcaaattccaaagg

SEQ ID NO: 13263 - DNA, 17 bp, Arabidopsis thaliana
aagtcaaattgtccatt

SEQ ID NO: 13264 - DNA, 17 bp, Arabidopsis thaliana
aagtcaacacttctgga

SEQ ID NO: 13265 - DNA, 17 bp, Arabidopsis thaliana
aagtcaactcaaacttt

SEQ ID NO: 13266 - DNA, 17 bp, Arabidopsis thaliana
aagtcaagcaacacgag

SEQ ID NO: 13267 - DNA, 17 bp, Arabidopsis thaliana
aagtcaatccatgaatg

SEQ ID NO: 13268 - DNA, 17 bp, Arabidopsis thaliana
aagtcacgtcagcactc

SEQ ID NO: 13269 - DNA, 17 bp, Arabidopsis thaliana
aagtcacgtttcttctt

SEQ ID NO: 13270 - DNA, 17 bp, Arabidopsis thaliana
aagtcactaagtcaagc

SEQ ID NO: 13271 - DNA, 17 bp, Arabidopsis thaliana
aagtcactactcagaca

SEQ ID NO: 13272 - DNA, 17 bp, Arabidopsis thaliana
aagtcactatggccggt

SEQ ID NO: 13273 - DNA, 17 bp, Arabidopsis thaliana
aagtcactcagactgtt

SEQ ID NO: 13274 - DNA, 17 bp, Arabidopsis thaliana
aagtcagacggtccaga

SEQ ID NO: 13275 - DNA, 17 bp, Arabidopsis thaliana
aagtcagacttgccaca

SEQ ID NO: 13276 - DNA, 17 bp, Arabidopsis thaliana
aagtcagcacattttct

SEQ ID NO: 13277 - DNA, 17 bp, Arabidopsis thaliana
aagtcagccctttgtcg

SEQ ID NO: 13278 - DNA, 17 bp, Arabidopsis thaliana
aagtcagcgaattgtgc

SEQ ID NO: 13279 - DNA, 17 bp, Arabidopsis thaliana
aagtcaggatattgggc

SEQ ID NO: 13280 - DNA, 17 bp, Arabidopsis thaliana
aagtcaggcaaagtgat

SEQ ID NO: 13281 - DNA, 17 bp, Arabidopsis thaliana
aagtcaggtctttacaa

SEQ ID NO: 13282 - DNA, 17 bp, Arabidopsis thaliana
aagtcaggtgtgctgct

SEQ ID NO: 13283 - DNA, 17 bp, Arabidopsis thaliana
aagtcagtccatggttg

SEQ ID NO: 13284 - DNA, 17 bp, Arabidopsis thaliana
aagtcatacagtggagg

SEQ ID NO: 13285 - DNA, 17 bp, Arabidopsis thaliana
aagtcatcactttagca

SEQ ID NO: 13286 - DNA, 17 bp, Arabidopsis thaliana
aagtcatcagctggcgg

SEQ ID NO: 13287 - DNA, 17 bp, Arabidopsis thaliana
aagtcatcagctggctg

SEQ ID NO: 13288 - DNA, 17 bp, Arabidopsis thaliana
aagtcatcggctggcgg

SEQ ID NO: 13289 - DNA, 17 bp, Arabidopsis thaliana
aagtcatctcatgtgga

SEQ ID NO: 13290 - DNA, 17 bp, Arabidopsis thaliana
aagtcatctctaccgat

SEQ ID NO: 13291 - DNA, 17 bp, Arabidopsis thaliana
aagtcatcttcatgggt

SEQ ID NO: 13292 - DNA, 17 bp, Arabidopsis thaliana
aagtcatgcggtgttcg

SEQ ID NO: 13293 - DNA, 17 bp, Arabidopsis thaliana
aagtcatgcttcgatgt

SEQ ID NO: 13294 - DNA, 17 bp, Arabidopsis thaliana
aagtcatgtgccaatca

SEQ ID NO: 13295 - DNA, 17 bp, Arabidopsis thaliana
aagtcattcatgccatg

SEQ ID NO: 13296 - DNA, 17 bp, Arabidopsis thaliana
aagtcattcggattgtt

SEQ ID NO: 13297 - DNA, 17 bp, Arabidopsis thaliana
aagtcattctttgggct

SEQ ID NO: 13298 - DNA, 17 bp, Arabidopsis thaliana
aagtcattgaggccgtt

SEQ ID NO: 13299 - DNA, 17 bp, Arabidopsis thaliana
aagtccaaaagctcttt

SEQ ID NO: 13300 - DNA, 17 bp, Arabidopsis thaliana
aagtccaaactttttaa

SEQ ID NO: 13301 - DNA, 17 bp, Arabidopsis thaliana
aagtccaaactttttag

SEQ ID NO: 13302 - DNA, 17 bp, Arabidopsis thaliana
aagtccaaaggtcctac

SEQ ID NO: 13303 - DNA, 17 bp, Arabidopsis thaliana
aagtccaaatccgctaa

SEQ ID NO: 13304 - DNA, 17 bp, Arabidopsis thaliana
aagtccaagatgagagg

SEQ ID NO: 13305 - DNA, 17 bp, Arabidopsis thaliana
aagtccaatctgtcgga

SEQ ID NO: 13306 - DNA, 17 bp, Arabidopsis thaliana
aagtccacaaaaactga

SEQ ID NO: 13307 - DNA, 17 bp, Arabidopsis thaliana
aagtccaccattttccc

SEQ ID NO: 13308 - DNA, 17 bp, Arabidopsis thaliana
aagtccactctgtatca

SEQ ID NO: 13309 - DNA, 17 bp, Arabidopsis thaliana
aagtccagactaatcac

SEQ ID NO: 13310 - DNA, 17 bp, Arabidopsis thaliana
aagtccagactaatctc

SEQ ID NO: 13311 - DNA, 17 bp, Arabidopsis thaliana
aagtccagcgtcagcga

SEQ ID NO: 13312 - DNA, 17 bp, Arabidopsis thaliana
aagtccaggagggatag

SEQ ID NO: 13313 - DNA, 17 bp, Arabidopsis thaliana
aagtccaggtcgctgat

SEQ ID NO: 13314 - DNA, 17 bp, Arabidopsis thaliana
aagtccagtcgcatcct

SEQ ID NO: 13315 - DNA, 17 bp, Arabidopsis thaliana
aagtccatatgagtcgt

SEQ ID NO: 13316 - DNA, 17 bp, Arabidopsis thaliana
aagtccatatgagtctt

SEQ ID NO: 13317 - DNA, 17 bp, Arabidopsis thaliana
aagtccatcatcctcgg

SEQ ID NO: 13318 - DNA, 17 bp, Arabidopsis thaliana
aagtccatctgattcca

SEQ ID NO: 13319 - DNA, 17 bp, Arabidopsis thaliana
aagtccatggtcagccc

SEQ ID NO: 13320 - DNA, 17 bp, Arabidopsis thaliana
aagtccatggttatttt

SEQ ID NO: 13321 - DNA, 17 bp, Arabidopsis thaliana
aagtcccaacttgaaga

SEQ ID NO: 13322 - DNA, 17 bp, Arabidopsis thaliana
aagtcccatctccagga

SEQ ID NO: 13323 - DNA, 17 bp, Arabidopsis thaliana
aagtccccgtgttgcat

SEQ ID NO: 13324 - DNA, 17 bp, Arabidopsis thaliana
aagtccccttggcccaa

SEQ ID NO: 13325 - DNA, 17 bp, Arabidopsis thaliana
aagtccccttggcccac

SEQ ID NO: 13326 - DNA, 17 bp, Arabidopsis thaliana
aagtcccgcctctggaa

SEQ ID NO: 13327 - DNA, 17 bp, Arabidopsis thaliana
aagtcccgctgcaccat

SEQ ID NO: 13328 - DNA, 17 bp, Arabidopsis thaliana
aagtccctaccaccccc

SEQ ID NO: 13329 - DNA, 17 bp, Arabidopsis thaliana
aagtccctctatcccca

SEQ ID NO: 13330 - DNA, 17 bp, Arabidopsis thaliana
aagtccctgcttctgcc

SEQ ID NO: 13331 - DNA, 17 bp, Arabidopsis thaliana
aagtccgactaaaagct

SEQ ID NO: 13332 - DNA, 17 bp, Arabidopsis thaliana
aagtccgatcccagcag

SEQ ID NO: 13333 - DNA, 17 bp, Arabidopsis thaliana
aagtccgattggaccat

SEQ ID NO: 13334 - DNA, 17 bp, Arabidopsis thaliana
aagtccgcgcctttgtg

SEQ ID NO: 13335 - DNA, 17 bp, Arabidopsis thaliana
aagtccggatatgtaca

SEQ ID NO: 13336 - DNA, 17 bp, Arabidopsis thaliana
aagtccggtgccagcag

SEQ ID NO: 13337 - DNA, 17 bp, Arabidopsis thaliana
aagtccgtaatccccca

SEQ ID NO: 13338 - DNA, 17 bp, Arabidopsis thaliana
aagtccgtatgagtctt

SEQ ID NO: 13339 - DNA, 17 bp, Arabidopsis thaliana
aagtccgtcttcaaggt

SEQ ID NO: 13340 - DNA, 17 bp, Arabidopsis thaliana
aagtccgtgtacgtcat

SEQ ID NO: 13341 - DNA, 17 bp, Arabidopsis thaliana
aagtccgtgtgctatag

SEQ ID NO: 13342 - DNA, 17 bp, Arabidopsis thaliana
aagtccgttcggcggaa

SEQ ID NO: 13343 - DNA, 17 bp, Arabidopsis thaliana
aagtccgtttgagtctt

SEQ ID NO: 13344 - DNA, 17 bp, Arabidopsis thaliana
aagtcctaacaatcact

SEQ ID NO: 13345 - DNA, 17 bp, Arabidopsis thaliana
aagtcctagttcaggcc

SEQ ID NO: 13346 - DNA, 17 bp, Arabidopsis thaliana
aagtcctattggtgttg

SEQ ID NO: 13347 - DNA, 17 bp, Arabidopsis thaliana
aagtcctccctgtgctg

SEQ ID NO: 13348 - DNA, 17 bp, Arabidopsis thaliana
aagtcctcgtgttgcat

SEQ ID NO: 13349 - DNA, 17 bp, Arabidopsis thaliana
aagtcctcgttttgcat

SEQ ID NO: 13350 - DNA, 17 bp, Arabidopsis thaliana
aagtcctctgtgcttgc

SEQ ID NO: 13351 - DNA, 17 bp, Arabidopsis thaliana
aagtcctcttctccacg

SEQ ID NO: 13352 - DNA, 17 bp, Arabidopsis thaliana
aagtcctgatatctcca

SEQ ID NO: 13353 - DNA, 17 bp, Arabidopsis thaliana
aagtcctgccagcataa

SEQ ID NO: 13354 - DNA, 17 bp, Arabidopsis thaliana
aagtcctgtgggctgtt

SEQ ID NO: 13355 - DNA, 17 bp, Arabidopsis thaliana
aagtccttggatggtgc

SEQ ID NO: 13356 - DNA, 17 bp, Arabidopsis thaliana
aagtcctttggcccaat

SEQ ID NO: 13357 - DNA, 17 bp, Arabidopsis thaliana
aagtcgcaggcatgaga

SEQ ID NO: 13358 - DNA, 17 bp, Arabidopsis thaliana
aagtcgcatcctgtaga

SEQ ID NO: 13359 - DNA, 17 bp, Arabidopsis thaliana
aagtcgcattctgtagg

SEQ ID NO: 13360 - DNA, 17 bp, Arabidopsis thaliana
aagtcgccggttcaaat

SEQ ID NO: 13361 - DNA, 17 bp, Arabidopsis thaliana
aagtcgcgacacctagg

SEQ ID NO: 13362 - DNA, 17 bp, Arabidopsis thaliana
aagtcgcggtcagattt

SEQ ID NO: 13363 - DNA, 17 bp, Arabidopsis thaliana
aagtcgctccaaccggg

SEQ ID NO: 13364 - DNA, 17 bp, Arabidopsis thaliana
aagtcgctcgcggcgaa

SEQ ID NO: 13365 - DNA, 17 bp, Arabidopsis thaliana
aagtcggacacaccgta

SEQ ID NO: 13366 - DNA, 17 bp, Arabidopsis thaliana
aagtcggcaaaatggat

SEQ ID NO: 13367 - DNA, 17 bp, Arabidopsis thaliana
aagtcggcgtttccttt

SEQ ID NO: 13368 - DNA, 17 bp, Arabidopsis thaliana
aagtcggcttgtccctt

SEQ ID NO: 13369 - DNA, 17 bp, Arabidopsis thaliana
aagtcgggcacctggcc

SEQ ID NO: 13370 - DNA, 17 bp, Arabidopsis thaliana
aagtcggtcctgggcag

SEQ ID NO: 13371 - DNA, 17 bp, Arabidopsis thaliana
aagtcggtggatgagca

SEQ ID NO: 13372 - DNA, 17 bp, Arabidopsis thaliana
aagtcggttccagagta

SEQ ID NO: 13373 - DNA, 17 bp, Arabidopsis thaliana
aagtcggttcctaatta

SEQ ID NO: 13374 - DNA, 17 bp, Arabidopsis thaliana
aagtcgtcgaactgtaa

SEQ ID NO: 13375 - DNA, 17 bp, Arabidopsis thaliana
aagtcgtcgcaaaagag

SEQ ID NO: 13376 - DNA, 17 bp, Arabidopsis thaliana
aagtcgtcggtttggtc

SEQ ID NO: 13377 - DNA, 17 bp, Arabidopsis thaliana
aagtcgtcgtgaagttc

SEQ ID NO: 13378 - DNA, 17 bp, Arabidopsis thaliana
aagtcgtctgcaaagga

SEQ ID NO: 13379 - DNA, 17 bp, Arabidopsis thaliana
aagtcgtctggccaaac

SEQ ID NO: 13380 - DNA, 17 bp, Arabidopsis thaliana
aagtcgtgttttaagca

SEQ ID NO: 13381 - DNA, 17 bp, Arabidopsis thaliana
aagtcgttcctcgacag

SEQ ID NO: 13382 - DNA, 17 bp, Arabidopsis thaliana
aagtctaacatacagat

SEQ ID NO: 13383 - DNA, 17 bp, Arabidopsis thaliana
aagtctaagtggtttgg

SEQ ID NO: 13384 - DNA, 17 bp, Arabidopsis thaliana
aagtctaatgttccagt

SEQ ID NO: 13385 - DNA, 17 bp, Arabidopsis thaliana
aagtctacaaggtgtca

SEQ ID NO: 13386 - DNA, 17 bp, Arabidopsis thaliana
aagtctacaagtttgtg

SEQ ID NO: 13387 - DNA, 17 bp, Arabidopsis thaliana
aagtctacgctggattt

SEQ ID NO: 13388 - DNA, 17 bp, Arabidopsis thaliana
aagtctactgcagagtc

SEQ ID NO: 13389 - DNA, 17 bp, Arabidopsis thaliana
aagtctactttgtctgg

SEQ ID NO: 13390 - DNA, 17 bp, Arabidopsis thaliana
aagtctatcagttgtgc

SEQ ID NO: 13391 - DNA, 17 bp, Arabidopsis thaliana
aagtctatccatgtggc

SEQ ID NO: 13392 - DNA, 17 bp, Arabidopsis thaliana
aagtctatcggtttgcc

SEQ ID NO: 13393 - DNA, 17 bp, Arabidopsis thaliana
aagtctatctacttccg

SEQ ID NO: 13394 - DNA, 17 bp, Arabidopsis thaliana
aagtctatttggttctt

SEQ ID NO: 13395 - DNA, 17 bp, Arabidopsis thaliana
aagtctcactcaggcta

SEQ ID NO: 13396 - DNA, 17 bp, Arabidopsis thaliana
aagtctcagagcgtttt

SEQ ID NO: 13397 - DNA, 17 bp, Arabidopsis thaliana
aagtctcatcaagttta

SEQ ID NO: 13398 - DNA, 17 bp, Arabidopsis thaliana
aagtctcatcgatggtc

SEQ ID NO: 13399 - DNA, 17 bp, Arabidopsis thaliana
aagtctccacctagtcc

SEQ ID NO: 13400 - DNA, 17 bp, Arabidopsis thaliana
aagtctcctcgacaatg

SEQ ID NO: 13401 - DNA, 17 bp, Arabidopsis thaliana
aagtctcctcggacgga

SEQ ID NO: 13402 - DNA, 17 bp, Arabidopsis thaliana
aagtctcgactccagga

SEQ ID NO: 13403 - DNA, 17 bp, Arabidopsis thaliana
aagtctcgagatccttg

SEQ ID NO: 13404 - DNA, 17 bp, Arabidopsis thaliana
aagtctcgatctgtcac

SEQ ID NO: 13405 - DNA, 17 bp, Arabidopsis thaliana
aagtctcggacccggtc

SEQ ID NO: 13406 - DNA, 17 bp, Arabidopsis thaliana
aagtctcggagaactgc

SEQ ID NO: 13407 - DNA, 17 bp, Arabidopsis thaliana
aagtctcgtcaggaaaa

SEQ ID NO: 13408 - DNA, 17 bp, Arabidopsis thaliana
aagtctctcttctgctg

SEQ ID NO: 13409 - DNA, 17 bp, Arabidopsis thaliana
aagtctctgcttctgcc

SEQ ID NO: 13410 - DNA, 17 bp, Arabidopsis thaliana
aagtctcttcgcaagtg

SEQ ID NO: 13411 - DNA, 17 bp, Arabidopsis thaliana
aagtctgaaggccctaa

SEQ ID NO: 13412 - DNA, 17 bp, Arabidopsis thaliana
aagtctgaatcggtgtt

SEQ ID NO: 13413 - DNA, 17 bp, Arabidopsis thaliana
aagtctgactccggtgt

SEQ ID NO: 13414 - DNA, 17 bp, Arabidopsis thaliana
aagtctgagataagagt

SEQ ID NO: 13415 - DNA, 17 bp, Arabidopsis thaliana
aagtctgaggaatctgt

SEQ ID NO: 13416 - DNA, 17 bp, Arabidopsis thaliana
aagtctgatcggagcag

SEQ ID NO: 13417 - DNA, 17 bp, Arabidopsis thaliana
aagtctgatcttaggtt

SEQ ID NO: 13418 - DNA, 17 bp, Arabidopsis thaliana
aagtctgattcagtgga

SEQ ID NO: 13419 - DNA, 17 bp, Arabidopsis thaliana
aagtctgattcagtggg

SEQ ID NO: 13420 - DNA, 17 bp, Arabidopsis thaliana
aagtctgattttgcggc

SEQ ID NO: 13421 - DNA, 17 bp, Arabidopsis thaliana
aagtctgcacgtgtggc

SEQ ID NO: 13422 - DNA, 17 bp, Arabidopsis thaliana
aagtctgcagccgtttg

SEQ ID NO: 13423 - DNA, 17 bp, Arabidopsis thaliana
aagtctgcatatgtgac

SEQ ID NO: 13424 - DNA, 17 bp, Arabidopsis thaliana
aagtctgcatcggacta

SEQ ID NO: 13425 - DNA, 17 bp, Arabidopsis thaliana
aagtctgccaaatcttc

SEQ ID NO: 13426 - DNA, 17 bp, Arabidopsis thaliana
aagtctgcgcctttgtg

SEQ ID NO: 13427 - DNA, 17 bp, Arabidopsis thaliana
aagtctgctttgaccca

SEQ ID NO: 13428 - DNA, 17 bp, Arabidopsis thaliana
aagtctggactacgacg

SEQ ID NO: 13429 - DNA, 17 bp, Arabidopsis thaliana
aagtctggatttgtgat

SEQ ID NO: 13430 - DNA, 17 bp, Arabidopsis thaliana
aagtctggccatgctag

SEQ ID NO: 13431 - DNA, 17 bp, Arabidopsis thaliana
aagtctggtgaaactga

SEQ ID NO: 13432 - DNA, 17 bp, Arabidopsis thaliana
aagtctggtgccagcag

SEQ ID NO: 13433 - DNA, 17 bp, Arabidopsis thaliana
aagtctggttccagcag

SEQ ID NO: 13434 - DNA, 17 bp, Arabidopsis thaliana
aagtctgtaagttggtt

SEQ ID NO: 13435 - DNA, 17 bp, Arabidopsis thaliana
aagtctgtagcagtttg

SEQ ID NO: 13436 - DNA, 17 bp, Arabidopsis thaliana
aagtctgtaggtttgcc

SEQ ID NO: 13437 - DNA, 17 bp, Arabidopsis thaliana
aagtctgtagtccaacg

SEQ ID NO: 13438 - DNA, 17 bp, Arabidopsis thaliana
aagtctgtatgagtgtt

SEQ ID NO: 13439 - DNA, 17 bp, Arabidopsis thaliana
aagtctgtcagttgagc

SEQ ID NO: 13440 - DNA, 17 bp, Arabidopsis thaliana
aagtctgtcagttgatc

SEQ ID NO: 13441 - DNA, 17 bp, Arabidopsis thaliana
aagtctgtcagttgcgc

SEQ ID NO: 13442 - DNA, 17 bp, Arabidopsis thaliana
aagtctgtcagttggat

SEQ ID NO: 13443 - DNA, 17 bp, Arabidopsis thaliana
aagtctgtcagttgggc

SEQ ID NO: 13444 - DNA, 17 bp, Arabidopsis thaliana
aagtctgtcagttgggt

SEQ ID NO: 13445 - DNA, 17 bp, Arabidopsis thaliana
aagtctgtcagttggtc

SEQ ID NO: 13446 - DNA, 17 bp, Arabidopsis thaliana
aagtctgtcagttggtt

SEQ ID NO: 13447 - DNA, 17 bp, Arabidopsis thaliana
aagtctgtcgatcagac

SEQ ID NO: 13448 - DNA, 17 bp, Arabidopsis thaliana
aagtctgtggtccagtc

SEQ ID NO: 13449 - DNA, 17 bp, Arabidopsis thaliana
aagtctgtggtccattt

SEQ ID NO: 13450 - DNA, 17 bp, Arabidopsis thaliana
aagtctgttagttgggg

SEQ ID NO: 13451 - DNA, 17 bp, Arabidopsis thaliana
aagtctgttgtgattcg

SEQ ID NO: 13452 - DNA, 17 bp, Arabidopsis thaliana
aagtcttaagcgcttta

SEQ ID NO: 13453 - DNA, 17 bp, Arabidopsis thaliana
aagtcttaagtctctgc

SEQ ID NO: 13454 - DNA, 17 bp, Arabidopsis thaliana
aagtcttacaaagagtt

SEQ ID NO: 13455 - DNA, 17 bp, Arabidopsis thaliana
aagtcttaggctgtgaa

SEQ ID NO: 13456 - DNA, 17 bp, Arabidopsis thaliana
aagtcttatgagtgtga

SEQ ID NO: 13457 - DNA, 17 bp, Arabidopsis thaliana
aagtcttcaggcgagct

SEQ ID NO: 13458 - DNA, 17 bp, Arabidopsis thaliana
aagtcttcagtggatgt

SEQ ID NO: 13459 - DNA, 17 bp, Arabidopsis thaliana
aagtcttcgatagggtt

SEQ ID NO: 13460 - DNA, 17 bp, Arabidopsis thaliana
aagtcttcggatctgga

SEQ ID NO: 13461 - DNA, 17 bp, Arabidopsis thaliana
aagtcttctcacttgga

SEQ ID NO: 13462 - DNA, 17 bp, Arabidopsis thaliana
aagtcttgatgaaccgg

SEQ ID NO: 13463 - DNA, 17 bp, Arabidopsis thaliana
aagtcttgatgaaccgt

SEQ ID NO: 13464 - DNA, 17 bp, Arabidopsis thaliana
aagtcttgatgaacctt

SEQ ID NO: 13465 - DNA, 17 bp, Arabidopsis thaliana
aagtcttgcggtgttcg

SEQ ID NO: 13466 - DNA, 17 bp, Arabidopsis thaliana
aagtcttggcttagcat

SEQ ID NO: 13467 - DNA, 17 bp, Arabidopsis thaliana
aagtcttgtggagcagt

SEQ ID NO: 13468 - DNA, 17 bp, Arabidopsis thaliana
aagtcttgttcttcatc

SEQ ID NO: 13469 - DNA, 17 bp, Arabidopsis thaliana
aagtctttacactgctg

SEQ ID NO: 13470 - DNA, 17 bp, Arabidopsis thaliana
aagtctttcactgtgac

SEQ ID NO: 13471 - DNA, 17 bp, Arabidopsis thaliana
aagtctttcactgtgag

SEQ ID NO: 13472 - DNA, 17 bp, Arabidopsis thaliana
aagtctttgattttgta

SEQ ID NO: 13473 - DNA, 17 bp, Arabidopsis thaliana
aagtctttgatttttta

SEQ ID NO: 13474 - DNA, 17 bp, Arabidopsis thaliana
aagtctttgtctcgggt

SEQ ID NO: 13475 - DNA, 17 bp, Arabidopsis thaliana
aagtctttgtggaagcc

SEQ ID NO: 13476 - DNA, 17 bp, Arabidopsis thaliana
aagtcttttggttggac

SEQ ID NO: 13477 - DNA, 17 bp, Arabidopsis thaliana
aagtgaaacatttgctg

SEQ ID NO: 13478 - DNA, 17 bp, Arabidopsis thaliana
aagtgaactcctttctg

SEQ ID NO: 13479 - DNA, 17 bp, Arabidopsis thaliana
aagtgaagttttatcaa

SEQ ID NO: 13480 - DNA, 17 bp, Arabidopsis thaliana
aagtgaatcaacatttt

SEQ ID NO: 13481 - DNA, 17 bp, Arabidopsis thaliana
aagtgaatgaagagaac

SEQ ID NO: 13482 - DNA, 17 bp, Arabidopsis thaliana
aagtgaatgtctttggt

SEQ ID NO: 13483 - DNA, 17 bp, Arabidopsis thaliana
aagtgaatgtgacacgt

SEQ ID NO: 13484 - DNA, 17 bp, Arabidopsis thaliana
aagtgacaatgaagggt

SEQ ID NO: 13485 - DNA, 17 bp, Arabidopsis thaliana
aagtgacaggtcgagtg

SEQ ID NO: 13486 - DNA, 17 bp, Arabidopsis thaliana
aagtgacatgaagcggt

SEQ ID NO: 13487 - DNA, 17 bp, Arabidopsis thaliana
aagtgacatgatgtggt

SEQ ID NO: 13488 - DNA, 17 bp, Arabidopsis thaliana
aagtgaccagatcccat

SEQ ID NO: 13489 - DNA, 17 bp, Arabidopsis thaliana
aagtgaccattggagca

SEQ ID NO: 13490 - DNA, 17 bp, Arabidopsis thaliana
aagtgaccgctggtttt

SEQ ID NO: 13491 - DNA, 17 bp, Arabidopsis thaliana
aagtgaccgggcggcaa

SEQ ID NO: 13492 - DNA, 17 bp, Arabidopsis thaliana
aagtgacgcttcggtct

SEQ ID NO: 13493 - DNA, 17 bp, Arabidopsis thaliana
aagtgacgggatccaaa

SEQ ID NO: 13494 - DNA, 17 bp, Arabidopsis thaliana
aagtgactcttgcttgg

SEQ ID NO: 13495 - DNA, 17 bp, Arabidopsis thaliana
aagtgactgtgttgcca

SEQ ID NO: 13496 - DNA, 17 bp, Arabidopsis thaliana
aagtgagatgtggtttt

SEQ ID NO: 13497 - DNA, 17 bp, Arabidopsis thaliana
aagtgagcgctcattag

SEQ ID NO: 13498 - DNA, 17 bp, Arabidopsis thaliana
aagtgagcgggcgatct

SEQ ID NO: 13499 - DNA, 17 bp, Arabidopsis thaliana
aagtgagctggcccaac

SEQ ID NO: 13500 - DNA, 17 bp, Arabidopsis thaliana
aagtgagcttgactcta

SEQ ID NO: 13501 - DNA, 17 bp, Arabidopsis thaliana
aagtgagctttggctag

SEQ ID NO: 13502 - DNA, 17 bp, Arabidopsis thaliana
aagtgaggatgaggact

SEQ ID NO: 13503 - DNA, 17 bp, Arabidopsis thaliana
aagtgataagactgata

SEQ ID NO: 13504 - DNA, 17 bp, Arabidopsis thaliana
aagtgatatgaagcagt

SEQ ID NO: 13505 - DNA, 17 bp, Arabidopsis thaliana
aagtgatatgatgtggt

SEQ ID NO: 13506 - DNA, 17 bp, Arabidopsis thaliana
aagtgatatgccgtttt

SEQ ID NO: 13507 - DNA, 17 bp, Arabidopsis thaliana
aagtgatcaacgggtgt

SEQ ID NO: 13508 - DNA, 17 bp, Arabidopsis thaliana
aagtgatcaagtgctgg

SEQ ID NO: 13509 - DNA, 17 bp, Arabidopsis thaliana
aagtgatcaagtggaag

SEQ ID NO: 13510 - DNA, 17 bp, Arabidopsis thaliana
aagtgatcgggccgagt

SEQ ID NO: 13511 - DNA, 17 bp, Arabidopsis thaliana
aagtgatcgggccgcgg

SEQ ID NO: 13512 - DNA, 17 bp, Arabidopsis thaliana
aagtgatcgggcggcat

SEQ ID NO: 13513 - DNA, 17 bp, Arabidopsis thaliana
aagtgatctaccttcaa

SEQ ID NO: 13514 - DNA, 17 bp, Arabidopsis thaliana
aagtgatctcagcataa

SEQ ID NO: 13515 - DNA, 17 bp, Arabidopsis thaliana
aagtgatctctctctag

SEQ ID NO: 13516 - DNA, 17 bp, Arabidopsis thaliana
aagtgatctgattagtt

SEQ ID NO: 13517 - DNA, 17 bp, Arabidopsis thaliana
aagtgatcttcattgtt

SEQ ID NO: 13518 - DNA, 17 bp, Arabidopsis thaliana
aagtgatgacgccattg

SEQ ID NO: 13519 - DNA, 17 bp, Arabidopsis thaliana
aagtgatgatgagtgtc

SEQ ID NO: 13520 - DNA, 17 bp, Arabidopsis thaliana
aagtgatgattcttcgt

SEQ ID NO: 13521 - DNA, 17 bp, Arabidopsis thaliana
aagtgatgccgccattg

SEQ ID NO: 13522 - DNA, 17 bp, Arabidopsis thaliana
aagtgatggctgagtta

SEQ ID NO: 13523 - DNA, 17 bp, Arabidopsis thaliana
aagtgatgggattgcct

SEQ ID NO: 13524 - DNA, 17 bp, Arabidopsis thaliana
aagtgatgggccaagtt

SEQ ID NO: 13525 - DNA, 17 bp, Arabidopsis thaliana
aagtgatggggatagat

SEQ ID NO: 13526 - DNA, 17 bp, Arabidopsis thaliana
aagtgatgtcggtgaga

SEQ ID NO: 13527 - DNA, 17 bp, Arabidopsis thaliana
aagtgatgtgatacggt

SEQ ID NO: 13528 - DNA, 17 bp, Arabidopsis thaliana
aagtgatgtgattcggc

SEQ ID NO: 13529 - DNA, 17 bp, Arabidopsis thaliana
aagtgattattgtcgga

SEQ ID NO: 13530 - DNA, 17 bp, Arabidopsis thaliana
aagtgattcaagtatca

SEQ ID NO: 13531 - DNA, 17 bp, Arabidopsis thaliana
aagtgattcaccgaagc

SEQ ID NO: 13532 - DNA, 17 bp, Arabidopsis thaliana
aagtgattcagttgccg

SEQ ID NO: 13533 - DNA, 17 bp, Arabidopsis thaliana
aagtgattcccagacat

SEQ ID NO: 13534 - DNA, 17 bp, Arabidopsis thaliana
aagtgattccgagtttc

SEQ ID NO: 13535 - DNA, 17 bp, Arabidopsis thaliana
aagtgattctgatcaac

SEQ ID NO: 13536 - DNA, 17 bp, Arabidopsis thaliana
aagtgattcttggcaag

SEQ ID NO: 13537 - DNA, 17 bp, Arabidopsis thaliana
aagtgattgtatccgtt

SEQ ID NO: 13538 - DNA, 17 bp, Arabidopsis thaliana
aagtgattgttgtgcgc

SEQ ID NO: 13539 - DNA, 17 bp, Arabidopsis thaliana
aagtgatttgcgcgagt

SEQ ID NO: 13540 - DNA, 17 bp, Arabidopsis thaliana
aagtgatttggctacag

SEQ ID NO: 13541 - DNA, 17 bp, Arabidopsis thaliana
aagtgcaggttccggac

SEQ ID NO: 13542 - DNA, 17 bp, Arabidopsis thaliana
aagtgcagttttgcggc

SEQ ID NO: 13543 - DNA, 17 bp, Arabidopsis thaliana
aagtgccagcattttat

SEQ ID NO: 13544 - DNA, 17 bp, Arabidopsis thaliana
aagtgccagcgcaacag

SEQ ID NO: 13545 - DNA, 17 bp, Arabidopsis thaliana
aagtgcccttgaatgtc

SEQ ID NO: 13546 - DNA, 17 bp, Arabidopsis thaliana
aagtgccgcttcagggt

SEQ ID NO: 13547 - DNA, 17 bp, Arabidopsis thaliana
aagtgccgcttcggggt

SEQ ID NO: 13548 - DNA, 17 bp, Arabidopsis thaliana
aagtgccgggcctttgt

SEQ ID NO: 13549 - DNA, 17 bp, Arabidopsis thaliana
aagtgccgtctgagctc

SEQ ID NO: 13550 - DNA, 17 bp, Arabidopsis thaliana
aagtgcctaaactcttg

SEQ ID NO: 13551 - DNA, 17 bp, Arabidopsis thaliana
aagtgcctcttcgggtt

SEQ ID NO: 13552 - DNA, 17 bp, Arabidopsis thaliana
aagtgcctgagagttgt

SEQ ID NO: 13553 - DNA, 17 bp, Arabidopsis thaliana
aagtgcctgttcgtctc

SEQ ID NO: 13554 - DNA, 17 bp, Arabidopsis thaliana
aagtgccttctcctttg

SEQ ID NO: 13555 - DNA, 17 bp, Arabidopsis thaliana
aagtgcgaatatcaccg

SEQ ID NO: 13556 - DNA, 17 bp, Arabidopsis thaliana
aagtgcgacaagtctca

SEQ ID NO: 13557 - DNA, 17 bp, Arabidopsis thaliana
aagtgcgatccaaaacc

SEQ ID NO: 13558 - DNA, 17 bp, Arabidopsis thaliana
aagtgcgatcgagtgga

SEQ ID NO: 13559 - DNA, 17 bp, Arabidopsis thaliana
aagtgcgattagtgcgg

SEQ ID NO: 13560 - DNA, 17 bp, Arabidopsis thaliana
aagtgcgattgaatggt

SEQ ID NO: 13561 - DNA, 17 bp, Arabidopsis thaliana
aagtgcgcgtgggttcg

SEQ ID NO: 13562 - DNA, 17 bp, Arabidopsis thaliana
aagtgcgcttacaatta

SEQ ID NO: 13563 - DNA, 17 bp, Arabidopsis thaliana
aagtgcggacgggataa

SEQ ID NO: 13564 - DNA, 17 bp, Arabidopsis thaliana
aagtgcggccttcgtct

SEQ ID NO: 13565 - DNA, 17 bp, Arabidopsis thaliana
aagtgcggtgcgattta

SEQ ID NO: 13566 - DNA, 17 bp, Arabidopsis thaliana
aagtgcggtgcggttca

SEQ ID NO: 13567 - DNA, 17 bp, Arabidopsis thaliana
aagtgcggtgcggtttt

SEQ ID NO: 13568 - DNA, 17 bp, Arabidopsis thaliana
aagtgcggtggcggtta

SEQ ID NO: 13569 - DNA, 17 bp, Arabidopsis thaliana
aagtgcggttgctaagt

SEQ ID NO: 13570 - DNA, 17 bp, Arabidopsis thaliana
aagtgcggttttgggtg

SEQ ID NO: 13571 - DNA, 17 bp, Arabidopsis thaliana
aagtgcggttttggtca

SEQ ID NO: 13572 - DNA, 17 bp, Arabidopsis thaliana
aagtgcggttttggtta

SEQ ID NO: 13573 - DNA, 17 bp, Arabidopsis thaliana
aagtgcgtaacaacgaa

SEQ ID NO: 13574 - DNA, 17 bp, Arabidopsis thaliana
aagtgcgtaacaactat

SEQ ID NO: 13575 - DNA, 17 bp, Arabidopsis thaliana
aagtgctacttcttggt

SEQ ID NO: 13576 - DNA, 17 bp, Arabidopsis thaliana
aagtgctacttggatag

SEQ ID NO: 13577 - DNA, 17 bp, Arabidopsis thaliana
aagtgctatagccgact

SEQ ID NO: 13578 - DNA, 17 bp, Arabidopsis thaliana
aagtgctcacatctgcg

SEQ ID NO: 13579 - DNA, 17 bp, Arabidopsis thaliana
aagtgctccaacatcga

SEQ ID NO: 13580 - DNA, 17 bp, Arabidopsis thaliana
aagtgctctcaattgtg

SEQ ID NO: 13581 - DNA, 17 bp, Arabidopsis thaliana
aagtgctcttagctgag

SEQ ID NO: 13582 - DNA, 17 bp, Arabidopsis thaliana
aagtgctctttttcaaa

SEQ ID NO: 13583 - DNA, 17 bp, Arabidopsis thaliana
aagtgctgaaacacctg

SEQ ID NO: 13584 - DNA, 17 bp, Arabidopsis thaliana
aagtgctgagttttgat

SEQ ID NO: 13585 - DNA, 17 bp, Arabidopsis thaliana
aagtgctgcagaatggg

SEQ ID NO: 13586 - DNA, 17 bp, Arabidopsis thaliana
aagtgctgtgtgatttg

SEQ ID NO: 13587 - DNA, 17 bp, Arabidopsis thaliana
aagtgcttcatccgtga

SEQ ID NO: 13588 - DNA, 17 bp, Arabidopsis thaliana
aagtgcttggccgccca

SEQ ID NO: 13589 - DNA, 17 bp, Arabidopsis thaliana
aagtgcttttccactac

SEQ ID NO: 13590 - DNA, 17 bp, Arabidopsis thaliana
aagtggaaccgcttgat

SEQ ID NO: 13591 - DNA, 17 bp, Arabidopsis thaliana
aagtggacctaggactt

SEQ ID NO: 13592 - DNA, 17 bp, Arabidopsis thaliana
aagtggactctagatcg

SEQ ID NO: 13593 - DNA, 17 bp, Arabidopsis thaliana
aagtggactggtccagc

SEQ ID NO: 13594 - DNA, 17 bp, Arabidopsis thaliana
aagtggacttctccccg

SEQ ID NO: 13595 - DNA, 17 bp, Arabidopsis thaliana
aagtggagcgatggttc

SEQ ID NO: 13596 - DNA, 17 bp, Arabidopsis thaliana
aagtggaggtccgaacc

SEQ ID NO: 13597 - DNA, 17 bp, Arabidopsis thaliana
aagtggatgattggttg

SEQ ID NO: 13598 - DNA, 17 bp, Arabidopsis thaliana
aagtggcagagtggccg

SEQ ID NO: 13599 - DNA, 17 bp, Arabidopsis thaliana
aagtggcagagtggcct

SEQ ID NO: 13600 - DNA, 17 bp, Arabidopsis thaliana
aagtggccaagcccgcg

SEQ ID NO: 13601 - DNA, 17 bp, Arabidopsis thaliana
aagtggccatagttgtg

SEQ ID NO: 13602 - DNA, 17 bp, Arabidopsis thaliana
aagtggccgctactccc

SEQ ID NO: 13603 - DNA, 17 bp, Arabidopsis thaliana
aagtggccttcaaattt

SEQ ID NO: 13604 - DNA, 17 bp, Arabidopsis thaliana
aagtggcggacacctta

SEQ ID NO: 13605 - DNA, 17 bp, Arabidopsis thaliana
aagtggcggcgctatac

SEQ ID NO: 13606 - DNA, 17 bp, Arabidopsis thaliana
aagtgggacccggtgca

SEQ ID NO: 13607 - DNA, 17 bp, Arabidopsis thaliana
aagtgggacccggtgcc

SEQ ID NO: 13608 - DNA, 17 bp, Arabidopsis thaliana
aagtgggactcggtgca

SEQ ID NO: 13609 - DNA, 17 bp, Arabidopsis thaliana
aagtgggatcatattgc

SEQ ID NO: 13610 - DNA, 17 bp, Arabidopsis thaliana
aagtgggatgggtcggc

SEQ ID NO: 13611 - DNA, 17 bp, Arabidopsis thaliana
aagtgggcagggccttt

SEQ ID NO: 13612 - DNA, 17 bp, Arabidopsis thaliana
aagtgggcatatgacca

SEQ ID NO: 13613 - DNA, 17 bp, Arabidopsis thaliana
aagtgggccattctctg

SEQ ID NO: 13614 - DNA, 17 bp, Arabidopsis thaliana
aagtgggcctaatctga

SEQ ID NO: 13615 - DNA, 17 bp, Arabidopsis thaliana
aagtgggccttcaccgg

SEQ ID NO: 13616 - DNA, 17 bp, Arabidopsis thaliana
aagtgggctggcccaac

SEQ ID NO: 13617 - DNA, 17 bp, Arabidopsis thaliana
aagtgggctgggccttt

SEQ ID NO: 13618 - DNA, 17 bp, Arabidopsis thaliana
aagtgggttgcctttag

SEQ ID NO: 13619 - DNA, 17 bp, Arabidopsis thaliana
aagtgggttttgaagtc

SEQ ID NO: 13620 - DNA, 17 bp, Arabidopsis thaliana
aagtggtcaccaatcgg

SEQ ID NO: 13621 - DNA, 17 bp, Arabidopsis thaliana
aagtggtcgccctctgt

SEQ ID NO: 13622 - DNA, 17 bp, Arabidopsis thaliana
aagtggtcgtgatctac

SEQ ID NO: 13623 - DNA, 17 bp, Arabidopsis thaliana
aagtggtgcgttgagta

SEQ ID NO: 13624 - DNA, 17 bp, Arabidopsis thaliana
aagtggtgttcaacggt

SEQ ID NO: 13625 - DNA, 17 bp, Arabidopsis thaliana
aagtggttaacggtcca

SEQ ID NO: 13626 - DNA, 17 bp, Arabidopsis thaliana
aagtggttcagctcagc

SEQ ID NO: 13627 - DNA, 17 bp, Arabidopsis thaliana
aagtggttcctagaaag

SEQ ID NO: 13628 - DNA, 17 bp, Arabidopsis thaliana
aagtggttctcaccggg

SEQ ID NO: 13629 - DNA, 17 bp, Arabidopsis thaliana
aagtggttgtgataatg

SEQ ID NO: 13630 - DNA, 17 bp, Arabidopsis thaliana
aagtggtttctaatgca

SEQ ID NO: 13631 - DNA, 17 bp, Arabidopsis thaliana
aagtggttttttcagaa

SEQ ID NO: 13632 - DNA, 17 bp, Arabidopsis thaliana
aagtgtaaccgtagtat

SEQ ID NO: 13633 - DNA, 17 bp, Arabidopsis thaliana
aagtgtacggaatgttt

SEQ ID NO: 13634 - DNA, 17 bp, Arabidopsis thaliana
aagtgtatgattggtgc

SEQ ID NO: 13635 - DNA, 17 bp, Arabidopsis thaliana
aagtgtatttgggcttg

SEQ ID NO: 13636 - DNA, 17 bp, Arabidopsis thaliana
aagtgtcaaattcgccg

SEQ ID NO: 13637 - DNA, 17 bp, Arabidopsis thaliana
aagtgtcactcgaacag

SEQ ID NO: 13638 - DNA, 17 bp, Arabidopsis thaliana
aagtgtccaccattgca

SEQ ID NO: 13639 - DNA, 17 bp, Arabidopsis thaliana
aagtgtcctggcaattt

SEQ ID NO: 13640 - DNA, 17 bp, Arabidopsis thaliana
aagtgtcgcatggatta

SEQ ID NO: 13641 - DNA, 17 bp, Arabidopsis thaliana
aagtgtcgcttttggct

SEQ ID NO: 13642 - DNA, 17 bp, Arabidopsis thaliana
aagtgtcggctcttcct

SEQ ID NO: 13643 - DNA, 17 bp, Arabidopsis thaliana
aagtgtcgtctgtcgtg

SEQ ID NO: 13644 - DNA, 17 bp, Arabidopsis thaliana
aagtgtcgtctttcgtg

SEQ ID NO: 13645 - DNA, 17 bp, Arabidopsis thaliana
aagtgtcgttagatcta

SEQ ID NO: 13646 - DNA, 17 bp, Arabidopsis thaliana
aagtgtctaatccctga

SEQ ID NO: 13647 - DNA, 17 bp, Arabidopsis thaliana
aagtgtctacagcttct

SEQ ID NO: 13648 - DNA, 17 bp, Arabidopsis thaliana
aagtgtctcagggactt

SEQ ID NO: 13649 - DNA, 17 bp, Arabidopsis thaliana
aagtgtctcggtgatcg

SEQ ID NO: 13650 - DNA, 17 bp, Arabidopsis thaliana
aagtgtctcgtgcccag

SEQ ID NO: 13651 - DNA, 17 bp, Arabidopsis thaliana
aagtgtctgaatggtaa

SEQ ID NO: 13652 - DNA, 17 bp, Arabidopsis thaliana
aagtgtctgggccttag

SEQ ID NO: 13653 - DNA, 17 bp, Arabidopsis thaliana
aagtgtctgttttacca

SEQ ID NO: 13654 - DNA, 17 bp, Arabidopsis thaliana
aagtgtcttcggaggtg

SEQ ID NO: 13655 - DNA, 17 bp, Arabidopsis thaliana
aagtgtgactgacatgc

SEQ ID NO: 13656 - DNA, 17 bp, Arabidopsis thaliana
aagtgtgactgatcctt

SEQ ID NO: 13657 - DNA, 17 bp, Arabidopsis thaliana
aagtgtgcacaattata

SEQ ID NO: 13658 - DNA, 17 bp, Arabidopsis thaliana
aagtgtgcaggagatca

SEQ ID NO: 13659 - DNA, 17 bp, Arabidopsis thaliana
aagtgtgcaggagatct

SEQ ID NO: 13660 - DNA, 17 bp, Arabidopsis thaliana
aagtgtgcaggagattt

SEQ ID NO: 13661 - DNA, 17 bp, Arabidopsis thaliana
aagtgtgccacgagacc

SEQ ID NO: 13662 - DNA, 17 bp, Arabidopsis thaliana
aagtgtgccacgagacg

SEQ ID NO: 13663 - DNA, 17 bp, Arabidopsis thaliana
aagtgtgccgcgacgct

SEQ ID NO: 13664 - DNA, 17 bp, Arabidopsis thaliana
aagtgtgcgtagagctg

SEQ ID NO: 13665 - DNA, 17 bp, Arabidopsis thaliana
aagtgtgctgaggtagc

SEQ ID NO: 13666 - DNA, 17 bp, Arabidopsis thaliana
aagtgtggcataaacca

SEQ ID NO: 13667 - DNA, 17 bp, Arabidopsis thaliana
aagtgtggcctggtcca

SEQ ID NO: 13668 - DNA, 17 bp, Arabidopsis thaliana
aagtgtggtctcaaggg

SEQ ID NO: 13669 - DNA, 17 bp, Arabidopsis thaliana
aagtgtgtcagctgtca

SEQ ID NO: 13670 - DNA, 17 bp, Arabidopsis thaliana
aagtgtgtccatgttca

SEQ ID NO: 13671 - DNA, 17 bp, Arabidopsis thaliana
aagtgtgtgtttgtatt

SEQ ID NO: 13672 - DNA, 17 bp, Arabidopsis thaliana
aagtgttaatcggctgc

SEQ ID NO: 13673 - DNA, 17 bp, Arabidopsis thaliana
aagtgttactccctccg

SEQ ID NO: 13674 - DNA, 17 bp, Arabidopsis thaliana
aagtgttcaatggaccc

SEQ ID NO: 13675 - DNA, 17 bp, Arabidopsis thaliana
aagtgttcagctgagtg

SEQ ID NO: 13676 - DNA, 17 bp, Arabidopsis thaliana
aagtgttccaacggcca

SEQ ID NO: 13677 - DNA, 17 bp, Arabidopsis thaliana
aagtgttcccatgcttc

SEQ ID NO: 13678 - DNA, 17 bp, Arabidopsis thaliana
aagtgttcctcgactgg

SEQ ID NO: 13679 - DNA, 17 bp, Arabidopsis thaliana
aagtgttcgaaccgttt

SEQ ID NO: 13680 - DNA, 17 bp, Arabidopsis thaliana
aagtgttcgaatcgcgg

SEQ ID NO: 13681 - DNA, 17 bp, Arabidopsis thaliana
aagtgttcggatcgcga

SEQ ID NO: 13682 - DNA, 17 bp, Arabidopsis thaliana
aagtgttcggatcgcgg

SEQ ID NO: 13683 - DNA, 17 bp, Arabidopsis thaliana
aagtgttcggatcgcgt

SEQ ID NO: 13684 - DNA, 17 bp, Arabidopsis thaliana
aagtgttgaaggctatc

SEQ ID NO: 13685 - DNA, 17 bp, Arabidopsis thaliana
aagtgttgagctcgctc

SEQ ID NO: 13686 - DNA, 17 bp, Arabidopsis thaliana
aagtgttgagttcgcgc

SEQ ID NO: 13687 - DNA, 17 bp, Arabidopsis thaliana
aagtgttgagtttgctc

SEQ ID NO: 13688 - DNA, 17 bp, Arabidopsis thaliana
aagtgttggcttgggat

SEQ ID NO: 13689 - DNA, 17 bp, Arabidopsis thaliana
aagtgttgtggatgtcg

SEQ ID NO: 13690 - DNA, 17 bp, Arabidopsis thaliana
aagtgttgttgtgtcca

SEQ ID NO: 13691 - DNA, 17 bp, Arabidopsis thaliana
aagtgtttacgacgaaa

SEQ ID NO: 13692 - DNA, 17 bp, Arabidopsis thaliana
aagtgtttactgctgct

SEQ ID NO: 13693 - DNA, 17 bp, Arabidopsis thaliana
aagtgtttcgcggtttg

SEQ ID NO: 13694 - DNA, 17 bp, Arabidopsis thaliana
aagtgtttgacccgctt

SEQ ID NO: 13695 - DNA, 17 bp, Arabidopsis thaliana
aagtgtttggaccattg

SEQ ID NO: 13696 - DNA, 17 bp, Arabidopsis thaliana
aagtgttttcccgccaa

SEQ ID NO: 13697 - DNA, 17 bp, Arabidopsis thaliana
aagtgttttgcgatcct

SEQ ID NO: 13698 - DNA, 17 bp, Arabidopsis thaliana
aagttaagcccaaggta

SEQ ID NO: 13699 - DNA, 17 bp, Arabidopsis thaliana
aagttacaatgcagcag

SEQ ID NO: 13700 - DNA, 17 bp, Arabidopsis thaliana
aagttacagtccacctt

SEQ ID NO: 13701 - DNA, 17 bp, Arabidopsis thaliana
aagttaccaagaagctg

SEQ ID NO: 13702 - DNA, 17 bp, Arabidopsis thaliana
aagttaccacagggata

SEQ ID NO: 13703 - DNA, 17 bp, Arabidopsis thaliana
aagttaccatcttttct

SEQ ID NO: 13704 - DNA, 17 bp, Arabidopsis thaliana
aagttaccattgagaaa

SEQ ID NO: 13705 - DNA, 17 bp, Arabidopsis thaliana
aagttaccgtcgtttag

SEQ ID NO: 13706 - DNA, 17 bp, Arabidopsis thaliana
aagttaccgtgtgctgg

SEQ ID NO: 13707 - DNA, 17 bp, Arabidopsis thaliana
aagttacctcagtggtg

SEQ ID NO: 13708 - DNA, 17 bp, Arabidopsis thaliana
aagttacgaggtgtggg

SEQ ID NO: 13709 - DNA, 17 bp, Arabidopsis thaliana
aagttacgattgaacgc

SEQ ID NO: 13710 - DNA, 17 bp, Arabidopsis thaliana
aagttactaactcacaa

SEQ ID NO: 13711 - DNA, 17 bp, Arabidopsis thaliana
aagttactaactgtgtg

SEQ ID NO: 13712 - DNA, 17 bp, Arabidopsis thaliana
aagttactaggccttgt

SEQ ID NO: 13713 - DNA, 17 bp, Arabidopsis thaliana
aagttactcagttggtc

SEQ ID NO: 13714 - DNA, 17 bp, Arabidopsis thaliana
aagttactcagttgtct

SEQ ID NO: 13715 - DNA, 17 bp, Arabidopsis thaliana
aagttactcagttgttc

SEQ ID NO: 13716 - DNA, 17 bp, Arabidopsis thaliana
aagttactgtccctgga

SEQ ID NO: 13717 - DNA, 17 bp, Arabidopsis thaliana
aagttagatagagccag

SEQ ID NO: 13718 - DNA, 17 bp, Arabidopsis thaliana
aagttagccacgacagt

SEQ ID NO: 13719 - DNA, 17 bp, Arabidopsis thaliana
aagttagcgtgtctagc

SEQ ID NO: 13720 - DNA, 17 bp, Arabidopsis thaliana
aagttagctacgcatac

SEQ ID NO: 13721 - DNA, 17 bp, Arabidopsis thaliana
aagttagctttataagt

SEQ ID NO: 13722 - DNA, 17 bp, Arabidopsis thaliana
aagttagcttttgggtg

SEQ ID NO: 13723 - DNA, 17 bp, Arabidopsis thaliana
aagttagtggcagccat

SEQ ID NO: 13724 - DNA, 17 bp, Arabidopsis thaliana
aagttatccattgtgag

SEQ ID NO: 13725 - DNA, 17 bp, Arabidopsis thaliana
aagttatcggaaagaca

SEQ ID NO: 13726 - DNA, 17 bp, Arabidopsis thaliana
aagttatcggaaagaga

SEQ ID NO: 13727 - DNA, 17 bp, Arabidopsis thaliana
aagttatcgttgacacg

SEQ ID NO: 13728 - DNA, 17 bp, Arabidopsis thaliana
aagttatcgttgacccg

SEQ ID NO: 13729 - DNA, 17 bp, Arabidopsis thaliana
aagttatcttctctccg

SEQ ID NO: 13730 - DNA, 17 bp, Arabidopsis thaliana
aagttatgattgaccca

SEQ ID NO: 13731 - DNA, 17 bp, Arabidopsis thaliana
aagttattccaccggtt

SEQ ID NO: 13732 - DNA, 17 bp, Arabidopsis thaliana
aagttattgtccagggg

SEQ ID NO: 13733 - DNA, 17 bp, Arabidopsis thaliana
aagttatttacaatggc

SEQ ID NO: 13734 - DNA, 17 bp, Arabidopsis thaliana
aagttcaaaggctaatt

SEQ ID NO: 13735 - DNA, 17 bp, Arabidopsis thaliana
aagttcaacgattcccg

SEQ ID NO: 13736 - DNA, 17 bp, Arabidopsis thaliana
aagttcaactgagacaa

SEQ ID NO: 13737 - DNA, 17 bp, Arabidopsis thaliana
aagttcaagattgaatc

SEQ ID NO: 13738 - DNA, 17 bp, Arabidopsis thaliana
aagttcaagttttttcg

SEQ ID NO: 13739 - DNA, 17 bp, Arabidopsis thaliana
aagttcaatgcccaggt

SEQ ID NO: 13740 - DNA, 17 bp, Arabidopsis thaliana
aagttcaatgtctgttg

SEQ ID NO: 13741 - DNA, 17 bp, Arabidopsis thaliana
aagttcaatgttttcgc

SEQ ID NO: 13742 - DNA, 17 bp, Arabidopsis thaliana
aagttcaccaccgcatg

SEQ ID NO: 13743 - DNA, 17 bp, Arabidopsis thaliana
aagttcacctccatttt

SEQ ID NO: 13744 - DNA, 17 bp, Arabidopsis thaliana
aagttcacgattgggcg

SEQ ID NO: 13745 - DNA, 17 bp, Arabidopsis thaliana
aagttcacggttaattt

SEQ ID NO: 13746 - DNA, 17 bp, Arabidopsis thaliana
aagttcactcaggttca

SEQ ID NO: 13747 - DNA, 17 bp, Arabidopsis thaliana
aagttcactttcgatct

SEQ ID NO: 13748 - DNA, 17 bp, Arabidopsis thaliana
aagttcagaatcaccgt

SEQ ID NO: 13749 - DNA, 17 bp, Arabidopsis thaliana
aagttcagcataacccg

SEQ ID NO: 13750 - DNA, 17 bp, Arabidopsis thaliana
aagttcagcgaagagga

SEQ ID NO: 13751 - DNA, 17 bp, Arabidopsis thaliana
aagttcagctcagtttt

SEQ ID NO: 13752 - DNA, 17 bp, Arabidopsis thaliana
aagttcatccggatttg

SEQ ID NO: 13753 - DNA, 17 bp, Arabidopsis thaliana
aagttcatctccatttt

SEQ ID NO: 13754 - DNA, 17 bp, Arabidopsis thaliana
aagttcatgatggaata

SEQ ID NO: 13755 - DNA, 17 bp, Arabidopsis thaliana
aagttcatgccttttcc

SEQ ID NO: 13756 - DNA, 17 bp, Arabidopsis thaliana
aagttcatgctttttcc

SEQ ID NO: 13757 - DNA, 17 bp, Arabidopsis thaliana
aagttcatgggttgagt

SEQ ID NO: 13758 - DNA, 17 bp, Arabidopsis thaliana
aagttcattcctgtggg

SEQ ID NO: 13759 - DNA, 17 bp, Arabidopsis thaliana
aagttcattgacctaga

SEQ ID NO: 13760 - DNA, 17 bp, Arabidopsis thaliana
aagttcattggtaagtt

SEQ ID NO: 13761 - DNA, 17 bp, Arabidopsis thaliana
aagttcatttttgggtg

SEQ ID NO: 13762 - DNA, 17 bp, Arabidopsis thaliana
aagttccaactgcagga

SEQ ID NO: 13763 - DNA, 17 bp, Arabidopsis thaliana
aagttccaagtcctctt

SEQ ID NO: 13764 - DNA, 17 bp, Arabidopsis thaliana
aagttccactcattttc

SEQ ID NO: 13765 - DNA, 17 bp, Arabidopsis thaliana
aagttccagagtccggg

SEQ ID NO: 13766 - DNA, 17 bp, Arabidopsis thaliana
aagttccagatttttga

SEQ ID NO: 13767 - DNA, 17 bp, Arabidopsis thaliana
aagttccagtaggggta

SEQ ID NO: 13768 - DNA, 17 bp, Arabidopsis thaliana
aagttccatacggcagc

SEQ ID NO: 13769 - DNA, 17 bp, Arabidopsis thaliana
aagttccattgtccagc

SEQ ID NO: 13770 - DNA, 17 bp, Arabidopsis thaliana
aagttccattgtcctgc

SEQ ID NO: 13771 - DNA, 17 bp, Arabidopsis thaliana
aagttccattgtcttgc

SEQ ID NO: 13772 - DNA, 17 bp, Arabidopsis thaliana
aagttcccaagatggga

SEQ ID NO: 13773 - DNA, 17 bp, Arabidopsis thaliana
aagttcccaagtaagct

SEQ ID NO: 13774 - DNA, 17 bp, Arabidopsis thaliana
aagttcccagactcttg

SEQ ID NO: 13775 - DNA, 17 bp, Arabidopsis thaliana
aagttccctctagatag

SEQ ID NO: 13776 - DNA, 17 bp, Arabidopsis thaliana
aagttccctctagattg

SEQ ID NO: 13777 - DNA, 17 bp, Arabidopsis thaliana
aagttccgagagaaacc

SEQ ID NO: 13778 - DNA, 17 bp, Arabidopsis thaliana
aagttccgcccgggtgt

SEQ ID NO: 13779 - DNA, 17 bp, Arabidopsis thaliana
aagttccggatcttgta

SEQ ID NO: 13780 - DNA, 17 bp, Arabidopsis thaliana
aagttccggtgatgtga

SEQ ID NO: 13781 - DNA, 17 bp, Arabidopsis thaliana
aagttccggttgcgggt

SEQ ID NO: 13782 - DNA, 17 bp, Arabidopsis thaliana
aagttccggttgcggtt

SEQ ID NO: 13783 - DNA, 17 bp, Arabidopsis thaliana
aagttccgtcgaaactc

SEQ ID NO: 13784 - DNA, 17 bp, Arabidopsis thaliana
aagttccgtgacttgac

SEQ ID NO: 13785 - DNA, 17 bp, Arabidopsis thaliana
aagttccgttgacttga

SEQ ID NO: 13786 - DNA, 17 bp, Arabidopsis thaliana
aagttccgttgtggctc

SEQ ID NO: 13787 - DNA, 17 bp, Arabidopsis thaliana
aagttcctactccgccc

SEQ ID NO: 13788 - DNA, 17 bp, Arabidopsis thaliana
aagttcctgatcccaaa

SEQ ID NO: 13789 - DNA, 17 bp, Arabidopsis thaliana
aagttcgaacagatgta

SEQ ID NO: 13790 - DNA, 17 bp, Arabidopsis thaliana
aagttcgataacgttgt

SEQ ID NO: 13791 - DNA, 17 bp, Arabidopsis thaliana
aagttcgatcgagtgct

SEQ ID NO: 13792 - DNA, 17 bp, Arabidopsis thaliana
aagttcgcaccctaccc

SEQ ID NO: 13793 - DNA, 17 bp, Arabidopsis thaliana
aagttcggccgaaacca

SEQ ID NO: 13794 - DNA, 17 bp, Arabidopsis thaliana
aagttcggcggtgagtg

SEQ ID NO: 13795 - DNA, 17 bp, Arabidopsis thaliana
aagttcgggtgctgacg

SEQ ID NO: 13796 - DNA, 17 bp, Arabidopsis thaliana
aagttcgggttgtggtt

SEQ ID NO: 13797 - DNA, 17 bp, Arabidopsis thaliana
aagttcggtgccgtctt

SEQ ID NO: 13798 - DNA, 17 bp, Arabidopsis thaliana
aagttcgtctccgattt

SEQ ID NO: 13799 - DNA, 17 bp, Arabidopsis thaliana
aagttcgtctttatgga

SEQ ID NO: 13800 - DNA, 17 bp, Arabidopsis thaliana
aagttcgtctttgttcg

SEQ ID NO: 13801 - DNA, 17 bp, Arabidopsis thaliana
aagttcgtgtccaaccg

SEQ ID NO: 13802 - DNA, 17 bp, Arabidopsis thaliana
aagttctaggttttctc

SEQ ID NO: 13803 - DNA, 17 bp, Arabidopsis thaliana
aagttctataacctcag

SEQ ID NO: 13804 - DNA, 17 bp, Arabidopsis thaliana
aagttctatacaccgcc

SEQ ID NO: 13805 - DNA, 17 bp, Arabidopsis thaliana
aagttctcaatccatcc

SEQ ID NO: 13806 - DNA, 17 bp, Arabidopsis thaliana
aagttctcggtcagttg

SEQ ID NO: 13807 - DNA, 17 bp, Arabidopsis thaliana
aagttctctcaagacgt

SEQ ID NO: 13808 - DNA, 17 bp, Arabidopsis thaliana
aagttctctcagtgagg

SEQ ID NO: 13809 - DNA, 17 bp, Arabidopsis thaliana
aagttctctcgtcaatg

SEQ ID NO: 13810 - DNA, 17 bp, Arabidopsis thaliana
aagttctgacgtggccg

SEQ ID NO: 13811 - DNA, 17 bp, Arabidopsis thaliana
aagttctgagattgtct

SEQ ID NO: 13812 - DNA, 17 bp, Arabidopsis thaliana
aagttctgcaactacaa

SEQ ID NO: 13813 - DNA, 17 bp, Arabidopsis thaliana
aagttctgggccaatgt

SEQ ID NO: 13814 - DNA, 17 bp, Arabidopsis thaliana
aagttctggttgcggtt

SEQ ID NO: 13815 - DNA, 17 bp, Arabidopsis thaliana
aagttcttccgcctgat

SEQ ID NO: 13816 - DNA, 17 bp, Arabidopsis thaliana
aagttcttggttcagtg

SEQ ID NO: 13817 - DNA, 17 bp, Arabidopsis thaliana
aagttctttccagagga

SEQ ID NO: 13818 - DNA, 17 bp, Arabidopsis thaliana
aagttctttctcgggca

SEQ ID NO: 13819 - DNA, 17 bp, Arabidopsis thaliana
aagttcttttgactgtc

SEQ ID NO: 13820 - DNA, 17 bp, Arabidopsis thaliana
aagttgacattgggctt

SEQ ID NO: 13821 - DNA, 17 bp, Arabidopsis thaliana
aagttgaccaactctct

SEQ ID NO: 13822 - DNA, 17 bp, Arabidopsis thaliana
aagttgaccttggctct

SEQ ID NO: 13823 - DNA, 17 bp, Arabidopsis thaliana
aagttgacgaaattttg

SEQ ID NO: 13824 - DNA, 17 bp, Arabidopsis thaliana
aagttgacgacatagat

SEQ ID NO: 13825 - DNA, 17 bp, Arabidopsis thaliana
aagttgactatccacct

SEQ ID NO: 13826 - DNA, 17 bp, Arabidopsis thaliana
aagttgactgaacaggc

SEQ ID NO: 13827 - DNA, 17 bp, Arabidopsis thaliana
aagttgactttttgtcg

SEQ ID NO: 13828 - DNA, 17 bp, Arabidopsis thaliana
aagttgagttgagttga

SEQ ID NO: 13829 - DNA, 17 bp, Arabidopsis thaliana
aagttgatctgaaatac

SEQ ID NO: 13830 - DNA, 17 bp, Arabidopsis thaliana
aagttgatgatacggcc

SEQ ID NO: 13831 - DNA, 17 bp, Arabidopsis thaliana
aagttgatgtctcatgc

SEQ ID NO: 13832 - DNA, 17 bp, Arabidopsis thaliana
aagttgatttgttgatt

SEQ ID NO: 13833 - DNA, 17 bp, Arabidopsis thaliana
aagttgatttgttgtga

SEQ ID NO: 13834 - DNA, 17 bp, Arabidopsis thaliana
aagttgcactcgtcttt

SEQ ID NO: 13835 - DNA, 17 bp, Arabidopsis thaliana
aagttgcaggctcatcg

SEQ ID NO: 13836 - DNA, 17 bp, Arabidopsis thaliana
aagttgcagttcatcaa

SEQ ID NO: 13837 - DNA, 17 bp, Arabidopsis thaliana
aagttgccatcacaccg

SEQ ID NO: 13838 - DNA, 17 bp, Arabidopsis thaliana
aagttgccttgctcaac

SEQ ID NO: 13839 - DNA, 17 bp, Arabidopsis thaliana
aagttgcgagtccttgg

SEQ ID NO: 13840 - DNA, 17 bp, Arabidopsis thaliana
aagttgcgattgaacgc

SEQ ID NO: 13841 - DNA, 17 bp, Arabidopsis thaliana
aagttgcgccccaagcc

SEQ ID NO: 13842 - DNA, 17 bp, Arabidopsis thaliana
aagttgcgtctttcaat

SEQ ID NO: 13843 - DNA, 17 bp, Arabidopsis thaliana
aagttgcgttcgcccta

SEQ ID NO: 13844 - DNA, 17 bp, Arabidopsis thaliana
aagttgctaactcagta

SEQ ID NO: 13845 - DNA, 17 bp, Arabidopsis thaliana
aagttgctccgaggacg

SEQ ID NO: 13846 - DNA, 17 bp, Arabidopsis thaliana
aagttgctgcctggatg

SEQ ID NO: 13847 - DNA, 17 bp, Arabidopsis thaliana
aagttgctgttctgcac

SEQ ID NO: 13848 - DNA, 17 bp, Arabidopsis thaliana
aagttggatttaaattt

SEQ ID NO: 13849 - DNA, 17 bp, Arabidopsis thaliana
aagttggccaactctct

SEQ ID NO: 13850 - DNA, 17 bp, Arabidopsis thaliana
aagttggccaactttca

SEQ ID NO: 13851 - DNA, 17 bp, Arabidopsis thaliana
aagttggccagaccgct

SEQ ID NO: 13852 - DNA, 17 bp, Arabidopsis thaliana
aagttggccatatctga

SEQ ID NO: 13853 - DNA, 17 bp, Arabidopsis thaliana
aagttggcgtgcaatac

SEQ ID NO: 13854 - DNA, 17 bp, Arabidopsis thaliana
aagttggctctttcctt

SEQ ID NO: 13855 - DNA, 17 bp, Arabidopsis thaliana
aagttggctttacaaaa

SEQ ID NO: 13856 - DNA, 17 bp, Arabidopsis thaliana
aagttgggaatgctcaa

SEQ ID NO: 13857 - DNA, 17 bp, Arabidopsis thaliana
aagttgggacttacgta

SEQ ID NO: 13858 - DNA, 17 bp, Arabidopsis thaliana
aagttgggacttattta

SEQ ID NO: 13859 - DNA, 17 bp, Arabidopsis thaliana
aagttgggtctccgctt

SEQ ID NO: 13860 - DNA, 17 bp, Arabidopsis thaliana
aagttggtctgcggcga

SEQ ID NO: 13861 - DNA, 17 bp, Arabidopsis thaliana
aagttggtggagcgatt

SEQ ID NO: 13862 - DNA, 17 bp, Arabidopsis thaliana
aagttggtttccgacaa

SEQ ID NO: 13863 - DNA, 17 bp, Arabidopsis thaliana
aagttggtttgtacccc

SEQ ID NO: 13864 - DNA, 17 bp, Arabidopsis thaliana
aagttgtacctacgcat

SEQ ID NO: 13865 - DNA, 17 bp, Arabidopsis thaliana
aagttgtacctacgcgt

SEQ ID NO: 13866 - DNA, 17 bp, Arabidopsis thaliana
aagttgtatagaccatt

SEQ ID NO: 13867 - DNA, 17 bp, Arabidopsis thaliana
aagttgtatgagccaca

SEQ ID NO: 13868 - DNA, 17 bp, Arabidopsis thaliana
aagttgtccctgttggc

SEQ ID NO: 13869 - DNA, 17 bp, Arabidopsis thaliana
aagttgtccttggctac

SEQ ID NO: 13870 - DNA, 17 bp, Arabidopsis thaliana
aagttgtcgacggtgac

SEQ ID NO: 13871 - DNA, 17 bp, Arabidopsis thaliana
aagttgtcgtggtcaca

SEQ ID NO: 13872 - DNA, 17 bp, Arabidopsis thaliana
aagttgtctggatttgc

SEQ ID NO: 13873 - DNA, 17 bp, Arabidopsis thaliana
aagttgtctgttttgct

SEQ ID NO: 13874 - DNA, 17 bp, Arabidopsis thaliana
aagttgtgattattgca

SEQ ID NO: 13875 - DNA, 17 bp, Arabidopsis thaliana
aagttgtgcgaagatga

SEQ ID NO: 13876 - DNA, 17 bp, Arabidopsis thaliana
aagttgtggaagagact

SEQ ID NO: 13877 - DNA, 17 bp, Arabidopsis thaliana
aagttgtggctatagct

SEQ ID NO: 13878 - DNA, 17 bp, Arabidopsis thaliana
aagttgtgggagagagt

SEQ ID NO: 13879 - DNA, 17 bp, Arabidopsis thaliana
aagttgtgggatggatg

SEQ ID NO: 13880 - DNA, 17 bp, Arabidopsis thaliana
aagttgtggtcggatct

SEQ ID NO: 13881 - DNA, 17 bp, Arabidopsis thaliana
aagttgtgtggtccgtg

SEQ ID NO: 13882 - DNA, 17 bp, Arabidopsis thaliana
aagttgttatgtcacca

SEQ ID NO: 13883 - DNA, 17 bp, Arabidopsis thaliana
aagttgttcgttctcat

SEQ ID NO: 13884 - DNA, 17 bp, Arabidopsis thaliana
aagttgttcgtttcatg

SEQ ID NO: 13885 - DNA, 17 bp, Arabidopsis thaliana
aagttgttcgtttgcat

SEQ ID NO: 13886 - DNA, 17 bp, Arabidopsis thaliana
aagttgttcgtttgcct

SEQ ID NO: 13887 - DNA, 17 bp, Arabidopsis thaliana
aagttgttcgtttgttt

SEQ ID NO: 13888 - DNA, 17 bp, Arabidopsis thaliana
aagttgttcttcagtaa

SEQ ID NO: 13889 - DNA, 17 bp, Arabidopsis thaliana
aagtttaacccgaactt

SEQ ID NO: 13890 - DNA, 17 bp, Arabidopsis thaliana
aagtttaagtatgcgtt

SEQ ID NO: 13891 - DNA, 17 bp, Arabidopsis thaliana
aagtttaatggctaagc

SEQ ID NO: 13892 - DNA, 17 bp, Arabidopsis thaliana
aagtttacaaaagactg

SEQ ID NO: 13893 - DNA, 17 bp, Arabidopsis thaliana
aagtttaccagcttctt

SEQ ID NO: 13894 - DNA, 17 bp, Arabidopsis thaliana
aagtttaccgcagtttg

SEQ ID NO: 13895 - DNA, 17 bp, Arabidopsis thaliana
aagtttaccgccgccgc

SEQ ID NO: 13896 - DNA, 17 bp, Arabidopsis thaliana
aagtttagaatcgccgt

SEQ ID NO: 13897 - DNA, 17 bp, Arabidopsis thaliana
aagtttagagatcgcct

SEQ ID NO: 13898 - DNA, 17 bp, Arabidopsis thaliana
aagtttaggatccgttc

SEQ ID NO: 13899 - DNA, 17 bp, Arabidopsis thaliana
aagtttagggtgaaaag

SEQ ID NO: 13900 - DNA, 17 bp, Arabidopsis thaliana
aagtttagggtgaaagt

SEQ ID NO: 13901 - DNA, 17 bp, Arabidopsis thaliana
aagtttatgagtgacac

SEQ ID NO: 13902 - DNA, 17 bp, Arabidopsis thaliana
aagtttatgatcctgtt

SEQ ID NO: 13903 - DNA, 17 bp, Arabidopsis thaliana
aagtttatgcctttttc

SEQ ID NO: 13904 - DNA, 17 bp, Arabidopsis thaliana
aagtttatgtgaaatgg

SEQ ID NO: 13905 - DNA, 17 bp, Arabidopsis thaliana
aagtttcaactccagga

SEQ ID NO: 13906 - DNA, 17 bp, Arabidopsis thaliana
aagtttcaagtgtttac

SEQ ID NO: 13907 - DNA, 17 bp, Arabidopsis thaliana
aagtttcacctgtggtg

SEQ ID NO: 13908 - DNA, 17 bp, Arabidopsis thaliana
aagtttcagacggattc

SEQ ID NO: 13909 - DNA, 17 bp, Arabidopsis thaliana
aagtttcagccttgcga

SEQ ID NO: 13910 - DNA, 17 bp, Arabidopsis thaliana
aagtttcagccttgcta

SEQ ID NO: 13911 - DNA, 17 bp, Arabidopsis thaliana
aagtttcataccagcca

SEQ ID NO: 13912 - DNA, 17 bp, Arabidopsis thaliana
aagtttccaccaacctt

SEQ ID NO: 13913 - DNA, 17 bp, Arabidopsis thaliana
aagtttccagagtgttg

SEQ ID NO: 13914 - DNA, 17 bp, Arabidopsis thaliana
aagtttccctcaggata

SEQ ID NO: 13915 - DNA, 17 bp, Arabidopsis thaliana
aagtttccggcaggtcg

SEQ ID NO: 13916 - DNA, 17 bp, Arabidopsis thaliana
aagtttccgtcaaccaa

SEQ ID NO: 13917 - DNA, 17 bp, Arabidopsis thaliana
aagtttcctaatatcac

SEQ ID NO: 13918 - DNA, 17 bp, Arabidopsis thaliana
aagtttccttgactatg

SEQ ID NO: 13919 - DNA, 17 bp, Arabidopsis thaliana
aagtttcgacatcagaa

SEQ ID NO: 13920 - DNA, 17 bp, Arabidopsis thaliana
aagtttcgcctaaggtc

SEQ ID NO: 13921 - DNA, 17 bp, Arabidopsis thaliana
aagtttcgcctaaggtt

SEQ ID NO: 13922 - DNA, 17 bp, Arabidopsis thaliana
aagtttcgcctacgatc

SEQ ID NO: 13923 - DNA, 17 bp, Arabidopsis thaliana
aagtttcgcctacggtc

SEQ ID NO: 13924 - DNA, 17 bp, Arabidopsis thaliana
aagtttcgcctagggtc

SEQ ID NO: 13925 - DNA, 17 bp, Arabidopsis thaliana
aagtttcgcgaattacc

SEQ ID NO: 13926 - DNA, 17 bp, Arabidopsis thaliana
aagtttcggcgtaagac

SEQ ID NO: 13927 - DNA, 17 bp, Arabidopsis thaliana
aagtttcgtctagggtt

SEQ ID NO: 13928 - DNA, 17 bp, Arabidopsis thaliana
aagtttcgtctcaagcg

SEQ ID NO: 13929 - DNA, 17 bp, Arabidopsis thaliana
aagtttcgttgaccgag

SEQ ID NO: 13930 - DNA, 17 bp, Arabidopsis thaliana
aagtttcgttgacttga

SEQ ID NO: 13931 - DNA, 17 bp, Arabidopsis thaliana
aagtttcgttgacttgg

SEQ ID NO: 13932 - DNA, 17 bp, Arabidopsis thaliana
aagtttcgttgacttgt

SEQ ID NO: 13933 - DNA, 17 bp, Arabidopsis thaliana
aagtttcgttgactttg

SEQ ID NO: 13934 - DNA, 17 bp, Arabidopsis thaliana
aagtttctcatccgagg

SEQ ID NO: 13935 - DNA, 17 bp, Arabidopsis thaliana
aagtttctccgaaagtg

SEQ ID NO: 13936 - DNA, 17 bp, Arabidopsis thaliana
aagtttctcctgctgct

SEQ ID NO: 13937 - DNA, 17 bp, Arabidopsis thaliana
aagtttctgcctttttg

SEQ ID NO: 13938 - DNA, 17 bp, Arabidopsis thaliana
aagtttctgcctttttt

SEQ ID NO: 13939 - DNA, 17 bp, Arabidopsis thaliana
aagtttctggctaattc

SEQ ID NO: 13940 - DNA, 17 bp, Arabidopsis thaliana
aagtttcttcagttcca

SEQ ID NO: 13941 - DNA, 17 bp, Arabidopsis thaliana
aagtttctttgacttgg

SEQ ID NO: 13942 - DNA, 17 bp, Arabidopsis thaliana
aagtttgaaatcaggaa

SEQ ID NO: 13943 - DNA, 17 bp, Arabidopsis thaliana
aagtttgaactctggac

SEQ ID NO: 13944 - DNA, 17 bp, Arabidopsis thaliana
aagtttgaaggtcagtt

SEQ ID NO: 13945 - DNA, 17 bp, Arabidopsis thaliana
aagtttgacgagtttag

SEQ ID NO: 13946 - DNA, 17 bp, Arabidopsis thaliana
aagtttgactaaatcca

SEQ ID NO: 13947 - DNA, 17 bp, Arabidopsis thaliana
aagtttgactccggtgt

SEQ ID NO: 13948 - DNA, 17 bp, Arabidopsis thaliana
aagtttgactgaaaccc

SEQ ID NO: 13949 - DNA, 17 bp, Arabidopsis thaliana
aagtttgagatcctgat

SEQ ID NO: 13950 - DNA, 17 bp, Arabidopsis thaliana
aagtttgatagcgggcc

SEQ ID NO: 13951 - DNA, 17 bp, Arabidopsis thaliana
aagtttgatgaaccgtt

SEQ ID NO: 13952 - DNA, 17 bp, Arabidopsis thaliana
aagtttgcactgaaccg

SEQ ID NO: 13953 - DNA, 17 bp, Arabidopsis thaliana
aagtttgcagattccgc

SEQ ID NO: 13954 - DNA, 17 bp, Arabidopsis thaliana
aagtttgcaggctgtta

SEQ ID NO: 13955 - DNA, 17 bp, Arabidopsis thaliana
aagtttgcagtagtcac

SEQ ID NO: 13956 - DNA, 17 bp, Arabidopsis thaliana
aagtttgccaccggaag

SEQ ID NO: 13957 - DNA, 17 bp, Arabidopsis thaliana
aagtttgcgatggattc

SEQ ID NO: 13958 - DNA, 17 bp, Arabidopsis thaliana
aagtttgcggaaacggg

SEQ ID NO: 13959 - DNA, 17 bp, Arabidopsis thaliana
aagtttgcgggagttga

SEQ ID NO: 13960 - DNA, 17 bp, Arabidopsis thaliana
aagtttgcgttgactcg

SEQ ID NO: 13961 - DNA, 17 bp, Arabidopsis thaliana
aagtttgcgttgttggg

SEQ ID NO: 13962 - DNA, 17 bp, Arabidopsis thaliana
aagtttgcgttttgcgt

SEQ ID NO: 13963 - DNA, 17 bp, Arabidopsis thaliana
aagtttgcttcaggtcg

SEQ ID NO: 13964 - DNA, 17 bp, Arabidopsis thaliana
aagtttggcctaaactg

SEQ ID NO: 13965 - DNA, 17 bp, Arabidopsis thaliana
aagtttggcctaacctg

SEQ ID NO: 13966 - DNA, 17 bp, Arabidopsis thaliana
aagtttggcctcacggt

SEQ ID NO: 13967 - DNA, 17 bp, Arabidopsis thaliana
aagtttggctccaatgt

SEQ ID NO: 13968 - DNA, 17 bp, Arabidopsis thaliana
aagtttgggaaccaact

SEQ ID NO: 13969 - DNA, 17 bp, Arabidopsis thaliana
aagtttgggaagtcttg

SEQ ID NO: 13970 - DNA, 17 bp, Arabidopsis thaliana
aagtttgggacagtaca

SEQ ID NO: 13971 - DNA, 17 bp, Arabidopsis thaliana
aagtttgggatccaacc

SEQ ID NO: 13972 - DNA, 17 bp, Arabidopsis thaliana
aagtttgggctctatct

SEQ ID NO: 13973 - DNA, 17 bp, Arabidopsis thaliana
aagtttggggtgaaaag

SEQ ID NO: 13974 - DNA, 17 bp, Arabidopsis thaliana
aagtttgggttcgagtt

SEQ ID NO: 13975 - DNA, 17 bp, Arabidopsis thaliana
aagtttgggtttgcggg

SEQ ID NO: 13976 - DNA, 17 bp, Arabidopsis thaliana
aagtttggttgggttat

SEQ ID NO: 13977 - DNA, 17 bp, Arabidopsis thaliana
aagtttgtaagtgccaa

SEQ ID NO: 13978 - DNA, 17 bp, Arabidopsis thaliana
aagtttgtaagtgccag

SEQ ID NO: 13979 - DNA, 17 bp, Arabidopsis thaliana
aagtttgtaatgttctg

SEQ ID NO: 13980 - DNA, 17 bp, Arabidopsis thaliana
aagtttgtcagttgggc

SEQ ID NO: 13981 - DNA, 17 bp, Arabidopsis thaliana
aagtttgtccaaaagtt

SEQ ID NO: 13982 - DNA, 17 bp, Arabidopsis thaliana
aagtttgtccttggagt

SEQ ID NO: 13983 - DNA, 17 bp, Arabidopsis thaliana
aagtttgtccttggatt

SEQ ID NO: 13984 - DNA, 17 bp, Arabidopsis thaliana
aagtttgtcttctgaag

SEQ ID NO: 13985 - DNA, 17 bp, Arabidopsis thaliana
aagtttgtcttgtgacc

SEQ ID NO: 13986 - DNA, 17 bp, Arabidopsis thaliana
aagtttgtgaactcatc

SEQ ID NO: 13987 - DNA, 17 bp, Arabidopsis thaliana
aagtttgtgctttgttt

SEQ ID NO: 13988 - DNA, 17 bp, Arabidopsis thaliana
aagtttgtgtaaaatca

SEQ ID NO: 13989 - DNA, 17 bp, Arabidopsis thaliana
aagtttgtgtgaaatga

SEQ ID NO: 13990 - DNA, 17 bp, Arabidopsis thaliana
aagtttgtgtgaaatgg

SEQ ID NO: 13991 - DNA, 17 bp, Arabidopsis thaliana
aagtttgtgttgactcg

SEQ ID NO: 13992 - DNA, 17 bp, Arabidopsis thaliana
aagtttgttgctgagaa

SEQ ID NO: 13993 - DNA, 17 bp, Arabidopsis thaliana
aagtttgttgctgagag

SEQ ID NO: 13994 - DNA, 17 bp, Arabidopsis thaliana
aagtttgttgctgagat

SEQ ID NO: 13995 - DNA, 17 bp, Arabidopsis thaliana
aagtttgttgctgaggt

SEQ ID NO: 13996 - DNA, 17 bp, Arabidopsis thaliana
aagtttgtttttcgttt

SEQ ID NO: 13997 - DNA, 17 bp, Arabidopsis thaliana
aagttttaactgcggtt

SEQ ID NO: 13998 - DNA, 17 bp, Arabidopsis thaliana
aagttttaccaacagtg

SEQ ID NO: 13999 - DNA, 17 bp, Arabidopsis thaliana
aagttttagcgaactga

SEQ ID NO: 14000 - DNA, 17 bp, Arabidopsis thaliana
aagttttagggcccaat

SEQ ID NO: 14001 - DNA, 17 bp, Arabidopsis thaliana
aagttttagggcccgat

SEQ ID NO: 14002 - DNA, 17 bp, Arabidopsis thaliana
aagttttcaactacaat

SEQ ID NO: 14003 - DNA, 17 bp, Arabidopsis thaliana
aagttttccatatggtt

SEQ ID NO: 14004 - DNA, 17 bp, Arabidopsis thaliana
aagttttcccagggtaa

SEQ ID NO: 14005 - DNA, 17 bp, Arabidopsis thaliana
aagttttcccttttcca

SEQ ID NO: 14006 - DNA, 17 bp, Arabidopsis thaliana
aagttttcggcgtaaga

SEQ ID NO: 14007 - DNA, 17 bp, Arabidopsis thaliana
aagttttctctttatgt

SEQ ID NO: 14008 - DNA, 17 bp, Arabidopsis thaliana
aagttttctgcaaagca

SEQ ID NO: 14009 - DNA, 17 bp, Arabidopsis thaliana
aagttttcttggctaaa

SEQ ID NO: 14010 - DNA, 17 bp, Arabidopsis thaliana
aagttttgaaattccgg

SEQ ID NO: 14011 - DNA, 17 bp, Arabidopsis thaliana
aagttttgactgcagag

SEQ ID NO: 14012 - DNA, 17 bp, Arabidopsis thaliana
aagttttgagagtgtag

SEQ ID NO: 14013 - DNA, 17 bp, Arabidopsis thaliana
aagttttgccgtctttg

SEQ ID NO: 14014 - DNA, 17 bp, Arabidopsis thaliana
aagttttgcggtgttcg

SEQ ID NO: 14015 - DNA, 17 bp, Arabidopsis thaliana
aagttttgctaagcact

SEQ ID NO: 14016 - DNA, 17 bp, Arabidopsis thaliana
aagttttgctaagtttt

SEQ ID NO: 14017 - DNA, 17 bp, Arabidopsis thaliana
aagttttggatccaatg

SEQ ID NO: 14018 - DNA, 17 bp, Arabidopsis thaliana
aagttttggctgacaca

SEQ ID NO: 14019 - DNA, 17 bp, Arabidopsis thaliana
aagttttgggatctgcg

SEQ ID NO: 14020 - DNA, 17 bp, Arabidopsis thaliana
aagttttgggccgaaac

SEQ ID NO: 14021 - DNA, 17 bp, Arabidopsis thaliana
aagttttgggccgaatc

SEQ ID NO: 14022 - DNA, 17 bp, Arabidopsis thaliana
aagttttgtgccgaagc

SEQ ID NO: 14023 - DNA, 17 bp, Arabidopsis thaliana
aagttttgtgtacgggc

SEQ ID NO: 14024 - DNA, 17 bp, Arabidopsis thaliana
aagttttgttgacctgg

SEQ ID NO: 14025 - DNA, 17 bp, Arabidopsis thaliana
aagttttgttgacctgt

SEQ ID NO: 14026 - DNA, 17 bp, Arabidopsis thaliana
aagttttgttgactggg

SEQ ID NO: 14027 - DNA, 17 bp, Arabidopsis thaliana
aagttttgttgactgtg

SEQ ID NO: 14028 - DNA, 17 bp, Arabidopsis thaliana
aagttttgttgactttg

SEQ ID NO: 14029 - DNA, 17 bp, Arabidopsis thaliana
aagttttgttgagtcgg

SEQ ID NO: 14030 - DNA, 17 bp, Arabidopsis thaliana
aagtttttcactgtgag

SEQ ID NO: 14031 - DNA, 17 bp, Arabidopsis thaliana
aagtttttcatgaccgt

SEQ ID NO: 14032 - DNA, 17 bp, Arabidopsis thaliana
aagtttttctcgtaccg

SEQ ID NO: 14033 - DNA, 17 bp, Arabidopsis thaliana
aagtttttctgatggta

SEQ ID NO: 14034 - DNA, 17 bp, Arabidopsis thaliana
aagtttttgacccaggt

SEQ ID NO: 14035 - DNA, 17 bp, Arabidopsis thaliana
aagtttttgcggttacg

SEQ ID NO: 14036 - DNA, 17 bp, Arabidopsis thaliana
aagtttttgcggttatg

SEQ ID NO: 14037 - DNA, 17 bp, Arabidopsis thaliana
aagtttttggcgggaaa

SEQ ID NO: 14038 - DNA, 17 bp, Arabidopsis thaliana
aagtttttgggcatgga

SEQ ID NO: 14039 - DNA, 17 bp, Arabidopsis thaliana
aataaaaacctacgctt

SEQ ID NO: 14040 - DNA, 17 bp, Arabidopsis thaliana
aataaaactgtgtcggc

SEQ ID NO: 14041 - DNA, 17 bp, Arabidopsis thaliana
aataaaatgggctgacc

SEQ ID NO: 14042 - DNA, 17 bp, Arabidopsis thaliana
aataaacatcagtcccg

SEQ ID NO: 14043 - DNA, 17 bp, Arabidopsis thaliana
aataaacattgcatagc

SEQ ID NO: 14044 - DNA, 17 bp, Arabidopsis thaliana
aataaaccgatcggtcc

SEQ ID NO: 14045 - DNA, 17 bp, Arabidopsis thaliana
aataaaccgctgcggac

SEQ ID NO: 14046 - DNA, 17 bp, Arabidopsis thaliana
aataaaccgttgcgcac

SEQ ID NO: 14047 - DNA, 17 bp, Arabidopsis thaliana
aataaaccgttgcggag

SEQ ID NO: 14048 - DNA, 17 bp, Arabidopsis thaliana
aataaactattcaggtt

SEQ ID NO: 14049 - DNA, 17 bp, Arabidopsis thaliana
aataaactctcctccgt

SEQ ID NO: 14050 - DNA, 17 bp, Arabidopsis thaliana
aataaacttggtctgca

SEQ ID NO: 14051 - DNA, 17 bp, Arabidopsis thaliana
aataaacttggtgcgca

SEQ ID NO: 14052 - DNA, 17 bp, Arabidopsis thaliana
aataaagaatcgagatc

SEQ ID NO: 14053 - DNA, 17 bp, Arabidopsis thaliana
aataaagcgatgtggat

SEQ ID NO: 14054 - DNA, 17 bp, Arabidopsis thaliana
aataaagcgggttactc

SEQ ID NO: 14055 - DNA, 17 bp, Arabidopsis thaliana
aataaagtcagcgtcca

SEQ ID NO: 14056 - DNA, 17 bp, Arabidopsis thaliana
aataaatcacagtatct

SEQ ID NO: 14057 - DNA, 17 bp, Arabidopsis thaliana
aataaatccgccgtcat

SEQ ID NO: 14058 - DNA, 17 bp, Arabidopsis thaliana
aataaatcctcaagttg

SEQ ID NO: 14059 - DNA, 17 bp, Arabidopsis thaliana
aataaatcctggagttg

SEQ ID NO: 14060 - DNA, 17 bp, Arabidopsis thaliana
aataaatccttgcgggc

SEQ ID NO: 14061 - DNA, 17 bp, Arabidopsis thaliana
aataaatcggtgcgtac

SEQ ID NO: 14062 - DNA, 17 bp, Arabidopsis thaliana
aataaatcgtcacgcgg

SEQ ID NO: 14063 - DNA, 17 bp, Arabidopsis thaliana
aataaatcgtcctgcgg

SEQ ID NO: 14064 - DNA, 17 bp, Arabidopsis thaliana
aataaatcgtggagttg

SEQ ID NO: 14065 - DNA, 17 bp, Arabidopsis thaliana
aataaatcgtgtagttg

SEQ ID NO: 14066 - DNA, 17 bp, Arabidopsis thaliana
aataaatcttgggagac

SEQ ID NO: 14067 - DNA, 17 bp, Arabidopsis thaliana
aataaatgctgagaatc

SEQ ID NO: 14068 - DNA, 17 bp, Arabidopsis thaliana
aataaattgaccgcaat

SEQ ID NO: 14069 - DNA, 17 bp, Arabidopsis thaliana
aataaattgtcttcgcg

SEQ ID NO: 14070 - DNA, 17 bp, Arabidopsis thaliana
aataaattgtttccgcg

SEQ ID NO: 14071 - DNA, 17 bp, Arabidopsis thaliana
aataaattgttttcgcg

SEQ ID NO: 14072 - DNA, 17 bp, Arabidopsis thaliana
aataaattttgtcggtc

SEQ ID NO: 14073 - DNA, 17 bp, Arabidopsis thaliana
aataacaaatcaccgaa

SEQ ID NO: 14074 - DNA, 17 bp, Arabidopsis thaliana
aataacaatacgtcgcg

SEQ ID NO: 14075 - DNA, 17 bp, Arabidopsis thaliana
aataacacccccttagt

SEQ ID NO: 14076 - DNA, 17 bp, Arabidopsis thaliana
aataacagtgaatccgt

SEQ ID NO: 14077 - DNA, 17 bp, Arabidopsis thaliana
aataaccgctactgcag

SEQ ID NO: 14078 - DNA, 17 bp, Arabidopsis thaliana
aataaccgggtggtctt

SEQ ID NO: 14079 - DNA, 17 bp, Arabidopsis thaliana
aataaccggtgggcgtg

SEQ ID NO: 14080 - DNA, 17 bp, Arabidopsis thaliana
aataacgacacttggtt

SEQ ID NO: 14081 - DNA, 17 bp, Arabidopsis thaliana
aataacgacgataccac

SEQ ID NO: 14082 - DNA, 17 bp, Arabidopsis thaliana
aataacgattgtggcca

SEQ ID NO: 14083 - DNA, 17 bp, Arabidopsis thaliana
aataacgcagcttgtga

SEQ ID NO: 14084 - DNA, 17 bp, Arabidopsis thaliana
aataacgctcaactaac

SEQ ID NO: 14085 - DNA, 17 bp, Arabidopsis thaliana
aataacgctgaactcgc

SEQ ID NO: 14086 - DNA, 17 bp, Arabidopsis thaliana
aataacgggcctgggcg

SEQ ID NO: 14087 - DNA, 17 bp, Arabidopsis thaliana
aataacgtcgtgtggat

SEQ ID NO: 14088 - DNA, 17 bp, Arabidopsis thaliana
aataactagattctgac

SEQ ID NO: 14089 - DNA, 17 bp, Arabidopsis thaliana
aataactatggaccacg

SEQ ID NO: 14090 - DNA, 17 bp, Arabidopsis thaliana
aataactgcacactgtc

SEQ ID NO: 14091 - DNA, 17 bp, Arabidopsis thaliana
aataactggtcctctct

SEQ ID NO: 14092 - DNA, 17 bp, Arabidopsis thaliana
aataactgtcgctgtgt

SEQ ID NO: 14093 - DNA, 17 bp, Arabidopsis thaliana
aataacttctgagcccg

SEQ ID NO: 14094 - DNA, 17 bp, Arabidopsis thaliana
aataactttggaacttg

SEQ ID NO: 14095 - DNA, 17 bp, Arabidopsis thaliana
aataagatacagccacg

SEQ ID NO: 14096 - DNA, 17 bp, Arabidopsis thaliana
aataagatctttaggtc

SEQ ID NO: 14097 - DNA, 17 bp, Arabidopsis thaliana
aataagccagtggtaac

SEQ ID NO: 14098 - DNA, 17 bp, Arabidopsis thaliana
aataagcctgggcacaa

SEQ ID NO: 14099 - DNA, 17 bp, Arabidopsis thaliana
aataagcgaagcccgct

SEQ ID NO: 14100 - DNA, 17 bp, Arabidopsis thaliana
aataagcgtatcgtgac

SEQ ID NO: 14101 - DNA, 17 bp, Arabidopsis thaliana
aataagcgtcggggaaa

SEQ ID NO: 14102 - DNA, 17 bp, Arabidopsis thaliana
aataagctatggatcga

SEQ ID NO: 14103 - DNA, 17 bp, Arabidopsis thaliana
aataagctgctgagtgc

SEQ ID NO: 14104 - DNA, 17 bp, Arabidopsis thaliana
aataagcttgtggcttc

SEQ ID NO: 14105 - DNA, 17 bp, Arabidopsis thaliana
aataaggccctgttcgt

SEQ ID NO: 14106 - DNA, 17 bp, Arabidopsis thaliana
aataaggctccgaatgg

SEQ ID NO: 14107 - DNA, 17 bp, Arabidopsis thaliana
aataagggtctatggtc

SEQ ID NO: 14108 - DNA, 17 bp, Arabidopsis thaliana
aataaggtccaatggac

SEQ ID NO: 14109 - DNA, 17 bp, Arabidopsis thaliana
aataagtcccaactcca

SEQ ID NO: 14110 - DNA, 17 bp, Arabidopsis thaliana
aataagtggtgtcttgg

SEQ ID NO: 14111 - DNA, 17 bp, Arabidopsis thaliana
aataagtgttctacact

SEQ ID NO: 14112 - DNA, 17 bp, Arabidopsis thaliana
aataagttccaactcca

SEQ ID NO: 14113 - DNA, 17 bp, Arabidopsis thaliana
aataagttccaactgca

SEQ ID NO: 14114 - DNA, 17 bp, Arabidopsis thaliana
aataagtttcaactgaa

SEQ ID NO: 14115 - DNA, 17 bp, Arabidopsis thaliana
aataagtttcaactgga

SEQ ID NO: 14116 - DNA, 17 bp, Arabidopsis thaliana
aataatacaactgggcc

SEQ ID NO: 14117 - DNA, 17 bp, Arabidopsis thaliana
aataatattccaaccga

SEQ ID NO: 14118 - DNA, 17 bp, Arabidopsis thaliana
aataatcagtcaatccg

SEQ ID NO: 14119 - DNA, 17 bp, Arabidopsis thaliana
aataatcatcagtttgc

SEQ ID NO: 14120 - DNA, 17 bp, Arabidopsis thaliana
aataatcggcgatttcc

SEQ ID NO: 14121 - DNA, 17 bp, Arabidopsis thaliana
aataatcgggcctgagc

SEQ ID NO: 14122 - DNA, 17 bp, Arabidopsis thaliana
aataatcgtagtgtgaa

SEQ ID NO: 14123 - DNA, 17 bp, Arabidopsis thaliana
aataatctcggcttctc

SEQ ID NO: 14124 - DNA, 17 bp, Arabidopsis thaliana
aataatctcgtccgtct

SEQ ID NO: 14125 - DNA, 17 bp, Arabidopsis thaliana
aataatctctcgacttt

SEQ ID NO: 14126 - DNA, 17 bp, Arabidopsis thaliana
aataatggcgacagggc

SEQ ID NO: 14127 - DNA, 17 bp, Arabidopsis thaliana
aataatggctgccactg

SEQ ID NO: 14128 - DNA, 17 bp, Arabidopsis thaliana
aataatgggtgctcaag

SEQ ID NO: 14129 - DNA, 17 bp, Arabidopsis thaliana
aataatggttcatctca

SEQ ID NO: 14130 - DNA, 17 bp, Arabidopsis thaliana
aataatgtctccatctg

SEQ ID NO: 14131 - DNA, 17 bp, Arabidopsis thaliana
aataatgtgctaacgcc

SEQ ID NO: 14132 - DNA, 17 bp, Arabidopsis thaliana
aataatgttgggccaca

SEQ ID NO: 14133 - DNA, 17 bp, Arabidopsis thaliana
aataattcatgcgagtg

SEQ ID NO: 14134 - DNA, 17 bp, Arabidopsis thaliana
aataattgtcgctgtgt

SEQ ID NO: 14135 - DNA, 17 bp, Arabidopsis thaliana
aatacaaaaccaatgca

SEQ ID NO: 14136 - DNA, 17 bp, Arabidopsis thaliana
aatacaaaccaaaccaa

SEQ ID NO: 14137 - DNA, 17 bp, Arabidopsis thaliana
aatacaacaggtctctg

SEQ ID NO: 14138 - DNA, 17 bp, Arabidopsis thaliana
aatacaagccaaagtgc

SEQ ID NO: 14139 - DNA, 17 bp, Arabidopsis thaliana
aatacaatgaaagtgtc

SEQ ID NO: 14140 - DNA, 17 bp, Arabidopsis thaliana
aatacaattgtgccaag

SEQ ID NO: 14141 - DNA, 17 bp, Arabidopsis thaliana
aatacaccgtttcacta

SEQ ID NO: 14142 - DNA, 17 bp, Arabidopsis thaliana
aatacaccgtttttccg

SEQ ID NO: 14143 - DNA, 17 bp, Arabidopsis thaliana
aatacacgaagccacag

SEQ ID NO: 14144 - DNA, 17 bp, Arabidopsis thaliana
aatacactgtgatctct

SEQ ID NO: 14145 - DNA, 17 bp, Arabidopsis thaliana
aatacaggagttttgcc

SEQ ID NO: 14146 - DNA, 17 bp, Arabidopsis thaliana
aatacaggcggttttcg

SEQ ID NO: 14147 - DNA, 17 bp, Arabidopsis thaliana
aatacaggtaactccat

SEQ ID NO: 14148 - DNA, 17 bp, Arabidopsis thaliana
aatacaggtggcctaac

SEQ ID NO: 14149 - DNA, 17 bp, Arabidopsis thaliana
aatacagttgaaggatc

SEQ ID NO: 14150 - DNA, 17 bp, Arabidopsis thaliana
aatacagttgaaggtcc

SEQ ID NO: 14151 - DNA, 17 bp, Arabidopsis thaliana
aatacagttgaaggttc

SEQ ID NO: 14152 - DNA, 17 bp, Arabidopsis thaliana
aatacagttttggaata

SEQ ID NO: 14153 - DNA, 17 bp, Arabidopsis thaliana
aatacagttttggaatg

SEQ ID NO: 14154 - DNA, 17 bp, Arabidopsis thaliana
aatacatatgtggatcg

SEQ ID NO: 14155 - DNA, 17 bp, Arabidopsis thaliana
aatacatctacttccgg

SEQ ID NO: 14156 - DNA, 17 bp, Arabidopsis thaliana
aatacatgcttaagccg

SEQ ID NO: 14157 - DNA, 17 bp, Arabidopsis thaliana
aataccagctctgatgg

SEQ ID NO: 14158 - DNA, 17 bp, Arabidopsis thaliana
aataccaggaggttctg

SEQ ID NO: 14159 - DNA, 17 bp, Arabidopsis thaliana
aataccaggaggttttg

SEQ ID NO: 14160 - DNA, 17 bp, Arabidopsis thaliana
aataccaggagtgccgg

SEQ ID NO: 14161 - DNA, 17 bp, Arabidopsis thaliana
aataccaggagtttttg

SEQ ID NO: 14162 - DNA, 17 bp, Arabidopsis thaliana
aataccagtcaatgctt

SEQ ID NO: 14163 - DNA, 17 bp, Arabidopsis thaliana
aataccagttaccacgc

SEQ ID NO: 14164 - DNA, 17 bp, Arabidopsis thaliana
aatacccacgagtatcg

SEQ ID NO: 14165 - DNA, 17 bp, Arabidopsis thaliana
aataccccgctagtccg

SEQ ID NO: 14166 - DNA, 17 bp, Arabidopsis thaliana
aatacccgcaaaaggat

SEQ ID NO: 14167 - DNA, 17 bp, Arabidopsis thaliana
aatacccgggctcagac

SEQ ID NO: 14168 - DNA, 17 bp, Arabidopsis thaliana
aatacccgtgggtaccc

SEQ ID NO: 14169 - DNA, 17 bp, Arabidopsis thaliana
aataccgaaaggcgatt

SEQ ID NO: 14170 - DNA, 17 bp, Arabidopsis thaliana
aataccgacgtcaagat

SEQ ID NO: 14171 - DNA, 17 bp, Arabidopsis thaliana
aataccgcaccgagcta

SEQ ID NO: 14172 - DNA, 17 bp, Arabidopsis thaliana
aataccgccaaactttt

SEQ ID NO: 14173 - DNA, 17 bp, Arabidopsis thaliana
aataccggaactcttgg

SEQ ID NO: 14174 - DNA, 17 bp, Arabidopsis thaliana
aataccggacagttctg

SEQ ID NO: 14175 - DNA, 17 bp, Arabidopsis thaliana
aataccgggttgatttg

SEQ ID NO: 14176 - DNA, 17 bp, Arabidopsis thaliana
aatacgaaccgtcaaag

SEQ ID NO: 14177 - DNA, 17 bp, Arabidopsis thaliana
aatacgaaccgtgaaag

SEQ ID NO: 14178 - DNA, 17 bp, Arabidopsis thaliana
aatacgaccttgactga

SEQ ID NO: 14179 - DNA, 17 bp, Arabidopsis thaliana
aatacgactactccctc

SEQ ID NO: 14180 - DNA, 17 bp, Arabidopsis thaliana
aatacgattctactcag

SEQ ID NO: 14181 - DNA, 17 bp, Arabidopsis thaliana
aatacgcaagttgcgcc

SEQ ID NO: 14182 - DNA, 17 bp, Arabidopsis thaliana
aatacgcacaccatgcc

SEQ ID NO: 14183 - DNA, 17 bp, Arabidopsis thaliana
aatacgcctttaagatc

SEQ ID NO: 14184 - DNA, 17 bp, Arabidopsis thaliana
aatacgcgacggggtac

SEQ ID NO: 14185 - DNA, 17 bp, Arabidopsis thaliana
aatacgcgacggggtat

SEQ ID NO: 14186 - DNA, 17 bp, Arabidopsis thaliana
aatacgcggattacggt

SEQ ID NO: 14187 - DNA, 17 bp, Arabidopsis thaliana
aatacgctcaccatgcc

SEQ ID NO: 14188 - DNA, 17 bp, Arabidopsis thaliana
aatacgctcattgcggc

SEQ ID NO: 14189 - DNA, 17 bp, Arabidopsis thaliana
aatacgcttgatccaca

SEQ ID NO: 14190 - DNA, 17 bp, Arabidopsis thaliana
aatacgctttcagattc

SEQ ID NO: 14191 - DNA, 17 bp, Arabidopsis thaliana
aatacgggacgacatac

SEQ ID NO: 14192 - DNA, 17 bp, Arabidopsis thaliana
aatacgggcttctgcaa

SEQ ID NO: 14193 - DNA, 17 bp, Arabidopsis thaliana
aatacgggtttggcagg

SEQ ID NO: 14194 - DNA, 17 bp, Arabidopsis thaliana
aatacggtgcggttcag

SEQ ID NO: 14195 - DNA, 17 bp, Arabidopsis thaliana
aatacggttacggtcca

SEQ ID NO: 14196 - DNA, 17 bp, Arabidopsis thaliana
aatacgtaaacttttag

SEQ ID NO: 14197 - DNA, 17 bp, Arabidopsis thaliana
aatacgtgaatttttgg

SEQ ID NO: 14198 - DNA, 17 bp, Arabidopsis thaliana
aatactaaacgcttccg

SEQ ID NO: 14199 - DNA, 17 bp, Arabidopsis thaliana
aatactaagggtagtca

SEQ ID NO: 14200 - DNA, 17 bp, Arabidopsis thaliana
aatactaatcgactggg

SEQ ID NO: 14201 - DNA, 17 bp, Arabidopsis thaliana
aatactaatcggtcgag

SEQ ID NO: 14202 - DNA, 17 bp, Arabidopsis thaliana
aatactaatggcttgtg

SEQ ID NO: 14203 - DNA, 17 bp, Arabidopsis thaliana
aatactaccagcgccta

SEQ ID NO: 14204 - DNA, 17 bp, Arabidopsis thaliana
aatactagaaggttctg

SEQ ID NO: 14205 - DNA, 17 bp, Arabidopsis thaliana
aatactagataaggtcc

SEQ ID NO: 14206 - DNA, 17 bp, Arabidopsis thaliana
aatactaggaggttctg

SEQ ID NO: 14207 - DNA, 17 bp, Arabidopsis thaliana
aatactaggaggttttg

SEQ ID NO: 14208 - DNA, 17 bp, Arabidopsis thaliana
aatactaggatatgacc

SEQ ID NO: 14209 - DNA, 17 bp, Arabidopsis thaliana
aatactagggtaaatta

SEQ ID NO: 14210 - DNA, 17 bp, Arabidopsis thaliana
aatactaggtgatcacc

SEQ ID NO: 14211 - DNA, 17 bp, Arabidopsis thaliana
aatactccatctcatcc

SEQ ID NO: 14212 - DNA, 17 bp, Arabidopsis thaliana
aatactccgctttgaca

SEQ ID NO: 14213 - DNA, 17 bp, Arabidopsis thaliana
aatactcgaacgggtct

SEQ ID NO: 14214 - DNA, 17 bp, Arabidopsis thaliana
aatactcgagcagattc

SEQ ID NO: 14215 - DNA, 17 bp, Arabidopsis thaliana
aatactcggatcaaagt

SEQ ID NO: 14216 - DNA, 17 bp, Arabidopsis thaliana
aatactctagtccgact

SEQ ID NO: 14217 - DNA, 17 bp, Arabidopsis thaliana
aatactctgcagcataa

SEQ ID NO: 14218 - DNA, 17 bp, Arabidopsis thaliana
aatactgaccaaccgta

SEQ ID NO: 14219 - DNA, 17 bp, Arabidopsis thaliana
aatactgcaatgccatt

SEQ ID NO: 14220 - DNA, 17 bp, Arabidopsis thaliana
aatactgcagtgtagcg

SEQ ID NO: 14221 - DNA, 17 bp, Arabidopsis thaliana
aatactgcggggcggag

SEQ ID NO: 14222 - DNA, 17 bp, Arabidopsis thaliana
aatactgctgattgccg

SEQ ID NO: 14223 - DNA, 17 bp, Arabidopsis thaliana
aatactggctaagttct

SEQ ID NO: 14224 - DNA, 17 bp, Arabidopsis thaliana
aatactggctaagttgt

SEQ ID NO: 14225 - DNA, 17 bp, Arabidopsis thaliana
aatactggtggagtctt

SEQ ID NO: 14226 - DNA, 17 bp, Arabidopsis thaliana
aatactgtggctccgaa

SEQ ID NO: 14227 - DNA, 17 bp, Arabidopsis thaliana
aatacttagaccatctc

SEQ ID NO: 14228 - DNA, 17 bp, Arabidopsis thaliana
aatacttagtgaggcaa

SEQ ID NO: 14229 - DNA, 17 bp, Arabidopsis thaliana
aatacttcagagtggac

SEQ ID NO: 14230 - DNA, 17 bp, Arabidopsis thaliana
aatacttcgagatcaga

SEQ ID NO: 14231 - DNA, 17 bp, Arabidopsis thaliana
aatacttcgagatcgga

SEQ ID NO: 14232 - DNA, 17 bp, Arabidopsis thaliana
aatacttggacccggtc

SEQ ID NO: 14233 - DNA, 17 bp, Arabidopsis thaliana
aatacttggcccgccga

SEQ ID NO: 14234 - DNA, 17 bp, Arabidopsis thaliana
aatacttggggctaccg

SEQ ID NO: 14235 - DNA, 17 bp, Arabidopsis thaliana
aatacttttgactgttg

SEQ ID NO: 14236 - DNA, 17 bp, Arabidopsis thaliana
aatagaatctgacactg

SEQ ID NO: 14237 - DNA, 17 bp, Arabidopsis thaliana
aatagacatgccgttat

SEQ ID NO: 14238 - DNA, 17 bp, Arabidopsis thaliana
aatagaccaaacggtcg

SEQ ID NO: 14239 - DNA, 17 bp, Arabidopsis thaliana
aatagaccaacgtgtag

SEQ ID NO: 14240 - DNA, 17 bp, Arabidopsis thaliana
aatagaccgtttgaccg

SEQ ID NO: 14241 - DNA, 17 bp, Arabidopsis thaliana
aatagaccgtttttctg

SEQ ID NO: 14242 - DNA, 17 bp, Arabidopsis thaliana
aatagacctctcatctc

SEQ ID NO: 14243 - DNA, 17 bp, Arabidopsis thaliana
aatagacgacggttcgg

SEQ ID NO: 14244 - DNA, 17 bp, Arabidopsis thaliana
aatagagaccatgtcca

SEQ ID NO: 14245 - DNA, 17 bp, Arabidopsis thaliana
aatagagatttctgcag

SEQ ID NO: 14246 - DNA, 17 bp, Arabidopsis thaliana
aatagagatttgtggct

SEQ ID NO: 14247 - DNA, 17 bp, Arabidopsis thaliana
aatagagcgggaaatac

SEQ ID NO: 14248 - DNA, 17 bp, Arabidopsis thaliana
aatagagctccacctgg

SEQ ID NO: 14249 - DNA, 17 bp, Arabidopsis thaliana
aatagagttggtccaca

SEQ ID NO: 14250 - DNA, 17 bp, Arabidopsis thaliana
aatagagttgtctgcga

SEQ ID NO: 14251 - DNA, 17 bp, Arabidopsis thaliana
aatagataccaccattg

SEQ ID NO: 14252 - DNA, 17 bp, Arabidopsis thaliana
aatagatagcagcctgg

SEQ ID NO: 14253 - DNA, 17 bp, Arabidopsis thaliana
aatagatcactttgggg

SEQ ID NO: 14254 - DNA, 17 bp, Arabidopsis thaliana
aatagatctgcaggttt

SEQ ID NO: 14255 - DNA, 17 bp, Arabidopsis thaliana
aatagatcttgttggtg

SEQ ID NO: 14256 - DNA, 17 bp, Arabidopsis thaliana
aatagattcgcgttgca

SEQ ID NO: 14257 - DNA, 17 bp, Arabidopsis thaliana
aatagccatggtgtcag

SEQ ID NO: 14258 - DNA, 17 bp, Arabidopsis thaliana
aatagccctttcctctt

SEQ ID NO: 14259 - DNA, 17 bp, Arabidopsis thaliana
aatagcccttttccctc

SEQ ID NO: 14260 - DNA, 17 bp, Arabidopsis thaliana
aatagcccttttccctt

SEQ ID NO: 14261 - DNA, 17 bp, Arabidopsis thaliana
aatagccgctggtcgag

SEQ ID NO: 14262 - DNA, 17 bp, Arabidopsis thaliana
aatagcggactgaaacg

SEQ ID NO: 14263 - DNA, 17 bp, Arabidopsis thaliana
aatagcggctcatcccc

SEQ ID NO: 14264 - DNA, 17 bp, Arabidopsis thaliana
aatagcggctttggacg

SEQ ID NO: 14265 - DNA, 17 bp, Arabidopsis thaliana
aatagcgggtaccggac

SEQ ID NO: 14266 - DNA, 17 bp, Arabidopsis thaliana
aataggagtggcaccgt

SEQ ID NO: 14267 - DNA, 17 bp, Arabidopsis thaliana
aataggcgctccgacta

SEQ ID NO: 14268 - DNA, 17 bp, Arabidopsis thaliana
aataggcgggttttggt

SEQ ID NO: 14269 - DNA, 17 bp, Arabidopsis thaliana
aataggcgttgactcat

SEQ ID NO: 14270 - DNA, 17 bp, Arabidopsis thaliana
aatagggcacgtctgcc

SEQ ID NO: 14271 - DNA, 17 bp, Arabidopsis thaliana
aatagggctccgtttgt

SEQ ID NO: 14272 - DNA, 17 bp, Arabidopsis thaliana
aataggtagcacgtgtc

SEQ ID NO: 14273 - DNA, 17 bp, Arabidopsis thaliana
aataggtaggacgtgtc

SEQ ID NO: 14274 - DNA, 17 bp, Arabidopsis thaliana
aataggtcttttcgtga

SEQ ID NO: 14275 - DNA, 17 bp, Arabidopsis thaliana
aataggtggacgtgtcg

SEQ ID NO: 14276 - DNA, 17 bp, Arabidopsis thaliana
aataggtggagaggccg

SEQ ID NO: 14277 - DNA, 17 bp, Arabidopsis thaliana
aataggtggagaggcct

SEQ ID NO: 14278 - DNA, 17 bp, Arabidopsis thaliana
aataggtggagaggtaa

SEQ ID NO: 14279 - DNA, 17 bp, Arabidopsis thaliana
aataggtgttgcgttta

SEQ ID NO: 14280 - DNA, 17 bp, Arabidopsis thaliana
aataggttttcggccca

SEQ ID NO: 14281 - DNA, 17 bp, Arabidopsis thaliana
aatagtaattgcgtttt

SEQ ID NO: 14282 - DNA, 17 bp, Arabidopsis thaliana
aatagtcattcgtcggg

SEQ ID NO: 14283 - DNA, 17 bp, Arabidopsis thaliana
aatagtccaattgggca

SEQ ID NO: 14284 - DNA, 17 bp, Arabidopsis thaliana
aatagtcctcactacgg

SEQ ID NO: 14285 - DNA, 17 bp, Arabidopsis thaliana
aatagtctctcacatgg

SEQ ID NO: 14286 - DNA, 17 bp, Arabidopsis thaliana
aatagtcttgtttgcag

SEQ ID NO: 14287 - DNA, 17 bp, Arabidopsis thaliana
aatagtgagtcgatttg

SEQ ID NO: 14288 - DNA, 17 bp, Arabidopsis thaliana
aatagtgcctgggagag

SEQ ID NO: 14289 - DNA, 17 bp, Arabidopsis thaliana
aatagtggaatccttga

SEQ ID NO: 14290 - DNA, 17 bp, Arabidopsis thaliana
aatagtgggatccttga

SEQ ID NO: 14291 - DNA, 17 bp, Arabidopsis thaliana
aatagtttccgtcagaa

SEQ ID NO: 14292 - DNA, 17 bp, Arabidopsis thaliana
aatagtttcggactctc

SEQ ID NO: 14293 - DNA, 17 bp, Arabidopsis thaliana
aatagtttctcgaatgt

SEQ ID NO: 14294 - DNA, 17 bp, Arabidopsis thaliana
aatagttttccaaagtt

SEQ ID NO: 14295 - DNA, 17 bp, Arabidopsis thaliana
aatataagccccaatta

SEQ ID NO: 14296 - DNA, 17 bp, Arabidopsis thaliana
aatataagcctacctgc

SEQ ID NO: 14297 - DNA, 17 bp, Arabidopsis thaliana
aatataaggagggatag

SEQ ID NO: 14298 - DNA, 17 bp, Arabidopsis thaliana
aatatagacctatccaa

SEQ ID NO: 14299 - DNA, 17 bp, Arabidopsis thaliana
aatatagacctgtccaa

SEQ ID NO: 14300 - DNA, 17 bp, Arabidopsis thaliana
aatataggccccaatta

SEQ ID NO: 14301 - DNA, 17 bp, Arabidopsis thaliana
aatataggctccaatta

SEQ ID NO: 14302 - DNA, 17 bp, Arabidopsis thaliana
aatatagttccgcggtg

SEQ ID NO: 14303 - DNA, 17 bp, Arabidopsis thaliana
aatatcaatccaaaccg

SEQ ID NO: 14304 - DNA, 17 bp, Arabidopsis thaliana
aatatcactgctgggca

SEQ ID NO: 14305 - DNA, 17 bp, Arabidopsis thaliana
aatatcaggaggttttg

SEQ ID NO: 14306 - DNA, 17 bp, Arabidopsis thaliana
aatatcagggctgacca

SEQ ID NO: 14307 - DNA, 17 bp, Arabidopsis thaliana
aatatcatctgcagggg

SEQ ID NO: 14308 - DNA, 17 bp, Arabidopsis thaliana
aatatccatcgtgggcc

SEQ ID NO: 14309 - DNA, 17 bp, Arabidopsis thaliana
aatatccgaccagttta

SEQ ID NO: 14310 - DNA, 17 bp, Arabidopsis thaliana
aatatccgatccgaatt

SEQ ID NO: 14311 - DNA, 17 bp, Arabidopsis thaliana
aatatccgccggtatgt

SEQ ID NO: 14312 - DNA, 17 bp, Arabidopsis thaliana
aatatccgccggtttat

SEQ ID NO: 14313 - DNA, 17 bp, Arabidopsis thaliana
aatatccgccggtttgt

SEQ ID NO: 14314 - DNA, 17 bp, Arabidopsis thaliana
aatatccgcggttcagg

SEQ ID NO: 14315 - DNA, 17 bp, Arabidopsis thaliana
aatatccgctttgatcc

SEQ ID NO: 14316 - DNA, 17 bp, Arabidopsis thaliana
aatatccggttcctgaa

SEQ ID NO: 14317 - DNA, 17 bp, Arabidopsis thaliana
aatatccgtcgggattg

SEQ ID NO: 14318 - DNA, 17 bp, Arabidopsis thaliana
aatatccgtttgcggtt

SEQ ID NO: 14319 - DNA, 17 bp, Arabidopsis thaliana
aatatcctctggacccg

SEQ ID NO: 14320 - DNA, 17 bp, Arabidopsis thaliana
aatatcgacccaaatca

SEQ ID NO: 14321 - DNA, 17 bp, Arabidopsis thaliana
aatatcgacccaaatcc

SEQ ID NO: 14322 - DNA, 17 bp, Arabidopsis thaliana
aatatcgactcaaatcc

SEQ ID NO: 14323 - DNA, 17 bp, Arabidopsis thaliana
aatatcgactttgttga

SEQ ID NO: 14324 - DNA, 17 bp, Arabidopsis thaliana
aatatcggagccttttg

SEQ ID NO: 14325 - DNA, 17 bp, Arabidopsis thaliana
aatatcggatgtctcag

SEQ ID NO: 14326 - DNA, 17 bp, Arabidopsis thaliana
aatatcgggaagcacac

SEQ ID NO: 14327 - DNA, 17 bp, Arabidopsis thaliana
aatatcgtagcccgctt

SEQ ID NO: 14328 - DNA, 17 bp, Arabidopsis thaliana
aatatcgtgctttgctt

SEQ ID NO: 14329 - DNA, 17 bp, Arabidopsis thaliana
aatatcgttatgatcgg

SEQ ID NO: 14330 - DNA, 17 bp, Arabidopsis thaliana
aatatctcaaccggaat

SEQ ID NO: 14331 - DNA, 17 bp, Arabidopsis thaliana
aatatctctcgggattg

SEQ ID NO: 14332 - DNA, 17 bp, Arabidopsis thaliana
aatatctctgcggtttg

SEQ ID NO: 14333 - DNA, 17 bp, Arabidopsis thaliana
aatatctgccatctttc

SEQ ID NO: 14334 - DNA, 17 bp, Arabidopsis thaliana
aatatctgccatctttg

SEQ ID NO: 14335 - DNA, 17 bp, Arabidopsis thaliana
aatatctggaccgagag

SEQ ID NO: 14336 - DNA, 17 bp, Arabidopsis thaliana
aatatcttcgcagaaat

SEQ ID NO: 14337 - DNA, 17 bp, Arabidopsis thaliana
aatatcttgcggactca

SEQ ID NO: 14338 - DNA, 17 bp, Arabidopsis thaliana
aatatgaagcggtttaa

SEQ ID NO: 14339 - DNA, 17 bp, Arabidopsis thaliana
aatatgaagcggtttcg

SEQ ID NO: 14340 - DNA, 17 bp, Arabidopsis thaliana
aatatgacattctcgtg

SEQ ID NO: 14341 - DNA, 17 bp, Arabidopsis thaliana
aatatgagcccgagtct

SEQ ID NO: 14342 - DNA, 17 bp, Arabidopsis thaliana
aatatgagcctcatgtg

SEQ ID NO: 14343 - DNA, 17 bp, Arabidopsis thaliana
aatatgatcttacggtt

SEQ ID NO: 14344 - DNA, 17 bp, Arabidopsis thaliana
aatatgccaaatgactg

SEQ ID NO: 14345 - DNA, 17 bp, Arabidopsis thaliana
aatatggactggaccgc

SEQ ID NO: 14346 - DNA, 17 bp, Arabidopsis thaliana
aatatgggatggtatac

SEQ ID NO: 14347 - DNA, 17 bp, Arabidopsis thaliana
aatatgggcttgaccgt

SEQ ID NO: 14348 - DNA, 17 bp, Arabidopsis thaliana
aatatggtatcagagcc

SEQ ID NO: 14349 - DNA, 17 bp, Arabidopsis thaliana
aatatggtccgcgctta

SEQ ID NO: 14350 - DNA, 17 bp, Arabidopsis thaliana
aatatgttctgcccttt

SEQ ID NO: 14351 - DNA, 17 bp, Arabidopsis thaliana
aatatgttttacttatg

SEQ ID NO: 14352 - DNA, 17 bp, Arabidopsis thaliana
aatattaagacaggaac

SEQ ID NO: 14353 - DNA, 17 bp, Arabidopsis thaliana
aatattaatccgctgtg

SEQ ID NO: 14354 - DNA, 17 bp, Arabidopsis thaliana
aatattacatgctggtc

SEQ ID NO: 14355 - DNA, 17 bp, Arabidopsis thaliana
aatattacatgctgtga

SEQ ID NO: 14356 - DNA, 17 bp, Arabidopsis thaliana
aatattacctcatcagg

SEQ ID NO: 14357 - DNA, 17 bp, Arabidopsis thaliana
aatattacgctggtctt

SEQ ID NO: 14358 - DNA, 17 bp, Arabidopsis thaliana
aatattaggacacggaa

SEQ ID NO: 14359 - DNA, 17 bp, Arabidopsis thaliana
aatattaggattcatcc

SEQ ID NO: 14360 - DNA, 17 bp, Arabidopsis thaliana
aatattagtttcgtccc

SEQ ID NO: 14361 - DNA, 17 bp, Arabidopsis thaliana
aatattcagatcaggtg

SEQ ID NO: 14362 - DNA, 17 bp, Arabidopsis thaliana
aatattccgtcgactgc

SEQ ID NO: 14363 - DNA, 17 bp, Arabidopsis thaliana
aatattccgttcgcact

SEQ ID NO: 14364 - DNA, 17 bp, Arabidopsis thaliana
aatattccgttcgtact

SEQ ID NO: 14365 - DNA, 17 bp, Arabidopsis thaliana
aatattcctgaacttgg

SEQ ID NO: 14366 - DNA, 17 bp, Arabidopsis thaliana
aatattccttgcttgtg

SEQ ID NO: 14367 - DNA, 17 bp, Arabidopsis thaliana
aatattcgcttcgtgcc

SEQ ID NO: 14368 - DNA, 17 bp, Arabidopsis thaliana
aatattcggttcaggtc

SEQ ID NO: 14369 - DNA, 17 bp, Arabidopsis thaliana
aatattcggttcgggtc

SEQ ID NO: 14370 - DNA, 17 bp, Arabidopsis thaliana
aatattcggttctggtt

SEQ ID NO: 14371 - DNA, 17 bp, Arabidopsis thaliana
aatattcgtatgcgttg

SEQ ID NO: 14372 - DNA, 17 bp, Arabidopsis thaliana
aatattctccaacaggc

SEQ ID NO: 14373 - DNA, 17 bp, Arabidopsis thaliana
aatattctgggctgaag

SEQ ID NO: 14374 - DNA, 17 bp, Arabidopsis thaliana
aatattctgtagtccgg

SEQ ID NO: 14375 - DNA, 17 bp, Arabidopsis thaliana
aatattcttagctggac

SEQ ID NO: 14376 - DNA, 17 bp, Arabidopsis thaliana
aatattcttcggaatag

SEQ ID NO: 14377 - DNA, 17 bp, Arabidopsis thaliana
aatattctttcgatccc

SEQ ID NO: 14378 - DNA, 17 bp, Arabidopsis thaliana
aatattgaccaacaccc

SEQ ID NO: 14379 - DNA, 17 bp, Arabidopsis thaliana
aatattgaccaacatcc

SEQ ID NO: 14380 - DNA, 17 bp, Arabidopsis thaliana
aatattgacctacaccc

SEQ ID NO: 14381 - DNA, 17 bp, Arabidopsis thaliana
aatattgcgaggcattt

SEQ ID NO: 14382 - DNA, 17 bp, Arabidopsis thaliana
aatattggaatgatcgc

SEQ ID NO: 14383 - DNA, 17 bp, Arabidopsis thaliana
aatattggcaagacccg

SEQ ID NO: 14384 - DNA, 17 bp, Arabidopsis thaliana
aatattgtgcgaccgaa

SEQ ID NO: 14385 - DNA, 17 bp, Arabidopsis thaliana
aatattgtgtggatctc

SEQ ID NO: 14386 - DNA, 17 bp, Arabidopsis thaliana
aatattgtgtgttaggg

SEQ ID NO: 14387 - DNA, 17 bp, Arabidopsis thaliana
aatattgttgcaactag

SEQ ID NO: 14388 - DNA, 17 bp, Arabidopsis thaliana
aatatttaatttcaccg

SEQ ID NO: 14389 - DNA, 17 bp, Arabidopsis thaliana
aatatttatgggtctgc

SEQ ID NO: 14390 - DNA, 17 bp, Arabidopsis thaliana
aatatttcattccgagc

SEQ ID NO: 14391 - DNA, 17 bp, Arabidopsis thaliana
aatatttccagctgctg

SEQ ID NO: 14392 - DNA, 17 bp, Arabidopsis thaliana
aatatttgtggaagttg

SEQ ID NO: 14393 - DNA, 17 bp, Arabidopsis thaliana
aatattttcagttgcca

SEQ ID NO: 14394 - DNA, 17 bp, Arabidopsis thaliana
aatattttccgctgtca

SEQ ID NO: 14395 - DNA, 17 bp, Arabidopsis thaliana
aatattttccgtcgttt

SEQ ID NO: 14396 - DNA, 17 bp, Arabidopsis thaliana
aatattttcggttgcca

SEQ ID NO: 14397 - DNA, 17 bp, Arabidopsis thaliana
aatcaaaaaacagggct

SEQ ID NO: 14398 - DNA, 17 bp, Arabidopsis thaliana
aatcaaaaaagcagatc

SEQ ID NO: 14399 - DNA, 17 bp, Arabidopsis thaliana
aatcaaaaaagctgctt

SEQ ID NO: 14400 - DNA, 17 bp, Arabidopsis thaliana
aatcaaaaatcaggctt

SEQ ID NO: 14401 - DNA, 17 bp, Arabidopsis thaliana
aatcaaaatgcgggatt

SEQ ID NO: 14402 - DNA, 17 bp, Arabidopsis thaliana
aatcaaaattccagtgg

SEQ ID NO: 14403 - DNA, 17 bp, Arabidopsis thaliana
aatcaaacccctaagtt

SEQ ID NO: 14404 - DNA, 17 bp, Arabidopsis thaliana
aatcaaacccgtcaatt

SEQ ID NO: 14405 - DNA, 17 bp, Arabidopsis thaliana
aatcaaacgaacagggc

SEQ ID NO: 14406 - DNA, 17 bp, Arabidopsis thaliana
aatcaaacgattgtggg

SEQ ID NO: 14407 - DNA, 17 bp, Arabidopsis thaliana
aatcaaacgcgtttctg

SEQ ID NO: 14408 - DNA, 17 bp, Arabidopsis thaliana
aatcaaactattggcca

SEQ ID NO: 14409 - DNA, 17 bp, Arabidopsis thaliana
aatcaaacttaatcgtt

SEQ ID NO: 14410 - DNA, 17 bp, Arabidopsis thaliana
aatcaaagccctccgtc

SEQ ID NO: 14411 - DNA, 17 bp, Arabidopsis thaliana
aatcaaagtcctacgct

SEQ ID NO: 14412 - DNA, 17 bp, Arabidopsis thaliana
aatcaaagtttttgggt

SEQ ID NO: 14413 - DNA, 17 bp, Arabidopsis thaliana
aatcaaatcgtgccttt

SEQ ID NO: 14414 - DNA, 17 bp, Arabidopsis thaliana
aatcaaatctaatggcg

SEQ ID NO: 14415 - DNA, 17 bp, Arabidopsis thaliana
aatcaaatctgctggca

SEQ ID NO: 14416 - DNA, 17 bp, Arabidopsis thaliana
aatcaaattcaggcccg

SEQ ID NO: 14417 - DNA, 17 bp, Arabidopsis thaliana
aatcaaattctaaaggt

SEQ ID NO: 14418 - DNA, 17 bp, Arabidopsis thaliana
aatcaaatttcgaagtt

SEQ ID NO: 14419 - DNA, 17 bp, Arabidopsis thaliana
aatcaacacggcctgcc

SEQ ID NO: 14420 - DNA, 17 bp, Arabidopsis thaliana
aatcaacagtcccaaag

SEQ ID NO: 14421 - DNA, 17 bp, Arabidopsis thaliana
aatcaacattcctcaga

SEQ ID NO: 14422 - DNA, 17 bp, Arabidopsis thaliana
aatcaaccgatgtagat

SEQ ID NO: 14423 - DNA, 17 bp, Arabidopsis thaliana
aatcaaccgtctcggag

SEQ ID NO: 14424 - DNA, 17 bp, Arabidopsis thaliana
aatcaacgaactgcaga

SEQ ID NO: 14425 - DNA, 17 bp, Arabidopsis thaliana
aatcaacgagcttaggt

SEQ ID NO: 14426 - DNA, 17 bp, Arabidopsis thaliana
aatcaacggatctctag

SEQ ID NO: 14427 - DNA, 17 bp, Arabidopsis thaliana
aatcaacgggtttgggg

SEQ ID NO: 14428 - DNA, 17 bp, Arabidopsis thaliana
aatcaacgtccaagttc

SEQ ID NO: 14429 - DNA, 17 bp, Arabidopsis thaliana
aatcaacgtcgtgacca

SEQ ID NO: 14430 - DNA, 17 bp, Arabidopsis thaliana
aatcaactaaagttgga

SEQ ID NO: 14431 - DNA, 17 bp, Arabidopsis thaliana
aatcaactctgtgcgat

SEQ ID NO: 14432 - DNA, 17 bp, Arabidopsis thaliana
aatcaactctgtgcggt

SEQ ID NO: 14433 - DNA, 17 bp, Arabidopsis thaliana
aatcaactctttggtgc

SEQ ID NO: 14434 - DNA, 17 bp, Arabidopsis thaliana
aatcaacttttagaccg

SEQ ID NO: 14435 - DNA, 17 bp, Arabidopsis thaliana
aatcaagaacatcgtcc

SEQ ID NO: 14436 - DNA, 17 bp, Arabidopsis thaliana
aatcaagaatgactagg

SEQ ID NO: 14437 - DNA, 17 bp, Arabidopsis thaliana
aatcaagactcatgctg

SEQ ID NO: 14438 - DNA, 17 bp, Arabidopsis thaliana
aatcaagatgagtggcc

SEQ ID NO: 14439 - DNA, 17 bp, Arabidopsis thaliana
aatcaagccatatgact

SEQ ID NO: 14440 - DNA, 17 bp, Arabidopsis thaliana
aatcaagcccgttcaag

SEQ ID NO: 14441 - DNA, 17 bp, Arabidopsis thaliana
aatcaagccgccattgt

SEQ ID NO: 14442 - DNA, 17 bp, Arabidopsis thaliana
aatcaagccttgcgatt

SEQ ID NO: 14443 - DNA, 17 bp, Arabidopsis thaliana
aatcaagcggtacggag

SEQ ID NO: 14444 - DNA, 17 bp, Arabidopsis thaliana
aatcaagcttcctgcct

SEQ ID NO: 14445 - DNA, 17 bp, Arabidopsis thaliana
aatcaaggaagcttcgg

SEQ ID NO: 14446 - DNA, 17 bp, Arabidopsis thaliana
aatcaaggagtgccaaa

SEQ ID NO: 14447 - DNA, 17 bp, Arabidopsis thaliana
aatcaagggcgttgtgt

SEQ ID NO: 14448 - DNA, 17 bp, Arabidopsis thaliana
aatcaagtccgcgaacg

SEQ ID NO: 14449 - DNA, 17 bp, Arabidopsis thaliana
aatcaagtgatatggct

SEQ ID NO: 14450 - DNA, 17 bp, Arabidopsis thaliana
aatcaagtgctgtgtga

SEQ ID NO: 14451 - DNA, 17 bp, Arabidopsis thaliana
aatcaagtgctgtgtgg

SEQ ID NO: 14452 - DNA, 17 bp, Arabidopsis thaliana
aatcaagttgcgttcgc

SEQ ID NO: 14453 - DNA, 17 bp, Arabidopsis thaliana
aatcaagttttgcagga

SEQ ID NO: 14454 - DNA, 17 bp, Arabidopsis thaliana
aatcaataaaaacctac

SEQ ID NO: 14455 - DNA, 17 bp, Arabidopsis thaliana
aatcaataaaatgggct

SEQ ID NO: 14456 - DNA, 17 bp, Arabidopsis thaliana
aatcaatccggaggacc

SEQ ID NO: 14457 - DNA, 17 bp, Arabidopsis thaliana
aatcaatccgtcagcgg

SEQ ID NO: 14458 - DNA, 17 bp, Arabidopsis thaliana
aatcaatctccaaatcc

SEQ ID NO: 14459 - DNA, 17 bp, Arabidopsis thaliana
aatcaatctcccaatcc

SEQ ID NO: 14460 - DNA, 17 bp, Arabidopsis thaliana
aatcaatctcctaccgg

SEQ ID NO: 14461 - DNA, 17 bp, Arabidopsis thaliana
aatcaatctcctcgcgg

SEQ ID NO: 14462 - DNA, 17 bp, Arabidopsis thaliana
aatcaatctgctttgac

SEQ ID NO: 14463 - DNA, 17 bp, Arabidopsis thaliana
aatcaatgacctcccat

SEQ ID NO: 14464 - DNA, 17 bp, Arabidopsis thaliana
aatcaatgcctagcgcc

SEQ ID NO: 14465 - DNA, 17 bp, Arabidopsis thaliana
aatcaatgcctatcaag

SEQ ID NO: 14466 - DNA, 17 bp, Arabidopsis thaliana
aatcaattgggccacca

SEQ ID NO: 14467 - DNA, 17 bp, Arabidopsis thaliana
aatcaattggggtcgag

SEQ ID NO: 14468 - DNA, 17 bp, Arabidopsis thaliana
aatcaattgtcgcagcc

SEQ ID NO: 14469 - DNA, 17 bp, Arabidopsis thaliana
aatcaatttggcccggt

SEQ ID NO: 14470 - DNA, 17 bp, Arabidopsis thaliana
aatcacaagccgccatg

SEQ ID NO: 14471 - DNA, 17 bp, Arabidopsis thaliana
aatcacaagctgccatg

SEQ ID NO: 14472 - DNA, 17 bp, Arabidopsis thaliana
aatcacacagctgggtt

SEQ ID NO: 14473 - DNA, 17 bp, Arabidopsis thaliana
aatcacagacagtctct

SEQ ID NO: 14474 - DNA, 17 bp, Arabidopsis thaliana
aatcacagatctctcat

SEQ ID NO: 14475 - DNA, 17 bp, Arabidopsis thaliana
aatcacaggacttcaga

SEQ ID NO: 14476 - DNA, 17 bp, Arabidopsis thaliana
aatcacaggtttatgtt

SEQ ID NO: 14477 - DNA, 17 bp, Arabidopsis thaliana
aatcaccaactttcgcc

SEQ ID NO: 14478 - DNA, 17 bp, Arabidopsis thaliana
aatcaccaactttcggc

SEQ ID NO: 14479 - DNA, 17 bp, Arabidopsis thaliana
aatcaccattgacgaga

SEQ ID NO: 14480 - DNA, 17 bp, Arabidopsis thaliana
aatcacccgtagtgtga

SEQ ID NO: 14481 - DNA, 17 bp, Arabidopsis thaliana
aatcaccgaaggtgcat

SEQ ID NO: 14482 - DNA, 17 bp, Arabidopsis thaliana
aatcaccgtgagactcg

SEQ ID NO: 14483 - DNA, 17 bp, Arabidopsis thaliana
aatcacctggaccgctg

SEQ ID NO: 14484 - DNA, 17 bp, Arabidopsis thaliana
aatcacgcaaatttccg

SEQ ID NO: 14485 - DNA, 17 bp, Arabidopsis thaliana
aatcacggatcgtcacc

SEQ ID NO: 14486 - DNA, 17 bp, Arabidopsis thaliana
aatcacggatttacgtt

SEQ ID NO: 14487 - DNA, 17 bp, Arabidopsis thaliana
aatcacgggacaggatt

SEQ ID NO: 14488 - DNA, 17 bp, Arabidopsis thaliana
aatcacgggtttacggt

SEQ ID NO: 14489 - DNA, 17 bp, Arabidopsis thaliana
aatcacgggtttacgta

SEQ ID NO: 14490 - DNA, 17 bp, Arabidopsis thaliana
aatcacgggtttacgtt

SEQ ID NO: 14491 - DNA, 17 bp, Arabidopsis thaliana
aatcacgtaagtcatcg

SEQ ID NO: 14492 - DNA, 17 bp, Arabidopsis thaliana
aatcacgtctgcctggg

SEQ ID NO: 14493 - DNA, 17 bp, Arabidopsis thaliana
aatcactaatcgctgcg

SEQ ID NO: 14494 - DNA, 17 bp, Arabidopsis thaliana
aatcactagatcctgtg

SEQ ID NO: 14495 - DNA, 17 bp, Arabidopsis thaliana
aatcactaggtgtagta

SEQ ID NO: 14496 - DNA, 17 bp, Arabidopsis thaliana
aatcactccatccatgt

SEQ ID NO: 14497 - DNA, 17 bp, Arabidopsis thaliana
aatcactcgaccacaac

SEQ ID NO: 14498 - DNA, 17 bp, Arabidopsis thaliana
aatcactcgacctcacc

SEQ ID NO: 14499 - DNA, 17 bp, Arabidopsis thaliana
aatcactcgtgccattc

SEQ ID NO: 14500 - DNA, 17 bp, Arabidopsis thaliana
aatcactctgctgggcc

SEQ ID NO: 14501 - DNA, 17 bp, Arabidopsis thaliana
aatcactgcaatgatac

SEQ ID NO: 14502 - DNA, 17 bp, Arabidopsis thaliana
aatcactgcactgatac

SEQ ID NO: 14503 - DNA, 17 bp, Arabidopsis thaliana
aatcactggttcaattg

SEQ ID NO: 14504 - DNA, 17 bp, Arabidopsis thaliana
aatcactgtggttgctc

SEQ ID NO: 14505 - DNA, 17 bp, Arabidopsis thaliana
aatcacttaagcgcttt

SEQ ID NO: 14506 - DNA, 17 bp, Arabidopsis thaliana
aatcacttccggaaagg

SEQ ID NO: 14507 - DNA, 17 bp, Arabidopsis thaliana
aatcacttcgttccatg

SEQ ID NO: 14508 - DNA, 17 bp, Arabidopsis thaliana
aatcacttctgaaaata

SEQ ID NO: 14509 - DNA, 17 bp, Arabidopsis thaliana
aatcactttctggaagg

SEQ ID NO: 14510 - DNA, 17 bp, Arabidopsis thaliana
aatcagaaatgcatgcg

SEQ ID NO: 14511 - DNA, 17 bp, Arabidopsis thaliana
aatcagacatgtgaacg

SEQ ID NO: 14512 - DNA, 17 bp, Arabidopsis thaliana
aatcagacccatcgttt

SEQ ID NO: 14513 - DNA, 17 bp, Arabidopsis thaliana
aatcagaccgcctgcct

SEQ ID NO: 14514 - DNA, 17 bp, Arabidopsis thaliana
aatcagactccgaattt

SEQ ID NO: 14515 - DNA, 17 bp, Arabidopsis thaliana
aatcagagcgctccgga

SEQ ID NO: 14516 - DNA, 17 bp, Arabidopsis thaliana
aatcagagtcggctgat

SEQ ID NO: 14517 - DNA, 17 bp, Arabidopsis thaliana
aatcagattttgccacg

SEQ ID NO: 14518 - DNA, 17 bp, Arabidopsis thaliana
aatcagcacgagtgata

SEQ ID NO: 14519 - DNA, 17 bp, Arabidopsis thaliana
aatcagcacggacattg

SEQ ID NO: 14520 - DNA, 17 bp, Arabidopsis thaliana
aatcagcactccttctg

SEQ ID NO: 14521 - DNA, 17 bp, Arabidopsis thaliana
aatcagcagaacaagcg

SEQ ID NO: 14522 - DNA, 17 bp, Arabidopsis thaliana
aatcagcataaagtcgc

SEQ ID NO: 14523 - DNA, 17 bp, Arabidopsis thaliana
aatcagcatccattcag

SEQ ID NO: 14524 - DNA, 17 bp, Arabidopsis thaliana
aatcagcatccattccc

SEQ ID NO: 14525 - DNA, 17 bp, Arabidopsis thaliana
aatcagcatccattccg

SEQ ID NO: 14526 - DNA, 17 bp, Arabidopsis thaliana
aatcagcggatgttgct

SEQ ID NO: 14527 - DNA, 17 bp, Arabidopsis thaliana
aatcagcgtgattgcga

SEQ ID NO: 14528 - DNA, 17 bp, Arabidopsis thaliana
aatcagctaacaaataa

SEQ ID NO: 14529 - DNA, 17 bp, Arabidopsis thaliana
aatcagctaacaaatgc

SEQ ID NO: 14530 - DNA, 17 bp, Arabidopsis thaliana
aatcagctagcaggcta

SEQ ID NO: 14531 - DNA, 17 bp, Arabidopsis thaliana
aatcagctagcaggtta

SEQ ID NO: 14532 - DNA, 17 bp, Arabidopsis thaliana
aatcagctcgcggaccg

SEQ ID NO: 14533 - DNA, 17 bp, Arabidopsis thaliana
aatcagctgatggcgat

SEQ ID NO: 14534 - DNA, 17 bp, Arabidopsis thaliana
aatcagctgcgccattt

SEQ ID NO: 14535 - DNA, 17 bp, Arabidopsis thaliana
aatcagctgctggattc

SEQ ID NO: 14536 - DNA, 17 bp, Arabidopsis thaliana
aatcagctggtccgatc

SEQ ID NO: 14537 - DNA, 17 bp, Arabidopsis thaliana
aatcagcttgcggatat

SEQ ID NO: 14538 - DNA, 17 bp, Arabidopsis thaliana
aatcaggaaagtgtgcc

SEQ ID NO: 14539 - DNA, 17 bp, Arabidopsis thaliana
aatcaggactccacagg

SEQ ID NO: 14540 - DNA, 17 bp, Arabidopsis thaliana
aatcaggagcctgtgcc

SEQ ID NO: 14541 - DNA, 17 bp, Arabidopsis thaliana
aatcaggataccgctgc

SEQ ID NO: 14542 - DNA, 17 bp, Arabidopsis thaliana
aatcaggatagtcctgt

SEQ ID NO: 14543 - DNA, 17 bp, Arabidopsis thaliana
aatcaggcatcgtggtc

SEQ ID NO: 14544 - DNA, 17 bp, Arabidopsis thaliana
aatcaggccgcctgcat

SEQ ID NO: 14545 - DNA, 17 bp, Arabidopsis thaliana
aatcaggccgcctgtat

SEQ ID NO: 14546 - DNA, 17 bp, Arabidopsis thaliana
aatcaggctgctttcat

SEQ ID NO: 14547 - DNA, 17 bp, Arabidopsis thaliana
aatcagggaatcccgat

SEQ ID NO: 14548 - DNA, 17 bp, Arabidopsis thaliana
aatcagggaggaggtga

SEQ ID NO: 14549 - DNA, 17 bp, Arabidopsis thaliana
aatcagggcctaaattg

SEQ ID NO: 14550 - DNA, 17 bp, Arabidopsis thaliana
aatcagggtttagggcc

SEQ ID NO: 14551 - DNA, 17 bp, Arabidopsis thaliana
aatcaggtcgcctgcat

SEQ ID NO: 14552 - DNA, 17 bp, Arabidopsis thaliana
aatcaggttcctaagca

SEQ ID NO: 14553 - DNA, 17 bp, Arabidopsis thaliana
aatcaggtttaggtcgg

SEQ ID NO: 14554 - DNA, 17 bp, Arabidopsis thaliana
aatcaggtttcgggctt

SEQ ID NO: 14555 - DNA, 17 bp, Arabidopsis thaliana
aatcaggttttttcgag

SEQ ID NO: 14556 - DNA, 17 bp, Arabidopsis thaliana
aatcaggttttttcgcg

SEQ ID NO: 14557 - DNA, 17 bp, Arabidopsis thaliana
aatcaggttttttcggg

SEQ ID NO: 14558 - DNA, 17 bp, Arabidopsis thaliana
aatcaggttttttcgtg

SEQ ID NO: 14559 - DNA, 17 bp, Arabidopsis thaliana
aatcagtcaacgtttac

SEQ ID NO: 14560 - DNA, 17 bp, Arabidopsis thaliana
aatcagtcggatcatct

SEQ ID NO: 14561 - DNA, 17 bp, Arabidopsis thaliana
aatcagtctattgccac

SEQ ID NO: 14562 - DNA, 17 bp, Arabidopsis thaliana
aatcagtctcctgcgac

SEQ ID NO: 14563 - DNA, 17 bp, Arabidopsis thaliana
aatcagtctgcctataa

SEQ ID NO: 14564 - DNA, 17 bp, Arabidopsis thaliana
aatcagttctcggttgc

SEQ ID NO: 14565 - DNA, 17 bp, Arabidopsis thaliana
aatcagtttccggaagg

SEQ ID NO: 14566 - DNA, 17 bp, Arabidopsis thaliana
aatcataacaatttgct

SEQ ID NO: 14567 - DNA, 17 bp, Arabidopsis thaliana
aatcatacggtttagtt

SEQ ID NO: 14568 - DNA, 17 bp, Arabidopsis thaliana
aatcatactgggctgga

SEQ ID NO: 14569 - DNA, 17 bp, Arabidopsis thaliana
aatcatatgctactcct

SEQ ID NO: 14570 - DNA, 17 bp, Arabidopsis thaliana
aatcatatggacagagt

SEQ ID NO: 14571 - DNA, 17 bp, Arabidopsis thaliana
aatcatcaaaccgcaga

SEQ ID NO: 14572 - DNA, 17 bp, Arabidopsis thaliana
aatcatcaactaaccaa

SEQ ID NO: 14573 - DNA, 17 bp, Arabidopsis thaliana
aatcatcagagatgttg

SEQ ID NO: 14574 - DNA, 17 bp, Arabidopsis thaliana
aatcatcattgaccgtc

SEQ ID NO: 14575 - DNA, 17 bp, Arabidopsis thaliana
aatcatccagctactat

SEQ ID NO: 14576 - DNA, 17 bp, Arabidopsis thaliana
aatcatcccaggtggtg

SEQ ID NO: 14577 - DNA, 17 bp, Arabidopsis thaliana
aatcatccttctcggca

SEQ ID NO: 14578 - DNA, 17 bp, Arabidopsis thaliana
aatcatcgagttgatac

SEQ ID NO: 14579 - DNA, 17 bp, Arabidopsis thaliana
aatcatcgatcggctca

SEQ ID NO: 14580 - DNA, 17 bp, Arabidopsis thaliana
aatcatcggtcctttct

SEQ ID NO: 14581 - DNA, 17 bp, Arabidopsis thaliana
aatcatcgtagatgtca

SEQ ID NO: 14582 - DNA, 17 bp, Arabidopsis thaliana
aatcatctccggtaccg

SEQ ID NO: 14583 - DNA, 17 bp, Arabidopsis thaliana
aatcatctgacgtggct

SEQ ID NO: 14584 - DNA, 17 bp, Arabidopsis thaliana
aatcatctgcggaggct

SEQ ID NO: 14585 - DNA, 17 bp, Arabidopsis thaliana
aatcatctgcgtaactg

SEQ ID NO: 14586 - DNA, 17 bp, Arabidopsis thaliana
aatcatcttcgagtgtt

SEQ ID NO: 14587 - DNA, 17 bp, Arabidopsis thaliana
aatcatcttgctgatgg

SEQ ID NO: 14588 - DNA, 17 bp, Arabidopsis thaliana
aatcatctttgaagatt

SEQ ID NO: 14589 - DNA, 17 bp, Arabidopsis thaliana
aatcatctttggttctc

SEQ ID NO: 14590 - DNA, 17 bp, Arabidopsis thaliana
aatcatgacttctgggc

SEQ ID NO: 14591 - DNA, 17 bp, Arabidopsis thaliana
aatcatgacttgtgtca

SEQ ID NO: 14592 - DNA, 17 bp, Arabidopsis thaliana
aatcatgactttgccat

SEQ ID NO: 14593 - DNA, 17 bp, Arabidopsis thaliana
aatcatgagtgtacgtg

SEQ ID NO: 14594 - DNA, 17 bp, Arabidopsis thaliana
aatcatgcaactttctt

SEQ ID NO: 14595 - DNA, 17 bp, Arabidopsis thaliana
aatcatgcgtgggattg

SEQ ID NO: 14596 - DNA, 17 bp, Arabidopsis thaliana
aatcatgctctagttct

SEQ ID NO: 14597 - DNA, 17 bp, Arabidopsis thaliana
aatcatggaaccatggg

SEQ ID NO: 14598 - DNA, 17 bp, Arabidopsis thaliana
aatcatggagtgtcaaa

SEQ ID NO: 14599 - DNA, 17 bp, Arabidopsis thaliana
aatcatgtcccggttgc

SEQ ID NO: 14600 - DNA, 17 bp, Arabidopsis thaliana
aatcatgtgactacgtt

SEQ ID NO: 14601 - DNA, 17 bp, Arabidopsis thaliana
aatcatgtgactgcgtt

SEQ ID NO: 14602 - DNA, 17 bp, Arabidopsis thaliana
aatcatgttgctcgtca

SEQ ID NO: 14603 - DNA, 17 bp, Arabidopsis thaliana
aatcatgttttttttgg

SEQ ID NO: 14604 - DNA, 17 bp, Arabidopsis thaliana
aatcattcgttgtggcc

SEQ ID NO: 14605 - DNA, 17 bp, Arabidopsis thaliana
aatcattctcgctacgc

SEQ ID NO: 14606 - DNA, 17 bp, Arabidopsis thaliana
aatcattcttgagagat

SEQ ID NO: 14607 - DNA, 17 bp, Arabidopsis thaliana
aatcattgaagttgctc

SEQ ID NO: 14608 - DNA, 17 bp, Arabidopsis thaliana
aatcattgagcgtgcga

SEQ ID NO: 14609 - DNA, 17 bp, Arabidopsis thaliana
aatcattgaggacctct

SEQ ID NO: 14610 - DNA, 17 bp, Arabidopsis thaliana
aatcattgctgattctc

SEQ ID NO: 14611 - DNA, 17 bp, Arabidopsis thaliana
aatcattgctgattctg

SEQ ID NO: 14612 - DNA, 17 bp, Arabidopsis thaliana
aatcatttaagttgcca

SEQ ID NO: 14613 - DNA, 17 bp, Arabidopsis thaliana
aatcatttgcggtcttt

SEQ ID NO: 14614 - DNA, 17 bp, Arabidopsis thaliana
aatcatttgcggttgcg

SEQ ID NO: 14615 - DNA, 17 bp, Arabidopsis thaliana
aatcatttggagagagt

SEQ ID NO: 14616 - DNA, 17 bp, Arabidopsis thaliana
aatcattttggagagag

SEQ ID NO: 14617 - DNA, 17 bp, Arabidopsis thaliana
aatccaaaccgattggg

SEQ ID NO: 14618 - DNA, 17 bp, Arabidopsis thaliana
aatccaaatccgtcccg

SEQ ID NO: 14619 - DNA, 17 bp, Arabidopsis thaliana
aatccaacatttgagtc

SEQ ID NO: 14620 - DNA, 17 bp, Arabidopsis thaliana
aatccaactctttttgg

SEQ ID NO: 14621 - DNA, 17 bp, Arabidopsis thaliana
aatccaagacgcatgcc

SEQ ID NO: 14622 - DNA, 17 bp, Arabidopsis thaliana
aatccaagacttgagct

SEQ ID NO: 14623 - DNA, 17 bp, Arabidopsis thaliana
aatccaagatctaccac

SEQ ID NO: 14624 - DNA, 17 bp, Arabidopsis thaliana
aatccaagtgtacgaat

SEQ ID NO: 14625 - DNA, 17 bp, Arabidopsis thaliana
aatccaagttgtgcgag

SEQ ID NO: 14626 - DNA, 17 bp, Arabidopsis thaliana
aatccaatccgatccgt

SEQ ID NO: 14627 - DNA, 17 bp, Arabidopsis thaliana
aatccaatcgcgatctt

SEQ ID NO: 14628 - DNA, 17 bp, Arabidopsis thaliana
aatccaatcgtgggaag

SEQ ID NO: 14629 - DNA, 17 bp, Arabidopsis thaliana
aatccaatctaaggtca

SEQ ID NO: 14630 - DNA, 17 bp, Arabidopsis thaliana
aatccaatgcgtttgac

SEQ ID NO: 14631 - DNA, 17 bp, Arabidopsis thaliana
aatccaattttatggtt

SEQ ID NO: 14632 - DNA, 17 bp, Arabidopsis thaliana
aatccacaaattatctg

SEQ ID NO: 14633 - DNA, 17 bp, Arabidopsis thaliana
aatccacagcgctttgt

SEQ ID NO: 14634 - DNA, 17 bp, Arabidopsis thaliana
aatccacatcatcaacc

SEQ ID NO: 14635 - DNA, 17 bp, Arabidopsis thaliana
aatccaccgcggaattg

SEQ ID NO: 14636 - DNA, 17 bp, Arabidopsis thaliana
aatccacgagattgtat

SEQ ID NO: 14637 - DNA, 17 bp, Arabidopsis thaliana
aatccacggcgtgccca

SEQ ID NO: 14638 - DNA, 17 bp, Arabidopsis thaliana
aatccacgtgtcatcta

SEQ ID NO: 14639 - DNA, 17 bp, Arabidopsis thaliana
aatccactggatcaatg

SEQ ID NO: 14640 - DNA, 17 bp, Arabidopsis thaliana
aatccacttagtaatct

SEQ ID NO: 14641 - DNA, 17 bp, Arabidopsis thaliana
aatccacttttcgacca

SEQ ID NO: 14642 - DNA, 17 bp, Arabidopsis thaliana
aatccagaaccattacg

SEQ ID NO: 14643 - DNA, 17 bp, Arabidopsis thaliana
aatccagacgcctaatc

SEQ ID NO: 14644 - DNA, 17 bp, Arabidopsis thaliana
aatccagacttctcatc

SEQ ID NO: 14645 - DNA, 17 bp, Arabidopsis thaliana
aatccagaggaatcgtc

SEQ ID NO: 14646 - DNA, 17 bp, Arabidopsis thaliana
aatccagaggaccgagt

SEQ ID NO: 14647 - DNA, 17 bp, Arabidopsis thaliana
aatccagaggagtcgtc

SEQ ID NO: 14648 - DNA, 17 bp, Arabidopsis thaliana
aatccagaggtgattag

SEQ ID NO: 14649 - DNA, 17 bp, Arabidopsis thaliana
aatccagatgactgggt

SEQ ID NO: 14650 - DNA, 17 bp, Arabidopsis thaliana
aatccagatggacgttt

SEQ ID NO: 14651 - DNA, 17 bp, Arabidopsis thaliana
aatccagatggtctggt

SEQ ID NO: 14652 - DNA, 17 bp, Arabidopsis thaliana
aatccagcagccgacca

SEQ ID NO: 14653 - DNA, 17 bp, Arabidopsis thaliana
aatccagccatctcagc

SEQ ID NO: 14654 - DNA, 17 bp, Arabidopsis thaliana
aatccagcctgttcagt

SEQ ID NO: 14655 - DNA, 17 bp, Arabidopsis thaliana
aatccagcgacctgggt

SEQ ID NO: 14656 - DNA, 17 bp, Arabidopsis thaliana
aatccagcgatctgggt

SEQ ID NO: 14657 - DNA, 17 bp, Arabidopsis thaliana
aatccagctgcccatga

SEQ ID NO: 14658 - DNA, 17 bp, Arabidopsis thaliana
aatccaggaagttttgt

SEQ ID NO: 14659 - DNA, 17 bp, Arabidopsis thaliana
aatccaggacatgctta

SEQ ID NO: 14660 - DNA, 17 bp, Arabidopsis thaliana
aatccaggactatctca

SEQ ID NO: 14661 - DNA, 17 bp, Arabidopsis thaliana
aatccaggaggttctgg

SEQ ID NO: 14662 - DNA, 17 bp, Arabidopsis thaliana
aatccaggatggcccac

SEQ ID NO: 14663 - DNA, 17 bp, Arabidopsis thaliana
aatccaggatgtccatt

SEQ ID NO: 14664 - DNA, 17 bp, Arabidopsis thaliana
aatccaggtaccgtttc

SEQ ID NO: 14665 - DNA, 17 bp, Arabidopsis thaliana
aatccagtcaagccaag

SEQ ID NO: 14666 - DNA, 17 bp, Arabidopsis thaliana
aatccagtgacagccat

SEQ ID NO: 14667 - DNA, 17 bp, Arabidopsis thaliana
aatccagtggtttggcc

SEQ ID NO: 14668 - DNA, 17 bp, Arabidopsis thaliana
aatccagtttttcacga

SEQ ID NO: 14669 - DNA, 17 bp, Arabidopsis thaliana
aatccatagttgaacca

SEQ ID NO: 14670 - DNA, 17 bp, Arabidopsis thaliana
aatccatcagagcacct

SEQ ID NO: 14671 - DNA, 17 bp, Arabidopsis thaliana
aatccatccaccctgca

SEQ ID NO: 14672 - DNA, 17 bp, Arabidopsis thaliana
aatccatggatcattgc

SEQ ID NO: 14673 - DNA, 17 bp, Arabidopsis thaliana
aatccatgtcatagctt

SEQ ID NO: 14674 - DNA, 17 bp, Arabidopsis thaliana
aatccatttgatttcgc

SEQ ID NO: 14675 - DNA, 17 bp, Arabidopsis thaliana
aatccatttggatgatt

SEQ ID NO: 14676 - DNA, 17 bp, Arabidopsis thaliana
aatccattttatttttg

SEQ ID NO: 14677 - DNA, 17 bp, Arabidopsis thaliana
aatcccaaaatgggctt

SEQ ID NO: 14678 - DNA, 17 bp, Arabidopsis thaliana
aatcccaaacgatgtgt

SEQ ID NO: 14679 - DNA, 17 bp, Arabidopsis thaliana
aatcccaatctagactt

SEQ ID NO: 14680 - DNA, 17 bp, Arabidopsis thaliana
aatcccagccgacagtg

SEQ ID NO: 14681 - DNA, 17 bp, Arabidopsis thaliana
aatcccagccgagtgtg

SEQ ID NO: 14682 - DNA, 17 bp, Arabidopsis thaliana
aatcccagctactgcga

SEQ ID NO: 14683 - DNA, 17 bp, Arabidopsis thaliana
aatcccaggtcctagcc

SEQ ID NO: 14684 - DNA, 17 bp, Arabidopsis thaliana
aatcccagtccaattgt

SEQ ID NO: 14685 - DNA, 17 bp, Arabidopsis thaliana
aatcccatagctcagtg

SEQ ID NO: 14686 - DNA, 17 bp, Arabidopsis thaliana
aatccccacacgtgaag

SEQ ID NO: 14687 - DNA, 17 bp, Arabidopsis thaliana
aatccccacaggtccga

SEQ ID NO: 14688 - DNA, 17 bp, Arabidopsis thaliana
aatccccactagtgctg

SEQ ID NO: 14689 - DNA, 17 bp, Arabidopsis thaliana
aatccccccagacccga

SEQ ID NO: 14690 - DNA, 17 bp, Arabidopsis thaliana
aatccccgtcgaagaaa

SEQ ID NO: 14691 - DNA, 17 bp, Arabidopsis thaliana
aatcccgcattcatcag

SEQ ID NO: 14692 - DNA, 17 bp, Arabidopsis thaliana
aatcccgcctgacctgg

SEQ ID NO: 14693 - DNA, 17 bp, Arabidopsis thaliana
aatcccgcggctttttg

SEQ ID NO: 14694 - DNA, 17 bp, Arabidopsis thaliana
aatcccggcggccggac

SEQ ID NO: 14695 - DNA, 17 bp, Arabidopsis thaliana
aatcccggcggctggac

SEQ ID NO: 14696 - DNA, 17 bp, Arabidopsis thaliana
aatcccggtctacatgt

SEQ ID NO: 14697 - DNA, 17 bp, Arabidopsis thaliana
aatcccgtaattcctcc

SEQ ID NO: 14698 - DNA, 17 bp, Arabidopsis thaliana
aatcccgtagctcagtc

SEQ ID NO: 14699 - DNA, 17 bp, Arabidopsis thaliana
aatcccgtgaaccatcg

SEQ ID NO: 14700 - DNA, 17 bp, Arabidopsis thaliana
aatcccgtttatctcag

SEQ ID NO: 14701 - DNA, 17 bp, Arabidopsis thaliana
aatccctaaatctctgg

SEQ ID NO: 14702 - DNA, 17 bp, Arabidopsis thaliana
aatccctaaattttctg

SEQ ID NO: 14703 - DNA, 17 bp, Arabidopsis thaliana
aatccctaagcggtgtc

SEQ ID NO: 14704 - DNA, 17 bp, Arabidopsis thaliana
aatccctccagacccgt

SEQ ID NO: 14705 - DNA, 17 bp, Arabidopsis thaliana
aatccctccagatcaga

SEQ ID NO: 14706 - DNA, 17 bp, Arabidopsis thaliana
aatccctggtcgcggac

SEQ ID NO: 14707 - DNA, 17 bp, Arabidopsis thaliana
aatccctggtcgcgggc

SEQ ID NO: 14708 - DNA, 17 bp, Arabidopsis thaliana
aatcccttctggattag

SEQ ID NO: 14709 - DNA, 17 bp, Arabidopsis thaliana
aatcccttgggatagag

SEQ ID NO: 14710 - DNA, 17 bp, Arabidopsis thaliana
aatccctttatgactct

SEQ ID NO: 14711 - DNA, 17 bp, Arabidopsis thaliana
aatccctttttgaattg

SEQ ID NO: 14712 - DNA, 17 bp, Arabidopsis thaliana
aatccgaaagactgcgg

SEQ ID NO: 14713 - DNA, 17 bp, Arabidopsis thaliana
aatccgacatctctgct

SEQ ID NO: 14714 - DNA, 17 bp, Arabidopsis thaliana
aatccgacccgttagga

SEQ ID NO: 14715 - DNA, 17 bp, Arabidopsis thaliana
aatccgacgatcggctt

SEQ ID NO: 14716 - DNA, 17 bp, Arabidopsis thaliana
aatccgacgcggattac

SEQ ID NO: 14717 - DNA, 17 bp, Arabidopsis thaliana
aatccgactaaaagctc

SEQ ID NO: 14718 - DNA, 17 bp, Arabidopsis thaliana
aatccgactaccttgct

SEQ ID NO: 14719 - DNA, 17 bp, Arabidopsis thaliana
aatccgagccaaggacg

SEQ ID NO: 14720 - DNA, 17 bp, Arabidopsis thaliana
aatccgagtgccgctca

SEQ ID NO: 14721 - DNA, 17 bp, Arabidopsis thaliana
aatccgatcccagacgt

SEQ ID NO: 14722 - DNA, 17 bp, Arabidopsis thaliana
aatccgatccgataacc

SEQ ID NO: 14723 - DNA, 17 bp, Arabidopsis thaliana
aatccgatccgcaatac

SEQ ID NO: 14724 - DNA, 17 bp, Arabidopsis thaliana
aatccgatctgagaaag

SEQ ID NO: 14725 - DNA, 17 bp, Arabidopsis thaliana
aatccgatgtgggacat

SEQ ID NO: 14726 - DNA, 17 bp, Arabidopsis thaliana
aatccgattctctcaaa

SEQ ID NO: 14727 - DNA, 17 bp, Arabidopsis thaliana
aatccgatttcctcctt

SEQ ID NO: 14728 - DNA, 17 bp, Arabidopsis thaliana
aatccgcacacgtggcc

SEQ ID NO: 14729 - DNA, 17 bp, Arabidopsis thaliana
aatccgcagtgtaccac

SEQ ID NO: 14730 - DNA, 17 bp, Arabidopsis thaliana
aatccgcagtgtaccgc

SEQ ID NO: 14731 - DNA, 17 bp, Arabidopsis thaliana
aatccgcatgttaattc

SEQ ID NO: 14732 - DNA, 17 bp, Arabidopsis thaliana
aatccgcctcatctaga

SEQ ID NO: 14733 - DNA, 17 bp, Arabidopsis thaliana
aatccgcctttgtgtcc

SEQ ID NO: 14734 - DNA, 17 bp, Arabidopsis thaliana
aatccgcgagttcttgc

SEQ ID NO: 14735 - DNA, 17 bp, Arabidopsis thaliana
aatccgcgctattacat

SEQ ID NO: 14736 - DNA, 17 bp, Arabidopsis thaliana
aatccgcgtaggtgtcg

SEQ ID NO: 14737 - DNA, 17 bp, Arabidopsis thaliana
aatccgctaaggagtgt

SEQ ID NO: 14738 - DNA, 17 bp, Arabidopsis thaliana
aatccgctccgtgtccc

SEQ ID NO: 14739 - DNA, 17 bp, Arabidopsis thaliana
aatccgctccgtgtccg

SEQ ID NO: 14740 - DNA, 17 bp, Arabidopsis thaliana
aatccgctgagattccc

SEQ ID NO: 14741 - DNA, 17 bp, Arabidopsis thaliana
aatccgctgagatttcc

SEQ ID NO: 14742 - DNA, 17 bp, Arabidopsis thaliana
aatccgctgtaggcacc

SEQ ID NO: 14743 - DNA, 17 bp, Arabidopsis thaliana
aatccgcttaatgtccg

SEQ ID NO: 14744 - DNA, 17 bp, Arabidopsis thaliana
aatccgcttcgacacgc

SEQ ID NO: 14745 - DNA, 17 bp, Arabidopsis thaliana
aatccgcttgccaatag

SEQ ID NO: 14746 - DNA, 17 bp, Arabidopsis thaliana
aatccgctttcaggtga

SEQ ID NO: 14747 - DNA, 17 bp, Arabidopsis thaliana
aatccggagctggaaag

SEQ ID NO: 14748 - DNA, 17 bp, Arabidopsis thaliana
aatccggaggaccgact

SEQ ID NO: 14749 - DNA, 17 bp, Arabidopsis thaliana
aatccggaggaccgagt

SEQ ID NO: 14750 - DNA, 17 bp, Arabidopsis thaliana
aatccggaggaccgatt

SEQ ID NO: 14751 - DNA, 17 bp, Arabidopsis thaliana
aatccggatgactgggt

SEQ ID NO: 14752 - DNA, 17 bp, Arabidopsis thaliana
aatccggattatcagcc

SEQ ID NO: 14753 - DNA, 17 bp, Arabidopsis thaliana
aatccggcaccacgggg

SEQ ID NO: 14754 - DNA, 17 bp, Arabidopsis thaliana
aatccggccaattccct

SEQ ID NO: 14755 - DNA, 17 bp, Arabidopsis thaliana
aatccggccccagacgt

SEQ ID NO: 14756 - DNA, 17 bp, Arabidopsis thaliana
aatccggcgaagagagg

SEQ ID NO: 14757 - DNA, 17 bp, Arabidopsis thaliana
aatccggcgatggaaat

SEQ ID NO: 14758 - DNA, 17 bp, Arabidopsis thaliana
aatccgggtgccgcctc

SEQ ID NO: 14759 - DNA, 17 bp, Arabidopsis thaliana
aatccggtccgccgatc

SEQ ID NO: 14760 - DNA, 17 bp, Arabidopsis thaliana
aatccggtgaacctgtt

SEQ ID NO: 14761 - DNA, 17 bp, Arabidopsis thaliana
aatccggttcgtagaca

SEQ ID NO: 14762 - DNA, 17 bp, Arabidopsis thaliana
aatccggttgacctgat

SEQ ID NO: 14763 - DNA, 17 bp, Arabidopsis thaliana
aatccgtcagcggttta

SEQ ID NO: 14764 - DNA, 17 bp, Arabidopsis thaliana
aatccgtccctccaaat

SEQ ID NO: 14765 - DNA, 17 bp, Arabidopsis thaliana
aatccgtggtccaatcc

SEQ ID NO: 14766 - DNA, 17 bp, Arabidopsis thaliana
aatccgttagcggttca

SEQ ID NO: 14767 - DNA, 17 bp, Arabidopsis thaliana
aatccgttccgccaaac

SEQ ID NO: 14768 - DNA, 17 bp, Arabidopsis thaliana
aatcctaaccgggttcc

SEQ ID NO: 14769 - DNA, 17 bp, Arabidopsis thaliana
aatcctaactgtaccgt

SEQ ID NO: 14770 - DNA, 17 bp, Arabidopsis thaliana
aatcctaagatcagttg

SEQ ID NO: 14771 - DNA, 17 bp, Arabidopsis thaliana
aatcctagagtcagatt

SEQ ID NO: 14772 - DNA, 17 bp, Arabidopsis thaliana
aatcctatacaaagcca

SEQ ID NO: 14773 - DNA, 17 bp, Arabidopsis thaliana
aatcctattggacgcac

SEQ ID NO: 14774 - DNA, 17 bp, Arabidopsis thaliana
aatcctcagatgttggg

SEQ ID NO: 14775 - DNA, 17 bp, Arabidopsis thaliana
aatcctcagctttggcc

SEQ ID NO: 14776 - DNA, 17 bp, Arabidopsis thaliana
aatcctcaggatcaggt

SEQ ID NO: 14777 - DNA, 17 bp, Arabidopsis thaliana
aatcctccatttatgtt

SEQ ID NO: 14778 - DNA, 17 bp, Arabidopsis thaliana
aatcctcccaggcccaa

SEQ ID NO: 14779 - DNA, 17 bp, Arabidopsis thaliana
aatcctccccattttga

SEQ ID NO: 14780 - DNA, 17 bp, Arabidopsis thaliana
aatcctcgatttggcgt

SEQ ID NO: 14781 - DNA, 17 bp, Arabidopsis thaliana
aatcctcggacccggtc

SEQ ID NO: 14782 - DNA, 17 bp, Arabidopsis thaliana
aatcctcggtcagtttg

SEQ ID NO: 14783 - DNA, 17 bp, Arabidopsis thaliana
aatcctctaggaggtgc

SEQ ID NO: 14784 - DNA, 17 bp, Arabidopsis thaliana
aatcctctatggaccct

SEQ ID NO: 14785 - DNA, 17 bp, Arabidopsis thaliana
aatcctctcaggcccga

SEQ ID NO: 14786 - DNA, 17 bp, Arabidopsis thaliana
aatcctctgagtggtga

SEQ ID NO: 14787 - DNA, 17 bp, Arabidopsis thaliana
aatcctctgagtggtta

SEQ ID NO: 14788 - DNA, 17 bp, Arabidopsis thaliana
aatcctctgttgctgct

SEQ ID NO: 14789 - DNA, 17 bp, Arabidopsis thaliana
aatcctcttcgagacat

SEQ ID NO: 14790 - DNA, 17 bp, Arabidopsis thaliana
aatcctcttcgagaccc

SEQ ID NO: 14791 - DNA, 17 bp, Arabidopsis thaliana
aatcctcttcggatctg

SEQ ID NO: 14792 - DNA, 17 bp, Arabidopsis thaliana
aatcctgacacggggag

SEQ ID NO: 14793 - DNA, 17 bp, Arabidopsis thaliana
aatcctgacccacctga

SEQ ID NO: 14794 - DNA, 17 bp, Arabidopsis thaliana
aatcctgaccgttcctc

SEQ ID NO: 14795 - DNA, 17 bp, Arabidopsis thaliana
aatcctgactttgattg

SEQ ID NO: 14796 - DNA, 17 bp, Arabidopsis thaliana
aatcctgacttttgatc

SEQ ID NO: 14797 - DNA, 17 bp, Arabidopsis thaliana
aatcctgagactgatga

SEQ ID NO: 14798 - DNA, 17 bp, Arabidopsis thaliana
aatcctgcagatctgaa

SEQ ID NO: 14799 - DNA, 17 bp, Arabidopsis thaliana
aatcctgccagtccgtc

SEQ ID NO: 14800 - DNA, 17 bp, Arabidopsis thaliana
aatcctgcgacctgggt

SEQ ID NO: 14801 - DNA, 17 bp, Arabidopsis thaliana
aatcctgctgttgacgc

SEQ ID NO: 14802 - DNA, 17 bp, Arabidopsis thaliana
aatcctggagttgagac

SEQ ID NO: 14803 - DNA, 17 bp, Arabidopsis thaliana
aatcctggagttggaac

SEQ ID NO: 14804 - DNA, 17 bp, Arabidopsis thaliana
aatcctggagttgggac

SEQ ID NO: 14805 - DNA, 17 bp, Arabidopsis thaliana
aatcctggcataccaag

SEQ ID NO: 14806 - DNA, 17 bp, Arabidopsis thaliana
aatcctggcgaacagct

SEQ ID NO: 14807 - DNA, 17 bp, Arabidopsis thaliana
aatcctggcgaacggcc

SEQ ID NO: 14808 - DNA, 17 bp, Arabidopsis thaliana
aatcctggtccgccact

SEQ ID NO: 14809 - DNA, 17 bp, Arabidopsis thaliana
aatcctggtgactggcc

SEQ ID NO: 14810 - DNA, 17 bp, Arabidopsis thaliana
aatcctggtgactgggc

SEQ ID NO: 14811 - DNA, 17 bp, Arabidopsis thaliana
aatcctgtaatctctcc

SEQ ID NO: 14812 - DNA, 17 bp, Arabidopsis thaliana
aatcctgtcgatgtcgt

SEQ ID NO: 14813 - DNA, 17 bp, Arabidopsis thaliana
aatcctgttatggccaa

SEQ ID NO: 14814 - DNA, 17 bp, Arabidopsis thaliana
aatccttaatcgcgggt

SEQ ID NO: 14815 - DNA, 17 bp, Arabidopsis thaliana
aatccttacgcctttaa

SEQ ID NO: 14816 - DNA, 17 bp, Arabidopsis thaliana
aatccttactcgacaac

SEQ ID NO: 14817 - DNA, 17 bp, Arabidopsis thaliana
aatccttcttctgattg

SEQ ID NO: 14818 - DNA, 17 bp, Arabidopsis thaliana
aatccttgaaaaattca

SEQ ID NO: 14819 - DNA, 17 bp, Arabidopsis thaliana
aatccttgatcaactat

SEQ ID NO: 14820 - DNA, 17 bp, Arabidopsis thaliana
aatccttgcgggcttga

SEQ ID NO: 14821 - DNA, 17 bp, Arabidopsis thaliana
aatccttgctgatggct

SEQ ID NO: 14822 - DNA, 17 bp, Arabidopsis thaliana
aatccttggaccgactc

SEQ ID NO: 14823 - DNA, 17 bp, Arabidopsis thaliana
aatcctttgcagacgac

SEQ ID NO: 14824 - DNA, 17 bp, Arabidopsis thaliana
aatcctttggcccagga

SEQ ID NO: 14825 - DNA, 17 bp, Arabidopsis thaliana
aatccttttcagaccca

SEQ ID NO: 14826 - DNA, 17 bp, Arabidopsis thaliana
aatccttttcagacccg

SEQ ID NO: 14827 - DNA, 17 bp, Arabidopsis thaliana
aatccttttcagacttt

SEQ ID NO: 14828 - DNA, 17 bp, Arabidopsis thaliana
aatcgaaacagagggag

SEQ ID NO: 14829 - DNA, 17 bp, Arabidopsis thaliana
aatcgaacaagcaatcg

SEQ ID NO: 14830 - DNA, 17 bp, Arabidopsis thaliana
aatcgaacctgagactt

SEQ ID NO: 14831 - DNA, 17 bp, Arabidopsis thaliana
aatcgaactgtacagtg

SEQ ID NO: 14832 - DNA, 17 bp, Arabidopsis thaliana
aatcgaatccgaactct

SEQ ID NO: 14833 - DNA, 17 bp, Arabidopsis thaliana
aatcgaatcgttgacct

SEQ ID NO: 14834 - DNA, 17 bp, Arabidopsis thaliana
aatcgaatggtcaccgt

SEQ ID NO: 14835 - DNA, 17 bp, Arabidopsis thaliana
aatcgaatgttaccagg

SEQ ID NO: 14836 - DNA, 17 bp, Arabidopsis thaliana
aatcgaattgtgactct

SEQ ID NO: 14837 - DNA, 17 bp, Arabidopsis thaliana
aatcgaccaggcttgac

SEQ ID NO: 14838 - DNA, 17 bp, Arabidopsis thaliana
aatcgacgcggattacg

SEQ ID NO: 14839 - DNA, 17 bp, Arabidopsis thaliana
aatcgacttggcctcag

SEQ ID NO: 14840 - DNA, 17 bp, Arabidopsis thaliana
aatcgagaacaagcgat

SEQ ID NO: 14841 - DNA, 17 bp, Arabidopsis thaliana
aatcgagatccggtgat

SEQ ID NO: 14842 - DNA, 17 bp, Arabidopsis thaliana
aatcgagcccgagccga

SEQ ID NO: 14843 - DNA, 17 bp, Arabidopsis thaliana
aatcgaggaccgagtgc

SEQ ID NO: 14844 - DNA, 17 bp, Arabidopsis thaliana
aatcgaggagagatgtg

SEQ ID NO: 14845 - DNA, 17 bp, Arabidopsis thaliana
aatcgagtcgtatcagt

SEQ ID NO: 14846 - DNA, 17 bp, Arabidopsis thaliana
aatcgagtgttcttctt

SEQ ID NO: 14847 - DNA, 17 bp, Arabidopsis thaliana
aatcgataaacggtcta

SEQ ID NO: 14848 - DNA, 17 bp, Arabidopsis thaliana
aatcgatatagagcgtc

SEQ ID NO: 14849 - DNA, 17 bp, Arabidopsis thaliana
aatcgatatggccgtct

SEQ ID NO: 14850 - DNA, 17 bp, Arabidopsis thaliana
aatcgatcagatgttga

SEQ ID NO: 14851 - DNA, 17 bp, Arabidopsis thaliana
aatcgatcggcggaccg

SEQ ID NO: 14852 - DNA, 17 bp, Arabidopsis thaliana
aatcgatgtcatgcttc

SEQ ID NO: 14853 - DNA, 17 bp, Arabidopsis thaliana
aatcgatgttgtaagtc

SEQ ID NO: 14854 - DNA, 17 bp, Arabidopsis thaliana
aatcgattctatggaac

SEQ ID NO: 14855 - DNA, 17 bp, Arabidopsis thaliana
aatcgattgttaaccac

SEQ ID NO: 14856 - DNA, 17 bp, Arabidopsis thaliana
aatcgatttcgattcca

SEQ ID NO: 14857 - DNA, 17 bp, Arabidopsis thaliana
aatcgatttggcctggt

SEQ ID NO: 14858 - DNA, 17 bp, Arabidopsis thaliana
aatcgcaaagtttcggt

SEQ ID NO: 14859 - DNA, 17 bp, Arabidopsis thaliana
aatcgcacttgatgata

SEQ ID NO: 14860 - DNA, 17 bp, Arabidopsis thaliana
aatcgcagaatagtcgc

SEQ ID NO: 14861 - DNA, 17 bp, Arabidopsis thaliana
aatcgcagatctacaaa

SEQ ID NO: 14862 - DNA, 17 bp, Arabidopsis thaliana
aatcgcagatctcaacc

SEQ ID NO: 14863 - DNA, 17 bp, Arabidopsis thaliana
aatcgcagcttctattt

SEQ ID NO: 14864 - DNA, 17 bp, Arabidopsis thaliana
aatcgcaggtcgctata

SEQ ID NO: 14865 - DNA, 17 bp, Arabidopsis thaliana
aatcgcatattgctgac

SEQ ID NO: 14866 - DNA, 17 bp, Arabidopsis thaliana
aatcgcatgtgtcggga

SEQ ID NO: 14867 - DNA, 17 bp, Arabidopsis thaliana
aatcgcattccaacatg

SEQ ID NO: 14868 - DNA, 17 bp, Arabidopsis thaliana
aatcgccagtgaccagc

SEQ ID NO: 14869 - DNA, 17 bp, Arabidopsis thaliana
aatcgccattaacccac

SEQ ID NO: 14870 - DNA, 17 bp, Arabidopsis thaliana
aatcgcccactttcttc

SEQ ID NO: 14871 - DNA, 17 bp, Arabidopsis thaliana
aatcgccggtcagccat

SEQ ID NO: 14872 - DNA, 17 bp, Arabidopsis thaliana
aatcgccggtttaacgg

SEQ ID NO: 14873 - DNA, 17 bp, Arabidopsis thaliana
aatcgcctatgtggata

SEQ ID NO: 14874 - DNA, 17 bp, Arabidopsis thaliana
aatcgcctgctacctga

SEQ ID NO: 14875 - DNA, 17 bp, Arabidopsis thaliana
aatcgcctgttcgagtg

SEQ ID NO: 14876 - DNA, 17 bp, Arabidopsis thaliana
aatcgccttcacgacat

SEQ ID NO: 14877 - DNA, 17 bp, Arabidopsis thaliana
aatcgccttgataccaa

SEQ ID NO: 14878 - DNA, 17 bp, Arabidopsis thaliana
aatcgcctttgagagca

SEQ ID NO: 14879 - DNA, 17 bp, Arabidopsis thaliana
aatcgcgattttctccg

SEQ ID NO: 14880 - DNA, 17 bp, Arabidopsis thaliana
aatcgcggcaagtcgtt

SEQ ID NO: 14881 - DNA, 17 bp, Arabidopsis thaliana
aatcgcgggttgcttgc

SEQ ID NO: 14882 - DNA, 17 bp, Arabidopsis thaliana
aatcgcggtacagtaaa

SEQ ID NO: 14883 - DNA, 17 bp, Arabidopsis thaliana
aatcgcggtgcttacaa

SEQ ID NO: 14884 - DNA, 17 bp, Arabidopsis thaliana
aatcgcggtggttacac

SEQ ID NO: 14885 - DNA, 17 bp, Arabidopsis thaliana
aatcgctaaaaccagcg

SEQ ID NO: 14886 - DNA, 17 bp, Arabidopsis thaliana
aatcgctaacgaccgaa

SEQ ID NO: 14887 - DNA, 17 bp, Arabidopsis thaliana
aatcgctaacgaccgta

SEQ ID NO: 14888 - DNA, 17 bp, Arabidopsis thaliana
aatcgctaacgactaat

SEQ ID NO: 14889 - DNA, 17 bp, Arabidopsis thaliana
aatcgctaacgactatt

SEQ ID NO: 14890 - DNA, 17 bp, Arabidopsis thaliana
aatcgctaatgacgaat

SEQ ID NO: 14891 - DNA, 17 bp, Arabidopsis thaliana
aatcgctatagtatccg

SEQ ID NO: 14892 - DNA, 17 bp, Arabidopsis thaliana
aatcgctctgttgctgg

SEQ ID NO: 14893 - DNA, 17 bp, Arabidopsis thaliana
aatcgctgaaacaagca

SEQ ID NO: 14894 - DNA, 17 bp, Arabidopsis thaliana
aatcgctgaaaccaggg

SEQ ID NO: 14895 - DNA, 17 bp, Arabidopsis thaliana
aatcgctgcgatagcga

SEQ ID NO: 14896 - DNA, 17 bp, Arabidopsis thaliana
aatcgctgcgtagagtg

SEQ ID NO: 14897 - DNA, 17 bp, Arabidopsis thaliana
aatcgctgcgttagtaa

SEQ ID NO: 14898 - DNA, 17 bp, Arabidopsis thaliana
aatcgctgtgcgccgtc

SEQ ID NO: 14899 - DNA, 17 bp, Arabidopsis thaliana
aatcgcttagtgaccag

SEQ ID NO: 14900 - DNA, 17 bp, Arabidopsis thaliana
aatcgcttctaggtaca

SEQ ID NO: 14901 - DNA, 17 bp, Arabidopsis thaliana
aatcgcttgtttgtgcc

SEQ ID NO: 14902 - DNA, 17 bp, Arabidopsis thaliana
aatcggaatgggttata

SEQ ID NO: 14903 - DNA, 17 bp, Arabidopsis thaliana
aatcggaccaactgatc

SEQ ID NO: 14904 - DNA, 17 bp, Arabidopsis thaliana
aatcggacgtcttcggc

SEQ ID NO: 14905 - DNA, 17 bp, Arabidopsis thaliana
aatcggactttgcagtt

SEQ ID NO: 14906 - DNA, 17 bp, Arabidopsis thaliana
aatcggagacttgcctt

SEQ ID NO: 14907 - DNA, 17 bp, Arabidopsis thaliana
aatcggagtgtgtatta

SEQ ID NO: 14908 - DNA, 17 bp, Arabidopsis thaliana
aatcggattagtgtttt

SEQ ID NO: 14909 - DNA, 17 bp, Arabidopsis thaliana
aatcggattcaggtcgg

SEQ ID NO: 14910 - DNA, 17 bp, Arabidopsis thaliana
aatcggattttctctcg

SEQ ID NO: 14911 - DNA, 17 bp, Arabidopsis thaliana
aatcggcatccattcag

SEQ ID NO: 14912 - DNA, 17 bp, Arabidopsis thaliana
aatcggcgacggcgaga

SEQ ID NO: 14913 - DNA, 17 bp, Arabidopsis thaliana
aatcggcgactaaatag

SEQ ID NO: 14914 - DNA, 17 bp, Arabidopsis thaliana
aatcggcggaccttatc

SEQ ID NO: 14915 - DNA, 17 bp, Arabidopsis thaliana
aatcggcggtgtttgtt

SEQ ID NO: 14916 - DNA, 17 bp, Arabidopsis thaliana
aatcggcgttgactgca

SEQ ID NO: 14917 - DNA, 17 bp, Arabidopsis thaliana
aatcggctggaaatcac

SEQ ID NO: 14918 - DNA, 17 bp, Arabidopsis thaliana
aatcggctttggatgtt

SEQ ID NO: 14919 - DNA, 17 bp, Arabidopsis thaliana
aatcgggatagacttcg

SEQ ID NO: 14920 - DNA, 17 bp, Arabidopsis thaliana
aatcgggatggttcgga

SEQ ID NO: 14921 - DNA, 17 bp, Arabidopsis thaliana
aatcgggctgatatccc

SEQ ID NO: 14922 - DNA, 17 bp, Arabidopsis thaliana
aatcggggtgtccatgt

SEQ ID NO: 14923 - DNA, 17 bp, Arabidopsis thaliana
aatcgggtccgaggaat

SEQ ID NO: 14924 - DNA, 17 bp, Arabidopsis thaliana
aatcggtgatcgggtga

SEQ ID NO: 14925 - DNA, 17 bp, Arabidopsis thaliana
aatcggtgcttcgttga

SEQ ID NO: 14926 - DNA, 17 bp, Arabidopsis thaliana
aatcggtgcttcgttgg

SEQ ID NO: 14927 - DNA, 17 bp, Arabidopsis thaliana
aatcggtggcttctgcg

SEQ ID NO: 14928 - DNA, 17 bp, Arabidopsis thaliana
aatcggtgtttcctctt

SEQ ID NO: 14929 - DNA, 17 bp, Arabidopsis thaliana
aatcggttcaccgggtc

SEQ ID NO: 14930 - DNA, 17 bp, Arabidopsis thaliana
aatcggttccggttttt

SEQ ID NO: 14931 - DNA, 17 bp, Arabidopsis thaliana
aatcggttcctgaatgg

SEQ ID NO: 14932 - DNA, 17 bp, Arabidopsis thaliana
aatcggttctgaccgaa

SEQ ID NO: 14933 - DNA, 17 bp, Arabidopsis thaliana
aatcggtttggatttgg

SEQ ID NO: 14934 - DNA, 17 bp, Arabidopsis thaliana
aatcgtaacggggtcaa

SEQ ID NO: 14935 - DNA, 17 bp, Arabidopsis thaliana
aatcgtaccgcattttt

SEQ ID NO: 14936 - DNA, 17 bp, Arabidopsis thaliana
aatcgtagccgtaactt

SEQ ID NO: 14937 - DNA, 17 bp, Arabidopsis thaliana
aatcgtatccggagcca

SEQ ID NO: 14938 - DNA, 17 bp, Arabidopsis thaliana
aatcgtcaacgttgtct

SEQ ID NO: 14939 - DNA, 17 bp, Arabidopsis thaliana
aatcgtcaatcggctgg

SEQ ID NO: 14940 - DNA, 17 bp, Arabidopsis thaliana
aatcgtcacaatccaat

SEQ ID NO: 14941 - DNA, 17 bp, Arabidopsis thaliana
aatcgtcacggcgtttt

SEQ ID NO: 14942 - DNA, 17 bp, Arabidopsis thaliana
aatcgtcattttgcgga

SEQ ID NO: 14943 - DNA, 17 bp, Arabidopsis thaliana
aatcgtccatcgctatg

SEQ ID NO: 14944 - DNA, 17 bp, Arabidopsis thaliana
aatcgtcccgcggtatt

SEQ ID NO: 14945 - DNA, 17 bp, Arabidopsis thaliana
aatcgtcctgcgatata

SEQ ID NO: 14946 - DNA, 17 bp, Arabidopsis thaliana
aatcgtcgaccgggtcc

SEQ ID NO: 14947 - DNA, 17 bp, Arabidopsis thaliana
aatcgtcgacgaactgt

SEQ ID NO: 14948 - DNA, 17 bp, Arabidopsis thaliana
aatcgtcgatctcacgc

SEQ ID NO: 14949 - DNA, 17 bp, Arabidopsis thaliana
aatcgtcgcgtcggttg

SEQ ID NO: 14950 - DNA, 17 bp, Arabidopsis thaliana
aatcgtcgtaacgtttc

SEQ ID NO: 14951 - DNA, 17 bp, Arabidopsis thaliana
aatcgtctaatttttag

SEQ ID NO: 14952 - DNA, 17 bp, Arabidopsis thaliana
aatcgtctatcgaaggg

SEQ ID NO: 14953 - DNA, 17 bp, Arabidopsis thaliana
aatcgtctcgcaggttt

SEQ ID NO: 14954 - DNA, 17 bp, Arabidopsis thaliana
aatcgtctcgcggatgg

SEQ ID NO: 14955 - DNA, 17 bp, Arabidopsis thaliana
aatcgtctctcaaactt

SEQ ID NO: 14956 - DNA, 17 bp, Arabidopsis thaliana
aatcgtctcttgtgtgt

SEQ ID NO: 14957 - DNA, 17 bp, Arabidopsis thaliana
aatcgtctgcctgggtg

SEQ ID NO: 14958 - DNA, 17 bp, Arabidopsis thaliana
aatcgtctgcgtcgtcg

SEQ ID NO: 14959 - DNA, 17 bp, Arabidopsis thaliana
aatcgtcttctcgttgc

SEQ ID NO: 14960 - DNA, 17 bp, Arabidopsis thaliana
aatcgtcttgcagtata

SEQ ID NO: 14961 - DNA, 17 bp, Arabidopsis thaliana
aatcgtcttgccgatgg

SEQ ID NO: 14962 - DNA, 17 bp, Arabidopsis thaliana
aatcgtcttgtagatgg

SEQ ID NO: 14963 - DNA, 17 bp, Arabidopsis thaliana
aatcgtctttcgtggat

SEQ ID NO: 14964 - DNA, 17 bp, Arabidopsis thaliana
aatcgtctttggatctg

SEQ ID NO: 14965 - DNA, 17 bp, Arabidopsis thaliana
aatcgtgagtaaaaaaa

SEQ ID NO: 14966 - DNA, 17 bp, Arabidopsis thaliana
aatcgtgagtgtggtat

SEQ ID NO: 14967 - DNA, 17 bp, Arabidopsis thaliana
aatcgtggaattgcgtt

SEQ ID NO: 14968 - DNA, 17 bp, Arabidopsis thaliana
aatcgtggagttgggac

SEQ ID NO: 14969 - DNA, 17 bp, Arabidopsis thaliana
aatcgtggtctgcagca

SEQ ID NO: 14970 - DNA, 17 bp, Arabidopsis thaliana
aatcgtgtagttgggac

SEQ ID NO: 14971 - DNA, 17 bp, Arabidopsis thaliana
aatcgttaagtccattc

SEQ ID NO: 14972 - DNA, 17 bp, Arabidopsis thaliana
aatcgttattcggtcag

SEQ ID NO: 14973 - DNA, 17 bp, Arabidopsis thaliana
aatcgttcaccgtgggt

SEQ ID NO: 14974 - DNA, 17 bp, Arabidopsis thaliana
aatcgttcaggttcgtt

SEQ ID NO: 14975 - DNA, 17 bp, Arabidopsis thaliana
aatcgttccacaacttg

SEQ ID NO: 14976 - DNA, 17 bp, Arabidopsis thaliana
aatcgttccgattgtta

SEQ ID NO: 14977 - DNA, 17 bp, Arabidopsis thaliana
aatcgttcggcaaaatt

SEQ ID NO: 14978 - DNA, 17 bp, Arabidopsis thaliana
aatcgttcggtaatgtt

SEQ ID NO: 14979 - DNA, 17 bp, Arabidopsis thaliana
aatcgttcgtctgactt

SEQ ID NO: 14980 - DNA, 17 bp, Arabidopsis thaliana
aatcgttctgccctgct

SEQ ID NO: 14981 - DNA, 17 bp, Arabidopsis thaliana
aatcgttgaccggtcat

SEQ ID NO: 14982 - DNA, 17 bp, Arabidopsis thaliana
aatcgttgatcaggcca

SEQ ID NO: 14983 - DNA, 17 bp, Arabidopsis thaliana
aatcgttggcggttcac

SEQ ID NO: 14984 - DNA, 17 bp, Arabidopsis thaliana
aatcgtttctctgacag

SEQ ID NO: 14985 - DNA, 17 bp, Arabidopsis thaliana
aatcgtttgacttgaca

SEQ ID NO: 14986 - DNA, 17 bp, Arabidopsis thaliana
aatcgtttggaccatcg

SEQ ID NO: 14987 - DNA, 17 bp, Arabidopsis thaliana
aatcgtttggacttacg

SEQ ID NO: 14988 - DNA, 17 bp, Arabidopsis thaliana
aatcgtttgtcgcagag

SEQ ID NO: 14989 - DNA, 17 bp, Arabidopsis thaliana
aatcgttttgcggatga

SEQ ID NO: 14990 - DNA, 17 bp, Arabidopsis thaliana
aatcgtttttttacggg

SEQ ID NO: 14991 - DNA, 17 bp, Arabidopsis thaliana
aatctaaaatcacaatg

SEQ ID NO: 14992 - DNA, 17 bp, Arabidopsis thaliana
aatctaaagtggatttc

SEQ ID NO: 14993 - DNA, 17 bp, Arabidopsis thaliana
aatctaaatgcgggatt

SEQ ID NO: 14994 - DNA, 17 bp, Arabidopsis thaliana
aatctaacaagtcgcag

SEQ ID NO: 14995 - DNA, 17 bp, Arabidopsis thaliana
aatctaaccactggtat

SEQ ID NO: 14996 - DNA, 17 bp, Arabidopsis thaliana
aatctaaccgcccgcaa

SEQ ID NO: 14997 - DNA, 17 bp, Arabidopsis thaliana
aatctaaccgctaccgc

SEQ ID NO: 14998 - DNA, 17 bp, Arabidopsis thaliana
aatctaaccggattttg

SEQ ID NO: 14999 - DNA, 17 bp, Arabidopsis thaliana
aatctaacctggtgtcg

SEQ ID NO: 15000 - DNA, 17 bp, Arabidopsis thaliana
aatctaagctgaacagc

SEQ ID NO: 15001 - DNA, 17 bp, Arabidopsis thaliana
aatctaagtgttgagct

SEQ ID NO: 15002 - DNA, 17 bp, Arabidopsis thaliana
aatctaagtgttgagtt

SEQ ID NO: 15003 - DNA, 17 bp, Arabidopsis thaliana
aatctaatcgctactgc

SEQ ID NO: 15004 - DNA, 17 bp, Arabidopsis thaliana
aatctaatggactctca

SEQ ID NO: 15005 - DNA, 17 bp, Arabidopsis thaliana
aatctaattgggtcaaa

SEQ ID NO: 15006 - DNA, 17 bp, Arabidopsis thaliana
aatctaatttatcgggg

SEQ ID NO: 15007 - DNA, 17 bp, Arabidopsis thaliana
aatctacagatctcaat

SEQ ID NO: 15008 - DNA, 17 bp, Arabidopsis thaliana
aatctaccgttgagcgg

SEQ ID NO: 15009 - DNA, 17 bp, Arabidopsis thaliana
aatctacctcgcgtatc

SEQ ID NO: 15010 - DNA, 17 bp, Arabidopsis thaliana
aatctacgataagtccg

SEQ ID NO: 15011 - DNA, 17 bp, Arabidopsis thaliana
aatctacgcaacgcaat

SEQ ID NO: 15012 - DNA, 17 bp, Arabidopsis thaliana
aatctacgtagtctggc

SEQ ID NO: 15013 - DNA, 17 bp, Arabidopsis thaliana
aatctacgttagcgttt

SEQ ID NO: 15014 - DNA, 17 bp, Arabidopsis thaliana
aatctactcacctgacc

SEQ ID NO: 15015 - DNA, 17 bp, Arabidopsis thaliana
aatctactcgctttgtt

SEQ ID NO: 15016 - DNA, 17 bp, Arabidopsis thaliana
aatctactcgttggaag

SEQ ID NO: 15017 - DNA, 17 bp, Arabidopsis thaliana
aatctactgggtttcgg

SEQ ID NO: 15018 - DNA, 17 bp, Arabidopsis thaliana
aatctacttcttggttg

SEQ ID NO: 15019 - DNA, 17 bp, Arabidopsis thaliana
aatctactttaggtgag

SEQ ID NO: 15020 - DNA, 17 bp, Arabidopsis thaliana
aatctactttgttgtcg

SEQ ID NO: 15021 - DNA, 17 bp, Arabidopsis thaliana
aatctagaagatagtcg

SEQ ID NO: 15022 - DNA, 17 bp, Arabidopsis thaliana
aatctaggttacagtct

SEQ ID NO: 15023 - DNA, 17 bp, Arabidopsis thaliana
aatctaggttccaatca

SEQ ID NO: 15024 - DNA, 17 bp, Arabidopsis thaliana
aatctaggttcgaatct

SEQ ID NO: 15025 - DNA, 17 bp, Arabidopsis thaliana
aatctagtcttgtgaag

SEQ ID NO: 15026 - DNA, 17 bp, Arabidopsis thaliana
aatctatagtccgtacg

SEQ ID NO: 15027 - DNA, 17 bp, Arabidopsis thaliana
aatctatcaggtgcaga

SEQ ID NO: 15028 - DNA, 17 bp, Arabidopsis thaliana
aatctatccgccatgct

SEQ ID NO: 15029 - DNA, 17 bp, Arabidopsis thaliana
aatctatcgggtccgag

SEQ ID NO: 15030 - DNA, 17 bp, Arabidopsis thaliana
aatctatgactagtttg

SEQ ID NO: 15031 - DNA, 17 bp, Arabidopsis thaliana
aatctatgatcctctgg

SEQ ID NO: 15032 - DNA, 17 bp, Arabidopsis thaliana
aatctatgggtccgatt

SEQ ID NO: 15033 - DNA, 17 bp, Arabidopsis thaliana
aatctatgggtccggtt

SEQ ID NO: 15034 - DNA, 17 bp, Arabidopsis thaliana
aatctatggtcactggt

SEQ ID NO: 15035 - DNA, 17 bp, Arabidopsis thaliana
aatctatggttgcctga

SEQ ID NO: 15036 - DNA, 17 bp, Arabidopsis thaliana
aatctattacgttcgag

SEQ ID NO: 15037 - DNA, 17 bp, Arabidopsis thaliana
aatctattagattgtgc

SEQ ID NO: 15038 - DNA, 17 bp, Arabidopsis thaliana
aatctattagctcagtg

SEQ ID NO: 15039 - DNA, 17 bp, Arabidopsis thaliana
aatctatttgctccgcc

SEQ ID NO: 15040 - DNA, 17 bp, Arabidopsis thaliana
aatctcaacctcaattc

SEQ ID NO: 15041 - DNA, 17 bp, Arabidopsis thaliana
aatctcaactagttcag

SEQ ID NO: 15042 - DNA, 17 bp, Arabidopsis thaliana
aatctcaactcttctgc

SEQ ID NO: 15043 - DNA, 17 bp, Arabidopsis thaliana
aatctcaactttacccc

SEQ ID NO: 15044 - DNA, 17 bp, Arabidopsis thaliana
aatctcaactttaccct

SEQ ID NO: 15045 - DNA, 17 bp, Arabidopsis thaliana
aatctcaagcagctccg

SEQ ID NO: 15046 - DNA, 17 bp, Arabidopsis thaliana
aatctcaagtgtcaact

SEQ ID NO: 15047 - DNA, 17 bp, Arabidopsis thaliana
aatctcaatcggagagg

SEQ ID NO: 15048 - DNA, 17 bp, Arabidopsis thaliana
aatctcacatcatctca

SEQ ID NO: 15049 - DNA, 17 bp, Arabidopsis thaliana
aatctcacttccatagc

SEQ ID NO: 15050 - DNA, 17 bp, Arabidopsis thaliana
aatctcagaaacatggc

SEQ ID NO: 15051 - DNA, 17 bp, Arabidopsis thaliana
aatctcagagtcggttt

SEQ ID NO: 15052 - DNA, 17 bp, Arabidopsis thaliana
aatctcagagtttttct

SEQ ID NO: 15053 - DNA, 17 bp, Arabidopsis thaliana
aatctcagcaccagcag

SEQ ID NO: 15054 - DNA, 17 bp, Arabidopsis thaliana
aatctcagccgacggtg

SEQ ID NO: 15055 - DNA, 17 bp, Arabidopsis thaliana
aatctcagctgcaatag

SEQ ID NO: 15056 - DNA, 17 bp, Arabidopsis thaliana
aatctcagctgcctttt

SEQ ID NO: 15057 - DNA, 17 bp, Arabidopsis thaliana
aatctcaggagggatag

SEQ ID NO: 15058 - DNA, 17 bp, Arabidopsis thaliana
aatctcaggttaaccgg

SEQ ID NO: 15059 - DNA, 17 bp, Arabidopsis thaliana
aatctcagtcgacggtg

SEQ ID NO: 15060 - DNA, 17 bp, Arabidopsis thaliana
aatctcagtggatcgtg

SEQ ID NO: 15061 - DNA, 17 bp, Arabidopsis thaliana
aatctcagtttccaatt

SEQ ID NO: 15062 - DNA, 17 bp, Arabidopsis thaliana
aatctcatacgtcacgc

SEQ ID NO: 15063 - DNA, 17 bp, Arabidopsis thaliana
aatctcataggtctgaa

SEQ ID NO: 15064 - DNA, 17 bp, Arabidopsis thaliana
aatctcatatgtcacgc

SEQ ID NO: 15065 - DNA, 17 bp, Arabidopsis thaliana
aatctcatctttaccgt

SEQ ID NO: 15066 - DNA, 17 bp, Arabidopsis thaliana
aatctcattgtaagggc

SEQ ID NO: 15067 - DNA, 17 bp, Arabidopsis thaliana
aatctcatttgacacgc

SEQ ID NO: 15068 - DNA, 17 bp, Arabidopsis thaliana
aatctcatttgtccaat

SEQ ID NO: 15069 - DNA, 17 bp, Arabidopsis thaliana
aatctccaccttgtggt

SEQ ID NO: 15070 - DNA, 17 bp, Arabidopsis thaliana
aatctccactagctagt

SEQ ID NO: 15071 - DNA, 17 bp, Arabidopsis thaliana
aatctccagattcgtac

SEQ ID NO: 15072 - DNA, 17 bp, Arabidopsis thaliana
aatctccaggttcctct

SEQ ID NO: 15073 - DNA, 17 bp, Arabidopsis thaliana
aatctccatcaccgtct

SEQ ID NO: 15074 - DNA, 17 bp, Arabidopsis thaliana
aatctccatccgaagtt

SEQ ID NO: 15075 - DNA, 17 bp, Arabidopsis thaliana
aatctccatctccaact

SEQ ID NO: 15076 - DNA, 17 bp, Arabidopsis thaliana
aatctccatctttgctt

SEQ ID NO: 15077 - DNA, 17 bp, Arabidopsis thaliana
aatctcccaggtgcagg

SEQ ID NO: 15078 - DNA, 17 bp, Arabidopsis thaliana
aatctccgacctaatcg

SEQ ID NO: 15079 - DNA, 17 bp, Arabidopsis thaliana
aatctccgatttcttga

SEQ ID NO: 15080 - DNA, 17 bp, Arabidopsis thaliana
aatctccgattttcctg

SEQ ID NO: 15081 - DNA, 17 bp, Arabidopsis thaliana
aatctccgccggtggcc

SEQ ID NO: 15082 - DNA, 17 bp, Arabidopsis thaliana
aatctccggacgtaact

SEQ ID NO: 15083 - DNA, 17 bp, Arabidopsis thaliana
aatctccggatctgttg

SEQ ID NO: 15084 - DNA, 17 bp, Arabidopsis thaliana
aatctcctatgtccgtg

SEQ ID NO: 15085 - DNA, 17 bp, Arabidopsis thaliana
aatctcctcagttggcg

SEQ ID NO: 15086 - DNA, 17 bp, Arabidopsis thaliana
aatctcctgcaaacgca

SEQ ID NO: 15087 - DNA, 17 bp, Arabidopsis thaliana
aatctcctgcggtacag

SEQ ID NO: 15088 - DNA, 17 bp, Arabidopsis thaliana
aatctcctttggagaaa

SEQ ID NO: 15089 - DNA, 17 bp, Arabidopsis thaliana
aatctccttttgtcttt

SEQ ID NO: 15090 - DNA, 17 bp, Arabidopsis thaliana
aatctcgaagacctttg

SEQ ID NO: 15091 - DNA, 17 bp, Arabidopsis thaliana
aatctcgaattacaggt

SEQ ID NO: 15092 - DNA, 17 bp, Arabidopsis thaliana
aatctcgacaagccgtc

SEQ ID NO: 15093 - DNA, 17 bp, Arabidopsis thaliana
aatctcgacccattttg

SEQ ID NO: 15094 - DNA, 17 bp, Arabidopsis thaliana
aatctcgacttggccca

SEQ ID NO: 15095 - DNA, 17 bp, Arabidopsis thaliana
aatctcgatgggttctg

SEQ ID NO: 15096 - DNA, 17 bp, Arabidopsis thaliana
aatctcgctgtcgcgtc

SEQ ID NO: 15097 - DNA, 17 bp, Arabidopsis thaliana
aatctcgcttctgttcc

SEQ ID NO: 15098 - DNA, 17 bp, Arabidopsis thaliana
aatctcggctggctgtc

SEQ ID NO: 15099 - DNA, 17 bp, Arabidopsis thaliana
aatctcgggggtgttga

SEQ ID NO: 15100 - DNA, 17 bp, Arabidopsis thaliana
aatctcgggtttacgtt

SEQ ID NO: 15101 - DNA, 17 bp, Arabidopsis thaliana
aatctcggtccagacgt

SEQ ID NO: 15102 - DNA, 17 bp, Arabidopsis thaliana
aatctcggtccagccgt

SEQ ID NO: 15103 - DNA, 17 bp, Arabidopsis thaliana
aatctcggtcgattctg

SEQ ID NO: 15104 - DNA, 17 bp, Arabidopsis thaliana
aatctcggttgtctcta

SEQ ID NO: 15105 - DNA, 17 bp, Arabidopsis thaliana
aatctcgtccgtctctt

SEQ ID NO: 15106 - DNA, 17 bp, Arabidopsis thaliana
aatctcgtccgtcttct

SEQ ID NO: 15107 - DNA, 17 bp, Arabidopsis thaliana
aatctcgtctctgggtt

SEQ ID NO: 15108 - DNA, 17 bp, Arabidopsis thaliana
aatctcgtgcaaaatgt

SEQ ID NO: 15109 - DNA, 17 bp, Arabidopsis thaliana
aatctcgtgcagttact

SEQ ID NO: 15110 - DNA, 17 bp, Arabidopsis thaliana
aatctcgtgggcatgat

SEQ ID NO: 15111 - DNA, 17 bp, Arabidopsis thaliana
aatctcgtgttcggtct

SEQ ID NO: 15112 - DNA, 17 bp, Arabidopsis thaliana
aatctcgttttggccgc

SEQ ID NO: 15113 - DNA, 17 bp, Arabidopsis thaliana
aatctctacggagtgtg

SEQ ID NO: 15114 - DNA, 17 bp, Arabidopsis thaliana
aatctctacggcgttaa

SEQ ID NO: 15115 - DNA, 17 bp, Arabidopsis thaliana
aatctctagcagctccg

SEQ ID NO: 15116 - DNA, 17 bp, Arabidopsis thaliana
aatctctagggtttgga

SEQ ID NO: 15117 - DNA, 17 bp, Arabidopsis thaliana
aatctctatcagtttcg

SEQ ID NO: 15118 - DNA, 17 bp, Arabidopsis thaliana
aatctctatcggtttcg

SEQ ID NO: 15119 - DNA, 17 bp, Arabidopsis thaliana
aatctctcaaattgcgg

SEQ ID NO: 15120 - DNA, 17 bp, Arabidopsis thaliana
aatctctcaggtgtcgc

SEQ ID NO: 15121 - DNA, 17 bp, Arabidopsis thaliana
aatctctcatagaccgt

SEQ ID NO: 15122 - DNA, 17 bp, Arabidopsis thaliana
aatctctcatctaccgc

SEQ ID NO: 15123 - DNA, 17 bp, Arabidopsis thaliana
aatctctcttggaccat

SEQ ID NO: 15124 - DNA, 17 bp, Arabidopsis thaliana
aatctctgcaatatgtc

SEQ ID NO: 15125 - DNA, 17 bp, Arabidopsis thaliana
aatctctgccaggtttc

SEQ ID NO: 15126 - DNA, 17 bp, Arabidopsis thaliana
aatctctgcgtcagact

SEQ ID NO: 15127 - DNA, 17 bp, Arabidopsis thaliana
aatctctgctgtgctga

SEQ ID NO: 15128 - DNA, 17 bp, Arabidopsis thaliana
aatctctgggtaacttt

SEQ ID NO: 15129 - DNA, 17 bp, Arabidopsis thaliana
aatctctggtcaggata

SEQ ID NO: 15130 - DNA, 17 bp, Arabidopsis thaliana
aatctctggttttgcag

SEQ ID NO: 15131 - DNA, 17 bp, Arabidopsis thaliana
aatctctgtatgggctg

SEQ ID NO: 15132 - DNA, 17 bp, Arabidopsis thaliana
aatctctgtcaagtccc

SEQ ID NO: 15133 - DNA, 17 bp, Arabidopsis thaliana
aatctctgttggtgcca

SEQ ID NO: 15134 - DNA, 17 bp, Arabidopsis thaliana
aatctcttgaggtagtc

SEQ ID NO: 15135 - DNA, 17 bp, Arabidopsis thaliana
aatctcttgtcggcttt

SEQ ID NO: 15136 - DNA, 17 bp, Arabidopsis thaliana
aatctctttccaagatc

SEQ ID NO: 15137 - DNA, 17 bp, Arabidopsis thaliana
aatctctttgcggatgt

SEQ ID NO: 15138 - DNA, 17 bp, Arabidopsis thaliana
aatctctttggcccctt

SEQ ID NO: 15139 - DNA, 17 bp, Arabidopsis thaliana
aatctctttgtgaccaa

SEQ ID NO: 15140 - DNA, 17 bp, Arabidopsis thaliana
aatctctttttaggtag

SEQ ID NO: 15141 - DNA, 17 bp, Arabidopsis thaliana
aatctgaagcagggaga

SEQ ID NO: 15142 - DNA, 17 bp, Arabidopsis thaliana
aatctgaagcagttgag

SEQ ID NO: 15143 - DNA, 17 bp, Arabidopsis thaliana
aatctgaaggtcgcgtg

SEQ ID NO: 15144 - DNA, 17 bp, Arabidopsis thaliana
aatctgaatgccaccga

SEQ ID NO: 15145 - DNA, 17 bp, Arabidopsis thaliana
aatctgacaagtggcgt

SEQ ID NO: 15146 - DNA, 17 bp, Arabidopsis thaliana
aatctgaccgcctgcct

SEQ ID NO: 15147 - DNA, 17 bp, Arabidopsis thaliana
aatctgacggtcttgct

SEQ ID NO: 15148 - DNA, 17 bp, Arabidopsis thaliana
aatctgaggtgtattgc

SEQ ID NO: 15149 - DNA, 17 bp, Arabidopsis thaliana
aatctgagtggcggaaa

SEQ ID NO: 15150 - DNA, 17 bp, Arabidopsis thaliana
aatctgagttggcgatg

SEQ ID NO: 15151 - DNA, 17 bp, Arabidopsis thaliana
aatctgagttggcgatt

SEQ ID NO: 15152 - DNA, 17 bp, Arabidopsis thaliana
aatctgatgtggatttt

SEQ ID NO: 15153 - DNA, 17 bp, Arabidopsis thaliana
aatctgattggatgacc

SEQ ID NO: 15154 - DNA, 17 bp, Arabidopsis thaliana
aatctgattggcgggat

SEQ ID NO: 15155 - DNA, 17 bp, Arabidopsis thaliana
aatctgattgtatgacc

SEQ ID NO: 15156 - DNA, 17 bp, Arabidopsis thaliana
aatctgatttggtgttg

SEQ ID NO: 15157 - DNA, 17 bp, Arabidopsis thaliana
aatctgcaactcaattt

SEQ ID NO: 15158 - DNA, 17 bp, Arabidopsis thaliana
aatctgcacgactgttt

SEQ ID NO: 15159 - DNA, 17 bp, Arabidopsis thaliana
aatctgcacgattgttt

SEQ ID NO: 15160 - DNA, 17 bp, Arabidopsis thaliana
aatctgcatgaaccgtt

SEQ ID NO: 15161 - DNA, 17 bp, Arabidopsis thaliana
aatctgccataatttgc

SEQ ID NO: 15162 - DNA, 17 bp, Arabidopsis thaliana
aatctgccatgtaacgc

SEQ ID NO: 15163 - DNA, 17 bp, Arabidopsis thaliana
aatctgccgccttgtgg

SEQ ID NO: 15164 - DNA, 17 bp, Arabidopsis thaliana
aatctgccgcgatggat

SEQ ID NO: 15165 - DNA, 17 bp, Arabidopsis thaliana
aatctgccgggcctcct

SEQ ID NO: 15166 - DNA, 17 bp, Arabidopsis thaliana
aatctgccgttgagcgg

SEQ ID NO: 15167 - DNA, 17 bp, Arabidopsis thaliana
aatctgccttgacgacg

SEQ ID NO: 15168 - DNA, 17 bp, Arabidopsis thaliana
aatctgccttgcaggat

SEQ ID NO: 15169 - DNA, 17 bp, Arabidopsis thaliana
aatctgcgatacaccgt

SEQ ID NO: 15170 - DNA, 17 bp, Arabidopsis thaliana
aatctgcggtacaccgc

SEQ ID NO: 15171 - DNA, 17 bp, Arabidopsis thaliana
aatctgcgtgcttttac

SEQ ID NO: 15172 - DNA, 17 bp, Arabidopsis thaliana
aatctgctaacttgctg

SEQ ID NO: 15173 - DNA, 17 bp, Arabidopsis thaliana
aatctgctagacgatct

SEQ ID NO: 15174 - DNA, 17 bp, Arabidopsis thaliana
aatctgctatatttttt

SEQ ID NO: 15175 - DNA, 17 bp, Arabidopsis thaliana
aatctgctccgcctgat

SEQ ID NO: 15176 - DNA, 17 bp, Arabidopsis thaliana
aatctgctgaaagcgtt

SEQ ID NO: 15177 - DNA, 17 bp, Arabidopsis thaliana
aatctgctgggcctcat

SEQ ID NO: 15178 - DNA, 17 bp, Arabidopsis thaliana
aatctgctgggcctccc

SEQ ID NO: 15179 - DNA, 17 bp, Arabidopsis thaliana
aatctgctgggcctcct

SEQ ID NO: 15180 - DNA, 17 bp, Arabidopsis thaliana
aatctgctgttgctcct

SEQ ID NO: 15181 - DNA, 17 bp, Arabidopsis thaliana
aatctgcttcttgaacc

SEQ ID NO: 15182 - DNA, 17 bp, Arabidopsis thaliana
aatctgctttgacacgg

SEQ ID NO: 15183 - DNA, 17 bp, Arabidopsis thaliana
aatctggaaccttatcc

SEQ ID NO: 15184 - DNA, 17 bp, Arabidopsis thaliana
aatctggaccatagatt

SEQ ID NO: 15185 - DNA, 17 bp, Arabidopsis thaliana
aatctggaccgtttaaa

SEQ ID NO: 15186 - DNA, 17 bp, Arabidopsis thaliana
aatctggatcctagctt

SEQ ID NO: 15187 - DNA, 17 bp, Arabidopsis thaliana
aatctggccaaagttga

SEQ ID NO: 15188 - DNA, 17 bp, Arabidopsis thaliana
aatctggcccaagtcgt

SEQ ID NO: 15189 - DNA, 17 bp, Arabidopsis thaliana
aatctggcgatttcgaa

SEQ ID NO: 15190 - DNA, 17 bp, Arabidopsis thaliana
aatctggctggaccagt

SEQ ID NO: 15191 - DNA, 17 bp, Arabidopsis thaliana
aatctggcttgacttag

SEQ ID NO: 15192 - DNA, 17 bp, Arabidopsis thaliana
aatctgggaagctgcat

SEQ ID NO: 15193 - DNA, 17 bp, Arabidopsis thaliana
aatctgggttcatcggc

SEQ ID NO: 15194 - DNA, 17 bp, Arabidopsis thaliana
aatctggtcatgtggtt

SEQ ID NO: 15195 - DNA, 17 bp, Arabidopsis thaliana
aatctggtcccggttga

SEQ ID NO: 15196 - DNA, 17 bp, Arabidopsis thaliana
aatctggtcctctggag

SEQ ID NO: 15197 - DNA, 17 bp, Arabidopsis thaliana
aatctggtcgcaaacat

SEQ ID NO: 15198 - DNA, 17 bp, Arabidopsis thaliana
aatctggtgtgaatccc

SEQ ID NO: 15199 - DNA, 17 bp, Arabidopsis thaliana
aatctggtgtgcctctg

SEQ ID NO: 15200 - DNA, 17 bp, Arabidopsis thaliana
aatctggtttgtagaca

SEQ ID NO: 15201 - DNA, 17 bp, Arabidopsis thaliana
aatctgtaccggtcaat

SEQ ID NO: 15202 - DNA, 17 bp, Arabidopsis thaliana
aatctgtagccacaaac

SEQ ID NO: 15203 - DNA, 17 bp, Arabidopsis thaliana
aatctgtagcccatcta

SEQ ID NO: 15204 - DNA, 17 bp, Arabidopsis thaliana
aatctgtatccagaaag

SEQ ID NO: 15205 - DNA, 17 bp, Arabidopsis thaliana
aatctgtcagcggtcca

SEQ ID NO: 15206 - DNA, 17 bp, Arabidopsis thaliana
aatctgtcagttgggct

SEQ ID NO: 15207 - DNA, 17 bp, Arabidopsis thaliana
aatctgtctgctcagac

SEQ ID NO: 15208 - DNA, 17 bp, Arabidopsis thaliana
aatctgtggaccaaaat

SEQ ID NO: 15209 - DNA, 17 bp, Arabidopsis thaliana
aatctgtggctcttgtt

SEQ ID NO: 15210 - DNA, 17 bp, Arabidopsis thaliana
aatctgtgttaggccgt

SEQ ID NO: 15211 - DNA, 17 bp, Arabidopsis thaliana
aatctgttatgggtctc

SEQ ID NO: 15212 - DNA, 17 bp, Arabidopsis thaliana
aatctgttgaggccctc

SEQ ID NO: 15213 - DNA, 17 bp, Arabidopsis thaliana
aatctgttgaggccttg

SEQ ID NO: 15214 - DNA, 17 bp, Arabidopsis thaliana
aatctgttgtcgatcta

SEQ ID NO: 15215 - DNA, 17 bp, Arabidopsis thaliana
aatctgttgttggtctg

SEQ ID NO: 15216 - DNA, 17 bp, Arabidopsis thaliana
aatctgttgtttgatgg

SEQ ID NO: 15217 - DNA, 17 bp, Arabidopsis thaliana
aatcttacggatatgcc

SEQ ID NO: 15218 - DNA, 17 bp, Arabidopsis thaliana
aatcttactagcaggtt

SEQ ID NO: 15219 - DNA, 17 bp, Arabidopsis thaliana
aatcttactcaccaagg

SEQ ID NO: 15220 - DNA, 17 bp, Arabidopsis thaliana
aatcttagaattgacgg

SEQ ID NO: 15221 - DNA, 17 bp, Arabidopsis thaliana
aatcttagattcaatcc

SEQ ID NO: 15222 - DNA, 17 bp, Arabidopsis thaliana
aatcttagcgacaaagg

SEQ ID NO: 15223 - DNA, 17 bp, Arabidopsis thaliana
aatcttagctgactact

SEQ ID NO: 15224 - DNA, 17 bp, Arabidopsis thaliana
aatcttaggtttgttgc

SEQ ID NO: 15225 - DNA, 17 bp, Arabidopsis thaliana
aatcttagtggatgttc

SEQ ID NO: 15226 - DNA, 17 bp, Arabidopsis thaliana
aatcttagttgtctcag

SEQ ID NO: 15227 - DNA, 17 bp, Arabidopsis thaliana
aatcttatcggctgtcc

SEQ ID NO: 15228 - DNA, 17 bp, Arabidopsis thaliana
aatcttatgcgattgtt

SEQ ID NO: 15229 - DNA, 17 bp, Arabidopsis thaliana
aatcttatttgccagct

SEQ ID NO: 15230 - DNA, 17 bp, Arabidopsis thaliana
aatcttcaagacttggt

SEQ ID NO: 15231 - DNA, 17 bp, Arabidopsis thaliana
aatcttcaccgaattag

SEQ ID NO: 15232 - DNA, 17 bp, Arabidopsis thaliana
aatcttcacttgaatcc

SEQ ID NO: 15233 - DNA, 17 bp, Arabidopsis thaliana
aatcttcacttgaggtc

SEQ ID NO: 15234 - DNA, 17 bp, Arabidopsis thaliana
aatcttcacttgaggtt

SEQ ID NO: 15235 - DNA, 17 bp, Arabidopsis thaliana
aatcttcaggccagctc

SEQ ID NO: 15236 - DNA, 17 bp, Arabidopsis thaliana
aatcttcatcgttggaa

SEQ ID NO: 15237 - DNA, 17 bp, Arabidopsis thaliana
aatcttcattgagatgg

SEQ ID NO: 15238 - DNA, 17 bp, Arabidopsis thaliana
aatcttccatcgctttt

SEQ ID NO: 15239 - DNA, 17 bp, Arabidopsis thaliana
aatcttcccatcaacct

SEQ ID NO: 15240 - DNA, 17 bp, Arabidopsis thaliana
aatcttccgcctcatgc

SEQ ID NO: 15241 - DNA, 17 bp, Arabidopsis thaliana
aatcttcctcaggctgc

SEQ ID NO: 15242 - DNA, 17 bp, Arabidopsis thaliana
aatcttcctgctttggt

SEQ ID NO: 15243 - DNA, 17 bp, Arabidopsis thaliana
aatcttccttgagcgca

SEQ ID NO: 15244 - DNA, 17 bp, Arabidopsis thaliana
aatcttcggaacctcat

SEQ ID NO: 15245 - DNA, 17 bp, Arabidopsis thaliana
aatcttcggacataacc

SEQ ID NO: 15246 - DNA, 17 bp, Arabidopsis thaliana
aatcttcggacgtaacc

SEQ ID NO: 15247 - DNA, 17 bp, Arabidopsis thaliana
aatcttcggacgtaact

SEQ ID NO: 15248 - DNA, 17 bp, Arabidopsis thaliana
aatcttcggactgtgga

SEQ ID NO: 15249 - DNA, 17 bp, Arabidopsis thaliana
aatcttcggagtcatgt

SEQ ID NO: 15250 - DNA, 17 bp, Arabidopsis thaliana
aatcttcgggttcggtt

SEQ ID NO: 15251 - DNA, 17 bp, Arabidopsis thaliana
aatcttcggtgttgtgt

SEQ ID NO: 15252 - DNA, 17 bp, Arabidopsis thaliana
aatcttcgtagaggtcg

SEQ ID NO: 15253 - DNA, 17 bp, Arabidopsis thaliana
aatcttctactggtaca

SEQ ID NO: 15254 - DNA, 17 bp, Arabidopsis thaliana
aatcttctagttggatg

SEQ ID NO: 15255 - DNA, 17 bp, Arabidopsis thaliana
aatcttctcagttgact

SEQ ID NO: 15256 - DNA, 17 bp, Arabidopsis thaliana
aatcttctcggctacgt

SEQ ID NO: 15257 - DNA, 17 bp, Arabidopsis thaliana
aatcttctcgtactgga

SEQ ID NO: 15258 - DNA, 17 bp, Arabidopsis thaliana
aatcttctcttacccgg

SEQ ID NO: 15259 - DNA, 17 bp, Arabidopsis thaliana
aatcttctgagatttcc

SEQ ID NO: 15260 - DNA, 17 bp, Arabidopsis thaliana
aatcttctgtgggtcgt

SEQ ID NO: 15261 - DNA, 17 bp, Arabidopsis thaliana
aatcttctgttttacca

SEQ ID NO: 15262 - DNA, 17 bp, Arabidopsis thaliana
aatcttcttggcgtgca

SEQ ID NO: 15263 - DNA, 17 bp, Arabidopsis thaliana
aatcttctttgaggttt

SEQ ID NO: 15264 - DNA, 17 bp, Arabidopsis thaliana
aatcttctttgggtctg

SEQ ID NO: 15265 - DNA, 17 bp, Arabidopsis thaliana
aatcttgaccgaacctc

SEQ ID NO: 15266 - DNA, 17 bp, Arabidopsis thaliana
aatcttgagcgacgagt

SEQ ID NO: 15267 - DNA, 17 bp, Arabidopsis thaliana
aatcttgatgatgctgc

SEQ ID NO: 15268 - DNA, 17 bp, Arabidopsis thaliana
aatcttgatgtcctcag

SEQ ID NO: 15269 - DNA, 17 bp, Arabidopsis thaliana
aatcttgatgtgggttc

SEQ ID NO: 15270 - DNA, 17 bp, Arabidopsis thaliana
aatcttgattcctcgac

SEQ ID NO: 15271 - DNA, 17 bp, Arabidopsis thaliana
aatcttgcaaatgatcc

SEQ ID NO: 15272 - DNA, 17 bp, Arabidopsis thaliana
aatcttgcaaatgattc

SEQ ID NO: 15273 - DNA, 17 bp, Arabidopsis thaliana
aatcttgccacatatcc

SEQ ID NO: 15274 - DNA, 17 bp, Arabidopsis thaliana
aatcttgcccattcttg

SEQ ID NO: 15275 - DNA, 17 bp, Arabidopsis thaliana
aatcttgccttccggat

SEQ ID NO: 15276 - DNA, 17 bp, Arabidopsis thaliana
aatcttgcctttcggtg

SEQ ID NO: 15277 - DNA, 17 bp, Arabidopsis thaliana
aatcttgcgattttaaa

SEQ ID NO: 15278 - DNA, 17 bp, Arabidopsis thaliana
aatcttgcgtttattct

SEQ ID NO: 15279 - DNA, 17 bp, Arabidopsis thaliana
aatcttgctttggacct

SEQ ID NO: 15280 - DNA, 17 bp, Arabidopsis thaliana
aatcttggagttggaac

SEQ ID NO: 15281 - DNA, 17 bp, Arabidopsis thaliana
aatcttggagttggact

SEQ ID NO: 15282 - DNA, 17 bp, Arabidopsis thaliana
aatcttggatcctagat

SEQ ID NO: 15283 - DNA, 17 bp, Arabidopsis thaliana
aatcttggcatgtgata

SEQ ID NO: 15284 - DNA, 17 bp, Arabidopsis thaliana
aatcttggcccgataca

SEQ ID NO: 15285 - DNA, 17 bp, Arabidopsis thaliana
aatcttggctcgactaa

SEQ ID NO: 15286 - DNA, 17 bp, Arabidopsis thaliana
aatcttggctgcagtgg

SEQ ID NO: 15287 - DNA, 17 bp, Arabidopsis thaliana
aatcttgggctcacatg

SEQ ID NO: 15288 - DNA, 17 bp, Arabidopsis thaliana
aatcttgggtatcaggt

SEQ ID NO: 15289 - DNA, 17 bp, Arabidopsis thaliana
aatcttgggtctatctt

SEQ ID NO: 15290 - DNA, 17 bp, Arabidopsis thaliana
aatcttgggtttttgcg

SEQ ID NO: 15291 - DNA, 17 bp, Arabidopsis thaliana
aatcttggtcctttggt

SEQ ID NO: 15292 - DNA, 17 bp, Arabidopsis thaliana
aatcttggtggtatggg

SEQ ID NO: 15293 - DNA, 17 bp, Arabidopsis thaliana
aatcttggttagcgttt

SEQ ID NO: 15294 - DNA, 17 bp, Arabidopsis thaliana
aatcttggttcgtgctg

SEQ ID NO: 15295 - DNA, 17 bp, Arabidopsis thaliana
aatcttggttgaatcca

SEQ ID NO: 15296 - DNA, 17 bp, Arabidopsis thaliana
aatcttgtagctggcgg

SEQ ID NO: 15297 - DNA, 17 bp, Arabidopsis thaliana
aatcttgtgtccgacaa

SEQ ID NO: 15298 - DNA, 17 bp, Arabidopsis thaliana
aatcttgtttctggagt

SEQ ID NO: 15299 - DNA, 17 bp, Arabidopsis thaliana
aatctttaacagctgtc

SEQ ID NO: 15300 - DNA, 17 bp, Arabidopsis thaliana
aatctttacgagtggca

SEQ ID NO: 15301 - DNA, 17 bp, Arabidopsis thaliana
aatctttactacgcggg

SEQ ID NO: 15302 - DNA, 17 bp, Arabidopsis thaliana
aatctttaggttcattt

SEQ ID NO: 15303 - DNA, 17 bp, Arabidopsis thaliana
aatctttcaagccatgt

SEQ ID NO: 15304 - DNA, 17 bp, Arabidopsis thaliana
aatctttcagggtaacg

SEQ ID NO: 15305 - DNA, 17 bp, Arabidopsis thaliana
aatctttccaggcccga

SEQ ID NO: 15306 - DNA, 17 bp, Arabidopsis thaliana
aatctttccgccaaagg

SEQ ID NO: 15307 - DNA, 17 bp, Arabidopsis thaliana
aatctttctagaaccga

SEQ ID NO: 15308 - DNA, 17 bp, Arabidopsis thaliana
aatctttgaaatttcat

SEQ ID NO: 15309 - DNA, 17 bp, Arabidopsis thaliana
aatctttgaagggcttt

SEQ ID NO: 15310 - DNA, 17 bp, Arabidopsis thaliana
aatctttgaggagagtg

SEQ ID NO: 15311 - DNA, 17 bp, Arabidopsis thaliana
aatctttgatgacccgt

SEQ ID NO: 15312 - DNA, 17 bp, Arabidopsis thaliana
aatctttgatgacgcgt

SEQ ID NO: 15313 - DNA, 17 bp, Arabidopsis thaliana
aatctttgatgatctgt

SEQ ID NO: 15314 - DNA, 17 bp, Arabidopsis thaliana
aatctttgatggtgtag

SEQ ID NO: 15315 - DNA, 17 bp, Arabidopsis thaliana
aatctttgccgactgga

SEQ ID NO: 15316 - DNA, 17 bp, Arabidopsis thaliana
aatctttgccggtggtt

SEQ ID NO: 15317 - DNA, 17 bp, Arabidopsis thaliana
aatctttgctctttgga

SEQ ID NO: 15318 - DNA, 17 bp, Arabidopsis thaliana
aatctttgctttgcggc

SEQ ID NO: 15319 - DNA, 17 bp, Arabidopsis thaliana
aatctttggatgtgctt

SEQ ID NO: 15320 - DNA, 17 bp, Arabidopsis thaliana
aatctttggttggtcct

SEQ ID NO: 15321 - DNA, 17 bp, Arabidopsis thaliana
aatctttgtcaacatct

SEQ ID NO: 15322 - DNA, 17 bp, Arabidopsis thaliana
aatctttgtcctcgtag

SEQ ID NO: 15323 - DNA, 17 bp, Arabidopsis thaliana
aatctttgtctttgacc

SEQ ID NO: 15324 - DNA, 17 bp, Arabidopsis thaliana
aatcttttcttcttccg

SEQ ID NO: 15325 - DNA, 17 bp, Arabidopsis thaliana
aatcttttttcgtacca

SEQ ID NO: 15326 - DNA, 17 bp, Arabidopsis thaliana
aatcttttttcgtaccg

SEQ ID NO: 15327 - DNA, 17 bp, Arabidopsis thaliana
aatcttttttgctgaag

SEQ ID NO: 15328 - DNA, 17 bp, Arabidopsis thaliana
aatctttttttgagcgt

SEQ ID NO: 15329 - DNA, 17 bp, Arabidopsis thaliana
aatgaaaaccgaactgc

SEQ ID NO: 15330 - DNA, 17 bp, Arabidopsis thaliana
aatgaaaacggctctac

SEQ ID NO: 15331 - DNA, 17 bp, Arabidopsis thaliana
aatgaaaatgggctgcc

SEQ ID NO: 15332 - DNA, 17 bp, Arabidopsis thaliana
aatgaaacaacccgacc

SEQ ID NO: 15333 - DNA, 17 bp, Arabidopsis thaliana
aatgaaacatctactgt

SEQ ID NO: 15334 - DNA, 17 bp, Arabidopsis thaliana
aatgaaacatctgctgt

SEQ ID NO: 15335 - DNA, 17 bp, Arabidopsis thaliana
aatgaaacctctttgga

SEQ ID NO: 15336 - DNA, 17 bp, Arabidopsis thaliana
aatgaaacgacccattt

SEQ ID NO: 15337 - DNA, 17 bp, Arabidopsis thaliana
aatgaaaggaggcggtt

SEQ ID NO: 15338 - DNA, 17 bp, Arabidopsis thaliana
aatgaaaggcgtagtcc

SEQ ID NO: 15339 - DNA, 17 bp, Arabidopsis thaliana
aatgaaaggctcagcct

SEQ ID NO: 15340 - DNA, 17 bp, Arabidopsis thaliana
aatgaaagtggagtggg

SEQ ID NO: 15341 - DNA, 17 bp, Arabidopsis thaliana
aatgaaagtgtcggcca

SEQ ID NO: 15342 - DNA, 17 bp, Arabidopsis thaliana
aatgaaatcccgtagtg

SEQ ID NO: 15343 - DNA, 17 bp, Arabidopsis thaliana
aatgaaatccgatgtgg

SEQ ID NO: 15344 - DNA, 17 bp, Arabidopsis thaliana
aatgaaatccggggccc

SEQ ID NO: 15345 - DNA, 17 bp, Arabidopsis thaliana
aatgaaatttggacttt

SEQ ID NO: 15346 - DNA, 17 bp, Arabidopsis thaliana
aatgaaccattggtcaa

SEQ ID NO: 15347 - DNA, 17 bp, Arabidopsis thaliana
aatgaacccatggcatt

SEQ ID NO: 15348 - DNA, 17 bp, Arabidopsis thaliana
aatgaacccttggtcaa

SEQ ID NO: 15349 - DNA, 17 bp, Arabidopsis thaliana
aatgaacctggcaacac

SEQ ID NO: 15350 - DNA, 17 bp, Arabidopsis thaliana
aatgaacctggcaatct

SEQ ID NO: 15351 - DNA, 17 bp, Arabidopsis thaliana
aatgaacgcagcgtcaa

SEQ ID NO: 15352 - DNA, 17 bp, Arabidopsis thaliana
aatgaacgcagcgtcag

SEQ ID NO: 15353 - DNA, 17 bp, Arabidopsis thaliana
aatgaactgtctccgcg

SEQ ID NO: 15354 - DNA, 17 bp, Arabidopsis thaliana
aatgaactgtgtccgcg

SEQ ID NO: 15355 - DNA, 17 bp, Arabidopsis thaliana
aatgaagatgggcatta

SEQ ID NO: 15356 - DNA, 17 bp, Arabidopsis thaliana
aatgaagcctggtccga

SEQ ID NO: 15357 - DNA, 17 bp, Arabidopsis thaliana
aatgaagcctggtcgga

SEQ ID NO: 15358 - DNA, 17 bp, Arabidopsis thaliana
aatgaagtaatgcccgc

SEQ ID NO: 15359 - DNA, 17 bp, Arabidopsis thaliana
aatgaagttgctctcag

SEQ ID NO: 15360 - DNA, 17 bp, Arabidopsis thaliana
aatgaatagggcttagt

SEQ ID NO: 15361 - DNA, 17 bp, Arabidopsis thaliana
aatgaatctgtgttgcc

SEQ ID NO: 15362 - DNA, 17 bp, Arabidopsis thaliana
aatgaatcttgcgaaag

SEQ ID NO: 15363 - DNA, 17 bp, Arabidopsis thaliana
aatgaatgaaacggctt

SEQ ID NO: 15364 - DNA, 17 bp, Arabidopsis thaliana
aatgaatgagtttgcgg

SEQ ID NO: 15365 - DNA, 17 bp, Arabidopsis thaliana
aatgaattaggtctgtg

SEQ ID NO: 15366 - DNA, 17 bp, Arabidopsis thaliana
aatgaattgccgtcaga

SEQ ID NO: 15367 - DNA, 17 bp, Arabidopsis thaliana
aatgaattgtctccgcg

SEQ ID NO: 15368 - DNA, 17 bp, Arabidopsis thaliana
aatgaattgtctctgcg

SEQ ID NO: 15369 - DNA, 17 bp, Arabidopsis thaliana
aatgaattgtcttcgcg

SEQ ID NO: 15370 - DNA, 17 bp, Arabidopsis thaliana
aatgacaagtggcaatg

SEQ ID NO: 15371 - DNA, 17 bp, Arabidopsis thaliana
aatgacacaactaatca

SEQ ID NO: 15372 - DNA, 17 bp, Arabidopsis thaliana
aatgacacatgtgtcgc

SEQ ID NO: 15373 - DNA, 17 bp, Arabidopsis thaliana
aatgacagaaaccaagt

SEQ ID NO: 15374 - DNA, 17 bp, Arabidopsis thaliana
aatgacatcgctacaaa

SEQ ID NO: 15375 - DNA, 17 bp, Arabidopsis thaliana
aatgacatttccggagt

SEQ ID NO: 15376 - DNA, 17 bp, Arabidopsis thaliana
aatgaccaaattatcct

SEQ ID NO: 15377 - DNA, 17 bp, Arabidopsis thaliana
aatgaccaactttcgtt

SEQ ID NO: 15378 - DNA, 17 bp, Arabidopsis thaliana
aatgaccacaagttagc

SEQ ID NO: 15379 - DNA, 17 bp, Arabidopsis thaliana
aatgacccgggccgtga

SEQ ID NO: 15380 - DNA, 17 bp, Arabidopsis thaliana
aatgaccgcatgtaaag

SEQ ID NO: 15381 - DNA, 17 bp, Arabidopsis thaliana
aatgaccgctacactgc

SEQ ID NO: 15382 - DNA, 17 bp, Arabidopsis thaliana
aatgaccgctcagtgat

SEQ ID NO: 15383 - DNA, 17 bp, Arabidopsis thaliana
aatgaccggtcaacgat

SEQ ID NO: 15384 - DNA, 17 bp, Arabidopsis thaliana
aatgaccgtgaaacgga

SEQ ID NO: 15385 - DNA, 17 bp, Arabidopsis thaliana
aatgacctggtagccat

SEQ ID NO: 15386 - DNA, 17 bp, Arabidopsis thaliana
aatgaccttttcatgat

SEQ ID NO: 15387 - DNA, 17 bp, Arabidopsis thaliana
aatgacgaatgcctagc

SEQ ID NO: 15388 - DNA, 17 bp, Arabidopsis thaliana
aatgacgactacttcac

SEQ ID NO: 15389 - DNA, 17 bp, Arabidopsis thaliana
aatgacgcgtcatggga

SEQ ID NO: 15390 - DNA, 17 bp, Arabidopsis thaliana
aatgacgcttctgccct

SEQ ID NO: 15391 - DNA, 17 bp, Arabidopsis thaliana
aatgacggcttgtagag

SEQ ID NO: 15392 - DNA, 17 bp, Arabidopsis thaliana
aatgacgggatccaaag

SEQ ID NO: 15393 - DNA, 17 bp, Arabidopsis thaliana
aatgacgtctagggttt

SEQ ID NO: 15394 - DNA, 17 bp, Arabidopsis thaliana
aatgacgtggcggcttg

SEQ ID NO: 15395 - DNA, 17 bp, Arabidopsis thaliana
aatgacgtggtgtgtgc

SEQ ID NO: 15396 - DNA, 17 bp, Arabidopsis thaliana
aatgacgtggtttgata

SEQ ID NO: 15397 - DNA, 17 bp, Arabidopsis thaliana
aatgacgtgtcctaaat

SEQ ID NO: 15398 - DNA, 17 bp, Arabidopsis thaliana
aatgactaaaacttggt

SEQ ID NO: 15399 - DNA, 17 bp, Arabidopsis thaliana
aatgactaagtcaagtg

SEQ ID NO: 15400 - DNA, 17 bp, Arabidopsis thaliana
aatgactagaaattcat

SEQ ID NO: 15401 - DNA, 17 bp, Arabidopsis thaliana
aatgactatgctccagc

SEQ ID NO: 15402 - DNA, 17 bp, Arabidopsis thaliana
aatgactcatctccaag

SEQ ID NO: 15403 - DNA, 17 bp, Arabidopsis thaliana
aatgactcattcgcttg

SEQ ID NO: 15404 - DNA, 17 bp, Arabidopsis thaliana
aatgactctccgatttc

SEQ ID NO: 15405 - DNA, 17 bp, Arabidopsis thaliana
aatgactctccgctctc

SEQ ID NO: 15406 - DNA, 17 bp, Arabidopsis thaliana
aatgactctcggcaacg

SEQ ID NO: 15407 - DNA, 17 bp, Arabidopsis thaliana
aatgactcttccgctgc

SEQ ID NO: 15408 - DNA, 17 bp, Arabidopsis thaliana
aatgactctttccgctg

SEQ ID NO: 15409 - DNA, 17 bp, Arabidopsis thaliana
aatgactctttgtttgg

SEQ ID NO: 15410 - DNA, 17 bp, Arabidopsis thaliana
aatgactgataacggca

SEQ ID NO: 15411 - DNA, 17 bp, Arabidopsis thaliana
aatgactgcaaatccgt

SEQ ID NO: 15412 - DNA, 17 bp, Arabidopsis thaliana
aatgacttagctctcca

SEQ ID NO: 15413 - DNA, 17 bp, Arabidopsis thaliana
aatgacttcagggagat

SEQ ID NO: 15414 - DNA, 17 bp, Arabidopsis thaliana
aatgacttcgtggttgc

SEQ ID NO: 15415 - DNA, 17 bp, Arabidopsis thaliana
aatgacttctggcacaa

SEQ ID NO: 15416 - DNA, 17 bp, Arabidopsis thaliana
aatgacttctggggaac

SEQ ID NO: 15417 - DNA, 17 bp, Arabidopsis thaliana
aatgagaagtgcggtgc

SEQ ID NO: 15418 - DNA, 17 bp, Arabidopsis thaliana
aatgagacttatgccac

SEQ ID NO: 15419 - DNA, 17 bp, Arabidopsis thaliana
aatgagatagactaaac

SEQ ID NO: 15420 - DNA, 17 bp, Arabidopsis thaliana
aatgagatcaccatcgg

SEQ ID NO: 15421 - DNA, 17 bp, Arabidopsis thaliana
aatgagatccgccatta

SEQ ID NO: 15422 - DNA, 17 bp, Arabidopsis thaliana
aatgagatcggctcgtc

SEQ ID NO: 15423 - DNA, 17 bp, Arabidopsis thaliana
aatgagatgaactaaac

SEQ ID NO: 15424 - DNA, 17 bp, Arabidopsis thaliana
aatgagatggactaaac

SEQ ID NO: 15425 - DNA, 17 bp, Arabidopsis thaliana
aatgagatggagtaaac

SEQ ID NO: 15426 - DNA, 17 bp, Arabidopsis thaliana
aatgagatggtctcggc

SEQ ID NO: 15427 - DNA, 17 bp, Arabidopsis thaliana
aatgagatttcagtgga

SEQ ID NO: 15428 - DNA, 17 bp, Arabidopsis thaliana
aatgagccattcgcagt

SEQ ID NO: 15429 - DNA, 17 bp, Arabidopsis thaliana
aatgagccggcgactca

SEQ ID NO: 15430 - DNA, 17 bp, Arabidopsis thaliana
aatgagcctgttcgctc

SEQ ID NO: 15431 - DNA, 17 bp, Arabidopsis thaliana
aatgagctacctcgcga

SEQ ID NO: 15432 - DNA, 17 bp, Arabidopsis thaliana
aatgagctatcctctac

SEQ ID NO: 15433 - DNA, 17 bp, Arabidopsis thaliana
aatgagctcggtaggcg

SEQ ID NO: 15434 - DNA, 17 bp, Arabidopsis thaliana
aatgagctctccgacgg

SEQ ID NO: 15435 - DNA, 17 bp, Arabidopsis thaliana
aatgaggatggtgtaaa

SEQ ID NO: 15436 - DNA, 17 bp, Arabidopsis thaliana
aatgaggccactgcgag

SEQ ID NO: 15437 - DNA, 17 bp, Arabidopsis thaliana
aatgaggcgagatccgc

SEQ ID NO: 15438 - DNA, 17 bp, Arabidopsis thaliana
aatgaggcgtacgtgag

SEQ ID NO: 15439 - DNA, 17 bp, Arabidopsis thaliana
aatgagggcacgtctgc

SEQ ID NO: 15440 - DNA, 17 bp, Arabidopsis thaliana
aatgagggctagatctt

SEQ ID NO: 15441 - DNA, 17 bp, Arabidopsis thaliana
aatgagggttcacgttt

SEQ ID NO: 15442 - DNA, 17 bp, Arabidopsis thaliana
aatgagtagcggcttga

SEQ ID NO: 15443 - DNA, 17 bp, Arabidopsis thaliana
aatgagtatcatgtgac

SEQ ID NO: 15444 - DNA, 17 bp, Arabidopsis thaliana
aatgagtcagcgtgtga

SEQ ID NO: 15445 - DNA, 17 bp, Arabidopsis thaliana
aatgagtcgatttggca

SEQ ID NO: 15446 - DNA, 17 bp, Arabidopsis thaliana
aatgagtgcgtttgcgg

SEQ ID NO: 15447 - DNA, 17 bp, Arabidopsis thaliana
aatgagtgtccgatcac

SEQ ID NO: 15448 - DNA, 17 bp, Arabidopsis thaliana
aatgagttgatgagtca

SEQ ID NO: 15449 - DNA, 17 bp, Arabidopsis thaliana
aatgagttgtcgactgt

SEQ ID NO: 15450 - DNA, 17 bp, Arabidopsis thaliana
aatgataaaactgttgg

SEQ ID NO: 15451 - DNA, 17 bp, Arabidopsis thaliana
aatgataaaccagcggg

SEQ ID NO: 15452 - DNA, 17 bp, Arabidopsis thaliana
aatgataaaccctatcg

SEQ ID NO: 15453 - DNA, 17 bp, Arabidopsis thaliana
aatgataacgtgcggta

SEQ ID NO: 15454 - DNA, 17 bp, Arabidopsis thaliana
aatgataacgtgcggtt

SEQ ID NO: 15455 - DNA, 17 bp, Arabidopsis thaliana
aatgataagtgcacccc

SEQ ID NO: 15456 - DNA, 17 bp, Arabidopsis thaliana
aatgataagtgcacttt

SEQ ID NO: 15457 - DNA, 17 bp, Arabidopsis thaliana
aatgataatcactaatc

SEQ ID NO: 15458 - DNA, 17 bp, Arabidopsis thaliana
aatgatagacctgacac

SEQ ID NO: 15459 - DNA, 17 bp, Arabidopsis thaliana
aatgatagataagtact

SEQ ID NO: 15460 - DNA, 17 bp, Arabidopsis thaliana
aatgatattcaacattt

SEQ ID NO: 15461 - DNA, 17 bp, Arabidopsis thaliana
aatgatattccaacgga

SEQ ID NO: 15462 - DNA, 17 bp, Arabidopsis thaliana
aatgatcaaacgccttg

SEQ ID NO: 15463 - DNA, 17 bp, Arabidopsis thaliana
aatgatcacagttgtgt

SEQ ID NO: 15464 - DNA, 17 bp, Arabidopsis thaliana
aatgatccctgctggct

SEQ ID NO: 15465 - DNA, 17 bp, Arabidopsis thaliana
aatgatccgacggttca

SEQ ID NO: 15466 - DNA, 17 bp, Arabidopsis thaliana
aatgatcgcactattca

SEQ ID NO: 15467 - DNA, 17 bp, Arabidopsis thaliana
aatgatcgctctgttgc

SEQ ID NO: 15468 - DNA, 17 bp, Arabidopsis thaliana
aatgatctgatgtggtg

SEQ ID NO: 15469 - DNA, 17 bp, Arabidopsis thaliana
aatgatcttgggatgaa

SEQ ID NO: 15470 - DNA, 17 bp, Arabidopsis thaliana
aatgatgacctgcgttg

SEQ ID NO: 15471 - DNA, 17 bp, Arabidopsis thaliana
aatgatgagaaccacat

SEQ ID NO: 15472 - DNA, 17 bp, Arabidopsis thaliana
aatgatgagaaccacct

SEQ ID NO: 15473 - DNA, 17 bp, Arabidopsis thaliana
aatgatgagtcgatttg

SEQ ID NO: 15474 - DNA, 17 bp, Arabidopsis thaliana
aatgatgattcgcctct

SEQ ID NO: 15475 - DNA, 17 bp, Arabidopsis thaliana
aatgatgcgagtcggcc

SEQ ID NO: 15476 - DNA, 17 bp, Arabidopsis thaliana
aatgatgggcttagatg

SEQ ID NO: 15477 - DNA, 17 bp, Arabidopsis thaliana
aatgatgtacaattatg

SEQ ID NO: 15478 - DNA, 17 bp, Arabidopsis thaliana
aatgatgtccaatgcca

SEQ ID NO: 15479 - DNA, 17 bp, Arabidopsis thaliana
aatgatgtctcatgttt

SEQ ID NO: 15480 - DNA, 17 bp, Arabidopsis thaliana
aatgatgtgacgtgtgc

SEQ ID NO: 15481 - DNA, 17 bp, Arabidopsis thaliana
aatgatgtgatggttgc

SEQ ID NO: 15482 - DNA, 17 bp, Arabidopsis thaliana
aatgatgtggcacgtgc

SEQ ID NO: 15483 - DNA, 17 bp, Arabidopsis thaliana
aatgatgttataggccg

SEQ ID NO: 15484 - DNA, 17 bp, Arabidopsis thaliana
aatgatgttgcaagcct

SEQ ID NO: 15485 - DNA, 17 bp, Arabidopsis thaliana
aatgatgttgcacgcct

SEQ ID NO: 15486 - DNA, 17 bp, Arabidopsis thaliana
aatgatgttgcggttct

SEQ ID NO: 15487 - DNA, 17 bp, Arabidopsis thaliana
aatgattaacagggaca

SEQ ID NO: 15488 - DNA, 17 bp, Arabidopsis thaliana
aatgattacggttgatt

SEQ ID NO: 15489 - DNA, 17 bp, Arabidopsis thaliana
aatgattatgaaccgtc

SEQ ID NO: 15490 - DNA, 17 bp, Arabidopsis thaliana
aatgattatgctccagc

SEQ ID NO: 15491 - DNA, 17 bp, Arabidopsis thaliana
aatgattatggaccgtc

SEQ ID NO: 15492 - DNA, 17 bp, Arabidopsis thaliana
aatgattgtaaactgac

SEQ ID NO: 15493 - DNA, 17 bp, Arabidopsis thaliana
aatgatttctgatgatc

SEQ ID NO: 15494 - DNA, 17 bp, Arabidopsis thaliana
aatgatttgaagtgagg

SEQ ID NO: 15495 - DNA, 17 bp, Arabidopsis thaliana
aatgatttgaccaccta

SEQ ID NO: 15496 - DNA, 17 bp, Arabidopsis thaliana
aatgatttgaccactta

SEQ ID NO: 15497 - DNA, 17 bp, Arabidopsis thaliana
aatgattttcgcacaag

SEQ ID NO: 15498 - DNA, 17 bp, Arabidopsis thaliana
aatgattttggcagaaa

SEQ ID NO: 15499 - DNA, 17 bp, Arabidopsis thaliana
aatgattttggcagaag

SEQ ID NO: 15500 - DNA, 17 bp, Arabidopsis thaliana
aatgattttggcagatg

SEQ ID NO: 15501 - DNA, 17 bp, Arabidopsis thaliana
aatgcaaatgccgccat

SEQ ID NO: 15502 - DNA, 17 bp, Arabidopsis thaliana
aatgcaacacacacttc

SEQ ID NO: 15503 - DNA, 17 bp, Arabidopsis thaliana
aatgcaaccgtttggtc

SEQ ID NO: 15504 - DNA, 17 bp, Arabidopsis thaliana
aatgcaacgatccgagg

SEQ ID NO: 15505 - DNA, 17 bp, Arabidopsis thaliana
aatgcaacggttagatc

SEQ ID NO: 15506 - DNA, 17 bp, Arabidopsis thaliana
aatgcaactgcggcttg

SEQ ID NO: 15507 - DNA, 17 bp, Arabidopsis thaliana
aatgcaaggcttcacac

SEQ ID NO: 15508 - DNA, 17 bp, Arabidopsis thaliana
aatgcaaggtggacatt

SEQ ID NO: 15509 - DNA, 17 bp, Arabidopsis thaliana
aatgcaagttggccgag

SEQ ID NO: 15510 - DNA, 17 bp, Arabidopsis thaliana
aatgcacaagccaaatg

SEQ ID NO: 15511 - DNA, 17 bp, Arabidopsis thaliana
aatgcacactgatctga

SEQ ID NO: 15512 - DNA, 17 bp, Arabidopsis thaliana
aatgcaccataccgtat

SEQ ID NO: 15513 - DNA, 17 bp, Arabidopsis thaliana
aatgcaccggatcccat

SEQ ID NO: 15514 - DNA, 17 bp, Arabidopsis thaliana
aatgcacgtctgcctgg

SEQ ID NO: 15515 - DNA, 17 bp, Arabidopsis thaliana
aatgcactcggcgagtc

SEQ ID NO: 15516 - DNA, 17 bp, Arabidopsis thaliana
aatgcactgcctcttcc

SEQ ID NO: 15517 - DNA, 17 bp, Arabidopsis thaliana
aatgcagacctctgttg

SEQ ID NO: 15518 - DNA, 17 bp, Arabidopsis thaliana
aatgcagacgacctgat

SEQ ID NO: 15519 - DNA, 17 bp, Arabidopsis thaliana
aatgcagatggtcttat

SEQ ID NO: 15520 - DNA, 17 bp, Arabidopsis thaliana
aatgcagcaccatgatc

SEQ ID NO: 15521 - DNA, 17 bp, Arabidopsis thaliana
aatgcagccccaatcgg

SEQ ID NO: 15522 - DNA, 17 bp, Arabidopsis thaliana
aatgcagcgaatattct

SEQ ID NO: 15523 - DNA, 17 bp, Arabidopsis thaliana
aatgcaggaggtcaagt

SEQ ID NO: 15524 - DNA, 17 bp, Arabidopsis thaliana
aatgcaggcgacctgat

SEQ ID NO: 15525 - DNA, 17 bp, Arabidopsis thaliana
aatgcaggcgaccttat

SEQ ID NO: 15526 - DNA, 17 bp, Arabidopsis thaliana
aatgcaggcggcctgat

SEQ ID NO: 15527 - DNA, 17 bp, Arabidopsis thaliana
aatgcaggcggtctgat

SEQ ID NO: 15528 - DNA, 17 bp, Arabidopsis thaliana
aatgcaggcggtttgat

SEQ ID NO: 15529 - DNA, 17 bp, Arabidopsis thaliana
aatgcaggtagtctgat

SEQ ID NO: 15530 - DNA, 17 bp, Arabidopsis thaliana
aatgcaggtgacctgac

SEQ ID NO: 15531 - DNA, 17 bp, Arabidopsis thaliana
aatgcaggtgacttgat

SEQ ID NO: 15532 - DNA, 17 bp, Arabidopsis thaliana
aatgcaggtggacttcc

SEQ ID NO: 15533 - DNA, 17 bp, Arabidopsis thaliana
aatgcaggttcatcatt

SEQ ID NO: 15534 - DNA, 17 bp, Arabidopsis thaliana
aatgcagtggccgagta

SEQ ID NO: 15535 - DNA, 17 bp, Arabidopsis thaliana
aatgcatagttcgctaa

SEQ ID NO: 15536 - DNA, 17 bp, Arabidopsis thaliana
aatgcatatggacgggc

SEQ ID NO: 15537 - DNA, 17 bp, Arabidopsis thaliana
aatgcatatgggcggac

SEQ ID NO: 15538 - DNA, 17 bp, Arabidopsis thaliana
aatgcatgcggtctgac

SEQ ID NO: 15539 - DNA, 17 bp, Arabidopsis thaliana
aatgcatgctgtggttt

SEQ ID NO: 15540 - DNA, 17 bp, Arabidopsis thaliana
aatgcattaggcactgc

SEQ ID NO: 15541 - DNA, 17 bp, Arabidopsis thaliana
aatgcattggattgtga

SEQ ID NO: 15542 - DNA, 17 bp, Arabidopsis thaliana
aatgcattgtgagtggt

SEQ ID NO: 15543 - DNA, 17 bp, Arabidopsis thaliana
aatgccaagttctttcc

SEQ ID NO: 15544 - DNA, 17 bp, Arabidopsis thaliana
aatgccagagagtagtc

SEQ ID NO: 15545 - DNA, 17 bp, Arabidopsis thaliana
aatgccagagggtagtc

SEQ ID NO: 15546 - DNA, 17 bp, Arabidopsis thaliana
aatgccagggatagtca

SEQ ID NO: 15547 - DNA, 17 bp, Arabidopsis thaliana
aatgccagggggtaatc

SEQ ID NO: 15548 - DNA, 17 bp, Arabidopsis thaliana
aatgccagggggtagtc

SEQ ID NO: 15549 - DNA, 17 bp, Arabidopsis thaliana
aatgccaggggtagtca

SEQ ID NO: 15550 - DNA, 17 bp, Arabidopsis thaliana
aatgccagtaatattgc

SEQ ID NO: 15551 - DNA, 17 bp, Arabidopsis thaliana
aatgcccagcggattat

SEQ ID NO: 15552 - DNA, 17 bp, Arabidopsis thaliana
aatgcccgctgcgcctc

SEQ ID NO: 15553 - DNA, 17 bp, Arabidopsis thaliana
aatgcccgggttgttag

SEQ ID NO: 15554 - DNA, 17 bp, Arabidopsis thaliana
aatgccctaagtgttgc

SEQ ID NO: 15555 - DNA, 17 bp, Arabidopsis thaliana
aatgccctccataggta

SEQ ID NO: 15556 - DNA, 17 bp, Arabidopsis thaliana
aatgccctcttgatggc

SEQ ID NO: 15557 - DNA, 17 bp, Arabidopsis thaliana
aatgccctttcctgatg

SEQ ID NO: 15558 - DNA, 17 bp, Arabidopsis thaliana
aatgccgacaccatcac

SEQ ID NO: 15559 - DNA, 17 bp, Arabidopsis thaliana
aatgccgacaccatcat

SEQ ID NO: 15560 - DNA, 17 bp, Arabidopsis thaliana
aatgccgacctatggaa

SEQ ID NO: 15561 - DNA, 17 bp, Arabidopsis thaliana
aatgccgcggcaaccga

SEQ ID NO: 15562 - DNA, 17 bp, Arabidopsis thaliana
aatgccgcgtggaggta

SEQ ID NO: 15563 - DNA, 17 bp, Arabidopsis thaliana
aatgccggtgttaacct

SEQ ID NO: 15564 - DNA, 17 bp, Arabidopsis thaliana
aatgccggtgttaactt

SEQ ID NO: 15565 - DNA, 17 bp, Arabidopsis thaliana
aatgcctaaaacgacgc

SEQ ID NO: 15566 - DNA, 17 bp, Arabidopsis thaliana
aatgcctagcgcctaga

SEQ ID NO: 15567 - DNA, 17 bp, Arabidopsis thaliana
aatgcctaggaggttgc

SEQ ID NO: 15568 - DNA, 17 bp, Arabidopsis thaliana
aatgcctatcaagacac

SEQ ID NO: 15569 - DNA, 17 bp, Arabidopsis thaliana
aatgcctattgtgtcgg

SEQ ID NO: 15570 - DNA, 17 bp, Arabidopsis thaliana
aatgcctcggatgacca

SEQ ID NO: 15571 - DNA, 17 bp, Arabidopsis thaliana
aatgcctgttggtgcca

SEQ ID NO: 15572 - DNA, 17 bp, Arabidopsis thaliana
aatgccttatccctcac

SEQ ID NO: 15573 - DNA, 17 bp, Arabidopsis thaliana
aatgccttgctgaactt

SEQ ID NO: 15574 - DNA, 17 bp, Arabidopsis thaliana
aatgcctttcttgagcg

SEQ ID NO: 15575 - DNA, 17 bp, Arabidopsis thaliana
aatgcctttttcataat

SEQ ID NO: 15576 - DNA, 17 bp, Arabidopsis thaliana
aatgcctttttcattat

SEQ ID NO: 15577 - DNA, 17 bp, Arabidopsis thaliana
aatgcgaccaatctgag

SEQ ID NO: 15578 - DNA, 17 bp, Arabidopsis thaliana
aatgcgacgactcaacg

SEQ ID NO: 15579 - DNA, 17 bp, Arabidopsis thaliana
aatgcgactactctgca

SEQ ID NO: 15580 - DNA, 17 bp, Arabidopsis thaliana
aatgcgagccgaacgaa

SEQ ID NO: 15581 - DNA, 17 bp, Arabidopsis thaliana
aatgcgatacttggtgt

SEQ ID NO: 15582 - DNA, 17 bp, Arabidopsis thaliana
aatgcgatatggtgcct

SEQ ID NO: 15583 - DNA, 17 bp, Arabidopsis thaliana
aatgcgcagtattttgt

SEQ ID NO: 15584 - DNA, 17 bp, Arabidopsis thaliana
aatgcgcagtatttttt

SEQ ID NO: 15585 - DNA, 17 bp, Arabidopsis thaliana
aatgcgcagtcttttgt

SEQ ID NO: 15586 - DNA, 17 bp, Arabidopsis thaliana
aatgcgcagttttttgt

SEQ ID NO: 15587 - DNA, 17 bp, Arabidopsis thaliana
aatgcggctccaacgac

SEQ ID NO: 15588 - DNA, 17 bp, Arabidopsis thaliana
aatgcgggtttacgatt

SEQ ID NO: 15589 - DNA, 17 bp, Arabidopsis thaliana
aatgcggttccaactac

SEQ ID NO: 15590 - DNA, 17 bp, Arabidopsis thaliana
aatgcggttcggggctt

SEQ ID NO: 15591 - DNA, 17 bp, Arabidopsis thaliana
aatgcggtttatgtcac

SEQ ID NO: 15592 - DNA, 17 bp, Arabidopsis thaliana
aatgcggttttgagtgc

SEQ ID NO: 15593 - DNA, 17 bp, Arabidopsis thaliana
aatgcgttcctaatata

SEQ ID NO: 15594 - DNA, 17 bp, Arabidopsis thaliana
aatgcgttgccaaaacg

SEQ ID NO: 15595 - DNA, 17 bp, Arabidopsis thaliana
aatgctaaaatgtatca

SEQ ID NO: 15596 - DNA, 17 bp, Arabidopsis thaliana
aatgctaacacaggtat

SEQ ID NO: 15597 - DNA, 17 bp, Arabidopsis thaliana
aatgctaacactggtgt

SEQ ID NO: 15598 - DNA, 17 bp, Arabidopsis thaliana
aatgctaagcgaacggt

SEQ ID NO: 15599 - DNA, 17 bp, Arabidopsis thaliana
aatgctaatggcattgg

SEQ ID NO: 15600 - DNA, 17 bp, Arabidopsis thaliana
aatgctacatcttggtt

SEQ ID NO: 15601 - DNA, 17 bp, Arabidopsis thaliana
aatgctaccaatcctca

SEQ ID NO: 15602 - DNA, 17 bp, Arabidopsis thaliana
aatgctaccatttgcct

SEQ ID NO: 15603 - DNA, 17 bp, Arabidopsis thaliana
aatgctacctaatctga

SEQ ID NO: 15604 - DNA, 17 bp, Arabidopsis thaliana
aatgctacctggttgat

SEQ ID NO: 15605 - DNA, 17 bp, Arabidopsis thaliana
aatgctacttcttggtt

SEQ ID NO: 15606 - DNA, 17 bp, Arabidopsis thaliana
aatgctactttggttgt

SEQ ID NO: 15607 - DNA, 17 bp, Arabidopsis thaliana
aatgctactttttggtt

SEQ ID NO: 15608 - DNA, 17 bp, Arabidopsis thaliana
aatgctaggcaacgctg

SEQ ID NO: 15609 - DNA, 17 bp, Arabidopsis thaliana
aatgctaggtgtccagt

SEQ ID NO: 15610 - DNA, 17 bp, Arabidopsis thaliana
aatgctagtggcagcca

SEQ ID NO: 15611 - DNA, 17 bp, Arabidopsis thaliana
aatgctatcggaaatca

SEQ ID NO: 15612 - DNA, 17 bp, Arabidopsis thaliana
aatgctatttcggagtt

SEQ ID NO: 15613 - DNA, 17 bp, Arabidopsis thaliana
aatgctcacatgggtgg

SEQ ID NO: 15614 - DNA, 17 bp, Arabidopsis thaliana
aatgctcaggaggtgcg

SEQ ID NO: 15615 - DNA, 17 bp, Arabidopsis thaliana
aatgctcccgcggaagc

SEQ ID NO: 15616 - DNA, 17 bp, Arabidopsis thaliana
aatgctccgaacctgta

SEQ ID NO: 15617 - DNA, 17 bp, Arabidopsis thaliana
aatgctcgatccatcag

SEQ ID NO: 15618 - DNA, 17 bp, Arabidopsis thaliana
aatgctcggagccctag

SEQ ID NO: 15619 - DNA, 17 bp, Arabidopsis thaliana
aatgctcggctctctga

SEQ ID NO: 15620 - DNA, 17 bp, Arabidopsis thaliana
aatgctctacaatggaa

SEQ ID NO: 15621 - DNA, 17 bp, Arabidopsis thaliana
aatgctctccaggtggg

SEQ ID NO: 15622 - DNA, 17 bp, Arabidopsis thaliana
aatgctctgatctccag

SEQ ID NO: 15623 - DNA, 17 bp, Arabidopsis thaliana
aatgctctgctgcctgg

SEQ ID NO: 15624 - DNA, 17 bp, Arabidopsis thaliana
aatgctcttacagttaa

SEQ ID NO: 15625 - DNA, 17 bp, Arabidopsis thaliana
aatgctcttttctcaat

SEQ ID NO: 15626 - DNA, 17 bp, Arabidopsis thaliana
aatgctgaaaccgtaca

SEQ ID NO: 15627 - DNA, 17 bp, Arabidopsis thaliana
aatgctgaacacaccgc

SEQ ID NO: 15628 - DNA, 17 bp, Arabidopsis thaliana
aatgctgacagtgctcc

SEQ ID NO: 15629 - DNA, 17 bp, Arabidopsis thaliana
aatgctgaccgaatcgc

SEQ ID NO: 15630 - DNA, 17 bp, Arabidopsis thaliana
aatgctgagagaagatt

SEQ ID NO: 15631 - DNA, 17 bp, Arabidopsis thaliana
aatgctgagagtactcc

SEQ ID NO: 15632 - DNA, 17 bp, Arabidopsis thaliana
aatgctgatcggcttgg

SEQ ID NO: 15633 - DNA, 17 bp, Arabidopsis thaliana
aatgctgatggcattag

SEQ ID NO: 15634 - DNA, 17 bp, Arabidopsis thaliana
aatgctgcattagattg

SEQ ID NO: 15635 - DNA, 17 bp, Arabidopsis thaliana
aatgctgcattggattg

SEQ ID NO: 15636 - DNA, 17 bp, Arabidopsis thaliana
aatgctgcattggattt

SEQ ID NO: 15637 - DNA, 17 bp, Arabidopsis thaliana
aatgctgcctcagggtt

SEQ ID NO: 15638 - DNA, 17 bp, Arabidopsis thaliana
aatgctgctcgacttag

SEQ ID NO: 15639 - DNA, 17 bp, Arabidopsis thaliana
aatgctggatgaggata

SEQ ID NO: 15640 - DNA, 17 bp, Arabidopsis thaliana
aatgctgggacgcagac

SEQ ID NO: 15641 - DNA, 17 bp, Arabidopsis thaliana
aatgctggtctcgggaa

SEQ ID NO: 15642 - DNA, 17 bp, Arabidopsis thaliana
aatgcttaacgcttaga

SEQ ID NO: 15643 - DNA, 17 bp, Arabidopsis thaliana
aatgcttacttagccat

SEQ ID NO: 15644 - DNA, 17 bp, Arabidopsis thaliana
aatgcttagatcttcgt

SEQ ID NO: 15645 - DNA, 17 bp, Arabidopsis thaliana
aatgcttcaagccaagg

SEQ ID NO: 15646 - DNA, 17 bp, Arabidopsis thaliana
aatgcttctgattcatt

SEQ ID NO: 15647 - DNA, 17 bp, Arabidopsis thaliana
aatgcttggggttacac

SEQ ID NO: 15648 - DNA, 17 bp, Arabidopsis thaliana
aatgcttgtggtacagt

SEQ ID NO: 15649 - DNA, 17 bp, Arabidopsis thaliana
aatgctttccaactaat

SEQ ID NO: 15650 - DNA, 17 bp, Arabidopsis thaliana
aatgctttgttctgttt

SEQ ID NO: 15651 - DNA, 17 bp, Arabidopsis thaliana
aatggaaaagttccatt

SEQ ID NO: 15652 - DNA, 17 bp, Arabidopsis thaliana
aatggaaaagtttcatt

SEQ ID NO: 15653 - DNA, 17 bp, Arabidopsis thaliana
aatggaaagaaaatttt

SEQ ID NO: 15654 - DNA, 17 bp, Arabidopsis thaliana
aatggaaatgccatctc

SEQ ID NO: 15655 - DNA, 17 bp, Arabidopsis thaliana
aatggaaatggccctaa

SEQ ID NO: 15656 - DNA, 17 bp, Arabidopsis thaliana
aatggaacctaatttcg

SEQ ID NO: 15657 - DNA, 17 bp, Arabidopsis thaliana
aatggaaccttacgaac

SEQ ID NO: 15658 - DNA, 17 bp, Arabidopsis thaliana
aatggaactgttccact

SEQ ID NO: 15659 - DNA, 17 bp, Arabidopsis thaliana
aatggaacttctaacgt

SEQ ID NO: 15660 - DNA, 17 bp, Arabidopsis thaliana
aatggaacttttccact

SEQ ID NO: 15661 - DNA, 17 bp, Arabidopsis thaliana
aatggaagagtgtctat

SEQ ID NO: 15662 - DNA, 17 bp, Arabidopsis thaliana
aatggaagtttttattc

SEQ ID NO: 15663 - DNA, 17 bp, Arabidopsis thaliana
aatggaatgccactaat

SEQ ID NO: 15664 - DNA, 17 bp, Arabidopsis thaliana
aatggacacttccgcat

SEQ ID NO: 15665 - DNA, 17 bp, Arabidopsis thaliana
aatggacatgctcttac

SEQ ID NO: 15666 - DNA, 17 bp, Arabidopsis thaliana
aatggacatgtgcctta

SEQ ID NO: 15667 - DNA, 17 bp, Arabidopsis thaliana
aatggaccaaagttccc

SEQ ID NO: 15668 - DNA, 17 bp, Arabidopsis thaliana
aatggaccacaatggag

SEQ ID NO: 15669 - DNA, 17 bp, Arabidopsis thaliana
aatggaccaccacactg

SEQ ID NO: 15670 - DNA, 17 bp, Arabidopsis thaliana
aatggacccatcattgc

SEQ ID NO: 15671 - DNA, 17 bp, Arabidopsis thaliana
aatggacccatgacatt

SEQ ID NO: 15672 - DNA, 17 bp, Arabidopsis thaliana
aatggacccatggcatt

SEQ ID NO: 15673 - DNA, 17 bp, Arabidopsis thaliana
aatggaccccaaaaaca

SEQ ID NO: 15674 - DNA, 17 bp, Arabidopsis thaliana
aatggacccctcattgc

SEQ ID NO: 15675 - DNA, 17 bp, Arabidopsis thaliana
aatggacccttcattgt

SEQ ID NO: 15676 - DNA, 17 bp, Arabidopsis thaliana
aatggaccgccttttct

SEQ ID NO: 15677 - DNA, 17 bp, Arabidopsis thaliana
aatggaccgtcgttgaa

SEQ ID NO: 15678 - DNA, 17 bp, Arabidopsis thaliana
aatggacgaaactgaac

SEQ ID NO: 15679 - DNA, 17 bp, Arabidopsis thaliana
aatggactatttccgga

SEQ ID NO: 15680 - DNA, 17 bp, Arabidopsis thaliana
aatggactctcagctgg

SEQ ID NO: 15681 - DNA, 17 bp, Arabidopsis thaliana
aatggagacaagtgtgc

SEQ ID NO: 15682 - DNA, 17 bp, Arabidopsis thaliana
aatggagacctctgttg

SEQ ID NO: 15683 - DNA, 17 bp, Arabidopsis thaliana
aatggagacgtgcggtt

SEQ ID NO: 15684 - DNA, 17 bp, Arabidopsis thaliana
aatggagatgatgacct

SEQ ID NO: 15685 - DNA, 17 bp, Arabidopsis thaliana
aatggagatggtcttac

SEQ ID NO: 15686 - DNA, 17 bp, Arabidopsis thaliana
aatggagcagccgtacg

SEQ ID NO: 15687 - DNA, 17 bp, Arabidopsis thaliana
aatggagcttactgggc

SEQ ID NO: 15688 - DNA, 17 bp, Arabidopsis thaliana
aatggagctttggcgac

SEQ ID NO: 15689 - DNA, 17 bp, Arabidopsis thaliana
aatggaggatcgccgcc

SEQ ID NO: 15690 - DNA, 17 bp, Arabidopsis thaliana
aatggagtctccggtga

SEQ ID NO: 15691 - DNA, 17 bp, Arabidopsis thaliana
aatggagtctctcaagc

SEQ ID NO: 15692 - DNA, 17 bp, Arabidopsis thaliana
aatggataaggctaatg

SEQ ID NO: 15693 - DNA, 17 bp, Arabidopsis thaliana
aatggatcacgggttaa

SEQ ID NO: 15694 - DNA, 17 bp, Arabidopsis thaliana
aatggatccttcattgc

SEQ ID NO: 15695 - DNA, 17 bp, Arabidopsis thaliana
aatggatcgtcgctgag

SEQ ID NO: 15696 - DNA, 17 bp, Arabidopsis thaliana
aatggatctgaccaaag

SEQ ID NO: 15697 - DNA, 17 bp, Arabidopsis thaliana
aatggatctgccgaggt

SEQ ID NO: 15698 - DNA, 17 bp, Arabidopsis thaliana
aatggatctggccaaag

SEQ ID NO: 15699 - DNA, 17 bp, Arabidopsis thaliana
aatggatctgtccaaag

SEQ ID NO: 15700 - DNA, 17 bp, Arabidopsis thaliana
aatggatggcgcttaag

SEQ ID NO: 15701 - DNA, 17 bp, Arabidopsis thaliana
aatggatgtcactggct

SEQ ID NO: 15702 - DNA, 17 bp, Arabidopsis thaliana
aatggattcactacaat

SEQ ID NO: 15703 - DNA, 17 bp, Arabidopsis thaliana
aatggattctgacagat

SEQ ID NO: 15704 - DNA, 17 bp, Arabidopsis thaliana
aatggatttgcggaccg

SEQ ID NO: 15705 - DNA, 17 bp, Arabidopsis thaliana
aatggatttgcgtgctc

SEQ ID NO: 15706 - DNA, 17 bp, Arabidopsis thaliana
aatggcacacaggtcgt

SEQ ID NO: 15707 - DNA, 17 bp, Arabidopsis thaliana
aatggcaccaacgcttt

SEQ ID NO: 15708 - DNA, 17 bp, Arabidopsis thaliana
aatggcacgccagattc

SEQ ID NO: 15709 - DNA, 17 bp, Arabidopsis thaliana
aatggcattttctttga

SEQ ID NO: 15710 - DNA, 17 bp, Arabidopsis thaliana
aatggccagtcaacgat

SEQ ID NO: 15711 - DNA, 17 bp, Arabidopsis thaliana
aatggcccaactttcca

SEQ ID NO: 15712 - DNA, 17 bp, Arabidopsis thaliana
aatggccgcatgtaaag

SEQ ID NO: 15713 - DNA, 17 bp, Arabidopsis thaliana
aatggccgtcaaaatgt

SEQ ID NO: 15714 - DNA, 17 bp, Arabidopsis thaliana
aatggcgactgcgtttt

SEQ ID NO: 15715 - DNA, 17 bp, Arabidopsis thaliana
aatggcgattctagggt

SEQ ID NO: 15716 - DNA, 17 bp, Arabidopsis thaliana
aatggcgatttcatctc

SEQ ID NO: 15717 - DNA, 17 bp, Arabidopsis thaliana
aatggcgctaccggtct

SEQ ID NO: 15718 - DNA, 17 bp, Arabidopsis thaliana
aatggcggctccagctg

SEQ ID NO: 15719 - DNA, 17 bp, Arabidopsis thaliana
aatggcgtctctggcag

SEQ ID NO: 15720 - DNA, 17 bp, Arabidopsis thaliana
aatggctaaaacctgat

SEQ ID NO: 15721 - DNA, 17 bp, Arabidopsis thaliana
aatggctaatagctgaa

SEQ ID NO: 15722 - DNA, 17 bp, Arabidopsis thaliana
aatggctacagcggtcc

SEQ ID NO: 15723 - DNA, 17 bp, Arabidopsis thaliana
aatggctatacaatggc

SEQ ID NO: 15724 - DNA, 17 bp, Arabidopsis thaliana
aatggctatgcgctgct

SEQ ID NO: 15725 - DNA, 17 bp, Arabidopsis thaliana
aatggctatggatcttc

SEQ ID NO: 15726 - DNA, 17 bp, Arabidopsis thaliana
aatggctccaaagtcac

SEQ ID NO: 15727 - DNA, 17 bp, Arabidopsis thaliana
aatggctctcctgcacc

SEQ ID NO: 15728 - DNA, 17 bp, Arabidopsis thaliana
aatggctctgcaacaca

SEQ ID NO: 15729 - DNA, 17 bp, Arabidopsis thaliana
aatggctgcagttgttg

SEQ ID NO: 15730 - DNA, 17 bp, Arabidopsis thaliana
aatggctgccactgaat

SEQ ID NO: 15731 - DNA, 17 bp, Arabidopsis thaliana
aatggctgccactggct

SEQ ID NO: 15732 - DNA, 17 bp, Arabidopsis thaliana
aatggctgccactggtt

SEQ ID NO: 15733 - DNA, 17 bp, Arabidopsis thaliana
aatggctgccattggat

SEQ ID NO: 15734 - DNA, 17 bp, Arabidopsis thaliana
aatggctgccattggct

SEQ ID NO: 15735 - DNA, 17 bp, Arabidopsis thaliana
aatggctgccgctggat

SEQ ID NO: 15736 - DNA, 17 bp, Arabidopsis thaliana
aatggctgcctgcgatt

SEQ ID NO: 15737 - DNA, 17 bp, Arabidopsis thaliana
aatggctgcctgtgatt

SEQ ID NO: 15738 - DNA, 17 bp, Arabidopsis thaliana
aatggctgctactggca

SEQ ID NO: 15739 - DNA, 17 bp, Arabidopsis thaliana
aatggctgtcactggct

SEQ ID NO: 15740 - DNA, 17 bp, Arabidopsis thaliana
aatggcttcaagtctgc

SEQ ID NO: 15741 - DNA, 17 bp, Arabidopsis thaliana
aatggcttgcctacatt

SEQ ID NO: 15742 - DNA, 17 bp, Arabidopsis thaliana
aatgggaatcgcctaca

SEQ ID NO: 15743 - DNA, 17 bp, Arabidopsis thaliana
aatgggacgctcggaaa

SEQ ID NO: 15744 - DNA, 17 bp, Arabidopsis thaliana
aatgggacggacctaaa

SEQ ID NO: 15745 - DNA, 17 bp, Arabidopsis thaliana
aatgggagatgtccgga

SEQ ID NO: 15746 - DNA, 17 bp, Arabidopsis thaliana
aatgggatatccggttc

SEQ ID NO: 15747 - DNA, 17 bp, Arabidopsis thaliana
aatgggcagtgggtcaa

SEQ ID NO: 15748 - DNA, 17 bp, Arabidopsis thaliana
aatgggcccgcccaccc

SEQ ID NO: 15749 - DNA, 17 bp, Arabidopsis thaliana
aatgggcgaaagcctga

SEQ ID NO: 15750 - DNA, 17 bp, Arabidopsis thaliana
aatgggctctatctggt

SEQ ID NO: 15751 - DNA, 17 bp, Arabidopsis thaliana
aatgggctctgaatggg

SEQ ID NO: 15752 - DNA, 17 bp, Arabidopsis thaliana
aatgggctgacggacct

SEQ ID NO: 15753 - DNA, 17 bp, Arabidopsis thaliana
aatgggtaatccaacac

SEQ ID NO: 15754 - DNA, 17 bp, Arabidopsis thaliana
aatgggtcaaaatttat

SEQ ID NO: 15755 - DNA, 17 bp, Arabidopsis thaliana
aatgggtctccctgtcg

SEQ ID NO: 15756 - DNA, 17 bp, Arabidopsis thaliana
aatgggtgcgtttgcgg

SEQ ID NO: 15757 - DNA, 17 bp, Arabidopsis thaliana
aatgggtgttgtgtagt

SEQ ID NO: 15758 - DNA, 17 bp, Arabidopsis thaliana
aatgggtgttgtgttgt

SEQ ID NO: 15759 - DNA, 17 bp, Arabidopsis thaliana
aatgggttttttccagt

SEQ ID NO: 15760 - DNA, 17 bp, Arabidopsis thaliana
aatggtaaaccagcggg

SEQ ID NO: 15761 - DNA, 17 bp, Arabidopsis thaliana
aatggtaacatagaccg

SEQ ID NO: 15762 - DNA, 17 bp, Arabidopsis thaliana
aatggtagtgcactcac

SEQ ID NO: 15763 - DNA, 17 bp, Arabidopsis thaliana
aatggtcatcaggggga

SEQ ID NO: 15764 - DNA, 17 bp, Arabidopsis thaliana
aatggtcatccgaggca

SEQ ID NO: 15765 - DNA, 17 bp, Arabidopsis thaliana
aatggtcatctcgtcag

SEQ ID NO: 15766 - DNA, 17 bp, Arabidopsis thaliana
aatggtccaaacagttg

SEQ ID NO: 15767 - DNA, 17 bp, Arabidopsis thaliana
aatggtcccatgatgtg

SEQ ID NO: 15768 - DNA, 17 bp, Arabidopsis thaliana
aatggtccgcaaatggt

SEQ ID NO: 15769 - DNA, 17 bp, Arabidopsis thaliana
aatggtccgcagtgggg

SEQ ID NO: 15770 - DNA, 17 bp, Arabidopsis thaliana
aatggtccgctgcgggt

SEQ ID NO: 15771 - DNA, 17 bp, Arabidopsis thaliana
aatggtccgctgcggtt

SEQ ID NO: 15772 - DNA, 17 bp, Arabidopsis thaliana
aatggtcctctcgatat

SEQ ID NO: 15773 - DNA, 17 bp, Arabidopsis thaliana
aatggtcgactttgccg

SEQ ID NO: 15774 - DNA, 17 bp, Arabidopsis thaliana
aatggtcgagcgttccg

SEQ ID NO: 15775 - DNA, 17 bp, Arabidopsis thaliana
aatggtcgagcgtttcg

SEQ ID NO: 15776 - DNA, 17 bp, Arabidopsis thaliana
aatggtcgatctcacgc

SEQ ID NO: 15777 - DNA, 17 bp, Arabidopsis thaliana
aatggtcgatctcacgt

SEQ ID NO: 15778 - DNA, 17 bp, Arabidopsis thaliana
aatggtcgatggtctga

SEQ ID NO: 15779 - DNA, 17 bp, Arabidopsis thaliana
aatggtcgtcgcagaga

SEQ ID NO: 15780 - DNA, 17 bp, Arabidopsis thaliana
aatggtctccaactttt

SEQ ID NO: 15781 - DNA, 17 bp, Arabidopsis thaliana
aatggtgaatcgatttg

SEQ ID NO: 15782 - DNA, 17 bp, Arabidopsis thaliana
aatggtgaccaaaaccg

SEQ ID NO: 15783 - DNA, 17 bp, Arabidopsis thaliana
aatggtgaccaaaccgc

SEQ ID NO: 15784 - DNA, 17 bp, Arabidopsis thaliana
aatggtgaccgaactgt

SEQ ID NO: 15785 - DNA, 17 bp, Arabidopsis thaliana
aatggtgacgaaaccgc

SEQ ID NO: 15786 - DNA, 17 bp, Arabidopsis thaliana
aatggtgactaaaaccg

SEQ ID NO: 15787 - DNA, 17 bp, Arabidopsis thaliana
aatggtgactgaactgc

SEQ ID NO: 15788 - DNA, 17 bp, Arabidopsis thaliana
aatggtgactgcatttt

SEQ ID NO: 15789 - DNA, 17 bp, Arabidopsis thaliana
aatggtgactgcgtttt

SEQ ID NO: 15790 - DNA, 17 bp, Arabidopsis thaliana
aatggtgagaccaatgt

SEQ ID NO: 15791 - DNA, 17 bp, Arabidopsis thaliana
aatggtgagagccacct

SEQ ID NO: 15792 - DNA, 17 bp, Arabidopsis thaliana
aatggtgagatcggtgt

SEQ ID NO: 15793 - DNA, 17 bp, Arabidopsis thaliana
aatggtgagtcgatttg

SEQ ID NO: 15794 - DNA, 17 bp, Arabidopsis thaliana
aatggtgatgacggtga

SEQ ID NO: 15795 - DNA, 17 bp, Arabidopsis thaliana
aatggtgatgatagctc

SEQ ID NO: 15796 - DNA, 17 bp, Arabidopsis thaliana
aatggtgattcgatttg

SEQ ID NO: 15797 - DNA, 17 bp, Arabidopsis thaliana
aatggtgcctccaacaa

SEQ ID NO: 15798 - DNA, 17 bp, Arabidopsis thaliana
aatggtgtggttcgttg

SEQ ID NO: 15799 - DNA, 17 bp, Arabidopsis thaliana
aatggtgttgattgtaa

SEQ ID NO: 15800 - DNA, 17 bp, Arabidopsis thaliana
aatggtgttggctagct

SEQ ID NO: 15801 - DNA, 17 bp, Arabidopsis thaliana
aatggttaattgctgaa

SEQ ID NO: 15802 - DNA, 17 bp, Arabidopsis thaliana
aatggttaattgcttaa

SEQ ID NO: 15803 - DNA, 17 bp, Arabidopsis thaliana
aatggttacagcggccc

SEQ ID NO: 15804 - DNA, 17 bp, Arabidopsis thaliana
aatggttatgacctcag

SEQ ID NO: 15805 - DNA, 17 bp, Arabidopsis thaliana
aatggttcaaggatttg

SEQ ID NO: 15806 - DNA, 17 bp, Arabidopsis thaliana
aatggttcctcgatcag

SEQ ID NO: 15807 - DNA, 17 bp, Arabidopsis thaliana
aatggttcgcgtgctgc

SEQ ID NO: 15808 - DNA, 17 bp, Arabidopsis thaliana
aatggttcgcttgctgc

SEQ ID NO: 15809 - DNA, 17 bp, Arabidopsis thaliana
aatggttgacaatttcc

SEQ ID NO: 15810 - DNA, 17 bp, Arabidopsis thaliana
aatggttgaccacaggt

SEQ ID NO: 15811 - DNA, 17 bp, Arabidopsis thaliana
aatggttgacccagggt

SEQ ID NO: 15812 - DNA, 17 bp, Arabidopsis thaliana
aatggttgacgacttgc

SEQ ID NO: 15813 - DNA, 17 bp, Arabidopsis thaliana
aatggttgagtgggcaa

SEQ ID NO: 15814 - DNA, 17 bp, Arabidopsis thaliana
aatggttgattaagggt

SEQ ID NO: 15815 - DNA, 17 bp, Arabidopsis thaliana
aatggttgccactagct

SEQ ID NO: 15816 - DNA, 17 bp, Arabidopsis thaliana
aatggttggtgccttgg

SEQ ID NO: 15817 - DNA, 17 bp, Arabidopsis thaliana
aatggttgtcactggat

SEQ ID NO: 15818 - DNA, 17 bp, Arabidopsis thaliana
aatggttgtctctcgat

SEQ ID NO: 15819 - DNA, 17 bp, Arabidopsis thaliana
aatggtttccatggttt

SEQ ID NO: 15820 - DNA, 17 bp, Arabidopsis thaliana
aatggtttcccacctag

SEQ ID NO: 15821 - DNA, 17 bp, Arabidopsis thaliana
aatggtttcccacctat

SEQ ID NO: 15822 - DNA, 17 bp, Arabidopsis thaliana
aatggtttcctcggttc

SEQ ID NO: 15823 - DNA, 17 bp, Arabidopsis thaliana
aatggtttgagcactct

SEQ ID NO: 15824 - DNA, 17 bp, Arabidopsis thaliana
aatggttttgtctgttt

SEQ ID NO: 15825 - DNA, 17 bp, Arabidopsis thaliana
aatggttttgttcgttt

SEQ ID NO: 15826 - DNA, 17 bp, Arabidopsis thaliana
aatggttttttacggga

SEQ ID NO: 15827 - DNA, 17 bp, Arabidopsis thaliana
aatggtttttttacggg

SEQ ID NO: 15828 - DNA, 17 bp, Arabidopsis thaliana
aatgtaaaaagacccga

SEQ ID NO: 15829 - DNA, 17 bp, Arabidopsis thaliana
aatgtaaacccgtggtt

SEQ ID NO: 15830 - DNA, 17 bp, Arabidopsis thaliana
aatgtaaatactcggcc

SEQ ID NO: 15831 - DNA, 17 bp, Arabidopsis thaliana
aatgtaaatattcggcc

SEQ ID NO: 15832 - DNA, 17 bp, Arabidopsis thaliana
aatgtaacatcacattt

SEQ ID NO: 15833 - DNA, 17 bp, Arabidopsis thaliana
aatgtaacgatctgggc

SEQ ID NO: 15834 - DNA, 17 bp, Arabidopsis thaliana
aatgtaactccgatgtc

SEQ ID NO: 15835 - DNA, 17 bp, Arabidopsis thaliana
aatgtaactgcggcttg

SEQ ID NO: 15836 - DNA, 17 bp, Arabidopsis thaliana
aatgtaagagccatcct

SEQ ID NO: 15837 - DNA, 17 bp, Arabidopsis thaliana
aatgtaagagctgacta

SEQ ID NO: 15838 - DNA, 17 bp, Arabidopsis thaliana
aatgtaaggatggtgtc

SEQ ID NO: 15839 - DNA, 17 bp, Arabidopsis thaliana
aatgtaatcccgaattg

SEQ ID NO: 15840 - DNA, 17 bp, Arabidopsis thaliana
aatgtaatttctgcgtt

SEQ ID NO: 15841 - DNA, 17 bp, Arabidopsis thaliana
aatgtacggtttagtcc

SEQ ID NO: 15842 - DNA, 17 bp, Arabidopsis thaliana
aatgtacggtttagtta

SEQ ID NO: 15843 - DNA, 17 bp, Arabidopsis thaliana
aatgtagacaggaaggc

SEQ ID NO: 15844 - DNA, 17 bp, Arabidopsis thaliana
aatgtagactcagggga

SEQ ID NO: 15845 - DNA, 17 bp, Arabidopsis thaliana
aatgtagatgaagccga

SEQ ID NO: 15846 - DNA, 17 bp, Arabidopsis thaliana
aatgtagtgaccctcgc

SEQ ID NO: 15847 - DNA, 17 bp, Arabidopsis thaliana
aatgtatactgcacgct

SEQ ID NO: 15848 - DNA, 17 bp, Arabidopsis thaliana
aatgtatagacgctttt

SEQ ID NO: 15849 - DNA, 17 bp, Arabidopsis thaliana
aatgtatcacggccatg

SEQ ID NO: 15850 - DNA, 17 bp, Arabidopsis thaliana
aatgtatccagagcgta

SEQ ID NO: 15851 - DNA, 17 bp, Arabidopsis thaliana
aatgtatcgtctgtcgt

SEQ ID NO: 15852 - DNA, 17 bp, Arabidopsis thaliana
aatgtatgactttgatc

SEQ ID NO: 15853 - DNA, 17 bp, Arabidopsis thaliana
aatgtatgatacatcta

SEQ ID NO: 15854 - DNA, 17 bp, Arabidopsis thaliana
aatgtatgatgtcgctg

SEQ ID NO: 15855 - DNA, 17 bp, Arabidopsis thaliana
aatgtatgccgcaattt

SEQ ID NO: 15856 - DNA, 17 bp, Arabidopsis thaliana
aatgtatttagttgcgt

SEQ ID NO: 15857 - DNA, 17 bp, Arabidopsis thaliana
aatgtatttccgcaaat

SEQ ID NO: 15858 - DNA, 17 bp, Arabidopsis thaliana
aatgtcaacaacttcgg

SEQ ID NO: 15859 - DNA, 17 bp, Arabidopsis thaliana
aatgtcaagggtactca

SEQ ID NO: 15860 - DNA, 17 bp, Arabidopsis thaliana
aatgtcacagccacttt

SEQ ID NO: 15861 - DNA, 17 bp, Arabidopsis thaliana
aatgtcactgaaccaga

SEQ ID NO: 15862 - DNA, 17 bp, Arabidopsis thaliana
aatgtcatcaccaagcg

SEQ ID NO: 15863 - DNA, 17 bp, Arabidopsis thaliana
aatgtcatccggcgaga

SEQ ID NO: 15864 - DNA, 17 bp, Arabidopsis thaliana
aatgtcattcgaaccgg

SEQ ID NO: 15865 - DNA, 17 bp, Arabidopsis thaliana
aatgtcattggccgaac

SEQ ID NO: 15866 - DNA, 17 bp, Arabidopsis thaliana
aatgtccaaacccctaa

SEQ ID NO: 15867 - DNA, 17 bp, Arabidopsis thaliana
aatgtccactacaagag

SEQ ID NO: 15868 - DNA, 17 bp, Arabidopsis thaliana
aatgtccagtgtaatta

SEQ ID NO: 15869 - DNA, 17 bp, Arabidopsis thaliana
aatgtccagtgtaattg

SEQ ID NO: 15870 - DNA, 17 bp, Arabidopsis thaliana
aatgtccatgtgccttt

SEQ ID NO: 15871 - DNA, 17 bp, Arabidopsis thaliana
aatgtcccacatcagaa

SEQ ID NO: 15872 - DNA, 17 bp, Arabidopsis thaliana
aatgtcccataacaatg

SEQ ID NO: 15873 - DNA, 17 bp, Arabidopsis thaliana
aatgtccctgaggaatt

SEQ ID NO: 15874 - DNA, 17 bp, Arabidopsis thaliana
aatgtcccttagtatgc

SEQ ID NO: 15875 - DNA, 17 bp, Arabidopsis thaliana
aatgtccggaccatttt

SEQ ID NO: 15876 - DNA, 17 bp, Arabidopsis thaliana
aatgtccgggctgactg

SEQ ID NO: 15877 - DNA, 17 bp, Arabidopsis thaliana
aatgtccggtctatcat

SEQ ID NO: 15878 - DNA, 17 bp, Arabidopsis thaliana
aatgtccgtgctgatta

SEQ ID NO: 15879 - DNA, 17 bp, Arabidopsis thaliana
aatgtccgtgctgattg

SEQ ID NO: 15880 - DNA, 17 bp, Arabidopsis thaliana
aatgtccgttaaatccc

SEQ ID NO: 15881 - DNA, 17 bp, Arabidopsis thaliana
aatgtccgtttatccgt

SEQ ID NO: 15882 - DNA, 17 bp, Arabidopsis thaliana
aatgtcctaagccgtgg

SEQ ID NO: 15883 - DNA, 17 bp, Arabidopsis thaliana
aatgtcctattctttcc

SEQ ID NO: 15884 - DNA, 17 bp, Arabidopsis thaliana
aatgtcctgccaaaccc

SEQ ID NO: 15885 - DNA, 17 bp, Arabidopsis thaliana
aatgtcctgctaaactc

SEQ ID NO: 15886 - DNA, 17 bp, Arabidopsis thaliana
aatgtccttttcatgat

SEQ ID NO: 15887 - DNA, 17 bp, Arabidopsis thaliana
aatgtcgactagatgtc

SEQ ID NO: 15888 - DNA, 17 bp, Arabidopsis thaliana
aatgtcgactagatttc

SEQ ID NO: 15889 - DNA, 17 bp, Arabidopsis thaliana
aatgtcgagctgttggt

SEQ ID NO: 15890 - DNA, 17 bp, Arabidopsis thaliana
aatgtcgattatgacag

SEQ ID NO: 15891 - DNA, 17 bp, Arabidopsis thaliana
aatgtcgcaagtgaaac

SEQ ID NO: 15892 - DNA, 17 bp, Arabidopsis thaliana
aatgtcgcagcttagaa

SEQ ID NO: 15893 - DNA, 17 bp, Arabidopsis thaliana
aatgtcggatcacctgt

SEQ ID NO: 15894 - DNA, 17 bp, Arabidopsis thaliana
aatgtcggccaatcgtc

SEQ ID NO: 15895 - DNA, 17 bp, Arabidopsis thaliana
aatgtcggctaatcgtc

SEQ ID NO: 15896 - DNA, 17 bp, Arabidopsis thaliana
aatgtcggctcggaaac

SEQ ID NO: 15897 - DNA, 17 bp, Arabidopsis thaliana
aatgtcggtgctgattg

SEQ ID NO: 15898 - DNA, 17 bp, Arabidopsis thaliana
aatgtcgttgcagaagg

SEQ ID NO: 15899 - DNA, 17 bp, Arabidopsis thaliana
aatgtctattggtgcca

SEQ ID NO: 15900 - DNA, 17 bp, Arabidopsis thaliana
aatgtctcaagttccta

SEQ ID NO: 15901 - DNA, 17 bp, Arabidopsis thaliana
aatgtctcagcccctgt

SEQ ID NO: 15902 - DNA, 17 bp, Arabidopsis thaliana
aatgtctccatctggac

SEQ ID NO: 15903 - DNA, 17 bp, Arabidopsis thaliana
aatgtctctaggatttg

SEQ ID NO: 15904 - DNA, 17 bp, Arabidopsis thaliana
aatgtctctggagagac

SEQ ID NO: 15905 - DNA, 17 bp, Arabidopsis thaliana
aatgtctcttgtcgccg

SEQ ID NO: 15906 - DNA, 17 bp, Arabidopsis thaliana
aatgtctgacatgtgtg

SEQ ID NO: 15907 - DNA, 17 bp, Arabidopsis thaliana
aatgtctgccagttcat

SEQ ID NO: 15908 - DNA, 17 bp, Arabidopsis thaliana
aatgtctgcctgcgcat

SEQ ID NO: 15909 - DNA, 17 bp, Arabidopsis thaliana
aatgtctgcttggttga

SEQ ID NO: 15910 - DNA, 17 bp, Arabidopsis thaliana
aatgtctggtgccaaga

SEQ ID NO: 15911 - DNA, 17 bp, Arabidopsis thaliana
aatgtctgttggtgcca

SEQ ID NO: 15912 - DNA, 17 bp, Arabidopsis thaliana
aatgtctgttggtgcga

SEQ ID NO: 15913 - DNA, 17 bp, Arabidopsis thaliana
aatgtctgtttgtgtca

SEQ ID NO: 15914 - DNA, 17 bp, Arabidopsis thaliana
aatgtctttggatccgg

SEQ ID NO: 15915 - DNA, 17 bp, Arabidopsis thaliana
aatgtctttgggtagac

SEQ ID NO: 15916 - DNA, 17 bp, Arabidopsis thaliana
aatgtgaacatgtgcca

SEQ ID NO: 15917 - DNA, 17 bp, Arabidopsis thaliana
aatgtgaaccgctccag

SEQ ID NO: 15918 - DNA, 17 bp, Arabidopsis thaliana
aatgtgaacctgctcat

SEQ ID NO: 15919 - DNA, 17 bp, Arabidopsis thaliana
aatgtgaccaaccatcc

SEQ ID NO: 15920 - DNA, 17 bp, Arabidopsis thaliana
aatgtgacccttttgct

SEQ ID NO: 15921 - DNA, 17 bp, Arabidopsis thaliana
aatgtgactcgatgaca

SEQ ID NO: 15922 - DNA, 17 bp, Arabidopsis thaliana
aatgtgactgcggctct

SEQ ID NO: 15923 - DNA, 17 bp, Arabidopsis thaliana
aatgtgagagtgactac

SEQ ID NO: 15924 - DNA, 17 bp, Arabidopsis thaliana
aatgtgagatgtccaat

SEQ ID NO: 15925 - DNA, 17 bp, Arabidopsis thaliana
aatgtgagcagtctttg

SEQ ID NO: 15926 - DNA, 17 bp, Arabidopsis thaliana
aatgtgagctctacaga

SEQ ID NO: 15927 - DNA, 17 bp, Arabidopsis thaliana
aatgtgagtccaggtct

SEQ ID NO: 15928 - DNA, 17 bp, Arabidopsis thaliana
aatgtgagtttccgcgc

SEQ ID NO: 15929 - DNA, 17 bp, Arabidopsis thaliana
aatgtgatacggttcgg

SEQ ID NO: 15930 - DNA, 17 bp, Arabidopsis thaliana
aatgtgatttctgccca

SEQ ID NO: 15931 - DNA, 17 bp, Arabidopsis thaliana
aatgtgcaaagttcact

SEQ ID NO: 15932 - DNA, 17 bp, Arabidopsis thaliana
aatgtgcatttgtcggc

SEQ ID NO: 15933 - DNA, 17 bp, Arabidopsis thaliana
aatgtgccaacttgttt

SEQ ID NO: 15934 - DNA, 17 bp, Arabidopsis thaliana
aatgtgccgtctgtcgt

SEQ ID NO: 15935 - DNA, 17 bp, Arabidopsis thaliana
aatgtgcgaaggctcct

SEQ ID NO: 15936 - DNA, 17 bp, Arabidopsis thaliana
aatgtgcggatcgattg

SEQ ID NO: 15937 - DNA, 17 bp, Arabidopsis thaliana
aatgtgcggtccgactc

SEQ ID NO: 15938 - DNA, 17 bp, Arabidopsis thaliana
aatgtgctgtgacagta

SEQ ID NO: 15939 - DNA, 17 bp, Arabidopsis thaliana
aatgtgcttccgctagt

SEQ ID NO: 15940 - DNA, 17 bp, Arabidopsis thaliana
aatgtgcttccgggtta

SEQ ID NO: 15941 - DNA, 17 bp, Arabidopsis thaliana
aatgtggaggtgcctac

SEQ ID NO: 15942 - DNA, 17 bp, Arabidopsis thaliana
aatgtggcttgtaagtg

SEQ ID NO: 15943 - DNA, 17 bp, Arabidopsis thaliana
aatgtgggatacgagct

SEQ ID NO: 15944 - DNA, 17 bp, Arabidopsis thaliana
aatgtgggcacgaggtt

SEQ ID NO: 15945 - DNA, 17 bp, Arabidopsis thaliana
aatgtggtacggttcaa

SEQ ID NO: 15946 - DNA, 17 bp, Arabidopsis thaliana
aatgtggtctaggagtg

SEQ ID NO: 15947 - DNA, 17 bp, Arabidopsis thaliana
aatgtggttgacccagc

SEQ ID NO: 15948 - DNA, 17 bp, Arabidopsis thaliana
aatgtggttgcccaatt

SEQ ID NO: 15949 - DNA, 17 bp, Arabidopsis thaliana
aatgtgtctcgattgtg

SEQ ID NO: 15950 - DNA, 17 bp, Arabidopsis thaliana
aatgtgtgtgtcaccga

SEQ ID NO: 15951 - DNA, 17 bp, Arabidopsis thaliana
aatgtgttggaccagat

SEQ ID NO: 15952 - DNA, 17 bp, Arabidopsis thaliana
aatgtgtttcgctaggt

SEQ ID NO: 15953 - DNA, 17 bp, Arabidopsis thaliana
aatgtgtttgcattggt

SEQ ID NO: 15954 - DNA, 17 bp, Arabidopsis thaliana
aatgtgttttacatgga

SEQ ID NO: 15955 - DNA, 17 bp, Arabidopsis thaliana
aatgttaaggtgcgcat

SEQ ID NO: 15956 - DNA, 17 bp, Arabidopsis thaliana
aatgttacggatcatat

SEQ ID NO: 15957 - DNA, 17 bp, Arabidopsis thaliana
aatgttagacttttgtc

SEQ ID NO: 15958 - DNA, 17 bp, Arabidopsis thaliana
aatgttagatactgctt

SEQ ID NO: 15959 - DNA, 17 bp, Arabidopsis thaliana
aatgttaggcgctaatc

SEQ ID NO: 15960 - DNA, 17 bp, Arabidopsis thaliana
aatgttagggcaagact

SEQ ID NO: 15961 - DNA, 17 bp, Arabidopsis thaliana
aatgttatcaagttatc

SEQ ID NO: 15962 - DNA, 17 bp, Arabidopsis thaliana
aatgttatccaggatca

SEQ ID NO: 15963 - DNA, 17 bp, Arabidopsis thaliana
aatgttatcggcgttgt

SEQ ID NO: 15964 - DNA, 17 bp, Arabidopsis thaliana
aatgttatttcttggtt

SEQ ID NO: 15965 - DNA, 17 bp, Arabidopsis thaliana
aatgttcacgaaagcac

SEQ ID NO: 15966 - DNA, 17 bp, Arabidopsis thaliana
aatgttccagctgatat

SEQ ID NO: 15967 - DNA, 17 bp, Arabidopsis thaliana
aatgttccgtgcttggt

SEQ ID NO: 15968 - DNA, 17 bp, Arabidopsis thaliana
aatgttcgagtaccagg

SEQ ID NO: 15969 - DNA, 17 bp, Arabidopsis thaliana
aatgttctgactgccac

SEQ ID NO: 15970 - DNA, 17 bp, Arabidopsis thaliana
aatgttgaccagcgttg

SEQ ID NO: 15971 - DNA, 17 bp, Arabidopsis thaliana
aatgttgacgtggcgga

SEQ ID NO: 15972 - DNA, 17 bp, Arabidopsis thaliana
aatgttgagccggccct

SEQ ID NO: 15973 - DNA, 17 bp, Arabidopsis thaliana
aatgttgaggaagaccc

SEQ ID NO: 15974 - DNA, 17 bp, Arabidopsis thaliana
aatgttgattcaaaaac

SEQ ID NO: 15975 - DNA, 17 bp, Arabidopsis thaliana
aatgttgccaacaccat

SEQ ID NO: 15976 - DNA, 17 bp, Arabidopsis thaliana
aatgttgcgacggattt

SEQ ID NO: 15977 - DNA, 17 bp, Arabidopsis thaliana
aatgttgcggatctggc

SEQ ID NO: 15978 - DNA, 17 bp, Arabidopsis thaliana
aatgttgcggcggaggt

SEQ ID NO: 15979 - DNA, 17 bp, Arabidopsis thaliana
aatgttgcgtcgaatta

SEQ ID NO: 15980 - DNA, 17 bp, Arabidopsis thaliana
aatgttgctaggatttg

SEQ ID NO: 15981 - DNA, 17 bp, Arabidopsis thaliana
aatgttgggaccttgaa

SEQ ID NO: 15982 - DNA, 17 bp, Arabidopsis thaliana
aatgttgggcttaggct

SEQ ID NO: 15983 - DNA, 17 bp, Arabidopsis thaliana
aatgttggtcacaacaa

SEQ ID NO: 15984 - DNA, 17 bp, Arabidopsis thaliana
aatgttgtatcaacttg

SEQ ID NO: 15985 - DNA, 17 bp, Arabidopsis thaliana
aatgttgtcaaagacct

SEQ ID NO: 15986 - DNA, 17 bp, Arabidopsis thaliana
aatgttgtcgcgatcac

SEQ ID NO: 15987 - DNA, 17 bp, Arabidopsis thaliana
aatgttgtgaaccgcac

SEQ ID NO: 15988 - DNA, 17 bp, Arabidopsis thaliana
aatgttgtggctgattc

SEQ ID NO: 15989 - DNA, 17 bp, Arabidopsis thaliana
aatgttgttcgtatgga

SEQ ID NO: 15990 - DNA, 17 bp, Arabidopsis thaliana
aatgttgttctgacctg

SEQ ID NO: 15991 - DNA, 17 bp, Arabidopsis thaliana
aatgttgttgctcaagc

SEQ ID NO: 15992 - DNA, 17 bp, Arabidopsis thaliana
aatgttgttgctcacgc

SEQ ID NO: 15993 - DNA, 17 bp, Arabidopsis thaliana
aatgttgttgttgacca

SEQ ID NO: 15994 - DNA, 17 bp, Arabidopsis thaliana
aatgtttacggaaagtt

SEQ ID NO: 15995 - DNA, 17 bp, Arabidopsis thaliana
aatgtttagggtaattt

SEQ ID NO: 15996 - DNA, 17 bp, Arabidopsis thaliana
aatgtttagtgtgagct

SEQ ID NO: 15997 - DNA, 17 bp, Arabidopsis thaliana
aatgtttatcagggtgc

SEQ ID NO: 15998 - DNA, 17 bp, Arabidopsis thaliana
aatgtttattacatcgg

SEQ ID NO: 15999 - DNA, 17 bp, Arabidopsis thaliana
aatgtttattacattgg

SEQ ID NO: 16000 - DNA, 17 bp, Arabidopsis thaliana
aatgtttcagtggcact

SEQ ID NO: 16001 - DNA, 17 bp, Arabidopsis thaliana
aatgtttcgtcaccgac

SEQ ID NO: 16002 - DNA, 17 bp, Arabidopsis thaliana
aatgtttctaagatcag

SEQ ID NO: 16003 - DNA, 17 bp, Arabidopsis thaliana
aatgtttgctgcaggca

SEQ ID NO: 16004 - DNA, 17 bp, Arabidopsis thaliana
aatgtttgctgcaggga

SEQ ID NO: 16005 - DNA, 17 bp, Arabidopsis thaliana
aatgtttgttggtgcca

SEQ ID NO: 16006 - DNA, 17 bp, Arabidopsis thaliana
aatgtttgttggtttta

SEQ ID NO: 16007 - DNA, 17 bp, Arabidopsis thaliana
aatgttttgggtggcta

SEQ ID NO: 16008 - DNA, 17 bp, Arabidopsis thaliana
aatgttttgtcttctct

SEQ ID NO: 16009 - DNA, 17 bp, Arabidopsis thaliana
aatgttttttttacggg

SEQ ID NO: 16010 - DNA, 17 bp, Arabidopsis thaliana
aattaacctgatgtttg

SEQ ID NO: 16011 - DNA, 17 bp, Arabidopsis thaliana
aattaacgaaggtgcga

SEQ ID NO: 16012 - DNA, 17 bp, Arabidopsis thaliana
aattaacgcaatgtgat

SEQ ID NO: 16013 - DNA, 17 bp, Arabidopsis thaliana
aattaacgtcctgccaa

SEQ ID NO: 16014 - DNA, 17 bp, Arabidopsis thaliana
aattaactgcgcttagg

SEQ ID NO: 16015 - DNA, 17 bp, Arabidopsis thaliana
aattaacttaacgaccc

SEQ ID NO: 16016 - DNA, 17 bp, Arabidopsis thaliana
aattaagcccgcgggcc

SEQ ID NO: 16017 - DNA, 17 bp, Arabidopsis thaliana
aattaagcgtctactcg

SEQ ID NO: 16018 - DNA, 17 bp, Arabidopsis thaliana
aattaagtctgcagccg

SEQ ID NO: 16019 - DNA, 17 bp, Arabidopsis thaliana
aattaatcccgcctgac

SEQ ID NO: 16020 - DNA, 17 bp, Arabidopsis thaliana
aattaattgtccccgcg

SEQ ID NO: 16021 - DNA, 17 bp, Arabidopsis thaliana
aattacaagccgccacg

SEQ ID NO: 16022 - DNA, 17 bp, Arabidopsis thaliana
aattacaggtttacgtt

SEQ ID NO: 16023 - DNA, 17 bp, Arabidopsis thaliana
aattacaggtttcgcct

SEQ ID NO: 16024 - DNA, 17 bp, Arabidopsis thaliana
aattacatccgactcgt

SEQ ID NO: 16025 - DNA, 17 bp, Arabidopsis thaliana
aattacatgctgtggtt

SEQ ID NO: 16026 - DNA, 17 bp, Arabidopsis thaliana
aattacatgctttggtt

SEQ ID NO: 16027 - DNA, 17 bp, Arabidopsis thaliana
aattaccaccgagcgac

SEQ ID NO: 16028 - DNA, 17 bp, Arabidopsis thaliana
aattaccaccgagcggc

SEQ ID NO: 16029 - DNA, 17 bp, Arabidopsis thaliana
aattaccaccgagcggg

SEQ ID NO: 16030 - DNA, 17 bp, Arabidopsis thaliana
aattaccacctagcggc

SEQ ID NO: 16031 - DNA, 17 bp, Arabidopsis thaliana
aattaccgcggacggtg

SEQ ID NO: 16032 - DNA, 17 bp, Arabidopsis thaliana
aattaccgcggctgctg

SEQ ID NO: 16033 - DNA, 17 bp, Arabidopsis thaliana
aattaccgcgtaaccta

SEQ ID NO: 16034 - DNA, 17 bp, Arabidopsis thaliana
aattaccgcgtaatctg

SEQ ID NO: 16035 - DNA, 17 bp, Arabidopsis thaliana
aattaccgtctctttgt

SEQ ID NO: 16036 - DNA, 17 bp, Arabidopsis thaliana
aattacctattgatggg

SEQ ID NO: 16037 - DNA, 17 bp, Arabidopsis thaliana
aattacgattttgggtg

SEQ ID NO: 16038 - DNA, 17 bp, Arabidopsis thaliana
aattacggatcgcattt

SEQ ID NO: 16039 - DNA, 17 bp, Arabidopsis thaliana
aattacggatttcggcc

SEQ ID NO: 16040 - DNA, 17 bp, Arabidopsis thaliana
aattacggctgatgtgt

SEQ ID NO: 16041 - DNA, 17 bp, Arabidopsis thaliana
aattacgggtttacgtt

SEQ ID NO: 16042 - DNA, 17 bp, Arabidopsis thaliana
aattacgggtttcggct

SEQ ID NO: 16043 - DNA, 17 bp, Arabidopsis thaliana
aattactaggatacgac

SEQ ID NO: 16044 - DNA, 17 bp, Arabidopsis thaliana
aattactatcacaccgg

SEQ ID NO: 16045 - DNA, 17 bp, Arabidopsis thaliana
aattactatcacatccg

SEQ ID NO: 16046 - DNA, 17 bp, Arabidopsis thaliana
aattactatcgcacccg

SEQ ID NO: 16047 - DNA, 17 bp, Arabidopsis thaliana
aattactatcgcaccgc

SEQ ID NO: 16048 - DNA, 17 bp, Arabidopsis thaliana
aattactatcgcaccgg

SEQ ID NO: 16049 - DNA, 17 bp, Arabidopsis thaliana
aattactatcgcacctg

SEQ ID NO: 16050 - DNA, 17 bp, Arabidopsis thaliana
aattactatcgtacccg

SEQ ID NO: 16051 - DNA, 17 bp, Arabidopsis thaliana
aattactattgcacctg

SEQ ID NO: 16052 - DNA, 17 bp, Arabidopsis thaliana
aattagacagccgatgg

SEQ ID NO: 16053 - DNA, 17 bp, Arabidopsis thaliana
aattagaccaaggtcca

SEQ ID NO: 16054 - DNA, 17 bp, Arabidopsis thaliana
aattagaccgctttgta

SEQ ID NO: 16055 - DNA, 17 bp, Arabidopsis thaliana
aattagaccgctttgtc

SEQ ID NO: 16056 - DNA, 17 bp, Arabidopsis thaliana
aattagaccgttttgtc

SEQ ID NO: 16057 - DNA, 17 bp, Arabidopsis thaliana
aattagagttatttcgc

SEQ ID NO: 16058 - DNA, 17 bp, Arabidopsis thaliana
aattagatctcaggcac

SEQ ID NO: 16059 - DNA, 17 bp, Arabidopsis thaliana
aattagcccaagttttg

SEQ ID NO: 16060 - DNA, 17 bp, Arabidopsis thaliana
aattagcccattgggcc

SEQ ID NO: 16061 - DNA, 17 bp, Arabidopsis thaliana
aattagcgacagtcgcc

SEQ ID NO: 16062 - DNA, 17 bp, Arabidopsis thaliana
aattagcgacagttgcc

SEQ ID NO: 16063 - DNA, 17 bp, Arabidopsis thaliana
aattagcgatagtcacc

SEQ ID NO: 16064 - DNA, 17 bp, Arabidopsis thaliana
aattagcgatgtgccgc

SEQ ID NO: 16065 - DNA, 17 bp, Arabidopsis thaliana
aattagcggtgtactgc

SEQ ID NO: 16066 - DNA, 17 bp, Arabidopsis thaliana
aattagcgtctgacaat

SEQ ID NO: 16067 - DNA, 17 bp, Arabidopsis thaliana
aattagctaacccatca

SEQ ID NO: 16068 - DNA, 17 bp, Arabidopsis thaliana
aattaggaccagcgggg

SEQ ID NO: 16069 - DNA, 17 bp, Arabidopsis thaliana
aattaggactcaaacga

SEQ ID NO: 16070 - DNA, 17 bp, Arabidopsis thaliana
aattaggcctgggattt

SEQ ID NO: 16071 - DNA, 17 bp, Arabidopsis thaliana
aattaggcgagatccgc

SEQ ID NO: 16072 - DNA, 17 bp, Arabidopsis thaliana
aattagggttcgattga

SEQ ID NO: 16073 - DNA, 17 bp, Arabidopsis thaliana
aattaggttgaccactt

SEQ ID NO: 16074 - DNA, 17 bp, Arabidopsis thaliana
aattaggtttatgacct

SEQ ID NO: 16075 - DNA, 17 bp, Arabidopsis thaliana
aattagtttggtgcgag

SEQ ID NO: 16076 - DNA, 17 bp, Arabidopsis thaliana
aattatcaggtcttcca

SEQ ID NO: 16077 - DNA, 17 bp, Arabidopsis thaliana
aattatccgccgccgcc

SEQ ID NO: 16078 - DNA, 17 bp, Arabidopsis thaliana
aattatccgctttgaca

SEQ ID NO: 16079 - DNA, 17 bp, Arabidopsis thaliana
aattatcctctcctttg

SEQ ID NO: 16080 - DNA, 17 bp, Arabidopsis thaliana
aattatcctcttttggg

SEQ ID NO: 16081 - DNA, 17 bp, Arabidopsis thaliana
aattatcctgagtggct

SEQ ID NO: 16082 - DNA, 17 bp, Arabidopsis thaliana
aattatcggttaactgg

SEQ ID NO: 16083 - DNA, 17 bp, Arabidopsis thaliana
aattatcgttgattcgg

SEQ ID NO: 16084 - DNA, 17 bp, Arabidopsis thaliana
aattatctcatggattc

SEQ ID NO: 16085 - DNA, 17 bp, Arabidopsis thaliana
aattatctcatggattt

SEQ ID NO: 16086 - DNA, 17 bp, Arabidopsis thaliana
aattatcttttgggtca

SEQ ID NO: 16087 - DNA, 17 bp, Arabidopsis thaliana
aattatgactaagttgc

SEQ ID NO: 16088 - DNA, 17 bp, Arabidopsis thaliana
aattatggcgatcctgc

SEQ ID NO: 16089 - DNA, 17 bp, Arabidopsis thaliana
aattatggttctagatc

SEQ ID NO: 16090 - DNA, 17 bp, Arabidopsis thaliana
aattattaaatgccagt

SEQ ID NO: 16091 - DNA, 17 bp, Arabidopsis thaliana
aattattcagtggacac

SEQ ID NO: 16092 - DNA, 17 bp, Arabidopsis thaliana
aattattccggtggtct

SEQ ID NO: 16093 - DNA, 17 bp, Arabidopsis thaliana
aattattcctcatgctt

SEQ ID NO: 16094 - DNA, 17 bp, Arabidopsis thaliana
aattattgaggacccac

SEQ ID NO: 16095 - DNA, 17 bp, Arabidopsis thaliana
aattattgatgtcggat

SEQ ID NO: 16096 - DNA, 17 bp, Arabidopsis thaliana
aattattgatgtggcaa

SEQ ID NO: 16097 - DNA, 17 bp, Arabidopsis thaliana
aattattgatgtggcag

SEQ ID NO: 16098 - DNA, 17 bp, Arabidopsis thaliana
aattattgccattcgcg

SEQ ID NO: 16099 - DNA, 17 bp, Arabidopsis thaliana
aattattggaccttgtg

SEQ ID NO: 16100 - DNA, 17 bp, Arabidopsis thaliana
aattcaaaataaacccg

SEQ ID NO: 16101 - DNA, 17 bp, Arabidopsis thaliana
aattcaaacggtcagat

SEQ ID NO: 16102 - DNA, 17 bp, Arabidopsis thaliana
aattcaaaggtccgtct

SEQ ID NO: 16103 - DNA, 17 bp, Arabidopsis thaliana
aattcaactcaacccat

SEQ ID NO: 16104 - DNA, 17 bp, Arabidopsis thaliana
aattcaacttgatgtgg

SEQ ID NO: 16105 - DNA, 17 bp, Arabidopsis thaliana
aattcaacttggtgtgg

SEQ ID NO: 16106 - DNA, 17 bp, Arabidopsis thaliana
aattcaagatttgtcat

SEQ ID NO: 16107 - DNA, 17 bp, Arabidopsis thaliana
aattcaagccgttgcag

SEQ ID NO: 16108 - DNA, 17 bp, Arabidopsis thaliana
aattcaaggcggtccga

SEQ ID NO: 16109 - DNA, 17 bp, Arabidopsis thaliana
aattcaagttgccttcc

SEQ ID NO: 16110 - DNA, 17 bp, Arabidopsis thaliana
aattcaatgctgctcga

SEQ ID NO: 16111 - DNA, 17 bp, Arabidopsis thaliana
aattcacaacctcacca

SEQ ID NO: 16112 - DNA, 17 bp, Arabidopsis thaliana
aattcacaagcgccttg

SEQ ID NO: 16113 - DNA, 17 bp, Arabidopsis thaliana
aattcacacgaacaagg

SEQ ID NO: 16114 - DNA, 17 bp, Arabidopsis thaliana
aattcacagtagacgct

SEQ ID NO: 16115 - DNA, 17 bp, Arabidopsis thaliana
aattcacagtagtttgc

SEQ ID NO: 16116 - DNA, 17 bp, Arabidopsis thaliana
aattcacagtctgtagg

SEQ ID NO: 16117 - DNA, 17 bp, Arabidopsis thaliana
aattcacatgggtcact

SEQ ID NO: 16118 - DNA, 17 bp, Arabidopsis thaliana
aattcaccagatcatga

SEQ ID NO: 16119 - DNA, 17 bp, Arabidopsis thaliana
aattcaccaggagaaaa

SEQ ID NO: 16120 - DNA, 17 bp, Arabidopsis thaliana
aattcaccatcatgagt

SEQ ID NO: 16121 - DNA, 17 bp, Arabidopsis thaliana
aattcaccatcgcgggt

SEQ ID NO: 16122 - DNA, 17 bp, Arabidopsis thaliana
aattcacccttaagttt

SEQ ID NO: 16123 - DNA, 17 bp, Arabidopsis thaliana
aattcaccggaaaacca

SEQ ID NO: 16124 - DNA, 17 bp, Arabidopsis thaliana
aattcacctctctttct

SEQ ID NO: 16125 - DNA, 17 bp, Arabidopsis thaliana
aattcacctttctccgc

SEQ ID NO: 16126 - DNA, 17 bp, Arabidopsis thaliana
aattcacgacatatgac

SEQ ID NO: 16127 - DNA, 17 bp, Arabidopsis thaliana
aattcacgaggcgttgg

SEQ ID NO: 16128 - DNA, 17 bp, Arabidopsis thaliana
aattcacggacaaattt

SEQ ID NO: 16129 - DNA, 17 bp, Arabidopsis thaliana
aattcacggttaatttg

SEQ ID NO: 16130 - DNA, 17 bp, Arabidopsis thaliana
aattcactaagtattgg

SEQ ID NO: 16131 - DNA, 17 bp, Arabidopsis thaliana
aattcactactgcgcca

SEQ ID NO: 16132 - DNA, 17 bp, Arabidopsis thaliana
aattcactctgttggtg

SEQ ID NO: 16133 - DNA, 17 bp, Arabidopsis thaliana
aattcactgcaaatgag

SEQ ID NO: 16134 - DNA, 17 bp, Arabidopsis thaliana
aattcactgctgcgcca

SEQ ID NO: 16135 - DNA, 17 bp, Arabidopsis thaliana
aattcagactaggacga

SEQ ID NO: 16136 - DNA, 17 bp, Arabidopsis thaliana
aattcagactctctagt

SEQ ID NO: 16137 - DNA, 17 bp, Arabidopsis thaliana
aattcagactgagattc

SEQ ID NO: 16138 - DNA, 17 bp, Arabidopsis thaliana
aattcagactgtgaaac

SEQ ID NO: 16139 - DNA, 17 bp, Arabidopsis thaliana
aattcagagtgacgctt

SEQ ID NO: 16140 - DNA, 17 bp, Arabidopsis thaliana
aattcagatatgtggcc

SEQ ID NO: 16141 - DNA, 17 bp, Arabidopsis thaliana
aattcagcccaatgttt

SEQ ID NO: 16142 - DNA, 17 bp, Arabidopsis thaliana
aattcagcccttgcgat

SEQ ID NO: 16143 - DNA, 17 bp, Arabidopsis thaliana
aattcagccctttgtcg

SEQ ID NO: 16144 - DNA, 17 bp, Arabidopsis thaliana
aattcagccgatctatt

SEQ ID NO: 16145 - DNA, 17 bp, Arabidopsis thaliana
aattcagcgctgcagtc

SEQ ID NO: 16146 - DNA, 17 bp, Arabidopsis thaliana
aattcaggtccaaaggt

SEQ ID NO: 16147 - DNA, 17 bp, Arabidopsis thaliana
aattcaggtgttaggga

SEQ ID NO: 16148 - DNA, 17 bp, Arabidopsis thaliana
aattcagtggcagccat

SEQ ID NO: 16149 - DNA, 17 bp, Arabidopsis thaliana
aattcagttccggattc

SEQ ID NO: 16150 - DNA, 17 bp, Arabidopsis thaliana
aattcataggacactgt

SEQ ID NO: 16151 - DNA, 17 bp, Arabidopsis thaliana
aattcataggatcatgt

SEQ ID NO: 16152 - DNA, 17 bp, Arabidopsis thaliana
aattcataggatcgtgc

SEQ ID NO: 16153 - DNA, 17 bp, Arabidopsis thaliana
aattcataggatcgtgt

SEQ ID NO: 16154 - DNA, 17 bp, Arabidopsis thaliana
aattcataggattatgc

SEQ ID NO: 16155 - DNA, 17 bp, Arabidopsis thaliana
aattcataggattgtgc

SEQ ID NO: 16156 - DNA, 17 bp, Arabidopsis thaliana
aattcatccgcaaggcg

SEQ ID NO: 16157 - DNA, 17 bp, Arabidopsis thaliana
aattcatccttgagcat

SEQ ID NO: 16158 - DNA, 17 bp, Arabidopsis thaliana
aattcatgcccatgggc

SEQ ID NO: 16159 - DNA, 17 bp, Arabidopsis thaliana
aattcatgcccatgggt

SEQ ID NO: 16160 - DNA, 17 bp, Arabidopsis thaliana
aattcatgcgattcgcc

SEQ ID NO: 16161 - DNA, 17 bp, Arabidopsis thaliana
aattcatgctcatgggc

SEQ ID NO: 16162 - DNA, 17 bp, Arabidopsis thaliana
aattcatggatgaccca

SEQ ID NO: 16163 - DNA, 17 bp, Arabidopsis thaliana
aattcatgtccatgggc

SEQ ID NO: 16164 - DNA, 17 bp, Arabidopsis thaliana
aattcatgtgcattgtc

SEQ ID NO: 16165 - DNA, 17 bp, Arabidopsis thaliana
aattcatgtttaaaatg

SEQ ID NO: 16166 - DNA, 17 bp, Arabidopsis thaliana
aattcattcccagtgct

SEQ ID NO: 16167 - DNA, 17 bp, Arabidopsis thaliana
aattcatttagattttt

SEQ ID NO: 16168 - DNA, 17 bp, Arabidopsis thaliana
aattcatttgacccctt

SEQ ID NO: 16169 - DNA, 17 bp, Arabidopsis thaliana
aattcatttgtttctgt

SEQ ID NO: 16170 - DNA, 17 bp, Arabidopsis thaliana
aattccaaccgactttg

SEQ ID NO: 16171 - DNA, 17 bp, Arabidopsis thaliana
aattccaaccgatgtgg

SEQ ID NO: 16172 - DNA, 17 bp, Arabidopsis thaliana
aattccaacttccggtg

SEQ ID NO: 16173 - DNA, 17 bp, Arabidopsis thaliana
aattccaacttccggtt

SEQ ID NO: 16174 - DNA, 17 bp, Arabidopsis thaliana
aattccaagtttacccc

SEQ ID NO: 16175 - DNA, 17 bp, Arabidopsis thaliana
aattccacagtgttctg

SEQ ID NO: 16176 - DNA, 17 bp, Arabidopsis thaliana
aattccacctcttgatg

SEQ ID NO: 16177 - DNA, 17 bp, Arabidopsis thaliana
aattccacgttgtggcc

SEQ ID NO: 16178 - DNA, 17 bp, Arabidopsis thaliana
aattccacttcacgggt

SEQ ID NO: 16179 - DNA, 17 bp, Arabidopsis thaliana
aattccagagattcgtg

SEQ ID NO: 16180 - DNA, 17 bp, Arabidopsis thaliana
aattccagcaaaggctt

SEQ ID NO: 16181 - DNA, 17 bp, Arabidopsis thaliana
aattccagcgtctacgg

SEQ ID NO: 16182 - DNA, 17 bp, Arabidopsis thaliana
aattccaggaagttctg

SEQ ID NO: 16183 - DNA, 17 bp, Arabidopsis thaliana
aattccagtagaaagaa

SEQ ID NO: 16184 - DNA, 17 bp, Arabidopsis thaliana
aattccagttgtggcaa

SEQ ID NO: 16185 - DNA, 17 bp, Arabidopsis thaliana
aattcccatcagattgt

SEQ ID NO: 16186 - DNA, 17 bp, Arabidopsis thaliana
aattcccattagtcgct

SEQ ID NO: 16187 - DNA, 17 bp, Arabidopsis thaliana
aattcccattgctggcg

SEQ ID NO: 16188 - DNA, 17 bp, Arabidopsis thaliana
aattcccatttggattg

SEQ ID NO: 16189 - DNA, 17 bp, Arabidopsis thaliana
aattccccttgttctct

SEQ ID NO: 16190 - DNA, 17 bp, Arabidopsis thaliana
aattcccggctggtgca

SEQ ID NO: 16191 - DNA, 17 bp, Arabidopsis thaliana
aattcccgtcgggcccc

SEQ ID NO: 16192 - DNA, 17 bp, Arabidopsis thaliana
aattcccgttatctggg

SEQ ID NO: 16193 - DNA, 17 bp, Arabidopsis thaliana
aattcccttggggaccc

SEQ ID NO: 16194 - DNA, 17 bp, Arabidopsis thaliana
aattcccttttgcaact

SEQ ID NO: 16195 - DNA, 17 bp, Arabidopsis thaliana
aattccgattgaggctc

SEQ ID NO: 16196 - DNA, 17 bp, Arabidopsis thaliana
aattccgccgcgacctg

SEQ ID NO: 16197 - DNA, 17 bp, Arabidopsis thaliana
aattccgcgtactagga

SEQ ID NO: 16198 - DNA, 17 bp, Arabidopsis thaliana
aattccgcgtctgcttt

SEQ ID NO: 16199 - DNA, 17 bp, Arabidopsis thaliana
aattccgctgcgaatgt

SEQ ID NO: 16200 - DNA, 17 bp, Arabidopsis thaliana
aattccggaaagtttat

SEQ ID NO: 16201 - DNA, 17 bp, Arabidopsis thaliana
aattccggaagcctaaa

SEQ ID NO: 16202 - DNA, 17 bp, Arabidopsis thaliana
aattccggacctaagcc

SEQ ID NO: 16203 - DNA, 17 bp, Arabidopsis thaliana
aattccgggctacaaaa

SEQ ID NO: 16204 - DNA, 17 bp, Arabidopsis thaliana
aattccgggtttatcgt

SEQ ID NO: 16205 - DNA, 17 bp, Arabidopsis thaliana
aattcctagtaagcgcg

SEQ ID NO: 16206 - DNA, 17 bp, Arabidopsis thaliana
aattcctcattttggca

SEQ ID NO: 16207 - DNA, 17 bp, Arabidopsis thaliana
aattcctctgcctgata

SEQ ID NO: 16208 - DNA, 17 bp, Arabidopsis thaliana
aattccttgaaaccgct

SEQ ID NO: 16209 - DNA, 17 bp, Arabidopsis thaliana
aattcgacccttgggag

SEQ ID NO: 16210 - DNA, 17 bp, Arabidopsis thaliana
aattcgacgggaaactt

SEQ ID NO: 16211 - DNA, 17 bp, Arabidopsis thaliana
aattcgatccagttgcc

SEQ ID NO: 16212 - DNA, 17 bp, Arabidopsis thaliana
aattcgatccggtaagc

SEQ ID NO: 16213 - DNA, 17 bp, Arabidopsis thaliana
aattcgattatgctgga

SEQ ID NO: 16214 - DNA, 17 bp, Arabidopsis thaliana
aattcgattattcactg

SEQ ID NO: 16215 - DNA, 17 bp, Arabidopsis thaliana
aattcgattgcgcaact

SEQ ID NO: 16216 - DNA, 17 bp, Arabidopsis thaliana
aattcgattttggacct

SEQ ID NO: 16217 - DNA, 17 bp, Arabidopsis thaliana
aattcgcagatgtgagc

SEQ ID NO: 16218 - DNA, 17 bp, Arabidopsis thaliana
aattcgccaagctcgcc

SEQ ID NO: 16219 - DNA, 17 bp, Arabidopsis thaliana
aattcgcctaagtcgca

SEQ ID NO: 16220 - DNA, 17 bp, Arabidopsis thaliana
aattcgcgtaattggcc

SEQ ID NO: 16221 - DNA, 17 bp, Arabidopsis thaliana
aattcgcgtctgagaaa

SEQ ID NO: 16222 - DNA, 17 bp, Arabidopsis thaliana
aattcgcgtctgagaac

SEQ ID NO: 16223 - DNA, 17 bp, Arabidopsis thaliana
aattcgcgtgatttcca

SEQ ID NO: 16224 - DNA, 17 bp, Arabidopsis thaliana
aattcgctccgcccgat

SEQ ID NO: 16225 - DNA, 17 bp, Arabidopsis thaliana
aattcgcttctgagcag

SEQ ID NO: 16226 - DNA, 17 bp, Arabidopsis thaliana
aattcggaaatttgcgt

SEQ ID NO: 16227 - DNA, 17 bp, Arabidopsis thaliana
aattcggagatacggtt

SEQ ID NO: 16228 - DNA, 17 bp, Arabidopsis thaliana
aattcggccaatccatt

SEQ ID NO: 16229 - DNA, 17 bp, Arabidopsis thaliana
aattcggccattccgta

SEQ ID NO: 16230 - DNA, 17 bp, Arabidopsis thaliana
aattcggcctgaggtgt

SEQ ID NO: 16231 - DNA, 17 bp, Arabidopsis thaliana
aattcggcgggaaactt

SEQ ID NO: 16232 - DNA, 17 bp, Arabidopsis thaliana
aattcggctgatgatct

SEQ ID NO: 16233 - DNA, 17 bp, Arabidopsis thaliana
aattcggcttcactatc

SEQ ID NO: 16234 - DNA, 17 bp, Arabidopsis thaliana
aattcggggacaactgg

SEQ ID NO: 16235 - DNA, 17 bp, Arabidopsis thaliana
aattcggtattgactag

SEQ ID NO: 16236 - DNA, 17 bp, Arabidopsis thaliana
aattcggtccatgtgct

SEQ ID NO: 16237 - DNA, 17 bp, Arabidopsis thaliana
aattcggtcgtacattg

SEQ ID NO: 16238 - DNA, 17 bp, Arabidopsis thaliana
aattcgtcccagaactt

SEQ ID NO: 16239 - DNA, 17 bp, Arabidopsis thaliana
aattcgtcgagtccttc

SEQ ID NO: 16240 - DNA, 17 bp, Arabidopsis thaliana
aattcgtcggcgatttc

SEQ ID NO: 16241 - DNA, 17 bp, Arabidopsis thaliana
aattcgtctcgatctcg

SEQ ID NO: 16242 - DNA, 17 bp, Arabidopsis thaliana
aattcgtcttactccgt

SEQ ID NO: 16243 - DNA, 17 bp, Arabidopsis thaliana
aattcgtggctacttgg

SEQ ID NO: 16244 - DNA, 17 bp, Arabidopsis thaliana
aattcgttcccgggcct

SEQ ID NO: 16245 - DNA, 17 bp, Arabidopsis thaliana
aattctaaaccattgca

SEQ ID NO: 16246 - DNA, 17 bp, Arabidopsis thaliana
aattctaacacggacaa

SEQ ID NO: 16247 - DNA, 17 bp, Arabidopsis thaliana
aattctaaccttgtgtc

SEQ ID NO: 16248 - DNA, 17 bp, Arabidopsis thaliana
aattctaactgaacctg

SEQ ID NO: 16249 - DNA, 17 bp, Arabidopsis thaliana
aattctaaggccatgaa

SEQ ID NO: 16250 - DNA, 17 bp, Arabidopsis thaliana
aattctaattgcagatt

SEQ ID NO: 16251 - DNA, 17 bp, Arabidopsis thaliana
aattctacaaatgtcac

SEQ ID NO: 16252 - DNA, 17 bp, Arabidopsis thaliana
aattctaccgatcagat

SEQ ID NO: 16253 - DNA, 17 bp, Arabidopsis thaliana
aattctaccgatgaatc

SEQ ID NO: 16254 - DNA, 17 bp, Arabidopsis thaliana
aattctactacggacaa

SEQ ID NO: 16255 - DNA, 17 bp, Arabidopsis thaliana
aattctactcagttgct

SEQ ID NO: 16256 - DNA, 17 bp, Arabidopsis thaliana
aattctactcgagccat

SEQ ID NO: 16257 - DNA, 17 bp, Arabidopsis thaliana
aattctactcttggcaa

SEQ ID NO: 16258 - DNA, 17 bp, Arabidopsis thaliana
aattctactcttgggaa

SEQ ID NO: 16259 - DNA, 17 bp, Arabidopsis thaliana
aattctagagaaaactg

SEQ ID NO: 16260 - DNA, 17 bp, Arabidopsis thaliana
aattctagcaaacccat

SEQ ID NO: 16261 - DNA, 17 bp, Arabidopsis thaliana
aattctagccattcgct

SEQ ID NO: 16262 - DNA, 17 bp, Arabidopsis thaliana
aattctaggatttcacc

SEQ ID NO: 16263 - DNA, 17 bp, Arabidopsis thaliana
aattctaggattttcca

SEQ ID NO: 16264 - DNA, 17 bp, Arabidopsis thaliana
aattctagtgcgccggg

SEQ ID NO: 16265 - DNA, 17 bp, Arabidopsis thaliana
aattctcactttgattc

SEQ ID NO: 16266 - DNA, 17 bp, Arabidopsis thaliana
aattctcagtatgctag

SEQ ID NO: 16267 - DNA, 17 bp, Arabidopsis thaliana
aattctcataggtggga

SEQ ID NO: 16268 - DNA, 17 bp, Arabidopsis thaliana
aattctccacgaaggct

SEQ ID NO: 16269 - DNA, 17 bp, Arabidopsis thaliana
aattctccagtgttgat

SEQ ID NO: 16270 - DNA, 17 bp, Arabidopsis thaliana
aattctccatcccgccc

SEQ ID NO: 16271 - DNA, 17 bp, Arabidopsis thaliana
aattctccatcgcgtga

SEQ ID NO: 16272 - DNA, 17 bp, Arabidopsis thaliana
aattctcctggttatgg

SEQ ID NO: 16273 - DNA, 17 bp, Arabidopsis thaliana
aattctcctggttccgc

SEQ ID NO: 16274 - DNA, 17 bp, Arabidopsis thaliana
aattctcctggttctgg

SEQ ID NO: 16275 - DNA, 17 bp, Arabidopsis thaliana
aattctcctggttctgt

SEQ ID NO: 16276 - DNA, 17 bp, Arabidopsis thaliana
aattctccttcgtgacc

SEQ ID NO: 16277 - DNA, 17 bp, Arabidopsis thaliana
aattctcgacgaacact

SEQ ID NO: 16278 - DNA, 17 bp, Arabidopsis thaliana
aattctcgcaaattgtt

SEQ ID NO: 16279 - DNA, 17 bp, Arabidopsis thaliana
aattctcgcgatctata

SEQ ID NO: 16280 - DNA, 17 bp, Arabidopsis thaliana
aattctcggaacgcccc

SEQ ID NO: 16281 - DNA, 17 bp, Arabidopsis thaliana
aattctcggaatgcccc

SEQ ID NO: 16282 - DNA, 17 bp, Arabidopsis thaliana
aattctcggacccggtc

SEQ ID NO: 16283 - DNA, 17 bp, Arabidopsis thaliana
aattctcgtcaacgaca

SEQ ID NO: 16284 - DNA, 17 bp, Arabidopsis thaliana
aattctctccatcttga

SEQ ID NO: 16285 - DNA, 17 bp, Arabidopsis thaliana
aattctctgaacttggg

SEQ ID NO: 16286 - DNA, 17 bp, Arabidopsis thaliana
aattctctgagtggtga

SEQ ID NO: 16287 - DNA, 17 bp, Arabidopsis thaliana
aattctctgcggtaaaa

SEQ ID NO: 16288 - DNA, 17 bp, Arabidopsis thaliana
aattctcttaggagttg

SEQ ID NO: 16289 - DNA, 17 bp, Arabidopsis thaliana
aattctcttcaatctaa

SEQ ID NO: 16290 - DNA, 17 bp, Arabidopsis thaliana
aattctcttgcatttaa

SEQ ID NO: 16291 - DNA, 17 bp, Arabidopsis thaliana
aattctcttgggtgaac

SEQ ID NO: 16292 - DNA, 17 bp, Arabidopsis thaliana
aattctgaaattctatc

SEQ ID NO: 16293 - DNA, 17 bp, Arabidopsis thaliana
aattctgaagcaaatac

SEQ ID NO: 16294 - DNA, 17 bp, Arabidopsis thaliana
aattctgaagcaaatgc

SEQ ID NO: 16295 - DNA, 17 bp, Arabidopsis thaliana
aattctgaagttgtgtg

SEQ ID NO: 16296 - DNA, 17 bp, Arabidopsis thaliana
aattctgacgactaatt

SEQ ID NO: 16297 - DNA, 17 bp, Arabidopsis thaliana
aattctgacgtggcaat

SEQ ID NO: 16298 - DNA, 17 bp, Arabidopsis thaliana
aattctgactggcaagc

SEQ ID NO: 16299 - DNA, 17 bp, Arabidopsis thaliana
aattctgatcgtttgac

SEQ ID NO: 16300 - DNA, 17 bp, Arabidopsis thaliana
aattctgattgagagct

SEQ ID NO: 16301 - DNA, 17 bp, Arabidopsis thaliana
aattctgcagagtccat

SEQ ID NO: 16302 - DNA, 17 bp, Arabidopsis thaliana
aattctgcctgagatgt

SEQ ID NO: 16303 - DNA, 17 bp, Arabidopsis thaliana
aattctgcgacggattt

SEQ ID NO: 16304 - DNA, 17 bp, Arabidopsis thaliana
aattctgcgtgttagcg

SEQ ID NO: 16305 - DNA, 17 bp, Arabidopsis thaliana
aattctgctgaagcggc

SEQ ID NO: 16306 - DNA, 17 bp, Arabidopsis thaliana
aattctgctggtggtga

SEQ ID NO: 16307 - DNA, 17 bp, Arabidopsis thaliana
aattctggagcaagtct

SEQ ID NO: 16308 - DNA, 17 bp, Arabidopsis thaliana
aattctggctatccaaa

SEQ ID NO: 16309 - DNA, 17 bp, Arabidopsis thaliana
aattctgggacgaagcc

SEQ ID NO: 16310 - DNA, 17 bp, Arabidopsis thaliana
aattctggggctggacc

SEQ ID NO: 16311 - DNA, 17 bp, Arabidopsis thaliana
aattctgggtttcggat

SEQ ID NO: 16312 - DNA, 17 bp, Arabidopsis thaliana
aattctggtgcggttca

SEQ ID NO: 16313 - DNA, 17 bp, Arabidopsis thaliana
aattctgtcagttggga

SEQ ID NO: 16314 - DNA, 17 bp, Arabidopsis thaliana
aattctgtcatcgaaat

SEQ ID NO: 16315 - DNA, 17 bp, Arabidopsis thaliana
aattctgtcgcgatgtt

SEQ ID NO: 16316 - DNA, 17 bp, Arabidopsis thaliana
aattctgtcttagtcgt

SEQ ID NO: 16317 - DNA, 17 bp, Arabidopsis thaliana
aattctgtcttccacga

SEQ ID NO: 16318 - DNA, 17 bp, Arabidopsis thaliana
aattctgttcagccgtt

SEQ ID NO: 16319 - DNA, 17 bp, Arabidopsis thaliana
aattctgttccgttgtc

SEQ ID NO: 16320 - DNA, 17 bp, Arabidopsis thaliana
aattcttacgcatttaa

SEQ ID NO: 16321 - DNA, 17 bp, Arabidopsis thaliana
aattcttacgcatttag

SEQ ID NO: 16322 - DNA, 17 bp, Arabidopsis thaliana
aattcttacgcatttga

SEQ ID NO: 16323 - DNA, 17 bp, Arabidopsis thaliana
aattcttacgcctttaa

SEQ ID NO: 16324 - DNA, 17 bp, Arabidopsis thaliana
aattcttacgcctttta

SEQ ID NO: 16325 - DNA, 17 bp, Arabidopsis thaliana
aattcttactcaggtct

SEQ ID NO: 16326 - DNA, 17 bp, Arabidopsis thaliana
aattcttatgcctttaa

SEQ ID NO: 16327 - DNA, 17 bp, Arabidopsis thaliana
aattcttcaggttccga

SEQ ID NO: 16328 - DNA, 17 bp, Arabidopsis thaliana
aattcttcatgtctgca

SEQ ID NO: 16329 - DNA, 17 bp, Arabidopsis thaliana
aattcttccaagcggcg

SEQ ID NO: 16330 - DNA, 17 bp, Arabidopsis thaliana
aattcttcgtcaatgtc

SEQ ID NO: 16331 - DNA, 17 bp, Arabidopsis thaliana
aattcttctccaatagc

SEQ ID NO: 16332 - DNA, 17 bp, Arabidopsis thaliana
aattcttctttgtcgct

SEQ ID NO: 16333 - DNA, 17 bp, Arabidopsis thaliana
aattcttgagggcttga

SEQ ID NO: 16334 - DNA, 17 bp, Arabidopsis thaliana
aattcttgtttcatcca

SEQ ID NO: 16335 - DNA, 17 bp, Arabidopsis thaliana
aattctttactgttact

SEQ ID NO: 16336 - DNA, 17 bp, Arabidopsis thaliana
aattctttctaacaggt

SEQ ID NO: 16337 - DNA, 17 bp, Arabidopsis thaliana
aattctttgtacgccgg

SEQ ID NO: 16338 - DNA, 17 bp, Arabidopsis thaliana
aattctttttgatggct

SEQ ID NO: 16339 - DNA, 17 bp, Arabidopsis thaliana
aattctttttgggatgg

SEQ ID NO: 16340 - DNA, 17 bp, Arabidopsis thaliana
aattcttttttcctggc

SEQ ID NO: 16341 - DNA, 17 bp, Arabidopsis thaliana
aattgaaaatcgctgcg

SEQ ID NO: 16342 - DNA, 17 bp, Arabidopsis thaliana
aattgaaaatgctggcc

SEQ ID NO: 16343 - DNA, 17 bp, Arabidopsis thaliana
aattgaaaccaccatgc

SEQ ID NO: 16344 - DNA, 17 bp, Arabidopsis thaliana
aattgaagctggttggc

SEQ ID NO: 16345 - DNA, 17 bp, Arabidopsis thaliana
aattgaatttggttcgt

SEQ ID NO: 16346 - DNA, 17 bp, Arabidopsis thaliana
aattgacaaaaagtgtg

SEQ ID NO: 16347 - DNA, 17 bp, Arabidopsis thaliana
aattgacaataggtgca

SEQ ID NO: 16348 - DNA, 17 bp, Arabidopsis thaliana
aattgacaataggtgga

SEQ ID NO: 16349 - DNA, 17 bp, Arabidopsis thaliana
aattgacactgaggata

SEQ ID NO: 16350 - DNA, 17 bp, Arabidopsis thaliana
aattgaccaacgatgta

SEQ ID NO: 16351 - DNA, 17 bp, Arabidopsis thaliana
aattgaccaacggtgta

SEQ ID NO: 16352 - DNA, 17 bp, Arabidopsis thaliana
aattgaccaagcagccg

SEQ ID NO: 16353 - DNA, 17 bp, Arabidopsis thaliana
aattgaccaaggattgt

SEQ ID NO: 16354 - DNA, 17 bp, Arabidopsis thaliana
aattgacccaataactc

SEQ ID NO: 16355 - DNA, 17 bp, Arabidopsis thaliana
aattgacccatggacca

SEQ ID NO: 16356 - DNA, 17 bp, Arabidopsis thaliana
aattgacccatggtcca

SEQ ID NO: 16357 - DNA, 17 bp, Arabidopsis thaliana
aattgacccgcggtata

SEQ ID NO: 16358 - DNA, 17 bp, Arabidopsis thaliana
aattgacccgtagttca

SEQ ID NO: 16359 - DNA, 17 bp, Arabidopsis thaliana
aattgacccgtggtatg

SEQ ID NO: 16360 - DNA, 17 bp, Arabidopsis thaliana
aattgacccgtggttca

SEQ ID NO: 16361 - DNA, 17 bp, Arabidopsis thaliana
aattgaccgagcagtgg

SEQ ID NO: 16362 - DNA, 17 bp, Arabidopsis thaliana
aattgaccgatcagccg

SEQ ID NO: 16363 - DNA, 17 bp, Arabidopsis thaliana
aattgacctagccgaat

SEQ ID NO: 16364 - DNA, 17 bp, Arabidopsis thaliana
aattgacctagtgctct

SEQ ID NO: 16365 - DNA, 17 bp, Arabidopsis thaliana
aattgacctagtgcttt

SEQ ID NO: 16366 - DNA, 17 bp, Arabidopsis thaliana
aattgacctcgacggcg

SEQ ID NO: 16367 - DNA, 17 bp, Arabidopsis thaliana
aattgacctgaccgaat

SEQ ID NO: 16368 - DNA, 17 bp, Arabidopsis thaliana
aattgacgaactgggac

SEQ ID NO: 16369 - DNA, 17 bp, Arabidopsis thaliana
aattgacgatgttgccc

SEQ ID NO: 16370 - DNA, 17 bp, Arabidopsis thaliana
aattgacggaagggcac

SEQ ID NO: 16371 - DNA, 17 bp, Arabidopsis thaliana
aattgacgggtttgatt

SEQ ID NO: 16372 - DNA, 17 bp, Arabidopsis thaliana
aattgacgtttttaccc

SEQ ID NO: 16373 - DNA, 17 bp, Arabidopsis thaliana
aattgactcatcaaccc

SEQ ID NO: 16374 - DNA, 17 bp, Arabidopsis thaliana
aattgactgctcctaca

SEQ ID NO: 16375 - DNA, 17 bp, Arabidopsis thaliana
aattgacttatggtcca

SEQ ID NO: 16376 - DNA, 17 bp, Arabidopsis thaliana
aattgacttcctaccga

SEQ ID NO: 16377 - DNA, 17 bp, Arabidopsis thaliana
aattgactttcttgtcc

SEQ ID NO: 16378 - DNA, 17 bp, Arabidopsis thaliana
aattgagacttatgcca

SEQ ID NO: 16379 - DNA, 17 bp, Arabidopsis thaliana
aattgagcggagctgtt

SEQ ID NO: 16380 - DNA, 17 bp, Arabidopsis thaliana
aattgagctaacgacac

SEQ ID NO: 16381 - DNA, 17 bp, Arabidopsis thaliana
aattgagctaacgactt

SEQ ID NO: 16382 - DNA, 17 bp, Arabidopsis thaliana
aattgagttcggtggtc

SEQ ID NO: 16383 - DNA, 17 bp, Arabidopsis thaliana
aattgagttgccgcagc

SEQ ID NO: 16384 - DNA, 17 bp, Arabidopsis thaliana
aattgatcactgggagc

SEQ ID NO: 16385 - DNA, 17 bp, Arabidopsis thaliana
aattgatccaaacccgt

SEQ ID NO: 16386 - DNA, 17 bp, Arabidopsis thaliana
aattgatccaccgtttc

SEQ ID NO: 16387 - DNA, 17 bp, Arabidopsis thaliana
aattgatccgcttgcac

SEQ ID NO: 16388 - DNA, 17 bp, Arabidopsis thaliana
aattgatctcctcttgc

SEQ ID NO: 16389 - DNA, 17 bp, Arabidopsis thaliana
aattgatgaatctgtcc

SEQ ID NO: 16390 - DNA, 17 bp, Arabidopsis thaliana
aattgatgcacactgat

SEQ ID NO: 16391 - DNA, 17 bp, Arabidopsis thaliana
aattgatgttgtgcctt

SEQ ID NO: 16392 - DNA, 17 bp, Arabidopsis thaliana
aattgattcggcgccgt

SEQ ID NO: 16393 - DNA, 17 bp, Arabidopsis thaliana
aattgattggattgtga

SEQ ID NO: 16394 - DNA, 17 bp, Arabidopsis thaliana
aattgattgtctactgt

SEQ ID NO: 16395 - DNA, 17 bp, Arabidopsis thaliana
aattgatttggccacct

SEQ ID NO: 16396 - DNA, 17 bp, Arabidopsis thaliana
aattgcagataaagtgc

SEQ ID NO: 16397 - DNA, 17 bp, Arabidopsis thaliana
aattgcagtatcccgtg

SEQ ID NO: 16398 - DNA, 17 bp, Arabidopsis thaliana
aattgcattctctgctt

SEQ ID NO: 16399 - DNA, 17 bp, Arabidopsis thaliana
aattgccgtgatcgatg

SEQ ID NO: 16400 - DNA, 17 bp, Arabidopsis thaliana
aattgccgtggtgaagg

SEQ ID NO: 16401 - DNA, 17 bp, Arabidopsis thaliana
aattgcctgcagatgtt

SEQ ID NO: 16402 - DNA, 17 bp, Arabidopsis thaliana
aattgcgacatgtgctc

SEQ ID NO: 16403 - DNA, 17 bp, Arabidopsis thaliana
aattgcgaccaatctga

SEQ ID NO: 16404 - DNA, 17 bp, Arabidopsis thaliana
aattgcgaccaatttgc

SEQ ID NO: 16405 - DNA, 17 bp, Arabidopsis thaliana
aattgcgacgagtttgc

SEQ ID NO: 16406 - DNA, 17 bp, Arabidopsis thaliana
aattgcgattgatcgag

SEQ ID NO: 16407 - DNA, 17 bp, Arabidopsis thaliana
aattgcgcacagtagcc

SEQ ID NO: 16408 - DNA, 17 bp, Arabidopsis thaliana
aattgcgccaagttgtt

SEQ ID NO: 16409 - DNA, 17 bp, Arabidopsis thaliana
aattgcggaggtgcttg

SEQ ID NO: 16410 - DNA, 17 bp, Arabidopsis thaliana
aattgcggcaaacttgc

SEQ ID NO: 16411 - DNA, 17 bp, Arabidopsis thaliana
aattgcggctttacggt

SEQ ID NO: 16412 - DNA, 17 bp, Arabidopsis thaliana
aattgcggtccagtcca

SEQ ID NO: 16413 - DNA, 17 bp, Arabidopsis thaliana
aattgcggtcgctggtc

SEQ ID NO: 16414 - DNA, 17 bp, Arabidopsis thaliana
aattgcggttgcggttg

SEQ ID NO: 16415 - DNA, 17 bp, Arabidopsis thaliana
aattgcggttttttcgg

SEQ ID NO: 16416 - DNA, 17 bp, Arabidopsis thaliana
aattgcgtacagtagcc

SEQ ID NO: 16417 - DNA, 17 bp, Arabidopsis thaliana
aattgcgtggatggtgc

SEQ ID NO: 16418 - DNA, 17 bp, Arabidopsis thaliana
aattgctactcgcgtgc

SEQ ID NO: 16419 - DNA, 17 bp, Arabidopsis thaliana
aattgctagtctcgcta

SEQ ID NO: 16420 - DNA, 17 bp, Arabidopsis thaliana
aattgctgagaatgccc

SEQ ID NO: 16421 - DNA, 17 bp, Arabidopsis thaliana
aattgctgagtgacctt

SEQ ID NO: 16422 - DNA, 17 bp, Arabidopsis thaliana
aattgctgctaaccgtc

SEQ ID NO: 16423 - DNA, 17 bp, Arabidopsis thaliana
aattgctgctgatggag

SEQ ID NO: 16424 - DNA, 17 bp, Arabidopsis thaliana
aattgcttaatggcttc

SEQ ID NO: 16425 - DNA, 17 bp, Arabidopsis thaliana
aattgcttactggcgtc

SEQ ID NO: 16426 - DNA, 17 bp, Arabidopsis thaliana
aattgcttgtggatccg

SEQ ID NO: 16427 - DNA, 17 bp, Arabidopsis thaliana
aattggaaactgaaatt

SEQ ID NO: 16428 - DNA, 17 bp, Arabidopsis thaliana
aattggaaactgaactt

SEQ ID NO: 16429 - DNA, 17 bp, Arabidopsis thaliana
aattggaaactgaattt

SEQ ID NO: 16430 - DNA, 17 bp, Arabidopsis thaliana
aattggaacatgggatt

SEQ ID NO: 16431 - DNA, 17 bp, Arabidopsis thaliana
aattggacaatggttca

SEQ ID NO: 16432 - DNA, 17 bp, Arabidopsis thaliana
aattggacagtggttca

SEQ ID NO: 16433 - DNA, 17 bp, Arabidopsis thaliana
aattggaccaaggctca

SEQ ID NO: 16434 - DNA, 17 bp, Arabidopsis thaliana
aattggacgggccgctc

SEQ ID NO: 16435 - DNA, 17 bp, Arabidopsis thaliana
aattggactcaaagcat

SEQ ID NO: 16436 - DNA, 17 bp, Arabidopsis thaliana
aattggactgtctaaaa

SEQ ID NO: 16437 - DNA, 17 bp, Arabidopsis thaliana
aattggagactgaactt

SEQ ID NO: 16438 - DNA, 17 bp, Arabidopsis thaliana
aattggagcgatttgtc

SEQ ID NO: 16439 - DNA, 17 bp, Arabidopsis thaliana
aattggaggtgagatga

SEQ ID NO: 16440 - DNA, 17 bp, Arabidopsis thaliana
aattggatgatcgggcc

SEQ ID NO: 16441 - DNA, 17 bp, Arabidopsis thaliana
aattggattcctaggta

SEQ ID NO: 16442 - DNA, 17 bp, Arabidopsis thaliana
aattggattctcagctt

SEQ ID NO: 16443 - DNA, 17 bp, Arabidopsis thaliana
aattggcactgacatgc

SEQ ID NO: 16444 - DNA, 17 bp, Arabidopsis thaliana
aattggccgggtcgtgc

SEQ ID NO: 16445 - DNA, 17 bp, Arabidopsis thaliana
aattggcgatgtgttgt

SEQ ID NO: 16446 - DNA, 17 bp, Arabidopsis thaliana
aattggcgggaaaagtt

SEQ ID NO: 16447 - DNA, 17 bp, Arabidopsis thaliana
aattggctaaattgctt

SEQ ID NO: 16448 - DNA, 17 bp, Arabidopsis thaliana
aattggctaagaaacga

SEQ ID NO: 16449 - DNA, 17 bp, Arabidopsis thaliana
aattggctacgcaagtt

SEQ ID NO: 16450 - DNA, 17 bp, Arabidopsis thaliana
aattggctattgggctg

SEQ ID NO: 16451 - DNA, 17 bp, Arabidopsis thaliana
aattggctctgtcgact

SEQ ID NO: 16452 - DNA, 17 bp, Arabidopsis thaliana
aattgggacccggtgca

SEQ ID NO: 16453 - DNA, 17 bp, Arabidopsis thaliana
aattgggacttatttac

SEQ ID NO: 16454 - DNA, 17 bp, Arabidopsis thaliana
aattgggcagccgatca

SEQ ID NO: 16455 - DNA, 17 bp, Arabidopsis thaliana
aattgggcatatgacca

SEQ ID NO: 16456 - DNA, 17 bp, Arabidopsis thaliana
aattgggccaccacact

SEQ ID NO: 16457 - DNA, 17 bp, Arabidopsis thaliana
aattgggccaccagact

SEQ ID NO: 16458 - DNA, 17 bp, Arabidopsis thaliana
aattgggcctagtccca

SEQ ID NO: 16459 - DNA, 17 bp, Arabidopsis thaliana
aattgggctgccttgtt

SEQ ID NO: 16460 - DNA, 17 bp, Arabidopsis thaliana
aattggtaataggtgga

SEQ ID NO: 16461 - DNA, 17 bp, Arabidopsis thaliana
aattggtactaggtgat

SEQ ID NO: 16462 - DNA, 17 bp, Arabidopsis thaliana
aattggtcaactatatc

SEQ ID NO: 16463 - DNA, 17 bp, Arabidopsis thaliana
aattggtcatagtgatc

SEQ ID NO: 16464 - DNA, 17 bp, Arabidopsis thaliana
aattggtccgcagatgg

SEQ ID NO: 16465 - DNA, 17 bp, Arabidopsis thaliana
aattggtccgtcagttg

SEQ ID NO: 16466 - DNA, 17 bp, Arabidopsis thaliana
aattggtctgtaagctt

SEQ ID NO: 16467 - DNA, 17 bp, Arabidopsis thaliana
aattggtgccaaccgct

SEQ ID NO: 16468 - DNA, 17 bp, Arabidopsis thaliana
aattggttcgtcagttg

SEQ ID NO: 16469 - DNA, 17 bp, Arabidopsis thaliana
aattggttgggcttaga

SEQ ID NO: 16470 - DNA, 17 bp, Arabidopsis thaliana
aattgtaacaacttgga

SEQ ID NO: 16471 - DNA, 17 bp, Arabidopsis thaliana
aattgtaagacccgacc

SEQ ID NO: 16472 - DNA, 17 bp, Arabidopsis thaliana
aattgtactgaactgct

SEQ ID NO: 16473 - DNA, 17 bp, Arabidopsis thaliana
aattgtatcgcactgtc

SEQ ID NO: 16474 - DNA, 17 bp, Arabidopsis thaliana
aattgtcaagtcaagca

SEQ ID NO: 16475 - DNA, 17 bp, Arabidopsis thaliana
aattgtcaccacggtgt

SEQ ID NO: 16476 - DNA, 17 bp, Arabidopsis thaliana
aattgtcaccgcggtgt

SEQ ID NO: 16477 - DNA, 17 bp, Arabidopsis thaliana
aattgtcactaaggccc

SEQ ID NO: 16478 - DNA, 17 bp, Arabidopsis thaliana
aattgtcactgcttatg

SEQ ID NO: 16479 - DNA, 17 bp, Arabidopsis thaliana
aattgtcagcatttctg

SEQ ID NO: 16480 - DNA, 17 bp, Arabidopsis thaliana
aattgtccgtgttagaa

SEQ ID NO: 16481 - DNA, 17 bp, Arabidopsis thaliana
aattgtcctgcaaatgg

SEQ ID NO: 16482 - DNA, 17 bp, Arabidopsis thaliana
aattgtcgagttattga

SEQ ID NO: 16483 - DNA, 17 bp, Arabidopsis thaliana
aattgtcgcagcctgta

SEQ ID NO: 16484 - DNA, 17 bp, Arabidopsis thaliana
aattgtcgcatagattc

SEQ ID NO: 16485 - DNA, 17 bp, Arabidopsis thaliana
aattgtcggaactgtgc

SEQ ID NO: 16486 - DNA, 17 bp, Arabidopsis thaliana
aattgtctataaatcgg

SEQ ID NO: 16487 - DNA, 17 bp, Arabidopsis thaliana
aattgtctcatgaattc

SEQ ID NO: 16488 - DNA, 17 bp, Arabidopsis thaliana
aattgtctcatggactc

SEQ ID NO: 16489 - DNA, 17 bp, Arabidopsis thaliana
aattgtctcatggattc

SEQ ID NO: 16490 - DNA, 17 bp, Arabidopsis thaliana
aattgtctccacggtgt

SEQ ID NO: 16491 - DNA, 17 bp, Arabidopsis thaliana
aattgtctccacggttt

SEQ ID NO: 16492 - DNA, 17 bp, Arabidopsis thaliana
aattgtctcgtgtaaag

SEQ ID NO: 16493 - DNA, 17 bp, Arabidopsis thaliana
aattgtcttcacggtgt

SEQ ID NO: 16494 - DNA, 17 bp, Arabidopsis thaliana
aattgtcttcgcggtgt

SEQ ID NO: 16495 - DNA, 17 bp, Arabidopsis thaliana
aattgtcttgcggacgg

SEQ ID NO: 16496 - DNA, 17 bp, Arabidopsis thaliana
aattgtcttggattcgt

SEQ ID NO: 16497 - DNA, 17 bp, Arabidopsis thaliana
aattgtgacaaacggaa

SEQ ID NO: 16498 - DNA, 17 bp, Arabidopsis thaliana
aattgtgacaccgccaa

SEQ ID NO: 16499 - DNA, 17 bp, Arabidopsis thaliana
aattgtgaccatcggag

SEQ ID NO: 16500 - DNA, 17 bp, Arabidopsis thaliana
aattgtgaccatcggtc

SEQ ID NO: 16501 - DNA, 17 bp, Arabidopsis thaliana
aattgtgagtagagcct

SEQ ID NO: 16502 - DNA, 17 bp, Arabidopsis thaliana
aattgtgattccgaaca

SEQ ID NO: 16503 - DNA, 17 bp, Arabidopsis thaliana
aattgtgcaaatccctt

SEQ ID NO: 16504 - DNA, 17 bp, Arabidopsis thaliana
aattgtgcgaatttcac

SEQ ID NO: 16505 - DNA, 17 bp, Arabidopsis thaliana
aattgtgcgaatttcag

SEQ ID NO: 16506 - DNA, 17 bp, Arabidopsis thaliana
aattgtggatcaagcgt

SEQ ID NO: 16507 - DNA, 17 bp, Arabidopsis thaliana
aattgtggatgtcggat

SEQ ID NO: 16508 - DNA, 17 bp, Arabidopsis thaliana
aattgtggcccacaaga

SEQ ID NO: 16509 - DNA, 17 bp, Arabidopsis thaliana
aattgtggctaatgcgc

SEQ ID NO: 16510 - DNA, 17 bp, Arabidopsis thaliana
aattgtggcttccatcc

SEQ ID NO: 16511 - DNA, 17 bp, Arabidopsis thaliana
aattgtgggttgggctt

SEQ ID NO: 16512 - DNA, 17 bp, Arabidopsis thaliana
aattgtgtaacctcgac

SEQ ID NO: 16513 - DNA, 17 bp, Arabidopsis thaliana
aattgtgtatgcgagtt

SEQ ID NO: 16514 - DNA, 17 bp, Arabidopsis thaliana
aattgtgtcttctttac

SEQ ID NO: 16515 - DNA, 17 bp, Arabidopsis thaliana
aattgttccaactcctg

SEQ ID NO: 16516 - DNA, 17 bp, Arabidopsis thaliana
aattgttcctcgcaaaa

SEQ ID NO: 16517 - DNA, 17 bp, Arabidopsis thaliana
aattgttgagccgtgag

SEQ ID NO: 16518 - DNA, 17 bp, Arabidopsis thaliana
aattgttgatgtatagc

SEQ ID NO: 16519 - DNA, 17 bp, Arabidopsis thaliana
aattgtttccggtcgtg

SEQ ID NO: 16520 - DNA, 17 bp, Arabidopsis thaliana
aattgtttctacttggg

SEQ ID NO: 16521 - DNA, 17 bp, Arabidopsis thaliana
aattgtttgtgaccgtc

SEQ ID NO: 16522 - DNA, 17 bp, Arabidopsis thaliana
aattgtttgttccaacg

SEQ ID NO: 16523 - DNA, 17 bp, Arabidopsis thaliana
aatttacaatgcttctc

SEQ ID NO: 16524 - DNA, 17 bp, Arabidopsis thaliana
aatttacgagatgtgcc

SEQ ID NO: 16525 - DNA, 17 bp, Arabidopsis thaliana
aatttacgtgcagacca

SEQ ID NO: 16526 - DNA, 17 bp, Arabidopsis thaliana
aatttactcgtgttagc

SEQ ID NO: 16527 - DNA, 17 bp, Arabidopsis thaliana
aatttatcctagtgtgg

SEQ ID NO: 16528 - DNA, 17 bp, Arabidopsis thaliana
aatttatcgatctcaaa

SEQ ID NO: 16529 - DNA, 17 bp, Arabidopsis thaliana
aatttatctgcgattta

SEQ ID NO: 16530 - DNA, 17 bp, Arabidopsis thaliana
aatttcaaccgacggta

SEQ ID NO: 16531 - DNA, 17 bp, Arabidopsis thaliana
aatttcaactacagcca

SEQ ID NO: 16532 - DNA, 17 bp, Arabidopsis thaliana
aatttcaagcgacagct

SEQ ID NO: 16533 - DNA, 17 bp, Arabidopsis thaliana
aatttcaatgttagcca

SEQ ID NO: 16534 - DNA, 17 bp, Arabidopsis thaliana
aatttcaccgaacggga

SEQ ID NO: 16535 - DNA, 17 bp, Arabidopsis thaliana
aatttcacctgcagctt

SEQ ID NO: 16536 - DNA, 17 bp, Arabidopsis thaliana
aatttcacgggacgggg

SEQ ID NO: 16537 - DNA, 17 bp, Arabidopsis thaliana
aatttcactgaacgggg

SEQ ID NO: 16538 - DNA, 17 bp, Arabidopsis thaliana
aatttcactgtgcagga

SEQ ID NO: 16539 - DNA, 17 bp, Arabidopsis thaliana
aatttcagaatgagtga

SEQ ID NO: 16540 - DNA, 17 bp, Arabidopsis thaliana
aatttcagagatggtca

SEQ ID NO: 16541 - DNA, 17 bp, Arabidopsis thaliana
aatttcagaggcaaatt

SEQ ID NO: 16542 - DNA, 17 bp, Arabidopsis thaliana
aatttcagcacggattt

SEQ ID NO: 16543 - DNA, 17 bp, Arabidopsis thaliana
aatttcagcggttacta

SEQ ID NO: 16544 - DNA, 17 bp, Arabidopsis thaliana
aatttcagggaattcca

SEQ ID NO: 16545 - DNA, 17 bp, Arabidopsis thaliana
aatttcaggtctatttt

SEQ ID NO: 16546 - DNA, 17 bp, Arabidopsis thaliana
aatttcatcgactggac

SEQ ID NO: 16547 - DNA, 17 bp, Arabidopsis thaliana
aatttcatcgtgatggg

SEQ ID NO: 16548 - DNA, 17 bp, Arabidopsis thaliana
aatttcatctcaggcgt

SEQ ID NO: 16549 - DNA, 17 bp, Arabidopsis thaliana
aatttcatgcaatccag

SEQ ID NO: 16550 - DNA, 17 bp, Arabidopsis thaliana
aatttcatgctcaccgc

SEQ ID NO: 16551 - DNA, 17 bp, Arabidopsis thaliana
aatttcatgctcaccgg

SEQ ID NO: 16552 - DNA, 17 bp, Arabidopsis thaliana
aatttcatgttgttact

SEQ ID NO: 16553 - DNA, 17 bp, Arabidopsis thaliana
aatttccaaacctgagc

SEQ ID NO: 16554 - DNA, 17 bp, Arabidopsis thaliana
aatttccaatcgaagtt

SEQ ID NO: 16555 - DNA, 17 bp, Arabidopsis thaliana
aatttccaatcgtcgct

SEQ ID NO: 16556 - DNA, 17 bp, Arabidopsis thaliana
aatttccaggcaagcca

SEQ ID NO: 16557 - DNA, 17 bp, Arabidopsis thaliana
aatttcccgccaaattt

SEQ ID NO: 16558 - DNA, 17 bp, Arabidopsis thaliana
aatttccggcaccgttt

SEQ ID NO: 16559 - DNA, 17 bp, Arabidopsis thaliana
aatttccggcacttttt

SEQ ID NO: 16560 - DNA, 17 bp, Arabidopsis thaliana
aatttccggtgcacttg

SEQ ID NO: 16561 - DNA, 17 bp, Arabidopsis thaliana
aatttccgttaacagaa

SEQ ID NO: 16562 - DNA, 17 bp, Arabidopsis thaliana
aatttccgttaacgggg

SEQ ID NO: 16563 - DNA, 17 bp, Arabidopsis thaliana
aatttccttgacacttt

SEQ ID NO: 16564 - DNA, 17 bp, Arabidopsis thaliana
aatttcgaaaccttcga

SEQ ID NO: 16565 - DNA, 17 bp, Arabidopsis thaliana
aatttcgaatgcgcaag

SEQ ID NO: 16566 - DNA, 17 bp, Arabidopsis thaliana
aatttcgacttcctttt

SEQ ID NO: 16567 - DNA, 17 bp, Arabidopsis thaliana
aatttcgattgaatcac

SEQ ID NO: 16568 - DNA, 17 bp, Arabidopsis thaliana
aatttcgccaaactttt

SEQ ID NO: 16569 - DNA, 17 bp, Arabidopsis thaliana
aatttcgcggtcgaact

SEQ ID NO: 16570 - DNA, 17 bp, Arabidopsis thaliana
aatttcgctgaaccggg

SEQ ID NO: 16571 - DNA, 17 bp, Arabidopsis thaliana
aatttcggcttcggcca

SEQ ID NO: 16572 - DNA, 17 bp, Arabidopsis thaliana
aatttcggttcggtttc

SEQ ID NO: 16573 - DNA, 17 bp, Arabidopsis thaliana
aatttcggttgtctctc

SEQ ID NO: 16574 - DNA, 17 bp, Arabidopsis thaliana
aatttcgtagcctcttt

SEQ ID NO: 16575 - DNA, 17 bp, Arabidopsis thaliana
aatttcgtatgcggtcg

SEQ ID NO: 16576 - DNA, 17 bp, Arabidopsis thaliana
aatttcgtccactgaat

SEQ ID NO: 16577 - DNA, 17 bp, Arabidopsis thaliana
aatttcgtctcaggcgt

SEQ ID NO: 16578 - DNA, 17 bp, Arabidopsis thaliana
aatttcgtctcgcggtg

SEQ ID NO: 16579 - DNA, 17 bp, Arabidopsis thaliana
aatttcgtcttctgccg

SEQ ID NO: 16580 - DNA, 17 bp, Arabidopsis thaliana
aatttcgtgcacattaa

SEQ ID NO: 16581 - DNA, 17 bp, Arabidopsis thaliana
aatttcgttcgtcggct

SEQ ID NO: 16582 - DNA, 17 bp, Arabidopsis thaliana
aatttcgtttcgctttc

SEQ ID NO: 16583 - DNA, 17 bp, Arabidopsis thaliana
aatttctaagccggaat

SEQ ID NO: 16584 - DNA, 17 bp, Arabidopsis thaliana
aatttctacggcacgta

SEQ ID NO: 16585 - DNA, 17 bp, Arabidopsis thaliana
aatttctacggtgatgt

SEQ ID NO: 16586 - DNA, 17 bp, Arabidopsis thaliana
aatttctactgcaacac

SEQ ID NO: 16587 - DNA, 17 bp, Arabidopsis thaliana
aatttctagccgttgcg

SEQ ID NO: 16588 - DNA, 17 bp, Arabidopsis thaliana
aatttctagtgggtcgt

SEQ ID NO: 16589 - DNA, 17 bp, Arabidopsis thaliana
aatttctatgattgttg

SEQ ID NO: 16590 - DNA, 17 bp, Arabidopsis thaliana
aatttctatgccaacct

SEQ ID NO: 16591 - DNA, 17 bp, Arabidopsis thaliana
aatttctctcaaagtgc

SEQ ID NO: 16592 - DNA, 17 bp, Arabidopsis thaliana
aatttctcttctacttt

SEQ ID NO: 16593 - DNA, 17 bp, Arabidopsis thaliana
aatttctgaatcatgtt

SEQ ID NO: 16594 - DNA, 17 bp, Arabidopsis thaliana
aatttctgacgtgccaa

SEQ ID NO: 16595 - DNA, 17 bp, Arabidopsis thaliana
aatttctgacgtggcag

SEQ ID NO: 16596 - DNA, 17 bp, Arabidopsis thaliana
aatttctgagcgacaag

SEQ ID NO: 16597 - DNA, 17 bp, Arabidopsis thaliana
aatttctgccctatcaa

SEQ ID NO: 16598 - DNA, 17 bp, Arabidopsis thaliana
aatttctgcggatagat

SEQ ID NO: 16599 - DNA, 17 bp, Arabidopsis thaliana
aatttctggaccaatcg

SEQ ID NO: 16600 - DNA, 17 bp, Arabidopsis thaliana
aatttcttagattttgc

SEQ ID NO: 16601 - DNA, 17 bp, Arabidopsis thaliana
aatttcttcgcaaatcg

SEQ ID NO: 16602 - DNA, 17 bp, Arabidopsis thaliana
aatttcttcgcaaatta

SEQ ID NO: 16603 - DNA, 17 bp, Arabidopsis thaliana
aatttcttcgccgtctt

SEQ ID NO: 16604 - DNA, 17 bp, Arabidopsis thaliana
aatttcttctaacttgg

SEQ ID NO: 16605 - DNA, 17 bp, Arabidopsis thaliana
aatttcttgctgagcct

SEQ ID NO: 16606 - DNA, 17 bp, Arabidopsis thaliana
aatttgaaagatgtttg

SEQ ID NO: 16607 - DNA, 17 bp, Arabidopsis thaliana
aatttgaaccgcaccgc

SEQ ID NO: 16608 - DNA, 17 bp, Arabidopsis thaliana
aatttgaacgcgacttg

SEQ ID NO: 16609 - DNA, 17 bp, Arabidopsis thaliana
aatttgaatcactagcc

SEQ ID NO: 16610 - DNA, 17 bp, Arabidopsis thaliana
aatttgacaccgttaga

SEQ ID NO: 16611 - DNA, 17 bp, Arabidopsis thaliana
aatttgacagacggtgt

SEQ ID NO: 16612 - DNA, 17 bp, Arabidopsis thaliana
aatttgaccaagcgtcg

SEQ ID NO: 16613 - DNA, 17 bp, Arabidopsis thaliana
aatttgaccgtttttct

SEQ ID NO: 16614 - DNA, 17 bp, Arabidopsis thaliana
aatttgaggttgttgca

SEQ ID NO: 16615 - DNA, 17 bp, Arabidopsis thaliana
aatttgagtggtctggc

SEQ ID NO: 16616 - DNA, 17 bp, Arabidopsis thaliana
aatttgcaacttccatg

SEQ ID NO: 16617 - DNA, 17 bp, Arabidopsis thaliana
aatttgcaggccaaccc

SEQ ID NO: 16618 - DNA, 17 bp, Arabidopsis thaliana
aatttgcaggccacacc

SEQ ID NO: 16619 - DNA, 17 bp, Arabidopsis thaliana
aatttgcaggccacagc

SEQ ID NO: 16620 - DNA, 17 bp, Arabidopsis thaliana
aatttgcaggtcacacc

SEQ ID NO: 16621 - DNA, 17 bp, Arabidopsis thaliana
aatttgcagtcaacagg

SEQ ID NO: 16622 - DNA, 17 bp, Arabidopsis thaliana
aatttgccaacttgggt

SEQ ID NO: 16623 - DNA, 17 bp, Arabidopsis thaliana
aatttgcccgtttgata

SEQ ID NO: 16624 - DNA, 17 bp, Arabidopsis thaliana
aatttgccgcaactgga

SEQ ID NO: 16625 - DNA, 17 bp, Arabidopsis thaliana
aatttgcctcactagtt

SEQ ID NO: 16626 - DNA, 17 bp, Arabidopsis thaliana
aatttgcctcactcact

SEQ ID NO: 16627 - DNA, 17 bp, Arabidopsis thaliana
aatttgcctctgaaatt

SEQ ID NO: 16628 - DNA, 17 bp, Arabidopsis thaliana
aatttgcgagagattta

SEQ ID NO: 16629 - DNA, 17 bp, Arabidopsis thaliana
aatttgcgatgactttg

SEQ ID NO: 16630 - DNA, 17 bp, Arabidopsis thaliana
aatttgcgcctgagaaa

SEQ ID NO: 16631 - DNA, 17 bp, Arabidopsis thaliana
aatttgcgctttgatgt

SEQ ID NO: 16632 - DNA, 17 bp, Arabidopsis thaliana
aatttgcgctttgattt

SEQ ID NO: 16633 - DNA, 17 bp, Arabidopsis thaliana
aatttgcggagtggtga

SEQ ID NO: 16634 - DNA, 17 bp, Arabidopsis thaliana
aatttgcggcggttgag

SEQ ID NO: 16635 - DNA, 17 bp, Arabidopsis thaliana
aatttgcgggccacacc

SEQ ID NO: 16636 - DNA, 17 bp, Arabidopsis thaliana
aatttgcgggggaactc

SEQ ID NO: 16637 - DNA, 17 bp, Arabidopsis thaliana
aatttgcggtttaagtt

SEQ ID NO: 16638 - DNA, 17 bp, Arabidopsis thaliana
aatttgcgtgatttcca

SEQ ID NO: 16639 - DNA, 17 bp, Arabidopsis thaliana
aatttgctaccgccgct

SEQ ID NO: 16640 - DNA, 17 bp, Arabidopsis thaliana
aatttgctacggatttg

SEQ ID NO: 16641 - DNA, 17 bp, Arabidopsis thaliana
aatttgctcagaatctg

SEQ ID NO: 16642 - DNA, 17 bp, Arabidopsis thaliana
aatttgctcctactaac

SEQ ID NO: 16643 - DNA, 17 bp, Arabidopsis thaliana
aatttgctcgcggtggt

SEQ ID NO: 16644 - DNA, 17 bp, Arabidopsis thaliana
aatttgctgagaagaag

SEQ ID NO: 16645 - DNA, 17 bp, Arabidopsis thaliana
aatttgctgcagtggac

SEQ ID NO: 16646 - DNA, 17 bp, Arabidopsis thaliana
aatttgcttgttgagcc

SEQ ID NO: 16647 - DNA, 17 bp, Arabidopsis thaliana
aatttgcttgttgagtc

SEQ ID NO: 16648 - DNA, 17 bp, Arabidopsis thaliana
aatttggacaggtgtaa

SEQ ID NO: 16649 - DNA, 17 bp, Arabidopsis thaliana
aatttggaccactcatt

SEQ ID NO: 16650 - DNA, 17 bp, Arabidopsis thaliana
aatttggacggttgtca

SEQ ID NO: 16651 - DNA, 17 bp, Arabidopsis thaliana
aatttggactccaagct

SEQ ID NO: 16652 - DNA, 17 bp, Arabidopsis thaliana
aatttggacttggtccc

SEQ ID NO: 16653 - DNA, 17 bp, Arabidopsis thaliana
aatttggattatcgagt

SEQ ID NO: 16654 - DNA, 17 bp, Arabidopsis thaliana
aatttggccaatgtttt

SEQ ID NO: 16655 - DNA, 17 bp, Arabidopsis thaliana
aatttggcccaatcgct

SEQ ID NO: 16656 - DNA, 17 bp, Arabidopsis thaliana
aatttggcccggtcaac

SEQ ID NO: 16657 - DNA, 17 bp, Arabidopsis thaliana
aatttggccgatcggtt

SEQ ID NO: 16658 - DNA, 17 bp, Arabidopsis thaliana
aatttggccttatagat

SEQ ID NO: 16659 - DNA, 17 bp, Arabidopsis thaliana
aatttggcgggaaactt

SEQ ID NO: 16660 - DNA, 17 bp, Arabidopsis thaliana
aatttggctaaagtttt

SEQ ID NO: 16661 - DNA, 17 bp, Arabidopsis thaliana
aatttggctctgtcaac

SEQ ID NO: 16662 - DNA, 17 bp, Arabidopsis thaliana
aatttggggtccaagct

SEQ ID NO: 16663 - DNA, 17 bp, Arabidopsis thaliana
aatttggggtgcccaga

SEQ ID NO: 16664 - DNA, 17 bp, Arabidopsis thaliana
aatttggtatcagagcg

SEQ ID NO: 16665 - DNA, 17 bp, Arabidopsis thaliana
aatttggtcacacagtg

SEQ ID NO: 16666 - DNA, 17 bp, Arabidopsis thaliana
aatttggtctgcagcga

SEQ ID NO: 16667 - DNA, 17 bp, Arabidopsis thaliana
aatttggtctgtggcga

SEQ ID NO: 16668 - DNA, 17 bp, Arabidopsis thaliana
aatttggtcttaacaat

SEQ ID NO: 16669 - DNA, 17 bp, Arabidopsis thaliana
aatttggtgtgagtccc

SEQ ID NO: 16670 - DNA, 17 bp, Arabidopsis thaliana
aatttggttgcggttta

SEQ ID NO: 16671 - DNA, 17 bp, Arabidopsis thaliana
aatttggtttccgattt

SEQ ID NO: 16672 - DNA, 17 bp, Arabidopsis thaliana
aatttgtacaccttgct

SEQ ID NO: 16673 - DNA, 17 bp, Arabidopsis thaliana
aatttgtaggtggaaag

SEQ ID NO: 16674 - DNA, 17 bp, Arabidopsis thaliana
aatttgtagtcccgttc

SEQ ID NO: 16675 - DNA, 17 bp, Arabidopsis thaliana
aatttgtcagcaggttg

SEQ ID NO: 16676 - DNA, 17 bp, Arabidopsis thaliana
aatttgtccgatgagga

SEQ ID NO: 16677 - DNA, 17 bp, Arabidopsis thaliana
aatttgtccgatgggga

SEQ ID NO: 16678 - DNA, 17 bp, Arabidopsis thaliana
aatttgtcgccgtcgca

SEQ ID NO: 16679 - DNA, 17 bp, Arabidopsis thaliana
aatttgtcgttgacccg

SEQ ID NO: 16680 - DNA, 17 bp, Arabidopsis thaliana
aatttgtctacgattta

SEQ ID NO: 16681 - DNA, 17 bp, Arabidopsis thaliana
aatttgtctacggttta

SEQ ID NO: 16682 - DNA, 17 bp, Arabidopsis thaliana
aatttgtctcgatttct

SEQ ID NO: 16683 - DNA, 17 bp, Arabidopsis thaliana
aatttgtctcgtctcgg

SEQ ID NO: 16684 - DNA, 17 bp, Arabidopsis thaliana
aatttgtctctaatctg

SEQ ID NO: 16685 - DNA, 17 bp, Arabidopsis thaliana
aatttgtctgcgattta

SEQ ID NO: 16686 - DNA, 17 bp, Arabidopsis thaliana
aatttgtctgcggttaa

SEQ ID NO: 16687 - DNA, 17 bp, Arabidopsis thaliana
aatttgtctgcggttag

SEQ ID NO: 16688 - DNA, 17 bp, Arabidopsis thaliana
aatttgtctgcggttca

SEQ ID NO: 16689 - DNA, 17 bp, Arabidopsis thaliana
aatttgtctgcggttta

SEQ ID NO: 16690 - DNA, 17 bp, Arabidopsis thaliana
aatttgtcttccacgag

SEQ ID NO: 16691 - DNA, 17 bp, Arabidopsis thaliana
aatttgtgcgaaatcag

SEQ ID NO: 16692 - DNA, 17 bp, Arabidopsis thaliana
aatttgtgcgacatgtt

SEQ ID NO: 16693 - DNA, 17 bp, Arabidopsis thaliana
aatttgtgcgcttggga

SEQ ID NO: 16694 - DNA, 17 bp, Arabidopsis thaliana
aatttgtgtgagttgag

SEQ ID NO: 16695 - DNA, 17 bp, Arabidopsis thaliana
aatttgttactatttga

SEQ ID NO: 16696 - DNA, 17 bp, Arabidopsis thaliana
aatttgttccttgcgca

SEQ ID NO: 16697 - DNA, 17 bp, Arabidopsis thaliana
aattttaagactgattt

SEQ ID NO: 16698 - DNA, 17 bp, Arabidopsis thaliana
aattttacagtttcgac

SEQ ID NO: 16699 - DNA, 17 bp, Arabidopsis thaliana
aattttaccgaaccttt

SEQ ID NO: 16700 - DNA, 17 bp, Arabidopsis thaliana
aattttacttctaagta

SEQ ID NO: 16701 - DNA, 17 bp, Arabidopsis thaliana
aattttacttctaagtt

SEQ ID NO: 16702 - DNA, 17 bp, Arabidopsis thaliana
aattttatctgtcagcg

SEQ ID NO: 16703 - DNA, 17 bp, Arabidopsis thaliana
aattttatgtgggtttt

SEQ ID NO: 16704 - DNA, 17 bp, Arabidopsis thaliana
aattttattggtggagt

SEQ ID NO: 16705 - DNA, 17 bp, Arabidopsis thaliana
aattttcaaggcccaag

SEQ ID NO: 16706 - DNA, 17 bp, Arabidopsis thaliana
aattttcaagtccacgg

SEQ ID NO: 16707 - DNA, 17 bp, Arabidopsis thaliana
aattttcacgttggaca

SEQ ID NO: 16708 - DNA, 17 bp, Arabidopsis thaliana
aattttcagaatgcatt

SEQ ID NO: 16709 - DNA, 17 bp, Arabidopsis thaliana
aattttcagagcagaaa

SEQ ID NO: 16710 - DNA, 17 bp, Arabidopsis thaliana
aattttcatactggatc

SEQ ID NO: 16711 - DNA, 17 bp, Arabidopsis thaliana
aattttcatcgaatcgc

SEQ ID NO: 16712 - DNA, 17 bp, Arabidopsis thaliana
aattttcatgtgatgga

SEQ ID NO: 16713 - DNA, 17 bp, Arabidopsis thaliana
aattttccacatctgct

SEQ ID NO: 16714 - DNA, 17 bp, Arabidopsis thaliana
aattttccattttgcgc

SEQ ID NO: 16715 - DNA, 17 bp, Arabidopsis thaliana
aattttccccttttcct

SEQ ID NO: 16716 - DNA, 17 bp, Arabidopsis thaliana
aattttcccgccaaaat

SEQ ID NO: 16717 - DNA, 17 bp, Arabidopsis thaliana
aattttccctcttggca

SEQ ID NO: 16718 - DNA, 17 bp, Arabidopsis thaliana
aattttccgcaatgggc

SEQ ID NO: 16719 - DNA, 17 bp, Arabidopsis thaliana
aattttcctcaacgtgg

SEQ ID NO: 16720 - DNA, 17 bp, Arabidopsis thaliana
aattttcctcagaattg

SEQ ID NO: 16721 - DNA, 17 bp, Arabidopsis thaliana
aattttcctcctgcttg

SEQ ID NO: 16722 - DNA, 17 bp, Arabidopsis thaliana
aattttcgcacaaatct

SEQ ID NO: 16723 - DNA, 17 bp, Arabidopsis thaliana
aattttcggatctatct

SEQ ID NO: 16724 - DNA, 17 bp, Arabidopsis thaliana
aattttcggtccgtcat

SEQ ID NO: 16725 - DNA, 17 bp, Arabidopsis thaliana
aattttcgtctccggat

SEQ ID NO: 16726 - DNA, 17 bp, Arabidopsis thaliana
aattttctccatctttg

SEQ ID NO: 16727 - DNA, 17 bp, Arabidopsis thaliana
aattttctccttttcct

SEQ ID NO: 16728 - DNA, 17 bp, Arabidopsis thaliana
aattttctcgacgattt

SEQ ID NO: 16729 - DNA, 17 bp, Arabidopsis thaliana
aattttctctcaagcaa

SEQ ID NO: 16730 - DNA, 17 bp, Arabidopsis thaliana
aattttctctgagactg

SEQ ID NO: 16731 - DNA, 17 bp, Arabidopsis thaliana
aattttctgactcgatc

SEQ ID NO: 16732 - DNA, 17 bp, Arabidopsis thaliana
aattttctgttggtccc

SEQ ID NO: 16733 - DNA, 17 bp, Arabidopsis thaliana
aattttcttggaagcca

SEQ ID NO: 16734 - DNA, 17 bp, Arabidopsis thaliana
aattttgaaaagtgctt

SEQ ID NO: 16735 - DNA, 17 bp, Arabidopsis thaliana
aattttgaaccattttg

SEQ ID NO: 16736 - DNA, 17 bp, Arabidopsis thaliana
aattttgacccattttg

SEQ ID NO: 16737 - DNA, 17 bp, Arabidopsis thaliana
aattttgagtgcggtct

SEQ ID NO: 16738 - DNA, 17 bp, Arabidopsis thaliana
aattttgatttctctcg

SEQ ID NO: 16739 - DNA, 17 bp, Arabidopsis thaliana
aattttgcaatcgtctt

SEQ ID NO: 16740 - DNA, 17 bp, Arabidopsis thaliana
aattttgcactcgtctt

SEQ ID NO: 16741 - DNA, 17 bp, Arabidopsis thaliana
aattttgcagccatttt

SEQ ID NO: 16742 - DNA, 17 bp, Arabidopsis thaliana
aattttgcaggctcttc

SEQ ID NO: 16743 - DNA, 17 bp, Arabidopsis thaliana
aattttgccaaagcggt

SEQ ID NO: 16744 - DNA, 17 bp, Arabidopsis thaliana
aattttgcccatttact

SEQ ID NO: 16745 - DNA, 17 bp, Arabidopsis thaliana
aattttgcgatttagcg

SEQ ID NO: 16746 - DNA, 17 bp, Arabidopsis thaliana
aattttgcggccgtctt

SEQ ID NO: 16747 - DNA, 17 bp, Arabidopsis thaliana
aattttgcggtcgtcct

SEQ ID NO: 16748 - DNA, 17 bp, Arabidopsis thaliana
aattttgcggtcgtctt

SEQ ID NO: 16749 - DNA, 17 bp, Arabidopsis thaliana
aattttgcgtcggattt

SEQ ID NO: 16750 - DNA, 17 bp, Arabidopsis thaliana
aattttgctgacttgtt

SEQ ID NO: 16751 - DNA, 17 bp, Arabidopsis thaliana
aattttgctgcggattt

SEQ ID NO: 16752 - DNA, 17 bp, Arabidopsis thaliana
aattttgctggtggtga

SEQ ID NO: 16753 - DNA, 17 bp, Arabidopsis thaliana
aattttggatcgggcct

SEQ ID NO: 16754 - DNA, 17 bp, Arabidopsis thaliana
aattttggcttatcgct

SEQ ID NO: 16755 - DNA, 17 bp, Arabidopsis thaliana
aattttgggccgaatgg

SEQ ID NO: 16756 - DNA, 17 bp, Arabidopsis thaliana
aattttgggtccgtcat

SEQ ID NO: 16757 - DNA, 17 bp, Arabidopsis thaliana
aattttgggtgtgagtc

SEQ ID NO: 16758 - DNA, 17 bp, Arabidopsis thaliana
aattttgggtttaagct

SEQ ID NO: 16759 - DNA, 17 bp, Arabidopsis thaliana
aattttgggtttcgggt

SEQ ID NO: 16760 - DNA, 17 bp, Arabidopsis thaliana
aattttggtgtggagta

SEQ ID NO: 16761 - DNA, 17 bp, Arabidopsis thaliana
aattttgtctcttgacc

SEQ ID NO: 16762 - DNA, 17 bp, Arabidopsis thaliana
aattttgtgctgcctcg

SEQ ID NO: 16763 - DNA, 17 bp, Arabidopsis thaliana
aattttgttgcctcgat

SEQ ID NO: 16764 - DNA, 17 bp, Arabidopsis thaliana
aattttgtttgttgagc

SEQ ID NO: 16765 - DNA, 17 bp, Arabidopsis thaliana
aattttgtttgttgagt

SEQ ID NO: 16766 - DNA, 17 bp, Arabidopsis thaliana
aatttttacgacgggat

SEQ ID NO: 16767 - DNA, 17 bp, Arabidopsis thaliana
aatttttagaccgtgag

SEQ ID NO: 16768 - DNA, 17 bp, Arabidopsis thaliana
aatttttcaacaaatct

SEQ ID NO: 16769 - DNA, 17 bp, Arabidopsis thaliana
aatttttcccggatatt

SEQ ID NO: 16770 - DNA, 17 bp, Arabidopsis thaliana
aatttttcgacttccct

SEQ ID NO: 16771 - DNA, 17 bp, Arabidopsis thaliana
aatttttcgcgtgtgct

SEQ ID NO: 16772 - DNA, 17 bp, Arabidopsis thaliana
aatttttcgtgtcaatt

SEQ ID NO: 16773 - DNA, 17 bp, Arabidopsis thaliana
aatttttctaagcgatg

SEQ ID NO: 16774 - DNA, 17 bp, Arabidopsis thaliana
aatttttctctctgggc

SEQ ID NO: 16775 - DNA, 17 bp, Arabidopsis thaliana
aatttttctggatatcg

SEQ ID NO: 16776 - DNA, 17 bp, Arabidopsis thaliana
aatttttggaggattaa

SEQ ID NO: 16777 - DNA, 17 bp, Arabidopsis thaliana
aatttttggcggaaaag

SEQ ID NO: 16778 - DNA, 17 bp, Arabidopsis thaliana
aatttttgtccgtctag

SEQ ID NO: 16779 - DNA, 17 bp, Arabidopsis thaliana
aatttttgttccaagcg

SEQ ID NO: 16780 - DNA, 17 bp, Arabidopsis thaliana
aatttttgttccaagtg

SEQ ID NO: 16781 - DNA, 17 bp, Arabidopsis thaliana
aatttttgttgaccggt

SEQ ID NO: 16782 - DNA, 17 bp, Arabidopsis thaliana
aattttttccgatctgc

SEQ ID NO: 16783 - DNA, 17 bp, Arabidopsis thaliana
aattttttctgtaggcg

SEQ ID NO: 16784 - DNA, 17 bp, Arabidopsis thaliana
aattttttgatgtgtcc

SEQ ID NO: 16785 - DNA, 17 bp, Arabidopsis thaliana
aattttttgggtcggtt

SEQ ID NO: 16786 - DNA, 17 bp, Arabidopsis thaliana
aattttttgtgtttagg

SEQ ID NO: 16787 - DNA, 17 bp, Arabidopsis thaliana
aattttttgtgtttatc

SEQ ID NO: 16788 - DNA, 17 bp, Arabidopsis thaliana
aatttttttgcgacgac

SEQ ID NO: 16789 - DNA, 17 bp, Arabidopsis thaliana
aatttttttttcagctc

SEQ ID NO: 16790 - DNA, 17 bp, Arabidopsis thaliana
acaaaaaactagccgga

SEQ ID NO: 16791 - DNA, 17 bp, Arabidopsis thaliana
acaaaaacgatggtgtg

SEQ ID NO: 16792 - DNA, 17 bp, Arabidopsis thaliana
acaaaaacgttgcaacg

SEQ ID NO: 16793 - DNA, 17 bp, Arabidopsis thaliana
acaaaaactgagctgtc

SEQ ID NO: 16794 - DNA, 17 bp, Arabidopsis thaliana
acaaaaactggtctatg

SEQ ID NO: 16795 - DNA, 17 bp, Arabidopsis thaliana
acaaaaatattacctga

SEQ ID NO: 16796 - DNA, 17 bp, Arabidopsis thaliana
acaaaaatcttaggcga

SEQ ID NO: 16797 - DNA, 17 bp, Arabidopsis thaliana
acaaaaatgaattgtct

SEQ ID NO: 16798 - DNA, 17 bp, Arabidopsis thaliana
acaaaaattcctaaacc

SEQ ID NO: 16799 - DNA, 17 bp, Arabidopsis thaliana
acaaaaattcgggtatc

SEQ ID NO: 16800 - DNA, 17 bp, Arabidopsis thaliana
acaaaacagtcgctagg

SEQ ID NO: 16801 - DNA, 17 bp, Arabidopsis thaliana
acaaaacagttacacaa

SEQ ID NO: 16802 - DNA, 17 bp, Arabidopsis thaliana
acaaaacagttagcgaa

SEQ ID NO: 16803 - DNA, 17 bp, Arabidopsis thaliana
acaaaacatctttcgcc

SEQ ID NO: 16804 - DNA, 17 bp, Arabidopsis thaliana
acaaaaccacggttaat

SEQ ID NO: 16805 - DNA, 17 bp, Arabidopsis thaliana
acaaaaccctagcagcc

SEQ ID NO: 16806 - DNA, 17 bp, Arabidopsis thaliana
acaaaaccggtctaact

SEQ ID NO: 16807 - DNA, 17 bp, Arabidopsis thaliana
acaaaaccgtcaacgga

SEQ ID NO: 16808 - DNA, 17 bp, Arabidopsis thaliana
acaaaacgacaccgctt

SEQ ID NO: 16809 - DNA, 17 bp, Arabidopsis thaliana
acaaaacgacaccgttt

SEQ ID NO: 16810 - DNA, 17 bp, Arabidopsis thaliana
acaaaacgactctcggc

SEQ ID NO: 16811 - DNA, 17 bp, Arabidopsis thaliana
acaaaacgccatgtagg

SEQ ID NO: 16812 - DNA, 17 bp, Arabidopsis thaliana
acaaaacggtccaattt

SEQ ID NO: 16813 - DNA, 17 bp, Arabidopsis thaliana
acaaaacggttgtgatc

SEQ ID NO: 16814 - DNA, 17 bp, Arabidopsis thaliana
acaaaacgtacgagatc

SEQ ID NO: 16815 - DNA, 17 bp, Arabidopsis thaliana
acaaaactatcaaacgt

SEQ ID NO: 16816 - DNA, 17 bp, Arabidopsis thaliana
acaaaactgtcgctagg

SEQ ID NO: 16817 - DNA, 17 bp, Arabidopsis thaliana
acaaaactgtctacaga

SEQ ID NO: 16818 - DNA, 17 bp, Arabidopsis thaliana
acaaaacttcttctgca

SEQ ID NO: 16819 - DNA, 17 bp, Arabidopsis thaliana
acaaaactttggacttt

SEQ ID NO: 16820 - DNA, 17 bp, Arabidopsis thaliana
acaaaagacttcggttc

SEQ ID NO: 16821 - DNA, 17 bp, Arabidopsis thaliana
acaaaagatgactggtg

SEQ ID NO: 16822 - DNA, 17 bp, Arabidopsis thaliana
acaaaagccttttgtgt

SEQ ID NO: 16823 - DNA, 17 bp, Arabidopsis thaliana
acaaaagcggattgtgt

SEQ ID NO: 16824 - DNA, 17 bp, Arabidopsis thaliana
acaaaaggcaattgcct

SEQ ID NO: 16825 - DNA, 17 bp, Arabidopsis thaliana
acaaaaggcttttgttc

SEQ ID NO: 16826 - DNA, 17 bp, Arabidopsis thaliana
acaaaagggatttcgtg

SEQ ID NO: 16827 - DNA, 17 bp, Arabidopsis thaliana
acaaaaggtttgttctg

SEQ ID NO: 16828 - DNA, 17 bp, Arabidopsis thaliana
acaaaagtcccatgtta

SEQ ID NO: 16829 - DNA, 17 bp, Arabidopsis thaliana
acaaaagtcgtctgcat

SEQ ID NO: 16830 - DNA, 17 bp, Arabidopsis thaliana
acaaaagtctgtcacca

SEQ ID NO: 16831 - DNA, 17 bp, Arabidopsis thaliana
acaaaagtcttacgcct

SEQ ID NO: 16832 - DNA, 17 bp, Arabidopsis thaliana
acaaaagtgagaggtgg

SEQ ID NO: 16833 - DNA, 17 bp, Arabidopsis thaliana
acaaaagtgatatgatg

SEQ ID NO: 16834 - DNA, 17 bp, Arabidopsis thaliana
acaaaagtgatttccgt

SEQ ID NO: 16835 - DNA, 17 bp, Arabidopsis thaliana
acaaaagtgtgggcaaa

SEQ ID NO: 16836 - DNA, 17 bp, Arabidopsis thaliana
acaaaagttcaagtgcc

SEQ ID NO: 16837 - DNA, 17 bp, Arabidopsis thaliana
acaaaagttggccaact

SEQ ID NO: 16838 - DNA, 17 bp, Arabidopsis thaliana
acaaaatacatgggctt

SEQ ID NO: 16839 - DNA, 17 bp, Arabidopsis thaliana
acaaaatcaccacatat

SEQ ID NO: 16840 - DNA, 17 bp, Arabidopsis thaliana
acaaaatccagcggaag

SEQ ID NO: 16841 - DNA, 17 bp, Arabidopsis thaliana
acaaaatccattaacgt

SEQ ID NO: 16842 - DNA, 17 bp, Arabidopsis thaliana
acaaaatccgcgattgc

SEQ ID NO: 16843 - DNA, 17 bp, Arabidopsis thaliana
acaaaatcgatcgccgg

SEQ ID NO: 16844 - DNA, 17 bp, Arabidopsis thaliana
acaaaatcgttgaccaa

SEQ ID NO: 16845 - DNA, 17 bp, Arabidopsis thaliana
acaaaatctctagtttg

SEQ ID NO: 16846 - DNA, 17 bp, Arabidopsis thaliana
acaaaatcttggtgttt

SEQ ID NO: 16847 - DNA, 17 bp, Arabidopsis thaliana
acaaaatgcactgtcag

SEQ ID NO: 16848 - DNA, 17 bp, Arabidopsis thaliana
acaaaatgtctccagaa

SEQ ID NO: 16849 - DNA, 17 bp, Arabidopsis thaliana
acaaaattccatagatc

SEQ ID NO: 16850 - DNA, 17 bp, Arabidopsis thaliana
acaaaattgggttgggc

SEQ ID NO: 16851 - DNA, 17 bp, Arabidopsis thaliana
acaaaatttctgttgtc

SEQ ID NO: 16852 - DNA, 17 bp, Arabidopsis thaliana
acaaaattttgttgact

SEQ ID NO: 16853 - DNA, 17 bp, Arabidopsis thaliana
acaaacaaagcccaatc

SEQ ID NO: 16854 - DNA, 17 bp, Arabidopsis thaliana
acaaacaacatttagcg

SEQ ID NO: 16855 - DNA, 17 bp, Arabidopsis thaliana
acaaacaaggaaaagtg

SEQ ID NO: 16856 - DNA, 17 bp, Arabidopsis thaliana
acaaacaccttggatgt

SEQ ID NO: 16857 - DNA, 17 bp, Arabidopsis thaliana
acaaacacgtgctgagc

SEQ ID NO: 16858 - DNA, 17 bp, Arabidopsis thaliana
acaaacagaagcagacg

SEQ ID NO: 16859 - DNA, 17 bp, Arabidopsis thaliana
acaaacattggcattgc

SEQ ID NO: 16860 - DNA, 17 bp, Arabidopsis thaliana
acaaaccacagcttcca

SEQ ID NO: 16861 - DNA, 17 bp, Arabidopsis thaliana
acaaaccagaactgaga

SEQ ID NO: 16862 - DNA, 17 bp, Arabidopsis thaliana
acaaaccagaacttaaa

SEQ ID NO: 16863 - DNA, 17 bp, Arabidopsis thaliana
acaaaccgagaccttgt

SEQ ID NO: 16864 - DNA, 17 bp, Arabidopsis thaliana
acaaaccgcgttcgtgg

SEQ ID NO: 16865 - DNA, 17 bp, Arabidopsis thaliana
acaaaccgctgcaaact

SEQ ID NO: 16866 - DNA, 17 bp, Arabidopsis thaliana
acaaaccgtcaggacat

SEQ ID NO: 16867 - DNA, 17 bp, Arabidopsis thaliana
acaaaccgtgacctcac

SEQ ID NO: 16868 - DNA, 17 bp, Arabidopsis thaliana
acaaacctaattttgcg

SEQ ID NO: 16869 - DNA, 17 bp, Arabidopsis thaliana
acaaacctccatcattt

SEQ ID NO: 16870 - DNA, 17 bp, Arabidopsis thaliana
acaaacctctgtggaca

SEQ ID NO: 16871 - DNA, 17 bp, Arabidopsis thaliana
acaaacgagttcctaaa

SEQ ID NO: 16872 - DNA, 17 bp, Arabidopsis thaliana
acaaacgagttcctaga

SEQ ID NO: 16873 - DNA, 17 bp, Arabidopsis thaliana
acaaacgagttcttaga

SEQ ID NO: 16874 - DNA, 17 bp, Arabidopsis thaliana
acaaacgatccatttgg

SEQ ID NO: 16875 - DNA, 17 bp, Arabidopsis thaliana
acaaacgatgttgacac

SEQ ID NO: 16876 - DNA, 17 bp, Arabidopsis thaliana
acaaacgcagattgtgt

SEQ ID NO: 16877 - DNA, 17 bp, Arabidopsis thaliana
acaaacggccagagttt

SEQ ID NO: 16878 - DNA, 17 bp, Arabidopsis thaliana
acaaacgggaaaacgtc

SEQ ID NO: 16879 - DNA, 17 bp, Arabidopsis thaliana
acaaacgggatgtcgtt

SEQ ID NO: 16880 - DNA, 17 bp, Arabidopsis thaliana
acaaacgtacatgtctc

SEQ ID NO: 16881 - DNA, 17 bp, Arabidopsis thaliana
acaaacgttgcaacgtg

SEQ ID NO: 16882 - DNA, 17 bp, Arabidopsis thaliana
acaaacgtttgtgggaa

SEQ ID NO: 16883 - DNA, 17 bp, Arabidopsis thaliana
acaaactaagccgggca

SEQ ID NO: 16884 - DNA, 17 bp, Arabidopsis thaliana
acaaactagatattgat

SEQ ID NO: 16885 - DNA, 17 bp, Arabidopsis thaliana
acaaactagccatgctg

SEQ ID NO: 16886 - DNA, 17 bp, Arabidopsis thaliana
acaaactatggcttgtg

SEQ ID NO: 16887 - DNA, 17 bp, Arabidopsis thaliana
acaaactcacttgggag

SEQ ID NO: 16888 - DNA, 17 bp, Arabidopsis thaliana
acaaactcagaatgagc

SEQ ID NO: 16889 - DNA, 17 bp, Arabidopsis thaliana
acaaactcaggtggtgg

SEQ ID NO: 16890 - DNA, 17 bp, Arabidopsis thaliana
acaaactgaactatgta

SEQ ID NO: 16891 - DNA, 17 bp, Arabidopsis thaliana
acaaactgaactatgtt

SEQ ID NO: 16892 - DNA, 17 bp, Arabidopsis thaliana
acaaactgctcagacct

SEQ ID NO: 16893 - DNA, 17 bp, Arabidopsis thaliana
acaaacttagggcctga

SEQ ID NO: 16894 - DNA, 17 bp, Arabidopsis thaliana
acaaacttctctcgtca

SEQ ID NO: 16895 - DNA, 17 bp, Arabidopsis thaliana
acaaacttgatctgcag

SEQ ID NO: 16896 - DNA, 17 bp, Arabidopsis thaliana
acaaacttgcgagattg

SEQ ID NO: 16897 - DNA, 17 bp, Arabidopsis thaliana
acaaacttgtagacttg

SEQ ID NO: 16898 - DNA, 17 bp, Arabidopsis thaliana
acaaactttcagacctg

SEQ ID NO: 16899 - DNA, 17 bp, Arabidopsis thaliana
acaaactttcttatctc

SEQ ID NO: 16900 - DNA, 17 bp, Arabidopsis thaliana
acaaacttttatgtacc

SEQ ID NO: 16901 - DNA, 17 bp, Arabidopsis thaliana
acaaagaacccgtcaat

SEQ ID NO: 16902 - DNA, 17 bp, Arabidopsis thaliana
acaaagaattgcgatgg

SEQ ID NO: 16903 - DNA, 17 bp, Arabidopsis thaliana
acaaagacaagttaggg

SEQ ID NO: 16904 - DNA, 17 bp, Arabidopsis thaliana
acaaagacgggtcatca

SEQ ID NO: 16905 - DNA, 17 bp, Arabidopsis thaliana
acaaagactatgtccgg

SEQ ID NO: 16906 - DNA, 17 bp, Arabidopsis thaliana
acaaagactcatacgga

SEQ ID NO: 16907 - DNA, 17 bp, Arabidopsis thaliana
acaaagactgcagttgt

SEQ ID NO: 16908 - DNA, 17 bp, Arabidopsis thaliana
acaaagacttgcaggga

SEQ ID NO: 16909 - DNA, 17 bp, Arabidopsis thaliana
acaaagactttcagctg

SEQ ID NO: 16910 - DNA, 17 bp, Arabidopsis thaliana
acaaagactttttatgc

SEQ ID NO: 16911 - DNA, 17 bp, Arabidopsis thaliana
acaaagatcagctgttt

SEQ ID NO: 16912 - DNA, 17 bp, Arabidopsis thaliana
acaaagatcgtccttcg

SEQ ID NO: 16913 - DNA, 17 bp, Arabidopsis thaliana
acaaagatcgtgatttt

SEQ ID NO: 16914 - DNA, 17 bp, Arabidopsis thaliana
acaaagatctactcagg

SEQ ID NO: 16915 - DNA, 17 bp, Arabidopsis thaliana
acaaagatggcgatgga

SEQ ID NO: 16916 - DNA, 17 bp, Arabidopsis thaliana
acaaagcattgagatgg

SEQ ID NO: 16917 - DNA, 17 bp, Arabidopsis thaliana
acaaagcattgcaatgg

SEQ ID NO: 16918 - DNA, 17 bp, Arabidopsis thaliana
acaaagcattgcgatga

SEQ ID NO: 16919 - DNA, 17 bp, Arabidopsis thaliana
acaaagcattgcgatgg

SEQ ID NO: 16920 - DNA, 17 bp, Arabidopsis thaliana
acaaagccacgtctgtc

SEQ ID NO: 16921 - DNA, 17 bp, Arabidopsis thaliana
acaaagccactttgcag

SEQ ID NO: 16922 - DNA, 17 bp, Arabidopsis thaliana
acaaagcccttctatta

SEQ ID NO: 16923 - DNA, 17 bp, Arabidopsis thaliana
acaaagccgggttgacc

SEQ ID NO: 16924 - DNA, 17 bp, Arabidopsis thaliana
acaaagcctgctaagtt

SEQ ID NO: 16925 - DNA, 17 bp, Arabidopsis thaliana
acaaagcgactgtttcg

SEQ ID NO: 16926 - DNA, 17 bp, Arabidopsis thaliana
acaaagcgactgttttg

SEQ ID NO: 16927 - DNA, 17 bp, Arabidopsis thaliana
acaaagcggacccgttg

SEQ ID NO: 16928 - DNA, 17 bp, Arabidopsis thaliana
acaaagcggtctaattt

SEQ ID NO: 16929 - DNA, 17 bp, Arabidopsis thaliana
acaaagctacccttcaa

SEQ ID NO: 16930 - DNA, 17 bp, Arabidopsis thaliana
acaaagctacccttcat

SEQ ID NO: 16931 - DNA, 17 bp, Arabidopsis thaliana
acaaagctaggctgtct

SEQ ID NO: 16932 - DNA, 17 bp, Arabidopsis thaliana
acaaagctccggtgtgc

SEQ ID NO: 16933 - DNA, 17 bp, Arabidopsis thaliana
acaaagctgtgaccatt

SEQ ID NO: 16934 - DNA, 17 bp, Arabidopsis thaliana
acaaagctttcatcgga

SEQ ID NO: 16935 - DNA, 17 bp, Arabidopsis thaliana
acaaagctttgatggtt

SEQ ID NO: 16936 - DNA, 17 bp, Arabidopsis thaliana
acaaagcttttcttggc

SEQ ID NO: 16937 - DNA, 17 bp, Arabidopsis thaliana
acaaaggaagtcagctg

SEQ ID NO: 16938 - DNA, 17 bp, Arabidopsis thaliana
acaaaggaggtggtcaa

SEQ ID NO: 16939 - DNA, 17 bp, Arabidopsis thaliana
acaaaggccccaggccc

SEQ ID NO: 16940 - DNA, 17 bp, Arabidopsis thaliana
acaaaggcgttacctac

SEQ ID NO: 16941 - DNA, 17 bp, Arabidopsis thaliana
acaaaggctccgaacct

SEQ ID NO: 16942 - DNA, 17 bp, Arabidopsis thaliana
acaaaggctccgaatgg

SEQ ID NO: 16943 - DNA, 17 bp, Arabidopsis thaliana
acaaaggctcgggcaca

SEQ ID NO: 16944 - DNA, 17 bp, Arabidopsis thaliana
acaaaggctggcactgg

SEQ ID NO: 16945 - DNA, 17 bp, Arabidopsis thaliana
acaaagggagcataagt

SEQ ID NO: 16946 - DNA, 17 bp, Arabidopsis thaliana
acaaagggtcgcgatcc

SEQ ID NO: 16947 - DNA, 17 bp, Arabidopsis thaliana
acaaagggtgttggtcg

SEQ ID NO: 16948 - DNA, 17 bp, Arabidopsis thaliana
acaaagggtttatgctg

SEQ ID NO: 16949 - DNA, 17 bp, Arabidopsis thaliana
acaaagtatggagttcg

SEQ ID NO: 16950 - DNA, 17 bp, Arabidopsis thaliana
acaaagtcaacggccga

SEQ ID NO: 16951 - DNA, 17 bp, Arabidopsis thaliana
acaaagtcattcagatg

SEQ ID NO: 16952 - DNA, 17 bp, Arabidopsis thaliana
acaaagtcattgagatg

SEQ ID NO: 16953 - DNA, 17 bp, Arabidopsis thaliana
acaaagtccgaaaaaac

SEQ ID NO: 16954 - DNA, 17 bp, Arabidopsis thaliana
acaaagtcctgccagca

SEQ ID NO: 16955 - DNA, 17 bp, Arabidopsis thaliana
acaaagtctatcctcgg

SEQ ID NO: 16956 - DNA, 17 bp, Arabidopsis thaliana
acaaagtcttctcgcaa

SEQ ID NO: 16957 - DNA, 17 bp, Arabidopsis thaliana
acaaagtgactacatcg

SEQ ID NO: 16958 - DNA, 17 bp, Arabidopsis thaliana
acaaagtgggctgggcc

SEQ ID NO: 16959 - DNA, 17 bp, Arabidopsis thaliana
acaaagttaattcagcc

SEQ ID NO: 16960 - DNA, 17 bp, Arabidopsis thaliana
acaaagttcctaaacaa

SEQ ID NO: 16961 - DNA, 17 bp, Arabidopsis thaliana
acaaagttcgtcgacga

SEQ ID NO: 16962 - DNA, 17 bp, Arabidopsis thaliana
acaaagttcgtgtccaa

SEQ ID NO: 16963 - DNA, 17 bp, Arabidopsis thaliana
acaaagtttggacgttt

SEQ ID NO: 16964 - DNA, 17 bp, Arabidopsis thaliana
acaaagtttttgttgac

SEQ ID NO: 16965 - DNA, 17 bp, Arabidopsis thaliana
acaaataaacttggtct

SEQ ID NO: 16966 - DNA, 17 bp, Arabidopsis thaliana
acaaataaagttggtct

SEQ ID NO: 16967 - DNA, 17 bp, Arabidopsis thaliana
acaaataaatcttggac

SEQ ID NO: 16968 - DNA, 17 bp, Arabidopsis thaliana
acaaataactttccggt

SEQ ID NO: 16969 - DNA, 17 bp, Arabidopsis thaliana
acaaatagacaaagtgg

SEQ ID NO: 16970 - DNA, 17 bp, Arabidopsis thaliana
acaaatagagttggtct

SEQ ID NO: 16971 - DNA, 17 bp, Arabidopsis thaliana
acaaatagattggtctg

SEQ ID NO: 16972 - DNA, 17 bp, Arabidopsis thaliana
acaaatagtcaaagtgg

SEQ ID NO: 16973 - DNA, 17 bp, Arabidopsis thaliana
acaaatatcagtgggct

SEQ ID NO: 16974 - DNA, 17 bp, Arabidopsis thaliana
acaaatatctctgcggt

SEQ ID NO: 16975 - DNA, 17 bp, Arabidopsis thaliana
acaaatatgtcaagtgt

SEQ ID NO: 16976 - DNA, 17 bp, Arabidopsis thaliana
acaaatcaaaggtccta

SEQ ID NO: 16977 - DNA, 17 bp, Arabidopsis thaliana
acaaatcaatggtcggc

SEQ ID NO: 16978 - DNA, 17 bp, Arabidopsis thaliana
acaaatcagaagaggat

SEQ ID NO: 16979 - DNA, 17 bp, Arabidopsis thaliana
acaaatcagtttgtgta

SEQ ID NO: 16980 - DNA, 17 bp, Arabidopsis thaliana
acaaatcatgtgcgtgc

SEQ ID NO: 16981 - DNA, 17 bp, Arabidopsis thaliana
acaaatcatttgaaact

SEQ ID NO: 16982 - DNA, 17 bp, Arabidopsis thaliana
acaaatccaggaggttc

SEQ ID NO: 16983 - DNA, 17 bp, Arabidopsis thaliana
acaaatccccactagta

SEQ ID NO: 16984 - DNA, 17 bp, Arabidopsis thaliana
acaaatccgcgtttact

SEQ ID NO: 16985 - DNA, 17 bp, Arabidopsis thaliana
acaaatcctaaaagcgc

SEQ ID NO: 16986 - DNA, 17 bp, Arabidopsis thaliana
acaaatcctattggacg

SEQ ID NO: 16987 - DNA, 17 bp, Arabidopsis thaliana
acaaatcctcagacccg

SEQ ID NO: 16988 - DNA, 17 bp, Arabidopsis thaliana
acaaatccttgcaggtt

SEQ ID NO: 16989 - DNA, 17 bp, Arabidopsis thaliana
acaaatccttgcgggct

SEQ ID NO: 16990 - DNA, 17 bp, Arabidopsis thaliana
acaaatcgcttggataa

SEQ ID NO: 16991 - DNA, 17 bp, Arabidopsis thaliana
acaaatcgcttggatca

SEQ ID NO: 16992 - DNA, 17 bp, Arabidopsis thaliana
acaaatcggccataaca

SEQ ID NO: 16993 - DNA, 17 bp, Arabidopsis thaliana
acaaatcgggttcagtt

SEQ ID NO: 16994 - DNA, 17 bp, Arabidopsis thaliana
acaaatcggtgcgttgt

SEQ ID NO: 16995 - DNA, 17 bp, Arabidopsis thaliana
acaaatcggtgtagact

SEQ ID NO: 16996 - DNA, 17 bp, Arabidopsis thaliana
acaaatcggtgttgact

SEQ ID NO: 16997 - DNA, 17 bp, Arabidopsis thaliana
acaaatctctagtgtga

SEQ ID NO: 16998 - DNA, 17 bp, Arabidopsis thaliana
acaaatctctgctgtgc

SEQ ID NO: 16999 - DNA, 17 bp, Arabidopsis thaliana
acaaatctctggaattc

SEQ ID NO: 17000 - DNA, 17 bp, Arabidopsis thaliana
acaaatctgctaaccaa

SEQ ID NO: 17001 - DNA, 17 bp, Arabidopsis thaliana
acaaatctgttgaggcc

SEQ ID NO: 17002 - DNA, 17 bp, Arabidopsis thaliana
acaaatgaactccggtc

SEQ ID NO: 17003 - DNA, 17 bp, Arabidopsis thaliana
acaaatgaagcggccaa

SEQ ID NO: 17004 - DNA, 17 bp, Arabidopsis thaliana
acaaatgacgtggcaag

SEQ ID NO: 17005 - DNA, 17 bp, Arabidopsis thaliana
acaaatgcaaatgccgc

SEQ ID NO: 17006 - DNA, 17 bp, Arabidopsis thaliana
acaaatgcagccacaag

SEQ ID NO: 17007 - DNA, 17 bp, Arabidopsis thaliana
acaaatgcatgctgtgg

SEQ ID NO: 17008 - DNA, 17 bp, Arabidopsis thaliana
acaaatgccactgagat

SEQ ID NO: 17009 - DNA, 17 bp, Arabidopsis thaliana
acaaatgcgccagttta

SEQ ID NO: 17010 - DNA, 17 bp, Arabidopsis thaliana
acaaatgcggccacaag

SEQ ID NO: 17011 - DNA, 17 bp, Arabidopsis thaliana
acaaatgcggttcaagc

SEQ ID NO: 17012 - DNA, 17 bp, Arabidopsis thaliana
acaaatgcgtttcattg

SEQ ID NO: 17013 - DNA, 17 bp, Arabidopsis thaliana
acaaatgctctggaagt

SEQ ID NO: 17014 - DNA, 17 bp, Arabidopsis thaliana
acaaatgcttgggctta

SEQ ID NO: 17015 - DNA, 17 bp, Arabidopsis thaliana
acaaatggacttttggg

SEQ ID NO: 17016 - DNA, 17 bp, Arabidopsis thaliana
acaaatggatatgtggc

SEQ ID NO: 17017 - DNA, 17 bp, Arabidopsis thaliana
acaaatgggtcgtcgtc

SEQ ID NO: 17018 - DNA, 17 bp, Arabidopsis thaliana
acaaatggtgatgtcat

SEQ ID NO: 17019 - DNA, 17 bp, Arabidopsis thaliana
acaaatgtgattggtgg

SEQ ID NO: 17020 - DNA, 17 bp, Arabidopsis thaliana
acaaatgttatcgttga

SEQ ID NO: 17021 - DNA, 17 bp, Arabidopsis thaliana
acaaatgttattgttga

SEQ ID NO: 17022 - DNA, 17 bp, Arabidopsis thaliana
acaaattagaccgcttt

SEQ ID NO: 17023 - DNA, 17 bp, Arabidopsis thaliana
acaaattctatttgtga

SEQ ID NO: 17024 - DNA, 17 bp, Arabidopsis thaliana
acaaattctgagactga

SEQ ID NO: 17025 - DNA, 17 bp, Arabidopsis thaliana
acaaattctgagactgg

SEQ ID NO: 17026 - DNA, 17 bp, Arabidopsis thaliana
acaaattctggggctgg

SEQ ID NO: 17027 - DNA, 17 bp, Arabidopsis thaliana
acaaattgcgtggatgg

SEQ ID NO: 17028 - DNA, 17 bp, Arabidopsis thaliana
acaaatttactctcaag

SEQ ID NO: 17029 - DNA, 17 bp, Arabidopsis thaliana
acaaatttgatgtgatc

SEQ ID NO: 17030 - DNA, 17 bp, Arabidopsis thaliana
acaaatttggataccac

SEQ ID NO: 17031 - DNA, 17 bp, Arabidopsis thaliana
acaaattttctatctca

SEQ ID NO: 17032 - DNA, 17 bp, Arabidopsis thaliana
acaacaaaatgttctaa

SEQ ID NO: 17033 - DNA, 17 bp, Arabidopsis thaliana
acaacaacttctggctg

SEQ ID NO: 17034 - DNA, 17 bp, Arabidopsis thaliana
acaacaagtgcggatca

SEQ ID NO: 17035 - DNA, 17 bp, Arabidopsis thaliana
acaacaagtgtacaaga

SEQ ID NO: 17036 - DNA, 17 bp, Arabidopsis thaliana
acaacaataaccaccac

SEQ ID NO: 17037 - DNA, 17 bp, Arabidopsis thaliana
acaacaatcagcacgtg

SEQ ID NO: 17038 - DNA, 17 bp, Arabidopsis thaliana
acaacaatggcggaatc

SEQ ID NO: 17039 - DNA, 17 bp, Arabidopsis thaliana
acaacacaaggaaccac

SEQ ID NO: 17040 - DNA, 17 bp, Arabidopsis thaliana
acaacacaggcgctgga

SEQ ID NO: 17041 - DNA, 17 bp, Arabidopsis thaliana
acaacaccagtagtttt

SEQ ID NO: 17042 - DNA, 17 bp, Arabidopsis thaliana
acaacacgaacggaccg

SEQ ID NO: 17043 - DNA, 17 bp, Arabidopsis thaliana
acaacacgtcggttttt

SEQ ID NO: 17044 - DNA, 17 bp, Arabidopsis thaliana
acaacacgttgtgatga

SEQ ID NO: 17045 - DNA, 17 bp, Arabidopsis thaliana
acaacactgctgattag

SEQ ID NO: 17046 - DNA, 17 bp, Arabidopsis thaliana
acaacacttgtgtgatt

SEQ ID NO: 17047 - DNA, 17 bp, Arabidopsis thaliana
acaacagacatgcatgt

SEQ ID NO: 17048 - DNA, 17 bp, Arabidopsis thaliana
acaacagacccgggtcc

SEQ ID NO: 17049 - DNA, 17 bp, Arabidopsis thaliana
acaacagaccgatcgaa

SEQ ID NO: 17050 - DNA, 17 bp, Arabidopsis thaliana
acaacagatttggagca

SEQ ID NO: 17051 - DNA, 17 bp, Arabidopsis thaliana
acaacagcctcaggttc

SEQ ID NO: 17052 - DNA, 17 bp, Arabidopsis thaliana
acaacagcgatggagcc

SEQ ID NO: 17053 - DNA, 17 bp, Arabidopsis thaliana
acaacagcgctgtccct

SEQ ID NO: 17054 - DNA, 17 bp, Arabidopsis thaliana
acaacagctggaaacgg

SEQ ID NO: 17055 - DNA, 17 bp, Arabidopsis thaliana
acaacagcttgctgtga

SEQ ID NO: 17056 - DNA, 17 bp, Arabidopsis thaliana
acaacaggaccttggtt

SEQ ID NO: 17057 - DNA, 17 bp, Arabidopsis thaliana
acaacaggggtctgcat

SEQ ID NO: 17058 - DNA, 17 bp, Arabidopsis thaliana
acaacagtcatcttctt

SEQ ID NO: 17059 - DNA, 17 bp, Arabidopsis thaliana
acaacagtcggcgattg

SEQ ID NO: 17060 - DNA, 17 bp, Arabidopsis thaliana
acaacagttccagctca

SEQ ID NO: 17061 - DNA, 17 bp, Arabidopsis thaliana
acaacagttggtttcgg

SEQ ID NO: 17062 - DNA, 17 bp, Arabidopsis thaliana
acaacatagttggccga

SEQ ID NO: 17063 - DNA, 17 bp, Arabidopsis thaliana
acaacatcagtagtgga

SEQ ID NO: 17064 - DNA, 17 bp, Arabidopsis thaliana
acaacatcatctctctg

SEQ ID NO: 17065 - DNA, 17 bp, Arabidopsis thaliana
acaacatcggggcaaga

SEQ ID NO: 17066 - DNA, 17 bp, Arabidopsis thaliana
acaacatctagtttggg

SEQ ID NO: 17067 - DNA, 17 bp, Arabidopsis thaliana
acaacatcttgattgtc

SEQ ID NO: 17068 - DNA, 17 bp, Arabidopsis thaliana
acaacatgaccaaatta

SEQ ID NO: 17069 - DNA, 17 bp, Arabidopsis thaliana
acaacatgactgcttcc

SEQ ID NO: 17070 - DNA, 17 bp, Arabidopsis thaliana
acaacatgggcgttctt

SEQ ID NO: 17071 - DNA, 17 bp, Arabidopsis thaliana
acaacattcctcagaat

SEQ ID NO: 17072 - DNA, 17 bp, Arabidopsis thaliana
acaacattcctcaggat

SEQ ID NO: 17073 - DNA, 17 bp, Arabidopsis thaliana
acaacattcctcaggtt

SEQ ID NO: 17074 - DNA, 17 bp, Arabidopsis thaliana
acaacattcctcagttt

SEQ ID NO: 17075 - DNA, 17 bp, Arabidopsis thaliana
acaacattcttcaggtt

SEQ ID NO: 17076 - DNA, 17 bp, Arabidopsis thaliana
acaacattgatctgacg

SEQ ID NO: 17077 - DNA, 17 bp, Arabidopsis thaliana
acaacattgtcaaggtc

SEQ ID NO: 17078 - DNA, 17 bp, Arabidopsis thaliana
acaacattgtgcagcgt

SEQ ID NO: 17079 - DNA, 17 bp, Arabidopsis thaliana
acaacatttagcgtcgt

SEQ ID NO: 17080 - DNA, 17 bp, Arabidopsis thaliana
acaacatttgcaaagtg

SEQ ID NO: 17081 - DNA, 17 bp, Arabidopsis thaliana
acaacatttgcataaga

SEQ ID NO: 17082 - DNA, 17 bp, Arabidopsis thaliana
acaaccaaggtcctgct

SEQ ID NO: 17083 - DNA, 17 bp, Arabidopsis thaliana
acaaccaccgcaccatc

SEQ ID NO: 17084 - DNA, 17 bp, Arabidopsis thaliana
acaaccaccgtcaccat

SEQ ID NO: 17085 - DNA, 17 bp, Arabidopsis thaliana
acaaccactgtcaccat

SEQ ID NO: 17086 - DNA, 17 bp, Arabidopsis thaliana
acaaccacttctacctc

SEQ ID NO: 17087 - DNA, 17 bp, Arabidopsis thaliana
acaaccaggatgttggc

SEQ ID NO: 17088 - DNA, 17 bp, Arabidopsis thaliana
acaaccaggggcagagg

SEQ ID NO: 17089 - DNA, 17 bp, Arabidopsis thaliana
acaaccagtggtgttcc

SEQ ID NO: 17090 - DNA, 17 bp, Arabidopsis thaliana
acaaccagttgtcattt

SEQ ID NO: 17091 - DNA, 17 bp, Arabidopsis thaliana
acaaccatgatcaaatt

SEQ ID NO: 17092 - DNA, 17 bp, Arabidopsis thaliana
acaaccattcaaaagtg

SEQ ID NO: 17093 - DNA, 17 bp, Arabidopsis thaliana
acaacccctcaactccg

SEQ ID NO: 17094 - DNA, 17 bp, Arabidopsis thaliana
acaacccgcacaactaa

SEQ ID NO: 17095 - DNA, 17 bp, Arabidopsis thaliana
acaacccggcaggatca

SEQ ID NO: 17096 - DNA, 17 bp, Arabidopsis thaliana
acaacccgtatcgcgat

SEQ ID NO: 17097 - DNA, 17 bp, Arabidopsis thaliana
acaacccgtcccgtggc

SEQ ID NO: 17098 - DNA, 17 bp, Arabidopsis thaliana
acaacccgtcccgtggg

SEQ ID NO: 17099 - DNA, 17 bp, Arabidopsis thaliana
acaaccctgttgagctt

SEQ ID NO: 17100 - DNA, 17 bp, Arabidopsis thaliana
acaaccgaagaagactc

SEQ ID NO: 17101 - DNA, 17 bp, Arabidopsis thaliana
acaaccgaagatgttgc

SEQ ID NO: 17102 - DNA, 17 bp, Arabidopsis thaliana
acaaccgaatggccagc

SEQ ID NO: 17103 - DNA, 17 bp, Arabidopsis thaliana
acaaccgctacgaacag

SEQ ID NO: 17104 - DNA, 17 bp, Arabidopsis thaliana
acaaccgtgactgattt

SEQ ID NO: 17105 - DNA, 17 bp, Arabidopsis thaliana
acaaccgttcgccctgg

SEQ ID NO: 17106 - DNA, 17 bp, Arabidopsis thaliana
acaaccgttggacattg

SEQ ID NO: 17107 - DNA, 17 bp, Arabidopsis thaliana
acaacctctggggaaat

SEQ ID NO: 17108 - DNA, 17 bp, Arabidopsis thaliana
acaaccttgggatgggt

SEQ ID NO: 17109 - DNA, 17 bp, Arabidopsis thaliana
acaacgaaaaaagttca

SEQ ID NO: 17110 - DNA, 17 bp, Arabidopsis thaliana
acaacgaaatcgtccgt

SEQ ID NO: 17111 - DNA, 17 bp, Arabidopsis thaliana
acaacgaagatgttctt

SEQ ID NO: 17112 - DNA, 17 bp, Arabidopsis thaliana
acaacgacctagatagt

SEQ ID NO: 17113 - DNA, 17 bp, Arabidopsis thaliana
acaacgactagttttct

SEQ ID NO: 17114 - DNA, 17 bp, Arabidopsis thaliana
acaacgactctcggcaa

SEQ ID NO: 17115 - DNA, 17 bp, Arabidopsis thaliana
acaacgactggtacagc

SEQ ID NO: 17116 - DNA, 17 bp, Arabidopsis thaliana
acaacgagatcgtccgt

SEQ ID NO: 17117 - DNA, 17 bp, Arabidopsis thaliana
acaacgatcgcggaccc

SEQ ID NO: 17118 - DNA, 17 bp, Arabidopsis thaliana
acaacgatcgcggaccg

SEQ ID NO: 17119 - DNA, 17 bp, Arabidopsis thaliana
acaacgatgggtttacg

SEQ ID NO: 17120 - DNA, 17 bp, Arabidopsis thaliana
acaacgattgttccgga

SEQ ID NO: 17121 - DNA, 17 bp, Arabidopsis thaliana
acaacgccagagaaggc

SEQ ID NO: 17122 - DNA, 17 bp, Arabidopsis thaliana
acaacgcgagcgagttt

SEQ ID NO: 17123 - DNA, 17 bp, Arabidopsis thaliana
acaacgcggattacggt

SEQ ID NO: 17124 - DNA, 17 bp, Arabidopsis thaliana
acaacgctatctgtaca

SEQ ID NO: 17125 - DNA, 17 bp, Arabidopsis thaliana
acaacggaaaattgcga

SEQ ID NO: 17126 - DNA, 17 bp, Arabidopsis thaliana
acaacggacccgccagt

SEQ ID NO: 17127 - DNA, 17 bp, Arabidopsis thaliana
acaacggaccttcttga

SEQ ID NO: 17128 - DNA, 17 bp, Arabidopsis thaliana
acaacggagttatcgat

SEQ ID NO: 17129 - DNA, 17 bp, Arabidopsis thaliana
acaacggcccagtttaa

SEQ ID NO: 17130 - DNA, 17 bp, Arabidopsis thaliana
acaacggcgccaacaat

SEQ ID NO: 17131 - DNA, 17 bp, Arabidopsis thaliana
acaacggcggtaagaca

SEQ ID NO: 17132 - DNA, 17 bp, Arabidopsis thaliana
acaacggctgccactgg

SEQ ID NO: 17133 - DNA, 17 bp, Arabidopsis thaliana
acaacggcttgtgccat

SEQ ID NO: 17134 - DNA, 17 bp, Arabidopsis thaliana
acaacgggctgcccatg

SEQ ID NO: 17135 - DNA, 17 bp, Arabidopsis thaliana
acaacggggcttgtttg

SEQ ID NO: 17136 - DNA, 17 bp, Arabidopsis thaliana
acaacgggtctgttcac

SEQ ID NO: 17137 - DNA, 17 bp, Arabidopsis thaliana
acaacgggtttggcagg

SEQ ID NO: 17138 - DNA, 17 bp, Arabidopsis thaliana
acaacggtccacctttg

SEQ ID NO: 17139 - DNA, 17 bp, Arabidopsis thaliana
acaacggttcaaaccgg

SEQ ID NO: 17140 - DNA, 17 bp, Arabidopsis thaliana
acaacggtttattgtct

SEQ ID NO: 17141 - DNA, 17 bp, Arabidopsis thaliana
acaacggtttcggcttt

SEQ ID NO: 17142 - DNA, 17 bp, Arabidopsis thaliana
acaacgtgctttgatgg

SEQ ID NO: 17143 - DNA, 17 bp, Arabidopsis thaliana
acaacgttgtctgtaca

SEQ ID NO: 17144 - DNA, 17 bp, Arabidopsis thaliana
acaacgttgtgttaggg

SEQ ID NO: 17145 - DNA, 17 bp, Arabidopsis thaliana
acaactaaacgtttttg

SEQ ID NO: 17146 - DNA, 17 bp, Arabidopsis thaliana
acaactaaaggttcctg

SEQ ID NO: 17147 - DNA, 17 bp, Arabidopsis thaliana
acaactaactgctgtgg

SEQ ID NO: 17148 - DNA, 17 bp, Arabidopsis thaliana
acaactaagtatcttcc

SEQ ID NO: 17149 - DNA, 17 bp, Arabidopsis thaliana
acaactaattcaaatgg

SEQ ID NO: 17150 - DNA, 17 bp, Arabidopsis thaliana
acaactagcaacgaggg

SEQ ID NO: 17151 - DNA, 17 bp, Arabidopsis thaliana
acaactagctaaaatgg

SEQ ID NO: 17152 - DNA, 17 bp, Arabidopsis thaliana
acaactaggtcagtatt

SEQ ID NO: 17153 - DNA, 17 bp, Arabidopsis thaliana
acaactagtaggacgtt

SEQ ID NO: 17154 - DNA, 17 bp, Arabidopsis thaliana
acaactagtgcgtcgtg

SEQ ID NO: 17155 - DNA, 17 bp, Arabidopsis thaliana
acaactatgccttcttc

SEQ ID NO: 17156 - DNA, 17 bp, Arabidopsis thaliana
acaactatggctaatgc

SEQ ID NO: 17157 - DNA, 17 bp, Arabidopsis thaliana
acaactattgacacggg

SEQ ID NO: 17158 - DNA, 17 bp, Arabidopsis thaliana
acaactattgggtcgga

SEQ ID NO: 17159 - DNA, 17 bp, Arabidopsis thaliana
acaactcacctgccgaa

SEQ ID NO: 17160 - DNA, 17 bp, Arabidopsis thaliana
acaactcagccaccaag

SEQ ID NO: 17161 - DNA, 17 bp, Arabidopsis thaliana
acaactcagtggcagac

SEQ ID NO: 17162 - DNA, 17 bp, Arabidopsis thaliana
acaactcataccacatt

SEQ ID NO: 17163 - DNA, 17 bp, Arabidopsis thaliana
acaactcatgatgacat

SEQ ID NO: 17164 - DNA, 17 bp, Arabidopsis thaliana
acaactcccagaacatc

SEQ ID NO: 17165 - DNA, 17 bp, Arabidopsis thaliana
acaactcccatttgcga

SEQ ID NO: 17166 - DNA, 17 bp, Arabidopsis thaliana
acaactccgtcctttct

SEQ ID NO: 17167 - DNA, 17 bp, Arabidopsis thaliana
acaactcctctgtggct

SEQ ID NO: 17168 - DNA, 17 bp, Arabidopsis thaliana
acaactcgaacctgacg

SEQ ID NO: 17169 - DNA, 17 bp, Arabidopsis thaliana
acaactctagggttcat

SEQ ID NO: 17170 - DNA, 17 bp, Arabidopsis thaliana
acaactctcggcaacgg

SEQ ID NO: 17171 - DNA, 17 bp, Arabidopsis thaliana
acaactctctctaagga

SEQ ID NO: 17172 - DNA, 17 bp, Arabidopsis thaliana
acaactctctctaagta

SEQ ID NO: 17173 - DNA, 17 bp, Arabidopsis thaliana
acaactgagaaggtcgg

SEQ ID NO: 17174 - DNA, 17 bp, Arabidopsis thaliana
acaactgatctagcaga

SEQ ID NO: 17175 - DNA, 17 bp, Arabidopsis thaliana
acaactgcctacgagga

SEQ ID NO: 17176 - DNA, 17 bp, Arabidopsis thaliana
acaactgcctcaacagg

SEQ ID NO: 17177 - DNA, 17 bp, Arabidopsis thaliana
acaactggctttgatga

SEQ ID NO: 17178 - DNA, 17 bp, Arabidopsis thaliana
acaactgggacagcatg

SEQ ID NO: 17179 - DNA, 17 bp, Arabidopsis thaliana
acaactgggtcgcgtct

SEQ ID NO: 17180 - DNA, 17 bp, Arabidopsis thaliana
acaactgggtggtcgag

SEQ ID NO: 17181 - DNA, 17 bp, Arabidopsis thaliana
acaactggtttgttgct

SEQ ID NO: 17182 - DNA, 17 bp, Arabidopsis thaliana
acaactgtgaccaagga

SEQ ID NO: 17183 - DNA, 17 bp, Arabidopsis thaliana
acaactgtgtggaccga

SEQ ID NO: 17184 - DNA, 17 bp, Arabidopsis thaliana
acaacttaaaccgaacc

SEQ ID NO: 17185 - DNA, 17 bp, Arabidopsis thaliana
acaacttaaaccgcaac

SEQ ID NO: 17186 - DNA, 17 bp, Arabidopsis thaliana
acaacttaaaccgcaat

SEQ ID NO: 17187 - DNA, 17 bp, Arabidopsis thaliana
acaacttaacgacgcca

SEQ ID NO: 17188 - DNA, 17 bp, Arabidopsis thaliana
acaacttacctctcctc

SEQ ID NO: 17189 - DNA, 17 bp, Arabidopsis thaliana
acaacttcaagcgcaat

SEQ ID NO: 17190 - DNA, 17 bp, Arabidopsis thaliana
acaacttcaagttacca

SEQ ID NO: 17191 - DNA, 17 bp, Arabidopsis thaliana
acaacttcattaggcaa

SEQ ID NO: 17192 - DNA, 17 bp, Arabidopsis thaliana
acaacttccttgtggcc

SEQ ID NO: 17193 - DNA, 17 bp, Arabidopsis thaliana
acaacttcggcctggta

SEQ ID NO: 17194 - DNA, 17 bp, Arabidopsis thaliana
acaacttcgtggtgtgt

SEQ ID NO: 17195 - DNA, 17 bp, Arabidopsis thaliana
acaacttctacagttat

SEQ ID NO: 17196 - DNA, 17 bp, Arabidopsis thaliana
acaacttcttagcgatt

SEQ ID NO: 17197 - DNA, 17 bp, Arabidopsis thaliana
acaacttgacacatcag

SEQ ID NO: 17198 - DNA, 17 bp, Arabidopsis thaliana
acaacttggcgcaattt

SEQ ID NO: 17199 - DNA, 17 bp, Arabidopsis thaliana
acaacttgtgcagtgat

SEQ ID NO: 17200 - DNA, 17 bp, Arabidopsis thaliana
acaacttgtgctaagtt

SEQ ID NO: 17201 - DNA, 17 bp, Arabidopsis thaliana
acaactttaaccgcaac

SEQ ID NO: 17202 - DNA, 17 bp, Arabidopsis thaliana
acaactttacaggcgtt

SEQ ID NO: 17203 - DNA, 17 bp, Arabidopsis thaliana
acaactttcatcagaag

SEQ ID NO: 17204 - DNA, 17 bp, Arabidopsis thaliana
acaactttctcacaggc

SEQ ID NO: 17205 - DNA, 17 bp, Arabidopsis thaliana
acaactttgaaccgaac

SEQ ID NO: 17206 - DNA, 17 bp, Arabidopsis thaliana
acaactttgatctcgtc

SEQ ID NO: 17207 - DNA, 17 bp, Arabidopsis thaliana
acaacttttccagacac

SEQ ID NO: 17208 - DNA, 17 bp, Arabidopsis thaliana
acaacttttccagaccc

SEQ ID NO: 17209 - DNA, 17 bp, Arabidopsis thaliana
acaacttttgatcgctg

SEQ ID NO: 17210 - DNA, 17 bp, Arabidopsis thaliana
acaacttttggctgagg

SEQ ID NO: 17211 - DNA, 17 bp, Arabidopsis thaliana
acaacttttggctgatg

SEQ ID NO: 17212 - DNA, 17 bp, Arabidopsis thaliana
acaacttttggtcgctg

SEQ ID NO: 17213 - DNA, 17 bp, Arabidopsis thaliana
acaactttttctggcta

SEQ ID NO: 17214 - DNA, 17 bp, Arabidopsis thaliana
acaactttttttacggg

SEQ ID NO: 17215 - DNA, 17 bp, Arabidopsis thaliana
acaagaaaccacagggg

SEQ ID NO: 17216 - DNA, 17 bp, Arabidopsis thaliana
acaagaaacgggtcatc

SEQ ID NO: 17217 - DNA, 17 bp, Arabidopsis thaliana
acaagaacacactcttt

SEQ ID NO: 17218 - DNA, 17 bp, Arabidopsis thaliana
acaagaacactcttttt

SEQ ID NO: 17219 - DNA, 17 bp, Arabidopsis thaliana
acaagaacgggttgcgg

SEQ ID NO: 17220 - DNA, 17 bp, Arabidopsis thaliana
acaagaacttaggtgat

SEQ ID NO: 17221 - DNA, 17 bp, Arabidopsis thaliana
acaagaatagcggatga

SEQ ID NO: 17222 - DNA, 17 bp, Arabidopsis thaliana
acaagacatcgatgacc

SEQ ID NO: 17223 - DNA, 17 bp, Arabidopsis thaliana
acaagacatgtcatttg

SEQ ID NO: 17224 - DNA, 17 bp, Arabidopsis thaliana
acaagaccctgttcgtt

SEQ ID NO: 17225 - DNA, 17 bp, Arabidopsis thaliana
acaagacctatcacttg

SEQ ID NO: 17226 - DNA, 17 bp, Arabidopsis thaliana
acaagacctcagcctgc

SEQ ID NO: 17227 - DNA, 17 bp, Arabidopsis thaliana
acaagacgacaagtgtc

SEQ ID NO: 17228 - DNA, 17 bp, Arabidopsis thaliana
acaagacgatggtatcc

SEQ ID NO: 17229 - DNA, 17 bp, Arabidopsis thaliana
acaagactcaagctttt

SEQ ID NO: 17230 - DNA, 17 bp, Arabidopsis thaliana
acaagacttggtggatg

SEQ ID NO: 17231 - DNA, 17 bp, Arabidopsis thaliana
acaagactttgacatct

SEQ ID NO: 17232 - DNA, 17 bp, Arabidopsis thaliana
acaagagacctaggctc

SEQ ID NO: 17233 - DNA, 17 bp, Arabidopsis thaliana
acaagagattcgattaa

SEQ ID NO: 17234 - DNA, 17 bp, Arabidopsis thaliana
acaagagcaatttcatc

SEQ ID NO: 17235 - DNA, 17 bp, Arabidopsis thaliana
acaagagcgggctacga

SEQ ID NO: 17236 - DNA, 17 bp, Arabidopsis thaliana
acaagagctgcggaaga

SEQ ID NO: 17237 - DNA, 17 bp, Arabidopsis thaliana
acaagaggataactcat

SEQ ID NO: 17238 - DNA, 17 bp, Arabidopsis thaliana
acaagaggatagctcac

SEQ ID NO: 17239 - DNA, 17 bp, Arabidopsis thaliana
acaagagtgtttgagac

SEQ ID NO: 17240 - DNA, 17 bp, Arabidopsis thaliana
acaagagttcagcccta

SEQ ID NO: 17241 - DNA, 17 bp, Arabidopsis thaliana
acaagataaagagaccg

SEQ ID NO: 17242 - DNA, 17 bp, Arabidopsis thaliana
acaagatactgtgactc

SEQ ID NO: 17243 - DNA, 17 bp, Arabidopsis thaliana
acaagatagtggaactt

SEQ ID NO: 17244 - DNA, 17 bp, Arabidopsis thaliana
acaagatatggtgggag

SEQ ID NO: 17245 - DNA, 17 bp, Arabidopsis thaliana
acaagatattgtgactc

SEQ ID NO: 17246 - DNA, 17 bp, Arabidopsis thaliana
acaagatcaaatctgtc

SEQ ID NO: 17247 - DNA, 17 bp, Arabidopsis thaliana
acaagatcaaatgggct

SEQ ID NO: 17248 - DNA, 17 bp, Arabidopsis thaliana
acaagatcagcagcagc

SEQ ID NO: 17249 - DNA, 17 bp, Arabidopsis thaliana
acaagatcaggttgcgg

SEQ ID NO: 17250 - DNA, 17 bp, Arabidopsis thaliana
acaagatcagtttgcgg

SEQ ID NO: 17251 - DNA, 17 bp, Arabidopsis thaliana
acaagatcatccatgct

SEQ ID NO: 17252 - DNA, 17 bp, Arabidopsis thaliana
acaagatccgtttgcgg

SEQ ID NO: 17253 - DNA, 17 bp, Arabidopsis thaliana
acaagatcctgcagtct

SEQ ID NO: 17254 - DNA, 17 bp, Arabidopsis thaliana
acaagatcgaattcggt

SEQ ID NO: 17255 - DNA, 17 bp, Arabidopsis thaliana
acaagatcggattgcgg

SEQ ID NO: 17256 - DNA, 17 bp, Arabidopsis thaliana
acaagatcgggttgcag

SEQ ID NO: 17257 - DNA, 17 bp, Arabidopsis thaliana
acaagatcgggttgcgg

SEQ ID NO: 17258 - DNA, 17 bp, Arabidopsis thaliana
acaagatcggtttgtag

SEQ ID NO: 17259 - DNA, 17 bp, Arabidopsis thaliana
acaagatcgtgttgcgg

SEQ ID NO: 17260 - DNA, 17 bp, Arabidopsis thaliana
acaagatctggttgcgg

SEQ ID NO: 17261 - DNA, 17 bp, Arabidopsis thaliana
acaagatgacacgtgtt

SEQ ID NO: 17262 - DNA, 17 bp, Arabidopsis thaliana
acaagatgggttttctc

SEQ ID NO: 17263 - DNA, 17 bp, Arabidopsis thaliana
acaagatgtcgtctgtc

SEQ ID NO: 17264 - DNA, 17 bp, Arabidopsis thaliana
acaagattcgtccattg

SEQ ID NO: 17265 - DNA, 17 bp, Arabidopsis thaliana
acaagattgagacattt

SEQ ID NO: 17266 - DNA, 17 bp, Arabidopsis thaliana
acaagattgggttgcgg

SEQ ID NO: 17267 - DNA, 17 bp, Arabidopsis thaliana
acaagatttttcgacgt

SEQ ID NO: 17268 - DNA, 17 bp, Arabidopsis thaliana
acaagcaacttttattg

SEQ ID NO: 17269 - DNA, 17 bp, Arabidopsis thaliana
acaagcaagttttgatt

SEQ ID NO: 17270 - DNA, 17 bp, Arabidopsis thaliana
acaagcaagttttgcag

SEQ ID NO: 17271 - DNA, 17 bp, Arabidopsis thaliana
acaagcaatcgcaggat

SEQ ID NO: 17272 - DNA, 17 bp, Arabidopsis thaliana
acaagcaatgacatccg

SEQ ID NO: 17273 - DNA, 17 bp, Arabidopsis thaliana
acaagcacggcggcggc

SEQ ID NO: 17274 - DNA, 17 bp, Arabidopsis thaliana
acaagcactcttcggcc

SEQ ID NO: 17275 - DNA, 17 bp, Arabidopsis thaliana
acaagcaggaagtgcag

SEQ ID NO: 17276 - DNA, 17 bp, Arabidopsis thaliana
acaagcatatgctttcg

SEQ ID NO: 17277 - DNA, 17 bp, Arabidopsis thaliana
acaagcatggatgtcgg

SEQ ID NO: 17278 - DNA, 17 bp, Arabidopsis thaliana
acaagcattggccattg

SEQ ID NO: 17279 - DNA, 17 bp, Arabidopsis thaliana
acaagcatttgcggctg

SEQ ID NO: 17280 - DNA, 17 bp, Arabidopsis thaliana
acaagccgccacgtcat

SEQ ID NO: 17281 - DNA, 17 bp, Arabidopsis thaliana
acaagccgtctgaccac

SEQ ID NO: 17282 - DNA, 17 bp, Arabidopsis thaliana
acaagcctccgggtgcg

SEQ ID NO: 17283 - DNA, 17 bp, Arabidopsis thaliana
acaagcctttcgcagga

SEQ ID NO: 17284 - DNA, 17 bp, Arabidopsis thaliana
acaagcgaaaggccgcg

SEQ ID NO: 17285 - DNA, 17 bp, Arabidopsis thaliana
acaagcgactatcgttt

SEQ ID NO: 17286 - DNA, 17 bp, Arabidopsis thaliana
acaagcgatagttgtct

SEQ ID NO: 17287 - DNA, 17 bp, Arabidopsis thaliana
acaagcggcaggccgtg

SEQ ID NO: 17288 - DNA, 17 bp, Arabidopsis thaliana
acaagcggtggagcatg

SEQ ID NO: 17289 - DNA, 17 bp, Arabidopsis thaliana
acaagcgtaacaggaaa

SEQ ID NO: 17290 - DNA, 17 bp, Arabidopsis thaliana
acaagcgtatcgaatga

SEQ ID NO: 17291 - DNA, 17 bp, Arabidopsis thaliana
acaagcgtgcttgggcg

SEQ ID NO: 17292 - DNA, 17 bp, Arabidopsis thaliana
acaagcgtgtcaaatga

SEQ ID NO: 17293 - DNA, 17 bp, Arabidopsis thaliana
acaagcgtttacagttg

SEQ ID NO: 17294 - DNA, 17 bp, Arabidopsis thaliana
acaagcgtttgcggttg

SEQ ID NO: 17295 - DNA, 17 bp, Arabidopsis thaliana
acaaggaccaagtgctg

SEQ ID NO: 17296 - DNA, 17 bp, Arabidopsis thaliana
acaaggacgtggtttga

SEQ ID NO: 17297 - DNA, 17 bp, Arabidopsis thaliana
acaaggagtcaccgcag

SEQ ID NO: 17298 - DNA, 17 bp, Arabidopsis thaliana
acaaggagttacggcgg

SEQ ID NO: 17299 - DNA, 17 bp, Arabidopsis thaliana
acaaggatcaggcattg

SEQ ID NO: 17300 - DNA, 17 bp, Arabidopsis thaliana
acaaggatgtggtttga

SEQ ID NO: 17301 - DNA, 17 bp, Arabidopsis thaliana
acaaggcaaagtgtctt

SEQ ID NO: 17302 - DNA, 17 bp, Arabidopsis thaliana
acaaggccaaatttgat

SEQ ID NO: 17303 - DNA, 17 bp, Arabidopsis thaliana
acaaggccacagtgtct

SEQ ID NO: 17304 - DNA, 17 bp, Arabidopsis thaliana
acaaggccagttttggt

SEQ ID NO: 17305 - DNA, 17 bp, Arabidopsis thaliana
acaaggcccaaactaat

SEQ ID NO: 17306 - DNA, 17 bp, Arabidopsis thaliana
acaaggcccatcatcca

SEQ ID NO: 17307 - DNA, 17 bp, Arabidopsis thaliana
acaaggcccgcctcgtt

SEQ ID NO: 17308 - DNA, 17 bp, Arabidopsis thaliana
acaaggccgagccgaac

SEQ ID NO: 17309 - DNA, 17 bp, Arabidopsis thaliana
acaaggccgagtgtctt

SEQ ID NO: 17310 - DNA, 17 bp, Arabidopsis thaliana
acaaggccgctctactt

SEQ ID NO: 17311 - DNA, 17 bp, Arabidopsis thaliana
acaaggccgtaagggtt

SEQ ID NO: 17312 - DNA, 17 bp, Arabidopsis thaliana
acaaggcctcctgtagt

SEQ ID NO: 17313 - DNA, 17 bp, Arabidopsis thaliana
acaaggcctgattccgt

SEQ ID NO: 17314 - DNA, 17 bp, Arabidopsis thaliana
acaaggccttatgacgt

SEQ ID NO: 17315 - DNA, 17 bp, Arabidopsis thaliana
acaaggcgactgctcgt

SEQ ID NO: 17316 - DNA, 17 bp, Arabidopsis thaliana
acaaggcggctgatgtg

SEQ ID NO: 17317 - DNA, 17 bp, Arabidopsis thaliana
acaaggctactgtggtg

SEQ ID NO: 17318 - DNA, 17 bp, Arabidopsis thaliana
acaaggctctcgcggca

SEQ ID NO: 17319 - DNA, 17 bp, Arabidopsis thaliana
acaaggcttatggctat

SEQ ID NO: 17320 - DNA, 17 bp, Arabidopsis thaliana
acaaggcttttgagttg

SEQ ID NO: 17321 - DNA, 17 bp, Arabidopsis thaliana
acaagggaaggttgcag

SEQ ID NO: 17322 - DNA, 17 bp, Arabidopsis thaliana
acaagggcacgtctgcc

SEQ ID NO: 17323 - DNA, 17 bp, Arabidopsis thaliana
acaagggctgagtgtcg

SEQ ID NO: 17324 - DNA, 17 bp, Arabidopsis thaliana
acaaggggaatccgact

SEQ ID NO: 17325 - DNA, 17 bp, Arabidopsis thaliana
acaaggggaatcgactg

SEQ ID NO: 17326 - DNA, 17 bp, Arabidopsis thaliana
acaagggtacactggcc

SEQ ID NO: 17327 - DNA, 17 bp, Arabidopsis thaliana
acaagggtacggtatct

SEQ ID NO: 17328 - DNA, 17 bp, Arabidopsis thaliana
acaagggttcgctgagg

SEQ ID NO: 17329 - DNA, 17 bp, Arabidopsis thaliana
acaagggttcggacaca

SEQ ID NO: 17330 - DNA, 17 bp, Arabidopsis thaliana
acaaggtaaagacccgt

SEQ ID NO: 17331 - DNA, 17 bp, Arabidopsis thaliana
acaaggtaactatttgg

SEQ ID NO: 17332 - DNA, 17 bp, Arabidopsis thaliana
acaaggtccagagttta

SEQ ID NO: 17333 - DNA, 17 bp, Arabidopsis thaliana
acaaggtcgagtatgag

SEQ ID NO: 17334 - DNA, 17 bp, Arabidopsis thaliana
acaaggtggcagactgg

SEQ ID NO: 17335 - DNA, 17 bp, Arabidopsis thaliana
acaaggtggttcgtcta

SEQ ID NO: 17336 - DNA, 17 bp, Arabidopsis thaliana
acaaggttacatagggc

SEQ ID NO: 17337 - DNA, 17 bp, Arabidopsis thaliana
acaaggttagatagtgc

SEQ ID NO: 17338 - DNA, 17 bp, Arabidopsis thaliana
acaaggttgaatgatgg

SEQ ID NO: 17339 - DNA, 17 bp, Arabidopsis thaliana
acaaggttgcctatgca

SEQ ID NO: 17340 - DNA, 17 bp, Arabidopsis thaliana
acaaggttgtgttgtgt

SEQ ID NO: 17341 - DNA, 17 bp, Arabidopsis thaliana
acaaggtttccgtaggt

SEQ ID NO: 17342 - DNA, 17 bp, Arabidopsis thaliana
acaagtaagaccatctc

SEQ ID NO: 17343 - DNA, 17 bp, Arabidopsis thaliana
acaagtactgcagcagt

SEQ ID NO: 17344 - DNA, 17 bp, Arabidopsis thaliana
acaagtagctcaggcgc

SEQ ID NO: 17345 - DNA, 17 bp, Arabidopsis thaliana
acaagtaggggtgtttt

SEQ ID NO: 17346 - DNA, 17 bp, Arabidopsis thaliana
acaagtagttttgcgtc

SEQ ID NO: 17347 - DNA, 17 bp, Arabidopsis thaliana
acaagtataccggaagt

SEQ ID NO: 17348 - DNA, 17 bp, Arabidopsis thaliana
acaagtcactgtaccac

SEQ ID NO: 17349 - DNA, 17 bp, Arabidopsis thaliana
acaagtcacttggcaaa

SEQ ID NO: 17350 - DNA, 17 bp, Arabidopsis thaliana
acaagtccaaacccaat

SEQ ID NO: 17351 - DNA, 17 bp, Arabidopsis thaliana
acaagtccatgctacaa

SEQ ID NO: 17352 - DNA, 17 bp, Arabidopsis thaliana
acaagtcccagaagttt

SEQ ID NO: 17353 - DNA, 17 bp, Arabidopsis thaliana
acaagtcccggaagttt

SEQ ID NO: 17354 - DNA, 17 bp, Arabidopsis thaliana
acaagtcctcgtgttgc

SEQ ID NO: 17355 - DNA, 17 bp, Arabidopsis thaliana
acaagtcgatagtcggt

SEQ ID NO: 17356 - DNA, 17 bp, Arabidopsis thaliana
acaagtcgtcacgtcag

SEQ ID NO: 17357 - DNA, 17 bp, Arabidopsis thaliana
acaagtcttcgtggatc

SEQ ID NO: 17358 - DNA, 17 bp, Arabidopsis thaliana
acaagtcttgtagaatg

SEQ ID NO: 17359 - DNA, 17 bp, Arabidopsis thaliana
acaagtctttcctttgc

SEQ ID NO: 17360 - DNA, 17 bp, Arabidopsis thaliana
acaagtctttgcctccc

SEQ ID NO: 17361 - DNA, 17 bp, Arabidopsis thaliana
acaagtctttgcctcgc

SEQ ID NO: 17362 - DNA, 17 bp, Arabidopsis thaliana
acaagtgaccaaataca

SEQ ID NO: 17363 - DNA, 17 bp, Arabidopsis thaliana
acaagtgacgagcaaca

SEQ ID NO: 17364 - DNA, 17 bp, Arabidopsis thaliana
acaagtgagttatgtgg

SEQ ID NO: 17365 - DNA, 17 bp, Arabidopsis thaliana
acaagtgatatcgtcga

SEQ ID NO: 17366 - DNA, 17 bp, Arabidopsis thaliana
acaagtgatttctatcg

SEQ ID NO: 17367 - DNA, 17 bp, Arabidopsis thaliana
acaagtgattttagctt

SEQ ID NO: 17368 - DNA, 17 bp, Arabidopsis thaliana
acaagtgcagttttgcg

SEQ ID NO: 17369 - DNA, 17 bp, Arabidopsis thaliana
acaagtggtcctatagt

SEQ ID NO: 17370 - DNA, 17 bp, Arabidopsis thaliana
acaagtggtgatgtgct

SEQ ID NO: 17371 - DNA, 17 bp, Arabidopsis thaliana
acaagtgtttagtgagg

SEQ ID NO: 17372 - DNA, 17 bp, Arabidopsis thaliana
acaagttaccaagaagc

SEQ ID NO: 17373 - DNA, 17 bp, Arabidopsis thaliana
acaagttaccagtataa

SEQ ID NO: 17374 - DNA, 17 bp, Arabidopsis thaliana
acaagttagttaccaca

SEQ ID NO: 17375 - DNA, 17 bp, Arabidopsis thaliana
acaagttagtttcgtcg

SEQ ID NO: 17376 - DNA, 17 bp, Arabidopsis thaliana
acaagttatcactgcgc

SEQ ID NO: 17377 - DNA, 17 bp, Arabidopsis thaliana
acaagttgaaggagtct

SEQ ID NO: 17378 - DNA, 17 bp, Arabidopsis thaliana
acaagttgaccttggct

SEQ ID NO: 17379 - DNA, 17 bp, Arabidopsis thaliana
acaagttgcagatgtta

SEQ ID NO: 17380 - DNA, 17 bp, Arabidopsis thaliana
acaagttgctaggaaat

SEQ ID NO: 17381 - DNA, 17 bp, Arabidopsis thaliana
acaagttgctcaagctg

SEQ ID NO: 17382 - DNA, 17 bp, Arabidopsis thaliana
acaagttgctccatgtt

SEQ ID NO: 17383 - DNA, 17 bp, Arabidopsis thaliana
acaagtttattaggtct

SEQ ID NO: 17384 - DNA, 17 bp, Arabidopsis thaliana
acaagtttcagccatgg

SEQ ID NO: 17385 - DNA, 17 bp, Arabidopsis thaliana
acaagtttctatggatc

SEQ ID NO: 17386 - DNA, 17 bp, Arabidopsis thaliana
acaagtttgtgcacggg

SEQ ID NO: 17387 - DNA, 17 bp, Arabidopsis thaliana
acaagtttttccgattg

SEQ ID NO: 17388 - DNA, 17 bp, Arabidopsis thaliana
acaagtttttcgtatgg

SEQ ID NO: 17389 - DNA, 17 bp, Arabidopsis thaliana
acaataaacctctcagg

SEQ ID NO: 17390 - DNA, 17 bp, Arabidopsis thaliana
acaataacaaattcaga

SEQ ID NO: 17391 - DNA, 17 bp, Arabidopsis thaliana
acaataacggctgttag

SEQ ID NO: 17392 - DNA, 17 bp, Arabidopsis thaliana
acaataacggtcctaag

SEQ ID NO: 17393 - DNA, 17 bp, Arabidopsis thaliana
acaataaggcacgagaa

SEQ ID NO: 17394 - DNA, 17 bp, Arabidopsis thaliana
acaatacatcttcaccg

SEQ ID NO: 17395 - DNA, 17 bp, Arabidopsis thaliana
acaataccatcggttga

SEQ ID NO: 17396 - DNA, 17 bp, Arabidopsis thaliana
acaataccgggctcttt

SEQ ID NO: 17397 - DNA, 17 bp, Arabidopsis thaliana
acaatacgggcttaacc

SEQ ID NO: 17398 - DNA, 17 bp, Arabidopsis thaliana
acaatagaccacaggcg

SEQ ID NO: 17399 - DNA, 17 bp, Arabidopsis thaliana
acaatagaccgaaatga

SEQ ID NO: 17400 - DNA, 17 bp, Arabidopsis thaliana
acaatagatattcccgc

SEQ ID NO: 17401 - DNA, 17 bp, Arabidopsis thaliana
acaatagcccttttccc

SEQ ID NO: 17402 - DNA, 17 bp, Arabidopsis thaliana
acaataggtggagaggc

SEQ ID NO: 17403 - DNA, 17 bp, Arabidopsis thaliana
acaatagtcactggtgc

SEQ ID NO: 17404 - DNA, 17 bp, Arabidopsis thaliana
acaatagtctacctgca

SEQ ID NO: 17405 - DNA, 17 bp, Arabidopsis thaliana
acaatagtttatctacg

SEQ ID NO: 17406 - DNA, 17 bp, Arabidopsis thaliana
acaatatctacggatag

SEQ ID NO: 17407 - DNA, 17 bp, Arabidopsis thaliana
acaatatctagctagct

SEQ ID NO: 17408 - DNA, 17 bp, Arabidopsis thaliana
acaatatttttgggtct

SEQ ID NO: 17409 - DNA, 17 bp, Arabidopsis thaliana
acaatcaacgagcttat

SEQ ID NO: 17410 - DNA, 17 bp, Arabidopsis thaliana
acaatcaagatgtttag

SEQ ID NO: 17411 - DNA, 17 bp, Arabidopsis thaliana
acaatcacaatctaagc

SEQ ID NO: 17412 - DNA, 17 bp, Arabidopsis thaliana
acaatcacaggcagcca

SEQ ID NO: 17413 - DNA, 17 bp, Arabidopsis thaliana
acaatcactccatccat

SEQ ID NO: 17414 - DNA, 17 bp, Arabidopsis thaliana
acaatcacttcccagaa

SEQ ID NO: 17415 - DNA, 17 bp, Arabidopsis thaliana
acaatcagcacggacat

SEQ ID NO: 17416 - DNA, 17 bp, Arabidopsis thaliana
acaatcaggcagtccat

SEQ ID NO: 17417 - DNA, 17 bp, Arabidopsis thaliana
acaatcaggtaaccagc

SEQ ID NO: 17418 - DNA, 17 bp, Arabidopsis thaliana
acaatcaggttttttcg

SEQ ID NO: 17419 - DNA, 17 bp, Arabidopsis thaliana
acaatcagttctcggtt

SEQ ID NO: 17420 - DNA, 17 bp, Arabidopsis thaliana
acaatcagttctcgttt

SEQ ID NO: 17421 - DNA, 17 bp, Arabidopsis thaliana
acaatcatgcggtagct

SEQ ID NO: 17422 - DNA, 17 bp, Arabidopsis thaliana
acaatcatgtgactgcg

SEQ ID NO: 17423 - DNA, 17 bp, Arabidopsis thaliana
acaatccaataacaccc

SEQ ID NO: 17424 - DNA, 17 bp, Arabidopsis thaliana
acaatccatcttaccag

SEQ ID NO: 17425 - DNA, 17 bp, Arabidopsis thaliana
acaatcccgaccatcag

SEQ ID NO: 17426 - DNA, 17 bp, Arabidopsis thaliana
acaatccctgacaatga

SEQ ID NO: 17427 - DNA, 17 bp, Arabidopsis thaliana
acaatcccttttcagta

SEQ ID NO: 17428 - DNA, 17 bp, Arabidopsis thaliana
acaatccgacggaccag

SEQ ID NO: 17429 - DNA, 17 bp, Arabidopsis thaliana
acaatccgcagcctggt

SEQ ID NO: 17430 - DNA, 17 bp, Arabidopsis thaliana
acaatcgaatgattcgt

SEQ ID NO: 17431 - DNA, 17 bp, Arabidopsis thaliana
acaatcgaattgtgact

SEQ ID NO: 17432 - DNA, 17 bp, Arabidopsis thaliana
acaatcgaggtgcatat

SEQ ID NO: 17433 - DNA, 17 bp, Arabidopsis thaliana
acaatcgattcacggcc

SEQ ID NO: 17434 - DNA, 17 bp, Arabidopsis thaliana
acaatcgcacagattgc

SEQ ID NO: 17435 - DNA, 17 bp, Arabidopsis thaliana
acaatcgccggtccact

SEQ ID NO: 17436 - DNA, 17 bp, Arabidopsis thaliana
acaatcgggaatgtgcc

SEQ ID NO: 17437 - DNA, 17 bp, Arabidopsis thaliana
acaatcgggaatgtgtc

SEQ ID NO: 17438 - DNA, 17 bp, Arabidopsis thaliana
acaatcggggatgtgcc

SEQ ID NO: 17439 - DNA, 17 bp, Arabidopsis thaliana
acaatcgtctccggtgc

SEQ ID NO: 17440 - DNA, 17 bp, Arabidopsis thaliana
acaatcgtctctcacga

SEQ ID NO: 17441 - DNA, 17 bp, Arabidopsis thaliana
acaatcgtttcagaggg

SEQ ID NO: 17442 - DNA, 17 bp, Arabidopsis thaliana
acaatctaatggactct

SEQ ID NO: 17443 - DNA, 17 bp, Arabidopsis thaliana
acaatctaccgctgagc

SEQ ID NO: 17444 - DNA, 17 bp, Arabidopsis thaliana
acaatctagtgggtgat

SEQ ID NO: 17445 - DNA, 17 bp, Arabidopsis thaliana
acaatctatgggtccga

SEQ ID NO: 17446 - DNA, 17 bp, Arabidopsis thaliana
acaatctcgacttggcc

SEQ ID NO: 17447 - DNA, 17 bp, Arabidopsis thaliana
acaatctcggctggctg

SEQ ID NO: 17448 - DNA, 17 bp, Arabidopsis thaliana
acaatctgatgggtgct

SEQ ID NO: 17449 - DNA, 17 bp, Arabidopsis thaliana
acaatctgcgacgagtt

SEQ ID NO: 17450 - DNA, 17 bp, Arabidopsis thaliana
acaatctggatcctagc

SEQ ID NO: 17451 - DNA, 17 bp, Arabidopsis thaliana
acaatctgggacagatc

SEQ ID NO: 17452 - DNA, 17 bp, Arabidopsis thaliana
acaatcttctccttaac

SEQ ID NO: 17453 - DNA, 17 bp, Arabidopsis thaliana
acaatcttgaagcaaac

SEQ ID NO: 17454 - DNA, 17 bp, Arabidopsis thaliana
acaatcttttcttgcgt

SEQ ID NO: 17455 - DNA, 17 bp, Arabidopsis thaliana
acaatgaagtgtatgat

SEQ ID NO: 17456 - DNA, 17 bp, Arabidopsis thaliana
acaatgacaaccgttag

SEQ ID NO: 17457 - DNA, 17 bp, Arabidopsis thaliana
acaatgacagaatccgt

SEQ ID NO: 17458 - DNA, 17 bp, Arabidopsis thaliana
acaatgacagacacgat

SEQ ID NO: 17459 - DNA, 17 bp, Arabidopsis thaliana
acaatgacgaaccggga

SEQ ID NO: 17460 - DNA, 17 bp, Arabidopsis thaliana
acaatgactgccactgg

SEQ ID NO: 17461 - DNA, 17 bp, Arabidopsis thaliana
acaatgacttcgataat

SEQ ID NO: 17462 - DNA, 17 bp, Arabidopsis thaliana
acaatgagtcgatttgc

SEQ ID NO: 17463 - DNA, 17 bp, Arabidopsis thaliana
acaatgagtcgatttgg

SEQ ID NO: 17464 - DNA, 17 bp, Arabidopsis thaliana
acaatgagtcgctttga

SEQ ID NO: 17465 - DNA, 17 bp, Arabidopsis thaliana
acaatgatcttcttgtt

SEQ ID NO: 17466 - DNA, 17 bp, Arabidopsis thaliana
acaatgcaactttgact

SEQ ID NO: 17467 - DNA, 17 bp, Arabidopsis thaliana
acaatgcacaagccaaa

SEQ ID NO: 17468 - DNA, 17 bp, Arabidopsis thaliana
acaatgcagatgtctca

SEQ ID NO: 17469 - DNA, 17 bp, Arabidopsis thaliana
acaatgccgtctgctgt

SEQ ID NO: 17470 - DNA, 17 bp, Arabidopsis thaliana
acaatgcgcttctatgt

SEQ ID NO: 17471 - DNA, 17 bp, Arabidopsis thaliana
acaatgcgtcattggat

SEQ ID NO: 17472 - DNA, 17 bp, Arabidopsis thaliana
acaatgctatagatcca

SEQ ID NO: 17473 - DNA, 17 bp, Arabidopsis thaliana
acaatgcttcaggacaa

SEQ ID NO: 17474 - DNA, 17 bp, Arabidopsis thaliana
acaatgcttgacccttg

SEQ ID NO: 17475 - DNA, 17 bp, Arabidopsis thaliana
acaatggataaccaagt

SEQ ID NO: 17476 - DNA, 17 bp, Arabidopsis thaliana
acaatggatatcatcta

SEQ ID NO: 17477 - DNA, 17 bp, Arabidopsis thaliana
acaatggatgctattaa

SEQ ID NO: 17478 - DNA, 17 bp, Arabidopsis thaliana
acaatggatgtcactgg

SEQ ID NO: 17479 - DNA, 17 bp, Arabidopsis thaliana
acaatggattatttgca

SEQ ID NO: 17480 - DNA, 17 bp, Arabidopsis thaliana
acaatggcatatgtgac

SEQ ID NO: 17481 - DNA, 17 bp, Arabidopsis thaliana
acaatggcgatgtcgat

SEQ ID NO: 17482 - DNA, 17 bp, Arabidopsis thaliana
acaatggcggaccgatt

SEQ ID NO: 17483 - DNA, 17 bp, Arabidopsis thaliana
acaatggctgcagttgt

SEQ ID NO: 17484 - DNA, 17 bp, Arabidopsis thaliana
acaatggctgccactag

SEQ ID NO: 17485 - DNA, 17 bp, Arabidopsis thaliana
acaatggctgccactca

SEQ ID NO: 17486 - DNA, 17 bp, Arabidopsis thaliana
acaatggctgccactgg

SEQ ID NO: 17487 - DNA, 17 bp, Arabidopsis thaliana
acaatggctgccattga

SEQ ID NO: 17488 - DNA, 17 bp, Arabidopsis thaliana
acaatggctgccattgg

SEQ ID NO: 17489 - DNA, 17 bp, Arabidopsis thaliana
acaatggctgctattag

SEQ ID NO: 17490 - DNA, 17 bp, Arabidopsis thaliana
acaatggctgctattgg

SEQ ID NO: 17491 - DNA, 17 bp, Arabidopsis thaliana
acaatggctgtcactaa

SEQ ID NO: 17492 - DNA, 17 bp, Arabidopsis thaliana
acaatggctgtcactga

SEQ ID NO: 17493 - DNA, 17 bp, Arabidopsis thaliana
acaatggctgtcactgg

SEQ ID NO: 17494 - DNA, 17 bp, Arabidopsis thaliana
acaatggctgtcattgg

SEQ ID NO: 17495 - DNA, 17 bp, Arabidopsis thaliana
acaatggcttgcctaca

SEQ ID NO: 17496 - DNA, 17 bp, Arabidopsis thaliana
acaatggctttgacatt

SEQ ID NO: 17497 - DNA, 17 bp, Arabidopsis thaliana
acaatggctttgttgga

SEQ ID NO: 17498 - DNA, 17 bp, Arabidopsis thaliana
acaatgggctctatctg

SEQ ID NO: 17499 - DNA, 17 bp, Arabidopsis thaliana
acaatgggctgcccatg

SEQ ID NO: 17500 - DNA, 17 bp, Arabidopsis thaliana
acaatggggatgtagct

SEQ ID NO: 17501 - DNA, 17 bp, Arabidopsis thaliana
acaatgggttgctcatg

SEQ ID NO: 17502 - DNA, 17 bp, Arabidopsis thaliana
acaatggtgtatgcgat

SEQ ID NO: 17503 - DNA, 17 bp, Arabidopsis thaliana
acaatggttgccactaa

SEQ ID NO: 17504 - DNA, 17 bp, Arabidopsis thaliana
acaatggttgccactag

SEQ ID NO: 17505 - DNA, 17 bp, Arabidopsis thaliana
acaatggttgccactgg

SEQ ID NO: 17506 - DNA, 17 bp, Arabidopsis thaliana
acaatggttgcctggat

SEQ ID NO: 17507 - DNA, 17 bp, Arabidopsis thaliana
acaatggttgggactgt

SEQ ID NO: 17508 - DNA, 17 bp, Arabidopsis thaliana
acaatggtttggactgc

SEQ ID NO: 17509 - DNA, 17 bp, Arabidopsis thaliana
acaatgtacgtacgaac

SEQ ID NO: 17510 - DNA, 17 bp, Arabidopsis thaliana
acaatgtaggcaaggga

SEQ ID NO: 17511 - DNA, 17 bp, Arabidopsis thaliana
acaatgtatgttgtcga

SEQ ID NO: 17512 - DNA, 17 bp, Arabidopsis thaliana
acaatgtatgttgtcgc

SEQ ID NO: 17513 - DNA, 17 bp, Arabidopsis thaliana
acaatgtatgttgtcgt

SEQ ID NO: 17514 - DNA, 17 bp, Arabidopsis thaliana
acaatgtccacgagatt

SEQ ID NO: 17515 - DNA, 17 bp, Arabidopsis thaliana
acaatgtccgtactgat

SEQ ID NO: 17516 - DNA, 17 bp, Arabidopsis thaliana
acaatgtccgtgctgat

SEQ ID NO: 17517 - DNA, 17 bp, Arabidopsis thaliana
acaatgtcgtcttcgct

SEQ ID NO: 17518 - DNA, 17 bp, Arabidopsis thaliana
acaatgtctctgctgat

SEQ ID NO: 17519 - DNA, 17 bp, Arabidopsis thaliana
acaatgtctgtgttgat

SEQ ID NO: 17520 - DNA, 17 bp, Arabidopsis thaliana
acaatgtgcgggccgat

SEQ ID NO: 17521 - DNA, 17 bp, Arabidopsis thaliana
acaatgtgtattagcag

SEQ ID NO: 17522 - DNA, 17 bp, Arabidopsis thaliana
acaatgtgtctggagac

SEQ ID NO: 17523 - DNA, 17 bp, Arabidopsis thaliana
acaatgtgttcggttgt

SEQ ID NO: 17524 - DNA, 17 bp, Arabidopsis thaliana
acaatgttctcatggcc

SEQ ID NO: 17525 - DNA, 17 bp, Arabidopsis thaliana
acaattaacctgatgtt

SEQ ID NO: 17526 - DNA, 17 bp, Arabidopsis thaliana
acaattacacagatggg

SEQ ID NO: 17527 - DNA, 17 bp, Arabidopsis thaliana
acaattaccgttttgca

SEQ ID NO: 17528 - DNA, 17 bp, Arabidopsis thaliana
acaattagggtgtgtca

SEQ ID NO: 17529 - DNA, 17 bp, Arabidopsis thaliana
acaattatagcccctgg

SEQ ID NO: 17530 - DNA, 17 bp, Arabidopsis thaliana
acaattatagccgcttg

SEQ ID NO: 17531 - DNA, 17 bp, Arabidopsis thaliana
acaattatagccgttcc

SEQ ID NO: 17532 - DNA, 17 bp, Arabidopsis thaliana
acaattatagccgttcg

SEQ ID NO: 17533 - DNA, 17 bp, Arabidopsis thaliana
acaattatagtcgttcg

SEQ ID NO: 17534 - DNA, 17 bp, Arabidopsis thaliana
acaattatagtcgtttg

SEQ ID NO: 17535 - DNA, 17 bp, Arabidopsis thaliana
acaattatctcatggat

SEQ ID NO: 17536 - DNA, 17 bp, Arabidopsis thaliana
acaattatctcgggagt

SEQ ID NO: 17537 - DNA, 17 bp, Arabidopsis thaliana
acaattattgccattca

SEQ ID NO: 17538 - DNA, 17 bp, Arabidopsis thaliana
acaattattgccattcg

SEQ ID NO: 17539 - DNA, 17 bp, Arabidopsis thaliana
acaattattttgttcac

SEQ ID NO: 17540 - DNA, 17 bp, Arabidopsis thaliana
acaattccgctgcgaat

SEQ ID NO: 17541 - DNA, 17 bp, Arabidopsis thaliana
acaattccggcggatcg

SEQ ID NO: 17542 - DNA, 17 bp, Arabidopsis thaliana
acaattcctacgcctcc

SEQ ID NO: 17543 - DNA, 17 bp, Arabidopsis thaliana
acaattcgtcctggact

SEQ ID NO: 17544 - DNA, 17 bp, Arabidopsis thaliana
acaattctattcttgcg

SEQ ID NO: 17545 - DNA, 17 bp, Arabidopsis thaliana
acaattctcttggaagg

SEQ ID NO: 17546 - DNA, 17 bp, Arabidopsis thaliana
acaattcttcgcgagtt

SEQ ID NO: 17547 - DNA, 17 bp, Arabidopsis thaliana
acaattcttgatcatag

SEQ ID NO: 17548 - DNA, 17 bp, Arabidopsis thaliana
acaattgactaggtctg

SEQ ID NO: 17549 - DNA, 17 bp, Arabidopsis thaliana
acaattgcgctctctgc

SEQ ID NO: 17550 - DNA, 17 bp, Arabidopsis thaliana
acaattgcggcgaggtt

SEQ ID NO: 17551 - DNA, 17 bp, Arabidopsis thaliana
acaattggactggggtt

SEQ ID NO: 17552 - DNA, 17 bp, Arabidopsis thaliana
acaattgggatgttctg

SEQ ID NO: 17553 - DNA, 17 bp, Arabidopsis thaliana
acaattggtcatcgcgc

SEQ ID NO: 17554 - DNA, 17 bp, Arabidopsis thaliana
acaattggtcttgagat

SEQ ID NO: 17555 - DNA, 17 bp, Arabidopsis thaliana
acaattgtctcatggat

SEQ ID NO: 17556 - DNA, 17 bp, Arabidopsis thaliana
acaattgtctcgtgtaa

SEQ ID NO: 17557 - DNA, 17 bp, Arabidopsis thaliana
acaattgtcttatggat

SEQ ID NO: 17558 - DNA, 17 bp, Arabidopsis thaliana
acaattgttccatggat

SEQ ID NO: 17559 - DNA, 17 bp, Arabidopsis thaliana
acaattgttcggctgtc

SEQ ID NO: 17560 - DNA, 17 bp, Arabidopsis thaliana
acaattgttttggttgt

SEQ ID NO: 17561 - DNA, 17 bp, Arabidopsis thaliana
acaatttaaaccgcaac

SEQ ID NO: 17562 - DNA, 17 bp, Arabidopsis thaliana
acaatttacagctccag

SEQ ID NO: 17563 - DNA, 17 bp, Arabidopsis thaliana
acaatttaccgtgggtt

SEQ ID NO: 17564 - DNA, 17 bp, Arabidopsis thaliana
acaatttcaaggggatc

SEQ ID NO: 17565 - DNA, 17 bp, Arabidopsis thaliana
acaatttcagacaagtg

SEQ ID NO: 17566 - DNA, 17 bp, Arabidopsis thaliana
acaatttcgacttcggg

SEQ ID NO: 17567 - DNA, 17 bp, Arabidopsis thaliana
acaatttcgatcgaaaa

SEQ ID NO: 17568 - DNA, 17 bp, Arabidopsis thaliana
acaatttcgggtcaggt

SEQ ID NO: 17569 - DNA, 17 bp, Arabidopsis thaliana
acaatttcgggtcgggt

SEQ ID NO: 17570 - DNA, 17 bp, Arabidopsis thaliana
acaatttcgtccaagac

SEQ ID NO: 17571 - DNA, 17 bp, Arabidopsis thaliana
acaatttgccgattgtt

SEQ ID NO: 17572 - DNA, 17 bp, Arabidopsis thaliana
acaatttgcgagggaat

SEQ ID NO: 17573 - DNA, 17 bp, Arabidopsis thaliana
acaatttgctgcagtgg

SEQ ID NO: 17574 - DNA, 17 bp, Arabidopsis thaliana
acaatttggattgtcgg

SEQ ID NO: 17575 - DNA, 17 bp, Arabidopsis thaliana
acaattttacagtttcg

SEQ ID NO: 17576 - DNA, 17 bp, Arabidopsis thaliana
acaattttaccctcgat

SEQ ID NO: 17577 - DNA, 17 bp, Arabidopsis thaliana
acaattttagcaagtac

SEQ ID NO: 17578 - DNA, 17 bp, Arabidopsis thaliana
acaattttcttggaagc

SEQ ID NO: 17579 - DNA, 17 bp, Arabidopsis thaliana
acaattttgtctgcttg

SEQ ID NO: 17580 - DNA, 17 bp, Arabidopsis thaliana
acaattttgttggagtt

SEQ ID NO: 17581 - DNA, 17 bp, Arabidopsis thaliana
acaatttttctggctta

SEQ ID NO: 17582 - DNA, 17 bp, Arabidopsis thaliana
acacaaaaaattttgag

SEQ ID NO: 17583 - DNA, 17 bp, Arabidopsis thaliana
acacaaaatccagcgga

SEQ ID NO: 17584 - DNA, 17 bp, Arabidopsis thaliana
acacaaacgttgcaacg

SEQ ID NO: 17585 - DNA, 17 bp, Arabidopsis thaliana
acacaaagcttagaggt

SEQ ID NO: 17586 - DNA, 17 bp, Arabidopsis thaliana
acacaaatggaccttgg

SEQ ID NO: 17587 - DNA, 17 bp, Arabidopsis thaliana
acacaaatggtggcttt

SEQ ID NO: 17588 - DNA, 17 bp, Arabidopsis thaliana
acacaacatcctacttt

SEQ ID NO: 17589 - DNA, 17 bp, Arabidopsis thaliana
acacaacatcggggcaa

SEQ ID NO: 17590 - DNA, 17 bp, Arabidopsis thaliana
acacaacatggtcctgt

SEQ ID NO: 17591 - DNA, 17 bp, Arabidopsis thaliana
acacaaccgtcaatgca

SEQ ID NO: 17592 - DNA, 17 bp, Arabidopsis thaliana
acacaacggcaatgtta

SEQ ID NO: 17593 - DNA, 17 bp, Arabidopsis thaliana
acacaactgtgatcacc

SEQ ID NO: 17594 - DNA, 17 bp, Arabidopsis thaliana
acacaactttcacttgc

SEQ ID NO: 17595 - DNA, 17 bp, Arabidopsis thaliana
acacaacttttgaacac

SEQ ID NO: 17596 - DNA, 17 bp, Arabidopsis thaliana
acacaagatcgggttgc

SEQ ID NO: 17597 - DNA, 17 bp, Arabidopsis thaliana
acacaagcacggcggcg

SEQ ID NO: 17598 - DNA, 17 bp, Arabidopsis thaliana
acacaagctggagacgt

SEQ ID NO: 17599 - DNA, 17 bp, Arabidopsis thaliana
acacaaggacttagggc

SEQ ID NO: 17600 - DNA, 17 bp, Arabidopsis thaliana
acacaaggttgagttga

SEQ ID NO: 17601 - DNA, 17 bp, Arabidopsis thaliana
acacaagtctgttagtt

SEQ ID NO: 17602 - DNA, 17 bp, Arabidopsis thaliana
acacaagtgtgactgac

SEQ ID NO: 17603 - DNA, 17 bp, Arabidopsis thaliana
acacaagtttgcagaga

SEQ ID NO: 17604 - DNA, 17 bp, Arabidopsis thaliana
acacaataatcgaggac

SEQ ID NO: 17605 - DNA, 17 bp, Arabidopsis thaliana
acacaatcaagtgaagc

SEQ ID NO: 17606 - DNA, 17 bp, Arabidopsis thaliana
acacaatcccatctggt

SEQ ID NO: 17607 - DNA, 17 bp, Arabidopsis thaliana
acacaatggctgcagtt

SEQ ID NO: 17608 - DNA, 17 bp, Arabidopsis thaliana
acacaatggtgcagcgg

SEQ ID NO: 17609 - DNA, 17 bp, Arabidopsis thaliana
acacaatgtgacatcgg

SEQ ID NO: 17610 - DNA, 17 bp, Arabidopsis thaliana
acacaattggactgggg

SEQ ID NO: 17611 - DNA, 17 bp, Arabidopsis thaliana
acacaatttttgggatc

SEQ ID NO: 17612 - DNA, 17 bp, Arabidopsis thaliana
acacacaaaaccgtcaa

SEQ ID NO: 17613 - DNA, 17 bp, Arabidopsis thaliana
acacacaaacctctgtg

SEQ ID NO: 17614 - DNA, 17 bp, Arabidopsis thaliana
acacacaaacttttcgg

SEQ ID NO: 17615 - DNA, 17 bp, Arabidopsis thaliana
acacacaaagcattgcg

SEQ ID NO: 17616 - DNA, 17 bp, Arabidopsis thaliana
acacacaaagtatggag

SEQ ID NO: 17617 - DNA, 17 bp, Arabidopsis thaliana
acacacaaagtgaccag

SEQ ID NO: 17618 - DNA, 17 bp, Arabidopsis thaliana
acacacaacttttggtc

SEQ ID NO: 17619 - DNA, 17 bp, Arabidopsis thaliana
acacacaagatcgagtt

SEQ ID NO: 17620 - DNA, 17 bp, Arabidopsis thaliana
acacacaagatcgggtt

SEQ ID NO: 17621 - DNA, 17 bp, Arabidopsis thaliana
acacacaaggagttacg

SEQ ID NO: 17622 - DNA, 17 bp, Arabidopsis thaliana
acacacaaggatacagt

SEQ ID NO: 17623 - DNA, 17 bp, Arabidopsis thaliana
acacacaagtgaccaaa

SEQ ID NO: 17624 - DNA, 17 bp, Arabidopsis thaliana
acacacaatcgggaatg

SEQ ID NO: 17625 - DNA, 17 bp, Arabidopsis thaliana
acacacaatctcgttaa

SEQ ID NO: 17626 - DNA, 17 bp, Arabidopsis thaliana
acacacaatgacaccta

SEQ ID NO: 17627 - DNA, 17 bp, Arabidopsis thaliana
acacacaatgagtcgat

SEQ ID NO: 17628 - DNA, 17 bp, Arabidopsis thaliana
acacacaatgagtcgct

SEQ ID NO: 17629 - DNA, 17 bp, Arabidopsis thaliana
acacacaattacacaga

SEQ ID NO: 17630 - DNA, 17 bp, Arabidopsis thaliana
acacacaattatagccg

SEQ ID NO: 17631 - DNA, 17 bp, Arabidopsis thaliana
acacacaattatagttg

SEQ ID NO: 17632 - DNA, 17 bp, Arabidopsis thaliana
acacacaattatctcat

SEQ ID NO: 17633 - DNA, 17 bp, Arabidopsis thaliana
acacacaattccggcgg

SEQ ID NO: 17634 - DNA, 17 bp, Arabidopsis thaliana
acacacaattgtacgag

SEQ ID NO: 17635 - DNA, 17 bp, Arabidopsis thaliana
acacacacacagacccg

SEQ ID NO: 17636 - DNA, 17 bp, Arabidopsis thaliana
acacacacacttagacc

SEQ ID NO: 17637 - DNA, 17 bp, Arabidopsis thaliana
acacacacaggtggtgc

SEQ ID NO: 17638 - DNA, 17 bp, Arabidopsis thaliana
acacacaccacggctat

SEQ ID NO: 17639 - DNA, 17 bp, Arabidopsis thaliana
acacacaccatggctat

SEQ ID NO: 17640 - DNA, 17 bp, Arabidopsis thaliana
acacacacgagatcgtg

SEQ ID NO: 17641 - DNA, 17 bp, Arabidopsis thaliana
acacacacgaggacttc

SEQ ID NO: 17642 - DNA, 17 bp, Arabidopsis thaliana
acacacacgatccgtga

SEQ ID NO: 17643 - DNA, 17 bp, Arabidopsis thaliana
acacacacggggaaact

SEQ ID NO: 17644 - DNA, 17 bp, Arabidopsis thaliana
acacacacgtctgcctg

SEQ ID NO: 17645 - DNA, 17 bp, Arabidopsis thaliana
acacacactaagtttta

SEQ ID NO: 17646 - DNA, 17 bp, Arabidopsis thaliana
acacacactgcactgcg

SEQ ID NO: 17647 - DNA, 17 bp, Arabidopsis thaliana
acacacacttgtgtgtg

SEQ ID NO: 17648 - DNA, 17 bp, Arabidopsis thaliana
acacacagaactgagat

SEQ ID NO: 17649 - DNA, 17 bp, Arabidopsis thaliana
acacacagacaatgaca

SEQ ID NO: 17650 - DNA, 17 bp, Arabidopsis thaliana
acacacagacagttttt

SEQ ID NO: 17651 - DNA, 17 bp, Arabidopsis thaliana
acacacagacccgggtt

SEQ ID NO: 17652 - DNA, 17 bp, Arabidopsis thaliana
acacacagaccggtaga

SEQ ID NO: 17653 - DNA, 17 bp, Arabidopsis thaliana
acacacagatttgaggt

SEQ ID NO: 17654 - DNA, 17 bp, Arabidopsis thaliana
acacacagatttgctac

SEQ ID NO: 17655 - DNA, 17 bp, Arabidopsis thaliana
acacacagcatattagt

SEQ ID NO: 17656 - DNA, 17 bp, Arabidopsis thaliana
acacacagcgacagcaa

SEQ ID NO: 17657 - DNA, 17 bp, Arabidopsis thaliana
acacacagcgaccccag

SEQ ID NO: 17658 - DNA, 17 bp, Arabidopsis thaliana
acacacagcgatgtaca

SEQ ID NO: 17659 - DNA, 17 bp, Arabidopsis thaliana
acacacagctacagcca

SEQ ID NO: 17660 - DNA, 17 bp, Arabidopsis thaliana
acacacagctcatttgg

SEQ ID NO: 17661 - DNA, 17 bp, Arabidopsis thaliana
acacacagggtcttctg

SEQ ID NO: 17662 - DNA, 17 bp, Arabidopsis thaliana
acacacaggtggtgcat

SEQ ID NO: 17663 - DNA, 17 bp, Arabidopsis thaliana
acacacagtccgttgct

SEQ ID NO: 17664 - DNA, 17 bp, Arabidopsis thaliana
acacacagtgtcagagt

SEQ ID NO: 17665 - DNA, 17 bp, Arabidopsis thaliana
acacacagtgtggtggt

SEQ ID NO: 17666 - DNA, 17 bp, Arabidopsis thaliana
acacacagttagttctg

SEQ ID NO: 17667 - DNA, 17 bp, Arabidopsis thaliana
acacacagtttatttct

SEQ ID NO: 17668 - DNA, 17 bp, Arabidopsis thaliana
acacacatattagaccg

SEQ ID NO: 17669 - DNA, 17 bp, Arabidopsis thaliana
acacacatcaagtgcgg

SEQ ID NO: 17670 - DNA, 17 bp, Arabidopsis thaliana
acacacatcatctactt

SEQ ID NO: 17671 - DNA, 17 bp, Arabidopsis thaliana
acacacatccaaggaag

SEQ ID NO: 17672 - DNA, 17 bp, Arabidopsis thaliana
acacacatctatttcgt

SEQ ID NO: 17673 - DNA, 17 bp, Arabidopsis thaliana
acacacatctcatcaca

SEQ ID NO: 17674 - DNA, 17 bp, Arabidopsis thaliana
acacacatctgatcgtt

SEQ ID NO: 17675 - DNA, 17 bp, Arabidopsis thaliana
acacacatcttccagag

SEQ ID NO: 17676 - DNA, 17 bp, Arabidopsis thaliana
acacacatcttctaaag

SEQ ID NO: 17677 - DNA, 17 bp, Arabidopsis thaliana
acacacatgattattcg

SEQ ID NO: 17678 - DNA, 17 bp, Arabidopsis thaliana
acacacatgccaagttt

SEQ ID NO: 17679 - DNA, 17 bp, Arabidopsis thaliana
acacacatgcgaagttt

SEQ ID NO: 17680 - DNA, 17 bp, Arabidopsis thaliana
acacacatggtcaacgg

SEQ ID NO: 17681 - DNA, 17 bp, Arabidopsis thaliana
acacacatgtgtgattc

SEQ ID NO: 17682 - DNA, 17 bp, Arabidopsis thaliana
acacacatgtttgggcc

SEQ ID NO: 17683 - DNA, 17 bp, Arabidopsis thaliana
acacacattcgaccgct

SEQ ID NO: 17684 - DNA, 17 bp, Arabidopsis thaliana
acacacattctgagttc

SEQ ID NO: 17685 - DNA, 17 bp, Arabidopsis thaliana
acacacattctggtgct

SEQ ID NO: 17686 - DNA, 17 bp, Arabidopsis thaliana
acacacattcttcaggt

SEQ ID NO: 17687 - DNA, 17 bp, Arabidopsis thaliana
acacacattggagatgg

SEQ ID NO: 17688 - DNA, 17 bp, Arabidopsis thaliana
acacacattgtcgtgcc

SEQ ID NO: 17689 - DNA, 17 bp, Arabidopsis thaliana
acacacatttcaatgtc

SEQ ID NO: 17690 - DNA, 17 bp, Arabidopsis thaliana
acacacattttcggtgg

SEQ ID NO: 17691 - DNA, 17 bp, Arabidopsis thaliana
acacacattttgaccac

SEQ ID NO: 17692 - DNA, 17 bp, Arabidopsis thaliana
acacaccacagtctcgc

SEQ ID NO: 17693 - DNA, 17 bp, Arabidopsis thaliana
acacaccacagtctcgg

SEQ ID NO: 17694 - DNA, 17 bp, Arabidopsis thaliana
acacaccatttgcagga

SEQ ID NO: 17695 - DNA, 17 bp, Arabidopsis thaliana
acacaccgcccgtcgct

SEQ ID NO: 17696 - DNA, 17 bp, Arabidopsis thaliana
acacacctcgtcagaac

SEQ ID NO: 17697 - DNA, 17 bp, Arabidopsis thaliana
acacacgactactcaga

SEQ ID NO: 17698 - DNA, 17 bp, Arabidopsis thaliana
acacacgactagatggt

SEQ ID NO: 17699 - DNA, 17 bp, Arabidopsis thaliana
acacacgagatctactt

SEQ ID NO: 17700 - DNA, 17 bp, Arabidopsis thaliana
acacacgatctacaaaa

SEQ ID NO: 17701 - DNA, 17 bp, Arabidopsis thaliana
acacacggatttttgaa

SEQ ID NO: 17702 - DNA, 17 bp, Arabidopsis thaliana
acacacggttaggcatg

SEQ ID NO: 17703 - DNA, 17 bp, Arabidopsis thaliana
acacacgtctaaatatg

SEQ ID NO: 17704 - DNA, 17 bp, Arabidopsis thaliana
acacacgtcttcctggg

SEQ ID NO: 17705 - DNA, 17 bp, Arabidopsis thaliana
acacacgtgctacaatg

SEQ ID NO: 17706 - DNA, 17 bp, Arabidopsis thaliana
acacacgttggtttctt

SEQ ID NO: 17707 - DNA, 17 bp, Arabidopsis thaliana
acacactaagtcggatg

SEQ ID NO: 17708 - DNA, 17 bp, Arabidopsis thaliana
acacactcccgccttag

SEQ ID NO: 17709 - DNA, 17 bp, Arabidopsis thaliana
acacactgaaggtctcc

SEQ ID NO: 17710 - DNA, 17 bp, Arabidopsis thaliana
acacactgattccgcat

SEQ ID NO: 17711 - DNA, 17 bp, Arabidopsis thaliana
acacactggtggattct

SEQ ID NO: 17712 - DNA, 17 bp, Arabidopsis thaliana
acacacttctggtgtcg

SEQ ID NO: 17713 - DNA, 17 bp, Arabidopsis thaliana
acacacttggatacgag

SEQ ID NO: 17714 - DNA, 17 bp, Arabidopsis thaliana
acacacttgtgcgggtt

SEQ ID NO: 17715 - DNA, 17 bp, Arabidopsis thaliana
acacacttttaccatcc

SEQ ID NO: 17716 - DNA, 17 bp, Arabidopsis thaliana
acacagaaatactatgg

SEQ ID NO: 17717 - DNA, 17 bp, Arabidopsis thaliana
acacagaagggtctgcg

SEQ ID NO: 17718 - DNA, 17 bp, Arabidopsis thaliana
acacagaatctagactg

SEQ ID NO: 17719 - DNA, 17 bp, Arabidopsis thaliana
acacagacccgggttcg

SEQ ID NO: 17720 - DNA, 17 bp, Arabidopsis thaliana
acacagacctgaaaggc

SEQ ID NO: 17721 - DNA, 17 bp, Arabidopsis thaliana
acacagacgctaacagt

SEQ ID NO: 17722 - DNA, 17 bp, Arabidopsis thaliana
acacagactggcctgaa

SEQ ID NO: 17723 - DNA, 17 bp, Arabidopsis thaliana
acacagagaaagatcgt

SEQ ID NO: 17724 - DNA, 17 bp, Arabidopsis thaliana
acacagataaactttag

SEQ ID NO: 17725 - DNA, 17 bp, Arabidopsis thaliana
acacagatgggatctgg

SEQ ID NO: 17726 - DNA, 17 bp, Arabidopsis thaliana
acacagattagcaggtc

SEQ ID NO: 17727 - DNA, 17 bp, Arabidopsis thaliana
acacagattgtctcccc

SEQ ID NO: 17728 - DNA, 17 bp, Arabidopsis thaliana
acacagatttcggacct

SEQ ID NO: 17729 - DNA, 17 bp, Arabidopsis thaliana
acacagcacttgatttc

SEQ ID NO: 17730 - DNA, 17 bp, Arabidopsis thaliana
acacagcagggtttggt

SEQ ID NO: 17731 - DNA, 17 bp, Arabidopsis thaliana
acacagcagttgtgcgg

SEQ ID NO: 17732 - DNA, 17 bp, Arabidopsis thaliana
acacagcattttagccc

SEQ ID NO: 17733 - DNA, 17 bp, Arabidopsis thaliana
acacagccctttgtcgc

SEQ ID NO: 17734 - DNA, 17 bp, Arabidopsis thaliana
acacagccggcggtgca

SEQ ID NO: 17735 - DNA, 17 bp, Arabidopsis thaliana
acacagccggcgtgacc

SEQ ID NO: 17736 - DNA, 17 bp, Arabidopsis thaliana
acacagcgatttgttgc

SEQ ID NO: 17737 - DNA, 17 bp, Arabidopsis thaliana
acacagcgtgcacttta

SEQ ID NO: 17738 - DNA, 17 bp, Arabidopsis thaliana
acacagcgttaattttc

SEQ ID NO: 17739 - DNA, 17 bp, Arabidopsis thaliana
acacagctgctgcagat

SEQ ID NO: 17740 - DNA, 17 bp, Arabidopsis thaliana
acacagcttccaactcg

SEQ ID NO: 17741 - DNA, 17 bp, Arabidopsis thaliana
acacagctttgcattat

SEQ ID NO: 17742 - DNA, 17 bp, Arabidopsis thaliana
acacaggaaatgagaac

SEQ ID NO: 17743 - DNA, 17 bp, Arabidopsis thaliana
acacaggaatcgccatg

SEQ ID NO: 17744 - DNA, 17 bp, Arabidopsis thaliana
acacaggactgtctcta

SEQ ID NO: 17745 - DNA, 17 bp, Arabidopsis thaliana
acacaggatcttctctc

SEQ ID NO: 17746 - DNA, 17 bp, Arabidopsis thaliana
acacaggatgaggatac

SEQ ID NO: 17747 - DNA, 17 bp, Arabidopsis thaliana
acacaggcaaggcgaat

SEQ ID NO: 17748 - DNA, 17 bp, Arabidopsis thaliana
acacagggactcacttg

SEQ ID NO: 17749 - DNA, 17 bp, Arabidopsis thaliana
acacagggtccgaatgg

SEQ ID NO: 17750 - DNA, 17 bp, Arabidopsis thaliana
acacagggtcgctgtac

SEQ ID NO: 17751 - DNA, 17 bp, Arabidopsis thaliana
acacaggtactggtgac

SEQ ID NO: 17752 - DNA, 17 bp, Arabidopsis thaliana
acacaggtcgtctttgg

SEQ ID NO: 17753 - DNA, 17 bp, Arabidopsis thaliana
acacaggtctccaaggt

SEQ ID NO: 17754 - DNA, 17 bp, Arabidopsis thaliana
acacaggtggtccatgg

SEQ ID NO: 17755 - DNA, 17 bp, Arabidopsis thaliana
acacaggtggtgcaggc

SEQ ID NO: 17756 - DNA, 17 bp, Arabidopsis thaliana
acacaggtggtgcaggg

SEQ ID NO: 17757 - DNA, 17 bp, Arabidopsis thaliana
acacaggtggtgcatgg

SEQ ID NO: 17758 - DNA, 17 bp, Arabidopsis thaliana
acacaggttcaaaacta

SEQ ID NO: 17759 - DNA, 17 bp, Arabidopsis thaliana
acacaggtttaaaatag

SEQ ID NO: 17760 - DNA, 17 bp, Arabidopsis thaliana
acacaggtttaaaatcg

SEQ ID NO: 17761 - DNA, 17 bp, Arabidopsis thaliana
acacaggtttaaaatgg

SEQ ID NO: 17762 - DNA, 17 bp, Arabidopsis thaliana
acacaggtttaaattgg

SEQ ID NO: 17763 - DNA, 17 bp, Arabidopsis thaliana
acacaggtttaaatttg

SEQ ID NO: 17764 - DNA, 17 bp, Arabidopsis thaliana
acacaggttttttcggg

SEQ ID NO: 17765 - DNA, 17 bp, Arabidopsis thaliana
acacagtaccgtttcgg

SEQ ID NO: 17766 - DNA, 17 bp, Arabidopsis thaliana
acacagtctttctgcgt

SEQ ID NO: 17767 - DNA, 17 bp, Arabidopsis thaliana
acacagtgcgtcacaaa

SEQ ID NO: 17768 - DNA, 17 bp, Arabidopsis thaliana
acacagtggactgtgtg

SEQ ID NO: 17769 - DNA, 17 bp, Arabidopsis thaliana
acacagtggctcgttca

SEQ ID NO: 17770 - DNA, 17 bp, Arabidopsis thaliana
acacagtgtagcgcagg

SEQ ID NO: 17771 - DNA, 17 bp, Arabidopsis thaliana
acacagttaagcgtgct

SEQ ID NO: 17772 - DNA, 17 bp, Arabidopsis thaliana
acacagttaggttgggt

SEQ ID NO: 17773 - DNA, 17 bp, Arabidopsis thaliana
acacagttggtgcatgg

SEQ ID NO: 17774 - DNA, 17 bp, Arabidopsis thaliana
acacagtttcaaggcat

SEQ ID NO: 17775 - DNA, 17 bp, Arabidopsis thaliana
acacagtttgactttag

SEQ ID NO: 17776 - DNA, 17 bp, Arabidopsis thaliana
acacagtttgacttttg

SEQ ID NO: 17777 - DNA, 17 bp, Arabidopsis thaliana
acacagttttgccctcg

SEQ ID NO: 17778 - DNA, 17 bp, Arabidopsis thaliana
acacagtttttgccaat

SEQ ID NO: 17779 - DNA, 17 bp, Arabidopsis thaliana
acacatactgaaacttg

SEQ ID NO: 17780 - DNA, 17 bp, Arabidopsis thaliana
acacatagctctactta

SEQ ID NO: 17781 - DNA, 17 bp, Arabidopsis thaliana
acacatatctcttgcga

SEQ ID NO: 17782 - DNA, 17 bp, Arabidopsis thaliana
acacatatggcccatct

SEQ ID NO: 17783 - DNA, 17 bp, Arabidopsis thaliana
acacatatgtcaggagc

SEQ ID NO: 17784 - DNA, 17 bp, Arabidopsis thaliana
acacatcaacatatgag

SEQ ID NO: 17785 - DNA, 17 bp, Arabidopsis thaliana
acacatcaacgtatttt

SEQ ID NO: 17786 - DNA, 17 bp, Arabidopsis thaliana
acacatcactaagtcta

SEQ ID NO: 17787 - DNA, 17 bp, Arabidopsis thaliana
acacatccactactttg

SEQ ID NO: 17788 - DNA, 17 bp, Arabidopsis thaliana
acacatccgagccaagt

SEQ ID NO: 17789 - DNA, 17 bp, Arabidopsis thaliana
acacatccgttaggcgg

SEQ ID NO: 17790 - DNA, 17 bp, Arabidopsis thaliana
acacatccgttccttgc

SEQ ID NO: 17791 - DNA, 17 bp, Arabidopsis thaliana
acacatcctgaaactac

SEQ ID NO: 17792 - DNA, 17 bp, Arabidopsis thaliana
acacatccttttgtcta

SEQ ID NO: 17793 - DNA, 17 bp, Arabidopsis thaliana
acacatcggttcttgaa

SEQ ID NO: 17794 - DNA, 17 bp, Arabidopsis thaliana
acacatctctcagacgc

SEQ ID NO: 17795 - DNA, 17 bp, Arabidopsis thaliana
acacatgcgtccagatc

SEQ ID NO: 17796 - DNA, 17 bp, Arabidopsis thaliana
acacatggcaacatctg

SEQ ID NO: 17797 - DNA, 17 bp, Arabidopsis thaliana
acacatgtctacatttg

SEQ ID NO: 17798 - DNA, 17 bp, Arabidopsis thaliana
acacatgtgtgattcgg

SEQ ID NO: 17799 - DNA, 17 bp, Arabidopsis thaliana
acacatgtgtggcaatg

SEQ ID NO: 17800 - DNA, 17 bp, Arabidopsis thaliana
acacattagtttgggcc

SEQ ID NO: 17801 - DNA, 17 bp, Arabidopsis thaliana
acacattctcacggaaa

SEQ ID NO: 17802 - DNA, 17 bp, Arabidopsis thaliana
acacattgacggtggtc

SEQ ID NO: 17803 - DNA, 17 bp, Arabidopsis thaliana
acacattgacggtggtg

SEQ ID NO: 17804 - DNA, 17 bp, Arabidopsis thaliana
acacattgatggaaaac

SEQ ID NO: 17805 - DNA, 17 bp, Arabidopsis thaliana
acacattgctacgagct

SEQ ID NO: 17806 - DNA, 17 bp, Arabidopsis thaliana
acacatttaagatcttg

SEQ ID NO: 17807 - DNA, 17 bp, Arabidopsis thaliana
acacatttcagggtcgc

SEQ ID NO: 17808 - DNA, 17 bp, Arabidopsis thaliana
acacatttcttgtgccg

SEQ ID NO: 17809 - DNA, 17 bp, Arabidopsis thaliana
acacatttctttctggt

SEQ ID NO: 17810 - DNA, 17 bp, Arabidopsis thaliana
acacatttggcatggtg

SEQ ID NO: 17811 - DNA, 17 bp, Arabidopsis thaliana
acacattttacgggact

SEQ ID NO: 17812 - DNA, 17 bp, Arabidopsis thaliana
acacatttttcgccaat

SEQ ID NO: 17813 - DNA, 17 bp, Arabidopsis thaliana
acacatttttcgccact

SEQ ID NO: 17814 - DNA, 17 bp, Arabidopsis thaliana
acacattttttgacagt

SEQ ID NO: 17815 - DNA, 17 bp, Arabidopsis thaliana
acaccaaaatctccgta

SEQ ID NO: 17816 - DNA, 17 bp, Arabidopsis thaliana
acaccaaaatggtgttg

SEQ ID NO: 17817 - DNA, 17 bp, Arabidopsis thaliana
acaccaacaggtttggc

SEQ ID NO: 17818 - DNA, 17 bp, Arabidopsis thaliana
acaccaactgggtgtcg

SEQ ID NO: 17819 - DNA, 17 bp, Arabidopsis thaliana
acaccaaggatgacttg

SEQ ID NO: 17820 - DNA, 17 bp, Arabidopsis thaliana
acaccaagtactcctcc

SEQ ID NO: 17821 - DNA, 17 bp, Arabidopsis thaliana
acaccaatccatcccga

SEQ ID NO: 17822 - DNA, 17 bp, Arabidopsis thaliana
acaccaattctcctatc

SEQ ID NO: 17823 - DNA, 17 bp, Arabidopsis thaliana
acaccaccaggatctga

SEQ ID NO: 17824 - DNA, 17 bp, Arabidopsis thaliana
acaccacctgacctcac

SEQ ID NO: 17825 - DNA, 17 bp, Arabidopsis thaliana
acaccacgcgacgtgcg

SEQ ID NO: 17826 - DNA, 17 bp, Arabidopsis thaliana
acaccacggctattttg

SEQ ID NO: 17827 - DNA, 17 bp, Arabidopsis thaliana
acaccacgtcaagtttg

SEQ ID NO: 17828 - DNA, 17 bp, Arabidopsis thaliana
acaccactgtacggatg

SEQ ID NO: 17829 - DNA, 17 bp, Arabidopsis thaliana
acaccagagcgcattgg

SEQ ID NO: 17830 - DNA, 17 bp, Arabidopsis thaliana
acaccagatcttacagg

SEQ ID NO: 17831 - DNA, 17 bp, Arabidopsis thaliana
acaccagatttgtaata

SEQ ID NO: 17832 - DNA, 17 bp, Arabidopsis thaliana
acaccagatttgttaac

SEQ ID NO: 17833 - DNA, 17 bp, Arabidopsis thaliana
acaccaggacagtgatg

SEQ ID NO: 17834 - DNA, 17 bp, Arabidopsis thaliana
acaccaggagtggagcc

SEQ ID NO: 17835 - DNA, 17 bp, Arabidopsis thaliana
acaccaggctacttttt

SEQ ID NO: 17836 - DNA, 17 bp, Arabidopsis thaliana
acaccaggctctatttt

SEQ ID NO: 17837 - DNA, 17 bp, Arabidopsis thaliana
acaccagggttgaactt

SEQ ID NO: 17838 - DNA, 17 bp, Arabidopsis thaliana
acaccaggtggatgagc

SEQ ID NO: 17839 - DNA, 17 bp, Arabidopsis thaliana
acaccaggttaaattca

SEQ ID NO: 17840 - DNA, 17 bp, Arabidopsis thaliana
acaccaggttagattca

SEQ ID NO: 17841 - DNA, 17 bp, Arabidopsis thaliana
acaccagtagttttgct

SEQ ID NO: 17842 - DNA, 17 bp, Arabidopsis thaliana
acaccagtgaatgccac

SEQ ID NO: 17843 - DNA, 17 bp, Arabidopsis thaliana
acaccagtggcgaaggc

SEQ ID NO: 17844 - DNA, 17 bp, Arabidopsis thaliana
acaccagttggctattg

SEQ ID NO: 17845 - DNA, 17 bp, Arabidopsis thaliana
acaccatccgtggttac

SEQ ID NO: 17846 - DNA, 17 bp, Arabidopsis thaliana
acaccatcgacttagtg

SEQ ID NO: 17847 - DNA, 17 bp, Arabidopsis thaliana
acaccatcgagacagat

SEQ ID NO: 17848 - DNA, 17 bp, Arabidopsis thaliana
acaccatcgcagtccca

SEQ ID NO: 17849 - DNA, 17 bp, Arabidopsis thaliana
acaccatcttcaccagg

SEQ ID NO: 17850 - DNA, 17 bp, Arabidopsis thaliana
acaccatcttcactagg

SEQ ID NO: 17851 - DNA, 17 bp, Arabidopsis thaliana
acaccatctttttgcgt

SEQ ID NO: 17852 - DNA, 17 bp, Arabidopsis thaliana
acaccatggacaaccag

SEQ ID NO: 17853 - DNA, 17 bp, Arabidopsis thaliana
acaccatggctattttg

SEQ ID NO: 17854 - DNA, 17 bp, Arabidopsis thaliana
acaccatgtaaggctgt

SEQ ID NO: 17855 - DNA, 17 bp, Arabidopsis thaliana
acaccattaccacttta

SEQ ID NO: 17856 - DNA, 17 bp, Arabidopsis thaliana
acaccattctcctttct

SEQ ID NO: 17857 - DNA, 17 bp, Arabidopsis thaliana
acaccattgctgctaag

SEQ ID NO: 17858 - DNA, 17 bp, Arabidopsis thaliana
acaccattgtacggatg

SEQ ID NO: 17859 - DNA, 17 bp, Arabidopsis thaliana
acaccatttgtagacaa

SEQ ID NO: 17860 - DNA, 17 bp, Arabidopsis thaliana
acacccaaattagtgat

SEQ ID NO: 17861 - DNA, 17 bp, Arabidopsis thaliana
acacccaggcagacgtg

SEQ ID NO: 17862 - DNA, 17 bp, Arabidopsis thaliana
acacccatttggattga

SEQ ID NO: 17863 - DNA, 17 bp, Arabidopsis thaliana
acacccgccgagtgata

SEQ ID NO: 17864 - DNA, 17 bp, Arabidopsis thaliana
acacccggacttttggg

SEQ ID NO: 17865 - DNA, 17 bp, Arabidopsis thaliana
acacccggccggttcaa

SEQ ID NO: 17866 - DNA, 17 bp, Arabidopsis thaliana
acacccggccgtgagtc

SEQ ID NO: 17867 - DNA, 17 bp, Arabidopsis thaliana
acacccgggttcgtttc

SEQ ID NO: 17868 - DNA, 17 bp, Arabidopsis thaliana
acaccctcgacacagct

SEQ ID NO: 17869 - DNA, 17 bp, Arabidopsis thaliana
acaccctttgtgggttc

SEQ ID NO: 17870 - DNA, 17 bp, Arabidopsis thaliana
acaccgacgcctcgtga

SEQ ID NO: 17871 - DNA, 17 bp, Arabidopsis thaliana
acaccgactgtggctag

SEQ ID NO: 17872 - DNA, 17 bp, Arabidopsis thaliana
acaccgaggcagaagca

SEQ ID NO: 17873 - DNA, 17 bp, Arabidopsis thaliana
acaccgatagccagaaa

SEQ ID NO: 17874 - DNA, 17 bp, Arabidopsis thaliana
acaccgatgacgtatcc

SEQ ID NO: 17875 - DNA, 17 bp, Arabidopsis thaliana
acaccgcaaaacgcagt

SEQ ID NO: 17876 - DNA, 17 bp, Arabidopsis thaliana
acaccgcactctcagat

SEQ ID NO: 17877 - DNA, 17 bp, Arabidopsis thaliana
acaccgcaggatttttg

SEQ ID NO: 17878 - DNA, 17 bp, Arabidopsis thaliana
acaccgcattggaccgt

SEQ ID NO: 17879 - DNA, 17 bp, Arabidopsis thaliana
acaccgcccgtcacact

SEQ ID NO: 17880 - DNA, 17 bp, Arabidopsis thaliana
acaccgcccgtcgctac

SEQ ID NO: 17881 - DNA, 17 bp, Arabidopsis thaliana
acaccgcccgtcgctcc

SEQ ID NO: 17882 - DNA, 17 bp, Arabidopsis thaliana
acaccgcccttcgctcc

SEQ ID NO: 17883 - DNA, 17 bp, Arabidopsis thaliana
acaccgcctaacggatg

SEQ ID NO: 17884 - DNA, 17 bp, Arabidopsis thaliana
acaccgcctgtcacact

SEQ ID NO: 17885 - DNA, 17 bp, Arabidopsis thaliana
acaccgcggagacaatt

SEQ ID NO: 17886 - DNA, 17 bp, Arabidopsis thaliana
acaccgcggggacaatt

SEQ ID NO: 17887 - DNA, 17 bp, Arabidopsis thaliana
acaccgcgggttaaatt

SEQ ID NO: 17888 - DNA, 17 bp, Arabidopsis thaliana
acaccgcggtgacaatt

SEQ ID NO: 17889 - DNA, 17 bp, Arabidopsis thaliana
acaccgctatctgtaca

SEQ ID NO: 17890 - DNA, 17 bp, Arabidopsis thaliana
acaccgctccaagcctc

SEQ ID NO: 17891 - DNA, 17 bp, Arabidopsis thaliana
acaccgctcgtcgctcc

SEQ ID NO: 17892 - DNA, 17 bp, Arabidopsis thaliana
acaccggattggatgga

SEQ ID NO: 17893 - DNA, 17 bp, Arabidopsis thaliana
acaccggattggattga

SEQ ID NO: 17894 - DNA, 17 bp, Arabidopsis thaliana
acaccggcctgcccccc

SEQ ID NO: 17895 - DNA, 17 bp, Arabidopsis thaliana
acaccggtggtcggctc

SEQ ID NO: 17896 - DNA, 17 bp, Arabidopsis thaliana
acaccgtcgagtgatga

SEQ ID NO: 17897 - DNA, 17 bp, Arabidopsis thaliana
acaccgtcgctcctacc

SEQ ID NO: 17898 - DNA, 17 bp, Arabidopsis thaliana
acaccgtgggactattt

SEQ ID NO: 17899 - DNA, 17 bp, Arabidopsis thaliana
acaccgtgtgatcgcca

SEQ ID NO: 17900 - DNA, 17 bp, Arabidopsis thaliana
acaccgttagtctattg

SEQ ID NO: 17901 - DNA, 17 bp, Arabidopsis thaliana
acaccgttcttccgtgg

SEQ ID NO: 17902 - DNA, 17 bp, Arabidopsis thaliana
acaccgtttttccgtgg

SEQ ID NO: 17903 - DNA, 17 bp, Arabidopsis thaliana
acacctacgtcaaattt

SEQ ID NO: 17904 - DNA, 17 bp, Arabidopsis thaliana
acacctagacgaggggg

SEQ ID NO: 17905 - DNA, 17 bp, Arabidopsis thaliana
acacctagccggttgtc

SEQ ID NO: 17906 - DNA, 17 bp, Arabidopsis thaliana
acacctatgtggctcat

SEQ ID NO: 17907 - DNA, 17 bp, Arabidopsis thaliana
acacctatgttagtagc

SEQ ID NO: 17908 - DNA, 17 bp, Arabidopsis thaliana
acacctccactggctct

SEQ ID NO: 17909 - DNA, 17 bp, Arabidopsis thaliana
acacctccatctgggag

SEQ ID NO: 17910 - DNA, 17 bp, Arabidopsis thaliana
acacctcctctgcttgc

SEQ ID NO: 17911 - DNA, 17 bp, Arabidopsis thaliana
acacctcttcactcgtg

SEQ ID NO: 17912 - DNA, 17 bp, Arabidopsis thaliana
acacctgacctccctcc

SEQ ID NO: 17913 - DNA, 17 bp, Arabidopsis thaliana
acacctgacggcaattt

SEQ ID NO: 17914 - DNA, 17 bp, Arabidopsis thaliana
acacctgacggcacttt

SEQ ID NO: 17915 - DNA, 17 bp, Arabidopsis thaliana
acacctgaggattatgg

SEQ ID NO: 17916 - DNA, 17 bp, Arabidopsis thaliana
acacctgatcctgagga

SEQ ID NO: 17917 - DNA, 17 bp, Arabidopsis thaliana
acacctgatcgtttgac

SEQ ID NO: 17918 - DNA, 17 bp, Arabidopsis thaliana
acacctgcacttttccg

SEQ ID NO: 17919 - DNA, 17 bp, Arabidopsis thaliana
acacctgcagctctatc

SEQ ID NO: 17920 - DNA, 17 bp, Arabidopsis thaliana
acacctgcctacttaga

SEQ ID NO: 17921 - DNA, 17 bp, Arabidopsis thaliana
acacctgtagattggca

SEQ ID NO: 17922 - DNA, 17 bp, Arabidopsis thaliana
acaccttcaaaggatca

SEQ ID NO: 17923 - DNA, 17 bp, Arabidopsis thaliana
acaccttcaaggtaaac

SEQ ID NO: 17924 - DNA, 17 bp, Arabidopsis thaliana
acaccttcagggtgttg

SEQ ID NO: 17925 - DNA, 17 bp, Arabidopsis thaliana
acaccttcgatgtcggc

SEQ ID NO: 17926 - DNA, 17 bp, Arabidopsis thaliana
acaccttctgggtgcgg

SEQ ID NO: 17927 - DNA, 17 bp, Arabidopsis thaliana
acaccttgatttggttt

SEQ ID NO: 17928 - DNA, 17 bp, Arabidopsis thaliana
acaccttggccgacagg

SEQ ID NO: 17929 - DNA, 17 bp, Arabidopsis thaliana
acacctttggcaaattt

SEQ ID NO: 17930 - DNA, 17 bp, Arabidopsis thaliana
acacctttgtcgctaag

SEQ ID NO: 17931 - DNA, 17 bp, Arabidopsis thaliana
acaccttttctcgatcg

SEQ ID NO: 17932 - DNA, 17 bp, Arabidopsis thaliana
acacctttttggggttt

SEQ ID NO: 17933 - DNA, 17 bp, Arabidopsis thaliana
acaccttttttcttacg

SEQ ID NO: 17934 - DNA, 17 bp, Arabidopsis thaliana
acacgaaaaacttgtcc

SEQ ID NO: 17935 - DNA, 17 bp, Arabidopsis thaliana
acacgaaaagattccga

SEQ ID NO: 17936 - DNA, 17 bp, Arabidopsis thaliana
acacgaacaaggttctc

SEQ ID NO: 17937 - DNA, 17 bp, Arabidopsis thaliana
acacgaacttggtgaca

SEQ ID NO: 17938 - DNA, 17 bp, Arabidopsis thaliana
acacgaagcccatctcg

SEQ ID NO: 17939 - DNA, 17 bp, Arabidopsis thaliana
acacgaatccgcagacg

SEQ ID NO: 17940 - DNA, 17 bp, Arabidopsis thaliana
acacgaatcctacttgg

SEQ ID NO: 17941 - DNA, 17 bp, Arabidopsis thaliana
acacgaccaagtgttgt

SEQ ID NO: 17942 - DNA, 17 bp, Arabidopsis thaliana
acacgacgaacctccgc

SEQ ID NO: 17943 - DNA, 17 bp, Arabidopsis thaliana
acacgacgcggattacg

SEQ ID NO: 17944 - DNA, 17 bp, Arabidopsis thaliana
acacgactactcagatg

SEQ ID NO: 17945 - DNA, 17 bp, Arabidopsis thaliana
acacgactaggctacaa

SEQ ID NO: 17946 - DNA, 17 bp, Arabidopsis thaliana
acacgactctgaggcgg

SEQ ID NO: 17947 - DNA, 17 bp, Arabidopsis thaliana
acacgactctgagtcgg

SEQ ID NO: 17948 - DNA, 17 bp, Arabidopsis thaliana
acacgactgtggagcga

SEQ ID NO: 17949 - DNA, 17 bp, Arabidopsis thaliana
acacgagactttaacca

SEQ ID NO: 17950 - DNA, 17 bp, Arabidopsis thaliana
acacgagatcgtgctgc

SEQ ID NO: 17951 - DNA, 17 bp, Arabidopsis thaliana
acacgaggacttcccgg

SEQ ID NO: 17952 - DNA, 17 bp, Arabidopsis thaliana
acacgaggcaagtatcc

SEQ ID NO: 17953 - DNA, 17 bp, Arabidopsis thaliana
acacgagggcacgtctg

SEQ ID NO: 17954 - DNA, 17 bp, Arabidopsis thaliana
acacgagtttttcatac

SEQ ID NO: 17955 - DNA, 17 bp, Arabidopsis thaliana
acacgatccaggtaaca

SEQ ID NO: 17956 - DNA, 17 bp, Arabidopsis thaliana
acacgatccgtgaagct

SEQ ID NO: 17957 - DNA, 17 bp, Arabidopsis thaliana
acacgatctacagcaga

SEQ ID NO: 17958 - DNA, 17 bp, Arabidopsis thaliana
acacgattggtcagcat

SEQ ID NO: 17959 - DNA, 17 bp, Arabidopsis thaliana
acacgattggtcagcgt

SEQ ID NO: 17960 - DNA, 17 bp, Arabidopsis thaliana
acacgcatcctgtagat

SEQ ID NO: 17961 - DNA, 17 bp, Arabidopsis thaliana
acacgcatgtctgttgc

SEQ ID NO: 17962 - DNA, 17 bp, Arabidopsis thaliana
acacgcatttgcctcag

SEQ ID NO: 17963 - DNA, 17 bp, Arabidopsis thaliana
acacgccatggaggacc

SEQ ID NO: 17964 - DNA, 17 bp, Arabidopsis thaliana
acacgcccattctcttc

SEQ ID NO: 17965 - DNA, 17 bp, Arabidopsis thaliana
acacgccggtgtgggtg

SEQ ID NO: 17966 - DNA, 17 bp, Arabidopsis thaliana
acacgccgtggccaagt

SEQ ID NO: 17967 - DNA, 17 bp, Arabidopsis thaliana
acacgcgatgatgaact

SEQ ID NO: 17968 - DNA, 17 bp, Arabidopsis thaliana
acacgcggagacactgt

SEQ ID NO: 17969 - DNA, 17 bp, Arabidopsis thaliana
acacgcgggcctaatgt

SEQ ID NO: 17970 - DNA, 17 bp, Arabidopsis thaliana
acacgctaacttgtggt

SEQ ID NO: 17971 - DNA, 17 bp, Arabidopsis thaliana
acacgctcaaggtgtac

SEQ ID NO: 17972 - DNA, 17 bp, Arabidopsis thaliana
acacgctggtctaaatc

SEQ ID NO: 17973 - DNA, 17 bp, Arabidopsis thaliana
acacgcttcctttagtt

SEQ ID NO: 17974 - DNA, 17 bp, Arabidopsis thaliana
acacggaaaaaagtttg

SEQ ID NO: 17975 - DNA, 17 bp, Arabidopsis thaliana
acacggaagggctatgt

SEQ ID NO: 17976 - DNA, 17 bp, Arabidopsis thaliana
acacggaatcgagagct

SEQ ID NO: 17977 - DNA, 17 bp, Arabidopsis thaliana
acacggaatcgggagct

SEQ ID NO: 17978 - DNA, 17 bp, Arabidopsis thaliana
acacggaccaaggagtc

SEQ ID NO: 17979 - DNA, 17 bp, Arabidopsis thaliana
acacggactctatgggc

SEQ ID NO: 17980 - DNA, 17 bp, Arabidopsis thaliana
acacggacttgccttgg

SEQ ID NO: 17981 - DNA, 17 bp, Arabidopsis thaliana
acacggactttggctac

SEQ ID NO: 17982 - DNA, 17 bp, Arabidopsis thaliana
acacggagaacagcaaa

SEQ ID NO: 17983 - DNA, 17 bp, Arabidopsis thaliana
acacggatgtgtttcgt

SEQ ID NO: 17984 - DNA, 17 bp, Arabidopsis thaliana
acacggcaatcgccaac

SEQ ID NO: 17985 - DNA, 17 bp, Arabidopsis thaliana
acacggccagagggtgt

SEQ ID NO: 17986 - DNA, 17 bp, Arabidopsis thaliana
acacggcccagactcct

SEQ ID NO: 17987 - DNA, 17 bp, Arabidopsis thaliana
acacggccgttgatcct

SEQ ID NO: 17988 - DNA, 17 bp, Arabidopsis thaliana
acacggctatgttcacc

SEQ ID NO: 17989 - DNA, 17 bp, Arabidopsis thaliana
acacggctccgacgatg

SEQ ID NO: 17990 - DNA, 17 bp, Arabidopsis thaliana
acacggctctcggcttt

SEQ ID NO: 17991 - DNA, 17 bp, Arabidopsis thaliana
acacggctttcacatgg

SEQ ID NO: 17992 - DNA, 17 bp, Arabidopsis thaliana
acacgggaaagctgtat

SEQ ID NO: 17993 - DNA, 17 bp, Arabidopsis thaliana
acacgggacaccacgat

SEQ ID NO: 17994 - DNA, 17 bp, Arabidopsis thaliana
acacgggacatagattt

SEQ ID NO: 17995 - DNA, 17 bp, Arabidopsis thaliana
acacgggacgggttggc

SEQ ID NO: 17996 - DNA, 17 bp, Arabidopsis thaliana
acacgggaggactgtat

SEQ ID NO: 17997 - DNA, 17 bp, Arabidopsis thaliana
acacgggagggctgtat

SEQ ID NO: 17998 - DNA, 17 bp, Arabidopsis thaliana
acacgggattgtgatat

SEQ ID NO: 17999 - DNA, 17 bp, Arabidopsis thaliana
acacggggaaacttacc

SEQ ID NO: 18000 - DNA, 17 bp, Arabidopsis thaliana
acacggggaaacttgcc

SEQ ID NO: 18001 - DNA, 17 bp, Arabidopsis thaliana
acacggggaacttacca

SEQ ID NO: 18002 - DNA, 17 bp, Arabidopsis thaliana
acacgggtaaacttacc

SEQ ID NO: 18003 - DNA, 17 bp, Arabidopsis thaliana
acacgggttcaaatcct

SEQ ID NO: 18004 - DNA, 17 bp, Arabidopsis thaliana
acacgggttcgattccc

SEQ ID NO: 18005 - DNA, 17 bp, Arabidopsis thaliana
acacggtcatttccgca

SEQ ID NO: 18006 - DNA, 17 bp, Arabidopsis thaliana
acacggtcccacgtctg

SEQ ID NO: 18007 - DNA, 17 bp, Arabidopsis thaliana
acacggtcgccggacgc

SEQ ID NO: 18008 - DNA, 17 bp, Arabidopsis thaliana
acacggtgcctgcagac

SEQ ID NO: 18009 - DNA, 17 bp, Arabidopsis thaliana
acacggtgcctgtagac

SEQ ID NO: 18010 - DNA, 17 bp, Arabidopsis thaliana
acacggttccaacaatt

SEQ ID NO: 18011 - DNA, 17 bp, Arabidopsis thaliana
acacggttccgacaatc

SEQ ID NO: 18012 - DNA, 17 bp, Arabidopsis thaliana
acacggttgaactttgt

SEQ ID NO: 18013 - DNA, 17 bp, Arabidopsis thaliana
acacggttgactgtacg

SEQ ID NO: 18014 - DNA, 17 bp, Arabidopsis thaliana
acacggtttctgttaaa

SEQ ID NO: 18015 - DNA, 17 bp, Arabidopsis thaliana
acacggtttttggtctg

SEQ ID NO: 18016 - DNA, 17 bp, Arabidopsis thaliana
acacgtaatctccaaag

SEQ ID NO: 18017 - DNA, 17 bp, Arabidopsis thaliana
acacgtacgttctttgg

SEQ ID NO: 18018 - DNA, 17 bp, Arabidopsis thaliana
acacgtagtcggtaatc

SEQ ID NO: 18019 - DNA, 17 bp, Arabidopsis thaliana
acacgtatgtgcggatc

SEQ ID NO: 18020 - DNA, 17 bp, Arabidopsis thaliana
acacgtcagatgatact

SEQ ID NO: 18021 - DNA, 17 bp, Arabidopsis thaliana
acacgtcagcatatggg

SEQ ID NO: 18022 - DNA, 17 bp, Arabidopsis thaliana
acacgtcaggggttccg

SEQ ID NO: 18023 - DNA, 17 bp, Arabidopsis thaliana
acacgtcctcagcgacg

SEQ ID NO: 18024 - DNA, 17 bp, Arabidopsis thaliana
acacgtctgcctgggtg

SEQ ID NO: 18025 - DNA, 17 bp, Arabidopsis thaliana
acacgtgaacaatgcgg

SEQ ID NO: 18026 - DNA, 17 bp, Arabidopsis thaliana
acacgtgaccagaaaca

SEQ ID NO: 18027 - DNA, 17 bp, Arabidopsis thaliana
acacgtgaggtcacggt

SEQ ID NO: 18028 - DNA, 17 bp, Arabidopsis thaliana
acacgtgatctgtctgc

SEQ ID NO: 18029 - DNA, 17 bp, Arabidopsis thaliana
acacgtgcctttgggag

SEQ ID NO: 18030 - DNA, 17 bp, Arabidopsis thaliana
acacgtgctacaatggc

SEQ ID NO: 18031 - DNA, 17 bp, Arabidopsis thaliana
acacgtgctgagctcta

SEQ ID NO: 18032 - DNA, 17 bp, Arabidopsis thaliana
acacgtggcatgggtgt

SEQ ID NO: 18033 - DNA, 17 bp, Arabidopsis thaliana
acacgtggcatgtgcgg

SEQ ID NO: 18034 - DNA, 17 bp, Arabidopsis thaliana
acacgtggccataaacg

SEQ ID NO: 18035 - DNA, 17 bp, Arabidopsis thaliana
acacgtggtcccagttc

SEQ ID NO: 18036 - DNA, 17 bp, Arabidopsis thaliana
acacgtgtcaaaatcta

SEQ ID NO: 18037 - DNA, 17 bp, Arabidopsis thaliana
acacgtgtcaacatctg

SEQ ID NO: 18038 - DNA, 17 bp, Arabidopsis thaliana
acacgtgtcatcttagt

SEQ ID NO: 18039 - DNA, 17 bp, Arabidopsis thaliana
acacgtgtcggctctta

SEQ ID NO: 18040 - DNA, 17 bp, Arabidopsis thaliana
acacgtgtcggctgctt

SEQ ID NO: 18041 - DNA, 17 bp, Arabidopsis thaliana
acacgtgtgtgagttgt

SEQ ID NO: 18042 - DNA, 17 bp, Arabidopsis thaliana
acacgttatcagcacga

SEQ ID NO: 18043 - DNA, 17 bp, Arabidopsis thaliana
acacgttatcaggacgc

SEQ ID NO: 18044 - DNA, 17 bp, Arabidopsis thaliana
acacgttcagtggaatg

SEQ ID NO: 18045 - DNA, 17 bp, Arabidopsis thaliana
acacgttcatcggaaat

SEQ ID NO: 18046 - DNA, 17 bp, Arabidopsis thaliana
acacgttgatgattcta

SEQ ID NO: 18047 - DNA, 17 bp, Arabidopsis thaliana
acacgttggacttgcca

SEQ ID NO: 18048 - DNA, 17 bp, Arabidopsis thaliana
acacgttgggagagatt

SEQ ID NO: 18049 - DNA, 17 bp, Arabidopsis thaliana
acacgttgggtgaagta

SEQ ID NO: 18050 - DNA, 17 bp, Arabidopsis thaliana
acacgttggtccttgat

SEQ ID NO: 18051 - DNA, 17 bp, Arabidopsis thaliana
acacgttgtgatgattg

SEQ ID NO: 18052 - DNA, 17 bp, Arabidopsis thaliana
acacgtttattatggct

SEQ ID NO: 18053 - DNA, 17 bp, Arabidopsis thaliana
acacgtttgattgccag

SEQ ID NO: 18054 - DNA, 17 bp, Arabidopsis thaliana
acactaactaacgccgt

SEQ ID NO: 18055 - DNA, 17 bp, Arabidopsis thaliana
acactaactgtgctagc

SEQ ID NO: 18056 - DNA, 17 bp, Arabidopsis thaliana
acactaagttgtgtccg

SEQ ID NO: 18057 - DNA, 17 bp, Arabidopsis thaliana
acactaagttttaatcc

SEQ ID NO: 18058 - DNA, 17 bp, Arabidopsis thaliana
acactaatgtagctgcg

SEQ ID NO: 18059 - DNA, 17 bp, Arabidopsis thaliana
acactaattttgttggg

SEQ ID NO: 18060 - DNA, 17 bp, Arabidopsis thaliana
acactacaatagggcag

SEQ ID NO: 18061 - DNA, 17 bp, Arabidopsis thaliana
acactacactgcggttc

SEQ ID NO: 18062 - DNA, 17 bp, Arabidopsis thaliana
acactacagccggcgga

SEQ ID NO: 18063 - DNA, 17 bp, Arabidopsis thaliana
acactacagccggctga

SEQ ID NO: 18064 - DNA, 17 bp, Arabidopsis thaliana
acactacaggatgcgac

SEQ ID NO: 18065 - DNA, 17 bp, Arabidopsis thaliana
acactaccctctgttaa

SEQ ID NO: 18066 - DNA, 17 bp, Arabidopsis thaliana
acactacgagcagtggc

SEQ ID NO: 18067 - DNA, 17 bp, Arabidopsis thaliana
acactacgattattgcg

SEQ ID NO: 18068 - DNA, 17 bp, Arabidopsis thaliana
acactacggaatttcat

SEQ ID NO: 18069 - DNA, 17 bp, Arabidopsis thaliana
acactacggagagcaca

SEQ ID NO: 18070 - DNA, 17 bp, Arabidopsis thaliana
acactacgggatttcat

SEQ ID NO: 18071 - DNA, 17 bp, Arabidopsis thaliana
acactacgggtgattca

SEQ ID NO: 18072 - DNA, 17 bp, Arabidopsis thaliana
acactacttggcttggc

SEQ ID NO: 18073 - DNA, 17 bp, Arabidopsis thaliana
acactacttggtgtcga

SEQ ID NO: 18074 - DNA, 17 bp, Arabidopsis thaliana
acactagatattgaccc

SEQ ID NO: 18075 - DNA, 17 bp, Arabidopsis thaliana
acactagctaatgtcgg

SEQ ID NO: 18076 - DNA, 17 bp, Arabidopsis thaliana
acactaggatatgatcc

SEQ ID NO: 18077 - DNA, 17 bp, Arabidopsis thaliana
acactagttgatcagtg

SEQ ID NO: 18078 - DNA, 17 bp, Arabidopsis thaliana
acactagttgatcatcc

SEQ ID NO: 18079 - DNA, 17 bp, Arabidopsis thaliana
acactatcgttcgattt

SEQ ID NO: 18080 - DNA, 17 bp, Arabidopsis thaliana
acactatcttcaccagg

SEQ ID NO: 18081 - DNA, 17 bp, Arabidopsis thaliana
acactatgaccgcccac

SEQ ID NO: 18082 - DNA, 17 bp, Arabidopsis thaliana
acactatgggagctggc

SEQ ID NO: 18083 - DNA, 17 bp, Arabidopsis thaliana
acactattagctcagtg

SEQ ID NO: 18084 - DNA, 17 bp, Arabidopsis thaliana
acactattgcggtgcag

SEQ ID NO: 18085 - DNA, 17 bp, Arabidopsis thaliana
acactattgggaactgg

SEQ ID NO: 18086 - DNA, 17 bp, Arabidopsis thaliana
acactattgtacggatg

SEQ ID NO: 18087 - DNA, 17 bp, Arabidopsis thaliana
acactatttgctgattc

SEQ ID NO: 18088 - DNA, 17 bp, Arabidopsis thaliana
acactcaactaatctgt

SEQ ID NO: 18089 - DNA, 17 bp, Arabidopsis thaliana
acactcaagatagtttg

SEQ ID NO: 18090 - DNA, 17 bp, Arabidopsis thaliana
acactcactaatgatcc

SEQ ID NO: 18091 - DNA, 17 bp, Arabidopsis thaliana
acactcactggtgtgat

SEQ ID NO: 18092 - DNA, 17 bp, Arabidopsis thaliana
acactcacttaacatgg

SEQ ID NO: 18093 - DNA, 17 bp, Arabidopsis thaliana
acactcagattctggtt

SEQ ID NO: 18094 - DNA, 17 bp, Arabidopsis thaliana
acactcagttttatgcc

SEQ ID NO: 18095 - DNA, 17 bp, Arabidopsis thaliana
acactcataagacttaa

SEQ ID NO: 18096 - DNA, 17 bp, Arabidopsis thaliana
acactcatcaatctcct

SEQ ID NO: 18097 - DNA, 17 bp, Arabidopsis thaliana
acactcatccatgtgtc

SEQ ID NO: 18098 - DNA, 17 bp, Arabidopsis thaliana
acactccatcgaaccgt

SEQ ID NO: 18099 - DNA, 17 bp, Arabidopsis thaliana
acactccctcttgatga

SEQ ID NO: 18100 - DNA, 17 bp, Arabidopsis thaliana
acactccgctgaccgca

SEQ ID NO: 18101 - DNA, 17 bp, Arabidopsis thaliana
acactcctctcccacac

SEQ ID NO: 18102 - DNA, 17 bp, Arabidopsis thaliana
acactcctgtccgacag

SEQ ID NO: 18103 - DNA, 17 bp, Arabidopsis thaliana
acactcgaccaagaaga

SEQ ID NO: 18104 - DNA, 17 bp, Arabidopsis thaliana
acactcgaccacggtgc

SEQ ID NO: 18105 - DNA, 17 bp, Arabidopsis thaliana
acactcgaccgcaagag

SEQ ID NO: 18106 - DNA, 17 bp, Arabidopsis thaliana
acactcgaccgtttctg

SEQ ID NO: 18107 - DNA, 17 bp, Arabidopsis thaliana
acactcgagctggtgga

SEQ ID NO: 18108 - DNA, 17 bp, Arabidopsis thaliana
acactcgatcaagtagt

SEQ ID NO: 18109 - DNA, 17 bp, Arabidopsis thaliana
acactcgatcacatctt

SEQ ID NO: 18110 - DNA, 17 bp, Arabidopsis thaliana
acactcgatcaggtctt

SEQ ID NO: 18111 - DNA, 17 bp, Arabidopsis thaliana
acactcgatctataggc

SEQ ID NO: 18112 - DNA, 17 bp, Arabidopsis thaliana
acactcgatctccaggt

SEQ ID NO: 18113 - DNA, 17 bp, Arabidopsis thaliana
acactcgccgtcgttgc

SEQ ID NO: 18114 - DNA, 17 bp, Arabidopsis thaliana
acactcgcctaaagctt

SEQ ID NO: 18115 - DNA, 17 bp, Arabidopsis thaliana
acactcgctctctcaaa

SEQ ID NO: 18116 - DNA, 17 bp, Arabidopsis thaliana
acactcggcggggacag

SEQ ID NO: 18117 - DNA, 17 bp, Arabidopsis thaliana
acactcggctggggtac

SEQ ID NO: 18118 - DNA, 17 bp, Arabidopsis thaliana
acactcgtgctggtgca

SEQ ID NO: 18119 - DNA, 17 bp, Arabidopsis thaliana
acactcgttgtggttga

SEQ ID NO: 18120 - DNA, 17 bp, Arabidopsis thaliana
acactctagatctgcgt

SEQ ID NO: 18121 - DNA, 17 bp, Arabidopsis thaliana
acactctagccttctgt

SEQ ID NO: 18122 - DNA, 17 bp, Arabidopsis thaliana
acactctccggtgtgat

SEQ ID NO: 18123 - DNA, 17 bp, Arabidopsis thaliana
acactctcgccttagtg

SEQ ID NO: 18124 - DNA, 17 bp, Arabidopsis thaliana
acactctcggcaacgga

SEQ ID NO: 18125 - DNA, 17 bp, Arabidopsis thaliana
acactctctgcttctcg

SEQ ID NO: 18126 - DNA, 17 bp, Arabidopsis thaliana
acactctgatggtgcaa

SEQ ID NO: 18127 - DNA, 17 bp, Arabidopsis thaliana
acactctgattactaac

SEQ ID NO: 18128 - DNA, 17 bp, Arabidopsis thaliana
acactctggaacttggt

SEQ ID NO: 18129 - DNA, 17 bp, Arabidopsis thaliana
acactctgtcgtcgctg

SEQ ID NO: 18130 - DNA, 17 bp, Arabidopsis thaliana
acactcttaactgtggg

SEQ ID NO: 18131 - DNA, 17 bp, Arabidopsis thaliana
acactcttattttctgg

SEQ ID NO: 18132 - DNA, 17 bp, Arabidopsis thaliana
acactcttcttcctctt

SEQ ID NO: 18133 - DNA, 17 bp, Arabidopsis thaliana
acactctttctgggcta

SEQ ID NO: 18134 - DNA, 17 bp, Arabidopsis thaliana
acactctttgtggagca

SEQ ID NO: 18135 - DNA, 17 bp, Arabidopsis thaliana
acactctttttcgtggt

SEQ ID NO: 18136 - DNA, 17 bp, Arabidopsis thaliana
acactgaacggagttag

SEQ ID NO: 18137 - DNA, 17 bp, Arabidopsis thaliana
acactgaaggtctccgg

SEQ ID NO: 18138 - DNA, 17 bp, Arabidopsis thaliana
acactgacaaatctggt

SEQ ID NO: 18139 - DNA, 17 bp, Arabidopsis thaliana
acactgaccatgctgct

SEQ ID NO: 18140 - DNA, 17 bp, Arabidopsis thaliana
acactgacccggtttaa

SEQ ID NO: 18141 - DNA, 17 bp, Arabidopsis thaliana
acactgactttctcagg

SEQ ID NO: 18142 - DNA, 17 bp, Arabidopsis thaliana
acactgagaaagccggc

SEQ ID NO: 18143 - DNA, 17 bp, Arabidopsis thaliana
acactgagaagaccggc

SEQ ID NO: 18144 - DNA, 17 bp, Arabidopsis thaliana
acactgagaaggtcggc

SEQ ID NO: 18145 - DNA, 17 bp, Arabidopsis thaliana
acactgagaatgtcggc

SEQ ID NO: 18146 - DNA, 17 bp, Arabidopsis thaliana
acactgagctgttcatc

SEQ ID NO: 18147 - DNA, 17 bp, Arabidopsis thaliana
acactgaggatctgcgg

SEQ ID NO: 18148 - DNA, 17 bp, Arabidopsis thaliana
acactgagtgtccagcc

SEQ ID NO: 18149 - DNA, 17 bp, Arabidopsis thaliana
acactgagttggtggtg

SEQ ID NO: 18150 - DNA, 17 bp, Arabidopsis thaliana
acactgatgctgacacc

SEQ ID NO: 18151 - DNA, 17 bp, Arabidopsis thaliana
acactgatgtgcgtaag

SEQ ID NO: 18152 - DNA, 17 bp, Arabidopsis thaliana
acactgattggatgggc

SEQ ID NO: 18153 - DNA, 17 bp, Arabidopsis thaliana
acactgcactgcggttc

SEQ ID NO: 18154 - DNA, 17 bp, Arabidopsis thaliana
acactgcagctcaattt

SEQ ID NO: 18155 - DNA, 17 bp, Arabidopsis thaliana
acactgcaggctatgtt

SEQ ID NO: 18156 - DNA, 17 bp, Arabidopsis thaliana
acactgccgcaggttgt

SEQ ID NO: 18157 - DNA, 17 bp, Arabidopsis thaliana
acactgccgctaccacc

SEQ ID NO: 18158 - DNA, 17 bp, Arabidopsis thaliana
acactgccggttgatcg

SEQ ID NO: 18159 - DNA, 17 bp, Arabidopsis thaliana
acactgcctgggtgtca

SEQ ID NO: 18160 - DNA, 17 bp, Arabidopsis thaliana
acactgcgatatgaact

SEQ ID NO: 18161 - DNA, 17 bp, Arabidopsis thaliana
acactgcggttcaaagt

SEQ ID NO: 18162 - DNA, 17 bp, Arabidopsis thaliana
acactgctaattgccgc

SEQ ID NO: 18163 - DNA, 17 bp, Arabidopsis thaliana
acactgctacgtgcgaa

SEQ ID NO: 18164 - DNA, 17 bp, Arabidopsis thaliana
acactgctgcaatgaca

SEQ ID NO: 18165 - DNA, 17 bp, Arabidopsis thaliana
acactgcttctttgcat

SEQ ID NO: 18166 - DNA, 17 bp, Arabidopsis thaliana
acactggacatgtattc

SEQ ID NO: 18167 - DNA, 17 bp, Arabidopsis thaliana
acactggagagtgccac

SEQ ID NO: 18168 - DNA, 17 bp, Arabidopsis thaliana
acactggataagcttga

SEQ ID NO: 18169 - DNA, 17 bp, Arabidopsis thaliana
acactggatcagcggat

SEQ ID NO: 18170 - DNA, 17 bp, Arabidopsis thaliana
acactggatgggtatcg

SEQ ID NO: 18171 - DNA, 17 bp, Arabidopsis thaliana
acactggattctttgtg

SEQ ID NO: 18172 - DNA, 17 bp, Arabidopsis thaliana
acactggctcggcccac

SEQ ID NO: 18173 - DNA, 17 bp, Arabidopsis thaliana
acactggctgctttgga

SEQ ID NO: 18174 - DNA, 17 bp, Arabidopsis thaliana
acactgggactgagaca

SEQ ID NO: 18175 - DNA, 17 bp, Arabidopsis thaliana
acactgggctcgctacc

SEQ ID NO: 18176 - DNA, 17 bp, Arabidopsis thaliana
acactggtcactggagg

SEQ ID NO: 18177 - DNA, 17 bp, Arabidopsis thaliana
acactgtccctaccgtc

SEQ ID NO: 18178 - DNA, 17 bp, Arabidopsis thaliana
acactgtcgagactttg

SEQ ID NO: 18179 - DNA, 17 bp, Arabidopsis thaliana
acactgtggaagccccc

SEQ ID NO: 18180 - DNA, 17 bp, Arabidopsis thaliana
acactgtggctttgatg

SEQ ID NO: 18181 - DNA, 17 bp, Arabidopsis thaliana
acactgtggtgagttac

SEQ ID NO: 18182 - DNA, 17 bp, Arabidopsis thaliana
acactgtggttccaagt

SEQ ID NO: 18183 - DNA, 17 bp, Arabidopsis thaliana
acactgtggttgattct

SEQ ID NO: 18184 - DNA, 17 bp, Arabidopsis thaliana
acactgtgtctggagac

SEQ ID NO: 18185 - DNA, 17 bp, Arabidopsis thaliana
acactgttcaccgacgg

SEQ ID NO: 18186 - DNA, 17 bp, Arabidopsis thaliana
acactgttcatcgacga

SEQ ID NO: 18187 - DNA, 17 bp, Arabidopsis thaliana
acactgttcatcgacgg

SEQ ID NO: 18188 - DNA, 17 bp, Arabidopsis thaliana
acactgttgcgctgcga

SEQ ID NO: 18189 - DNA, 17 bp, Arabidopsis thaliana
acactgttgcggtgcgg

SEQ ID NO: 18190 - DNA, 17 bp, Arabidopsis thaliana
acactgttgctctgcga

SEQ ID NO: 18191 - DNA, 17 bp, Arabidopsis thaliana
acactgttggagcatgc

SEQ ID NO: 18192 - DNA, 17 bp, Arabidopsis thaliana
acactgttgtagtgcga

SEQ ID NO: 18193 - DNA, 17 bp, Arabidopsis thaliana
acactgttgtgatacga

SEQ ID NO: 18194 - DNA, 17 bp, Arabidopsis thaliana
acactgttgtgcaagat

SEQ ID NO: 18195 - DNA, 17 bp, Arabidopsis thaliana
acactgtttcagtgcgg

SEQ ID NO: 18196 - DNA, 17 bp, Arabidopsis thaliana
acactgttttgtgtgat

SEQ ID NO: 18197 - DNA, 17 bp, Arabidopsis thaliana
acacttaacacctggat

SEQ ID NO: 18198 - DNA, 17 bp, Arabidopsis thaliana
acacttaaccaacagat

SEQ ID NO: 18199 - DNA, 17 bp, Arabidopsis thaliana
acacttaagatcgtggc

SEQ ID NO: 18200 - DNA, 17 bp, Arabidopsis thaliana
acacttaccaggttagt

SEQ ID NO: 18201 - DNA, 17 bp, Arabidopsis thaliana
acacttactcttctcac

SEQ ID NO: 18202 - DNA, 17 bp, Arabidopsis thaliana
acacttactggtgtgtt

SEQ ID NO: 18203 - DNA, 17 bp, Arabidopsis thaliana
acacttagaccatctcc

SEQ ID NO: 18204 - DNA, 17 bp, Arabidopsis thaliana
acacttagtttaaagac

SEQ ID NO: 18205 - DNA, 17 bp, Arabidopsis thaliana
acacttatcagtactcc

SEQ ID NO: 18206 - DNA, 17 bp, Arabidopsis thaliana
acacttatcgccaattg

SEQ ID NO: 18207 - DNA, 17 bp, Arabidopsis thaliana
acacttcagtgcgttcc

SEQ ID NO: 18208 - DNA, 17 bp, Arabidopsis thaliana
acacttcctcaggttgg

SEQ ID NO: 18209 - DNA, 17 bp, Arabidopsis thaliana
acacttcctcgcaaaac

SEQ ID NO: 18210 - DNA, 17 bp, Arabidopsis thaliana
acacttcctgcagcatt

SEQ ID NO: 18211 - DNA, 17 bp, Arabidopsis thaliana
acacttcgaccggcttt

SEQ ID NO: 18212 - DNA, 17 bp, Arabidopsis thaliana
acacttcggatcgcggt

SEQ ID NO: 18213 - DNA, 17 bp, Arabidopsis thaliana
acacttcgtgaaattgc

SEQ ID NO: 18214 - DNA, 17 bp, Arabidopsis thaliana
acacttgacgcgaggtt

SEQ ID NO: 18215 - DNA, 17 bp, Arabidopsis thaliana
acacttgccaatttttc

SEQ ID NO: 18216 - DNA, 17 bp, Arabidopsis thaliana
acacttgcccagggccg

SEQ ID NO: 18217 - DNA, 17 bp, Arabidopsis thaliana
acacttgcccagggtct

SEQ ID NO: 18218 - DNA, 17 bp, Arabidopsis thaliana
acacttgcgctagtctg

SEQ ID NO: 18219 - DNA, 17 bp, Arabidopsis thaliana
acacttgctttttggat

SEQ ID NO: 18220 - DNA, 17 bp, Arabidopsis thaliana
acacttggacttagcca

SEQ ID NO: 18221 - DNA, 17 bp, Arabidopsis thaliana
acacttggaggtatgtc

SEQ ID NO: 18222 - DNA, 17 bp, Arabidopsis thaliana
acacttggattgtacat

SEQ ID NO: 18223 - DNA, 17 bp, Arabidopsis thaliana
acacttggccgtgaatt

SEQ ID NO: 18224 - DNA, 17 bp, Arabidopsis thaliana
acacttgtcgtcgtgcg

SEQ ID NO: 18225 - DNA, 17 bp, Arabidopsis thaliana
acacttgtctccataaa

SEQ ID NO: 18226 - DNA, 17 bp, Arabidopsis thaliana
acacttgtgaatgggga

SEQ ID NO: 18227 - DNA, 17 bp, Arabidopsis thaliana
acacttgtgtgtgatta

SEQ ID NO: 18228 - DNA, 17 bp, Arabidopsis thaliana
acacttgttcgtcgtct

SEQ ID NO: 18229 - DNA, 17 bp, Arabidopsis thaliana
acacttgttctacatga

SEQ ID NO: 18230 - DNA, 17 bp, Arabidopsis thaliana
acacttgttggccgtca

SEQ ID NO: 18231 - DNA, 17 bp, Arabidopsis thaliana
acacttgttggccgtga

SEQ ID NO: 18232 - DNA, 17 bp, Arabidopsis thaliana
acacttgttggttctgc

SEQ ID NO: 18233 - DNA, 17 bp, Arabidopsis thaliana
acactttcatatacgcg

SEQ ID NO: 18234 - DNA, 17 bp, Arabidopsis thaliana
acactttctccttctcc

SEQ ID NO: 18235 - DNA, 17 bp, Arabidopsis thaliana
acactttgaaccgcagt

SEQ ID NO: 18236 - DNA, 17 bp, Arabidopsis thaliana
acactttgacacggatt

SEQ ID NO: 18237 - DNA, 17 bp, Arabidopsis thaliana
acactttgacgtggggg

SEQ ID NO: 18238 - DNA, 17 bp, Arabidopsis thaliana
acactttgattgacagg

SEQ ID NO: 18239 - DNA, 17 bp, Arabidopsis thaliana
acactttgcagcccatg

SEQ ID NO: 18240 - DNA, 17 bp, Arabidopsis thaliana
acactttggccgacaga

SEQ ID NO: 18241 - DNA, 17 bp, Arabidopsis thaliana
acactttggctcggaac

SEQ ID NO: 18242 - DNA, 17 bp, Arabidopsis thaliana
acactttggtatgggac

SEQ ID NO: 18243 - DNA, 17 bp, Arabidopsis thaliana
acactttggtgcgtttt

SEQ ID NO: 18244 - DNA, 17 bp, Arabidopsis thaliana
acactttgtcctgatcg

SEQ ID NO: 18245 - DNA, 17 bp, Arabidopsis thaliana
acactttgtcctgattg

SEQ ID NO: 18246 - DNA, 17 bp, Arabidopsis thaliana
acactttgtcgctaaga

SEQ ID NO: 18247 - DNA, 17 bp, Arabidopsis thaliana
acactttgttttgctgg

SEQ ID NO: 18248 - DNA, 17 bp, Arabidopsis thaliana
acacttttaggtttctc

SEQ ID NO: 18249 - DNA, 17 bp, Arabidopsis thaliana
acacttttcctgatgat

SEQ ID NO: 18250 - DNA, 17 bp, Arabidopsis thaliana
acacttttccttctttg

SEQ ID NO: 18251 - DNA, 17 bp, Arabidopsis thaliana
acacttttcgtgccggg

SEQ ID NO: 18252 - DNA, 17 bp, Arabidopsis thaliana
acacttttggctaaacc

SEQ ID NO: 18253 - DNA, 17 bp, Arabidopsis thaliana
acactttttttgctttt

SEQ ID NO: 18254 - DNA, 17 bp, Arabidopsis thaliana
acagaaaaagttgtgac

SEQ ID NO: 18255 - DNA, 17 bp, Arabidopsis thaliana
acagaaaaatccgcgtc

SEQ ID NO: 18256 - DNA, 17 bp, Arabidopsis thaliana
acagaaaactttctgga

SEQ ID NO: 18257 - DNA, 17 bp, Arabidopsis thaliana
acagaaacaaggtcggc

SEQ ID NO: 18258 - DNA, 17 bp, Arabidopsis thaliana
acagaaactatttcacc

SEQ ID NO: 18259 - DNA, 17 bp, Arabidopsis thaliana
acagaaactgcgtcatg

SEQ ID NO: 18260 - DNA, 17 bp, Arabidopsis thaliana
acagaaactgtttccca

SEQ ID NO: 18261 - DNA, 17 bp, Arabidopsis thaliana
acagaaactttgtacgc

SEQ ID NO: 18262 - DNA, 17 bp, Arabidopsis thaliana
acagaaagcttatcccg

SEQ ID NO: 18263 - DNA, 17 bp, Arabidopsis thaliana
acagaaatactatggat

SEQ ID NO: 18264 - DNA, 17 bp, Arabidopsis thaliana
acagaaatgaaggatca

SEQ ID NO: 18265 - DNA, 17 bp, Arabidopsis thaliana
acagaaatgagacctct

SEQ ID NO: 18266 - DNA, 17 bp, Arabidopsis thaliana
acagaaattggtacttt

SEQ ID NO: 18267 - DNA, 17 bp, Arabidopsis thaliana
acagaacaactattggg

SEQ ID NO: 18268 - DNA, 17 bp, Arabidopsis thaliana
acagaaccagcactgcc

SEQ ID NO: 18269 - DNA, 17 bp, Arabidopsis thaliana
acagaaccgttgggtga

SEQ ID NO: 18270 - DNA, 17 bp, Arabidopsis thaliana
acagaaccttgggatga

SEQ ID NO: 18271 - DNA, 17 bp, Arabidopsis thaliana
acagaacgagttggcgg

SEQ ID NO: 18272 - DNA, 17 bp, Arabidopsis thaliana
acagaacggaccagttg

SEQ ID NO: 18273 - DNA, 17 bp, Arabidopsis thaliana
acagaacgggaaccagt

SEQ ID NO: 18274 - DNA, 17 bp, Arabidopsis thaliana
acagaacgtggctttgt

SEQ ID NO: 18275 - DNA, 17 bp, Arabidopsis thaliana
acagaagactgcgggat

SEQ ID NO: 18276 - DNA, 17 bp, Arabidopsis thaliana
acagaagactggtgaaa

SEQ ID NO: 18277 - DNA, 17 bp, Arabidopsis thaliana
acagaagatagcaaggt

SEQ ID NO: 18278 - DNA, 17 bp, Arabidopsis thaliana
acagaagatctaaaagt

SEQ ID NO: 18279 - DNA, 17 bp, Arabidopsis thaliana
acagaagatgtcgagta

SEQ ID NO: 18280 - DNA, 17 bp, Arabidopsis thaliana
acagaagattgcgggat

SEQ ID NO: 18281 - DNA, 17 bp, Arabidopsis thaliana
acagaagccatgttatc

SEQ ID NO: 18282 - DNA, 17 bp, Arabidopsis thaliana
acagaagctgcaattga

SEQ ID NO: 18283 - DNA, 17 bp, Arabidopsis thaliana
acagaaggccgacaatt

SEQ ID NO: 18284 - DNA, 17 bp, Arabidopsis thaliana
acagaaggcctggagat

SEQ ID NO: 18285 - DNA, 17 bp, Arabidopsis thaliana
acagaaggctagagagc

SEQ ID NO: 18286 - DNA, 17 bp, Arabidopsis thaliana
acagaataaaactcaga

SEQ ID NO: 18287 - DNA, 17 bp, Arabidopsis thaliana
acagaatagtcatgccg

SEQ ID NO: 18288 - DNA, 17 bp, Arabidopsis thaliana
acagaatccaacggatc

SEQ ID NO: 18289 - DNA, 17 bp, Arabidopsis thaliana
acagaatccgggaacaa

SEQ ID NO: 18290 - DNA, 17 bp, Arabidopsis thaliana
acagacaaaaatcctag

SEQ ID NO: 18291 - DNA, 17 bp, Arabidopsis thaliana
acagacaaaagccattt

SEQ ID NO: 18292 - DNA, 17 bp, Arabidopsis thaliana
acagacaaaagttggcc

SEQ ID NO: 18293 - DNA, 17 bp, Arabidopsis thaliana
acagacaaagtgggcag

SEQ ID NO: 18294 - DNA, 17 bp, Arabidopsis thaliana
acagacaaagtgggctg

SEQ ID NO: 18295 - DNA, 17 bp, Arabidopsis thaliana
acagacaaatcctattg

SEQ ID NO: 18296 - DNA, 17 bp, Arabidopsis thaliana
acagacaacgagacctc

SEQ ID NO: 18297 - DNA, 17 bp, Arabidopsis thaliana
acagacaacggttgagt

SEQ ID NO: 18298 - DNA, 17 bp, Arabidopsis thaliana
acagacaatgacaaccg

SEQ ID NO: 18299 - DNA, 17 bp, Arabidopsis thaliana
acagacaatggcaaccg

SEQ ID NO: 18300 - DNA, 17 bp, Arabidopsis thaliana
acagacaatgtggtggt

SEQ ID NO: 18301 - DNA, 17 bp, Arabidopsis thaliana
acagacacgtccgttaa

SEQ ID NO: 18302 - DNA, 17 bp, Arabidopsis thaliana
acagacagaccctgttg

SEQ ID NO: 18303 - DNA, 17 bp, Arabidopsis thaliana
acagacagacttgaaat

SEQ ID NO: 18304 - DNA, 17 bp, Arabidopsis thaliana
acagacagacttttggg

SEQ ID NO: 18305 - DNA, 17 bp, Arabidopsis thaliana
acagacagtagtccggt

SEQ ID NO: 18306 - DNA, 17 bp, Arabidopsis thaliana
acagacagtgtggtgga

SEQ ID NO: 18307 - DNA, 17 bp, Arabidopsis thaliana
acagacagtgtggtggt

SEQ ID NO: 18308 - DNA, 17 bp, Arabidopsis thaliana
acagacagttttgtctg

SEQ ID NO: 18309 - DNA, 17 bp, Arabidopsis thaliana
acagacagttttttttg

SEQ ID NO: 18310 - DNA, 17 bp, Arabidopsis thaliana
acagacatactccatcg

SEQ ID NO: 18311 - DNA, 17 bp, Arabidopsis thaliana
acagacatcatgtggct

SEQ ID NO: 18312 - DNA, 17 bp, Arabidopsis thaliana
acagacatgccacttgt

SEQ ID NO: 18313 - DNA, 17 bp, Arabidopsis thaliana
acagacatgtgtaagtt

SEQ ID NO: 18314 - DNA, 17 bp, Arabidopsis thaliana
acagacatttccggagt

SEQ ID NO: 18315 - DNA, 17 bp, Arabidopsis thaliana
acagaccaaaggtccca

SEQ ID NO: 18316 - DNA, 17 bp, Arabidopsis thaliana
acagaccatctccatcg

SEQ ID NO: 18317 - DNA, 17 bp, Arabidopsis thaliana
acagacccgatggaagc

SEQ ID NO: 18318 - DNA, 17 bp, Arabidopsis thaliana
acagacccgggttcaat

SEQ ID NO: 18319 - DNA, 17 bp, Arabidopsis thaliana
acagacccgggttcatt

SEQ ID NO: 18320 - DNA, 17 bp, Arabidopsis thaliana
acagacccgggttcgat

SEQ ID NO: 18321 - DNA, 17 bp, Arabidopsis thaliana
acagacccgggttcggt

SEQ ID NO: 18322 - DNA, 17 bp, Arabidopsis thaliana
acagacccgggttcgtt

SEQ ID NO: 18323 - DNA, 17 bp, Arabidopsis thaliana
acagacccgggttcttc

SEQ ID NO: 18324 - DNA, 17 bp, Arabidopsis thaliana
acagacccgggtttccc

SEQ ID NO: 18325 - DNA, 17 bp, Arabidopsis thaliana
acagacccggtttcccg

SEQ ID NO: 18326 - DNA, 17 bp, Arabidopsis thaliana
acagacccgtaggttgg

SEQ ID NO: 18327 - DNA, 17 bp, Arabidopsis thaliana
acagaccctgttgagct

SEQ ID NO: 18328 - DNA, 17 bp, Arabidopsis thaliana
acagacccttcatcgtc

SEQ ID NO: 18329 - DNA, 17 bp, Arabidopsis thaliana
acagaccggagaagtga

SEQ ID NO: 18330 - DNA, 17 bp, Arabidopsis thaliana
acagaccggtagacttg

SEQ ID NO: 18331 - DNA, 17 bp, Arabidopsis thaliana
acagacctagctgctgt

SEQ ID NO: 18332 - DNA, 17 bp, Arabidopsis thaliana
acagacctctgcctggc

SEQ ID NO: 18333 - DNA, 17 bp, Arabidopsis thaliana
acagacctggactcaca

SEQ ID NO: 18334 - DNA, 17 bp, Arabidopsis thaliana
acagacctggtgaagat

SEQ ID NO: 18335 - DNA, 17 bp, Arabidopsis thaliana
acagacgaagctgcgca

SEQ ID NO: 18336 - DNA, 17 bp, Arabidopsis thaliana
acagacgacacttcctt

SEQ ID NO: 18337 - DNA, 17 bp, Arabidopsis thaliana
acagacgacctccccca

SEQ ID NO: 18338 - DNA, 17 bp, Arabidopsis thaliana
acagacgaccttactac

SEQ ID NO: 18339 - DNA, 17 bp, Arabidopsis thaliana
acagacgacgacccatt

SEQ ID NO: 18340 - DNA, 17 bp, Arabidopsis thaliana
acagacgagtgacttga

SEQ ID NO: 18341 - DNA, 17 bp, Arabidopsis thaliana
acagacggcctgagtac

SEQ ID NO: 18342 - DNA, 17 bp, Arabidopsis thaliana
acagacggtgttgatta

SEQ ID NO: 18343 - DNA, 17 bp, Arabidopsis thaliana
acagacgtcgctgccgt

SEQ ID NO: 18344 - DNA, 17 bp, Arabidopsis thaliana
acagacgtggactgtta

SEQ ID NO: 18345 - DNA, 17 bp, Arabidopsis thaliana
acagacgtggctttgta

SEQ ID NO: 18346 - DNA, 17 bp, Arabidopsis thaliana
acagactaccaacaacg

SEQ ID NO: 18347 - DNA, 17 bp, Arabidopsis thaliana
acagactaggcatgtga

SEQ ID NO: 18348 - DNA, 17 bp, Arabidopsis thaliana
acagactcagagctctt

SEQ ID NO: 18349 - DNA, 17 bp, Arabidopsis thaliana
acagactcgggctgcat

SEQ ID NO: 18350 - DNA, 17 bp, Arabidopsis thaliana
acagactctcggcaacg

SEQ ID NO: 18351 - DNA, 17 bp, Arabidopsis thaliana
acagactcttcttgact

SEQ ID NO: 18352 - DNA, 17 bp, Arabidopsis thaliana
acagactcttttgctct

SEQ ID NO: 18353 - DNA, 17 bp, Arabidopsis thaliana
acagactgagagctctt

SEQ ID NO: 18354 - DNA, 17 bp, Arabidopsis thaliana
acagactgatgtgtcag

SEQ ID NO: 18355 - DNA, 17 bp, Arabidopsis thaliana
acagactgccggtgata

SEQ ID NO: 18356 - DNA, 17 bp, Arabidopsis thaliana
acagactgctcggatct

SEQ ID NO: 18357 - DNA, 17 bp, Arabidopsis thaliana
acagactgtgaattatt

SEQ ID NO: 18358 - DNA, 17 bp, Arabidopsis thaliana
acagactgtgcagacct

SEQ ID NO: 18359 - DNA, 17 bp, Arabidopsis thaliana
acagactgtgctgtcga

SEQ ID NO: 18360 - DNA, 17 bp, Arabidopsis thaliana
acagactgttcaaacct

SEQ ID NO: 18361 - DNA, 17 bp, Arabidopsis thaliana
acagactgttcagacct

SEQ ID NO: 18362 - DNA, 17 bp, Arabidopsis thaliana
acagactgttcagactt

SEQ ID NO: 18363 - DNA, 17 bp, Arabidopsis thaliana
acagactgttcagatct

SEQ ID NO: 18364 - DNA, 17 bp, Arabidopsis thaliana
acagactgttcagattt

SEQ ID NO: 18365 - DNA, 17 bp, Arabidopsis thaliana
acagactgttcggatct

SEQ ID NO: 18366 - DNA, 17 bp, Arabidopsis thaliana
acagactgtttagattt

SEQ ID NO: 18367 - DNA, 17 bp, Arabidopsis thaliana
acagacttagcggggcg

SEQ ID NO: 18368 - DNA, 17 bp, Arabidopsis thaliana
acagacttcggttcaga

SEQ ID NO: 18369 - DNA, 17 bp, Arabidopsis thaliana
acagacttcttctgcaa

SEQ ID NO: 18370 - DNA, 17 bp, Arabidopsis thaliana
acagacttgttcggggc

SEQ ID NO: 18371 - DNA, 17 bp, Arabidopsis thaliana
acagactttcagacttg

SEQ ID NO: 18372 - DNA, 17 bp, Arabidopsis thaliana
acagacttttatttttt

SEQ ID NO: 18373 - DNA, 17 bp, Arabidopsis thaliana
acagacttttggggtgc

SEQ ID NO: 18374 - DNA, 17 bp, Arabidopsis thaliana
acagactttttgttagc

SEQ ID NO: 18375 - DNA, 17 bp, Arabidopsis thaliana
acagacttttttggttg

SEQ ID NO: 18376 - DNA, 17 bp, Arabidopsis thaliana
acagagaacaaggttaa

SEQ ID NO: 18377 - DNA, 17 bp, Arabidopsis thaliana
acagagaacccgtttgg

SEQ ID NO: 18378 - DNA, 17 bp, Arabidopsis thaliana
acagagaacctgatgat

SEQ ID NO: 18379 - DNA, 17 bp, Arabidopsis thaliana
acagagaatttccaatc

SEQ ID NO: 18380 - DNA, 17 bp, Arabidopsis thaliana
acagagaccctgttaaa

SEQ ID NO: 18381 - DNA, 17 bp, Arabidopsis thaliana
acagagacctgtggatc

SEQ ID NO: 18382 - DNA, 17 bp, Arabidopsis thaliana
acagagacgattctcac

SEQ ID NO: 18383 - DNA, 17 bp, Arabidopsis thaliana
acagagacgattctcgc

SEQ ID NO: 18384 - DNA, 17 bp, Arabidopsis thaliana
acagagagaggtgtgtc

SEQ ID NO: 18385 - DNA, 17 bp, Arabidopsis thaliana
acagagagatgttctta

SEQ ID NO: 18386 - DNA, 17 bp, Arabidopsis thaliana
acagagatcatctgtca

SEQ ID NO: 18387 - DNA, 17 bp, Arabidopsis thaliana
acagagatccgcttgaa

SEQ ID NO: 18388 - DNA, 17 bp, Arabidopsis thaliana
acagagatctcttcccc

SEQ ID NO: 18389 - DNA, 17 bp, Arabidopsis thaliana
acagagattctggatcg

SEQ ID NO: 18390 - DNA, 17 bp, Arabidopsis thaliana
acagagcaacaaagggt

SEQ ID NO: 18391 - DNA, 17 bp, Arabidopsis thaliana
acagagccaaggtcaac

SEQ ID NO: 18392 - DNA, 17 bp, Arabidopsis thaliana
acagagcccaataatta

SEQ ID NO: 18393 - DNA, 17 bp, Arabidopsis thaliana
acagagcccaataattt

SEQ ID NO: 18394 - DNA, 17 bp, Arabidopsis thaliana
acagagccccgtcgtgc

SEQ ID NO: 18395 - DNA, 17 bp, Arabidopsis thaliana
acagagccggagctcgg

SEQ ID NO: 18396 - DNA, 17 bp, Arabidopsis thaliana
acagagcgacagggaag

SEQ ID NO: 18397 - DNA, 17 bp, Arabidopsis thaliana
acagagcgataaggatg

SEQ ID NO: 18398 - DNA, 17 bp, Arabidopsis thaliana
acagagcgctgctttgg

SEQ ID NO: 18399 - DNA, 17 bp, Arabidopsis thaliana
acagagcgtggcccacc

SEQ ID NO: 18400 - DNA, 17 bp, Arabidopsis thaliana
acagagcttgggttagt

SEQ ID NO: 18401 - DNA, 17 bp, Arabidopsis thaliana
acagagcttgggttttt

SEQ ID NO: 18402 - DNA, 17 bp, Arabidopsis thaliana
acagaggacaaggatct

SEQ ID NO: 18403 - DNA, 17 bp, Arabidopsis thaliana
acagaggagctggtggg

SEQ ID NO: 18404 - DNA, 17 bp, Arabidopsis thaliana
acagaggattccacaaa

SEQ ID NO: 18405 - DNA, 17 bp, Arabidopsis thaliana
acagaggattgcgggat

SEQ ID NO: 18406 - DNA, 17 bp, Arabidopsis thaliana
acagaggcagaggtcga

SEQ ID NO: 18407 - DNA, 17 bp, Arabidopsis thaliana
acagaggcctttcattc

SEQ ID NO: 18408 - DNA, 17 bp, Arabidopsis thaliana
acagaggctgctccaat

SEQ ID NO: 18409 - DNA, 17 bp, Arabidopsis thaliana
acagaggctgttttgct

SEQ ID NO: 18410 - DNA, 17 bp, Arabidopsis thaliana
acagagggcacgtctgc

SEQ ID NO: 18411 - DNA, 17 bp, Arabidopsis thaliana
acagagggccataggtt

SEQ ID NO: 18412 - DNA, 17 bp, Arabidopsis thaliana
acagagggccgtccgcg

SEQ ID NO: 18413 - DNA, 17 bp, Arabidopsis thaliana
acagagggtactgttgg

SEQ ID NO: 18414 - DNA, 17 bp, Arabidopsis thaliana
acagagggtggaccaca

SEQ ID NO: 18415 - DNA, 17 bp, Arabidopsis thaliana
acagagggtttcttcaa

SEQ ID NO: 18416 - DNA, 17 bp, Arabidopsis thaliana
acagaggtctcatttct

SEQ ID NO: 18417 - DNA, 17 bp, Arabidopsis thaliana
acagaggtctcgattaa

SEQ ID NO: 18418 - DNA, 17 bp, Arabidopsis thaliana
acagaggtcttcatcct

SEQ ID NO: 18419 - DNA, 17 bp, Arabidopsis thaliana
acagagtacatcttgac

SEQ ID NO: 18420 - DNA, 17 bp, Arabidopsis thaliana
acagagtcaaagaactg

SEQ ID NO: 18421 - DNA, 17 bp, Arabidopsis thaliana
acagagtccgctgccgt

SEQ ID NO: 18422 - DNA, 17 bp, Arabidopsis thaliana
acagagtcgataacagg

SEQ ID NO: 18423 - DNA, 17 bp, Arabidopsis thaliana
acagagtgatggtcaga

SEQ ID NO: 18424 - DNA, 17 bp, Arabidopsis thaliana
acagagttatcgagtgc

SEQ ID NO: 18425 - DNA, 17 bp, Arabidopsis thaliana
acagagttcctctctct

SEQ ID NO: 18426 - DNA, 17 bp, Arabidopsis thaliana
acagagtttcttcggga

SEQ ID NO: 18427 - DNA, 17 bp, Arabidopsis thaliana
acagagttttcttctcc

SEQ ID NO: 18428 - DNA, 17 bp, Arabidopsis thaliana
acagataaaaggtcgac

SEQ ID NO: 18429 - DNA, 17 bp, Arabidopsis thaliana
acagatacctatggcgg

SEQ ID NO: 18430 - DNA, 17 bp, Arabidopsis thaliana
acagatagcggtgtaca

SEQ ID NO: 18431 - DNA, 17 bp, Arabidopsis thaliana
acagatagcgttgtgca

SEQ ID NO: 18432 - DNA, 17 bp, Arabidopsis thaliana
acagatagtttctcgat

SEQ ID NO: 18433 - DNA, 17 bp, Arabidopsis thaliana
acagatatccggttcgg

SEQ ID NO: 18434 - DNA, 17 bp, Arabidopsis thaliana
acagatatcgggttcgg

SEQ ID NO: 18435 - DNA, 17 bp, Arabidopsis thaliana
acagatattccaagtta

SEQ ID NO: 18436 - DNA, 17 bp, Arabidopsis thaliana
acagatattgctgttgc

SEQ ID NO: 18437 - DNA, 17 bp, Arabidopsis thaliana
acagatatttggcgcag

SEQ ID NO: 18438 - DNA, 17 bp, Arabidopsis thaliana
acagatcactcgacccc

SEQ ID NO: 18439 - DNA, 17 bp, Arabidopsis thaliana
acagatcgagacttgac

SEQ ID NO: 18440 - DNA, 17 bp, Arabidopsis thaliana
acagatcgattgataga

SEQ ID NO: 18441 - DNA, 17 bp, Arabidopsis thaliana
acagatctctgtggata

SEQ ID NO: 18442 - DNA, 17 bp, Arabidopsis thaliana
acagatctggtggaggt

SEQ ID NO: 18443 - DNA, 17 bp, Arabidopsis thaliana
acagatctgtctatcca

SEQ ID NO: 18444 - DNA, 17 bp, Arabidopsis thaliana
acagatctgtctatcta

SEQ ID NO: 18445 - DNA, 17 bp, Arabidopsis thaliana
acagatctttactcgcc

SEQ ID NO: 18446 - DNA, 17 bp, Arabidopsis thaliana
acagatgatctgttgcg

SEQ ID NO: 18447 - DNA, 17 bp, Arabidopsis thaliana
acagatgctgcaaggga

SEQ ID NO: 18448 - DNA, 17 bp, Arabidopsis thaliana
acagatgctgcaagggt

SEQ ID NO: 18449 - DNA, 17 bp, Arabidopsis thaliana
acagatggctgaagagt

SEQ ID NO: 18450 - DNA, 17 bp, Arabidopsis thaliana
acagatggctgaagatt

SEQ ID NO: 18451 - DNA, 17 bp, Arabidopsis thaliana
acagatgggatctggtc

SEQ ID NO: 18452 - DNA, 17 bp, Arabidopsis thaliana
acagatgggctttgtct

SEQ ID NO: 18453 - DNA, 17 bp, Arabidopsis thaliana
acagatgtatccgtaca

SEQ ID NO: 18454 - DNA, 17 bp, Arabidopsis thaliana
acagatgtcacagatac

SEQ ID NO: 18455 - DNA, 17 bp, Arabidopsis thaliana
acagatgtccccccccc

SEQ ID NO: 18456 - DNA, 17 bp, Arabidopsis thaliana
acagatgtgccaagacg

SEQ ID NO: 18457 - DNA, 17 bp, Arabidopsis thaliana
acagatgtgtggagtcg

SEQ ID NO: 18458 - DNA, 17 bp, Arabidopsis thaliana
acagatgttaagtcgca

SEQ ID NO: 18459 - DNA, 17 bp, Arabidopsis thaliana
acagatgtttgtccgag

SEQ ID NO: 18460 - DNA, 17 bp, Arabidopsis thaliana
acagattaacttgatcg

SEQ ID NO: 18461 - DNA, 17 bp, Arabidopsis thaliana
acagattaagggtctcg

SEQ ID NO: 18462 - DNA, 17 bp, Arabidopsis thaliana
acagattattgttcgtt

SEQ ID NO: 18463 - DNA, 17 bp, Arabidopsis thaliana
acagattcatccaactg

SEQ ID NO: 18464 - DNA, 17 bp, Arabidopsis thaliana
acagattccatgtctct

SEQ ID NO: 18465 - DNA, 17 bp, Arabidopsis thaliana
acagattctgagcaagt

SEQ ID NO: 18466 - DNA, 17 bp, Arabidopsis thaliana
acagattcttcaatgcg

SEQ ID NO: 18467 - DNA, 17 bp, Arabidopsis thaliana
acagattgaggtccggt

SEQ ID NO: 18468 - DNA, 17 bp, Arabidopsis thaliana
acagattgcaggacctt

SEQ ID NO: 18469 - DNA, 17 bp, Arabidopsis thaliana
acagattgcggtgtact

SEQ ID NO: 18470 - DNA, 17 bp, Arabidopsis thaliana
acagattgcggtttact

SEQ ID NO: 18471 - DNA, 17 bp, Arabidopsis thaliana
acagattggaccgttga

SEQ ID NO: 18472 - DNA, 17 bp, Arabidopsis thaliana
acagattggatgtgcca

SEQ ID NO: 18473 - DNA, 17 bp, Arabidopsis thaliana
acagattgggctttgtt

SEQ ID NO: 18474 - DNA, 17 bp, Arabidopsis thaliana
acagattgtctctcctt

SEQ ID NO: 18475 - DNA, 17 bp, Arabidopsis thaliana
acagattgtggctaaag

SEQ ID NO: 18476 - DNA, 17 bp, Arabidopsis thaliana
acagatttccctacggt

SEQ ID NO: 18477 - DNA, 17 bp, Arabidopsis thaliana
acagatttccctgcggt

SEQ ID NO: 18478 - DNA, 17 bp, Arabidopsis thaliana
acagatttcctttctca

SEQ ID NO: 18479 - DNA, 17 bp, Arabidopsis thaliana
acagatttgacagaacg

SEQ ID NO: 18480 - DNA, 17 bp, Arabidopsis thaliana
acagatttgaggtgcgt

SEQ ID NO: 18481 - DNA, 17 bp, Arabidopsis thaliana
acagatttggacagctt

SEQ ID NO: 18482 - DNA, 17 bp, Arabidopsis thaliana
acagatttggagcaggt

SEQ ID NO: 18483 - DNA, 17 bp, Arabidopsis thaliana
acagatttgtcgagacg

SEQ ID NO: 18484 - DNA, 17 bp, Arabidopsis thaliana
acagattttccaggagt

SEQ ID NO: 18485 - DNA, 17 bp, Arabidopsis thaliana
acagatttttccaaagt

SEQ ID NO: 18486 - DNA, 17 bp, Arabidopsis thaliana
acagcaaccaccatctc

SEQ ID NO: 18487 - DNA, 17 bp, Arabidopsis thaliana
acagcaactgcttattc

SEQ ID NO: 18488 - DNA, 17 bp, Arabidopsis thaliana
acagcaacttaacattt

SEQ ID NO: 18489 - DNA, 17 bp, Arabidopsis thaliana
acagcaagacgtctggg

SEQ ID NO: 18490 - DNA, 17 bp, Arabidopsis thaliana
acagcaaggcgtagaaa

SEQ ID NO: 18491 - DNA, 17 bp, Arabidopsis thaliana
acagcaatccgaccatt

SEQ ID NO: 18492 - DNA, 17 bp, Arabidopsis thaliana
acagcaattcgtatgat

SEQ ID NO: 18493 - DNA, 17 bp, Arabidopsis thaliana
acagcaattggccaacc

SEQ ID NO: 18494 - DNA, 17 bp, Arabidopsis thaliana
acagcaattggccaacg

SEQ ID NO: 18495 - DNA, 17 bp, Arabidopsis thaliana
acagcacaatctgtaga

SEQ ID NO: 18496 - DNA, 17 bp, Arabidopsis thaliana
acagcaccagactgttt

SEQ ID NO: 18497 - DNA, 17 bp, Arabidopsis thaliana
acagcaccggactatgc

SEQ ID NO: 18498 - DNA, 17 bp, Arabidopsis thaliana
acagcaccgtgatactg

SEQ ID NO: 18499 - DNA, 17 bp, Arabidopsis thaliana
acagcacgagttatgat

SEQ ID NO: 18500 - DNA, 17 bp, Arabidopsis thaliana
acagcacgggttatgat

SEQ ID NO: 18501 - DNA, 17 bp, Arabidopsis thaliana
acagcacgtctgcctgg

SEQ ID NO: 18502 - DNA, 17 bp, Arabidopsis thaliana
acagcactcctaacagc

SEQ ID NO: 18503 - DNA, 17 bp, Arabidopsis thaliana
acagcactggactatgc

SEQ ID NO: 18504 - DNA, 17 bp, Arabidopsis thaliana
acagcactgttgcactg

SEQ ID NO: 18505 - DNA, 17 bp, Arabidopsis thaliana
acagcactgttgcgata

SEQ ID NO: 18506 - DNA, 17 bp, Arabidopsis thaliana
acagcagaatgtgtcca

SEQ ID NO: 18507 - DNA, 17 bp, Arabidopsis thaliana
acagcagcggtaacgac

SEQ ID NO: 18508 - DNA, 17 bp, Arabidopsis thaliana
acagcagcggtgacctc

SEQ ID NO: 18509 - DNA, 17 bp, Arabidopsis thaliana
acagcagcgtcagaggc

SEQ ID NO: 18510 - DNA, 17 bp, Arabidopsis thaliana
acagcagcttgcagggt

SEQ ID NO: 18511 - DNA, 17 bp, Arabidopsis thaliana
acagcagcttttccatc

SEQ ID NO: 18512 - DNA, 17 bp, Arabidopsis thaliana
acagcaggacggtggtc

SEQ ID NO: 18513 - DNA, 17 bp, Arabidopsis thaliana
acagcagggagattctt

SEQ ID NO: 18514 - DNA, 17 bp, Arabidopsis thaliana
acagcagtggacggatc

SEQ ID NO: 18515 - DNA, 17 bp, Arabidopsis thaliana
acagcagttggattcgg

SEQ ID NO: 18516 - DNA, 17 bp, Arabidopsis thaliana
acagcagttggtttcgg

SEQ ID NO: 18517 - DNA, 17 bp, Arabidopsis thaliana
acagcatattagttggg

SEQ ID NO: 18518 - DNA, 17 bp, Arabidopsis thaliana
acagcatggctagtttg

SEQ ID NO: 18519 - DNA, 17 bp, Arabidopsis thaliana
acagcatgtaataggcc

SEQ ID NO: 18520 - DNA, 17 bp, Arabidopsis thaliana
acagcattattgcggtg

SEQ ID NO: 18521 - DNA, 17 bp, Arabidopsis thaliana
acagcattgttgcagtg

SEQ ID NO: 18522 - DNA, 17 bp, Arabidopsis thaliana
acagcattgttgcattg

SEQ ID NO: 18523 - DNA, 17 bp, Arabidopsis thaliana
acagcattgttgcgatg

SEQ ID NO: 18524 - DNA, 17 bp, Arabidopsis thaliana
acagccaaaagctgtta

SEQ ID NO: 18525 - DNA, 17 bp, Arabidopsis thaliana
acagccaaggtttcgtt

SEQ ID NO: 18526 - DNA, 17 bp, Arabidopsis thaliana
acagccaagtaacttcc

SEQ ID NO: 18527 - DNA, 17 bp, Arabidopsis thaliana
acagccaccttttccga

SEQ ID NO: 18528 - DNA, 17 bp, Arabidopsis thaliana
acagccacgcttggtga

SEQ ID NO: 18529 - DNA, 17 bp, Arabidopsis thaliana
acagccactgtcatccg

SEQ ID NO: 18530 - DNA, 17 bp, Arabidopsis thaliana
acagccattgtaagtaa

SEQ ID NO: 18531 - DNA, 17 bp, Arabidopsis thaliana
acagcccaaccaatcac

SEQ ID NO: 18532 - DNA, 17 bp, Arabidopsis thaliana
acagcccagatcgtacg

SEQ ID NO: 18533 - DNA, 17 bp, Arabidopsis thaliana
acagcccagcatgggcc

SEQ ID NO: 18534 - DNA, 17 bp, Arabidopsis thaliana
acagccctggcgaagac

SEQ ID NO: 18535 - DNA, 17 bp, Arabidopsis thaliana
acagccgacccgagcag

SEQ ID NO: 18536 - DNA, 17 bp, Arabidopsis thaliana
acagccgctcagtccgc

SEQ ID NO: 18537 - DNA, 17 bp, Arabidopsis thaliana
acagccggcggtgcagc

SEQ ID NO: 18538 - DNA, 17 bp, Arabidopsis thaliana
acagccgttcaattcac

SEQ ID NO: 18539 - DNA, 17 bp, Arabidopsis thaliana
acagcctccgacgggtg

SEQ ID NO: 18540 - DNA, 17 bp, Arabidopsis thaliana
acagcctgaattgcggc

SEQ ID NO: 18541 - DNA, 17 bp, Arabidopsis thaliana
acagcctgcccaccctg

SEQ ID NO: 18542 - DNA, 17 bp, Arabidopsis thaliana
acagcctgtagcttgca

SEQ ID NO: 18543 - DNA, 17 bp, Arabidopsis thaliana
acagcgaacaaaacggt

SEQ ID NO: 18544 - DNA, 17 bp, Arabidopsis thaliana
acagcgacagcaaccat

SEQ ID NO: 18545 - DNA, 17 bp, Arabidopsis thaliana
acagcgaccagcgacag

SEQ ID NO: 18546 - DNA, 17 bp, Arabidopsis thaliana
acagcgaccagcgacca

SEQ ID NO: 18547 - DNA, 17 bp, Arabidopsis thaliana
acagcgaccagcgatca

SEQ ID NO: 18548 - DNA, 17 bp, Arabidopsis thaliana
acagcgaccagtgacgg

SEQ ID NO: 18549 - DNA, 17 bp, Arabidopsis thaliana
acagcgaccatcgatca

SEQ ID NO: 18550 - DNA, 17 bp, Arabidopsis thaliana
acagcgaccccagatct

SEQ ID NO: 18551 - DNA, 17 bp, Arabidopsis thaliana
acagcgacgggattgaa

SEQ ID NO: 18552 - DNA, 17 bp, Arabidopsis thaliana
acagcgactttttagct

SEQ ID NO: 18553 - DNA, 17 bp, Arabidopsis thaliana
acagcgaggttgtcctc

SEQ ID NO: 18554 - DNA, 17 bp, Arabidopsis thaliana
acagcgatccaagtgga

SEQ ID NO: 18555 - DNA, 17 bp, Arabidopsis thaliana
acagcgatctgaaatca

SEQ ID NO: 18556 - DNA, 17 bp, Arabidopsis thaliana
acagcgatgtacaggta

SEQ ID NO: 18557 - DNA, 17 bp, Arabidopsis thaliana
acagcgattgtctgtgc

SEQ ID NO: 18558 - DNA, 17 bp, Arabidopsis thaliana
acagcgatttgttgccc

SEQ ID NO: 18559 - DNA, 17 bp, Arabidopsis thaliana
acagcgctatctctcta

SEQ ID NO: 18560 - DNA, 17 bp, Arabidopsis thaliana
acagcgctgtttttttt

SEQ ID NO: 18561 - DNA, 17 bp, Arabidopsis thaliana
acagcggaacttgctgg

SEQ ID NO: 18562 - DNA, 17 bp, Arabidopsis thaliana
acagcggaagaagggac

SEQ ID NO: 18563 - DNA, 17 bp, Arabidopsis thaliana
acagcggagtcctataa

SEQ ID NO: 18564 - DNA, 17 bp, Arabidopsis thaliana
acagcggatggacagtc

SEQ ID NO: 18565 - DNA, 17 bp, Arabidopsis thaliana
acagcggcagtgttggc

SEQ ID NO: 18566 - DNA, 17 bp, Arabidopsis thaliana
acagcggcccaagcgga

SEQ ID NO: 18567 - DNA, 17 bp, Arabidopsis thaliana
acagcggctcttcagac

SEQ ID NO: 18568 - DNA, 17 bp, Arabidopsis thaliana
acagcggctgccactag

SEQ ID NO: 18569 - DNA, 17 bp, Arabidopsis thaliana
acagcggctgccactgg

SEQ ID NO: 18570 - DNA, 17 bp, Arabidopsis thaliana
acagcggctgtcattgg

SEQ ID NO: 18571 - DNA, 17 bp, Arabidopsis thaliana
acagcggcttgatttga

SEQ ID NO: 18572 - DNA, 17 bp, Arabidopsis thaliana
acagcggtagcacagct

SEQ ID NO: 18573 - DNA, 17 bp, Arabidopsis thaliana
acagcggtccaagcgaa

SEQ ID NO: 18574 - DNA, 17 bp, Arabidopsis thaliana
acagcggtctatatctg

SEQ ID NO: 18575 - DNA, 17 bp, Arabidopsis thaliana
acagcggttaaccggtc

SEQ ID NO: 18576 - DNA, 17 bp, Arabidopsis thaliana
acagcggttcgagtccg

SEQ ID NO: 18577 - DNA, 17 bp, Arabidopsis thaliana
acagcgtaatctgtaca

SEQ ID NO: 18578 - DNA, 17 bp, Arabidopsis thaliana
acagcgtaatctgtgcg

SEQ ID NO: 18579 - DNA, 17 bp, Arabidopsis thaliana
acagcgtattcgcctca

SEQ ID NO: 18580 - DNA, 17 bp, Arabidopsis thaliana
acagcgttacatctccc

SEQ ID NO: 18581 - DNA, 17 bp, Arabidopsis thaliana
acagcgtttcttctgcg

SEQ ID NO: 18582 - DNA, 17 bp, Arabidopsis thaliana
acagctaacggcacact

SEQ ID NO: 18583 - DNA, 17 bp, Arabidopsis thaliana
acagctaattgaatgga

SEQ ID NO: 18584 - DNA, 17 bp, Arabidopsis thaliana
acagctacagcacgatt

SEQ ID NO: 18585 - DNA, 17 bp, Arabidopsis thaliana
acagctacagccaacac

SEQ ID NO: 18586 - DNA, 17 bp, Arabidopsis thaliana
acagctacagccatcac

SEQ ID NO: 18587 - DNA, 17 bp, Arabidopsis thaliana
acagctattctgcatgg

SEQ ID NO: 18588 - DNA, 17 bp, Arabidopsis thaliana
acagctattgacacgtg

SEQ ID NO: 18589 - DNA, 17 bp, Arabidopsis thaliana
acagctattgcccgcag

SEQ ID NO: 18590 - DNA, 17 bp, Arabidopsis thaliana
acagctattttatcgtg

SEQ ID NO: 18591 - DNA, 17 bp, Arabidopsis thaliana
acagctcaaccaatcac

SEQ ID NO: 18592 - DNA, 17 bp, Arabidopsis thaliana
acagctcagtttttgtg

SEQ ID NO: 18593 - DNA, 17 bp, Arabidopsis thaliana
acagctcatgtgcacca

SEQ ID NO: 18594 - DNA, 17 bp, Arabidopsis thaliana
acagctcatgttatgat

SEQ ID NO: 18595 - DNA, 17 bp, Arabidopsis thaliana
acagctcatttggatgt

SEQ ID NO: 18596 - DNA, 17 bp, Arabidopsis thaliana
acagctccgccgccggc

SEQ ID NO: 18597 - DNA, 17 bp, Arabidopsis thaliana
acagctcgatattctgc

SEQ ID NO: 18598 - DNA, 17 bp, Arabidopsis thaliana
acagctctattctacca

SEQ ID NO: 18599 - DNA, 17 bp, Arabidopsis thaliana
acagctctgcggcaaag

SEQ ID NO: 18600 - DNA, 17 bp, Arabidopsis thaliana
acagctcttgggtcctg

SEQ ID NO: 18601 - DNA, 17 bp, Arabidopsis thaliana
acagctgctaagattta

SEQ ID NO: 18602 - DNA, 17 bp, Arabidopsis thaliana
acagctgctacctgttt

SEQ ID NO: 18603 - DNA, 17 bp, Arabidopsis thaliana
acagctggacaactctg

SEQ ID NO: 18604 - DNA, 17 bp, Arabidopsis thaliana
acagctggcttctactg

SEQ ID NO: 18605 - DNA, 17 bp, Arabidopsis thaliana
acagctgggtttcttca

SEQ ID NO: 18606 - DNA, 17 bp, Arabidopsis thaliana
acagctggtctcacagg

SEQ ID NO: 18607 - DNA, 17 bp, Arabidopsis thaliana
acagctggtgaactcaa

SEQ ID NO: 18608 - DNA, 17 bp, Arabidopsis thaliana
acagctggtgtacggtc

SEQ ID NO: 18609 - DNA, 17 bp, Arabidopsis thaliana
acagctgtgcctgagag

SEQ ID NO: 18610 - DNA, 17 bp, Arabidopsis thaliana
acagcttcaccatcatt

SEQ ID NO: 18611 - DNA, 17 bp, Arabidopsis thaliana
acagcttcattgccgga

SEQ ID NO: 18612 - DNA, 17 bp, Arabidopsis thaliana
acagcttccagcttgtt

SEQ ID NO: 18613 - DNA, 17 bp, Arabidopsis thaliana
acagcttccatgcgtca

SEQ ID NO: 18614 - DNA, 17 bp, Arabidopsis thaliana
acagcttccatttcctg

SEQ ID NO: 18615 - DNA, 17 bp, Arabidopsis thaliana
acagcttccttgagtcc

SEQ ID NO: 18616 - DNA, 17 bp, Arabidopsis thaliana
acagcttcgatagttat

SEQ ID NO: 18617 - DNA, 17 bp, Arabidopsis thaliana
acagcttcgatatgcgt

SEQ ID NO: 18618 - DNA, 17 bp, Arabidopsis thaliana
acagcttcggcccatgt

SEQ ID NO: 18619 - DNA, 17 bp, Arabidopsis thaliana
acagcttctccgcaaac

SEQ ID NO: 18620 - DNA, 17 bp, Arabidopsis thaliana
acagcttcttctaacag

SEQ ID NO: 18621 - DNA, 17 bp, Arabidopsis thaliana
acagcttgcagagagaa

SEQ ID NO: 18622 - DNA, 17 bp, Arabidopsis thaliana
acagcttggacctgaac

SEQ ID NO: 18623 - DNA, 17 bp, Arabidopsis thaliana
acagcttggactgaact

SEQ ID NO: 18624 - DNA, 17 bp, Arabidopsis thaliana
acagcttggactgggca

SEQ ID NO: 18625 - DNA, 17 bp, Arabidopsis thaliana
acagctttcccgtgtag

SEQ ID NO: 18626 - DNA, 17 bp, Arabidopsis thaliana
acagctttcggttgccg

SEQ ID NO: 18627 - DNA, 17 bp, Arabidopsis thaliana
acagctttgcgttacca

SEQ ID NO: 18628 - DNA, 17 bp, Arabidopsis thaliana
acagctttgcttctgta

SEQ ID NO: 18629 - DNA, 17 bp, Arabidopsis thaliana
acagctttgtgttgtac

SEQ ID NO: 18630 - DNA, 17 bp, Arabidopsis thaliana
acagcttttggaccgag

SEQ ID NO: 18631 - DNA, 17 bp, Arabidopsis thaliana
acagcttttggttacca

SEQ ID NO: 18632 - DNA, 17 bp, Arabidopsis thaliana
acagctttttacaggtt

SEQ ID NO: 18633 - DNA, 17 bp, Arabidopsis thaliana
acaggaagaggctctcc

SEQ ID NO: 18634 - DNA, 17 bp, Arabidopsis thaliana
acaggaagggttggcgg

SEQ ID NO: 18635 - DNA, 17 bp, Arabidopsis thaliana
acaggaagtgtcgggat

SEQ ID NO: 18636 - DNA, 17 bp, Arabidopsis thaliana
acaggacaatgggatgt

SEQ ID NO: 18637 - DNA, 17 bp, Arabidopsis thaliana
acaggacagagcggtgg

SEQ ID NO: 18638 - DNA, 17 bp, Arabidopsis thaliana
acaggacaggttggcgg

SEQ ID NO: 18639 - DNA, 17 bp, Arabidopsis thaliana
acaggacaggtttggcg

SEQ ID NO: 18640 - DNA, 17 bp, Arabidopsis thaliana
acaggacgagttggccc

SEQ ID NO: 18641 - DNA, 17 bp, Arabidopsis thaliana
acaggacgagttggcgg

SEQ ID NO: 18642 - DNA, 17 bp, Arabidopsis thaliana
acaggacgggtgggtgg

SEQ ID NO: 18643 - DNA, 17 bp, Arabidopsis thaliana
acaggacgggtgggttt

SEQ ID NO: 18644 - DNA, 17 bp, Arabidopsis thaliana
acaggacgggttgacgg

SEQ ID NO: 18645 - DNA, 17 bp, Arabidopsis thaliana
acaggacgggttggagg

SEQ ID NO: 18646 - DNA, 17 bp, Arabidopsis thaliana
acaggacgggttggcgg

SEQ ID NO: 18647 - DNA, 17 bp, Arabidopsis thaliana
acaggacgggtttggca

SEQ ID NO: 18648 - DNA, 17 bp, Arabidopsis thaliana
acaggacgggtttggcg

SEQ ID NO: 18649 - DNA, 17 bp, Arabidopsis thaliana
acaggactatgaatacg

SEQ ID NO: 18650 - DNA, 17 bp, Arabidopsis thaliana
acaggactctgctaagt

SEQ ID NO: 18651 - DNA, 17 bp, Arabidopsis thaliana
acaggagaagcagcgac

SEQ ID NO: 18652 - DNA, 17 bp, Arabidopsis thaliana
acaggagactgtaacaa

SEQ ID NO: 18653 - DNA, 17 bp, Arabidopsis thaliana
acaggagagacactgtg

SEQ ID NO: 18654 - DNA, 17 bp, Arabidopsis thaliana
acaggagatccaggatt

SEQ ID NO: 18655 - DNA, 17 bp, Arabidopsis thaliana
acaggagatgtgtctca

SEQ ID NO: 18656 - DNA, 17 bp, Arabidopsis thaliana
acaggagattcgattaa

SEQ ID NO: 18657 - DNA, 17 bp, Arabidopsis thaliana
acaggagctgcggctgg

SEQ ID NO: 18658 - DNA, 17 bp, Arabidopsis thaliana
acaggagctggacccca

SEQ ID NO: 18659 - DNA, 17 bp, Arabidopsis thaliana
acaggatgcgactaaga

SEQ ID NO: 18660 - DNA, 17 bp, Arabidopsis thaliana
acaggatgcgactgatg

SEQ ID NO: 18661 - DNA, 17 bp, Arabidopsis thaliana
acaggatgcgagtaaga

SEQ ID NO: 18662 - DNA, 17 bp, Arabidopsis thaliana
acaggatgcggatccat

SEQ ID NO: 18663 - DNA, 17 bp, Arabidopsis thaliana
acaggatggtgcacttt

SEQ ID NO: 18664 - DNA, 17 bp, Arabidopsis thaliana
acaggatgtttaggtgc

SEQ ID NO: 18665 - DNA, 17 bp, Arabidopsis thaliana
acaggattgacttcgat

SEQ ID NO: 18666 - DNA, 17 bp, Arabidopsis thaliana
acaggattgttctactg

SEQ ID NO: 18667 - DNA, 17 bp, Arabidopsis thaliana
acaggcaacagcgttag

SEQ ID NO: 18668 - DNA, 17 bp, Arabidopsis thaliana
acaggcaagggtttggc

SEQ ID NO: 18669 - DNA, 17 bp, Arabidopsis thaliana
acaggcagatgacaggt

SEQ ID NO: 18670 - DNA, 17 bp, Arabidopsis thaliana
acaggcattggcgtttc

SEQ ID NO: 18671 - DNA, 17 bp, Arabidopsis thaliana
acaggccctgtttgttt

SEQ ID NO: 18672 - DNA, 17 bp, Arabidopsis thaliana
acaggcgaaataccgag

SEQ ID NO: 18673 - DNA, 17 bp, Arabidopsis thaliana
acaggcgaatcatctcg

SEQ ID NO: 18674 - DNA, 17 bp, Arabidopsis thaliana
acaggcgcatcctgtag

SEQ ID NO: 18675 - DNA, 17 bp, Arabidopsis thaliana
acaggcgcccgccaccc

SEQ ID NO: 18676 - DNA, 17 bp, Arabidopsis thaliana
acaggcgcctactacgt

SEQ ID NO: 18677 - DNA, 17 bp, Arabidopsis thaliana
acaggcgctcgaccgta

SEQ ID NO: 18678 - DNA, 17 bp, Arabidopsis thaliana
acaggcgctgtctacga

SEQ ID NO: 18679 - DNA, 17 bp, Arabidopsis thaliana
acaggcggcctgattac

SEQ ID NO: 18680 - DNA, 17 bp, Arabidopsis thaliana
acaggcggtcttgtgtg

SEQ ID NO: 18681 - DNA, 17 bp, Arabidopsis thaliana
acaggcggttgcggttt

SEQ ID NO: 18682 - DNA, 17 bp, Arabidopsis thaliana
acaggctaaaggcccta

SEQ ID NO: 18683 - DNA, 17 bp, Arabidopsis thaliana
acaggctctatttggga

SEQ ID NO: 18684 - DNA, 17 bp, Arabidopsis thaliana
acaggctgaggtctcgt

SEQ ID NO: 18685 - DNA, 17 bp, Arabidopsis thaliana
acaggcttacaagatcg

SEQ ID NO: 18686 - DNA, 17 bp, Arabidopsis thaliana
acaggcttcggcccaga

SEQ ID NO: 18687 - DNA, 17 bp, Arabidopsis thaliana
acaggcttctagcttcg

SEQ ID NO: 18688 - DNA, 17 bp, Arabidopsis thaliana
acaggcttcttctgatt

SEQ ID NO: 18689 - DNA, 17 bp, Arabidopsis thaliana
acaggctttggcccaga

SEQ ID NO: 18690 - DNA, 17 bp, Arabidopsis thaliana
acagggaactgattttc

SEQ ID NO: 18691 - DNA, 17 bp, Arabidopsis thaliana
acagggaatgccattgc

SEQ ID NO: 18692 - DNA, 17 bp, Arabidopsis thaliana
acagggacagtccagta

SEQ ID NO: 18693 - DNA, 17 bp, Arabidopsis thaliana
acagggacagtcggggc

SEQ ID NO: 18694 - DNA, 17 bp, Arabidopsis thaliana
acagggacagtcggggg

SEQ ID NO: 18695 - DNA, 17 bp, Arabidopsis thaliana
acagggacctgattgcc

SEQ ID NO: 18696 - DNA, 17 bp, Arabidopsis thaliana
acagggacctgatttgc

SEQ ID NO: 18697 - DNA, 17 bp, Arabidopsis thaliana
acagggacgtttttcct

SEQ ID NO: 18698 - DNA, 17 bp, Arabidopsis thaliana
acagggactgtcactaa

SEQ ID NO: 18699 - DNA, 17 bp, Arabidopsis thaliana
acagggactgtgcagta

SEQ ID NO: 18700 - DNA, 17 bp, Arabidopsis thaliana
acagggagagaactgat

SEQ ID NO: 18701 - DNA, 17 bp, Arabidopsis thaliana
acagggagtctacagga

SEQ ID NO: 18702 - DNA, 17 bp, Arabidopsis thaliana
acagggcagcaccgaca

SEQ ID NO: 18703 - DNA, 17 bp, Arabidopsis thaliana
acagggccggccctgcc

SEQ ID NO: 18704 - DNA, 17 bp, Arabidopsis thaliana
acagggcttattggatc

SEQ ID NO: 18705 - DNA, 17 bp, Arabidopsis thaliana
acaggggagccaataac

SEQ ID NO: 18706 - DNA, 17 bp, Arabidopsis thaliana
acaggggagccggcgac

SEQ ID NO: 18707 - DNA, 17 bp, Arabidopsis thaliana
acaggggtcccaggtcc

SEQ ID NO: 18708 - DNA, 17 bp, Arabidopsis thaliana
acagggtagagcggatc

SEQ ID NO: 18709 - DNA, 17 bp, Arabidopsis thaliana
acagggtcttctgagtg

SEQ ID NO: 18710 - DNA, 17 bp, Arabidopsis thaliana
acagggtcttctttccc

SEQ ID NO: 18711 - DNA, 17 bp, Arabidopsis thaliana
acagggttcgtttccct

SEQ ID NO: 18712 - DNA, 17 bp, Arabidopsis thaliana
acagggttttgcttcca

SEQ ID NO: 18713 - DNA, 17 bp, Arabidopsis thaliana
acaggtaaatgctcaac

SEQ ID NO: 18714 - DNA, 17 bp, Arabidopsis thaliana
acaggtaattcactttg

SEQ ID NO: 18715 - DNA, 17 bp, Arabidopsis thaliana
acaggtacagcctcctc

SEQ ID NO: 18716 - DNA, 17 bp, Arabidopsis thaliana
acaggtactacagcaat

SEQ ID NO: 18717 - DNA, 17 bp, Arabidopsis thaliana
acaggtatgcggaacaa

SEQ ID NO: 18718 - DNA, 17 bp, Arabidopsis thaliana
acaggtccagctaacaa

SEQ ID NO: 18719 - DNA, 17 bp, Arabidopsis thaliana
acaggtccctacgaggc

SEQ ID NO: 18720 - DNA, 17 bp, Arabidopsis thaliana
acaggtcgccggttcga

SEQ ID NO: 18721 - DNA, 17 bp, Arabidopsis thaliana
acaggtcggaaaacaga

SEQ ID NO: 18722 - DNA, 17 bp, Arabidopsis thaliana
acaggtctgtgatgccc

SEQ ID NO: 18723 - DNA, 17 bp, Arabidopsis thaliana
acaggtctgtgatgtcc

SEQ ID NO: 18724 - DNA, 17 bp, Arabidopsis thaliana
acaggtgcaattctact

SEQ ID NO: 18725 - DNA, 17 bp, Arabidopsis thaliana
acaggtgccgcatggct

SEQ ID NO: 18726 - DNA, 17 bp, Arabidopsis thaliana
acaggtgcgttccatta

SEQ ID NO: 18727 - DNA, 17 bp, Arabidopsis thaliana
acaggtggcctgactat

SEQ ID NO: 18728 - DNA, 17 bp, Arabidopsis thaliana
acaggtggtgcatggat

SEQ ID NO: 18729 - DNA, 17 bp, Arabidopsis thaliana
acaggtggtgcatggct

SEQ ID NO: 18730 - DNA, 17 bp, Arabidopsis thaliana
acaggtgtctacgggtg

SEQ ID NO: 18731 - DNA, 17 bp, Arabidopsis thaliana
acaggtgtctcggacga

SEQ ID NO: 18732 - DNA, 17 bp, Arabidopsis thaliana
acaggtgtggtcggatc

SEQ ID NO: 18733 - DNA, 17 bp, Arabidopsis thaliana
acaggtgttgcatggct

SEQ ID NO: 18734 - DNA, 17 bp, Arabidopsis thaliana
acaggttaagagtttgg

SEQ ID NO: 18735 - DNA, 17 bp, Arabidopsis thaliana
acaggttaagtgtttag

SEQ ID NO: 18736 - DNA, 17 bp, Arabidopsis thaliana
acaggttacggtgccca

SEQ ID NO: 18737 - DNA, 17 bp, Arabidopsis thaliana
acaggttatcagtaaga

SEQ ID NO: 18738 - DNA, 17 bp, Arabidopsis thaliana
acaggttatggtgactg

SEQ ID NO: 18739 - DNA, 17 bp, Arabidopsis thaliana
acaggttcagctatggc

SEQ ID NO: 18740 - DNA, 17 bp, Arabidopsis thaliana
acaggttcatatccagg

SEQ ID NO: 18741 - DNA, 17 bp, Arabidopsis thaliana
acaggttcatgtttttg

SEQ ID NO: 18742 - DNA, 17 bp, Arabidopsis thaliana
acaggttcgagagtcgg

SEQ ID NO: 18743 - DNA, 17 bp, Arabidopsis thaliana
acaggttcgagtcctct

SEQ ID NO: 18744 - DNA, 17 bp, Arabidopsis thaliana
acaggttcgatccctgt

SEQ ID NO: 18745 - DNA, 17 bp, Arabidopsis thaliana
acaggttcggtccctgt

SEQ ID NO: 18746 - DNA, 17 bp, Arabidopsis thaliana
acaggttcgttccctgt

SEQ ID NO: 18747 - DNA, 17 bp, Arabidopsis thaliana
acaggttgcggttcagt

SEQ ID NO: 18748 - DNA, 17 bp, Arabidopsis thaliana
acaggttggcgggacgg

SEQ ID NO: 18749 - DNA, 17 bp, Arabidopsis thaliana
acaggttgggcaaggtt

SEQ ID NO: 18750 - DNA, 17 bp, Arabidopsis thaliana
acaggttgttaactggt

SEQ ID NO: 18751 - DNA, 17 bp, Arabidopsis thaliana
acaggtttacaggttat

SEQ ID NO: 18752 - DNA, 17 bp, Arabidopsis thaliana
acaggtttagtgtctca

SEQ ID NO: 18753 - DNA, 17 bp, Arabidopsis thaliana
acaggtttatgtttttg

SEQ ID NO: 18754 - DNA, 17 bp, Arabidopsis thaliana
acaggtttggcaggacg

SEQ ID NO: 18755 - DNA, 17 bp, Arabidopsis thaliana
acaggtttggcgggacc

SEQ ID NO: 18756 - DNA, 17 bp, Arabidopsis thaliana
acaggtttggcgggacg

SEQ ID NO: 18757 - DNA, 17 bp, Arabidopsis thaliana
acaggtttgggctatct

SEQ ID NO: 18758 - DNA, 17 bp, Arabidopsis thaliana
acaggttttagttcagg

SEQ ID NO: 18759 - DNA, 17 bp, Arabidopsis thaliana
acaggttttggtgtgtt

SEQ ID NO: 18760 - DNA, 17 bp, Arabidopsis thaliana
acagtaaacgaggattt

SEQ ID NO: 18761 - DNA, 17 bp, Arabidopsis thaliana
acagtaaacgcggattt

SEQ ID NO: 18762 - DNA, 17 bp, Arabidopsis thaliana
acagtaaacgctatttt

SEQ ID NO: 18763 - DNA, 17 bp, Arabidopsis thaliana
acagtaaacttatgccg

SEQ ID NO: 18764 - DNA, 17 bp, Arabidopsis thaliana
acagtaactgagtgcag

SEQ ID NO: 18765 - DNA, 17 bp, Arabidopsis thaliana
acagtaactttctcttg

SEQ ID NO: 18766 - DNA, 17 bp, Arabidopsis thaliana
acagtaaggctttagtc

SEQ ID NO: 18767 - DNA, 17 bp, Arabidopsis thaliana
acagtactgctgcggtg

SEQ ID NO: 18768 - DNA, 17 bp, Arabidopsis thaliana
acagtagaagccagttg

SEQ ID NO: 18769 - DNA, 17 bp, Arabidopsis thaliana
acagtagaccgatgttt

SEQ ID NO: 18770 - DNA, 17 bp, Arabidopsis thaliana
acagtagaggtggatcg

SEQ ID NO: 18771 - DNA, 17 bp, Arabidopsis thaliana
acagtagatgtcacagg

SEQ ID NO: 18772 - DNA, 17 bp, Arabidopsis thaliana
acagtagcacactgccg

SEQ ID NO: 18773 - DNA, 17 bp, Arabidopsis thaliana
acagtagccgttgatcc

SEQ ID NO: 18774 - DNA, 17 bp, Arabidopsis thaliana
acagtagctgtcactgg

SEQ ID NO: 18775 - DNA, 17 bp, Arabidopsis thaliana
acagtaggacaaatgct

SEQ ID NO: 18776 - DNA, 17 bp, Arabidopsis thaliana
acagtaggcgagacact

SEQ ID NO: 18777 - DNA, 17 bp, Arabidopsis thaliana
acagtagtccggttcat

SEQ ID NO: 18778 - DNA, 17 bp, Arabidopsis thaliana
acagtagtcgttgaccc

SEQ ID NO: 18779 - DNA, 17 bp, Arabidopsis thaliana
acagtagtttgcaggtt

SEQ ID NO: 18780 - DNA, 17 bp, Arabidopsis thaliana
acagtatccgcaggcga

SEQ ID NO: 18781 - DNA, 17 bp, Arabidopsis thaliana
acagtatctggactcga

SEQ ID NO: 18782 - DNA, 17 bp, Arabidopsis thaliana
acagtatcttgagtttt

SEQ ID NO: 18783 - DNA, 17 bp, Arabidopsis thaliana
acagtcacagcttctac

SEQ ID NO: 18784 - DNA, 17 bp, Arabidopsis thaliana
acagtcacctgaagaat

SEQ ID NO: 18785 - DNA, 17 bp, Arabidopsis thaliana
acagtcactcgatctcg

SEQ ID NO: 18786 - DNA, 17 bp, Arabidopsis thaliana
acagtcactttcggcga

SEQ ID NO: 18787 - DNA, 17 bp, Arabidopsis thaliana
acagtcagctcagaact

SEQ ID NO: 18788 - DNA, 17 bp, Arabidopsis thaliana
acagtcatgctcgtttt

SEQ ID NO: 18789 - DNA, 17 bp, Arabidopsis thaliana
acagtccacagatggtc

SEQ ID NO: 18790 - DNA, 17 bp, Arabidopsis thaliana
acagtccacatgcgttg

SEQ ID NO: 18791 - DNA, 17 bp, Arabidopsis thaliana
acagtccactttcgtac

SEQ ID NO: 18792 - DNA, 17 bp, Arabidopsis thaliana
acagtccaggatttgaa

SEQ ID NO: 18793 - DNA, 17 bp, Arabidopsis thaliana
acagtccgagaagacgt

SEQ ID NO: 18794 - DNA, 17 bp, Arabidopsis thaliana
acagtccgcagatggtc

SEQ ID NO: 18795 - DNA, 17 bp, Arabidopsis thaliana
acagtccgggatttgaa

SEQ ID NO: 18796 - DNA, 17 bp, Arabidopsis thaliana
acagtcctctgtgtgac

SEQ ID NO: 18797 - DNA, 17 bp, Arabidopsis thaliana
acagtcgaggttacaca

SEQ ID NO: 18798 - DNA, 17 bp, Arabidopsis thaliana
acagtcgattgggcatt

SEQ ID NO: 18799 - DNA, 17 bp, Arabidopsis thaliana
acagtcgcactttgcaa

SEQ ID NO: 18800 - DNA, 17 bp, Arabidopsis thaliana
acagtcgcatcctgtag

SEQ ID NO: 18801 - DNA, 17 bp, Arabidopsis thaliana
acagtcgccagcgaccg

SEQ ID NO: 18802 - DNA, 17 bp, Arabidopsis thaliana
acagtcggcgatttggt

SEQ ID NO: 18803 - DNA, 17 bp, Arabidopsis thaliana
acagtcggggccaaaac

SEQ ID NO: 18804 - DNA, 17 bp, Arabidopsis thaliana
acagtcgggggcattcg

SEQ ID NO: 18805 - DNA, 17 bp, Arabidopsis thaliana
acagtcggtctcagatc

SEQ ID NO: 18806 - DNA, 17 bp, Arabidopsis thaliana
acagtcgtcaccattca

SEQ ID NO: 18807 - DNA, 17 bp, Arabidopsis thaliana
acagtcgttttgcgagg

SEQ ID NO: 18808 - DNA, 17 bp, Arabidopsis thaliana
acagtctaaggccctgt

SEQ ID NO: 18809 - DNA, 17 bp, Arabidopsis thaliana
acagtctacagttctgt

SEQ ID NO: 18810 - DNA, 17 bp, Arabidopsis thaliana
acagtctactcaaatcc

SEQ ID NO: 18811 - DNA, 17 bp, Arabidopsis thaliana
acagtctcccgaaccgt

SEQ ID NO: 18812 - DNA, 17 bp, Arabidopsis thaliana
acagtctccgttggaag

SEQ ID NO: 18813 - DNA, 17 bp, Arabidopsis thaliana
acagtctcctgtacacg

SEQ ID NO: 18814 - DNA, 17 bp, Arabidopsis thaliana
acagtctctcgaccgac

SEQ ID NO: 18815 - DNA, 17 bp, Arabidopsis thaliana
acagtctctgcttctgc

SEQ ID NO: 18816 - DNA, 17 bp, Arabidopsis thaliana
acagtctctggtgttgc

SEQ ID NO: 18817 - DNA, 17 bp, Arabidopsis thaliana
acagtctgaattcgttc

SEQ ID NO: 18818 - DNA, 17 bp, Arabidopsis thaliana
acagtctgtaggttgca

SEQ ID NO: 18819 - DNA, 17 bp, Arabidopsis thaliana
acagtcttcatgtgatc

SEQ ID NO: 18820 - DNA, 17 bp, Arabidopsis thaliana
acagtcttccgctctac

SEQ ID NO: 18821 - DNA, 17 bp, Arabidopsis thaliana
acagtctttaggttgca

SEQ ID NO: 18822 - DNA, 17 bp, Arabidopsis thaliana
acagtctttgtttcgac

SEQ ID NO: 18823 - DNA, 17 bp, Arabidopsis thaliana
acagtgaaaccgaggac

SEQ ID NO: 18824 - DNA, 17 bp, Arabidopsis thaliana
acagtgaaccttttgtc

SEQ ID NO: 18825 - DNA, 17 bp, Arabidopsis thaliana
acagtgaagatcaaaac

SEQ ID NO: 18826 - DNA, 17 bp, Arabidopsis thaliana
acagtgaatccctccca

SEQ ID NO: 18827 - DNA, 17 bp, Arabidopsis thaliana
acagtgacccggtttaa

SEQ ID NO: 18828 - DNA, 17 bp, Arabidopsis thaliana
acagtgactgctactga

SEQ ID NO: 18829 - DNA, 17 bp, Arabidopsis thaliana
acagtgatccacgtgtc

SEQ ID NO: 18830 - DNA, 17 bp, Arabidopsis thaliana
acagtgatctaattagc

SEQ ID NO: 18831 - DNA, 17 bp, Arabidopsis thaliana
acagtgatctgactagt

SEQ ID NO: 18832 - DNA, 17 bp, Arabidopsis thaliana
acagtgatctgagactg

SEQ ID NO: 18833 - DNA, 17 bp, Arabidopsis thaliana
acagtgcaaccactaga

SEQ ID NO: 18834 - DNA, 17 bp, Arabidopsis thaliana
acagtgcaaggcgtttg

SEQ ID NO: 18835 - DNA, 17 bp, Arabidopsis thaliana
acagtgcacagtagccg

SEQ ID NO: 18836 - DNA, 17 bp, Arabidopsis thaliana
acagtgcattggtcggc

SEQ ID NO: 18837 - DNA, 17 bp, Arabidopsis thaliana
acagtgccatagggggt

SEQ ID NO: 18838 - DNA, 17 bp, Arabidopsis thaliana
acagtgcctctggatct

SEQ ID NO: 18839 - DNA, 17 bp, Arabidopsis thaliana
acagtgccttcgcagac

SEQ ID NO: 18840 - DNA, 17 bp, Arabidopsis thaliana
acagtgcggtgcgtttc

SEQ ID NO: 18841 - DNA, 17 bp, Arabidopsis thaliana
acagtgcttcgatttgt

SEQ ID NO: 18842 - DNA, 17 bp, Arabidopsis thaliana
acagtggactgtgtgat

SEQ ID NO: 18843 - DNA, 17 bp, Arabidopsis thaliana
acagtggatgtcagtct

SEQ ID NO: 18844 - DNA, 17 bp, Arabidopsis thaliana
acagtggcagagtggcc

SEQ ID NO: 18845 - DNA, 17 bp, Arabidopsis thaliana
acagtggccacgtgtgc

SEQ ID NO: 18846 - DNA, 17 bp, Arabidopsis thaliana
acagtggccttgctgcc

SEQ ID NO: 18847 - DNA, 17 bp, Arabidopsis thaliana
acagtggcggatctaga

SEQ ID NO: 18848 - DNA, 17 bp, Arabidopsis thaliana
acagtggctgaacatgc

SEQ ID NO: 18849 - DNA, 17 bp, Arabidopsis thaliana
acagtggctgccactag

SEQ ID NO: 18850 - DNA, 17 bp, Arabidopsis thaliana
acagtggctgctactga

SEQ ID NO: 18851 - DNA, 17 bp, Arabidopsis thaliana
acagtggctgtcattga

SEQ ID NO: 18852 - DNA, 17 bp, Arabidopsis thaliana
acagtggctgtcattgg

SEQ ID NO: 18853 - DNA, 17 bp, Arabidopsis thaliana
acagtgggagaccatcc

SEQ ID NO: 18854 - DNA, 17 bp, Arabidopsis thaliana
acagtgggagctacgaa

SEQ ID NO: 18855 - DNA, 17 bp, Arabidopsis thaliana
acagtggtcatctggtg

SEQ ID NO: 18856 - DNA, 17 bp, Arabidopsis thaliana
acagtggtgacatccat

SEQ ID NO: 18857 - DNA, 17 bp, Arabidopsis thaliana
acagtggtgatcatcca

SEQ ID NO: 18858 - DNA, 17 bp, Arabidopsis thaliana
acagtgtactactatcg

SEQ ID NO: 18859 - DNA, 17 bp, Arabidopsis thaliana
acagtgtcagagtttct

SEQ ID NO: 18860 - DNA, 17 bp, Arabidopsis thaliana
acagtgtcctatgaatt

SEQ ID NO: 18861 - DNA, 17 bp, Arabidopsis thaliana
acagtgtcgatgcaaga

SEQ ID NO: 18862 - DNA, 17 bp, Arabidopsis thaliana
acagtgtctctcctgtt

SEQ ID NO: 18863 - DNA, 17 bp, Arabidopsis thaliana
acagtgtgacgaaaagc

SEQ ID NO: 18864 - DNA, 17 bp, Arabidopsis thaliana
acagtgtgcttctcgtt

SEQ ID NO: 18865 - DNA, 17 bp, Arabidopsis thaliana
acagtgtggtggtcctc

SEQ ID NO: 18866 - DNA, 17 bp, Arabidopsis thaliana
acagtgtggtggtcctt

SEQ ID NO: 18867 - DNA, 17 bp, Arabidopsis thaliana
acagtgtgtctagtatc

SEQ ID NO: 18868 - DNA, 17 bp, Arabidopsis thaliana
acagtgttccgcgctgc

SEQ ID NO: 18869 - DNA, 17 bp, Arabidopsis thaliana
acagtgttgtcgtcgtg

SEQ ID NO: 18870 - DNA, 17 bp, Arabidopsis thaliana
acagtgtttttgtgggt

SEQ ID NO: 18871 - DNA, 17 bp, Arabidopsis thaliana
acagttaaacgtgcttg

SEQ ID NO: 18872 - DNA, 17 bp, Arabidopsis thaliana
acagttaagagtgtttg

SEQ ID NO: 18873 - DNA, 17 bp, Arabidopsis thaliana
acagttaagcaaagggt

SEQ ID NO: 18874 - DNA, 17 bp, Arabidopsis thaliana
acagttaagcgtgcttg

SEQ ID NO: 18875 - DNA, 17 bp, Arabidopsis thaliana
acagttaagtccgggta

SEQ ID NO: 18876 - DNA, 17 bp, Arabidopsis thaliana
acagttaatttgcttgc

SEQ ID NO: 18877 - DNA, 17 bp, Arabidopsis thaliana
acagttacactttgcgc

SEQ ID NO: 18878 - DNA, 17 bp, Arabidopsis thaliana
acagttacttggataca

SEQ ID NO: 18879 - DNA, 17 bp, Arabidopsis thaliana
acagttagtctgcagcg

SEQ ID NO: 18880 - DNA, 17 bp, Arabidopsis thaliana
acagttcaagaggttcg

SEQ ID NO: 18881 - DNA, 17 bp, Arabidopsis thaliana
acagttcggtccctatc

SEQ ID NO: 18882 - DNA, 17 bp, Arabidopsis thaliana
acagttctacctgatct

SEQ ID NO: 18883 - DNA, 17 bp, Arabidopsis thaliana
acagttctagatcctcg

SEQ ID NO: 18884 - DNA, 17 bp, Arabidopsis thaliana
acagttctgagccaaga

SEQ ID NO: 18885 - DNA, 17 bp, Arabidopsis thaliana
acagttctgggccgaat

SEQ ID NO: 18886 - DNA, 17 bp, Arabidopsis thaliana
acagttctgtggtcaga

SEQ ID NO: 18887 - DNA, 17 bp, Arabidopsis thaliana
acagttcttacgccctt

SEQ ID NO: 18888 - DNA, 17 bp, Arabidopsis thaliana
acagttcttcgacgtgt

SEQ ID NO: 18889 - DNA, 17 bp, Arabidopsis thaliana
acagttgatattgaccg

SEQ ID NO: 18890 - DNA, 17 bp, Arabidopsis thaliana
acagttgatggtgatgt

SEQ ID NO: 18891 - DNA, 17 bp, Arabidopsis thaliana
acagttgattctcttct

SEQ ID NO: 18892 - DNA, 17 bp, Arabidopsis thaliana
acagttgcaatggacag

SEQ ID NO: 18893 - DNA, 17 bp, Arabidopsis thaliana
acagttgcaggagcagt

SEQ ID NO: 18894 - DNA, 17 bp, Arabidopsis thaliana
acagttgccagaacact

SEQ ID NO: 18895 - DNA, 17 bp, Arabidopsis thaliana
acagttgccagaccact

SEQ ID NO: 18896 - DNA, 17 bp, Arabidopsis thaliana
acagttgcgacatagat

SEQ ID NO: 18897 - DNA, 17 bp, Arabidopsis thaliana
acagttgcgacatggat

SEQ ID NO: 18898 - DNA, 17 bp, Arabidopsis thaliana
acagttgcgggcggtac

SEQ ID NO: 18899 - DNA, 17 bp, Arabidopsis thaliana
acagttgcttaggctct

SEQ ID NO: 18900 - DNA, 17 bp, Arabidopsis thaliana
acagttgcttccttggc

SEQ ID NO: 18901 - DNA, 17 bp, Arabidopsis thaliana
acagttggccaaagatt

SEQ ID NO: 18902 - DNA, 17 bp, Arabidopsis thaliana
acagttgggttcagacc

SEQ ID NO: 18903 - DNA, 17 bp, Arabidopsis thaliana
acagttggtgaccggtc

SEQ ID NO: 18904 - DNA, 17 bp, Arabidopsis thaliana
acagttggtgagtggtc

SEQ ID NO: 18905 - DNA, 17 bp, Arabidopsis thaliana
acagttgtaagtccgac

SEQ ID NO: 18906 - DNA, 17 bp, Arabidopsis thaliana
acagttgtctacatctc

SEQ ID NO: 18907 - DNA, 17 bp, Arabidopsis thaliana
acagttgtctcattact

SEQ ID NO: 18908 - DNA, 17 bp, Arabidopsis thaliana
acagttgtctcgtgtaa

SEQ ID NO: 18909 - DNA, 17 bp, Arabidopsis thaliana
acagttgtgaatttgta

SEQ ID NO: 18910 - DNA, 17 bp, Arabidopsis thaliana
acagtttaaaatgggct

SEQ ID NO: 18911 - DNA, 17 bp, Arabidopsis thaliana
acagtttaccagtgcga

SEQ ID NO: 18912 - DNA, 17 bp, Arabidopsis thaliana
acagtttagttagtcag

SEQ ID NO: 18913 - DNA, 17 bp, Arabidopsis thaliana
acagtttatttcctagg

SEQ ID NO: 18914 - DNA, 17 bp, Arabidopsis thaliana
acagtttatttctcagt

SEQ ID NO: 18915 - DNA, 17 bp, Arabidopsis thaliana
acagtttcatttatctg

SEQ ID NO: 18916 - DNA, 17 bp, Arabidopsis thaliana
acagtttccttgtagaa

SEQ ID NO: 18917 - DNA, 17 bp, Arabidopsis thaliana
acagtttcgtttggttc

SEQ ID NO: 18918 - DNA, 17 bp, Arabidopsis thaliana
acagtttctatggggcg

SEQ ID NO: 18919 - DNA, 17 bp, Arabidopsis thaliana
acagtttcttgctcaac

SEQ ID NO: 18920 - DNA, 17 bp, Arabidopsis thaliana
acagtttctttctcact

SEQ ID NO: 18921 - DNA, 17 bp, Arabidopsis thaliana
acagtttgacttttggg

SEQ ID NO: 18922 - DNA, 17 bp, Arabidopsis thaliana
acagtttgcagagacct

SEQ ID NO: 18923 - DNA, 17 bp, Arabidopsis thaliana
acagtttgcgatatgcc

SEQ ID NO: 18924 - DNA, 17 bp, Arabidopsis thaliana
acagtttggccgagtga

SEQ ID NO: 18925 - DNA, 17 bp, Arabidopsis thaliana
acagtttggccgagtgg

SEQ ID NO: 18926 - DNA, 17 bp, Arabidopsis thaliana
acagtttgtgttgtgat

SEQ ID NO: 18927 - DNA, 17 bp, Arabidopsis thaliana
acagtttgttgagattt

SEQ ID NO: 18928 - DNA, 17 bp, Arabidopsis thaliana
acagttttcagagcgca

SEQ ID NO: 18929 - DNA, 17 bp, Arabidopsis thaliana
acagttttgacacgcac

SEQ ID NO: 18930 - DNA, 17 bp, Arabidopsis thaliana
acagttttgacagttac

SEQ ID NO: 18931 - DNA, 17 bp, Arabidopsis thaliana
acagttttgatagttac

SEQ ID NO: 18932 - DNA, 17 bp, Arabidopsis thaliana
acagttttgcgaattac

SEQ ID NO: 18933 - DNA, 17 bp, Arabidopsis thaliana
acagttttggaatgcgt

SEQ ID NO: 18934 - DNA, 17 bp, Arabidopsis thaliana
acagttttggccgttgc

SEQ ID NO: 18935 - DNA, 17 bp, Arabidopsis thaliana
acagttttggccgttgg

SEQ ID NO: 18936 - DNA, 17 bp, Arabidopsis thaliana
acagttttgggctgaca

SEQ ID NO: 18937 - DNA, 17 bp, Arabidopsis thaliana
acagtttttgcaacctc

SEQ ID NO: 18938 - DNA, 17 bp, Arabidopsis thaliana
acagtttttgccacctc

SEQ ID NO: 18939 - DNA, 17 bp, Arabidopsis thaliana
acataaacccgtgattt

SEQ ID NO: 18940 - DNA, 17 bp, Arabidopsis thaliana
acataaacctgtaattt

SEQ ID NO: 18941 - DNA, 17 bp, Arabidopsis thaliana
acataaacctgtgattt

SEQ ID NO: 18942 - DNA, 17 bp, Arabidopsis thaliana
acataacggtgtcctgc

SEQ ID NO: 18943 - DNA, 17 bp, Arabidopsis thaliana
acataactgatttcggc

SEQ ID NO: 18944 - DNA, 17 bp, Arabidopsis thaliana
acataagcagcgaccaa

SEQ ID NO: 18945 - DNA, 17 bp, Arabidopsis thaliana
acataagcggctagaca

SEQ ID NO: 18946 - DNA, 17 bp, Arabidopsis thaliana
acataagtgatgtgata

SEQ ID NO: 18947 - DNA, 17 bp, Arabidopsis thaliana
acataagtgcgcgtggg

SEQ ID NO: 18948 - DNA, 17 bp, Arabidopsis thaliana
acataagtgcgcgtggt

SEQ ID NO: 18949 - DNA, 17 bp, Arabidopsis thaliana
acataatcacatgagcg

SEQ ID NO: 18950 - DNA, 17 bp, Arabidopsis thaliana
acataattcagatttag

SEQ ID NO: 18951 - DNA, 17 bp, Arabidopsis thaliana
acataattttctgacac

SEQ ID NO: 18952 - DNA, 17 bp, Arabidopsis thaliana
acataccgggagggtgc

SEQ ID NO: 18953 - DNA, 17 bp, Arabidopsis thaliana
acataccgggggcgtgc

SEQ ID NO: 18954 - DNA, 17 bp, Arabidopsis thaliana
acataccgttggggtgc

SEQ ID NO: 18955 - DNA, 17 bp, Arabidopsis thaliana
acataccttggttgcgt

SEQ ID NO: 18956 - DNA, 17 bp, Arabidopsis thaliana
acatacgattggcggcg

SEQ ID NO: 18957 - DNA, 17 bp, Arabidopsis thaliana
acatacgcaggccagga

SEQ ID NO: 18958 - DNA, 17 bp, Arabidopsis thaliana
acatacgcccaacagag

SEQ ID NO: 18959 - DNA, 17 bp, Arabidopsis thaliana
acatacgcgagtacgat

SEQ ID NO: 18960 - DNA, 17 bp, Arabidopsis thaliana
acatacggtatggtgca

SEQ ID NO: 18961 - DNA, 17 bp, Arabidopsis thaliana
acatacgtgcgggattt

SEQ ID NO: 18962 - DNA, 17 bp, Arabidopsis thaliana
acatacgttgcaacgtg

SEQ ID NO: 18963 - DNA, 17 bp, Arabidopsis thaliana
acatactcaccagcctc

SEQ ID NO: 18964 - DNA, 17 bp, Arabidopsis thaliana
acatactccatcgagac

SEQ ID NO: 18965 - DNA, 17 bp, Arabidopsis thaliana
acatacttcttggagtc

SEQ ID NO: 18966 - DNA, 17 bp, Arabidopsis thaliana
acatactttgctgttgt

SEQ ID NO: 18967 - DNA, 17 bp, Arabidopsis thaliana
acatacttttcagacct

SEQ ID NO: 18968 - DNA, 17 bp, Arabidopsis thaliana
acatactttttgtgatt

SEQ ID NO: 18969 - DNA, 17 bp, Arabidopsis thaliana
acatagaaaaacgttga

SEQ ID NO: 18970 - DNA, 17 bp, Arabidopsis thaliana
acatagacattagcgag

SEQ ID NO: 18971 - DNA, 17 bp, Arabidopsis thaliana
acatagacggttttgtc

SEQ ID NO: 18972 - DNA, 17 bp, Arabidopsis thaliana
acatagatcgtcactta

SEQ ID NO: 18973 - DNA, 17 bp, Arabidopsis thaliana
acatagattttctcgtg

SEQ ID NO: 18974 - DNA, 17 bp, Arabidopsis thaliana
acatagcaggttggcag

SEQ ID NO: 18975 - DNA, 17 bp, Arabidopsis thaliana
acatagcgacacatgtg

SEQ ID NO: 18976 - DNA, 17 bp, Arabidopsis thaliana
acatagcgggtgggacc

SEQ ID NO: 18977 - DNA, 17 bp, Arabidopsis thaliana
acatagcgggtgggacg

SEQ ID NO: 18978 - DNA, 17 bp, Arabidopsis thaliana
acataggccatgattgg

SEQ ID NO: 18979 - DNA, 17 bp, Arabidopsis thaliana
acataggccttgttcgt

SEQ ID NO: 18980 - DNA, 17 bp, Arabidopsis thaliana
acatagggatgttgctg

SEQ ID NO: 18981 - DNA, 17 bp, Arabidopsis thaliana
acatagggctcgtcggc

SEQ ID NO: 18982 - DNA, 17 bp, Arabidopsis thaliana
acatagtcaaaaggtgt

SEQ ID NO: 18983 - DNA, 17 bp, Arabidopsis thaliana
acatagtcgatggtgga

SEQ ID NO: 18984 - DNA, 17 bp, Arabidopsis thaliana
acatagtcgctgagtga

SEQ ID NO: 18985 - DNA, 17 bp, Arabidopsis thaliana
acatagtctttctcgtt

SEQ ID NO: 18986 - DNA, 17 bp, Arabidopsis thaliana
acatagtgcttccaaac

SEQ ID NO: 18987 - DNA, 17 bp, Arabidopsis thaliana
acatagtggaccgacca

SEQ ID NO: 18988 - DNA, 17 bp, Arabidopsis thaliana
acatagttggccgagtt

SEQ ID NO: 18989 - DNA, 17 bp, Arabidopsis thaliana
acatagtttctttctcg

SEQ ID NO: 18990 - DNA, 17 bp, Arabidopsis thaliana
acatatcggatccgatt

SEQ ID NO: 18991 - DNA, 17 bp, Arabidopsis thaliana
acatatctcttgcgaac

SEQ ID NO: 18992 - DNA, 17 bp, Arabidopsis thaliana
acatatctcttgcgaat

SEQ ID NO: 18993 - DNA, 17 bp, Arabidopsis thaliana
acatatgctctacaagg

SEQ ID NO: 18994 - DNA, 17 bp, Arabidopsis thaliana
acatatggaccgagggg

SEQ ID NO: 18995 - DNA, 17 bp, Arabidopsis thaliana
acatatggcccatctgg

SEQ ID NO: 18996 - DNA, 17 bp, Arabidopsis thaliana
acatatgtgacgcaacc

SEQ ID NO: 18997 - DNA, 17 bp, Arabidopsis thaliana
acatatgtgtggtagca

SEQ ID NO: 18998 - DNA, 17 bp, Arabidopsis thaliana
acatatgtgttctggaa

SEQ ID NO: 18999 - DNA, 17 bp, Arabidopsis thaliana
acatatgttcgacgctc

SEQ ID NO: 19000 - DNA, 17 bp, Arabidopsis thaliana
acatattagaccgcttt

SEQ ID NO: 19001 - DNA, 17 bp, Arabidopsis thaliana
acatattcatccgaggt

SEQ ID NO: 19002 - DNA, 17 bp, Arabidopsis thaliana
acatattgcatatgagc

SEQ ID NO: 19003 - DNA, 17 bp, Arabidopsis thaliana
acatattgcgttcacgg

SEQ ID NO: 19004 - DNA, 17 bp, Arabidopsis thaliana
acatattgctgatttaa

SEQ ID NO: 19005 - DNA, 17 bp, Arabidopsis thaliana
acatattggtccgcaat

SEQ ID NO: 19006 - DNA, 17 bp, Arabidopsis thaliana
acatattggtgcggttc

SEQ ID NO: 19007 - DNA, 17 bp, Arabidopsis thaliana
acatattggttggctca

SEQ ID NO: 19008 - DNA, 17 bp, Arabidopsis thaliana
acatatttgctacgact

SEQ ID NO: 19009 - DNA, 17 bp, Arabidopsis thaliana
acatcaaagcgaaggcc

SEQ ID NO: 19010 - DNA, 17 bp, Arabidopsis thaliana
acatcaaatttggatgt

SEQ ID NO: 19011 - DNA, 17 bp, Arabidopsis thaliana
acatcaacccaagttca

SEQ ID NO: 19012 - DNA, 17 bp, Arabidopsis thaliana
acatcaactaacgtcgg

SEQ ID NO: 19013 - DNA, 17 bp, Arabidopsis thaliana
acatcaacttcacatat

SEQ ID NO: 19014 - DNA, 17 bp, Arabidopsis thaliana
acatcaacttcacatgt

SEQ ID NO: 19015 - DNA, 17 bp, Arabidopsis thaliana
acatcaacttcgtagat

SEQ ID NO: 19016 - DNA, 17 bp, Arabidopsis thaliana
acatcaacttcgtatgc

SEQ ID NO: 19017 - DNA, 17 bp, Arabidopsis thaliana
acatcaacttcgtatgt

SEQ ID NO: 19018 - DNA, 17 bp, Arabidopsis thaliana
acatcaactttacatgc

SEQ ID NO: 19019 - DNA, 17 bp, Arabidopsis thaliana
acatcaactttgggagc

SEQ ID NO: 19020 - DNA, 17 bp, Arabidopsis thaliana
acatcaactttgtatgt

SEQ ID NO: 19021 - DNA, 17 bp, Arabidopsis thaliana
acatcaagaaccacttg

SEQ ID NO: 19022 - DNA, 17 bp, Arabidopsis thaliana
acatcaagaaccgcttg

SEQ ID NO: 19023 - DNA, 17 bp, Arabidopsis thaliana
acatcaagcacatccac

SEQ ID NO: 19024 - DNA, 17 bp, Arabidopsis thaliana
acatcaagtatgtggag

SEQ ID NO: 19025 - DNA, 17 bp, Arabidopsis thaliana
acatcaagtctgggatc

SEQ ID NO: 19026 - DNA, 17 bp, Arabidopsis thaliana
acatcaagtgcggcttg

SEQ ID NO: 19027 - DNA, 17 bp, Arabidopsis thaliana
acatcaagttaccctct

SEQ ID NO: 19028 - DNA, 17 bp, Arabidopsis thaliana
acatcaatatgcttcaa

SEQ ID NO: 19029 - DNA, 17 bp, Arabidopsis thaliana
acatcaatcaacacccc

SEQ ID NO: 19030 - DNA, 17 bp, Arabidopsis thaliana
acatcaatttcacatgt

SEQ ID NO: 19031 - DNA, 17 bp, Arabidopsis thaliana
acatcaatttcgtatat

SEQ ID NO: 19032 - DNA, 17 bp, Arabidopsis thaliana
acatcaatttcgtatgc

SEQ ID NO: 19033 - DNA, 17 bp, Arabidopsis thaliana
acatcacaagactacaa

SEQ ID NO: 19034 - DNA, 17 bp, Arabidopsis thaliana
acatcacagtcatcaca

SEQ ID NO: 19035 - DNA, 17 bp, Arabidopsis thaliana
acatcacctgatcaaga

SEQ ID NO: 19036 - DNA, 17 bp, Arabidopsis thaliana
acatcacctgatcaagc

SEQ ID NO: 19037 - DNA, 17 bp, Arabidopsis thaliana
acatcactgtcctcggt

SEQ ID NO: 19038 - DNA, 17 bp, Arabidopsis thaliana
acatcactttgctacag

SEQ ID NO: 19039 - DNA, 17 bp, Arabidopsis thaliana
acatcactttgtcaaca

SEQ ID NO: 19040 - DNA, 17 bp, Arabidopsis thaliana
acatcagaacacgacga

SEQ ID NO: 19041 - DNA, 17 bp, Arabidopsis thaliana
acatcagacgccgatct

SEQ ID NO: 19042 - DNA, 17 bp, Arabidopsis thaliana
acatcagactcctcgac

SEQ ID NO: 19043 - DNA, 17 bp, Arabidopsis thaliana
acatcagagtccgagga

SEQ ID NO: 19044 - DNA, 17 bp, Arabidopsis thaliana
acatcagattcaccttt

SEQ ID NO: 19045 - DNA, 17 bp, Arabidopsis thaliana
acatcagcctctatttc

SEQ ID NO: 19046 - DNA, 17 bp, Arabidopsis thaliana
acatcagcctctatttt

SEQ ID NO: 19047 - DNA, 17 bp, Arabidopsis thaliana
acatcagcctttttgtg

SEQ ID NO: 19048 - DNA, 17 bp, Arabidopsis thaliana
acatcagcgtctccaga

SEQ ID NO: 19049 - DNA, 17 bp, Arabidopsis thaliana
acatcagcttcacatat

SEQ ID NO: 19050 - DNA, 17 bp, Arabidopsis thaliana
acatcagcttcacgcac

SEQ ID NO: 19051 - DNA, 17 bp, Arabidopsis thaliana
acatcagcttcacggat

SEQ ID NO: 19052 - DNA, 17 bp, Arabidopsis thaliana
acatcagctttaatgac

SEQ ID NO: 19053 - DNA, 17 bp, Arabidopsis thaliana
acatcaggtattagtgg

SEQ ID NO: 19054 - DNA, 17 bp, Arabidopsis thaliana
acatcaggtgttgcttg

SEQ ID NO: 19055 - DNA, 17 bp, Arabidopsis thaliana
acatcagtagctcagtg

SEQ ID NO: 19056 - DNA, 17 bp, Arabidopsis thaliana
acatcagtccggaacgg

SEQ ID NO: 19057 - DNA, 17 bp, Arabidopsis thaliana
acatcagttcctgaatg

SEQ ID NO: 19058 - DNA, 17 bp, Arabidopsis thaliana
acatcagtttatagttt

SEQ ID NO: 19059 - DNA, 17 bp, Arabidopsis thaliana
acatcagtttatggttt

SEQ ID NO: 19060 - DNA, 17 bp, Arabidopsis thaliana
acatcagtttggaagca

SEQ ID NO: 19061 - DNA, 17 bp, Arabidopsis thaliana
acatcatatgcatttgg

SEQ ID NO: 19062 - DNA, 17 bp, Arabidopsis thaliana
acatcatcacactggag

SEQ ID NO: 19063 - DNA, 17 bp, Arabidopsis thaliana
acatcatcaccgtcttc

SEQ ID NO: 19064 - DNA, 17 bp, Arabidopsis thaliana
acatcatcactttagca

SEQ ID NO: 19065 - DNA, 17 bp, Arabidopsis thaliana
acatcatcattcagcac

SEQ ID NO: 19066 - DNA, 17 bp, Arabidopsis thaliana
acatcatccacgcgtct

SEQ ID NO: 19067 - DNA, 17 bp, Arabidopsis thaliana
acatcatcctatcttgg

SEQ ID NO: 19068 - DNA, 17 bp, Arabidopsis thaliana
acatcatcgctatagct

SEQ ID NO: 19069 - DNA, 17 bp, Arabidopsis thaliana
acatcatcgttatacgg

SEQ ID NO: 19070 - DNA, 17 bp, Arabidopsis thaliana
acatcatctactttcga

SEQ ID NO: 19071 - DNA, 17 bp, Arabidopsis thaliana
acatcatctactttcgg

SEQ ID NO: 19072 - DNA, 17 bp, Arabidopsis thaliana
acatcatgataggctca

SEQ ID NO: 19073 - DNA, 17 bp, Arabidopsis thaliana
acatcatgccagataga

SEQ ID NO: 19074 - DNA, 17 bp, Arabidopsis thaliana
acatcatggagctgttg

SEQ ID NO: 19075 - DNA, 17 bp, Arabidopsis thaliana
acatcatgggtccgcca

SEQ ID NO: 19076 - DNA, 17 bp, Arabidopsis thaliana
acatcatgtcatcatct

SEQ ID NO: 19077 - DNA, 17 bp, Arabidopsis thaliana
acatcatgtggtttttg

SEQ ID NO: 19078 - DNA, 17 bp, Arabidopsis thaliana
acatcatgtgtgtggcg

SEQ ID NO: 19079 - DNA, 17 bp, Arabidopsis thaliana
acatcattggtttagtc

SEQ ID NO: 19080 - DNA, 17 bp, Arabidopsis thaliana
acatcatttccaagttc

SEQ ID NO: 19081 - DNA, 17 bp, Arabidopsis thaliana
acatcatttttggaata

SEQ ID NO: 19082 - DNA, 17 bp, Arabidopsis thaliana
acatccaaccagggccg

SEQ ID NO: 19083 - DNA, 17 bp, Arabidopsis thaliana
acatccaaggaaggcag

SEQ ID NO: 19084 - DNA, 17 bp, Arabidopsis thaliana
acatccaataatcatcc

SEQ ID NO: 19085 - DNA, 17 bp, Arabidopsis thaliana
acatccacatacggtta

SEQ ID NO: 19086 - DNA, 17 bp, Arabidopsis thaliana
acatccacctatattgg

SEQ ID NO: 19087 - DNA, 17 bp, Arabidopsis thaliana
acatccatgtcgctgtc

SEQ ID NO: 19088 - DNA, 17 bp, Arabidopsis thaliana
acatccatttggatttg

SEQ ID NO: 19089 - DNA, 17 bp, Arabidopsis thaliana
acatcccacttaccagt

SEQ ID NO: 19090 - DNA, 17 bp, Arabidopsis thaliana
acatccccattcacaag

SEQ ID NO: 19091 - DNA, 17 bp, Arabidopsis thaliana
acatcccgcacgaccac

SEQ ID NO: 19092 - DNA, 17 bp, Arabidopsis thaliana
acatcccgtccatagta

SEQ ID NO: 19093 - DNA, 17 bp, Arabidopsis thaliana
acatcccgtccttggtc

SEQ ID NO: 19094 - DNA, 17 bp, Arabidopsis thaliana
acatccctatttaggtg

SEQ ID NO: 19095 - DNA, 17 bp, Arabidopsis thaliana
acatccgatgtgggaca

SEQ ID NO: 19096 - DNA, 17 bp, Arabidopsis thaliana
acatccgcctagtggga

SEQ ID NO: 19097 - DNA, 17 bp, Arabidopsis thaliana
acatccgctgatccctg

SEQ ID NO: 19098 - DNA, 17 bp, Arabidopsis thaliana
acatccgcttgcgttac

SEQ ID NO: 19099 - DNA, 17 bp, Arabidopsis thaliana
acatccgcttttttgtg

SEQ ID NO: 19100 - DNA, 17 bp, Arabidopsis thaliana
acatccgctttttttgt

SEQ ID NO: 19101 - DNA, 17 bp, Arabidopsis thaliana
acatccgcttttttttg

SEQ ID NO: 19102 - DNA, 17 bp, Arabidopsis thaliana
acatccgcttttttttt

SEQ ID NO: 19103 - DNA, 17 bp, Arabidopsis thaliana
acatccggcggatcccc

SEQ ID NO: 19104 - DNA, 17 bp, Arabidopsis thaliana
acatccgggagctcggt

SEQ ID NO: 19105 - DNA, 17 bp, Arabidopsis thaliana
acatccggggtcatttc

SEQ ID NO: 19106 - DNA, 17 bp, Arabidopsis thaliana
acatccggtccgtatgc

SEQ ID NO: 19107 - DNA, 17 bp, Arabidopsis thaliana
acatccggtcgctgcca

SEQ ID NO: 19108 - DNA, 17 bp, Arabidopsis thaliana
acatccggtttgactta

SEQ ID NO: 19109 - DNA, 17 bp, Arabidopsis thaliana
acatccgtacaccacag

SEQ ID NO: 19110 - DNA, 17 bp, Arabidopsis thaliana
acatccgtgatgggcca

SEQ ID NO: 19111 - DNA, 17 bp, Arabidopsis thaliana
acatcctactttgtggc

SEQ ID NO: 19112 - DNA, 17 bp, Arabidopsis thaliana
acatcctcgagtagccc

SEQ ID NO: 19113 - DNA, 17 bp, Arabidopsis thaliana
acatcctcggttagacg

SEQ ID NO: 19114 - DNA, 17 bp, Arabidopsis thaliana
acatcctcttctgccaa

SEQ ID NO: 19115 - DNA, 17 bp, Arabidopsis thaliana
acatcctgaccaggccg

SEQ ID NO: 19116 - DNA, 17 bp, Arabidopsis thaliana
acatcctgatggtgcaa

SEQ ID NO: 19117 - DNA, 17 bp, Arabidopsis thaliana
acatcctgcgatgtgcg

SEQ ID NO: 19118 - DNA, 17 bp, Arabidopsis thaliana
acatcgaagagtgttga

SEQ ID NO: 19119 - DNA, 17 bp, Arabidopsis thaliana
acatcgacgggaaggta

SEQ ID NO: 19120 - DNA, 17 bp, Arabidopsis thaliana
acatcgacgtcagatgg

SEQ ID NO: 19121 - DNA, 17 bp, Arabidopsis thaliana
acatcgatgtctgagtt

SEQ ID NO: 19122 - DNA, 17 bp, Arabidopsis thaliana
acatcgcaccccacgaa

SEQ ID NO: 19123 - DNA, 17 bp, Arabidopsis thaliana
acatcgccgctcttttg

SEQ ID NO: 19124 - DNA, 17 bp, Arabidopsis thaliana
acatcgcgccccacgga

SEQ ID NO: 19125 - DNA, 17 bp, Arabidopsis thaliana
acatcgcgggttgagta

SEQ ID NO: 19126 - DNA, 17 bp, Arabidopsis thaliana
acatcgctactaagtga

SEQ ID NO: 19127 - DNA, 17 bp, Arabidopsis thaliana
acatcgctatctgtaca

SEQ ID NO: 19128 - DNA, 17 bp, Arabidopsis thaliana
acatcgctgtaatttac

SEQ ID NO: 19129 - DNA, 17 bp, Arabidopsis thaliana
acatcgcttggaatgtc

SEQ ID NO: 19130 - DNA, 17 bp, Arabidopsis thaliana
acatcggaagttgaata

SEQ ID NO: 19131 - DNA, 17 bp, Arabidopsis thaliana
acatcggaagttgagta

SEQ ID NO: 19132 - DNA, 17 bp, Arabidopsis thaliana
acatcggattcaccttt

SEQ ID NO: 19133 - DNA, 17 bp, Arabidopsis thaliana
acatcggcaccggcact

SEQ ID NO: 19134 - DNA, 17 bp, Arabidopsis thaliana
acatcggcccgacttgg

SEQ ID NO: 19135 - DNA, 17 bp, Arabidopsis thaliana
acatcggctgccactga

SEQ ID NO: 19136 - DNA, 17 bp, Arabidopsis thaliana
acatcggggcaagaccg

SEQ ID NO: 19137 - DNA, 17 bp, Arabidopsis thaliana
acatcggtccgacccaa

SEQ ID NO: 19138 - DNA, 17 bp, Arabidopsis thaliana
acatcggtccggcccaa

SEQ ID NO: 19139 - DNA, 17 bp, Arabidopsis thaliana
acatcggtccggcctaa

SEQ ID NO: 19140 - DNA, 17 bp, Arabidopsis thaliana
acatcggtcgtttgatg

SEQ ID NO: 19141 - DNA, 17 bp, Arabidopsis thaliana
acatcggttccaactac

SEQ ID NO: 19142 - DNA, 17 bp, Arabidopsis thaliana
acatcggttcctgaatg

SEQ ID NO: 19143 - DNA, 17 bp, Arabidopsis thaliana
acatcggttctcattct

SEQ ID NO: 19144 - DNA, 17 bp, Arabidopsis thaliana
acatcggttcttgaatg

SEQ ID NO: 19145 - DNA, 17 bp, Arabidopsis thaliana
acatcggttgcggttcg

SEQ ID NO: 19146 - DNA, 17 bp, Arabidopsis thaliana
acatcgtccaaatttct

SEQ ID NO: 19147 - DNA, 17 bp, Arabidopsis thaliana
acatcgtcgacatagac

SEQ ID NO: 19148 - DNA, 17 bp, Arabidopsis thaliana
acatcgtgatggtaatc

SEQ ID NO: 19149 - DNA, 17 bp, Arabidopsis thaliana
acatcgttcgcggctca

SEQ ID NO: 19150 - DNA, 17 bp, Arabidopsis thaliana
acatcgttgaccaacat

SEQ ID NO: 19151 - DNA, 17 bp, Arabidopsis thaliana
acatcgtttctttgact

SEQ ID NO: 19152 - DNA, 17 bp, Arabidopsis thaliana
acatcgtttgcggttat

SEQ ID NO: 19153 - DNA, 17 bp, Arabidopsis thaliana
acatcgtttttatggcc

SEQ ID NO: 19154 - DNA, 17 bp, Arabidopsis thaliana
acatctaagaaccatgg

SEQ ID NO: 19155 - DNA, 17 bp, Arabidopsis thaliana
acatctaagtacaaatc

SEQ ID NO: 19156 - DNA, 17 bp, Arabidopsis thaliana
acatctaatccgctcgg

SEQ ID NO: 19157 - DNA, 17 bp, Arabidopsis thaliana
acatctaatggcgtccg

SEQ ID NO: 19158 - DNA, 17 bp, Arabidopsis thaliana
acatctacactggcact

SEQ ID NO: 19159 - DNA, 17 bp, Arabidopsis thaliana
acatctaccatgtaacc

SEQ ID NO: 19160 - DNA, 17 bp, Arabidopsis thaliana
acatctactcgctttgt

SEQ ID NO: 19161 - DNA, 17 bp, Arabidopsis thaliana
acatctacttaatggct

SEQ ID NO: 19162 - DNA, 17 bp, Arabidopsis thaliana
acatctagcggatttgg

SEQ ID NO: 19163 - DNA, 17 bp, Arabidopsis thaliana
acatctaggatccgatt

SEQ ID NO: 19164 - DNA, 17 bp, Arabidopsis thaliana
acatctaggtatgtcca

SEQ ID NO: 19165 - DNA, 17 bp, Arabidopsis thaliana
acatctatgaagtttgc

SEQ ID NO: 19166 - DNA, 17 bp, Arabidopsis thaliana
acatctatgaagtttgt

SEQ ID NO: 19167 - DNA, 17 bp, Arabidopsis thaliana
acatctatgattgctcc

SEQ ID NO: 19168 - DNA, 17 bp, Arabidopsis thaliana
acatctatgtgttgttg

SEQ ID NO: 19169 - DNA, 17 bp, Arabidopsis thaliana
acatctattttggtcca

SEQ ID NO: 19170 - DNA, 17 bp, Arabidopsis thaliana
acatctcaaattgcgtt

SEQ ID NO: 19171 - DNA, 17 bp, Arabidopsis thaliana
acatctcaagatacagg

SEQ ID NO: 19172 - DNA, 17 bp, Arabidopsis thaliana
acatctcaggccgaatt

SEQ ID NO: 19173 - DNA, 17 bp, Arabidopsis thaliana
acatctcatcacacttt

SEQ ID NO: 19174 - DNA, 17 bp, Arabidopsis thaliana
acatctcatctgtttgc

SEQ ID NO: 19175 - DNA, 17 bp, Arabidopsis thaliana
acatctcattcggatgg

SEQ ID NO: 19176 - DNA, 17 bp, Arabidopsis thaliana
acatctccatcggggag

SEQ ID NO: 19177 - DNA, 17 bp, Arabidopsis thaliana
acatctccgagaggcgt

SEQ ID NO: 19178 - DNA, 17 bp, Arabidopsis thaliana
acatctccgatctgtct

SEQ ID NO: 19179 - DNA, 17 bp, Arabidopsis thaliana
acatctcgagctgatgt

SEQ ID NO: 19180 - DNA, 17 bp, Arabidopsis thaliana
acatctcgcatttctac

SEQ ID NO: 19181 - DNA, 17 bp, Arabidopsis thaliana
acatctcgcggaagagt

SEQ ID NO: 19182 - DNA, 17 bp, Arabidopsis thaliana
acatctcgttcttgtct

SEQ ID NO: 19183 - DNA, 17 bp, Arabidopsis thaliana
acatctctagttgagga

SEQ ID NO: 19184 - DNA, 17 bp, Arabidopsis thaliana
acatctctatctcacac

SEQ ID NO: 19185 - DNA, 17 bp, Arabidopsis thaliana
acatctctctgaggcaa

SEQ ID NO: 19186 - DNA, 17 bp, Arabidopsis thaliana
acatctctcttgattta

SEQ ID NO: 19187 - DNA, 17 bp, Arabidopsis thaliana
acatctctgaagcagtt

SEQ ID NO: 19188 - DNA, 17 bp, Arabidopsis thaliana
acatctctttgtgacat

SEQ ID NO: 19189 - DNA, 17 bp, Arabidopsis thaliana
acatctgaacgattcgc

SEQ ID NO: 19190 - DNA, 17 bp, Arabidopsis thaliana
acatctgaagattggtg

SEQ ID NO: 19191 - DNA, 17 bp, Arabidopsis thaliana
acatctgaccggtgttg

SEQ ID NO: 19192 - DNA, 17 bp, Arabidopsis thaliana
acatctgatcgacagac

SEQ ID NO: 19193 - DNA, 17 bp, Arabidopsis thaliana
acatctgatcgataaaa

SEQ ID NO: 19194 - DNA, 17 bp, Arabidopsis thaliana
acatctgatcgtttgac

SEQ ID NO: 19195 - DNA, 17 bp, Arabidopsis thaliana
acatctgcaacttgttg

SEQ ID NO: 19196 - DNA, 17 bp, Arabidopsis thaliana
acatctgcagttgaacc

SEQ ID NO: 19197 - DNA, 17 bp, Arabidopsis thaliana
acatctggattgtggtc

SEQ ID NO: 19198 - DNA, 17 bp, Arabidopsis thaliana
acatctggccggttcaa

SEQ ID NO: 19199 - DNA, 17 bp, Arabidopsis thaliana
acatctgggagaagaat

SEQ ID NO: 19200 - DNA, 17 bp, Arabidopsis thaliana
acatctgtctaactgtc

SEQ ID NO: 19201 - DNA, 17 bp, Arabidopsis thaliana
acatctgtgcgagtcaa

SEQ ID NO: 19202 - DNA, 17 bp, Arabidopsis thaliana
acatctgttcgtttgac

SEQ ID NO: 19203 - DNA, 17 bp, Arabidopsis thaliana
acatctgtttttggttt

SEQ ID NO: 19204 - DNA, 17 bp, Arabidopsis thaliana
acatcttaaccgcctaa

SEQ ID NO: 19205 - DNA, 17 bp, Arabidopsis thaliana
acatcttactattcatc

SEQ ID NO: 19206 - DNA, 17 bp, Arabidopsis thaliana
acatcttagctcacgtt

SEQ ID NO: 19207 - DNA, 17 bp, Arabidopsis thaliana
acatcttatcaggatat

SEQ ID NO: 19208 - DNA, 17 bp, Arabidopsis thaliana
acatcttccagaggcgg

SEQ ID NO: 19209 - DNA, 17 bp, Arabidopsis thaliana
acatcttcccttgaaca

SEQ ID NO: 19210 - DNA, 17 bp, Arabidopsis thaliana
acatcttctaaaggagg

SEQ ID NO: 19211 - DNA, 17 bp, Arabidopsis thaliana
acatcttctaaaggcgg

SEQ ID NO: 19212 - DNA, 17 bp, Arabidopsis thaliana
acatcttgattatctgc

SEQ ID NO: 19213 - DNA, 17 bp, Arabidopsis thaliana
acatcttgccggttcaa

SEQ ID NO: 19214 - DNA, 17 bp, Arabidopsis thaliana
acatcttgccggttcgc

SEQ ID NO: 19215 - DNA, 17 bp, Arabidopsis thaliana
acatcttggttatcggc

SEQ ID NO: 19216 - DNA, 17 bp, Arabidopsis thaliana
acatcttggttgtcggc

SEQ ID NO: 19217 - DNA, 17 bp, Arabidopsis thaliana
acatcttgtctccatca

SEQ ID NO: 19218 - DNA, 17 bp, Arabidopsis thaliana
acatcttgtgacttttc

SEQ ID NO: 19219 - DNA, 17 bp, Arabidopsis thaliana
acatcttgttgaccagc

SEQ ID NO: 19220 - DNA, 17 bp, Arabidopsis thaliana
acatctttggttcgcga

SEQ ID NO: 19221 - DNA, 17 bp, Arabidopsis thaliana
acatcttttgtacagtt

SEQ ID NO: 19222 - DNA, 17 bp, Arabidopsis thaliana
acatgaaagactgctct

SEQ ID NO: 19223 - DNA, 17 bp, Arabidopsis thaliana
acatgaaatttgcgtcg

SEQ ID NO: 19224 - DNA, 17 bp, Arabidopsis thaliana
acatgaacccaaaataa

SEQ ID NO: 19225 - DNA, 17 bp, Arabidopsis thaliana
acatgaactgcggtgtg

SEQ ID NO: 19226 - DNA, 17 bp, Arabidopsis thaliana
acatgaactggttgctt

SEQ ID NO: 19227 - DNA, 17 bp, Arabidopsis thaliana
acatgaagacttagggc

SEQ ID NO: 19228 - DNA, 17 bp, Arabidopsis thaliana
acatgaagctgctcacg

SEQ ID NO: 19229 - DNA, 17 bp, Arabidopsis thaliana
acatgaaggtctttgcc

SEQ ID NO: 19230 - DNA, 17 bp, Arabidopsis thaliana
acatgacaggagctcaa

SEQ ID NO: 19231 - DNA, 17 bp, Arabidopsis thaliana
acatgacccgaatgcac

SEQ ID NO: 19232 - DNA, 17 bp, Arabidopsis thaliana
acatgacctggtagcca

SEQ ID NO: 19233 - DNA, 17 bp, Arabidopsis thaliana
acatgagcattaatggg

SEQ ID NO: 19234 - DNA, 17 bp, Arabidopsis thaliana
acatgagccttcttgac

SEQ ID NO: 19235 - DNA, 17 bp, Arabidopsis thaliana
acatgagcttttcttgg

SEQ ID NO: 19236 - DNA, 17 bp, Arabidopsis thaliana
acatgaggattggtagc

SEQ ID NO: 19237 - DNA, 17 bp, Arabidopsis thaliana
acatgaggtgctacatt

SEQ ID NO: 19238 - DNA, 17 bp, Arabidopsis thaliana
acatgagtaactcggac

SEQ ID NO: 19239 - DNA, 17 bp, Arabidopsis thaliana
acatgagtatgactggt

SEQ ID NO: 19240 - DNA, 17 bp, Arabidopsis thaliana
acatgagtggacaacgt

SEQ ID NO: 19241 - DNA, 17 bp, Arabidopsis thaliana
acatgatactgttcatc

SEQ ID NO: 19242 - DNA, 17 bp, Arabidopsis thaliana
acatgatcaaagggtgt

SEQ ID NO: 19243 - DNA, 17 bp, Arabidopsis thaliana
acatgatcaacggatgt

SEQ ID NO: 19244 - DNA, 17 bp, Arabidopsis thaliana
acatgatcaacgggtgt

SEQ ID NO: 19245 - DNA, 17 bp, Arabidopsis thaliana
acatgatcacatcctga

SEQ ID NO: 19246 - DNA, 17 bp, Arabidopsis thaliana
acatgatcattcgttga

SEQ ID NO: 19247 - DNA, 17 bp, Arabidopsis thaliana
acatgatctttccgttg

SEQ ID NO: 19248 - DNA, 17 bp, Arabidopsis thaliana
acatgatgacatggcgg

SEQ ID NO: 19249 - DNA, 17 bp, Arabidopsis thaliana
acatgatgtggtttcag

SEQ ID NO: 19250 - DNA, 17 bp, Arabidopsis thaliana
acatgatgtggtttcgg

SEQ ID NO: 19251 - DNA, 17 bp, Arabidopsis thaliana
acatgattattcgttga

SEQ ID NO: 19252 - DNA, 17 bp, Arabidopsis thaliana
acatgattcacattggg

SEQ ID NO: 19253 - DNA, 17 bp, Arabidopsis thaliana
acatgatttggatctgc

SEQ ID NO: 19254 - DNA, 17 bp, Arabidopsis thaliana
acatgattttacggttt

SEQ ID NO: 19255 - DNA, 17 bp, Arabidopsis thaliana
acatgattttatggttt

SEQ ID NO: 19256 - DNA, 17 bp, Arabidopsis thaliana
acatgccaagtttggcc

SEQ ID NO: 19257 - DNA, 17 bp, Arabidopsis thaliana
acatgccacttgtatgg

SEQ ID NO: 19258 - DNA, 17 bp, Arabidopsis thaliana
acatgccatcgatgaca

SEQ ID NO: 19259 - DNA, 17 bp, Arabidopsis thaliana
acatgccatgtttggcc

SEQ ID NO: 19260 - DNA, 17 bp, Arabidopsis thaliana
acatgccgtgcttgcca

SEQ ID NO: 19261 - DNA, 17 bp, Arabidopsis thaliana
acatgcctaagccgtga

SEQ ID NO: 19262 - DNA, 17 bp, Arabidopsis thaliana
acatgcctgtcgggacc

SEQ ID NO: 19263 - DNA, 17 bp, Arabidopsis thaliana
acatgcgaagtttggcc

SEQ ID NO: 19264 - DNA, 17 bp, Arabidopsis thaliana
acatgcgagattgccag

SEQ ID NO: 19265 - DNA, 17 bp, Arabidopsis thaliana
acatgcgatcatggtaa

SEQ ID NO: 19266 - DNA, 17 bp, Arabidopsis thaliana
acatgcgattttgctgt

SEQ ID NO: 19267 - DNA, 17 bp, Arabidopsis thaliana
acatgcgcccgccgccc

SEQ ID NO: 19268 - DNA, 17 bp, Arabidopsis thaliana
acatgcgctgtcgccgt

SEQ ID NO: 19269 - DNA, 17 bp, Arabidopsis thaliana
acatgcggacttgctca

SEQ ID NO: 19270 - DNA, 17 bp, Arabidopsis thaliana
acatgcggacttgctct

SEQ ID NO: 19271 - DNA, 17 bp, Arabidopsis thaliana
acatgcggccattttaa

SEQ ID NO: 19272 - DNA, 17 bp, Arabidopsis thaliana
acatgcgggacctcttg

SEQ ID NO: 19273 - DNA, 17 bp, Arabidopsis thaliana
acatgcgggatatccaa

SEQ ID NO: 19274 - DNA, 17 bp, Arabidopsis thaliana
acatgcgggctttcact

SEQ ID NO: 19275 - DNA, 17 bp, Arabidopsis thaliana
acatgcgggtgtgatag

SEQ ID NO: 19276 - DNA, 17 bp, Arabidopsis thaliana
acatgcggtggtgaact

SEQ ID NO: 19277 - DNA, 17 bp, Arabidopsis thaliana
acatgcggttagcttct

SEQ ID NO: 19278 - DNA, 17 bp, Arabidopsis thaliana
acatgcgtattcaggtg

SEQ ID NO: 19279 - DNA, 17 bp, Arabidopsis thaliana
acatgctaagtttggcc

SEQ ID NO: 19280 - DNA, 17 bp, Arabidopsis thaliana
acatgctatacgccgga

SEQ ID NO: 19281 - DNA, 17 bp, Arabidopsis thaliana
acatgctatggtttcgg

SEQ ID NO: 19282 - DNA, 17 bp, Arabidopsis thaliana
acatgctattggcaaag

SEQ ID NO: 19283 - DNA, 17 bp, Arabidopsis thaliana
acatgctcctaggattt

SEQ ID NO: 19284 - DNA, 17 bp, Arabidopsis thaliana
acatgctctccgtttgt

SEQ ID NO: 19285 - DNA, 17 bp, Arabidopsis thaliana
acatgctgcagcgttcc

SEQ ID NO: 19286 - DNA, 17 bp, Arabidopsis thaliana
acatgctgctggtttcg

SEQ ID NO: 19287 - DNA, 17 bp, Arabidopsis thaliana
acatgctggtcttgggc

SEQ ID NO: 19288 - DNA, 17 bp, Arabidopsis thaliana
acatgctgtagttttgg

SEQ ID NO: 19289 - DNA, 17 bp, Arabidopsis thaliana
acatgctgtggtttcga

SEQ ID NO: 19290 - DNA, 17 bp, Arabidopsis thaliana
acatgctgtggtttcgg

SEQ ID NO: 19291 - DNA, 17 bp, Arabidopsis thaliana
acatgctgtggttttgg

SEQ ID NO: 19292 - DNA, 17 bp, Arabidopsis thaliana
acatgcttcagccatgg

SEQ ID NO: 19293 - DNA, 17 bp, Arabidopsis thaliana
acatgcttctgaactca

SEQ ID NO: 19294 - DNA, 17 bp, Arabidopsis thaliana
acatgcttctgctggct

SEQ ID NO: 19295 - DNA, 17 bp, Arabidopsis thaliana
acatgctttattggttt

SEQ ID NO: 19296 - DNA, 17 bp, Arabidopsis thaliana
acatggaagttgtcaac

SEQ ID NO: 19297 - DNA, 17 bp, Arabidopsis thaliana
acatggaccgaggttaa

SEQ ID NO: 19298 - DNA, 17 bp, Arabidopsis thaliana
acatggaggtcggggag

SEQ ID NO: 19299 - DNA, 17 bp, Arabidopsis thaliana
acatggatccgcatcct

SEQ ID NO: 19300 - DNA, 17 bp, Arabidopsis thaliana
acatggatccgcatctt

SEQ ID NO: 19301 - DNA, 17 bp, Arabidopsis thaliana
acatggatctggccaaa

SEQ ID NO: 19302 - DNA, 17 bp, Arabidopsis thaliana
acatggattgctacaga

SEQ ID NO: 19303 - DNA, 17 bp, Arabidopsis thaliana
acatggattggacagtg

SEQ ID NO: 19304 - DNA, 17 bp, Arabidopsis thaliana
acatggcaacgcactgt

SEQ ID NO: 19305 - DNA, 17 bp, Arabidopsis thaliana
acatggcagagagtggc

SEQ ID NO: 19306 - DNA, 17 bp, Arabidopsis thaliana
acatggcagagtgaaag

SEQ ID NO: 19307 - DNA, 17 bp, Arabidopsis thaliana
acatggcccgagccaag

SEQ ID NO: 19308 - DNA, 17 bp, Arabidopsis thaliana
acatggcgagactatgg

SEQ ID NO: 19309 - DNA, 17 bp, Arabidopsis thaliana
acatggcgattatgctc

SEQ ID NO: 19310 - DNA, 17 bp, Arabidopsis thaliana
acatggcggcttgtgat

SEQ ID NO: 19311 - DNA, 17 bp, Arabidopsis thaliana
acatggcgggtgggacc

SEQ ID NO: 19312 - DNA, 17 bp, Arabidopsis thaliana
acatggctggtcccgac

SEQ ID NO: 19313 - DNA, 17 bp, Arabidopsis thaliana
acatggcttatcgatcg

SEQ ID NO: 19314 - DNA, 17 bp, Arabidopsis thaliana
acatggcttcccctcgt

SEQ ID NO: 19315 - DNA, 17 bp, Arabidopsis thaliana
acatgggcattaatggg

SEQ ID NO: 19316 - DNA, 17 bp, Arabidopsis thaliana
acatgggccaagttgga

SEQ ID NO: 19317 - DNA, 17 bp, Arabidopsis thaliana
acatgggcccgaacccg

SEQ ID NO: 19318 - DNA, 17 bp, Arabidopsis thaliana
acatgggtcaaaagcgt

SEQ ID NO: 19319 - DNA, 17 bp, Arabidopsis thaliana
acatgggtcactcagat

SEQ ID NO: 19320 - DNA, 17 bp, Arabidopsis thaliana
acatgggtcatgattag

SEQ ID NO: 19321 - DNA, 17 bp, Arabidopsis thaliana
acatgggttagtcgatc

SEQ ID NO: 19322 - DNA, 17 bp, Arabidopsis thaliana
acatgggttgtgaatgg

SEQ ID NO: 19323 - DNA, 17 bp, Arabidopsis thaliana
acatggtacggctttgg

SEQ ID NO: 19324 - DNA, 17 bp, Arabidopsis thaliana
acatggtacttcgctct

SEQ ID NO: 19325 - DNA, 17 bp, Arabidopsis thaliana
acatggtaggtgactct

SEQ ID NO: 19326 - DNA, 17 bp, Arabidopsis thaliana
acatggtcaaagggtgt

SEQ ID NO: 19327 - DNA, 17 bp, Arabidopsis thaliana
acatggtcaacggatgt

SEQ ID NO: 19328 - DNA, 17 bp, Arabidopsis thaliana
acatggtcaacgggtgt

SEQ ID NO: 19329 - DNA, 17 bp, Arabidopsis thaliana
acatggtcagagtttgg

SEQ ID NO: 19330 - DNA, 17 bp, Arabidopsis thaliana
acatggtccgatgatgg

SEQ ID NO: 19331 - DNA, 17 bp, Arabidopsis thaliana
acatggtcggcttgtcc

SEQ ID NO: 19332 - DNA, 17 bp, Arabidopsis thaliana
acatggtgtggtttcgg

SEQ ID NO: 19333 - DNA, 17 bp, Arabidopsis thaliana
acatggttactccttct

SEQ ID NO: 19334 - DNA, 17 bp, Arabidopsis thaliana
acatggtttcgacaaag

SEQ ID NO: 19335 - DNA, 17 bp, Arabidopsis thaliana
acatggttttacggttt

SEQ ID NO: 19336 - DNA, 17 bp, Arabidopsis thaliana
acatggttttatggaca

SEQ ID NO: 19337 - DNA, 17 bp, Arabidopsis thaliana
acatgtaaagatccgat

SEQ ID NO: 19338 - DNA, 17 bp, Arabidopsis thaliana
acatgtaagcggatttc

SEQ ID NO: 19339 - DNA, 17 bp, Arabidopsis thaliana
acatgtactttcggatt

SEQ ID NO: 19340 - DNA, 17 bp, Arabidopsis thaliana
acatgtagaccaaggtt

SEQ ID NO: 19341 - DNA, 17 bp, Arabidopsis thaliana
acatgtagataatttgt

SEQ ID NO: 19342 - DNA, 17 bp, Arabidopsis thaliana
acatgtagtttagtggt

SEQ ID NO: 19343 - DNA, 17 bp, Arabidopsis thaliana
acatgtcacggctgagt

SEQ ID NO: 19344 - DNA, 17 bp, Arabidopsis thaliana
acatgtcactcgattac

SEQ ID NO: 19345 - DNA, 17 bp, Arabidopsis thaliana
acatgtcatgatctcgc

SEQ ID NO: 19346 - DNA, 17 bp, Arabidopsis thaliana
acatgtccatctggatg

SEQ ID NO: 19347 - DNA, 17 bp, Arabidopsis thaliana
acatgtctacatttgac

SEQ ID NO: 19348 - DNA, 17 bp, Arabidopsis thaliana
acatgtgaagactatgt

SEQ ID NO: 19349 - DNA, 17 bp, Arabidopsis thaliana
acatgtgaagtagagcg

SEQ ID NO: 19350 - DNA, 17 bp, Arabidopsis thaliana
acatgtgacactcaccg

SEQ ID NO: 19351 - DNA, 17 bp, Arabidopsis thaliana
acatgtgacactcactg

SEQ ID NO: 19352 - DNA, 17 bp, Arabidopsis thaliana
acatgtgacactctccg

SEQ ID NO: 19353 - DNA, 17 bp, Arabidopsis thaliana
acatgtgacattcactg

SEQ ID NO: 19354 - DNA, 17 bp, Arabidopsis thaliana
acatgtgaccattggag

SEQ ID NO: 19355 - DNA, 17 bp, Arabidopsis thaliana
acatgtgacttgtggga

SEQ ID NO: 19356 - DNA, 17 bp, Arabidopsis thaliana
acatgtgaggtcacggt

SEQ ID NO: 19357 - DNA, 17 bp, Arabidopsis thaliana
acatgtgcaaatgcttt

SEQ ID NO: 19358 - DNA, 17 bp, Arabidopsis thaliana
acatgtgcgcagccttt

SEQ ID NO: 19359 - DNA, 17 bp, Arabidopsis thaliana
acatgtgctaaaggctc

SEQ ID NO: 19360 - DNA, 17 bp, Arabidopsis thaliana
acatgtgctcaaggccg

SEQ ID NO: 19361 - DNA, 17 bp, Arabidopsis thaliana
acatgtgcttagcctgt

SEQ ID NO: 19362 - DNA, 17 bp, Arabidopsis thaliana
acatgtgcttggcctcg

SEQ ID NO: 19363 - DNA, 17 bp, Arabidopsis thaliana
acatgtggcaaagttga

SEQ ID NO: 19364 - DNA, 17 bp, Arabidopsis thaliana
acatgtggcagatccgt

SEQ ID NO: 19365 - DNA, 17 bp, Arabidopsis thaliana
acatgtggcagcgggcg

SEQ ID NO: 19366 - DNA, 17 bp, Arabidopsis thaliana
acatgtggccgcaaaac

SEQ ID NO: 19367 - DNA, 17 bp, Arabidopsis thaliana
acatgtggtatttgggc

SEQ ID NO: 19368 - DNA, 17 bp, Arabidopsis thaliana
acatgtggttctgccga

SEQ ID NO: 19369 - DNA, 17 bp, Arabidopsis thaliana
acatgtgtccattgatg

SEQ ID NO: 19370 - DNA, 17 bp, Arabidopsis thaliana
acatgtgtgatttggac

SEQ ID NO: 19371 - DNA, 17 bp, Arabidopsis thaliana
acatgtgtgcgactcaa

SEQ ID NO: 19372 - DNA, 17 bp, Arabidopsis thaliana
acatgtgtgcgagtcaa

SEQ ID NO: 19373 - DNA, 17 bp, Arabidopsis thaliana
acatgtgtggcgatgtg

SEQ ID NO: 19374 - DNA, 17 bp, Arabidopsis thaliana
acatgttaccttggatt

SEQ ID NO: 19375 - DNA, 17 bp, Arabidopsis thaliana
acatgttactggctcgg

SEQ ID NO: 19376 - DNA, 17 bp, Arabidopsis thaliana
acatgttagtgatgtgc

SEQ ID NO: 19377 - DNA, 17 bp, Arabidopsis thaliana
acatgttatccaggatc

SEQ ID NO: 19378 - DNA, 17 bp, Arabidopsis thaliana
acatgttattcaggatc

SEQ ID NO: 19379 - DNA, 17 bp, Arabidopsis thaliana
acatgttcctattggat

SEQ ID NO: 19380 - DNA, 17 bp, Arabidopsis thaliana
acatgttccttctggcc

SEQ ID NO: 19381 - DNA, 17 bp, Arabidopsis thaliana
acatgttcgagctgtct

SEQ ID NO: 19382 - DNA, 17 bp, Arabidopsis thaliana
acatgttgacttgcgtt

SEQ ID NO: 19383 - DNA, 17 bp, Arabidopsis thaliana
acatgttggttaggatt

SEQ ID NO: 19384 - DNA, 17 bp, Arabidopsis thaliana
acatgttgtagtttcgg

SEQ ID NO: 19385 - DNA, 17 bp, Arabidopsis thaliana
acatgttgtcaatggtc

SEQ ID NO: 19386 - DNA, 17 bp, Arabidopsis thaliana
acatgttgtggtttcgg

SEQ ID NO: 19387 - DNA, 17 bp, Arabidopsis thaliana
acatgttgtggttttgc

SEQ ID NO: 19388 - DNA, 17 bp, Arabidopsis thaliana
acatgttgtggtttttt

SEQ ID NO: 19389 - DNA, 17 bp, Arabidopsis thaliana
acatgtttacagccaag

SEQ ID NO: 19390 - DNA, 17 bp, Arabidopsis thaliana
acatgtttcagccatgg

SEQ ID NO: 19391 - DNA, 17 bp, Arabidopsis thaliana
acatgtttcatgcgatt

SEQ ID NO: 19392 - DNA, 17 bp, Arabidopsis thaliana
acatgtttgaagcggat

SEQ ID NO: 19393 - DNA, 17 bp, Arabidopsis thaliana
acatgtttgaggtggaa

SEQ ID NO: 19394 - DNA, 17 bp, Arabidopsis thaliana
acatgtttgcttcattt

SEQ ID NO: 19395 - DNA, 17 bp, Arabidopsis thaliana
acatgttttgcagatgg

SEQ ID NO: 19396 - DNA, 17 bp, Arabidopsis thaliana
acatgttttggtttcgg

SEQ ID NO: 19397 - DNA, 17 bp, Arabidopsis thaliana
acatgtttttacggttt

SEQ ID NO: 19398 - DNA, 17 bp, Arabidopsis thaliana
acatgttttttcaggaa

SEQ ID NO: 19399 - DNA, 17 bp, Arabidopsis thaliana
acattaaacttttttct

SEQ ID NO: 19400 - DNA, 17 bp, Arabidopsis thaliana
acattaattggccatgt

SEQ ID NO: 19401 - DNA, 17 bp, Arabidopsis thaliana
acattacatgttgtggt

SEQ ID NO: 19402 - DNA, 17 bp, Arabidopsis thaliana
acattacattgttggcc

SEQ ID NO: 19403 - DNA, 17 bp, Arabidopsis thaliana
acattacattgttggct

SEQ ID NO: 19404 - DNA, 17 bp, Arabidopsis thaliana
acattaccttcataggc

SEQ ID NO: 19405 - DNA, 17 bp, Arabidopsis thaliana
acattacgtgttgcgct

SEQ ID NO: 19406 - DNA, 17 bp, Arabidopsis thaliana
acattactttgggactg

SEQ ID NO: 19407 - DNA, 17 bp, Arabidopsis thaliana
acattagtcgcctgtag

SEQ ID NO: 19408 - DNA, 17 bp, Arabidopsis thaliana
acattagtttagttgcg

SEQ ID NO: 19409 - DNA, 17 bp, Arabidopsis thaliana
acattatatctcctgcg

SEQ ID NO: 19410 - DNA, 17 bp, Arabidopsis thaliana
acattatcgttcgattt

SEQ ID NO: 19411 - DNA, 17 bp, Arabidopsis thaliana
acattattgctcgacgc

SEQ ID NO: 19412 - DNA, 17 bp, Arabidopsis thaliana
acattattggatccact

SEQ ID NO: 19413 - DNA, 17 bp, Arabidopsis thaliana
acattcaaggccttggt

SEQ ID NO: 19414 - DNA, 17 bp, Arabidopsis thaliana
acattcaagtttgcgtt

SEQ ID NO: 19415 - DNA, 17 bp, Arabidopsis thaliana
acattcacacgaccagt

SEQ ID NO: 19416 - DNA, 17 bp, Arabidopsis thaliana
acattcacagatgattt

SEQ ID NO: 19417 - DNA, 17 bp, Arabidopsis thaliana
acattcacatcctgagg

SEQ ID NO: 19418 - DNA, 17 bp, Arabidopsis thaliana
acattcactggtgtgat

SEQ ID NO: 19419 - DNA, 17 bp, Arabidopsis thaliana
acattcagatttcggtt

SEQ ID NO: 19420 - DNA, 17 bp, Arabidopsis thaliana
acattcagccctttgtc

SEQ ID NO: 19421 - DNA, 17 bp, Arabidopsis thaliana
acattcagtgtcgaccc

SEQ ID NO: 19422 - DNA, 17 bp, Arabidopsis thaliana
acattcagtgtcgacct

SEQ ID NO: 19423 - DNA, 17 bp, Arabidopsis thaliana
acattcatcaagattag

SEQ ID NO: 19424 - DNA, 17 bp, Arabidopsis thaliana
acattcattttgacaaa

SEQ ID NO: 19425 - DNA, 17 bp, Arabidopsis thaliana
acattccaacgggtgtt

SEQ ID NO: 19426 - DNA, 17 bp, Arabidopsis thaliana
acattccatcagtcgat

SEQ ID NO: 19427 - DNA, 17 bp, Arabidopsis thaliana
acattccatggacattg

SEQ ID NO: 19428 - DNA, 17 bp, Arabidopsis thaliana
acattccgacggatccg

SEQ ID NO: 19429 - DNA, 17 bp, Arabidopsis thaliana
acattccgcaacactct

SEQ ID NO: 19430 - DNA, 17 bp, Arabidopsis thaliana
acattcctcaagattgg

SEQ ID NO: 19431 - DNA, 17 bp, Arabidopsis thaliana
acattcctcaggattgg

SEQ ID NO: 19432 - DNA, 17 bp, Arabidopsis thaliana
acattcgaccgctaaca

SEQ ID NO: 19433 - DNA, 17 bp, Arabidopsis thaliana
acattcgactattgaca

SEQ ID NO: 19434 - DNA, 17 bp, Arabidopsis thaliana
acattcgagatccgacc

SEQ ID NO: 19435 - DNA, 17 bp, Arabidopsis thaliana
acattcgcagcggaatt

SEQ ID NO: 19436 - DNA, 17 bp, Arabidopsis thaliana
acattcggattttcggg

SEQ ID NO: 19437 - DNA, 17 bp, Arabidopsis thaliana
acattcggttgtaccgc

SEQ ID NO: 19438 - DNA, 17 bp, Arabidopsis thaliana
acattcgtagcaaatca

SEQ ID NO: 19439 - DNA, 17 bp, Arabidopsis thaliana
acattcgtcaacttcgt

SEQ ID NO: 19440 - DNA, 17 bp, Arabidopsis thaliana
acattctaagcgatgtg

SEQ ID NO: 19441 - DNA, 17 bp, Arabidopsis thaliana
acattctccatcccaaa

SEQ ID NO: 19442 - DNA, 17 bp, Arabidopsis thaliana
acattctcccccggtcg

SEQ ID NO: 19443 - DNA, 17 bp, Arabidopsis thaliana
acattctccgttttgga

SEQ ID NO: 19444 - DNA, 17 bp, Arabidopsis thaliana
acattctcctcctttcg

SEQ ID NO: 19445 - DNA, 17 bp, Arabidopsis thaliana
acattctcgtggcagga

SEQ ID NO: 19446 - DNA, 17 bp, Arabidopsis thaliana
acattctctctatcgga

SEQ ID NO: 19447 - DNA, 17 bp, Arabidopsis thaliana
acattctgagacttccg

SEQ ID NO: 19448 - DNA, 17 bp, Arabidopsis thaliana
acattctgaggctccga

SEQ ID NO: 19449 - DNA, 17 bp, Arabidopsis thaliana
acattctgagttcttga

SEQ ID NO: 19450 - DNA, 17 bp, Arabidopsis thaliana
acattctggtgcttgat

SEQ ID NO: 19451 - DNA, 17 bp, Arabidopsis thaliana
acattctggtgtcctag

SEQ ID NO: 19452 - DNA, 17 bp, Arabidopsis thaliana
acattctgtagtttcgg

SEQ ID NO: 19453 - DNA, 17 bp, Arabidopsis thaliana
acattcttatggcagtc

SEQ ID NO: 19454 - DNA, 17 bp, Arabidopsis thaliana
acattcttcaggtttga

SEQ ID NO: 19455 - DNA, 17 bp, Arabidopsis thaliana
acattcttgaacttggt

SEQ ID NO: 19456 - DNA, 17 bp, Arabidopsis thaliana
acattcttggactgctt

SEQ ID NO: 19457 - DNA, 17 bp, Arabidopsis thaliana
acattctttggcccgac

SEQ ID NO: 19458 - DNA, 17 bp, Arabidopsis thaliana
acattgaacgactatga

SEQ ID NO: 19459 - DNA, 17 bp, Arabidopsis thaliana
acattgacaaagacttt

SEQ ID NO: 19460 - DNA, 17 bp, Arabidopsis thaliana
acattgaccagcagttt

SEQ ID NO: 19461 - DNA, 17 bp, Arabidopsis thaliana
acattgaccagttgaag

SEQ ID NO: 19462 - DNA, 17 bp, Arabidopsis thaliana
acattgacgtctcaagc

SEQ ID NO: 19463 - DNA, 17 bp, Arabidopsis thaliana
acattgactatgagaac

SEQ ID NO: 19464 - DNA, 17 bp, Arabidopsis thaliana
acattgacttcaagcct

SEQ ID NO: 19465 - DNA, 17 bp, Arabidopsis thaliana
acattgagacggcgtgc

SEQ ID NO: 19466 - DNA, 17 bp, Arabidopsis thaliana
acattgagacttagctt

SEQ ID NO: 19467 - DNA, 17 bp, Arabidopsis thaliana
acattgataaccagaat

SEQ ID NO: 19468 - DNA, 17 bp, Arabidopsis thaliana
acattgatctgcattgt

SEQ ID NO: 19469 - DNA, 17 bp, Arabidopsis thaliana
acattgcaagagttgtg

SEQ ID NO: 19470 - DNA, 17 bp, Arabidopsis thaliana
acattgcacgacgtcgt

SEQ ID NO: 19471 - DNA, 17 bp, Arabidopsis thaliana
acattgccatctgattg

SEQ ID NO: 19472 - DNA, 17 bp, Arabidopsis thaliana
acattgccgaccctcag

SEQ ID NO: 19473 - DNA, 17 bp, Arabidopsis thaliana
acattgccgtattggtg

SEQ ID NO: 19474 - DNA, 17 bp, Arabidopsis thaliana
acattgctctcgcagac

SEQ ID NO: 19475 - DNA, 17 bp, Arabidopsis thaliana
acattgctggctctggt

SEQ ID NO: 19476 - DNA, 17 bp, Arabidopsis thaliana
acattgcttctgctttg

SEQ ID NO: 19477 - DNA, 17 bp, Arabidopsis thaliana
acattgcttggttttag

SEQ ID NO: 19478 - DNA, 17 bp, Arabidopsis thaliana
acattggaaagatgagt

SEQ ID NO: 19479 - DNA, 17 bp, Arabidopsis thaliana
acattggaagtttgaag

SEQ ID NO: 19480 - DNA, 17 bp, Arabidopsis thaliana
acattggaattcatcct

SEQ ID NO: 19481 - DNA, 17 bp, Arabidopsis thaliana
acattggaccagtcaag

SEQ ID NO: 19482 - DNA, 17 bp, Arabidopsis thaliana
acattggagatggtcta

SEQ ID NO: 19483 - DNA, 17 bp, Arabidopsis thaliana
acattggaggtgctcta

SEQ ID NO: 19484 - DNA, 17 bp, Arabidopsis thaliana
acattggatgacttcgc

SEQ ID NO: 19485 - DNA, 17 bp, Arabidopsis thaliana
acattggccatgagaac

SEQ ID NO: 19486 - DNA, 17 bp, Arabidopsis thaliana
acattggcccgacttgg

SEQ ID NO: 19487 - DNA, 17 bp, Arabidopsis thaliana
acattggcctaacttgg

SEQ ID NO: 19488 - DNA, 17 bp, Arabidopsis thaliana
acattggctccatgatc

SEQ ID NO: 19489 - DNA, 17 bp, Arabidopsis thaliana
acattggctctcgacga

SEQ ID NO: 19490 - DNA, 17 bp, Arabidopsis thaliana
acattggtatttggtcg

SEQ ID NO: 19491 - DNA, 17 bp, Arabidopsis thaliana
acattggtccgacttgg

SEQ ID NO: 19492 - DNA, 17 bp, Arabidopsis thaliana
acattggtggttgtctg

SEQ ID NO: 19493 - DNA, 17 bp, Arabidopsis thaliana
acattggttgccattgg

SEQ ID NO: 19494 - DNA, 17 bp, Arabidopsis thaliana
acattggttgcgaaact

SEQ ID NO: 19495 - DNA, 17 bp, Arabidopsis thaliana
acattgtattcttctag

SEQ ID NO: 19496 - DNA, 17 bp, Arabidopsis thaliana
acattgtcaggtgggga

SEQ ID NO: 19497 - DNA, 17 bp, Arabidopsis thaliana
acattgtccctaatacg

SEQ ID NO: 19498 - DNA, 17 bp, Arabidopsis thaliana
acattgtcgtaagtgcc

SEQ ID NO: 19499 - DNA, 17 bp, Arabidopsis thaliana
acattgtctcaggaaac

SEQ ID NO: 19500 - DNA, 17 bp, Arabidopsis thaliana
acattgtcttgcgtcga

SEQ ID NO: 19501 - DNA, 17 bp, Arabidopsis thaliana
acattgtgcttgtctac

SEQ ID NO: 19502 - DNA, 17 bp, Arabidopsis thaliana
acattgtgtgcaagact

SEQ ID NO: 19503 - DNA, 17 bp, Arabidopsis thaliana
acattgttactttttcc

SEQ ID NO: 19504 - DNA, 17 bp, Arabidopsis thaliana
acattgttctaccgcga

SEQ ID NO: 19505 - DNA, 17 bp, Arabidopsis thaliana
acattgttctgatttgg

SEQ ID NO: 19506 - DNA, 17 bp, Arabidopsis thaliana
acattgtttcgtactga

SEQ ID NO: 19507 - DNA, 17 bp, Arabidopsis thaliana
acattgtttcgtctcgg

SEQ ID NO: 19508 - DNA, 17 bp, Arabidopsis thaliana
acatttaagtctgcttt

SEQ ID NO: 19509 - DNA, 17 bp, Arabidopsis thaliana
acatttacatcttacac

SEQ ID NO: 19510 - DNA, 17 bp, Arabidopsis thaliana
acatttagttggtctgc

SEQ ID NO: 19511 - DNA, 17 bp, Arabidopsis thaliana
acatttattgccgacct

SEQ ID NO: 19512 - DNA, 17 bp, Arabidopsis thaliana
acatttatttggaaccg

SEQ ID NO: 19513 - DNA, 17 bp, Arabidopsis thaliana
acatttcaatgtctgtt

SEQ ID NO: 19514 - DNA, 17 bp, Arabidopsis thaliana
acatttcaatgtttgtt

SEQ ID NO: 19515 - DNA, 17 bp, Arabidopsis thaliana
acatttcacattcttgg

SEQ ID NO: 19516 - DNA, 17 bp, Arabidopsis thaliana
acatttcagattctttg

SEQ ID NO: 19517 - DNA, 17 bp, Arabidopsis thaliana
acatttcatagttttgt

SEQ ID NO: 19518 - DNA, 17 bp, Arabidopsis thaliana
acatttcattaggccca

SEQ ID NO: 19519 - DNA, 17 bp, Arabidopsis thaliana
acatttccagttggatg

SEQ ID NO: 19520 - DNA, 17 bp, Arabidopsis thaliana
acatttccattacccgc

SEQ ID NO: 19521 - DNA, 17 bp, Arabidopsis thaliana
acatttcccatccaaat

SEQ ID NO: 19522 - DNA, 17 bp, Arabidopsis thaliana
acatttccgtgattaga

SEQ ID NO: 19523 - DNA, 17 bp, Arabidopsis thaliana
acatttccgtggttagg

SEQ ID NO: 19524 - DNA, 17 bp, Arabidopsis thaliana
acatttcctcttcaagt

SEQ ID NO: 19525 - DNA, 17 bp, Arabidopsis thaliana
acatttccttgaactga

SEQ ID NO: 19526 - DNA, 17 bp, Arabidopsis thaliana
acatttcggtgcgtttc

SEQ ID NO: 19527 - DNA, 17 bp, Arabidopsis thaliana
acatttctaatgtttgt

SEQ ID NO: 19528 - DNA, 17 bp, Arabidopsis thaliana
acatttctcagaggcgg

SEQ ID NO: 19529 - DNA, 17 bp, Arabidopsis thaliana
acatttctcgtggcgta

SEQ ID NO: 19530 - DNA, 17 bp, Arabidopsis thaliana
acatttgaaagggtgtg

SEQ ID NO: 19531 - DNA, 17 bp, Arabidopsis thaliana
acatttgaccactgtac

SEQ ID NO: 19532 - DNA, 17 bp, Arabidopsis thaliana
acatttgaccatccatc

SEQ ID NO: 19533 - DNA, 17 bp, Arabidopsis thaliana
acatttgactttgacaa

SEQ ID NO: 19534 - DNA, 17 bp, Arabidopsis thaliana
acatttgatacggtgtg

SEQ ID NO: 19535 - DNA, 17 bp, Arabidopsis thaliana
acatttgcaaatgcttt

SEQ ID NO: 19536 - DNA, 17 bp, Arabidopsis thaliana
acatttgccaagaccgc

SEQ ID NO: 19537 - DNA, 17 bp, Arabidopsis thaliana
acatttgccctatgtcc

SEQ ID NO: 19538 - DNA, 17 bp, Arabidopsis thaliana
acatttgcctcgaaggc

SEQ ID NO: 19539 - DNA, 17 bp, Arabidopsis thaliana
acatttgcgagggatta

SEQ ID NO: 19540 - DNA, 17 bp, Arabidopsis thaliana
acatttgcgtaagatct

SEQ ID NO: 19541 - DNA, 17 bp, Arabidopsis thaliana
acatttgctccagtttg

SEQ ID NO: 19542 - DNA, 17 bp, Arabidopsis thaliana
acatttgctgtgacctc

SEQ ID NO: 19543 - DNA, 17 bp, Arabidopsis thaliana
acatttgcttgatcaat

SEQ ID NO: 19544 - DNA, 17 bp, Arabidopsis thaliana
acatttgctttgctgat

SEQ ID NO: 19545 - DNA, 17 bp, Arabidopsis thaliana
acatttggaatgtttgt

SEQ ID NO: 19546 - DNA, 17 bp, Arabidopsis thaliana
acatttggaccaacatc

SEQ ID NO: 19547 - DNA, 17 bp, Arabidopsis thaliana
acatttggaccaacctc

SEQ ID NO: 19548 - DNA, 17 bp, Arabidopsis thaliana
acatttggcgccgtctt

SEQ ID NO: 19549 - DNA, 17 bp, Arabidopsis thaliana
acatttggcgctctatt

SEQ ID NO: 19550 - DNA, 17 bp, Arabidopsis thaliana
acatttggcggtactga

SEQ ID NO: 19551 - DNA, 17 bp, Arabidopsis thaliana
acatttggctgccacac

SEQ ID NO: 19552 - DNA, 17 bp, Arabidopsis thaliana
acatttgggactggagg

SEQ ID NO: 19553 - DNA, 17 bp, Arabidopsis thaliana
acatttgggactggtgg

SEQ ID NO: 19554 - DNA, 17 bp, Arabidopsis thaliana
acatttgggcaggatct

SEQ ID NO: 19555 - DNA, 17 bp, Arabidopsis thaliana
acatttggtccgtccat

SEQ ID NO: 19556 - DNA, 17 bp, Arabidopsis thaliana
acatttggtcttccagc

SEQ ID NO: 19557 - DNA, 17 bp, Arabidopsis thaliana
acatttggtggtgtttc

SEQ ID NO: 19558 - DNA, 17 bp, Arabidopsis thaliana
acatttgtactgaaccg

SEQ ID NO: 19559 - DNA, 17 bp, Arabidopsis thaliana
acatttgtagacctaat

SEQ ID NO: 19560 - DNA, 17 bp, Arabidopsis thaliana
acatttgtgtgaaataa

SEQ ID NO: 19561 - DNA, 17 bp, Arabidopsis thaliana
acatttgtgtgaaatgg

SEQ ID NO: 19562 - DNA, 17 bp, Arabidopsis thaliana
acatttgtttggaaagt

SEQ ID NO: 19563 - DNA, 17 bp, Arabidopsis thaliana
acattttaaccgatgtg

SEQ ID NO: 19564 - DNA, 17 bp, Arabidopsis thaliana
acattttacgggactgt

SEQ ID NO: 19565 - DNA, 17 bp, Arabidopsis thaliana
acattttagattctttg

SEQ ID NO: 19566 - DNA, 17 bp, Arabidopsis thaliana
acattttccagaggcgg

SEQ ID NO: 19567 - DNA, 17 bp, Arabidopsis thaliana
acattttcgggcatttt

SEQ ID NO: 19568 - DNA, 17 bp, Arabidopsis thaliana
acattttcggtggcatt

SEQ ID NO: 19569 - DNA, 17 bp, Arabidopsis thaliana
acattttcgtgatttgg

SEQ ID NO: 19570 - DNA, 17 bp, Arabidopsis thaliana
acattttctctggcgat

SEQ ID NO: 19571 - DNA, 17 bp, Arabidopsis thaliana
acattttctcttctctg

SEQ ID NO: 19572 - DNA, 17 bp, Arabidopsis thaliana
acattttgaccactgta

SEQ ID NO: 19573 - DNA, 17 bp, Arabidopsis thaliana
acattttgctccctttg

SEQ ID NO: 19574 - DNA, 17 bp, Arabidopsis thaliana
acattttgggtcggctg

SEQ ID NO: 19575 - DNA, 17 bp, Arabidopsis thaliana
acattttggtccacgtg

SEQ ID NO: 19576 - DNA, 17 bp, Arabidopsis thaliana
acattttggtctacgtg

SEQ ID NO: 19577 - DNA, 17 bp, Arabidopsis thaliana
acattttgtcgcgggta

SEQ ID NO: 19578 - DNA, 17 bp, Arabidopsis thaliana
acattttgttgagcggt

SEQ ID NO: 19579 - DNA, 17 bp, Arabidopsis thaliana
acatttttcatggatga

SEQ ID NO: 19580 - DNA, 17 bp, Arabidopsis thaliana
acatttttctcgacgat

SEQ ID NO: 19581 - DNA, 17 bp, Arabidopsis thaliana
acatttttctggggaag

SEQ ID NO: 19582 - DNA, 17 bp, Arabidopsis thaliana
acatttttggctttgtt

SEQ ID NO: 19583 - DNA, 17 bp, Arabidopsis thaliana
acatttttggtagactt

SEQ ID NO: 19584 - DNA, 17 bp, Arabidopsis thaliana
acattttttctaaattt

SEQ ID NO: 19585 - DNA, 17 bp, Arabidopsis thaliana
accaaaaaagtttcggg

SEQ ID NO: 19586 - DNA, 17 bp, Arabidopsis thaliana
accaaaaccaccgaagg

SEQ ID NO: 19587 - DNA, 17 bp, Arabidopsis thaliana
accaaaaccaccgcagg

SEQ ID NO: 19588 - DNA, 17 bp, Arabidopsis thaliana
accaaaacccgtaattt

SEQ ID NO: 19589 - DNA, 17 bp, Arabidopsis thaliana
accaaaaccgttgttgt

SEQ ID NO: 19590 - DNA, 17 bp, Arabidopsis thaliana
accaaaacctcaactcc

SEQ ID NO: 19591 - DNA, 17 bp, Arabidopsis thaliana
accaaaacctgttattg

SEQ ID NO: 19592 - DNA, 17 bp, Arabidopsis thaliana
accaaaaccttaactac

SEQ ID NO: 19593 - DNA, 17 bp, Arabidopsis thaliana
accaaaactaactgctg

SEQ ID NO: 19594 - DNA, 17 bp, Arabidopsis thaliana
accaaaactatctcggg

SEQ ID NO: 19595 - DNA, 17 bp, Arabidopsis thaliana
accaaaagttgttcgtt

SEQ ID NO: 19596 - DNA, 17 bp, Arabidopsis thaliana
accaaaatcttctgggt

SEQ ID NO: 19597 - DNA, 17 bp, Arabidopsis thaliana
accaaaatcttctggtt

SEQ ID NO: 19598 - DNA, 17 bp, Arabidopsis thaliana
accaaaatgactcttgt

SEQ ID NO: 19599 - DNA, 17 bp, Arabidopsis thaliana
accaaaatggtgttgag

SEQ ID NO: 19600 - DNA, 17 bp, Arabidopsis thaliana
accaaaatgtcttggcc

SEQ ID NO: 19601 - DNA, 17 bp, Arabidopsis thaliana
accaaaattcaaaaatc

SEQ ID NO: 19602 - DNA, 17 bp, Arabidopsis thaliana
accaaaccccactacgc

SEQ ID NO: 19603 - DNA, 17 bp, Arabidopsis thaliana
accaaacctctggtagc

SEQ ID NO: 19604 - DNA, 17 bp, Arabidopsis thaliana
accaaacgcagccagta

SEQ ID NO: 19605 - DNA, 17 bp, Arabidopsis thaliana
accaaacgctggtaggt

SEQ ID NO: 19606 - DNA, 17 bp, Arabidopsis thaliana
accaaacggcatgtctt

SEQ ID NO: 19607 - DNA, 17 bp, Arabidopsis thaliana
accaaacgtctcagtgg

SEQ ID NO: 19608 - DNA, 17 bp, Arabidopsis thaliana
accaaacttggagactt

SEQ ID NO: 19609 - DNA, 17 bp, Arabidopsis thaliana
accaaacttggcatgta

SEQ ID NO: 19610 - DNA, 17 bp, Arabidopsis thaliana
accaaactttctacttt

SEQ ID NO: 19611 - DNA, 17 bp, Arabidopsis thaliana
accaaactttggttgac

SEQ ID NO: 19612 - DNA, 17 bp, Arabidopsis thaliana
accaaagagatctcaac

SEQ ID NO: 19613 - DNA, 17 bp, Arabidopsis thaliana
accaaaggaccaactga

SEQ ID NO: 19614 - DNA, 17 bp, Arabidopsis thaliana
accaaaggcggaccggc

SEQ ID NO: 19615 - DNA, 17 bp, Arabidopsis thaliana
accaaagggagtggtta

SEQ ID NO: 19616 - DNA, 17 bp, Arabidopsis thaliana
accaaaggtgaatttga

SEQ ID NO: 19617 - DNA, 17 bp, Arabidopsis thaliana
accaaaggttgctctca

SEQ ID NO: 19618 - DNA, 17 bp, Arabidopsis thaliana
accaaagtccggttctc

SEQ ID NO: 19619 - DNA, 17 bp, Arabidopsis thaliana
accaaataccgttggct

SEQ ID NO: 19620 - DNA, 17 bp, Arabidopsis thaliana
accaaatcgttggctat

SEQ ID NO: 19621 - DNA, 17 bp, Arabidopsis thaliana
accaaatctatccagtg

SEQ ID NO: 19622 - DNA, 17 bp, Arabidopsis thaliana
accaaatctctcggatg

SEQ ID NO: 19623 - DNA, 17 bp, Arabidopsis thaliana
accaaatggctgaaact

SEQ ID NO: 19624 - DNA, 17 bp, Arabidopsis thaliana
accaaatgggcctacat

SEQ ID NO: 19625 - DNA, 17 bp, Arabidopsis thaliana
accaaatttcagattat

SEQ ID NO: 19626 - DNA, 17 bp, Arabidopsis thaliana
accaaatttcatccttt

SEQ ID NO: 19627 - DNA, 17 bp, Arabidopsis thaliana
accaaatttcgttgacc

SEQ ID NO: 19628 - DNA, 17 bp, Arabidopsis thaliana
accaaatttgcataggt

SEQ ID NO: 19629 - DNA, 17 bp, Arabidopsis thaliana
accaaattttcgttgac

SEQ ID NO: 19630 - DNA, 17 bp, Arabidopsis thaliana
accaacaaacgccgctg

SEQ ID NO: 19631 - DNA, 17 bp, Arabidopsis thaliana
accaacaatggcgtaaa

SEQ ID NO: 19632 - DNA, 17 bp, Arabidopsis thaliana
accaacacggtctgatc

SEQ ID NO: 19633 - DNA, 17 bp, Arabidopsis thaliana
accaacatgttcttggc

SEQ ID NO: 19634 - DNA, 17 bp, Arabidopsis thaliana
accaaccgtcggacaag

SEQ ID NO: 19635 - DNA, 17 bp, Arabidopsis thaliana
accaacgacaagcgaca

SEQ ID NO: 19636 - DNA, 17 bp, Arabidopsis thaliana
accaacgcggattacgg

SEQ ID NO: 19637 - DNA, 17 bp, Arabidopsis thaliana
accaacggtggttcctt

SEQ ID NO: 19638 - DNA, 17 bp, Arabidopsis thaliana
accaacgtcaccaccac

SEQ ID NO: 19639 - DNA, 17 bp, Arabidopsis thaliana
accaacgtggtcactaa

SEQ ID NO: 19640 - DNA, 17 bp, Arabidopsis thaliana
accaacgtgttcttggc

SEQ ID NO: 19641 - DNA, 17 bp, Arabidopsis thaliana
accaacgttaaccaggc

SEQ ID NO: 19642 - DNA, 17 bp, Arabidopsis thaliana
accaacgtttacggcaa

SEQ ID NO: 19643 - DNA, 17 bp, Arabidopsis thaliana
accaactccgatggagc

SEQ ID NO: 19644 - DNA, 17 bp, Arabidopsis thaliana
accaactctcttcatat

SEQ ID NO: 19645 - DNA, 17 bp, Arabidopsis thaliana
accaactctcttcatcc

SEQ ID NO: 19646 - DNA, 17 bp, Arabidopsis thaliana
accaactgcaaacgctg

SEQ ID NO: 19647 - DNA, 17 bp, Arabidopsis thaliana
accaactggatgaccta

SEQ ID NO: 19648 - DNA, 17 bp, Arabidopsis thaliana
accaactggatgttcgt

SEQ ID NO: 19649 - DNA, 17 bp, Arabidopsis thaliana
accaactgtttccaagc

SEQ ID NO: 19650 - DNA, 17 bp, Arabidopsis thaliana
accaactttagcccagg

SEQ ID NO: 19651 - DNA, 17 bp, Arabidopsis thaliana
accaactttagctcagg

SEQ ID NO: 19652 - DNA, 17 bp, Arabidopsis thaliana
accaactttcggctcag

SEQ ID NO: 19653 - DNA, 17 bp, Arabidopsis thaliana
accaactttcgttgacc

SEQ ID NO: 19654 - DNA, 17 bp, Arabidopsis thaliana
accaactttggccagat

SEQ ID NO: 19655 - DNA, 17 bp, Arabidopsis thaliana
accaagactcccatcaa

SEQ ID NO: 19656 - DNA, 17 bp, Arabidopsis thaliana
accaagaggtctggggt

SEQ ID NO: 19657 - DNA, 17 bp, Arabidopsis thaliana
accaagatcgacgaaca

SEQ ID NO: 19658 - DNA, 17 bp, Arabidopsis thaliana
accaagatgggtttacg

SEQ ID NO: 19659 - DNA, 17 bp, Arabidopsis thaliana
accaagattctattgat

SEQ ID NO: 19660 - DNA, 17 bp, Arabidopsis thaliana
accaagattgcggaaaa

SEQ ID NO: 19661 - DNA, 17 bp, Arabidopsis thaliana
accaagcaactcttgca

SEQ ID NO: 19662 - DNA, 17 bp, Arabidopsis thaliana
accaagcccagcgacgt

SEQ ID NO: 19663 - DNA, 17 bp, Arabidopsis thaliana
accaagccctggatgct

SEQ ID NO: 19664 - DNA, 17 bp, Arabidopsis thaliana
accaagccctgggtgct

SEQ ID NO: 19665 - DNA, 17 bp, Arabidopsis thaliana
accaagcgggtgggcga

SEQ ID NO: 19666 - DNA, 17 bp, Arabidopsis thaliana
accaagctcgccgtcgt

SEQ ID NO: 19667 - DNA, 17 bp, Arabidopsis thaliana
accaaggaatgcgtacc

SEQ ID NO: 19668 - DNA, 17 bp, Arabidopsis thaliana
accaaggaggctttctg

SEQ ID NO: 19669 - DNA, 17 bp, Arabidopsis thaliana
accaaggagtactgttt

SEQ ID NO: 19670 - DNA, 17 bp, Arabidopsis thaliana
accaaggagtctgacat

SEQ ID NO: 19671 - DNA, 17 bp, Arabidopsis thaliana
accaaggctccacatgt

SEQ ID NO: 19672 - DNA, 17 bp, Arabidopsis thaliana
accaagggtgcagaata

SEQ ID NO: 19673 - DNA, 17 bp, Arabidopsis thaliana
accaaggtcctgctgct

SEQ ID NO: 19674 - DNA, 17 bp, Arabidopsis thaliana
accaaggttctacaagc

SEQ ID NO: 19675 - DNA, 17 bp, Arabidopsis thaliana
accaagtccatccaaat

SEQ ID NO: 19676 - DNA, 17 bp, Arabidopsis thaliana
accaagtgactacatcg

SEQ ID NO: 19677 - DNA, 17 bp, Arabidopsis thaliana
accaagtgattcagttg

SEQ ID NO: 19678 - DNA, 17 bp, Arabidopsis thaliana
accaagtgattgaggga

SEQ ID NO: 19679 - DNA, 17 bp, Arabidopsis thaliana
accaagtgcatattggc

SEQ ID NO: 19680 - DNA, 17 bp, Arabidopsis thaliana
accaagtggtcgtgatc

SEQ ID NO: 19681 - DNA, 17 bp, Arabidopsis thaliana
accaagtgtcgttagct

SEQ ID NO: 19682 - DNA, 17 bp, Arabidopsis thaliana
accaagtgttcgctcct

SEQ ID NO: 19683 - DNA, 17 bp, Arabidopsis thaliana
accaagttgttgtctct

SEQ ID NO: 19684 - DNA, 17 bp, Arabidopsis thaliana
accaagtttgaagatta

SEQ ID NO: 19685 - DNA, 17 bp, Arabidopsis thaliana
accaataactagggtac

SEQ ID NO: 19686 - DNA, 17 bp, Arabidopsis thaliana
accaataccttggtaca

SEQ ID NO: 19687 - DNA, 17 bp, Arabidopsis thaliana
accaatacggcaatgtc

SEQ ID NO: 19688 - DNA, 17 bp, Arabidopsis thaliana
accaatatcatctgacg

SEQ ID NO: 19689 - DNA, 17 bp, Arabidopsis thaliana
accaatattcggagatc

SEQ ID NO: 19690 - DNA, 17 bp, Arabidopsis thaliana
accaatccatcccgaac

SEQ ID NO: 19691 - DNA, 17 bp, Arabidopsis thaliana
accaatcctcttgagac

SEQ ID NO: 19692 - DNA, 17 bp, Arabidopsis thaliana
accaatcgatgggggaa

SEQ ID NO: 19693 - DNA, 17 bp, Arabidopsis thaliana
accaatcggatatccac

SEQ ID NO: 19694 - DNA, 17 bp, Arabidopsis thaliana
accaatcgtaatgaccg

SEQ ID NO: 19695 - DNA, 17 bp, Arabidopsis thaliana
accaatctctgatgaca

SEQ ID NO: 19696 - DNA, 17 bp, Arabidopsis thaliana
accaatctgctggctaa

SEQ ID NO: 19697 - DNA, 17 bp, Arabidopsis thaliana
accaatgaatggttgga

SEQ ID NO: 19698 - DNA, 17 bp, Arabidopsis thaliana
accaatgaccggttatt

SEQ ID NO: 19699 - DNA, 17 bp, Arabidopsis thaliana
accaatgcagccatagg

SEQ ID NO: 19700 - DNA, 17 bp, Arabidopsis thaliana
accaatggaccaaagaa

SEQ ID NO: 19701 - DNA, 17 bp, Arabidopsis thaliana
accaatgggttcgctgc

SEQ ID NO: 19702 - DNA, 17 bp, Arabidopsis thaliana
accaattcatcggatca

SEQ ID NO: 19703 - DNA, 17 bp, Arabidopsis thaliana
accaatttgcccttgaa

SEQ ID NO: 19704 - DNA, 17 bp, Arabidopsis thaliana
accaattttgacaccgc

SEQ ID NO: 19705 - DNA, 17 bp, Arabidopsis thaliana
accaattttttacggga

SEQ ID NO: 19706 - DNA, 17 bp, Arabidopsis thaliana
accacaaaacgctgtca

SEQ ID NO: 19707 - DNA, 17 bp, Arabidopsis thaliana
accacaaataaaaatct

SEQ ID NO: 19708 - DNA, 17 bp, Arabidopsis thaliana
accacaacctccaccag

SEQ ID NO: 19709 - DNA, 17 bp, Arabidopsis thaliana
accacaagaataggccg

SEQ ID NO: 19710 - DNA, 17 bp, Arabidopsis thaliana
accacaagtcttcttct

SEQ ID NO: 19711 - DNA, 17 bp, Arabidopsis thaliana
accacaagttagcgtgt

SEQ ID NO: 19712 - DNA, 17 bp, Arabidopsis thaliana
accacaatttccacctg

SEQ ID NO: 19713 - DNA, 17 bp, Arabidopsis thaliana
accacacacttcctgag

SEQ ID NO: 19714 - DNA, 17 bp, Arabidopsis thaliana
accacaccattgtgacc

SEQ ID NO: 19715 - DNA, 17 bp, Arabidopsis thaliana
accacacgttgaactcc

SEQ ID NO: 19716 - DNA, 17 bp, Arabidopsis thaliana
accacactgtgcagttc

SEQ ID NO: 19717 - DNA, 17 bp, Arabidopsis thaliana
accacagacccgggttt

SEQ ID NO: 19718 - DNA, 17 bp, Arabidopsis thaliana
accacagatctgtcagg

SEQ ID NO: 19719 - DNA, 17 bp, Arabidopsis thaliana
accacagctgctcctaa

SEQ ID NO: 19720 - DNA, 17 bp, Arabidopsis thaliana
accacagggataactgg

SEQ ID NO: 19721 - DNA, 17 bp, Arabidopsis thaliana
accacaggtcaatccct

SEQ ID NO: 19722 - DNA, 17 bp, Arabidopsis thaliana
accacaggttcattaat

SEQ ID NO: 19723 - DNA, 17 bp, Arabidopsis thaliana
accacagtcatgctcgt

SEQ ID NO: 19724 - DNA, 17 bp, Arabidopsis thaliana
accacagttgcttaggc

SEQ ID NO: 19725 - DNA, 17 bp, Arabidopsis thaliana
accacatcagggcttgc

SEQ ID NO: 19726 - DNA, 17 bp, Arabidopsis thaliana
accacatccaccagtgc

SEQ ID NO: 19727 - DNA, 17 bp, Arabidopsis thaliana
accacatcgaccccgtt

SEQ ID NO: 19728 - DNA, 17 bp, Arabidopsis thaliana
accacatctcagtttgc

SEQ ID NO: 19729 - DNA, 17 bp, Arabidopsis thaliana
accacatgctgtggttt

SEQ ID NO: 19730 - DNA, 17 bp, Arabidopsis thaliana
accacattagccttacc

SEQ ID NO: 19731 - DNA, 17 bp, Arabidopsis thaliana
accacattggcggtcta

SEQ ID NO: 19732 - DNA, 17 bp, Arabidopsis thaliana
accacatttgactttgc

SEQ ID NO: 19733 - DNA, 17 bp, Arabidopsis thaliana
accaccaagccgagtga

SEQ ID NO: 19734 - DNA, 17 bp, Arabidopsis thaliana
accaccaatgaatgtcc

SEQ ID NO: 19735 - DNA, 17 bp, Arabidopsis thaliana
accaccacaaccaccgc

SEQ ID NO: 19736 - DNA, 17 bp, Arabidopsis thaliana
accaccaccacaaccac

SEQ ID NO: 19737 - DNA, 17 bp, Arabidopsis thaliana
accaccaccaccaccag

SEQ ID NO: 19738 - DNA, 17 bp, Arabidopsis thaliana
accaccaccacctccag

SEQ ID NO: 19739 - DNA, 17 bp, Arabidopsis thaliana
accaccaccgccggcca

SEQ ID NO: 19740 - DNA, 17 bp, Arabidopsis thaliana
accaccacctccagcgc

SEQ ID NO: 19741 - DNA, 17 bp, Arabidopsis thaliana
accaccacgatcacaaa

SEQ ID NO: 19742 - DNA, 17 bp, Arabidopsis thaliana
accaccactgagaccct

SEQ ID NO: 19743 - DNA, 17 bp, Arabidopsis thaliana
accaccagacgatccga

SEQ ID NO: 19744 - DNA, 17 bp, Arabidopsis thaliana
accaccagagaaaactt

SEQ ID NO: 19745 - DNA, 17 bp, Arabidopsis thaliana
accaccagagaatgggc

SEQ ID NO: 19746 - DNA, 17 bp, Arabidopsis thaliana
accaccagagcctccat

SEQ ID NO: 19747 - DNA, 17 bp, Arabidopsis thaliana
accaccagcagtggagc

SEQ ID NO: 19748 - DNA, 17 bp, Arabidopsis thaliana
accaccaggagtggagc

SEQ ID NO: 19749 - DNA, 17 bp, Arabidopsis thaliana
accaccaggagtgtagc

SEQ ID NO: 19750 - DNA, 17 bp, Arabidopsis thaliana
accaccagttccagggg

SEQ ID NO: 19751 - DNA, 17 bp, Arabidopsis thaliana
accaccatcaccatcag

SEQ ID NO: 19752 - DNA, 17 bp, Arabidopsis thaliana
accaccatcggtgacac

SEQ ID NO: 19753 - DNA, 17 bp, Arabidopsis thaliana
accaccatctgtatttg

SEQ ID NO: 19754 - DNA, 17 bp, Arabidopsis thaliana
accaccattgctgctgc

SEQ ID NO: 19755 - DNA, 17 bp, Arabidopsis thaliana
accaccattgctggtgc

SEQ ID NO: 19756 - DNA, 17 bp, Arabidopsis thaliana
accacccccacccaccc

SEQ ID NO: 19757 - DNA, 17 bp, Arabidopsis thaliana
accacccgcaaccgcaa

SEQ ID NO: 19758 - DNA, 17 bp, Arabidopsis thaliana
accacccttggtgtcgc

SEQ ID NO: 19759 - DNA, 17 bp, Arabidopsis thaliana
accaccgaatgttacca

SEQ ID NO: 19760 - DNA, 17 bp, Arabidopsis thaliana
accaccgagcggcgggt

SEQ ID NO: 19761 - DNA, 17 bp, Arabidopsis thaliana
accaccgatcctgctgc

SEQ ID NO: 19762 - DNA, 17 bp, Arabidopsis thaliana
accaccgattgagtcat

SEQ ID NO: 19763 - DNA, 17 bp, Arabidopsis thaliana
accaccgattgagtctt

SEQ ID NO: 19764 - DNA, 17 bp, Arabidopsis thaliana
accaccgccgtctacag

SEQ ID NO: 19765 - DNA, 17 bp, Arabidopsis thaliana
accaccgcctatttgga

SEQ ID NO: 19766 - DNA, 17 bp, Arabidopsis thaliana
accaccgcgaacaagaa

SEQ ID NO: 19767 - DNA, 17 bp, Arabidopsis thaliana
accaccgcgagcaagct

SEQ ID NO: 19768 - DNA, 17 bp, Arabidopsis thaliana
accaccgctatcgctaa

SEQ ID NO: 19769 - DNA, 17 bp, Arabidopsis thaliana
accaccggactggtcag

SEQ ID NO: 19770 - DNA, 17 bp, Arabidopsis thaliana
accaccggttgcatagg

SEQ ID NO: 19771 - DNA, 17 bp, Arabidopsis thaliana
accaccgtacggtctgt

SEQ ID NO: 19772 - DNA, 17 bp, Arabidopsis thaliana
accacctccgtcacagg

SEQ ID NO: 19773 - DNA, 17 bp, Arabidopsis thaliana
accacctccgttccccc

SEQ ID NO: 19774 - DNA, 17 bp, Arabidopsis thaliana
accacctcgtttcccac

SEQ ID NO: 19775 - DNA, 17 bp, Arabidopsis thaliana
accacctttacctacat

SEQ ID NO: 19776 - DNA, 17 bp, Arabidopsis thaliana
accacgaaagcatacac

SEQ ID NO: 19777 - DNA, 17 bp, Arabidopsis thaliana
accacgaacaggagccc

SEQ ID NO: 19778 - DNA, 17 bp, Arabidopsis thaliana
accacgactctcggcaa

SEQ ID NO: 19779 - DNA, 17 bp, Arabidopsis thaliana
accacgagcagaagccc

SEQ ID NO: 19780 - DNA, 17 bp, Arabidopsis thaliana
accacgagcaggagccc

SEQ ID NO: 19781 - DNA, 17 bp, Arabidopsis thaliana
accacgaggcgctgtct

SEQ ID NO: 19782 - DNA, 17 bp, Arabidopsis thaliana
accacgaggttgaacgc

SEQ ID NO: 19783 - DNA, 17 bp, Arabidopsis thaliana
accacgaggttgacaag

SEQ ID NO: 19784 - DNA, 17 bp, Arabidopsis thaliana
accacgagtttggcctt

SEQ ID NO: 19785 - DNA, 17 bp, Arabidopsis thaliana
accacgatcacggcagc

SEQ ID NO: 19786 - DNA, 17 bp, Arabidopsis thaliana
accacgatcataaatgc

SEQ ID NO: 19787 - DNA, 17 bp, Arabidopsis thaliana
accacgatccactgaga

SEQ ID NO: 19788 - DNA, 17 bp, Arabidopsis thaliana
accacgatttccagatc

SEQ ID NO: 19789 - DNA, 17 bp, Arabidopsis thaliana
accacgcgacgtgcggt

SEQ ID NO: 19790 - DNA, 17 bp, Arabidopsis thaliana
accacgcggattacggt

SEQ ID NO: 19791 - DNA, 17 bp, Arabidopsis thaliana
accacggacagacgatc

SEQ ID NO: 19792 - DNA, 17 bp, Arabidopsis thaliana
accacggaggggtcttc

SEQ ID NO: 19793 - DNA, 17 bp, Arabidopsis thaliana
accacggatcagaatgc

SEQ ID NO: 19794 - DNA, 17 bp, Arabidopsis thaliana
accacggatcatgttca

SEQ ID NO: 19795 - DNA, 17 bp, Arabidopsis thaliana
accacggctattttgtt

SEQ ID NO: 19796 - DNA, 17 bp, Arabidopsis thaliana
accacgggttgcccaca

SEQ ID NO: 19797 - DNA, 17 bp, Arabidopsis thaliana
accacggtggggtcttc

SEQ ID NO: 19798 - DNA, 17 bp, Arabidopsis thaliana
accacggtgtcgggggt

SEQ ID NO: 19799 - DNA, 17 bp, Arabidopsis thaliana
accacgtctgcctgggt

SEQ ID NO: 19800 - DNA, 17 bp, Arabidopsis thaliana
accacgtcttatcattt

SEQ ID NO: 19801 - DNA, 17 bp, Arabidopsis thaliana
accacgtggccgtgggt

SEQ ID NO: 19802 - DNA, 17 bp, Arabidopsis thaliana
accactaaaacttgtgt

SEQ ID NO: 19803 - DNA, 17 bp, Arabidopsis thaliana
accactaagtgcttgtt

SEQ ID NO: 19804 - DNA, 17 bp, Arabidopsis thaliana
accactaattccagaga

SEQ ID NO: 19805 - DNA, 17 bp, Arabidopsis thaliana
accactactaccatccc

SEQ ID NO: 19806 - DNA, 17 bp, Arabidopsis thaliana
accactactaccatcgc

SEQ ID NO: 19807 - DNA, 17 bp, Arabidopsis thaliana
accactagaccaatgtg

SEQ ID NO: 19808 - DNA, 17 bp, Arabidopsis thaliana
accactagaccacaaat

SEQ ID NO: 19809 - DNA, 17 bp, Arabidopsis thaliana
accactagagattggcc

SEQ ID NO: 19810 - DNA, 17 bp, Arabidopsis thaliana
accactaggatgggtga

SEQ ID NO: 19811 - DNA, 17 bp, Arabidopsis thaliana
accactagttttgctgt

SEQ ID NO: 19812 - DNA, 17 bp, Arabidopsis thaliana
accactatggcctgatg

SEQ ID NO: 19813 - DNA, 17 bp, Arabidopsis thaliana
accactattgctgtttg

SEQ ID NO: 19814 - DNA, 17 bp, Arabidopsis thaliana
accactcaacggggccc

SEQ ID NO: 19815 - DNA, 17 bp, Arabidopsis thaliana
accactccaaatccact

SEQ ID NO: 19816 - DNA, 17 bp, Arabidopsis thaliana
accactcgacttcgtcc

SEQ ID NO: 19817 - DNA, 17 bp, Arabidopsis thaliana
accactctacggatgtg

SEQ ID NO: 19818 - DNA, 17 bp, Arabidopsis thaliana
accactctccagatctg

SEQ ID NO: 19819 - DNA, 17 bp, Arabidopsis thaliana
accactctcggtgggcc

SEQ ID NO: 19820 - DNA, 17 bp, Arabidopsis thaliana
accactctgactctgat

SEQ ID NO: 19821 - DNA, 17 bp, Arabidopsis thaliana
accactctgtcccctct

SEQ ID NO: 19822 - DNA, 17 bp, Arabidopsis thaliana
accactctgtccgctct

SEQ ID NO: 19823 - DNA, 17 bp, Arabidopsis thaliana
accactgactaaaccac

SEQ ID NO: 19824 - DNA, 17 bp, Arabidopsis thaliana
accactgcttttctatg

SEQ ID NO: 19825 - DNA, 17 bp, Arabidopsis thaliana
accactggaccaacagc

SEQ ID NO: 19826 - DNA, 17 bp, Arabidopsis thaliana
accactggatggtgatt

SEQ ID NO: 19827 - DNA, 17 bp, Arabidopsis thaliana
accactgggccaaccaa

SEQ ID NO: 19828 - DNA, 17 bp, Arabidopsis thaliana
accactgggccaataac

SEQ ID NO: 19829 - DNA, 17 bp, Arabidopsis thaliana
accactgggttttttta

SEQ ID NO: 19830 - DNA, 17 bp, Arabidopsis thaliana
accactgtctgatgatc

SEQ ID NO: 19831 - DNA, 17 bp, Arabidopsis thaliana
accacttaagaacgcaa

SEQ ID NO: 19832 - DNA, 17 bp, Arabidopsis thaliana
accacttcagaacgcaa

SEQ ID NO: 19833 - DNA, 17 bp, Arabidopsis thaliana
accacttctacctatcg

SEQ ID NO: 19834 - DNA, 17 bp, Arabidopsis thaliana
accacttctattcactg

SEQ ID NO: 19835 - DNA, 17 bp, Arabidopsis thaliana
accacttctcagctagc

SEQ ID NO: 19836 - DNA, 17 bp, Arabidopsis thaliana
accacttgatcttcgcg

SEQ ID NO: 19837 - DNA, 17 bp, Arabidopsis thaliana
accacttgctttttgga

SEQ ID NO: 19838 - DNA, 17 bp, Arabidopsis thaliana
accacttgtggctactt

SEQ ID NO: 19839 - DNA, 17 bp, Arabidopsis thaliana
accactttacttcttgg

SEQ ID NO: 19840 - DNA, 17 bp, Arabidopsis thaliana
accactttgctgaagat

SEQ ID NO: 19841 - DNA, 17 bp, Arabidopsis thaliana
accactttgtcaggatc

SEQ ID NO: 19842 - DNA, 17 bp, Arabidopsis thaliana
accacttttgccgatgg

SEQ ID NO: 19843 - DNA, 17 bp, Arabidopsis thaliana
accacttttggcaaact

SEQ ID NO: 19844 - DNA, 17 bp, Arabidopsis thaliana
accagaaaatcggttag

SEQ ID NO: 19845 - DNA, 17 bp, Arabidopsis thaliana
accagaaagtctaggtg

SEQ ID NO: 19846 - DNA, 17 bp, Arabidopsis thaliana
accagaaattacagatg

SEQ ID NO: 19847 - DNA, 17 bp, Arabidopsis thaliana
accagaacatcccaatt

SEQ ID NO: 19848 - DNA, 17 bp, Arabidopsis thaliana
accagaacctgtcggat

SEQ ID NO: 19849 - DNA, 17 bp, Arabidopsis thaliana
accagaactcggcccac

SEQ ID NO: 19850 - DNA, 17 bp, Arabidopsis thaliana
accagaagattctgggc

SEQ ID NO: 19851 - DNA, 17 bp, Arabidopsis thaliana
accagaaggagtgctga

SEQ ID NO: 19852 - DNA, 17 bp, Arabidopsis thaliana
accagaaggagtgctgg

SEQ ID NO: 19853 - DNA, 17 bp, Arabidopsis thaliana
accagaaggttctgggc

SEQ ID NO: 19854 - DNA, 17 bp, Arabidopsis thaliana
accagaagtgtgaattc

SEQ ID NO: 19855 - DNA, 17 bp, Arabidopsis thaliana
accagaatggtgattag

SEQ ID NO: 19856 - DNA, 17 bp, Arabidopsis thaliana
accagaatttctctcca

SEQ ID NO: 19857 - DNA, 17 bp, Arabidopsis thaliana
accagacagtggcggat

SEQ ID NO: 19858 - DNA, 17 bp, Arabidopsis thaliana
accagacgggttggcgg

SEQ ID NO: 19859 - DNA, 17 bp, Arabidopsis thaliana
accagacttgccctcca

SEQ ID NO: 19860 - DNA, 17 bp, Arabidopsis thaliana
accagagacagaaaacc

SEQ ID NO: 19861 - DNA, 17 bp, Arabidopsis thaliana
accagagcctccatctc

SEQ ID NO: 19862 - DNA, 17 bp, Arabidopsis thaliana
accagagccttccgccc

SEQ ID NO: 19863 - DNA, 17 bp, Arabidopsis thaliana
accagaggaattgttga

SEQ ID NO: 19864 - DNA, 17 bp, Arabidopsis thaliana
accagagggtagtcagg

SEQ ID NO: 19865 - DNA, 17 bp, Arabidopsis thaliana
accagagtgtcaagccc

SEQ ID NO: 19866 - DNA, 17 bp, Arabidopsis thaliana
accagataccgtcttga

SEQ ID NO: 19867 - DNA, 17 bp, Arabidopsis thaliana
accagatacggtgttcg

SEQ ID NO: 19868 - DNA, 17 bp, Arabidopsis thaliana
accagatcagccgatag

SEQ ID NO: 19869 - DNA, 17 bp, Arabidopsis thaliana
accagatcagtcgatag

SEQ ID NO: 19870 - DNA, 17 bp, Arabidopsis thaliana
accagatggatgttcac

SEQ ID NO: 19871 - DNA, 17 bp, Arabidopsis thaliana
accagatgtgattgttg

SEQ ID NO: 19872 - DNA, 17 bp, Arabidopsis thaliana
accagattaccgaacat

SEQ ID NO: 19873 - DNA, 17 bp, Arabidopsis thaliana
accagattcagattcat

SEQ ID NO: 19874 - DNA, 17 bp, Arabidopsis thaliana
accagattcggtgttcg

SEQ ID NO: 19875 - DNA, 17 bp, Arabidopsis thaliana
accagattggacacgca

SEQ ID NO: 19876 - DNA, 17 bp, Arabidopsis thaliana
accagcaaatacagctg

SEQ ID NO: 19877 - DNA, 17 bp, Arabidopsis thaliana
accagcaattgtgaaag

SEQ ID NO: 19878 - DNA, 17 bp, Arabidopsis thaliana
accagcactaatgcacc

SEQ ID NO: 19879 - DNA, 17 bp, Arabidopsis thaliana
accagcactagtgcacc

SEQ ID NO: 19880 - DNA, 17 bp, Arabidopsis thaliana
accagccgtggctaaac

SEQ ID NO: 19881 - DNA, 17 bp, Arabidopsis thaliana
accagcgacagcaacca

SEQ ID NO: 19882 - DNA, 17 bp, Arabidopsis thaliana
accagcgaccagcgaca

SEQ ID NO: 19883 - DNA, 17 bp, Arabidopsis thaliana
accagcgagtgcgatag

SEQ ID NO: 19884 - DNA, 17 bp, Arabidopsis thaliana
accagcgatcagcgaca

SEQ ID NO: 19885 - DNA, 17 bp, Arabidopsis thaliana
accagcgccgccaccac

SEQ ID NO: 19886 - DNA, 17 bp, Arabidopsis thaliana
accagcgggaattgtaa

SEQ ID NO: 19887 - DNA, 17 bp, Arabidopsis thaliana
accagcggtttccatat

SEQ ID NO: 19888 - DNA, 17 bp, Arabidopsis thaliana
accagctgggaaaattt

SEQ ID NO: 19889 - DNA, 17 bp, Arabidopsis thaliana
accaggaacttctgggc

SEQ ID NO: 19890 - DNA, 17 bp, Arabidopsis thaliana
accaggaaggtgtggct

SEQ ID NO: 19891 - DNA, 17 bp, Arabidopsis thaliana
accaggaagttctgggc

SEQ ID NO: 19892 - DNA, 17 bp, Arabidopsis thaliana
accaggaatgccactat

SEQ ID NO: 19893 - DNA, 17 bp, Arabidopsis thaliana
accaggaccacttgatc

SEQ ID NO: 19894 - DNA, 17 bp, Arabidopsis thaliana
accaggacgcatcgccg

SEQ ID NO: 19895 - DNA, 17 bp, Arabidopsis thaliana
accaggagagatgattg

SEQ ID NO: 19896 - DNA, 17 bp, Arabidopsis thaliana
accaggagattctggat

SEQ ID NO: 19897 - DNA, 17 bp, Arabidopsis thaliana
accaggagctaaagacc

SEQ ID NO: 19898 - DNA, 17 bp, Arabidopsis thaliana
accaggaggttcggggc

SEQ ID NO: 19899 - DNA, 17 bp, Arabidopsis thaliana
accaggaggttctacgc

SEQ ID NO: 19900 - DNA, 17 bp, Arabidopsis thaliana
accaggaggttctgggc

SEQ ID NO: 19901 - DNA, 17 bp, Arabidopsis thaliana
accaggaggttttggac

SEQ ID NO: 19902 - DNA, 17 bp, Arabidopsis thaliana
accaggagtagagcctg

SEQ ID NO: 19903 - DNA, 17 bp, Arabidopsis thaliana
accaggagtagtcagac

SEQ ID NO: 19904 - DNA, 17 bp, Arabidopsis thaliana
accaggagtgaagcctg

SEQ ID NO: 19905 - DNA, 17 bp, Arabidopsis thaliana
accaggagtggaccctc

SEQ ID NO: 19906 - DNA, 17 bp, Arabidopsis thaliana
accaggagtggagcctg

SEQ ID NO: 19907 - DNA, 17 bp, Arabidopsis thaliana
accaggagttggcttaa

SEQ ID NO: 19908 - DNA, 17 bp, Arabidopsis thaliana
accaggatccccacgga

SEQ ID NO: 19909 - DNA, 17 bp, Arabidopsis thaliana
accaggattcgatagtc

SEQ ID NO: 19910 - DNA, 17 bp, Arabidopsis thaliana
accaggatttgtggttg

SEQ ID NO: 19911 - DNA, 17 bp, Arabidopsis thaliana
accaggcccgggcgact

SEQ ID NO: 19912 - DNA, 17 bp, Arabidopsis thaliana
accaggcggcacaggca

SEQ ID NO: 19913 - DNA, 17 bp, Arabidopsis thaliana
accaggctctaggtgac

SEQ ID NO: 19914 - DNA, 17 bp, Arabidopsis thaliana
accagggaccagcccac

SEQ ID NO: 19915 - DNA, 17 bp, Arabidopsis thaliana
accagggagtgggcggt

SEQ ID NO: 19916 - DNA, 17 bp, Arabidopsis thaliana
accagggatcagcggat

SEQ ID NO: 19917 - DNA, 17 bp, Arabidopsis thaliana
accagggcacgtctgcc

SEQ ID NO: 19918 - DNA, 17 bp, Arabidopsis thaliana
accagggcttgacatgc

SEQ ID NO: 19919 - DNA, 17 bp, Arabidopsis thaliana
accaggggaattacggg

SEQ ID NO: 19920 - DNA, 17 bp, Arabidopsis thaliana
accaggggttgaaatcg

SEQ ID NO: 19921 - DNA, 17 bp, Arabidopsis thaliana
accagggttcgattccc

SEQ ID NO: 19922 - DNA, 17 bp, Arabidopsis thaliana
accagggttcgtttccc

SEQ ID NO: 19923 - DNA, 17 bp, Arabidopsis thaliana
accaggtaaaccaatgg

SEQ ID NO: 19924 - DNA, 17 bp, Arabidopsis thaliana
accaggtccaaaaccac

SEQ ID NO: 19925 - DNA, 17 bp, Arabidopsis thaliana
accaggtccagacatag

SEQ ID NO: 19926 - DNA, 17 bp, Arabidopsis thaliana
accaggtccataacaac

SEQ ID NO: 19927 - DNA, 17 bp, Arabidopsis thaliana
accaggtccgagacttc

SEQ ID NO: 19928 - DNA, 17 bp, Arabidopsis thaliana
accaggtgaaagtctct

SEQ ID NO: 19929 - DNA, 17 bp, Arabidopsis thaliana
accaggtggatgagctt

SEQ ID NO: 19930 - DNA, 17 bp, Arabidopsis thaliana
accaggtggcctcttag

SEQ ID NO: 19931 - DNA, 17 bp, Arabidopsis thaliana
accaggtggtcgagtga

SEQ ID NO: 19932 - DNA, 17 bp, Arabidopsis thaliana
accaggtgttagaaggt

SEQ ID NO: 19933 - DNA, 17 bp, Arabidopsis thaliana
accaggttctggccgaa

SEQ ID NO: 19934 - DNA, 17 bp, Arabidopsis thaliana
accaggttggaccatgg

SEQ ID NO: 19935 - DNA, 17 bp, Arabidopsis thaliana
accagtaatccacgcaa

SEQ ID NO: 19936 - DNA, 17 bp, Arabidopsis thaliana
accagtacaagctctgt

SEQ ID NO: 19937 - DNA, 17 bp, Arabidopsis thaliana
accagtagcgttctatt

SEQ ID NO: 19938 - DNA, 17 bp, Arabidopsis thaliana
accagtaggttctgggc

SEQ ID NO: 19939 - DNA, 17 bp, Arabidopsis thaliana
accagtagttttgagcc

SEQ ID NO: 19940 - DNA, 17 bp, Arabidopsis thaliana
accagtatcatctaacg

SEQ ID NO: 19941 - DNA, 17 bp, Arabidopsis thaliana
accagtatcatctgacg

SEQ ID NO: 19942 - DNA, 17 bp, Arabidopsis thaliana
accagtatggtacttta

SEQ ID NO: 19943 - DNA, 17 bp, Arabidopsis thaliana
accagtccaccggtcca

SEQ ID NO: 19944 - DNA, 17 bp, Arabidopsis thaliana
accagtcgtatgcctat

SEQ ID NO: 19945 - DNA, 17 bp, Arabidopsis thaliana
accagtgactgtagccg

SEQ ID NO: 19946 - DNA, 17 bp, Arabidopsis thaliana
accagtgacttcagatt

SEQ ID NO: 19947 - DNA, 17 bp, Arabidopsis thaliana
accagtgatcagcggat

SEQ ID NO: 19948 - DNA, 17 bp, Arabidopsis thaliana
accagtgcgatcaccag

SEQ ID NO: 19949 - DNA, 17 bp, Arabidopsis thaliana
accagtgcgattgccaa

SEQ ID NO: 19950 - DNA, 17 bp, Arabidopsis thaliana
accagtggagatggcct

SEQ ID NO: 19951 - DNA, 17 bp, Arabidopsis thaliana
accagtgggttgccttc

SEQ ID NO: 19952 - DNA, 17 bp, Arabidopsis thaliana
accagtggtaaatttcc

SEQ ID NO: 19953 - DNA, 17 bp, Arabidopsis thaliana
accagtggtgttccgcg

SEQ ID NO: 19954 - DNA, 17 bp, Arabidopsis thaliana
accagtgttccgacggt

SEQ ID NO: 19955 - DNA, 17 bp, Arabidopsis thaliana
accagttaccacgcagt

SEQ ID NO: 19956 - DNA, 17 bp, Arabidopsis thaliana
accagttagactgtcag

SEQ ID NO: 19957 - DNA, 17 bp, Arabidopsis thaliana
accagttccaggggacc

SEQ ID NO: 19958 - DNA, 17 bp, Arabidopsis thaliana
accagttcccagactct

SEQ ID NO: 19959 - DNA, 17 bp, Arabidopsis thaliana
accagttctcagactct

SEQ ID NO: 19960 - DNA, 17 bp, Arabidopsis thaliana
accagttctggcggatt

SEQ ID NO: 19961 - DNA, 17 bp, Arabidopsis thaliana
accagttgaaccggtcg

SEQ ID NO: 19962 - DNA, 17 bp, Arabidopsis thaliana
accagttgagctaacga

SEQ ID NO: 19963 - DNA, 17 bp, Arabidopsis thaliana
accagttgatctaacga

SEQ ID NO: 19964 - DNA, 17 bp, Arabidopsis thaliana
accagttgcggcccaga

SEQ ID NO: 19965 - DNA, 17 bp, Arabidopsis thaliana
accagttgcggcccagt

SEQ ID NO: 19966 - DNA, 17 bp, Arabidopsis thaliana
accagttgcggctcagt

SEQ ID NO: 19967 - DNA, 17 bp, Arabidopsis thaliana
accagttggctattagc

SEQ ID NO: 19968 - DNA, 17 bp, Arabidopsis thaliana
accagttggctattggc

SEQ ID NO: 19969 - DNA, 17 bp, Arabidopsis thaliana
accagttgtggcccagc

SEQ ID NO: 19970 - DNA, 17 bp, Arabidopsis thaliana
accagtttctgaaccgg

SEQ ID NO: 19971 - DNA, 17 bp, Arabidopsis thaliana
accagtttgttctccat

SEQ ID NO: 19972 - DNA, 17 bp, Arabidopsis thaliana
accagttttggagtaat

SEQ ID NO: 19973 - DNA, 17 bp, Arabidopsis thaliana
accagttttggcccagg

SEQ ID NO: 19974 - DNA, 17 bp, Arabidopsis thaliana
accagttttgtccacgg

SEQ ID NO: 19975 - DNA, 17 bp, Arabidopsis thaliana
accagttttgtggcagg

SEQ ID NO: 19976 - DNA, 17 bp, Arabidopsis thaliana
accagttttgtggctgg

SEQ ID NO: 19977 - DNA, 17 bp, Arabidopsis thaliana
accataatccgaaagat

SEQ ID NO: 19978 - DNA, 17 bp, Arabidopsis thaliana
accataattcgaaagat

SEQ ID NO: 19979 - DNA, 17 bp, Arabidopsis thaliana
accatagagatccgtcg

SEQ ID NO: 19980 - DNA, 17 bp, Arabidopsis thaliana
accatagcggcatagcc

SEQ ID NO: 19981 - DNA, 17 bp, Arabidopsis thaliana
accataggtgcgatgat

SEQ ID NO: 19982 - DNA, 17 bp, Arabidopsis thaliana
accatcaggagtggagc

SEQ ID NO: 19983 - DNA, 17 bp, Arabidopsis thaliana
accatcatcgtctccgg

SEQ ID NO: 19984 - DNA, 17 bp, Arabidopsis thaliana
accatcatcttgagaga

SEQ ID NO: 19985 - DNA, 17 bp, Arabidopsis thaliana
accatcatgccgctatc

SEQ ID NO: 19986 - DNA, 17 bp, Arabidopsis thaliana
accatccagcaaaatcc

SEQ ID NO: 19987 - DNA, 17 bp, Arabidopsis thaliana
accatccgaaaagatgt

SEQ ID NO: 19988 - DNA, 17 bp, Arabidopsis thaliana
accatccgccggtttgt

SEQ ID NO: 19989 - DNA, 17 bp, Arabidopsis thaliana
accatcggctggcggac

SEQ ID NO: 19990 - DNA, 17 bp, Arabidopsis thaliana
accatcgggaaccggac

SEQ ID NO: 19991 - DNA, 17 bp, Arabidopsis thaliana
accatcgggctactcag

SEQ ID NO: 19992 - DNA, 17 bp, Arabidopsis thaliana
accatcggttaagatta

SEQ ID NO: 19993 - DNA, 17 bp, Arabidopsis thaliana
accatctaagtcagagt

SEQ ID NO: 19994 - DNA, 17 bp, Arabidopsis thaliana
accatctccattggtag

SEQ ID NO: 19995 - DNA, 17 bp, Arabidopsis thaliana
accatctgactgagcaa

SEQ ID NO: 19996 - DNA, 17 bp, Arabidopsis thaliana
accatctgattgagcaa

SEQ ID NO: 19997 - DNA, 17 bp, Arabidopsis thaliana
accatctggaccgagag

SEQ ID NO: 19998 - DNA, 17 bp, Arabidopsis thaliana
accatctggttaggatt

SEQ ID NO: 19999 - DNA, 17 bp, Arabidopsis thaliana
accatgaccttgcttgt

SEQ ID NO: 20000 - DNA, 17 bp, Arabidopsis thaliana
accatgagctctgatac

SEQ ID NO: 20001 - DNA, 17 bp, Arabidopsis thaliana
accatgatatccgtcga

SEQ ID NO: 20002 - DNA, 17 bp, Arabidopsis thaliana
accatgattgtgcctct

SEQ ID NO: 20003 - DNA, 17 bp, Arabidopsis thaliana
accatggaccggacggg

SEQ ID NO: 20004 - DNA, 17 bp, Arabidopsis thaliana
accatggagacgcagga

SEQ ID NO: 20005 - DNA, 17 bp, Arabidopsis thaliana
accatggattttgaatc

SEQ ID NO: 20006 - DNA, 17 bp, Arabidopsis thaliana
accatggcctgctggct

SEQ ID NO: 20007 - DNA, 17 bp, Arabidopsis thaliana
accatgggctaagccca

SEQ ID NO: 20008 - DNA, 17 bp, Arabidopsis thaliana
accatgggcttgccata

SEQ ID NO: 20009 - DNA, 17 bp, Arabidopsis thaliana
accatggtgtgctgata

SEQ ID NO: 20010 - DNA, 17 bp, Arabidopsis thaliana
accatgtccagatgggt

SEQ ID NO: 20011 - DNA, 17 bp, Arabidopsis thaliana
accatgtccatatggga

SEQ ID NO: 20012 - DNA, 17 bp, Arabidopsis thaliana
accatgtccctattttg

SEQ ID NO: 20013 - DNA, 17 bp, Arabidopsis thaliana
accatgtgactgtaagc

SEQ ID NO: 20014 - DNA, 17 bp, Arabidopsis thaliana
accatgtgagagactat

SEQ ID NO: 20015 - DNA, 17 bp, Arabidopsis thaliana
accatgtgattttcaac

SEQ ID NO: 20016 - DNA, 17 bp, Arabidopsis thaliana
accatgtggcttggatc

SEQ ID NO: 20017 - DNA, 17 bp, Arabidopsis thaliana
accatgtgttccacaat

SEQ ID NO: 20018 - DNA, 17 bp, Arabidopsis thaliana
accattaactctgactc

SEQ ID NO: 20019 - DNA, 17 bp, Arabidopsis thaliana
accattactcctggtca

SEQ ID NO: 20020 - DNA, 17 bp, Arabidopsis thaliana
accattactggccagtt

SEQ ID NO: 20021 - DNA, 17 bp, Arabidopsis thaliana
accattagaccaagaga

SEQ ID NO: 20022 - DNA, 17 bp, Arabidopsis thaliana
accattagaccaagagg

SEQ ID NO: 20023 - DNA, 17 bp, Arabidopsis thaliana
accattatagccgtttg

SEQ ID NO: 20024 - DNA, 17 bp, Arabidopsis thaliana
accattatcgctatcgt

SEQ ID NO: 20025 - DNA, 17 bp, Arabidopsis thaliana
accattatgtggaggct

SEQ ID NO: 20026 - DNA, 17 bp, Arabidopsis thaliana
accattatttatgcgat

SEQ ID NO: 20027 - DNA, 17 bp, Arabidopsis thaliana
accattcaaagccttag

SEQ ID NO: 20028 - DNA, 17 bp, Arabidopsis thaliana
accattcattatttttc

SEQ ID NO: 20029 - DNA, 17 bp, Arabidopsis thaliana
accattctgtgaatgtc

SEQ ID NO: 20030 - DNA, 17 bp, Arabidopsis thaliana
accattcttctgtgcac

SEQ ID NO: 20031 - DNA, 17 bp, Arabidopsis thaliana
accattgaagtgaggaa

SEQ ID NO: 20032 - DNA, 17 bp, Arabidopsis thaliana
accattgacgagagcta

SEQ ID NO: 20033 - DNA, 17 bp, Arabidopsis thaliana
accattgatgtgccttc

SEQ ID NO: 20034 - DNA, 17 bp, Arabidopsis thaliana
accattgcgatggtccc

SEQ ID NO: 20035 - DNA, 17 bp, Arabidopsis thaliana
accattgctactgctct

SEQ ID NO: 20036 - DNA, 17 bp, Arabidopsis thaliana
accattgctgctgctct

SEQ ID NO: 20037 - DNA, 17 bp, Arabidopsis thaliana
accattgctgtggactt

SEQ ID NO: 20038 - DNA, 17 bp, Arabidopsis thaliana
accattggaaagggctt

SEQ ID NO: 20039 - DNA, 17 bp, Arabidopsis thaliana
accattggacatgctct

SEQ ID NO: 20040 - DNA, 17 bp, Arabidopsis thaliana
accattggaccaacaga

SEQ ID NO: 20041 - DNA, 17 bp, Arabidopsis thaliana
accattggaccaacagc

SEQ ID NO: 20042 - DNA, 17 bp, Arabidopsis thaliana
accattggaccaagggg

SEQ ID NO: 20043 - DNA, 17 bp, Arabidopsis thaliana
accattggacttggcaa

SEQ ID NO: 20044 - DNA, 17 bp, Arabidopsis thaliana
accattggagatgatct

SEQ ID NO: 20045 - DNA, 17 bp, Arabidopsis thaliana
accattgtccatggacc

SEQ ID NO: 20046 - DNA, 17 bp, Arabidopsis thaliana
accattgtccatgtctc

SEQ ID NO: 20047 - DNA, 17 bp, Arabidopsis thaliana
accattgtgactaactt

SEQ ID NO: 20048 - DNA, 17 bp, Arabidopsis thaliana
accatttcccgaaggat

SEQ ID NO: 20049 - DNA, 17 bp, Arabidopsis thaliana
accatttctgcagcttg

SEQ ID NO: 20050 - DNA, 17 bp, Arabidopsis thaliana
accatttgaccttttga

SEQ ID NO: 20051 - DNA, 17 bp, Arabidopsis thaliana
accatttgtcccagttc

SEQ ID NO: 20052 - DNA, 17 bp, Arabidopsis thaliana
acccaaaacattttgag

SEQ ID NO: 20053 - DNA, 17 bp, Arabidopsis thaliana
acccaaaaccgcactgc

SEQ ID NO: 20054 - DNA, 17 bp, Arabidopsis thaliana
acccaaaaccgtaccgt

SEQ ID NO: 20055 - DNA, 17 bp, Arabidopsis thaliana
acccaaaactccttcgg

SEQ ID NO: 20056 - DNA, 17 bp, Arabidopsis thaliana
acccaaaagggaaattt

SEQ ID NO: 20057 - DNA, 17 bp, Arabidopsis thaliana
acccaaacccaactgga

SEQ ID NO: 20058 - DNA, 17 bp, Arabidopsis thaliana
acccaaacccgtccgac

SEQ ID NO: 20059 - DNA, 17 bp, Arabidopsis thaliana
acccaaacgtccaggac

SEQ ID NO: 20060 - DNA, 17 bp, Arabidopsis thaliana
acccaaacttccttgtg

SEQ ID NO: 20061 - DNA, 17 bp, Arabidopsis thaliana
acccaaatcggcggcct

SEQ ID NO: 20062 - DNA, 17 bp, Arabidopsis thaliana
acccaaatcggcggcgt

SEQ ID NO: 20063 - DNA, 17 bp, Arabidopsis thaliana
acccaaatgcccaggac

SEQ ID NO: 20064 - DNA, 17 bp, Arabidopsis thaliana
acccaaatggagagagt

SEQ ID NO: 20065 - DNA, 17 bp, Arabidopsis thaliana
acccaacacgggcaaac

SEQ ID NO: 20066 - DNA, 17 bp, Arabidopsis thaliana
acccaacccgatacccg

SEQ ID NO: 20067 - DNA, 17 bp, Arabidopsis thaliana
acccaaccgctcagata

SEQ ID NO: 20068 - DNA, 17 bp, Arabidopsis thaliana
acccaaccggcactcca

SEQ ID NO: 20069 - DNA, 17 bp, Arabidopsis thaliana
acccaacctaatcctgc

SEQ ID NO: 20070 - DNA, 17 bp, Arabidopsis thaliana
acccaacgggttcgtgg

SEQ ID NO: 20071 - DNA, 17 bp, Arabidopsis thaliana
acccaactggatttgac

SEQ ID NO: 20072 - DNA, 17 bp, Arabidopsis thaliana
acccaagaccaacatgg

SEQ ID NO: 20073 - DNA, 17 bp, Arabidopsis thaliana
acccaagataggatgat

SEQ ID NO: 20074 - DNA, 17 bp, Arabidopsis thaliana
acccaagcttataagtc

SEQ ID NO: 20075 - DNA, 17 bp, Arabidopsis thaliana
acccaagctttcaaagt

SEQ ID NO: 20076 - DNA, 17 bp, Arabidopsis thaliana
acccaaggatgacctgc

SEQ ID NO: 20077 - DNA, 17 bp, Arabidopsis thaliana
acccaaggcgagatagg

SEQ ID NO: 20078 - DNA, 17 bp, Arabidopsis thaliana
acccaagggttcctccg

SEQ ID NO: 20079 - DNA, 17 bp, Arabidopsis thaliana
acccaagtgcgccgagt

SEQ ID NO: 20080 - DNA, 17 bp, Arabidopsis thaliana
acccaataacaaatcct

SEQ ID NO: 20081 - DNA, 17 bp, Arabidopsis thaliana
acccaataacaaatgac

SEQ ID NO: 20082 - DNA, 17 bp, Arabidopsis thaliana
acccaatcctgacacac

SEQ ID NO: 20083 - DNA, 17 bp, Arabidopsis thaliana
acccaatcctgacacgg

SEQ ID NO: 20084 - DNA, 17 bp, Arabidopsis thaliana
acccacaaagggtgttg

SEQ ID NO: 20085 - DNA, 17 bp, Arabidopsis thaliana
acccacacccggccggt

SEQ ID NO: 20086 - DNA, 17 bp, Arabidopsis thaliana
acccacagaatcgccct

SEQ ID NO: 20087 - DNA, 17 bp, Arabidopsis thaliana
acccacagagaaagaat

SEQ ID NO: 20088 - DNA, 17 bp, Arabidopsis thaliana
acccacagaggattccg

SEQ ID NO: 20089 - DNA, 17 bp, Arabidopsis thaliana
acccacaggtattagat

SEQ ID NO: 20090 - DNA, 17 bp, Arabidopsis thaliana
acccacagtataccgcg

SEQ ID NO: 20091 - DNA, 17 bp, Arabidopsis thaliana
acccacagtgggcgaat

SEQ ID NO: 20092 - DNA, 17 bp, Arabidopsis thaliana
acccaccaaaagttgtt

SEQ ID NO: 20093 - DNA, 17 bp, Arabidopsis thaliana
acccaccaacaaacgcc

SEQ ID NO: 20094 - DNA, 17 bp, Arabidopsis thaliana
acccaccacaagttagc

SEQ ID NO: 20095 - DNA, 17 bp, Arabidopsis thaliana
acccaccacttttgccg

SEQ ID NO: 20096 - DNA, 17 bp, Arabidopsis thaliana
acccaccagatcagccg

SEQ ID NO: 20097 - DNA, 17 bp, Arabidopsis thaliana
acccaccaggagattct

SEQ ID NO: 20098 - DNA, 17 bp, Arabidopsis thaliana
acccaccaggaggtttt

SEQ ID NO: 20099 - DNA, 17 bp, Arabidopsis thaliana
acccaccaggagtggag

SEQ ID NO: 20100 - DNA, 17 bp, Arabidopsis thaliana
acccaccaggagttggc

SEQ ID NO: 20101 - DNA, 17 bp, Arabidopsis thaliana
acccaccaggattcgat

SEQ ID NO: 20102 - DNA, 17 bp, Arabidopsis thaliana
acccaccaggtccaaaa

SEQ ID NO: 20103 - DNA, 17 bp, Arabidopsis thaliana
acccaccagtaccaact

SEQ ID NO: 20104 - DNA, 17 bp, Arabidopsis thaliana
acccaccagtaccaatt

SEQ ID NO: 20105 - DNA, 17 bp, Arabidopsis thaliana
acccacccacacccggc

SEQ ID NO: 20106 - DNA, 17 bp, Arabidopsis thaliana
acccacccaccgggacg

SEQ ID NO: 20107 - DNA, 17 bp, Arabidopsis thaliana
acccacccaccttggga

SEQ ID NO: 20108 - DNA, 17 bp, Arabidopsis thaliana
acccacccactagttac

SEQ ID NO: 20109 - DNA, 17 bp, Arabidopsis thaliana
acccacccactctatgg

SEQ ID NO: 20110 - DNA, 17 bp, Arabidopsis thaliana
acccacccagtggtctg

SEQ ID NO: 20111 - DNA, 17 bp, Arabidopsis thaliana
acccacccattcctgac

SEQ ID NO: 20112 - DNA, 17 bp, Arabidopsis thaliana
acccacccgaaagaacc

SEQ ID NO: 20113 - DNA, 17 bp, Arabidopsis thaliana
acccacccgaacccgaa

SEQ ID NO: 20114 - DNA, 17 bp, Arabidopsis thaliana
acccacccgatgattgg

SEQ ID NO: 20115 - DNA, 17 bp, Arabidopsis thaliana
acccacccgccgtgccg

SEQ ID NO: 20116 - DNA, 17 bp, Arabidopsis thaliana
acccacccgctttctcc

SEQ ID NO: 20117 - DNA, 17 bp, Arabidopsis thaliana
acccacccgggttcggc

SEQ ID NO: 20118 - DNA, 17 bp, Arabidopsis thaliana
acccacccgggttcggg

SEQ ID NO: 20119 - DNA, 17 bp, Arabidopsis thaliana
acccacccgggttcgtt

SEQ ID NO: 20120 - DNA, 17 bp, Arabidopsis thaliana
acccacccgtcgagcag

SEQ ID NO: 20121 - DNA, 17 bp, Arabidopsis thaliana
acccacccgtgcagtgc

SEQ ID NO: 20122 - DNA, 17 bp, Arabidopsis thaliana
acccaccctgccgcacc

SEQ ID NO: 20123 - DNA, 17 bp, Arabidopsis thaliana
acccaccctgctttatt

SEQ ID NO: 20124 - DNA, 17 bp, Arabidopsis thaliana
acccaccctgttgagct

SEQ ID NO: 20125 - DNA, 17 bp, Arabidopsis thaliana
acccaccgaatctaata

SEQ ID NO: 20126 - DNA, 17 bp, Arabidopsis thaliana
acccaccgagactcacc

SEQ ID NO: 20127 - DNA, 17 bp, Arabidopsis thaliana
acccaccgagatctttg

SEQ ID NO: 20128 - DNA, 17 bp, Arabidopsis thaliana
acccaccgatgaactct

SEQ ID NO: 20129 - DNA, 17 bp, Arabidopsis thaliana
acccaccgcttaggggt

SEQ ID NO: 20130 - DNA, 17 bp, Arabidopsis thaliana
acccaccgctttatgtt

SEQ ID NO: 20131 - DNA, 17 bp, Arabidopsis thaliana
acccaccggatcagtcg

SEQ ID NO: 20132 - DNA, 17 bp, Arabidopsis thaliana
acccaccgggtcctgat

SEQ ID NO: 20133 - DNA, 17 bp, Arabidopsis thaliana
acccaccgtaaacctgt

SEQ ID NO: 20134 - DNA, 17 bp, Arabidopsis thaliana
acccaccgtgaattttt

SEQ ID NO: 20135 - DNA, 17 bp, Arabidopsis thaliana
acccaccgtgcgctgga

SEQ ID NO: 20136 - DNA, 17 bp, Arabidopsis thaliana
acccaccgttttccggc

SEQ ID NO: 20137 - DNA, 17 bp, Arabidopsis thaliana
acccacctaagcggaaa

SEQ ID NO: 20138 - DNA, 17 bp, Arabidopsis thaliana
acccacctattatcaat

SEQ ID NO: 20139 - DNA, 17 bp, Arabidopsis thaliana
acccacctcaactttac

SEQ ID NO: 20140 - DNA, 17 bp, Arabidopsis thaliana
acccacctcagcctgct

SEQ ID NO: 20141 - DNA, 17 bp, Arabidopsis thaliana
acccacctcgtatttgt

SEQ ID NO: 20142 - DNA, 17 bp, Arabidopsis thaliana
acccacctgaggaattt

SEQ ID NO: 20143 - DNA, 17 bp, Arabidopsis thaliana
acccacctgcttctgga

SEQ ID NO: 20144 - DNA, 17 bp, Arabidopsis thaliana
acccacctggagctgat

SEQ ID NO: 20145 - DNA, 17 bp, Arabidopsis thaliana
acccacctgttgcagtg

SEQ ID NO: 20146 - DNA, 17 bp, Arabidopsis thaliana
acccaccttcaactttg

SEQ ID NO: 20147 - DNA, 17 bp, Arabidopsis thaliana
acccaccttgggatgga

SEQ ID NO: 20148 - DNA, 17 bp, Arabidopsis thaliana
acccaccttgggatggg

SEQ ID NO: 20149 - DNA, 17 bp, Arabidopsis thaliana
acccaccttgtgtcagg

SEQ ID NO: 20150 - DNA, 17 bp, Arabidopsis thaliana
acccacctttcaaatct

SEQ ID NO: 20151 - DNA, 17 bp, Arabidopsis thaliana
acccacgacccgtgtgg

SEQ ID NO: 20152 - DNA, 17 bp, Arabidopsis thaliana
acccacgagtagtctcg

SEQ ID NO: 20153 - DNA, 17 bp, Arabidopsis thaliana
acccacgatttagattt

SEQ ID NO: 20154 - DNA, 17 bp, Arabidopsis thaliana
acccacgggtagtctca

SEQ ID NO: 20155 - DNA, 17 bp, Arabidopsis thaliana
acccacgggtagtctcg

SEQ ID NO: 20156 - DNA, 17 bp, Arabidopsis thaliana
acccacgggtattagat

SEQ ID NO: 20157 - DNA, 17 bp, Arabidopsis thaliana
acccacgggttttttta

SEQ ID NO: 20158 - DNA, 17 bp, Arabidopsis thaliana
acccacggtatactgcg

SEQ ID NO: 20159 - DNA, 17 bp, Arabidopsis thaliana
acccacggtgccactcc

SEQ ID NO: 20160 - DNA, 17 bp, Arabidopsis thaliana
acccacggtgtgccgca

SEQ ID NO: 20161 - DNA, 17 bp, Arabidopsis thaliana
acccacggttgggctgt

SEQ ID NO: 20162 - DNA, 17 bp, Arabidopsis thaliana
acccacgtcatttgtta

SEQ ID NO: 20163 - DNA, 17 bp, Arabidopsis thaliana
acccacgtctgcctggg

SEQ ID NO: 20164 - DNA, 17 bp, Arabidopsis thaliana
acccactagttactcga

SEQ ID NO: 20165 - DNA, 17 bp, Arabidopsis thaliana
acccactcctgacacgg

SEQ ID NO: 20166 - DNA, 17 bp, Arabidopsis thaliana
acccactctatgggatt

SEQ ID NO: 20167 - DNA, 17 bp, Arabidopsis thaliana
acccactctcgggtgca

SEQ ID NO: 20168 - DNA, 17 bp, Arabidopsis thaliana
acccactgctctatctg

SEQ ID NO: 20169 - DNA, 17 bp, Arabidopsis thaliana
acccagacccgggttcg

SEQ ID NO: 20170 - DNA, 17 bp, Arabidopsis thaliana
acccagacctgatcttc

SEQ ID NO: 20171 - DNA, 17 bp, Arabidopsis thaliana
acccagacgagttcagt

SEQ ID NO: 20172 - DNA, 17 bp, Arabidopsis thaliana
acccagagaccttcgcc

SEQ ID NO: 20173 - DNA, 17 bp, Arabidopsis thaliana
acccagcactaggacca

SEQ ID NO: 20174 - DNA, 17 bp, Arabidopsis thaliana
acccagcagtggtttgt

SEQ ID NO: 20175 - DNA, 17 bp, Arabidopsis thaliana
acccagcccactttgcc

SEQ ID NO: 20176 - DNA, 17 bp, Arabidopsis thaliana
acccagcgtgcttctac

SEQ ID NO: 20177 - DNA, 17 bp, Arabidopsis thaliana
acccaggagacccgggt

SEQ ID NO: 20178 - DNA, 17 bp, Arabidopsis thaliana
acccaggcgattaatcc

SEQ ID NO: 20179 - DNA, 17 bp, Arabidopsis thaliana
acccaggtgctgtcggt

SEQ ID NO: 20180 - DNA, 17 bp, Arabidopsis thaliana
acccaggtggtcgagtg

SEQ ID NO: 20181 - DNA, 17 bp, Arabidopsis thaliana
acccaggtggtgcatgg

SEQ ID NO: 20182 - DNA, 17 bp, Arabidopsis thaliana
acccaggttcccggcat

SEQ ID NO: 20183 - DNA, 17 bp, Arabidopsis thaliana
acccagtattcgttgtt

SEQ ID NO: 20184 - DNA, 17 bp, Arabidopsis thaliana
acccagtcaccattcgg

SEQ ID NO: 20185 - DNA, 17 bp, Arabidopsis thaliana
acccagtcctgacacgg

SEQ ID NO: 20186 - DNA, 17 bp, Arabidopsis thaliana
acccagtgccggcttaa

SEQ ID NO: 20187 - DNA, 17 bp, Arabidopsis thaliana
acccagtggcgcgaagc

SEQ ID NO: 20188 - DNA, 17 bp, Arabidopsis thaliana
acccagtggtctggaca

SEQ ID NO: 20189 - DNA, 17 bp, Arabidopsis thaliana
acccagttcagtgagac

SEQ ID NO: 20190 - DNA, 17 bp, Arabidopsis thaliana
acccagttcctccgttg

SEQ ID NO: 20191 - DNA, 17 bp, Arabidopsis thaliana
acccataggattgtgcc

SEQ ID NO: 20192 - DNA, 17 bp, Arabidopsis thaliana
acccatcatttgggtta

SEQ ID NO: 20193 - DNA, 17 bp, Arabidopsis thaliana
acccatccaccaactct

SEQ ID NO: 20194 - DNA, 17 bp, Arabidopsis thaliana
acccatctcgtttgtct

SEQ ID NO: 20195 - DNA, 17 bp, Arabidopsis thaliana
acccatggcacgtgtcc

SEQ ID NO: 20196 - DNA, 17 bp, Arabidopsis thaliana
acccatggtccaacctt

SEQ ID NO: 20197 - DNA, 17 bp, Arabidopsis thaliana
acccattgggccaagtg

SEQ ID NO: 20198 - DNA, 17 bp, Arabidopsis thaliana
acccattttcgtgattt

SEQ ID NO: 20199 - DNA, 17 bp, Arabidopsis thaliana
acccattttctcccaga

SEQ ID NO: 20200 - DNA, 17 bp, Arabidopsis thaliana
accccaaaatcgaaaca

SEQ ID NO: 20201 - DNA, 17 bp, Arabidopsis thaliana
accccaacccgtccgac

SEQ ID NO: 20202 - DNA, 17 bp, Arabidopsis thaliana
accccaagatgagtgct

SEQ ID NO: 20203 - DNA, 17 bp, Arabidopsis thaliana
accccaagattagtgct

SEQ ID NO: 20204 - DNA, 17 bp, Arabidopsis thaliana
accccaaggatgacttg

SEQ ID NO: 20205 - DNA, 17 bp, Arabidopsis thaliana
accccacctacccaccc

SEQ ID NO: 20206 - DNA, 17 bp, Arabidopsis thaliana
accccacggctggaaga

SEQ ID NO: 20207 - DNA, 17 bp, Arabidopsis thaliana
accccactgctgacacc

SEQ ID NO: 20208 - DNA, 17 bp, Arabidopsis thaliana
accccagacttttgggc

SEQ ID NO: 20209 - DNA, 17 bp, Arabidopsis thaliana
accccagggaaactccg

SEQ ID NO: 20210 - DNA, 17 bp, Arabidopsis thaliana
accccagggaatctacg

SEQ ID NO: 20211 - DNA, 17 bp, Arabidopsis thaliana
accccaggtcaggcggg

SEQ ID NO: 20212 - DNA, 17 bp, Arabidopsis thaliana
accccaggtcagtcggg

SEQ ID NO: 20213 - DNA, 17 bp, Arabidopsis thaliana
accccagtgagtcattg

SEQ ID NO: 20214 - DNA, 17 bp, Arabidopsis thaliana
accccatccttaggaat

SEQ ID NO: 20215 - DNA, 17 bp, Arabidopsis thaliana
accccatgacttgcgtt

SEQ ID NO: 20216 - DNA, 17 bp, Arabidopsis thaliana
accccatgagattggtg

SEQ ID NO: 20217 - DNA, 17 bp, Arabidopsis thaliana
acccccaaaatggaacc

SEQ ID NO: 20218 - DNA, 17 bp, Arabidopsis thaliana
acccccacccacccacc

SEQ ID NO: 20219 - DNA, 17 bp, Arabidopsis thaliana
acccccaggtcgagtga

SEQ ID NO: 20220 - DNA, 17 bp, Arabidopsis thaliana
acccccatcatctaagc

SEQ ID NO: 20221 - DNA, 17 bp, Arabidopsis thaliana
acccccccccccccccc

SEQ ID NO: 20222 - DNA, 17 bp, Arabidopsis thaliana
accccccccccccccct

SEQ ID NO: 20223 - DNA, 17 bp, Arabidopsis thaliana
acccccgacgagagagg

SEQ ID NO: 20224 - DNA, 17 bp, Arabidopsis thaliana
acccccgatggagatgg

SEQ ID NO: 20225 - DNA, 17 bp, Arabidopsis thaliana
acccccggacttttggg

SEQ ID NO: 20226 - DNA, 17 bp, Arabidopsis thaliana
acccccgtacgtctaca

SEQ ID NO: 20227 - DNA, 17 bp, Arabidopsis thaliana
accccctacctggcgcg

SEQ ID NO: 20228 - DNA, 17 bp, Arabidopsis thaliana
accccctttgtcgctaa

SEQ ID NO: 20229 - DNA, 17 bp, Arabidopsis thaliana
accccgacggaccgctg

SEQ ID NO: 20230 - DNA, 17 bp, Arabidopsis thaliana
accccgagacccgggtt

SEQ ID NO: 20231 - DNA, 17 bp, Arabidopsis thaliana
accccgcagatatgtgc

SEQ ID NO: 20232 - DNA, 17 bp, Arabidopsis thaliana
accccgctccgtgcgcc

SEQ ID NO: 20233 - DNA, 17 bp, Arabidopsis thaliana
accccggtggcagcttc

SEQ ID NO: 20234 - DNA, 17 bp, Arabidopsis thaliana
accccggtttcagcgtc

SEQ ID NO: 20235 - DNA, 17 bp, Arabidopsis thaliana
accccgtaggaactacg

SEQ ID NO: 20236 - DNA, 17 bp, Arabidopsis thaliana
accccgtcctggacgtc

SEQ ID NO: 20237 - DNA, 17 bp, Arabidopsis thaliana
accccgtggatatccga

SEQ ID NO: 20238 - DNA, 17 bp, Arabidopsis thaliana
acccctaaaaccctccg

SEQ ID NO: 20239 - DNA, 17 bp, Arabidopsis thaliana
acccctaagaagtgtcc

SEQ ID NO: 20240 - DNA, 17 bp, Arabidopsis thaliana
acccctaagaggcgtca

SEQ ID NO: 20241 - DNA, 17 bp, Arabidopsis thaliana
acccctaggaggtgtgc

SEQ ID NO: 20242 - DNA, 17 bp, Arabidopsis thaliana
acccctaggtcgagggc

SEQ ID NO: 20243 - DNA, 17 bp, Arabidopsis thaliana
acccctatttggtgaac

SEQ ID NO: 20244 - DNA, 17 bp, Arabidopsis thaliana
acccctccagagcccaa

SEQ ID NO: 20245 - DNA, 17 bp, Arabidopsis thaliana
acccctctcagagatgt

SEQ ID NO: 20246 - DNA, 17 bp, Arabidopsis thaliana
acccctctttttggtcc

SEQ ID NO: 20247 - DNA, 17 bp, Arabidopsis thaliana
acccctgtttttggtcc

SEQ ID NO: 20248 - DNA, 17 bp, Arabidopsis thaliana
accccttgaagaccggg

SEQ ID NO: 20249 - DNA, 17 bp, Arabidopsis thaliana
accccttgacggattct

SEQ ID NO: 20250 - DNA, 17 bp, Arabidopsis thaliana
accccttgttggtcccg

SEQ ID NO: 20251 - DNA, 17 bp, Arabidopsis thaliana
accccttgtttgtcatc

SEQ ID NO: 20252 - DNA, 17 bp, Arabidopsis thaliana
acccctttgtcgctaag

SEQ ID NO: 20253 - DNA, 17 bp, Arabidopsis thaliana
acccctttttaacggcg

SEQ ID NO: 20254 - DNA, 17 bp, Arabidopsis thaliana
acccctttttttgtccc

SEQ ID NO: 20255 - DNA, 17 bp, Arabidopsis thaliana
acccgaaaccgacacag

SEQ ID NO: 20256 - DNA, 17 bp, Arabidopsis thaliana
acccgaaagaaccgatc

SEQ ID NO: 20257 - DNA, 17 bp, Arabidopsis thaliana
acccgaaagatggtgaa

SEQ ID NO: 20258 - DNA, 17 bp, Arabidopsis thaliana
acccgaaagatggtgga

SEQ ID NO: 20259 - DNA, 17 bp, Arabidopsis thaliana
acccgaaagatggttaa

SEQ ID NO: 20260 - DNA, 17 bp, Arabidopsis thaliana
acccgaacccgaaataa

SEQ ID NO: 20261 - DNA, 17 bp, Arabidopsis thaliana
acccgaacccgaaatac

SEQ ID NO: 20262 - DNA, 17 bp, Arabidopsis thaliana
acccgaacccgaacccg

SEQ ID NO: 20263 - DNA, 17 bp, Arabidopsis thaliana
acccgaacccgaatagg

SEQ ID NO: 20264 - DNA, 17 bp, Arabidopsis thaliana
acccgaacctagataag

SEQ ID NO: 20265 - DNA, 17 bp, Arabidopsis thaliana
acccgaacctgagtgat

SEQ ID NO: 20266 - DNA, 17 bp, Arabidopsis thaliana
acccgaacctgggtgat

SEQ ID NO: 20267 - DNA, 17 bp, Arabidopsis thaliana
acccgaacgggtacccg

SEQ ID NO: 20268 - DNA, 17 bp, Arabidopsis thaliana
acccgaacgggtcctaa

SEQ ID NO: 20269 - DNA, 17 bp, Arabidopsis thaliana
acccgaatccttccgtc

SEQ ID NO: 20270 - DNA, 17 bp, Arabidopsis thaliana
acccgaatctaaagaac

SEQ ID NO: 20271 - DNA, 17 bp, Arabidopsis thaliana
acccgaattatccggac

SEQ ID NO: 20272 - DNA, 17 bp, Arabidopsis thaliana
acccgacaagtactatt

SEQ ID NO: 20273 - DNA, 17 bp, Arabidopsis thaliana
acccgacccgcttaccc

SEQ ID NO: 20274 - DNA, 17 bp, Arabidopsis thaliana
acccgaccgggcacaaa

SEQ ID NO: 20275 - DNA, 17 bp, Arabidopsis thaliana
acccgacgatggggatg

SEQ ID NO: 20276 - DNA, 17 bp, Arabidopsis thaliana
acccgacgcagacgcag

SEQ ID NO: 20277 - DNA, 17 bp, Arabidopsis thaliana
acccgacggatcgcatg

SEQ ID NO: 20278 - DNA, 17 bp, Arabidopsis thaliana
acccgactggagactca

SEQ ID NO: 20279 - DNA, 17 bp, Arabidopsis thaliana
acccgagaaccatctag

SEQ ID NO: 20280 - DNA, 17 bp, Arabidopsis thaliana
acccgagactgccacaa

SEQ ID NO: 20281 - DNA, 17 bp, Arabidopsis thaliana
acccgagagacccgggt

SEQ ID NO: 20282 - DNA, 17 bp, Arabidopsis thaliana
acccgagagatcgggtt

SEQ ID NO: 20283 - DNA, 17 bp, Arabidopsis thaliana
acccgaggagcctaatg

SEQ ID NO: 20284 - DNA, 17 bp, Arabidopsis thaliana
acccgagggcacgtctg

SEQ ID NO: 20285 - DNA, 17 bp, Arabidopsis thaliana
acccgagttcaggtctc

SEQ ID NO: 20286 - DNA, 17 bp, Arabidopsis thaliana
acccgagttcatatctc

SEQ ID NO: 20287 - DNA, 17 bp, Arabidopsis thaliana
acccgagttcatctcgg

SEQ ID NO: 20288 - DNA, 17 bp, Arabidopsis thaliana
acccgatagaactcgtg

SEQ ID NO: 20289 - DNA, 17 bp, Arabidopsis thaliana
acccgatccacatcgat

SEQ ID NO: 20290 - DNA, 17 bp, Arabidopsis thaliana
acccgatccacatcggt

SEQ ID NO: 20291 - DNA, 17 bp, Arabidopsis thaliana
acccgatccgaaccaga

SEQ ID NO: 20292 - DNA, 17 bp, Arabidopsis thaliana
acccgatctacagcaga

SEQ ID NO: 20293 - DNA, 17 bp, Arabidopsis thaliana
acccgatcttaaaggcg

SEQ ID NO: 20294 - DNA, 17 bp, Arabidopsis thaliana
acccgatgacccagtga

SEQ ID NO: 20295 - DNA, 17 bp, Arabidopsis thaliana
acccgatgacccggtga

SEQ ID NO: 20296 - DNA, 17 bp, Arabidopsis thaliana
acccgatgactcgactg

SEQ ID NO: 20297 - DNA, 17 bp, Arabidopsis thaliana
acccgatgattggctcg

SEQ ID NO: 20298 - DNA, 17 bp, Arabidopsis thaliana
acccgattaggtatttg

SEQ ID NO: 20299 - DNA, 17 bp, Arabidopsis thaliana
acccgattggtcagcgt

SEQ ID NO: 20300 - DNA, 17 bp, Arabidopsis thaliana
acccgcaatacagtcct

SEQ ID NO: 20301 - DNA, 17 bp, Arabidopsis thaliana
acccgcaccctgtagat

SEQ ID NO: 20302 - DNA, 17 bp, Arabidopsis thaliana
acccgcacgaaaggcgt

SEQ ID NO: 20303 - DNA, 17 bp, Arabidopsis thaliana
acccgcaggattgtcgg

SEQ ID NO: 20304 - DNA, 17 bp, Arabidopsis thaliana
acccgccatgtagggat

SEQ ID NO: 20305 - DNA, 17 bp, Arabidopsis thaliana
acccgccctgtagatgg

SEQ ID NO: 20306 - DNA, 17 bp, Arabidopsis thaliana
acccgccgactttgtct

SEQ ID NO: 20307 - DNA, 17 bp, Arabidopsis thaliana
acccgccgagttgcgta

SEQ ID NO: 20308 - DNA, 17 bp, Arabidopsis thaliana
acccgccgtctacagta

SEQ ID NO: 20309 - DNA, 17 bp, Arabidopsis thaliana
acccgccgtgccggatg

SEQ ID NO: 20310 - DNA, 17 bp, Arabidopsis thaliana
acccgcggtacaccacg

SEQ ID NO: 20311 - DNA, 17 bp, Arabidopsis thaliana
acccgctatgtagggat

SEQ ID NO: 20312 - DNA, 17 bp, Arabidopsis thaliana
acccgctatgttggact

SEQ ID NO: 20313 - DNA, 17 bp, Arabidopsis thaliana
acccgcttctccgtatg

SEQ ID NO: 20314 - DNA, 17 bp, Arabidopsis thaliana
acccgctttctccaatc

SEQ ID NO: 20315 - DNA, 17 bp, Arabidopsis thaliana
acccggacatagtcttt

SEQ ID NO: 20316 - DNA, 17 bp, Arabidopsis thaliana
acccggaggtcatggcc

SEQ ID NO: 20317 - DNA, 17 bp, Arabidopsis thaliana
acccggagtcggtgctt

SEQ ID NO: 20318 - DNA, 17 bp, Arabidopsis thaliana
acccggatgatcgtttc

SEQ ID NO: 20319 - DNA, 17 bp, Arabidopsis thaliana
acccggattcgggttag

SEQ ID NO: 20320 - DNA, 17 bp, Arabidopsis thaliana
acccggccgtcggggca

SEQ ID NO: 20321 - DNA, 17 bp, Arabidopsis thaliana
acccggccgtgagtcaa

SEQ ID NO: 20322 - DNA, 17 bp, Arabidopsis thaliana
acccggcgaaaaccaca

SEQ ID NO: 20323 - DNA, 17 bp, Arabidopsis thaliana
acccggcggatctgctt

SEQ ID NO: 20324 - DNA, 17 bp, Arabidopsis thaliana
acccggctggagtaatg

SEQ ID NO: 20325 - DNA, 17 bp, Arabidopsis thaliana
acccggcttccggttca

SEQ ID NO: 20326 - DNA, 17 bp, Arabidopsis thaliana
acccgggatttcgcctc

SEQ ID NO: 20327 - DNA, 17 bp, Arabidopsis thaliana
acccgggcctgacgggt

SEQ ID NO: 20328 - DNA, 17 bp, Arabidopsis thaliana
acccgggctcagacacc

SEQ ID NO: 20329 - DNA, 17 bp, Arabidopsis thaliana
acccgggctcccggcag

SEQ ID NO: 20330 - DNA, 17 bp, Arabidopsis thaliana
acccggggacacgtcta

SEQ ID NO: 20331 - DNA, 17 bp, Arabidopsis thaliana
acccgggggggtcccgg

SEQ ID NO: 20332 - DNA, 17 bp, Arabidopsis thaliana
acccggggtcccggcaa

SEQ ID NO: 20333 - DNA, 17 bp, Arabidopsis thaliana
acccggggtgtcccggc

SEQ ID NO: 20334 - DNA, 17 bp, Arabidopsis thaliana
acccggggtttcccggc

SEQ ID NO: 20335 - DNA, 17 bp, Arabidopsis thaliana
acccggggtttggctca

SEQ ID NO: 20336 - DNA, 17 bp, Arabidopsis thaliana
acccgggttcgactccc

SEQ ID NO: 20337 - DNA, 17 bp, Arabidopsis thaliana
acccgggttcgagtccc

SEQ ID NO: 20338 - DNA, 17 bp, Arabidopsis thaliana
acccgggttcgattcct

SEQ ID NO: 20339 - DNA, 17 bp, Arabidopsis thaliana
acccgggttcggctccc

SEQ ID NO: 20340 - DNA, 17 bp, Arabidopsis thaliana
acccgggttcggtccct

SEQ ID NO: 20341 - DNA, 17 bp, Arabidopsis thaliana
acccgggttcgtcccgg

SEQ ID NO: 20342 - DNA, 17 bp, Arabidopsis thaliana
acccgggttcgtctccc

SEQ ID NO: 20343 - DNA, 17 bp, Arabidopsis thaliana
acccgggttcgtgtccc

SEQ ID NO: 20344 - DNA, 17 bp, Arabidopsis thaliana
acccgggttcgtttccc

SEQ ID NO: 20345 - DNA, 17 bp, Arabidopsis thaliana
acccgggttcgtttcct

SEQ ID NO: 20346 - DNA, 17 bp, Arabidopsis thaliana
acccgggttcgtttctt

SEQ ID NO: 20347 - DNA, 17 bp, Arabidopsis thaliana
acccgggtttctcccgg

SEQ ID NO: 20348 - DNA, 17 bp, Arabidopsis thaliana
acccgggtttttcccgg

SEQ ID NO: 20349 - DNA, 17 bp, Arabidopsis thaliana
acccggtccagtgaacc

SEQ ID NO: 20350 - DNA, 17 bp, Arabidopsis thaliana
acccggtccgcctttgg

SEQ ID NO: 20351 - DNA, 17 bp, Arabidopsis thaliana
acccggtgaagtgttcg

SEQ ID NO: 20352 - DNA, 17 bp, Arabidopsis thaliana
acccggtgcactagcac

SEQ ID NO: 20353 - DNA, 17 bp, Arabidopsis thaliana
acccggtgtcccggcaa

SEQ ID NO: 20354 - DNA, 17 bp, Arabidopsis thaliana
acccggttaggattgtc

SEQ ID NO: 20355 - DNA, 17 bp, Arabidopsis thaliana
acccggttaggattgtt

SEQ ID NO: 20356 - DNA, 17 bp, Arabidopsis thaliana
acccggttgacccgatg

SEQ ID NO: 20357 - DNA, 17 bp, Arabidopsis thaliana
acccgtaaggcgcaagg

SEQ ID NO: 20358 - DNA, 17 bp, Arabidopsis thaliana
acccgtaatccctaagc

SEQ ID NO: 20359 - DNA, 17 bp, Arabidopsis thaliana
acccgtaatcccttcag

SEQ ID NO: 20360 - DNA, 17 bp, Arabidopsis thaliana
acccgtaatccctttag

SEQ ID NO: 20361 - DNA, 17 bp, Arabidopsis thaliana
acccgtaatcctcaggc

SEQ ID NO: 20362 - DNA, 17 bp, Arabidopsis thaliana
acccgtatcatctgacg

SEQ ID NO: 20363 - DNA, 17 bp, Arabidopsis thaliana
acccgtatgtgggaacg

SEQ ID NO: 20364 - DNA, 17 bp, Arabidopsis thaliana
acccgtcagttttgtct

SEQ ID NO: 20365 - DNA, 17 bp, Arabidopsis thaliana
acccgtcccgccaactc

SEQ ID NO: 20366 - DNA, 17 bp, Arabidopsis thaliana
acccgtcccgtcaaccc

SEQ ID NO: 20367 - DNA, 17 bp, Arabidopsis thaliana
acccgtcctaccactaa

SEQ ID NO: 20368 - DNA, 17 bp, Arabidopsis thaliana
acccgtcctcagttcgg

SEQ ID NO: 20369 - DNA, 17 bp, Arabidopsis thaliana
acccgtcgagcagggac

SEQ ID NO: 20370 - DNA, 17 bp, Arabidopsis thaliana
acccgtcggctgtcagc

SEQ ID NO: 20371 - DNA, 17 bp, Arabidopsis thaliana
acccgtctcgccaaccc

SEQ ID NO: 20372 - DNA, 17 bp, Arabidopsis thaliana
acccgtctgatagcccg

SEQ ID NO: 20373 - DNA, 17 bp, Arabidopsis thaliana
acccgtctgatagcgct

SEQ ID NO: 20374 - DNA, 17 bp, Arabidopsis thaliana
acccgtctgcctgggtg

SEQ ID NO: 20375 - DNA, 17 bp, Arabidopsis thaliana
acccgtcttggaacacg

SEQ ID NO: 20376 - DNA, 17 bp, Arabidopsis thaliana
acccgtctttagatcca

SEQ ID NO: 20377 - DNA, 17 bp, Arabidopsis thaliana
acccgtgcagtactgta

SEQ ID NO: 20378 - DNA, 17 bp, Arabidopsis thaliana
acccgtgcagtgctgca

SEQ ID NO: 20379 - DNA, 17 bp, Arabidopsis thaliana
acccgtgcagtgctgta

SEQ ID NO: 20380 - DNA, 17 bp, Arabidopsis thaliana
acccgtggatatccgac

SEQ ID NO: 20381 - DNA, 17 bp, Arabidopsis thaliana
acccgtggatatccgat

SEQ ID NO: 20382 - DNA, 17 bp, Arabidopsis thaliana
acccgtggccctgtaaa

SEQ ID NO: 20383 - DNA, 17 bp, Arabidopsis thaliana
acccgtggcctaatgga

SEQ ID NO: 20384 - DNA, 17 bp, Arabidopsis thaliana
acccgtgggtacccata

SEQ ID NO: 20385 - DNA, 17 bp, Arabidopsis thaliana
acccgtgtaccgaccga

SEQ ID NO: 20386 - DNA, 17 bp, Arabidopsis thaliana
acccgtgtcatcttagt

SEQ ID NO: 20387 - DNA, 17 bp, Arabidopsis thaliana
acccgttccgccaaccc

SEQ ID NO: 20388 - DNA, 17 bp, Arabidopsis thaliana
acccgttccgtcagacg

SEQ ID NO: 20389 - DNA, 17 bp, Arabidopsis thaliana
acccgttggtctgcggt

SEQ ID NO: 20390 - DNA, 17 bp, Arabidopsis thaliana
accctaaaccctagcta

SEQ ID NO: 20391 - DNA, 17 bp, Arabidopsis thaliana
accctaaacgcaggcag

SEQ ID NO: 20392 - DNA, 17 bp, Arabidopsis thaliana
accctaaacgcaggcgg

SEQ ID NO: 20393 - DNA, 17 bp, Arabidopsis thaliana
accctaaaggttgggct

SEQ ID NO: 20394 - DNA, 17 bp, Arabidopsis thaliana
accctaaccaatcatac

SEQ ID NO: 20395 - DNA, 17 bp, Arabidopsis thaliana
accctaacgatcctggt

SEQ ID NO: 20396 - DNA, 17 bp, Arabidopsis thaliana
accctaacgattctgct

SEQ ID NO: 20397 - DNA, 17 bp, Arabidopsis thaliana
accctaacgattggtcc

SEQ ID NO: 20398 - DNA, 17 bp, Arabidopsis thaliana
accctaactaaattttc

SEQ ID NO: 20399 - DNA, 17 bp, Arabidopsis thaliana
accctaagatggtctaa

SEQ ID NO: 20400 - DNA, 17 bp, Arabidopsis thaliana
accctaaggagttccag

SEQ ID NO: 20401 - DNA, 17 bp, Arabidopsis thaliana
accctacatgccaaagc

SEQ ID NO: 20402 - DNA, 17 bp, Arabidopsis thaliana
accctaccgtgcgctgg

SEQ ID NO: 20403 - DNA, 17 bp, Arabidopsis thaliana
accctactatgcccgcg

SEQ ID NO: 20404 - DNA, 17 bp, Arabidopsis thaliana
accctactgatgcccgc

SEQ ID NO: 20405 - DNA, 17 bp, Arabidopsis thaliana
accctactgattcccgc

SEQ ID NO: 20406 - DNA, 17 bp, Arabidopsis thaliana
accctactgattccgca

SEQ ID NO: 20407 - DNA, 17 bp, Arabidopsis thaliana
accctactggttatgat

SEQ ID NO: 20408 - DNA, 17 bp, Arabidopsis thaliana
accctagagtgtgccta

SEQ ID NO: 20409 - DNA, 17 bp, Arabidopsis thaliana
accctagattggggcgg

SEQ ID NO: 20410 - DNA, 17 bp, Arabidopsis thaliana
accctagtcccaggagc

SEQ ID NO: 20411 - DNA, 17 bp, Arabidopsis thaliana
accctatcagctgatct

SEQ ID NO: 20412 - DNA, 17 bp, Arabidopsis thaliana
accctatcggctgatct

SEQ ID NO: 20413 - DNA, 17 bp, Arabidopsis thaliana
accctattagctcagtg

SEQ ID NO: 20414 - DNA, 17 bp, Arabidopsis thaliana
accctattggatcctaa

SEQ ID NO: 20415 - DNA, 17 bp, Arabidopsis thaliana
accctatttttgcacga

SEQ ID NO: 20416 - DNA, 17 bp, Arabidopsis thaliana
accctcaaatctgggat

SEQ ID NO: 20417 - DNA, 17 bp, Arabidopsis thaliana
accctcaacttcggcca

SEQ ID NO: 20418 - DNA, 17 bp, Arabidopsis thaliana
accctcaactttggcca

SEQ ID NO: 20419 - DNA, 17 bp, Arabidopsis thaliana
accctcaactttggcta

SEQ ID NO: 20420 - DNA, 17 bp, Arabidopsis thaliana
accctcaagactctggt

SEQ ID NO: 20421 - DNA, 17 bp, Arabidopsis thaliana
accctcactgaacctta

SEQ ID NO: 20422 - DNA, 17 bp, Arabidopsis thaliana
accctcagactggaagt

SEQ ID NO: 20423 - DNA, 17 bp, Arabidopsis thaliana
accctcatccaatttgg

SEQ ID NO: 20424 - DNA, 17 bp, Arabidopsis thaliana
accctccaggcgtttga

SEQ ID NO: 20425 - DNA, 17 bp, Arabidopsis thaliana
accctccttggttctga

SEQ ID NO: 20426 - DNA, 17 bp, Arabidopsis thaliana
accctcctttcttctct

SEQ ID NO: 20427 - DNA, 17 bp, Arabidopsis thaliana
accctcgaccaggacga

SEQ ID NO: 20428 - DNA, 17 bp, Arabidopsis thaliana
accctcgagacaaattg

SEQ ID NO: 20429 - DNA, 17 bp, Arabidopsis thaliana
accctcgagacaaattt

SEQ ID NO: 20430 - DNA, 17 bp, Arabidopsis thaliana
accctcgaggactcgtc

SEQ ID NO: 20431 - DNA, 17 bp, Arabidopsis thaliana
accctcgatggcgacaa

SEQ ID NO: 20432 - DNA, 17 bp, Arabidopsis thaliana
accctcggcccgggcac

SEQ ID NO: 20433 - DNA, 17 bp, Arabidopsis thaliana
accctcgtccctctcga

SEQ ID NO: 20434 - DNA, 17 bp, Arabidopsis thaliana
accctcgtgtttggttg

SEQ ID NO: 20435 - DNA, 17 bp, Arabidopsis thaliana
accctcgttctcatcct

SEQ ID NO: 20436 - DNA, 17 bp, Arabidopsis thaliana
accctctaaatttgtcc

SEQ ID NO: 20437 - DNA, 17 bp, Arabidopsis thaliana
accctctaaatttgtct

SEQ ID NO: 20438 - DNA, 17 bp, Arabidopsis thaliana
accctctcttgctgtgg

SEQ ID NO: 20439 - DNA, 17 bp, Arabidopsis thaliana
accctctgaatgattag

SEQ ID NO: 20440 - DNA, 17 bp, Arabidopsis thaliana
accctctgggagagact

SEQ ID NO: 20441 - DNA, 17 bp, Arabidopsis thaliana
accctctgtggaacact

SEQ ID NO: 20442 - DNA, 17 bp, Arabidopsis thaliana
accctcttgtgtcaatt

SEQ ID NO: 20443 - DNA, 17 bp, Arabidopsis thaliana
accctctttcttgtttc

SEQ ID NO: 20444 - DNA, 17 bp, Arabidopsis thaliana
accctgatgctgacacc

SEQ ID NO: 20445 - DNA, 17 bp, Arabidopsis thaliana
accctgccgcaccacga

SEQ ID NO: 20446 - DNA, 17 bp, Arabidopsis thaliana
accctgcgcattagcca

SEQ ID NO: 20447 - DNA, 17 bp, Arabidopsis thaliana
accctggcctgtgcagt

SEQ ID NO: 20448 - DNA, 17 bp, Arabidopsis thaliana
accctggccttgacatc

SEQ ID NO: 20449 - DNA, 17 bp, Arabidopsis thaliana
accctgggtgttacgac

SEQ ID NO: 20450 - DNA, 17 bp, Arabidopsis thaliana
accctgggtttagaccg

SEQ ID NO: 20451 - DNA, 17 bp, Arabidopsis thaliana
accctggttgttgttga

SEQ ID NO: 20452 - DNA, 17 bp, Arabidopsis thaliana
accctgtattggtggct

SEQ ID NO: 20453 - DNA, 17 bp, Arabidopsis thaliana
accctgtcgcaccacga

SEQ ID NO: 20454 - DNA, 17 bp, Arabidopsis thaliana
accctgtgcctcagctt

SEQ ID NO: 20455 - DNA, 17 bp, Arabidopsis thaliana
accctgtgctatgctcc

SEQ ID NO: 20456 - DNA, 17 bp, Arabidopsis thaliana
accctgttgagctgact

SEQ ID NO: 20457 - DNA, 17 bp, Arabidopsis thaliana
accctgttgagcttgac

SEQ ID NO: 20458 - DNA, 17 bp, Arabidopsis thaliana
accctgttgagcttgat

SEQ ID NO: 20459 - DNA, 17 bp, Arabidopsis thaliana
acccttaactttggcca

SEQ ID NO: 20460 - DNA, 17 bp, Arabidopsis thaliana
acccttaatcaaccaat

SEQ ID NO: 20461 - DNA, 17 bp, Arabidopsis thaliana
acccttactacgtcatc

SEQ ID NO: 20462 - DNA, 17 bp, Arabidopsis thaliana
acccttactgaatgatt

SEQ ID NO: 20463 - DNA, 17 bp, Arabidopsis thaliana
acccttagcttagatcc

SEQ ID NO: 20464 - DNA, 17 bp, Arabidopsis thaliana
acccttaggattcttca

SEQ ID NO: 20465 - DNA, 17 bp, Arabidopsis thaliana
acccttataatccattg

SEQ ID NO: 20466 - DNA, 17 bp, Arabidopsis thaliana
acccttcactttgtcga

SEQ ID NO: 20467 - DNA, 17 bp, Arabidopsis thaliana
acccttcactttgttga

SEQ ID NO: 20468 - DNA, 17 bp, Arabidopsis thaliana
acccttcatcgcttcta

SEQ ID NO: 20469 - DNA, 17 bp, Arabidopsis thaliana
acccttcctgactaagc

SEQ ID NO: 20470 - DNA, 17 bp, Arabidopsis thaliana
acccttcctgcagtgct

SEQ ID NO: 20471 - DNA, 17 bp, Arabidopsis thaliana
acccttcgacttccgga

SEQ ID NO: 20472 - DNA, 17 bp, Arabidopsis thaliana
acccttcgtgttcgctg

SEQ ID NO: 20473 - DNA, 17 bp, Arabidopsis thaliana
acccttcgtttgcagtc

SEQ ID NO: 20474 - DNA, 17 bp, Arabidopsis thaliana
acccttctcaacgcgga

SEQ ID NO: 20475 - DNA, 17 bp, Arabidopsis thaliana
acccttgaccttagcca

SEQ ID NO: 20476 - DNA, 17 bp, Arabidopsis thaliana
acccttgacttaggcac

SEQ ID NO: 20477 - DNA, 17 bp, Arabidopsis thaliana
acccttgagcaaattga

SEQ ID NO: 20478 - DNA, 17 bp, Arabidopsis thaliana
acccttgatggacttgg

SEQ ID NO: 20479 - DNA, 17 bp, Arabidopsis thaliana
acccttgctgactaagc

SEQ ID NO: 20480 - DNA, 17 bp, Arabidopsis thaliana
acccttggagctttgtc

SEQ ID NO: 20481 - DNA, 17 bp, Arabidopsis thaliana
acccttggatgtttgat

SEQ ID NO: 20482 - DNA, 17 bp, Arabidopsis thaliana
acccttggccggcgtat

SEQ ID NO: 20483 - DNA, 17 bp, Arabidopsis thaliana
acccttgggttcgtcgt

SEQ ID NO: 20484 - DNA, 17 bp, Arabidopsis thaliana
acccttgtggagacgtc

SEQ ID NO: 20485 - DNA, 17 bp, Arabidopsis thaliana
acccttgtgtcagacga

SEQ ID NO: 20486 - DNA, 17 bp, Arabidopsis thaliana
acccttgtttttggtcc

SEQ ID NO: 20487 - DNA, 17 bp, Arabidopsis thaliana
accctttaagatccggt

SEQ ID NO: 20488 - DNA, 17 bp, Arabidopsis thaliana
accctttacgagaagtt

SEQ ID NO: 20489 - DNA, 17 bp, Arabidopsis thaliana
accctttccacggagcg

SEQ ID NO: 20490 - DNA, 17 bp, Arabidopsis thaliana
accctttccgaaaaggt

SEQ ID NO: 20491 - DNA, 17 bp, Arabidopsis thaliana
accctttcgctcgatcc

SEQ ID NO: 20492 - DNA, 17 bp, Arabidopsis thaliana
accctttcgtgttggcc

SEQ ID NO: 20493 - DNA, 17 bp, Arabidopsis thaliana
accctttctgcagttgg

SEQ ID NO: 20494 - DNA, 17 bp, Arabidopsis thaliana
accctttgatggtgtag

SEQ ID NO: 20495 - DNA, 17 bp, Arabidopsis thaliana
accctttgccaaggatc

SEQ ID NO: 20496 - DNA, 17 bp, Arabidopsis thaliana
accctttgggcctatag

SEQ ID NO: 20497 - DNA, 17 bp, Arabidopsis thaliana
acccttttttgctatcg

SEQ ID NO: 20498 - DNA, 17 bp, Arabidopsis thaliana
accgaaacgcctgtttc

SEQ ID NO: 20499 - DNA, 17 bp, Arabidopsis thaliana
accgaaagggatgtatc

SEQ ID NO: 20500 - DNA, 17 bp, Arabidopsis thaliana
accgaaaggtgcattac

SEQ ID NO: 20501 - DNA, 17 bp, Arabidopsis thaliana
accgaaaggtttttgcg

SEQ ID NO: 20502 - DNA, 17 bp, Arabidopsis thaliana
accgaaatggtctaata

SEQ ID NO: 20503 - DNA, 17 bp, Arabidopsis thaliana
accgaaatgttacggaa

SEQ ID NO: 20504 - DNA, 17 bp, Arabidopsis thaliana
accgaaccaggctgcgg

SEQ ID NO: 20505 - DNA, 17 bp, Arabidopsis thaliana
accgaaccgaaccaggc

SEQ ID NO: 20506 - DNA, 17 bp, Arabidopsis thaliana
accgaacgaggcgcaac

SEQ ID NO: 20507 - DNA, 17 bp, Arabidopsis thaliana
accgaagatcggtcggc

SEQ ID NO: 20508 - DNA, 17 bp, Arabidopsis thaliana
accgaagcggattacgg

SEQ ID NO: 20509 - DNA, 17 bp, Arabidopsis thaliana
accgaagctgaccagat

SEQ ID NO: 20510 - DNA, 17 bp, Arabidopsis thaliana
accgaaggagctacaac

SEQ ID NO: 20511 - DNA, 17 bp, Arabidopsis thaliana
accgaagtacccaagtg

SEQ ID NO: 20512 - DNA, 17 bp, Arabidopsis thaliana
accgaagtcagttatgt

SEQ ID NO: 20513 - DNA, 17 bp, Arabidopsis thaliana
accgaagtccagactaa

SEQ ID NO: 20514 - DNA, 17 bp, Arabidopsis thaliana
accgaagtgcgaggaca

SEQ ID NO: 20515 - DNA, 17 bp, Arabidopsis thaliana
accgaatagggactaac

SEQ ID NO: 20516 - DNA, 17 bp, Arabidopsis thaliana
accgaatatcctgctgc

SEQ ID NO: 20517 - DNA, 17 bp, Arabidopsis thaliana
accgaatcagccgatag

SEQ ID NO: 20518 - DNA, 17 bp, Arabidopsis thaliana
accgaatctaatacccg

SEQ ID NO: 20519 - DNA, 17 bp, Arabidopsis thaliana
accgaatctaataccta

SEQ ID NO: 20520 - DNA, 17 bp, Arabidopsis thaliana
accgaatctaatacctg

SEQ ID NO: 20521 - DNA, 17 bp, Arabidopsis thaliana
accgaatctaatatccg

SEQ ID NO: 20522 - DNA, 17 bp, Arabidopsis thaliana
accgaatctatgtgttg

SEQ ID NO: 20523 - DNA, 17 bp, Arabidopsis thaliana
accgaatctttagacca

SEQ ID NO: 20524 - DNA, 17 bp, Arabidopsis thaliana
accgaatgaccagcatt

SEQ ID NO: 20525 - DNA, 17 bp, Arabidopsis thaliana
accgaatgaccagcgtt

SEQ ID NO: 20526 - DNA, 17 bp, Arabidopsis thaliana
accgaatgaccagcttt

SEQ ID NO: 20527 - DNA, 17 bp, Arabidopsis thaliana
accgaatggccagtgtt

SEQ ID NO: 20528 - DNA, 17 bp, Arabidopsis thaliana
accgaatggccgacttt

SEQ ID NO: 20529 - DNA, 17 bp, Arabidopsis thaliana
accgaatggctgacttt

SEQ ID NO: 20530 - DNA, 17 bp, Arabidopsis thaliana
accgaatggtcagcatt

SEQ ID NO: 20531 - DNA, 17 bp, Arabidopsis thaliana
accgaatggtcagcgtt

SEQ ID NO: 20532 - DNA, 17 bp, Arabidopsis thaliana
accgaattacagtcgct

SEQ ID NO: 20533 - DNA, 17 bp, Arabidopsis thaliana
accgaattagggtcagt

SEQ ID NO: 20534 - DNA, 17 bp, Arabidopsis thaliana
accgaattgacgttcag

SEQ ID NO: 20535 - DNA, 17 bp, Arabidopsis thaliana
accgaatttcggtgact

SEQ ID NO: 20536 - DNA, 17 bp, Arabidopsis thaliana
accgaattttggatcct

SEQ ID NO: 20537 - DNA, 17 bp, Arabidopsis thaliana
accgacaaaccgaagct

SEQ ID NO: 20538 - DNA, 17 bp, Arabidopsis thaliana
accgacaaaccggagct

SEQ ID NO: 20539 - DNA, 17 bp, Arabidopsis thaliana
accgacaacggatctca

SEQ ID NO: 20540 - DNA, 17 bp, Arabidopsis thaliana
accgacaacttctaagc

SEQ ID NO: 20541 - DNA, 17 bp, Arabidopsis thaliana
accgacaagtactattt

SEQ ID NO: 20542 - DNA, 17 bp, Arabidopsis thaliana
accgacaatggagagac

SEQ ID NO: 20543 - DNA, 17 bp, Arabidopsis thaliana
accgacacaacgagcgg

SEQ ID NO: 20544 - DNA, 17 bp, Arabidopsis thaliana
accgacaccatgttaga

SEQ ID NO: 20545 - DNA, 17 bp, Arabidopsis thaliana
accgacacggccgatcg

SEQ ID NO: 20546 - DNA, 17 bp, Arabidopsis thaliana
accgacacttggtcgtt

SEQ ID NO: 20547 - DNA, 17 bp, Arabidopsis thaliana
accgacattcgcagcag

SEQ ID NO: 20548 - DNA, 17 bp, Arabidopsis thaliana
accgacattggcccaga

SEQ ID NO: 20549 - DNA, 17 bp, Arabidopsis thaliana
accgacattggcccata

SEQ ID NO: 20550 - DNA, 17 bp, Arabidopsis thaliana
accgaccaagtaagtac

SEQ ID NO: 20551 - DNA, 17 bp, Arabidopsis thaliana
accgacccgggttcgtt

SEQ ID NO: 20552 - DNA, 17 bp, Arabidopsis thaliana
accgaccgaatctaata

SEQ ID NO: 20553 - DNA, 17 bp, Arabidopsis thaliana
accgaccgacgcggata

SEQ ID NO: 20554 - DNA, 17 bp, Arabidopsis thaliana
accgaccgccgctgaaa

SEQ ID NO: 20555 - DNA, 17 bp, Arabidopsis thaliana
accgaccgctatggcct

SEQ ID NO: 20556 - DNA, 17 bp, Arabidopsis thaliana
accgaccgctggggcta

SEQ ID NO: 20557 - DNA, 17 bp, Arabidopsis thaliana
accgaccggattacggt

SEQ ID NO: 20558 - DNA, 17 bp, Arabidopsis thaliana
accgaccgtccggccgc

SEQ ID NO: 20559 - DNA, 17 bp, Arabidopsis thaliana
accgaccgtccgtccgc

SEQ ID NO: 20560 - DNA, 17 bp, Arabidopsis thaliana
accgacgactcgaatcc

SEQ ID NO: 20561 - DNA, 17 bp, Arabidopsis thaliana
accgacgacttctaagt

SEQ ID NO: 20562 - DNA, 17 bp, Arabidopsis thaliana
accgacgagatctgtac

SEQ ID NO: 20563 - DNA, 17 bp, Arabidopsis thaliana
accgacgcattacggtg

SEQ ID NO: 20564 - DNA, 17 bp, Arabidopsis thaliana
accgacgcgattacggt

SEQ ID NO: 20565 - DNA, 17 bp, Arabidopsis thaliana
accgacgcggaatacgg

SEQ ID NO: 20566 - DNA, 17 bp, Arabidopsis thaliana
accgacgcggacaccgg

SEQ ID NO: 20567 - DNA, 17 bp, Arabidopsis thaliana
accgacgcggactacgg

SEQ ID NO: 20568 - DNA, 17 bp, Arabidopsis thaliana
accgacgcggagaccgg

SEQ ID NO: 20569 - DNA, 17 bp, Arabidopsis thaliana
accgacgcggataacga

SEQ ID NO: 20570 - DNA, 17 bp, Arabidopsis thaliana
accgacgcggataacgg

SEQ ID NO: 20571 - DNA, 17 bp, Arabidopsis thaliana
accgacgcggataccga

SEQ ID NO: 20572 - DNA, 17 bp, Arabidopsis thaliana
accgacgcggataccgg

SEQ ID NO: 20573 - DNA, 17 bp, Arabidopsis thaliana
accgacgcggataccgt

SEQ ID NO: 20574 - DNA, 17 bp, Arabidopsis thaliana
accgacgcggatacctg

SEQ ID NO: 20575 - DNA, 17 bp, Arabidopsis thaliana
accgacgcggatggtgg

SEQ ID NO: 20576 - DNA, 17 bp, Arabidopsis thaliana
accgacgcggattacag

SEQ ID NO: 20577 - DNA, 17 bp, Arabidopsis thaliana
accgacgcggattacga

SEQ ID NO: 20578 - DNA, 17 bp, Arabidopsis thaliana
accgacgcggattacgg

SEQ ID NO: 20579 - DNA, 17 bp, Arabidopsis thaliana
accgacgcggattacgt

SEQ ID NO: 20580 - DNA, 17 bp, Arabidopsis thaliana
accgacgcggattaggt

SEQ ID NO: 20581 - DNA, 17 bp, Arabidopsis thaliana
accgacgcggatttcgg

SEQ ID NO: 20582 - DNA, 17 bp, Arabidopsis thaliana
accgacgcgggttacgg

SEQ ID NO: 20583 - DNA, 17 bp, Arabidopsis thaliana
accgacgctcggcaaca

SEQ ID NO: 20584 - DNA, 17 bp, Arabidopsis thaliana
accgacgctgattacgg

SEQ ID NO: 20585 - DNA, 17 bp, Arabidopsis thaliana
accgacggccgctccgc

SEQ ID NO: 20586 - DNA, 17 bp, Arabidopsis thaliana
accgacggtcagagttc

SEQ ID NO: 20587 - DNA, 17 bp, Arabidopsis thaliana
accgacgtcttcgcggg

SEQ ID NO: 20588 - DNA, 17 bp, Arabidopsis thaliana
accgacgtgatctccgg

SEQ ID NO: 20589 - DNA, 17 bp, Arabidopsis thaliana
accgacgtggattacgg

SEQ ID NO: 20590 - DNA, 17 bp, Arabidopsis thaliana
accgacgtgtttccgac

SEQ ID NO: 20591 - DNA, 17 bp, Arabidopsis thaliana
accgacgtttcaccgtc

SEQ ID NO: 20592 - DNA, 17 bp, Arabidopsis thaliana
accgacgtttgaccgtc

SEQ ID NO: 20593 - DNA, 17 bp, Arabidopsis thaliana
accgactatttctcgaa

SEQ ID NO: 20594 - DNA, 17 bp, Arabidopsis thaliana
accgactatttctctaa

SEQ ID NO: 20595 - DNA, 17 bp, Arabidopsis thaliana
accgactccacgaccta

SEQ ID NO: 20596 - DNA, 17 bp, Arabidopsis thaliana
accgactcccggtgtac

SEQ ID NO: 20597 - DNA, 17 bp, Arabidopsis thaliana
accgactctcggcaacg

SEQ ID NO: 20598 - DNA, 17 bp, Arabidopsis thaliana
accgactcttggtgtat

SEQ ID NO: 20599 - DNA, 17 bp, Arabidopsis thaliana
accgactgtggctaggg

SEQ ID NO: 20600 - DNA, 17 bp, Arabidopsis thaliana
accgacttatggggagg

SEQ ID NO: 20601 - DNA, 17 bp, Arabidopsis thaliana
accgactttggtgaatc

SEQ ID NO: 20602 - DNA, 17 bp, Arabidopsis thaliana
accgactttgtggttga

SEQ ID NO: 20603 - DNA, 17 bp, Arabidopsis thaliana
accgagaaagttcctgc

SEQ ID NO: 20604 - DNA, 17 bp, Arabidopsis thaliana
accgagaactctccgac

SEQ ID NO: 20605 - DNA, 17 bp, Arabidopsis thaliana
accgagaactgattgtc

SEQ ID NO: 20606 - DNA, 17 bp, Arabidopsis thaliana
accgagaaggatccgag

SEQ ID NO: 20607 - DNA, 17 bp, Arabidopsis thaliana
accgagacagacatcaa

SEQ ID NO: 20608 - DNA, 17 bp, Arabidopsis thaliana
accgagacagaggtttc

SEQ ID NO: 20609 - DNA, 17 bp, Arabidopsis thaliana
accgagaccttgtgctt

SEQ ID NO: 20610 - DNA, 17 bp, Arabidopsis thaliana
accgagactcaccagat

SEQ ID NO: 20611 - DNA, 17 bp, Arabidopsis thaliana
accgagagacaggatcc

SEQ ID NO: 20612 - DNA, 17 bp, Arabidopsis thaliana
accgagagatctaactc

SEQ ID NO: 20613 - DNA, 17 bp, Arabidopsis thaliana
accgagatcgtcaatca

SEQ ID NO: 20614 - DNA, 17 bp, Arabidopsis thaliana
accgagatctttacttc

SEQ ID NO: 20615 - DNA, 17 bp, Arabidopsis thaliana
accgagatctttacttg

SEQ ID NO: 20616 - DNA, 17 bp, Arabidopsis thaliana
accgagattcagccctt

SEQ ID NO: 20617 - DNA, 17 bp, Arabidopsis thaliana
accgagcccaccgttct

SEQ ID NO: 20618 - DNA, 17 bp, Arabidopsis thaliana
accgagcccattttaaa

SEQ ID NO: 20619 - DNA, 17 bp, Arabidopsis thaliana
accgagccctgctgcgt

SEQ ID NO: 20620 - DNA, 17 bp, Arabidopsis thaliana
accgagcgactaggcac

SEQ ID NO: 20621 - DNA, 17 bp, Arabidopsis thaliana
accgagcggcgggtaga

SEQ ID NO: 20622 - DNA, 17 bp, Arabidopsis thaliana
accgagcgtcaccgcgt

SEQ ID NO: 20623 - DNA, 17 bp, Arabidopsis thaliana
accgagctaatgttttg

SEQ ID NO: 20624 - DNA, 17 bp, Arabidopsis thaliana
accgagctgcttgatga

SEQ ID NO: 20625 - DNA, 17 bp, Arabidopsis thaliana
accgaggcgaaatatcc

SEQ ID NO: 20626 - DNA, 17 bp, Arabidopsis thaliana
accgaggctgaccggat

SEQ ID NO: 20627 - DNA, 17 bp, Arabidopsis thaliana
accgagggcacgtctgc

SEQ ID NO: 20628 - DNA, 17 bp, Arabidopsis thaliana
accgagggtgcagaata

SEQ ID NO: 20629 - DNA, 17 bp, Arabidopsis thaliana
accgaggtcggccgaat

SEQ ID NO: 20630 - DNA, 17 bp, Arabidopsis thaliana
accgaggtgcttgatga

SEQ ID NO: 20631 - DNA, 17 bp, Arabidopsis thaliana
accgagtaaggagtgaa

SEQ ID NO: 20632 - DNA, 17 bp, Arabidopsis thaliana
accgagtctcggccacg

SEQ ID NO: 20633 - DNA, 17 bp, Arabidopsis thaliana
accgagtgccgctcacc

SEQ ID NO: 20634 - DNA, 17 bp, Arabidopsis thaliana
accgagtgccgctcacg

SEQ ID NO: 20635 - DNA, 17 bp, Arabidopsis thaliana
accgagttatggtttag

SEQ ID NO: 20636 - DNA, 17 bp, Arabidopsis thaliana
accgagttcaccatcaa

SEQ ID NO: 20637 - DNA, 17 bp, Arabidopsis thaliana
accgataactccagttc

SEQ ID NO: 20638 - DNA, 17 bp, Arabidopsis thaliana
accgataattccagttc

SEQ ID NO: 20639 - DNA, 17 bp, Arabidopsis thaliana
accgatacagaccaaca

SEQ ID NO: 20640 - DNA, 17 bp, Arabidopsis thaliana
accgatagcgaacaagt

SEQ ID NO: 20641 - DNA, 17 bp, Arabidopsis thaliana
accgatatgtccaaatg

SEQ ID NO: 20642 - DNA, 17 bp, Arabidopsis thaliana
accgatattggtccatt

SEQ ID NO: 20643 - DNA, 17 bp, Arabidopsis thaliana
accgatcccaagtcgga

SEQ ID NO: 20644 - DNA, 17 bp, Arabidopsis thaliana
accgatccgcagttctt

SEQ ID NO: 20645 - DNA, 17 bp, Arabidopsis thaliana
accgatcgcagcgactg

SEQ ID NO: 20646 - DNA, 17 bp, Arabidopsis thaliana
accgatcgcatcgactg

SEQ ID NO: 20647 - DNA, 17 bp, Arabidopsis thaliana
accgatcgccggaaaag

SEQ ID NO: 20648 - DNA, 17 bp, Arabidopsis thaliana
accgatcggctcatatt

SEQ ID NO: 20649 - DNA, 17 bp, Arabidopsis thaliana
accgatcggtcgtagcg

SEQ ID NO: 20650 - DNA, 17 bp, Arabidopsis thaliana
accgatcgtcggacaga

SEQ ID NO: 20651 - DNA, 17 bp, Arabidopsis thaliana
accgatcgtctatttgt

SEQ ID NO: 20652 - DNA, 17 bp, Arabidopsis thaliana
accgatgaactctacct

SEQ ID NO: 20653 - DNA, 17 bp, Arabidopsis thaliana
accgatgaagatggtct

SEQ ID NO: 20654 - DNA, 17 bp, Arabidopsis thaliana
accgatgaaggtgctct

SEQ ID NO: 20655 - DNA, 17 bp, Arabidopsis thaliana
accgatgacagttgtac

SEQ ID NO: 20656 - DNA, 17 bp, Arabidopsis thaliana
accgatgacgccgctta

SEQ ID NO: 20657 - DNA, 17 bp, Arabidopsis thaliana
accgatgacttaccgat

SEQ ID NO: 20658 - DNA, 17 bp, Arabidopsis thaliana
accgatgatccttcttc

SEQ ID NO: 20659 - DNA, 17 bp, Arabidopsis thaliana
accgatgatggtgacac

SEQ ID NO: 20660 - DNA, 17 bp, Arabidopsis thaliana
accgatgcggaccatct

SEQ ID NO: 20661 - DNA, 17 bp, Arabidopsis thaliana
accgatggagatggtct

SEQ ID NO: 20662 - DNA, 17 bp, Arabidopsis thaliana
accgatggatggaatga

SEQ ID NO: 20663 - DNA, 17 bp, Arabidopsis thaliana
accgatggctgcagtaa

SEQ ID NO: 20664 - DNA, 17 bp, Arabidopsis thaliana
accgatggtggtgctct

SEQ ID NO: 20665 - DNA, 17 bp, Arabidopsis thaliana
accgatgttaaccagat

SEQ ID NO: 20666 - DNA, 17 bp, Arabidopsis thaliana
accgattagtgtcccgg

SEQ ID NO: 20667 - DNA, 17 bp, Arabidopsis thaliana
accgattcagttcttgt

SEQ ID NO: 20668 - DNA, 17 bp, Arabidopsis thaliana
accgattcatagttggt

SEQ ID NO: 20669 - DNA, 17 bp, Arabidopsis thaliana
accgattcatcaagcta

SEQ ID NO: 20670 - DNA, 17 bp, Arabidopsis thaliana
accgattcatcaagctc

SEQ ID NO: 20671 - DNA, 17 bp, Arabidopsis thaliana
accgattcatcggatca

SEQ ID NO: 20672 - DNA, 17 bp, Arabidopsis thaliana
accgattcggattctgc

SEQ ID NO: 20673 - DNA, 17 bp, Arabidopsis thaliana
accgattctgattgcat

SEQ ID NO: 20674 - DNA, 17 bp, Arabidopsis thaliana
accgattctgcaaataa

SEQ ID NO: 20675 - DNA, 17 bp, Arabidopsis thaliana
accgattgaaccggccg

SEQ ID NO: 20676 - DNA, 17 bp, Arabidopsis thaliana
accgattgaatgattga

SEQ ID NO: 20677 - DNA, 17 bp, Arabidopsis thaliana
accgattgaccattccg

SEQ ID NO: 20678 - DNA, 17 bp, Arabidopsis thaliana
accgattgagctttgca

SEQ ID NO: 20679 - DNA, 17 bp, Arabidopsis thaliana
accgattgatccaacaa

SEQ ID NO: 20680 - DNA, 17 bp, Arabidopsis thaliana
accgattgatccgacaa

SEQ ID NO: 20681 - DNA, 17 bp, Arabidopsis thaliana
accgattggatgtgggt

SEQ ID NO: 20682 - DNA, 17 bp, Arabidopsis thaliana
accgattggtgttgatg

SEQ ID NO: 20683 - DNA, 17 bp, Arabidopsis thaliana
accgattgtgtccagat

SEQ ID NO: 20684 - DNA, 17 bp, Arabidopsis thaliana
accgattgttattagaa

SEQ ID NO: 20685 - DNA, 17 bp, Arabidopsis thaliana
accgatttattgtccgc

SEQ ID NO: 20686 - DNA, 17 bp, Arabidopsis thaliana
accgatttctccgagtt

SEQ ID NO: 20687 - DNA, 17 bp, Arabidopsis thaliana
accgatttctggtatgc

SEQ ID NO: 20688 - DNA, 17 bp, Arabidopsis thaliana
accgatttggtagtgtt

SEQ ID NO: 20689 - DNA, 17 bp, Arabidopsis thaliana
accgatttgtatcaatt

SEQ ID NO: 20690 - DNA, 17 bp, Arabidopsis thaliana
accgattttcactccga

SEQ ID NO: 20691 - DNA, 17 bp, Arabidopsis thaliana
accgattttccggttca

SEQ ID NO: 20692 - DNA, 17 bp, Arabidopsis thaliana
accgatttttttctgga

SEQ ID NO: 20693 - DNA, 17 bp, Arabidopsis thaliana
accgcaaaacgcagtca

SEQ ID NO: 20694 - DNA, 17 bp, Arabidopsis thaliana
accgcaaacgacggtga

SEQ ID NO: 20695 - DNA, 17 bp, Arabidopsis thaliana
accgcaacagtgctgta

SEQ ID NO: 20696 - DNA, 17 bp, Arabidopsis thaliana
accgcaacatcctttat

SEQ ID NO: 20697 - DNA, 17 bp, Arabidopsis thaliana
accgcaaccagatctca

SEQ ID NO: 20698 - DNA, 17 bp, Arabidopsis thaliana
accgcaacccgatctac

SEQ ID NO: 20699 - DNA, 17 bp, Arabidopsis thaliana
accgcaaccgcacccgc

SEQ ID NO: 20700 - DNA, 17 bp, Arabidopsis thaliana
accgcaaccggaccccc

SEQ ID NO: 20701 - DNA, 17 bp, Arabidopsis thaliana
accgcaacgcattgttt

SEQ ID NO: 20702 - DNA, 17 bp, Arabidopsis thaliana
accgcaacggaccatcc

SEQ ID NO: 20703 - DNA, 17 bp, Arabidopsis thaliana
accgcaacggaccatct

SEQ ID NO: 20704 - DNA, 17 bp, Arabidopsis thaliana
accgcaactggatctcg

SEQ ID NO: 20705 - DNA, 17 bp, Arabidopsis thaliana
accgcaagcggcggcgg

SEQ ID NO: 20706 - DNA, 17 bp, Arabidopsis thaliana
accgcaagcttgtggat

SEQ ID NO: 20707 - DNA, 17 bp, Arabidopsis thaliana
accgcaaggaggggggt

SEQ ID NO: 20708 - DNA, 17 bp, Arabidopsis thaliana
accgcaatatctacttg

SEQ ID NO: 20709 - DNA, 17 bp, Arabidopsis thaliana
accgcaatgcaacagtg

SEQ ID NO: 20710 - DNA, 17 bp, Arabidopsis thaliana
accgcaatttgtttgaa

SEQ ID NO: 20711 - DNA, 17 bp, Arabidopsis thaliana
accgcacagattgcgcc

SEQ ID NO: 20712 - DNA, 17 bp, Arabidopsis thaliana
accgcaccccacttgtc

SEQ ID NO: 20713 - DNA, 17 bp, Arabidopsis thaliana
accgcaccgcacttctt

SEQ ID NO: 20714 - DNA, 17 bp, Arabidopsis thaliana
accgcaccgcacttgtc

SEQ ID NO: 20715 - DNA, 17 bp, Arabidopsis thaliana
accgcaccgtactttcc

SEQ ID NO: 20716 - DNA, 17 bp, Arabidopsis thaliana
accgcaccgtacttttc

SEQ ID NO: 20717 - DNA, 17 bp, Arabidopsis thaliana
accgcacgattaactgc

SEQ ID NO: 20718 - DNA, 17 bp, Arabidopsis thaliana
accgcacgcgtgagaca

SEQ ID NO: 20719 - DNA, 17 bp, Arabidopsis thaliana
accgcacgtcgcgtggt

SEQ ID NO: 20720 - DNA, 17 bp, Arabidopsis thaliana
accgcacgtctgcctgg

SEQ ID NO: 20721 - DNA, 17 bp, Arabidopsis thaliana
accgcactgtaataacg

SEQ ID NO: 20722 - DNA, 17 bp, Arabidopsis thaliana
accgcactgtgcgattc

SEQ ID NO: 20723 - DNA, 17 bp, Arabidopsis thaliana
accgcacttctataacc

SEQ ID NO: 20724 - DNA, 17 bp, Arabidopsis thaliana
accgcacttctcccgca

SEQ ID NO: 20725 - DNA, 17 bp, Arabidopsis thaliana
accgcacttttcccgta

SEQ ID NO: 20726 - DNA, 17 bp, Arabidopsis thaliana
accgcagacggtgtttt

SEQ ID NO: 20727 - DNA, 17 bp, Arabidopsis thaliana
accgcagatctggcagt

SEQ ID NO: 20728 - DNA, 17 bp, Arabidopsis thaliana
accgcagatcttggtgg

SEQ ID NO: 20729 - DNA, 17 bp, Arabidopsis thaliana
accgcagcatgcatttg

SEQ ID NO: 20730 - DNA, 17 bp, Arabidopsis thaliana
accgcagcggatcatct

SEQ ID NO: 20731 - DNA, 17 bp, Arabidopsis thaliana
accgcagcgtagcgcga

SEQ ID NO: 20732 - DNA, 17 bp, Arabidopsis thaliana
accgcaggacgatttat

SEQ ID NO: 20733 - DNA, 17 bp, Arabidopsis thaliana
accgcaggagttacttt

SEQ ID NO: 20734 - DNA, 17 bp, Arabidopsis thaliana
accgcaggccaatggtc

SEQ ID NO: 20735 - DNA, 17 bp, Arabidopsis thaliana
accgcagggttacacta

SEQ ID NO: 20736 - DNA, 17 bp, Arabidopsis thaliana
accgcaggttaaaatct

SEQ ID NO: 20737 - DNA, 17 bp, Arabidopsis thaliana
accgcaggttgttgttc

SEQ ID NO: 20738 - DNA, 17 bp, Arabidopsis thaliana
accgcagtgttctgcgc

SEQ ID NO: 20739 - DNA, 17 bp, Arabidopsis thaliana
accgcagtttgcaagac

SEQ ID NO: 20740 - DNA, 17 bp, Arabidopsis thaliana
accgcagtttgcgagac

SEQ ID NO: 20741 - DNA, 17 bp, Arabidopsis thaliana
accgcagtttgcgaggc

SEQ ID NO: 20742 - DNA, 17 bp, Arabidopsis thaliana
accgcataacgctgcgt

SEQ ID NO: 20743 - DNA, 17 bp, Arabidopsis thaliana
accgcatagcgcagtgg

SEQ ID NO: 20744 - DNA, 17 bp, Arabidopsis thaliana
accgcatagtccagtgc

SEQ ID NO: 20745 - DNA, 17 bp, Arabidopsis thaliana
accgcatagtgcgattc

SEQ ID NO: 20746 - DNA, 17 bp, Arabidopsis thaliana
accgcatttctaccggt

SEQ ID NO: 20747 - DNA, 17 bp, Arabidopsis thaliana
accgcatttgtggcaag

SEQ ID NO: 20748 - DNA, 17 bp, Arabidopsis thaliana
accgcatttttcctgca

SEQ ID NO: 20749 - DNA, 17 bp, Arabidopsis thaliana
accgccaaggatgtttt

SEQ ID NO: 20750 - DNA, 17 bp, Arabidopsis thaliana
accgccacaactgtctc

SEQ ID NO: 20751 - DNA, 17 bp, Arabidopsis thaliana
accgccagtccgttatt

SEQ ID NO: 20752 - DNA, 17 bp, Arabidopsis thaliana
accgccatagctgatcg

SEQ ID NO: 20753 - DNA, 17 bp, Arabidopsis thaliana
accgcccgtcacactat

SEQ ID NO: 20754 - DNA, 17 bp, Arabidopsis thaliana
accgcccgtcgctccta

SEQ ID NO: 20755 - DNA, 17 bp, Arabidopsis thaliana
accgcccgtcgcttacc

SEQ ID NO: 20756 - DNA, 17 bp, Arabidopsis thaliana
accgccctgttccgtat

SEQ ID NO: 20757 - DNA, 17 bp, Arabidopsis thaliana
accgccgaccgaccttg

SEQ ID NO: 20758 - DNA, 17 bp, Arabidopsis thaliana
accgccgccgttgcggg

SEQ ID NO: 20759 - DNA, 17 bp, Arabidopsis thaliana
accgccgcgtctctgct

SEQ ID NO: 20760 - DNA, 17 bp, Arabidopsis thaliana
accgccggctgtactac

SEQ ID NO: 20761 - DNA, 17 bp, Arabidopsis thaliana
accgccggctgtactag

SEQ ID NO: 20762 - DNA, 17 bp, Arabidopsis thaliana
accgccggtgcttgtcg

SEQ ID NO: 20763 - DNA, 17 bp, Arabidopsis thaliana
accgccgtctgcgttta

SEQ ID NO: 20764 - DNA, 17 bp, Arabidopsis thaliana
accgcctaacggatgtg

SEQ ID NO: 20765 - DNA, 17 bp, Arabidopsis thaliana
accgcgaagggacgctc

SEQ ID NO: 20766 - DNA, 17 bp, Arabidopsis thaliana
accgcgactgacttatt

SEQ ID NO: 20767 - DNA, 17 bp, Arabidopsis thaliana
accgcgacttccgctgg

SEQ ID NO: 20768 - DNA, 17 bp, Arabidopsis thaliana
accgcgattgtgattaa

SEQ ID NO: 20769 - DNA, 17 bp, Arabidopsis thaliana
accgcgattgtgattta

SEQ ID NO: 20770 - DNA, 17 bp, Arabidopsis thaliana
accgcggacggtgttct

SEQ ID NO: 20771 - DNA, 17 bp, Arabidopsis thaliana
accgcggatctatttag

SEQ ID NO: 20772 - DNA, 17 bp, Arabidopsis thaliana
accgcggcctcgtcctt

SEQ ID NO: 20773 - DNA, 17 bp, Arabidopsis thaliana
accgcgggacgatttat

SEQ ID NO: 20774 - DNA, 17 bp, Arabidopsis thaliana
accgcgggattaggttt

SEQ ID NO: 20775 - DNA, 17 bp, Arabidopsis thaliana
accgcgggccaatctct

SEQ ID NO: 20776 - DNA, 17 bp, Arabidopsis thaliana
accgcggggttagatgg

SEQ ID NO: 20777 - DNA, 17 bp, Arabidopsis thaliana
accgcggggttaggttt

SEQ ID NO: 20778 - DNA, 17 bp, Arabidopsis thaliana
accgcgggttaaaatct

SEQ ID NO: 20779 - DNA, 17 bp, Arabidopsis thaliana
accgcgggttagaatct

SEQ ID NO: 20780 - DNA, 17 bp, Arabidopsis thaliana
accgcgtgacgccgcgt

SEQ ID NO: 20781 - DNA, 17 bp, Arabidopsis thaliana
accgcgttgattgcggc

SEQ ID NO: 20782 - DNA, 17 bp, Arabidopsis thaliana
accgctaaggagtgtgt

SEQ ID NO: 20783 - DNA, 17 bp, Arabidopsis thaliana
accgctaatgtgaacta

SEQ ID NO: 20784 - DNA, 17 bp, Arabidopsis thaliana
accgctacactgcttat

SEQ ID NO: 20785 - DNA, 17 bp, Arabidopsis thaliana
accgctaccgcccgcaa

SEQ ID NO: 20786 - DNA, 17 bp, Arabidopsis thaliana
accgctacgaccgatcg

SEQ ID NO: 20787 - DNA, 17 bp, Arabidopsis thaliana
accgctagataccgctt

SEQ ID NO: 20788 - DNA, 17 bp, Arabidopsis thaliana
accgctagctgagtcac

SEQ ID NO: 20789 - DNA, 17 bp, Arabidopsis thaliana
accgctaggagtgaaag

SEQ ID NO: 20790 - DNA, 17 bp, Arabidopsis thaliana
accgctagttctaacta

SEQ ID NO: 20791 - DNA, 17 bp, Arabidopsis thaliana
accgctagttctaactg

SEQ ID NO: 20792 - DNA, 17 bp, Arabidopsis thaliana
accgctattacgctctt

SEQ ID NO: 20793 - DNA, 17 bp, Arabidopsis thaliana
accgctattgtgattta

SEQ ID NO: 20794 - DNA, 17 bp, Arabidopsis thaliana
accgctattttcgtcat

SEQ ID NO: 20795 - DNA, 17 bp, Arabidopsis thaliana
accgctcaccctgtgtc

SEQ ID NO: 20796 - DNA, 17 bp, Arabidopsis thaliana
accgctcaggacaggga

SEQ ID NO: 20797 - DNA, 17 bp, Arabidopsis thaliana
accgctccaagcctctt

SEQ ID NO: 20798 - DNA, 17 bp, Arabidopsis thaliana
accgctccttcttactt

SEQ ID NO: 20799 - DNA, 17 bp, Arabidopsis thaliana
accgctcgatactccga

SEQ ID NO: 20800 - DNA, 17 bp, Arabidopsis thaliana
accgctcggacaaacat

SEQ ID NO: 20801 - DNA, 17 bp, Arabidopsis thaliana
accgctcggttatggat

SEQ ID NO: 20802 - DNA, 17 bp, Arabidopsis thaliana
accgctcgtggtgcaac

SEQ ID NO: 20803 - DNA, 17 bp, Arabidopsis thaliana
accgctctacaattcat

SEQ ID NO: 20804 - DNA, 17 bp, Arabidopsis thaliana
accgctctacaatttat

SEQ ID NO: 20805 - DNA, 17 bp, Arabidopsis thaliana
accgctgacggattaat

SEQ ID NO: 20806 - DNA, 17 bp, Arabidopsis thaliana
accgctgacggattagt

SEQ ID NO: 20807 - DNA, 17 bp, Arabidopsis thaliana
accgctgcagttggtct

SEQ ID NO: 20808 - DNA, 17 bp, Arabidopsis thaliana
accgctgcgcaggtaat

SEQ ID NO: 20809 - DNA, 17 bp, Arabidopsis thaliana
accgctgcggaccatct

SEQ ID NO: 20810 - DNA, 17 bp, Arabidopsis thaliana
accgctgctatgtggat

SEQ ID NO: 20811 - DNA, 17 bp, Arabidopsis thaliana
accgctggaactccctc

SEQ ID NO: 20812 - DNA, 17 bp, Arabidopsis thaliana
accgctggcgatatcga

SEQ ID NO: 20813 - DNA, 17 bp, Arabidopsis thaliana
accgctggctgtaccat

SEQ ID NO: 20814 - DNA, 17 bp, Arabidopsis thaliana
accgctgggcatggtct

SEQ ID NO: 20815 - DNA, 17 bp, Arabidopsis thaliana
accgctggggctactct

SEQ ID NO: 20816 - DNA, 17 bp, Arabidopsis thaliana
accgctgtccaccgcca

SEQ ID NO: 20817 - DNA, 17 bp, Arabidopsis thaliana
accgctgttcacgaact

SEQ ID NO: 20818 - DNA, 17 bp, Arabidopsis thaliana
accgcttagggctttgg

SEQ ID NO: 20819 - DNA, 17 bp, Arabidopsis thaliana
accgcttaggggtttgg

SEQ ID NO: 20820 - DNA, 17 bp, Arabidopsis thaliana
accgcttattgtgtact

SEQ ID NO: 20821 - DNA, 17 bp, Arabidopsis thaliana
accgcttcatgcagaac

SEQ ID NO: 20822 - DNA, 17 bp, Arabidopsis thaliana
accgcttccagcttgtt

SEQ ID NO: 20823 - DNA, 17 bp, Arabidopsis thaliana
accgcttctaagcaggt

SEQ ID NO: 20824 - DNA, 17 bp, Arabidopsis thaliana
accgcttctgctaaacc

SEQ ID NO: 20825 - DNA, 17 bp, Arabidopsis thaliana
accgcttcttcgaaggg

SEQ ID NO: 20826 - DNA, 17 bp, Arabidopsis thaliana
accgcttgaaccgcatt

SEQ ID NO: 20827 - DNA, 17 bp, Arabidopsis thaliana
accgcttgctacttggt

SEQ ID NO: 20828 - DNA, 17 bp, Arabidopsis thaliana
accgctttactatagga

SEQ ID NO: 20829 - DNA, 17 bp, Arabidopsis thaliana
accgctttatctgctct

SEQ ID NO: 20830 - DNA, 17 bp, Arabidopsis thaliana
accgctttatgttcttc

SEQ ID NO: 20831 - DNA, 17 bp, Arabidopsis thaliana
accgctttctccatctc

SEQ ID NO: 20832 - DNA, 17 bp, Arabidopsis thaliana
accgctttgattggcgt

SEQ ID NO: 20833 - DNA, 17 bp, Arabidopsis thaliana
accgctttggaccgctt

SEQ ID NO: 20834 - DNA, 17 bp, Arabidopsis thaliana
accgctttggccgagtg

SEQ ID NO: 20835 - DNA, 17 bp, Arabidopsis thaliana
accgctttgtccgctgc

SEQ ID NO: 20836 - DNA, 17 bp, Arabidopsis thaliana
accgctttgtccgttac

SEQ ID NO: 20837 - DNA, 17 bp, Arabidopsis thaliana
accggaaaatcggttag

SEQ ID NO: 20838 - DNA, 17 bp, Arabidopsis thaliana
accggaaccaccggatc

SEQ ID NO: 20839 - DNA, 17 bp, Arabidopsis thaliana
accggaacccatttggt

SEQ ID NO: 20840 - DNA, 17 bp, Arabidopsis thaliana
accggaactctctgact

SEQ ID NO: 20841 - DNA, 17 bp, Arabidopsis thaliana
accggaactcttggccg

SEQ ID NO: 20842 - DNA, 17 bp, Arabidopsis thaliana
accggaactgttccact

SEQ ID NO: 20843 - DNA, 17 bp, Arabidopsis thaliana
accggaagactaggttt

SEQ ID NO: 20844 - DNA, 17 bp, Arabidopsis thaliana
accggaagccgggttac

SEQ ID NO: 20845 - DNA, 17 bp, Arabidopsis thaliana
accggaagccgggttag

SEQ ID NO: 20846 - DNA, 17 bp, Arabidopsis thaliana
accggaagtcctcgtgt

SEQ ID NO: 20847 - DNA, 17 bp, Arabidopsis thaliana
accggacgacgacttct

SEQ ID NO: 20848 - DNA, 17 bp, Arabidopsis thaliana
accggacgagttggcgg

SEQ ID NO: 20849 - DNA, 17 bp, Arabidopsis thaliana
accggacggctaaatct

SEQ ID NO: 20850 - DNA, 17 bp, Arabidopsis thaliana
accggacgggttggcgg

SEQ ID NO: 20851 - DNA, 17 bp, Arabidopsis thaliana
accggactatcttttgg

SEQ ID NO: 20852 - DNA, 17 bp, Arabidopsis thaliana
accggactttggatccc

SEQ ID NO: 20853 - DNA, 17 bp, Arabidopsis thaliana
accggagaacggtgaac

SEQ ID NO: 20854 - DNA, 17 bp, Arabidopsis thaliana
accggagaagcgtttgg

SEQ ID NO: 20855 - DNA, 17 bp, Arabidopsis thaliana
accggagaagtgaggcc

SEQ ID NO: 20856 - DNA, 17 bp, Arabidopsis thaliana
accggagagaggcgtcg

SEQ ID NO: 20857 - DNA, 17 bp, Arabidopsis thaliana
accggagtcaaacattc

SEQ ID NO: 20858 - DNA, 17 bp, Arabidopsis thaliana
accggagtggacaagtc

SEQ ID NO: 20859 - DNA, 17 bp, Arabidopsis thaliana
accggagttccgtacga

SEQ ID NO: 20860 - DNA, 17 bp, Arabidopsis thaliana
accggagttgcagaagg

SEQ ID NO: 20861 - DNA, 17 bp, Arabidopsis thaliana
accggatactgcaccag

SEQ ID NO: 20862 - DNA, 17 bp, Arabidopsis thaliana
accggatcactggattc

SEQ ID NO: 20863 - DNA, 17 bp, Arabidopsis thaliana
accggatcagccgatag

SEQ ID NO: 20864 - DNA, 17 bp, Arabidopsis thaliana
accggatcagtcgatag

SEQ ID NO: 20865 - DNA, 17 bp, Arabidopsis thaliana
accggatcccatcagaa

SEQ ID NO: 20866 - DNA, 17 bp, Arabidopsis thaliana
accggatcccctctcga

SEQ ID NO: 20867 - DNA, 17 bp, Arabidopsis thaliana
accggatcggtggcgca

SEQ ID NO: 20868 - DNA, 17 bp, Arabidopsis thaliana
accggatctctcttttt

SEQ ID NO: 20869 - DNA, 17 bp, Arabidopsis thaliana
accggatctgcaaggcg

SEQ ID NO: 20870 - DNA, 17 bp, Arabidopsis thaliana
accggatcttaaaggcg

SEQ ID NO: 20871 - DNA, 17 bp, Arabidopsis thaliana
accggatcttagaggcg

SEQ ID NO: 20872 - DNA, 17 bp, Arabidopsis thaliana
accggatggagcagtgc

SEQ ID NO: 20873 - DNA, 17 bp, Arabidopsis thaliana
accggatggttgtgaaa

SEQ ID NO: 20874 - DNA, 17 bp, Arabidopsis thaliana
accggatggttgtgtaa

SEQ ID NO: 20875 - DNA, 17 bp, Arabidopsis thaliana
accggatgtagccaagt

SEQ ID NO: 20876 - DNA, 17 bp, Arabidopsis thaliana
accggatgtatgcagag

SEQ ID NO: 20877 - DNA, 17 bp, Arabidopsis thaliana
accggatgtggttgtct

SEQ ID NO: 20878 - DNA, 17 bp, Arabidopsis thaliana
accggatgtttgatggg

SEQ ID NO: 20879 - DNA, 17 bp, Arabidopsis thaliana
accggattggtcggaac

SEQ ID NO: 20880 - DNA, 17 bp, Arabidopsis thaliana
accggatttccagcagg

SEQ ID NO: 20881 - DNA, 17 bp, Arabidopsis thaliana
accggatttgctgcttg

SEQ ID NO: 20882 - DNA, 17 bp, Arabidopsis thaliana
accggattttggatcca

SEQ ID NO: 20883 - DNA, 17 bp, Arabidopsis thaliana
accggcaaagtcatttc

SEQ ID NO: 20884 - DNA, 17 bp, Arabidopsis thaliana
accggcaacctctaaga

SEQ ID NO: 20885 - DNA, 17 bp, Arabidopsis thaliana
accggcaatgttgaccc

SEQ ID NO: 20886 - DNA, 17 bp, Arabidopsis thaliana
accggcagactcttcgg

SEQ ID NO: 20887 - DNA, 17 bp, Arabidopsis thaliana
accggcagtagcactcc

SEQ ID NO: 20888 - DNA, 17 bp, Arabidopsis thaliana
accggccaactgggaca

SEQ ID NO: 20889 - DNA, 17 bp, Arabidopsis thaliana
accggccgggggacgga

SEQ ID NO: 20890 - DNA, 17 bp, Arabidopsis thaliana
accggccgtgagcacaa

SEQ ID NO: 20891 - DNA, 17 bp, Arabidopsis thaliana
accggcgaagcctcacg

SEQ ID NO: 20892 - DNA, 17 bp, Arabidopsis thaliana
accggcgacctctaagc

SEQ ID NO: 20893 - DNA, 17 bp, Arabidopsis thaliana
accggcgacgaaatcct

SEQ ID NO: 20894 - DNA, 17 bp, Arabidopsis thaliana
accggcgactacttgat

SEQ ID NO: 20895 - DNA, 17 bp, Arabidopsis thaliana
accggcgactgcaattt

SEQ ID NO: 20896 - DNA, 17 bp, Arabidopsis thaliana
accggcgactgcacttt

SEQ ID NO: 20897 - DNA, 17 bp, Arabidopsis thaliana
accggcgagttgattgg

SEQ ID NO: 20898 - DNA, 17 bp, Arabidopsis thaliana
accggcgatcagttctc

SEQ ID NO: 20899 - DNA, 17 bp, Arabidopsis thaliana
accggcgattgtcaacc

SEQ ID NO: 20900 - DNA, 17 bp, Arabidopsis thaliana
accggcgatttcgattg

SEQ ID NO: 20901 - DNA, 17 bp, Arabidopsis thaliana
accggcggctacttgat

SEQ ID NO: 20902 - DNA, 17 bp, Arabidopsis thaliana
accggcgttttcggcga

SEQ ID NO: 20903 - DNA, 17 bp, Arabidopsis thaliana
accggctaataagtgtt

SEQ ID NO: 20904 - DNA, 17 bp, Arabidopsis thaliana
accggctaccgttatcc

SEQ ID NO: 20905 - DNA, 17 bp, Arabidopsis thaliana
accggctctacaaatca

SEQ ID NO: 20906 - DNA, 17 bp, Arabidopsis thaliana
accggcttacacgtgcc

SEQ ID NO: 20907 - DNA, 17 bp, Arabidopsis thaliana
accggcttacacgtgtc

SEQ ID NO: 20908 - DNA, 17 bp, Arabidopsis thaliana
accgggaagcgatagcc

SEQ ID NO: 20909 - DNA, 17 bp, Arabidopsis thaliana
accgggaagtcctcgtg

SEQ ID NO: 20910 - DNA, 17 bp, Arabidopsis thaliana
accgggacgtggcgatt

SEQ ID NO: 20911 - DNA, 17 bp, Arabidopsis thaliana
accgggacgtggcggtg

SEQ ID NO: 20912 - DNA, 17 bp, Arabidopsis thaliana
accgggacgtggcggtt

SEQ ID NO: 20913 - DNA, 17 bp, Arabidopsis thaliana
accgggactaaccgaat

SEQ ID NO: 20914 - DNA, 17 bp, Arabidopsis thaliana
accgggactgagcggat

SEQ ID NO: 20915 - DNA, 17 bp, Arabidopsis thaliana
accgggatgatcggata

SEQ ID NO: 20916 - DNA, 17 bp, Arabidopsis thaliana
accgggccgacagaccg

SEQ ID NO: 20917 - DNA, 17 bp, Arabidopsis thaliana
accgggccgacgtactt

SEQ ID NO: 20918 - DNA, 17 bp, Arabidopsis thaliana
accggggaaacttacca

SEQ ID NO: 20919 - DNA, 17 bp, Arabidopsis thaliana
accgggtcacgggttaa

SEQ ID NO: 20920 - DNA, 17 bp, Arabidopsis thaliana
accgggtccatgtatgt

SEQ ID NO: 20921 - DNA, 17 bp, Arabidopsis thaliana
accgggtcccaattctt

SEQ ID NO: 20922 - DNA, 17 bp, Arabidopsis thaliana
accgggtccgaggattt

SEQ ID NO: 20923 - DNA, 17 bp, Arabidopsis thaliana
accgggtcctgatggtc

SEQ ID NO: 20924 - DNA, 17 bp, Arabidopsis thaliana
accgggtgccgtagcca

SEQ ID NO: 20925 - DNA, 17 bp, Arabidopsis thaliana
accgggtgcgacggatt

SEQ ID NO: 20926 - DNA, 17 bp, Arabidopsis thaliana
accgggtgtatctgact

SEQ ID NO: 20927 - DNA, 17 bp, Arabidopsis thaliana
accgggtgtgtcactca

SEQ ID NO: 20928 - DNA, 17 bp, Arabidopsis thaliana
accgggttacatggact

SEQ ID NO: 20929 - DNA, 17 bp, Arabidopsis thaliana
accgggttcgtttcccc

SEQ ID NO: 20930 - DNA, 17 bp, Arabidopsis thaliana
accgggttcgtttcccg

SEQ ID NO: 20931 - DNA, 17 bp, Arabidopsis thaliana
accgggttttttgattt

SEQ ID NO: 20932 - DNA, 17 bp, Arabidopsis thaliana
accggtaaaatctctgc

SEQ ID NO: 20933 - DNA, 17 bp, Arabidopsis thaliana
accggtagacttgaacc

SEQ ID NO: 20934 - DNA, 17 bp, Arabidopsis thaliana
accggtatccggtaggg

SEQ ID NO: 20935 - DNA, 17 bp, Arabidopsis thaliana
accggtcaacgagactt

SEQ ID NO: 20936 - DNA, 17 bp, Arabidopsis thaliana
accggtcagacctgttc

SEQ ID NO: 20937 - DNA, 17 bp, Arabidopsis thaliana
accggtccgcctttggt

SEQ ID NO: 20938 - DNA, 17 bp, Arabidopsis thaliana
accggtcctgtggatga

SEQ ID NO: 20939 - DNA, 17 bp, Arabidopsis thaliana
accggtcgagccggcga

SEQ ID NO: 20940 - DNA, 17 bp, Arabidopsis thaliana
accggtcggtctaacgt

SEQ ID NO: 20941 - DNA, 17 bp, Arabidopsis thaliana
accggtgaccttaagtt

SEQ ID NO: 20942 - DNA, 17 bp, Arabidopsis thaliana
accggtgagtgagtatg

SEQ ID NO: 20943 - DNA, 17 bp, Arabidopsis thaliana
accggtgatgtgccgtg

SEQ ID NO: 20944 - DNA, 17 bp, Arabidopsis thaliana
accggtgcaccagcagc

SEQ ID NO: 20945 - DNA, 17 bp, Arabidopsis thaliana
accggtggattaagttg

SEQ ID NO: 20946 - DNA, 17 bp, Arabidopsis thaliana
accggtggctacttgat

SEQ ID NO: 20947 - DNA, 17 bp, Arabidopsis thaliana
accggtggtcccacttt

SEQ ID NO: 20948 - DNA, 17 bp, Arabidopsis thaliana
accggtggtgccaatgg

SEQ ID NO: 20949 - DNA, 17 bp, Arabidopsis thaliana
accggtgtagacttggg

SEQ ID NO: 20950 - DNA, 17 bp, Arabidopsis thaliana
accggtgtgcgacagct

SEQ ID NO: 20951 - DNA, 17 bp, Arabidopsis thaliana
accggttactgggaaga

SEQ ID NO: 20952 - DNA, 17 bp, Arabidopsis thaliana
accggttagcagattaa

SEQ ID NO: 20953 - DNA, 17 bp, Arabidopsis thaliana
accggttaggattgtgt

SEQ ID NO: 20954 - DNA, 17 bp, Arabidopsis thaliana
accggttatgcttctgt

SEQ ID NO: 20955 - DNA, 17 bp, Arabidopsis thaliana
accggttcaccgagtca

SEQ ID NO: 20956 - DNA, 17 bp, Arabidopsis thaliana
accggttcaccgggtca

SEQ ID NO: 20957 - DNA, 17 bp, Arabidopsis thaliana
accggttcaggagttac

SEQ ID NO: 20958 - DNA, 17 bp, Arabidopsis thaliana
accggttcatcgggtca

SEQ ID NO: 20959 - DNA, 17 bp, Arabidopsis thaliana
accggttccaagtcagg

SEQ ID NO: 20960 - DNA, 17 bp, Arabidopsis thaliana
accggttgaaccggccg

SEQ ID NO: 20961 - DNA, 17 bp, Arabidopsis thaliana
accggttgaaccgtgac

SEQ ID NO: 20962 - DNA, 17 bp, Arabidopsis thaliana
accggttgaatcggcgg

SEQ ID NO: 20963 - DNA, 17 bp, Arabidopsis thaliana
accggttgaatcggctg

SEQ ID NO: 20964 - DNA, 17 bp, Arabidopsis thaliana
accggttgaggtgtcgt

SEQ ID NO: 20965 - DNA, 17 bp, Arabidopsis thaliana
accggttgatacccatc

SEQ ID NO: 20966 - DNA, 17 bp, Arabidopsis thaliana
accggttgcaacaccgc

SEQ ID NO: 20967 - DNA, 17 bp, Arabidopsis thaliana
accggttgcggttctag

SEQ ID NO: 20968 - DNA, 17 bp, Arabidopsis thaliana
accggttgttagcgatt

SEQ ID NO: 20969 - DNA, 17 bp, Arabidopsis thaliana
accggtttcatcgtctt

SEQ ID NO: 20970 - DNA, 17 bp, Arabidopsis thaliana
accggtttctctttcac

SEQ ID NO: 20971 - DNA, 17 bp, Arabidopsis thaliana
accggtttgacgtttgg

SEQ ID NO: 20972 - DNA, 17 bp, Arabidopsis thaliana
accggtttgtatcaggt

SEQ ID NO: 20973 - DNA, 17 bp, Arabidopsis thaliana
accggttttgacccaga

SEQ ID NO: 20974 - DNA, 17 bp, Arabidopsis thaliana
accgtaaacatgactgc

SEQ ID NO: 20975 - DNA, 17 bp, Arabidopsis thaliana
accgtaaaccgatgttt

SEQ ID NO: 20976 - DNA, 17 bp, Arabidopsis thaliana
accgtaaacctgttggt

SEQ ID NO: 20977 - DNA, 17 bp, Arabidopsis thaliana
accgtaaagccgcaatt

SEQ ID NO: 20978 - DNA, 17 bp, Arabidopsis thaliana
accgtaacccggcttcc

SEQ ID NO: 20979 - DNA, 17 bp, Arabidopsis thaliana
accgtaacgaagatgtt

SEQ ID NO: 20980 - DNA, 17 bp, Arabidopsis thaliana
accgtaactcagccgtg

SEQ ID NO: 20981 - DNA, 17 bp, Arabidopsis thaliana
accgtaactttttaccg

SEQ ID NO: 20982 - DNA, 17 bp, Arabidopsis thaliana
accgtaagctcccaagc

SEQ ID NO: 20983 - DNA, 17 bp, Arabidopsis thaliana
accgtaatatgcgtttt

SEQ ID NO: 20984 - DNA, 17 bp, Arabidopsis thaliana
accgtaatccgcgtcgg

SEQ ID NO: 20985 - DNA, 17 bp, Arabidopsis thaliana
accgtaccgtatcatgt

SEQ ID NO: 20986 - DNA, 17 bp, Arabidopsis thaliana
accgtacgtctacagct

SEQ ID NO: 20987 - DNA, 17 bp, Arabidopsis thaliana
accgtactcgcgtatgt

SEQ ID NO: 20988 - DNA, 17 bp, Arabidopsis thaliana
accgtacttgtcccgca

SEQ ID NO: 20989 - DNA, 17 bp, Arabidopsis thaliana
accgtagaccaactccg

SEQ ID NO: 20990 - DNA, 17 bp, Arabidopsis thaliana
accgtagacggtttcgt

SEQ ID NO: 20991 - DNA, 17 bp, Arabidopsis thaliana
accgtagaggttgtcta

SEQ ID NO: 20992 - DNA, 17 bp, Arabidopsis thaliana
accgtagattcctttgc

SEQ ID NO: 20993 - DNA, 17 bp, Arabidopsis thaliana
accgtatacagggccgg

SEQ ID NO: 20994 - DNA, 17 bp, Arabidopsis thaliana
accgtatatcccgcgtt

SEQ ID NO: 20995 - DNA, 17 bp, Arabidopsis thaliana
accgtatatttttggct

SEQ ID NO: 20996 - DNA, 17 bp, Arabidopsis thaliana
accgtatcagtgatgtg

SEQ ID NO: 20997 - DNA, 17 bp, Arabidopsis thaliana
accgtatccaagctccg

SEQ ID NO: 20998 - DNA, 17 bp, Arabidopsis thaliana
accgtatccctacatag

SEQ ID NO: 20999 - DNA, 17 bp, Arabidopsis thaliana
accgtatcttggttatg

SEQ ID NO: 21000 - DNA, 17 bp, Arabidopsis thaliana
accgtatcttggttatt

SEQ ID NO: 21001 - DNA, 17 bp, Arabidopsis thaliana
accgtatggacaatggg

SEQ ID NO: 21002 - DNA, 17 bp, Arabidopsis thaliana
accgtatgttgtcacgt

SEQ ID NO: 21003 - DNA, 17 bp, Arabidopsis thaliana
accgtatgtttgttgat

SEQ ID NO: 21004 - DNA, 17 bp, Arabidopsis thaliana
accgtattcttcttcga

SEQ ID NO: 21005 - DNA, 17 bp, Arabidopsis thaliana
accgtattgtgcgattt

SEQ ID NO: 21006 - DNA, 17 bp, Arabidopsis thaliana
accgtcaatggatcaga

SEQ ID NO: 21007 - DNA, 17 bp, Arabidopsis thaliana
accgtcaatgtctgaga

SEQ ID NO: 21008 - DNA, 17 bp, Arabidopsis thaliana
accgtcaatgtctgccc

SEQ ID NO: 21009 - DNA, 17 bp, Arabidopsis thaliana
accgtcaatgtgccaca

SEQ ID NO: 21010 - DNA, 17 bp, Arabidopsis thaliana
accgtcactcgaaccgg

SEQ ID NO: 21011 - DNA, 17 bp, Arabidopsis thaliana
accgtcagagtcaccgc

SEQ ID NO: 21012 - DNA, 17 bp, Arabidopsis thaliana
accgtcagctattgcgt

SEQ ID NO: 21013 - DNA, 17 bp, Arabidopsis thaliana
accgtcagcttgtgatg

SEQ ID NO: 21014 - DNA, 17 bp, Arabidopsis thaliana
accgtcatgtacttcat

SEQ ID NO: 21015 - DNA, 17 bp, Arabidopsis thaliana
accgtccgcctttggtg

SEQ ID NO: 21016 - DNA, 17 bp, Arabidopsis thaliana
accgtccggccgccggg

SEQ ID NO: 21017 - DNA, 17 bp, Arabidopsis thaliana
accgtcctctaggtgca

SEQ ID NO: 21018 - DNA, 17 bp, Arabidopsis thaliana
accgtcgacaacttttc

SEQ ID NO: 21019 - DNA, 17 bp, Arabidopsis thaliana
accgtcgacaagggagg

SEQ ID NO: 21020 - DNA, 17 bp, Arabidopsis thaliana
accgtcgattgaactga

SEQ ID NO: 21021 - DNA, 17 bp, Arabidopsis thaliana
accgtcgccgttcgcgc

SEQ ID NO: 21022 - DNA, 17 bp, Arabidopsis thaliana
accgtcgctaaacaggt

SEQ ID NO: 21023 - DNA, 17 bp, Arabidopsis thaliana
accgtcgctgtcgccgg

SEQ ID NO: 21024 - DNA, 17 bp, Arabidopsis thaliana
accgtcggatctatcga

SEQ ID NO: 21025 - DNA, 17 bp, Arabidopsis thaliana
accgtcgggatcggtga

SEQ ID NO: 21026 - DNA, 17 bp, Arabidopsis thaliana
accgtcggttgagatga

SEQ ID NO: 21027 - DNA, 17 bp, Arabidopsis thaliana
accgtcgtctattttta

SEQ ID NO: 21028 - DNA, 17 bp, Arabidopsis thaliana
accgtcgtcttcggtcg

SEQ ID NO: 21029 - DNA, 17 bp, Arabidopsis thaliana
accgtcgtgagacaggt

SEQ ID NO: 21030 - DNA, 17 bp, Arabidopsis thaliana
accgtcgtgtagacaac

SEQ ID NO: 21031 - DNA, 17 bp, Arabidopsis thaliana
accgtcgttgaacgacc

SEQ ID NO: 21032 - DNA, 17 bp, Arabidopsis thaliana
accgtcgtttagatctg

SEQ ID NO: 21033 - DNA, 17 bp, Arabidopsis thaliana
accgtctaagcgttagg

SEQ ID NO: 21034 - DNA, 17 bp, Arabidopsis thaliana
accgtctagcgtaggcg

SEQ ID NO: 21035 - DNA, 17 bp, Arabidopsis thaliana
accgtctagggtttcct

SEQ ID NO: 21036 - DNA, 17 bp, Arabidopsis thaliana
accgtctcggccccgaa

SEQ ID NO: 21037 - DNA, 17 bp, Arabidopsis thaliana
accgtctgacgcgtctt

SEQ ID NO: 21038 - DNA, 17 bp, Arabidopsis thaliana
accgtctgatttcctta

SEQ ID NO: 21039 - DNA, 17 bp, Arabidopsis thaliana
accgtctgcctgggtgt

SEQ ID NO: 21040 - DNA, 17 bp, Arabidopsis thaliana
accgtcttagcttgtgg

SEQ ID NO: 21041 - DNA, 17 bp, Arabidopsis thaliana
accgtcttgacttcgtg

SEQ ID NO: 21042 - DNA, 17 bp, Arabidopsis thaliana
accgtcttgagacaggt

SEQ ID NO: 21043 - DNA, 17 bp, Arabidopsis thaliana
accgtctttagaaagat

SEQ ID NO: 21044 - DNA, 17 bp, Arabidopsis thaliana
accgtgaaagcatggcc

SEQ ID NO: 21045 - DNA, 17 bp, Arabidopsis thaliana
accgtgaaagcgtggcc

SEQ ID NO: 21046 - DNA, 17 bp, Arabidopsis thaliana
accgtgaaagtagatca

SEQ ID NO: 21047 - DNA, 17 bp, Arabidopsis thaliana
accgtgaactcgtgaaa

SEQ ID NO: 21048 - DNA, 17 bp, Arabidopsis thaliana
accgtgaactcttgaaa

SEQ ID NO: 21049 - DNA, 17 bp, Arabidopsis thaliana
accgtgacacaattagg

SEQ ID NO: 21050 - DNA, 17 bp, Arabidopsis thaliana
accgtgacacaatttgg

SEQ ID NO: 21051 - DNA, 17 bp, Arabidopsis thaliana
accgtgacagcctaggc

SEQ ID NO: 21052 - DNA, 17 bp, Arabidopsis thaliana
accgtgaccaaaagttg

SEQ ID NO: 21053 - DNA, 17 bp, Arabidopsis thaliana
accgtgacccggtgaac

SEQ ID NO: 21054 - DNA, 17 bp, Arabidopsis thaliana
accgtgacgccatcgct

SEQ ID NO: 21055 - DNA, 17 bp, Arabidopsis thaliana
accgtgactgatttgtt

SEQ ID NO: 21056 - DNA, 17 bp, Arabidopsis thaliana
accgtgagaccaaactt

SEQ ID NO: 21057 - DNA, 17 bp, Arabidopsis thaliana
accgtgagactcgttat

SEQ ID NO: 21058 - DNA, 17 bp, Arabidopsis thaliana
accgtgagagtcaccgc

SEQ ID NO: 21059 - DNA, 17 bp, Arabidopsis thaliana
accgtgagcccaaacta

SEQ ID NO: 21060 - DNA, 17 bp, Arabidopsis thaliana
accgtgagcccaaactt

SEQ ID NO: 21061 - DNA, 17 bp, Arabidopsis thaliana
accgtgagcccaaattt

SEQ ID NO: 21062 - DNA, 17 bp, Arabidopsis thaliana
accgtgagctcgtgaaa

SEQ ID NO: 21063 - DNA, 17 bp, Arabidopsis thaliana
accgtgaggccaaacta

SEQ ID NO: 21064 - DNA, 17 bp, Arabidopsis thaliana
accgtgaggccaaactt

SEQ ID NO: 21065 - DNA, 17 bp, Arabidopsis thaliana
accgtgaggccaaattt

SEQ ID NO: 21066 - DNA, 17 bp, Arabidopsis thaliana
accgtgaggccaagctt

SEQ ID NO: 21067 - DNA, 17 bp, Arabidopsis thaliana
accgtgaggccgaactt

SEQ ID NO: 21068 - DNA, 17 bp, Arabidopsis thaliana
accgtgagtccaaactt

SEQ ID NO: 21069 - DNA, 17 bp, Arabidopsis thaliana
accgtgatctgagcaat

SEQ ID NO: 21070 - DNA, 17 bp, Arabidopsis thaliana
accgtgatgacaatgcc

SEQ ID NO: 21071 - DNA, 17 bp, Arabidopsis thaliana
accgtgatttccagccg

SEQ ID NO: 21072 - DNA, 17 bp, Arabidopsis thaliana
accgtgcattggtcggc

SEQ ID NO: 21073 - DNA, 17 bp, Arabidopsis thaliana
accgtgcgctggattat

SEQ ID NO: 21074 - DNA, 17 bp, Arabidopsis thaliana
accgtgcgctggattga

SEQ ID NO: 21075 - DNA, 17 bp, Arabidopsis thaliana
accgtgcgctggattgt

SEQ ID NO: 21076 - DNA, 17 bp, Arabidopsis thaliana
accgtgcggtttcgcca

SEQ ID NO: 21077 - DNA, 17 bp, Arabidopsis thaliana
accgtgctcaagcagat

SEQ ID NO: 21078 - DNA, 17 bp, Arabidopsis thaliana
accgtgctccaatggtc

SEQ ID NO: 21079 - DNA, 17 bp, Arabidopsis thaliana
accgtgctctggattat

SEQ ID NO: 21080 - DNA, 17 bp, Arabidopsis thaliana
accgtggacacctttct

SEQ ID NO: 21081 - DNA, 17 bp, Arabidopsis thaliana
accgtggatatggcaga

SEQ ID NO: 21082 - DNA, 17 bp, Arabidopsis thaliana
accgtggggacaattta

SEQ ID NO: 21083 - DNA, 17 bp, Arabidopsis thaliana
accgtggtcgtgggttc

SEQ ID NO: 21084 - DNA, 17 bp, Arabidopsis thaliana
accgtgtacaaagggca

SEQ ID NO: 21085 - DNA, 17 bp, Arabidopsis thaliana
accgtgtatcggcaccg

SEQ ID NO: 21086 - DNA, 17 bp, Arabidopsis thaliana
accgtgtccagagcctg

SEQ ID NO: 21087 - DNA, 17 bp, Arabidopsis thaliana
accgtgtccgaggattc

SEQ ID NO: 21088 - DNA, 17 bp, Arabidopsis thaliana
accgtgtgattccaagc

SEQ ID NO: 21089 - DNA, 17 bp, Arabidopsis thaliana
accgttagacttggcac

SEQ ID NO: 21090 - DNA, 17 bp, Arabidopsis thaliana
accgttaggcatgacca

SEQ ID NO: 21091 - DNA, 17 bp, Arabidopsis thaliana
accgttatcgggtacgc

SEQ ID NO: 21092 - DNA, 17 bp, Arabidopsis thaliana
accgttatctgctgctg

SEQ ID NO: 21093 - DNA, 17 bp, Arabidopsis thaliana
accgttattacggttac

SEQ ID NO: 21094 - DNA, 17 bp, Arabidopsis thaliana
accgttattggagtggc

SEQ ID NO: 21095 - DNA, 17 bp, Arabidopsis thaliana
accgttattggagtggg

SEQ ID NO: 21096 - DNA, 17 bp, Arabidopsis thaliana
accgttattggtccatt

SEQ ID NO: 21097 - DNA, 17 bp, Arabidopsis thaliana
accgttatttgtatgtg

SEQ ID NO: 21098 - DNA, 17 bp, Arabidopsis thaliana
accgttcaacctcatct

SEQ ID NO: 21099 - DNA, 17 bp, Arabidopsis thaliana
accgttcaatccgctgt

SEQ ID NO: 21100 - DNA, 17 bp, Arabidopsis thaliana
accgttcaggccagacc

SEQ ID NO: 21101 - DNA, 17 bp, Arabidopsis thaliana
accgttccaaagacctt

SEQ ID NO: 21102 - DNA, 17 bp, Arabidopsis thaliana
accgttccagcttacta

SEQ ID NO: 21103 - DNA, 17 bp, Arabidopsis thaliana
accgttccagcttactt

SEQ ID NO: 21104 - DNA, 17 bp, Arabidopsis thaliana
accgttcgccctgggtc

SEQ ID NO: 21105 - DNA, 17 bp, Arabidopsis thaliana
accgttcgtccatgatg

SEQ ID NO: 21106 - DNA, 17 bp, Arabidopsis thaliana
accgttctatgagatac

SEQ ID NO: 21107 - DNA, 17 bp, Arabidopsis thaliana
accgttcttctacgaga

SEQ ID NO: 21108 - DNA, 17 bp, Arabidopsis thaliana
accgttctttgaaacga

SEQ ID NO: 21109 - DNA, 17 bp, Arabidopsis thaliana
accgttctttgaaacgc

SEQ ID NO: 21110 - DNA, 17 bp, Arabidopsis thaliana
accgttgaaaaacttct

SEQ ID NO: 21111 - DNA, 17 bp, Arabidopsis thaliana
accgttgaccagttttg

SEQ ID NO: 21112 - DNA, 17 bp, Arabidopsis thaliana
accgttgacccgataac

SEQ ID NO: 21113 - DNA, 17 bp, Arabidopsis thaliana
accgttgacggattagt

SEQ ID NO: 21114 - DNA, 17 bp, Arabidopsis thaliana
accgttgataaccggga

SEQ ID NO: 21115 - DNA, 17 bp, Arabidopsis thaliana
accgttgattcgcacaa

SEQ ID NO: 21116 - DNA, 17 bp, Arabidopsis thaliana
accgttgattcgcaccc

SEQ ID NO: 21117 - DNA, 17 bp, Arabidopsis thaliana
accgttgcggaccatct

SEQ ID NO: 21118 - DNA, 17 bp, Arabidopsis thaliana
accgttgctacaataaa

SEQ ID NO: 21119 - DNA, 17 bp, Arabidopsis thaliana
accgttgctacaataac

SEQ ID NO: 21120 - DNA, 17 bp, Arabidopsis thaliana
accgttgctacaataat

SEQ ID NO: 21121 - DNA, 17 bp, Arabidopsis thaliana
accgttgctacaatagc

SEQ ID NO: 21122 - DNA, 17 bp, Arabidopsis thaliana
accgttgctctgcttgg

SEQ ID NO: 21123 - DNA, 17 bp, Arabidopsis thaliana
accgttgctctgcttgt

SEQ ID NO: 21124 - DNA, 17 bp, Arabidopsis thaliana
accgttgctgtgattgc

SEQ ID NO: 21125 - DNA, 17 bp, Arabidopsis thaliana
accgttgctgttattgc

SEQ ID NO: 21126 - DNA, 17 bp, Arabidopsis thaliana
accgttggacatgctct

SEQ ID NO: 21127 - DNA, 17 bp, Arabidopsis thaliana
accgttggctaattcca

SEQ ID NO: 21128 - DNA, 17 bp, Arabidopsis thaliana
accgttggggctgctct

SEQ ID NO: 21129 - DNA, 17 bp, Arabidopsis thaliana
accgttggtgatcccgt

SEQ ID NO: 21130 - DNA, 17 bp, Arabidopsis thaliana
accgttggtggtgctct

SEQ ID NO: 21131 - DNA, 17 bp, Arabidopsis thaliana
accgttggttttgacta

SEQ ID NO: 21132 - DNA, 17 bp, Arabidopsis thaliana
accgttgttgcaaatcc

SEQ ID NO: 21133 - DNA, 17 bp, Arabidopsis thaliana
accgtttaggccaagga

SEQ ID NO: 21134 - DNA, 17 bp, Arabidopsis thaliana
accgtttcttattttgt

SEQ ID NO: 21135 - DNA, 17 bp, Arabidopsis thaliana
accgtttcttgtgattt

SEQ ID NO: 21136 - DNA, 17 bp, Arabidopsis thaliana
accgtttgaccaaggaa

SEQ ID NO: 21137 - DNA, 17 bp, Arabidopsis thaliana
accgtttgattcgtaca

SEQ ID NO: 21138 - DNA, 17 bp, Arabidopsis thaliana
accgtttgccccgaagc

SEQ ID NO: 21139 - DNA, 17 bp, Arabidopsis thaliana
accgtttgcggttgcgg

SEQ ID NO: 21140 - DNA, 17 bp, Arabidopsis thaliana
accgtttgctgaccgcc

SEQ ID NO: 21141 - DNA, 17 bp, Arabidopsis thaliana
accgtttggaccgtcat

SEQ ID NO: 21142 - DNA, 17 bp, Arabidopsis thaliana
accgtttggtctattgt

SEQ ID NO: 21143 - DNA, 17 bp, Arabidopsis thaliana
accgttttccggctttt

SEQ ID NO: 21144 - DNA, 17 bp, Arabidopsis thaliana
accgttttgcagttctc

SEQ ID NO: 21145 - DNA, 17 bp, Arabidopsis thaliana
accgtttttccgtggat

SEQ ID NO: 21146 - DNA, 17 bp, Arabidopsis thaliana
accgtttttggcaccaa

SEQ ID NO: 21147 - DNA, 17 bp, Arabidopsis thaliana
acctaaaggtaaaactc

SEQ ID NO: 21148 - DNA, 17 bp, Arabidopsis thaliana
acctaaatgactcttgt

SEQ ID NO: 21149 - DNA, 17 bp, Arabidopsis thaliana
acctaaatgatccatct

SEQ ID NO: 21150 - DNA, 17 bp, Arabidopsis thaliana
acctaaatggggtgggc

SEQ ID NO: 21151 - DNA, 17 bp, Arabidopsis thaliana
acctaaccacggttgaa

SEQ ID NO: 21152 - DNA, 17 bp, Arabidopsis thaliana
acctaaccattactggc

SEQ ID NO: 21153 - DNA, 17 bp, Arabidopsis thaliana
acctaaccgcatgcacc

SEQ ID NO: 21154 - DNA, 17 bp, Arabidopsis thaliana
acctaaccgctaccgcc

SEQ ID NO: 21155 - DNA, 17 bp, Arabidopsis thaliana
acctaagcggaaaattt

SEQ ID NO: 21156 - DNA, 17 bp, Arabidopsis thaliana
acctaaggggattacgg

SEQ ID NO: 21157 - DNA, 17 bp, Arabidopsis thaliana
acctaatattgccgaag

SEQ ID NO: 21158 - DNA, 17 bp, Arabidopsis thaliana
acctaatgcggaactgc

SEQ ID NO: 21159 - DNA, 17 bp, Arabidopsis thaliana
acctaattaacggatcc

SEQ ID NO: 21160 - DNA, 17 bp, Arabidopsis thaliana
acctaattgcctccggc

SEQ ID NO: 21161 - DNA, 17 bp, Arabidopsis thaliana
acctaattgtgctgccg

SEQ ID NO: 21162 - DNA, 17 bp, Arabidopsis thaliana
acctaatttctgagcgt

SEQ ID NO: 21163 - DNA, 17 bp, Arabidopsis thaliana
acctaatttttcagtct

SEQ ID NO: 21164 - DNA, 17 bp, Arabidopsis thaliana
acctacaaattacggcc

SEQ ID NO: 21165 - DNA, 17 bp, Arabidopsis thaliana
acctaccaatggaaaag

SEQ ID NO: 21166 - DNA, 17 bp, Arabidopsis thaliana
acctacccaagggttcc

SEQ ID NO: 21167 - DNA, 17 bp, Arabidopsis thaliana
acctaccgtccgccgga

SEQ ID NO: 21168 - DNA, 17 bp, Arabidopsis thaliana
acctacctggttgatcc

SEQ ID NO: 21169 - DNA, 17 bp, Arabidopsis thaliana
acctacgaagtcacggc

SEQ ID NO: 21170 - DNA, 17 bp, Arabidopsis thaliana
acctacgcagctgatga

SEQ ID NO: 21171 - DNA, 17 bp, Arabidopsis thaliana
acctacgcaggccagga

SEQ ID NO: 21172 - DNA, 17 bp, Arabidopsis thaliana
acctacgcgacgcctaa

SEQ ID NO: 21173 - DNA, 17 bp, Arabidopsis thaliana
acctacgggccaaggga

SEQ ID NO: 21174 - DNA, 17 bp, Arabidopsis thaliana
acctacgggtattagat

SEQ ID NO: 21175 - DNA, 17 bp, Arabidopsis thaliana
acctacgggttttttaa

SEQ ID NO: 21176 - DNA, 17 bp, Arabidopsis thaliana
acctacgtccgggttgt

SEQ ID NO: 21177 - DNA, 17 bp, Arabidopsis thaliana
acctactacggccgatt

SEQ ID NO: 21178 - DNA, 17 bp, Arabidopsis thaliana
acctactcggtttgtgg

SEQ ID NO: 21179 - DNA, 17 bp, Arabidopsis thaliana
acctactctttctctct

SEQ ID NO: 21180 - DNA, 17 bp, Arabidopsis thaliana
acctacttcttggttgt

SEQ ID NO: 21181 - DNA, 17 bp, Arabidopsis thaliana
acctacttgacaaccgc

SEQ ID NO: 21182 - DNA, 17 bp, Arabidopsis thaliana
acctacttgactcagcg

SEQ ID NO: 21183 - DNA, 17 bp, Arabidopsis thaliana
acctacttgagtgatgg

SEQ ID NO: 21184 - DNA, 17 bp, Arabidopsis thaliana
acctactttactttggc

SEQ ID NO: 21185 - DNA, 17 bp, Arabidopsis thaliana
acctactttcgcacctt

SEQ ID NO: 21186 - DNA, 17 bp, Arabidopsis thaliana
acctacttttggcttct

SEQ ID NO: 21187 - DNA, 17 bp, Arabidopsis thaliana
acctactttttgtgaga

SEQ ID NO: 21188 - DNA, 17 bp, Arabidopsis thaliana
acctagctgctgttgag

SEQ ID NO: 21189 - DNA, 17 bp, Arabidopsis thaliana
acctaggaaattacggg

SEQ ID NO: 21190 - DNA, 17 bp, Arabidopsis thaliana
acctaggacaccgctga

SEQ ID NO: 21191 - DNA, 17 bp, Arabidopsis thaliana
acctaggttgcctgaag

SEQ ID NO: 21192 - DNA, 17 bp, Arabidopsis thaliana
acctagtctcaacatag

SEQ ID NO: 21193 - DNA, 17 bp, Arabidopsis thaliana
acctagtgactggttga

SEQ ID NO: 21194 - DNA, 17 bp, Arabidopsis thaliana
acctagtgtattgcgga

SEQ ID NO: 21195 - DNA, 17 bp, Arabidopsis thaliana
acctagttttgggattc

SEQ ID NO: 21196 - DNA, 17 bp, Arabidopsis thaliana
acctataaacgaggctc

SEQ ID NO: 21197 - DNA, 17 bp, Arabidopsis thaliana
acctatactctctcgca

SEQ ID NO: 21198 - DNA, 17 bp, Arabidopsis thaliana
acctatcaggactctgg

SEQ ID NO: 21199 - DNA, 17 bp, Arabidopsis thaliana
acctatgaaaacttgta

SEQ ID NO: 21200 - DNA, 17 bp, Arabidopsis thaliana
acctatgcccaaattgg

SEQ ID NO: 21201 - DNA, 17 bp, Arabidopsis thaliana
acctatgccctgttcgt

SEQ ID NO: 21202 - DNA, 17 bp, Arabidopsis thaliana
acctatgcctccatcaa

SEQ ID NO: 21203 - DNA, 17 bp, Arabidopsis thaliana
acctatggccggtttcg

SEQ ID NO: 21204 - DNA, 17 bp, Arabidopsis thaliana
acctatggcctaaggtg

SEQ ID NO: 21205 - DNA, 17 bp, Arabidopsis thaliana
acctatgttgggctgtg

SEQ ID NO: 21206 - DNA, 17 bp, Arabidopsis thaliana
acctattaaatgccagt

SEQ ID NO: 21207 - DNA, 17 bp, Arabidopsis thaliana
acctattcaggttctgg

SEQ ID NO: 21208 - DNA, 17 bp, Arabidopsis thaliana
acctattcgggttcgag

SEQ ID NO: 21209 - DNA, 17 bp, Arabidopsis thaliana
acctattcgggttcggg

SEQ ID NO: 21210 - DNA, 17 bp, Arabidopsis thaliana
acctattcgtcttgcct

SEQ ID NO: 21211 - DNA, 17 bp, Arabidopsis thaliana
acctattgatgggcggc

SEQ ID NO: 21212 - DNA, 17 bp, Arabidopsis thaliana
acctatttaggcggacc

SEQ ID NO: 21213 - DNA, 17 bp, Arabidopsis thaliana
acctatttggcttgatc

SEQ ID NO: 21214 - DNA, 17 bp, Arabidopsis thaliana
acctcaaatccggaagc

SEQ ID NO: 21215 - DNA, 17 bp, Arabidopsis thaliana
acctcaacttaacatcc

SEQ ID NO: 21216 - DNA, 17 bp, Arabidopsis thaliana
acctcaactttacatgc

SEQ ID NO: 21217 - DNA, 17 bp, Arabidopsis thaliana
acctcaactttggccag

SEQ ID NO: 21218 - DNA, 17 bp, Arabidopsis thaliana
acctcaactttggtcag

SEQ ID NO: 21219 - DNA, 17 bp, Arabidopsis thaliana
acctcaagatgagtgct

SEQ ID NO: 21220 - DNA, 17 bp, Arabidopsis thaliana
acctcacattccgttgc

SEQ ID NO: 21221 - DNA, 17 bp, Arabidopsis thaliana
acctcacggctcagcca

SEQ ID NO: 21222 - DNA, 17 bp, Arabidopsis thaliana
acctcactactcagttg

SEQ ID NO: 21223 - DNA, 17 bp, Arabidopsis thaliana
acctcactcaaagtccc

SEQ ID NO: 21224 - DNA, 17 bp, Arabidopsis thaliana
acctcagacctcttggt

SEQ ID NO: 21225 - DNA, 17 bp, Arabidopsis thaliana
acctcagaccttaacta

SEQ ID NO: 21226 - DNA, 17 bp, Arabidopsis thaliana
acctcagacttggcagc

SEQ ID NO: 21227 - DNA, 17 bp, Arabidopsis thaliana
acctcagaggcggtttg

SEQ ID NO: 21228 - DNA, 17 bp, Arabidopsis thaliana
acctcagagggtatttc

SEQ ID NO: 21229 - DNA, 17 bp, Arabidopsis thaliana
acctcagatgaagaaag

SEQ ID NO: 21230 - DNA, 17 bp, Arabidopsis thaliana
acctcagcaaaaccaag

SEQ ID NO: 21231 - DNA, 17 bp, Arabidopsis thaliana
acctcagcctgctaacg

SEQ ID NO: 21232 - DNA, 17 bp, Arabidopsis thaliana
acctcagcctgctaact

SEQ ID NO: 21233 - DNA, 17 bp, Arabidopsis thaliana
acctcagcgctcttttt

SEQ ID NO: 21234 - DNA, 17 bp, Arabidopsis thaliana
acctcagctatgatgta

SEQ ID NO: 21235 - DNA, 17 bp, Arabidopsis thaliana
acctcagctatggtgta

SEQ ID NO: 21236 - DNA, 17 bp, Arabidopsis thaliana
acctcagctttcggatg

SEQ ID NO: 21237 - DNA, 17 bp, Arabidopsis thaliana
acctcagctttgggatg

SEQ ID NO: 21238 - DNA, 17 bp, Arabidopsis thaliana
acctcaggctaaaattt

SEQ ID NO: 21239 - DNA, 17 bp, Arabidopsis thaliana
acctcagggaatgtgtg

SEQ ID NO: 21240 - DNA, 17 bp, Arabidopsis thaliana
acctcagggaattcctt

SEQ ID NO: 21241 - DNA, 17 bp, Arabidopsis thaliana
acctcagggtcgagtga

SEQ ID NO: 21242 - DNA, 17 bp, Arabidopsis thaliana
acctcaggtttgactct

SEQ ID NO: 21243 - DNA, 17 bp, Arabidopsis thaliana
acctcagtgatatagaa

SEQ ID NO: 21244 - DNA, 17 bp, Arabidopsis thaliana
acctcatacagcggaaa

SEQ ID NO: 21245 - DNA, 17 bp, Arabidopsis thaliana
acctcataggattgtgc

SEQ ID NO: 21246 - DNA, 17 bp, Arabidopsis thaliana
acctcatcagctctgtg

SEQ ID NO: 21247 - DNA, 17 bp, Arabidopsis thaliana
acctcatcagctttgtg

SEQ ID NO: 21248 - DNA, 17 bp, Arabidopsis thaliana
acctcatcagtggaggc

SEQ ID NO: 21249 - DNA, 17 bp, Arabidopsis thaliana
acctcatccatgtcata

SEQ ID NO: 21250 - DNA, 17 bp, Arabidopsis thaliana
acctcatcccgaggact

SEQ ID NO: 21251 - DNA, 17 bp, Arabidopsis thaliana
acctcatcgggtttgtt

SEQ ID NO: 21252 - DNA, 17 bp, Arabidopsis thaliana
acctcatcgtgcacagc

SEQ ID NO: 21253 - DNA, 17 bp, Arabidopsis thaliana
acctcatctactgatgt

SEQ ID NO: 21254 - DNA, 17 bp, Arabidopsis thaliana
acctcatctggatcctg

SEQ ID NO: 21255 - DNA, 17 bp, Arabidopsis thaliana
acctcatgctagcgatc

SEQ ID NO: 21256 - DNA, 17 bp, Arabidopsis thaliana
acctcatggtgctttgg

SEQ ID NO: 21257 - DNA, 17 bp, Arabidopsis thaliana
acctcatgttaggggat

SEQ ID NO: 21258 - DNA, 17 bp, Arabidopsis thaliana
acctccaaagatctgtt

SEQ ID NO: 21259 - DNA, 17 bp, Arabidopsis thaliana
acctccaatgtcgatcg

SEQ ID NO: 21260 - DNA, 17 bp, Arabidopsis thaliana
acctccacacgtgatcc

SEQ ID NO: 21261 - DNA, 17 bp, Arabidopsis thaliana
acctccatggggatggt

SEQ ID NO: 21262 - DNA, 17 bp, Arabidopsis thaliana
acctcccctacagtatc

SEQ ID NO: 21263 - DNA, 17 bp, Arabidopsis thaliana
acctcccggatccacag

SEQ ID NO: 21264 - DNA, 17 bp, Arabidopsis thaliana
acctcccgggaagtcct

SEQ ID NO: 21265 - DNA, 17 bp, Arabidopsis thaliana
acctccctacatggcgg

SEQ ID NO: 21266 - DNA, 17 bp, Arabidopsis thaliana
acctccgccgacgaaca

SEQ ID NO: 21267 - DNA, 17 bp, Arabidopsis thaliana
acctccggctgggtccg

SEQ ID NO: 21268 - DNA, 17 bp, Arabidopsis thaliana
acctccggtttgaaggc

SEQ ID NO: 21269 - DNA, 17 bp, Arabidopsis thaliana
acctcctagaggattcc

SEQ ID NO: 21270 - DNA, 17 bp, Arabidopsis thaliana
acctcctaggagtttgg

SEQ ID NO: 21271 - DNA, 17 bp, Arabidopsis thaliana
acctcctaggggtttgg

SEQ ID NO: 21272 - DNA, 17 bp, Arabidopsis thaliana
acctcctctatatgccg

SEQ ID NO: 21273 - DNA, 17 bp, Arabidopsis thaliana
acctcctgcagtacatg

SEQ ID NO: 21274 - DNA, 17 bp, Arabidopsis thaliana
acctcctggatatgtgc

SEQ ID NO: 21275 - DNA, 17 bp, Arabidopsis thaliana
acctcctggtcgagtat

SEQ ID NO: 21276 - DNA, 17 bp, Arabidopsis thaliana
acctccttcttggaccg

SEQ ID NO: 21277 - DNA, 17 bp, Arabidopsis thaliana
acctcgaacccagcacc

SEQ ID NO: 21278 - DNA, 17 bp, Arabidopsis thaliana
acctcgacgggggcctc

SEQ ID NO: 21279 - DNA, 17 bp, Arabidopsis thaliana
acctcgatgtcgatcca

SEQ ID NO: 21280 - DNA, 17 bp, Arabidopsis thaliana
acctcgatgtcggctct

SEQ ID NO: 21281 - DNA, 17 bp, Arabidopsis thaliana
acctcgattgattcgga

SEQ ID NO: 21282 - DNA, 17 bp, Arabidopsis thaliana
acctcgatttgcggtct

SEQ ID NO: 21283 - DNA, 17 bp, Arabidopsis thaliana
acctcgcacgtgtgctg

SEQ ID NO: 21284 - DNA, 17 bp, Arabidopsis thaliana
acctcgccgtatgatat

SEQ ID NO: 21285 - DNA, 17 bp, Arabidopsis thaliana
acctcgcgccgtttcac

SEQ ID NO: 21286 - DNA, 17 bp, Arabidopsis thaliana
acctcgcggtacttgtt

SEQ ID NO: 21287 - DNA, 17 bp, Arabidopsis thaliana
acctcgctgtgactcac

SEQ ID NO: 21288 - DNA, 17 bp, Arabidopsis thaliana
acctcggaggcaaggac

SEQ ID NO: 21289 - DNA, 17 bp, Arabidopsis thaliana
acctcggcagagatgcg

SEQ ID NO: 21290 - DNA, 17 bp, Arabidopsis thaliana
acctcggcgttttgaat

SEQ ID NO: 21291 - DNA, 17 bp, Arabidopsis thaliana
acctcggcttttacggc

SEQ ID NO: 21292 - DNA, 17 bp, Arabidopsis thaliana
acctcgtatttgtatag

SEQ ID NO: 21293 - DNA, 17 bp, Arabidopsis thaliana
acctcgtgctagatatg

SEQ ID NO: 21294 - DNA, 17 bp, Arabidopsis thaliana
acctcgtgctattgcct

SEQ ID NO: 21295 - DNA, 17 bp, Arabidopsis thaliana
acctcgtgggaatccgg

SEQ ID NO: 21296 - DNA, 17 bp, Arabidopsis thaliana
acctcgtgtggccatgg

SEQ ID NO: 21297 - DNA, 17 bp, Arabidopsis thaliana
acctcgttttgcagatg

SEQ ID NO: 21298 - DNA, 17 bp, Arabidopsis thaliana
acctctaactgctgaga

SEQ ID NO: 21299 - DNA, 17 bp, Arabidopsis thaliana
acctctaagcttcaagt

SEQ ID NO: 21300 - DNA, 17 bp, Arabidopsis thaliana
acctctaagcttcacct

SEQ ID NO: 21301 - DNA, 17 bp, Arabidopsis thaliana
acctctaaggtctgagg

SEQ ID NO: 21302 - DNA, 17 bp, Arabidopsis thaliana
acctctaagtttcacat

SEQ ID NO: 21303 - DNA, 17 bp, Arabidopsis thaliana
acctctaagtttcgccc

SEQ ID NO: 21304 - DNA, 17 bp, Arabidopsis thaliana
acctctaagtttcgcct

SEQ ID NO: 21305 - DNA, 17 bp, Arabidopsis thaliana
acctctaattcgttcga

SEQ ID NO: 21306 - DNA, 17 bp, Arabidopsis thaliana
acctctagctagctcat

SEQ ID NO: 21307 - DNA, 17 bp, Arabidopsis thaliana
acctctaggaacaggcc

SEQ ID NO: 21308 - DNA, 17 bp, Arabidopsis thaliana
acctctcaaattgcgtt

SEQ ID NO: 21309 - DNA, 17 bp, Arabidopsis thaliana
acctctcacgatttggg

SEQ ID NO: 21310 - DNA, 17 bp, Arabidopsis thaliana
acctctccagagatgac

SEQ ID NO: 21311 - DNA, 17 bp, Arabidopsis thaliana
acctctccctgggtgtc

SEQ ID NO: 21312 - DNA, 17 bp, Arabidopsis thaliana
acctctcgtccccgctc

SEQ ID NO: 21313 - DNA, 17 bp, Arabidopsis thaliana
acctctcgtccccgctt

SEQ ID NO: 21314 - DNA, 17 bp, Arabidopsis thaliana
acctctctctctctttc

SEQ ID NO: 21315 - DNA, 17 bp, Arabidopsis thaliana
acctctctctgggaccc

SEQ ID NO: 21316 - DNA, 17 bp, Arabidopsis thaliana
acctctctcttcccttc

SEQ ID NO: 21317 - DNA, 17 bp, Arabidopsis thaliana
acctctctttgtgctga

SEQ ID NO: 21318 - DNA, 17 bp, Arabidopsis thaliana
acctctctttttttcta

SEQ ID NO: 21319 - DNA, 17 bp, Arabidopsis thaliana
acctctgcattgatttg

SEQ ID NO: 21320 - DNA, 17 bp, Arabidopsis thaliana
acctctgccatctctgc

SEQ ID NO: 21321 - DNA, 17 bp, Arabidopsis thaliana
acctctggactttgact

SEQ ID NO: 21322 - DNA, 17 bp, Arabidopsis thaliana
acctctggagcttaaat

SEQ ID NO: 21323 - DNA, 17 bp, Arabidopsis thaliana
acctctgggaattcctt

SEQ ID NO: 21324 - DNA, 17 bp, Arabidopsis thaliana
acctctgggtcgagtgg

SEQ ID NO: 21325 - DNA, 17 bp, Arabidopsis thaliana
acctctggtgtcctagg

SEQ ID NO: 21326 - DNA, 17 bp, Arabidopsis thaliana
acctctgtctgtgatgt

SEQ ID NO: 21327 - DNA, 17 bp, Arabidopsis thaliana
acctctgtctgtgattt

SEQ ID NO: 21328 - DNA, 17 bp, Arabidopsis thaliana
acctctgtggacagcga

SEQ ID NO: 21329 - DNA, 17 bp, Arabidopsis thaliana
acctctgtgtggatgat

SEQ ID NO: 21330 - DNA, 17 bp, Arabidopsis thaliana
acctcttactgccgacg

SEQ ID NO: 21331 - DNA, 17 bp, Arabidopsis thaliana
acctcttaggggtttgg

SEQ ID NO: 21332 - DNA, 17 bp, Arabidopsis thaliana
acctcttcgggttcgag

SEQ ID NO: 21333 - DNA, 17 bp, Arabidopsis thaliana
acctcttcttcttcatt

SEQ ID NO: 21334 - DNA, 17 bp, Arabidopsis thaliana
acctcttgatgatctgt

SEQ ID NO: 21335 - DNA, 17 bp, Arabidopsis thaliana
acctctttaattggttt

SEQ ID NO: 21336 - DNA, 17 bp, Arabidopsis thaliana
acctctttagatcgcgg

SEQ ID NO: 21337 - DNA, 17 bp, Arabidopsis thaliana
acctctttcatagccag

SEQ ID NO: 21338 - DNA, 17 bp, Arabidopsis thaliana
acctctttctgcggttc

SEQ ID NO: 21339 - DNA, 17 bp, Arabidopsis thaliana
acctctttgcaaaactc

SEQ ID NO: 21340 - DNA, 17 bp, Arabidopsis thaliana
acctctttgcatgcacc

SEQ ID NO: 21341 - DNA, 17 bp, Arabidopsis thaliana
acctcttttggattttt

SEQ ID NO: 21342 - DNA, 17 bp, Arabidopsis thaliana
acctgaacctcgggatc

SEQ ID NO: 21343 - DNA, 17 bp, Arabidopsis thaliana
acctgaacctgtggaaa

SEQ ID NO: 21344 - DNA, 17 bp, Arabidopsis thaliana
acctgaactctgacata

SEQ ID NO: 21345 - DNA, 17 bp, Arabidopsis thaliana
acctgaagaacccaaga

SEQ ID NO: 21346 - DNA, 17 bp, Arabidopsis thaliana
acctgaagaatgacccg

SEQ ID NO: 21347 - DNA, 17 bp, Arabidopsis thaliana
acctgaagaatggcccg

SEQ ID NO: 21348 - DNA, 17 bp, Arabidopsis thaliana
acctgaatgccgaaata

SEQ ID NO: 21349 - DNA, 17 bp, Arabidopsis thaliana
acctgaatggaccatgg

SEQ ID NO: 21350 - DNA, 17 bp, Arabidopsis thaliana
acctgaattggaacaag

SEQ ID NO: 21351 - DNA, 17 bp, Arabidopsis thaliana
acctgaattggaactag

SEQ ID NO: 21352 - DNA, 17 bp, Arabidopsis thaliana
acctgaatttgcttgcg

SEQ ID NO: 21353 - DNA, 17 bp, Arabidopsis thaliana
acctgacagacgtggct

SEQ ID NO: 21354 - DNA, 17 bp, Arabidopsis thaliana
acctgacttgacaactg

SEQ ID NO: 21355 - DNA, 17 bp, Arabidopsis thaliana
acctgagactgttgtaa

SEQ ID NO: 21356 - DNA, 17 bp, Arabidopsis thaliana
acctgagagattacggg

SEQ ID NO: 21357 - DNA, 17 bp, Arabidopsis thaliana
acctgagatccttccgt

SEQ ID NO: 21358 - DNA, 17 bp, Arabidopsis thaliana
acctgagctgggattag

SEQ ID NO: 21359 - DNA, 17 bp, Arabidopsis thaliana
acctgagggtcgagtgt

SEQ ID NO: 21360 - DNA, 17 bp, Arabidopsis thaliana
acctgaggttgatgaga

SEQ ID NO: 21361 - DNA, 17 bp, Arabidopsis thaliana
acctgagtctacactcc

SEQ ID NO: 21362 - DNA, 17 bp, Arabidopsis thaliana
acctgatcgtggtctgc

SEQ ID NO: 21363 - DNA, 17 bp, Arabidopsis thaliana
acctgatcgtttgactt

SEQ ID NO: 21364 - DNA, 17 bp, Arabidopsis thaliana
acctgatcttaaaggcg

SEQ ID NO: 21365 - DNA, 17 bp, Arabidopsis thaliana
acctgatgaagatagtg

SEQ ID NO: 21366 - DNA, 17 bp, Arabidopsis thaliana
acctgatgaagatggtg

SEQ ID NO: 21367 - DNA, 17 bp, Arabidopsis thaliana
acctgatgtgggtccgt

SEQ ID NO: 21368 - DNA, 17 bp, Arabidopsis thaliana
acctgatgtttgcgaca

SEQ ID NO: 21369 - DNA, 17 bp, Arabidopsis thaliana
acctgattccgggtata

SEQ ID NO: 21370 - DNA, 17 bp, Arabidopsis thaliana
acctgattggttctgga

SEQ ID NO: 21371 - DNA, 17 bp, Arabidopsis thaliana
acctgatttgactgtgt

SEQ ID NO: 21372 - DNA, 17 bp, Arabidopsis thaliana
acctgcaaaaatgacga

SEQ ID NO: 21373 - DNA, 17 bp, Arabidopsis thaliana
acctgcaggaggattga

SEQ ID NO: 21374 - DNA, 17 bp, Arabidopsis thaliana
acctgcagtataccgca

SEQ ID NO: 21375 - DNA, 17 bp, Arabidopsis thaliana
acctgcagtataccgcg

SEQ ID NO: 21376 - DNA, 17 bp, Arabidopsis thaliana
acctgcccgctcgtctg

SEQ ID NO: 21377 - DNA, 17 bp, Arabidopsis thaliana
acctgccgcaccacgag

SEQ ID NO: 21378 - DNA, 17 bp, Arabidopsis thaliana
acctgcctagtcattct

SEQ ID NO: 21379 - DNA, 17 bp, Arabidopsis thaliana
acctgcgaagatctggt

SEQ ID NO: 21380 - DNA, 17 bp, Arabidopsis thaliana
acctgcgacttaacatc

SEQ ID NO: 21381 - DNA, 17 bp, Arabidopsis thaliana
acctgcgagcagcggtg

SEQ ID NO: 21382 - DNA, 17 bp, Arabidopsis thaliana
acctgcgattaaatcca

SEQ ID NO: 21383 - DNA, 17 bp, Arabidopsis thaliana
acctgcgctccttgctt

SEQ ID NO: 21384 - DNA, 17 bp, Arabidopsis thaliana
acctgcggttaaatgat

SEQ ID NO: 21385 - DNA, 17 bp, Arabidopsis thaliana
acctgcgttgaccgatg

SEQ ID NO: 21386 - DNA, 17 bp, Arabidopsis thaliana
acctgcgtttggatgtg

SEQ ID NO: 21387 - DNA, 17 bp, Arabidopsis thaliana
acctgctcaactgtcac

SEQ ID NO: 21388 - DNA, 17 bp, Arabidopsis thaliana
acctgctgctgcttctt

SEQ ID NO: 21389 - DNA, 17 bp, Arabidopsis thaliana
acctgcttctggacgag

SEQ ID NO: 21390 - DNA, 17 bp, Arabidopsis thaliana
acctgcttggtgtcttt

SEQ ID NO: 21391 - DNA, 17 bp, Arabidopsis thaliana
acctgcttgtcgacagc

SEQ ID NO: 21392 - DNA, 17 bp, Arabidopsis thaliana
acctgctttgtgtcgat

SEQ ID NO: 21393 - DNA, 17 bp, Arabidopsis thaliana
acctgctttgttgagcc

SEQ ID NO: 21394 - DNA, 17 bp, Arabidopsis thaliana
acctggaaatcctcggg

SEQ ID NO: 21395 - DNA, 17 bp, Arabidopsis thaliana
acctggacattcggttt

SEQ ID NO: 21396 - DNA, 17 bp, Arabidopsis thaliana
acctggaccgctgatcg

SEQ ID NO: 21397 - DNA, 17 bp, Arabidopsis thaliana
acctggagctgattcac

SEQ ID NO: 21398 - DNA, 17 bp, Arabidopsis thaliana
acctggaggaattacgg

SEQ ID NO: 21399 - DNA, 17 bp, Arabidopsis thaliana
acctggatcgggagatg

SEQ ID NO: 21400 - DNA, 17 bp, Arabidopsis thaliana
acctggatcggggagct

SEQ ID NO: 21401 - DNA, 17 bp, Arabidopsis thaliana
acctggatctctaaacc

SEQ ID NO: 21402 - DNA, 17 bp, Arabidopsis thaliana
acctggcctggttcact

SEQ ID NO: 21403 - DNA, 17 bp, Arabidopsis thaliana
acctgggagatttacca

SEQ ID NO: 21404 - DNA, 17 bp, Arabidopsis thaliana
acctggggctgtagtat

SEQ ID NO: 21405 - DNA, 17 bp, Arabidopsis thaliana
acctgggtgatctatct

SEQ ID NO: 21406 - DNA, 17 bp, Arabidopsis thaliana
acctgggttcgactccc

SEQ ID NO: 21407 - DNA, 17 bp, Arabidopsis thaliana
acctgggttcggctccc

SEQ ID NO: 21408 - DNA, 17 bp, Arabidopsis thaliana
acctggtagtcagaaat

SEQ ID NO: 21409 - DNA, 17 bp, Arabidopsis thaliana
acctggtcccaaggctc

SEQ ID NO: 21410 - DNA, 17 bp, Arabidopsis thaliana
acctggtgaagatggtg

SEQ ID NO: 21411 - DNA, 17 bp, Arabidopsis thaliana
acctggtggtcgagtgg

SEQ ID NO: 21412 - DNA, 17 bp, Arabidopsis thaliana
acctggtgtcggtctcg

SEQ ID NO: 21413 - DNA, 17 bp, Arabidopsis thaliana
acctggttccttgagcg

SEQ ID NO: 21414 - DNA, 17 bp, Arabidopsis thaliana
acctggttgacccgatg

SEQ ID NO: 21415 - DNA, 17 bp, Arabidopsis thaliana
acctggttgatccgatg

SEQ ID NO: 21416 - DNA, 17 bp, Arabidopsis thaliana
acctggttgatcctgcc

SEQ ID NO: 21417 - DNA, 17 bp, Arabidopsis thaliana
acctgtaactgtttctt

SEQ ID NO: 21418 - DNA, 17 bp, Arabidopsis thaliana
acctgtactttcggttc

SEQ ID NO: 21419 - DNA, 17 bp, Arabidopsis thaliana
acctgtactttcggttt

SEQ ID NO: 21420 - DNA, 17 bp, Arabidopsis thaliana
acctgtagatatccgat

SEQ ID NO: 21421 - DNA, 17 bp, Arabidopsis thaliana
acctgtagttcgcgatt

SEQ ID NO: 21422 - DNA, 17 bp, Arabidopsis thaliana
acctgtcagaccgccgt

SEQ ID NO: 21423 - DNA, 17 bp, Arabidopsis thaliana
acctgtccaaaacagaa

SEQ ID NO: 21424 - DNA, 17 bp, Arabidopsis thaliana
acctgtcgcaattatga

SEQ ID NO: 21425 - DNA, 17 bp, Arabidopsis thaliana
acctgtgcaaatattgt

SEQ ID NO: 21426 - DNA, 17 bp, Arabidopsis thaliana
acctgtggctggattga

SEQ ID NO: 21427 - DNA, 17 bp, Arabidopsis thaliana
acctgtgtatccttttc

SEQ ID NO: 21428 - DNA, 17 bp, Arabidopsis thaliana
acctgtgtccccctcgg

SEQ ID NO: 21429 - DNA, 17 bp, Arabidopsis thaliana
acctgtgtccgagtatc

SEQ ID NO: 21430 - DNA, 17 bp, Arabidopsis thaliana
acctgtgtgccattcgg

SEQ ID NO: 21431 - DNA, 17 bp, Arabidopsis thaliana
acctgttaaggattgga

SEQ ID NO: 21432 - DNA, 17 bp, Arabidopsis thaliana
acctgttaagtttcccc

SEQ ID NO: 21433 - DNA, 17 bp, Arabidopsis thaliana
acctgttacattgcggt

SEQ ID NO: 21434 - DNA, 17 bp, Arabidopsis thaliana
acctgttattgtttggc

SEQ ID NO: 21435 - DNA, 17 bp, Arabidopsis thaliana
acctgttcactggatca

SEQ ID NO: 21436 - DNA, 17 bp, Arabidopsis thaliana
acctgttcagtgttgcg

SEQ ID NO: 21437 - DNA, 17 bp, Arabidopsis thaliana
acctgttccccgacgaa

SEQ ID NO: 21438 - DNA, 17 bp, Arabidopsis thaliana
acctgttgaccatgttt

SEQ ID NO: 21439 - DNA, 17 bp, Arabidopsis thaliana
acctgttgaccccttgg

SEQ ID NO: 21440 - DNA, 17 bp, Arabidopsis thaliana
acctgttgcagtgcggt

SEQ ID NO: 21441 - DNA, 17 bp, Arabidopsis thaliana
acctgttgtctagggat

SEQ ID NO: 21442 - DNA, 17 bp, Arabidopsis thaliana
acctgtttgaatcctga

SEQ ID NO: 21443 - DNA, 17 bp, Arabidopsis thaliana
acctgtttgatcctgcc

SEQ ID NO: 21444 - DNA, 17 bp, Arabidopsis thaliana
acctgtttgtccattca

SEQ ID NO: 21445 - DNA, 17 bp, Arabidopsis thaliana
acctgttttggtatgcg

SEQ ID NO: 21446 - DNA, 17 bp, Arabidopsis thaliana
acctgttttgtgcaatc

SEQ ID NO: 21447 - DNA, 17 bp, Arabidopsis thaliana
accttaactagaagacc

SEQ ID NO: 21448 - DNA, 17 bp, Arabidopsis thaliana
accttaaggatttgtgg

SEQ ID NO: 21449 - DNA, 17 bp, Arabidopsis thaliana
accttaagtactttttc

SEQ ID NO: 21450 - DNA, 17 bp, Arabidopsis thaliana
accttaatgagaaagtc

SEQ ID NO: 21451 - DNA, 17 bp, Arabidopsis thaliana
accttaatgtgtttttc

SEQ ID NO: 21452 - DNA, 17 bp, Arabidopsis thaliana
accttagaaagtgcctc

SEQ ID NO: 21453 - DNA, 17 bp, Arabidopsis thaliana
accttagatgtcggctt

SEQ ID NO: 21454 - DNA, 17 bp, Arabidopsis thaliana
accttagccgtgatact

SEQ ID NO: 21455 - DNA, 17 bp, Arabidopsis thaliana
accttagccttctatct

SEQ ID NO: 21456 - DNA, 17 bp, Arabidopsis thaliana
accttagggggcgtagg

SEQ ID NO: 21457 - DNA, 17 bp, Arabidopsis thaliana
accttagtcgcatcctg

SEQ ID NO: 21458 - DNA, 17 bp, Arabidopsis thaliana
accttataagttggtta

SEQ ID NO: 21459 - DNA, 17 bp, Arabidopsis thaliana
accttatcgagattcgc

SEQ ID NO: 21460 - DNA, 17 bp, Arabidopsis thaliana
accttatcttagtttgt

SEQ ID NO: 21461 - DNA, 17 bp, Arabidopsis thaliana
accttatctttggattt

SEQ ID NO: 21462 - DNA, 17 bp, Arabidopsis thaliana
accttattcgcgttgtg

SEQ ID NO: 21463 - DNA, 17 bp, Arabidopsis thaliana
accttattgaccgcaac

SEQ ID NO: 21464 - DNA, 17 bp, Arabidopsis thaliana
accttatttacaaccca

SEQ ID NO: 21465 - DNA, 17 bp, Arabidopsis thaliana
accttatttctgctgtg

SEQ ID NO: 21466 - DNA, 17 bp, Arabidopsis thaliana
accttattttgatgtgg

SEQ ID NO: 21467 - DNA, 17 bp, Arabidopsis thaliana
accttcaactgtattga

SEQ ID NO: 21468 - DNA, 17 bp, Arabidopsis thaliana
accttcaactgtattta

SEQ ID NO: 21469 - DNA, 17 bp, Arabidopsis thaliana
accttcaactttggcca

SEQ ID NO: 21470 - DNA, 17 bp, Arabidopsis thaliana
accttcaagtttgcgtt

SEQ ID NO: 21471 - DNA, 17 bp, Arabidopsis thaliana
accttcacgatgaggtc

SEQ ID NO: 21472 - DNA, 17 bp, Arabidopsis thaliana
accttcataggctgcaa

SEQ ID NO: 21473 - DNA, 17 bp, Arabidopsis thaliana
accttcattgggcattg

SEQ ID NO: 21474 - DNA, 17 bp, Arabidopsis thaliana
accttcccggctggtgc

SEQ ID NO: 21475 - DNA, 17 bp, Arabidopsis thaliana
accttccctggccactt

SEQ ID NO: 21476 - DNA, 17 bp, Arabidopsis thaliana
accttcctcctctgtca

SEQ ID NO: 21477 - DNA, 17 bp, Arabidopsis thaliana
accttcgaacaacaaac

SEQ ID NO: 21478 - DNA, 17 bp, Arabidopsis thaliana
accttcgagtttgggtg

SEQ ID NO: 21479 - DNA, 17 bp, Arabidopsis thaliana
accttcgagtttggttg

SEQ ID NO: 21480 - DNA, 17 bp, Arabidopsis thaliana
accttcgcccaagcacg

SEQ ID NO: 21481 - DNA, 17 bp, Arabidopsis thaliana
accttcggatccatagg

SEQ ID NO: 21482 - DNA, 17 bp, Arabidopsis thaliana
accttcgggatcggagt

SEQ ID NO: 21483 - DNA, 17 bp, Arabidopsis thaliana
accttcgggattgagta

SEQ ID NO: 21484 - DNA, 17 bp, Arabidopsis thaliana
accttcggggaagtgac

SEQ ID NO: 21485 - DNA, 17 bp, Arabidopsis thaliana
accttcggtgcagtggt

SEQ ID NO: 21486 - DNA, 17 bp, Arabidopsis thaliana
accttcggtgcggtggt

SEQ ID NO: 21487 - DNA, 17 bp, Arabidopsis thaliana
accttcgtggtgggcgt

SEQ ID NO: 21488 - DNA, 17 bp, Arabidopsis thaliana
accttctagtcgcttgc

SEQ ID NO: 21489 - DNA, 17 bp, Arabidopsis thaliana
accttctcatctagcag

SEQ ID NO: 21490 - DNA, 17 bp, Arabidopsis thaliana
accttctccacccaccc

SEQ ID NO: 21491 - DNA, 17 bp, Arabidopsis thaliana
accttctctctggccgc

SEQ ID NO: 21492 - DNA, 17 bp, Arabidopsis thaliana
accttctctttggattt

SEQ ID NO: 21493 - DNA, 17 bp, Arabidopsis thaliana
accttctgagtcactgg

SEQ ID NO: 21494 - DNA, 17 bp, Arabidopsis thaliana
accttctgggacataga

SEQ ID NO: 21495 - DNA, 17 bp, Arabidopsis thaliana
accttctgggacatagg

SEQ ID NO: 21496 - DNA, 17 bp, Arabidopsis thaliana
accttctgggacattga

SEQ ID NO: 21497 - DNA, 17 bp, Arabidopsis thaliana
accttctgggtcactgg

SEQ ID NO: 21498 - DNA, 17 bp, Arabidopsis thaliana
accttctgtactacctt

SEQ ID NO: 21499 - DNA, 17 bp, Arabidopsis thaliana
accttcttagcagtgac

SEQ ID NO: 21500 - DNA, 17 bp, Arabidopsis thaliana
accttcttcaccaggtc

SEQ ID NO: 21501 - DNA, 17 bp, Arabidopsis thaliana
accttcttctctttctc

SEQ ID NO: 21502 - DNA, 17 bp, Arabidopsis thaliana
accttcttgcctaagtg

SEQ ID NO: 21503 - DNA, 17 bp, Arabidopsis thaliana
accttctttgtagatct

SEQ ID NO: 21504 - DNA, 17 bp, Arabidopsis thaliana
accttctttttttgacg

SEQ ID NO: 21505 - DNA, 17 bp, Arabidopsis thaliana
accttgaagcgatttag

SEQ ID NO: 21506 - DNA, 17 bp, Arabidopsis thaliana
accttgaccggcgtcgg

SEQ ID NO: 21507 - DNA, 17 bp, Arabidopsis thaliana
accttgagatgggtcga

SEQ ID NO: 21508 - DNA, 17 bp, Arabidopsis thaliana
accttgagatgggtcgg

SEQ ID NO: 21509 - DNA, 17 bp, Arabidopsis thaliana
accttgaggccaaacta

SEQ ID NO: 21510 - DNA, 17 bp, Arabidopsis thaliana
accttgatctgctgtgc

SEQ ID NO: 21511 - DNA, 17 bp, Arabidopsis thaliana
accttgatcttctgaga

SEQ ID NO: 21512 - DNA, 17 bp, Arabidopsis thaliana
accttgatctttatgct

SEQ ID NO: 21513 - DNA, 17 bp, Arabidopsis thaliana
accttgatggacggatg

SEQ ID NO: 21514 - DNA, 17 bp, Arabidopsis thaliana
accttgattctgtaggt

SEQ ID NO: 21515 - DNA, 17 bp, Arabidopsis thaliana
accttgcaaagggaaga

SEQ ID NO: 21516 - DNA, 17 bp, Arabidopsis thaliana
accttgcaaggctaaat

SEQ ID NO: 21517 - DNA, 17 bp, Arabidopsis thaliana
accttgccggttatcgt

SEQ ID NO: 21518 - DNA, 17 bp, Arabidopsis thaliana
accttgccttgcgctct

SEQ ID NO: 21519 - DNA, 17 bp, Arabidopsis thaliana
accttgcgattgccatt

SEQ ID NO: 21520 - DNA, 17 bp, Arabidopsis thaliana
accttgctggttatcgt

SEQ ID NO: 21521 - DNA, 17 bp, Arabidopsis thaliana
accttggaccaaatagt

SEQ ID NO: 21522 - DNA, 17 bp, Arabidopsis thaliana
accttggaccggccttc

SEQ ID NO: 21523 - DNA, 17 bp, Arabidopsis thaliana
accttggaccggccttg

SEQ ID NO: 21524 - DNA, 17 bp, Arabidopsis thaliana
accttggacttcaactg

SEQ ID NO: 21525 - DNA, 17 bp, Arabidopsis thaliana
accttggatccgttaat

SEQ ID NO: 21526 - DNA, 17 bp, Arabidopsis thaliana
accttggatccgttgat

SEQ ID NO: 21527 - DNA, 17 bp, Arabidopsis thaliana
accttggatgggtcggc

SEQ ID NO: 21528 - DNA, 17 bp, Arabidopsis thaliana
accttggccttcgggat

SEQ ID NO: 21529 - DNA, 17 bp, Arabidopsis thaliana
accttgggagcaagaca

SEQ ID NO: 21530 - DNA, 17 bp, Arabidopsis thaliana
accttgggatggatcgg

SEQ ID NO: 21531 - DNA, 17 bp, Arabidopsis thaliana
accttgggatggggggc

SEQ ID NO: 21532 - DNA, 17 bp, Arabidopsis thaliana
accttgggatgggtcga

SEQ ID NO: 21533 - DNA, 17 bp, Arabidopsis thaliana
accttgggatgggtcgc

SEQ ID NO: 21534 - DNA, 17 bp, Arabidopsis thaliana
accttgggatgggtcgg

SEQ ID NO: 21535 - DNA, 17 bp, Arabidopsis thaliana
accttgggatgggtctg

SEQ ID NO: 21536 - DNA, 17 bp, Arabidopsis thaliana
accttgggatggttcgg

SEQ ID NO: 21537 - DNA, 17 bp, Arabidopsis thaliana
accttgggatggttcgt

SEQ ID NO: 21538 - DNA, 17 bp, Arabidopsis thaliana
accttgggccgagtggt

SEQ ID NO: 21539 - DNA, 17 bp, Arabidopsis thaliana
accttgggtgccttgat

SEQ ID NO: 21540 - DNA, 17 bp, Arabidopsis thaliana
accttggtatggatcgg

SEQ ID NO: 21541 - DNA, 17 bp, Arabidopsis thaliana
accttggtccaattggt

SEQ ID NO: 21542 - DNA, 17 bp, Arabidopsis thaliana
accttggtctttcttgg

SEQ ID NO: 21543 - DNA, 17 bp, Arabidopsis thaliana
accttggtgttgcggaa

SEQ ID NO: 21544 - DNA, 17 bp, Arabidopsis thaliana
accttggttgcgtcaca

SEQ ID NO: 21545 - DNA, 17 bp, Arabidopsis thaliana
accttggttggctcagt

SEQ ID NO: 21546 - DNA, 17 bp, Arabidopsis thaliana
accttgtactatggacg

SEQ ID NO: 21547 - DNA, 17 bp, Arabidopsis thaliana
accttgtccgtcgactt

SEQ ID NO: 21548 - DNA, 17 bp, Arabidopsis thaliana
accttgtcttatggatt

SEQ ID NO: 21549 - DNA, 17 bp, Arabidopsis thaliana
accttgtgcctgtgcca

SEQ ID NO: 21550 - DNA, 17 bp, Arabidopsis thaliana
accttgtgctatgctcc

SEQ ID NO: 21551 - DNA, 17 bp, Arabidopsis thaliana
accttgtgctctagact

SEQ ID NO: 21552 - DNA, 17 bp, Arabidopsis thaliana
accttgtggagctttcc

SEQ ID NO: 21553 - DNA, 17 bp, Arabidopsis thaliana
accttgtgtcaggacct

SEQ ID NO: 21554 - DNA, 17 bp, Arabidopsis thaliana
accttgttttcctgatg

SEQ ID NO: 21555 - DNA, 17 bp, Arabidopsis thaliana
acctttaagactttttc

SEQ ID NO: 21556 - DNA, 17 bp, Arabidopsis thaliana
acctttaagatcccgtt

SEQ ID NO: 21557 - DNA, 17 bp, Arabidopsis thaliana
acctttaagatccggtt

SEQ ID NO: 21558 - DNA, 17 bp, Arabidopsis thaliana
acctttaagcacttttt

SEQ ID NO: 21559 - DNA, 17 bp, Arabidopsis thaliana
acctttaagtacttttt

SEQ ID NO: 21560 - DNA, 17 bp, Arabidopsis thaliana
acctttaagtttgcgtt

SEQ ID NO: 21561 - DNA, 17 bp, Arabidopsis thaliana
acctttacacttggcgg

SEQ ID NO: 21562 - DNA, 17 bp, Arabidopsis thaliana
acctttaccatgatttt

SEQ ID NO: 21563 - DNA, 17 bp, Arabidopsis thaliana
acctttagaccgtgagg

SEQ ID NO: 21564 - DNA, 17 bp, Arabidopsis thaliana
acctttaggctaggtct

SEQ ID NO: 21565 - DNA, 17 bp, Arabidopsis thaliana
acctttagggtgaaccg

SEQ ID NO: 21566 - DNA, 17 bp, Arabidopsis thaliana
acctttagggtgaagcg

SEQ ID NO: 21567 - DNA, 17 bp, Arabidopsis thaliana
acctttaggtgaaccga

SEQ ID NO: 21568 - DNA, 17 bp, Arabidopsis thaliana
acctttatctctcactg

SEQ ID NO: 21569 - DNA, 17 bp, Arabidopsis thaliana
acctttcaaatctttcg

SEQ ID NO: 21570 - DNA, 17 bp, Arabidopsis thaliana
acctttcaatccgacgg

SEQ ID NO: 21571 - DNA, 17 bp, Arabidopsis thaliana
acctttcattctcgtgg

SEQ ID NO: 21572 - DNA, 17 bp, Arabidopsis thaliana
acctttcccggtgacag

SEQ ID NO: 21573 - DNA, 17 bp, Arabidopsis thaliana
acctttcccggtgaccg

SEQ ID NO: 21574 - DNA, 17 bp, Arabidopsis thaliana
acctttcgcatgcagca

SEQ ID NO: 21575 - DNA, 17 bp, Arabidopsis thaliana
acctttcgttgaccttt

SEQ ID NO: 21576 - DNA, 17 bp, Arabidopsis thaliana
acctttctacggaggtt

SEQ ID NO: 21577 - DNA, 17 bp, Arabidopsis thaliana
acctttctccgctggat

SEQ ID NO: 21578 - DNA, 17 bp, Arabidopsis thaliana
acctttctctgctgcgt

SEQ ID NO: 21579 - DNA, 17 bp, Arabidopsis thaliana
acctttctgattcttct

SEQ ID NO: 21580 - DNA, 17 bp, Arabidopsis thaliana
acctttctgcaggattg

SEQ ID NO: 21581 - DNA, 17 bp, Arabidopsis thaliana
acctttgagcctaatga

SEQ ID NO: 21582 - DNA, 17 bp, Arabidopsis thaliana
acctttgagtctagtgt

SEQ ID NO: 21583 - DNA, 17 bp, Arabidopsis thaliana
acctttgagtctagttt

SEQ ID NO: 21584 - DNA, 17 bp, Arabidopsis thaliana
acctttgcactattccg

SEQ ID NO: 21585 - DNA, 17 bp, Arabidopsis thaliana
acctttgcttacaagcg

SEQ ID NO: 21586 - DNA, 17 bp, Arabidopsis thaliana
acctttggacttttgga

SEQ ID NO: 21587 - DNA, 17 bp, Arabidopsis thaliana
acctttggctttgcctt

SEQ ID NO: 21588 - DNA, 17 bp, Arabidopsis thaliana
acctttggctttggctt

SEQ ID NO: 21589 - DNA, 17 bp, Arabidopsis thaliana
acctttggggatcgagt

SEQ ID NO: 21590 - DNA, 17 bp, Arabidopsis thaliana
acctttggtttttccag

SEQ ID NO: 21591 - DNA, 17 bp, Arabidopsis thaliana
accttttaatgtgattt

SEQ ID NO: 21592 - DNA, 17 bp, Arabidopsis thaliana
accttttagagcgtgct

SEQ ID NO: 21593 - DNA, 17 bp, Arabidopsis thaliana
accttttaggggtttgg

SEQ ID NO: 21594 - DNA, 17 bp, Arabidopsis thaliana
accttttcaaacttatg

SEQ ID NO: 21595 - DNA, 17 bp, Arabidopsis thaliana
accttttcaaccctttg

SEQ ID NO: 21596 - DNA, 17 bp, Arabidopsis thaliana
accttttcctggatgta

SEQ ID NO: 21597 - DNA, 17 bp, Arabidopsis thaliana
accttttcgcgttagcg

SEQ ID NO: 21598 - DNA, 17 bp, Arabidopsis thaliana
accttttcggaaagcca

SEQ ID NO: 21599 - DNA, 17 bp, Arabidopsis thaliana
accttttcggaaagccc

SEQ ID NO: 21600 - DNA, 17 bp, Arabidopsis thaliana
accttttcggaaagcct

SEQ ID NO: 21601 - DNA, 17 bp, Arabidopsis thaliana
accttttcgtgatttgg

SEQ ID NO: 21602 - DNA, 17 bp, Arabidopsis thaliana
accttttgaactgctgc

SEQ ID NO: 21603 - DNA, 17 bp, Arabidopsis thaliana
accttttgacggccttt

SEQ ID NO: 21604 - DNA, 17 bp, Arabidopsis thaliana
accttttgacggctttt

SEQ ID NO: 21605 - DNA, 17 bp, Arabidopsis thaliana
accttttgacttggctg

SEQ ID NO: 21606 - DNA, 17 bp, Arabidopsis thaliana
accttttgcaagggtat

SEQ ID NO: 21607 - DNA, 17 bp, Arabidopsis thaliana
accttttgggtggtgta

SEQ ID NO: 21608 - DNA, 17 bp, Arabidopsis thaliana
accttttgggtgtgagt

SEQ ID NO: 21609 - DNA, 17 bp, Arabidopsis thaliana
accttttggtctgccat

SEQ ID NO: 21610 - DNA, 17 bp, Arabidopsis thaliana
accttttggttaccaat

SEQ ID NO: 21611 - DNA, 17 bp, Arabidopsis thaliana
acctttttgattagctt

SEQ ID NO: 21612 - DNA, 17 bp, Arabidopsis thaliana
acctttttggttgacag

SEQ ID NO: 21613 - DNA, 17 bp, Arabidopsis thaliana
acgaaaaacccgtgatt

SEQ ID NO: 21614 - DNA, 17 bp, Arabidopsis thaliana
acgaaaaagttgcgccg

SEQ ID NO: 21615 - DNA, 17 bp, Arabidopsis thaliana
acgaaaacgaacccatg

SEQ ID NO: 21616 - DNA, 17 bp, Arabidopsis thaliana
acgaaaacgactatccc

SEQ ID NO: 21617 - DNA, 17 bp, Arabidopsis thaliana
acgaaaagctagggtgt

SEQ ID NO: 21618 - DNA, 17 bp, Arabidopsis thaliana
acgaaaagctagggttt

SEQ ID NO: 21619 - DNA, 17 bp, Arabidopsis thaliana
acgaaaagttgcgattt

SEQ ID NO: 21620 - DNA, 17 bp, Arabidopsis thaliana
acgaaaatccaaacctg

SEQ ID NO: 21621 - DNA, 17 bp, Arabidopsis thaliana
acgaaaatgcaaatagg

SEQ ID NO: 21622 - DNA, 17 bp, Arabidopsis thaliana
acgaaaatgcatagttg

SEQ ID NO: 21623 - DNA, 17 bp, Arabidopsis thaliana
acgaaaatgccatcgtc

SEQ ID NO: 21624 - DNA, 17 bp, Arabidopsis thaliana
acgaaaatgcccgaaaa

SEQ ID NO: 21625 - DNA, 17 bp, Arabidopsis thaliana
acgaaaatttcacggca

SEQ ID NO: 21626 - DNA, 17 bp, Arabidopsis thaliana
acgaaaattttacggca

SEQ ID NO: 21627 - DNA, 17 bp, Arabidopsis thaliana
acgaaaattttgatgtt

SEQ ID NO: 21628 - DNA, 17 bp, Arabidopsis thaliana
acgaaacaaattggatt

SEQ ID NO: 21629 - DNA, 17 bp, Arabidopsis thaliana
acgaaacaagcttcact

SEQ ID NO: 21630 - DNA, 17 bp, Arabidopsis thaliana
acgaaacagagcaacaa

SEQ ID NO: 21631 - DNA, 17 bp, Arabidopsis thaliana
acgaaacagttgggatt

SEQ ID NO: 21632 - DNA, 17 bp, Arabidopsis thaliana
acgaaacgacgatggcg

SEQ ID NO: 21633 - DNA, 17 bp, Arabidopsis thaliana
acgaaacgcctttttta

SEQ ID NO: 21634 - DNA, 17 bp, Arabidopsis thaliana
acgaaactcatagccga

SEQ ID NO: 21635 - DNA, 17 bp, Arabidopsis thaliana
acgaaagcatttgccaa

SEQ ID NO: 21636 - DNA, 17 bp, Arabidopsis thaliana
acgaaaggcgtaacgat

SEQ ID NO: 21637 - DNA, 17 bp, Arabidopsis thaliana
acgaaagtcgtttgcgg

SEQ ID NO: 21638 - DNA, 17 bp, Arabidopsis thaliana
acgaaagtggacggtga

SEQ ID NO: 21639 - DNA, 17 bp, Arabidopsis thaliana
acgaaagtggattgacc

SEQ ID NO: 21640 - DNA, 17 bp, Arabidopsis thaliana
acgaaagttaaagatct

SEQ ID NO: 21641 - DNA, 17 bp, Arabidopsis thaliana
acgaaagttgggggctc

SEQ ID NO: 21642 - DNA, 17 bp, Arabidopsis thaliana
acgaaatagctatctca

SEQ ID NO: 21643 - DNA, 17 bp, Arabidopsis thaliana
acgaaatccaggaggtt

SEQ ID NO: 21644 - DNA, 17 bp, Arabidopsis thaliana
acgaaatcgttcttttc

SEQ ID NO: 21645 - DNA, 17 bp, Arabidopsis thaliana
acgaaatcttcccatgg

SEQ ID NO: 21646 - DNA, 17 bp, Arabidopsis thaliana
acgaaatgagacttatt

SEQ ID NO: 21647 - DNA, 17 bp, Arabidopsis thaliana
acgaaatgggacctgtc

SEQ ID NO: 21648 - DNA, 17 bp, Arabidopsis thaliana
acgaaatgggcgttctg

SEQ ID NO: 21649 - DNA, 17 bp, Arabidopsis thaliana
acgaaatgtgaaccctt

SEQ ID NO: 21650 - DNA, 17 bp, Arabidopsis thaliana
acgaaattgtcctagat

SEQ ID NO: 21651 - DNA, 17 bp, Arabidopsis thaliana
acgaaattgtggttagc

SEQ ID NO: 21652 - DNA, 17 bp, Arabidopsis thaliana
acgaaattttaaagtga

SEQ ID NO: 21653 - DNA, 17 bp, Arabidopsis thaliana
acgaacaacatctcatt

SEQ ID NO: 21654 - DNA, 17 bp, Arabidopsis thaliana
acgaacaacatgtcatt

SEQ ID NO: 21655 - DNA, 17 bp, Arabidopsis thaliana
acgaacaacttttgatc

SEQ ID NO: 21656 - DNA, 17 bp, Arabidopsis thaliana
acgaacaacttttggtc

SEQ ID NO: 21657 - DNA, 17 bp, Arabidopsis thaliana
acgaacaaggttctcat

SEQ ID NO: 21658 - DNA, 17 bp, Arabidopsis thaliana
acgaacaagttctcatg

SEQ ID NO: 21659 - DNA, 17 bp, Arabidopsis thaliana
acgaacaatgttctcat

SEQ ID NO: 21660 - DNA, 17 bp, Arabidopsis thaliana
acgaacaatgttttcat

SEQ ID NO: 21661 - DNA, 17 bp, Arabidopsis thaliana
acgaacacgttggaata

SEQ ID NO: 21662 - DNA, 17 bp, Arabidopsis thaliana
acgaacaggacgtgctt

SEQ ID NO: 21663 - DNA, 17 bp, Arabidopsis thaliana
acgaacagggccatagt

SEQ ID NO: 21664 - DNA, 17 bp, Arabidopsis thaliana
acgaacagggccgaaag

SEQ ID NO: 21665 - DNA, 17 bp, Arabidopsis thaliana
acgaacagtcgtgtgct

SEQ ID NO: 21666 - DNA, 17 bp, Arabidopsis thaliana
acgaacatcatcacctg

SEQ ID NO: 21667 - DNA, 17 bp, Arabidopsis thaliana
acgaacatctcattcgg

SEQ ID NO: 21668 - DNA, 17 bp, Arabidopsis thaliana
acgaacatgacctatgg

SEQ ID NO: 21669 - DNA, 17 bp, Arabidopsis thaliana
acgaacattcgtgtgct

SEQ ID NO: 21670 - DNA, 17 bp, Arabidopsis thaliana
acgaacatttcgtgcca

SEQ ID NO: 21671 - DNA, 17 bp, Arabidopsis thaliana
acgaaccctaaatcatt

SEQ ID NO: 21672 - DNA, 17 bp, Arabidopsis thaliana
acgaaccctgaaagcgt

SEQ ID NO: 21673 - DNA, 17 bp, Arabidopsis thaliana
acgaaccggctgtctaa

SEQ ID NO: 21674 - DNA, 17 bp, Arabidopsis thaliana
acgaaccgtgaaagcgt

SEQ ID NO: 21675 - DNA, 17 bp, Arabidopsis thaliana
acgaacctgcggaagga

SEQ ID NO: 21676 - DNA, 17 bp, Arabidopsis thaliana
acgaacgactctgcgtg

SEQ ID NO: 21677 - DNA, 17 bp, Arabidopsis thaliana
acgaacgagacctcaac

SEQ ID NO: 21678 - DNA, 17 bp, Arabidopsis thaliana
acgaacgagacctcagc

SEQ ID NO: 21679 - DNA, 17 bp, Arabidopsis thaliana
acgaacgagactcagcc

SEQ ID NO: 21680 - DNA, 17 bp, Arabidopsis thaliana
acgaacgagacttcagc

SEQ ID NO: 21681 - DNA, 17 bp, Arabidopsis thaliana
acgaacgagtgttcttt

SEQ ID NO: 21682 - DNA, 17 bp, Arabidopsis thaliana
acgaacggtgtgacaat

SEQ ID NO: 21683 - DNA, 17 bp, Arabidopsis thaliana
acgaacgtccctttgtg

SEQ ID NO: 21684 - DNA, 17 bp, Arabidopsis thaliana
acgaacgtgcgggtcag

SEQ ID NO: 21685 - DNA, 17 bp, Arabidopsis thaliana
acgaacgttcttgtagc

SEQ ID NO: 21686 - DNA, 17 bp, Arabidopsis thaliana
acgaacgttgttgcggc

SEQ ID NO: 21687 - DNA, 17 bp, Arabidopsis thaliana
acgaactacggatcgat

SEQ ID NO: 21688 - DNA, 17 bp, Arabidopsis thaliana
acgaactacggatcgct

SEQ ID NO: 21689 - DNA, 17 bp, Arabidopsis thaliana
acgaactatgcgcgtga

SEQ ID NO: 21690 - DNA, 17 bp, Arabidopsis thaliana
acgaactcacctttgta

SEQ ID NO: 21691 - DNA, 17 bp, Arabidopsis thaliana
acgaacttccaacttcc

SEQ ID NO: 21692 - DNA, 17 bp, Arabidopsis thaliana
acgaacttgagacttgg

SEQ ID NO: 21693 - DNA, 17 bp, Arabidopsis thaliana
acgaactttgcgttgat

SEQ ID NO: 21694 - DNA, 17 bp, Arabidopsis thaliana
acgaactttttgtgcca

SEQ ID NO: 21695 - DNA, 17 bp, Arabidopsis thaliana
acgaagacaacgagctt

SEQ ID NO: 21696 - DNA, 17 bp, Arabidopsis thaliana
acgaagacaatgcagca

SEQ ID NO: 21697 - DNA, 17 bp, Arabidopsis thaliana
acgaagacgacagtttg

SEQ ID NO: 21698 - DNA, 17 bp, Arabidopsis thaliana
acgaagacttcgttggc

SEQ ID NO: 21699 - DNA, 17 bp, Arabidopsis thaliana
acgaagatgttgagccg

SEQ ID NO: 21700 - DNA, 17 bp, Arabidopsis thaliana
acgaagatttcctttct

SEQ ID NO: 21701 - DNA, 17 bp, Arabidopsis thaliana
acgaagatttcttttat

SEQ ID NO: 21702 - DNA, 17 bp, Arabidopsis thaliana
acgaagatttcttttct

SEQ ID NO: 21703 - DNA, 17 bp, Arabidopsis thaliana
acgaagcaaataggatt

SEQ ID NO: 21704 - DNA, 17 bp, Arabidopsis thaliana
acgaagcacctaataat

SEQ ID NO: 21705 - DNA, 17 bp, Arabidopsis thaliana
acgaagcatttcctcca

SEQ ID NO: 21706 - DNA, 17 bp, Arabidopsis thaliana
acgaagccagaagatgt

SEQ ID NO: 21707 - DNA, 17 bp, Arabidopsis thaliana
acgaagcccaggttttt

SEQ ID NO: 21708 - DNA, 17 bp, Arabidopsis thaliana
acgaagcccgtaattca

SEQ ID NO: 21709 - DNA, 17 bp, Arabidopsis thaliana
acgaagccggcggcgga

SEQ ID NO: 21710 - DNA, 17 bp, Arabidopsis thaliana
acgaagccttgacagac

SEQ ID NO: 21711 - DNA, 17 bp, Arabidopsis thaliana
acgaagcggttcggtac

SEQ ID NO: 21712 - DNA, 17 bp, Arabidopsis thaliana
acgaagctaccgtgcgc

SEQ ID NO: 21713 - DNA, 17 bp, Arabidopsis thaliana
acgaagctcattaggat

SEQ ID NO: 21714 - DNA, 17 bp, Arabidopsis thaliana
acgaagcttataggtcg

SEQ ID NO: 21715 - DNA, 17 bp, Arabidopsis thaliana
acgaagcttcgttccaa

SEQ ID NO: 21716 - DNA, 17 bp, Arabidopsis thaliana
acgaaggaccaccacac

SEQ ID NO: 21717 - DNA, 17 bp, Arabidopsis thaliana
acgaaggccaacccgtt

SEQ ID NO: 21718 - DNA, 17 bp, Arabidopsis thaliana
acgaaggccgcacttca

SEQ ID NO: 21719 - DNA, 17 bp, Arabidopsis thaliana
acgaagggtttcagcgg

SEQ ID NO: 21720 - DNA, 17 bp, Arabidopsis thaliana
acgaaggtctaaaggat

SEQ ID NO: 21721 - DNA, 17 bp, Arabidopsis thaliana
acgaaggtcttgggtgc

SEQ ID NO: 21722 - DNA, 17 bp, Arabidopsis thaliana
acgaaggtgatcataca

SEQ ID NO: 21723 - DNA, 17 bp, Arabidopsis thaliana
acgaaggttactattgg

SEQ ID NO: 21724 - DNA, 17 bp, Arabidopsis thaliana
acgaagtggctcttttg

SEQ ID NO: 21725 - DNA, 17 bp, Arabidopsis thaliana
acgaagttaagctgagg

SEQ ID NO: 21726 - DNA, 17 bp, Arabidopsis thaliana
acgaagttgctgagcgg

SEQ ID NO: 21727 - DNA, 17 bp, Arabidopsis thaliana
acgaagttgctttgact

SEQ ID NO: 21728 - DNA, 17 bp, Arabidopsis thaliana
acgaagttgtccttggc

SEQ ID NO: 21729 - DNA, 17 bp, Arabidopsis thaliana
acgaataagtccttgtt

SEQ ID NO: 21730 - DNA, 17 bp, Arabidopsis thaliana
acgaataatccattggt

SEQ ID NO: 21731 - DNA, 17 bp, Arabidopsis thaliana
acgaatacgaaccgtga

SEQ ID NO: 21732 - DNA, 17 bp, Arabidopsis thaliana
acgaatcaaacagtgaa

SEQ ID NO: 21733 - DNA, 17 bp, Arabidopsis thaliana
acgaatcaagactttcc

SEQ ID NO: 21734 - DNA, 17 bp, Arabidopsis thaliana
acgaatcacgattcaag

SEQ ID NO: 21735 - DNA, 17 bp, Arabidopsis thaliana
acgaatccaagacttgt

SEQ ID NO: 21736 - DNA, 17 bp, Arabidopsis thaliana
acgaatcctcggacccg

SEQ ID NO: 21737 - DNA, 17 bp, Arabidopsis thaliana
acgaatcctgatgagtg

SEQ ID NO: 21738 - DNA, 17 bp, Arabidopsis thaliana
acgaatcctggtattag

SEQ ID NO: 21739 - DNA, 17 bp, Arabidopsis thaliana
acgaatctagcgtattt

SEQ ID NO: 21740 - DNA, 17 bp, Arabidopsis thaliana
acgaatctcggctccta

SEQ ID NO: 21741 - DNA, 17 bp, Arabidopsis thaliana
acgaatctggagattgc

SEQ ID NO: 21742 - DNA, 17 bp, Arabidopsis thaliana
acgaatctgttggtgcc

SEQ ID NO: 21743 - DNA, 17 bp, Arabidopsis thaliana
acgaatgagcatgaaca

SEQ ID NO: 21744 - DNA, 17 bp, Arabidopsis thaliana
acgaatgagccagaagc

SEQ ID NO: 21745 - DNA, 17 bp, Arabidopsis thaliana
acgaatgatcatagtgt

SEQ ID NO: 21746 - DNA, 17 bp, Arabidopsis thaliana
acgaatgcagtcttcag

SEQ ID NO: 21747 - DNA, 17 bp, Arabidopsis thaliana
acgaatgcccccgactg

SEQ ID NO: 21748 - DNA, 17 bp, Arabidopsis thaliana
acgaatgctggaaacaa

SEQ ID NO: 21749 - DNA, 17 bp, Arabidopsis thaliana
acgaatggggaaagacg

SEQ ID NO: 21750 - DNA, 17 bp, Arabidopsis thaliana
acgaatgtgctctctat

SEQ ID NO: 21751 - DNA, 17 bp, Arabidopsis thaliana
acgaattcagactgtaa

SEQ ID NO: 21752 - DNA, 17 bp, Arabidopsis thaliana
acgaattcagactgtga

SEQ ID NO: 21753 - DNA, 17 bp, Arabidopsis thaliana
acgaattggagttaacg

SEQ ID NO: 21754 - DNA, 17 bp, Arabidopsis thaliana
acgaattgtgggcgaat

SEQ ID NO: 21755 - DNA, 17 bp, Arabidopsis thaliana
acgaatttagacatttt

SEQ ID NO: 21756 - DNA, 17 bp, Arabidopsis thaliana
acgaatttcatcatatc

SEQ ID NO: 21757 - DNA, 17 bp, Arabidopsis thaliana
acgaatttcggacctaa

SEQ ID NO: 21758 - DNA, 17 bp, Arabidopsis thaliana
acgaattttgcgggacg

SEQ ID NO: 21759 - DNA, 17 bp, Arabidopsis thaliana
acgacaaagatgtgcta

SEQ ID NO: 21760 - DNA, 17 bp, Arabidopsis thaliana
acgacaaattggaagct

SEQ ID NO: 21761 - DNA, 17 bp, Arabidopsis thaliana
acgacaacatcgacctt

SEQ ID NO: 21762 - DNA, 17 bp, Arabidopsis thaliana
acgacaagaatttccaa

SEQ ID NO: 21763 - DNA, 17 bp, Arabidopsis thaliana
acgacaagccctaattg

SEQ ID NO: 21764 - DNA, 17 bp, Arabidopsis thaliana
acgacaaggctcggggg

SEQ ID NO: 21765 - DNA, 17 bp, Arabidopsis thaliana
acgacaaggggaatccg

SEQ ID NO: 21766 - DNA, 17 bp, Arabidopsis thaliana
acgacaattatggccat

SEQ ID NO: 21767 - DNA, 17 bp, Arabidopsis thaliana
acgacaattcgatttcg

SEQ ID NO: 21768 - DNA, 17 bp, Arabidopsis thaliana
acgacacatggtcgttt

SEQ ID NO: 21769 - DNA, 17 bp, Arabidopsis thaliana
acgacacctctgtcgtc

SEQ ID NO: 21770 - DNA, 17 bp, Arabidopsis thaliana
acgacacgtgtatagga

SEQ ID NO: 21771 - DNA, 17 bp, Arabidopsis thaliana
acgacacttggttcgtt

SEQ ID NO: 21772 - DNA, 17 bp, Arabidopsis thaliana
acgacagacttcgtcaa

SEQ ID NO: 21773 - DNA, 17 bp, Arabidopsis thaliana
acgacagagtgttccgg

SEQ ID NO: 21774 - DNA, 17 bp, Arabidopsis thaliana
acgacagataacgttgt

SEQ ID NO: 21775 - DNA, 17 bp, Arabidopsis thaliana
acgacagatttgggctt

SEQ ID NO: 21776 - DNA, 17 bp, Arabidopsis thaliana
acgacagcgatcaaaca

SEQ ID NO: 21777 - DNA, 17 bp, Arabidopsis thaliana
acgacagctattttatc

SEQ ID NO: 21778 - DNA, 17 bp, Arabidopsis thaliana
acgacaggaacaacgtt

SEQ ID NO: 21779 - DNA, 17 bp, Arabidopsis thaliana
acgacaggttttgcggg

SEQ ID NO: 21780 - DNA, 17 bp, Arabidopsis thaliana
acgacagtcggttttga

SEQ ID NO: 21781 - DNA, 17 bp, Arabidopsis thaliana
acgacagtctttgcttg

SEQ ID NO: 21782 - DNA, 17 bp, Arabidopsis thaliana
acgacagtggattgacc

SEQ ID NO: 21783 - DNA, 17 bp, Arabidopsis thaliana
acgacataacatgggct

SEQ ID NO: 21784 - DNA, 17 bp, Arabidopsis thaliana
acgacatcagatctatc

SEQ ID NO: 21785 - DNA, 17 bp, Arabidopsis thaliana
acgacatccatttgact

SEQ ID NO: 21786 - DNA, 17 bp, Arabidopsis thaliana
acgacatcgacaggatt

SEQ ID NO: 21787 - DNA, 17 bp, Arabidopsis thaliana
acgacatcgttttaccg

SEQ ID NO: 21788 - DNA, 17 bp, Arabidopsis thaliana
acgacatgaactatcgc

SEQ ID NO: 21789 - DNA, 17 bp, Arabidopsis thaliana
acgacatgaccaaaatg

SEQ ID NO: 21790 - DNA, 17 bp, Arabidopsis thaliana
acgacatgactcaaatg

SEQ ID NO: 21791 - DNA, 17 bp, Arabidopsis thaliana
acgacatgactctggat

SEQ ID NO: 21792 - DNA, 17 bp, Arabidopsis thaliana
acgacatgagcttcaag

SEQ ID NO: 21793 - DNA, 17 bp, Arabidopsis thaliana
acgacatgcccaaaata

SEQ ID NO: 21794 - DNA, 17 bp, Arabidopsis thaliana
acgacatggttgccgat

SEQ ID NO: 21795 - DNA, 17 bp, Arabidopsis thaliana
acgacatggttggcgat

SEQ ID NO: 21796 - DNA, 17 bp, Arabidopsis thaliana
acgacatgtcgacggcc

SEQ ID NO: 21797 - DNA, 17 bp, Arabidopsis thaliana
acgacatgtctgctttg

SEQ ID NO: 21798 - DNA, 17 bp, Arabidopsis thaliana
acgacatgtgtcccccc

SEQ ID NO: 21799 - DNA, 17 bp, Arabidopsis thaliana
acgacattcatgtgatg

SEQ ID NO: 21800 - DNA, 17 bp, Arabidopsis thaliana
acgacattgctgccaaa

SEQ ID NO: 21801 - DNA, 17 bp, Arabidopsis thaliana
acgaccaatcggaagct

SEQ ID NO: 21802 - DNA, 17 bp, Arabidopsis thaliana
acgaccagctgttagag

SEQ ID NO: 21803 - DNA, 17 bp, Arabidopsis thaliana
acgaccaggatgttggc

SEQ ID NO: 21804 - DNA, 17 bp, Arabidopsis thaliana
acgaccaggtgttggat

SEQ ID NO: 21805 - DNA, 17 bp, Arabidopsis thaliana
acgaccagtgccagttt

SEQ ID NO: 21806 - DNA, 17 bp, Arabidopsis thaliana
acgaccatagcacgaac

SEQ ID NO: 21807 - DNA, 17 bp, Arabidopsis thaliana
acgaccatttcaaaagt

SEQ ID NO: 21808 - DNA, 17 bp, Arabidopsis thaliana
acgaccatttcaagagt

SEQ ID NO: 21809 - DNA, 17 bp, Arabidopsis thaliana
acgaccatttcacgagt

SEQ ID NO: 21810 - DNA, 17 bp, Arabidopsis thaliana
acgacccacagaggact

SEQ ID NO: 21811 - DNA, 17 bp, Arabidopsis thaliana
acgacccagaaagcctc

SEQ ID NO: 21812 - DNA, 17 bp, Arabidopsis thaliana
acgacccagaaagcctt

SEQ ID NO: 21813 - DNA, 17 bp, Arabidopsis thaliana
acgacccatagagactc

SEQ ID NO: 21814 - DNA, 17 bp, Arabidopsis thaliana
acgaccccaggtcaggc

SEQ ID NO: 21815 - DNA, 17 bp, Arabidopsis thaliana
acgaccctcggcaacgg

SEQ ID NO: 21816 - DNA, 17 bp, Arabidopsis thaliana
acgaccgacgcggatta

SEQ ID NO: 21817 - DNA, 17 bp, Arabidopsis thaliana
acgaccgcatacgaagt

SEQ ID NO: 21818 - DNA, 17 bp, Arabidopsis thaliana
acgaccgctgatactgt

SEQ ID NO: 21819 - DNA, 17 bp, Arabidopsis thaliana
acgaccggatattgcgt

SEQ ID NO: 21820 - DNA, 17 bp, Arabidopsis thaliana
acgaccggcgttaggca

SEQ ID NO: 21821 - DNA, 17 bp, Arabidopsis thaliana
acgaccgggcgtgagcg

SEQ ID NO: 21822 - DNA, 17 bp, Arabidopsis thaliana
acgaccgggttggcgag

SEQ ID NO: 21823 - DNA, 17 bp, Arabidopsis thaliana
acgaccggtccactacc

SEQ ID NO: 21824 - DNA, 17 bp, Arabidopsis thaliana
acgaccgttccgccgtt

SEQ ID NO: 21825 - DNA, 17 bp, Arabidopsis thaliana
acgaccgttgtgattgg

SEQ ID NO: 21826 - DNA, 17 bp, Arabidopsis thaliana
acgaccgtttggttaac

SEQ ID NO: 21827 - DNA, 17 bp, Arabidopsis thaliana
acgacctagatagtacg

SEQ ID NO: 21828 - DNA, 17 bp, Arabidopsis thaliana
acgacctataatctttg

SEQ ID NO: 21829 - DNA, 17 bp, Arabidopsis thaliana
acgacctatacccggcc

SEQ ID NO: 21830 - DNA, 17 bp, Arabidopsis thaliana
acgacctcttctacagg

SEQ ID NO: 21831 - DNA, 17 bp, Arabidopsis thaliana
acgacctgtgtccccat

SEQ ID NO: 21832 - DNA, 17 bp, Arabidopsis thaliana
acgacctgtgtccccct

SEQ ID NO: 21833 - DNA, 17 bp, Arabidopsis thaliana
acgacctgtgtgccatt

SEQ ID NO: 21834 - DNA, 17 bp, Arabidopsis thaliana
acgacctgtgtgccctc

SEQ ID NO: 21835 - DNA, 17 bp, Arabidopsis thaliana
acgacctgtgtgccctt

SEQ ID NO: 21836 - DNA, 17 bp, Arabidopsis thaliana
acgacctgtgtgtccct

SEQ ID NO: 21837 - DNA, 17 bp, Arabidopsis thaliana
acgaccttagctcagtt

SEQ ID NO: 21838 - DNA, 17 bp, Arabidopsis thaliana
acgacgaacctccgccc

SEQ ID NO: 21839 - DNA, 17 bp, Arabidopsis thaliana
acgacgaacctccgccg

SEQ ID NO: 21840 - DNA, 17 bp, Arabidopsis thaliana
acgacgaatcggcttgc

SEQ ID NO: 21841 - DNA, 17 bp, Arabidopsis thaliana
acgacgacccatttgtc

SEQ ID NO: 21842 - DNA, 17 bp, Arabidopsis thaliana
acgacgaccgggttggc

SEQ ID NO: 21843 - DNA, 17 bp, Arabidopsis thaliana
acgacgacggatctgtc

SEQ ID NO: 21844 - DNA, 17 bp, Arabidopsis thaliana
acgacgactgacgactg

SEQ ID NO: 21845 - DNA, 17 bp, Arabidopsis thaliana
acgacgagatgagacat

SEQ ID NO: 21846 - DNA, 17 bp, Arabidopsis thaliana
acgacgagatgatcaaa

SEQ ID NO: 21847 - DNA, 17 bp, Arabidopsis thaliana
acgacgagcaactgtag

SEQ ID NO: 21848 - DNA, 17 bp, Arabidopsis thaliana
acgacgagccagatccg

SEQ ID NO: 21849 - DNA, 17 bp, Arabidopsis thaliana
acgacgaggattgtgca

SEQ ID NO: 21850 - DNA, 17 bp, Arabidopsis thaliana
acgacgaggcgggaggt

SEQ ID NO: 21851 - DNA, 17 bp, Arabidopsis thaliana
acgacgaggtgatcgct

SEQ ID NO: 21852 - DNA, 17 bp, Arabidopsis thaliana
acgacgagtgttggtga

SEQ ID NO: 21853 - DNA, 17 bp, Arabidopsis thaliana
acgacgatgaccaccca

SEQ ID NO: 21854 - DNA, 17 bp, Arabidopsis thaliana
acgacgatgtaacgggg

SEQ ID NO: 21855 - DNA, 17 bp, Arabidopsis thaliana
acgacgcagacgatttt

SEQ ID NO: 21856 - DNA, 17 bp, Arabidopsis thaliana
acgacgccgacccgctt

SEQ ID NO: 21857 - DNA, 17 bp, Arabidopsis thaliana
acgacgccgcaatttct

SEQ ID NO: 21858 - DNA, 17 bp, Arabidopsis thaliana
acgacgccggagattgc

SEQ ID NO: 21859 - DNA, 17 bp, Arabidopsis thaliana
acgacgccgtcgtttga

SEQ ID NO: 21860 - DNA, 17 bp, Arabidopsis thaliana
acgacgccgttttgggt

SEQ ID NO: 21861 - DNA, 17 bp, Arabidopsis thaliana
acgacgcgaacaagttt

SEQ ID NO: 21862 - DNA, 17 bp, Arabidopsis thaliana
acgacgcggattacggt

SEQ ID NO: 21863 - DNA, 17 bp, Arabidopsis thaliana
acgacgcgttttatgtg

SEQ ID NO: 21864 - DNA, 17 bp, Arabidopsis thaliana
acgacgctatcggtgag

SEQ ID NO: 21865 - DNA, 17 bp, Arabidopsis thaliana
acgacgctccttttgac

SEQ ID NO: 21866 - DNA, 17 bp, Arabidopsis thaliana
acgacgctgtcgatcga

SEQ ID NO: 21867 - DNA, 17 bp, Arabidopsis thaliana
acgacgcttggagaaga

SEQ ID NO: 21868 - DNA, 17 bp, Arabidopsis thaliana
acgacggacatgggtac

SEQ ID NO: 21869 - DNA, 17 bp, Arabidopsis thaliana
acgacggatctgtcttt

SEQ ID NO: 21870 - DNA, 17 bp, Arabidopsis thaliana
acgacggattctatggc

SEQ ID NO: 21871 - DNA, 17 bp, Arabidopsis thaliana
acgacggatttggcgag

SEQ ID NO: 21872 - DNA, 17 bp, Arabidopsis thaliana
acgacggcgaagatggg

SEQ ID NO: 21873 - DNA, 17 bp, Arabidopsis thaliana
acgacggcgacgaattg

SEQ ID NO: 21874 - DNA, 17 bp, Arabidopsis thaliana
acgacggcgagtggcag

SEQ ID NO: 21875 - DNA, 17 bp, Arabidopsis thaliana
acgacggctcggagtat

SEQ ID NO: 21876 - DNA, 17 bp, Arabidopsis thaliana
acgacggctctcatgct

SEQ ID NO: 21877 - DNA, 17 bp, Arabidopsis thaliana
acgacggctctcattct

SEQ ID NO: 21878 - DNA, 17 bp, Arabidopsis thaliana
acgacggggcaggtggg

SEQ ID NO: 21879 - DNA, 17 bp, Arabidopsis thaliana
acgacggtccatactat

SEQ ID NO: 21880 - DNA, 17 bp, Arabidopsis thaliana
acgacggtctaatccca

SEQ ID NO: 21881 - DNA, 17 bp, Arabidopsis thaliana
acgacggtgatcgctac

SEQ ID NO: 21882 - DNA, 17 bp, Arabidopsis thaliana
acgacggtgtagccttt

SEQ ID NO: 21883 - DNA, 17 bp, Arabidopsis thaliana
acgacggtgtcgatcga

SEQ ID NO: 21884 - DNA, 17 bp, Arabidopsis thaliana
acgacgtcgttttggaa

SEQ ID NO: 21885 - DNA, 17 bp, Arabidopsis thaliana
acgacgtggccgccacc

SEQ ID NO: 21886 - DNA, 17 bp, Arabidopsis thaliana
acgacgtgtggtttgtt

SEQ ID NO: 21887 - DNA, 17 bp, Arabidopsis thaliana
acgactaaatgtctgaa

SEQ ID NO: 21888 - DNA, 17 bp, Arabidopsis thaliana
acgactaacatccggaa

SEQ ID NO: 21889 - DNA, 17 bp, Arabidopsis thaliana
acgactaaggacttcaa

SEQ ID NO: 21890 - DNA, 17 bp, Arabidopsis thaliana
acgactaagggcttgat

SEQ ID NO: 21891 - DNA, 17 bp, Arabidopsis thaliana
acgactaagtagtccac

SEQ ID NO: 21892 - DNA, 17 bp, Arabidopsis thaliana
acgactaagttctccgg

SEQ ID NO: 21893 - DNA, 17 bp, Arabidopsis thaliana
acgactaataagcttgt

SEQ ID NO: 21894 - DNA, 17 bp, Arabidopsis thaliana
acgactaatcagtgcaa

SEQ ID NO: 21895 - DNA, 17 bp, Arabidopsis thaliana
acgactacagggttact

SEQ ID NO: 21896 - DNA, 17 bp, Arabidopsis thaliana
acgactaccgaggtgct

SEQ ID NO: 21897 - DNA, 17 bp, Arabidopsis thaliana
acgactacggacggatg

SEQ ID NO: 21898 - DNA, 17 bp, Arabidopsis thaliana
acgactactcagatggg

SEQ ID NO: 21899 - DNA, 17 bp, Arabidopsis thaliana
acgactactccagtgtt

SEQ ID NO: 21900 - DNA, 17 bp, Arabidopsis thaliana
acgactacttcacccaa

SEQ ID NO: 21901 - DNA, 17 bp, Arabidopsis thaliana
acgactagggcagtccg

SEQ ID NO: 21902 - DNA, 17 bp, Arabidopsis thaliana
acgactagttgctcgat

SEQ ID NO: 21903 - DNA, 17 bp, Arabidopsis thaliana
acgactagttttctgat

SEQ ID NO: 21904 - DNA, 17 bp, Arabidopsis thaliana
acgactatcttatgcaa

SEQ ID NO: 21905 - DNA, 17 bp, Arabidopsis thaliana
acgactatgccaactgg

SEQ ID NO: 21906 - DNA, 17 bp, Arabidopsis thaliana
acgactatgccactcca

SEQ ID NO: 21907 - DNA, 17 bp, Arabidopsis thaliana
acgactattccgtgccg

SEQ ID NO: 21908 - DNA, 17 bp, Arabidopsis thaliana
acgactattgcgtttag

SEQ ID NO: 21909 - DNA, 17 bp, Arabidopsis thaliana
acgactatttcctgccg

SEQ ID NO: 21910 - DNA, 17 bp, Arabidopsis thaliana
acgactatttggcgact

SEQ ID NO: 21911 - DNA, 17 bp, Arabidopsis thaliana
acgactattttgcgact

SEQ ID NO: 21912 - DNA, 17 bp, Arabidopsis thaliana
acgactcaaacccgtcc

SEQ ID NO: 21913 - DNA, 17 bp, Arabidopsis thaliana
acgactccgctggcacc

SEQ ID NO: 21914 - DNA, 17 bp, Arabidopsis thaliana
acgactcggaatttcac

SEQ ID NO: 21915 - DNA, 17 bp, Arabidopsis thaliana
acgactcggcaacggat

SEQ ID NO: 21916 - DNA, 17 bp, Arabidopsis thaliana
acgactctaagatctgt

SEQ ID NO: 21917 - DNA, 17 bp, Arabidopsis thaliana
acgactctcagcaacgg

SEQ ID NO: 21918 - DNA, 17 bp, Arabidopsis thaliana
acgactctccgcaaccg

SEQ ID NO: 21919 - DNA, 17 bp, Arabidopsis thaliana
acgactctccgcaacgg

SEQ ID NO: 21920 - DNA, 17 bp, Arabidopsis thaliana
acgactctcggcaacag

SEQ ID NO: 21921 - DNA, 17 bp, Arabidopsis thaliana
acgactctcggcaacgc

SEQ ID NO: 21922 - DNA, 17 bp, Arabidopsis thaliana
acgactctcggcaacgg

SEQ ID NO: 21923 - DNA, 17 bp, Arabidopsis thaliana
acgactctcggcaacgt

SEQ ID NO: 21924 - DNA, 17 bp, Arabidopsis thaliana
acgactctcggcaactg

SEQ ID NO: 21925 - DNA, 17 bp, Arabidopsis thaliana
acgactctcggcagcgg

SEQ ID NO: 21926 - DNA, 17 bp, Arabidopsis thaliana
acgactctcggtaacgg

SEQ ID NO: 21927 - DNA, 17 bp, Arabidopsis thaliana
acgactctctgcaacgg

SEQ ID NO: 21928 - DNA, 17 bp, Arabidopsis thaliana
acgactcttggcaacgg

SEQ ID NO: 21929 - DNA, 17 bp, Arabidopsis thaliana
acgactcttgttcttct

SEQ ID NO: 21930 - DNA, 17 bp, Arabidopsis thaliana
acgactgaccaaacggg

SEQ ID NO: 21931 - DNA, 17 bp, Arabidopsis thaliana
acgactgacgactgctg

SEQ ID NO: 21932 - DNA, 17 bp, Arabidopsis thaliana
acgactgagtacgacgg

SEQ ID NO: 21933 - DNA, 17 bp, Arabidopsis thaliana
acgactgagttatacgt

SEQ ID NO: 21934 - DNA, 17 bp, Arabidopsis thaliana
acgactgatcataagcc

SEQ ID NO: 21935 - DNA, 17 bp, Arabidopsis thaliana
acgactgatcccactcg

SEQ ID NO: 21936 - DNA, 17 bp, Arabidopsis thaliana
acgactgatgacttgct

SEQ ID NO: 21937 - DNA, 17 bp, Arabidopsis thaliana
acgactgatgtggggct

SEQ ID NO: 21938 - DNA, 17 bp, Arabidopsis thaliana
acgactgcggctgacta

SEQ ID NO: 21939 - DNA, 17 bp, Arabidopsis thaliana
acgactgctaacgtcgc

SEQ ID NO: 21940 - DNA, 17 bp, Arabidopsis thaliana
acgactgctacctattc

SEQ ID NO: 21941 - DNA, 17 bp, Arabidopsis thaliana
acgactgctctgtccct

SEQ ID NO: 21942 - DNA, 17 bp, Arabidopsis thaliana
acgactgctgggttcat

SEQ ID NO: 21943 - DNA, 17 bp, Arabidopsis thaliana
acgactggagtctgaat

SEQ ID NO: 21944 - DNA, 17 bp, Arabidopsis thaliana
acgactggagtgggaga

SEQ ID NO: 21945 - DNA, 17 bp, Arabidopsis thaliana
acgactggctggctcta

SEQ ID NO: 21946 - DNA, 17 bp, Arabidopsis thaliana
acgactgggataggttc

SEQ ID NO: 21947 - DNA, 17 bp, Arabidopsis thaliana
acgactggtctgactca

SEQ ID NO: 21948 - DNA, 17 bp, Arabidopsis thaliana
acgactggttgagcgtt

SEQ ID NO: 21949 - DNA, 17 bp, Arabidopsis thaliana
acgactggttgatcagc

SEQ ID NO: 21950 - DNA, 17 bp, Arabidopsis thaliana
acgactggtttagcggt

SEQ ID NO: 21951 - DNA, 17 bp, Arabidopsis thaliana
acgactgtcaccattcg

SEQ ID NO: 21952 - DNA, 17 bp, Arabidopsis thaliana
acgactgtcaccgttcg

SEQ ID NO: 21953 - DNA, 17 bp, Arabidopsis thaliana
acgactgtcgctacttt

SEQ ID NO: 21954 - DNA, 17 bp, Arabidopsis thaliana
acgactgtctctggttc

SEQ ID NO: 21955 - DNA, 17 bp, Arabidopsis thaliana
acgactgtggcggtgtt

SEQ ID NO: 21956 - DNA, 17 bp, Arabidopsis thaliana
acgactgtgttttagtt

SEQ ID NO: 21957 - DNA, 17 bp, Arabidopsis thaliana
acgactgttcttcacca

SEQ ID NO: 21958 - DNA, 17 bp, Arabidopsis thaliana
acgactgttgttgcgtc

SEQ ID NO: 21959 - DNA, 17 bp, Arabidopsis thaliana
acgactgtttcaaccac

SEQ ID NO: 21960 - DNA, 17 bp, Arabidopsis thaliana
acgactgtttgtgaatc

SEQ ID NO: 21961 - DNA, 17 bp, Arabidopsis thaliana
acgactgtttttgtatc

SEQ ID NO: 21962 - DNA, 17 bp, Arabidopsis thaliana
acgacttaaactgcgca

SEQ ID NO: 21963 - DNA, 17 bp, Arabidopsis thaliana
acgacttaaatacgcga

SEQ ID NO: 21964 - DNA, 17 bp, Arabidopsis thaliana
acgacttaactttctga

SEQ ID NO: 21965 - DNA, 17 bp, Arabidopsis thaliana
acgacttagttgcttgg

SEQ ID NO: 21966 - DNA, 17 bp, Arabidopsis thaliana
acgacttcaacggtgaa

SEQ ID NO: 21967 - DNA, 17 bp, Arabidopsis thaliana
acgacttccggcaacgg

SEQ ID NO: 21968 - DNA, 17 bp, Arabidopsis thaliana
acgacttcggcaacgga

SEQ ID NO: 21969 - DNA, 17 bp, Arabidopsis thaliana
acgacttcgtatgcggt

SEQ ID NO: 21970 - DNA, 17 bp, Arabidopsis thaliana
acgacttcgttcggccg

SEQ ID NO: 21971 - DNA, 17 bp, Arabidopsis thaliana
acgacttctgacctgct

SEQ ID NO: 21972 - DNA, 17 bp, Arabidopsis thaliana
acgacttctttgcgact

SEQ ID NO: 21973 - DNA, 17 bp, Arabidopsis thaliana
acgacttgccgcgattc

SEQ ID NO: 21974 - DNA, 17 bp, Arabidopsis thaliana
acgacttggacatcctg

SEQ ID NO: 21975 - DNA, 17 bp, Arabidopsis thaliana
acgacttggatatagcg

SEQ ID NO: 21976 - DNA, 17 bp, Arabidopsis thaliana
acgacttggctaagatg

SEQ ID NO: 21977 - DNA, 17 bp, Arabidopsis thaliana
acgacttgttctggtaa

SEQ ID NO: 21978 - DNA, 17 bp, Arabidopsis thaliana
acgactttaaaccgaac

SEQ ID NO: 21979 - DNA, 17 bp, Arabidopsis thaliana
acgactttaagatccgg

SEQ ID NO: 21980 - DNA, 17 bp, Arabidopsis thaliana
acgactttaagatctat

SEQ ID NO: 21981 - DNA, 17 bp, Arabidopsis thaliana
acgactttaagatctgt

SEQ ID NO: 21982 - DNA, 17 bp, Arabidopsis thaliana
acgactttcggcaacgg

SEQ ID NO: 21983 - DNA, 17 bp, Arabidopsis thaliana
acgactttcttggcaat

SEQ ID NO: 21984 - DNA, 17 bp, Arabidopsis thaliana
acgactttgaaattttc

SEQ ID NO: 21985 - DNA, 17 bp, Arabidopsis thaliana
acgactttgattatttt

SEQ ID NO: 21986 - DNA, 17 bp, Arabidopsis thaliana
acgactttgtttgctcc

SEQ ID NO: 21987 - DNA, 17 bp, Arabidopsis thaliana
acgacttttacggcgtt

SEQ ID NO: 21988 - DNA, 17 bp, Arabidopsis thaliana
acgagaaaccaagcaac

SEQ ID NO: 21989 - DNA, 17 bp, Arabidopsis thaliana
acgagaaacttccattt

SEQ ID NO: 21990 - DNA, 17 bp, Arabidopsis thaliana
acgagaaattcctaagg

SEQ ID NO: 21991 - DNA, 17 bp, Arabidopsis thaliana
acgagaacgagatcttt

SEQ ID NO: 21992 - DNA, 17 bp, Arabidopsis thaliana
acgagaactatcaataa

SEQ ID NO: 21993 - DNA, 17 bp, Arabidopsis thaliana
acgagaactatcagatc

SEQ ID NO: 21994 - DNA, 17 bp, Arabidopsis thaliana
acgagaactatcgcatc

SEQ ID NO: 21995 - DNA, 17 bp, Arabidopsis thaliana
acgagaactccgaggtg

SEQ ID NO: 21996 - DNA, 17 bp, Arabidopsis thaliana
acgagaagagtatcgat

SEQ ID NO: 21997 - DNA, 17 bp, Arabidopsis thaliana
acgagaagcacactgtc

SEQ ID NO: 21998 - DNA, 17 bp, Arabidopsis thaliana
acgagaagcagggcacg

SEQ ID NO: 21999 - DNA, 17 bp, Arabidopsis thaliana
acgagaatccagtggtg

SEQ ID NO: 22000 - DNA, 17 bp, Arabidopsis thaliana
acgagaatttggtgctc

SEQ ID NO: 22001 - DNA, 17 bp, Arabidopsis thaliana
acgagacagcagaagtc

SEQ ID NO: 22002 - DNA, 17 bp, Arabidopsis thaliana
acgagaccggagaagag

SEQ ID NO: 22003 - DNA, 17 bp, Arabidopsis thaliana
acgagacctcagcctgc

SEQ ID NO: 22004 - DNA, 17 bp, Arabidopsis thaliana
acgagacctcagtctgc

SEQ ID NO: 22005 - DNA, 17 bp, Arabidopsis thaliana
acgagacggccgggagt

SEQ ID NO: 22006 - DNA, 17 bp, Arabidopsis thaliana
acgagacgggttggcgg

SEQ ID NO: 22007 - DNA, 17 bp, Arabidopsis thaliana
acgagacgggttggtgg

SEQ ID NO: 22008 - DNA, 17 bp, Arabidopsis thaliana
acgagacggtataccac

SEQ ID NO: 22009 - DNA, 17 bp, Arabidopsis thaliana
acgagacgtcggcgggg

SEQ ID NO: 22010 - DNA, 17 bp, Arabidopsis thaliana
acgagactacccgtggg

SEQ ID NO: 22011 - DNA, 17 bp, Arabidopsis thaliana
acgagactgcagaagtc

SEQ ID NO: 22012 - DNA, 17 bp, Arabidopsis thaliana
acgagagaacttattga

SEQ ID NO: 22013 - DNA, 17 bp, Arabidopsis thaliana
acgagagaagtgcggtg

SEQ ID NO: 22014 - DNA, 17 bp, Arabidopsis thaliana
acgagagcgcttatcca

SEQ ID NO: 22015 - DNA, 17 bp, Arabidopsis thaliana
acgagagcgttcgcagg

SEQ ID NO: 22016 - DNA, 17 bp, Arabidopsis thaliana
acgagaggaaccgttga

SEQ ID NO: 22017 - DNA, 17 bp, Arabidopsis thaliana
acgagaggtccaacggc

SEQ ID NO: 22018 - DNA, 17 bp, Arabidopsis thaliana
acgagagtcagccgttg

SEQ ID NO: 22019 - DNA, 17 bp, Arabidopsis thaliana
acgagataacgtcggtt

SEQ ID NO: 22020 - DNA, 17 bp, Arabidopsis thaliana
acgagataccgataggc

SEQ ID NO: 22021 - DNA, 17 bp, Arabidopsis thaliana
acgagatattggtgcgg

SEQ ID NO: 22022 - DNA, 17 bp, Arabidopsis thaliana
acgagatattggtgggg

SEQ ID NO: 22023 - DNA, 17 bp, Arabidopsis thaliana
acgagatcatgacacgt

SEQ ID NO: 22024 - DNA, 17 bp, Arabidopsis thaliana
acgagatcgatcagtgc

SEQ ID NO: 22025 - DNA, 17 bp, Arabidopsis thaliana
acgagatcgttgaatga

SEQ ID NO: 22026 - DNA, 17 bp, Arabidopsis thaliana
acgagatctacttcaag

SEQ ID NO: 22027 - DNA, 17 bp, Arabidopsis thaliana
acgagatctttccgcgt

SEQ ID NO: 22028 - DNA, 17 bp, Arabidopsis thaliana
acgagatgttgggcttg

SEQ ID NO: 22029 - DNA, 17 bp, Arabidopsis thaliana
acgagattagatggtcg

SEQ ID NO: 22030 - DNA, 17 bp, Arabidopsis thaliana
acgagattatgacacgt

SEQ ID NO: 22031 - DNA, 17 bp, Arabidopsis thaliana
acgagattattgtgttg

SEQ ID NO: 22032 - DNA, 17 bp, Arabidopsis thaliana
acgagattcatgtcttt

SEQ ID NO: 22033 - DNA, 17 bp, Arabidopsis thaliana
acgagattcccactgtc

SEQ ID NO: 22034 - DNA, 17 bp, Arabidopsis thaliana
acgagattcccactttc

SEQ ID NO: 22035 - DNA, 17 bp, Arabidopsis thaliana
acgagattcctaaacta

SEQ ID NO: 22036 - DNA, 17 bp, Arabidopsis thaliana
acgagattcgttttcgt

SEQ ID NO: 22037 - DNA, 17 bp, Arabidopsis thaliana
acgagattcttggttgg

SEQ ID NO: 22038 - DNA, 17 bp, Arabidopsis thaliana
acgagatttggatggat

SEQ ID NO: 22039 - DNA, 17 bp, Arabidopsis thaliana
acgagattttgacccgc

SEQ ID NO: 22040 - DNA, 17 bp, Arabidopsis thaliana
acgagatttttccgcgt

SEQ ID NO: 22041 - DNA, 17 bp, Arabidopsis thaliana
acgagattttttccgcg

SEQ ID NO: 22042 - DNA, 17 bp, Arabidopsis thaliana
acgagcacggcaagcgg

SEQ ID NO: 22043 - DNA, 17 bp, Arabidopsis thaliana
acgagcagaggagcgat

SEQ ID NO: 22044 - DNA, 17 bp, Arabidopsis thaliana
acgagcaggagtcggaa

SEQ ID NO: 22045 - DNA, 17 bp, Arabidopsis thaliana
acgagcatgactatcca

SEQ ID NO: 22046 - DNA, 17 bp, Arabidopsis thaliana
acgagcatggttactac

SEQ ID NO: 22047 - DNA, 17 bp, Arabidopsis thaliana
acgagcattaccacatt

SEQ ID NO: 22048 - DNA, 17 bp, Arabidopsis thaliana
acgagcccgagttttct

SEQ ID NO: 22049 - DNA, 17 bp, Arabidopsis thaliana
acgagcccgctttcaag

SEQ ID NO: 22050 - DNA, 17 bp, Arabidopsis thaliana
acgagccgacccagtag

SEQ ID NO: 22051 - DNA, 17 bp, Arabidopsis thaliana
acgagccgatttttttt

SEQ ID NO: 22052 - DNA, 17 bp, Arabidopsis thaliana
acgagcctcttaggttg

SEQ ID NO: 22053 - DNA, 17 bp, Arabidopsis thaliana
acgagcggataagcctc

SEQ ID NO: 22054 - DNA, 17 bp, Arabidopsis thaliana
acgagcggcgggttttg

SEQ ID NO: 22055 - DNA, 17 bp, Arabidopsis thaliana
acgagcggttgcggttt

SEQ ID NO: 22056 - DNA, 17 bp, Arabidopsis thaliana
acgagctgcggtcgagt

SEQ ID NO: 22057 - DNA, 17 bp, Arabidopsis thaliana
acgaggaaggagtgccg

SEQ ID NO: 22058 - DNA, 17 bp, Arabidopsis thaliana
acgaggaagtgtctgag

SEQ ID NO: 22059 - DNA, 17 bp, Arabidopsis thaliana
acgaggaatcgtcgacc

SEQ ID NO: 22060 - DNA, 17 bp, Arabidopsis thaliana
acgaggaatgaccgacc

SEQ ID NO: 22061 - DNA, 17 bp, Arabidopsis thaliana
acgaggaattaccgacc

SEQ ID NO: 22062 - DNA, 17 bp, Arabidopsis thaliana
acgaggacccaggagtg

SEQ ID NO: 22063 - DNA, 17 bp, Arabidopsis thaliana
acgaggaccgagtgccg

SEQ ID NO: 22064 - DNA, 17 bp, Arabidopsis thaliana
acgaggactatggctcc

SEQ ID NO: 22065 - DNA, 17 bp, Arabidopsis thaliana
acgaggactcttgtcag

SEQ ID NO: 22066 - DNA, 17 bp, Arabidopsis thaliana
acgaggacttcccggga

SEQ ID NO: 22067 - DNA, 17 bp, Arabidopsis thaliana
acgaggacttgccggca

SEQ ID NO: 22068 - DNA, 17 bp, Arabidopsis thaliana
acgaggactttgattgg

SEQ ID NO: 22069 - DNA, 17 bp, Arabidopsis thaliana
acgaggactttttcggt

SEQ ID NO: 22070 - DNA, 17 bp, Arabidopsis thaliana
acgaggagacacgtggc

SEQ ID NO: 22071 - DNA, 17 bp, Arabidopsis thaliana
acgaggagcgtctcaac

SEQ ID NO: 22072 - DNA, 17 bp, Arabidopsis thaliana
acgaggagcgtcttcac

SEQ ID NO: 22073 - DNA, 17 bp, Arabidopsis thaliana
acgaggagtgtggtgtt

SEQ ID NO: 22074 - DNA, 17 bp, Arabidopsis thaliana
acgaggagttcaactct

SEQ ID NO: 22075 - DNA, 17 bp, Arabidopsis thaliana
acgaggatccattggag

SEQ ID NO: 22076 - DNA, 17 bp, Arabidopsis thaliana
acgaggcaagtatccaa

SEQ ID NO: 22077 - DNA, 17 bp, Arabidopsis thaliana
acgaggccagtgagaga

SEQ ID NO: 22078 - DNA, 17 bp, Arabidopsis thaliana
acgaggccgtataccac

SEQ ID NO: 22079 - DNA, 17 bp, Arabidopsis thaliana
acgaggcctccatagcg

SEQ ID NO: 22080 - DNA, 17 bp, Arabidopsis thaliana
acgaggccttggtttct

SEQ ID NO: 22081 - DNA, 17 bp, Arabidopsis thaliana
acgaggcgatataccgt

SEQ ID NO: 22082 - DNA, 17 bp, Arabidopsis thaliana
acgaggcgctgtctacg

SEQ ID NO: 22083 - DNA, 17 bp, Arabidopsis thaliana
acgaggcgcttgtttcc

SEQ ID NO: 22084 - DNA, 17 bp, Arabidopsis thaliana
acgaggcgggccttgtc

SEQ ID NO: 22085 - DNA, 17 bp, Arabidopsis thaliana
acgagggaaagtttcta

SEQ ID NO: 22086 - DNA, 17 bp, Arabidopsis thaliana
acgagggagtgctacca

SEQ ID NO: 22087 - DNA, 17 bp, Arabidopsis thaliana
acgagggcacgtctgcc

SEQ ID NO: 22088 - DNA, 17 bp, Arabidopsis thaliana
acgagggctgggctcgg

SEQ ID NO: 22089 - DNA, 17 bp, Arabidopsis thaliana
acgagggtcgttcatgg

SEQ ID NO: 22090 - DNA, 17 bp, Arabidopsis thaliana
acgagggtgtgcacggg

SEQ ID NO: 22091 - DNA, 17 bp, Arabidopsis thaliana
acgaggtcagtcaaggt

SEQ ID NO: 22092 - DNA, 17 bp, Arabidopsis thaliana
acgaggtcccgagttcg

SEQ ID NO: 22093 - DNA, 17 bp, Arabidopsis thaliana
acgaggtcgcttcttga

SEQ ID NO: 22094 - DNA, 17 bp, Arabidopsis thaliana
acgaggtgctaaaatca

SEQ ID NO: 22095 - DNA, 17 bp, Arabidopsis thaliana
acgaggtgtgggaggga

SEQ ID NO: 22096 - DNA, 17 bp, Arabidopsis thaliana
acgaggttaatgcacaa

SEQ ID NO: 22097 - DNA, 17 bp, Arabidopsis thaliana
acgaggttccgacaggc

SEQ ID NO: 22098 - DNA, 17 bp, Arabidopsis thaliana
acgaggtttgccttttg

SEQ ID NO: 22099 - DNA, 17 bp, Arabidopsis thaliana
acgagtacggactcctt

SEQ ID NO: 22100 - DNA, 17 bp, Arabidopsis thaliana
acgagtaggcaggaagc

SEQ ID NO: 22101 - DNA, 17 bp, Arabidopsis thaliana
acgagtcacgactcctt

SEQ ID NO: 22102 - DNA, 17 bp, Arabidopsis thaliana
acgagtcccacggaacg

SEQ ID NO: 22103 - DNA, 17 bp, Arabidopsis thaliana
acgagtccgaactttct

SEQ ID NO: 22104 - DNA, 17 bp, Arabidopsis thaliana
acgagtcctacctagct

SEQ ID NO: 22105 - DNA, 17 bp, Arabidopsis thaliana
acgagtcgcttccagac

SEQ ID NO: 22106 - DNA, 17 bp, Arabidopsis thaliana
acgagtgacggacgaac

SEQ ID NO: 22107 - DNA, 17 bp, Arabidopsis thaliana
acgagtgacggacggac

SEQ ID NO: 22108 - DNA, 17 bp, Arabidopsis thaliana
acgagtgacggactagc

SEQ ID NO: 22109 - DNA, 17 bp, Arabidopsis thaliana
acgagtgactctctgag

SEQ ID NO: 22110 - DNA, 17 bp, Arabidopsis thaliana
acgagtgagtgcttgcc

SEQ ID NO: 22111 - DNA, 17 bp, Arabidopsis thaliana
acgagtgcaacgtttgt

SEQ ID NO: 22112 - DNA, 17 bp, Arabidopsis thaliana
acgagtgtcctaagcgt

SEQ ID NO: 22113 - DNA, 17 bp, Arabidopsis thaliana
acgagttattacttgct

SEQ ID NO: 22114 - DNA, 17 bp, Arabidopsis thaliana
acgagttcacggttaat

SEQ ID NO: 22115 - DNA, 17 bp, Arabidopsis thaliana
acgagttcacggttact

SEQ ID NO: 22116 - DNA, 17 bp, Arabidopsis thaliana
acgagttctacagatcc

SEQ ID NO: 22117 - DNA, 17 bp, Arabidopsis thaliana
acgagttctcggagtag

SEQ ID NO: 22118 - DNA, 17 bp, Arabidopsis thaliana
acgagttctgttgaccg

SEQ ID NO: 22119 - DNA, 17 bp, Arabidopsis thaliana
acgagttgacacagctc

SEQ ID NO: 22120 - DNA, 17 bp, Arabidopsis thaliana
acgagttgacgggacgg

SEQ ID NO: 22121 - DNA, 17 bp, Arabidopsis thaliana
acgagttgcagagggac

SEQ ID NO: 22122 - DNA, 17 bp, Arabidopsis thaliana
acgagttgcttggacaa

SEQ ID NO: 22123 - DNA, 17 bp, Arabidopsis thaliana
acgagttggagttggac

SEQ ID NO: 22124 - DNA, 17 bp, Arabidopsis thaliana
acgagttggcgagacgg

SEQ ID NO: 22125 - DNA, 17 bp, Arabidopsis thaliana
acgagttggcgggacgg

SEQ ID NO: 22126 - DNA, 17 bp, Arabidopsis thaliana
acgagttggcggtcgag

SEQ ID NO: 22127 - DNA, 17 bp, Arabidopsis thaliana
acgagttggtatcagac

SEQ ID NO: 22128 - DNA, 17 bp, Arabidopsis thaliana
acgagttgtctactaaa

SEQ ID NO: 22129 - DNA, 17 bp, Arabidopsis thaliana
acgagtttacattttcg

SEQ ID NO: 22130 - DNA, 17 bp, Arabidopsis thaliana
acgagtttacgtttttg

SEQ ID NO: 22131 - DNA, 17 bp, Arabidopsis thaliana
acgagtttagcaggacg

SEQ ID NO: 22132 - DNA, 17 bp, Arabidopsis thaliana
acgagtttcggcttaga

SEQ ID NO: 22133 - DNA, 17 bp, Arabidopsis thaliana
acgagtttggaatcggt

SEQ ID NO: 22134 - DNA, 17 bp, Arabidopsis thaliana
acgagtttggcaggacg

SEQ ID NO: 22135 - DNA, 17 bp, Arabidopsis thaliana
acgagtttggcggaatg

SEQ ID NO: 22136 - DNA, 17 bp, Arabidopsis thaliana
acgagttttgcccaggc

SEQ ID NO: 22137 - DNA, 17 bp, Arabidopsis thaliana
acgagttttggcttgaa

SEQ ID NO: 22138 - DNA, 17 bp, Arabidopsis thaliana
acgagtttttcatacag

SEQ ID NO: 22139 - DNA, 17 bp, Arabidopsis thaliana
acgataaacctctgcat

SEQ ID NO: 22140 - DNA, 17 bp, Arabidopsis thaliana
acgataactatgggccc

SEQ ID NO: 22141 - DNA, 17 bp, Arabidopsis thaliana
acgataagcttgagttc

SEQ ID NO: 22142 - DNA, 17 bp, Arabidopsis thaliana
acgataaggttgcgggt

SEQ ID NO: 22143 - DNA, 17 bp, Arabidopsis thaliana
acgataaggttgcggtt

SEQ ID NO: 22144 - DNA, 17 bp, Arabidopsis thaliana
acgatagaactcgagcc

SEQ ID NO: 22145 - DNA, 17 bp, Arabidopsis thaliana
acgatagtatgcgttgt

SEQ ID NO: 22146 - DNA, 17 bp, Arabidopsis thaliana
acgatatgtggttagac

SEQ ID NO: 22147 - DNA, 17 bp, Arabidopsis thaliana
acgatattttgaatctt

SEQ ID NO: 22148 - DNA, 17 bp, Arabidopsis thaliana
acgatcaaaagaatgag

SEQ ID NO: 22149 - DNA, 17 bp, Arabidopsis thaliana
acgatcaattctcgtca

SEQ ID NO: 22150 - DNA, 17 bp, Arabidopsis thaliana
acgatcacctccttctt

SEQ ID NO: 22151 - DNA, 17 bp, Arabidopsis thaliana
acgatcactgctttgaa

SEQ ID NO: 22152 - DNA, 17 bp, Arabidopsis thaliana
acgatcacttttgtttc

SEQ ID NO: 22153 - DNA, 17 bp, Arabidopsis thaliana
acgatcagataccgtcc

SEQ ID NO: 22154 - DNA, 17 bp, Arabidopsis thaliana
acgatcagtcgctgcca

SEQ ID NO: 22155 - DNA, 17 bp, Arabidopsis thaliana
acgatcataagtcttgg

SEQ ID NO: 22156 - DNA, 17 bp, Arabidopsis thaliana
acgatcatatttccgtc

SEQ ID NO: 22157 - DNA, 17 bp, Arabidopsis thaliana
acgatcatcttacttga

SEQ ID NO: 22158 - DNA, 17 bp, Arabidopsis thaliana
acgatcatttccgacta

SEQ ID NO: 22159 - DNA, 17 bp, Arabidopsis thaliana
acgatccaccttgctcc

SEQ ID NO: 22160 - DNA, 17 bp, Arabidopsis thaliana
acgatccactgagatac

SEQ ID NO: 22161 - DNA, 17 bp, Arabidopsis thaliana
acgatccactgagattc

SEQ ID NO: 22162 - DNA, 17 bp, Arabidopsis thaliana
acgatccatttggttgc

SEQ ID NO: 22163 - DNA, 17 bp, Arabidopsis thaliana
acgatccgacactgacg

SEQ ID NO: 22164 - DNA, 17 bp, Arabidopsis thaliana
acgatcctatgagttag

SEQ ID NO: 22165 - DNA, 17 bp, Arabidopsis thaliana
acgatcgagatgagctc

SEQ ID NO: 22166 - DNA, 17 bp, Arabidopsis thaliana
acgatcgagatgagctg

SEQ ID NO: 22167 - DNA, 17 bp, Arabidopsis thaliana
acgatcgagtgaacttg

SEQ ID NO: 22168 - DNA, 17 bp, Arabidopsis thaliana
acgatcgattacatcaa

SEQ ID NO: 22169 - DNA, 17 bp, Arabidopsis thaliana
acgatcgatttggacag

SEQ ID NO: 22170 - DNA, 17 bp, Arabidopsis thaliana
acgatcgctgatactgt

SEQ ID NO: 22171 - DNA, 17 bp, Arabidopsis thaliana
acgatcggaaatgtttg

SEQ ID NO: 22172 - DNA, 17 bp, Arabidopsis thaliana
acgatcggcctgtccca

SEQ ID NO: 22173 - DNA, 17 bp, Arabidopsis thaliana
acgatcgtacttctacg

SEQ ID NO: 22174 - DNA, 17 bp, Arabidopsis thaliana
acgatcgtatgagttag

SEQ ID NO: 22175 - DNA, 17 bp, Arabidopsis thaliana
acgatcgtttctccagg

SEQ ID NO: 22176 - DNA, 17 bp, Arabidopsis thaliana
acgatctaagtaaggag

SEQ ID NO: 22177 - DNA, 17 bp, Arabidopsis thaliana
acgatctacgatgtcag

SEQ ID NO: 22178 - DNA, 17 bp, Arabidopsis thaliana
acgatctatccgcatgg

SEQ ID NO: 22179 - DNA, 17 bp, Arabidopsis thaliana
acgatctatcttcaccg

SEQ ID NO: 22180 - DNA, 17 bp, Arabidopsis thaliana
acgatctccaagttgcg

SEQ ID NO: 22181 - DNA, 17 bp, Arabidopsis thaliana
acgatctccacatctcc

SEQ ID NO: 22182 - DNA, 17 bp, Arabidopsis thaliana
acgatctctctcgccaa

SEQ ID NO: 22183 - DNA, 17 bp, Arabidopsis thaliana
acgatctgactgagcaa

SEQ ID NO: 22184 - DNA, 17 bp, Arabidopsis thaliana
acgatctgctagcacaa

SEQ ID NO: 22185 - DNA, 17 bp, Arabidopsis thaliana
acgatctggcgaaactt

SEQ ID NO: 22186 - DNA, 17 bp, Arabidopsis thaliana
acgatctgtgtgccctt

SEQ ID NO: 22187 - DNA, 17 bp, Arabidopsis thaliana
acgatcttcaagctcag

SEQ ID NO: 22188 - DNA, 17 bp, Arabidopsis thaliana
acgatcttggagtgttt

SEQ ID NO: 22189 - DNA, 17 bp, Arabidopsis thaliana
acgatcttgtggaatcc

SEQ ID NO: 22190 - DNA, 17 bp, Arabidopsis thaliana
acgatgaaaggagcaca

SEQ ID NO: 22191 - DNA, 17 bp, Arabidopsis thaliana
acgatgaaatcaggcca

SEQ ID NO: 22192 - DNA, 17 bp, Arabidopsis thaliana
acgatgacacgcggata

SEQ ID NO: 22193 - DNA, 17 bp, Arabidopsis thaliana
acgatgacatttgtgga

SEQ ID NO: 22194 - DNA, 17 bp, Arabidopsis thaliana
acgatgacgacgatgac

SEQ ID NO: 22195 - DNA, 17 bp, Arabidopsis thaliana
acgatgactcagcaccg

SEQ ID NO: 22196 - DNA, 17 bp, Arabidopsis thaliana
acgatgactcgacaaag

SEQ ID NO: 22197 - DNA, 17 bp, Arabidopsis thaliana
acgatgagattcaggtt

SEQ ID NO: 22198 - DNA, 17 bp, Arabidopsis thaliana
acgatgagattcgggtt

SEQ ID NO: 22199 - DNA, 17 bp, Arabidopsis thaliana
acgatgagctttgtgcc

SEQ ID NO: 22200 - DNA, 17 bp, Arabidopsis thaliana
acgatgattgactttca

SEQ ID NO: 22201 - DNA, 17 bp, Arabidopsis thaliana
acgatgcaagagcttgg

SEQ ID NO: 22202 - DNA, 17 bp, Arabidopsis thaliana
acgatgccgaccaggca

SEQ ID NO: 22203 - DNA, 17 bp, Arabidopsis thaliana
acgatgccgaccaggga

SEQ ID NO: 22204 - DNA, 17 bp, Arabidopsis thaliana
acgatgcctctaggtat

SEQ ID NO: 22205 - DNA, 17 bp, Arabidopsis thaliana
acgatgctctgttaccg

SEQ ID NO: 22206 - DNA, 17 bp, Arabidopsis thaliana
acgatggagatagagat

SEQ ID NO: 22207 - DNA, 17 bp, Arabidopsis thaliana
acgatggagtatgtctg

SEQ ID NO: 22208 - DNA, 17 bp, Arabidopsis thaliana
acgatggataacctcta

SEQ ID NO: 22209 - DNA, 17 bp, Arabidopsis thaliana
acgatggatactaggcg

SEQ ID NO: 22210 - DNA, 17 bp, Arabidopsis thaliana
acgatggcgaagatggg

SEQ ID NO: 22211 - DNA, 17 bp, Arabidopsis thaliana
acgatggcggcttgtga

SEQ ID NO: 22212 - DNA, 17 bp, Arabidopsis thaliana
acgatgggaccggtttc

SEQ ID NO: 22213 - DNA, 17 bp, Arabidopsis thaliana
acgatgggtgaaacaga

SEQ ID NO: 22214 - DNA, 17 bp, Arabidopsis thaliana
acgatggtccaaacgat

SEQ ID NO: 22215 - DNA, 17 bp, Arabidopsis thaliana
acgatggtttcctccta

SEQ ID NO: 22216 - DNA, 17 bp, Arabidopsis thaliana
acgatgtaggactccgc

SEQ ID NO: 22217 - DNA, 17 bp, Arabidopsis thaliana
acgatgtcagcgcctac

SEQ ID NO: 22218 - DNA, 17 bp, Arabidopsis thaliana
acgatgtcgagctaagt

SEQ ID NO: 22219 - DNA, 17 bp, Arabidopsis thaliana
acgatgtctacacaggt

SEQ ID NO: 22220 - DNA, 17 bp, Arabidopsis thaliana
acgatgtctgcgggagg

SEQ ID NO: 22221 - DNA, 17 bp, Arabidopsis thaliana
acgatgtgccttaactt

SEQ ID NO: 22222 - DNA, 17 bp, Arabidopsis thaliana
acgatgtgcttgagtca

SEQ ID NO: 22223 - DNA, 17 bp, Arabidopsis thaliana
acgatgtgtcttaattg

SEQ ID NO: 22224 - DNA, 17 bp, Arabidopsis thaliana
acgatgtgtgcaaccag

SEQ ID NO: 22225 - DNA, 17 bp, Arabidopsis thaliana
acgatgtgttgaggaag

SEQ ID NO: 22226 - DNA, 17 bp, Arabidopsis thaliana
acgattaacagggacag

SEQ ID NO: 22227 - DNA, 17 bp, Arabidopsis thaliana
acgattaaggcggttgg

SEQ ID NO: 22228 - DNA, 17 bp, Arabidopsis thaliana
acgattaagttctcgcc

SEQ ID NO: 22229 - DNA, 17 bp, Arabidopsis thaliana
acgattaagttctcggc

SEQ ID NO: 22230 - DNA, 17 bp, Arabidopsis thaliana
acgattaatcgcgtcta

SEQ ID NO: 22231 - DNA, 17 bp, Arabidopsis thaliana
acgattaatctgagtcc

SEQ ID NO: 22232 - DNA, 17 bp, Arabidopsis thaliana
acgattacgatccagat

SEQ ID NO: 22233 - DNA, 17 bp, Arabidopsis thaliana
acgattagcgccagatt

SEQ ID NO: 22234 - DNA, 17 bp, Arabidopsis thaliana
acgattaggcctgttac

SEQ ID NO: 22235 - DNA, 17 bp, Arabidopsis thaliana
acgattagtccgcatcg

SEQ ID NO: 22236 - DNA, 17 bp, Arabidopsis thaliana
acgattagttctacggt

SEQ ID NO: 22237 - DNA, 17 bp, Arabidopsis thaliana
acgattataaccgttcg

SEQ ID NO: 22238 - DNA, 17 bp, Arabidopsis thaliana
acgattataccacgtgt

SEQ ID NO: 22239 - DNA, 17 bp, Arabidopsis thaliana
acgattatagcgtcgtt

SEQ ID NO: 22240 - DNA, 17 bp, Arabidopsis thaliana
acgattatcattacgtt

SEQ ID NO: 22241 - DNA, 17 bp, Arabidopsis thaliana
acgattatctcaggaat

SEQ ID NO: 22242 - DNA, 17 bp, Arabidopsis thaliana
acgattatctgccacat

SEQ ID NO: 22243 - DNA, 17 bp, Arabidopsis thaliana
acgattatgacagcagg

SEQ ID NO: 22244 - DNA, 17 bp, Arabidopsis thaliana
acgattattgcgttcac

SEQ ID NO: 22245 - DNA, 17 bp, Arabidopsis thaliana
acgattattgcgttcat

SEQ ID NO: 22246 - DNA, 17 bp, Arabidopsis thaliana
acgattatttgcttgga

SEQ ID NO: 22247 - DNA, 17 bp, Arabidopsis thaliana
acgattcaaacccttga

SEQ ID NO: 22248 - DNA, 17 bp, Arabidopsis thaliana
acgattcagatcagatt

SEQ ID NO: 22249 - DNA, 17 bp, Arabidopsis thaliana
acgattccacacagttg

SEQ ID NO: 22250 - DNA, 17 bp, Arabidopsis thaliana
acgattcctcgagggta

SEQ ID NO: 22251 - DNA, 17 bp, Arabidopsis thaliana
acgattcctcgtcctgg

SEQ ID NO: 22252 - DNA, 17 bp, Arabidopsis thaliana
acgattcctttaccacc

SEQ ID NO: 22253 - DNA, 17 bp, Arabidopsis thaliana
acgattcggctgagttc

SEQ ID NO: 22254 - DNA, 17 bp, Arabidopsis thaliana
acgattctctcgaccca

SEQ ID NO: 22255 - DNA, 17 bp, Arabidopsis thaliana
acgattctgatggaacc

SEQ ID NO: 22256 - DNA, 17 bp, Arabidopsis thaliana
acgattctgcgagtaga

SEQ ID NO: 22257 - DNA, 17 bp, Arabidopsis thaliana
acgattctgcgtagcgt

SEQ ID NO: 22258 - DNA, 17 bp, Arabidopsis thaliana
acgattcttctcctaca

SEQ ID NO: 22259 - DNA, 17 bp, Arabidopsis thaliana
acgattctttcagattt

SEQ ID NO: 22260 - DNA, 17 bp, Arabidopsis thaliana
acgattgaacgctcggc

SEQ ID NO: 22261 - DNA, 17 bp, Arabidopsis thaliana
acgattgagctatgtca

SEQ ID NO: 22262 - DNA, 17 bp, Arabidopsis thaliana
acgattgagggactaag

SEQ ID NO: 22263 - DNA, 17 bp, Arabidopsis thaliana
acgattgcggttgcggg

SEQ ID NO: 22264 - DNA, 17 bp, Arabidopsis thaliana
acgattgcggttggggg

SEQ ID NO: 22265 - DNA, 17 bp, Arabidopsis thaliana
acgattgctgacttatt

SEQ ID NO: 22266 - DNA, 17 bp, Arabidopsis thaliana
acgattggcggcgatcc

SEQ ID NO: 22267 - DNA, 17 bp, Arabidopsis thaliana
acgattgggcgacacac

SEQ ID NO: 22268 - DNA, 17 bp, Arabidopsis thaliana
acgattggtcagcattt

SEQ ID NO: 22269 - DNA, 17 bp, Arabidopsis thaliana
acgattgtctcatggat

SEQ ID NO: 22270 - DNA, 17 bp, Arabidopsis thaliana
acgattgtgccaaggct

SEQ ID NO: 22271 - DNA, 17 bp, Arabidopsis thaliana
acgattgtgccacatgt

SEQ ID NO: 22272 - DNA, 17 bp, Arabidopsis thaliana
acgattgtgccacgtgt

SEQ ID NO: 22273 - DNA, 17 bp, Arabidopsis thaliana
acgattgtgccatgaat

SEQ ID NO: 22274 - DNA, 17 bp, Arabidopsis thaliana
acgattgtgccatgact

SEQ ID NO: 22275 - DNA, 17 bp, Arabidopsis thaliana
acgattgtgccatggct

SEQ ID NO: 22276 - DNA, 17 bp, Arabidopsis thaliana
acgattgtgccttccac

SEQ ID NO: 22277 - DNA, 17 bp, Arabidopsis thaliana
acgattgtggccagatc

SEQ ID NO: 22278 - DNA, 17 bp, Arabidopsis thaliana
acgattgtgggttcggg

SEQ ID NO: 22279 - DNA, 17 bp, Arabidopsis thaliana
acgattgtgggttcgtc

SEQ ID NO: 22280 - DNA, 17 bp, Arabidopsis thaliana
acgattgtgggttcgtt

SEQ ID NO: 22281 - DNA, 17 bp, Arabidopsis thaliana
acgatttaacagtttac

SEQ ID NO: 22282 - DNA, 17 bp, Arabidopsis thaliana
acgatttagattcataa

SEQ ID NO: 22283 - DNA, 17 bp, Arabidopsis thaliana
acgatttaggccctgtt

SEQ ID NO: 22284 - DNA, 17 bp, Arabidopsis thaliana
acgatttagggttcagg

SEQ ID NO: 22285 - DNA, 17 bp, Arabidopsis thaliana
acgatttatcgatttgt

SEQ ID NO: 22286 - DNA, 17 bp, Arabidopsis thaliana
acgatttcaacccctgg

SEQ ID NO: 22287 - DNA, 17 bp, Arabidopsis thaliana
acgatttcacccgtggt

SEQ ID NO: 22288 - DNA, 17 bp, Arabidopsis thaliana
acgatttcaccgtcatc

SEQ ID NO: 22289 - DNA, 17 bp, Arabidopsis thaliana
acgatttcaggataggt

SEQ ID NO: 22290 - DNA, 17 bp, Arabidopsis thaliana
acgatttccagatcgcg

SEQ ID NO: 22291 - DNA, 17 bp, Arabidopsis thaliana
acgatttgatttgtgtg

SEQ ID NO: 22292 - DNA, 17 bp, Arabidopsis thaliana
acgatttggatatgctc

SEQ ID NO: 22293 - DNA, 17 bp, Arabidopsis thaliana
acgatttgtgacaccca

SEQ ID NO: 22294 - DNA, 17 bp, Arabidopsis thaliana
acgattttacaattcca

SEQ ID NO: 22295 - DNA, 17 bp, Arabidopsis thaliana
acgattttacagttttg

SEQ ID NO: 22296 - DNA, 17 bp, Arabidopsis thaliana
acgattttacggttttg

SEQ ID NO: 22297 - DNA, 17 bp, Arabidopsis thaliana
acgattttagacttcgg

SEQ ID NO: 22298 - DNA, 17 bp, Arabidopsis thaliana
acgattttagccgaaaa

SEQ ID NO: 22299 - DNA, 17 bp, Arabidopsis thaliana
acgattttagcctcgct

SEQ ID NO: 22300 - DNA, 17 bp, Arabidopsis thaliana
acgattttaggcggtta

SEQ ID NO: 22301 - DNA, 17 bp, Arabidopsis thaliana
acgattttaggctgtgt

SEQ ID NO: 22302 - DNA, 17 bp, Arabidopsis thaliana
acgattttcattttgga

SEQ ID NO: 22303 - DNA, 17 bp, Arabidopsis thaliana
acgattttcggcttaga

SEQ ID NO: 22304 - DNA, 17 bp, Arabidopsis thaliana
acgattttgaattgtgc

SEQ ID NO: 22305 - DNA, 17 bp, Arabidopsis thaliana
acgattttgactctgat

SEQ ID NO: 22306 - DNA, 17 bp, Arabidopsis thaliana
acgattttgccacgtgt

SEQ ID NO: 22307 - DNA, 17 bp, Arabidopsis thaliana
acgattttggagtgctt

SEQ ID NO: 22308 - DNA, 17 bp, Arabidopsis thaliana
acgattttggcgagaaa

SEQ ID NO: 22309 - DNA, 17 bp, Arabidopsis thaliana
acgattttggcggaaaa

SEQ ID NO: 22310 - DNA, 17 bp, Arabidopsis thaliana
acgattttgggtctcca

SEQ ID NO: 22311 - DNA, 17 bp, Arabidopsis thaliana
acgattttgggtgcgat

SEQ ID NO: 22312 - DNA, 17 bp, Arabidopsis thaliana
acgattttgggtgcgct

SEQ ID NO: 22313 - DNA, 17 bp, Arabidopsis thaliana
acgattttgggtgcggt

SEQ ID NO: 22314 - DNA, 17 bp, Arabidopsis thaliana
acgattttgtagttgcc

SEQ ID NO: 22315 - DNA, 17 bp, Arabidopsis thaliana
acgatttttggcgggaa

SEQ ID NO: 22316 - DNA, 17 bp, Arabidopsis thaliana
acgcaaaactacttgtg

SEQ ID NO: 22317 - DNA, 17 bp, Arabidopsis thaliana
acgcaaaaggtctccag

SEQ ID NO: 22318 - DNA, 17 bp, Arabidopsis thaliana
acgcaaaattcgtcaaa

SEQ ID NO: 22319 - DNA, 17 bp, Arabidopsis thaliana
acgcaaactatcttcct

SEQ ID NO: 22320 - DNA, 17 bp, Arabidopsis thaliana
acgcaaagaatattgaa

SEQ ID NO: 22321 - DNA, 17 bp, Arabidopsis thaliana
acgcaaagcaacctcag

SEQ ID NO: 22322 - DNA, 17 bp, Arabidopsis thaliana
acgcaaagcttaacagc

SEQ ID NO: 22323 - DNA, 17 bp, Arabidopsis thaliana
acgcaaatactcaaccc

SEQ ID NO: 22324 - DNA, 17 bp, Arabidopsis thaliana
acgcaaatgtcatggat

SEQ ID NO: 22325 - DNA, 17 bp, Arabidopsis thaliana
acgcaaatgtcatgggt

SEQ ID NO: 22326 - DNA, 17 bp, Arabidopsis thaliana
acgcaactgtttggacc

SEQ ID NO: 22327 - DNA, 17 bp, Arabidopsis thaliana
acgcaagactgcgtttc

SEQ ID NO: 22328 - DNA, 17 bp, Arabidopsis thaliana
acgcaagccagagagtc

SEQ ID NO: 22329 - DNA, 17 bp, Arabidopsis thaliana
acgcaaggagagtctct

SEQ ID NO: 22330 - DNA, 17 bp, Arabidopsis thaliana
acgcaagggggtccgag

SEQ ID NO: 22331 - DNA, 17 bp, Arabidopsis thaliana
acgcaaggtttaccgac

SEQ ID NO: 22332 - DNA, 17 bp, Arabidopsis thaliana
acgcaagtggtttctaa

SEQ ID NO: 22333 - DNA, 17 bp, Arabidopsis thaliana
acgcaagttgcgcccca

SEQ ID NO: 22334 - DNA, 17 bp, Arabidopsis thaliana
acgcaagttgcgcgcca

SEQ ID NO: 22335 - DNA, 17 bp, Arabidopsis thaliana
acgcaagttgctgccca

SEQ ID NO: 22336 - DNA, 17 bp, Arabidopsis thaliana
acgcaatattccgtcga

SEQ ID NO: 22337 - DNA, 17 bp, Arabidopsis thaliana
acgcaatcaaaagatct

SEQ ID NO: 22338 - DNA, 17 bp, Arabidopsis thaliana
acgcaatcgtttggacc

SEQ ID NO: 22339 - DNA, 17 bp, Arabidopsis thaliana
acgcaatgaaagttgag

SEQ ID NO: 22340 - DNA, 17 bp, Arabidopsis thaliana
acgcaatggtaaacaag

SEQ ID NO: 22341 - DNA, 17 bp, Arabidopsis thaliana
acgcaatgtgatttctg

SEQ ID NO: 22342 - DNA, 17 bp, Arabidopsis thaliana
acgcaatttggatgaac

SEQ ID NO: 22343 - DNA, 17 bp, Arabidopsis thaliana
acgcacaattccttccg

SEQ ID NO: 22344 - DNA, 17 bp, Arabidopsis thaliana
acgcacacaaactggat

SEQ ID NO: 22345 - DNA, 17 bp, Arabidopsis thaliana
acgcacagctcacaata

SEQ ID NO: 22346 - DNA, 17 bp, Arabidopsis thaliana
acgcaccaccagtaatg

SEQ ID NO: 22347 - DNA, 17 bp, Arabidopsis thaliana
acgcaccatgccttttc

SEQ ID NO: 22348 - DNA, 17 bp, Arabidopsis thaliana
acgcaccctgtagatgg

SEQ ID NO: 22349 - DNA, 17 bp, Arabidopsis thaliana
acgcaccggtgactgtt

SEQ ID NO: 22350 - DNA, 17 bp, Arabidopsis thaliana
acgcacctttcgtttcg

SEQ ID NO: 22351 - DNA, 17 bp, Arabidopsis thaliana
acgcacgaaaatgcccg

SEQ ID NO: 22352 - DNA, 17 bp, Arabidopsis thaliana
acgcacgaaatcgttct

SEQ ID NO: 22353 - DNA, 17 bp, Arabidopsis thaliana
acgcacgaatcaaacag

SEQ ID NO: 22354 - DNA, 17 bp, Arabidopsis thaliana
acgcacgacaagaattt

SEQ ID NO: 22355 - DNA, 17 bp, Arabidopsis thaliana
acgcacgacccacagag

SEQ ID NO: 22356 - DNA, 17 bp, Arabidopsis thaliana
acgcacgacgaggtgat

SEQ ID NO: 22357 - DNA, 17 bp, Arabidopsis thaliana
acgcacgactatgccaa

SEQ ID NO: 22358 - DNA, 17 bp, Arabidopsis thaliana
acgcacgactctcggca

SEQ ID NO: 22359 - DNA, 17 bp, Arabidopsis thaliana
acgcacgacttgggtta

SEQ ID NO: 22360 - DNA, 17 bp, Arabidopsis thaliana
acgcacgagattagatg

SEQ ID NO: 22361 - DNA, 17 bp, Arabidopsis thaliana
acgcacgagcggttgcg

SEQ ID NO: 22362 - DNA, 17 bp, Arabidopsis thaliana
acgcacgaggagcgtct

SEQ ID NO: 22363 - DNA, 17 bp, Arabidopsis thaliana
acgcacgagtgacggac

SEQ ID NO: 22364 - DNA, 17 bp, Arabidopsis thaliana
acgcacgatagaactcg

SEQ ID NO: 22365 - DNA, 17 bp, Arabidopsis thaliana
acgcacgatgggaccgg

SEQ ID NO: 22366 - DNA, 17 bp, Arabidopsis thaliana
acgcacgattaacaggg

SEQ ID NO: 22367 - DNA, 17 bp, Arabidopsis thaliana
acgcacgattttaggcg

SEQ ID NO: 22368 - DNA, 17 bp, Arabidopsis thaliana
acgcacgcaagttgcgc

SEQ ID NO: 22369 - DNA, 17 bp, Arabidopsis thaliana
acgcacgcatatctcgg

SEQ ID NO: 22370 - DNA, 17 bp, Arabidopsis thaliana
acgcacgcattcaagat

SEQ ID NO: 22371 - DNA, 17 bp, Arabidopsis thaliana
acgcacgcccgacctgg

SEQ ID NO: 22372 - DNA, 17 bp, Arabidopsis thaliana
acgcacgccctacgaat

SEQ ID NO: 22373 - DNA, 17 bp, Arabidopsis thaliana
acgcacgccttaagatc

SEQ ID NO: 22374 - DNA, 17 bp, Arabidopsis thaliana
acgcacgccttcaagat

SEQ ID NO: 22375 - DNA, 17 bp, Arabidopsis thaliana
acgcacgcctttaagat

SEQ ID NO: 22376 - DNA, 17 bp, Arabidopsis thaliana
acgcacgcctttaatat

SEQ ID NO: 22377 - DNA, 17 bp, Arabidopsis thaliana
acgcacgcctttaggat

SEQ ID NO: 22378 - DNA, 17 bp, Arabidopsis thaliana
acgcacgcgagttctat

SEQ ID NO: 22379 - DNA, 17 bp, Arabidopsis thaliana
acgcacgcggattacgg

SEQ ID NO: 22380 - DNA, 17 bp, Arabidopsis thaliana
acgcacgcggatttgtg

SEQ ID NO: 22381 - DNA, 17 bp, Arabidopsis thaliana
acgcacgcggcgacaac

SEQ ID NO: 22382 - DNA, 17 bp, Arabidopsis thaliana
acgcacgcttacaagat

SEQ ID NO: 22383 - DNA, 17 bp, Arabidopsis thaliana
acgcacgcttcgcctca

SEQ ID NO: 22384 - DNA, 17 bp, Arabidopsis thaliana
acgcacgcttcttgcaa

SEQ ID NO: 22385 - DNA, 17 bp, Arabidopsis thaliana
acgcacgcttgccgttt

SEQ ID NO: 22386 - DNA, 17 bp, Arabidopsis thaliana
acgcacgcttgcggaag

SEQ ID NO: 22387 - DNA, 17 bp, Arabidopsis thaliana
acgcacgcttgtgctat

SEQ ID NO: 22388 - DNA, 17 bp, Arabidopsis thaliana
acgcacgcttgtggaga

SEQ ID NO: 22389 - DNA, 17 bp, Arabidopsis thaliana
acgcacggaatgtgcag

SEQ ID NO: 22390 - DNA, 17 bp, Arabidopsis thaliana
acgcacggacggttgtg

SEQ ID NO: 22391 - DNA, 17 bp, Arabidopsis thaliana
acgcacggactaaaaag

SEQ ID NO: 22392 - DNA, 17 bp, Arabidopsis thaliana
acgcacggactgggaac

SEQ ID NO: 22393 - DNA, 17 bp, Arabidopsis thaliana
acgcacggactggttgg

SEQ ID NO: 22394 - DNA, 17 bp, Arabidopsis thaliana
acgcacggactgttcag

SEQ ID NO: 22395 - DNA, 17 bp, Arabidopsis thaliana
acgcacggagaaccgaa

SEQ ID NO: 22396 - DNA, 17 bp, Arabidopsis thaliana
acgcacggagaagcgag

SEQ ID NO: 22397 - DNA, 17 bp, Arabidopsis thaliana
acgcacggagaattagg

SEQ ID NO: 22398 - DNA, 17 bp, Arabidopsis thaliana
acgcacggattgtttct

SEQ ID NO: 22399 - DNA, 17 bp, Arabidopsis thaliana
acgcacggatttacgtt

SEQ ID NO: 22400 - DNA, 17 bp, Arabidopsis thaliana
acgcacggcaaactttt

SEQ ID NO: 22401 - DNA, 17 bp, Arabidopsis thaliana
acgcacggcatgtctat

SEQ ID NO: 22402 - DNA, 17 bp, Arabidopsis thaliana
acgcacggccatttcaa

SEQ ID NO: 22403 - DNA, 17 bp, Arabidopsis thaliana
acgcacggccggcttct

SEQ ID NO: 22404 - DNA, 17 bp, Arabidopsis thaliana
acgcacggcgtgacggc

SEQ ID NO: 22405 - DNA, 17 bp, Arabidopsis thaliana
acgcacggctctctcgg

SEQ ID NO: 22406 - DNA, 17 bp, Arabidopsis thaliana
acgcacggctgagttac

SEQ ID NO: 22407 - DNA, 17 bp, Arabidopsis thaliana
acgcacggctggttccg

SEQ ID NO: 22408 - DNA, 17 bp, Arabidopsis thaliana
acgcacggcttacggac

SEQ ID NO: 22409 - DNA, 17 bp, Arabidopsis thaliana
acgcacggcttagaccc

SEQ ID NO: 22410 - DNA, 17 bp, Arabidopsis thaliana
acgcacgggacggattg

SEQ ID NO: 22411 - DNA, 17 bp, Arabidopsis thaliana
acgcacgggacgggttg

SEQ ID NO: 22412 - DNA, 17 bp, Arabidopsis thaliana
acgcacgggattatgcg

SEQ ID NO: 22413 - DNA, 17 bp, Arabidopsis thaliana
acgcacgggatttgctg

SEQ ID NO: 22414 - DNA, 17 bp, Arabidopsis thaliana
acgcacgggcttcggcc

SEQ ID NO: 22415 - DNA, 17 bp, Arabidopsis thaliana
acgcacggggagtaagc

SEQ ID NO: 22416 - DNA, 17 bp, Arabidopsis thaliana
acgcacggggtaccccg

SEQ ID NO: 22417 - DNA, 17 bp, Arabidopsis thaliana
acgcacggggttcgttt

SEQ ID NO: 22418 - DNA, 17 bp, Arabidopsis thaliana
acgcacgggtcggatct

SEQ ID NO: 22419 - DNA, 17 bp, Arabidopsis thaliana
acgcacgggttcaaatc

SEQ ID NO: 22420 - DNA, 17 bp, Arabidopsis thaliana
acgcacgggttggcgag

SEQ ID NO: 22421 - DNA, 17 bp, Arabidopsis thaliana
acgcacgggttggcggg

SEQ ID NO: 22422 - DNA, 17 bp, Arabidopsis thaliana
acgcacgggttggcgtg

SEQ ID NO: 22423 - DNA, 17 bp, Arabidopsis thaliana
acgcacgggtttacgtt

SEQ ID NO: 22424 - DNA, 17 bp, Arabidopsis thaliana
acgcacggtgaatcgat

SEQ ID NO: 22425 - DNA, 17 bp, Arabidopsis thaliana
acgcacggtggattgac

SEQ ID NO: 22426 - DNA, 17 bp, Arabidopsis thaliana
acgcacggtttagttag

SEQ ID NO: 22427 - DNA, 17 bp, Arabidopsis thaliana
acgcacggtttctcgga

SEQ ID NO: 22428 - DNA, 17 bp, Arabidopsis thaliana
acgcacggttttggggg

SEQ ID NO: 22429 - DNA, 17 bp, Arabidopsis thaliana
acgcacgtaaacctgtg

SEQ ID NO: 22430 - DNA, 17 bp, Arabidopsis thaliana
acgcacgtaggcgtagg

SEQ ID NO: 22431 - DNA, 17 bp, Arabidopsis thaliana
acgcacgtcaagtgcgg

SEQ ID NO: 22432 - DNA, 17 bp, Arabidopsis thaliana
acgcacgtcgctatgtg

SEQ ID NO: 22433 - DNA, 17 bp, Arabidopsis thaliana
acgcacgtcgtggagat

SEQ ID NO: 22434 - DNA, 17 bp, Arabidopsis thaliana
acgcacgtcgttctgac

SEQ ID NO: 22435 - DNA, 17 bp, Arabidopsis thaliana
acgcacgtctagaacga

SEQ ID NO: 22436 - DNA, 17 bp, Arabidopsis thaliana
acgcacgtctgcctggg

SEQ ID NO: 22437 - DNA, 17 bp, Arabidopsis thaliana
acgcacgtctggactct

SEQ ID NO: 22438 - DNA, 17 bp, Arabidopsis thaliana
acgcacgtctgtttgac

SEQ ID NO: 22439 - DNA, 17 bp, Arabidopsis thaliana
acgcacgtcttcggcgt

SEQ ID NO: 22440 - DNA, 17 bp, Arabidopsis thaliana
acgcacgtcttgcggct

SEQ ID NO: 22441 - DNA, 17 bp, Arabidopsis thaliana
acgcacgtctttaagat

SEQ ID NO: 22442 - DNA, 17 bp, Arabidopsis thaliana
acgcacgtgagctgggg

SEQ ID NO: 22443 - DNA, 17 bp, Arabidopsis thaliana
acgcacgtgatagattc

SEQ ID NO: 22444 - DNA, 17 bp, Arabidopsis thaliana
acgcacgtgctacaatg

SEQ ID NO: 22445 - DNA, 17 bp, Arabidopsis thaliana
acgcacgtggccgtggg

SEQ ID NO: 22446 - DNA, 17 bp, Arabidopsis thaliana
acgcacgtgtcaagtca

SEQ ID NO: 22447 - DNA, 17 bp, Arabidopsis thaliana
acgcacgttgttgccat

SEQ ID NO: 22448 - DNA, 17 bp, Arabidopsis thaliana
acgcacgttttgcggtg

SEQ ID NO: 22449 - DNA, 17 bp, Arabidopsis thaliana
acgcactacgggaagag

SEQ ID NO: 22450 - DNA, 17 bp, Arabidopsis thaliana
acgcactagtaaatccg

SEQ ID NO: 22451 - DNA, 17 bp, Arabidopsis thaliana
acgcactatgaatgtcc

SEQ ID NO: 22452 - DNA, 17 bp, Arabidopsis thaliana
acgcactgattccgcat

SEQ ID NO: 22453 - DNA, 17 bp, Arabidopsis thaliana
acgcactgctctatctg

SEQ ID NO: 22454 - DNA, 17 bp, Arabidopsis thaliana
acgcactgtctgtggat

SEQ ID NO: 22455 - DNA, 17 bp, Arabidopsis thaliana
acgcactgtctgtgtgt

SEQ ID NO: 22456 - DNA, 17 bp, Arabidopsis thaliana
acgcagaaggttgtccg

SEQ ID NO: 22457 - DNA, 17 bp, Arabidopsis thaliana
acgcagaccccgctaca

SEQ ID NO: 22458 - DNA, 17 bp, Arabidopsis thaliana
acgcagagaagggattg

SEQ ID NO: 22459 - DNA, 17 bp, Arabidopsis thaliana
acgcagagtgtccgagt

SEQ ID NO: 22460 - DNA, 17 bp, Arabidopsis thaliana
acgcagatcagctgata

SEQ ID NO: 22461 - DNA, 17 bp, Arabidopsis thaliana
acgcagatcgcctatcg

SEQ ID NO: 22462 - DNA, 17 bp, Arabidopsis thaliana
acgcagatttgtggtta

SEQ ID NO: 22463 - DNA, 17 bp, Arabidopsis thaliana
acgcagatttttctcgg

SEQ ID NO: 22464 - DNA, 17 bp, Arabidopsis thaliana
acgcagcaggaggttgt

SEQ ID NO: 22465 - DNA, 17 bp, Arabidopsis thaliana
acgcagcccttgggcca

SEQ ID NO: 22466 - DNA, 17 bp, Arabidopsis thaliana
acgcagccgaactcaca

SEQ ID NO: 22467 - DNA, 17 bp, Arabidopsis thaliana
acgcagcctgctaatat

SEQ ID NO: 22468 - DNA, 17 bp, Arabidopsis thaliana
acgcagcgattagtgat

SEQ ID NO: 22469 - DNA, 17 bp, Arabidopsis thaliana
acgcagcggctgtcaat

SEQ ID NO: 22470 - DNA, 17 bp, Arabidopsis thaliana
acgcagcgggtgcgatt

SEQ ID NO: 22471 - DNA, 17 bp, Arabidopsis thaliana
acgcagcggttattgtt

SEQ ID NO: 22472 - DNA, 17 bp, Arabidopsis thaliana
acgcagcggtttattgt

SEQ ID NO: 22473 - DNA, 17 bp, Arabidopsis thaliana
acgcagcgtttgcagtt

SEQ ID NO: 22474 - DNA, 17 bp, Arabidopsis thaliana
acgcagcgtttgcgggt

SEQ ID NO: 22475 - DNA, 17 bp, Arabidopsis thaliana
acgcagcgtttgcggtt

SEQ ID NO: 22476 - DNA, 17 bp, Arabidopsis thaliana
acgcagctccaactaaa

SEQ ID NO: 22477 - DNA, 17 bp, Arabidopsis thaliana
acgcagcttcttgcagg

SEQ ID NO: 22478 - DNA, 17 bp, Arabidopsis thaliana
acgcagcttttggacac

SEQ ID NO: 22479 - DNA, 17 bp, Arabidopsis thaliana
acgcaggaaatagtcgg

SEQ ID NO: 22480 - DNA, 17 bp, Arabidopsis thaliana
acgcaggatttttatgt

SEQ ID NO: 22481 - DNA, 17 bp, Arabidopsis thaliana
acgcaggatttttattt

SEQ ID NO: 22482 - DNA, 17 bp, Arabidopsis thaliana
acgcaggcccacagaaa

SEQ ID NO: 22483 - DNA, 17 bp, Arabidopsis thaliana
acgcagggacagtcggg

SEQ ID NO: 22484 - DNA, 17 bp, Arabidopsis thaliana
acgcagggcgaaggcca

SEQ ID NO: 22485 - DNA, 17 bp, Arabidopsis thaliana
acgcagggtgggccgcg

SEQ ID NO: 22486 - DNA, 17 bp, Arabidopsis thaliana
acgcaggtcatcaagat

SEQ ID NO: 22487 - DNA, 17 bp, Arabidopsis thaliana
acgcaggtcatcaagga

SEQ ID NO: 22488 - DNA, 17 bp, Arabidopsis thaliana
acgcaggtcatcaaggg

SEQ ID NO: 22489 - DNA, 17 bp, Arabidopsis thaliana
acgcaggtggtgcatgg

SEQ ID NO: 22490 - DNA, 17 bp, Arabidopsis thaliana
acgcaggtgtcctaaga

SEQ ID NO: 22491 - DNA, 17 bp, Arabidopsis thaliana
acgcagtaagtgactcg

SEQ ID NO: 22492 - DNA, 17 bp, Arabidopsis thaliana
acgcagtaggagctgtt

SEQ ID NO: 22493 - DNA, 17 bp, Arabidopsis thaliana
acgcagtattgggacgg

SEQ ID NO: 22494 - DNA, 17 bp, Arabidopsis thaliana
acgcagtcaccattcgg

SEQ ID NO: 22495 - DNA, 17 bp, Arabidopsis thaliana
acgcagtgatgtatgca

SEQ ID NO: 22496 - DNA, 17 bp, Arabidopsis thaliana
acgcagttaccattcga

SEQ ID NO: 22497 - DNA, 17 bp, Arabidopsis thaliana
acgcagttcctcggaca

SEQ ID NO: 22498 - DNA, 17 bp, Arabidopsis thaliana
acgcagttgcccaacgt

SEQ ID NO: 22499 - DNA, 17 bp, Arabidopsis thaliana
acgcagtttgttaaact

SEQ ID NO: 22500 - DNA, 17 bp, Arabidopsis thaliana
acgcataacatcaggca

SEQ ID NO: 22501 - DNA, 17 bp, Arabidopsis thaliana
acgcatagctccggcgc

SEQ ID NO: 22502 - DNA, 17 bp, Arabidopsis thaliana
acgcatatctcggctct

SEQ ID NO: 22503 - DNA, 17 bp, Arabidopsis thaliana
acgcatcctgtagatgg

SEQ ID NO: 22504 - DNA, 17 bp, Arabidopsis thaliana
acgcatcttggttatcg

SEQ ID NO: 22505 - DNA, 17 bp, Arabidopsis thaliana
acgcattataggcagac

SEQ ID NO: 22506 - DNA, 17 bp, Arabidopsis thaliana
acgcattcaagatccgg

SEQ ID NO: 22507 - DNA, 17 bp, Arabidopsis thaliana
acgcattctcaagtatt

SEQ ID NO: 22508 - DNA, 17 bp, Arabidopsis thaliana
acgcattctccgggtat

SEQ ID NO: 22509 - DNA, 17 bp, Arabidopsis thaliana
acgcattgactcgattg

SEQ ID NO: 22510 - DNA, 17 bp, Arabidopsis thaliana
acgcattgagtttcgtt

SEQ ID NO: 22511 - DNA, 17 bp, Arabidopsis thaliana
acgcatttaagatcccg

SEQ ID NO: 22512 - DNA, 17 bp, Arabidopsis thaliana
acgcatttaagatccgg

SEQ ID NO: 22513 - DNA, 17 bp, Arabidopsis thaliana
acgcatttaagatctgg

SEQ ID NO: 22514 - DNA, 17 bp, Arabidopsis thaliana
acgcatttcatcttagg

SEQ ID NO: 22515 - DNA, 17 bp, Arabidopsis thaliana
acgcattttctagatta

SEQ ID NO: 22516 - DNA, 17 bp, Arabidopsis thaliana
acgcattttgttcccgg

SEQ ID NO: 22517 - DNA, 17 bp, Arabidopsis thaliana
acgccaaagaacgacct

SEQ ID NO: 22518 - DNA, 17 bp, Arabidopsis thaliana
acgccaaagtttgtgtt

SEQ ID NO: 22519 - DNA, 17 bp, Arabidopsis thaliana
acgccaagaagattcac

SEQ ID NO: 22520 - DNA, 17 bp, Arabidopsis thaliana
acgccaaggatgacttg

SEQ ID NO: 22521 - DNA, 17 bp, Arabidopsis thaliana
acgccaagtggcatacg

SEQ ID NO: 22522 - DNA, 17 bp, Arabidopsis thaliana
acgccaatcctctgttg

SEQ ID NO: 22523 - DNA, 17 bp, Arabidopsis thaliana
acgccacagccattgac

SEQ ID NO: 22524 - DNA, 17 bp, Arabidopsis thaliana
acgccacatggattaag

SEQ ID NO: 22525 - DNA, 17 bp, Arabidopsis thaliana
acgccacatggattagg

SEQ ID NO: 22526 - DNA, 17 bp, Arabidopsis thaliana
acgccacgagaaatgtg

SEQ ID NO: 22527 - DNA, 17 bp, Arabidopsis thaliana
acgccacgagattgcag

SEQ ID NO: 22528 - DNA, 17 bp, Arabidopsis thaliana
acgccacgtgttagatc

SEQ ID NO: 22529 - DNA, 17 bp, Arabidopsis thaliana
acgccactcagattcac

SEQ ID NO: 22530 - DNA, 17 bp, Arabidopsis thaliana
acgccagacccgaaccg

SEQ ID NO: 22531 - DNA, 17 bp, Arabidopsis thaliana
acgccagcaggttgctc

SEQ ID NO: 22532 - DNA, 17 bp, Arabidopsis thaliana
acgccaggaatctcgct

SEQ ID NO: 22533 - DNA, 17 bp, Arabidopsis thaliana
acgccaggctatcatga

SEQ ID NO: 22534 - DNA, 17 bp, Arabidopsis thaliana
acgccagggaatctaca

SEQ ID NO: 22535 - DNA, 17 bp, Arabidopsis thaliana
acgccagtgtctacaat

SEQ ID NO: 22536 - DNA, 17 bp, Arabidopsis thaliana
acgccatcacttggtct

SEQ ID NO: 22537 - DNA, 17 bp, Arabidopsis thaliana
acgccatcgtcgggatc

SEQ ID NO: 22538 - DNA, 17 bp, Arabidopsis thaliana
acgccattgacctttat

SEQ ID NO: 22539 - DNA, 17 bp, Arabidopsis thaliana
acgcccaagcatgttaa

SEQ ID NO: 22540 - DNA, 17 bp, Arabidopsis thaliana
acgcccacgtgaaggag

SEQ ID NO: 22541 - DNA, 17 bp, Arabidopsis thaliana
acgcccaggcgcgttga

SEQ ID NO: 22542 - DNA, 17 bp, Arabidopsis thaliana
acgcccatagctcagtg

SEQ ID NO: 22543 - DNA, 17 bp, Arabidopsis thaliana
acgcccatcggctaaag

SEQ ID NO: 22544 - DNA, 17 bp, Arabidopsis thaliana
acgccccgaatcgatcg

SEQ ID NO: 22545 - DNA, 17 bp, Arabidopsis thaliana
acgccccgaccgcccct

SEQ ID NO: 22546 - DNA, 17 bp, Arabidopsis thaliana
acgcccgacctggactg

SEQ ID NO: 22547 - DNA, 17 bp, Arabidopsis thaliana
acgccctacatggcgag

SEQ ID NO: 22548 - DNA, 17 bp, Arabidopsis thaliana
acgcccttaagatccgg

SEQ ID NO: 22549 - DNA, 17 bp, Arabidopsis thaliana
acgcccttagatgttct

SEQ ID NO: 22550 - DNA, 17 bp, Arabidopsis thaliana
acgccctttgtcgctaa

SEQ ID NO: 22551 - DNA, 17 bp, Arabidopsis thaliana
acgccgaagacgtccga

SEQ ID NO: 22552 - DNA, 17 bp, Arabidopsis thaliana
acgccgacgaggacgga

SEQ ID NO: 22553 - DNA, 17 bp, Arabidopsis thaliana
acgccgagcctgcctca

SEQ ID NO: 22554 - DNA, 17 bp, Arabidopsis thaliana
acgccgattctgtccaa

SEQ ID NO: 22555 - DNA, 17 bp, Arabidopsis thaliana
acgccgcactgctgtac

SEQ ID NO: 22556 - DNA, 17 bp, Arabidopsis thaliana
acgccgcggttttttca

SEQ ID NO: 22557 - DNA, 17 bp, Arabidopsis thaliana
acgccgcttcaatgtgg

SEQ ID NO: 22558 - DNA, 17 bp, Arabidopsis thaliana
acgccgcttttgcttct

SEQ ID NO: 22559 - DNA, 17 bp, Arabidopsis thaliana
acgccgtcgtttcgtct

SEQ ID NO: 22560 - DNA, 17 bp, Arabidopsis thaliana
acgccgtgaatacgaga

SEQ ID NO: 22561 - DNA, 17 bp, Arabidopsis thaliana
acgccgttgagtcgctg

SEQ ID NO: 22562 - DNA, 17 bp, Arabidopsis thaliana
acgcctaaatagatcca

SEQ ID NO: 22563 - DNA, 17 bp, Arabidopsis thaliana
acgcctaaatagatccg

SEQ ID NO: 22564 - DNA, 17 bp, Arabidopsis thaliana
acgcctaagtgtatgct

SEQ ID NO: 22565 - DNA, 17 bp, Arabidopsis thaliana
acgcctaccatggtggt

SEQ ID NO: 22566 - DNA, 17 bp, Arabidopsis thaliana
acgcctacgaacgtacc

SEQ ID NO: 22567 - DNA, 17 bp, Arabidopsis thaliana
acgcctataagatccgg

SEQ ID NO: 22568 - DNA, 17 bp, Arabidopsis thaliana
acgcctattcggctaca

SEQ ID NO: 22569 - DNA, 17 bp, Arabidopsis thaliana
acgcctcccgacggatc

SEQ ID NO: 22570 - DNA, 17 bp, Arabidopsis thaliana
acgcctcgacctattct

SEQ ID NO: 22571 - DNA, 17 bp, Arabidopsis thaliana
acgcctcgactttggag

SEQ ID NO: 22572 - DNA, 17 bp, Arabidopsis thaliana
acgcctctaacatccgg

SEQ ID NO: 22573 - DNA, 17 bp, Arabidopsis thaliana
acgcctctaagatacgg

SEQ ID NO: 22574 - DNA, 17 bp, Arabidopsis thaliana
acgcctctaagatctgg

SEQ ID NO: 22575 - DNA, 17 bp, Arabidopsis thaliana
acgcctctaagattctg

SEQ ID NO: 22576 - DNA, 17 bp, Arabidopsis thaliana
acgcctctaagtcagaa

SEQ ID NO: 22577 - DNA, 17 bp, Arabidopsis thaliana
acgcctctcggagatgt

SEQ ID NO: 22578 - DNA, 17 bp, Arabidopsis thaliana
acgcctctcggtgctct

SEQ ID NO: 22579 - DNA, 17 bp, Arabidopsis thaliana
acgcctctcggttgaat

SEQ ID NO: 22580 - DNA, 17 bp, Arabidopsis thaliana
acgcctgaatgcatgtg

SEQ ID NO: 22581 - DNA, 17 bp, Arabidopsis thaliana
acgcctgacactttatc

SEQ ID NO: 22582 - DNA, 17 bp, Arabidopsis thaliana
acgcctgagtctttctt

SEQ ID NO: 22583 - DNA, 17 bp, Arabidopsis thaliana
acgcctgatttctacag

SEQ ID NO: 22584 - DNA, 17 bp, Arabidopsis thaliana
acgcctgatttgttgct

SEQ ID NO: 22585 - DNA, 17 bp, Arabidopsis thaliana
acgcctgcatgcctgcc

SEQ ID NO: 22586 - DNA, 17 bp, Arabidopsis thaliana
acgcctgcccagtgccg

SEQ ID NO: 22587 - DNA, 17 bp, Arabidopsis thaliana
acgcctgcccggtgctg

SEQ ID NO: 22588 - DNA, 17 bp, Arabidopsis thaliana
acgcctgcctgcctgcc

SEQ ID NO: 22589 - DNA, 17 bp, Arabidopsis thaliana
acgcctgctcggctaca

SEQ ID NO: 22590 - DNA, 17 bp, Arabidopsis thaliana
acgcctgtactggctca

SEQ ID NO: 22591 - DNA, 17 bp, Arabidopsis thaliana
acgcctgtagctcagtg

SEQ ID NO: 22592 - DNA, 17 bp, Arabidopsis thaliana
acgccttaaagatccga

SEQ ID NO: 22593 - DNA, 17 bp, Arabidopsis thaliana
acgccttaaagatccgg

SEQ ID NO: 22594 - DNA, 17 bp, Arabidopsis thaliana
acgccttaagacggtga

SEQ ID NO: 22595 - DNA, 17 bp, Arabidopsis thaliana
acgccttaagatccggt

SEQ ID NO: 22596 - DNA, 17 bp, Arabidopsis thaliana
acgccttaagatcgggt

SEQ ID NO: 22597 - DNA, 17 bp, Arabidopsis thaliana
acgccttaagatctgtt

SEQ ID NO: 22598 - DNA, 17 bp, Arabidopsis thaliana
acgccttaagccagaat

SEQ ID NO: 22599 - DNA, 17 bp, Arabidopsis thaliana
acgccttcaagatccag

SEQ ID NO: 22600 - DNA, 17 bp, Arabidopsis thaliana
acgccttcaagatccga

SEQ ID NO: 22601 - DNA, 17 bp, Arabidopsis thaliana
acgccttcaagatccgg

SEQ ID NO: 22602 - DNA, 17 bp, Arabidopsis thaliana
acgccttcaagatccgt

SEQ ID NO: 22603 - DNA, 17 bp, Arabidopsis thaliana
acgccttcaagatcctg

SEQ ID NO: 22604 - DNA, 17 bp, Arabidopsis thaliana
acgccttcaagatctcg

SEQ ID NO: 22605 - DNA, 17 bp, Arabidopsis thaliana
acgccttcaagatctgg

SEQ ID NO: 22606 - DNA, 17 bp, Arabidopsis thaliana
acgccttcaagatgcgg

SEQ ID NO: 22607 - DNA, 17 bp, Arabidopsis thaliana
acgccttccttttgttc

SEQ ID NO: 22608 - DNA, 17 bp, Arabidopsis thaliana
acgccttcgagatccgg

SEQ ID NO: 22609 - DNA, 17 bp, Arabidopsis thaliana
acgccttcgatgtcggc

SEQ ID NO: 22610 - DNA, 17 bp, Arabidopsis thaliana
acgccttctttgtccac

SEQ ID NO: 22611 - DNA, 17 bp, Arabidopsis thaliana
acgccttgaagatcagg

SEQ ID NO: 22612 - DNA, 17 bp, Arabidopsis thaliana
acgccttgaagatccgt

SEQ ID NO: 22613 - DNA, 17 bp, Arabidopsis thaliana
acgccttgaagatcggg

SEQ ID NO: 22614 - DNA, 17 bp, Arabidopsis thaliana
acgccttgaatacatgg

SEQ ID NO: 22615 - DNA, 17 bp, Arabidopsis thaliana
acgccttggggataaat

SEQ ID NO: 22616 - DNA, 17 bp, Arabidopsis thaliana
acgccttggggataact

SEQ ID NO: 22617 - DNA, 17 bp, Arabidopsis thaliana
acgccttgttatgcttt

SEQ ID NO: 22618 - DNA, 17 bp, Arabidopsis thaliana
acgccttgttggtgcca

SEQ ID NO: 22619 - DNA, 17 bp, Arabidopsis thaliana
acgcctttaaattcggg

SEQ ID NO: 22620 - DNA, 17 bp, Arabidopsis thaliana
acgcctttaacatccgt

SEQ ID NO: 22621 - DNA, 17 bp, Arabidopsis thaliana
acgcctttaacatcctg

SEQ ID NO: 22622 - DNA, 17 bp, Arabidopsis thaliana
acgcctttaagatacgg

SEQ ID NO: 22623 - DNA, 17 bp, Arabidopsis thaliana
acgcctttaagatcatt

SEQ ID NO: 22624 - DNA, 17 bp, Arabidopsis thaliana
acgcctttaagatccaa

SEQ ID NO: 22625 - DNA, 17 bp, Arabidopsis thaliana
acgcctttaagatccag

SEQ ID NO: 22626 - DNA, 17 bp, Arabidopsis thaliana
acgcctttaagatccat

SEQ ID NO: 22627 - DNA, 17 bp, Arabidopsis thaliana
acgcctttaagatcccg

SEQ ID NO: 22628 - DNA, 17 bp, Arabidopsis thaliana
acgcctttaagatccga

SEQ ID NO: 22629 - DNA, 17 bp, Arabidopsis thaliana
acgcctttaagatccgc

SEQ ID NO: 22630 - DNA, 17 bp, Arabidopsis thaliana
acgcctttaagatccgg

SEQ ID NO: 22631 - DNA, 17 bp, Arabidopsis thaliana
acgcctttaagatccgt

SEQ ID NO: 22632 - DNA, 17 bp, Arabidopsis thaliana
acgcctttaagatccta

SEQ ID NO: 22633 - DNA, 17 bp, Arabidopsis thaliana
acgcctttaagatcctc

SEQ ID NO: 22634 - DNA, 17 bp, Arabidopsis thaliana
acgcctttaagatcctg

SEQ ID NO: 22635 - DNA, 17 bp, Arabidopsis thaliana
acgcctttaagatcctt

SEQ ID NO: 22636 - DNA, 17 bp, Arabidopsis thaliana
acgcctttaagatcgtg

SEQ ID NO: 22637 - DNA, 17 bp, Arabidopsis thaliana
acgcctttaagatctag

SEQ ID NO: 22638 - DNA, 17 bp, Arabidopsis thaliana
acgcctttaagatctat

SEQ ID NO: 22639 - DNA, 17 bp, Arabidopsis thaliana
acgcctttaagatctca

SEQ ID NO: 22640 - DNA, 17 bp, Arabidopsis thaliana
acgcctttaagatctcg

SEQ ID NO: 22641 - DNA, 17 bp, Arabidopsis thaliana
acgcctttaagatctga

SEQ ID NO: 22642 - DNA, 17 bp, Arabidopsis thaliana
acgcctttaagatctgg

SEQ ID NO: 22643 - DNA, 17 bp, Arabidopsis thaliana
acgcctttaagatctgt

SEQ ID NO: 22644 - DNA, 17 bp, Arabidopsis thaliana
acgcctttaagatcttg

SEQ ID NO: 22645 - DNA, 17 bp, Arabidopsis thaliana
acgcctttaagattaga

SEQ ID NO: 22646 - DNA, 17 bp, Arabidopsis thaliana
acgcctttaagattcag

SEQ ID NO: 22647 - DNA, 17 bp, Arabidopsis thaliana
acgcctttaagattcga

SEQ ID NO: 22648 - DNA, 17 bp, Arabidopsis thaliana
acgcctttaagattcgg

SEQ ID NO: 22649 - DNA, 17 bp, Arabidopsis thaliana
acgcctttaagattcgt

SEQ ID NO: 22650 - DNA, 17 bp, Arabidopsis thaliana
acgcctttaagattcta

SEQ ID NO: 22651 - DNA, 17 bp, Arabidopsis thaliana
acgcctttaagattctg

SEQ ID NO: 22652 - DNA, 17 bp, Arabidopsis thaliana
acgcctttaagattggg

SEQ ID NO: 22653 - DNA, 17 bp, Arabidopsis thaliana
acgcctttaagatttgg

SEQ ID NO: 22654 - DNA, 17 bp, Arabidopsis thaliana
acgcctttaagtggaca

SEQ ID NO: 22655 - DNA, 17 bp, Arabidopsis thaliana
acgcctttaatatccgg

SEQ ID NO: 22656 - DNA, 17 bp, Arabidopsis thaliana
acgcctttacgatcggg

SEQ ID NO: 22657 - DNA, 17 bp, Arabidopsis thaliana
acgcctttacgatctgg

SEQ ID NO: 22658 - DNA, 17 bp, Arabidopsis thaliana
acgcctttaggatccgg

SEQ ID NO: 22659 - DNA, 17 bp, Arabidopsis thaliana
acgcctttaggatcggg

SEQ ID NO: 22660 - DNA, 17 bp, Arabidopsis thaliana
acgcctttaggatctga

SEQ ID NO: 22661 - DNA, 17 bp, Arabidopsis thaliana
acgcctttaggatctgg

SEQ ID NO: 22662 - DNA, 17 bp, Arabidopsis thaliana
acgcctttaggatctgt

SEQ ID NO: 22663 - DNA, 17 bp, Arabidopsis thaliana
acgcctttatgatccag

SEQ ID NO: 22664 - DNA, 17 bp, Arabidopsis thaliana
acgcctttatgatccgg

SEQ ID NO: 22665 - DNA, 17 bp, Arabidopsis thaliana
acgcctttatgatcctg

SEQ ID NO: 22666 - DNA, 17 bp, Arabidopsis thaliana
acgcctttatgatctgg

SEQ ID NO: 22667 - DNA, 17 bp, Arabidopsis thaliana
acgcctttcagatcagg

SEQ ID NO: 22668 - DNA, 17 bp, Arabidopsis thaliana
acgcctttcagatccga

SEQ ID NO: 22669 - DNA, 17 bp, Arabidopsis thaliana
acgcctttcagatccgg

SEQ ID NO: 22670 - DNA, 17 bp, Arabidopsis thaliana
acgcctttcagatcggg

SEQ ID NO: 22671 - DNA, 17 bp, Arabidopsis thaliana
acgcctttcagatcttg

SEQ ID NO: 22672 - DNA, 17 bp, Arabidopsis thaliana
acgcctttcagatcttt

SEQ ID NO: 22673 - DNA, 17 bp, Arabidopsis thaliana
acgcctttgctcggggg

SEQ ID NO: 22674 - DNA, 17 bp, Arabidopsis thaliana
acgcctttgtcgctaag

SEQ ID NO: 22675 - DNA, 17 bp, Arabidopsis thaliana
acgccttttaccgagag

SEQ ID NO: 22676 - DNA, 17 bp, Arabidopsis thaliana
acgccttttagatccgg

SEQ ID NO: 22677 - DNA, 17 bp, Arabidopsis thaliana
acgccttttagatcttg

SEQ ID NO: 22678 - DNA, 17 bp, Arabidopsis thaliana
acgcgaaaccacggacc

SEQ ID NO: 22679 - DNA, 17 bp, Arabidopsis thaliana
acgcgaaaccacggatc

SEQ ID NO: 22680 - DNA, 17 bp, Arabidopsis thaliana
acgcgaagccacaggtt

SEQ ID NO: 22681 - DNA, 17 bp, Arabidopsis thaliana
acgcgaagcttaaagat

SEQ ID NO: 22682 - DNA, 17 bp, Arabidopsis thaliana
acgcgaagcttagagat

SEQ ID NO: 22683 - DNA, 17 bp, Arabidopsis thaliana
acgcgaagcttagaggt

SEQ ID NO: 22684 - DNA, 17 bp, Arabidopsis thaliana
acgcgaagtcactgaaa

SEQ ID NO: 22685 - DNA, 17 bp, Arabidopsis thaliana
acgcgaagtgactgttt

SEQ ID NO: 22686 - DNA, 17 bp, Arabidopsis thaliana
acgcgaatcgcctctgc

SEQ ID NO: 22687 - DNA, 17 bp, Arabidopsis thaliana
acgcgaatttctgagtt

SEQ ID NO: 22688 - DNA, 17 bp, Arabidopsis thaliana
acgcgacacgttagttt

SEQ ID NO: 22689 - DNA, 17 bp, Arabidopsis thaliana
acgcgacgcggattacg

SEQ ID NO: 22690 - DNA, 17 bp, Arabidopsis thaliana
acgcgacggggtattgt

SEQ ID NO: 22691 - DNA, 17 bp, Arabidopsis thaliana
acgcgacgtcaagaggt

SEQ ID NO: 22692 - DNA, 17 bp, Arabidopsis thaliana
acgcgactattagtctt

SEQ ID NO: 22693 - DNA, 17 bp, Arabidopsis thaliana
acgcgacttcaatgcag

SEQ ID NO: 22694 - DNA, 17 bp, Arabidopsis thaliana
acgcgaggaatcgtcga

SEQ ID NO: 22695 - DNA, 17 bp, Arabidopsis thaliana
acgcgaggctcttttgg

SEQ ID NO: 22696 - DNA, 17 bp, Arabidopsis thaliana
acgcgagggcacgtctg

SEQ ID NO: 22697 - DNA, 17 bp, Arabidopsis thaliana
acgcgaggtcggtgcat

SEQ ID NO: 22698 - DNA, 17 bp, Arabidopsis thaliana
acgcgagtacgatagaa

SEQ ID NO: 22699 - DNA, 17 bp, Arabidopsis thaliana
acgcgagtgccgctcac

SEQ ID NO: 22700 - DNA, 17 bp, Arabidopsis thaliana
acgcgagtgtgggtttg

SEQ ID NO: 22701 - DNA, 17 bp, Arabidopsis thaliana
acgcgagttctatcggg

SEQ ID NO: 22702 - DNA, 17 bp, Arabidopsis thaliana
acgcgataagttggagt

SEQ ID NO: 22703 - DNA, 17 bp, Arabidopsis thaliana
acgcgatacagcggcag

SEQ ID NO: 22704 - DNA, 17 bp, Arabidopsis thaliana
acgcgatctctaccgta

SEQ ID NO: 22705 - DNA, 17 bp, Arabidopsis thaliana
acgcgatgaggcgcgct

SEQ ID NO: 22706 - DNA, 17 bp, Arabidopsis thaliana
acgcgatgtctaccagt

SEQ ID NO: 22707 - DNA, 17 bp, Arabidopsis thaliana
acgcgattggaccatca

SEQ ID NO: 22708 - DNA, 17 bp, Arabidopsis thaliana
acgcgattgtggagctc

SEQ ID NO: 22709 - DNA, 17 bp, Arabidopsis thaliana
acgcgatttagtgggat

SEQ ID NO: 22710 - DNA, 17 bp, Arabidopsis thaliana
acgcgatttagtggggt

SEQ ID NO: 22711 - DNA, 17 bp, Arabidopsis thaliana
acgcgcactgtagatgg

SEQ ID NO: 22712 - DNA, 17 bp, Arabidopsis thaliana
acgcgcaggattttgtt

SEQ ID NO: 22713 - DNA, 17 bp, Arabidopsis thaliana
acgcgcatattggtttg

SEQ ID NO: 22714 - DNA, 17 bp, Arabidopsis thaliana
acgcgcatggccatctt

SEQ ID NO: 22715 - DNA, 17 bp, Arabidopsis thaliana
acgcgcctaacggcgtg

SEQ ID NO: 22716 - DNA, 17 bp, Arabidopsis thaliana
acgcgcctaacggcttg

SEQ ID NO: 22717 - DNA, 17 bp, Arabidopsis thaliana
acgcgccttcgcctcca

SEQ ID NO: 22718 - DNA, 17 bp, Arabidopsis thaliana
acgcgctacgatatcac

SEQ ID NO: 22719 - DNA, 17 bp, Arabidopsis thaliana
acgcgctatcacctctt

SEQ ID NO: 22720 - DNA, 17 bp, Arabidopsis thaliana
acgcgctcgttatactt

SEQ ID NO: 22721 - DNA, 17 bp, Arabidopsis thaliana
acgcgctgaagataagg

SEQ ID NO: 22722 - DNA, 17 bp, Arabidopsis thaliana
acgcgctgtctacgagt

SEQ ID NO: 22723 - DNA, 17 bp, Arabidopsis thaliana
acgcgcttcagcccaga

SEQ ID NO: 22724 - DNA, 17 bp, Arabidopsis thaliana
acgcgcttcgttttggt

SEQ ID NO: 22725 - DNA, 17 bp, Arabidopsis thaliana
acgcggacacacgtgct

SEQ ID NO: 22726 - DNA, 17 bp, Arabidopsis thaliana
acgcggacacaggtggt

SEQ ID NO: 22727 - DNA, 17 bp, Arabidopsis thaliana
acgcggactatccagcc

SEQ ID NO: 22728 - DNA, 17 bp, Arabidopsis thaliana
acgcggagtacggtggc

SEQ ID NO: 22729 - DNA, 17 bp, Arabidopsis thaliana
acgcggatccttatgac

SEQ ID NO: 22730 - DNA, 17 bp, Arabidopsis thaliana
acgcggatccttttgac

SEQ ID NO: 22731 - DNA, 17 bp, Arabidopsis thaliana
acgcggattacggtagc

SEQ ID NO: 22732 - DNA, 17 bp, Arabidopsis thaliana
acgcggattacggtgac

SEQ ID NO: 22733 - DNA, 17 bp, Arabidopsis thaliana
acgcggattacggtggc

SEQ ID NO: 22734 - DNA, 17 bp, Arabidopsis thaliana
acgcggattgcttctac

SEQ ID NO: 22735 - DNA, 17 bp, Arabidopsis thaliana
acgcggattgtcacttc

SEQ ID NO: 22736 - DNA, 17 bp, Arabidopsis thaliana
acgcggatttgtggtta

SEQ ID NO: 22737 - DNA, 17 bp, Arabidopsis thaliana
acgcggcatgggtgtgg

SEQ ID NO: 22738 - DNA, 17 bp, Arabidopsis thaliana
acgcggcgaagtgcgaa

SEQ ID NO: 22739 - DNA, 17 bp, Arabidopsis thaliana
acgcggcgacaacgctc

SEQ ID NO: 22740 - DNA, 17 bp, Arabidopsis thaliana
acgcggcgcctagtcgc

SEQ ID NO: 22741 - DNA, 17 bp, Arabidopsis thaliana
acgcggcgcggtctttc

SEQ ID NO: 22742 - DNA, 17 bp, Arabidopsis thaliana
acgcggctcggcgaaga

SEQ ID NO: 22743 - DNA, 17 bp, Arabidopsis thaliana
acgcggcttctcctgat

SEQ ID NO: 22744 - DNA, 17 bp, Arabidopsis thaliana
acgcggcttctcctgct

SEQ ID NO: 22745 - DNA, 17 bp, Arabidopsis thaliana
acgcgggacgcggtcgt

SEQ ID NO: 22746 - DNA, 17 bp, Arabidopsis thaliana
acgcgggacgcgttcgt

SEQ ID NO: 22747 - DNA, 17 bp, Arabidopsis thaliana
acgcgggatatacggtt

SEQ ID NO: 22748 - DNA, 17 bp, Arabidopsis thaliana
acgcgggtacgcagacc

SEQ ID NO: 22749 - DNA, 17 bp, Arabidopsis thaliana
acgcgggtgacccgggt

SEQ ID NO: 22750 - DNA, 17 bp, Arabidopsis thaliana
acgcgggtgattgggaa

SEQ ID NO: 22751 - DNA, 17 bp, Arabidopsis thaliana
acgcgggttcgattccc

SEQ ID NO: 22752 - DNA, 17 bp, Arabidopsis thaliana
acgcgggttcgggcccc

SEQ ID NO: 22753 - DNA, 17 bp, Arabidopsis thaliana
acgcggtaatggagatg

SEQ ID NO: 22754 - DNA, 17 bp, Arabidopsis thaliana
acgcggtatccgtgcta

SEQ ID NO: 22755 - DNA, 17 bp, Arabidopsis thaliana
acgcggtccatggtctt

SEQ ID NO: 22756 - DNA, 17 bp, Arabidopsis thaliana
acgcggtccgcctttgg

SEQ ID NO: 22757 - DNA, 17 bp, Arabidopsis thaliana
acgcggtcgttacagtt

SEQ ID NO: 22758 - DNA, 17 bp, Arabidopsis thaliana
acgcggtcgtttagtgc

SEQ ID NO: 22759 - DNA, 17 bp, Arabidopsis thaliana
acgcggtgccttgcggc

SEQ ID NO: 22760 - DNA, 17 bp, Arabidopsis thaliana
acgcggtggcggcctaa

SEQ ID NO: 22761 - DNA, 17 bp, Arabidopsis thaliana
acgcggtggtggtatat

SEQ ID NO: 22762 - DNA, 17 bp, Arabidopsis thaliana
acgcgtaagaacctgcc

SEQ ID NO: 22763 - DNA, 17 bp, Arabidopsis thaliana
acgcgtacccgggctca

SEQ ID NO: 22764 - DNA, 17 bp, Arabidopsis thaliana
acgcgtagtaagctcaa

SEQ ID NO: 22765 - DNA, 17 bp, Arabidopsis thaliana
acgcgtagtgtaaccct

SEQ ID NO: 22766 - DNA, 17 bp, Arabidopsis thaliana
acgcgtcaaacatgcac

SEQ ID NO: 22767 - DNA, 17 bp, Arabidopsis thaliana
acgcgtcaaacatgcgc

SEQ ID NO: 22768 - DNA, 17 bp, Arabidopsis thaliana
acgcgtcaagtctatcg

SEQ ID NO: 22769 - DNA, 17 bp, Arabidopsis thaliana
acgcgtcaagtgcggct

SEQ ID NO: 22770 - DNA, 17 bp, Arabidopsis thaliana
acgcgtcagagacaacg

SEQ ID NO: 22771 - DNA, 17 bp, Arabidopsis thaliana
acgcgtccaacaaacaa

SEQ ID NO: 22772 - DNA, 17 bp, Arabidopsis thaliana
acgcgtcgccgtctgct

SEQ ID NO: 22773 - DNA, 17 bp, Arabidopsis thaliana
acgcgtctcctatgtat

SEQ ID NO: 22774 - DNA, 17 bp, Arabidopsis thaliana
acgcgtctgcctgggtg

SEQ ID NO: 22775 - DNA, 17 bp, Arabidopsis thaliana
acgcgtcttcgccattt

SEQ ID NO: 22776 - DNA, 17 bp, Arabidopsis thaliana
acgcgtgagacagtttg

SEQ ID NO: 22777 - DNA, 17 bp, Arabidopsis thaliana
acgcgtgagagacttgt

SEQ ID NO: 22778 - DNA, 17 bp, Arabidopsis thaliana
acgcgtgatgaccaaaa

SEQ ID NO: 22779 - DNA, 17 bp, Arabidopsis thaliana
acgcgtgcctgactttt

SEQ ID NO: 22780 - DNA, 17 bp, Arabidopsis thaliana
acgcgtgctcctgtagg

SEQ ID NO: 22781 - DNA, 17 bp, Arabidopsis thaliana
acgcgtggacgagtttg

SEQ ID NO: 22782 - DNA, 17 bp, Arabidopsis thaliana
acgcgtgggtttgtttt

SEQ ID NO: 22783 - DNA, 17 bp, Arabidopsis thaliana
acgcgtgtagagttttc

SEQ ID NO: 22784 - DNA, 17 bp, Arabidopsis thaliana
acgcgtgtgccacttgc

SEQ ID NO: 22785 - DNA, 17 bp, Arabidopsis thaliana
acgcgttaagattcggt

SEQ ID NO: 22786 - DNA, 17 bp, Arabidopsis thaliana
acgcgttaagtatcccg

SEQ ID NO: 22787 - DNA, 17 bp, Arabidopsis thaliana
acgcgttagatctccat

SEQ ID NO: 22788 - DNA, 17 bp, Arabidopsis thaliana
acgcgttccgtctccgg

SEQ ID NO: 22789 - DNA, 17 bp, Arabidopsis thaliana
acgcgttctttggacct

SEQ ID NO: 22790 - DNA, 17 bp, Arabidopsis thaliana
acgcgttggcgggacgg

SEQ ID NO: 22791 - DNA, 17 bp, Arabidopsis thaliana
acgcgtttaagatccgg

SEQ ID NO: 22792 - DNA, 17 bp, Arabidopsis thaliana
acgcgtttaagatcctg

SEQ ID NO: 22793 - DNA, 17 bp, Arabidopsis thaliana
acgcgtttacgtttttg

SEQ ID NO: 22794 - DNA, 17 bp, Arabidopsis thaliana
acgcgtttgattcaacg

SEQ ID NO: 22795 - DNA, 17 bp, Arabidopsis thaliana
acgcgtttgcggttgcg

SEQ ID NO: 22796 - DNA, 17 bp, Arabidopsis thaliana
acgcgttttctttgtcc

SEQ ID NO: 22797 - DNA, 17 bp, Arabidopsis thaliana
acgcgtttttgtgaatt

SEQ ID NO: 22798 - DNA, 17 bp, Arabidopsis thaliana
acgctaaaacctcagct

SEQ ID NO: 22799 - DNA, 17 bp, Arabidopsis thaliana
acgctaaaatcgttttt

SEQ ID NO: 22800 - DNA, 17 bp, Arabidopsis thaliana
acgctaaataggagtga

SEQ ID NO: 22801 - DNA, 17 bp, Arabidopsis thaliana
acgctaacaaccgctac

SEQ ID NO: 22802 - DNA, 17 bp, Arabidopsis thaliana
acgctaaccaagatttt

SEQ ID NO: 22803 - DNA, 17 bp, Arabidopsis thaliana
acgctaacttgtggtca

SEQ ID NO: 22804 - DNA, 17 bp, Arabidopsis thaliana
acgctaagcactcgtaa

SEQ ID NO: 22805 - DNA, 17 bp, Arabidopsis thaliana
acgctaagttcaactct

SEQ ID NO: 22806 - DNA, 17 bp, Arabidopsis thaliana
acgctaatgatgttgca

SEQ ID NO: 22807 - DNA, 17 bp, Arabidopsis thaliana
acgctaatggagttcgc

SEQ ID NO: 22808 - DNA, 17 bp, Arabidopsis thaliana
acgctacgtctcggggg

SEQ ID NO: 22809 - DNA, 17 bp, Arabidopsis thaliana
acgctacgtctggaaga

SEQ ID NO: 22810 - DNA, 17 bp, Arabidopsis thaliana
acgctacgtgtgggttt

SEQ ID NO: 22811 - DNA, 17 bp, Arabidopsis thaliana
acgctactttgttttcg

SEQ ID NO: 22812 - DNA, 17 bp, Arabidopsis thaliana
acgctagattttgaccc

SEQ ID NO: 22813 - DNA, 17 bp, Arabidopsis thaliana
acgctatctggtgcctg

SEQ ID NO: 22814 - DNA, 17 bp, Arabidopsis thaliana
acgctatgcgtgggttt

SEQ ID NO: 22815 - DNA, 17 bp, Arabidopsis thaliana
acgctattagctcagtg

SEQ ID NO: 22816 - DNA, 17 bp, Arabidopsis thaliana
acgctattaggagagct

SEQ ID NO: 22817 - DNA, 17 bp, Arabidopsis thaliana
acgctcaaccagtcgtt

SEQ ID NO: 22818 - DNA, 17 bp, Arabidopsis thaliana
acgctcaactaatctgt

SEQ ID NO: 22819 - DNA, 17 bp, Arabidopsis thaliana
acgctcaagactctatc

SEQ ID NO: 22820 - DNA, 17 bp, Arabidopsis thaliana
acgctcagagcattttg

SEQ ID NO: 22821 - DNA, 17 bp, Arabidopsis thaliana
acgctcaggagggatag

SEQ ID NO: 22822 - DNA, 17 bp, Arabidopsis thaliana
acgctcagtgtcctcgt

SEQ ID NO: 22823 - DNA, 17 bp, Arabidopsis thaliana
acgctcatacgattcga

SEQ ID NO: 22824 - DNA, 17 bp, Arabidopsis thaliana
acgctcccgggaagtcc

SEQ ID NO: 22825 - DNA, 17 bp, Arabidopsis thaliana
acgctccctcgagatga

SEQ ID NO: 22826 - DNA, 17 bp, Arabidopsis thaliana
acgctcctggtcttaat

SEQ ID NO: 22827 - DNA, 17 bp, Arabidopsis thaliana
acgctcgatgataagtt

SEQ ID NO: 22828 - DNA, 17 bp, Arabidopsis thaliana
acgctcggccggttgtc

SEQ ID NO: 22829 - DNA, 17 bp, Arabidopsis thaliana
acgctcgtttccctcaa

SEQ ID NO: 22830 - DNA, 17 bp, Arabidopsis thaliana
acgctcgttttgacccg

SEQ ID NO: 22831 - DNA, 17 bp, Arabidopsis thaliana
acgctctaagggacgcc

SEQ ID NO: 22832 - DNA, 17 bp, Arabidopsis thaliana
acgctctaatcgctaca

SEQ ID NO: 22833 - DNA, 17 bp, Arabidopsis thaliana
acgctctatctggcatg

SEQ ID NO: 22834 - DNA, 17 bp, Arabidopsis thaliana
acgctctggatacatta

SEQ ID NO: 22835 - DNA, 17 bp, Arabidopsis thaliana
acgctctgtgcaaccaa

SEQ ID NO: 22836 - DNA, 17 bp, Arabidopsis thaliana
acgctctgttgctttta

SEQ ID NO: 22837 - DNA, 17 bp, Arabidopsis thaliana
acgctcttagttcagtt

SEQ ID NO: 22838 - DNA, 17 bp, Arabidopsis thaliana
acgctcttagtttcggt

SEQ ID NO: 22839 - DNA, 17 bp, Arabidopsis thaliana
acgctcttcagcttgtt

SEQ ID NO: 22840 - DNA, 17 bp, Arabidopsis thaliana
acgctcttgatacatct

SEQ ID NO: 22841 - DNA, 17 bp, Arabidopsis thaliana
acgctcttgctcatctt

SEQ ID NO: 22842 - DNA, 17 bp, Arabidopsis thaliana
acgctcttggtccatta

SEQ ID NO: 22843 - DNA, 17 bp, Arabidopsis thaliana
acgctctttcatcgtcg

SEQ ID NO: 22844 - DNA, 17 bp, Arabidopsis thaliana
acgctgaaacctgttat

SEQ ID NO: 22845 - DNA, 17 bp, Arabidopsis thaliana
acgctgaatcctgtcga

SEQ ID NO: 22846 - DNA, 17 bp, Arabidopsis thaliana
acgctgacggcatagcc

SEQ ID NO: 22847 - DNA, 17 bp, Arabidopsis thaliana
acgctgacttgtgtacg

SEQ ID NO: 22848 - DNA, 17 bp, Arabidopsis thaliana
acgctgagccggttgag

SEQ ID NO: 22849 - DNA, 17 bp, Arabidopsis thaliana
acgctgagctcaggccg

SEQ ID NO: 22850 - DNA, 17 bp, Arabidopsis thaliana
acgctgagtactcgaca

SEQ ID NO: 22851 - DNA, 17 bp, Arabidopsis thaliana
acgctgatgctttgtaa

SEQ ID NO: 22852 - DNA, 17 bp, Arabidopsis thaliana
acgctgcgcgggttaaa

SEQ ID NO: 22853 - DNA, 17 bp, Arabidopsis thaliana
acgctgcgtttgcgggt

SEQ ID NO: 22854 - DNA, 17 bp, Arabidopsis thaliana
acgctgctattggagac

SEQ ID NO: 22855 - DNA, 17 bp, Arabidopsis thaliana
acgctgctgatgttgat

SEQ ID NO: 22856 - DNA, 17 bp, Arabidopsis thaliana
acgctgctgatgtttga

SEQ ID NO: 22857 - DNA, 17 bp, Arabidopsis thaliana
acgctggagttggtcga

SEQ ID NO: 22858 - DNA, 17 bp, Arabidopsis thaliana
acgctggcgaagcctct

SEQ ID NO: 22859 - DNA, 17 bp, Arabidopsis thaliana
acgctggctaagaggcc

SEQ ID NO: 22860 - DNA, 17 bp, Arabidopsis thaliana
acgctggctaggaggcc

SEQ ID NO: 22861 - DNA, 17 bp, Arabidopsis thaliana
acgctggcttactgagg

SEQ ID NO: 22862 - DNA, 17 bp, Arabidopsis thaliana
acgctggtgaagcttcg

SEQ ID NO: 22863 - DNA, 17 bp, Arabidopsis thaliana
acgctggttcaaatcca

SEQ ID NO: 22864 - DNA, 17 bp, Arabidopsis thaliana
acgctggttctgctgat

SEQ ID NO: 22865 - DNA, 17 bp, Arabidopsis thaliana
acgctggtttcgacgct

SEQ ID NO: 22866 - DNA, 17 bp, Arabidopsis thaliana
acgctgtagcaatgttg

SEQ ID NO: 22867 - DNA, 17 bp, Arabidopsis thaliana
acgctgtcagatttgcg

SEQ ID NO: 22868 - DNA, 17 bp, Arabidopsis thaliana
acgctgtcgagtggcag

SEQ ID NO: 22869 - DNA, 17 bp, Arabidopsis thaliana
acgctgtctaagaggcc

SEQ ID NO: 22870 - DNA, 17 bp, Arabidopsis thaliana
acgctgtgtctacaaag

SEQ ID NO: 22871 - DNA, 17 bp, Arabidopsis thaliana
acgctgtgtggcacgag

SEQ ID NO: 22872 - DNA, 17 bp, Arabidopsis thaliana
acgctgttaggagagct

SEQ ID NO: 22873 - DNA, 17 bp, Arabidopsis thaliana
acgctgttgaggcgggc

SEQ ID NO: 22874 - DNA, 17 bp, Arabidopsis thaliana
acgctgtttaccgtaat

SEQ ID NO: 22875 - DNA, 17 bp, Arabidopsis thaliana
acgctgtttgtaccgag

SEQ ID NO: 22876 - DNA, 17 bp, Arabidopsis thaliana
acgctgttttgctctag

SEQ ID NO: 22877 - DNA, 17 bp, Arabidopsis thaliana
acgcttaactgcggagt

SEQ ID NO: 22878 - DNA, 17 bp, Arabidopsis thaliana
acgcttacaagatcggg

SEQ ID NO: 22879 - DNA, 17 bp, Arabidopsis thaliana
acgcttaggtggaagat

SEQ ID NO: 22880 - DNA, 17 bp, Arabidopsis thaliana
acgcttataagctgcgg

SEQ ID NO: 22881 - DNA, 17 bp, Arabidopsis thaliana
acgcttatacgattgcg

SEQ ID NO: 22882 - DNA, 17 bp, Arabidopsis thaliana
acgcttattgggcgttg

SEQ ID NO: 22883 - DNA, 17 bp, Arabidopsis thaliana
acgcttcacagatagag

SEQ ID NO: 22884 - DNA, 17 bp, Arabidopsis thaliana
acgcttcagtgacaagt

SEQ ID NO: 22885 - DNA, 17 bp, Arabidopsis thaliana
acgcttccaaacgcttc

SEQ ID NO: 22886 - DNA, 17 bp, Arabidopsis thaliana
acgcttccaagggtgct

SEQ ID NO: 22887 - DNA, 17 bp, Arabidopsis thaliana
acgcttccgccgaacga

SEQ ID NO: 22888 - DNA, 17 bp, Arabidopsis thaliana
acgcttccgccgaacgg

SEQ ID NO: 22889 - DNA, 17 bp, Arabidopsis thaliana
acgcttcgagactcaca

SEQ ID NO: 22890 - DNA, 17 bp, Arabidopsis thaliana
acgcttcgccgaacgga

SEQ ID NO: 22891 - DNA, 17 bp, Arabidopsis thaliana
acgcttcgcctcaacat

SEQ ID NO: 22892 - DNA, 17 bp, Arabidopsis thaliana
acgcttcggtgatgaca

SEQ ID NO: 22893 - DNA, 17 bp, Arabidopsis thaliana
acgcttcggtttgattc

SEQ ID NO: 22894 - DNA, 17 bp, Arabidopsis thaliana
acgcttcgtttttgtcg

SEQ ID NO: 22895 - DNA, 17 bp, Arabidopsis thaliana
acgcttctctattctga

SEQ ID NO: 22896 - DNA, 17 bp, Arabidopsis thaliana
acgcttctgcccttgcg

SEQ ID NO: 22897 - DNA, 17 bp, Arabidopsis thaliana
acgcttctgccttggat

SEQ ID NO: 22898 - DNA, 17 bp, Arabidopsis thaliana
acgcttctggacgaggc

SEQ ID NO: 22899 - DNA, 17 bp, Arabidopsis thaliana
acgcttctggtgctgaa

SEQ ID NO: 22900 - DNA, 17 bp, Arabidopsis thaliana
acgcttcttatggtggt

SEQ ID NO: 22901 - DNA, 17 bp, Arabidopsis thaliana
acgcttcttcttgattt

SEQ ID NO: 22902 - DNA, 17 bp, Arabidopsis thaliana
acgcttcttgcaagatc

SEQ ID NO: 22903 - DNA, 17 bp, Arabidopsis thaliana
acgcttcttgtctaaag

SEQ ID NO: 22904 - DNA, 17 bp, Arabidopsis thaliana
acgcttgaaaccgcaac

SEQ ID NO: 22905 - DNA, 17 bp, Arabidopsis thaliana
acgcttgaattaataca

SEQ ID NO: 22906 - DNA, 17 bp, Arabidopsis thaliana
acgcttgaattaattca

SEQ ID NO: 22907 - DNA, 17 bp, Arabidopsis thaliana
acgcttgactctagctg

SEQ ID NO: 22908 - DNA, 17 bp, Arabidopsis thaliana
acgcttgagatcttttt

SEQ ID NO: 22909 - DNA, 17 bp, Arabidopsis thaliana
acgcttgagttgctgac

SEQ ID NO: 22910 - DNA, 17 bp, Arabidopsis thaliana
acgcttgatccacagtt

SEQ ID NO: 22911 - DNA, 17 bp, Arabidopsis thaliana
acgcttgatggacactt

SEQ ID NO: 22912 - DNA, 17 bp, Arabidopsis thaliana
acgcttgccgtgtaccg

SEQ ID NO: 22913 - DNA, 17 bp, Arabidopsis thaliana
acgcttgcgagaatgaa

SEQ ID NO: 22914 - DNA, 17 bp, Arabidopsis thaliana
acgcttgcgagaatgag

SEQ ID NO: 22915 - DNA, 17 bp, Arabidopsis thaliana
acgcttgcggaaaggag

SEQ ID NO: 22916 - DNA, 17 bp, Arabidopsis thaliana
acgcttgcggaaggagc

SEQ ID NO: 22917 - DNA, 17 bp, Arabidopsis thaliana
acgcttgcgggaaggtg

SEQ ID NO: 22918 - DNA, 17 bp, Arabidopsis thaliana
acgcttggattgcagga

SEQ ID NO: 22919 - DNA, 17 bp, Arabidopsis thaliana
acgcttggattttgtgg

SEQ ID NO: 22920 - DNA, 17 bp, Arabidopsis thaliana
acgcttggcaccaacag

SEQ ID NO: 22921 - DNA, 17 bp, Arabidopsis thaliana
acgcttggtgatgacat

SEQ ID NO: 22922 - DNA, 17 bp, Arabidopsis thaliana
acgcttggtgcaggccc

SEQ ID NO: 22923 - DNA, 17 bp, Arabidopsis thaliana
acgcttggtgcaggtcg

SEQ ID NO: 22924 - DNA, 17 bp, Arabidopsis thaliana
acgcttgtgccatggct

SEQ ID NO: 22925 - DNA, 17 bp, Arabidopsis thaliana
acgcttgtggagacgtc

SEQ ID NO: 22926 - DNA, 17 bp, Arabidopsis thaliana
acgctttaagatccggt

SEQ ID NO: 22927 - DNA, 17 bp, Arabidopsis thaliana
acgctttaagatctggt

SEQ ID NO: 22928 - DNA, 17 bp, Arabidopsis thaliana
acgctttacttgccttt

SEQ ID NO: 22929 - DNA, 17 bp, Arabidopsis thaliana
acgctttagggtccaat

SEQ ID NO: 22930 - DNA, 17 bp, Arabidopsis thaliana
acgctttcaagtcaggt

SEQ ID NO: 22931 - DNA, 17 bp, Arabidopsis thaliana
acgctttcgaactacgt

SEQ ID NO: 22932 - DNA, 17 bp, Arabidopsis thaliana
acgctttctccattcgg

SEQ ID NO: 22933 - DNA, 17 bp, Arabidopsis thaliana
acgctttctccattcta

SEQ ID NO: 22934 - DNA, 17 bp, Arabidopsis thaliana
acgctttgatggtgtag

SEQ ID NO: 22935 - DNA, 17 bp, Arabidopsis thaliana
acgctttgtccattcgg

SEQ ID NO: 22936 - DNA, 17 bp, Arabidopsis thaliana
acgctttgtcgctaaga

SEQ ID NO: 22937 - DNA, 17 bp, Arabidopsis thaliana
acgcttttaagatccgg

SEQ ID NO: 22938 - DNA, 17 bp, Arabidopsis thaliana
acgcttttaagatccgt

SEQ ID NO: 22939 - DNA, 17 bp, Arabidopsis thaliana
acgcttttaagatttgg

SEQ ID NO: 22940 - DNA, 17 bp, Arabidopsis thaliana
acgcttttagttcagtt

SEQ ID NO: 22941 - DNA, 17 bp, Arabidopsis thaliana
acgcttttcagatcggc

SEQ ID NO: 22942 - DNA, 17 bp, Arabidopsis thaliana
acgcttttcagatcggg

SEQ ID NO: 22943 - DNA, 17 bp, Arabidopsis thaliana
acgcttttctagacttg

SEQ ID NO: 22944 - DNA, 17 bp, Arabidopsis thaliana
acgcttttctcaggatt

SEQ ID NO: 22945 - DNA, 17 bp, Arabidopsis thaliana
acgcttttgaatgtgca

SEQ ID NO: 22946 - DNA, 17 bp, Arabidopsis thaliana
acggaaaactgactaat

SEQ ID NO: 22947 - DNA, 17 bp, Arabidopsis thaliana
acggaaaatgagctatc

SEQ ID NO: 22948 - DNA, 17 bp, Arabidopsis thaliana
acggaaacaaaggggaa

SEQ ID NO: 22949 - DNA, 17 bp, Arabidopsis thaliana
acggaaacttaatgacg

SEQ ID NO: 22950 - DNA, 17 bp, Arabidopsis thaliana
acggaaatcaaggatga

SEQ ID NO: 22951 - DNA, 17 bp, Arabidopsis thaliana
acggaaatcggatggtg

SEQ ID NO: 22952 - DNA, 17 bp, Arabidopsis thaliana
acggaaatttaacgacg

SEQ ID NO: 22953 - DNA, 17 bp, Arabidopsis thaliana
acggaaatttaacggaa

SEQ ID NO: 22954 - DNA, 17 bp, Arabidopsis thaliana
acggaaatttaacggca

SEQ ID NO: 22955 - DNA, 17 bp, Arabidopsis thaliana
acggaaatttacgacgt

SEQ ID NO: 22956 - DNA, 17 bp, Arabidopsis thaliana
acggaacaaggcggttc

SEQ ID NO: 22957 - DNA, 17 bp, Arabidopsis thaliana
acggaacaatagcagag

SEQ ID NO: 22958 - DNA, 17 bp, Arabidopsis thaliana
acggaacggagaagcga

SEQ ID NO: 22959 - DNA, 17 bp, Arabidopsis thaliana
acggaacggattggcga

SEQ ID NO: 22960 - DNA, 17 bp, Arabidopsis thaliana
acggaacggattggcgg

SEQ ID NO: 22961 - DNA, 17 bp, Arabidopsis thaliana
acggaacgggttggcgg

SEQ ID NO: 22962 - DNA, 17 bp, Arabidopsis thaliana
acggaacgggttgttac

SEQ ID NO: 22963 - DNA, 17 bp, Arabidopsis thaliana
acggaacgggtttggca

SEQ ID NO: 22964 - DNA, 17 bp, Arabidopsis thaliana
acggaacttttttgtga

SEQ ID NO: 22965 - DNA, 17 bp, Arabidopsis thaliana
acggaagatggagtgat

SEQ ID NO: 22966 - DNA, 17 bp, Arabidopsis thaliana
acggaagatgtgcttta

SEQ ID NO: 22967 - DNA, 17 bp, Arabidopsis thaliana
acggaagattggctatg

SEQ ID NO: 22968 - DNA, 17 bp, Arabidopsis thaliana
acggaagattgtgggga

SEQ ID NO: 22969 - DNA, 17 bp, Arabidopsis thaliana
acggaagggcaccacca

SEQ ID NO: 22970 - DNA, 17 bp, Arabidopsis thaliana
acggaaggtccaacgac

SEQ ID NO: 22971 - DNA, 17 bp, Arabidopsis thaliana
acggaagtttgcgttgt

SEQ ID NO: 22972 - DNA, 17 bp, Arabidopsis thaliana
acggaatatcgcgatat

SEQ ID NO: 22973 - DNA, 17 bp, Arabidopsis thaliana
acggaatattgttgtga

SEQ ID NO: 22974 - DNA, 17 bp, Arabidopsis thaliana
acggaatcaggccttgt

SEQ ID NO: 22975 - DNA, 17 bp, Arabidopsis thaliana
acggaatcatctaacgg

SEQ ID NO: 22976 - DNA, 17 bp, Arabidopsis thaliana
acggaatcgtggagtct

SEQ ID NO: 22977 - DNA, 17 bp, Arabidopsis thaliana
acggaatctgatcccac

SEQ ID NO: 22978 - DNA, 17 bp, Arabidopsis thaliana
acggaatctgtccaggg

SEQ ID NO: 22979 - DNA, 17 bp, Arabidopsis thaliana
acggaatgaagtttgtg

SEQ ID NO: 22980 - DNA, 17 bp, Arabidopsis thaliana
acggaatgaccggtgaa

SEQ ID NO: 22981 - DNA, 17 bp, Arabidopsis thaliana
acggaatgccacatcaa

SEQ ID NO: 22982 - DNA, 17 bp, Arabidopsis thaliana
acggaatgtgcagaaga

SEQ ID NO: 22983 - DNA, 17 bp, Arabidopsis thaliana
acggaatgttgcgaggt

SEQ ID NO: 22984 - DNA, 17 bp, Arabidopsis thaliana
acggaattcattttcgt

SEQ ID NO: 22985 - DNA, 17 bp, Arabidopsis thaliana
acggaattcggcccaga

SEQ ID NO: 22986 - DNA, 17 bp, Arabidopsis thaliana
acggaattcggcctaga

SEQ ID NO: 22987 - DNA, 17 bp, Arabidopsis thaliana
acggaattctttgcacc

SEQ ID NO: 22988 - DNA, 17 bp, Arabidopsis thaliana
acggaattgctgctttt

SEQ ID NO: 22989 - DNA, 17 bp, Arabidopsis thaliana
acggaattttacggttt

SEQ ID NO: 22990 - DNA, 17 bp, Arabidopsis thaliana
acggacaacccctacac

SEQ ID NO: 22991 - DNA, 17 bp, Arabidopsis thaliana
acggacaagcctctggt

SEQ ID NO: 22992 - DNA, 17 bp, Arabidopsis thaliana
acggacaaggggaatcc

SEQ ID NO: 22993 - DNA, 17 bp, Arabidopsis thaliana
acggacaatctctttcg

SEQ ID NO: 22994 - DNA, 17 bp, Arabidopsis thaliana
acggacaattaatcgtg

SEQ ID NO: 22995 - DNA, 17 bp, Arabidopsis thaliana
acggacaattccttccg

SEQ ID NO: 22996 - DNA, 17 bp, Arabidopsis thaliana
acggacaattccttctg

SEQ ID NO: 22997 - DNA, 17 bp, Arabidopsis thaliana
acggacaattcctttcg

SEQ ID NO: 22998 - DNA, 17 bp, Arabidopsis thaliana
acggacaatttctcccg

SEQ ID NO: 22999 - DNA, 17 bp, Arabidopsis thaliana
acggacacacatcatgg

SEQ ID NO: 23000 - DNA, 17 bp, Arabidopsis thaliana
acggacacgcccaatgg

SEQ ID NO: 23001 - DNA, 17 bp, Arabidopsis thaliana
acggacacgccgcctcg

SEQ ID NO: 23002 - DNA, 17 bp, Arabidopsis thaliana
acggacaggatcgctcg

SEQ ID NO: 23003 - DNA, 17 bp, Arabidopsis thaliana
acggacagtttttttat

SEQ ID NO: 23004 - DNA, 17 bp, Arabidopsis thaliana
acggacagtttttttta

SEQ ID NO: 23005 - DNA, 17 bp, Arabidopsis thaliana
acggacataggagatcc

SEQ ID NO: 23006 - DNA, 17 bp, Arabidopsis thaliana
acggacatctcctcagc

SEQ ID NO: 23007 - DNA, 17 bp, Arabidopsis thaliana
acggaccaaatgttacg

SEQ ID NO: 23008 - DNA, 17 bp, Arabidopsis thaliana
acggaccaacccgtcgc

SEQ ID NO: 23009 - DNA, 17 bp, Arabidopsis thaliana
acggaccaactaaggac

SEQ ID NO: 23010 - DNA, 17 bp, Arabidopsis thaliana
acggaccaggcttcatt

SEQ ID NO: 23011 - DNA, 17 bp, Arabidopsis thaliana
acggaccagttgatgtt

SEQ ID NO: 23012 - DNA, 17 bp, Arabidopsis thaliana
acggaccattcccgcga

SEQ ID NO: 23013 - DNA, 17 bp, Arabidopsis thaliana
acggacccaaggcgaga

SEQ ID NO: 23014 - DNA, 17 bp, Arabidopsis thaliana
acggacccaaggctaga

SEQ ID NO: 23015 - DNA, 17 bp, Arabidopsis thaliana
acggacccgtaggatgg

SEQ ID NO: 23016 - DNA, 17 bp, Arabidopsis thaliana
acggacccgtaggctgg

SEQ ID NO: 23017 - DNA, 17 bp, Arabidopsis thaliana
acggaccgatgtggatc

SEQ ID NO: 23018 - DNA, 17 bp, Arabidopsis thaliana
acggaccgcgtcgttgg

SEQ ID NO: 23019 - DNA, 17 bp, Arabidopsis thaliana
acggaccgggcctaagt

SEQ ID NO: 23020 - DNA, 17 bp, Arabidopsis thaliana
acggacgagatcattcc

SEQ ID NO: 23021 - DNA, 17 bp, Arabidopsis thaliana
acggacgatcatgcttt

SEQ ID NO: 23022 - DNA, 17 bp, Arabidopsis thaliana
acggacgatctcgttgt

SEQ ID NO: 23023 - DNA, 17 bp, Arabidopsis thaliana
acggacggattgatgga

SEQ ID NO: 23024 - DNA, 17 bp, Arabidopsis thaliana
acggacggattggcggg

SEQ ID NO: 23025 - DNA, 17 bp, Arabidopsis thaliana
acggacgggtatctgta

SEQ ID NO: 23026 - DNA, 17 bp, Arabidopsis thaliana
acggacggtgccgacca

SEQ ID NO: 23027 - DNA, 17 bp, Arabidopsis thaliana
acggacgtgccggagtg

SEQ ID NO: 23028 - DNA, 17 bp, Arabidopsis thaliana
acggactaaaaagtacc

SEQ ID NO: 23029 - DNA, 17 bp, Arabidopsis thaliana
acggactaaaacggctg

SEQ ID NO: 23030 - DNA, 17 bp, Arabidopsis thaliana
acggactaactgtggac

SEQ ID NO: 23031 - DNA, 17 bp, Arabidopsis thaliana
acggactagataaggct

SEQ ID NO: 23032 - DNA, 17 bp, Arabidopsis thaliana
acggactatttgacctc

SEQ ID NO: 23033 - DNA, 17 bp, Arabidopsis thaliana
acggactccgctgccag

SEQ ID NO: 23034 - DNA, 17 bp, Arabidopsis thaliana
acggactcgactgcggc

SEQ ID NO: 23035 - DNA, 17 bp, Arabidopsis thaliana
acggactgagatacgcg

SEQ ID NO: 23036 - DNA, 17 bp, Arabidopsis thaliana
acggactgcaacggctc

SEQ ID NO: 23037 - DNA, 17 bp, Arabidopsis thaliana
acggactgcccagacct

SEQ ID NO: 23038 - DNA, 17 bp, Arabidopsis thaliana
acggactgcccagactc

SEQ ID NO: 23039 - DNA, 17 bp, Arabidopsis thaliana
acggactgcggattata

SEQ ID NO: 23040 - DNA, 17 bp, Arabidopsis thaliana
acggactgctcggtggc

SEQ ID NO: 23041 - DNA, 17 bp, Arabidopsis thaliana
acggactggaacggctc

SEQ ID NO: 23042 - DNA, 17 bp, Arabidopsis thaliana
acggactgggaacggct

SEQ ID NO: 23043 - DNA, 17 bp, Arabidopsis thaliana
acggactgggaacggtt

SEQ ID NO: 23044 - DNA, 17 bp, Arabidopsis thaliana
acggactgggaagggct

SEQ ID NO: 23045 - DNA, 17 bp, Arabidopsis thaliana
acggactggttagtggg

SEQ ID NO: 23046 - DNA, 17 bp, Arabidopsis thaliana
acggactggttggtggg

SEQ ID NO: 23047 - DNA, 17 bp, Arabidopsis thaliana
acggactgtctaccgat

SEQ ID NO: 23048 - DNA, 17 bp, Arabidopsis thaliana
acggactgttcagacct

SEQ ID NO: 23049 - DNA, 17 bp, Arabidopsis thaliana
acggactgttcagatct

SEQ ID NO: 23050 - DNA, 17 bp, Arabidopsis thaliana
acggacttcgccttaga

SEQ ID NO: 23051 - DNA, 17 bp, Arabidopsis thaliana
acggacttcggcccaga

SEQ ID NO: 23052 - DNA, 17 bp, Arabidopsis thaliana
acggacttctgctaagg

SEQ ID NO: 23053 - DNA, 17 bp, Arabidopsis thaliana
acggacttctgctatac

SEQ ID NO: 23054 - DNA, 17 bp, Arabidopsis thaliana
acggacttgcttctggt

SEQ ID NO: 23055 - DNA, 17 bp, Arabidopsis thaliana
acggactttgacccaga

SEQ ID NO: 23056 - DNA, 17 bp, Arabidopsis thaliana
acggactttggagatta

SEQ ID NO: 23057 - DNA, 17 bp, Arabidopsis thaliana
acggactttggctacac

SEQ ID NO: 23058 - DNA, 17 bp, Arabidopsis thaliana
acggacttttgtttcct

SEQ ID NO: 23059 - DNA, 17 bp, Arabidopsis thaliana
acggagaaccgaaagaa

SEQ ID NO: 23060 - DNA, 17 bp, Arabidopsis thaliana
acggagaaccgaaagta

SEQ ID NO: 23061 - DNA, 17 bp, Arabidopsis thaliana
acggagaactgccttcg

SEQ ID NO: 23062 - DNA, 17 bp, Arabidopsis thaliana
acggagaactgttagtt

SEQ ID NO: 23063 - DNA, 17 bp, Arabidopsis thaliana
acggagaattagggttc

SEQ ID NO: 23064 - DNA, 17 bp, Arabidopsis thaliana
acggagacccgggttcg

SEQ ID NO: 23065 - DNA, 17 bp, Arabidopsis thaliana
acggagacctgggctcg

SEQ ID NO: 23066 - DNA, 17 bp, Arabidopsis thaliana
acggagacgctcacgaa

SEQ ID NO: 23067 - DNA, 17 bp, Arabidopsis thaliana
acggagactgagacgtt

SEQ ID NO: 23068 - DNA, 17 bp, Arabidopsis thaliana
acggagagccacggcct

SEQ ID NO: 23069 - DNA, 17 bp, Arabidopsis thaliana
acggagagccattcagg

SEQ ID NO: 23070 - DNA, 17 bp, Arabidopsis thaliana
acggagaggagctatgc

SEQ ID NO: 23071 - DNA, 17 bp, Arabidopsis thaliana
acggagatacaaaaaca

SEQ ID NO: 23072 - DNA, 17 bp, Arabidopsis thaliana
acggagatcctcctgga

SEQ ID NO: 23073 - DNA, 17 bp, Arabidopsis thaliana
acggagatctctgcggc

SEQ ID NO: 23074 - DNA, 17 bp, Arabidopsis thaliana
acggagattaggatcca

SEQ ID NO: 23075 - DNA, 17 bp, Arabidopsis thaliana
acggagattatcagaac

SEQ ID NO: 23076 - DNA, 17 bp, Arabidopsis thaliana
acggagcaagccataag

SEQ ID NO: 23077 - DNA, 17 bp, Arabidopsis thaliana
acggagcaagtcattaa

SEQ ID NO: 23078 - DNA, 17 bp, Arabidopsis thaliana
acggagcaatccggtcc

SEQ ID NO: 23079 - DNA, 17 bp, Arabidopsis thaliana
acggagcgaaacagggg

SEQ ID NO: 23080 - DNA, 17 bp, Arabidopsis thaliana
acggagctttgtgcggc

SEQ ID NO: 23081 - DNA, 17 bp, Arabidopsis thaliana
acggaggacagttcata

SEQ ID NO: 23082 - DNA, 17 bp, Arabidopsis thaliana
acggaggaggcggtggt

SEQ ID NO: 23083 - DNA, 17 bp, Arabidopsis thaliana
acggaggcgtgatgaca

SEQ ID NO: 23084 - DNA, 17 bp, Arabidopsis thaliana
acggaggcgtgcaaagg

SEQ ID NO: 23085 - DNA, 17 bp, Arabidopsis thaliana
acggaggcgtgcaagga

SEQ ID NO: 23086 - DNA, 17 bp, Arabidopsis thaliana
acggagggctttgattt

SEQ ID NO: 23087 - DNA, 17 bp, Arabidopsis thaliana
acggagggtgcagaata

SEQ ID NO: 23088 - DNA, 17 bp, Arabidopsis thaliana
acggaggtattcgtcaa

SEQ ID NO: 23089 - DNA, 17 bp, Arabidopsis thaliana
acggagtctccacaggg

SEQ ID NO: 23090 - DNA, 17 bp, Arabidopsis thaliana
acggagttagtggtagg

SEQ ID NO: 23091 - DNA, 17 bp, Arabidopsis thaliana
acggagttatcattcgg

SEQ ID NO: 23092 - DNA, 17 bp, Arabidopsis thaliana
acggagttatcgattgc

SEQ ID NO: 23093 - DNA, 17 bp, Arabidopsis thaliana
acggagttgtgcttgta

SEQ ID NO: 23094 - DNA, 17 bp, Arabidopsis thaliana
acggataaccggaacaa

SEQ ID NO: 23095 - DNA, 17 bp, Arabidopsis thaliana
acggataatggttggcc

SEQ ID NO: 23096 - DNA, 17 bp, Arabidopsis thaliana
acggatacgaaatcgtc

SEQ ID NO: 23097 - DNA, 17 bp, Arabidopsis thaliana
acggatacttctggtgg

SEQ ID NO: 23098 - DNA, 17 bp, Arabidopsis thaliana
acggatagtctcggaac

SEQ ID NO: 23099 - DNA, 17 bp, Arabidopsis thaliana
acggatagtgtagtgac

SEQ ID NO: 23100 - DNA, 17 bp, Arabidopsis thaliana
acggatatccgctttga

SEQ ID NO: 23101 - DNA, 17 bp, Arabidopsis thaliana
acggatatctcggctct

SEQ ID NO: 23102 - DNA, 17 bp, Arabidopsis thaliana
acggatatgtccgtggt

SEQ ID NO: 23103 - DNA, 17 bp, Arabidopsis thaliana
acggatcacggtttggc

SEQ ID NO: 23104 - DNA, 17 bp, Arabidopsis thaliana
acggatcactctcagct

SEQ ID NO: 23105 - DNA, 17 bp, Arabidopsis thaliana
acggatcatatctcacc

SEQ ID NO: 23106 - DNA, 17 bp, Arabidopsis thaliana
acggatccattttgccg

SEQ ID NO: 23107 - DNA, 17 bp, Arabidopsis thaliana
acggatcgcatggcctc

SEQ ID NO: 23108 - DNA, 17 bp, Arabidopsis thaliana
acggatcgttgtgcgga

SEQ ID NO: 23109 - DNA, 17 bp, Arabidopsis thaliana
acggatctacgtttttg

SEQ ID NO: 23110 - DNA, 17 bp, Arabidopsis thaliana
acggatctactcctcag

SEQ ID NO: 23111 - DNA, 17 bp, Arabidopsis thaliana
acggatctgaggcagga

SEQ ID NO: 23112 - DNA, 17 bp, Arabidopsis thaliana
acggatctgtagaactc

SEQ ID NO: 23113 - DNA, 17 bp, Arabidopsis thaliana
acggatgagatctaatc

SEQ ID NO: 23114 - DNA, 17 bp, Arabidopsis thaliana
acggatgagttatgtgt

SEQ ID NO: 23115 - DNA, 17 bp, Arabidopsis thaliana
acggatgattgtcagta

SEQ ID NO: 23116 - DNA, 17 bp, Arabidopsis thaliana
acggatgattgtcagtg

SEQ ID NO: 23117 - DNA, 17 bp, Arabidopsis thaliana
acggatgcaagcttcat

SEQ ID NO: 23118 - DNA, 17 bp, Arabidopsis thaliana
acggatgcactcgcggc

SEQ ID NO: 23119 - DNA, 17 bp, Arabidopsis thaliana
acggatggtaaaaaatg

SEQ ID NO: 23120 - DNA, 17 bp, Arabidopsis thaliana
acggatggttgtgaaag

SEQ ID NO: 23121 - DNA, 17 bp, Arabidopsis thaliana
acggatgtagcgcagct

SEQ ID NO: 23122 - DNA, 17 bp, Arabidopsis thaliana
acggatgtcacttccat

SEQ ID NO: 23123 - DNA, 17 bp, Arabidopsis thaliana
acggatgtctctggtcc

SEQ ID NO: 23124 - DNA, 17 bp, Arabidopsis thaliana
acggatgtgttgattcg

SEQ ID NO: 23125 - DNA, 17 bp, Arabidopsis thaliana
acggatgtgtttcgttt

SEQ ID NO: 23126 - DNA, 17 bp, Arabidopsis thaliana
acggatgttatcggatc

SEQ ID NO: 23127 - DNA, 17 bp, Arabidopsis thaliana
acggatgttctataacg

SEQ ID NO: 23128 - DNA, 17 bp, Arabidopsis thaliana
acggatgttctgtaacg

SEQ ID NO: 23129 - DNA, 17 bp, Arabidopsis thaliana
acggattaagacagcag

SEQ ID NO: 23130 - DNA, 17 bp, Arabidopsis thaliana
acggattagaccgctga

SEQ ID NO: 23131 - DNA, 17 bp, Arabidopsis thaliana
acggattagtccgcact

SEQ ID NO: 23132 - DNA, 17 bp, Arabidopsis thaliana
acggattatacggtgga

SEQ ID NO: 23133 - DNA, 17 bp, Arabidopsis thaliana
acggattatggttcgtt

SEQ ID NO: 23134 - DNA, 17 bp, Arabidopsis thaliana
acggattcagatcaatt

SEQ ID NO: 23135 - DNA, 17 bp, Arabidopsis thaliana
acggattccacttttta

SEQ ID NO: 23136 - DNA, 17 bp, Arabidopsis thaliana
acggattccgtggaaac

SEQ ID NO: 23137 - DNA, 17 bp, Arabidopsis thaliana
acggattcctatagctg

SEQ ID NO: 23138 - DNA, 17 bp, Arabidopsis thaliana
acggattcgacttcccc

SEQ ID NO: 23139 - DNA, 17 bp, Arabidopsis thaliana
acggattgaccctgtat

SEQ ID NO: 23140 - DNA, 17 bp, Arabidopsis thaliana
acggattgatgtatgca

SEQ ID NO: 23141 - DNA, 17 bp, Arabidopsis thaliana
acggattgcggccagaa

SEQ ID NO: 23142 - DNA, 17 bp, Arabidopsis thaliana
acggattggcgagacgg

SEQ ID NO: 23143 - DNA, 17 bp, Arabidopsis thaliana
acggattggcgggacgg

SEQ ID NO: 23144 - DNA, 17 bp, Arabidopsis thaliana
acggattggcgggaggg

SEQ ID NO: 23145 - DNA, 17 bp, Arabidopsis thaliana
acggattggcgggatga

SEQ ID NO: 23146 - DNA, 17 bp, Arabidopsis thaliana
acggattggcgggatgg

SEQ ID NO: 23147 - DNA, 17 bp, Arabidopsis thaliana
acggattgtggccagaa

SEQ ID NO: 23148 - DNA, 17 bp, Arabidopsis thaliana
acggattgtttctactg

SEQ ID NO: 23149 - DNA, 17 bp, Arabidopsis thaliana
acggatttacgtttggc

SEQ ID NO: 23150 - DNA, 17 bp, Arabidopsis thaliana
acggatttacgttttca

SEQ ID NO: 23151 - DNA, 17 bp, Arabidopsis thaliana
acggatttacgttttcg

SEQ ID NO: 23152 - DNA, 17 bp, Arabidopsis thaliana
acggatttacgtttttg

SEQ ID NO: 23153 - DNA, 17 bp, Arabidopsis thaliana
acggatttatgtggcgg

SEQ ID NO: 23154 - DNA, 17 bp, Arabidopsis thaliana
acggatttcgtcgaact

SEQ ID NO: 23155 - DNA, 17 bp, Arabidopsis thaliana
acggatttctgacggcc

SEQ ID NO: 23156 - DNA, 17 bp, Arabidopsis thaliana
acggatttctgactatc

SEQ ID NO: 23157 - DNA, 17 bp, Arabidopsis thaliana
acggatttggagtgacg

SEQ ID NO: 23158 - DNA, 17 bp, Arabidopsis thaliana
acggatttggatctgga

SEQ ID NO: 23159 - DNA, 17 bp, Arabidopsis thaliana
acggatttggcaggacg

SEQ ID NO: 23160 - DNA, 17 bp, Arabidopsis thaliana
acggatttggcgggatg

SEQ ID NO: 23161 - DNA, 17 bp, Arabidopsis thaliana
acggatttgtctcgggt

SEQ ID NO: 23162 - DNA, 17 bp, Arabidopsis thaliana
acggatttgtgagggcc

SEQ ID NO: 23163 - DNA, 17 bp, Arabidopsis thaliana
acggattttggcccaaa

SEQ ID NO: 23164 - DNA, 17 bp, Arabidopsis thaliana
acggattttttaaaagg

SEQ ID NO: 23165 - DNA, 17 bp, Arabidopsis thaliana
acggcaaaattgtgcgt

SEQ ID NO: 23166 - DNA, 17 bp, Arabidopsis thaliana
acggcaaacttttgtct

SEQ ID NO: 23167 - DNA, 17 bp, Arabidopsis thaliana
acggcaacaacggagta

SEQ ID NO: 23168 - DNA, 17 bp, Arabidopsis thaliana
acggcaacgttagggag

SEQ ID NO: 23169 - DNA, 17 bp, Arabidopsis thaliana
acggcaactgaatcact

SEQ ID NO: 23170 - DNA, 17 bp, Arabidopsis thaliana
acggcaagataccttgt

SEQ ID NO: 23171 - DNA, 17 bp, Arabidopsis thaliana
acggcaagcgtaggttt

SEQ ID NO: 23172 - DNA, 17 bp, Arabidopsis thaliana
acggcaagtttcttgag

SEQ ID NO: 23173 - DNA, 17 bp, Arabidopsis thaliana
acggcaatacgattgta

SEQ ID NO: 23174 - DNA, 17 bp, Arabidopsis thaliana
acggcacagattgcgcc

SEQ ID NO: 23175 - DNA, 17 bp, Arabidopsis thaliana
acggcaccaccatcatc

SEQ ID NO: 23176 - DNA, 17 bp, Arabidopsis thaliana
acggcacgtctgcctgg

SEQ ID NO: 23177 - DNA, 17 bp, Arabidopsis thaliana
acggcacgtctgctggg

SEQ ID NO: 23178 - DNA, 17 bp, Arabidopsis thaliana
acggcacgtctgcttgg

SEQ ID NO: 23179 - DNA, 17 bp, Arabidopsis thaliana
acggcacgtttgcctgg

SEQ ID NO: 23180 - DNA, 17 bp, Arabidopsis thaliana
acggcacgttttgccga

SEQ ID NO: 23181 - DNA, 17 bp, Arabidopsis thaliana
acggcactatcgcgggg

SEQ ID NO: 23182 - DNA, 17 bp, Arabidopsis thaliana
acggcacttgcacatgg

SEQ ID NO: 23183 - DNA, 17 bp, Arabidopsis thaliana
acggcagattgccctat

SEQ ID NO: 23184 - DNA, 17 bp, Arabidopsis thaliana
acggcagcgacgtctcc

SEQ ID NO: 23185 - DNA, 17 bp, Arabidopsis thaliana
acggcagctgctctgag

SEQ ID NO: 23186 - DNA, 17 bp, Arabidopsis thaliana
acggcagcttgttgatg

SEQ ID NO: 23187 - DNA, 17 bp, Arabidopsis thaliana
acggcatacgaatcaaa

SEQ ID NO: 23188 - DNA, 17 bp, Arabidopsis thaliana
acggcatacgcaactaa

SEQ ID NO: 23189 - DNA, 17 bp, Arabidopsis thaliana
acggcatatgttgacgg

SEQ ID NO: 23190 - DNA, 17 bp, Arabidopsis thaliana
acggcatgcccgaaata

SEQ ID NO: 23191 - DNA, 17 bp, Arabidopsis thaliana
acggcatgcctattttg

SEQ ID NO: 23192 - DNA, 17 bp, Arabidopsis thaliana
acggcatgctgcccaaa

SEQ ID NO: 23193 - DNA, 17 bp, Arabidopsis thaliana
acggcatgcttaatccg

SEQ ID NO: 23194 - DNA, 17 bp, Arabidopsis thaliana
acggcatgcttctttgt

SEQ ID NO: 23195 - DNA, 17 bp, Arabidopsis thaliana
acggcatggagactttg

SEQ ID NO: 23196 - DNA, 17 bp, Arabidopsis thaliana
acggcatggggactttg

SEQ ID NO: 23197 - DNA, 17 bp, Arabidopsis thaliana
acggcatgtccgaaatg

SEQ ID NO: 23198 - DNA, 17 bp, Arabidopsis thaliana
acggcatgtccgaatga

SEQ ID NO: 23199 - DNA, 17 bp, Arabidopsis thaliana
acggcatgtccgaatgg

SEQ ID NO: 23200 - DNA, 17 bp, Arabidopsis thaliana
acggcatgtccgaattg

SEQ ID NO: 23201 - DNA, 17 bp, Arabidopsis thaliana
acggcatgtctattctg

SEQ ID NO: 23202 - DNA, 17 bp, Arabidopsis thaliana
acggcatgtctattttg

SEQ ID NO: 23203 - DNA, 17 bp, Arabidopsis thaliana
acggcatgtcttaaacg

SEQ ID NO: 23204 - DNA, 17 bp, Arabidopsis thaliana
acggcatgtttattttg

SEQ ID NO: 23205 - DNA, 17 bp, Arabidopsis thaliana
acggcattatgacctcg

SEQ ID NO: 23206 - DNA, 17 bp, Arabidopsis thaliana
acggcattttcaggttc

SEQ ID NO: 23207 - DNA, 17 bp, Arabidopsis thaliana
acggccaaagcgcctaa

SEQ ID NO: 23208 - DNA, 17 bp, Arabidopsis thaliana
acggccaacaagtgtga

SEQ ID NO: 23209 - DNA, 17 bp, Arabidopsis thaliana
acggccaaggatgactt

SEQ ID NO: 23210 - DNA, 17 bp, Arabidopsis thaliana
acggccaagtctgtaat

SEQ ID NO: 23211 - DNA, 17 bp, Arabidopsis thaliana
acggccacctacgaagt

SEQ ID NO: 23212 - DNA, 17 bp, Arabidopsis thaliana
acggccatacacgttaa

SEQ ID NO: 23213 - DNA, 17 bp, Arabidopsis thaliana
acggccatgcggatgtt

SEQ ID NO: 23214 - DNA, 17 bp, Arabidopsis thaliana
acggccatttcaagaat

SEQ ID NO: 23215 - DNA, 17 bp, Arabidopsis thaliana
acggccatttcacgagt

SEQ ID NO: 23216 - DNA, 17 bp, Arabidopsis thaliana
acggcccatcgaccagt

SEQ ID NO: 23217 - DNA, 17 bp, Arabidopsis thaliana
acggcccatgtactcta

SEQ ID NO: 23218 - DNA, 17 bp, Arabidopsis thaliana
acggccccgtctaacaa

SEQ ID NO: 23219 - DNA, 17 bp, Arabidopsis thaliana
acggccctatcactttt

SEQ ID NO: 23220 - DNA, 17 bp, Arabidopsis thaliana
acggccgagggcacgtc

SEQ ID NO: 23221 - DNA, 17 bp, Arabidopsis thaliana
acggccgatcggttcgt

SEQ ID NO: 23222 - DNA, 17 bp, Arabidopsis thaliana
acggccgcaaaattagg

SEQ ID NO: 23223 - DNA, 17 bp, Arabidopsis thaliana
acggccgcatacaaagt

SEQ ID NO: 23224 - DNA, 17 bp, Arabidopsis thaliana
acggccgcatacgaagt

SEQ ID NO: 23225 - DNA, 17 bp, Arabidopsis thaliana
acggccgctgcgagtga

SEQ ID NO: 23226 - DNA, 17 bp, Arabidopsis thaliana
acggccggcttcttaga

SEQ ID NO: 23227 - DNA, 17 bp, Arabidopsis thaliana
acggccggtcagtcgtt

SEQ ID NO: 23228 - DNA, 17 bp, Arabidopsis thaliana
acggccgtaacgttcag

SEQ ID NO: 23229 - DNA, 17 bp, Arabidopsis thaliana
acggccgtgtgatttgt

SEQ ID NO: 23230 - DNA, 17 bp, Arabidopsis thaliana
acggccgttgcggtgca

SEQ ID NO: 23231 - DNA, 17 bp, Arabidopsis thaliana
acggcctcatacgaagt

SEQ ID NO: 23232 - DNA, 17 bp, Arabidopsis thaliana
acggcctcttgtatgcg

SEQ ID NO: 23233 - DNA, 17 bp, Arabidopsis thaliana
acggcctgccgcttctt

SEQ ID NO: 23234 - DNA, 17 bp, Arabidopsis thaliana
acggcctggacctccat

SEQ ID NO: 23235 - DNA, 17 bp, Arabidopsis thaliana
acggccttgaatgtttt

SEQ ID NO: 23236 - DNA, 17 bp, Arabidopsis thaliana
acggcctttgtggtaac

SEQ ID NO: 23237 - DNA, 17 bp, Arabidopsis thaliana
acggccttttttcagca

SEQ ID NO: 23238 - DNA, 17 bp, Arabidopsis thaliana
acggcgaaagcactctg

SEQ ID NO: 23239 - DNA, 17 bp, Arabidopsis thaliana
acggcgaagatgggttt

SEQ ID NO: 23240 - DNA, 17 bp, Arabidopsis thaliana
acggcgaatggttcatc

SEQ ID NO: 23241 - DNA, 17 bp, Arabidopsis thaliana
acggcgacctatacccg

SEQ ID NO: 23242 - DNA, 17 bp, Arabidopsis thaliana
acggcgacggtggttgt

SEQ ID NO: 23243 - DNA, 17 bp, Arabidopsis thaliana
acggcgagcgaaccggg

SEQ ID NO: 23244 - DNA, 17 bp, Arabidopsis thaliana
acggcgagcgtgtcatc

SEQ ID NO: 23245 - DNA, 17 bp, Arabidopsis thaliana
acggcgatacgctcctg

SEQ ID NO: 23246 - DNA, 17 bp, Arabidopsis thaliana
acggcgatcaaacaaac

SEQ ID NO: 23247 - DNA, 17 bp, Arabidopsis thaliana
acggcgatctccgaccg

SEQ ID NO: 23248 - DNA, 17 bp, Arabidopsis thaliana
acggcgatctgagaagg

SEQ ID NO: 23249 - DNA, 17 bp, Arabidopsis thaliana
acggcgattcacatagc

SEQ ID NO: 23250 - DNA, 17 bp, Arabidopsis thaliana
acggcgatttggcggtg

SEQ ID NO: 23251 - DNA, 17 bp, Arabidopsis thaliana
acggcggagaatccctg

SEQ ID NO: 23252 - DNA, 17 bp, Arabidopsis thaliana
acggcggcagtaactat

SEQ ID NO: 23253 - DNA, 17 bp, Arabidopsis thaliana
acggcggcgattcttta

SEQ ID NO: 23254 - DNA, 17 bp, Arabidopsis thaliana
acggcggcggtaacggc

SEQ ID NO: 23255 - DNA, 17 bp, Arabidopsis thaliana
acggcggctcagatcgt

SEQ ID NO: 23256 - DNA, 17 bp, Arabidopsis thaliana
acggcgggagtaactat

SEQ ID NO: 23257 - DNA, 17 bp, Arabidopsis thaliana
acggcgggagtatttat

SEQ ID NO: 23258 - DNA, 17 bp, Arabidopsis thaliana
acggcgggttaaacttg

SEQ ID NO: 23259 - DNA, 17 bp, Arabidopsis thaliana
acggcggtctgacaggt

SEQ ID NO: 23260 - DNA, 17 bp, Arabidopsis thaliana
acggcggtgaattcgtt

SEQ ID NO: 23261 - DNA, 17 bp, Arabidopsis thaliana
acggcggtggttgccgg

SEQ ID NO: 23262 - DNA, 17 bp, Arabidopsis thaliana
acggcggttatcagatc

SEQ ID NO: 23263 - DNA, 17 bp, Arabidopsis thaliana
acggcggttcgggtgca

SEQ ID NO: 23264 - DNA, 17 bp, Arabidopsis thaliana
acggcggttgttgcggc

SEQ ID NO: 23265 - DNA, 17 bp, Arabidopsis thaliana
acggcgtaagaattgta

SEQ ID NO: 23266 - DNA, 17 bp, Arabidopsis thaliana
acggcgtacaaactttt

SEQ ID NO: 23267 - DNA, 17 bp, Arabidopsis thaliana
acggcgtagcgcgggtg

SEQ ID NO: 23268 - DNA, 17 bp, Arabidopsis thaliana
acggcgtccatattgaa

SEQ ID NO: 23269 - DNA, 17 bp, Arabidopsis thaliana
acggcgtgacagctctt

SEQ ID NO: 23270 - DNA, 17 bp, Arabidopsis thaliana
acggcgtgacggctctt

SEQ ID NO: 23271 - DNA, 17 bp, Arabidopsis thaliana
acggcgtgcccgaaatg

SEQ ID NO: 23272 - DNA, 17 bp, Arabidopsis thaliana
acggcgtgctttcactt

SEQ ID NO: 23273 - DNA, 17 bp, Arabidopsis thaliana
acggcgtggtaactggt

SEQ ID NO: 23274 - DNA, 17 bp, Arabidopsis thaliana
acggcgtgtcgatctct

SEQ ID NO: 23275 - DNA, 17 bp, Arabidopsis thaliana
acggcgttaaccggatt

SEQ ID NO: 23276 - DNA, 17 bp, Arabidopsis thaliana
acggcgttagattgtag

SEQ ID NO: 23277 - DNA, 17 bp, Arabidopsis thaliana
acggctaaactttcaga

SEQ ID NO: 23278 - DNA, 17 bp, Arabidopsis thaliana
acggctaagagaatacg

SEQ ID NO: 23279 - DNA, 17 bp, Arabidopsis thaliana
acggctaagttactaca

SEQ ID NO: 23280 - DNA, 17 bp, Arabidopsis thaliana
acggctaatgcatttct

SEQ ID NO: 23281 - DNA, 17 bp, Arabidopsis thaliana
acggctaatgcgcagta

SEQ ID NO: 23282 - DNA, 17 bp, Arabidopsis thaliana
acggctaatgcgcagtc

SEQ ID NO: 23283 - DNA, 17 bp, Arabidopsis thaliana
acggctacagtttcccg

SEQ ID NO: 23284 - DNA, 17 bp, Arabidopsis thaliana
acggctaccacatccaa

SEQ ID NO: 23285 - DNA, 17 bp, Arabidopsis thaliana
acggctaccacattcgg

SEQ ID NO: 23286 - DNA, 17 bp, Arabidopsis thaliana
acggctaccaccaagga

SEQ ID NO: 23287 - DNA, 17 bp, Arabidopsis thaliana
acggctacgatagcata

SEQ ID NO: 23288 - DNA, 17 bp, Arabidopsis thaliana
acggctactgtcttcat

SEQ ID NO: 23289 - DNA, 17 bp, Arabidopsis thaliana
acggctactgtgcacaa

SEQ ID NO: 23290 - DNA, 17 bp, Arabidopsis thaliana
acggctactgtgctcaa

SEQ ID NO: 23291 - DNA, 17 bp, Arabidopsis thaliana
acggctactgtgctcac

SEQ ID NO: 23292 - DNA, 17 bp, Arabidopsis thaliana
acggctaggagcccgaa

SEQ ID NO: 23293 - DNA, 17 bp, Arabidopsis thaliana
acggctataattgtaca

SEQ ID NO: 23294 - DNA, 17 bp, Arabidopsis thaliana
acggctatggtgaaatt

SEQ ID NO: 23295 - DNA, 17 bp, Arabidopsis thaliana
acggctattgttctctg

SEQ ID NO: 23296 - DNA, 17 bp, Arabidopsis thaliana
acggctatttcaagagt

SEQ ID NO: 23297 - DNA, 17 bp, Arabidopsis thaliana
acggctatttcacgagt

SEQ ID NO: 23298 - DNA, 17 bp, Arabidopsis thaliana
acggctatttgaactaa

SEQ ID NO: 23299 - DNA, 17 bp, Arabidopsis thaliana
acggctatttgaccggg

SEQ ID NO: 23300 - DNA, 17 bp, Arabidopsis thaliana
acggctcacctattggc

SEQ ID NO: 23301 - DNA, 17 bp, Arabidopsis thaliana
acggctcagaaacggtc

SEQ ID NO: 23302 - DNA, 17 bp, Arabidopsis thaliana
acggctcagccgcaggc

SEQ ID NO: 23303 - DNA, 17 bp, Arabidopsis thaliana
acggctcagccgcaggt

SEQ ID NO: 23304 - DNA, 17 bp, Arabidopsis thaliana
acggctcagccggaggg

SEQ ID NO: 23305 - DNA, 17 bp, Arabidopsis thaliana
acggctcagccggaggt

SEQ ID NO: 23306 - DNA, 17 bp, Arabidopsis thaliana
acggctccaagctgctc

SEQ ID NO: 23307 - DNA, 17 bp, Arabidopsis thaliana
acggctccttgattgca

SEQ ID NO: 23308 - DNA, 17 bp, Arabidopsis thaliana
acggctccttgattgct

SEQ ID NO: 23309 - DNA, 17 bp, Arabidopsis thaliana
acggctcgagaaacctg

SEQ ID NO: 23310 - DNA, 17 bp, Arabidopsis thaliana
acggctcgtccttgctc

SEQ ID NO: 23311 - DNA, 17 bp, Arabidopsis thaliana
acggctctaccgtgtcg

SEQ ID NO: 23312 - DNA, 17 bp, Arabidopsis thaliana
acggctctctcgggagc

SEQ ID NO: 23313 - DNA, 17 bp, Arabidopsis thaliana
acggctctctgacggag

SEQ ID NO: 23314 - DNA, 17 bp, Arabidopsis thaliana
acggctctgagtgaagg

SEQ ID NO: 23315 - DNA, 17 bp, Arabidopsis thaliana
acggctctgccaaaaag

SEQ ID NO: 23316 - DNA, 17 bp, Arabidopsis thaliana
acggctctgggagcccg

SEQ ID NO: 23317 - DNA, 17 bp, Arabidopsis thaliana
acggctctgggtgaagg

SEQ ID NO: 23318 - DNA, 17 bp, Arabidopsis thaliana
acggctctggttatcac

SEQ ID NO: 23319 - DNA, 17 bp, Arabidopsis thaliana
acggctctgtgacggag

SEQ ID NO: 23320 - DNA, 17 bp, Arabidopsis thaliana
acggctctttccatagc

SEQ ID NO: 23321 - DNA, 17 bp, Arabidopsis thaliana
acggctgagttaatgtt

SEQ ID NO: 23322 - DNA, 17 bp, Arabidopsis thaliana
acggctgagttacggta

SEQ ID NO: 23323 - DNA, 17 bp, Arabidopsis thaliana
acggctgagttactgtt

SEQ ID NO: 23324 - DNA, 17 bp, Arabidopsis thaliana
acggctgagttattgat

SEQ ID NO: 23325 - DNA, 17 bp, Arabidopsis thaliana
acggctgagttctatgt

SEQ ID NO: 23326 - DNA, 17 bp, Arabidopsis thaliana
acggctgagttgtaaaa

SEQ ID NO: 23327 - DNA, 17 bp, Arabidopsis thaliana
acggctgctaatacccc

SEQ ID NO: 23328 - DNA, 17 bp, Arabidopsis thaliana
acggctgctactgcggc

SEQ ID NO: 23329 - DNA, 17 bp, Arabidopsis thaliana
acggctgctcaagcgac

SEQ ID NO: 23330 - DNA, 17 bp, Arabidopsis thaliana
acggctgctgcgttatt

SEQ ID NO: 23331 - DNA, 17 bp, Arabidopsis thaliana
acggctgctgctacaaa

SEQ ID NO: 23332 - DNA, 17 bp, Arabidopsis thaliana
acggctggctcggattc

SEQ ID NO: 23333 - DNA, 17 bp, Arabidopsis thaliana
acggctgggaatcagac

SEQ ID NO: 23334 - DNA, 17 bp, Arabidopsis thaliana
acggctgggctggagtt

SEQ ID NO: 23335 - DNA, 17 bp, Arabidopsis thaliana
acggctggttccggaag

SEQ ID NO: 23336 - DNA, 17 bp, Arabidopsis thaliana
acggctgtagattctcg

SEQ ID NO: 23337 - DNA, 17 bp, Arabidopsis thaliana
acggctgtggtgaagac

SEQ ID NO: 23338 - DNA, 17 bp, Arabidopsis thaliana
acggcttaccctttgca

SEQ ID NO: 23339 - DNA, 17 bp, Arabidopsis thaliana
acggcttacggacccgt

SEQ ID NO: 23340 - DNA, 17 bp, Arabidopsis thaliana
acggcttactgccctgc

SEQ ID NO: 23341 - DNA, 17 bp, Arabidopsis thaliana
acggcttagaccctgtt

SEQ ID NO: 23342 - DNA, 17 bp, Arabidopsis thaliana
acggcttagttatggga

SEQ ID NO: 23343 - DNA, 17 bp, Arabidopsis thaliana
acggcttatctcaggtg

SEQ ID NO: 23344 - DNA, 17 bp, Arabidopsis thaliana
acggcttgccgctttgg

SEQ ID NO: 23345 - DNA, 17 bp, Arabidopsis thaliana
acggcttgctttgtcat

SEQ ID NO: 23346 - DNA, 17 bp, Arabidopsis thaliana
acggcttggctcggggt

SEQ ID NO: 23347 - DNA, 17 bp, Arabidopsis thaliana
acggcttgtgccatggg

SEQ ID NO: 23348 - DNA, 17 bp, Arabidopsis thaliana
acggcttgtggcacaag

SEQ ID NO: 23349 - DNA, 17 bp, Arabidopsis thaliana
acggctttggccgagtg

SEQ ID NO: 23350 - DNA, 17 bp, Arabidopsis thaliana
acggctttggttcagaa

SEQ ID NO: 23351 - DNA, 17 bp, Arabidopsis thaliana
acggctttttttcagca

SEQ ID NO: 23352 - DNA, 17 bp, Arabidopsis thaliana
acgggaaaacggctttt

SEQ ID NO: 23353 - DNA, 17 bp, Arabidopsis thaliana
acgggaaaatgtgattt

SEQ ID NO: 23354 - DNA, 17 bp, Arabidopsis thaliana
acgggaactgcgtgtga

SEQ ID NO: 23355 - DNA, 17 bp, Arabidopsis thaliana
acgggaagtcctcgtgt

SEQ ID NO: 23356 - DNA, 17 bp, Arabidopsis thaliana
acgggaagtggtgtttc

SEQ ID NO: 23357 - DNA, 17 bp, Arabidopsis thaliana
acgggaagtggttgatg

SEQ ID NO: 23358 - DNA, 17 bp, Arabidopsis thaliana
acgggacaaaaattata

SEQ ID NO: 23359 - DNA, 17 bp, Arabidopsis thaliana
acgggacagacttagcg

SEQ ID NO: 23360 - DNA, 17 bp, Arabidopsis thaliana
acgggacagattggcgg

SEQ ID NO: 23361 - DNA, 17 bp, Arabidopsis thaliana
acgggacaggattggtg

SEQ ID NO: 23362 - DNA, 17 bp, Arabidopsis thaliana
acgggacaggttggcgg

SEQ ID NO: 23363 - DNA, 17 bp, Arabidopsis thaliana
acgggacaggtttgacg

SEQ ID NO: 23364 - DNA, 17 bp, Arabidopsis thaliana
acgggacagttttggcg

SEQ ID NO: 23365 - DNA, 17 bp, Arabidopsis thaliana
acgggacatgtttggcg

SEQ ID NO: 23366 - DNA, 17 bp, Arabidopsis thaliana
acgggacgaattggcgg

SEQ ID NO: 23367 - DNA, 17 bp, Arabidopsis thaliana
acgggacgagttagcgg

SEQ ID NO: 23368 - DNA, 17 bp, Arabidopsis thaliana
acgggacgagttgacgg

SEQ ID NO: 23369 - DNA, 17 bp, Arabidopsis thaliana
acgggacgagttggcgg

SEQ ID NO: 23370 - DNA, 17 bp, Arabidopsis thaliana
acgggacgagtttggcg

SEQ ID NO: 23371 - DNA, 17 bp, Arabidopsis thaliana
acgggacgataatctac

SEQ ID NO: 23372 - DNA, 17 bp, Arabidopsis thaliana
acgggacggatggaggg

SEQ ID NO: 23373 - DNA, 17 bp, Arabidopsis thaliana
acgggacggattagcgg

SEQ ID NO: 23374 - DNA, 17 bp, Arabidopsis thaliana
acgggacggattgacgg

SEQ ID NO: 23375 - DNA, 17 bp, Arabidopsis thaliana
acgggacggattggcgg

SEQ ID NO: 23376 - DNA, 17 bp, Arabidopsis thaliana
acgggacggattggtgg

SEQ ID NO: 23377 - DNA, 17 bp, Arabidopsis thaliana
acgggacggattgtcgg

SEQ ID NO: 23378 - DNA, 17 bp, Arabidopsis thaliana
acgggacggatttggca

SEQ ID NO: 23379 - DNA, 17 bp, Arabidopsis thaliana
acgggacggatttggcg

SEQ ID NO: 23380 - DNA, 17 bp, Arabidopsis thaliana
acgggacgggggcggga

SEQ ID NO: 23381 - DNA, 17 bp, Arabidopsis thaliana
acgggacgggtaggcgg

SEQ ID NO: 23382 - DNA, 17 bp, Arabidopsis thaliana
acgggacgggttagcgg

SEQ ID NO: 23383 - DNA, 17 bp, Arabidopsis thaliana
acgggacgggttgacga

SEQ ID NO: 23384 - DNA, 17 bp, Arabidopsis thaliana
acgggacgggttgacgg

SEQ ID NO: 23385 - DNA, 17 bp, Arabidopsis thaliana
acgggacgggttggcag

SEQ ID NO: 23386 - DNA, 17 bp, Arabidopsis thaliana
acgggacgggttggcgg

SEQ ID NO: 23387 - DNA, 17 bp, Arabidopsis thaliana
acgggacgggttggtga

SEQ ID NO: 23388 - DNA, 17 bp, Arabidopsis thaliana
acgggacgggttgtcgg

SEQ ID NO: 23389 - DNA, 17 bp, Arabidopsis thaliana
acgggacgggtttggca

SEQ ID NO: 23390 - DNA, 17 bp, Arabidopsis thaliana
acgggacgggtttggcg

SEQ ID NO: 23391 - DNA, 17 bp, Arabidopsis thaliana
acgggacgtgttggcgg

SEQ ID NO: 23392 - DNA, 17 bp, Arabidopsis thaliana
acgggactgagtacttg

SEQ ID NO: 23393 - DNA, 17 bp, Arabidopsis thaliana
acgggactggttggcgg

SEQ ID NO: 23394 - DNA, 17 bp, Arabidopsis thaliana
acgggagaagtgcggtg

SEQ ID NO: 23395 - DNA, 17 bp, Arabidopsis thaliana
acgggagaccagcttcc

SEQ ID NO: 23396 - DNA, 17 bp, Arabidopsis thaliana
acgggagatggattagg

SEQ ID NO: 23397 - DNA, 17 bp, Arabidopsis thaliana
acgggaggactgtattg

SEQ ID NO: 23398 - DNA, 17 bp, Arabidopsis thaliana
acgggaggattcggcag

SEQ ID NO: 23399 - DNA, 17 bp, Arabidopsis thaliana
acgggaggccatgcagg

SEQ ID NO: 23400 - DNA, 17 bp, Arabidopsis thaliana
acgggagggctgtattg

SEQ ID NO: 23401 - DNA, 17 bp, Arabidopsis thaliana
acgggagggttgtattg

SEQ ID NO: 23402 - DNA, 17 bp, Arabidopsis thaliana
acgggaggtcagtggct

SEQ ID NO: 23403 - DNA, 17 bp, Arabidopsis thaliana
acgggagtaaattggtc

SEQ ID NO: 23404 - DNA, 17 bp, Arabidopsis thaliana
acgggagtgaattgatc

SEQ ID NO: 23405 - DNA, 17 bp, Arabidopsis thaliana
acgggagtttgcggaaa

SEQ ID NO: 23406 - DNA, 17 bp, Arabidopsis thaliana
acgggataaggcgtctt

SEQ ID NO: 23407 - DNA, 17 bp, Arabidopsis thaliana
acgggatacctaggcgc

SEQ ID NO: 23408 - DNA, 17 bp, Arabidopsis thaliana
acgggatatttgacttc

SEQ ID NO: 23409 - DNA, 17 bp, Arabidopsis thaliana
acgggatcagaccgtgt

SEQ ID NO: 23410 - DNA, 17 bp, Arabidopsis thaliana
acgggatcataatgccg

SEQ ID NO: 23411 - DNA, 17 bp, Arabidopsis thaliana
acgggatccaaagtctg

SEQ ID NO: 23412 - DNA, 17 bp, Arabidopsis thaliana
acgggatcgataccccc

SEQ ID NO: 23413 - DNA, 17 bp, Arabidopsis thaliana
acgggatgatattctac

SEQ ID NO: 23414 - DNA, 17 bp, Arabidopsis thaliana
acgggatgcctaggcgc

SEQ ID NO: 23415 - DNA, 17 bp, Arabidopsis thaliana
acgggatgggtcggccg

SEQ ID NO: 23416 - DNA, 17 bp, Arabidopsis thaliana
acgggatgggttgacgg

SEQ ID NO: 23417 - DNA, 17 bp, Arabidopsis thaliana
acgggatgggtttggcg

SEQ ID NO: 23418 - DNA, 17 bp, Arabidopsis thaliana
acgggatggtgacaatg

SEQ ID NO: 23419 - DNA, 17 bp, Arabidopsis thaliana
acgggatgtcgtttcca

SEQ ID NO: 23420 - DNA, 17 bp, Arabidopsis thaliana
acgggatgttacatcga

SEQ ID NO: 23421 - DNA, 17 bp, Arabidopsis thaliana
acgggatgttctgtaac

SEQ ID NO: 23422 - DNA, 17 bp, Arabidopsis thaliana
acgggatgttgtgtccg

SEQ ID NO: 23423 - DNA, 17 bp, Arabidopsis thaliana
acgggattcagcccaga

SEQ ID NO: 23424 - DNA, 17 bp, Arabidopsis thaliana
acgggattcgcttatcc

SEQ ID NO: 23425 - DNA, 17 bp, Arabidopsis thaliana
acgggattcggcccaga

SEQ ID NO: 23426 - DNA, 17 bp, Arabidopsis thaliana
acgggattcggttttcc

SEQ ID NO: 23427 - DNA, 17 bp, Arabidopsis thaliana
acgggattctgcaatta

SEQ ID NO: 23428 - DNA, 17 bp, Arabidopsis thaliana
acgggattctgcaattc

SEQ ID NO: 23429 - DNA, 17 bp, Arabidopsis thaliana
acgggattgaaggtcgc

SEQ ID NO: 23430 - DNA, 17 bp, Arabidopsis thaliana
acgggattggtccaata

SEQ ID NO: 23431 - DNA, 17 bp, Arabidopsis thaliana
acgggattggttgatct

SEQ ID NO: 23432 - DNA, 17 bp, Arabidopsis thaliana
acgggatttgacttgac

SEQ ID NO: 23433 - DNA, 17 bp, Arabidopsis thaliana
acgggatttgctgcttg

SEQ ID NO: 23434 - DNA, 17 bp, Arabidopsis thaliana
acgggatttgtgtgagg

SEQ ID NO: 23435 - DNA, 17 bp, Arabidopsis thaliana
acgggcaaaagggttgt

SEQ ID NO: 23436 - DNA, 17 bp, Arabidopsis thaliana
acgggcagctgtgggca

SEQ ID NO: 23437 - DNA, 17 bp, Arabidopsis thaliana
acgggcatttggtctag

SEQ ID NO: 23438 - DNA, 17 bp, Arabidopsis thaliana
acgggccattgccttcc

SEQ ID NO: 23439 - DNA, 17 bp, Arabidopsis thaliana
acgggcgagagaccgat

SEQ ID NO: 23440 - DNA, 17 bp, Arabidopsis thaliana
acgggcggcgtatctac

SEQ ID NO: 23441 - DNA, 17 bp, Arabidopsis thaliana
acgggcgtaaccaggtt

SEQ ID NO: 23442 - DNA, 17 bp, Arabidopsis thaliana
acgggcgtctaacacaa

SEQ ID NO: 23443 - DNA, 17 bp, Arabidopsis thaliana
acgggctaaaccttaag

SEQ ID NO: 23444 - DNA, 17 bp, Arabidopsis thaliana
acgggctccattgttgg

SEQ ID NO: 23445 - DNA, 17 bp, Arabidopsis thaliana
acgggctctgaccacaa

SEQ ID NO: 23446 - DNA, 17 bp, Arabidopsis thaliana
acgggctgggcctgtta

SEQ ID NO: 23447 - DNA, 17 bp, Arabidopsis thaliana
acgggcttcagtccaaa

SEQ ID NO: 23448 - DNA, 17 bp, Arabidopsis thaliana
acgggcttcgcagaatc

SEQ ID NO: 23449 - DNA, 17 bp, Arabidopsis thaliana
acgggcttcgccccaaa

SEQ ID NO: 23450 - DNA, 17 bp, Arabidopsis thaliana
acgggcttcgccccaga

SEQ ID NO: 23451 - DNA, 17 bp, Arabidopsis thaliana
acgggcttcggccagaa

SEQ ID NO: 23452 - DNA, 17 bp, Arabidopsis thaliana
acgggcttcggccagac

SEQ ID NO: 23453 - DNA, 17 bp, Arabidopsis thaliana
acgggcttcggcccaga

SEQ ID NO: 23454 - DNA, 17 bp, Arabidopsis thaliana
acgggcttctgcccaga

SEQ ID NO: 23455 - DNA, 17 bp, Arabidopsis thaliana
acgggcttgcccgcttg

SEQ ID NO: 23456 - DNA, 17 bp, Arabidopsis thaliana
acgggcttgctccactg

SEQ ID NO: 23457 - DNA, 17 bp, Arabidopsis thaliana
acgggcttggcagaatc

SEQ ID NO: 23458 - DNA, 17 bp, Arabidopsis thaliana
acgggcttggctcaacc

SEQ ID NO: 23459 - DNA, 17 bp, Arabidopsis thaliana
acgggcttgtccactag

SEQ ID NO: 23460 - DNA, 17 bp, Arabidopsis thaliana
acgggcttgtccgctat

SEQ ID NO: 23461 - DNA, 17 bp, Arabidopsis thaliana
acgggctttgaagatta

SEQ ID NO: 23462 - DNA, 17 bp, Arabidopsis thaliana
acgggctttgacccaga

SEQ ID NO: 23463 - DNA, 17 bp, Arabidopsis thaliana
acgggctttgaccccga

SEQ ID NO: 23464 - DNA, 17 bp, Arabidopsis thaliana
acgggctttgcattcac

SEQ ID NO: 23465 - DNA, 17 bp, Arabidopsis thaliana
acgggctttgccctcca

SEQ ID NO: 23466 - DNA, 17 bp, Arabidopsis thaliana
acgggctttgccctccc

SEQ ID NO: 23467 - DNA, 17 bp, Arabidopsis thaliana
acgggctttggagatta

SEQ ID NO: 23468 - DNA, 17 bp, Arabidopsis thaliana
acgggctttggcccaga

SEQ ID NO: 23469 - DNA, 17 bp, Arabidopsis thaliana
acgggctttgtcccaga

SEQ ID NO: 23470 - DNA, 17 bp, Arabidopsis thaliana
acgggctttgtcctaga

SEQ ID NO: 23471 - DNA, 17 bp, Arabidopsis thaliana
acgggcttttgatacgc

SEQ ID NO: 23472 - DNA, 17 bp, Arabidopsis thaliana
acggggaaacttaccag

SEQ ID NO: 23473 - DNA, 17 bp, Arabidopsis thaliana
acggggacacaggtcgt

SEQ ID NO: 23474 - DNA, 17 bp, Arabidopsis thaliana
acggggacccacggcga

SEQ ID NO: 23475 - DNA, 17 bp, Arabidopsis thaliana
acggggacccgggctcg

SEQ ID NO: 23476 - DNA, 17 bp, Arabidopsis thaliana
acggggagataatgcct

SEQ ID NO: 23477 - DNA, 17 bp, Arabidopsis thaliana
acggggagtaagccgac

SEQ ID NO: 23478 - DNA, 17 bp, Arabidopsis thaliana
acggggagtaagccgag

SEQ ID NO: 23479 - DNA, 17 bp, Arabidopsis thaliana
acggggatcgtaccccg

SEQ ID NO: 23480 - DNA, 17 bp, Arabidopsis thaliana
acggggatcgttaccag

SEQ ID NO: 23481 - DNA, 17 bp, Arabidopsis thaliana
acggggatcgttacccc

SEQ ID NO: 23482 - DNA, 17 bp, Arabidopsis thaliana
acggggcgcaggtgcag

SEQ ID NO: 23483 - DNA, 17 bp, Arabidopsis thaliana
acgggggcccgcacaag

SEQ ID NO: 23484 - DNA, 17 bp, Arabidopsis thaliana
acgggggcctcgggaag

SEQ ID NO: 23485 - DNA, 17 bp, Arabidopsis thaliana
acgggggttaccccgca

SEQ ID NO: 23486 - DNA, 17 bp, Arabidopsis thaliana
acggggtattgtaagtg

SEQ ID NO: 23487 - DNA, 17 bp, Arabidopsis thaliana
acggggtggggcttgta

SEQ ID NO: 23488 - DNA, 17 bp, Arabidopsis thaliana
acggggttaatcggcga

SEQ ID NO: 23489 - DNA, 17 bp, Arabidopsis thaliana
acggggttagatgatag

SEQ ID NO: 23490 - DNA, 17 bp, Arabidopsis thaliana
acggggttagtggtagg

SEQ ID NO: 23491 - DNA, 17 bp, Arabidopsis thaliana
acggggttatcgcacta

SEQ ID NO: 23492 - DNA, 17 bp, Arabidopsis thaliana
acggggttcggtccccc

SEQ ID NO: 23493 - DNA, 17 bp, Arabidopsis thaliana
acggggttcggttcccc

SEQ ID NO: 23494 - DNA, 17 bp, Arabidopsis thaliana
acggggttcgtcccccg

SEQ ID NO: 23495 - DNA, 17 bp, Arabidopsis thaliana
acggggttcgttccccc

SEQ ID NO: 23496 - DNA, 17 bp, Arabidopsis thaliana
acggggttcgtttcccc

SEQ ID NO: 23497 - DNA, 17 bp, Arabidopsis thaliana
acggggttgatcccccg

SEQ ID NO: 23498 - DNA, 17 bp, Arabidopsis thaliana
acggggtttccccgcac

SEQ ID NO: 23499 - DNA, 17 bp, Arabidopsis thaliana
acggggtttgtttcccc

SEQ ID NO: 23500 - DNA, 17 bp, Arabidopsis thaliana
acggggttttcccccgc

SEQ ID NO: 23501 - DNA, 17 bp, Arabidopsis thaliana
acgggtactcgattgag

SEQ ID NO: 23502 - DNA, 17 bp, Arabidopsis thaliana
acgggtactggattgag

SEQ ID NO: 23503 - DNA, 17 bp, Arabidopsis thaliana
acgggtagtttacatga

SEQ ID NO: 23504 - DNA, 17 bp, Arabidopsis thaliana
acgggtattagattcgg

SEQ ID NO: 23505 - DNA, 17 bp, Arabidopsis thaliana
acgggtcgacgcgggct

SEQ ID NO: 23506 - DNA, 17 bp, Arabidopsis thaliana
acgggtcgccggttcga

SEQ ID NO: 23507 - DNA, 17 bp, Arabidopsis thaliana
acgggtcggatctgttg

SEQ ID NO: 23508 - DNA, 17 bp, Arabidopsis thaliana
acgggtctttcagattg

SEQ ID NO: 23509 - DNA, 17 bp, Arabidopsis thaliana
acgggtgacccgggttc

SEQ ID NO: 23510 - DNA, 17 bp, Arabidopsis thaliana
acgggtgacggagagtt

SEQ ID NO: 23511 - DNA, 17 bp, Arabidopsis thaliana
acgggtgagtaacgcgc

SEQ ID NO: 23512 - DNA, 17 bp, Arabidopsis thaliana
acgggtgagtaacgcgt

SEQ ID NO: 23513 - DNA, 17 bp, Arabidopsis thaliana
acgggtgattctggtcc

SEQ ID NO: 23514 - DNA, 17 bp, Arabidopsis thaliana
acgggtgattgcattaa

SEQ ID NO: 23515 - DNA, 17 bp, Arabidopsis thaliana
acgggtgcgtaaggcgt

SEQ ID NO: 23516 - DNA, 17 bp, Arabidopsis thaliana
acgggtgggtttggcag

SEQ ID NO: 23517 - DNA, 17 bp, Arabidopsis thaliana
acgggtggttgcggttt

SEQ ID NO: 23518 - DNA, 17 bp, Arabidopsis thaliana
acgggttaatgatgagt

SEQ ID NO: 23519 - DNA, 17 bp, Arabidopsis thaliana
acgggttagcaggacgg

SEQ ID NO: 23520 - DNA, 17 bp, Arabidopsis thaliana
acgggttagcgggacgg

SEQ ID NO: 23521 - DNA, 17 bp, Arabidopsis thaliana
acgggttatgttgactt

SEQ ID NO: 23522 - DNA, 17 bp, Arabidopsis thaliana
acgggttcaaatcctgt

SEQ ID NO: 23523 - DNA, 17 bp, Arabidopsis thaliana
acgggttcaaatccttt

SEQ ID NO: 23524 - DNA, 17 bp, Arabidopsis thaliana
acgggttcccagtgctc

SEQ ID NO: 23525 - DNA, 17 bp, Arabidopsis thaliana
acgggttcgattcccgt

SEQ ID NO: 23526 - DNA, 17 bp, Arabidopsis thaliana
acgggttcggcttttgt

SEQ ID NO: 23527 - DNA, 17 bp, Arabidopsis thaliana
acgggttcgggtcccac

SEQ ID NO: 23528 - DNA, 17 bp, Arabidopsis thaliana
acgggttcgggtcccgg

SEQ ID NO: 23529 - DNA, 17 bp, Arabidopsis thaliana
acgggttcgtttcccgg

SEQ ID NO: 23530 - DNA, 17 bp, Arabidopsis thaliana
acgggttgacatttgga

SEQ ID NO: 23531 - DNA, 17 bp, Arabidopsis thaliana
acgggttgacgggacgg

SEQ ID NO: 23532 - DNA, 17 bp, Arabidopsis thaliana
acgggttgcccatatgg

SEQ ID NO: 23533 - DNA, 17 bp, Arabidopsis thaliana
acgggttgcccatggac

SEQ ID NO: 23534 - DNA, 17 bp, Arabidopsis thaliana
acgggttggagctcatc

SEQ ID NO: 23535 - DNA, 17 bp, Arabidopsis thaliana
acgggttggcaggacgg

SEQ ID NO: 23536 - DNA, 17 bp, Arabidopsis thaliana
acgggttggcgagacgg

SEQ ID NO: 23537 - DNA, 17 bp, Arabidopsis thaliana
acgggttggcggaacgg

SEQ ID NO: 23538 - DNA, 17 bp, Arabidopsis thaliana
acgggttggcggaaggg

SEQ ID NO: 23539 - DNA, 17 bp, Arabidopsis thaliana
acgggttggcggacggg

SEQ ID NO: 23540 - DNA, 17 bp, Arabidopsis thaliana
acgggttggcgggacag

SEQ ID NO: 23541 - DNA, 17 bp, Arabidopsis thaliana
acgggttggcgggacga

SEQ ID NO: 23542 - DNA, 17 bp, Arabidopsis thaliana
acgggttggcgggacgg

SEQ ID NO: 23543 - DNA, 17 bp, Arabidopsis thaliana
acgggttggcgggacgt

SEQ ID NO: 23544 - DNA, 17 bp, Arabidopsis thaliana
acgggttggcgggaggg

SEQ ID NO: 23545 - DNA, 17 bp, Arabidopsis thaliana
acgggttggcgggatgg

SEQ ID NO: 23546 - DNA, 17 bp, Arabidopsis thaliana
acgggttggcggtaggg

SEQ ID NO: 23547 - DNA, 17 bp, Arabidopsis thaliana
acgggttggcgtgacgg

SEQ ID NO: 23548 - DNA, 17 bp, Arabidopsis thaliana
acgggtttacatttttg

SEQ ID NO: 23549 - DNA, 17 bp, Arabidopsis thaliana
acgggtttacgtttttg

SEQ ID NO: 23550 - DNA, 17 bp, Arabidopsis thaliana
acgggtttacgtttttt

SEQ ID NO: 23551 - DNA, 17 bp, Arabidopsis thaliana
acgggtttagactgcta

SEQ ID NO: 23552 - DNA, 17 bp, Arabidopsis thaliana
acgggtttagcaggacg

SEQ ID NO: 23553 - DNA, 17 bp, Arabidopsis thaliana
acgggtttatgtttttg

SEQ ID NO: 23554 - DNA, 17 bp, Arabidopsis thaliana
acgggtttcagaatctg

SEQ ID NO: 23555 - DNA, 17 bp, Arabidopsis thaliana
acgggtttcagaatgtg

SEQ ID NO: 23556 - DNA, 17 bp, Arabidopsis thaliana
acgggtttcagcgcaga

SEQ ID NO: 23557 - DNA, 17 bp, Arabidopsis thaliana
acgggtttcgcctcaga

SEQ ID NO: 23558 - DNA, 17 bp, Arabidopsis thaliana
acgggtttcggcccaga

SEQ ID NO: 23559 - DNA, 17 bp, Arabidopsis thaliana
acgggtttcggcctaga

SEQ ID NO: 23560 - DNA, 17 bp, Arabidopsis thaliana
acgggtttctagctcga

SEQ ID NO: 23561 - DNA, 17 bp, Arabidopsis thaliana
acgggtttgacaggacg

SEQ ID NO: 23562 - DNA, 17 bp, Arabidopsis thaliana
acgggtttgacggaacg

SEQ ID NO: 23563 - DNA, 17 bp, Arabidopsis thaliana
acgggtttgatctgcaa

SEQ ID NO: 23564 - DNA, 17 bp, Arabidopsis thaliana
acgggtttgcgggacgg

SEQ ID NO: 23565 - DNA, 17 bp, Arabidopsis thaliana
acgggtttggaatgacg

SEQ ID NO: 23566 - DNA, 17 bp, Arabidopsis thaliana
acgggtttggcaagacg

SEQ ID NO: 23567 - DNA, 17 bp, Arabidopsis thaliana
acgggtttggcaggacg

SEQ ID NO: 23568 - DNA, 17 bp, Arabidopsis thaliana
acgggtttggcaggatg

SEQ ID NO: 23569 - DNA, 17 bp, Arabidopsis thaliana
acgggtttggcaggttg

SEQ ID NO: 23570 - DNA, 17 bp, Arabidopsis thaliana
acgggtttggcgggacg

SEQ ID NO: 23571 - DNA, 17 bp, Arabidopsis thaliana
acgggtttggcgggatg

SEQ ID NO: 23572 - DNA, 17 bp, Arabidopsis thaliana
acgggtttggtcgatgg

SEQ ID NO: 23573 - DNA, 17 bp, Arabidopsis thaliana
acgggtttgtaggtcga

SEQ ID NO: 23574 - DNA, 17 bp, Arabidopsis thaliana
acgggtttgtcaggacg

SEQ ID NO: 23575 - DNA, 17 bp, Arabidopsis thaliana
acgggttttattttgga

SEQ ID NO: 23576 - DNA, 17 bp, Arabidopsis thaliana
acgggttttgcggaacg

SEQ ID NO: 23577 - DNA, 17 bp, Arabidopsis thaliana
acgggttttgcgggacg

SEQ ID NO: 23578 - DNA, 17 bp, Arabidopsis thaliana
acgggttttggctaaat

SEQ ID NO: 23579 - DNA, 17 bp, Arabidopsis thaliana
acgggttttgtatgcat

SEQ ID NO: 23580 - DNA, 17 bp, Arabidopsis thaliana
acgggttttgtatgttt

SEQ ID NO: 23581 - DNA, 17 bp, Arabidopsis thaliana
acggtaaaccgcgggga

SEQ ID NO: 23582 - DNA, 17 bp, Arabidopsis thaliana
acggtaaagacctcgtc

SEQ ID NO: 23583 - DNA, 17 bp, Arabidopsis thaliana
acggtaaccagcggtgg

SEQ ID NO: 23584 - DNA, 17 bp, Arabidopsis thaliana
acggtaaccgtggtcat

SEQ ID NO: 23585 - DNA, 17 bp, Arabidopsis thaliana
acggtaaccgtggtgct

SEQ ID NO: 23586 - DNA, 17 bp, Arabidopsis thaliana
acggtaacgcaatttga

SEQ ID NO: 23587 - DNA, 17 bp, Arabidopsis thaliana
acggtaagccgcttcca

SEQ ID NO: 23588 - DNA, 17 bp, Arabidopsis thaliana
acggtacagacccgggt

SEQ ID NO: 23589 - DNA, 17 bp, Arabidopsis thaliana
acggtactgtagacggc

SEQ ID NO: 23590 - DNA, 17 bp, Arabidopsis thaliana
acggtactgtggacgga

SEQ ID NO: 23591 - DNA, 17 bp, Arabidopsis thaliana
acggtagaccaaggttg

SEQ ID NO: 23592 - DNA, 17 bp, Arabidopsis thaliana
acggtagagaaacatca

SEQ ID NO: 23593 - DNA, 17 bp, Arabidopsis thaliana
acggtagagttggagca

SEQ ID NO: 23594 - DNA, 17 bp, Arabidopsis thaliana
acggtagagttggagcg

SEQ ID NO: 23595 - DNA, 17 bp, Arabidopsis thaliana
acggtagcgtcttatct

SEQ ID NO: 23596 - DNA, 17 bp, Arabidopsis thaliana
acggtaggacaggtttt

SEQ ID NO: 23597 - DNA, 17 bp, Arabidopsis thaliana
acggtaggacgggttta

SEQ ID NO: 23598 - DNA, 17 bp, Arabidopsis thaliana
acggtaggttcattggc

SEQ ID NO: 23599 - DNA, 17 bp, Arabidopsis thaliana
acggtatacagggtcaa

SEQ ID NO: 23600 - DNA, 17 bp, Arabidopsis thaliana
acggtataccacgggtg

SEQ ID NO: 23601 - DNA, 17 bp, Arabidopsis thaliana
acggtataccgcgagac

SEQ ID NO: 23602 - DNA, 17 bp, Arabidopsis thaliana
acggtataccgcgagtc

SEQ ID NO: 23603 - DNA, 17 bp, Arabidopsis thaliana
acggtatactgcggaac

SEQ ID NO: 23604 - DNA, 17 bp, Arabidopsis thaliana
acggtatatcctgactt

SEQ ID NO: 23605 - DNA, 17 bp, Arabidopsis thaliana
acggtatccatgggcca

SEQ ID NO: 23606 - DNA, 17 bp, Arabidopsis thaliana
acggtatcgaattggcc

SEQ ID NO: 23607 - DNA, 17 bp, Arabidopsis thaliana
acggtatctctcctacg

SEQ ID NO: 23608 - DNA, 17 bp, Arabidopsis thaliana
acggtatgacaatgcgg

SEQ ID NO: 23609 - DNA, 17 bp, Arabidopsis thaliana
acggtatggggattttg

SEQ ID NO: 23610 - DNA, 17 bp, Arabidopsis thaliana
acggtattgtgcgtgtg

SEQ ID NO: 23611 - DNA, 17 bp, Arabidopsis thaliana
acggtattgttgacgca

SEQ ID NO: 23612 - DNA, 17 bp, Arabidopsis thaliana
acggtcaacctcgtcgt

SEQ ID NO: 23613 - DNA, 17 bp, Arabidopsis thaliana
acggtcaagcccatatt

SEQ ID NO: 23614 - DNA, 17 bp, Arabidopsis thaliana
acggtcaggtttggact

SEQ ID NO: 23615 - DNA, 17 bp, Arabidopsis thaliana
acggtcatttcacgagt

SEQ ID NO: 23616 - DNA, 17 bp, Arabidopsis thaliana
acggtccataatggaca

SEQ ID NO: 23617 - DNA, 17 bp, Arabidopsis thaliana
acggtccatgggcttgc

SEQ ID NO: 23618 - DNA, 17 bp, Arabidopsis thaliana
acggtcccacgtctgcg

SEQ ID NO: 23619 - DNA, 17 bp, Arabidopsis thaliana
acggtccctggtcggtg

SEQ ID NO: 23620 - DNA, 17 bp, Arabidopsis thaliana
acggtccctggtcggtt

SEQ ID NO: 23621 - DNA, 17 bp, Arabidopsis thaliana
acggtccgcagttagtc

SEQ ID NO: 23622 - DNA, 17 bp, Arabidopsis thaliana
acggtccgtagataatc

SEQ ID NO: 23623 - DNA, 17 bp, Arabidopsis thaliana
acggtcctgcgtgtggg

SEQ ID NO: 23624 - DNA, 17 bp, Arabidopsis thaliana
acggtcgagcgcctcct

SEQ ID NO: 23625 - DNA, 17 bp, Arabidopsis thaliana
acggtcgcatcctgtag

SEQ ID NO: 23626 - DNA, 17 bp, Arabidopsis thaliana
acggtcggtatgccacg

SEQ ID NO: 23627 - DNA, 17 bp, Arabidopsis thaliana
acggtcgtctccaaaat

SEQ ID NO: 23628 - DNA, 17 bp, Arabidopsis thaliana
acggtctaaaagttatg

SEQ ID NO: 23629 - DNA, 17 bp, Arabidopsis thaliana
acggtctaagagttatg

SEQ ID NO: 23630 - DNA, 17 bp, Arabidopsis thaliana
acggtctagcgggattt

SEQ ID NO: 23631 - DNA, 17 bp, Arabidopsis thaliana
acggtctcaatagttca

SEQ ID NO: 23632 - DNA, 17 bp, Arabidopsis thaliana
acggtctcagaattgta

SEQ ID NO: 23633 - DNA, 17 bp, Arabidopsis thaliana
acggtctcagaattgtg

SEQ ID NO: 23634 - DNA, 17 bp, Arabidopsis thaliana
acggtctcagttttcga

SEQ ID NO: 23635 - DNA, 17 bp, Arabidopsis thaliana
acggtctccacctgaca

SEQ ID NO: 23636 - DNA, 17 bp, Arabidopsis thaliana
acggtctccccacttcc

SEQ ID NO: 23637 - DNA, 17 bp, Arabidopsis thaliana
acggtctgagcgtgaat

SEQ ID NO: 23638 - DNA, 17 bp, Arabidopsis thaliana
acggtctgatccgttga

SEQ ID NO: 23639 - DNA, 17 bp, Arabidopsis thaliana
acggtctgatctattaa

SEQ ID NO: 23640 - DNA, 17 bp, Arabidopsis thaliana
acggtctgcctgggtgt

SEQ ID NO: 23641 - DNA, 17 bp, Arabidopsis thaliana
acggtctgtatagtggg

SEQ ID NO: 23642 - DNA, 17 bp, Arabidopsis thaliana
acggtcttactagaaac

SEQ ID NO: 23643 - DNA, 17 bp, Arabidopsis thaliana
acggtcttgttgtcaca

SEQ ID NO: 23644 - DNA, 17 bp, Arabidopsis thaliana
acggtctttgactgttt

SEQ ID NO: 23645 - DNA, 17 bp, Arabidopsis thaliana
acggtgaatcgatttgg

SEQ ID NO: 23646 - DNA, 17 bp, Arabidopsis thaliana
acggtgacacgtcggat

SEQ ID NO: 23647 - DNA, 17 bp, Arabidopsis thaliana
acggtgaccagcggtgg

SEQ ID NO: 23648 - DNA, 17 bp, Arabidopsis thaliana
acggtgacggagaatta

SEQ ID NO: 23649 - DNA, 17 bp, Arabidopsis thaliana
acggtgacggcctaagc

SEQ ID NO: 23650 - DNA, 17 bp, Arabidopsis thaliana
acggtgactacggaccg

SEQ ID NO: 23651 - DNA, 17 bp, Arabidopsis thaliana
acggtgactcgatctgt

SEQ ID NO: 23652 - DNA, 17 bp, Arabidopsis thaliana
acggtgagctttgcctt

SEQ ID NO: 23653 - DNA, 17 bp, Arabidopsis thaliana
acggtgagtcgatttgg

SEQ ID NO: 23654 - DNA, 17 bp, Arabidopsis thaliana
acggtgagtcgatttgt

SEQ ID NO: 23655 - DNA, 17 bp, Arabidopsis thaliana
acggtgatcacgtggtg

SEQ ID NO: 23656 - DNA, 17 bp, Arabidopsis thaliana
acggtgatggaatgtcc

SEQ ID NO: 23657 - DNA, 17 bp, Arabidopsis thaliana
acggtgatggaatgtgt

SEQ ID NO: 23658 - DNA, 17 bp, Arabidopsis thaliana
acggtgattgcattaac

SEQ ID NO: 23659 - DNA, 17 bp, Arabidopsis thaliana
acggtgattgggcctgt

SEQ ID NO: 23660 - DNA, 17 bp, Arabidopsis thaliana
acggtgattttcgacgg

SEQ ID NO: 23661 - DNA, 17 bp, Arabidopsis thaliana
acggtgcaatgtgtttt

SEQ ID NO: 23662 - DNA, 17 bp, Arabidopsis thaliana
acggtgcacatctttct

SEQ ID NO: 23663 - DNA, 17 bp, Arabidopsis thaliana
acggtgcactaaccatt

SEQ ID NO: 23664 - DNA, 17 bp, Arabidopsis thaliana
acggtgcattggtcggc

SEQ ID NO: 23665 - DNA, 17 bp, Arabidopsis thaliana
acggtgccacggggtgt

SEQ ID NO: 23666 - DNA, 17 bp, Arabidopsis thaliana
acggtgcccaactgccg

SEQ ID NO: 23667 - DNA, 17 bp, Arabidopsis thaliana
acggtgcccaactgcgc

SEQ ID NO: 23668 - DNA, 17 bp, Arabidopsis thaliana
acggtgccgaccaaact

SEQ ID NO: 23669 - DNA, 17 bp, Arabidopsis thaliana
acggtgccgagtggaag

SEQ ID NO: 23670 - DNA, 17 bp, Arabidopsis thaliana
acggtgcctgtagactc

SEQ ID NO: 23671 - DNA, 17 bp, Arabidopsis thaliana
acggtgcggtgtgtttt

SEQ ID NO: 23672 - DNA, 17 bp, Arabidopsis thaliana
acggtgcggttcagata

SEQ ID NO: 23673 - DNA, 17 bp, Arabidopsis thaliana
acggtgcgtccactgag

SEQ ID NO: 23674 - DNA, 17 bp, Arabidopsis thaliana
acggtgcgtccatcgac

SEQ ID NO: 23675 - DNA, 17 bp, Arabidopsis thaliana
acggtgctcgcagtgga

SEQ ID NO: 23676 - DNA, 17 bp, Arabidopsis thaliana
acggtgctggtgcatgg

SEQ ID NO: 23677 - DNA, 17 bp, Arabidopsis thaliana
acggtggaaggattacg

SEQ ID NO: 23678 - DNA, 17 bp, Arabidopsis thaliana
acggtggatacctaggc

SEQ ID NO: 23679 - DNA, 17 bp, Arabidopsis thaliana
acggtggattgacccag

SEQ ID NO: 23680 - DNA, 17 bp, Arabidopsis thaliana
acggtggcagcctaagc

SEQ ID NO: 23681 - DNA, 17 bp, Arabidopsis thaliana
acggtggcagtcaagat

SEQ ID NO: 23682 - DNA, 17 bp, Arabidopsis thaliana
acggtggccctggcttg

SEQ ID NO: 23683 - DNA, 17 bp, Arabidopsis thaliana
acggtggcggcctaaac

SEQ ID NO: 23684 - DNA, 17 bp, Arabidopsis thaliana
acggtggcggcctaacc

SEQ ID NO: 23685 - DNA, 17 bp, Arabidopsis thaliana
acggtggcggcctaagc

SEQ ID NO: 23686 - DNA, 17 bp, Arabidopsis thaliana
acggtggcggcctaagg

SEQ ID NO: 23687 - DNA, 17 bp, Arabidopsis thaliana
acggtggcggcctaagt

SEQ ID NO: 23688 - DNA, 17 bp, Arabidopsis thaliana
acggtggcggcctaggc

SEQ ID NO: 23689 - DNA, 17 bp, Arabidopsis thaliana
acggtggcggcctaggt

SEQ ID NO: 23690 - DNA, 17 bp, Arabidopsis thaliana
acggtggcgtctaagcc

SEQ ID NO: 23691 - DNA, 17 bp, Arabidopsis thaliana
acggtggctgcctaagc

SEQ ID NO: 23692 - DNA, 17 bp, Arabidopsis thaliana
acggtgggcccggtgca

SEQ ID NO: 23693 - DNA, 17 bp, Arabidopsis thaliana
acggtgggcttccaacc

SEQ ID NO: 23694 - DNA, 17 bp, Arabidopsis thaliana
acggtggttaacagggt

SEQ ID NO: 23695 - DNA, 17 bp, Arabidopsis thaliana
acggtggttcttcctgt

SEQ ID NO: 23696 - DNA, 17 bp, Arabidopsis thaliana
acggtggttgcttcgga

SEQ ID NO: 23697 - DNA, 17 bp, Arabidopsis thaliana
acggtggttgcttcgta

SEQ ID NO: 23698 - DNA, 17 bp, Arabidopsis thaliana
acggtggttgtccggcg

SEQ ID NO: 23699 - DNA, 17 bp, Arabidopsis thaliana
acggtgtaagttccgtc

SEQ ID NO: 23700 - DNA, 17 bp, Arabidopsis thaliana
acggtgtaccgcgagtt

SEQ ID NO: 23701 - DNA, 17 bp, Arabidopsis thaliana
acggtgtcaccagggca

SEQ ID NO: 23702 - DNA, 17 bp, Arabidopsis thaliana
acggtgtcgattgatac

SEQ ID NO: 23703 - DNA, 17 bp, Arabidopsis thaliana
acggtgtcgggggttcg

SEQ ID NO: 23704 - DNA, 17 bp, Arabidopsis thaliana
acggtgtgacaatcgat

SEQ ID NO: 23705 - DNA, 17 bp, Arabidopsis thaliana
acggtgtgcattggtcg

SEQ ID NO: 23706 - DNA, 17 bp, Arabidopsis thaliana
acggtgtgccgcaagtc

SEQ ID NO: 23707 - DNA, 17 bp, Arabidopsis thaliana
acggtgtgcgcaggtgg

SEQ ID NO: 23708 - DNA, 17 bp, Arabidopsis thaliana
acggtgttagacattta

SEQ ID NO: 23709 - DNA, 17 bp, Arabidopsis thaliana
acggtgttctacaagct

SEQ ID NO: 23710 - DNA, 17 bp, Arabidopsis thaliana
acggtgttgacaaatat

SEQ ID NO: 23711 - DNA, 17 bp, Arabidopsis thaliana
acggtgttgttcgattg

SEQ ID NO: 23712 - DNA, 17 bp, Arabidopsis thaliana
acggtgtttgttgacaa

SEQ ID NO: 23713 - DNA, 17 bp, Arabidopsis thaliana
acggtgttttgcagcta

SEQ ID NO: 23714 - DNA, 17 bp, Arabidopsis thaliana
acggttaagattgtcta

SEQ ID NO: 23715 - DNA, 17 bp, Arabidopsis thaliana
acggttaataaacggtc

SEQ ID NO: 23716 - DNA, 17 bp, Arabidopsis thaliana
acggttaccgtcggatc

SEQ ID NO: 23717 - DNA, 17 bp, Arabidopsis thaliana
acggttagagtgatttc

SEQ ID NO: 23718 - DNA, 17 bp, Arabidopsis thaliana
acggttagccacttttc

SEQ ID NO: 23719 - DNA, 17 bp, Arabidopsis thaliana
acggttagggccgagtc

SEQ ID NO: 23720 - DNA, 17 bp, Arabidopsis thaliana
acggttagggttggtta

SEQ ID NO: 23721 - DNA, 17 bp, Arabidopsis thaliana
acggttataccctcttg

SEQ ID NO: 23722 - DNA, 17 bp, Arabidopsis thaliana
acggttatagcagtgga

SEQ ID NO: 23723 - DNA, 17 bp, Arabidopsis thaliana
acggttatcccgcatgt

SEQ ID NO: 23724 - DNA, 17 bp, Arabidopsis thaliana
acggttatgggccaaaa

SEQ ID NO: 23725 - DNA, 17 bp, Arabidopsis thaliana
acggttattgtcaggtg

SEQ ID NO: 23726 - DNA, 17 bp, Arabidopsis thaliana
acggttcaaacgagcca

SEQ ID NO: 23727 - DNA, 17 bp, Arabidopsis thaliana
acggttcaactgcagta

SEQ ID NO: 23728 - DNA, 17 bp, Arabidopsis thaliana
acggttcaactgcggta

SEQ ID NO: 23729 - DNA, 17 bp, Arabidopsis thaliana
acggttcacagaatcgg

SEQ ID NO: 23730 - DNA, 17 bp, Arabidopsis thaliana
acggttcataatggaca

SEQ ID NO: 23731 - DNA, 17 bp, Arabidopsis thaliana
acggttcatcagggaaa

SEQ ID NO: 23732 - DNA, 17 bp, Arabidopsis thaliana
acggttcattcagatca

SEQ ID NO: 23733 - DNA, 17 bp, Arabidopsis thaliana
acggttccaaattcact

SEQ ID NO: 23734 - DNA, 17 bp, Arabidopsis thaliana
acggttccaagacacaa

SEQ ID NO: 23735 - DNA, 17 bp, Arabidopsis thaliana
acggttccaagggatct

SEQ ID NO: 23736 - DNA, 17 bp, Arabidopsis thaliana
acggttccgacaatcat

SEQ ID NO: 23737 - DNA, 17 bp, Arabidopsis thaliana
acggttcgagtccgtat

SEQ ID NO: 23738 - DNA, 17 bp, Arabidopsis thaliana
acggttcgattcgggtc

SEQ ID NO: 23739 - DNA, 17 bp, Arabidopsis thaliana
acggttcgcaaatggtc

SEQ ID NO: 23740 - DNA, 17 bp, Arabidopsis thaliana
acggttcggacaatcac

SEQ ID NO: 23741 - DNA, 17 bp, Arabidopsis thaliana
acggttcggatcggact

SEQ ID NO: 23742 - DNA, 17 bp, Arabidopsis thaliana
acggttcgtcccaccgg

SEQ ID NO: 23743 - DNA, 17 bp, Arabidopsis thaliana
acggttcgtgccccacg

SEQ ID NO: 23744 - DNA, 17 bp, Arabidopsis thaliana
acggttctcagagcagc

SEQ ID NO: 23745 - DNA, 17 bp, Arabidopsis thaliana
acggttctcgattggct

SEQ ID NO: 23746 - DNA, 17 bp, Arabidopsis thaliana
acggttctgaactggtc

SEQ ID NO: 23747 - DNA, 17 bp, Arabidopsis thaliana
acggttgaactttgttt

SEQ ID NO: 23748 - DNA, 17 bp, Arabidopsis thaliana
acggttgagttgctgac

SEQ ID NO: 23749 - DNA, 17 bp, Arabidopsis thaliana
acggttgcagtgatgct

SEQ ID NO: 23750 - DNA, 17 bp, Arabidopsis thaliana
acggttgcagtgattct

SEQ ID NO: 23751 - DNA, 17 bp, Arabidopsis thaliana
acggttgcatgaatcgc

SEQ ID NO: 23752 - DNA, 17 bp, Arabidopsis thaliana
acggttgcatttgcaaa

SEQ ID NO: 23753 - DNA, 17 bp, Arabidopsis thaliana
acggttgcattttacac

SEQ ID NO: 23754 - DNA, 17 bp, Arabidopsis thaliana
acggttgccgaatggtt

SEQ ID NO: 23755 - DNA, 17 bp, Arabidopsis thaliana
acggttgccgacttttc

SEQ ID NO: 23756 - DNA, 17 bp, Arabidopsis thaliana
acggttgcgcaatgtag

SEQ ID NO: 23757 - DNA, 17 bp, Arabidopsis thaliana
acggttgcgggcggtag

SEQ ID NO: 23758 - DNA, 17 bp, Arabidopsis thaliana
acggttgcggtgttaag

SEQ ID NO: 23759 - DNA, 17 bp, Arabidopsis thaliana
acggttggtcagtattt

SEQ ID NO: 23760 - DNA, 17 bp, Arabidopsis thaliana
acggttgtgccaaggct

SEQ ID NO: 23761 - DNA, 17 bp, Arabidopsis thaliana
acggttgtgccatagct

SEQ ID NO: 23762 - DNA, 17 bp, Arabidopsis thaliana
acggttgtgccatggct

SEQ ID NO: 23763 - DNA, 17 bp, Arabidopsis thaliana
acggttgtgctatggct

SEQ ID NO: 23764 - DNA, 17 bp, Arabidopsis thaliana
acggttgtgtctttttg

SEQ ID NO: 23765 - DNA, 17 bp, Arabidopsis thaliana
acggttgtgttcatttt

SEQ ID NO: 23766 - DNA, 17 bp, Arabidopsis thaliana
acggttgttagcgattg

SEQ ID NO: 23767 - DNA, 17 bp, Arabidopsis thaliana
acggttgttgttgcgag

SEQ ID NO: 23768 - DNA, 17 bp, Arabidopsis thaliana
acggtttaactaacggc

SEQ ID NO: 23769 - DNA, 17 bp, Arabidopsis thaliana
acggtttacttcaggtg

SEQ ID NO: 23770 - DNA, 17 bp, Arabidopsis thaliana
acggtttagattgaatt

SEQ ID NO: 23771 - DNA, 17 bp, Arabidopsis thaliana
acggtttagggttcttc

SEQ ID NO: 23772 - DNA, 17 bp, Arabidopsis thaliana
acggtttagttagtcag

SEQ ID NO: 23773 - DNA, 17 bp, Arabidopsis thaliana
acggtttagtttaacag

SEQ ID NO: 23774 - DNA, 17 bp, Arabidopsis thaliana
acggtttagtttagcag

SEQ ID NO: 23775 - DNA, 17 bp, Arabidopsis thaliana
acggtttatgctcaaag

SEQ ID NO: 23776 - DNA, 17 bp, Arabidopsis thaliana
acggtttatgggttgag

SEQ ID NO: 23777 - DNA, 17 bp, Arabidopsis thaliana
acggtttcacctacgtt

SEQ ID NO: 23778 - DNA, 17 bp, Arabidopsis thaliana
acggtttcacgggcttg

SEQ ID NO: 23779 - DNA, 17 bp, Arabidopsis thaliana
acggtttcagatctaaa

SEQ ID NO: 23780 - DNA, 17 bp, Arabidopsis thaliana
acggtttcaggaatgca

SEQ ID NO: 23781 - DNA, 17 bp, Arabidopsis thaliana
acggtttcagtgacttc

SEQ ID NO: 23782 - DNA, 17 bp, Arabidopsis thaliana
acggtttccgagatgtg

SEQ ID NO: 23783 - DNA, 17 bp, Arabidopsis thaliana
acggtttcgacaatcac

SEQ ID NO: 23784 - DNA, 17 bp, Arabidopsis thaliana
acggtttcgcctctgat

SEQ ID NO: 23785 - DNA, 17 bp, Arabidopsis thaliana
acggtttcggggattac

SEQ ID NO: 23786 - DNA, 17 bp, Arabidopsis thaliana
acggtttctcggaatgt

SEQ ID NO: 23787 - DNA, 17 bp, Arabidopsis thaliana
acggtttctctgttggg

SEQ ID NO: 23788 - DNA, 17 bp, Arabidopsis thaliana
acggtttctctgttggt

SEQ ID NO: 23789 - DNA, 17 bp, Arabidopsis thaliana
acggtttctgtgtgatt

SEQ ID NO: 23790 - DNA, 17 bp, Arabidopsis thaliana
acggtttgatgatcgag

SEQ ID NO: 23791 - DNA, 17 bp, Arabidopsis thaliana
acggtttgattcgtaca

SEQ ID NO: 23792 - DNA, 17 bp, Arabidopsis thaliana
acggtttgccacttttc

SEQ ID NO: 23793 - DNA, 17 bp, Arabidopsis thaliana
acggtttgcgggagttt

SEQ ID NO: 23794 - DNA, 17 bp, Arabidopsis thaliana
acggtttgctaattctc

SEQ ID NO: 23795 - DNA, 17 bp, Arabidopsis thaliana
acggtttgctgcttata

SEQ ID NO: 23796 - DNA, 17 bp, Arabidopsis thaliana
acggtttggagttcctt

SEQ ID NO: 23797 - DNA, 17 bp, Arabidopsis thaliana
acggtttggtttcggac

SEQ ID NO: 23798 - DNA, 17 bp, Arabidopsis thaliana
acggtttgtcgaatgat

SEQ ID NO: 23799 - DNA, 17 bp, Arabidopsis thaliana
acggttttaggtacggt

SEQ ID NO: 23800 - DNA, 17 bp, Arabidopsis thaliana
acggttttatccgcctc

SEQ ID NO: 23801 - DNA, 17 bp, Arabidopsis thaliana
acggttttcactcggca

SEQ ID NO: 23802 - DNA, 17 bp, Arabidopsis thaliana
acggttttgacgattac

SEQ ID NO: 23803 - DNA, 17 bp, Arabidopsis thaliana
acggttttgacgggaaa

SEQ ID NO: 23804 - DNA, 17 bp, Arabidopsis thaliana
acggttttgacgggaag

SEQ ID NO: 23805 - DNA, 17 bp, Arabidopsis thaliana
acggttttgagtgcggt

SEQ ID NO: 23806 - DNA, 17 bp, Arabidopsis thaliana
acggttttgccactggt

SEQ ID NO: 23807 - DNA, 17 bp, Arabidopsis thaliana
acggttttgcgactaaa

SEQ ID NO: 23808 - DNA, 17 bp, Arabidopsis thaliana
acggttttgcggaaaaa

SEQ ID NO: 23809 - DNA, 17 bp, Arabidopsis thaliana
acggttttggcgggaaa

SEQ ID NO: 23810 - DNA, 17 bp, Arabidopsis thaliana
acggttttgggggcggg

SEQ ID NO: 23811 - DNA, 17 bp, Arabidopsis thaliana
acggttttggtttggat

SEQ ID NO: 23812 - DNA, 17 bp, Arabidopsis thaliana
acggttttgtccgcttg

SEQ ID NO: 23813 - DNA, 17 bp, Arabidopsis thaliana
acggttttgtctaacgg

SEQ ID NO: 23814 - DNA, 17 bp, Arabidopsis thaliana
acggttttgtgcgcttg

SEQ ID NO: 23815 - DNA, 17 bp, Arabidopsis thaliana
acggtttttggcgtatc

SEQ ID NO: 23816 - DNA, 17 bp, Arabidopsis thaliana
acggtttttttgccaag

SEQ ID NO: 23817 - DNA, 17 bp, Arabidopsis thaliana
acggtttttttttgcca

SEQ ID NO: 23818 - DNA, 17 bp, Arabidopsis thaliana
acgtaaacccgtgattt

SEQ ID NO: 23819 - DNA, 17 bp, Arabidopsis thaliana
acgtaaacctgtaattt

SEQ ID NO: 23820 - DNA, 17 bp, Arabidopsis thaliana
acgtaaacctgtgattt

SEQ ID NO: 23821 - DNA, 17 bp, Arabidopsis thaliana
acgtaaacttttaggtc

SEQ ID NO: 23822 - DNA, 17 bp, Arabidopsis thaliana
acgtaaccaaatgttcg

SEQ ID NO: 23823 - DNA, 17 bp, Arabidopsis thaliana
acgtaagaccatgccca

SEQ ID NO: 23824 - DNA, 17 bp, Arabidopsis thaliana
acgtaagcccgtgattt

SEQ ID NO: 23825 - DNA, 17 bp, Arabidopsis thaliana
acgtaagtcatgcggtg

SEQ ID NO: 23826 - DNA, 17 bp, Arabidopsis thaliana
acgtaagttctttgtgt

SEQ ID NO: 23827 - DNA, 17 bp, Arabidopsis thaliana
acgtaatgcgggtactc

SEQ ID NO: 23828 - DNA, 17 bp, Arabidopsis thaliana
acgtaattggctgcgtg

SEQ ID NO: 23829 - DNA, 17 bp, Arabidopsis thaliana
acgtacaatagatgggt

SEQ ID NO: 23830 - DNA, 17 bp, Arabidopsis thaliana
acgtacaccgtcgactg

SEQ ID NO: 23831 - DNA, 17 bp, Arabidopsis thaliana
acgtacaccgtcgggtt

SEQ ID NO: 23832 - DNA, 17 bp, Arabidopsis thaliana
acgtacactgttccggt

SEQ ID NO: 23833 - DNA, 17 bp, Arabidopsis thaliana
acgtacagcggtccaag

SEQ ID NO: 23834 - DNA, 17 bp, Arabidopsis thaliana
acgtacattgacgggtt

SEQ ID NO: 23835 - DNA, 17 bp, Arabidopsis thaliana
acgtaccgccaacgacc

SEQ ID NO: 23836 - DNA, 17 bp, Arabidopsis thaliana
acgtacggaccgcatcg

SEQ ID NO: 23837 - DNA, 17 bp, Arabidopsis thaliana
acgtacgtttcgtattg

SEQ ID NO: 23838 - DNA, 17 bp, Arabidopsis thaliana
acgtactagataaggcc

SEQ ID NO: 23839 - DNA, 17 bp, Arabidopsis thaliana
acgtagaccaaaatgtg

SEQ ID NO: 23840 - DNA, 17 bp, Arabidopsis thaliana
acgtagcgggtgcggtt

SEQ ID NO: 23841 - DNA, 17 bp, Arabidopsis thaliana
acgtagcgggtgggacc

SEQ ID NO: 23842 - DNA, 17 bp, Arabidopsis thaliana
acgtaggcgtaggcatg

SEQ ID NO: 23843 - DNA, 17 bp, Arabidopsis thaliana
acgtaggtgaacctgcg

SEQ ID NO: 23844 - DNA, 17 bp, Arabidopsis thaliana
acgtaggtttgcttctt

SEQ ID NO: 23845 - DNA, 17 bp, Arabidopsis thaliana
acgtagtcaccattcgg

SEQ ID NO: 23846 - DNA, 17 bp, Arabidopsis thaliana
acgtagttcaccgtcat

SEQ ID NO: 23847 - DNA, 17 bp, Arabidopsis thaliana
acgtagtttgcaaagtc

SEQ ID NO: 23848 - DNA, 17 bp, Arabidopsis thaliana
acgtatcaggcggatca

SEQ ID NO: 23849 - DNA, 17 bp, Arabidopsis thaliana
acgtatcgcatgtgaat

SEQ ID NO: 23850 - DNA, 17 bp, Arabidopsis thaliana
acgtatgcaggaaacac

SEQ ID NO: 23851 - DNA, 17 bp, Arabidopsis thaliana
acgtatgcctgctacag

SEQ ID NO: 23852 - DNA, 17 bp, Arabidopsis thaliana
acgtatgtcacataatg

SEQ ID NO: 23853 - DNA, 17 bp, Arabidopsis thaliana
acgtatgtctgccactt

SEQ ID NO: 23854 - DNA, 17 bp, Arabidopsis thaliana
acgtatgtgcggatcag

SEQ ID NO: 23855 - DNA, 17 bp, Arabidopsis thaliana
acgtatgtgcgggtcaa

SEQ ID NO: 23856 - DNA, 17 bp, Arabidopsis thaliana
acgtatgtgcgggtcag

SEQ ID NO: 23857 - DNA, 17 bp, Arabidopsis thaliana
acgtattatgcaccttc

SEQ ID NO: 23858 - DNA, 17 bp, Arabidopsis thaliana
acgtattctgcaccctc

SEQ ID NO: 23859 - DNA, 17 bp, Arabidopsis thaliana
acgtatttaggtgcgtt

SEQ ID NO: 23860 - DNA, 17 bp, Arabidopsis thaliana
acgtatttgaggagcgc

SEQ ID NO: 23861 - DNA, 17 bp, Arabidopsis thaliana
acgtcaagtgcggcttg

SEQ ID NO: 23862 - DNA, 17 bp, Arabidopsis thaliana
acgtcaatacattcgcc

SEQ ID NO: 23863 - DNA, 17 bp, Arabidopsis thaliana
acgtcacacacaccctc

SEQ ID NO: 23864 - DNA, 17 bp, Arabidopsis thaliana
acgtcacaggcagttac

SEQ ID NO: 23865 - DNA, 17 bp, Arabidopsis thaliana
acgtcactacaaactcc

SEQ ID NO: 23866 - DNA, 17 bp, Arabidopsis thaliana
acgtcactcgaatcggc

SEQ ID NO: 23867 - DNA, 17 bp, Arabidopsis thaliana
acgtcactgcaaactcc

SEQ ID NO: 23868 - DNA, 17 bp, Arabidopsis thaliana
acgtcactgctctatct

SEQ ID NO: 23869 - DNA, 17 bp, Arabidopsis thaliana
acgtcagccctttgtcg

SEQ ID NO: 23870 - DNA, 17 bp, Arabidopsis thaliana
acgtcagccttttgtcg

SEQ ID NO: 23871 - DNA, 17 bp, Arabidopsis thaliana
acgtcagctgttgcgct

SEQ ID NO: 23872 - DNA, 17 bp, Arabidopsis thaliana
acgtcaggtgcgtttgt

SEQ ID NO: 23873 - DNA, 17 bp, Arabidopsis thaliana
acgtcagtgtcaaagcg

SEQ ID NO: 23874 - DNA, 17 bp, Arabidopsis thaliana
acgtcagtgttcttcgt

SEQ ID NO: 23875 - DNA, 17 bp, Arabidopsis thaliana
acgtcataggatcgtgc

SEQ ID NO: 23876 - DNA, 17 bp, Arabidopsis thaliana
acgtcatcagccgagta

SEQ ID NO: 23877 - DNA, 17 bp, Arabidopsis thaliana
acgtcatcagctcgcgt

SEQ ID NO: 23878 - DNA, 17 bp, Arabidopsis thaliana
acgtcatcgatacacgg

SEQ ID NO: 23879 - DNA, 17 bp, Arabidopsis thaliana
acgtcatcgctatacgg

SEQ ID NO: 23880 - DNA, 17 bp, Arabidopsis thaliana
acgtcatctggtattcg

SEQ ID NO: 23881 - DNA, 17 bp, Arabidopsis thaliana
acgtcatgatcctgcga

SEQ ID NO: 23882 - DNA, 17 bp, Arabidopsis thaliana
acgtcatgatgaattta

SEQ ID NO: 23883 - DNA, 17 bp, Arabidopsis thaliana
acgtcatggctgaccca

SEQ ID NO: 23884 - DNA, 17 bp, Arabidopsis thaliana
acgtcatggctgcccaa

SEQ ID NO: 23885 - DNA, 17 bp, Arabidopsis thaliana
acgtcatggttgctcgc

SEQ ID NO: 23886 - DNA, 17 bp, Arabidopsis thaliana
acgtcatggttggtcgc

SEQ ID NO: 23887 - DNA, 17 bp, Arabidopsis thaliana
acgtcatgtagattttg

SEQ ID NO: 23888 - DNA, 17 bp, Arabidopsis thaliana
acgtcatgttcgcagtt

SEQ ID NO: 23889 - DNA, 17 bp, Arabidopsis thaliana
acgtcattccgggagaa

SEQ ID NO: 23890 - DNA, 17 bp, Arabidopsis thaliana
acgtcattcgaatcggc

SEQ ID NO: 23891 - DNA, 17 bp, Arabidopsis thaliana
acgtcattgatacacgg

SEQ ID NO: 23892 - DNA, 17 bp, Arabidopsis thaliana
acgtccaaggtatgcat

SEQ ID NO: 23893 - DNA, 17 bp, Arabidopsis thaliana
acgtccagcgtcagcga

SEQ ID NO: 23894 - DNA, 17 bp, Arabidopsis thaliana
acgtccagggactaata

SEQ ID NO: 23895 - DNA, 17 bp, Arabidopsis thaliana
acgtccagtcgatgaaa

SEQ ID NO: 23896 - DNA, 17 bp, Arabidopsis thaliana
acgtcccctgtatgaaa

SEQ ID NO: 23897 - DNA, 17 bp, Arabidopsis thaliana
acgtccctctctgttgg

SEQ ID NO: 23898 - DNA, 17 bp, Arabidopsis thaliana
acgtccctcttggcacc

SEQ ID NO: 23899 - DNA, 17 bp, Arabidopsis thaliana
acgtccctgccctttgt

SEQ ID NO: 23900 - DNA, 17 bp, Arabidopsis thaliana
acgtccctgcccttttt

SEQ ID NO: 23901 - DNA, 17 bp, Arabidopsis thaliana
acgtccctgcctttgta

SEQ ID NO: 23902 - DNA, 17 bp, Arabidopsis thaliana
acgtccctgcttttgta

SEQ ID NO: 23903 - DNA, 17 bp, Arabidopsis thaliana
acgtccctgggtgccac

SEQ ID NO: 23904 - DNA, 17 bp, Arabidopsis thaliana
acgtccctgggtgtcac

SEQ ID NO: 23905 - DNA, 17 bp, Arabidopsis thaliana
acgtccgcctgggtgtc

SEQ ID NO: 23906 - DNA, 17 bp, Arabidopsis thaliana
acgtccggagacgtcgg

SEQ ID NO: 23907 - DNA, 17 bp, Arabidopsis thaliana
acgtccggggggtgtgt

SEQ ID NO: 23908 - DNA, 17 bp, Arabidopsis thaliana
acgtccgtaggctgcct

SEQ ID NO: 23909 - DNA, 17 bp, Arabidopsis thaliana
acgtccgtccgttatca

SEQ ID NO: 23910 - DNA, 17 bp, Arabidopsis thaliana
acgtcctactagatgtt

SEQ ID NO: 23911 - DNA, 17 bp, Arabidopsis thaliana
acgtcctattgtgttga

SEQ ID NO: 23912 - DNA, 17 bp, Arabidopsis thaliana
acgtcctcagatcacga

SEQ ID NO: 23913 - DNA, 17 bp, Arabidopsis thaliana
acgtcctcagcgacgga

SEQ ID NO: 23914 - DNA, 17 bp, Arabidopsis thaliana
acgtcctctaattccta

SEQ ID NO: 23915 - DNA, 17 bp, Arabidopsis thaliana
acgtcctctctcaggcc

SEQ ID NO: 23916 - DNA, 17 bp, Arabidopsis thaliana
acgtcctcttaaattcg

SEQ ID NO: 23917 - DNA, 17 bp, Arabidopsis thaliana
acgtcctcttctcctcg

SEQ ID NO: 23918 - DNA, 17 bp, Arabidopsis thaliana
acgtcctgccaaaccca

SEQ ID NO: 23919 - DNA, 17 bp, Arabidopsis thaliana
acgtcctgccaaacccg

SEQ ID NO: 23920 - DNA, 17 bp, Arabidopsis thaliana
acgtcctgccaaacctg

SEQ ID NO: 23921 - DNA, 17 bp, Arabidopsis thaliana
acgtcctgccaaactcg

SEQ ID NO: 23922 - DNA, 17 bp, Arabidopsis thaliana
acgtcctgccggggtag

SEQ ID NO: 23923 - DNA, 17 bp, Arabidopsis thaliana
acgtcctgctaaacccg

SEQ ID NO: 23924 - DNA, 17 bp, Arabidopsis thaliana
acgtcctgctaaatcgc

SEQ ID NO: 23925 - DNA, 17 bp, Arabidopsis thaliana
acgtcctggctcgtcga

SEQ ID NO: 23926 - DNA, 17 bp, Arabidopsis thaliana
acgtccttccgggaggc

SEQ ID NO: 23927 - DNA, 17 bp, Arabidopsis thaliana
acgtccttctaaacccg

SEQ ID NO: 23928 - DNA, 17 bp, Arabidopsis thaliana
acgtcgaaaactaaccg

SEQ ID NO: 23929 - DNA, 17 bp, Arabidopsis thaliana
acgtcgacaagtatgga

SEQ ID NO: 23930 - DNA, 17 bp, Arabidopsis thaliana
acgtcgacgacagtttg

SEQ ID NO: 23931 - DNA, 17 bp, Arabidopsis thaliana
acgtcgagtatgagcct

SEQ ID NO: 23932 - DNA, 17 bp, Arabidopsis thaliana
acgtcgatttggatgat

SEQ ID NO: 23933 - DNA, 17 bp, Arabidopsis thaliana
acgtcgcagggtttttg

SEQ ID NO: 23934 - DNA, 17 bp, Arabidopsis thaliana
acgtcgcaggtttttgg

SEQ ID NO: 23935 - DNA, 17 bp, Arabidopsis thaliana
acgtcgcaggttttttg

SEQ ID NO: 23936 - DNA, 17 bp, Arabidopsis thaliana
acgtcgccttggccgag

SEQ ID NO: 23937 - DNA, 17 bp, Arabidopsis thaliana
acgtcgcgagaagtcca

SEQ ID NO: 23938 - DNA, 17 bp, Arabidopsis thaliana
acgtcgcggtgttttag

SEQ ID NO: 23939 - DNA, 17 bp, Arabidopsis thaliana
acgtcgcggtgtttttg

SEQ ID NO: 23940 - DNA, 17 bp, Arabidopsis thaliana
acgtcgcggttttttcg

SEQ ID NO: 23941 - DNA, 17 bp, Arabidopsis thaliana
acgtcgcgtggtgtccg

SEQ ID NO: 23942 - DNA, 17 bp, Arabidopsis thaliana
acgtcgctatgaacgct

SEQ ID NO: 23943 - DNA, 17 bp, Arabidopsis thaliana
acgtcgctatgtgttct

SEQ ID NO: 23944 - DNA, 17 bp, Arabidopsis thaliana
acgtcgctgccgtgatc

SEQ ID NO: 23945 - DNA, 17 bp, Arabidopsis thaliana
acgtcgctgtcgtgatc

SEQ ID NO: 23946 - DNA, 17 bp, Arabidopsis thaliana
acgtcgctttggccgag

SEQ ID NO: 23947 - DNA, 17 bp, Arabidopsis thaliana
acgtcggaatcggtggc

SEQ ID NO: 23948 - DNA, 17 bp, Arabidopsis thaliana
acgtcggagagcaggag

SEQ ID NO: 23949 - DNA, 17 bp, Arabidopsis thaliana
acgtcggagagtaggtt

SEQ ID NO: 23950 - DNA, 17 bp, Arabidopsis thaliana
acgtcggagatctcgtt

SEQ ID NO: 23951 - DNA, 17 bp, Arabidopsis thaliana
acgtcggatgaaacttt

SEQ ID NO: 23952 - DNA, 17 bp, Arabidopsis thaliana
acgtcggcaattgtaga

SEQ ID NO: 23953 - DNA, 17 bp, Arabidopsis thaliana
acgtcggccgagtatca

SEQ ID NO: 23954 - DNA, 17 bp, Arabidopsis thaliana
acgtcggccggttgttt

SEQ ID NO: 23955 - DNA, 17 bp, Arabidopsis thaliana
acgtcggcttgatttga

SEQ ID NO: 23956 - DNA, 17 bp, Arabidopsis thaliana
acgtcggcttgtccctt

SEQ ID NO: 23957 - DNA, 17 bp, Arabidopsis thaliana
acgtcggtgaacttctt

SEQ ID NO: 23958 - DNA, 17 bp, Arabidopsis thaliana
acgtcggttcccgaatg

SEQ ID NO: 23959 - DNA, 17 bp, Arabidopsis thaliana
acgtcggtttgttacag

SEQ ID NO: 23960 - DNA, 17 bp, Arabidopsis thaliana
acgtcgtcaatgatgtt

SEQ ID NO: 23961 - DNA, 17 bp, Arabidopsis thaliana
acgtcgtccagcggtta

SEQ ID NO: 23962 - DNA, 17 bp, Arabidopsis thaliana
acgtcgtctccgctttc

SEQ ID NO: 23963 - DNA, 17 bp, Arabidopsis thaliana
acgtcgtctcggtcgat

SEQ ID NO: 23964 - DNA, 17 bp, Arabidopsis thaliana
acgtcgtcttcgtggtc

SEQ ID NO: 23965 - DNA, 17 bp, Arabidopsis thaliana
acgtcgtcttcgttggt

SEQ ID NO: 23966 - DNA, 17 bp, Arabidopsis thaliana
acgtcgtgagacagttc

SEQ ID NO: 23967 - DNA, 17 bp, Arabidopsis thaliana
acgtcgtgcaatgtgat

SEQ ID NO: 23968 - DNA, 17 bp, Arabidopsis thaliana
acgtcgtggagattttg

SEQ ID NO: 23969 - DNA, 17 bp, Arabidopsis thaliana
acgtcgtgtagattttg

SEQ ID NO: 23970 - DNA, 17 bp, Arabidopsis thaliana
acgtcgtgtggattgat

SEQ ID NO: 23971 - DNA, 17 bp, Arabidopsis thaliana
acgtcgtgtggattttg

SEQ ID NO: 23972 - DNA, 17 bp, Arabidopsis thaliana
acgtcgttaacaaccat

SEQ ID NO: 23973 - DNA, 17 bp, Arabidopsis thaliana
acgtcgttccccggcaa

SEQ ID NO: 23974 - DNA, 17 bp, Arabidopsis thaliana
acgtcgttctgactcgt

SEQ ID NO: 23975 - DNA, 17 bp, Arabidopsis thaliana
acgtcgttttccagtca

SEQ ID NO: 23976 - DNA, 17 bp, Arabidopsis thaliana
acgtctaaatatgtggg

SEQ ID NO: 23977 - DNA, 17 bp, Arabidopsis thaliana
acgtctacaaaaaagtt

SEQ ID NO: 23978 - DNA, 17 bp, Arabidopsis thaliana
acgtctacagttctgtg

SEQ ID NO: 23979 - DNA, 17 bp, Arabidopsis thaliana
acgtctaccggatgaat

SEQ ID NO: 23980 - DNA, 17 bp, Arabidopsis thaliana
acgtctacctgggtgtc

SEQ ID NO: 23981 - DNA, 17 bp, Arabidopsis thaliana
acgtctacctgttgact

SEQ ID NO: 23982 - DNA, 17 bp, Arabidopsis thaliana
acgtctactcgctttgt

SEQ ID NO: 23983 - DNA, 17 bp, Arabidopsis thaliana
acgtctagaacgattat

SEQ ID NO: 23984 - DNA, 17 bp, Arabidopsis thaliana
acgtctatcggttatat

SEQ ID NO: 23985 - DNA, 17 bp, Arabidopsis thaliana
acgtctatcggttattt

SEQ ID NO: 23986 - DNA, 17 bp, Arabidopsis thaliana
acgtctatgcttgcggg

SEQ ID NO: 23987 - DNA, 17 bp, Arabidopsis thaliana
acgtctatggtgtagtg

SEQ ID NO: 23988 - DNA, 17 bp, Arabidopsis thaliana
acgtctattccaacgtc

SEQ ID NO: 23989 - DNA, 17 bp, Arabidopsis thaliana
acgtctccagctgtggt

SEQ ID NO: 23990 - DNA, 17 bp, Arabidopsis thaliana
acgtctccagctttggt

SEQ ID NO: 23991 - DNA, 17 bp, Arabidopsis thaliana
acgtctccattcagagc

SEQ ID NO: 23992 - DNA, 17 bp, Arabidopsis thaliana
acgtctccctgggtgtc

SEQ ID NO: 23993 - DNA, 17 bp, Arabidopsis thaliana
acgtctcctcgagatga

SEQ ID NO: 23994 - DNA, 17 bp, Arabidopsis thaliana
acgtctcctgggtgtca

SEQ ID NO: 23995 - DNA, 17 bp, Arabidopsis thaliana
acgtctcgaatgaccat

SEQ ID NO: 23996 - DNA, 17 bp, Arabidopsis thaliana
acgtctcggctgctttg

SEQ ID NO: 23997 - DNA, 17 bp, Arabidopsis thaliana
acgtctcgggattttgg

SEQ ID NO: 23998 - DNA, 17 bp, Arabidopsis thaliana
acgtctcggggattttg

SEQ ID NO: 23999 - DNA, 17 bp, Arabidopsis thaliana
acgtctctaactgtcca

SEQ ID NO: 24000 - DNA, 17 bp, Arabidopsis thaliana
acgtctctaggttcgtc

SEQ ID NO: 24001 - DNA, 17 bp, Arabidopsis thaliana
acgtctctgccttggat

SEQ ID NO: 24002 - DNA, 17 bp, Arabidopsis thaliana
acgtctctgcttggttt

SEQ ID NO: 24003 - DNA, 17 bp, Arabidopsis thaliana
acgtctgaactctcaaa

SEQ ID NO: 24004 - DNA, 17 bp, Arabidopsis thaliana
acgtctgaccactcaag

SEQ ID NO: 24005 - DNA, 17 bp, Arabidopsis thaliana
acgtctgcatatgctag

SEQ ID NO: 24006 - DNA, 17 bp, Arabidopsis thaliana
acgtctgcctaggtgtc

SEQ ID NO: 24007 - DNA, 17 bp, Arabidopsis thaliana
acgtctgcctcggtgtc

SEQ ID NO: 24008 - DNA, 17 bp, Arabidopsis thaliana
acgtctgcctgcctgcc

SEQ ID NO: 24009 - DNA, 17 bp, Arabidopsis thaliana
acgtctgcctgcctgtc

SEQ ID NO: 24010 - DNA, 17 bp, Arabidopsis thaliana
acgtctgcctgcgtgtc

SEQ ID NO: 24011 - DNA, 17 bp, Arabidopsis thaliana
acgtctgcctggctgcc

SEQ ID NO: 24012 - DNA, 17 bp, Arabidopsis thaliana
acgtctgcctggctggc

SEQ ID NO: 24013 - DNA, 17 bp, Arabidopsis thaliana
acgtctgcctggctgtc

SEQ ID NO: 24014 - DNA, 17 bp, Arabidopsis thaliana
acgtctgcctgggtatc

SEQ ID NO: 24015 - DNA, 17 bp, Arabidopsis thaliana
acgtctgcctgggtgcc

SEQ ID NO: 24016 - DNA, 17 bp, Arabidopsis thaliana
acgtctgcctgggtggc

SEQ ID NO: 24017 - DNA, 17 bp, Arabidopsis thaliana
acgtctgcctgggtgtc

SEQ ID NO: 24018 - DNA, 17 bp, Arabidopsis thaliana
acgtctgcctgggtgtt

SEQ ID NO: 24019 - DNA, 17 bp, Arabidopsis thaliana
acgtctgcctgggtttc

SEQ ID NO: 24020 - DNA, 17 bp, Arabidopsis thaliana
acgtctgcctggttgtc

SEQ ID NO: 24021 - DNA, 17 bp, Arabidopsis thaliana
acgtctgccttgggtgt

SEQ ID NO: 24022 - DNA, 17 bp, Arabidopsis thaliana
acgtctgccttggtgtc

SEQ ID NO: 24023 - DNA, 17 bp, Arabidopsis thaliana
acgtctgcggtttagtc

SEQ ID NO: 24024 - DNA, 17 bp, Arabidopsis thaliana
acgtctgctcatccttg

SEQ ID NO: 24025 - DNA, 17 bp, Arabidopsis thaliana
acgtctgctgggtggct

SEQ ID NO: 24026 - DNA, 17 bp, Arabidopsis thaliana
acgtctgctgggtgtca

SEQ ID NO: 24027 - DNA, 17 bp, Arabidopsis thaliana
acgtctgcttgggtgtc

SEQ ID NO: 24028 - DNA, 17 bp, Arabidopsis thaliana
acgtctggactctgact

SEQ ID NO: 24029 - DNA, 17 bp, Arabidopsis thaliana
acgtctgtagtccaacg

SEQ ID NO: 24030 - DNA, 17 bp, Arabidopsis thaliana
acgtctgtcaggtaagt

SEQ ID NO: 24031 - DNA, 17 bp, Arabidopsis thaliana
acgtctgtctgggtgtc

SEQ ID NO: 24032 - DNA, 17 bp, Arabidopsis thaliana
acgtctgttgcaaaagg

SEQ ID NO: 24033 - DNA, 17 bp, Arabidopsis thaliana
acgtctgtttgacgatt

SEQ ID NO: 24034 - DNA, 17 bp, Arabidopsis thaliana
acgtcttaaccgcgtaa

SEQ ID NO: 24035 - DNA, 17 bp, Arabidopsis thaliana
acgtcttagagcaaatc

SEQ ID NO: 24036 - DNA, 17 bp, Arabidopsis thaliana
acgtcttagccctaatt

SEQ ID NO: 24037 - DNA, 17 bp, Arabidopsis thaliana
acgtcttagtcggttcc

SEQ ID NO: 24038 - DNA, 17 bp, Arabidopsis thaliana
acgtcttcagcgttcga

SEQ ID NO: 24039 - DNA, 17 bp, Arabidopsis thaliana
acgtcttccacaacctc

SEQ ID NO: 24040 - DNA, 17 bp, Arabidopsis thaliana
acgtcttcggcgttcga

SEQ ID NO: 24041 - DNA, 17 bp, Arabidopsis thaliana
acgtcttcggcgttcta

SEQ ID NO: 24042 - DNA, 17 bp, Arabidopsis thaliana
acgtcttgaacgggctt

SEQ ID NO: 24043 - DNA, 17 bp, Arabidopsis thaliana
acgtcttgccgattctc

SEQ ID NO: 24044 - DNA, 17 bp, Arabidopsis thaliana
acgtcttgcggctttcc

SEQ ID NO: 24045 - DNA, 17 bp, Arabidopsis thaliana
acgtcttggaaatggag

SEQ ID NO: 24046 - DNA, 17 bp, Arabidopsis thaliana
acgtcttgggattttgg

SEQ ID NO: 24047 - DNA, 17 bp, Arabidopsis thaliana
acgtcttgggtgtcaca

SEQ ID NO: 24048 - DNA, 17 bp, Arabidopsis thaliana
acgtcttggtagtggat

SEQ ID NO: 24049 - DNA, 17 bp, Arabidopsis thaliana
acgtctttaagatccgg

SEQ ID NO: 24050 - DNA, 17 bp, Arabidopsis thaliana
acgtctttaagatctgg

SEQ ID NO: 24051 - DNA, 17 bp, Arabidopsis thaliana
acgtctttaagattcgg

SEQ ID NO: 24052 - DNA, 17 bp, Arabidopsis thaliana
acgtcttttggacgctg

SEQ ID NO: 24053 - DNA, 17 bp, Arabidopsis thaliana
acgtcttttggtattcg

SEQ ID NO: 24054 - DNA, 17 bp, Arabidopsis thaliana
acgtgaaaacagagttc

SEQ ID NO: 24055 - DNA, 17 bp, Arabidopsis thaliana
acgtgaaacccttcctg

SEQ ID NO: 24056 - DNA, 17 bp, Arabidopsis thaliana
acgtgaaagaagacgac

SEQ ID NO: 24057 - DNA, 17 bp, Arabidopsis thaliana
acgtgaacccgtaattt

SEQ ID NO: 24058 - DNA, 17 bp, Arabidopsis thaliana
acgtgaactctgacgtc

SEQ ID NO: 24059 - DNA, 17 bp, Arabidopsis thaliana
acgtgaacttcgtatgt

SEQ ID NO: 24060 - DNA, 17 bp, Arabidopsis thaliana
acgtgaacttcttgtgt

SEQ ID NO: 24061 - DNA, 17 bp, Arabidopsis thaliana
acgtgaagtttagaagt

SEQ ID NO: 24062 - DNA, 17 bp, Arabidopsis thaliana
acgtgaattcgttcccg

SEQ ID NO: 24063 - DNA, 17 bp, Arabidopsis thaliana
acgtgacacgatcctac

SEQ ID NO: 24064 - DNA, 17 bp, Arabidopsis thaliana
acgtgacacgatcctat

SEQ ID NO: 24065 - DNA, 17 bp, Arabidopsis thaliana
acgtgacatcctcagat

SEQ ID NO: 24066 - DNA, 17 bp, Arabidopsis thaliana
acgtgacatgatgcggt

SEQ ID NO: 24067 - DNA, 17 bp, Arabidopsis thaliana
acgtgaccatatggaca

SEQ ID NO: 24068 - DNA, 17 bp, Arabidopsis thaliana
acgtgacgcttccggat

SEQ ID NO: 24069 - DNA, 17 bp, Arabidopsis thaliana
acgtgacgggttagcag

SEQ ID NO: 24070 - DNA, 17 bp, Arabidopsis thaliana
acgtgacgggttggcga

SEQ ID NO: 24071 - DNA, 17 bp, Arabidopsis thaliana
acgtgacgggttggcgg

SEQ ID NO: 24072 - DNA, 17 bp, Arabidopsis thaliana
acgtgactattggtgca

SEQ ID NO: 24073 - DNA, 17 bp, Arabidopsis thaliana
acgtgacttgactctgt

SEQ ID NO: 24074 - DNA, 17 bp, Arabidopsis thaliana
acgtgagcactttagac

SEQ ID NO: 24075 - DNA, 17 bp, Arabidopsis thaliana
acgtgagcctttgagac

SEQ ID NO: 24076 - DNA, 17 bp, Arabidopsis thaliana
acgtgagctgggattag

SEQ ID NO: 24077 - DNA, 17 bp, Arabidopsis thaliana
acgtgagctggggttag

SEQ ID NO: 24078 - DNA, 17 bp, Arabidopsis thaliana
acgtgagctgggttaga

SEQ ID NO: 24079 - DNA, 17 bp, Arabidopsis thaliana
acgtgagctgggtttag

SEQ ID NO: 24080 - DNA, 17 bp, Arabidopsis thaliana
acgtgagctgggttttg

SEQ ID NO: 24081 - DNA, 17 bp, Arabidopsis thaliana
acgtgagctggtgtgag

SEQ ID NO: 24082 - DNA, 17 bp, Arabidopsis thaliana
acgtgaggaattgagtg

SEQ ID NO: 24083 - DNA, 17 bp, Arabidopsis thaliana
acgtgagtatgaccggt

SEQ ID NO: 24084 - DNA, 17 bp, Arabidopsis thaliana
acgtgataaatttccga

SEQ ID NO: 24085 - DNA, 17 bp, Arabidopsis thaliana
acgtgatatcctctgat

SEQ ID NO: 24086 - DNA, 17 bp, Arabidopsis thaliana
acgtgatattggtccgt

SEQ ID NO: 24087 - DNA, 17 bp, Arabidopsis thaliana
acgtgatccgacccgaa

SEQ ID NO: 24088 - DNA, 17 bp, Arabidopsis thaliana
acgtgatcgctggtcgc

SEQ ID NO: 24089 - DNA, 17 bp, Arabidopsis thaliana
acgtgatggatatgagc

SEQ ID NO: 24090 - DNA, 17 bp, Arabidopsis thaliana
acgtgatggtccaagac

SEQ ID NO: 24091 - DNA, 17 bp, Arabidopsis thaliana
acgtgatggtggctcgc

SEQ ID NO: 24092 - DNA, 17 bp, Arabidopsis thaliana
acgtgattggagtccaa

SEQ ID NO: 24093 - DNA, 17 bp, Arabidopsis thaliana
acgtgattttatgattt

SEQ ID NO: 24094 - DNA, 17 bp, Arabidopsis thaliana
acgtgccaaccggttat

SEQ ID NO: 24095 - DNA, 17 bp, Arabidopsis thaliana
acgtgccagaccgcttt

SEQ ID NO: 24096 - DNA, 17 bp, Arabidopsis thaliana
acgtgcccggaccctgt

SEQ ID NO: 24097 - DNA, 17 bp, Arabidopsis thaliana
acgtgccgctggatcac

SEQ ID NO: 24098 - DNA, 17 bp, Arabidopsis thaliana
acgtgcctcgaacccac

SEQ ID NO: 24099 - DNA, 17 bp, Arabidopsis thaliana
acgtgcctcgaacccag

SEQ ID NO: 24100 - DNA, 17 bp, Arabidopsis thaliana
acgtgcgactgtgttct

SEQ ID NO: 24101 - DNA, 17 bp, Arabidopsis thaliana
acgtgcgagattgttaa

SEQ ID NO: 24102 - DNA, 17 bp, Arabidopsis thaliana
acgtgcgggtcagaatc

SEQ ID NO: 24103 - DNA, 17 bp, Arabidopsis thaliana
acgtgcgggtttacata

SEQ ID NO: 24104 - DNA, 17 bp, Arabidopsis thaliana
acgtgcgggtttatgtg

SEQ ID NO: 24105 - DNA, 17 bp, Arabidopsis thaliana
acgtgcggtgctcttcc

SEQ ID NO: 24106 - DNA, 17 bp, Arabidopsis thaliana
acgtgcggttgcggggg

SEQ ID NO: 24107 - DNA, 17 bp, Arabidopsis thaliana
acgtgcgtgttgtcttg

SEQ ID NO: 24108 - DNA, 17 bp, Arabidopsis thaliana
acgtgctaaaaaaagtc

SEQ ID NO: 24109 - DNA, 17 bp, Arabidopsis thaliana
acgtgctacaatggccg

SEQ ID NO: 24110 - DNA, 17 bp, Arabidopsis thaliana
acgtgctactgtgttct

SEQ ID NO: 24111 - DNA, 17 bp, Arabidopsis thaliana
acgtgctcgagtgtctg

SEQ ID NO: 24112 - DNA, 17 bp, Arabidopsis thaliana
acgtgctgaatccatgg

SEQ ID NO: 24113 - DNA, 17 bp, Arabidopsis thaliana
acgtgctgaccacgggt

SEQ ID NO: 24114 - DNA, 17 bp, Arabidopsis thaliana
acgtgctgacctaacct

SEQ ID NO: 24115 - DNA, 17 bp, Arabidopsis thaliana
acgtgctgccaaacccg

SEQ ID NO: 24116 - DNA, 17 bp, Arabidopsis thaliana
acgtgcttcatccgtga

SEQ ID NO: 24117 - DNA, 17 bp, Arabidopsis thaliana
acgtgcttgggatagat

SEQ ID NO: 24118 - DNA, 17 bp, Arabidopsis thaliana
acgtgcttgggcgagag

SEQ ID NO: 24119 - DNA, 17 bp, Arabidopsis thaliana
acgtgcttgggctggag

SEQ ID NO: 24120 - DNA, 17 bp, Arabidopsis thaliana
acgtggaccaaaatacg

SEQ ID NO: 24121 - DNA, 17 bp, Arabidopsis thaliana
acgtggaccaaaatatg

SEQ ID NO: 24122 - DNA, 17 bp, Arabidopsis thaliana
acgtggaccaaaatgtg

SEQ ID NO: 24123 - DNA, 17 bp, Arabidopsis thaliana
acgtggaccctgtgcct

SEQ ID NO: 24124 - DNA, 17 bp, Arabidopsis thaliana
acgtggaccgtgcgatc

SEQ ID NO: 24125 - DNA, 17 bp, Arabidopsis thaliana
acgtggagcgatttgtc

SEQ ID NO: 24126 - DNA, 17 bp, Arabidopsis thaliana
acgtggagcgtcttcaa

SEQ ID NO: 24127 - DNA, 17 bp, Arabidopsis thaliana
acgtggatcttgggcgg

SEQ ID NO: 24128 - DNA, 17 bp, Arabidopsis thaliana
acgtggattggtgacat

SEQ ID NO: 24129 - DNA, 17 bp, Arabidopsis thaliana
acgtggcaagtgctgat

SEQ ID NO: 24130 - DNA, 17 bp, Arabidopsis thaliana
acgtggcacgcgcggat

SEQ ID NO: 24131 - DNA, 17 bp, Arabidopsis thaliana
acgtggcactatatcat

SEQ ID NO: 24132 - DNA, 17 bp, Arabidopsis thaliana
acgtggccgtgggttcc

SEQ ID NO: 24133 - DNA, 17 bp, Arabidopsis thaliana
acgtggccgtgggttcg

SEQ ID NO: 24134 - DNA, 17 bp, Arabidopsis thaliana
acgtggccgtgggttct

SEQ ID NO: 24135 - DNA, 17 bp, Arabidopsis thaliana
acgtggccgtgggttgc

SEQ ID NO: 24136 - DNA, 17 bp, Arabidopsis thaliana
acgtggccgttcttagt

SEQ ID NO: 24137 - DNA, 17 bp, Arabidopsis thaliana
acgtggcgcgttctgat

SEQ ID NO: 24138 - DNA, 17 bp, Arabidopsis thaliana
acgtggcggcttgtaat

SEQ ID NO: 24139 - DNA, 17 bp, Arabidopsis thaliana
acgtggcggttgacggc

SEQ ID NO: 24140 - DNA, 17 bp, Arabidopsis thaliana
acgtggctattgggctg

SEQ ID NO: 24141 - DNA, 17 bp, Arabidopsis thaliana
acgtggctgtatcttat

SEQ ID NO: 24142 - DNA, 17 bp, Arabidopsis thaliana
acgtggcttcttctgat

SEQ ID NO: 24143 - DNA, 17 bp, Arabidopsis thaliana
acgtggctttgtatatg

SEQ ID NO: 24144 - DNA, 17 bp, Arabidopsis thaliana
acgtgggtccatggtta

SEQ ID NO: 24145 - DNA, 17 bp, Arabidopsis thaliana
acgtgggtggttcgccg

SEQ ID NO: 24146 - DNA, 17 bp, Arabidopsis thaliana
acgtgggttcgtgtccc

SEQ ID NO: 24147 - DNA, 17 bp, Arabidopsis thaliana
acgtgggttctacatcc

SEQ ID NO: 24148 - DNA, 17 bp, Arabidopsis thaliana
acgtggtaagggtttgg

SEQ ID NO: 24149 - DNA, 17 bp, Arabidopsis thaliana
acgtggtagctccgtcc

SEQ ID NO: 24150 - DNA, 17 bp, Arabidopsis thaliana
acgtggtaggagttgtg

SEQ ID NO: 24151 - DNA, 17 bp, Arabidopsis thaliana
acgtggtattacgattt

SEQ ID NO: 24152 - DNA, 17 bp, Arabidopsis thaliana
acgtggtccgcctcttt

SEQ ID NO: 24153 - DNA, 17 bp, Arabidopsis thaliana
acgtggtgcgtgctgat

SEQ ID NO: 24154 - DNA, 17 bp, Arabidopsis thaliana
acgtggtgctacggcct

SEQ ID NO: 24155 - DNA, 17 bp, Arabidopsis thaliana
acgtggtgcttgtggta

SEQ ID NO: 24156 - DNA, 17 bp, Arabidopsis thaliana
acgtggtggagcgattt

SEQ ID NO: 24157 - DNA, 17 bp, Arabidopsis thaliana
acgtggttaagagatct

SEQ ID NO: 24158 - DNA, 17 bp, Arabidopsis thaliana
acgtggttggattggat

SEQ ID NO: 24159 - DNA, 17 bp, Arabidopsis thaliana
acgtgtaaaaatcgttg

SEQ ID NO: 24160 - DNA, 17 bp, Arabidopsis thaliana
acgtgtaaacgccgcag

SEQ ID NO: 24161 - DNA, 17 bp, Arabidopsis thaliana
acgtgtaacaatgtttc

SEQ ID NO: 24162 - DNA, 17 bp, Arabidopsis thaliana
acgtgtacgtggcatgt

SEQ ID NO: 24163 - DNA, 17 bp, Arabidopsis thaliana
acgtgtatgttctaagt

SEQ ID NO: 24164 - DNA, 17 bp, Arabidopsis thaliana
acgtgtattgcaggtga

SEQ ID NO: 24165 - DNA, 17 bp, Arabidopsis thaliana
acgtgtcaagtcaaacg

SEQ ID NO: 24166 - DNA, 17 bp, Arabidopsis thaliana
acgtgtcatgatctcgt

SEQ ID NO: 24167 - DNA, 17 bp, Arabidopsis thaliana
acgtgtcatgatctggt

SEQ ID NO: 24168 - DNA, 17 bp, Arabidopsis thaliana
acgtgtcatgatcttgt

SEQ ID NO: 24169 - DNA, 17 bp, Arabidopsis thaliana
acgtgtccgagtcaaga

SEQ ID NO: 24170 - DNA, 17 bp, Arabidopsis thaliana
acgtgtcgctgctcgag

SEQ ID NO: 24171 - DNA, 17 bp, Arabidopsis thaliana
acgtgtcggctgccttg

SEQ ID NO: 24172 - DNA, 17 bp, Arabidopsis thaliana
acgtgtcggctgctttg

SEQ ID NO: 24173 - DNA, 17 bp, Arabidopsis thaliana
acgtgtcggtcgagaga

SEQ ID NO: 24174 - DNA, 17 bp, Arabidopsis thaliana
acgtgtcgttgactaag

SEQ ID NO: 24175 - DNA, 17 bp, Arabidopsis thaliana
acgtgtcgttggctaag

SEQ ID NO: 24176 - DNA, 17 bp, Arabidopsis thaliana
acgtgtcgttggctgag

SEQ ID NO: 24177 - DNA, 17 bp, Arabidopsis thaliana
acgtgtctacgctcgat

SEQ ID NO: 24178 - DNA, 17 bp, Arabidopsis thaliana
acgtgtctacgcttgac

SEQ ID NO: 24179 - DNA, 17 bp, Arabidopsis thaliana
acgtgtctcaaacccat

SEQ ID NO: 24180 - DNA, 17 bp, Arabidopsis thaliana
acgtgtctcggcccaaa

SEQ ID NO: 24181 - DNA, 17 bp, Arabidopsis thaliana
acgtgtctgctgctttg

SEQ ID NO: 24182 - DNA, 17 bp, Arabidopsis thaliana
acgtgtgacgatgtgtt

SEQ ID NO: 24183 - DNA, 17 bp, Arabidopsis thaliana
acgtgtgcattggtcgg

SEQ ID NO: 24184 - DNA, 17 bp, Arabidopsis thaliana
acgtgtgcctctgatgt

SEQ ID NO: 24185 - DNA, 17 bp, Arabidopsis thaliana
acgtgtgcgcagtaatt

SEQ ID NO: 24186 - DNA, 17 bp, Arabidopsis thaliana
acgtgtggcaaccacgc

SEQ ID NO: 24187 - DNA, 17 bp, Arabidopsis thaliana
acgtgtgggacctcctt

SEQ ID NO: 24188 - DNA, 17 bp, Arabidopsis thaliana
acgtgtggtggactggt

SEQ ID NO: 24189 - DNA, 17 bp, Arabidopsis thaliana
acgtgtgtaggcatgca

SEQ ID NO: 24190 - DNA, 17 bp, Arabidopsis thaliana
acgtgtgtctaatgatg

SEQ ID NO: 24191 - DNA, 17 bp, Arabidopsis thaliana
acgtgttgattgttcgg

SEQ ID NO: 24192 - DNA, 17 bp, Arabidopsis thaliana
acgtgttgctcgacatc

SEQ ID NO: 24193 - DNA, 17 bp, Arabidopsis thaliana
acgtgttgttcagcgtg

SEQ ID NO: 24194 - DNA, 17 bp, Arabidopsis thaliana
acgtgtttgctcttatc

SEQ ID NO: 24195 - DNA, 17 bp, Arabidopsis thaliana
acgtgtttggactgcag

SEQ ID NO: 24196 - DNA, 17 bp, Arabidopsis thaliana
acgtgttttagtgtcac

SEQ ID NO: 24197 - DNA, 17 bp, Arabidopsis thaliana
acgtgttttctatgcgg

SEQ ID NO: 24198 - DNA, 17 bp, Arabidopsis thaliana
acgtgttttttcaggaa

SEQ ID NO: 24199 - DNA, 17 bp, Arabidopsis thaliana
acgtgttttttcaggag

SEQ ID NO: 24200 - DNA, 17 bp, Arabidopsis thaliana
acgtgttttttcaggca

SEQ ID NO: 24201 - DNA, 17 bp, Arabidopsis thaliana
acgtgtttttttcagga

SEQ ID NO: 24202 - DNA, 17 bp, Arabidopsis thaliana
acgttacagcactgttg

SEQ ID NO: 24203 - DNA, 17 bp, Arabidopsis thaliana
acgttaccccatacagt

SEQ ID NO: 24204 - DNA, 17 bp, Arabidopsis thaliana
acgttaccgtgttggtg

SEQ ID NO: 24205 - DNA, 17 bp, Arabidopsis thaliana
acgttacgacgtttgtg

SEQ ID NO: 24206 - DNA, 17 bp, Arabidopsis thaliana
acgttacgatgactgca

SEQ ID NO: 24207 - DNA, 17 bp, Arabidopsis thaliana
acgttacggctgagtta

SEQ ID NO: 24208 - DNA, 17 bp, Arabidopsis thaliana
acgttactgtcagtggc

SEQ ID NO: 24209 - DNA, 17 bp, Arabidopsis thaliana
acgttagaatgagtgac

SEQ ID NO: 24210 - DNA, 17 bp, Arabidopsis thaliana
acgttagacccaactgg

SEQ ID NO: 24211 - DNA, 17 bp, Arabidopsis thaliana
acgttagattctgtgac

SEQ ID NO: 24212 - DNA, 17 bp, Arabidopsis thaliana
acgttagtcgcatccag

SEQ ID NO: 24213 - DNA, 17 bp, Arabidopsis thaliana
acgttagtcgcctgtag

SEQ ID NO: 24214 - DNA, 17 bp, Arabidopsis thaliana
acgttagtcttgggtgg

SEQ ID NO: 24215 - DNA, 17 bp, Arabidopsis thaliana
acgttatcagcacaagt

SEQ ID NO: 24216 - DNA, 17 bp, Arabidopsis thaliana
acgttatcagcacgaac

SEQ ID NO: 24217 - DNA, 17 bp, Arabidopsis thaliana
acgttatcagcacgagc

SEQ ID NO: 24218 - DNA, 17 bp, Arabidopsis thaliana
acgttatcagcacgagt

SEQ ID NO: 24219 - DNA, 17 bp, Arabidopsis thaliana
acgttcaactaacctgt

SEQ ID NO: 24220 - DNA, 17 bp, Arabidopsis thaliana
acgttcaactaatctgt

SEQ ID NO: 24221 - DNA, 17 bp, Arabidopsis thaliana
acgttcacatatccgat

SEQ ID NO: 24222 - DNA, 17 bp, Arabidopsis thaliana
acgttcaccacacctac

SEQ ID NO: 24223 - DNA, 17 bp, Arabidopsis thaliana
acgttcacctttatctc

SEQ ID NO: 24224 - DNA, 17 bp, Arabidopsis thaliana
acgttcagacttggtga

SEQ ID NO: 24225 - DNA, 17 bp, Arabidopsis thaliana
acgttcagccttccctt

SEQ ID NO: 24226 - DNA, 17 bp, Arabidopsis thaliana
acgttcatatggtatca

SEQ ID NO: 24227 - DNA, 17 bp, Arabidopsis thaliana
acgttcatcttcttcgt

SEQ ID NO: 24228 - DNA, 17 bp, Arabidopsis thaliana
acgttccaactgcagga

SEQ ID NO: 24229 - DNA, 17 bp, Arabidopsis thaliana
acgttccacaacatcat

SEQ ID NO: 24230 - DNA, 17 bp, Arabidopsis thaliana
acgttcctgagtgactg

SEQ ID NO: 24231 - DNA, 17 bp, Arabidopsis thaliana
acgttcctgagtgactt

SEQ ID NO: 24232 - DNA, 17 bp, Arabidopsis thaliana
acgttcgagaaggtcgt

SEQ ID NO: 24233 - DNA, 17 bp, Arabidopsis thaliana
acgttcgatgtgattgt

SEQ ID NO: 24234 - DNA, 17 bp, Arabidopsis thaliana
acgttcgcttttccatc

SEQ ID NO: 24235 - DNA, 17 bp, Arabidopsis thaliana
acgttcggagggatctc

SEQ ID NO: 24236 - DNA, 17 bp, Arabidopsis thaliana
acgttcgggatatgctt

SEQ ID NO: 24237 - DNA, 17 bp, Arabidopsis thaliana
acgttcggtgccgatga

SEQ ID NO: 24238 - DNA, 17 bp, Arabidopsis thaliana
acgttctcagtggatga

SEQ ID NO: 24239 - DNA, 17 bp, Arabidopsis thaliana
acgttctccgagtaagc

SEQ ID NO: 24240 - DNA, 17 bp, Arabidopsis thaliana
acgttctgccaaacccg

SEQ ID NO: 24241 - DNA, 17 bp, Arabidopsis thaliana
acgttctgccaacgacc

SEQ ID NO: 24242 - DNA, 17 bp, Arabidopsis thaliana
acgttctggaccattgg

SEQ ID NO: 24243 - DNA, 17 bp, Arabidopsis thaliana
acgttctgtcaaatccg

SEQ ID NO: 24244 - DNA, 17 bp, Arabidopsis thaliana
acgttctgttaacgacc

SEQ ID NO: 24245 - DNA, 17 bp, Arabidopsis thaliana
acgttcttacgagatgt

SEQ ID NO: 24246 - DNA, 17 bp, Arabidopsis thaliana
acgttcttcaatcttta

SEQ ID NO: 24247 - DNA, 17 bp, Arabidopsis thaliana
acgttcttcatctccgg

SEQ ID NO: 24248 - DNA, 17 bp, Arabidopsis thaliana
acgttgaacccacacat

SEQ ID NO: 24249 - DNA, 17 bp, Arabidopsis thaliana
acgttgacacgttgact

SEQ ID NO: 24250 - DNA, 17 bp, Arabidopsis thaliana
acgttgacacgttgtct

SEQ ID NO: 24251 - DNA, 17 bp, Arabidopsis thaliana
acgttgacgcgattcgg

SEQ ID NO: 24252 - DNA, 17 bp, Arabidopsis thaliana
acgttgactgatgatgg

SEQ ID NO: 24253 - DNA, 17 bp, Arabidopsis thaliana
acgttgactttttgtcg

SEQ ID NO: 24254 - DNA, 17 bp, Arabidopsis thaliana
acgttgatgatgttgtg

SEQ ID NO: 24255 - DNA, 17 bp, Arabidopsis thaliana
acgttgatggatgtgtt

SEQ ID NO: 24256 - DNA, 17 bp, Arabidopsis thaliana
acgttgcaaatttggga

SEQ ID NO: 24257 - DNA, 17 bp, Arabidopsis thaliana
acgttgcaacgtgcgac

SEQ ID NO: 24258 - DNA, 17 bp, Arabidopsis thaliana
acgttgcaacgtttttg

SEQ ID NO: 24259 - DNA, 17 bp, Arabidopsis thaliana
acgttgcacgatcctat

SEQ ID NO: 24260 - DNA, 17 bp, Arabidopsis thaliana
acgttgccaagcactgg

SEQ ID NO: 24261 - DNA, 17 bp, Arabidopsis thaliana
acgttgccggagctaca

SEQ ID NO: 24262 - DNA, 17 bp, Arabidopsis thaliana
acgttgcgaatgttctg

SEQ ID NO: 24263 - DNA, 17 bp, Arabidopsis thaliana
acgttgcgccgaagtga

SEQ ID NO: 24264 - DNA, 17 bp, Arabidopsis thaliana
acgttgcggtttaagtc

SEQ ID NO: 24265 - DNA, 17 bp, Arabidopsis thaliana
acgttgcggtttaagtt

SEQ ID NO: 24266 - DNA, 17 bp, Arabidopsis thaliana
acgttgcttaccctatg

SEQ ID NO: 24267 - DNA, 17 bp, Arabidopsis thaliana
acgttgcttttggttgt

SEQ ID NO: 24268 - DNA, 17 bp, Arabidopsis thaliana
acgttgctttttgatcc

SEQ ID NO: 24269 - DNA, 17 bp, Arabidopsis thaliana
acgttggaataagtcct

SEQ ID NO: 24270 - DNA, 17 bp, Arabidopsis thaliana
acgttggaccggctctg

SEQ ID NO: 24271 - DNA, 17 bp, Arabidopsis thaliana
acgttggaccgtttttc

SEQ ID NO: 24272 - DNA, 17 bp, Arabidopsis thaliana
acgttggagatggcctt

SEQ ID NO: 24273 - DNA, 17 bp, Arabidopsis thaliana
acgttggatgtttctac

SEQ ID NO: 24274 - DNA, 17 bp, Arabidopsis thaliana
acgttggatttgtatgg

SEQ ID NO: 24275 - DNA, 17 bp, Arabidopsis thaliana
acgttggcatacatagg

SEQ ID NO: 24276 - DNA, 17 bp, Arabidopsis thaliana
acgttggcgttaaatca

SEQ ID NO: 24277 - DNA, 17 bp, Arabidopsis thaliana
acgttggctaatgtact

SEQ ID NO: 24278 - DNA, 17 bp, Arabidopsis thaliana
acgttggctgttactgg

SEQ ID NO: 24279 - DNA, 17 bp, Arabidopsis thaliana
acgttggctttaggttt

SEQ ID NO: 24280 - DNA, 17 bp, Arabidopsis thaliana
acgttggctttgtacca

SEQ ID NO: 24281 - DNA, 17 bp, Arabidopsis thaliana
acgttggtccttgatct

SEQ ID NO: 24282 - DNA, 17 bp, Arabidopsis thaliana
acgttggtggtggctga

SEQ ID NO: 24283 - DNA, 17 bp, Arabidopsis thaliana
acgttggttgtgattca

SEQ ID NO: 24284 - DNA, 17 bp, Arabidopsis thaliana
acgttgtaacttaggat

SEQ ID NO: 24285 - DNA, 17 bp, Arabidopsis thaliana
acgttgtacgcgctcga

SEQ ID NO: 24286 - DNA, 17 bp, Arabidopsis thaliana
acgttgtatgcggcagg

SEQ ID NO: 24287 - DNA, 17 bp, Arabidopsis thaliana
acgttgtcctccgctaa

SEQ ID NO: 24288 - DNA, 17 bp, Arabidopsis thaliana
acgttgtgataggtggt

SEQ ID NO: 24289 - DNA, 17 bp, Arabidopsis thaliana
acgttgtgatgattgcc

SEQ ID NO: 24290 - DNA, 17 bp, Arabidopsis thaliana
acgttgtggggattttg

SEQ ID NO: 24291 - DNA, 17 bp, Arabidopsis thaliana
acgttgtgtgctcacca

SEQ ID NO: 24292 - DNA, 17 bp, Arabidopsis thaliana
acgttgttgccatttgg

SEQ ID NO: 24293 - DNA, 17 bp, Arabidopsis thaliana
acgttgttgcggcacgg

SEQ ID NO: 24294 - DNA, 17 bp, Arabidopsis thaliana
acgttgttgtactttcg

SEQ ID NO: 24295 - DNA, 17 bp, Arabidopsis thaliana
acgttgtttaccgtaat

SEQ ID NO: 24296 - DNA, 17 bp, Arabidopsis thaliana
acgttgtttcggagatg

SEQ ID NO: 24297 - DNA, 17 bp, Arabidopsis thaliana
acgttgtttgcaccttt

SEQ ID NO: 24298 - DNA, 17 bp, Arabidopsis thaliana
acgtttaaaaaatggcc

SEQ ID NO: 24299 - DNA, 17 bp, Arabidopsis thaliana
acgtttaaggcactccc

SEQ ID NO: 24300 - DNA, 17 bp, Arabidopsis thaliana
acgtttaaggcactttg

SEQ ID NO: 24301 - DNA, 17 bp, Arabidopsis thaliana
acgtttaagtcgccgcc

SEQ ID NO: 24302 - DNA, 17 bp, Arabidopsis thaliana
acgtttaccccacgagc

SEQ ID NO: 24303 - DNA, 17 bp, Arabidopsis thaliana
acgtttatacccgaccg

SEQ ID NO: 24304 - DNA, 17 bp, Arabidopsis thaliana
acgtttatggccacgtg

SEQ ID NO: 24305 - DNA, 17 bp, Arabidopsis thaliana
acgtttattgatcgttg

SEQ ID NO: 24306 - DNA, 17 bp, Arabidopsis thaliana
acgtttcactgtgtagc

SEQ ID NO: 24307 - DNA, 17 bp, Arabidopsis thaliana
acgtttcatctaccgtc

SEQ ID NO: 24308 - DNA, 17 bp, Arabidopsis thaliana
acgtttcatgtgctgat

SEQ ID NO: 24309 - DNA, 17 bp, Arabidopsis thaliana
acgtttcattctctggt

SEQ ID NO: 24310 - DNA, 17 bp, Arabidopsis thaliana
acgtttccatatggatg

SEQ ID NO: 24311 - DNA, 17 bp, Arabidopsis thaliana
acgtttccgcccatccg

SEQ ID NO: 24312 - DNA, 17 bp, Arabidopsis thaliana
acgtttcgtattgggct

SEQ ID NO: 24313 - DNA, 17 bp, Arabidopsis thaliana
acgtttcgtctagtggt

SEQ ID NO: 24314 - DNA, 17 bp, Arabidopsis thaliana
acgtttcgtgacgcaga

SEQ ID NO: 24315 - DNA, 17 bp, Arabidopsis thaliana
acgtttctatgtgccat

SEQ ID NO: 24316 - DNA, 17 bp, Arabidopsis thaliana
acgtttctcctgtagac

SEQ ID NO: 24317 - DNA, 17 bp, Arabidopsis thaliana
acgtttctgaccatgtg

SEQ ID NO: 24318 - DNA, 17 bp, Arabidopsis thaliana
acgtttctggacgtttc

SEQ ID NO: 24319 - DNA, 17 bp, Arabidopsis thaliana
acgtttctggccaactc

SEQ ID NO: 24320 - DNA, 17 bp, Arabidopsis thaliana
acgtttcttcgggtaag

SEQ ID NO: 24321 - DNA, 17 bp, Arabidopsis thaliana
acgtttgacagaacggg

SEQ ID NO: 24322 - DNA, 17 bp, Arabidopsis thaliana
acgtttgaccctctgcc

SEQ ID NO: 24323 - DNA, 17 bp, Arabidopsis thaliana
acgtttgaggcactttc

SEQ ID NO: 24324 - DNA, 17 bp, Arabidopsis thaliana
acgtttgcaacaagtgt

SEQ ID NO: 24325 - DNA, 17 bp, Arabidopsis thaliana
acgtttgcctgggtgtc

SEQ ID NO: 24326 - DNA, 17 bp, Arabidopsis thaliana
acgtttgcgggcactaa

SEQ ID NO: 24327 - DNA, 17 bp, Arabidopsis thaliana
acgtttgcgggtggtag

SEQ ID NO: 24328 - DNA, 17 bp, Arabidopsis thaliana
acgtttggcatatgcct

SEQ ID NO: 24329 - DNA, 17 bp, Arabidopsis thaliana
acgtttgggtatgcgtt

SEQ ID NO: 24330 - DNA, 17 bp, Arabidopsis thaliana
acgtttggtccggcggt

SEQ ID NO: 24331 - DNA, 17 bp, Arabidopsis thaliana
acgtttggtgcctctct

SEQ ID NO: 24332 - DNA, 17 bp, Arabidopsis thaliana
acgtttgtacaacatgt

SEQ ID NO: 24333 - DNA, 17 bp, Arabidopsis thaliana
acgtttgtagctacagg

SEQ ID NO: 24334 - DNA, 17 bp, Arabidopsis thaliana
acgtttgtgccatggct

SEQ ID NO: 24335 - DNA, 17 bp, Arabidopsis thaliana
acgtttgtgctatggct

SEQ ID NO: 24336 - DNA, 17 bp, Arabidopsis thaliana
acgtttgtgttatggct

SEQ ID NO: 24337 - DNA, 17 bp, Arabidopsis thaliana
acgtttgttgtgtccga

SEQ ID NO: 24338 - DNA, 17 bp, Arabidopsis thaliana
acgttttaacccgctgt

SEQ ID NO: 24339 - DNA, 17 bp, Arabidopsis thaliana
acgttttagccattagg

SEQ ID NO: 24340 - DNA, 17 bp, Arabidopsis thaliana
acgttttattcagatgg

SEQ ID NO: 24341 - DNA, 17 bp, Arabidopsis thaliana
acgttttcaagttcgat

SEQ ID NO: 24342 - DNA, 17 bp, Arabidopsis thaliana
acgttttcacccttcac

SEQ ID NO: 24343 - DNA, 17 bp, Arabidopsis thaliana
acgttttcgtgatttgg

SEQ ID NO: 24344 - DNA, 17 bp, Arabidopsis thaliana
acgttttgagacttggt

SEQ ID NO: 24345 - DNA, 17 bp, Arabidopsis thaliana
acgttttgcggtacggg

SEQ ID NO: 24346 - DNA, 17 bp, Arabidopsis thaliana
acgttttgcggtgcgga

SEQ ID NO: 24347 - DNA, 17 bp, Arabidopsis thaliana
acgttttgcggtgcggg

SEQ ID NO: 24348 - DNA, 17 bp, Arabidopsis thaliana
acgttttgtgccatggc

SEQ ID NO: 24349 - DNA, 17 bp, Arabidopsis thaliana
acgtttttccttgcggc

SEQ ID NO: 24350 - DNA, 17 bp, Arabidopsis thaliana
acgtttttctccattta

SEQ ID NO: 24351 - DNA, 17 bp, Arabidopsis thaliana
acgtttttgcaagatca

SEQ ID NO: 24352 - DNA, 17 bp, Arabidopsis thaliana
acgtttttggccatgtg

SEQ ID NO: 24353 - DNA, 17 bp, Arabidopsis thaliana
acgtttttggccggaaa

SEQ ID NO: 24354 - DNA, 17 bp, Arabidopsis thaliana
acgtttttggcgggaaa

SEQ ID NO: 24355 - DNA, 17 bp, Arabidopsis thaliana
acgttttttccttgcgg

SEQ ID NO: 24356 - DNA, 17 bp, Arabidopsis thaliana
acgttttttggagactc

SEQ ID NO: 24357 - DNA, 17 bp, Arabidopsis thaliana
acgttttttggcgggaa

SEQ ID NO: 24358 - DNA, 17 bp, Arabidopsis thaliana
acgttttttgggacgct

SEQ ID NO: 24359 - DNA, 17 bp, Arabidopsis thaliana
actaaaaacatagttca

SEQ ID NO: 24360 - DNA, 17 bp, Arabidopsis thaliana
actaaaaattatgatcg

SEQ ID NO: 24361 - DNA, 17 bp, Arabidopsis thaliana
actaaaacttggttggc

SEQ ID NO: 24362 - DNA, 17 bp, Arabidopsis thaliana
actaaaccctagcagcc

SEQ ID NO: 24363 - DNA, 17 bp, Arabidopsis thaliana
actaaacgttaatctgc

SEQ ID NO: 24364 - DNA, 17 bp, Arabidopsis thaliana
actaaagatctcagatg

SEQ ID NO: 24365 - DNA, 17 bp, Arabidopsis thaliana
actaaagattggggggc

SEQ ID NO: 24366 - DNA, 17 bp, Arabidopsis thaliana
actaaagctttgcgaac

SEQ ID NO: 24367 - DNA, 17 bp, Arabidopsis thaliana
actaaagttgccttctg

SEQ ID NO: 24368 - DNA, 17 bp, Arabidopsis thaliana
actaaatacggagaagg

SEQ ID NO: 24369 - DNA, 17 bp, Arabidopsis thaliana
actaaatcagggttgtg

SEQ ID NO: 24370 - DNA, 17 bp, Arabidopsis thaliana
actaaatccaggccctt

SEQ ID NO: 24371 - DNA, 17 bp, Arabidopsis thaliana
actaaatcgcataacct

SEQ ID NO: 24372 - DNA, 17 bp, Arabidopsis thaliana
actaaattgcggctccg

SEQ ID NO: 24373 - DNA, 17 bp, Arabidopsis thaliana
actaacagcttcagact

SEQ ID NO: 24374 - DNA, 17 bp, Arabidopsis thaliana
actaacagtggatcaag

SEQ ID NO: 24375 - DNA, 17 bp, Arabidopsis thaliana
actaacatcttggtaag

SEQ ID NO: 24376 - DNA, 17 bp, Arabidopsis thaliana
actaacatgatccgtgt

SEQ ID NO: 24377 - DNA, 17 bp, Arabidopsis thaliana
actaaccatcgcggtgg

SEQ ID NO: 24378 - DNA, 17 bp, Arabidopsis thaliana
actaaccgaatccattg

SEQ ID NO: 24379 - DNA, 17 bp, Arabidopsis thaliana
actaaccgcctaacgga

SEQ ID NO: 24380 - DNA, 17 bp, Arabidopsis thaliana
actaaccgcgagtaagt

SEQ ID NO: 24381 - DNA, 17 bp, Arabidopsis thaliana
actaaccgtgcctaagc

SEQ ID NO: 24382 - DNA, 17 bp, Arabidopsis thaliana
actaacgaccaaggggg

SEQ ID NO: 24383 - DNA, 17 bp, Arabidopsis thaliana
actaacgactaatgcgg

SEQ ID NO: 24384 - DNA, 17 bp, Arabidopsis thaliana
actaacgccgtagcctc

SEQ ID NO: 24385 - DNA, 17 bp, Arabidopsis thaliana
actaacgcgttttggct

SEQ ID NO: 24386 - DNA, 17 bp, Arabidopsis thaliana
actaactcataggatca

SEQ ID NO: 24387 - DNA, 17 bp, Arabidopsis thaliana
actaactcataggatcg

SEQ ID NO: 24388 - DNA, 17 bp, Arabidopsis thaliana
actaactccatgagaat

SEQ ID NO: 24389 - DNA, 17 bp, Arabidopsis thaliana
actaactcgacggatcg

SEQ ID NO: 24390 - DNA, 17 bp, Arabidopsis thaliana
actaactctccaagtcc

SEQ ID NO: 24391 - DNA, 17 bp, Arabidopsis thaliana
actaactctctgcaact

SEQ ID NO: 24392 - DNA, 17 bp, Arabidopsis thaliana
actaactgcagaccatc

SEQ ID NO: 24393 - DNA, 17 bp, Arabidopsis thaliana
actaactgcggaccgtc

SEQ ID NO: 24394 - DNA, 17 bp, Arabidopsis thaliana
actaactggtttcctgc

SEQ ID NO: 24395 - DNA, 17 bp, Arabidopsis thaliana
actaactttgggtctgg

SEQ ID NO: 24396 - DNA, 17 bp, Arabidopsis thaliana
actaagaacgctgacca

SEQ ID NO: 24397 - DNA, 17 bp, Arabidopsis thaliana
actaagaatttagtccg

SEQ ID NO: 24398 - DNA, 17 bp, Arabidopsis thaliana
actaagacagtctcggg

SEQ ID NO: 24399 - DNA, 17 bp, Arabidopsis thaliana
actaagacgtagcttaa

SEQ ID NO: 24400 - DNA, 17 bp, Arabidopsis thaliana
actaagactctgttttc

SEQ ID NO: 24401 - DNA, 17 bp, Arabidopsis thaliana
actaagactgtgaatgg

SEQ ID NO: 24402 - DNA, 17 bp, Arabidopsis thaliana
actaagagcaagtctat

SEQ ID NO: 24403 - DNA, 17 bp, Arabidopsis thaliana
actaagatgacgtcttc

SEQ ID NO: 24404 - DNA, 17 bp, Arabidopsis thaliana
actaagcactgaggtta

SEQ ID NO: 24405 - DNA, 17 bp, Arabidopsis thaliana
actaagcggttgctgca

SEQ ID NO: 24406 - DNA, 17 bp, Arabidopsis thaliana
actaagctattttgggc

SEQ ID NO: 24407 - DNA, 17 bp, Arabidopsis thaliana
actaagctggtgatatg

SEQ ID NO: 24408 - DNA, 17 bp, Arabidopsis thaliana
actaagctgttggtgca

SEQ ID NO: 24409 - DNA, 17 bp, Arabidopsis thaliana
actaaggaagtaccaag

SEQ ID NO: 24410 - DNA, 17 bp, Arabidopsis thaliana
actaaggcacatgtcca

SEQ ID NO: 24411 - DNA, 17 bp, Arabidopsis thaliana
actaaggccctgttcgt

SEQ ID NO: 24412 - DNA, 17 bp, Arabidopsis thaliana
actaaggcgggagtgtg

SEQ ID NO: 24413 - DNA, 17 bp, Arabidopsis thaliana
actaaggctccgaatgg

SEQ ID NO: 24414 - DNA, 17 bp, Arabidopsis thaliana
actaaggctttgaatgg

SEQ ID NO: 24415 - DNA, 17 bp, Arabidopsis thaliana
actaagggtctgaatgg

SEQ ID NO: 24416 - DNA, 17 bp, Arabidopsis thaliana
actaagtaacgtcctgt

SEQ ID NO: 24417 - DNA, 17 bp, Arabidopsis thaliana
actaagtaggtccgctt

SEQ ID NO: 24418 - DNA, 17 bp, Arabidopsis thaliana
actaagtccgcattggt

SEQ ID NO: 24419 - DNA, 17 bp, Arabidopsis thaliana
actaagtctatttggtt

SEQ ID NO: 24420 - DNA, 17 bp, Arabidopsis thaliana
actaagtctgtagcagt

SEQ ID NO: 24421 - DNA, 17 bp, Arabidopsis thaliana
actaagtgactacatcg

SEQ ID NO: 24422 - DNA, 17 bp, Arabidopsis thaliana
actaagtgagtatcaac

SEQ ID NO: 24423 - DNA, 17 bp, Arabidopsis thaliana
actaagttgcgaaggga

SEQ ID NO: 24424 - DNA, 17 bp, Arabidopsis thaliana
actaagtttgcagcggt

SEQ ID NO: 24425 - DNA, 17 bp, Arabidopsis thaliana
actaagtttggagtgga

SEQ ID NO: 24426 - DNA, 17 bp, Arabidopsis thaliana
actaatcacaagccgcc

SEQ ID NO: 24427 - DNA, 17 bp, Arabidopsis thaliana
actaatccaccgtctga

SEQ ID NO: 24428 - DNA, 17 bp, Arabidopsis thaliana
actaatccgggttcaac

SEQ ID NO: 24429 - DNA, 17 bp, Arabidopsis thaliana
actaatccgtcagcggt

SEQ ID NO: 24430 - DNA, 17 bp, Arabidopsis thaliana
actaatccttctgttga

SEQ ID NO: 24431 - DNA, 17 bp, Arabidopsis thaliana
actaatcgaaccatcaa

SEQ ID NO: 24432 - DNA, 17 bp, Arabidopsis thaliana
actaatcgctgaaacca

SEQ ID NO: 24433 - DNA, 17 bp, Arabidopsis thaliana
actaatcgctgcgtaga

SEQ ID NO: 24434 - DNA, 17 bp, Arabidopsis thaliana
actaatgcaccggatcc

SEQ ID NO: 24435 - DNA, 17 bp, Arabidopsis thaliana
actaatgcaccggatcg

SEQ ID NO: 24436 - DNA, 17 bp, Arabidopsis thaliana
actaatgcaccggatct

SEQ ID NO: 24437 - DNA, 17 bp, Arabidopsis thaliana
actaatgccagagggta

SEQ ID NO: 24438 - DNA, 17 bp, Arabidopsis thaliana
actaatgccagggggta

SEQ ID NO: 24439 - DNA, 17 bp, Arabidopsis thaliana
actaatggaccggatcc

SEQ ID NO: 24440 - DNA, 17 bp, Arabidopsis thaliana
actaatgggctgaccac

SEQ ID NO: 24441 - DNA, 17 bp, Arabidopsis thaliana
actaatgggctttcatt

SEQ ID NO: 24442 - DNA, 17 bp, Arabidopsis thaliana
actaatgtctgttgcag

SEQ ID NO: 24443 - DNA, 17 bp, Arabidopsis thaliana
actaatgttcgattctc

SEQ ID NO: 24444 - DNA, 17 bp, Arabidopsis thaliana
actacaacttggccgct

SEQ ID NO: 24445 - DNA, 17 bp, Arabidopsis thaliana
actacaagagatctcca

SEQ ID NO: 24446 - DNA, 17 bp, Arabidopsis thaliana
actacaatcgtattgcc

SEQ ID NO: 24447 - DNA, 17 bp, Arabidopsis thaliana
actacacaagttgtcgc

SEQ ID NO: 24448 - DNA, 17 bp, Arabidopsis thaliana
actacagacccgggttc

SEQ ID NO: 24449 - DNA, 17 bp, Arabidopsis thaliana
actacagactcactggt

SEQ ID NO: 24450 - DNA, 17 bp, Arabidopsis thaliana
actacagagtggacttc

SEQ ID NO: 24451 - DNA, 17 bp, Arabidopsis thaliana
actacagagttgcgttt

SEQ ID NO: 24452 - DNA, 17 bp, Arabidopsis thaliana
actacagatttgtggtc

SEQ ID NO: 24453 - DNA, 17 bp, Arabidopsis thaliana
actacagcgactcgttt

SEQ ID NO: 24454 - DNA, 17 bp, Arabidopsis thaliana
actacagcgtacactgt

SEQ ID NO: 24455 - DNA, 17 bp, Arabidopsis thaliana
actacaggccgactcgc

SEQ ID NO: 24456 - DNA, 17 bp, Arabidopsis thaliana
actacagtggctaccac

SEQ ID NO: 24457 - DNA, 17 bp, Arabidopsis thaliana
actacagtgttagttgc

SEQ ID NO: 24458 - DNA, 17 bp, Arabidopsis thaliana
actacatacttctccgg

SEQ ID NO: 24459 - DNA, 17 bp, Arabidopsis thaliana
actacatctggtattag

SEQ ID NO: 24460 - DNA, 17 bp, Arabidopsis thaliana
actacatcttggttatc

SEQ ID NO: 24461 - DNA, 17 bp, Arabidopsis thaliana
actacatcttggttgtc

SEQ ID NO: 24462 - DNA, 17 bp, Arabidopsis thaliana
actacatgagaacattg

SEQ ID NO: 24463 - DNA, 17 bp, Arabidopsis thaliana
actacatgcgggctttc

SEQ ID NO: 24464 - DNA, 17 bp, Arabidopsis thaliana
actacatgtattggttt

SEQ ID NO: 24465 - DNA, 17 bp, Arabidopsis thaliana
actacatgtggatccaa

SEQ ID NO: 24466 - DNA, 17 bp, Arabidopsis thaliana
actacatgttgtggttt

SEQ ID NO: 24467 - DNA, 17 bp, Arabidopsis thaliana
actacattcggaagtgg

SEQ ID NO: 24468 - DNA, 17 bp, Arabidopsis thaliana
actacattgcccgtatc

SEQ ID NO: 24469 - DNA, 17 bp, Arabidopsis thaliana
actacatttgccacgtt

SEQ ID NO: 24470 - DNA, 17 bp, Arabidopsis thaliana
actacatttgtatggcc

SEQ ID NO: 24471 - DNA, 17 bp, Arabidopsis thaliana
actaccaaaatgactct

SEQ ID NO: 24472 - DNA, 17 bp, Arabidopsis thaliana
actaccaagtgattcag

SEQ ID NO: 24473 - DNA, 17 bp, Arabidopsis thaliana
actaccaggtaaaccaa

SEQ ID NO: 24474 - DNA, 17 bp, Arabidopsis thaliana
actaccaggtaaatcaa

SEQ ID NO: 24475 - DNA, 17 bp, Arabidopsis thaliana
actaccatccgttgcac

SEQ ID NO: 24476 - DNA, 17 bp, Arabidopsis thaliana
actacccctggcattag

SEQ ID NO: 24477 - DNA, 17 bp, Arabidopsis thaliana
actaccgacaaatgccg

SEQ ID NO: 24478 - DNA, 17 bp, Arabidopsis thaliana
actaccgatctaacacg

SEQ ID NO: 24479 - DNA, 17 bp, Arabidopsis thaliana
actaccgcttcatggag

SEQ ID NO: 24480 - DNA, 17 bp, Arabidopsis thaliana
actaccggaggtttcca

SEQ ID NO: 24481 - DNA, 17 bp, Arabidopsis thaliana
actaccgtacgtccgta

SEQ ID NO: 24482 - DNA, 17 bp, Arabidopsis thaliana
actaccgtggagtttgt

SEQ ID NO: 24483 - DNA, 17 bp, Arabidopsis thaliana
actacctcttgaaccac

SEQ ID NO: 24484 - DNA, 17 bp, Arabidopsis thaliana
actaccttagctcagtt

SEQ ID NO: 24485 - DNA, 17 bp, Arabidopsis thaliana
actaccttccggaccat

SEQ ID NO: 24486 - DNA, 17 bp, Arabidopsis thaliana
actaccttttgggtcac

SEQ ID NO: 24487 - DNA, 17 bp, Arabidopsis thaliana
actacgaagaagacacg

SEQ ID NO: 24488 - DNA, 17 bp, Arabidopsis thaliana
actacgaggttttgtgc

SEQ ID NO: 24489 - DNA, 17 bp, Arabidopsis thaliana
actacgcggatcgcatg

SEQ ID NO: 24490 - DNA, 17 bp, Arabidopsis thaliana
actacgcggattacggt

SEQ ID NO: 24491 - DNA, 17 bp, Arabidopsis thaliana
actacggccctgtttgt

SEQ ID NO: 24492 - DNA, 17 bp, Arabidopsis thaliana
actacgggattcagccc

SEQ ID NO: 24493 - DNA, 17 bp, Arabidopsis thaliana
actacgggatttcattt

SEQ ID NO: 24494 - DNA, 17 bp, Arabidopsis thaliana
actacgggtgacttaag

SEQ ID NO: 24495 - DNA, 17 bp, Arabidopsis thaliana
actacgggtgattcaaa

SEQ ID NO: 24496 - DNA, 17 bp, Arabidopsis thaliana
actacgggtttggcagg

SEQ ID NO: 24497 - DNA, 17 bp, Arabidopsis thaliana
actacggtccgcactcc

SEQ ID NO: 24498 - DNA, 17 bp, Arabidopsis thaliana
actacggtggtggctca

SEQ ID NO: 24499 - DNA, 17 bp, Arabidopsis thaliana
actacgtcgttgattct

SEQ ID NO: 24500 - DNA, 17 bp, Arabidopsis thaliana
actacgtctacaattct

SEQ ID NO: 24501 - DNA, 17 bp, Arabidopsis thaliana
actacgtctacagttct

SEQ ID NO: 24502 - DNA, 17 bp, Arabidopsis thaliana
actacgtgccagcagcc

SEQ ID NO: 24503 - DNA, 17 bp, Arabidopsis thaliana
actactaaaaccacaaa

SEQ ID NO: 24504 - DNA, 17 bp, Arabidopsis thaliana
actactaaggtgttatt

SEQ ID NO: 24505 - DNA, 17 bp, Arabidopsis thaliana
actactagattttcacc

SEQ ID NO: 24506 - DNA, 17 bp, Arabidopsis thaliana
actactaggcttgggcg

SEQ ID NO: 24507 - DNA, 17 bp, Arabidopsis thaliana
actactattccttgcgc

SEQ ID NO: 24508 - DNA, 17 bp, Arabidopsis thaliana
actactcagatgggatc

SEQ ID NO: 24509 - DNA, 17 bp, Arabidopsis thaliana
actactcccgcagcggc

SEQ ID NO: 24510 - DNA, 17 bp, Arabidopsis thaliana
actactcggtcactagg

SEQ ID NO: 24511 - DNA, 17 bp, Arabidopsis thaliana
actactcttgtcggctc

SEQ ID NO: 24512 - DNA, 17 bp, Arabidopsis thaliana
actactgatcaattatt

SEQ ID NO: 24513 - DNA, 17 bp, Arabidopsis thaliana
actactgcaagggctgg

SEQ ID NO: 24514 - DNA, 17 bp, Arabidopsis thaliana
actactgcacaaacccg

SEQ ID NO: 24515 - DNA, 17 bp, Arabidopsis thaliana
actactgcacaggcttg

SEQ ID NO: 24516 - DNA, 17 bp, Arabidopsis thaliana
actactgcacgggcctg

SEQ ID NO: 24517 - DNA, 17 bp, Arabidopsis thaliana
actactgctaacattgg

SEQ ID NO: 24518 - DNA, 17 bp, Arabidopsis thaliana
actactggagtctatac

SEQ ID NO: 24519 - DNA, 17 bp, Arabidopsis thaliana
actactggcgatccaat

SEQ ID NO: 24520 - DNA, 17 bp, Arabidopsis thaliana
actactgggaagtcctc

SEQ ID NO: 24521 - DNA, 17 bp, Arabidopsis thaliana
actactgggatgaaccg

SEQ ID NO: 24522 - DNA, 17 bp, Arabidopsis thaliana
actactgggccaacaga

SEQ ID NO: 24523 - DNA, 17 bp, Arabidopsis thaliana
actactgggccaagggg

SEQ ID NO: 24524 - DNA, 17 bp, Arabidopsis thaliana
actactggtcgagtagc

SEQ ID NO: 24525 - DNA, 17 bp, Arabidopsis thaliana
actactggtgcaagatc

SEQ ID NO: 24526 - DNA, 17 bp, Arabidopsis thaliana
actactgtgaattgcca

SEQ ID NO: 24527 - DNA, 17 bp, Arabidopsis thaliana
actactgtttcaccggc

SEQ ID NO: 24528 - DNA, 17 bp, Arabidopsis thaliana
actacttaaattcctac

SEQ ID NO: 24529 - DNA, 17 bp, Arabidopsis thaliana
actacttaagtctctgc

SEQ ID NO: 24530 - DNA, 17 bp, Arabidopsis thaliana
actacttaatccgcttg

SEQ ID NO: 24531 - DNA, 17 bp, Arabidopsis thaliana
actacttacggttcatg

SEQ ID NO: 24532 - DNA, 17 bp, Arabidopsis thaliana
actacttaggcttttat

SEQ ID NO: 24533 - DNA, 17 bp, Arabidopsis thaliana
actacttaggtcaccag

SEQ ID NO: 24534 - DNA, 17 bp, Arabidopsis thaliana
actacttatttacaatg

SEQ ID NO: 24535 - DNA, 17 bp, Arabidopsis thaliana
actacttcaggggtaaa

SEQ ID NO: 24536 - DNA, 17 bp, Arabidopsis thaliana
actacttcctcgatatc

SEQ ID NO: 24537 - DNA, 17 bp, Arabidopsis thaliana
actacttctcgacaagg

SEQ ID NO: 24538 - DNA, 17 bp, Arabidopsis thaliana
actacttgcggtgcgga

SEQ ID NO: 24539 - DNA, 17 bp, Arabidopsis thaliana
actacttgggcctcttc

SEQ ID NO: 24540 - DNA, 17 bp, Arabidopsis thaliana
actacttgtggctgcag

SEQ ID NO: 24541 - DNA, 17 bp, Arabidopsis thaliana
actacttgtgttgctgt

SEQ ID NO: 24542 - DNA, 17 bp, Arabidopsis thaliana
actactttgtccgcttg

SEQ ID NO: 24543 - DNA, 17 bp, Arabidopsis thaliana
actactttttcgggcat

SEQ ID NO: 24544 - DNA, 17 bp, Arabidopsis thaliana
actacttttttgtctcg

SEQ ID NO: 24545 - DNA, 17 bp, Arabidopsis thaliana
actagaaacctctgtct

SEQ ID NO: 24546 - DNA, 17 bp, Arabidopsis thaliana
actagaacagggcagac

SEQ ID NO: 24547 - DNA, 17 bp, Arabidopsis thaliana
actagaacttttagacc

SEQ ID NO: 24548 - DNA, 17 bp, Arabidopsis thaliana
actagaagcggaagcac

SEQ ID NO: 24549 - DNA, 17 bp, Arabidopsis thaliana
actagaagcttggtgat

SEQ ID NO: 24550 - DNA, 17 bp, Arabidopsis thaliana
actagaaggagtgttga

SEQ ID NO: 24551 - DNA, 17 bp, Arabidopsis thaliana
actagaaggggtgtcga

SEQ ID NO: 24552 - DNA, 17 bp, Arabidopsis thaliana
actagaaggttctgggc

SEQ ID NO: 24553 - DNA, 17 bp, Arabidopsis thaliana
actagaagttgcgtgac

SEQ ID NO: 24554 - DNA, 17 bp, Arabidopsis thaliana
actagaagttggcctgg

SEQ ID NO: 24555 - DNA, 17 bp, Arabidopsis thaliana
actagaagttgtccacg

SEQ ID NO: 24556 - DNA, 17 bp, Arabidopsis thaliana
actagaccgcagaatta

SEQ ID NO: 24557 - DNA, 17 bp, Arabidopsis thaliana
actagaccgctgacgga

SEQ ID NO: 24558 - DNA, 17 bp, Arabidopsis thaliana
actagaccgctgaggga

SEQ ID NO: 24559 - DNA, 17 bp, Arabidopsis thaliana
actagagacaatatgcg

SEQ ID NO: 24560 - DNA, 17 bp, Arabidopsis thaliana
actagagactactgatg

SEQ ID NO: 24561 - DNA, 17 bp, Arabidopsis thaliana
actagaggtctagcaat

SEQ ID NO: 24562 - DNA, 17 bp, Arabidopsis thaliana
actagaggtgtgtcgat

SEQ ID NO: 24563 - DNA, 17 bp, Arabidopsis thaliana
actagaggttacaggtg

SEQ ID NO: 24564 - DNA, 17 bp, Arabidopsis thaliana
actagaggttgtgattc

SEQ ID NO: 24565 - DNA, 17 bp, Arabidopsis thaliana
actagataacgcaggtg

SEQ ID NO: 24566 - DNA, 17 bp, Arabidopsis thaliana
actagatattaacccgc

SEQ ID NO: 24567 - DNA, 17 bp, Arabidopsis thaliana
actagatattgacccgc

SEQ ID NO: 24568 - DNA, 17 bp, Arabidopsis thaliana
actagatcggcctttcg

SEQ ID NO: 24569 - DNA, 17 bp, Arabidopsis thaliana
actagatcgggttgcgg

SEQ ID NO: 24570 - DNA, 17 bp, Arabidopsis thaliana
actagatcgtggtgttt

SEQ ID NO: 24571 - DNA, 17 bp, Arabidopsis thaliana
actagatctgcgggacc

SEQ ID NO: 24572 - DNA, 17 bp, Arabidopsis thaliana
actagatgagggtgatt

SEQ ID NO: 24573 - DNA, 17 bp, Arabidopsis thaliana
actagatgttctgggcc

SEQ ID NO: 24574 - DNA, 17 bp, Arabidopsis thaliana
actagattcagcccttt

SEQ ID NO: 24575 - DNA, 17 bp, Arabidopsis thaliana
actagattcagctgagc

SEQ ID NO: 24576 - DNA, 17 bp, Arabidopsis thaliana
actagatttcacccgcg

SEQ ID NO: 24577 - DNA, 17 bp, Arabidopsis thaliana
actagattttcacccgc

SEQ ID NO: 24578 - DNA, 17 bp, Arabidopsis thaliana
actagattttgacccga

SEQ ID NO: 24579 - DNA, 17 bp, Arabidopsis thaliana
actagattttgacccgc

SEQ ID NO: 24580 - DNA, 17 bp, Arabidopsis thaliana
actagattttgaccctc

SEQ ID NO: 24581 - DNA, 17 bp, Arabidopsis thaliana
actagcaaatactgcag

SEQ ID NO: 24582 - DNA, 17 bp, Arabidopsis thaliana
actagcaacaactgtcc

SEQ ID NO: 24583 - DNA, 17 bp, Arabidopsis thaliana
actagcaagaaaagtga

SEQ ID NO: 24584 - DNA, 17 bp, Arabidopsis thaliana
actagcaccgggtcttg

SEQ ID NO: 24585 - DNA, 17 bp, Arabidopsis thaliana
actagcactctcagcac

SEQ ID NO: 24586 - DNA, 17 bp, Arabidopsis thaliana
actagcaggtttcgtct

SEQ ID NO: 24587 - DNA, 17 bp, Arabidopsis thaliana
actagcattccagatct

SEQ ID NO: 24588 - DNA, 17 bp, Arabidopsis thaliana
actagccgggtgttggt

SEQ ID NO: 24589 - DNA, 17 bp, Arabidopsis thaliana
actagcgacgcatgcac

SEQ ID NO: 24590 - DNA, 17 bp, Arabidopsis thaliana
actagcttcttccacag

SEQ ID NO: 24591 - DNA, 17 bp, Arabidopsis thaliana
actaggaacgggtatga

SEQ ID NO: 24592 - DNA, 17 bp, Arabidopsis thaliana
actaggactacttgtcg

SEQ ID NO: 24593 - DNA, 17 bp, Arabidopsis thaliana
actaggacttaacccgc

SEQ ID NO: 24594 - DNA, 17 bp, Arabidopsis thaliana
actaggaggttttgcgc

SEQ ID NO: 24595 - DNA, 17 bp, Arabidopsis thaliana
actaggagtagcgttgt

SEQ ID NO: 24596 - DNA, 17 bp, Arabidopsis thaliana
actaggatatcctcaag

SEQ ID NO: 24597 - DNA, 17 bp, Arabidopsis thaliana
actaggatcttcaagtt

SEQ ID NO: 24598 - DNA, 17 bp, Arabidopsis thaliana
actaggatgagatttca

SEQ ID NO: 24599 - DNA, 17 bp, Arabidopsis thaliana
actaggatgggtgacct

SEQ ID NO: 24600 - DNA, 17 bp, Arabidopsis thaliana
actaggattcaacccgt

SEQ ID NO: 24601 - DNA, 17 bp, Arabidopsis thaliana
actaggcactaggatga

SEQ ID NO: 24602 - DNA, 17 bp, Arabidopsis thaliana
actaggcgctgtgcgta

SEQ ID NO: 24603 - DNA, 17 bp, Arabidopsis thaliana
actagggactattccag

SEQ ID NO: 24604 - DNA, 17 bp, Arabidopsis thaliana
actagggcaacaacacg

SEQ ID NO: 24605 - DNA, 17 bp, Arabidopsis thaliana
actagggcacgtctgcc

SEQ ID NO: 24606 - DNA, 17 bp, Arabidopsis thaliana
actaggtcagtacccgt

SEQ ID NO: 24607 - DNA, 17 bp, Arabidopsis thaliana
actaggtcagtacctgt

SEQ ID NO: 24608 - DNA, 17 bp, Arabidopsis thaliana
actaggtgagtacccac

SEQ ID NO: 24609 - DNA, 17 bp, Arabidopsis thaliana
actaggtgccgaactag

SEQ ID NO: 24610 - DNA, 17 bp, Arabidopsis thaliana
actaggtgtgatgagcc

SEQ ID NO: 24611 - DNA, 17 bp, Arabidopsis thaliana
actaggttgtgtcagat

SEQ ID NO: 24612 - DNA, 17 bp, Arabidopsis thaliana
actaggtttccctcggg

SEQ ID NO: 24613 - DNA, 17 bp, Arabidopsis thaliana
actagtaacgtcacctg

SEQ ID NO: 24614 - DNA, 17 bp, Arabidopsis thaliana
actagtaaggtcacctg

SEQ ID NO: 24615 - DNA, 17 bp, Arabidopsis thaliana
actagtccaccgtctga

SEQ ID NO: 24616 - DNA, 17 bp, Arabidopsis thaliana
actagtcctggctggcc

SEQ ID NO: 24617 - DNA, 17 bp, Arabidopsis thaliana
actagtcgcatcctgta

SEQ ID NO: 24618 - DNA, 17 bp, Arabidopsis thaliana
actagtggagctacggt

SEQ ID NO: 24619 - DNA, 17 bp, Arabidopsis thaliana
actagtgtccacgatga

SEQ ID NO: 24620 - DNA, 17 bp, Arabidopsis thaliana
actagtgtttcctcttg

SEQ ID NO: 24621 - DNA, 17 bp, Arabidopsis thaliana
actagttcaaaattcgg

SEQ ID NO: 24622 - DNA, 17 bp, Arabidopsis thaliana
actagttgaccttggct

SEQ ID NO: 24623 - DNA, 17 bp, Arabidopsis thaliana
actagttgccctgtctg

SEQ ID NO: 24624 - DNA, 17 bp, Arabidopsis thaliana
actagtttacattttcg

SEQ ID NO: 24625 - DNA, 17 bp, Arabidopsis thaliana
actagtttccatgtcct

SEQ ID NO: 24626 - DNA, 17 bp, Arabidopsis thaliana
actagtttccgaacaaa

SEQ ID NO: 24627 - DNA, 17 bp, Arabidopsis thaliana
actagtttgtccgcttg

SEQ ID NO: 24628 - DNA, 17 bp, Arabidopsis thaliana
actataaacattcgttg

SEQ ID NO: 24629 - DNA, 17 bp, Arabidopsis thaliana
actataaacgcgtcttg

SEQ ID NO: 24630 - DNA, 17 bp, Arabidopsis thaliana
actatacctcgggattc

SEQ ID NO: 24631 - DNA, 17 bp, Arabidopsis thaliana
actatacgtcgcacgtt

SEQ ID NO: 24632 - DNA, 17 bp, Arabidopsis thaliana
actatcaacttgtttct

SEQ ID NO: 24633 - DNA, 17 bp, Arabidopsis thaliana
actatcacagataccca

SEQ ID NO: 24634 - DNA, 17 bp, Arabidopsis thaliana
actatcaccagggacca

SEQ ID NO: 24635 - DNA, 17 bp, Arabidopsis thaliana
actatcacttccatcgt

SEQ ID NO: 24636 - DNA, 17 bp, Arabidopsis thaliana
actatcagaattcagct

SEQ ID NO: 24637 - DNA, 17 bp, Arabidopsis thaliana
actatcagataaaccag

SEQ ID NO: 24638 - DNA, 17 bp, Arabidopsis thaliana
actatcagatgaggtgc

SEQ ID NO: 24639 - DNA, 17 bp, Arabidopsis thaliana
actatcaggtaaatcta

SEQ ID NO: 24640 - DNA, 17 bp, Arabidopsis thaliana
actatcaggtgaaccaa

SEQ ID NO: 24641 - DNA, 17 bp, Arabidopsis thaliana
actatcaggtgaaccac

SEQ ID NO: 24642 - DNA, 17 bp, Arabidopsis thaliana
actatccagcgcctgac

SEQ ID NO: 24643 - DNA, 17 bp, Arabidopsis thaliana
actatccgtatccggaa

SEQ ID NO: 24644 - DNA, 17 bp, Arabidopsis thaliana
actatcgaagctgttgc

SEQ ID NO: 24645 - DNA, 17 bp, Arabidopsis thaliana
actatcgacacaagtcc

SEQ ID NO: 24646 - DNA, 17 bp, Arabidopsis thaliana
actatcgacattaccag

SEQ ID NO: 24647 - DNA, 17 bp, Arabidopsis thaliana
actatcgacccaaaccc

SEQ ID NO: 24648 - DNA, 17 bp, Arabidopsis thaliana
actatcgatccaaatcc

SEQ ID NO: 24649 - DNA, 17 bp, Arabidopsis thaliana
actatcgcacccgctgg

SEQ ID NO: 24650 - DNA, 17 bp, Arabidopsis thaliana
actatcgcacctgctgg

SEQ ID NO: 24651 - DNA, 17 bp, Arabidopsis thaliana
actatcgcgacgcgggc

SEQ ID NO: 24652 - DNA, 17 bp, Arabidopsis thaliana
actatcgctcatctcca

SEQ ID NO: 24653 - DNA, 17 bp, Arabidopsis thaliana
actatcggataaaccag

SEQ ID NO: 24654 - DNA, 17 bp, Arabidopsis thaliana
actatcgggaccttttc

SEQ ID NO: 24655 - DNA, 17 bp, Arabidopsis thaliana
actatctacttcttggt

SEQ ID NO: 24656 - DNA, 17 bp, Arabidopsis thaliana
actatctccctgacgag

SEQ ID NO: 24657 - DNA, 17 bp, Arabidopsis thaliana
actatctcctggattag

SEQ ID NO: 24658 - DNA, 17 bp, Arabidopsis thaliana
actatctcgctgcagct

SEQ ID NO: 24659 - DNA, 17 bp, Arabidopsis thaliana
actatctctttctccaa

SEQ ID NO: 24660 - DNA, 17 bp, Arabidopsis thaliana
actatctgcggcggatt

SEQ ID NO: 24661 - DNA, 17 bp, Arabidopsis thaliana
actatctggataggttt

SEQ ID NO: 24662 - DNA, 17 bp, Arabidopsis thaliana
actatctgtttcgtacc

SEQ ID NO: 24663 - DNA, 17 bp, Arabidopsis thaliana
actatcttcgcggatct

SEQ ID NO: 24664 - DNA, 17 bp, Arabidopsis thaliana
actatcttctctggaag

SEQ ID NO: 24665 - DNA, 17 bp, Arabidopsis thaliana
actatcttgtgcgacta

SEQ ID NO: 24666 - DNA, 17 bp, Arabidopsis thaliana
actatgaactccgaatc

SEQ ID NO: 24667 - DNA, 17 bp, Arabidopsis thaliana
actatgaatgtccgtgc

SEQ ID NO: 24668 - DNA, 17 bp, Arabidopsis thaliana
actatgacatcatgcca

SEQ ID NO: 24669 - DNA, 17 bp, Arabidopsis thaliana
actatgacccaataaac

SEQ ID NO: 24670 - DNA, 17 bp, Arabidopsis thaliana
actatgacccaataagc

SEQ ID NO: 24671 - DNA, 17 bp, Arabidopsis thaliana
actatgagaccatcttc

SEQ ID NO: 24672 - DNA, 17 bp, Arabidopsis thaliana
actatgcacttggtatc

SEQ ID NO: 24673 - DNA, 17 bp, Arabidopsis thaliana
actatgccgtccggaat

SEQ ID NO: 24674 - DNA, 17 bp, Arabidopsis thaliana
actatgcctattgcgcg

SEQ ID NO: 24675 - DNA, 17 bp, Arabidopsis thaliana
actatgcctgagcgggg

SEQ ID NO: 24676 - DNA, 17 bp, Arabidopsis thaliana
actatgcttcatctggt

SEQ ID NO: 24677 - DNA, 17 bp, Arabidopsis thaliana
actatggaccaagcacg

SEQ ID NO: 24678 - DNA, 17 bp, Arabidopsis thaliana
actatggacgcaaagat

SEQ ID NO: 24679 - DNA, 17 bp, Arabidopsis thaliana
actatggactggacatt

SEQ ID NO: 24680 - DNA, 17 bp, Arabidopsis thaliana
actatggagttctgcaa

SEQ ID NO: 24681 - DNA, 17 bp, Arabidopsis thaliana
actatggatcggacttt

SEQ ID NO: 24682 - DNA, 17 bp, Arabidopsis thaliana
actatggcccgctggtt

SEQ ID NO: 24683 - DNA, 17 bp, Arabidopsis thaliana
actatggcctgatggtc

SEQ ID NO: 24684 - DNA, 17 bp, Arabidopsis thaliana
actatggctaaaatcag

SEQ ID NO: 24685 - DNA, 17 bp, Arabidopsis thaliana
actatggctaatgcgca

SEQ ID NO: 24686 - DNA, 17 bp, Arabidopsis thaliana
actatggctggtgttag

SEQ ID NO: 24687 - DNA, 17 bp, Arabidopsis thaliana
actatggcttgtgatgt

SEQ ID NO: 24688 - DNA, 17 bp, Arabidopsis thaliana
actatgggagctggcca

SEQ ID NO: 24689 - DNA, 17 bp, Arabidopsis thaliana
actatgggcccatgttg

SEQ ID NO: 24690 - DNA, 17 bp, Arabidopsis thaliana
actatggggtagccttg

SEQ ID NO: 24691 - DNA, 17 bp, Arabidopsis thaliana
actatgtatctcgtaac

SEQ ID NO: 24692 - DNA, 17 bp, Arabidopsis thaliana
actatgtcatccgcttt

SEQ ID NO: 24693 - DNA, 17 bp, Arabidopsis thaliana
actatgttccttttggg

SEQ ID NO: 24694 - DNA, 17 bp, Arabidopsis thaliana
actatgttgcggcccgt

SEQ ID NO: 24695 - DNA, 17 bp, Arabidopsis thaliana
actattactggctgcgt

SEQ ID NO: 24696 - DNA, 17 bp, Arabidopsis thaliana
actattatcctctctgt

SEQ ID NO: 24697 - DNA, 17 bp, Arabidopsis thaliana
actattcaaccgtccga

SEQ ID NO: 24698 - DNA, 17 bp, Arabidopsis thaliana
actattccgataaatct

SEQ ID NO: 24699 - DNA, 17 bp, Arabidopsis thaliana
actattcctgtgtaagt

SEQ ID NO: 24700 - DNA, 17 bp, Arabidopsis thaliana
actattcgaaaggtatc

SEQ ID NO: 24701 - DNA, 17 bp, Arabidopsis thaliana
actattgacggctccgg

SEQ ID NO: 24702 - DNA, 17 bp, Arabidopsis thaliana
actattgagaccgtttt

SEQ ID NO: 24703 - DNA, 17 bp, Arabidopsis thaliana
actattgcaccgctggt

SEQ ID NO: 24704 - DNA, 17 bp, Arabidopsis thaliana
actattgcacctgctgg

SEQ ID NO: 24705 - DNA, 17 bp, Arabidopsis thaliana
actattgcgatacggag

SEQ ID NO: 24706 - DNA, 17 bp, Arabidopsis thaliana
actattgggaactgggt

SEQ ID NO: 24707 - DNA, 17 bp, Arabidopsis thaliana
actattgggatgaaccg

SEQ ID NO: 24708 - DNA, 17 bp, Arabidopsis thaliana
actattggtcgatatct

SEQ ID NO: 24709 - DNA, 17 bp, Arabidopsis thaliana
actattggtcgctgagt

SEQ ID NO: 24710 - DNA, 17 bp, Arabidopsis thaliana
actatttgaaccgcact

SEQ ID NO: 24711 - DNA, 17 bp, Arabidopsis thaliana
actatttgaaccggatt

SEQ ID NO: 24712 - DNA, 17 bp, Arabidopsis thaliana
actatttgattcgtaca

SEQ ID NO: 24713 - DNA, 17 bp, Arabidopsis thaliana
actatttggagcggtcg

SEQ ID NO: 24714 - DNA, 17 bp, Arabidopsis thaliana
actatttggatcgagat

SEQ ID NO: 24715 - DNA, 17 bp, Arabidopsis thaliana
actatttgtggacctaa

SEQ ID NO: 24716 - DNA, 17 bp, Arabidopsis thaliana
actattttttggttgtc

SEQ ID NO: 24717 - DNA, 17 bp, Arabidopsis thaliana
actcaaaatcgccggcg

SEQ ID NO: 24718 - DNA, 17 bp, Arabidopsis thaliana
actcaaaattcttcaaa

SEQ ID NO: 24719 - DNA, 17 bp, Arabidopsis thaliana
actcaaacatgtgcttg

SEQ ID NO: 24720 - DNA, 17 bp, Arabidopsis thaliana
actcaaacctgtaacga

SEQ ID NO: 24721 - DNA, 17 bp, Arabidopsis thaliana
actcaaacgagccaaaa

SEQ ID NO: 24722 - DNA, 17 bp, Arabidopsis thaliana
actcaaactggtggtgg

SEQ ID NO: 24723 - DNA, 17 bp, Arabidopsis thaliana
actcaaaggattgtacc

SEQ ID NO: 24724 - DNA, 17 bp, Arabidopsis thaliana
actcaaaggattgtgcc

SEQ ID NO: 24725 - DNA, 17 bp, Arabidopsis thaliana
actcaaaggattgtgcg

SEQ ID NO: 24726 - DNA, 17 bp, Arabidopsis thaliana
actcaaagtggctgtac

SEQ ID NO: 24727 - DNA, 17 bp, Arabidopsis thaliana
actcaaatccctcgtga

SEQ ID NO: 24728 - DNA, 17 bp, Arabidopsis thaliana
actcaaatcgctctgtt

SEQ ID NO: 24729 - DNA, 17 bp, Arabidopsis thaliana
actcaaatctactgttt

SEQ ID NO: 24730 - DNA, 17 bp, Arabidopsis thaliana
actcaaatggacttaac

SEQ ID NO: 24731 - DNA, 17 bp, Arabidopsis thaliana
actcaaattctactgct

SEQ ID NO: 24732 - DNA, 17 bp, Arabidopsis thaliana
actcaaattttgggcca

SEQ ID NO: 24733 - DNA, 17 bp, Arabidopsis thaliana
actcaacattgccatag

SEQ ID NO: 24734 - DNA, 17 bp, Arabidopsis thaliana
actcaacgagtgtggca

SEQ ID NO: 24735 - DNA, 17 bp, Arabidopsis thaliana
actcaactatcgcaggc

SEQ ID NO: 24736 - DNA, 17 bp, Arabidopsis thaliana
actcaacttccgatgtg

SEQ ID NO: 24737 - DNA, 17 bp, Arabidopsis thaliana
actcaacttcgatgtgg

SEQ ID NO: 24738 - DNA, 17 bp, Arabidopsis thaliana
actcaacttctaatgtg

SEQ ID NO: 24739 - DNA, 17 bp, Arabidopsis thaliana
actcaactttcgatgtg

SEQ ID NO: 24740 - DNA, 17 bp, Arabidopsis thaliana
actcaactttcgatgtt

SEQ ID NO: 24741 - DNA, 17 bp, Arabidopsis thaliana
actcaagaatagggcgt

SEQ ID NO: 24742 - DNA, 17 bp, Arabidopsis thaliana
actcaagaccgttgtca

SEQ ID NO: 24743 - DNA, 17 bp, Arabidopsis thaliana
actcaagacctggtgct

SEQ ID NO: 24744 - DNA, 17 bp, Arabidopsis thaliana
actcaagacgaacttgg

SEQ ID NO: 24745 - DNA, 17 bp, Arabidopsis thaliana
actcaagagattcagga

SEQ ID NO: 24746 - DNA, 17 bp, Arabidopsis thaliana
actcaagcagggagatc

SEQ ID NO: 24747 - DNA, 17 bp, Arabidopsis thaliana
actcaagcccgttcaag

SEQ ID NO: 24748 - DNA, 17 bp, Arabidopsis thaliana
actcaagcctaggacaa

SEQ ID NO: 24749 - DNA, 17 bp, Arabidopsis thaliana
actcaagcttgtgccta

SEQ ID NO: 24750 - DNA, 17 bp, Arabidopsis thaliana
actcaaggtggctatag

SEQ ID NO: 24751 - DNA, 17 bp, Arabidopsis thaliana
actcaagtgctgtgtgg

SEQ ID NO: 24752 - DNA, 17 bp, Arabidopsis thaliana
actcaagttagattttg

SEQ ID NO: 24753 - DNA, 17 bp, Arabidopsis thaliana
actcaagttgcgcccca

SEQ ID NO: 24754 - DNA, 17 bp, Arabidopsis thaliana
actcaatcatacacatg

SEQ ID NO: 24755 - DNA, 17 bp, Arabidopsis thaliana
actcaatctgcttttgt

SEQ ID NO: 24756 - DNA, 17 bp, Arabidopsis thaliana
actcaattcatgcccat

SEQ ID NO: 24757 - DNA, 17 bp, Arabidopsis thaliana
actcaatttgcccttgt

SEQ ID NO: 24758 - DNA, 17 bp, Arabidopsis thaliana
actcaattttacatatg

SEQ ID NO: 24759 - DNA, 17 bp, Arabidopsis thaliana
actcacaaggtgcttcc

SEQ ID NO: 24760 - DNA, 17 bp, Arabidopsis thaliana
actcacaagtatatccg

SEQ ID NO: 24761 - DNA, 17 bp, Arabidopsis thaliana
actcacatgagatggat

SEQ ID NO: 24762 - DNA, 17 bp, Arabidopsis thaliana
actcacatgattgtggc

SEQ ID NO: 24763 - DNA, 17 bp, Arabidopsis thaliana
actcacatgtatcgggt

SEQ ID NO: 24764 - DNA, 17 bp, Arabidopsis thaliana
actcacattttgggttt

SEQ ID NO: 24765 - DNA, 17 bp, Arabidopsis thaliana
actcaccagcctcgcta

SEQ ID NO: 24766 - DNA, 17 bp, Arabidopsis thaliana
actcaccatcttcgttg

SEQ ID NO: 24767 - DNA, 17 bp, Arabidopsis thaliana
actcacccttgaagcag

SEQ ID NO: 24768 - DNA, 17 bp, Arabidopsis thaliana
actcaccggttcggatc

SEQ ID NO: 24769 - DNA, 17 bp, Arabidopsis thaliana
actcacctcatgctgcc

SEQ ID NO: 24770 - DNA, 17 bp, Arabidopsis thaliana
actcacctgccgaatca

SEQ ID NO: 24771 - DNA, 17 bp, Arabidopsis thaliana
actcaccttctgctaac

SEQ ID NO: 24772 - DNA, 17 bp, Arabidopsis thaliana
actcaccttctgctaag

SEQ ID NO: 24773 - DNA, 17 bp, Arabidopsis thaliana
actcaccttggtgttgc

SEQ ID NO: 24774 - DNA, 17 bp, Arabidopsis thaliana
actcacgactgtgatca

SEQ ID NO: 24775 - DNA, 17 bp, Arabidopsis thaliana
actcacgactgttcgac

SEQ ID NO: 24776 - DNA, 17 bp, Arabidopsis thaliana
actcacgagacccttca

SEQ ID NO: 24777 - DNA, 17 bp, Arabidopsis thaliana
actcacgagatcatgac

SEQ ID NO: 24778 - DNA, 17 bp, Arabidopsis thaliana
actcacgccgtcgatca

SEQ ID NO: 24779 - DNA, 17 bp, Arabidopsis thaliana
actcacgggtattagat

SEQ ID NO: 24780 - DNA, 17 bp, Arabidopsis thaliana
actcacgtctgcctggg

SEQ ID NO: 24781 - DNA, 17 bp, Arabidopsis thaliana
actcacgtggtcgcttt

SEQ ID NO: 24782 - DNA, 17 bp, Arabidopsis thaliana
actcacgttggctttct

SEQ ID NO: 24783 - DNA, 17 bp, Arabidopsis thaliana
actcactaagtttgcag

SEQ ID NO: 24784 - DNA, 17 bp, Arabidopsis thaliana
actcactacatcttggt

SEQ ID NO: 24785 - DNA, 17 bp, Arabidopsis thaliana
actcactacatgagaac

SEQ ID NO: 24786 - DNA, 17 bp, Arabidopsis thaliana
actcactacatgcgggc

SEQ ID NO: 24787 - DNA, 17 bp, Arabidopsis thaliana
actcactactgcacagg

SEQ ID NO: 24788 - DNA, 17 bp, Arabidopsis thaliana
actcactacttaagtct

SEQ ID NO: 24789 - DNA, 17 bp, Arabidopsis thaliana
actcactacttaatccg

SEQ ID NO: 24790 - DNA, 17 bp, Arabidopsis thaliana
actcactactttgtccg

SEQ ID NO: 24791 - DNA, 17 bp, Arabidopsis thaliana
actcactagaagttgtc

SEQ ID NO: 24792 - DNA, 17 bp, Arabidopsis thaliana
actcactagattttcac

SEQ ID NO: 24793 - DNA, 17 bp, Arabidopsis thaliana
actcactagattttgac

SEQ ID NO: 24794 - DNA, 17 bp, Arabidopsis thaliana
actcactagcagagccg

SEQ ID NO: 24795 - DNA, 17 bp, Arabidopsis thaliana
actcactatgcaccttt

SEQ ID NO: 24796 - DNA, 17 bp, Arabidopsis thaliana
actcactattaacctat

SEQ ID NO: 24797 - DNA, 17 bp, Arabidopsis thaliana
actcactcaaaggattg

SEQ ID NO: 24798 - DNA, 17 bp, Arabidopsis thaliana
actcactcaagacgaac

SEQ ID NO: 24799 - DNA, 17 bp, Arabidopsis thaliana
actcactcacaaggtgc

SEQ ID NO: 24800 - DNA, 17 bp, Arabidopsis thaliana
actcactcacgagatca

SEQ ID NO: 24801 - DNA, 17 bp, Arabidopsis thaliana
actcactcactcgacaa

SEQ ID NO: 24802 - DNA, 17 bp, Arabidopsis thaliana
actcactcactgctcta

SEQ ID NO: 24803 - DNA, 17 bp, Arabidopsis thaliana
actcactcactggtgtg

SEQ ID NO: 24804 - DNA, 17 bp, Arabidopsis thaliana
actcactcagaatcgac

SEQ ID NO: 24805 - DNA, 17 bp, Arabidopsis thaliana
actcactcagacgcaca

SEQ ID NO: 24806 - DNA, 17 bp, Arabidopsis thaliana
actcactcagcaggtgc

SEQ ID NO: 24807 - DNA, 17 bp, Arabidopsis thaliana
actcactcaggtttttc

SEQ ID NO: 24808 - DNA, 17 bp, Arabidopsis thaliana
actcactcagtttgtca

SEQ ID NO: 24809 - DNA, 17 bp, Arabidopsis thaliana
actcactcataagattg

SEQ ID NO: 24810 - DNA, 17 bp, Arabidopsis thaliana
actcactcataggatgt

SEQ ID NO: 24811 - DNA, 17 bp, Arabidopsis thaliana
actcactcataggattg

SEQ ID NO: 24812 - DNA, 17 bp, Arabidopsis thaliana
actcactcatccgctag

SEQ ID NO: 24813 - DNA, 17 bp, Arabidopsis thaliana
actcactcccggttgga

SEQ ID NO: 24814 - DNA, 17 bp, Arabidopsis thaliana
actcactccgcagttaa

SEQ ID NO: 24815 - DNA, 17 bp, Arabidopsis thaliana
actcactcctgtccgac

SEQ ID NO: 24816 - DNA, 17 bp, Arabidopsis thaliana
actcactccttcatcta

SEQ ID NO: 24817 - DNA, 17 bp, Arabidopsis thaliana
actcactcgacaaagtg

SEQ ID NO: 24818 - DNA, 17 bp, Arabidopsis thaliana
actcactcgaccaccca

SEQ ID NO: 24819 - DNA, 17 bp, Arabidopsis thaliana
actcactcgacggatcg

SEQ ID NO: 24820 - DNA, 17 bp, Arabidopsis thaliana
actcactcgcagctttc

SEQ ID NO: 24821 - DNA, 17 bp, Arabidopsis thaliana
actcactcgcatggttc

SEQ ID NO: 24822 - DNA, 17 bp, Arabidopsis thaliana
actcactcggattactg

SEQ ID NO: 24823 - DNA, 17 bp, Arabidopsis thaliana
actcactcgggcgagta

SEQ ID NO: 24824 - DNA, 17 bp, Arabidopsis thaliana
actcactcgtggctgct

SEQ ID NO: 24825 - DNA, 17 bp, Arabidopsis thaliana
actcactcgttcccagc

SEQ ID NO: 24826 - DNA, 17 bp, Arabidopsis thaliana
actcactctatttcgtg

SEQ ID NO: 24827 - DNA, 17 bp, Arabidopsis thaliana
actcactctcatgtgct

SEQ ID NO: 24828 - DNA, 17 bp, Arabidopsis thaliana
actcactctctagggtt

SEQ ID NO: 24829 - DNA, 17 bp, Arabidopsis thaliana
actcactctctccatat

SEQ ID NO: 24830 - DNA, 17 bp, Arabidopsis thaliana
actcactctctccatga

SEQ ID NO: 24831 - DNA, 17 bp, Arabidopsis thaliana
actcactctgcggtaca

SEQ ID NO: 24832 - DNA, 17 bp, Arabidopsis thaliana
actcactctgctgcgcc

SEQ ID NO: 24833 - DNA, 17 bp, Arabidopsis thaliana
actcactctgctgggcc

SEQ ID NO: 24834 - DNA, 17 bp, Arabidopsis thaliana
actcactctgtaccgtg

SEQ ID NO: 24835 - DNA, 17 bp, Arabidopsis thaliana
actcactcttaagatcg

SEQ ID NO: 24836 - DNA, 17 bp, Arabidopsis thaliana
actcactgaaaacgccg

SEQ ID NO: 24837 - DNA, 17 bp, Arabidopsis thaliana
actcactgaaaccagcg

SEQ ID NO: 24838 - DNA, 17 bp, Arabidopsis thaliana
actcactgaatctgaga

SEQ ID NO: 24839 - DNA, 17 bp, Arabidopsis thaliana
actcactgagattcagc

SEQ ID NO: 24840 - DNA, 17 bp, Arabidopsis thaliana
actcactgagttttcca

SEQ ID NO: 24841 - DNA, 17 bp, Arabidopsis thaliana
actcactgatttgtcgg

SEQ ID NO: 24842 - DNA, 17 bp, Arabidopsis thaliana
actcactgcaccatttc

SEQ ID NO: 24843 - DNA, 17 bp, Arabidopsis thaliana
actcactgcgaatggct

SEQ ID NO: 24844 - DNA, 17 bp, Arabidopsis thaliana
actcactgcgacgagag

SEQ ID NO: 24845 - DNA, 17 bp, Arabidopsis thaliana
actcactgcgttttgcg

SEQ ID NO: 24846 - DNA, 17 bp, Arabidopsis thaliana
actcactgctctatcta

SEQ ID NO: 24847 - DNA, 17 bp, Arabidopsis thaliana
actcactgctctatctg

SEQ ID NO: 24848 - DNA, 17 bp, Arabidopsis thaliana
actcactgcttgatttg

SEQ ID NO: 24849 - DNA, 17 bp, Arabidopsis thaliana
actcactggaaggtgcg

SEQ ID NO: 24850 - DNA, 17 bp, Arabidopsis thaliana
actcactggtgtgatga

SEQ ID NO: 24851 - DNA, 17 bp, Arabidopsis thaliana
actcactggttggtgtg

SEQ ID NO: 24852 - DNA, 17 bp, Arabidopsis thaliana
actcactggtttgatga

SEQ ID NO: 24853 - DNA, 17 bp, Arabidopsis thaliana
actcactgtcaaggagc

SEQ ID NO: 24854 - DNA, 17 bp, Arabidopsis thaliana
actcactgtcaccaccg

SEQ ID NO: 24855 - DNA, 17 bp, Arabidopsis thaliana
actcactgtgaaactgc

SEQ ID NO: 24856 - DNA, 17 bp, Arabidopsis thaliana
actcactgtgaacgaca

SEQ ID NO: 24857 - DNA, 17 bp, Arabidopsis thaliana
actcactgtgaagtatg

SEQ ID NO: 24858 - DNA, 17 bp, Arabidopsis thaliana
actcactgtgactcaag

SEQ ID NO: 24859 - DNA, 17 bp, Arabidopsis thaliana
actcactgttacccaaa

SEQ ID NO: 24860 - DNA, 17 bp, Arabidopsis thaliana
actcactgttccctggg

SEQ ID NO: 24861 - DNA, 17 bp, Arabidopsis thaliana
actcactgttttaggtt

SEQ ID NO: 24862 - DNA, 17 bp, Arabidopsis thaliana
actcacttaaaccgcag

SEQ ID NO: 24863 - DNA, 17 bp, Arabidopsis thaliana
actcacttaattttgtg

SEQ ID NO: 24864 - DNA, 17 bp, Arabidopsis thaliana
actcacttacgggtttt

SEQ ID NO: 24865 - DNA, 17 bp, Arabidopsis thaliana
actcacttagtcgcagc

SEQ ID NO: 24866 - DNA, 17 bp, Arabidopsis thaliana
actcacttatttacaat

SEQ ID NO: 24867 - DNA, 17 bp, Arabidopsis thaliana
actcacttcaacggcgg

SEQ ID NO: 24868 - DNA, 17 bp, Arabidopsis thaliana
actcacttcatggacct

SEQ ID NO: 24869 - DNA, 17 bp, Arabidopsis thaliana
actcacttccgatgtgg

SEQ ID NO: 24870 - DNA, 17 bp, Arabidopsis thaliana
actcacttccgcacgtc

SEQ ID NO: 24871 - DNA, 17 bp, Arabidopsis thaliana
actcacttcctatgctc

SEQ ID NO: 24872 - DNA, 17 bp, Arabidopsis thaliana
actcacttcctcccagg

SEQ ID NO: 24873 - DNA, 17 bp, Arabidopsis thaliana
actcacttctaggaaga

SEQ ID NO: 24874 - DNA, 17 bp, Arabidopsis thaliana
actcacttctcgaataa

SEQ ID NO: 24875 - DNA, 17 bp, Arabidopsis thaliana
actcacttctgacctgc

SEQ ID NO: 24876 - DNA, 17 bp, Arabidopsis thaliana
actcacttctgcaaggc

SEQ ID NO: 24877 - DNA, 17 bp, Arabidopsis thaliana
actcacttcttggttgt

SEQ ID NO: 24878 - DNA, 17 bp, Arabidopsis thaliana
actcacttgaccattta

SEQ ID NO: 24879 - DNA, 17 bp, Arabidopsis thaliana
actcacttgcgttcaaa

SEQ ID NO: 24880 - DNA, 17 bp, Arabidopsis thaliana
actcacttgctttgtta

SEQ ID NO: 24881 - DNA, 17 bp, Arabidopsis thaliana
actcacttggacattga

SEQ ID NO: 24882 - DNA, 17 bp, Arabidopsis thaliana
actcacttgggagattt

SEQ ID NO: 24883 - DNA, 17 bp, Arabidopsis thaliana
actcacttggtccgcag

SEQ ID NO: 24884 - DNA, 17 bp, Arabidopsis thaliana
actcacttggttggact

SEQ ID NO: 24885 - DNA, 17 bp, Arabidopsis thaliana
actcacttggtttcggg

SEQ ID NO: 24886 - DNA, 17 bp, Arabidopsis thaliana
actcacttgtactttcg

SEQ ID NO: 24887 - DNA, 17 bp, Arabidopsis thaliana
actcacttgtgcgaggg

SEQ ID NO: 24888 - DNA, 17 bp, Arabidopsis thaliana
actcactttaggcttcc

SEQ ID NO: 24889 - DNA, 17 bp, Arabidopsis thaliana
actcactttcatgtgct

SEQ ID NO: 24890 - DNA, 17 bp, Arabidopsis thaliana
actcactttcggttcag

SEQ ID NO: 24891 - DNA, 17 bp, Arabidopsis thaliana
actcactttctaaggcc

SEQ ID NO: 24892 - DNA, 17 bp, Arabidopsis thaliana
actcactttctgggtca

SEQ ID NO: 24893 - DNA, 17 bp, Arabidopsis thaliana
actcactttcttctgct

SEQ ID NO: 24894 - DNA, 17 bp, Arabidopsis thaliana
actcactttgaattaag

SEQ ID NO: 24895 - DNA, 17 bp, Arabidopsis thaliana
actcactttgacccaga

SEQ ID NO: 24896 - DNA, 17 bp, Arabidopsis thaliana
actcactttgactgttg

SEQ ID NO: 24897 - DNA, 17 bp, Arabidopsis thaliana
actcactttgatttctt

SEQ ID NO: 24898 - DNA, 17 bp, Arabidopsis thaliana
actcactttggcctatg

SEQ ID NO: 24899 - DNA, 17 bp, Arabidopsis thaliana
actcacttttaccatcg

SEQ ID NO: 24900 - DNA, 17 bp, Arabidopsis thaliana
actcacttttgactgtt

SEQ ID NO: 24901 - DNA, 17 bp, Arabidopsis thaliana
actcacttttgatcgct

SEQ ID NO: 24902 - DNA, 17 bp, Arabidopsis thaliana
actcacttttgcaaaaa

SEQ ID NO: 24903 - DNA, 17 bp, Arabidopsis thaliana
actcactttttcgcaga

SEQ ID NO: 24904 - DNA, 17 bp, Arabidopsis thaliana
actcactttttcgggca

SEQ ID NO: 24905 - DNA, 17 bp, Arabidopsis thaliana
actcagaatcgactgtc

SEQ ID NO: 24906 - DNA, 17 bp, Arabidopsis thaliana
actcagaattcgcattt

SEQ ID NO: 24907 - DNA, 17 bp, Arabidopsis thaliana
actcagacgcacatctg

SEQ ID NO: 24908 - DNA, 17 bp, Arabidopsis thaliana
actcagacttacagcct

SEQ ID NO: 24909 - DNA, 17 bp, Arabidopsis thaliana
actcagagaccagagat

SEQ ID NO: 24910 - DNA, 17 bp, Arabidopsis thaliana
actcagagtattgtgcg

SEQ ID NO: 24911 - DNA, 17 bp, Arabidopsis thaliana
actcagatcaaacaatg

SEQ ID NO: 24912 - DNA, 17 bp, Arabidopsis thaliana
actcagatccaccaccg

SEQ ID NO: 24913 - DNA, 17 bp, Arabidopsis thaliana
actcagatctgaagcgt

SEQ ID NO: 24914 - DNA, 17 bp, Arabidopsis thaliana
actcagatgggatctgg

SEQ ID NO: 24915 - DNA, 17 bp, Arabidopsis thaliana
actcagattcagccctt

SEQ ID NO: 24916 - DNA, 17 bp, Arabidopsis thaliana
actcagattgaaaagaa

SEQ ID NO: 24917 - DNA, 17 bp, Arabidopsis thaliana
actcagattggatggtt

SEQ ID NO: 24918 - DNA, 17 bp, Arabidopsis thaliana
actcagcagcaggtggc

SEQ ID NO: 24919 - DNA, 17 bp, Arabidopsis thaliana
actcagcaggtgctcga

SEQ ID NO: 24920 - DNA, 17 bp, Arabidopsis thaliana
actcagcatgctcctga

SEQ ID NO: 24921 - DNA, 17 bp, Arabidopsis thaliana
actcagccacaacaagc

SEQ ID NO: 24922 - DNA, 17 bp, Arabidopsis thaliana
actcagccacttgcctt

SEQ ID NO: 24923 - DNA, 17 bp, Arabidopsis thaliana
actcagccagctgagtt

SEQ ID NO: 24924 - DNA, 17 bp, Arabidopsis thaliana
actcagccctttgtcgc

SEQ ID NO: 24925 - DNA, 17 bp, Arabidopsis thaliana
actcagccgtaacgcga

SEQ ID NO: 24926 - DNA, 17 bp, Arabidopsis thaliana
actcagccgtaactgcc

SEQ ID NO: 24927 - DNA, 17 bp, Arabidopsis thaliana
actcagcgacaagagaa

SEQ ID NO: 24928 - DNA, 17 bp, Arabidopsis thaliana
actcagcgctgctatag

SEQ ID NO: 24929 - DNA, 17 bp, Arabidopsis thaliana
actcagcggctgtcatt

SEQ ID NO: 24930 - DNA, 17 bp, Arabidopsis thaliana
actcagcgtcccgatag

SEQ ID NO: 24931 - DNA, 17 bp, Arabidopsis thaliana
actcagcgtccttcgac

SEQ ID NO: 24932 - DNA, 17 bp, Arabidopsis thaliana
actcagcgtgaccattt

SEQ ID NO: 24933 - DNA, 17 bp, Arabidopsis thaliana
actcagctaggtaggaa

SEQ ID NO: 24934 - DNA, 17 bp, Arabidopsis thaliana
actcagctaggtaggac

SEQ ID NO: 24935 - DNA, 17 bp, Arabidopsis thaliana
actcagctcaggctcaa

SEQ ID NO: 24936 - DNA, 17 bp, Arabidopsis thaliana
actcagctgtgcaactg

SEQ ID NO: 24937 - DNA, 17 bp, Arabidopsis thaliana
actcagcttttggacat

SEQ ID NO: 24938 - DNA, 17 bp, Arabidopsis thaliana
actcaggacagacagtg

SEQ ID NO: 24939 - DNA, 17 bp, Arabidopsis thaliana
actcaggacaggaatgt

SEQ ID NO: 24940 - DNA, 17 bp, Arabidopsis thaliana
actcaggatcggtgaag

SEQ ID NO: 24941 - DNA, 17 bp, Arabidopsis thaliana
actcaggccgcctgtat

SEQ ID NO: 24942 - DNA, 17 bp, Arabidopsis thaliana
actcaggcgttgactag

SEQ ID NO: 24943 - DNA, 17 bp, Arabidopsis thaliana
actcaggctttgactag

SEQ ID NO: 24944 - DNA, 17 bp, Arabidopsis thaliana
actcagggatgaggcac

SEQ ID NO: 24945 - DNA, 17 bp, Arabidopsis thaliana
actcaggtcacttacac

SEQ ID NO: 24946 - DNA, 17 bp, Arabidopsis thaliana
actcaggtcctgcagct

SEQ ID NO: 24947 - DNA, 17 bp, Arabidopsis thaliana
actcaggtggatactcg

SEQ ID NO: 24948 - DNA, 17 bp, Arabidopsis thaliana
actcaggtttacagaat

SEQ ID NO: 24949 - DNA, 17 bp, Arabidopsis thaliana
actcaggtttttccaaa

SEQ ID NO: 24950 - DNA, 17 bp, Arabidopsis thaliana
actcagtatcaggtgac

SEQ ID NO: 24951 - DNA, 17 bp, Arabidopsis thaliana
actcagtatcgagtgac

SEQ ID NO: 24952 - DNA, 17 bp, Arabidopsis thaliana
actcagtatctggtgac

SEQ ID NO: 24953 - DNA, 17 bp, Arabidopsis thaliana
actcagtcctgaccaaa

SEQ ID NO: 24954 - DNA, 17 bp, Arabidopsis thaliana
actcagtcgccctatcg

SEQ ID NO: 24955 - DNA, 17 bp, Arabidopsis thaliana
actcagtctccttggct

SEQ ID NO: 24956 - DNA, 17 bp, Arabidopsis thaliana
actcagtgaccaaaccg

SEQ ID NO: 24957 - DNA, 17 bp, Arabidopsis thaliana
actcagtggcagacaac

SEQ ID NO: 24958 - DNA, 17 bp, Arabidopsis thaliana
actcagtgtccagacca

SEQ ID NO: 24959 - DNA, 17 bp, Arabidopsis thaliana
actcagttgcgaagtta

SEQ ID NO: 24960 - DNA, 17 bp, Arabidopsis thaliana
actcagtttgcttttgc

SEQ ID NO: 24961 - DNA, 17 bp, Arabidopsis thaliana
actcagtttggaagcac

SEQ ID NO: 24962 - DNA, 17 bp, Arabidopsis thaliana
actcagtttggaggcac

SEQ ID NO: 24963 - DNA, 17 bp, Arabidopsis thaliana
actcagtttgtcaaagg

SEQ ID NO: 24964 - DNA, 17 bp, Arabidopsis thaliana
actcagtttgtcaatca

SEQ ID NO: 24965 - DNA, 17 bp, Arabidopsis thaliana
actcagtttttggcgtc

SEQ ID NO: 24966 - DNA, 17 bp, Arabidopsis thaliana
actcataacagcctgca

SEQ ID NO: 24967 - DNA, 17 bp, Arabidopsis thaliana
actcataagatcgtgac

SEQ ID NO: 24968 - DNA, 17 bp, Arabidopsis thaliana
actcataagatcgtgat

SEQ ID NO: 24969 - DNA, 17 bp, Arabidopsis thaliana
actcataagatcgtgtc

SEQ ID NO: 24970 - DNA, 17 bp, Arabidopsis thaliana
actcataagattatgcc

SEQ ID NO: 24971 - DNA, 17 bp, Arabidopsis thaliana
actcataagattgtgcc

SEQ ID NO: 24972 - DNA, 17 bp, Arabidopsis thaliana
actcataaggagagagt

SEQ ID NO: 24973 - DNA, 17 bp, Arabidopsis thaliana
actcataaggttgtacc

SEQ ID NO: 24974 - DNA, 17 bp, Arabidopsis thaliana
actcatacgatcgtgcc

SEQ ID NO: 24975 - DNA, 17 bp, Arabidopsis thaliana
actcatacgattgtgcc

SEQ ID NO: 24976 - DNA, 17 bp, Arabidopsis thaliana
actcatacgattttgcc

SEQ ID NO: 24977 - DNA, 17 bp, Arabidopsis thaliana
actcatacggacttcgg

SEQ ID NO: 24978 - DNA, 17 bp, Arabidopsis thaliana
actcataggatcatgcc

SEQ ID NO: 24979 - DNA, 17 bp, Arabidopsis thaliana
actcataggatcgtacc

SEQ ID NO: 24980 - DNA, 17 bp, Arabidopsis thaliana
actcataggatcgtgca

SEQ ID NO: 24981 - DNA, 17 bp, Arabidopsis thaliana
actcataggatcgtgcc

SEQ ID NO: 24982 - DNA, 17 bp, Arabidopsis thaliana
actcataggatcgtggc

SEQ ID NO: 24983 - DNA, 17 bp, Arabidopsis thaliana
actcataggatcgtgtc

SEQ ID NO: 24984 - DNA, 17 bp, Arabidopsis thaliana
actcataggatgtgcca

SEQ ID NO: 24985 - DNA, 17 bp, Arabidopsis thaliana
actcataggattatgcc

SEQ ID NO: 24986 - DNA, 17 bp, Arabidopsis thaliana
actcataggattgtgcc

SEQ ID NO: 24987 - DNA, 17 bp, Arabidopsis thaliana
actcataggattgtgct

SEQ ID NO: 24988 - DNA, 17 bp, Arabidopsis thaliana
actcataggcagtggct

SEQ ID NO: 24989 - DNA, 17 bp, Arabidopsis thaliana
actcatatctgctggtc

SEQ ID NO: 24990 - DNA, 17 bp, Arabidopsis thaliana
actcatatctgctggtg

SEQ ID NO: 24991 - DNA, 17 bp, Arabidopsis thaliana
actcatatggaaagtgt

SEQ ID NO: 24992 - DNA, 17 bp, Arabidopsis thaliana
actcatatggactttgg

SEQ ID NO: 24993 - DNA, 17 bp, Arabidopsis thaliana
actcatatggagagagt

SEQ ID NO: 24994 - DNA, 17 bp, Arabidopsis thaliana
actcatatggagagtgt

SEQ ID NO: 24995 - DNA, 17 bp, Arabidopsis thaliana
actcatatggttccgac

SEQ ID NO: 24996 - DNA, 17 bp, Arabidopsis thaliana
actcatcaactcatttg

SEQ ID NO: 24997 - DNA, 17 bp, Arabidopsis thaliana
actcatcactattgtgc

SEQ ID NO: 24998 - DNA, 17 bp, Arabidopsis thaliana
actcatcagtgtgactt

SEQ ID NO: 24999 - DNA, 17 bp, Arabidopsis thaliana
actcatcagttgggatg

SEQ ID NO: 25000 - DNA, 17 bp, Arabidopsis thaliana
actcatcatctagatgt

SEQ ID NO: 25001 - DNA, 17 bp, Arabidopsis thaliana
actcatccgctagacga

SEQ ID NO: 25002 - DNA, 17 bp, Arabidopsis thaliana
actcatccgctagacgc

SEQ ID NO: 25003 - DNA, 17 bp, Arabidopsis thaliana
actcatccgctagacgg

SEQ ID NO: 25004 - DNA, 17 bp, Arabidopsis thaliana
actcatccgtgaccgac

SEQ ID NO: 25005 - DNA, 17 bp, Arabidopsis thaliana
actcatccttatcgctc

SEQ ID NO: 25006 - DNA, 17 bp, Arabidopsis thaliana
actcatccttgtcgctc

SEQ ID NO: 25007 - DNA, 17 bp, Arabidopsis thaliana
actcatcgagttgatac

SEQ ID NO: 25008 - DNA, 17 bp, Arabidopsis thaliana
actcatcgctacacagg

SEQ ID NO: 25009 - DNA, 17 bp, Arabidopsis thaliana
actcatctacgtacatg

SEQ ID NO: 25010 - DNA, 17 bp, Arabidopsis thaliana
actcatctgatcgtttg

SEQ ID NO: 25011 - DNA, 17 bp, Arabidopsis thaliana
actcatctgctgcctgt

SEQ ID NO: 25012 - DNA, 17 bp, Arabidopsis thaliana
actcatgagatcgtgat

SEQ ID NO: 25013 - DNA, 17 bp, Arabidopsis thaliana
actcatgatgattctgt

SEQ ID NO: 25014 - DNA, 17 bp, Arabidopsis thaliana
actcatgcgtaaatata

SEQ ID NO: 25015 - DNA, 17 bp, Arabidopsis thaliana
actcattagggttcatg

SEQ ID NO: 25016 - DNA, 17 bp, Arabidopsis thaliana
actcattagggtttctt

SEQ ID NO: 25017 - DNA, 17 bp, Arabidopsis thaliana
actcattcccaaggatc

SEQ ID NO: 25018 - DNA, 17 bp, Arabidopsis thaliana
actcattcggctgattt

SEQ ID NO: 25019 - DNA, 17 bp, Arabidopsis thaliana
actcattgacggcggtg

SEQ ID NO: 25020 - DNA, 17 bp, Arabidopsis thaliana
actcattgcacagtctt

SEQ ID NO: 25021 - DNA, 17 bp, Arabidopsis thaliana
actcattgctggatttg

SEQ ID NO: 25022 - DNA, 17 bp, Arabidopsis thaliana
actcattggtccttgtt

SEQ ID NO: 25023 - DNA, 17 bp, Arabidopsis thaliana
actcattggtgtgatga

SEQ ID NO: 25024 - DNA, 17 bp, Arabidopsis thaliana
actcattgtccaactct

SEQ ID NO: 25025 - DNA, 17 bp, Arabidopsis thaliana
actcattgttccgtgat

SEQ ID NO: 25026 - DNA, 17 bp, Arabidopsis thaliana
actcatttaatttgatg

SEQ ID NO: 25027 - DNA, 17 bp, Arabidopsis thaliana
actcatttacttgtgca

SEQ ID NO: 25028 - DNA, 17 bp, Arabidopsis thaliana
actcatttggatggact

SEQ ID NO: 25029 - DNA, 17 bp, Arabidopsis thaliana
actcatttggatggatt

SEQ ID NO: 25030 - DNA, 17 bp, Arabidopsis thaliana
actcatttttggctcag

SEQ ID NO: 25031 - DNA, 17 bp, Arabidopsis thaliana
actccaaacttagtgcc

SEQ ID NO: 25032 - DNA, 17 bp, Arabidopsis thaliana
actccaaattgccgctt

SEQ ID NO: 25033 - DNA, 17 bp, Arabidopsis thaliana
actccaaattttgacct

SEQ ID NO: 25034 - DNA, 17 bp, Arabidopsis thaliana
actccaaccttggtcta

SEQ ID NO: 25035 - DNA, 17 bp, Arabidopsis thaliana
actccaagatgagtgct

SEQ ID NO: 25036 - DNA, 17 bp, Arabidopsis thaliana
actccaaggatgacttg

SEQ ID NO: 25037 - DNA, 17 bp, Arabidopsis thaliana
actccaaggattgtgcc

SEQ ID NO: 25038 - DNA, 17 bp, Arabidopsis thaliana
actccaagtgtacgaat

SEQ ID NO: 25039 - DNA, 17 bp, Arabidopsis thaliana
actccacagtgttctga

SEQ ID NO: 25040 - DNA, 17 bp, Arabidopsis thaliana
actccacagttaagcgt

SEQ ID NO: 25041 - DNA, 17 bp, Arabidopsis thaliana
actccaccagcggcagc

SEQ ID NO: 25042 - DNA, 17 bp, Arabidopsis thaliana
actccacgacctgtgct

SEQ ID NO: 25043 - DNA, 17 bp, Arabidopsis thaliana
actccacgctagggctc

SEQ ID NO: 25044 - DNA, 17 bp, Arabidopsis thaliana
actccacggatcgcatg

SEQ ID NO: 25045 - DNA, 17 bp, Arabidopsis thaliana
actccactgaagaaact

SEQ ID NO: 25046 - DNA, 17 bp, Arabidopsis thaliana
actccagaagattcctc

SEQ ID NO: 25047 - DNA, 17 bp, Arabidopsis thaliana
actccagaccgttgtct

SEQ ID NO: 25048 - DNA, 17 bp, Arabidopsis thaliana
actccagatcagaaggt

SEQ ID NO: 25049 - DNA, 17 bp, Arabidopsis thaliana
actccagcccagccgtg

SEQ ID NO: 25050 - DNA, 17 bp, Arabidopsis thaliana
actccagccctgaaacc

SEQ ID NO: 25051 - DNA, 17 bp, Arabidopsis thaliana
actccagccgccgcctg

SEQ ID NO: 25052 - DNA, 17 bp, Arabidopsis thaliana
actccagcggctattag

SEQ ID NO: 25053 - DNA, 17 bp, Arabidopsis thaliana
actccagctcacgctac

SEQ ID NO: 25054 - DNA, 17 bp, Arabidopsis thaliana
actccaggactgcaaga

SEQ ID NO: 25055 - DNA, 17 bp, Arabidopsis thaliana
actccaggattggacca

SEQ ID NO: 25056 - DNA, 17 bp, Arabidopsis thaliana
actccaggccctggata

SEQ ID NO: 25057 - DNA, 17 bp, Arabidopsis thaliana
actccaggtcgccatgt

SEQ ID NO: 25058 - DNA, 17 bp, Arabidopsis thaliana
actccagtccaagcacg

SEQ ID NO: 25059 - DNA, 17 bp, Arabidopsis thaliana
actccagtcggcgagcg

SEQ ID NO: 25060 - DNA, 17 bp, Arabidopsis thaliana
actccagtgcttcaaat

SEQ ID NO: 25061 - DNA, 17 bp, Arabidopsis thaliana
actccagtggtgtggcc

SEQ ID NO: 25062 - DNA, 17 bp, Arabidopsis thaliana
actccagttagccttac

SEQ ID NO: 25063 - DNA, 17 bp, Arabidopsis thaliana
actccagttctggtcgt

SEQ ID NO: 25064 - DNA, 17 bp, Arabidopsis thaliana
actccataacttcagac

SEQ ID NO: 25065 - DNA, 17 bp, Arabidopsis thaliana
actccataacttttaga

SEQ ID NO: 25066 - DNA, 17 bp, Arabidopsis thaliana
actccatcgtgactttg

SEQ ID NO: 25067 - DNA, 17 bp, Arabidopsis thaliana
actccatctacatcgtt

SEQ ID NO: 25068 - DNA, 17 bp, Arabidopsis thaliana
actccatctccaggctc

SEQ ID NO: 25069 - DNA, 17 bp, Arabidopsis thaliana
actccatgcgtgattag

SEQ ID NO: 25070 - DNA, 17 bp, Arabidopsis thaliana
actccattgactttttg

SEQ ID NO: 25071 - DNA, 17 bp, Arabidopsis thaliana
actccattgagttcacc

SEQ ID NO: 25072 - DNA, 17 bp, Arabidopsis thaliana
actccattttatttttg

SEQ ID NO: 25073 - DNA, 17 bp, Arabidopsis thaliana
actcccccaaacttagt

SEQ ID NO: 25074 - DNA, 17 bp, Arabidopsis thaliana
actccccctgatgacca

SEQ ID NO: 25075 - DNA, 17 bp, Arabidopsis thaliana
actcccggtgtaccagg

SEQ ID NO: 25076 - DNA, 17 bp, Arabidopsis thaliana
actcccggttggagatg

SEQ ID NO: 25077 - DNA, 17 bp, Arabidopsis thaliana
actcccgtagctcagtt

SEQ ID NO: 25078 - DNA, 17 bp, Arabidopsis thaliana
actccctcaacacccac

SEQ ID NO: 25079 - DNA, 17 bp, Arabidopsis thaliana
actccctgctgcacctg

SEQ ID NO: 25080 - DNA, 17 bp, Arabidopsis thaliana
actccctttgtcgctaa

SEQ ID NO: 25081 - DNA, 17 bp, Arabidopsis thaliana
actccgaatggtgactg

SEQ ID NO: 25082 - DNA, 17 bp, Arabidopsis thaliana
actccgaatgttgactg

SEQ ID NO: 25083 - DNA, 17 bp, Arabidopsis thaliana
actccgaccttctcagt

SEQ ID NO: 25084 - DNA, 17 bp, Arabidopsis thaliana
actccgactaatggcag

SEQ ID NO: 25085 - DNA, 17 bp, Arabidopsis thaliana
actccgagatgatttgt

SEQ ID NO: 25086 - DNA, 17 bp, Arabidopsis thaliana
actccgagctgcggaga

SEQ ID NO: 25087 - DNA, 17 bp, Arabidopsis thaliana
actccgatgatcctcac

SEQ ID NO: 25088 - DNA, 17 bp, Arabidopsis thaliana
actccgatggagaagac

SEQ ID NO: 25089 - DNA, 17 bp, Arabidopsis thaliana
actccgatggcgattga

SEQ ID NO: 25090 - DNA, 17 bp, Arabidopsis thaliana
actccgcagctaagtgt

SEQ ID NO: 25091 - DNA, 17 bp, Arabidopsis thaliana
actccgcaggcacgacc

SEQ ID NO: 25092 - DNA, 17 bp, Arabidopsis thaliana
actccgcagttaagcat

SEQ ID NO: 25093 - DNA, 17 bp, Arabidopsis thaliana
actccgcagttaagcgt

SEQ ID NO: 25094 - DNA, 17 bp, Arabidopsis thaliana
actccgcccttcacttc

SEQ ID NO: 25095 - DNA, 17 bp, Arabidopsis thaliana
actccgcctcttccgtc

SEQ ID NO: 25096 - DNA, 17 bp, Arabidopsis thaliana
actccgcgaagccgagg

SEQ ID NO: 25097 - DNA, 17 bp, Arabidopsis thaliana
actccgcggatacagtt

SEQ ID NO: 25098 - DNA, 17 bp, Arabidopsis thaliana
actccgctcaaaatagt

SEQ ID NO: 25099 - DNA, 17 bp, Arabidopsis thaliana
actccgctcaccactgg

SEQ ID NO: 25100 - DNA, 17 bp, Arabidopsis thaliana
actccggatttggttgc

SEQ ID NO: 25101 - DNA, 17 bp, Arabidopsis thaliana
actccggctgcgtgaat

SEQ ID NO: 25102 - DNA, 17 bp, Arabidopsis thaliana
actccgggatatttggt

SEQ ID NO: 25103 - DNA, 17 bp, Arabidopsis thaliana
actccgtactttcgtca

SEQ ID NO: 25104 - DNA, 17 bp, Arabidopsis thaliana
actccgtgaagatgata

SEQ ID NO: 25105 - DNA, 17 bp, Arabidopsis thaliana
actccgtgaatcggagg

SEQ ID NO: 25106 - DNA, 17 bp, Arabidopsis thaliana
actccgtgctgcacgtg

SEQ ID NO: 25107 - DNA, 17 bp, Arabidopsis thaliana
actccgtggaggatgta

SEQ ID NO: 25108 - DNA, 17 bp, Arabidopsis thaliana
actccgtggctactttg

SEQ ID NO: 25109 - DNA, 17 bp, Arabidopsis thaliana
actcctacattgtgcgt

SEQ ID NO: 25110 - DNA, 17 bp, Arabidopsis thaliana
actcctagggagagagt

SEQ ID NO: 25111 - DNA, 17 bp, Arabidopsis thaliana
actcctagttctatcgc

SEQ ID NO: 25112 - DNA, 17 bp, Arabidopsis thaliana
actcctcatctccactc

SEQ ID NO: 25113 - DNA, 17 bp, Arabidopsis thaliana
actcctcatcttcactt

SEQ ID NO: 25114 - DNA, 17 bp, Arabidopsis thaliana
actcctcgagaagtcgg

SEQ ID NO: 25115 - DNA, 17 bp, Arabidopsis thaliana
actcctcgcaggggaga

SEQ ID NO: 25116 - DNA, 17 bp, Arabidopsis thaliana
actcctcgccgccgact

SEQ ID NO: 25117 - DNA, 17 bp, Arabidopsis thaliana
actcctctcggcttggg

SEQ ID NO: 25118 - DNA, 17 bp, Arabidopsis thaliana
actcctctgtggctggc

SEQ ID NO: 25119 - DNA, 17 bp, Arabidopsis thaliana
actcctcttgattcctg

SEQ ID NO: 25120 - DNA, 17 bp, Arabidopsis thaliana
actcctgaaatttgtga

SEQ ID NO: 25121 - DNA, 17 bp, Arabidopsis thaliana
actcctgctttaatgtc

SEQ ID NO: 25122 - DNA, 17 bp, Arabidopsis thaliana
actcctggatgcccgat

SEQ ID NO: 25123 - DNA, 17 bp, Arabidopsis thaliana
actcctggtcgacaaat

SEQ ID NO: 25124 - DNA, 17 bp, Arabidopsis thaliana
actcctgtccgacagtc

SEQ ID NO: 25125 - DNA, 17 bp, Arabidopsis thaliana
actccttactcaacaat

SEQ ID NO: 25126 - DNA, 17 bp, Arabidopsis thaliana
actccttcatctaagcg

SEQ ID NO: 25127 - DNA, 17 bp, Arabidopsis thaliana
actccttctaagagctt

SEQ ID NO: 25128 - DNA, 17 bp, Arabidopsis thaliana
actccttctccatgctc

SEQ ID NO: 25129 - DNA, 17 bp, Arabidopsis thaliana
actccttgccgaagtcg

SEQ ID NO: 25130 - DNA, 17 bp, Arabidopsis thaliana
actccttggttggtttg

SEQ ID NO: 25131 - DNA, 17 bp, Arabidopsis thaliana
actccttgtggctggcc

SEQ ID NO: 25132 - DNA, 17 bp, Arabidopsis thaliana
actcctttccacatatg

SEQ ID NO: 25133 - DNA, 17 bp, Arabidopsis thaliana
actcctttcttggctct

SEQ ID NO: 25134 - DNA, 17 bp, Arabidopsis thaliana
actcctttggattttga

SEQ ID NO: 25135 - DNA, 17 bp, Arabidopsis thaliana
actcgaaaatactcgcc

SEQ ID NO: 25136 - DNA, 17 bp, Arabidopsis thaliana
actcgaaaccaaatctc

SEQ ID NO: 25137 - DNA, 17 bp, Arabidopsis thaliana
actcgaaccagggagga

SEQ ID NO: 25138 - DNA, 17 bp, Arabidopsis thaliana
actcgaaccccagacct

SEQ ID NO: 25139 - DNA, 17 bp, Arabidopsis thaliana
actcgaaggttgtcatg

SEQ ID NO: 25140 - DNA, 17 bp, Arabidopsis thaliana
actcgaagtcaccgttg

SEQ ID NO: 25141 - DNA, 17 bp, Arabidopsis thaliana
actcgaatgcttagtcc

SEQ ID NO: 25142 - DNA, 17 bp, Arabidopsis thaliana
actcgacaaagtgaagg

SEQ ID NO: 25143 - DNA, 17 bp, Arabidopsis thaliana
actcgacaacccagttg

SEQ ID NO: 25144 - DNA, 17 bp, Arabidopsis thaliana
actcgacatctaggtta

SEQ ID NO: 25145 - DNA, 17 bp, Arabidopsis thaliana
actcgacattgttctgg

SEQ ID NO: 25146 - DNA, 17 bp, Arabidopsis thaliana
actcgaccaaacctcac

SEQ ID NO: 25147 - DNA, 17 bp, Arabidopsis thaliana
actcgaccaacacagct

SEQ ID NO: 25148 - DNA, 17 bp, Arabidopsis thaliana
actcgaccaagggtgac

SEQ ID NO: 25149 - DNA, 17 bp, Arabidopsis thaliana
actcgaccacaacaggc

SEQ ID NO: 25150 - DNA, 17 bp, Arabidopsis thaliana
actcgaccacatccagt

SEQ ID NO: 25151 - DNA, 17 bp, Arabidopsis thaliana
actcgaccacccagttg

SEQ ID NO: 25152 - DNA, 17 bp, Arabidopsis thaliana
actcgaccaccggaccg

SEQ ID NO: 25153 - DNA, 17 bp, Arabidopsis thaliana
actcgaccaccgtgcgt

SEQ ID NO: 25154 - DNA, 17 bp, Arabidopsis thaliana
actcgaccagtcactcg

SEQ ID NO: 25155 - DNA, 17 bp, Arabidopsis thaliana
actcgaccagtcactgg

SEQ ID NO: 25156 - DNA, 17 bp, Arabidopsis thaliana
actcgaccatctctgcg

SEQ ID NO: 25157 - DNA, 17 bp, Arabidopsis thaliana
actcgaccattcagttg

SEQ ID NO: 25158 - DNA, 17 bp, Arabidopsis thaliana
actcgaccgcagctcgt

SEQ ID NO: 25159 - DNA, 17 bp, Arabidopsis thaliana
actcgaccgccggaccg

SEQ ID NO: 25160 - DNA, 17 bp, Arabidopsis thaliana
actcgacctgagtaacc

SEQ ID NO: 25161 - DNA, 17 bp, Arabidopsis thaliana
actcgacctgtcactcg

SEQ ID NO: 25162 - DNA, 17 bp, Arabidopsis thaliana
actcgacctgtcattcg

SEQ ID NO: 25163 - DNA, 17 bp, Arabidopsis thaliana
actcgaccttgcgtagt

SEQ ID NO: 25164 - DNA, 17 bp, Arabidopsis thaliana
actcgaccttgttgcat

SEQ ID NO: 25165 - DNA, 17 bp, Arabidopsis thaliana
actcgacgaatcgcatg

SEQ ID NO: 25166 - DNA, 17 bp, Arabidopsis thaliana
actcgacgacgggacag

SEQ ID NO: 25167 - DNA, 17 bp, Arabidopsis thaliana
actcgacgcaagcagag

SEQ ID NO: 25168 - DNA, 17 bp, Arabidopsis thaliana
actcgacgcgaaggttt

SEQ ID NO: 25169 - DNA, 17 bp, Arabidopsis thaliana
actcgacgcggattacg

SEQ ID NO: 25170 - DNA, 17 bp, Arabidopsis thaliana
actcgacggatcgcacg

SEQ ID NO: 25171 - DNA, 17 bp, Arabidopsis thaliana
actcgacggatcgcagg

SEQ ID NO: 25172 - DNA, 17 bp, Arabidopsis thaliana
actcgacggatcgcatg

SEQ ID NO: 25173 - DNA, 17 bp, Arabidopsis thaliana
actcgacggtgttctat

SEQ ID NO: 25174 - DNA, 17 bp, Arabidopsis thaliana
actcgacgtcaacgcca

SEQ ID NO: 25175 - DNA, 17 bp, Arabidopsis thaliana
actcgactcgtttgact

SEQ ID NO: 25176 - DNA, 17 bp, Arabidopsis thaliana
actcgactgatcgcatg

SEQ ID NO: 25177 - DNA, 17 bp, Arabidopsis thaliana
actcgactgctacgcca

SEQ ID NO: 25178 - DNA, 17 bp, Arabidopsis thaliana
actcgactggaacggcc

SEQ ID NO: 25179 - DNA, 17 bp, Arabidopsis thaliana
actcgacttacagtcgc

SEQ ID NO: 25180 - DNA, 17 bp, Arabidopsis thaliana
actcgacttctttgctt

SEQ ID NO: 25181 - DNA, 17 bp, Arabidopsis thaliana
actcgagacggcagatc

SEQ ID NO: 25182 - DNA, 17 bp, Arabidopsis thaliana
actcgagagatttacca

SEQ ID NO: 25183 - DNA, 17 bp, Arabidopsis thaliana
actcgagattaggcaat

SEQ ID NO: 25184 - DNA, 17 bp, Arabidopsis thaliana
actcgagctgccactcg

SEQ ID NO: 25185 - DNA, 17 bp, Arabidopsis thaliana
actcgaggcccaactac

SEQ ID NO: 25186 - DNA, 17 bp, Arabidopsis thaliana
actcgaggctcgaaacc

SEQ ID NO: 25187 - DNA, 17 bp, Arabidopsis thaliana
actcgaggctttttcat

SEQ ID NO: 25188 - DNA, 17 bp, Arabidopsis thaliana
actcgagggagtagact

SEQ ID NO: 25189 - DNA, 17 bp, Arabidopsis thaliana
actcgagggcacgtctg

SEQ ID NO: 25190 - DNA, 17 bp, Arabidopsis thaliana
actcgagtcttcccacc

SEQ ID NO: 25191 - DNA, 17 bp, Arabidopsis thaliana
actcgagtcttggatag

SEQ ID NO: 25192 - DNA, 17 bp, Arabidopsis thaliana
actcgagtggtgctcta

SEQ ID NO: 25193 - DNA, 17 bp, Arabidopsis thaliana
actcgatcacagggtcc

SEQ ID NO: 25194 - DNA, 17 bp, Arabidopsis thaliana
actcgatcacagtattg

SEQ ID NO: 25195 - DNA, 17 bp, Arabidopsis thaliana
actcgatccattatgtc

SEQ ID NO: 25196 - DNA, 17 bp, Arabidopsis thaliana
actcgatcctctactcg

SEQ ID NO: 25197 - DNA, 17 bp, Arabidopsis thaliana
actcgatcgacagttca

SEQ ID NO: 25198 - DNA, 17 bp, Arabidopsis thaliana
actcgatcgcagaggag

SEQ ID NO: 25199 - DNA, 17 bp, Arabidopsis thaliana
actcgatcgcagcctcg

SEQ ID NO: 25200 - DNA, 17 bp, Arabidopsis thaliana
actcgatcgcagggtaa

SEQ ID NO: 25201 - DNA, 17 bp, Arabidopsis thaliana
actcgatctccacgcaa

SEQ ID NO: 25202 - DNA, 17 bp, Arabidopsis thaliana
actcgatctccaggctc

SEQ ID NO: 25203 - DNA, 17 bp, Arabidopsis thaliana
actcgatctcctgttgc

SEQ ID NO: 25204 - DNA, 17 bp, Arabidopsis thaliana
actcgatctcgccgctc

SEQ ID NO: 25205 - DNA, 17 bp, Arabidopsis thaliana
actcgatctcgctctgc

SEQ ID NO: 25206 - DNA, 17 bp, Arabidopsis thaliana
actcgatctctacctat

SEQ ID NO: 25207 - DNA, 17 bp, Arabidopsis thaliana
actcgatctgccacaca

SEQ ID NO: 25208 - DNA, 17 bp, Arabidopsis thaliana
actcgatctgtggctaa

SEQ ID NO: 25209 - DNA, 17 bp, Arabidopsis thaliana
actcgatcttaaaagcc

SEQ ID NO: 25210 - DNA, 17 bp, Arabidopsis thaliana
actcgatggatcgcatg

SEQ ID NO: 25211 - DNA, 17 bp, Arabidopsis thaliana
actcgatggttcacggg

SEQ ID NO: 25212 - DNA, 17 bp, Arabidopsis thaliana
actcgatgttgctgcca

SEQ ID NO: 25213 - DNA, 17 bp, Arabidopsis thaliana
actcgattaattttggg

SEQ ID NO: 25214 - DNA, 17 bp, Arabidopsis thaliana
actcgattctctgttgc

SEQ ID NO: 25215 - DNA, 17 bp, Arabidopsis thaliana
actcgatttcatactcg

SEQ ID NO: 25216 - DNA, 17 bp, Arabidopsis thaliana
actcgattttttagccg

SEQ ID NO: 25217 - DNA, 17 bp, Arabidopsis thaliana
actcgcaactgtgacga

SEQ ID NO: 25218 - DNA, 17 bp, Arabidopsis thaliana
actcgcaagaaccacaa

SEQ ID NO: 25219 - DNA, 17 bp, Arabidopsis thaliana
actcgcaccagaacgcc

SEQ ID NO: 25220 - DNA, 17 bp, Arabidopsis thaliana
actcgcactttagatgg

SEQ ID NO: 25221 - DNA, 17 bp, Arabidopsis thaliana
actcgcagcttcctgat

SEQ ID NO: 25222 - DNA, 17 bp, Arabidopsis thaliana
actcgcagctttctgat

SEQ ID NO: 25223 - DNA, 17 bp, Arabidopsis thaliana
actcgcatagttccgac

SEQ ID NO: 25224 - DNA, 17 bp, Arabidopsis thaliana
actcgcatcctgtagat

SEQ ID NO: 25225 - DNA, 17 bp, Arabidopsis thaliana
actcgcatggggatgga

SEQ ID NO: 25226 - DNA, 17 bp, Arabidopsis thaliana
actcgcatggttccgac

SEQ ID NO: 25227 - DNA, 17 bp, Arabidopsis thaliana
actcgcatggttccggc

SEQ ID NO: 25228 - DNA, 17 bp, Arabidopsis thaliana
actcgcccggtgccgct

SEQ ID NO: 25229 - DNA, 17 bp, Arabidopsis thaliana
actcgccgagcgcaccc

SEQ ID NO: 25230 - DNA, 17 bp, Arabidopsis thaliana
actcgcctgagtaaccg

SEQ ID NO: 25231 - DNA, 17 bp, Arabidopsis thaliana
actcgccttttaaacaa

SEQ ID NO: 25232 - DNA, 17 bp, Arabidopsis thaliana
actcgcgacacgtcacc

SEQ ID NO: 25233 - DNA, 17 bp, Arabidopsis thaliana
actcgcgagatcatcac

SEQ ID NO: 25234 - DNA, 17 bp, Arabidopsis thaliana
actcgcggctctggcgt

SEQ ID NO: 25235 - DNA, 17 bp, Arabidopsis thaliana
actcgctaacgactaat

SEQ ID NO: 25236 - DNA, 17 bp, Arabidopsis thaliana
actcgctagagagagcc

SEQ ID NO: 25237 - DNA, 17 bp, Arabidopsis thaliana
actcgctagtattcgag

SEQ ID NO: 25238 - DNA, 17 bp, Arabidopsis thaliana
actcgctgctctgatct

SEQ ID NO: 25239 - DNA, 17 bp, Arabidopsis thaliana
actcggacacaggtact

SEQ ID NO: 25240 - DNA, 17 bp, Arabidopsis thaliana
actcggactgcgggtat

SEQ ID NO: 25241 - DNA, 17 bp, Arabidopsis thaliana
actcggatacggtgcac

SEQ ID NO: 25242 - DNA, 17 bp, Arabidopsis thaliana
actcggatcaccaattt

SEQ ID NO: 25243 - DNA, 17 bp, Arabidopsis thaliana
actcggatcaggcagtg

SEQ ID NO: 25244 - DNA, 17 bp, Arabidopsis thaliana
actcggatctagttcgg

SEQ ID NO: 25245 - DNA, 17 bp, Arabidopsis thaliana
actcggatgtctgattt

SEQ ID NO: 25246 - DNA, 17 bp, Arabidopsis thaliana
actcggattacggtggc

SEQ ID NO: 25247 - DNA, 17 bp, Arabidopsis thaliana
actcggattactgagat

SEQ ID NO: 25248 - DNA, 17 bp, Arabidopsis thaliana
actcggatttgtggtta

SEQ ID NO: 25249 - DNA, 17 bp, Arabidopsis thaliana
actcggcatagacttga

SEQ ID NO: 25250 - DNA, 17 bp, Arabidopsis thaliana
actcggccatcctgacc

SEQ ID NO: 25251 - DNA, 17 bp, Arabidopsis thaliana
actcggccatctctccg

SEQ ID NO: 25252 - DNA, 17 bp, Arabidopsis thaliana
actcggcccaggccact

SEQ ID NO: 25253 - DNA, 17 bp, Arabidopsis thaliana
actcggcctccagttgt

SEQ ID NO: 25254 - DNA, 17 bp, Arabidopsis thaliana
actcggcctggcccggt

SEQ ID NO: 25255 - DNA, 17 bp, Arabidopsis thaliana
actcggcggatcgcatg

SEQ ID NO: 25256 - DNA, 17 bp, Arabidopsis thaliana
actcggctacatactcg

SEQ ID NO: 25257 - DNA, 17 bp, Arabidopsis thaliana
actcggctactagagat

SEQ ID NO: 25258 - DNA, 17 bp, Arabidopsis thaliana
actcggctcaatctttt

SEQ ID NO: 25259 - DNA, 17 bp, Arabidopsis thaliana
actcggctggatgttgg

SEQ ID NO: 25260 - DNA, 17 bp, Arabidopsis thaliana
actcggctgtgcaattg

SEQ ID NO: 25261 - DNA, 17 bp, Arabidopsis thaliana
actcggcttgtcccttc

SEQ ID NO: 25262 - DNA, 17 bp, Arabidopsis thaliana
actcgggacagacagtg

SEQ ID NO: 25263 - DNA, 17 bp, Arabidopsis thaliana
actcgggacagatagtg

SEQ ID NO: 25264 - DNA, 17 bp, Arabidopsis thaliana
actcgggacaggctaac

SEQ ID NO: 25265 - DNA, 17 bp, Arabidopsis thaliana
actcgggatggctctgc

SEQ ID NO: 25266 - DNA, 17 bp, Arabidopsis thaliana
actcgggcgagtagccg

SEQ ID NO: 25267 - DNA, 17 bp, Arabidopsis thaliana
actcggggcctcggtca

SEQ ID NO: 25268 - DNA, 17 bp, Arabidopsis thaliana
actcgggtgaccgtaca

SEQ ID NO: 25269 - DNA, 17 bp, Arabidopsis thaliana
actcgggttcttcaatg

SEQ ID NO: 25270 - DNA, 17 bp, Arabidopsis thaliana
actcggtagaagcgtct

SEQ ID NO: 25271 - DNA, 17 bp, Arabidopsis thaliana
actcggtcattgtgtcg

SEQ ID NO: 25272 - DNA, 17 bp, Arabidopsis thaliana
actcggtccacgggtca

SEQ ID NO: 25273 - DNA, 17 bp, Arabidopsis thaliana
actcggtgaaccggttg

SEQ ID NO: 25274 - DNA, 17 bp, Arabidopsis thaliana
actcggtgcagatatgt

SEQ ID NO: 25275 - DNA, 17 bp, Arabidopsis thaliana
actcggtggacaaagcc

SEQ ID NO: 25276 - DNA, 17 bp, Arabidopsis thaliana
actcggtgtagctgaac

SEQ ID NO: 25277 - DNA, 17 bp, Arabidopsis thaliana
actcggtgttggtccag

SEQ ID NO: 25278 - DNA, 17 bp, Arabidopsis thaliana
actcggttcatttgact

SEQ ID NO: 25279 - DNA, 17 bp, Arabidopsis thaliana
actcggttccgacaagt

SEQ ID NO: 25280 - DNA, 17 bp, Arabidopsis thaliana
actcggttgcacatttt

SEQ ID NO: 25281 - DNA, 17 bp, Arabidopsis thaliana
actcggttgtgactagt

SEQ ID NO: 25282 - DNA, 17 bp, Arabidopsis thaliana
actcggtttagagatta

SEQ ID NO: 25283 - DNA, 17 bp, Arabidopsis thaliana
actcgtacatcgccgct

SEQ ID NO: 25284 - DNA, 17 bp, Arabidopsis thaliana
actcgtagacaagcata

SEQ ID NO: 25285 - DNA, 17 bp, Arabidopsis thaliana
actcgtagattatcgtc

SEQ ID NO: 25286 - DNA, 17 bp, Arabidopsis thaliana
actcgtagcgtggttca

SEQ ID NO: 25287 - DNA, 17 bp, Arabidopsis thaliana
actcgtatatcgccgct

SEQ ID NO: 25288 - DNA, 17 bp, Arabidopsis thaliana
actcgtcaacatctcct

SEQ ID NO: 25289 - DNA, 17 bp, Arabidopsis thaliana
actcgtcaatgccggtg

SEQ ID NO: 25290 - DNA, 17 bp, Arabidopsis thaliana
actcgtcataccatcta

SEQ ID NO: 25291 - DNA, 17 bp, Arabidopsis thaliana
actcgtcctcagttcgg

SEQ ID NO: 25292 - DNA, 17 bp, Arabidopsis thaliana
actcgtcgatagttcca

SEQ ID NO: 25293 - DNA, 17 bp, Arabidopsis thaliana
actcgtcgcagattgtg

SEQ ID NO: 25294 - DNA, 17 bp, Arabidopsis thaliana
actcgtcggataatgca

SEQ ID NO: 25295 - DNA, 17 bp, Arabidopsis thaliana
actcgtcggctgtcagc

SEQ ID NO: 25296 - DNA, 17 bp, Arabidopsis thaliana
actcgtctctttacggt

SEQ ID NO: 25297 - DNA, 17 bp, Arabidopsis thaliana
actcgtctgcctgggtg

SEQ ID NO: 25298 - DNA, 17 bp, Arabidopsis thaliana
actcgtcttggactttg

SEQ ID NO: 25299 - DNA, 17 bp, Arabidopsis thaliana
actcgtcttgggctttg

SEQ ID NO: 25300 - DNA, 17 bp, Arabidopsis thaliana
actcgtgacaaaactgt

SEQ ID NO: 25301 - DNA, 17 bp, Arabidopsis thaliana
actcgtgactcggtgaa

SEQ ID NO: 25302 - DNA, 17 bp, Arabidopsis thaliana
actcgtgagatgttttg

SEQ ID NO: 25303 - DNA, 17 bp, Arabidopsis thaliana
actcgtgcagtttggtc

SEQ ID NO: 25304 - DNA, 17 bp, Arabidopsis thaliana
actcgtgctgtagatag

SEQ ID NO: 25305 - DNA, 17 bp, Arabidopsis thaliana
actcgtggactggcaaa

SEQ ID NO: 25306 - DNA, 17 bp, Arabidopsis thaliana
actcgtggctgctcgag

SEQ ID NO: 25307 - DNA, 17 bp, Arabidopsis thaliana
actcgtggttcggcgcc

SEQ ID NO: 25308 - DNA, 17 bp, Arabidopsis thaliana
actcgtgttgcttgact

SEQ ID NO: 25309 - DNA, 17 bp, Arabidopsis thaliana
actcgttcaacggttga

SEQ ID NO: 25310 - DNA, 17 bp, Arabidopsis thaliana
actcgttcccagcgttg

SEQ ID NO: 25311 - DNA, 17 bp, Arabidopsis thaliana
actcgttgggcactttg

SEQ ID NO: 25312 - DNA, 17 bp, Arabidopsis thaliana
actcgttgtaacaactt

SEQ ID NO: 25313 - DNA, 17 bp, Arabidopsis thaliana
actcgttttgaccagct

SEQ ID NO: 25314 - DNA, 17 bp, Arabidopsis thaliana
actcgtttttcaggaat

SEQ ID NO: 25315 - DNA, 17 bp, Arabidopsis thaliana
actctaacaagactcac

SEQ ID NO: 25316 - DNA, 17 bp, Arabidopsis thaliana
actctaacgtcaaccgg

SEQ ID NO: 25317 - DNA, 17 bp, Arabidopsis thaliana
actctaagaattatttg

SEQ ID NO: 25318 - DNA, 17 bp, Arabidopsis thaliana
actctaagagaatcaga

SEQ ID NO: 25319 - DNA, 17 bp, Arabidopsis thaliana
actctaagagcacctcc

SEQ ID NO: 25320 - DNA, 17 bp, Arabidopsis thaliana
actctaagatacaacct

SEQ ID NO: 25321 - DNA, 17 bp, Arabidopsis thaliana
actctaaggagctgaaa

SEQ ID NO: 25322 - DNA, 17 bp, Arabidopsis thaliana
actctaatagtgcggtg

SEQ ID NO: 25323 - DNA, 17 bp, Arabidopsis thaliana
actctacacatgtgctg

SEQ ID NO: 25324 - DNA, 17 bp, Arabidopsis thaliana
actctacagaagacctg

SEQ ID NO: 25325 - DNA, 17 bp, Arabidopsis thaliana
actctacagttaagcat

SEQ ID NO: 25326 - DNA, 17 bp, Arabidopsis thaliana
actctacagttaagcgt

SEQ ID NO: 25327 - DNA, 17 bp, Arabidopsis thaliana
actctaccctgtacgct

SEQ ID NO: 25328 - DNA, 17 bp, Arabidopsis thaliana
actctacgcagcgatta

SEQ ID NO: 25329 - DNA, 17 bp, Arabidopsis thaliana
actctactctggacgat

SEQ ID NO: 25330 - DNA, 17 bp, Arabidopsis thaliana
actctactgcgccgttt

SEQ ID NO: 25331 - DNA, 17 bp, Arabidopsis thaliana
actctactgcgctgctt

SEQ ID NO: 25332 - DNA, 17 bp, Arabidopsis thaliana
actctactgcggtgacg

SEQ ID NO: 25333 - DNA, 17 bp, Arabidopsis thaliana
actctactgctgtgtac

SEQ ID NO: 25334 - DNA, 17 bp, Arabidopsis thaliana
actctagaacttggatt

SEQ ID NO: 25335 - DNA, 17 bp, Arabidopsis thaliana
actctagaatttggatt

SEQ ID NO: 25336 - DNA, 17 bp, Arabidopsis thaliana
actctagtccgactttg

SEQ ID NO: 25337 - DNA, 17 bp, Arabidopsis thaliana
actctataaccgaggca

SEQ ID NO: 25338 - DNA, 17 bp, Arabidopsis thaliana
actctatagccgacaaa

SEQ ID NO: 25339 - DNA, 17 bp, Arabidopsis thaliana
actctataggctaaact

SEQ ID NO: 25340 - DNA, 17 bp, Arabidopsis thaliana
actctatcattctgtat

SEQ ID NO: 25341 - DNA, 17 bp, Arabidopsis thaliana
actctatcctgttgtgg

SEQ ID NO: 25342 - DNA, 17 bp, Arabidopsis thaliana
actctatcgatcagatg

SEQ ID NO: 25343 - DNA, 17 bp, Arabidopsis thaliana
actctatcgcaacttac

SEQ ID NO: 25344 - DNA, 17 bp, Arabidopsis thaliana
actctatcgcaactttg

SEQ ID NO: 25345 - DNA, 17 bp, Arabidopsis thaliana
actctatcggctgatcc

SEQ ID NO: 25346 - DNA, 17 bp, Arabidopsis thaliana
actctatcggctgatcg

SEQ ID NO: 25347 - DNA, 17 bp, Arabidopsis thaliana
actctatcggctgatct

SEQ ID NO: 25348 - DNA, 17 bp, Arabidopsis thaliana
actctatctgtgaagcg

SEQ ID NO: 25349 - DNA, 17 bp, Arabidopsis thaliana
actctatgagtaccaac

SEQ ID NO: 25350 - DNA, 17 bp, Arabidopsis thaliana
actctatgcgtgattag

SEQ ID NO: 25351 - DNA, 17 bp, Arabidopsis thaliana
actctatgtagagcggc

SEQ ID NO: 25352 - DNA, 17 bp, Arabidopsis thaliana
actctattagctcagtg

SEQ ID NO: 25353 - DNA, 17 bp, Arabidopsis thaliana
actctatttcatggtgc

SEQ ID NO: 25354 - DNA, 17 bp, Arabidopsis thaliana
actctatttcgtgttaa

SEQ ID NO: 25355 - DNA, 17 bp, Arabidopsis thaliana
actctattttgatcgag

SEQ ID NO: 25356 - DNA, 17 bp, Arabidopsis thaliana
actctattttggaggtg

SEQ ID NO: 25357 - DNA, 17 bp, Arabidopsis thaliana
actctcaaaagtttggg

SEQ ID NO: 25358 - DNA, 17 bp, Arabidopsis thaliana
actctcaacattctctt

SEQ ID NO: 25359 - DNA, 17 bp, Arabidopsis thaliana
actctcacacagatcga

SEQ ID NO: 25360 - DNA, 17 bp, Arabidopsis thaliana
actctcacaccggtttc

SEQ ID NO: 25361 - DNA, 17 bp, Arabidopsis thaliana
actctcagacttgagtt

SEQ ID NO: 25362 - DNA, 17 bp, Arabidopsis thaliana
actctcaggctgccttt

SEQ ID NO: 25363 - DNA, 17 bp, Arabidopsis thaliana
actctcagtcggctttg

SEQ ID NO: 25364 - DNA, 17 bp, Arabidopsis thaliana
actctcagtttgccttt

SEQ ID NO: 25365 - DNA, 17 bp, Arabidopsis thaliana
actctcagtttttttgt

SEQ ID NO: 25366 - DNA, 17 bp, Arabidopsis thaliana
actctcatgtgctgatg

SEQ ID NO: 25367 - DNA, 17 bp, Arabidopsis thaliana
actctcattgatctatc

SEQ ID NO: 25368 - DNA, 17 bp, Arabidopsis thaliana
actctccaagggttcga

SEQ ID NO: 25369 - DNA, 17 bp, Arabidopsis thaliana
actctccagagcattgt

SEQ ID NO: 25370 - DNA, 17 bp, Arabidopsis thaliana
actctccagatctgatg

SEQ ID NO: 25371 - DNA, 17 bp, Arabidopsis thaliana
actctccagtgatgatg

SEQ ID NO: 25372 - DNA, 17 bp, Arabidopsis thaliana
actctccagtgtgatga

SEQ ID NO: 25373 - DNA, 17 bp, Arabidopsis thaliana
actctcccccgccgatt

SEQ ID NO: 25374 - DNA, 17 bp, Arabidopsis thaliana
actctcccggttaggtt

SEQ ID NO: 25375 - DNA, 17 bp, Arabidopsis thaliana
actctccctcgacgatt

SEQ ID NO: 25376 - DNA, 17 bp, Arabidopsis thaliana
actctccggtgtgatga

SEQ ID NO: 25377 - DNA, 17 bp, Arabidopsis thaliana
actctccgtttaatcgc

SEQ ID NO: 25378 - DNA, 17 bp, Arabidopsis thaliana
actctcctccgctgatt

SEQ ID NO: 25379 - DNA, 17 bp, Arabidopsis thaliana
actctccttgcgtctga

SEQ ID NO: 25380 - DNA, 17 bp, Arabidopsis thaliana
actctccttgtcgctct

SEQ ID NO: 25381 - DNA, 17 bp, Arabidopsis thaliana
actctcgaagattccca

SEQ ID NO: 25382 - DNA, 17 bp, Arabidopsis thaliana
actctcgacagttgctc

SEQ ID NO: 25383 - DNA, 17 bp, Arabidopsis thaliana
actctcgacctattctc

SEQ ID NO: 25384 - DNA, 17 bp, Arabidopsis thaliana
actctcgacctccgccg

SEQ ID NO: 25385 - DNA, 17 bp, Arabidopsis thaliana
actctcgactcattcat

SEQ ID NO: 25386 - DNA, 17 bp, Arabidopsis thaliana
actctcgactggatctg

SEQ ID NO: 25387 - DNA, 17 bp, Arabidopsis thaliana
actctcgcccaagcacg

SEQ ID NO: 25388 - DNA, 17 bp, Arabidopsis thaliana
actctcgctatagagag

SEQ ID NO: 25389 - DNA, 17 bp, Arabidopsis thaliana
actctcgcttctacatc

SEQ ID NO: 25390 - DNA, 17 bp, Arabidopsis thaliana
actctcgcttgaatcag

SEQ ID NO: 25391 - DNA, 17 bp, Arabidopsis thaliana
actctcggcaacggata

SEQ ID NO: 25392 - DNA, 17 bp, Arabidopsis thaliana
actctcggtgatgtttg

SEQ ID NO: 25393 - DNA, 17 bp, Arabidopsis thaliana
actctcggtgggccggt

SEQ ID NO: 25394 - DNA, 17 bp, Arabidopsis thaliana
actctcggttcacatgg

SEQ ID NO: 25395 - DNA, 17 bp, Arabidopsis thaliana
actctcgtccaacggtc

SEQ ID NO: 25396 - DNA, 17 bp, Arabidopsis thaliana
actctcgtgatagagac

SEQ ID NO: 25397 - DNA, 17 bp, Arabidopsis thaliana
actctctagcaggttaa

SEQ ID NO: 25398 - DNA, 17 bp, Arabidopsis thaliana
actctctaggagctggc

SEQ ID NO: 25399 - DNA, 17 bp, Arabidopsis thaliana
actctctagggttccgg

SEQ ID NO: 25400 - DNA, 17 bp, Arabidopsis thaliana
actctctcaacacccac

SEQ ID NO: 25401 - DNA, 17 bp, Arabidopsis thaliana
actctctcaggcacagt

SEQ ID NO: 25402 - DNA, 17 bp, Arabidopsis thaliana
actctctccacatgagt

SEQ ID NO: 25403 - DNA, 17 bp, Arabidopsis thaliana
actctctccatatgggt

SEQ ID NO: 25404 - DNA, 17 bp, Arabidopsis thaliana
actctctccatatgtgt

SEQ ID NO: 25405 - DNA, 17 bp, Arabidopsis thaliana
actctctccatatttgt

SEQ ID NO: 25406 - DNA, 17 bp, Arabidopsis thaliana
actctctccatgatttg

SEQ ID NO: 25407 - DNA, 17 bp, Arabidopsis thaliana
actctctccatttgggt

SEQ ID NO: 25408 - DNA, 17 bp, Arabidopsis thaliana
actctctccctaggagt

SEQ ID NO: 25409 - DNA, 17 bp, Arabidopsis thaliana
actctctctcacaactt

SEQ ID NO: 25410 - DNA, 17 bp, Arabidopsis thaliana
actctctgcaatatgtc

SEQ ID NO: 25411 - DNA, 17 bp, Arabidopsis thaliana
actctctgcagcattta

SEQ ID NO: 25412 - DNA, 17 bp, Arabidopsis thaliana
actctctgcagcatttg

SEQ ID NO: 25413 - DNA, 17 bp, Arabidopsis thaliana
actctctgcgacatcaa

SEQ ID NO: 25414 - DNA, 17 bp, Arabidopsis thaliana
actctctgcggactgtg

SEQ ID NO: 25415 - DNA, 17 bp, Arabidopsis thaliana
actctctggcttgcgtt

SEQ ID NO: 25416 - DNA, 17 bp, Arabidopsis thaliana
actctctgtaagactct

SEQ ID NO: 25417 - DNA, 17 bp, Arabidopsis thaliana
actctctgtgttgtgtt

SEQ ID NO: 25418 - DNA, 17 bp, Arabidopsis thaliana
actctctgttttgctga

SEQ ID NO: 25419 - DNA, 17 bp, Arabidopsis thaliana
actctcttcatatggat

SEQ ID NO: 25420 - DNA, 17 bp, Arabidopsis thaliana
actctcttccttgccat

SEQ ID NO: 25421 - DNA, 17 bp, Arabidopsis thaliana
actctcttcttcaactc

SEQ ID NO: 25422 - DNA, 17 bp, Arabidopsis thaliana
actctcttgagagacta

SEQ ID NO: 25423 - DNA, 17 bp, Arabidopsis thaliana
actctctttccaagatc

SEQ ID NO: 25424 - DNA, 17 bp, Arabidopsis thaliana
actctctttgcgtcggt

SEQ ID NO: 25425 - DNA, 17 bp, Arabidopsis thaliana
actctctttggtcgcta

SEQ ID NO: 25426 - DNA, 17 bp, Arabidopsis thaliana
actctcttttgaacacg

SEQ ID NO: 25427 - DNA, 17 bp, Arabidopsis thaliana
actctgaaaggatttgc

SEQ ID NO: 25428 - DNA, 17 bp, Arabidopsis thaliana
actctgaaattggatgg

SEQ ID NO: 25429 - DNA, 17 bp, Arabidopsis thaliana
actctgaacggttgtgt

SEQ ID NO: 25430 - DNA, 17 bp, Arabidopsis thaliana
actctgaactgtatgtg

SEQ ID NO: 25431 - DNA, 17 bp, Arabidopsis thaliana
actctgaagaggcctgt

SEQ ID NO: 25432 - DNA, 17 bp, Arabidopsis thaliana
actctgaaggctttgtg

SEQ ID NO: 25433 - DNA, 17 bp, Arabidopsis thaliana
actctgaagtgtatgta

SEQ ID NO: 25434 - DNA, 17 bp, Arabidopsis thaliana
actctgaagtgtatgtg

SEQ ID NO: 25435 - DNA, 17 bp, Arabidopsis thaliana
actctgaatttgcaggt

SEQ ID NO: 25436 - DNA, 17 bp, Arabidopsis thaliana
actctgacaccatggct

SEQ ID NO: 25437 - DNA, 17 bp, Arabidopsis thaliana
actctgacatgtgtgcg

SEQ ID NO: 25438 - DNA, 17 bp, Arabidopsis thaliana
actctgaccttgagctt

SEQ ID NO: 25439 - DNA, 17 bp, Arabidopsis thaliana
actctgactcaaggtta

SEQ ID NO: 25440 - DNA, 17 bp, Arabidopsis thaliana
actctgacttagatggt

SEQ ID NO: 25441 - DNA, 17 bp, Arabidopsis thaliana
actctgagaaactgttt

SEQ ID NO: 25442 - DNA, 17 bp, Arabidopsis thaliana
actctgagctgcaggat

SEQ ID NO: 25443 - DNA, 17 bp, Arabidopsis thaliana
actctgagtgtggaagc

SEQ ID NO: 25444 - DNA, 17 bp, Arabidopsis thaliana
actctgagtttgtggag

SEQ ID NO: 25445 - DNA, 17 bp, Arabidopsis thaliana
actctgatccaacttgc

SEQ ID NO: 25446 - DNA, 17 bp, Arabidopsis thaliana
actctgatcgggaaata

SEQ ID NO: 25447 - DNA, 17 bp, Arabidopsis thaliana
actctgatggtgcaagg

SEQ ID NO: 25448 - DNA, 17 bp, Arabidopsis thaliana
actctgatgtcaaaatg

SEQ ID NO: 25449 - DNA, 17 bp, Arabidopsis thaliana
actctgatttgatgaca

SEQ ID NO: 25450 - DNA, 17 bp, Arabidopsis thaliana
actctgcaattggacga

SEQ ID NO: 25451 - DNA, 17 bp, Arabidopsis thaliana
actctgcagttaagcgt

SEQ ID NO: 25452 - DNA, 17 bp, Arabidopsis thaliana
actctgccctttgtaca

SEQ ID NO: 25453 - DNA, 17 bp, Arabidopsis thaliana
actctgcctgggtgtca

SEQ ID NO: 25454 - DNA, 17 bp, Arabidopsis thaliana
actctgcgctaaagaaa

SEQ ID NO: 25455 - DNA, 17 bp, Arabidopsis thaliana
actctgcggtacaccgt

SEQ ID NO: 25456 - DNA, 17 bp, Arabidopsis thaliana
actctgcggtgccgctg

SEQ ID NO: 25457 - DNA, 17 bp, Arabidopsis thaliana
actctgctaagatttcg

SEQ ID NO: 25458 - DNA, 17 bp, Arabidopsis thaliana
actctgctcaaaaggtt

SEQ ID NO: 25459 - DNA, 17 bp, Arabidopsis thaliana
actctgctgcgccgatt

SEQ ID NO: 25460 - DNA, 17 bp, Arabidopsis thaliana
actctgctgggccgaca

SEQ ID NO: 25461 - DNA, 17 bp, Arabidopsis thaliana
actctgcttgaagactg

SEQ ID NO: 25462 - DNA, 17 bp, Arabidopsis thaliana
actctggaccaatatct

SEQ ID NO: 25463 - DNA, 17 bp, Arabidopsis thaliana
actctggatttcgtggg

SEQ ID NO: 25464 - DNA, 17 bp, Arabidopsis thaliana
actctggctcatcatct

SEQ ID NO: 25465 - DNA, 17 bp, Arabidopsis thaliana
actctggctgcgccgct

SEQ ID NO: 25466 - DNA, 17 bp, Arabidopsis thaliana
actctgggccgaaaccc

SEQ ID NO: 25467 - DNA, 17 bp, Arabidopsis thaliana
actctgggcggaacaag

SEQ ID NO: 25468 - DNA, 17 bp, Arabidopsis thaliana
actctgggtgtcgtcca

SEQ ID NO: 25469 - DNA, 17 bp, Arabidopsis thaliana
actctggtggaagcccg

SEQ ID NO: 25470 - DNA, 17 bp, Arabidopsis thaliana
actctggttgtgccgct

SEQ ID NO: 25471 - DNA, 17 bp, Arabidopsis thaliana
actctgtaacactttgg

SEQ ID NO: 25472 - DNA, 17 bp, Arabidopsis thaliana
actctgtaccgtgcgat

SEQ ID NO: 25473 - DNA, 17 bp, Arabidopsis thaliana
actctgtagaagcgtct

SEQ ID NO: 25474 - DNA, 17 bp, Arabidopsis thaliana
actctgtagcaggcttt

SEQ ID NO: 25475 - DNA, 17 bp, Arabidopsis thaliana
actctgtagcgcagtgc

SEQ ID NO: 25476 - DNA, 17 bp, Arabidopsis thaliana
actctgtcaggcattgc

SEQ ID NO: 25477 - DNA, 17 bp, Arabidopsis thaliana
actctgtcatccgcttt

SEQ ID NO: 25478 - DNA, 17 bp, Arabidopsis thaliana
actctgtcggatgttgc

SEQ ID NO: 25479 - DNA, 17 bp, Arabidopsis thaliana
actctgtctatatgagc

SEQ ID NO: 25480 - DNA, 17 bp, Arabidopsis thaliana
actctgtgacttgccgt

SEQ ID NO: 25481 - DNA, 17 bp, Arabidopsis thaliana
actctgtgccagcagcc

SEQ ID NO: 25482 - DNA, 17 bp, Arabidopsis thaliana
actctgtgcgggacctt

SEQ ID NO: 25483 - DNA, 17 bp, Arabidopsis thaliana
actctgtgttgattgat

SEQ ID NO: 25484 - DNA, 17 bp, Arabidopsis thaliana
actctgttctgtcgggt

SEQ ID NO: 25485 - DNA, 17 bp, Arabidopsis thaliana
actctgtttcaggttgg

SEQ ID NO: 25486 - DNA, 17 bp, Arabidopsis thaliana
actctgtttcatgctct

SEQ ID NO: 25487 - DNA, 17 bp, Arabidopsis thaliana
actctgtttggatctgc

SEQ ID NO: 25488 - DNA, 17 bp, Arabidopsis thaliana
actctgtttgtttctcc

SEQ ID NO: 25489 - DNA, 17 bp, Arabidopsis thaliana
actcttaaagccgtcca

SEQ ID NO: 25490 - DNA, 17 bp, Arabidopsis thaliana
actcttaactagatttt

SEQ ID NO: 25491 - DNA, 17 bp, Arabidopsis thaliana
actcttaagatcgtgcc

SEQ ID NO: 25492 - DNA, 17 bp, Arabidopsis thaliana
actcttaagatcgtggc

SEQ ID NO: 25493 - DNA, 17 bp, Arabidopsis thaliana
actcttaagattgtgcc

SEQ ID NO: 25494 - DNA, 17 bp, Arabidopsis thaliana
actcttaatcccctggt

SEQ ID NO: 25495 - DNA, 17 bp, Arabidopsis thaliana
actcttaatgctaccaa

SEQ ID NO: 25496 - DNA, 17 bp, Arabidopsis thaliana
actcttaatgggatcaa

SEQ ID NO: 25497 - DNA, 17 bp, Arabidopsis thaliana
actcttactcgactagc

SEQ ID NO: 25498 - DNA, 17 bp, Arabidopsis thaliana
actcttaggattatgcc

SEQ ID NO: 25499 - DNA, 17 bp, Arabidopsis thaliana
actcttagtcgcagcct

SEQ ID NO: 25500 - DNA, 17 bp, Arabidopsis thaliana
actcttagtcgcatcct

SEQ ID NO: 25501 - DNA, 17 bp, Arabidopsis thaliana
actcttatcacaagatg

SEQ ID NO: 25502 - DNA, 17 bp, Arabidopsis thaliana
actcttatgggtttggc

SEQ ID NO: 25503 - DNA, 17 bp, Arabidopsis thaliana
actcttcatctcgaggg

SEQ ID NO: 25504 - DNA, 17 bp, Arabidopsis thaliana
actcttccgagccgtgg

SEQ ID NO: 25505 - DNA, 17 bp, Arabidopsis thaliana
actcttccggtttgtga

SEQ ID NO: 25506 - DNA, 17 bp, Arabidopsis thaliana
actcttccgtttccgtc

SEQ ID NO: 25507 - DNA, 17 bp, Arabidopsis thaliana
actcttcgcacggttta

SEQ ID NO: 25508 - DNA, 17 bp, Arabidopsis thaliana
actcttcgcttcttggg

SEQ ID NO: 25509 - DNA, 17 bp, Arabidopsis thaliana
actcttcggaaaggtgc

SEQ ID NO: 25510 - DNA, 17 bp, Arabidopsis thaliana
actcttcgggagaaggg

SEQ ID NO: 25511 - DNA, 17 bp, Arabidopsis thaliana
actcttcggttcgcttg

SEQ ID NO: 25512 - DNA, 17 bp, Arabidopsis thaliana
actcttctcactatgca

SEQ ID NO: 25513 - DNA, 17 bp, Arabidopsis thaliana
actcttcttcttgtcgg

SEQ ID NO: 25514 - DNA, 17 bp, Arabidopsis thaliana
actcttctttcggctta

SEQ ID NO: 25515 - DNA, 17 bp, Arabidopsis thaliana
actcttctttctttctt

SEQ ID NO: 25516 - DNA, 17 bp, Arabidopsis thaliana
actcttgacatccatct

SEQ ID NO: 25517 - DNA, 17 bp, Arabidopsis thaliana
actcttgacctcaaatt

SEQ ID NO: 25518 - DNA, 17 bp, Arabidopsis thaliana
actcttgactctagtcc

SEQ ID NO: 25519 - DNA, 17 bp, Arabidopsis thaliana
actcttgatggacacct

SEQ ID NO: 25520 - DNA, 17 bp, Arabidopsis thaliana
actcttgcagggttatg

SEQ ID NO: 25521 - DNA, 17 bp, Arabidopsis thaliana
actcttgcagtgctgtc

SEQ ID NO: 25522 - DNA, 17 bp, Arabidopsis thaliana
actcttgcctgttttgc

SEQ ID NO: 25523 - DNA, 17 bp, Arabidopsis thaliana
actcttgcttgtggccg

SEQ ID NO: 25524 - DNA, 17 bp, Arabidopsis thaliana
actcttggcaattcaca

SEQ ID NO: 25525 - DNA, 17 bp, Arabidopsis thaliana
actcttggccggagtaa

SEQ ID NO: 25526 - DNA, 17 bp, Arabidopsis thaliana
actcttggcctaaggtc

SEQ ID NO: 25527 - DNA, 17 bp, Arabidopsis thaliana
actcttggggtgtgctg

SEQ ID NO: 25528 - DNA, 17 bp, Arabidopsis thaliana
actcttggtgcaggtcg

SEQ ID NO: 25529 - DNA, 17 bp, Arabidopsis thaliana
actcttggtgctactgc

SEQ ID NO: 25530 - DNA, 17 bp, Arabidopsis thaliana
actcttggttctatcct

SEQ ID NO: 25531 - DNA, 17 bp, Arabidopsis thaliana
actcttgtcagctttga

SEQ ID NO: 25532 - DNA, 17 bp, Arabidopsis thaliana
actctttcaagggtggc

SEQ ID NO: 25533 - DNA, 17 bp, Arabidopsis thaliana
actctttcccccgaaca

SEQ ID NO: 25534 - DNA, 17 bp, Arabidopsis thaliana
actctttccgctgctcc

SEQ ID NO: 25535 - DNA, 17 bp, Arabidopsis thaliana
actctttcgggattctg

SEQ ID NO: 25536 - DNA, 17 bp, Arabidopsis thaliana
actctttctaacagctt

SEQ ID NO: 25537 - DNA, 17 bp, Arabidopsis thaliana
actctttcttctgatga

SEQ ID NO: 25538 - DNA, 17 bp, Arabidopsis thaliana
actctttggcatggatc

SEQ ID NO: 25539 - DNA, 17 bp, Arabidopsis thaliana
actctttggctatgtct

SEQ ID NO: 25540 - DNA, 17 bp, Arabidopsis thaliana
actctttggcttgaatc

SEQ ID NO: 25541 - DNA, 17 bp, Arabidopsis thaliana
actctttggtgcgtttc

SEQ ID NO: 25542 - DNA, 17 bp, Arabidopsis thaliana
actcttttacgggctct

SEQ ID NO: 25543 - DNA, 17 bp, Arabidopsis thaliana
actcttttcaaagattg

SEQ ID NO: 25544 - DNA, 17 bp, Arabidopsis thaliana
actcttttcctaaactt

SEQ ID NO: 25545 - DNA, 17 bp, Arabidopsis thaliana
actcttttgctctccga

SEQ ID NO: 25546 - DNA, 17 bp, Arabidopsis thaliana
actcttttgctgtcagg

SEQ ID NO: 25547 - DNA, 17 bp, Arabidopsis thaliana
actcttttggaagtgcc

SEQ ID NO: 25548 - DNA, 17 bp, Arabidopsis thaliana
actcttttgggcgatga

SEQ ID NO: 25549 - DNA, 17 bp, Arabidopsis thaliana
actctttttcccatcgc

SEQ ID NO: 25550 - DNA, 17 bp, Arabidopsis thaliana
actgaaaaagatcctgc

SEQ ID NO: 25551 - DNA, 17 bp, Arabidopsis thaliana
actgaaaaagttatttc

SEQ ID NO: 25552 - DNA, 17 bp, Arabidopsis thaliana
actgaaaacgccggcca

SEQ ID NO: 25553 - DNA, 17 bp, Arabidopsis thaliana
actgaaaatgctggtca

SEQ ID NO: 25554 - DNA, 17 bp, Arabidopsis thaliana
actgaaaatgtcggcca

SEQ ID NO: 25555 - DNA, 17 bp, Arabidopsis thaliana
actgaaaccagcgacca

SEQ ID NO: 25556 - DNA, 17 bp, Arabidopsis thaliana
actgaaaccgcaaccgg

SEQ ID NO: 25557 - DNA, 17 bp, Arabidopsis thaliana
actgaaactatcttcgt

SEQ ID NO: 25558 - DNA, 17 bp, Arabidopsis thaliana
actgaaactctggaatt

SEQ ID NO: 25559 - DNA, 17 bp, Arabidopsis thaliana
actgaaagatagtgcgc

SEQ ID NO: 25560 - DNA, 17 bp, Arabidopsis thaliana
actgaaataacgcccca

SEQ ID NO: 25561 - DNA, 17 bp, Arabidopsis thaliana
actgaaatcctcatctt

SEQ ID NO: 25562 - DNA, 17 bp, Arabidopsis thaliana
actgaaatgcttcagag

SEQ ID NO: 25563 - DNA, 17 bp, Arabidopsis thaliana
actgaaatgtttctgac

SEQ ID NO: 25564 - DNA, 17 bp, Arabidopsis thaliana
actgaaattcgtcctta

SEQ ID NO: 25565 - DNA, 17 bp, Arabidopsis thaliana
actgaaatttgaaccaa

SEQ ID NO: 25566 - DNA, 17 bp, Arabidopsis thaliana
actgaacaatgagcgac

SEQ ID NO: 25567 - DNA, 17 bp, Arabidopsis thaliana
actgaacagtttctgct

SEQ ID NO: 25568 - DNA, 17 bp, Arabidopsis thaliana
actgaaccgcaccgtgc

SEQ ID NO: 25569 - DNA, 17 bp, Arabidopsis thaliana
actgaacgcctctaagt

SEQ ID NO: 25570 - DNA, 17 bp, Arabidopsis thaliana
actgaacgctttttgcc

SEQ ID NO: 25571 - DNA, 17 bp, Arabidopsis thaliana
actgaacggggttagat

SEQ ID NO: 25572 - DNA, 17 bp, Arabidopsis thaliana
actgaactgcttgcttt

SEQ ID NO: 25573 - DNA, 17 bp, Arabidopsis thaliana
actgaagatacaagggt

SEQ ID NO: 25574 - DNA, 17 bp, Arabidopsis thaliana
actgaagcggatattta

SEQ ID NO: 25575 - DNA, 17 bp, Arabidopsis thaliana
actgaagctgatgtggc

SEQ ID NO: 25576 - DNA, 17 bp, Arabidopsis thaliana
actgaaggtccgtagtt

SEQ ID NO: 25577 - DNA, 17 bp, Arabidopsis thaliana
actgaaggtcgcgaacg

SEQ ID NO: 25578 - DNA, 17 bp, Arabidopsis thaliana
actgaagtcaacacttt

SEQ ID NO: 25579 - DNA, 17 bp, Arabidopsis thaliana
actgaatactgtgtgcg

SEQ ID NO: 25580 - DNA, 17 bp, Arabidopsis thaliana
actgaatagttgaccca

SEQ ID NO: 25581 - DNA, 17 bp, Arabidopsis thaliana
actgaatcagagtttgg

SEQ ID NO: 25582 - DNA, 17 bp, Arabidopsis thaliana
actgaatctacagggtg

SEQ ID NO: 25583 - DNA, 17 bp, Arabidopsis thaliana
actgaatctgagactct

SEQ ID NO: 25584 - DNA, 17 bp, Arabidopsis thaliana
actgaatcttgcgaaag

SEQ ID NO: 25585 - DNA, 17 bp, Arabidopsis thaliana
actgaattcagtttcca

SEQ ID NO: 25586 - DNA, 17 bp, Arabidopsis thaliana
actgaattccacggaac

SEQ ID NO: 25587 - DNA, 17 bp, Arabidopsis thaliana
actgaattccacgtgga

SEQ ID NO: 25588 - DNA, 17 bp, Arabidopsis thaliana
actgaattcgtcgagtc

SEQ ID NO: 25589 - DNA, 17 bp, Arabidopsis thaliana
actgaattgtcaacgtc

SEQ ID NO: 25590 - DNA, 17 bp, Arabidopsis thaliana
actgacaaacacgtcga

SEQ ID NO: 25591 - DNA, 17 bp, Arabidopsis thaliana
actgacaaacagagaat

SEQ ID NO: 25592 - DNA, 17 bp, Arabidopsis thaliana
actgacaaagacaaggc

SEQ ID NO: 25593 - DNA, 17 bp, Arabidopsis thaliana
actgacaaagtgaaagg

SEQ ID NO: 25594 - DNA, 17 bp, Arabidopsis thaliana
actgacaatcctaaccg

SEQ ID NO: 25595 - DNA, 17 bp, Arabidopsis thaliana
actgacacgtggcacgc

SEQ ID NO: 25596 - DNA, 17 bp, Arabidopsis thaliana
actgacacgtgttttct

SEQ ID NO: 25597 - DNA, 17 bp, Arabidopsis thaliana
actgacactgagtgtcc

SEQ ID NO: 25598 - DNA, 17 bp, Arabidopsis thaliana
actgacactgcaagcct

SEQ ID NO: 25599 - DNA, 17 bp, Arabidopsis thaliana
actgacatgcgggataa

SEQ ID NO: 25600 - DNA, 17 bp, Arabidopsis thaliana
actgaccaaccgtatgc

SEQ ID NO: 25601 - DNA, 17 bp, Arabidopsis thaliana
actgaccagaaaatgga

SEQ ID NO: 25602 - DNA, 17 bp, Arabidopsis thaliana
actgacccagctgggtg

SEQ ID NO: 25603 - DNA, 17 bp, Arabidopsis thaliana
actgaccgatcagccgg

SEQ ID NO: 25604 - DNA, 17 bp, Arabidopsis thaliana
actgaccggatcagccg

SEQ ID NO: 25605 - DNA, 17 bp, Arabidopsis thaliana
actgaccggatcagtcg

SEQ ID NO: 25606 - DNA, 17 bp, Arabidopsis thaliana
actgaccgtcagatagg

SEQ ID NO: 25607 - DNA, 17 bp, Arabidopsis thaliana
actgaccgtgctcaagc

SEQ ID NO: 25608 - DNA, 17 bp, Arabidopsis thaliana
actgacgcttctgccct

SEQ ID NO: 25609 - DNA, 17 bp, Arabidopsis thaliana
actgacgggttagcaaa

SEQ ID NO: 25610 - DNA, 17 bp, Arabidopsis thaliana
actgactatggatcgga

SEQ ID NO: 25611 - DNA, 17 bp, Arabidopsis thaliana
actgactctctgttgga

SEQ ID NO: 25612 - DNA, 17 bp, Arabidopsis thaliana
actgactgctaccctct

SEQ ID NO: 25613 - DNA, 17 bp, Arabidopsis thaliana
actgactgctgccctct

SEQ ID NO: 25614 - DNA, 17 bp, Arabidopsis thaliana
actgactggtaaaccag

SEQ ID NO: 25615 - DNA, 17 bp, Arabidopsis thaliana
actgactgttcacggta

SEQ ID NO: 25616 - DNA, 17 bp, Arabidopsis thaliana
actgacttcggcgttgg

SEQ ID NO: 25617 - DNA, 17 bp, Arabidopsis thaliana
actgacttcggtcaacc

SEQ ID NO: 25618 - DNA, 17 bp, Arabidopsis thaliana
actgacttctactgttg

SEQ ID NO: 25619 - DNA, 17 bp, Arabidopsis thaliana
actgactttactgagaa

SEQ ID NO: 25620 - DNA, 17 bp, Arabidopsis thaliana
actgactttggcgttgg

SEQ ID NO: 25621 - DNA, 17 bp, Arabidopsis thaliana
actgactttgtagtcct

SEQ ID NO: 25622 - DNA, 17 bp, Arabidopsis thaliana
actgactttttgtcgac

SEQ ID NO: 25623 - DNA, 17 bp, Arabidopsis thaliana
actgagaacgtagttga

SEQ ID NO: 25624 - DNA, 17 bp, Arabidopsis thaliana
actgagaagaccggcca

SEQ ID NO: 25625 - DNA, 17 bp, Arabidopsis thaliana
actgagaagcagataag

SEQ ID NO: 25626 - DNA, 17 bp, Arabidopsis thaliana
actgagaaggccggcca

SEQ ID NO: 25627 - DNA, 17 bp, Arabidopsis thaliana
actgagaaggctggtca

SEQ ID NO: 25628 - DNA, 17 bp, Arabidopsis thaliana
actgagaaggtccgcca

SEQ ID NO: 25629 - DNA, 17 bp, Arabidopsis thaliana
actgagaaggtcggcca

SEQ ID NO: 25630 - DNA, 17 bp, Arabidopsis thaliana
actgagaatcaccgaag

SEQ ID NO: 25631 - DNA, 17 bp, Arabidopsis thaliana
actgagaatgtcggcta

SEQ ID NO: 25632 - DNA, 17 bp, Arabidopsis thaliana
actgagactgaagttgg

SEQ ID NO: 25633 - DNA, 17 bp, Arabidopsis thaliana
actgagactgggcttaa

SEQ ID NO: 25634 - DNA, 17 bp, Arabidopsis thaliana
actgagagctctttctt

SEQ ID NO: 25635 - DNA, 17 bp, Arabidopsis thaliana
actgagagctgccaatt

SEQ ID NO: 25636 - DNA, 17 bp, Arabidopsis thaliana
actgagatggccgagtg

SEQ ID NO: 25637 - DNA, 17 bp, Arabidopsis thaliana
actgagatgtggttttc

SEQ ID NO: 25638 - DNA, 17 bp, Arabidopsis thaliana
actgagattcagccctt

SEQ ID NO: 25639 - DNA, 17 bp, Arabidopsis thaliana
actgagattcagccttt

SEQ ID NO: 25640 - DNA, 17 bp, Arabidopsis thaliana
actgagattcagctttt

SEQ ID NO: 25641 - DNA, 17 bp, Arabidopsis thaliana
actgagattcagttctt

SEQ ID NO: 25642 - DNA, 17 bp, Arabidopsis thaliana
actgagattcgtcgttg

SEQ ID NO: 25643 - DNA, 17 bp, Arabidopsis thaliana
actgagattcgttctga

SEQ ID NO: 25644 - DNA, 17 bp, Arabidopsis thaliana
actgagatttgtcgttg

SEQ ID NO: 25645 - DNA, 17 bp, Arabidopsis thaliana
actgagccattcgcagt

SEQ ID NO: 25646 - DNA, 17 bp, Arabidopsis thaliana
actgagcctgagattgc

SEQ ID NO: 25647 - DNA, 17 bp, Arabidopsis thaliana
actgagctctactgccc

SEQ ID NO: 25648 - DNA, 17 bp, Arabidopsis thaliana
actgagcttcccgtgtc

SEQ ID NO: 25649 - DNA, 17 bp, Arabidopsis thaliana
actgaggaccgagtgcc

SEQ ID NO: 25650 - DNA, 17 bp, Arabidopsis thaliana
actgaggatctgcggat

SEQ ID NO: 25651 - DNA, 17 bp, Arabidopsis thaliana
actgaggcgcccgccac

SEQ ID NO: 25652 - DNA, 17 bp, Arabidopsis thaliana
actgagggtctgggagt

SEQ ID NO: 25653 - DNA, 17 bp, Arabidopsis thaliana
actgagggtgttgagac

SEQ ID NO: 25654 - DNA, 17 bp, Arabidopsis thaliana
actgaggtccacagttc

SEQ ID NO: 25655 - DNA, 17 bp, Arabidopsis thaliana
actgaggtggtggtggt

SEQ ID NO: 25656 - DNA, 17 bp, Arabidopsis thaliana
actgagtataagccaga

SEQ ID NO: 25657 - DNA, 17 bp, Arabidopsis thaliana
actgagtatcaggtggc

SEQ ID NO: 25658 - DNA, 17 bp, Arabidopsis thaliana
actgagtatcatgtgac

SEQ ID NO: 25659 - DNA, 17 bp, Arabidopsis thaliana
actgagtcaaccagatt

SEQ ID NO: 25660 - DNA, 17 bp, Arabidopsis thaliana
actgagtcaactaacca

SEQ ID NO: 25661 - DNA, 17 bp, Arabidopsis thaliana
actgagtcttcgccgac

SEQ ID NO: 25662 - DNA, 17 bp, Arabidopsis thaliana
actgagtgacttcaatg

SEQ ID NO: 25663 - DNA, 17 bp, Arabidopsis thaliana
actgagtgtccagcccc

SEQ ID NO: 25664 - DNA, 17 bp, Arabidopsis thaliana
actgagttttatcttgt

SEQ ID NO: 25665 - DNA, 17 bp, Arabidopsis thaliana
actgagttttccagagc

SEQ ID NO: 25666 - DNA, 17 bp, Arabidopsis thaliana
actgataatccaggaca

SEQ ID NO: 25667 - DNA, 17 bp, Arabidopsis thaliana
actgatacgactttgtt

SEQ ID NO: 25668 - DNA, 17 bp, Arabidopsis thaliana
actgatagagtccaagc

SEQ ID NO: 25669 - DNA, 17 bp, Arabidopsis thaliana
actgatatagctcagtt

SEQ ID NO: 25670 - DNA, 17 bp, Arabidopsis thaliana
actgatcgttctcctag

SEQ ID NO: 25671 - DNA, 17 bp, Arabidopsis thaliana
actgatctgacctttcg

SEQ ID NO: 25672 - DNA, 17 bp, Arabidopsis thaliana
actgatgaaacgcagcg

SEQ ID NO: 25673 - DNA, 17 bp, Arabidopsis thaliana
actgatgaatgcagggt

SEQ ID NO: 25674 - DNA, 17 bp, Arabidopsis thaliana
actgatgaggctgaagt

SEQ ID NO: 25675 - DNA, 17 bp, Arabidopsis thaliana
actgatgattaggtgag

SEQ ID NO: 25676 - DNA, 17 bp, Arabidopsis thaliana
actgatgcaggagagcc

SEQ ID NO: 25677 - DNA, 17 bp, Arabidopsis thaliana
actgatgcccgcgtcgc

SEQ ID NO: 25678 - DNA, 17 bp, Arabidopsis thaliana
actgatgctgacacctg

SEQ ID NO: 25679 - DNA, 17 bp, Arabidopsis thaliana
actgatggacatggtct

SEQ ID NO: 25680 - DNA, 17 bp, Arabidopsis thaliana
actgatggagataccct

SEQ ID NO: 25681 - DNA, 17 bp, Arabidopsis thaliana
actgatggagatgtcct

SEQ ID NO: 25682 - DNA, 17 bp, Arabidopsis thaliana
actgatggaggctccgc

SEQ ID NO: 25683 - DNA, 17 bp, Arabidopsis thaliana
actgatggcttgtcatc

SEQ ID NO: 25684 - DNA, 17 bp, Arabidopsis thaliana
actgatggttgtgtacc

SEQ ID NO: 25685 - DNA, 17 bp, Arabidopsis thaliana
actgatgtgacacctgt

SEQ ID NO: 25686 - DNA, 17 bp, Arabidopsis thaliana
actgatgtgtcaagtta

SEQ ID NO: 25687 - DNA, 17 bp, Arabidopsis thaliana
actgatgtgtcaagttg

SEQ ID NO: 25688 - DNA, 17 bp, Arabidopsis thaliana
actgatgtttcggatgg

SEQ ID NO: 25689 - DNA, 17 bp, Arabidopsis thaliana
actgattaaccagcagg

SEQ ID NO: 25690 - DNA, 17 bp, Arabidopsis thaliana
actgattagcgactgca

SEQ ID NO: 25691 - DNA, 17 bp, Arabidopsis thaliana
actgattccaggtgtag

SEQ ID NO: 25692 - DNA, 17 bp, Arabidopsis thaliana
actgattccgcactagc

SEQ ID NO: 25693 - DNA, 17 bp, Arabidopsis thaliana
actgattctggtgcctt

SEQ ID NO: 25694 - DNA, 17 bp, Arabidopsis thaliana
actgattctgtaaacgt

SEQ ID NO: 25695 - DNA, 17 bp, Arabidopsis thaliana
actgattgggtttcgct

SEQ ID NO: 25696 - DNA, 17 bp, Arabidopsis thaliana
actgattgttctttgct

SEQ ID NO: 25697 - DNA, 17 bp, Arabidopsis thaliana
actgatttattgttgat

SEQ ID NO: 25698 - DNA, 17 bp, Arabidopsis thaliana
actgatttccatggacc

SEQ ID NO: 25699 - DNA, 17 bp, Arabidopsis thaliana
actgatttcggccaatc

SEQ ID NO: 25700 - DNA, 17 bp, Arabidopsis thaliana
actgatttgctcacgac

SEQ ID NO: 25701 - DNA, 17 bp, Arabidopsis thaliana
actgatttgggcctgag

SEQ ID NO: 25702 - DNA, 17 bp, Arabidopsis thaliana
actgatttgtcggctat

SEQ ID NO: 25703 - DNA, 17 bp, Arabidopsis thaliana
actgatttgttttccgg

SEQ ID NO: 25704 - DNA, 17 bp, Arabidopsis thaliana
actgattttcttgttcg

SEQ ID NO: 25705 - DNA, 17 bp, Arabidopsis thaliana
actgattttgacgaggg

SEQ ID NO: 25706 - DNA, 17 bp, Arabidopsis thaliana
actgattttgtaatagg

SEQ ID NO: 25707 - DNA, 17 bp, Arabidopsis thaliana
actgatttttcgggtcg

SEQ ID NO: 25708 - DNA, 17 bp, Arabidopsis thaliana
actgattttttaccaaa

SEQ ID NO: 25709 - DNA, 17 bp, Arabidopsis thaliana
actgcaaacaacccagg

SEQ ID NO: 25710 - DNA, 17 bp, Arabidopsis thaliana
actgcaaaggtgatgtc

SEQ ID NO: 25711 - DNA, 17 bp, Arabidopsis thaliana
actgcaaatgccgccat

SEQ ID NO: 25712 - DNA, 17 bp, Arabidopsis thaliana
actgcaaatgccttgga

SEQ ID NO: 25713 - DNA, 17 bp, Arabidopsis thaliana
actgcaaatgccttgta

SEQ ID NO: 25714 - DNA, 17 bp, Arabidopsis thaliana
actgcaaatgcgtgtcc

SEQ ID NO: 25715 - DNA, 17 bp, Arabidopsis thaliana
actgcaaatttccaaat

SEQ ID NO: 25716 - DNA, 17 bp, Arabidopsis thaliana
actgcaacatctttggt

SEQ ID NO: 25717 - DNA, 17 bp, Arabidopsis thaliana
actgcaaccgcccgttt

SEQ ID NO: 25718 - DNA, 17 bp, Arabidopsis thaliana
actgcaacctggctcgg

SEQ ID NO: 25719 - DNA, 17 bp, Arabidopsis thaliana
actgcaacgacatcgtc

SEQ ID NO: 25720 - DNA, 17 bp, Arabidopsis thaliana
actgcaactccaaactg

SEQ ID NO: 25721 - DNA, 17 bp, Arabidopsis thaliana
actgcaactgtgcgatt

SEQ ID NO: 25722 - DNA, 17 bp, Arabidopsis thaliana
actgcaacttgatgtcc

SEQ ID NO: 25723 - DNA, 17 bp, Arabidopsis thaliana
actgcaacttgatgtgc

SEQ ID NO: 25724 - DNA, 17 bp, Arabidopsis thaliana
actgcaacttgtccgct

SEQ ID NO: 25725 - DNA, 17 bp, Arabidopsis thaliana
actgcaagacccacccg

SEQ ID NO: 25726 - DNA, 17 bp, Arabidopsis thaliana
actgcaagggctggctc

SEQ ID NO: 25727 - DNA, 17 bp, Arabidopsis thaliana
actgcaaggtttaacgc

SEQ ID NO: 25728 - DNA, 17 bp, Arabidopsis thaliana
actgcaagtagagatgt

SEQ ID NO: 25729 - DNA, 17 bp, Arabidopsis thaliana
actgcaagttggccgag

SEQ ID NO: 25730 - DNA, 17 bp, Arabidopsis thaliana
actgcaatattccatgt

SEQ ID NO: 25731 - DNA, 17 bp, Arabidopsis thaliana
actgcaatcggattccg

SEQ ID NO: 25732 - DNA, 17 bp, Arabidopsis thaliana
actgcaatgccattcgg

SEQ ID NO: 25733 - DNA, 17 bp, Arabidopsis thaliana
actgcaatttttggtcg

SEQ ID NO: 25734 - DNA, 17 bp, Arabidopsis thaliana
actgcacagattgcgcc

SEQ ID NO: 25735 - DNA, 17 bp, Arabidopsis thaliana
actgcacaggcttggct

SEQ ID NO: 25736 - DNA, 17 bp, Arabidopsis thaliana
actgcacatttccgttt

SEQ ID NO: 25737 - DNA, 17 bp, Arabidopsis thaliana
actgcaccagttccggg

SEQ ID NO: 25738 - DNA, 17 bp, Arabidopsis thaliana
actgcaccgcaacagtg

SEQ ID NO: 25739 - DNA, 17 bp, Arabidopsis thaliana
actgcaccgcactttat

SEQ ID NO: 25740 - DNA, 17 bp, Arabidopsis thaliana
actgcaccgcacttttc

SEQ ID NO: 25741 - DNA, 17 bp, Arabidopsis thaliana
actgcaccgcattttat

SEQ ID NO: 25742 - DNA, 17 bp, Arabidopsis thaliana
actgcaccgtgcggttt

SEQ ID NO: 25743 - DNA, 17 bp, Arabidopsis thaliana
actgcacgggcctggct

SEQ ID NO: 25744 - DNA, 17 bp, Arabidopsis thaliana
actgcacgtctgcctgg

SEQ ID NO: 25745 - DNA, 17 bp, Arabidopsis thaliana
actgcacgtcttcattc

SEQ ID NO: 25746 - DNA, 17 bp, Arabidopsis thaliana
actgcactcatggctca

SEQ ID NO: 25747 - DNA, 17 bp, Arabidopsis thaliana
actgcactgcggttcgg

SEQ ID NO: 25748 - DNA, 17 bp, Arabidopsis thaliana
actgcactgtgcggttc

SEQ ID NO: 25749 - DNA, 17 bp, Arabidopsis thaliana
actgcactgttgcggta

SEQ ID NO: 25750 - DNA, 17 bp, Arabidopsis thaliana
actgcagaaatcactga

SEQ ID NO: 25751 - DNA, 17 bp, Arabidopsis thaliana
actgcagactatggccc

SEQ ID NO: 25752 - DNA, 17 bp, Arabidopsis thaliana
actgcagacttgtttca

SEQ ID NO: 25753 - DNA, 17 bp, Arabidopsis thaliana
actgcagatctatttgg

SEQ ID NO: 25754 - DNA, 17 bp, Arabidopsis thaliana
actgcagcttgtgtctc

SEQ ID NO: 25755 - DNA, 17 bp, Arabidopsis thaliana
actgcaggaaaaatgcg

SEQ ID NO: 25756 - DNA, 17 bp, Arabidopsis thaliana
actgcaggaggtttgtt

SEQ ID NO: 25757 - DNA, 17 bp, Arabidopsis thaliana
actgcaggctctttggc

SEQ ID NO: 25758 - DNA, 17 bp, Arabidopsis thaliana
actgcagggagagggga

SEQ ID NO: 25759 - DNA, 17 bp, Arabidopsis thaliana
actgcagtatgcggatt

SEQ ID NO: 25760 - DNA, 17 bp, Arabidopsis thaliana
actgcagtctttggtca

SEQ ID NO: 25761 - DNA, 17 bp, Arabidopsis thaliana
actgcagtgctacggta

SEQ ID NO: 25762 - DNA, 17 bp, Arabidopsis thaliana
actgcagttagcggttc

SEQ ID NO: 25763 - DNA, 17 bp, Arabidopsis thaliana
actgcagttcgctctgt

SEQ ID NO: 25764 - DNA, 17 bp, Arabidopsis thaliana
actgcatagttcgctaa

SEQ ID NO: 25765 - DNA, 17 bp, Arabidopsis thaliana
actgcatattcagattt

SEQ ID NO: 25766 - DNA, 17 bp, Arabidopsis thaliana
actgcatgaagattatc

SEQ ID NO: 25767 - DNA, 17 bp, Arabidopsis thaliana
actgcattttgcggtgc

SEQ ID NO: 25768 - DNA, 17 bp, Arabidopsis thaliana
actgccaaagtgtggac

SEQ ID NO: 25769 - DNA, 17 bp, Arabidopsis thaliana
actgccaacttggacat

SEQ ID NO: 25770 - DNA, 17 bp, Arabidopsis thaliana
actgccaagatattatg

SEQ ID NO: 25771 - DNA, 17 bp, Arabidopsis thaliana
actgccaatctctctac

SEQ ID NO: 25772 - DNA, 17 bp, Arabidopsis thaliana
actgccactgccatccg

SEQ ID NO: 25773 - DNA, 17 bp, Arabidopsis thaliana
actgccagcttcagagt

SEQ ID NO: 25774 - DNA, 17 bp, Arabidopsis thaliana
actgccatcatcgacta

SEQ ID NO: 25775 - DNA, 17 bp, Arabidopsis thaliana
actgcccaaagacagcc

SEQ ID NO: 25776 - DNA, 17 bp, Arabidopsis thaliana
actgcccgagcctgacc

SEQ ID NO: 25777 - DNA, 17 bp, Arabidopsis thaliana
actgcccgattagcgcc

SEQ ID NO: 25778 - DNA, 17 bp, Arabidopsis thaliana
actgccgggggacggac

SEQ ID NO: 25779 - DNA, 17 bp, Arabidopsis thaliana
actgccggtgttaactt

SEQ ID NO: 25780 - DNA, 17 bp, Arabidopsis thaliana
actgccggttgatcgta

SEQ ID NO: 25781 - DNA, 17 bp, Arabidopsis thaliana
actgcctaatgggaacc

SEQ ID NO: 25782 - DNA, 17 bp, Arabidopsis thaliana
actgcctagaacgactc

SEQ ID NO: 25783 - DNA, 17 bp, Arabidopsis thaliana
actgcctataggaggcc

SEQ ID NO: 25784 - DNA, 17 bp, Arabidopsis thaliana
actgcctctaagcaatg

SEQ ID NO: 25785 - DNA, 17 bp, Arabidopsis thaliana
actgcctgcatttctga

SEQ ID NO: 25786 - DNA, 17 bp, Arabidopsis thaliana
actgcctgcttgttcgt

SEQ ID NO: 25787 - DNA, 17 bp, Arabidopsis thaliana
actgcctgtgacgtatg

SEQ ID NO: 25788 - DNA, 17 bp, Arabidopsis thaliana
actgccttcccatttac

SEQ ID NO: 25789 - DNA, 17 bp, Arabidopsis thaliana
actgcgaaagcatttgc

SEQ ID NO: 25790 - DNA, 17 bp, Arabidopsis thaliana
actgcgaactgataatg

SEQ ID NO: 25791 - DNA, 17 bp, Arabidopsis thaliana
actgcgaatggctcatg

SEQ ID NO: 25792 - DNA, 17 bp, Arabidopsis thaliana
actgcgaatgtgatata

SEQ ID NO: 25793 - DNA, 17 bp, Arabidopsis thaliana
actgcgacaatctctct

SEQ ID NO: 25794 - DNA, 17 bp, Arabidopsis thaliana
actgcgaccgcgtcgcc

SEQ ID NO: 25795 - DNA, 17 bp, Arabidopsis thaliana
actgcgacctatacccg

SEQ ID NO: 25796 - DNA, 17 bp, Arabidopsis thaliana
actgcgacgagagtcat

SEQ ID NO: 25797 - DNA, 17 bp, Arabidopsis thaliana
actgcgactgcccttca

SEQ ID NO: 25798 - DNA, 17 bp, Arabidopsis thaliana
actgcgagacatctctc

SEQ ID NO: 25799 - DNA, 17 bp, Arabidopsis thaliana
actgcgagtttgtgatc

SEQ ID NO: 25800 - DNA, 17 bp, Arabidopsis thaliana
actgcgatgaccgtcag

SEQ ID NO: 25801 - DNA, 17 bp, Arabidopsis thaliana
actgcgatggattattc

SEQ ID NO: 25802 - DNA, 17 bp, Arabidopsis thaliana
actgcgattctctccgc

SEQ ID NO: 25803 - DNA, 17 bp, Arabidopsis thaliana
actgcgcaaggaacaaa

SEQ ID NO: 25804 - DNA, 17 bp, Arabidopsis thaliana
actgcggagttctgatg

SEQ ID NO: 25805 - DNA, 17 bp, Arabidopsis thaliana
actgcggataaagtgcg

SEQ ID NO: 25806 - DNA, 17 bp, Arabidopsis thaliana
actgcggataaagtgtg

SEQ ID NO: 25807 - DNA, 17 bp, Arabidopsis thaliana
actgcggatcaagtgta

SEQ ID NO: 25808 - DNA, 17 bp, Arabidopsis thaliana
actgcggatcactggat

SEQ ID NO: 25809 - DNA, 17 bp, Arabidopsis thaliana
actgcggatgaaatgcg

SEQ ID NO: 25810 - DNA, 17 bp, Arabidopsis thaliana
actgcggattcaagcgg

SEQ ID NO: 25811 - DNA, 17 bp, Arabidopsis thaliana
actgcggcgtgacgcgg

SEQ ID NO: 25812 - DNA, 17 bp, Arabidopsis thaliana
actgcggctaccccagc

SEQ ID NO: 25813 - DNA, 17 bp, Arabidopsis thaliana
actgcggcttgctatgg

SEQ ID NO: 25814 - DNA, 17 bp, Arabidopsis thaliana
actgcgggactatttag

SEQ ID NO: 25815 - DNA, 17 bp, Arabidopsis thaliana
actgcgggcaatcggtt

SEQ ID NO: 25816 - DNA, 17 bp, Arabidopsis thaliana
actgcgggctaatggcg

SEQ ID NO: 25817 - DNA, 17 bp, Arabidopsis thaliana
actgcggggtcgtctgc

SEQ ID NO: 25818 - DNA, 17 bp, Arabidopsis thaliana
actgcgggttaaaatct

SEQ ID NO: 25819 - DNA, 17 bp, Arabidopsis thaliana
actgcgggtttttttta

SEQ ID NO: 25820 - DNA, 17 bp, Arabidopsis thaliana
actgcggtacgtgtagg

SEQ ID NO: 25821 - DNA, 17 bp, Arabidopsis thaliana
actgcggtgcggtttaa

SEQ ID NO: 25822 - DNA, 17 bp, Arabidopsis thaliana
actgcggtgcttctcat

SEQ ID NO: 25823 - DNA, 17 bp, Arabidopsis thaliana
actgcggttagcgattc

SEQ ID NO: 25824 - DNA, 17 bp, Arabidopsis thaliana
actgcgtaagcatttgc

SEQ ID NO: 25825 - DNA, 17 bp, Arabidopsis thaliana
actgcgtattcagattt

SEQ ID NO: 25826 - DNA, 17 bp, Arabidopsis thaliana
actgcgtattggagttt

SEQ ID NO: 25827 - DNA, 17 bp, Arabidopsis thaliana
actgcgtctaagcaaat

SEQ ID NO: 25828 - DNA, 17 bp, Arabidopsis thaliana
actgcgtggctgagtgc

SEQ ID NO: 25829 - DNA, 17 bp, Arabidopsis thaliana
actgcgtggtaactggt

SEQ ID NO: 25830 - DNA, 17 bp, Arabidopsis thaliana
actgcgttttgcgctac

SEQ ID NO: 25831 - DNA, 17 bp, Arabidopsis thaliana
actgcgttttgcggtac

SEQ ID NO: 25832 - DNA, 17 bp, Arabidopsis thaliana
actgcgttttgcggtat

SEQ ID NO: 25833 - DNA, 17 bp, Arabidopsis thaliana
actgcgttttgcggtgc

SEQ ID NO: 25834 - DNA, 17 bp, Arabidopsis thaliana
actgcgttttgcggtgt

SEQ ID NO: 25835 - DNA, 17 bp, Arabidopsis thaliana
actgcgttttgctgtgc

SEQ ID NO: 25836 - DNA, 17 bp, Arabidopsis thaliana
actgcgttttgtggtgc

SEQ ID NO: 25837 - DNA, 17 bp, Arabidopsis thaliana
actgcgtttttcggtgc

SEQ ID NO: 25838 - DNA, 17 bp, Arabidopsis thaliana
actgcgttttttggtgc

SEQ ID NO: 25839 - DNA, 17 bp, Arabidopsis thaliana
actgcgttttttggttg

SEQ ID NO: 25840 - DNA, 17 bp, Arabidopsis thaliana
actgctaaatcgtttgc

SEQ ID NO: 25841 - DNA, 17 bp, Arabidopsis thaliana
actgctaacattggtgc

SEQ ID NO: 25842 - DNA, 17 bp, Arabidopsis thaliana
actgctaacattggtgg

SEQ ID NO: 25843 - DNA, 17 bp, Arabidopsis thaliana
actgctaaggtttgctc

SEQ ID NO: 25844 - DNA, 17 bp, Arabidopsis thaliana
actgctaatggcattgg

SEQ ID NO: 25845 - DNA, 17 bp, Arabidopsis thaliana
actgctacgtgcgaaat

SEQ ID NO: 25846 - DNA, 17 bp, Arabidopsis thaliana
actgctagatttacttg

SEQ ID NO: 25847 - DNA, 17 bp, Arabidopsis thaliana
actgctagctaggagtt

SEQ ID NO: 25848 - DNA, 17 bp, Arabidopsis thaliana
actgctagtcctgggcg

SEQ ID NO: 25849 - DNA, 17 bp, Arabidopsis thaliana
actgctataaccgtatt

SEQ ID NO: 25850 - DNA, 17 bp, Arabidopsis thaliana
actgctatgttctcatt

SEQ ID NO: 25851 - DNA, 17 bp, Arabidopsis thaliana
actgctcacctcttagc

SEQ ID NO: 25852 - DNA, 17 bp, Arabidopsis thaliana
actgctcactccgccta

SEQ ID NO: 25853 - DNA, 17 bp, Arabidopsis thaliana
actgctcaggacaggga

SEQ ID NO: 25854 - DNA, 17 bp, Arabidopsis thaliana
actgctccccattcgac

SEQ ID NO: 25855 - DNA, 17 bp, Arabidopsis thaliana
actgctcctcaaaccgc

SEQ ID NO: 25856 - DNA, 17 bp, Arabidopsis thaliana
actgctcgagctgcttc

SEQ ID NO: 25857 - DNA, 17 bp, Arabidopsis thaliana
actgctcgctaggaacc

SEQ ID NO: 25858 - DNA, 17 bp, Arabidopsis thaliana
actgctctcatgtgctg

SEQ ID NO: 25859 - DNA, 17 bp, Arabidopsis thaliana
actgctctgttggctcg

SEQ ID NO: 25860 - DNA, 17 bp, Arabidopsis thaliana
actgctgaagtgactcg

SEQ ID NO: 25861 - DNA, 17 bp, Arabidopsis thaliana
actgctgacgaatcatg

SEQ ID NO: 25862 - DNA, 17 bp, Arabidopsis thaliana
actgctgatcggcttgg

SEQ ID NO: 25863 - DNA, 17 bp, Arabidopsis thaliana
actgctgatgtccaaac

SEQ ID NO: 25864 - DNA, 17 bp, Arabidopsis thaliana
actgctgattgtggaat

SEQ ID NO: 25865 - DNA, 17 bp, Arabidopsis thaliana
actgctgccctcttgac

SEQ ID NO: 25866 - DNA, 17 bp, Arabidopsis thaliana
actgctgcgagttggat

SEQ ID NO: 25867 - DNA, 17 bp, Arabidopsis thaliana
actgctgctgaatccat

SEQ ID NO: 25868 - DNA, 17 bp, Arabidopsis thaliana
actgctgctgctattgc

SEQ ID NO: 25869 - DNA, 17 bp, Arabidopsis thaliana
actgctggagtgctgag

SEQ ID NO: 25870 - DNA, 17 bp, Arabidopsis thaliana
actgctggattgctgag

SEQ ID NO: 25871 - DNA, 17 bp, Arabidopsis thaliana
actgctgggtttgaaca

SEQ ID NO: 25872 - DNA, 17 bp, Arabidopsis thaliana
actgctggtctcgggaa

SEQ ID NO: 25873 - DNA, 17 bp, Arabidopsis thaliana
actgctggttctggtgt

SEQ ID NO: 25874 - DNA, 17 bp, Arabidopsis thaliana
actgctgtagattctcg

SEQ ID NO: 25875 - DNA, 17 bp, Arabidopsis thaliana
actgctgtgcggtttgg

SEQ ID NO: 25876 - DNA, 17 bp, Arabidopsis thaliana
actgctgtggggtttgg

SEQ ID NO: 25877 - DNA, 17 bp, Arabidopsis thaliana
actgcttaggcttttca

SEQ ID NO: 25878 - DNA, 17 bp, Arabidopsis thaliana
actgcttatggacccga

SEQ ID NO: 25879 - DNA, 17 bp, Arabidopsis thaliana
actgcttccatcgggtc

SEQ ID NO: 25880 - DNA, 17 bp, Arabidopsis thaliana
actgcttctaagcaatt

SEQ ID NO: 25881 - DNA, 17 bp, Arabidopsis thaliana
actgcttcttgcttgac

SEQ ID NO: 25882 - DNA, 17 bp, Arabidopsis thaliana
actgcttctttgaggaa

SEQ ID NO: 25883 - DNA, 17 bp, Arabidopsis thaliana
actgcttgagttttctg

SEQ ID NO: 25884 - DNA, 17 bp, Arabidopsis thaliana
actgcttgcagagagaa

SEQ ID NO: 25885 - DNA, 17 bp, Arabidopsis thaliana
actgcttggatggtggt

SEQ ID NO: 25886 - DNA, 17 bp, Arabidopsis thaliana
actgcttggattggatt

SEQ ID NO: 25887 - DNA, 17 bp, Arabidopsis thaliana
actgcttggcatggtcc

SEQ ID NO: 25888 - DNA, 17 bp, Arabidopsis thaliana
actgcttggcatggtct

SEQ ID NO: 25889 - DNA, 17 bp, Arabidopsis thaliana
actgcttgtggatgtac

SEQ ID NO: 25890 - DNA, 17 bp, Arabidopsis thaliana
actgctttattactatc

SEQ ID NO: 25891 - DNA, 17 bp, Arabidopsis thaliana
actgctttgaacggttt

SEQ ID NO: 25892 - DNA, 17 bp, Arabidopsis thaliana
actggaaaagtgactgc

SEQ ID NO: 25893 - DNA, 17 bp, Arabidopsis thaliana
actggaacgatgtagaa

SEQ ID NO: 25894 - DNA, 17 bp, Arabidopsis thaliana
actggaactttagatca

SEQ ID NO: 25895 - DNA, 17 bp, Arabidopsis thaliana
actggaaggtgcggctg

SEQ ID NO: 25896 - DNA, 17 bp, Arabidopsis thaliana
actggaatagttttatg

SEQ ID NO: 25897 - DNA, 17 bp, Arabidopsis thaliana
actggaatcatttccaa

SEQ ID NO: 25898 - DNA, 17 bp, Arabidopsis thaliana
actggaattcatcaggt

SEQ ID NO: 25899 - DNA, 17 bp, Arabidopsis thaliana
actggaatttcaaccga

SEQ ID NO: 25900 - DNA, 17 bp, Arabidopsis thaliana
actggaatttcaagcga

SEQ ID NO: 25901 - DNA, 17 bp, Arabidopsis thaliana
actggaatttgccaact

SEQ ID NO: 25902 - DNA, 17 bp, Arabidopsis thaliana
actggaccaacaactcg

SEQ ID NO: 25903 - DNA, 17 bp, Arabidopsis thaliana
actggaccactgcttaa

SEQ ID NO: 25904 - DNA, 17 bp, Arabidopsis thaliana
actggacccaacccgaa

SEQ ID NO: 25905 - DNA, 17 bp, Arabidopsis thaliana
actggaccgaagtccgt

SEQ ID NO: 25906 - DNA, 17 bp, Arabidopsis thaliana
actggaccgctgacaga

SEQ ID NO: 25907 - DNA, 17 bp, Arabidopsis thaliana
actggaccgggtaggcg

SEQ ID NO: 25908 - DNA, 17 bp, Arabidopsis thaliana
actggaccgggtgggcg

SEQ ID NO: 25909 - DNA, 17 bp, Arabidopsis thaliana
actggacgggttggcgg

SEQ ID NO: 25910 - DNA, 17 bp, Arabidopsis thaliana
actggacgtccatttac

SEQ ID NO: 25911 - DNA, 17 bp, Arabidopsis thaliana
actggactgcttggaca

SEQ ID NO: 25912 - DNA, 17 bp, Arabidopsis thaliana
actggactgcttggcca

SEQ ID NO: 25913 - DNA, 17 bp, Arabidopsis thaliana
actggagaccggcaaat

SEQ ID NO: 25914 - DNA, 17 bp, Arabidopsis thaliana
actggagagtccgtatt

SEQ ID NO: 25915 - DNA, 17 bp, Arabidopsis thaliana
actggagccaacatcac

SEQ ID NO: 25916 - DNA, 17 bp, Arabidopsis thaliana
actggagtttcaagcga

SEQ ID NO: 25917 - DNA, 17 bp, Arabidopsis thaliana
actggagtttccctgcc

SEQ ID NO: 25918 - DNA, 17 bp, Arabidopsis thaliana
actggatattgatgtga

SEQ ID NO: 25919 - DNA, 17 bp, Arabidopsis thaliana
actggatcaaccaggtt

SEQ ID NO: 25920 - DNA, 17 bp, Arabidopsis thaliana
actggatcagacccgaa

SEQ ID NO: 25921 - DNA, 17 bp, Arabidopsis thaliana
actggatcagattgcac

SEQ ID NO: 25922 - DNA, 17 bp, Arabidopsis thaliana
actggatcagcggatag

SEQ ID NO: 25923 - DNA, 17 bp, Arabidopsis thaliana
actggatcaggtggact

SEQ ID NO: 25924 - DNA, 17 bp, Arabidopsis thaliana
actggatccaacgtggc

SEQ ID NO: 25925 - DNA, 17 bp, Arabidopsis thaliana
actggatgagttgtgcg

SEQ ID NO: 25926 - DNA, 17 bp, Arabidopsis thaliana
actggattatttccatc

SEQ ID NO: 25927 - DNA, 17 bp, Arabidopsis thaliana
actggattgctgacgga

SEQ ID NO: 25928 - DNA, 17 bp, Arabidopsis thaliana
actggattgttctactg

SEQ ID NO: 25929 - DNA, 17 bp, Arabidopsis thaliana
actggatttgaccctaa

SEQ ID NO: 25930 - DNA, 17 bp, Arabidopsis thaliana
actggatttgtgacaag

SEQ ID NO: 25931 - DNA, 17 bp, Arabidopsis thaliana
actggatttgtgacaat

SEQ ID NO: 25932 - DNA, 17 bp, Arabidopsis thaliana
actggatttgtggtata

SEQ ID NO: 25933 - DNA, 17 bp, Arabidopsis thaliana
actggattttctgcagg

SEQ ID NO: 25934 - DNA, 17 bp, Arabidopsis thaliana
actggcacgattaccga

SEQ ID NO: 25935 - DNA, 17 bp, Arabidopsis thaliana
actggcacgtctgcctg

SEQ ID NO: 25936 - DNA, 17 bp, Arabidopsis thaliana
actggcactgcggttat

SEQ ID NO: 25937 - DNA, 17 bp, Arabidopsis thaliana
actggcactggccgtag

SEQ ID NO: 25938 - DNA, 17 bp, Arabidopsis thaliana
actggcagaaacgattc

SEQ ID NO: 25939 - DNA, 17 bp, Arabidopsis thaliana
actggcattttcgtgat

SEQ ID NO: 25940 - DNA, 17 bp, Arabidopsis thaliana
actggcgacctctaagc

SEQ ID NO: 25941 - DNA, 17 bp, Arabidopsis thaliana
actggcgactgcgtttt

SEQ ID NO: 25942 - DNA, 17 bp, Arabidopsis thaliana
actggcggatgggatgt

SEQ ID NO: 25943 - DNA, 17 bp, Arabidopsis thaliana
actggcggccttgatct

SEQ ID NO: 25944 - DNA, 17 bp, Arabidopsis thaliana
actggcgtagacgttgt

SEQ ID NO: 25945 - DNA, 17 bp, Arabidopsis thaliana
actggcgtctaaggcag

SEQ ID NO: 25946 - DNA, 17 bp, Arabidopsis thaliana
actggcgtgtccggacc

SEQ ID NO: 25947 - DNA, 17 bp, Arabidopsis thaliana
actggctaagttgtcca

SEQ ID NO: 25948 - DNA, 17 bp, Arabidopsis thaliana
actggctaagttgtccc

SEQ ID NO: 25949 - DNA, 17 bp, Arabidopsis thaliana
actggctccgccccttc

SEQ ID NO: 25950 - DNA, 17 bp, Arabidopsis thaliana
actggctcggactccca

SEQ ID NO: 25951 - DNA, 17 bp, Arabidopsis thaliana
actggctgacttggtgc

SEQ ID NO: 25952 - DNA, 17 bp, Arabidopsis thaliana
actggctgcgtttggtc

SEQ ID NO: 25953 - DNA, 17 bp, Arabidopsis thaliana
actggctgtagtttcgg

SEQ ID NO: 25954 - DNA, 17 bp, Arabidopsis thaliana
actggcttcattgttga

SEQ ID NO: 25955 - DNA, 17 bp, Arabidopsis thaliana
actggcttctactgttg

SEQ ID NO: 25956 - DNA, 17 bp, Arabidopsis thaliana
actggcttgtggcagcc

SEQ ID NO: 25957 - DNA, 17 bp, Arabidopsis thaliana
actggcttgtggtagcc

SEQ ID NO: 25958 - DNA, 17 bp, Arabidopsis thaliana
actggctttgatgattg

SEQ ID NO: 25959 - DNA, 17 bp, Arabidopsis thaliana
actgggaacggctctct

SEQ ID NO: 25960 - DNA, 17 bp, Arabidopsis thaliana
actgggaagaagacacg

SEQ ID NO: 25961 - DNA, 17 bp, Arabidopsis thaliana
actgggaatgtgatgat

SEQ ID NO: 25962 - DNA, 17 bp, Arabidopsis thaliana
actgggactgagacacg

SEQ ID NO: 25963 - DNA, 17 bp, Arabidopsis thaliana
actgggactgagacact

SEQ ID NO: 25964 - DNA, 17 bp, Arabidopsis thaliana
actgggactggttctta

SEQ ID NO: 25965 - DNA, 17 bp, Arabidopsis thaliana
actgggacttgctggcg

SEQ ID NO: 25966 - DNA, 17 bp, Arabidopsis thaliana
actgggagagtgtctat

SEQ ID NO: 25967 - DNA, 17 bp, Arabidopsis thaliana
actgggagctaaagacc

SEQ ID NO: 25968 - DNA, 17 bp, Arabidopsis thaliana
actgggaggtgcggctg

SEQ ID NO: 25969 - DNA, 17 bp, Arabidopsis thaliana
actgggagtcccaccat

SEQ ID NO: 25970 - DNA, 17 bp, Arabidopsis thaliana
actgggagtgtaggttg

SEQ ID NO: 25971 - DNA, 17 bp, Arabidopsis thaliana
actgggcaagcccatgg

SEQ ID NO: 25972 - DNA, 17 bp, Arabidopsis thaliana
actgggccaaccacgtt

SEQ ID NO: 25973 - DNA, 17 bp, Arabidopsis thaliana
actgggccgaagcccgc

SEQ ID NO: 25974 - DNA, 17 bp, Arabidopsis thaliana
actgggcctcatattgg

SEQ ID NO: 25975 - DNA, 17 bp, Arabidopsis thaliana
actgggcgcggctctgc

SEQ ID NO: 25976 - DNA, 17 bp, Arabidopsis thaliana
actgggctggaactcct

SEQ ID NO: 25977 - DNA, 17 bp, Arabidopsis thaliana
actggggacaggaacgt

SEQ ID NO: 25978 - DNA, 17 bp, Arabidopsis thaliana
actggggacagtaacgt

SEQ ID NO: 25979 - DNA, 17 bp, Arabidopsis thaliana
actgggtacctaaaatc

SEQ ID NO: 25980 - DNA, 17 bp, Arabidopsis thaliana
actgggtcatcgggtca

SEQ ID NO: 25981 - DNA, 17 bp, Arabidopsis thaliana
actgggtgcttcacgcc

SEQ ID NO: 25982 - DNA, 17 bp, Arabidopsis thaliana
actgggttcgtctcccg

SEQ ID NO: 25983 - DNA, 17 bp, Arabidopsis thaliana
actgggttcgtgcccca

SEQ ID NO: 25984 - DNA, 17 bp, Arabidopsis thaliana
actgggttctgaagcag

SEQ ID NO: 25985 - DNA, 17 bp, Arabidopsis thaliana
actgggtttggttctct

SEQ ID NO: 25986 - DNA, 17 bp, Arabidopsis thaliana
actggtaaaccagcggg

SEQ ID NO: 25987 - DNA, 17 bp, Arabidopsis thaliana
actggtaaagacgatcg

SEQ ID NO: 25988 - DNA, 17 bp, Arabidopsis thaliana
actggtaaagaggatcg

SEQ ID NO: 25989 - DNA, 17 bp, Arabidopsis thaliana
actggtacggaagaggt

SEQ ID NO: 25990 - DNA, 17 bp, Arabidopsis thaliana
actggtacggacaaggg

SEQ ID NO: 25991 - DNA, 17 bp, Arabidopsis thaliana
actggtaggtgcggctg

SEQ ID NO: 25992 - DNA, 17 bp, Arabidopsis thaliana
actggtccgaaagtgcg

SEQ ID NO: 25993 - DNA, 17 bp, Arabidopsis thaliana
actggtcgatggttgct

SEQ ID NO: 25994 - DNA, 17 bp, Arabidopsis thaliana
actggtcggttattgtg

SEQ ID NO: 25995 - DNA, 17 bp, Arabidopsis thaliana
actggtgaacatcaacc

SEQ ID NO: 25996 - DNA, 17 bp, Arabidopsis thaliana
actggtgacctgcacca

SEQ ID NO: 25997 - DNA, 17 bp, Arabidopsis thaliana
actggtgactccagctt

SEQ ID NO: 25998 - DNA, 17 bp, Arabidopsis thaliana
actggtgactcctgctt

SEQ ID NO: 25999 - DNA, 17 bp, Arabidopsis thaliana
actggtgctcttcgtct

SEQ ID NO: 26000 - DNA, 17 bp, Arabidopsis thaliana
actggtggagacgcctg

SEQ ID NO: 26001 - DNA, 17 bp, Arabidopsis thaliana
actggtggagacggctg

SEQ ID NO: 26002 - DNA, 17 bp, Arabidopsis thaliana
actggtggtctaaggcg

SEQ ID NO: 26003 - DNA, 17 bp, Arabidopsis thaliana
actggtggtctgaggcg

SEQ ID NO: 26004 - DNA, 17 bp, Arabidopsis thaliana
actggtggtctgagggg

SEQ ID NO: 26005 - DNA, 17 bp, Arabidopsis thaliana
actggtggttggtatgc

SEQ ID NO: 26006 - DNA, 17 bp, Arabidopsis thaliana
actggtgtgatgatgtg

SEQ ID NO: 26007 - DNA, 17 bp, Arabidopsis thaliana
actggtgttgattgtaa

SEQ ID NO: 26008 - DNA, 17 bp, Arabidopsis thaliana
actggtgttgcatcttt

SEQ ID NO: 26009 - DNA, 17 bp, Arabidopsis thaliana
actggttaaagtctcgt

SEQ ID NO: 26010 - DNA, 17 bp, Arabidopsis thaliana
actggttaaccagcagg

SEQ ID NO: 26011 - DNA, 17 bp, Arabidopsis thaliana
actggttagtccgggtt

SEQ ID NO: 26012 - DNA, 17 bp, Arabidopsis thaliana
actggttatgatctgct

SEQ ID NO: 26013 - DNA, 17 bp, Arabidopsis thaliana
actggttcaattggagg

SEQ ID NO: 26014 - DNA, 17 bp, Arabidopsis thaliana
actggttcactggaccg

SEQ ID NO: 26015 - DNA, 17 bp, Arabidopsis thaliana
actggttcggactccca

SEQ ID NO: 26016 - DNA, 17 bp, Arabidopsis thaliana
actggttcgtttccggc

SEQ ID NO: 26017 - DNA, 17 bp, Arabidopsis thaliana
actggttctgattggtc

SEQ ID NO: 26018 - DNA, 17 bp, Arabidopsis thaliana
actggttgacgatctcc

SEQ ID NO: 26019 - DNA, 17 bp, Arabidopsis thaliana
actggttggttggttgg

SEQ ID NO: 26020 - DNA, 17 bp, Arabidopsis thaliana
actggttgtagcaagga

SEQ ID NO: 26021 - DNA, 17 bp, Arabidopsis thaliana
actggttgttgcgctca

SEQ ID NO: 26022 - DNA, 17 bp, Arabidopsis thaliana
actggtttaagcggggt

SEQ ID NO: 26023 - DNA, 17 bp, Arabidopsis thaliana
actggtttacagggcca

SEQ ID NO: 26024 - DNA, 17 bp, Arabidopsis thaliana
actggtttcagcgatta

SEQ ID NO: 26025 - DNA, 17 bp, Arabidopsis thaliana
actggtttttccgctac

SEQ ID NO: 26026 - DNA, 17 bp, Arabidopsis thaliana
actgtaactcccacatt

SEQ ID NO: 26027 - DNA, 17 bp, Arabidopsis thaliana
actgtaactgatcggtg

SEQ ID NO: 26028 - DNA, 17 bp, Arabidopsis thaliana
actgtaactgattggtg

SEQ ID NO: 26029 - DNA, 17 bp, Arabidopsis thaliana
actgtaataacgctttc

SEQ ID NO: 26030 - DNA, 17 bp, Arabidopsis thaliana
actgtaatgccattcgg

SEQ ID NO: 26031 - DNA, 17 bp, Arabidopsis thaliana
actgtaattcggccatt

SEQ ID NO: 26032 - DNA, 17 bp, Arabidopsis thaliana
actgtacaagcttcctg

SEQ ID NO: 26033 - DNA, 17 bp, Arabidopsis thaliana
actgtacaccgctatct

SEQ ID NO: 26034 - DNA, 17 bp, Arabidopsis thaliana
actgtacagatgacgct

SEQ ID NO: 26035 - DNA, 17 bp, Arabidopsis thaliana
actgtaccacgattgcg

SEQ ID NO: 26036 - DNA, 17 bp, Arabidopsis thaliana
actgtactcgaccaaca

SEQ ID NO: 26037 - DNA, 17 bp, Arabidopsis thaliana
actgtactgtgactcaa

SEQ ID NO: 26038 - DNA, 17 bp, Arabidopsis thaliana
actgtagacggcgggtg

SEQ ID NO: 26039 - DNA, 17 bp, Arabidopsis thaliana
actgtatagagtccgtc

SEQ ID NO: 26040 - DNA, 17 bp, Arabidopsis thaliana
actgtatcccgaatcaa

SEQ ID NO: 26041 - DNA, 17 bp, Arabidopsis thaliana
actgtatccgcagttga

SEQ ID NO: 26042 - DNA, 17 bp, Arabidopsis thaliana
actgtattgcgggtgac

SEQ ID NO: 26043 - DNA, 17 bp, Arabidopsis thaliana
actgtcaactggacagg

SEQ ID NO: 26044 - DNA, 17 bp, Arabidopsis thaliana
actgtcaagtggcaggc

SEQ ID NO: 26045 - DNA, 17 bp, Arabidopsis thaliana
actgtcaagttgaggcc

SEQ ID NO: 26046 - DNA, 17 bp, Arabidopsis thaliana
actgtcacactacgggt

SEQ ID NO: 26047 - DNA, 17 bp, Arabidopsis thaliana
actgtcacgggagatca

SEQ ID NO: 26048 - DNA, 17 bp, Arabidopsis thaliana
actgtcagacgggatca

SEQ ID NO: 26049 - DNA, 17 bp, Arabidopsis thaliana
actgtcatgaaaatagt

SEQ ID NO: 26050 - DNA, 17 bp, Arabidopsis thaliana
actgtccatccgctgtc

SEQ ID NO: 26051 - DNA, 17 bp, Arabidopsis thaliana
actgtccatcgtgatct

SEQ ID NO: 26052 - DNA, 17 bp, Arabidopsis thaliana
actgtccctgtctacta

SEQ ID NO: 26053 - DNA, 17 bp, Arabidopsis thaliana
actgtccgatttctttc

SEQ ID NO: 26054 - DNA, 17 bp, Arabidopsis thaliana
actgtccgatttgatct

SEQ ID NO: 26055 - DNA, 17 bp, Arabidopsis thaliana
actgtccgccagacatc

SEQ ID NO: 26056 - DNA, 17 bp, Arabidopsis thaliana
actgtccgcttagcgcc

SEQ ID NO: 26057 - DNA, 17 bp, Arabidopsis thaliana
actgtccggcttatcgt

SEQ ID NO: 26058 - DNA, 17 bp, Arabidopsis thaliana
actgtccgtctgtctgt

SEQ ID NO: 26059 - DNA, 17 bp, Arabidopsis thaliana
actgtccgtgaatgcgc

SEQ ID NO: 26060 - DNA, 17 bp, Arabidopsis thaliana
actgtcctggtgagata

SEQ ID NO: 26061 - DNA, 17 bp, Arabidopsis thaliana
actgtcgaaagatgttt

SEQ ID NO: 26062 - DNA, 17 bp, Arabidopsis thaliana
actgtcgaaggatcgtc

SEQ ID NO: 26063 - DNA, 17 bp, Arabidopsis thaliana
actgtcgagtaaggatt

SEQ ID NO: 26064 - DNA, 17 bp, Arabidopsis thaliana
actgtcgattcaaaccg

SEQ ID NO: 26065 - DNA, 17 bp, Arabidopsis thaliana
actgtcgcacccgctgg

SEQ ID NO: 26066 - DNA, 17 bp, Arabidopsis thaliana
actgtcgctacttttga

SEQ ID NO: 26067 - DNA, 17 bp, Arabidopsis thaliana
actgtcgctggtcgctg

SEQ ID NO: 26068 - DNA, 17 bp, Arabidopsis thaliana
actgtcgctgtgttgtt

SEQ ID NO: 26069 - DNA, 17 bp, Arabidopsis thaliana
actgtcgctttcttcct

SEQ ID NO: 26070 - DNA, 17 bp, Arabidopsis thaliana
actgtcggaggaggcgc

SEQ ID NO: 26071 - DNA, 17 bp, Arabidopsis thaliana
actgtcggatttgtgtg

SEQ ID NO: 26072 - DNA, 17 bp, Arabidopsis thaliana
actgtcggctgtactac

SEQ ID NO: 26073 - DNA, 17 bp, Arabidopsis thaliana
actgtcggggctatttt

SEQ ID NO: 26074 - DNA, 17 bp, Arabidopsis thaliana
actgtcgggtttgtgca

SEQ ID NO: 26075 - DNA, 17 bp, Arabidopsis thaliana
actgtcggtcatcgggt

SEQ ID NO: 26076 - DNA, 17 bp, Arabidopsis thaliana
actgtcgtctgtactac

SEQ ID NO: 26077 - DNA, 17 bp, Arabidopsis thaliana
actgtctaggcgattgt

SEQ ID NO: 26078 - DNA, 17 bp, Arabidopsis thaliana
actgtctcacgcgtgcg

SEQ ID NO: 26079 - DNA, 17 bp, Arabidopsis thaliana
actgtctctcagctgct

SEQ ID NO: 26080 - DNA, 17 bp, Arabidopsis thaliana
actgtctgcatagtaga

SEQ ID NO: 26081 - DNA, 17 bp, Arabidopsis thaliana
actgtctgcctgggtgt

SEQ ID NO: 26082 - DNA, 17 bp, Arabidopsis thaliana
actgtctgcgtataact

SEQ ID NO: 26083 - DNA, 17 bp, Arabidopsis thaliana
actgtctggaccaccgc

SEQ ID NO: 26084 - DNA, 17 bp, Arabidopsis thaliana
actgtctggaccgatgg

SEQ ID NO: 26085 - DNA, 17 bp, Arabidopsis thaliana
actgtctgggtaccgcg

SEQ ID NO: 26086 - DNA, 17 bp, Arabidopsis thaliana
actgtctgggttgaata

SEQ ID NO: 26087 - DNA, 17 bp, Arabidopsis thaliana
actgtcttaagactctt

SEQ ID NO: 26088 - DNA, 17 bp, Arabidopsis thaliana
actgtcttaccgacccc

SEQ ID NO: 26089 - DNA, 17 bp, Arabidopsis thaliana
actgtcttagactttgc

SEQ ID NO: 26090 - DNA, 17 bp, Arabidopsis thaliana
actgtcttatgcacggg

SEQ ID NO: 26091 - DNA, 17 bp, Arabidopsis thaliana
actgtcttctgcagaca

SEQ ID NO: 26092 - DNA, 17 bp, Arabidopsis thaliana
actgtcttcttcagctt

SEQ ID NO: 26093 - DNA, 17 bp, Arabidopsis thaliana
actgtcttggtgggatc

SEQ ID NO: 26094 - DNA, 17 bp, Arabidopsis thaliana
actgtcttgtctactat

SEQ ID NO: 26095 - DNA, 17 bp, Arabidopsis thaliana
actgtctttagactgtc

SEQ ID NO: 26096 - DNA, 17 bp, Arabidopsis thaliana
actgtctttcatacccg

SEQ ID NO: 26097 - DNA, 17 bp, Arabidopsis thaliana
actgtctttgacttacc

SEQ ID NO: 26098 - DNA, 17 bp, Arabidopsis thaliana
actgtgaaactgcgaat

SEQ ID NO: 26099 - DNA, 17 bp, Arabidopsis thaliana
actgtgaaactgcgtat

SEQ ID NO: 26100 - DNA, 17 bp, Arabidopsis thaliana
actgtgaacagtgtgct

SEQ ID NO: 26101 - DNA, 17 bp, Arabidopsis thaliana
actgtgaaccgttatcc

SEQ ID NO: 26102 - DNA, 17 bp, Arabidopsis thaliana
actgtgaacgacaaggc

SEQ ID NO: 26103 - DNA, 17 bp, Arabidopsis thaliana
actgtgaaggaaactgc

SEQ ID NO: 26104 - DNA, 17 bp, Arabidopsis thaliana
actgtgaaggatggccc

SEQ ID NO: 26105 - DNA, 17 bp, Arabidopsis thaliana
actgtgaattattgcgc

SEQ ID NO: 26106 - DNA, 17 bp, Arabidopsis thaliana
actgtgaattgccaaga

SEQ ID NO: 26107 - DNA, 17 bp, Arabidopsis thaliana
actgtgacctttctggc

SEQ ID NO: 26108 - DNA, 17 bp, Arabidopsis thaliana
actgtgactaaatccag

SEQ ID NO: 26109 - DNA, 17 bp, Arabidopsis thaliana
actgtgactcaaggtta

SEQ ID NO: 26110 - DNA, 17 bp, Arabidopsis thaliana
actgtgactcgggctga

SEQ ID NO: 26111 - DNA, 17 bp, Arabidopsis thaliana
actgtgagagtgtctat

SEQ ID NO: 26112 - DNA, 17 bp, Arabidopsis thaliana
actgtgaggtctgaacc

SEQ ID NO: 26113 - DNA, 17 bp, Arabidopsis thaliana
actgtgatacggttcgg

SEQ ID NO: 26114 - DNA, 17 bp, Arabidopsis thaliana
actgtgatctatcagtt

SEQ ID NO: 26115 - DNA, 17 bp, Arabidopsis thaliana
actgtgatctctggggt

SEQ ID NO: 26116 - DNA, 17 bp, Arabidopsis thaliana
actgtgatttgtggggg

SEQ ID NO: 26117 - DNA, 17 bp, Arabidopsis thaliana
actgtgcacatattgca

SEQ ID NO: 26118 - DNA, 17 bp, Arabidopsis thaliana
actgtgcagtcgaggat

SEQ ID NO: 26119 - DNA, 17 bp, Arabidopsis thaliana
actgtgcagtctagtat

SEQ ID NO: 26120 - DNA, 17 bp, Arabidopsis thaliana
actgtgcatgattggtt

SEQ ID NO: 26121 - DNA, 17 bp, Arabidopsis thaliana
actgtgcattggtcaac

SEQ ID NO: 26122 - DNA, 17 bp, Arabidopsis thaliana
actgtgcattggtcggc

SEQ ID NO: 26123 - DNA, 17 bp, Arabidopsis thaliana
actgtgcgaatatgatt

SEQ ID NO: 26124 - DNA, 17 bp, Arabidopsis thaliana
actgtgcgattcggtca

SEQ ID NO: 26125 - DNA, 17 bp, Arabidopsis thaliana
actgtgcgattgattga

SEQ ID NO: 26126 - DNA, 17 bp, Arabidopsis thaliana
actgtgcgcaatttacc

SEQ ID NO: 26127 - DNA, 17 bp, Arabidopsis thaliana
actgtgcggttcgatta

SEQ ID NO: 26128 - DNA, 17 bp, Arabidopsis thaliana
actgtgcggttcggtta

SEQ ID NO: 26129 - DNA, 17 bp, Arabidopsis thaliana
actgtggaagccccctt

SEQ ID NO: 26130 - DNA, 17 bp, Arabidopsis thaliana
actgtggacagtgtgct

SEQ ID NO: 26131 - DNA, 17 bp, Arabidopsis thaliana
actgtggaccagggctc

SEQ ID NO: 26132 - DNA, 17 bp, Arabidopsis thaliana
actgtggacgattagcg

SEQ ID NO: 26133 - DNA, 17 bp, Arabidopsis thaliana
actgtggattcgccaat

SEQ ID NO: 26134 - DNA, 17 bp, Arabidopsis thaliana
actgtggattctattgg

SEQ ID NO: 26135 - DNA, 17 bp, Arabidopsis thaliana
actgtggccaatagttt

SEQ ID NO: 26136 - DNA, 17 bp, Arabidopsis thaliana
actgtggctctgtctct

SEQ ID NO: 26137 - DNA, 17 bp, Arabidopsis thaliana
actgtggctgacagcag

SEQ ID NO: 26138 - DNA, 17 bp, Arabidopsis thaliana
actgtgggatacgggtt

SEQ ID NO: 26139 - DNA, 17 bp, Arabidopsis thaliana
actgtgggcgaatctca

SEQ ID NO: 26140 - DNA, 17 bp, Arabidopsis thaliana
actgtgggctggccttt

SEQ ID NO: 26141 - DNA, 17 bp, Arabidopsis thaliana
actgtggggaattcgac

SEQ ID NO: 26142 - DNA, 17 bp, Arabidopsis thaliana
actgtgggtggatctag

SEQ ID NO: 26143 - DNA, 17 bp, Arabidopsis thaliana
actgtggtgatccttgc

SEQ ID NO: 26144 - DNA, 17 bp, Arabidopsis thaliana
actgtggtttcgggcct

SEQ ID NO: 26145 - DNA, 17 bp, Arabidopsis thaliana
actgtgtaaatgacgat

SEQ ID NO: 26146 - DNA, 17 bp, Arabidopsis thaliana
actgtgtaagcggccac

SEQ ID NO: 26147 - DNA, 17 bp, Arabidopsis thaliana
actgtgtctcagatggt

SEQ ID NO: 26148 - DNA, 17 bp, Arabidopsis thaliana
actgtgtctgcaggaca

SEQ ID NO: 26149 - DNA, 17 bp, Arabidopsis thaliana
actgtgtgacaccgcgc

SEQ ID NO: 26150 - DNA, 17 bp, Arabidopsis thaliana
actgtgtgcgtgacata

SEQ ID NO: 26151 - DNA, 17 bp, Arabidopsis thaliana
actgtgtggaagctctt

SEQ ID NO: 26152 - DNA, 17 bp, Arabidopsis thaliana
actgtgtggtcaggaca

SEQ ID NO: 26153 - DNA, 17 bp, Arabidopsis thaliana
actgtgtgtttggctct

SEQ ID NO: 26154 - DNA, 17 bp, Arabidopsis thaliana
actgtgttctgttgtcg

SEQ ID NO: 26155 - DNA, 17 bp, Arabidopsis thaliana
actgtgttgccaaccaa

SEQ ID NO: 26156 - DNA, 17 bp, Arabidopsis thaliana
actgtgttgctaaccaa

SEQ ID NO: 26157 - DNA, 17 bp, Arabidopsis thaliana
actgttaaactgcgaat

SEQ ID NO: 26158 - DNA, 17 bp, Arabidopsis thaliana
actgttaaatcgcggtt

SEQ ID NO: 26159 - DNA, 17 bp, Arabidopsis thaliana
actgttacaacactatt

SEQ ID NO: 26160 - DNA, 17 bp, Arabidopsis thaliana
actgttacaacactgtt

SEQ ID NO: 26161 - DNA, 17 bp, Arabidopsis thaliana
actgttacagcacagtt

SEQ ID NO: 26162 - DNA, 17 bp, Arabidopsis thaliana
actgttacagcactgtt

SEQ ID NO: 26163 - DNA, 17 bp, Arabidopsis thaliana
actgttacagcattgtt

SEQ ID NO: 26164 - DNA, 17 bp, Arabidopsis thaliana
actgttacagtactgtt

SEQ ID NO: 26165 - DNA, 17 bp, Arabidopsis thaliana
actgttacccaaagatc

SEQ ID NO: 26166 - DNA, 17 bp, Arabidopsis thaliana
actgttacctgttgcag

SEQ ID NO: 26167 - DNA, 17 bp, Arabidopsis thaliana
actgttacgattcggtt

SEQ ID NO: 26168 - DNA, 17 bp, Arabidopsis thaliana
actgttactacactgtt

SEQ ID NO: 26169 - DNA, 17 bp, Arabidopsis thaliana
actgttagctggagcag

SEQ ID NO: 26170 - DNA, 17 bp, Arabidopsis thaliana
actgttaggattatgcc

SEQ ID NO: 26171 - DNA, 17 bp, Arabidopsis thaliana
actgttataggattccc

SEQ ID NO: 26172 - DNA, 17 bp, Arabidopsis thaliana
actgttatccaggatca

SEQ ID NO: 26173 - DNA, 17 bp, Arabidopsis thaliana
actgttcaagccggatt

SEQ ID NO: 26174 - DNA, 17 bp, Arabidopsis thaliana
actgttcagacctggtg

SEQ ID NO: 26175 - DNA, 17 bp, Arabidopsis thaliana
actgttcagatctggtg

SEQ ID NO: 26176 - DNA, 17 bp, Arabidopsis thaliana
actgttcagtgtgacag

SEQ ID NO: 26177 - DNA, 17 bp, Arabidopsis thaliana
actgttcatcaactgcc

SEQ ID NO: 26178 - DNA, 17 bp, Arabidopsis thaliana
actgttcatgtgtaggt

SEQ ID NO: 26179 - DNA, 17 bp, Arabidopsis thaliana
actgttccagctgtgtc

SEQ ID NO: 26180 - DNA, 17 bp, Arabidopsis thaliana
actgttccattgacttt

SEQ ID NO: 26181 - DNA, 17 bp, Arabidopsis thaliana
actgttccctgggatcc

SEQ ID NO: 26182 - DNA, 17 bp, Arabidopsis thaliana
actgttccctgggatgg

SEQ ID NO: 26183 - DNA, 17 bp, Arabidopsis thaliana
actgttccctgggattg

SEQ ID NO: 26184 - DNA, 17 bp, Arabidopsis thaliana
actgttccgaacccgtc

SEQ ID NO: 26185 - DNA, 17 bp, Arabidopsis thaliana
actgttccggttcagtt

SEQ ID NO: 26186 - DNA, 17 bp, Arabidopsis thaliana
actgttcctacggcttt

SEQ ID NO: 26187 - DNA, 17 bp, Arabidopsis thaliana
actgttccttgggattg

SEQ ID NO: 26188 - DNA, 17 bp, Arabidopsis thaliana
actgttcgagtaccagg

SEQ ID NO: 26189 - DNA, 17 bp, Arabidopsis thaliana
actgttcgtgaatgcgt

SEQ ID NO: 26190 - DNA, 17 bp, Arabidopsis thaliana
actgttgacagagtctg

SEQ ID NO: 26191 - DNA, 17 bp, Arabidopsis thaliana
actgttgacctagtggt

SEQ ID NO: 26192 - DNA, 17 bp, Arabidopsis thaliana
actgttgaggtcattgt

SEQ ID NO: 26193 - DNA, 17 bp, Arabidopsis thaliana
actgttgatccttctga

SEQ ID NO: 26194 - DNA, 17 bp, Arabidopsis thaliana
actgttgcacaacctgc

SEQ ID NO: 26195 - DNA, 17 bp, Arabidopsis thaliana
actgttgcagcactgtt

SEQ ID NO: 26196 - DNA, 17 bp, Arabidopsis thaliana
actgttgcagtacggtt

SEQ ID NO: 26197 - DNA, 17 bp, Arabidopsis thaliana
actgttgcagtgcggtt

SEQ ID NO: 26198 - DNA, 17 bp, Arabidopsis thaliana
actgttgcgaccaccac

SEQ ID NO: 26199 - DNA, 17 bp, Arabidopsis thaliana
actgttgcgatacggtt

SEQ ID NO: 26200 - DNA, 17 bp, Arabidopsis thaliana
actgttgcgccgatttt

SEQ ID NO: 26201 - DNA, 17 bp, Arabidopsis thaliana
actgttgcgctgcgatt

SEQ ID NO: 26202 - DNA, 17 bp, Arabidopsis thaliana
actgttgcggtgcagtt

SEQ ID NO: 26203 - DNA, 17 bp, Arabidopsis thaliana
actgttgcggtgcggtt

SEQ ID NO: 26204 - DNA, 17 bp, Arabidopsis thaliana
actgttgctgagattaa

SEQ ID NO: 26205 - DNA, 17 bp, Arabidopsis thaliana
actgttggagttacttg

SEQ ID NO: 26206 - DNA, 17 bp, Arabidopsis thaliana
actgttggcctagtggt

SEQ ID NO: 26207 - DNA, 17 bp, Arabidopsis thaliana
actgttggtttgctaca

SEQ ID NO: 26208 - DNA, 17 bp, Arabidopsis thaliana
actgttgtccgcgctgt

SEQ ID NO: 26209 - DNA, 17 bp, Arabidopsis thaliana
actgttgtgatacgatt

SEQ ID NO: 26210 - DNA, 17 bp, Arabidopsis thaliana
actgttgtgatacgttt

SEQ ID NO: 26211 - DNA, 17 bp, Arabidopsis thaliana
actgttgtgctatggct

SEQ ID NO: 26212 - DNA, 17 bp, Arabidopsis thaliana
actgttgtggtgcggtt

SEQ ID NO: 26213 - DNA, 17 bp, Arabidopsis thaliana
actgttgtgtcgaaccg

SEQ ID NO: 26214 - DNA, 17 bp, Arabidopsis thaliana
actgttgtttactgcat

SEQ ID NO: 26215 - DNA, 17 bp, Arabidopsis thaliana
actgtttacttcatttc

SEQ ID NO: 26216 - DNA, 17 bp, Arabidopsis thaliana
actgtttagtgctgact

SEQ ID NO: 26217 - DNA, 17 bp, Arabidopsis thaliana
actgtttatggatcgga

SEQ ID NO: 26218 - DNA, 17 bp, Arabidopsis thaliana
actgtttcaaatgggag

SEQ ID NO: 26219 - DNA, 17 bp, Arabidopsis thaliana
actgtttcaccggctta

SEQ ID NO: 26220 - DNA, 17 bp, Arabidopsis thaliana
actgtttcagacgcaag

SEQ ID NO: 26221 - DNA, 17 bp, Arabidopsis thaliana
actgtttcagtgcggtt

SEQ ID NO: 26222 - DNA, 17 bp, Arabidopsis thaliana
actgtttccgttccagc

SEQ ID NO: 26223 - DNA, 17 bp, Arabidopsis thaliana
actgtttccgttgcagc

SEQ ID NO: 26224 - DNA, 17 bp, Arabidopsis thaliana
actgtttcggaactgca

SEQ ID NO: 26225 - DNA, 17 bp, Arabidopsis thaliana
actgtttcggtgcgggc

SEQ ID NO: 26226 - DNA, 17 bp, Arabidopsis thaliana
actgtttctaagcaaat

SEQ ID NO: 26227 - DNA, 17 bp, Arabidopsis thaliana
actgtttgatgttcgaa

SEQ ID NO: 26228 - DNA, 17 bp, Arabidopsis thaliana
actgtttgattcgtaca

SEQ ID NO: 26229 - DNA, 17 bp, Arabidopsis thaliana
actgtttgcagagacct

SEQ ID NO: 26230 - DNA, 17 bp, Arabidopsis thaliana
actgtttggaccattgt

SEQ ID NO: 26231 - DNA, 17 bp, Arabidopsis thaliana
actgtttggagcggtaa

SEQ ID NO: 26232 - DNA, 17 bp, Arabidopsis thaliana
actgtttgtgagaccaa

SEQ ID NO: 26233 - DNA, 17 bp, Arabidopsis thaliana
actgtttgtgattccgg

SEQ ID NO: 26234 - DNA, 17 bp, Arabidopsis thaliana
actgtttgtgattccgt

SEQ ID NO: 26235 - DNA, 17 bp, Arabidopsis thaliana
actgtttgtgattctgt

SEQ ID NO: 26236 - DNA, 17 bp, Arabidopsis thaliana
actgtttgtgtttgtgt

SEQ ID NO: 26237 - DNA, 17 bp, Arabidopsis thaliana
actgttttgacgatcgc

SEQ ID NO: 26238 - DNA, 17 bp, Arabidopsis thaliana
actgttttgattgcgca

SEQ ID NO: 26239 - DNA, 17 bp, Arabidopsis thaliana
actgttttgcgtttctc

SEQ ID NO: 26240 - DNA, 17 bp, Arabidopsis thaliana
actgttttggccatcag

SEQ ID NO: 26241 - DNA, 17 bp, Arabidopsis thaliana
actgttttgggtctgcg

SEQ ID NO: 26242 - DNA, 17 bp, Arabidopsis thaliana
actgtttttcgttggac

SEQ ID NO: 26243 - DNA, 17 bp, Arabidopsis thaliana
actgtttttgactaagc

SEQ ID NO: 26244 - DNA, 17 bp, Arabidopsis thaliana
acttaaaccacaaccgg

SEQ ID NO: 26245 - DNA, 17 bp, Arabidopsis thaliana
acttaaaccgcaacaga

SEQ ID NO: 26246 - DNA, 17 bp, Arabidopsis thaliana
acttaaaccgcaacccg

SEQ ID NO: 26247 - DNA, 17 bp, Arabidopsis thaliana
acttaaaccgcaaccgg

SEQ ID NO: 26248 - DNA, 17 bp, Arabidopsis thaliana
acttaaaccgcaactcg

SEQ ID NO: 26249 - DNA, 17 bp, Arabidopsis thaliana
acttaaaccgcagccgg

SEQ ID NO: 26250 - DNA, 17 bp, Arabidopsis thaliana
acttaacgattaagcgg

SEQ ID NO: 26251 - DNA, 17 bp, Arabidopsis thaliana
acttaagctctatctgc

SEQ ID NO: 26252 - DNA, 17 bp, Arabidopsis thaliana
acttaagtcctttgtga

SEQ ID NO: 26253 - DNA, 17 bp, Arabidopsis thaliana
acttaagtctctgcttc

SEQ ID NO: 26254 - DNA, 17 bp, Arabidopsis thaliana
acttaatcattgagcgt

SEQ ID NO: 26255 - DNA, 17 bp, Arabidopsis thaliana
acttaatccacatcggt

SEQ ID NO: 26256 - DNA, 17 bp, Arabidopsis thaliana
acttaatccaccggtgg

SEQ ID NO: 26257 - DNA, 17 bp, Arabidopsis thaliana
acttaatgattcttctg

SEQ ID NO: 26258 - DNA, 17 bp, Arabidopsis thaliana
acttaattacgggttga

SEQ ID NO: 26259 - DNA, 17 bp, Arabidopsis thaliana
acttaattgtgccaatc

SEQ ID NO: 26260 - DNA, 17 bp, Arabidopsis thaliana
acttaatttgacttttt

SEQ ID NO: 26261 - DNA, 17 bp, Arabidopsis thaliana
acttaattttgtgattc

SEQ ID NO: 26262 - DNA, 17 bp, Arabidopsis thaliana
acttacaagatggaagg

SEQ ID NO: 26263 - DNA, 17 bp, Arabidopsis thaliana
acttacaccagttggct

SEQ ID NO: 26264 - DNA, 17 bp, Arabidopsis thaliana
acttacagaaggatgta

SEQ ID NO: 26265 - DNA, 17 bp, Arabidopsis thaliana
acttacagcttcttccc

SEQ ID NO: 26266 - DNA, 17 bp, Arabidopsis thaliana
acttaccaggtccagac

SEQ ID NO: 26267 - DNA, 17 bp, Arabidopsis thaliana
acttaccaggttagtgg

SEQ ID NO: 26268 - DNA, 17 bp, Arabidopsis thaliana
acttaccatcaatttgc

SEQ ID NO: 26269 - DNA, 17 bp, Arabidopsis thaliana
acttaccatctgcatgc

SEQ ID NO: 26270 - DNA, 17 bp, Arabidopsis thaliana
acttacctctcctccgc

SEQ ID NO: 26271 - DNA, 17 bp, Arabidopsis thaliana
acttacctctcgctgct

SEQ ID NO: 26272 - DNA, 17 bp, Arabidopsis thaliana
acttacctggcaggaga

SEQ ID NO: 26273 - DNA, 17 bp, Arabidopsis thaliana
acttacgacggcgaaga

SEQ ID NO: 26274 - DNA, 17 bp, Arabidopsis thaliana
acttacgagatgtgcca

SEQ ID NO: 26275 - DNA, 17 bp, Arabidopsis thaliana
acttacgcgactactca

SEQ ID NO: 26276 - DNA, 17 bp, Arabidopsis thaliana
acttacgctttgaagat

SEQ ID NO: 26277 - DNA, 17 bp, Arabidopsis thaliana
acttacggcagttatca

SEQ ID NO: 26278 - DNA, 17 bp, Arabidopsis thaliana
acttacggccatggatc

SEQ ID NO: 26279 - DNA, 17 bp, Arabidopsis thaliana
acttacggttgcaagac

SEQ ID NO: 26280 - DNA, 17 bp, Arabidopsis thaliana
acttacgtctcgttgct

SEQ ID NO: 26281 - DNA, 17 bp, Arabidopsis thaliana
acttactgacacgtggc

SEQ ID NO: 26282 - DNA, 17 bp, Arabidopsis thaliana
acttactggtgtgttga

SEQ ID NO: 26283 - DNA, 17 bp, Arabidopsis thaliana
acttacttctttcctgc

SEQ ID NO: 26284 - DNA, 17 bp, Arabidopsis thaliana
acttactttctggtctc

SEQ ID NO: 26285 - DNA, 17 bp, Arabidopsis thaliana
acttagaccagtggggt

SEQ ID NO: 26286 - DNA, 17 bp, Arabidopsis thaliana
acttagaccgcaaccgg

SEQ ID NO: 26287 - DNA, 17 bp, Arabidopsis thaliana
acttagaccgcttatat

SEQ ID NO: 26288 - DNA, 17 bp, Arabidopsis thaliana
acttagaccgtctccaa

SEQ ID NO: 26289 - DNA, 17 bp, Arabidopsis thaliana
acttagatggagcctct

SEQ ID NO: 26290 - DNA, 17 bp, Arabidopsis thaliana
acttagcaggtgcttga

SEQ ID NO: 26291 - DNA, 17 bp, Arabidopsis thaliana
acttagccaacgacacg

SEQ ID NO: 26292 - DNA, 17 bp, Arabidopsis thaliana
acttagcggggcgagtt

SEQ ID NO: 26293 - DNA, 17 bp, Arabidopsis thaliana
acttaggacatctccat

SEQ ID NO: 26294 - DNA, 17 bp, Arabidopsis thaliana
acttaggatcatcattg

SEQ ID NO: 26295 - DNA, 17 bp, Arabidopsis thaliana
acttaggccatctccat

SEQ ID NO: 26296 - DNA, 17 bp, Arabidopsis thaliana
acttaggccttgaatgt

SEQ ID NO: 26297 - DNA, 17 bp, Arabidopsis thaliana
acttaggctcacaagat

SEQ ID NO: 26298 - DNA, 17 bp, Arabidopsis thaliana
acttaggctccgagtgg

SEQ ID NO: 26299 - DNA, 17 bp, Arabidopsis thaliana
acttaggctctgaatgg

SEQ ID NO: 26300 - DNA, 17 bp, Arabidopsis thaliana
acttaggcttacaagac

SEQ ID NO: 26301 - DNA, 17 bp, Arabidopsis thaliana
acttaggcttacaagat

SEQ ID NO: 26302 - DNA, 17 bp, Arabidopsis thaliana
acttaggcttacaggat

SEQ ID NO: 26303 - DNA, 17 bp, Arabidopsis thaliana
acttaggcttggttttg

SEQ ID NO: 26304 - DNA, 17 bp, Arabidopsis thaliana
acttaggcttttatgat

SEQ ID NO: 26305 - DNA, 17 bp, Arabidopsis thaliana
acttagggcctgtttgt

SEQ ID NO: 26306 - DNA, 17 bp, Arabidopsis thaliana
acttagggtccgaatag

SEQ ID NO: 26307 - DNA, 17 bp, Arabidopsis thaliana
acttagggtccgaatgg

SEQ ID NO: 26308 - DNA, 17 bp, Arabidopsis thaliana
acttaggttctggatcc

SEQ ID NO: 26309 - DNA, 17 bp, Arabidopsis thaliana
acttagtcacatcctgt

SEQ ID NO: 26310 - DNA, 17 bp, Arabidopsis thaliana
acttagtcagcctgtag

SEQ ID NO: 26311 - DNA, 17 bp, Arabidopsis thaliana
acttagtcatccggtag

SEQ ID NO: 26312 - DNA, 17 bp, Arabidopsis thaliana
acttagtcatcttagca

SEQ ID NO: 26313 - DNA, 17 bp, Arabidopsis thaliana
acttagtcgcatcctgt

SEQ ID NO: 26314 - DNA, 17 bp, Arabidopsis thaliana
acttagtcgcatgtaga

SEQ ID NO: 26315 - DNA, 17 bp, Arabidopsis thaliana
acttagtcgccctgtag

SEQ ID NO: 26316 - DNA, 17 bp, Arabidopsis thaliana
acttagtcgctcctgta

SEQ ID NO: 26317 - DNA, 17 bp, Arabidopsis thaliana
acttagtcgctgtagat

SEQ ID NO: 26318 - DNA, 17 bp, Arabidopsis thaliana
acttagtctcatcctgt

SEQ ID NO: 26319 - DNA, 17 bp, Arabidopsis thaliana
acttagtgaggtgtatc

SEQ ID NO: 26320 - DNA, 17 bp, Arabidopsis thaliana
acttagtgattttagca

SEQ ID NO: 26321 - DNA, 17 bp, Arabidopsis thaliana
acttagtgtgcggtagc

SEQ ID NO: 26322 - DNA, 17 bp, Arabidopsis thaliana
acttagttatcgagaaa

SEQ ID NO: 26323 - DNA, 17 bp, Arabidopsis thaliana
acttagttccaatggtt

SEQ ID NO: 26324 - DNA, 17 bp, Arabidopsis thaliana
acttagttccggagtga

SEQ ID NO: 26325 - DNA, 17 bp, Arabidopsis thaliana
acttagttccggagtgg

SEQ ID NO: 26326 - DNA, 17 bp, Arabidopsis thaliana
acttagtttccctcgtt

SEQ ID NO: 26327 - DNA, 17 bp, Arabidopsis thaliana
acttagtttccgtctgg

SEQ ID NO: 26328 - DNA, 17 bp, Arabidopsis thaliana
acttagttttatgggtg

SEQ ID NO: 26329 - DNA, 17 bp, Arabidopsis thaliana
acttagtttttgcctaa

SEQ ID NO: 26330 - DNA, 17 bp, Arabidopsis thaliana
acttatcactctctttc

SEQ ID NO: 26331 - DNA, 17 bp, Arabidopsis thaliana
acttatcaggtacgaac

SEQ ID NO: 26332 - DNA, 17 bp, Arabidopsis thaliana
acttatcaggtgttgat

SEQ ID NO: 26333 - DNA, 17 bp, Arabidopsis thaliana
acttatcattgggtgag

SEQ ID NO: 26334 - DNA, 17 bp, Arabidopsis thaliana
acttatccccaggtgga

SEQ ID NO: 26335 - DNA, 17 bp, Arabidopsis thaliana
acttatccgcagatgga

SEQ ID NO: 26336 - DNA, 17 bp, Arabidopsis thaliana
acttatccttctggata

SEQ ID NO: 26337 - DNA, 17 bp, Arabidopsis thaliana
acttatccttgaatgcc

SEQ ID NO: 26338 - DNA, 17 bp, Arabidopsis thaliana
acttatcgatgtgcgtt

SEQ ID NO: 26339 - DNA, 17 bp, Arabidopsis thaliana
acttatcgggttcgccg

SEQ ID NO: 26340 - DNA, 17 bp, Arabidopsis thaliana
acttatcgtctcggtgc

SEQ ID NO: 26341 - DNA, 17 bp, Arabidopsis thaliana
acttatctcaaaccggc

SEQ ID NO: 26342 - DNA, 17 bp, Arabidopsis thaliana
acttatctgctgtcctt

SEQ ID NO: 26343 - DNA, 17 bp, Arabidopsis thaliana
acttatcttgtgacaca

SEQ ID NO: 26344 - DNA, 17 bp, Arabidopsis thaliana
acttatgcgcagagccg

SEQ ID NO: 26345 - DNA, 17 bp, Arabidopsis thaliana
acttatggccgaaggag

SEQ ID NO: 26346 - DNA, 17 bp, Arabidopsis thaliana
acttattaaatgccagt

SEQ ID NO: 26347 - DNA, 17 bp, Arabidopsis thaliana
acttattcacaatggct

SEQ ID NO: 26348 - DNA, 17 bp, Arabidopsis thaliana
acttattgaatccattg

SEQ ID NO: 26349 - DNA, 17 bp, Arabidopsis thaliana
acttattgacacgtggc

SEQ ID NO: 26350 - DNA, 17 bp, Arabidopsis thaliana
acttattgttgcgacgc

SEQ ID NO: 26351 - DNA, 17 bp, Arabidopsis thaliana
acttatttacaatgctt

SEQ ID NO: 26352 - DNA, 17 bp, Arabidopsis thaliana
acttatttacaatggct

SEQ ID NO: 26353 - DNA, 17 bp, Arabidopsis thaliana
acttatttacaatggga

SEQ ID NO: 26354 - DNA, 17 bp, Arabidopsis thaliana
acttatttacaatggtt

SEQ ID NO: 26355 - DNA, 17 bp, Arabidopsis thaliana
acttatttacagcggct

SEQ ID NO: 26356 - DNA, 17 bp, Arabidopsis thaliana
acttatttacagtggct

SEQ ID NO: 26357 - DNA, 17 bp, Arabidopsis thaliana
acttatttactgtggct

SEQ ID NO: 26358 - DNA, 17 bp, Arabidopsis thaliana
acttatttcggcattca

SEQ ID NO: 26359 - DNA, 17 bp, Arabidopsis thaliana
acttcaaactcgtctac

SEQ ID NO: 26360 - DNA, 17 bp, Arabidopsis thaliana
acttcaaatgtggtttg

SEQ ID NO: 26361 - DNA, 17 bp, Arabidopsis thaliana
acttcaacagggagatg

SEQ ID NO: 26362 - DNA, 17 bp, Arabidopsis thaliana
acttcaacaggttccca

SEQ ID NO: 26363 - DNA, 17 bp, Arabidopsis thaliana
acttcaacgagatctgt

SEQ ID NO: 26364 - DNA, 17 bp, Arabidopsis thaliana
acttcaacggcggcgca

SEQ ID NO: 26365 - DNA, 17 bp, Arabidopsis thaliana
acttcaactttggactc

SEQ ID NO: 26366 - DNA, 17 bp, Arabidopsis thaliana
acttcaagaactcactc

SEQ ID NO: 26367 - DNA, 17 bp, Arabidopsis thaliana
acttcaagctcaggtta

SEQ ID NO: 26368 - DNA, 17 bp, Arabidopsis thaliana
acttcaagcttttggac

SEQ ID NO: 26369 - DNA, 17 bp, Arabidopsis thaliana
acttcaagtctacccgc

SEQ ID NO: 26370 - DNA, 17 bp, Arabidopsis thaliana
acttcaatgcgcatatc

SEQ ID NO: 26371 - DNA, 17 bp, Arabidopsis thaliana
acttcaatggtcgatct

SEQ ID NO: 26372 - DNA, 17 bp, Arabidopsis thaliana
acttcaattcattcatg

SEQ ID NO: 26373 - DNA, 17 bp, Arabidopsis thaliana
acttcaattctactcag

SEQ ID NO: 26374 - DNA, 17 bp, Arabidopsis thaliana
acttcaatttcgggtgc

SEQ ID NO: 26375 - DNA, 17 bp, Arabidopsis thaliana
acttcacaaatgtcggt

SEQ ID NO: 26376 - DNA, 17 bp, Arabidopsis thaliana
acttcacatccacgggt

SEQ ID NO: 26377 - DNA, 17 bp, Arabidopsis thaliana
acttcacgtaggtgtca

SEQ ID NO: 26378 - DNA, 17 bp, Arabidopsis thaliana
acttcacgtctccattc

SEQ ID NO: 26379 - DNA, 17 bp, Arabidopsis thaliana
acttcagaatggacttc

SEQ ID NO: 26380 - DNA, 17 bp, Arabidopsis thaliana
acttcagacagcttctt

SEQ ID NO: 26381 - DNA, 17 bp, Arabidopsis thaliana
acttcagacggttctct

SEQ ID NO: 26382 - DNA, 17 bp, Arabidopsis thaliana
acttcagagtggacttc

SEQ ID NO: 26383 - DNA, 17 bp, Arabidopsis thaliana
acttcagagtggacttt

SEQ ID NO: 26384 - DNA, 17 bp, Arabidopsis thaliana
acttcagccattttcag

SEQ ID NO: 26385 - DNA, 17 bp, Arabidopsis thaliana
acttcagcccttgcgat

SEQ ID NO: 26386 - DNA, 17 bp, Arabidopsis thaliana
acttcagctattgccaa

SEQ ID NO: 26387 - DNA, 17 bp, Arabidopsis thaliana
acttcagggctggctgc

SEQ ID NO: 26388 - DNA, 17 bp, Arabidopsis thaliana
acttcaggggcaaattg

SEQ ID NO: 26389 - DNA, 17 bp, Arabidopsis thaliana
acttcaggttaaagtcc

SEQ ID NO: 26390 - DNA, 17 bp, Arabidopsis thaliana
acttcagtgcgtttcta

SEQ ID NO: 26391 - DNA, 17 bp, Arabidopsis thaliana
acttcagtttgcaatcc

SEQ ID NO: 26392 - DNA, 17 bp, Arabidopsis thaliana
acttcatatccgaaacg

SEQ ID NO: 26393 - DNA, 17 bp, Arabidopsis thaliana
acttcatatggatctga

SEQ ID NO: 26394 - DNA, 17 bp, Arabidopsis thaliana
acttcatccccggtgac

SEQ ID NO: 26395 - DNA, 17 bp, Arabidopsis thaliana
acttcatccgagggggg

SEQ ID NO: 26396 - DNA, 17 bp, Arabidopsis thaliana
acttcatccgcactttc

SEQ ID NO: 26397 - DNA, 17 bp, Arabidopsis thaliana
acttcatcgaccgggtc

SEQ ID NO: 26398 - DNA, 17 bp, Arabidopsis thaliana
acttcatctccatcttc

SEQ ID NO: 26399 - DNA, 17 bp, Arabidopsis thaliana
acttcatctccattttt

SEQ ID NO: 26400 - DNA, 17 bp, Arabidopsis thaliana
acttcatctgtcggctt

SEQ ID NO: 26401 - DNA, 17 bp, Arabidopsis thaliana
acttcatggaatcgaaa

SEQ ID NO: 26402 - DNA, 17 bp, Arabidopsis thaliana
acttcatggacctttgc

SEQ ID NO: 26403 - DNA, 17 bp, Arabidopsis thaliana
acttcatgtagctctga

SEQ ID NO: 26404 - DNA, 17 bp, Arabidopsis thaliana
acttcattgcgtttcta

SEQ ID NO: 26405 - DNA, 17 bp, Arabidopsis thaliana
acttcattgtgaccaca

SEQ ID NO: 26406 - DNA, 17 bp, Arabidopsis thaliana
acttcatttaccatcgc

SEQ ID NO: 26407 - DNA, 17 bp, Arabidopsis thaliana
acttcatttgccagtgt

SEQ ID NO: 26408 - DNA, 17 bp, Arabidopsis thaliana
acttcattttgcaactc

SEQ ID NO: 26409 - DNA, 17 bp, Arabidopsis thaliana
acttcattttttccgct

SEQ ID NO: 26410 - DNA, 17 bp, Arabidopsis thaliana
acttccaagagtttagg

SEQ ID NO: 26411 - DNA, 17 bp, Arabidopsis thaliana
acttccaagatcaaatg

SEQ ID NO: 26412 - DNA, 17 bp, Arabidopsis thaliana
acttccaataggaggtt

SEQ ID NO: 26413 - DNA, 17 bp, Arabidopsis thaliana
acttccaatggaaatgc

SEQ ID NO: 26414 - DNA, 17 bp, Arabidopsis thaliana
acttccaccgctacagg

SEQ ID NO: 26415 - DNA, 17 bp, Arabidopsis thaliana
acttccaccgtactcgc

SEQ ID NO: 26416 - DNA, 17 bp, Arabidopsis thaliana
acttccacttacagggc

SEQ ID NO: 26417 - DNA, 17 bp, Arabidopsis thaliana
acttccacttggccact

SEQ ID NO: 26418 - DNA, 17 bp, Arabidopsis thaliana
acttccagacctgggtt

SEQ ID NO: 26419 - DNA, 17 bp, Arabidopsis thaliana
acttccagagcaagcca

SEQ ID NO: 26420 - DNA, 17 bp, Arabidopsis thaliana
acttccatccttgggtt

SEQ ID NO: 26421 - DNA, 17 bp, Arabidopsis thaliana
acttccatcttgctttg

SEQ ID NO: 26422 - DNA, 17 bp, Arabidopsis thaliana
acttccatggggacaca

SEQ ID NO: 26423 - DNA, 17 bp, Arabidopsis thaliana
acttccattgcgtttga

SEQ ID NO: 26424 - DNA, 17 bp, Arabidopsis thaliana
acttccattttgtggag

SEQ ID NO: 26425 - DNA, 17 bp, Arabidopsis thaliana
acttcccaaaggcacgt

SEQ ID NO: 26426 - DNA, 17 bp, Arabidopsis thaliana
acttcccaatgaggctg

SEQ ID NO: 26427 - DNA, 17 bp, Arabidopsis thaliana
acttcccgaacagaagc

SEQ ID NO: 26428 - DNA, 17 bp, Arabidopsis thaliana
acttcccgggaggtcac

SEQ ID NO: 26429 - DNA, 17 bp, Arabidopsis thaliana
acttcccttggaattgc

SEQ ID NO: 26430 - DNA, 17 bp, Arabidopsis thaliana
acttccgaaaaggtatc

SEQ ID NO: 26431 - DNA, 17 bp, Arabidopsis thaliana
acttccgaagggcacac

SEQ ID NO: 26432 - DNA, 17 bp, Arabidopsis thaliana
acttccgaatggcacac

SEQ ID NO: 26433 - DNA, 17 bp, Arabidopsis thaliana
acttccgacttaggatc

SEQ ID NO: 26434 - DNA, 17 bp, Arabidopsis thaliana
acttccgagggggacac

SEQ ID NO: 26435 - DNA, 17 bp, Arabidopsis thaliana
acttccgatagacgatt

SEQ ID NO: 26436 - DNA, 17 bp, Arabidopsis thaliana
acttccgatgaatttta

SEQ ID NO: 26437 - DNA, 17 bp, Arabidopsis thaliana
acttccgatgtgagaca

SEQ ID NO: 26438 - DNA, 17 bp, Arabidopsis thaliana
acttccgatgtgcgacc

SEQ ID NO: 26439 - DNA, 17 bp, Arabidopsis thaliana
acttccgatgtgggaca

SEQ ID NO: 26440 - DNA, 17 bp, Arabidopsis thaliana
acttccgatgtgggact

SEQ ID NO: 26441 - DNA, 17 bp, Arabidopsis thaliana
acttccgatgtgggatc

SEQ ID NO: 26442 - DNA, 17 bp, Arabidopsis thaliana
acttccgattcttctgc

SEQ ID NO: 26443 - DNA, 17 bp, Arabidopsis thaliana
acttccgcacgtccagc

SEQ ID NO: 26444 - DNA, 17 bp, Arabidopsis thaliana
acttccgcgttgatggt

SEQ ID NO: 26445 - DNA, 17 bp, Arabidopsis thaliana
acttccggcgaccgcgg

SEQ ID NO: 26446 - DNA, 17 bp, Arabidopsis thaliana
acttccgggtagagtga

SEQ ID NO: 26447 - DNA, 17 bp, Arabidopsis thaliana
acttccgtctggcctga

SEQ ID NO: 26448 - DNA, 17 bp, Arabidopsis thaliana
acttccgtttggaaagc

SEQ ID NO: 26449 - DNA, 17 bp, Arabidopsis thaliana
acttcctcccaggtgag

SEQ ID NO: 26450 - DNA, 17 bp, Arabidopsis thaliana
acttccttgcgactctg

SEQ ID NO: 26451 - DNA, 17 bp, Arabidopsis thaliana
acttccttggttcaaca

SEQ ID NO: 26452 - DNA, 17 bp, Arabidopsis thaliana
acttccttgtggcctcc

SEQ ID NO: 26453 - DNA, 17 bp, Arabidopsis thaliana
acttcgacttgtccact

SEQ ID NO: 26454 - DNA, 17 bp, Arabidopsis thaliana
acttcgagaggttgcct

SEQ ID NO: 26455 - DNA, 17 bp, Arabidopsis thaliana
acttcgatttcggtatg

SEQ ID NO: 26456 - DNA, 17 bp, Arabidopsis thaliana
acttcgcagagaagatg

SEQ ID NO: 26457 - DNA, 17 bp, Arabidopsis thaliana
acttcgcgactggtgac

SEQ ID NO: 26458 - DNA, 17 bp, Arabidopsis thaliana
acttcgcgctagaggtt

SEQ ID NO: 26459 - DNA, 17 bp, Arabidopsis thaliana
acttcgctgccgtgatc

SEQ ID NO: 26460 - DNA, 17 bp, Arabidopsis thaliana
acttcgctgtcaactcc

SEQ ID NO: 26461 - DNA, 17 bp, Arabidopsis thaliana
acttcggatcgcggttt

SEQ ID NO: 26462 - DNA, 17 bp, Arabidopsis thaliana
acttcggatggagattc

SEQ ID NO: 26463 - DNA, 17 bp, Arabidopsis thaliana
acttcggattcggttgg

SEQ ID NO: 26464 - DNA, 17 bp, Arabidopsis thaliana
acttcggcaaggagtag

SEQ ID NO: 26465 - DNA, 17 bp, Arabidopsis thaliana
acttcggcaatggcgcc

SEQ ID NO: 26466 - DNA, 17 bp, Arabidopsis thaliana
acttcggcccagaacct

SEQ ID NO: 26467 - DNA, 17 bp, Arabidopsis thaliana
acttcgggaaaaggatt

SEQ ID NO: 26468 - DNA, 17 bp, Arabidopsis thaliana
acttcgggactcattcc

SEQ ID NO: 26469 - DNA, 17 bp, Arabidopsis thaliana
acttcgggagaaggggt

SEQ ID NO: 26470 - DNA, 17 bp, Arabidopsis thaliana
acttcgggatagttgag

SEQ ID NO: 26471 - DNA, 17 bp, Arabidopsis thaliana
acttcgggcatgttcgt

SEQ ID NO: 26472 - DNA, 17 bp, Arabidopsis thaliana
acttcgggccggttcgt

SEQ ID NO: 26473 - DNA, 17 bp, Arabidopsis thaliana
acttcgggtttggatcg

SEQ ID NO: 26474 - DNA, 17 bp, Arabidopsis thaliana
acttcggtaacgatgta

SEQ ID NO: 26475 - DNA, 17 bp, Arabidopsis thaliana
acttcggttccaatcca

SEQ ID NO: 26476 - DNA, 17 bp, Arabidopsis thaliana
acttcggttttcggcat

SEQ ID NO: 26477 - DNA, 17 bp, Arabidopsis thaliana
acttcgtatgcggccgt

SEQ ID NO: 26478 - DNA, 17 bp, Arabidopsis thaliana
acttcgtcagggtgatc

SEQ ID NO: 26479 - DNA, 17 bp, Arabidopsis thaliana
acttcgtcccaacccct

SEQ ID NO: 26480 - DNA, 17 bp, Arabidopsis thaliana
acttcgtcgaaactgtt

SEQ ID NO: 26481 - DNA, 17 bp, Arabidopsis thaliana
acttcgtctttcaagcg

SEQ ID NO: 26482 - DNA, 17 bp, Arabidopsis thaliana
acttcgtgacttctgat

SEQ ID NO: 26483 - DNA, 17 bp, Arabidopsis thaliana
acttcgttccatgtcaa

SEQ ID NO: 26484 - DNA, 17 bp, Arabidopsis thaliana
acttcgttccccggcaa

SEQ ID NO: 26485 - DNA, 17 bp, Arabidopsis thaliana
acttcgtttcccggctg

SEQ ID NO: 26486 - DNA, 17 bp, Arabidopsis thaliana
acttcgtttctagttgc

SEQ ID NO: 26487 - DNA, 17 bp, Arabidopsis thaliana
acttctaagagcagcag

SEQ ID NO: 26488 - DNA, 17 bp, Arabidopsis thaliana
acttctaagtcagactc

SEQ ID NO: 26489 - DNA, 17 bp, Arabidopsis thaliana
acttctaagttcggtgc

SEQ ID NO: 26490 - DNA, 17 bp, Arabidopsis thaliana
acttctaatcaagcgat

SEQ ID NO: 26491 - DNA, 17 bp, Arabidopsis thaliana
acttctacagagattaa

SEQ ID NO: 26492 - DNA, 17 bp, Arabidopsis thaliana
acttctacagttatttg

SEQ ID NO: 26493 - DNA, 17 bp, Arabidopsis thaliana
acttctaccgctagatc

SEQ ID NO: 26494 - DNA, 17 bp, Arabidopsis thaliana
acttctacgaagattag

SEQ ID NO: 26495 - DNA, 17 bp, Arabidopsis thaliana
acttctacttgggattt

SEQ ID NO: 26496 - DNA, 17 bp, Arabidopsis thaliana
acttctagacaatcgct

SEQ ID NO: 26497 - DNA, 17 bp, Arabidopsis thaliana
acttctaggaagagagt

SEQ ID NO: 26498 - DNA, 17 bp, Arabidopsis thaliana
acttctataaccgcttg

SEQ ID NO: 26499 - DNA, 17 bp, Arabidopsis thaliana
acttctattctgcacga

SEQ ID NO: 26500 - DNA, 17 bp, Arabidopsis thaliana
acttctcaaagctttca

SEQ ID NO: 26501 - DNA, 17 bp, Arabidopsis thaliana
acttctcaactttacat

SEQ ID NO: 26502 - DNA, 17 bp, Arabidopsis thaliana
acttctcaagtccaaat

SEQ ID NO: 26503 - DNA, 17 bp, Arabidopsis thaliana
acttctcatccggatta

SEQ ID NO: 26504 - DNA, 17 bp, Arabidopsis thaliana
acttctcatctcgaggg

SEQ ID NO: 26505 - DNA, 17 bp, Arabidopsis thaliana
acttctcatggggacac

SEQ ID NO: 26506 - DNA, 17 bp, Arabidopsis thaliana
acttctccacgaaggac

SEQ ID NO: 26507 - DNA, 17 bp, Arabidopsis thaliana
acttctccccgaaggac

SEQ ID NO: 26508 - DNA, 17 bp, Arabidopsis thaliana
acttctcccgcaccgca

SEQ ID NO: 26509 - DNA, 17 bp, Arabidopsis thaliana
acttctccgatgaaggc

SEQ ID NO: 26510 - DNA, 17 bp, Arabidopsis thaliana
acttctcctcgaaatat

SEQ ID NO: 26511 - DNA, 17 bp, Arabidopsis thaliana
acttctcctcgatcgga

SEQ ID NO: 26512 - DNA, 17 bp, Arabidopsis thaliana
acttctcctgaggaaat

SEQ ID NO: 26513 - DNA, 17 bp, Arabidopsis thaliana
acttctcgaacagatgt

SEQ ID NO: 26514 - DNA, 17 bp, Arabidopsis thaliana
acttctcggagatgagt

SEQ ID NO: 26515 - DNA, 17 bp, Arabidopsis thaliana
acttctcgtggagaaat

SEQ ID NO: 26516 - DNA, 17 bp, Arabidopsis thaliana
acttctcgtggggaaat

SEQ ID NO: 26517 - DNA, 17 bp, Arabidopsis thaliana
acttctcgtggggaagt

SEQ ID NO: 26518 - DNA, 17 bp, Arabidopsis thaliana
acttctctaagctccgg

SEQ ID NO: 26519 - DNA, 17 bp, Arabidopsis thaliana
acttctctagccttctg

SEQ ID NO: 26520 - DNA, 17 bp, Arabidopsis thaliana
acttctctcacagacgc

SEQ ID NO: 26521 - DNA, 17 bp, Arabidopsis thaliana
acttctctgggccgaaa

SEQ ID NO: 26522 - DNA, 17 bp, Arabidopsis thaliana
acttctctgggccgcaa

SEQ ID NO: 26523 - DNA, 17 bp, Arabidopsis thaliana
acttctgacctgcttga

SEQ ID NO: 26524 - DNA, 17 bp, Arabidopsis thaliana
acttctgataccagtct

SEQ ID NO: 26525 - DNA, 17 bp, Arabidopsis thaliana
acttctgatgtgggatc

SEQ ID NO: 26526 - DNA, 17 bp, Arabidopsis thaliana
acttctgcaaggctctt

SEQ ID NO: 26527 - DNA, 17 bp, Arabidopsis thaliana
acttctgcagcttgatg

SEQ ID NO: 26528 - DNA, 17 bp, Arabidopsis thaliana
acttctgccttggatgg

SEQ ID NO: 26529 - DNA, 17 bp, Arabidopsis thaliana
acttctgcgtatgtttt

SEQ ID NO: 26530 - DNA, 17 bp, Arabidopsis thaliana
acttctgcgttttggag

SEQ ID NO: 26531 - DNA, 17 bp, Arabidopsis thaliana
acttctgctaaggtttg

SEQ ID NO: 26532 - DNA, 17 bp, Arabidopsis thaliana
acttctgctgctgctgc

SEQ ID NO: 26533 - DNA, 17 bp, Arabidopsis thaliana
acttctggaatgatgac

SEQ ID NO: 26534 - DNA, 17 bp, Arabidopsis thaliana
acttctggttccacttc

SEQ ID NO: 26535 - DNA, 17 bp, Arabidopsis thaliana
acttctgttggcacaat

SEQ ID NO: 26536 - DNA, 17 bp, Arabidopsis thaliana
acttctgttgtggactg

SEQ ID NO: 26537 - DNA, 17 bp, Arabidopsis thaliana
acttctgtttttggtcc

SEQ ID NO: 26538 - DNA, 17 bp, Arabidopsis thaliana
acttcttcaacgccgaa

SEQ ID NO: 26539 - DNA, 17 bp, Arabidopsis thaliana
acttcttcagctttgca

SEQ ID NO: 26540 - DNA, 17 bp, Arabidopsis thaliana
acttcttccggcaacga

SEQ ID NO: 26541 - DNA, 17 bp, Arabidopsis thaliana
acttcttctgagattgg

SEQ ID NO: 26542 - DNA, 17 bp, Arabidopsis thaliana
acttcttctgattggtc

SEQ ID NO: 26543 - DNA, 17 bp, Arabidopsis thaliana
acttcttgaccggaatg

SEQ ID NO: 26544 - DNA, 17 bp, Arabidopsis thaliana
acttcttgattgtcggc

SEQ ID NO: 26545 - DNA, 17 bp, Arabidopsis thaliana
acttcttgcaagggagt

SEQ ID NO: 26546 - DNA, 17 bp, Arabidopsis thaliana
acttcttggagggaaat

SEQ ID NO: 26547 - DNA, 17 bp, Arabidopsis thaliana
acttcttgggcttcacc

SEQ ID NO: 26548 - DNA, 17 bp, Arabidopsis thaliana
acttcttggttggctgc

SEQ ID NO: 26549 - DNA, 17 bp, Arabidopsis thaliana
acttcttggttgtaggg

SEQ ID NO: 26550 - DNA, 17 bp, Arabidopsis thaliana
acttcttggttgtcggc

SEQ ID NO: 26551 - DNA, 17 bp, Arabidopsis thaliana
acttcttgtgaacttga

SEQ ID NO: 26552 - DNA, 17 bp, Arabidopsis thaliana
acttctttacaatggct

SEQ ID NO: 26553 - DNA, 17 bp, Arabidopsis thaliana
acttctttcctacggtg

SEQ ID NO: 26554 - DNA, 17 bp, Arabidopsis thaliana
acttctttcctgcggtg

SEQ ID NO: 26555 - DNA, 17 bp, Arabidopsis thaliana
acttctttcctttggtg

SEQ ID NO: 26556 - DNA, 17 bp, Arabidopsis thaliana
acttctttctcgggata

SEQ ID NO: 26557 - DNA, 17 bp, Arabidopsis thaliana
acttctttctgggctgt

SEQ ID NO: 26558 - DNA, 17 bp, Arabidopsis thaliana
acttctttggaaatgcc

SEQ ID NO: 26559 - DNA, 17 bp, Arabidopsis thaliana
acttctttgtggaggcc

SEQ ID NO: 26560 - DNA, 17 bp, Arabidopsis thaliana
acttcttttgacatttt

SEQ ID NO: 26561 - DNA, 17 bp, Arabidopsis thaliana
acttcttttggcttcat

SEQ ID NO: 26562 - DNA, 17 bp, Arabidopsis thaliana
acttgaaaaagcgtcac

SEQ ID NO: 26563 - DNA, 17 bp, Arabidopsis thaliana
acttgaaatctgtctgg

SEQ ID NO: 26564 - DNA, 17 bp, Arabidopsis thaliana
acttgaaattctccagg

SEQ ID NO: 26565 - DNA, 17 bp, Arabidopsis thaliana
acttgaaccatcaacct

SEQ ID NO: 26566 - DNA, 17 bp, Arabidopsis thaliana
acttgaaccgacgacct

SEQ ID NO: 26567 - DNA, 17 bp, Arabidopsis thaliana
acttgaactacgggttg

SEQ ID NO: 26568 - DNA, 17 bp, Arabidopsis thaliana
acttgaactataggctc

SEQ ID NO: 26569 - DNA, 17 bp, Arabidopsis thaliana
acttgaactgagaagag

SEQ ID NO: 26570 - DNA, 17 bp, Arabidopsis thaliana
acttgaaggtgtgaccg

SEQ ID NO: 26571 - DNA, 17 bp, Arabidopsis thaliana
acttgaagtccaggaag

SEQ ID NO: 26572 - DNA, 17 bp, Arabidopsis thaliana
acttgaatggactgtgc

SEQ ID NO: 26573 - DNA, 17 bp, Arabidopsis thaliana
acttgacaagtagcacg

SEQ ID NO: 26574 - DNA, 17 bp, Arabidopsis thaliana
acttgacaagtggcacg

SEQ ID NO: 26575 - DNA, 17 bp, Arabidopsis thaliana
acttgacacgtggcacg

SEQ ID NO: 26576 - DNA, 17 bp, Arabidopsis thaliana
acttgacactgtgccac

SEQ ID NO: 26577 - DNA, 17 bp, Arabidopsis thaliana
acttgacatgtggcacg

SEQ ID NO: 26578 - DNA, 17 bp, Arabidopsis thaliana
acttgaccatttagggc

SEQ ID NO: 26579 - DNA, 17 bp, Arabidopsis thaliana
acttgaccattttgggc

SEQ ID NO: 26580 - DNA, 17 bp, Arabidopsis thaliana
acttgaccgttgactcc

SEQ ID NO: 26581 - DNA, 17 bp, Arabidopsis thaliana
acttgactcagcgttag

SEQ ID NO: 26582 - DNA, 17 bp, Arabidopsis thaliana
acttgactctagtccga

SEQ ID NO: 26583 - DNA, 17 bp, Arabidopsis thaliana
acttgactgattggctg

SEQ ID NO: 26584 - DNA, 17 bp, Arabidopsis thaliana
acttgactgctgacgga

SEQ ID NO: 26585 - DNA, 17 bp, Arabidopsis thaliana
acttgacttgctttcag

SEQ ID NO: 26586 - DNA, 17 bp, Arabidopsis thaliana
acttgacttgctttctg

SEQ ID NO: 26587 - DNA, 17 bp, Arabidopsis thaliana
acttgacttggcatttt

SEQ ID NO: 26588 - DNA, 17 bp, Arabidopsis thaliana
acttgagaaattctgag

SEQ ID NO: 26589 - DNA, 17 bp, Arabidopsis thaliana
acttgagaatgggtcaa

SEQ ID NO: 26590 - DNA, 17 bp, Arabidopsis thaliana
acttgagacttggtatc

SEQ ID NO: 26591 - DNA, 17 bp, Arabidopsis thaliana
acttgagagagcctgac

SEQ ID NO: 26592 - DNA, 17 bp, Arabidopsis thaliana
acttgagaggtgtagga

SEQ ID NO: 26593 - DNA, 17 bp, Arabidopsis thaliana
acttgagagtctctgtt

SEQ ID NO: 26594 - DNA, 17 bp, Arabidopsis thaliana
acttgagccacctgtga

SEQ ID NO: 26595 - DNA, 17 bp, Arabidopsis thaliana
acttgagcgtgtgaatt

SEQ ID NO: 26596 - DNA, 17 bp, Arabidopsis thaliana
acttgagctctaagttc

SEQ ID NO: 26597 - DNA, 17 bp, Arabidopsis thaliana
acttgagtgactgttgg

SEQ ID NO: 26598 - DNA, 17 bp, Arabidopsis thaliana
acttgagtgtgtgaatc

SEQ ID NO: 26599 - DNA, 17 bp, Arabidopsis thaliana
acttgataaaccagccg

SEQ ID NO: 26600 - DNA, 17 bp, Arabidopsis thaliana
acttgatagcgctcgta

SEQ ID NO: 26601 - DNA, 17 bp, Arabidopsis thaliana
acttgatatgctcagac

SEQ ID NO: 26602 - DNA, 17 bp, Arabidopsis thaliana
acttgatcacttgctgc

SEQ ID NO: 26603 - DNA, 17 bp, Arabidopsis thaliana
acttgatccgcagcggt

SEQ ID NO: 26604 - DNA, 17 bp, Arabidopsis thaliana
acttgatccgcctaata

SEQ ID NO: 26605 - DNA, 17 bp, Arabidopsis thaliana
acttgatcgggttcagg

SEQ ID NO: 26606 - DNA, 17 bp, Arabidopsis thaliana
acttgatctcacgtgta

SEQ ID NO: 26607 - DNA, 17 bp, Arabidopsis thaliana
acttgatctgctccact

SEQ ID NO: 26608 - DNA, 17 bp, Arabidopsis thaliana
acttgatctttggttgg

SEQ ID NO: 26609 - DNA, 17 bp, Arabidopsis thaliana
acttgatgggcgtccaa

SEQ ID NO: 26610 - DNA, 17 bp, Arabidopsis thaliana
acttgatggggatagat

SEQ ID NO: 26611 - DNA, 17 bp, Arabidopsis thaliana
acttgattcatcacagg

SEQ ID NO: 26612 - DNA, 17 bp, Arabidopsis thaliana
acttgattcatttttat

SEQ ID NO: 26613 - DNA, 17 bp, Arabidopsis thaliana
acttgattcgtcaccgt

SEQ ID NO: 26614 - DNA, 17 bp, Arabidopsis thaliana
acttgattctacaacag

SEQ ID NO: 26615 - DNA, 17 bp, Arabidopsis thaliana
acttgcaagtgattcag

SEQ ID NO: 26616 - DNA, 17 bp, Arabidopsis thaliana
acttgccatcgtcctgt

SEQ ID NO: 26617 - DNA, 17 bp, Arabidopsis thaliana
acttgcccagggccgat

SEQ ID NO: 26618 - DNA, 17 bp, Arabidopsis thaliana
acttgcccgtgcgcagg

SEQ ID NO: 26619 - DNA, 17 bp, Arabidopsis thaliana
acttgccggatgcatta

SEQ ID NO: 26620 - DNA, 17 bp, Arabidopsis thaliana
acttgcctgatcattag

SEQ ID NO: 26621 - DNA, 17 bp, Arabidopsis thaliana
acttgcctgatgcatta

SEQ ID NO: 26622 - DNA, 17 bp, Arabidopsis thaliana
acttgcctgctactgcc

SEQ ID NO: 26623 - DNA, 17 bp, Arabidopsis thaliana
acttgcctgtcgagaca

SEQ ID NO: 26624 - DNA, 17 bp, Arabidopsis thaliana
acttgcgaaagtgctgg

SEQ ID NO: 26625 - DNA, 17 bp, Arabidopsis thaliana
acttgcgaacttgaaat

SEQ ID NO: 26626 - DNA, 17 bp, Arabidopsis thaliana
acttgcgagaagacttt

SEQ ID NO: 26627 - DNA, 17 bp, Arabidopsis thaliana
acttgcgagagagaact

SEQ ID NO: 26628 - DNA, 17 bp, Arabidopsis thaliana
acttgcgagattgagaa

SEQ ID NO: 26629 - DNA, 17 bp, Arabidopsis thaliana
acttgcgagggaattcc

SEQ ID NO: 26630 - DNA, 17 bp, Arabidopsis thaliana
acttgcgagggaattgc

SEQ ID NO: 26631 - DNA, 17 bp, Arabidopsis thaliana
acttgcggcgtacaaac

SEQ ID NO: 26632 - DNA, 17 bp, Arabidopsis thaliana
acttgcggtgccttgcg

SEQ ID NO: 26633 - DNA, 17 bp, Arabidopsis thaliana
acttgcgttcaaagact

SEQ ID NO: 26634 - DNA, 17 bp, Arabidopsis thaliana
acttgctacttaagcag

SEQ ID NO: 26635 - DNA, 17 bp, Arabidopsis thaliana
acttgctacttgcgaat

SEQ ID NO: 26636 - DNA, 17 bp, Arabidopsis thaliana
acttgctatcagactca

SEQ ID NO: 26637 - DNA, 17 bp, Arabidopsis thaliana
acttgctcactaagtcg

SEQ ID NO: 26638 - DNA, 17 bp, Arabidopsis thaliana
acttgctccgcaacggt

SEQ ID NO: 26639 - DNA, 17 bp, Arabidopsis thaliana
acttgctgacttcacgc

SEQ ID NO: 26640 - DNA, 17 bp, Arabidopsis thaliana
acttgcttgaccgcatc

SEQ ID NO: 26641 - DNA, 17 bp, Arabidopsis thaliana
acttgcttgtaaactgt

SEQ ID NO: 26642 - DNA, 17 bp, Arabidopsis thaliana
acttgctttgttactcg

SEQ ID NO: 26643 - DNA, 17 bp, Arabidopsis thaliana
acttggaaaagaccctg

SEQ ID NO: 26644 - DNA, 17 bp, Arabidopsis thaliana
acttggaaagtgcaatg

SEQ ID NO: 26645 - DNA, 17 bp, Arabidopsis thaliana
acttggaaggagtcttg

SEQ ID NO: 26646 - DNA, 17 bp, Arabidopsis thaliana
acttggaatgtgacacg

SEQ ID NO: 26647 - DNA, 17 bp, Arabidopsis thaliana
acttggaccaggcttca

SEQ ID NO: 26648 - DNA, 17 bp, Arabidopsis thaliana
acttggacccggtcgat

SEQ ID NO: 26649 - DNA, 17 bp, Arabidopsis thaliana
acttggaccgcagggtc

SEQ ID NO: 26650 - DNA, 17 bp, Arabidopsis thaliana
acttggacctaatgttg

SEQ ID NO: 26651 - DNA, 17 bp, Arabidopsis thaliana
acttggactggtgtggc

SEQ ID NO: 26652 - DNA, 17 bp, Arabidopsis thaliana
acttggacttataagct

SEQ ID NO: 26653 - DNA, 17 bp, Arabidopsis thaliana
acttggacttcaatgct

SEQ ID NO: 26654 - DNA, 17 bp, Arabidopsis thaliana
acttggaggtatgtcgt

SEQ ID NO: 26655 - DNA, 17 bp, Arabidopsis thaliana
acttggatcaggcaatg

SEQ ID NO: 26656 - DNA, 17 bp, Arabidopsis thaliana
acttggatcatttgcgc

SEQ ID NO: 26657 - DNA, 17 bp, Arabidopsis thaliana
acttggatctaattcac

SEQ ID NO: 26658 - DNA, 17 bp, Arabidopsis thaliana
acttggatctgactttg

SEQ ID NO: 26659 - DNA, 17 bp, Arabidopsis thaliana
acttggcaatgcgtaaa

SEQ ID NO: 26660 - DNA, 17 bp, Arabidopsis thaliana
acttggcaggacgttac

SEQ ID NO: 26661 - DNA, 17 bp, Arabidopsis thaliana
acttggcataatggcgg

SEQ ID NO: 26662 - DNA, 17 bp, Arabidopsis thaliana
acttggcatagaccgtg

SEQ ID NO: 26663 - DNA, 17 bp, Arabidopsis thaliana
acttggcatgatggcgg

SEQ ID NO: 26664 - DNA, 17 bp, Arabidopsis thaliana
acttggcatgtgatacc

SEQ ID NO: 26665 - DNA, 17 bp, Arabidopsis thaliana
acttggccactggtcta

SEQ ID NO: 26666 - DNA, 17 bp, Arabidopsis thaliana
acttggccatttaggac

SEQ ID NO: 26667 - DNA, 17 bp, Arabidopsis thaliana
acttggcccataaaaaa

SEQ ID NO: 26668 - DNA, 17 bp, Arabidopsis thaliana
acttggccctgttcgtt

SEQ ID NO: 26669 - DNA, 17 bp, Arabidopsis thaliana
acttggccgaagccgaa

SEQ ID NO: 26670 - DNA, 17 bp, Arabidopsis thaliana
acttggcctggttcact

SEQ ID NO: 26671 - DNA, 17 bp, Arabidopsis thaliana
acttggcggacgggagc

SEQ ID NO: 26672 - DNA, 17 bp, Arabidopsis thaliana
acttggcggagttcagg

SEQ ID NO: 26673 - DNA, 17 bp, Arabidopsis thaliana
acttggctcatctatca

SEQ ID NO: 26674 - DNA, 17 bp, Arabidopsis thaliana
acttggctcggatgtgt

SEQ ID NO: 26675 - DNA, 17 bp, Arabidopsis thaliana
acttggctgaagccttg

SEQ ID NO: 26676 - DNA, 17 bp, Arabidopsis thaliana
acttggcttgccgatcc

SEQ ID NO: 26677 - DNA, 17 bp, Arabidopsis thaliana
acttgggacaaacttta

SEQ ID NO: 26678 - DNA, 17 bp, Arabidopsis thaliana
acttgggaccggcaaaa

SEQ ID NO: 26679 - DNA, 17 bp, Arabidopsis thaliana
acttgggagatttatca

SEQ ID NO: 26680 - DNA, 17 bp, Arabidopsis thaliana
acttgggatcttcctat

SEQ ID NO: 26681 - DNA, 17 bp, Arabidopsis thaliana
acttgggatgggtcggc

SEQ ID NO: 26682 - DNA, 17 bp, Arabidopsis thaliana
acttgggccaagctgag

SEQ ID NO: 26683 - DNA, 17 bp, Arabidopsis thaliana
acttgggctgtgaccaa

SEQ ID NO: 26684 - DNA, 17 bp, Arabidopsis thaliana
acttgggcttacacaga

SEQ ID NO: 26685 - DNA, 17 bp, Arabidopsis thaliana
acttgggctttaagcta

SEQ ID NO: 26686 - DNA, 17 bp, Arabidopsis thaliana
acttggggtcttaggcc

SEQ ID NO: 26687 - DNA, 17 bp, Arabidopsis thaliana
acttgggtataggggcg

SEQ ID NO: 26688 - DNA, 17 bp, Arabidopsis thaliana
acttgggtctgattggt

SEQ ID NO: 26689 - DNA, 17 bp, Arabidopsis thaliana
acttgggttaatgtggg

SEQ ID NO: 26690 - DNA, 17 bp, Arabidopsis thaliana
acttgggtttgggcatt

SEQ ID NO: 26691 - DNA, 17 bp, Arabidopsis thaliana
acttggtagtggacatg

SEQ ID NO: 26692 - DNA, 17 bp, Arabidopsis thaliana
acttggtatgcaccgat

SEQ ID NO: 26693 - DNA, 17 bp, Arabidopsis thaliana
acttggtatgcgaagaa

SEQ ID NO: 26694 - DNA, 17 bp, Arabidopsis thaliana
acttggtatgggacggt

SEQ ID NO: 26695 - DNA, 17 bp, Arabidopsis thaliana
acttggtccacaacggt

SEQ ID NO: 26696 - DNA, 17 bp, Arabidopsis thaliana
acttggtccgcagcgat

SEQ ID NO: 26697 - DNA, 17 bp, Arabidopsis thaliana
acttggtccgcagcgct

SEQ ID NO: 26698 - DNA, 17 bp, Arabidopsis thaliana
acttggtccgcagcggt

SEQ ID NO: 26699 - DNA, 17 bp, Arabidopsis thaliana
acttggtcgacaacatc

SEQ ID NO: 26700 - DNA, 17 bp, Arabidopsis thaliana
acttggtctgcagcggt

SEQ ID NO: 26701 - DNA, 17 bp, Arabidopsis thaliana
acttggtgcgcaacggt

SEQ ID NO: 26702 - DNA, 17 bp, Arabidopsis thaliana
acttggtggatgttgct

SEQ ID NO: 26703 - DNA, 17 bp, Arabidopsis thaliana
acttggtgtgagttctg

SEQ ID NO: 26704 - DNA, 17 bp, Arabidopsis thaliana
acttggtgtgcagcggt

SEQ ID NO: 26705 - DNA, 17 bp, Arabidopsis thaliana
acttggtgtgcgattga

SEQ ID NO: 26706 - DNA, 17 bp, Arabidopsis thaliana
acttggtgtggatcctg

SEQ ID NO: 26707 - DNA, 17 bp, Arabidopsis thaliana
acttggtgtggattctg

SEQ ID NO: 26708 - DNA, 17 bp, Arabidopsis thaliana
acttggtgtggctctcg

SEQ ID NO: 26709 - DNA, 17 bp, Arabidopsis thaliana
acttggtgtttctttgg

SEQ ID NO: 26710 - DNA, 17 bp, Arabidopsis thaliana
acttggttcagaggcat

SEQ ID NO: 26711 - DNA, 17 bp, Arabidopsis thaliana
acttggttcgcagcagt

SEQ ID NO: 26712 - DNA, 17 bp, Arabidopsis thaliana
acttggttctctattag

SEQ ID NO: 26713 - DNA, 17 bp, Arabidopsis thaliana
acttggttctgaggatt

SEQ ID NO: 26714 - DNA, 17 bp, Arabidopsis thaliana
acttggttggacttggt

SEQ ID NO: 26715 - DNA, 17 bp, Arabidopsis thaliana
acttggtttcgacaaag

SEQ ID NO: 26716 - DNA, 17 bp, Arabidopsis thaliana
acttgtaaggtccctgc

SEQ ID NO: 26717 - DNA, 17 bp, Arabidopsis thaliana
acttgtaatccttccag

SEQ ID NO: 26718 - DNA, 17 bp, Arabidopsis thaliana
acttgtactatttgtgt

SEQ ID NO: 26719 - DNA, 17 bp, Arabidopsis thaliana
acttgtactttcggttc

SEQ ID NO: 26720 - DNA, 17 bp, Arabidopsis thaliana
acttgtagctgcataat

SEQ ID NO: 26721 - DNA, 17 bp, Arabidopsis thaliana
acttgtatggtctgggg

SEQ ID NO: 26722 - DNA, 17 bp, Arabidopsis thaliana
acttgtcaacagctatg

SEQ ID NO: 26723 - DNA, 17 bp, Arabidopsis thaliana
acttgtcacggaccaat

SEQ ID NO: 26724 - DNA, 17 bp, Arabidopsis thaliana
acttgtcacttgacctc

SEQ ID NO: 26725 - DNA, 17 bp, Arabidopsis thaliana
acttgtcagcggtccag

SEQ ID NO: 26726 - DNA, 17 bp, Arabidopsis thaliana
acttgtcagggatgagg

SEQ ID NO: 26727 - DNA, 17 bp, Arabidopsis thaliana
acttgtcatgatcttgt

SEQ ID NO: 26728 - DNA, 17 bp, Arabidopsis thaliana
acttgtccataaccact

SEQ ID NO: 26729 - DNA, 17 bp, Arabidopsis thaliana
acttgtccattaatgat

SEQ ID NO: 26730 - DNA, 17 bp, Arabidopsis thaliana
acttgtccgcttttacc

SEQ ID NO: 26731 - DNA, 17 bp, Arabidopsis thaliana
acttgtcgggtggcggc

SEQ ID NO: 26732 - DNA, 17 bp, Arabidopsis thaliana
acttgtctgttgatcga

SEQ ID NO: 26733 - DNA, 17 bp, Arabidopsis thaliana
acttgtgacaaacggaa

SEQ ID NO: 26734 - DNA, 17 bp, Arabidopsis thaliana
acttgtgatgttgtctt

SEQ ID NO: 26735 - DNA, 17 bp, Arabidopsis thaliana
acttgtgattatggtgt

SEQ ID NO: 26736 - DNA, 17 bp, Arabidopsis thaliana
acttgtgattgaactta

SEQ ID NO: 26737 - DNA, 17 bp, Arabidopsis thaliana
acttgtgcacggctctg

SEQ ID NO: 26738 - DNA, 17 bp, Arabidopsis thaliana
acttgtgccgtctgtac

SEQ ID NO: 26739 - DNA, 17 bp, Arabidopsis thaliana
acttgtgcgaagagtgc

SEQ ID NO: 26740 - DNA, 17 bp, Arabidopsis thaliana
acttgtgcgagggattt

SEQ ID NO: 26741 - DNA, 17 bp, Arabidopsis thaliana
acttgtggaacggtcga

SEQ ID NO: 26742 - DNA, 17 bp, Arabidopsis thaliana
acttgtggcggcagaga

SEQ ID NO: 26743 - DNA, 17 bp, Arabidopsis thaliana
acttgtgggtatccgat

SEQ ID NO: 26744 - DNA, 17 bp, Arabidopsis thaliana
acttgtggttggttgct

SEQ ID NO: 26745 - DNA, 17 bp, Arabidopsis thaliana
acttgtgtccatgggtg

SEQ ID NO: 26746 - DNA, 17 bp, Arabidopsis thaliana
acttgtgtcctgcttcg

SEQ ID NO: 26747 - DNA, 17 bp, Arabidopsis thaliana
acttgtgtctgaggatc

SEQ ID NO: 26748 - DNA, 17 bp, Arabidopsis thaliana
acttgtgtgtgattagt

SEQ ID NO: 26749 - DNA, 17 bp, Arabidopsis thaliana
acttgtgttgaccgcgc

SEQ ID NO: 26750 - DNA, 17 bp, Arabidopsis thaliana
acttgtgttgatggact

SEQ ID NO: 26751 - DNA, 17 bp, Arabidopsis thaliana
acttgtgtttgaaccac

SEQ ID NO: 26752 - DNA, 17 bp, Arabidopsis thaliana
acttgttaaccgccggc

SEQ ID NO: 26753 - DNA, 17 bp, Arabidopsis thaliana
acttgttaaccgctggc

SEQ ID NO: 26754 - DNA, 17 bp, Arabidopsis thaliana
acttgttacttgacttg

SEQ ID NO: 26755 - DNA, 17 bp, Arabidopsis thaliana
acttgttatccaggatc

SEQ ID NO: 26756 - DNA, 17 bp, Arabidopsis thaliana
acttgttcgacaaagat

SEQ ID NO: 26757 - DNA, 17 bp, Arabidopsis thaliana
acttgttcgctatcggt

SEQ ID NO: 26758 - DNA, 17 bp, Arabidopsis thaliana
acttgttctatttgtgt

SEQ ID NO: 26759 - DNA, 17 bp, Arabidopsis thaliana
acttgttgacggcggca

SEQ ID NO: 26760 - DNA, 17 bp, Arabidopsis thaliana
acttgttgagttagggc

SEQ ID NO: 26761 - DNA, 17 bp, Arabidopsis thaliana
acttgttgcagagcact

SEQ ID NO: 26762 - DNA, 17 bp, Arabidopsis thaliana
acttgttgctctgatca

SEQ ID NO: 26763 - DNA, 17 bp, Arabidopsis thaliana
acttgttggccgtgaat

SEQ ID NO: 26764 - DNA, 17 bp, Arabidopsis thaliana
acttgttgtaacaacat

SEQ ID NO: 26765 - DNA, 17 bp, Arabidopsis thaliana
acttgttgtaggacgtt

SEQ ID NO: 26766 - DNA, 17 bp, Arabidopsis thaliana
acttgtttgctctgcga

SEQ ID NO: 26767 - DNA, 17 bp, Arabidopsis thaliana
acttgtttgtatgaaac

SEQ ID NO: 26768 - DNA, 17 bp, Arabidopsis thaliana
acttgtttttccttgac

SEQ ID NO: 26769 - DNA, 17 bp, Arabidopsis thaliana
actttacactagttgat

SEQ ID NO: 26770 - DNA, 17 bp, Arabidopsis thaliana
actttacgactgagatt

SEQ ID NO: 26771 - DNA, 17 bp, Arabidopsis thaliana
actttacggattatcgg

SEQ ID NO: 26772 - DNA, 17 bp, Arabidopsis thaliana
actttacttcttggcga

SEQ ID NO: 26773 - DNA, 17 bp, Arabidopsis thaliana
actttacttcttggcta

SEQ ID NO: 26774 - DNA, 17 bp, Arabidopsis thaliana
actttacttcttggctg

SEQ ID NO: 26775 - DNA, 17 bp, Arabidopsis thaliana
actttactttgactcat

SEQ ID NO: 26776 - DNA, 17 bp, Arabidopsis thaliana
actttagccagtccgat

SEQ ID NO: 26777 - DNA, 17 bp, Arabidopsis thaliana
actttagccatgaagtt

SEQ ID NO: 26778 - DNA, 17 bp, Arabidopsis thaliana
actttagccatggagtt

SEQ ID NO: 26779 - DNA, 17 bp, Arabidopsis thaliana
actttagcccagggccg

SEQ ID NO: 26780 - DNA, 17 bp, Arabidopsis thaliana
actttaggcttccagaa

SEQ ID NO: 26781 - DNA, 17 bp, Arabidopsis thaliana
actttagggatcgaacc

SEQ ID NO: 26782 - DNA, 17 bp, Arabidopsis thaliana
actttatccgcagttga

SEQ ID NO: 26783 - DNA, 17 bp, Arabidopsis thaliana
actttattacggcttga

SEQ ID NO: 26784 - DNA, 17 bp, Arabidopsis thaliana
actttatttgccgagct

SEQ ID NO: 26785 - DNA, 17 bp, Arabidopsis thaliana
actttatttttctgggc

SEQ ID NO: 26786 - DNA, 17 bp, Arabidopsis thaliana
actttcaaaggcgtcca

SEQ ID NO: 26787 - DNA, 17 bp, Arabidopsis thaliana
actttcaaatccaggat

SEQ ID NO: 26788 - DNA, 17 bp, Arabidopsis thaliana
actttcaaatgggagga

SEQ ID NO: 26789 - DNA, 17 bp, Arabidopsis thaliana
actttcaaatgtgatcg

SEQ ID NO: 26790 - DNA, 17 bp, Arabidopsis thaliana
actttcaaattgtgaca

SEQ ID NO: 26791 - DNA, 17 bp, Arabidopsis thaliana
actttcacccatccacg

SEQ ID NO: 26792 - DNA, 17 bp, Arabidopsis thaliana
actttcacgatttcctt

SEQ ID NO: 26793 - DNA, 17 bp, Arabidopsis thaliana
actttcagactctgctt

SEQ ID NO: 26794 - DNA, 17 bp, Arabidopsis thaliana
actttcagagactcctt

SEQ ID NO: 26795 - DNA, 17 bp, Arabidopsis thaliana
actttcagcaggccgag

SEQ ID NO: 26796 - DNA, 17 bp, Arabidopsis thaliana
actttcaggaagggatt

SEQ ID NO: 26797 - DNA, 17 bp, Arabidopsis thaliana
actttcaggactcattg

SEQ ID NO: 26798 - DNA, 17 bp, Arabidopsis thaliana
actttcatactgagggt

SEQ ID NO: 26799 - DNA, 17 bp, Arabidopsis thaliana
actttcatagcgatgat

SEQ ID NO: 26800 - DNA, 17 bp, Arabidopsis thaliana
actttcatatgcataag

SEQ ID NO: 26801 - DNA, 17 bp, Arabidopsis thaliana
actttcatggacaggcg

SEQ ID NO: 26802 - DNA, 17 bp, Arabidopsis thaliana
actttcatggtgtagcc

SEQ ID NO: 26803 - DNA, 17 bp, Arabidopsis thaliana
actttcatgtgctgatg

SEQ ID NO: 26804 - DNA, 17 bp, Arabidopsis thaliana
actttcattgctcagat

SEQ ID NO: 26805 - DNA, 17 bp, Arabidopsis thaliana
actttccactaagtaac

SEQ ID NO: 26806 - DNA, 17 bp, Arabidopsis thaliana
actttccaggcaagcca

SEQ ID NO: 26807 - DNA, 17 bp, Arabidopsis thaliana
actttccatgagattgc

SEQ ID NO: 26808 - DNA, 17 bp, Arabidopsis thaliana
actttcccatctctgcg

SEQ ID NO: 26809 - DNA, 17 bp, Arabidopsis thaliana
actttccggcgactttt

SEQ ID NO: 26810 - DNA, 17 bp, Arabidopsis thaliana
actttccgtactgagct

SEQ ID NO: 26811 - DNA, 17 bp, Arabidopsis thaliana
actttccgttaacaggc

SEQ ID NO: 26812 - DNA, 17 bp, Arabidopsis thaliana
actttcctcgggatagt

SEQ ID NO: 26813 - DNA, 17 bp, Arabidopsis thaliana
actttccttgaacagaa

SEQ ID NO: 26814 - DNA, 17 bp, Arabidopsis thaliana
actttcgacaactggta

SEQ ID NO: 26815 - DNA, 17 bp, Arabidopsis thaliana
actttcgacccattcac

SEQ ID NO: 26816 - DNA, 17 bp, Arabidopsis thaliana
actttcgatcagctttt

SEQ ID NO: 26817 - DNA, 17 bp, Arabidopsis thaliana
actttcgatcggagttt

SEQ ID NO: 26818 - DNA, 17 bp, Arabidopsis thaliana
actttcgatggtaggat

SEQ ID NO: 26819 - DNA, 17 bp, Arabidopsis thaliana
actttcgatgtgggaca

SEQ ID NO: 26820 - DNA, 17 bp, Arabidopsis thaliana
actttcgatgtgggacc

SEQ ID NO: 26821 - DNA, 17 bp, Arabidopsis thaliana
actttcgcaacttggag

SEQ ID NO: 26822 - DNA, 17 bp, Arabidopsis thaliana
actttcgcctagggttt

SEQ ID NO: 26823 - DNA, 17 bp, Arabidopsis thaliana
actttcgcttcggttat

SEQ ID NO: 26824 - DNA, 17 bp, Arabidopsis thaliana
actttcggattcatgct

SEQ ID NO: 26825 - DNA, 17 bp, Arabidopsis thaliana
actttcgggtgcagtac

SEQ ID NO: 26826 - DNA, 17 bp, Arabidopsis thaliana
actttcgggtgtagtac

SEQ ID NO: 26827 - DNA, 17 bp, Arabidopsis thaliana
actttcgggtgtagtag

SEQ ID NO: 26828 - DNA, 17 bp, Arabidopsis thaliana
actttcgggtgtagttc

SEQ ID NO: 26829 - DNA, 17 bp, Arabidopsis thaliana
actttcggttaactggg

SEQ ID NO: 26830 - DNA, 17 bp, Arabidopsis thaliana
actttcggttcaggaga

SEQ ID NO: 26831 - DNA, 17 bp, Arabidopsis thaliana
actttcggttttccgtt

SEQ ID NO: 26832 - DNA, 17 bp, Arabidopsis thaliana
actttcgtaggctgaga

SEQ ID NO: 26833 - DNA, 17 bp, Arabidopsis thaliana
actttcgtttatcagct

SEQ ID NO: 26834 - DNA, 17 bp, Arabidopsis thaliana
actttctaaatgcgtgg

SEQ ID NO: 26835 - DNA, 17 bp, Arabidopsis thaliana
actttctaaggggacac

SEQ ID NO: 26836 - DNA, 17 bp, Arabidopsis thaliana
actttctaaggttcaga

SEQ ID NO: 26837 - DNA, 17 bp, Arabidopsis thaliana
actttctacatgagttc

SEQ ID NO: 26838 - DNA, 17 bp, Arabidopsis thaliana
actttctactgagtaac

SEQ ID NO: 26839 - DNA, 17 bp, Arabidopsis thaliana
actttctactgagtaag

SEQ ID NO: 26840 - DNA, 17 bp, Arabidopsis thaliana
actttctagacggacac

SEQ ID NO: 26841 - DNA, 17 bp, Arabidopsis thaliana
actttctaggtcaccag

SEQ ID NO: 26842 - DNA, 17 bp, Arabidopsis thaliana
actttctatttgtgtgg

SEQ ID NO: 26843 - DNA, 17 bp, Arabidopsis thaliana
actttctccatatgggt

SEQ ID NO: 26844 - DNA, 17 bp, Arabidopsis thaliana
actttctctaactttga

SEQ ID NO: 26845 - DNA, 17 bp, Arabidopsis thaliana
actttctctctgctaat

SEQ ID NO: 26846 - DNA, 17 bp, Arabidopsis thaliana
actttctctctgctagt

SEQ ID NO: 26847 - DNA, 17 bp, Arabidopsis thaliana
actttctctgtcttcgc

SEQ ID NO: 26848 - DNA, 17 bp, Arabidopsis thaliana
actttctctgtcttcgt

SEQ ID NO: 26849 - DNA, 17 bp, Arabidopsis thaliana
actttctcttggagtgc

SEQ ID NO: 26850 - DNA, 17 bp, Arabidopsis thaliana
actttctctttgagtgc

SEQ ID NO: 26851 - DNA, 17 bp, Arabidopsis thaliana
actttctgaagttccat

SEQ ID NO: 26852 - DNA, 17 bp, Arabidopsis thaliana
actttctgacgggagat

SEQ ID NO: 26853 - DNA, 17 bp, Arabidopsis thaliana
actttctgggtcactag

SEQ ID NO: 26854 - DNA, 17 bp, Arabidopsis thaliana
actttctgtttggtgga

SEQ ID NO: 26855 - DNA, 17 bp, Arabidopsis thaliana
actttcttcatgtgatc

SEQ ID NO: 26856 - DNA, 17 bp, Arabidopsis thaliana
actttcttccatccatg

SEQ ID NO: 26857 - DNA, 17 bp, Arabidopsis thaliana
actttcttctgctgcag

SEQ ID NO: 26858 - DNA, 17 bp, Arabidopsis thaliana
actttctttccatgatc

SEQ ID NO: 26859 - DNA, 17 bp, Arabidopsis thaliana
actttcttttcaggctt

SEQ ID NO: 26860 - DNA, 17 bp, Arabidopsis thaliana
actttgaaacaagggcc

SEQ ID NO: 26861 - DNA, 17 bp, Arabidopsis thaliana
actttgaaggccgaaga

SEQ ID NO: 26862 - DNA, 17 bp, Arabidopsis thaliana
actttgaattaagtccg

SEQ ID NO: 26863 - DNA, 17 bp, Arabidopsis thaliana
actttgacacatcagcc

SEQ ID NO: 26864 - DNA, 17 bp, Arabidopsis thaliana
actttgactgcaaagac

SEQ ID NO: 26865 - DNA, 17 bp, Arabidopsis thaliana
actttgactgttgtccg

SEQ ID NO: 26866 - DNA, 17 bp, Arabidopsis thaliana
actttgactgttgtcct

SEQ ID NO: 26867 - DNA, 17 bp, Arabidopsis thaliana
actttgacttcaacgcc

SEQ ID NO: 26868 - DNA, 17 bp, Arabidopsis thaliana
actttgacttgtccgat

SEQ ID NO: 26869 - DNA, 17 bp, Arabidopsis thaliana
actttgagaactggata

SEQ ID NO: 26870 - DNA, 17 bp, Arabidopsis thaliana
actttgagaagtgcggc

SEQ ID NO: 26871 - DNA, 17 bp, Arabidopsis thaliana
actttgatcagtcttga

SEQ ID NO: 26872 - DNA, 17 bp, Arabidopsis thaliana
actttgatcccttgcaa

SEQ ID NO: 26873 - DNA, 17 bp, Arabidopsis thaliana
actttgatcgtagtagt

SEQ ID NO: 26874 - DNA, 17 bp, Arabidopsis thaliana
actttgattctgttctc

SEQ ID NO: 26875 - DNA, 17 bp, Arabidopsis thaliana
actttgatttcttcagg

SEQ ID NO: 26876 - DNA, 17 bp, Arabidopsis thaliana
actttgatttcttcatg

SEQ ID NO: 26877 - DNA, 17 bp, Arabidopsis thaliana
actttgatttcttcatt

SEQ ID NO: 26878 - DNA, 17 bp, Arabidopsis thaliana
actttgatttgaagttt

SEQ ID NO: 26879 - DNA, 17 bp, Arabidopsis thaliana
actttgcacctaatccc

SEQ ID NO: 26880 - DNA, 17 bp, Arabidopsis thaliana
actttgcaggctgttat

SEQ ID NO: 26881 - DNA, 17 bp, Arabidopsis thaliana
actttgccgcaactgga

SEQ ID NO: 26882 - DNA, 17 bp, Arabidopsis thaliana
actttgccgcggttctt

SEQ ID NO: 26883 - DNA, 17 bp, Arabidopsis thaliana
actttgccggagcttct

SEQ ID NO: 26884 - DNA, 17 bp, Arabidopsis thaliana
actttgcctataatcga

SEQ ID NO: 26885 - DNA, 17 bp, Arabidopsis thaliana
actttgcgacagagtag

SEQ ID NO: 26886 - DNA, 17 bp, Arabidopsis thaliana
actttgcgcctggacag

SEQ ID NO: 26887 - DNA, 17 bp, Arabidopsis thaliana
actttgcgtgtgcgtgc

SEQ ID NO: 26888 - DNA, 17 bp, Arabidopsis thaliana
actttgctgagccgaaa

SEQ ID NO: 26889 - DNA, 17 bp, Arabidopsis thaliana
actttgctgcttttgtc

SEQ ID NO: 26890 - DNA, 17 bp, Arabidopsis thaliana
actttgctgggccaaaa

SEQ ID NO: 26891 - DNA, 17 bp, Arabidopsis thaliana
actttgctgggccaaac

SEQ ID NO: 26892 - DNA, 17 bp, Arabidopsis thaliana
actttgctgggccacaa

SEQ ID NO: 26893 - DNA, 17 bp, Arabidopsis thaliana
actttgctgggccgaaa

SEQ ID NO: 26894 - DNA, 17 bp, Arabidopsis thaliana
actttgctgtggtcaag

SEQ ID NO: 26895 - DNA, 17 bp, Arabidopsis thaliana
actttgcttcagtgtga

SEQ ID NO: 26896 - DNA, 17 bp, Arabidopsis thaliana
actttgcttcgtcgcgg

SEQ ID NO: 26897 - DNA, 17 bp, Arabidopsis thaliana
actttgctttcaaagtt

SEQ ID NO: 26898 - DNA, 17 bp, Arabidopsis thaliana
actttggacctccaggc

SEQ ID NO: 26899 - DNA, 17 bp, Arabidopsis thaliana
actttggacttgaatgc

SEQ ID NO: 26900 - DNA, 17 bp, Arabidopsis thaliana
actttggacttgtctct

SEQ ID NO: 26901 - DNA, 17 bp, Arabidopsis thaliana
actttggagccattctt

SEQ ID NO: 26902 - DNA, 17 bp, Arabidopsis thaliana
actttggatcagtttgt

SEQ ID NO: 26903 - DNA, 17 bp, Arabidopsis thaliana
actttggatcagttttt

SEQ ID NO: 26904 - DNA, 17 bp, Arabidopsis thaliana
actttggattgacttga

SEQ ID NO: 26905 - DNA, 17 bp, Arabidopsis thaliana
actttggattggcgttt

SEQ ID NO: 26906 - DNA, 17 bp, Arabidopsis thaliana
actttggattggcttga

SEQ ID NO: 26907 - DNA, 17 bp, Arabidopsis thaliana
actttggatttgatttg

SEQ ID NO: 26908 - DNA, 17 bp, Arabidopsis thaliana
actttggccaactgtcg

SEQ ID NO: 26909 - DNA, 17 bp, Arabidopsis thaliana
actttggccaagcatat

SEQ ID NO: 26910 - DNA, 17 bp, Arabidopsis thaliana
actttggccagatccat

SEQ ID NO: 26911 - DNA, 17 bp, Arabidopsis thaliana
actttggcccggtcaac

SEQ ID NO: 26912 - DNA, 17 bp, Arabidopsis thaliana
actttggccgacagacc

SEQ ID NO: 26913 - DNA, 17 bp, Arabidopsis thaliana
actttggcctatgcgga

SEQ ID NO: 26914 - DNA, 17 bp, Arabidopsis thaliana
actttggctcggaacgc

SEQ ID NO: 26915 - DNA, 17 bp, Arabidopsis thaliana
actttggcttatttaat

SEQ ID NO: 26916 - DNA, 17 bp, Arabidopsis thaliana
actttggcttgctaatc

SEQ ID NO: 26917 - DNA, 17 bp, Arabidopsis thaliana
actttggctttagattt

SEQ ID NO: 26918 - DNA, 17 bp, Arabidopsis thaliana
actttgggcctaagttt

SEQ ID NO: 26919 - DNA, 17 bp, Arabidopsis thaliana
actttgggctctatcta

SEQ ID NO: 26920 - DNA, 17 bp, Arabidopsis thaliana
actttgggctctatctg

SEQ ID NO: 26921 - DNA, 17 bp, Arabidopsis thaliana
actttgggttcactcgc

SEQ ID NO: 26922 - DNA, 17 bp, Arabidopsis thaliana
actttgggtttgttgct

SEQ ID NO: 26923 - DNA, 17 bp, Arabidopsis thaliana
actttggtacaggtgct

SEQ ID NO: 26924 - DNA, 17 bp, Arabidopsis thaliana
actttggtgattggcta

SEQ ID NO: 26925 - DNA, 17 bp, Arabidopsis thaliana
actttggtgcgtttcta

SEQ ID NO: 26926 - DNA, 17 bp, Arabidopsis thaliana
actttggtgtagtttgc

SEQ ID NO: 26927 - DNA, 17 bp, Arabidopsis thaliana
actttggtttggcatgg

SEQ ID NO: 26928 - DNA, 17 bp, Arabidopsis thaliana
actttgtaggtttctca

SEQ ID NO: 26929 - DNA, 17 bp, Arabidopsis thaliana
actttgtcaagtcaaat

SEQ ID NO: 26930 - DNA, 17 bp, Arabidopsis thaliana
actttgtcatttgccgt

SEQ ID NO: 26931 - DNA, 17 bp, Arabidopsis thaliana
actttgtccagctagtt

SEQ ID NO: 26932 - DNA, 17 bp, Arabidopsis thaliana
actttgtccgcttgggc

SEQ ID NO: 26933 - DNA, 17 bp, Arabidopsis thaliana
actttgtccttctcgtt

SEQ ID NO: 26934 - DNA, 17 bp, Arabidopsis thaliana
actttgtcttgaacagg

SEQ ID NO: 26935 - DNA, 17 bp, Arabidopsis thaliana
actttgtgcttctcgtt

SEQ ID NO: 26936 - DNA, 17 bp, Arabidopsis thaliana
actttgtgggtttctca

SEQ ID NO: 26937 - DNA, 17 bp, Arabidopsis thaliana
actttgtggtgcagaag

SEQ ID NO: 26938 - DNA, 17 bp, Arabidopsis thaliana
actttgtgtaaatcccg

SEQ ID NO: 26939 - DNA, 17 bp, Arabidopsis thaliana
actttgtgtcgggatca

SEQ ID NO: 26940 - DNA, 17 bp, Arabidopsis thaliana
actttgttactttttcc

SEQ ID NO: 26941 - DNA, 17 bp, Arabidopsis thaliana
actttgttagtcgactt

SEQ ID NO: 26942 - DNA, 17 bp, Arabidopsis thaliana
actttgttcttgtgagc

SEQ ID NO: 26943 - DNA, 17 bp, Arabidopsis thaliana
actttgttgctagacca

SEQ ID NO: 26944 - DNA, 17 bp, Arabidopsis thaliana
actttgttggatatggg

SEQ ID NO: 26945 - DNA, 17 bp, Arabidopsis thaliana
actttgttgggccaaaa

SEQ ID NO: 26946 - DNA, 17 bp, Arabidopsis thaliana
actttgttgtgctcagg

SEQ ID NO: 26947 - DNA, 17 bp, Arabidopsis thaliana
actttgtttaccagttt

SEQ ID NO: 26948 - DNA, 17 bp, Arabidopsis thaliana
acttttaatttcagatt

SEQ ID NO: 26949 - DNA, 17 bp, Arabidopsis thaliana
acttttagaccgtgagg

SEQ ID NO: 26950 - DNA, 17 bp, Arabidopsis thaliana
acttttagaccgtgagt

SEQ ID NO: 26951 - DNA, 17 bp, Arabidopsis thaliana
acttttagactgtgagg

SEQ ID NO: 26952 - DNA, 17 bp, Arabidopsis thaliana
acttttcaaaactggtt

SEQ ID NO: 26953 - DNA, 17 bp, Arabidopsis thaliana
acttttcaaagaaaatc

SEQ ID NO: 26954 - DNA, 17 bp, Arabidopsis thaliana
acttttcacggtttgat

SEQ ID NO: 26955 - DNA, 17 bp, Arabidopsis thaliana
acttttcatgcgttggc

SEQ ID NO: 26956 - DNA, 17 bp, Arabidopsis thaliana
acttttccatgggtgga

SEQ ID NO: 26957 - DNA, 17 bp, Arabidopsis thaliana
acttttcccgattcagg

SEQ ID NO: 26958 - DNA, 17 bp, Arabidopsis thaliana
acttttcccgtaccgca

SEQ ID NO: 26959 - DNA, 17 bp, Arabidopsis thaliana
acttttccgatgtggga

SEQ ID NO: 26960 - DNA, 17 bp, Arabidopsis thaliana
acttttccgtgagagcg

SEQ ID NO: 26961 - DNA, 17 bp, Arabidopsis thaliana
acttttccgttgagcca

SEQ ID NO: 26962 - DNA, 17 bp, Arabidopsis thaliana
acttttcctcaggtaac

SEQ ID NO: 26963 - DNA, 17 bp, Arabidopsis thaliana
acttttcctcgatcgga

SEQ ID NO: 26964 - DNA, 17 bp, Arabidopsis thaliana
acttttcgaggccaagc

SEQ ID NO: 26965 - DNA, 17 bp, Arabidopsis thaliana
acttttcgcgaattttt

SEQ ID NO: 26966 - DNA, 17 bp, Arabidopsis thaliana
acttttcgggatctggt

SEQ ID NO: 26967 - DNA, 17 bp, Arabidopsis thaliana
acttttcgggcattttc

SEQ ID NO: 26968 - DNA, 17 bp, Arabidopsis thaliana
acttttcgttggaccgt

SEQ ID NO: 26969 - DNA, 17 bp, Arabidopsis thaliana
acttttctaagccaaat

SEQ ID NO: 26970 - DNA, 17 bp, Arabidopsis thaliana
acttttctactgatccg

SEQ ID NO: 26971 - DNA, 17 bp, Arabidopsis thaliana
acttttctctaagtgcc

SEQ ID NO: 26972 - DNA, 17 bp, Arabidopsis thaliana
acttttctgcttttgtc

SEQ ID NO: 26973 - DNA, 17 bp, Arabidopsis thaliana
acttttctgggagaagg

SEQ ID NO: 26974 - DNA, 17 bp, Arabidopsis thaliana
acttttctgggctgcaa

SEQ ID NO: 26975 - DNA, 17 bp, Arabidopsis thaliana
acttttctgtaagcggt

SEQ ID NO: 26976 - DNA, 17 bp, Arabidopsis thaliana
acttttcttcctatagc

SEQ ID NO: 26977 - DNA, 17 bp, Arabidopsis thaliana
acttttcttctaatttc

SEQ ID NO: 26978 - DNA, 17 bp, Arabidopsis thaliana
acttttcttgctagttc

SEQ ID NO: 26979 - DNA, 17 bp, Arabidopsis thaliana
acttttcttttgtccgc

SEQ ID NO: 26980 - DNA, 17 bp, Arabidopsis thaliana
acttttgaacatgggat

SEQ ID NO: 26981 - DNA, 17 bp, Arabidopsis thaliana
acttttgaagggaaggt

SEQ ID NO: 26982 - DNA, 17 bp, Arabidopsis thaliana
acttttgaagggatgtg

SEQ ID NO: 26983 - DNA, 17 bp, Arabidopsis thaliana
acttttgaccaatttgc

SEQ ID NO: 26984 - DNA, 17 bp, Arabidopsis thaliana
acttttgacgaaacatg

SEQ ID NO: 26985 - DNA, 17 bp, Arabidopsis thaliana
acttttgactggacata

SEQ ID NO: 26986 - DNA, 17 bp, Arabidopsis thaliana
acttttgactgtgtccg

SEQ ID NO: 26987 - DNA, 17 bp, Arabidopsis thaliana
acttttgactgttgtcc

SEQ ID NO: 26988 - DNA, 17 bp, Arabidopsis thaliana
acttttgagggagtgag

SEQ ID NO: 26989 - DNA, 17 bp, Arabidopsis thaliana
acttttgagtttagtgc

SEQ ID NO: 26990 - DNA, 17 bp, Arabidopsis thaliana
acttttgatcgctgtcg

SEQ ID NO: 26991 - DNA, 17 bp, Arabidopsis thaliana
acttttgattgcgtatg

SEQ ID NO: 26992 - DNA, 17 bp, Arabidopsis thaliana
acttttgcaaaaagtgc

SEQ ID NO: 26993 - DNA, 17 bp, Arabidopsis thaliana
acttttgcaattcaccc

SEQ ID NO: 26994 - DNA, 17 bp, Arabidopsis thaliana
acttttgcctgggtgtc

SEQ ID NO: 26995 - DNA, 17 bp, Arabidopsis thaliana
acttttgcgagagacac

SEQ ID NO: 26996 - DNA, 17 bp, Arabidopsis thaliana
acttttgctgaaggcgt

SEQ ID NO: 26997 - DNA, 17 bp, Arabidopsis thaliana
acttttgctgtgctcag

SEQ ID NO: 26998 - DNA, 17 bp, Arabidopsis thaliana
acttttggagcgatctt

SEQ ID NO: 26999 - DNA, 17 bp, Arabidopsis thaliana
acttttggcagcttgcc

SEQ ID NO: 27000 - DNA, 17 bp, Arabidopsis thaliana
acttttggcccgggatg

SEQ ID NO: 27001 - DNA, 17 bp, Arabidopsis thaliana
acttttgggaatccggg

SEQ ID NO: 27002 - DNA, 17 bp, Arabidopsis thaliana
acttttggggtgctaag

SEQ ID NO: 27003 - DNA, 17 bp, Arabidopsis thaliana
acttttgggtgagattt

SEQ ID NO: 27004 - DNA, 17 bp, Arabidopsis thaliana
acttttggtcacggtcg

SEQ ID NO: 27005 - DNA, 17 bp, Arabidopsis thaliana
acttttggtcctacggt

SEQ ID NO: 27006 - DNA, 17 bp, Arabidopsis thaliana
acttttggtcgctgtcg

SEQ ID NO: 27007 - DNA, 17 bp, Arabidopsis thaliana
acttttggtctgtggcg

SEQ ID NO: 27008 - DNA, 17 bp, Arabidopsis thaliana
acttttgtagctcatct

SEQ ID NO: 27009 - DNA, 17 bp, Arabidopsis thaliana
acttttgtggactatga

SEQ ID NO: 27010 - DNA, 17 bp, Arabidopsis thaliana
acttttgtgggctggct

SEQ ID NO: 27011 - DNA, 17 bp, Arabidopsis thaliana
actttttaaccttccac

SEQ ID NO: 27012 - DNA, 17 bp, Arabidopsis thaliana
actttttaacttagcct

SEQ ID NO: 27013 - DNA, 17 bp, Arabidopsis thaliana
actttttaagatcgggt

SEQ ID NO: 27014 - DNA, 17 bp, Arabidopsis thaliana
actttttacaaactgtt

SEQ ID NO: 27015 - DNA, 17 bp, Arabidopsis thaliana
actttttagaccgtgag

SEQ ID NO: 27016 - DNA, 17 bp, Arabidopsis thaliana
actttttatcttagatc

SEQ ID NO: 27017 - DNA, 17 bp, Arabidopsis thaliana
actttttcaagcattgt

SEQ ID NO: 27018 - DNA, 17 bp, Arabidopsis thaliana
actttttcattaaactt

SEQ ID NO: 27019 - DNA, 17 bp, Arabidopsis thaliana
actttttcatttctcgc

SEQ ID NO: 27020 - DNA, 17 bp, Arabidopsis thaliana
actttttccgctttgtt

SEQ ID NO: 27021 - DNA, 17 bp, Arabidopsis thaliana
actttttcgactcacct

SEQ ID NO: 27022 - DNA, 17 bp, Arabidopsis thaliana
actttttcgcagatagt

SEQ ID NO: 27023 - DNA, 17 bp, Arabidopsis thaliana
actttttcgggcattta

SEQ ID NO: 27024 - DNA, 17 bp, Arabidopsis thaliana
actttttcgggcatttt

SEQ ID NO: 27025 - DNA, 17 bp, Arabidopsis thaliana
actttttcgggcctttt

SEQ ID NO: 27026 - DNA, 17 bp, Arabidopsis thaliana
actttttcgttgtgcag

SEQ ID NO: 27027 - DNA, 17 bp, Arabidopsis thaliana
actttttctaaatggtc

SEQ ID NO: 27028 - DNA, 17 bp, Arabidopsis thaliana
actttttctactatcct

SEQ ID NO: 27029 - DNA, 17 bp, Arabidopsis thaliana
actttttctgcagttga

SEQ ID NO: 27030 - DNA, 17 bp, Arabidopsis thaliana
actttttctgtcaacca

SEQ ID NO: 27031 - DNA, 17 bp, Arabidopsis thaliana
actttttcttcaggcat

SEQ ID NO: 27032 - DNA, 17 bp, Arabidopsis thaliana
actttttgaaagttcag

SEQ ID NO: 27033 - DNA, 17 bp, Arabidopsis thaliana
actttttgcatgtgagg

SEQ ID NO: 27034 - DNA, 17 bp, Arabidopsis thaliana
actttttgcggggttta

SEQ ID NO: 27035 - DNA, 17 bp, Arabidopsis thaliana
actttttgcttacagtt

SEQ ID NO: 27036 - DNA, 17 bp, Arabidopsis thaliana
actttttggagaaggat

SEQ ID NO: 27037 - DNA, 17 bp, Arabidopsis thaliana
actttttggatacagtg

SEQ ID NO: 27038 - DNA, 17 bp, Arabidopsis thaliana
actttttggtgaagttt

SEQ ID NO: 27039 - DNA, 17 bp, Arabidopsis thaliana
actttttgtacgacgta

SEQ ID NO: 27040 - DNA, 17 bp, Arabidopsis thaliana
acttttttaccatccgt

SEQ ID NO: 27041 - DNA, 17 bp, Arabidopsis thaliana
acttttttagcaactgc

SEQ ID NO: 27042 - DNA, 17 bp, Arabidopsis thaliana
acttttttaggtcgccg

SEQ ID NO: 27043 - DNA, 17 bp, Arabidopsis thaliana
acttttttaggttgccg

SEQ ID NO: 27044 - DNA, 17 bp, Arabidopsis thaliana
acttttttattagccgg

SEQ ID NO: 27045 - DNA, 17 bp, Arabidopsis thaliana
acttttttcacaaataa

SEQ ID NO: 27046 - DNA, 17 bp, Arabidopsis thaliana
acttttttgcgacgaca

SEQ ID NO: 27047 - DNA, 17 bp, Arabidopsis thaliana
acttttttgggcatttt

SEQ ID NO: 27048 - DNA, 17 bp, Arabidopsis thaliana
acttttttgggcctttt

SEQ ID NO: 27049 - DNA, 17 bp, Arabidopsis thaliana
acttttttgttgtcttt

SEQ ID NO: 27050 - DNA, 17 bp, Arabidopsis thaliana
actttttttctgggtgg

SEQ ID NO: 27051 - DNA, 17 bp, Arabidopsis thaliana
actttttttgccatgga

SEQ ID NO: 27052 - DNA, 17 bp, Arabidopsis thaliana
actttttttgggtcgca

SEQ ID NO: 27053 - DNA, 17 bp, Arabidopsis thaliana
actttttttgtcaacca

SEQ ID NO: 27054 - DNA, 17 bp, Arabidopsis thaliana
agaaaaaactctggtat

SEQ ID NO: 27055 - DNA, 17 bp, Arabidopsis thaliana
agaaaaacgattggtac

SEQ ID NO: 27056 - DNA, 17 bp, Arabidopsis thaliana
agaaaaacggcttagac

SEQ ID NO: 27057 - DNA, 17 bp, Arabidopsis thaliana
agaaaaactaaaccgaa

SEQ ID NO: 27058 - DNA, 17 bp, Arabidopsis thaliana
agaaaaactggatggag

SEQ ID NO: 27059 - DNA, 17 bp, Arabidopsis thaliana
agaaaaacttattccgt

SEQ ID NO: 27060 - DNA, 17 bp, Arabidopsis thaliana
agaaaaagagtgtggtc

SEQ ID NO: 27061 - DNA, 17 bp, Arabidopsis thaliana
agaaaaagcctctgacg

SEQ ID NO: 27062 - DNA, 17 bp, Arabidopsis thaliana
agaaaaagtttacgcac

SEQ ID NO: 27063 - DNA, 17 bp, Arabidopsis thaliana
agaaaaagtttcagaca

SEQ ID NO: 27064 - DNA, 17 bp, Arabidopsis thaliana
agaaaaataacgttgat

SEQ ID NO: 27065 - DNA, 17 bp, Arabidopsis thaliana
agaaaaatagattcggc

SEQ ID NO: 27066 - DNA, 17 bp, Arabidopsis thaliana
agaaaaatccgcgtcgg

SEQ ID NO: 27067 - DNA, 17 bp, Arabidopsis thaliana
agaaaaatctacggcag

SEQ ID NO: 27068 - DNA, 17 bp, Arabidopsis thaliana
agaaaaatctgtgtttg

SEQ ID NO: 27069 - DNA, 17 bp, Arabidopsis thaliana
agaaaaattagaccgct

SEQ ID NO: 27070 - DNA, 17 bp, Arabidopsis thaliana
agaaaacagctaatttg

SEQ ID NO: 27071 - DNA, 17 bp, Arabidopsis thaliana
agaaaacagtcgcactt

SEQ ID NO: 27072 - DNA, 17 bp, Arabidopsis thaliana
agaaaacatcagatcgc

SEQ ID NO: 27073 - DNA, 17 bp, Arabidopsis thaliana
agaaaacattctaaact

SEQ ID NO: 27074 - DNA, 17 bp, Arabidopsis thaliana
agaaaaccacagttgct

SEQ ID NO: 27075 - DNA, 17 bp, Arabidopsis thaliana
agaaaaccctagcgcct

SEQ ID NO: 27076 - DNA, 17 bp, Arabidopsis thaliana
agaaaaccctgctgcga

SEQ ID NO: 27077 - DNA, 17 bp, Arabidopsis thaliana
agaaaaccgcagcggac

SEQ ID NO: 27078 - DNA, 17 bp, Arabidopsis thaliana
agaaaaccgcagcggct

SEQ ID NO: 27079 - DNA, 17 bp, Arabidopsis thaliana
agaaaaccgctgcggac

SEQ ID NO: 27080 - DNA, 17 bp, Arabidopsis thaliana
agaaaaccgtacaagct

SEQ ID NO: 27081 - DNA, 17 bp, Arabidopsis thaliana
agaaaaccgttgcgaac

SEQ ID NO: 27082 - DNA, 17 bp, Arabidopsis thaliana
agaaaaccgttgcggac

SEQ ID NO: 27083 - DNA, 17 bp, Arabidopsis thaliana
agaaaacctctcataag

SEQ ID NO: 27084 - DNA, 17 bp, Arabidopsis thaliana
agaaaacctgcattttg

SEQ ID NO: 27085 - DNA, 17 bp, Arabidopsis thaliana
agaaaacgcaacagacg

SEQ ID NO: 27086 - DNA, 17 bp, Arabidopsis thaliana
agaaaacgcggtaagta

SEQ ID NO: 27087 - DNA, 17 bp, Arabidopsis thaliana
agaaaacggtgcaggag

SEQ ID NO: 27088 - DNA, 17 bp, Arabidopsis thaliana
agaaaactaagaccttt

SEQ ID NO: 27089 - DNA, 17 bp, Arabidopsis thaliana
agaaaactatctgacgg

SEQ ID NO: 27090 - DNA, 17 bp, Arabidopsis thaliana
agaaaactatgagcggt

SEQ ID NO: 27091 - DNA, 17 bp, Arabidopsis thaliana
agaaaactatttacggg

SEQ ID NO: 27092 - DNA, 17 bp, Arabidopsis thaliana
agaaaactcatcaggct

SEQ ID NO: 27093 - DNA, 17 bp, Arabidopsis thaliana
agaaaactcctgatctc

SEQ ID NO: 27094 - DNA, 17 bp, Arabidopsis thaliana
agaaaactcggaatcac

SEQ ID NO: 27095 - DNA, 17 bp, Arabidopsis thaliana
agaaaactcggttggtg

SEQ ID NO: 27096 - DNA, 17 bp, Arabidopsis thaliana
agaaaactctagaactt

SEQ ID NO: 27097 - DNA, 17 bp, Arabidopsis thaliana
agaaaactctccctgaa

SEQ ID NO: 27098 - DNA, 17 bp, Arabidopsis thaliana
agaaaactgaggttgtg

SEQ ID NO: 27099 - DNA, 17 bp, Arabidopsis thaliana
agaaaactgctaaagat

SEQ ID NO: 27100 - DNA, 17 bp, Arabidopsis thaliana
agaaaactgttgcggac

SEQ ID NO: 27101 - DNA, 17 bp, Arabidopsis thaliana
agaaaacttgattcatc

SEQ ID NO: 27102 - DNA, 17 bp, Arabidopsis thaliana
agaaaacttgattgatt

SEQ ID NO: 27103 - DNA, 17 bp, Arabidopsis thaliana
agaaaacttggatccgg

SEQ ID NO: 27104 - DNA, 17 bp, Arabidopsis thaliana
agaaaacttgggcttac

SEQ ID NO: 27105 - DNA, 17 bp, Arabidopsis thaliana
agaaaactttctggaga

SEQ ID NO: 27106 - DNA, 17 bp, Arabidopsis thaliana
agaaaactttggcttgt

SEQ ID NO: 27107 - DNA, 17 bp, Arabidopsis thaliana
agaaaagacatagttcg

SEQ ID NO: 27108 - DNA, 17 bp, Arabidopsis thaliana
agaaaagacattggaca

SEQ ID NO: 27109 - DNA, 17 bp, Arabidopsis thaliana
agaaaagaccagctgct

SEQ ID NO: 27110 - DNA, 17 bp, Arabidopsis thaliana
agaaaagactcgattag

SEQ ID NO: 27111 - DNA, 17 bp, Arabidopsis thaliana
agaaaagacttacggcg

SEQ ID NO: 27112 - DNA, 17 bp, Arabidopsis thaliana
agaaaagatgttcaacg

SEQ ID NO: 27113 - DNA, 17 bp, Arabidopsis thaliana
agaaaagcgaccggata

SEQ ID NO: 27114 - DNA, 17 bp, Arabidopsis thaliana
agaaaagcgctgtgtac

SEQ ID NO: 27115 - DNA, 17 bp, Arabidopsis thaliana
agaaaagcggtctgtca

SEQ ID NO: 27116 - DNA, 17 bp, Arabidopsis thaliana
agaaaagcggttttgta

SEQ ID NO: 27117 - DNA, 17 bp, Arabidopsis thaliana
agaaaagctcaaattct

SEQ ID NO: 27118 - DNA, 17 bp, Arabidopsis thaliana
agaaaaggaatcgtcgg

SEQ ID NO: 27119 - DNA, 17 bp, Arabidopsis thaliana
agaaaaggcactttggc

SEQ ID NO: 27120 - DNA, 17 bp, Arabidopsis thaliana
agaaaaggccgtctctg

SEQ ID NO: 27121 - DNA, 17 bp, Arabidopsis thaliana
agaaaaggtggtggcgg

SEQ ID NO: 27122 - DNA, 17 bp, Arabidopsis thaliana
agaaaagtacggtgcgg

SEQ ID NO: 27123 - DNA, 17 bp, Arabidopsis thaliana
agaaaagtatggactga

SEQ ID NO: 27124 - DNA, 17 bp, Arabidopsis thaliana
agaaaagtatggactgg

SEQ ID NO: 27125 - DNA, 17 bp, Arabidopsis thaliana
agaaaagtctcaagctc

SEQ ID NO: 27126 - DNA, 17 bp, Arabidopsis thaliana
agaaaagtggttgagat

SEQ ID NO: 27127 - DNA, 17 bp, Arabidopsis thaliana
agaaaagttaggtctcg

SEQ ID NO: 27128 - DNA, 17 bp, Arabidopsis thaliana
agaaaagttcggcaaga

SEQ ID NO: 27129 - DNA, 17 bp, Arabidopsis thaliana
agaaaagttcggcggct

SEQ ID NO: 27130 - DNA, 17 bp, Arabidopsis thaliana
agaaaataagcccaagc

SEQ ID NO: 27131 - DNA, 17 bp, Arabidopsis thaliana
agaaaataaggcctcgt

SEQ ID NO: 27132 - DNA, 17 bp, Arabidopsis thaliana
agaaaataatgttgctt

SEQ ID NO: 27133 - DNA, 17 bp, Arabidopsis thaliana
agaaaatagtctgagcc

SEQ ID NO: 27134 - DNA, 17 bp, Arabidopsis thaliana
agaaaatccgctgaagc

SEQ ID NO: 27135 - DNA, 17 bp, Arabidopsis thaliana
agaaaatcctattggac

SEQ ID NO: 27136 - DNA, 17 bp, Arabidopsis thaliana
agaaaatcgactgggag

SEQ ID NO: 27137 - DNA, 17 bp, Arabidopsis thaliana
agaaaatcgctgcggac

SEQ ID NO: 27138 - DNA, 17 bp, Arabidopsis thaliana
agaaaatcgttgaccaa

SEQ ID NO: 27139 - DNA, 17 bp, Arabidopsis thaliana
agaaaatctccaacttt

SEQ ID NO: 27140 - DNA, 17 bp, Arabidopsis thaliana
agaaaatctctatgcca

SEQ ID NO: 27141 - DNA, 17 bp, Arabidopsis thaliana
agaaaatctctcagatg

SEQ ID NO: 27142 - DNA, 17 bp, Arabidopsis thaliana
agaaaatgaattgtctt

SEQ ID NO: 27143 - DNA, 17 bp, Arabidopsis thaliana
agaaaatgcatagttag

SEQ ID NO: 27144 - DNA, 17 bp, Arabidopsis thaliana
agaaaatgccatgtcag

SEQ ID NO: 27145 - DNA, 17 bp, Arabidopsis thaliana
agaaaatgccatttgga

SEQ ID NO: 27146 - DNA, 17 bp, Arabidopsis thaliana
agaaaatgcgttgccaa

SEQ ID NO: 27147 - DNA, 17 bp, Arabidopsis thaliana
agaaaatggatagggca

SEQ ID NO: 27148 - DNA, 17 bp, Arabidopsis thaliana
agaaaatgggacccggt

SEQ ID NO: 27149 - DNA, 17 bp, Arabidopsis thaliana
agaaaatgggttggctg

SEQ ID NO: 27150 - DNA, 17 bp, Arabidopsis thaliana
agaaaatggttgaccaa

SEQ ID NO: 27151 - DNA, 17 bp, Arabidopsis thaliana
agaaaatgtatggcttt

SEQ ID NO: 27152 - DNA, 17 bp, Arabidopsis thaliana
agaaaatgtcgtctttc

SEQ ID NO: 27153 - DNA, 17 bp, Arabidopsis thaliana
agaaaatgtgccgactt

SEQ ID NO: 27154 - DNA, 17 bp, Arabidopsis thaliana
agaaaatgttcgggttc

SEQ ID NO: 27155 - DNA, 17 bp, Arabidopsis thaliana
agaaaatgtttggcaag

SEQ ID NO: 27156 - DNA, 17 bp, Arabidopsis thaliana
agaaaattacgtgcgtg

SEQ ID NO: 27157 - DNA, 17 bp, Arabidopsis thaliana
agaaaattatttggtca

SEQ ID NO: 27158 - DNA, 17 bp, Arabidopsis thaliana
agaaaattcatctttgt

SEQ ID NO: 27159 - DNA, 17 bp, Arabidopsis thaliana
agaaaattgccatttac

SEQ ID NO: 27160 - DNA, 17 bp, Arabidopsis thaliana
agaaaattgtgagcgag

SEQ ID NO: 27161 - DNA, 17 bp, Arabidopsis thaliana
agaaaattgtttgacga

SEQ ID NO: 27162 - DNA, 17 bp, Arabidopsis thaliana
agaaaatttcatcgctg

SEQ ID NO: 27163 - DNA, 17 bp, Arabidopsis thaliana
agaaaatttggaggtga

SEQ ID NO: 27164 - DNA, 17 bp, Arabidopsis thaliana
agaaaattttattccat

SEQ ID NO: 27165 - DNA, 17 bp, Arabidopsis thaliana
agaaacaaaacgttgac

SEQ ID NO: 27166 - DNA, 17 bp, Arabidopsis thaliana
agaaacaaaagcgttgg

SEQ ID NO: 27167 - DNA, 17 bp, Arabidopsis thaliana
agaaacaaaggtcgctg

SEQ ID NO: 27168 - DNA, 17 bp, Arabidopsis thaliana
agaaacaactggtgtgc

SEQ ID NO: 27169 - DNA, 17 bp, Arabidopsis thaliana
agaaacaaggaaaagtg

SEQ ID NO: 27170 - DNA, 17 bp, Arabidopsis thaliana
agaaacaagttgctagg

SEQ ID NO: 27171 - DNA, 17 bp, Arabidopsis thaliana
agaaacaatcgttcggg

SEQ ID NO: 27172 - DNA, 17 bp, Arabidopsis thaliana
agaaacaatgtgaccca

SEQ ID NO: 27173 - DNA, 17 bp, Arabidopsis thaliana
agaaacaattgaatgtg

SEQ ID NO: 27174 - DNA, 17 bp, Arabidopsis thaliana
agaaacacagagattag

SEQ ID NO: 27175 - DNA, 17 bp, Arabidopsis thaliana
agaaacacagttacaaa

SEQ ID NO: 27176 - DNA, 17 bp, Arabidopsis thaliana
agaaacacattgctctc

SEQ ID NO: 27177 - DNA, 17 bp, Arabidopsis thaliana
agaaacaccccgcctta

SEQ ID NO: 27178 - DNA, 17 bp, Arabidopsis thaliana
agaaacacctcggactt

SEQ ID NO: 27179 - DNA, 17 bp, Arabidopsis thaliana
agaaacactcgacctct

SEQ ID NO: 27180 - DNA, 17 bp, Arabidopsis thaliana
agaaacagagaaagagg

SEQ ID NO: 27181 - DNA, 17 bp, Arabidopsis thaliana
agaaacagagccaacca

SEQ ID NO: 27182 - DNA, 17 bp, Arabidopsis thaliana
agaaacagagccgacca

SEQ ID NO: 27183 - DNA, 17 bp, Arabidopsis thaliana
agaaacagagtgtgtaa

SEQ ID NO: 27184 - DNA, 17 bp, Arabidopsis thaliana
agaaacaggagcttgac

SEQ ID NO: 27185 - DNA, 17 bp, Arabidopsis thaliana
agaaacaggatctccgc

SEQ ID NO: 27186 - DNA, 17 bp, Arabidopsis thaliana
agaaacagtgaattgcg

SEQ ID NO: 27187 - DNA, 17 bp, Arabidopsis thaliana
agaaacagtgacccgga

SEQ ID NO: 27188 - DNA, 17 bp, Arabidopsis thaliana
agaaacagtggtaacta

SEQ ID NO: 27189 - DNA, 17 bp, Arabidopsis thaliana
agaaacagttccataga

SEQ ID NO: 27190 - DNA, 17 bp, Arabidopsis thaliana
agaaacatttgatcgtt

SEQ ID NO: 27191 - DNA, 17 bp, Arabidopsis thaliana
agaaaccaagcgcagtc

SEQ ID NO: 27192 - DNA, 17 bp, Arabidopsis thaliana
agaaaccaccactggac

SEQ ID NO: 27193 - DNA, 17 bp, Arabidopsis thaliana
agaaaccactcattcac

SEQ ID NO: 27194 - DNA, 17 bp, Arabidopsis thaliana
agaaaccactcattcgc

SEQ ID NO: 27195 - DNA, 17 bp, Arabidopsis thaliana
agaaaccactgcaaatc

SEQ ID NO: 27196 - DNA, 17 bp, Arabidopsis thaliana
agaaaccaggtggtggc

SEQ ID NO: 27197 - DNA, 17 bp, Arabidopsis thaliana
agaaaccatcagaggta

SEQ ID NO: 27198 - DNA, 17 bp, Arabidopsis thaliana
agaaacccacttaagga

SEQ ID NO: 27199 - DNA, 17 bp, Arabidopsis thaliana
agaaacccataggcctg

SEQ ID NO: 27200 - DNA, 17 bp, Arabidopsis thaliana
agaaacccctctaccca

SEQ ID NO: 27201 - DNA, 17 bp, Arabidopsis thaliana
agaaaccgacagaacta

SEQ ID NO: 27202 - DNA, 17 bp, Arabidopsis thaliana
agaaaccgacagaactc

SEQ ID NO: 27203 - DNA, 17 bp, Arabidopsis thaliana
agaaaccgctagatacc

SEQ ID NO: 27204 - DNA, 17 bp, Arabidopsis thaliana
agaaaccgctcggttat

SEQ ID NO: 27205 - DNA, 17 bp, Arabidopsis thaliana
agaaaccggatcttaaa

SEQ ID NO: 27206 - DNA, 17 bp, Arabidopsis thaliana
agaaaccggcccaccga

SEQ ID NO: 27207 - DNA, 17 bp, Arabidopsis thaliana
agaaaccgtcacactac

SEQ ID NO: 27208 - DNA, 17 bp, Arabidopsis thaliana
agaaaccgtttttcgca

SEQ ID NO: 27209 - DNA, 17 bp, Arabidopsis thaliana
agaaacctaaccttcca

SEQ ID NO: 27210 - DNA, 17 bp, Arabidopsis thaliana
agaaacctaaccttccg

SEQ ID NO: 27211 - DNA, 17 bp, Arabidopsis thaliana
agaaacctagtttagca

SEQ ID NO: 27212 - DNA, 17 bp, Arabidopsis thaliana
agaaacctccctccgta

SEQ ID NO: 27213 - DNA, 17 bp, Arabidopsis thaliana
agaaacgacatcacttc

SEQ ID NO: 27214 - DNA, 17 bp, Arabidopsis thaliana
agaaacgataacgacag

SEQ ID NO: 27215 - DNA, 17 bp, Arabidopsis thaliana
agaaacgatagtcggtt

SEQ ID NO: 27216 - DNA, 17 bp, Arabidopsis thaliana
agaaacgatgattgggc

SEQ ID NO: 27217 - DNA, 17 bp, Arabidopsis thaliana
agaaacgattggctggc

SEQ ID NO: 27218 - DNA, 17 bp, Arabidopsis thaliana
agaaacgcgttggctaa

SEQ ID NO: 27219 - DNA, 17 bp, Arabidopsis thaliana
agaaacgcgttttggct

SEQ ID NO: 27220 - DNA, 17 bp, Arabidopsis thaliana
agaaacgctatgttacg

SEQ ID NO: 27221 - DNA, 17 bp, Arabidopsis thaliana
agaaacgctgatggaga

SEQ ID NO: 27222 - DNA, 17 bp, Arabidopsis thaliana
agaaacgcttctgcctt

SEQ ID NO: 27223 - DNA, 17 bp, Arabidopsis thaliana
agaaacggagataacgc

SEQ ID NO: 27224 - DNA, 17 bp, Arabidopsis thaliana
agaaacggcgacctcta

SEQ ID NO: 27225 - DNA, 17 bp, Arabidopsis thaliana
agaaacggctcatctcg

SEQ ID NO: 27226 - DNA, 17 bp, Arabidopsis thaliana
agaaacgggtcatctcg

SEQ ID NO: 27227 - DNA, 17 bp, Arabidopsis thaliana
agaaacgggttggctaa

SEQ ID NO: 27228 - DNA, 17 bp, Arabidopsis thaliana
agaaacgggttttggct

SEQ ID NO: 27229 - DNA, 17 bp, Arabidopsis thaliana
agaaacggtctatttcc

SEQ ID NO: 27230 - DNA, 17 bp, Arabidopsis thaliana
agaaacggtctattttc

SEQ ID NO: 27231 - DNA, 17 bp, Arabidopsis thaliana
agaaacggtttgccact

SEQ ID NO: 27232 - DNA, 17 bp, Arabidopsis thaliana
agaaacgtagcagggct

SEQ ID NO: 27233 - DNA, 17 bp, Arabidopsis thaliana
agaaacgtcgcaagcta

SEQ ID NO: 27234 - DNA, 17 bp, Arabidopsis thaliana
agaaacgtctatctttg

SEQ ID NO: 27235 - DNA, 17 bp, Arabidopsis thaliana
agaaacgtctctgactc

SEQ ID NO: 27236 - DNA, 17 bp, Arabidopsis thaliana
agaaacgtctctgcctt

SEQ ID NO: 27237 - DNA, 17 bp, Arabidopsis thaliana
agaaacgtgatggtggc

SEQ ID NO: 27238 - DNA, 17 bp, Arabidopsis thaliana
agaaacgtgcggccgag

SEQ ID NO: 27239 - DNA, 17 bp, Arabidopsis thaliana
agaaacgtgttttggct

SEQ ID NO: 27240 - DNA, 17 bp, Arabidopsis thaliana
agaaactaaaccgaaat

SEQ ID NO: 27241 - DNA, 17 bp, Arabidopsis thaliana
agaaactaaacgttgac

SEQ ID NO: 27242 - DNA, 17 bp, Arabidopsis thaliana
agaaactaaagccatga

SEQ ID NO: 27243 - DNA, 17 bp, Arabidopsis thaliana
agaaactaaccgcctaa

SEQ ID NO: 27244 - DNA, 17 bp, Arabidopsis thaliana
agaaactaagtgtcaga

SEQ ID NO: 27245 - DNA, 17 bp, Arabidopsis thaliana
agaaactacagagactt

SEQ ID NO: 27246 - DNA, 17 bp, Arabidopsis thaliana
agaaactacccgggtgt

SEQ ID NO: 27247 - DNA, 17 bp, Arabidopsis thaliana
agaaactacctacagca

SEQ ID NO: 27248 - DNA, 17 bp, Arabidopsis thaliana
agaaactactgctggag

SEQ ID NO: 27249 - DNA, 17 bp, Arabidopsis thaliana
agaaactagagggcggc

SEQ ID NO: 27250 - DNA, 17 bp, Arabidopsis thaliana
agaaactagccccgcgg

SEQ ID NO: 27251 - DNA, 17 bp, Arabidopsis thaliana
agaaactatccgctaga

SEQ ID NO: 27252 - DNA, 17 bp, Arabidopsis thaliana
agaaactatggttagaa

SEQ ID NO: 27253 - DNA, 17 bp, Arabidopsis thaliana
agaaactatgtccaagc

SEQ ID NO: 27254 - DNA, 17 bp, Arabidopsis thaliana
agaaactattctcaatc

SEQ ID NO: 27255 - DNA, 17 bp, Arabidopsis thaliana
agaaactcacttaatga

SEQ ID NO: 27256 - DNA, 17 bp, Arabidopsis thaliana
agaaactcagaatcaaa

SEQ ID NO: 27257 - DNA, 17 bp, Arabidopsis thaliana
agaaactcagacgtggc

SEQ ID NO: 27258 - DNA, 17 bp, Arabidopsis thaliana
agaaactcagtcccgtt

SEQ ID NO: 27259 - DNA, 17 bp, Arabidopsis thaliana
agaaactcgagtggtgc

SEQ ID NO: 27260 - DNA, 17 bp, Arabidopsis thaliana
agaaactcggtgacaaa

SEQ ID NO: 27261 - DNA, 17 bp, Arabidopsis thaliana
agaaactcgtcgataaa

SEQ ID NO: 27262 - DNA, 17 bp, Arabidopsis thaliana
agaaactctacgggtag

SEQ ID NO: 27263 - DNA, 17 bp, Arabidopsis thaliana
agaaactcttagatact

SEQ ID NO: 27264 - DNA, 17 bp, Arabidopsis thaliana
agaaactctttgatgac

SEQ ID NO: 27265 - DNA, 17 bp, Arabidopsis thaliana
agaaactgaaattttta

SEQ ID NO: 27266 - DNA, 17 bp, Arabidopsis thaliana
agaaactgaaatttttg

SEQ ID NO: 27267 - DNA, 17 bp, Arabidopsis thaliana
agaaactgaatttcacg

SEQ ID NO: 27268 - DNA, 17 bp, Arabidopsis thaliana
agaaactgaatttcact

SEQ ID NO: 27269 - DNA, 17 bp, Arabidopsis thaliana
agaaactgaccagaatc

SEQ ID NO: 27270 - DNA, 17 bp, Arabidopsis thaliana
agaaactgactttacag

SEQ ID NO: 27271 - DNA, 17 bp, Arabidopsis thaliana
agaaactgagcaatgtc

SEQ ID NO: 27272 - DNA, 17 bp, Arabidopsis thaliana
agaaactggttgcgtgg

SEQ ID NO: 27273 - DNA, 17 bp, Arabidopsis thaliana
agaaactgtaaacctca

SEQ ID NO: 27274 - DNA, 17 bp, Arabidopsis thaliana
agaaactgtgaaggggg

SEQ ID NO: 27275 - DNA, 17 bp, Arabidopsis thaliana
agaaactgtgttttctg

SEQ ID NO: 27276 - DNA, 17 bp, Arabidopsis thaliana
agaaacttaagtctcca

SEQ ID NO: 27277 - DNA, 17 bp, Arabidopsis thaliana
agaaacttcaatggctt

SEQ ID NO: 27278 - DNA, 17 bp, Arabidopsis thaliana
agaaacttggcatttgc

SEQ ID NO: 27279 - DNA, 17 bp, Arabidopsis thaliana
agaaacttgtaaggtcc

SEQ ID NO: 27280 - DNA, 17 bp, Arabidopsis thaliana
agaaactttctacactc

SEQ ID NO: 27281 - DNA, 17 bp, Arabidopsis thaliana
agaaactttgatcagtc

SEQ ID NO: 27282 - DNA, 17 bp, Arabidopsis thaliana
agaaactttggcagctt

SEQ ID NO: 27283 - DNA, 17 bp, Arabidopsis thaliana
agaaactttggtccagg

SEQ ID NO: 27284 - DNA, 17 bp, Arabidopsis thaliana
agaaagaacatctcgag

SEQ ID NO: 27285 - DNA, 17 bp, Arabidopsis thaliana
agaaagaacttttggtg

SEQ ID NO: 27286 - DNA, 17 bp, Arabidopsis thaliana
agaaagacccggggccg

SEQ ID NO: 27287 - DNA, 17 bp, Arabidopsis thaliana
agaaagacgatctacga

SEQ ID NO: 27288 - DNA, 17 bp, Arabidopsis thaliana
agaaagacgtgttgctc

SEQ ID NO: 27289 - DNA, 17 bp, Arabidopsis thaliana
agaaagactcaggcgtt

SEQ ID NO: 27290 - DNA, 17 bp, Arabidopsis thaliana
agaaagacttgacctct

SEQ ID NO: 27291 - DNA, 17 bp, Arabidopsis thaliana
agaaagagggtcaccct

SEQ ID NO: 27292 - DNA, 17 bp, Arabidopsis thaliana
agaaagagtttcaccgg

SEQ ID NO: 27293 - DNA, 17 bp, Arabidopsis thaliana
agaaagatcacggtcgt

SEQ ID NO: 27294 - DNA, 17 bp, Arabidopsis thaliana
agaaagatcgccgacgg

SEQ ID NO: 27295 - DNA, 17 bp, Arabidopsis thaliana
agaaagatctagaagat

SEQ ID NO: 27296 - DNA, 17 bp, Arabidopsis thaliana
agaaagatcttctctaa

SEQ ID NO: 27297 - DNA, 17 bp, Arabidopsis thaliana
agaaagatttgctcctt

SEQ ID NO: 27298 - DNA, 17 bp, Arabidopsis thaliana
agaaagcaatggttgta

SEQ ID NO: 27299 - DNA, 17 bp, Arabidopsis thaliana
agaaagcagagcgttct

SEQ ID NO: 27300 - DNA, 17 bp, Arabidopsis thaliana
agaaagcaggccattct

SEQ ID NO: 27301 - DNA, 17 bp, Arabidopsis thaliana
agaaagccaccggaacc

SEQ ID NO: 27302 - DNA, 17 bp, Arabidopsis thaliana
agaaagcccattatcgc

SEQ ID NO: 27303 - DNA, 17 bp, Arabidopsis thaliana
agaaagccgatgggtcc

SEQ ID NO: 27304 - DNA, 17 bp, Arabidopsis thaliana
agaaagcctccttggtt

SEQ ID NO: 27305 - DNA, 17 bp, Arabidopsis thaliana
agaaagcgcaactccct

SEQ ID NO: 27306 - DNA, 17 bp, Arabidopsis thaliana
agaaagcgcaactcctt

SEQ ID NO: 27307 - DNA, 17 bp, Arabidopsis thaliana
agaaagcgcaggagtgt

SEQ ID NO: 27308 - DNA, 17 bp, Arabidopsis thaliana
agaaagcgctggagtat

SEQ ID NO: 27309 - DNA, 17 bp, Arabidopsis thaliana
agaaagcgctggagtga

SEQ ID NO: 27310 - DNA, 17 bp, Arabidopsis thaliana
agaaagcgctggagtgt

SEQ ID NO: 27311 - DNA, 17 bp, Arabidopsis thaliana
agaaagcggatcggacg

SEQ ID NO: 27312 - DNA, 17 bp, Arabidopsis thaliana
agaaagcgggtcattct

SEQ ID NO: 27313 - DNA, 17 bp, Arabidopsis thaliana
agaaagcgtacagggta

SEQ ID NO: 27314 - DNA, 17 bp, Arabidopsis thaliana
agaaagctaagaaaaca

SEQ ID NO: 27315 - DNA, 17 bp, Arabidopsis thaliana
agaaagctagggtttgc

SEQ ID NO: 27316 - DNA, 17 bp, Arabidopsis thaliana
agaaagctatggggcgg

SEQ ID NO: 27317 - DNA, 17 bp, Arabidopsis thaliana
agaaagctatttactgc

SEQ ID NO: 27318 - DNA, 17 bp, Arabidopsis thaliana
agaaagctgatgtggct

SEQ ID NO: 27319 - DNA, 17 bp, Arabidopsis thaliana
agaaagctgcgagtcct

SEQ ID NO: 27320 - DNA, 17 bp, Arabidopsis thaliana
agaaagctgcgtttgac

SEQ ID NO: 27321 - DNA, 17 bp, Arabidopsis thaliana
agaaaggaaatcttcgt

SEQ ID NO: 27322 - DNA, 17 bp, Arabidopsis thaliana
agaaaggaagctatggt

SEQ ID NO: 27323 - DNA, 17 bp, Arabidopsis thaliana
agaaaggagcctaacta

SEQ ID NO: 27324 - DNA, 17 bp, Arabidopsis thaliana
agaaaggatcgtgtgac

SEQ ID NO: 27325 - DNA, 17 bp, Arabidopsis thaliana
agaaaggatggaactgt

SEQ ID NO: 27326 - DNA, 17 bp, Arabidopsis thaliana
agaaaggcctaagtgtg

SEQ ID NO: 27327 - DNA, 17 bp, Arabidopsis thaliana
agaaaggctttggcttt

SEQ ID NO: 27328 - DNA, 17 bp, Arabidopsis thaliana
agaaagggaaatttgca

SEQ ID NO: 27329 - DNA, 17 bp, Arabidopsis thaliana
agaaagggaactttggt

SEQ ID NO: 27330 - DNA, 17 bp, Arabidopsis thaliana
agaaagggggaccaccc

SEQ ID NO: 27331 - DNA, 17 bp, Arabidopsis thaliana
agaaagggttgccttcc

SEQ ID NO: 27332 - DNA, 17 bp, Arabidopsis thaliana
agaaaggtaatgagtca

SEQ ID NO: 27333 - DNA, 17 bp, Arabidopsis thaliana
agaaaggtagttcacga

SEQ ID NO: 27334 - DNA, 17 bp, Arabidopsis thaliana
agaaaggtgaccgacgc

SEQ ID NO: 27335 - DNA, 17 bp, Arabidopsis thaliana
agaaaggttctattgga

SEQ ID NO: 27336 - DNA, 17 bp, Arabidopsis thaliana
agaaaggttgatgtgtc

SEQ ID NO: 27337 - DNA, 17 bp, Arabidopsis thaliana
agaaaggttgatttatc

SEQ ID NO: 27338 - DNA, 17 bp, Arabidopsis thaliana
agaaaggtttccaacgc

SEQ ID NO: 27339 - DNA, 17 bp, Arabidopsis thaliana
agaaagtactcaggccg

SEQ ID NO: 27340 - DNA, 17 bp, Arabidopsis thaliana
agaaagtctcggccttt

SEQ ID NO: 27341 - DNA, 17 bp, Arabidopsis thaliana
agaaagtctgtcagtaa

SEQ ID NO: 27342 - DNA, 17 bp, Arabidopsis thaliana
agaaagtctgtcagttg

SEQ ID NO: 27343 - DNA, 17 bp, Arabidopsis thaliana
agaaagtgaaggttcag

SEQ ID NO: 27344 - DNA, 17 bp, Arabidopsis thaliana
agaaagtgaatcgactc

SEQ ID NO: 27345 - DNA, 17 bp, Arabidopsis thaliana
agaaagtgacaaagtgt

SEQ ID NO: 27346 - DNA, 17 bp, Arabidopsis thaliana
agaaagtgactacatcg

SEQ ID NO: 27347 - DNA, 17 bp, Arabidopsis thaliana
agaaagtgcctcaaacg

SEQ ID NO: 27348 - DNA, 17 bp, Arabidopsis thaliana
agaaagtgctttaacct

SEQ ID NO: 27349 - DNA, 17 bp, Arabidopsis thaliana
agaaagtggagatgtgg

SEQ ID NO: 27350 - DNA, 17 bp, Arabidopsis thaliana
agaaagtgggaccaccg

SEQ ID NO: 27351 - DNA, 17 bp, Arabidopsis thaliana
agaaagtgtcgtctgtc

SEQ ID NO: 27352 - DNA, 17 bp, Arabidopsis thaliana
agaaagttaacaccggc

SEQ ID NO: 27353 - DNA, 17 bp, Arabidopsis thaliana
agaaagttatcgaccgt

SEQ ID NO: 27354 - DNA, 17 bp, Arabidopsis thaliana
agaaagttcagggccga

SEQ ID NO: 27355 - DNA, 17 bp, Arabidopsis thaliana
agaaagttcatgttttt

SEQ ID NO: 27356 - DNA, 17 bp, Arabidopsis thaliana
agaaagttccggcggta

SEQ ID NO: 27357 - DNA, 17 bp, Arabidopsis thaliana
agaaagttctactcgac

SEQ ID NO: 27358 - DNA, 17 bp, Arabidopsis thaliana
agaaagttgcgagtcct

SEQ ID NO: 27359 - DNA, 17 bp, Arabidopsis thaliana
agaaagttgctgcgatt

SEQ ID NO: 27360 - DNA, 17 bp, Arabidopsis thaliana
agaaagttgggtgtgtt

SEQ ID NO: 27361 - DNA, 17 bp, Arabidopsis thaliana
agaaagttggttggttc

SEQ ID NO: 27362 - DNA, 17 bp, Arabidopsis thaliana
agaaagttttcttgcaa

SEQ ID NO: 27363 - DNA, 17 bp, Arabidopsis thaliana
agaaataaaacgttgac

SEQ ID NO: 27364 - DNA, 17 bp, Arabidopsis thaliana
agaaataaatatcgtga

SEQ ID NO: 27365 - DNA, 17 bp, Arabidopsis thaliana
agaaatacaggcggcct

SEQ ID NO: 27366 - DNA, 17 bp, Arabidopsis thaliana
agaaatacaggtggcct

SEQ ID NO: 27367 - DNA, 17 bp, Arabidopsis thaliana
agaaatacgatgagatt

SEQ ID NO: 27368 - DNA, 17 bp, Arabidopsis thaliana
agaaatacgatgggatt

SEQ ID NO: 27369 - DNA, 17 bp, Arabidopsis thaliana
agaaatacggtgcggtt

SEQ ID NO: 27370 - DNA, 17 bp, Arabidopsis thaliana
agaaatactatggattc

SEQ ID NO: 27371 - DNA, 17 bp, Arabidopsis thaliana
agaaatagacactttct

SEQ ID NO: 27372 - DNA, 17 bp, Arabidopsis thaliana
agaaataggcactttct

SEQ ID NO: 27373 - DNA, 17 bp, Arabidopsis thaliana
agaaatatctccgaggt

SEQ ID NO: 27374 - DNA, 17 bp, Arabidopsis thaliana
agaaatatgtcatgggc

SEQ ID NO: 27375 - DNA, 17 bp, Arabidopsis thaliana
agaaatattactgatgg

SEQ ID NO: 27376 - DNA, 17 bp, Arabidopsis thaliana
agaaatatttgcggttg

SEQ ID NO: 27377 - DNA, 17 bp, Arabidopsis thaliana
agaaatatttgctcagc

SEQ ID NO: 27378 - DNA, 17 bp, Arabidopsis thaliana
agaaatatttttctgac

SEQ ID NO: 27379 - DNA, 17 bp, Arabidopsis thaliana
agaaatcaaagtatcca

SEQ ID NO: 27380 - DNA, 17 bp, Arabidopsis thaliana
agaaatcaaagtatttt

SEQ ID NO: 27381 - DNA, 17 bp, Arabidopsis thaliana
agaaatcagctatcact

SEQ ID NO: 27382 - DNA, 17 bp, Arabidopsis thaliana
agaaatcagtttaagcc

SEQ ID NO: 27383 - DNA, 17 bp, Arabidopsis thaliana
agaaatcatcaagaagt

SEQ ID NO: 27384 - DNA, 17 bp, Arabidopsis thaliana
agaaatccagcgaagag

SEQ ID NO: 27385 - DNA, 17 bp, Arabidopsis thaliana
agaaatccgatatccgt

SEQ ID NO: 27386 - DNA, 17 bp, Arabidopsis thaliana
agaaatccggctatgga

SEQ ID NO: 27387 - DNA, 17 bp, Arabidopsis thaliana
agaaatcctctctggat

SEQ ID NO: 27388 - DNA, 17 bp, Arabidopsis thaliana
agaaatcgaatccggat

SEQ ID NO: 27389 - DNA, 17 bp, Arabidopsis thaliana
agaaatcgaatccgggt

SEQ ID NO: 27390 - DNA, 17 bp, Arabidopsis thaliana
agaaatcgattttgttc

SEQ ID NO: 27391 - DNA, 17 bp, Arabidopsis thaliana
agaaatcgccagatccg

SEQ ID NO: 27392 - DNA, 17 bp, Arabidopsis thaliana
agaaatcgccgaataag

SEQ ID NO: 27393 - DNA, 17 bp, Arabidopsis thaliana
agaaatcggtgatacca

SEQ ID NO: 27394 - DNA, 17 bp, Arabidopsis thaliana
agaaatcgttgtggata

SEQ ID NO: 27395 - DNA, 17 bp, Arabidopsis thaliana
agaaatctaggacatgt

SEQ ID NO: 27396 - DNA, 17 bp, Arabidopsis thaliana
agaaatctagtttttac

SEQ ID NO: 27397 - DNA, 17 bp, Arabidopsis thaliana
agaaatctatcttttgg

SEQ ID NO: 27398 - DNA, 17 bp, Arabidopsis thaliana
agaaatctctcgactgt

SEQ ID NO: 27399 - DNA, 17 bp, Arabidopsis thaliana
agaaatctgatggagat

SEQ ID NO: 27400 - DNA, 17 bp, Arabidopsis thaliana
agaaatctgccattgat

SEQ ID NO: 27401 - DNA, 17 bp, Arabidopsis thaliana
agaaatgaaggatcaaa

SEQ ID NO: 27402 - DNA, 17 bp, Arabidopsis thaliana
agaaatgacgtcgtttg

SEQ ID NO: 27403 - DNA, 17 bp, Arabidopsis thaliana
agaaatgagcgatggat

SEQ ID NO: 27404 - DNA, 17 bp, Arabidopsis thaliana
agaaatgaggagttgca

SEQ ID NO: 27405 - DNA, 17 bp, Arabidopsis thaliana
agaaatgaggtccctcg

SEQ ID NO: 27406 - DNA, 17 bp, Arabidopsis thaliana
agaaatgagtacttttt

SEQ ID NO: 27407 - DNA, 17 bp, Arabidopsis thaliana
agaaatgagtccgatca

SEQ ID NO: 27408 - DNA, 17 bp, Arabidopsis thaliana
agaaatgatgtccaagc

SEQ ID NO: 27409 - DNA, 17 bp, Arabidopsis thaliana
agaaatgattggctgcc

SEQ ID NO: 27410 - DNA, 17 bp, Arabidopsis thaliana
agaaatgattggctggc

SEQ ID NO: 27411 - DNA, 17 bp, Arabidopsis thaliana
agaaatgcagacggtat

SEQ ID NO: 27412 - DNA, 17 bp, Arabidopsis thaliana
agaaatgcagattcgat

SEQ ID NO: 27413 - DNA, 17 bp, Arabidopsis thaliana
agaaatgcagccggtct

SEQ ID NO: 27414 - DNA, 17 bp, Arabidopsis thaliana
agaaatgcagcggcttg

SEQ ID NO: 27415 - DNA, 17 bp, Arabidopsis thaliana
agaaatgcaggcagcca

SEQ ID NO: 27416 - DNA, 17 bp, Arabidopsis thaliana
agaaatgcaggcagcct

SEQ ID NO: 27417 - DNA, 17 bp, Arabidopsis thaliana
agaaatgcaggcgacct

SEQ ID NO: 27418 - DNA, 17 bp, Arabidopsis thaliana
agaaatgcaggcggcct

SEQ ID NO: 27419 - DNA, 17 bp, Arabidopsis thaliana
agaaatgcaggcggctt

SEQ ID NO: 27420 - DNA, 17 bp, Arabidopsis thaliana
agaaatgcaggcggtct

SEQ ID NO: 27421 - DNA, 17 bp, Arabidopsis thaliana
agaaatgcaggcggttt

SEQ ID NO: 27422 - DNA, 17 bp, Arabidopsis thaliana
agaaatgcaggtgactt

SEQ ID NO: 27423 - DNA, 17 bp, Arabidopsis thaliana
agaaatgcatgcggctt

SEQ ID NO: 27424 - DNA, 17 bp, Arabidopsis thaliana
agaaatgcatgcggtct

SEQ ID NO: 27425 - DNA, 17 bp, Arabidopsis thaliana
agaaatgcccgcgagcc

SEQ ID NO: 27426 - DNA, 17 bp, Arabidopsis thaliana
agaaatgcccgcgggcc

SEQ ID NO: 27427 - DNA, 17 bp, Arabidopsis thaliana
agaaatgcctgcgggcc

SEQ ID NO: 27428 - DNA, 17 bp, Arabidopsis thaliana
agaaatgccttctccgg

SEQ ID NO: 27429 - DNA, 17 bp, Arabidopsis thaliana
agaaatgcggttttgag

SEQ ID NO: 27430 - DNA, 17 bp, Arabidopsis thaliana
agaaatgcgtgtctaat

SEQ ID NO: 27431 - DNA, 17 bp, Arabidopsis thaliana
agaaatgcttccatcca

SEQ ID NO: 27432 - DNA, 17 bp, Arabidopsis thaliana
agaaatgcttcgatcca

SEQ ID NO: 27433 - DNA, 17 bp, Arabidopsis thaliana
agaaatggaccaccaca

SEQ ID NO: 27434 - DNA, 17 bp, Arabidopsis thaliana
agaaatggaccagttta

SEQ ID NO: 27435 - DNA, 17 bp, Arabidopsis thaliana
agaaatggctaagtgtt

SEQ ID NO: 27436 - DNA, 17 bp, Arabidopsis thaliana
agaaatggcttatggat

SEQ ID NO: 27437 - DNA, 17 bp, Arabidopsis thaliana
agaaatgggggaacggc

SEQ ID NO: 27438 - DNA, 17 bp, Arabidopsis thaliana
agaaatggttgcctcta

SEQ ID NO: 27439 - DNA, 17 bp, Arabidopsis thaliana
agaaatgtaagtgacct

SEQ ID NO: 27440 - DNA, 17 bp, Arabidopsis thaliana
agaaatgtatgggactc

SEQ ID NO: 27441 - DNA, 17 bp, Arabidopsis thaliana
agaaatgtcctaatggc

SEQ ID NO: 27442 - DNA, 17 bp, Arabidopsis thaliana
agaaatgtctatttgag

SEQ ID NO: 27443 - DNA, 17 bp, Arabidopsis thaliana
agaaatgtctttggacc

SEQ ID NO: 27444 - DNA, 17 bp, Arabidopsis thaliana
agaaatgtgatggtggc

SEQ ID NO: 27445 - DNA, 17 bp, Arabidopsis thaliana
agaaatgtggcgtaact

SEQ ID NO: 27446 - DNA, 17 bp, Arabidopsis thaliana
agaaatgtggcgtaccc

SEQ ID NO: 27447 - DNA, 17 bp, Arabidopsis thaliana
agaaatgttgtctccgg

SEQ ID NO: 27448 - DNA, 17 bp, Arabidopsis thaliana
agaaatgttttaggctc

SEQ ID NO: 27449 - DNA, 17 bp, Arabidopsis thaliana
agaaattacagaacggg

SEQ ID NO: 27450 - DNA, 17 bp, Arabidopsis thaliana
agaaattacgggattcg

SEQ ID NO: 27451 - DNA, 17 bp, Arabidopsis thaliana
agaaattactgacgatc

SEQ ID NO: 27452 - DNA, 17 bp, Arabidopsis thaliana
agaaattagtgagcgtg

SEQ ID NO: 27453 - DNA, 17 bp, Arabidopsis thaliana
agaaattattcgctaac

SEQ ID NO: 27454 - DNA, 17 bp, Arabidopsis thaliana
agaaattcagtgtgtgg

SEQ ID NO: 27455 - DNA, 17 bp, Arabidopsis thaliana
agaaattcatcaagttt

SEQ ID NO: 27456 - DNA, 17 bp, Arabidopsis thaliana
agaaattcatcaatttt

SEQ ID NO: 27457 - DNA, 17 bp, Arabidopsis thaliana
agaaattcatgaagact

SEQ ID NO: 27458 - DNA, 17 bp, Arabidopsis thaliana
agaaattccatctactg

SEQ ID NO: 27459 - DNA, 17 bp, Arabidopsis thaliana
agaaattctcctggtcc

SEQ ID NO: 27460 - DNA, 17 bp, Arabidopsis thaliana
agaaattctctgttgcg

SEQ ID NO: 27461 - DNA, 17 bp, Arabidopsis thaliana
agaaattctctgttgtg

SEQ ID NO: 27462 - DNA, 17 bp, Arabidopsis thaliana
agaaattctgcggcgct

SEQ ID NO: 27463 - DNA, 17 bp, Arabidopsis thaliana
agaaattgactatgtgc

SEQ ID NO: 27464 - DNA, 17 bp, Arabidopsis thaliana
agaaattgctagatacc

SEQ ID NO: 27465 - DNA, 17 bp, Arabidopsis thaliana
agaaattgctatgtaca

SEQ ID NO: 27466 - DNA, 17 bp, Arabidopsis thaliana
agaaattgctgacgtgg

SEQ ID NO: 27467 - DNA, 17 bp, Arabidopsis thaliana
agaaattggtcggactt

SEQ ID NO: 27468 - DNA, 17 bp, Arabidopsis thaliana
agaaattggtgtatgcc

SEQ ID NO: 27469 - DNA, 17 bp, Arabidopsis thaliana
agaaattggttgcgtcg

SEQ ID NO: 27470 - DNA, 17 bp, Arabidopsis thaliana
agaaattgtggaggcga

SEQ ID NO: 27471 - DNA, 17 bp, Arabidopsis thaliana
agaaattgttaggaatg

SEQ ID NO: 27472 - DNA, 17 bp, Arabidopsis thaliana
agaaatttagggtttct

SEQ ID NO: 27473 - DNA, 17 bp, Arabidopsis thaliana
agaaatttcatatctcc

SEQ ID NO: 27474 - DNA, 17 bp, Arabidopsis thaliana
agaaatttcgtgacatc

SEQ ID NO: 27475 - DNA, 17 bp, Arabidopsis thaliana
agaaatttgcgtggttg

SEQ ID NO: 27476 - DNA, 17 bp, Arabidopsis thaliana
agaaattttgggtggac

SEQ ID NO: 27477 - DNA, 17 bp, Arabidopsis thaliana
agaacaaaccggcggat

SEQ ID NO: 27478 - DNA, 17 bp, Arabidopsis thaliana
agaacaaacctgcagat

SEQ ID NO: 27479 - DNA, 17 bp, Arabidopsis thaliana
agaacaaagatctcgga

SEQ ID NO: 27480 - DNA, 17 bp, Arabidopsis thaliana
agaacaacaatggatga

SEQ ID NO: 27481 - DNA, 17 bp, Arabidopsis thaliana
agaacaacagacggtgc

SEQ ID NO: 27482 - DNA, 17 bp, Arabidopsis thaliana
agaacaacagcccacag

SEQ ID NO: 27483 - DNA, 17 bp, Arabidopsis thaliana
agaacaactagcgagct

SEQ ID NO: 27484 - DNA, 17 bp, Arabidopsis thaliana
agaacaactattgggtt

SEQ ID NO: 27485 - DNA, 17 bp, Arabidopsis thaliana
agaacaagaaccggatc

SEQ ID NO: 27486 - DNA, 17 bp, Arabidopsis thaliana
agaacaagaatgggaga

SEQ ID NO: 27487 - DNA, 17 bp, Arabidopsis thaliana
agaacaagagcggatca

SEQ ID NO: 27488 - DNA, 17 bp, Arabidopsis thaliana
agaacaaggaggttcgt

SEQ ID NO: 27489 - DNA, 17 bp, Arabidopsis thaliana
agaacaaggctgcactg

SEQ ID NO: 27490 - DNA, 17 bp, Arabidopsis thaliana
agaacaaggtccattgg

SEQ ID NO: 27491 - DNA, 17 bp, Arabidopsis thaliana
agaacaagttggtgtgg

SEQ ID NO: 27492 - DNA, 17 bp, Arabidopsis thaliana
agaacaagtttttcgaa

SEQ ID NO: 27493 - DNA, 17 bp, Arabidopsis thaliana
agaacaatcaggttttt

SEQ ID NO: 27494 - DNA, 17 bp, Arabidopsis thaliana
agaacaatcccgaccat

SEQ ID NO: 27495 - DNA, 17 bp, Arabidopsis thaliana
agaacaatgacagaatc

SEQ ID NO: 27496 - DNA, 17 bp, Arabidopsis thaliana
agaacaatgagctccaa

SEQ ID NO: 27497 - DNA, 17 bp, Arabidopsis thaliana
agaacaatggcttggtc

SEQ ID NO: 27498 - DNA, 17 bp, Arabidopsis thaliana
agaacaatgtcgttcca

SEQ ID NO: 27499 - DNA, 17 bp, Arabidopsis thaliana
agaacacagtcgcacgt

SEQ ID NO: 27500 - DNA, 17 bp, Arabidopsis thaliana
agaacaccagagcaatg

SEQ ID NO: 27501 - DNA, 17 bp, Arabidopsis thaliana
agaacaccgcttagggc

SEQ ID NO: 27502 - DNA, 17 bp, Arabidopsis thaliana
agaacaccgtggcaaga

SEQ ID NO: 27503 - DNA, 17 bp, Arabidopsis thaliana
agaacacctcttagggg

SEQ ID NO: 27504 - DNA, 17 bp, Arabidopsis thaliana
agaacacctggctaagt

SEQ ID NO: 27505 - DNA, 17 bp, Arabidopsis thaliana
agaacaccttcacggta

SEQ ID NO: 27506 - DNA, 17 bp, Arabidopsis thaliana
agaacagaaagcgctat

SEQ ID NO: 27507 - DNA, 17 bp, Arabidopsis thaliana
agaacagaaccattcag

SEQ ID NO: 27508 - DNA, 17 bp, Arabidopsis thaliana
agaacagaacctcgtgc

SEQ ID NO: 27509 - DNA, 17 bp, Arabidopsis thaliana
agaacagacaatgaggt

SEQ ID NO: 27510 - DNA, 17 bp, Arabidopsis thaliana
agaacagacaatgtggt

SEQ ID NO: 27511 - DNA, 17 bp, Arabidopsis thaliana
agaacagagaagcccaa

SEQ ID NO: 27512 - DNA, 17 bp, Arabidopsis thaliana
agaacagagatgggtcc

SEQ ID NO: 27513 - DNA, 17 bp, Arabidopsis thaliana
agaacagaggagagatt

SEQ ID NO: 27514 - DNA, 17 bp, Arabidopsis thaliana
agaacagaggcctgcgt

SEQ ID NO: 27515 - DNA, 17 bp, Arabidopsis thaliana
agaacagagtcagatct

SEQ ID NO: 27516 - DNA, 17 bp, Arabidopsis thaliana
agaacagatactgaaaa

SEQ ID NO: 27517 - DNA, 17 bp, Arabidopsis thaliana
agaacagatagagtttc

SEQ ID NO: 27518 - DNA, 17 bp, Arabidopsis thaliana
agaacagccctgcaacg

SEQ ID NO: 27519 - DNA, 17 bp, Arabidopsis thaliana
agaacagctaaaagaca

SEQ ID NO: 27520 - DNA, 17 bp, Arabidopsis thaliana
agaacagcttgcgatat

SEQ ID NO: 27521 - DNA, 17 bp, Arabidopsis thaliana
agaacaggggcgtcacg

SEQ ID NO: 27522 - DNA, 17 bp, Arabidopsis thaliana
agaacaggtggcttcta

SEQ ID NO: 27523 - DNA, 17 bp, Arabidopsis thaliana
agaacaggtttatcgga

SEQ ID NO: 27524 - DNA, 17 bp, Arabidopsis thaliana
agaacagtctccgattt

SEQ ID NO: 27525 - DNA, 17 bp, Arabidopsis thaliana
agaacagtctctggtgt

SEQ ID NO: 27526 - DNA, 17 bp, Arabidopsis thaliana
agaacagtgaagatcaa

SEQ ID NO: 27527 - DNA, 17 bp, Arabidopsis thaliana
agaacagttccagaggc

SEQ ID NO: 27528 - DNA, 17 bp, Arabidopsis thaliana
agaacagttgaatgcat

SEQ ID NO: 27529 - DNA, 17 bp, Arabidopsis thaliana
agaacataaagcggtga

SEQ ID NO: 27530 - DNA, 17 bp, Arabidopsis thaliana
agaacataagatggtgc

SEQ ID NO: 27531 - DNA, 17 bp, Arabidopsis thaliana
agaacatatccagtggt

SEQ ID NO: 27532 - DNA, 17 bp, Arabidopsis thaliana
agaacatcagcactatc

SEQ ID NO: 27533 - DNA, 17 bp, Arabidopsis thaliana
agaacatcatgtggttt

SEQ ID NO: 27534 - DNA, 17 bp, Arabidopsis thaliana
agaacatcccaattgtg

SEQ ID NO: 27535 - DNA, 17 bp, Arabidopsis thaliana
agaacatctccatcggc

SEQ ID NO: 27536 - DNA, 17 bp, Arabidopsis thaliana
agaacatctctctgcac

SEQ ID NO: 27537 - DNA, 17 bp, Arabidopsis thaliana
agaacatctttgatagg

SEQ ID NO: 27538 - DNA, 17 bp, Arabidopsis thaliana
agaacatggcaagcact

SEQ ID NO: 27539 - DNA, 17 bp, Arabidopsis thaliana
agaacatgtccagtggt

SEQ ID NO: 27540 - DNA, 17 bp, Arabidopsis thaliana
agaacattatcagtggc

SEQ ID NO: 27541 - DNA, 17 bp, Arabidopsis thaliana
agaacattcgctacaga

SEQ ID NO: 27542 - DNA, 17 bp, Arabidopsis thaliana
agaacattctcttcctc

SEQ ID NO: 27543 - DNA, 17 bp, Arabidopsis thaliana
agaacattgccatttac

SEQ ID NO: 27544 - DNA, 17 bp, Arabidopsis thaliana
agaacatttcacttggg

SEQ ID NO: 27545 - DNA, 17 bp, Arabidopsis thaliana
agaacatttccagtggt

SEQ ID NO: 27546 - DNA, 17 bp, Arabidopsis thaliana
agaacatttcgattaat

SEQ ID NO: 27547 - DNA, 17 bp, Arabidopsis thaliana
agaacattttcaacggg

SEQ ID NO: 27548 - DNA, 17 bp, Arabidopsis thaliana
agaacattttccgacta

SEQ ID NO: 27549 - DNA, 17 bp, Arabidopsis thaliana
agaaccaagattctaga

SEQ ID NO: 27550 - DNA, 17 bp, Arabidopsis thaliana
agaaccaccacattgca

SEQ ID NO: 27551 - DNA, 17 bp, Arabidopsis thaliana
agaaccaccaccaccgg

SEQ ID NO: 27552 - DNA, 17 bp, Arabidopsis thaliana
agaaccactaaggcggg

SEQ ID NO: 27553 - DNA, 17 bp, Arabidopsis thaliana
agaaccagaagaccccc

SEQ ID NO: 27554 - DNA, 17 bp, Arabidopsis thaliana
agaaccagatctgtgac

SEQ ID NO: 27555 - DNA, 17 bp, Arabidopsis thaliana
agaaccagattgttgtt

SEQ ID NO: 27556 - DNA, 17 bp, Arabidopsis thaliana
agaaccagcgtcagctc

SEQ ID NO: 27557 - DNA, 17 bp, Arabidopsis thaliana
agaaccagctaggagag

SEQ ID NO: 27558 - DNA, 17 bp, Arabidopsis thaliana
agaaccaggaccggccc

SEQ ID NO: 27559 - DNA, 17 bp, Arabidopsis thaliana
agaaccaggattttgtt

SEQ ID NO: 27560 - DNA, 17 bp, Arabidopsis thaliana
agaaccagtctcttctt

SEQ ID NO: 27561 - DNA, 17 bp, Arabidopsis thaliana
agaaccatcctgttcct

SEQ ID NO: 27562 - DNA, 17 bp, Arabidopsis thaliana
agaaccatggatcacgc

SEQ ID NO: 27563 - DNA, 17 bp, Arabidopsis thaliana
agaacccacatagccat

SEQ ID NO: 27564 - DNA, 17 bp, Arabidopsis thaliana
agaacccagttctttga

SEQ ID NO: 27565 - DNA, 17 bp, Arabidopsis thaliana
agaacccatgcatggtt

SEQ ID NO: 27566 - DNA, 17 bp, Arabidopsis thaliana
agaacccgagtctccaa

SEQ ID NO: 27567 - DNA, 17 bp, Arabidopsis thaliana
agaacccgcacgacact

SEQ ID NO: 27568 - DNA, 17 bp, Arabidopsis thaliana
agaacccgtcggctgtc

SEQ ID NO: 27569 - DNA, 17 bp, Arabidopsis thaliana
agaacccgttcgggttt

SEQ ID NO: 27570 - DNA, 17 bp, Arabidopsis thaliana
agaaccctagatcagct

SEQ ID NO: 27571 - DNA, 17 bp, Arabidopsis thaliana
agaaccctctagactta

SEQ ID NO: 27572 - DNA, 17 bp, Arabidopsis thaliana
agaacccttgggtttcc

SEQ ID NO: 27573 - DNA, 17 bp, Arabidopsis thaliana
agaacccttttctcaat

SEQ ID NO: 27574 - DNA, 17 bp, Arabidopsis thaliana
agaaccctttttgtttg

SEQ ID NO: 27575 - DNA, 17 bp, Arabidopsis thaliana
agaaccgaactaaactt

SEQ ID NO: 27576 - DNA, 17 bp, Arabidopsis thaliana
agaaccgacaacttcta

SEQ ID NO: 27577 - DNA, 17 bp, Arabidopsis thaliana
agaaccgactcttttaa

SEQ ID NO: 27578 - DNA, 17 bp, Arabidopsis thaliana
agaaccgagtgccgcag

SEQ ID NO: 27579 - DNA, 17 bp, Arabidopsis thaliana
agaaccgagtgccgctc

SEQ ID NO: 27580 - DNA, 17 bp, Arabidopsis thaliana
agaaccgataacaagcg

SEQ ID NO: 27581 - DNA, 17 bp, Arabidopsis thaliana
agaaccgataacaggcg

SEQ ID NO: 27582 - DNA, 17 bp, Arabidopsis thaliana
agaaccgatacccgaat

SEQ ID NO: 27583 - DNA, 17 bp, Arabidopsis thaliana
agaaccgcaaccggatt

SEQ ID NO: 27584 - DNA, 17 bp, Arabidopsis thaliana
agaaccgcaaccttccc

SEQ ID NO: 27585 - DNA, 17 bp, Arabidopsis thaliana
agaaccgcattgcattt

SEQ ID NO: 27586 - DNA, 17 bp, Arabidopsis thaliana
agaaccgccataggcgc

SEQ ID NO: 27587 - DNA, 17 bp, Arabidopsis thaliana
agaaccgccgtgactcg

SEQ ID NO: 27588 - DNA, 17 bp, Arabidopsis thaliana
agaaccgccgtgatgac

SEQ ID NO: 27589 - DNA, 17 bp, Arabidopsis thaliana
agaaccgccgtgtctcg

SEQ ID NO: 27590 - DNA, 17 bp, Arabidopsis thaliana
agaaccgcttaatccgc

SEQ ID NO: 27591 - DNA, 17 bp, Arabidopsis thaliana
agaaccggaagccgggt

SEQ ID NO: 27592 - DNA, 17 bp, Arabidopsis thaliana
agaaccggcccgtggac

SEQ ID NO: 27593 - DNA, 17 bp, Arabidopsis thaliana
agaaccggccctggttg

SEQ ID NO: 27594 - DNA, 17 bp, Arabidopsis thaliana
agaaccggcgcacccca

SEQ ID NO: 27595 - DNA, 17 bp, Arabidopsis thaliana
agaaccggctgtgtctc

SEQ ID NO: 27596 - DNA, 17 bp, Arabidopsis thaliana
agaaccggcttaagtgg

SEQ ID NO: 27597 - DNA, 17 bp, Arabidopsis thaliana
agaaccgggttcggctc

SEQ ID NO: 27598 - DNA, 17 bp, Arabidopsis thaliana
agaaccgggttcgtacg

SEQ ID NO: 27599 - DNA, 17 bp, Arabidopsis thaliana
agaaccgggttttggat

SEQ ID NO: 27600 - DNA, 17 bp, Arabidopsis thaliana
agaaccggtcatgcctc

SEQ ID NO: 27601 - DNA, 17 bp, Arabidopsis thaliana
agaaccggtcatgcctg

SEQ ID NO: 27602 - DNA, 17 bp, Arabidopsis thaliana
agaaccggtctatgatc

SEQ ID NO: 27603 - DNA, 17 bp, Arabidopsis thaliana
agaaccgtcgcctcgta

SEQ ID NO: 27604 - DNA, 17 bp, Arabidopsis thaliana
agaaccgtcggaaagga

SEQ ID NO: 27605 - DNA, 17 bp, Arabidopsis thaliana
agaaccgtcggaaaggt

SEQ ID NO: 27606 - DNA, 17 bp, Arabidopsis thaliana
agaaccgtctctaagcg

SEQ ID NO: 27607 - DNA, 17 bp, Arabidopsis thaliana
agaaccgtgtggcagga

SEQ ID NO: 27608 - DNA, 17 bp, Arabidopsis thaliana
agaaccgttcaagcaag

SEQ ID NO: 27609 - DNA, 17 bp, Arabidopsis thaliana
agaaccgttcaagcagg

SEQ ID NO: 27610 - DNA, 17 bp, Arabidopsis thaliana
agaaccgttgactgatc

SEQ ID NO: 27611 - DNA, 17 bp, Arabidopsis thaliana
agaaccgtttatgacta

SEQ ID NO: 27612 - DNA, 17 bp, Arabidopsis thaliana
agaacctataccgtaac

SEQ ID NO: 27613 - DNA, 17 bp, Arabidopsis thaliana
agaacctattggccttt

SEQ ID NO: 27614 - DNA, 17 bp, Arabidopsis thaliana
agaacctcctaattatc

SEQ ID NO: 27615 - DNA, 17 bp, Arabidopsis thaliana
agaacctcctcatctgg

SEQ ID NO: 27616 - DNA, 17 bp, Arabidopsis thaliana
agaacctcgcgagccag

SEQ ID NO: 27617 - DNA, 17 bp, Arabidopsis thaliana
agaacctctaagcacct

SEQ ID NO: 27618 - DNA, 17 bp, Arabidopsis thaliana
agaacctctgagcgtgt

SEQ ID NO: 27619 - DNA, 17 bp, Arabidopsis thaliana
agaacctgactcgaatg

SEQ ID NO: 27620 - DNA, 17 bp, Arabidopsis thaliana
agaacctggatcctctc

SEQ ID NO: 27621 - DNA, 17 bp, Arabidopsis thaliana
agaacctgtcggattaa

SEQ ID NO: 27622 - DNA, 17 bp, Arabidopsis thaliana
agaaccttcaaggcctc

SEQ ID NO: 27623 - DNA, 17 bp, Arabidopsis thaliana
agaaccttcatttgtcc

SEQ ID NO: 27624 - DNA, 17 bp, Arabidopsis thaliana
agaaccttcttgataat

SEQ ID NO: 27625 - DNA, 17 bp, Arabidopsis thaliana
agaaccttgctgaccat

SEQ ID NO: 27626 - DNA, 17 bp, Arabidopsis thaliana
agaacctttggacctga

SEQ ID NO: 27627 - DNA, 17 bp, Arabidopsis thaliana
agaaccttttgtcgaag

SEQ ID NO: 27628 - DNA, 17 bp, Arabidopsis thaliana
agaacgaaaaccaactc

SEQ ID NO: 27629 - DNA, 17 bp, Arabidopsis thaliana
agaacgaaccatctggg

SEQ ID NO: 27630 - DNA, 17 bp, Arabidopsis thaliana
agaacgacatcctgaca

SEQ ID NO: 27631 - DNA, 17 bp, Arabidopsis thaliana
agaacgacattatgatc

SEQ ID NO: 27632 - DNA, 17 bp, Arabidopsis thaliana
agaacgaccaatcggaa

SEQ ID NO: 27633 - DNA, 17 bp, Arabidopsis thaliana
agaacgaccggccaatg

SEQ ID NO: 27634 - DNA, 17 bp, Arabidopsis thaliana
agaacgacgtcgctgca

SEQ ID NO: 27635 - DNA, 17 bp, Arabidopsis thaliana
agaacgagcagaaactg

SEQ ID NO: 27636 - DNA, 17 bp, Arabidopsis thaliana
agaacgagccgattgta

SEQ ID NO: 27637 - DNA, 17 bp, Arabidopsis thaliana
agaacgagccggaggct

SEQ ID NO: 27638 - DNA, 17 bp, Arabidopsis thaliana
agaacgagggaatccag

SEQ ID NO: 27639 - DNA, 17 bp, Arabidopsis thaliana
agaacgatcaagcagac

SEQ ID NO: 27640 - DNA, 17 bp, Arabidopsis thaliana
agaacgatcctcgacct

SEQ ID NO: 27641 - DNA, 17 bp, Arabidopsis thaliana
agaacgattctctccct

SEQ ID NO: 27642 - DNA, 17 bp, Arabidopsis thaliana
agaacgcatagtttgct

SEQ ID NO: 27643 - DNA, 17 bp, Arabidopsis thaliana
agaacgcattgtgaacc

SEQ ID NO: 27644 - DNA, 17 bp, Arabidopsis thaliana
agaacgcctaatcgggg

SEQ ID NO: 27645 - DNA, 17 bp, Arabidopsis thaliana
agaacgcgccacgtcat

SEQ ID NO: 27646 - DNA, 17 bp, Arabidopsis thaliana
agaacgcggattacggt

SEQ ID NO: 27647 - DNA, 17 bp, Arabidopsis thaliana
agaacgctactggcgct

SEQ ID NO: 27648 - DNA, 17 bp, Arabidopsis thaliana
agaacgctactggtcag

SEQ ID NO: 27649 - DNA, 17 bp, Arabidopsis thaliana
agaacgctgatgatttg

SEQ ID NO: 27650 - DNA, 17 bp, Arabidopsis thaliana
agaacgcttagtcgggg

SEQ ID NO: 27651 - DNA, 17 bp, Arabidopsis thaliana
agaacgcttatgggcct

SEQ ID NO: 27652 - DNA, 17 bp, Arabidopsis thaliana
agaacgcttggcgtatt

SEQ ID NO: 27653 - DNA, 17 bp, Arabidopsis thaliana
agaacgcttttgtacct

SEQ ID NO: 27654 - DNA, 17 bp, Arabidopsis thaliana
agaacggacctgatatc

SEQ ID NO: 27655 - DNA, 17 bp, Arabidopsis thaliana
agaacggagaaccgaaa

SEQ ID NO: 27656 - DNA, 17 bp, Arabidopsis thaliana
agaacggagaaccgccc

SEQ ID NO: 27657 - DNA, 17 bp, Arabidopsis thaliana
agaacggatgtgcggat

SEQ ID NO: 27658 - DNA, 17 bp, Arabidopsis thaliana
agaacggattgcgagat

SEQ ID NO: 27659 - DNA, 17 bp, Arabidopsis thaliana
agaacggatttggcagg

SEQ ID NO: 27660 - DNA, 17 bp, Arabidopsis thaliana
agaacggattttgcgag

SEQ ID NO: 27661 - DNA, 17 bp, Arabidopsis thaliana
agaacggcccatcagaa

SEQ ID NO: 27662 - DNA, 17 bp, Arabidopsis thaliana
agaacggcgaagtccat

SEQ ID NO: 27663 - DNA, 17 bp, Arabidopsis thaliana
agaacggcgagatccgc

SEQ ID NO: 27664 - DNA, 17 bp, Arabidopsis thaliana
agaacggctgaacctgc

SEQ ID NO: 27665 - DNA, 17 bp, Arabidopsis thaliana
agaacgggaaccagttt

SEQ ID NO: 27666 - DNA, 17 bp, Arabidopsis thaliana
agaacgggattcggaag

SEQ ID NO: 27667 - DNA, 17 bp, Arabidopsis thaliana
agaacgggcaccttttg

SEQ ID NO: 27668 - DNA, 17 bp, Arabidopsis thaliana
agaacgggcaccttttt

SEQ ID NO: 27669 - DNA, 17 bp, Arabidopsis thaliana
agaacgggctaagtagt

SEQ ID NO: 27670 - DNA, 17 bp, Arabidopsis thaliana
agaacgggctttgacaa

SEQ ID NO: 27671 - DNA, 17 bp, Arabidopsis thaliana
agaacgggggcgtggaa

SEQ ID NO: 27672 - DNA, 17 bp, Arabidopsis thaliana
agaacgggtttagaagg

SEQ ID NO: 27673 - DNA, 17 bp, Arabidopsis thaliana
agaacgggtttgagtcg

SEQ ID NO: 27674 - DNA, 17 bp, Arabidopsis thaliana
agaacgggtttggaagg

SEQ ID NO: 27675 - DNA, 17 bp, Arabidopsis thaliana
agaacgggttttatttt

SEQ ID NO: 27676 - DNA, 17 bp, Arabidopsis thaliana
agaacggtgaacacaag

SEQ ID NO: 27677 - DNA, 17 bp, Arabidopsis thaliana
agaacggtgggcccggt

SEQ ID NO: 27678 - DNA, 17 bp, Arabidopsis thaliana
agaacggtttcgaaaag

SEQ ID NO: 27679 - DNA, 17 bp, Arabidopsis thaliana
agaacgtagcgaaatgc

SEQ ID NO: 27680 - DNA, 17 bp, Arabidopsis thaliana
agaacgtccagggttca

SEQ ID NO: 27681 - DNA, 17 bp, Arabidopsis thaliana
agaacgtcgttaggtca

SEQ ID NO: 27682 - DNA, 17 bp, Arabidopsis thaliana
agaacgtgccaaattat

SEQ ID NO: 27683 - DNA, 17 bp, Arabidopsis thaliana
agaacgtgtcggctgct

SEQ ID NO: 27684 - DNA, 17 bp, Arabidopsis thaliana
agaacgttggttagtgt

SEQ ID NO: 27685 - DNA, 17 bp, Arabidopsis thaliana
agaactaaacagaacga

SEQ ID NO: 27686 - DNA, 17 bp, Arabidopsis thaliana
agaactaaagcggatca

SEQ ID NO: 27687 - DNA, 17 bp, Arabidopsis thaliana
agaactaacacactgac

SEQ ID NO: 27688 - DNA, 17 bp, Arabidopsis thaliana
agaactaacagctgagc

SEQ ID NO: 27689 - DNA, 17 bp, Arabidopsis thaliana
agaactaaggtttcttt

SEQ ID NO: 27690 - DNA, 17 bp, Arabidopsis thaliana
agaactaatacgaacac

SEQ ID NO: 27691 - DNA, 17 bp, Arabidopsis thaliana
agaactaattccgttgt

SEQ ID NO: 27692 - DNA, 17 bp, Arabidopsis thaliana
agaactacaacattgtg

SEQ ID NO: 27693 - DNA, 17 bp, Arabidopsis thaliana
agaactagacacattag

SEQ ID NO: 27694 - DNA, 17 bp, Arabidopsis thaliana
agaactagactcttcca

SEQ ID NO: 27695 - DNA, 17 bp, Arabidopsis thaliana
agaactagagctgtcaa

SEQ ID NO: 27696 - DNA, 17 bp, Arabidopsis thaliana
agaactagattctgacc

SEQ ID NO: 27697 - DNA, 17 bp, Arabidopsis thaliana
agaactagcgactgcat

SEQ ID NO: 27698 - DNA, 17 bp, Arabidopsis thaliana
agaactagcggtcttgg

SEQ ID NO: 27699 - DNA, 17 bp, Arabidopsis thaliana
agaactaggtggaccct

SEQ ID NO: 27700 - DNA, 17 bp, Arabidopsis thaliana
agaactagtcgcgatag

SEQ ID NO: 27701 - DNA, 17 bp, Arabidopsis thaliana
agaactagtgctgagaa

SEQ ID NO: 27702 - DNA, 17 bp, Arabidopsis thaliana
agaactatacgcgggta

SEQ ID NO: 27703 - DNA, 17 bp, Arabidopsis thaliana
agaactatcccttcagg

SEQ ID NO: 27704 - DNA, 17 bp, Arabidopsis thaliana
agaactatgtttgccga

SEQ ID NO: 27705 - DNA, 17 bp, Arabidopsis thaliana
agaactatttattgcac

SEQ ID NO: 27706 - DNA, 17 bp, Arabidopsis thaliana
agaactcaaacctttcg

SEQ ID NO: 27707 - DNA, 17 bp, Arabidopsis thaliana
agaactcaacggggccc

SEQ ID NO: 27708 - DNA, 17 bp, Arabidopsis thaliana
agaactcaatacgacgg

SEQ ID NO: 27709 - DNA, 17 bp, Arabidopsis thaliana
agaactcataatagcca

SEQ ID NO: 27710 - DNA, 17 bp, Arabidopsis thaliana
agaactcatcaatagct

SEQ ID NO: 27711 - DNA, 17 bp, Arabidopsis thaliana
agaactccacggttaag

SEQ ID NO: 27712 - DNA, 17 bp, Arabidopsis thaliana
agaactccaggattaag

SEQ ID NO: 27713 - DNA, 17 bp, Arabidopsis thaliana
agaactccatggctaaa

SEQ ID NO: 27714 - DNA, 17 bp, Arabidopsis thaliana
agaactcccagaacatc

SEQ ID NO: 27715 - DNA, 17 bp, Arabidopsis thaliana
agaactccccactggag

SEQ ID NO: 27716 - DNA, 17 bp, Arabidopsis thaliana
agaactccctaggcatg

SEQ ID NO: 27717 - DNA, 17 bp, Arabidopsis thaliana
agaactccgcagttaac

SEQ ID NO: 27718 - DNA, 17 bp, Arabidopsis thaliana
agaactccgcagttaag

SEQ ID NO: 27719 - DNA, 17 bp, Arabidopsis thaliana
agaactccgcagttacg

SEQ ID NO: 27720 - DNA, 17 bp, Arabidopsis thaliana
agaactccggcttcacc

SEQ ID NO: 27721 - DNA, 17 bp, Arabidopsis thaliana
agaactcgaaccatcat

SEQ ID NO: 27722 - DNA, 17 bp, Arabidopsis thaliana
agaactcgcacagagcc

SEQ ID NO: 27723 - DNA, 17 bp, Arabidopsis thaliana
agaactcggcatagact

SEQ ID NO: 27724 - DNA, 17 bp, Arabidopsis thaliana
agaactcgtgctgataa

SEQ ID NO: 27725 - DNA, 17 bp, Arabidopsis thaliana
agaactcgttgattctg

SEQ ID NO: 27726 - DNA, 17 bp, Arabidopsis thaliana
agaactctccttctaat

SEQ ID NO: 27727 - DNA, 17 bp, Arabidopsis thaliana
agaactctctagactta

SEQ ID NO: 27728 - DNA, 17 bp, Arabidopsis thaliana
agaactctgctggtcga

SEQ ID NO: 27729 - DNA, 17 bp, Arabidopsis thaliana
agaactctgtctcatgc

SEQ ID NO: 27730 - DNA, 17 bp, Arabidopsis thaliana
agaactgaaaccgcaac

SEQ ID NO: 27731 - DNA, 17 bp, Arabidopsis thaliana
agaactgaagattctcc

SEQ ID NO: 27732 - DNA, 17 bp, Arabidopsis thaliana
agaactgaagattctgc

SEQ ID NO: 27733 - DNA, 17 bp, Arabidopsis thaliana
agaactgacctgctgaa

SEQ ID NO: 27734 - DNA, 17 bp, Arabidopsis thaliana
agaactgacgctttttc

SEQ ID NO: 27735 - DNA, 17 bp, Arabidopsis thaliana
agaactgagcgcttcaa

SEQ ID NO: 27736 - DNA, 17 bp, Arabidopsis thaliana
agaactgaggtctctct

SEQ ID NO: 27737 - DNA, 17 bp, Arabidopsis thaliana
agaactgatcgactact

SEQ ID NO: 27738 - DNA, 17 bp, Arabidopsis thaliana
agaactgatcggccatc

SEQ ID NO: 27739 - DNA, 17 bp, Arabidopsis thaliana
agaactgatttggccat

SEQ ID NO: 27740 - DNA, 17 bp, Arabidopsis thaliana
agaactgcgggaagttt

SEQ ID NO: 27741 - DNA, 17 bp, Arabidopsis thaliana
agaactgctctataact

SEQ ID NO: 27742 - DNA, 17 bp, Arabidopsis thaliana
agaactgctctgttggc

SEQ ID NO: 27743 - DNA, 17 bp, Arabidopsis thaliana
agaactgctggagtctt

SEQ ID NO: 27744 - DNA, 17 bp, Arabidopsis thaliana
agaactgcttgatccgc

SEQ ID NO: 27745 - DNA, 17 bp, Arabidopsis thaliana
agaactggacggtggtg

SEQ ID NO: 27746 - DNA, 17 bp, Arabidopsis thaliana
agaactggagttatcgg

SEQ ID NO: 27747 - DNA, 17 bp, Arabidopsis thaliana
agaactggggcagagtt

SEQ ID NO: 27748 - DNA, 17 bp, Arabidopsis thaliana
agaactgggtttaacat

SEQ ID NO: 27749 - DNA, 17 bp, Arabidopsis thaliana
agaactggtacggacaa

SEQ ID NO: 27750 - DNA, 17 bp, Arabidopsis thaliana
agaactggtcagatgaa

SEQ ID NO: 27751 - DNA, 17 bp, Arabidopsis thaliana
agaactggtcgatggtt

SEQ ID NO: 27752 - DNA, 17 bp, Arabidopsis thaliana
agaactgtagacgtagt

SEQ ID NO: 27753 - DNA, 17 bp, Arabidopsis thaliana
agaactgtagcgaattt

SEQ ID NO: 27754 - DNA, 17 bp, Arabidopsis thaliana
agaactgtagttgcgtg

SEQ ID NO: 27755 - DNA, 17 bp, Arabidopsis thaliana
agaactgtcctggtgag

SEQ ID NO: 27756 - DNA, 17 bp, Arabidopsis thaliana
agaactgtcttctttgg

SEQ ID NO: 27757 - DNA, 17 bp, Arabidopsis thaliana
agaactgtgttgcgtgt

SEQ ID NO: 27758 - DNA, 17 bp, Arabidopsis thaliana
agaactgttggagaagc

SEQ ID NO: 27759 - DNA, 17 bp, Arabidopsis thaliana
agaactgttttggtggg

SEQ ID NO: 27760 - DNA, 17 bp, Arabidopsis thaliana
agaacttaaaacgcaac

SEQ ID NO: 27761 - DNA, 17 bp, Arabidopsis thaliana
agaacttaaaccgaagc

SEQ ID NO: 27762 - DNA, 17 bp, Arabidopsis thaliana
agaacttaaaccgcaaa

SEQ ID NO: 27763 - DNA, 17 bp, Arabidopsis thaliana
agaacttaaaccgcaac

SEQ ID NO: 27764 - DNA, 17 bp, Arabidopsis thaliana
agaacttaaaccgcaat

SEQ ID NO: 27765 - DNA, 17 bp, Arabidopsis thaliana
agaacttaaaccgcagc

SEQ ID NO: 27766 - DNA, 17 bp, Arabidopsis thaliana
agaacttaaaccgcatt

SEQ ID NO: 27767 - DNA, 17 bp, Arabidopsis thaliana
agaacttaaaccgtaac

SEQ ID NO: 27768 - DNA, 17 bp, Arabidopsis thaliana
agaacttaaatcgcacc

SEQ ID NO: 27769 - DNA, 17 bp, Arabidopsis thaliana
agaacttaacccgcaac

SEQ ID NO: 27770 - DNA, 17 bp, Arabidopsis thaliana
agaacttaagtgcccta

SEQ ID NO: 27771 - DNA, 17 bp, Arabidopsis thaliana
agaacttataccgcaac

SEQ ID NO: 27772 - DNA, 17 bp, Arabidopsis thaliana
agaacttattcacaatg

SEQ ID NO: 27773 - DNA, 17 bp, Arabidopsis thaliana
agaacttattggccttt

SEQ ID NO: 27774 - DNA, 17 bp, Arabidopsis thaliana
agaacttatttacaatg

SEQ ID NO: 27775 - DNA, 17 bp, Arabidopsis thaliana
agaacttcaataagttg

SEQ ID NO: 27776 - DNA, 17 bp, Arabidopsis thaliana
agaacttcaggccaagt

SEQ ID NO: 27777 - DNA, 17 bp, Arabidopsis thaliana
agaacttccctctcctc

SEQ ID NO: 27778 - DNA, 17 bp, Arabidopsis thaliana
agaacttccctgtcctc

SEQ ID NO: 27779 - DNA, 17 bp, Arabidopsis thaliana
agaacttcctcttggac

SEQ ID NO: 27780 - DNA, 17 bp, Arabidopsis thaliana
agaacttccttgagtcc

SEQ ID NO: 27781 - DNA, 17 bp, Arabidopsis thaliana
agaacttcgagagtcga

SEQ ID NO: 27782 - DNA, 17 bp, Arabidopsis thaliana
agaacttcgcagttacg

SEQ ID NO: 27783 - DNA, 17 bp, Arabidopsis thaliana
agaacttctaacgtccg

SEQ ID NO: 27784 - DNA, 17 bp, Arabidopsis thaliana
agaacttctacctgtga

SEQ ID NO: 27785 - DNA, 17 bp, Arabidopsis thaliana
agaacttctctgatttg

SEQ ID NO: 27786 - DNA, 17 bp, Arabidopsis thaliana
agaacttctgctcacgc

SEQ ID NO: 27787 - DNA, 17 bp, Arabidopsis thaliana
agaacttctgctcatgc

SEQ ID NO: 27788 - DNA, 17 bp, Arabidopsis thaliana
agaacttgagacttcag

SEQ ID NO: 27789 - DNA, 17 bp, Arabidopsis thaliana
agaacttgagatggaac

SEQ ID NO: 27790 - DNA, 17 bp, Arabidopsis thaliana
agaacttgaggctgcga

SEQ ID NO: 27791 - DNA, 17 bp, Arabidopsis thaliana
agaacttgatcggagtc

SEQ ID NO: 27792 - DNA, 17 bp, Arabidopsis thaliana
agaacttgcggcgattt

SEQ ID NO: 27793 - DNA, 17 bp, Arabidopsis thaliana
agaacttggatccggcg

SEQ ID NO: 27794 - DNA, 17 bp, Arabidopsis thaliana
agaacttggatttggcc

SEQ ID NO: 27795 - DNA, 17 bp, Arabidopsis thaliana
agaacttgggcagaatg

SEQ ID NO: 27796 - DNA, 17 bp, Arabidopsis thaliana
agaacttgtgctgataa

SEQ ID NO: 27797 - DNA, 17 bp, Arabidopsis thaliana
agaactttagaccgtga

SEQ ID NO: 27798 - DNA, 17 bp, Arabidopsis thaliana
agaactttaggattaag

SEQ ID NO: 27799 - DNA, 17 bp, Arabidopsis thaliana
agaactttcagactctg

SEQ ID NO: 27800 - DNA, 17 bp, Arabidopsis thaliana
agaactttccatttatg

SEQ ID NO: 27801 - DNA, 17 bp, Arabidopsis thaliana
agaactttccatttgtg

SEQ ID NO: 27802 - DNA, 17 bp, Arabidopsis thaliana
agaactttctatttgtg

SEQ ID NO: 27803 - DNA, 17 bp, Arabidopsis thaliana
agaactttgaagtatgc

SEQ ID NO: 27804 - DNA, 17 bp, Arabidopsis thaliana
agaactttgcaatcctg

SEQ ID NO: 27805 - DNA, 17 bp, Arabidopsis thaliana
agaactttggacctcca

SEQ ID NO: 27806 - DNA, 17 bp, Arabidopsis thaliana
agaactttggtggcagt

SEQ ID NO: 27807 - DNA, 17 bp, Arabidopsis thaliana
agaacttttcgtgccaa

SEQ ID NO: 27808 - DNA, 17 bp, Arabidopsis thaliana
agaacttttgaaatctg

SEQ ID NO: 27809 - DNA, 17 bp, Arabidopsis thaliana
agaacttttggctgctt

SEQ ID NO: 27810 - DNA, 17 bp, Arabidopsis thaliana
agaactttttgtgccaa

SEQ ID NO: 27811 - DNA, 17 bp, Arabidopsis thaliana
agaactttttttggata

SEQ ID NO: 27812 - DNA, 17 bp, Arabidopsis thaliana
agaactttttttgggtc

SEQ ID NO: 27813 - DNA, 17 bp, Arabidopsis thaliana
agaagaaaaccgcagcg

SEQ ID NO: 27814 - DNA, 17 bp, Arabidopsis thaliana
agaagaaaaccgctgcg

SEQ ID NO: 27815 - DNA, 17 bp, Arabidopsis thaliana
agaagaaacaacagagg

SEQ ID NO: 27816 - DNA, 17 bp, Arabidopsis thaliana
agaagaaacctaagatc

SEQ ID NO: 27817 - DNA, 17 bp, Arabidopsis thaliana
agaagaaagttgctggt

SEQ ID NO: 27818 - DNA, 17 bp, Arabidopsis thaliana
agaagaaattgaggtat

SEQ ID NO: 27819 - DNA, 17 bp, Arabidopsis thaliana
agaagaacaagcgactc

SEQ ID NO: 27820 - DNA, 17 bp, Arabidopsis thaliana
agaagaacctatgaaac

SEQ ID NO: 27821 - DNA, 17 bp, Arabidopsis thaliana
agaagaacgacctttga

SEQ ID NO: 27822 - DNA, 17 bp, Arabidopsis thaliana
agaagaacggtgattga

SEQ ID NO: 27823 - DNA, 17 bp, Arabidopsis thaliana
agaagaacgtgtccaga

SEQ ID NO: 27824 - DNA, 17 bp, Arabidopsis thaliana
agaagaactatctgccg

SEQ ID NO: 27825 - DNA, 17 bp, Arabidopsis thaliana
agaagaagacaaatgag

SEQ ID NO: 27826 - DNA, 17 bp, Arabidopsis thaliana
agaagaagatgatgagc

SEQ ID NO: 27827 - DNA, 17 bp, Arabidopsis thaliana
agaagaagatgtcgtct

SEQ ID NO: 27828 - DNA, 17 bp, Arabidopsis thaliana
agaagaagatgtcgttt

SEQ ID NO: 27829 - DNA, 17 bp, Arabidopsis thaliana
agaagaaggacgggagt

SEQ ID NO: 27830 - DNA, 17 bp, Arabidopsis thaliana
agaagaaggctgcactc

SEQ ID NO: 27831 - DNA, 17 bp, Arabidopsis thaliana
agaagaaggtgtcgtct

SEQ ID NO: 27832 - DNA, 17 bp, Arabidopsis thaliana
agaagaaggttgctggt

SEQ ID NO: 27833 - DNA, 17 bp, Arabidopsis thaliana
agaagaaggttggatag

SEQ ID NO: 27834 - DNA, 17 bp, Arabidopsis thaliana
agaagaatccagtttcg

SEQ ID NO: 27835 - DNA, 17 bp, Arabidopsis thaliana
agaagaatctgaggtaa

SEQ ID NO: 27836 - DNA, 17 bp, Arabidopsis thaliana
agaagaatctgcctcat

SEQ ID NO: 27837 - DNA, 17 bp, Arabidopsis thaliana
agaagaatctgggttag

SEQ ID NO: 27838 - DNA, 17 bp, Arabidopsis thaliana
agaagaatctgggtttt

SEQ ID NO: 27839 - DNA, 17 bp, Arabidopsis thaliana
agaagaatgcttttgtg

SEQ ID NO: 27840 - DNA, 17 bp, Arabidopsis thaliana
agaagaatggtgatgta

SEQ ID NO: 27841 - DNA, 17 bp, Arabidopsis thaliana
agaagaatgtgtcgtcc

SEQ ID NO: 27842 - DNA, 17 bp, Arabidopsis thaliana
agaagaatgtgtggtct

SEQ ID NO: 27843 - DNA, 17 bp, Arabidopsis thaliana
agaagaattacgggttt

SEQ ID NO: 27844 - DNA, 17 bp, Arabidopsis thaliana
agaagacaacaccagga

SEQ ID NO: 27845 - DNA, 17 bp, Arabidopsis thaliana
agaagacaacacttgca

SEQ ID NO: 27846 - DNA, 17 bp, Arabidopsis thaliana
agaagacaagctgaccc

SEQ ID NO: 27847 - DNA, 17 bp, Arabidopsis thaliana
agaagacaccatcttca

SEQ ID NO: 27848 - DNA, 17 bp, Arabidopsis thaliana
agaagacacggcgggga

SEQ ID NO: 27849 - DNA, 17 bp, Arabidopsis thaliana
agaagacatccggctcc

SEQ ID NO: 27850 - DNA, 17 bp, Arabidopsis thaliana
agaagaccactcacgag

SEQ ID NO: 27851 - DNA, 17 bp, Arabidopsis thaliana
agaagacccagttactc

SEQ ID NO: 27852 - DNA, 17 bp, Arabidopsis thaliana
agaagaccccacaagga

SEQ ID NO: 27853 - DNA, 17 bp, Arabidopsis thaliana
agaagacccctcaccgt

SEQ ID NO: 27854 - DNA, 17 bp, Arabidopsis thaliana
agaagaccctgttgagc

SEQ ID NO: 27855 - DNA, 17 bp, Arabidopsis thaliana
agaagaccgaggaggcc

SEQ ID NO: 27856 - DNA, 17 bp, Arabidopsis thaliana
agaagaccgtgatagtt

SEQ ID NO: 27857 - DNA, 17 bp, Arabidopsis thaliana
agaagaccgttgcacag

SEQ ID NO: 27858 - DNA, 17 bp, Arabidopsis thaliana
agaagacctgcaatttc

SEQ ID NO: 27859 - DNA, 17 bp, Arabidopsis thaliana
agaagaccttgtggatt

SEQ ID NO: 27860 - DNA, 17 bp, Arabidopsis thaliana
agaagaccttgtggctt

SEQ ID NO: 27861 - DNA, 17 bp, Arabidopsis thaliana
agaagacgatccttgtg

SEQ ID NO: 27862 - DNA, 17 bp, Arabidopsis thaliana
agaagacgcccgatctt

SEQ ID NO: 27863 - DNA, 17 bp, Arabidopsis thaliana
agaagacgcggacgaga

SEQ ID NO: 27864 - DNA, 17 bp, Arabidopsis thaliana
agaagacgcgggttcga

SEQ ID NO: 27865 - DNA, 17 bp, Arabidopsis thaliana
agaagacggacctttga

SEQ ID NO: 27866 - DNA, 17 bp, Arabidopsis thaliana
agaagacggacgaatcc

SEQ ID NO: 27867 - DNA, 17 bp, Arabidopsis thaliana
agaagacggcgttttcc

SEQ ID NO: 27868 - DNA, 17 bp, Arabidopsis thaliana
agaagacgggctcatcg

SEQ ID NO: 27869 - DNA, 17 bp, Arabidopsis thaliana
agaagacgtcacctttg

SEQ ID NO: 27870 - DNA, 17 bp, Arabidopsis thaliana
agaagacgtgagatcca

SEQ ID NO: 27871 - DNA, 17 bp, Arabidopsis thaliana
agaagacgttcagctgt

SEQ ID NO: 27872 - DNA, 17 bp, Arabidopsis thaliana
agaagactcggcggtgg

SEQ ID NO: 27873 - DNA, 17 bp, Arabidopsis thaliana
agaagactgaattccct

SEQ ID NO: 27874 - DNA, 17 bp, Arabidopsis thaliana
agaagagaaccactaag

SEQ ID NO: 27875 - DNA, 17 bp, Arabidopsis thaliana
agaagagacggctcggg

SEQ ID NO: 27876 - DNA, 17 bp, Arabidopsis thaliana
agaagagaggtcgagta

SEQ ID NO: 27877 - DNA, 17 bp, Arabidopsis thaliana
agaagagagtaacggag

SEQ ID NO: 27878 - DNA, 17 bp, Arabidopsis thaliana
agaagagagttaggact

SEQ ID NO: 27879 - DNA, 17 bp, Arabidopsis thaliana
agaagagatctattcaa

SEQ ID NO: 27880 - DNA, 17 bp, Arabidopsis thaliana
agaagagcaagtctatg

SEQ ID NO: 27881 - DNA, 17 bp, Arabidopsis thaliana
agaagagccatcatctc

SEQ ID NO: 27882 - DNA, 17 bp, Arabidopsis thaliana
agaagagccctgcaact

SEQ ID NO: 27883 - DNA, 17 bp, Arabidopsis thaliana
agaagagccgtgcctca

SEQ ID NO: 27884 - DNA, 17 bp, Arabidopsis thaliana
agaagagcgtgttttgc

SEQ ID NO: 27885 - DNA, 17 bp, Arabidopsis thaliana
agaagagctaacgacaa

SEQ ID NO: 27886 - DNA, 17 bp, Arabidopsis thaliana
agaagagctctcgcctg

SEQ ID NO: 27887 - DNA, 17 bp, Arabidopsis thaliana
agaagagcttccatttc

SEQ ID NO: 27888 - DNA, 17 bp, Arabidopsis thaliana
agaagaggacggttttt

SEQ ID NO: 27889 - DNA, 17 bp, Arabidopsis thaliana
agaagaggcagccacca

SEQ ID NO: 27890 - DNA, 17 bp, Arabidopsis thaliana
agaagaggccagagaaa

SEQ ID NO: 27891 - DNA, 17 bp, Arabidopsis thaliana
agaagagggatccagaa

SEQ ID NO: 27892 - DNA, 17 bp, Arabidopsis thaliana
agaagagggatgacgtg

SEQ ID NO: 27893 - DNA, 17 bp, Arabidopsis thaliana
agaagaggggtccagaa

SEQ ID NO: 27894 - DNA, 17 bp, Arabidopsis thaliana
agaagaggtttggcgca

SEQ ID NO: 27895 - DNA, 17 bp, Arabidopsis thaliana
agaagaggtttgtcgga

SEQ ID NO: 27896 - DNA, 17 bp, Arabidopsis thaliana
agaagagtatcgattat

SEQ ID NO: 27897 - DNA, 17 bp, Arabidopsis thaliana
agaagagtcatctcggc

SEQ ID NO: 27898 - DNA, 17 bp, Arabidopsis thaliana
agaagagtctctctctg

SEQ ID NO: 27899 - DNA, 17 bp, Arabidopsis thaliana
agaagagtggtttcatc

SEQ ID NO: 27900 - DNA, 17 bp, Arabidopsis thaliana
agaagagtgtcgatcga

SEQ ID NO: 27901 - DNA, 17 bp, Arabidopsis thaliana
agaagagtttgctacat

SEQ ID NO: 27902 - DNA, 17 bp, Arabidopsis thaliana
agaagataaacaaggga

SEQ ID NO: 27903 - DNA, 17 bp, Arabidopsis thaliana
agaagataaacataggt

SEQ ID NO: 27904 - DNA, 17 bp, Arabidopsis thaliana
agaagataagcgcctta

SEQ ID NO: 27905 - DNA, 17 bp, Arabidopsis thaliana
agaagatactgtgactc

SEQ ID NO: 27906 - DNA, 17 bp, Arabidopsis thaliana
agaagataggccgttca

SEQ ID NO: 27907 - DNA, 17 bp, Arabidopsis thaliana
agaagatattgaaggta

SEQ ID NO: 27908 - DNA, 17 bp, Arabidopsis thaliana
agaagatcaaggtcggt

SEQ ID NO: 27909 - DNA, 17 bp, Arabidopsis thaliana
agaagatcaggtgatcc

SEQ ID NO: 27910 - DNA, 17 bp, Arabidopsis thaliana
agaagatccaagggtgg

SEQ ID NO: 27911 - DNA, 17 bp, Arabidopsis thaliana
agaagatccatatgtgg

SEQ ID NO: 27912 - DNA, 17 bp, Arabidopsis thaliana
agaagatcccaactttg

SEQ ID NO: 27913 - DNA, 17 bp, Arabidopsis thaliana
agaagatcccgcttatt

SEQ ID NO: 27914 - DNA, 17 bp, Arabidopsis thaliana
agaagatccgcagtggc

SEQ ID NO: 27915 - DNA, 17 bp, Arabidopsis thaliana
agaagatcctcttgagc

SEQ ID NO: 27916 - DNA, 17 bp, Arabidopsis thaliana
agaagatcgatcgatct

SEQ ID NO: 27917 - DNA, 17 bp, Arabidopsis thaliana
agaagatcggctttgca

SEQ ID NO: 27918 - DNA, 17 bp, Arabidopsis thaliana
agaagatcgggttgcgg

SEQ ID NO: 27919 - DNA, 17 bp, Arabidopsis thaliana
agaagatcggtgttctc

SEQ ID NO: 27920 - DNA, 17 bp, Arabidopsis thaliana
agaagatctaaaagcta

SEQ ID NO: 27921 - DNA, 17 bp, Arabidopsis thaliana
agaagatctccaacgat

SEQ ID NO: 27922 - DNA, 17 bp, Arabidopsis thaliana
agaagatctccgaagtt

SEQ ID NO: 27923 - DNA, 17 bp, Arabidopsis thaliana
agaagatctgctcgatc

SEQ ID NO: 27924 - DNA, 17 bp, Arabidopsis thaliana
agaagatctttgcggtc

SEQ ID NO: 27925 - DNA, 17 bp, Arabidopsis thaliana
agaagatgaaaatgttt

SEQ ID NO: 27926 - DNA, 17 bp, Arabidopsis thaliana
agaagatgacggttttt

SEQ ID NO: 27927 - DNA, 17 bp, Arabidopsis thaliana
agaagatgatgagcgtg

SEQ ID NO: 27928 - DNA, 17 bp, Arabidopsis thaliana
agaagatgatgtggagg

SEQ ID NO: 27929 - DNA, 17 bp, Arabidopsis thaliana
agaagatgtaagacttt

SEQ ID NO: 27930 - DNA, 17 bp, Arabidopsis thaliana
agaagatgtaggacctt

SEQ ID NO: 27931 - DNA, 17 bp, Arabidopsis thaliana
agaagatgtcgtctgtc

SEQ ID NO: 27932 - DNA, 17 bp, Arabidopsis thaliana
agaagattatgggtttc

SEQ ID NO: 27933 - DNA, 17 bp, Arabidopsis thaliana
agaagattcagattcat

SEQ ID NO: 27934 - DNA, 17 bp, Arabidopsis thaliana
agaagattcagcccttt

SEQ ID NO: 27935 - DNA, 17 bp, Arabidopsis thaliana
agaagattctgggccga

SEQ ID NO: 27936 - DNA, 17 bp, Arabidopsis thaliana
agaagattgcaaaattg

SEQ ID NO: 27937 - DNA, 17 bp, Arabidopsis thaliana
agaagattgcgaaattg

SEQ ID NO: 27938 - DNA, 17 bp, Arabidopsis thaliana
agaagattggagattgg

SEQ ID NO: 27939 - DNA, 17 bp, Arabidopsis thaliana
agaagattggattgccg

SEQ ID NO: 27940 - DNA, 17 bp, Arabidopsis thaliana
agaagattggccgacat

SEQ ID NO: 27941 - DNA, 17 bp, Arabidopsis thaliana
agaagattggccgtggt

SEQ ID NO: 27942 - DNA, 17 bp, Arabidopsis thaliana
agaagattgtattggct

SEQ ID NO: 27943 - DNA, 17 bp, Arabidopsis thaliana
agaagattgttgtagtt

SEQ ID NO: 27944 - DNA, 17 bp, Arabidopsis thaliana
agaagatttcgattgtt

SEQ ID NO: 27945 - DNA, 17 bp, Arabidopsis thaliana
agaagatttctacgaca

SEQ ID NO: 27946 - DNA, 17 bp, Arabidopsis thaliana
agaagatttggcagact

SEQ ID NO: 27947 - DNA, 17 bp, Arabidopsis thaliana
agaagatttggccgaga

SEQ ID NO: 27948 - DNA, 17 bp, Arabidopsis thaliana
agaagattttcccttat

SEQ ID NO: 27949 - DNA, 17 bp, Arabidopsis thaliana
agaagattttgtggttt

SEQ ID NO: 27950 - DNA, 17 bp, Arabidopsis thaliana
agaagatttttgcctat

SEQ ID NO: 27951 - DNA, 17 bp, Arabidopsis thaliana
agaagcaaaatgacgac

SEQ ID NO: 27952 - DNA, 17 bp, Arabidopsis thaliana
agaagcaaccacacctg

SEQ ID NO: 27953 - DNA, 17 bp, Arabidopsis thaliana
agaagcaacgtgcgatt

SEQ ID NO: 27954 - DNA, 17 bp, Arabidopsis thaliana
agaagcacaaggtctcg

SEQ ID NO: 27955 - DNA, 17 bp, Arabidopsis thaliana
agaagcaccaagttcgg

SEQ ID NO: 27956 - DNA, 17 bp, Arabidopsis thaliana
agaagcacccgactgtc

SEQ ID NO: 27957 - DNA, 17 bp, Arabidopsis thaliana
agaagcactaaaccatt

SEQ ID NO: 27958 - DNA, 17 bp, Arabidopsis thaliana
agaagcactctggatca

SEQ ID NO: 27959 - DNA, 17 bp, Arabidopsis thaliana
agaagcactgtccgcca

SEQ ID NO: 27960 - DNA, 17 bp, Arabidopsis thaliana
agaagcactgtttgatc

SEQ ID NO: 27961 - DNA, 17 bp, Arabidopsis thaliana
agaagcacttgggcgaa

SEQ ID NO: 27962 - DNA, 17 bp, Arabidopsis thaliana
agaagcagagacttaag

SEQ ID NO: 27963 - DNA, 17 bp, Arabidopsis thaliana
agaagcagagggactga

SEQ ID NO: 27964 - DNA, 17 bp, Arabidopsis thaliana
agaagcagcaggaagac

SEQ ID NO: 27965 - DNA, 17 bp, Arabidopsis thaliana
agaagcagcgtctactg

SEQ ID NO: 27966 - DNA, 17 bp, Arabidopsis thaliana
agaagcaggacaatgga

SEQ ID NO: 27967 - DNA, 17 bp, Arabidopsis thaliana
agaagcaggagctgagt

SEQ ID NO: 27968 - DNA, 17 bp, Arabidopsis thaliana
agaagcaggttgcggat

SEQ ID NO: 27969 - DNA, 17 bp, Arabidopsis thaliana
agaagcagtctccagtg

SEQ ID NO: 27970 - DNA, 17 bp, Arabidopsis thaliana
agaagcatattgatgtg

SEQ ID NO: 27971 - DNA, 17 bp, Arabidopsis thaliana
agaagcatgaccggtgg

SEQ ID NO: 27972 - DNA, 17 bp, Arabidopsis thaliana
agaagccagctgttctc

SEQ ID NO: 27973 - DNA, 17 bp, Arabidopsis thaliana
agaagccattgtggatt

SEQ ID NO: 27974 - DNA, 17 bp, Arabidopsis thaliana
agaagcccccttggccc

SEQ ID NO: 27975 - DNA, 17 bp, Arabidopsis thaliana
agaagccctgtttttga

SEQ ID NO: 27976 - DNA, 17 bp, Arabidopsis thaliana
agaagccggcgacgagg

SEQ ID NO: 27977 - DNA, 17 bp, Arabidopsis thaliana
agaagcctgtttttgac

SEQ ID NO: 27978 - DNA, 17 bp, Arabidopsis thaliana
agaagccttcgcaccaa

SEQ ID NO: 27979 - DNA, 17 bp, Arabidopsis thaliana
agaagccttctcacacc

SEQ ID NO: 27980 - DNA, 17 bp, Arabidopsis thaliana
agaagcctttgattgtg

SEQ ID NO: 27981 - DNA, 17 bp, Arabidopsis thaliana
agaagcgaaacgacgtc

SEQ ID NO: 27982 - DNA, 17 bp, Arabidopsis thaliana
agaagcgacgcacgcac

SEQ ID NO: 27983 - DNA, 17 bp, Arabidopsis thaliana
agaagcgacgcatgcac

SEQ ID NO: 27984 - DNA, 17 bp, Arabidopsis thaliana
agaagcgacgcatgcgc

SEQ ID NO: 27985 - DNA, 17 bp, Arabidopsis thaliana
agaagcgacggaacttg

SEQ ID NO: 27986 - DNA, 17 bp, Arabidopsis thaliana
agaagcgagatgggagt

SEQ ID NO: 27987 - DNA, 17 bp, Arabidopsis thaliana
agaagcgatacccgaat

SEQ ID NO: 27988 - DNA, 17 bp, Arabidopsis thaliana
agaagcgattctcaatt

SEQ ID NO: 27989 - DNA, 17 bp, Arabidopsis thaliana
agaagcgcaaccgagca

SEQ ID NO: 27990 - DNA, 17 bp, Arabidopsis thaliana
agaagcgctatggaagt

SEQ ID NO: 27991 - DNA, 17 bp, Arabidopsis thaliana
agaagcgctccagtatg

SEQ ID NO: 27992 - DNA, 17 bp, Arabidopsis thaliana
agaagcgctctatcatc

SEQ ID NO: 27993 - DNA, 17 bp, Arabidopsis thaliana
agaagcggcaggccgtg

SEQ ID NO: 27994 - DNA, 17 bp, Arabidopsis thaliana
agaagcggccacgtctg

SEQ ID NO: 27995 - DNA, 17 bp, Arabidopsis thaliana
agaagcggccagcatga

SEQ ID NO: 27996 - DNA, 17 bp, Arabidopsis thaliana
agaagcgggattcacaa

SEQ ID NO: 27997 - DNA, 17 bp, Arabidopsis thaliana
agaagcggggcccacaa

SEQ ID NO: 27998 - DNA, 17 bp, Arabidopsis thaliana
agaagcgggtgaggaag

SEQ ID NO: 27999 - DNA, 17 bp, Arabidopsis thaliana
agaagcggtgatttggt

SEQ ID NO: 28000 - DNA, 17 bp, Arabidopsis thaliana
agaagcgtcctcagcga

SEQ ID NO: 28001 - DNA, 17 bp, Arabidopsis thaliana
agaagcgtctggatttt

SEQ ID NO: 28002 - DNA, 17 bp, Arabidopsis thaliana
agaagcgtgaacggtga

SEQ ID NO: 28003 - DNA, 17 bp, Arabidopsis thaliana
agaagctatgactggtg

SEQ ID NO: 28004 - DNA, 17 bp, Arabidopsis thaliana
agaagctgagactgtct

SEQ ID NO: 28005 - DNA, 17 bp, Arabidopsis thaliana
agaagctgaggcacagg

SEQ ID NO: 28006 - DNA, 17 bp, Arabidopsis thaliana
agaagctgccagcatga

SEQ ID NO: 28007 - DNA, 17 bp, Arabidopsis thaliana
agaagctgcgggaggag

SEQ ID NO: 28008 - DNA, 17 bp, Arabidopsis thaliana
agaaggaaaacaagcta

SEQ ID NO: 28009 - DNA, 17 bp, Arabidopsis thaliana
agaaggaacatgaaggt

SEQ ID NO: 28010 - DNA, 17 bp, Arabidopsis thaliana
agaaggaagaccattct

SEQ ID NO: 28011 - DNA, 17 bp, Arabidopsis thaliana
agaaggaagcttgctcc

SEQ ID NO: 28012 - DNA, 17 bp, Arabidopsis thaliana
agaaggaagggtcgccg

SEQ ID NO: 28013 - DNA, 17 bp, Arabidopsis thaliana
agaaggaatattcgctg

SEQ ID NO: 28014 - DNA, 17 bp, Arabidopsis thaliana
agaaggaatgaccacgc

SEQ ID NO: 28015 - DNA, 17 bp, Arabidopsis thaliana
agaaggacagcgggatg

SEQ ID NO: 28016 - DNA, 17 bp, Arabidopsis thaliana
agaaggacgattctgaa

SEQ ID NO: 28017 - DNA, 17 bp, Arabidopsis thaliana
agaaggactcgacgaat

SEQ ID NO: 28018 - DNA, 17 bp, Arabidopsis thaliana
agaaggactgcatgcat

SEQ ID NO: 28019 - DNA, 17 bp, Arabidopsis thaliana
agaaggacttgggttca

SEQ ID NO: 28020 - DNA, 17 bp, Arabidopsis thaliana
agaaggagacggtggag

SEQ ID NO: 28021 - DNA, 17 bp, Arabidopsis thaliana
agaaggagagcgtgatg

SEQ ID NO: 28022 - DNA, 17 bp, Arabidopsis thaliana
agaaggagatgggtcag

SEQ ID NO: 28023 - DNA, 17 bp, Arabidopsis thaliana
agaaggagcacaatcgt

SEQ ID NO: 28024 - DNA, 17 bp, Arabidopsis thaliana
agaaggagcttacaagg

SEQ ID NO: 28025 - DNA, 17 bp, Arabidopsis thaliana
agaaggaggaaggcgac

SEQ ID NO: 28026 - DNA, 17 bp, Arabidopsis thaliana
agaaggagtacccgggc

SEQ ID NO: 28027 - DNA, 17 bp, Arabidopsis thaliana
agaaggagtgctgattg

SEQ ID NO: 28028 - DNA, 17 bp, Arabidopsis thaliana
agaaggagtgttgattg

SEQ ID NO: 28029 - DNA, 17 bp, Arabidopsis thaliana
agaaggagttattggct

SEQ ID NO: 28030 - DNA, 17 bp, Arabidopsis thaliana
agaaggatcaactatca

SEQ ID NO: 28031 - DNA, 17 bp, Arabidopsis thaliana
agaaggatcaaggagtg

SEQ ID NO: 28032 - DNA, 17 bp, Arabidopsis thaliana
agaaggatctaattttt

SEQ ID NO: 28033 - DNA, 17 bp, Arabidopsis thaliana
agaaggatctcagcacg

SEQ ID NO: 28034 - DNA, 17 bp, Arabidopsis thaliana
agaaggatgtgaactgg

SEQ ID NO: 28035 - DNA, 17 bp, Arabidopsis thaliana
agaaggatgtgttatct

SEQ ID NO: 28036 - DNA, 17 bp, Arabidopsis thaliana
agaaggatgttatgctt

SEQ ID NO: 28037 - DNA, 17 bp, Arabidopsis thaliana
agaaggattacgggttt

SEQ ID NO: 28038 - DNA, 17 bp, Arabidopsis thaliana
agaaggattcaaatcca

SEQ ID NO: 28039 - DNA, 17 bp, Arabidopsis thaliana
agaaggattctctcaag

SEQ ID NO: 28040 - DNA, 17 bp, Arabidopsis thaliana
agaaggcaacaaggtga

SEQ ID NO: 28041 - DNA, 17 bp, Arabidopsis thaliana
agaaggcaacagcgatg

SEQ ID NO: 28042 - DNA, 17 bp, Arabidopsis thaliana
agaaggcaaggaagaac

SEQ ID NO: 28043 - DNA, 17 bp, Arabidopsis thaliana
agaaggcacataatttc

SEQ ID NO: 28044 - DNA, 17 bp, Arabidopsis thaliana
agaaggccaaactggct

SEQ ID NO: 28045 - DNA, 17 bp, Arabidopsis thaliana
agaaggccaaactgggt

SEQ ID NO: 28046 - DNA, 17 bp, Arabidopsis thaliana
agaaggccctaggaacg

SEQ ID NO: 28047 - DNA, 17 bp, Arabidopsis thaliana
agaaggccggaggtttt

SEQ ID NO: 28048 - DNA, 17 bp, Arabidopsis thaliana
agaaggcctacgggtcc

SEQ ID NO: 28049 - DNA, 17 bp, Arabidopsis thaliana
agaaggcgaaggaagcg

SEQ ID NO: 28050 - DNA, 17 bp, Arabidopsis thaliana
agaaggcgactgctcgt

SEQ ID NO: 28051 - DNA, 17 bp, Arabidopsis thaliana
agaaggcgctgagtttc

SEQ ID NO: 28052 - DNA, 17 bp, Arabidopsis thaliana
agaaggcgtctatttgc

SEQ ID NO: 28053 - DNA, 17 bp, Arabidopsis thaliana
agaaggctaagcctagg

SEQ ID NO: 28054 - DNA, 17 bp, Arabidopsis thaliana
agaaggctagtgaattt

SEQ ID NO: 28055 - DNA, 17 bp, Arabidopsis thaliana
agaaggctccaccaccg

SEQ ID NO: 28056 - DNA, 17 bp, Arabidopsis thaliana
agaaggctcgcaccatc

SEQ ID NO: 28057 - DNA, 17 bp, Arabidopsis thaliana
agaaggcttgcaccatc

SEQ ID NO: 28058 - DNA, 17 bp, Arabidopsis thaliana
agaagggacagttttaa

SEQ ID NO: 28059 - DNA, 17 bp, Arabidopsis thaliana
agaagggaccctgtgat

SEQ ID NO: 28060 - DNA, 17 bp, Arabidopsis thaliana
agaagggacctttctcg

SEQ ID NO: 28061 - DNA, 17 bp, Arabidopsis thaliana
agaagggactctcactt

SEQ ID NO: 28062 - DNA, 17 bp, Arabidopsis thaliana
agaagggagcggtaaat

SEQ ID NO: 28063 - DNA, 17 bp, Arabidopsis thaliana
agaagggatggtgcgtg

SEQ ID NO: 28064 - DNA, 17 bp, Arabidopsis thaliana
agaagggattaccacca

SEQ ID NO: 28065 - DNA, 17 bp, Arabidopsis thaliana
agaagggcacgtctgcc

SEQ ID NO: 28066 - DNA, 17 bp, Arabidopsis thaliana
agaagggcatgtcagtc

SEQ ID NO: 28067 - DNA, 17 bp, Arabidopsis thaliana
agaagggcgatgacact

SEQ ID NO: 28068 - DNA, 17 bp, Arabidopsis thaliana
agaagggcgccttcttg

SEQ ID NO: 28069 - DNA, 17 bp, Arabidopsis thaliana
agaagggcgtgaacttt

SEQ ID NO: 28070 - DNA, 17 bp, Arabidopsis thaliana
agaagggctcatacccg

SEQ ID NO: 28071 - DNA, 17 bp, Arabidopsis thaliana
agaagggttcgagtgtg

SEQ ID NO: 28072 - DNA, 17 bp, Arabidopsis thaliana
agaaggtaatttcccgt

SEQ ID NO: 28073 - DNA, 17 bp, Arabidopsis thaliana
agaaggtaatttctcgt

SEQ ID NO: 28074 - DNA, 17 bp, Arabidopsis thaliana
agaaggtacagacaccg

SEQ ID NO: 28075 - DNA, 17 bp, Arabidopsis thaliana
agaaggtacagacatcg

SEQ ID NO: 28076 - DNA, 17 bp, Arabidopsis thaliana
agaaggtactggaccaa

SEQ ID NO: 28077 - DNA, 17 bp, Arabidopsis thaliana
agaaggtactggaccga

SEQ ID NO: 28078 - DNA, 17 bp, Arabidopsis thaliana
agaaggtagtccggttc

SEQ ID NO: 28079 - DNA, 17 bp, Arabidopsis thaliana
agaaggtatcctgctgc

SEQ ID NO: 28080 - DNA, 17 bp, Arabidopsis thaliana
agaaggtatgccacatt

SEQ ID NO: 28081 - DNA, 17 bp, Arabidopsis thaliana
agaaggtccagagactt

SEQ ID NO: 28082 - DNA, 17 bp, Arabidopsis thaliana
agaaggtcccaagggtt

SEQ ID NO: 28083 - DNA, 17 bp, Arabidopsis thaliana
agaaggtccgccgtatg

SEQ ID NO: 28084 - DNA, 17 bp, Arabidopsis thaliana
agaaggtcctgcgatcg

SEQ ID NO: 28085 - DNA, 17 bp, Arabidopsis thaliana
agaaggtcgcagagaag

SEQ ID NO: 28086 - DNA, 17 bp, Arabidopsis thaliana
agaaggtcggccattcg

SEQ ID NO: 28087 - DNA, 17 bp, Arabidopsis thaliana
agaaggtcgttgaagcg

SEQ ID NO: 28088 - DNA, 17 bp, Arabidopsis thaliana
agaaggtctatctacgg

SEQ ID NO: 28089 - DNA, 17 bp, Arabidopsis thaliana
agaaggtctccagccag

SEQ ID NO: 28090 - DNA, 17 bp, Arabidopsis thaliana
agaaggtctccagctag

SEQ ID NO: 28091 - DNA, 17 bp, Arabidopsis thaliana
agaaggtctccagcttg

SEQ ID NO: 28092 - DNA, 17 bp, Arabidopsis thaliana
agaaggtctccatcttg

SEQ ID NO: 28093 - DNA, 17 bp, Arabidopsis thaliana
agaaggtgcgaggagcc

SEQ ID NO: 28094 - DNA, 17 bp, Arabidopsis thaliana
agaaggttcggaccact

SEQ ID NO: 28095 - DNA, 17 bp, Arabidopsis thaliana
agaaggttctaggccga

SEQ ID NO: 28096 - DNA, 17 bp, Arabidopsis thaliana
agaaggttctggaccgg

SEQ ID NO: 28097 - DNA, 17 bp, Arabidopsis thaliana
agaaggttctggccgaa

SEQ ID NO: 28098 - DNA, 17 bp, Arabidopsis thaliana
agaaggttctgggccga

SEQ ID NO: 28099 - DNA, 17 bp, Arabidopsis thaliana
agaaggttctgggccgg

SEQ ID NO: 28100 - DNA, 17 bp, Arabidopsis thaliana
agaaggttctgggctga

SEQ ID NO: 28101 - DNA, 17 bp, Arabidopsis thaliana
agaaggttgaccactct

SEQ ID NO: 28102 - DNA, 17 bp, Arabidopsis thaliana
agaaggttgatctctcg

SEQ ID NO: 28103 - DNA, 17 bp, Arabidopsis thaliana
agaaggttgattcctcg

SEQ ID NO: 28104 - DNA, 17 bp, Arabidopsis thaliana
agaaggttgcgtgttcg

SEQ ID NO: 28105 - DNA, 17 bp, Arabidopsis thaliana
agaaggttggtgcaaaa

SEQ ID NO: 28106 - DNA, 17 bp, Arabidopsis thaliana
agaaggttggttagtgt

SEQ ID NO: 28107 - DNA, 17 bp, Arabidopsis thaliana
agaaggttgtcggataa

SEQ ID NO: 28108 - DNA, 17 bp, Arabidopsis thaliana
agaaggtttgcagatgg

SEQ ID NO: 28109 - DNA, 17 bp, Arabidopsis thaliana
agaagtaacccgtgatt

SEQ ID NO: 28110 - DNA, 17 bp, Arabidopsis thaliana
agaagtaaggtccacag

SEQ ID NO: 28111 - DNA, 17 bp, Arabidopsis thaliana
agaagtaagtgtttcta

SEQ ID NO: 28112 - DNA, 17 bp, Arabidopsis thaliana
agaagtaatggtcatcc

SEQ ID NO: 28113 - DNA, 17 bp, Arabidopsis thaliana
agaagtaccttggtttt

SEQ ID NO: 28114 - DNA, 17 bp, Arabidopsis thaliana
agaagtactcactgatg

SEQ ID NO: 28115 - DNA, 17 bp, Arabidopsis thaliana
agaagtatctcctctag

SEQ ID NO: 28116 - DNA, 17 bp, Arabidopsis thaliana
agaagtatctgatgtgg

SEQ ID NO: 28117 - DNA, 17 bp, Arabidopsis thaliana
agaagtcaagcaacacg

SEQ ID NO: 28118 - DNA, 17 bp, Arabidopsis thaliana
agaagtcagggtcttct

SEQ ID NO: 28119 - DNA, 17 bp, Arabidopsis thaliana
agaagtccatggctaaa

SEQ ID NO: 28120 - DNA, 17 bp, Arabidopsis thaliana
agaagtccggctgagca

SEQ ID NO: 28121 - DNA, 17 bp, Arabidopsis thaliana
agaagtcctcatcttca

SEQ ID NO: 28122 - DNA, 17 bp, Arabidopsis thaliana
agaagtcctcgtgttgc

SEQ ID NO: 28123 - DNA, 17 bp, Arabidopsis thaliana
agaagtccttgaggcgc

SEQ ID NO: 28124 - DNA, 17 bp, Arabidopsis thaliana
agaagtcctttgcctca

SEQ ID NO: 28125 - DNA, 17 bp, Arabidopsis thaliana
agaagtcgccggttcaa

SEQ ID NO: 28126 - DNA, 17 bp, Arabidopsis thaliana
agaagtcgccggttcga

SEQ ID NO: 28127 - DNA, 17 bp, Arabidopsis thaliana
agaagtcggctgggcga

SEQ ID NO: 28128 - DNA, 17 bp, Arabidopsis thaliana
agaagtcggtggatgag

SEQ ID NO: 28129 - DNA, 17 bp, Arabidopsis thaliana
agaagtcggttttttgt

SEQ ID NO: 28130 - DNA, 17 bp, Arabidopsis thaliana
agaagtctaaaccgtgg

SEQ ID NO: 28131 - DNA, 17 bp, Arabidopsis thaliana
agaagtctaatgttcca

SEQ ID NO: 28132 - DNA, 17 bp, Arabidopsis thaliana
agaagtctccagacggg

SEQ ID NO: 28133 - DNA, 17 bp, Arabidopsis thaliana
agaagtctctcctgtgc

SEQ ID NO: 28134 - DNA, 17 bp, Arabidopsis thaliana
agaagtgaccagatccc

SEQ ID NO: 28135 - DNA, 17 bp, Arabidopsis thaliana
agaagtgacctccatca

SEQ ID NO: 28136 - DNA, 17 bp, Arabidopsis thaliana
agaagtgagcgacattc

SEQ ID NO: 28137 - DNA, 17 bp, Arabidopsis thaliana
agaagtgaggtgacgtg

SEQ ID NO: 28138 - DNA, 17 bp, Arabidopsis thaliana
agaagtgagtggtgaaa

SEQ ID NO: 28139 - DNA, 17 bp, Arabidopsis thaliana
agaagtgatggattatg

SEQ ID NO: 28140 - DNA, 17 bp, Arabidopsis thaliana
agaagtgattattgtcg

SEQ ID NO: 28141 - DNA, 17 bp, Arabidopsis thaliana
agaagtgcacaagtgga

SEQ ID NO: 28142 - DNA, 17 bp, Arabidopsis thaliana
agaagtgccctactcta

SEQ ID NO: 28143 - DNA, 17 bp, Arabidopsis thaliana
agaagtgccgcaggctg

SEQ ID NO: 28144 - DNA, 17 bp, Arabidopsis thaliana
agaagtgcgctgcggtt

SEQ ID NO: 28145 - DNA, 17 bp, Arabidopsis thaliana
agaagtgcggcgattac

SEQ ID NO: 28146 - DNA, 17 bp, Arabidopsis thaliana
agaagtgcggtgcggtt

SEQ ID NO: 28147 - DNA, 17 bp, Arabidopsis thaliana
agaagtgcgtcagaaac

SEQ ID NO: 28148 - DNA, 17 bp, Arabidopsis thaliana
agaagtgctatgtccga

SEQ ID NO: 28149 - DNA, 17 bp, Arabidopsis thaliana
agaagtgcttgaatcag

SEQ ID NO: 28150 - DNA, 17 bp, Arabidopsis thaliana
agaagtggacaacaata

SEQ ID NO: 28151 - DNA, 17 bp, Arabidopsis thaliana
agaagtggcttggttag

SEQ ID NO: 28152 - DNA, 17 bp, Arabidopsis thaliana
agaagtgggacccagtg

SEQ ID NO: 28153 - DNA, 17 bp, Arabidopsis thaliana
agaagtgggacccggcg

SEQ ID NO: 28154 - DNA, 17 bp, Arabidopsis thaliana
agaagtgggacccggtg

SEQ ID NO: 28155 - DNA, 17 bp, Arabidopsis thaliana
agaagtgggccagactt

SEQ ID NO: 28156 - DNA, 17 bp, Arabidopsis thaliana
agaagtgtagccaatgc

SEQ ID NO: 28157 - DNA, 17 bp, Arabidopsis thaliana
agaagtgtgagtcaagc

SEQ ID NO: 28158 - DNA, 17 bp, Arabidopsis thaliana
agaagtgttaacaatga

SEQ ID NO: 28159 - DNA, 17 bp, Arabidopsis thaliana
agaagtgttgaagacct

SEQ ID NO: 28160 - DNA, 17 bp, Arabidopsis thaliana
agaagtgttgtagttga

SEQ ID NO: 28161 - DNA, 17 bp, Arabidopsis thaliana
agaagtgttgttcgttt

SEQ ID NO: 28162 - DNA, 17 bp, Arabidopsis thaliana
agaagtgttttggctca

SEQ ID NO: 28163 - DNA, 17 bp, Arabidopsis thaliana
agaagttacaagatgtt

SEQ ID NO: 28164 - DNA, 17 bp, Arabidopsis thaliana
agaagttacacaagata

SEQ ID NO: 28165 - DNA, 17 bp, Arabidopsis thaliana
agaagttaggacatctc

SEQ ID NO: 28166 - DNA, 17 bp, Arabidopsis thaliana
agaagttagggcatctc

SEQ ID NO: 28167 - DNA, 17 bp, Arabidopsis thaliana
agaagttagtctatcgt

SEQ ID NO: 28168 - DNA, 17 bp, Arabidopsis thaliana
agaagttcaagtccaaa

SEQ ID NO: 28169 - DNA, 17 bp, Arabidopsis thaliana
agaagttcacgattggg

SEQ ID NO: 28170 - DNA, 17 bp, Arabidopsis thaliana
agaagttcaggctcaaa

SEQ ID NO: 28171 - DNA, 17 bp, Arabidopsis thaliana
agaagttcttgcagcgt

SEQ ID NO: 28172 - DNA, 17 bp, Arabidopsis thaliana
agaagttgaaatggtca

SEQ ID NO: 28173 - DNA, 17 bp, Arabidopsis thaliana
agaagttgaagacttga

SEQ ID NO: 28174 - DNA, 17 bp, Arabidopsis thaliana
agaagttgacgacatag

SEQ ID NO: 28175 - DNA, 17 bp, Arabidopsis thaliana
agaagttgagatcattg

SEQ ID NO: 28176 - DNA, 17 bp, Arabidopsis thaliana
agaagttgagccaaaaa

SEQ ID NO: 28177 - DNA, 17 bp, Arabidopsis thaliana
agaagttggcccaatgg

SEQ ID NO: 28178 - DNA, 17 bp, Arabidopsis thaliana
agaagttggctagagcc

SEQ ID NO: 28179 - DNA, 17 bp, Arabidopsis thaliana
agaagttggtcctgctg

SEQ ID NO: 28180 - DNA, 17 bp, Arabidopsis thaliana
agaagttggtgattgac

SEQ ID NO: 28181 - DNA, 17 bp, Arabidopsis thaliana
agaagttgtcggttcga

SEQ ID NO: 28182 - DNA, 17 bp, Arabidopsis thaliana
agaagttgtctacgcga

SEQ ID NO: 28183 - DNA, 17 bp, Arabidopsis thaliana
agaagttgtgttcgatc

SEQ ID NO: 28184 - DNA, 17 bp, Arabidopsis thaliana
agaagtttaggatccgt

SEQ ID NO: 28185 - DNA, 17 bp, Arabidopsis thaliana
agaagtttccggtggtg

SEQ ID NO: 28186 - DNA, 17 bp, Arabidopsis thaliana
agaagttttgatcaacg

SEQ ID NO: 28187 - DNA, 17 bp, Arabidopsis thaliana
agaagttttgatcagcg

SEQ ID NO: 28188 - DNA, 17 bp, Arabidopsis thaliana
agaagttttgtgcagaa

SEQ ID NO: 28189 - DNA, 17 bp, Arabidopsis thaliana
agaataaaacacctgac

SEQ ID NO: 28190 - DNA, 17 bp, Arabidopsis thaliana
agaataagggcagtttt

SEQ ID NO: 28191 - DNA, 17 bp, Arabidopsis thaliana
agaataatagattttaa

SEQ ID NO: 28192 - DNA, 17 bp, Arabidopsis thaliana
agaataatctatctcca

SEQ ID NO: 28193 - DNA, 17 bp, Arabidopsis thaliana
agaataatgtgaaccgc

SEQ ID NO: 28194 - DNA, 17 bp, Arabidopsis thaliana
agaataatgtgatcgtc

SEQ ID NO: 28195 - DNA, 17 bp, Arabidopsis thaliana
agaataattttctaaga

SEQ ID NO: 28196 - DNA, 17 bp, Arabidopsis thaliana
agaatacaatcgttggc

SEQ ID NO: 28197 - DNA, 17 bp, Arabidopsis thaliana
agaatacacgattttac

SEQ ID NO: 28198 - DNA, 17 bp, Arabidopsis thaliana
agaatacatcggtaggg

SEQ ID NO: 28199 - DNA, 17 bp, Arabidopsis thaliana
agaataccggaactctt

SEQ ID NO: 28200 - DNA, 17 bp, Arabidopsis thaliana
agaatacgctatgttgg

SEQ ID NO: 28201 - DNA, 17 bp, Arabidopsis thaliana
agaatacggtagtcgat

SEQ ID NO: 28202 - DNA, 17 bp, Arabidopsis thaliana
agaatactttgccgcgg

SEQ ID NO: 28203 - DNA, 17 bp, Arabidopsis thaliana
agaatagaaggaatgac

SEQ ID NO: 28204 - DNA, 17 bp, Arabidopsis thaliana
agaatagagtcagatct

SEQ ID NO: 28205 - DNA, 17 bp, Arabidopsis thaliana
agaatagcattccctcg

SEQ ID NO: 28206 - DNA, 17 bp, Arabidopsis thaliana
agaatagcattccctgg

SEQ ID NO: 28207 - DNA, 17 bp, Arabidopsis thaliana
agaatagcggatgaatc

SEQ ID NO: 28208 - DNA, 17 bp, Arabidopsis thaliana
agaatagctcgcttgtc

SEQ ID NO: 28209 - DNA, 17 bp, Arabidopsis thaliana
agaataggcgattttga

SEQ ID NO: 28210 - DNA, 17 bp, Arabidopsis thaliana
agaatagggtagtcgac

SEQ ID NO: 28211 - DNA, 17 bp, Arabidopsis thaliana
agaatagggttccattg

SEQ ID NO: 28212 - DNA, 17 bp, Arabidopsis thaliana
agaatagggttgactca

SEQ ID NO: 28213 - DNA, 17 bp, Arabidopsis thaliana
agaataggttgccgttg

SEQ ID NO: 28214 - DNA, 17 bp, Arabidopsis thaliana
agaatagtccctcttgc

SEQ ID NO: 28215 - DNA, 17 bp, Arabidopsis thaliana
agaatagtctccttttc

SEQ ID NO: 28216 - DNA, 17 bp, Arabidopsis thaliana
agaatagtgtgccaagg

SEQ ID NO: 28217 - DNA, 17 bp, Arabidopsis thaliana
agaatagtttctcaaag

SEQ ID NO: 28218 - DNA, 17 bp, Arabidopsis thaliana
agaatagtttgtggatt

SEQ ID NO: 28219 - DNA, 17 bp, Arabidopsis thaliana
agaatataactgtttgg

SEQ ID NO: 28220 - DNA, 17 bp, Arabidopsis thaliana
agaatatctgcaagctg

SEQ ID NO: 28221 - DNA, 17 bp, Arabidopsis thaliana
agaatatcttgtccatc

SEQ ID NO: 28222 - DNA, 17 bp, Arabidopsis thaliana
agaatatgactggtcac

SEQ ID NO: 28223 - DNA, 17 bp, Arabidopsis thaliana
agaatatgtttgcttgg

SEQ ID NO: 28224 - DNA, 17 bp, Arabidopsis thaliana
agaatattctaaacccg

SEQ ID NO: 28225 - DNA, 17 bp, Arabidopsis thaliana
agaatatttacagaatt

SEQ ID NO: 28226 - DNA, 17 bp, Arabidopsis thaliana
agaatatttacagattt

SEQ ID NO: 28227 - DNA, 17 bp, Arabidopsis thaliana
agaatattttgagacca

SEQ ID NO: 28228 - DNA, 17 bp, Arabidopsis thaliana
agaatatttttccgcga

SEQ ID NO: 28229 - DNA, 17 bp, Arabidopsis thaliana
agaatcaaaagtctttt

SEQ ID NO: 28230 - DNA, 17 bp, Arabidopsis thaliana
agaatcaaatgccataa

SEQ ID NO: 28231 - DNA, 17 bp, Arabidopsis thaliana
agaatcaacagatctga

SEQ ID NO: 28232 - DNA, 17 bp, Arabidopsis thaliana
agaatcaacaggtcctt

SEQ ID NO: 28233 - DNA, 17 bp, Arabidopsis thaliana
agaatcaacatttggcg

SEQ ID NO: 28234 - DNA, 17 bp, Arabidopsis thaliana
agaatcaacgaactgca

SEQ ID NO: 28235 - DNA, 17 bp, Arabidopsis thaliana
agaatcaacgatgtaga

SEQ ID NO: 28236 - DNA, 17 bp, Arabidopsis thaliana
agaatcaacggctgact

SEQ ID NO: 28237 - DNA, 17 bp, Arabidopsis thaliana
agaatcaactggtgtgc

SEQ ID NO: 28238 - DNA, 17 bp, Arabidopsis thaliana
agaatcaagcgagccta

SEQ ID NO: 28239 - DNA, 17 bp, Arabidopsis thaliana
agaatcaaggcaaaaat

SEQ ID NO: 28240 - DNA, 17 bp, Arabidopsis thaliana
agaatcaaggcaagaat

SEQ ID NO: 28241 - DNA, 17 bp, Arabidopsis thaliana
agaatcaagttaggcaa

SEQ ID NO: 28242 - DNA, 17 bp, Arabidopsis thaliana
agaatcaatgcctatca

SEQ ID NO: 28243 - DNA, 17 bp, Arabidopsis thaliana
agaatcaatgtctgggt

SEQ ID NO: 28244 - DNA, 17 bp, Arabidopsis thaliana
agaatcacccatggaca

SEQ ID NO: 28245 - DNA, 17 bp, Arabidopsis thaliana
agaatcacctcgaatgc

SEQ ID NO: 28246 - DNA, 17 bp, Arabidopsis thaliana
agaatcacctggaccgc

SEQ ID NO: 28247 - DNA, 17 bp, Arabidopsis thaliana
agaatcactatcttgtg

SEQ ID NO: 28248 - DNA, 17 bp, Arabidopsis thaliana
agaatcactcgaccgta

SEQ ID NO: 28249 - DNA, 17 bp, Arabidopsis thaliana
agaatcactgctctgat

SEQ ID NO: 28250 - DNA, 17 bp, Arabidopsis thaliana
agaatcactgtctgggt

SEQ ID NO: 28251 - DNA, 17 bp, Arabidopsis thaliana
agaatcagaatgtctat

SEQ ID NO: 28252 - DNA, 17 bp, Arabidopsis thaliana
agaatcagagcaatatt

SEQ ID NO: 28253 - DNA, 17 bp, Arabidopsis thaliana
agaatcagagctggtgc

SEQ ID NO: 28254 - DNA, 17 bp, Arabidopsis thaliana
agaatcagaggacatac

SEQ ID NO: 28255 - DNA, 17 bp, Arabidopsis thaliana
agaatcagattctcgct

SEQ ID NO: 28256 - DNA, 17 bp, Arabidopsis thaliana
agaatcagattctcggt

SEQ ID NO: 28257 - DNA, 17 bp, Arabidopsis thaliana
agaatcagcagtaaccg

SEQ ID NO: 28258 - DNA, 17 bp, Arabidopsis thaliana
agaatcagcggggaaag

SEQ ID NO: 28259 - DNA, 17 bp, Arabidopsis thaliana
agaatcaggtttgtgca

SEQ ID NO: 28260 - DNA, 17 bp, Arabidopsis thaliana
agaatcatcaatggaag

SEQ ID NO: 28261 - DNA, 17 bp, Arabidopsis thaliana
agaatccaacactaccc

SEQ ID NO: 28262 - DNA, 17 bp, Arabidopsis thaliana
agaatccaatccatcat

SEQ ID NO: 28263 - DNA, 17 bp, Arabidopsis thaliana
agaatccaatgacgcgg

SEQ ID NO: 28264 - DNA, 17 bp, Arabidopsis thaliana
agaatccaccacacggc

SEQ ID NO: 28265 - DNA, 17 bp, Arabidopsis thaliana
agaatccagaaactcgc

SEQ ID NO: 28266 - DNA, 17 bp, Arabidopsis thaliana
agaatccagcggtgtgg

SEQ ID NO: 28267 - DNA, 17 bp, Arabidopsis thaliana
agaatccagtggtgtgg

SEQ ID NO: 28268 - DNA, 17 bp, Arabidopsis thaliana
agaatcccatccccggt

SEQ ID NO: 28269 - DNA, 17 bp, Arabidopsis thaliana
agaatcccatgagccaa

SEQ ID NO: 28270 - DNA, 17 bp, Arabidopsis thaliana
agaatccccgaagtctt

SEQ ID NO: 28271 - DNA, 17 bp, Arabidopsis thaliana
agaatccgaatcggtgt

SEQ ID NO: 28272 - DNA, 17 bp, Arabidopsis thaliana
agaatccgctacgatct

SEQ ID NO: 28273 - DNA, 17 bp, Arabidopsis thaliana
agaatccgcttttacat

SEQ ID NO: 28274 - DNA, 17 bp, Arabidopsis thaliana
agaatccggattgcctt

SEQ ID NO: 28275 - DNA, 17 bp, Arabidopsis thaliana
agaatccggcattaccc

SEQ ID NO: 28276 - DNA, 17 bp, Arabidopsis thaliana
agaatccggcgttgact

SEQ ID NO: 28277 - DNA, 17 bp, Arabidopsis thaliana
agaatccggctggctca

SEQ ID NO: 28278 - DNA, 17 bp, Arabidopsis thaliana
agaatccgggcagcgac

SEQ ID NO: 28279 - DNA, 17 bp, Arabidopsis thaliana
agaatccgtcgttttcc

SEQ ID NO: 28280 - DNA, 17 bp, Arabidopsis thaliana
agaatccgttttaacat

SEQ ID NO: 28281 - DNA, 17 bp, Arabidopsis thaliana
agaatcctaacctaagc

SEQ ID NO: 28282 - DNA, 17 bp, Arabidopsis thaliana
agaatcctccgaaagag

SEQ ID NO: 28283 - DNA, 17 bp, Arabidopsis thaliana
agaatcctctatggacc

SEQ ID NO: 28284 - DNA, 17 bp, Arabidopsis thaliana
agaatcctgacgaacgg

SEQ ID NO: 28285 - DNA, 17 bp, Arabidopsis thaliana
agaatcctgagacttga

SEQ ID NO: 28286 - DNA, 17 bp, Arabidopsis thaliana
agaatcctgatgattct

SEQ ID NO: 28287 - DNA, 17 bp, Arabidopsis thaliana
agaatcctggcaagcga

SEQ ID NO: 28288 - DNA, 17 bp, Arabidopsis thaliana
agaatcctggcgaacga

SEQ ID NO: 28289 - DNA, 17 bp, Arabidopsis thaliana
agaatcctggcgaacgg

SEQ ID NO: 28290 - DNA, 17 bp, Arabidopsis thaliana
agaatcctgtccagctt

SEQ ID NO: 28291 - DNA, 17 bp, Arabidopsis thaliana
agaatccttgcagacga

SEQ ID NO: 28292 - DNA, 17 bp, Arabidopsis thaliana
agaatcctttgcagacg

SEQ ID NO: 28293 - DNA, 17 bp, Arabidopsis thaliana
agaatcgaacaccaaga

SEQ ID NO: 28294 - DNA, 17 bp, Arabidopsis thaliana
agaatcgaacactaccc

SEQ ID NO: 28295 - DNA, 17 bp, Arabidopsis thaliana
agaatcgaacttccgat

SEQ ID NO: 28296 - DNA, 17 bp, Arabidopsis thaliana
agaatcgaccctagcta

SEQ ID NO: 28297 - DNA, 17 bp, Arabidopsis thaliana
agaatcgacggctaccg

SEQ ID NO: 28298 - DNA, 17 bp, Arabidopsis thaliana
agaatcgacttccgttg

SEQ ID NO: 28299 - DNA, 17 bp, Arabidopsis thaliana
agaatcgagacttccat

SEQ ID NO: 28300 - DNA, 17 bp, Arabidopsis thaliana
agaatcgagggtccccc

SEQ ID NO: 28301 - DNA, 17 bp, Arabidopsis thaliana
agaatcgagtgcgacga

SEQ ID NO: 28302 - DNA, 17 bp, Arabidopsis thaliana
agaatcgatggatcttg

SEQ ID NO: 28303 - DNA, 17 bp, Arabidopsis thaliana
agaatcgattcacggcc

SEQ ID NO: 28304 - DNA, 17 bp, Arabidopsis thaliana
agaatcgcgaccttcaa

SEQ ID NO: 28305 - DNA, 17 bp, Arabidopsis thaliana
agaatcgcgatttggga

SEQ ID NO: 28306 - DNA, 17 bp, Arabidopsis thaliana
agaatcgcggcaagtcg

SEQ ID NO: 28307 - DNA, 17 bp, Arabidopsis thaliana
agaatcgctgtgcgccg

SEQ ID NO: 28308 - DNA, 17 bp, Arabidopsis thaliana
agaatcgcttgtttgtg

SEQ ID NO: 28309 - DNA, 17 bp, Arabidopsis thaliana
agaatcggcggcgacga

SEQ ID NO: 28310 - DNA, 17 bp, Arabidopsis thaliana
agaatcggcgtgaaaac

SEQ ID NO: 28311 - DNA, 17 bp, Arabidopsis thaliana
agaatcggctgagtcat

SEQ ID NO: 28312 - DNA, 17 bp, Arabidopsis thaliana
agaatcgggcaacgagg

SEQ ID NO: 28313 - DNA, 17 bp, Arabidopsis thaliana
agaatcgggctgctagt

SEQ ID NO: 28314 - DNA, 17 bp, Arabidopsis thaliana
agaatcgggtatcggtg

SEQ ID NO: 28315 - DNA, 17 bp, Arabidopsis thaliana
agaatcggtaccaccta

SEQ ID NO: 28316 - DNA, 17 bp, Arabidopsis thaliana
agaatcgtcttctccat

SEQ ID NO: 28317 - DNA, 17 bp, Arabidopsis thaliana
agaatcgtgacagtacg

SEQ ID NO: 28318 - DNA, 17 bp, Arabidopsis thaliana
agaatcgtgatgatgct

SEQ ID NO: 28319 - DNA, 17 bp, Arabidopsis thaliana
agaatcgtgccacgtgt

SEQ ID NO: 28320 - DNA, 17 bp, Arabidopsis thaliana
agaatcgttcggatgta

SEQ ID NO: 28321 - DNA, 17 bp, Arabidopsis thaliana
agaatctaagctgaaca

SEQ ID NO: 28322 - DNA, 17 bp, Arabidopsis thaliana
agaatctacaattagtc

SEQ ID NO: 28323 - DNA, 17 bp, Arabidopsis thaliana
agaatctacgcaagcac

SEQ ID NO: 28324 - DNA, 17 bp, Arabidopsis thaliana
agaatctagactgagac

SEQ ID NO: 28325 - DNA, 17 bp, Arabidopsis thaliana
agaatctagcaccaaac

SEQ ID NO: 28326 - DNA, 17 bp, Arabidopsis thaliana
agaatctagcagactct

SEQ ID NO: 28327 - DNA, 17 bp, Arabidopsis thaliana
agaatctatgggtccga

SEQ ID NO: 28328 - DNA, 17 bp, Arabidopsis thaliana
agaatctcacttccata

SEQ ID NO: 28329 - DNA, 17 bp, Arabidopsis thaliana
agaatctcaggttaacc

SEQ ID NO: 28330 - DNA, 17 bp, Arabidopsis thaliana
agaatctcagtctgcga

SEQ ID NO: 28331 - DNA, 17 bp, Arabidopsis thaliana
agaatctcattcgatac

SEQ ID NO: 28332 - DNA, 17 bp, Arabidopsis thaliana
agaatctccaacggaca

SEQ ID NO: 28333 - DNA, 17 bp, Arabidopsis thaliana
agaatctccaactcatg

SEQ ID NO: 28334 - DNA, 17 bp, Arabidopsis thaliana
agaatctccgcagatcc

SEQ ID NO: 28335 - DNA, 17 bp, Arabidopsis thaliana
agaatctccggtgatga

SEQ ID NO: 28336 - DNA, 17 bp, Arabidopsis thaliana
agaatctctctaggttt

SEQ ID NO: 28337 - DNA, 17 bp, Arabidopsis thaliana
agaatctctgcaccaat

SEQ ID NO: 28338 - DNA, 17 bp, Arabidopsis thaliana
agaatctctgcaccact

SEQ ID NO: 28339 - DNA, 17 bp, Arabidopsis thaliana
agaatctgaagaatgcc

SEQ ID NO: 28340 - DNA, 17 bp, Arabidopsis thaliana
agaatctgacactgttt

SEQ ID NO: 28341 - DNA, 17 bp, Arabidopsis thaliana
agaatctgaccatgaag

SEQ ID NO: 28342 - DNA, 17 bp, Arabidopsis thaliana
agaatctgagatttgcc

SEQ ID NO: 28343 - DNA, 17 bp, Arabidopsis thaliana
agaatctgagatttgct

SEQ ID NO: 28344 - DNA, 17 bp, Arabidopsis thaliana
agaatctgagttggcga

SEQ ID NO: 28345 - DNA, 17 bp, Arabidopsis thaliana
agaatctgcgtctggat

SEQ ID NO: 28346 - DNA, 17 bp, Arabidopsis thaliana
agaatctgctggttgtg

SEQ ID NO: 28347 - DNA, 17 bp, Arabidopsis thaliana
agaatctgctgtagcac

SEQ ID NO: 28348 - DNA, 17 bp, Arabidopsis thaliana
agaatctggaagcagca

SEQ ID NO: 28349 - DNA, 17 bp, Arabidopsis thaliana
agaatctgggttagcgt

SEQ ID NO: 28350 - DNA, 17 bp, Arabidopsis thaliana
agaatctgggttttctg

SEQ ID NO: 28351 - DNA, 17 bp, Arabidopsis thaliana
agaatctggtccaacac

SEQ ID NO: 28352 - DNA, 17 bp, Arabidopsis thaliana
agaatctgtgatccaac

SEQ ID NO: 28353 - DNA, 17 bp, Arabidopsis thaliana
agaatctgtgcaggttg

SEQ ID NO: 28354 - DNA, 17 bp, Arabidopsis thaliana
agaatctgttagttggg

SEQ ID NO: 28355 - DNA, 17 bp, Arabidopsis thaliana
agaatctgttgccatct

SEQ ID NO: 28356 - DNA, 17 bp, Arabidopsis thaliana
agaatcttactagcagg

SEQ ID NO: 28357 - DNA, 17 bp, Arabidopsis thaliana
agaatcttcctaatcta

SEQ ID NO: 28358 - DNA, 17 bp, Arabidopsis thaliana
agaatcttcgtcgcaaa

SEQ ID NO: 28359 - DNA, 17 bp, Arabidopsis thaliana
agaatcttctgtgggtc

SEQ ID NO: 28360 - DNA, 17 bp, Arabidopsis thaliana
agaatcttgataatgct

SEQ ID NO: 28361 - DNA, 17 bp, Arabidopsis thaliana
agaatcttgatgaagct

SEQ ID NO: 28362 - DNA, 17 bp, Arabidopsis thaliana
agaatcttgatgacgcg

SEQ ID NO: 28363 - DNA, 17 bp, Arabidopsis thaliana
agaatcttgatgacgct

SEQ ID NO: 28364 - DNA, 17 bp, Arabidopsis thaliana
agaatcttgatgatact

SEQ ID NO: 28365 - DNA, 17 bp, Arabidopsis thaliana
agaatcttgatgatcct

SEQ ID NO: 28366 - DNA, 17 bp, Arabidopsis thaliana
agaatcttgatgatgat

SEQ ID NO: 28367 - DNA, 17 bp, Arabidopsis thaliana
agaatcttgatgatgca

SEQ ID NO: 28368 - DNA, 17 bp, Arabidopsis thaliana
agaatcttgatgatgcc

SEQ ID NO: 28369 - DNA, 17 bp, Arabidopsis thaliana
agaatcttgatgatgcg

SEQ ID NO: 28370 - DNA, 17 bp, Arabidopsis thaliana
agaatcttgatgatgct

SEQ ID NO: 28371 - DNA, 17 bp, Arabidopsis thaliana
agaatcttgatgatgtt

SEQ ID NO: 28372 - DNA, 17 bp, Arabidopsis thaliana
agaatcttgatgattct

SEQ ID NO: 28373 - DNA, 17 bp, Arabidopsis thaliana
agaatcttgatggtgct

SEQ ID NO: 28374 - DNA, 17 bp, Arabidopsis thaliana
agaatcttgattatgct

SEQ ID NO: 28375 - DNA, 17 bp, Arabidopsis thaliana
agaatcttggcgaacgg

SEQ ID NO: 28376 - DNA, 17 bp, Arabidopsis thaliana
agaatcttggttctgtg

SEQ ID NO: 28377 - DNA, 17 bp, Arabidopsis thaliana
agaatcttgtagaccat

SEQ ID NO: 28378 - DNA, 17 bp, Arabidopsis thaliana
agaatcttgtcgaacgg

SEQ ID NO: 28379 - DNA, 17 bp, Arabidopsis thaliana
agaatcttgtgctcttg

SEQ ID NO: 28380 - DNA, 17 bp, Arabidopsis thaliana
agaatcttgtttgctga

SEQ ID NO: 28381 - DNA, 17 bp, Arabidopsis thaliana
agaatctttcgttaaat

SEQ ID NO: 28382 - DNA, 17 bp, Arabidopsis thaliana
agaatctttgggtgttg

SEQ ID NO: 28383 - DNA, 17 bp, Arabidopsis thaliana
agaatgaacggattgcg

SEQ ID NO: 28384 - DNA, 17 bp, Arabidopsis thaliana
agaatgaatttggattt

SEQ ID NO: 28385 - DNA, 17 bp, Arabidopsis thaliana
agaatgacacatgtgtc

SEQ ID NO: 28386 - DNA, 17 bp, Arabidopsis thaliana
agaatgacagctcacca

SEQ ID NO: 28387 - DNA, 17 bp, Arabidopsis thaliana
agaatgacatgtgacac

SEQ ID NO: 28388 - DNA, 17 bp, Arabidopsis thaliana
agaatgacatgtggcac

SEQ ID NO: 28389 - DNA, 17 bp, Arabidopsis thaliana
agaatgaccaaatagaa

SEQ ID NO: 28390 - DNA, 17 bp, Arabidopsis thaliana
agaatgaccaaattatc

SEQ ID NO: 28391 - DNA, 17 bp, Arabidopsis thaliana
agaatgacccgctttct

SEQ ID NO: 28392 - DNA, 17 bp, Arabidopsis thaliana
agaatgacctgggtgaa

SEQ ID NO: 28393 - DNA, 17 bp, Arabidopsis thaliana
agaatgactaggcaggt

SEQ ID NO: 28394 - DNA, 17 bp, Arabidopsis thaliana
agaatgactcctcttgg

SEQ ID NO: 28395 - DNA, 17 bp, Arabidopsis thaliana
agaatgacttacattga

SEQ ID NO: 28396 - DNA, 17 bp, Arabidopsis thaliana
agaatgagacctccaac

SEQ ID NO: 28397 - DNA, 17 bp, Arabidopsis thaliana
agaatgagggtctactg

SEQ ID NO: 28398 - DNA, 17 bp, Arabidopsis thaliana
agaatgagtgactccga

SEQ ID NO: 28399 - DNA, 17 bp, Arabidopsis thaliana
agaatgagtttgatcag

SEQ ID NO: 28400 - DNA, 17 bp, Arabidopsis thaliana
agaatgatcagtacctt

SEQ ID NO: 28401 - DNA, 17 bp, Arabidopsis thaliana
agaatgatgggagttgg

SEQ ID NO: 28402 - DNA, 17 bp, Arabidopsis thaliana
agaatgatgtcctctat

SEQ ID NO: 28403 - DNA, 17 bp, Arabidopsis thaliana
agaatgcaaagtgtctg

SEQ ID NO: 28404 - DNA, 17 bp, Arabidopsis thaliana
agaatgcaaatccttag

SEQ ID NO: 28405 - DNA, 17 bp, Arabidopsis thaliana
agaatgcaggcggtcta

SEQ ID NO: 28406 - DNA, 17 bp, Arabidopsis thaliana
agaatgcataagaatga

SEQ ID NO: 28407 - DNA, 17 bp, Arabidopsis thaliana
agaatgcccagcggatt

SEQ ID NO: 28408 - DNA, 17 bp, Arabidopsis thaliana
agaatgccgatggttga

SEQ ID NO: 28409 - DNA, 17 bp, Arabidopsis thaliana
agaatgccgtctcttgc

SEQ ID NO: 28410 - DNA, 17 bp, Arabidopsis thaliana
agaatgcctcgttctac

SEQ ID NO: 28411 - DNA, 17 bp, Arabidopsis thaliana
agaatgcgtgaatttgg

SEQ ID NO: 28412 - DNA, 17 bp, Arabidopsis thaliana
agaatgctattgtgagg

SEQ ID NO: 28413 - DNA, 17 bp, Arabidopsis thaliana
agaatgctcgatccatc

SEQ ID NO: 28414 - DNA, 17 bp, Arabidopsis thaliana
agaatgctctactgctt

SEQ ID NO: 28415 - DNA, 17 bp, Arabidopsis thaliana
agaatgctgcttgacac

SEQ ID NO: 28416 - DNA, 17 bp, Arabidopsis thaliana
agaatgctttgactcca

SEQ ID NO: 28417 - DNA, 17 bp, Arabidopsis thaliana
agaatgcttttgtgagg

SEQ ID NO: 28418 - DNA, 17 bp, Arabidopsis thaliana
agaatgctttttgttcc

SEQ ID NO: 28419 - DNA, 17 bp, Arabidopsis thaliana
agaatggaagtctcgat

SEQ ID NO: 28420 - DNA, 17 bp, Arabidopsis thaliana
agaatggaccattctct

SEQ ID NO: 28421 - DNA, 17 bp, Arabidopsis thaliana
agaatggacttctcaga

SEQ ID NO: 28422 - DNA, 17 bp, Arabidopsis thaliana
agaatggagcaccaggt

SEQ ID NO: 28423 - DNA, 17 bp, Arabidopsis thaliana
agaatggatcgaactat

SEQ ID NO: 28424 - DNA, 17 bp, Arabidopsis thaliana
agaatggatctgtttct

SEQ ID NO: 28425 - DNA, 17 bp, Arabidopsis thaliana
agaatggcacgagtgat

SEQ ID NO: 28426 - DNA, 17 bp, Arabidopsis thaliana
agaatggccctgccaac

SEQ ID NO: 28427 - DNA, 17 bp, Arabidopsis thaliana
agaatggccggcgttct

SEQ ID NO: 28428 - DNA, 17 bp, Arabidopsis thaliana
agaatggctattcacct

SEQ ID NO: 28429 - DNA, 17 bp, Arabidopsis thaliana
agaatggcttgttgtcc

SEQ ID NO: 28430 - DNA, 17 bp, Arabidopsis thaliana
agaatgggattgcagag

SEQ ID NO: 28431 - DNA, 17 bp, Arabidopsis thaliana
agaatgggccggaaatg

SEQ ID NO: 28432 - DNA, 17 bp, Arabidopsis thaliana
agaatgggctctatctg

SEQ ID NO: 28433 - DNA, 17 bp, Arabidopsis thaliana
agaatgggttgcccttg

SEQ ID NO: 28434 - DNA, 17 bp, Arabidopsis thaliana
agaatgggtttggaagg

SEQ ID NO: 28435 - DNA, 17 bp, Arabidopsis thaliana
agaatggtactagaacc

SEQ ID NO: 28436 - DNA, 17 bp, Arabidopsis thaliana
agaatggtcaataatta

SEQ ID NO: 28437 - DNA, 17 bp, Arabidopsis thaliana
agaatggtctgagtatc

SEQ ID NO: 28438 - DNA, 17 bp, Arabidopsis thaliana
agaatggtgatgtacgt

SEQ ID NO: 28439 - DNA, 17 bp, Arabidopsis thaliana
agaatggtgttgcagtt

SEQ ID NO: 28440 - DNA, 17 bp, Arabidopsis thaliana
agaatgtacagtttttg

SEQ ID NO: 28441 - DNA, 17 bp, Arabidopsis thaliana
agaatgtaggcagacct

SEQ ID NO: 28442 - DNA, 17 bp, Arabidopsis thaliana
agaatgtagtccggttc

SEQ ID NO: 28443 - DNA, 17 bp, Arabidopsis thaliana
agaatgtatccatccct

SEQ ID NO: 28444 - DNA, 17 bp, Arabidopsis thaliana
agaatgtatcgtctgtc

SEQ ID NO: 28445 - DNA, 17 bp, Arabidopsis thaliana
agaatgtatggcagaga

SEQ ID NO: 28446 - DNA, 17 bp, Arabidopsis thaliana
agaatgtatttaggtgt

SEQ ID NO: 28447 - DNA, 17 bp, Arabidopsis thaliana
agaatgtcaacatagtt

SEQ ID NO: 28448 - DNA, 17 bp, Arabidopsis thaliana
agaatgtcatcctcggt

SEQ ID NO: 28449 - DNA, 17 bp, Arabidopsis thaliana
agaatgtccagagccca

SEQ ID NO: 28450 - DNA, 17 bp, Arabidopsis thaliana
agaatgtcccacattaa

SEQ ID NO: 28451 - DNA, 17 bp, Arabidopsis thaliana
agaatgtcgaacctggc

SEQ ID NO: 28452 - DNA, 17 bp, Arabidopsis thaliana
agaatgtcggcttgagt

SEQ ID NO: 28453 - DNA, 17 bp, Arabidopsis thaliana
agaatgtctccagcttg

SEQ ID NO: 28454 - DNA, 17 bp, Arabidopsis thaliana
agaatgtcttcaagcca

SEQ ID NO: 28455 - DNA, 17 bp, Arabidopsis thaliana
agaatgtcttggctgct

SEQ ID NO: 28456 - DNA, 17 bp, Arabidopsis thaliana
agaatgtcttgggcgga

SEQ ID NO: 28457 - DNA, 17 bp, Arabidopsis thaliana
agaatgtggaagagccg

SEQ ID NO: 28458 - DNA, 17 bp, Arabidopsis thaliana
agaatgtggacttccaa

SEQ ID NO: 28459 - DNA, 17 bp, Arabidopsis thaliana
agaatgtggtacttagg

SEQ ID NO: 28460 - DNA, 17 bp, Arabidopsis thaliana
agaatgtgtcgtccgtc

SEQ ID NO: 28461 - DNA, 17 bp, Arabidopsis thaliana
agaatgtgtcgtctgtc

SEQ ID NO: 28462 - DNA, 17 bp, Arabidopsis thaliana
agaatgtgttgtctgtc

SEQ ID NO: 28463 - DNA, 17 bp, Arabidopsis thaliana
agaatgtgtttttcgga

SEQ ID NO: 28464 - DNA, 17 bp, Arabidopsis thaliana
agaatgttccacatcga

SEQ ID NO: 28465 - DNA, 17 bp, Arabidopsis thaliana
agaatgttgatctctcg

SEQ ID NO: 28466 - DNA, 17 bp, Arabidopsis thaliana
agaatgttgatttgatc

SEQ ID NO: 28467 - DNA, 17 bp, Arabidopsis thaliana
agaatgttggcggttat

SEQ ID NO: 28468 - DNA, 17 bp, Arabidopsis thaliana
agaattaaacatgttgt

SEQ ID NO: 28469 - DNA, 17 bp, Arabidopsis thaliana
agaattaacatgcggac

SEQ ID NO: 28470 - DNA, 17 bp, Arabidopsis thaliana
agaattaacgggtttag

SEQ ID NO: 28471 - DNA, 17 bp, Arabidopsis thaliana
agaattaacttatacta

SEQ ID NO: 28472 - DNA, 17 bp, Arabidopsis thaliana
agaattaagaccaggag

SEQ ID NO: 28473 - DNA, 17 bp, Arabidopsis thaliana
agaattacaaagctgtg

SEQ ID NO: 28474 - DNA, 17 bp, Arabidopsis thaliana
agaattaccgatggtca

SEQ ID NO: 28475 - DNA, 17 bp, Arabidopsis thaliana
agaattacgatcgaacc

SEQ ID NO: 28476 - DNA, 17 bp, Arabidopsis thaliana
agaattagagactcagg

SEQ ID NO: 28477 - DNA, 17 bp, Arabidopsis thaliana
agaattaggcttaggta

SEQ ID NO: 28478 - DNA, 17 bp, Arabidopsis thaliana
agaattatagccccgca

SEQ ID NO: 28479 - DNA, 17 bp, Arabidopsis thaliana
agaattatccgaatggg

SEQ ID NO: 28480 - DNA, 17 bp, Arabidopsis thaliana
agaattattgcgtttgt

SEQ ID NO: 28481 - DNA, 17 bp, Arabidopsis thaliana
agaattcacactttttc

SEQ ID NO: 28482 - DNA, 17 bp, Arabidopsis thaliana
agaattcaccaagtgtt

SEQ ID NO: 28483 - DNA, 17 bp, Arabidopsis thaliana
agaattcactgtttctt

SEQ ID NO: 28484 - DNA, 17 bp, Arabidopsis thaliana
agaattcagaagtgtaa

SEQ ID NO: 28485 - DNA, 17 bp, Arabidopsis thaliana
agaattcatcgcaaatt

SEQ ID NO: 28486 - DNA, 17 bp, Arabidopsis thaliana
agaattcccgaggatgg

SEQ ID NO: 28487 - DNA, 17 bp, Arabidopsis thaliana
agaattcctcgttggaa

SEQ ID NO: 28488 - DNA, 17 bp, Arabidopsis thaliana
agaattccttcaggcat

SEQ ID NO: 28489 - DNA, 17 bp, Arabidopsis thaliana
agaattcgaattacagg

SEQ ID NO: 28490 - DNA, 17 bp, Arabidopsis thaliana
agaattcgcagggctgg

SEQ ID NO: 28491 - DNA, 17 bp, Arabidopsis thaliana
agaattcgtcgaccaga

SEQ ID NO: 28492 - DNA, 17 bp, Arabidopsis thaliana
agaattcgtctcagcgg

SEQ ID NO: 28493 - DNA, 17 bp, Arabidopsis thaliana
agaattcgttggccctt

SEQ ID NO: 28494 - DNA, 17 bp, Arabidopsis thaliana
agaattctaaccttgtg

SEQ ID NO: 28495 - DNA, 17 bp, Arabidopsis thaliana
agaattctaagccgaaa

SEQ ID NO: 28496 - DNA, 17 bp, Arabidopsis thaliana
agaattctaagccgttg

SEQ ID NO: 28497 - DNA, 17 bp, Arabidopsis thaliana
agaattctcagtatgct

SEQ ID NO: 28498 - DNA, 17 bp, Arabidopsis thaliana
agaattctccgggatca

SEQ ID NO: 28499 - DNA, 17 bp, Arabidopsis thaliana
agaattcttcaactctg

SEQ ID NO: 28500 - DNA, 17 bp, Arabidopsis thaliana
agaattcttgctgagcc

SEQ ID NO: 28501 - DNA, 17 bp, Arabidopsis thaliana
agaattgacgaggtctt

SEQ ID NO: 28502 - DNA, 17 bp, Arabidopsis thaliana
agaattgacggatttag

SEQ ID NO: 28503 - DNA, 17 bp, Arabidopsis thaliana
agaattgacgggcttga

SEQ ID NO: 28504 - DNA, 17 bp, Arabidopsis thaliana
agaattgacgggtttag

SEQ ID NO: 28505 - DNA, 17 bp, Arabidopsis thaliana
agaattgactggtttgg

SEQ ID NO: 28506 - DNA, 17 bp, Arabidopsis thaliana
agaattgatttgaccac

SEQ ID NO: 28507 - DNA, 17 bp, Arabidopsis thaliana
agaattgcagaatggac

SEQ ID NO: 28508 - DNA, 17 bp, Arabidopsis thaliana
agaattgccgaccctca

SEQ ID NO: 28509 - DNA, 17 bp, Arabidopsis thaliana
agaattggacaaactag

SEQ ID NO: 28510 - DNA, 17 bp, Arabidopsis thaliana
agaattggctgctgaca

SEQ ID NO: 28511 - DNA, 17 bp, Arabidopsis thaliana
agaattggcttcttaac

SEQ ID NO: 28512 - DNA, 17 bp, Arabidopsis thaliana
agaattgggtccagtta

SEQ ID NO: 28513 - DNA, 17 bp, Arabidopsis thaliana
agaattgggttaccaca

SEQ ID NO: 28514 - DNA, 17 bp, Arabidopsis thaliana
agaattggtcggacgaa

SEQ ID NO: 28515 - DNA, 17 bp, Arabidopsis thaliana
agaattggtcggcttgt

SEQ ID NO: 28516 - DNA, 17 bp, Arabidopsis thaliana
agaattggtcttagtcg

SEQ ID NO: 28517 - DNA, 17 bp, Arabidopsis thaliana
agaattggtttcgttct

SEQ ID NO: 28518 - DNA, 17 bp, Arabidopsis thaliana
agaattgtctttggaga

SEQ ID NO: 28519 - DNA, 17 bp, Arabidopsis thaliana
agaattgtgtccagtta

SEQ ID NO: 28520 - DNA, 17 bp, Arabidopsis thaliana
agaattgttaccgaccc

SEQ ID NO: 28521 - DNA, 17 bp, Arabidopsis thaliana
agaattgtttggccaga

SEQ ID NO: 28522 - DNA, 17 bp, Arabidopsis thaliana
agaatttaatccttccg

SEQ ID NO: 28523 - DNA, 17 bp, Arabidopsis thaliana
agaatttagtgcgggag

SEQ ID NO: 28524 - DNA, 17 bp, Arabidopsis thaliana
agaatttcatcacggtg

SEQ ID NO: 28525 - DNA, 17 bp, Arabidopsis thaliana
agaatttcctaacaagg

SEQ ID NO: 28526 - DNA, 17 bp, Arabidopsis thaliana
agaatttcctgactaaa

SEQ ID NO: 28527 - DNA, 17 bp, Arabidopsis thaliana
agaatttgaaccgtaac

SEQ ID NO: 28528 - DNA, 17 bp, Arabidopsis thaliana
agaatttgaacgcgact

SEQ ID NO: 28529 - DNA, 17 bp, Arabidopsis thaliana
agaatttgactagacca

SEQ ID NO: 28530 - DNA, 17 bp, Arabidopsis thaliana
agaatttgatgataaat

SEQ ID NO: 28531 - DNA, 17 bp, Arabidopsis thaliana
agaatttgatgtaactt

SEQ ID NO: 28532 - DNA, 17 bp, Arabidopsis thaliana
agaatttgattcatccg

SEQ ID NO: 28533 - DNA, 17 bp, Arabidopsis thaliana
agaatttgccgaaagtt

SEQ ID NO: 28534 - DNA, 17 bp, Arabidopsis thaliana
agaatttgctgatcggc

SEQ ID NO: 28535 - DNA, 17 bp, Arabidopsis thaliana
agaatttgctgggatct

SEQ ID NO: 28536 - DNA, 17 bp, Arabidopsis thaliana
agaatttgcttccctaa

SEQ ID NO: 28537 - DNA, 17 bp, Arabidopsis thaliana
agaatttggctgtaaaa

SEQ ID NO: 28538 - DNA, 17 bp, Arabidopsis thaliana
agaatttggctgtaaag

SEQ ID NO: 28539 - DNA, 17 bp, Arabidopsis thaliana
agaatttggtccgttag

SEQ ID NO: 28540 - DNA, 17 bp, Arabidopsis thaliana
agaatttgtagtcccgt

SEQ ID NO: 28541 - DNA, 17 bp, Arabidopsis thaliana
agaatttgtcgaccagg

SEQ ID NO: 28542 - DNA, 17 bp, Arabidopsis thaliana
agaatttgtgcgcttgg

SEQ ID NO: 28543 - DNA, 17 bp, Arabidopsis thaliana
agaatttgttcggatat

SEQ ID NO: 28544 - DNA, 17 bp, Arabidopsis thaliana
agaattttcgtatgtcg

SEQ ID NO: 28545 - DNA, 17 bp, Arabidopsis thaliana
agaattttgcggtccca

SEQ ID NO: 28546 - DNA, 17 bp, Arabidopsis thaliana
agaattttgcggtgcca

SEQ ID NO: 28547 - DNA, 17 bp, Arabidopsis thaliana
agaattttgttggattg

SEQ ID NO: 28548 - DNA, 17 bp, Arabidopsis thaliana
agaatttttcgacgcac

SEQ ID NO: 28549 - DNA, 17 bp, Arabidopsis thaliana
agaatttttcgccgctt

SEQ ID NO: 28550 - DNA, 17 bp, Arabidopsis thaliana
agaatttttgttgatat

SEQ ID NO: 28551 - DNA, 17 bp, Arabidopsis thaliana
agacaaaaatcttctgg

SEQ ID NO: 28552 - DNA, 17 bp, Arabidopsis thaliana
agacaaaagaataatgt

SEQ ID NO: 28553 - DNA, 17 bp, Arabidopsis thaliana
agacaaaagacggcgtt

SEQ ID NO: 28554 - DNA, 17 bp, Arabidopsis thaliana
agacaaaagccatttgg

SEQ ID NO: 28555 - DNA, 17 bp, Arabidopsis thaliana
agacaaaagttttggcg

SEQ ID NO: 28556 - DNA, 17 bp, Arabidopsis thaliana
agacaaaatttggggtc

SEQ ID NO: 28557 - DNA, 17 bp, Arabidopsis thaliana
agacaaaccactgctgg

SEQ ID NO: 28558 - DNA, 17 bp, Arabidopsis thaliana
agacaaaccgacgctga

SEQ ID NO: 28559 - DNA, 17 bp, Arabidopsis thaliana
agacaaaccgtgagatc

SEQ ID NO: 28560 - DNA, 17 bp, Arabidopsis thaliana
agacaaacggtgaaaac

SEQ ID NO: 28561 - DNA, 17 bp, Arabidopsis thaliana
agacaaacgtccaaagc

SEQ ID NO: 28562 - DNA, 17 bp, Arabidopsis thaliana
agacaaacttggtcgga

SEQ ID NO: 28563 - DNA, 17 bp, Arabidopsis thaliana
agacaaagcccaccgct

SEQ ID NO: 28564 - DNA, 17 bp, Arabidopsis thaliana
agacaaagctccaggcc

SEQ ID NO: 28565 - DNA, 17 bp, Arabidopsis thaliana
agacaaagtcacgatgg

SEQ ID NO: 28566 - DNA, 17 bp, Arabidopsis thaliana
agacaaagtcggcgggt

SEQ ID NO: 28567 - DNA, 17 bp, Arabidopsis thaliana
agacaaagtggactgct

SEQ ID NO: 28568 - DNA, 17 bp, Arabidopsis thaliana
agacaaagtggactggt

SEQ ID NO: 28569 - DNA, 17 bp, Arabidopsis thaliana
agacaaataaatctgag

SEQ ID NO: 28570 - DNA, 17 bp, Arabidopsis thaliana
agacaaatactgcaatg

SEQ ID NO: 28571 - DNA, 17 bp, Arabidopsis thaliana
agacaaatcgctgttga

SEQ ID NO: 28572 - DNA, 17 bp, Arabidopsis thaliana
agacaaatcgtttgttg

SEQ ID NO: 28573 - DNA, 17 bp, Arabidopsis thaliana
agacaaatgtgctaatg

SEQ ID NO: 28574 - DNA, 17 bp, Arabidopsis thaliana
agacaaattaccgcttt

SEQ ID NO: 28575 - DNA, 17 bp, Arabidopsis thaliana
agacaaattagaccgct

SEQ ID NO: 28576 - DNA, 17 bp, Arabidopsis thaliana
agacaaattgtcttaag

SEQ ID NO: 28577 - DNA, 17 bp, Arabidopsis thaliana
agacaacaaaccgccgc

SEQ ID NO: 28578 - DNA, 17 bp, Arabidopsis thaliana
agacaacaaacgtggtg

SEQ ID NO: 28579 - DNA, 17 bp, Arabidopsis thaliana
agacaacacttatgccc

SEQ ID NO: 28580 - DNA, 17 bp, Arabidopsis thaliana
agacaacaggttcaaca

SEQ ID NO: 28581 - DNA, 17 bp, Arabidopsis thaliana
agacaaccactcgacct

SEQ ID NO: 28582 - DNA, 17 bp, Arabidopsis thaliana
agacaacctctacggtt

SEQ ID NO: 28583 - DNA, 17 bp, Arabidopsis thaliana
agacaacctgaatctga

SEQ ID NO: 28584 - DNA, 17 bp, Arabidopsis thaliana
agacaacctggcgaact

SEQ ID NO: 28585 - DNA, 17 bp, Arabidopsis thaliana
agacaacgacaagatct

SEQ ID NO: 28586 - DNA, 17 bp, Arabidopsis thaliana
agacaacgacagagtgt

SEQ ID NO: 28587 - DNA, 17 bp, Arabidopsis thaliana
agacaacgagctccttc

SEQ ID NO: 28588 - DNA, 17 bp, Arabidopsis thaliana
agacaacgattctgatt

SEQ ID NO: 28589 - DNA, 17 bp, Arabidopsis thaliana
agacaacgcagcagcta

SEQ ID NO: 28590 - DNA, 17 bp, Arabidopsis thaliana
agacaacgctgtacaga

SEQ ID NO: 28591 - DNA, 17 bp, Arabidopsis thaliana
agacaacggtcctgttc

SEQ ID NO: 28592 - DNA, 17 bp, Arabidopsis thaliana
agacaactccagtcttg

SEQ ID NO: 28593 - DNA, 17 bp, Arabidopsis thaliana
agacaactgagggcttc

SEQ ID NO: 28594 - DNA, 17 bp, Arabidopsis thaliana
agacaactgggtggtcg

SEQ ID NO: 28595 - DNA, 17 bp, Arabidopsis thaliana
agacaacttgaacaggt

SEQ ID NO: 28596 - DNA, 17 bp, Arabidopsis thaliana
agacaagaagccatagt

SEQ ID NO: 28597 - DNA, 17 bp, Arabidopsis thaliana
agacaagaattatgtga

SEQ ID NO: 28598 - DNA, 17 bp, Arabidopsis thaliana
agacaagacactggagc

SEQ ID NO: 28599 - DNA, 17 bp, Arabidopsis thaliana
agacaagaccaaaaggg

SEQ ID NO: 28600 - DNA, 17 bp, Arabidopsis thaliana
agacaagagatcttttc

SEQ ID NO: 28601 - DNA, 17 bp, Arabidopsis thaliana
agacaagagggctttct

SEQ ID NO: 28602 - DNA, 17 bp, Arabidopsis thaliana
agacaagcacaatgttg

SEQ ID NO: 28603 - DNA, 17 bp, Arabidopsis thaliana
agacaagcataacttcc

SEQ ID NO: 28604 - DNA, 17 bp, Arabidopsis thaliana
agacaagcatatggtat

SEQ ID NO: 28605 - DNA, 17 bp, Arabidopsis thaliana
agacaagcattaaacca

SEQ ID NO: 28606 - DNA, 17 bp, Arabidopsis thaliana
agacaagcggatactca

SEQ ID NO: 28607 - DNA, 17 bp, Arabidopsis thaliana
agacaagcgggcatgtt

SEQ ID NO: 28608 - DNA, 17 bp, Arabidopsis thaliana
agacaagctaagttgct

SEQ ID NO: 28609 - DNA, 17 bp, Arabidopsis thaliana
agacaagctattgatgg

SEQ ID NO: 28610 - DNA, 17 bp, Arabidopsis thaliana
agacaagctgagttgct

SEQ ID NO: 28611 - DNA, 17 bp, Arabidopsis thaliana
agacaagctggtgagaa

SEQ ID NO: 28612 - DNA, 17 bp, Arabidopsis thaliana
agacaagcttcctactc

SEQ ID NO: 28613 - DNA, 17 bp, Arabidopsis thaliana
agacaagctttcttttc

SEQ ID NO: 28614 - DNA, 17 bp, Arabidopsis thaliana
agacaaggagccacaaa

SEQ ID NO: 28615 - DNA, 17 bp, Arabidopsis thaliana
agacaaggcctgattcc

SEQ ID NO: 28616 - DNA, 17 bp, Arabidopsis thaliana
agacaaggcttttcggg

SEQ ID NO: 28617 - DNA, 17 bp, Arabidopsis thaliana
agacaagggatgtgtgt

SEQ ID NO: 28618 - DNA, 17 bp, Arabidopsis thaliana
agacaagggttgggcca

SEQ ID NO: 28619 - DNA, 17 bp, Arabidopsis thaliana
agacaagtacttgctag

SEQ ID NO: 28620 - DNA, 17 bp, Arabidopsis thaliana
agacaagtatgcaggag

SEQ ID NO: 28621 - DNA, 17 bp, Arabidopsis thaliana
agacaagtcaataaggg

SEQ ID NO: 28622 - DNA, 17 bp, Arabidopsis thaliana
agacaagtctgactctg

SEQ ID NO: 28623 - DNA, 17 bp, Arabidopsis thaliana
agacaagtgcggtttgt

SEQ ID NO: 28624 - DNA, 17 bp, Arabidopsis thaliana
agacaagtggccaggtg

SEQ ID NO: 28625 - DNA, 17 bp, Arabidopsis thaliana
agacaagtggtgggatc

SEQ ID NO: 28626 - DNA, 17 bp, Arabidopsis thaliana
agacaagtgtccacgag

SEQ ID NO: 28627 - DNA, 17 bp, Arabidopsis thaliana
agacaagtgtgcaggag

SEQ ID NO: 28628 - DNA, 17 bp, Arabidopsis thaliana
agacaatatgctactac

SEQ ID NO: 28629 - DNA, 17 bp, Arabidopsis thaliana
agacaatattcagcgtg

SEQ ID NO: 28630 - DNA, 17 bp, Arabidopsis thaliana
agacaatcaaagttggg

SEQ ID NO: 28631 - DNA, 17 bp, Arabidopsis thaliana
agacaatcacccggaga

SEQ ID NO: 28632 - DNA, 17 bp, Arabidopsis thaliana
agacaatcagcacggac

SEQ ID NO: 28633 - DNA, 17 bp, Arabidopsis thaliana
agacaatcgctggcgac

SEQ ID NO: 28634 - DNA, 17 bp, Arabidopsis thaliana
agacaatgctactgagc

SEQ ID NO: 28635 - DNA, 17 bp, Arabidopsis thaliana
agacaatgctgtggagc

SEQ ID NO: 28636 - DNA, 17 bp, Arabidopsis thaliana
agacaatggaacttttc

SEQ ID NO: 28637 - DNA, 17 bp, Arabidopsis thaliana
agacaatggacgctttt

SEQ ID NO: 28638 - DNA, 17 bp, Arabidopsis thaliana
agacaatgtgaacctgc

SEQ ID NO: 28639 - DNA, 17 bp, Arabidopsis thaliana
agacaatgttccacatc

SEQ ID NO: 28640 - DNA, 17 bp, Arabidopsis thaliana
agacaattaacggtgcc

SEQ ID NO: 28641 - DNA, 17 bp, Arabidopsis thaliana
agacaattccggacggg

SEQ ID NO: 28642 - DNA, 17 bp, Arabidopsis thaliana
agacaattcctccgacg

SEQ ID NO: 28643 - DNA, 17 bp, Arabidopsis thaliana
agacaattgcggtgact

SEQ ID NO: 28644 - DNA, 17 bp, Arabidopsis thaliana
agacaattggctctggt

SEQ ID NO: 28645 - DNA, 17 bp, Arabidopsis thaliana
agacaatttgcctaggt

SEQ ID NO: 28646 - DNA, 17 bp, Arabidopsis thaliana
agacaatttttcagatc

SEQ ID NO: 28647 - DNA, 17 bp, Arabidopsis thaliana
agacacaaaccctcgac

SEQ ID NO: 28648 - DNA, 17 bp, Arabidopsis thaliana
agacacaaaggcttaga

SEQ ID NO: 28649 - DNA, 17 bp, Arabidopsis thaliana
agacacaagataacccg

SEQ ID NO: 28650 - DNA, 17 bp, Arabidopsis thaliana
agacacaagcagcataa

SEQ ID NO: 28651 - DNA, 17 bp, Arabidopsis thaliana
agacacaatctgtgacg

SEQ ID NO: 28652 - DNA, 17 bp, Arabidopsis thaliana
agacacaatggctacag

SEQ ID NO: 28653 - DNA, 17 bp, Arabidopsis thaliana
agacacaatggctgcag

SEQ ID NO: 28654 - DNA, 17 bp, Arabidopsis thaliana
agacacaattttttttc

SEQ ID NO: 28655 - DNA, 17 bp, Arabidopsis thaliana
agacacacagctctcct

SEQ ID NO: 28656 - DNA, 17 bp, Arabidopsis thaliana
agacacacggtggtggg

SEQ ID NO: 28657 - DNA, 17 bp, Arabidopsis thaliana
agacacactcaactttg

SEQ ID NO: 28658 - DNA, 17 bp, Arabidopsis thaliana
agacacagaaattggta

SEQ ID NO: 28659 - DNA, 17 bp, Arabidopsis thaliana
agacacatatcatgagg

SEQ ID NO: 28660 - DNA, 17 bp, Arabidopsis thaliana
agacacatatgctgcag

SEQ ID NO: 28661 - DNA, 17 bp, Arabidopsis thaliana
agacacatcagcagatt

SEQ ID NO: 28662 - DNA, 17 bp, Arabidopsis thaliana
agacacatgtaaacatc

SEQ ID NO: 28663 - DNA, 17 bp, Arabidopsis thaliana
agacacatgttgctttg

SEQ ID NO: 28664 - DNA, 17 bp, Arabidopsis thaliana
agacacattgtgctcca

SEQ ID NO: 28665 - DNA, 17 bp, Arabidopsis thaliana
agacaccaaaaacttgt

SEQ ID NO: 28666 - DNA, 17 bp, Arabidopsis thaliana
agacaccaagtgttgga

SEQ ID NO: 28667 - DNA, 17 bp, Arabidopsis thaliana
agacaccagaataggcg

SEQ ID NO: 28668 - DNA, 17 bp, Arabidopsis thaliana
agacaccatcgctggct

SEQ ID NO: 28669 - DNA, 17 bp, Arabidopsis thaliana
agacaccatctccacca

SEQ ID NO: 28670 - DNA, 17 bp, Arabidopsis thaliana
agacacccctttgtttg

SEQ ID NO: 28671 - DNA, 17 bp, Arabidopsis thaliana
agacaccctccgtaccg

SEQ ID NO: 28672 - DNA, 17 bp, Arabidopsis thaliana
agacaccgacgcctcgt

SEQ ID NO: 28673 - DNA, 17 bp, Arabidopsis thaliana
agacaccgattccacgc

SEQ ID NO: 28674 - DNA, 17 bp, Arabidopsis thaliana
agacaccgtgatggtaa

SEQ ID NO: 28675 - DNA, 17 bp, Arabidopsis thaliana
agacacctccatcatac

SEQ ID NO: 28676 - DNA, 17 bp, Arabidopsis thaliana
agacacctgtttgtttt

SEQ ID NO: 28677 - DNA, 17 bp, Arabidopsis thaliana
agacaccttcaatatct

SEQ ID NO: 28678 - DNA, 17 bp, Arabidopsis thaliana
agacacgaaggttagtc

SEQ ID NO: 28679 - DNA, 17 bp, Arabidopsis thaliana
agacacgaatcgtttca

SEQ ID NO: 28680 - DNA, 17 bp, Arabidopsis thaliana
agacacgactatgccaa

SEQ ID NO: 28681 - DNA, 17 bp, Arabidopsis thaliana
agacacgatgtctgtag

SEQ ID NO: 28682 - DNA, 17 bp, Arabidopsis thaliana
agacacgctaacttgtg

SEQ ID NO: 28683 - DNA, 17 bp, Arabidopsis thaliana
agacacggagaaatcgg

SEQ ID NO: 28684 - DNA, 17 bp, Arabidopsis thaliana
agacacggtgcctgcag

SEQ ID NO: 28685 - DNA, 17 bp, Arabidopsis thaliana
agacacggtgcctgtag

SEQ ID NO: 28686 - DNA, 17 bp, Arabidopsis thaliana
agacacgtcagcagcta

SEQ ID NO: 28687 - DNA, 17 bp, Arabidopsis thaliana
agacacgtccataggtt

SEQ ID NO: 28688 - DNA, 17 bp, Arabidopsis thaliana
agacacgtcccattgta

SEQ ID NO: 28689 - DNA, 17 bp, Arabidopsis thaliana
agacacgtctgcctggg

SEQ ID NO: 28690 - DNA, 17 bp, Arabidopsis thaliana
agacacgttggttgctg

SEQ ID NO: 28691 - DNA, 17 bp, Arabidopsis thaliana
agacactactaagaaga

SEQ ID NO: 28692 - DNA, 17 bp, Arabidopsis thaliana
agacactatcttcacca

SEQ ID NO: 28693 - DNA, 17 bp, Arabidopsis thaliana
agacactatcttcccca

SEQ ID NO: 28694 - DNA, 17 bp, Arabidopsis thaliana
agacactatggacgaaa

SEQ ID NO: 28695 - DNA, 17 bp, Arabidopsis thaliana
agacactattcagacca

SEQ ID NO: 28696 - DNA, 17 bp, Arabidopsis thaliana
agacactattgattctc

SEQ ID NO: 28697 - DNA, 17 bp, Arabidopsis thaliana
agacactattggcggaa

SEQ ID NO: 28698 - DNA, 17 bp, Arabidopsis thaliana
agacactattgggaact

SEQ ID NO: 28699 - DNA, 17 bp, Arabidopsis thaliana
agacactctgatggctt

SEQ ID NO: 28700 - DNA, 17 bp, Arabidopsis thaliana
agacactgaagttgttc

SEQ ID NO: 28701 - DNA, 17 bp, Arabidopsis thaliana
agacactgacctaatca

SEQ ID NO: 28702 - DNA, 17 bp, Arabidopsis thaliana
agacactgtgatttctc

SEQ ID NO: 28703 - DNA, 17 bp, Arabidopsis thaliana
agacactttttgttgga

SEQ ID NO: 28704 - DNA, 17 bp, Arabidopsis thaliana
agacacttttttaaaac

SEQ ID NO: 28705 - DNA, 17 bp, Arabidopsis thaliana
agacagaaacagagccg

SEQ ID NO: 28706 - DNA, 17 bp, Arabidopsis thaliana
agacagaaactttggtc

SEQ ID NO: 28707 - DNA, 17 bp, Arabidopsis thaliana
agacagaaagacagatc

SEQ ID NO: 28708 - DNA, 17 bp, Arabidopsis thaliana
agacagaaatcaaagta

SEQ ID NO: 28709 - DNA, 17 bp, Arabidopsis thaliana
agacagaaatgcaggcg

SEQ ID NO: 28710 - DNA, 17 bp, Arabidopsis thaliana
agacagaacagacaatg

SEQ ID NO: 28711 - DNA, 17 bp, Arabidopsis thaliana
agacagaacctataccg

SEQ ID NO: 28712 - DNA, 17 bp, Arabidopsis thaliana
agacagaactcggcata

SEQ ID NO: 28713 - DNA, 17 bp, Arabidopsis thaliana
agacagaactgaagatt

SEQ ID NO: 28714 - DNA, 17 bp, Arabidopsis thaliana
agacagaacttaaaccg

SEQ ID NO: 28715 - DNA, 17 bp, Arabidopsis thaliana
agacagaacttatttac

SEQ ID NO: 28716 - DNA, 17 bp, Arabidopsis thaliana
agacagaagagttttga

SEQ ID NO: 28717 - DNA, 17 bp, Arabidopsis thaliana
agacagaagatgtcgtc

SEQ ID NO: 28718 - DNA, 17 bp, Arabidopsis thaliana
agacagaaggtactgga

SEQ ID NO: 28719 - DNA, 17 bp, Arabidopsis thaliana
agacagaagtacccagg

SEQ ID NO: 28720 - DNA, 17 bp, Arabidopsis thaliana
agacagaatctccgcag

SEQ ID NO: 28721 - DNA, 17 bp, Arabidopsis thaliana
agacagaatggcttgtt

SEQ ID NO: 28722 - DNA, 17 bp, Arabidopsis thaliana
agacagaatggtaaagg

SEQ ID NO: 28723 - DNA, 17 bp, Arabidopsis thaliana
agacagaattcgattta

SEQ ID NO: 28724 - DNA, 17 bp, Arabidopsis thaliana
agacagacagccccgac

SEQ ID NO: 28725 - DNA, 17 bp, Arabidopsis thaliana
agacagacagtgtggtc

SEQ ID NO: 28726 - DNA, 17 bp, Arabidopsis thaliana
agacagacagttgttgg

SEQ ID NO: 28727 - DNA, 17 bp, Arabidopsis thaliana
agacagacagttttttt

SEQ ID NO: 28728 - DNA, 17 bp, Arabidopsis thaliana
agacagacatttccaga

SEQ ID NO: 28729 - DNA, 17 bp, Arabidopsis thaliana
agacagaccaagaggtt

SEQ ID NO: 28730 - DNA, 17 bp, Arabidopsis thaliana
agacagaccaaggttgg

SEQ ID NO: 28731 - DNA, 17 bp, Arabidopsis thaliana
agacagaccaccacact

SEQ ID NO: 28732 - DNA, 17 bp, Arabidopsis thaliana
agacagaccagaaggag

SEQ ID NO: 28733 - DNA, 17 bp, Arabidopsis thaliana
agacagaccagagtatg

SEQ ID NO: 28734 - DNA, 17 bp, Arabidopsis thaliana
agacagaccatctccat

SEQ ID NO: 28735 - DNA, 17 bp, Arabidopsis thaliana
agacagacccaagtgac

SEQ ID NO: 28736 - DNA, 17 bp, Arabidopsis thaliana
agacagacccatttgca

SEQ ID NO: 28737 - DNA, 17 bp, Arabidopsis thaliana
agacagacccgatgtct

SEQ ID NO: 28738 - DNA, 17 bp, Arabidopsis thaliana
agacagacccgggttca

SEQ ID NO: 28739 - DNA, 17 bp, Arabidopsis thaliana
agacagacccgggttcg

SEQ ID NO: 28740 - DNA, 17 bp, Arabidopsis thaliana
agacagacccgtgttcg

SEQ ID NO: 28741 - DNA, 17 bp, Arabidopsis thaliana
agacagaccctgccttt

SEQ ID NO: 28742 - DNA, 17 bp, Arabidopsis thaliana
agacagaccgctatgtc

SEQ ID NO: 28743 - DNA, 17 bp, Arabidopsis thaliana
agacagaccggagatgt

SEQ ID NO: 28744 - DNA, 17 bp, Arabidopsis thaliana
agacagaccgtcgtgag

SEQ ID NO: 28745 - DNA, 17 bp, Arabidopsis thaliana
agacagaccgtgaggcc

SEQ ID NO: 28746 - DNA, 17 bp, Arabidopsis thaliana
agacagacctagctcgt

SEQ ID NO: 28747 - DNA, 17 bp, Arabidopsis thaliana
agacagacctcgcgaag

SEQ ID NO: 28748 - DNA, 17 bp, Arabidopsis thaliana
agacagacctggtcgct

SEQ ID NO: 28749 - DNA, 17 bp, Arabidopsis thaliana
agacagaccttctgaat

SEQ ID NO: 28750 - DNA, 17 bp, Arabidopsis thaliana
agacagacgaggccaag

SEQ ID NO: 28751 - DNA, 17 bp, Arabidopsis thaliana
agacagacgatcaaggt

SEQ ID NO: 28752 - DNA, 17 bp, Arabidopsis thaliana
agacagacgatggtcct

SEQ ID NO: 28753 - DNA, 17 bp, Arabidopsis thaliana
agacagacgattgaccg

SEQ ID NO: 28754 - DNA, 17 bp, Arabidopsis thaliana
agacagacgcatttctt

SEQ ID NO: 28755 - DNA, 17 bp, Arabidopsis thaliana
agacagacgctgcgacg

SEQ ID NO: 28756 - DNA, 17 bp, Arabidopsis thaliana
agacagacggacagtgt

SEQ ID NO: 28757 - DNA, 17 bp, Arabidopsis thaliana
agacagacgtagcgtac

SEQ ID NO: 28758 - DNA, 17 bp, Arabidopsis thaliana
agacagacgtcgctgcc

SEQ ID NO: 28759 - DNA, 17 bp, Arabidopsis thaliana
agacagacgtgctggga

SEQ ID NO: 28760 - DNA, 17 bp, Arabidopsis thaliana
agacagactatagtcgc

SEQ ID NO: 28761 - DNA, 17 bp, Arabidopsis thaliana
agacagactcaagggga

SEQ ID NO: 28762 - DNA, 17 bp, Arabidopsis thaliana
agacagactcagccctt

SEQ ID NO: 28763 - DNA, 17 bp, Arabidopsis thaliana
agacagactcatatgga

SEQ ID NO: 28764 - DNA, 17 bp, Arabidopsis thaliana
agacagactccgaacgg

SEQ ID NO: 28765 - DNA, 17 bp, Arabidopsis thaliana
agacagactcgagttcg

SEQ ID NO: 28766 - DNA, 17 bp, Arabidopsis thaliana
agacagactcttgatcg

SEQ ID NO: 28767 - DNA, 17 bp, Arabidopsis thaliana
agacagactgaactgtg

SEQ ID NO: 28768 - DNA, 17 bp, Arabidopsis thaliana
agacagactgttcagac

SEQ ID NO: 28769 - DNA, 17 bp, Arabidopsis thaliana
agacagactgttcagat

SEQ ID NO: 28770 - DNA, 17 bp, Arabidopsis thaliana
agacagacttagcgata

SEQ ID NO: 28771 - DNA, 17 bp, Arabidopsis thaliana
agacagacttagtttaa

SEQ ID NO: 28772 - DNA, 17 bp, Arabidopsis thaliana
agacagacttcatcgac

SEQ ID NO: 28773 - DNA, 17 bp, Arabidopsis thaliana
agacagacttggtcctg

SEQ ID NO: 28774 - DNA, 17 bp, Arabidopsis thaliana
agacagactttaaagat

SEQ ID NO: 28775 - DNA, 17 bp, Arabidopsis thaliana
agacagactttgaatgg

SEQ ID NO: 28776 - DNA, 17 bp, Arabidopsis thaliana
agacagactttgccatt

SEQ ID NO: 28777 - DNA, 17 bp, Arabidopsis thaliana
agacagacttttgatct

SEQ ID NO: 28778 - DNA, 17 bp, Arabidopsis thaliana
agacagactttttgtaa

SEQ ID NO: 28779 - DNA, 17 bp, Arabidopsis thaliana
agacagagactaccttg

SEQ ID NO: 28780 - DNA, 17 bp, Arabidopsis thaliana
agacagagactgtaacc

SEQ ID NO: 28781 - DNA, 17 bp, Arabidopsis thaliana
agacagagatatcatct

SEQ ID NO: 28782 - DNA, 17 bp, Arabidopsis thaliana
agacagagcaagacgtc

SEQ ID NO: 28783 - DNA, 17 bp, Arabidopsis thaliana
agacagagcatgtccat

SEQ ID NO: 28784 - DNA, 17 bp, Arabidopsis thaliana
agacagagccacagtgg

SEQ ID NO: 28785 - DNA, 17 bp, Arabidopsis thaliana
agacagagccatcatct

SEQ ID NO: 28786 - DNA, 17 bp, Arabidopsis thaliana
agacagagccatccgat

SEQ ID NO: 28787 - DNA, 17 bp, Arabidopsis thaliana
agacagagcccgcgtcg

SEQ ID NO: 28788 - DNA, 17 bp, Arabidopsis thaliana
agacagaggaagcatct

SEQ ID NO: 28789 - DNA, 17 bp, Arabidopsis thaliana
agacagaggctctaacc

SEQ ID NO: 28790 - DNA, 17 bp, Arabidopsis thaliana
agacagagtaaatactg

SEQ ID NO: 28791 - DNA, 17 bp, Arabidopsis thaliana
agacagagtaggacgtt

SEQ ID NO: 28792 - DNA, 17 bp, Arabidopsis thaliana
agacagagtatctctca

SEQ ID NO: 28793 - DNA, 17 bp, Arabidopsis thaliana
agacagagtcagggcgg

SEQ ID NO: 28794 - DNA, 17 bp, Arabidopsis thaliana
agacagagtctgttctg

SEQ ID NO: 28795 - DNA, 17 bp, Arabidopsis thaliana
agacagagtgaacggcc

SEQ ID NO: 28796 - DNA, 17 bp, Arabidopsis thaliana
agacagagtgtggccca

SEQ ID NO: 28797 - DNA, 17 bp, Arabidopsis thaliana
agacagagtgtttcgag

SEQ ID NO: 28798 - DNA, 17 bp, Arabidopsis thaliana
agacagagttagaccca

SEQ ID NO: 28799 - DNA, 17 bp, Arabidopsis thaliana
agacagagttcgtatct

SEQ ID NO: 28800 - DNA, 17 bp, Arabidopsis thaliana
agacagagttctctcaa

SEQ ID NO: 28801 - DNA, 17 bp, Arabidopsis thaliana
agacagagttggtctgc

SEQ ID NO: 28802 - DNA, 17 bp, Arabidopsis thaliana
agacagagttgttttct

SEQ ID NO: 28803 - DNA, 17 bp, Arabidopsis thaliana
agacagatattaagagc

SEQ ID NO: 28804 - DNA, 17 bp, Arabidopsis thaliana
agacagatattggtgcg

SEQ ID NO: 28805 - DNA, 17 bp, Arabidopsis thaliana
agacagatatttgtgcg

SEQ ID NO: 28806 - DNA, 17 bp, Arabidopsis thaliana
agacagatcatcttcac

SEQ ID NO: 28807 - DNA, 17 bp, Arabidopsis thaliana
agacagatcatgttcgc

SEQ ID NO: 28808 - DNA, 17 bp, Arabidopsis thaliana
agacagatccagttgcg

SEQ ID NO: 28809 - DNA, 17 bp, Arabidopsis thaliana
agacagatccagttgtt

SEQ ID NO: 28810 - DNA, 17 bp, Arabidopsis thaliana
agacagatccgaaggct

SEQ ID NO: 28811 - DNA, 17 bp, Arabidopsis thaliana
agacagatccgacggta

SEQ ID NO: 28812 - DNA, 17 bp, Arabidopsis thaliana
agacagatccggttgcg

SEQ ID NO: 28813 - DNA, 17 bp, Arabidopsis thaliana
agacagatccggttgct

SEQ ID NO: 28814 - DNA, 17 bp, Arabidopsis thaliana
agacagatccgttcttg

SEQ ID NO: 28815 - DNA, 17 bp, Arabidopsis thaliana
agacagatcggagatgt

SEQ ID NO: 28816 - DNA, 17 bp, Arabidopsis thaliana
agacagatcgtgttgcg

SEQ ID NO: 28817 - DNA, 17 bp, Arabidopsis thaliana
agacagatctagccaag

SEQ ID NO: 28818 - DNA, 17 bp, Arabidopsis thaliana
agacagatctgattgaa

SEQ ID NO: 28819 - DNA, 17 bp, Arabidopsis thaliana
agacagatctggccaaa

SEQ ID NO: 28820 - DNA, 17 bp, Arabidopsis thaliana
agacagatctggccaca

SEQ ID NO: 28821 - DNA, 17 bp, Arabidopsis thaliana
agacagatctggttgac

SEQ ID NO: 28822 - DNA, 17 bp, Arabidopsis thaliana
agacagatcttcttcac

SEQ ID NO: 28823 - DNA, 17 bp, Arabidopsis thaliana
agacagatcttgctgcg

SEQ ID NO: 28824 - DNA, 17 bp, Arabidopsis thaliana
agacagatctttagcgt

SEQ ID NO: 28825 - DNA, 17 bp, Arabidopsis thaliana
agacagatggatcatcc

SEQ ID NO: 28826 - DNA, 17 bp, Arabidopsis thaliana
agacagatgtagcgttc

SEQ ID NO: 28827 - DNA, 17 bp, Arabidopsis thaliana
agacagatgttctgggc

SEQ ID NO: 28828 - DNA, 17 bp, Arabidopsis thaliana
agacagattcaatcgcg

SEQ ID NO: 28829 - DNA, 17 bp, Arabidopsis thaliana
agacagattcagccaag

SEQ ID NO: 28830 - DNA, 17 bp, Arabidopsis thaliana
agacagattcagccctt

SEQ ID NO: 28831 - DNA, 17 bp, Arabidopsis thaliana
agacagattcgaactct

SEQ ID NO: 28832 - DNA, 17 bp, Arabidopsis thaliana
agacagattctaagtct

SEQ ID NO: 28833 - DNA, 17 bp, Arabidopsis thaliana
agacagattctagccca

SEQ ID NO: 28834 - DNA, 17 bp, Arabidopsis thaliana
agacagattctgacaac

SEQ ID NO: 28835 - DNA, 17 bp, Arabidopsis thaliana
agacagattggtttcct

SEQ ID NO: 28836 - DNA, 17 bp, Arabidopsis thaliana
agacagatttcaagttc

SEQ ID NO: 28837 - DNA, 17 bp, Arabidopsis thaliana
agacagatttcctttct

SEQ ID NO: 28838 - DNA, 17 bp, Arabidopsis thaliana
agacagatttcgtggct

SEQ ID NO: 28839 - DNA, 17 bp, Arabidopsis thaliana
agacagatttgcctcgc

SEQ ID NO: 28840 - DNA, 17 bp, Arabidopsis thaliana
agacagatttggagtga

SEQ ID NO: 28841 - DNA, 17 bp, Arabidopsis thaliana
agacagatttgtcatgg

SEQ ID NO: 28842 - DNA, 17 bp, Arabidopsis thaliana
agacagattttaaccca

SEQ ID NO: 28843 - DNA, 17 bp, Arabidopsis thaliana
agacagattttgacatt

SEQ ID NO: 28844 - DNA, 17 bp, Arabidopsis thaliana
agacagattttgacccg

SEQ ID NO: 28845 - DNA, 17 bp, Arabidopsis thaliana
agacagattttgcacat

SEQ ID NO: 28846 - DNA, 17 bp, Arabidopsis thaliana
agacagatttttctggt

SEQ ID NO: 28847 - DNA, 17 bp, Arabidopsis thaliana
agacagcaacgggttct

SEQ ID NO: 28848 - DNA, 17 bp, Arabidopsis thaliana
agacagcacttaatcaa

SEQ ID NO: 28849 - DNA, 17 bp, Arabidopsis thaliana
agacagcacttaatcat

SEQ ID NO: 28850 - DNA, 17 bp, Arabidopsis thaliana
agacagcacttaatcca

SEQ ID NO: 28851 - DNA, 17 bp, Arabidopsis thaliana
agacagcagcgattata

SEQ ID NO: 28852 - DNA, 17 bp, Arabidopsis thaliana
agacagcaggacggtgg

SEQ ID NO: 28853 - DNA, 17 bp, Arabidopsis thaliana
agacagccaggaggttt

SEQ ID NO: 28854 - DNA, 17 bp, Arabidopsis thaliana
agacagccccgacgaaa

SEQ ID NO: 28855 - DNA, 17 bp, Arabidopsis thaliana
agacagcccgctttgac

SEQ ID NO: 28856 - DNA, 17 bp, Arabidopsis thaliana
agacagccgaacatttg

SEQ ID NO: 28857 - DNA, 17 bp, Arabidopsis thaliana
agacagccgatgggtcc

SEQ ID NO: 28858 - DNA, 17 bp, Arabidopsis thaliana
agacagccttctttctc

SEQ ID NO: 28859 - DNA, 17 bp, Arabidopsis thaliana
agacagcgattttgtgg

SEQ ID NO: 28860 - DNA, 17 bp, Arabidopsis thaliana
agacagcgtggcccacc

SEQ ID NO: 28861 - DNA, 17 bp, Arabidopsis thaliana
agacagcgtgtgtgaat

SEQ ID NO: 28862 - DNA, 17 bp, Arabidopsis thaliana
agacagctcagaaagtc

SEQ ID NO: 28863 - DNA, 17 bp, Arabidopsis thaliana
agacagctcgccagccc

SEQ ID NO: 28864 - DNA, 17 bp, Arabidopsis thaliana
agacagctcgccagctc

SEQ ID NO: 28865 - DNA, 17 bp, Arabidopsis thaliana
agacagcttcaagatca

SEQ ID NO: 28866 - DNA, 17 bp, Arabidopsis thaliana
agacaggaaaataacag

SEQ ID NO: 28867 - DNA, 17 bp, Arabidopsis thaliana
agacaggaaaatcacag

SEQ ID NO: 28868 - DNA, 17 bp, Arabidopsis thaliana
agacaggaattccaagt

SEQ ID NO: 28869 - DNA, 17 bp, Arabidopsis thaliana
agacaggagggcgttta

SEQ ID NO: 28870 - DNA, 17 bp, Arabidopsis thaliana
agacaggatccacacca

SEQ ID NO: 28871 - DNA, 17 bp, Arabidopsis thaliana
agacaggcgatcatccg

SEQ ID NO: 28872 - DNA, 17 bp, Arabidopsis thaliana
agacaggcgatcatcgg

SEQ ID NO: 28873 - DNA, 17 bp, Arabidopsis thaliana
agacaggcggagaaggg

SEQ ID NO: 28874 - DNA, 17 bp, Arabidopsis thaliana
agacaggcggctcatga

SEQ ID NO: 28875 - DNA, 17 bp, Arabidopsis thaliana
agacaggctcagattct

SEQ ID NO: 28876 - DNA, 17 bp, Arabidopsis thaliana
agacagggacagtcggg

SEQ ID NO: 28877 - DNA, 17 bp, Arabidopsis thaliana
agacagggattccaagt

SEQ ID NO: 28878 - DNA, 17 bp, Arabidopsis thaliana
agacaggtaatcaggcc

SEQ ID NO: 28879 - DNA, 17 bp, Arabidopsis thaliana
agacaggtaatcaggtc

SEQ ID NO: 28880 - DNA, 17 bp, Arabidopsis thaliana
agacaggtctttgcttg

SEQ ID NO: 28881 - DNA, 17 bp, Arabidopsis thaliana
agacaggtggtgcatgg

SEQ ID NO: 28882 - DNA, 17 bp, Arabidopsis thaliana
agacaggtgttggaata

SEQ ID NO: 28883 - DNA, 17 bp, Arabidopsis thaliana
agacaggttgcctgaaa

SEQ ID NO: 28884 - DNA, 17 bp, Arabidopsis thaliana
agacagtacagcagcga

SEQ ID NO: 28885 - DNA, 17 bp, Arabidopsis thaliana
agacagtaccgtttcgc

SEQ ID NO: 28886 - DNA, 17 bp, Arabidopsis thaliana
agacagtaccgtttcgg

SEQ ID NO: 28887 - DNA, 17 bp, Arabidopsis thaliana
agacagtagcacactgc

SEQ ID NO: 28888 - DNA, 17 bp, Arabidopsis thaliana
agacagtagtgctggta

SEQ ID NO: 28889 - DNA, 17 bp, Arabidopsis thaliana
agacagtatcttccaag

SEQ ID NO: 28890 - DNA, 17 bp, Arabidopsis thaliana
agacagtatggcgaaaa

SEQ ID NO: 28891 - DNA, 17 bp, Arabidopsis thaliana
agacagtatggtagtca

SEQ ID NO: 28892 - DNA, 17 bp, Arabidopsis thaliana
agacagtatggtagtcc

SEQ ID NO: 28893 - DNA, 17 bp, Arabidopsis thaliana
agacagtcgatgggtcc

SEQ ID NO: 28894 - DNA, 17 bp, Arabidopsis thaliana
agacagtctaaagcgtc

SEQ ID NO: 28895 - DNA, 17 bp, Arabidopsis thaliana
agacagtctcagcttct

SEQ ID NO: 28896 - DNA, 17 bp, Arabidopsis thaliana
agacagtctggatcggg

SEQ ID NO: 28897 - DNA, 17 bp, Arabidopsis thaliana
agacagtgaatttgatg

SEQ ID NO: 28898 - DNA, 17 bp, Arabidopsis thaliana
agacagtgcgggacaat

SEQ ID NO: 28899 - DNA, 17 bp, Arabidopsis thaliana
agacagtgctgcaagag

SEQ ID NO: 28900 - DNA, 17 bp, Arabidopsis thaliana
agacagtggcgcgaagc

SEQ ID NO: 28901 - DNA, 17 bp, Arabidopsis thaliana
agacagtgtggtgatcc

SEQ ID NO: 28902 - DNA, 17 bp, Arabidopsis thaliana
agacagtgtggtggtcc

SEQ ID NO: 28903 - DNA, 17 bp, Arabidopsis thaliana
agacagtgtggtggtct

SEQ ID NO: 28904 - DNA, 17 bp, Arabidopsis thaliana
agacagttatgtcttaa

SEQ ID NO: 28905 - DNA, 17 bp, Arabidopsis thaliana
agacagttcggtccata

SEQ ID NO: 28906 - DNA, 17 bp, Arabidopsis thaliana
agacagttcttcgaggt

SEQ ID NO: 28907 - DNA, 17 bp, Arabidopsis thaliana
agacagttgatattgac

SEQ ID NO: 28908 - DNA, 17 bp, Arabidopsis thaliana
agacagttggtccatat

SEQ ID NO: 28909 - DNA, 17 bp, Arabidopsis thaliana
agacagttgttggagcg

SEQ ID NO: 28910 - DNA, 17 bp, Arabidopsis thaliana
agacagtttctactgga

SEQ ID NO: 28911 - DNA, 17 bp, Arabidopsis thaliana
agacagtttctatgggg

SEQ ID NO: 28912 - DNA, 17 bp, Arabidopsis thaliana
agacagtttgccgagct

SEQ ID NO: 28913 - DNA, 17 bp, Arabidopsis thaliana
agacagttttatcatgg

SEQ ID NO: 28914 - DNA, 17 bp, Arabidopsis thaliana
agacagttttgataaag

SEQ ID NO: 28915 - DNA, 17 bp, Arabidopsis thaliana
agacagttttgtatgct

SEQ ID NO: 28916 - DNA, 17 bp, Arabidopsis thaliana
agacagttttttttgat

SEQ ID NO: 28917 - DNA, 17 bp, Arabidopsis thaliana
agacataaagctttttg

SEQ ID NO: 28918 - DNA, 17 bp, Arabidopsis thaliana
agacataacaacttgat

SEQ ID NO: 28919 - DNA, 17 bp, Arabidopsis thaliana
agacataacgaaccgac

SEQ ID NO: 28920 - DNA, 17 bp, Arabidopsis thaliana
agacatactccatcgag

SEQ ID NO: 28921 - DNA, 17 bp, Arabidopsis thaliana
agacatactccatcgtg

SEQ ID NO: 28922 - DNA, 17 bp, Arabidopsis thaliana
agacatagcgactgcga

SEQ ID NO: 28923 - DNA, 17 bp, Arabidopsis thaliana
agacatatcactgtcta

SEQ ID NO: 28924 - DNA, 17 bp, Arabidopsis thaliana
agacatatgaggaatca

SEQ ID NO: 28925 - DNA, 17 bp, Arabidopsis thaliana
agacatatggaccgagg

SEQ ID NO: 28926 - DNA, 17 bp, Arabidopsis thaliana
agacatatggtggtggt

SEQ ID NO: 28927 - DNA, 17 bp, Arabidopsis thaliana
agacatatttggagtga

SEQ ID NO: 28928 - DNA, 17 bp, Arabidopsis thaliana
agacatcaaatttgggg

SEQ ID NO: 28929 - DNA, 17 bp, Arabidopsis thaliana
agacatcaacttcttat

SEQ ID NO: 28930 - DNA, 17 bp, Arabidopsis thaliana
agacatcatcgggtgaa

SEQ ID NO: 28931 - DNA, 17 bp, Arabidopsis thaliana
agacatcatcttcacca

SEQ ID NO: 28932 - DNA, 17 bp, Arabidopsis thaliana
agacatccaaaattaaa

SEQ ID NO: 28933 - DNA, 17 bp, Arabidopsis thaliana
agacatccgagttaacg

SEQ ID NO: 28934 - DNA, 17 bp, Arabidopsis thaliana
agacatcctagacttta

SEQ ID NO: 28935 - DNA, 17 bp, Arabidopsis thaliana
agacatcgccggacatc

SEQ ID NO: 28936 - DNA, 17 bp, Arabidopsis thaliana
agacatcgctttggacc

SEQ ID NO: 28937 - DNA, 17 bp, Arabidopsis thaliana
agacatcggtttgagtt

SEQ ID NO: 28938 - DNA, 17 bp, Arabidopsis thaliana
agacatcgtctgcacca

SEQ ID NO: 28939 - DNA, 17 bp, Arabidopsis thaliana
agacatcgtgatggtaa

SEQ ID NO: 28940 - DNA, 17 bp, Arabidopsis thaliana
agacatcgttttggtac

SEQ ID NO: 28941 - DNA, 17 bp, Arabidopsis thaliana
agacatctatcttggct

SEQ ID NO: 28942 - DNA, 17 bp, Arabidopsis thaliana
agacatctatttgggct

SEQ ID NO: 28943 - DNA, 17 bp, Arabidopsis thaliana
agacatctcaaattgcg

SEQ ID NO: 28944 - DNA, 17 bp, Arabidopsis thaliana
agacatctcattggcct

SEQ ID NO: 28945 - DNA, 17 bp, Arabidopsis thaliana
agacatctctaagcttt

SEQ ID NO: 28946 - DNA, 17 bp, Arabidopsis thaliana
agacatctgagcatacg

SEQ ID NO: 28947 - DNA, 17 bp, Arabidopsis thaliana
agacatctgctacagct

SEQ ID NO: 28948 - DNA, 17 bp, Arabidopsis thaliana
agacatgactggtttaa

SEQ ID NO: 28949 - DNA, 17 bp, Arabidopsis thaliana
agacatgagatcgcaat

SEQ ID NO: 28950 - DNA, 17 bp, Arabidopsis thaliana
agacatgcagtgaaatt

SEQ ID NO: 28951 - DNA, 17 bp, Arabidopsis thaliana
agacatgcatgggtgga

SEQ ID NO: 28952 - DNA, 17 bp, Arabidopsis thaliana
agacatgccgctatcag

SEQ ID NO: 28953 - DNA, 17 bp, Arabidopsis thaliana
agacatgccgttatcag

SEQ ID NO: 28954 - DNA, 17 bp, Arabidopsis thaliana
agacatgccgttatccg

SEQ ID NO: 28955 - DNA, 17 bp, Arabidopsis thaliana
agacatgccttcaattt

SEQ ID NO: 28956 - DNA, 17 bp, Arabidopsis thaliana
agacatgctcatgctga

SEQ ID NO: 28957 - DNA, 17 bp, Arabidopsis thaliana
agacatgcttgagactg

SEQ ID NO: 28958 - DNA, 17 bp, Arabidopsis thaliana
agacatgggcgtcagcg

SEQ ID NO: 28959 - DNA, 17 bp, Arabidopsis thaliana
agacatggtccaagccc

SEQ ID NO: 28960 - DNA, 17 bp, Arabidopsis thaliana
agacatgtagaccggga

SEQ ID NO: 28961 - DNA, 17 bp, Arabidopsis thaliana
agacatgtagaccgggg

SEQ ID NO: 28962 - DNA, 17 bp, Arabidopsis thaliana
agacatgtagccgctac

SEQ ID NO: 28963 - DNA, 17 bp, Arabidopsis thaliana
agacatgtatactgcag

SEQ ID NO: 28964 - DNA, 17 bp, Arabidopsis thaliana
agacatgtctattttgg

SEQ ID NO: 28965 - DNA, 17 bp, Arabidopsis thaliana
agacatgtgcgccgttt

SEQ ID NO: 28966 - DNA, 17 bp, Arabidopsis thaliana
agacatgtgtaagttgt

SEQ ID NO: 28967 - DNA, 17 bp, Arabidopsis thaliana
agacatgttttaccact

SEQ ID NO: 28968 - DNA, 17 bp, Arabidopsis thaliana
agacattaaacgttgcc

SEQ ID NO: 28969 - DNA, 17 bp, Arabidopsis thaliana
agacattaaagtcaccg

SEQ ID NO: 28970 - DNA, 17 bp, Arabidopsis thaliana
agacattaccggagatc

SEQ ID NO: 28971 - DNA, 17 bp, Arabidopsis thaliana
agacattaggtcatctc

SEQ ID NO: 28972 - DNA, 17 bp, Arabidopsis thaliana
agacattaggtcgtctt

SEQ ID NO: 28973 - DNA, 17 bp, Arabidopsis thaliana
agacattatcttggacg

SEQ ID NO: 28974 - DNA, 17 bp, Arabidopsis thaliana
agacattatggctctgg

SEQ ID NO: 28975 - DNA, 17 bp, Arabidopsis thaliana
agacattcaccggcgcg

SEQ ID NO: 28976 - DNA, 17 bp, Arabidopsis thaliana
agacattcaccggtgcg

SEQ ID NO: 28977 - DNA, 17 bp, Arabidopsis thaliana
agacattcagcgtcgct

SEQ ID NO: 28978 - DNA, 17 bp, Arabidopsis thaliana
agacattcagtttgctg

SEQ ID NO: 28979 - DNA, 17 bp, Arabidopsis thaliana
agacattcatcacgcga

SEQ ID NO: 28980 - DNA, 17 bp, Arabidopsis thaliana
agacattccgatcgtca

SEQ ID NO: 28981 - DNA, 17 bp, Arabidopsis thaliana
agacattcctcctcatt

SEQ ID NO: 28982 - DNA, 17 bp, Arabidopsis thaliana
agacattcctcgggggc

SEQ ID NO: 28983 - DNA, 17 bp, Arabidopsis thaliana
agacattctcagcgagg

SEQ ID NO: 28984 - DNA, 17 bp, Arabidopsis thaliana
agacattcttaggtgac

SEQ ID NO: 28985 - DNA, 17 bp, Arabidopsis thaliana
agacattggaaacgcgg

SEQ ID NO: 28986 - DNA, 17 bp, Arabidopsis thaliana
agacattggccgatttg

SEQ ID NO: 28987 - DNA, 17 bp, Arabidopsis thaliana
agacattgtaaccctcg

SEQ ID NO: 28988 - DNA, 17 bp, Arabidopsis thaliana
agacattgtttctccgt

SEQ ID NO: 28989 - DNA, 17 bp, Arabidopsis thaliana
agacatttagttggtct

SEQ ID NO: 28990 - DNA, 17 bp, Arabidopsis thaliana
agacatttcaatgtatg

SEQ ID NO: 28991 - DNA, 17 bp, Arabidopsis thaliana
agacatttcaatgtctc

SEQ ID NO: 28992 - DNA, 17 bp, Arabidopsis thaliana
agacatttccagagaca

SEQ ID NO: 28993 - DNA, 17 bp, Arabidopsis thaliana
agacatttcggtccata

SEQ ID NO: 28994 - DNA, 17 bp, Arabidopsis thaliana
agacattttagcttagc

SEQ ID NO: 28995 - DNA, 17 bp, Arabidopsis thaliana
agacattttagctttgc

SEQ ID NO: 28996 - DNA, 17 bp, Arabidopsis thaliana
agacattttagttttga

SEQ ID NO: 28997 - DNA, 17 bp, Arabidopsis thaliana
agacattttatcagtag

SEQ ID NO: 28998 - DNA, 17 bp, Arabidopsis thaliana
agacattttcgtgattt

SEQ ID NO: 28999 - DNA, 17 bp, Arabidopsis thaliana
agacattttgacgtggt

SEQ ID NO: 29000 - DNA, 17 bp, Arabidopsis thaliana
agacattttgggagaaa

SEQ ID NO: 29001 - DNA, 17 bp, Arabidopsis thaliana
agacattttgttccgca

SEQ ID NO: 29002 - DNA, 17 bp, Arabidopsis thaliana
agacatttttgcgcacg

SEQ ID NO: 29003 - DNA, 17 bp, Arabidopsis thaliana
agaccaaaatgtggcag

SEQ ID NO: 29004 - DNA, 17 bp, Arabidopsis thaliana
agaccaaacggttgcat

SEQ ID NO: 29005 - DNA, 17 bp, Arabidopsis thaliana
agaccaaactcaacgac

SEQ ID NO: 29006 - DNA, 17 bp, Arabidopsis thaliana
agaccaaacttcacgta

SEQ ID NO: 29007 - DNA, 17 bp, Arabidopsis thaliana
agaccaaatctggttgt

SEQ ID NO: 29008 - DNA, 17 bp, Arabidopsis thaliana
agaccaaatgccattcc

SEQ ID NO: 29009 - DNA, 17 bp, Arabidopsis thaliana
agaccaaatggaccaat

SEQ ID NO: 29010 - DNA, 17 bp, Arabidopsis thaliana
agaccaaccatttattc

SEQ ID NO: 29011 - DNA, 17 bp, Arabidopsis thaliana
agaccaacctgtcagat

SEQ ID NO: 29012 - DNA, 17 bp, Arabidopsis thaliana
agaccaacctttgtgtg

SEQ ID NO: 29013 - DNA, 17 bp, Arabidopsis thaliana
agaccaacgagctgttg

SEQ ID NO: 29014 - DNA, 17 bp, Arabidopsis thaliana
agaccaacgatctgttt

SEQ ID NO: 29015 - DNA, 17 bp, Arabidopsis thaliana
agaccaacgggtttgcg

SEQ ID NO: 29016 - DNA, 17 bp, Arabidopsis thaliana
agaccaacgtggggtta

SEQ ID NO: 29017 - DNA, 17 bp, Arabidopsis thaliana
agaccaacgtgtagcgt

SEQ ID NO: 29018 - DNA, 17 bp, Arabidopsis thaliana
agaccaactacaaactg

SEQ ID NO: 29019 - DNA, 17 bp, Arabidopsis thaliana
agaccaactttccagag

SEQ ID NO: 29020 - DNA, 17 bp, Arabidopsis thaliana
agaccaagaggtttcca

SEQ ID NO: 29021 - DNA, 17 bp, Arabidopsis thaliana
agaccaagatcctcctg

SEQ ID NO: 29022 - DNA, 17 bp, Arabidopsis thaliana
agaccaagcgtactatt

SEQ ID NO: 29023 - DNA, 17 bp, Arabidopsis thaliana
agaccaagctactgatg

SEQ ID NO: 29024 - DNA, 17 bp, Arabidopsis thaliana
agaccaaggatgacttg

SEQ ID NO: 29025 - DNA, 17 bp, Arabidopsis thaliana
agaccaaggcataagtc

SEQ ID NO: 29026 - DNA, 17 bp, Arabidopsis thaliana
agaccaaggtcggagtt

SEQ ID NO: 29027 - DNA, 17 bp, Arabidopsis thaliana
agaccaaggtgggctaa

SEQ ID NO: 29028 - DNA, 17 bp, Arabidopsis thaliana
agaccaaggttggagtt

SEQ ID NO: 29029 - DNA, 17 bp, Arabidopsis thaliana
agaccaagtccgggtgt

SEQ ID NO: 29030 - DNA, 17 bp, Arabidopsis thaliana
agaccaagttcatcgat

SEQ ID NO: 29031 - DNA, 17 bp, Arabidopsis thaliana
agaccaagttgaaacac

SEQ ID NO: 29032 - DNA, 17 bp, Arabidopsis thaliana
agaccaatgcattgctg

SEQ ID NO: 29033 - DNA, 17 bp, Arabidopsis thaliana
agaccaatgtcaccttg

SEQ ID NO: 29034 - DNA, 17 bp, Arabidopsis thaliana
agaccaattctgaaata

SEQ ID NO: 29035 - DNA, 17 bp, Arabidopsis thaliana
agaccaattttgtccat

SEQ ID NO: 29036 - DNA, 17 bp, Arabidopsis thaliana
agaccacaagctcatgg

SEQ ID NO: 29037 - DNA, 17 bp, Arabidopsis thaliana
agaccacacagtgatct

SEQ ID NO: 29038 - DNA, 17 bp, Arabidopsis thaliana
agaccacaggctccttc

SEQ ID NO: 29039 - DNA, 17 bp, Arabidopsis thaliana
agaccacatttgcgtta

SEQ ID NO: 29040 - DNA, 17 bp, Arabidopsis thaliana
agaccaccacactatct

SEQ ID NO: 29041 - DNA, 17 bp, Arabidopsis thaliana
agaccaccacactgtct

SEQ ID NO: 29042 - DNA, 17 bp, Arabidopsis thaliana
agaccaccagcaaggac

SEQ ID NO: 29043 - DNA, 17 bp, Arabidopsis thaliana
agaccaccagttccagg

SEQ ID NO: 29044 - DNA, 17 bp, Arabidopsis thaliana
agaccaccattcatgtt

SEQ ID NO: 29045 - DNA, 17 bp, Arabidopsis thaliana
agaccaccattggtgct

SEQ ID NO: 29046 - DNA, 17 bp, Arabidopsis thaliana
agaccaccgtctccatt

SEQ ID NO: 29047 - DNA, 17 bp, Arabidopsis thaliana
agaccaccttgtggact

SEQ ID NO: 29048 - DNA, 17 bp, Arabidopsis thaliana
agaccacgctttcacgg

SEQ ID NO: 29049 - DNA, 17 bp, Arabidopsis thaliana
agaccacggtgggatgg

SEQ ID NO: 29050 - DNA, 17 bp, Arabidopsis thaliana
agaccacggtgggattg

SEQ ID NO: 29051 - DNA, 17 bp, Arabidopsis thaliana
agaccacggttggttac

SEQ ID NO: 29052 - DNA, 17 bp, Arabidopsis thaliana
agaccacgtctctcaat

SEQ ID NO: 29053 - DNA, 17 bp, Arabidopsis thaliana
agaccactattgctgct

SEQ ID NO: 29054 - DNA, 17 bp, Arabidopsis thaliana
agaccactctttcgtct

SEQ ID NO: 29055 - DNA, 17 bp, Arabidopsis thaliana
agaccactgtacaaacc

SEQ ID NO: 29056 - DNA, 17 bp, Arabidopsis thaliana
agaccactgtacagacc

SEQ ID NO: 29057 - DNA, 17 bp, Arabidopsis thaliana
agaccactgtggactat

SEQ ID NO: 29058 - DNA, 17 bp, Arabidopsis thaliana
agaccagaaggagtgct

SEQ ID NO: 29059 - DNA, 17 bp, Arabidopsis thaliana
agaccagaccgcttttt

SEQ ID NO: 29060 - DNA, 17 bp, Arabidopsis thaliana
agaccagacctctgata

SEQ ID NO: 29061 - DNA, 17 bp, Arabidopsis thaliana
agaccagagatgaagta

SEQ ID NO: 29062 - DNA, 17 bp, Arabidopsis thaliana
agaccagagccggccgt

SEQ ID NO: 29063 - DNA, 17 bp, Arabidopsis thaliana
agaccagagtatgctcc

SEQ ID NO: 29064 - DNA, 17 bp, Arabidopsis thaliana
agaccagatcttcgcag

SEQ ID NO: 29065 - DNA, 17 bp, Arabidopsis thaliana
agaccagcaccgggtgg

SEQ ID NO: 29066 - DNA, 17 bp, Arabidopsis thaliana
agaccagcacctctatg

SEQ ID NO: 29067 - DNA, 17 bp, Arabidopsis thaliana
agaccagccagttatgg

SEQ ID NO: 29068 - DNA, 17 bp, Arabidopsis thaliana
agaccagcggtgcctta

SEQ ID NO: 29069 - DNA, 17 bp, Arabidopsis thaliana
agaccagcttccaactt

SEQ ID NO: 29070 - DNA, 17 bp, Arabidopsis thaliana
agaccaggagcgtatcg

SEQ ID NO: 29071 - DNA, 17 bp, Arabidopsis thaliana
agaccaggagtggagcc

SEQ ID NO: 29072 - DNA, 17 bp, Arabidopsis thaliana
agaccaggctcgtgatt

SEQ ID NO: 29073 - DNA, 17 bp, Arabidopsis thaliana
agaccaggctggcgtca

SEQ ID NO: 29074 - DNA, 17 bp, Arabidopsis thaliana
agaccagggatcagcgg

SEQ ID NO: 29075 - DNA, 17 bp, Arabidopsis thaliana
agaccagggtggccacc

SEQ ID NO: 29076 - DNA, 17 bp, Arabidopsis thaliana
agaccaggtcactgcac

SEQ ID NO: 29077 - DNA, 17 bp, Arabidopsis thaliana
agaccaggtcattgcac

SEQ ID NO: 29078 - DNA, 17 bp, Arabidopsis thaliana
agaccagtcatctgaag

SEQ ID NO: 29079 - DNA, 17 bp, Arabidopsis thaliana
agaccagtcctcgggga

SEQ ID NO: 29080 - DNA, 17 bp, Arabidopsis thaliana
agaccagtcgcggcgcg

SEQ ID NO: 29081 - DNA, 17 bp, Arabidopsis thaliana
agaccagtgatctttcg

SEQ ID NO: 29082 - DNA, 17 bp, Arabidopsis thaliana
agaccagtgccgtgctt

SEQ ID NO: 29083 - DNA, 17 bp, Arabidopsis thaliana
agaccagtggaaaggcc

SEQ ID NO: 29084 - DNA, 17 bp, Arabidopsis thaliana
agaccagtttcattcga

SEQ ID NO: 29085 - DNA, 17 bp, Arabidopsis thaliana
agaccatccccatcgga

SEQ ID NO: 29086 - DNA, 17 bp, Arabidopsis thaliana
agaccatcctcatcgga

SEQ ID NO: 29087 - DNA, 17 bp, Arabidopsis thaliana
agaccatcctcctctag

SEQ ID NO: 29088 - DNA, 17 bp, Arabidopsis thaliana
agaccatcgttgcaggt

SEQ ID NO: 29089 - DNA, 17 bp, Arabidopsis thaliana
agaccatctacatcgtt

SEQ ID NO: 29090 - DNA, 17 bp, Arabidopsis thaliana
agaccatctacattggt

SEQ ID NO: 29091 - DNA, 17 bp, Arabidopsis thaliana
agaccatctccaacaaa

SEQ ID NO: 29092 - DNA, 17 bp, Arabidopsis thaliana
agaccatctccaatgat

SEQ ID NO: 29093 - DNA, 17 bp, Arabidopsis thaliana
agaccatctccaatgtg

SEQ ID NO: 29094 - DNA, 17 bp, Arabidopsis thaliana
agaccatctccatagga

SEQ ID NO: 29095 - DNA, 17 bp, Arabidopsis thaliana
agaccatctccatcagg

SEQ ID NO: 29096 - DNA, 17 bp, Arabidopsis thaliana
agaccatctccatcatc

SEQ ID NO: 29097 - DNA, 17 bp, Arabidopsis thaliana
agaccatctccatcgga

SEQ ID NO: 29098 - DNA, 17 bp, Arabidopsis thaliana
agaccatctccatcggg

SEQ ID NO: 29099 - DNA, 17 bp, Arabidopsis thaliana
agaccatctccatcggt

SEQ ID NO: 29100 - DNA, 17 bp, Arabidopsis thaliana
agaccatctccattaag

SEQ ID NO: 29101 - DNA, 17 bp, Arabidopsis thaliana
agaccatctccctcgct

SEQ ID NO: 29102 - DNA, 17 bp, Arabidopsis thaliana
agaccatctctattggg

SEQ ID NO: 29103 - DNA, 17 bp, Arabidopsis thaliana
agaccatcttcattgga

SEQ ID NO: 29104 - DNA, 17 bp, Arabidopsis thaliana
agaccatcttcattggg

SEQ ID NO: 29105 - DNA, 17 bp, Arabidopsis thaliana
agaccatcttttgcttg

SEQ ID NO: 29106 - DNA, 17 bp, Arabidopsis thaliana
agaccatgaaaatccga

SEQ ID NO: 29107 - DNA, 17 bp, Arabidopsis thaliana
agaccatgaggccaaac

SEQ ID NO: 29108 - DNA, 17 bp, Arabidopsis thaliana
agaccatgaggccaacc

SEQ ID NO: 29109 - DNA, 17 bp, Arabidopsis thaliana
agaccatgatttgtcaa

SEQ ID NO: 29110 - DNA, 17 bp, Arabidopsis thaliana
agaccatgccaaaccaa

SEQ ID NO: 29111 - DNA, 17 bp, Arabidopsis thaliana
agaccatgcccagcggt

SEQ ID NO: 29112 - DNA, 17 bp, Arabidopsis thaliana
agaccatgtatgggggc

SEQ ID NO: 29113 - DNA, 17 bp, Arabidopsis thaliana
agaccatgtccagtggg

SEQ ID NO: 29114 - DNA, 17 bp, Arabidopsis thaliana
agaccatgtccatatgg

SEQ ID NO: 29115 - DNA, 17 bp, Arabidopsis thaliana
agaccatgttttgtaac

SEQ ID NO: 29116 - DNA, 17 bp, Arabidopsis thaliana
agaccattccctgcttc

SEQ ID NO: 29117 - DNA, 17 bp, Arabidopsis thaliana
agaccattccgatgtga

SEQ ID NO: 29118 - DNA, 17 bp, Arabidopsis thaliana
agaccattcctcttcat

SEQ ID NO: 29119 - DNA, 17 bp, Arabidopsis thaliana
agaccattctctatgtt

SEQ ID NO: 29120 - DNA, 17 bp, Arabidopsis thaliana
agaccattcttcttgtt

SEQ ID NO: 29121 - DNA, 17 bp, Arabidopsis thaliana
agaccattgggcgtgtc

SEQ ID NO: 29122 - DNA, 17 bp, Arabidopsis thaliana
agaccattggtgctgct

SEQ ID NO: 29123 - DNA, 17 bp, Arabidopsis thaliana
agaccatttgatgatcg

SEQ ID NO: 29124 - DNA, 17 bp, Arabidopsis thaliana
agaccatttgtgagaag

SEQ ID NO: 29125 - DNA, 17 bp, Arabidopsis thaliana
agaccattttccactgt

SEQ ID NO: 29126 - DNA, 17 bp, Arabidopsis thaliana
agacccaaaagctctac

SEQ ID NO: 29127 - DNA, 17 bp, Arabidopsis thaliana
agacccaaatgccgatt

SEQ ID NO: 29128 - DNA, 17 bp, Arabidopsis thaliana
agacccaactgacagac

SEQ ID NO: 29129 - DNA, 17 bp, Arabidopsis thaliana
agacccaactgtcaaac

SEQ ID NO: 29130 - DNA, 17 bp, Arabidopsis thaliana
agacccaagtgacagac

SEQ ID NO: 29131 - DNA, 17 bp, Arabidopsis thaliana
agacccaattggtttac

SEQ ID NO: 29132 - DNA, 17 bp, Arabidopsis thaliana
agacccaccagctcggg

SEQ ID NO: 29133 - DNA, 17 bp, Arabidopsis thaliana
agacccacccgttttca

SEQ ID NO: 29134 - DNA, 17 bp, Arabidopsis thaliana
agacccacggtatactg

SEQ ID NO: 29135 - DNA, 17 bp, Arabidopsis thaliana
agacccacgttgtcgga

SEQ ID NO: 29136 - DNA, 17 bp, Arabidopsis thaliana
agacccactttggaggt

SEQ ID NO: 29137 - DNA, 17 bp, Arabidopsis thaliana
agacccatcatctaagc

SEQ ID NO: 29138 - DNA, 17 bp, Arabidopsis thaliana
agacccatcatctaagt

SEQ ID NO: 29139 - DNA, 17 bp, Arabidopsis thaliana
agacccattggcatcgc

SEQ ID NO: 29140 - DNA, 17 bp, Arabidopsis thaliana
agacccatttgcactca

SEQ ID NO: 29141 - DNA, 17 bp, Arabidopsis thaliana
agacccatttgcactcg

SEQ ID NO: 29142 - DNA, 17 bp, Arabidopsis thaliana
agaccccagcgttctag

SEQ ID NO: 29143 - DNA, 17 bp, Arabidopsis thaliana
agacccccctcttcctt

SEQ ID NO: 29144 - DNA, 17 bp, Arabidopsis thaliana
agaccccgtcccggacg

SEQ ID NO: 29145 - DNA, 17 bp, Arabidopsis thaliana
agacccctatcggcgtt

SEQ ID NO: 29146 - DNA, 17 bp, Arabidopsis thaliana
agacccctcgacaatac

SEQ ID NO: 29147 - DNA, 17 bp, Arabidopsis thaliana
agacccgaaaactaaaa

SEQ ID NO: 29148 - DNA, 17 bp, Arabidopsis thaliana
agacccgaaaccacagc

SEQ ID NO: 29149 - DNA, 17 bp, Arabidopsis thaliana
agacccgaaatcaccgt

SEQ ID NO: 29150 - DNA, 17 bp, Arabidopsis thaliana
agacccgaccgtcttta

SEQ ID NO: 29151 - DNA, 17 bp, Arabidopsis thaliana
agacccgaggatatcgt

SEQ ID NO: 29152 - DNA, 17 bp, Arabidopsis thaliana
agacccgagtttgggaa

SEQ ID NO: 29153 - DNA, 17 bp, Arabidopsis thaliana
agacccgatggaagcag

SEQ ID NO: 29154 - DNA, 17 bp, Arabidopsis thaliana
agacccgatgtcttctc

SEQ ID NO: 29155 - DNA, 17 bp, Arabidopsis thaliana
agacccgcagtataccg

SEQ ID NO: 29156 - DNA, 17 bp, Arabidopsis thaliana
agacccgcccatctcct

SEQ ID NO: 29157 - DNA, 17 bp, Arabidopsis thaliana
agacccgcggtatcccg

SEQ ID NO: 29158 - DNA, 17 bp, Arabidopsis thaliana
agacccgcgtgcgcacc

SEQ ID NO: 29159 - DNA, 17 bp, Arabidopsis thaliana
agacccgggcgtcctcc

SEQ ID NO: 29160 - DNA, 17 bp, Arabidopsis thaliana
agacccgggtgattccc

SEQ ID NO: 29161 - DNA, 17 bp, Arabidopsis thaliana
agacccgggttcatttc

SEQ ID NO: 29162 - DNA, 17 bp, Arabidopsis thaliana
agacccgggttcgaccc

SEQ ID NO: 29163 - DNA, 17 bp, Arabidopsis thaliana
agacccgggttcgactc

SEQ ID NO: 29164 - DNA, 17 bp, Arabidopsis thaliana
agacccgggttcgattc

SEQ ID NO: 29165 - DNA, 17 bp, Arabidopsis thaliana
agacccgggttcggccc

SEQ ID NO: 29166 - DNA, 17 bp, Arabidopsis thaliana
agacccgggttcggctc

SEQ ID NO: 29167 - DNA, 17 bp, Arabidopsis thaliana
agacccgggttcgtttc

SEQ ID NO: 29168 - DNA, 17 bp, Arabidopsis thaliana
agacccggtcggttcaa

SEQ ID NO: 29169 - DNA, 17 bp, Arabidopsis thaliana
agacccggtgcactagc

SEQ ID NO: 29170 - DNA, 17 bp, Arabidopsis thaliana
agacccggtgctagttc

SEQ ID NO: 29171 - DNA, 17 bp, Arabidopsis thaliana
agacccgtgcgctttaa

SEQ ID NO: 29172 - DNA, 17 bp, Arabidopsis thaliana
agacccgtgttcgattc

SEQ ID NO: 29173 - DNA, 17 bp, Arabidopsis thaliana
agacccgttcaagtatt

SEQ ID NO: 29174 - DNA, 17 bp, Arabidopsis thaliana
agacccgttcgaatatt

SEQ ID NO: 29175 - DNA, 17 bp, Arabidopsis thaliana
agacccgttgcttttgt

SEQ ID NO: 29176 - DNA, 17 bp, Arabidopsis thaliana
agaccctactgattccg

SEQ ID NO: 29177 - DNA, 17 bp, Arabidopsis thaliana
agaccctaggcgaagct

SEQ ID NO: 29178 - DNA, 17 bp, Arabidopsis thaliana
agaccctattgagcttg

SEQ ID NO: 29179 - DNA, 17 bp, Arabidopsis thaliana
agaccctccctccctcc

SEQ ID NO: 29180 - DNA, 17 bp, Arabidopsis thaliana
agaccctctctcttttg

SEQ ID NO: 29181 - DNA, 17 bp, Arabidopsis thaliana
agaccctgaaactaccg

SEQ ID NO: 29182 - DNA, 17 bp, Arabidopsis thaliana
agaccctgccaaacccg

SEQ ID NO: 29183 - DNA, 17 bp, Arabidopsis thaliana
agaccctgcctttctgc

SEQ ID NO: 29184 - DNA, 17 bp, Arabidopsis thaliana
agaccctgtcgcaccac

SEQ ID NO: 29185 - DNA, 17 bp, Arabidopsis thaliana
agaccctgtgcctcagt

SEQ ID NO: 29186 - DNA, 17 bp, Arabidopsis thaliana
agaccctgttaaggaac

SEQ ID NO: 29187 - DNA, 17 bp, Arabidopsis thaliana
agaccctgttagtgaag

SEQ ID NO: 29188 - DNA, 17 bp, Arabidopsis thaliana
agaccctgttcgtttga

SEQ ID NO: 29189 - DNA, 17 bp, Arabidopsis thaliana
agaccctgttgaacttg

SEQ ID NO: 29190 - DNA, 17 bp, Arabidopsis thaliana
agaccctgttgacctgg

SEQ ID NO: 29191 - DNA, 17 bp, Arabidopsis thaliana
agaccctgttgagctac

SEQ ID NO: 29192 - DNA, 17 bp, Arabidopsis thaliana
agaccctgttgagcttg

SEQ ID NO: 29193 - DNA, 17 bp, Arabidopsis thaliana
agaccctgtttagcttg

SEQ ID NO: 29194 - DNA, 17 bp, Arabidopsis thaliana
agaccctttgtcgctaa

SEQ ID NO: 29195 - DNA, 17 bp, Arabidopsis thaliana
agaccctttgtgccctc

SEQ ID NO: 29196 - DNA, 17 bp, Arabidopsis thaliana
agaccgaaatgaccagg

SEQ ID NO: 29197 - DNA, 17 bp, Arabidopsis thaliana
agaccgaaatgacctgg

SEQ ID NO: 29198 - DNA, 17 bp, Arabidopsis thaliana
agaccgaagctagctct

SEQ ID NO: 29199 - DNA, 17 bp, Arabidopsis thaliana
agaccgaagtcctgata

SEQ ID NO: 29200 - DNA, 17 bp, Arabidopsis thaliana
agaccgaagtcctggta

SEQ ID NO: 29201 - DNA, 17 bp, Arabidopsis thaliana
agaccgacaacggatgg

SEQ ID NO: 29202 - DNA, 17 bp, Arabidopsis thaliana
agaccgacaccaggtta

SEQ ID NO: 29203 - DNA, 17 bp, Arabidopsis thaliana
agaccgaccggagttca

SEQ ID NO: 29204 - DNA, 17 bp, Arabidopsis thaliana
agaccgacgcggattaa

SEQ ID NO: 29205 - DNA, 17 bp, Arabidopsis thaliana
agaccgacgtggattac

SEQ ID NO: 29206 - DNA, 17 bp, Arabidopsis thaliana
agaccgagactgaccgg

SEQ ID NO: 29207 - DNA, 17 bp, Arabidopsis thaliana
agaccgagagtgaagta

SEQ ID NO: 29208 - DNA, 17 bp, Arabidopsis thaliana
agaccgaggtgaaagaa

SEQ ID NO: 29209 - DNA, 17 bp, Arabidopsis thaliana
agaccgagtttggccac

SEQ ID NO: 29210 - DNA, 17 bp, Arabidopsis thaliana
agaccgatcgtcagacg

SEQ ID NO: 29211 - DNA, 17 bp, Arabidopsis thaliana
agaccgatcgtcggacg

SEQ ID NO: 29212 - DNA, 17 bp, Arabidopsis thaliana
agaccgatctactgctt

SEQ ID NO: 29213 - DNA, 17 bp, Arabidopsis thaliana
agaccgattggtttgat

SEQ ID NO: 29214 - DNA, 17 bp, Arabidopsis thaliana
agaccgcaaccggatct

SEQ ID NO: 29215 - DNA, 17 bp, Arabidopsis thaliana
agaccgcacccaaaatc

SEQ ID NO: 29216 - DNA, 17 bp, Arabidopsis thaliana
agaccgcagaattagtc

SEQ ID NO: 29217 - DNA, 17 bp, Arabidopsis thaliana
agaccgcatgcatttct

SEQ ID NO: 29218 - DNA, 17 bp, Arabidopsis thaliana
agaccgccactgctgcc

SEQ ID NO: 29219 - DNA, 17 bp, Arabidopsis thaliana
agaccgccagaactaac

SEQ ID NO: 29220 - DNA, 17 bp, Arabidopsis thaliana
agaccgccatcaactat

SEQ ID NO: 29221 - DNA, 17 bp, Arabidopsis thaliana
agaccgcccgtcacact

SEQ ID NO: 29222 - DNA, 17 bp, Arabidopsis thaliana
agaccgccgggtcgtga

SEQ ID NO: 29223 - DNA, 17 bp, Arabidopsis thaliana
agaccgcctgcatttct

SEQ ID NO: 29224 - DNA, 17 bp, Arabidopsis thaliana
agaccgcctttttttct

SEQ ID NO: 29225 - DNA, 17 bp, Arabidopsis thaliana
agaccgcctttttttgt

SEQ ID NO: 29226 - DNA, 17 bp, Arabidopsis thaliana
agaccgcgacaggcaga

SEQ ID NO: 29227 - DNA, 17 bp, Arabidopsis thaliana
agaccgcgatagttcat

SEQ ID NO: 29228 - DNA, 17 bp, Arabidopsis thaliana
agaccgcgccaagttta

SEQ ID NO: 29229 - DNA, 17 bp, Arabidopsis thaliana
agaccgcggttttgcgg

SEQ ID NO: 29230 - DNA, 17 bp, Arabidopsis thaliana
agaccgctagttctaac

SEQ ID NO: 29231 - DNA, 17 bp, Arabidopsis thaliana
agaccgctatgtccact

SEQ ID NO: 29232 - DNA, 17 bp, Arabidopsis thaliana
agaccgctgacggatta

SEQ ID NO: 29233 - DNA, 17 bp, Arabidopsis thaliana
agaccgctgtacagagg

SEQ ID NO: 29234 - DNA, 17 bp, Arabidopsis thaliana
agaccgcttctgcctct

SEQ ID NO: 29235 - DNA, 17 bp, Arabidopsis thaliana
agaccgcttgcatgtgt

SEQ ID NO: 29236 - DNA, 17 bp, Arabidopsis thaliana
agaccgcttgtatttct

SEQ ID NO: 29237 - DNA, 17 bp, Arabidopsis thaliana
agaccgctttgtacgct

SEQ ID NO: 29238 - DNA, 17 bp, Arabidopsis thaliana
agaccgctttgtccgct

SEQ ID NO: 29239 - DNA, 17 bp, Arabidopsis thaliana
agaccgctttgtccgtt

SEQ ID NO: 29240 - DNA, 17 bp, Arabidopsis thaliana
agaccggaaaagtgagg

SEQ ID NO: 29241 - DNA, 17 bp, Arabidopsis thaliana
agaccggagaagtgagg

SEQ ID NO: 29242 - DNA, 17 bp, Arabidopsis thaliana
agaccggagttaaagtt

SEQ ID NO: 29243 - DNA, 17 bp, Arabidopsis thaliana
agaccggagttgaagtt

SEQ ID NO: 29244 - DNA, 17 bp, Arabidopsis thaliana
agaccggatgtggttgt

SEQ ID NO: 29245 - DNA, 17 bp, Arabidopsis thaliana
agaccggcgtgtatcat

SEQ ID NO: 29246 - DNA, 17 bp, Arabidopsis thaliana
agaccgggattgaagtt

SEQ ID NO: 29247 - DNA, 17 bp, Arabidopsis thaliana
agaccggggttcaagtt

SEQ ID NO: 29248 - DNA, 17 bp, Arabidopsis thaliana
agaccggggttgaagtt

SEQ ID NO: 29249 - DNA, 17 bp, Arabidopsis thaliana
agaccggtattgtcgga

SEQ ID NO: 29250 - DNA, 17 bp, Arabidopsis thaliana
agaccggttagggttgg

SEQ ID NO: 29251 - DNA, 17 bp, Arabidopsis thaliana
agaccggtttccgtttt

SEQ ID NO: 29252 - DNA, 17 bp, Arabidopsis thaliana
agaccgtagtgttctgt

SEQ ID NO: 29253 - DNA, 17 bp, Arabidopsis thaliana
agaccgtcaggccaacc

SEQ ID NO: 29254 - DNA, 17 bp, Arabidopsis thaliana
agaccgtccgcacaacg

SEQ ID NO: 29255 - DNA, 17 bp, Arabidopsis thaliana
agaccgtcggaatcgtc

SEQ ID NO: 29256 - DNA, 17 bp, Arabidopsis thaliana
agaccgtcgtgagacag

SEQ ID NO: 29257 - DNA, 17 bp, Arabidopsis thaliana
agaccgtctgcagttag

SEQ ID NO: 29258 - DNA, 17 bp, Arabidopsis thaliana
agaccgtcttgtcattg

SEQ ID NO: 29259 - DNA, 17 bp, Arabidopsis thaliana
agaccgtgacgccaaac

SEQ ID NO: 29260 - DNA, 17 bp, Arabidopsis thaliana
agaccgtgagaccaaac

SEQ ID NO: 29261 - DNA, 17 bp, Arabidopsis thaliana
agaccgtgaggccaaac

SEQ ID NO: 29262 - DNA, 17 bp, Arabidopsis thaliana
agaccgtgaggccaaat

SEQ ID NO: 29263 - DNA, 17 bp, Arabidopsis thaliana
agaccgtgaggccaacc

SEQ ID NO: 29264 - DNA, 17 bp, Arabidopsis thaliana
agaccgtgaggccgaac

SEQ ID NO: 29265 - DNA, 17 bp, Arabidopsis thaliana
agaccgtgaggcgaaac

SEQ ID NO: 29266 - DNA, 17 bp, Arabidopsis thaliana
agaccgtgaggctaaac

SEQ ID NO: 29267 - DNA, 17 bp, Arabidopsis thaliana
agaccgtgatgtcgtca

SEQ ID NO: 29268 - DNA, 17 bp, Arabidopsis thaliana
agaccgtggtttaatct

SEQ ID NO: 29269 - DNA, 17 bp, Arabidopsis thaliana
agaccgtgtggccaaac

SEQ ID NO: 29270 - DNA, 17 bp, Arabidopsis thaliana
agaccgttcaatcactc

SEQ ID NO: 29271 - DNA, 17 bp, Arabidopsis thaliana
agaccgttcttagttgg

SEQ ID NO: 29272 - DNA, 17 bp, Arabidopsis thaliana
agaccgttgtcagttct

SEQ ID NO: 29273 - DNA, 17 bp, Arabidopsis thaliana
agaccgtttgcggttgg

SEQ ID NO: 29274 - DNA, 17 bp, Arabidopsis thaliana
agaccgtttgcttccat

SEQ ID NO: 29275 - DNA, 17 bp, Arabidopsis thaliana
agaccgttttacccccc

SEQ ID NO: 29276 - DNA, 17 bp, Arabidopsis thaliana
agaccgttttccgctag

SEQ ID NO: 29277 - DNA, 17 bp, Arabidopsis thaliana
agaccgttttgttagga

SEQ ID NO: 29278 - DNA, 17 bp, Arabidopsis thaliana
agaccgtttttccgtgg

SEQ ID NO: 29279 - DNA, 17 bp, Arabidopsis thaliana
agacctaaagcaaacct

SEQ ID NO: 29280 - DNA, 17 bp, Arabidopsis thaliana
agacctaacatcaaaac

SEQ ID NO: 29281 - DNA, 17 bp, Arabidopsis thaliana
agacctaagaccatctc

SEQ ID NO: 29282 - DNA, 17 bp, Arabidopsis thaliana
agacctaatggctaaaa

SEQ ID NO: 29283 - DNA, 17 bp, Arabidopsis thaliana
agacctaattcatttct

SEQ ID NO: 29284 - DNA, 17 bp, Arabidopsis thaliana
agacctaattggaccct

SEQ ID NO: 29285 - DNA, 17 bp, Arabidopsis thaliana
agacctagaatgctttg

SEQ ID NO: 29286 - DNA, 17 bp, Arabidopsis thaliana
agacctagacaaccgac

SEQ ID NO: 29287 - DNA, 17 bp, Arabidopsis thaliana
agacctagctcgtggcg

SEQ ID NO: 29288 - DNA, 17 bp, Arabidopsis thaliana
agacctagctgctgttg

SEQ ID NO: 29289 - DNA, 17 bp, Arabidopsis thaliana
agacctaggggattacg

SEQ ID NO: 29290 - DNA, 17 bp, Arabidopsis thaliana
agacctagtgaagatgg

SEQ ID NO: 29291 - DNA, 17 bp, Arabidopsis thaliana
agacctagtgtttgttt

SEQ ID NO: 29292 - DNA, 17 bp, Arabidopsis thaliana
agacctatagcttcttt

SEQ ID NO: 29293 - DNA, 17 bp, Arabidopsis thaliana
agacctcacacgcgttt

SEQ ID NO: 29294 - DNA, 17 bp, Arabidopsis thaliana
agacctcacattgggtt

SEQ ID NO: 29295 - DNA, 17 bp, Arabidopsis thaliana
agacctcagcctactaa

SEQ ID NO: 29296 - DNA, 17 bp, Arabidopsis thaliana
agacctcagcctgctaa

SEQ ID NO: 29297 - DNA, 17 bp, Arabidopsis thaliana
agacctccaactatcgg

SEQ ID NO: 29298 - DNA, 17 bp, Arabidopsis thaliana
agacctccatctgtcgt

SEQ ID NO: 29299 - DNA, 17 bp, Arabidopsis thaliana
agacctcgcgaagaagc

SEQ ID NO: 29300 - DNA, 17 bp, Arabidopsis thaliana
agacctcgcgttcctga

SEQ ID NO: 29301 - DNA, 17 bp, Arabidopsis thaliana
agacctcggggcgagtt

SEQ ID NO: 29302 - DNA, 17 bp, Arabidopsis thaliana
agacctctcatcttgga

SEQ ID NO: 29303 - DNA, 17 bp, Arabidopsis thaliana
agacctctggatgtaga

SEQ ID NO: 29304 - DNA, 17 bp, Arabidopsis thaliana
agacctctttgtccgtt

SEQ ID NO: 29305 - DNA, 17 bp, Arabidopsis thaliana
agacctcttttaccaca

SEQ ID NO: 29306 - DNA, 17 bp, Arabidopsis thaliana
agacctcttttcttgtg

SEQ ID NO: 29307 - DNA, 17 bp, Arabidopsis thaliana
agacctgaagctactgc

SEQ ID NO: 29308 - DNA, 17 bp, Arabidopsis thaliana
agacctgacatacagtt

SEQ ID NO: 29309 - DNA, 17 bp, Arabidopsis thaliana
agacctgacgctttaat

SEQ ID NO: 29310 - DNA, 17 bp, Arabidopsis thaliana
agacctgagatcgcagc

SEQ ID NO: 29311 - DNA, 17 bp, Arabidopsis thaliana
agacctgatgaagatgg

SEQ ID NO: 29312 - DNA, 17 bp, Arabidopsis thaliana
agacctgatgcggttgt

SEQ ID NO: 29313 - DNA, 17 bp, Arabidopsis thaliana
agacctgcaatggcgtc

SEQ ID NO: 29314 - DNA, 17 bp, Arabidopsis thaliana
agacctggactcacatc

SEQ ID NO: 29315 - DNA, 17 bp, Arabidopsis thaliana
agacctggagaaattac

SEQ ID NO: 29316 - DNA, 17 bp, Arabidopsis thaliana
agacctggagatcgagt

SEQ ID NO: 29317 - DNA, 17 bp, Arabidopsis thaliana
agacctggtgaagatag

SEQ ID NO: 29318 - DNA, 17 bp, Arabidopsis thaliana
agacctggtgaagatga

SEQ ID NO: 29319 - DNA, 17 bp, Arabidopsis thaliana
agacctggtgaagatgg

SEQ ID NO: 29320 - DNA, 17 bp, Arabidopsis thaliana
agacctggtgaatatgg

SEQ ID NO: 29321 - DNA, 17 bp, Arabidopsis thaliana
agacctggtgcagacga

SEQ ID NO: 29322 - DNA, 17 bp, Arabidopsis thaliana
agacctgtgatacctcg

SEQ ID NO: 29323 - DNA, 17 bp, Arabidopsis thaliana
agacctgttattgcctc

SEQ ID NO: 29324 - DNA, 17 bp, Arabidopsis thaliana
agacctgttctatgcta

SEQ ID NO: 29325 - DNA, 17 bp, Arabidopsis thaliana
agacctgtttccgcttt

SEQ ID NO: 29326 - DNA, 17 bp, Arabidopsis thaliana
agaccttaactaccctc

SEQ ID NO: 29327 - DNA, 17 bp, Arabidopsis thaliana
agaccttaactaccctt

SEQ ID NO: 29328 - DNA, 17 bp, Arabidopsis thaliana
agaccttaggccaagag

SEQ ID NO: 29329 - DNA, 17 bp, Arabidopsis thaliana
agaccttatggacatgg

SEQ ID NO: 29330 - DNA, 17 bp, Arabidopsis thaliana
agaccttattcttctca

SEQ ID NO: 29331 - DNA, 17 bp, Arabidopsis thaliana
agaccttccggccacac

SEQ ID NO: 29332 - DNA, 17 bp, Arabidopsis thaliana
agaccttccttgagtcc

SEQ ID NO: 29333 - DNA, 17 bp, Arabidopsis thaliana
agaccttcggaatttga

SEQ ID NO: 29334 - DNA, 17 bp, Arabidopsis thaliana
agaccttctgaatctgg

SEQ ID NO: 29335 - DNA, 17 bp, Arabidopsis thaliana
agaccttctgatttgct

SEQ ID NO: 29336 - DNA, 17 bp, Arabidopsis thaliana
agaccttctggccacat

SEQ ID NO: 29337 - DNA, 17 bp, Arabidopsis thaliana
agaccttctggccacct

SEQ ID NO: 29338 - DNA, 17 bp, Arabidopsis thaliana
agaccttgacggattct

SEQ ID NO: 29339 - DNA, 17 bp, Arabidopsis thaliana
agaccttgactgcaatg

SEQ ID NO: 29340 - DNA, 17 bp, Arabidopsis thaliana
agaccttgagctatgag

SEQ ID NO: 29341 - DNA, 17 bp, Arabidopsis thaliana
agaccttgctcaacagg

SEQ ID NO: 29342 - DNA, 17 bp, Arabidopsis thaliana
agaccttgctctctgaa

SEQ ID NO: 29343 - DNA, 17 bp, Arabidopsis thaliana
agaccttggtccaattg

SEQ ID NO: 29344 - DNA, 17 bp, Arabidopsis thaliana
agaccttggtccacttg

SEQ ID NO: 29345 - DNA, 17 bp, Arabidopsis thaliana
agaccttggttccggtg

SEQ ID NO: 29346 - DNA, 17 bp, Arabidopsis thaliana
agaccttgtgaggatga

SEQ ID NO: 29347 - DNA, 17 bp, Arabidopsis thaliana
agaccttgtgcctcaac

SEQ ID NO: 29348 - DNA, 17 bp, Arabidopsis thaliana
agaccttgtgcctcagc

SEQ ID NO: 29349 - DNA, 17 bp, Arabidopsis thaliana
agaccttgtgcttctta

SEQ ID NO: 29350 - DNA, 17 bp, Arabidopsis thaliana
agaccttgtggagcttt

SEQ ID NO: 29351 - DNA, 17 bp, Arabidopsis thaliana
agaccttgtggcttgaa

SEQ ID NO: 29352 - DNA, 17 bp, Arabidopsis thaliana
agaccttgtgttctaga

SEQ ID NO: 29353 - DNA, 17 bp, Arabidopsis thaliana
agaccttgttaatttgg

SEQ ID NO: 29354 - DNA, 17 bp, Arabidopsis thaliana
agaccttgtttgcaact

SEQ ID NO: 29355 - DNA, 17 bp, Arabidopsis thaliana
agacctttagctgtccc

SEQ ID NO: 29356 - DNA, 17 bp, Arabidopsis thaliana
agacctttcccctcgca

SEQ ID NO: 29357 - DNA, 17 bp, Arabidopsis thaliana
agacctttgctcaagat

SEQ ID NO: 29358 - DNA, 17 bp, Arabidopsis thaliana
agacctttggcggagca

SEQ ID NO: 29359 - DNA, 17 bp, Arabidopsis thaliana
agacctttgtatgctcc

SEQ ID NO: 29360 - DNA, 17 bp, Arabidopsis thaliana
agacctttgtcagttga

SEQ ID NO: 29361 - DNA, 17 bp, Arabidopsis thaliana
agacctttgtcgctaag

SEQ ID NO: 29362 - DNA, 17 bp, Arabidopsis thaliana
agacctttgttcttcga

SEQ ID NO: 29363 - DNA, 17 bp, Arabidopsis thaliana
agaccttttcggggagt

SEQ ID NO: 29364 - DNA, 17 bp, Arabidopsis thaliana
agaccttttctccttgg

SEQ ID NO: 29365 - DNA, 17 bp, Arabidopsis thaliana
agaccttttctctttcg

SEQ ID NO: 29366 - DNA, 17 bp, Arabidopsis thaliana
agaccttttgatcatct

SEQ ID NO: 29367 - DNA, 17 bp, Arabidopsis thaliana
agaccttttgtcatccg

SEQ ID NO: 29368 - DNA, 17 bp, Arabidopsis thaliana
agacctttttggttgac

SEQ ID NO: 29369 - DNA, 17 bp, Arabidopsis thaliana
agaccttttttacctag

SEQ ID NO: 29370 - DNA, 17 bp, Arabidopsis thaliana
agacgaaaaagaatcca

SEQ ID NO: 29371 - DNA, 17 bp, Arabidopsis thaliana
agacgaaaatacccctg

SEQ ID NO: 29372 - DNA, 17 bp, Arabidopsis thaliana
agacgaaactgaaccac

SEQ ID NO: 29373 - DNA, 17 bp, Arabidopsis thaliana
agacgaaagatgggttt

SEQ ID NO: 29374 - DNA, 17 bp, Arabidopsis thaliana
agacgaaaggattcact

SEQ ID NO: 29375 - DNA, 17 bp, Arabidopsis thaliana
agacgaacaactgcgaa

SEQ ID NO: 29376 - DNA, 17 bp, Arabidopsis thaliana
agacgaacagggccgaa

SEQ ID NO: 29377 - DNA, 17 bp, Arabidopsis thaliana
agacgaaccagggacag

SEQ ID NO: 29378 - DNA, 17 bp, Arabidopsis thaliana
agacgaactcgacggtg

SEQ ID NO: 29379 - DNA, 17 bp, Arabidopsis thaliana
agacgaactgacaaagc

SEQ ID NO: 29380 - DNA, 17 bp, Arabidopsis thaliana
agacgaacttttccatt

SEQ ID NO: 29381 - DNA, 17 bp, Arabidopsis thaliana
agacgaagacgacagtt

SEQ ID NO: 29382 - DNA, 17 bp, Arabidopsis thaliana
agacgaagccggagggg

SEQ ID NO: 29383 - DNA, 17 bp, Arabidopsis thaliana
agacgaaggttccttgg

SEQ ID NO: 29384 - DNA, 17 bp, Arabidopsis thaliana
agacgaagttgaaccat

SEQ ID NO: 29385 - DNA, 17 bp, Arabidopsis thaliana
agacgaataggcaaagg

SEQ ID NO: 29386 - DNA, 17 bp, Arabidopsis thaliana
agacgaatcataagcct

SEQ ID NO: 29387 - DNA, 17 bp, Arabidopsis thaliana
agacgaatcatgagcct

SEQ ID NO: 29388 - DNA, 17 bp, Arabidopsis thaliana
agacgaatctggaggga

SEQ ID NO: 29389 - DNA, 17 bp, Arabidopsis thaliana
agacgaatcttagaggt

SEQ ID NO: 29390 - DNA, 17 bp, Arabidopsis thaliana
agacgaatgcgaaatta

SEQ ID NO: 29391 - DNA, 17 bp, Arabidopsis thaliana
agacgaatggaatgggc

SEQ ID NO: 29392 - DNA, 17 bp, Arabidopsis thaliana
agacgaattatgtgaag

SEQ ID NO: 29393 - DNA, 17 bp, Arabidopsis thaliana
agacgaattctgttgtt

SEQ ID NO: 29394 - DNA, 17 bp, Arabidopsis thaliana
agacgaatttggaggga

SEQ ID NO: 29395 - DNA, 17 bp, Arabidopsis thaliana
agacgaattttcagcgg

SEQ ID NO: 29396 - DNA, 17 bp, Arabidopsis thaliana
agacgacaaagaaatag

SEQ ID NO: 29397 - DNA, 17 bp, Arabidopsis thaliana
agacgacacattcttct

SEQ ID NO: 29398 - DNA, 17 bp, Arabidopsis thaliana
agacgacactgataacc

SEQ ID NO: 29399 - DNA, 17 bp, Arabidopsis thaliana
agacgacatcttcttct

SEQ ID NO: 29400 - DNA, 17 bp, Arabidopsis thaliana
agacgaccaaacttcat

SEQ ID NO: 29401 - DNA, 17 bp, Arabidopsis thaliana
agacgaccgcaaaatta

SEQ ID NO: 29402 - DNA, 17 bp, Arabidopsis thaliana
agacgaccgtgatcttt

SEQ ID NO: 29403 - DNA, 17 bp, Arabidopsis thaliana
agacgaccttcgaacaa

SEQ ID NO: 29404 - DNA, 17 bp, Arabidopsis thaliana
agacgacgacaggggga

SEQ ID NO: 29405 - DNA, 17 bp, Arabidopsis thaliana
agacgacgacgagtgtt

SEQ ID NO: 29406 - DNA, 17 bp, Arabidopsis thaliana
agacgacgagtgtcaga

SEQ ID NO: 29407 - DNA, 17 bp, Arabidopsis thaliana
agacgacgccacggttt

SEQ ID NO: 29408 - DNA, 17 bp, Arabidopsis thaliana
agacgacgcctcatttt

SEQ ID NO: 29409 - DNA, 17 bp, Arabidopsis thaliana
agacgacgcggattacg

SEQ ID NO: 29410 - DNA, 17 bp, Arabidopsis thaliana
agacgacggcacggttt

SEQ ID NO: 29411 - DNA, 17 bp, Arabidopsis thaliana
agacgacggtgagtgcg

SEQ ID NO: 29412 - DNA, 17 bp, Arabidopsis thaliana
agacgacgtgttggtga

SEQ ID NO: 29413 - DNA, 17 bp, Arabidopsis thaliana
agacgactacgtcatcc

SEQ ID NO: 29414 - DNA, 17 bp, Arabidopsis thaliana
agacgactacgtcatct

SEQ ID NO: 29415 - DNA, 17 bp, Arabidopsis thaliana
agacgactattgaatac

SEQ ID NO: 29416 - DNA, 17 bp, Arabidopsis thaliana
agacgactgaattctcc

SEQ ID NO: 29417 - DNA, 17 bp, Arabidopsis thaliana
agacgactgaatttccc

SEQ ID NO: 29418 - DNA, 17 bp, Arabidopsis thaliana
agacgactgagtttcgt

SEQ ID NO: 29419 - DNA, 17 bp, Arabidopsis thaliana
agacgactgatcataag

SEQ ID NO: 29420 - DNA, 17 bp, Arabidopsis thaliana
agacgactgtgatcttt

SEQ ID NO: 29421 - DNA, 17 bp, Arabidopsis thaliana
agacgacttacaaacat

SEQ ID NO: 29422 - DNA, 17 bp, Arabidopsis thaliana
agacgagaacgcttctg

SEQ ID NO: 29423 - DNA, 17 bp, Arabidopsis thaliana
agacgagatcgtgcggt

SEQ ID NO: 29424 - DNA, 17 bp, Arabidopsis thaliana
agacgagattgtgagta

SEQ ID NO: 29425 - DNA, 17 bp, Arabidopsis thaliana
agacgagattgtgagtt

SEQ ID NO: 29426 - DNA, 17 bp, Arabidopsis thaliana
agacgagatttgtgcgc

SEQ ID NO: 29427 - DNA, 17 bp, Arabidopsis thaliana
agacgagcatagaccgt

SEQ ID NO: 29428 - DNA, 17 bp, Arabidopsis thaliana
agacgagctgacgttga

SEQ ID NO: 29429 - DNA, 17 bp, Arabidopsis thaliana
agacgaggccaagcaca

SEQ ID NO: 29430 - DNA, 17 bp, Arabidopsis thaliana
agacgagggagtgctaa

SEQ ID NO: 29431 - DNA, 17 bp, Arabidopsis thaliana
agacgagggcacgtctg

SEQ ID NO: 29432 - DNA, 17 bp, Arabidopsis thaliana
agacgagggcgtttttg

SEQ ID NO: 29433 - DNA, 17 bp, Arabidopsis thaliana
agacgagggtgtatggg

SEQ ID NO: 29434 - DNA, 17 bp, Arabidopsis thaliana
agacgagtgaattcccc

SEQ ID NO: 29435 - DNA, 17 bp, Arabidopsis thaliana
agacgagtgccacagct

SEQ ID NO: 29436 - DNA, 17 bp, Arabidopsis thaliana
agacgagtggcctagcc

SEQ ID NO: 29437 - DNA, 17 bp, Arabidopsis thaliana
agacgagtggcctaggc

SEQ ID NO: 29438 - DNA, 17 bp, Arabidopsis thaliana
agacgagtgtcgaggtc

SEQ ID NO: 29439 - DNA, 17 bp, Arabidopsis thaliana
agacgagtgtgatggag

SEQ ID NO: 29440 - DNA, 17 bp, Arabidopsis thaliana
agacgagttttgcggga

SEQ ID NO: 29441 - DNA, 17 bp, Arabidopsis thaliana
agacgataagattcgga

SEQ ID NO: 29442 - DNA, 17 bp, Arabidopsis thaliana
agacgataatcaacctc

SEQ ID NO: 29443 - DNA, 17 bp, Arabidopsis thaliana
agacgatacaagttggc

SEQ ID NO: 29444 - DNA, 17 bp, Arabidopsis thaliana
agacgatcaggcgttct

SEQ ID NO: 29445 - DNA, 17 bp, Arabidopsis thaliana
agacgatcatcttcggt

SEQ ID NO: 29446 - DNA, 17 bp, Arabidopsis thaliana
agacgatcggcctgtcc

SEQ ID NO: 29447 - DNA, 17 bp, Arabidopsis thaliana
agacgatctacgatgcc

SEQ ID NO: 29448 - DNA, 17 bp, Arabidopsis thaliana
agacgatctacgatgtc

SEQ ID NO: 29449 - DNA, 17 bp, Arabidopsis thaliana
agacgatcttcgagtgc

SEQ ID NO: 29450 - DNA, 17 bp, Arabidopsis thaliana
agacgatcttggagtgc

SEQ ID NO: 29451 - DNA, 17 bp, Arabidopsis thaliana
agacgatgatagagcgc

SEQ ID NO: 29452 - DNA, 17 bp, Arabidopsis thaliana
agacgatgatggcggga

SEQ ID NO: 29453 - DNA, 17 bp, Arabidopsis thaliana
agacgatggctctcttg

SEQ ID NO: 29454 - DNA, 17 bp, Arabidopsis thaliana
agacgatggctttgttg

SEQ ID NO: 29455 - DNA, 17 bp, Arabidopsis thaliana
agacgatggtatccgca

SEQ ID NO: 29456 - DNA, 17 bp, Arabidopsis thaliana
agacgatggtcctgttc

SEQ ID NO: 29457 - DNA, 17 bp, Arabidopsis thaliana
agacgatgtgcttagat

SEQ ID NO: 29458 - DNA, 17 bp, Arabidopsis thaliana
agacgattagcccacac

SEQ ID NO: 29459 - DNA, 17 bp, Arabidopsis thaliana
agacgattagcttccta

SEQ ID NO: 29460 - DNA, 17 bp, Arabidopsis thaliana
agacgattcccgctatc

SEQ ID NO: 29461 - DNA, 17 bp, Arabidopsis thaliana
agacgattcccggctgg

SEQ ID NO: 29462 - DNA, 17 bp, Arabidopsis thaliana
agacgattctaccacgg

SEQ ID NO: 29463 - DNA, 17 bp, Arabidopsis thaliana
agacgattctactacgc

SEQ ID NO: 29464 - DNA, 17 bp, Arabidopsis thaliana
agacgattctcacttct

SEQ ID NO: 29465 - DNA, 17 bp, Arabidopsis thaliana
agacgattgaccgacat

SEQ ID NO: 29466 - DNA, 17 bp, Arabidopsis thaliana
agacgattggaccatca

SEQ ID NO: 29467 - DNA, 17 bp, Arabidopsis thaliana
agacgattggccgactt

SEQ ID NO: 29468 - DNA, 17 bp, Arabidopsis thaliana
agacgatttagatttca

SEQ ID NO: 29469 - DNA, 17 bp, Arabidopsis thaliana
agacgattttggagtgc

SEQ ID NO: 29470 - DNA, 17 bp, Arabidopsis thaliana
agacgattttggagtgt

SEQ ID NO: 29471 - DNA, 17 bp, Arabidopsis thaliana
agacgcaaataccgttt

SEQ ID NO: 29472 - DNA, 17 bp, Arabidopsis thaliana
agacgcaacttattgaa

SEQ ID NO: 29473 - DNA, 17 bp, Arabidopsis thaliana
agacgcaacttttcttt

SEQ ID NO: 29474 - DNA, 17 bp, Arabidopsis thaliana
agacgcaagcaaagacc

SEQ ID NO: 29475 - DNA, 17 bp, Arabidopsis thaliana
agacgcaaggagagtct

SEQ ID NO: 29476 - DNA, 17 bp, Arabidopsis thaliana
agacgcaccagacagag

SEQ ID NO: 29477 - DNA, 17 bp, Arabidopsis thaliana
agacgcacccgctggtt

SEQ ID NO: 29478 - DNA, 17 bp, Arabidopsis thaliana
agacgcaccgataacaa

SEQ ID NO: 29479 - DNA, 17 bp, Arabidopsis thaliana
agacgcactgagataaa

SEQ ID NO: 29480 - DNA, 17 bp, Arabidopsis thaliana
agacgcagggcagattg

SEQ ID NO: 29481 - DNA, 17 bp, Arabidopsis thaliana
agacgcagggcagattt

SEQ ID NO: 29482 - DNA, 17 bp, Arabidopsis thaliana
agacgcattcgcctctt

SEQ ID NO: 29483 - DNA, 17 bp, Arabidopsis thaliana
agacgcattctacagat

SEQ ID NO: 29484 - DNA, 17 bp, Arabidopsis thaliana
agacgcattgtgctcca

SEQ ID NO: 29485 - DNA, 17 bp, Arabidopsis thaliana
agacgcattgttctcca

SEQ ID NO: 29486 - DNA, 17 bp, Arabidopsis thaliana
agacgcatttgacatgg

SEQ ID NO: 29487 - DNA, 17 bp, Arabidopsis thaliana
agacgccataactgttt

SEQ ID NO: 29488 - DNA, 17 bp, Arabidopsis thaliana
agacgccatggataacg

SEQ ID NO: 29489 - DNA, 17 bp, Arabidopsis thaliana
agacgcccgatcttgca

SEQ ID NO: 29490 - DNA, 17 bp, Arabidopsis thaliana
agacgcccgcagtcggc

SEQ ID NO: 29491 - DNA, 17 bp, Arabidopsis thaliana
agacgccgacctatggt

SEQ ID NO: 29492 - DNA, 17 bp, Arabidopsis thaliana
agacgccggattagtcg

SEQ ID NO: 29493 - DNA, 17 bp, Arabidopsis thaliana
agacgcctatgcaaccg

SEQ ID NO: 29494 - DNA, 17 bp, Arabidopsis thaliana
agacgcgaccgcttccg

SEQ ID NO: 29495 - DNA, 17 bp, Arabidopsis thaliana
agacgcgacggcaacga

SEQ ID NO: 29496 - DNA, 17 bp, Arabidopsis thaliana
agacgcgacggcaacgg

SEQ ID NO: 29497 - DNA, 17 bp, Arabidopsis thaliana
agacgcgactgagaaaa

SEQ ID NO: 29498 - DNA, 17 bp, Arabidopsis thaliana
agacgcgattgagtcag

SEQ ID NO: 29499 - DNA, 17 bp, Arabidopsis thaliana
agacgcggaacccacac

SEQ ID NO: 29500 - DNA, 17 bp, Arabidopsis thaliana
agacgcggcggttttac

SEQ ID NO: 29501 - DNA, 17 bp, Arabidopsis thaliana
agacgcggctaaccgtg

SEQ ID NO: 29502 - DNA, 17 bp, Arabidopsis thaliana
agacgcgtcatcaaaga

SEQ ID NO: 29503 - DNA, 17 bp, Arabidopsis thaliana
agacgctaatttccagg

SEQ ID NO: 29504 - DNA, 17 bp, Arabidopsis thaliana
agacgctactaggattg

SEQ ID NO: 29505 - DNA, 17 bp, Arabidopsis thaliana
agacgctaggtattgtg

SEQ ID NO: 29506 - DNA, 17 bp, Arabidopsis thaliana
agacgctagtagaggtt

SEQ ID NO: 29507 - DNA, 17 bp, Arabidopsis thaliana
agacgctattcggaagg

SEQ ID NO: 29508 - DNA, 17 bp, Arabidopsis thaliana
agacgctcaagactcta

SEQ ID NO: 29509 - DNA, 17 bp, Arabidopsis thaliana
agacgctcaagacttta

SEQ ID NO: 29510 - DNA, 17 bp, Arabidopsis thaliana
agacgctcaagcaactt

SEQ ID NO: 29511 - DNA, 17 bp, Arabidopsis thaliana
agacgctgaaagtcatg

SEQ ID NO: 29512 - DNA, 17 bp, Arabidopsis thaliana
agacgctgcgacggagg

SEQ ID NO: 29513 - DNA, 17 bp, Arabidopsis thaliana
agacgctgcgatcagat

SEQ ID NO: 29514 - DNA, 17 bp, Arabidopsis thaliana
agacgctgctattggag

SEQ ID NO: 29515 - DNA, 17 bp, Arabidopsis thaliana
agacgctgtctctgcca

SEQ ID NO: 29516 - DNA, 17 bp, Arabidopsis thaliana
agacgctgtgaagacgc

SEQ ID NO: 29517 - DNA, 17 bp, Arabidopsis thaliana
agacgcttaagtgattt

SEQ ID NO: 29518 - DNA, 17 bp, Arabidopsis thaliana
agacgcttgaagtaagg

SEQ ID NO: 29519 - DNA, 17 bp, Arabidopsis thaliana
agacgcttgccaggatt

SEQ ID NO: 29520 - DNA, 17 bp, Arabidopsis thaliana
agacgcttgcgaacaaa

SEQ ID NO: 29521 - DNA, 17 bp, Arabidopsis thaliana
agacgctttggccgagt

SEQ ID NO: 29522 - DNA, 17 bp, Arabidopsis thaliana
agacgcttttgtccgct

SEQ ID NO: 29523 - DNA, 17 bp, Arabidopsis thaliana
agacggaaatagactga

SEQ ID NO: 29524 - DNA, 17 bp, Arabidopsis thaliana
agacggaacggcccgcg

SEQ ID NO: 29525 - DNA, 17 bp, Arabidopsis thaliana
agacggacagtgtggtg

SEQ ID NO: 29526 - DNA, 17 bp, Arabidopsis thaliana
agacggaccgacccgcg

SEQ ID NO: 29527 - DNA, 17 bp, Arabidopsis thaliana
agacggacgagattatt

SEQ ID NO: 29528 - DNA, 17 bp, Arabidopsis thaliana
agacggacgtttagcag

SEQ ID NO: 29529 - DNA, 17 bp, Arabidopsis thaliana
agacggactctatacag

SEQ ID NO: 29530 - DNA, 17 bp, Arabidopsis thaliana
agacggacttgagcgac

SEQ ID NO: 29531 - DNA, 17 bp, Arabidopsis thaliana
agacggagtgtgggagg

SEQ ID NO: 29532 - DNA, 17 bp, Arabidopsis thaliana
agacggataagccatca

SEQ ID NO: 29533 - DNA, 17 bp, Arabidopsis thaliana
agacggatacgtgaggc

SEQ ID NO: 29534 - DNA, 17 bp, Arabidopsis thaliana
agacggatatcggattt

SEQ ID NO: 29535 - DNA, 17 bp, Arabidopsis thaliana
agacggatcagtgttgg

SEQ ID NO: 29536 - DNA, 17 bp, Arabidopsis thaliana
agacggatccagtgggt

SEQ ID NO: 29537 - DNA, 17 bp, Arabidopsis thaliana
agacggatcgcatggcc

SEQ ID NO: 29538 - DNA, 17 bp, Arabidopsis thaliana
agacggatctgaacctt

SEQ ID NO: 29539 - DNA, 17 bp, Arabidopsis thaliana
agacggatcttaaaggc

SEQ ID NO: 29540 - DNA, 17 bp, Arabidopsis thaliana
agacggatggactaaca

SEQ ID NO: 29541 - DNA, 17 bp, Arabidopsis thaliana
agacggatggactatca

SEQ ID NO: 29542 - DNA, 17 bp, Arabidopsis thaliana
agacggatggttgctta

SEQ ID NO: 29543 - DNA, 17 bp, Arabidopsis thaliana
agacggatttgaaggga

SEQ ID NO: 29544 - DNA, 17 bp, Arabidopsis thaliana
agacggatttggagaga

SEQ ID NO: 29545 - DNA, 17 bp, Arabidopsis thaliana
agacggatttggaggga

SEQ ID NO: 29546 - DNA, 17 bp, Arabidopsis thaliana
agacggatttggagtga

SEQ ID NO: 29547 - DNA, 17 bp, Arabidopsis thaliana
agacggatttggcagga

SEQ ID NO: 29548 - DNA, 17 bp, Arabidopsis thaliana
agacggcaaaagcttca

SEQ ID NO: 29549 - DNA, 17 bp, Arabidopsis thaliana
agacggcaagacgtttg

SEQ ID NO: 29550 - DNA, 17 bp, Arabidopsis thaliana
agacggccacaaaatta

SEQ ID NO: 29551 - DNA, 17 bp, Arabidopsis thaliana
agacggccgcaaaatta

SEQ ID NO: 29552 - DNA, 17 bp, Arabidopsis thaliana
agacggcctgactaccc

SEQ ID NO: 29553 - DNA, 17 bp, Arabidopsis thaliana
agacggcgcacgaggcg

SEQ ID NO: 29554 - DNA, 17 bp, Arabidopsis thaliana
agacggcgccaaaatga

SEQ ID NO: 29555 - DNA, 17 bp, Arabidopsis thaliana
agacggcgccaaaatgt

SEQ ID NO: 29556 - DNA, 17 bp, Arabidopsis thaliana
agacggcggagagagat

SEQ ID NO: 29557 - DNA, 17 bp, Arabidopsis thaliana
agacggcgtttccggcg

SEQ ID NO: 29558 - DNA, 17 bp, Arabidopsis thaliana
agacggctttgtttgcg

SEQ ID NO: 29559 - DNA, 17 bp, Arabidopsis thaliana
agacgggaaaatcacag

SEQ ID NO: 29560 - DNA, 17 bp, Arabidopsis thaliana
agacgggcctaacctag

SEQ ID NO: 29561 - DNA, 17 bp, Arabidopsis thaliana
agacgggcctgccgagt

SEQ ID NO: 29562 - DNA, 17 bp, Arabidopsis thaliana
agacgggctatatttcg

SEQ ID NO: 29563 - DNA, 17 bp, Arabidopsis thaliana
agacgggctttggagat

SEQ ID NO: 29564 - DNA, 17 bp, Arabidopsis thaliana
agacggggtcccagaga

SEQ ID NO: 29565 - DNA, 17 bp, Arabidopsis thaliana
agacgggtaagctgacg

SEQ ID NO: 29566 - DNA, 17 bp, Arabidopsis thaliana
agacgggtcgaatgggg

SEQ ID NO: 29567 - DNA, 17 bp, Arabidopsis thaliana
agacgggtttagtagga

SEQ ID NO: 29568 - DNA, 17 bp, Arabidopsis thaliana
agacggtacggactgag

SEQ ID NO: 29569 - DNA, 17 bp, Arabidopsis thaliana
agacggtagcggttagg

SEQ ID NO: 29570 - DNA, 17 bp, Arabidopsis thaliana
agacggtataccagggg

SEQ ID NO: 29571 - DNA, 17 bp, Arabidopsis thaliana
agacggtattgaagcac

SEQ ID NO: 29572 - DNA, 17 bp, Arabidopsis thaliana
agacggtcagccggtcg

SEQ ID NO: 29573 - DNA, 17 bp, Arabidopsis thaliana
agacggtccatgggctt

SEQ ID NO: 29574 - DNA, 17 bp, Arabidopsis thaliana
agacggtccgcagttag

SEQ ID NO: 29575 - DNA, 17 bp, Arabidopsis thaliana
agacggtctgatagatt

SEQ ID NO: 29576 - DNA, 17 bp, Arabidopsis thaliana
agacggtctttaaacaa

SEQ ID NO: 29577 - DNA, 17 bp, Arabidopsis thaliana
agacggtgacaacggtg

SEQ ID NO: 29578 - DNA, 17 bp, Arabidopsis thaliana
agacggtgactgggtct

SEQ ID NO: 29579 - DNA, 17 bp, Arabidopsis thaliana
agacggtgaggccaaac

SEQ ID NO: 29580 - DNA, 17 bp, Arabidopsis thaliana
agacggtgattgcgatt

SEQ ID NO: 29581 - DNA, 17 bp, Arabidopsis thaliana
agacggtgtgaccactt

SEQ ID NO: 29582 - DNA, 17 bp, Arabidopsis thaliana
agacggtgttgattatc

SEQ ID NO: 29583 - DNA, 17 bp, Arabidopsis thaliana
agacggttagccttcct

SEQ ID NO: 29584 - DNA, 17 bp, Arabidopsis thaliana
agacggttctgcatgtg

SEQ ID NO: 29585 - DNA, 17 bp, Arabidopsis thaliana
agacggtttgtccgctt

SEQ ID NO: 29586 - DNA, 17 bp, Arabidopsis thaliana
agacggttttgtccgct

SEQ ID NO: 29587 - DNA, 17 bp, Arabidopsis thaliana
agacggttttgttcgct

SEQ ID NO: 29588 - DNA, 17 bp, Arabidopsis thaliana
agacggttttgttcgtt

SEQ ID NO: 29589 - DNA, 17 bp, Arabidopsis thaliana
agacgtacctgaatagg

SEQ ID NO: 29590 - DNA, 17 bp, Arabidopsis thaliana
agacgtacgatttgcgt

SEQ ID NO: 29591 - DNA, 17 bp, Arabidopsis thaliana
agacgtacttaccagct

SEQ ID NO: 29592 - DNA, 17 bp, Arabidopsis thaliana
agacgtagcgattccga

SEQ ID NO: 29593 - DNA, 17 bp, Arabidopsis thaliana
agacgtagcgtaccgac

SEQ ID NO: 29594 - DNA, 17 bp, Arabidopsis thaliana
agacgtagcttaaagcc

SEQ ID NO: 29595 - DNA, 17 bp, Arabidopsis thaliana
agacgtagggttccgat

SEQ ID NO: 29596 - DNA, 17 bp, Arabidopsis thaliana
agacgtatggtggtggt

SEQ ID NO: 29597 - DNA, 17 bp, Arabidopsis thaliana
agacgtcagattcaggt

SEQ ID NO: 29598 - DNA, 17 bp, Arabidopsis thaliana
agacgtcctgtgttcga

SEQ ID NO: 29599 - DNA, 17 bp, Arabidopsis thaliana
agacgtcgccgtcgttt

SEQ ID NO: 29600 - DNA, 17 bp, Arabidopsis thaliana
agacgtcgctgccgtga

SEQ ID NO: 29601 - DNA, 17 bp, Arabidopsis thaliana
agacgtcggcgggggcc

SEQ ID NO: 29602 - DNA, 17 bp, Arabidopsis thaliana
agacgtcgtatctgtga

SEQ ID NO: 29603 - DNA, 17 bp, Arabidopsis thaliana
agacgtctatgatcgaa

SEQ ID NO: 29604 - DNA, 17 bp, Arabidopsis thaliana
agacgtctgcctgggtg

SEQ ID NO: 29605 - DNA, 17 bp, Arabidopsis thaliana
agacgtcttgctgtaga

SEQ ID NO: 29606 - DNA, 17 bp, Arabidopsis thaliana
agacgtgactcgtaggc

SEQ ID NO: 29607 - DNA, 17 bp, Arabidopsis thaliana
agacgtgcggttcaact

SEQ ID NO: 29608 - DNA, 17 bp, Arabidopsis thaliana
agacgtgctcgatctac

SEQ ID NO: 29609 - DNA, 17 bp, Arabidopsis thaliana
agacgtgctgggaaaag

SEQ ID NO: 29610 - DNA, 17 bp, Arabidopsis thaliana
agacgtggaggtcactg

SEQ ID NO: 29611 - DNA, 17 bp, Arabidopsis thaliana
agacgtggccgcttctg

SEQ ID NO: 29612 - DNA, 17 bp, Arabidopsis thaliana
agacgtggccttatttt

SEQ ID NO: 29613 - DNA, 17 bp, Arabidopsis thaliana
agacgtggctttgtata

SEQ ID NO: 29614 - DNA, 17 bp, Arabidopsis thaliana
agacgtggggttttccg

SEQ ID NO: 29615 - DNA, 17 bp, Arabidopsis thaliana
agacgtggtcccagttc

SEQ ID NO: 29616 - DNA, 17 bp, Arabidopsis thaliana
agacgtggtcgtcggcg

SEQ ID NO: 29617 - DNA, 17 bp, Arabidopsis thaliana
agacgtgtcctttacca

SEQ ID NO: 29618 - DNA, 17 bp, Arabidopsis thaliana
agacgtgtctacgcttg

SEQ ID NO: 29619 - DNA, 17 bp, Arabidopsis thaliana
agacgtgtgtacccgaa

SEQ ID NO: 29620 - DNA, 17 bp, Arabidopsis thaliana
agacgttaagtgacgct

SEQ ID NO: 29621 - DNA, 17 bp, Arabidopsis thaliana
agacgttagcctgttgt

SEQ ID NO: 29622 - DNA, 17 bp, Arabidopsis thaliana
agacgttatagtccgat

SEQ ID NO: 29623 - DNA, 17 bp, Arabidopsis thaliana
agacgttcctacacgtt

SEQ ID NO: 29624 - DNA, 17 bp, Arabidopsis thaliana
agacgttcgataggtgt

SEQ ID NO: 29625 - DNA, 17 bp, Arabidopsis thaliana
agacgttgacaattcag

SEQ ID NO: 29626 - DNA, 17 bp, Arabidopsis thaliana
agacgttggcgtgatta

SEQ ID NO: 29627 - DNA, 17 bp, Arabidopsis thaliana
agacgtttctggccaac

SEQ ID NO: 29628 - DNA, 17 bp, Arabidopsis thaliana
agacgtttgatactgag

SEQ ID NO: 29629 - DNA, 17 bp, Arabidopsis thaliana
agacgtttgccatcgac

SEQ ID NO: 29630 - DNA, 17 bp, Arabidopsis thaliana
agacgttttcggcaggt

SEQ ID NO: 29631 - DNA, 17 bp, Arabidopsis thaliana
agacgttttctaatgcg

SEQ ID NO: 29632 - DNA, 17 bp, Arabidopsis thaliana
agacgtttttggccatg

SEQ ID NO: 29633 - DNA, 17 bp, Arabidopsis thaliana
agactaaaatggcgcgg

SEQ ID NO: 29634 - DNA, 17 bp, Arabidopsis thaliana
agactaaactggcgcat

SEQ ID NO: 29635 - DNA, 17 bp, Arabidopsis thaliana
agactaaatccacagcg

SEQ ID NO: 29636 - DNA, 17 bp, Arabidopsis thaliana
agactaacaagatcggg

SEQ ID NO: 29637 - DNA, 17 bp, Arabidopsis thaliana
agactaaccttagaggt

SEQ ID NO: 29638 - DNA, 17 bp, Arabidopsis thaliana
agactaactatccagtt

SEQ ID NO: 29639 - DNA, 17 bp, Arabidopsis thaliana
agactaagaaaggacgg

SEQ ID NO: 29640 - DNA, 17 bp, Arabidopsis thaliana
agactaagaagtcacaa

SEQ ID NO: 29641 - DNA, 17 bp, Arabidopsis thaliana
agactaagccgttgaag

SEQ ID NO: 29642 - DNA, 17 bp, Arabidopsis thaliana
agactaagccgttgaat

SEQ ID NO: 29643 - DNA, 17 bp, Arabidopsis thaliana
agactaaggggaaccat

SEQ ID NO: 29644 - DNA, 17 bp, Arabidopsis thaliana
agactaagttacgaggt

SEQ ID NO: 29645 - DNA, 17 bp, Arabidopsis thaliana
agactaagttgagtccg

SEQ ID NO: 29646 - DNA, 17 bp, Arabidopsis thaliana
agactaagttgatctag

SEQ ID NO: 29647 - DNA, 17 bp, Arabidopsis thaliana
agactaagttgttggtg

SEQ ID NO: 29648 - DNA, 17 bp, Arabidopsis thaliana
agactaagtttggggga

SEQ ID NO: 29649 - DNA, 17 bp, Arabidopsis thaliana
agactaatcgaaccatc

SEQ ID NO: 29650 - DNA, 17 bp, Arabidopsis thaliana
agactaatcgacggttg

SEQ ID NO: 29651 - DNA, 17 bp, Arabidopsis thaliana
agactaatctcggtacg

SEQ ID NO: 29652 - DNA, 17 bp, Arabidopsis thaliana
agactaatgaacgaggg

SEQ ID NO: 29653 - DNA, 17 bp, Arabidopsis thaliana
agactaatgcttcatga

SEQ ID NO: 29654 - DNA, 17 bp, Arabidopsis thaliana
agactacaagcgttgca

SEQ ID NO: 29655 - DNA, 17 bp, Arabidopsis thaliana
agactacaccggtgaca

SEQ ID NO: 29656 - DNA, 17 bp, Arabidopsis thaliana
agactacaggctacatg

SEQ ID NO: 29657 - DNA, 17 bp, Arabidopsis thaliana
agactacagtgcttaag

SEQ ID NO: 29658 - DNA, 17 bp, Arabidopsis thaliana
agactacagttcgatag

SEQ ID NO: 29659 - DNA, 17 bp, Arabidopsis thaliana
agactacatcttggttg

SEQ ID NO: 29660 - DNA, 17 bp, Arabidopsis thaliana
agactaccaaaatgact

SEQ ID NO: 29661 - DNA, 17 bp, Arabidopsis thaliana
agactaccaaaatgtct

SEQ ID NO: 29662 - DNA, 17 bp, Arabidopsis thaliana
agactaccaccacttgg

SEQ ID NO: 29663 - DNA, 17 bp, Arabidopsis thaliana
agactacccgtgggtac

SEQ ID NO: 29664 - DNA, 17 bp, Arabidopsis thaliana
agactacgacggctgaa

SEQ ID NO: 29665 - DNA, 17 bp, Arabidopsis thaliana
agactacgcggtttcat

SEQ ID NO: 29666 - DNA, 17 bp, Arabidopsis thaliana
agactacggctagttgc

SEQ ID NO: 29667 - DNA, 17 bp, Arabidopsis thaliana
agactacgggtgactta

SEQ ID NO: 29668 - DNA, 17 bp, Arabidopsis thaliana
agactacgtgcagtttt

SEQ ID NO: 29669 - DNA, 17 bp, Arabidopsis thaliana
agactacgttgaccagt

SEQ ID NO: 29670 - DNA, 17 bp, Arabidopsis thaliana
agactactcagacctga

SEQ ID NO: 29671 - DNA, 17 bp, Arabidopsis thaliana
agactactcggccatcc

SEQ ID NO: 29672 - DNA, 17 bp, Arabidopsis thaliana
agactactcggcgtcat

SEQ ID NO: 29673 - DNA, 17 bp, Arabidopsis thaliana
agactactcgtaatgga

SEQ ID NO: 29674 - DNA, 17 bp, Arabidopsis thaliana
agactactgtacagata

SEQ ID NO: 29675 - DNA, 17 bp, Arabidopsis thaliana
agactactgttagttgc

SEQ ID NO: 29676 - DNA, 17 bp, Arabidopsis thaliana
agactacttcccgaaaa

SEQ ID NO: 29677 - DNA, 17 bp, Arabidopsis thaliana
agactacttgcaatgga

SEQ ID NO: 29678 - DNA, 17 bp, Arabidopsis thaliana
agactactttctaggtc

SEQ ID NO: 29679 - DNA, 17 bp, Arabidopsis thaliana
agactactttgtgatcg

SEQ ID NO: 29680 - DNA, 17 bp, Arabidopsis thaliana
agactagagccggccgt

SEQ ID NO: 29681 - DNA, 17 bp, Arabidopsis thaliana
agactagagcgacacct

SEQ ID NO: 29682 - DNA, 17 bp, Arabidopsis thaliana
agactagagcggttggt

SEQ ID NO: 29683 - DNA, 17 bp, Arabidopsis thaliana
agactagatttaacccg

SEQ ID NO: 29684 - DNA, 17 bp, Arabidopsis thaliana
agactagatttcatcca

SEQ ID NO: 29685 - DNA, 17 bp, Arabidopsis thaliana
agactagatttcatccc

SEQ ID NO: 29686 - DNA, 17 bp, Arabidopsis thaliana
agactagatttgcgagc

SEQ ID NO: 29687 - DNA, 17 bp, Arabidopsis thaliana
agactagattttatcac

SEQ ID NO: 29688 - DNA, 17 bp, Arabidopsis thaliana
agactagccacgtggcc

SEQ ID NO: 29689 - DNA, 17 bp, Arabidopsis thaliana
agactagcgtttggctc

SEQ ID NO: 29690 - DNA, 17 bp, Arabidopsis thaliana
agactaggcggggattt

SEQ ID NO: 29691 - DNA, 17 bp, Arabidopsis thaliana
agactagggcgataagg

SEQ ID NO: 29692 - DNA, 17 bp, Arabidopsis thaliana
agactaggttttaccca

SEQ ID NO: 29693 - DNA, 17 bp, Arabidopsis thaliana
agactatagtcgccact

SEQ ID NO: 29694 - DNA, 17 bp, Arabidopsis thaliana
agactatcatttttgca

SEQ ID NO: 29695 - DNA, 17 bp, Arabidopsis thaliana
agactatccgctatcga

SEQ ID NO: 29696 - DNA, 17 bp, Arabidopsis thaliana
agactatccgtgggtac

SEQ ID NO: 29697 - DNA, 17 bp, Arabidopsis thaliana
agactatcgactactgg

SEQ ID NO: 29698 - DNA, 17 bp, Arabidopsis thaliana
agactatcgagctgaac

SEQ ID NO: 29699 - DNA, 17 bp, Arabidopsis thaliana
agactatcggctgattc

SEQ ID NO: 29700 - DNA, 17 bp, Arabidopsis thaliana
agactatcggtccgcac

SEQ ID NO: 29701 - DNA, 17 bp, Arabidopsis thaliana
agactatcttccaattg

SEQ ID NO: 29702 - DNA, 17 bp, Arabidopsis thaliana
agactatgagtgaattt

SEQ ID NO: 29703 - DNA, 17 bp, Arabidopsis thaliana
agactatgcgacttgtt

SEQ ID NO: 29704 - DNA, 17 bp, Arabidopsis thaliana
agactatgcgacttttt

SEQ ID NO: 29705 - DNA, 17 bp, Arabidopsis thaliana
agactatggccacgtgg

SEQ ID NO: 29706 - DNA, 17 bp, Arabidopsis thaliana
agactatggggattggc

SEQ ID NO: 29707 - DNA, 17 bp, Arabidopsis thaliana
agactatgtccgagttc

SEQ ID NO: 29708 - DNA, 17 bp, Arabidopsis thaliana
agactatgtccgggtgt

SEQ ID NO: 29709 - DNA, 17 bp, Arabidopsis thaliana
agactatgtccgggttc

SEQ ID NO: 29710 - DNA, 17 bp, Arabidopsis thaliana
agactatgtccgggttt

SEQ ID NO: 29711 - DNA, 17 bp, Arabidopsis thaliana
agactatgtcttcgcag

SEQ ID NO: 29712 - DNA, 17 bp, Arabidopsis thaliana
agactatgtgactggtg

SEQ ID NO: 29713 - DNA, 17 bp, Arabidopsis thaliana
agactatgtggtcgtcg

SEQ ID NO: 29714 - DNA, 17 bp, Arabidopsis thaliana
agactatgttcgaaaga

SEQ ID NO: 29715 - DNA, 17 bp, Arabidopsis thaliana
agactattacggtctca

SEQ ID NO: 29716 - DNA, 17 bp, Arabidopsis thaliana
agactattagctcagtg

SEQ ID NO: 29717 - DNA, 17 bp, Arabidopsis thaliana
agactattagggtctca

SEQ ID NO: 29718 - DNA, 17 bp, Arabidopsis thaliana
agactattagggtctct

SEQ ID NO: 29719 - DNA, 17 bp, Arabidopsis thaliana
agactattgagcctgag

SEQ ID NO: 29720 - DNA, 17 bp, Arabidopsis thaliana
agactattgggccgcca

SEQ ID NO: 29721 - DNA, 17 bp, Arabidopsis thaliana
agactattgggcgtgcc

SEQ ID NO: 29722 - DNA, 17 bp, Arabidopsis thaliana
agactattgggcgtgtc

SEQ ID NO: 29723 - DNA, 17 bp, Arabidopsis thaliana
agactattgtcactatc

SEQ ID NO: 29724 - DNA, 17 bp, Arabidopsis thaliana
agactatttcgagcctg

SEQ ID NO: 29725 - DNA, 17 bp, Arabidopsis thaliana
agactatttgcaatgga

SEQ ID NO: 29726 - DNA, 17 bp, Arabidopsis thaliana
agactatttttgtggat

SEQ ID NO: 29727 - DNA, 17 bp, Arabidopsis thaliana
agactcaaacctaaact

SEQ ID NO: 29728 - DNA, 17 bp, Arabidopsis thaliana
agactcaacatcactcc

SEQ ID NO: 29729 - DNA, 17 bp, Arabidopsis thaliana
agactcaaccatattaa

SEQ ID NO: 29730 - DNA, 17 bp, Arabidopsis thaliana
agactcaaccgcattat

SEQ ID NO: 29731 - DNA, 17 bp, Arabidopsis thaliana
agactcaagcagaaagt

SEQ ID NO: 29732 - DNA, 17 bp, Arabidopsis thaliana
agactcaagcccagctg

SEQ ID NO: 29733 - DNA, 17 bp, Arabidopsis thaliana
agactcaaggccgggat

SEQ ID NO: 29734 - DNA, 17 bp, Arabidopsis thaliana
agactcaaggggagttt

SEQ ID NO: 29735 - DNA, 17 bp, Arabidopsis thaliana
agactcaataaccgatg

SEQ ID NO: 29736 - DNA, 17 bp, Arabidopsis thaliana
agactcaatccacttac

SEQ ID NO: 29737 - DNA, 17 bp, Arabidopsis thaliana
agactcacacgccaaca

SEQ ID NO: 29738 - DNA, 17 bp, Arabidopsis thaliana
agactcactccctatgc

SEQ ID NO: 29739 - DNA, 17 bp, Arabidopsis thaliana
agactcacttcctatgc

SEQ ID NO: 29740 - DNA, 17 bp, Arabidopsis thaliana
agactcacttcttatgc

SEQ ID NO: 29741 - DNA, 17 bp, Arabidopsis thaliana
agactcagactcaagtg

SEQ ID NO: 29742 - DNA, 17 bp, Arabidopsis thaliana
agactcagactgagttt

SEQ ID NO: 29743 - DNA, 17 bp, Arabidopsis thaliana
agactcagaggagcggg

SEQ ID NO: 29744 - DNA, 17 bp, Arabidopsis thaliana
agactcagcaatccaac

SEQ ID NO: 29745 - DNA, 17 bp, Arabidopsis thaliana
agactcagccaaccgca

SEQ ID NO: 29746 - DNA, 17 bp, Arabidopsis thaliana
agactcagccctttgtc

SEQ ID NO: 29747 - DNA, 17 bp, Arabidopsis thaliana
agactcagcttcgtttc

SEQ ID NO: 29748 - DNA, 17 bp, Arabidopsis thaliana
agactcagctttcctga

SEQ ID NO: 29749 - DNA, 17 bp, Arabidopsis thaliana
agactcaggacaggaat

SEQ ID NO: 29750 - DNA, 17 bp, Arabidopsis thaliana
agactcaggagggatag

SEQ ID NO: 29751 - DNA, 17 bp, Arabidopsis thaliana
agactcaggcgcatttg

SEQ ID NO: 29752 - DNA, 17 bp, Arabidopsis thaliana
agactcagggggagttt

SEQ ID NO: 29753 - DNA, 17 bp, Arabidopsis thaliana
agactcagtatgagaag

SEQ ID NO: 29754 - DNA, 17 bp, Arabidopsis thaliana
agactcagttttatgcc

SEQ ID NO: 29755 - DNA, 17 bp, Arabidopsis thaliana
agactcagttttgcaat

SEQ ID NO: 29756 - DNA, 17 bp, Arabidopsis thaliana
agactcataccttagcc

SEQ ID NO: 29757 - DNA, 17 bp, Arabidopsis thaliana
agactcatacgcacttt

SEQ ID NO: 29758 - DNA, 17 bp, Arabidopsis thaliana
agactcatacggacttt

SEQ ID NO: 29759 - DNA, 17 bp, Arabidopsis thaliana
agactcatatcgccttt

SEQ ID NO: 29760 - DNA, 17 bp, Arabidopsis thaliana
agactcatatggacttc

SEQ ID NO: 29761 - DNA, 17 bp, Arabidopsis thaliana
agactcatatggacttt

SEQ ID NO: 29762 - DNA, 17 bp, Arabidopsis thaliana
agactcatcacgcgtgt

SEQ ID NO: 29763 - DNA, 17 bp, Arabidopsis thaliana
agactcatcgttggtgc

SEQ ID NO: 29764 - DNA, 17 bp, Arabidopsis thaliana
agactcatctctggtag

SEQ ID NO: 29765 - DNA, 17 bp, Arabidopsis thaliana
agactcatgacaggaat

SEQ ID NO: 29766 - DNA, 17 bp, Arabidopsis thaliana
agactcatgactcagga

SEQ ID NO: 29767 - DNA, 17 bp, Arabidopsis thaliana
agactcatggctaaatt

SEQ ID NO: 29768 - DNA, 17 bp, Arabidopsis thaliana
agactcattggactatt

SEQ ID NO: 29769 - DNA, 17 bp, Arabidopsis thaliana
agactcatttgagacat

SEQ ID NO: 29770 - DNA, 17 bp, Arabidopsis thaliana
agactccaagctggcag

SEQ ID NO: 29771 - DNA, 17 bp, Arabidopsis thaliana
agactccaatcatatgt

SEQ ID NO: 29772 - DNA, 17 bp, Arabidopsis thaliana
agactccaccgccgcca

SEQ ID NO: 29773 - DNA, 17 bp, Arabidopsis thaliana
agactccaccgccgtca

SEQ ID NO: 29774 - DNA, 17 bp, Arabidopsis thaliana
agactccaccggtatcc

SEQ ID NO: 29775 - DNA, 17 bp, Arabidopsis thaliana
agactccaccggtattt

SEQ ID NO: 29776 - DNA, 17 bp, Arabidopsis thaliana
agactccagatctgtca

SEQ ID NO: 29777 - DNA, 17 bp, Arabidopsis thaliana
agactccctcaacaccc

SEQ ID NO: 29778 - DNA, 17 bp, Arabidopsis thaliana
agactccctttggagaa

SEQ ID NO: 29779 - DNA, 17 bp, Arabidopsis thaliana
agactccgaacggtgac

SEQ ID NO: 29780 - DNA, 17 bp, Arabidopsis thaliana
agactccgaatttggac

SEQ ID NO: 29781 - DNA, 17 bp, Arabidopsis thaliana
agactccgctaaccgca

SEQ ID NO: 29782 - DNA, 17 bp, Arabidopsis thaliana
agactccgctattgcct

SEQ ID NO: 29783 - DNA, 17 bp, Arabidopsis thaliana
agactccggggttccta

SEQ ID NO: 29784 - DNA, 17 bp, Arabidopsis thaliana
agactccggttgatcca

SEQ ID NO: 29785 - DNA, 17 bp, Arabidopsis thaliana
agactcctgcaaagctt

SEQ ID NO: 29786 - DNA, 17 bp, Arabidopsis thaliana
agactcctggacgggtt

SEQ ID NO: 29787 - DNA, 17 bp, Arabidopsis thaliana
agactcctgtcagttcc

SEQ ID NO: 29788 - DNA, 17 bp, Arabidopsis thaliana
agactcctgtcagttgc

SEQ ID NO: 29789 - DNA, 17 bp, Arabidopsis thaliana
agactcgaaagaactta

SEQ ID NO: 29790 - DNA, 17 bp, Arabidopsis thaliana
agactcgaaatgaattg

SEQ ID NO: 29791 - DNA, 17 bp, Arabidopsis thaliana
agactcgactccttctg

SEQ ID NO: 29792 - DNA, 17 bp, Arabidopsis thaliana
agactcgagcgttcttc

SEQ ID NO: 29793 - DNA, 17 bp, Arabidopsis thaliana
agactcgaggtctagga

SEQ ID NO: 29794 - DNA, 17 bp, Arabidopsis thaliana
agactcgagtccggtag

SEQ ID NO: 29795 - DNA, 17 bp, Arabidopsis thaliana
agactcgatgatgtgat

SEQ ID NO: 29796 - DNA, 17 bp, Arabidopsis thaliana
agactcgatggttcacg

SEQ ID NO: 29797 - DNA, 17 bp, Arabidopsis thaliana
agactcgatttgttgta

SEQ ID NO: 29798 - DNA, 17 bp, Arabidopsis thaliana
agactcgcacgccaata

SEQ ID NO: 29799 - DNA, 17 bp, Arabidopsis thaliana
agactcgccaaccatgg

SEQ ID NO: 29800 - DNA, 17 bp, Arabidopsis thaliana
agactcgctcaactcag

SEQ ID NO: 29801 - DNA, 17 bp, Arabidopsis thaliana
agactcggacggaccag

SEQ ID NO: 29802 - DNA, 17 bp, Arabidopsis thaliana
agactcggacggaccga

SEQ ID NO: 29803 - DNA, 17 bp, Arabidopsis thaliana
agactcggccgtgatag

SEQ ID NO: 29804 - DNA, 17 bp, Arabidopsis thaliana
agactcggctgattatc

SEQ ID NO: 29805 - DNA, 17 bp, Arabidopsis thaliana
agactcgggaaggataa

SEQ ID NO: 29806 - DNA, 17 bp, Arabidopsis thaliana
agactcgggcccatgtc

SEQ ID NO: 29807 - DNA, 17 bp, Arabidopsis thaliana
agactcggtactgtcat

SEQ ID NO: 29808 - DNA, 17 bp, Arabidopsis thaliana
agactcggttcagatac

SEQ ID NO: 29809 - DNA, 17 bp, Arabidopsis thaliana
agactcgtcggatccat

SEQ ID NO: 29810 - DNA, 17 bp, Arabidopsis thaliana
agactcgtttgctctcc

SEQ ID NO: 29811 - DNA, 17 bp, Arabidopsis thaliana
agactctaaagctaatg

SEQ ID NO: 29812 - DNA, 17 bp, Arabidopsis thaliana
agactctaaatgtggtt

SEQ ID NO: 29813 - DNA, 17 bp, Arabidopsis thaliana
agactctaactcccatg

SEQ ID NO: 29814 - DNA, 17 bp, Arabidopsis thaliana
agactctaaggggtgtt

SEQ ID NO: 29815 - DNA, 17 bp, Arabidopsis thaliana
agactctactaagtcgc

SEQ ID NO: 29816 - DNA, 17 bp, Arabidopsis thaliana
agactctacttgcagga

SEQ ID NO: 29817 - DNA, 17 bp, Arabidopsis thaliana
agactctagattacgca

SEQ ID NO: 29818 - DNA, 17 bp, Arabidopsis thaliana
agactctagcaaatcca

SEQ ID NO: 29819 - DNA, 17 bp, Arabidopsis thaliana
agactctagccctctgt

SEQ ID NO: 29820 - DNA, 17 bp, Arabidopsis thaliana
agactctagcgggttgt

SEQ ID NO: 29821 - DNA, 17 bp, Arabidopsis thaliana
agactctagtagagatt

SEQ ID NO: 29822 - DNA, 17 bp, Arabidopsis thaliana
agactctatggcttatg

SEQ ID NO: 29823 - DNA, 17 bp, Arabidopsis thaliana
agactctatggcttatt

SEQ ID NO: 29824 - DNA, 17 bp, Arabidopsis thaliana
agactctatttcccaac

SEQ ID NO: 29825 - DNA, 17 bp, Arabidopsis thaliana
agactctcagcgttggc

SEQ ID NO: 29826 - DNA, 17 bp, Arabidopsis thaliana
agactctcagtccgtac

SEQ ID NO: 29827 - DNA, 17 bp, Arabidopsis thaliana
agactctcattaggtgg

SEQ ID NO: 29828 - DNA, 17 bp, Arabidopsis thaliana
agactctccatttgccg

SEQ ID NO: 29829 - DNA, 17 bp, Arabidopsis thaliana
agactctcgagaggtat

SEQ ID NO: 29830 - DNA, 17 bp, Arabidopsis thaliana
agactctctccgggcgt

SEQ ID NO: 29831 - DNA, 17 bp, Arabidopsis thaliana
agactctctcgtggatt

SEQ ID NO: 29832 - DNA, 17 bp, Arabidopsis thaliana
agactctctctaggcat

SEQ ID NO: 29833 - DNA, 17 bp, Arabidopsis thaliana
agactctctgttggcct

SEQ ID NO: 29834 - DNA, 17 bp, Arabidopsis thaliana
agactctcttgaacctt

SEQ ID NO: 29835 - DNA, 17 bp, Arabidopsis thaliana
agactctcttgtagttg

SEQ ID NO: 29836 - DNA, 17 bp, Arabidopsis thaliana
agactctgaactgtacg

SEQ ID NO: 29837 - DNA, 17 bp, Arabidopsis thaliana
agactctgaactgtatg

SEQ ID NO: 29838 - DNA, 17 bp, Arabidopsis thaliana
agactctgaagctggca

SEQ ID NO: 29839 - DNA, 17 bp, Arabidopsis thaliana
agactctgaagtgtatg

SEQ ID NO: 29840 - DNA, 17 bp, Arabidopsis thaliana
agactctgatcaatctt

SEQ ID NO: 29841 - DNA, 17 bp, Arabidopsis thaliana
agactctgattggggaa

SEQ ID NO: 29842 - DNA, 17 bp, Arabidopsis thaliana
agactctgcccccagac

SEQ ID NO: 29843 - DNA, 17 bp, Arabidopsis thaliana
agactctggatcgggaa

SEQ ID NO: 29844 - DNA, 17 bp, Arabidopsis thaliana
agactctggcagagaca

SEQ ID NO: 29845 - DNA, 17 bp, Arabidopsis thaliana
agactctgggcttccaa

SEQ ID NO: 29846 - DNA, 17 bp, Arabidopsis thaliana
agactctggtcgtcatt

SEQ ID NO: 29847 - DNA, 17 bp, Arabidopsis thaliana
agactctggttgtcatt

SEQ ID NO: 29848 - DNA, 17 bp, Arabidopsis thaliana
agactctgtgcgttttt

SEQ ID NO: 29849 - DNA, 17 bp, Arabidopsis thaliana
agactctgtggccttac

SEQ ID NO: 29850 - DNA, 17 bp, Arabidopsis thaliana
agactctgttaagggat

SEQ ID NO: 29851 - DNA, 17 bp, Arabidopsis thaliana
agactctgttcctaagc

SEQ ID NO: 29852 - DNA, 17 bp, Arabidopsis thaliana
agactcttactcactct

SEQ ID NO: 29853 - DNA, 17 bp, Arabidopsis thaliana
agactcttatgatggcc

SEQ ID NO: 29854 - DNA, 17 bp, Arabidopsis thaliana
agactcttcggcgatca

SEQ ID NO: 29855 - DNA, 17 bp, Arabidopsis thaliana
agactcttcttccattt

SEQ ID NO: 29856 - DNA, 17 bp, Arabidopsis thaliana
agactcttgacggactt

SEQ ID NO: 29857 - DNA, 17 bp, Arabidopsis thaliana
agactcttgacgggctt

SEQ ID NO: 29858 - DNA, 17 bp, Arabidopsis thaliana
agactcttgatcgttcc

SEQ ID NO: 29859 - DNA, 17 bp, Arabidopsis thaliana
agactcttgtagattcg

SEQ ID NO: 29860 - DNA, 17 bp, Arabidopsis thaliana
agactctttgagatgaa

SEQ ID NO: 29861 - DNA, 17 bp, Arabidopsis thaliana
agactctttggcgattg

SEQ ID NO: 29862 - DNA, 17 bp, Arabidopsis thaliana
agactcttttgctctcc

SEQ ID NO: 29863 - DNA, 17 bp, Arabidopsis thaliana
agactgaaaatgacatt

SEQ ID NO: 29864 - DNA, 17 bp, Arabidopsis thaliana
agactgaaaccatccat

SEQ ID NO: 29865 - DNA, 17 bp, Arabidopsis thaliana
agactgaagccgtgtcg

SEQ ID NO: 29866 - DNA, 17 bp, Arabidopsis thaliana
agactgaatatctggct

SEQ ID NO: 29867 - DNA, 17 bp, Arabidopsis thaliana
agactgaattcccttgg

SEQ ID NO: 29868 - DNA, 17 bp, Arabidopsis thaliana
agactgaccgggatcgc

SEQ ID NO: 29869 - DNA, 17 bp, Arabidopsis thaliana
agactgacctaggattg

SEQ ID NO: 29870 - DNA, 17 bp, Arabidopsis thaliana
agactgacctgcattgt

SEQ ID NO: 29871 - DNA, 17 bp, Arabidopsis thaliana
agactgactctttcact

SEQ ID NO: 29872 - DNA, 17 bp, Arabidopsis thaliana
agactgactgtgaagag

SEQ ID NO: 29873 - DNA, 17 bp, Arabidopsis thaliana
agactgagaaagccaga

SEQ ID NO: 29874 - DNA, 17 bp, Arabidopsis thaliana
agactgagactgaagtt

SEQ ID NO: 29875 - DNA, 17 bp, Arabidopsis thaliana
agactgagagctctttc

SEQ ID NO: 29876 - DNA, 17 bp, Arabidopsis thaliana
agactgagagtatcagt

SEQ ID NO: 29877 - DNA, 17 bp, Arabidopsis thaliana
agactgagataaaactc

SEQ ID NO: 29878 - DNA, 17 bp, Arabidopsis thaliana
agactgagatacgcgta

SEQ ID NO: 29879 - DNA, 17 bp, Arabidopsis thaliana
agactgagatagaggtt

SEQ ID NO: 29880 - DNA, 17 bp, Arabidopsis thaliana
agactgagatgactgtg

SEQ ID NO: 29881 - DNA, 17 bp, Arabidopsis thaliana
agactgagattcagccc

SEQ ID NO: 29882 - DNA, 17 bp, Arabidopsis thaliana
agactgagattcgtcgt

SEQ ID NO: 29883 - DNA, 17 bp, Arabidopsis thaliana
agactgagatttgtcgt

SEQ ID NO: 29884 - DNA, 17 bp, Arabidopsis thaliana
agactgagctactcagg

SEQ ID NO: 29885 - DNA, 17 bp, Arabidopsis thaliana
agactgagctgttcttg

SEQ ID NO: 29886 - DNA, 17 bp, Arabidopsis thaliana
agactgagcttgaagat

SEQ ID NO: 29887 - DNA, 17 bp, Arabidopsis thaliana
agactgaggagtagcga

SEQ ID NO: 29888 - DNA, 17 bp, Arabidopsis thaliana
agactgaggtcaaagtt

SEQ ID NO: 29889 - DNA, 17 bp, Arabidopsis thaliana
agactgagtttgatctg

SEQ ID NO: 29890 - DNA, 17 bp, Arabidopsis thaliana
agactgatacacttgcg

SEQ ID NO: 29891 - DNA, 17 bp, Arabidopsis thaliana
agactgatctgacgttt

SEQ ID NO: 29892 - DNA, 17 bp, Arabidopsis thaliana
agactgatctgtttaac

SEQ ID NO: 29893 - DNA, 17 bp, Arabidopsis thaliana
agactgatggatgatct

SEQ ID NO: 29894 - DNA, 17 bp, Arabidopsis thaliana
agactgatgtggtggaa

SEQ ID NO: 29895 - DNA, 17 bp, Arabidopsis thaliana
agactgattattcaaac

SEQ ID NO: 29896 - DNA, 17 bp, Arabidopsis thaliana
agactgattctgttgcg

SEQ ID NO: 29897 - DNA, 17 bp, Arabidopsis thaliana
agactgattggtctaag

SEQ ID NO: 29898 - DNA, 17 bp, Arabidopsis thaliana
agactgcaaaaccagag

SEQ ID NO: 29899 - DNA, 17 bp, Arabidopsis thaliana
agactgcagctgaagct

SEQ ID NO: 29900 - DNA, 17 bp, Arabidopsis thaliana
agactgcaggatctccg

SEQ ID NO: 29901 - DNA, 17 bp, Arabidopsis thaliana
agactgcataaccgcgg

SEQ ID NO: 29902 - DNA, 17 bp, Arabidopsis thaliana
agactgcattggttcct

SEQ ID NO: 29903 - DNA, 17 bp, Arabidopsis thaliana
agactgcccagactccc

SEQ ID NO: 29904 - DNA, 17 bp, Arabidopsis thaliana
agactgcctctgaggga

SEQ ID NO: 29905 - DNA, 17 bp, Arabidopsis thaliana
agactgccttgtgccaa

SEQ ID NO: 29906 - DNA, 17 bp, Arabidopsis thaliana
agactgcgcaaactcac

SEQ ID NO: 29907 - DNA, 17 bp, Arabidopsis thaliana
agactgcgcattagcca

SEQ ID NO: 29908 - DNA, 17 bp, Arabidopsis thaliana
agactgcgcattagcta

SEQ ID NO: 29909 - DNA, 17 bp, Arabidopsis thaliana
agactgcgctaggcttg

SEQ ID NO: 29910 - DNA, 17 bp, Arabidopsis thaliana
agactgcgcttgtcggc

SEQ ID NO: 29911 - DNA, 17 bp, Arabidopsis thaliana
agactgctcaacatcca

SEQ ID NO: 29912 - DNA, 17 bp, Arabidopsis thaliana
agactgctcgaaatcgt

SEQ ID NO: 29913 - DNA, 17 bp, Arabidopsis thaliana
agactgctctcagtcca

SEQ ID NO: 29914 - DNA, 17 bp, Arabidopsis thaliana
agactgctcttgtcggc

SEQ ID NO: 29915 - DNA, 17 bp, Arabidopsis thaliana
agactgctgctgtctca

SEQ ID NO: 29916 - DNA, 17 bp, Arabidopsis thaliana
agactgctgtccatcgt

SEQ ID NO: 29917 - DNA, 17 bp, Arabidopsis thaliana
agactgctgtccatctt

SEQ ID NO: 29918 - DNA, 17 bp, Arabidopsis thaliana
agactgcttattgactt

SEQ ID NO: 29919 - DNA, 17 bp, Arabidopsis thaliana
agactgcttggtgactt

SEQ ID NO: 29920 - DNA, 17 bp, Arabidopsis thaliana
agactgctttgaatgtt

SEQ ID NO: 29921 - DNA, 17 bp, Arabidopsis thaliana
agactggaagtccgatt

SEQ ID NO: 29922 - DNA, 17 bp, Arabidopsis thaliana
agactggaccgcttttt

SEQ ID NO: 29923 - DNA, 17 bp, Arabidopsis thaliana
agactggactttccaat

SEQ ID NO: 29924 - DNA, 17 bp, Arabidopsis thaliana
agactggagatcagagc

SEQ ID NO: 29925 - DNA, 17 bp, Arabidopsis thaliana
agactggatagactgtg

SEQ ID NO: 29926 - DNA, 17 bp, Arabidopsis thaliana
agactggatcaactcag

SEQ ID NO: 29927 - DNA, 17 bp, Arabidopsis thaliana
agactggatcgaactcg

SEQ ID NO: 29928 - DNA, 17 bp, Arabidopsis thaliana
agactggcagaaacgat

SEQ ID NO: 29929 - DNA, 17 bp, Arabidopsis thaliana
agactggcccaggtttg

SEQ ID NO: 29930 - DNA, 17 bp, Arabidopsis thaliana
agactggctagtaggtc

SEQ ID NO: 29931 - DNA, 17 bp, Arabidopsis thaliana
agactggctcaactcag

SEQ ID NO: 29932 - DNA, 17 bp, Arabidopsis thaliana
agactggctcaatccag

SEQ ID NO: 29933 - DNA, 17 bp, Arabidopsis thaliana
agactggcttaactcat

SEQ ID NO: 29934 - DNA, 17 bp, Arabidopsis thaliana
agactgggataaaggtt

SEQ ID NO: 29935 - DNA, 17 bp, Arabidopsis thaliana
agactgggtaacaaact

SEQ ID NO: 29936 - DNA, 17 bp, Arabidopsis thaliana
agactggtatgatcaag

SEQ ID NO: 29937 - DNA, 17 bp, Arabidopsis thaliana
agactggtccattgcaa

SEQ ID NO: 29938 - DNA, 17 bp, Arabidopsis thaliana
agactggtctgcaaagc

SEQ ID NO: 29939 - DNA, 17 bp, Arabidopsis thaliana
agactggtgcaagtgtt

SEQ ID NO: 29940 - DNA, 17 bp, Arabidopsis thaliana
agactggttgcgaaagg

SEQ ID NO: 29941 - DNA, 17 bp, Arabidopsis thaliana
agactggtttgttttga

SEQ ID NO: 29942 - DNA, 17 bp, Arabidopsis thaliana
agactgtaaggcaccgg

SEQ ID NO: 29943 - DNA, 17 bp, Arabidopsis thaliana
agactgtagatctttag

SEQ ID NO: 29944 - DNA, 17 bp, Arabidopsis thaliana
agactgtaggctgagcc

SEQ ID NO: 29945 - DNA, 17 bp, Arabidopsis thaliana
agactgtatgtatgctt

SEQ ID NO: 29946 - DNA, 17 bp, Arabidopsis thaliana
agactgtcagttgggct

SEQ ID NO: 29947 - DNA, 17 bp, Arabidopsis thaliana
agactgtccgttttgat

SEQ ID NO: 29948 - DNA, 17 bp, Arabidopsis thaliana
agactgtgaaactcgaa

SEQ ID NO: 29949 - DNA, 17 bp, Arabidopsis thaliana
agactgtgaaactgcga

SEQ ID NO: 29950 - DNA, 17 bp, Arabidopsis thaliana
agactgtgaaactgcgg

SEQ ID NO: 29951 - DNA, 17 bp, Arabidopsis thaliana
agactgtgaagacgtga

SEQ ID NO: 29952 - DNA, 17 bp, Arabidopsis thaliana
agactgtgaatctgaag

SEQ ID NO: 29953 - DNA, 17 bp, Arabidopsis thaliana
agactgtgaattattgc

SEQ ID NO: 29954 - DNA, 17 bp, Arabidopsis thaliana
agactgtgaattattta

SEQ ID NO: 29955 - DNA, 17 bp, Arabidopsis thaliana
agactgtgaattgccaa

SEQ ID NO: 29956 - DNA, 17 bp, Arabidopsis thaliana
agactgtgaccatccag

SEQ ID NO: 29957 - DNA, 17 bp, Arabidopsis thaliana
agactgtgagcttccaa

SEQ ID NO: 29958 - DNA, 17 bp, Arabidopsis thaliana
agactgtgcagacctgg

SEQ ID NO: 29959 - DNA, 17 bp, Arabidopsis thaliana
agactgtgctaggctcg

SEQ ID NO: 29960 - DNA, 17 bp, Arabidopsis thaliana
agactgtggattgccaa

SEQ ID NO: 29961 - DNA, 17 bp, Arabidopsis thaliana
agactgtgggcttccaa

SEQ ID NO: 29962 - DNA, 17 bp, Arabidopsis thaliana
agactgtggttaggcta

SEQ ID NO: 29963 - DNA, 17 bp, Arabidopsis thaliana
agactgtgtgagagaga

SEQ ID NO: 29964 - DNA, 17 bp, Arabidopsis thaliana
agactgttagttaccct

SEQ ID NO: 29965 - DNA, 17 bp, Arabidopsis thaliana
agactgttcaaacctgg

SEQ ID NO: 29966 - DNA, 17 bp, Arabidopsis thaliana
agactgttcaagtattt

SEQ ID NO: 29967 - DNA, 17 bp, Arabidopsis thaliana
agactgttcacgtggga

SEQ ID NO: 29968 - DNA, 17 bp, Arabidopsis thaliana
agactgttcagacctag

SEQ ID NO: 29969 - DNA, 17 bp, Arabidopsis thaliana
agactgttcagacctgg

SEQ ID NO: 29970 - DNA, 17 bp, Arabidopsis thaliana
agactgttcagacttgg

SEQ ID NO: 29971 - DNA, 17 bp, Arabidopsis thaliana
agactgttcagatctgc

SEQ ID NO: 29972 - DNA, 17 bp, Arabidopsis thaliana
agactgttcagatctgg

SEQ ID NO: 29973 - DNA, 17 bp, Arabidopsis thaliana
agactgttcagatttgg

SEQ ID NO: 29974 - DNA, 17 bp, Arabidopsis thaliana
agactgttcaggtttgg

SEQ ID NO: 29975 - DNA, 17 bp, Arabidopsis thaliana
agactgttccatatcta

SEQ ID NO: 29976 - DNA, 17 bp, Arabidopsis thaliana
agactgttcccttgccg

SEQ ID NO: 29977 - DNA, 17 bp, Arabidopsis thaliana
agactgttcccttggcg

SEQ ID NO: 29978 - DNA, 17 bp, Arabidopsis thaliana
agactgttccttcctgc

SEQ ID NO: 29979 - DNA, 17 bp, Arabidopsis thaliana
agactgttcgaatgttt

SEQ ID NO: 29980 - DNA, 17 bp, Arabidopsis thaliana
agactgttcgcaatcag

SEQ ID NO: 29981 - DNA, 17 bp, Arabidopsis thaliana
agactgttctaatgtga

SEQ ID NO: 29982 - DNA, 17 bp, Arabidopsis thaliana
agactgttgaccacgcg

SEQ ID NO: 29983 - DNA, 17 bp, Arabidopsis thaliana
agactgttggagcatgc

SEQ ID NO: 29984 - DNA, 17 bp, Arabidopsis thaliana
agactgtttagatttgg

SEQ ID NO: 29985 - DNA, 17 bp, Arabidopsis thaliana
agactgtttcgggcatg

SEQ ID NO: 29986 - DNA, 17 bp, Arabidopsis thaliana
agactgttttcctctcg

SEQ ID NO: 29987 - DNA, 17 bp, Arabidopsis thaliana
agactgttttgcagatt

SEQ ID NO: 29988 - DNA, 17 bp, Arabidopsis thaliana
agacttaaaccgcaacc

SEQ ID NO: 29989 - DNA, 17 bp, Arabidopsis thaliana
agacttaaccgattggt

SEQ ID NO: 29990 - DNA, 17 bp, Arabidopsis thaliana
agacttaagaactgctc

SEQ ID NO: 29991 - DNA, 17 bp, Arabidopsis thaliana
agacttaagggcccaga

SEQ ID NO: 29992 - DNA, 17 bp, Arabidopsis thaliana
agacttaagtagtagtg

SEQ ID NO: 29993 - DNA, 17 bp, Arabidopsis thaliana
agacttaattgtgccaa

SEQ ID NO: 29994 - DNA, 17 bp, Arabidopsis thaliana
agacttacaaacataat

SEQ ID NO: 29995 - DNA, 17 bp, Arabidopsis thaliana
agacttacaagatcggg

SEQ ID NO: 29996 - DNA, 17 bp, Arabidopsis thaliana
agacttacaatatcggg

SEQ ID NO: 29997 - DNA, 17 bp, Arabidopsis thaliana
agacttacatcagccac

SEQ ID NO: 29998 - DNA, 17 bp, Arabidopsis thaliana
agacttacctcggctct

SEQ ID NO: 29999 - DNA, 17 bp, Arabidopsis thaliana
agacttacggtcatcca

SEQ ID NO: 30000 - DNA, 17 bp, Arabidopsis thaliana
agacttacggtcattca

SEQ ID NO: 30001 - DNA, 17 bp, Arabidopsis thaliana
agacttactgtagtgtc

SEQ ID NO: 30002 - DNA, 17 bp, Arabidopsis thaliana
agacttactgtctcgga

SEQ ID NO: 30003 - DNA, 17 bp, Arabidopsis thaliana
agacttagactgaagtt

SEQ ID NO: 30004 - DNA, 17 bp, Arabidopsis thaliana
agacttagagcatttcc

SEQ ID NO: 30005 - DNA, 17 bp, Arabidopsis thaliana
agacttagcaccacggt

SEQ ID NO: 30006 - DNA, 17 bp, Arabidopsis thaliana
agacttaggatcataat

SEQ ID NO: 30007 - DNA, 17 bp, Arabidopsis thaliana
agacttagggcagcagc

SEQ ID NO: 30008 - DNA, 17 bp, Arabidopsis thaliana
agacttagggcttgatt

SEQ ID NO: 30009 - DNA, 17 bp, Arabidopsis thaliana
agacttagtaacgttaa

SEQ ID NO: 30010 - DNA, 17 bp, Arabidopsis thaliana
agacttagtcaatcgat

SEQ ID NO: 30011 - DNA, 17 bp, Arabidopsis thaliana
agacttagtcaatcggt

SEQ ID NO: 30012 - DNA, 17 bp, Arabidopsis thaliana
agacttagtcgcatcct

SEQ ID NO: 30013 - DNA, 17 bp, Arabidopsis thaliana
agacttagtgaggtgta

SEQ ID NO: 30014 - DNA, 17 bp, Arabidopsis thaliana
agacttagtgatgtgta

SEQ ID NO: 30015 - DNA, 17 bp, Arabidopsis thaliana
agacttagtgatgttta

SEQ ID NO: 30016 - DNA, 17 bp, Arabidopsis thaliana
agacttagtggacttcg

SEQ ID NO: 30017 - DNA, 17 bp, Arabidopsis thaliana
agacttagttacaatgg

SEQ ID NO: 30018 - DNA, 17 bp, Arabidopsis thaliana
agacttagtttaaagaa

SEQ ID NO: 30019 - DNA, 17 bp, Arabidopsis thaliana
agacttagtttaaagac

SEQ ID NO: 30020 - DNA, 17 bp, Arabidopsis thaliana
agacttatatggacttt

SEQ ID NO: 30021 - DNA, 17 bp, Arabidopsis thaliana
agacttatccttctgga

SEQ ID NO: 30022 - DNA, 17 bp, Arabidopsis thaliana
agacttatctttagccc

SEQ ID NO: 30023 - DNA, 17 bp, Arabidopsis thaliana
agacttattcttcgatg

SEQ ID NO: 30024 - DNA, 17 bp, Arabidopsis thaliana
agacttattggcctaaa

SEQ ID NO: 30025 - DNA, 17 bp, Arabidopsis thaliana
agacttatttacaatgg

SEQ ID NO: 30026 - DNA, 17 bp, Arabidopsis thaliana
agacttatttacagtgg

SEQ ID NO: 30027 - DNA, 17 bp, Arabidopsis thaliana
agacttatttaccatgg

SEQ ID NO: 30028 - DNA, 17 bp, Arabidopsis thaliana
agacttatttacgatgg

SEQ ID NO: 30029 - DNA, 17 bp, Arabidopsis thaliana
agacttatttactgtgc

SEQ ID NO: 30030 - DNA, 17 bp, Arabidopsis thaliana
agacttatttgaccgga

SEQ ID NO: 30031 - DNA, 17 bp, Arabidopsis thaliana
agacttatttggagttg

SEQ ID NO: 30032 - DNA, 17 bp, Arabidopsis thaliana
agacttcaaatgcccct

SEQ ID NO: 30033 - DNA, 17 bp, Arabidopsis thaliana
agacttcacaatgccgc

SEQ ID NO: 30034 - DNA, 17 bp, Arabidopsis thaliana
agacttcagaacgatca

SEQ ID NO: 30035 - DNA, 17 bp, Arabidopsis thaliana
agacttcagttcgcagc

SEQ ID NO: 30036 - DNA, 17 bp, Arabidopsis thaliana
agacttcatatccgaaa

SEQ ID NO: 30037 - DNA, 17 bp, Arabidopsis thaliana
agacttcatatccgtaa

SEQ ID NO: 30038 - DNA, 17 bp, Arabidopsis thaliana
agacttcatcgaccggg

SEQ ID NO: 30039 - DNA, 17 bp, Arabidopsis thaliana
agacttcattcgactat

SEQ ID NO: 30040 - DNA, 17 bp, Arabidopsis thaliana
agacttcattctggttt

SEQ ID NO: 30041 - DNA, 17 bp, Arabidopsis thaliana
agacttcatttgcggac

SEQ ID NO: 30042 - DNA, 17 bp, Arabidopsis thaliana
agacttccactatttag

SEQ ID NO: 30043 - DNA, 17 bp, Arabidopsis thaliana
agacttcccaaacaaat

SEQ ID NO: 30044 - DNA, 17 bp, Arabidopsis thaliana
agacttcctcaacaccc

SEQ ID NO: 30045 - DNA, 17 bp, Arabidopsis thaliana
agacttcctcccaagtg

SEQ ID NO: 30046 - DNA, 17 bp, Arabidopsis thaliana
agacttcctccgagacc

SEQ ID NO: 30047 - DNA, 17 bp, Arabidopsis thaliana
agacttcctttgtgctg

SEQ ID NO: 30048 - DNA, 17 bp, Arabidopsis thaliana
agacttcgccaaggctc

SEQ ID NO: 30049 - DNA, 17 bp, Arabidopsis thaliana
agacttcgggtttggat

SEQ ID NO: 30050 - DNA, 17 bp, Arabidopsis thaliana
agacttcggtcaatcct

SEQ ID NO: 30051 - DNA, 17 bp, Arabidopsis thaliana
agacttcggttccggtg

SEQ ID NO: 30052 - DNA, 17 bp, Arabidopsis thaliana
agacttcgtcaaggctc

SEQ ID NO: 30053 - DNA, 17 bp, Arabidopsis thaliana
agacttcgtcacctgcg

SEQ ID NO: 30054 - DNA, 17 bp, Arabidopsis thaliana
agacttcgtctaaggtt

SEQ ID NO: 30055 - DNA, 17 bp, Arabidopsis thaliana
agacttcgtctcaggtt

SEQ ID NO: 30056 - DNA, 17 bp, Arabidopsis thaliana
agacttctactgatgta

SEQ ID NO: 30057 - DNA, 17 bp, Arabidopsis thaliana
agacttctagttcggtt

SEQ ID NO: 30058 - DNA, 17 bp, Arabidopsis thaliana
agacttctatttggatt

SEQ ID NO: 30059 - DNA, 17 bp, Arabidopsis thaliana
agacttctcccgacgag

SEQ ID NO: 30060 - DNA, 17 bp, Arabidopsis thaliana
agacttctcgcgtttcc

SEQ ID NO: 30061 - DNA, 17 bp, Arabidopsis thaliana
agacttctgaaaccttc

SEQ ID NO: 30062 - DNA, 17 bp, Arabidopsis thaliana
agacttctggctcgctt

SEQ ID NO: 30063 - DNA, 17 bp, Arabidopsis thaliana
agacttctggtccgatc

SEQ ID NO: 30064 - DNA, 17 bp, Arabidopsis thaliana
agacttcttatgagatt

SEQ ID NO: 30065 - DNA, 17 bp, Arabidopsis thaliana
agacttcttctgagatt

SEQ ID NO: 30066 - DNA, 17 bp, Arabidopsis thaliana
agacttcttcttttcgg

SEQ ID NO: 30067 - DNA, 17 bp, Arabidopsis thaliana
agacttctttcgtatat

SEQ ID NO: 30068 - DNA, 17 bp, Arabidopsis thaliana
agacttgaacaaaatgg

SEQ ID NO: 30069 - DNA, 17 bp, Arabidopsis thaliana
agacttgaagatgagtt

SEQ ID NO: 30070 - DNA, 17 bp, Arabidopsis thaliana
agacttgacaattcgtc

SEQ ID NO: 30071 - DNA, 17 bp, Arabidopsis thaliana
agacttgacacatggca

SEQ ID NO: 30072 - DNA, 17 bp, Arabidopsis thaliana
agacttgacacgtatca

SEQ ID NO: 30073 - DNA, 17 bp, Arabidopsis thaliana
agacttgacacgtctca

SEQ ID NO: 30074 - DNA, 17 bp, Arabidopsis thaliana
agacttgacacgtggca

SEQ ID NO: 30075 - DNA, 17 bp, Arabidopsis thaliana
agacttgacacgtgtca

SEQ ID NO: 30076 - DNA, 17 bp, Arabidopsis thaliana
agacttgacctcttttg

SEQ ID NO: 30077 - DNA, 17 bp, Arabidopsis thaliana
agacttgacttgaacct

SEQ ID NO: 30078 - DNA, 17 bp, Arabidopsis thaliana
agacttgagcccagtcg

SEQ ID NO: 30079 - DNA, 17 bp, Arabidopsis thaliana
agacttgaggcggtttg

SEQ ID NO: 30080 - DNA, 17 bp, Arabidopsis thaliana
agacttgaggcggtttt

SEQ ID NO: 30081 - DNA, 17 bp, Arabidopsis thaliana
agacttgagttcgatcc

SEQ ID NO: 30082 - DNA, 17 bp, Arabidopsis thaliana
agacttgatcttgtggg

SEQ ID NO: 30083 - DNA, 17 bp, Arabidopsis thaliana
agacttgatgaaccatt

SEQ ID NO: 30084 - DNA, 17 bp, Arabidopsis thaliana
agacttgatgacgaggt

SEQ ID NO: 30085 - DNA, 17 bp, Arabidopsis thaliana
agacttgatgccaaatt

SEQ ID NO: 30086 - DNA, 17 bp, Arabidopsis thaliana
agacttgatggggtatc

SEQ ID NO: 30087 - DNA, 17 bp, Arabidopsis thaliana
agacttgattcatcaca

SEQ ID NO: 30088 - DNA, 17 bp, Arabidopsis thaliana
agacttgcaaatctctc

SEQ ID NO: 30089 - DNA, 17 bp, Arabidopsis thaliana
agacttgcaaccattga

SEQ ID NO: 30090 - DNA, 17 bp, Arabidopsis thaliana
agacttgcagcaactca

SEQ ID NO: 30091 - DNA, 17 bp, Arabidopsis thaliana
agacttgcagcaactgt

SEQ ID NO: 30092 - DNA, 17 bp, Arabidopsis thaliana
agacttgccacgtgtca

SEQ ID NO: 30093 - DNA, 17 bp, Arabidopsis thaliana
agacttgccagacattt

SEQ ID NO: 30094 - DNA, 17 bp, Arabidopsis thaliana
agacttgcccatatgga

SEQ ID NO: 30095 - DNA, 17 bp, Arabidopsis thaliana
agacttgccctccaatg

SEQ ID NO: 30096 - DNA, 17 bp, Arabidopsis thaliana
agacttgccgaagacat

SEQ ID NO: 30097 - DNA, 17 bp, Arabidopsis thaliana
agacttgcgagatcaaa

SEQ ID NO: 30098 - DNA, 17 bp, Arabidopsis thaliana
agacttgcgagcacttc

SEQ ID NO: 30099 - DNA, 17 bp, Arabidopsis thaliana
agacttgcgagcacttt

SEQ ID NO: 30100 - DNA, 17 bp, Arabidopsis thaliana
agacttgcgctaactac

SEQ ID NO: 30101 - DNA, 17 bp, Arabidopsis thaliana
agacttgctagtaggcc

SEQ ID NO: 30102 - DNA, 17 bp, Arabidopsis thaliana
agacttgctcattgcag

SEQ ID NO: 30103 - DNA, 17 bp, Arabidopsis thaliana
agacttgctctgatgtt

SEQ ID NO: 30104 - DNA, 17 bp, Arabidopsis thaliana
agacttggacaggagaa

SEQ ID NO: 30105 - DNA, 17 bp, Arabidopsis thaliana
agacttggacatcctgg

SEQ ID NO: 30106 - DNA, 17 bp, Arabidopsis thaliana
agacttggagttattga

SEQ ID NO: 30107 - DNA, 17 bp, Arabidopsis thaliana
agacttggcacgtttca

SEQ ID NO: 30108 - DNA, 17 bp, Arabidopsis thaliana
agacttggcatgtttca

SEQ ID NO: 30109 - DNA, 17 bp, Arabidopsis thaliana
agacttggccatgtcat

SEQ ID NO: 30110 - DNA, 17 bp, Arabidopsis thaliana
agacttggccgtgatag

SEQ ID NO: 30111 - DNA, 17 bp, Arabidopsis thaliana
agacttggccgtgattg

SEQ ID NO: 30112 - DNA, 17 bp, Arabidopsis thaliana
agacttggtcctgaggg

SEQ ID NO: 30113 - DNA, 17 bp, Arabidopsis thaliana
agacttggtcctgcgag

SEQ ID NO: 30114 - DNA, 17 bp, Arabidopsis thaliana
agacttggtcctgcggc

SEQ ID NO: 30115 - DNA, 17 bp, Arabidopsis thaliana
agacttggtcgggctag

SEQ ID NO: 30116 - DNA, 17 bp, Arabidopsis thaliana
agacttggtgaagatgg

SEQ ID NO: 30117 - DNA, 17 bp, Arabidopsis thaliana
agacttggtgcaggtcg

SEQ ID NO: 30118 - DNA, 17 bp, Arabidopsis thaliana
agacttggtggatgttg

SEQ ID NO: 30119 - DNA, 17 bp, Arabidopsis thaliana
agacttggttccatcgg

SEQ ID NO: 30120 - DNA, 17 bp, Arabidopsis thaliana
agacttggttgcagcgc

SEQ ID NO: 30121 - DNA, 17 bp, Arabidopsis thaliana
agacttggttggacacg

SEQ ID NO: 30122 - DNA, 17 bp, Arabidopsis thaliana
agacttggttggaccat

SEQ ID NO: 30123 - DNA, 17 bp, Arabidopsis thaliana
agacttgtaatccgttc

SEQ ID NO: 30124 - DNA, 17 bp, Arabidopsis thaliana
agacttgtcaagcatta

SEQ ID NO: 30125 - DNA, 17 bp, Arabidopsis thaliana
agacttgtcatgatagc

SEQ ID NO: 30126 - DNA, 17 bp, Arabidopsis thaliana
agacttgtcatgtgtca

SEQ ID NO: 30127 - DNA, 17 bp, Arabidopsis thaliana
agacttgtgcaaaatta

SEQ ID NO: 30128 - DNA, 17 bp, Arabidopsis thaliana
agacttgtggaatccac

SEQ ID NO: 30129 - DNA, 17 bp, Arabidopsis thaliana
agacttgtggatcacca

SEQ ID NO: 30130 - DNA, 17 bp, Arabidopsis thaliana
agacttgtgtaggacgg

SEQ ID NO: 30131 - DNA, 17 bp, Arabidopsis thaliana
agacttgtgttccacgg

SEQ ID NO: 30132 - DNA, 17 bp, Arabidopsis thaliana
agacttgttgatggatc

SEQ ID NO: 30133 - DNA, 17 bp, Arabidopsis thaliana
agacttgtttaactgcg

SEQ ID NO: 30134 - DNA, 17 bp, Arabidopsis thaliana
agacttgttttgtaccc

SEQ ID NO: 30135 - DNA, 17 bp, Arabidopsis thaliana
agactttaaagatcgag

SEQ ID NO: 30136 - DNA, 17 bp, Arabidopsis thaliana
agactttaaagatcggg

SEQ ID NO: 30137 - DNA, 17 bp, Arabidopsis thaliana
agactttaacgaaatgg

SEQ ID NO: 30138 - DNA, 17 bp, Arabidopsis thaliana
agactttacacgtatca

SEQ ID NO: 30139 - DNA, 17 bp, Arabidopsis thaliana
agactttactgtgttat

SEQ ID NO: 30140 - DNA, 17 bp, Arabidopsis thaliana
agactttagaggcctgt

SEQ ID NO: 30141 - DNA, 17 bp, Arabidopsis thaliana
agactttagatcccgtc

SEQ ID NO: 30142 - DNA, 17 bp, Arabidopsis thaliana
agactttagattacgca

SEQ ID NO: 30143 - DNA, 17 bp, Arabidopsis thaliana
agactttagcatagctg

SEQ ID NO: 30144 - DNA, 17 bp, Arabidopsis thaliana
agactttagctatggag

SEQ ID NO: 30145 - DNA, 17 bp, Arabidopsis thaliana
agactttagctttgctt

SEQ ID NO: 30146 - DNA, 17 bp, Arabidopsis thaliana
agactttaggttttgag

SEQ ID NO: 30147 - DNA, 17 bp, Arabidopsis thaliana
agactttatgatccatt

SEQ ID NO: 30148 - DNA, 17 bp, Arabidopsis thaliana
agactttattcagctgg

SEQ ID NO: 30149 - DNA, 17 bp, Arabidopsis thaliana
agactttatttgtgtga

SEQ ID NO: 30150 - DNA, 17 bp, Arabidopsis thaliana
agactttcacatgtttt

SEQ ID NO: 30151 - DNA, 17 bp, Arabidopsis thaliana
agactttcaccggcgtg

SEQ ID NO: 30152 - DNA, 17 bp, Arabidopsis thaliana
agactttcattgggctc

SEQ ID NO: 30153 - DNA, 17 bp, Arabidopsis thaliana
agactttcccgggcgaa

SEQ ID NO: 30154 - DNA, 17 bp, Arabidopsis thaliana
agactttcgccaaatac

SEQ ID NO: 30155 - DNA, 17 bp, Arabidopsis thaliana
agactttcgctgtagga

SEQ ID NO: 30156 - DNA, 17 bp, Arabidopsis thaliana
agactttcgggcttgaa

SEQ ID NO: 30157 - DNA, 17 bp, Arabidopsis thaliana
agactttctccatccaa

SEQ ID NO: 30158 - DNA, 17 bp, Arabidopsis thaliana
agactttctcgctatct

SEQ ID NO: 30159 - DNA, 17 bp, Arabidopsis thaliana
agactttcttgttgtcc

SEQ ID NO: 30160 - DNA, 17 bp, Arabidopsis thaliana
agactttgaaccattgc

SEQ ID NO: 30161 - DNA, 17 bp, Arabidopsis thaliana
agactttgaatggttat

SEQ ID NO: 30162 - DNA, 17 bp, Arabidopsis thaliana
agactttgagtctaagg

SEQ ID NO: 30163 - DNA, 17 bp, Arabidopsis thaliana
agactttgagtgttgag

SEQ ID NO: 30164 - DNA, 17 bp, Arabidopsis thaliana
agactttgatctcgtca

SEQ ID NO: 30165 - DNA, 17 bp, Arabidopsis thaliana
agactttgatgagttta

SEQ ID NO: 30166 - DNA, 17 bp, Arabidopsis thaliana
agactttgccagggttg

SEQ ID NO: 30167 - DNA, 17 bp, Arabidopsis thaliana
agactttgccattcgcc

SEQ ID NO: 30168 - DNA, 17 bp, Arabidopsis thaliana
agactttgccattcgtc

SEQ ID NO: 30169 - DNA, 17 bp, Arabidopsis thaliana
agactttgctcgggagt

SEQ ID NO: 30170 - DNA, 17 bp, Arabidopsis thaliana
agactttgctgccatct

SEQ ID NO: 30171 - DNA, 17 bp, Arabidopsis thaliana
agactttggacccgtgg

SEQ ID NO: 30172 - DNA, 17 bp, Arabidopsis thaliana
agactttggcagtgcaa

SEQ ID NO: 30173 - DNA, 17 bp, Arabidopsis thaliana
agactttggctagtcac

SEQ ID NO: 30174 - DNA, 17 bp, Arabidopsis thaliana
agactttggctgttaaa

SEQ ID NO: 30175 - DNA, 17 bp, Arabidopsis thaliana
agactttggtccaattg

SEQ ID NO: 30176 - DNA, 17 bp, Arabidopsis thaliana
agactttgtattggtag

SEQ ID NO: 30177 - DNA, 17 bp, Arabidopsis thaliana
agactttgtcatgattg

SEQ ID NO: 30178 - DNA, 17 bp, Arabidopsis thaliana
agactttgtccaattgc

SEQ ID NO: 30179 - DNA, 17 bp, Arabidopsis thaliana
agactttgtcgctaaga

SEQ ID NO: 30180 - DNA, 17 bp, Arabidopsis thaliana
agactttgtctcccttg

SEQ ID NO: 30181 - DNA, 17 bp, Arabidopsis thaliana
agactttgtggttgcag

SEQ ID NO: 30182 - DNA, 17 bp, Arabidopsis thaliana
agactttgttgcgtctt

SEQ ID NO: 30183 - DNA, 17 bp, Arabidopsis thaliana
agacttttacctagttg

SEQ ID NO: 30184 - DNA, 17 bp, Arabidopsis thaliana
agacttttagccagtgg

SEQ ID NO: 30185 - DNA, 17 bp, Arabidopsis thaliana
agacttttagcctagtg

SEQ ID NO: 30186 - DNA, 17 bp, Arabidopsis thaliana
agacttttaggatcagg

SEQ ID NO: 30187 - DNA, 17 bp, Arabidopsis thaliana
agacttttaggtggatt

SEQ ID NO: 30188 - DNA, 17 bp, Arabidopsis thaliana
agacttttagttgtctg

SEQ ID NO: 30189 - DNA, 17 bp, Arabidopsis thaliana
agacttttatggccgtc

SEQ ID NO: 30190 - DNA, 17 bp, Arabidopsis thaliana
agacttttgatctgtgg

SEQ ID NO: 30191 - DNA, 17 bp, Arabidopsis thaliana
agacttttggagaattt

SEQ ID NO: 30192 - DNA, 17 bp, Arabidopsis thaliana
agacttttggagcgatc

SEQ ID NO: 30193 - DNA, 17 bp, Arabidopsis thaliana
agacttttggggtgcta

SEQ ID NO: 30194 - DNA, 17 bp, Arabidopsis thaliana
agacttttgttgctatt

SEQ ID NO: 30195 - DNA, 17 bp, Arabidopsis thaliana
agactttttacccgtct

SEQ ID NO: 30196 - DNA, 17 bp, Arabidopsis thaliana
agactttttatcgccgc

SEQ ID NO: 30197 - DNA, 17 bp, Arabidopsis thaliana
agactttttcattgggc

SEQ ID NO: 30198 - DNA, 17 bp, Arabidopsis thaliana
agactttttcctgggtg

SEQ ID NO: 30199 - DNA, 17 bp, Arabidopsis thaliana
agactttttcgggcatt

SEQ ID NO: 30200 - DNA, 17 bp, Arabidopsis thaliana
agactttttggtgtacc

SEQ ID NO: 30201 - DNA, 17 bp, Arabidopsis thaliana
agactttttggttgaca

SEQ ID NO: 30202 - DNA, 17 bp, Arabidopsis thaliana
agactttttgtaatccg

SEQ ID NO: 30203 - DNA, 17 bp, Arabidopsis thaliana
agacttttttaactgcg

SEQ ID NO: 30204 - DNA, 17 bp, Arabidopsis thaliana
agacttttttgcttgac

SEQ ID NO: 30205 - DNA, 17 bp, Arabidopsis thaliana
agacttttttggtggat

SEQ ID NO: 30206 - DNA, 17 bp, Arabidopsis thaliana
agacttttttggtggct

SEQ ID NO: 30207 - DNA, 17 bp, Arabidopsis thaliana
agacttttttggttgac

SEQ ID NO: 30208 - DNA, 17 bp, Arabidopsis thaliana
agagaaaaagcctctga

SEQ ID NO: 30209 - DNA, 17 bp, Arabidopsis thaliana
agagaaaaccacagttg

SEQ ID NO: 30210 - DNA, 17 bp, Arabidopsis thaliana
agagaaaaccgtacaag

SEQ ID NO: 30211 - DNA, 17 bp, Arabidopsis thaliana
agagaaaagaggaattg

SEQ ID NO: 30212 - DNA, 17 bp, Arabidopsis thaliana
agagaaaaggttgtgcc

SEQ ID NO: 30213 - DNA, 17 bp, Arabidopsis thaliana
agagaaaatccgatttg

SEQ ID NO: 30214 - DNA, 17 bp, Arabidopsis thaliana
agagaaaatgatgtgga

SEQ ID NO: 30215 - DNA, 17 bp, Arabidopsis thaliana
agagaaaatttatcggt

SEQ ID NO: 30216 - DNA, 17 bp, Arabidopsis thaliana
agagaaacagttggcgt

SEQ ID NO: 30217 - DNA, 17 bp, Arabidopsis thaliana
agagaaaccgccatgga

SEQ ID NO: 30218 - DNA, 17 bp, Arabidopsis thaliana
agagaaactcagctctc

SEQ ID NO: 30219 - DNA, 17 bp, Arabidopsis thaliana
agagaaactgctgcgag

SEQ ID NO: 30220 - DNA, 17 bp, Arabidopsis thaliana
agagaaactttggcagc

SEQ ID NO: 30221 - DNA, 17 bp, Arabidopsis thaliana
agagaaagaaggaggaa

SEQ ID NO: 30222 - DNA, 17 bp, Arabidopsis thaliana
agagaaagacgaaatgc

SEQ ID NO: 30223 - DNA, 17 bp, Arabidopsis thaliana
agagaaagactttgttc

SEQ ID NO: 30224 - DNA, 17 bp, Arabidopsis thaliana
agagaaagaggatagtt

SEQ ID NO: 30225 - DNA, 17 bp, Arabidopsis thaliana
agagaaagagggttcta

SEQ ID NO: 30226 - DNA, 17 bp, Arabidopsis thaliana
agagaaagatttccagt

SEQ ID NO: 30227 - DNA, 17 bp, Arabidopsis thaliana
agagaaagcactttggc

SEQ ID NO: 30228 - DNA, 17 bp, Arabidopsis thaliana
agagaaaggggcctgtt

SEQ ID NO: 30229 - DNA, 17 bp, Arabidopsis thaliana
agagaaagtcccattat

SEQ ID NO: 30230 - DNA, 17 bp, Arabidopsis thaliana
agagaaagtgtctactc

SEQ ID NO: 30231 - DNA, 17 bp, Arabidopsis thaliana
agagaaataggagttta

SEQ ID NO: 30232 - DNA, 17 bp, Arabidopsis thaliana
agagaaatgcccgcggg

SEQ ID NO: 30233 - DNA, 17 bp, Arabidopsis thaliana
agagaaattacgggatt

SEQ ID NO: 30234 - DNA, 17 bp, Arabidopsis thaliana
agagaaattcccacaaa

SEQ ID NO: 30235 - DNA, 17 bp, Arabidopsis thaliana
agagaaattctcaaagc

SEQ ID NO: 30236 - DNA, 17 bp, Arabidopsis thaliana
agagaaattgtcggaaa

SEQ ID NO: 30237 - DNA, 17 bp, Arabidopsis thaliana
agagaaattttgggtgg

SEQ ID NO: 30238 - DNA, 17 bp, Arabidopsis thaliana
agagaacagagaggttt

SEQ ID NO: 30239 - DNA, 17 bp, Arabidopsis thaliana
agagaaccctagatcaa

SEQ ID NO: 30240 - DNA, 17 bp, Arabidopsis thaliana
agagaaccgtcggcttc

SEQ ID NO: 30241 - DNA, 17 bp, Arabidopsis thaliana
agagaacctgtgattga

SEQ ID NO: 30242 - DNA, 17 bp, Arabidopsis thaliana
agagaacctgtgattgt

SEQ ID NO: 30243 - DNA, 17 bp, Arabidopsis thaliana
agagaacgttctgttaa

SEQ ID NO: 30244 - DNA, 17 bp, Arabidopsis thaliana
agagaactaatttaggt

SEQ ID NO: 30245 - DNA, 17 bp, Arabidopsis thaliana
agagaactactatggtc

SEQ ID NO: 30246 - DNA, 17 bp, Arabidopsis thaliana
agagaactccatagtta

SEQ ID NO: 30247 - DNA, 17 bp, Arabidopsis thaliana
agagaactccccactga

SEQ ID NO: 30248 - DNA, 17 bp, Arabidopsis thaliana
agagaactccccactgg

SEQ ID NO: 30249 - DNA, 17 bp, Arabidopsis thaliana
agagaactctgaaattt

SEQ ID NO: 30250 - DNA, 17 bp, Arabidopsis thaliana
agagaactgatcgccgg

SEQ ID NO: 30251 - DNA, 17 bp, Arabidopsis thaliana
agagaactgttattttt

SEQ ID NO: 30252 - DNA, 17 bp, Arabidopsis thaliana
agagaacttcatggcta

SEQ ID NO: 30253 - DNA, 17 bp, Arabidopsis thaliana
agagaacttctcttaaa

SEQ ID NO: 30254 - DNA, 17 bp, Arabidopsis thaliana
agagaacttggatccgg

SEQ ID NO: 30255 - DNA, 17 bp, Arabidopsis thaliana
agagaactttgtcaact

SEQ ID NO: 30256 - DNA, 17 bp, Arabidopsis thaliana
agagaagaagcgtgttg

SEQ ID NO: 30257 - DNA, 17 bp, Arabidopsis thaliana
agagaagaatgtgtcgt

SEQ ID NO: 30258 - DNA, 17 bp, Arabidopsis thaliana
agagaagacgatttttg

SEQ ID NO: 30259 - DNA, 17 bp, Arabidopsis thaliana
agagaagactcagaggg

SEQ ID NO: 30260 - DNA, 17 bp, Arabidopsis thaliana
agagaagagatccctcc

SEQ ID NO: 30261 - DNA, 17 bp, Arabidopsis thaliana
agagaagagcgtcccgt

SEQ ID NO: 30262 - DNA, 17 bp, Arabidopsis thaliana
agagaagatgatgtgga

SEQ ID NO: 30263 - DNA, 17 bp, Arabidopsis thaliana
agagaagatgatgttga

SEQ ID NO: 30264 - DNA, 17 bp, Arabidopsis thaliana
agagaagattgtattga

SEQ ID NO: 30265 - DNA, 17 bp, Arabidopsis thaliana
agagaagattgtattgg

SEQ ID NO: 30266 - DNA, 17 bp, Arabidopsis thaliana
agagaagccattgacga

SEQ ID NO: 30267 - DNA, 17 bp, Arabidopsis thaliana
agagaagcctatctcag

SEQ ID NO: 30268 - DNA, 17 bp, Arabidopsis thaliana
agagaagctctggttgc

SEQ ID NO: 30269 - DNA, 17 bp, Arabidopsis thaliana
agagaaggactgcatgc

SEQ ID NO: 30270 - DNA, 17 bp, Arabidopsis thaliana
agagaaggcactttggc

SEQ ID NO: 30271 - DNA, 17 bp, Arabidopsis thaliana
agagaaggcccattcga

SEQ ID NO: 30272 - DNA, 17 bp, Arabidopsis thaliana
agagaaggctaaggacc

SEQ ID NO: 30273 - DNA, 17 bp, Arabidopsis thaliana
agagaagtatggtgcga

SEQ ID NO: 30274 - DNA, 17 bp, Arabidopsis thaliana
agagaagtatggtgcgg

SEQ ID NO: 30275 - DNA, 17 bp, Arabidopsis thaliana
agagaagtcctcatctt

SEQ ID NO: 30276 - DNA, 17 bp, Arabidopsis thaliana
agagaagtctgctcgtc

SEQ ID NO: 30277 - DNA, 17 bp, Arabidopsis thaliana
agagaagtttgtgaatt

SEQ ID NO: 30278 - DNA, 17 bp, Arabidopsis thaliana
agagaataatagcgagg

SEQ ID NO: 30279 - DNA, 17 bp, Arabidopsis thaliana
agagaatagggctgggc

SEQ ID NO: 30280 - DNA, 17 bp, Arabidopsis thaliana
agagaatatgaccaagt

SEQ ID NO: 30281 - DNA, 17 bp, Arabidopsis thaliana
agagaatcaagggcaat

SEQ ID NO: 30282 - DNA, 17 bp, Arabidopsis thaliana
agagaatcgtttctctg

SEQ ID NO: 30283 - DNA, 17 bp, Arabidopsis thaliana
agagaatcgtttctgcc

SEQ ID NO: 30284 - DNA, 17 bp, Arabidopsis thaliana
agagaatctatgggtcc

SEQ ID NO: 30285 - DNA, 17 bp, Arabidopsis thaliana
agagaatctgtacaggt

SEQ ID NO: 30286 - DNA, 17 bp, Arabidopsis thaliana
agagaatctgtgcaggt

SEQ ID NO: 30287 - DNA, 17 bp, Arabidopsis thaliana
agagaatcttcaagttg

SEQ ID NO: 30288 - DNA, 17 bp, Arabidopsis thaliana
agagaatgagagttgag

SEQ ID NO: 30289 - DNA, 17 bp, Arabidopsis thaliana
agagaatgccaaactgc

SEQ ID NO: 30290 - DNA, 17 bp, Arabidopsis thaliana
agagaatgcgagggacc

SEQ ID NO: 30291 - DNA, 17 bp, Arabidopsis thaliana
agagaatggggctgggc

SEQ ID NO: 30292 - DNA, 17 bp, Arabidopsis thaliana
agagaatgtttttccat

SEQ ID NO: 30293 - DNA, 17 bp, Arabidopsis thaliana
agagaattaccggattc

SEQ ID NO: 30294 - DNA, 17 bp, Arabidopsis thaliana
agagaattacgggattc

SEQ ID NO: 30295 - DNA, 17 bp, Arabidopsis thaliana
agagaattcagacctcg

SEQ ID NO: 30296 - DNA, 17 bp, Arabidopsis thaliana
agagaattgctgtctag

SEQ ID NO: 30297 - DNA, 17 bp, Arabidopsis thaliana
agagaattggttagggt

SEQ ID NO: 30298 - DNA, 17 bp, Arabidopsis thaliana
agagaatttgtgcgctt

SEQ ID NO: 30299 - DNA, 17 bp, Arabidopsis thaliana
agagacaaagtcacgat

SEQ ID NO: 30300 - DNA, 17 bp, Arabidopsis thaliana
agagacaaagtgggctc

SEQ ID NO: 30301 - DNA, 17 bp, Arabidopsis thaliana
agagacaaagtgggctg

SEQ ID NO: 30302 - DNA, 17 bp, Arabidopsis thaliana
agagacaacaacttggt

SEQ ID NO: 30303 - DNA, 17 bp, Arabidopsis thaliana
agagacaaccgagattt

SEQ ID NO: 30304 - DNA, 17 bp, Arabidopsis thaliana
agagacaaccgtggtta

SEQ ID NO: 30305 - DNA, 17 bp, Arabidopsis thaliana
agagacaatctgcaaat

SEQ ID NO: 30306 - DNA, 17 bp, Arabidopsis thaliana
agagacaatctgtgttc

SEQ ID NO: 30307 - DNA, 17 bp, Arabidopsis thaliana
agagacaatgacaaccg

SEQ ID NO: 30308 - DNA, 17 bp, Arabidopsis thaliana
agagacaatttgcctag

SEQ ID NO: 30309 - DNA, 17 bp, Arabidopsis thaliana
agagacacattctattg

SEQ ID NO: 30310 - DNA, 17 bp, Arabidopsis thaliana
agagacacccattggac

SEQ ID NO: 30311 - DNA, 17 bp, Arabidopsis thaliana
agagacaccgcttggag

SEQ ID NO: 30312 - DNA, 17 bp, Arabidopsis thaliana
agagacactcactcagc

SEQ ID NO: 30313 - DNA, 17 bp, Arabidopsis thaliana
agagacactctcagctg

SEQ ID NO: 30314 - DNA, 17 bp, Arabidopsis thaliana
agagacactgtggcttt

SEQ ID NO: 30315 - DNA, 17 bp, Arabidopsis thaliana
agagacagacattcatc

SEQ ID NO: 30316 - DNA, 17 bp, Arabidopsis thaliana
agagacagacttgtcca

SEQ ID NO: 30317 - DNA, 17 bp, Arabidopsis thaliana
agagacagagagctttg

SEQ ID NO: 30318 - DNA, 17 bp, Arabidopsis thaliana
agagacagaggcggagg

SEQ ID NO: 30319 - DNA, 17 bp, Arabidopsis thaliana
agagacagcaggggttc

SEQ ID NO: 30320 - DNA, 17 bp, Arabidopsis thaliana
agagacagccaggaggt

SEQ ID NO: 30321 - DNA, 17 bp, Arabidopsis thaliana
agagacaggatccacac

SEQ ID NO: 30322 - DNA, 17 bp, Arabidopsis thaliana
agagacaggtggcatct

SEQ ID NO: 30323 - DNA, 17 bp, Arabidopsis thaliana
agagacagtattcccga

SEQ ID NO: 30324 - DNA, 17 bp, Arabidopsis thaliana
agagacagttgcaggag

SEQ ID NO: 30325 - DNA, 17 bp, Arabidopsis thaliana
agagacatatggaccga

SEQ ID NO: 30326 - DNA, 17 bp, Arabidopsis thaliana
agagacatgatccactc

SEQ ID NO: 30327 - DNA, 17 bp, Arabidopsis thaliana
agagacattaccttgtt

SEQ ID NO: 30328 - DNA, 17 bp, Arabidopsis thaliana
agagacattgtctaccg

SEQ ID NO: 30329 - DNA, 17 bp, Arabidopsis thaliana
agagacatttggtgcaa

SEQ ID NO: 30330 - DNA, 17 bp, Arabidopsis thaliana
agagaccaaaaattgcg

SEQ ID NO: 30331 - DNA, 17 bp, Arabidopsis thaliana
agagaccaacgcccttc

SEQ ID NO: 30332 - DNA, 17 bp, Arabidopsis thaliana
agagaccaagtgtcgtt

SEQ ID NO: 30333 - DNA, 17 bp, Arabidopsis thaliana
agagaccaccgttgcag

SEQ ID NO: 30334 - DNA, 17 bp, Arabidopsis thaliana
agagaccactcgacccc

SEQ ID NO: 30335 - DNA, 17 bp, Arabidopsis thaliana
agagaccaggcttcatt

SEQ ID NO: 30336 - DNA, 17 bp, Arabidopsis thaliana
agagaccatcgttgcag

SEQ ID NO: 30337 - DNA, 17 bp, Arabidopsis thaliana
agagaccatgtccatat

SEQ ID NO: 30338 - DNA, 17 bp, Arabidopsis thaliana
agagaccattgggtttg

SEQ ID NO: 30339 - DNA, 17 bp, Arabidopsis thaliana
agagaccattttacctg

SEQ ID NO: 30340 - DNA, 17 bp, Arabidopsis thaliana
agagacccgggttcggg

SEQ ID NO: 30341 - DNA, 17 bp, Arabidopsis thaliana
agagacccgggttcgtg

SEQ ID NO: 30342 - DNA, 17 bp, Arabidopsis thaliana
agagaccctcgtcatta

SEQ ID NO: 30343 - DNA, 17 bp, Arabidopsis thaliana
agagacccttcaatggc

SEQ ID NO: 30344 - DNA, 17 bp, Arabidopsis thaliana
agagaccgagtttggcc

SEQ ID NO: 30345 - DNA, 17 bp, Arabidopsis thaliana
agagaccgccgccgaga

SEQ ID NO: 30346 - DNA, 17 bp, Arabidopsis thaliana
agagaccgtggtctcca

SEQ ID NO: 30347 - DNA, 17 bp, Arabidopsis thaliana
agagaccgttggcgaga

SEQ ID NO: 30348 - DNA, 17 bp, Arabidopsis thaliana
agagacctccaccctca

SEQ ID NO: 30349 - DNA, 17 bp, Arabidopsis thaliana
agagacctttggtttgt

SEQ ID NO: 30350 - DNA, 17 bp, Arabidopsis thaliana
agagacgacgacgagtg

SEQ ID NO: 30351 - DNA, 17 bp, Arabidopsis thaliana
agagacgactgtgatct

SEQ ID NO: 30352 - DNA, 17 bp, Arabidopsis thaliana
agagacgatgacgtggt

SEQ ID NO: 30353 - DNA, 17 bp, Arabidopsis thaliana
agagacgcaaaactact

SEQ ID NO: 30354 - DNA, 17 bp, Arabidopsis thaliana
agagacgcaggagtgaa

SEQ ID NO: 30355 - DNA, 17 bp, Arabidopsis thaliana
agagacgcggcggtttt

SEQ ID NO: 30356 - DNA, 17 bp, Arabidopsis thaliana
agagacgctgcgacaga

SEQ ID NO: 30357 - DNA, 17 bp, Arabidopsis thaliana
agagacggagatggaga

SEQ ID NO: 30358 - DNA, 17 bp, Arabidopsis thaliana
agagacggagtaatggt

SEQ ID NO: 30359 - DNA, 17 bp, Arabidopsis thaliana
agagacgggtcatcaaa

SEQ ID NO: 30360 - DNA, 17 bp, Arabidopsis thaliana
agagacgggtttttgaa

SEQ ID NO: 30361 - DNA, 17 bp, Arabidopsis thaliana
agagacggtgaagaaga

SEQ ID NO: 30362 - DNA, 17 bp, Arabidopsis thaliana
agagacgtgcggttcaa

SEQ ID NO: 30363 - DNA, 17 bp, Arabidopsis thaliana
agagacgtggaacgatt

SEQ ID NO: 30364 - DNA, 17 bp, Arabidopsis thaliana
agagacgttcgctaaat

SEQ ID NO: 30365 - DNA, 17 bp, Arabidopsis thaliana
agagacgtttcatctcg

SEQ ID NO: 30366 - DNA, 17 bp, Arabidopsis thaliana
agagacgtttctatccg

SEQ ID NO: 30367 - DNA, 17 bp, Arabidopsis thaliana
agagacgtttctggcca

SEQ ID NO: 30368 - DNA, 17 bp, Arabidopsis thaliana
agagacgtttttggcga

SEQ ID NO: 30369 - DNA, 17 bp, Arabidopsis thaliana
agagactaaagcaagtg

SEQ ID NO: 30370 - DNA, 17 bp, Arabidopsis thaliana
agagactaagtttccaa

SEQ ID NO: 30371 - DNA, 17 bp, Arabidopsis thaliana
agagactacaggctaca

SEQ ID NO: 30372 - DNA, 17 bp, Arabidopsis thaliana
agagactacatgtttga

SEQ ID NO: 30373 - DNA, 17 bp, Arabidopsis thaliana
agagactaccaatggag

SEQ ID NO: 30374 - DNA, 17 bp, Arabidopsis thaliana
agagactaccttgtgga

SEQ ID NO: 30375 - DNA, 17 bp, Arabidopsis thaliana
agagactactgatggag

SEQ ID NO: 30376 - DNA, 17 bp, Arabidopsis thaliana
agagactagattttatc

SEQ ID NO: 30377 - DNA, 17 bp, Arabidopsis thaliana
agagactaggatgggtg

SEQ ID NO: 30378 - DNA, 17 bp, Arabidopsis thaliana
agagactcaagatctgg

SEQ ID NO: 30379 - DNA, 17 bp, Arabidopsis thaliana
agagactcaaggccggg

SEQ ID NO: 30380 - DNA, 17 bp, Arabidopsis thaliana
agagactcaggtctcca

SEQ ID NO: 30381 - DNA, 17 bp, Arabidopsis thaliana
agagactcgatcatcca

SEQ ID NO: 30382 - DNA, 17 bp, Arabidopsis thaliana
agagactcggtttgacc

SEQ ID NO: 30383 - DNA, 17 bp, Arabidopsis thaliana
agagactctatttgtgc

SEQ ID NO: 30384 - DNA, 17 bp, Arabidopsis thaliana
agagactctcgagaggt

SEQ ID NO: 30385 - DNA, 17 bp, Arabidopsis thaliana
agagactctcggcaacg

SEQ ID NO: 30386 - DNA, 17 bp, Arabidopsis thaliana
agagactctctttcatc

SEQ ID NO: 30387 - DNA, 17 bp, Arabidopsis thaliana
agagactctctttcatt

SEQ ID NO: 30388 - DNA, 17 bp, Arabidopsis thaliana
agagactctctttctct

SEQ ID NO: 30389 - DNA, 17 bp, Arabidopsis thaliana
agagactcttcaatggc

SEQ ID NO: 30390 - DNA, 17 bp, Arabidopsis thaliana
agagactgaacccaaag

SEQ ID NO: 30391 - DNA, 17 bp, Arabidopsis thaliana
agagactgagaggagga

SEQ ID NO: 30392 - DNA, 17 bp, Arabidopsis thaliana
agagactgagattggcg

SEQ ID NO: 30393 - DNA, 17 bp, Arabidopsis thaliana
agagactgcctgggttt

SEQ ID NO: 30394 - DNA, 17 bp, Arabidopsis thaliana
agagactgctcctgctg

SEQ ID NO: 30395 - DNA, 17 bp, Arabidopsis thaliana
agagactgctctatctg

SEQ ID NO: 30396 - DNA, 17 bp, Arabidopsis thaliana
agagactgcttctacga

SEQ ID NO: 30397 - DNA, 17 bp, Arabidopsis thaliana
agagactgcttctacgg

SEQ ID NO: 30398 - DNA, 17 bp, Arabidopsis thaliana
agagactggacctgaag

SEQ ID NO: 30399 - DNA, 17 bp, Arabidopsis thaliana
agagactggtttggtga

SEQ ID NO: 30400 - DNA, 17 bp, Arabidopsis thaliana
agagactgtaacctaga

SEQ ID NO: 30401 - DNA, 17 bp, Arabidopsis thaliana
agagactgtttctccac

SEQ ID NO: 30402 - DNA, 17 bp, Arabidopsis thaliana
agagactgtttttgtat

SEQ ID NO: 30403 - DNA, 17 bp, Arabidopsis thaliana
agagacttaaccgcacg

SEQ ID NO: 30404 - DNA, 17 bp, Arabidopsis thaliana
agagacttacggtcatc

SEQ ID NO: 30405 - DNA, 17 bp, Arabidopsis thaliana
agagacttccacctcca

SEQ ID NO: 30406 - DNA, 17 bp, Arabidopsis thaliana
agagacttccgattcgg

SEQ ID NO: 30407 - DNA, 17 bp, Arabidopsis thaliana
agagacttctacgagag

SEQ ID NO: 30408 - DNA, 17 bp, Arabidopsis thaliana
agagacttgaagccttc

SEQ ID NO: 30409 - DNA, 17 bp, Arabidopsis thaliana
agagacttgtcacgatg

SEQ ID NO: 30410 - DNA, 17 bp, Arabidopsis thaliana
agagactttcatgggca

SEQ ID NO: 30411 - DNA, 17 bp, Arabidopsis thaliana
agagagaaacggctacc

SEQ ID NO: 30412 - DNA, 17 bp, Arabidopsis thaliana
agagagaaatcaatcgc

SEQ ID NO: 30413 - DNA, 17 bp, Arabidopsis thaliana
agagagaaatcgacccc

SEQ ID NO: 30414 - DNA, 17 bp, Arabidopsis thaliana
agagagaaggaaggagg

SEQ ID NO: 30415 - DNA, 17 bp, Arabidopsis thaliana
agagagaccactattgc

SEQ ID NO: 30416 - DNA, 17 bp, Arabidopsis thaliana
agagagaccatcgttgc

SEQ ID NO: 30417 - DNA, 17 bp, Arabidopsis thaliana
agagagacccaagtcag

SEQ ID NO: 30418 - DNA, 17 bp, Arabidopsis thaliana
agagagacctagagggg

SEQ ID NO: 30419 - DNA, 17 bp, Arabidopsis thaliana
agagagacctagcgtgg

SEQ ID NO: 30420 - DNA, 17 bp, Arabidopsis thaliana
agagagagacaaggtcg

SEQ ID NO: 30421 - DNA, 17 bp, Arabidopsis thaliana
agagagagacgcaaaac

SEQ ID NO: 30422 - DNA, 17 bp, Arabidopsis thaliana
agagagagcaaaccagt

SEQ ID NO: 30423 - DNA, 17 bp, Arabidopsis thaliana
agagagagccaatcggg

SEQ ID NO: 30424 - DNA, 17 bp, Arabidopsis thaliana
agagagagcggtctgcg

SEQ ID NO: 30425 - DNA, 17 bp, Arabidopsis thaliana
agagagaggttcgaatc

SEQ ID NO: 30426 - DNA, 17 bp, Arabidopsis thaliana
agagagagttgaccaac

SEQ ID NO: 30427 - DNA, 17 bp, Arabidopsis thaliana
agagagagttggccaac

SEQ ID NO: 30428 - DNA, 17 bp, Arabidopsis thaliana
agagagagttggccaat

SEQ ID NO: 30429 - DNA, 17 bp, Arabidopsis thaliana
agagagatcccttgtga

SEQ ID NO: 30430 - DNA, 17 bp, Arabidopsis thaliana
agagagatccggggaag

SEQ ID NO: 30431 - DNA, 17 bp, Arabidopsis thaliana
agagagatcctcctctt

SEQ ID NO: 30432 - DNA, 17 bp, Arabidopsis thaliana
agagagatggagatgtc

SEQ ID NO: 30433 - DNA, 17 bp, Arabidopsis thaliana
agagagatggtcgctcg

SEQ ID NO: 30434 - DNA, 17 bp, Arabidopsis thaliana
agagagatgtgattcgt

SEQ ID NO: 30435 - DNA, 17 bp, Arabidopsis thaliana
agagagattcgcgttga

SEQ ID NO: 30436 - DNA, 17 bp, Arabidopsis thaliana
agagagattcgtcttca

SEQ ID NO: 30437 - DNA, 17 bp, Arabidopsis thaliana
agagagatttccagtta

SEQ ID NO: 30438 - DNA, 17 bp, Arabidopsis thaliana
agagagcaaggtcttac

SEQ ID NO: 30439 - DNA, 17 bp, Arabidopsis thaliana
agagagccacggcctgc

SEQ ID NO: 30440 - DNA, 17 bp, Arabidopsis thaliana
agagagccattcaagaa

SEQ ID NO: 30441 - DNA, 17 bp, Arabidopsis thaliana
agagagccattcaggaa

SEQ ID NO: 30442 - DNA, 17 bp, Arabidopsis thaliana
agagagccctccgacga

SEQ ID NO: 30443 - DNA, 17 bp, Arabidopsis thaliana
agagagccgagctttag

SEQ ID NO: 30444 - DNA, 17 bp, Arabidopsis thaliana
agagagccgttcccagt

SEQ ID NO: 30445 - DNA, 17 bp, Arabidopsis thaliana
agagagccttccccctt

SEQ ID NO: 30446 - DNA, 17 bp, Arabidopsis thaliana
agagagctctgtttttg

SEQ ID NO: 30447 - DNA, 17 bp, Arabidopsis thaliana
agagagcttcatgagga

SEQ ID NO: 30448 - DNA, 17 bp, Arabidopsis thaliana
agagagcttgtcactga

SEQ ID NO: 30449 - DNA, 17 bp, Arabidopsis thaliana
agagaggaccagttatt

SEQ ID NO: 30450 - DNA, 17 bp, Arabidopsis thaliana
agagaggacgggttggc

SEQ ID NO: 30451 - DNA, 17 bp, Arabidopsis thaliana
agagaggacgtgggtgc

SEQ ID NO: 30452 - DNA, 17 bp, Arabidopsis thaliana
agagaggaggactatat

SEQ ID NO: 30453 - DNA, 17 bp, Arabidopsis thaliana
agagaggatgatctagg

SEQ ID NO: 30454 - DNA, 17 bp, Arabidopsis thaliana
agagaggccctctcacg

SEQ ID NO: 30455 - DNA, 17 bp, Arabidopsis thaliana
agagaggcgagaccgac

SEQ ID NO: 30456 - DNA, 17 bp, Arabidopsis thaliana
agagaggcgtcggaccg

SEQ ID NO: 30457 - DNA, 17 bp, Arabidopsis thaliana
agagaggcgtgacccac

SEQ ID NO: 30458 - DNA, 17 bp, Arabidopsis thaliana
agagaggctctcttctt

SEQ ID NO: 30459 - DNA, 17 bp, Arabidopsis thaliana
agagagggacagaggaa

SEQ ID NO: 30460 - DNA, 17 bp, Arabidopsis thaliana
agagagggtctcagggt

SEQ ID NO: 30461 - DNA, 17 bp, Arabidopsis thaliana
agagagggtgtcttccc

SEQ ID NO: 30462 - DNA, 17 bp, Arabidopsis thaliana
agagaggtgcttcttta

SEQ ID NO: 30463 - DNA, 17 bp, Arabidopsis thaliana
agagagtatcaaacaaa

SEQ ID NO: 30464 - DNA, 17 bp, Arabidopsis thaliana
agagagtatcaatcaaa

SEQ ID NO: 30465 - DNA, 17 bp, Arabidopsis thaliana
agagagtatctcctagt

SEQ ID NO: 30466 - DNA, 17 bp, Arabidopsis thaliana
agagagtcaaagagtgc

SEQ ID NO: 30467 - DNA, 17 bp, Arabidopsis thaliana
agagagtccgacattag

SEQ ID NO: 30468 - DNA, 17 bp, Arabidopsis thaliana
agagagtctaaccgtct

SEQ ID NO: 30469 - DNA, 17 bp, Arabidopsis thaliana
agagagtctgtcgaagg

SEQ ID NO: 30470 - DNA, 17 bp, Arabidopsis thaliana
agagagtgacgggatcc

SEQ ID NO: 30471 - DNA, 17 bp, Arabidopsis thaliana
agagagtgagacctacc

SEQ ID NO: 30472 - DNA, 17 bp, Arabidopsis thaliana
agagagtgagcactttg

SEQ ID NO: 30473 - DNA, 17 bp, Arabidopsis thaliana
agagagtgcaagtcaca

SEQ ID NO: 30474 - DNA, 17 bp, Arabidopsis thaliana
agagagtgcgagacaag

SEQ ID NO: 30475 - DNA, 17 bp, Arabidopsis thaliana
agagagtgctgagaagt

SEQ ID NO: 30476 - DNA, 17 bp, Arabidopsis thaliana
agagagtggctcttggg

SEQ ID NO: 30477 - DNA, 17 bp, Arabidopsis thaliana
agagagtgggcactttc

SEQ ID NO: 30478 - DNA, 17 bp, Arabidopsis thaliana
agagagtgtgatctgac

SEQ ID NO: 30479 - DNA, 17 bp, Arabidopsis thaliana
agagagtgtggtctgac

SEQ ID NO: 30480 - DNA, 17 bp, Arabidopsis thaliana
agagagtgtggtctggc

SEQ ID NO: 30481 - DNA, 17 bp, Arabidopsis thaliana
agagagtgttgaccaac

SEQ ID NO: 30482 - DNA, 17 bp, Arabidopsis thaliana
agagagtgttggccaac

SEQ ID NO: 30483 - DNA, 17 bp, Arabidopsis thaliana
agagagttccatcgtcg

SEQ ID NO: 30484 - DNA, 17 bp, Arabidopsis thaliana
agagagttccggtgagg

SEQ ID NO: 30485 - DNA, 17 bp, Arabidopsis thaliana
agagagttctttcttag

SEQ ID NO: 30486 - DNA, 17 bp, Arabidopsis thaliana
agagagttttacctatg

SEQ ID NO: 30487 - DNA, 17 bp, Arabidopsis thaliana
agagagtttttctctcc

SEQ ID NO: 30488 - DNA, 17 bp, Arabidopsis thaliana
agagagtttttgagcca

SEQ ID NO: 30489 - DNA, 17 bp, Arabidopsis thaliana
agagataaccgactgct

SEQ ID NO: 30490 - DNA, 17 bp, Arabidopsis thaliana
agagataagatcccatc

SEQ ID NO: 30491 - DNA, 17 bp, Arabidopsis thaliana
agagataagatgatgtg

SEQ ID NO: 30492 - DNA, 17 bp, Arabidopsis thaliana
agagataagttgccaac

SEQ ID NO: 30493 - DNA, 17 bp, Arabidopsis thaliana
agagataattttccgca

SEQ ID NO: 30494 - DNA, 17 bp, Arabidopsis thaliana
agagatacagtgcgttg

SEQ ID NO: 30495 - DNA, 17 bp, Arabidopsis thaliana
agagataccaagtcttt

SEQ ID NO: 30496 - DNA, 17 bp, Arabidopsis thaliana
agagatacggcgacggg

SEQ ID NO: 30497 - DNA, 17 bp, Arabidopsis thaliana
agagatactctaccgcg

SEQ ID NO: 30498 - DNA, 17 bp, Arabidopsis thaliana
agagatagggtcgccct

SEQ ID NO: 30499 - DNA, 17 bp, Arabidopsis thaliana
agagataggttgaagcg

SEQ ID NO: 30500 - DNA, 17 bp, Arabidopsis thaliana
agagatagtctacatgg

SEQ ID NO: 30501 - DNA, 17 bp, Arabidopsis thaliana
agagatatcatctccgg

SEQ ID NO: 30502 - DNA, 17 bp, Arabidopsis thaliana
agagatattgccgaagt

SEQ ID NO: 30503 - DNA, 17 bp, Arabidopsis thaliana
agagatattgccgacgt

SEQ ID NO: 30504 - DNA, 17 bp, Arabidopsis thaliana
agagatatttgccttct

SEQ ID NO: 30505 - DNA, 17 bp, Arabidopsis thaliana
agagatcaagcgaccga

SEQ ID NO: 30506 - DNA, 17 bp, Arabidopsis thaliana
agagatcaccggtttga

SEQ ID NO: 30507 - DNA, 17 bp, Arabidopsis thaliana
agagatcactgctttgg

SEQ ID NO: 30508 - DNA, 17 bp, Arabidopsis thaliana
agagatcagcggatgta

SEQ ID NO: 30509 - DNA, 17 bp, Arabidopsis thaliana
agagatcagcggatgtt

SEQ ID NO: 30510 - DNA, 17 bp, Arabidopsis thaliana
agagatcagctgctgta

SEQ ID NO: 30511 - DNA, 17 bp, Arabidopsis thaliana
agagatcccctgttact

SEQ ID NO: 30512 - DNA, 17 bp, Arabidopsis thaliana
agagatcccgagcacag

SEQ ID NO: 30513 - DNA, 17 bp, Arabidopsis thaliana
agagatcctcccaacgt

SEQ ID NO: 30514 - DNA, 17 bp, Arabidopsis thaliana
agagatcgccagttcga

SEQ ID NO: 30515 - DNA, 17 bp, Arabidopsis thaliana
agagatcgccgattcga

SEQ ID NO: 30516 - DNA, 17 bp, Arabidopsis thaliana
agagatcgccggttcga

SEQ ID NO: 30517 - DNA, 17 bp, Arabidopsis thaliana
agagatcgcctgttcga

SEQ ID NO: 30518 - DNA, 17 bp, Arabidopsis thaliana
agagatcgctggagcta

SEQ ID NO: 30519 - DNA, 17 bp, Arabidopsis thaliana
agagatcgctgtttttc

SEQ ID NO: 30520 - DNA, 17 bp, Arabidopsis thaliana
agagatcgtcggttcga

SEQ ID NO: 30521 - DNA, 17 bp, Arabidopsis thaliana
agagatcgtgggattgt

SEQ ID NO: 30522 - DNA, 17 bp, Arabidopsis thaliana
agagatctcaaccactt

SEQ ID NO: 30523 - DNA, 17 bp, Arabidopsis thaliana
agagatctcagattatt

SEQ ID NO: 30524 - DNA, 17 bp, Arabidopsis thaliana
agagatctcatgcacac

SEQ ID NO: 30525 - DNA, 17 bp, Arabidopsis thaliana
agagatctgtgccaccg

SEQ ID NO: 30526 - DNA, 17 bp, Arabidopsis thaliana
agagatcttcattctgt

SEQ ID NO: 30527 - DNA, 17 bp, Arabidopsis thaliana
agagatcttttccagca

SEQ ID NO: 30528 - DNA, 17 bp, Arabidopsis thaliana
agagatgaccattggag

SEQ ID NO: 30529 - DNA, 17 bp, Arabidopsis thaliana
agagatgacggtccaaa

SEQ ID NO: 30530 - DNA, 17 bp, Arabidopsis thaliana
agagatgactagaagaa

SEQ ID NO: 30531 - DNA, 17 bp, Arabidopsis thaliana
agagatgagcactaagg

SEQ ID NO: 30532 - DNA, 17 bp, Arabidopsis thaliana
agagatgataaaaccgg

SEQ ID NO: 30533 - DNA, 17 bp, Arabidopsis thaliana
agagatgataatccaga

SEQ ID NO: 30534 - DNA, 17 bp, Arabidopsis thaliana
agagatgatcaccgaca

SEQ ID NO: 30535 - DNA, 17 bp, Arabidopsis thaliana
agagatgatctaagcgt

SEQ ID NO: 30536 - DNA, 17 bp, Arabidopsis thaliana
agagatgcagtgtttgc

SEQ ID NO: 30537 - DNA, 17 bp, Arabidopsis thaliana
agagatggagctcgaca

SEQ ID NO: 30538 - DNA, 17 bp, Arabidopsis thaliana
agagatggattaggagt

SEQ ID NO: 30539 - DNA, 17 bp, Arabidopsis thaliana
agagatggatttctctc

SEQ ID NO: 30540 - DNA, 17 bp, Arabidopsis thaliana
agagatggctcgtgttt

SEQ ID NO: 30541 - DNA, 17 bp, Arabidopsis thaliana
agagatggggtcttaca

SEQ ID NO: 30542 - DNA, 17 bp, Arabidopsis thaliana
agagatggtagaccccc

SEQ ID NO: 30543 - DNA, 17 bp, Arabidopsis thaliana
agagatggtatctgatg

SEQ ID NO: 30544 - DNA, 17 bp, Arabidopsis thaliana
agagatggtgaggaagc

SEQ ID NO: 30545 - DNA, 17 bp, Arabidopsis thaliana
agagatggttgatgaat

SEQ ID NO: 30546 - DNA, 17 bp, Arabidopsis thaliana
agagatgtagcgcagct

SEQ ID NO: 30547 - DNA, 17 bp, Arabidopsis thaliana
agagatgtcaaggccag

SEQ ID NO: 30548 - DNA, 17 bp, Arabidopsis thaliana
agagatgtcctcttgga

SEQ ID NO: 30549 - DNA, 17 bp, Arabidopsis thaliana
agagatgtcggctgctg

SEQ ID NO: 30550 - DNA, 17 bp, Arabidopsis thaliana
agagatgtctatttgag

SEQ ID NO: 30551 - DNA, 17 bp, Arabidopsis thaliana
agagatgtgaatccatg

SEQ ID NO: 30552 - DNA, 17 bp, Arabidopsis thaliana
agagatgtgatttccga

SEQ ID NO: 30553 - DNA, 17 bp, Arabidopsis thaliana
agagatgtgggtcaggt

SEQ ID NO: 30554 - DNA, 17 bp, Arabidopsis thaliana
agagatgtgtgatctgt

SEQ ID NO: 30555 - DNA, 17 bp, Arabidopsis thaliana
agagatgtgtgatgtgt

SEQ ID NO: 30556 - DNA, 17 bp, Arabidopsis thaliana
agagatgtgttagcccg

SEQ ID NO: 30557 - DNA, 17 bp, Arabidopsis thaliana
agagattaacatggatc

SEQ ID NO: 30558 - DNA, 17 bp, Arabidopsis thaliana
agagattaatctacagt

SEQ ID NO: 30559 - DNA, 17 bp, Arabidopsis thaliana
agagattacagacttcg

SEQ ID NO: 30560 - DNA, 17 bp, Arabidopsis thaliana
agagattacatcaggta

SEQ ID NO: 30561 - DNA, 17 bp, Arabidopsis thaliana
agagattaccgatggag

SEQ ID NO: 30562 - DNA, 17 bp, Arabidopsis thaliana
agagattacggacttcg

SEQ ID NO: 30563 - DNA, 17 bp, Arabidopsis thaliana
agagattacgggattcg

SEQ ID NO: 30564 - DNA, 17 bp, Arabidopsis thaliana
agagattacgggcttcg

SEQ ID NO: 30565 - DNA, 17 bp, Arabidopsis thaliana
agagattacgggtttcg

SEQ ID NO: 30566 - DNA, 17 bp, Arabidopsis thaliana
agagattacgggttttg

SEQ ID NO: 30567 - DNA, 17 bp, Arabidopsis thaliana
agagattagggcgtaag

SEQ ID NO: 30568 - DNA, 17 bp, Arabidopsis thaliana
agagattagtccggact

SEQ ID NO: 30569 - DNA, 17 bp, Arabidopsis thaliana
agagattagtctagact

SEQ ID NO: 30570 - DNA, 17 bp, Arabidopsis thaliana
agagattagtctggact

SEQ ID NO: 30571 - DNA, 17 bp, Arabidopsis thaliana
agagattatttacgctg

SEQ ID NO: 30572 - DNA, 17 bp, Arabidopsis thaliana
agagattcaagaggcgt

SEQ ID NO: 30573 - DNA, 17 bp, Arabidopsis thaliana
agagattcagagtaaac

SEQ ID NO: 30574 - DNA, 17 bp, Arabidopsis thaliana
agagattccggacctag

SEQ ID NO: 30575 - DNA, 17 bp, Arabidopsis thaliana
agagattccttccaacg

SEQ ID NO: 30576 - DNA, 17 bp, Arabidopsis thaliana
agagattcggactatcc

SEQ ID NO: 30577 - DNA, 17 bp, Arabidopsis thaliana
agagattcgtcttcagc

SEQ ID NO: 30578 - DNA, 17 bp, Arabidopsis thaliana
agagattcgtggctcaa

SEQ ID NO: 30579 - DNA, 17 bp, Arabidopsis thaliana
agagattctcgatgtta

SEQ ID NO: 30580 - DNA, 17 bp, Arabidopsis thaliana
agagattctcgcttcac

SEQ ID NO: 30581 - DNA, 17 bp, Arabidopsis thaliana
agagattctggaactaa

SEQ ID NO: 30582 - DNA, 17 bp, Arabidopsis thaliana
agagattctggacctag

SEQ ID NO: 30583 - DNA, 17 bp, Arabidopsis thaliana
agagattctgggtcaaa

SEQ ID NO: 30584 - DNA, 17 bp, Arabidopsis thaliana
agagattgacacacaat

SEQ ID NO: 30585 - DNA, 17 bp, Arabidopsis thaliana
agagattgaccagcggt

SEQ ID NO: 30586 - DNA, 17 bp, Arabidopsis thaliana
agagattgcaccgggcc

SEQ ID NO: 30587 - DNA, 17 bp, Arabidopsis thaliana
agagattgccggttcga

SEQ ID NO: 30588 - DNA, 17 bp, Arabidopsis thaliana
agagattgctgaggagg

SEQ ID NO: 30589 - DNA, 17 bp, Arabidopsis thaliana
agagattggaatttgtc

SEQ ID NO: 30590 - DNA, 17 bp, Arabidopsis thaliana
agagattggagactcgg

SEQ ID NO: 30591 - DNA, 17 bp, Arabidopsis thaliana
agagattgtgaatcatg

SEQ ID NO: 30592 - DNA, 17 bp, Arabidopsis thaliana
agagatttaccattaga

SEQ ID NO: 30593 - DNA, 17 bp, Arabidopsis thaliana
agagatttaccattagg

SEQ ID NO: 30594 - DNA, 17 bp, Arabidopsis thaliana
agagatttacttttggc

SEQ ID NO: 30595 - DNA, 17 bp, Arabidopsis thaliana
agagatttagcgtatgc

SEQ ID NO: 30596 - DNA, 17 bp, Arabidopsis thaliana
agagatttatttatcgg

SEQ ID NO: 30597 - DNA, 17 bp, Arabidopsis thaliana
agagatttctctcaacg

SEQ ID NO: 30598 - DNA, 17 bp, Arabidopsis thaliana
agagatttctgatgtaa

SEQ ID NO: 30599 - DNA, 17 bp, Arabidopsis thaliana
agagatttgatttgccg

SEQ ID NO: 30600 - DNA, 17 bp, Arabidopsis thaliana
agagatttgggctatat

SEQ ID NO: 30601 - DNA, 17 bp, Arabidopsis thaliana
agagatttgtggcttgg

SEQ ID NO: 30602 - DNA, 17 bp, Arabidopsis thaliana
agagatttgtgggttta

SEQ ID NO: 30603 - DNA, 17 bp, Arabidopsis thaliana
agagattttacggtact

SEQ ID NO: 30604 - DNA, 17 bp, Arabidopsis thaliana
agagattttctataccg

SEQ ID NO: 30605 - DNA, 17 bp, Arabidopsis thaliana
agagattttgatcagcg

SEQ ID NO: 30606 - DNA, 17 bp, Arabidopsis thaliana
agagattttgggaataa

SEQ ID NO: 30607 - DNA, 17 bp, Arabidopsis thaliana
agagcaaaacaaaagac

SEQ ID NO: 30608 - DNA, 17 bp, Arabidopsis thaliana
agagcaaaccagtttca

SEQ ID NO: 30609 - DNA, 17 bp, Arabidopsis thaliana
agagcaaaccctagctt

SEQ ID NO: 30610 - DNA, 17 bp, Arabidopsis thaliana
agagcaaacgcaagcca

SEQ ID NO: 30611 - DNA, 17 bp, Arabidopsis thaliana
agagcaaagattccatc

SEQ ID NO: 30612 - DNA, 17 bp, Arabidopsis thaliana
agagcaaagttgcgaaa

SEQ ID NO: 30613 - DNA, 17 bp, Arabidopsis thaliana
agagcaaatcaagattt

SEQ ID NO: 30614 - DNA, 17 bp, Arabidopsis thaliana
agagcaaattgcctacg

SEQ ID NO: 30615 - DNA, 17 bp, Arabidopsis thaliana
agagcaacaaagggtgt

SEQ ID NO: 30616 - DNA, 17 bp, Arabidopsis thaliana
agagcaaccttgggcct

SEQ ID NO: 30617 - DNA, 17 bp, Arabidopsis thaliana
agagcaactaaagaacc

SEQ ID NO: 30618 - DNA, 17 bp, Arabidopsis thaliana
agagcaactccaatgag

SEQ ID NO: 30619 - DNA, 17 bp, Arabidopsis thaliana
agagcaactgttttgaa

SEQ ID NO: 30620 - DNA, 17 bp, Arabidopsis thaliana
agagcaacttaagagca

SEQ ID NO: 30621 - DNA, 17 bp, Arabidopsis thaliana
agagcaacttcaatggt

SEQ ID NO: 30622 - DNA, 17 bp, Arabidopsis thaliana
agagcaagatgatgaaa

SEQ ID NO: 30623 - DNA, 17 bp, Arabidopsis thaliana
agagcaagctagttgcg

SEQ ID NO: 30624 - DNA, 17 bp, Arabidopsis thaliana
agagcaaggaaagccaa

SEQ ID NO: 30625 - DNA, 17 bp, Arabidopsis thaliana
agagcaaggctcttaac

SEQ ID NO: 30626 - DNA, 17 bp, Arabidopsis thaliana
agagcaagtagatcaga

SEQ ID NO: 30627 - DNA, 17 bp, Arabidopsis thaliana
agagcaagtccagtgat

SEQ ID NO: 30628 - DNA, 17 bp, Arabidopsis thaliana
agagcaagtcggctttg

SEQ ID NO: 30629 - DNA, 17 bp, Arabidopsis thaliana
agagcaatctaggcatg

SEQ ID NO: 30630 - DNA, 17 bp, Arabidopsis thaliana
agagcaatctctacact

SEQ ID NO: 30631 - DNA, 17 bp, Arabidopsis thaliana
agagcaatctgggcatg

SEQ ID NO: 30632 - DNA, 17 bp, Arabidopsis thaliana
agagcaatgctgtatgt

SEQ ID NO: 30633 - DNA, 17 bp, Arabidopsis thaliana
agagcaatgttttgcca

SEQ ID NO: 30634 - DNA, 17 bp, Arabidopsis thaliana
agagcaattgactgcag

SEQ ID NO: 30635 - DNA, 17 bp, Arabidopsis thaliana
agagcaatttcatcgac

SEQ ID NO: 30636 - DNA, 17 bp, Arabidopsis thaliana
agagcacagaccactcg

SEQ ID NO: 30637 - DNA, 17 bp, Arabidopsis thaliana
agagcacagagcgtatc

SEQ ID NO: 30638 - DNA, 17 bp, Arabidopsis thaliana
agagcacagataatgac

SEQ ID NO: 30639 - DNA, 17 bp, Arabidopsis thaliana
agagcacatgcctacat

SEQ ID NO: 30640 - DNA, 17 bp, Arabidopsis thaliana
agagcacattatgatta

SEQ ID NO: 30641 - DNA, 17 bp, Arabidopsis thaliana
agagcaccgcacgtcgc

SEQ ID NO: 30642 - DNA, 17 bp, Arabidopsis thaliana
agagcacctccaaagtg

SEQ ID NO: 30643 - DNA, 17 bp, Arabidopsis thaliana
agagcaccttcattgga

SEQ ID NO: 30644 - DNA, 17 bp, Arabidopsis thaliana
agagcacgctttagggt

SEQ ID NO: 30645 - DNA, 17 bp, Arabidopsis thaliana
agagcacgtctgcctag

SEQ ID NO: 30646 - DNA, 17 bp, Arabidopsis thaliana
agagcacgtctgcctga

SEQ ID NO: 30647 - DNA, 17 bp, Arabidopsis thaliana
agagcacgtctgcctgg

SEQ ID NO: 30648 - DNA, 17 bp, Arabidopsis thaliana
agagcactccaagactt

SEQ ID NO: 30649 - DNA, 17 bp, Arabidopsis thaliana
agagcactgggtgaggt

SEQ ID NO: 30650 - DNA, 17 bp, Arabidopsis thaliana
agagcactgtaaagaaa

SEQ ID NO: 30651 - DNA, 17 bp, Arabidopsis thaliana
agagcacttcaactgga

SEQ ID NO: 30652 - DNA, 17 bp, Arabidopsis thaliana
agagcacttctgcctgg

SEQ ID NO: 30653 - DNA, 17 bp, Arabidopsis thaliana
agagcagaagaccgagg

SEQ ID NO: 30654 - DNA, 17 bp, Arabidopsis thaliana
agagcagacgacttttg

SEQ ID NO: 30655 - DNA, 17 bp, Arabidopsis thaliana
agagcagagccgtgcct

SEQ ID NO: 30656 - DNA, 17 bp, Arabidopsis thaliana
agagcagagtcagatat

SEQ ID NO: 30657 - DNA, 17 bp, Arabidopsis thaliana
agagcagagtcagatct

SEQ ID NO: 30658 - DNA, 17 bp, Arabidopsis thaliana
agagcagattactgttg

SEQ ID NO: 30659 - DNA, 17 bp, Arabidopsis thaliana
agagcagccccaacggt

SEQ ID NO: 30660 - DNA, 17 bp, Arabidopsis thaliana
agagcagctattgatga

SEQ ID NO: 30661 - DNA, 17 bp, Arabidopsis thaliana
agagcagctcacaaaag

SEQ ID NO: 30662 - DNA, 17 bp, Arabidopsis thaliana
agagcagctgattactc

SEQ ID NO: 30663 - DNA, 17 bp, Arabidopsis thaliana
agagcagctgcaggtct

SEQ ID NO: 30664 - DNA, 17 bp, Arabidopsis thaliana
agagcagctgtggtttg

SEQ ID NO: 30665 - DNA, 17 bp, Arabidopsis thaliana
agagcagcttggtttgg

SEQ ID NO: 30666 - DNA, 17 bp, Arabidopsis thaliana
agagcaggctccagctg

SEQ ID NO: 30667 - DNA, 17 bp, Arabidopsis thaliana
agagcagggtcggtcca

SEQ ID NO: 30668 - DNA, 17 bp, Arabidopsis thaliana
agagcagggtttaagca

SEQ ID NO: 30669 - DNA, 17 bp, Arabidopsis thaliana
agagcaggtcgattggc

SEQ ID NO: 30670 - DNA, 17 bp, Arabidopsis thaliana
agagcagtgcgatctac

SEQ ID NO: 30671 - DNA, 17 bp, Arabidopsis thaliana
agagcatagtcagatat

SEQ ID NO: 30672 - DNA, 17 bp, Arabidopsis thaliana
agagcatctacattgca

SEQ ID NO: 30673 - DNA, 17 bp, Arabidopsis thaliana
agagcatgcccgaaata

SEQ ID NO: 30674 - DNA, 17 bp, Arabidopsis thaliana
agagcatgctaagtccg

SEQ ID NO: 30675 - DNA, 17 bp, Arabidopsis thaliana
agagcatggatcagatt

SEQ ID NO: 30676 - DNA, 17 bp, Arabidopsis thaliana
agagcatgtacattggg

SEQ ID NO: 30677 - DNA, 17 bp, Arabidopsis thaliana
agagcatgtccaacggt

SEQ ID NO: 30678 - DNA, 17 bp, Arabidopsis thaliana
agagcatgtccaatggt

SEQ ID NO: 30679 - DNA, 17 bp, Arabidopsis thaliana
agagcatgtccagtggt

SEQ ID NO: 30680 - DNA, 17 bp, Arabidopsis thaliana
agagcatgtccattgca

SEQ ID NO: 30681 - DNA, 17 bp, Arabidopsis thaliana
agagcatgttcattgca

SEQ ID NO: 30682 - DNA, 17 bp, Arabidopsis thaliana
agagcattatgcgacat

SEQ ID NO: 30683 - DNA, 17 bp, Arabidopsis thaliana
agagcattcataggtca

SEQ ID NO: 30684 - DNA, 17 bp, Arabidopsis thaliana
agagcattccatcagta

SEQ ID NO: 30685 - DNA, 17 bp, Arabidopsis thaliana
agagcattgacaggacc

SEQ ID NO: 30686 - DNA, 17 bp, Arabidopsis thaliana
agagcattggtgctatg

SEQ ID NO: 30687 - DNA, 17 bp, Arabidopsis thaliana
agagcatttacaatggt

SEQ ID NO: 30688 - DNA, 17 bp, Arabidopsis thaliana
agagcatttccaaggct

SEQ ID NO: 30689 - DNA, 17 bp, Arabidopsis thaliana
agagcatttccatccat

SEQ ID NO: 30690 - DNA, 17 bp, Arabidopsis thaliana
agagcatttccatcgcg

SEQ ID NO: 30691 - DNA, 17 bp, Arabidopsis thaliana
agagcatttccatcggg

SEQ ID NO: 30692 - DNA, 17 bp, Arabidopsis thaliana
agagcatttccattggt

SEQ ID NO: 30693 - DNA, 17 bp, Arabidopsis thaliana
agagcatttctatcagg

SEQ ID NO: 30694 - DNA, 17 bp, Arabidopsis thaliana
agagcattttcattgga

SEQ ID NO: 30695 - DNA, 17 bp, Arabidopsis thaliana
agagccaaaagtaggca

SEQ ID NO: 30696 - DNA, 17 bp, Arabidopsis thaliana
agagccaacttgtatcg

SEQ ID NO: 30697 - DNA, 17 bp, Arabidopsis thaliana
agagccaagacgggaga

SEQ ID NO: 30698 - DNA, 17 bp, Arabidopsis thaliana
agagccaagatcagagt

SEQ ID NO: 30699 - DNA, 17 bp, Arabidopsis thaliana
agagccaattaagaacc

SEQ ID NO: 30700 - DNA, 17 bp, Arabidopsis thaliana
agagccacccatttctg

SEQ ID NO: 30701 - DNA, 17 bp, Arabidopsis thaliana
agagccacctattgacc

SEQ ID NO: 30702 - DNA, 17 bp, Arabidopsis thaliana
agagccacggcctgccg

SEQ ID NO: 30703 - DNA, 17 bp, Arabidopsis thaliana
agagccacgtcgttcct

SEQ ID NO: 30704 - DNA, 17 bp, Arabidopsis thaliana
agagccacttgatcgtt

SEQ ID NO: 30705 - DNA, 17 bp, Arabidopsis thaliana
agagccaggttccgatc

SEQ ID NO: 30706 - DNA, 17 bp, Arabidopsis thaliana
agagccataaacccggc

SEQ ID NO: 30707 - DNA, 17 bp, Arabidopsis thaliana
agagccatacttgtcgt

SEQ ID NO: 30708 - DNA, 17 bp, Arabidopsis thaliana
agagccatagttctcac

SEQ ID NO: 30709 - DNA, 17 bp, Arabidopsis thaliana
agagccatcatctcgag

SEQ ID NO: 30710 - DNA, 17 bp, Arabidopsis thaliana
agagccatccgatcgtt

SEQ ID NO: 30711 - DNA, 17 bp, Arabidopsis thaliana
agagccatgagctaata

SEQ ID NO: 30712 - DNA, 17 bp, Arabidopsis thaliana
agagccatggccaatgt

SEQ ID NO: 30713 - DNA, 17 bp, Arabidopsis thaliana
agagccattcaacatca

SEQ ID NO: 30714 - DNA, 17 bp, Arabidopsis thaliana
agagcccaaacttcaac

SEQ ID NO: 30715 - DNA, 17 bp, Arabidopsis thaliana
agagcccaaagtatgac

SEQ ID NO: 30716 - DNA, 17 bp, Arabidopsis thaliana
agagcccacttgtgact

SEQ ID NO: 30717 - DNA, 17 bp, Arabidopsis thaliana
agagccccgtcgtgccc

SEQ ID NO: 30718 - DNA, 17 bp, Arabidopsis thaliana
agagccccgtcgtgcct

SEQ ID NO: 30719 - DNA, 17 bp, Arabidopsis thaliana
agagccccgtcgtgctc

SEQ ID NO: 30720 - DNA, 17 bp, Arabidopsis thaliana
agagcccgagggaagat

SEQ ID NO: 30721 - DNA, 17 bp, Arabidopsis thaliana
agagcccgatgatggga

SEQ ID NO: 30722 - DNA, 17 bp, Arabidopsis thaliana
agagcccgattcgtcag

SEQ ID NO: 30723 - DNA, 17 bp, Arabidopsis thaliana
agagcccgcgtcgacct

SEQ ID NO: 30724 - DNA, 17 bp, Arabidopsis thaliana
agagccctccgacgaaa

SEQ ID NO: 30725 - DNA, 17 bp, Arabidopsis thaliana
agagccgacatcgaagg

SEQ ID NO: 30726 - DNA, 17 bp, Arabidopsis thaliana
agagccgacgtggtagg

SEQ ID NO: 30727 - DNA, 17 bp, Arabidopsis thaliana
agagccgagacccaacg

SEQ ID NO: 30728 - DNA, 17 bp, Arabidopsis thaliana
agagccgagatatccgt

SEQ ID NO: 30729 - DNA, 17 bp, Arabidopsis thaliana
agagccgagtgaacgac

SEQ ID NO: 30730 - DNA, 17 bp, Arabidopsis thaliana
agagccgcaggattagg

SEQ ID NO: 30731 - DNA, 17 bp, Arabidopsis thaliana
agagccggactgataat

SEQ ID NO: 30732 - DNA, 17 bp, Arabidopsis thaliana
agagccgggggacggac

SEQ ID NO: 30733 - DNA, 17 bp, Arabidopsis thaliana
agagccgtgactataag

SEQ ID NO: 30734 - DNA, 17 bp, Arabidopsis thaliana
agagccgtgatcgtggt

SEQ ID NO: 30735 - DNA, 17 bp, Arabidopsis thaliana
agagcctaagcaactgt

SEQ ID NO: 30736 - DNA, 17 bp, Arabidopsis thaliana
agagcctagtgggcaac

SEQ ID NO: 30737 - DNA, 17 bp, Arabidopsis thaliana
agagcctcaacaaaatg

SEQ ID NO: 30738 - DNA, 17 bp, Arabidopsis thaliana
agagcctccatctccgc

SEQ ID NO: 30739 - DNA, 17 bp, Arabidopsis thaliana
agagcctccttgagtcc

SEQ ID NO: 30740 - DNA, 17 bp, Arabidopsis thaliana
agagcctcgatgactta

SEQ ID NO: 30741 - DNA, 17 bp, Arabidopsis thaliana
agagcctcgcagagacc

SEQ ID NO: 30742 - DNA, 17 bp, Arabidopsis thaliana
agagcctgaggaaaacc

SEQ ID NO: 30743 - DNA, 17 bp, Arabidopsis thaliana
agagcctggggatcgag

SEQ ID NO: 30744 - DNA, 17 bp, Arabidopsis thaliana
agagcctgtcgccaaag

SEQ ID NO: 30745 - DNA, 17 bp, Arabidopsis thaliana
agagccttccaatggag

SEQ ID NO: 30746 - DNA, 17 bp, Arabidopsis thaliana
agagcctttgccttttt

SEQ ID NO: 30747 - DNA, 17 bp, Arabidopsis thaliana
agagccttttgtcgcta

SEQ ID NO: 30748 - DNA, 17 bp, Arabidopsis thaliana
agagcgaaactggatag

SEQ ID NO: 30749 - DNA, 17 bp, Arabidopsis thaliana
agagcgaagatttctga

SEQ ID NO: 30750 - DNA, 17 bp, Arabidopsis thaliana
agagcgacctatacccg

SEQ ID NO: 30751 - DNA, 17 bp, Arabidopsis thaliana
agagcgacctccagagt

SEQ ID NO: 30752 - DNA, 17 bp, Arabidopsis thaliana
agagcgagaccgacccg

SEQ ID NO: 30753 - DNA, 17 bp, Arabidopsis thaliana
agagcgagactgtttgt

SEQ ID NO: 30754 - DNA, 17 bp, Arabidopsis thaliana
agagcgagattcccgtt

SEQ ID NO: 30755 - DNA, 17 bp, Arabidopsis thaliana
agagcgagttggtcctg

SEQ ID NO: 30756 - DNA, 17 bp, Arabidopsis thaliana
agagcgataagctaaaa

SEQ ID NO: 30757 - DNA, 17 bp, Arabidopsis thaliana
agagcgattacggttct

SEQ ID NO: 30758 - DNA, 17 bp, Arabidopsis thaliana
agagcgattacggtttt

SEQ ID NO: 30759 - DNA, 17 bp, Arabidopsis thaliana
agagcgattcgggggcg

SEQ ID NO: 30760 - DNA, 17 bp, Arabidopsis thaliana
agagcgattgcgtttca

SEQ ID NO: 30761 - DNA, 17 bp, Arabidopsis thaliana
agagcgatttcaagtct

SEQ ID NO: 30762 - DNA, 17 bp, Arabidopsis thaliana
agagcggaccaaatatg

SEQ ID NO: 30763 - DNA, 17 bp, Arabidopsis thaliana
agagcggactgcttaac

SEQ ID NO: 30764 - DNA, 17 bp, Arabidopsis thaliana
agagcggagcggacaga

SEQ ID NO: 30765 - DNA, 17 bp, Arabidopsis thaliana
agagcggatcaagcggt

SEQ ID NO: 30766 - DNA, 17 bp, Arabidopsis thaliana
agagcggatcggaatcc

SEQ ID NO: 30767 - DNA, 17 bp, Arabidopsis thaliana
agagcggattatttttt

SEQ ID NO: 30768 - DNA, 17 bp, Arabidopsis thaliana
agagcggcaagattctc

SEQ ID NO: 30769 - DNA, 17 bp, Arabidopsis thaliana
agagcggcactcctcta

SEQ ID NO: 30770 - DNA, 17 bp, Arabidopsis thaliana
agagcggccaccatcaa

SEQ ID NO: 30771 - DNA, 17 bp, Arabidopsis thaliana
agagcggcgatcctgag

SEQ ID NO: 30772 - DNA, 17 bp, Arabidopsis thaliana
agagcgggactaatgca

SEQ ID NO: 30773 - DNA, 17 bp, Arabidopsis thaliana
agagcgggagaacggtc

SEQ ID NO: 30774 - DNA, 17 bp, Arabidopsis thaliana
agagcgggtcgccgcgt

SEQ ID NO: 30775 - DNA, 17 bp, Arabidopsis thaliana
agagcgggttaagcagt

SEQ ID NO: 30776 - DNA, 17 bp, Arabidopsis thaliana
agagcggtgtaggcggt

SEQ ID NO: 30777 - DNA, 17 bp, Arabidopsis thaliana
agagcggttgcgggcgg

SEQ ID NO: 30778 - DNA, 17 bp, Arabidopsis thaliana
agagcgtaccggactac

SEQ ID NO: 30779 - DNA, 17 bp, Arabidopsis thaliana
agagcgtagagtctgtg

SEQ ID NO: 30780 - DNA, 17 bp, Arabidopsis thaliana
agagcgtatcgagcaga

SEQ ID NO: 30781 - DNA, 17 bp, Arabidopsis thaliana
agagcgtctccatcagt

SEQ ID NO: 30782 - DNA, 17 bp, Arabidopsis thaliana
agagcgtctcggcggat

SEQ ID NO: 30783 - DNA, 17 bp, Arabidopsis thaliana
agagcgtctttagtgac

SEQ ID NO: 30784 - DNA, 17 bp, Arabidopsis thaliana
agagcgtgccaagcagt

SEQ ID NO: 30785 - DNA, 17 bp, Arabidopsis thaliana
agagcgtgctgataacg

SEQ ID NO: 30786 - DNA, 17 bp, Arabidopsis thaliana
agagcgtgctgataagg

SEQ ID NO: 30787 - DNA, 17 bp, Arabidopsis thaliana
agagcgtgctgataatg

SEQ ID NO: 30788 - DNA, 17 bp, Arabidopsis thaliana
agagcgtgtccattgca

SEQ ID NO: 30789 - DNA, 17 bp, Arabidopsis thaliana
agagcgtgtttagagga

SEQ ID NO: 30790 - DNA, 17 bp, Arabidopsis thaliana
agagcgtgtttgcgact

SEQ ID NO: 30791 - DNA, 17 bp, Arabidopsis thaliana
agagcgtgttttgcgac

SEQ ID NO: 30792 - DNA, 17 bp, Arabidopsis thaliana
agagcgttaggtgaagt

SEQ ID NO: 30793 - DNA, 17 bp, Arabidopsis thaliana
agagcgttccaagaaag

SEQ ID NO: 30794 - DNA, 17 bp, Arabidopsis thaliana
agagcgtttcagcggat

SEQ ID NO: 30795 - DNA, 17 bp, Arabidopsis thaliana
agagctaaaagcccagt

SEQ ID NO: 30796 - DNA, 17 bp, Arabidopsis thaliana
agagctaaatggatgaa

SEQ ID NO: 30797 - DNA, 17 bp, Arabidopsis thaliana
agagctaacgacaatga

SEQ ID NO: 30798 - DNA, 17 bp, Arabidopsis thaliana
agagctaacgacacttg

SEQ ID NO: 30799 - DNA, 17 bp, Arabidopsis thaliana
agagctaagattgcctt

SEQ ID NO: 30800 - DNA, 17 bp, Arabidopsis thaliana
agagctaaggcgcttat

SEQ ID NO: 30801 - DNA, 17 bp, Arabidopsis thaliana
agagctaagttacatat

SEQ ID NO: 30802 - DNA, 17 bp, Arabidopsis thaliana
agagctaatacgtgcaa

SEQ ID NO: 30803 - DNA, 17 bp, Arabidopsis thaliana
agagctaatccggatag

SEQ ID NO: 30804 - DNA, 17 bp, Arabidopsis thaliana
agagctaatttcagatc

SEQ ID NO: 30805 - DNA, 17 bp, Arabidopsis thaliana
agagctacggttttgga

SEQ ID NO: 30806 - DNA, 17 bp, Arabidopsis thaliana
agagctactcttaccgg

SEQ ID NO: 30807 - DNA, 17 bp, Arabidopsis thaliana
agagctagaaacgcttg

SEQ ID NO: 30808 - DNA, 17 bp, Arabidopsis thaliana
agagctagcaaaccgta

SEQ ID NO: 30809 - DNA, 17 bp, Arabidopsis thaliana
agagctagcgatggagg

SEQ ID NO: 30810 - DNA, 17 bp, Arabidopsis thaliana
agagctagctgacattg

SEQ ID NO: 30811 - DNA, 17 bp, Arabidopsis thaliana
agagctagcttccatga

SEQ ID NO: 30812 - DNA, 17 bp, Arabidopsis thaliana
agagctagcttccatgg

SEQ ID NO: 30813 - DNA, 17 bp, Arabidopsis thaliana
agagctagcttcggtct

SEQ ID NO: 30814 - DNA, 17 bp, Arabidopsis thaliana
agagctagctttcatgg

SEQ ID NO: 30815 - DNA, 17 bp, Arabidopsis thaliana
agagctagggagaagga

SEQ ID NO: 30816 - DNA, 17 bp, Arabidopsis thaliana
agagctagtgcttgtgt

SEQ ID NO: 30817 - DNA, 17 bp, Arabidopsis thaliana
agagctatagctttttc

SEQ ID NO: 30818 - DNA, 17 bp, Arabidopsis thaliana
agagctatcctgaatct

SEQ ID NO: 30819 - DNA, 17 bp, Arabidopsis thaliana
agagctatgaacagctg

SEQ ID NO: 30820 - DNA, 17 bp, Arabidopsis thaliana
agagctatgtttacgag

SEQ ID NO: 30821 - DNA, 17 bp, Arabidopsis thaliana
agagctcaacaggatct

SEQ ID NO: 30822 - DNA, 17 bp, Arabidopsis thaliana
agagctcaagagaatca

SEQ ID NO: 30823 - DNA, 17 bp, Arabidopsis thaliana
agagctcacagcgatag

SEQ ID NO: 30824 - DNA, 17 bp, Arabidopsis thaliana
agagctcacatcgacgg

SEQ ID NO: 30825 - DNA, 17 bp, Arabidopsis thaliana
agagctcacattcgcaa

SEQ ID NO: 30826 - DNA, 17 bp, Arabidopsis thaliana
agagctcacctcttatg

SEQ ID NO: 30827 - DNA, 17 bp, Arabidopsis thaliana
agagctcacgagagtac

SEQ ID NO: 30828 - DNA, 17 bp, Arabidopsis thaliana
agagctcatctcgatcg

SEQ ID NO: 30829 - DNA, 17 bp, Arabidopsis thaliana
agagctccaggtttccc

SEQ ID NO: 30830 - DNA, 17 bp, Arabidopsis thaliana
agagctcccttcaatcc

SEQ ID NO: 30831 - DNA, 17 bp, Arabidopsis thaliana
agagctcccttcagtcc

SEQ ID NO: 30832 - DNA, 17 bp, Arabidopsis thaliana
agagctcccttcattcc

SEQ ID NO: 30833 - DNA, 17 bp, Arabidopsis thaliana
agagctccttacgtatg

SEQ ID NO: 30834 - DNA, 17 bp, Arabidopsis thaliana
agagctcgtatcagatc

SEQ ID NO: 30835 - DNA, 17 bp, Arabidopsis thaliana
agagctctgataccatg

SEQ ID NO: 30836 - DNA, 17 bp, Arabidopsis thaliana
agagctctgttgccatt

SEQ ID NO: 30837 - DNA, 17 bp, Arabidopsis thaliana
agagctctttcttgatt

SEQ ID NO: 30838 - DNA, 17 bp, Arabidopsis thaliana
agagctctttgacccgg

SEQ ID NO: 30839 - DNA, 17 bp, Arabidopsis thaliana
agagctctttgacctgg

SEQ ID NO: 30840 - DNA, 17 bp, Arabidopsis thaliana
agagctgaactggatct

SEQ ID NO: 30841 - DNA, 17 bp, Arabidopsis thaliana
agagctgaagactgtag

SEQ ID NO: 30842 - DNA, 17 bp, Arabidopsis thaliana
agagctgaagcacgcgc

SEQ ID NO: 30843 - DNA, 17 bp, Arabidopsis thaliana
agagctgactacctcgc

SEQ ID NO: 30844 - DNA, 17 bp, Arabidopsis thaliana
agagctgactacttagc

SEQ ID NO: 30845 - DNA, 17 bp, Arabidopsis thaliana
agagctgagacccaacg

SEQ ID NO: 30846 - DNA, 17 bp, Arabidopsis thaliana
agagctgagcgtatctg

SEQ ID NO: 30847 - DNA, 17 bp, Arabidopsis thaliana
agagctgaggacggcga

SEQ ID NO: 30848 - DNA, 17 bp, Arabidopsis thaliana
agagctgatcttgaaga

SEQ ID NO: 30849 - DNA, 17 bp, Arabidopsis thaliana
agagctgatgggttcga

SEQ ID NO: 30850 - DNA, 17 bp, Arabidopsis thaliana
agagctgcttgcggtac

SEQ ID NO: 30851 - DNA, 17 bp, Arabidopsis thaliana
agagctggacagggtgg

SEQ ID NO: 30852 - DNA, 17 bp, Arabidopsis thaliana
agagctgggcaaaatat

SEQ ID NO: 30853 - DNA, 17 bp, Arabidopsis thaliana
agagctgtaggggatcc

SEQ ID NO: 30854 - DNA, 17 bp, Arabidopsis thaliana
agagctgtcaaaatagt

SEQ ID NO: 30855 - DNA, 17 bp, Arabidopsis thaliana
agagctgtcaattgggc

SEQ ID NO: 30856 - DNA, 17 bp, Arabidopsis thaliana
agagctgtcacagcggg

SEQ ID NO: 30857 - DNA, 17 bp, Arabidopsis thaliana
agagctgtgacaatgtg

SEQ ID NO: 30858 - DNA, 17 bp, Arabidopsis thaliana
agagctgtgatcggaca

SEQ ID NO: 30859 - DNA, 17 bp, Arabidopsis thaliana
agagctgtgtgtcgccg

SEQ ID NO: 30860 - DNA, 17 bp, Arabidopsis thaliana
agagctgttgacccagt

SEQ ID NO: 30861 - DNA, 17 bp, Arabidopsis thaliana
agagctgttgcaggtct

SEQ ID NO: 30862 - DNA, 17 bp, Arabidopsis thaliana
agagctgttgggcgagc

SEQ ID NO: 30863 - DNA, 17 bp, Arabidopsis thaliana
agagcttaatagccctt

SEQ ID NO: 30864 - DNA, 17 bp, Arabidopsis thaliana
agagcttcagaagcagt

SEQ ID NO: 30865 - DNA, 17 bp, Arabidopsis thaliana
agagcttcatcaaactt

SEQ ID NO: 30866 - DNA, 17 bp, Arabidopsis thaliana
agagcttccaaagcaac

SEQ ID NO: 30867 - DNA, 17 bp, Arabidopsis thaliana
agagcttccctgagtcc

SEQ ID NO: 30868 - DNA, 17 bp, Arabidopsis thaliana
agagcttccttcagtcc

SEQ ID NO: 30869 - DNA, 17 bp, Arabidopsis thaliana
agagcttccttgactcc

SEQ ID NO: 30870 - DNA, 17 bp, Arabidopsis thaliana
agagcttccttgagtcc

SEQ ID NO: 30871 - DNA, 17 bp, Arabidopsis thaliana
agagcttccttgagtct

SEQ ID NO: 30872 - DNA, 17 bp, Arabidopsis thaliana
agagcttccttgcgtcc

SEQ ID NO: 30873 - DNA, 17 bp, Arabidopsis thaliana
agagcttcgacttcttt

SEQ ID NO: 30874 - DNA, 17 bp, Arabidopsis thaliana
agagcttcgttgagtcc

SEQ ID NO: 30875 - DNA, 17 bp, Arabidopsis thaliana
agagcttcgtttagtct

SEQ ID NO: 30876 - DNA, 17 bp, Arabidopsis thaliana
agagcttctcagtgcaa

SEQ ID NO: 30877 - DNA, 17 bp, Arabidopsis thaliana
agagcttctctggctgc

SEQ ID NO: 30878 - DNA, 17 bp, Arabidopsis thaliana
agagcttctgagtccat

SEQ ID NO: 30879 - DNA, 17 bp, Arabidopsis thaliana
agagcttcttaccctgg

SEQ ID NO: 30880 - DNA, 17 bp, Arabidopsis thaliana
agagcttcttgagtcca

SEQ ID NO: 30881 - DNA, 17 bp, Arabidopsis thaliana
agagcttctttgagtcc

SEQ ID NO: 30882 - DNA, 17 bp, Arabidopsis thaliana
agagcttgcagagagaa

SEQ ID NO: 30883 - DNA, 17 bp, Arabidopsis thaliana
agagcttgccacctaaa

SEQ ID NO: 30884 - DNA, 17 bp, Arabidopsis thaliana
agagcttgggcgttttc

SEQ ID NO: 30885 - DNA, 17 bp, Arabidopsis thaliana
agagcttgtatgagacg

SEQ ID NO: 30886 - DNA, 17 bp, Arabidopsis thaliana
agagcttgtcactgacc

SEQ ID NO: 30887 - DNA, 17 bp, Arabidopsis thaliana
agagcttgtgagttctc

SEQ ID NO: 30888 - DNA, 17 bp, Arabidopsis thaliana
agagcttgtggctgtta

SEQ ID NO: 30889 - DNA, 17 bp, Arabidopsis thaliana
agagctttaccttggaa

SEQ ID NO: 30890 - DNA, 17 bp, Arabidopsis thaliana
agagctttagaccatct

SEQ ID NO: 30891 - DNA, 17 bp, Arabidopsis thaliana
agagctttcttcggtcc

SEQ ID NO: 30892 - DNA, 17 bp, Arabidopsis thaliana
agagctttcttctgtcc

SEQ ID NO: 30893 - DNA, 17 bp, Arabidopsis thaliana
agagctttcttgagtcc

SEQ ID NO: 30894 - DNA, 17 bp, Arabidopsis thaliana
agagctttgacttctgt

SEQ ID NO: 30895 - DNA, 17 bp, Arabidopsis thaliana
agagctttgagtccatt

SEQ ID NO: 30896 - DNA, 17 bp, Arabidopsis thaliana
agagctttggccgagtg

SEQ ID NO: 30897 - DNA, 17 bp, Arabidopsis thaliana
agagctttgtggaattc

SEQ ID NO: 30898 - DNA, 17 bp, Arabidopsis thaliana
agagctttgttccttag

SEQ ID NO: 30899 - DNA, 17 bp, Arabidopsis thaliana
agagcttttctcatctg

SEQ ID NO: 30900 - DNA, 17 bp, Arabidopsis thaliana
agagcttttctccccgt

SEQ ID NO: 30901 - DNA, 17 bp, Arabidopsis thaliana
agagcttttcttgattc

SEQ ID NO: 30902 - DNA, 17 bp, Arabidopsis thaliana
agagcttttgcgattat

SEQ ID NO: 30903 - DNA, 17 bp, Arabidopsis thaliana
agagcttttggattgga

SEQ ID NO: 30904 - DNA, 17 bp, Arabidopsis thaliana
agagctttttgatccgg

SEQ ID NO: 30905 - DNA, 17 bp, Arabidopsis thaliana
agagctttttttggatc

SEQ ID NO: 30906 - DNA, 17 bp, Arabidopsis thaliana
agaggaaatctccttga

SEQ ID NO: 30907 - DNA, 17 bp, Arabidopsis thaliana
agaggaaattcgccggc

SEQ ID NO: 30908 - DNA, 17 bp, Arabidopsis thaliana
agaggaaattcgtcggc

SEQ ID NO: 30909 - DNA, 17 bp, Arabidopsis thaliana
agaggaaccgttgattc

SEQ ID NO: 30910 - DNA, 17 bp, Arabidopsis thaliana
agaggaagcagcaatct

SEQ ID NO: 30911 - DNA, 17 bp, Arabidopsis thaliana
agaggaagcatctgact

SEQ ID NO: 30912 - DNA, 17 bp, Arabidopsis thaliana
agaggaagccttttggg

SEQ ID NO: 30913 - DNA, 17 bp, Arabidopsis thaliana
agaggaagcgggaaagt

SEQ ID NO: 30914 - DNA, 17 bp, Arabidopsis thaliana
agaggaaggcggatacc

SEQ ID NO: 30915 - DNA, 17 bp, Arabidopsis thaliana
agaggaaggcgggtacc

SEQ ID NO: 30916 - DNA, 17 bp, Arabidopsis thaliana
agaggaagtcaccccga

SEQ ID NO: 30917 - DNA, 17 bp, Arabidopsis thaliana
agaggaatacagcaagt

SEQ ID NO: 30918 - DNA, 17 bp, Arabidopsis thaliana
agaggaatgtaccatat

SEQ ID NO: 30919 - DNA, 17 bp, Arabidopsis thaliana
agaggaattgtcgctaa

SEQ ID NO: 30920 - DNA, 17 bp, Arabidopsis thaliana
agaggacaccacaggga

SEQ ID NO: 30921 - DNA, 17 bp, Arabidopsis thaliana
agaggaccaaatcgccg

SEQ ID NO: 30922 - DNA, 17 bp, Arabidopsis thaliana
agaggaccactgaattc

SEQ ID NO: 30923 - DNA, 17 bp, Arabidopsis thaliana
agaggaccagattcgag

SEQ ID NO: 30924 - DNA, 17 bp, Arabidopsis thaliana
agaggaccagggtagcc

SEQ ID NO: 30925 - DNA, 17 bp, Arabidopsis thaliana
agaggaccgccatccgc

SEQ ID NO: 30926 - DNA, 17 bp, Arabidopsis thaliana
agaggaccgtagtcgct

SEQ ID NO: 30927 - DNA, 17 bp, Arabidopsis thaliana
agaggacgatttgccgt

SEQ ID NO: 30928 - DNA, 17 bp, Arabidopsis thaliana
agaggacgcaatgttca

SEQ ID NO: 30929 - DNA, 17 bp, Arabidopsis thaliana
agaggacgggttggcga

SEQ ID NO: 30930 - DNA, 17 bp, Arabidopsis thaliana
agaggacgggttggcgg

SEQ ID NO: 30931 - DNA, 17 bp, Arabidopsis thaliana
agaggacgggtttcgag

SEQ ID NO: 30932 - DNA, 17 bp, Arabidopsis thaliana
agaggacgggtttggca

SEQ ID NO: 30933 - DNA, 17 bp, Arabidopsis thaliana
agaggacttgcccatgt

SEQ ID NO: 30934 - DNA, 17 bp, Arabidopsis thaliana
agaggagaagaaccaat

SEQ ID NO: 30935 - DNA, 17 bp, Arabidopsis thaliana
agaggagagagatccgg

SEQ ID NO: 30936 - DNA, 17 bp, Arabidopsis thaliana
agaggagagctgaagaa

SEQ ID NO: 30937 - DNA, 17 bp, Arabidopsis thaliana
agaggagagtggagaga

SEQ ID NO: 30938 - DNA, 17 bp, Arabidopsis thaliana
agaggagatattcgcgg

SEQ ID NO: 30939 - DNA, 17 bp, Arabidopsis thaliana
agaggagcactatgcgt

SEQ ID NO: 30940 - DNA, 17 bp, Arabidopsis thaliana
agaggagcctccaccga

SEQ ID NO: 30941 - DNA, 17 bp, Arabidopsis thaliana
agaggagcctgtgacgg

SEQ ID NO: 30942 - DNA, 17 bp, Arabidopsis thaliana
agaggagcggactcggg

SEQ ID NO: 30943 - DNA, 17 bp, Arabidopsis thaliana
agaggagctttgacgac

SEQ ID NO: 30944 - DNA, 17 bp, Arabidopsis thaliana
agaggaggccgtcgggt

SEQ ID NO: 30945 - DNA, 17 bp, Arabidopsis thaliana
agaggagggctagtgct

SEQ ID NO: 30946 - DNA, 17 bp, Arabidopsis thaliana
agaggaggttctgtcga

SEQ ID NO: 30947 - DNA, 17 bp, Arabidopsis thaliana
agaggagtcgtcacttg

SEQ ID NO: 30948 - DNA, 17 bp, Arabidopsis thaliana
agaggagtctcagtctc

SEQ ID NO: 30949 - DNA, 17 bp, Arabidopsis thaliana
agaggagttgtcgctgt

SEQ ID NO: 30950 - DNA, 17 bp, Arabidopsis thaliana
agaggataaggttgcgg

SEQ ID NO: 30951 - DNA, 17 bp, Arabidopsis thaliana
agaggatacaaacggga

SEQ ID NO: 30952 - DNA, 17 bp, Arabidopsis thaliana
agaggataccttctgtt

SEQ ID NO: 30953 - DNA, 17 bp, Arabidopsis thaliana
agaggatacgttattgg

SEQ ID NO: 30954 - DNA, 17 bp, Arabidopsis thaliana
agaggatagtcaggcca

SEQ ID NO: 30955 - DNA, 17 bp, Arabidopsis thaliana
agaggatagttaggcca

SEQ ID NO: 30956 - DNA, 17 bp, Arabidopsis thaliana
agaggatagttgatacg

SEQ ID NO: 30957 - DNA, 17 bp, Arabidopsis thaliana
agaggatagttgttacg

SEQ ID NO: 30958 - DNA, 17 bp, Arabidopsis thaliana
agaggatccgtgatgac

SEQ ID NO: 30959 - DNA, 17 bp, Arabidopsis thaliana
agaggatcgaacccagg

SEQ ID NO: 30960 - DNA, 17 bp, Arabidopsis thaliana
agaggatcgattactac

SEQ ID NO: 30961 - DNA, 17 bp, Arabidopsis thaliana
agaggatctaattttgg

SEQ ID NO: 30962 - DNA, 17 bp, Arabidopsis thaliana
agaggatctaatttttg

SEQ ID NO: 30963 - DNA, 17 bp, Arabidopsis thaliana
agaggatctccgagtac

SEQ ID NO: 30964 - DNA, 17 bp, Arabidopsis thaliana
agaggatctgccacctg

SEQ ID NO: 30965 - DNA, 17 bp, Arabidopsis thaliana
agaggatcttccatctg

SEQ ID NO: 30966 - DNA, 17 bp, Arabidopsis thaliana
agaggatcttgccctgg

SEQ ID NO: 30967 - DNA, 17 bp, Arabidopsis thaliana
agaggatgacgaccttc

SEQ ID NO: 30968 - DNA, 17 bp, Arabidopsis thaliana
agaggatgacggaatgc

SEQ ID NO: 30969 - DNA, 17 bp, Arabidopsis thaliana
agaggatgacgtcgccg

SEQ ID NO: 30970 - DNA, 17 bp, Arabidopsis thaliana
agaggatgatcagccac

SEQ ID NO: 30971 - DNA, 17 bp, Arabidopsis thaliana
agaggatgatgtcgccg

SEQ ID NO: 30972 - DNA, 17 bp, Arabidopsis thaliana
agaggatgattctgccg

SEQ ID NO: 30973 - DNA, 17 bp, Arabidopsis thaliana
agaggatgattggttgg

SEQ ID NO: 30974 - DNA, 17 bp, Arabidopsis thaliana
agaggatggaaagcatg

SEQ ID NO: 30975 - DNA, 17 bp, Arabidopsis thaliana
agaggatgtacaggctt

SEQ ID NO: 30976 - DNA, 17 bp, Arabidopsis thaliana
agaggatgtcaaccaga

SEQ ID NO: 30977 - DNA, 17 bp, Arabidopsis thaliana
agaggatgtgttgcgat

SEQ ID NO: 30978 - DNA, 17 bp, Arabidopsis thaliana
agaggattaaccttctc

SEQ ID NO: 30979 - DNA, 17 bp, Arabidopsis thaliana
agaggattacggaattc

SEQ ID NO: 30980 - DNA, 17 bp, Arabidopsis thaliana
agaggattacgggcttc

SEQ ID NO: 30981 - DNA, 17 bp, Arabidopsis thaliana
agaggattagatggtat

SEQ ID NO: 30982 - DNA, 17 bp, Arabidopsis thaliana
agaggattatgctgagt

SEQ ID NO: 30983 - DNA, 17 bp, Arabidopsis thaliana
agaggattctccactgt

SEQ ID NO: 30984 - DNA, 17 bp, Arabidopsis thaliana
agaggattgctacctta

SEQ ID NO: 30985 - DNA, 17 bp, Arabidopsis thaliana
agaggattggcgttgag

SEQ ID NO: 30986 - DNA, 17 bp, Arabidopsis thaliana
agaggattttccgtcaa

SEQ ID NO: 30987 - DNA, 17 bp, Arabidopsis thaliana
agaggcaaaagactgtg

SEQ ID NO: 30988 - DNA, 17 bp, Arabidopsis thaliana
agaggcaaagtgggctg

SEQ ID NO: 30989 - DNA, 17 bp, Arabidopsis thaliana
agaggcaatccggagaa

SEQ ID NO: 30990 - DNA, 17 bp, Arabidopsis thaliana
agaggcaatcgtttggt

SEQ ID NO: 30991 - DNA, 17 bp, Arabidopsis thaliana
agaggcacacgtcagta

SEQ ID NO: 30992 - DNA, 17 bp, Arabidopsis thaliana
agaggcacagctgactc

SEQ ID NO: 30993 - DNA, 17 bp, Arabidopsis thaliana
agaggcacagggttcgt

SEQ ID NO: 30994 - DNA, 17 bp, Arabidopsis thaliana
agaggcacggggttcgg

SEQ ID NO: 30995 - DNA, 17 bp, Arabidopsis thaliana
agaggcacgtctgcctg

SEQ ID NO: 30996 - DNA, 17 bp, Arabidopsis thaliana
agaggcagattagggtt

SEQ ID NO: 30997 - DNA, 17 bp, Arabidopsis thaliana
agaggcagccaccatcc

SEQ ID NO: 30998 - DNA, 17 bp, Arabidopsis thaliana
agaggcagcggttgttt

SEQ ID NO: 30999 - DNA, 17 bp, Arabidopsis thaliana
agaggcaggatcttttc

SEQ ID NO: 31000 - DNA, 17 bp, Arabidopsis thaliana
agaggcagtcgctgcaa

SEQ ID NO: 31001 - DNA, 17 bp, Arabidopsis thaliana
agaggcagtctcctttg

SEQ ID NO: 31002 - DNA, 17 bp, Arabidopsis thaliana
agaggcattgtactcca

SEQ ID NO: 31003 - DNA, 17 bp, Arabidopsis thaliana
agaggcattgtgctcca

SEQ ID NO: 31004 - DNA, 17 bp, Arabidopsis thaliana
agaggcgaaaccctcac

SEQ ID NO: 31005 - DNA, 17 bp, Arabidopsis thaliana
agaggcgaccaggtagt

SEQ ID NO: 31006 - DNA, 17 bp, Arabidopsis thaliana
agaggcgacggatctga

SEQ ID NO: 31007 - DNA, 17 bp, Arabidopsis thaliana
agaggcgagaccgacac

SEQ ID NO: 31008 - DNA, 17 bp, Arabidopsis thaliana
agaggcgagttccttgg

SEQ ID NO: 31009 - DNA, 17 bp, Arabidopsis thaliana
agaggcgatgggagcgg

SEQ ID NO: 31010 - DNA, 17 bp, Arabidopsis thaliana
agaggcgcaatagaacg

SEQ ID NO: 31011 - DNA, 17 bp, Arabidopsis thaliana
agaggcgcccgttcgca

SEQ ID NO: 31012 - DNA, 17 bp, Arabidopsis thaliana
agaggcgctcgaccgta

SEQ ID NO: 31013 - DNA, 17 bp, Arabidopsis thaliana
agaggcggaacccacac

SEQ ID NO: 31014 - DNA, 17 bp, Arabidopsis thaliana
agaggcggaggaggcag

SEQ ID NO: 31015 - DNA, 17 bp, Arabidopsis thaliana
agaggcggcgaagagag

SEQ ID NO: 31016 - DNA, 17 bp, Arabidopsis thaliana
agaggcgggacccacac

SEQ ID NO: 31017 - DNA, 17 bp, Arabidopsis thaliana
agaggcgggacccacat

SEQ ID NO: 31018 - DNA, 17 bp, Arabidopsis thaliana
agaggcgggactcacac

SEQ ID NO: 31019 - DNA, 17 bp, Arabidopsis thaliana
agaggcgggatccacac

SEQ ID NO: 31020 - DNA, 17 bp, Arabidopsis thaliana
agaggcgggatccaggt

SEQ ID NO: 31021 - DNA, 17 bp, Arabidopsis thaliana
agaggcggttgcggttg

SEQ ID NO: 31022 - DNA, 17 bp, Arabidopsis thaliana
agaggcgtcgtctgtcg

SEQ ID NO: 31023 - DNA, 17 bp, Arabidopsis thaliana
agaggcgttgcgtctat

SEQ ID NO: 31024 - DNA, 17 bp, Arabidopsis thaliana
agaggctaaagtttttt

SEQ ID NO: 31025 - DNA, 17 bp, Arabidopsis thaliana
agaggctaagagtttgg

SEQ ID NO: 31026 - DNA, 17 bp, Arabidopsis thaliana
agaggctcactcggagg

SEQ ID NO: 31027 - DNA, 17 bp, Arabidopsis thaliana
agaggctcagctgaatc

SEQ ID NO: 31028 - DNA, 17 bp, Arabidopsis thaliana
agaggctcaggtctcca

SEQ ID NO: 31029 - DNA, 17 bp, Arabidopsis thaliana
agaggctcggtaaaggg

SEQ ID NO: 31030 - DNA, 17 bp, Arabidopsis thaliana
agaggctctaacccaga

SEQ ID NO: 31031 - DNA, 17 bp, Arabidopsis thaliana
agaggctctctgtctct

SEQ ID NO: 31032 - DNA, 17 bp, Arabidopsis thaliana
agaggctctgatcgtag

SEQ ID NO: 31033 - DNA, 17 bp, Arabidopsis thaliana
agaggctctgcagttgc

SEQ ID NO: 31034 - DNA, 17 bp, Arabidopsis thaliana
agaggctctgtctggtg

SEQ ID NO: 31035 - DNA, 17 bp, Arabidopsis thaliana
agaggctgaaccgcttg

SEQ ID NO: 31036 - DNA, 17 bp, Arabidopsis thaliana
agaggctgatgttgtga

SEQ ID NO: 31037 - DNA, 17 bp, Arabidopsis thaliana
agaggctgctccaatgg

SEQ ID NO: 31038 - DNA, 17 bp, Arabidopsis thaliana
agaggctgctccatttg

SEQ ID NO: 31039 - DNA, 17 bp, Arabidopsis thaliana
agaggctgcttctgaca

SEQ ID NO: 31040 - DNA, 17 bp, Arabidopsis thaliana
agaggctgtaacctaga

SEQ ID NO: 31041 - DNA, 17 bp, Arabidopsis thaliana
agaggctgtcttcaggt

SEQ ID NO: 31042 - DNA, 17 bp, Arabidopsis thaliana
agaggctgtgggaaacg

SEQ ID NO: 31043 - DNA, 17 bp, Arabidopsis thaliana
agaggctgttagggatt

SEQ ID NO: 31044 - DNA, 17 bp, Arabidopsis thaliana
agaggcttcttctgatg

SEQ ID NO: 31045 - DNA, 17 bp, Arabidopsis thaliana
agaggcttgatttgatt

SEQ ID NO: 31046 - DNA, 17 bp, Arabidopsis thaliana
agaggcttgtcccttcc

SEQ ID NO: 31047 - DNA, 17 bp, Arabidopsis thaliana
agaggctttctccattc

SEQ ID NO: 31048 - DNA, 17 bp, Arabidopsis thaliana
agagggaaaaccaactg

SEQ ID NO: 31049 - DNA, 17 bp, Arabidopsis thaliana
agagggaaacagcccgg

SEQ ID NO: 31050 - DNA, 17 bp, Arabidopsis thaliana
agagggaagcatttgca

SEQ ID NO: 31051 - DNA, 17 bp, Arabidopsis thaliana
agagggaattggccgga

SEQ ID NO: 31052 - DNA, 17 bp, Arabidopsis thaliana
agagggacattatttgc

SEQ ID NO: 31053 - DNA, 17 bp, Arabidopsis thaliana
agagggacgatcgctag

SEQ ID NO: 31054 - DNA, 17 bp, Arabidopsis thaliana
agagggactaaggagca

SEQ ID NO: 31055 - DNA, 17 bp, Arabidopsis thaliana
agagggactatggccgt

SEQ ID NO: 31056 - DNA, 17 bp, Arabidopsis thaliana
agagggagcctgagaaa

SEQ ID NO: 31057 - DNA, 17 bp, Arabidopsis thaliana
agagggagtccgtttac

SEQ ID NO: 31058 - DNA, 17 bp, Arabidopsis thaliana
agagggatggagctcct

SEQ ID NO: 31059 - DNA, 17 bp, Arabidopsis thaliana
agagggatgtgcttgtt

SEQ ID NO: 31060 - DNA, 17 bp, Arabidopsis thaliana
agagggattccaccaac

SEQ ID NO: 31061 - DNA, 17 bp, Arabidopsis thaliana
agagggcagcagtcagt

SEQ ID NO: 31062 - DNA, 17 bp, Arabidopsis thaliana
agagggcattgacgagg

SEQ ID NO: 31063 - DNA, 17 bp, Arabidopsis thaliana
agagggccataggttcg

SEQ ID NO: 31064 - DNA, 17 bp, Arabidopsis thaliana
agagggcgtgggttcat

SEQ ID NO: 31065 - DNA, 17 bp, Arabidopsis thaliana
agagggctgggctcggg

SEQ ID NO: 31066 - DNA, 17 bp, Arabidopsis thaliana
agaggggtatcgattga

SEQ ID NO: 31067 - DNA, 17 bp, Arabidopsis thaliana
agaggggtcaactaagc

SEQ ID NO: 31068 - DNA, 17 bp, Arabidopsis thaliana
agaggggtccagaacct

SEQ ID NO: 31069 - DNA, 17 bp, Arabidopsis thaliana
agagggtaagacagtca

SEQ ID NO: 31070 - DNA, 17 bp, Arabidopsis thaliana
agagggtagtcaggcca

SEQ ID NO: 31071 - DNA, 17 bp, Arabidopsis thaliana
agagggtagtcaggccg

SEQ ID NO: 31072 - DNA, 17 bp, Arabidopsis thaliana
agagggtctacccaaag

SEQ ID NO: 31073 - DNA, 17 bp, Arabidopsis thaliana
agagggtgagagccccg

SEQ ID NO: 31074 - DNA, 17 bp, Arabidopsis thaliana
agagggtgcacatgccg

SEQ ID NO: 31075 - DNA, 17 bp, Arabidopsis thaliana
agagggtgcgttgtcaa

SEQ ID NO: 31076 - DNA, 17 bp, Arabidopsis thaliana
agagggtgtctctccac

SEQ ID NO: 31077 - DNA, 17 bp, Arabidopsis thaliana
agagggtgtgtggatca

SEQ ID NO: 31078 - DNA, 17 bp, Arabidopsis thaliana
agagggttttgggattg

SEQ ID NO: 31079 - DNA, 17 bp, Arabidopsis thaliana
agaggtaaaccacgttt

SEQ ID NO: 31080 - DNA, 17 bp, Arabidopsis thaliana
agaggtatcgtctgtcg

SEQ ID NO: 31081 - DNA, 17 bp, Arabidopsis thaliana
agaggtcaccggctcga

SEQ ID NO: 31082 - DNA, 17 bp, Arabidopsis thaliana
agaggtcagttgggact

SEQ ID NO: 31083 - DNA, 17 bp, Arabidopsis thaliana
agaggtcccttctcttg

SEQ ID NO: 31084 - DNA, 17 bp, Arabidopsis thaliana
agaggtccttaggtggt

SEQ ID NO: 31085 - DNA, 17 bp, Arabidopsis thaliana
agaggtcgagtaccccc

SEQ ID NO: 31086 - DNA, 17 bp, Arabidopsis thaliana
agaggtcgagtagaatg

SEQ ID NO: 31087 - DNA, 17 bp, Arabidopsis thaliana
agaggtcgccgattcga

SEQ ID NO: 31088 - DNA, 17 bp, Arabidopsis thaliana
agaggtcgccggttcga

SEQ ID NO: 31089 - DNA, 17 bp, Arabidopsis thaliana
agaggtcgccgtttcta

SEQ ID NO: 31090 - DNA, 17 bp, Arabidopsis thaliana
agaggtcgccgtttctc

SEQ ID NO: 31091 - DNA, 17 bp, Arabidopsis thaliana
agaggtcgtcgaccagc

SEQ ID NO: 31092 - DNA, 17 bp, Arabidopsis thaliana
agaggtcgtcggttcga

SEQ ID NO: 31093 - DNA, 17 bp, Arabidopsis thaliana
agaggtctcatttctca

SEQ ID NO: 31094 - DNA, 17 bp, Arabidopsis thaliana
agaggtctctcaggttg

SEQ ID NO: 31095 - DNA, 17 bp, Arabidopsis thaliana
agaggtctctggttcga

SEQ ID NO: 31096 - DNA, 17 bp, Arabidopsis thaliana
agaggtcttcatcctcg

SEQ ID NO: 31097 - DNA, 17 bp, Arabidopsis thaliana
agaggtgaccattagaa

SEQ ID NO: 31098 - DNA, 17 bp, Arabidopsis thaliana
agaggtgaccattggag

SEQ ID NO: 31099 - DNA, 17 bp, Arabidopsis thaliana
agaggtgaccatttgaa

SEQ ID NO: 31100 - DNA, 17 bp, Arabidopsis thaliana
agaggtgccatctggag

SEQ ID NO: 31101 - DNA, 17 bp, Arabidopsis thaliana
agaggtgccgcgtggcc

SEQ ID NO: 31102 - DNA, 17 bp, Arabidopsis thaliana
agaggtggatagataga

SEQ ID NO: 31103 - DNA, 17 bp, Arabidopsis thaliana
agaggtgtcgtctatcg

SEQ ID NO: 31104 - DNA, 17 bp, Arabidopsis thaliana
agaggtgtctcggccga

SEQ ID NO: 31105 - DNA, 17 bp, Arabidopsis thaliana
agaggtgttgtgttcca

SEQ ID NO: 31106 - DNA, 17 bp, Arabidopsis thaliana
agaggttacaggtgctg

SEQ ID NO: 31107 - DNA, 17 bp, Arabidopsis thaliana
agaggttacttgatggg

SEQ ID NO: 31108 - DNA, 17 bp, Arabidopsis thaliana
agaggttagtccgttca

SEQ ID NO: 31109 - DNA, 17 bp, Arabidopsis thaliana
agaggttagtccgttcg

SEQ ID NO: 31110 - DNA, 17 bp, Arabidopsis thaliana
agaggttcccccctctc

SEQ ID NO: 31111 - DNA, 17 bp, Arabidopsis thaliana
agaggttccccctctct

SEQ ID NO: 31112 - DNA, 17 bp, Arabidopsis thaliana
agaggttccgtgttttg

SEQ ID NO: 31113 - DNA, 17 bp, Arabidopsis thaliana
agaggttcgaatccttc

SEQ ID NO: 31114 - DNA, 17 bp, Arabidopsis thaliana
agaggttcgacctctct

SEQ ID NO: 31115 - DNA, 17 bp, Arabidopsis thaliana
agaggttcgcccccttt

SEQ ID NO: 31116 - DNA, 17 bp, Arabidopsis thaliana
agaggttctgaggcgaa

SEQ ID NO: 31117 - DNA, 17 bp, Arabidopsis thaliana
agaggttctgggccaaa

SEQ ID NO: 31118 - DNA, 17 bp, Arabidopsis thaliana
agaggttctgggccgat

SEQ ID NO: 31119 - DNA, 17 bp, Arabidopsis thaliana
agaggttgaaactgcag

SEQ ID NO: 31120 - DNA, 17 bp, Arabidopsis thaliana
agaggttgacgcagttt

SEQ ID NO: 31121 - DNA, 17 bp, Arabidopsis thaliana
agaggttgacgggatcc

SEQ ID NO: 31122 - DNA, 17 bp, Arabidopsis thaliana
agaggttgccgcgagtg

SEQ ID NO: 31123 - DNA, 17 bp, Arabidopsis thaliana
agaggttgccggttcga

SEQ ID NO: 31124 - DNA, 17 bp, Arabidopsis thaliana
agaggttgccggtttaa

SEQ ID NO: 31125 - DNA, 17 bp, Arabidopsis thaliana
agaggttgccggtttga

SEQ ID NO: 31126 - DNA, 17 bp, Arabidopsis thaliana
agaggttgcctgtgaag

SEQ ID NO: 31127 - DNA, 17 bp, Arabidopsis thaliana
agaggttggtttggcgg

SEQ ID NO: 31128 - DNA, 17 bp, Arabidopsis thaliana
agaggttgtatcctgag

SEQ ID NO: 31129 - DNA, 17 bp, Arabidopsis thaliana
agaggttgtatcctggg

SEQ ID NO: 31130 - DNA, 17 bp, Arabidopsis thaliana
agaggttgtcggtttga

SEQ ID NO: 31131 - DNA, 17 bp, Arabidopsis thaliana
agaggttgttggtcagg

SEQ ID NO: 31132 - DNA, 17 bp, Arabidopsis thaliana
agaggttgttggttcga

SEQ ID NO: 31133 - DNA, 17 bp, Arabidopsis thaliana
agaggtttcggcccaga

SEQ ID NO: 31134 - DNA, 17 bp, Arabidopsis thaliana
agaggtttctccggcga

SEQ ID NO: 31135 - DNA, 17 bp, Arabidopsis thaliana
agaggtttgtctaagtg

SEQ ID NO: 31136 - DNA, 17 bp, Arabidopsis thaliana
agaggttttgggagtta

SEQ ID NO: 31137 - DNA, 17 bp, Arabidopsis thaliana
agaggttttgtgtacgg

SEQ ID NO: 31138 - DNA, 17 bp, Arabidopsis thaliana
agagtaaaactcgtaat

SEQ ID NO: 31139 - DNA, 17 bp, Arabidopsis thaliana
agagtaacattgagact

SEQ ID NO: 31140 - DNA, 17 bp, Arabidopsis thaliana
agagtaacgtctatttt

SEQ ID NO: 31141 - DNA, 17 bp, Arabidopsis thaliana
agagtaagacgctgccg

SEQ ID NO: 31142 - DNA, 17 bp, Arabidopsis thaliana
agagtaagacggctact

SEQ ID NO: 31143 - DNA, 17 bp, Arabidopsis thaliana
agagtaagagtgtaagg

SEQ ID NO: 31144 - DNA, 17 bp, Arabidopsis thaliana
agagtaaggccctgttc

SEQ ID NO: 31145 - DNA, 17 bp, Arabidopsis thaliana
agagtaagttttgatgg

SEQ ID NO: 31146 - DNA, 17 bp, Arabidopsis thaliana
agagtaatgattcagtg

SEQ ID NO: 31147 - DNA, 17 bp, Arabidopsis thaliana
agagtaattctgtgggt

SEQ ID NO: 31148 - DNA, 17 bp, Arabidopsis thaliana
agagtacaagaaccaag

SEQ ID NO: 31149 - DNA, 17 bp, Arabidopsis thaliana
agagtacgagcgctatc

SEQ ID NO: 31150 - DNA, 17 bp, Arabidopsis thaliana
agagtactcagaataga

SEQ ID NO: 31151 - DNA, 17 bp, Arabidopsis thaliana
agagtactcagagtaga

SEQ ID NO: 31152 - DNA, 17 bp, Arabidopsis thaliana
agagtactttggctgaa

SEQ ID NO: 31153 - DNA, 17 bp, Arabidopsis thaliana
agagtagaaacctgcaa

SEQ ID NO: 31154 - DNA, 17 bp, Arabidopsis thaliana
agagtagaatcctcctt

SEQ ID NO: 31155 - DNA, 17 bp, Arabidopsis thaliana
agagtagagtacgcaac

SEQ ID NO: 31156 - DNA, 17 bp, Arabidopsis thaliana
agagtagcagtgttgaa

SEQ ID NO: 31157 - DNA, 17 bp, Arabidopsis thaliana
agagtagccattctcat

SEQ ID NO: 31158 - DNA, 17 bp, Arabidopsis thaliana
agagtagccccagcggt

SEQ ID NO: 31159 - DNA, 17 bp, Arabidopsis thaliana
agagtagcccttccatt

SEQ ID NO: 31160 - DNA, 17 bp, Arabidopsis thaliana
agagtagctagcctcct

SEQ ID NO: 31161 - DNA, 17 bp, Arabidopsis thaliana
agagtagctagcctcgt

SEQ ID NO: 31162 - DNA, 17 bp, Arabidopsis thaliana
agagtaggacaaatgct

SEQ ID NO: 31163 - DNA, 17 bp, Arabidopsis thaliana
agagtaggacactccac

SEQ ID NO: 31164 - DNA, 17 bp, Arabidopsis thaliana
agagtaggacgttgcca

SEQ ID NO: 31165 - DNA, 17 bp, Arabidopsis thaliana
agagtaggcgttcaggt

SEQ ID NO: 31166 - DNA, 17 bp, Arabidopsis thaliana
agagtagggcaaatgcc

SEQ ID NO: 31167 - DNA, 17 bp, Arabidopsis thaliana
agagtagggttttgtgt

SEQ ID NO: 31168 - DNA, 17 bp, Arabidopsis thaliana
agagtaggtgcatgtcg

SEQ ID NO: 31169 - DNA, 17 bp, Arabidopsis thaliana
agagtaggttcgcgatt

SEQ ID NO: 31170 - DNA, 17 bp, Arabidopsis thaliana
agagtagtactagaatg

SEQ ID NO: 31171 - DNA, 17 bp, Arabidopsis thaliana
agagtagtactaggatg

SEQ ID NO: 31172 - DNA, 17 bp, Arabidopsis thaliana
agagtataccgagggca

SEQ ID NO: 31173 - DNA, 17 bp, Arabidopsis thaliana
agagtatatccgacttc

SEQ ID NO: 31174 - DNA, 17 bp, Arabidopsis thaliana
agagtatcagtatgggc

SEQ ID NO: 31175 - DNA, 17 bp, Arabidopsis thaliana
agagtatcatcctgctg

SEQ ID NO: 31176 - DNA, 17 bp, Arabidopsis thaliana
agagtatccgcaggcga

SEQ ID NO: 31177 - DNA, 17 bp, Arabidopsis thaliana
agagtatcctcttgttg

SEQ ID NO: 31178 - DNA, 17 bp, Arabidopsis thaliana
agagtatcgattatccc

SEQ ID NO: 31179 - DNA, 17 bp, Arabidopsis thaliana
agagtatcggcagaacc

SEQ ID NO: 31180 - DNA, 17 bp, Arabidopsis thaliana
agagtatctcatggttt

SEQ ID NO: 31181 - DNA, 17 bp, Arabidopsis thaliana
agagtatctccaccaat

SEQ ID NO: 31182 - DNA, 17 bp, Arabidopsis thaliana
agagtatctccaccagt

SEQ ID NO: 31183 - DNA, 17 bp, Arabidopsis thaliana
agagtatctccctaaca

SEQ ID NO: 31184 - DNA, 17 bp, Arabidopsis thaliana
agagtatctccctaact

SEQ ID NO: 31185 - DNA, 17 bp, Arabidopsis thaliana
agagtatctctcaggtg

SEQ ID NO: 31186 - DNA, 17 bp, Arabidopsis thaliana
agagtatctctcaggtt

SEQ ID NO: 31187 - DNA, 17 bp, Arabidopsis thaliana
agagtatgctaccaatg

SEQ ID NO: 31188 - DNA, 17 bp, Arabidopsis thaliana
agagtatggtctgacgc

SEQ ID NO: 31189 - DNA, 17 bp, Arabidopsis thaliana
agagtattgcgagtttg

SEQ ID NO: 31190 - DNA, 17 bp, Arabidopsis thaliana
agagtattggacctttg

SEQ ID NO: 31191 - DNA, 17 bp, Arabidopsis thaliana
agagtcaaacctagggc

SEQ ID NO: 31192 - DNA, 17 bp, Arabidopsis thaliana
agagtcaaatgcagttg

SEQ ID NO: 31193 - DNA, 17 bp, Arabidopsis thaliana
agagtcaacattgccgg

SEQ ID NO: 31194 - DNA, 17 bp, Arabidopsis thaliana
agagtcaactctaagaa

SEQ ID NO: 31195 - DNA, 17 bp, Arabidopsis thaliana
agagtcaagttgacggg

SEQ ID NO: 31196 - DNA, 17 bp, Arabidopsis thaliana
agagtcaatccgggata

SEQ ID NO: 31197 - DNA, 17 bp, Arabidopsis thaliana
agagtcaatcgatcatt

SEQ ID NO: 31198 - DNA, 17 bp, Arabidopsis thaliana
agagtcaatttggtgaa

SEQ ID NO: 31199 - DNA, 17 bp, Arabidopsis thaliana
agagtcaccaaatttct

SEQ ID NO: 31200 - DNA, 17 bp, Arabidopsis thaliana
agagtcaccaacttgag

SEQ ID NO: 31201 - DNA, 17 bp, Arabidopsis thaliana
agagtcacctaccatgt

SEQ ID NO: 31202 - DNA, 17 bp, Arabidopsis thaliana
agagtcactcgtgctag

SEQ ID NO: 31203 - DNA, 17 bp, Arabidopsis thaliana
agagtcagatatggcca

SEQ ID NO: 31204 - DNA, 17 bp, Arabidopsis thaliana
agagtcagatgaacgta

SEQ ID NO: 31205 - DNA, 17 bp, Arabidopsis thaliana
agagtcaggcaaaagac

SEQ ID NO: 31206 - DNA, 17 bp, Arabidopsis thaliana
agagtcagggcggtcca

SEQ ID NO: 31207 - DNA, 17 bp, Arabidopsis thaliana
agagtcagggcggtcga

SEQ ID NO: 31208 - DNA, 17 bp, Arabidopsis thaliana
agagtcagttgtgcttc

SEQ ID NO: 31209 - DNA, 17 bp, Arabidopsis thaliana
agagtcatacaatggac

SEQ ID NO: 31210 - DNA, 17 bp, Arabidopsis thaliana
agagtcattcaggaacc

SEQ ID NO: 31211 - DNA, 17 bp, Arabidopsis thaliana
agagtcattcgggaacc

SEQ ID NO: 31212 - DNA, 17 bp, Arabidopsis thaliana
agagtcattctggcagc

SEQ ID NO: 31213 - DNA, 17 bp, Arabidopsis thaliana
agagtccacatttggct

SEQ ID NO: 31214 - DNA, 17 bp, Arabidopsis thaliana
agagtccagcgttggga

SEQ ID NO: 31215 - DNA, 17 bp, Arabidopsis thaliana
agagtccagcgttgggg

SEQ ID NO: 31216 - DNA, 17 bp, Arabidopsis thaliana
agagtccagtagccgaa

SEQ ID NO: 31217 - DNA, 17 bp, Arabidopsis thaliana
agagtccatctcgatcg

SEQ ID NO: 31218 - DNA, 17 bp, Arabidopsis thaliana
agagtccattctctaat

SEQ ID NO: 31219 - DNA, 17 bp, Arabidopsis thaliana
agagtcccagctattgc

SEQ ID NO: 31220 - DNA, 17 bp, Arabidopsis thaliana
agagtccgaatcacaca

SEQ ID NO: 31221 - DNA, 17 bp, Arabidopsis thaliana
agagtccgagtgtgatc

SEQ ID NO: 31222 - DNA, 17 bp, Arabidopsis thaliana
agagtccgctgccgtat

SEQ ID NO: 31223 - DNA, 17 bp, Arabidopsis thaliana
agagtccgctgctatgg

SEQ ID NO: 31224 - DNA, 17 bp, Arabidopsis thaliana
agagtccgtgtggtttt

SEQ ID NO: 31225 - DNA, 17 bp, Arabidopsis thaliana
agagtcctaagccacat

SEQ ID NO: 31226 - DNA, 17 bp, Arabidopsis thaliana
agagtcctacagcatgc

SEQ ID NO: 31227 - DNA, 17 bp, Arabidopsis thaliana
agagtcctcagcgacgg

SEQ ID NO: 31228 - DNA, 17 bp, Arabidopsis thaliana
agagtcctgatcaacaa

SEQ ID NO: 31229 - DNA, 17 bp, Arabidopsis thaliana
agagtcctttgtggttt

SEQ ID NO: 31230 - DNA, 17 bp, Arabidopsis thaliana
agagtcgacgttcgtac

SEQ ID NO: 31231 - DNA, 17 bp, Arabidopsis thaliana
agagtcgacttctttct

SEQ ID NO: 31232 - DNA, 17 bp, Arabidopsis thaliana
agagtcgatttagtacc

SEQ ID NO: 31233 - DNA, 17 bp, Arabidopsis thaliana
agagtcgcatcctgtag

SEQ ID NO: 31234 - DNA, 17 bp, Arabidopsis thaliana
agagtcgccaaccatgg

SEQ ID NO: 31235 - DNA, 17 bp, Arabidopsis thaliana
agagtcgcctagatcgt

SEQ ID NO: 31236 - DNA, 17 bp, Arabidopsis thaliana
agagtcgcctttcgaga

SEQ ID NO: 31237 - DNA, 17 bp, Arabidopsis thaliana
agagtcggagagttgtg

SEQ ID NO: 31238 - DNA, 17 bp, Arabidopsis thaliana
agagtcggatgttttgt

SEQ ID NO: 31239 - DNA, 17 bp, Arabidopsis thaliana
agagtcggctgtttcag

SEQ ID NO: 31240 - DNA, 17 bp, Arabidopsis thaliana
agagtcgggcctgatcc

SEQ ID NO: 31241 - DNA, 17 bp, Arabidopsis thaliana
agagtcggtaacccgtt

SEQ ID NO: 31242 - DNA, 17 bp, Arabidopsis thaliana
agagtcgtcgggggcca

SEQ ID NO: 31243 - DNA, 17 bp, Arabidopsis thaliana
agagtcgtgatgaagat

SEQ ID NO: 31244 - DNA, 17 bp, Arabidopsis thaliana
agagtcgttgcggcgat

SEQ ID NO: 31245 - DNA, 17 bp, Arabidopsis thaliana
agagtctaaatcatcga

SEQ ID NO: 31246 - DNA, 17 bp, Arabidopsis thaliana
agagtctaaccgtcttg

SEQ ID NO: 31247 - DNA, 17 bp, Arabidopsis thaliana
agagtctagcgggtttg

SEQ ID NO: 31248 - DNA, 17 bp, Arabidopsis thaliana
agagtctaggaagttct

SEQ ID NO: 31249 - DNA, 17 bp, Arabidopsis thaliana
agagtctaggatggatg

SEQ ID NO: 31250 - DNA, 17 bp, Arabidopsis thaliana
agagtctaggttttcct

SEQ ID NO: 31251 - DNA, 17 bp, Arabidopsis thaliana
agagtctatgtttccag

SEQ ID NO: 31252 - DNA, 17 bp, Arabidopsis thaliana
agagtctcaatctcaga

SEQ ID NO: 31253 - DNA, 17 bp, Arabidopsis thaliana
agagtctcactaccttc

SEQ ID NO: 31254 - DNA, 17 bp, Arabidopsis thaliana
agagtctccaacttgac

SEQ ID NO: 31255 - DNA, 17 bp, Arabidopsis thaliana
agagtctccgaccgctg

SEQ ID NO: 31256 - DNA, 17 bp, Arabidopsis thaliana
agagtctccgttattga

SEQ ID NO: 31257 - DNA, 17 bp, Arabidopsis thaliana
agagtctccttttcatt

SEQ ID NO: 31258 - DNA, 17 bp, Arabidopsis thaliana
agagtctcgttccgact

SEQ ID NO: 31259 - DNA, 17 bp, Arabidopsis thaliana
agagtctctactctcca

SEQ ID NO: 31260 - DNA, 17 bp, Arabidopsis thaliana
agagtctctccatctaa

SEQ ID NO: 31261 - DNA, 17 bp, Arabidopsis thaliana
agagtctctctgctgtg

SEQ ID NO: 31262 - DNA, 17 bp, Arabidopsis thaliana
agagtctctgttgcggt

SEQ ID NO: 31263 - DNA, 17 bp, Arabidopsis thaliana
agagtctgacgatctac

SEQ ID NO: 31264 - DNA, 17 bp, Arabidopsis thaliana
agagtctgattaagtga

SEQ ID NO: 31265 - DNA, 17 bp, Arabidopsis thaliana
agagtctgcctgggtgt

SEQ ID NO: 31266 - DNA, 17 bp, Arabidopsis thaliana
agagtctgcgtttttgc

SEQ ID NO: 31267 - DNA, 17 bp, Arabidopsis thaliana
agagtctggttgtcgta

SEQ ID NO: 31268 - DNA, 17 bp, Arabidopsis thaliana
agagtctgttctggatc

SEQ ID NO: 31269 - DNA, 17 bp, Arabidopsis thaliana
agagtctgttggtgcca

SEQ ID NO: 31270 - DNA, 17 bp, Arabidopsis thaliana
agagtcttcagttttct

SEQ ID NO: 31271 - DNA, 17 bp, Arabidopsis thaliana
agagtcttcatatcccc

SEQ ID NO: 31272 - DNA, 17 bp, Arabidopsis thaliana
agagtcttccaggaagt

SEQ ID NO: 31273 - DNA, 17 bp, Arabidopsis thaliana
agagtcttctccgcaaa

SEQ ID NO: 31274 - DNA, 17 bp, Arabidopsis thaliana
agagtcttctcgattcc

SEQ ID NO: 31275 - DNA, 17 bp, Arabidopsis thaliana
agagtcttctgcagttt

SEQ ID NO: 31276 - DNA, 17 bp, Arabidopsis thaliana
agagtcttctgtcagat

SEQ ID NO: 31277 - DNA, 17 bp, Arabidopsis thaliana
agagtcttgagcgtctg

SEQ ID NO: 31278 - DNA, 17 bp, Arabidopsis thaliana
agagtcttggccggctg

SEQ ID NO: 31279 - DNA, 17 bp, Arabidopsis thaliana
agagtcttgttttgttt

SEQ ID NO: 31280 - DNA, 17 bp, Arabidopsis thaliana
agagtctttggaagcat

SEQ ID NO: 31281 - DNA, 17 bp, Arabidopsis thaliana
agagtcttttcgcatat

SEQ ID NO: 31282 - DNA, 17 bp, Arabidopsis thaliana
agagtcttttggacctg

SEQ ID NO: 31283 - DNA, 17 bp, Arabidopsis thaliana
agagtgaaaaggagttt

SEQ ID NO: 31284 - DNA, 17 bp, Arabidopsis thaliana
agagtgaaccatttcgt

SEQ ID NO: 31285 - DNA, 17 bp, Arabidopsis thaliana
agagtgaaccgcttttt

SEQ ID NO: 31286 - DNA, 17 bp, Arabidopsis thaliana
agagtgaacggccgagt

SEQ ID NO: 31287 - DNA, 17 bp, Arabidopsis thaliana
agagtgaaggaacctgg

SEQ ID NO: 31288 - DNA, 17 bp, Arabidopsis thaliana
agagtgacaaaagcgct

SEQ ID NO: 31289 - DNA, 17 bp, Arabidopsis thaliana
agagtgacacccgtcgc

SEQ ID NO: 31290 - DNA, 17 bp, Arabidopsis thaliana
agagtgacatttcttca

SEQ ID NO: 31291 - DNA, 17 bp, Arabidopsis thaliana
agagtgactcgctgtta

SEQ ID NO: 31292 - DNA, 17 bp, Arabidopsis thaliana
agagtgactcgctgttc

SEQ ID NO: 31293 - DNA, 17 bp, Arabidopsis thaliana
agagtgactgtgactgc

SEQ ID NO: 31294 - DNA, 17 bp, Arabidopsis thaliana
agagtgacttaccctta

SEQ ID NO: 31295 - DNA, 17 bp, Arabidopsis thaliana
agagtgagacacctgaa

SEQ ID NO: 31296 - DNA, 17 bp, Arabidopsis thaliana
agagtgagctctatctg

SEQ ID NO: 31297 - DNA, 17 bp, Arabidopsis thaliana
agagtgagtctctcggt

SEQ ID NO: 31298 - DNA, 17 bp, Arabidopsis thaliana
agagtgataggccgcta

SEQ ID NO: 31299 - DNA, 17 bp, Arabidopsis thaliana
agagtgataggcgacta

SEQ ID NO: 31300 - DNA, 17 bp, Arabidopsis thaliana
agagtgatccagatctc

SEQ ID NO: 31301 - DNA, 17 bp, Arabidopsis thaliana
agagtgatcccaggaga

SEQ ID NO: 31302 - DNA, 17 bp, Arabidopsis thaliana
agagtgatgttacctct

SEQ ID NO: 31303 - DNA, 17 bp, Arabidopsis thaliana
agagtgatttgccctgg

SEQ ID NO: 31304 - DNA, 17 bp, Arabidopsis thaliana
agagtgcattaaatccg

SEQ ID NO: 31305 - DNA, 17 bp, Arabidopsis thaliana
agagtgcattggtcggc

SEQ ID NO: 31306 - DNA, 17 bp, Arabidopsis thaliana
agagtgccaaatatcgc

SEQ ID NO: 31307 - DNA, 17 bp, Arabidopsis thaliana
agagtgccaggttagct

SEQ ID NO: 31308 - DNA, 17 bp, Arabidopsis thaliana
agagtgccattttggtc

SEQ ID NO: 31309 - DNA, 17 bp, Arabidopsis thaliana
agagtgcgatgtttgcc

SEQ ID NO: 31310 - DNA, 17 bp, Arabidopsis thaliana
agagtgcgctaaatctg

SEQ ID NO: 31311 - DNA, 17 bp, Arabidopsis thaliana
agagtgcgtttcagacc

SEQ ID NO: 31312 - DNA, 17 bp, Arabidopsis thaliana
agagtgctaggctgatg

SEQ ID NO: 31313 - DNA, 17 bp, Arabidopsis thaliana
agagtgctcaaagcggc

SEQ ID NO: 31314 - DNA, 17 bp, Arabidopsis thaliana
agagtgctcaaggcggc

SEQ ID NO: 31315 - DNA, 17 bp, Arabidopsis thaliana
agagtgcttgcgtagat

SEQ ID NO: 31316 - DNA, 17 bp, Arabidopsis thaliana
agagtggaatatggcag

SEQ ID NO: 31317 - DNA, 17 bp, Arabidopsis thaliana
agagtggactcctcacc

SEQ ID NO: 31318 - DNA, 17 bp, Arabidopsis thaliana
agagtggacttaccccc

SEQ ID NO: 31319 - DNA, 17 bp, Arabidopsis thaliana
agagtggacttctttca

SEQ ID NO: 31320 - DNA, 17 bp, Arabidopsis thaliana
agagtggacttctttcc

SEQ ID NO: 31321 - DNA, 17 bp, Arabidopsis thaliana
agagtggacttttctcc

SEQ ID NO: 31322 - DNA, 17 bp, Arabidopsis thaliana
agagtggcaagttttct

SEQ ID NO: 31323 - DNA, 17 bp, Arabidopsis thaliana
agagtggccaaccttct

SEQ ID NO: 31324 - DNA, 17 bp, Arabidopsis thaliana
agagtggccacgtgtgc

SEQ ID NO: 31325 - DNA, 17 bp, Arabidopsis thaliana
agagtggccttgctgcc

SEQ ID NO: 31326 - DNA, 17 bp, Arabidopsis thaliana
agagtggctaagttgtc

SEQ ID NO: 31327 - DNA, 17 bp, Arabidopsis thaliana
agagtggctgacttgtg

SEQ ID NO: 31328 - DNA, 17 bp, Arabidopsis thaliana
agagtggcttgctccag

SEQ ID NO: 31329 - DNA, 17 bp, Arabidopsis thaliana
agagtgggctcatctcg

SEQ ID NO: 31330 - DNA, 17 bp, Arabidopsis thaliana
agagtggtctctcatct

SEQ ID NO: 31331 - DNA, 17 bp, Arabidopsis thaliana
agagtggtgtcgcggtc

SEQ ID NO: 31332 - DNA, 17 bp, Arabidopsis thaliana
agagtggttcgagttcg

SEQ ID NO: 31333 - DNA, 17 bp, Arabidopsis thaliana
agagtgtaagcaccgtt

SEQ ID NO: 31334 - DNA, 17 bp, Arabidopsis thaliana
agagtgtatgcgaaaga

SEQ ID NO: 31335 - DNA, 17 bp, Arabidopsis thaliana
agagtgtatgtgttagc

SEQ ID NO: 31336 - DNA, 17 bp, Arabidopsis thaliana
agagtgtattcacccgg

SEQ ID NO: 31337 - DNA, 17 bp, Arabidopsis thaliana
agagtgtcaaatgtcgc

SEQ ID NO: 31338 - DNA, 17 bp, Arabidopsis thaliana
agagtgtcaaatgtcgt

SEQ ID NO: 31339 - DNA, 17 bp, Arabidopsis thaliana
agagtgtcagacgggcg

SEQ ID NO: 31340 - DNA, 17 bp, Arabidopsis thaliana
agagtgtcgatcgacag

SEQ ID NO: 31341 - DNA, 17 bp, Arabidopsis thaliana
agagtgtctatgagact

SEQ ID NO: 31342 - DNA, 17 bp, Arabidopsis thaliana
agagtgtctcgataggg

SEQ ID NO: 31343 - DNA, 17 bp, Arabidopsis thaliana
agagtgtctgagcattt

SEQ ID NO: 31344 - DNA, 17 bp, Arabidopsis thaliana
agagtgtgagatttgtg

SEQ ID NO: 31345 - DNA, 17 bp, Arabidopsis thaliana
agagtgtgcattggtcg

SEQ ID NO: 31346 - DNA, 17 bp, Arabidopsis thaliana
agagtgtgctcatttcg

SEQ ID NO: 31347 - DNA, 17 bp, Arabidopsis thaliana
agagtgtggaccacgca

SEQ ID NO: 31348 - DNA, 17 bp, Arabidopsis thaliana
agagtgtggaccacgcg

SEQ ID NO: 31349 - DNA, 17 bp, Arabidopsis thaliana
agagtgtggacttccaa

SEQ ID NO: 31350 - DNA, 17 bp, Arabidopsis thaliana
agagtgttacgtttcga

SEQ ID NO: 31351 - DNA, 17 bp, Arabidopsis thaliana
agagtgttagccaactt

SEQ ID NO: 31352 - DNA, 17 bp, Arabidopsis thaliana
agagtgttagtgaggca

SEQ ID NO: 31353 - DNA, 17 bp, Arabidopsis thaliana
agagtgttcgcaggtgc

SEQ ID NO: 31354 - DNA, 17 bp, Arabidopsis thaliana
agagtgttctgacttat

SEQ ID NO: 31355 - DNA, 17 bp, Arabidopsis thaliana
agagtgttgccatagac

SEQ ID NO: 31356 - DNA, 17 bp, Arabidopsis thaliana
agagtgtttcgagccgc

SEQ ID NO: 31357 - DNA, 17 bp, Arabidopsis thaliana
agagtgtttctgagact

SEQ ID NO: 31358 - DNA, 17 bp, Arabidopsis thaliana
agagtgtttctgagatt

SEQ ID NO: 31359 - DNA, 17 bp, Arabidopsis thaliana
agagtgtttgttgaatc

SEQ ID NO: 31360 - DNA, 17 bp, Arabidopsis thaliana
agagttaaaacggccat

SEQ ID NO: 31361 - DNA, 17 bp, Arabidopsis thaliana
agagttaaaacggctat

SEQ ID NO: 31362 - DNA, 17 bp, Arabidopsis thaliana
agagttaaaatcaggcc

SEQ ID NO: 31363 - DNA, 17 bp, Arabidopsis thaliana
agagttaaaccgggtaa

SEQ ID NO: 31364 - DNA, 17 bp, Arabidopsis thaliana
agagttaaccggaatct

SEQ ID NO: 31365 - DNA, 17 bp, Arabidopsis thaliana
agagttaactttccgtt

SEQ ID NO: 31366 - DNA, 17 bp, Arabidopsis thaliana
agagttaaggtctgccg

SEQ ID NO: 31367 - DNA, 17 bp, Arabidopsis thaliana
agagttaagtttctcgg

SEQ ID NO: 31368 - DNA, 17 bp, Arabidopsis thaliana
agagttaatctacagtt

SEQ ID NO: 31369 - DNA, 17 bp, Arabidopsis thaliana
agagttaattcagaact

SEQ ID NO: 31370 - DNA, 17 bp, Arabidopsis thaliana
agagttacaaaggtgtt

SEQ ID NO: 31371 - DNA, 17 bp, Arabidopsis thaliana
agagttacaattctgcg

SEQ ID NO: 31372 - DNA, 17 bp, Arabidopsis thaliana
agagttacgtccacttt

SEQ ID NO: 31373 - DNA, 17 bp, Arabidopsis thaliana
agagttacttggagagg

SEQ ID NO: 31374 - DNA, 17 bp, Arabidopsis thaliana
agagttagacccaaatg

SEQ ID NO: 31375 - DNA, 17 bp, Arabidopsis thaliana
agagttagagatggatt

SEQ ID NO: 31376 - DNA, 17 bp, Arabidopsis thaliana
agagttagctagatgtt

SEQ ID NO: 31377 - DNA, 17 bp, Arabidopsis thaliana
agagttaggaccttgtc

SEQ ID NO: 31378 - DNA, 17 bp, Arabidopsis thaliana
agagttagtctgtgacg

SEQ ID NO: 31379 - DNA, 17 bp, Arabidopsis thaliana
agagttagttgggcttt

SEQ ID NO: 31380 - DNA, 17 bp, Arabidopsis thaliana
agagttatatcttttga

SEQ ID NO: 31381 - DNA, 17 bp, Arabidopsis thaliana
agagttatccaaaattc

SEQ ID NO: 31382 - DNA, 17 bp, Arabidopsis thaliana
agagttatcgagtgcca

SEQ ID NO: 31383 - DNA, 17 bp, Arabidopsis thaliana
agagttatctcgctctg

SEQ ID NO: 31384 - DNA, 17 bp, Arabidopsis thaliana
agagttatctgacacat

SEQ ID NO: 31385 - DNA, 17 bp, Arabidopsis thaliana
agagttatggtctacgg

SEQ ID NO: 31386 - DNA, 17 bp, Arabidopsis thaliana
agagttatttctctctg

SEQ ID NO: 31387 - DNA, 17 bp, Arabidopsis thaliana
agagttcaaacgagcca

SEQ ID NO: 31388 - DNA, 17 bp, Arabidopsis thaliana
agagttcaaatccagga

SEQ ID NO: 31389 - DNA, 17 bp, Arabidopsis thaliana
agagttcaactatgcct

SEQ ID NO: 31390 - DNA, 17 bp, Arabidopsis thaliana
agagttcaaggttaatt

SEQ ID NO: 31391 - DNA, 17 bp, Arabidopsis thaliana
agagttcacgattaatt

SEQ ID NO: 31392 - DNA, 17 bp, Arabidopsis thaliana
agagttcacggttaagt

SEQ ID NO: 31393 - DNA, 17 bp, Arabidopsis thaliana
agagttcacggttaata

SEQ ID NO: 31394 - DNA, 17 bp, Arabidopsis thaliana
agagttcacggttaatt

SEQ ID NO: 31395 - DNA, 17 bp, Arabidopsis thaliana
agagttcacggttagtt

SEQ ID NO: 31396 - DNA, 17 bp, Arabidopsis thaliana
agagttcactttccgtt

SEQ ID NO: 31397 - DNA, 17 bp, Arabidopsis thaliana
agagttcacttttcgtt

SEQ ID NO: 31398 - DNA, 17 bp, Arabidopsis thaliana
agagttcatccgctgga

SEQ ID NO: 31399 - DNA, 17 bp, Arabidopsis thaliana
agagttcatctggaact

SEQ ID NO: 31400 - DNA, 17 bp, Arabidopsis thaliana
agagttcatgcgcgtat

SEQ ID NO: 31401 - DNA, 17 bp, Arabidopsis thaliana
agagttcatgggttgac

SEQ ID NO: 31402 - DNA, 17 bp, Arabidopsis thaliana
agagttcatgggttgag

SEQ ID NO: 31403 - DNA, 17 bp, Arabidopsis thaliana
agagttccaagatttgc

SEQ ID NO: 31404 - DNA, 17 bp, Arabidopsis thaliana
agagttccacttgtgtc

SEQ ID NO: 31405 - DNA, 17 bp, Arabidopsis thaliana
agagttcccaatatgat

SEQ ID NO: 31406 - DNA, 17 bp, Arabidopsis thaliana
agagttccccatcttcc

SEQ ID NO: 31407 - DNA, 17 bp, Arabidopsis thaliana
agagttccgttgggggg

SEQ ID NO: 31408 - DNA, 17 bp, Arabidopsis thaliana
agagttccttacaggag

SEQ ID NO: 31409 - DNA, 17 bp, Arabidopsis thaliana
agagttccttctgatct

SEQ ID NO: 31410 - DNA, 17 bp, Arabidopsis thaliana
agagttcgaggaagtct

SEQ ID NO: 31411 - DNA, 17 bp, Arabidopsis thaliana
agagttcgatcctggct

SEQ ID NO: 31412 - DNA, 17 bp, Arabidopsis thaliana
agagttcgatctctcag

SEQ ID NO: 31413 - DNA, 17 bp, Arabidopsis thaliana
agagttcgcggtaagct

SEQ ID NO: 31414 - DNA, 17 bp, Arabidopsis thaliana
agagttcgctcgtaaac

SEQ ID NO: 31415 - DNA, 17 bp, Arabidopsis thaliana
agagttcgggcctctct

SEQ ID NO: 31416 - DNA, 17 bp, Arabidopsis thaliana
agagttcgtatctctca

SEQ ID NO: 31417 - DNA, 17 bp, Arabidopsis thaliana
agagttcgtgcctctct

SEQ ID NO: 31418 - DNA, 17 bp, Arabidopsis thaliana
agagttcgttccccaca

SEQ ID NO: 31419 - DNA, 17 bp, Arabidopsis thaliana
agagttctacaatcgcg

SEQ ID NO: 31420 - DNA, 17 bp, Arabidopsis thaliana
agagttctcatatttgc

SEQ ID NO: 31421 - DNA, 17 bp, Arabidopsis thaliana
agagttctcctctcagg

SEQ ID NO: 31422 - DNA, 17 bp, Arabidopsis thaliana
agagttctcggttgcta

SEQ ID NO: 31423 - DNA, 17 bp, Arabidopsis thaliana
agagttctctcaagata

SEQ ID NO: 31424 - DNA, 17 bp, Arabidopsis thaliana
agagttctctcaagatg

SEQ ID NO: 31425 - DNA, 17 bp, Arabidopsis thaliana
agagttctctcggaacg

SEQ ID NO: 31426 - DNA, 17 bp, Arabidopsis thaliana
agagttctgaattctgg

SEQ ID NO: 31427 - DNA, 17 bp, Arabidopsis thaliana
agagttcttaccgattg

SEQ ID NO: 31428 - DNA, 17 bp, Arabidopsis thaliana
agagttctttcaaggtt

SEQ ID NO: 31429 - DNA, 17 bp, Arabidopsis thaliana
agagttctttgcgatta

SEQ ID NO: 31430 - DNA, 17 bp, Arabidopsis thaliana
agagttctttggcgaag

SEQ ID NO: 31431 - DNA, 17 bp, Arabidopsis thaliana
agagttgaactcctcgt

SEQ ID NO: 31432 - DNA, 17 bp, Arabidopsis thaliana
agagttgaataagcgtt

SEQ ID NO: 31433 - DNA, 17 bp, Arabidopsis thaliana
agagttgaatctctcag

SEQ ID NO: 31434 - DNA, 17 bp, Arabidopsis thaliana
agagttgacacgtgtca

SEQ ID NO: 31435 - DNA, 17 bp, Arabidopsis thaliana
agagttgacgatgaagg

SEQ ID NO: 31436 - DNA, 17 bp, Arabidopsis thaliana
agagttgactgtttaac

SEQ ID NO: 31437 - DNA, 17 bp, Arabidopsis thaliana
agagttgacttttcgtt

SEQ ID NO: 31438 - DNA, 17 bp, Arabidopsis thaliana
agagttgagaccgtcaa

SEQ ID NO: 31439 - DNA, 17 bp, Arabidopsis thaliana
agagttgagatctgctg

SEQ ID NO: 31440 - DNA, 17 bp, Arabidopsis thaliana
agagttgagcgtctggc

SEQ ID NO: 31441 - DNA, 17 bp, Arabidopsis thaliana
agagttgataaaccgcc

SEQ ID NO: 31442 - DNA, 17 bp, Arabidopsis thaliana
agagttgatccgctgga

SEQ ID NO: 31443 - DNA, 17 bp, Arabidopsis thaliana
agagttgatgtggttga

SEQ ID NO: 31444 - DNA, 17 bp, Arabidopsis thaliana
agagttgattgcaatgg

SEQ ID NO: 31445 - DNA, 17 bp, Arabidopsis thaliana
agagttgattgcgctgt

SEQ ID NO: 31446 - DNA, 17 bp, Arabidopsis thaliana
agagttgcatgatgtcc

SEQ ID NO: 31447 - DNA, 17 bp, Arabidopsis thaliana
agagttgccaactcata

SEQ ID NO: 31448 - DNA, 17 bp, Arabidopsis thaliana
agagttgccaagacact

SEQ ID NO: 31449 - DNA, 17 bp, Arabidopsis thaliana
agagttgccaagacagt

SEQ ID NO: 31450 - DNA, 17 bp, Arabidopsis thaliana
agagttgccatagtgtg

SEQ ID NO: 31451 - DNA, 17 bp, Arabidopsis thaliana
agagttgcctgaatttt

SEQ ID NO: 31452 - DNA, 17 bp, Arabidopsis thaliana
agagttggacttattta

SEQ ID NO: 31453 - DNA, 17 bp, Arabidopsis thaliana
agagttggccaactttc

SEQ ID NO: 31454 - DNA, 17 bp, Arabidopsis thaliana
agagttggcgtttgcgt

SEQ ID NO: 31455 - DNA, 17 bp, Arabidopsis thaliana
agagttggctaagtccg

SEQ ID NO: 31456 - DNA, 17 bp, Arabidopsis thaliana
agagttggctcaggacc

SEQ ID NO: 31457 - DNA, 17 bp, Arabidopsis thaliana
agagttgggacttattt

SEQ ID NO: 31458 - DNA, 17 bp, Arabidopsis thaliana
agagttgggatggagac

SEQ ID NO: 31459 - DNA, 17 bp, Arabidopsis thaliana
agagttgggtcgttggt

SEQ ID NO: 31460 - DNA, 17 bp, Arabidopsis thaliana
agagttggtaggccaag

SEQ ID NO: 31461 - DNA, 17 bp, Arabidopsis thaliana
agagttggtccacaaca

SEQ ID NO: 31462 - DNA, 17 bp, Arabidopsis thaliana
agagttggtctgcgacc

SEQ ID NO: 31463 - DNA, 17 bp, Arabidopsis thaliana
agagttggtctgcgacg

SEQ ID NO: 31464 - DNA, 17 bp, Arabidopsis thaliana
agagttggtctgcgact

SEQ ID NO: 31465 - DNA, 17 bp, Arabidopsis thaliana
agagttggtctgcgatt

SEQ ID NO: 31466 - DNA, 17 bp, Arabidopsis thaliana
agagttggttgcgacgg

SEQ ID NO: 31467 - DNA, 17 bp, Arabidopsis thaliana
agagttgtaccgtccga

SEQ ID NO: 31468 - DNA, 17 bp, Arabidopsis thaliana
agagttgtcaaatcggg

SEQ ID NO: 31469 - DNA, 17 bp, Arabidopsis thaliana
agagttgtccatgaatc

SEQ ID NO: 31470 - DNA, 17 bp, Arabidopsis thaliana
agagttgtgaccaaccc

SEQ ID NO: 31471 - DNA, 17 bp, Arabidopsis thaliana
agagttgttaacgcttc

SEQ ID NO: 31472 - DNA, 17 bp, Arabidopsis thaliana
agagttgttcatcatct

SEQ ID NO: 31473 - DNA, 17 bp, Arabidopsis thaliana
agagttgttgtggtcac

SEQ ID NO: 31474 - DNA, 17 bp, Arabidopsis thaliana
agagttgtttcaggggc

SEQ ID NO: 31475 - DNA, 17 bp, Arabidopsis thaliana
agagttgttttctcaat

SEQ ID NO: 31476 - DNA, 17 bp, Arabidopsis thaliana
agagtttaagacccgtt

SEQ ID NO: 31477 - DNA, 17 bp, Arabidopsis thaliana
agagtttacggattgag

SEQ ID NO: 31478 - DNA, 17 bp, Arabidopsis thaliana
agagtttacgggttgag

SEQ ID NO: 31479 - DNA, 17 bp, Arabidopsis thaliana
agagtttacggttaatt

SEQ ID NO: 31480 - DNA, 17 bp, Arabidopsis thaliana
agagtttactcgctcgt

SEQ ID NO: 31481 - DNA, 17 bp, Arabidopsis thaliana
agagtttagcggcacat

SEQ ID NO: 31482 - DNA, 17 bp, Arabidopsis thaliana
agagtttagggttttgg

SEQ ID NO: 31483 - DNA, 17 bp, Arabidopsis thaliana
agagtttaggtgacaat

SEQ ID NO: 31484 - DNA, 17 bp, Arabidopsis thaliana
agagtttaggttctgag

SEQ ID NO: 31485 - DNA, 17 bp, Arabidopsis thaliana
agagtttattgacttga

SEQ ID NO: 31486 - DNA, 17 bp, Arabidopsis thaliana
agagtttcaacaacaag

SEQ ID NO: 31487 - DNA, 17 bp, Arabidopsis thaliana
agagtttcaagtttcgg

SEQ ID NO: 31488 - DNA, 17 bp, Arabidopsis thaliana
agagtttcagaatatgg

SEQ ID NO: 31489 - DNA, 17 bp, Arabidopsis thaliana
agagtttcatcacttag

SEQ ID NO: 31490 - DNA, 17 bp, Arabidopsis thaliana
agagtttccataactgc

SEQ ID NO: 31491 - DNA, 17 bp, Arabidopsis thaliana
agagtttcctcttggtc

SEQ ID NO: 31492 - DNA, 17 bp, Arabidopsis thaliana
agagtttctaagccaat

SEQ ID NO: 31493 - DNA, 17 bp, Arabidopsis thaliana
agagtttctatgtacct

SEQ ID NO: 31494 - DNA, 17 bp, Arabidopsis thaliana
agagtttctcacttgag

SEQ ID NO: 31495 - DNA, 17 bp, Arabidopsis thaliana
agagtttctcagtggag

SEQ ID NO: 31496 - DNA, 17 bp, Arabidopsis thaliana
agagtttctgaaaacag

SEQ ID NO: 31497 - DNA, 17 bp, Arabidopsis thaliana
agagtttctggcccaaa

SEQ ID NO: 31498 - DNA, 17 bp, Arabidopsis thaliana
agagtttctgggctttg

SEQ ID NO: 31499 - DNA, 17 bp, Arabidopsis thaliana
agagtttcttcagtgga

SEQ ID NO: 31500 - DNA, 17 bp, Arabidopsis thaliana
agagtttcttcgggaga

SEQ ID NO: 31501 - DNA, 17 bp, Arabidopsis thaliana
agagtttgaattattgg

SEQ ID NO: 31502 - DNA, 17 bp, Arabidopsis thaliana
agagtttgaattgttga

SEQ ID NO: 31503 - DNA, 17 bp, Arabidopsis thaliana
agagtttgaattgttgg

SEQ ID NO: 31504 - DNA, 17 bp, Arabidopsis thaliana
agagtttgacaaaaagt

SEQ ID NO: 31505 - DNA, 17 bp, Arabidopsis thaliana
agagtttgatgaccctt

SEQ ID NO: 31506 - DNA, 17 bp, Arabidopsis thaliana
agagtttgatgacttgg

SEQ ID NO: 31507 - DNA, 17 bp, Arabidopsis thaliana
agagtttgccggagctt

SEQ ID NO: 31508 - DNA, 17 bp, Arabidopsis thaliana
agagtttgcctggaggt

SEQ ID NO: 31509 - DNA, 17 bp, Arabidopsis thaliana
agagtttgcgagattac

SEQ ID NO: 31510 - DNA, 17 bp, Arabidopsis thaliana
agagtttgcggaagcgg

SEQ ID NO: 31511 - DNA, 17 bp, Arabidopsis thaliana
agagtttgctgatttca

SEQ ID NO: 31512 - DNA, 17 bp, Arabidopsis thaliana
agagtttgcttagcgtt

SEQ ID NO: 31513 - DNA, 17 bp, Arabidopsis thaliana
agagtttggatgtgttc

SEQ ID NO: 31514 - DNA, 17 bp, Arabidopsis thaliana
agagtttgtctccctga

SEQ ID NO: 31515 - DNA, 17 bp, Arabidopsis thaliana
agagtttgtggtacgat

SEQ ID NO: 31516 - DNA, 17 bp, Arabidopsis thaliana
agagttttaccgattgt

SEQ ID NO: 31517 - DNA, 17 bp, Arabidopsis thaliana
agagttttaggatccat

SEQ ID NO: 31518 - DNA, 17 bp, Arabidopsis thaliana
agagttttagtccgaat

SEQ ID NO: 31519 - DNA, 17 bp, Arabidopsis thaliana
agagttttccgtagatt

SEQ ID NO: 31520 - DNA, 17 bp, Arabidopsis thaliana
agagttttcgcacgctc

SEQ ID NO: 31521 - DNA, 17 bp, Arabidopsis thaliana
agagttttctcaggatg

SEQ ID NO: 31522 - DNA, 17 bp, Arabidopsis thaliana
agagttttgggcagctt

SEQ ID NO: 31523 - DNA, 17 bp, Arabidopsis thaliana
agagttttggtaacaat

SEQ ID NO: 31524 - DNA, 17 bp, Arabidopsis thaliana
agagtttttcatcacca

SEQ ID NO: 31525 - DNA, 17 bp, Arabidopsis thaliana
agagtttttgacctcaa

SEQ ID NO: 31526 - DNA, 17 bp, Arabidopsis thaliana
agagttttttcgcatat

SEQ ID NO: 31527 - DNA, 17 bp, Arabidopsis thaliana
agataaaacctcgtgct

SEQ ID NO: 31528 - DNA, 17 bp, Arabidopsis thaliana
agataaacagattaata

SEQ ID NO: 31529 - DNA, 17 bp, Arabidopsis thaliana
agataaaccaattgggc

SEQ ID NO: 31530 - DNA, 17 bp, Arabidopsis thaliana
agataaacctccgtagc

SEQ ID NO: 31531 - DNA, 17 bp, Arabidopsis thaliana
agataaagtgcggtgcg

SEQ ID NO: 31532 - DNA, 17 bp, Arabidopsis thaliana
agataaatcacactgag

SEQ ID NO: 31533 - DNA, 17 bp, Arabidopsis thaliana
agataaatttcccctgc

SEQ ID NO: 31534 - DNA, 17 bp, Arabidopsis thaliana
agataacaaatcgccgt

SEQ ID NO: 31535 - DNA, 17 bp, Arabidopsis thaliana
agataacatcgtatgga

SEQ ID NO: 31536 - DNA, 17 bp, Arabidopsis thaliana
agataacatggcttctt

SEQ ID NO: 31537 - DNA, 17 bp, Arabidopsis thaliana
agataaccgactgcttc

SEQ ID NO: 31538 - DNA, 17 bp, Arabidopsis thaliana
agataaccgagattcgt

SEQ ID NO: 31539 - DNA, 17 bp, Arabidopsis thaliana
agataaccgatctccca

SEQ ID NO: 31540 - DNA, 17 bp, Arabidopsis thaliana
agataaccggccgctgt

SEQ ID NO: 31541 - DNA, 17 bp, Arabidopsis thaliana
agataaccgtctataag

SEQ ID NO: 31542 - DNA, 17 bp, Arabidopsis thaliana
agataacctagtaggtg

SEQ ID NO: 31543 - DNA, 17 bp, Arabidopsis thaliana
agataacctggcaaggg

SEQ ID NO: 31544 - DNA, 17 bp, Arabidopsis thaliana
agataaccttgacagtg

SEQ ID NO: 31545 - DNA, 17 bp, Arabidopsis thaliana
agataacgcaggtgtcc

SEQ ID NO: 31546 - DNA, 17 bp, Arabidopsis thaliana
agataacggatttttcc

SEQ ID NO: 31547 - DNA, 17 bp, Arabidopsis thaliana
agataacgtcgtgtgga

SEQ ID NO: 31548 - DNA, 17 bp, Arabidopsis thaliana
agataactccagcaagt

SEQ ID NO: 31549 - DNA, 17 bp, Arabidopsis thaliana
agataagaatcccttgt

SEQ ID NO: 31550 - DNA, 17 bp, Arabidopsis thaliana
agataagattacgagaa

SEQ ID NO: 31551 - DNA, 17 bp, Arabidopsis thaliana
agataagcagtgtagcg

SEQ ID NO: 31552 - DNA, 17 bp, Arabidopsis thaliana
agataagccgctgcggt

SEQ ID NO: 31553 - DNA, 17 bp, Arabidopsis thaliana
agataagcgccttagtt

SEQ ID NO: 31554 - DNA, 17 bp, Arabidopsis thaliana
agataagctctgcttca

SEQ ID NO: 31555 - DNA, 17 bp, Arabidopsis thaliana
agataagctgagttgct

SEQ ID NO: 31556 - DNA, 17 bp, Arabidopsis thaliana
agataagctgagttgtt

SEQ ID NO: 31557 - DNA, 17 bp, Arabidopsis thaliana
agataagcttctgggtc

SEQ ID NO: 31558 - DNA, 17 bp, Arabidopsis thaliana
agataagtactttgccg

SEQ ID NO: 31559 - DNA, 17 bp, Arabidopsis thaliana
agataagtcgttgattc

SEQ ID NO: 31560 - DNA, 17 bp, Arabidopsis thaliana
agataagtgtccgttgg

SEQ ID NO: 31561 - DNA, 17 bp, Arabidopsis thaliana
agataataatcccacgg

SEQ ID NO: 31562 - DNA, 17 bp, Arabidopsis thaliana
agataatcaagatgtag

SEQ ID NO: 31563 - DNA, 17 bp, Arabidopsis thaliana
agataatcacgctcagg

SEQ ID NO: 31564 - DNA, 17 bp, Arabidopsis thaliana
agataatctcagtcgac

SEQ ID NO: 31565 - DNA, 17 bp, Arabidopsis thaliana
agataatgtccgcctat

SEQ ID NO: 31566 - DNA, 17 bp, Arabidopsis thaliana
agataattttgtcgtta

SEQ ID NO: 31567 - DNA, 17 bp, Arabidopsis thaliana
agatacaaccgcacaga

SEQ ID NO: 31568 - DNA, 17 bp, Arabidopsis thaliana
agatacaactgtggaac

SEQ ID NO: 31569 - DNA, 17 bp, Arabidopsis thaliana
agatacaaggttggagt

SEQ ID NO: 31570 - DNA, 17 bp, Arabidopsis thaliana
agatacactcgtttggg

SEQ ID NO: 31571 - DNA, 17 bp, Arabidopsis thaliana
agatacagatatgggca

SEQ ID NO: 31572 - DNA, 17 bp, Arabidopsis thaliana
agatacagtgcgttgcc

SEQ ID NO: 31573 - DNA, 17 bp, Arabidopsis thaliana
agatacagttttggacc

SEQ ID NO: 31574 - DNA, 17 bp, Arabidopsis thaliana
agatacatcacaggttt

SEQ ID NO: 31575 - DNA, 17 bp, Arabidopsis thaliana
agatacatggtccgatt

SEQ ID NO: 31576 - DNA, 17 bp, Arabidopsis thaliana
agataccaatccatcaa

SEQ ID NO: 31577 - DNA, 17 bp, Arabidopsis thaliana
agataccacatgtcaca

SEQ ID NO: 31578 - DNA, 17 bp, Arabidopsis thaliana
agataccaccattgctg

SEQ ID NO: 31579 - DNA, 17 bp, Arabidopsis thaliana
agataccactgtctgat

SEQ ID NO: 31580 - DNA, 17 bp, Arabidopsis thaliana
agataccatggctgact

SEQ ID NO: 31581 - DNA, 17 bp, Arabidopsis thaliana
agataccgatgaatgac

SEQ ID NO: 31582 - DNA, 17 bp, Arabidopsis thaliana
agataccgctttggacc

SEQ ID NO: 31583 - DNA, 17 bp, Arabidopsis thaliana
agataccgctttggatc

SEQ ID NO: 31584 - DNA, 17 bp, Arabidopsis thaliana
agataccggtttggacc

SEQ ID NO: 31585 - DNA, 17 bp, Arabidopsis thaliana
agataccgtgcgctgga

SEQ ID NO: 31586 - DNA, 17 bp, Arabidopsis thaliana
agataccgttttggacc

SEQ ID NO: 31587 - DNA, 17 bp, Arabidopsis thaliana
agatacgaaccgtgaaa

SEQ ID NO: 31588 - DNA, 17 bp, Arabidopsis thaliana
agatacgaaggttagtc

SEQ ID NO: 31589 - DNA, 17 bp, Arabidopsis thaliana
agatacgagggcaaaac

SEQ ID NO: 31590 - DNA, 17 bp, Arabidopsis thaliana
agatacgcagccctgtc

SEQ ID NO: 31591 - DNA, 17 bp, Arabidopsis thaliana
agatacgcgtgcctgac

SEQ ID NO: 31592 - DNA, 17 bp, Arabidopsis thaliana
agatacgctttctccat

SEQ ID NO: 31593 - DNA, 17 bp, Arabidopsis thaliana
agatacggtgaatcccc

SEQ ID NO: 31594 - DNA, 17 bp, Arabidopsis thaliana
agatacggttatccgaa

SEQ ID NO: 31595 - DNA, 17 bp, Arabidopsis thaliana
agatacgtctccgacag

SEQ ID NO: 31596 - DNA, 17 bp, Arabidopsis thaliana
agatacgttgattgctt

SEQ ID NO: 31597 - DNA, 17 bp, Arabidopsis thaliana
agatactaagtcacagt

SEQ ID NO: 31598 - DNA, 17 bp, Arabidopsis thaliana
agatactccgatggaga

SEQ ID NO: 31599 - DNA, 17 bp, Arabidopsis thaliana
agatactcggacacagg

SEQ ID NO: 31600 - DNA, 17 bp, Arabidopsis thaliana
agatactctccttgcgt

SEQ ID NO: 31601 - DNA, 17 bp, Arabidopsis thaliana
agatactgaatttctct

SEQ ID NO: 31602 - DNA, 17 bp, Arabidopsis thaliana
agatactgctttaggcc

SEQ ID NO: 31603 - DNA, 17 bp, Arabidopsis thaliana
agatactggcccttgtg

SEQ ID NO: 31604 - DNA, 17 bp, Arabidopsis thaliana
agatactgtgactcaag

SEQ ID NO: 31605 - DNA, 17 bp, Arabidopsis thaliana
agatacttctagaatgc

SEQ ID NO: 31606 - DNA, 17 bp, Arabidopsis thaliana
agatacttgcggcagcg

SEQ ID NO: 31607 - DNA, 17 bp, Arabidopsis thaliana
agatactttagttgcca

SEQ ID NO: 31608 - DNA, 17 bp, Arabidopsis thaliana
agatactttggctactt

SEQ ID NO: 31609 - DNA, 17 bp, Arabidopsis thaliana
agatacttttgttttgc

SEQ ID NO: 31610 - DNA, 17 bp, Arabidopsis thaliana
agatagaaatgagcgat

SEQ ID NO: 31611 - DNA, 17 bp, Arabidopsis thaliana
agatagaccgattctta

SEQ ID NO: 31612 - DNA, 17 bp, Arabidopsis thaliana
agatagacgatggtcca

SEQ ID NO: 31613 - DNA, 17 bp, Arabidopsis thaliana
agatagactgaaggatt

SEQ ID NO: 31614 - DNA, 17 bp, Arabidopsis thaliana
agatagacttggttgga

SEQ ID NO: 31615 - DNA, 17 bp, Arabidopsis thaliana
agatagagttctggtgc

SEQ ID NO: 31616 - DNA, 17 bp, Arabidopsis thaliana
agatagatcatgctggc

SEQ ID NO: 31617 - DNA, 17 bp, Arabidopsis thaliana
agatagatcgcattcac

SEQ ID NO: 31618 - DNA, 17 bp, Arabidopsis thaliana
agatagatttgacaacg

SEQ ID NO: 31619 - DNA, 17 bp, Arabidopsis thaliana
agatagcactgcacaga

SEQ ID NO: 31620 - DNA, 17 bp, Arabidopsis thaliana
agatagcagtatgtttt

SEQ ID NO: 31621 - DNA, 17 bp, Arabidopsis thaliana
agatagccttcaacact

SEQ ID NO: 31622 - DNA, 17 bp, Arabidopsis thaliana
agatagcgctactctct

SEQ ID NO: 31623 - DNA, 17 bp, Arabidopsis thaliana
agatagcggtatgtctc

SEQ ID NO: 31624 - DNA, 17 bp, Arabidopsis thaliana
agatagcggtgtacaga

SEQ ID NO: 31625 - DNA, 17 bp, Arabidopsis thaliana
agatagcgttattcggc

SEQ ID NO: 31626 - DNA, 17 bp, Arabidopsis thaliana
agatagctgctggttta

SEQ ID NO: 31627 - DNA, 17 bp, Arabidopsis thaliana
agataggagaacgtcgc

SEQ ID NO: 31628 - DNA, 17 bp, Arabidopsis thaliana
agataggataagccgag

SEQ ID NO: 31629 - DNA, 17 bp, Arabidopsis thaliana
agataggcaagctgttg

SEQ ID NO: 31630 - DNA, 17 bp, Arabidopsis thaliana
agataggccgaacatgg

SEQ ID NO: 31631 - DNA, 17 bp, Arabidopsis thaliana
agataggcctcctggtg

SEQ ID NO: 31632 - DNA, 17 bp, Arabidopsis thaliana
agataggtcggcaaaaa

SEQ ID NO: 31633 - DNA, 17 bp, Arabidopsis thaliana
agataggtcgtctgagg

SEQ ID NO: 31634 - DNA, 17 bp, Arabidopsis thaliana
agataggtgaaactctc

SEQ ID NO: 31635 - DNA, 17 bp, Arabidopsis thaliana
agatagtccacattgcg

SEQ ID NO: 31636 - DNA, 17 bp, Arabidopsis thaliana
agatagtcccggtatca

SEQ ID NO: 31637 - DNA, 17 bp, Arabidopsis thaliana
agatagtctcggtattg

SEQ ID NO: 31638 - DNA, 17 bp, Arabidopsis thaliana
agatagtctgcgtttct

SEQ ID NO: 31639 - DNA, 17 bp, Arabidopsis thaliana
agatagtgcctccaaac

SEQ ID NO: 31640 - DNA, 17 bp, Arabidopsis thaliana
agatagtgttgtttgcc

SEQ ID NO: 31641 - DNA, 17 bp, Arabidopsis thaliana
agatagttgatggcggt

SEQ ID NO: 31642 - DNA, 17 bp, Arabidopsis thaliana
agatagtttgcagttag

SEQ ID NO: 31643 - DNA, 17 bp, Arabidopsis thaliana
agatatcacttgtgctt

SEQ ID NO: 31644 - DNA, 17 bp, Arabidopsis thaliana
agatatccgcttcgtgc

SEQ ID NO: 31645 - DNA, 17 bp, Arabidopsis thaliana
agatatccgctttgata

SEQ ID NO: 31646 - DNA, 17 bp, Arabidopsis thaliana
agatatccggtcgacat

SEQ ID NO: 31647 - DNA, 17 bp, Arabidopsis thaliana
agatatcgaatggagtt

SEQ ID NO: 31648 - DNA, 17 bp, Arabidopsis thaliana
agatatcgccttatcta

SEQ ID NO: 31649 - DNA, 17 bp, Arabidopsis thaliana
agatatcgctttggacc

SEQ ID NO: 31650 - DNA, 17 bp, Arabidopsis thaliana
agatatcggtgcggttc

SEQ ID NO: 31651 - DNA, 17 bp, Arabidopsis thaliana
agatatcgtcaccaggt

SEQ ID NO: 31652 - DNA, 17 bp, Arabidopsis thaliana
agatatcgtcatcaggt

SEQ ID NO: 31653 - DNA, 17 bp, Arabidopsis thaliana
agatatcgttgaccaac

SEQ ID NO: 31654 - DNA, 17 bp, Arabidopsis thaliana
agatatcgttttggacc

SEQ ID NO: 31655 - DNA, 17 bp, Arabidopsis thaliana
agatatctatttgctat

SEQ ID NO: 31656 - DNA, 17 bp, Arabidopsis thaliana
agatatctcatgcagct

SEQ ID NO: 31657 - DNA, 17 bp, Arabidopsis thaliana
agatatcttcaaggaca

SEQ ID NO: 31658 - DNA, 17 bp, Arabidopsis thaliana
agatatcttgatttgcg

SEQ ID NO: 31659 - DNA, 17 bp, Arabidopsis thaliana
agatatgaccgtcggaa

SEQ ID NO: 31660 - DNA, 17 bp, Arabidopsis thaliana
agatatgactgaacgcc

SEQ ID NO: 31661 - DNA, 17 bp, Arabidopsis thaliana
agatatgatggacattg

SEQ ID NO: 31662 - DNA, 17 bp, Arabidopsis thaliana
agatatgattttcaccg

SEQ ID NO: 31663 - DNA, 17 bp, Arabidopsis thaliana
agatatgcacagactca

SEQ ID NO: 31664 - DNA, 17 bp, Arabidopsis thaliana
agatatgccagagatca

SEQ ID NO: 31665 - DNA, 17 bp, Arabidopsis thaliana
agatatgccgttaaatt

SEQ ID NO: 31666 - DNA, 17 bp, Arabidopsis thaliana
agatatgcgtgtacgga

SEQ ID NO: 31667 - DNA, 17 bp, Arabidopsis thaliana
agatatgctgagctgag

SEQ ID NO: 31668 - DNA, 17 bp, Arabidopsis thaliana
agatatgctgcaggttc

SEQ ID NO: 31669 - DNA, 17 bp, Arabidopsis thaliana
agatatggacctctcca

SEQ ID NO: 31670 - DNA, 17 bp, Arabidopsis thaliana
agatatggatatgaccc

SEQ ID NO: 31671 - DNA, 17 bp, Arabidopsis thaliana
agatatggccaatctat

SEQ ID NO: 31672 - DNA, 17 bp, Arabidopsis thaliana
agatatggggttgtgag

SEQ ID NO: 31673 - DNA, 17 bp, Arabidopsis thaliana
agatatggttgtagcga

SEQ ID NO: 31674 - DNA, 17 bp, Arabidopsis thaliana
agatatgtctgagcccg

SEQ ID NO: 31675 - DNA, 17 bp, Arabidopsis thaliana
agatatgtggctttccc

SEQ ID NO: 31676 - DNA, 17 bp, Arabidopsis thaliana
agatatgtggtgagcct

SEQ ID NO: 31677 - DNA, 17 bp, Arabidopsis thaliana
agatattaagagcagcc

SEQ ID NO: 31678 - DNA, 17 bp, Arabidopsis thaliana
agatattagtgcggctc

SEQ ID NO: 31679 - DNA, 17 bp, Arabidopsis thaliana
agatattagtgcggttc

SEQ ID NO: 31680 - DNA, 17 bp, Arabidopsis thaliana
agatattcagattgcaa

SEQ ID NO: 31681 - DNA, 17 bp, Arabidopsis thaliana
agatattccgatggaga

SEQ ID NO: 31682 - DNA, 17 bp, Arabidopsis thaliana
agatattcttcaaagcc

SEQ ID NO: 31683 - DNA, 17 bp, Arabidopsis thaliana
agatattctttgaatgc

SEQ ID NO: 31684 - DNA, 17 bp, Arabidopsis thaliana
agatattgaaggtgtcc

SEQ ID NO: 31685 - DNA, 17 bp, Arabidopsis thaliana
agatattgatagtgacg

SEQ ID NO: 31686 - DNA, 17 bp, Arabidopsis thaliana
agatattgcggcttcgt

SEQ ID NO: 31687 - DNA, 17 bp, Arabidopsis thaliana
agatattgcggtacaaa

SEQ ID NO: 31688 - DNA, 17 bp, Arabidopsis thaliana
agatattgctgttgcgc

SEQ ID NO: 31689 - DNA, 17 bp, Arabidopsis thaliana
agatattgctgttgcgg

SEQ ID NO: 31690 - DNA, 17 bp, Arabidopsis thaliana
agatattgctgttgctg

SEQ ID NO: 31691 - DNA, 17 bp, Arabidopsis thaliana
agatattggcaagttca

SEQ ID NO: 31692 - DNA, 17 bp, Arabidopsis thaliana
agatattggtgcggttc

SEQ ID NO: 31693 - DNA, 17 bp, Arabidopsis thaliana
agatattggtggggttc

SEQ ID NO: 31694 - DNA, 17 bp, Arabidopsis thaliana
agatattgtgtactgca

SEQ ID NO: 31695 - DNA, 17 bp, Arabidopsis thaliana
agatattgtttgctggc

SEQ ID NO: 31696 - DNA, 17 bp, Arabidopsis thaliana
agatatttccattgctg

SEQ ID NO: 31697 - DNA, 17 bp, Arabidopsis thaliana
agatatttggaggtgag

SEQ ID NO: 31698 - DNA, 17 bp, Arabidopsis thaliana
agatatttgtgcggttc

SEQ ID NO: 31699 - DNA, 17 bp, Arabidopsis thaliana
agatattttggctcagg

SEQ ID NO: 31700 - DNA, 17 bp, Arabidopsis thaliana
agatattttgtctcttt

SEQ ID NO: 31701 - DNA, 17 bp, Arabidopsis thaliana
agatcaaaatgttgatg

SEQ ID NO: 31702 - DNA, 17 bp, Arabidopsis thaliana
agatcaaaatgttgtgg

SEQ ID NO: 31703 - DNA, 17 bp, Arabidopsis thaliana
agatcaaagattatcga

SEQ ID NO: 31704 - DNA, 17 bp, Arabidopsis thaliana
agatcaaatccttccag

SEQ ID NO: 31705 - DNA, 17 bp, Arabidopsis thaliana
agatcaacaaatctatg

SEQ ID NO: 31706 - DNA, 17 bp, Arabidopsis thaliana
agatcaagagcggtctc

SEQ ID NO: 31707 - DNA, 17 bp, Arabidopsis thaliana
agatcaagcggttctag

SEQ ID NO: 31708 - DNA, 17 bp, Arabidopsis thaliana
agatcaagttagctttt

SEQ ID NO: 31709 - DNA, 17 bp, Arabidopsis thaliana
agatcaataccgctaca

SEQ ID NO: 31710 - DNA, 17 bp, Arabidopsis thaliana
agatcaatacgtggctg

SEQ ID NO: 31711 - DNA, 17 bp, Arabidopsis thaliana
agatcaatgacggattt

SEQ ID NO: 31712 - DNA, 17 bp, Arabidopsis thaliana
agatcacattcacgggg

SEQ ID NO: 31713 - DNA, 17 bp, Arabidopsis thaliana
agatcaccatctttcgg

SEQ ID NO: 31714 - DNA, 17 bp, Arabidopsis thaliana
agatcaccattgctgct

SEQ ID NO: 31715 - DNA, 17 bp, Arabidopsis thaliana
agatcaccattggagat

SEQ ID NO: 31716 - DNA, 17 bp, Arabidopsis thaliana
agatcaccgattttgtc

SEQ ID NO: 31717 - DNA, 17 bp, Arabidopsis thaliana
agatcaccgcacgcgtg

SEQ ID NO: 31718 - DNA, 17 bp, Arabidopsis thaliana
agatcacctcgtaagat

SEQ ID NO: 31719 - DNA, 17 bp, Arabidopsis thaliana
agatcacctgtgttctt

SEQ ID NO: 31720 - DNA, 17 bp, Arabidopsis thaliana
agatcacgctggattga

SEQ ID NO: 31721 - DNA, 17 bp, Arabidopsis thaliana
agatcacgggatctact

SEQ ID NO: 31722 - DNA, 17 bp, Arabidopsis thaliana
agatcacggtctttcat

SEQ ID NO: 31723 - DNA, 17 bp, Arabidopsis thaliana
agatcactgacaatgga

SEQ ID NO: 31724 - DNA, 17 bp, Arabidopsis thaliana
agatcactgtgcggtct

SEQ ID NO: 31725 - DNA, 17 bp, Arabidopsis thaliana
agatcactgtgtggtct

SEQ ID NO: 31726 - DNA, 17 bp, Arabidopsis thaliana
agatcagaaggttgcgt

SEQ ID NO: 31727 - DNA, 17 bp, Arabidopsis thaliana
agatcagagatattggc

SEQ ID NO: 31728 - DNA, 17 bp, Arabidopsis thaliana
agatcagatcgactgtt

SEQ ID NO: 31729 - DNA, 17 bp, Arabidopsis thaliana
agatcagattcgatttc

SEQ ID NO: 31730 - DNA, 17 bp, Arabidopsis thaliana
agatcagatttggctgg

SEQ ID NO: 31731 - DNA, 17 bp, Arabidopsis thaliana
agatcagccctttgtcg

SEQ ID NO: 31732 - DNA, 17 bp, Arabidopsis thaliana
agatcagccgatagggt

SEQ ID NO: 31733 - DNA, 17 bp, Arabidopsis thaliana
agatcagctgctcacct

SEQ ID NO: 31734 - DNA, 17 bp, Arabidopsis thaliana
agatcagctgtttcgtt

SEQ ID NO: 31735 - DNA, 17 bp, Arabidopsis thaliana
agatcaggaagtgaaga

SEQ ID NO: 31736 - DNA, 17 bp, Arabidopsis thaliana
agatcaggagcagttct

SEQ ID NO: 31737 - DNA, 17 bp, Arabidopsis thaliana
agatcaggccttgtgtt

SEQ ID NO: 31738 - DNA, 17 bp, Arabidopsis thaliana
agatcaggctgagtgaa

SEQ ID NO: 31739 - DNA, 17 bp, Arabidopsis thaliana
agatcagggcctgatct

SEQ ID NO: 31740 - DNA, 17 bp, Arabidopsis thaliana
agatcaggtgacgtgac

SEQ ID NO: 31741 - DNA, 17 bp, Arabidopsis thaliana
agatcaggttccggttt

SEQ ID NO: 31742 - DNA, 17 bp, Arabidopsis thaliana
agatcaggttgcgggtt

SEQ ID NO: 31743 - DNA, 17 bp, Arabidopsis thaliana
agatcaggttgcggtgg

SEQ ID NO: 31744 - DNA, 17 bp, Arabidopsis thaliana
agatcaggttgcggtgt

SEQ ID NO: 31745 - DNA, 17 bp, Arabidopsis thaliana
agatcaggttgcggttt

SEQ ID NO: 31746 - DNA, 17 bp, Arabidopsis thaliana
agatcaggttgtcgtca

SEQ ID NO: 31747 - DNA, 17 bp, Arabidopsis thaliana
agatcaggttgtggtgt

SEQ ID NO: 31748 - DNA, 17 bp, Arabidopsis thaliana
agatcaggtttttaggc

SEQ ID NO: 31749 - DNA, 17 bp, Arabidopsis thaliana
agatcagtcctagtttt

SEQ ID NO: 31750 - DNA, 17 bp, Arabidopsis thaliana
agatcagtctcagaatt

SEQ ID NO: 31751 - DNA, 17 bp, Arabidopsis thaliana
agatcagtgagagtgcc

SEQ ID NO: 31752 - DNA, 17 bp, Arabidopsis thaliana
agatcagtgatagtgtc

SEQ ID NO: 31753 - DNA, 17 bp, Arabidopsis thaliana
agatcagttctaaaccg

SEQ ID NO: 31754 - DNA, 17 bp, Arabidopsis thaliana
agatcagttgcgtcaaa

SEQ ID NO: 31755 - DNA, 17 bp, Arabidopsis thaliana
agatcatacggataatg

SEQ ID NO: 31756 - DNA, 17 bp, Arabidopsis thaliana
agatcataggtggcttt

SEQ ID NO: 31757 - DNA, 17 bp, Arabidopsis thaliana
agatcatattctcaggt

SEQ ID NO: 31758 - DNA, 17 bp, Arabidopsis thaliana
agatcatcaaatggaga

SEQ ID NO: 31759 - DNA, 17 bp, Arabidopsis thaliana
agatcatcaacttgtca

SEQ ID NO: 31760 - DNA, 17 bp, Arabidopsis thaliana
agatcatcaagaggtgg

SEQ ID NO: 31761 - DNA, 17 bp, Arabidopsis thaliana
agatcatcacagacccg

SEQ ID NO: 31762 - DNA, 17 bp, Arabidopsis thaliana
agatcatcatctcttgc

SEQ ID NO: 31763 - DNA, 17 bp, Arabidopsis thaliana
agatcatcctctcttcc

SEQ ID NO: 31764 - DNA, 17 bp, Arabidopsis thaliana
agatcatcctctgtttg

SEQ ID NO: 31765 - DNA, 17 bp, Arabidopsis thaliana
agatcatccttccagag

SEQ ID NO: 31766 - DNA, 17 bp, Arabidopsis thaliana
agatcatcgccgaaagt

SEQ ID NO: 31767 - DNA, 17 bp, Arabidopsis thaliana
agatcatcgtggttgcg

SEQ ID NO: 31768 - DNA, 17 bp, Arabidopsis thaliana
agatcatctccattgga

SEQ ID NO: 31769 - DNA, 17 bp, Arabidopsis thaliana
agatcatctccattggt

SEQ ID NO: 31770 - DNA, 17 bp, Arabidopsis thaliana
agatcatctcgatgtta

SEQ ID NO: 31771 - DNA, 17 bp, Arabidopsis thaliana
agatcatctctgcagga

SEQ ID NO: 31772 - DNA, 17 bp, Arabidopsis thaliana
agatcatctctgcatac

SEQ ID NO: 31773 - DNA, 17 bp, Arabidopsis thaliana
agatcatcttcacttcc

SEQ ID NO: 31774 - DNA, 17 bp, Arabidopsis thaliana
agatcatcttcactttc

SEQ ID NO: 31775 - DNA, 17 bp, Arabidopsis thaliana
agatcatcttctcttcc

SEQ ID NO: 31776 - DNA, 17 bp, Arabidopsis thaliana
agatcatctttgtcaat

SEQ ID NO: 31777 - DNA, 17 bp, Arabidopsis thaliana
agatcatgaattagtaa

SEQ ID NO: 31778 - DNA, 17 bp, Arabidopsis thaliana
agatcatgacagcgtgg

SEQ ID NO: 31779 - DNA, 17 bp, Arabidopsis thaliana
agatcatgacccgcaca

SEQ ID NO: 31780 - DNA, 17 bp, Arabidopsis thaliana
agatcatgacggttggg

SEQ ID NO: 31781 - DNA, 17 bp, Arabidopsis thaliana
agatcatgatgaacccg

SEQ ID NO: 31782 - DNA, 17 bp, Arabidopsis thaliana
agatcatgctggcagcc

SEQ ID NO: 31783 - DNA, 17 bp, Arabidopsis thaliana
agatcatgctggcagct

SEQ ID NO: 31784 - DNA, 17 bp, Arabidopsis thaliana
agatcatgctggcaggt

SEQ ID NO: 31785 - DNA, 17 bp, Arabidopsis thaliana
agatcatgctgtcagct

SEQ ID NO: 31786 - DNA, 17 bp, Arabidopsis thaliana
agatcatggaattgtgt

SEQ ID NO: 31787 - DNA, 17 bp, Arabidopsis thaliana
agatcatggacgttgat

SEQ ID NO: 31788 - DNA, 17 bp, Arabidopsis thaliana
agatcatggatttgcag

SEQ ID NO: 31789 - DNA, 17 bp, Arabidopsis thaliana
agatcatggcttgcttg

SEQ ID NO: 31790 - DNA, 17 bp, Arabidopsis thaliana
agatcatgtaggacaag

SEQ ID NO: 31791 - DNA, 17 bp, Arabidopsis thaliana
agatcatgtccatatgg

SEQ ID NO: 31792 - DNA, 17 bp, Arabidopsis thaliana
agatcatgttcgcaggt

SEQ ID NO: 31793 - DNA, 17 bp, Arabidopsis thaliana
agatcatgttcgcagtt

SEQ ID NO: 31794 - DNA, 17 bp, Arabidopsis thaliana
agatcattcgccggtgt

SEQ ID NO: 31795 - DNA, 17 bp, Arabidopsis thaliana
agatcattcgttcgttc

SEQ ID NO: 31796 - DNA, 17 bp, Arabidopsis thaliana
agatcattctggcagct

SEQ ID NO: 31797 - DNA, 17 bp, Arabidopsis thaliana
agatcattgatttgctt

SEQ ID NO: 31798 - DNA, 17 bp, Arabidopsis thaliana
agatcatttcaatggtg

SEQ ID NO: 31799 - DNA, 17 bp, Arabidopsis thaliana
agatcatttgccagtgt

SEQ ID NO: 31800 - DNA, 17 bp, Arabidopsis thaliana
agatcattttccaatac

SEQ ID NO: 31801 - DNA, 17 bp, Arabidopsis thaliana
agatcatttttcaggtc

SEQ ID NO: 31802 - DNA, 17 bp, Arabidopsis thaliana
agatcattttttggcga

SEQ ID NO: 31803 - DNA, 17 bp, Arabidopsis thaliana
agatccaaaggtcctac

SEQ ID NO: 31804 - DNA, 17 bp, Arabidopsis thaliana
agatccaactacagata

SEQ ID NO: 31805 - DNA, 17 bp, Arabidopsis thaliana
agatccaaggaccgtcc

SEQ ID NO: 31806 - DNA, 17 bp, Arabidopsis thaliana
agatccaatccattgag

SEQ ID NO: 31807 - DNA, 17 bp, Arabidopsis thaliana
agatccacaaaaaccac

SEQ ID NO: 31808 - DNA, 17 bp, Arabidopsis thaliana
agatccacagtcgaaat

SEQ ID NO: 31809 - DNA, 17 bp, Arabidopsis thaliana
agatccacctagacttt

SEQ ID NO: 31810 - DNA, 17 bp, Arabidopsis thaliana
agatccacctcaacgca

SEQ ID NO: 31811 - DNA, 17 bp, Arabidopsis thaliana
agatccacctgcaaagg

SEQ ID NO: 31812 - DNA, 17 bp, Arabidopsis thaliana
agatccacgacagacga

SEQ ID NO: 31813 - DNA, 17 bp, Arabidopsis thaliana
agatccacgatagacga

SEQ ID NO: 31814 - DNA, 17 bp, Arabidopsis thaliana
agatccacttcaggagt

SEQ ID NO: 31815 - DNA, 17 bp, Arabidopsis thaliana
agatccagacttcgctg

SEQ ID NO: 31816 - DNA, 17 bp, Arabidopsis thaliana
agatccagcggatattc

SEQ ID NO: 31817 - DNA, 17 bp, Arabidopsis thaliana
agatccaggcttcaact

SEQ ID NO: 31818 - DNA, 17 bp, Arabidopsis thaliana
agatccagtgggatgga

SEQ ID NO: 31819 - DNA, 17 bp, Arabidopsis thaliana
agatccagttgcggtgt

SEQ ID NO: 31820 - DNA, 17 bp, Arabidopsis thaliana
agatccagttgcggttg

SEQ ID NO: 31821 - DNA, 17 bp, Arabidopsis thaliana
agatccagttgcggttt

SEQ ID NO: 31822 - DNA, 17 bp, Arabidopsis thaliana
agatccatagccattgc

SEQ ID NO: 31823 - DNA, 17 bp, Arabidopsis thaliana
agatccatagctcagtg

SEQ ID NO: 31824 - DNA, 17 bp, Arabidopsis thaliana
agatccatctacaggat

SEQ ID NO: 31825 - DNA, 17 bp, Arabidopsis thaliana
agatccattgcgcttgt

SEQ ID NO: 31826 - DNA, 17 bp, Arabidopsis thaliana
agatccatttctaagct

SEQ ID NO: 31827 - DNA, 17 bp, Arabidopsis thaliana
agatcccaaatcgtgag

SEQ ID NO: 31828 - DNA, 17 bp, Arabidopsis thaliana
agatcccaagagtgtct

SEQ ID NO: 31829 - DNA, 17 bp, Arabidopsis thaliana
agatcccacacaatctt

SEQ ID NO: 31830 - DNA, 17 bp, Arabidopsis thaliana
agatcccatctgagtag

SEQ ID NO: 31831 - DNA, 17 bp, Arabidopsis thaliana
agatcccatctgtgtaa

SEQ ID NO: 31832 - DNA, 17 bp, Arabidopsis thaliana
agatccccaatgcttgc

SEQ ID NO: 31833 - DNA, 17 bp, Arabidopsis thaliana
agatccccacagacgga

SEQ ID NO: 31834 - DNA, 17 bp, Arabidopsis thaliana
agatccccctgccttct

SEQ ID NO: 31835 - DNA, 17 bp, Arabidopsis thaliana
agatcccctgttactga

SEQ ID NO: 31836 - DNA, 17 bp, Arabidopsis thaliana
agatcccgatattagac

SEQ ID NO: 31837 - DNA, 17 bp, Arabidopsis thaliana
agatcccgcacatgctc

SEQ ID NO: 31838 - DNA, 17 bp, Arabidopsis thaliana
agatccctggacggacc

SEQ ID NO: 31839 - DNA, 17 bp, Arabidopsis thaliana
agatccctgtcggttgg

SEQ ID NO: 31840 - DNA, 17 bp, Arabidopsis thaliana
agatcccttgtgactaa

SEQ ID NO: 31841 - DNA, 17 bp, Arabidopsis thaliana
agatccgaaacggtgga

SEQ ID NO: 31842 - DNA, 17 bp, Arabidopsis thaliana
agatccgaacagtctgt

SEQ ID NO: 31843 - DNA, 17 bp, Arabidopsis thaliana
agatccgaaggcttttc

SEQ ID NO: 31844 - DNA, 17 bp, Arabidopsis thaliana
agatccgacggtaaccg

SEQ ID NO: 31845 - DNA, 17 bp, Arabidopsis thaliana
agatccgagatctttta

SEQ ID NO: 31846 - DNA, 17 bp, Arabidopsis thaliana
agatccgatccattgtc

SEQ ID NO: 31847 - DNA, 17 bp, Arabidopsis thaliana
agatccgatcgtttgac

SEQ ID NO: 31848 - DNA, 17 bp, Arabidopsis thaliana
agatccgattgcggtaa

SEQ ID NO: 31849 - DNA, 17 bp, Arabidopsis thaliana
agatccgattgcggtgt

SEQ ID NO: 31850 - DNA, 17 bp, Arabidopsis thaliana
agatccgattgcggttg

SEQ ID NO: 31851 - DNA, 17 bp, Arabidopsis thaliana
agatccgcagtctcgta

SEQ ID NO: 31852 - DNA, 17 bp, Arabidopsis thaliana
agatccgccactagtta

SEQ ID NO: 31853 - DNA, 17 bp, Arabidopsis thaliana
agatccgccactgctcg

SEQ ID NO: 31854 - DNA, 17 bp, Arabidopsis thaliana
agatccgccactgcttc

SEQ ID NO: 31855 - DNA, 17 bp, Arabidopsis thaliana
agatccgcgtagaaatg

SEQ ID NO: 31856 - DNA, 17 bp, Arabidopsis thaliana
agatccgctaagcccta

SEQ ID NO: 31857 - DNA, 17 bp, Arabidopsis thaliana
agatccgctagacctgc

SEQ ID NO: 31858 - DNA, 17 bp, Arabidopsis thaliana
agatccgcttcgtgccc

SEQ ID NO: 31859 - DNA, 17 bp, Arabidopsis thaliana
agatccgcttgcggatg

SEQ ID NO: 31860 - DNA, 17 bp, Arabidopsis thaliana
agatccggaaactcggc

SEQ ID NO: 31861 - DNA, 17 bp, Arabidopsis thaliana
agatccggacaaaaaag

SEQ ID NO: 31862 - DNA, 17 bp, Arabidopsis thaliana
agatccggactcacagg

SEQ ID NO: 31863 - DNA, 17 bp, Arabidopsis thaliana
agatccggagattgctc

SEQ ID NO: 31864 - DNA, 17 bp, Arabidopsis thaliana
agatccggagtggctag

SEQ ID NO: 31865 - DNA, 17 bp, Arabidopsis thaliana
agatccggcgagggaga

SEQ ID NO: 31866 - DNA, 17 bp, Arabidopsis thaliana
agatccggcgatagaga

SEQ ID NO: 31867 - DNA, 17 bp, Arabidopsis thaliana
agatccggctgtttata

SEQ ID NO: 31868 - DNA, 17 bp, Arabidopsis thaliana
agatccggttcggttta

SEQ ID NO: 31869 - DNA, 17 bp, Arabidopsis thaliana
agatccggttgcgggtt

SEQ ID NO: 31870 - DNA, 17 bp, Arabidopsis thaliana
agatccggttgcggtat

SEQ ID NO: 31871 - DNA, 17 bp, Arabidopsis thaliana
agatccggttgcggtcg

SEQ ID NO: 31872 - DNA, 17 bp, Arabidopsis thaliana
agatccggttgcggtgt

SEQ ID NO: 31873 - DNA, 17 bp, Arabidopsis thaliana
agatccggttgcggtta

SEQ ID NO: 31874 - DNA, 17 bp, Arabidopsis thaliana
agatccggttgcggttg

SEQ ID NO: 31875 - DNA, 17 bp, Arabidopsis thaliana
agatccggttgcggttt

SEQ ID NO: 31876 - DNA, 17 bp, Arabidopsis thaliana
agatccgtaataattga

SEQ ID NO: 31877 - DNA, 17 bp, Arabidopsis thaliana
agatccgtcagttgctg

SEQ ID NO: 31878 - DNA, 17 bp, Arabidopsis thaliana
agatccgtcatatttgg

SEQ ID NO: 31879 - DNA, 17 bp, Arabidopsis thaliana
agatccgtgagactggt

SEQ ID NO: 31880 - DNA, 17 bp, Arabidopsis thaliana
agatccgtgcgctttaa

SEQ ID NO: 31881 - DNA, 17 bp, Arabidopsis thaliana
agatccgttcgagtatt

SEQ ID NO: 31882 - DNA, 17 bp, Arabidopsis thaliana
agatccgttcttcaacc

SEQ ID NO: 31883 - DNA, 17 bp, Arabidopsis thaliana
agatccgttcttgaacc

SEQ ID NO: 31884 - DNA, 17 bp, Arabidopsis thaliana
agatccgttgaaccttg

SEQ ID NO: 31885 - DNA, 17 bp, Arabidopsis thaliana
agatccgtttcgactca

SEQ ID NO: 31886 - DNA, 17 bp, Arabidopsis thaliana
agatcctactcaacttc

SEQ ID NO: 31887 - DNA, 17 bp, Arabidopsis thaliana
agatcctaggatcagtg

SEQ ID NO: 31888 - DNA, 17 bp, Arabidopsis thaliana
agatcctaggcgaaact

SEQ ID NO: 31889 - DNA, 17 bp, Arabidopsis thaliana
agatcctcaataaccgc

SEQ ID NO: 31890 - DNA, 17 bp, Arabidopsis thaliana
agatcctcagatgttcc

SEQ ID NO: 31891 - DNA, 17 bp, Arabidopsis thaliana
agatcctcagctattcg

SEQ ID NO: 31892 - DNA, 17 bp, Arabidopsis thaliana
agatcctccactcctgg

SEQ ID NO: 31893 - DNA, 17 bp, Arabidopsis thaliana
agatcctctgatccttc

SEQ ID NO: 31894 - DNA, 17 bp, Arabidopsis thaliana
agatcctgacccgcacg

SEQ ID NO: 31895 - DNA, 17 bp, Arabidopsis thaliana
agatcctgacctgcatg

SEQ ID NO: 31896 - DNA, 17 bp, Arabidopsis thaliana
agatcctgcagtctgat

SEQ ID NO: 31897 - DNA, 17 bp, Arabidopsis thaliana
agatcctgttgcggttt

SEQ ID NO: 31898 - DNA, 17 bp, Arabidopsis thaliana
agatccttctggattcc

SEQ ID NO: 31899 - DNA, 17 bp, Arabidopsis thaliana
agatccttgggtgtttt

SEQ ID NO: 31900 - DNA, 17 bp, Arabidopsis thaliana
agatcctttgcgtattc

SEQ ID NO: 31901 - DNA, 17 bp, Arabidopsis thaliana
agatcgaaaacccactg

SEQ ID NO: 31902 - DNA, 17 bp, Arabidopsis thaliana
agatcgaaacctggctc

SEQ ID NO: 31903 - DNA, 17 bp, Arabidopsis thaliana
agatcgaaacgacgtcg

SEQ ID NO: 31904 - DNA, 17 bp, Arabidopsis thaliana
agatcgaaacttggctc

SEQ ID NO: 31905 - DNA, 17 bp, Arabidopsis thaliana
agatcgaaaggaggctt

SEQ ID NO: 31906 - DNA, 17 bp, Arabidopsis thaliana
agatcgaagtagaggct

SEQ ID NO: 31907 - DNA, 17 bp, Arabidopsis thaliana
agatcgacactcttgag

SEQ ID NO: 31908 - DNA, 17 bp, Arabidopsis thaliana
agatcgaccgagatgac

SEQ ID NO: 31909 - DNA, 17 bp, Arabidopsis thaliana
agatcgacgaacagata

SEQ ID NO: 31910 - DNA, 17 bp, Arabidopsis thaliana
agatcgacgaacagatc

SEQ ID NO: 31911 - DNA, 17 bp, Arabidopsis thaliana
agatcgacgattctggt

SEQ ID NO: 31912 - DNA, 17 bp, Arabidopsis thaliana
agatcgactagactgag

SEQ ID NO: 31913 - DNA, 17 bp, Arabidopsis thaliana
agatcgactgcgatacc

SEQ ID NO: 31914 - DNA, 17 bp, Arabidopsis thaliana
agatcgacttgggtgcc

SEQ ID NO: 31915 - DNA, 17 bp, Arabidopsis thaliana
agatcgagacccagtat

SEQ ID NO: 31916 - DNA, 17 bp, Arabidopsis thaliana
agatcgagatcatacta

SEQ ID NO: 31917 - DNA, 17 bp, Arabidopsis thaliana
agatcgagcgcctacga

SEQ ID NO: 31918 - DNA, 17 bp, Arabidopsis thaliana
agatcgagtcccttggt

SEQ ID NO: 31919 - DNA, 17 bp, Arabidopsis thaliana
agatcgagttgcggact

SEQ ID NO: 31920 - DNA, 17 bp, Arabidopsis thaliana
agatcgagttgcgggcg

SEQ ID NO: 31921 - DNA, 17 bp, Arabidopsis thaliana
agatcgatagatttgcc

SEQ ID NO: 31922 - DNA, 17 bp, Arabidopsis thaliana
agatcgattagtcagat

SEQ ID NO: 31923 - DNA, 17 bp, Arabidopsis thaliana
agatcgattagtctctg

SEQ ID NO: 31924 - DNA, 17 bp, Arabidopsis thaliana
agatcgatttcgaggtt

SEQ ID NO: 31925 - DNA, 17 bp, Arabidopsis thaliana
agatcgcaaattacagg

SEQ ID NO: 31926 - DNA, 17 bp, Arabidopsis thaliana
agatcgcactgctctaa

SEQ ID NO: 31927 - DNA, 17 bp, Arabidopsis thaliana
agatcgcagggattcgt

SEQ ID NO: 31928 - DNA, 17 bp, Arabidopsis thaliana
agatcgcaggtaaaact

SEQ ID NO: 31929 - DNA, 17 bp, Arabidopsis thaliana
agatcgcagtgaacata

SEQ ID NO: 31930 - DNA, 17 bp, Arabidopsis thaliana
agatcgcattcaaaacc

SEQ ID NO: 31931 - DNA, 17 bp, Arabidopsis thaliana
agatcgccaatgccaag

SEQ ID NO: 31932 - DNA, 17 bp, Arabidopsis thaliana
agatcgccaatggcaag

SEQ ID NO: 31933 - DNA, 17 bp, Arabidopsis thaliana
agatcgccatcagctga

SEQ ID NO: 31934 - DNA, 17 bp, Arabidopsis thaliana
agatcgcccccctttag

SEQ ID NO: 31935 - DNA, 17 bp, Arabidopsis thaliana
agatcgccgacgggagc

SEQ ID NO: 31936 - DNA, 17 bp, Arabidopsis thaliana
agatcgccgagccaaca

SEQ ID NO: 31937 - DNA, 17 bp, Arabidopsis thaliana
agatcgccgattcgaat

SEQ ID NO: 31938 - DNA, 17 bp, Arabidopsis thaliana
agatcgcctgttcgagt

SEQ ID NO: 31939 - DNA, 17 bp, Arabidopsis thaliana
agatcgcgaaatacagg

SEQ ID NO: 31940 - DNA, 17 bp, Arabidopsis thaliana
agatcgcggcagcggcg

SEQ ID NO: 31941 - DNA, 17 bp, Arabidopsis thaliana
agatcgcggcggcggca

SEQ ID NO: 31942 - DNA, 17 bp, Arabidopsis thaliana
agatcgcggtggcggcg

SEQ ID NO: 31943 - DNA, 17 bp, Arabidopsis thaliana
agatcgcgtgattcgcc

SEQ ID NO: 31944 - DNA, 17 bp, Arabidopsis thaliana
agatcgctaagccttag

SEQ ID NO: 31945 - DNA, 17 bp, Arabidopsis thaliana
agatcgctatgaggtga

SEQ ID NO: 31946 - DNA, 17 bp, Arabidopsis thaliana
agatcgctgttcactcg

SEQ ID NO: 31947 - DNA, 17 bp, Arabidopsis thaliana
agatcgctgtttttcgt

SEQ ID NO: 31948 - DNA, 17 bp, Arabidopsis thaliana
agatcggccagacggac

SEQ ID NO: 31949 - DNA, 17 bp, Arabidopsis thaliana
agatcggcctttcgatg

SEQ ID NO: 31950 - DNA, 17 bp, Arabidopsis thaliana
agatcggcgagtaggat

SEQ ID NO: 31951 - DNA, 17 bp, Arabidopsis thaliana
agatcggctcacaacgc

SEQ ID NO: 31952 - DNA, 17 bp, Arabidopsis thaliana
agatcggcttgcaacca

SEQ ID NO: 31953 - DNA, 17 bp, Arabidopsis thaliana
agatcggctttagcggt

SEQ ID NO: 31954 - DNA, 17 bp, Arabidopsis thaliana
agatcgggaagcctaga

SEQ ID NO: 31955 - DNA, 17 bp, Arabidopsis thaliana
agatcggggaaaaacat

SEQ ID NO: 31956 - DNA, 17 bp, Arabidopsis thaliana
agatcggggtcatactt

SEQ ID NO: 31957 - DNA, 17 bp, Arabidopsis thaliana
agatcgggtggcggatt

SEQ ID NO: 31958 - DNA, 17 bp, Arabidopsis thaliana
agatcgggttcaggtcg

SEQ ID NO: 31959 - DNA, 17 bp, Arabidopsis thaliana
agatcgggttgcggatt

SEQ ID NO: 31960 - DNA, 17 bp, Arabidopsis thaliana
agatcgggttgcgggtt

SEQ ID NO: 31961 - DNA, 17 bp, Arabidopsis thaliana
agatcgggttgcggtgt

SEQ ID NO: 31962 - DNA, 17 bp, Arabidopsis thaliana
agatcgggttgcggttt

SEQ ID NO: 31963 - DNA, 17 bp, Arabidopsis thaliana
agatcggtgaagacaat

SEQ ID NO: 31964 - DNA, 17 bp, Arabidopsis thaliana
agatcggtggatgtgtt

SEQ ID NO: 31965 - DNA, 17 bp, Arabidopsis thaliana
agatcggttatgagatt

SEQ ID NO: 31966 - DNA, 17 bp, Arabidopsis thaliana
agatcggttgcggttta

SEQ ID NO: 31967 - DNA, 17 bp, Arabidopsis thaliana
agatcggtttatttgcc

SEQ ID NO: 31968 - DNA, 17 bp, Arabidopsis thaliana
agatcgtaatcgagtgc

SEQ ID NO: 31969 - DNA, 17 bp, Arabidopsis thaliana
agatcgtacatgggttc

SEQ ID NO: 31970 - DNA, 17 bp, Arabidopsis thaliana
agatcgtagaaggagca

SEQ ID NO: 31971 - DNA, 17 bp, Arabidopsis thaliana
agatcgtcactggattg

SEQ ID NO: 31972 - DNA, 17 bp, Arabidopsis thaliana
agatcgtctaggattcc

SEQ ID NO: 31973 - DNA, 17 bp, Arabidopsis thaliana
agatcgtctgactctca

SEQ ID NO: 31974 - DNA, 17 bp, Arabidopsis thaliana
agatcgtctggatggtc

SEQ ID NO: 31975 - DNA, 17 bp, Arabidopsis thaliana
agatcgtctgtccatcg

SEQ ID NO: 31976 - DNA, 17 bp, Arabidopsis thaliana
agatcgtctttcaatgt

SEQ ID NO: 31977 - DNA, 17 bp, Arabidopsis thaliana
agatcgtctttctccct

SEQ ID NO: 31978 - DNA, 17 bp, Arabidopsis thaliana
agatcgtgaaatcttgg

SEQ ID NO: 31979 - DNA, 17 bp, Arabidopsis thaliana
agatcgtgagcgtaaaa

SEQ ID NO: 31980 - DNA, 17 bp, Arabidopsis thaliana
agatcgtgattttgctg

SEQ ID NO: 31981 - DNA, 17 bp, Arabidopsis thaliana
agatcgtgccacgtgtc

SEQ ID NO: 31982 - DNA, 17 bp, Arabidopsis thaliana
agatcgtggcacgtgtc

SEQ ID NO: 31983 - DNA, 17 bp, Arabidopsis thaliana
agatcgtgtagggcggc

SEQ ID NO: 31984 - DNA, 17 bp, Arabidopsis thaliana
agatcgtgttgcggtta

SEQ ID NO: 31985 - DNA, 17 bp, Arabidopsis thaliana
agatcgtgttgcggttt

SEQ ID NO: 31986 - DNA, 17 bp, Arabidopsis thaliana
agatcgttgaaagtgca

SEQ ID NO: 31987 - DNA, 17 bp, Arabidopsis thaliana
agatcgttgcctctgtc

SEQ ID NO: 31988 - DNA, 17 bp, Arabidopsis thaliana
agatcgttggccagggc

SEQ ID NO: 31989 - DNA, 17 bp, Arabidopsis thaliana
agatcgttggccatttt

SEQ ID NO: 31990 - DNA, 17 bp, Arabidopsis thaliana
agatcgttggcggcctt

SEQ ID NO: 31991 - DNA, 17 bp, Arabidopsis thaliana
agatcgtttaggattcc

SEQ ID NO: 31992 - DNA, 17 bp, Arabidopsis thaliana
agatctaaaaactgtga

SEQ ID NO: 31993 - DNA, 17 bp, Arabidopsis thaliana
agatctaaacgacggta

SEQ ID NO: 31994 - DNA, 17 bp, Arabidopsis thaliana
agatctaaactacttta

SEQ ID NO: 31995 - DNA, 17 bp, Arabidopsis thaliana
agatctaaataaggctt

SEQ ID NO: 31996 - DNA, 17 bp, Arabidopsis thaliana
agatctaaatctgaaac

SEQ ID NO: 31997 - DNA, 17 bp, Arabidopsis thaliana
agatctaaccgttgcac

SEQ ID NO: 31998 - DNA, 17 bp, Arabidopsis thaliana
agatctaacgacaatga

SEQ ID NO: 31999 - DNA, 17 bp, Arabidopsis thaliana
agatctaacgattgggt

SEQ ID NO: 32000 - DNA, 17 bp, Arabidopsis thaliana
agatctaactttggacg

SEQ ID NO: 32001 - DNA, 17 bp, Arabidopsis thaliana
agatctaagaataggtt

SEQ ID NO: 32002 - DNA, 17 bp, Arabidopsis thaliana
agatctaagaatagtcg

SEQ ID NO: 32003 - DNA, 17 bp, Arabidopsis thaliana
agatctaagcaccaacc

SEQ ID NO: 32004 - DNA, 17 bp, Arabidopsis thaliana
agatctaagcaccaacg

SEQ ID NO: 32005 - DNA, 17 bp, Arabidopsis thaliana
agatctaagcgtttagg

SEQ ID NO: 32006 - DNA, 17 bp, Arabidopsis thaliana
agatctaaggtttctta

SEQ ID NO: 32007 - DNA, 17 bp, Arabidopsis thaliana
agatctaatggctttgg

SEQ ID NO: 32008 - DNA, 17 bp, Arabidopsis thaliana
agatctaattcacaaga

SEQ ID NO: 32009 - DNA, 17 bp, Arabidopsis thaliana
agatctacaggttggta

SEQ ID NO: 32010 - DNA, 17 bp, Arabidopsis thaliana
agatctacatagtgctg

SEQ ID NO: 32011 - DNA, 17 bp, Arabidopsis thaliana
agatctaccttgccttt

SEQ ID NO: 32012 - DNA, 17 bp, Arabidopsis thaliana
agatctacgacagccgc

SEQ ID NO: 32013 - DNA, 17 bp, Arabidopsis thaliana
agatctacgtctgtgat

SEQ ID NO: 32014 - DNA, 17 bp, Arabidopsis thaliana
agatctactgcactctt

SEQ ID NO: 32015 - DNA, 17 bp, Arabidopsis thaliana
agatctacttcaagggt

SEQ ID NO: 32016 - DNA, 17 bp, Arabidopsis thaliana
agatctagaagcgatga

SEQ ID NO: 32017 - DNA, 17 bp, Arabidopsis thaliana
agatctagagtcgtgcg

SEQ ID NO: 32018 - DNA, 17 bp, Arabidopsis thaliana
agatctagagttactcc

SEQ ID NO: 32019 - DNA, 17 bp, Arabidopsis thaliana
agatctagccggttatg

SEQ ID NO: 32020 - DNA, 17 bp, Arabidopsis thaliana
agatctagcggtagaag

SEQ ID NO: 32021 - DNA, 17 bp, Arabidopsis thaliana
agatctaggatcagatc

SEQ ID NO: 32022 - DNA, 17 bp, Arabidopsis thaliana
agatctagggattctcc

SEQ ID NO: 32023 - DNA, 17 bp, Arabidopsis thaliana
agatctagggtttctta

SEQ ID NO: 32024 - DNA, 17 bp, Arabidopsis thaliana
agatctagggttttctg

SEQ ID NO: 32025 - DNA, 17 bp, Arabidopsis thaliana
agatctagttcaagcca

SEQ ID NO: 32026 - DNA, 17 bp, Arabidopsis thaliana
agatctagttgaactct

SEQ ID NO: 32027 - DNA, 17 bp, Arabidopsis thaliana
agatctatcgctgcgac

SEQ ID NO: 32028 - DNA, 17 bp, Arabidopsis thaliana
agatctatcgctgctac

SEQ ID NO: 32029 - DNA, 17 bp, Arabidopsis thaliana
agatctatgagtttagt

SEQ ID NO: 32030 - DNA, 17 bp, Arabidopsis thaliana
agatctatgccacttac

SEQ ID NO: 32031 - DNA, 17 bp, Arabidopsis thaliana
agatctatggccagtat

SEQ ID NO: 32032 - DNA, 17 bp, Arabidopsis thaliana
agatctatggcttggac

SEQ ID NO: 32033 - DNA, 17 bp, Arabidopsis thaliana
agatctattgacatcgc

SEQ ID NO: 32034 - DNA, 17 bp, Arabidopsis thaliana
agatctattgctgcgac

SEQ ID NO: 32035 - DNA, 17 bp, Arabidopsis thaliana
agatctattgcttcaaa

SEQ ID NO: 32036 - DNA, 17 bp, Arabidopsis thaliana
agatctatttcccgtcg

SEQ ID NO: 32037 - DNA, 17 bp, Arabidopsis thaliana
agatctatttgatcaca

SEQ ID NO: 32038 - DNA, 17 bp, Arabidopsis thaliana
agatctatttgggctga

SEQ ID NO: 32039 - DNA, 17 bp, Arabidopsis thaliana
agatctcaacagttggt

SEQ ID NO: 32040 - DNA, 17 bp, Arabidopsis thaliana
agatctcaacctcagac

SEQ ID NO: 32041 - DNA, 17 bp, Arabidopsis thaliana
agatctcaagtcagcct

SEQ ID NO: 32042 - DNA, 17 bp, Arabidopsis thaliana
agatctcacaaacgttg

SEQ ID NO: 32043 - DNA, 17 bp, Arabidopsis thaliana
agatctcaccgtcgttc

SEQ ID NO: 32044 - DNA, 17 bp, Arabidopsis thaliana
agatctcaccgtcgttg

SEQ ID NO: 32045 - DNA, 17 bp, Arabidopsis thaliana
agatctcacgatgttaa

SEQ ID NO: 32046 - DNA, 17 bp, Arabidopsis thaliana
agatctcagaagtgcgg

SEQ ID NO: 32047 - DNA, 17 bp, Arabidopsis thaliana
agatctcagataatgcc

SEQ ID NO: 32048 - DNA, 17 bp, Arabidopsis thaliana
agatctcagtttgcgtt

SEQ ID NO: 32049 - DNA, 17 bp, Arabidopsis thaliana
agatctcatagggaaga

SEQ ID NO: 32050 - DNA, 17 bp, Arabidopsis thaliana
agatctcatccgtccat

SEQ ID NO: 32051 - DNA, 17 bp, Arabidopsis thaliana
agatctcatcgatggtc

SEQ ID NO: 32052 - DNA, 17 bp, Arabidopsis thaliana
agatctcatgatgatag

SEQ ID NO: 32053 - DNA, 17 bp, Arabidopsis thaliana
agatctcattcatcagc

SEQ ID NO: 32054 - DNA, 17 bp, Arabidopsis thaliana
agatctccaaaacgaca

SEQ ID NO: 32055 - DNA, 17 bp, Arabidopsis thaliana
agatctccaaaacgacg

SEQ ID NO: 32056 - DNA, 17 bp, Arabidopsis thaliana
agatctccaaggtgaac

SEQ ID NO: 32057 - DNA, 17 bp, Arabidopsis thaliana
agatctccatggtatgc

SEQ ID NO: 32058 - DNA, 17 bp, Arabidopsis thaliana
agatctccattcccgac

SEQ ID NO: 32059 - DNA, 17 bp, Arabidopsis thaliana
agatctcccgattttgg

SEQ ID NO: 32060 - DNA, 17 bp, Arabidopsis thaliana
agatctccgaatcgatt

SEQ ID NO: 32061 - DNA, 17 bp, Arabidopsis thaliana
agatctccgcagttaag

SEQ ID NO: 32062 - DNA, 17 bp, Arabidopsis thaliana
agatctccgccgatttc

SEQ ID NO: 32063 - DNA, 17 bp, Arabidopsis thaliana
agatctccggattatct

SEQ ID NO: 32064 - DNA, 17 bp, Arabidopsis thaliana
agatctccggcgacgag

SEQ ID NO: 32065 - DNA, 17 bp, Arabidopsis thaliana
agatctccgtggtatgc

SEQ ID NO: 32066 - DNA, 17 bp, Arabidopsis thaliana
agatctccgttcaatct

SEQ ID NO: 32067 - DNA, 17 bp, Arabidopsis thaliana
agatctcctacacactt

SEQ ID NO: 32068 - DNA, 17 bp, Arabidopsis thaliana
agatctcctgcacactt

SEQ ID NO: 32069 - DNA, 17 bp, Arabidopsis thaliana
agatctccttttgacat

SEQ ID NO: 32070 - DNA, 17 bp, Arabidopsis thaliana
agatctcgaaacgcctc

SEQ ID NO: 32071 - DNA, 17 bp, Arabidopsis thaliana
agatctcgacgagcctc

SEQ ID NO: 32072 - DNA, 17 bp, Arabidopsis thaliana
agatctcgagggccaaa

SEQ ID NO: 32073 - DNA, 17 bp, Arabidopsis thaliana
agatctcgattagggac

SEQ ID NO: 32074 - DNA, 17 bp, Arabidopsis thaliana
agatctcgcctcaagta

SEQ ID NO: 32075 - DNA, 17 bp, Arabidopsis thaliana
agatctcggatcacaat

SEQ ID NO: 32076 - DNA, 17 bp, Arabidopsis thaliana
agatctcgggaaatgcg

SEQ ID NO: 32077 - DNA, 17 bp, Arabidopsis thaliana
agatctcgtgtgggtgg

SEQ ID NO: 32078 - DNA, 17 bp, Arabidopsis thaliana
agatctcgtttccagtc

SEQ ID NO: 32079 - DNA, 17 bp, Arabidopsis thaliana
agatctctatctccttt

SEQ ID NO: 32080 - DNA, 17 bp, Arabidopsis thaliana
agatctctcatggttgg

SEQ ID NO: 32081 - DNA, 17 bp, Arabidopsis thaliana
agatctctcgaggacca

SEQ ID NO: 32082 - DNA, 17 bp, Arabidopsis thaliana
agatctctgatcaaagt

SEQ ID NO: 32083 - DNA, 17 bp, Arabidopsis thaliana
agatctctgccatacat

SEQ ID NO: 32084 - DNA, 17 bp, Arabidopsis thaliana
agatctctgcgagtgat

SEQ ID NO: 32085 - DNA, 17 bp, Arabidopsis thaliana
agatctctggggttcac

SEQ ID NO: 32086 - DNA, 17 bp, Arabidopsis thaliana
agatctctgtggacagc

SEQ ID NO: 32087 - DNA, 17 bp, Arabidopsis thaliana
agatctctgtgtccgtt

SEQ ID NO: 32088 - DNA, 17 bp, Arabidopsis thaliana
agatctcttctccgcgc

SEQ ID NO: 32089 - DNA, 17 bp, Arabidopsis thaliana
agatctcttctccgtgc

SEQ ID NO: 32090 - DNA, 17 bp, Arabidopsis thaliana
agatctgaacagtctgc

SEQ ID NO: 32091 - DNA, 17 bp, Arabidopsis thaliana
agatctgaacccagctt

SEQ ID NO: 32092 - DNA, 17 bp, Arabidopsis thaliana
agatctgaacccttgga

SEQ ID NO: 32093 - DNA, 17 bp, Arabidopsis thaliana
agatctgacaatcattt

SEQ ID NO: 32094 - DNA, 17 bp, Arabidopsis thaliana
agatctgacatgttggt

SEQ ID NO: 32095 - DNA, 17 bp, Arabidopsis thaliana
agatctgaccaaagctg

SEQ ID NO: 32096 - DNA, 17 bp, Arabidopsis thaliana
agatctgacgctgtttc

SEQ ID NO: 32097 - DNA, 17 bp, Arabidopsis thaliana
agatctgactacttagc

SEQ ID NO: 32098 - DNA, 17 bp, Arabidopsis thaliana
agatctgactagtccac

SEQ ID NO: 32099 - DNA, 17 bp, Arabidopsis thaliana
agatctgagaatgaact

SEQ ID NO: 32100 - DNA, 17 bp, Arabidopsis thaliana
agatctgagacataagg

SEQ ID NO: 32101 - DNA, 17 bp, Arabidopsis thaliana
agatctgagagactcta

SEQ ID NO: 32102 - DNA, 17 bp, Arabidopsis thaliana
agatctgagccatcccg

SEQ ID NO: 32103 - DNA, 17 bp, Arabidopsis thaliana
agatctgagccgccgcc

SEQ ID NO: 32104 - DNA, 17 bp, Arabidopsis thaliana
agatctgataagaacat

SEQ ID NO: 32105 - DNA, 17 bp, Arabidopsis thaliana
agatctgatgtcgtcgg

SEQ ID NO: 32106 - DNA, 17 bp, Arabidopsis thaliana
agatctgattcaagcca

SEQ ID NO: 32107 - DNA, 17 bp, Arabidopsis thaliana
agatctgcaccgacggc

SEQ ID NO: 32108 - DNA, 17 bp, Arabidopsis thaliana
agatctgcacgaacttt

SEQ ID NO: 32109 - DNA, 17 bp, Arabidopsis thaliana
agatctgcagatttgtt

SEQ ID NO: 32110 - DNA, 17 bp, Arabidopsis thaliana
agatctgcagcgtttgt

SEQ ID NO: 32111 - DNA, 17 bp, Arabidopsis thaliana
agatctgcaggattgat

SEQ ID NO: 32112 - DNA, 17 bp, Arabidopsis thaliana
agatctgcaggtttgtt

SEQ ID NO: 32113 - DNA, 17 bp, Arabidopsis thaliana
agatctgcctgggtgtc

SEQ ID NO: 32114 - DNA, 17 bp, Arabidopsis thaliana
agatctgcgactacaaa

SEQ ID NO: 32115 - DNA, 17 bp, Arabidopsis thaliana
agatctgcggctacaaa

SEQ ID NO: 32116 - DNA, 17 bp, Arabidopsis thaliana
agatctgctagccaaag

SEQ ID NO: 32117 - DNA, 17 bp, Arabidopsis thaliana
agatctgctatgagtat

SEQ ID NO: 32118 - DNA, 17 bp, Arabidopsis thaliana
agatctgctcaggtcgt

SEQ ID NO: 32119 - DNA, 17 bp, Arabidopsis thaliana
agatctgctgaggaaag

SEQ ID NO: 32120 - DNA, 17 bp, Arabidopsis thaliana
agatctgctgctggtcg

SEQ ID NO: 32121 - DNA, 17 bp, Arabidopsis thaliana
agatctgctgtctgtac

SEQ ID NO: 32122 - DNA, 17 bp, Arabidopsis thaliana
agatctggacacaaacg

SEQ ID NO: 32123 - DNA, 17 bp, Arabidopsis thaliana
agatctggacacaatcg

SEQ ID NO: 32124 - DNA, 17 bp, Arabidopsis thaliana
agatctggacgcaaaag

SEQ ID NO: 32125 - DNA, 17 bp, Arabidopsis thaliana
agatctggatcactctc

SEQ ID NO: 32126 - DNA, 17 bp, Arabidopsis thaliana
agatctggcagaaacta

SEQ ID NO: 32127 - DNA, 17 bp, Arabidopsis thaliana
agatctggcagaaatgg

SEQ ID NO: 32128 - DNA, 17 bp, Arabidopsis thaliana
agatctggcatgccttt

SEQ ID NO: 32129 - DNA, 17 bp, Arabidopsis thaliana
agatctggccaaagttg

SEQ ID NO: 32130 - DNA, 17 bp, Arabidopsis thaliana
agatctggccaaattga

SEQ ID NO: 32131 - DNA, 17 bp, Arabidopsis thaliana
agatctggccgatccat

SEQ ID NO: 32132 - DNA, 17 bp, Arabidopsis thaliana
agatctggccgatctat

SEQ ID NO: 32133 - DNA, 17 bp, Arabidopsis thaliana
agatctggctgcgtgaa

SEQ ID NO: 32134 - DNA, 17 bp, Arabidopsis thaliana
agatctgggcaccaatc

SEQ ID NO: 32135 - DNA, 17 bp, Arabidopsis thaliana
agatctgggccgttccc

SEQ ID NO: 32136 - DNA, 17 bp, Arabidopsis thaliana
agatctgggccgttcgc

SEQ ID NO: 32137 - DNA, 17 bp, Arabidopsis thaliana
agatctgggttttgctt

SEQ ID NO: 32138 - DNA, 17 bp, Arabidopsis thaliana
agatctggtagaccgat

SEQ ID NO: 32139 - DNA, 17 bp, Arabidopsis thaliana
agatctggtgaatatgg

SEQ ID NO: 32140 - DNA, 17 bp, Arabidopsis thaliana
agatctggtgccagcag

SEQ ID NO: 32141 - DNA, 17 bp, Arabidopsis thaliana
agatctggttaagatag

SEQ ID NO: 32142 - DNA, 17 bp, Arabidopsis thaliana
agatctggttatccggc

SEQ ID NO: 32143 - DNA, 17 bp, Arabidopsis thaliana
agatctggttctgattc

SEQ ID NO: 32144 - DNA, 17 bp, Arabidopsis thaliana
agatctggttgacaacc

SEQ ID NO: 32145 - DNA, 17 bp, Arabidopsis thaliana
agatctggttgacagcc

SEQ ID NO: 32146 - DNA, 17 bp, Arabidopsis thaliana
agatctggttgacatcc

SEQ ID NO: 32147 - DNA, 17 bp, Arabidopsis thaliana
agatctggttgccggtc

SEQ ID NO: 32148 - DNA, 17 bp, Arabidopsis thaliana
agatctggttgccgtgc

SEQ ID NO: 32149 - DNA, 17 bp, Arabidopsis thaliana
agatctggttgcgggtt

SEQ ID NO: 32150 - DNA, 17 bp, Arabidopsis thaliana
agatctggttgcggtaa

SEQ ID NO: 32151 - DNA, 17 bp, Arabidopsis thaliana
agatctggttgcggtgt

SEQ ID NO: 32152 - DNA, 17 bp, Arabidopsis thaliana
agatctggttgcggttt

SEQ ID NO: 32153 - DNA, 17 bp, Arabidopsis thaliana
agatctgtcgctgagac

SEQ ID NO: 32154 - DNA, 17 bp, Arabidopsis thaliana
agatctgtcgctgcgac

SEQ ID NO: 32155 - DNA, 17 bp, Arabidopsis thaliana
agatctgtcgctgtttc

SEQ ID NO: 32156 - DNA, 17 bp, Arabidopsis thaliana
agatctgtctatccagg

SEQ ID NO: 32157 - DNA, 17 bp, Arabidopsis thaliana
agatctgtgccaccgtt

SEQ ID NO: 32158 - DNA, 17 bp, Arabidopsis thaliana
agatctgtgcgctttaa

SEQ ID NO: 32159 - DNA, 17 bp, Arabidopsis thaliana
agatctgtgggcggact

SEQ ID NO: 32160 - DNA, 17 bp, Arabidopsis thaliana
agatctgtggttgcttg

SEQ ID NO: 32161 - DNA, 17 bp, Arabidopsis thaliana
agatctgttgcggttta

SEQ ID NO: 32162 - DNA, 17 bp, Arabidopsis thaliana
agatctgttggcacaat

SEQ ID NO: 32163 - DNA, 17 bp, Arabidopsis thaliana
agatcttaaaggcgtaa

SEQ ID NO: 32164 - DNA, 17 bp, Arabidopsis thaliana
agatcttacgcttcttc

SEQ ID NO: 32165 - DNA, 17 bp, Arabidopsis thaliana
agatcttaggtttcgaa

SEQ ID NO: 32166 - DNA, 17 bp, Arabidopsis thaliana
agatcttatcaacgaac

SEQ ID NO: 32167 - DNA, 17 bp, Arabidopsis thaliana
agatcttatcaacgtcc

SEQ ID NO: 32168 - DNA, 17 bp, Arabidopsis thaliana
agatcttatcgaacgct

SEQ ID NO: 32169 - DNA, 17 bp, Arabidopsis thaliana
agatcttatctttggag

SEQ ID NO: 32170 - DNA, 17 bp, Arabidopsis thaliana
agatcttatgaggggca

SEQ ID NO: 32171 - DNA, 17 bp, Arabidopsis thaliana
agatcttatgcaaatgt

SEQ ID NO: 32172 - DNA, 17 bp, Arabidopsis thaliana
agatcttcaatagtttt

SEQ ID NO: 32173 - DNA, 17 bp, Arabidopsis thaliana
agatcttcagatgggcg

SEQ ID NO: 32174 - DNA, 17 bp, Arabidopsis thaliana
agatcttcagcgtcgat

SEQ ID NO: 32175 - DNA, 17 bp, Arabidopsis thaliana
agatcttcatcctggta

SEQ ID NO: 32176 - DNA, 17 bp, Arabidopsis thaliana
agatcttccgaaacgat

SEQ ID NO: 32177 - DNA, 17 bp, Arabidopsis thaliana
agatcttccttaaggct

SEQ ID NO: 32178 - DNA, 17 bp, Arabidopsis thaliana
agatcttccttgagtcc

SEQ ID NO: 32179 - DNA, 17 bp, Arabidopsis thaliana
agatcttccttttgtga

SEQ ID NO: 32180 - DNA, 17 bp, Arabidopsis thaliana
agatcttcggagattca

SEQ ID NO: 32181 - DNA, 17 bp, Arabidopsis thaliana
agatcttcggatggtcg

SEQ ID NO: 32182 - DNA, 17 bp, Arabidopsis thaliana
agatcttcggggacaga

SEQ ID NO: 32183 - DNA, 17 bp, Arabidopsis thaliana
agatcttctctcattgc

SEQ ID NO: 32184 - DNA, 17 bp, Arabidopsis thaliana
agatcttctcttagatt

SEQ ID NO: 32185 - DNA, 17 bp, Arabidopsis thaliana
agatcttcttcaccttc

SEQ ID NO: 32186 - DNA, 17 bp, Arabidopsis thaliana
agatcttgacccgcaca

SEQ ID NO: 32187 - DNA, 17 bp, Arabidopsis thaliana
agatcttgattcagatt

SEQ ID NO: 32188 - DNA, 17 bp, Arabidopsis thaliana
agatcttgcccattcgg

SEQ ID NO: 32189 - DNA, 17 bp, Arabidopsis thaliana
agatcttggaaccaaat

SEQ ID NO: 32190 - DNA, 17 bp, Arabidopsis thaliana
agatcttggaccgagac

SEQ ID NO: 32191 - DNA, 17 bp, Arabidopsis thaliana
agatcttggagtcttac

SEQ ID NO: 32192 - DNA, 17 bp, Arabidopsis thaliana
agatcttggtaaggtta

SEQ ID NO: 32193 - DNA, 17 bp, Arabidopsis thaliana
agatcttggtgcggttc

SEQ ID NO: 32194 - DNA, 17 bp, Arabidopsis thaliana
agatcttggttttgctt

SEQ ID NO: 32195 - DNA, 17 bp, Arabidopsis thaliana
agatcttgtcaccgatt

SEQ ID NO: 32196 - DNA, 17 bp, Arabidopsis thaliana
agatcttgtccaccaat

SEQ ID NO: 32197 - DNA, 17 bp, Arabidopsis thaliana
agatcttgtgctatggc

SEQ ID NO: 32198 - DNA, 17 bp, Arabidopsis thaliana
agatcttgtggacataa

SEQ ID NO: 32199 - DNA, 17 bp, Arabidopsis thaliana
agatcttgttgcggttt

SEQ ID NO: 32200 - DNA, 17 bp, Arabidopsis thaliana
agatctttacttgcctc

SEQ ID NO: 32201 - DNA, 17 bp, Arabidopsis thaliana
agatctttaggccaatg

SEQ ID NO: 32202 - DNA, 17 bp, Arabidopsis thaliana
agatctttaggtcggac

SEQ ID NO: 32203 - DNA, 17 bp, Arabidopsis thaliana
agatctttaggtctgtc

SEQ ID NO: 32204 - DNA, 17 bp, Arabidopsis thaliana
agatctttccagctgga

SEQ ID NO: 32205 - DNA, 17 bp, Arabidopsis thaliana
agatctttcctgatccg

SEQ ID NO: 32206 - DNA, 17 bp, Arabidopsis thaliana
agatctttgaccgaatt

SEQ ID NO: 32207 - DNA, 17 bp, Arabidopsis thaliana
agatctttgagacggcg

SEQ ID NO: 32208 - DNA, 17 bp, Arabidopsis thaliana
agatctttgatgttcta

SEQ ID NO: 32209 - DNA, 17 bp, Arabidopsis thaliana
agatctttgcagaaaat

SEQ ID NO: 32210 - DNA, 17 bp, Arabidopsis thaliana
agatctttggatgtatg

SEQ ID NO: 32211 - DNA, 17 bp, Arabidopsis thaliana
agatctttgggacattc

SEQ ID NO: 32212 - DNA, 17 bp, Arabidopsis thaliana
agatctttgggcttaag

SEQ ID NO: 32213 - DNA, 17 bp, Arabidopsis thaliana
agatctttgttcttcga

SEQ ID NO: 32214 - DNA, 17 bp, Arabidopsis thaliana
agatctttgttgcacga

SEQ ID NO: 32215 - DNA, 17 bp, Arabidopsis thaliana
agatcttttatgagcca

SEQ ID NO: 32216 - DNA, 17 bp, Arabidopsis thaliana
agatcttttatgagtca

SEQ ID NO: 32217 - DNA, 17 bp, Arabidopsis thaliana
agatcttttgaatttgg

SEQ ID NO: 32218 - DNA, 17 bp, Arabidopsis thaliana
agatctttttcagttga

SEQ ID NO: 32219 - DNA, 17 bp, Arabidopsis thaliana
agatctttttgaggcca

SEQ ID NO: 32220 - DNA, 17 bp, Arabidopsis thaliana
agatgaaaacatgccgt

SEQ ID NO: 32221 - DNA, 17 bp, Arabidopsis thaliana
agatgaaaacgggtggg

SEQ ID NO: 32222 - DNA, 17 bp, Arabidopsis thaliana
agatgaaacatgattca

SEQ ID NO: 32223 - DNA, 17 bp, Arabidopsis thaliana
agatgaaacggacggtg

SEQ ID NO: 32224 - DNA, 17 bp, Arabidopsis thaliana
agatgaaaggagcacac

SEQ ID NO: 32225 - DNA, 17 bp, Arabidopsis thaliana
agatgaaagtctactcg

SEQ ID NO: 32226 - DNA, 17 bp, Arabidopsis thaliana
agatgaacatggacttg

SEQ ID NO: 32227 - DNA, 17 bp, Arabidopsis thaliana
agatgaaccccactgcg

SEQ ID NO: 32228 - DNA, 17 bp, Arabidopsis thaliana
agatgaacctgaaagtc

SEQ ID NO: 32229 - DNA, 17 bp, Arabidopsis thaliana
agatgaactatgcctga

SEQ ID NO: 32230 - DNA, 17 bp, Arabidopsis thaliana
agatgaactccaaggtt

SEQ ID NO: 32231 - DNA, 17 bp, Arabidopsis thaliana
agatgaactccattgcg

SEQ ID NO: 32232 - DNA, 17 bp, Arabidopsis thaliana
agatgaagacactcgac

SEQ ID NO: 32233 - DNA, 17 bp, Arabidopsis thaliana
agatgaagattcagtgg

SEQ ID NO: 32234 - DNA, 17 bp, Arabidopsis thaliana
agatgaagcatttgtta

SEQ ID NO: 32235 - DNA, 17 bp, Arabidopsis thaliana
agatgaagcgatgacga

SEQ ID NO: 32236 - DNA, 17 bp, Arabidopsis thaliana
agatgaaggcctaattg

SEQ ID NO: 32237 - DNA, 17 bp, Arabidopsis thaliana
agatgaagtcactcgac

SEQ ID NO: 32238 - DNA, 17 bp, Arabidopsis thaliana
agatgaagtttagaggt

SEQ ID NO: 32239 - DNA, 17 bp, Arabidopsis thaliana
agatgaatattgtgtgg

SEQ ID NO: 32240 - DNA, 17 bp, Arabidopsis thaliana
agatgaatcatttggat

SEQ ID NO: 32241 - DNA, 17 bp, Arabidopsis thaliana
agatgaatctaacctgg

SEQ ID NO: 32242 - DNA, 17 bp, Arabidopsis thaliana
agatgaatcttggtgtc

SEQ ID NO: 32243 - DNA, 17 bp, Arabidopsis thaliana
agatgaatttaacttgg

SEQ ID NO: 32244 - DNA, 17 bp, Arabidopsis thaliana
agatgaatttccaatcg

SEQ ID NO: 32245 - DNA, 17 bp, Arabidopsis thaliana
agatgacaactaaccaa

SEQ ID NO: 32246 - DNA, 17 bp, Arabidopsis thaliana
agatgacaactaatctc

SEQ ID NO: 32247 - DNA, 17 bp, Arabidopsis thaliana
agatgacaatgaagccg

SEQ ID NO: 32248 - DNA, 17 bp, Arabidopsis thaliana
agatgacactctttctg

SEQ ID NO: 32249 - DNA, 17 bp, Arabidopsis thaliana
agatgacatctccacca

SEQ ID NO: 32250 - DNA, 17 bp, Arabidopsis thaliana
agatgacatgtgtcaga

SEQ ID NO: 32251 - DNA, 17 bp, Arabidopsis thaliana
agatgaccatttggact

SEQ ID NO: 32252 - DNA, 17 bp, Arabidopsis thaliana
agatgacgagactccct

SEQ ID NO: 32253 - DNA, 17 bp, Arabidopsis thaliana
agatgacggttttttta

SEQ ID NO: 32254 - DNA, 17 bp, Arabidopsis thaliana
agatgacgtattttgct

SEQ ID NO: 32255 - DNA, 17 bp, Arabidopsis thaliana
agatgacgtattttgtt

SEQ ID NO: 32256 - DNA, 17 bp, Arabidopsis thaliana
agatgacgtctttctcg

SEQ ID NO: 32257 - DNA, 17 bp, Arabidopsis thaliana
agatgactctgctccag

SEQ ID NO: 32258 - DNA, 17 bp, Arabidopsis thaliana
agatgactttgctggca

SEQ ID NO: 32259 - DNA, 17 bp, Arabidopsis thaliana
agatgagacctaggtag

SEQ ID NO: 32260 - DNA, 17 bp, Arabidopsis thaliana
agatgagacctaggtgg

SEQ ID NO: 32261 - DNA, 17 bp, Arabidopsis thaliana
agatgagacttgtcatg

SEQ ID NO: 32262 - DNA, 17 bp, Arabidopsis thaliana
agatgagagacccactg

SEQ ID NO: 32263 - DNA, 17 bp, Arabidopsis thaliana
agatgagagatccttgt

SEQ ID NO: 32264 - DNA, 17 bp, Arabidopsis thaliana
agatgagattccagctc

SEQ ID NO: 32265 - DNA, 17 bp, Arabidopsis thaliana
agatgagctcgttggac

SEQ ID NO: 32266 - DNA, 17 bp, Arabidopsis thaliana
agatgagctctgcgatg

SEQ ID NO: 32267 - DNA, 17 bp, Arabidopsis thaliana
agatgagcttctaggtg

SEQ ID NO: 32268 - DNA, 17 bp, Arabidopsis thaliana
agatgaggactccagtt

SEQ ID NO: 32269 - DNA, 17 bp, Arabidopsis thaliana
agatgaggcccagcaga

SEQ ID NO: 32270 - DNA, 17 bp, Arabidopsis thaliana
agatgagggtaatttcg

SEQ ID NO: 32271 - DNA, 17 bp, Arabidopsis thaliana
agatgagggtaatttgg

SEQ ID NO: 32272 - DNA, 17 bp, Arabidopsis thaliana
agatgaggtcgagtagt

SEQ ID NO: 32273 - DNA, 17 bp, Arabidopsis thaliana
agatgagtacccacgct

SEQ ID NO: 32274 - DNA, 17 bp, Arabidopsis thaliana
agatgagtacccgcact

SEQ ID NO: 32275 - DNA, 17 bp, Arabidopsis thaliana
agatgagtacccgcatt

SEQ ID NO: 32276 - DNA, 17 bp, Arabidopsis thaliana
agatgagtatccacgct

SEQ ID NO: 32277 - DNA, 17 bp, Arabidopsis thaliana
agatgagtcatttgtgg

SEQ ID NO: 32278 - DNA, 17 bp, Arabidopsis thaliana
agatgagtgatgggtgc

SEQ ID NO: 32279 - DNA, 17 bp, Arabidopsis thaliana
agatgagtgtgtcgaag

SEQ ID NO: 32280 - DNA, 17 bp, Arabidopsis thaliana
agatgagttagcaaact

SEQ ID NO: 32281 - DNA, 17 bp, Arabidopsis thaliana
agatgagtttggcatga

SEQ ID NO: 32282 - DNA, 17 bp, Arabidopsis thaliana
agatgataaaagttata

SEQ ID NO: 32283 - DNA, 17 bp, Arabidopsis thaliana
agatgataatccctatt

SEQ ID NO: 32284 - DNA, 17 bp, Arabidopsis thaliana
agatgatcaccgttggc

SEQ ID NO: 32285 - DNA, 17 bp, Arabidopsis thaliana
agatgatcatccgcgct

SEQ ID NO: 32286 - DNA, 17 bp, Arabidopsis thaliana
agatgatccgctgcggt

SEQ ID NO: 32287 - DNA, 17 bp, Arabidopsis thaliana
agatgatccgtctcatt

SEQ ID NO: 32288 - DNA, 17 bp, Arabidopsis thaliana
agatgatcgtgacacac

SEQ ID NO: 32289 - DNA, 17 bp, Arabidopsis thaliana
agatgatcgtttgtctt

SEQ ID NO: 32290 - DNA, 17 bp, Arabidopsis thaliana
agatgatctaatttttg

SEQ ID NO: 32291 - DNA, 17 bp, Arabidopsis thaliana
agatgatctgttgcggt

SEQ ID NO: 32292 - DNA, 17 bp, Arabidopsis thaliana
agatgatcttccgattt

SEQ ID NO: 32293 - DNA, 17 bp, Arabidopsis thaliana
agatgatgaacactaac

SEQ ID NO: 32294 - DNA, 17 bp, Arabidopsis thaliana
agatgatgaacagtaac

SEQ ID NO: 32295 - DNA, 17 bp, Arabidopsis thaliana
agatgatgaattttcta

SEQ ID NO: 32296 - DNA, 17 bp, Arabidopsis thaliana
agatgatgaccttagtc

SEQ ID NO: 32297 - DNA, 17 bp, Arabidopsis thaliana
agatgatgagtttggat

SEQ ID NO: 32298 - DNA, 17 bp, Arabidopsis thaliana
agatgatgatagaggca

SEQ ID NO: 32299 - DNA, 17 bp, Arabidopsis thaliana
agatgatgattatggcg

SEQ ID NO: 32300 - DNA, 17 bp, Arabidopsis thaliana
agatgatggacttagat

SEQ ID NO: 32301 - DNA, 17 bp, Arabidopsis thaliana
agatgatgggattagat

SEQ ID NO: 32302 - DNA, 17 bp, Arabidopsis thaliana
agatgatgggctgacct

SEQ ID NO: 32303 - DNA, 17 bp, Arabidopsis thaliana
agatgatgggcttaaat

SEQ ID NO: 32304 - DNA, 17 bp, Arabidopsis thaliana
agatgatgggcttacat

SEQ ID NO: 32305 - DNA, 17 bp, Arabidopsis thaliana
agatgatgggcttagac

SEQ ID NO: 32306 - DNA, 17 bp, Arabidopsis thaliana
agatgatgggcttagat

SEQ ID NO: 32307 - DNA, 17 bp, Arabidopsis thaliana
agatgatgggcttagtt

SEQ ID NO: 32308 - DNA, 17 bp, Arabidopsis thaliana
agatgatgggcttatat

SEQ ID NO: 32309 - DNA, 17 bp, Arabidopsis thaliana
agatgatgggtttagat

SEQ ID NO: 32310 - DNA, 17 bp, Arabidopsis thaliana
agatgatgggtttagtt

SEQ ID NO: 32311 - DNA, 17 bp, Arabidopsis thaliana
agatgatggtagatctg

SEQ ID NO: 32312 - DNA, 17 bp, Arabidopsis thaliana
agatgatggttaatcgg

SEQ ID NO: 32313 - DNA, 17 bp, Arabidopsis thaliana
agatgatgtagaggctc

SEQ ID NO: 32314 - DNA, 17 bp, Arabidopsis thaliana
agatgatgtggagggtg

SEQ ID NO: 32315 - DNA, 17 bp, Arabidopsis thaliana
agatgatgttactccga

SEQ ID NO: 32316 - DNA, 17 bp, Arabidopsis thaliana
agatgattcagttcctt

SEQ ID NO: 32317 - DNA, 17 bp, Arabidopsis thaliana
agatgattcatcttgac

SEQ ID NO: 32318 - DNA, 17 bp, Arabidopsis thaliana
agatgattctaattccg

SEQ ID NO: 32319 - DNA, 17 bp, Arabidopsis thaliana
agatgatttcatggcga

SEQ ID NO: 32320 - DNA, 17 bp, Arabidopsis thaliana
agatgatttccagtgtg

SEQ ID NO: 32321 - DNA, 17 bp, Arabidopsis thaliana
agatgatttcctgttga

SEQ ID NO: 32322 - DNA, 17 bp, Arabidopsis thaliana
agatgattttggcttga

SEQ ID NO: 32323 - DNA, 17 bp, Arabidopsis thaliana
agatgatttttaagatg

SEQ ID NO: 32324 - DNA, 17 bp, Arabidopsis thaliana
agatgcaaccatccatc

SEQ ID NO: 32325 - DNA, 17 bp, Arabidopsis thaliana
agatgcaaccgttggtg

SEQ ID NO: 32326 - DNA, 17 bp, Arabidopsis thaliana
agatgcaactgataatc

SEQ ID NO: 32327 - DNA, 17 bp, Arabidopsis thaliana
agatgcactcacagccc

SEQ ID NO: 32328 - DNA, 17 bp, Arabidopsis thaliana
agatgcactcgcagccc

SEQ ID NO: 32329 - DNA, 17 bp, Arabidopsis thaliana
agatgccaatatggatt

SEQ ID NO: 32330 - DNA, 17 bp, Arabidopsis thaliana
agatgccacaattgttt

SEQ ID NO: 32331 - DNA, 17 bp, Arabidopsis thaliana
agatgccacctgtctct

SEQ ID NO: 32332 - DNA, 17 bp, Arabidopsis thaliana
agatgccgccgacttgg

SEQ ID NO: 32333 - DNA, 17 bp, Arabidopsis thaliana
agatgccggttgtccaa

SEQ ID NO: 32334 - DNA, 17 bp, Arabidopsis thaliana
agatgccgttagttaaa

SEQ ID NO: 32335 - DNA, 17 bp, Arabidopsis thaliana
agatgcctcagtttccg

SEQ ID NO: 32336 - DNA, 17 bp, Arabidopsis thaliana
agatgccttatccacct

SEQ ID NO: 32337 - DNA, 17 bp, Arabidopsis thaliana
agatgcgaaccctgcaa

SEQ ID NO: 32338 - DNA, 17 bp, Arabidopsis thaliana
agatgcgactgccgcag

SEQ ID NO: 32339 - DNA, 17 bp, Arabidopsis thaliana
agatgcgatagttccca

SEQ ID NO: 32340 - DNA, 17 bp, Arabidopsis thaliana
agatgcgatctctcagg

SEQ ID NO: 32341 - DNA, 17 bp, Arabidopsis thaliana
agatgcgattgagtgct

SEQ ID NO: 32342 - DNA, 17 bp, Arabidopsis thaliana
agatgcggaagattcgg

SEQ ID NO: 32343 - DNA, 17 bp, Arabidopsis thaliana
agatgcggactacctac

SEQ ID NO: 32344 - DNA, 17 bp, Arabidopsis thaliana
agatgcggactacctgc

SEQ ID NO: 32345 - DNA, 17 bp, Arabidopsis thaliana
agatgcggatcgaatca

SEQ ID NO: 32346 - DNA, 17 bp, Arabidopsis thaliana
agatgcggttgcggttg

SEQ ID NO: 32347 - DNA, 17 bp, Arabidopsis thaliana
agatgcggttgcggttt

SEQ ID NO: 32348 - DNA, 17 bp, Arabidopsis thaliana
agatgctatttgggtga

SEQ ID NO: 32349 - DNA, 17 bp, Arabidopsis thaliana
agatgctcccaagcgac

SEQ ID NO: 32350 - DNA, 17 bp, Arabidopsis thaliana
agatgctcgagtagtga

SEQ ID NO: 32351 - DNA, 17 bp, Arabidopsis thaliana
agatgctcggctgattg

SEQ ID NO: 32352 - DNA, 17 bp, Arabidopsis thaliana
agatgctcggctgattt

SEQ ID NO: 32353 - DNA, 17 bp, Arabidopsis thaliana
agatgctctaaaccttt

SEQ ID NO: 32354 - DNA, 17 bp, Arabidopsis thaliana
agatgctctaaatggct

SEQ ID NO: 32355 - DNA, 17 bp, Arabidopsis thaliana
agatgctctaaggttgt

SEQ ID NO: 32356 - DNA, 17 bp, Arabidopsis thaliana
agatgctcttacctttt

SEQ ID NO: 32357 - DNA, 17 bp, Arabidopsis thaliana
agatgctcttagggaat

SEQ ID NO: 32358 - DNA, 17 bp, Arabidopsis thaliana
agatgctcttatgatca

SEQ ID NO: 32359 - DNA, 17 bp, Arabidopsis thaliana
agatgctgagattgctg

SEQ ID NO: 32360 - DNA, 17 bp, Arabidopsis thaliana
agatgctgatacagttg

SEQ ID NO: 32361 - DNA, 17 bp, Arabidopsis thaliana
agatgctgatcattcgt

SEQ ID NO: 32362 - DNA, 17 bp, Arabidopsis thaliana
agatgctgatgggtttc

SEQ ID NO: 32363 - DNA, 17 bp, Arabidopsis thaliana
agatgctgcacgtcctc

SEQ ID NO: 32364 - DNA, 17 bp, Arabidopsis thaliana
agatgctgctatctaca

SEQ ID NO: 32365 - DNA, 17 bp, Arabidopsis thaliana
agatgctgctgactcca

SEQ ID NO: 32366 - DNA, 17 bp, Arabidopsis thaliana
agatgctgcttgtcgtt

SEQ ID NO: 32367 - DNA, 17 bp, Arabidopsis thaliana
agatgctggcgacgcat

SEQ ID NO: 32368 - DNA, 17 bp, Arabidopsis thaliana
agatgctgggctcggct

SEQ ID NO: 32369 - DNA, 17 bp, Arabidopsis thaliana
agatgcttcagcttcag

SEQ ID NO: 32370 - DNA, 17 bp, Arabidopsis thaliana
agatgcttcgcgaccct

SEQ ID NO: 32371 - DNA, 17 bp, Arabidopsis thaliana
agatgcttgatctcacc

SEQ ID NO: 32372 - DNA, 17 bp, Arabidopsis thaliana
agatggaactggtgcct

SEQ ID NO: 32373 - DNA, 17 bp, Arabidopsis thaliana
agatggaagcggagact

SEQ ID NO: 32374 - DNA, 17 bp, Arabidopsis thaliana
agatggaccatccaaat

SEQ ID NO: 32375 - DNA, 17 bp, Arabidopsis thaliana
agatggaccatcctgta

SEQ ID NO: 32376 - DNA, 17 bp, Arabidopsis thaliana
agatggacctaatgcta

SEQ ID NO: 32377 - DNA, 17 bp, Arabidopsis thaliana
agatggacctgttagct

SEQ ID NO: 32378 - DNA, 17 bp, Arabidopsis thaliana
agatggactaaaccgca

SEQ ID NO: 32379 - DNA, 17 bp, Arabidopsis thaliana
agatggagatgtgatta

SEQ ID NO: 32380 - DNA, 17 bp, Arabidopsis thaliana
agatggagctcgacacc

SEQ ID NO: 32381 - DNA, 17 bp, Arabidopsis thaliana
agatggaggctgatgtc

SEQ ID NO: 32382 - DNA, 17 bp, Arabidopsis thaliana
agatggagtaccttttt

SEQ ID NO: 32383 - DNA, 17 bp, Arabidopsis thaliana
agatggataaacttatt

SEQ ID NO: 32384 - DNA, 17 bp, Arabidopsis thaliana
agatggatcaactcgat

SEQ ID NO: 32385 - DNA, 17 bp, Arabidopsis thaliana
agatggatcaatattgt

SEQ ID NO: 32386 - DNA, 17 bp, Arabidopsis thaliana
agatggatcacgtctgc

SEQ ID NO: 32387 - DNA, 17 bp, Arabidopsis thaliana
agatggatcagggtaat

SEQ ID NO: 32388 - DNA, 17 bp, Arabidopsis thaliana
agatggatcataaaatt

SEQ ID NO: 32389 - DNA, 17 bp, Arabidopsis thaliana
agatggatcatagtcgc

SEQ ID NO: 32390 - DNA, 17 bp, Arabidopsis thaliana
agatggatcatcctacc

SEQ ID NO: 32391 - DNA, 17 bp, Arabidopsis thaliana
agatggatcatcctact

SEQ ID NO: 32392 - DNA, 17 bp, Arabidopsis thaliana
agatggatcatctccac

SEQ ID NO: 32393 - DNA, 17 bp, Arabidopsis thaliana
agatggatcatctctcc

SEQ ID NO: 32394 - DNA, 17 bp, Arabidopsis thaliana
agatggatcatgcctgg

SEQ ID NO: 32395 - DNA, 17 bp, Arabidopsis thaliana
agatggatcatggatcg

SEQ ID NO: 32396 - DNA, 17 bp, Arabidopsis thaliana
agatggatcatgtacca

SEQ ID NO: 32397 - DNA, 17 bp, Arabidopsis thaliana
agatggatccaatagat

SEQ ID NO: 32398 - DNA, 17 bp, Arabidopsis thaliana
agatggatccacgtctg

SEQ ID NO: 32399 - DNA, 17 bp, Arabidopsis thaliana
agatggatccatcctgt

SEQ ID NO: 32400 - DNA, 17 bp, Arabidopsis thaliana
agatggatccctggaga

SEQ ID NO: 32401 - DNA, 17 bp, Arabidopsis thaliana
agatggatccctgtaga

SEQ ID NO: 32402 - DNA, 17 bp, Arabidopsis thaliana
agatggatccgcatcct

SEQ ID NO: 32403 - DNA, 17 bp, Arabidopsis thaliana
agatggatccgtatcct

SEQ ID NO: 32404 - DNA, 17 bp, Arabidopsis thaliana
agatggatccgtctgcc

SEQ ID NO: 32405 - DNA, 17 bp, Arabidopsis thaliana
agatggatccttagtcg

SEQ ID NO: 32406 - DNA, 17 bp, Arabidopsis thaliana
agatggatcgcccccat

SEQ ID NO: 32407 - DNA, 17 bp, Arabidopsis thaliana
agatggatcgggttgct

SEQ ID NO: 32408 - DNA, 17 bp, Arabidopsis thaliana
agatggatcgtaaagtg

SEQ ID NO: 32409 - DNA, 17 bp, Arabidopsis thaliana
agatggatcgtatcatc

SEQ ID NO: 32410 - DNA, 17 bp, Arabidopsis thaliana
agatggatcgtcgcatc

SEQ ID NO: 32411 - DNA, 17 bp, Arabidopsis thaliana
agatggatcgtttctat

SEQ ID NO: 32412 - DNA, 17 bp, Arabidopsis thaliana
agatggatctcctgtag

SEQ ID NO: 32413 - DNA, 17 bp, Arabidopsis thaliana
agatggatctcggaatg

SEQ ID NO: 32414 - DNA, 17 bp, Arabidopsis thaliana
agatggatctcggacca

SEQ ID NO: 32415 - DNA, 17 bp, Arabidopsis thaliana
agatggatctgaagctg

SEQ ID NO: 32416 - DNA, 17 bp, Arabidopsis thaliana
agatggatctggggctt

SEQ ID NO: 32417 - DNA, 17 bp, Arabidopsis thaliana
agatggatctggtatcc

SEQ ID NO: 32418 - DNA, 17 bp, Arabidopsis thaliana
agatggatctgtgttct

SEQ ID NO: 32419 - DNA, 17 bp, Arabidopsis thaliana
agatggatcttagattc

SEQ ID NO: 32420 - DNA, 17 bp, Arabidopsis thaliana
agatggatcttcttcgt

SEQ ID NO: 32421 - DNA, 17 bp, Arabidopsis thaliana
agatggatctttaaacc

SEQ ID NO: 32422 - DNA, 17 bp, Arabidopsis thaliana
agatggatctttaggcc

SEQ ID NO: 32423 - DNA, 17 bp, Arabidopsis thaliana
agatggatctttgatcc

SEQ ID NO: 32424 - DNA, 17 bp, Arabidopsis thaliana
agatggatcttttgctg

SEQ ID NO: 32425 - DNA, 17 bp, Arabidopsis thaliana
agatggatcttttggtc

SEQ ID NO: 32426 - DNA, 17 bp, Arabidopsis thaliana
agatggatgattggttg

SEQ ID NO: 32427 - DNA, 17 bp, Arabidopsis thaliana
agatggatgggctcccc

SEQ ID NO: 32428 - DNA, 17 bp, Arabidopsis thaliana
agatggattagtcgcat

SEQ ID NO: 32429 - DNA, 17 bp, Arabidopsis thaliana
agatggcaaagtgtaca

SEQ ID NO: 32430 - DNA, 17 bp, Arabidopsis thaliana
agatggcaaagtgtcta

SEQ ID NO: 32431 - DNA, 17 bp, Arabidopsis thaliana
agatggcaaagtgttca

SEQ ID NO: 32432 - DNA, 17 bp, Arabidopsis thaliana
agatggcagcgataatc

SEQ ID NO: 32433 - DNA, 17 bp, Arabidopsis thaliana
agatggcccgatgttcg

SEQ ID NO: 32434 - DNA, 17 bp, Arabidopsis thaliana
agatggccgcaaaatta

SEQ ID NO: 32435 - DNA, 17 bp, Arabidopsis thaliana
agatggcgactagggtt

SEQ ID NO: 32436 - DNA, 17 bp, Arabidopsis thaliana
agatggcgagagtccag

SEQ ID NO: 32437 - DNA, 17 bp, Arabidopsis thaliana
agatggcggttgacaga

SEQ ID NO: 32438 - DNA, 17 bp, Arabidopsis thaliana
agatggctcagatactc

SEQ ID NO: 32439 - DNA, 17 bp, Arabidopsis thaliana
agatgggaaacggtcca

SEQ ID NO: 32440 - DNA, 17 bp, Arabidopsis thaliana
agatgggatctggatac

SEQ ID NO: 32441 - DNA, 17 bp, Arabidopsis thaliana
agatgggatctggtcac

SEQ ID NO: 32442 - DNA, 17 bp, Arabidopsis thaliana
agatgggcactgcggtt

SEQ ID NO: 32443 - DNA, 17 bp, Arabidopsis thaliana
agatgggccatatgtgt

SEQ ID NO: 32444 - DNA, 17 bp, Arabidopsis thaliana
agatggggatgaggacg

SEQ ID NO: 32445 - DNA, 17 bp, Arabidopsis thaliana
agatggggtatccctac

SEQ ID NO: 32446 - DNA, 17 bp, Arabidopsis thaliana
agatgggttagtggtga

SEQ ID NO: 32447 - DNA, 17 bp, Arabidopsis thaliana
agatgggttcatccacg

SEQ ID NO: 32448 - DNA, 17 bp, Arabidopsis thaliana
agatgggttgtccgctt

SEQ ID NO: 32449 - DNA, 17 bp, Arabidopsis thaliana
agatgggtttgcttggt

SEQ ID NO: 32450 - DNA, 17 bp, Arabidopsis thaliana
agatgggttttctccga

SEQ ID NO: 32451 - DNA, 17 bp, Arabidopsis thaliana
agatggtaggacgggtt

SEQ ID NO: 32452 - DNA, 17 bp, Arabidopsis thaliana
agatggtaggatgggtt

SEQ ID NO: 32453 - DNA, 17 bp, Arabidopsis thaliana
agatggtatcagaggct

SEQ ID NO: 32454 - DNA, 17 bp, Arabidopsis thaliana
agatggtatctgatggc

SEQ ID NO: 32455 - DNA, 17 bp, Arabidopsis thaliana
agatggtatgacgagtt

SEQ ID NO: 32456 - DNA, 17 bp, Arabidopsis thaliana
agatggtccagtctgag

SEQ ID NO: 32457 - DNA, 17 bp, Arabidopsis thaliana
agatggtccatctgaat

SEQ ID NO: 32458 - DNA, 17 bp, Arabidopsis thaliana
agatggtccgcaacggt

SEQ ID NO: 32459 - DNA, 17 bp, Arabidopsis thaliana
agatggtccgcagcggt

SEQ ID NO: 32460 - DNA, 17 bp, Arabidopsis thaliana
agatggtccgctgcggg

SEQ ID NO: 32461 - DNA, 17 bp, Arabidopsis thaliana
agatggtccgctgcggt

SEQ ID NO: 32462 - DNA, 17 bp, Arabidopsis thaliana
agatggtccgttgcggt

SEQ ID NO: 32463 - DNA, 17 bp, Arabidopsis thaliana
agatggtcgctcgtccc

SEQ ID NO: 32464 - DNA, 17 bp, Arabidopsis thaliana
agatggtctaagggctt

SEQ ID NO: 32465 - DNA, 17 bp, Arabidopsis thaliana
agatggtctgatgtgtc

SEQ ID NO: 32466 - DNA, 17 bp, Arabidopsis thaliana
agatggtcttatgggtt

SEQ ID NO: 32467 - DNA, 17 bp, Arabidopsis thaliana
agatggtcttgtccggt

SEQ ID NO: 32468 - DNA, 17 bp, Arabidopsis thaliana
agatggtgaactatgcc

SEQ ID NO: 32469 - DNA, 17 bp, Arabidopsis thaliana
agatggtgattcaggat

SEQ ID NO: 32470 - DNA, 17 bp, Arabidopsis thaliana
agatggtgctgctcaga

SEQ ID NO: 32471 - DNA, 17 bp, Arabidopsis thaliana
agatggtggatttgtga

SEQ ID NO: 32472 - DNA, 17 bp, Arabidopsis thaliana
agatggtggcgtgacca

SEQ ID NO: 32473 - DNA, 17 bp, Arabidopsis thaliana
agatggtgggacccacg

SEQ ID NO: 32474 - DNA, 17 bp, Arabidopsis thaliana
agatggtggtggctatt

SEQ ID NO: 32475 - DNA, 17 bp, Arabidopsis thaliana
agatggtgtcttctcca

SEQ ID NO: 32476 - DNA, 17 bp, Arabidopsis thaliana
agatggttattctcggt

SEQ ID NO: 32477 - DNA, 17 bp, Arabidopsis thaliana
agatggttcatccaaat

SEQ ID NO: 32478 - DNA, 17 bp, Arabidopsis thaliana
agatggttgaagctgcc

SEQ ID NO: 32479 - DNA, 17 bp, Arabidopsis thaliana
agatggtttgtccgctt

SEQ ID NO: 32480 - DNA, 17 bp, Arabidopsis thaliana
agatggttttccgcttg

SEQ ID NO: 32481 - DNA, 17 bp, Arabidopsis thaliana
agatgtaactctttgga

SEQ ID NO: 32482 - DNA, 17 bp, Arabidopsis thaliana
agatgtaagttgctcgg

SEQ ID NO: 32483 - DNA, 17 bp, Arabidopsis thaliana
agatgtaatgaagatgg

SEQ ID NO: 32484 - DNA, 17 bp, Arabidopsis thaliana
agatgtaattttgctat

SEQ ID NO: 32485 - DNA, 17 bp, Arabidopsis thaliana
agatgtagaccactcta

SEQ ID NO: 32486 - DNA, 17 bp, Arabidopsis thaliana
agatgtaggacctttgg

SEQ ID NO: 32487 - DNA, 17 bp, Arabidopsis thaliana
agatgtagggcctttcg

SEQ ID NO: 32488 - DNA, 17 bp, Arabidopsis thaliana
agatgtagtaacgtgga

SEQ ID NO: 32489 - DNA, 17 bp, Arabidopsis thaliana
agatgtatcccaactat

SEQ ID NO: 32490 - DNA, 17 bp, Arabidopsis thaliana
agatgtatctgcacagt

SEQ ID NO: 32491 - DNA, 17 bp, Arabidopsis thaliana
agatgtatttttcagga

SEQ ID NO: 32492 - DNA, 17 bp, Arabidopsis thaliana
agatgtcaaggccaggg

SEQ ID NO: 32493 - DNA, 17 bp, Arabidopsis thaliana
agatgtcacaggttcga

SEQ ID NO: 32494 - DNA, 17 bp, Arabidopsis thaliana
agatgtcacctagattc

SEQ ID NO: 32495 - DNA, 17 bp, Arabidopsis thaliana
agatgtcactacttctg

SEQ ID NO: 32496 - DNA, 17 bp, Arabidopsis thaliana
agatgtcatgatgttgt

SEQ ID NO: 32497 - DNA, 17 bp, Arabidopsis thaliana
agatgtccgataacatt

SEQ ID NO: 32498 - DNA, 17 bp, Arabidopsis thaliana
agatgtcctaactcgtt

SEQ ID NO: 32499 - DNA, 17 bp, Arabidopsis thaliana
agatgtcgaatgatgtt

SEQ ID NO: 32500 - DNA, 17 bp, Arabidopsis thaliana
agatgtcgaatgtgact

SEQ ID NO: 32501 - DNA, 17 bp, Arabidopsis thaliana
agatgtcgtctgtcgtg

SEQ ID NO: 32502 - DNA, 17 bp, Arabidopsis thaliana
agatgtgaaatcgtgcg

SEQ ID NO: 32503 - DNA, 17 bp, Arabidopsis thaliana
agatgtgaatccatgtg

SEQ ID NO: 32504 - DNA, 17 bp, Arabidopsis thaliana
agatgtgaatcgatttt

SEQ ID NO: 32505 - DNA, 17 bp, Arabidopsis thaliana
agatgtgaggtcgagtg

SEQ ID NO: 32506 - DNA, 17 bp, Arabidopsis thaliana
agatgtgatgaagatgg

SEQ ID NO: 32507 - DNA, 17 bp, Arabidopsis thaliana
agatgtgattccgaacc

SEQ ID NO: 32508 - DNA, 17 bp, Arabidopsis thaliana
agatgtgattgagtgct

SEQ ID NO: 32509 - DNA, 17 bp, Arabidopsis thaliana
agatgtgcattggtcgg

SEQ ID NO: 32510 - DNA, 17 bp, Arabidopsis thaliana
agatgtgccgccccacc

SEQ ID NO: 32511 - DNA, 17 bp, Arabidopsis thaliana
agatgtgccgccccagc

SEQ ID NO: 32512 - DNA, 17 bp, Arabidopsis thaliana
agatgtgcgagggattt

SEQ ID NO: 32513 - DNA, 17 bp, Arabidopsis thaliana
agatgtgctatatgacg

SEQ ID NO: 32514 - DNA, 17 bp, Arabidopsis thaliana
agatgtggccgaatctt

SEQ ID NO: 32515 - DNA, 17 bp, Arabidopsis thaliana
agatgtggcgtttccaa

SEQ ID NO: 32516 - DNA, 17 bp, Arabidopsis thaliana
agatgtgggacgttggt

SEQ ID NO: 32517 - DNA, 17 bp, Arabidopsis thaliana
agatgtgggcacattgg

SEQ ID NO: 32518 - DNA, 17 bp, Arabidopsis thaliana
agatgtgggcttagatg

SEQ ID NO: 32519 - DNA, 17 bp, Arabidopsis thaliana
agatgtggttgcaactt

SEQ ID NO: 32520 - DNA, 17 bp, Arabidopsis thaliana
agatgtgtcgtcgtggc

SEQ ID NO: 32521 - DNA, 17 bp, Arabidopsis thaliana
agatgtgtggttggcta

SEQ ID NO: 32522 - DNA, 17 bp, Arabidopsis thaliana
agatgtgttagcggcaa

SEQ ID NO: 32523 - DNA, 17 bp, Arabidopsis thaliana
agatgtgtttcatgagc

SEQ ID NO: 32524 - DNA, 17 bp, Arabidopsis thaliana
agatgtgtttcccgcga

SEQ ID NO: 32525 - DNA, 17 bp, Arabidopsis thaliana
agatgtgtttgttgatg

SEQ ID NO: 32526 - DNA, 17 bp, Arabidopsis thaliana
agatgttacggctgagt

SEQ ID NO: 32527 - DNA, 17 bp, Arabidopsis thaliana
agatgttactcgacctg

SEQ ID NO: 32528 - DNA, 17 bp, Arabidopsis thaliana
agatgttaggacgagtt

SEQ ID NO: 32529 - DNA, 17 bp, Arabidopsis thaliana
agatgttatctttggat

SEQ ID NO: 32530 - DNA, 17 bp, Arabidopsis thaliana
agatgttctccgggtca

SEQ ID NO: 32531 - DNA, 17 bp, Arabidopsis thaliana
agatgttctgagactac

SEQ ID NO: 32532 - DNA, 17 bp, Arabidopsis thaliana
agatgttctgggccgca

SEQ ID NO: 32533 - DNA, 17 bp, Arabidopsis thaliana
agatgttgacatttagg

SEQ ID NO: 32534 - DNA, 17 bp, Arabidopsis thaliana
agatgttgagccgctgt

SEQ ID NO: 32535 - DNA, 17 bp, Arabidopsis thaliana
agatgttgagctgctgt

SEQ ID NO: 32536 - DNA, 17 bp, Arabidopsis thaliana
agatgttgcccgcagac

SEQ ID NO: 32537 - DNA, 17 bp, Arabidopsis thaliana
agatgttggattacggt

SEQ ID NO: 32538 - DNA, 17 bp, Arabidopsis thaliana
agatgttgggcttacgc

SEQ ID NO: 32539 - DNA, 17 bp, Arabidopsis thaliana
agatgttgggcttgatt

SEQ ID NO: 32540 - DNA, 17 bp, Arabidopsis thaliana
agatgttgggcttgggc

SEQ ID NO: 32541 - DNA, 17 bp, Arabidopsis thaliana
agatgtttccgaggggg

SEQ ID NO: 32542 - DNA, 17 bp, Arabidopsis thaliana
agatgtttctagtaaga

SEQ ID NO: 32543 - DNA, 17 bp, Arabidopsis thaliana
agatgtttgcccgcttg

SEQ ID NO: 32544 - DNA, 17 bp, Arabidopsis thaliana
agatgtttgcgccagac

SEQ ID NO: 32545 - DNA, 17 bp, Arabidopsis thaliana
agatgtttgctaagatt

SEQ ID NO: 32546 - DNA, 17 bp, Arabidopsis thaliana
agatgtttggaagactc

SEQ ID NO: 32547 - DNA, 17 bp, Arabidopsis thaliana
agatgttttcgaggcga

SEQ ID NO: 32548 - DNA, 17 bp, Arabidopsis thaliana
agattaacatattgcgt

SEQ ID NO: 32549 - DNA, 17 bp, Arabidopsis thaliana
agattaacgatggaagt

SEQ ID NO: 32550 - DNA, 17 bp, Arabidopsis thaliana
agattaacgatggcagt

SEQ ID NO: 32551 - DNA, 17 bp, Arabidopsis thaliana
agattaactgatggcag

SEQ ID NO: 32552 - DNA, 17 bp, Arabidopsis thaliana
agattaagccatgcatg

SEQ ID NO: 32553 - DNA, 17 bp, Arabidopsis thaliana
agattaaggacaagatt

SEQ ID NO: 32554 - DNA, 17 bp, Arabidopsis thaliana
agattaatgacccattc

SEQ ID NO: 32555 - DNA, 17 bp, Arabidopsis thaliana
agattaatgatggaagt

SEQ ID NO: 32556 - DNA, 17 bp, Arabidopsis thaliana
agattaatttgtctctt

SEQ ID NO: 32557 - DNA, 17 bp, Arabidopsis thaliana
agattacaagacctgac

SEQ ID NO: 32558 - DNA, 17 bp, Arabidopsis thaliana
agattacagacttcggt

SEQ ID NO: 32559 - DNA, 17 bp, Arabidopsis thaliana
agattacagggcttatc

SEQ ID NO: 32560 - DNA, 17 bp, Arabidopsis thaliana
agattacagggcttatt

SEQ ID NO: 32561 - DNA, 17 bp, Arabidopsis thaliana
agattaccaccacgatg

SEQ ID NO: 32562 - DNA, 17 bp, Arabidopsis thaliana
agattaccatcacgatg

SEQ ID NO: 32563 - DNA, 17 bp, Arabidopsis thaliana
agattaccatcacggtt

SEQ ID NO: 32564 - DNA, 17 bp, Arabidopsis thaliana
agattaccgatggagat

SEQ ID NO: 32565 - DNA, 17 bp, Arabidopsis thaliana
agattaccgcacgcgtg

SEQ ID NO: 32566 - DNA, 17 bp, Arabidopsis thaliana
agattacgctgtacaga

SEQ ID NO: 32567 - DNA, 17 bp, Arabidopsis thaliana
agattacgcttgcgcaa

SEQ ID NO: 32568 - DNA, 17 bp, Arabidopsis thaliana
agattacggacttcgcc

SEQ ID NO: 32569 - DNA, 17 bp, Arabidopsis thaliana
agattacggacttcggc

SEQ ID NO: 32570 - DNA, 17 bp, Arabidopsis thaliana
agattacgggtttcgat

SEQ ID NO: 32571 - DNA, 17 bp, Arabidopsis thaliana
agattacgggtttcgcc

SEQ ID NO: 32572 - DNA, 17 bp, Arabidopsis thaliana
agattacgggtttcggt

SEQ ID NO: 32573 - DNA, 17 bp, Arabidopsis thaliana
agattacggtagagatc

SEQ ID NO: 32574 - DNA, 17 bp, Arabidopsis thaliana
agattacggtggcggcc

SEQ ID NO: 32575 - DNA, 17 bp, Arabidopsis thaliana
agattacgtccatgcaa

SEQ ID NO: 32576 - DNA, 17 bp, Arabidopsis thaliana
agattacgtgtctcggc

SEQ ID NO: 32577 - DNA, 17 bp, Arabidopsis thaliana
agattactacgcctcct

SEQ ID NO: 32578 - DNA, 17 bp, Arabidopsis thaliana
agattactagattctga

SEQ ID NO: 32579 - DNA, 17 bp, Arabidopsis thaliana
agattactgatggagat

SEQ ID NO: 32580 - DNA, 17 bp, Arabidopsis thaliana
agattagacgagaattt

SEQ ID NO: 32581 - DNA, 17 bp, Arabidopsis thaliana
agattagactctgatcg

SEQ ID NO: 32582 - DNA, 17 bp, Arabidopsis thaliana
agattagattgcggatt

SEQ ID NO: 32583 - DNA, 17 bp, Arabidopsis thaliana
agattagattgtaggac

SEQ ID NO: 32584 - DNA, 17 bp, Arabidopsis thaliana
agattagattttaaccc

SEQ ID NO: 32585 - DNA, 17 bp, Arabidopsis thaliana
agattagcaggcatgct

SEQ ID NO: 32586 - DNA, 17 bp, Arabidopsis thaliana
agattagccagaggact

SEQ ID NO: 32587 - DNA, 17 bp, Arabidopsis thaliana
agattagccggtagggt

SEQ ID NO: 32588 - DNA, 17 bp, Arabidopsis thaliana
agattagcgtctcaagc

SEQ ID NO: 32589 - DNA, 17 bp, Arabidopsis thaliana
agattagctccagcctt

SEQ ID NO: 32590 - DNA, 17 bp, Arabidopsis thaliana
agattagctccggcctt

SEQ ID NO: 32591 - DNA, 17 bp, Arabidopsis thaliana
agattaggcgtctggat

SEQ ID NO: 32592 - DNA, 17 bp, Arabidopsis thaliana
agattaggcttcatcgg

SEQ ID NO: 32593 - DNA, 17 bp, Arabidopsis thaliana
agattaggtttgctcgt

SEQ ID NO: 32594 - DNA, 17 bp, Arabidopsis thaliana
agattagtgacgaggca

SEQ ID NO: 32595 - DNA, 17 bp, Arabidopsis thaliana
agattagtgttgaccgg

SEQ ID NO: 32596 - DNA, 17 bp, Arabidopsis thaliana
agattagttccacgtct

SEQ ID NO: 32597 - DNA, 17 bp, Arabidopsis thaliana
agattagtttggaatca

SEQ ID NO: 32598 - DNA, 17 bp, Arabidopsis thaliana
agattataacccgcggt

SEQ ID NO: 32599 - DNA, 17 bp, Arabidopsis thaliana
agattataatgcgaaga

SEQ ID NO: 32600 - DNA, 17 bp, Arabidopsis thaliana
agattatagggcttatt

SEQ ID NO: 32601 - DNA, 17 bp, Arabidopsis thaliana
agattatatcgggctat

SEQ ID NO: 32602 - DNA, 17 bp, Arabidopsis thaliana
agattatccacatttct

SEQ ID NO: 32603 - DNA, 17 bp, Arabidopsis thaliana
agattatccgtgcaaaa

SEQ ID NO: 32604 - DNA, 17 bp, Arabidopsis thaliana
agattatctacgggtaa

SEQ ID NO: 32605 - DNA, 17 bp, Arabidopsis thaliana
agattatctctaagctg

SEQ ID NO: 32606 - DNA, 17 bp, Arabidopsis thaliana
agattatctggatgtac

SEQ ID NO: 32607 - DNA, 17 bp, Arabidopsis thaliana
agattatcttggccgga

SEQ ID NO: 32608 - DNA, 17 bp, Arabidopsis thaliana
agattatctttgatagg

SEQ ID NO: 32609 - DNA, 17 bp, Arabidopsis thaliana
agattatgacagaagca

SEQ ID NO: 32610 - DNA, 17 bp, Arabidopsis thaliana
agattatgcgcttacag

SEQ ID NO: 32611 - DNA, 17 bp, Arabidopsis thaliana
agattatgcgcttacgg

SEQ ID NO: 32612 - DNA, 17 bp, Arabidopsis thaliana
agattatgggcttagat

SEQ ID NO: 32613 - DNA, 17 bp, Arabidopsis thaliana
agattatgggcttagtt

SEQ ID NO: 32614 - DNA, 17 bp, Arabidopsis thaliana
agattattcgatggcct

SEQ ID NO: 32615 - DNA, 17 bp, Arabidopsis thaliana
agattattctcaaacga

SEQ ID NO: 32616 - DNA, 17 bp, Arabidopsis thaliana
agattattgctcgacgc

SEQ ID NO: 32617 - DNA, 17 bp, Arabidopsis thaliana
agattattgggtcatcg

SEQ ID NO: 32618 - DNA, 17 bp, Arabidopsis thaliana
agattattggttgtgtg

SEQ ID NO: 32619 - DNA, 17 bp, Arabidopsis thaliana
agattatttcgcgctga

SEQ ID NO: 32620 - DNA, 17 bp, Arabidopsis thaliana
agattatttcggcttac

SEQ ID NO: 32621 - DNA, 17 bp, Arabidopsis thaliana
agattatttgctaagag

SEQ ID NO: 32622 - DNA, 17 bp, Arabidopsis thaliana
agattatttttgatagg

SEQ ID NO: 32623 - DNA, 17 bp, Arabidopsis thaliana
agattcaaggttcgcaa

SEQ ID NO: 32624 - DNA, 17 bp, Arabidopsis thaliana
agattcaatcccggtgg

SEQ ID NO: 32625 - DNA, 17 bp, Arabidopsis thaliana
agattcaatcgcggtgc

SEQ ID NO: 32626 - DNA, 17 bp, Arabidopsis thaliana
agattcaatcgcgttgc

SEQ ID NO: 32627 - DNA, 17 bp, Arabidopsis thaliana
agattcaatctcgcagt

SEQ ID NO: 32628 - DNA, 17 bp, Arabidopsis thaliana
agattcacagaactgtc

SEQ ID NO: 32629 - DNA, 17 bp, Arabidopsis thaliana
agattcaccatgtcatt

SEQ ID NO: 32630 - DNA, 17 bp, Arabidopsis thaliana
agattcacgacatatga

SEQ ID NO: 32631 - DNA, 17 bp, Arabidopsis thaliana
agattcacgacatctgt

SEQ ID NO: 32632 - DNA, 17 bp, Arabidopsis thaliana
agattcacgacgtctgt

SEQ ID NO: 32633 - DNA, 17 bp, Arabidopsis thaliana
agattcacgagagacgg

SEQ ID NO: 32634 - DNA, 17 bp, Arabidopsis thaliana
agattcacgattctttg

SEQ ID NO: 32635 - DNA, 17 bp, Arabidopsis thaliana
agattcactgcttgacc

SEQ ID NO: 32636 - DNA, 17 bp, Arabidopsis thaliana
agattcactgcttgact

SEQ ID NO: 32637 - DNA, 17 bp, Arabidopsis thaliana
agattcacttgacaaca

SEQ ID NO: 32638 - DNA, 17 bp, Arabidopsis thaliana
agattcagccaagccat

SEQ ID NO: 32639 - DNA, 17 bp, Arabidopsis thaliana
agattcagccatttgtc

SEQ ID NO: 32640 - DNA, 17 bp, Arabidopsis thaliana
agattcagccccttgcc

SEQ ID NO: 32641 - DNA, 17 bp, Arabidopsis thaliana
agattcagccccttgtc

SEQ ID NO: 32642 - DNA, 17 bp, Arabidopsis thaliana
agattcagcccttagtc

SEQ ID NO: 32643 - DNA, 17 bp, Arabidopsis thaliana
agattcagcccttgtcg

SEQ ID NO: 32644 - DNA, 17 bp, Arabidopsis thaliana
agattcagccctttgcc

SEQ ID NO: 32645 - DNA, 17 bp, Arabidopsis thaliana
agattcagccctttgtc

SEQ ID NO: 32646 - DNA, 17 bp, Arabidopsis thaliana
agattcagccttgtcgc

SEQ ID NO: 32647 - DNA, 17 bp, Arabidopsis thaliana
agattcagcctttgtcg

SEQ ID NO: 32648 - DNA, 17 bp, Arabidopsis thaliana
agattcagccttttgtc

SEQ ID NO: 32649 - DNA, 17 bp, Arabidopsis thaliana
agattcagctgagcccc

SEQ ID NO: 32650 - DNA, 17 bp, Arabidopsis thaliana
agattcagcttttgtcg

SEQ ID NO: 32651 - DNA, 17 bp, Arabidopsis thaliana
agattcagtcatggtgg

SEQ ID NO: 32652 - DNA, 17 bp, Arabidopsis thaliana
agattcatccaactgat

SEQ ID NO: 32653 - DNA, 17 bp, Arabidopsis thaliana
agattcatcgcttggag

SEQ ID NO: 32654 - DNA, 17 bp, Arabidopsis thaliana
agattcatgataactcg

SEQ ID NO: 32655 - DNA, 17 bp, Arabidopsis thaliana
agattccaaacacaaat

SEQ ID NO: 32656 - DNA, 17 bp, Arabidopsis thaliana
agattccaaccggccgg

SEQ ID NO: 32657 - DNA, 17 bp, Arabidopsis thaliana
agattccaactagtata

SEQ ID NO: 32658 - DNA, 17 bp, Arabidopsis thaliana
agattccaggatctcca

SEQ ID NO: 32659 - DNA, 17 bp, Arabidopsis thaliana
agattccatctcctctc

SEQ ID NO: 32660 - DNA, 17 bp, Arabidopsis thaliana
agattccatcttctctc

SEQ ID NO: 32661 - DNA, 17 bp, Arabidopsis thaliana
agattccatcttctctt

SEQ ID NO: 32662 - DNA, 17 bp, Arabidopsis thaliana
agattccatgacccaga

SEQ ID NO: 32663 - DNA, 17 bp, Arabidopsis thaliana
agattcccactgtccct

SEQ ID NO: 32664 - DNA, 17 bp, Arabidopsis thaliana
agattccccagtcattc

SEQ ID NO: 32665 - DNA, 17 bp, Arabidopsis thaliana
agattcccggctggtgc

SEQ ID NO: 32666 - DNA, 17 bp, Arabidopsis thaliana
agattccctatctcggt

SEQ ID NO: 32667 - DNA, 17 bp, Arabidopsis thaliana
agattccgatatcgcca

SEQ ID NO: 32668 - DNA, 17 bp, Arabidopsis thaliana
agattccgattcagttt

SEQ ID NO: 32669 - DNA, 17 bp, Arabidopsis thaliana
agattccgcatttgatt

SEQ ID NO: 32670 - DNA, 17 bp, Arabidopsis thaliana
agattccgctatcgtgt

SEQ ID NO: 32671 - DNA, 17 bp, Arabidopsis thaliana
agattccggacctcgcc

SEQ ID NO: 32672 - DNA, 17 bp, Arabidopsis thaliana
agattccgttatcgagt

SEQ ID NO: 32673 - DNA, 17 bp, Arabidopsis thaliana
agattccgtttttttga

SEQ ID NO: 32674 - DNA, 17 bp, Arabidopsis thaliana
agattcctaaagggcgc

SEQ ID NO: 32675 - DNA, 17 bp, Arabidopsis thaliana
agattcctacggtccca

SEQ ID NO: 32676 - DNA, 17 bp, Arabidopsis thaliana
agattcctattagctgg

SEQ ID NO: 32677 - DNA, 17 bp, Arabidopsis thaliana
agattcctctggattgg

SEQ ID NO: 32678 - DNA, 17 bp, Arabidopsis thaliana
agattcgaaaattgggt

SEQ ID NO: 32679 - DNA, 17 bp, Arabidopsis thaliana
agattcgaaccactact

SEQ ID NO: 32680 - DNA, 17 bp, Arabidopsis thaliana
agattcgaactctctag

SEQ ID NO: 32681 - DNA, 17 bp, Arabidopsis thaliana
agattcgaagccctgtg

SEQ ID NO: 32682 - DNA, 17 bp, Arabidopsis thaliana
agattcgactgttgacg

SEQ ID NO: 32683 - DNA, 17 bp, Arabidopsis thaliana
agattcgacttcccctg

SEQ ID NO: 32684 - DNA, 17 bp, Arabidopsis thaliana
agattcgagataagtct

SEQ ID NO: 32685 - DNA, 17 bp, Arabidopsis thaliana
agattcgagcgttcttc

SEQ ID NO: 32686 - DNA, 17 bp, Arabidopsis thaliana
agattcgatccccagca

SEQ ID NO: 32687 - DNA, 17 bp, Arabidopsis thaliana
agattcgatcgtgactc

SEQ ID NO: 32688 - DNA, 17 bp, Arabidopsis thaliana
agattcgatgaactacg

SEQ ID NO: 32689 - DNA, 17 bp, Arabidopsis thaliana
agattcgattaaccgtg

SEQ ID NO: 32690 - DNA, 17 bp, Arabidopsis thaliana
agattcgccaacccagc

SEQ ID NO: 32691 - DNA, 17 bp, Arabidopsis thaliana
agattcgcccaccaagt

SEQ ID NO: 32692 - DNA, 17 bp, Arabidopsis thaliana
agattcgcctagggtct

SEQ ID NO: 32693 - DNA, 17 bp, Arabidopsis thaliana
agattcgcgattttggg

SEQ ID NO: 32694 - DNA, 17 bp, Arabidopsis thaliana
agattcggactatccag

SEQ ID NO: 32695 - DNA, 17 bp, Arabidopsis thaliana
agattcggacttttggt

SEQ ID NO: 32696 - DNA, 17 bp, Arabidopsis thaliana
agattcggactttttgg

SEQ ID NO: 32697 - DNA, 17 bp, Arabidopsis thaliana
agattcggagactgttg

SEQ ID NO: 32698 - DNA, 17 bp, Arabidopsis thaliana
agattcggagtacccga

SEQ ID NO: 32699 - DNA, 17 bp, Arabidopsis thaliana
agattcggattggtttt

SEQ ID NO: 32700 - DNA, 17 bp, Arabidopsis thaliana
agattcggcccagaacc

SEQ ID NO: 32701 - DNA, 17 bp, Arabidopsis thaliana
agattcggctgaaggtt

SEQ ID NO: 32702 - DNA, 17 bp, Arabidopsis thaliana
agattcgggagcgtctg

SEQ ID NO: 32703 - DNA, 17 bp, Arabidopsis thaliana
agattcgggatggctca

SEQ ID NO: 32704 - DNA, 17 bp, Arabidopsis thaliana
agattcgggttgagatt

SEQ ID NO: 32705 - DNA, 17 bp, Arabidopsis thaliana
agattcggtcccaccgg

SEQ ID NO: 32706 - DNA, 17 bp, Arabidopsis thaliana
agattcggtgcgatcta

SEQ ID NO: 32707 - DNA, 17 bp, Arabidopsis thaliana
agattcggttcgggttc

SEQ ID NO: 32708 - DNA, 17 bp, Arabidopsis thaliana
agattcgtattacccaa

SEQ ID NO: 32709 - DNA, 17 bp, Arabidopsis thaliana
agattcgtggtatagcg

SEQ ID NO: 32710 - DNA, 17 bp, Arabidopsis thaliana
agattcgtttgcgggtt

SEQ ID NO: 32711 - DNA, 17 bp, Arabidopsis thaliana
agattcgtttgtcgggt

SEQ ID NO: 32712 - DNA, 17 bp, Arabidopsis thaliana
agattctaagatccacc

SEQ ID NO: 32713 - DNA, 17 bp, Arabidopsis thaliana
agattctaagtcttccg

SEQ ID NO: 32714 - DNA, 17 bp, Arabidopsis thaliana
agattctaatctatcgc

SEQ ID NO: 32715 - DNA, 17 bp, Arabidopsis thaliana
agattctaccgttgtgc

SEQ ID NO: 32716 - DNA, 17 bp, Arabidopsis thaliana
agattctacttgaggtt

SEQ ID NO: 32717 - DNA, 17 bp, Arabidopsis thaliana
agattctagatcatcaa

SEQ ID NO: 32718 - DNA, 17 bp, Arabidopsis thaliana
agattctagcaaatcca

SEQ ID NO: 32719 - DNA, 17 bp, Arabidopsis thaliana
agattctagcccaagac

SEQ ID NO: 32720 - DNA, 17 bp, Arabidopsis thaliana
agattctagttcatatg

SEQ ID NO: 32721 - DNA, 17 bp, Arabidopsis thaliana
agattctatgttgctac

SEQ ID NO: 32722 - DNA, 17 bp, Arabidopsis thaliana
agattctattaaggctc

SEQ ID NO: 32723 - DNA, 17 bp, Arabidopsis thaliana
agattctcaatttggcc

SEQ ID NO: 32724 - DNA, 17 bp, Arabidopsis thaliana
agattctcattcaggag

SEQ ID NO: 32725 - DNA, 17 bp, Arabidopsis thaliana
agattctccctcccatc

SEQ ID NO: 32726 - DNA, 17 bp, Arabidopsis thaliana
agattctccgctacaga

SEQ ID NO: 32727 - DNA, 17 bp, Arabidopsis thaliana
agattctccggcgagac

SEQ ID NO: 32728 - DNA, 17 bp, Arabidopsis thaliana
agattctgaaactgcta

SEQ ID NO: 32729 - DNA, 17 bp, Arabidopsis thaliana
agattctgacaacaacg

SEQ ID NO: 32730 - DNA, 17 bp, Arabidopsis thaliana
agattctgacccgcaca

SEQ ID NO: 32731 - DNA, 17 bp, Arabidopsis thaliana
agattctgacccgcacg

SEQ ID NO: 32732 - DNA, 17 bp, Arabidopsis thaliana
agattctgacctacacg

SEQ ID NO: 32733 - DNA, 17 bp, Arabidopsis thaliana
agattctgacgttgaca

SEQ ID NO: 32734 - DNA, 17 bp, Arabidopsis thaliana
agattctgactatacgt

SEQ ID NO: 32735 - DNA, 17 bp, Arabidopsis thaliana
agattctgagattgctg

SEQ ID NO: 32736 - DNA, 17 bp, Arabidopsis thaliana
agattctgagcaagttg

SEQ ID NO: 32737 - DNA, 17 bp, Arabidopsis thaliana
agattctgagtttgttg

SEQ ID NO: 32738 - DNA, 17 bp, Arabidopsis thaliana
agattctgatcatttct

SEQ ID NO: 32739 - DNA, 17 bp, Arabidopsis thaliana
agattctgcactcagag

SEQ ID NO: 32740 - DNA, 17 bp, Arabidopsis thaliana
agattctgcatggcact

SEQ ID NO: 32741 - DNA, 17 bp, Arabidopsis thaliana
agattctgccaacgacc

SEQ ID NO: 32742 - DNA, 17 bp, Arabidopsis thaliana
agattctgccctttgcc

SEQ ID NO: 32743 - DNA, 17 bp, Arabidopsis thaliana
agattctgcgcttagag

SEQ ID NO: 32744 - DNA, 17 bp, Arabidopsis thaliana
agattctgctcttagag

SEQ ID NO: 32745 - DNA, 17 bp, Arabidopsis thaliana
agattctggagctgatg

SEQ ID NO: 32746 - DNA, 17 bp, Arabidopsis thaliana
agattctgggccgaagc

SEQ ID NO: 32747 - DNA, 17 bp, Arabidopsis thaliana
agattctgggccgaatc

SEQ ID NO: 32748 - DNA, 17 bp, Arabidopsis thaliana
agattctgtaaggctga

SEQ ID NO: 32749 - DNA, 17 bp, Arabidopsis thaliana
agattctgtccatgact

SEQ ID NO: 32750 - DNA, 17 bp, Arabidopsis thaliana
agattcttcaatgcggt

SEQ ID NO: 32751 - DNA, 17 bp, Arabidopsis thaliana
agattcttcatccatct

SEQ ID NO: 32752 - DNA, 17 bp, Arabidopsis thaliana
agattcttccgcaggtc

SEQ ID NO: 32753 - DNA, 17 bp, Arabidopsis thaliana
agattcttccgcgggtc

SEQ ID NO: 32754 - DNA, 17 bp, Arabidopsis thaliana
agattcttgatgatgct

SEQ ID NO: 32755 - DNA, 17 bp, Arabidopsis thaliana
agattctttctaatgcc

SEQ ID NO: 32756 - DNA, 17 bp, Arabidopsis thaliana
agattctttgactttcc

SEQ ID NO: 32757 - DNA, 17 bp, Arabidopsis thaliana
agattgaaatgtcttag

SEQ ID NO: 32758 - DNA, 17 bp, Arabidopsis thaliana
agattgaactacacagt

SEQ ID NO: 32759 - DNA, 17 bp, Arabidopsis thaliana
agattgaagaacgtgct

SEQ ID NO: 32760 - DNA, 17 bp, Arabidopsis thaliana
agattgaatcatctccg

SEQ ID NO: 32761 - DNA, 17 bp, Arabidopsis thaliana
agattgaccatatctga

SEQ ID NO: 32762 - DNA, 17 bp, Arabidopsis thaliana
agattgagccgtgctga

SEQ ID NO: 32763 - DNA, 17 bp, Arabidopsis thaliana
agattgagctttggaat

SEQ ID NO: 32764 - DNA, 17 bp, Arabidopsis thaliana
agattgagtagtgcgga

SEQ ID NO: 32765 - DNA, 17 bp, Arabidopsis thaliana
agattgatactccttgt

SEQ ID NO: 32766 - DNA, 17 bp, Arabidopsis thaliana
agattgatggaaccagg

SEQ ID NO: 32767 - DNA, 17 bp, Arabidopsis thaliana
agattgatgtaactggg

SEQ ID NO: 32768 - DNA, 17 bp, Arabidopsis thaliana
agattgattacgtgaaa

SEQ ID NO: 32769 - DNA, 17 bp, Arabidopsis thaliana
agattgattatcaccga

SEQ ID NO: 32770 - DNA, 17 bp, Arabidopsis thaliana
agattgattgaggagga

SEQ ID NO: 32771 - DNA, 17 bp, Arabidopsis thaliana
agattgattgatggagc

SEQ ID NO: 32772 - DNA, 17 bp, Arabidopsis thaliana
agattgattgcgcctcg

SEQ ID NO: 32773 - DNA, 17 bp, Arabidopsis thaliana
agattgcaaaattggct

SEQ ID NO: 32774 - DNA, 17 bp, Arabidopsis thaliana
agattgcaaagagtacc

SEQ ID NO: 32775 - DNA, 17 bp, Arabidopsis thaliana
agattgcaatcttcagg

SEQ ID NO: 32776 - DNA, 17 bp, Arabidopsis thaliana
agattgcacctagagga

SEQ ID NO: 32777 - DNA, 17 bp, Arabidopsis thaliana
agattgcacggattcta

SEQ ID NO: 32778 - DNA, 17 bp, Arabidopsis thaliana
agattgcagacgatcgt

SEQ ID NO: 32779 - DNA, 17 bp, Arabidopsis thaliana
agattgcaggatcttcg

SEQ ID NO: 32780 - DNA, 17 bp, Arabidopsis thaliana
agattgccacgtatagt

SEQ ID NO: 32781 - DNA, 17 bp, Arabidopsis thaliana
agattgccatggatcga

SEQ ID NO: 32782 - DNA, 17 bp, Arabidopsis thaliana
agattgcccatctgtct

SEQ ID NO: 32783 - DNA, 17 bp, Arabidopsis thaliana
agattgcccccttgcta

SEQ ID NO: 32784 - DNA, 17 bp, Arabidopsis thaliana
agattgcccccttgtta

SEQ ID NO: 32785 - DNA, 17 bp, Arabidopsis thaliana
agattgccggatagtcg

SEQ ID NO: 32786 - DNA, 17 bp, Arabidopsis thaliana
agattgccttggcgggg

SEQ ID NO: 32787 - DNA, 17 bp, Arabidopsis thaliana
agattgcgacttttctc

SEQ ID NO: 32788 - DNA, 17 bp, Arabidopsis thaliana
agattgcgatggtccct

SEQ ID NO: 32789 - DNA, 17 bp, Arabidopsis thaliana
agattgcgccaagtgac

SEQ ID NO: 32790 - DNA, 17 bp, Arabidopsis thaliana
agattgcgccgtacaga

SEQ ID NO: 32791 - DNA, 17 bp, Arabidopsis thaliana
agattgcgccgtactga

SEQ ID NO: 32792 - DNA, 17 bp, Arabidopsis thaliana
agattgcgccgtgctga

SEQ ID NO: 32793 - DNA, 17 bp, Arabidopsis thaliana
agattgcgctgtacaga

SEQ ID NO: 32794 - DNA, 17 bp, Arabidopsis thaliana
agattgcgtctcggata

SEQ ID NO: 32795 - DNA, 17 bp, Arabidopsis thaliana
agattgcgtgatttcct

SEQ ID NO: 32796 - DNA, 17 bp, Arabidopsis thaliana
agattgctaactgatgt

SEQ ID NO: 32797 - DNA, 17 bp, Arabidopsis thaliana
agattgctgcttcctct

SEQ ID NO: 32798 - DNA, 17 bp, Arabidopsis thaliana
agattgcttcgtactga

SEQ ID NO: 32799 - DNA, 17 bp, Arabidopsis thaliana
agattgcttctgctttg

SEQ ID NO: 32800 - DNA, 17 bp, Arabidopsis thaliana
agattggacaaaagctt

SEQ ID NO: 32801 - DNA, 17 bp, Arabidopsis thaliana
agattggacacgcattt

SEQ ID NO: 32802 - DNA, 17 bp, Arabidopsis thaliana
agattggacccttgggt

SEQ ID NO: 32803 - DNA, 17 bp, Arabidopsis thaliana
agattggaccgaaacga

SEQ ID NO: 32804 - DNA, 17 bp, Arabidopsis thaliana
agattggaccggaacga

SEQ ID NO: 32805 - DNA, 17 bp, Arabidopsis thaliana
agattggaccgttgacg

SEQ ID NO: 32806 - DNA, 17 bp, Arabidopsis thaliana
agattggaccgtttgtt

SEQ ID NO: 32807 - DNA, 17 bp, Arabidopsis thaliana
agattggactaatttgc

SEQ ID NO: 32808 - DNA, 17 bp, Arabidopsis thaliana
agattggactttgcaaa

SEQ ID NO: 32809 - DNA, 17 bp, Arabidopsis thaliana
agattggagaaagccgc

SEQ ID NO: 32810 - DNA, 17 bp, Arabidopsis thaliana
agattggagaaagcggg

SEQ ID NO: 32811 - DNA, 17 bp, Arabidopsis thaliana
agattggatcattgggt

SEQ ID NO: 32812 - DNA, 17 bp, Arabidopsis thaliana
agattggatctttgggt

SEQ ID NO: 32813 - DNA, 17 bp, Arabidopsis thaliana
agattggatggtttcag

SEQ ID NO: 32814 - DNA, 17 bp, Arabidopsis thaliana
agattggattggtacaa

SEQ ID NO: 32815 - DNA, 17 bp, Arabidopsis thaliana
agattggccatatctaa

SEQ ID NO: 32816 - DNA, 17 bp, Arabidopsis thaliana
agattggccatatctga

SEQ ID NO: 32817 - DNA, 17 bp, Arabidopsis thaliana
agattggccgacgtcag

SEQ ID NO: 32818 - DNA, 17 bp, Arabidopsis thaliana
agattggccggtggaaa

SEQ ID NO: 32819 - DNA, 17 bp, Arabidopsis thaliana
agattggcctattagct

SEQ ID NO: 32820 - DNA, 17 bp, Arabidopsis thaliana
agattggcggatcagtc

SEQ ID NO: 32821 - DNA, 17 bp, Arabidopsis thaliana
agattggctcgtttgaa

SEQ ID NO: 32822 - DNA, 17 bp, Arabidopsis thaliana
agattggctctcaacgt

SEQ ID NO: 32823 - DNA, 17 bp, Arabidopsis thaliana
agattggctggtttgga

SEQ ID NO: 32824 - DNA, 17 bp, Arabidopsis thaliana
agattgggtcataacag

SEQ ID NO: 32825 - DNA, 17 bp, Arabidopsis thaliana
agattgggtctcactac

SEQ ID NO: 32826 - DNA, 17 bp, Arabidopsis thaliana
agattgggttaagaagt

SEQ ID NO: 32827 - DNA, 17 bp, Arabidopsis thaliana
agattgggttgcggtgt

SEQ ID NO: 32828 - DNA, 17 bp, Arabidopsis thaliana
agattgggttgcggttt

SEQ ID NO: 32829 - DNA, 17 bp, Arabidopsis thaliana
agattgggttgctatgt

SEQ ID NO: 32830 - DNA, 17 bp, Arabidopsis thaliana
agattgggtttgctggt

SEQ ID NO: 32831 - DNA, 17 bp, Arabidopsis thaliana
agattggtagatcgatc

SEQ ID NO: 32832 - DNA, 17 bp, Arabidopsis thaliana
agattggtatgcagggc

SEQ ID NO: 32833 - DNA, 17 bp, Arabidopsis thaliana
agattggtcagatctgg

SEQ ID NO: 32834 - DNA, 17 bp, Arabidopsis thaliana
agattggtctgctaagc

SEQ ID NO: 32835 - DNA, 17 bp, Arabidopsis thaliana
agattggtgagacacaa

SEQ ID NO: 32836 - DNA, 17 bp, Arabidopsis thaliana
agattggtgcggttcaa

SEQ ID NO: 32837 - DNA, 17 bp, Arabidopsis thaliana
agattggttgtctcggc

SEQ ID NO: 32838 - DNA, 17 bp, Arabidopsis thaliana
agattggtttcctcggt

SEQ ID NO: 32839 - DNA, 17 bp, Arabidopsis thaliana
agattggtttcctttcg

SEQ ID NO: 32840 - DNA, 17 bp, Arabidopsis thaliana
agattgtaccgggattt

SEQ ID NO: 32841 - DNA, 17 bp, Arabidopsis thaliana
agattgtagagggatga

SEQ ID NO: 32842 - DNA, 17 bp, Arabidopsis thaliana
agattgtaggcttccaa

SEQ ID NO: 32843 - DNA, 17 bp, Arabidopsis thaliana
agattgtatcggctacc

SEQ ID NO: 32844 - DNA, 17 bp, Arabidopsis thaliana
agattgtatgtccatgc

SEQ ID NO: 32845 - DNA, 17 bp, Arabidopsis thaliana
agattgtattggctgag

SEQ ID NO: 32846 - DNA, 17 bp, Arabidopsis thaliana
agattgtcagaaccgcc

SEQ ID NO: 32847 - DNA, 17 bp, Arabidopsis thaliana
agattgtcagacttgga

SEQ ID NO: 32848 - DNA, 17 bp, Arabidopsis thaliana
agattgtccgtctcagg

SEQ ID NO: 32849 - DNA, 17 bp, Arabidopsis thaliana
agattgtcctgctatgg

SEQ ID NO: 32850 - DNA, 17 bp, Arabidopsis thaliana
agattgtccttcgtcat

SEQ ID NO: 32851 - DNA, 17 bp, Arabidopsis thaliana
agattgtcgttctaaaa

SEQ ID NO: 32852 - DNA, 17 bp, Arabidopsis thaliana
agattgtctaccgttac

SEQ ID NO: 32853 - DNA, 17 bp, Arabidopsis thaliana
agattgtgacaggctga

SEQ ID NO: 32854 - DNA, 17 bp, Arabidopsis thaliana
agattgtgacatatttt

SEQ ID NO: 32855 - DNA, 17 bp, Arabidopsis thaliana
agattgtgagacggtga

SEQ ID NO: 32856 - DNA, 17 bp, Arabidopsis thaliana
agattgtgattcatttt

SEQ ID NO: 32857 - DNA, 17 bp, Arabidopsis thaliana
agattgtgattgtaacg

SEQ ID NO: 32858 - DNA, 17 bp, Arabidopsis thaliana
agattgtgattgtgatg

SEQ ID NO: 32859 - DNA, 17 bp, Arabidopsis thaliana
agattgtgccacgtgcc

SEQ ID NO: 32860 - DNA, 17 bp, Arabidopsis thaliana
agattgtgccacgtgtc

SEQ ID NO: 32861 - DNA, 17 bp, Arabidopsis thaliana
agattgtgcgtataggg

SEQ ID NO: 32862 - DNA, 17 bp, Arabidopsis thaliana
agattgtggacttccaa

SEQ ID NO: 32863 - DNA, 17 bp, Arabidopsis thaliana
agattgtggacttgggc

SEQ ID NO: 32864 - DNA, 17 bp, Arabidopsis thaliana
agattgtggatcagata

SEQ ID NO: 32865 - DNA, 17 bp, Arabidopsis thaliana
agattgtgggattgact

SEQ ID NO: 32866 - DNA, 17 bp, Arabidopsis thaliana
agattgtggtttgacct

SEQ ID NO: 32867 - DNA, 17 bp, Arabidopsis thaliana
agattgtggtttgtggt

SEQ ID NO: 32868 - DNA, 17 bp, Arabidopsis thaliana
agattgtgttgtgcggt

SEQ ID NO: 32869 - DNA, 17 bp, Arabidopsis thaliana
agattgttacagacagt

SEQ ID NO: 32870 - DNA, 17 bp, Arabidopsis thaliana
agattgttagccatgca

SEQ ID NO: 32871 - DNA, 17 bp, Arabidopsis thaliana
agattgttccagtttcg

SEQ ID NO: 32872 - DNA, 17 bp, Arabidopsis thaliana
agattgttctcagattt

SEQ ID NO: 32873 - DNA, 17 bp, Arabidopsis thaliana
agattgttgacgccctt

SEQ ID NO: 32874 - DNA, 17 bp, Arabidopsis thaliana
agattgttgatccacct

SEQ ID NO: 32875 - DNA, 17 bp, Arabidopsis thaliana
agattgttggagagagt

SEQ ID NO: 32876 - DNA, 17 bp, Arabidopsis thaliana
agattgttggtccggat

SEQ ID NO: 32877 - DNA, 17 bp, Arabidopsis thaliana
agattgttgtacccgtg

SEQ ID NO: 32878 - DNA, 17 bp, Arabidopsis thaliana
agattgtttccgagatt

SEQ ID NO: 32879 - DNA, 17 bp, Arabidopsis thaliana
agattgtttcgtactga

SEQ ID NO: 32880 - DNA, 17 bp, Arabidopsis thaliana
agattgtttgcgggttt

SEQ ID NO: 32881 - DNA, 17 bp, Arabidopsis thaliana
agattgtttttggttgt

SEQ ID NO: 32882 - DNA, 17 bp, Arabidopsis thaliana
agatttaaccgcggcaa

SEQ ID NO: 32883 - DNA, 17 bp, Arabidopsis thaliana
agatttaacctggtctg

SEQ ID NO: 32884 - DNA, 17 bp, Arabidopsis thaliana
agatttaaggaagctca

SEQ ID NO: 32885 - DNA, 17 bp, Arabidopsis thaliana
agatttaagggcccgaa

SEQ ID NO: 32886 - DNA, 17 bp, Arabidopsis thaliana
agatttaatctggaccg

SEQ ID NO: 32887 - DNA, 17 bp, Arabidopsis thaliana
agatttacaagagtttt

SEQ ID NO: 32888 - DNA, 17 bp, Arabidopsis thaliana
agatttacactctgctg

SEQ ID NO: 32889 - DNA, 17 bp, Arabidopsis thaliana
agatttacatgggtttg

SEQ ID NO: 32890 - DNA, 17 bp, Arabidopsis thaliana
agatttaccacgtgtca

SEQ ID NO: 32891 - DNA, 17 bp, Arabidopsis thaliana
agatttaccattggacc

SEQ ID NO: 32892 - DNA, 17 bp, Arabidopsis thaliana
agatttaccattgggcc

SEQ ID NO: 32893 - DNA, 17 bp, Arabidopsis thaliana
agatttacgactggttg

SEQ ID NO: 32894 - DNA, 17 bp, Arabidopsis thaliana
agatttactagtgcggt

SEQ ID NO: 32895 - DNA, 17 bp, Arabidopsis thaliana
agatttactcgacgaga

SEQ ID NO: 32896 - DNA, 17 bp, Arabidopsis thaliana
agatttagaggtcattg

SEQ ID NO: 32897 - DNA, 17 bp, Arabidopsis thaliana
agatttagatattttgc

SEQ ID NO: 32898 - DNA, 17 bp, Arabidopsis thaliana
agatttagcgtatgctt

SEQ ID NO: 32899 - DNA, 17 bp, Arabidopsis thaliana
agatttaggacatctcc

SEQ ID NO: 32900 - DNA, 17 bp, Arabidopsis thaliana
agatttaggccacaatg

SEQ ID NO: 32901 - DNA, 17 bp, Arabidopsis thaliana
agatttaggctctggtc

SEQ ID NO: 32902 - DNA, 17 bp, Arabidopsis thaliana
agatttagggaatgcga

SEQ ID NO: 32903 - DNA, 17 bp, Arabidopsis thaliana
agatttaggtcgacaat

SEQ ID NO: 32904 - DNA, 17 bp, Arabidopsis thaliana
agatttatcaccgggcc

SEQ ID NO: 32905 - DNA, 17 bp, Arabidopsis thaliana
agatttatcactgggcc

SEQ ID NO: 32906 - DNA, 17 bp, Arabidopsis thaliana
agatttatccgtcgagt

SEQ ID NO: 32907 - DNA, 17 bp, Arabidopsis thaliana
agatttatgaggtagac

SEQ ID NO: 32908 - DNA, 17 bp, Arabidopsis thaliana
agatttatggcttgcag

SEQ ID NO: 32909 - DNA, 17 bp, Arabidopsis thaliana
agatttattcacaagga

SEQ ID NO: 32910 - DNA, 17 bp, Arabidopsis thaliana
agatttattcgttgcgg

SEQ ID NO: 32911 - DNA, 17 bp, Arabidopsis thaliana
agatttatttacagcgg

SEQ ID NO: 32912 - DNA, 17 bp, Arabidopsis thaliana
agatttatttacagtga

SEQ ID NO: 32913 - DNA, 17 bp, Arabidopsis thaliana
agatttatttacagtgg

SEQ ID NO: 32914 - DNA, 17 bp, Arabidopsis thaliana
agatttatttacagtgt

SEQ ID NO: 32915 - DNA, 17 bp, Arabidopsis thaliana
agatttatttatcggga

SEQ ID NO: 32916 - DNA, 17 bp, Arabidopsis thaliana
agatttatttcacaaaa

SEQ ID NO: 32917 - DNA, 17 bp, Arabidopsis thaliana
agatttatttcacagaa

SEQ ID NO: 32918 - DNA, 17 bp, Arabidopsis thaliana
agatttatttggagtga

SEQ ID NO: 32919 - DNA, 17 bp, Arabidopsis thaliana
agatttattttacaaag

SEQ ID NO: 32920 - DNA, 17 bp, Arabidopsis thaliana
agatttcaaatgccgat

SEQ ID NO: 32921 - DNA, 17 bp, Arabidopsis thaliana
agatttcaaatgtgact

SEQ ID NO: 32922 - DNA, 17 bp, Arabidopsis thaliana
agatttcaactagtata

SEQ ID NO: 32923 - DNA, 17 bp, Arabidopsis thaliana
agatttcaaggaccttt

SEQ ID NO: 32924 - DNA, 17 bp, Arabidopsis thaliana
agatttcaccgaagttt

SEQ ID NO: 32925 - DNA, 17 bp, Arabidopsis thaliana
agatttcactggcttgt

SEQ ID NO: 32926 - DNA, 17 bp, Arabidopsis thaliana
agatttcagaatggttg

SEQ ID NO: 32927 - DNA, 17 bp, Arabidopsis thaliana
agatttcagacttgctt

SEQ ID NO: 32928 - DNA, 17 bp, Arabidopsis thaliana
agatttcagatcggatt

SEQ ID NO: 32929 - DNA, 17 bp, Arabidopsis thaliana
agatttcagatctcgtt

SEQ ID NO: 32930 - DNA, 17 bp, Arabidopsis thaliana
agatttcaggaccacca

SEQ ID NO: 32931 - DNA, 17 bp, Arabidopsis thaliana
agatttcaggtattcct

SEQ ID NO: 32932 - DNA, 17 bp, Arabidopsis thaliana
agatttcagttgttgat

SEQ ID NO: 32933 - DNA, 17 bp, Arabidopsis thaliana
agatttcatgaccattt

SEQ ID NO: 32934 - DNA, 17 bp, Arabidopsis thaliana
agatttccaggcgtggc

SEQ ID NO: 32935 - DNA, 17 bp, Arabidopsis thaliana
agatttccgtctcttat

SEQ ID NO: 32936 - DNA, 17 bp, Arabidopsis thaliana
agatttcctctctcagg

SEQ ID NO: 32937 - DNA, 17 bp, Arabidopsis thaliana
agatttcctgcatttga

SEQ ID NO: 32938 - DNA, 17 bp, Arabidopsis thaliana
agatttcctttctcagg

SEQ ID NO: 32939 - DNA, 17 bp, Arabidopsis thaliana
agatttcctttctcctt

SEQ ID NO: 32940 - DNA, 17 bp, Arabidopsis thaliana
agatttcgaatgccgat

SEQ ID NO: 32941 - DNA, 17 bp, Arabidopsis thaliana
agatttcgaatggagac

SEQ ID NO: 32942 - DNA, 17 bp, Arabidopsis thaliana
agatttcgagtcggttt

SEQ ID NO: 32943 - DNA, 17 bp, Arabidopsis thaliana
agatttcgcaaccagtt

SEQ ID NO: 32944 - DNA, 17 bp, Arabidopsis thaliana
agatttcgctgtacacg

SEQ ID NO: 32945 - DNA, 17 bp, Arabidopsis thaliana
agatttcggacctcgtt

SEQ ID NO: 32946 - DNA, 17 bp, Arabidopsis thaliana
agatttcggattcggat

SEQ ID NO: 32947 - DNA, 17 bp, Arabidopsis thaliana
agatttcggattttatg

SEQ ID NO: 32948 - DNA, 17 bp, Arabidopsis thaliana
agatttcgggtcggttt

SEQ ID NO: 32949 - DNA, 17 bp, Arabidopsis thaliana
agatttcgggtttggat

SEQ ID NO: 32950 - DNA, 17 bp, Arabidopsis thaliana
agatttcgtgcccgagt

SEQ ID NO: 32951 - DNA, 17 bp, Arabidopsis thaliana
agatttcgtggctaagt

SEQ ID NO: 32952 - DNA, 17 bp, Arabidopsis thaliana
agatttcgtggctgagt

SEQ ID NO: 32953 - DNA, 17 bp, Arabidopsis thaliana
agatttcgttgcaatag

SEQ ID NO: 32954 - DNA, 17 bp, Arabidopsis thaliana
agatttcgttggaaggt

SEQ ID NO: 32955 - DNA, 17 bp, Arabidopsis thaliana
agatttctacaagagtt

SEQ ID NO: 32956 - DNA, 17 bp, Arabidopsis thaliana
agatttctcacctgtgc

SEQ ID NO: 32957 - DNA, 17 bp, Arabidopsis thaliana
agatttctcagaaactt

SEQ ID NO: 32958 - DNA, 17 bp, Arabidopsis thaliana
agatttctccggtttgc

SEQ ID NO: 32959 - DNA, 17 bp, Arabidopsis thaliana
agatttctcggcttctc

SEQ ID NO: 32960 - DNA, 17 bp, Arabidopsis thaliana
agatttctctgtgttct

SEQ ID NO: 32961 - DNA, 17 bp, Arabidopsis thaliana
agatttctgattttggc

SEQ ID NO: 32962 - DNA, 17 bp, Arabidopsis thaliana
agatttctgcaggtctc

SEQ ID NO: 32963 - DNA, 17 bp, Arabidopsis thaliana
agatttctgcctttttg

SEQ ID NO: 32964 - DNA, 17 bp, Arabidopsis thaliana
agatttctgtatgccgc

SEQ ID NO: 32965 - DNA, 17 bp, Arabidopsis thaliana
agatttctgtgcttgct

SEQ ID NO: 32966 - DNA, 17 bp, Arabidopsis thaliana
agatttgaaatctattg

SEQ ID NO: 32967 - DNA, 17 bp, Arabidopsis thaliana
agatttgaatggtaggc

SEQ ID NO: 32968 - DNA, 17 bp, Arabidopsis thaliana
agatttgacaaacgctt

SEQ ID NO: 32969 - DNA, 17 bp, Arabidopsis thaliana
agatttgacacattgca

SEQ ID NO: 32970 - DNA, 17 bp, Arabidopsis thaliana
agatttgacacttaaac

SEQ ID NO: 32971 - DNA, 17 bp, Arabidopsis thaliana
agatttgacagactttt

SEQ ID NO: 32972 - DNA, 17 bp, Arabidopsis thaliana
agatttgacagcctttg

SEQ ID NO: 32973 - DNA, 17 bp, Arabidopsis thaliana
agatttgacattgtggg

SEQ ID NO: 32974 - DNA, 17 bp, Arabidopsis thaliana
agatttgacggacaatg

SEQ ID NO: 32975 - DNA, 17 bp, Arabidopsis thaliana
agatttgacggattctg

SEQ ID NO: 32976 - DNA, 17 bp, Arabidopsis thaliana
agatttgacgttagcag

SEQ ID NO: 32977 - DNA, 17 bp, Arabidopsis thaliana
agatttgactgtcctcg

SEQ ID NO: 32978 - DNA, 17 bp, Arabidopsis thaliana
agatttgactgttcttc

SEQ ID NO: 32979 - DNA, 17 bp, Arabidopsis thaliana
agatttgagaagagcgt

SEQ ID NO: 32980 - DNA, 17 bp, Arabidopsis thaliana
agatttgagaatgcgat

SEQ ID NO: 32981 - DNA, 17 bp, Arabidopsis thaliana
agatttgagattcggat

SEQ ID NO: 32982 - DNA, 17 bp, Arabidopsis thaliana
agatttgagctgcgatt

SEQ ID NO: 32983 - DNA, 17 bp, Arabidopsis thaliana
agatttgagggttgatt

SEQ ID NO: 32984 - DNA, 17 bp, Arabidopsis thaliana
agatttgagtcaaactt

SEQ ID NO: 32985 - DNA, 17 bp, Arabidopsis thaliana
agatttgagtgtgttga

SEQ ID NO: 32986 - DNA, 17 bp, Arabidopsis thaliana
agatttgatagcattgc

SEQ ID NO: 32987 - DNA, 17 bp, Arabidopsis thaliana
agatttgatctaagaac

SEQ ID NO: 32988 - DNA, 17 bp, Arabidopsis thaliana
agatttgatggtgaagc

SEQ ID NO: 32989 - DNA, 17 bp, Arabidopsis thaliana
agatttgatgtcggtct

SEQ ID NO: 32990 - DNA, 17 bp, Arabidopsis thaliana
agatttgcagattggta

SEQ ID NO: 32991 - DNA, 17 bp, Arabidopsis thaliana
agatttgcagatttatt

SEQ ID NO: 32992 - DNA, 17 bp, Arabidopsis thaliana
agatttgcagcaggaag

SEQ ID NO: 32993 - DNA, 17 bp, Arabidopsis thaliana
agatttgcctcctccca

SEQ ID NO: 32994 - DNA, 17 bp, Arabidopsis thaliana
agatttgcctcgctaac

SEQ ID NO: 32995 - DNA, 17 bp, Arabidopsis thaliana
agatttgcctctgaatc

SEQ ID NO: 32996 - DNA, 17 bp, Arabidopsis thaliana
agatttgcgagacgtcg

SEQ ID NO: 32997 - DNA, 17 bp, Arabidopsis thaliana
agatttgctcgtggcaa

SEQ ID NO: 32998 - DNA, 17 bp, Arabidopsis thaliana
agatttgcttagattga

SEQ ID NO: 32999 - DNA, 17 bp, Arabidopsis thaliana
agatttggaaaattctt

SEQ ID NO: 33000 - DNA, 17 bp, Arabidopsis thaliana
agatttggacccatgga

SEQ ID NO: 33001 - DNA, 17 bp, Arabidopsis thaliana
agatttggatcgggttc

SEQ ID NO: 33002 - DNA, 17 bp, Arabidopsis thaliana
agatttggcaggtatat

SEQ ID NO: 33003 - DNA, 17 bp, Arabidopsis thaliana
agatttggcataagagt

SEQ ID NO: 33004 - DNA, 17 bp, Arabidopsis thaliana
agatttggcggacaatg

SEQ ID NO: 33005 - DNA, 17 bp, Arabidopsis thaliana
agatttggcgggctatg

SEQ ID NO: 33006 - DNA, 17 bp, Arabidopsis thaliana
agatttggctagttgtg

SEQ ID NO: 33007 - DNA, 17 bp, Arabidopsis thaliana
agatttggctctgatca

SEQ ID NO: 33008 - DNA, 17 bp, Arabidopsis thaliana
agatttggcttcaggat

SEQ ID NO: 33009 - DNA, 17 bp, Arabidopsis thaliana
agatttgggaggattac

SEQ ID NO: 33010 - DNA, 17 bp, Arabidopsis thaliana
agatttgggatggctca

SEQ ID NO: 33011 - DNA, 17 bp, Arabidopsis thaliana
agatttgggcactttca

SEQ ID NO: 33012 - DNA, 17 bp, Arabidopsis thaliana
agatttgggcctacacc

SEQ ID NO: 33013 - DNA, 17 bp, Arabidopsis thaliana
agatttgggtaaatcta

SEQ ID NO: 33014 - DNA, 17 bp, Arabidopsis thaliana
agatttggtcactctgc

SEQ ID NO: 33015 - DNA, 17 bp, Arabidopsis thaliana
agatttggttgctcttg

SEQ ID NO: 33016 - DNA, 17 bp, Arabidopsis thaliana
agatttgtaccgcggtg

SEQ ID NO: 33017 - DNA, 17 bp, Arabidopsis thaliana
agatttgtacgggacga

SEQ ID NO: 33018 - DNA, 17 bp, Arabidopsis thaliana
agatttgtcatgggcta

SEQ ID NO: 33019 - DNA, 17 bp, Arabidopsis thaliana
agatttgtccttctgtg

SEQ ID NO: 33020 - DNA, 17 bp, Arabidopsis thaliana
agatttgtcctttggtc

SEQ ID NO: 33021 - DNA, 17 bp, Arabidopsis thaliana
agatttgtctgcttgga

SEQ ID NO: 33022 - DNA, 17 bp, Arabidopsis thaliana
agatttgtgactgaatg

SEQ ID NO: 33023 - DNA, 17 bp, Arabidopsis thaliana
agatttgtgcttatttt

SEQ ID NO: 33024 - DNA, 17 bp, Arabidopsis thaliana
agatttgtggacaattt

SEQ ID NO: 33025 - DNA, 17 bp, Arabidopsis thaliana
agatttgtggcttggtt

SEQ ID NO: 33026 - DNA, 17 bp, Arabidopsis thaliana
agatttgtgggttaaga

SEQ ID NO: 33027 - DNA, 17 bp, Arabidopsis thaliana
agatttgtggttaatcc

SEQ ID NO: 33028 - DNA, 17 bp, Arabidopsis thaliana
agatttgttccaccagg

SEQ ID NO: 33029 - DNA, 17 bp, Arabidopsis thaliana
agatttgttggatcata

SEQ ID NO: 33030 - DNA, 17 bp, Arabidopsis thaliana
agatttgtttggtggct

SEQ ID NO: 33031 - DNA, 17 bp, Arabidopsis thaliana
agatttgttttcggtag

SEQ ID NO: 33032 - DNA, 17 bp, Arabidopsis thaliana
agattttaacccacggt

SEQ ID NO: 33033 - DNA, 17 bp, Arabidopsis thaliana
agattttaacccgcaat

SEQ ID NO: 33034 - DNA, 17 bp, Arabidopsis thaliana
agattttaacccgcagt

SEQ ID NO: 33035 - DNA, 17 bp, Arabidopsis thaliana
agattttaacccgcggt

SEQ ID NO: 33036 - DNA, 17 bp, Arabidopsis thaliana
agattttaacccgctgt

SEQ ID NO: 33037 - DNA, 17 bp, Arabidopsis thaliana
agattttaacccgtggt

SEQ ID NO: 33038 - DNA, 17 bp, Arabidopsis thaliana
agattttaacctgcggt

SEQ ID NO: 33039 - DNA, 17 bp, Arabidopsis thaliana
agattttaacttagcct

SEQ ID NO: 33040 - DNA, 17 bp, Arabidopsis thaliana
agattttaagccgcgct

SEQ ID NO: 33041 - DNA, 17 bp, Arabidopsis thaliana
agattttaagccttcgt

SEQ ID NO: 33042 - DNA, 17 bp, Arabidopsis thaliana
agattttaatccgcgga

SEQ ID NO: 33043 - DNA, 17 bp, Arabidopsis thaliana
agattttaatccgcggt

SEQ ID NO: 33044 - DNA, 17 bp, Arabidopsis thaliana
agattttaatcgtttga

SEQ ID NO: 33045 - DNA, 17 bp, Arabidopsis thaliana
agattttaattgcgcat

SEQ ID NO: 33046 - DNA, 17 bp, Arabidopsis thaliana
agattttacgcagatcc

SEQ ID NO: 33047 - DNA, 17 bp, Arabidopsis thaliana
agattttaggttctttg

SEQ ID NO: 33048 - DNA, 17 bp, Arabidopsis thaliana
agattttagttttagct

SEQ ID NO: 33049 - DNA, 17 bp, Arabidopsis thaliana
agattttatctggccac

SEQ ID NO: 33050 - DNA, 17 bp, Arabidopsis thaliana
agattttattcgttgcg

SEQ ID NO: 33051 - DNA, 17 bp, Arabidopsis thaliana
agattttcaacgttgat

SEQ ID NO: 33052 - DNA, 17 bp, Arabidopsis thaliana
agattttcatccctcaa

SEQ ID NO: 33053 - DNA, 17 bp, Arabidopsis thaliana
agattttcatgtgactc

SEQ ID NO: 33054 - DNA, 17 bp, Arabidopsis thaliana
agattttcattgtcggg

SEQ ID NO: 33055 - DNA, 17 bp, Arabidopsis thaliana
agattttccagattttg

SEQ ID NO: 33056 - DNA, 17 bp, Arabidopsis thaliana
agattttccattgatgg

SEQ ID NO: 33057 - DNA, 17 bp, Arabidopsis thaliana
agattttcctgcaaact

SEQ ID NO: 33058 - DNA, 17 bp, Arabidopsis thaliana
agattttcgcaaccagt

SEQ ID NO: 33059 - DNA, 17 bp, Arabidopsis thaliana
agattttcgccatctat

SEQ ID NO: 33060 - DNA, 17 bp, Arabidopsis thaliana
agattttcgttcgtgaa

SEQ ID NO: 33061 - DNA, 17 bp, Arabidopsis thaliana
agattttctactgtggt

SEQ ID NO: 33062 - DNA, 17 bp, Arabidopsis thaliana
agattttctgcacactt

SEQ ID NO: 33063 - DNA, 17 bp, Arabidopsis thaliana
agattttctgccatgaa

SEQ ID NO: 33064 - DNA, 17 bp, Arabidopsis thaliana
agattttctgccatgag

SEQ ID NO: 33065 - DNA, 17 bp, Arabidopsis thaliana
agattttctgggccgca

SEQ ID NO: 33066 - DNA, 17 bp, Arabidopsis thaliana
agattttgaaagaatgt

SEQ ID NO: 33067 - DNA, 17 bp, Arabidopsis thaliana
agattttgaagtttaga

SEQ ID NO: 33068 - DNA, 17 bp, Arabidopsis thaliana
agattttgacactgtgg

SEQ ID NO: 33069 - DNA, 17 bp, Arabidopsis thaliana
agattttgacatgtgcg

SEQ ID NO: 33070 - DNA, 17 bp, Arabidopsis thaliana
agattttgacattgtgg

SEQ ID NO: 33071 - DNA, 17 bp, Arabidopsis thaliana
agattttgacccgcacg

SEQ ID NO: 33072 - DNA, 17 bp, Arabidopsis thaliana
agattttgacccgcggt

SEQ ID NO: 33073 - DNA, 17 bp, Arabidopsis thaliana
agattttgatactgtgg

SEQ ID NO: 33074 - DNA, 17 bp, Arabidopsis thaliana
agattttgcagaacatt

SEQ ID NO: 33075 - DNA, 17 bp, Arabidopsis thaliana
agattttgccatttttc

SEQ ID NO: 33076 - DNA, 17 bp, Arabidopsis thaliana
agattttgctatatgac

SEQ ID NO: 33077 - DNA, 17 bp, Arabidopsis thaliana
agattttgctccaaaat

SEQ ID NO: 33078 - DNA, 17 bp, Arabidopsis thaliana
agattttgcttctattg

SEQ ID NO: 33079 - DNA, 17 bp, Arabidopsis thaliana
agattttgctttcaaca

SEQ ID NO: 33080 - DNA, 17 bp, Arabidopsis thaliana
agattttggatcaagtt

SEQ ID NO: 33081 - DNA, 17 bp, Arabidopsis thaliana
agattttggatcccgcc

SEQ ID NO: 33082 - DNA, 17 bp, Arabidopsis thaliana
agattttggcctgatca

SEQ ID NO: 33083 - DNA, 17 bp, Arabidopsis thaliana
agattttggcctggtca

SEQ ID NO: 33084 - DNA, 17 bp, Arabidopsis thaliana
agattttgggaagcaac

SEQ ID NO: 33085 - DNA, 17 bp, Arabidopsis thaliana
agattttgggccgcacg

SEQ ID NO: 33086 - DNA, 17 bp, Arabidopsis thaliana
agattttgggctaagat

SEQ ID NO: 33087 - DNA, 17 bp, Arabidopsis thaliana
agattttgggctaagtt

SEQ ID NO: 33088 - DNA, 17 bp, Arabidopsis thaliana
agattttgggttcggat

SEQ ID NO: 33089 - DNA, 17 bp, Arabidopsis thaliana
agattttggtgaagact

SEQ ID NO: 33090 - DNA, 17 bp, Arabidopsis thaliana
agattttggtttgaccc

SEQ ID NO: 33091 - DNA, 17 bp, Arabidopsis thaliana
agattttgtagctcatt

SEQ ID NO: 33092 - DNA, 17 bp, Arabidopsis thaliana
agattttgtagctcttg

SEQ ID NO: 33093 - DNA, 17 bp, Arabidopsis thaliana
agatttttagcaatgtg

SEQ ID NO: 33094 - DNA, 17 bp, Arabidopsis thaliana
agatttttcaaccgtga

SEQ ID NO: 33095 - DNA, 17 bp, Arabidopsis thaliana
agatttttccaaaattg

SEQ ID NO: 33096 - DNA, 17 bp, Arabidopsis thaliana
agatttttccaataagg

SEQ ID NO: 33097 - DNA, 17 bp, Arabidopsis thaliana
agatttttccgatgtgt

SEQ ID NO: 33098 - DNA, 17 bp, Arabidopsis thaliana
agatttttcgccatcta

SEQ ID NO: 33099 - DNA, 17 bp, Arabidopsis thaliana
agatttttctaacggga

SEQ ID NO: 33100 - DNA, 17 bp, Arabidopsis thaliana
agatttttctggtcgtc

SEQ ID NO: 33101 - DNA, 17 bp, Arabidopsis thaliana
agatttttgacatgtat

SEQ ID NO: 33102 - DNA, 17 bp, Arabidopsis thaliana
agatttttgagacagcg

SEQ ID NO: 33103 - DNA, 17 bp, Arabidopsis thaliana
agatttttgccggcaaa

SEQ ID NO: 33104 - DNA, 17 bp, Arabidopsis thaliana
agatttttgcggttttg

SEQ ID NO: 33105 - DNA, 17 bp, Arabidopsis thaliana
agatttttggcgggatg

SEQ ID NO: 33106 - DNA, 17 bp, Arabidopsis thaliana
agatttttgggcttgaa

SEQ ID NO: 33107 - DNA, 17 bp, Arabidopsis thaliana
agatttttgtgccggtc

SEQ ID NO: 33108 - DNA, 17 bp, Arabidopsis thaliana
agatttttgttggaccg

SEQ ID NO: 33109 - DNA, 17 bp, Arabidopsis thaliana
agattttttctcaggcg

SEQ ID NO: 33110 - DNA, 17 bp, Arabidopsis thaliana
agatttttttcgcatat

SEQ ID NO: 33111 - DNA, 17 bp, Arabidopsis thaliana
agatttttttctcaggc

SEQ ID NO: 33112 - DNA, 17 bp, Arabidopsis thaliana
agatttttttctcgtcc

SEQ ID NO: 33113 - DNA, 17 bp, Arabidopsis thaliana
agattttttttggccct

SEQ ID NO: 33114 - DNA, 17 bp, Arabidopsis thaliana
agattttttttggtgga

SEQ ID NO: 33115 - DNA, 17 bp, Arabidopsis thaliana
agatttttttttttttt

SEQ ID NO: 33116 - DNA, 17 bp, Arabidopsis thaliana
agcaaaaaaaaggatga

SEQ ID NO: 33117 - DNA, 17 bp, Arabidopsis thaliana
agcaaaaaagttgactt

SEQ ID NO: 33118 - DNA, 17 bp, Arabidopsis thaliana
agcaaaaacaccaccgg

SEQ ID NO: 33119 - DNA, 17 bp, Arabidopsis thaliana
agcaaaaacctcctata

SEQ ID NO: 33120 - DNA, 17 bp, Arabidopsis thaliana
agcaaaacgcacctaaa

SEQ ID NO: 33121 - DNA, 17 bp, Arabidopsis thaliana
agcaaaactactggtgt

SEQ ID NO: 33122 - DNA, 17 bp, Arabidopsis thaliana
agcaaaagacctccact

SEQ ID NO: 33123 - DNA, 17 bp, Arabidopsis thaliana
agcaaaagtggcttggt

SEQ ID NO: 33124 - DNA, 17 bp, Arabidopsis thaliana
agcaaaatccacaagcc

SEQ ID NO: 33125 - DNA, 17 bp, Arabidopsis thaliana
agcaaaatcttttctac

SEQ ID NO: 33126 - DNA, 17 bp, Arabidopsis thaliana
agcaaaatgtatcacgg

SEQ ID NO: 33127 - DNA, 17 bp, Arabidopsis thaliana
agcaaacaattcaacaa

SEQ ID NO: 33128 - DNA, 17 bp, Arabidopsis thaliana
agcaaacaccagaatag

SEQ ID NO: 33129 - DNA, 17 bp, Arabidopsis thaliana
agcaaacaggtgttgga

SEQ ID NO: 33130 - DNA, 17 bp, Arabidopsis thaliana
agcaaaccgcatagtat

SEQ ID NO: 33131 - DNA, 17 bp, Arabidopsis thaliana
agcaaacgaacaacttt

SEQ ID NO: 33132 - DNA, 17 bp, Arabidopsis thaliana
agcaaacggtcgacagg

SEQ ID NO: 33133 - DNA, 17 bp, Arabidopsis thaliana
agcaaacgttaagggct

SEQ ID NO: 33134 - DNA, 17 bp, Arabidopsis thaliana
agcaaactaaaccagtt

SEQ ID NO: 33135 - DNA, 17 bp, Arabidopsis thaliana
agcaaactatgcgtttt

SEQ ID NO: 33136 - DNA, 17 bp, Arabidopsis thaliana
agcaaactatgcttttt

SEQ ID NO: 33137 - DNA, 17 bp, Arabidopsis thaliana
agcaaactgctgtgaca

SEQ ID NO: 33138 - DNA, 17 bp, Arabidopsis thaliana
agcaaacttctcacgat

SEQ ID NO: 33139 - DNA, 17 bp, Arabidopsis thaliana
agcaaacttggtgtgtc

SEQ ID NO: 33140 - DNA, 17 bp, Arabidopsis thaliana
agcaaagaagatccgga

SEQ ID NO: 33141 - DNA, 17 bp, Arabidopsis thaliana
agcaaagacaccaagca

SEQ ID NO: 33142 - DNA, 17 bp, Arabidopsis thaliana
agcaaagaccagctgct

SEQ ID NO: 33143 - DNA, 17 bp, Arabidopsis thaliana
agcaaagactatgtccg

SEQ ID NO: 33144 - DNA, 17 bp, Arabidopsis thaliana
agcaaagactatgtcgg

SEQ ID NO: 33145 - DNA, 17 bp, Arabidopsis thaliana
agcaaagatcacgaaaa

SEQ ID NO: 33146 - DNA, 17 bp, Arabidopsis thaliana
agcaaagattctggcaa

SEQ ID NO: 33147 - DNA, 17 bp, Arabidopsis thaliana
agcaaagcatatgaccg

SEQ ID NO: 33148 - DNA, 17 bp, Arabidopsis thaliana
agcaaagccgtcagatt

SEQ ID NO: 33149 - DNA, 17 bp, Arabidopsis thaliana
agcaaagcggcgcagcc

SEQ ID NO: 33150 - DNA, 17 bp, Arabidopsis thaliana
agcaaagctaagcaagt

SEQ ID NO: 33151 - DNA, 17 bp, Arabidopsis thaliana
agcaaaggatgacttgc

SEQ ID NO: 33152 - DNA, 17 bp, Arabidopsis thaliana
agcaaaggcttcaccaa

SEQ ID NO: 33153 - DNA, 17 bp, Arabidopsis thaliana
agcaaaggcttcaccag

SEQ ID NO: 33154 - DNA, 17 bp, Arabidopsis thaliana
agcaaagggtgtgaacg

SEQ ID NO: 33155 - DNA, 17 bp, Arabidopsis thaliana
agcaaaggttggaagat

SEQ ID NO: 33156 - DNA, 17 bp, Arabidopsis thaliana
agcaaagtgctacattg

SEQ ID NO: 33157 - DNA, 17 bp, Arabidopsis thaliana
agcaaagtggactgcct

SEQ ID NO: 33158 - DNA, 17 bp, Arabidopsis thaliana
agcaaagtttccttgac

SEQ ID NO: 33159 - DNA, 17 bp, Arabidopsis thaliana
agcaaagtttcgttgac

SEQ ID NO: 33160 - DNA, 17 bp, Arabidopsis thaliana
agcaaagttttggaccg

SEQ ID NO: 33161 - DNA, 17 bp, Arabidopsis thaliana
agcaaatcccggtacaa

SEQ ID NO: 33162 - DNA, 17 bp, Arabidopsis thaliana
agcaaatccctaagcaa

SEQ ID NO: 33163 - DNA, 17 bp, Arabidopsis thaliana
agcaaatcggatgtctg

SEQ ID NO: 33164 - DNA, 17 bp, Arabidopsis thaliana
agcaaatcgtccaagtt

SEQ ID NO: 33165 - DNA, 17 bp, Arabidopsis thaliana
agcaaatctcttaccca

SEQ ID NO: 33166 - DNA, 17 bp, Arabidopsis thaliana
agcaaatctgtaattgc

SEQ ID NO: 33167 - DNA, 17 bp, Arabidopsis thaliana
agcaaatgaagcggcgc

SEQ ID NO: 33168 - DNA, 17 bp, Arabidopsis thaliana
agcaaatgattccactg

SEQ ID NO: 33169 - DNA, 17 bp, Arabidopsis thaliana
agcaaatgcgtctggca

SEQ ID NO: 33170 - DNA, 17 bp, Arabidopsis thaliana
agcaaatgcttggtcag

SEQ ID NO: 33171 - DNA, 17 bp, Arabidopsis thaliana
agcaaatgttatcggga

SEQ ID NO: 33172 - DNA, 17 bp, Arabidopsis thaliana
agcaaatgtttgttggc

SEQ ID NO: 33173 - DNA, 17 bp, Arabidopsis thaliana
agcaaattacaggtttt

SEQ ID NO: 33174 - DNA, 17 bp, Arabidopsis thaliana
agcaaattgtgcaagga

SEQ ID NO: 33175 - DNA, 17 bp, Arabidopsis thaliana
agcaaatttcaacttga

SEQ ID NO: 33176 - DNA, 17 bp, Arabidopsis thaliana
agcaaatttgcgacgaa

SEQ ID NO: 33177 - DNA, 17 bp, Arabidopsis thaliana
agcaaattttctctgca

SEQ ID NO: 33178 - DNA, 17 bp, Arabidopsis thaliana
agcaaattttgcgtcgg

SEQ ID NO: 33179 - DNA, 17 bp, Arabidopsis thaliana
agcaacaaacttttgcc

SEQ ID NO: 33180 - DNA, 17 bp, Arabidopsis thaliana
agcaacaacaatgtcgt

SEQ ID NO: 33181 - DNA, 17 bp, Arabidopsis thaliana
agcaacaagattcaatg

SEQ ID NO: 33182 - DNA, 17 bp, Arabidopsis thaliana
agcaacaagtgtgatca

SEQ ID NO: 33183 - DNA, 17 bp, Arabidopsis thaliana
agcaacaccaccgcagg

SEQ ID NO: 33184 - DNA, 17 bp, Arabidopsis thaliana
agcaacaccctcccgcc

SEQ ID NO: 33185 - DNA, 17 bp, Arabidopsis thaliana
agcaacacctctagtac

SEQ ID NO: 33186 - DNA, 17 bp, Arabidopsis thaliana
agcaacacggggaaact

SEQ ID NO: 33187 - DNA, 17 bp, Arabidopsis thaliana
agcaacacgtctttcta

SEQ ID NO: 33188 - DNA, 17 bp, Arabidopsis thaliana
agcaacactactatctc

SEQ ID NO: 33189 - DNA, 17 bp, Arabidopsis thaliana
agcaacagaacgattcg

SEQ ID NO: 33190 - DNA, 17 bp, Arabidopsis thaliana
agcaacagaagacgcat

SEQ ID NO: 33191 - DNA, 17 bp, Arabidopsis thaliana
agcaacagagcgattac

SEQ ID NO: 33192 - DNA, 17 bp, Arabidopsis thaliana
agcaacagcgaccagcg

SEQ ID NO: 33193 - DNA, 17 bp, Arabidopsis thaliana
agcaacagcgatggagc

SEQ ID NO: 33194 - DNA, 17 bp, Arabidopsis thaliana
agcaacagcgcgagcgt

SEQ ID NO: 33195 - DNA, 17 bp, Arabidopsis thaliana
agcaacagctaagtctc

SEQ ID NO: 33196 - DNA, 17 bp, Arabidopsis thaliana
agcaacagcttagaaac

SEQ ID NO: 33197 - DNA, 17 bp, Arabidopsis thaliana
agcaacaggtggtgcga

SEQ ID NO: 33198 - DNA, 17 bp, Arabidopsis thaliana
agcaacagtagccataa

SEQ ID NO: 33199 - DNA, 17 bp, Arabidopsis thaliana
agcaacagttgcttcct

SEQ ID NO: 33200 - DNA, 17 bp, Arabidopsis thaliana
agcaacatccgattagg

SEQ ID NO: 33201 - DNA, 17 bp, Arabidopsis thaliana
agcaacatgctcaagct

SEQ ID NO: 33202 - DNA, 17 bp, Arabidopsis thaliana
agcaacatgtttaccag

SEQ ID NO: 33203 - DNA, 17 bp, Arabidopsis thaliana
agcaaccacagcttgag

SEQ ID NO: 33204 - DNA, 17 bp, Arabidopsis thaliana
agcaaccagttcatgta

SEQ ID NO: 33205 - DNA, 17 bp, Arabidopsis thaliana
agcaacccgccccgcgg

SEQ ID NO: 33206 - DNA, 17 bp, Arabidopsis thaliana
agcaaccggatcttaaa

SEQ ID NO: 33207 - DNA, 17 bp, Arabidopsis thaliana
agcaaccggatcttcaa

SEQ ID NO: 33208 - DNA, 17 bp, Arabidopsis thaliana
agcaaccggatttcctt

SEQ ID NO: 33209 - DNA, 17 bp, Arabidopsis thaliana
agcaaccgggacatgat

SEQ ID NO: 33210 - DNA, 17 bp, Arabidopsis thaliana
agcaaccgggtttcctt

SEQ ID NO: 33211 - DNA, 17 bp, Arabidopsis thaliana
agcaaccgtctccacca

SEQ ID NO: 33212 - DNA, 17 bp, Arabidopsis thaliana
agcaaccttcccttgta

SEQ ID NO: 33213 - DNA, 17 bp, Arabidopsis thaliana
agcaaccttgaagcaaa

SEQ ID NO: 33214 - DNA, 17 bp, Arabidopsis thaliana
agcaacgacgcttggag

SEQ ID NO: 33215 - DNA, 17 bp, Arabidopsis thaliana
agcaacgattccagtta

SEQ ID NO: 33216 - DNA, 17 bp, Arabidopsis thaliana
agcaacgattccagttt

SEQ ID NO: 33217 - DNA, 17 bp, Arabidopsis thaliana
agcaacggacgagaggt

SEQ ID NO: 33218 - DNA, 17 bp, Arabidopsis thaliana
agcaacggccaaaactg

SEQ ID NO: 33219 - DNA, 17 bp, Arabidopsis thaliana
agcaacggctgttccga

SEQ ID NO: 33220 - DNA, 17 bp, Arabidopsis thaliana
agcaacggtcacatgtc

SEQ ID NO: 33221 - DNA, 17 bp, Arabidopsis thaliana
agcaacggtgctcttgt

SEQ ID NO: 33222 - DNA, 17 bp, Arabidopsis thaliana
agcaacggtgctctttt

SEQ ID NO: 33223 - DNA, 17 bp, Arabidopsis thaliana
agcaacggttgctttct

SEQ ID NO: 33224 - DNA, 17 bp, Arabidopsis thaliana
agcaacgtcggcagtaa

SEQ ID NO: 33225 - DNA, 17 bp, Arabidopsis thaliana
agcaacgtgctgttggc

SEQ ID NO: 33226 - DNA, 17 bp, Arabidopsis thaliana
agcaactaaagaacctg

SEQ ID NO: 33227 - DNA, 17 bp, Arabidopsis thaliana
agcaactacaatctgca

SEQ ID NO: 33228 - DNA, 17 bp, Arabidopsis thaliana
agcaactactgcgtaat

SEQ ID NO: 33229 - DNA, 17 bp, Arabidopsis thaliana
agcaactagacgcttgt

SEQ ID NO: 33230 - DNA, 17 bp, Arabidopsis thaliana
agcaactataaacgcgt

SEQ ID NO: 33231 - DNA, 17 bp, Arabidopsis thaliana
agcaactcaatcacctt

SEQ ID NO: 33232 - DNA, 17 bp, Arabidopsis thaliana
agcaactcacctgactg

SEQ ID NO: 33233 - DNA, 17 bp, Arabidopsis thaliana
agcaactccaaccttgg

SEQ ID NO: 33234 - DNA, 17 bp, Arabidopsis thaliana
agcaactcttcttttcc

SEQ ID NO: 33235 - DNA, 17 bp, Arabidopsis thaliana
agcaactgaaaagacaa

SEQ ID NO: 33236 - DNA, 17 bp, Arabidopsis thaliana
agcaactgaaaccagaa

SEQ ID NO: 33237 - DNA, 17 bp, Arabidopsis thaliana
agcaactgagtcacaaa

SEQ ID NO: 33238 - DNA, 17 bp, Arabidopsis thaliana
agcaactgcaaggtggg

SEQ ID NO: 33239 - DNA, 17 bp, Arabidopsis thaliana
agcaactgctttctacg

SEQ ID NO: 33240 - DNA, 17 bp, Arabidopsis thaliana
agcaactggatcttaaa

SEQ ID NO: 33241 - DNA, 17 bp, Arabidopsis thaliana
agcaactgttctttaga

SEQ ID NO: 33242 - DNA, 17 bp, Arabidopsis thaliana
agcaactgttgaaatgt

SEQ ID NO: 33243 - DNA, 17 bp, Arabidopsis thaliana
agcaactgttgtttaga

SEQ ID NO: 33244 - DNA, 17 bp, Arabidopsis thaliana
agcaacttattgactcg

SEQ ID NO: 33245 - DNA, 17 bp, Arabidopsis thaliana
agcaacttgaacattct

SEQ ID NO: 33246 - DNA, 17 bp, Arabidopsis thaliana
agcaacttggcatgtga

SEQ ID NO: 33247 - DNA, 17 bp, Arabidopsis thaliana
agcaacttgtctccgga

SEQ ID NO: 33248 - DNA, 17 bp, Arabidopsis thaliana
agcaactttgattatcc

SEQ ID NO: 33249 - DNA, 17 bp, Arabidopsis thaliana
agcaacttttttcttca

SEQ ID NO: 33250 - DNA, 17 bp, Arabidopsis thaliana
agcaagaacatttgact

SEQ ID NO: 33251 - DNA, 17 bp, Arabidopsis thaliana
agcaagacaatcagcac

SEQ ID NO: 33252 - DNA, 17 bp, Arabidopsis thaliana
agcaagaccaagtgtcg

SEQ ID NO: 33253 - DNA, 17 bp, Arabidopsis thaliana
agcaagaccgtcagatt

SEQ ID NO: 33254 - DNA, 17 bp, Arabidopsis thaliana
agcaagacctgaagggt

SEQ ID NO: 33255 - DNA, 17 bp, Arabidopsis thaliana
agcaagacggatttgga

SEQ ID NO: 33256 - DNA, 17 bp, Arabidopsis thaliana
agcaagactatggcttg

SEQ ID NO: 33257 - DNA, 17 bp, Arabidopsis thaliana
agcaagactcaatgagg

SEQ ID NO: 33258 - DNA, 17 bp, Arabidopsis thaliana
agcaagagctccgctgt

SEQ ID NO: 33259 - DNA, 17 bp, Arabidopsis thaliana
agcaagaggcaagtggg

SEQ ID NO: 33260 - DNA, 17 bp, Arabidopsis thaliana
agcaagagggataactt

SEQ ID NO: 33261 - DNA, 17 bp, Arabidopsis thaliana
agcaagattccagtcag

SEQ ID NO: 33262 - DNA, 17 bp, Arabidopsis thaliana
agcaagcacatgcaagt

SEQ ID NO: 33263 - DNA, 17 bp, Arabidopsis thaliana
agcaagcactcgtttta

SEQ ID NO: 33264 - DNA, 17 bp, Arabidopsis thaliana
agcaagcacttaacact

SEQ ID NO: 33265 - DNA, 17 bp, Arabidopsis thaliana
agcaagcagaggttttt

SEQ ID NO: 33266 - DNA, 17 bp, Arabidopsis thaliana
agcaagcagcggggccg

SEQ ID NO: 33267 - DNA, 17 bp, Arabidopsis thaliana
agcaagcatttgcggtt

SEQ ID NO: 33268 - DNA, 17 bp, Arabidopsis thaliana
agcaagccagtaagtgt

SEQ ID NO: 33269 - DNA, 17 bp, Arabidopsis thaliana
agcaagccgctactcat

SEQ ID NO: 33270 - DNA, 17 bp, Arabidopsis thaliana
agcaagcctacgctctg

SEQ ID NO: 33271 - DNA, 17 bp, Arabidopsis thaliana
agcaagccttgatgact

SEQ ID NO: 33272 - DNA, 17 bp, Arabidopsis thaliana
agcaagcgatgagcctc

SEQ ID NO: 33273 - DNA, 17 bp, Arabidopsis thaliana
agcaagcggggaccgaa

SEQ ID NO: 33274 - DNA, 17 bp, Arabidopsis thaliana
agcaagcgtttgcggtt

SEQ ID NO: 33275 - DNA, 17 bp, Arabidopsis thaliana
agcaagctcgtccatgc

SEQ ID NO: 33276 - DNA, 17 bp, Arabidopsis thaliana
agcaagcttaaccgtgg

SEQ ID NO: 33277 - DNA, 17 bp, Arabidopsis thaliana
agcaagcttgtgaaata

SEQ ID NO: 33278 - DNA, 17 bp, Arabidopsis thaliana
agcaaggaactgaaacg

SEQ ID NO: 33279 - DNA, 17 bp, Arabidopsis thaliana
agcaaggatgacttgcc

SEQ ID NO: 33280 - DNA, 17 bp, Arabidopsis thaliana
agcaaggattaccttag

SEQ ID NO: 33281 - DNA, 17 bp, Arabidopsis thaliana
agcaaggcaataaaacc

SEQ ID NO: 33282 - DNA, 17 bp, Arabidopsis thaliana
agcaaggcagcttaccc

SEQ ID NO: 33283 - DNA, 17 bp, Arabidopsis thaliana
agcaaggccacactgcc

SEQ ID NO: 33284 - DNA, 17 bp, Arabidopsis thaliana
agcaaggccactctgcc

SEQ ID NO: 33285 - DNA, 17 bp, Arabidopsis thaliana
agcaaggctctgaagct

SEQ ID NO: 33286 - DNA, 17 bp, Arabidopsis thaliana
agcaaggcttaaacttg

SEQ ID NO: 33287 - DNA, 17 bp, Arabidopsis thaliana
agcaaggcttgaacttg

SEQ ID NO: 33288 - DNA, 17 bp, Arabidopsis thaliana
agcaaggtaggcgttct

SEQ ID NO: 33289 - DNA, 17 bp, Arabidopsis thaliana
agcaaggtctatccgcc

SEQ ID NO: 33290 - DNA, 17 bp, Arabidopsis thaliana
agcaaggttctctatca

SEQ ID NO: 33291 - DNA, 17 bp, Arabidopsis thaliana
agcaagtaaagttctcg

SEQ ID NO: 33292 - DNA, 17 bp, Arabidopsis thaliana
agcaagtacttgcctaa

SEQ ID NO: 33293 - DNA, 17 bp, Arabidopsis thaliana
agcaagtacttgccttg

SEQ ID NO: 33294 - DNA, 17 bp, Arabidopsis thaliana
agcaagtccattgagga

SEQ ID NO: 33295 - DNA, 17 bp, Arabidopsis thaliana
agcaagtcccccgaact

SEQ ID NO: 33296 - DNA, 17 bp, Arabidopsis thaliana
agcaagtctatcaggtg

SEQ ID NO: 33297 - DNA, 17 bp, Arabidopsis thaliana
agcaagtgaatacatcg

SEQ ID NO: 33298 - DNA, 17 bp, Arabidopsis thaliana
agcaagtgactacatcg

SEQ ID NO: 33299 - DNA, 17 bp, Arabidopsis thaliana
agcaagtgaggatgagg

SEQ ID NO: 33300 - DNA, 17 bp, Arabidopsis thaliana
agcaagtgcgtaacaac

SEQ ID NO: 33301 - DNA, 17 bp, Arabidopsis thaliana
agcaagttagatctccc

SEQ ID NO: 33302 - DNA, 17 bp, Arabidopsis thaliana
agcaagttaggcccaga

SEQ ID NO: 33303 - DNA, 17 bp, Arabidopsis thaliana
agcaagttcccaatact

SEQ ID NO: 33304 - DNA, 17 bp, Arabidopsis thaliana
agcaagttcctcgcaaa

SEQ ID NO: 33305 - DNA, 17 bp, Arabidopsis thaliana
agcaagttgtccttggc

SEQ ID NO: 33306 - DNA, 17 bp, Arabidopsis thaliana
agcaagtttcccgccaa

SEQ ID NO: 33307 - DNA, 17 bp, Arabidopsis thaliana
agcaagtttggttggtt

SEQ ID NO: 33308 - DNA, 17 bp, Arabidopsis thaliana
agcaagttttgattcgt

SEQ ID NO: 33309 - DNA, 17 bp, Arabidopsis thaliana
agcaagttttgcaagat

SEQ ID NO: 33310 - DNA, 17 bp, Arabidopsis thaliana
agcaagttttgcaggat

SEQ ID NO: 33311 - DNA, 17 bp, Arabidopsis thaliana
agcaagttttggctgtt

SEQ ID NO: 33312 - DNA, 17 bp, Arabidopsis thaliana
agcaataacccttacgg

SEQ ID NO: 33313 - DNA, 17 bp, Arabidopsis thaliana
agcaatagacccgggtt

SEQ ID NO: 33314 - DNA, 17 bp, Arabidopsis thaliana
agcaatagcaagcccgt

SEQ ID NO: 33315 - DNA, 17 bp, Arabidopsis thaliana
agcaatagtcgttcgcg

SEQ ID NO: 33316 - DNA, 17 bp, Arabidopsis thaliana
agcaatatctgccatct

SEQ ID NO: 33317 - DNA, 17 bp, Arabidopsis thaliana
agcaatcagatacgcag

SEQ ID NO: 33318 - DNA, 17 bp, Arabidopsis thaliana
agcaatctccggatctg

SEQ ID NO: 33319 - DNA, 17 bp, Arabidopsis thaliana
agcaatctgtcaccgtc

SEQ ID NO: 33320 - DNA, 17 bp, Arabidopsis thaliana
agcaatgaagtgtatga

SEQ ID NO: 33321 - DNA, 17 bp, Arabidopsis thaliana
agcaatgaccagcagat

SEQ ID NO: 33322 - DNA, 17 bp, Arabidopsis thaliana
agcaatgatcgtgaccg

SEQ ID NO: 33323 - DNA, 17 bp, Arabidopsis thaliana
agcaatgatgggtgccg

SEQ ID NO: 33324 - DNA, 17 bp, Arabidopsis thaliana
agcaatgcaatattttg

SEQ ID NO: 33325 - DNA, 17 bp, Arabidopsis thaliana
agcaatgccaaagtgtc

SEQ ID NO: 33326 - DNA, 17 bp, Arabidopsis thaliana
agcaatgcttgcgatga

SEQ ID NO: 33327 - DNA, 17 bp, Arabidopsis thaliana
agcaatggaaaaactgg

SEQ ID NO: 33328 - DNA, 17 bp, Arabidopsis thaliana
agcaatggctaagatag

SEQ ID NO: 33329 - DNA, 17 bp, Arabidopsis thaliana
agcaatggctaagatcg

SEQ ID NO: 33330 - DNA, 17 bp, Arabidopsis thaliana
agcaatgttcatctgat

SEQ ID NO: 33331 - DNA, 17 bp, Arabidopsis thaliana
agcaatgttgcaatgcg

SEQ ID NO: 33332 - DNA, 17 bp, Arabidopsis thaliana
agcaattccggagcatg

SEQ ID NO: 33333 - DNA, 17 bp, Arabidopsis thaliana
agcaattgacaaaattt

SEQ ID NO: 33334 - DNA, 17 bp, Arabidopsis thaliana
agcaatttcacgaagtg

SEQ ID NO: 33335 - DNA, 17 bp, Arabidopsis thaliana
agcaatttccaacagac

SEQ ID NO: 33336 - DNA, 17 bp, Arabidopsis thaliana
agcacaaactttccgag

SEQ ID NO: 33337 - DNA, 17 bp, Arabidopsis thaliana
agcacaaatcacaaaaa

SEQ ID NO: 33338 - DNA, 17 bp, Arabidopsis thaliana
agcacaaatcacgaaaa

SEQ ID NO: 33339 - DNA, 17 bp, Arabidopsis thaliana
agcacaaatctcttgat

SEQ ID NO: 33340 - DNA, 17 bp, Arabidopsis thaliana
agcacaacgcattcctt

SEQ ID NO: 33341 - DNA, 17 bp, Arabidopsis thaliana
agcacaactatggctaa

SEQ ID NO: 33342 - DNA, 17 bp, Arabidopsis thaliana
agcacaagaggatacat

SEQ ID NO: 33343 - DNA, 17 bp, Arabidopsis thaliana
agcacaagccgaaggat

SEQ ID NO: 33344 - DNA, 17 bp, Arabidopsis thaliana
agcacaaggtctcggtt

SEQ ID NO: 33345 - DNA, 17 bp, Arabidopsis thaliana
agcacaagtcttaccca

SEQ ID NO: 33346 - DNA, 17 bp, Arabidopsis thaliana
agcacaagtcttaccta

SEQ ID NO: 33347 - DNA, 17 bp, Arabidopsis thaliana
agcacaagttgccattt

SEQ ID NO: 33348 - DNA, 17 bp, Arabidopsis thaliana
agcacaatcatgtgact

SEQ ID NO: 33349 - DNA, 17 bp, Arabidopsis thaliana
agcacaatcattgatgg

SEQ ID NO: 33350 - DNA, 17 bp, Arabidopsis thaliana
agcacacgattggtcac

SEQ ID NO: 33351 - DNA, 17 bp, Arabidopsis thaliana
agcacacgattggtcag

SEQ ID NO: 33352 - DNA, 17 bp, Arabidopsis thaliana
agcacacgcgtgacccg

SEQ ID NO: 33353 - DNA, 17 bp, Arabidopsis thaliana
agcacacggggatagct

SEQ ID NO: 33354 - DNA, 17 bp, Arabidopsis thaliana
agcacactatgccgttt

SEQ ID NO: 33355 - DNA, 17 bp, Arabidopsis thaliana
agcacactcagcacctc

SEQ ID NO: 33356 - DNA, 17 bp, Arabidopsis thaliana
agcacactgccgcaacc

SEQ ID NO: 33357 - DNA, 17 bp, Arabidopsis thaliana
agcacactgccgctacc

SEQ ID NO: 33358 - DNA, 17 bp, Arabidopsis thaliana
agcacacttataccggc

SEQ ID NO: 33359 - DNA, 17 bp, Arabidopsis thaliana
agcacagacagtgtggt

SEQ ID NO: 33360 - DNA, 17 bp, Arabidopsis thaliana
agcacagaggccatgcg

SEQ ID NO: 33361 - DNA, 17 bp, Arabidopsis thaliana
agcacagatcacggaaa

SEQ ID NO: 33362 - DNA, 17 bp, Arabidopsis thaliana
agcacagatttggacac

SEQ ID NO: 33363 - DNA, 17 bp, Arabidopsis thaliana
agcacagatttggacag

SEQ ID NO: 33364 - DNA, 17 bp, Arabidopsis thaliana
agcacagatttggaccg

SEQ ID NO: 33365 - DNA, 17 bp, Arabidopsis thaliana
agcacagcgaccagcga

SEQ ID NO: 33366 - DNA, 17 bp, Arabidopsis thaliana
agcacaggctcttcctc

SEQ ID NO: 33367 - DNA, 17 bp, Arabidopsis thaliana
agcacagggttagggag

SEQ ID NO: 33368 - DNA, 17 bp, Arabidopsis thaliana
agcacaggtcacggaaa

SEQ ID NO: 33369 - DNA, 17 bp, Arabidopsis thaliana
agcacagtctcctctca

SEQ ID NO: 33370 - DNA, 17 bp, Arabidopsis thaliana
agcacagtgctgcattt

SEQ ID NO: 33371 - DNA, 17 bp, Arabidopsis thaliana
agcacataagagcttgc

SEQ ID NO: 33372 - DNA, 17 bp, Arabidopsis thaliana
agcacataagtaggcct

SEQ ID NO: 33373 - DNA, 17 bp, Arabidopsis thaliana
agcacatagggcgattt

SEQ ID NO: 33374 - DNA, 17 bp, Arabidopsis thaliana
agcacatctactaccta

SEQ ID NO: 33375 - DNA, 17 bp, Arabidopsis thaliana
agcacatgacatccaga

SEQ ID NO: 33376 - DNA, 17 bp, Arabidopsis thaliana
agcacatgagagcttgc

SEQ ID NO: 33377 - DNA, 17 bp, Arabidopsis thaliana
agcacatgagagtttgc

SEQ ID NO: 33378 - DNA, 17 bp, Arabidopsis thaliana
agcacatgcaactaatg

SEQ ID NO: 33379 - DNA, 17 bp, Arabidopsis thaliana
agcacatgctgtggttt

SEQ ID NO: 33380 - DNA, 17 bp, Arabidopsis thaliana
agcacatggaccgaatt

SEQ ID NO: 33381 - DNA, 17 bp, Arabidopsis thaliana
agcacatggattgcaat

SEQ ID NO: 33382 - DNA, 17 bp, Arabidopsis thaliana
agcacatggcccgttaa

SEQ ID NO: 33383 - DNA, 17 bp, Arabidopsis thaliana
agcacatggcggacgaa

SEQ ID NO: 33384 - DNA, 17 bp, Arabidopsis thaliana
agcacatgtaaatgtca

SEQ ID NO: 33385 - DNA, 17 bp, Arabidopsis thaliana
agcacattcattttctg

SEQ ID NO: 33386 - DNA, 17 bp, Arabidopsis thaliana
agcaccaaaaagaattt

SEQ ID NO: 33387 - DNA, 17 bp, Arabidopsis thaliana
agcaccaaacactgact

SEQ ID NO: 33388 - DNA, 17 bp, Arabidopsis thaliana
agcaccaaacgctgact

SEQ ID NO: 33389 - DNA, 17 bp, Arabidopsis thaliana
agcaccaactttgggtc

SEQ ID NO: 33390 - DNA, 17 bp, Arabidopsis thaliana
agcaccaagcaatatcg

SEQ ID NO: 33391 - DNA, 17 bp, Arabidopsis thaliana
agcaccaatctgttcgg

SEQ ID NO: 33392 - DNA, 17 bp, Arabidopsis thaliana
agcaccaatgtttgcag

SEQ ID NO: 33393 - DNA, 17 bp, Arabidopsis thaliana
agcaccacagccgcggc

SEQ ID NO: 33394 - DNA, 17 bp, Arabidopsis thaliana
agcaccagaaaacaaac

SEQ ID NO: 33395 - DNA, 17 bp, Arabidopsis thaliana
agcaccatgatcttgtc

SEQ ID NO: 33396 - DNA, 17 bp, Arabidopsis thaliana
agcacccaaaaccgcac

SEQ ID NO: 33397 - DNA, 17 bp, Arabidopsis thaliana
agcacccaactgggaac

SEQ ID NO: 33398 - DNA, 17 bp, Arabidopsis thaliana
agcacccaactgggacc

SEQ ID NO: 33399 - DNA, 17 bp, Arabidopsis thaliana
agcacccaactgggact

SEQ ID NO: 33400 - DNA, 17 bp, Arabidopsis thaliana
agcacccaaggccaaga

SEQ ID NO: 33401 - DNA, 17 bp, Arabidopsis thaliana
agcacccccaacgctgg

SEQ ID NO: 33402 - DNA, 17 bp, Arabidopsis thaliana
agcaccctgctgtctac

SEQ ID NO: 33403 - DNA, 17 bp, Arabidopsis thaliana
agcaccctttccactga

SEQ ID NO: 33404 - DNA, 17 bp, Arabidopsis thaliana
agcaccgacaaaaccgt

SEQ ID NO: 33405 - DNA, 17 bp, Arabidopsis thaliana
agcaccgacaggatgtt

SEQ ID NO: 33406 - DNA, 17 bp, Arabidopsis thaliana
agcaccgatgctctccg

SEQ ID NO: 33407 - DNA, 17 bp, Arabidopsis thaliana
agcaccgattttcactc

SEQ ID NO: 33408 - DNA, 17 bp, Arabidopsis thaliana
agcaccgcaccgaaggt

SEQ ID NO: 33409 - DNA, 17 bp, Arabidopsis thaliana
agcaccgcacgtcgcgt

SEQ ID NO: 33410 - DNA, 17 bp, Arabidopsis thaliana
agcaccgcgattgaatc

SEQ ID NO: 33411 - DNA, 17 bp, Arabidopsis thaliana
agcaccgctctgatgat

SEQ ID NO: 33412 - DNA, 17 bp, Arabidopsis thaliana
agcaccgcttaccatcc

SEQ ID NO: 33413 - DNA, 17 bp, Arabidopsis thaliana
agcaccggaaccggagt

SEQ ID NO: 33414 - DNA, 17 bp, Arabidopsis thaliana
agcaccggagaatcgac

SEQ ID NO: 33415 - DNA, 17 bp, Arabidopsis thaliana
agcaccggctttggcgt

SEQ ID NO: 33416 - DNA, 17 bp, Arabidopsis thaliana
agcaccgggctgcgaat

SEQ ID NO: 33417 - DNA, 17 bp, Arabidopsis thaliana
agcaccgggctgtggat

SEQ ID NO: 33418 - DNA, 17 bp, Arabidopsis thaliana
agcaccgggtcttgcca

SEQ ID NO: 33419 - DNA, 17 bp, Arabidopsis thaliana
agcaccggtagaaaccc

SEQ ID NO: 33420 - DNA, 17 bp, Arabidopsis thaliana
agcaccgtcatcaacca

SEQ ID NO: 33421 - DNA, 17 bp, Arabidopsis thaliana
agcacctagggcacgta

SEQ ID NO: 33422 - DNA, 17 bp, Arabidopsis thaliana
agcacctcattggactg

SEQ ID NO: 33423 - DNA, 17 bp, Arabidopsis thaliana
agcacctccgcttctcc

SEQ ID NO: 33424 - DNA, 17 bp, Arabidopsis thaliana
agcacctcgatgtcggc

SEQ ID NO: 33425 - DNA, 17 bp, Arabidopsis thaliana
agcacctcttccgccaa

SEQ ID NO: 33426 - DNA, 17 bp, Arabidopsis thaliana
agcacctgcgaagagat

SEQ ID NO: 33427 - DNA, 17 bp, Arabidopsis thaliana
agcacctgctggttaac

SEQ ID NO: 33428 - DNA, 17 bp, Arabidopsis thaliana
agcaccttggatctggc

SEQ ID NO: 33429 - DNA, 17 bp, Arabidopsis thaliana
agcaccttggatctgtc

SEQ ID NO: 33430 - DNA, 17 bp, Arabidopsis thaliana
agcacctttgtctggtc

SEQ ID NO: 33431 - DNA, 17 bp, Arabidopsis thaliana
agcacgagaacgagatc

SEQ ID NO: 33432 - DNA, 17 bp, Arabidopsis thaliana
agcacgagaatgtcata

SEQ ID NO: 33433 - DNA, 17 bp, Arabidopsis thaliana
agcacgagcaataccct

SEQ ID NO: 33434 - DNA, 17 bp, Arabidopsis thaliana
agcacgagcaatggaag

SEQ ID NO: 33435 - DNA, 17 bp, Arabidopsis thaliana
agcacgagcaatggtag

SEQ ID NO: 33436 - DNA, 17 bp, Arabidopsis thaliana
agcacgagctgcctaag

SEQ ID NO: 33437 - DNA, 17 bp, Arabidopsis thaliana
agcacgaggagtttcct

SEQ ID NO: 33438 - DNA, 17 bp, Arabidopsis thaliana
agcacgagtcctaccta

SEQ ID NO: 33439 - DNA, 17 bp, Arabidopsis thaliana
agcacgagttatgatac

SEQ ID NO: 33440 - DNA, 17 bp, Arabidopsis thaliana
agcacgagttatgatct

SEQ ID NO: 33441 - DNA, 17 bp, Arabidopsis thaliana
agcacgcgcctaacggc

SEQ ID NO: 33442 - DNA, 17 bp, Arabidopsis thaliana
agcacgcgctaagacgc

SEQ ID NO: 33443 - DNA, 17 bp, Arabidopsis thaliana
agcacgcgctaagacgg

SEQ ID NO: 33444 - DNA, 17 bp, Arabidopsis thaliana
agcacgcggattacggt

SEQ ID NO: 33445 - DNA, 17 bp, Arabidopsis thaliana
agcacgcttaactgcgg

SEQ ID NO: 33446 - DNA, 17 bp, Arabidopsis thaliana
agcacgcttagctgcgg

SEQ ID NO: 33447 - DNA, 17 bp, Arabidopsis thaliana
agcacgcttatacgatt

SEQ ID NO: 33448 - DNA, 17 bp, Arabidopsis thaliana
agcacggagcaagtcat

SEQ ID NO: 33449 - DNA, 17 bp, Arabidopsis thaliana
agcacggagttgtggtt

SEQ ID NO: 33450 - DNA, 17 bp, Arabidopsis thaliana
agcacggcaagcgggag

SEQ ID NO: 33451 - DNA, 17 bp, Arabidopsis thaliana
agcacgggcattaatat

SEQ ID NO: 33452 - DNA, 17 bp, Arabidopsis thaliana
agcacgggtactgacct

SEQ ID NO: 33453 - DNA, 17 bp, Arabidopsis thaliana
agcacgggttatgatct

SEQ ID NO: 33454 - DNA, 17 bp, Arabidopsis thaliana
agcacgggttggcggga

SEQ ID NO: 33455 - DNA, 17 bp, Arabidopsis thaliana
agcacggtcgagtggtt

SEQ ID NO: 33456 - DNA, 17 bp, Arabidopsis thaliana
agcacggtgcggttcag

SEQ ID NO: 33457 - DNA, 17 bp, Arabidopsis thaliana
agcacggttcatgaggt

SEQ ID NO: 33458 - DNA, 17 bp, Arabidopsis thaliana
agcacggttggttgctc

SEQ ID NO: 33459 - DNA, 17 bp, Arabidopsis thaliana
agcacgtctgcctgggt

SEQ ID NO: 33460 - DNA, 17 bp, Arabidopsis thaliana
agcacgtgtcgattgac

SEQ ID NO: 33461 - DNA, 17 bp, Arabidopsis thaliana
agcactaaaacttatgt

SEQ ID NO: 33462 - DNA, 17 bp, Arabidopsis thaliana
agcactaaaacttctgt

SEQ ID NO: 33463 - DNA, 17 bp, Arabidopsis thaliana
agcactaaactggaagc

SEQ ID NO: 33464 - DNA, 17 bp, Arabidopsis thaliana
agcactaacgcaccaac

SEQ ID NO: 33465 - DNA, 17 bp, Arabidopsis thaliana
agcactaacgcaccgga

SEQ ID NO: 33466 - DNA, 17 bp, Arabidopsis thaliana
agcactaaggtcatctc

SEQ ID NO: 33467 - DNA, 17 bp, Arabidopsis thaliana
agcactaatgcaccgaa

SEQ ID NO: 33468 - DNA, 17 bp, Arabidopsis thaliana
agcactaatgcaccgac

SEQ ID NO: 33469 - DNA, 17 bp, Arabidopsis thaliana
agcactaatgcaccgga

SEQ ID NO: 33470 - DNA, 17 bp, Arabidopsis thaliana
agcactaatgcaccggg

SEQ ID NO: 33471 - DNA, 17 bp, Arabidopsis thaliana
agcactaattgtcgtta

SEQ ID NO: 33472 - DNA, 17 bp, Arabidopsis thaliana
agcactagatcggcctt

SEQ ID NO: 33473 - DNA, 17 bp, Arabidopsis thaliana
agcactagatggacatc

SEQ ID NO: 33474 - DNA, 17 bp, Arabidopsis thaliana
agcactagccctcctct

SEQ ID NO: 33475 - DNA, 17 bp, Arabidopsis thaliana
agcactagtacagccgg

SEQ ID NO: 33476 - DNA, 17 bp, Arabidopsis thaliana
agcactagtcagattgt

SEQ ID NO: 33477 - DNA, 17 bp, Arabidopsis thaliana
agcactagtggggattt

SEQ ID NO: 33478 - DNA, 17 bp, Arabidopsis thaliana
agcactattggtgtctc

SEQ ID NO: 33479 - DNA, 17 bp, Arabidopsis thaliana
agcactcagctgggccg

SEQ ID NO: 33480 - DNA, 17 bp, Arabidopsis thaliana
agcactcatgactcaac

SEQ ID NO: 33481 - DNA, 17 bp, Arabidopsis thaliana
agcactcattgacgatc

SEQ ID NO: 33482 - DNA, 17 bp, Arabidopsis thaliana
agcactcattgtcgtta

SEQ ID NO: 33483 - DNA, 17 bp, Arabidopsis thaliana
agcactccacgctaggt

SEQ ID NO: 33484 - DNA, 17 bp, Arabidopsis thaliana
agcactcccaacgctcg

SEQ ID NO: 33485 - DNA, 17 bp, Arabidopsis thaliana
agcactcccaacgcttg

SEQ ID NO: 33486 - DNA, 17 bp, Arabidopsis thaliana
agcactccgctgactgc

SEQ ID NO: 33487 - DNA, 17 bp, Arabidopsis thaliana
agcactcgagagtttga

SEQ ID NO: 33488 - DNA, 17 bp, Arabidopsis thaliana
agcactcgttcagccaa

SEQ ID NO: 33489 - DNA, 17 bp, Arabidopsis thaliana
agcactctacgcagcca

SEQ ID NO: 33490 - DNA, 17 bp, Arabidopsis thaliana
agcactctacgcagcga

SEQ ID NO: 33491 - DNA, 17 bp, Arabidopsis thaliana
agcactctgatttgcgt

SEQ ID NO: 33492 - DNA, 17 bp, Arabidopsis thaliana
agcactctgctaggccg

SEQ ID NO: 33493 - DNA, 17 bp, Arabidopsis thaliana
agcactctgctgggccg

SEQ ID NO: 33494 - DNA, 17 bp, Arabidopsis thaliana
agcactctgctgtgccg

SEQ ID NO: 33495 - DNA, 17 bp, Arabidopsis thaliana
agcactctggactgtga

SEQ ID NO: 33496 - DNA, 17 bp, Arabidopsis thaliana
agcactcttcggccgaa

SEQ ID NO: 33497 - DNA, 17 bp, Arabidopsis thaliana
agcactgacatttctcc

SEQ ID NO: 33498 - DNA, 17 bp, Arabidopsis thaliana
agcactgacctgaaatt

SEQ ID NO: 33499 - DNA, 17 bp, Arabidopsis thaliana
agcactgacgcaatcac

SEQ ID NO: 33500 - DNA, 17 bp, Arabidopsis thaliana
agcactgcacagattga

SEQ ID NO: 33501 - DNA, 17 bp, Arabidopsis thaliana
agcactgcacagattgc

SEQ ID NO: 33502 - DNA, 17 bp, Arabidopsis thaliana
agcactgcactgcactt

SEQ ID NO: 33503 - DNA, 17 bp, Arabidopsis thaliana
agcactgcggttcttct

SEQ ID NO: 33504 - DNA, 17 bp, Arabidopsis thaliana
agcactgctcgagccac

SEQ ID NO: 33505 - DNA, 17 bp, Arabidopsis thaliana
agcactggactatgcag

SEQ ID NO: 33506 - DNA, 17 bp, Arabidopsis thaliana
agcactggagttgagca

SEQ ID NO: 33507 - DNA, 17 bp, Arabidopsis thaliana
agcactgggcagaaatc

SEQ ID NO: 33508 - DNA, 17 bp, Arabidopsis thaliana
agcactgggtgtggtcg

SEQ ID NO: 33509 - DNA, 17 bp, Arabidopsis thaliana
agcactgttatgatgcg

SEQ ID NO: 33510 - DNA, 17 bp, Arabidopsis thaliana
agcactgttgcagtacg

SEQ ID NO: 33511 - DNA, 17 bp, Arabidopsis thaliana
agcactgttgcattgcg

SEQ ID NO: 33512 - DNA, 17 bp, Arabidopsis thaliana
agcactgttgcgatacg

SEQ ID NO: 33513 - DNA, 17 bp, Arabidopsis thaliana
agcactgttgcggtgcg

SEQ ID NO: 33514 - DNA, 17 bp, Arabidopsis thaliana
agcactgtttcggtgcg

SEQ ID NO: 33515 - DNA, 17 bp, Arabidopsis thaliana
agcacttaacaggacgg

SEQ ID NO: 33516 - DNA, 17 bp, Arabidopsis thaliana
agcacttaccgcgagtt

SEQ ID NO: 33517 - DNA, 17 bp, Arabidopsis thaliana
agcacttgaatgctgcg

SEQ ID NO: 33518 - DNA, 17 bp, Arabidopsis thaliana
agcacttggagagcctt

SEQ ID NO: 33519 - DNA, 17 bp, Arabidopsis thaliana
agcacttggcccaatgg

SEQ ID NO: 33520 - DNA, 17 bp, Arabidopsis thaliana
agcacttgggtcgagaa

SEQ ID NO: 33521 - DNA, 17 bp, Arabidopsis thaliana
agcacttgtgaaggatc

SEQ ID NO: 33522 - DNA, 17 bp, Arabidopsis thaliana
agcacttgttagcttgt

SEQ ID NO: 33523 - DNA, 17 bp, Arabidopsis thaliana
agcacttgttgtcgtta

SEQ ID NO: 33524 - DNA, 17 bp, Arabidopsis thaliana
agcactttcggtgtaga

SEQ ID NO: 33525 - DNA, 17 bp, Arabidopsis thaliana
agcactttctgattcct

SEQ ID NO: 33526 - DNA, 17 bp, Arabidopsis thaliana
agcactttgcgcgggaa

SEQ ID NO: 33527 - DNA, 17 bp, Arabidopsis thaliana
agcacttttcgcgataa

SEQ ID NO: 33528 - DNA, 17 bp, Arabidopsis thaliana
agcacttttgactgttg

SEQ ID NO: 33529 - DNA, 17 bp, Arabidopsis thaliana
agcacttttgggatcga

SEQ ID NO: 33530 - DNA, 17 bp, Arabidopsis thaliana
agcagaaactgatcact

SEQ ID NO: 33531 - DNA, 17 bp, Arabidopsis thaliana
agcagaaattcaaccaa

SEQ ID NO: 33532 - DNA, 17 bp, Arabidopsis thaliana
agcagaacaagcgtcag

SEQ ID NO: 33533 - DNA, 17 bp, Arabidopsis thaliana
agcagaaccacccgcca

SEQ ID NO: 33534 - DNA, 17 bp, Arabidopsis thaliana
agcagaacccatagttt

SEQ ID NO: 33535 - DNA, 17 bp, Arabidopsis thaliana
agcagaactggcgatac

SEQ ID NO: 33536 - DNA, 17 bp, Arabidopsis thaliana
agcagaagacacgtggc

SEQ ID NO: 33537 - DNA, 17 bp, Arabidopsis thaliana
agcagaagacactattg

SEQ ID NO: 33538 - DNA, 17 bp, Arabidopsis thaliana
agcagaagagatattct

SEQ ID NO: 33539 - DNA, 17 bp, Arabidopsis thaliana
agcagaagcacttgtca

SEQ ID NO: 33540 - DNA, 17 bp, Arabidopsis thaliana
agcagaagtcagatttg

SEQ ID NO: 33541 - DNA, 17 bp, Arabidopsis thaliana
agcagaatccggctggc

SEQ ID NO: 33542 - DNA, 17 bp, Arabidopsis thaliana
agcagaatttgcgatgg

SEQ ID NO: 33543 - DNA, 17 bp, Arabidopsis thaliana
agcagaattttggacct

SEQ ID NO: 33544 - DNA, 17 bp, Arabidopsis thaliana
agcagacaagtactatt

SEQ ID NO: 33545 - DNA, 17 bp, Arabidopsis thaliana
agcagacaccagaatag

SEQ ID NO: 33546 - DNA, 17 bp, Arabidopsis thaliana
agcagacacggagaaat

SEQ ID NO: 33547 - DNA, 17 bp, Arabidopsis thaliana
agcagacagaccgcggc

SEQ ID NO: 33548 - DNA, 17 bp, Arabidopsis thaliana
agcagacaggttcttca

SEQ ID NO: 33549 - DNA, 17 bp, Arabidopsis thaliana
agcagacctccgaacaa

SEQ ID NO: 33550 - DNA, 17 bp, Arabidopsis thaliana
agcagaccttgtgttct

SEQ ID NO: 33551 - DNA, 17 bp, Arabidopsis thaliana
agcagacgaggtttgat

SEQ ID NO: 33552 - DNA, 17 bp, Arabidopsis thaliana
agcagacgcactagccg

SEQ ID NO: 33553 - DNA, 17 bp, Arabidopsis thaliana
agcagacgtgacaagcg

SEQ ID NO: 33554 - DNA, 17 bp, Arabidopsis thaliana
agcagacgtgtctcgtc

SEQ ID NO: 33555 - DNA, 17 bp, Arabidopsis thaliana
agcagactatgcgactt

SEQ ID NO: 33556 - DNA, 17 bp, Arabidopsis thaliana
agcagactcagaagcgt

SEQ ID NO: 33557 - DNA, 17 bp, Arabidopsis thaliana
agcagactctgatcgga

SEQ ID NO: 33558 - DNA, 17 bp, Arabidopsis thaliana
agcagactgcaggtttg

SEQ ID NO: 33559 - DNA, 17 bp, Arabidopsis thaliana
agcagactgctcgagct

SEQ ID NO: 33560 - DNA, 17 bp, Arabidopsis thaliana
agcagactggcagacac

SEQ ID NO: 33561 - DNA, 17 bp, Arabidopsis thaliana
agcagactgtgaatcaa

SEQ ID NO: 33562 - DNA, 17 bp, Arabidopsis thaliana
agcagacttctctcgac

SEQ ID NO: 33563 - DNA, 17 bp, Arabidopsis thaliana
agcagacttggtcttat

SEQ ID NO: 33564 - DNA, 17 bp, Arabidopsis thaliana
agcagactttggagttt

SEQ ID NO: 33565 - DNA, 17 bp, Arabidopsis thaliana
agcagagaaatgcctgc

SEQ ID NO: 33566 - DNA, 17 bp, Arabidopsis thaliana
agcagagacccttgtag

SEQ ID NO: 33567 - DNA, 17 bp, Arabidopsis thaliana
agcagagacgcggcggt

SEQ ID NO: 33568 - DNA, 17 bp, Arabidopsis thaliana
agcagagagccctccaa

SEQ ID NO: 33569 - DNA, 17 bp, Arabidopsis thaliana
agcagagaggctttcac

SEQ ID NO: 33570 - DNA, 17 bp, Arabidopsis thaliana
agcagagatatacgcgg

SEQ ID NO: 33571 - DNA, 17 bp, Arabidopsis thaliana
agcagagattgcgattt

SEQ ID NO: 33572 - DNA, 17 bp, Arabidopsis thaliana
agcagagattgttgaca

SEQ ID NO: 33573 - DNA, 17 bp, Arabidopsis thaliana
agcagagcaagtgagtt

SEQ ID NO: 33574 - DNA, 17 bp, Arabidopsis thaliana
agcagagccgtgcctca

SEQ ID NO: 33575 - DNA, 17 bp, Arabidopsis thaliana
agcagagcgaactagct

SEQ ID NO: 33576 - DNA, 17 bp, Arabidopsis thaliana
agcagagcgctgagact

SEQ ID NO: 33577 - DNA, 17 bp, Arabidopsis thaliana
agcagagctcatctcga

SEQ ID NO: 33578 - DNA, 17 bp, Arabidopsis thaliana
agcagaggcaaaacgat

SEQ ID NO: 33579 - DNA, 17 bp, Arabidopsis thaliana
agcagaggcttcgccag

SEQ ID NO: 33580 - DNA, 17 bp, Arabidopsis thaliana
agcagagggtcggcggt

SEQ ID NO: 33581 - DNA, 17 bp, Arabidopsis thaliana
agcagagggtgagccgc

SEQ ID NO: 33582 - DNA, 17 bp, Arabidopsis thaliana
agcagaggtatcgactt

SEQ ID NO: 33583 - DNA, 17 bp, Arabidopsis thaliana
agcagaggtatctgaac

SEQ ID NO: 33584 - DNA, 17 bp, Arabidopsis thaliana
agcagaggtcgagtacc

SEQ ID NO: 33585 - DNA, 17 bp, Arabidopsis thaliana
agcagaggtgcaccgga

SEQ ID NO: 33586 - DNA, 17 bp, Arabidopsis thaliana
agcagaggtgtcctccg

SEQ ID NO: 33587 - DNA, 17 bp, Arabidopsis thaliana
agcagagtcagatatgg

SEQ ID NO: 33588 - DNA, 17 bp, Arabidopsis thaliana
agcagagtgataggcgg

SEQ ID NO: 33589 - DNA, 17 bp, Arabidopsis thaliana
agcagagtgcttcttag

SEQ ID NO: 33590 - DNA, 17 bp, Arabidopsis thaliana
agcagagtggcgcagcg

SEQ ID NO: 33591 - DNA, 17 bp, Arabidopsis thaliana
agcagagtgtcaagtag

SEQ ID NO: 33592 - DNA, 17 bp, Arabidopsis thaliana
agcagataacgagggaa

SEQ ID NO: 33593 - DNA, 17 bp, Arabidopsis thaliana
agcagatacaattctac

SEQ ID NO: 33594 - DNA, 17 bp, Arabidopsis thaliana
agcagatcaagcggtcc

SEQ ID NO: 33595 - DNA, 17 bp, Arabidopsis thaliana
agcagatcacaggactt

SEQ ID NO: 33596 - DNA, 17 bp, Arabidopsis thaliana
agcagatcagcagaatt

SEQ ID NO: 33597 - DNA, 17 bp, Arabidopsis thaliana
agcagatcataaccagt

SEQ ID NO: 33598 - DNA, 17 bp, Arabidopsis thaliana
agcagatccagtttggg

SEQ ID NO: 33599 - DNA, 17 bp, Arabidopsis thaliana
agcagatccgagcggag

SEQ ID NO: 33600 - DNA, 17 bp, Arabidopsis thaliana
agcagatccgcaggttt

SEQ ID NO: 33601 - DNA, 17 bp, Arabidopsis thaliana
agcagatccggcgttct

SEQ ID NO: 33602 - DNA, 17 bp, Arabidopsis thaliana
agcagatcctttctaac

SEQ ID NO: 33603 - DNA, 17 bp, Arabidopsis thaliana
agcagatctattcacaa

SEQ ID NO: 33604 - DNA, 17 bp, Arabidopsis thaliana
agcagatctgagcggag

SEQ ID NO: 33605 - DNA, 17 bp, Arabidopsis thaliana
agcagatctgcagattt

SEQ ID NO: 33606 - DNA, 17 bp, Arabidopsis thaliana
agcagatctgcagcttt

SEQ ID NO: 33607 - DNA, 17 bp, Arabidopsis thaliana
agcagatctgcaggtct

SEQ ID NO: 33608 - DNA, 17 bp, Arabidopsis thaliana
agcagatctgcaggttc

SEQ ID NO: 33609 - DNA, 17 bp, Arabidopsis thaliana
agcagatctgcaggttt

SEQ ID NO: 33610 - DNA, 17 bp, Arabidopsis thaliana
agcagatcttgattttg

SEQ ID NO: 33611 - DNA, 17 bp, Arabidopsis thaliana
agcagatcttgctcctt

SEQ ID NO: 33612 - DNA, 17 bp, Arabidopsis thaliana
agcagatgatgattgtc

SEQ ID NO: 33613 - DNA, 17 bp, Arabidopsis thaliana
agcagatggaagtgcct

SEQ ID NO: 33614 - DNA, 17 bp, Arabidopsis thaliana
agcagatgtctaaagtg

SEQ ID NO: 33615 - DNA, 17 bp, Arabidopsis thaliana
agcagatgtgaccgtta

SEQ ID NO: 33616 - DNA, 17 bp, Arabidopsis thaliana
agcagatgtgtctttgt

SEQ ID NO: 33617 - DNA, 17 bp, Arabidopsis thaliana
agcagatgtttaaagtg

SEQ ID NO: 33618 - DNA, 17 bp, Arabidopsis thaliana
agcagattaagcagatc

SEQ ID NO: 33619 - DNA, 17 bp, Arabidopsis thaliana
agcagattaccatcacg

SEQ ID NO: 33620 - DNA, 17 bp, Arabidopsis thaliana
agcagattcagccgctc

SEQ ID NO: 33621 - DNA, 17 bp, Arabidopsis thaliana
agcagattcgcgctatt

SEQ ID NO: 33622 - DNA, 17 bp, Arabidopsis thaliana
agcagattctgtggaga

SEQ ID NO: 33623 - DNA, 17 bp, Arabidopsis thaliana
agcagattgagttggtg

SEQ ID NO: 33624 - DNA, 17 bp, Arabidopsis thaliana
agcagattgccttggcg

SEQ ID NO: 33625 - DNA, 17 bp, Arabidopsis thaliana
agcagattggagaaagc

SEQ ID NO: 33626 - DNA, 17 bp, Arabidopsis thaliana
agcagattggccgaggc

SEQ ID NO: 33627 - DNA, 17 bp, Arabidopsis thaliana
agcagattggtagatcg

SEQ ID NO: 33628 - DNA, 17 bp, Arabidopsis thaliana
agcagatttagccagca

SEQ ID NO: 33629 - DNA, 17 bp, Arabidopsis thaliana
agcagatttctacggta

SEQ ID NO: 33630 - DNA, 17 bp, Arabidopsis thaliana
agcagatttctgactta

SEQ ID NO: 33631 - DNA, 17 bp, Arabidopsis thaliana
agcagcaaaactcttcc

SEQ ID NO: 33632 - DNA, 17 bp, Arabidopsis thaliana
agcagcaaagccgaaag

SEQ ID NO: 33633 - DNA, 17 bp, Arabidopsis thaliana
agcagcaatagtggtct

SEQ ID NO: 33634 - DNA, 17 bp, Arabidopsis thaliana
agcagcaatgtcgatgt

SEQ ID NO: 33635 - DNA, 17 bp, Arabidopsis thaliana
agcagcaccaaccaacg

SEQ ID NO: 33636 - DNA, 17 bp, Arabidopsis thaliana
agcagcagacctcacac

SEQ ID NO: 33637 - DNA, 17 bp, Arabidopsis thaliana
agcagcagatccgagcg

SEQ ID NO: 33638 - DNA, 17 bp, Arabidopsis thaliana
agcagcagccattgtaa

SEQ ID NO: 33639 - DNA, 17 bp, Arabidopsis thaliana
agcagcaggagcctgcg

SEQ ID NO: 33640 - DNA, 17 bp, Arabidopsis thaliana
agcagcaggcagtgcag

SEQ ID NO: 33641 - DNA, 17 bp, Arabidopsis thaliana
agcagcaggcttgtcct

SEQ ID NO: 33642 - DNA, 17 bp, Arabidopsis thaliana
agcagcatgatctttga

SEQ ID NO: 33643 - DNA, 17 bp, Arabidopsis thaliana
agcagcatggtctgtat

SEQ ID NO: 33644 - DNA, 17 bp, Arabidopsis thaliana
agcagcattttaccttg

SEQ ID NO: 33645 - DNA, 17 bp, Arabidopsis thaliana
agcagccaagcgtagga

SEQ ID NO: 33646 - DNA, 17 bp, Arabidopsis thaliana
agcagccacaggttcgc

SEQ ID NO: 33647 - DNA, 17 bp, Arabidopsis thaliana
agcagccactttgtgaa

SEQ ID NO: 33648 - DNA, 17 bp, Arabidopsis thaliana
agcagccagcgacagca

SEQ ID NO: 33649 - DNA, 17 bp, Arabidopsis thaliana
agcagccatactcttca

SEQ ID NO: 33650 - DNA, 17 bp, Arabidopsis thaliana
agcagccattttcttgc

SEQ ID NO: 33651 - DNA, 17 bp, Arabidopsis thaliana
agcagccccttcacggt

SEQ ID NO: 33652 - DNA, 17 bp, Arabidopsis thaliana
agcagccgcactgtttt

SEQ ID NO: 33653 - DNA, 17 bp, Arabidopsis thaliana
agcagccgccgtaactc

SEQ ID NO: 33654 - DNA, 17 bp, Arabidopsis thaliana
agcagccgcggtaattc

SEQ ID NO: 33655 - DNA, 17 bp, Arabidopsis thaliana
agcagccgtcgcgactc

SEQ ID NO: 33656 - DNA, 17 bp, Arabidopsis thaliana
agcagccgtctccacca

SEQ ID NO: 33657 - DNA, 17 bp, Arabidopsis thaliana
agcagccgtgccactat

SEQ ID NO: 33658 - DNA, 17 bp, Arabidopsis thaliana
agcagcctcaggatcct

SEQ ID NO: 33659 - DNA, 17 bp, Arabidopsis thaliana
agcagccttcacaccag

SEQ ID NO: 33660 - DNA, 17 bp, Arabidopsis thaliana
agcagcgccgggcagct

SEQ ID NO: 33661 - DNA, 17 bp, Arabidopsis thaliana
agcagcgcgggtccaag

SEQ ID NO: 33662 - DNA, 17 bp, Arabidopsis thaliana
agcagcggaccatttgc

SEQ ID NO: 33663 - DNA, 17 bp, Arabidopsis thaliana
agcagcggcaaagtact

SEQ ID NO: 33664 - DNA, 17 bp, Arabidopsis thaliana
agcagcggcagaacgac

SEQ ID NO: 33665 - DNA, 17 bp, Arabidopsis thaliana
agcagcggccggcctga

SEQ ID NO: 33666 - DNA, 17 bp, Arabidopsis thaliana
agcagcggctgtgtctg

SEQ ID NO: 33667 - DNA, 17 bp, Arabidopsis thaliana
agcagcggcttcaggag

SEQ ID NO: 33668 - DNA, 17 bp, Arabidopsis thaliana
agcagcgggctgcggtt

SEQ ID NO: 33669 - DNA, 17 bp, Arabidopsis thaliana
agcagcgggtgcgattg

SEQ ID NO: 33670 - DNA, 17 bp, Arabidopsis thaliana
agcagcgtcagaggctt

SEQ ID NO: 33671 - DNA, 17 bp, Arabidopsis thaliana
agcagctcaggattggg

SEQ ID NO: 33672 - DNA, 17 bp, Arabidopsis thaliana
agcagctccggtgccgg

SEQ ID NO: 33673 - DNA, 17 bp, Arabidopsis thaliana
agcagctctgcgctcgg

SEQ ID NO: 33674 - DNA, 17 bp, Arabidopsis thaliana
agcagctctgcgctctg

SEQ ID NO: 33675 - DNA, 17 bp, Arabidopsis thaliana
agcagctgggccattat

SEQ ID NO: 33676 - DNA, 17 bp, Arabidopsis thaliana
agcagctgtcattcgcg

SEQ ID NO: 33677 - DNA, 17 bp, Arabidopsis thaliana
agcagctgtctatttgt

SEQ ID NO: 33678 - DNA, 17 bp, Arabidopsis thaliana
agcagctgtgtaccgca

SEQ ID NO: 33679 - DNA, 17 bp, Arabidopsis thaliana
agcagcttcggagcaac

SEQ ID NO: 33680 - DNA, 17 bp, Arabidopsis thaliana
agcagcttcgtctccct

SEQ ID NO: 33681 - DNA, 17 bp, Arabidopsis thaliana
agcagcttggctttcct

SEQ ID NO: 33682 - DNA, 17 bp, Arabidopsis thaliana
agcaggaaaacatgatg

SEQ ID NO: 33683 - DNA, 17 bp, Arabidopsis thaliana
agcaggaaaacatgatt

SEQ ID NO: 33684 - DNA, 17 bp, Arabidopsis thaliana
agcaggaacagaaattg

SEQ ID NO: 33685 - DNA, 17 bp, Arabidopsis thaliana
agcaggacaatggaaat

SEQ ID NO: 33686 - DNA, 17 bp, Arabidopsis thaliana
agcaggacaatggaaca

SEQ ID NO: 33687 - DNA, 17 bp, Arabidopsis thaliana
agcaggacaatggaact

SEQ ID NO: 33688 - DNA, 17 bp, Arabidopsis thaliana
agcaggaccaacctcct

SEQ ID NO: 33689 - DNA, 17 bp, Arabidopsis thaliana
agcaggacggatttggc

SEQ ID NO: 33690 - DNA, 17 bp, Arabidopsis thaliana
agcaggacggtgattta

SEQ ID NO: 33691 - DNA, 17 bp, Arabidopsis thaliana
agcaggacggtggtcat

SEQ ID NO: 33692 - DNA, 17 bp, Arabidopsis thaliana
agcaggacgttcttcaa

SEQ ID NO: 33693 - DNA, 17 bp, Arabidopsis thaliana
agcaggagccctaccga

SEQ ID NO: 33694 - DNA, 17 bp, Arabidopsis thaliana
agcaggaggagaagcag

SEQ ID NO: 33695 - DNA, 17 bp, Arabidopsis thaliana
agcaggaggatcttggt

SEQ ID NO: 33696 - DNA, 17 bp, Arabidopsis thaliana
agcaggaggcccgcacg

SEQ ID NO: 33697 - DNA, 17 bp, Arabidopsis thaliana
agcaggaggtgcaatcc

SEQ ID NO: 33698 - DNA, 17 bp, Arabidopsis thaliana
agcaggagtcgcaattc

SEQ ID NO: 33699 - DNA, 17 bp, Arabidopsis thaliana
agcaggagttcgagtag

SEQ ID NO: 33700 - DNA, 17 bp, Arabidopsis thaliana
agcaggagttgcgccga

SEQ ID NO: 33701 - DNA, 17 bp, Arabidopsis thaliana
agcaggatcaaacatag

SEQ ID NO: 33702 - DNA, 17 bp, Arabidopsis thaliana
agcaggattcgcatatg

SEQ ID NO: 33703 - DNA, 17 bp, Arabidopsis thaliana
agcaggatttgatgtgt

SEQ ID NO: 33704 - DNA, 17 bp, Arabidopsis thaliana
agcaggcaaggatggag

SEQ ID NO: 33705 - DNA, 17 bp, Arabidopsis thaliana
agcaggcatacgtgaaa

SEQ ID NO: 33706 - DNA, 17 bp, Arabidopsis thaliana
agcaggccagtaagtgt

SEQ ID NO: 33707 - DNA, 17 bp, Arabidopsis thaliana
agcaggctacggttcga

SEQ ID NO: 33708 - DNA, 17 bp, Arabidopsis thaliana
agcaggctatgagccaa

SEQ ID NO: 33709 - DNA, 17 bp, Arabidopsis thaliana
agcaggctgactctgtg

SEQ ID NO: 33710 - DNA, 17 bp, Arabidopsis thaliana
agcaggctgaggtctcg

SEQ ID NO: 33711 - DNA, 17 bp, Arabidopsis thaliana
agcaggctttttgtgat

SEQ ID NO: 33712 - DNA, 17 bp, Arabidopsis thaliana
agcaggctttttgttat

SEQ ID NO: 33713 - DNA, 17 bp, Arabidopsis thaliana
agcagggagaagactgt

SEQ ID NO: 33714 - DNA, 17 bp, Arabidopsis thaliana
agcagggagtgcagcag

SEQ ID NO: 33715 - DNA, 17 bp, Arabidopsis thaliana
agcagggcacgtctgcc

SEQ ID NO: 33716 - DNA, 17 bp, Arabidopsis thaliana
agcagggccaaagaagc

SEQ ID NO: 33717 - DNA, 17 bp, Arabidopsis thaliana
agcagggccattctgtt

SEQ ID NO: 33718 - DNA, 17 bp, Arabidopsis thaliana
agcagggggagattcgg

SEQ ID NO: 33719 - DNA, 17 bp, Arabidopsis thaliana
agcagggggatcactgt

SEQ ID NO: 33720 - DNA, 17 bp, Arabidopsis thaliana
agcagggtctcggtagc

SEQ ID NO: 33721 - DNA, 17 bp, Arabidopsis thaliana
agcaggtacatggcggt

SEQ ID NO: 33722 - DNA, 17 bp, Arabidopsis thaliana
agcaggtacattgcggt

SEQ ID NO: 33723 - DNA, 17 bp, Arabidopsis thaliana
agcaggtatgccacatt

SEQ ID NO: 33724 - DNA, 17 bp, Arabidopsis thaliana
agcaggtcacgtctgcc

SEQ ID NO: 33725 - DNA, 17 bp, Arabidopsis thaliana
agcaggtcagcagactc

SEQ ID NO: 33726 - DNA, 17 bp, Arabidopsis thaliana
agcaggtccgacagaac

SEQ ID NO: 33727 - DNA, 17 bp, Arabidopsis thaliana
agcaggtctacggttcg

SEQ ID NO: 33728 - DNA, 17 bp, Arabidopsis thaliana
agcaggtctcggtttca

SEQ ID NO: 33729 - DNA, 17 bp, Arabidopsis thaliana
agcaggtcttttttggg

SEQ ID NO: 33730 - DNA, 17 bp, Arabidopsis thaliana
agcaggtgacctttgag

SEQ ID NO: 33731 - DNA, 17 bp, Arabidopsis thaliana
agcaggtgctactacag

SEQ ID NO: 33732 - DNA, 17 bp, Arabidopsis thaliana
agcaggtgcttccagct

SEQ ID NO: 33733 - DNA, 17 bp, Arabidopsis thaliana
agcaggtggcgagataa

SEQ ID NO: 33734 - DNA, 17 bp, Arabidopsis thaliana
agcaggtggcgagatag

SEQ ID NO: 33735 - DNA, 17 bp, Arabidopsis thaliana
agcaggtgggacccacg

SEQ ID NO: 33736 - DNA, 17 bp, Arabidopsis thaliana
agcaggtgggtcagcaa

SEQ ID NO: 33737 - DNA, 17 bp, Arabidopsis thaliana
agcaggtgggtttactc

SEQ ID NO: 33738 - DNA, 17 bp, Arabidopsis thaliana
agcaggtgtgtctgtgc

SEQ ID NO: 33739 - DNA, 17 bp, Arabidopsis thaliana
agcaggttagacggttg

SEQ ID NO: 33740 - DNA, 17 bp, Arabidopsis thaliana
agcaggttcacattgtc

SEQ ID NO: 33741 - DNA, 17 bp, Arabidopsis thaliana
agcaggttctttagggc

SEQ ID NO: 33742 - DNA, 17 bp, Arabidopsis thaliana
agcaggttgggttgttc

SEQ ID NO: 33743 - DNA, 17 bp, Arabidopsis thaliana
agcaggtttagttactg

SEQ ID NO: 33744 - DNA, 17 bp, Arabidopsis thaliana
agcaggtttgtctgaag

SEQ ID NO: 33745 - DNA, 17 bp, Arabidopsis thaliana
agcaggttttggactga

SEQ ID NO: 33746 - DNA, 17 bp, Arabidopsis thaliana
agcagtaaatgctcgtg

SEQ ID NO: 33747 - DNA, 17 bp, Arabidopsis thaliana
agcagtaaccacagcaa

SEQ ID NO: 33748 - DNA, 17 bp, Arabidopsis thaliana
agcagtaaccacggcaa

SEQ ID NO: 33749 - DNA, 17 bp, Arabidopsis thaliana
agcagtaaccgatggag

SEQ ID NO: 33750 - DNA, 17 bp, Arabidopsis thaliana
agcagtaatggtggtct

SEQ ID NO: 33751 - DNA, 17 bp, Arabidopsis thaliana
agcagtacatagttagt

SEQ ID NO: 33752 - DNA, 17 bp, Arabidopsis thaliana
agcagtaccaacgagat

SEQ ID NO: 33753 - DNA, 17 bp, Arabidopsis thaliana
agcagtagatagcgcct

SEQ ID NO: 33754 - DNA, 17 bp, Arabidopsis thaliana
agcagtaggtagcgcct

SEQ ID NO: 33755 - DNA, 17 bp, Arabidopsis thaliana
agcagtatcttggtcat

SEQ ID NO: 33756 - DNA, 17 bp, Arabidopsis thaliana
agcagtatgttgtttgg

SEQ ID NO: 33757 - DNA, 17 bp, Arabidopsis thaliana
agcagtatgtttttttg

SEQ ID NO: 33758 - DNA, 17 bp, Arabidopsis thaliana
agcagtattcgaccgta

SEQ ID NO: 33759 - DNA, 17 bp, Arabidopsis thaliana
agcagtcataatgtcgg

SEQ ID NO: 33760 - DNA, 17 bp, Arabidopsis thaliana
agcagtcattctgacgg

SEQ ID NO: 33761 - DNA, 17 bp, Arabidopsis thaliana
agcagtcattctgatgg

SEQ ID NO: 33762 - DNA, 17 bp, Arabidopsis thaliana
agcagtcatttgtctgg

SEQ ID NO: 33763 - DNA, 17 bp, Arabidopsis thaliana
agcagtccattgaaaca

SEQ ID NO: 33764 - DNA, 17 bp, Arabidopsis thaliana
agcagtccgctgacagc

SEQ ID NO: 33765 - DNA, 17 bp, Arabidopsis thaliana
agcagtcggctactatc

SEQ ID NO: 33766 - DNA, 17 bp, Arabidopsis thaliana
agcagtcggctgttaac

SEQ ID NO: 33767 - DNA, 17 bp, Arabidopsis thaliana
agcagtcggcttgtcct

SEQ ID NO: 33768 - DNA, 17 bp, Arabidopsis thaliana
agcagtcttgcgaacat

SEQ ID NO: 33769 - DNA, 17 bp, Arabidopsis thaliana
agcagtgactgcaacca

SEQ ID NO: 33770 - DNA, 17 bp, Arabidopsis thaliana
agcagtgagccactgat

SEQ ID NO: 33771 - DNA, 17 bp, Arabidopsis thaliana
agcagtgatatgtaaat

SEQ ID NO: 33772 - DNA, 17 bp, Arabidopsis thaliana
agcagtggacggatcac

SEQ ID NO: 33773 - DNA, 17 bp, Arabidopsis thaliana
agcagtggcagtggtac

SEQ ID NO: 33774 - DNA, 17 bp, Arabidopsis thaliana
agcagtgggaggagccc

SEQ ID NO: 33775 - DNA, 17 bp, Arabidopsis thaliana
agcagtggggaattttc

SEQ ID NO: 33776 - DNA, 17 bp, Arabidopsis thaliana
agcagtggtgatgggat

SEQ ID NO: 33777 - DNA, 17 bp, Arabidopsis thaliana
agcagtggttgaactgg

SEQ ID NO: 33778 - DNA, 17 bp, Arabidopsis thaliana
agcagtgtctgggcagt

SEQ ID NO: 33779 - DNA, 17 bp, Arabidopsis thaliana
agcagtgttgtggcatt

SEQ ID NO: 33780 - DNA, 17 bp, Arabidopsis thaliana
agcagtgtttggtcggc

SEQ ID NO: 33781 - DNA, 17 bp, Arabidopsis thaliana
agcagttaccgcagttg

SEQ ID NO: 33782 - DNA, 17 bp, Arabidopsis thaliana
agcagttagcgcgtgag

SEQ ID NO: 33783 - DNA, 17 bp, Arabidopsis thaliana
agcagttcagtgcgaac

SEQ ID NO: 33784 - DNA, 17 bp, Arabidopsis thaliana
agcagttccatcaaccc

SEQ ID NO: 33785 - DNA, 17 bp, Arabidopsis thaliana
agcagttccatcaacta

SEQ ID NO: 33786 - DNA, 17 bp, Arabidopsis thaliana
agcagttccggtgccgg

SEQ ID NO: 33787 - DNA, 17 bp, Arabidopsis thaliana
agcagttctacacgact

SEQ ID NO: 33788 - DNA, 17 bp, Arabidopsis thaliana
agcagttcttgagccaa

SEQ ID NO: 33789 - DNA, 17 bp, Arabidopsis thaliana
agcagttgattccacaa

SEQ ID NO: 33790 - DNA, 17 bp, Arabidopsis thaliana
agcagttggctgagttc

SEQ ID NO: 33791 - DNA, 17 bp, Arabidopsis thaliana
agcagttgttgctacgg

SEQ ID NO: 33792 - DNA, 17 bp, Arabidopsis thaliana
agcagtttccaccagtt

SEQ ID NO: 33793 - DNA, 17 bp, Arabidopsis thaliana
agcagtttctttggccg

SEQ ID NO: 33794 - DNA, 17 bp, Arabidopsis thaliana
agcagtttgaaattgga

SEQ ID NO: 33795 - DNA, 17 bp, Arabidopsis thaliana
agcagtttttcgtaatc

SEQ ID NO: 33796 - DNA, 17 bp, Arabidopsis thaliana
agcagtttttttgccca

SEQ ID NO: 33797 - DNA, 17 bp, Arabidopsis thaliana
agcataaaaagtttgta

SEQ ID NO: 33798 - DNA, 17 bp, Arabidopsis thaliana
agcataaattctggact

SEQ ID NO: 33799 - DNA, 17 bp, Arabidopsis thaliana
agcataacagtttgccc

SEQ ID NO: 33800 - DNA, 17 bp, Arabidopsis thaliana
agcataccagtaagtat

SEQ ID NO: 33801 - DNA, 17 bp, Arabidopsis thaliana
agcatacgccgatttga

SEQ ID NO: 33802 - DNA, 17 bp, Arabidopsis thaliana
agcatacgctaaatctc

SEQ ID NO: 33803 - DNA, 17 bp, Arabidopsis thaliana
agcatagaaactcagtc

SEQ ID NO: 33804 - DNA, 17 bp, Arabidopsis thaliana
agcatagattcatgaat

SEQ ID NO: 33805 - DNA, 17 bp, Arabidopsis thaliana
agcatagcttccaacaa

SEQ ID NO: 33806 - DNA, 17 bp, Arabidopsis thaliana
agcataggactgaatga

SEQ ID NO: 33807 - DNA, 17 bp, Arabidopsis thaliana
agcataggccccaatta

SEQ ID NO: 33808 - DNA, 17 bp, Arabidopsis thaliana
agcatagttcgctaacc

SEQ ID NO: 33809 - DNA, 17 bp, Arabidopsis thaliana
agcatagttcgctaatc

SEQ ID NO: 33810 - DNA, 17 bp, Arabidopsis thaliana
agcatagtttgctaact

SEQ ID NO: 33811 - DNA, 17 bp, Arabidopsis thaliana
agcatatcaggatgtgg

SEQ ID NO: 33812 - DNA, 17 bp, Arabidopsis thaliana
agcatatcatgatgtgg

SEQ ID NO: 33813 - DNA, 17 bp, Arabidopsis thaliana
agcatatttgcgacgaa

SEQ ID NO: 33814 - DNA, 17 bp, Arabidopsis thaliana
agcatcaaccactctac

SEQ ID NO: 33815 - DNA, 17 bp, Arabidopsis thaliana
agcatcagagccaccac

SEQ ID NO: 33816 - DNA, 17 bp, Arabidopsis thaliana
agcatcatcaagattct

SEQ ID NO: 33817 - DNA, 17 bp, Arabidopsis thaliana
agcatcgtgccacttgt

SEQ ID NO: 33818 - DNA, 17 bp, Arabidopsis thaliana
agcatctgatcgcttct

SEQ ID NO: 33819 - DNA, 17 bp, Arabidopsis thaliana
agcatgaacttctccac

SEQ ID NO: 33820 - DNA, 17 bp, Arabidopsis thaliana
agcatgaagtcccaagt

SEQ ID NO: 33821 - DNA, 17 bp, Arabidopsis thaliana
agcatgactgccactgg

SEQ ID NO: 33822 - DNA, 17 bp, Arabidopsis thaliana
agcatgccgtcccatcc

SEQ ID NO: 33823 - DNA, 17 bp, Arabidopsis thaliana
agcatgcctgtcgggac

SEQ ID NO: 33824 - DNA, 17 bp, Arabidopsis thaliana
agcatgcggttatccac

SEQ ID NO: 33825 - DNA, 17 bp, Arabidopsis thaliana
agcatgctctcgtgaca

SEQ ID NO: 33826 - DNA, 17 bp, Arabidopsis thaliana
agcatgctggaaaagat

SEQ ID NO: 33827 - DNA, 17 bp, Arabidopsis thaliana
agcatgctttccatcct

SEQ ID NO: 33828 - DNA, 17 bp, Arabidopsis thaliana
agcatggacttgactgc

SEQ ID NO: 33829 - DNA, 17 bp, Arabidopsis thaliana
agcatggattcgagggt

SEQ ID NO: 33830 - DNA, 17 bp, Arabidopsis thaliana
agcatggcagtgggagt

SEQ ID NO: 33831 - DNA, 17 bp, Arabidopsis thaliana
agcatggcccctgcgca

SEQ ID NO: 33832 - DNA, 17 bp, Arabidopsis thaliana
agcatggcggcggcggt

SEQ ID NO: 33833 - DNA, 17 bp, Arabidopsis thaliana
agcatggctagtttgtt

SEQ ID NO: 33834 - DNA, 17 bp, Arabidopsis thaliana
agcatgggataacatca

SEQ ID NO: 33835 - DNA, 17 bp, Arabidopsis thaliana
agcatgggtcggccggt

SEQ ID NO: 33836 - DNA, 17 bp, Arabidopsis thaliana
agcatgtccaatggtgg

SEQ ID NO: 33837 - DNA, 17 bp, Arabidopsis thaliana
agcatgtcgttaagttt

SEQ ID NO: 33838 - DNA, 17 bp, Arabidopsis thaliana
agcatgtctctggtttt

SEQ ID NO: 33839 - DNA, 17 bp, Arabidopsis thaliana
agcatgtgaattctgca

SEQ ID NO: 33840 - DNA, 17 bp, Arabidopsis thaliana
agcatgtgcggtaatct

SEQ ID NO: 33841 - DNA, 17 bp, Arabidopsis thaliana
agcatgtgtcgtctgtc

SEQ ID NO: 33842 - DNA, 17 bp, Arabidopsis thaliana
agcatgtttcactgttc

SEQ ID NO: 33843 - DNA, 17 bp, Arabidopsis thaliana
agcatgtttggatttta

SEQ ID NO: 33844 - DNA, 17 bp, Arabidopsis thaliana
agcattaaatgcctaga

SEQ ID NO: 33845 - DNA, 17 bp, Arabidopsis thaliana
agcattaagccaactat

SEQ ID NO: 33846 - DNA, 17 bp, Arabidopsis thaliana
agcattaagccaacttt

SEQ ID NO: 33847 - DNA, 17 bp, Arabidopsis thaliana
agcattaatgaaccctg

SEQ ID NO: 33848 - DNA, 17 bp, Arabidopsis thaliana
agcattaatgaacctgt

SEQ ID NO: 33849 - DNA, 17 bp, Arabidopsis thaliana
agcattacgggcttcgg

SEQ ID NO: 33850 - DNA, 17 bp, Arabidopsis thaliana
agcattactttgaggaa

SEQ ID NO: 33851 - DNA, 17 bp, Arabidopsis thaliana
agcattatgttcgggta

SEQ ID NO: 33852 - DNA, 17 bp, Arabidopsis thaliana
agcattattgcggtgcg

SEQ ID NO: 33853 - DNA, 17 bp, Arabidopsis thaliana
agcattattgcggtgct

SEQ ID NO: 33854 - DNA, 17 bp, Arabidopsis thaliana
agcattcaagcttttcg

SEQ ID NO: 33855 - DNA, 17 bp, Arabidopsis thaliana
agcattcacctcggcgt

SEQ ID NO: 33856 - DNA, 17 bp, Arabidopsis thaliana
agcattcaggatcaagt

SEQ ID NO: 33857 - DNA, 17 bp, Arabidopsis thaliana
agcattcaggcgatggt

SEQ ID NO: 33858 - DNA, 17 bp, Arabidopsis thaliana
agcattcaggtttgcga

SEQ ID NO: 33859 - DNA, 17 bp, Arabidopsis thaliana
agcattccatagtagcc

SEQ ID NO: 33860 - DNA, 17 bp, Arabidopsis thaliana
agcattccatcgaacac

SEQ ID NO: 33861 - DNA, 17 bp, Arabidopsis thaliana
agcattcccgcacccag

SEQ ID NO: 33862 - DNA, 17 bp, Arabidopsis thaliana
agcattccgccgtcctg

SEQ ID NO: 33863 - DNA, 17 bp, Arabidopsis thaliana
agcattccgggacgcgg

SEQ ID NO: 33864 - DNA, 17 bp, Arabidopsis thaliana
agcattccttttgggtc

SEQ ID NO: 33865 - DNA, 17 bp, Arabidopsis thaliana
agcattcgactaccaac

SEQ ID NO: 33866 - DNA, 17 bp, Arabidopsis thaliana
agcattcgcccaagtgc

SEQ ID NO: 33867 - DNA, 17 bp, Arabidopsis thaliana
agcattctaggtcttga

SEQ ID NO: 33868 - DNA, 17 bp, Arabidopsis thaliana
agcattctatcgattgc

SEQ ID NO: 33869 - DNA, 17 bp, Arabidopsis thaliana
agcattctccactgtgg

SEQ ID NO: 33870 - DNA, 17 bp, Arabidopsis thaliana
agcattctcgattggga

SEQ ID NO: 33871 - DNA, 17 bp, Arabidopsis thaliana
agcattctcttgctttc

SEQ ID NO: 33872 - DNA, 17 bp, Arabidopsis thaliana
agcattctgagggtgca

SEQ ID NO: 33873 - DNA, 17 bp, Arabidopsis thaliana
agcattctgctggaccg

SEQ ID NO: 33874 - DNA, 17 bp, Arabidopsis thaliana
agcattcttggctggat

SEQ ID NO: 33875 - DNA, 17 bp, Arabidopsis thaliana
agcattgaatgcagcgt

SEQ ID NO: 33876 - DNA, 17 bp, Arabidopsis thaliana
agcattgagaggacctt

SEQ ID NO: 33877 - DNA, 17 bp, Arabidopsis thaliana
agcattgagccagtttc

SEQ ID NO: 33878 - DNA, 17 bp, Arabidopsis thaliana
agcattgcgatcgtccc

SEQ ID NO: 33879 - DNA, 17 bp, Arabidopsis thaliana
agcattgcgatggtccc

SEQ ID NO: 33880 - DNA, 17 bp, Arabidopsis thaliana
agcattgctcttaccaa

SEQ ID NO: 33881 - DNA, 17 bp, Arabidopsis thaliana
agcattggacacgggcc

SEQ ID NO: 33882 - DNA, 17 bp, Arabidopsis thaliana
agcattggaccactatg

SEQ ID NO: 33883 - DNA, 17 bp, Arabidopsis thaliana
agcattggccattgcta

SEQ ID NO: 33884 - DNA, 17 bp, Arabidopsis thaliana
agcattggtcagccagg

SEQ ID NO: 33885 - DNA, 17 bp, Arabidopsis thaliana
agcattgtaattgccaa

SEQ ID NO: 33886 - DNA, 17 bp, Arabidopsis thaliana
agcattgtaattgccag

SEQ ID NO: 33887 - DNA, 17 bp, Arabidopsis thaliana
agcattgtaccttggac

SEQ ID NO: 33888 - DNA, 17 bp, Arabidopsis thaliana
agcattgtactaatcac

SEQ ID NO: 33889 - DNA, 17 bp, Arabidopsis thaliana
agcattgtcttttgggt

SEQ ID NO: 33890 - DNA, 17 bp, Arabidopsis thaliana
agcattgtggcttggat

SEQ ID NO: 33891 - DNA, 17 bp, Arabidopsis thaliana
agcattgtggcttggcc

SEQ ID NO: 33892 - DNA, 17 bp, Arabidopsis thaliana
agcattgtgtgcaagac

SEQ ID NO: 33893 - DNA, 17 bp, Arabidopsis thaliana
agcattgtgtgcaatac

SEQ ID NO: 33894 - DNA, 17 bp, Arabidopsis thaliana
agcatttaaggtgtcaa

SEQ ID NO: 33895 - DNA, 17 bp, Arabidopsis thaliana
agcatttaatcgctcac

SEQ ID NO: 33896 - DNA, 17 bp, Arabidopsis thaliana
agcatttacgaatccgg

SEQ ID NO: 33897 - DNA, 17 bp, Arabidopsis thaliana
agcatttactgccacct

SEQ ID NO: 33898 - DNA, 17 bp, Arabidopsis thaliana
agcatttagtcggaaat

SEQ ID NO: 33899 - DNA, 17 bp, Arabidopsis thaliana
agcatttatttgtgtcg

SEQ ID NO: 33900 - DNA, 17 bp, Arabidopsis thaliana
agcatttcagtgtgttt

SEQ ID NO: 33901 - DNA, 17 bp, Arabidopsis thaliana
agcatttcatcgactgg

SEQ ID NO: 33902 - DNA, 17 bp, Arabidopsis thaliana
agcatttccagcaatgg

SEQ ID NO: 33903 - DNA, 17 bp, Arabidopsis thaliana
agcatttccatcgggag

SEQ ID NO: 33904 - DNA, 17 bp, Arabidopsis thaliana
agcatttcctgactcgt

SEQ ID NO: 33905 - DNA, 17 bp, Arabidopsis thaliana
agcatttcctgactgct

SEQ ID NO: 33906 - DNA, 17 bp, Arabidopsis thaliana
agcatttcctgactggt

SEQ ID NO: 33907 - DNA, 17 bp, Arabidopsis thaliana
agcatttccttgggtga

SEQ ID NO: 33908 - DNA, 17 bp, Arabidopsis thaliana
agcatttcggagtgaaa

SEQ ID NO: 33909 - DNA, 17 bp, Arabidopsis thaliana
agcatttcgttcactat

SEQ ID NO: 33910 - DNA, 17 bp, Arabidopsis thaliana
agcatttctaggttttt

SEQ ID NO: 33911 - DNA, 17 bp, Arabidopsis thaliana
agcatttctatcaggag

SEQ ID NO: 33912 - DNA, 17 bp, Arabidopsis thaliana
agcatttctctaggcat

SEQ ID NO: 33913 - DNA, 17 bp, Arabidopsis thaliana
agcatttctctaggcct

SEQ ID NO: 33914 - DNA, 17 bp, Arabidopsis thaliana
agcatttctgactatca

SEQ ID NO: 33915 - DNA, 17 bp, Arabidopsis thaliana
agcatttgaagacgaca

SEQ ID NO: 33916 - DNA, 17 bp, Arabidopsis thaliana
agcatttgagacacttg

SEQ ID NO: 33917 - DNA, 17 bp, Arabidopsis thaliana
agcatttgccaaggatg

SEQ ID NO: 33918 - DNA, 17 bp, Arabidopsis thaliana
agcatttgccaaggatt

SEQ ID NO: 33919 - DNA, 17 bp, Arabidopsis thaliana
agcatttgccaagggtg

SEQ ID NO: 33920 - DNA, 17 bp, Arabidopsis thaliana
agcatttgccatgtgtc

SEQ ID NO: 33921 - DNA, 17 bp, Arabidopsis thaliana
agcatttgcggctgcgg

SEQ ID NO: 33922 - DNA, 17 bp, Arabidopsis thaliana
agcatttgcggttgcgg

SEQ ID NO: 33923 - DNA, 17 bp, Arabidopsis thaliana
agcatttgcggttgggg

SEQ ID NO: 33924 - DNA, 17 bp, Arabidopsis thaliana
agcatttggatcgatca

SEQ ID NO: 33925 - DNA, 17 bp, Arabidopsis thaliana
agcatttgtatccactc

SEQ ID NO: 33926 - DNA, 17 bp, Arabidopsis thaliana
agcatttgtatttgtgt

SEQ ID NO: 33927 - DNA, 17 bp, Arabidopsis thaliana
agcatttgtcctactct

SEQ ID NO: 33928 - DNA, 17 bp, Arabidopsis thaliana
agcatttgtgatcgtgg

SEQ ID NO: 33929 - DNA, 17 bp, Arabidopsis thaliana
agcatttgttctactct

SEQ ID NO: 33930 - DNA, 17 bp, Arabidopsis thaliana
agcattttaccttggac

SEQ ID NO: 33931 - DNA, 17 bp, Arabidopsis thaliana
agcattttattgggtga

SEQ ID NO: 33932 - DNA, 17 bp, Arabidopsis thaliana
agcattttcaggccgat

SEQ ID NO: 33933 - DNA, 17 bp, Arabidopsis thaliana
agcattttccaagaatg

SEQ ID NO: 33934 - DNA, 17 bp, Arabidopsis thaliana
agcattttcgggagctg

SEQ ID NO: 33935 - DNA, 17 bp, Arabidopsis thaliana
agcattttcgtgatttg

SEQ ID NO: 33936 - DNA, 17 bp, Arabidopsis thaliana
agcattttctgacattt

SEQ ID NO: 33937 - DNA, 17 bp, Arabidopsis thaliana
agcattttgaccgactg

SEQ ID NO: 33938 - DNA, 17 bp, Arabidopsis thaliana
agcattttgactatcag

SEQ ID NO: 33939 - DNA, 17 bp, Arabidopsis thaliana
agcattttggggtgttt

SEQ ID NO: 33940 - DNA, 17 bp, Arabidopsis thaliana
agcattttggttcacca

SEQ ID NO: 33941 - DNA, 17 bp, Arabidopsis thaliana
agcattttgtcctctcc

SEQ ID NO: 33942 - DNA, 17 bp, Arabidopsis thaliana
agcattttgtgaaccgc

SEQ ID NO: 33943 - DNA, 17 bp, Arabidopsis thaliana
agccaaaaacaatcgtt

SEQ ID NO: 33944 - DNA, 17 bp, Arabidopsis thaliana
agccaaaaaccctgcga

SEQ ID NO: 33945 - DNA, 17 bp, Arabidopsis thaliana
agccaaaacaaaaggat

SEQ ID NO: 33946 - DNA, 17 bp, Arabidopsis thaliana
agccaaaacgagattgg

SEQ ID NO: 33947 - DNA, 17 bp, Arabidopsis thaliana
agccaaaacgcgtttct

SEQ ID NO: 33948 - DNA, 17 bp, Arabidopsis thaliana
agccaaaactgaggaat

SEQ ID NO: 33949 - DNA, 17 bp, Arabidopsis thaliana
agccaaaactgtttgta

SEQ ID NO: 33950 - DNA, 17 bp, Arabidopsis thaliana
agccaaaactttgcgaa

SEQ ID NO: 33951 - DNA, 17 bp, Arabidopsis thaliana
agccaaaagacagccct

SEQ ID NO: 33952 - DNA, 17 bp, Arabidopsis thaliana
agccaaaatcagaaatc

SEQ ID NO: 33953 - DNA, 17 bp, Arabidopsis thaliana
agccaaaatcggcggct

SEQ ID NO: 33954 - DNA, 17 bp, Arabidopsis thaliana
agccaaacaagggtgtg

SEQ ID NO: 33955 - DNA, 17 bp, Arabidopsis thaliana
agccaaagactcatatg

SEQ ID NO: 33956 - DNA, 17 bp, Arabidopsis thaliana
agccaaagatgacttgc

SEQ ID NO: 33957 - DNA, 17 bp, Arabidopsis thaliana
agccaaagtgccttctc

SEQ ID NO: 33958 - DNA, 17 bp, Arabidopsis thaliana
agccaaagtggctgata

SEQ ID NO: 33959 - DNA, 17 bp, Arabidopsis thaliana
agccaaagttgtgtttc

SEQ ID NO: 33960 - DNA, 17 bp, Arabidopsis thaliana
agccaaatagtgcactt

SEQ ID NO: 33961 - DNA, 17 bp, Arabidopsis thaliana
agccaaatcctggttta

SEQ ID NO: 33962 - DNA, 17 bp, Arabidopsis thaliana
agccaaatgcctcgtca

SEQ ID NO: 33963 - DNA, 17 bp, Arabidopsis thaliana
agccaaatgtaatggac

SEQ ID NO: 33964 - DNA, 17 bp, Arabidopsis thaliana
agccaaattcgcatatg

SEQ ID NO: 33965 - DNA, 17 bp, Arabidopsis thaliana
agccaacagaaagcgca

SEQ ID NO: 33966 - DNA, 17 bp, Arabidopsis thaliana
agccaacccacggagct

SEQ ID NO: 33967 - DNA, 17 bp, Arabidopsis thaliana
agccaacctcgtctttg

SEQ ID NO: 33968 - DNA, 17 bp, Arabidopsis thaliana
agccaacgacacgtgcc

SEQ ID NO: 33969 - DNA, 17 bp, Arabidopsis thaliana
agccaacgatgacttgc

SEQ ID NO: 33970 - DNA, 17 bp, Arabidopsis thaliana
agccaacgctcggttat

SEQ ID NO: 33971 - DNA, 17 bp, Arabidopsis thaliana
agccaacggtatttggt

SEQ ID NO: 33972 - DNA, 17 bp, Arabidopsis thaliana
agccaacgtcgatcttg

SEQ ID NO: 33973 - DNA, 17 bp, Arabidopsis thaliana
agccaactaagcacatt

SEQ ID NO: 33974 - DNA, 17 bp, Arabidopsis thaliana
agccaactaccctcctt

SEQ ID NO: 33975 - DNA, 17 bp, Arabidopsis thaliana
agccaactgcgcgcact

SEQ ID NO: 33976 - DNA, 17 bp, Arabidopsis thaliana
agccaactggtgtaagt

SEQ ID NO: 33977 - DNA, 17 bp, Arabidopsis thaliana
agccaacttgtatcgtc

SEQ ID NO: 33978 - DNA, 17 bp, Arabidopsis thaliana
agccaactttcttcgta

SEQ ID NO: 33979 - DNA, 17 bp, Arabidopsis thaliana
agccaactttgagttac

SEQ ID NO: 33980 - DNA, 17 bp, Arabidopsis thaliana
agccaagaagtcgactg

SEQ ID NO: 33981 - DNA, 17 bp, Arabidopsis thaliana
agccaagaatgacttgc

SEQ ID NO: 33982 - DNA, 17 bp, Arabidopsis thaliana
agccaagaccaagatcc

SEQ ID NO: 33983 - DNA, 17 bp, Arabidopsis thaliana
agccaagataggatgat

SEQ ID NO: 33984 - DNA, 17 bp, Arabidopsis thaliana
agccaagcaggagtcac

SEQ ID NO: 33985 - DNA, 17 bp, Arabidopsis thaliana
agccaagccaagtagtg

SEQ ID NO: 33986 - DNA, 17 bp, Arabidopsis thaliana
agccaagcgttcatagc

SEQ ID NO: 33987 - DNA, 17 bp, Arabidopsis thaliana
agccaagctggagtcaa

SEQ ID NO: 33988 - DNA, 17 bp, Arabidopsis thaliana
agccaagcttcgctaag

SEQ ID NO: 33989 - DNA, 17 bp, Arabidopsis thaliana
agccaagcttctttaca

SEQ ID NO: 33990 - DNA, 17 bp, Arabidopsis thaliana
agccaaggaccgtcatt

SEQ ID NO: 33991 - DNA, 17 bp, Arabidopsis thaliana
agccaaggacgacttgc

SEQ ID NO: 33992 - DNA, 17 bp, Arabidopsis thaliana
agccaaggagccgcaaa

SEQ ID NO: 33993 - DNA, 17 bp, Arabidopsis thaliana
agccaaggatgaattac

SEQ ID NO: 33994 - DNA, 17 bp, Arabidopsis thaliana
agccaaggatgaattga

SEQ ID NO: 33995 - DNA, 17 bp, Arabidopsis thaliana
agccaaggatgaattgc

SEQ ID NO: 33996 - DNA, 17 bp, Arabidopsis thaliana
agccaaggatgactccc

SEQ ID NO: 33997 - DNA, 17 bp, Arabidopsis thaliana
agccaaggatgactcgc

SEQ ID NO: 33998 - DNA, 17 bp, Arabidopsis thaliana
agccaaggatgactgcc

SEQ ID NO: 33999 - DNA, 17 bp, Arabidopsis thaliana
agccaaggatgactggc

SEQ ID NO: 34000 - DNA, 17 bp, Arabidopsis thaliana
agccaaggatgacttac

SEQ ID NO: 34001 - DNA, 17 bp, Arabidopsis thaliana
agccaaggatgacttcc

SEQ ID NO: 34002 - DNA, 17 bp, Arabidopsis thaliana
agccaaggatgacttga

SEQ ID NO: 34003 - DNA, 17 bp, Arabidopsis thaliana
agccaaggatgacttgc

SEQ ID NO: 34004 - DNA, 17 bp, Arabidopsis thaliana
agccaaggatgacttgt

SEQ ID NO: 34005 - DNA, 17 bp, Arabidopsis thaliana
agccaaggatgactttc

SEQ ID NO: 34006 - DNA, 17 bp, Arabidopsis thaliana
agccaaggatgatggat

SEQ ID NO: 34007 - DNA, 17 bp, Arabidopsis thaliana
agccaaggatggtggat

SEQ ID NO: 34008 - DNA, 17 bp, Arabidopsis thaliana
agccaaggattacttgc

SEQ ID NO: 34009 - DNA, 17 bp, Arabidopsis thaliana
agccaaggattgaagga

SEQ ID NO: 34010 - DNA, 17 bp, Arabidopsis thaliana
agccaaggattgaaggg

SEQ ID NO: 34011 - DNA, 17 bp, Arabidopsis thaliana
agccaaggcctgttacg

SEQ ID NO: 34012 - DNA, 17 bp, Arabidopsis thaliana
agccaaggctgacttgc

SEQ ID NO: 34013 - DNA, 17 bp, Arabidopsis thaliana
agccaagggtgacttgc

SEQ ID NO: 34014 - DNA, 17 bp, Arabidopsis thaliana
agccaagggtgtgaacg

SEQ ID NO: 34015 - DNA, 17 bp, Arabidopsis thaliana
agccaagtatgacttgc

SEQ ID NO: 34016 - DNA, 17 bp, Arabidopsis thaliana
agccaagtcagcacagg

SEQ ID NO: 34017 - DNA, 17 bp, Arabidopsis thaliana
agccaagtcggcgcacg

SEQ ID NO: 34018 - DNA, 17 bp, Arabidopsis thaliana
agccaagtgaatggata

SEQ ID NO: 34019 - DNA, 17 bp, Arabidopsis thaliana
agccaagtggactgcct

SEQ ID NO: 34020 - DNA, 17 bp, Arabidopsis thaliana
agccaagtttgagcacg

SEQ ID NO: 34021 - DNA, 17 bp, Arabidopsis thaliana
agccaagtttggcctaa

SEQ ID NO: 34022 - DNA, 17 bp, Arabidopsis thaliana
agccaatacgggtgcac

SEQ ID NO: 34023 - DNA, 17 bp, Arabidopsis thaliana
agccaatatgcttcttt

SEQ ID NO: 34024 - DNA, 17 bp, Arabidopsis thaliana
agccaatcccagggaac

SEQ ID NO: 34025 - DNA, 17 bp, Arabidopsis thaliana
agccaatcctgaggaat

SEQ ID NO: 34026 - DNA, 17 bp, Arabidopsis thaliana
agccaatgatgacttgc

SEQ ID NO: 34027 - DNA, 17 bp, Arabidopsis thaliana
agccaatgtaggcatgt

SEQ ID NO: 34028 - DNA, 17 bp, Arabidopsis thaliana
agccaatgttcgagtac

SEQ ID NO: 34029 - DNA, 17 bp, Arabidopsis thaliana
agccaattgaggaatgt

SEQ ID NO: 34030 - DNA, 17 bp, Arabidopsis thaliana
agccaattgcggaggcg

SEQ ID NO: 34031 - DNA, 17 bp, Arabidopsis thaliana
agccaattgcggaggtg

SEQ ID NO: 34032 - DNA, 17 bp, Arabidopsis thaliana
agccaattgctgacctg

SEQ ID NO: 34033 - DNA, 17 bp, Arabidopsis thaliana
agccaattgtggatgtg

SEQ ID NO: 34034 - DNA, 17 bp, Arabidopsis thaliana
agccaatttacttgtgt

SEQ ID NO: 34035 - DNA, 17 bp, Arabidopsis thaliana
agccaatttctcaagtc

SEQ ID NO: 34036 - DNA, 17 bp, Arabidopsis thaliana
agccacaagattagttg

SEQ ID NO: 34037 - DNA, 17 bp, Arabidopsis thaliana
agccacaaggatgttct

SEQ ID NO: 34038 - DNA, 17 bp, Arabidopsis thaliana
agccacaaggatgtttt

SEQ ID NO: 34039 - DNA, 17 bp, Arabidopsis thaliana
agccacaagtagttttg

SEQ ID NO: 34040 - DNA, 17 bp, Arabidopsis thaliana
agccacactgggactga

SEQ ID NO: 34041 - DNA, 17 bp, Arabidopsis thaliana
agccacacttgctggta

SEQ ID NO: 34042 - DNA, 17 bp, Arabidopsis thaliana
agccacagatcgagtca

SEQ ID NO: 34043 - DNA, 17 bp, Arabidopsis thaliana
agccacaggcgcgtcag

SEQ ID NO: 34044 - DNA, 17 bp, Arabidopsis thaliana
agccacagtgtctctcc

SEQ ID NO: 34045 - DNA, 17 bp, Arabidopsis thaliana
agccacataggtgtgaa

SEQ ID NO: 34046 - DNA, 17 bp, Arabidopsis thaliana
agccaccaaacgaacat

SEQ ID NO: 34047 - DNA, 17 bp, Arabidopsis thaliana
agccaccatccactagt

SEQ ID NO: 34048 - DNA, 17 bp, Arabidopsis thaliana
agccaccatttgtgttt

SEQ ID NO: 34049 - DNA, 17 bp, Arabidopsis thaliana
agccacccatttctgct

SEQ ID NO: 34050 - DNA, 17 bp, Arabidopsis thaliana
agccaccgaggtttaag

SEQ ID NO: 34051 - DNA, 17 bp, Arabidopsis thaliana
agccaccgagtgttact

SEQ ID NO: 34052 - DNA, 17 bp, Arabidopsis thaliana
agccaccgcacgtcgcg

SEQ ID NO: 34053 - DNA, 17 bp, Arabidopsis thaliana
agccaccgtcgatccgt

SEQ ID NO: 34054 - DNA, 17 bp, Arabidopsis thaliana
agccacctacccgacta

SEQ ID NO: 34055 - DNA, 17 bp, Arabidopsis thaliana
agccacgactgtcatgt

SEQ ID NO: 34056 - DNA, 17 bp, Arabidopsis thaliana
agccacgcgacaaaaag

SEQ ID NO: 34057 - DNA, 17 bp, Arabidopsis thaliana
agccacgcttgatgatg

SEQ ID NO: 34058 - DNA, 17 bp, Arabidopsis thaliana
agccacggaattgagat

SEQ ID NO: 34059 - DNA, 17 bp, Arabidopsis thaliana
agccacggcctgccgct

SEQ ID NO: 34060 - DNA, 17 bp, Arabidopsis thaliana
agccacgggcggcggag

SEQ ID NO: 34061 - DNA, 17 bp, Arabidopsis thaliana
agccacgtcagatgata

SEQ ID NO: 34062 - DNA, 17 bp, Arabidopsis thaliana
agccacgtcagcgcacc

SEQ ID NO: 34063 - DNA, 17 bp, Arabidopsis thaliana
agccacgtctgcctggg

SEQ ID NO: 34064 - DNA, 17 bp, Arabidopsis thaliana
agccacgtctgtcaggt

SEQ ID NO: 34065 - DNA, 17 bp, Arabidopsis thaliana
agccacgttggatctcc

SEQ ID NO: 34066 - DNA, 17 bp, Arabidopsis thaliana
agccactaagtgactcg

SEQ ID NO: 34067 - DNA, 17 bp, Arabidopsis thaliana
agccactaataccagat

SEQ ID NO: 34068 - DNA, 17 bp, Arabidopsis thaliana
agccactactgtgtgaa

SEQ ID NO: 34069 - DNA, 17 bp, Arabidopsis thaliana
agccactagcctgcttt

SEQ ID NO: 34070 - DNA, 17 bp, Arabidopsis thaliana
agccactattttgtagc

SEQ ID NO: 34071 - DNA, 17 bp, Arabidopsis thaliana
agccactcgatcatcat

SEQ ID NO: 34072 - DNA, 17 bp, Arabidopsis thaliana
agccactgcaggagcta

SEQ ID NO: 34073 - DNA, 17 bp, Arabidopsis thaliana
agccactgctctatctg

SEQ ID NO: 34074 - DNA, 17 bp, Arabidopsis thaliana
agccactggaagctgtt

SEQ ID NO: 34075 - DNA, 17 bp, Arabidopsis thaliana
agccactgtgtcaatcc

SEQ ID NO: 34076 - DNA, 17 bp, Arabidopsis thaliana
agccactgtgtgaataa

SEQ ID NO: 34077 - DNA, 17 bp, Arabidopsis thaliana
agccactgtgtgaatac

SEQ ID NO: 34078 - DNA, 17 bp, Arabidopsis thaliana
agccacttctgccgcga

SEQ ID NO: 34079 - DNA, 17 bp, Arabidopsis thaliana
agccacttgtcagggat

SEQ ID NO: 34080 - DNA, 17 bp, Arabidopsis thaliana
agccactttggctcaaa

SEQ ID NO: 34081 - DNA, 17 bp, Arabidopsis thaliana
agccactttggctcaag

SEQ ID NO: 34082 - DNA, 17 bp, Arabidopsis thaliana
agccactttgtgaaata

SEQ ID NO: 34083 - DNA, 17 bp, Arabidopsis thaliana
agccactttgtgaatta

SEQ ID NO: 34084 - DNA, 17 bp, Arabidopsis thaliana
agccagaagatcataga

SEQ ID NO: 34085 - DNA, 17 bp, Arabidopsis thaliana
agccagaagcccggtta

SEQ ID NO: 34086 - DNA, 17 bp, Arabidopsis thaliana
agccagaccataacaaa

SEQ ID NO: 34087 - DNA, 17 bp, Arabidopsis thaliana
agccagaccctaaagct

SEQ ID NO: 34088 - DNA, 17 bp, Arabidopsis thaliana
agccagacgcaagcaga

SEQ ID NO: 34089 - DNA, 17 bp, Arabidopsis thaliana
agccagacggacttgag

SEQ ID NO: 34090 - DNA, 17 bp, Arabidopsis thaliana
agccagacgttacggct

SEQ ID NO: 34091 - DNA, 17 bp, Arabidopsis thaliana
agccagactggttgcca

SEQ ID NO: 34092 - DNA, 17 bp, Arabidopsis thaliana
agccagactgtggccga

SEQ ID NO: 34093 - DNA, 17 bp, Arabidopsis thaliana
agccagagagtccatcc

SEQ ID NO: 34094 - DNA, 17 bp, Arabidopsis thaliana
agccagagcgtttttga

SEQ ID NO: 34095 - DNA, 17 bp, Arabidopsis thaliana
agccagagctttgcttg

SEQ ID NO: 34096 - DNA, 17 bp, Arabidopsis thaliana
agccagaggacgatgaa

SEQ ID NO: 34097 - DNA, 17 bp, Arabidopsis thaliana
agccagagtcgtagatc

SEQ ID NO: 34098 - DNA, 17 bp, Arabidopsis thaliana
agccagatcagccgata

SEQ ID NO: 34099 - DNA, 17 bp, Arabidopsis thaliana
agccagatccaatgtgc

SEQ ID NO: 34100 - DNA, 17 bp, Arabidopsis thaliana
agccagatgattcattt

SEQ ID NO: 34101 - DNA, 17 bp, Arabidopsis thaliana
agccagatttctctgac

SEQ ID NO: 34102 - DNA, 17 bp, Arabidopsis thaliana
agccagcaaagtttcgt

SEQ ID NO: 34103 - DNA, 17 bp, Arabidopsis thaliana
agccagcaaccggatct

SEQ ID NO: 34104 - DNA, 17 bp, Arabidopsis thaliana
agccagcaactcactca

SEQ ID NO: 34105 - DNA, 17 bp, Arabidopsis thaliana
agccagcagaagacacg

SEQ ID NO: 34106 - DNA, 17 bp, Arabidopsis thaliana
agccagcagaagcatgt

SEQ ID NO: 34107 - DNA, 17 bp, Arabidopsis thaliana
agccagcagatccgagc

SEQ ID NO: 34108 - DNA, 17 bp, Arabidopsis thaliana
agccagcagatctgcag

SEQ ID NO: 34109 - DNA, 17 bp, Arabidopsis thaliana
agccagcagattggtag

SEQ ID NO: 34110 - DNA, 17 bp, Arabidopsis thaliana
agccagcagtgatgagc

SEQ ID NO: 34111 - DNA, 17 bp, Arabidopsis thaliana
agccagcatggcccctg

SEQ ID NO: 34112 - DNA, 17 bp, Arabidopsis thaliana
agccagcatttgccaag

SEQ ID NO: 34113 - DNA, 17 bp, Arabidopsis thaliana
agccagccaaaagacag

SEQ ID NO: 34114 - DNA, 17 bp, Arabidopsis thaliana
agccagccaaagtgcct

SEQ ID NO: 34115 - DNA, 17 bp, Arabidopsis thaliana
agccagccaaggatgac

SEQ ID NO: 34116 - DNA, 17 bp, Arabidopsis thaliana
agccagccagactggtt

SEQ ID NO: 34117 - DNA, 17 bp, Arabidopsis thaliana
agccagccagcgatttg

SEQ ID NO: 34118 - DNA, 17 bp, Arabidopsis thaliana
agccagccaggttgcag

SEQ ID NO: 34119 - DNA, 17 bp, Arabidopsis thaliana
agccagccagtggcagc

SEQ ID NO: 34120 - DNA, 17 bp, Arabidopsis thaliana
agccagccagtggcgcg

SEQ ID NO: 34121 - DNA, 17 bp, Arabidopsis thaliana
agccagccattgtgaat

SEQ ID NO: 34122 - DNA, 17 bp, Arabidopsis thaliana
agccagcccaaatcacg

SEQ ID NO: 34123 - DNA, 17 bp, Arabidopsis thaliana
agccagcccatgggccg

SEQ ID NO: 34124 - DNA, 17 bp, Arabidopsis thaliana
agccagcccattggtgt

SEQ ID NO: 34125 - DNA, 17 bp, Arabidopsis thaliana
agccagccccgtcgtgc

SEQ ID NO: 34126 - DNA, 17 bp, Arabidopsis thaliana
agccagcccgaggagtc

SEQ ID NO: 34127 - DNA, 17 bp, Arabidopsis thaliana
agccagcccgctttgac

SEQ ID NO: 34128 - DNA, 17 bp, Arabidopsis thaliana
agccagcccgtaatccc

SEQ ID NO: 34129 - DNA, 17 bp, Arabidopsis thaliana
agccagcccgtctatat

SEQ ID NO: 34130 - DNA, 17 bp, Arabidopsis thaliana
agccagccctaagtgag

SEQ ID NO: 34131 - DNA, 17 bp, Arabidopsis thaliana
agccagccctgggctct

SEQ ID NO: 34132 - DNA, 17 bp, Arabidopsis thaliana
agccagccctttgtccc

SEQ ID NO: 34133 - DNA, 17 bp, Arabidopsis thaliana
agccagccctttgtcgc

SEQ ID NO: 34134 - DNA, 17 bp, Arabidopsis thaliana
agccagccgacaagtac

SEQ ID NO: 34135 - DNA, 17 bp, Arabidopsis thaliana
agccagccgaccgtgta

SEQ ID NO: 34136 - DNA, 17 bp, Arabidopsis thaliana
agccagccgattctaag

SEQ ID NO: 34137 - DNA, 17 bp, Arabidopsis thaliana
agccagccgcttcctgc

SEQ ID NO: 34138 - DNA, 17 bp, Arabidopsis thaliana
agccagccggcggtgca

SEQ ID NO: 34139 - DNA, 17 bp, Arabidopsis thaliana
agccagccggttagaac

SEQ ID NO: 34140 - DNA, 17 bp, Arabidopsis thaliana
agccagccggttgcggt

SEQ ID NO: 34141 - DNA, 17 bp, Arabidopsis thaliana
agccagccgtccatttt

SEQ ID NO: 34142 - DNA, 17 bp, Arabidopsis thaliana
agccagccgtgacatga

SEQ ID NO: 34143 - DNA, 17 bp, Arabidopsis thaliana
agccagcctaagcgccc

SEQ ID NO: 34144 - DNA, 17 bp, Arabidopsis thaliana
agccagcctaccctccg

SEQ ID NO: 34145 - DNA, 17 bp, Arabidopsis thaliana
agccagcctcttcctga

SEQ ID NO: 34146 - DNA, 17 bp, Arabidopsis thaliana
agccagcctgaaaataa

SEQ ID NO: 34147 - DNA, 17 bp, Arabidopsis thaliana
agccagcctgggctcta

SEQ ID NO: 34148 - DNA, 17 bp, Arabidopsis thaliana
agccagccttagccctg

SEQ ID NO: 34149 - DNA, 17 bp, Arabidopsis thaliana
agccagccttcttgggt

SEQ ID NO: 34150 - DNA, 17 bp, Arabidopsis thaliana
agccagccttggaaatg

SEQ ID NO: 34151 - DNA, 17 bp, Arabidopsis thaliana
agccagcctttaagatc

SEQ ID NO: 34152 - DNA, 17 bp, Arabidopsis thaliana
agccagcctttctgact

SEQ ID NO: 34153 - DNA, 17 bp, Arabidopsis thaliana
agccagcgaaaaccgca

SEQ ID NO: 34154 - DNA, 17 bp, Arabidopsis thaliana
agccagcgacagcgaca

SEQ ID NO: 34155 - DNA, 17 bp, Arabidopsis thaliana
agccagcgacagtcgcc

SEQ ID NO: 34156 - DNA, 17 bp, Arabidopsis thaliana
agccagcgacagttgcc

SEQ ID NO: 34157 - DNA, 17 bp, Arabidopsis thaliana
agccagcgacgttgctt

SEQ ID NO: 34158 - DNA, 17 bp, Arabidopsis thaliana
agccagcgacttctcct

SEQ ID NO: 34159 - DNA, 17 bp, Arabidopsis thaliana
agccagcgagacattcg

SEQ ID NO: 34160 - DNA, 17 bp, Arabidopsis thaliana
agccagcgattagtcga

SEQ ID NO: 34161 - DNA, 17 bp, Arabidopsis thaliana
agccagcgattgtcgct

SEQ ID NO: 34162 - DNA, 17 bp, Arabidopsis thaliana
agccagcgcacgtctgc

SEQ ID NO: 34163 - DNA, 17 bp, Arabidopsis thaliana
agccagcgcactcagcg

SEQ ID NO: 34164 - DNA, 17 bp, Arabidopsis thaliana
agccagcgcagtgcgga

SEQ ID NO: 34165 - DNA, 17 bp, Arabidopsis thaliana
agccagcggaaccagta

SEQ ID NO: 34166 - DNA, 17 bp, Arabidopsis thaliana
agccagcggatgttgct

SEQ ID NO: 34167 - DNA, 17 bp, Arabidopsis thaliana
agccagcggcgggtaga

SEQ ID NO: 34168 - DNA, 17 bp, Arabidopsis thaliana
agccagcgggaaaatta

SEQ ID NO: 34169 - DNA, 17 bp, Arabidopsis thaliana
agccagcgggaagtcct

SEQ ID NO: 34170 - DNA, 17 bp, Arabidopsis thaliana
agccagcggttgcaagt

SEQ ID NO: 34171 - DNA, 17 bp, Arabidopsis thaliana
agccagcgtaaaaaaat

SEQ ID NO: 34172 - DNA, 17 bp, Arabidopsis thaliana
agccagcgtcatttgaa

SEQ ID NO: 34173 - DNA, 17 bp, Arabidopsis thaliana
agccagcgtcctcagcg

SEQ ID NO: 34174 - DNA, 17 bp, Arabidopsis thaliana
agccagcgtctatgaga

SEQ ID NO: 34175 - DNA, 17 bp, Arabidopsis thaliana
agccagcgtctgtaggt

SEQ ID NO: 34176 - DNA, 17 bp, Arabidopsis thaliana
agccagcgtggaagcac

SEQ ID NO: 34177 - DNA, 17 bp, Arabidopsis thaliana
agccagcgttcgaaccg

SEQ ID NO: 34178 - DNA, 17 bp, Arabidopsis thaliana
agccagcgtttaggact

SEQ ID NO: 34179 - DNA, 17 bp, Arabidopsis thaliana
agccagctacacagcat

SEQ ID NO: 34180 - DNA, 17 bp, Arabidopsis thaliana
agccagctagttttgca

SEQ ID NO: 34181 - DNA, 17 bp, Arabidopsis thaliana
agccagctattgacacg

SEQ ID NO: 34182 - DNA, 17 bp, Arabidopsis thaliana
agccagctatttcttgg

SEQ ID NO: 34183 - DNA, 17 bp, Arabidopsis thaliana
agccagctcaacggtga

SEQ ID NO: 34184 - DNA, 17 bp, Arabidopsis thaliana
agccagctcaggaggga

SEQ ID NO: 34185 - DNA, 17 bp, Arabidopsis thaliana
agccagctccagttaac

SEQ ID NO: 34186 - DNA, 17 bp, Arabidopsis thaliana
agccagctccgagtctg

SEQ ID NO: 34187 - DNA, 17 bp, Arabidopsis thaliana
agccagctcctgttgca

SEQ ID NO: 34188 - DNA, 17 bp, Arabidopsis thaliana
agccagctcgcgttgac

SEQ ID NO: 34189 - DNA, 17 bp, Arabidopsis thaliana
agccagctcgtccactt

SEQ ID NO: 34190 - DNA, 17 bp, Arabidopsis thaliana
agccagctctgatacca

SEQ ID NO: 34191 - DNA, 17 bp, Arabidopsis thaliana
agccagctcttaggttc

SEQ ID NO: 34192 - DNA, 17 bp, Arabidopsis thaliana
agccagctgagactgtt

SEQ ID NO: 34193 - DNA, 17 bp, Arabidopsis thaliana
agccagctgattcacgg

SEQ ID NO: 34194 - DNA, 17 bp, Arabidopsis thaliana
agccagctgattggcgg

SEQ ID NO: 34195 - DNA, 17 bp, Arabidopsis thaliana
agccagctggagtttcc

SEQ ID NO: 34196 - DNA, 17 bp, Arabidopsis thaliana
agccagctgtccacgtg

SEQ ID NO: 34197 - DNA, 17 bp, Arabidopsis thaliana
agccagcttagagatcg

SEQ ID NO: 34198 - DNA, 17 bp, Arabidopsis thaliana
agccagcttatgttctc

SEQ ID NO: 34199 - DNA, 17 bp, Arabidopsis thaliana
agccagcttcgatgtga

SEQ ID NO: 34200 - DNA, 17 bp, Arabidopsis thaliana
agccagcttctaatatc

SEQ ID NO: 34201 - DNA, 17 bp, Arabidopsis thaliana
agccagcttgactctag

SEQ ID NO: 34202 - DNA, 17 bp, Arabidopsis thaliana
agccagcttgctgttgt

SEQ ID NO: 34203 - DNA, 17 bp, Arabidopsis thaliana
agccagcttgtgtgacc

SEQ ID NO: 34204 - DNA, 17 bp, Arabidopsis thaliana
agccagctttcatggtg

SEQ ID NO: 34205 - DNA, 17 bp, Arabidopsis thaliana
agccagctttccaagat

SEQ ID NO: 34206 - DNA, 17 bp, Arabidopsis thaliana
agccagctttcgaggaa

SEQ ID NO: 34207 - DNA, 17 bp, Arabidopsis thaliana
agccagctttgatcgat

SEQ ID NO: 34208 - DNA, 17 bp, Arabidopsis thaliana
agccagctttggtgtgt

SEQ ID NO: 34209 - DNA, 17 bp, Arabidopsis thaliana
agccagcttttaggcgt

SEQ ID NO: 34210 - DNA, 17 bp, Arabidopsis thaliana
agccagctttttgctca

SEQ ID NO: 34211 - DNA, 17 bp, Arabidopsis thaliana
agccagcttttttggct

SEQ ID NO: 34212 - DNA, 17 bp, Arabidopsis thaliana
agccaggaagtgtaatt

SEQ ID NO: 34213 - DNA, 17 bp, Arabidopsis thaliana
agccaggacctgtgatt

SEQ ID NO: 34214 - DNA, 17 bp, Arabidopsis thaliana
agccaggagtggagcct

SEQ ID NO: 34215 - DNA, 17 bp, Arabidopsis thaliana
agccaggatcgaactct

SEQ ID NO: 34216 - DNA, 17 bp, Arabidopsis thaliana
agccaggatcttggtgg

SEQ ID NO: 34217 - DNA, 17 bp, Arabidopsis thaliana
agccaggatgacttgcc

SEQ ID NO: 34218 - DNA, 17 bp, Arabidopsis thaliana
agccaggctatctcgcc

SEQ ID NO: 34219 - DNA, 17 bp, Arabidopsis thaliana
agccagggatcctgcca

SEQ ID NO: 34220 - DNA, 17 bp, Arabidopsis thaliana
agccagggcggcgagag

SEQ ID NO: 34221 - DNA, 17 bp, Arabidopsis thaliana
agccaggtggctcgggc

SEQ ID NO: 34222 - DNA, 17 bp, Arabidopsis thaliana
agccaggttcgacattc

SEQ ID NO: 34223 - DNA, 17 bp, Arabidopsis thaliana
agccaggttgcaaatta

SEQ ID NO: 34224 - DNA, 17 bp, Arabidopsis thaliana
agccaggttgcagtgat

SEQ ID NO: 34225 - DNA, 17 bp, Arabidopsis thaliana
agccaggtttcgatctt

SEQ ID NO: 34226 - DNA, 17 bp, Arabidopsis thaliana
agccagtaagtgactcg

SEQ ID NO: 34227 - DNA, 17 bp, Arabidopsis thaliana
agccagtccgcctttca

SEQ ID NO: 34228 - DNA, 17 bp, Arabidopsis thaliana
agccagtgacagccatt

SEQ ID NO: 34229 - DNA, 17 bp, Arabidopsis thaliana
agccagtgatgattaga

SEQ ID NO: 34230 - DNA, 17 bp, Arabidopsis thaliana
agccagtggcagccatt

SEQ ID NO: 34231 - DNA, 17 bp, Arabidopsis thaliana
agccagtggcgcgaagc

SEQ ID NO: 34232 - DNA, 17 bp, Arabidopsis thaliana
agccagtggcgcgaagt

SEQ ID NO: 34233 - DNA, 17 bp, Arabidopsis thaliana
agccagtggcgcgaatc

SEQ ID NO: 34234 - DNA, 17 bp, Arabidopsis thaliana
agccagtgttctaccag

SEQ ID NO: 34235 - DNA, 17 bp, Arabidopsis thaliana
agccagttgatgtcgga

SEQ ID NO: 34236 - DNA, 17 bp, Arabidopsis thaliana
agccagtttagacttcc

SEQ ID NO: 34237 - DNA, 17 bp, Arabidopsis thaliana
agccataactagcagtc

SEQ ID NO: 34238 - DNA, 17 bp, Arabidopsis thaliana
agccatacagcctctgc

SEQ ID NO: 34239 - DNA, 17 bp, Arabidopsis thaliana
agccatagccagtgacg

SEQ ID NO: 34240 - DNA, 17 bp, Arabidopsis thaliana
agccatagtggctaaga

SEQ ID NO: 34241 - DNA, 17 bp, Arabidopsis thaliana
agccatatactatctgc

SEQ ID NO: 34242 - DNA, 17 bp, Arabidopsis thaliana
agccatcaaaaggcgcg

SEQ ID NO: 34243 - DNA, 17 bp, Arabidopsis thaliana
agccatcaagcgagacc

SEQ ID NO: 34244 - DNA, 17 bp, Arabidopsis thaliana
agccatcaggaccaggg

SEQ ID NO: 34245 - DNA, 17 bp, Arabidopsis thaliana
agccatcatctcgaggg

SEQ ID NO: 34246 - DNA, 17 bp, Arabidopsis thaliana
agccatccatgtttggg

SEQ ID NO: 34247 - DNA, 17 bp, Arabidopsis thaliana
agccatcctaacaccgg

SEQ ID NO: 34248 - DNA, 17 bp, Arabidopsis thaliana
agccatcgaacaccttt

SEQ ID NO: 34249 - DNA, 17 bp, Arabidopsis thaliana
agccatcttagagacta

SEQ ID NO: 34250 - DNA, 17 bp, Arabidopsis thaliana
agccatgaacctatcat

SEQ ID NO: 34251 - DNA, 17 bp, Arabidopsis thaliana
agccatgaagttctctt

SEQ ID NO: 34252 - DNA, 17 bp, Arabidopsis thaliana
agccatgagcctatcat

SEQ ID NO: 34253 - DNA, 17 bp, Arabidopsis thaliana
agccatgagcctatcta

SEQ ID NO: 34254 - DNA, 17 bp, Arabidopsis thaliana
agccatgagcctattat

SEQ ID NO: 34255 - DNA, 17 bp, Arabidopsis thaliana
agccatgattgtagaca

SEQ ID NO: 34256 - DNA, 17 bp, Arabidopsis thaliana
agccatgcaactattct

SEQ ID NO: 34257 - DNA, 17 bp, Arabidopsis thaliana
agccatggcacaaacgt

SEQ ID NO: 34258 - DNA, 17 bp, Arabidopsis thaliana
agccatgggggactatt

SEQ ID NO: 34259 - DNA, 17 bp, Arabidopsis thaliana
agccatggtgtcagacc

SEQ ID NO: 34260 - DNA, 17 bp, Arabidopsis thaliana
agccatggtgtcagatc

SEQ ID NO: 34261 - DNA, 17 bp, Arabidopsis thaliana
agccattacgatggtcc

SEQ ID NO: 34262 - DNA, 17 bp, Arabidopsis thaliana
agccattatgactttcc

SEQ ID NO: 34263 - DNA, 17 bp, Arabidopsis thaliana
agccattatgtacttca

SEQ ID NO: 34264 - DNA, 17 bp, Arabidopsis thaliana
agccattcaagaaccga

SEQ ID NO: 34265 - DNA, 17 bp, Arabidopsis thaliana
agccattcagccaaaaa

SEQ ID NO: 34266 - DNA, 17 bp, Arabidopsis thaliana
agccattcagccaacca

SEQ ID NO: 34267 - DNA, 17 bp, Arabidopsis thaliana
agccattcaggaaccga

SEQ ID NO: 34268 - DNA, 17 bp, Arabidopsis thaliana
agccattgaatttgtga

SEQ ID NO: 34269 - DNA, 17 bp, Arabidopsis thaliana
agccattgacgaccaac

SEQ ID NO: 34270 - DNA, 17 bp, Arabidopsis thaliana
agccattgagtctacct

SEQ ID NO: 34271 - DNA, 17 bp, Arabidopsis thaliana
agccattgatgagcaac

SEQ ID NO: 34272 - DNA, 17 bp, Arabidopsis thaliana
agccattgcgatgaagc

SEQ ID NO: 34273 - DNA, 17 bp, Arabidopsis thaliana
agccattgcgatgatgc

SEQ ID NO: 34274 - DNA, 17 bp, Arabidopsis thaliana
agccattggacaagacc

SEQ ID NO: 34275 - DNA, 17 bp, Arabidopsis thaliana
agccattgggccattat

SEQ ID NO: 34276 - DNA, 17 bp, Arabidopsis thaliana
agccattgtaaataagt

SEQ ID NO: 34277 - DNA, 17 bp, Arabidopsis thaliana
agccattgtaagtaagt

SEQ ID NO: 34278 - DNA, 17 bp, Arabidopsis thaliana
agccattgtgaataagt

SEQ ID NO: 34279 - DNA, 17 bp, Arabidopsis thaliana
agccatttggttccaag

SEQ ID NO: 34280 - DNA, 17 bp, Arabidopsis thaliana
agccattttacgaactc

SEQ ID NO: 34281 - DNA, 17 bp, Arabidopsis thaliana
agccattttcgtgattt

SEQ ID NO: 34282 - DNA, 17 bp, Arabidopsis thaliana
agcccaaacggcacgca

SEQ ID NO: 34283 - DNA, 17 bp, Arabidopsis thaliana
agcccaaacttatacca

SEQ ID NO: 34284 - DNA, 17 bp, Arabidopsis thaliana
agcccaaacttcaacca

SEQ ID NO: 34285 - DNA, 17 bp, Arabidopsis thaliana
agcccaaacttggcatg

SEQ ID NO: 34286 - DNA, 17 bp, Arabidopsis thaliana
agcccaaagacaaccct

SEQ ID NO: 34287 - DNA, 17 bp, Arabidopsis thaliana
agcccaaagacacctct

SEQ ID NO: 34288 - DNA, 17 bp, Arabidopsis thaliana
agcccaaagacagccct

SEQ ID NO: 34289 - DNA, 17 bp, Arabidopsis thaliana
agcccaaagacagctct

SEQ ID NO: 34290 - DNA, 17 bp, Arabidopsis thaliana
agcccaaagagtgccct

SEQ ID NO: 34291 - DNA, 17 bp, Arabidopsis thaliana
agcccaaagtatgacct

SEQ ID NO: 34292 - DNA, 17 bp, Arabidopsis thaliana
agcccaaatcacgaaaa

SEQ ID NO: 34293 - DNA, 17 bp, Arabidopsis thaliana
agcccaacccgacctga

SEQ ID NO: 34294 - DNA, 17 bp, Arabidopsis thaliana
agcccaactaatatcga

SEQ ID NO: 34295 - DNA, 17 bp, Arabidopsis thaliana
agcccaagaccttggat

SEQ ID NO: 34296 - DNA, 17 bp, Arabidopsis thaliana
agcccaagcaattcaga

SEQ ID NO: 34297 - DNA, 17 bp, Arabidopsis thaliana
agcccaagctcagaacc

SEQ ID NO: 34298 - DNA, 17 bp, Arabidopsis thaliana
agcccaaggatgacttg

SEQ ID NO: 34299 - DNA, 17 bp, Arabidopsis thaliana
agcccaaggtatgttgg

SEQ ID NO: 34300 - DNA, 17 bp, Arabidopsis thaliana
agcccaagtgaataacg

SEQ ID NO: 34301 - DNA, 17 bp, Arabidopsis thaliana
agcccaattgggactgg

SEQ ID NO: 34302 - DNA, 17 bp, Arabidopsis thaliana
agcccacaaactatctt

SEQ ID NO: 34303 - DNA, 17 bp, Arabidopsis thaliana
agcccacaggccgacac

SEQ ID NO: 34304 - DNA, 17 bp, Arabidopsis thaliana
agcccacaggccgaccc

SEQ ID NO: 34305 - DNA, 17 bp, Arabidopsis thaliana
agcccacaggccgacgc

SEQ ID NO: 34306 - DNA, 17 bp, Arabidopsis thaliana
agcccacccacccaccc

SEQ ID NO: 34307 - DNA, 17 bp, Arabidopsis thaliana
agcccaccccaagatga

SEQ ID NO: 34308 - DNA, 17 bp, Arabidopsis thaliana
agcccacccccccaccc

SEQ ID NO: 34309 - DNA, 17 bp, Arabidopsis thaliana
agcccaccgttggggat

SEQ ID NO: 34310 - DNA, 17 bp, Arabidopsis thaliana
agcccacctcaagatga

SEQ ID NO: 34311 - DNA, 17 bp, Arabidopsis thaliana
agcccactacagaagcc

SEQ ID NO: 34312 - DNA, 17 bp, Arabidopsis thaliana
agcccacttgggacgac

SEQ ID NO: 34313 - DNA, 17 bp, Arabidopsis thaliana
agcccactttgtcaaaa

SEQ ID NO: 34314 - DNA, 17 bp, Arabidopsis thaliana
agcccagaacatctaag

SEQ ID NO: 34315 - DNA, 17 bp, Arabidopsis thaliana
agcccagatcgtacgct

SEQ ID NO: 34316 - DNA, 17 bp, Arabidopsis thaliana
agcccagccatttctgc

SEQ ID NO: 34317 - DNA, 17 bp, Arabidopsis thaliana
agcccagcccaattttg

SEQ ID NO: 34318 - DNA, 17 bp, Arabidopsis thaliana
agcccagcccgacctga

SEQ ID NO: 34319 - DNA, 17 bp, Arabidopsis thaliana
agcccagccgtgaggca

SEQ ID NO: 34320 - DNA, 17 bp, Arabidopsis thaliana
agcccagcttgaaaatc

SEQ ID NO: 34321 - DNA, 17 bp, Arabidopsis thaliana
agcccaggaccgaccga

SEQ ID NO: 34322 - DNA, 17 bp, Arabidopsis thaliana
agcccaggaccggccct

SEQ ID NO: 34323 - DNA, 17 bp, Arabidopsis thaliana
agcccaggagtaggtgg

SEQ ID NO: 34324 - DNA, 17 bp, Arabidopsis thaliana
agcccaggttggagcag

SEQ ID NO: 34325 - DNA, 17 bp, Arabidopsis thaliana
agcccagtcttcaggtg

SEQ ID NO: 34326 - DNA, 17 bp, Arabidopsis thaliana
agcccagtgatatttgt

SEQ ID NO: 34327 - DNA, 17 bp, Arabidopsis thaliana
agcccatataagttgcc

SEQ ID NO: 34328 - DNA, 17 bp, Arabidopsis thaliana
agcccatcatctaaatg

SEQ ID NO: 34329 - DNA, 17 bp, Arabidopsis thaliana
agcccatcatctagatg

SEQ ID NO: 34330 - DNA, 17 bp, Arabidopsis thaliana
agcccatccaagagcaa

SEQ ID NO: 34331 - DNA, 17 bp, Arabidopsis thaliana
agcccatctatgatagt

SEQ ID NO: 34332 - DNA, 17 bp, Arabidopsis thaliana
agcccatgacctcagaa

SEQ ID NO: 34333 - DNA, 17 bp, Arabidopsis thaliana
agcccatgaggatgaac

SEQ ID NO: 34334 - DNA, 17 bp, Arabidopsis thaliana
agcccatgggccgcctg

SEQ ID NO: 34335 - DNA, 17 bp, Arabidopsis thaliana
agcccatggttggatgt

SEQ ID NO: 34336 - DNA, 17 bp, Arabidopsis thaliana
agcccatgtctgtcatt

SEQ ID NO: 34337 - DNA, 17 bp, Arabidopsis thaliana
agcccatgtgctgatgt

SEQ ID NO: 34338 - DNA, 17 bp, Arabidopsis thaliana
agcccattctttgactt

SEQ ID NO: 34339 - DNA, 17 bp, Arabidopsis thaliana
agcccattgcgagatga

SEQ ID NO: 34340 - DNA, 17 bp, Arabidopsis thaliana
agcccattgggcctaag

SEQ ID NO: 34341 - DNA, 17 bp, Arabidopsis thaliana
agcccattggtgtgacg

SEQ ID NO: 34342 - DNA, 17 bp, Arabidopsis thaliana
agcccattgtccatacg

SEQ ID NO: 34343 - DNA, 17 bp, Arabidopsis thaliana
agcccattgtgtggaaa

SEQ ID NO: 34344 - DNA, 17 bp, Arabidopsis thaliana
agcccattgtttggaaa

SEQ ID NO: 34345 - DNA, 17 bp, Arabidopsis thaliana
agccccaatcgggcggt

SEQ ID NO: 34346 - DNA, 17 bp, Arabidopsis thaliana
agccccatcatctaagc

SEQ ID NO: 34347 - DNA, 17 bp, Arabidopsis thaliana
agccccatcgtcaaggt

SEQ ID NO: 34348 - DNA, 17 bp, Arabidopsis thaliana
agccccccaagtcctct

SEQ ID NO: 34349 - DNA, 17 bp, Arabidopsis thaliana
agcccccccacactttt

SEQ ID NO: 34350 - DNA, 17 bp, Arabidopsis thaliana
agccccccccccccccc

SEQ ID NO: 34351 - DNA, 17 bp, Arabidopsis thaliana
agccccccctcttggca

SEQ ID NO: 34352 - DNA, 17 bp, Arabidopsis thaliana
agcccccgacgctgtta

SEQ ID NO: 34353 - DNA, 17 bp, Arabidopsis thaliana
agcccccgggcgtcgaa

SEQ ID NO: 34354 - DNA, 17 bp, Arabidopsis thaliana
agccccctcttggcacc

SEQ ID NO: 34355 - DNA, 17 bp, Arabidopsis thaliana
agcccccttggcccaat

SEQ ID NO: 34356 - DNA, 17 bp, Arabidopsis thaliana
agccccgaaaatggatg

SEQ ID NO: 34357 - DNA, 17 bp, Arabidopsis thaliana
agccccggcttaggcat

SEQ ID NO: 34358 - DNA, 17 bp, Arabidopsis thaliana
agccccggtatgtctaa

SEQ ID NO: 34359 - DNA, 17 bp, Arabidopsis thaliana
agccccgtcgtccccgg

SEQ ID NO: 34360 - DNA, 17 bp, Arabidopsis thaliana
agccccgtcgtgcccac

SEQ ID NO: 34361 - DNA, 17 bp, Arabidopsis thaliana
agccccgtcgtgcccag

SEQ ID NO: 34362 - DNA, 17 bp, Arabidopsis thaliana
agccccgtcgtgcccgc

SEQ ID NO: 34363 - DNA, 17 bp, Arabidopsis thaliana
agccccgtcgtgcccgg

SEQ ID NO: 34364 - DNA, 17 bp, Arabidopsis thaliana
agcccctgacgtgttgc

SEQ ID NO: 34365 - DNA, 17 bp, Arabidopsis thaliana
agcccctggccctttgt

SEQ ID NO: 34366 - DNA, 17 bp, Arabidopsis thaliana
agcccctgtcgctaaga

SEQ ID NO: 34367 - DNA, 17 bp, Arabidopsis thaliana
agccccttcgtgcccgc

SEQ ID NO: 34368 - DNA, 17 bp, Arabidopsis thaliana
agccccttcgtgcccgg

SEQ ID NO: 34369 - DNA, 17 bp, Arabidopsis thaliana
agccccttgtcgctaag

SEQ ID NO: 34370 - DNA, 17 bp, Arabidopsis thaliana
agcccctttggcccaat

SEQ ID NO: 34371 - DNA, 17 bp, Arabidopsis thaliana
agcccctttgtcgctaa

SEQ ID NO: 34372 - DNA, 17 bp, Arabidopsis thaliana
agcccgacagcggaaaa

SEQ ID NO: 34373 - DNA, 17 bp, Arabidopsis thaliana
agcccgacctgaatcca

SEQ ID NO: 34374 - DNA, 17 bp, Arabidopsis thaliana
agcccgactaccgctgg

SEQ ID NO: 34375 - DNA, 17 bp, Arabidopsis thaliana
agcccgaggagtccgac

SEQ ID NO: 34376 - DNA, 17 bp, Arabidopsis thaliana
agcccgagtataactct

SEQ ID NO: 34377 - DNA, 17 bp, Arabidopsis thaliana
agcccgatagcggaaaa

SEQ ID NO: 34378 - DNA, 17 bp, Arabidopsis thaliana
agcccgatctttgacct

SEQ ID NO: 34379 - DNA, 17 bp, Arabidopsis thaliana
agcccgcaaggatttgt

SEQ ID NO: 34380 - DNA, 17 bp, Arabidopsis thaliana
agcccgcagcgatactg

SEQ ID NO: 34381 - DNA, 17 bp, Arabidopsis thaliana
agcccgcctaaacccgc

SEQ ID NO: 34382 - DNA, 17 bp, Arabidopsis thaliana
agcccgcctcgggacga

SEQ ID NO: 34383 - DNA, 17 bp, Arabidopsis thaliana
agcccgcgggcgttaca

SEQ ID NO: 34384 - DNA, 17 bp, Arabidopsis thaliana
agcccgctgtgacagct

SEQ ID NO: 34385 - DNA, 17 bp, Arabidopsis thaliana
agcccgctttgacagct

SEQ ID NO: 34386 - DNA, 17 bp, Arabidopsis thaliana
agcccggaacaatgcca

SEQ ID NO: 34387 - DNA, 17 bp, Arabidopsis thaliana
agcccggaaccattgtt

SEQ ID NO: 34388 - DNA, 17 bp, Arabidopsis thaliana
agcccggattgatcgtt

SEQ ID NO: 34389 - DNA, 17 bp, Arabidopsis thaliana
agcccgggcggagcgcc

SEQ ID NO: 34390 - DNA, 17 bp, Arabidopsis thaliana
agcccgggcttaggccg

SEQ ID NO: 34391 - DNA, 17 bp, Arabidopsis thaliana
agcccgggcttttgaca

SEQ ID NO: 34392 - DNA, 17 bp, Arabidopsis thaliana
agcccgggcttttgata

SEQ ID NO: 34393 - DNA, 17 bp, Arabidopsis thaliana
agcccgggcttttgtta

SEQ ID NO: 34394 - DNA, 17 bp, Arabidopsis thaliana
agcccggtgcttaggta

SEQ ID NO: 34395 - DNA, 17 bp, Arabidopsis thaliana
agcccgtaatcatacaa

SEQ ID NO: 34396 - DNA, 17 bp, Arabidopsis thaliana
agcccgtaatcatccca

SEQ ID NO: 34397 - DNA, 17 bp, Arabidopsis thaliana
agcccgtaatccatcca

SEQ ID NO: 34398 - DNA, 17 bp, Arabidopsis thaliana
agcccgtaatcccccca

SEQ ID NO: 34399 - DNA, 17 bp, Arabidopsis thaliana
agcccgtaatcccctaa

SEQ ID NO: 34400 - DNA, 17 bp, Arabidopsis thaliana
agcccgtaatcccctca

SEQ ID NO: 34401 - DNA, 17 bp, Arabidopsis thaliana
agcccgtaatccctcca

SEQ ID NO: 34402 - DNA, 17 bp, Arabidopsis thaliana
agcccgtaatcctacca

SEQ ID NO: 34403 - DNA, 17 bp, Arabidopsis thaliana
agcccgtaatcctccag

SEQ ID NO: 34404 - DNA, 17 bp, Arabidopsis thaliana
agcccgtaatcctctca

SEQ ID NO: 34405 - DNA, 17 bp, Arabidopsis thaliana
agcccgtaatctcacca

SEQ ID NO: 34406 - DNA, 17 bp, Arabidopsis thaliana
agcccgtaatctctcag

SEQ ID NO: 34407 - DNA, 17 bp, Arabidopsis thaliana
agcccgtaatctctcca

SEQ ID NO: 34408 - DNA, 17 bp, Arabidopsis thaliana
agcccgtaattcctcca

SEQ ID NO: 34409 - DNA, 17 bp, Arabidopsis thaliana
agcccgtctatatgcat

SEQ ID NO: 34410 - DNA, 17 bp, Arabidopsis thaliana
agcccgtgcaaggagat

SEQ ID NO: 34411 - DNA, 17 bp, Arabidopsis thaliana
agcccgtggtgcgggat

SEQ ID NO: 34412 - DNA, 17 bp, Arabidopsis thaliana
agcccgttacccgatct

SEQ ID NO: 34413 - DNA, 17 bp, Arabidopsis thaliana
agcccgttatccctcca

SEQ ID NO: 34414 - DNA, 17 bp, Arabidopsis thaliana
agcccgttcttgcgacc

SEQ ID NO: 34415 - DNA, 17 bp, Arabidopsis thaliana
agcccgttgcggacaag

SEQ ID NO: 34416 - DNA, 17 bp, Arabidopsis thaliana
agcccgttgtccatatg

SEQ ID NO: 34417 - DNA, 17 bp, Arabidopsis thaliana
agcccgttttgattcat

SEQ ID NO: 34418 - DNA, 17 bp, Arabidopsis thaliana
agccctaaaactgattt

SEQ ID NO: 34419 - DNA, 17 bp, Arabidopsis thaliana
agccctaagcattatgc

SEQ ID NO: 34420 - DNA, 17 bp, Arabidopsis thaliana
agccctaagcatttcag

SEQ ID NO: 34421 - DNA, 17 bp, Arabidopsis thaliana
agccctaagtaagagat

SEQ ID NO: 34422 - DNA, 17 bp, Arabidopsis thaliana
agccctaagtgagccct

SEQ ID NO: 34423 - DNA, 17 bp, Arabidopsis thaliana
agccctaattggccagg

SEQ ID NO: 34424 - DNA, 17 bp, Arabidopsis thaliana
agccctaatttcgagtt

SEQ ID NO: 34425 - DNA, 17 bp, Arabidopsis thaliana
agccctacctgaagaat

SEQ ID NO: 34426 - DNA, 17 bp, Arabidopsis thaliana
agccctatagttgtttt

SEQ ID NO: 34427 - DNA, 17 bp, Arabidopsis thaliana
agccctatccaatcttg

SEQ ID NO: 34428 - DNA, 17 bp, Arabidopsis thaliana
agccctattcgacggtt

SEQ ID NO: 34429 - DNA, 17 bp, Arabidopsis thaliana
agccctatttgatttga

SEQ ID NO: 34430 - DNA, 17 bp, Arabidopsis thaliana
agccctatttggtgaac

SEQ ID NO: 34431 - DNA, 17 bp, Arabidopsis thaliana
agccctcccgtgtagcg

SEQ ID NO: 34432 - DNA, 17 bp, Arabidopsis thaliana
agccctccgacgaaaga

SEQ ID NO: 34433 - DNA, 17 bp, Arabidopsis thaliana
agccctccgacgaaata

SEQ ID NO: 34434 - DNA, 17 bp, Arabidopsis thaliana
agccctccgacgaacga

SEQ ID NO: 34435 - DNA, 17 bp, Arabidopsis thaliana
agccctcctgattacct

SEQ ID NO: 34436 - DNA, 17 bp, Arabidopsis thaliana
agccctctgctgcacct

SEQ ID NO: 34437 - DNA, 17 bp, Arabidopsis thaliana
agccctctgtactgaac

SEQ ID NO: 34438 - DNA, 17 bp, Arabidopsis thaliana
agccctgaaagttcggt

SEQ ID NO: 34439 - DNA, 17 bp, Arabidopsis thaliana
agccctgactagcgtct

SEQ ID NO: 34440 - DNA, 17 bp, Arabidopsis thaliana
agccctgagatgaagga

SEQ ID NO: 34441 - DNA, 17 bp, Arabidopsis thaliana
agccctggaaagctctc

SEQ ID NO: 34442 - DNA, 17 bp, Arabidopsis thaliana
agccctggctgctctac

SEQ ID NO: 34443 - DNA, 17 bp, Arabidopsis thaliana
agccctgggctctgacc

SEQ ID NO: 34444 - DNA, 17 bp, Arabidopsis thaliana
agccctgggctgaccgc

SEQ ID NO: 34445 - DNA, 17 bp, Arabidopsis thaliana
agccctgggcttgaccg

SEQ ID NO: 34446 - DNA, 17 bp, Arabidopsis thaliana
agccctggtgaagatag

SEQ ID NO: 34447 - DNA, 17 bp, Arabidopsis thaliana
agccctgtagagttgta

SEQ ID NO: 34448 - DNA, 17 bp, Arabidopsis thaliana
agccctgtcatcccggt

SEQ ID NO: 34449 - DNA, 17 bp, Arabidopsis thaliana
agccctgtcatctcggt

SEQ ID NO: 34450 - DNA, 17 bp, Arabidopsis thaliana
agccctgtcatctcgtt

SEQ ID NO: 34451 - DNA, 17 bp, Arabidopsis thaliana
agccctgtgcgagaatg

SEQ ID NO: 34452 - DNA, 17 bp, Arabidopsis thaliana
agcccttcaagatccgg

SEQ ID NO: 34453 - DNA, 17 bp, Arabidopsis thaliana
agcccttcgatgtcggc

SEQ ID NO: 34454 - DNA, 17 bp, Arabidopsis thaliana
agcccttcgctaagatt

SEQ ID NO: 34455 - DNA, 17 bp, Arabidopsis thaliana
agcccttctcttttctg

SEQ ID NO: 34456 - DNA, 17 bp, Arabidopsis thaliana
agcccttggttggggat

SEQ ID NO: 34457 - DNA, 17 bp, Arabidopsis thaliana
agcccttgtcgctaaga

SEQ ID NO: 34458 - DNA, 17 bp, Arabidopsis thaliana
agcccttgtttgtaatt

SEQ ID NO: 34459 - DNA, 17 bp, Arabidopsis thaliana
agccctttagctcagtt

SEQ ID NO: 34460 - DNA, 17 bp, Arabidopsis thaliana
agccctttatcgctaag

SEQ ID NO: 34461 - DNA, 17 bp, Arabidopsis thaliana
agccctttccttgattt

SEQ ID NO: 34462 - DNA, 17 bp, Arabidopsis thaliana
agccctttcgctaagat

SEQ ID NO: 34463 - DNA, 17 bp, Arabidopsis thaliana
agccctttctcgctaag

SEQ ID NO: 34464 - DNA, 17 bp, Arabidopsis thaliana
agccctttctcgctcac

SEQ ID NO: 34465 - DNA, 17 bp, Arabidopsis thaliana
agccctttgtcactaag

SEQ ID NO: 34466 - DNA, 17 bp, Arabidopsis thaliana
agccctttgtccctaac

SEQ ID NO: 34467 - DNA, 17 bp, Arabidopsis thaliana
agccctttgtccctaag

SEQ ID NO: 34468 - DNA, 17 bp, Arabidopsis thaliana
agccctttgtcgcaaga

SEQ ID NO: 34469 - DNA, 17 bp, Arabidopsis thaliana
agccctttgtcgccaag

SEQ ID NO: 34470 - DNA, 17 bp, Arabidopsis thaliana
agccctttgtcgctaaa

SEQ ID NO: 34471 - DNA, 17 bp, Arabidopsis thaliana
agccctttgtcgctaac

SEQ ID NO: 34472 - DNA, 17 bp, Arabidopsis thaliana
agccctttgtcgctaag

SEQ ID NO: 34473 - DNA, 17 bp, Arabidopsis thaliana
agccctttgtcgctaat

SEQ ID NO: 34474 - DNA, 17 bp, Arabidopsis thaliana
agccctttgtcgctacg

SEQ ID NO: 34475 - DNA, 17 bp, Arabidopsis thaliana
agccctttgtcgctagg

SEQ ID NO: 34476 - DNA, 17 bp, Arabidopsis thaliana
agccctttgtcgctatt

SEQ ID NO: 34477 - DNA, 17 bp, Arabidopsis thaliana
agccctttgtcgctcac

SEQ ID NO: 34478 - DNA, 17 bp, Arabidopsis thaliana
agccctttgtcgctccc

SEQ ID NO: 34479 - DNA, 17 bp, Arabidopsis thaliana
agccctttgtcgcttag

SEQ ID NO: 34480 - DNA, 17 bp, Arabidopsis thaliana
agccctttgtctctaag

SEQ ID NO: 34481 - DNA, 17 bp, Arabidopsis thaliana
agccctttgtctgggtg

SEQ ID NO: 34482 - DNA, 17 bp, Arabidopsis thaliana
agccctttgttgctaag

SEQ ID NO: 34483 - DNA, 17 bp, Arabidopsis thaliana
agcccttttccctctct

SEQ ID NO: 34484 - DNA, 17 bp, Arabidopsis thaliana
agcccttttccctcttg

SEQ ID NO: 34485 - DNA, 17 bp, Arabidopsis thaliana
agcccttttcccttggc

SEQ ID NO: 34486 - DNA, 17 bp, Arabidopsis thaliana
agcccttttcctccttg

SEQ ID NO: 34487 - DNA, 17 bp, Arabidopsis thaliana
agcccttttccttcttg

SEQ ID NO: 34488 - DNA, 17 bp, Arabidopsis thaliana
agcccttttccttcttt

SEQ ID NO: 34489 - DNA, 17 bp, Arabidopsis thaliana
agcccttttccttggca

SEQ ID NO: 34490 - DNA, 17 bp, Arabidopsis thaliana
agcccttttcgctaaga

SEQ ID NO: 34491 - DNA, 17 bp, Arabidopsis thaliana
agcccttttctgtttgc

SEQ ID NO: 34492 - DNA, 17 bp, Arabidopsis thaliana
agccctttttcctctct

SEQ ID NO: 34493 - DNA, 17 bp, Arabidopsis thaliana
agccctttttcctcttg

SEQ ID NO: 34494 - DNA, 17 bp, Arabidopsis thaliana
agccctttttcgctaag

SEQ ID NO: 34495 - DNA, 17 bp, Arabidopsis thaliana
agccgaaaccataaact

SEQ ID NO: 34496 - DNA, 17 bp, Arabidopsis thaliana
agccgaaacccgtaatt

SEQ ID NO: 34497 - DNA, 17 bp, Arabidopsis thaliana
agccgaaatgagagaaa

SEQ ID NO: 34498 - DNA, 17 bp, Arabidopsis thaliana
agccgaacatagccaga

SEQ ID NO: 34499 - DNA, 17 bp, Arabidopsis thaliana
agccgaacatgtttgtg

SEQ ID NO: 34500 - DNA, 17 bp, Arabidopsis thaliana
agccgaaccaagatggg

SEQ ID NO: 34501 - DNA, 17 bp, Arabidopsis thaliana
agccgaaccctgtattt

SEQ ID NO: 34502 - DNA, 17 bp, Arabidopsis thaliana
agccgaaccgaaagtca

SEQ ID NO: 34503 - DNA, 17 bp, Arabidopsis thaliana
agccgaaccggcataaa

SEQ ID NO: 34504 - DNA, 17 bp, Arabidopsis thaliana
agccgaacctagataag

SEQ ID NO: 34505 - DNA, 17 bp, Arabidopsis thaliana
agccgaacctctttcca

SEQ ID NO: 34506 - DNA, 17 bp, Arabidopsis thaliana
agccgaacgttggatga

SEQ ID NO: 34507 - DNA, 17 bp, Arabidopsis thaliana
agccgaagaagactcag

SEQ ID NO: 34508 - DNA, 17 bp, Arabidopsis thaliana
agccgaagcccgtaatc

SEQ ID NO: 34509 - DNA, 17 bp, Arabidopsis thaliana
agccgaagcctgtaatt

SEQ ID NO: 34510 - DNA, 17 bp, Arabidopsis thaliana
agccgaaggatttgatc

SEQ ID NO: 34511 - DNA, 17 bp, Arabidopsis thaliana
agccgaagtccatatga

SEQ ID NO: 34512 - DNA, 17 bp, Arabidopsis thaliana
agccgaagtccgtaatc

SEQ ID NO: 34513 - DNA, 17 bp, Arabidopsis thaliana
agccgaataggtcgcag

SEQ ID NO: 34514 - DNA, 17 bp, Arabidopsis thaliana
agccgaatggtcgagtc

SEQ ID NO: 34515 - DNA, 17 bp, Arabidopsis thaliana
agccgaattacagtcgc

SEQ ID NO: 34516 - DNA, 17 bp, Arabidopsis thaliana
agccgacaaccaaagag

SEQ ID NO: 34517 - DNA, 17 bp, Arabidopsis thaliana
agccgacaaccaagaag

SEQ ID NO: 34518 - DNA, 17 bp, Arabidopsis thaliana
agccgacaacgacagag

SEQ ID NO: 34519 - DNA, 17 bp, Arabidopsis thaliana
agccgacaagtactatt

SEQ ID NO: 34520 - DNA, 17 bp, Arabidopsis thaliana
agccgaccaatgcacac

SEQ ID NO: 34521 - DNA, 17 bp, Arabidopsis thaliana
agccgaccatctatcta

SEQ ID NO: 34522 - DNA, 17 bp, Arabidopsis thaliana
agccgaccatctatctt

SEQ ID NO: 34523 - DNA, 17 bp, Arabidopsis thaliana
agccgaccgtgtacaac

SEQ ID NO: 34524 - DNA, 17 bp, Arabidopsis thaliana
agccgacctgattacct

SEQ ID NO: 34525 - DNA, 17 bp, Arabidopsis thaliana
agccgacgactcagagc

SEQ ID NO: 34526 - DNA, 17 bp, Arabidopsis thaliana
agccgacgatagctgcg

SEQ ID NO: 34527 - DNA, 17 bp, Arabidopsis thaliana
agccgacgcggattacg

SEQ ID NO: 34528 - DNA, 17 bp, Arabidopsis thaliana
agccgacggatcgcatg

SEQ ID NO: 34529 - DNA, 17 bp, Arabidopsis thaliana
agccgacggtgtatgtg

SEQ ID NO: 34530 - DNA, 17 bp, Arabidopsis thaliana
agccgacggttctctcg

SEQ ID NO: 34531 - DNA, 17 bp, Arabidopsis thaliana
agccgactcccgcgtgt

SEQ ID NO: 34532 - DNA, 17 bp, Arabidopsis thaliana
agccgactgtctgtatt

SEQ ID NO: 34533 - DNA, 17 bp, Arabidopsis thaliana
agccgacttcttgaacc

SEQ ID NO: 34534 - DNA, 17 bp, Arabidopsis thaliana
agccgagacaagtttga

SEQ ID NO: 34535 - DNA, 17 bp, Arabidopsis thaliana
agccgagacagcaacgg

SEQ ID NO: 34536 - DNA, 17 bp, Arabidopsis thaliana
agccgagacagtgtcac

SEQ ID NO: 34537 - DNA, 17 bp, Arabidopsis thaliana
agccgagagccgtgtgg

SEQ ID NO: 34538 - DNA, 17 bp, Arabidopsis thaliana
agccgagatatcagcct

SEQ ID NO: 34539 - DNA, 17 bp, Arabidopsis thaliana
agccgagccactgtttt

SEQ ID NO: 34540 - DNA, 17 bp, Arabidopsis thaliana
agccgagggcacgtccc

SEQ ID NO: 34541 - DNA, 17 bp, Arabidopsis thaliana
agccgagggcacgtccg

SEQ ID NO: 34542 - DNA, 17 bp, Arabidopsis thaliana
agccgagggcacgtctg

SEQ ID NO: 34543 - DNA, 17 bp, Arabidopsis thaliana
agccgaggtagggtcca

SEQ ID NO: 34544 - DNA, 17 bp, Arabidopsis thaliana
agccgaggtggtggtcg

SEQ ID NO: 34545 - DNA, 17 bp, Arabidopsis thaliana
agccgagtacagtggcc

SEQ ID NO: 34546 - DNA, 17 bp, Arabidopsis thaliana
agccgataagtcatcga

SEQ ID NO: 34547 - DNA, 17 bp, Arabidopsis thaliana
agccgatagagttcaac

SEQ ID NO: 34548 - DNA, 17 bp, Arabidopsis thaliana
agccgatagatcaatga

SEQ ID NO: 34549 - DNA, 17 bp, Arabidopsis thaliana
agccgatcaacgacctg

SEQ ID NO: 34550 - DNA, 17 bp, Arabidopsis thaliana
agccgatcatgtgttcg

SEQ ID NO: 34551 - DNA, 17 bp, Arabidopsis thaliana
agccgatccctacccgg

SEQ ID NO: 34552 - DNA, 17 bp, Arabidopsis thaliana
agccgatccgttccgtc

SEQ ID NO: 34553 - DNA, 17 bp, Arabidopsis thaliana
agccgatctcgaggatt

SEQ ID NO: 34554 - DNA, 17 bp, Arabidopsis thaliana
agccgatggctttgttg

SEQ ID NO: 34555 - DNA, 17 bp, Arabidopsis thaliana
agccgatgtaaataaat

SEQ ID NO: 34556 - DNA, 17 bp, Arabidopsis thaliana
agccgatgtcctctttg

SEQ ID NO: 34557 - DNA, 17 bp, Arabidopsis thaliana
agccgatgttgaatagg

SEQ ID NO: 34558 - DNA, 17 bp, Arabidopsis thaliana
agccgatgtttcccggg

SEQ ID NO: 34559 - DNA, 17 bp, Arabidopsis thaliana
agccgattaaatattaa

SEQ ID NO: 34560 - DNA, 17 bp, Arabidopsis thaliana
agccgattacggtccat

SEQ ID NO: 34561 - DNA, 17 bp, Arabidopsis thaliana
agccgattattggttgc

SEQ ID NO: 34562 - DNA, 17 bp, Arabidopsis thaliana
agccgattctaagtgtc

SEQ ID NO: 34563 - DNA, 17 bp, Arabidopsis thaliana
agccgattctaccttgg

SEQ ID NO: 34564 - DNA, 17 bp, Arabidopsis thaliana
agccgattctacctttg

SEQ ID NO: 34565 - DNA, 17 bp, Arabidopsis thaliana
agccgattgcgagatga

SEQ ID NO: 34566 - DNA, 17 bp, Arabidopsis thaliana
agccgattttacctttg

SEQ ID NO: 34567 - DNA, 17 bp, Arabidopsis thaliana
agccgcaacataccgta

SEQ ID NO: 34568 - DNA, 17 bp, Arabidopsis thaliana
agccgcaaccttgttcg

SEQ ID NO: 34569 - DNA, 17 bp, Arabidopsis thaliana
agccgcaacgacttgcg

SEQ ID NO: 34570 - DNA, 17 bp, Arabidopsis thaliana
agccgcaagccttgttc

SEQ ID NO: 34571 - DNA, 17 bp, Arabidopsis thaliana
agccgcaatgagcgtat

SEQ ID NO: 34572 - DNA, 17 bp, Arabidopsis thaliana
agccgcacagaccgtcg

SEQ ID NO: 34573 - DNA, 17 bp, Arabidopsis thaliana
agccgcacgtttgacct

SEQ ID NO: 34574 - DNA, 17 bp, Arabidopsis thaliana
agccgcactgtagatgg

SEQ ID NO: 34575 - DNA, 17 bp, Arabidopsis thaliana
agccgcagacgcagccg

SEQ ID NO: 34576 - DNA, 17 bp, Arabidopsis thaliana
agccgcagcatgcaagc

SEQ ID NO: 34577 - DNA, 17 bp, Arabidopsis thaliana
agccgcagttaacgccg

SEQ ID NO: 34578 - DNA, 17 bp, Arabidopsis thaliana
agccgcatcctgtagat

SEQ ID NO: 34579 - DNA, 17 bp, Arabidopsis thaliana
agccgcatgaaccagta

SEQ ID NO: 34580 - DNA, 17 bp, Arabidopsis thaliana
agccgccaccaccacct

SEQ ID NO: 34581 - DNA, 17 bp, Arabidopsis thaliana
agccgccgcctgcgccc

SEQ ID NO: 34582 - DNA, 17 bp, Arabidopsis thaliana
agccgccgcctgcgtgc

SEQ ID NO: 34583 - DNA, 17 bp, Arabidopsis thaliana
agccgccgcctgtatgt

SEQ ID NO: 34584 - DNA, 17 bp, Arabidopsis thaliana
agccgccggagcgacac

SEQ ID NO: 34585 - DNA, 17 bp, Arabidopsis thaliana
agccgccgtaattagta

SEQ ID NO: 34586 - DNA, 17 bp, Arabidopsis thaliana
agccgcctcagaggatg

SEQ ID NO: 34587 - DNA, 17 bp, Arabidopsis thaliana
agccgcctcagaggatt

SEQ ID NO: 34588 - DNA, 17 bp, Arabidopsis thaliana
agccgcgagtgtgtatg

SEQ ID NO: 34589 - DNA, 17 bp, Arabidopsis thaliana
agccgcgatgaaggaac

SEQ ID NO: 34590 - DNA, 17 bp, Arabidopsis thaliana
agccgcggcggtggtgc

SEQ ID NO: 34591 - DNA, 17 bp, Arabidopsis thaliana
agccgcggctaaaaaat

SEQ ID NO: 34592 - DNA, 17 bp, Arabidopsis thaliana
agccgcggctagaatcc

SEQ ID NO: 34593 - DNA, 17 bp, Arabidopsis thaliana
agccgcggtaattccaa

SEQ ID NO: 34594 - DNA, 17 bp, Arabidopsis thaliana
agccgcggtaattccag

SEQ ID NO: 34595 - DNA, 17 bp, Arabidopsis thaliana
agccgcggtaattcccc

SEQ ID NO: 34596 - DNA, 17 bp, Arabidopsis thaliana
agccgcggtctgtctgc

SEQ ID NO: 34597 - DNA, 17 bp, Arabidopsis thaliana
agccgcgtcgtcttcgt

SEQ ID NO: 34598 - DNA, 17 bp, Arabidopsis thaliana
agccgcgttctatggat

SEQ ID NO: 34599 - DNA, 17 bp, Arabidopsis thaliana
agccgctacatggttgt

SEQ ID NO: 34600 - DNA, 17 bp, Arabidopsis thaliana
agccgctactcattcgg

SEQ ID NO: 34601 - DNA, 17 bp, Arabidopsis thaliana
agccgctattacgtttt

SEQ ID NO: 34602 - DNA, 17 bp, Arabidopsis thaliana
agccgctcccgggaggg

SEQ ID NO: 34603 - DNA, 17 bp, Arabidopsis thaliana
agccgctccgattagac

SEQ ID NO: 34604 - DNA, 17 bp, Arabidopsis thaliana
agccgctccgattggac

SEQ ID NO: 34605 - DNA, 17 bp, Arabidopsis thaliana
agccgctcctttgtcgc

SEQ ID NO: 34606 - DNA, 17 bp, Arabidopsis thaliana
agccgctgagacggtcg

SEQ ID NO: 34607 - DNA, 17 bp, Arabidopsis thaliana
agccgctgccaacgctt

SEQ ID NO: 34608 - DNA, 17 bp, Arabidopsis thaliana
agccgctgccacaagca

SEQ ID NO: 34609 - DNA, 17 bp, Arabidopsis thaliana
agccgctgccgcaaccg

SEQ ID NO: 34610 - DNA, 17 bp, Arabidopsis thaliana
agccgctgcgacaagca

SEQ ID NO: 34611 - DNA, 17 bp, Arabidopsis thaliana
agccgctggaccctacc

SEQ ID NO: 34612 - DNA, 17 bp, Arabidopsis thaliana
agccgctggaccctccc

SEQ ID NO: 34613 - DNA, 17 bp, Arabidopsis thaliana
agccgcttaagtgtctg

SEQ ID NO: 34614 - DNA, 17 bp, Arabidopsis thaliana
agccgcttcctgctatg

SEQ ID NO: 34615 - DNA, 17 bp, Arabidopsis thaliana
agccgcttcgttgttgt

SEQ ID NO: 34616 - DNA, 17 bp, Arabidopsis thaliana
agccgcttgccaggatt

SEQ ID NO: 34617 - DNA, 17 bp, Arabidopsis thaliana
agccgcttgttaactgt

SEQ ID NO: 34618 - DNA, 17 bp, Arabidopsis thaliana
agccgctttgagcactc

SEQ ID NO: 34619 - DNA, 17 bp, Arabidopsis thaliana
agccggaaccgaagtag

SEQ ID NO: 34620 - DNA, 17 bp, Arabidopsis thaliana
agccggaattgagtgat

SEQ ID NO: 34621 - DNA, 17 bp, Arabidopsis thaliana
agccggacttctctccg

SEQ ID NO: 34622 - DNA, 17 bp, Arabidopsis thaliana
agccggaggtagggtcc

SEQ ID NO: 34623 - DNA, 17 bp, Arabidopsis thaliana
agccggagtggggactg

SEQ ID NO: 34624 - DNA, 17 bp, Arabidopsis thaliana
agccggatctagtctta

SEQ ID NO: 34625 - DNA, 17 bp, Arabidopsis thaliana
agccggatctgattagc

SEQ ID NO: 34626 - DNA, 17 bp, Arabidopsis thaliana
agccggatcttaaaggc

SEQ ID NO: 34627 - DNA, 17 bp, Arabidopsis thaliana
agccggattacggtgct

SEQ ID NO: 34628 - DNA, 17 bp, Arabidopsis thaliana
agccggatttggcagga

SEQ ID NO: 34629 - DNA, 17 bp, Arabidopsis thaliana
agccggcaaaatggatc

SEQ ID NO: 34630 - DNA, 17 bp, Arabidopsis thaliana
agccggcaaagatataa

SEQ ID NO: 34631 - DNA, 17 bp, Arabidopsis thaliana
agccggcaaaggcaact

SEQ ID NO: 34632 - DNA, 17 bp, Arabidopsis thaliana
agccggccagagatggt

SEQ ID NO: 34633 - DNA, 17 bp, Arabidopsis thaliana
agccggcccattctctg

SEQ ID NO: 34634 - DNA, 17 bp, Arabidopsis thaliana
agccggcgaccgaagcc

SEQ ID NO: 34635 - DNA, 17 bp, Arabidopsis thaliana
agccggcgactcatagg

SEQ ID NO: 34636 - DNA, 17 bp, Arabidopsis thaliana
agccggcgggagcaaaa

SEQ ID NO: 34637 - DNA, 17 bp, Arabidopsis thaliana
agccggcgggagccccg

SEQ ID NO: 34638 - DNA, 17 bp, Arabidopsis thaliana
agccggcggtgcagcaa

SEQ ID NO: 34639 - DNA, 17 bp, Arabidopsis thaliana
agccggcggtgcagcac

SEQ ID NO: 34640 - DNA, 17 bp, Arabidopsis thaliana
agccggcggtgcagcag

SEQ ID NO: 34641 - DNA, 17 bp, Arabidopsis thaliana
agccggctctggtccaa

SEQ ID NO: 34642 - DNA, 17 bp, Arabidopsis thaliana
agccgggggtcgtgtga

SEQ ID NO: 34643 - DNA, 17 bp, Arabidopsis thaliana
agccggggtgtggaggc

SEQ ID NO: 34644 - DNA, 17 bp, Arabidopsis thaliana
agccgggttacggtgcc

SEQ ID NO: 34645 - DNA, 17 bp, Arabidopsis thaliana
agccggtccgcctttgg

SEQ ID NO: 34646 - DNA, 17 bp, Arabidopsis thaliana
agccggtccgtctcaag

SEQ ID NO: 34647 - DNA, 17 bp, Arabidopsis thaliana
agccggtcgagctatag

SEQ ID NO: 34648 - DNA, 17 bp, Arabidopsis thaliana
agccggtcgtcgcttct

SEQ ID NO: 34649 - DNA, 17 bp, Arabidopsis thaliana
agccggttagaactaat

SEQ ID NO: 34650 - DNA, 17 bp, Arabidopsis thaliana
agccggttccatctcta

SEQ ID NO: 34651 - DNA, 17 bp, Arabidopsis thaliana
agccggttctagatggc

SEQ ID NO: 34652 - DNA, 17 bp, Arabidopsis thaliana
agccggttgctcgcttt

SEQ ID NO: 34653 - DNA, 17 bp, Arabidopsis thaliana
agccggttgttggagag

SEQ ID NO: 34654 - DNA, 17 bp, Arabidopsis thaliana
agccgtaaacgatggat

SEQ ID NO: 34655 - DNA, 17 bp, Arabidopsis thaliana
agccgtaacaaggtttc

SEQ ID NO: 34656 - DNA, 17 bp, Arabidopsis thaliana
agccgtaactgtcgttg

SEQ ID NO: 34657 - DNA, 17 bp, Arabidopsis thaliana
agccgtaagtcggacgg

SEQ ID NO: 34658 - DNA, 17 bp, Arabidopsis thaliana
agccgtaattaggcact

SEQ ID NO: 34659 - DNA, 17 bp, Arabidopsis thaliana
agccgtactacggctga

SEQ ID NO: 34660 - DNA, 17 bp, Arabidopsis thaliana
agccgtagcgtccatcg

SEQ ID NO: 34661 - DNA, 17 bp, Arabidopsis thaliana
agccgtagctacttcca

SEQ ID NO: 34662 - DNA, 17 bp, Arabidopsis thaliana
agccgtatcggaaggtg

SEQ ID NO: 34663 - DNA, 17 bp, Arabidopsis thaliana
agccgtatctaccagag

SEQ ID NO: 34664 - DNA, 17 bp, Arabidopsis thaliana
agccgtcacacggaatc

SEQ ID NO: 34665 - DNA, 17 bp, Arabidopsis thaliana
agccgtcagattcaggt

SEQ ID NO: 34666 - DNA, 17 bp, Arabidopsis thaliana
agccgtcagggtccgaa

SEQ ID NO: 34667 - DNA, 17 bp, Arabidopsis thaliana
agccgtcagtgtccgaa

SEQ ID NO: 34668 - DNA, 17 bp, Arabidopsis thaliana
agccgtcataccatctg

SEQ ID NO: 34669 - DNA, 17 bp, Arabidopsis thaliana
agccgtccatttttgca

SEQ ID NO: 34670 - DNA, 17 bp, Arabidopsis thaliana
agccgtccggccgtttt

SEQ ID NO: 34671 - DNA, 17 bp, Arabidopsis thaliana
agccgtcgaatctcttg

SEQ ID NO: 34672 - DNA, 17 bp, Arabidopsis thaliana
agccgtcgactcatagc

SEQ ID NO: 34673 - DNA, 17 bp, Arabidopsis thaliana
agccgtcgattctcagg

SEQ ID NO: 34674 - DNA, 17 bp, Arabidopsis thaliana
agccgtcgttggagccg

SEQ ID NO: 34675 - DNA, 17 bp, Arabidopsis thaliana
agccgtctagttctgca

SEQ ID NO: 34676 - DNA, 17 bp, Arabidopsis thaliana
agccgtctccaccagtg

SEQ ID NO: 34677 - DNA, 17 bp, Arabidopsis thaliana
agccgtctccactagtg

SEQ ID NO: 34678 - DNA, 17 bp, Arabidopsis thaliana
agccgtctgcctgggtg

SEQ ID NO: 34679 - DNA, 17 bp, Arabidopsis thaliana
agccgtctggtgcttct

SEQ ID NO: 34680 - DNA, 17 bp, Arabidopsis thaliana
agccgtctgtaggtggc

SEQ ID NO: 34681 - DNA, 17 bp, Arabidopsis thaliana
agccgtgacatgacgca

SEQ ID NO: 34682 - DNA, 17 bp, Arabidopsis thaliana
agccgtgacatgtaaat

SEQ ID NO: 34683 - DNA, 17 bp, Arabidopsis thaliana
agccgtgactataagct

SEQ ID NO: 34684 - DNA, 17 bp, Arabidopsis thaliana
agccgtgactgccgctg

SEQ ID NO: 34685 - DNA, 17 bp, Arabidopsis thaliana
agccgtgcgactcataa

SEQ ID NO: 34686 - DNA, 17 bp, Arabidopsis thaliana
agccgtgctgaatctgt

SEQ ID NO: 34687 - DNA, 17 bp, Arabidopsis thaliana
agccgtggcatgtaaat

SEQ ID NO: 34688 - DNA, 17 bp, Arabidopsis thaliana
agccgtggggtggtctt

SEQ ID NO: 34689 - DNA, 17 bp, Arabidopsis thaliana
agccgtggtgtcagacc

SEQ ID NO: 34690 - DNA, 17 bp, Arabidopsis thaliana
agccgtgtcctccgccg

SEQ ID NO: 34691 - DNA, 17 bp, Arabidopsis thaliana
agccgtgtggtggattc

SEQ ID NO: 34692 - DNA, 17 bp, Arabidopsis thaliana
agccgtgtggttcaagg

SEQ ID NO: 34693 - DNA, 17 bp, Arabidopsis thaliana
agccgttaagatccgat

SEQ ID NO: 34694 - DNA, 17 bp, Arabidopsis thaliana
agccgttacaaaacgtg

SEQ ID NO: 34695 - DNA, 17 bp, Arabidopsis thaliana
agccgttactgaacgac

SEQ ID NO: 34696 - DNA, 17 bp, Arabidopsis thaliana
agccgttcctcaggatt

SEQ ID NO: 34697 - DNA, 17 bp, Arabidopsis thaliana
agccgttcgccaagatt

SEQ ID NO: 34698 - DNA, 17 bp, Arabidopsis thaliana
agccgttcgccaggatt

SEQ ID NO: 34699 - DNA, 17 bp, Arabidopsis thaliana
agccgttgccttattag

SEQ ID NO: 34700 - DNA, 17 bp, Arabidopsis thaliana
agccgttggatcgaatt

SEQ ID NO: 34701 - DNA, 17 bp, Arabidopsis thaliana
agccgttgtaaataagt

SEQ ID NO: 34702 - DNA, 17 bp, Arabidopsis thaliana
agccgttgtcttaatgg

SEQ ID NO: 34703 - DNA, 17 bp, Arabidopsis thaliana
agccgtttattgttcgc

SEQ ID NO: 34704 - DNA, 17 bp, Arabidopsis thaliana
agccgtttcccctatct

SEQ ID NO: 34705 - DNA, 17 bp, Arabidopsis thaliana
agccgtttgcaaatgca

SEQ ID NO: 34706 - DNA, 17 bp, Arabidopsis thaliana
agccgtttgccaggatt

SEQ ID NO: 34707 - DNA, 17 bp, Arabidopsis thaliana
agccgtttgttaggatt

SEQ ID NO: 34708 - DNA, 17 bp, Arabidopsis thaliana
agccgtttttatctact

SEQ ID NO: 34709 - DNA, 17 bp, Arabidopsis thaliana
agcctaaaacctcctgg

SEQ ID NO: 34710 - DNA, 17 bp, Arabidopsis thaliana
agcctaaacgtttcaga

SEQ ID NO: 34711 - DNA, 17 bp, Arabidopsis thaliana
agcctaaatctagttag

SEQ ID NO: 34712 - DNA, 17 bp, Arabidopsis thaliana
agcctaaatctgtctcg

SEQ ID NO: 34713 - DNA, 17 bp, Arabidopsis thaliana
agcctaacgggtttgca

SEQ ID NO: 34714 - DNA, 17 bp, Arabidopsis thaliana
agcctaactgctaccgc

SEQ ID NO: 34715 - DNA, 17 bp, Arabidopsis thaliana
agcctaagcaactgtgg

SEQ ID NO: 34716 - DNA, 17 bp, Arabidopsis thaliana
agcctaagcatgcttaa

SEQ ID NO: 34717 - DNA, 17 bp, Arabidopsis thaliana
agcctaagcattttttg

SEQ ID NO: 34718 - DNA, 17 bp, Arabidopsis thaliana
agcctaagcgccctact

SEQ ID NO: 34719 - DNA, 17 bp, Arabidopsis thaliana
agcctaagcggatctca

SEQ ID NO: 34720 - DNA, 17 bp, Arabidopsis thaliana
agcctaagcggatctct

SEQ ID NO: 34721 - DNA, 17 bp, Arabidopsis thaliana
agcctaagctcctactg

SEQ ID NO: 34722 - DNA, 17 bp, Arabidopsis thaliana
agcctaagtagtgttgc

SEQ ID NO: 34723 - DNA, 17 bp, Arabidopsis thaliana
agcctaagtagtgtttc

SEQ ID NO: 34724 - DNA, 17 bp, Arabidopsis thaliana
agcctaagtagtgtttg

SEQ ID NO: 34725 - DNA, 17 bp, Arabidopsis thaliana
agcctaagtatggctgg

SEQ ID NO: 34726 - DNA, 17 bp, Arabidopsis thaliana
agcctaagtggtgtggc

SEQ ID NO: 34727 - DNA, 17 bp, Arabidopsis thaliana
agcctaatcatggtcta

SEQ ID NO: 34728 - DNA, 17 bp, Arabidopsis thaliana
agcctaattgtgtgtgt

SEQ ID NO: 34729 - DNA, 17 bp, Arabidopsis thaliana
agcctacacctcaggaa

SEQ ID NO: 34730 - DNA, 17 bp, Arabidopsis thaliana
agcctacatgcggtatg

SEQ ID NO: 34731 - DNA, 17 bp, Arabidopsis thaliana
agcctaccatcgatggg

SEQ ID NO: 34732 - DNA, 17 bp, Arabidopsis thaliana
agcctacctacggtata

SEQ ID NO: 34733 - DNA, 17 bp, Arabidopsis thaliana
agcctacgctctggata

SEQ ID NO: 34734 - DNA, 17 bp, Arabidopsis thaliana
agcctacggatcggtcc

SEQ ID NO: 34735 - DNA, 17 bp, Arabidopsis thaliana
agcctacggggtattag

SEQ ID NO: 34736 - DNA, 17 bp, Arabidopsis thaliana
agcctactgtctgactc

SEQ ID NO: 34737 - DNA, 17 bp, Arabidopsis thaliana
agcctaggaagaagttt

SEQ ID NO: 34738 - DNA, 17 bp, Arabidopsis thaliana
agcctaggagatcagtg

SEQ ID NO: 34739 - DNA, 17 bp, Arabidopsis thaliana
agcctaggcgcgattaa

SEQ ID NO: 34740 - DNA, 17 bp, Arabidopsis thaliana
agcctaggcgcgattag

SEQ ID NO: 34741 - DNA, 17 bp, Arabidopsis thaliana
agcctaggcgggattag

SEQ ID NO: 34742 - DNA, 17 bp, Arabidopsis thaliana
agcctagtggtgagaac

SEQ ID NO: 34743 - DNA, 17 bp, Arabidopsis thaliana
agcctagttttggattc

SEQ ID NO: 34744 - DNA, 17 bp, Arabidopsis thaliana
agcctagttttggattt

SEQ ID NO: 34745 - DNA, 17 bp, Arabidopsis thaliana
agcctatcaggtttgca

SEQ ID NO: 34746 - DNA, 17 bp, Arabidopsis thaliana
agcctatcaggtttgga

SEQ ID NO: 34747 - DNA, 17 bp, Arabidopsis thaliana
agcctatcattaccgag

SEQ ID NO: 34748 - DNA, 17 bp, Arabidopsis thaliana
agcctatcgtatcagat

SEQ ID NO: 34749 - DNA, 17 bp, Arabidopsis thaliana
agcctatctgcaaactc

SEQ ID NO: 34750 - DNA, 17 bp, Arabidopsis thaliana
agcctatgagtaaccca

SEQ ID NO: 34751 - DNA, 17 bp, Arabidopsis thaliana
agcctatgagtgaattt

SEQ ID NO: 34752 - DNA, 17 bp, Arabidopsis thaliana
agcctatgattgaccca

SEQ ID NO: 34753 - DNA, 17 bp, Arabidopsis thaliana
agcctatgattggccca

SEQ ID NO: 34754 - DNA, 17 bp, Arabidopsis thaliana
agcctatgggccgcctg

SEQ ID NO: 34755 - DNA, 17 bp, Arabidopsis thaliana
agcctatggggtcgctt

SEQ ID NO: 34756 - DNA, 17 bp, Arabidopsis thaliana
agcctattagctcagtg

SEQ ID NO: 34757 - DNA, 17 bp, Arabidopsis thaliana
agcctattagctcagtt

SEQ ID NO: 34758 - DNA, 17 bp, Arabidopsis thaliana
agcctattgttggacta

SEQ ID NO: 34759 - DNA, 17 bp, Arabidopsis thaliana
agcctatttggttcttt

SEQ ID NO: 34760 - DNA, 17 bp, Arabidopsis thaliana
agcctcaaaggccctac

SEQ ID NO: 34761 - DNA, 17 bp, Arabidopsis thaliana
agcctcaacaagattac

SEQ ID NO: 34762 - DNA, 17 bp, Arabidopsis thaliana
agcctcaactttcattg

SEQ ID NO: 34763 - DNA, 17 bp, Arabidopsis thaliana
agcctcaatactatcaa

SEQ ID NO: 34764 - DNA, 17 bp, Arabidopsis thaliana
agcctcaatcatctaca

SEQ ID NO: 34765 - DNA, 17 bp, Arabidopsis thaliana
agcctcactcaagattc

SEQ ID NO: 34766 - DNA, 17 bp, Arabidopsis thaliana
agcctcactgctttggt

SEQ ID NO: 34767 - DNA, 17 bp, Arabidopsis thaliana
agcctcagaccacgctg

SEQ ID NO: 34768 - DNA, 17 bp, Arabidopsis thaliana
agcctcagaccacggtg

SEQ ID NO: 34769 - DNA, 17 bp, Arabidopsis thaliana
agcctcagcgggcgctg

SEQ ID NO: 34770 - DNA, 17 bp, Arabidopsis thaliana
agcctcaggagcagcag

SEQ ID NO: 34771 - DNA, 17 bp, Arabidopsis thaliana
agcctcaggagggatag

SEQ ID NO: 34772 - DNA, 17 bp, Arabidopsis thaliana
agcctcagtcattggct

SEQ ID NO: 34773 - DNA, 17 bp, Arabidopsis thaliana
agcctcatacctgaatt

SEQ ID NO: 34774 - DNA, 17 bp, Arabidopsis thaliana
agcctcatattcagacg

SEQ ID NO: 34775 - DNA, 17 bp, Arabidopsis thaliana
agcctcatcaccaacaa

SEQ ID NO: 34776 - DNA, 17 bp, Arabidopsis thaliana
agcctcatcaccaacac

SEQ ID NO: 34777 - DNA, 17 bp, Arabidopsis thaliana
agcctcatgaagctagc

SEQ ID NO: 34778 - DNA, 17 bp, Arabidopsis thaliana
agcctcatggattcgtg

SEQ ID NO: 34779 - DNA, 17 bp, Arabidopsis thaliana
agcctcatgtgaccaag

SEQ ID NO: 34780 - DNA, 17 bp, Arabidopsis thaliana
agcctccacatcgatga

SEQ ID NO: 34781 - DNA, 17 bp, Arabidopsis thaliana
agcctccacttaagggc

SEQ ID NO: 34782 - DNA, 17 bp, Arabidopsis thaliana
agcctccatctccgccg

SEQ ID NO: 34783 - DNA, 17 bp, Arabidopsis thaliana
agcctcccggacgtggc

SEQ ID NO: 34784 - DNA, 17 bp, Arabidopsis thaliana
agcctccgagaaccttc

SEQ ID NO: 34785 - DNA, 17 bp, Arabidopsis thaliana
agcctccgatacaaagt

SEQ ID NO: 34786 - DNA, 17 bp, Arabidopsis thaliana
agcctccggctcgttct

SEQ ID NO: 34787 - DNA, 17 bp, Arabidopsis thaliana
agcctccgggttagcag

SEQ ID NO: 34788 - DNA, 17 bp, Arabidopsis thaliana
agcctccggtaggaaga

SEQ ID NO: 34789 - DNA, 17 bp, Arabidopsis thaliana
agcctccttggttcaat

SEQ ID NO: 34790 - DNA, 17 bp, Arabidopsis thaliana
agcctcgaagacgatca

SEQ ID NO: 34791 - DNA, 17 bp, Arabidopsis thaliana
agcctcgacagggcatc

SEQ ID NO: 34792 - DNA, 17 bp, Arabidopsis thaliana
agcctcgcgacgatcac

SEQ ID NO: 34793 - DNA, 17 bp, Arabidopsis thaliana
agcctcgcgtgaccaaa

SEQ ID NO: 34794 - DNA, 17 bp, Arabidopsis thaliana
agcctcgcgtgacccaa

SEQ ID NO: 34795 - DNA, 17 bp, Arabidopsis thaliana
agcctcgctcagatttg

SEQ ID NO: 34796 - DNA, 17 bp, Arabidopsis thaliana
agcctcggagcgagatc

SEQ ID NO: 34797 - DNA, 17 bp, Arabidopsis thaliana
agcctcggtatttcgcc

SEQ ID NO: 34798 - DNA, 17 bp, Arabidopsis thaliana
agcctcgtgaatctggg

SEQ ID NO: 34799 - DNA, 17 bp, Arabidopsis thaliana
agcctcgttcggaccgc

SEQ ID NO: 34800 - DNA, 17 bp, Arabidopsis thaliana
agcctcgtttccttgcg

SEQ ID NO: 34801 - DNA, 17 bp, Arabidopsis thaliana
agcctctaagtcagaat

SEQ ID NO: 34802 - DNA, 17 bp, Arabidopsis thaliana
agcctctacggatgggc

SEQ ID NO: 34803 - DNA, 17 bp, Arabidopsis thaliana
agcctctacttaagggc

SEQ ID NO: 34804 - DNA, 17 bp, Arabidopsis thaliana
agcctctagccaggcga

SEQ ID NO: 34805 - DNA, 17 bp, Arabidopsis thaliana
agcctctagccaggtga

SEQ ID NO: 34806 - DNA, 17 bp, Arabidopsis thaliana
agcctctataagcttcc

SEQ ID NO: 34807 - DNA, 17 bp, Arabidopsis thaliana
agcctctccacctattg

SEQ ID NO: 34808 - DNA, 17 bp, Arabidopsis thaliana
agcctctccatttgccg

SEQ ID NO: 34809 - DNA, 17 bp, Arabidopsis thaliana
agcctctcgacaacgca

SEQ ID NO: 34810 - DNA, 17 bp, Arabidopsis thaliana
agcctctcgtacgtgac

SEQ ID NO: 34811 - DNA, 17 bp, Arabidopsis thaliana
agcctctcgtcgaaagc

SEQ ID NO: 34812 - DNA, 17 bp, Arabidopsis thaliana
agcctctgacgctgctg

SEQ ID NO: 34813 - DNA, 17 bp, Arabidopsis thaliana
agcctctgactggttac

SEQ ID NO: 34814 - DNA, 17 bp, Arabidopsis thaliana
agcctctgcctggttgt

SEQ ID NO: 34815 - DNA, 17 bp, Arabidopsis thaliana
agcctctgctcgtgatg

SEQ ID NO: 34816 - DNA, 17 bp, Arabidopsis thaliana
agcctctggtcgatgga

SEQ ID NO: 34817 - DNA, 17 bp, Arabidopsis thaliana
agcctctgtggtagccc

SEQ ID NO: 34818 - DNA, 17 bp, Arabidopsis thaliana
agcctcttagatcattt

SEQ ID NO: 34819 - DNA, 17 bp, Arabidopsis thaliana
agcctcttaggttgctt

SEQ ID NO: 34820 - DNA, 17 bp, Arabidopsis thaliana
agcctcttcctgacatc

SEQ ID NO: 34821 - DNA, 17 bp, Arabidopsis thaliana
agcctcttggtccaatg

SEQ ID NO: 34822 - DNA, 17 bp, Arabidopsis thaliana
agcctcttgtatgctga

SEQ ID NO: 34823 - DNA, 17 bp, Arabidopsis thaliana
agcctcttgtttctggg

SEQ ID NO: 34824 - DNA, 17 bp, Arabidopsis thaliana
agcctcttttggaacct

SEQ ID NO: 34825 - DNA, 17 bp, Arabidopsis thaliana
agcctcttttgggagaa

SEQ ID NO: 34826 - DNA, 17 bp, Arabidopsis thaliana
agcctgaactttcaaat

SEQ ID NO: 34827 - DNA, 17 bp, Arabidopsis thaliana
agcctgaagttcagacc

SEQ ID NO: 34828 - DNA, 17 bp, Arabidopsis thaliana
agcctgaagttgagagc

SEQ ID NO: 34829 - DNA, 17 bp, Arabidopsis thaliana
agcctgaagttgcacag

SEQ ID NO: 34830 - DNA, 17 bp, Arabidopsis thaliana
agcctgactcaaagtga

SEQ ID NO: 34831 - DNA, 17 bp, Arabidopsis thaliana
agcctgagatcgaggtt

SEQ ID NO: 34832 - DNA, 17 bp, Arabidopsis thaliana
agcctgagtttgtggag

SEQ ID NO: 34833 - DNA, 17 bp, Arabidopsis thaliana
agcctgatactcgatcg

SEQ ID NO: 34834 - DNA, 17 bp, Arabidopsis thaliana
agcctgattaacaacct

SEQ ID NO: 34835 - DNA, 17 bp, Arabidopsis thaliana
agcctgattaacaccat

SEQ ID NO: 34836 - DNA, 17 bp, Arabidopsis thaliana
agcctgattgacatacc

SEQ ID NO: 34837 - DNA, 17 bp, Arabidopsis thaliana
agcctgcagtttttcga

SEQ ID NO: 34838 - DNA, 17 bp, Arabidopsis thaliana
agcctgcccaccctgga

SEQ ID NO: 34839 - DNA, 17 bp, Arabidopsis thaliana
agcctgcgacttggcgc

SEQ ID NO: 34840 - DNA, 17 bp, Arabidopsis thaliana
agcctgcgcgatgaccc

SEQ ID NO: 34841 - DNA, 17 bp, Arabidopsis thaliana
agcctgcggcttaattt

SEQ ID NO: 34842 - DNA, 17 bp, Arabidopsis thaliana
agcctgctaactagcta

SEQ ID NO: 34843 - DNA, 17 bp, Arabidopsis thaliana
agcctgctctctctctt

SEQ ID NO: 34844 - DNA, 17 bp, Arabidopsis thaliana
agcctgctgtgacagct

SEQ ID NO: 34845 - DNA, 17 bp, Arabidopsis thaliana
agcctgcttcctgcgat

SEQ ID NO: 34846 - DNA, 17 bp, Arabidopsis thaliana
agcctgcttgcagaatc

SEQ ID NO: 34847 - DNA, 17 bp, Arabidopsis thaliana
agcctggacatgtgaga

SEQ ID NO: 34848 - DNA, 17 bp, Arabidopsis thaliana
agcctggctccctgtat

SEQ ID NO: 34849 - DNA, 17 bp, Arabidopsis thaliana
agcctgggtgatctatc

SEQ ID NO: 34850 - DNA, 17 bp, Arabidopsis thaliana
agcctggtcgttgtgtt

SEQ ID NO: 34851 - DNA, 17 bp, Arabidopsis thaliana
agcctggtgatgatgat

SEQ ID NO: 34852 - DNA, 17 bp, Arabidopsis thaliana
agcctggttgatcctgc

SEQ ID NO: 34853 - DNA, 17 bp, Arabidopsis thaliana
agcctggttgcggagct

SEQ ID NO: 34854 - DNA, 17 bp, Arabidopsis thaliana
agcctggtttgcaatga

SEQ ID NO: 34855 - DNA, 17 bp, Arabidopsis thaliana
agcctgtagtccaacgg

SEQ ID NO: 34856 - DNA, 17 bp, Arabidopsis thaliana
agcctgtcgctaagatt

SEQ ID NO: 34857 - DNA, 17 bp, Arabidopsis thaliana
agcctgtgatgtttgag

SEQ ID NO: 34858 - DNA, 17 bp, Arabidopsis thaliana
agcctgtgtttggcccc

SEQ ID NO: 34859 - DNA, 17 bp, Arabidopsis thaliana
agccttacaggagaaag

SEQ ID NO: 34860 - DNA, 17 bp, Arabidopsis thaliana
agccttagccctatttg

SEQ ID NO: 34861 - DNA, 17 bp, Arabidopsis thaliana
agccttagccctgtttg

SEQ ID NO: 34862 - DNA, 17 bp, Arabidopsis thaliana
agccttagcccttttgt

SEQ ID NO: 34863 - DNA, 17 bp, Arabidopsis thaliana
agccttaggccaggggc

SEQ ID NO: 34864 - DNA, 17 bp, Arabidopsis thaliana
agccttaggctatgccg

SEQ ID NO: 34865 - DNA, 17 bp, Arabidopsis thaliana
agccttagtgtggggtt

SEQ ID NO: 34866 - DNA, 17 bp, Arabidopsis thaliana
agccttatttcatcgcg

SEQ ID NO: 34867 - DNA, 17 bp, Arabidopsis thaliana
agccttatttggaagaa

SEQ ID NO: 34868 - DNA, 17 bp, Arabidopsis thaliana
agccttattttcttttc

SEQ ID NO: 34869 - DNA, 17 bp, Arabidopsis thaliana
agccttcaaatcctgga

SEQ ID NO: 34870 - DNA, 17 bp, Arabidopsis thaliana
agccttcaaatgtcatt

SEQ ID NO: 34871 - DNA, 17 bp, Arabidopsis thaliana
agccttcacccagagcc

SEQ ID NO: 34872 - DNA, 17 bp, Arabidopsis thaliana
agccttcacggactatg

SEQ ID NO: 34873 - DNA, 17 bp, Arabidopsis thaliana
agccttcactaaatctc

SEQ ID NO: 34874 - DNA, 17 bp, Arabidopsis thaliana
agccttcaggaccgtaa

SEQ ID NO: 34875 - DNA, 17 bp, Arabidopsis thaliana
agccttcatcggagaag

SEQ ID NO: 34876 - DNA, 17 bp, Arabidopsis thaliana
agccttcatggtgtagc

SEQ ID NO: 34877 - DNA, 17 bp, Arabidopsis thaliana
agccttcattcgtagac

SEQ ID NO: 34878 - DNA, 17 bp, Arabidopsis thaliana
agccttcattgtcacct

SEQ ID NO: 34879 - DNA, 17 bp, Arabidopsis thaliana
agccttccgactgttca

SEQ ID NO: 34880 - DNA, 17 bp, Arabidopsis thaliana
agccttcctttggtatc

SEQ ID NO: 34881 - DNA, 17 bp, Arabidopsis thaliana
agccttcgacggtatac

SEQ ID NO: 34882 - DNA, 17 bp, Arabidopsis thaliana
agccttctatgtcgttg

SEQ ID NO: 34883 - DNA, 17 bp, Arabidopsis thaliana
agccttctggccgaggg

SEQ ID NO: 34884 - DNA, 17 bp, Arabidopsis thaliana
agccttcttgggttcgt

SEQ ID NO: 34885 - DNA, 17 bp, Arabidopsis thaliana
agccttctttattacca

SEQ ID NO: 34886 - DNA, 17 bp, Arabidopsis thaliana
agccttgaaagcttcag

SEQ ID NO: 34887 - DNA, 17 bp, Arabidopsis thaliana
agccttgaactattcag

SEQ ID NO: 34888 - DNA, 17 bp, Arabidopsis thaliana
agccttgaactattgag

SEQ ID NO: 34889 - DNA, 17 bp, Arabidopsis thaliana
agccttgaatgatgaat

SEQ ID NO: 34890 - DNA, 17 bp, Arabidopsis thaliana
agccttgaatgggtgaa

SEQ ID NO: 34891 - DNA, 17 bp, Arabidopsis thaliana
agccttgaccacaaagt

SEQ ID NO: 34892 - DNA, 17 bp, Arabidopsis thaliana
agccttgactctagtcc

SEQ ID NO: 34893 - DNA, 17 bp, Arabidopsis thaliana
agccttgagaatgggaa

SEQ ID NO: 34894 - DNA, 17 bp, Arabidopsis thaliana
agccttgagatcatctt

SEQ ID NO: 34895 - DNA, 17 bp, Arabidopsis thaliana
agccttgatgactcgac

SEQ ID NO: 34896 - DNA, 17 bp, Arabidopsis thaliana
agccttgatgattcgac

SEQ ID NO: 34897 - DNA, 17 bp, Arabidopsis thaliana
agccttgcacagcgcca

SEQ ID NO: 34898 - DNA, 17 bp, Arabidopsis thaliana
agccttgcgattgtttt

SEQ ID NO: 34899 - DNA, 17 bp, Arabidopsis thaliana
agccttgcgttcggccg

SEQ ID NO: 34900 - DNA, 17 bp, Arabidopsis thaliana
agccttggaaatgctct

SEQ ID NO: 34901 - DNA, 17 bp, Arabidopsis thaliana
agccttggattggttct

SEQ ID NO: 34902 - DNA, 17 bp, Arabidopsis thaliana
agccttggcctgtgata

SEQ ID NO: 34903 - DNA, 17 bp, Arabidopsis thaliana
agccttgggatgggtcg

SEQ ID NO: 34904 - DNA, 17 bp, Arabidopsis thaliana
agccttggtgactcgac

SEQ ID NO: 34905 - DNA, 17 bp, Arabidopsis thaliana
agccttggtgcaggtcg

SEQ ID NO: 34906 - DNA, 17 bp, Arabidopsis thaliana
agccttggttgtcttgc

SEQ ID NO: 34907 - DNA, 17 bp, Arabidopsis thaliana
agccttgtaagcatttt

SEQ ID NO: 34908 - DNA, 17 bp, Arabidopsis thaliana
agccttgtaatcggtgg

SEQ ID NO: 34909 - DNA, 17 bp, Arabidopsis thaliana
agccttgtcatctcggt

SEQ ID NO: 34910 - DNA, 17 bp, Arabidopsis thaliana
agccttgtcgctaagat

SEQ ID NO: 34911 - DNA, 17 bp, Arabidopsis thaliana
agccttgtcgtctcggt

SEQ ID NO: 34912 - DNA, 17 bp, Arabidopsis thaliana
agccttgtcgtctcgtt

SEQ ID NO: 34913 - DNA, 17 bp, Arabidopsis thaliana
agccttgtggatgaaga

SEQ ID NO: 34914 - DNA, 17 bp, Arabidopsis thaliana
agccttgtgtcaggaaa

SEQ ID NO: 34915 - DNA, 17 bp, Arabidopsis thaliana
agccttgtgttctagac

SEQ ID NO: 34916 - DNA, 17 bp, Arabidopsis thaliana
agccttgttacgactga

SEQ ID NO: 34917 - DNA, 17 bp, Arabidopsis thaliana
agccttgttcgtttctc

SEQ ID NO: 34918 - DNA, 17 bp, Arabidopsis thaliana
agccttgttcttcatct

SEQ ID NO: 34919 - DNA, 17 bp, Arabidopsis thaliana
agccttgttctttgcag

SEQ ID NO: 34920 - DNA, 17 bp, Arabidopsis thaliana
agcctttaagaactggt

SEQ ID NO: 34921 - DNA, 17 bp, Arabidopsis thaliana
agcctttaagatccgct

SEQ ID NO: 34922 - DNA, 17 bp, Arabidopsis thaliana
agcctttaagatccggt

SEQ ID NO: 34923 - DNA, 17 bp, Arabidopsis thaliana
agcctttcatttctcag

SEQ ID NO: 34924 - DNA, 17 bp, Arabidopsis thaliana
agcctttcgcaggaggt

SEQ ID NO: 34925 - DNA, 17 bp, Arabidopsis thaliana
agcctttctgactcggc

SEQ ID NO: 34926 - DNA, 17 bp, Arabidopsis thaliana
agcctttctgcaggtct

SEQ ID NO: 34927 - DNA, 17 bp, Arabidopsis thaliana
agcctttgaaggaagat

SEQ ID NO: 34928 - DNA, 17 bp, Arabidopsis thaliana
agcctttgaatgcttag

SEQ ID NO: 34929 - DNA, 17 bp, Arabidopsis thaliana
agcctttgactcgagtt

SEQ ID NO: 34930 - DNA, 17 bp, Arabidopsis thaliana
agcctttgagctctcag

SEQ ID NO: 34931 - DNA, 17 bp, Arabidopsis thaliana
agcctttgcaatcttct

SEQ ID NO: 34932 - DNA, 17 bp, Arabidopsis thaliana
agcctttgcaggtggag

SEQ ID NO: 34933 - DNA, 17 bp, Arabidopsis thaliana
agcctttgccaaatatt

SEQ ID NO: 34934 - DNA, 17 bp, Arabidopsis thaliana
agcctttgccgattgtt

SEQ ID NO: 34935 - DNA, 17 bp, Arabidopsis thaliana
agcctttgcctttttct

SEQ ID NO: 34936 - DNA, 17 bp, Arabidopsis thaliana
agcctttgggctttccg

SEQ ID NO: 34937 - DNA, 17 bp, Arabidopsis thaliana
agcctttggtccaagtt

SEQ ID NO: 34938 - DNA, 17 bp, Arabidopsis thaliana
agcctttgtcgctaaga

SEQ ID NO: 34939 - DNA, 17 bp, Arabidopsis thaliana
agcctttgtggggtgtc

SEQ ID NO: 34940 - DNA, 17 bp, Arabidopsis thaliana
agccttttcgtgatctt

SEQ ID NO: 34941 - DNA, 17 bp, Arabidopsis thaliana
agccttttctagaggcg

SEQ ID NO: 34942 - DNA, 17 bp, Arabidopsis thaliana
agccttttctgacactt

SEQ ID NO: 34943 - DNA, 17 bp, Arabidopsis thaliana
agccttttgaatgatga

SEQ ID NO: 34944 - DNA, 17 bp, Arabidopsis thaliana
agccttttgatctgtgg

SEQ ID NO: 34945 - DNA, 17 bp, Arabidopsis thaliana
agccttttgggaccaac

SEQ ID NO: 34946 - DNA, 17 bp, Arabidopsis thaliana
agccttttgtcgctaaa

SEQ ID NO: 34947 - DNA, 17 bp, Arabidopsis thaliana
agccttttgtcgctaag

SEQ ID NO: 34948 - DNA, 17 bp, Arabidopsis thaliana
agccttttgtgttgtac

SEQ ID NO: 34949 - DNA, 17 bp, Arabidopsis thaliana
agcctttttctatcgac

SEQ ID NO: 34950 - DNA, 17 bp, Arabidopsis thaliana
agcctttttgtgtgacg

SEQ ID NO: 34951 - DNA, 17 bp, Arabidopsis thaliana
agcgaaaaattccacta

SEQ ID NO: 34952 - DNA, 17 bp, Arabidopsis thaliana
agcgaaaaccgcatagg

SEQ ID NO: 34953 - DNA, 17 bp, Arabidopsis thaliana
agcgaaaacggatctga

SEQ ID NO: 34954 - DNA, 17 bp, Arabidopsis thaliana
agcgaaaacggcaagat

SEQ ID NO: 34955 - DNA, 17 bp, Arabidopsis thaliana
agcgaaaagaggcagcc

SEQ ID NO: 34956 - DNA, 17 bp, Arabidopsis thaliana
agcgaaaagccgtgaag

SEQ ID NO: 34957 - DNA, 17 bp, Arabidopsis thaliana
agcgaaaatggtttcaa

SEQ ID NO: 34958 - DNA, 17 bp, Arabidopsis thaliana
agcgaaaatggttttgc

SEQ ID NO: 34959 - DNA, 17 bp, Arabidopsis thaliana
agcgaaacaaccgtgat

SEQ ID NO: 34960 - DNA, 17 bp, Arabidopsis thaliana
agcgaaacagactagga

SEQ ID NO: 34961 - DNA, 17 bp, Arabidopsis thaliana
agcgaaacagttatggc

SEQ ID NO: 34962 - DNA, 17 bp, Arabidopsis thaliana
agcgaaactgacgcgcc

SEQ ID NO: 34963 - DNA, 17 bp, Arabidopsis thaliana
agcgaaagaggggattt

SEQ ID NO: 34964 - DNA, 17 bp, Arabidopsis thaliana
agcgaaagatcacgggt

SEQ ID NO: 34965 - DNA, 17 bp, Arabidopsis thaliana
agcgaaagatcactggt

SEQ ID NO: 34966 - DNA, 17 bp, Arabidopsis thaliana
agcgaaagatttagcga

SEQ ID NO: 34967 - DNA, 17 bp, Arabidopsis thaliana
agcgaaagctagcaaca

SEQ ID NO: 34968 - DNA, 17 bp, Arabidopsis thaliana
agcgaaagttgacagcg

SEQ ID NO: 34969 - DNA, 17 bp, Arabidopsis thaliana
agcgaaatatggatggg

SEQ ID NO: 34970 - DNA, 17 bp, Arabidopsis thaliana
agcgaaatctaagtgtt

SEQ ID NO: 34971 - DNA, 17 bp, Arabidopsis thaliana
agcgaaatgatggtaca

SEQ ID NO: 34972 - DNA, 17 bp, Arabidopsis thaliana
agcgaaatgcgatactt

SEQ ID NO: 34973 - DNA, 17 bp, Arabidopsis thaliana
agcgaaattccttgtcg

SEQ ID NO: 34974 - DNA, 17 bp, Arabidopsis thaliana
agcgaaatttgtggtga

SEQ ID NO: 34975 - DNA, 17 bp, Arabidopsis thaliana
agcgaacaaaaccgtct

SEQ ID NO: 34976 - DNA, 17 bp, Arabidopsis thaliana
agcgaacaagtaccgcg

SEQ ID NO: 34977 - DNA, 17 bp, Arabidopsis thaliana
agcgaacaggcttattt

SEQ ID NO: 34978 - DNA, 17 bp, Arabidopsis thaliana
agcgaacccttagagca

SEQ ID NO: 34979 - DNA, 17 bp, Arabidopsis thaliana
agcgaaccgacttctcg

SEQ ID NO: 34980 - DNA, 17 bp, Arabidopsis thaliana
agcgaacctgcggaagg

SEQ ID NO: 34981 - DNA, 17 bp, Arabidopsis thaliana
agcgaacgcctgtgaga

SEQ ID NO: 34982 - DNA, 17 bp, Arabidopsis thaliana
agcgaacggtgatccat

SEQ ID NO: 34983 - DNA, 17 bp, Arabidopsis thaliana
agcgaacgtgagcatga

SEQ ID NO: 34984 - DNA, 17 bp, Arabidopsis thaliana
agcgaactcaacagtta

SEQ ID NO: 34985 - DNA, 17 bp, Arabidopsis thaliana
agcgaagaacaggttta

SEQ ID NO: 34986 - DNA, 17 bp, Arabidopsis thaliana
agcgaagaagttcagtg

SEQ ID NO: 34987 - DNA, 17 bp, Arabidopsis thaliana
agcgaagaccgaatatt

SEQ ID NO: 34988 - DNA, 17 bp, Arabidopsis thaliana
agcgaagatggcggtgg

SEQ ID NO: 34989 - DNA, 17 bp, Arabidopsis thaliana
agcgaagatgttagccg

SEQ ID NO: 34990 - DNA, 17 bp, Arabidopsis thaliana
agcgaagatttctgatt

SEQ ID NO: 34991 - DNA, 17 bp, Arabidopsis thaliana
agcgaagcccattctca

SEQ ID NO: 34992 - DNA, 17 bp, Arabidopsis thaliana
agcgaagcccgtaatct

SEQ ID NO: 34993 - DNA, 17 bp, Arabidopsis thaliana
agcgaagctgaggccgg

SEQ ID NO: 34994 - DNA, 17 bp, Arabidopsis thaliana
agcgaaggctggctact

SEQ ID NO: 34995 - DNA, 17 bp, Arabidopsis thaliana
agcgaaggctgttgtag

SEQ ID NO: 34996 - DNA, 17 bp, Arabidopsis thaliana
agcgaaggcttggctca

SEQ ID NO: 34997 - DNA, 17 bp, Arabidopsis thaliana
agcgaaggtcatgagtt

SEQ ID NO: 34998 - DNA, 17 bp, Arabidopsis thaliana
agcgaaggttagaggtc

SEQ ID NO: 34999 - DNA, 17 bp, Arabidopsis thaliana
agcgaagtagtaccgtg

SEQ ID NO: 35000 - DNA, 17 bp, Arabidopsis thaliana
agcgaagtgcacgaagg

SEQ ID NO: 35001 - DNA, 17 bp, Arabidopsis thaliana
agcgaagttttgaggtc

SEQ ID NO: 35002 - DNA, 17 bp, Arabidopsis thaliana
agcgaatcaagcggtac

SEQ ID NO: 35003 - DNA, 17 bp, Arabidopsis thaliana
agcgaatcacaggactc

SEQ ID NO: 35004 - DNA, 17 bp, Arabidopsis thaliana
agcgaatcgatttggcc

SEQ ID NO: 35005 - DNA, 17 bp, Arabidopsis thaliana
agcgaatcgcgcaaatc

SEQ ID NO: 35006 - DNA, 17 bp, Arabidopsis thaliana
agcgaatctcgataagg

SEQ ID NO: 35007 - DNA, 17 bp, Arabidopsis thaliana
agcgaatctggaggcgg

SEQ ID NO: 35008 - DNA, 17 bp, Arabidopsis thaliana
agcgaatctgtaattgc

SEQ ID NO: 35009 - DNA, 17 bp, Arabidopsis thaliana
agcgaatgagttacttg

SEQ ID NO: 35010 - DNA, 17 bp, Arabidopsis thaliana
agcgaatggagacggag

SEQ ID NO: 35011 - DNA, 17 bp, Arabidopsis thaliana
agcgaattgaaatcaac

SEQ ID NO: 35012 - DNA, 17 bp, Arabidopsis thaliana
agcgaattggatggtcg

SEQ ID NO: 35013 - DNA, 17 bp, Arabidopsis thaliana
agcgaattggccgagct

SEQ ID NO: 35014 - DNA, 17 bp, Arabidopsis thaliana
agcgaattgtcatgatg

SEQ ID NO: 35015 - DNA, 17 bp, Arabidopsis thaliana
agcgaattgttgggcca

SEQ ID NO: 35016 - DNA, 17 bp, Arabidopsis thaliana
agcgacaaaaattcggc

SEQ ID NO: 35017 - DNA, 17 bp, Arabidopsis thaliana
agcgacaaagaaacgaa

SEQ ID NO: 35018 - DNA, 17 bp, Arabidopsis thaliana
agcgacaaccttaccag

SEQ ID NO: 35019 - DNA, 17 bp, Arabidopsis thaliana
agcgacaagacttcttg

SEQ ID NO: 35020 - DNA, 17 bp, Arabidopsis thaliana
agcgacaagcaaacgaa

SEQ ID NO: 35021 - DNA, 17 bp, Arabidopsis thaliana
agcgacaaggaaacgaa

SEQ ID NO: 35022 - DNA, 17 bp, Arabidopsis thaliana
agcgacaatcagttctc

SEQ ID NO: 35023 - DNA, 17 bp, Arabidopsis thaliana
agcgacaatcattggcg

SEQ ID NO: 35024 - DNA, 17 bp, Arabidopsis thaliana
agcgacaatcatttgcg

SEQ ID NO: 35025 - DNA, 17 bp, Arabidopsis thaliana
agcgacaatcgccagcg

SEQ ID NO: 35026 - DNA, 17 bp, Arabidopsis thaliana
agcgacaatcgctaaaa

SEQ ID NO: 35027 - DNA, 17 bp, Arabidopsis thaliana
agcgacaattcctcttt

SEQ ID NO: 35028 - DNA, 17 bp, Arabidopsis thaliana
agcgacacatgtgccct

SEQ ID NO: 35029 - DNA, 17 bp, Arabidopsis thaliana
agcgacacatgtgtcat

SEQ ID NO: 35030 - DNA, 17 bp, Arabidopsis thaliana
agcgacacggaaacgaa

SEQ ID NO: 35031 - DNA, 17 bp, Arabidopsis thaliana
agcgacagagaaacgaa

SEQ ID NO: 35032 - DNA, 17 bp, Arabidopsis thaliana
agcgacagatctaaacg

SEQ ID NO: 35033 - DNA, 17 bp, Arabidopsis thaliana
agcgacagattccatcg

SEQ ID NO: 35034 - DNA, 17 bp, Arabidopsis thaliana
agcgacagcaaccagcg

SEQ ID NO: 35035 - DNA, 17 bp, Arabidopsis thaliana
agcgacagccgccagcc

SEQ ID NO: 35036 - DNA, 17 bp, Arabidopsis thaliana
agcgacagcgacagcaa

SEQ ID NO: 35037 - DNA, 17 bp, Arabidopsis thaliana
agcgacagcgactaaaa

SEQ ID NO: 35038 - DNA, 17 bp, Arabidopsis thaliana
agcgacagcgatcaaaa

SEQ ID NO: 35039 - DNA, 17 bp, Arabidopsis thaliana
agcgacagctgcggcaa

SEQ ID NO: 35040 - DNA, 17 bp, Arabidopsis thaliana
agcgacaggaaaacgaa

SEQ ID NO: 35041 - DNA, 17 bp, Arabidopsis thaliana
agcgacaggcaaacaaa

SEQ ID NO: 35042 - DNA, 17 bp, Arabidopsis thaliana
agcgacaggcaaacgaa

SEQ ID NO: 35043 - DNA, 17 bp, Arabidopsis thaliana
agcgacaggcaaatgaa

SEQ ID NO: 35044 - DNA, 17 bp, Arabidopsis thaliana
agcgacagggaaacgaa

SEQ ID NO: 35045 - DNA, 17 bp, Arabidopsis thaliana
agcgacagtaaccagcg

SEQ ID NO: 35046 - DNA, 17 bp, Arabidopsis thaliana
agcgacagtcgccaacg

SEQ ID NO: 35047 - DNA, 17 bp, Arabidopsis thaliana
agcgacagtcgccagcg

SEQ ID NO: 35048 - DNA, 17 bp, Arabidopsis thaliana
agcgacagtcgccaggg

SEQ ID NO: 35049 - DNA, 17 bp, Arabidopsis thaliana
agcgacagtgactgggc

SEQ ID NO: 35050 - DNA, 17 bp, Arabidopsis thaliana
agcgacagttgccagcg

SEQ ID NO: 35051 - DNA, 17 bp, Arabidopsis thaliana
agcgacatacaactgtc

SEQ ID NO: 35052 - DNA, 17 bp, Arabidopsis thaliana
agcgacatctccgatcc

SEQ ID NO: 35053 - DNA, 17 bp, Arabidopsis thaliana
agcgacatctccgatct

SEQ ID NO: 35054 - DNA, 17 bp, Arabidopsis thaliana
agcgaccaaaagttgtt

SEQ ID NO: 35055 - DNA, 17 bp, Arabidopsis thaliana
agcgaccaatcagtgcc

SEQ ID NO: 35056 - DNA, 17 bp, Arabidopsis thaliana
agcgaccagcgacagca

SEQ ID NO: 35057 - DNA, 17 bp, Arabidopsis thaliana
agcgaccagcgaccagc

SEQ ID NO: 35058 - DNA, 17 bp, Arabidopsis thaliana
agcgaccatctcctcgc

SEQ ID NO: 35059 - DNA, 17 bp, Arabidopsis thaliana
agcgaccccaggtcagg

SEQ ID NO: 35060 - DNA, 17 bp, Arabidopsis thaliana
agcgaccgactgatccg

SEQ ID NO: 35061 - DNA, 17 bp, Arabidopsis thaliana
agcgaccgatcgcagcg

SEQ ID NO: 35062 - DNA, 17 bp, Arabidopsis thaliana
agcgaccgccgcgccct

SEQ ID NO: 35063 - DNA, 17 bp, Arabidopsis thaliana
agcgaccgggtccgagg

SEQ ID NO: 35064 - DNA, 17 bp, Arabidopsis thaliana
agcgaccgtgggggttt

SEQ ID NO: 35065 - DNA, 17 bp, Arabidopsis thaliana
agcgacctaatctgggc

SEQ ID NO: 35066 - DNA, 17 bp, Arabidopsis thaliana
agcgacctctaagtttc

SEQ ID NO: 35067 - DNA, 17 bp, Arabidopsis thaliana
agcgacctgcgattata

SEQ ID NO: 35068 - DNA, 17 bp, Arabidopsis thaliana
agcgacctgggttcgac

SEQ ID NO: 35069 - DNA, 17 bp, Arabidopsis thaliana
agcgacctgggttcggc

SEQ ID NO: 35070 - DNA, 17 bp, Arabidopsis thaliana
agcgacctgggttcgtc

SEQ ID NO: 35071 - DNA, 17 bp, Arabidopsis thaliana
agcgacgaaaacggcct

SEQ ID NO: 35072 - DNA, 17 bp, Arabidopsis thaliana
agcgacgaaatgcttca

SEQ ID NO: 35073 - DNA, 17 bp, Arabidopsis thaliana
agcgacgaaatgcttcg

SEQ ID NO: 35074 - DNA, 17 bp, Arabidopsis thaliana
agcgacgaagtcgtcgg

SEQ ID NO: 35075 - DNA, 17 bp, Arabidopsis thaliana
agcgacgaataaggatg

SEQ ID NO: 35076 - DNA, 17 bp, Arabidopsis thaliana
agcgacgaattatttcc

SEQ ID NO: 35077 - DNA, 17 bp, Arabidopsis thaliana
agcgacgacatacctcc

SEQ ID NO: 35078 - DNA, 17 bp, Arabidopsis thaliana
agcgacgagaactttgg

SEQ ID NO: 35079 - DNA, 17 bp, Arabidopsis thaliana
agcgacgagtcacacgg

SEQ ID NO: 35080 - DNA, 17 bp, Arabidopsis thaliana
agcgacgatggcggtgg

SEQ ID NO: 35081 - DNA, 17 bp, Arabidopsis thaliana
agcgacgattgtggtta

SEQ ID NO: 35082 - DNA, 17 bp, Arabidopsis thaliana
agcgacgcagtattggg

SEQ ID NO: 35083 - DNA, 17 bp, Arabidopsis thaliana
agcgacgcagtcatcca

SEQ ID NO: 35084 - DNA, 17 bp, Arabidopsis thaliana
agcgacgcatgcacccg

SEQ ID NO: 35085 - DNA, 17 bp, Arabidopsis thaliana
agcgacgcatgcgcccg

SEQ ID NO: 35086 - DNA, 17 bp, Arabidopsis thaliana
agcgacgcattcgcccg

SEQ ID NO: 35087 - DNA, 17 bp, Arabidopsis thaliana
agcgacgccaaaccgtg

SEQ ID NO: 35088 - DNA, 17 bp, Arabidopsis thaliana
agcgacgcgtgcgcccg

SEQ ID NO: 35089 - DNA, 17 bp, Arabidopsis thaliana
agcgacgcgtggtttgc

SEQ ID NO: 35090 - DNA, 17 bp, Arabidopsis thaliana
agcgacggaccgggcct

SEQ ID NO: 35091 - DNA, 17 bp, Arabidopsis thaliana
agcgacggagacaacaa

SEQ ID NO: 35092 - DNA, 17 bp, Arabidopsis thaliana
agcgacggagacaacag

SEQ ID NO: 35093 - DNA, 17 bp, Arabidopsis thaliana
agcgacggcgagttcag

SEQ ID NO: 35094 - DNA, 17 bp, Arabidopsis thaliana
agcgacgggattgaagg

SEQ ID NO: 35095 - DNA, 17 bp, Arabidopsis thaliana
agcgacggtgattctat

SEQ ID NO: 35096 - DNA, 17 bp, Arabidopsis thaliana
agcgacggtggtggcag

SEQ ID NO: 35097 - DNA, 17 bp, Arabidopsis thaliana
agcgacggttcggtcta

SEQ ID NO: 35098 - DNA, 17 bp, Arabidopsis thaliana
agcgacgtagggaaagc

SEQ ID NO: 35099 - DNA, 17 bp, Arabidopsis thaliana
agcgacgtcattactta

SEQ ID NO: 35100 - DNA, 17 bp, Arabidopsis thaliana
agcgacgtcgctttttg

SEQ ID NO: 35101 - DNA, 17 bp, Arabidopsis thaliana
agcgacgtctccacaag

SEQ ID NO: 35102 - DNA, 17 bp, Arabidopsis thaliana
agcgacgtgtttgccac

SEQ ID NO: 35103 - DNA, 17 bp, Arabidopsis thaliana
agcgacgttctcatatc

SEQ ID NO: 35104 - DNA, 17 bp, Arabidopsis thaliana
agcgacgttctcctatc

SEQ ID NO: 35105 - DNA, 17 bp, Arabidopsis thaliana
agcgacgttcttctatc

SEQ ID NO: 35106 - DNA, 17 bp, Arabidopsis thaliana
agcgacgttgccttttg

SEQ ID NO: 35107 - DNA, 17 bp, Arabidopsis thaliana
agcgacgttgctttgat

SEQ ID NO: 35108 - DNA, 17 bp, Arabidopsis thaliana
agcgacgttgcttttta

SEQ ID NO: 35109 - DNA, 17 bp, Arabidopsis thaliana
agcgacgttgctttttg

SEQ ID NO: 35110 - DNA, 17 bp, Arabidopsis thaliana
agcgacgttgctttttt

SEQ ID NO: 35111 - DNA, 17 bp, Arabidopsis thaliana
agcgactaatcgctgaa

SEQ ID NO: 35112 - DNA, 17 bp, Arabidopsis thaliana
agcgactacggtttgtt

SEQ ID NO: 35113 - DNA, 17 bp, Arabidopsis thaliana
agcgactactacggcgg

SEQ ID NO: 35114 - DNA, 17 bp, Arabidopsis thaliana
agcgactatcaccaggg

SEQ ID NO: 35115 - DNA, 17 bp, Arabidopsis thaliana
agcgactatcgtttctt

SEQ ID NO: 35116 - DNA, 17 bp, Arabidopsis thaliana
agcgactccggtgctgt

SEQ ID NO: 35117 - DNA, 17 bp, Arabidopsis thaliana
agcgactctcaactcgt

SEQ ID NO: 35118 - DNA, 17 bp, Arabidopsis thaliana
agcgactctcggcaacg

SEQ ID NO: 35119 - DNA, 17 bp, Arabidopsis thaliana
agcgactctgctatgta

SEQ ID NO: 35120 - DNA, 17 bp, Arabidopsis thaliana
agcgactctgctatgtt

SEQ ID NO: 35121 - DNA, 17 bp, Arabidopsis thaliana
agcgactcttattcccg

SEQ ID NO: 35122 - DNA, 17 bp, Arabidopsis thaliana
agcgactcttttcagcg

SEQ ID NO: 35123 - DNA, 17 bp, Arabidopsis thaliana
agcgactgaaaaaagca

SEQ ID NO: 35124 - DNA, 17 bp, Arabidopsis thaliana
agcgactgagttactta

SEQ ID NO: 35125 - DNA, 17 bp, Arabidopsis thaliana
agcgactgagttacttg

SEQ ID NO: 35126 - DNA, 17 bp, Arabidopsis thaliana
agcgactgcaatttttg

SEQ ID NO: 35127 - DNA, 17 bp, Arabidopsis thaliana
agcgactgcggttgcgg

SEQ ID NO: 35128 - DNA, 17 bp, Arabidopsis thaliana
agcgactggcaaacgaa

SEQ ID NO: 35129 - DNA, 17 bp, Arabidopsis thaliana
agcgactgggaacggct

SEQ ID NO: 35130 - DNA, 17 bp, Arabidopsis thaliana
agcgactggtttgtgcc

SEQ ID NO: 35131 - DNA, 17 bp, Arabidopsis thaliana
agcgactgtaattcgct

SEQ ID NO: 35132 - DNA, 17 bp, Arabidopsis thaliana
agcgactgtcgccagcg

SEQ ID NO: 35133 - DNA, 17 bp, Arabidopsis thaliana
agcgactgtctgtgcga

SEQ ID NO: 35134 - DNA, 17 bp, Arabidopsis thaliana
agcgactgttagtttac

SEQ ID NO: 35135 - DNA, 17 bp, Arabidopsis thaliana
agcgactgtttatagcg

SEQ ID NO: 35136 - DNA, 17 bp, Arabidopsis thaliana
agcgactgttttgtgac

SEQ ID NO: 35137 - DNA, 17 bp, Arabidopsis thaliana
agcgactgtttttgtat

SEQ ID NO: 35138 - DNA, 17 bp, Arabidopsis thaliana
agcgacttcatctccat

SEQ ID NO: 35139 - DNA, 17 bp, Arabidopsis thaliana
agcgacttctccttatt

SEQ ID NO: 35140 - DNA, 17 bp, Arabidopsis thaliana
agcgacttctccttgta

SEQ ID NO: 35141 - DNA, 17 bp, Arabidopsis thaliana
agcgacttcttcattgt

SEQ ID NO: 35142 - DNA, 17 bp, Arabidopsis thaliana
agcgacttgctagggtt

SEQ ID NO: 35143 - DNA, 17 bp, Arabidopsis thaliana
agcgacttggtctgagg

SEQ ID NO: 35144 - DNA, 17 bp, Arabidopsis thaliana
agcgagaaaatcacgga

SEQ ID NO: 35145 - DNA, 17 bp, Arabidopsis thaliana
agcgagaaaatcacggg

SEQ ID NO: 35146 - DNA, 17 bp, Arabidopsis thaliana
agcgagaactgcatcac

SEQ ID NO: 35147 - DNA, 17 bp, Arabidopsis thaliana
agcgagaactgcatcat

SEQ ID NO: 35148 - DNA, 17 bp, Arabidopsis thaliana
agcgagaagcggttgac

SEQ ID NO: 35149 - DNA, 17 bp, Arabidopsis thaliana
agcgagaatcaaatggt

SEQ ID NO: 35150 - DNA, 17 bp, Arabidopsis thaliana
agcgagaatctcgacta

SEQ ID NO: 35151 - DNA, 17 bp, Arabidopsis thaliana
agcgagaatgtcggctt

SEQ ID NO: 35152 - DNA, 17 bp, Arabidopsis thaliana
agcgagacattcgtggt

SEQ ID NO: 35153 - DNA, 17 bp, Arabidopsis thaliana
agcgagaccaaatctgg

SEQ ID NO: 35154 - DNA, 17 bp, Arabidopsis thaliana
agcgagaccacatagga

SEQ ID NO: 35155 - DNA, 17 bp, Arabidopsis thaliana
agcgagaccacataggt

SEQ ID NO: 35156 - DNA, 17 bp, Arabidopsis thaliana
agcgagaccctactaca

SEQ ID NO: 35157 - DNA, 17 bp, Arabidopsis thaliana
agcgagacgggtttgga

SEQ ID NO: 35158 - DNA, 17 bp, Arabidopsis thaliana
agcgagacgggtttggc

SEQ ID NO: 35159 - DNA, 17 bp, Arabidopsis thaliana
agcgagacggttagctt

SEQ ID NO: 35160 - DNA, 17 bp, Arabidopsis thaliana
agcgagacgtaccattg

SEQ ID NO: 35161 - DNA, 17 bp, Arabidopsis thaliana
agcgagactcggctgga

SEQ ID NO: 35162 - DNA, 17 bp, Arabidopsis thaliana
agcgagagccgtccgaa

SEQ ID NO: 35163 - DNA, 17 bp, Arabidopsis thaliana
agcgagagtcgccagcg

SEQ ID NO: 35164 - DNA, 17 bp, Arabidopsis thaliana
agcgagcaatgagacgc

SEQ ID NO: 35165 - DNA, 17 bp, Arabidopsis thaliana
agcgagccccttttgca

SEQ ID NO: 35166 - DNA, 17 bp, Arabidopsis thaliana
agcgagcgatttgtctg

SEQ ID NO: 35167 - DNA, 17 bp, Arabidopsis thaliana
agcgagctgagacgagg

SEQ ID NO: 35168 - DNA, 17 bp, Arabidopsis thaliana
agcgagctggctcattt

SEQ ID NO: 35169 - DNA, 17 bp, Arabidopsis thaliana
agcgagctggtttgcga

SEQ ID NO: 35170 - DNA, 17 bp, Arabidopsis thaliana
agcgaggaatcgaggag

SEQ ID NO: 35171 - DNA, 17 bp, Arabidopsis thaliana
agcgaggacagtttcaa

SEQ ID NO: 35172 - DNA, 17 bp, Arabidopsis thaliana
agcgaggatatagcggg

SEQ ID NO: 35173 - DNA, 17 bp, Arabidopsis thaliana
agcgaggatttctgatt

SEQ ID NO: 35174 - DNA, 17 bp, Arabidopsis thaliana
agcgaggcagtcagcca

SEQ ID NO: 35175 - DNA, 17 bp, Arabidopsis thaliana
agcgaggcagtcagccc

SEQ ID NO: 35176 - DNA, 17 bp, Arabidopsis thaliana
agcgaggcccttttgca

SEQ ID NO: 35177 - DNA, 17 bp, Arabidopsis thaliana
agcgaggctggtgagta

SEQ ID NO: 35178 - DNA, 17 bp, Arabidopsis thaliana
agcgagggaaactgtat

SEQ ID NO: 35179 - DNA, 17 bp, Arabidopsis thaliana
agcgagggcaagtctgg

SEQ ID NO: 35180 - DNA, 17 bp, Arabidopsis thaliana
agcgagggtcactacac

SEQ ID NO: 35181 - DNA, 17 bp, Arabidopsis thaliana
agcgaggtgcttcttta

SEQ ID NO: 35182 - DNA, 17 bp, Arabidopsis thaliana
agcgaggtgttgtgtgt

SEQ ID NO: 35183 - DNA, 17 bp, Arabidopsis thaliana
agcgaggttctctatca

SEQ ID NO: 35184 - DNA, 17 bp, Arabidopsis thaliana
agcgaggttgccttctt

SEQ ID NO: 35185 - DNA, 17 bp, Arabidopsis thaliana
agcgaggttggccagct

SEQ ID NO: 35186 - DNA, 17 bp, Arabidopsis thaliana
agcgagtaacaattcgg

SEQ ID NO: 35187 - DNA, 17 bp, Arabidopsis thaliana
agcgagtagtgtcttga

SEQ ID NO: 35188 - DNA, 17 bp, Arabidopsis thaliana
agcgagtcattcttcgg

SEQ ID NO: 35189 - DNA, 17 bp, Arabidopsis thaliana
agcgagtctggagagct

SEQ ID NO: 35190 - DNA, 17 bp, Arabidopsis thaliana
agcgagtcttcataggg

SEQ ID NO: 35191 - DNA, 17 bp, Arabidopsis thaliana
agcgagtcttggcgggt

SEQ ID NO: 35192 - DNA, 17 bp, Arabidopsis thaliana
agcgagtgagagcgatt

SEQ ID NO: 35193 - DNA, 17 bp, Arabidopsis thaliana
agcgagtggcagccatt

SEQ ID NO: 35194 - DNA, 17 bp, Arabidopsis thaliana
agcgagtgttctccagc

SEQ ID NO: 35195 - DNA, 17 bp, Arabidopsis thaliana
agcgagttggtcctgtt

SEQ ID NO: 35196 - DNA, 17 bp, Arabidopsis thaliana
agcgagtttgcaccaac

SEQ ID NO: 35197 - DNA, 17 bp, Arabidopsis thaliana
agcgagtttttccattt

SEQ ID NO: 35198 - DNA, 17 bp, Arabidopsis thaliana
agcgataaagccttcga

SEQ ID NO: 35199 - DNA, 17 bp, Arabidopsis thaliana
agcgataaaggatttac

SEQ ID NO: 35200 - DNA, 17 bp, Arabidopsis thaliana
agcgataatcaacaccg

SEQ ID NO: 35201 - DNA, 17 bp, Arabidopsis thaliana
agcgataatttctcttt

SEQ ID NO: 35202 - DNA, 17 bp, Arabidopsis thaliana
agcgatactgacgcgca

SEQ ID NO: 35203 - DNA, 17 bp, Arabidopsis thaliana
agcgatactgacgtgca

SEQ ID NO: 35204 - DNA, 17 bp, Arabidopsis thaliana
agcgatagcgaccagcg

SEQ ID NO: 35205 - DNA, 17 bp, Arabidopsis thaliana
agcgatagtcgccagcg

SEQ ID NO: 35206 - DNA, 17 bp, Arabidopsis thaliana
agcgatatccagagagc

SEQ ID NO: 35207 - DNA, 17 bp, Arabidopsis thaliana
agcgatatctagagagc

SEQ ID NO: 35208 - DNA, 17 bp, Arabidopsis thaliana
agcgatatctagcggct

SEQ ID NO: 35209 - DNA, 17 bp, Arabidopsis thaliana
agcgatatctagcggtt

SEQ ID NO: 35210 - DNA, 17 bp, Arabidopsis thaliana
agcgatatctagctgtt

SEQ ID NO: 35211 - DNA, 17 bp, Arabidopsis thaliana
agcgatatgcggaatct

SEQ ID NO: 35212 - DNA, 17 bp, Arabidopsis thaliana
agcgatatgtccgagtg

SEQ ID NO: 35213 - DNA, 17 bp, Arabidopsis thaliana
agcgatcaatcaaagaa

SEQ ID NO: 35214 - DNA, 17 bp, Arabidopsis thaliana
agcgatcacaagaatcc

SEQ ID NO: 35215 - DNA, 17 bp, Arabidopsis thaliana
agcgatcaccgtcgtcc

SEQ ID NO: 35216 - DNA, 17 bp, Arabidopsis thaliana
agcgatcactgctttga

SEQ ID NO: 35217 - DNA, 17 bp, Arabidopsis thaliana
agcgatcactttacgga

SEQ ID NO: 35218 - DNA, 17 bp, Arabidopsis thaliana
agcgatcagatttgcgt

SEQ ID NO: 35219 - DNA, 17 bp, Arabidopsis thaliana
agcgatcagtccctggt

SEQ ID NO: 35220 - DNA, 17 bp, Arabidopsis thaliana
agcgatcagtcgctgct

SEQ ID NO: 35221 - DNA, 17 bp, Arabidopsis thaliana
agcgatcagtcgctggt

SEQ ID NO: 35222 - DNA, 17 bp, Arabidopsis thaliana
agcgatcagtcgttggt

SEQ ID NO: 35223 - DNA, 17 bp, Arabidopsis thaliana
agcgatcagtgtcactt

SEQ ID NO: 35224 - DNA, 17 bp, Arabidopsis thaliana
agcgatcgagggatggt

SEQ ID NO: 35225 - DNA, 17 bp, Arabidopsis thaliana
agcgatcgctagcgtgt

SEQ ID NO: 35226 - DNA, 17 bp, Arabidopsis thaliana
agcgatcgggttgtgga

SEQ ID NO: 35227 - DNA, 17 bp, Arabidopsis thaliana
agcgatcgggttgtgta

SEQ ID NO: 35228 - DNA, 17 bp, Arabidopsis thaliana
agcgatcggttgccaac

SEQ ID NO: 35229 - DNA, 17 bp, Arabidopsis thaliana
agcgatcgtgataacac

SEQ ID NO: 35230 - DNA, 17 bp, Arabidopsis thaliana
agcgatctaagtagatt

SEQ ID NO: 35231 - DNA, 17 bp, Arabidopsis thaliana
agcgatctctaactaag

SEQ ID NO: 35232 - DNA, 17 bp, Arabidopsis thaliana
agcgatctgccgaagct

SEQ ID NO: 35233 - DNA, 17 bp, Arabidopsis thaliana
agcgatctgttgccaac

SEQ ID NO: 35234 - DNA, 17 bp, Arabidopsis thaliana
agcgatcttagatttta

SEQ ID NO: 35235 - DNA, 17 bp, Arabidopsis thaliana
agcgatctttcgttttg

SEQ ID NO: 35236 - DNA, 17 bp, Arabidopsis thaliana
agcgatcttttcgtagg

SEQ ID NO: 35237 - DNA, 17 bp, Arabidopsis thaliana
agcgatgaaaggaatgc

SEQ ID NO: 35238 - DNA, 17 bp, Arabidopsis thaliana
agcgatgaagatggtct

SEQ ID NO: 35239 - DNA, 17 bp, Arabidopsis thaliana
agcgatgaaggccctag

SEQ ID NO: 35240 - DNA, 17 bp, Arabidopsis thaliana
agcgatgaagtgtatga

SEQ ID NO: 35241 - DNA, 17 bp, Arabidopsis thaliana
agcgatgacctaatgga

SEQ ID NO: 35242 - DNA, 17 bp, Arabidopsis thaliana
agcgatgacgattttag

SEQ ID NO: 35243 - DNA, 17 bp, Arabidopsis thaliana
agcgatgagcctcgaag

SEQ ID NO: 35244 - DNA, 17 bp, Arabidopsis thaliana
agcgatgagtatccgct

SEQ ID NO: 35245 - DNA, 17 bp, Arabidopsis thaliana
agcgatgagtggcactc

SEQ ID NO: 35246 - DNA, 17 bp, Arabidopsis thaliana
agcgatgatatctggtt

SEQ ID NO: 35247 - DNA, 17 bp, Arabidopsis thaliana
agcgatgatgtccgcac

SEQ ID NO: 35248 - DNA, 17 bp, Arabidopsis thaliana
agcgatggaagctttgc

SEQ ID NO: 35249 - DNA, 17 bp, Arabidopsis thaliana
agcgatggattaggagt

SEQ ID NO: 35250 - DNA, 17 bp, Arabidopsis thaliana
agcgatggcgacaaatt

SEQ ID NO: 35251 - DNA, 17 bp, Arabidopsis thaliana
agcgatggctccggtga

SEQ ID NO: 35252 - DNA, 17 bp, Arabidopsis thaliana
agcgatgggaaatcagt

SEQ ID NO: 35253 - DNA, 17 bp, Arabidopsis thaliana
agcgatgggaaccacgg

SEQ ID NO: 35254 - DNA, 17 bp, Arabidopsis thaliana
agcgatggtaagaactc

SEQ ID NO: 35255 - DNA, 17 bp, Arabidopsis thaliana
agcgatggtgagcgtga

SEQ ID NO: 35256 - DNA, 17 bp, Arabidopsis thaliana
agcgatgtaatgcttta

SEQ ID NO: 35257 - DNA, 17 bp, Arabidopsis thaliana
agcgatgtccggcgagt

SEQ ID NO: 35258 - DNA, 17 bp, Arabidopsis thaliana
agcgatgtctagcggtt

SEQ ID NO: 35259 - DNA, 17 bp, Arabidopsis thaliana
agcgatgtgaagaatag

SEQ ID NO: 35260 - DNA, 17 bp, Arabidopsis thaliana
agcgatgtgccaggatg

SEQ ID NO: 35261 - DNA, 17 bp, Arabidopsis thaliana
agcgatgtgccgcgggt

SEQ ID NO: 35262 - DNA, 17 bp, Arabidopsis thaliana
agcgatgtgcgagaatg

SEQ ID NO: 35263 - DNA, 17 bp, Arabidopsis thaliana
agcgatgtgggacattg

SEQ ID NO: 35264 - DNA, 17 bp, Arabidopsis thaliana
agcgatgttgcttatag

SEQ ID NO: 35265 - DNA, 17 bp, Arabidopsis thaliana
agcgattacagttctag

SEQ ID NO: 35266 - DNA, 17 bp, Arabidopsis thaliana
agcgattacggttctaa

SEQ ID NO: 35267 - DNA, 17 bp, Arabidopsis thaliana
agcgattacggttctag

SEQ ID NO: 35268 - DNA, 17 bp, Arabidopsis thaliana
agcgattagctgctttt

SEQ ID NO: 35269 - DNA, 17 bp, Arabidopsis thaliana
agcgattaggttattgg

SEQ ID NO: 35270 - DNA, 17 bp, Arabidopsis thaliana
agcgattagtcgactga

SEQ ID NO: 35271 - DNA, 17 bp, Arabidopsis thaliana
agcgattagtcgactgt

SEQ ID NO: 35272 - DNA, 17 bp, Arabidopsis thaliana
agcgattagtcgatgct

SEQ ID NO: 35273 - DNA, 17 bp, Arabidopsis thaliana
agcgattagtcgctgaa

SEQ ID NO: 35274 - DNA, 17 bp, Arabidopsis thaliana
agcgattagtcgctgct

SEQ ID NO: 35275 - DNA, 17 bp, Arabidopsis thaliana
agcgattagtcgctggt

SEQ ID NO: 35276 - DNA, 17 bp, Arabidopsis thaliana
agcgattagttgctgcg

SEQ ID NO: 35277 - DNA, 17 bp, Arabidopsis thaliana
agcgattagttgctgct

SEQ ID NO: 35278 - DNA, 17 bp, Arabidopsis thaliana
agcgattattcgactgt

SEQ ID NO: 35279 - DNA, 17 bp, Arabidopsis thaliana
agcgattcagacagctg

SEQ ID NO: 35280 - DNA, 17 bp, Arabidopsis thaliana
agcgattcatcgaatga

SEQ ID NO: 35281 - DNA, 17 bp, Arabidopsis thaliana
agcgattcccgtagtgg

SEQ ID NO: 35282 - DNA, 17 bp, Arabidopsis thaliana
agcgattccgctatgtt

SEQ ID NO: 35283 - DNA, 17 bp, Arabidopsis thaliana
agcgattccggtcagtc

SEQ ID NO: 35284 - DNA, 17 bp, Arabidopsis thaliana
agcgattccgttaccac

SEQ ID NO: 35285 - DNA, 17 bp, Arabidopsis thaliana
agcgattcctgcctcag

SEQ ID NO: 35286 - DNA, 17 bp, Arabidopsis thaliana
agcgattcgacttgcag

SEQ ID NO: 35287 - DNA, 17 bp, Arabidopsis thaliana
agcgattctggtcagcc

SEQ ID NO: 35288 - DNA, 17 bp, Arabidopsis thaliana
agcgattctggtcagtc

SEQ ID NO: 35289 - DNA, 17 bp, Arabidopsis thaliana
agcgattctgtgggtaa

SEQ ID NO: 35290 - DNA, 17 bp, Arabidopsis thaliana
agcgattctgttaccac

SEQ ID NO: 35291 - DNA, 17 bp, Arabidopsis thaliana
agcgattcttgcctcag

SEQ ID NO: 35292 - DNA, 17 bp, Arabidopsis thaliana
agcgattgaatggtttg

SEQ ID NO: 35293 - DNA, 17 bp, Arabidopsis thaliana
agcgattgagaaaagaa

SEQ ID NO: 35294 - DNA, 17 bp, Arabidopsis thaliana
agcgattgaggtccgtt

SEQ ID NO: 35295 - DNA, 17 bp, Arabidopsis thaliana
agcgattgatccaactc

SEQ ID NO: 35296 - DNA, 17 bp, Arabidopsis thaliana
agcgattggaatttctg

SEQ ID NO: 35297 - DNA, 17 bp, Arabidopsis thaliana
agcgattggccatcgta

SEQ ID NO: 35298 - DNA, 17 bp, Arabidopsis thaliana
agcgattggggtggaga

SEQ ID NO: 35299 - DNA, 17 bp, Arabidopsis thaliana
agcgattgggttgtggg

SEQ ID NO: 35300 - DNA, 17 bp, Arabidopsis thaliana
agcgattgggttgtgta

SEQ ID NO: 35301 - DNA, 17 bp, Arabidopsis thaliana
agcgattgggttgtgtg

SEQ ID NO: 35302 - DNA, 17 bp, Arabidopsis thaliana
agcgattgggttgtgtt

SEQ ID NO: 35303 - DNA, 17 bp, Arabidopsis thaliana
agcgattgtcgctgtaa

SEQ ID NO: 35304 - DNA, 17 bp, Arabidopsis thaliana
agcgattgtcgctgtat

SEQ ID NO: 35305 - DNA, 17 bp, Arabidopsis thaliana
agcgattgtctcagcga

SEQ ID NO: 35306 - DNA, 17 bp, Arabidopsis thaliana
agcgattgtctgtgcga

SEQ ID NO: 35307 - DNA, 17 bp, Arabidopsis thaliana
agcgattgttagcggtt

SEQ ID NO: 35308 - DNA, 17 bp, Arabidopsis thaliana
agcgatttattgtccgc

SEQ ID NO: 35309 - DNA, 17 bp, Arabidopsis thaliana
agcgatttcgtccattc

SEQ ID NO: 35310 - DNA, 17 bp, Arabidopsis thaliana
agcgatttcgttaccac

SEQ ID NO: 35311 - DNA, 17 bp, Arabidopsis thaliana
agcgatttctatgattg

SEQ ID NO: 35312 - DNA, 17 bp, Arabidopsis thaliana
agcgatttctccgtttt

SEQ ID NO: 35313 - DNA, 17 bp, Arabidopsis thaliana
agcgatttctcgttcat

SEQ ID NO: 35314 - DNA, 17 bp, Arabidopsis thaliana
agcgatttctgacgtga

SEQ ID NO: 35315 - DNA, 17 bp, Arabidopsis thaliana
agcgatttgatccgcgg

SEQ ID NO: 35316 - DNA, 17 bp, Arabidopsis thaliana
agcgatttggatgatcc

SEQ ID NO: 35317 - DNA, 17 bp, Arabidopsis thaliana
agcgatttgtctccagc

SEQ ID NO: 35318 - DNA, 17 bp, Arabidopsis thaliana
agcgatttgtctggtta

SEQ ID NO: 35319 - DNA, 17 bp, Arabidopsis thaliana
agcgatttgttgcccat

SEQ ID NO: 35320 - DNA, 17 bp, Arabidopsis thaliana
agcgatttgtttggtta

SEQ ID NO: 35321 - DNA, 17 bp, Arabidopsis thaliana
agcgattttagattttg

SEQ ID NO: 35322 - DNA, 17 bp, Arabidopsis thaliana
agcgattttcattgctc

SEQ ID NO: 35323 - DNA, 17 bp, Arabidopsis thaliana
agcgattttcgaggtcc

SEQ ID NO: 35324 - DNA, 17 bp, Arabidopsis thaliana
agcgattttcttcctcc

SEQ ID NO: 35325 - DNA, 17 bp, Arabidopsis thaliana
agcgattttggagagtg

SEQ ID NO: 35326 - DNA, 17 bp, Arabidopsis thaliana
agcgattttggcaaaac

SEQ ID NO: 35327 - DNA, 17 bp, Arabidopsis thaliana
agcgattttgtccattc

SEQ ID NO: 35328 - DNA, 17 bp, Arabidopsis thaliana
agcgatttttgaatcta

SEQ ID NO: 35329 - DNA, 17 bp, Arabidopsis thaliana
agcgcaaaaaccacatg

SEQ ID NO: 35330 - DNA, 17 bp, Arabidopsis thaliana
agcgcaaaaaccacgtg

SEQ ID NO: 35331 - DNA, 17 bp, Arabidopsis thaliana
agcgcaacaacgaaagt

SEQ ID NO: 35332 - DNA, 17 bp, Arabidopsis thaliana
agcgcaacaacttctta

SEQ ID NO: 35333 - DNA, 17 bp, Arabidopsis thaliana
agcgcaacactttcttc

SEQ ID NO: 35334 - DNA, 17 bp, Arabidopsis thaliana
agcgcaaccgagcacct

SEQ ID NO: 35335 - DNA, 17 bp, Arabidopsis thaliana
agcgcaagagcccacac

SEQ ID NO: 35336 - DNA, 17 bp, Arabidopsis thaliana
agcgcaaggatcaccac

SEQ ID NO: 35337 - DNA, 17 bp, Arabidopsis thaliana
agcgcaataaccatcag

SEQ ID NO: 35338 - DNA, 17 bp, Arabidopsis thaliana
agcgcaatcaactctgt

SEQ ID NO: 35339 - DNA, 17 bp, Arabidopsis thaliana
agcgcaatcgatagaat

SEQ ID NO: 35340 - DNA, 17 bp, Arabidopsis thaliana
agcgcaatggatctctg

SEQ ID NO: 35341 - DNA, 17 bp, Arabidopsis thaliana
agcgcaatttggttcat

SEQ ID NO: 35342 - DNA, 17 bp, Arabidopsis thaliana
agcgcaattttgtgata

SEQ ID NO: 35343 - DNA, 17 bp, Arabidopsis thaliana
agcgcacaagcacgcac

SEQ ID NO: 35344 - DNA, 17 bp, Arabidopsis thaliana
agcgcacaagcccgccc

SEQ ID NO: 35345 - DNA, 17 bp, Arabidopsis thaliana
agcgcacaagcccggcc

SEQ ID NO: 35346 - DNA, 17 bp, Arabidopsis thaliana
agcgcacgtctgcctgg

SEQ ID NO: 35347 - DNA, 17 bp, Arabidopsis thaliana
agcgcacgtctgcctgt

SEQ ID NO: 35348 - DNA, 17 bp, Arabidopsis thaliana
agcgcactcagcgtgaa

SEQ ID NO: 35349 - DNA, 17 bp, Arabidopsis thaliana
agcgcactgtagatgga

SEQ ID NO: 35350 - DNA, 17 bp, Arabidopsis thaliana
agcgcagaacctcttga

SEQ ID NO: 35351 - DNA, 17 bp, Arabidopsis thaliana
agcgcagagacgcggcg

SEQ ID NO: 35352 - DNA, 17 bp, Arabidopsis thaliana
agcgcagagatatttga

SEQ ID NO: 35353 - DNA, 17 bp, Arabidopsis thaliana
agcgcagagcctgtcaa

SEQ ID NO: 35354 - DNA, 17 bp, Arabidopsis thaliana
agcgcagattaatccgt

SEQ ID NO: 35355 - DNA, 17 bp, Arabidopsis thaliana
agcgcagattgcgagca

SEQ ID NO: 35356 - DNA, 17 bp, Arabidopsis thaliana
agcgcagattgcgatca

SEQ ID NO: 35357 - DNA, 17 bp, Arabidopsis thaliana
agcgcagcccgacctga

SEQ ID NO: 35358 - DNA, 17 bp, Arabidopsis thaliana
agcgcaggcggttggga

SEQ ID NO: 35359 - DNA, 17 bp, Arabidopsis thaliana
agcgcaggtcatccagt

SEQ ID NO: 35360 - DNA, 17 bp, Arabidopsis thaliana
agcgcaggtttaggctc

SEQ ID NO: 35361 - DNA, 17 bp, Arabidopsis thaliana
agcgcaggtttaggttc

SEQ ID NO: 35362 - DNA, 17 bp, Arabidopsis thaliana
agcgcaggttttgtctt

SEQ ID NO: 35363 - DNA, 17 bp, Arabidopsis thaliana
agcgcagtcttttggga

SEQ ID NO: 35364 - DNA, 17 bp, Arabidopsis thaliana
agcgcagtgcggatgat

SEQ ID NO: 35365 - DNA, 17 bp, Arabidopsis thaliana
agcgcagtgcgtatgat

SEQ ID NO: 35366 - DNA, 17 bp, Arabidopsis thaliana
agcgcagttgcactact

SEQ ID NO: 35367 - DNA, 17 bp, Arabidopsis thaliana
agcgcataatcactgat

SEQ ID NO: 35368 - DNA, 17 bp, Arabidopsis thaliana
agcgcatagagccatcc

SEQ ID NO: 35369 - DNA, 17 bp, Arabidopsis thaliana
agcgcatagagccattc

SEQ ID NO: 35370 - DNA, 17 bp, Arabidopsis thaliana
agcgcatagtctcttcc

SEQ ID NO: 35371 - DNA, 17 bp, Arabidopsis thaliana
agcgcatagtctcttct

SEQ ID NO: 35372 - DNA, 17 bp, Arabidopsis thaliana
agcgcatatgagtaata

SEQ ID NO: 35373 - DNA, 17 bp, Arabidopsis thaliana
agcgcatattgtgacca

SEQ ID NO: 35374 - DNA, 17 bp, Arabidopsis thaliana
agcgcatcctgtagatg

SEQ ID NO: 35375 - DNA, 17 bp, Arabidopsis thaliana
agcgcatgagttagtgg

SEQ ID NO: 35376 - DNA, 17 bp, Arabidopsis thaliana
agcgcatgagttagttg

SEQ ID NO: 35377 - DNA, 17 bp, Arabidopsis thaliana
agcgcatgcggtgtgca

SEQ ID NO: 35378 - DNA, 17 bp, Arabidopsis thaliana
agcgccaatcctctgtt

SEQ ID NO: 35379 - DNA, 17 bp, Arabidopsis thaliana
agcgccacatcgttgac

SEQ ID NO: 35380 - DNA, 17 bp, Arabidopsis thaliana
agcgccagcagccgcgg

SEQ ID NO: 35381 - DNA, 17 bp, Arabidopsis thaliana
agcgccaggtcctgatg

SEQ ID NO: 35382 - DNA, 17 bp, Arabidopsis thaliana
agcgccattcagagttt

SEQ ID NO: 35383 - DNA, 17 bp, Arabidopsis thaliana
agcgcccgcatattgtc

SEQ ID NO: 35384 - DNA, 17 bp, Arabidopsis thaliana
agcgcccggacgatagt

SEQ ID NO: 35385 - DNA, 17 bp, Arabidopsis thaliana
agcgcccgtaggctcga

SEQ ID NO: 35386 - DNA, 17 bp, Arabidopsis thaliana
agcgccctgtagatgga

SEQ ID NO: 35387 - DNA, 17 bp, Arabidopsis thaliana
agcgccgacatttttca

SEQ ID NO: 35388 - DNA, 17 bp, Arabidopsis thaliana
agcgccgagtccccgac

SEQ ID NO: 35389 - DNA, 17 bp, Arabidopsis thaliana
agcgccgagtcgccgac

SEQ ID NO: 35390 - DNA, 17 bp, Arabidopsis thaliana
agcgccgatcatccagc

SEQ ID NO: 35391 - DNA, 17 bp, Arabidopsis thaliana
agcgccgatcatccagg

SEQ ID NO: 35392 - DNA, 17 bp, Arabidopsis thaliana
agcgccgatgtttgtgc

SEQ ID NO: 35393 - DNA, 17 bp, Arabidopsis thaliana
agcgccgatttgaggat

SEQ ID NO: 35394 - DNA, 17 bp, Arabidopsis thaliana
agcgccgattttgtacc

SEQ ID NO: 35395 - DNA, 17 bp, Arabidopsis thaliana
agcgccggacgtctgga

SEQ ID NO: 35396 - DNA, 17 bp, Arabidopsis thaliana
agcgccggagctatgcg

SEQ ID NO: 35397 - DNA, 17 bp, Arabidopsis thaliana
agcgccggaggcacgac

SEQ ID NO: 35398 - DNA, 17 bp, Arabidopsis thaliana
agcgccggagttatgcc

SEQ ID NO: 35399 - DNA, 17 bp, Arabidopsis thaliana
agcgccggatccgatag

SEQ ID NO: 35400 - DNA, 17 bp, Arabidopsis thaliana
agcgccggccctgctca

SEQ ID NO: 35401 - DNA, 17 bp, Arabidopsis thaliana
agcgccggcggtggtgg

SEQ ID NO: 35402 - DNA, 17 bp, Arabidopsis thaliana
agcgccgggcagctaag

SEQ ID NO: 35403 - DNA, 17 bp, Arabidopsis thaliana
agcgccgtgattgtttg

SEQ ID NO: 35404 - DNA, 17 bp, Arabidopsis thaliana
agcgcctaatgaacctc

SEQ ID NO: 35405 - DNA, 17 bp, Arabidopsis thaliana
agcgcctacgctaccta

SEQ ID NO: 35406 - DNA, 17 bp, Arabidopsis thaliana
agcgcctacgctgccta

SEQ ID NO: 35407 - DNA, 17 bp, Arabidopsis thaliana
agcgcctagaatgctta

SEQ ID NO: 35408 - DNA, 17 bp, Arabidopsis thaliana
agcgcctagcgattttt

SEQ ID NO: 35409 - DNA, 17 bp, Arabidopsis thaliana
agcgcctatcagatttt

SEQ ID NO: 35410 - DNA, 17 bp, Arabidopsis thaliana
agcgcctatttcctgat

SEQ ID NO: 35411 - DNA, 17 bp, Arabidopsis thaliana
agcgcctgctagatccc

SEQ ID NO: 35412 - DNA, 17 bp, Arabidopsis thaliana
agcgcctgtgttgtaca

SEQ ID NO: 35413 - DNA, 17 bp, Arabidopsis thaliana
agcgccttagattctcg

SEQ ID NO: 35414 - DNA, 17 bp, Arabidopsis thaliana
agcgccttcagcagctc

SEQ ID NO: 35415 - DNA, 17 bp, Arabidopsis thaliana
agcgccttggtgaataa

SEQ ID NO: 35416 - DNA, 17 bp, Arabidopsis thaliana
agcgcctttgtgaataa

SEQ ID NO: 35417 - DNA, 17 bp, Arabidopsis thaliana
agcgcctttgtttctgc

SEQ ID NO: 35418 - DNA, 17 bp, Arabidopsis thaliana
agcgcgaactcaacaat

SEQ ID NO: 35419 - DNA, 17 bp, Arabidopsis thaliana
agcgcgaactcaacaca

SEQ ID NO: 35420 - DNA, 17 bp, Arabidopsis thaliana
agcgcgaactgctccgt

SEQ ID NO: 35421 - DNA, 17 bp, Arabidopsis thaliana
agcgcgagatgactaac

SEQ ID NO: 35422 - DNA, 17 bp, Arabidopsis thaliana
agcgcgatgaccaattg

SEQ ID NO: 35423 - DNA, 17 bp, Arabidopsis thaliana
agcgcgatgtttgccag

SEQ ID NO: 35424 - DNA, 17 bp, Arabidopsis thaliana
agcgcggaacactgtgg

SEQ ID NO: 35425 - DNA, 17 bp, Arabidopsis thaliana
agcgcggacaacagtca

SEQ ID NO: 35426 - DNA, 17 bp, Arabidopsis thaliana
agcgcggagcggacctg

SEQ ID NO: 35427 - DNA, 17 bp, Arabidopsis thaliana
agcgcggaggtgtcgag

SEQ ID NO: 35428 - DNA, 17 bp, Arabidopsis thaliana
agcgcggctctaacgcc

SEQ ID NO: 35429 - DNA, 17 bp, Arabidopsis thaliana
agcgcgggtaaacggcg

SEQ ID NO: 35430 - DNA, 17 bp, Arabidopsis thaliana
agcgcgtcagcttggtt

SEQ ID NO: 35431 - DNA, 17 bp, Arabidopsis thaliana
agcgcgtggttcacaca

SEQ ID NO: 35432 - DNA, 17 bp, Arabidopsis thaliana
agcgcgttaattggtga

SEQ ID NO: 35433 - DNA, 17 bp, Arabidopsis thaliana
agcgctaacaaatgcgc

SEQ ID NO: 35434 - DNA, 17 bp, Arabidopsis thaliana
agcgctaactttcaaat

SEQ ID NO: 35435 - DNA, 17 bp, Arabidopsis thaliana
agcgctaaggtttgctc

SEQ ID NO: 35436 - DNA, 17 bp, Arabidopsis thaliana
agcgctaatggcattgg

SEQ ID NO: 35437 - DNA, 17 bp, Arabidopsis thaliana
agcgctacgccccttgt

SEQ ID NO: 35438 - DNA, 17 bp, Arabidopsis thaliana
agcgctaggttgggact

SEQ ID NO: 35439 - DNA, 17 bp, Arabidopsis thaliana
agcgctatcagacgggt

SEQ ID NO: 35440 - DNA, 17 bp, Arabidopsis thaliana
agcgctatctatacatc

SEQ ID NO: 35441 - DNA, 17 bp, Arabidopsis thaliana
agcgctatggaagtgag

SEQ ID NO: 35442 - DNA, 17 bp, Arabidopsis thaliana
agcgctccagcaggtgg

SEQ ID NO: 35443 - DNA, 17 bp, Arabidopsis thaliana
agcgctcctaaagctta

SEQ ID NO: 35444 - DNA, 17 bp, Arabidopsis thaliana
agcgctcctcggaccac

SEQ ID NO: 35445 - DNA, 17 bp, Arabidopsis thaliana
agcgctcgattaacgcc

SEQ ID NO: 35446 - DNA, 17 bp, Arabidopsis thaliana
agcgctcggttgccaac

SEQ ID NO: 35447 - DNA, 17 bp, Arabidopsis thaliana
agcgctcggttgccaat

SEQ ID NO: 35448 - DNA, 17 bp, Arabidopsis thaliana
agcgctcgtactctgga

SEQ ID NO: 35449 - DNA, 17 bp, Arabidopsis thaliana
agcgctcgttgccggac

SEQ ID NO: 35450 - DNA, 17 bp, Arabidopsis thaliana
agcgctctgacgaaaat

SEQ ID NO: 35451 - DNA, 17 bp, Arabidopsis thaliana
agcgctctgacgaagat

SEQ ID NO: 35452 - DNA, 17 bp, Arabidopsis thaliana
agcgctctgtagtccac

SEQ ID NO: 35453 - DNA, 17 bp, Arabidopsis thaliana
agcgctcttgcgaataa

SEQ ID NO: 35454 - DNA, 17 bp, Arabidopsis thaliana
agcgctcttgcgccgaa

SEQ ID NO: 35455 - DNA, 17 bp, Arabidopsis thaliana
agcgctgacagtataga

SEQ ID NO: 35456 - DNA, 17 bp, Arabidopsis thaliana
agcgctgacagtatcaa

SEQ ID NO: 35457 - DNA, 17 bp, Arabidopsis thaliana
agcgctgacagtatcga

SEQ ID NO: 35458 - DNA, 17 bp, Arabidopsis thaliana
agcgctgatgcgacggt

SEQ ID NO: 35459 - DNA, 17 bp, Arabidopsis thaliana
agcgctgattccgacgg

SEQ ID NO: 35460 - DNA, 17 bp, Arabidopsis thaliana
agcgctgcccgttgcta

SEQ ID NO: 35461 - DNA, 17 bp, Arabidopsis thaliana
agcgctgctataggaac

SEQ ID NO: 35462 - DNA, 17 bp, Arabidopsis thaliana
agcgctggaatgtctgg

SEQ ID NO: 35463 - DNA, 17 bp, Arabidopsis thaliana
agcgctggagtgtccac

SEQ ID NO: 35464 - DNA, 17 bp, Arabidopsis thaliana
agcgctggatccgatag

SEQ ID NO: 35465 - DNA, 17 bp, Arabidopsis thaliana
agcgctgtacagatagc

SEQ ID NO: 35466 - DNA, 17 bp, Arabidopsis thaliana
agcgctgtctccatcaa

SEQ ID NO: 35467 - DNA, 17 bp, Arabidopsis thaliana
agcgctgtgtactaact

SEQ ID NO: 35468 - DNA, 17 bp, Arabidopsis thaliana
agcgctgttcctcgcaa

SEQ ID NO: 35469 - DNA, 17 bp, Arabidopsis thaliana
agcgctgttgctcacgt

SEQ ID NO: 35470 - DNA, 17 bp, Arabidopsis thaliana
agcgcttaagtaacttt

SEQ ID NO: 35471 - DNA, 17 bp, Arabidopsis thaliana
agcgcttaggtctcata

SEQ ID NO: 35472 - DNA, 17 bp, Arabidopsis thaliana
agcgcttaggtctcatt

SEQ ID NO: 35473 - DNA, 17 bp, Arabidopsis thaliana
agcgcttagtgctactg

SEQ ID NO: 35474 - DNA, 17 bp, Arabidopsis thaliana
agcgcttgatggacatc

SEQ ID NO: 35475 - DNA, 17 bp, Arabidopsis thaliana
agcgcttgcagagagaa

SEQ ID NO: 35476 - DNA, 17 bp, Arabidopsis thaliana
agcgcttgtgtcaactt

SEQ ID NO: 35477 - DNA, 17 bp, Arabidopsis thaliana
agcgctttatgtctcag

SEQ ID NO: 35478 - DNA, 17 bp, Arabidopsis thaliana
agcgctttatgtctctc

SEQ ID NO: 35479 - DNA, 17 bp, Arabidopsis thaliana
agcgctttcgacaggta

SEQ ID NO: 35480 - DNA, 17 bp, Arabidopsis thaliana
agcgctttctactccgc

SEQ ID NO: 35481 - DNA, 17 bp, Arabidopsis thaliana
agcgctttcttatgggc

SEQ ID NO: 35482 - DNA, 17 bp, Arabidopsis thaliana
agcgctttgatctcctt

SEQ ID NO: 35483 - DNA, 17 bp, Arabidopsis thaliana
agcgctttgttgtccgc

SEQ ID NO: 35484 - DNA, 17 bp, Arabidopsis thaliana
agcgcttttgaggacac

SEQ ID NO: 35485 - DNA, 17 bp, Arabidopsis thaliana
agcggaaaaaccagtta

SEQ ID NO: 35486 - DNA, 17 bp, Arabidopsis thaliana
agcggaaaaagtaacaa

SEQ ID NO: 35487 - DNA, 17 bp, Arabidopsis thaliana
agcggaaaaccactgtc

SEQ ID NO: 35488 - DNA, 17 bp, Arabidopsis thaliana
agcggaaaatgcgggtt

SEQ ID NO: 35489 - DNA, 17 bp, Arabidopsis thaliana
agcggaaagaatcttat

SEQ ID NO: 35490 - DNA, 17 bp, Arabidopsis thaliana
agcggaaagagtcattg

SEQ ID NO: 35491 - DNA, 17 bp, Arabidopsis thaliana
agcggaaagtcttgatt

SEQ ID NO: 35492 - DNA, 17 bp, Arabidopsis thaliana
agcggaaatttaacgac

SEQ ID NO: 35493 - DNA, 17 bp, Arabidopsis thaliana
agcggaacctctatcca

SEQ ID NO: 35494 - DNA, 17 bp, Arabidopsis thaliana
agcggaacgattgtcca

SEQ ID NO: 35495 - DNA, 17 bp, Arabidopsis thaliana
agcggaacgggtttgac

SEQ ID NO: 35496 - DNA, 17 bp, Arabidopsis thaliana
agcggaagatgatggtt

SEQ ID NO: 35497 - DNA, 17 bp, Arabidopsis thaliana
agcggaagcgagaatgt

SEQ ID NO: 35498 - DNA, 17 bp, Arabidopsis thaliana
agcggaagcgtggtaga

SEQ ID NO: 35499 - DNA, 17 bp, Arabidopsis thaliana
agcggaagcgtggtggg

SEQ ID NO: 35500 - DNA, 17 bp, Arabidopsis thaliana
agcggaagttaagcgcg

SEQ ID NO: 35501 - DNA, 17 bp, Arabidopsis thaliana
agcggaatatgcggatt

SEQ ID NO: 35502 - DNA, 17 bp, Arabidopsis thaliana
agcggaatgtaccatat

SEQ ID NO: 35503 - DNA, 17 bp, Arabidopsis thaliana
agcggacaaagacttgc

SEQ ID NO: 35504 - DNA, 17 bp, Arabidopsis thaliana
agcggacaaagcggtat

SEQ ID NO: 35505 - DNA, 17 bp, Arabidopsis thaliana
agcggacaaagcggtct

SEQ ID NO: 35506 - DNA, 17 bp, Arabidopsis thaliana
agcggacagagtggtca

SEQ ID NO: 35507 - DNA, 17 bp, Arabidopsis thaliana
agcggacagcggtatgg

SEQ ID NO: 35508 - DNA, 17 bp, Arabidopsis thaliana
agcggacattgtttgta

SEQ ID NO: 35509 - DNA, 17 bp, Arabidopsis thaliana
agcggaccaagcggaca

SEQ ID NO: 35510 - DNA, 17 bp, Arabidopsis thaliana
agcggaccaagcggatt

SEQ ID NO: 35511 - DNA, 17 bp, Arabidopsis thaliana
agcggaccaattccata

SEQ ID NO: 35512 - DNA, 17 bp, Arabidopsis thaliana
agcggaccaggactcag

SEQ ID NO: 35513 - DNA, 17 bp, Arabidopsis thaliana
agcggaccatttgcgaa

SEQ ID NO: 35514 - DNA, 17 bp, Arabidopsis thaliana
agcggaccatttgcgga

SEQ ID NO: 35515 - DNA, 17 bp, Arabidopsis thaliana
agcggacccacatcaaa

SEQ ID NO: 35516 - DNA, 17 bp, Arabidopsis thaliana
agcggaccgaccgtcgg

SEQ ID NO: 35517 - DNA, 17 bp, Arabidopsis thaliana
agcggacggtgaaccag

SEQ ID NO: 35518 - DNA, 17 bp, Arabidopsis thaliana
agcggacggttgcggtg

SEQ ID NO: 35519 - DNA, 17 bp, Arabidopsis thaliana
agcggactctgatgata

SEQ ID NO: 35520 - DNA, 17 bp, Arabidopsis thaliana
agcggactctgcaagca

SEQ ID NO: 35521 - DNA, 17 bp, Arabidopsis thaliana
agcggactgctcgagct

SEQ ID NO: 35522 - DNA, 17 bp, Arabidopsis thaliana
agcggactgtccgagct

SEQ ID NO: 35523 - DNA, 17 bp, Arabidopsis thaliana
agcggagaagattagtt

SEQ ID NO: 35524 - DNA, 17 bp, Arabidopsis thaliana
agcggagaatttcttcc

SEQ ID NO: 35525 - DNA, 17 bp, Arabidopsis thaliana
agcggagagacgagagc

SEQ ID NO: 35526 - DNA, 17 bp, Arabidopsis thaliana
agcggagcggacagagc

SEQ ID NO: 35527 - DNA, 17 bp, Arabidopsis thaliana
agcggaggaattgcgaa

SEQ ID NO: 35528 - DNA, 17 bp, Arabidopsis thaliana
agcggaggaattgcgtt

SEQ ID NO: 35529 - DNA, 17 bp, Arabidopsis thaliana
agcggagggagacattc

SEQ ID NO: 35530 - DNA, 17 bp, Arabidopsis thaliana
agcggaggtgctcgtcg

SEQ ID NO: 35531 - DNA, 17 bp, Arabidopsis thaliana
agcggagtcgacgacag

SEQ ID NO: 35532 - DNA, 17 bp, Arabidopsis thaliana
agcggagttgtttttgg

SEQ ID NO: 35533 - DNA, 17 bp, Arabidopsis thaliana
agcggataaagcggtct

SEQ ID NO: 35534 - DNA, 17 bp, Arabidopsis thaliana
agcggataagtgacacg

SEQ ID NO: 35535 - DNA, 17 bp, Arabidopsis thaliana
agcggataatttggcgc

SEQ ID NO: 35536 - DNA, 17 bp, Arabidopsis thaliana
agcggatacggttgttg

SEQ ID NO: 35537 - DNA, 17 bp, Arabidopsis thaliana
agcggatactgacacat

SEQ ID NO: 35538 - DNA, 17 bp, Arabidopsis thaliana
agcggatagcagctcta

SEQ ID NO: 35539 - DNA, 17 bp, Arabidopsis thaliana
agcggatatcagttcga

SEQ ID NO: 35540 - DNA, 17 bp, Arabidopsis thaliana
agcggatcaaacccctc

SEQ ID NO: 35541 - DNA, 17 bp, Arabidopsis thaliana
agcggatcaaatttctc

SEQ ID NO: 35542 - DNA, 17 bp, Arabidopsis thaliana
agcggatcaaccgacct

SEQ ID NO: 35543 - DNA, 17 bp, Arabidopsis thaliana
agcggatcaactctact

SEQ ID NO: 35544 - DNA, 17 bp, Arabidopsis thaliana
agcggatcaactctatt

SEQ ID NO: 35545 - DNA, 17 bp, Arabidopsis thaliana
agcggatcaagcggttg

SEQ ID NO: 35546 - DNA, 17 bp, Arabidopsis thaliana
agcggatcaagcggttt

SEQ ID NO: 35547 - DNA, 17 bp, Arabidopsis thaliana
agcggatcacaggactt

SEQ ID NO: 35548 - DNA, 17 bp, Arabidopsis thaliana
agcggatcacagggctt

SEQ ID NO: 35549 - DNA, 17 bp, Arabidopsis thaliana
agcggatcacctttcaa

SEQ ID NO: 35550 - DNA, 17 bp, Arabidopsis thaliana
agcggatccacaggtct

SEQ ID NO: 35551 - DNA, 17 bp, Arabidopsis thaliana
agcggatccttctactt

SEQ ID NO: 35552 - DNA, 17 bp, Arabidopsis thaliana
agcggatccttctgctt

SEQ ID NO: 35553 - DNA, 17 bp, Arabidopsis thaliana
agcggatcgaatttctc

SEQ ID NO: 35554 - DNA, 17 bp, Arabidopsis thaliana
agcggatcgagcggtgc

SEQ ID NO: 35555 - DNA, 17 bp, Arabidopsis thaliana
agcggatcgtgtcacgt

SEQ ID NO: 35556 - DNA, 17 bp, Arabidopsis thaliana
agcggatctgcgaagga

SEQ ID NO: 35557 - DNA, 17 bp, Arabidopsis thaliana
agcggatctgtcctagc

SEQ ID NO: 35558 - DNA, 17 bp, Arabidopsis thaliana
agcggatcttgttctga

SEQ ID NO: 35559 - DNA, 17 bp, Arabidopsis thaliana
agcggatgaccaactgc

SEQ ID NO: 35560 - DNA, 17 bp, Arabidopsis thaliana
agcggatgagccataca

SEQ ID NO: 35561 - DNA, 17 bp, Arabidopsis thaliana
agcggatgagggccggc

SEQ ID NO: 35562 - DNA, 17 bp, Arabidopsis thaliana
agcggatgagttgtggt

SEQ ID NO: 35563 - DNA, 17 bp, Arabidopsis thaliana
agcggatgcggttgcgg

SEQ ID NO: 35564 - DNA, 17 bp, Arabidopsis thaliana
agcggatggggctgtgg

SEQ ID NO: 35565 - DNA, 17 bp, Arabidopsis thaliana
agcggatgggggccggc

SEQ ID NO: 35566 - DNA, 17 bp, Arabidopsis thaliana
agcggatgtagccaagt

SEQ ID NO: 35567 - DNA, 17 bp, Arabidopsis thaliana
agcggatgtagccaatt

SEQ ID NO: 35568 - DNA, 17 bp, Arabidopsis thaliana
agcggatgtcgcttata

SEQ ID NO: 35569 - DNA, 17 bp, Arabidopsis thaliana
agcggatgtctcacttt

SEQ ID NO: 35570 - DNA, 17 bp, Arabidopsis thaliana
agcggatgtgagaggac

SEQ ID NO: 35571 - DNA, 17 bp, Arabidopsis thaliana
agcggatgtgtgacctc

SEQ ID NO: 35572 - DNA, 17 bp, Arabidopsis thaliana
agcggatgttgctacta

SEQ ID NO: 35573 - DNA, 17 bp, Arabidopsis thaliana
agcggatgttgcttaga

SEQ ID NO: 35574 - DNA, 17 bp, Arabidopsis thaliana
agcggatgttgcttata

SEQ ID NO: 35575 - DNA, 17 bp, Arabidopsis thaliana
agcggatgttgcttatg

SEQ ID NO: 35576 - DNA, 17 bp, Arabidopsis thaliana
agcggatgttgcttcta

SEQ ID NO: 35577 - DNA, 17 bp, Arabidopsis thaliana
agcggatgtttcttata

SEQ ID NO: 35578 - DNA, 17 bp, Arabidopsis thaliana
agcggattattcgtgtg

SEQ ID NO: 35579 - DNA, 17 bp, Arabidopsis thaliana
agcggattctgacacat

SEQ ID NO: 35580 - DNA, 17 bp, Arabidopsis thaliana
agcggattctttgacaa

SEQ ID NO: 35581 - DNA, 17 bp, Arabidopsis thaliana
agcggatttctaggctt

SEQ ID NO: 35582 - DNA, 17 bp, Arabidopsis thaliana
agcggatttctgagatt

SEQ ID NO: 35583 - DNA, 17 bp, Arabidopsis thaliana
agcggcaacagcggtag

SEQ ID NO: 35584 - DNA, 17 bp, Arabidopsis thaliana
agcggcaaccacggcgt

SEQ ID NO: 35585 - DNA, 17 bp, Arabidopsis thaliana
agcggcaacggctccgg

SEQ ID NO: 35586 - DNA, 17 bp, Arabidopsis thaliana
agcggcaacggctgcgc

SEQ ID NO: 35587 - DNA, 17 bp, Arabidopsis thaliana
agcggcaacggctgcgg

SEQ ID NO: 35588 - DNA, 17 bp, Arabidopsis thaliana
agcggcaatcagcagta

SEQ ID NO: 35589 - DNA, 17 bp, Arabidopsis thaliana
agcggcaatcagcagtg

SEQ ID NO: 35590 - DNA, 17 bp, Arabidopsis thaliana
agcggcaatgattttga

SEQ ID NO: 35591 - DNA, 17 bp, Arabidopsis thaliana
agcggcaattagcagtg

SEQ ID NO: 35592 - DNA, 17 bp, Arabidopsis thaliana
agcggcaatttggagtg

SEQ ID NO: 35593 - DNA, 17 bp, Arabidopsis thaliana
agcggcaccgcagggtt

SEQ ID NO: 35594 - DNA, 17 bp, Arabidopsis thaliana
agcggcacgtctgcctg

SEQ ID NO: 35595 - DNA, 17 bp, Arabidopsis thaliana
agcggcactcggtcctc

SEQ ID NO: 35596 - DNA, 17 bp, Arabidopsis thaliana
agcggcactgggtggcg

SEQ ID NO: 35597 - DNA, 17 bp, Arabidopsis thaliana
agcggcagcgcagggtt

SEQ ID NO: 35598 - DNA, 17 bp, Arabidopsis thaliana
agcggcagcggcagcga

SEQ ID NO: 35599 - DNA, 17 bp, Arabidopsis thaliana
agcggcagcggcggcgg

SEQ ID NO: 35600 - DNA, 17 bp, Arabidopsis thaliana
agcggcaggccgtggct

SEQ ID NO: 35601 - DNA, 17 bp, Arabidopsis thaliana
agcggcatagcctaagg

SEQ ID NO: 35602 - DNA, 17 bp, Arabidopsis thaliana
agcggcattcgaccgac

SEQ ID NO: 35603 - DNA, 17 bp, Arabidopsis thaliana
agcggcattctgtccac

SEQ ID NO: 35604 - DNA, 17 bp, Arabidopsis thaliana
agcggcatttgccatgt

SEQ ID NO: 35605 - DNA, 17 bp, Arabidopsis thaliana
agcggccacaacctgtg

SEQ ID NO: 35606 - DNA, 17 bp, Arabidopsis thaliana
agcggccacgccttggg

SEQ ID NO: 35607 - DNA, 17 bp, Arabidopsis thaliana
agcggccagctacaagt

SEQ ID NO: 35608 - DNA, 17 bp, Arabidopsis thaliana
agcggcccaagcggaca

SEQ ID NO: 35609 - DNA, 17 bp, Arabidopsis thaliana
agcggcccagatccaag

SEQ ID NO: 35610 - DNA, 17 bp, Arabidopsis thaliana
agcggccgaataacgct

SEQ ID NO: 35611 - DNA, 17 bp, Arabidopsis thaliana
agcggccggcctgaaca

SEQ ID NO: 35612 - DNA, 17 bp, Arabidopsis thaliana
agcggccgtcggcgcag

SEQ ID NO: 35613 - DNA, 17 bp, Arabidopsis thaliana
agcggccgtcggtccct

SEQ ID NO: 35614 - DNA, 17 bp, Arabidopsis thaliana
agcggccgtcggtgcag

SEQ ID NO: 35615 - DNA, 17 bp, Arabidopsis thaliana
agcggccttatgacgta

SEQ ID NO: 35616 - DNA, 17 bp, Arabidopsis thaliana
agcggcgaattacagac

SEQ ID NO: 35617 - DNA, 17 bp, Arabidopsis thaliana
agcggcgagcgaacgcg

SEQ ID NO: 35618 - DNA, 17 bp, Arabidopsis thaliana
agcggcgataatgctct

SEQ ID NO: 35619 - DNA, 17 bp, Arabidopsis thaliana
agcggcgatgtacgagt

SEQ ID NO: 35620 - DNA, 17 bp, Arabidopsis thaliana
agcggcgattgtggctg

SEQ ID NO: 35621 - DNA, 17 bp, Arabidopsis thaliana
agcggcgcgaacggagc

SEQ ID NO: 35622 - DNA, 17 bp, Arabidopsis thaliana
agcggcggagcagaagg

SEQ ID NO: 35623 - DNA, 17 bp, Arabidopsis thaliana
agcggcggatcccatag

SEQ ID NO: 35624 - DNA, 17 bp, Arabidopsis thaliana
agcggcggatggagaag

SEQ ID NO: 35625 - DNA, 17 bp, Arabidopsis thaliana
agcggcgggaggccctg

SEQ ID NO: 35626 - DNA, 17 bp, Arabidopsis thaliana
agcggcgggtagaatcc

SEQ ID NO: 35627 - DNA, 17 bp, Arabidopsis thaliana
agcggcggtgggctagc

SEQ ID NO: 35628 - DNA, 17 bp, Arabidopsis thaliana
agcggcggtgttggcta

SEQ ID NO: 35629 - DNA, 17 bp, Arabidopsis thaliana
agcggcgtttattccgg

SEQ ID NO: 35630 - DNA, 17 bp, Arabidopsis thaliana
agcggctaaagcgggag

SEQ ID NO: 35631 - DNA, 17 bp, Arabidopsis thaliana
agcggctacatgtctcc

SEQ ID NO: 35632 - DNA, 17 bp, Arabidopsis thaliana
agcggctatcaccaggg

SEQ ID NO: 35633 - DNA, 17 bp, Arabidopsis thaliana
agcggctatgtgcaggg

SEQ ID NO: 35634 - DNA, 17 bp, Arabidopsis thaliana
agcggctgatcgtactc

SEQ ID NO: 35635 - DNA, 17 bp, Arabidopsis thaliana
agcggctgcacaagggg

SEQ ID NO: 35636 - DNA, 17 bp, Arabidopsis thaliana
agcggctgccactggca

SEQ ID NO: 35637 - DNA, 17 bp, Arabidopsis thaliana
agcggctgcggcaacgg

SEQ ID NO: 35638 - DNA, 17 bp, Arabidopsis thaliana
agcggctgctcgtggag

SEQ ID NO: 35639 - DNA, 17 bp, Arabidopsis thaliana
agcggctgctgactcta

SEQ ID NO: 35640 - DNA, 17 bp, Arabidopsis thaliana
agcggctggaagagcac

SEQ ID NO: 35641 - DNA, 17 bp, Arabidopsis thaliana
agcggctggaagatcac

SEQ ID NO: 35642 - DNA, 17 bp, Arabidopsis thaliana
agcggctgtagcacaaa

SEQ ID NO: 35643 - DNA, 17 bp, Arabidopsis thaliana
agcggcttaagccatta

SEQ ID NO: 35644 - DNA, 17 bp, Arabidopsis thaliana
agcggcttctatgattg

SEQ ID NO: 35645 - DNA, 17 bp, Arabidopsis thaliana
agcggcttgatttgatt

SEQ ID NO: 35646 - DNA, 17 bp, Arabidopsis thaliana
agcggcttggccggtag

SEQ ID NO: 35647 - DNA, 17 bp, Arabidopsis thaliana
agcggctttcggaagtt

SEQ ID NO: 35648 - DNA, 17 bp, Arabidopsis thaliana
agcggctttggaagttt

SEQ ID NO: 35649 - DNA, 17 bp, Arabidopsis thaliana
agcgggaaaacgtgatt

SEQ ID NO: 35650 - DNA, 17 bp, Arabidopsis thaliana
agcgggaaaattacgga

SEQ ID NO: 35651 - DNA, 17 bp, Arabidopsis thaliana
agcgggaaaattacggg

SEQ ID NO: 35652 - DNA, 17 bp, Arabidopsis thaliana
agcgggaaaatttcagt

SEQ ID NO: 35653 - DNA, 17 bp, Arabidopsis thaliana
agcgggaaacagtccaa

SEQ ID NO: 35654 - DNA, 17 bp, Arabidopsis thaliana
agcgggaactcctcgtg

SEQ ID NO: 35655 - DNA, 17 bp, Arabidopsis thaliana
agcgggaagcatttgca

SEQ ID NO: 35656 - DNA, 17 bp, Arabidopsis thaliana
agcgggaagtagtcgct

SEQ ID NO: 35657 - DNA, 17 bp, Arabidopsis thaliana
agcgggaagtcctcgtg

SEQ ID NO: 35658 - DNA, 17 bp, Arabidopsis thaliana
agcgggaatgtagtggc

SEQ ID NO: 35659 - DNA, 17 bp, Arabidopsis thaliana
agcgggacagatttgga

SEQ ID NO: 35660 - DNA, 17 bp, Arabidopsis thaliana
agcgggacgggtttgac

SEQ ID NO: 35661 - DNA, 17 bp, Arabidopsis thaliana
agcgggacgggtttgga

SEQ ID NO: 35662 - DNA, 17 bp, Arabidopsis thaliana
agcgggacgggtttggc

SEQ ID NO: 35663 - DNA, 17 bp, Arabidopsis thaliana
agcgggacggttttggc

SEQ ID NO: 35664 - DNA, 17 bp, Arabidopsis thaliana
agcgggacggttttggg

SEQ ID NO: 35665 - DNA, 17 bp, Arabidopsis thaliana
agcgggacgtcgcacga

SEQ ID NO: 35666 - DNA, 17 bp, Arabidopsis thaliana
agcgggactggtgcggg

SEQ ID NO: 35667 - DNA, 17 bp, Arabidopsis thaliana
agcgggagattcatctt

SEQ ID NO: 35668 - DNA, 17 bp, Arabidopsis thaliana
agcgggatccctcgcgg

SEQ ID NO: 35669 - DNA, 17 bp, Arabidopsis thaliana
agcgggatcctcccaac

SEQ ID NO: 35670 - DNA, 17 bp, Arabidopsis thaliana
agcgggatcttctttgt

SEQ ID NO: 35671 - DNA, 17 bp, Arabidopsis thaliana
agcgggatgtgtaccag

SEQ ID NO: 35672 - DNA, 17 bp, Arabidopsis thaliana
agcgggattggacatca

SEQ ID NO: 35673 - DNA, 17 bp, Arabidopsis thaliana
agcgggatttgatgtgt

SEQ ID NO: 35674 - DNA, 17 bp, Arabidopsis thaliana
agcgggatttgtttgct

SEQ ID NO: 35675 - DNA, 17 bp, Arabidopsis thaliana
agcgggcattacttcat

SEQ ID NO: 35676 - DNA, 17 bp, Arabidopsis thaliana
agcgggccaaatgttga

SEQ ID NO: 35677 - DNA, 17 bp, Arabidopsis thaliana
agcgggccaaatgttgt

SEQ ID NO: 35678 - DNA, 17 bp, Arabidopsis thaliana
agcgggccattcttcag

SEQ ID NO: 35679 - DNA, 17 bp, Arabidopsis thaliana
agcgggcgagagggcaa

SEQ ID NO: 35680 - DNA, 17 bp, Arabidopsis thaliana
agcgggcggtgctgcat

SEQ ID NO: 35681 - DNA, 17 bp, Arabidopsis thaliana
agcgggctgggctcggg

SEQ ID NO: 35682 - DNA, 17 bp, Arabidopsis thaliana
agcggggactcagagac

SEQ ID NO: 35683 - DNA, 17 bp, Arabidopsis thaliana
agcggggactcagagcc

SEQ ID NO: 35684 - DNA, 17 bp, Arabidopsis thaliana
agcggggattcgacttc

SEQ ID NO: 35685 - DNA, 17 bp, Arabidopsis thaliana
agcggggattgtaactg

SEQ ID NO: 35686 - DNA, 17 bp, Arabidopsis thaliana
agcggggcgagtttggc

SEQ ID NO: 35687 - DNA, 17 bp, Arabidopsis thaliana
agcgggggtttgcgttc

SEQ ID NO: 35688 - DNA, 17 bp, Arabidopsis thaliana
agcgggtaatcccgcct

SEQ ID NO: 35689 - DNA, 17 bp, Arabidopsis thaliana
agcgggtacaatgattg

SEQ ID NO: 35690 - DNA, 17 bp, Arabidopsis thaliana
agcgggtcattcttcag

SEQ ID NO: 35691 - DNA, 17 bp, Arabidopsis thaliana
agcgggtcgccgcgtgc

SEQ ID NO: 35692 - DNA, 17 bp, Arabidopsis thaliana
agcgggtcggattcgga

SEQ ID NO: 35693 - DNA, 17 bp, Arabidopsis thaliana
agcgggtcttggatttg

SEQ ID NO: 35694 - DNA, 17 bp, Arabidopsis thaliana
agcgggtgcgatagtaa

SEQ ID NO: 35695 - DNA, 17 bp, Arabidopsis thaliana
agcgggtgcgattgcgg

SEQ ID NO: 35696 - DNA, 17 bp, Arabidopsis thaliana
agcgggtgcgggtgcgg

SEQ ID NO: 35697 - DNA, 17 bp, Arabidopsis thaliana
agcgggtgcggttgcgg

SEQ ID NO: 35698 - DNA, 17 bp, Arabidopsis thaliana
agcgggtgctgtagcga

SEQ ID NO: 35699 - DNA, 17 bp, Arabidopsis thaliana
agcgggtgggacccacg

SEQ ID NO: 35700 - DNA, 17 bp, Arabidopsis thaliana
agcgggttcttcagaaa

SEQ ID NO: 35701 - DNA, 17 bp, Arabidopsis thaliana
agcgggttgcactgtcg

SEQ ID NO: 35702 - DNA, 17 bp, Arabidopsis thaliana
agcgggtttcctaggtt

SEQ ID NO: 35703 - DNA, 17 bp, Arabidopsis thaliana
agcgggttttggtccaa

SEQ ID NO: 35704 - DNA, 17 bp, Arabidopsis thaliana
agcgggttttgtctgcg

SEQ ID NO: 35705 - DNA, 17 bp, Arabidopsis thaliana
agcggtaatcagctcac

SEQ ID NO: 35706 - DNA, 17 bp, Arabidopsis thaliana
agcggtacaaccgaaga

SEQ ID NO: 35707 - DNA, 17 bp, Arabidopsis thaliana
agcggtacaagtgcaga

SEQ ID NO: 35708 - DNA, 17 bp, Arabidopsis thaliana
agcggtacatgtgcggt

SEQ ID NO: 35709 - DNA, 17 bp, Arabidopsis thaliana
agcggtacggagcaggc

SEQ ID NO: 35710 - DNA, 17 bp, Arabidopsis thaliana
agcggtacgggagaagt

SEQ ID NO: 35711 - DNA, 17 bp, Arabidopsis thaliana
agcggtactaaatcgac

SEQ ID NO: 35712 - DNA, 17 bp, Arabidopsis thaliana
agcggtactcggagatc

SEQ ID NO: 35713 - DNA, 17 bp, Arabidopsis thaliana
agcggtagcggcaacgg

SEQ ID NO: 35714 - DNA, 17 bp, Arabidopsis thaliana
agcggtataggtctcgc

SEQ ID NO: 35715 - DNA, 17 bp, Arabidopsis thaliana
agcggtataggtctctc

SEQ ID NO: 35716 - DNA, 17 bp, Arabidopsis thaliana
agcggtatctaccactt

SEQ ID NO: 35717 - DNA, 17 bp, Arabidopsis thaliana
agcggtatctagcggtt

SEQ ID NO: 35718 - DNA, 17 bp, Arabidopsis thaliana
agcggtatgtctctttg

SEQ ID NO: 35719 - DNA, 17 bp, Arabidopsis thaliana
agcggtccaaagcggta

SEQ ID NO: 35720 - DNA, 17 bp, Arabidopsis thaliana
agcggtccaaagcggtt

SEQ ID NO: 35721 - DNA, 17 bp, Arabidopsis thaliana
agcggtccacctactag

SEQ ID NO: 35722 - DNA, 17 bp, Arabidopsis thaliana
agcggtcctccagtgga

SEQ ID NO: 35723 - DNA, 17 bp, Arabidopsis thaliana
agcggtcgaatgtatag

SEQ ID NO: 35724 - DNA, 17 bp, Arabidopsis thaliana
agcggtcgagtggcggc

SEQ ID NO: 35725 - DNA, 17 bp, Arabidopsis thaliana
agcggtcggattgcggc

SEQ ID NO: 35726 - DNA, 17 bp, Arabidopsis thaliana
agcggtctaatttatct

SEQ ID NO: 35727 - DNA, 17 bp, Arabidopsis thaliana
agcggtctaatttgtct

SEQ ID NO: 35728 - DNA, 17 bp, Arabidopsis thaliana
agcggtctatatctgta

SEQ ID NO: 35729 - DNA, 17 bp, Arabidopsis thaliana
agcggtctcatctatgg

SEQ ID NO: 35730 - DNA, 17 bp, Arabidopsis thaliana
agcggtctgtacttcaa

SEQ ID NO: 35731 - DNA, 17 bp, Arabidopsis thaliana
agcggtcttggcaaatg

SEQ ID NO: 35732 - DNA, 17 bp, Arabidopsis thaliana
agcggtgaaagtcgcca

SEQ ID NO: 35733 - DNA, 17 bp, Arabidopsis thaliana
agcggtgactctcatgg

SEQ ID NO: 35734 - DNA, 17 bp, Arabidopsis thaliana
agcggtgacttctattt

SEQ ID NO: 35735 - DNA, 17 bp, Arabidopsis thaliana
agcggtgagtcgatttg

SEQ ID NO: 35736 - DNA, 17 bp, Arabidopsis thaliana
agcggtgagtcgcgcga

SEQ ID NO: 35737 - DNA, 17 bp, Arabidopsis thaliana
agcggtgataccaacaa

SEQ ID NO: 35738 - DNA, 17 bp, Arabidopsis thaliana
agcggtgcaggacaagc

SEQ ID NO: 35739 - DNA, 17 bp, Arabidopsis thaliana
agcggtgcattagtcaa

SEQ ID NO: 35740 - DNA, 17 bp, Arabidopsis thaliana
agcggtgcctacaatga

SEQ ID NO: 35741 - DNA, 17 bp, Arabidopsis thaliana
agcggtgcggttttcaa

SEQ ID NO: 35742 - DNA, 17 bp, Arabidopsis thaliana
agcggtgctggccgcga

SEQ ID NO: 35743 - DNA, 17 bp, Arabidopsis thaliana
agcggtggtggctggct

SEQ ID NO: 35744 - DNA, 17 bp, Arabidopsis thaliana
agcggtgtacagatagc

SEQ ID NO: 35745 - DNA, 17 bp, Arabidopsis thaliana
agcggtgtacagttagc

SEQ ID NO: 35746 - DNA, 17 bp, Arabidopsis thaliana
agcggtgtaccgcggag

SEQ ID NO: 35747 - DNA, 17 bp, Arabidopsis thaliana
agcggtgtattgttgag

SEQ ID NO: 35748 - DNA, 17 bp, Arabidopsis thaliana
agcggtgtcaaaattgg

SEQ ID NO: 35749 - DNA, 17 bp, Arabidopsis thaliana
agcggtgtcctaggttc

SEQ ID NO: 35750 - DNA, 17 bp, Arabidopsis thaliana
agcggtgtctctaaagg

SEQ ID NO: 35751 - DNA, 17 bp, Arabidopsis thaliana
agcggttaacgatagga

SEQ ID NO: 35752 - DNA, 17 bp, Arabidopsis thaliana
agcggttaagcggtcgg

SEQ ID NO: 35753 - DNA, 17 bp, Arabidopsis thaliana
agcggttaaggcggaca

SEQ ID NO: 35754 - DNA, 17 bp, Arabidopsis thaliana
agcggttagacggaccg

SEQ ID NO: 35755 - DNA, 17 bp, Arabidopsis thaliana
agcggttagacggacgg

SEQ ID NO: 35756 - DNA, 17 bp, Arabidopsis thaliana
agcggttagccgtgaac

SEQ ID NO: 35757 - DNA, 17 bp, Arabidopsis thaliana
agcggttatagaagtgc

SEQ ID NO: 35758 - DNA, 17 bp, Arabidopsis thaliana
agcggttatcccaccgg

SEQ ID NO: 35759 - DNA, 17 bp, Arabidopsis thaliana
agcggttattagcgatt

SEQ ID NO: 35760 - DNA, 17 bp, Arabidopsis thaliana
agcggttattagcggtt

SEQ ID NO: 35761 - DNA, 17 bp, Arabidopsis thaliana
agcggttcacattattc

SEQ ID NO: 35762 - DNA, 17 bp, Arabidopsis thaliana
agcggttcagcacaaac

SEQ ID NO: 35763 - DNA, 17 bp, Arabidopsis thaliana
agcggttcaggatcaga

SEQ ID NO: 35764 - DNA, 17 bp, Arabidopsis thaliana
agcggttcagtacgaac

SEQ ID NO: 35765 - DNA, 17 bp, Arabidopsis thaliana
agcggttcagtgcgatt

SEQ ID NO: 35766 - DNA, 17 bp, Arabidopsis thaliana
agcggttcgagtccgct

SEQ ID NO: 35767 - DNA, 17 bp, Arabidopsis thaliana
agcggttcgagtcctct

SEQ ID NO: 35768 - DNA, 17 bp, Arabidopsis thaliana
agcggttcgatcccgct

SEQ ID NO: 35769 - DNA, 17 bp, Arabidopsis thaliana
agcggttcgatcccgtc

SEQ ID NO: 35770 - DNA, 17 bp, Arabidopsis thaliana
agcggttgaaaattgtt

SEQ ID NO: 35771 - DNA, 17 bp, Arabidopsis thaliana
agcggttgaggccgtga

SEQ ID NO: 35772 - DNA, 17 bp, Arabidopsis thaliana
agcggttgaggctgtga

SEQ ID NO: 35773 - DNA, 17 bp, Arabidopsis thaliana
agcggttgaggttgagg

SEQ ID NO: 35774 - DNA, 17 bp, Arabidopsis thaliana
agcggttgagtccgctt

SEQ ID NO: 35775 - DNA, 17 bp, Arabidopsis thaliana
agcggttgcaagtctta

SEQ ID NO: 35776 - DNA, 17 bp, Arabidopsis thaliana
agcggttgcggacaatt

SEQ ID NO: 35777 - DNA, 17 bp, Arabidopsis thaliana
agcggttgcggttgcgg

SEQ ID NO: 35778 - DNA, 17 bp, Arabidopsis thaliana
agcggttggagacacta

SEQ ID NO: 35779 - DNA, 17 bp, Arabidopsis thaliana
agcggttggatacgaac

SEQ ID NO: 35780 - DNA, 17 bp, Arabidopsis thaliana
agcggttgggtacaaac

SEQ ID NO: 35781 - DNA, 17 bp, Arabidopsis thaliana
agcggttgggtacaaat

SEQ ID NO: 35782 - DNA, 17 bp, Arabidopsis thaliana
agcggttgggtacgaac

SEQ ID NO: 35783 - DNA, 17 bp, Arabidopsis thaliana
agcggttgggtgcgaac

SEQ ID NO: 35784 - DNA, 17 bp, Arabidopsis thaliana
agcggttgttagcgatt

SEQ ID NO: 35785 - DNA, 17 bp, Arabidopsis thaliana
agcggttgttagcgttt

SEQ ID NO: 35786 - DNA, 17 bp, Arabidopsis thaliana
agcggtttacttttggg

SEQ ID NO: 35787 - DNA, 17 bp, Arabidopsis thaliana
agcggtttacttttgtg

SEQ ID NO: 35788 - DNA, 17 bp, Arabidopsis thaliana
agcggtttacttttttg

SEQ ID NO: 35789 - DNA, 17 bp, Arabidopsis thaliana
agcggtttagatattcg

SEQ ID NO: 35790 - DNA, 17 bp, Arabidopsis thaliana
agcggtttaggcttctg

SEQ ID NO: 35791 - DNA, 17 bp, Arabidopsis thaliana
agcggtttagtccatac

SEQ ID NO: 35792 - DNA, 17 bp, Arabidopsis thaliana
agcggtttagtccatgt

SEQ ID NO: 35793 - DNA, 17 bp, Arabidopsis thaliana
agcggtttatgaactgt

SEQ ID NO: 35794 - DNA, 17 bp, Arabidopsis thaliana
agcggtttattgtccgt

SEQ ID NO: 35795 - DNA, 17 bp, Arabidopsis thaliana
agcggtttattgttcgt

SEQ ID NO: 35796 - DNA, 17 bp, Arabidopsis thaliana
agcggtttccggcgaaa

SEQ ID NO: 35797 - DNA, 17 bp, Arabidopsis thaliana
agcggtttctatgatta

SEQ ID NO: 35798 - DNA, 17 bp, Arabidopsis thaliana
agcggtttctatgattg

SEQ ID NO: 35799 - DNA, 17 bp, Arabidopsis thaliana
agcggtttctatggttg

SEQ ID NO: 35800 - DNA, 17 bp, Arabidopsis thaliana
agcggtttttatgattg

SEQ ID NO: 35801 - DNA, 17 bp, Arabidopsis thaliana
agcggtttttgatcctc

SEQ ID NO: 35802 - DNA, 17 bp, Arabidopsis thaliana
agcggtttttttgccca

SEQ ID NO: 35803 - DNA, 17 bp, Arabidopsis thaliana
agcgtaaaccttgctct

SEQ ID NO: 35804 - DNA, 17 bp, Arabidopsis thaliana
agcgtaaccgaaacctc

SEQ ID NO: 35805 - DNA, 17 bp, Arabidopsis thaliana
agcgtaacggatcatca

SEQ ID NO: 35806 - DNA, 17 bp, Arabidopsis thaliana
agcgtaacggcctaaca

SEQ ID NO: 35807 - DNA, 17 bp, Arabidopsis thaliana
agcgtaagaccgttagt

SEQ ID NO: 35808 - DNA, 17 bp, Arabidopsis thaliana
agcgtaagactcgtcca

SEQ ID NO: 35809 - DNA, 17 bp, Arabidopsis thaliana
agcgtaatggtataagc

SEQ ID NO: 35810 - DNA, 17 bp, Arabidopsis thaliana
agcgtacagggtagagc

SEQ ID NO: 35811 - DNA, 17 bp, Arabidopsis thaliana
agcgtaccatttgcgaa

SEQ ID NO: 35812 - DNA, 17 bp, Arabidopsis thaliana
agcgtaccgaccgtcag

SEQ ID NO: 35813 - DNA, 17 bp, Arabidopsis thaliana
agcgtactatgggccat

SEQ ID NO: 35814 - DNA, 17 bp, Arabidopsis thaliana
agcgtagaaagtggagc

SEQ ID NO: 35815 - DNA, 17 bp, Arabidopsis thaliana
agcgtagaccaactccg

SEQ ID NO: 35816 - DNA, 17 bp, Arabidopsis thaliana
agcgtagaccgacgttt

SEQ ID NO: 35817 - DNA, 17 bp, Arabidopsis thaliana
agcgtaggactttgatt

SEQ ID NO: 35818 - DNA, 17 bp, Arabidopsis thaliana
agcgtaggcttgctatg

SEQ ID NO: 35819 - DNA, 17 bp, Arabidopsis thaliana
agcgtaggcttgctttg

SEQ ID NO: 35820 - DNA, 17 bp, Arabidopsis thaliana
agcgtagggcatagacg

SEQ ID NO: 35821 - DNA, 17 bp, Arabidopsis thaliana
agcgtaggtataaactc

SEQ ID NO: 35822 - DNA, 17 bp, Arabidopsis thaliana
agcgtatcaaaagcccg

SEQ ID NO: 35823 - DNA, 17 bp, Arabidopsis thaliana
agcgtatcgccgaccga

SEQ ID NO: 35824 - DNA, 17 bp, Arabidopsis thaliana
agcgtatcgtgacacac

SEQ ID NO: 35825 - DNA, 17 bp, Arabidopsis thaliana
agcgtatcgtgacacat

SEQ ID NO: 35826 - DNA, 17 bp, Arabidopsis thaliana
agcgtatctgtcgtcgc

SEQ ID NO: 35827 - DNA, 17 bp, Arabidopsis thaliana
agcgtatgatgtcgatg

SEQ ID NO: 35828 - DNA, 17 bp, Arabidopsis thaliana
agcgtatgcttccgagg

SEQ ID NO: 35829 - DNA, 17 bp, Arabidopsis thaliana
agcgtatggcggttctc

SEQ ID NO: 35830 - DNA, 17 bp, Arabidopsis thaliana
agcgtatgtctctggat

SEQ ID NO: 35831 - DNA, 17 bp, Arabidopsis thaliana
agcgtattaggcggatc

SEQ ID NO: 35832 - DNA, 17 bp, Arabidopsis thaliana
agcgtattcgcttcaac

SEQ ID NO: 35833 - DNA, 17 bp, Arabidopsis thaliana
agcgtattgacgatcaa

SEQ ID NO: 35834 - DNA, 17 bp, Arabidopsis thaliana
agcgtatttggaggggt

SEQ ID NO: 35835 - DNA, 17 bp, Arabidopsis thaliana
agcgtattttgcgactg

SEQ ID NO: 35836 - DNA, 17 bp, Arabidopsis thaliana
agcgtcaacactgaccc

SEQ ID NO: 35837 - DNA, 17 bp, Arabidopsis thaliana
agcgtcaatggcgtgat

SEQ ID NO: 35838 - DNA, 17 bp, Arabidopsis thaliana
agcgtcacggacagcag

SEQ ID NO: 35839 - DNA, 17 bp, Arabidopsis thaliana
agcgtcactcaaaccgg

SEQ ID NO: 35840 - DNA, 17 bp, Arabidopsis thaliana
agcgtcactccaaccgg

SEQ ID NO: 35841 - DNA, 17 bp, Arabidopsis thaliana
agcgtcactcgaaccgg

SEQ ID NO: 35842 - DNA, 17 bp, Arabidopsis thaliana
agcgtcactcgaacctt

SEQ ID NO: 35843 - DNA, 17 bp, Arabidopsis thaliana
agcgtcactcgaatcgg

SEQ ID NO: 35844 - DNA, 17 bp, Arabidopsis thaliana
agcgtcagcggcagcgg

SEQ ID NO: 35845 - DNA, 17 bp, Arabidopsis thaliana
agcgtcagcgggagcag

SEQ ID NO: 35846 - DNA, 17 bp, Arabidopsis thaliana
agcgtcaggctaaggta

SEQ ID NO: 35847 - DNA, 17 bp, Arabidopsis thaliana
agcgtcaggcttaaggt

SEQ ID NO: 35848 - DNA, 17 bp, Arabidopsis thaliana
agcgtcaggtctaagga

SEQ ID NO: 35849 - DNA, 17 bp, Arabidopsis thaliana
agcgtcatgaactttgc

SEQ ID NO: 35850 - DNA, 17 bp, Arabidopsis thaliana
agcgtcatgatctctta

SEQ ID NO: 35851 - DNA, 17 bp, Arabidopsis thaliana
agcgtcatggacttctg

SEQ ID NO: 35852 - DNA, 17 bp, Arabidopsis thaliana
agcgtcatggactttcc

SEQ ID NO: 35853 - DNA, 17 bp, Arabidopsis thaliana
agcgtcatggactttgc

SEQ ID NO: 35854 - DNA, 17 bp, Arabidopsis thaliana
agcgtcatggacttttg

SEQ ID NO: 35855 - DNA, 17 bp, Arabidopsis thaliana
agcgtcattcgaaccga

SEQ ID NO: 35856 - DNA, 17 bp, Arabidopsis thaliana
agcgtcattcgaaccgg

SEQ ID NO: 35857 - DNA, 17 bp, Arabidopsis thaliana
agcgtcatttgaaccaa

SEQ ID NO: 35858 - DNA, 17 bp, Arabidopsis thaliana
agcgtcatttgaaccag

SEQ ID NO: 35859 - DNA, 17 bp, Arabidopsis thaliana
agcgtcatttgaaccgg

SEQ ID NO: 35860 - DNA, 17 bp, Arabidopsis thaliana
agcgtccctttggtcca

SEQ ID NO: 35861 - DNA, 17 bp, Arabidopsis thaliana
agcgtcctcaccgacgg

SEQ ID NO: 35862 - DNA, 17 bp, Arabidopsis thaliana
agcgtcctcagcgacca

SEQ ID NO: 35863 - DNA, 17 bp, Arabidopsis thaliana
agcgtcctcagcgaccg

SEQ ID NO: 35864 - DNA, 17 bp, Arabidopsis thaliana
agcgtcctcagcgacga

SEQ ID NO: 35865 - DNA, 17 bp, Arabidopsis thaliana
agcgtcctcagcgacgg

SEQ ID NO: 35866 - DNA, 17 bp, Arabidopsis thaliana
agcgtcctccctcgaga

SEQ ID NO: 35867 - DNA, 17 bp, Arabidopsis thaliana
agcgtcctcgactgcta

SEQ ID NO: 35868 - DNA, 17 bp, Arabidopsis thaliana
agcgtcctgtcaaaccc

SEQ ID NO: 35869 - DNA, 17 bp, Arabidopsis thaliana
agcgtccttaaacattg

SEQ ID NO: 35870 - DNA, 17 bp, Arabidopsis thaliana
agcgtcgaagcatatgt

SEQ ID NO: 35871 - DNA, 17 bp, Arabidopsis thaliana
agcgtcgaagttcagtt

SEQ ID NO: 35872 - DNA, 17 bp, Arabidopsis thaliana
agcgtcgagagtctttt

SEQ ID NO: 35873 - DNA, 17 bp, Arabidopsis thaliana
agcgtcgcatcctgtag

SEQ ID NO: 35874 - DNA, 17 bp, Arabidopsis thaliana
agcgtcgccaactcgac

SEQ ID NO: 35875 - DNA, 17 bp, Arabidopsis thaliana
agcgtcgccaccattat

SEQ ID NO: 35876 - DNA, 17 bp, Arabidopsis thaliana
agcgtcgtaacggttcc

SEQ ID NO: 35877 - DNA, 17 bp, Arabidopsis thaliana
agcgtcgtagtgctgtc

SEQ ID NO: 35878 - DNA, 17 bp, Arabidopsis thaliana
agcgtcgtccaattggg

SEQ ID NO: 35879 - DNA, 17 bp, Arabidopsis thaliana
agcgtcgtcgccgccga

SEQ ID NO: 35880 - DNA, 17 bp, Arabidopsis thaliana
agcgtcgtgaacccggg

SEQ ID NO: 35881 - DNA, 17 bp, Arabidopsis thaliana
agcgtcgtgctgctagg

SEQ ID NO: 35882 - DNA, 17 bp, Arabidopsis thaliana
agcgtcgttcggaccgc

SEQ ID NO: 35883 - DNA, 17 bp, Arabidopsis thaliana
agcgtcgttcggacctc

SEQ ID NO: 35884 - DNA, 17 bp, Arabidopsis thaliana
agcgtcgttgcagagcc

SEQ ID NO: 35885 - DNA, 17 bp, Arabidopsis thaliana
agcgtctaacaggtcga

SEQ ID NO: 35886 - DNA, 17 bp, Arabidopsis thaliana
agcgtctacagtgttta

SEQ ID NO: 35887 - DNA, 17 bp, Arabidopsis thaliana
agcgtctaccactttat

SEQ ID NO: 35888 - DNA, 17 bp, Arabidopsis thaliana
agcgtctaccactttgt

SEQ ID NO: 35889 - DNA, 17 bp, Arabidopsis thaliana
agcgtctacggaatgac

SEQ ID NO: 35890 - DNA, 17 bp, Arabidopsis thaliana
agcgtctacggaatggc

SEQ ID NO: 35891 - DNA, 17 bp, Arabidopsis thaliana
agcgtctactgccgtgt

SEQ ID NO: 35892 - DNA, 17 bp, Arabidopsis thaliana
agcgtctactgccttgt

SEQ ID NO: 35893 - DNA, 17 bp, Arabidopsis thaliana
agcgtctactgtgaatt

SEQ ID NO: 35894 - DNA, 17 bp, Arabidopsis thaliana
agcgtctaggactttgc

SEQ ID NO: 35895 - DNA, 17 bp, Arabidopsis thaliana
agcgtctaggacttttg

SEQ ID NO: 35896 - DNA, 17 bp, Arabidopsis thaliana
agcgtctagggttttgc

SEQ ID NO: 35897 - DNA, 17 bp, Arabidopsis thaliana
agcgtctagggtttttg

SEQ ID NO: 35898 - DNA, 17 bp, Arabidopsis thaliana
agcgtctagtagaaaca

SEQ ID NO: 35899 - DNA, 17 bp, Arabidopsis thaliana
agcgtctagttatcgca

SEQ ID NO: 35900 - DNA, 17 bp, Arabidopsis thaliana
agcgtctagttgaaaca

SEQ ID NO: 35901 - DNA, 17 bp, Arabidopsis thaliana
agcgtctatgagagaag

SEQ ID NO: 35902 - DNA, 17 bp, Arabidopsis thaliana
agcgtctatggtttttg

SEQ ID NO: 35903 - DNA, 17 bp, Arabidopsis thaliana
agcgtctatgtcaacat

SEQ ID NO: 35904 - DNA, 17 bp, Arabidopsis thaliana
agcgtctcaaattccct

SEQ ID NO: 35905 - DNA, 17 bp, Arabidopsis thaliana
agcgtctcaacggtcga

SEQ ID NO: 35906 - DNA, 17 bp, Arabidopsis thaliana
agcgtctcaagcgtcac

SEQ ID NO: 35907 - DNA, 17 bp, Arabidopsis thaliana
agcgtctcaagtacagg

SEQ ID NO: 35908 - DNA, 17 bp, Arabidopsis thaliana
agcgtctcaatagtcct

SEQ ID NO: 35909 - DNA, 17 bp, Arabidopsis thaliana
agcgtctcagcgaatga

SEQ ID NO: 35910 - DNA, 17 bp, Arabidopsis thaliana
agcgtctccaggttcgt

SEQ ID NO: 35911 - DNA, 17 bp, Arabidopsis thaliana
agcgtctccagtacctg

SEQ ID NO: 35912 - DNA, 17 bp, Arabidopsis thaliana
agcgtctccccaagctt

SEQ ID NO: 35913 - DNA, 17 bp, Arabidopsis thaliana
agcgtctcgtcagccgg

SEQ ID NO: 35914 - DNA, 17 bp, Arabidopsis thaliana
agcgtctctaggtggct

SEQ ID NO: 35915 - DNA, 17 bp, Arabidopsis thaliana
agcgtctctcaagccac

SEQ ID NO: 35916 - DNA, 17 bp, Arabidopsis thaliana
agcgtctctccatttgc

SEQ ID NO: 35917 - DNA, 17 bp, Arabidopsis thaliana
agcgtctctccgggtga

SEQ ID NO: 35918 - DNA, 17 bp, Arabidopsis thaliana
agcgtctcttatccagt

SEQ ID NO: 35919 - DNA, 17 bp, Arabidopsis thaliana
agcgtctgaatggaagg

SEQ ID NO: 35920 - DNA, 17 bp, Arabidopsis thaliana
agcgtctgacgttttct

SEQ ID NO: 35921 - DNA, 17 bp, Arabidopsis thaliana
agcgtctgagagatgta

SEQ ID NO: 35922 - DNA, 17 bp, Arabidopsis thaliana
agcgtctgagagatgtg

SEQ ID NO: 35923 - DNA, 17 bp, Arabidopsis thaliana
agcgtctgatgtgccgg

SEQ ID NO: 35924 - DNA, 17 bp, Arabidopsis thaliana
agcgtctgatgtgcctg

SEQ ID NO: 35925 - DNA, 17 bp, Arabidopsis thaliana
agcgtctgcctgggtgt

SEQ ID NO: 35926 - DNA, 17 bp, Arabidopsis thaliana
agcgtctgcggcaataa

SEQ ID NO: 35927 - DNA, 17 bp, Arabidopsis thaliana
agcgtctgcgggtggta

SEQ ID NO: 35928 - DNA, 17 bp, Arabidopsis thaliana
agcgtctggaaaaagaa

SEQ ID NO: 35929 - DNA, 17 bp, Arabidopsis thaliana
agcgtctggactgcact

SEQ ID NO: 35930 - DNA, 17 bp, Arabidopsis thaliana
agcgtctggcaacttct

SEQ ID NO: 35931 - DNA, 17 bp, Arabidopsis thaliana
agcgtctgggagagttt

SEQ ID NO: 35932 - DNA, 17 bp, Arabidopsis thaliana
agcgtctgggccttaga

SEQ ID NO: 35933 - DNA, 17 bp, Arabidopsis thaliana
agcgtctgggtaacgtt

SEQ ID NO: 35934 - DNA, 17 bp, Arabidopsis thaliana
agcgtctggtcagaaat

SEQ ID NO: 35935 - DNA, 17 bp, Arabidopsis thaliana
agcgtctggtgaaacta

SEQ ID NO: 35936 - DNA, 17 bp, Arabidopsis thaliana
agcgtctgtacggagcc

SEQ ID NO: 35937 - DNA, 17 bp, Arabidopsis thaliana
agcgtctgtacggatcc

SEQ ID NO: 35938 - DNA, 17 bp, Arabidopsis thaliana
agcgtctgtaggtggct

SEQ ID NO: 35939 - DNA, 17 bp, Arabidopsis thaliana
agcgtctgtaggtgggt

SEQ ID NO: 35940 - DNA, 17 bp, Arabidopsis thaliana
agcgtctgttggtgcca

SEQ ID NO: 35941 - DNA, 17 bp, Arabidopsis thaliana
agcgtcttcaacaactt

SEQ ID NO: 35942 - DNA, 17 bp, Arabidopsis thaliana
agcgtcttgatcgccat

SEQ ID NO: 35943 - DNA, 17 bp, Arabidopsis thaliana
agcgtcttgcatccttt

SEQ ID NO: 35944 - DNA, 17 bp, Arabidopsis thaliana
agcgtcttggactttgc

SEQ ID NO: 35945 - DNA, 17 bp, Arabidopsis thaliana
agcgtcttggccgctgg

SEQ ID NO: 35946 - DNA, 17 bp, Arabidopsis thaliana
agcgtgaaatttggtcc

SEQ ID NO: 35947 - DNA, 17 bp, Arabidopsis thaliana
agcgtgacaacgttact

SEQ ID NO: 35948 - DNA, 17 bp, Arabidopsis thaliana
agcgtgaccggtgttgt

SEQ ID NO: 35949 - DNA, 17 bp, Arabidopsis thaliana
agcgtgacggatttgga

SEQ ID NO: 35950 - DNA, 17 bp, Arabidopsis thaliana
agcgtgactcatttcgt

SEQ ID NO: 35951 - DNA, 17 bp, Arabidopsis thaliana
agcgtgacttacaaggt

SEQ ID NO: 35952 - DNA, 17 bp, Arabidopsis thaliana
agcgtgatacgatagtt

SEQ ID NO: 35953 - DNA, 17 bp, Arabidopsis thaliana
agcgtgatccaccatgc

SEQ ID NO: 35954 - DNA, 17 bp, Arabidopsis thaliana
agcgtgatccatggttc

SEQ ID NO: 35955 - DNA, 17 bp, Arabidopsis thaliana
agcgtgatctaatagtt

SEQ ID NO: 35956 - DNA, 17 bp, Arabidopsis thaliana
agcgtgatctgagcagc

SEQ ID NO: 35957 - DNA, 17 bp, Arabidopsis thaliana
agcgtgatctgatagtt

SEQ ID NO: 35958 - DNA, 17 bp, Arabidopsis thaliana
agcgtgatgcgatagtt

SEQ ID NO: 35959 - DNA, 17 bp, Arabidopsis thaliana
agcgtgattctaatggc

SEQ ID NO: 35960 - DNA, 17 bp, Arabidopsis thaliana
agcgtgcattggtcggc

SEQ ID NO: 35961 - DNA, 17 bp, Arabidopsis thaliana
agcgtgctattcatccg

SEQ ID NO: 35962 - DNA, 17 bp, Arabidopsis thaliana
agcgtgctccgggcgtc

SEQ ID NO: 35963 - DNA, 17 bp, Arabidopsis thaliana
agcgtgctgtggtggat

SEQ ID NO: 35964 - DNA, 17 bp, Arabidopsis thaliana
agcgtgcttgacattta

SEQ ID NO: 35965 - DNA, 17 bp, Arabidopsis thaliana
agcgtgcttgggcgaga

SEQ ID NO: 35966 - DNA, 17 bp, Arabidopsis thaliana
agcgtgcttttatctgt

SEQ ID NO: 35967 - DNA, 17 bp, Arabidopsis thaliana
agcgtggaacgccgctc

SEQ ID NO: 35968 - DNA, 17 bp, Arabidopsis thaliana
agcgtggaggttcgagt

SEQ ID NO: 35969 - DNA, 17 bp, Arabidopsis thaliana
agcgtggatagggagag

SEQ ID NO: 35970 - DNA, 17 bp, Arabidopsis thaliana
agcgtggcccaccacct

SEQ ID NO: 35971 - DNA, 17 bp, Arabidopsis thaliana
agcgtggcctatcgatc

SEQ ID NO: 35972 - DNA, 17 bp, Arabidopsis thaliana
agcgtgggaggcctatt

SEQ ID NO: 35973 - DNA, 17 bp, Arabidopsis thaliana
agcgtgggtcaggtggg

SEQ ID NO: 35974 - DNA, 17 bp, Arabidopsis thaliana
agcgtggttccacttga

SEQ ID NO: 35975 - DNA, 17 bp, Arabidopsis thaliana
agcgtgtaagcaacctt

SEQ ID NO: 35976 - DNA, 17 bp, Arabidopsis thaliana
agcgtgtacttcacacc

SEQ ID NO: 35977 - DNA, 17 bp, Arabidopsis thaliana
agcgtgtattaagagtt

SEQ ID NO: 35978 - DNA, 17 bp, Arabidopsis thaliana
agcgtgtcctaagatga

SEQ ID NO: 35979 - DNA, 17 bp, Arabidopsis thaliana
agcgtgtgaaagacgga

SEQ ID NO: 35980 - DNA, 17 bp, Arabidopsis thaliana
agcgtgtgattgtgtct

SEQ ID NO: 35981 - DNA, 17 bp, Arabidopsis thaliana
agcgtgtgctacagagt

SEQ ID NO: 35982 - DNA, 17 bp, Arabidopsis thaliana
agcgtgtgctggacgcg

SEQ ID NO: 35983 - DNA, 17 bp, Arabidopsis thaliana
agcgtgtgtgactgaga

SEQ ID NO: 35984 - DNA, 17 bp, Arabidopsis thaliana
agcgtgtttggactgca

SEQ ID NO: 35985 - DNA, 17 bp, Arabidopsis thaliana
agcgtgttttgcgactg

SEQ ID NO: 35986 - DNA, 17 bp, Arabidopsis thaliana
agcgtgtttttttttac

SEQ ID NO: 35987 - DNA, 17 bp, Arabidopsis thaliana
agcgtgttttttttttt

SEQ ID NO: 35988 - DNA, 17 bp, Arabidopsis thaliana
agcgttaaacactctgc

SEQ ID NO: 35989 - DNA, 17 bp, Arabidopsis thaliana
agcgttaaactgtaaaa

SEQ ID NO: 35990 - DNA, 17 bp, Arabidopsis thaliana
agcgttaaactttccat

SEQ ID NO: 35991 - DNA, 17 bp, Arabidopsis thaliana
agcgttaagatcttgga

SEQ ID NO: 35992 - DNA, 17 bp, Arabidopsis thaliana
agcgttaatgcaacaag

SEQ ID NO: 35993 - DNA, 17 bp, Arabidopsis thaliana
agcgttaatggacatgg

SEQ ID NO: 35994 - DNA, 17 bp, Arabidopsis thaliana
agcgttaattatgtcca

SEQ ID NO: 35995 - DNA, 17 bp, Arabidopsis thaliana
agcgttacagctccatc

SEQ ID NO: 35996 - DNA, 17 bp, Arabidopsis thaliana
agcgttaccgagactca

SEQ ID NO: 35997 - DNA, 17 bp, Arabidopsis thaliana
agcgttactagctatct

SEQ ID NO: 35998 - DNA, 17 bp, Arabidopsis thaliana
agcgttactcgaaccgg

SEQ ID NO: 35999 - DNA, 17 bp, Arabidopsis thaliana
agcgttagatggtaagc

SEQ ID NO: 36000 - DNA, 17 bp, Arabidopsis thaliana
agcgttaggcactagtc

SEQ ID NO: 36001 - DNA, 17 bp, Arabidopsis thaliana
agcgttaggtcatcggg

SEQ ID NO: 36002 - DNA, 17 bp, Arabidopsis thaliana
agcgttagtagatgaca

SEQ ID NO: 36003 - DNA, 17 bp, Arabidopsis thaliana
agcgttataaccggcag

SEQ ID NO: 36004 - DNA, 17 bp, Arabidopsis thaliana
agcgttatatcgaagca

SEQ ID NO: 36005 - DNA, 17 bp, Arabidopsis thaliana
agcgttatccggaatga

SEQ ID NO: 36006 - DNA, 17 bp, Arabidopsis thaliana
agcgttatctttagtgt

SEQ ID NO: 36007 - DNA, 17 bp, Arabidopsis thaliana
agcgttattacagtgcg

SEQ ID NO: 36008 - DNA, 17 bp, Arabidopsis thaliana
agcgttattcaggtgcc

SEQ ID NO: 36009 - DNA, 17 bp, Arabidopsis thaliana
agcgttattcggccgct

SEQ ID NO: 36010 - DNA, 17 bp, Arabidopsis thaliana
agcgttcaaaccacttg

SEQ ID NO: 36011 - DNA, 17 bp, Arabidopsis thaliana
agcgttcaagaaaacag

SEQ ID NO: 36012 - DNA, 17 bp, Arabidopsis thaliana
agcgttcacgtcggctt

SEQ ID NO: 36013 - DNA, 17 bp, Arabidopsis thaliana
agcgttcactggtgtga

SEQ ID NO: 36014 - DNA, 17 bp, Arabidopsis thaliana
agcgttcagttatccat

SEQ ID NO: 36015 - DNA, 17 bp, Arabidopsis thaliana
agcgttcatcatctgtg

SEQ ID NO: 36016 - DNA, 17 bp, Arabidopsis thaliana
agcgttccatggttgag

SEQ ID NO: 36017 - DNA, 17 bp, Arabidopsis thaliana
agcgttccatggttgat

SEQ ID NO: 36018 - DNA, 17 bp, Arabidopsis thaliana
agcgttcctagctacag

SEQ ID NO: 36019 - DNA, 17 bp, Arabidopsis thaliana
agcgttcgaaccgctta

SEQ ID NO: 36020 - DNA, 17 bp, Arabidopsis thaliana
agcgttcgaaccgcttg

SEQ ID NO: 36021 - DNA, 17 bp, Arabidopsis thaliana
agcgttcgaggataatc

SEQ ID NO: 36022 - DNA, 17 bp, Arabidopsis thaliana
agcgttcgagtccgctt

SEQ ID NO: 36023 - DNA, 17 bp, Arabidopsis thaliana
agcgttctaaccgcttg

SEQ ID NO: 36024 - DNA, 17 bp, Arabidopsis thaliana
agcgttctaactgcttg

SEQ ID NO: 36025 - DNA, 17 bp, Arabidopsis thaliana
agcgttctaatttatct

SEQ ID NO: 36026 - DNA, 17 bp, Arabidopsis thaliana
agcgttctacagccaat

SEQ ID NO: 36027 - DNA, 17 bp, Arabidopsis thaliana
agcgttctgaacgactg

SEQ ID NO: 36028 - DNA, 17 bp, Arabidopsis thaliana
agcgttctgtacttcaa

SEQ ID NO: 36029 - DNA, 17 bp, Arabidopsis thaliana
agcgttcttaagagtct

SEQ ID NO: 36030 - DNA, 17 bp, Arabidopsis thaliana
agcgttctttacagact

SEQ ID NO: 36031 - DNA, 17 bp, Arabidopsis thaliana
agcgttgacaacttact

SEQ ID NO: 36032 - DNA, 17 bp, Arabidopsis thaliana
agcgttgaccgatgttg

SEQ ID NO: 36033 - DNA, 17 bp, Arabidopsis thaliana
agcgttgaccggccatt

SEQ ID NO: 36034 - DNA, 17 bp, Arabidopsis thaliana
agcgttgactaacagat

SEQ ID NO: 36035 - DNA, 17 bp, Arabidopsis thaliana
agcgttgactacacggc

SEQ ID NO: 36036 - DNA, 17 bp, Arabidopsis thaliana
agcgttgacttaaagga

SEQ ID NO: 36037 - DNA, 17 bp, Arabidopsis thaliana
agcgttgataagtatgc

SEQ ID NO: 36038 - DNA, 17 bp, Arabidopsis thaliana
agcgttgatcactctgc

SEQ ID NO: 36039 - DNA, 17 bp, Arabidopsis thaliana
agcgttgatggatttca

SEQ ID NO: 36040 - DNA, 17 bp, Arabidopsis thaliana
agcgttgcaacgtgcga

SEQ ID NO: 36041 - DNA, 17 bp, Arabidopsis thaliana
agcgttgcagatcatgt

SEQ ID NO: 36042 - DNA, 17 bp, Arabidopsis thaliana
agcgttgcagctccatc

SEQ ID NO: 36043 - DNA, 17 bp, Arabidopsis thaliana
agcgttgcagctccccc

SEQ ID NO: 36044 - DNA, 17 bp, Arabidopsis thaliana
agcgttgcagtgattct

SEQ ID NO: 36045 - DNA, 17 bp, Arabidopsis thaliana
agcgttgccggagactg

SEQ ID NO: 36046 - DNA, 17 bp, Arabidopsis thaliana
agcgttggacacgggca

SEQ ID NO: 36047 - DNA, 17 bp, Arabidopsis thaliana
agcgttggatctgaggc

SEQ ID NO: 36048 - DNA, 17 bp, Arabidopsis thaliana
agcgttggcgggtaaat

SEQ ID NO: 36049 - DNA, 17 bp, Arabidopsis thaliana
agcgttggctggcttat

SEQ ID NO: 36050 - DNA, 17 bp, Arabidopsis thaliana
agcgttggtgatcccgt

SEQ ID NO: 36051 - DNA, 17 bp, Arabidopsis thaliana
agcgttggttaaagctt

SEQ ID NO: 36052 - DNA, 17 bp, Arabidopsis thaliana
agcgttggttgggtcct

SEQ ID NO: 36053 - DNA, 17 bp, Arabidopsis thaliana
agcgttgtaattgccag

SEQ ID NO: 36054 - DNA, 17 bp, Arabidopsis thaliana
agcgttgtgaagcgcga

SEQ ID NO: 36055 - DNA, 17 bp, Arabidopsis thaliana
agcgttgtgcagattac

SEQ ID NO: 36056 - DNA, 17 bp, Arabidopsis thaliana
agcgttgttacaactaa

SEQ ID NO: 36057 - DNA, 17 bp, Arabidopsis thaliana
agcgttgttacaactag

SEQ ID NO: 36058 - DNA, 17 bp, Arabidopsis thaliana
agcgttgttggctctga

SEQ ID NO: 36059 - DNA, 17 bp, Arabidopsis thaliana
agcgtttaagattcggt

SEQ ID NO: 36060 - DNA, 17 bp, Arabidopsis thaliana
agcgtttacagttgcgg

SEQ ID NO: 36061 - DNA, 17 bp, Arabidopsis thaliana
agcgtttagagccattg

SEQ ID NO: 36062 - DNA, 17 bp, Arabidopsis thaliana
agcgtttaggacttttg

SEQ ID NO: 36063 - DNA, 17 bp, Arabidopsis thaliana
agcgtttagtaggaggc

SEQ ID NO: 36064 - DNA, 17 bp, Arabidopsis thaliana
agcgtttagtttcattg

SEQ ID NO: 36065 - DNA, 17 bp, Arabidopsis thaliana
agcgtttattgcctaga

SEQ ID NO: 36066 - DNA, 17 bp, Arabidopsis thaliana
agcgtttattgcgtaga

SEQ ID NO: 36067 - DNA, 17 bp, Arabidopsis thaliana
agcgtttcaaacttctt

SEQ ID NO: 36068 - DNA, 17 bp, Arabidopsis thaliana
agcgtttcagacctaag

SEQ ID NO: 36069 - DNA, 17 bp, Arabidopsis thaliana
agcgtttcccggctggt

SEQ ID NO: 36070 - DNA, 17 bp, Arabidopsis thaliana
agcgtttccgtctgtaa

SEQ ID NO: 36071 - DNA, 17 bp, Arabidopsis thaliana
agcgtttccttgttcag

SEQ ID NO: 36072 - DNA, 17 bp, Arabidopsis thaliana
agcgtttcgtcaacaag

SEQ ID NO: 36073 - DNA, 17 bp, Arabidopsis thaliana
agcgtttctatggtcaa

SEQ ID NO: 36074 - DNA, 17 bp, Arabidopsis thaliana
agcgtttctatggtcag

SEQ ID NO: 36075 - DNA, 17 bp, Arabidopsis thaliana
agcgtttctatggtcgg

SEQ ID NO: 36076 - DNA, 17 bp, Arabidopsis thaliana
agcgtttctcgtttctg

SEQ ID NO: 36077 - DNA, 17 bp, Arabidopsis thaliana
agcgtttgaacagggtt

SEQ ID NO: 36078 - DNA, 17 bp, Arabidopsis thaliana
agcgtttgaggccgtga

SEQ ID NO: 36079 - DNA, 17 bp, Arabidopsis thaliana
agcgtttgataatggga

SEQ ID NO: 36080 - DNA, 17 bp, Arabidopsis thaliana
agcgtttgataatgggt

SEQ ID NO: 36081 - DNA, 17 bp, Arabidopsis thaliana
agcgtttgatcgggtat

SEQ ID NO: 36082 - DNA, 17 bp, Arabidopsis thaliana
agcgtttgatcgggtga

SEQ ID NO: 36083 - DNA, 17 bp, Arabidopsis thaliana
agcgtttgcagttatga

SEQ ID NO: 36084 - DNA, 17 bp, Arabidopsis thaliana
agcgtttgcagttggta

SEQ ID NO: 36085 - DNA, 17 bp, Arabidopsis thaliana
agcgtttgcggatggta

SEQ ID NO: 36086 - DNA, 17 bp, Arabidopsis thaliana
agcgtttgcggatggtg

SEQ ID NO: 36087 - DNA, 17 bp, Arabidopsis thaliana
agcgtttgcgggtgaca

SEQ ID NO: 36088 - DNA, 17 bp, Arabidopsis thaliana
agcgtttgcgggtgata

SEQ ID NO: 36089 - DNA, 17 bp, Arabidopsis thaliana
agcgtttgcgggtggta

SEQ ID NO: 36090 - DNA, 17 bp, Arabidopsis thaliana
agcgtttgcggttgcga

SEQ ID NO: 36091 - DNA, 17 bp, Arabidopsis thaliana
agcgtttgcggttgcgg

SEQ ID NO: 36092 - DNA, 17 bp, Arabidopsis thaliana
agcgtttgcggttgcgt

SEQ ID NO: 36093 - DNA, 17 bp, Arabidopsis thaliana
agcgtttgcggttggga

SEQ ID NO: 36094 - DNA, 17 bp, Arabidopsis thaliana
agcgtttgcggttggta

SEQ ID NO: 36095 - DNA, 17 bp, Arabidopsis thaliana
agcgtttgcggttgtgg

SEQ ID NO: 36096 - DNA, 17 bp, Arabidopsis thaliana
agcgtttgcggttgtta

SEQ ID NO: 36097 - DNA, 17 bp, Arabidopsis thaliana
agcgtttggaagcatag

SEQ ID NO: 36098 - DNA, 17 bp, Arabidopsis thaliana
agcgtttggctaatgct

SEQ ID NO: 36099 - DNA, 17 bp, Arabidopsis thaliana
agcgtttggtcgacacg

SEQ ID NO: 36100 - DNA, 17 bp, Arabidopsis thaliana
agcgtttggttatgggt

SEQ ID NO: 36101 - DNA, 17 bp, Arabidopsis thaliana
agcgtttgtcaaatctt

SEQ ID NO: 36102 - DNA, 17 bp, Arabidopsis thaliana
agcgtttgttagttgac

SEQ ID NO: 36103 - DNA, 17 bp, Arabidopsis thaliana
agcgtttgttagttgat

SEQ ID NO: 36104 - DNA, 17 bp, Arabidopsis thaliana
agcgtttgtttcatgtc

SEQ ID NO: 36105 - DNA, 17 bp, Arabidopsis thaliana
agcgttttcaacaactt

SEQ ID NO: 36106 - DNA, 17 bp, Arabidopsis thaliana
agcgttttgaacgaccg

SEQ ID NO: 36107 - DNA, 17 bp, Arabidopsis thaliana
agcgttttgaacgactg

SEQ ID NO: 36108 - DNA, 17 bp, Arabidopsis thaliana
agcgttttgaccgacta

SEQ ID NO: 36109 - DNA, 17 bp, Arabidopsis thaliana
agcgttttgaccgactg

SEQ ID NO: 36110 - DNA, 17 bp, Arabidopsis thaliana
agcgttttgaccgattg

SEQ ID NO: 36111 - DNA, 17 bp, Arabidopsis thaliana
agcgttttgcggcgaaa

SEQ ID NO: 36112 - DNA, 17 bp, Arabidopsis thaliana
agcgttttggctttaac

SEQ ID NO: 36113 - DNA, 17 bp, Arabidopsis thaliana
agcgtttttcacgattg

SEQ ID NO: 36114 - DNA, 17 bp, Arabidopsis thaliana
agcgtttttgtagggtc

SEQ ID NO: 36115 - DNA, 17 bp, Arabidopsis thaliana
agcgtttttgtagggtg

SEQ ID NO: 36116 - DNA, 17 bp, Arabidopsis thaliana
agcgttttttggtgaga

SEQ ID NO: 36117 - DNA, 17 bp, Arabidopsis thaliana
agctaaaacatcaaatt

SEQ ID NO: 36118 - DNA, 17 bp, Arabidopsis thaliana
agctaaaatccaggtgg

SEQ ID NO: 36119 - DNA, 17 bp, Arabidopsis thaliana
agctaaaatggtgttct

SEQ ID NO: 36120 - DNA, 17 bp, Arabidopsis thaliana
agctaaacctggcgaag

SEQ ID NO: 36121 - DNA, 17 bp, Arabidopsis thaliana
agctaaagacggttgca

SEQ ID NO: 36122 - DNA, 17 bp, Arabidopsis thaliana
agctaaagcggaaagga

SEQ ID NO: 36123 - DNA, 17 bp, Arabidopsis thaliana
agctaaatcgagttcgc

SEQ ID NO: 36124 - DNA, 17 bp, Arabidopsis thaliana
agctaaatgagctagct

SEQ ID NO: 36125 - DNA, 17 bp, Arabidopsis thaliana
agctaaatgcggaagtg

SEQ ID NO: 36126 - DNA, 17 bp, Arabidopsis thaliana
agctaaatgtccccaaa

SEQ ID NO: 36127 - DNA, 17 bp, Arabidopsis thaliana
agctaaatttggaaatt

SEQ ID NO: 36128 - DNA, 17 bp, Arabidopsis thaliana
agctaacaaatgcgctg

SEQ ID NO: 36129 - DNA, 17 bp, Arabidopsis thaliana
agctaacatccgcaaag

SEQ ID NO: 36130 - DNA, 17 bp, Arabidopsis thaliana
agctaacattcgcatgg

SEQ ID NO: 36131 - DNA, 17 bp, Arabidopsis thaliana
agctaaccaagttgttg

SEQ ID NO: 36132 - DNA, 17 bp, Arabidopsis thaliana
agctaaccatgcgtttt

SEQ ID NO: 36133 - DNA, 17 bp, Arabidopsis thaliana
agctaaccatgttggga

SEQ ID NO: 36134 - DNA, 17 bp, Arabidopsis thaliana
agctaacccatcagcaa

SEQ ID NO: 36135 - DNA, 17 bp, Arabidopsis thaliana
agctaacccatccgcga

SEQ ID NO: 36136 - DNA, 17 bp, Arabidopsis thaliana
agctaacccccaagatc

SEQ ID NO: 36137 - DNA, 17 bp, Arabidopsis thaliana
agctaaccggatcaacc

SEQ ID NO: 36138 - DNA, 17 bp, Arabidopsis thaliana
agctaaccgttagccaa

SEQ ID NO: 36139 - DNA, 17 bp, Arabidopsis thaliana
agctaaccgttgacagg

SEQ ID NO: 36140 - DNA, 17 bp, Arabidopsis thaliana
agctaacgaaaaaggca

SEQ ID NO: 36141 - DNA, 17 bp, Arabidopsis thaliana
agctaacgacacttgat

SEQ ID NO: 36142 - DNA, 17 bp, Arabidopsis thaliana
agctaacgacacttggt

SEQ ID NO: 36143 - DNA, 17 bp, Arabidopsis thaliana
agctaactaaaatagcg

SEQ ID NO: 36144 - DNA, 17 bp, Arabidopsis thaliana
agctaactaccacaatt

SEQ ID NO: 36145 - DNA, 17 bp, Arabidopsis thaliana
agctaactatgcattta

SEQ ID NO: 36146 - DNA, 17 bp, Arabidopsis thaliana
agctaactatgcatttt

SEQ ID NO: 36147 - DNA, 17 bp, Arabidopsis thaliana
agctaactatgcgtttt

SEQ ID NO: 36148 - DNA, 17 bp, Arabidopsis thaliana
agctaactcatccgcta

SEQ ID NO: 36149 - DNA, 17 bp, Arabidopsis thaliana
agctaactctcctctta

SEQ ID NO: 36150 - DNA, 17 bp, Arabidopsis thaliana
agctaactctctacttc

SEQ ID NO: 36151 - DNA, 17 bp, Arabidopsis thaliana
agctaactctctccttc

SEQ ID NO: 36152 - DNA, 17 bp, Arabidopsis thaliana
agctaactctgccacac

SEQ ID NO: 36153 - DNA, 17 bp, Arabidopsis thaliana
agctaactgtacaccgc

SEQ ID NO: 36154 - DNA, 17 bp, Arabidopsis thaliana
agctaactgtggatgtc

SEQ ID NO: 36155 - DNA, 17 bp, Arabidopsis thaliana
agctaacttgtcctcct

SEQ ID NO: 36156 - DNA, 17 bp, Arabidopsis thaliana
agctaactttcgttgac

SEQ ID NO: 36157 - DNA, 17 bp, Arabidopsis thaliana
agctaactttgccaaag

SEQ ID NO: 36158 - DNA, 17 bp, Arabidopsis thaliana
agctaactttgccgaag

SEQ ID NO: 36159 - DNA, 17 bp, Arabidopsis thaliana
agctaactttgtcaaag

SEQ ID NO: 36160 - DNA, 17 bp, Arabidopsis thaliana
agctaactttgtgtcgg

SEQ ID NO: 36161 - DNA, 17 bp, Arabidopsis thaliana
agctaagaaaactcggg

SEQ ID NO: 36162 - DNA, 17 bp, Arabidopsis thaliana
agctaagaaagctcggg

SEQ ID NO: 36163 - DNA, 17 bp, Arabidopsis thaliana
agctaagaaagtttgga

SEQ ID NO: 36164 - DNA, 17 bp, Arabidopsis thaliana
agctaagaacatttcca

SEQ ID NO: 36165 - DNA, 17 bp, Arabidopsis thaliana
agctaagaacggaagaa

SEQ ID NO: 36166 - DNA, 17 bp, Arabidopsis thaliana
agctaagaggtgagcag

SEQ ID NO: 36167 - DNA, 17 bp, Arabidopsis thaliana
agctaagatacaaggtt

SEQ ID NO: 36168 - DNA, 17 bp, Arabidopsis thaliana
agctaagatgtctctat

SEQ ID NO: 36169 - DNA, 17 bp, Arabidopsis thaliana
agctaagatgtgtctaa

SEQ ID NO: 36170 - DNA, 17 bp, Arabidopsis thaliana
agctaagatgtgtctat

SEQ ID NO: 36171 - DNA, 17 bp, Arabidopsis thaliana
agctaagattccgagct

SEQ ID NO: 36172 - DNA, 17 bp, Arabidopsis thaliana
agctaagattctgctcg

SEQ ID NO: 36173 - DNA, 17 bp, Arabidopsis thaliana
agctaagattgatgtga

SEQ ID NO: 36174 - DNA, 17 bp, Arabidopsis thaliana
agctaagatttgttcag

SEQ ID NO: 36175 - DNA, 17 bp, Arabidopsis thaliana
agctaagccagctgctt

SEQ ID NO: 36176 - DNA, 17 bp, Arabidopsis thaliana
agctaagcctacctact

SEQ ID NO: 36177 - DNA, 17 bp, Arabidopsis thaliana
agctaagcctacttaca

SEQ ID NO: 36178 - DNA, 17 bp, Arabidopsis thaliana
agctaagcctacttaga

SEQ ID NO: 36179 - DNA, 17 bp, Arabidopsis thaliana
agctaagcgtgcttggg

SEQ ID NO: 36180 - DNA, 17 bp, Arabidopsis thaliana
agctaaggacgattttt

SEQ ID NO: 36181 - DNA, 17 bp, Arabidopsis thaliana
agctaaggatgacttgc

SEQ ID NO: 36182 - DNA, 17 bp, Arabidopsis thaliana
agctaaggatttgcatt

SEQ ID NO: 36183 - DNA, 17 bp, Arabidopsis thaliana
agctaaggcacagggtc

SEQ ID NO: 36184 - DNA, 17 bp, Arabidopsis thaliana
agctaaggctgttgtgg

SEQ ID NO: 36185 - DNA, 17 bp, Arabidopsis thaliana
agctaaggtatgtttca

SEQ ID NO: 36186 - DNA, 17 bp, Arabidopsis thaliana
agctaagtacgatgttg

SEQ ID NO: 36187 - DNA, 17 bp, Arabidopsis thaliana
agctaagtcagcattgg

SEQ ID NO: 36188 - DNA, 17 bp, Arabidopsis thaliana
agctaagtccgatgttg

SEQ ID NO: 36189 - DNA, 17 bp, Arabidopsis thaliana
agctaagtctgggggag

SEQ ID NO: 36190 - DNA, 17 bp, Arabidopsis thaliana
agctaagtgatgatgtg

SEQ ID NO: 36191 - DNA, 17 bp, Arabidopsis thaliana
agctaagttacatctga

SEQ ID NO: 36192 - DNA, 17 bp, Arabidopsis thaliana
agctaagttagaccatc

SEQ ID NO: 36193 - DNA, 17 bp, Arabidopsis thaliana
agctaagttgtccttgt

SEQ ID NO: 36194 - DNA, 17 bp, Arabidopsis thaliana
agctaagtttcgttgac

SEQ ID NO: 36195 - DNA, 17 bp, Arabidopsis thaliana
agctaataaccggaaaa

SEQ ID NO: 36196 - DNA, 17 bp, Arabidopsis thaliana
agctaataatcccacgg

SEQ ID NO: 36197 - DNA, 17 bp, Arabidopsis thaliana
agctaatagatcaccgc

SEQ ID NO: 36198 - DNA, 17 bp, Arabidopsis thaliana
agctaataggcttcggc

SEQ ID NO: 36199 - DNA, 17 bp, Arabidopsis thaliana
agctaatcagatccgac

SEQ ID NO: 36200 - DNA, 17 bp, Arabidopsis thaliana
agctaatcagatccggc

SEQ ID NO: 36201 - DNA, 17 bp, Arabidopsis thaliana
agctaatcagcagtgtt

SEQ ID NO: 36202 - DNA, 17 bp, Arabidopsis thaliana
agctaatcgtctcgcgg

SEQ ID NO: 36203 - DNA, 17 bp, Arabidopsis thaliana
agctaatgaatggatga

SEQ ID NO: 36204 - DNA, 17 bp, Arabidopsis thaliana
agctaatggattgagga

SEQ ID NO: 36205 - DNA, 17 bp, Arabidopsis thaliana
agctaatggggatggtc

SEQ ID NO: 36206 - DNA, 17 bp, Arabidopsis thaliana
agctaatggtttgccaa

SEQ ID NO: 36207 - DNA, 17 bp, Arabidopsis thaliana
agctaatgtggttgcag

SEQ ID NO: 36208 - DNA, 17 bp, Arabidopsis thaliana
agctaattcacccttaa

SEQ ID NO: 36209 - DNA, 17 bp, Arabidopsis thaliana
agctaattccactgcga

SEQ ID NO: 36210 - DNA, 17 bp, Arabidopsis thaliana
agctaattctaggttgc

SEQ ID NO: 36211 - DNA, 17 bp, Arabidopsis thaliana
agctaatttggtagagg

SEQ ID NO: 36212 - DNA, 17 bp, Arabidopsis thaliana
agctacaaagacttaca

SEQ ID NO: 36213 - DNA, 17 bp, Arabidopsis thaliana
agctacaaagttgcgtg

SEQ ID NO: 36214 - DNA, 17 bp, Arabidopsis thaliana
agctacaaataccgagt

SEQ ID NO: 36215 - DNA, 17 bp, Arabidopsis thaliana
agctacacaagctgatt

SEQ ID NO: 36216 - DNA, 17 bp, Arabidopsis thaliana
agctacaccctttgtcg

SEQ ID NO: 36217 - DNA, 17 bp, Arabidopsis thaliana
agctacactcttgcgct

SEQ ID NO: 36218 - DNA, 17 bp, Arabidopsis thaliana
agctacagaaagatctg

SEQ ID NO: 36219 - DNA, 17 bp, Arabidopsis thaliana
agctacagacgcctgca

SEQ ID NO: 36220 - DNA, 17 bp, Arabidopsis thaliana
agctacagacttggccg

SEQ ID NO: 36221 - DNA, 17 bp, Arabidopsis thaliana
agctacagagacttaca

SEQ ID NO: 36222 - DNA, 17 bp, Arabidopsis thaliana
agctacagagctcaggg

SEQ ID NO: 36223 - DNA, 17 bp, Arabidopsis thaliana
agctacagatatatggt

SEQ ID NO: 36224 - DNA, 17 bp, Arabidopsis thaliana
agctacagcacaagcag

SEQ ID NO: 36225 - DNA, 17 bp, Arabidopsis thaliana
agctacagctgaccttt

SEQ ID NO: 36226 - DNA, 17 bp, Arabidopsis thaliana
agctacaggtggttcat

SEQ ID NO: 36227 - DNA, 17 bp, Arabidopsis thaliana
agctacagtcaaattat

SEQ ID NO: 36228 - DNA, 17 bp, Arabidopsis thaliana
agctacagtccagcttg

SEQ ID NO: 36229 - DNA, 17 bp, Arabidopsis thaliana
agctacagtgttttgtc

SEQ ID NO: 36230 - DNA, 17 bp, Arabidopsis thaliana
agctacagtgttttgtt

SEQ ID NO: 36231 - DNA, 17 bp, Arabidopsis thaliana
agctacagttttggctt

SEQ ID NO: 36232 - DNA, 17 bp, Arabidopsis thaliana
agctacatcatgctcag

SEQ ID NO: 36233 - DNA, 17 bp, Arabidopsis thaliana
agctacatctcgaacag

SEQ ID NO: 36234 - DNA, 17 bp, Arabidopsis thaliana
agctacatcttggttgt

SEQ ID NO: 36235 - DNA, 17 bp, Arabidopsis thaliana
agctacatggcctagat

SEQ ID NO: 36236 - DNA, 17 bp, Arabidopsis thaliana
agctacatgtgatctac

SEQ ID NO: 36237 - DNA, 17 bp, Arabidopsis thaliana
agctacatttgccatgt

SEQ ID NO: 36238 - DNA, 17 bp, Arabidopsis thaliana
agctacattttggttat

SEQ ID NO: 36239 - DNA, 17 bp, Arabidopsis thaliana
agctaccaagatgtact

SEQ ID NO: 36240 - DNA, 17 bp, Arabidopsis thaliana
agctaccaagatgtcct

SEQ ID NO: 36241 - DNA, 17 bp, Arabidopsis thaliana
agctaccaattaggcct

SEQ ID NO: 36242 - DNA, 17 bp, Arabidopsis thaliana
agctaccacgtgcgtag

SEQ ID NO: 36243 - DNA, 17 bp, Arabidopsis thaliana
agctacccaagcggtaa

SEQ ID NO: 36244 - DNA, 17 bp, Arabidopsis thaliana
agctaccctacatggtt

SEQ ID NO: 36245 - DNA, 17 bp, Arabidopsis thaliana
agctacccttggccgag

SEQ ID NO: 36246 - DNA, 17 bp, Arabidopsis thaliana
agctaccgattcaaccg

SEQ ID NO: 36247 - DNA, 17 bp, Arabidopsis thaliana
agctaccgatttatctg

SEQ ID NO: 36248 - DNA, 17 bp, Arabidopsis thaliana
agctaccgtacgctgga

SEQ ID NO: 36249 - DNA, 17 bp, Arabidopsis thaliana
agctaccgtgcactgga

SEQ ID NO: 36250 - DNA, 17 bp, Arabidopsis thaliana
agctaccgtgccctgga

SEQ ID NO: 36251 - DNA, 17 bp, Arabidopsis thaliana
agctaccgtgcctggat

SEQ ID NO: 36252 - DNA, 17 bp, Arabidopsis thaliana
agctaccgtgcgctgga

SEQ ID NO: 36253 - DNA, 17 bp, Arabidopsis thaliana
agctaccgtgcgctggg

SEQ ID NO: 36254 - DNA, 17 bp, Arabidopsis thaliana
agctaccgtgcgctggt

SEQ ID NO: 36255 - DNA, 17 bp, Arabidopsis thaliana
agctaccgtgctctgga

SEQ ID NO: 36256 - DNA, 17 bp, Arabidopsis thaliana
agctaccgttgtttcag

SEQ ID NO: 36257 - DNA, 17 bp, Arabidopsis thaliana
agctacctggacattga

SEQ ID NO: 36258 - DNA, 17 bp, Arabidopsis thaliana
agctacctggatctgga

SEQ ID NO: 36259 - DNA, 17 bp, Arabidopsis thaliana
agctacctgtgcagttc

SEQ ID NO: 36260 - DNA, 17 bp, Arabidopsis thaliana
agctaccttgcgctgga

SEQ ID NO: 36261 - DNA, 17 bp, Arabidopsis thaliana
agctaccttgtgcttaa

SEQ ID NO: 36262 - DNA, 17 bp, Arabidopsis thaliana
agctacgaacaccgctt

SEQ ID NO: 36263 - DNA, 17 bp, Arabidopsis thaliana
agctacgaatacgacct

SEQ ID NO: 36264 - DNA, 17 bp, Arabidopsis thaliana
agctacgagaagctgac

SEQ ID NO: 36265 - DNA, 17 bp, Arabidopsis thaliana
agctacgatgtttgtgt

SEQ ID NO: 36266 - DNA, 17 bp, Arabidopsis thaliana
agctacgcaaaccgagg

SEQ ID NO: 36267 - DNA, 17 bp, Arabidopsis thaliana
agctacgccttctggag

SEQ ID NO: 36268 - DNA, 17 bp, Arabidopsis thaliana
agctacggtgttagctc

SEQ ID NO: 36269 - DNA, 17 bp, Arabidopsis thaliana
agctacggtttcacgtc

SEQ ID NO: 36270 - DNA, 17 bp, Arabidopsis thaliana
agctacgtattggttgt

SEQ ID NO: 36271 - DNA, 17 bp, Arabidopsis thaliana
agctacgtcataaggcc

SEQ ID NO: 36272 - DNA, 17 bp, Arabidopsis thaliana
agctacgtcctggttat

SEQ ID NO: 36273 - DNA, 17 bp, Arabidopsis thaliana
agctacgtctgggtcga

SEQ ID NO: 36274 - DNA, 17 bp, Arabidopsis thaliana
agctacgtcttagtcgg

SEQ ID NO: 36275 - DNA, 17 bp, Arabidopsis thaliana
agctacgtcttgattgt

SEQ ID NO: 36276 - DNA, 17 bp, Arabidopsis thaliana
agctacgtcttggttgt

SEQ ID NO: 36277 - DNA, 17 bp, Arabidopsis thaliana
agctacgtgaagtccac

SEQ ID NO: 36278 - DNA, 17 bp, Arabidopsis thaliana
agctacgtgcgatttta

SEQ ID NO: 36279 - DNA, 17 bp, Arabidopsis thaliana
agctacgtggaggcatc

SEQ ID NO: 36280 - DNA, 17 bp, Arabidopsis thaliana
agctacgttctggtttg

SEQ ID NO: 36281 - DNA, 17 bp, Arabidopsis thaliana
agctacgttgcagaatc

SEQ ID NO: 36282 - DNA, 17 bp, Arabidopsis thaliana
agctacgttgctgaaga

SEQ ID NO: 36283 - DNA, 17 bp, Arabidopsis thaliana
agctacgtttgtggtta

SEQ ID NO: 36284 - DNA, 17 bp, Arabidopsis thaliana
agctacgttttggttat

SEQ ID NO: 36285 - DNA, 17 bp, Arabidopsis thaliana
agctactaaaacttcgg

SEQ ID NO: 36286 - DNA, 17 bp, Arabidopsis thaliana
agctactaagcgttggg

SEQ ID NO: 36287 - DNA, 17 bp, Arabidopsis thaliana
agctactaattcatgat

SEQ ID NO: 36288 - DNA, 17 bp, Arabidopsis thaliana
agctactactaaagtaa

SEQ ID NO: 36289 - DNA, 17 bp, Arabidopsis thaliana
agctactagatggttcg

SEQ ID NO: 36290 - DNA, 17 bp, Arabidopsis thaliana
agctactcggcctcctc

SEQ ID NO: 36291 - DNA, 17 bp, Arabidopsis thaliana
agctactctgctgctta

SEQ ID NO: 36292 - DNA, 17 bp, Arabidopsis thaliana
agctactctttttagcg

SEQ ID NO: 36293 - DNA, 17 bp, Arabidopsis thaliana
agctactgaaggtattg

SEQ ID NO: 36294 - DNA, 17 bp, Arabidopsis thaliana
agctactgagtctggtc

SEQ ID NO: 36295 - DNA, 17 bp, Arabidopsis thaliana
agctactgcgatggatt

SEQ ID NO: 36296 - DNA, 17 bp, Arabidopsis thaliana
agctactggatctgctg

SEQ ID NO: 36297 - DNA, 17 bp, Arabidopsis thaliana
agctactggcagctttg

SEQ ID NO: 36298 - DNA, 17 bp, Arabidopsis thaliana
agctactgggtttgggg

SEQ ID NO: 36299 - DNA, 17 bp, Arabidopsis thaliana
agctactgtgactcaag

SEQ ID NO: 36300 - DNA, 17 bp, Arabidopsis thaliana
agctactgtgccggtcg

SEQ ID NO: 36301 - DNA, 17 bp, Arabidopsis thaliana
agctactgtgcgctgga

SEQ ID NO: 36302 - DNA, 17 bp, Arabidopsis thaliana
agctactgttgacaccg

SEQ ID NO: 36303 - DNA, 17 bp, Arabidopsis thaliana
agctacttactaccaac

SEQ ID NO: 36304 - DNA, 17 bp, Arabidopsis thaliana
agctacttcttggttgc

SEQ ID NO: 36305 - DNA, 17 bp, Arabidopsis thaliana
agctacttcttggttgt

SEQ ID NO: 36306 - DNA, 17 bp, Arabidopsis thaliana
agctacttgaccgagtg

SEQ ID NO: 36307 - DNA, 17 bp, Arabidopsis thaliana
agctacttgacggaccg

SEQ ID NO: 36308 - DNA, 17 bp, Arabidopsis thaliana
agctacttgagacggac

SEQ ID NO: 36309 - DNA, 17 bp, Arabidopsis thaliana
agctacttgcgacagac

SEQ ID NO: 36310 - DNA, 17 bp, Arabidopsis thaliana
agctacttgcgacagtc

SEQ ID NO: 36311 - DNA, 17 bp, Arabidopsis thaliana
agctacttggatctgga

SEQ ID NO: 36312 - DNA, 17 bp, Arabidopsis thaliana
agctacttgtaaagtga

SEQ ID NO: 36313 - DNA, 17 bp, Arabidopsis thaliana
agctacttgtcggcacc

SEQ ID NO: 36314 - DNA, 17 bp, Arabidopsis thaliana
agctactttagttgcca

SEQ ID NO: 36315 - DNA, 17 bp, Arabidopsis thaliana
agctactttcgagaaaa

SEQ ID NO: 36316 - DNA, 17 bp, Arabidopsis thaliana
agctactttcgcaactg

SEQ ID NO: 36317 - DNA, 17 bp, Arabidopsis thaliana
agctactttcgcaactt

SEQ ID NO: 36318 - DNA, 17 bp, Arabidopsis thaliana
agctactttcgcacctt

SEQ ID NO: 36319 - DNA, 17 bp, Arabidopsis thaliana
agctactttcgcacttt

SEQ ID NO: 36320 - DNA, 17 bp, Arabidopsis thaliana
agctactttcgttgcca

SEQ ID NO: 36321 - DNA, 17 bp, Arabidopsis thaliana
agctactttctcaactt

SEQ ID NO: 36322 - DNA, 17 bp, Arabidopsis thaliana
agctacttttgcaactt

SEQ ID NO: 36323 - DNA, 17 bp, Arabidopsis thaliana
agctagacagtcagtca

SEQ ID NO: 36324 - DNA, 17 bp, Arabidopsis thaliana
agctagatcgttacata

SEQ ID NO: 36325 - DNA, 17 bp, Arabidopsis thaliana
agctagatcttcttgtc

SEQ ID NO: 36326 - DNA, 17 bp, Arabidopsis thaliana
agctagcaggctatgag

SEQ ID NO: 36327 - DNA, 17 bp, Arabidopsis thaliana
agctagccaaggatgac

SEQ ID NO: 36328 - DNA, 17 bp, Arabidopsis thaliana
agctagcgaatctgcaa

SEQ ID NO: 36329 - DNA, 17 bp, Arabidopsis thaliana
agctagctctgaacaat

SEQ ID NO: 36330 - DNA, 17 bp, Arabidopsis thaliana
agctagcttttgggtgt

SEQ ID NO: 36331 - DNA, 17 bp, Arabidopsis thaliana
agctaggactttgacgg

SEQ ID NO: 36332 - DNA, 17 bp, Arabidopsis thaliana
agctagggtcgcagcag

SEQ ID NO: 36333 - DNA, 17 bp, Arabidopsis thaliana
agctagggttctcagta

SEQ ID NO: 36334 - DNA, 17 bp, Arabidopsis thaliana
agctaggtaggacttgt

SEQ ID NO: 36335 - DNA, 17 bp, Arabidopsis thaliana
agctaggtgagctgacc

SEQ ID NO: 36336 - DNA, 17 bp, Arabidopsis thaliana
agctagtcagtttcatc

SEQ ID NO: 36337 - DNA, 17 bp, Arabidopsis thaliana
agctagttagcaggctg

SEQ ID NO: 36338 - DNA, 17 bp, Arabidopsis thaliana
agctagttggttggatg

SEQ ID NO: 36339 - DNA, 17 bp, Arabidopsis thaliana
agctagttgtggcccgc

SEQ ID NO: 36340 - DNA, 17 bp, Arabidopsis thaliana
agctagttttgcaaatc

SEQ ID NO: 36341 - DNA, 17 bp, Arabidopsis thaliana
agctagttttgggaatg

SEQ ID NO: 36342 - DNA, 17 bp, Arabidopsis thaliana
agctatacaacaggtgg

SEQ ID NO: 36343 - DNA, 17 bp, Arabidopsis thaliana
agctataccacaaattt

SEQ ID NO: 36344 - DNA, 17 bp, Arabidopsis thaliana
agctatagcgataatgt

SEQ ID NO: 36345 - DNA, 17 bp, Arabidopsis thaliana
agctatagcgatgatgt

SEQ ID NO: 36346 - DNA, 17 bp, Arabidopsis thaliana
agctatagggggtgtca

SEQ ID NO: 36347 - DNA, 17 bp, Arabidopsis thaliana
agctatagtggataacc

SEQ ID NO: 36348 - DNA, 17 bp, Arabidopsis thaliana
agctatatcccttgcga

SEQ ID NO: 36349 - DNA, 17 bp, Arabidopsis thaliana
agctatatcttggttgt

SEQ ID NO: 36350 - DNA, 17 bp, Arabidopsis thaliana
agctatcagacattttc

SEQ ID NO: 36351 - DNA, 17 bp, Arabidopsis thaliana
agctatccattcggttt

SEQ ID NO: 36352 - DNA, 17 bp, Arabidopsis thaliana
agctatccctagacaac

SEQ ID NO: 36353 - DNA, 17 bp, Arabidopsis thaliana
agctatccgacttggct

SEQ ID NO: 36354 - DNA, 17 bp, Arabidopsis thaliana
agctatcggtgtctcgt

SEQ ID NO: 36355 - DNA, 17 bp, Arabidopsis thaliana
agctatcgtgcgctgga

SEQ ID NO: 36356 - DNA, 17 bp, Arabidopsis thaliana
agctatctgaccacaga

SEQ ID NO: 36357 - DNA, 17 bp, Arabidopsis thaliana
agctatctgcttggctt

SEQ ID NO: 36358 - DNA, 17 bp, Arabidopsis thaliana
agctatcttgataatac

SEQ ID NO: 36359 - DNA, 17 bp, Arabidopsis thaliana
agctatcttgatgatac

SEQ ID NO: 36360 - DNA, 17 bp, Arabidopsis thaliana
agctatctttgtgccag

SEQ ID NO: 36361 - DNA, 17 bp, Arabidopsis thaliana
agctatcttttgactag

SEQ ID NO: 36362 - DNA, 17 bp, Arabidopsis thaliana
agctatgaaaacgaagt

SEQ ID NO: 36363 - DNA, 17 bp, Arabidopsis thaliana
agctatgaatgtaggca

SEQ ID NO: 36364 - DNA, 17 bp, Arabidopsis thaliana
agctatgacgacctgct

SEQ ID NO: 36365 - DNA, 17 bp, Arabidopsis thaliana
agctatgacttcacttg

SEQ ID NO: 36366 - DNA, 17 bp, Arabidopsis thaliana
agctatgatgaatgctc

SEQ ID NO: 36367 - DNA, 17 bp, Arabidopsis thaliana
agctatgcctgagcggg

SEQ ID NO: 36368 - DNA, 17 bp, Arabidopsis thaliana
agctatggaacttgggg

SEQ ID NO: 36369 - DNA, 17 bp, Arabidopsis thaliana
agctatggaggtccatg

SEQ ID NO: 36370 - DNA, 17 bp, Arabidopsis thaliana
agctatggatccatatt

SEQ ID NO: 36371 - DNA, 17 bp, Arabidopsis thaliana
agctatggatgaagcta

SEQ ID NO: 36372 - DNA, 17 bp, Arabidopsis thaliana
agctatggcagttgagg

SEQ ID NO: 36373 - DNA, 17 bp, Arabidopsis thaliana
agctatggcggtgaaga

SEQ ID NO: 36374 - DNA, 17 bp, Arabidopsis thaliana
agctatggctcgtcggc

SEQ ID NO: 36375 - DNA, 17 bp, Arabidopsis thaliana
agctatggctgttggga

SEQ ID NO: 36376 - DNA, 17 bp, Arabidopsis thaliana
agctatgggcttcacaa

SEQ ID NO: 36377 - DNA, 17 bp, Arabidopsis thaliana
agctatgtcttagtcgg

SEQ ID NO: 36378 - DNA, 17 bp, Arabidopsis thaliana
agctatgtcttttcctt

SEQ ID NO: 36379 - DNA, 17 bp, Arabidopsis thaliana
agctatgtgattgtgaa

SEQ ID NO: 36380 - DNA, 17 bp, Arabidopsis thaliana
agctatgtgggtgattg

SEQ ID NO: 36381 - DNA, 17 bp, Arabidopsis thaliana
agctattacatgctaag

SEQ ID NO: 36382 - DNA, 17 bp, Arabidopsis thaliana
agctattacgagtccga

SEQ ID NO: 36383 - DNA, 17 bp, Arabidopsis thaliana
agctattaggatgggtg

SEQ ID NO: 36384 - DNA, 17 bp, Arabidopsis thaliana
agctattcactgcttcc

SEQ ID NO: 36385 - DNA, 17 bp, Arabidopsis thaliana
agctattcattttgcag

SEQ ID NO: 36386 - DNA, 17 bp, Arabidopsis thaliana
agctattccacagggac

SEQ ID NO: 36387 - DNA, 17 bp, Arabidopsis thaliana
agctattcgcttgatca

SEQ ID NO: 36388 - DNA, 17 bp, Arabidopsis thaliana
agctattcggctaagca

SEQ ID NO: 36389 - DNA, 17 bp, Arabidopsis thaliana
agctattcgtcccatac

SEQ ID NO: 36390 - DNA, 17 bp, Arabidopsis thaliana
agctattctgctactga

SEQ ID NO: 36391 - DNA, 17 bp, Arabidopsis thaliana
agctattgacacgtgaa

SEQ ID NO: 36392 - DNA, 17 bp, Arabidopsis thaliana
agctattgacacgtgga

SEQ ID NO: 36393 - DNA, 17 bp, Arabidopsis thaliana
agctattgaccatgtgg

SEQ ID NO: 36394 - DNA, 17 bp, Arabidopsis thaliana
agctattgactagattt

SEQ ID NO: 36395 - DNA, 17 bp, Arabidopsis thaliana
agctattgactcaaagc

SEQ ID NO: 36396 - DNA, 17 bp, Arabidopsis thaliana
agctattgactgcttga

SEQ ID NO: 36397 - DNA, 17 bp, Arabidopsis thaliana
agctattgccgacttgt

SEQ ID NO: 36398 - DNA, 17 bp, Arabidopsis thaliana
agctattgcgtcaacac

SEQ ID NO: 36399 - DNA, 17 bp, Arabidopsis thaliana
agctattggtgatgaac

SEQ ID NO: 36400 - DNA, 17 bp, Arabidopsis thaliana
agctattgtgttccaca

SEQ ID NO: 36401 - DNA, 17 bp, Arabidopsis thaliana
agctatttacagagatg

SEQ ID NO: 36402 - DNA, 17 bp, Arabidopsis thaliana
agctatttcgcaacttg

SEQ ID NO: 36403 - DNA, 17 bp, Arabidopsis thaliana
agctatttctatgaccg

SEQ ID NO: 36404 - DNA, 17 bp, Arabidopsis thaliana
agctatttcttggcgct

SEQ ID NO: 36405 - DNA, 17 bp, Arabidopsis thaliana
agctatttcttggttgt

SEQ ID NO: 36406 - DNA, 17 bp, Arabidopsis thaliana
agctatttgaccaacgt

SEQ ID NO: 36407 - DNA, 17 bp, Arabidopsis thaliana
agctatttgatcatccg

SEQ ID NO: 36408 - DNA, 17 bp, Arabidopsis thaliana
agctattttcaactatt

SEQ ID NO: 36409 - DNA, 17 bp, Arabidopsis thaliana
agctattttcgcaacta

SEQ ID NO: 36410 - DNA, 17 bp, Arabidopsis thaliana
agctattttcgcaactt

SEQ ID NO: 36411 - DNA, 17 bp, Arabidopsis thaliana
agctatttttacggact

SEQ ID NO: 36412 - DNA, 17 bp, Arabidopsis thaliana
agctcaaacttcgaagt

SEQ ID NO: 36413 - DNA, 17 bp, Arabidopsis thaliana
agctcaaagacagtcct

SEQ ID NO: 36414 - DNA, 17 bp, Arabidopsis thaliana
agctcaaatcgaatgga

SEQ ID NO: 36415 - DNA, 17 bp, Arabidopsis thaliana
agctcaaatgatgcatt

SEQ ID NO: 36416 - DNA, 17 bp, Arabidopsis thaliana
agctcaacacttagatt

SEQ ID NO: 36417 - DNA, 17 bp, Arabidopsis thaliana
agctcaacagggtcttc

SEQ ID NO: 36418 - DNA, 17 bp, Arabidopsis thaliana
agctcaacccgaactcg

SEQ ID NO: 36419 - DNA, 17 bp, Arabidopsis thaliana
agctcaactggcaagga

SEQ ID NO: 36420 - DNA, 17 bp, Arabidopsis thaliana
agctcaagaaccgaagc

SEQ ID NO: 36421 - DNA, 17 bp, Arabidopsis thaliana
agctcaagagtggatgt

SEQ ID NO: 36422 - DNA, 17 bp, Arabidopsis thaliana
agctcaagcatgcttaa

SEQ ID NO: 36423 - DNA, 17 bp, Arabidopsis thaliana
agctcaagccactgaca

SEQ ID NO: 36424 - DNA, 17 bp, Arabidopsis thaliana
agctcaagccataccgt

SEQ ID NO: 36425 - DNA, 17 bp, Arabidopsis thaliana
agctcaagccgatttca

SEQ ID NO: 36426 - DNA, 17 bp, Arabidopsis thaliana
agctcaagccgttcgac

SEQ ID NO: 36427 - DNA, 17 bp, Arabidopsis thaliana
agctcaaggatgtttaa

SEQ ID NO: 36428 - DNA, 17 bp, Arabidopsis thaliana
agctcaaggcgagacca

SEQ ID NO: 36429 - DNA, 17 bp, Arabidopsis thaliana
agctcaaggtcagagta

SEQ ID NO: 36430 - DNA, 17 bp, Arabidopsis thaliana
agctcaagtcctcgcgg

SEQ ID NO: 36431 - DNA, 17 bp, Arabidopsis thaliana
agctcaagtgactttgg

SEQ ID NO: 36432 - DNA, 17 bp, Arabidopsis thaliana
agctcaagttgagcgga

SEQ ID NO: 36433 - DNA, 17 bp, Arabidopsis thaliana
agctcaagtttgcccca

SEQ ID NO: 36434 - DNA, 17 bp, Arabidopsis thaliana
agctcaagtttgtacaa

SEQ ID NO: 36435 - DNA, 17 bp, Arabidopsis thaliana
agctcaatcacaggctt

SEQ ID NO: 36436 - DNA, 17 bp, Arabidopsis thaliana
agctcaatcatgtgact

SEQ ID NO: 36437 - DNA, 17 bp, Arabidopsis thaliana
agctcaatcattcttga

SEQ ID NO: 36438 - DNA, 17 bp, Arabidopsis thaliana
agctcaatcattcttta

SEQ ID NO: 36439 - DNA, 17 bp, Arabidopsis thaliana
agctcaatcatttttga

SEQ ID NO: 36440 - DNA, 17 bp, Arabidopsis thaliana
agctcaatcatttttta

SEQ ID NO: 36441 - DNA, 17 bp, Arabidopsis thaliana
agctcaatgttcagcgg

SEQ ID NO: 36442 - DNA, 17 bp, Arabidopsis thaliana
agctcaattcactgcag

SEQ ID NO: 36443 - DNA, 17 bp, Arabidopsis thaliana
agctcaattcatccagt

SEQ ID NO: 36444 - DNA, 17 bp, Arabidopsis thaliana
agctcaattccttaggg

SEQ ID NO: 36445 - DNA, 17 bp, Arabidopsis thaliana
agctcaattggtaaaga

SEQ ID NO: 36446 - DNA, 17 bp, Arabidopsis thaliana
agctcaattgtccctgc

SEQ ID NO: 36447 - DNA, 17 bp, Arabidopsis thaliana
agctcaatttagggtgt

SEQ ID NO: 36448 - DNA, 17 bp, Arabidopsis thaliana
agctcaatttcttaggg

SEQ ID NO: 36449 - DNA, 17 bp, Arabidopsis thaliana
agctcacccgtctcaag

SEQ ID NO: 36450 - DNA, 17 bp, Arabidopsis thaliana
agctcacggcgactttc

SEQ ID NO: 36451 - DNA, 17 bp, Arabidopsis thaliana
agctcacggttaatttg

SEQ ID NO: 36452 - DNA, 17 bp, Arabidopsis thaliana
agctcacgttcaagctg

SEQ ID NO: 36453 - DNA, 17 bp, Arabidopsis thaliana
agctcactgatcgagcg

SEQ ID NO: 36454 - DNA, 17 bp, Arabidopsis thaliana
agctcactgctataacc

SEQ ID NO: 36455 - DNA, 17 bp, Arabidopsis thaliana
agctcactgctctatct

SEQ ID NO: 36456 - DNA, 17 bp, Arabidopsis thaliana
agctcactttccgttac

SEQ ID NO: 36457 - DNA, 17 bp, Arabidopsis thaliana
agctcagaaaattgtat

SEQ ID NO: 36458 - DNA, 17 bp, Arabidopsis thaliana
agctcagaaatttgcgt

SEQ ID NO: 36459 - DNA, 17 bp, Arabidopsis thaliana
agctcagaacgaatctc

SEQ ID NO: 36460 - DNA, 17 bp, Arabidopsis thaliana
agctcagaactggtacg

SEQ ID NO: 36461 - DNA, 17 bp, Arabidopsis thaliana
agctcagaatgcctaat

SEQ ID NO: 36462 - DNA, 17 bp, Arabidopsis thaliana
agctcagaccattttcg

SEQ ID NO: 36463 - DNA, 17 bp, Arabidopsis thaliana
agctcagactcagccag

SEQ ID NO: 36464 - DNA, 17 bp, Arabidopsis thaliana
agctcagagggtatttc

SEQ ID NO: 36465 - DNA, 17 bp, Arabidopsis thaliana
agctcagatcgtccttg

SEQ ID NO: 36466 - DNA, 17 bp, Arabidopsis thaliana
agctcagatgattcgtc

SEQ ID NO: 36467 - DNA, 17 bp, Arabidopsis thaliana
agctcagatttggcttc

SEQ ID NO: 36468 - DNA, 17 bp, Arabidopsis thaliana
agctcagcagatgttcg

SEQ ID NO: 36469 - DNA, 17 bp, Arabidopsis thaliana
agctcagccagctcgag

SEQ ID NO: 36470 - DNA, 17 bp, Arabidopsis thaliana
agctcagccctttgtcg

SEQ ID NO: 36471 - DNA, 17 bp, Arabidopsis thaliana
agctcagcctcttgcat

SEQ ID NO: 36472 - DNA, 17 bp, Arabidopsis thaliana
agctcagcctcttgctt

SEQ ID NO: 36473 - DNA, 17 bp, Arabidopsis thaliana
agctcagcgacctgtcg

SEQ ID NO: 36474 - DNA, 17 bp, Arabidopsis thaliana
agctcagcggtagattg

SEQ ID NO: 36475 - DNA, 17 bp, Arabidopsis thaliana
agctcagctggaaggag

SEQ ID NO: 36476 - DNA, 17 bp, Arabidopsis thaliana
agctcagctgtagattg

SEQ ID NO: 36477 - DNA, 17 bp, Arabidopsis thaliana
agctcaggaaggatagc

SEQ ID NO: 36478 - DNA, 17 bp, Arabidopsis thaliana
agctcaggaggaatagc

SEQ ID NO: 36479 - DNA, 17 bp, Arabidopsis thaliana
agctcaggagggatacc

SEQ ID NO: 36480 - DNA, 17 bp, Arabidopsis thaliana
agctcaggagggataga

SEQ ID NO: 36481 - DNA, 17 bp, Arabidopsis thaliana
agctcaggagggatagc

SEQ ID NO: 36482 - DNA, 17 bp, Arabidopsis thaliana
agctcaggaggggtagc

SEQ ID NO: 36483 - DNA, 17 bp, Arabidopsis thaliana
agctcaggatacagatc

SEQ ID NO: 36484 - DNA, 17 bp, Arabidopsis thaliana
agctcaggattatgtca

SEQ ID NO: 36485 - DNA, 17 bp, Arabidopsis thaliana
agctcaggattggctcg

SEQ ID NO: 36486 - DNA, 17 bp, Arabidopsis thaliana
agctcagggttaggtta

SEQ ID NO: 36487 - DNA, 17 bp, Arabidopsis thaliana
agctcagggttgatgtg

SEQ ID NO: 36488 - DNA, 17 bp, Arabidopsis thaliana
agctcaggtgttagcat

SEQ ID NO: 36489 - DNA, 17 bp, Arabidopsis thaliana
agctcaggtgtttgcat

SEQ ID NO: 36490 - DNA, 17 bp, Arabidopsis thaliana
agctcagtccaaccttt

SEQ ID NO: 36491 - DNA, 17 bp, Arabidopsis thaliana
agctcagtggtagagct

SEQ ID NO: 36492 - DNA, 17 bp, Arabidopsis thaliana
agctcagttacgctgtc

SEQ ID NO: 36493 - DNA, 17 bp, Arabidopsis thaliana
agctcagttggaaccga

SEQ ID NO: 36494 - DNA, 17 bp, Arabidopsis thaliana
agctcagtttctgttcc

SEQ ID NO: 36495 - DNA, 17 bp, Arabidopsis thaliana
agctcagttttccttgt

SEQ ID NO: 36496 - DNA, 17 bp, Arabidopsis thaliana
agctcagtttttgtaga

SEQ ID NO: 36497 - DNA, 17 bp, Arabidopsis thaliana
agctcagtttttgtgga

SEQ ID NO: 36498 - DNA, 17 bp, Arabidopsis thaliana
agctcatacggataatg

SEQ ID NO: 36499 - DNA, 17 bp, Arabidopsis thaliana
agctcatagataactgg

SEQ ID NO: 36500 - DNA, 17 bp, Arabidopsis thaliana
agctcatagatgggagg

SEQ ID NO: 36501 - DNA, 17 bp, Arabidopsis thaliana
agctcataggatcgtgt

SEQ ID NO: 36502 - DNA, 17 bp, Arabidopsis thaliana
agctcatatcttaggcc

SEQ ID NO: 36503 - DNA, 17 bp, Arabidopsis thaliana
agctcatcatgaacttt

SEQ ID NO: 36504 - DNA, 17 bp, Arabidopsis thaliana
agctcatcatgaagtta

SEQ ID NO: 36505 - DNA, 17 bp, Arabidopsis thaliana
agctcatcatgaagttt

SEQ ID NO: 36506 - DNA, 17 bp, Arabidopsis thaliana
agctcatccacctggtg

SEQ ID NO: 36507 - DNA, 17 bp, Arabidopsis thaliana
agctcatccactttttt

SEQ ID NO: 36508 - DNA, 17 bp, Arabidopsis thaliana
agctcatccgtccttcg

SEQ ID NO: 36509 - DNA, 17 bp, Arabidopsis thaliana
agctcatcgatacaagt

SEQ ID NO: 36510 - DNA, 17 bp, Arabidopsis thaliana
agctcatcgatgagatc

SEQ ID NO: 36511 - DNA, 17 bp, Arabidopsis thaliana
agctcatcggagatatt

SEQ ID NO: 36512 - DNA, 17 bp, Arabidopsis thaliana
agctcatctgccatgat

SEQ ID NO: 36513 - DNA, 17 bp, Arabidopsis thaliana
agctcatgaacaagatc

SEQ ID NO: 36514 - DNA, 17 bp, Arabidopsis thaliana
agctcatgatctgggtt

SEQ ID NO: 36515 - DNA, 17 bp, Arabidopsis thaliana
agctcatgccggtccgc

SEQ ID NO: 36516 - DNA, 17 bp, Arabidopsis thaliana
agctcatgccggtccgg

SEQ ID NO: 36517 - DNA, 17 bp, Arabidopsis thaliana
agctcatgctttaggtc

SEQ ID NO: 36518 - DNA, 17 bp, Arabidopsis thaliana
agctcatggcccgttaa

SEQ ID NO: 36519 - DNA, 17 bp, Arabidopsis thaliana
agctcatgtccaactgg

SEQ ID NO: 36520 - DNA, 17 bp, Arabidopsis thaliana
agctcatgtgcaccatc

SEQ ID NO: 36521 - DNA, 17 bp, Arabidopsis thaliana
agctcatgtgctgatgt

SEQ ID NO: 36522 - DNA, 17 bp, Arabidopsis thaliana
agctcattaggatgtca

SEQ ID NO: 36523 - DNA, 17 bp, Arabidopsis thaliana
agctcattagtaagtaa

SEQ ID NO: 36524 - DNA, 17 bp, Arabidopsis thaliana
agctcattcctacgaga

SEQ ID NO: 36525 - DNA, 17 bp, Arabidopsis thaliana
agctcattgcagagcac

SEQ ID NO: 36526 - DNA, 17 bp, Arabidopsis thaliana
agctcatttagcttgcg

SEQ ID NO: 36527 - DNA, 17 bp, Arabidopsis thaliana
agctcatttgctgtaag

SEQ ID NO: 36528 - DNA, 17 bp, Arabidopsis thaliana
agctcattttccgtaac

SEQ ID NO: 36529 - DNA, 17 bp, Arabidopsis thaliana
agctcattttttggcga

SEQ ID NO: 36530 - DNA, 17 bp, Arabidopsis thaliana
agctccaaaatttgaca

SEQ ID NO: 36531 - DNA, 17 bp, Arabidopsis thaliana
agctccaacggctatct

SEQ ID NO: 36532 - DNA, 17 bp, Arabidopsis thaliana
agctccaactcgccatt

SEQ ID NO: 36533 - DNA, 17 bp, Arabidopsis thaliana
agctccaagtcccagat

SEQ ID NO: 36534 - DNA, 17 bp, Arabidopsis thaliana
agctccaccagccccca

SEQ ID NO: 36535 - DNA, 17 bp, Arabidopsis thaliana
agctccaccttagcaga

SEQ ID NO: 36536 - DNA, 17 bp, Arabidopsis thaliana
agctccacggtccagac

SEQ ID NO: 36537 - DNA, 17 bp, Arabidopsis thaliana
agctccacgttgagacg

SEQ ID NO: 36538 - DNA, 17 bp, Arabidopsis thaliana
agctccactttctacgc

SEQ ID NO: 36539 - DNA, 17 bp, Arabidopsis thaliana
agctccagaggaccaga

SEQ ID NO: 36540 - DNA, 17 bp, Arabidopsis thaliana
agctccagattgcggga

SEQ ID NO: 36541 - DNA, 17 bp, Arabidopsis thaliana
agctccagcactagcac

SEQ ID NO: 36542 - DNA, 17 bp, Arabidopsis thaliana
agctccagctggacctt

SEQ ID NO: 36543 - DNA, 17 bp, Arabidopsis thaliana
agctccaggacctgatg

SEQ ID NO: 36544 - DNA, 17 bp, Arabidopsis thaliana
agctccaggatagcgta

SEQ ID NO: 36545 - DNA, 17 bp, Arabidopsis thaliana
agctccaggcccgaaac

SEQ ID NO: 36546 - DNA, 17 bp, Arabidopsis thaliana
agctccagggtttattt

SEQ ID NO: 36547 - DNA, 17 bp, Arabidopsis thaliana
agctccagttaacgatg

SEQ ID NO: 36548 - DNA, 17 bp, Arabidopsis thaliana
agctccagttaacgctg

SEQ ID NO: 36549 - DNA, 17 bp, Arabidopsis thaliana
agctccatcgacaggtc

SEQ ID NO: 36550 - DNA, 17 bp, Arabidopsis thaliana
agctccatgatgtttat

SEQ ID NO: 36551 - DNA, 17 bp, Arabidopsis thaliana
agctccatgtttgcgct

SEQ ID NO: 36552 - DNA, 17 bp, Arabidopsis thaliana
agctccattcagtttta

SEQ ID NO: 36553 - DNA, 17 bp, Arabidopsis thaliana
agctccatttttgcgct

SEQ ID NO: 36554 - DNA, 17 bp, Arabidopsis thaliana
agctcccaagggtcgaa

SEQ ID NO: 36555 - DNA, 17 bp, Arabidopsis thaliana
agctcccatactgtgtg

SEQ ID NO: 36556 - DNA, 17 bp, Arabidopsis thaliana
agctccccgtctgctgt

SEQ ID NO: 36557 - DNA, 17 bp, Arabidopsis thaliana
agctcccgaaaccaggg

SEQ ID NO: 36558 - DNA, 17 bp, Arabidopsis thaliana
agctccctgtctgctgt

SEQ ID NO: 36559 - DNA, 17 bp, Arabidopsis thaliana
agctcccttcaatccac

SEQ ID NO: 36560 - DNA, 17 bp, Arabidopsis thaliana
agctcccttcaatccta

SEQ ID NO: 36561 - DNA, 17 bp, Arabidopsis thaliana
agctcccttcattccta

SEQ ID NO: 36562 - DNA, 17 bp, Arabidopsis thaliana
agctcccttgggccaat

SEQ ID NO: 36563 - DNA, 17 bp, Arabidopsis thaliana
agctccgaatggtgact

SEQ ID NO: 36564 - DNA, 17 bp, Arabidopsis thaliana
agctccgacaagtttaa

SEQ ID NO: 36565 - DNA, 17 bp, Arabidopsis thaliana
agctccgagtctgtaaa

SEQ ID NO: 36566 - DNA, 17 bp, Arabidopsis thaliana
agctccgattcgtcttc

SEQ ID NO: 36567 - DNA, 17 bp, Arabidopsis thaliana
agctccgattggaccat

SEQ ID NO: 36568 - DNA, 17 bp, Arabidopsis thaliana
agctccgcacgtccagc

SEQ ID NO: 36569 - DNA, 17 bp, Arabidopsis thaliana
agctccgcagttaagcg

SEQ ID NO: 36570 - DNA, 17 bp, Arabidopsis thaliana
agctccgccatttccgc

SEQ ID NO: 36571 - DNA, 17 bp, Arabidopsis thaliana
agctccgcctaggatct

SEQ ID NO: 36572 - DNA, 17 bp, Arabidopsis thaliana
agctccgcgctcgcacc

SEQ ID NO: 36573 - DNA, 17 bp, Arabidopsis thaliana
agctccggccgtaatta

SEQ ID NO: 36574 - DNA, 17 bp, Arabidopsis thaliana
agctccggccttaatgg

SEQ ID NO: 36575 - DNA, 17 bp, Arabidopsis thaliana
agctccggcgctatgga

SEQ ID NO: 36576 - DNA, 17 bp, Arabidopsis thaliana
agctccgggtcgaatca

SEQ ID NO: 36577 - DNA, 17 bp, Arabidopsis thaliana
agctccggtgaaacctt

SEQ ID NO: 36578 - DNA, 17 bp, Arabidopsis thaliana
agctccggttggtgtgg

SEQ ID NO: 36579 - DNA, 17 bp, Arabidopsis thaliana
agctccgtacgtattct

SEQ ID NO: 36580 - DNA, 17 bp, Arabidopsis thaliana
agctccgtccgggatct

SEQ ID NO: 36581 - DNA, 17 bp, Arabidopsis thaliana
agctccgttgactacgt

SEQ ID NO: 36582 - DNA, 17 bp, Arabidopsis thaliana
agctcctaagatgagta

SEQ ID NO: 36583 - DNA, 17 bp, Arabidopsis thaliana
agctcctactgacggtc

SEQ ID NO: 36584 - DNA, 17 bp, Arabidopsis thaliana
agctcctactgagggtc

SEQ ID NO: 36585 - DNA, 17 bp, Arabidopsis thaliana
agctcctactgcgtaat

SEQ ID NO: 36586 - DNA, 17 bp, Arabidopsis thaliana
agctcctaggattggtg

SEQ ID NO: 36587 - DNA, 17 bp, Arabidopsis thaliana
agctcctatggatgtgg

SEQ ID NO: 36588 - DNA, 17 bp, Arabidopsis thaliana
agctcctcaatgattaa

SEQ ID NO: 36589 - DNA, 17 bp, Arabidopsis thaliana
agctcctcaatgattat

SEQ ID NO: 36590 - DNA, 17 bp, Arabidopsis thaliana
agctcctcactactacc

SEQ ID NO: 36591 - DNA, 17 bp, Arabidopsis thaliana
agctcctcttgacgaat

SEQ ID NO: 36592 - DNA, 17 bp, Arabidopsis thaliana
agctcctgagatcttga

SEQ ID NO: 36593 - DNA, 17 bp, Arabidopsis thaliana
agctcctgcagcgctgg

SEQ ID NO: 36594 - DNA, 17 bp, Arabidopsis thaliana
agctcctgctaagtcca

SEQ ID NO: 36595 - DNA, 17 bp, Arabidopsis thaliana
agctcctgttgcagctg

SEQ ID NO: 36596 - DNA, 17 bp, Arabidopsis thaliana
agctcctgttggtcgag

SEQ ID NO: 36597 - DNA, 17 bp, Arabidopsis thaliana
agctcctgtttgtgcga

SEQ ID NO: 36598 - DNA, 17 bp, Arabidopsis thaliana
agctccttcagtgtgac

SEQ ID NO: 36599 - DNA, 17 bp, Arabidopsis thaliana
agctccttcccgcaaat

SEQ ID NO: 36600 - DNA, 17 bp, Arabidopsis thaliana
agctccttcccgcaagc

SEQ ID NO: 36601 - DNA, 17 bp, Arabidopsis thaliana
agctccttcgcgaatca

SEQ ID NO: 36602 - DNA, 17 bp, Arabidopsis thaliana
agctccttcggcgtgac

SEQ ID NO: 36603 - DNA, 17 bp, Arabidopsis thaliana
agctccttcggtgtgac

SEQ ID NO: 36604 - DNA, 17 bp, Arabidopsis thaliana
agctccttcggtgtgtc

SEQ ID NO: 36605 - DNA, 17 bp, Arabidopsis thaliana
agctccttctgtgtgac

SEQ ID NO: 36606 - DNA, 17 bp, Arabidopsis thaliana
agctccttgagaggcct

SEQ ID NO: 36607 - DNA, 17 bp, Arabidopsis thaliana
agctccttgtgactgaa

SEQ ID NO: 36608 - DNA, 17 bp, Arabidopsis thaliana
agctccttgtttttgtc

SEQ ID NO: 36609 - DNA, 17 bp, Arabidopsis thaliana
agctcctttgtttgctc

SEQ ID NO: 36610 - DNA, 17 bp, Arabidopsis thaliana
agctcctttttggaggc

SEQ ID NO: 36611 - DNA, 17 bp, Arabidopsis thaliana
agctcgaacgaccttca

SEQ ID NO: 36612 - DNA, 17 bp, Arabidopsis thaliana
agctcgaacttgcgcac

SEQ ID NO: 36613 - DNA, 17 bp, Arabidopsis thaliana
agctcgaagcctaactt

SEQ ID NO: 36614 - DNA, 17 bp, Arabidopsis thaliana
agctcgaatgtctgacc

SEQ ID NO: 36615 - DNA, 17 bp, Arabidopsis thaliana
agctcgacagattcgga

SEQ ID NO: 36616 - DNA, 17 bp, Arabidopsis thaliana
agctcgacatcgtcttt

SEQ ID NO: 36617 - DNA, 17 bp, Arabidopsis thaliana
agctcgacgcaagacgc

SEQ ID NO: 36618 - DNA, 17 bp, Arabidopsis thaliana
agctcgacgccaggatg

SEQ ID NO: 36619 - DNA, 17 bp, Arabidopsis thaliana
agctcgacttgagcttc

SEQ ID NO: 36620 - DNA, 17 bp, Arabidopsis thaliana
agctcgaggatgatttg

SEQ ID NO: 36621 - DNA, 17 bp, Arabidopsis thaliana
agctcgagtccgcaatt

SEQ ID NO: 36622 - DNA, 17 bp, Arabidopsis thaliana
agctcgagtgtcagctg

SEQ ID NO: 36623 - DNA, 17 bp, Arabidopsis thaliana
agctcgagttgcggtct

SEQ ID NO: 36624 - DNA, 17 bp, Arabidopsis thaliana
agctcgatgagtggcta

SEQ ID NO: 36625 - DNA, 17 bp, Arabidopsis thaliana
agctcgatttgcagact

SEQ ID NO: 36626 - DNA, 17 bp, Arabidopsis thaliana
agctcgcagcgatactg

SEQ ID NO: 36627 - DNA, 17 bp, Arabidopsis thaliana
agctcgcagtaagattt

SEQ ID NO: 36628 - DNA, 17 bp, Arabidopsis thaliana
agctcgccaatggcaag

SEQ ID NO: 36629 - DNA, 17 bp, Arabidopsis thaliana
agctcgcccgacgacgc

SEQ ID NO: 36630 - DNA, 17 bp, Arabidopsis thaliana
agctcgcgcgactacgt

SEQ ID NO: 36631 - DNA, 17 bp, Arabidopsis thaliana
agctcgcgctgactacg

SEQ ID NO: 36632 - DNA, 17 bp, Arabidopsis thaliana
agctcgcgttgactacg

SEQ ID NO: 36633 - DNA, 17 bp, Arabidopsis thaliana
agctcgcgttgactact

SEQ ID NO: 36634 - DNA, 17 bp, Arabidopsis thaliana
agctcgcgttgactagt

SEQ ID NO: 36635 - DNA, 17 bp, Arabidopsis thaliana
agctcgcgttgactccc

SEQ ID NO: 36636 - DNA, 17 bp, Arabidopsis thaliana
agctcgctcagctcagc

SEQ ID NO: 36637 - DNA, 17 bp, Arabidopsis thaliana
agctcgctctgcttttg

SEQ ID NO: 36638 - DNA, 17 bp, Arabidopsis thaliana
agctcgctcttcacaag

SEQ ID NO: 36639 - DNA, 17 bp, Arabidopsis thaliana
agctcgctgccgtgatc

SEQ ID NO: 36640 - DNA, 17 bp, Arabidopsis thaliana
agctcgctgcgtgcaat

SEQ ID NO: 36641 - DNA, 17 bp, Arabidopsis thaliana
agctcggaaatttgcgt

SEQ ID NO: 36642 - DNA, 17 bp, Arabidopsis thaliana
agctcggacgcgagtta

SEQ ID NO: 36643 - DNA, 17 bp, Arabidopsis thaliana
agctcggacgcgagttc

SEQ ID NO: 36644 - DNA, 17 bp, Arabidopsis thaliana
agctcggacgcgagttt

SEQ ID NO: 36645 - DNA, 17 bp, Arabidopsis thaliana
agctcggacgcgatttc

SEQ ID NO: 36646 - DNA, 17 bp, Arabidopsis thaliana
agctcggactggctcgt

SEQ ID NO: 36647 - DNA, 17 bp, Arabidopsis thaliana
agctcggcatgatgatg

SEQ ID NO: 36648 - DNA, 17 bp, Arabidopsis thaliana
agctcggccagctcaag

SEQ ID NO: 36649 - DNA, 17 bp, Arabidopsis thaliana
agctcggccatcacggc

SEQ ID NO: 36650 - DNA, 17 bp, Arabidopsis thaliana
agctcggctaattcgct

SEQ ID NO: 36651 - DNA, 17 bp, Arabidopsis thaliana
agctcggctggaatcta

SEQ ID NO: 36652 - DNA, 17 bp, Arabidopsis thaliana
agctcggctgggacaac

SEQ ID NO: 36653 - DNA, 17 bp, Arabidopsis thaliana
agctcggctgtagaaac

SEQ ID NO: 36654 - DNA, 17 bp, Arabidopsis thaliana
agctcggctgtggaaac

SEQ ID NO: 36655 - DNA, 17 bp, Arabidopsis thaliana
agctcggcttactagca

SEQ ID NO: 36656 - DNA, 17 bp, Arabidopsis thaliana
agctcggctttagatct

SEQ ID NO: 36657 - DNA, 17 bp, Arabidopsis thaliana
agctcggggactgaaga

SEQ ID NO: 36658 - DNA, 17 bp, Arabidopsis thaliana
agctcgggggtcccagt

SEQ ID NO: 36659 - DNA, 17 bp, Arabidopsis thaliana
agctcggggtagctcgg

SEQ ID NO: 36660 - DNA, 17 bp, Arabidopsis thaliana
agctcgggttccggtcg

SEQ ID NO: 36661 - DNA, 17 bp, Arabidopsis thaliana
agctcggtcattgtgtc

SEQ ID NO: 36662 - DNA, 17 bp, Arabidopsis thaliana
agctcggtctttatatc

SEQ ID NO: 36663 - DNA, 17 bp, Arabidopsis thaliana
agctcggtgaccgaaga

SEQ ID NO: 36664 - DNA, 17 bp, Arabidopsis thaliana
agctcggtttgattagg

SEQ ID NO: 36665 - DNA, 17 bp, Arabidopsis thaliana
agctcgtaaactccggc

SEQ ID NO: 36666 - DNA, 17 bp, Arabidopsis thaliana
agctcgtaatctctcag

SEQ ID NO: 36667 - DNA, 17 bp, Arabidopsis thaliana
agctcgtactcgaggga

SEQ ID NO: 36668 - DNA, 17 bp, Arabidopsis thaliana
agctcgtagatgggagg

SEQ ID NO: 36669 - DNA, 17 bp, Arabidopsis thaliana
agctcgtagatgggatg

SEQ ID NO: 36670 - DNA, 17 bp, Arabidopsis thaliana
agctcgtagtgcacttt

SEQ ID NO: 36671 - DNA, 17 bp, Arabidopsis thaliana
agctcgtagttcaacct

SEQ ID NO: 36672 - DNA, 17 bp, Arabidopsis thaliana
agctcgtagttgaacct

SEQ ID NO: 36673 - DNA, 17 bp, Arabidopsis thaliana
agctcgtagtttgaggc

SEQ ID NO: 36674 - DNA, 17 bp, Arabidopsis thaliana
agctcgtcaaggagatt

SEQ ID NO: 36675 - DNA, 17 bp, Arabidopsis thaliana
agctcgtcaattctagg

SEQ ID NO: 36676 - DNA, 17 bp, Arabidopsis thaliana
agctcgtccacttcgga

SEQ ID NO: 36677 - DNA, 17 bp, Arabidopsis thaliana
agctcgtccgccgtccg

SEQ ID NO: 36678 - DNA, 17 bp, Arabidopsis thaliana
agctcgtcgccaagcac

SEQ ID NO: 36679 - DNA, 17 bp, Arabidopsis thaliana
agctcgtcgtccagttc

SEQ ID NO: 36680 - DNA, 17 bp, Arabidopsis thaliana
agctcgtctattagatg

SEQ ID NO: 36681 - DNA, 17 bp, Arabidopsis thaliana
agctcgtctctggttca

SEQ ID NO: 36682 - DNA, 17 bp, Arabidopsis thaliana
agctcgtcttcaaagct

SEQ ID NO: 36683 - DNA, 17 bp, Arabidopsis thaliana
agctcgtgaaatgaccg

SEQ ID NO: 36684 - DNA, 17 bp, Arabidopsis thaliana
agctcgtgattcccctc

SEQ ID NO: 36685 - DNA, 17 bp, Arabidopsis thaliana
agctcgtgcttcaattg

SEQ ID NO: 36686 - DNA, 17 bp, Arabidopsis thaliana
agctcgtggatgggagg

SEQ ID NO: 36687 - DNA, 17 bp, Arabidopsis thaliana
agctcgtggattggtcc

SEQ ID NO: 36688 - DNA, 17 bp, Arabidopsis thaliana
agctcgtggctgatgat

SEQ ID NO: 36689 - DNA, 17 bp, Arabidopsis thaliana
agctcgtggttgaacct

SEQ ID NO: 36690 - DNA, 17 bp, Arabidopsis thaliana
agctcgttgcgtactgc

SEQ ID NO: 36691 - DNA, 17 bp, Arabidopsis thaliana
agctcgttgttgtcaga

SEQ ID NO: 36692 - DNA, 17 bp, Arabidopsis thaliana
agctcgtttgcatgtcg

SEQ ID NO: 36693 - DNA, 17 bp, Arabidopsis thaliana
agctcgtttgccccccc

SEQ ID NO: 36694 - DNA, 17 bp, Arabidopsis thaliana
agctctaagatattctt

SEQ ID NO: 36695 - DNA, 17 bp, Arabidopsis thaliana
agctctaagtaagacta

SEQ ID NO: 36696 - DNA, 17 bp, Arabidopsis thaliana
agctctaagttccatgg

SEQ ID NO: 36697 - DNA, 17 bp, Arabidopsis thaliana
agctctaataatgccgg

SEQ ID NO: 36698 - DNA, 17 bp, Arabidopsis thaliana
agctctaatcagcagtg

SEQ ID NO: 36699 - DNA, 17 bp, Arabidopsis thaliana
agctctaatgatctgtt

SEQ ID NO: 36700 - DNA, 17 bp, Arabidopsis thaliana
agctctaattagatttt

SEQ ID NO: 36701 - DNA, 17 bp, Arabidopsis thaliana
agctctacacgaatcag

SEQ ID NO: 36702 - DNA, 17 bp, Arabidopsis thaliana
agctctaccatctctgc

SEQ ID NO: 36703 - DNA, 17 bp, Arabidopsis thaliana
agctctactcgactcag

SEQ ID NO: 36704 - DNA, 17 bp, Arabidopsis thaliana
agctctactctgggcga

SEQ ID NO: 36705 - DNA, 17 bp, Arabidopsis thaliana
agctctactttggatga

SEQ ID NO: 36706 - DNA, 17 bp, Arabidopsis thaliana
agctctagagtgcgtcg

SEQ ID NO: 36707 - DNA, 17 bp, Arabidopsis thaliana
agctctagttgcgcttc

SEQ ID NO: 36708 - DNA, 17 bp, Arabidopsis thaliana
agctctagttgcggttt

SEQ ID NO: 36709 - DNA, 17 bp, Arabidopsis thaliana
agctctataagtgccac

SEQ ID NO: 36710 - DNA, 17 bp, Arabidopsis thaliana
agctctatagcattcgg

SEQ ID NO: 36711 - DNA, 17 bp, Arabidopsis thaliana
agctctatctgctgctc

SEQ ID NO: 36712 - DNA, 17 bp, Arabidopsis thaliana
agctctatgatgaggct

SEQ ID NO: 36713 - DNA, 17 bp, Arabidopsis thaliana
agctctattccacttag

SEQ ID NO: 36714 - DNA, 17 bp, Arabidopsis thaliana
agctctattgggcaatc

SEQ ID NO: 36715 - DNA, 17 bp, Arabidopsis thaliana
agctctatttgcctctt

SEQ ID NO: 36716 - DNA, 17 bp, Arabidopsis thaliana
agctctatttggcatga

SEQ ID NO: 36717 - DNA, 17 bp, Arabidopsis thaliana
agctctcaaggcctgag

SEQ ID NO: 36718 - DNA, 17 bp, Arabidopsis thaliana
agctctcactaaatcac

SEQ ID NO: 36719 - DNA, 17 bp, Arabidopsis thaliana
agctctcatatgcgcaa

SEQ ID NO: 36720 - DNA, 17 bp, Arabidopsis thaliana
agctctcatatgctgat

SEQ ID NO: 36721 - DNA, 17 bp, Arabidopsis thaliana
agctctcatgtgccgat

SEQ ID NO: 36722 - DNA, 17 bp, Arabidopsis thaliana
agctctcatgtgctaat

SEQ ID NO: 36723 - DNA, 17 bp, Arabidopsis thaliana
agctctcatgtgctgat

SEQ ID NO: 36724 - DNA, 17 bp, Arabidopsis thaliana
agctctcctctgggcga

SEQ ID NO: 36725 - DNA, 17 bp, Arabidopsis thaliana
agctctcctttctcaga

SEQ ID NO: 36726 - DNA, 17 bp, Arabidopsis thaliana
agctctcctttcttaga

SEQ ID NO: 36727 - DNA, 17 bp, Arabidopsis thaliana
agctctcgattccgtgt

SEQ ID NO: 36728 - DNA, 17 bp, Arabidopsis thaliana
agctctcgcaaatgcac

SEQ ID NO: 36729 - DNA, 17 bp, Arabidopsis thaliana
agctctcgcctccacgt

SEQ ID NO: 36730 - DNA, 17 bp, Arabidopsis thaliana
agctctcggctgcggct

SEQ ID NO: 36731 - DNA, 17 bp, Arabidopsis thaliana
agctctcgggaagttcc

SEQ ID NO: 36732 - DNA, 17 bp, Arabidopsis thaliana
agctctcgtgaatggtg

SEQ ID NO: 36733 - DNA, 17 bp, Arabidopsis thaliana
agctctctggctctatc

SEQ ID NO: 36734 - DNA, 17 bp, Arabidopsis thaliana
agctctcttccacgtca

SEQ ID NO: 36735 - DNA, 17 bp, Arabidopsis thaliana
agctctcttggactgca

SEQ ID NO: 36736 - DNA, 17 bp, Arabidopsis thaliana
agctctcttttggacac

SEQ ID NO: 36737 - DNA, 17 bp, Arabidopsis thaliana
agctctcttttggacag

SEQ ID NO: 36738 - DNA, 17 bp, Arabidopsis thaliana
agctctctttttgacag

SEQ ID NO: 36739 - DNA, 17 bp, Arabidopsis thaliana
agctctgaacaatcggt

SEQ ID NO: 36740 - DNA, 17 bp, Arabidopsis thaliana
agctctgaactgactga

SEQ ID NO: 36741 - DNA, 17 bp, Arabidopsis thaliana
agctctgaactgactgc

SEQ ID NO: 36742 - DNA, 17 bp, Arabidopsis thaliana
agctctgaatcttcggg

SEQ ID NO: 36743 - DNA, 17 bp, Arabidopsis thaliana
agctctgaatttttcgt

SEQ ID NO: 36744 - DNA, 17 bp, Arabidopsis thaliana
agctctgacattatcca

SEQ ID NO: 36745 - DNA, 17 bp, Arabidopsis thaliana
agctctgaccatgatcg

SEQ ID NO: 36746 - DNA, 17 bp, Arabidopsis thaliana
agctctgactgtgacca

SEQ ID NO: 36747 - DNA, 17 bp, Arabidopsis thaliana
agctctgactgtgacta

SEQ ID NO: 36748 - DNA, 17 bp, Arabidopsis thaliana
agctctgagtccccgct

SEQ ID NO: 36749 - DNA, 17 bp, Arabidopsis thaliana
agctctgagtcttccga

SEQ ID NO: 36750 - DNA, 17 bp, Arabidopsis thaliana
agctctgataccaaatg

SEQ ID NO: 36751 - DNA, 17 bp, Arabidopsis thaliana
agctctgataccacatg

SEQ ID NO: 36752 - DNA, 17 bp, Arabidopsis thaliana
agctctgataccatgat

SEQ ID NO: 36753 - DNA, 17 bp, Arabidopsis thaliana
agctctgatcgttctgt

SEQ ID NO: 36754 - DNA, 17 bp, Arabidopsis thaliana
agctctgattggtaaca

SEQ ID NO: 36755 - DNA, 17 bp, Arabidopsis thaliana
agctctgcacctgatac

SEQ ID NO: 36756 - DNA, 17 bp, Arabidopsis thaliana
agctctgcagtgtaccg

SEQ ID NO: 36757 - DNA, 17 bp, Arabidopsis thaliana
agctctgccaacacagt

SEQ ID NO: 36758 - DNA, 17 bp, Arabidopsis thaliana
agctctgccacatccgg

SEQ ID NO: 36759 - DNA, 17 bp, Arabidopsis thaliana
agctctgccatctctgc

SEQ ID NO: 36760 - DNA, 17 bp, Arabidopsis thaliana
agctctgccatttccgt

SEQ ID NO: 36761 - DNA, 17 bp, Arabidopsis thaliana
agctctgcctttccttt

SEQ ID NO: 36762 - DNA, 17 bp, Arabidopsis thaliana
agctctgcggcaaagcg

SEQ ID NO: 36763 - DNA, 17 bp, Arabidopsis thaliana
agctctggaagcatgtg

SEQ ID NO: 36764 - DNA, 17 bp, Arabidopsis thaliana
agctctggaaggatgat

SEQ ID NO: 36765 - DNA, 17 bp, Arabidopsis thaliana
agctctggagatgacga

SEQ ID NO: 36766 - DNA, 17 bp, Arabidopsis thaliana
agctctggctttgtatc

SEQ ID NO: 36767 - DNA, 17 bp, Arabidopsis thaliana
agctctggtatgactgc

SEQ ID NO: 36768 - DNA, 17 bp, Arabidopsis thaliana
agctctggtgacaattt

SEQ ID NO: 36769 - DNA, 17 bp, Arabidopsis thaliana
agctctggtgacacttt

SEQ ID NO: 36770 - DNA, 17 bp, Arabidopsis thaliana
agctctggtgactatat

SEQ ID NO: 36771 - DNA, 17 bp, Arabidopsis thaliana
agctctggtgtcctagg

SEQ ID NO: 36772 - DNA, 17 bp, Arabidopsis thaliana
agctctggtttgccaac

SEQ ID NO: 36773 - DNA, 17 bp, Arabidopsis thaliana
agctctgtaccgttgaa

SEQ ID NO: 36774 - DNA, 17 bp, Arabidopsis thaliana
agctctgtctgcttaga

SEQ ID NO: 36775 - DNA, 17 bp, Arabidopsis thaliana
agctctgtggcggccag

SEQ ID NO: 36776 - DNA, 17 bp, Arabidopsis thaliana
agctctgttactcgttc

SEQ ID NO: 36777 - DNA, 17 bp, Arabidopsis thaliana
agctctgttatctctta

SEQ ID NO: 36778 - DNA, 17 bp, Arabidopsis thaliana
agctctgttgcggccag

SEQ ID NO: 36779 - DNA, 17 bp, Arabidopsis thaliana
agctctgtttccgtggc

SEQ ID NO: 36780 - DNA, 17 bp, Arabidopsis thaliana
agctctgttttggaaga

SEQ ID NO: 36781 - DNA, 17 bp, Arabidopsis thaliana
agctcttaagcaggttt

SEQ ID NO: 36782 - DNA, 17 bp, Arabidopsis thaliana
agctcttaatcctccag

SEQ ID NO: 36783 - DNA, 17 bp, Arabidopsis thaliana
agctcttaatgcatacg

SEQ ID NO: 36784 - DNA, 17 bp, Arabidopsis thaliana
agctcttactgaggctg

SEQ ID NO: 36785 - DNA, 17 bp, Arabidopsis thaliana
agctcttatgtgctgat

SEQ ID NO: 36786 - DNA, 17 bp, Arabidopsis thaliana
agctcttccaagactct

SEQ ID NO: 36787 - DNA, 17 bp, Arabidopsis thaliana
agctcttcccttctgtt

SEQ ID NO: 36788 - DNA, 17 bp, Arabidopsis thaliana
agctcttctactcagtt

SEQ ID NO: 36789 - DNA, 17 bp, Arabidopsis thaliana
agctcttctattcagtt

SEQ ID NO: 36790 - DNA, 17 bp, Arabidopsis thaliana
agctcttctctaggcga

SEQ ID NO: 36791 - DNA, 17 bp, Arabidopsis thaliana
agctcttctttgggcga

SEQ ID NO: 36792 - DNA, 17 bp, Arabidopsis thaliana
agctcttgatcagttcc

SEQ ID NO: 36793 - DNA, 17 bp, Arabidopsis thaliana
agctcttgatctatggt

SEQ ID NO: 36794 - DNA, 17 bp, Arabidopsis thaliana
agctcttgcacacttac

SEQ ID NO: 36795 - DNA, 17 bp, Arabidopsis thaliana
agctcttgcagatttct

SEQ ID NO: 36796 - DNA, 17 bp, Arabidopsis thaliana
agctcttgtgtgaccat

SEQ ID NO: 36797 - DNA, 17 bp, Arabidopsis thaliana
agctcttgttgcgacag

SEQ ID NO: 36798 - DNA, 17 bp, Arabidopsis thaliana
agctcttgtttggactt

SEQ ID NO: 36799 - DNA, 17 bp, Arabidopsis thaliana
agctctttcagtgttcc

SEQ ID NO: 36800 - DNA, 17 bp, Arabidopsis thaliana
agctctttcagtttctt

SEQ ID NO: 36801 - DNA, 17 bp, Arabidopsis thaliana
agctctttccggtgttg

SEQ ID NO: 36802 - DNA, 17 bp, Arabidopsis thaliana
agctctttctaacagct

SEQ ID NO: 36803 - DNA, 17 bp, Arabidopsis thaliana
agctctttctaacagtt

SEQ ID NO: 36804 - DNA, 17 bp, Arabidopsis thaliana
agctctttcttgattct

SEQ ID NO: 36805 - DNA, 17 bp, Arabidopsis thaliana
agctctttgacccggat

SEQ ID NO: 36806 - DNA, 17 bp, Arabidopsis thaliana
agctctttgatccggaa

SEQ ID NO: 36807 - DNA, 17 bp, Arabidopsis thaliana
agctctttgcagagcac

SEQ ID NO: 36808 - DNA, 17 bp, Arabidopsis thaliana
agctctttgctgagaaa

SEQ ID NO: 36809 - DNA, 17 bp, Arabidopsis thaliana
agctctttgggcgatga

SEQ ID NO: 36810 - DNA, 17 bp, Arabidopsis thaliana
agctctttggtgatggc

SEQ ID NO: 36811 - DNA, 17 bp, Arabidopsis thaliana
agctctttgtcgctaag

SEQ ID NO: 36812 - DNA, 17 bp, Arabidopsis thaliana
agctcttttcattgctc

SEQ ID NO: 36813 - DNA, 17 bp, Arabidopsis thaliana
agctcttttggcccaat

SEQ ID NO: 36814 - DNA, 17 bp, Arabidopsis thaliana
agctcttttggcggctt

SEQ ID NO: 36815 - DNA, 17 bp, Arabidopsis thaliana
agctcttttgtacagtt

SEQ ID NO: 36816 - DNA, 17 bp, Arabidopsis thaliana
agctcttttgtgtgccc

SEQ ID NO: 36817 - DNA, 17 bp, Arabidopsis thaliana
agctgaaactctcgtcc

SEQ ID NO: 36818 - DNA, 17 bp, Arabidopsis thaliana
agctgaaactgcatagg

SEQ ID NO: 36819 - DNA, 17 bp, Arabidopsis thaliana
agctgaaactggtttgc

SEQ ID NO: 36820 - DNA, 17 bp, Arabidopsis thaliana
agctgaaactgttggtt

SEQ ID NO: 36821 - DNA, 17 bp, Arabidopsis thaliana
agctgaaaggagtgacg

SEQ ID NO: 36822 - DNA, 17 bp, Arabidopsis thaliana
agctgaaaggccctgcc

SEQ ID NO: 36823 - DNA, 17 bp, Arabidopsis thaliana
agctgaaatcaaagtcc

SEQ ID NO: 36824 - DNA, 17 bp, Arabidopsis thaliana
agctgaaatcaaattgt

SEQ ID NO: 36825 - DNA, 17 bp, Arabidopsis thaliana
agctgaaatcccatgtg

SEQ ID NO: 36826 - DNA, 17 bp, Arabidopsis thaliana
agctgaaatggttgacc

SEQ ID NO: 36827 - DNA, 17 bp, Arabidopsis thaliana
agctgaaatttgaccat

SEQ ID NO: 36828 - DNA, 17 bp, Arabidopsis thaliana
agctgaacccctttgcc

SEQ ID NO: 36829 - DNA, 17 bp, Arabidopsis thaliana
agctgaaccgccaaatt

SEQ ID NO: 36830 - DNA, 17 bp, Arabidopsis thaliana
agctgaacctgaggcag

SEQ ID NO: 36831 - DNA, 17 bp, Arabidopsis thaliana
agctgaactacgctatc

SEQ ID NO: 36832 - DNA, 17 bp, Arabidopsis thaliana
agctgaactatgcctga

SEQ ID NO: 36833 - DNA, 17 bp, Arabidopsis thaliana
agctgaactcaggcggt

SEQ ID NO: 36834 - DNA, 17 bp, Arabidopsis thaliana
agctgaacttgttcctg

SEQ ID NO: 36835 - DNA, 17 bp, Arabidopsis thaliana
agctgaacttgttcctt

SEQ ID NO: 36836 - DNA, 17 bp, Arabidopsis thaliana
agctgaaggatgtggtt

SEQ ID NO: 36837 - DNA, 17 bp, Arabidopsis thaliana
agctgaaggtactgctc

SEQ ID NO: 36838 - DNA, 17 bp, Arabidopsis thaliana
agctgaagtggttgttg

SEQ ID NO: 36839 - DNA, 17 bp, Arabidopsis thaliana
agctgaagttgcttgat

SEQ ID NO: 36840 - DNA, 17 bp, Arabidopsis thaliana
agctgaatcttctgtca

SEQ ID NO: 36841 - DNA, 17 bp, Arabidopsis thaliana
agctgaatgccttcctc

SEQ ID NO: 36842 - DNA, 17 bp, Arabidopsis thaliana
agctgaattcgggttgg

SEQ ID NO: 36843 - DNA, 17 bp, Arabidopsis thaliana
agctgaattgggtggct

SEQ ID NO: 36844 - DNA, 17 bp, Arabidopsis thaliana
agctgacaacgagtgtg

SEQ ID NO: 36845 - DNA, 17 bp, Arabidopsis thaliana
agctgacaagtggcgct

SEQ ID NO: 36846 - DNA, 17 bp, Arabidopsis thaliana
agctgacacagctccgc

SEQ ID NO: 36847 - DNA, 17 bp, Arabidopsis thaliana
agctgacacttgctggc

SEQ ID NO: 36848 - DNA, 17 bp, Arabidopsis thaliana
agctgacagaggctccg

SEQ ID NO: 36849 - DNA, 17 bp, Arabidopsis thaliana
agctgacagaggcttcg

SEQ ID NO: 36850 - DNA, 17 bp, Arabidopsis thaliana
agctgaccatccattta

SEQ ID NO: 36851 - DNA, 17 bp, Arabidopsis thaliana
agctgacgagcccacat

SEQ ID NO: 36852 - DNA, 17 bp, Arabidopsis thaliana
agctgacgcagccagag

SEQ ID NO: 36853 - DNA, 17 bp, Arabidopsis thaliana
agctgacggcgagcggt

SEQ ID NO: 36854 - DNA, 17 bp, Arabidopsis thaliana
agctgacgggagcgctg

SEQ ID NO: 36855 - DNA, 17 bp, Arabidopsis thaliana
agctgacgggtttgatt

SEQ ID NO: 36856 - DNA, 17 bp, Arabidopsis thaliana
agctgacgtagcgatca

SEQ ID NO: 36857 - DNA, 17 bp, Arabidopsis thaliana
agctgacgtggctttat

SEQ ID NO: 36858 - DNA, 17 bp, Arabidopsis thaliana
agctgacgtggttttat

SEQ ID NO: 36859 - DNA, 17 bp, Arabidopsis thaliana
agctgactaagaatgtg

SEQ ID NO: 36860 - DNA, 17 bp, Arabidopsis thaliana
agctgactacttacccc

SEQ ID NO: 36861 - DNA, 17 bp, Arabidopsis thaliana
agctgactacttagccc

SEQ ID NO: 36862 - DNA, 17 bp, Arabidopsis thaliana
agctgactcagccagag

SEQ ID NO: 36863 - DNA, 17 bp, Arabidopsis thaliana
agctgactctagtccga

SEQ ID NO: 36864 - DNA, 17 bp, Arabidopsis thaliana
agctgacttagcgatca

SEQ ID NO: 36865 - DNA, 17 bp, Arabidopsis thaliana
agctgacttcttcaaac

SEQ ID NO: 36866 - DNA, 17 bp, Arabidopsis thaliana
agctgacttcttccaac

SEQ ID NO: 36867 - DNA, 17 bp, Arabidopsis thaliana
agctgacttgaccagca

SEQ ID NO: 36868 - DNA, 17 bp, Arabidopsis thaliana
agctgacttgatgacga

SEQ ID NO: 36869 - DNA, 17 bp, Arabidopsis thaliana
agctgagaacgccagct

SEQ ID NO: 36870 - DNA, 17 bp, Arabidopsis thaliana
agctgagaacgccggcc

SEQ ID NO: 36871 - DNA, 17 bp, Arabidopsis thaliana
agctgagaatcgaaata

SEQ ID NO: 36872 - DNA, 17 bp, Arabidopsis thaliana
agctgagactgtctcaa

SEQ ID NO: 36873 - DNA, 17 bp, Arabidopsis thaliana
agctgagactgttggtt

SEQ ID NO: 36874 - DNA, 17 bp, Arabidopsis thaliana
agctgagagtccactag

SEQ ID NO: 36875 - DNA, 17 bp, Arabidopsis thaliana
agctgagagtccattag

SEQ ID NO: 36876 - DNA, 17 bp, Arabidopsis thaliana
agctgagatccggtcgt

SEQ ID NO: 36877 - DNA, 17 bp, Arabidopsis thaliana
agctgagatggttcttg

SEQ ID NO: 36878 - DNA, 17 bp, Arabidopsis thaliana
agctgagattcagggca

SEQ ID NO: 36879 - DNA, 17 bp, Arabidopsis thaliana
agctgagattgatccgc

SEQ ID NO: 36880 - DNA, 17 bp, Arabidopsis thaliana
agctgagattgttccag

SEQ ID NO: 36881 - DNA, 17 bp, Arabidopsis thaliana
agctgagatttaacgaa

SEQ ID NO: 36882 - DNA, 17 bp, Arabidopsis thaliana
agctgagatttaacgat

SEQ ID NO: 36883 - DNA, 17 bp, Arabidopsis thaliana
agctgagatttgacgat

SEQ ID NO: 36884 - DNA, 17 bp, Arabidopsis thaliana
agctgagcaaatatttc

SEQ ID NO: 36885 - DNA, 17 bp, Arabidopsis thaliana
agctgagccagtcaacg

SEQ ID NO: 36886 - DNA, 17 bp, Arabidopsis thaliana
agctgagccttactttg

SEQ ID NO: 36887 - DNA, 17 bp, Arabidopsis thaliana
agctgagctcggtttac

SEQ ID NO: 36888 - DNA, 17 bp, Arabidopsis thaliana
agctgagctgagcgagc

SEQ ID NO: 36889 - DNA, 17 bp, Arabidopsis thaliana
agctgagcttcctacag

SEQ ID NO: 36890 - DNA, 17 bp, Arabidopsis thaliana
agctgaggcacagggtc

SEQ ID NO: 36891 - DNA, 17 bp, Arabidopsis thaliana
agctgaggctatattgg

SEQ ID NO: 36892 - DNA, 17 bp, Arabidopsis thaliana
agctgaggctgaggctg

SEQ ID NO: 36893 - DNA, 17 bp, Arabidopsis thaliana
agctgaggtgtcatcac

SEQ ID NO: 36894 - DNA, 17 bp, Arabidopsis thaliana
agctgagtacattgcca

SEQ ID NO: 36895 - DNA, 17 bp, Arabidopsis thaliana
agctgagtcagtttaag

SEQ ID NO: 36896 - DNA, 17 bp, Arabidopsis thaliana
agctgagtctgactgag

SEQ ID NO: 36897 - DNA, 17 bp, Arabidopsis thaliana
agctgagtcttggtcaa

SEQ ID NO: 36898 - DNA, 17 bp, Arabidopsis thaliana
agctgagttcccgcgtg

SEQ ID NO: 36899 - DNA, 17 bp, Arabidopsis thaliana
agctgagtttgatcggt

SEQ ID NO: 36900 - DNA, 17 bp, Arabidopsis thaliana
agctgataacacgtgat

SEQ ID NO: 36901 - DNA, 17 bp, Arabidopsis thaliana
agctgatacagaacagg

SEQ ID NO: 36902 - DNA, 17 bp, Arabidopsis thaliana
agctgatagatcagtga

SEQ ID NO: 36903 - DNA, 17 bp, Arabidopsis thaliana
agctgatatcgacctca

SEQ ID NO: 36904 - DNA, 17 bp, Arabidopsis thaliana
agctgatcaaggctatc

SEQ ID NO: 36905 - DNA, 17 bp, Arabidopsis thaliana
agctgatcaccacgccc

SEQ ID NO: 36906 - DNA, 17 bp, Arabidopsis thaliana
agctgatcacttgcgag

SEQ ID NO: 36907 - DNA, 17 bp, Arabidopsis thaliana
agctgatcctggggctt

SEQ ID NO: 36908 - DNA, 17 bp, Arabidopsis thaliana
agctgatcctttgcatt

SEQ ID NO: 36909 - DNA, 17 bp, Arabidopsis thaliana
agctgatcgctggtcgc

SEQ ID NO: 36910 - DNA, 17 bp, Arabidopsis thaliana
agctgatctaactcgcg

SEQ ID NO: 36911 - DNA, 17 bp, Arabidopsis thaliana
agctgatctgttccaat

SEQ ID NO: 36912 - DNA, 17 bp, Arabidopsis thaliana
agctgatctttgtagcg

SEQ ID NO: 36913 - DNA, 17 bp, Arabidopsis thaliana
agctgatgaagtttctt

SEQ ID NO: 36914 - DNA, 17 bp, Arabidopsis thaliana
agctgatgcgttgacca

SEQ ID NO: 36915 - DNA, 17 bp, Arabidopsis thaliana
agctgatgctgacatag

SEQ ID NO: 36916 - DNA, 17 bp, Arabidopsis thaliana
agctgatggagagaggc

SEQ ID NO: 36917 - DNA, 17 bp, Arabidopsis thaliana
agctgatggatgttgat

SEQ ID NO: 36918 - DNA, 17 bp, Arabidopsis thaliana
agctgatggattcatgg

SEQ ID NO: 36919 - DNA, 17 bp, Arabidopsis thaliana
agctgatggattcattg

SEQ ID NO: 36920 - DNA, 17 bp, Arabidopsis thaliana
agctgatggctcacatg

SEQ ID NO: 36921 - DNA, 17 bp, Arabidopsis thaliana
agctgatgtaattgcgg

SEQ ID NO: 36922 - DNA, 17 bp, Arabidopsis thaliana
agctgatgtacaggtcc

SEQ ID NO: 36923 - DNA, 17 bp, Arabidopsis thaliana
agctgatgtctacagtt

SEQ ID NO: 36924 - DNA, 17 bp, Arabidopsis thaliana
agctgatgtggcattga

SEQ ID NO: 36925 - DNA, 17 bp, Arabidopsis thaliana
agctgatgtggcgactg

SEQ ID NO: 36926 - DNA, 17 bp, Arabidopsis thaliana
agctgatgttcatctat

SEQ ID NO: 36927 - DNA, 17 bp, Arabidopsis thaliana
agctgatgttggacgtt

SEQ ID NO: 36928 - DNA, 17 bp, Arabidopsis thaliana
agctgatgttgttcgaa

SEQ ID NO: 36929 - DNA, 17 bp, Arabidopsis thaliana
agctgattactctgacc

SEQ ID NO: 36930 - DNA, 17 bp, Arabidopsis thaliana
agctgattagagttttg

SEQ ID NO: 36931 - DNA, 17 bp, Arabidopsis thaliana
agctgattaggttcaat

SEQ ID NO: 36932 - DNA, 17 bp, Arabidopsis thaliana
agctgattcacagagat

SEQ ID NO: 36933 - DNA, 17 bp, Arabidopsis thaliana
agctgattcacggtctg

SEQ ID NO: 36934 - DNA, 17 bp, Arabidopsis thaliana
agctgattcaggatgtg

SEQ ID NO: 36935 - DNA, 17 bp, Arabidopsis thaliana
agctgattgattcactc

SEQ ID NO: 36936 - DNA, 17 bp, Arabidopsis thaliana
agctgattgccaatgtt

SEQ ID NO: 36937 - DNA, 17 bp, Arabidopsis thaliana
agctgattggcgagatc

SEQ ID NO: 36938 - DNA, 17 bp, Arabidopsis thaliana
agctgattggcgggatc

SEQ ID NO: 36939 - DNA, 17 bp, Arabidopsis thaliana
agctgattgggattgga

SEQ ID NO: 36940 - DNA, 17 bp, Arabidopsis thaliana
agctgattggtggaatc

SEQ ID NO: 36941 - DNA, 17 bp, Arabidopsis thaliana
agctgatttgccacata

SEQ ID NO: 36942 - DNA, 17 bp, Arabidopsis thaliana
agctgatttggcggcaa

SEQ ID NO: 36943 - DNA, 17 bp, Arabidopsis thaliana
agctgatttgtggcgtg

SEQ ID NO: 36944 - DNA, 17 bp, Arabidopsis thaliana
agctgattttttgcgct

SEQ ID NO: 36945 - DNA, 17 bp, Arabidopsis thaliana
agctgcaatggatggag

SEQ ID NO: 36946 - DNA, 17 bp, Arabidopsis thaliana
agctgcacttggtggtt

SEQ ID NO: 36947 - DNA, 17 bp, Arabidopsis thaliana
agctgcagagcgttcca

SEQ ID NO: 36948 - DNA, 17 bp, Arabidopsis thaliana
agctgcagatgttagtt

SEQ ID NO: 36949 - DNA, 17 bp, Arabidopsis thaliana
agctgcagccactgatt

SEQ ID NO: 36950 - DNA, 17 bp, Arabidopsis thaliana
agctgcagtgtgcgcct

SEQ ID NO: 36951 - DNA, 17 bp, Arabidopsis thaliana
agctgcatttcaggtgt

SEQ ID NO: 36952 - DNA, 17 bp, Arabidopsis thaliana
agctgccagatagcgat

SEQ ID NO: 36953 - DNA, 17 bp, Arabidopsis thaliana
agctgccagtttgtcca

SEQ ID NO: 36954 - DNA, 17 bp, Arabidopsis thaliana
agctgccgatcaggccg

SEQ ID NO: 36955 - DNA, 17 bp, Arabidopsis thaliana
agctgccgcaggtgcac

SEQ ID NO: 36956 - DNA, 17 bp, Arabidopsis thaliana
agctgccggagacaaca

SEQ ID NO: 36957 - DNA, 17 bp, Arabidopsis thaliana
agctgccgtgcgctgcg

SEQ ID NO: 36958 - DNA, 17 bp, Arabidopsis thaliana
agctgcctaatctccaa

SEQ ID NO: 36959 - DNA, 17 bp, Arabidopsis thaliana
agctgcctacagtctgg

SEQ ID NO: 36960 - DNA, 17 bp, Arabidopsis thaliana
agctgcctctgtaacta

SEQ ID NO: 36961 - DNA, 17 bp, Arabidopsis thaliana
agctgcctggatcgagt

SEQ ID NO: 36962 - DNA, 17 bp, Arabidopsis thaliana
agctgcctgggtggtta

SEQ ID NO: 36963 - DNA, 17 bp, Arabidopsis thaliana
agctgcctgttatacgt

SEQ ID NO: 36964 - DNA, 17 bp, Arabidopsis thaliana
agctgcgagaagcacct

SEQ ID NO: 36965 - DNA, 17 bp, Arabidopsis thaliana
agctgcgataactagac

SEQ ID NO: 36966 - DNA, 17 bp, Arabidopsis thaliana
agctgcgatttgagtaa

SEQ ID NO: 36967 - DNA, 17 bp, Arabidopsis thaliana
agctgcgcgttggctcg

SEQ ID NO: 36968 - DNA, 17 bp, Arabidopsis thaliana
agctgcggaggactgga

SEQ ID NO: 36969 - DNA, 17 bp, Arabidopsis thaliana
agctgcggctttctcca

SEQ ID NO: 36970 - DNA, 17 bp, Arabidopsis thaliana
agctgcggttgcggcgg

SEQ ID NO: 36971 - DNA, 17 bp, Arabidopsis thaliana
agctgcggttgcggttg

SEQ ID NO: 36972 - DNA, 17 bp, Arabidopsis thaliana
agctgcggttgtgtgac

SEQ ID NO: 36973 - DNA, 17 bp, Arabidopsis thaliana
agctgcggttttgtgtg

SEQ ID NO: 36974 - DNA, 17 bp, Arabidopsis thaliana
agctgcgtccgcagata

SEQ ID NO: 36975 - DNA, 17 bp, Arabidopsis thaliana
agctgcgtctgcttttg

SEQ ID NO: 36976 - DNA, 17 bp, Arabidopsis thaliana
agctgctaaacgtccgt

SEQ ID NO: 36977 - DNA, 17 bp, Arabidopsis thaliana
agctgctaagcgaacgg

SEQ ID NO: 36978 - DNA, 17 bp, Arabidopsis thaliana
agctgctaagctatgga

SEQ ID NO: 36979 - DNA, 17 bp, Arabidopsis thaliana
agctgctaagctatgta

SEQ ID NO: 36980 - DNA, 17 bp, Arabidopsis thaliana
agctgctaagtaactag

SEQ ID NO: 36981 - DNA, 17 bp, Arabidopsis thaliana
agctgctacaattggac

SEQ ID NO: 36982 - DNA, 17 bp, Arabidopsis thaliana
agctgctatttgctgca

SEQ ID NO: 36983 - DNA, 17 bp, Arabidopsis thaliana
agctgctcacggttatt

SEQ ID NO: 36984 - DNA, 17 bp, Arabidopsis thaliana
agctgctccaaccctta

SEQ ID NO: 36985 - DNA, 17 bp, Arabidopsis thaliana
agctgctctcagtatcg

SEQ ID NO: 36986 - DNA, 17 bp, Arabidopsis thaliana
agctgctgaatcttcta

SEQ ID NO: 36987 - DNA, 17 bp, Arabidopsis thaliana
agctgctgacgtgtcta

SEQ ID NO: 36988 - DNA, 17 bp, Arabidopsis thaliana
agctgctgagatttatt

SEQ ID NO: 36989 - DNA, 17 bp, Arabidopsis thaliana
agctgctgagcgttcca

SEQ ID NO: 36990 - DNA, 17 bp, Arabidopsis thaliana
agctgctgagggtaaac

SEQ ID NO: 36991 - DNA, 17 bp, Arabidopsis thaliana
agctgctgagtgctgac

SEQ ID NO: 36992 - DNA, 17 bp, Arabidopsis thaliana
agctgctgcatgcgaag

SEQ ID NO: 36993 - DNA, 17 bp, Arabidopsis thaliana
agctgctgcgagagctc

SEQ ID NO: 36994 - DNA, 17 bp, Arabidopsis thaliana
agctgctgcgagagttc

SEQ ID NO: 36995 - DNA, 17 bp, Arabidopsis thaliana
agctgctgcgttgccta

SEQ ID NO: 36996 - DNA, 17 bp, Arabidopsis thaliana
agctgctgctggtgctg

SEQ ID NO: 36997 - DNA, 17 bp, Arabidopsis thaliana
agctgctggtgtggatc

SEQ ID NO: 36998 - DNA, 17 bp, Arabidopsis thaliana
agctgctgtggtttcga

SEQ ID NO: 36999 - DNA, 17 bp, Arabidopsis thaliana
agctgctgttgaggctc

SEQ ID NO: 37000 - DNA, 17 bp, Arabidopsis thaliana
agctgctgttgaggctg

SEQ ID NO: 37001 - DNA, 17 bp, Arabidopsis thaliana
agctgctgttgattatg

SEQ ID NO: 37002 - DNA, 17 bp, Arabidopsis thaliana
agctgcttccactttgg

SEQ ID NO: 37003 - DNA, 17 bp, Arabidopsis thaliana
agctgcttgatccgcct

SEQ ID NO: 37004 - DNA, 17 bp, Arabidopsis thaliana
agctgcttgatgacttc

SEQ ID NO: 37005 - DNA, 17 bp, Arabidopsis thaliana
agctgcttgcttctccg

SEQ ID NO: 37006 - DNA, 17 bp, Arabidopsis thaliana
agctgcttggattctgc

SEQ ID NO: 37007 - DNA, 17 bp, Arabidopsis thaliana
agctgcttggccggtag

SEQ ID NO: 37008 - DNA, 17 bp, Arabidopsis thaliana
agctgctttcacctctg

SEQ ID NO: 37009 - DNA, 17 bp, Arabidopsis thaliana
agctgctttgtgctcta

SEQ ID NO: 37010 - DNA, 17 bp, Arabidopsis thaliana
agctggaacggcgagaa

SEQ ID NO: 37011 - DNA, 17 bp, Arabidopsis thaliana
agctggaactagactgt

SEQ ID NO: 37012 - DNA, 17 bp, Arabidopsis thaliana
agctggaactgttagat

SEQ ID NO: 37013 - DNA, 17 bp, Arabidopsis thaliana
agctggaactgttgtgg

SEQ ID NO: 37014 - DNA, 17 bp, Arabidopsis thaliana
agctggaattaccgcgg

SEQ ID NO: 37015 - DNA, 17 bp, Arabidopsis thaliana
agctggacaatggaact

SEQ ID NO: 37016 - DNA, 17 bp, Arabidopsis thaliana
agctggacacaagcact

SEQ ID NO: 37017 - DNA, 17 bp, Arabidopsis thaliana
agctggacaggattctt

SEQ ID NO: 37018 - DNA, 17 bp, Arabidopsis thaliana
agctggacagggtggtc

SEQ ID NO: 37019 - DNA, 17 bp, Arabidopsis thaliana
agctggaccgttcatgc

SEQ ID NO: 37020 - DNA, 17 bp, Arabidopsis thaliana
agctggacctgttagct

SEQ ID NO: 37021 - DNA, 17 bp, Arabidopsis thaliana
agctggacggcgtcgag

SEQ ID NO: 37022 - DNA, 17 bp, Arabidopsis thaliana
agctggacttcgtagct

SEQ ID NO: 37023 - DNA, 17 bp, Arabidopsis thaliana
agctggagcggtaaact

SEQ ID NO: 37024 - DNA, 17 bp, Arabidopsis thaliana
agctggaggaaaacgta

SEQ ID NO: 37025 - DNA, 17 bp, Arabidopsis thaliana
agctggagtcgacattt

SEQ ID NO: 37026 - DNA, 17 bp, Arabidopsis thaliana
agctggagttgagaatg

SEQ ID NO: 37027 - DNA, 17 bp, Arabidopsis thaliana
agctggagtttccaaca

SEQ ID NO: 37028 - DNA, 17 bp, Arabidopsis thaliana
agctggatagactatca

SEQ ID NO: 37029 - DNA, 17 bp, Arabidopsis thaliana
agctggataggccttgc

SEQ ID NO: 37030 - DNA, 17 bp, Arabidopsis thaliana
agctggatatggcttgt

SEQ ID NO: 37031 - DNA, 17 bp, Arabidopsis thaliana
agctggatcctagaacc

SEQ ID NO: 37032 - DNA, 17 bp, Arabidopsis thaliana
agctggatttggaagcg

SEQ ID NO: 37033 - DNA, 17 bp, Arabidopsis thaliana
agctggcaatacatcag

SEQ ID NO: 37034 - DNA, 17 bp, Arabidopsis thaliana
agctggcgagctgtctt

SEQ ID NO: 37035 - DNA, 17 bp, Arabidopsis thaliana
agctggcgaggcagtat

SEQ ID NO: 37036 - DNA, 17 bp, Arabidopsis thaliana
agctggctatgtcgcag

SEQ ID NO: 37037 - DNA, 17 bp, Arabidopsis thaliana
agctggctcagactccc

SEQ ID NO: 37038 - DNA, 17 bp, Arabidopsis thaliana
agctggctcattttgac

SEQ ID NO: 37039 - DNA, 17 bp, Arabidopsis thaliana
agctggctgagtgacga

SEQ ID NO: 37040 - DNA, 17 bp, Arabidopsis thaliana
agctggctgctgttgaa

SEQ ID NO: 37041 - DNA, 17 bp, Arabidopsis thaliana
agctgggacatgtacct

SEQ ID NO: 37042 - DNA, 17 bp, Arabidopsis thaliana
agctgggactctaattc

SEQ ID NO: 37043 - DNA, 17 bp, Arabidopsis thaliana
agctgggacttttttgt

SEQ ID NO: 37044 - DNA, 17 bp, Arabidopsis thaliana
agctgggattagaccgt

SEQ ID NO: 37045 - DNA, 17 bp, Arabidopsis thaliana
agctggggcttaagcga

SEQ ID NO: 37046 - DNA, 17 bp, Arabidopsis thaliana
agctggggggtgagccg

SEQ ID NO: 37047 - DNA, 17 bp, Arabidopsis thaliana
agctggggttagaccgt

SEQ ID NO: 37048 - DNA, 17 bp, Arabidopsis thaliana
agctgggtatcagatga

SEQ ID NO: 37049 - DNA, 17 bp, Arabidopsis thaliana
agctgggtgtagaccgt

SEQ ID NO: 37050 - DNA, 17 bp, Arabidopsis thaliana
agctgggttagaccgtc

SEQ ID NO: 37051 - DNA, 17 bp, Arabidopsis thaliana
agctgggttgacaagag

SEQ ID NO: 37052 - DNA, 17 bp, Arabidopsis thaliana
agctgggtttagaccgt

SEQ ID NO: 37053 - DNA, 17 bp, Arabidopsis thaliana
agctgggttttgttgat

SEQ ID NO: 37054 - DNA, 17 bp, Arabidopsis thaliana
agctggtaaagcacgaa

SEQ ID NO: 37055 - DNA, 17 bp, Arabidopsis thaliana
agctggtatccagggat

SEQ ID NO: 37056 - DNA, 17 bp, Arabidopsis thaliana
agctggtcaagatgtgc

SEQ ID NO: 37057 - DNA, 17 bp, Arabidopsis thaliana
agctggtcaggatactc

SEQ ID NO: 37058 - DNA, 17 bp, Arabidopsis thaliana
agctggtcattcggttg

SEQ ID NO: 37059 - DNA, 17 bp, Arabidopsis thaliana
agctggtccgagaggat

SEQ ID NO: 37060 - DNA, 17 bp, Arabidopsis thaliana
agctggtccgattaaca

SEQ ID NO: 37061 - DNA, 17 bp, Arabidopsis thaliana
agctggtccttgtgctg

SEQ ID NO: 37062 - DNA, 17 bp, Arabidopsis thaliana
agctggtcgctgtcgct

SEQ ID NO: 37063 - DNA, 17 bp, Arabidopsis thaliana
agctggtctcccgtgtg

SEQ ID NO: 37064 - DNA, 17 bp, Arabidopsis thaliana
agctggtcttgatagaa

SEQ ID NO: 37065 - DNA, 17 bp, Arabidopsis thaliana
agctggtgagagcgatt

SEQ ID NO: 37066 - DNA, 17 bp, Arabidopsis thaliana
agctggtgcactctgtt

SEQ ID NO: 37067 - DNA, 17 bp, Arabidopsis thaliana
agctggtgcatggctgt

SEQ ID NO: 37068 - DNA, 17 bp, Arabidopsis thaliana
agctggtggactgtggt

SEQ ID NO: 37069 - DNA, 17 bp, Arabidopsis thaliana
agctggtggagcgattt

SEQ ID NO: 37070 - DNA, 17 bp, Arabidopsis thaliana
agctggtggctgattat

SEQ ID NO: 37071 - DNA, 17 bp, Arabidopsis thaliana
agctggtgttagacgtc

SEQ ID NO: 37072 - DNA, 17 bp, Arabidopsis thaliana
agctggttaccgtttga

SEQ ID NO: 37073 - DNA, 17 bp, Arabidopsis thaliana
agctggttccctccgaa

SEQ ID NO: 37074 - DNA, 17 bp, Arabidopsis thaliana
agctggttcctcaggcc

SEQ ID NO: 37075 - DNA, 17 bp, Arabidopsis thaliana
agctggttctccccgaa

SEQ ID NO: 37076 - DNA, 17 bp, Arabidopsis thaliana
agctggttgactctgct

SEQ ID NO: 37077 - DNA, 17 bp, Arabidopsis thaliana
agctggttgactttctc

SEQ ID NO: 37078 - DNA, 17 bp, Arabidopsis thaliana
agctggttgcggttcta

SEQ ID NO: 37079 - DNA, 17 bp, Arabidopsis thaliana
agctggtttattgttgg

SEQ ID NO: 37080 - DNA, 17 bp, Arabidopsis thaliana
agctgtaaagactttgg

SEQ ID NO: 37081 - DNA, 17 bp, Arabidopsis thaliana
agctgtaacgaccgcgt

SEQ ID NO: 37082 - DNA, 17 bp, Arabidopsis thaliana
agctgtacaaaattttt

SEQ ID NO: 37083 - DNA, 17 bp, Arabidopsis thaliana
agctgtacagatagcgg

SEQ ID NO: 37084 - DNA, 17 bp, Arabidopsis thaliana
agctgtaccattgactt

SEQ ID NO: 37085 - DNA, 17 bp, Arabidopsis thaliana
agctgtaccattgatta

SEQ ID NO: 37086 - DNA, 17 bp, Arabidopsis thaliana
agctgtacgccgtgcgt

SEQ ID NO: 37087 - DNA, 17 bp, Arabidopsis thaliana
agctgtactctggatga

SEQ ID NO: 37088 - DNA, 17 bp, Arabidopsis thaliana
agctgtagcagcaaggg

SEQ ID NO: 37089 - DNA, 17 bp, Arabidopsis thaliana
agctgtatgttaccgat

SEQ ID NO: 37090 - DNA, 17 bp, Arabidopsis thaliana
agctgtattgcaggtga

SEQ ID NO: 37091 - DNA, 17 bp, Arabidopsis thaliana
agctgtcaaatggtccg

SEQ ID NO: 37092 - DNA, 17 bp, Arabidopsis thaliana
agctgtcaagttcgcta

SEQ ID NO: 37093 - DNA, 17 bp, Arabidopsis thaliana
agctgtcaattgggtgg

SEQ ID NO: 37094 - DNA, 17 bp, Arabidopsis thaliana
agctgtcacagcgggct

SEQ ID NO: 37095 - DNA, 17 bp, Arabidopsis thaliana
agctgtcagggaacaat

SEQ ID NO: 37096 - DNA, 17 bp, Arabidopsis thaliana
agctgtcaggggtttca

SEQ ID NO: 37097 - DNA, 17 bp, Arabidopsis thaliana
agctgtcagttcctaac

SEQ ID NO: 37098 - DNA, 17 bp, Arabidopsis thaliana
agctgtccacgtgcgca

SEQ ID NO: 37099 - DNA, 17 bp, Arabidopsis thaliana
agctgtccagatgtcag

SEQ ID NO: 37100 - DNA, 17 bp, Arabidopsis thaliana
agctgtccgctcgcagg

SEQ ID NO: 37101 - DNA, 17 bp, Arabidopsis thaliana
agctgtcgagtaaggat

SEQ ID NO: 37102 - DNA, 17 bp, Arabidopsis thaliana
agctgtcgcttaccgcc

SEQ ID NO: 37103 - DNA, 17 bp, Arabidopsis thaliana
agctgtcggaaactaac

SEQ ID NO: 37104 - DNA, 17 bp, Arabidopsis thaliana
agctgtcggaaactgac

SEQ ID NO: 37105 - DNA, 17 bp, Arabidopsis thaliana
agctgtctagcgatttc

SEQ ID NO: 37106 - DNA, 17 bp, Arabidopsis thaliana
agctgtctatttgttgg

SEQ ID NO: 37107 - DNA, 17 bp, Arabidopsis thaliana
agctgtctttgttccct

SEQ ID NO: 37108 - DNA, 17 bp, Arabidopsis thaliana
agctgtctttgttcctt

SEQ ID NO: 37109 - DNA, 17 bp, Arabidopsis thaliana
agctgtgaagatggtaa

SEQ ID NO: 37110 - DNA, 17 bp, Arabidopsis thaliana
agctgtgactcaagcaa

SEQ ID NO: 37111 - DNA, 17 bp, Arabidopsis thaliana
agctgtgagagcctttt

SEQ ID NO: 37112 - DNA, 17 bp, Arabidopsis thaliana
agctgtgagcagagacg

SEQ ID NO: 37113 - DNA, 17 bp, Arabidopsis thaliana
agctgtgatgaagatgg

SEQ ID NO: 37114 - DNA, 17 bp, Arabidopsis thaliana
agctgtgatggaccgag

SEQ ID NO: 37115 - DNA, 17 bp, Arabidopsis thaliana
agctgtgatttccggtc

SEQ ID NO: 37116 - DNA, 17 bp, Arabidopsis thaliana
agctgtgatttgcggtc

SEQ ID NO: 37117 - DNA, 17 bp, Arabidopsis thaliana
agctgtgctatatgacg

SEQ ID NO: 37118 - DNA, 17 bp, Arabidopsis thaliana
agctgtgcttctgacgg

SEQ ID NO: 37119 - DNA, 17 bp, Arabidopsis thaliana
agctgtggagactgatc

SEQ ID NO: 37120 - DNA, 17 bp, Arabidopsis thaliana
agctgtggatcggtgga

SEQ ID NO: 37121 - DNA, 17 bp, Arabidopsis thaliana
agctgtggatgaatccg

SEQ ID NO: 37122 - DNA, 17 bp, Arabidopsis thaliana
agctgtggatgtcaaaa

SEQ ID NO: 37123 - DNA, 17 bp, Arabidopsis thaliana
agctgtggcggcggacg

SEQ ID NO: 37124 - DNA, 17 bp, Arabidopsis thaliana
agctgtggctatggcta

SEQ ID NO: 37125 - DNA, 17 bp, Arabidopsis thaliana
agctgtgggagagagtt

SEQ ID NO: 37126 - DNA, 17 bp, Arabidopsis thaliana
agctgtgggatgtcaaa

SEQ ID NO: 37127 - DNA, 17 bp, Arabidopsis thaliana
agctgtggtgactttgg

SEQ ID NO: 37128 - DNA, 17 bp, Arabidopsis thaliana
agctgtgtgtagtgtga

SEQ ID NO: 37129 - DNA, 17 bp, Arabidopsis thaliana
agctgtgttgacaaaac

SEQ ID NO: 37130 - DNA, 17 bp, Arabidopsis thaliana
agctgtgttggtcgagc

SEQ ID NO: 37131 - DNA, 17 bp, Arabidopsis thaliana
agctgtgttggtcgagt

SEQ ID NO: 37132 - DNA, 17 bp, Arabidopsis thaliana
agctgtgtttcccgcga

SEQ ID NO: 37133 - DNA, 17 bp, Arabidopsis thaliana
agctgtgtttggcggca

SEQ ID NO: 37134 - DNA, 17 bp, Arabidopsis thaliana
agctgttaacggaaaat

SEQ ID NO: 37135 - DNA, 17 bp, Arabidopsis thaliana
agctgttaagtaccagg

SEQ ID NO: 37136 - DNA, 17 bp, Arabidopsis thaliana
agctgttagctggagcg

SEQ ID NO: 37137 - DNA, 17 bp, Arabidopsis thaliana
agctgttaggccatgtt

SEQ ID NO: 37138 - DNA, 17 bp, Arabidopsis thaliana
agctgttagttggagct

SEQ ID NO: 37139 - DNA, 17 bp, Arabidopsis thaliana
agctgttatgtcaccat

SEQ ID NO: 37140 - DNA, 17 bp, Arabidopsis thaliana
agctgttattatgtctt

SEQ ID NO: 37141 - DNA, 17 bp, Arabidopsis thaliana
agctgttcagcttagat

SEQ ID NO: 37142 - DNA, 17 bp, Arabidopsis thaliana
agctgttcaggttggct

SEQ ID NO: 37143 - DNA, 17 bp, Arabidopsis thaliana
agctgttcatcctcagg

SEQ ID NO: 37144 - DNA, 17 bp, Arabidopsis thaliana
agctgttccacggatca

SEQ ID NO: 37145 - DNA, 17 bp, Arabidopsis thaliana
agctgttccatgagctt

SEQ ID NO: 37146 - DNA, 17 bp, Arabidopsis thaliana
agctgttccgagactac

SEQ ID NO: 37147 - DNA, 17 bp, Arabidopsis thaliana
agctgttcgccaatatt

SEQ ID NO: 37148 - DNA, 17 bp, Arabidopsis thaliana
agctgttcgccaggatt

SEQ ID NO: 37149 - DNA, 17 bp, Arabidopsis thaliana
agctgttctcaggggcg

SEQ ID NO: 37150 - DNA, 17 bp, Arabidopsis thaliana
agctgttgaaagttctt

SEQ ID NO: 37151 - DNA, 17 bp, Arabidopsis thaliana
agctgttgagcaggttt

SEQ ID NO: 37152 - DNA, 17 bp, Arabidopsis thaliana
agctgttggatttgcgt

SEQ ID NO: 37153 - DNA, 17 bp, Arabidopsis thaliana
agctgttggcccagtgg

SEQ ID NO: 37154 - DNA, 17 bp, Arabidopsis thaliana
agctgttggggcttgtt

SEQ ID NO: 37155 - DNA, 17 bp, Arabidopsis thaliana
agctgtttcacggatca

SEQ ID NO: 37156 - DNA, 17 bp, Arabidopsis thaliana
agctgtttgcttctccg

SEQ ID NO: 37157 - DNA, 17 bp, Arabidopsis thaliana
agctgtttggttgcgac

SEQ ID NO: 37158 - DNA, 17 bp, Arabidopsis thaliana
agcttaaaaagaatctc

SEQ ID NO: 37159 - DNA, 17 bp, Arabidopsis thaliana
agcttaaaaagactctc

SEQ ID NO: 37160 - DNA, 17 bp, Arabidopsis thaliana
agcttaaaagcactcta

SEQ ID NO: 37161 - DNA, 17 bp, Arabidopsis thaliana
agcttaaacccgaaatt

SEQ ID NO: 37162 - DNA, 17 bp, Arabidopsis thaliana
agcttaaagatcgtcgg

SEQ ID NO: 37163 - DNA, 17 bp, Arabidopsis thaliana
agcttaacggaaggatc

SEQ ID NO: 37164 - DNA, 17 bp, Arabidopsis thaliana
agcttaagaatttggct

SEQ ID NO: 37165 - DNA, 17 bp, Arabidopsis thaliana
agcttaaggatttgtgg

SEQ ID NO: 37166 - DNA, 17 bp, Arabidopsis thaliana
agcttaaggtcgccggt

SEQ ID NO: 37167 - DNA, 17 bp, Arabidopsis thaliana
agcttaagtgacgactg

SEQ ID NO: 37168 - DNA, 17 bp, Arabidopsis thaliana
agcttaagttgtttgtt

SEQ ID NO: 37169 - DNA, 17 bp, Arabidopsis thaliana
agcttaatacccctttt

SEQ ID NO: 37170 - DNA, 17 bp, Arabidopsis thaliana
agcttaatagccccttt

SEQ ID NO: 37171 - DNA, 17 bp, Arabidopsis thaliana
agcttaatagccctccc

SEQ ID NO: 37172 - DNA, 17 bp, Arabidopsis thaliana
agcttaatagccctttt

SEQ ID NO: 37173 - DNA, 17 bp, Arabidopsis thaliana
agcttaatgttgataag

SEQ ID NO: 37174 - DNA, 17 bp, Arabidopsis thaliana
agcttacaagatcgggt

SEQ ID NO: 37175 - DNA, 17 bp, Arabidopsis thaliana
agcttacagctccagct

SEQ ID NO: 37176 - DNA, 17 bp, Arabidopsis thaliana
agcttacagttgcccta

SEQ ID NO: 37177 - DNA, 17 bp, Arabidopsis thaliana
agcttacatccaactag

SEQ ID NO: 37178 - DNA, 17 bp, Arabidopsis thaliana
agcttaccgagttgaga

SEQ ID NO: 37179 - DNA, 17 bp, Arabidopsis thaliana
agcttaccgctccaact

SEQ ID NO: 37180 - DNA, 17 bp, Arabidopsis thaliana
agcttacgatgtgttcg

SEQ ID NO: 37181 - DNA, 17 bp, Arabidopsis thaliana
agcttacggatctataa

SEQ ID NO: 37182 - DNA, 17 bp, Arabidopsis thaliana
agcttacgggtctttcc

SEQ ID NO: 37183 - DNA, 17 bp, Arabidopsis thaliana
agcttactactcagtcc

SEQ ID NO: 37184 - DNA, 17 bp, Arabidopsis thaliana
agcttactcgactttcg

SEQ ID NO: 37185 - DNA, 17 bp, Arabidopsis thaliana
agcttactgcgcaagga

SEQ ID NO: 37186 - DNA, 17 bp, Arabidopsis thaliana
agcttactgtgaggaca

SEQ ID NO: 37187 - DNA, 17 bp, Arabidopsis thaliana
agcttacttccgtcatt

SEQ ID NO: 37188 - DNA, 17 bp, Arabidopsis thaliana
agcttagaactttcaac

SEQ ID NO: 37189 - DNA, 17 bp, Arabidopsis thaliana
agcttagaccatctcta

SEQ ID NO: 37190 - DNA, 17 bp, Arabidopsis thaliana
agcttagaccttagcag

SEQ ID NO: 37191 - DNA, 17 bp, Arabidopsis thaliana
agcttagacgaactgga

SEQ ID NO: 37192 - DNA, 17 bp, Arabidopsis thaliana
agcttagagatcgtcgg

SEQ ID NO: 37193 - DNA, 17 bp, Arabidopsis thaliana
agcttagaggtcatcga

SEQ ID NO: 37194 - DNA, 17 bp, Arabidopsis thaliana
agcttagaggtcatcgg

SEQ ID NO: 37195 - DNA, 17 bp, Arabidopsis thaliana
agcttagaggtcccccc

SEQ ID NO: 37196 - DNA, 17 bp, Arabidopsis thaliana
agcttagaggtcgccgg

SEQ ID NO: 37197 - DNA, 17 bp, Arabidopsis thaliana
agcttagaggtcgtcgg

SEQ ID NO: 37198 - DNA, 17 bp, Arabidopsis thaliana
agcttagatgtgagacg

SEQ ID NO: 37199 - DNA, 17 bp, Arabidopsis thaliana
agcttagatgtggtttt

SEQ ID NO: 37200 - DNA, 17 bp, Arabidopsis thaliana
agcttagattgccatgg

SEQ ID NO: 37201 - DNA, 17 bp, Arabidopsis thaliana
agcttagattgcgtttg

SEQ ID NO: 37202 - DNA, 17 bp, Arabidopsis thaliana
agcttagccctgtttgt

SEQ ID NO: 37203 - DNA, 17 bp, Arabidopsis thaliana
agcttagccggcattcc

SEQ ID NO: 37204 - DNA, 17 bp, Arabidopsis thaliana
agcttagcggcaaggat

SEQ ID NO: 37205 - DNA, 17 bp, Arabidopsis thaliana
agcttaggagggatagc

SEQ ID NO: 37206 - DNA, 17 bp, Arabidopsis thaliana
agcttaggatgaaggct

SEQ ID NO: 37207 - DNA, 17 bp, Arabidopsis thaliana
agcttaggcagctcgtg

SEQ ID NO: 37208 - DNA, 17 bp, Arabidopsis thaliana
agcttaggctcccaaag

SEQ ID NO: 37209 - DNA, 17 bp, Arabidopsis thaliana
agcttagggacggtcac

SEQ ID NO: 37210 - DNA, 17 bp, Arabidopsis thaliana
agcttaggtggttctga

SEQ ID NO: 37211 - DNA, 17 bp, Arabidopsis thaliana
agcttaggtttctggag

SEQ ID NO: 37212 - DNA, 17 bp, Arabidopsis thaliana
agcttaggttttctatc

SEQ ID NO: 37213 - DNA, 17 bp, Arabidopsis thaliana
agcttagtcaacggatt

SEQ ID NO: 37214 - DNA, 17 bp, Arabidopsis thaliana
agcttagtcatcggctg

SEQ ID NO: 37215 - DNA, 17 bp, Arabidopsis thaliana
agcttagtccggctagg

SEQ ID NO: 37216 - DNA, 17 bp, Arabidopsis thaliana
agcttagttgaccaatc

SEQ ID NO: 37217 - DNA, 17 bp, Arabidopsis thaliana
agcttataagatcgggt

SEQ ID NO: 37218 - DNA, 17 bp, Arabidopsis thaliana
agcttatactattcgac

SEQ ID NO: 37219 - DNA, 17 bp, Arabidopsis thaliana
agcttataggtcgccgg

SEQ ID NO: 37220 - DNA, 17 bp, Arabidopsis thaliana
agcttatagtcacggct

SEQ ID NO: 37221 - DNA, 17 bp, Arabidopsis thaliana
agcttatagtttctaag

SEQ ID NO: 37222 - DNA, 17 bp, Arabidopsis thaliana
agcttatatgttcatgc

SEQ ID NO: 37223 - DNA, 17 bp, Arabidopsis thaliana
agcttatcaatggtgcg

SEQ ID NO: 37224 - DNA, 17 bp, Arabidopsis thaliana
agcttatccccgtagga

SEQ ID NO: 37225 - DNA, 17 bp, Arabidopsis thaliana
agcttatcgcgatacag

SEQ ID NO: 37226 - DNA, 17 bp, Arabidopsis thaliana
agcttatctgagcgatt

SEQ ID NO: 37227 - DNA, 17 bp, Arabidopsis thaliana
agcttatctgtcggagg

SEQ ID NO: 37228 - DNA, 17 bp, Arabidopsis thaliana
agcttatctgttctgcg

SEQ ID NO: 37229 - DNA, 17 bp, Arabidopsis thaliana
agcttatctgttctttc

SEQ ID NO: 37230 - DNA, 17 bp, Arabidopsis thaliana
agcttatgctctgaccc

SEQ ID NO: 37231 - DNA, 17 bp, Arabidopsis thaliana
agcttatgggacataga

SEQ ID NO: 37232 - DNA, 17 bp, Arabidopsis thaliana
agcttatgggcggctgt

SEQ ID NO: 37233 - DNA, 17 bp, Arabidopsis thaliana
agcttatggtgcaatta

SEQ ID NO: 37234 - DNA, 17 bp, Arabidopsis thaliana
agcttatggtgcaattc

SEQ ID NO: 37235 - DNA, 17 bp, Arabidopsis thaliana
agcttatggtgcaattt

SEQ ID NO: 37236 - DNA, 17 bp, Arabidopsis thaliana
agcttatgttctccggt

SEQ ID NO: 37237 - DNA, 17 bp, Arabidopsis thaliana
agcttattgaccatatc

SEQ ID NO: 37238 - DNA, 17 bp, Arabidopsis thaliana
agcttattgatccagag

SEQ ID NO: 37239 - DNA, 17 bp, Arabidopsis thaliana
agcttattgcgtcggag

SEQ ID NO: 37240 - DNA, 17 bp, Arabidopsis thaliana
agcttattggacataga

SEQ ID NO: 37241 - DNA, 17 bp, Arabidopsis thaliana
agcttattggatctaaa

SEQ ID NO: 37242 - DNA, 17 bp, Arabidopsis thaliana
agcttatttcgtcgaag

SEQ ID NO: 37243 - DNA, 17 bp, Arabidopsis thaliana
agcttatttcgtcggag

SEQ ID NO: 37244 - DNA, 17 bp, Arabidopsis thaliana
agcttatttctctgtga

SEQ ID NO: 37245 - DNA, 17 bp, Arabidopsis thaliana
agcttatttgctactgc

SEQ ID NO: 37246 - DNA, 17 bp, Arabidopsis thaliana
agcttatttgctacttc

SEQ ID NO: 37247 - DNA, 17 bp, Arabidopsis thaliana
agcttatttggaaaact

SEQ ID NO: 37248 - DNA, 17 bp, Arabidopsis thaliana
agcttatttggtgcgaa

SEQ ID NO: 37249 - DNA, 17 bp, Arabidopsis thaliana
agcttcaaagtggctag

SEQ ID NO: 37250 - DNA, 17 bp, Arabidopsis thaliana
agcttcaacaaacggac

SEQ ID NO: 37251 - DNA, 17 bp, Arabidopsis thaliana
agcttcaactactggct

SEQ ID NO: 37252 - DNA, 17 bp, Arabidopsis thaliana
agcttcacaacttctga

SEQ ID NO: 37253 - DNA, 17 bp, Arabidopsis thaliana
agcttcacagtccttga

SEQ ID NO: 37254 - DNA, 17 bp, Arabidopsis thaliana
agcttcacggatcgtgt

SEQ ID NO: 37255 - DNA, 17 bp, Arabidopsis thaliana
agcttcacggggttgtg

SEQ ID NO: 37256 - DNA, 17 bp, Arabidopsis thaliana
agcttcacgtcgggttc

SEQ ID NO: 37257 - DNA, 17 bp, Arabidopsis thaliana
agcttcactgttccctg

SEQ ID NO: 37258 - DNA, 17 bp, Arabidopsis thaliana
agcttcagaagccatta

SEQ ID NO: 37259 - DNA, 17 bp, Arabidopsis thaliana
agcttcagacatctcac

SEQ ID NO: 37260 - DNA, 17 bp, Arabidopsis thaliana
agcttcagagacgctta

SEQ ID NO: 37261 - DNA, 17 bp, Arabidopsis thaliana
agcttcagagccgagac

SEQ ID NO: 37262 - DNA, 17 bp, Arabidopsis thaliana
agcttcagagtagttac

SEQ ID NO: 37263 - DNA, 17 bp, Arabidopsis thaliana
agcttcagcagaatgaa

SEQ ID NO: 37264 - DNA, 17 bp, Arabidopsis thaliana
agcttcagtgattgttt

SEQ ID NO: 37265 - DNA, 17 bp, Arabidopsis thaliana
agcttcatcgactttga

SEQ ID NO: 37266 - DNA, 17 bp, Arabidopsis thaliana
agcttcatcgcaatggc

SEQ ID NO: 37267 - DNA, 17 bp, Arabidopsis thaliana
agcttcatcgctctcac

SEQ ID NO: 37268 - DNA, 17 bp, Arabidopsis thaliana
agcttcatcggatatgt

SEQ ID NO: 37269 - DNA, 17 bp, Arabidopsis thaliana
agcttcatctatccgac

SEQ ID NO: 37270 - DNA, 17 bp, Arabidopsis thaliana
agcttcatctgcgtcta

SEQ ID NO: 37271 - DNA, 17 bp, Arabidopsis thaliana
agcttcatcttgcggtt

SEQ ID NO: 37272 - DNA, 17 bp, Arabidopsis thaliana
agcttcatggccagtgt

SEQ ID NO: 37273 - DNA, 17 bp, Arabidopsis thaliana
agcttcatggtgtagcc

SEQ ID NO: 37274 - DNA, 17 bp, Arabidopsis thaliana
agcttcattgtcaataa

SEQ ID NO: 37275 - DNA, 17 bp, Arabidopsis thaliana
agcttcattttggttat

SEQ ID NO: 37276 - DNA, 17 bp, Arabidopsis thaliana
agcttccaacgacgtat

SEQ ID NO: 37277 - DNA, 17 bp, Arabidopsis thaliana
agcttccaagtctgatt

SEQ ID NO: 37278 - DNA, 17 bp, Arabidopsis thaliana
agcttccacactgacat

SEQ ID NO: 37279 - DNA, 17 bp, Arabidopsis thaliana
agcttccacagattcga

SEQ ID NO: 37280 - DNA, 17 bp, Arabidopsis thaliana
agcttccagacagattt

SEQ ID NO: 37281 - DNA, 17 bp, Arabidopsis thaliana
agcttccagcttgttcc

SEQ ID NO: 37282 - DNA, 17 bp, Arabidopsis thaliana
agcttccatgagtggtt

SEQ ID NO: 37283 - DNA, 17 bp, Arabidopsis thaliana
agcttccatgcgtcata

SEQ ID NO: 37284 - DNA, 17 bp, Arabidopsis thaliana
agcttccatgtgataga

SEQ ID NO: 37285 - DNA, 17 bp, Arabidopsis thaliana
agcttcccagaatacgc

SEQ ID NO: 37286 - DNA, 17 bp, Arabidopsis thaliana
agcttccgaagcaatgg

SEQ ID NO: 37287 - DNA, 17 bp, Arabidopsis thaliana
agcttccgacaaaccat

SEQ ID NO: 37288 - DNA, 17 bp, Arabidopsis thaliana
agcttccgactcattca

SEQ ID NO: 37289 - DNA, 17 bp, Arabidopsis thaliana
agcttccgatatcgcca

SEQ ID NO: 37290 - DNA, 17 bp, Arabidopsis thaliana
agcttccgccgtgtcgt

SEQ ID NO: 37291 - DNA, 17 bp, Arabidopsis thaliana
agcttccgcctcgacgt

SEQ ID NO: 37292 - DNA, 17 bp, Arabidopsis thaliana
agcttccgctaatggtc

SEQ ID NO: 37293 - DNA, 17 bp, Arabidopsis thaliana
agcttccggacaagagc

SEQ ID NO: 37294 - DNA, 17 bp, Arabidopsis thaliana
agcttccggcgcttttg

SEQ ID NO: 37295 - DNA, 17 bp, Arabidopsis thaliana
agcttccgtgccacttt

SEQ ID NO: 37296 - DNA, 17 bp, Arabidopsis thaliana
agcttccgttcgacgaa

SEQ ID NO: 37297 - DNA, 17 bp, Arabidopsis thaliana
agcttcctaagtctgaa

SEQ ID NO: 37298 - DNA, 17 bp, Arabidopsis thaliana
agcttcctaataaccgc

SEQ ID NO: 37299 - DNA, 17 bp, Arabidopsis thaliana
agcttcctaggccatgg

SEQ ID NO: 37300 - DNA, 17 bp, Arabidopsis thaliana
agcttcctcttgtactc

SEQ ID NO: 37301 - DNA, 17 bp, Arabidopsis thaliana
agcttcctgagcttcaa

SEQ ID NO: 37302 - DNA, 17 bp, Arabidopsis thaliana
agcttcctgccaaaccc

SEQ ID NO: 37303 - DNA, 17 bp, Arabidopsis thaliana
agcttccttcaagtgct

SEQ ID NO: 37304 - DNA, 17 bp, Arabidopsis thaliana
agcttccttcatgtatg

SEQ ID NO: 37305 - DNA, 17 bp, Arabidopsis thaliana
agcttccttgagtccat

SEQ ID NO: 37306 - DNA, 17 bp, Arabidopsis thaliana
agcttccttgcgtgact

SEQ ID NO: 37307 - DNA, 17 bp, Arabidopsis thaliana
agcttccttgcttgtga

SEQ ID NO: 37308 - DNA, 17 bp, Arabidopsis thaliana
agcttcgaatggtgatt

SEQ ID NO: 37309 - DNA, 17 bp, Arabidopsis thaliana
agcttcgacacaaagga

SEQ ID NO: 37310 - DNA, 17 bp, Arabidopsis thaliana
agcttcgaccattttct

SEQ ID NO: 37311 - DNA, 17 bp, Arabidopsis thaliana
agcttcgatcaaaatcc

SEQ ID NO: 37312 - DNA, 17 bp, Arabidopsis thaliana
agcttcgatccaaaacc

SEQ ID NO: 37313 - DNA, 17 bp, Arabidopsis thaliana
agcttcgatgtcggctc

SEQ ID NO: 37314 - DNA, 17 bp, Arabidopsis thaliana
agcttcgatgtgattcc

SEQ ID NO: 37315 - DNA, 17 bp, Arabidopsis thaliana
agcttcgatgtgattgt

SEQ ID NO: 37316 - DNA, 17 bp, Arabidopsis thaliana
agcttcgcagtgacaac

SEQ ID NO: 37317 - DNA, 17 bp, Arabidopsis thaliana
agcttcgccgattttac

SEQ ID NO: 37318 - DNA, 17 bp, Arabidopsis thaliana
agcttcgcctaaggtct

SEQ ID NO: 37319 - DNA, 17 bp, Arabidopsis thaliana
agcttcgcctagggtct

SEQ ID NO: 37320 - DNA, 17 bp, Arabidopsis thaliana
agcttcgcctctgccgc

SEQ ID NO: 37321 - DNA, 17 bp, Arabidopsis thaliana
agcttcgcgattgtgtt

SEQ ID NO: 37322 - DNA, 17 bp, Arabidopsis thaliana
agcttcgcgccactggc

SEQ ID NO: 37323 - DNA, 17 bp, Arabidopsis thaliana
agcttcgcgtaggatct

SEQ ID NO: 37324 - DNA, 17 bp, Arabidopsis thaliana
agcttcgcttagggtcg

SEQ ID NO: 37325 - DNA, 17 bp, Arabidopsis thaliana
agcttcgcttaggttcg

SEQ ID NO: 37326 - DNA, 17 bp, Arabidopsis thaliana
agcttcggagcaacgtc

SEQ ID NO: 37327 - DNA, 17 bp, Arabidopsis thaliana
agcttcggcaatactgg

SEQ ID NO: 37328 - DNA, 17 bp, Arabidopsis thaliana
agcttcggcgcaagtga

SEQ ID NO: 37329 - DNA, 17 bp, Arabidopsis thaliana
agcttcggcggtgttca

SEQ ID NO: 37330 - DNA, 17 bp, Arabidopsis thaliana
agcttcggctcctacct

SEQ ID NO: 37331 - DNA, 17 bp, Arabidopsis thaliana
agcttcgggccgagtgc

SEQ ID NO: 37332 - DNA, 17 bp, Arabidopsis thaliana
agcttcggggttaggtt

SEQ ID NO: 37333 - DNA, 17 bp, Arabidopsis thaliana
agcttcggggttttgat

SEQ ID NO: 37334 - DNA, 17 bp, Arabidopsis thaliana
agcttcgggttagacag

SEQ ID NO: 37335 - DNA, 17 bp, Arabidopsis thaliana
agcttcggtccaaaacc

SEQ ID NO: 37336 - DNA, 17 bp, Arabidopsis thaliana
agcttcggtcttagctc

SEQ ID NO: 37337 - DNA, 17 bp, Arabidopsis thaliana
agcttcggtgttgcgat

SEQ ID NO: 37338 - DNA, 17 bp, Arabidopsis thaliana
agcttcggtgttggcga

SEQ ID NO: 37339 - DNA, 17 bp, Arabidopsis thaliana
agcttcggttcaggtct

SEQ ID NO: 37340 - DNA, 17 bp, Arabidopsis thaliana
agcttcgtagctttctc

SEQ ID NO: 37341 - DNA, 17 bp, Arabidopsis thaliana
agcttcgtccgggatct

SEQ ID NO: 37342 - DNA, 17 bp, Arabidopsis thaliana
agcttcgtctactatcc

SEQ ID NO: 37343 - DNA, 17 bp, Arabidopsis thaliana
agcttcgttactgcgat

SEQ ID NO: 37344 - DNA, 17 bp, Arabidopsis thaliana
agcttcgttccaaagtg

SEQ ID NO: 37345 - DNA, 17 bp, Arabidopsis thaliana
agcttcgtttagtctcg

SEQ ID NO: 37346 - DNA, 17 bp, Arabidopsis thaliana
agcttcgtttgcagatt

SEQ ID NO: 37347 - DNA, 17 bp, Arabidopsis thaliana
agcttctaatatccagc

SEQ ID NO: 37348 - DNA, 17 bp, Arabidopsis thaliana
agcttctacaaaacggg

SEQ ID NO: 37349 - DNA, 17 bp, Arabidopsis thaliana
agcttctactaagcatg

SEQ ID NO: 37350 - DNA, 17 bp, Arabidopsis thaliana
agcttctactaggcatg

SEQ ID NO: 37351 - DNA, 17 bp, Arabidopsis thaliana
agcttctactcgacctg

SEQ ID NO: 37352 - DNA, 17 bp, Arabidopsis thaliana
agcttctactcgccctg

SEQ ID NO: 37353 - DNA, 17 bp, Arabidopsis thaliana
agcttctactgtggcat

SEQ ID NO: 37354 - DNA, 17 bp, Arabidopsis thaliana
agcttctacttgtcttg

SEQ ID NO: 37355 - DNA, 17 bp, Arabidopsis thaliana
agcttctagctgttgta

SEQ ID NO: 37356 - DNA, 17 bp, Arabidopsis thaliana
agcttctatagagttgg

SEQ ID NO: 37357 - DNA, 17 bp, Arabidopsis thaliana
agcttctatagagttgt

SEQ ID NO: 37358 - DNA, 17 bp, Arabidopsis thaliana
agcttctatcttccaac

SEQ ID NO: 37359 - DNA, 17 bp, Arabidopsis thaliana
agcttctatttcctggc

SEQ ID NO: 37360 - DNA, 17 bp, Arabidopsis thaliana
agcttctcaaagctttc

SEQ ID NO: 37361 - DNA, 17 bp, Arabidopsis thaliana
agcttctcagaatcggt

SEQ ID NO: 37362 - DNA, 17 bp, Arabidopsis thaliana
agcttctcagtggtctt

SEQ ID NO: 37363 - DNA, 17 bp, Arabidopsis thaliana
agcttctcggaatcggt

SEQ ID NO: 37364 - DNA, 17 bp, Arabidopsis thaliana
agcttctcggtagcgtt

SEQ ID NO: 37365 - DNA, 17 bp, Arabidopsis thaliana
agcttctctcaaagtgc

SEQ ID NO: 37366 - DNA, 17 bp, Arabidopsis thaliana
agcttctctggctgcac

SEQ ID NO: 37367 - DNA, 17 bp, Arabidopsis thaliana
agcttctctggctgcgt

SEQ ID NO: 37368 - DNA, 17 bp, Arabidopsis thaliana
agcttctcttaaactcg

SEQ ID NO: 37369 - DNA, 17 bp, Arabidopsis thaliana
agcttctgacacgtgtt

SEQ ID NO: 37370 - DNA, 17 bp, Arabidopsis thaliana
agcttctgataggccac

SEQ ID NO: 37371 - DNA, 17 bp, Arabidopsis thaliana
agcttctgattctgtgt

SEQ ID NO: 37372 - DNA, 17 bp, Arabidopsis thaliana
agcttctgcagataacc

SEQ ID NO: 37373 - DNA, 17 bp, Arabidopsis thaliana
agcttctgctcccttag

SEQ ID NO: 37374 - DNA, 17 bp, Arabidopsis thaliana
agcttctggaagccggt

SEQ ID NO: 37375 - DNA, 17 bp, Arabidopsis thaliana
agcttctggaagctggt

SEQ ID NO: 37376 - DNA, 17 bp, Arabidopsis thaliana
agcttctgggagagttt

SEQ ID NO: 37377 - DNA, 17 bp, Arabidopsis thaliana
agcttctgggattcggt

SEQ ID NO: 37378 - DNA, 17 bp, Arabidopsis thaliana
agcttctggtagcccaa

SEQ ID NO: 37379 - DNA, 17 bp, Arabidopsis thaliana
agcttctggtgcttgat

SEQ ID NO: 37380 - DNA, 17 bp, Arabidopsis thaliana
agcttctggttcatcgt

SEQ ID NO: 37381 - DNA, 17 bp, Arabidopsis thaliana
agcttctggttccaagg

SEQ ID NO: 37382 - DNA, 17 bp, Arabidopsis thaliana
agcttctgtgatatcca

SEQ ID NO: 37383 - DNA, 17 bp, Arabidopsis thaliana
agcttctgttatctggc

SEQ ID NO: 37384 - DNA, 17 bp, Arabidopsis thaliana
agcttctgttggtcgag

SEQ ID NO: 37385 - DNA, 17 bp, Arabidopsis thaliana
agcttctgtttgtgcga

SEQ ID NO: 37386 - DNA, 17 bp, Arabidopsis thaliana
agcttcttagaccatcc

SEQ ID NO: 37387 - DNA, 17 bp, Arabidopsis thaliana
agcttcttcagacttta

SEQ ID NO: 37388 - DNA, 17 bp, Arabidopsis thaliana
agcttcttcccgcaagc

SEQ ID NO: 37389 - DNA, 17 bp, Arabidopsis thaliana
agcttcttcgccgtctc

SEQ ID NO: 37390 - DNA, 17 bp, Arabidopsis thaliana
agcttcttcggtatgac

SEQ ID NO: 37391 - DNA, 17 bp, Arabidopsis thaliana
agcttcttctaacagtt

SEQ ID NO: 37392 - DNA, 17 bp, Arabidopsis thaliana
agcttcttctcagggat

SEQ ID NO: 37393 - DNA, 17 bp, Arabidopsis thaliana
agcttcttctccagacc

SEQ ID NO: 37394 - DNA, 17 bp, Arabidopsis thaliana
agcttcttgaatcactg

SEQ ID NO: 37395 - DNA, 17 bp, Arabidopsis thaliana
agcttcttgacaacggc

SEQ ID NO: 37396 - DNA, 17 bp, Arabidopsis thaliana
agcttcttgctgcagct

SEQ ID NO: 37397 - DNA, 17 bp, Arabidopsis thaliana
agcttcttggaaccaat

SEQ ID NO: 37398 - DNA, 17 bp, Arabidopsis thaliana
agcttcttgtggatgat

SEQ ID NO: 37399 - DNA, 17 bp, Arabidopsis thaliana
agcttcttgtggatgct

SEQ ID NO: 37400 - DNA, 17 bp, Arabidopsis thaliana
agcttctttgagtccat

SEQ ID NO: 37401 - DNA, 17 bp, Arabidopsis thaliana
agcttctttggactggt

SEQ ID NO: 37402 - DNA, 17 bp, Arabidopsis thaliana
agcttcttttcgggatt

SEQ ID NO: 37403 - DNA, 17 bp, Arabidopsis thaliana
agcttcttttgtagggc

SEQ ID NO: 37404 - DNA, 17 bp, Arabidopsis thaliana
agcttctttttggccta

SEQ ID NO: 37405 - DNA, 17 bp, Arabidopsis thaliana
agcttgaaaacggttct

SEQ ID NO: 37406 - DNA, 17 bp, Arabidopsis thaliana
agcttgaaaatcggacg

SEQ ID NO: 37407 - DNA, 17 bp, Arabidopsis thaliana
agcttgaacctggaggt

SEQ ID NO: 37408 - DNA, 17 bp, Arabidopsis thaliana
agcttgaactgcgactg

SEQ ID NO: 37409 - DNA, 17 bp, Arabidopsis thaliana
agcttgaagatttgcaa

SEQ ID NO: 37410 - DNA, 17 bp, Arabidopsis thaliana
agcttgaagatttgcag

SEQ ID NO: 37411 - DNA, 17 bp, Arabidopsis thaliana
agcttgaatcccacagc

SEQ ID NO: 37412 - DNA, 17 bp, Arabidopsis thaliana
agcttgaatgcgtcttc

SEQ ID NO: 37413 - DNA, 17 bp, Arabidopsis thaliana
agcttgaccctagtcca

SEQ ID NO: 37414 - DNA, 17 bp, Arabidopsis thaliana
agcttgacgcccgtccg

SEQ ID NO: 37415 - DNA, 17 bp, Arabidopsis thaliana
agcttgactagtccgac

SEQ ID NO: 37416 - DNA, 17 bp, Arabidopsis thaliana
agcttgactcagtccga

SEQ ID NO: 37417 - DNA, 17 bp, Arabidopsis thaliana
agcttgactcctgtccg

SEQ ID NO: 37418 - DNA, 17 bp, Arabidopsis thaliana
agcttgactctagtacg

SEQ ID NO: 37419 - DNA, 17 bp, Arabidopsis thaliana
agcttgactctagtcag

SEQ ID NO: 37420 - DNA, 17 bp, Arabidopsis thaliana
agcttgactctagtcca

SEQ ID NO: 37421 - DNA, 17 bp, Arabidopsis thaliana
agcttgactctagtccg

SEQ ID NO: 37422 - DNA, 17 bp, Arabidopsis thaliana
agcttgactctagtcct

SEQ ID NO: 37423 - DNA, 17 bp, Arabidopsis thaliana
agcttgactctagtctg

SEQ ID NO: 37424 - DNA, 17 bp, Arabidopsis thaliana
agcttgactctagtgcg

SEQ ID NO: 37425 - DNA, 17 bp, Arabidopsis thaliana
agcttgactctagttcg

SEQ ID NO: 37426 - DNA, 17 bp, Arabidopsis thaliana
agcttgactctattccg

SEQ ID NO: 37427 - DNA, 17 bp, Arabidopsis thaliana
agcttgactctcccgat

SEQ ID NO: 37428 - DNA, 17 bp, Arabidopsis thaliana
agcttgactctggtccg

SEQ ID NO: 37429 - DNA, 17 bp, Arabidopsis thaliana
agcttgactgtaacgct

SEQ ID NO: 37430 - DNA, 17 bp, Arabidopsis thaliana
agcttgacttacttgtt

SEQ ID NO: 37431 - DNA, 17 bp, Arabidopsis thaliana
agcttgacttcagtccg

SEQ ID NO: 37432 - DNA, 17 bp, Arabidopsis thaliana
agcttgactttagtccg

SEQ ID NO: 37433 - DNA, 17 bp, Arabidopsis thaliana
agcttgactttgctgga

SEQ ID NO: 37434 - DNA, 17 bp, Arabidopsis thaliana
agcttgagaaagcggtg

SEQ ID NO: 37435 - DNA, 17 bp, Arabidopsis thaliana
agcttgagatctgcgat

SEQ ID NO: 37436 - DNA, 17 bp, Arabidopsis thaliana
agcttgagttccttgtt

SEQ ID NO: 37437 - DNA, 17 bp, Arabidopsis thaliana
agcttgatacgctttct

SEQ ID NO: 37438 - DNA, 17 bp, Arabidopsis thaliana
agcttgatattttcgca

SEQ ID NO: 37439 - DNA, 17 bp, Arabidopsis thaliana
agcttgatcgcgaactt

SEQ ID NO: 37440 - DNA, 17 bp, Arabidopsis thaliana
agcttgatctgcttgat

SEQ ID NO: 37441 - DNA, 17 bp, Arabidopsis thaliana
agcttgatctttattga

SEQ ID NO: 37442 - DNA, 17 bp, Arabidopsis thaliana
agcttgatctttattta

SEQ ID NO: 37443 - DNA, 17 bp, Arabidopsis thaliana
agcttgatctttgtgtt

SEQ ID NO: 37444 - DNA, 17 bp, Arabidopsis thaliana
agcttgatggctggtac

SEQ ID NO: 37445 - DNA, 17 bp, Arabidopsis thaliana
agcttgatgggaatgcc

SEQ ID NO: 37446 - DNA, 17 bp, Arabidopsis thaliana
agcttgatggttggtac

SEQ ID NO: 37447 - DNA, 17 bp, Arabidopsis thaliana
agcttgattctagtccg

SEQ ID NO: 37448 - DNA, 17 bp, Arabidopsis thaliana
agcttgattgcgcttga

SEQ ID NO: 37449 - DNA, 17 bp, Arabidopsis thaliana
agcttgattgcgcttgt

SEQ ID NO: 37450 - DNA, 17 bp, Arabidopsis thaliana
agcttgattgctggctg

SEQ ID NO: 37451 - DNA, 17 bp, Arabidopsis thaliana
agcttgcacaaccgacc

SEQ ID NO: 37452 - DNA, 17 bp, Arabidopsis thaliana
agcttgcagtaaaaatt

SEQ ID NO: 37453 - DNA, 17 bp, Arabidopsis thaliana
agcttgcagttgcagag

SEQ ID NO: 37454 - DNA, 17 bp, Arabidopsis thaliana
agcttgccaactgaatg

SEQ ID NO: 37455 - DNA, 17 bp, Arabidopsis thaliana
agcttgcccatgtgatt

SEQ ID NO: 37456 - DNA, 17 bp, Arabidopsis thaliana
agcttgcctaaggcatc

SEQ ID NO: 37457 - DNA, 17 bp, Arabidopsis thaliana
agcttgcctccgatcta

SEQ ID NO: 37458 - DNA, 17 bp, Arabidopsis thaliana
agcttgcctgtaagtgc

SEQ ID NO: 37459 - DNA, 17 bp, Arabidopsis thaliana
agcttgccttcgagcgt

SEQ ID NO: 37460 - DNA, 17 bp, Arabidopsis thaliana
agcttgcggtttaagtt

SEQ ID NO: 37461 - DNA, 17 bp, Arabidopsis thaliana
agcttgcgtacttctgg

SEQ ID NO: 37462 - DNA, 17 bp, Arabidopsis thaliana
agcttgctcaaactcgt

SEQ ID NO: 37463 - DNA, 17 bp, Arabidopsis thaliana
agcttgctcatggttca

SEQ ID NO: 37464 - DNA, 17 bp, Arabidopsis thaliana
agcttgctccgggcgtc

SEQ ID NO: 37465 - DNA, 17 bp, Arabidopsis thaliana
agcttgctcgcggtggt

SEQ ID NO: 37466 - DNA, 17 bp, Arabidopsis thaliana
agcttgctgttgtgcct

SEQ ID NO: 37467 - DNA, 17 bp, Arabidopsis thaliana
agcttgctgttgtgctt

SEQ ID NO: 37468 - DNA, 17 bp, Arabidopsis thaliana
agcttgctgttgttcct

SEQ ID NO: 37469 - DNA, 17 bp, Arabidopsis thaliana
agcttgcttcatcaact

SEQ ID NO: 37470 - DNA, 17 bp, Arabidopsis thaliana
agcttgcttctttaccg

SEQ ID NO: 37471 - DNA, 17 bp, Arabidopsis thaliana
agcttgcttgcctccct

SEQ ID NO: 37472 - DNA, 17 bp, Arabidopsis thaliana
agcttggactaaggcgt

SEQ ID NO: 37473 - DNA, 17 bp, Arabidopsis thaliana
agcttggagaagctaga

SEQ ID NO: 37474 - DNA, 17 bp, Arabidopsis thaliana
agcttggagcggaagaa

SEQ ID NO: 37475 - DNA, 17 bp, Arabidopsis thaliana
agcttggaggccacaag

SEQ ID NO: 37476 - DNA, 17 bp, Arabidopsis thaliana
agcttggattggttagg

SEQ ID NO: 37477 - DNA, 17 bp, Arabidopsis thaliana
agcttggcccaattgat

SEQ ID NO: 37478 - DNA, 17 bp, Arabidopsis thaliana
agcttggcccaattggt

SEQ ID NO: 37479 - DNA, 17 bp, Arabidopsis thaliana
agcttggcccattatct

SEQ ID NO: 37480 - DNA, 17 bp, Arabidopsis thaliana
agcttggcctcgaaaag

SEQ ID NO: 37481 - DNA, 17 bp, Arabidopsis thaliana
agcttggcgaatttggc

SEQ ID NO: 37482 - DNA, 17 bp, Arabidopsis thaliana
agcttgggatcgcacct

SEQ ID NO: 37483 - DNA, 17 bp, Arabidopsis thaliana
agcttgggcttgtgaca

SEQ ID NO: 37484 - DNA, 17 bp, Arabidopsis thaliana
agcttgggtgaaactaa

SEQ ID NO: 37485 - DNA, 17 bp, Arabidopsis thaliana
agcttgggtgtgagtta

SEQ ID NO: 37486 - DNA, 17 bp, Arabidopsis thaliana
agcttgggttttccatt

SEQ ID NO: 37487 - DNA, 17 bp, Arabidopsis thaliana
agcttggtaaccgtcat

SEQ ID NO: 37488 - DNA, 17 bp, Arabidopsis thaliana
agcttggtagcgctttt

SEQ ID NO: 37489 - DNA, 17 bp, Arabidopsis thaliana
agcttggtccacgctca

SEQ ID NO: 37490 - DNA, 17 bp, Arabidopsis thaliana
agcttggtctaagattt

SEQ ID NO: 37491 - DNA, 17 bp, Arabidopsis thaliana
agcttggttcgttttcc

SEQ ID NO: 37492 - DNA, 17 bp, Arabidopsis thaliana
agcttggtttgcgatga

SEQ ID NO: 37493 - DNA, 17 bp, Arabidopsis thaliana
agcttgtacagctttga

SEQ ID NO: 37494 - DNA, 17 bp, Arabidopsis thaliana
agcttgtagttgattac

SEQ ID NO: 37495 - DNA, 17 bp, Arabidopsis thaliana
agcttgtcacctgagat

SEQ ID NO: 37496 - DNA, 17 bp, Arabidopsis thaliana
agcttgtcctgcttctt

SEQ ID NO: 37497 - DNA, 17 bp, Arabidopsis thaliana
agcttgtccttgaatga

SEQ ID NO: 37498 - DNA, 17 bp, Arabidopsis thaliana
agcttgtctacaaaagg

SEQ ID NO: 37499 - DNA, 17 bp, Arabidopsis thaliana
agcttgtctctctccat

SEQ ID NO: 37500 - DNA, 17 bp, Arabidopsis thaliana
agcttgtctctcttcat

SEQ ID NO: 37501 - DNA, 17 bp, Arabidopsis thaliana
agcttgtctgccactga

SEQ ID NO: 37502 - DNA, 17 bp, Arabidopsis thaliana
agcttgtctggttgagt

SEQ ID NO: 37503 - DNA, 17 bp, Arabidopsis thaliana
agcttgtctgtaagtgc

SEQ ID NO: 37504 - DNA, 17 bp, Arabidopsis thaliana
agcttgtgaatgctgca

SEQ ID NO: 37505 - DNA, 17 bp, Arabidopsis thaliana
agcttgtgatggccatg

SEQ ID NO: 37506 - DNA, 17 bp, Arabidopsis thaliana
agcttgtgctctcatct

SEQ ID NO: 37507 - DNA, 17 bp, Arabidopsis thaliana
agcttgtggatggcgat

SEQ ID NO: 37508 - DNA, 17 bp, Arabidopsis thaliana
agcttgtgtaggccgag

SEQ ID NO: 37509 - DNA, 17 bp, Arabidopsis thaliana
agcttgtgtgaccatgc

SEQ ID NO: 37510 - DNA, 17 bp, Arabidopsis thaliana
agcttgtgttgcggatt

SEQ ID NO: 37511 - DNA, 17 bp, Arabidopsis thaliana
agcttgttatcgaacgg

SEQ ID NO: 37512 - DNA, 17 bp, Arabidopsis thaliana
agcttgttatgaccttc

SEQ ID NO: 37513 - DNA, 17 bp, Arabidopsis thaliana
agcttgttccagcaatc

SEQ ID NO: 37514 - DNA, 17 bp, Arabidopsis thaliana
agcttgttccgccgggc

SEQ ID NO: 37515 - DNA, 17 bp, Arabidopsis thaliana
agcttgttcgcggtggt

SEQ ID NO: 37516 - DNA, 17 bp, Arabidopsis thaliana
agcttgttcgcggtgtt

SEQ ID NO: 37517 - DNA, 17 bp, Arabidopsis thaliana
agcttgttgccaatcac

SEQ ID NO: 37518 - DNA, 17 bp, Arabidopsis thaliana
agcttgttgtggctgcc

SEQ ID NO: 37519 - DNA, 17 bp, Arabidopsis thaliana
agcttgtttataagttc

SEQ ID NO: 37520 - DNA, 17 bp, Arabidopsis thaliana
agcttgtttcatcaact

SEQ ID NO: 37521 - DNA, 17 bp, Arabidopsis thaliana
agcttgtttgccatcaa

SEQ ID NO: 37522 - DNA, 17 bp, Arabidopsis thaliana
agcttgtttgtcatcta

SEQ ID NO: 37523 - DNA, 17 bp, Arabidopsis thaliana
agctttaactaattttg

SEQ ID NO: 37524 - DNA, 17 bp, Arabidopsis thaliana
agctttaactctttttc

SEQ ID NO: 37525 - DNA, 17 bp, Arabidopsis thaliana
agctttaagattttttg

SEQ ID NO: 37526 - DNA, 17 bp, Arabidopsis thaliana
agctttaagcccaagca

SEQ ID NO: 37527 - DNA, 17 bp, Arabidopsis thaliana
agctttaaggtacttct

SEQ ID NO: 37528 - DNA, 17 bp, Arabidopsis thaliana
agctttaagtacttttt

SEQ ID NO: 37529 - DNA, 17 bp, Arabidopsis thaliana
agctttaagttctgacc

SEQ ID NO: 37530 - DNA, 17 bp, Arabidopsis thaliana
agctttaatagattgag

SEQ ID NO: 37531 - DNA, 17 bp, Arabidopsis thaliana
agctttaatgacctgaa

SEQ ID NO: 37532 - DNA, 17 bp, Arabidopsis thaliana
agctttacaccagattg

SEQ ID NO: 37533 - DNA, 17 bp, Arabidopsis thaliana
agctttacatgtaggtc

SEQ ID NO: 37534 - DNA, 17 bp, Arabidopsis thaliana
agctttacttttggctt

SEQ ID NO: 37535 - DNA, 17 bp, Arabidopsis thaliana
agctttagcccaggacc

SEQ ID NO: 37536 - DNA, 17 bp, Arabidopsis thaliana
agctttagtgactgctg

SEQ ID NO: 37537 - DNA, 17 bp, Arabidopsis thaliana
agctttagtgtgtgcgt

SEQ ID NO: 37538 - DNA, 17 bp, Arabidopsis thaliana
agctttagttctggtcg

SEQ ID NO: 37539 - DNA, 17 bp, Arabidopsis thaliana
agctttataagtgccac

SEQ ID NO: 37540 - DNA, 17 bp, Arabidopsis thaliana
agctttatagccctttt

SEQ ID NO: 37541 - DNA, 17 bp, Arabidopsis thaliana
agctttatcccattgtg

SEQ ID NO: 37542 - DNA, 17 bp, Arabidopsis thaliana
agctttatgagtgtttc

SEQ ID NO: 37543 - DNA, 17 bp, Arabidopsis thaliana
agctttatgggtttagg

SEQ ID NO: 37544 - DNA, 17 bp, Arabidopsis thaliana
agctttatgtgccgatt

SEQ ID NO: 37545 - DNA, 17 bp, Arabidopsis thaliana
agctttatgttgtgatt

SEQ ID NO: 37546 - DNA, 17 bp, Arabidopsis thaliana
agctttattacattcgg

SEQ ID NO: 37547 - DNA, 17 bp, Arabidopsis thaliana
agctttattacattctt

SEQ ID NO: 37548 - DNA, 17 bp, Arabidopsis thaliana
agctttattgatggctg

SEQ ID NO: 37549 - DNA, 17 bp, Arabidopsis thaliana
agctttattggaacagt

SEQ ID NO: 37550 - DNA, 17 bp, Arabidopsis thaliana
agctttcaaagggccca

SEQ ID NO: 37551 - DNA, 17 bp, Arabidopsis thaliana
agctttcaactcggtgc

SEQ ID NO: 37552 - DNA, 17 bp, Arabidopsis thaliana
agctttcaagatcgggt

SEQ ID NO: 37553 - DNA, 17 bp, Arabidopsis thaliana
agctttcaagatctggt

SEQ ID NO: 37554 - DNA, 17 bp, Arabidopsis thaliana
agctttcaatcggctga

SEQ ID NO: 37555 - DNA, 17 bp, Arabidopsis thaliana
agctttcaatgtctgtt

SEQ ID NO: 37556 - DNA, 17 bp, Arabidopsis thaliana
agctttcacagttacca

SEQ ID NO: 37557 - DNA, 17 bp, Arabidopsis thaliana
agctttcacccccggac

SEQ ID NO: 37558 - DNA, 17 bp, Arabidopsis thaliana
agctttcacgacggcga

SEQ ID NO: 37559 - DNA, 17 bp, Arabidopsis thaliana
agctttcagaatccagt

SEQ ID NO: 37560 - DNA, 17 bp, Arabidopsis thaliana
agctttcagttgttggc

SEQ ID NO: 37561 - DNA, 17 bp, Arabidopsis thaliana
agctttcatagctcagt

SEQ ID NO: 37562 - DNA, 17 bp, Arabidopsis thaliana
agctttcatggtgtagc

SEQ ID NO: 37563 - DNA, 17 bp, Arabidopsis thaliana
agctttcatggtgtagt

SEQ ID NO: 37564 - DNA, 17 bp, Arabidopsis thaliana
agctttcatggtgtcgg

SEQ ID NO: 37565 - DNA, 17 bp, Arabidopsis thaliana
agctttcatggtgtggc

SEQ ID NO: 37566 - DNA, 17 bp, Arabidopsis thaliana
agctttccaagatcgtc

SEQ ID NO: 37567 - DNA, 17 bp, Arabidopsis thaliana
agctttccaattacatg

SEQ ID NO: 37568 - DNA, 17 bp, Arabidopsis thaliana
agctttccactaagcat

SEQ ID NO: 37569 - DNA, 17 bp, Arabidopsis thaliana
agctttccagggctctt

SEQ ID NO: 37570 - DNA, 17 bp, Arabidopsis thaliana
agctttccccgggcgtc

SEQ ID NO: 37571 - DNA, 17 bp, Arabidopsis thaliana
agctttcccgtgtagcg

SEQ ID NO: 37572 - DNA, 17 bp, Arabidopsis thaliana
agctttcctaaacggct

SEQ ID NO: 37573 - DNA, 17 bp, Arabidopsis thaliana
agctttcgactgtcaat

SEQ ID NO: 37574 - DNA, 17 bp, Arabidopsis thaliana
agctttcgagatcagtt

SEQ ID NO: 37575 - DNA, 17 bp, Arabidopsis thaliana
agctttcgaggaactct

SEQ ID NO: 37576 - DNA, 17 bp, Arabidopsis thaliana
agctttcgatcgcctcg

SEQ ID NO: 37577 - DNA, 17 bp, Arabidopsis thaliana
agctttcgatcttcagg

SEQ ID NO: 37578 - DNA, 17 bp, Arabidopsis thaliana
agctttcgcaacttgga

SEQ ID NO: 37579 - DNA, 17 bp, Arabidopsis thaliana
agctttcggattaagtt

SEQ ID NO: 37580 - DNA, 17 bp, Arabidopsis thaliana
agctttcgggaactggt

SEQ ID NO: 37581 - DNA, 17 bp, Arabidopsis thaliana
agctttcgggatacggc

SEQ ID NO: 37582 - DNA, 17 bp, Arabidopsis thaliana
agctttcgggattcgtt

SEQ ID NO: 37583 - DNA, 17 bp, Arabidopsis thaliana
agctttcgggctaagtt

SEQ ID NO: 37584 - DNA, 17 bp, Arabidopsis thaliana
agctttcggttgcccat

SEQ ID NO: 37585 - DNA, 17 bp, Arabidopsis thaliana
agctttcggttgccgat

SEQ ID NO: 37586 - DNA, 17 bp, Arabidopsis thaliana
agctttcggtttagatc

SEQ ID NO: 37587 - DNA, 17 bp, Arabidopsis thaliana
agctttcgtaactttga

SEQ ID NO: 37588 - DNA, 17 bp, Arabidopsis thaliana
agctttcgtcaaggatc

SEQ ID NO: 37589 - DNA, 17 bp, Arabidopsis thaliana
agctttcgttttacttc

SEQ ID NO: 37590 - DNA, 17 bp, Arabidopsis thaliana
agctttctaaattttcc

SEQ ID NO: 37591 - DNA, 17 bp, Arabidopsis thaliana
agctttctattcatgca

SEQ ID NO: 37592 - DNA, 17 bp, Arabidopsis thaliana
agctttctcaacacagg

SEQ ID NO: 37593 - DNA, 17 bp, Arabidopsis thaliana
agctttctctggctgca

SEQ ID NO: 37594 - DNA, 17 bp, Arabidopsis thaliana
agctttctctgttaatt

SEQ ID NO: 37595 - DNA, 17 bp, Arabidopsis thaliana
agctttcttgtagtaca

SEQ ID NO: 37596 - DNA, 17 bp, Arabidopsis thaliana
agctttctttcgacttt

SEQ ID NO: 37597 - DNA, 17 bp, Arabidopsis thaliana
agctttgaagaacgttg

SEQ ID NO: 37598 - DNA, 17 bp, Arabidopsis thaliana
agctttgactgcagaga

SEQ ID NO: 37599 - DNA, 17 bp, Arabidopsis thaliana
agctttgaggattgaga

SEQ ID NO: 37600 - DNA, 17 bp, Arabidopsis thaliana
agctttgaggtatgttg

SEQ ID NO: 37601 - DNA, 17 bp, Arabidopsis thaliana
agctttgaggtgcgtcc

SEQ ID NO: 37602 - DNA, 17 bp, Arabidopsis thaliana
agctttgagtccattca

SEQ ID NO: 37603 - DNA, 17 bp, Arabidopsis thaliana
agctttgatcaccgttg

SEQ ID NO: 37604 - DNA, 17 bp, Arabidopsis thaliana
agctttgatcgatcaat

SEQ ID NO: 37605 - DNA, 17 bp, Arabidopsis thaliana
agctttgatcttgtggg

SEQ ID NO: 37606 - DNA, 17 bp, Arabidopsis thaliana
agctttgatgactctac

SEQ ID NO: 37607 - DNA, 17 bp, Arabidopsis thaliana
agctttgatgactctgt

SEQ ID NO: 37608 - DNA, 17 bp, Arabidopsis thaliana
agctttgatggattagc

SEQ ID NO: 37609 - DNA, 17 bp, Arabidopsis thaliana
agctttgatggtgtagc

SEQ ID NO: 37610 - DNA, 17 bp, Arabidopsis thaliana
agctttgattacgtacc

SEQ ID NO: 37611 - DNA, 17 bp, Arabidopsis thaliana
agctttgattcgtttac

SEQ ID NO: 37612 - DNA, 17 bp, Arabidopsis thaliana
agctttgcaccattaat

SEQ ID NO: 37613 - DNA, 17 bp, Arabidopsis thaliana
agctttgcactattccg

SEQ ID NO: 37614 - DNA, 17 bp, Arabidopsis thaliana
agctttgcagaccagtc

SEQ ID NO: 37615 - DNA, 17 bp, Arabidopsis thaliana
agctttgcagatggaca

SEQ ID NO: 37616 - DNA, 17 bp, Arabidopsis thaliana
agctttgccaatttcga

SEQ ID NO: 37617 - DNA, 17 bp, Arabidopsis thaliana
agctttgccatctctgc

SEQ ID NO: 37618 - DNA, 17 bp, Arabidopsis thaliana
agctttgcctagagttt

SEQ ID NO: 37619 - DNA, 17 bp, Arabidopsis thaliana
agctttgcctagggtct

SEQ ID NO: 37620 - DNA, 17 bp, Arabidopsis thaliana
agctttgcgttaccaat

SEQ ID NO: 37621 - DNA, 17 bp, Arabidopsis thaliana
agctttgctaagcggtc

SEQ ID NO: 37622 - DNA, 17 bp, Arabidopsis thaliana
agctttgctctcatctg

SEQ ID NO: 37623 - DNA, 17 bp, Arabidopsis thaliana
agctttgcttaagcagc

SEQ ID NO: 37624 - DNA, 17 bp, Arabidopsis thaliana
agctttgcttcttcttg

SEQ ID NO: 37625 - DNA, 17 bp, Arabidopsis thaliana
agctttgcttgtgacta

SEQ ID NO: 37626 - DNA, 17 bp, Arabidopsis thaliana
agctttggaccctgcgt

SEQ ID NO: 37627 - DNA, 17 bp, Arabidopsis thaliana
agctttggcattttcct

SEQ ID NO: 37628 - DNA, 17 bp, Arabidopsis thaliana
agctttggctagcagat

SEQ ID NO: 37629 - DNA, 17 bp, Arabidopsis thaliana
agctttgggatggagaa

SEQ ID NO: 37630 - DNA, 17 bp, Arabidopsis thaliana
agctttgggtgaggacc

SEQ ID NO: 37631 - DNA, 17 bp, Arabidopsis thaliana
agctttgggtgtcaacg

SEQ ID NO: 37632 - DNA, 17 bp, Arabidopsis thaliana
agctttggtgatggctt

SEQ ID NO: 37633 - DNA, 17 bp, Arabidopsis thaliana
agctttggtgtgatttt

SEQ ID NO: 37634 - DNA, 17 bp, Arabidopsis thaliana
agctttggtgtgtgcgt

SEQ ID NO: 37635 - DNA, 17 bp, Arabidopsis thaliana
agctttggtttgacaca

SEQ ID NO: 37636 - DNA, 17 bp, Arabidopsis thaliana
agctttgtacaactttg

SEQ ID NO: 37637 - DNA, 17 bp, Arabidopsis thaliana
agctttgtagtcgcaga

SEQ ID NO: 37638 - DNA, 17 bp, Arabidopsis thaliana
agctttgtatcggtttt

SEQ ID NO: 37639 - DNA, 17 bp, Arabidopsis thaliana
agctttgtatgaggtct

SEQ ID NO: 37640 - DNA, 17 bp, Arabidopsis thaliana
agctttgtattttggac

SEQ ID NO: 37641 - DNA, 17 bp, Arabidopsis thaliana
agctttgtcacaatcgt

SEQ ID NO: 37642 - DNA, 17 bp, Arabidopsis thaliana
agctttgtcatgtccat

SEQ ID NO: 37643 - DNA, 17 bp, Arabidopsis thaliana
agctttgtctcaatcgt

SEQ ID NO: 37644 - DNA, 17 bp, Arabidopsis thaliana
agctttgtgaagaccat

SEQ ID NO: 37645 - DNA, 17 bp, Arabidopsis thaliana
agctttgtgagggttcc

SEQ ID NO: 37646 - DNA, 17 bp, Arabidopsis thaliana
agctttgtgcctctggt

SEQ ID NO: 37647 - DNA, 17 bp, Arabidopsis thaliana
agctttgtgctacagcc

SEQ ID NO: 37648 - DNA, 17 bp, Arabidopsis thaliana
agctttgtggaattcga

SEQ ID NO: 37649 - DNA, 17 bp, Arabidopsis thaliana
agctttgtgttaccaat

SEQ ID NO: 37650 - DNA, 17 bp, Arabidopsis thaliana
agctttgttagggtttc

SEQ ID NO: 37651 - DNA, 17 bp, Arabidopsis thaliana
agctttgttcttgattg

SEQ ID NO: 37652 - DNA, 17 bp, Arabidopsis thaliana
agctttgttggctgtag

SEQ ID NO: 37653 - DNA, 17 bp, Arabidopsis thaliana
agcttttaagatcaggt

SEQ ID NO: 37654 - DNA, 17 bp, Arabidopsis thaliana
agcttttaagatcgggt

SEQ ID NO: 37655 - DNA, 17 bp, Arabidopsis thaliana
agcttttaagatctgat

SEQ ID NO: 37656 - DNA, 17 bp, Arabidopsis thaliana
agcttttaagttgtgac

SEQ ID NO: 37657 - DNA, 17 bp, Arabidopsis thaliana
agcttttacactcgtct

SEQ ID NO: 37658 - DNA, 17 bp, Arabidopsis thaliana
agcttttactctcatca

SEQ ID NO: 37659 - DNA, 17 bp, Arabidopsis thaliana
agcttttaggcgaccac

SEQ ID NO: 37660 - DNA, 17 bp, Arabidopsis thaliana
agcttttaggtgtgagt

SEQ ID NO: 37661 - DNA, 17 bp, Arabidopsis thaliana
agcttttataggccaaa

SEQ ID NO: 37662 - DNA, 17 bp, Arabidopsis thaliana
agcttttatgatcgggt

SEQ ID NO: 37663 - DNA, 17 bp, Arabidopsis thaliana
agcttttattgtgtagc

SEQ ID NO: 37664 - DNA, 17 bp, Arabidopsis thaliana
agcttttcaactttgcc

SEQ ID NO: 37665 - DNA, 17 bp, Arabidopsis thaliana
agcttttcaaggattgg

SEQ ID NO: 37666 - DNA, 17 bp, Arabidopsis thaliana
agcttttccgacgacga

SEQ ID NO: 37667 - DNA, 17 bp, Arabidopsis thaliana
agcttttcgcaacttgg

SEQ ID NO: 37668 - DNA, 17 bp, Arabidopsis thaliana
agcttttcggaatcggt

SEQ ID NO: 37669 - DNA, 17 bp, Arabidopsis thaliana
agcttttcgtgatttgg

SEQ ID NO: 37670 - DNA, 17 bp, Arabidopsis thaliana
agcttttcgttgtcgat

SEQ ID NO: 37671 - DNA, 17 bp, Arabidopsis thaliana
agcttttctattgacaa

SEQ ID NO: 37672 - DNA, 17 bp, Arabidopsis thaliana
agcttttctcatctgtg

SEQ ID NO: 37673 - DNA, 17 bp, Arabidopsis thaliana
agcttttctggagatga

SEQ ID NO: 37674 - DNA, 17 bp, Arabidopsis thaliana
agcttttctggccggca

SEQ ID NO: 37675 - DNA, 17 bp, Arabidopsis thaliana
agcttttgaaatctcgc

SEQ ID NO: 37676 - DNA, 17 bp, Arabidopsis thaliana
agcttttgaaatctggc

SEQ ID NO: 37677 - DNA, 17 bp, Arabidopsis thaliana
agcttttgactggaaaa

SEQ ID NO: 37678 - DNA, 17 bp, Arabidopsis thaliana
agcttttgagatcagtt

SEQ ID NO: 37679 - DNA, 17 bp, Arabidopsis thaliana
agcttttgaggtgagat

SEQ ID NO: 37680 - DNA, 17 bp, Arabidopsis thaliana
agcttttgatccttcat

SEQ ID NO: 37681 - DNA, 17 bp, Arabidopsis thaliana
agcttttgatcggggtt

SEQ ID NO: 37682 - DNA, 17 bp, Arabidopsis thaliana
agcttttgatgggcagg

SEQ ID NO: 37683 - DNA, 17 bp, Arabidopsis thaliana
agcttttgccgtctttc

SEQ ID NO: 37684 - DNA, 17 bp, Arabidopsis thaliana
agcttttgccgtctttg

SEQ ID NO: 37685 - DNA, 17 bp, Arabidopsis thaliana
agcttttgccgttttgt

SEQ ID NO: 37686 - DNA, 17 bp, Arabidopsis thaliana
agcttttgccgtttttg

SEQ ID NO: 37687 - DNA, 17 bp, Arabidopsis thaliana
agcttttgctccaaaat

SEQ ID NO: 37688 - DNA, 17 bp, Arabidopsis thaliana
agcttttggaacatctt

SEQ ID NO: 37689 - DNA, 17 bp, Arabidopsis thaliana
agcttttggacactcct

SEQ ID NO: 37690 - DNA, 17 bp, Arabidopsis thaliana
agcttttggacacttct

SEQ ID NO: 37691 - DNA, 17 bp, Arabidopsis thaliana
agcttttggagactgta

SEQ ID NO: 37692 - DNA, 17 bp, Arabidopsis thaliana
agcttttggcagatgtg

SEQ ID NO: 37693 - DNA, 17 bp, Arabidopsis thaliana
agcttttggctgatggg

SEQ ID NO: 37694 - DNA, 17 bp, Arabidopsis thaliana
agcttttggctgatgta

SEQ ID NO: 37695 - DNA, 17 bp, Arabidopsis thaliana
agcttttggctgatgtg

SEQ ID NO: 37696 - DNA, 17 bp, Arabidopsis thaliana
agcttttggcttagtga

SEQ ID NO: 37697 - DNA, 17 bp, Arabidopsis thaliana
agcttttgggacctttg

SEQ ID NO: 37698 - DNA, 17 bp, Arabidopsis thaliana
agcttttgggccgatca

SEQ ID NO: 37699 - DNA, 17 bp, Arabidopsis thaliana
agcttttgggtgtaagt

SEQ ID NO: 37700 - DNA, 17 bp, Arabidopsis thaliana
agcttttgggtgtgagt

SEQ ID NO: 37701 - DNA, 17 bp, Arabidopsis thaliana
agcttttgggttaagga

SEQ ID NO: 37702 - DNA, 17 bp, Arabidopsis thaliana
agcttttgggttaagta

SEQ ID NO: 37703 - DNA, 17 bp, Arabidopsis thaliana
agcttttgggttaatta

SEQ ID NO: 37704 - DNA, 17 bp, Arabidopsis thaliana
agcttttggtataagtt

SEQ ID NO: 37705 - DNA, 17 bp, Arabidopsis thaliana
agcttttggttaccaat

SEQ ID NO: 37706 - DNA, 17 bp, Arabidopsis thaliana
agcttttgtcgctaaga

SEQ ID NO: 37707 - DNA, 17 bp, Arabidopsis thaliana
agctttttagcaaccgg

SEQ ID NO: 37708 - DNA, 17 bp, Arabidopsis thaliana
agctttttcccccacac

SEQ ID NO: 37709 - DNA, 17 bp, Arabidopsis thaliana
agctttttcccctacac

SEQ ID NO: 37710 - DNA, 17 bp, Arabidopsis thaliana
agctttttcggatggtt

SEQ ID NO: 37711 - DNA, 17 bp, Arabidopsis thaliana
agctttttcggtccagt

SEQ ID NO: 37712 - DNA, 17 bp, Arabidopsis thaliana
agctttttctagtctgc

SEQ ID NO: 37713 - DNA, 17 bp, Arabidopsis thaliana
agctttttctagtctgt

SEQ ID NO: 37714 - DNA, 17 bp, Arabidopsis thaliana
agctttttcttgtgtag

SEQ ID NO: 37715 - DNA, 17 bp, Arabidopsis thaliana
agctttttgaccaaatc

SEQ ID NO: 37716 - DNA, 17 bp, Arabidopsis thaliana
agctttttgcggattat

SEQ ID NO: 37717 - DNA, 17 bp, Arabidopsis thaliana
agctttttgctcatttc

SEQ ID NO: 37718 - DNA, 17 bp, Arabidopsis thaliana
agctttttggcaagacg

SEQ ID NO: 37719 - DNA, 17 bp, Arabidopsis thaliana
agctttttgtcgctaag

SEQ ID NO: 37720 - DNA, 17 bp, Arabidopsis thaliana
agcttttttcatctgtg

SEQ ID NO: 37721 - DNA, 17 bp, Arabidopsis thaliana
agcttttttccgtctgg

SEQ ID NO: 37722 - DNA, 17 bp, Arabidopsis thaliana
agcttttttcttggatt

SEQ ID NO: 37723 - DNA, 17 bp, Arabidopsis thaliana
agcttttttggctcatt

SEQ ID NO: 37724 - DNA, 17 bp, Arabidopsis thaliana
agctttttttagatcgc

SEQ ID NO: 37725 - DNA, 17 bp, Arabidopsis thaliana
agctttttttcaagctc

SEQ ID NO: 37726 - DNA, 17 bp, Arabidopsis thaliana
agctttttttgtccatt

SEQ ID NO: 37727 - DNA, 17 bp, Arabidopsis thaliana
aggaaaaaaatgctaag

SEQ ID NO: 37728 - DNA, 17 bp, Arabidopsis thaliana
aggaaaaacggattcaa

SEQ ID NO: 37729 - DNA, 17 bp, Arabidopsis thaliana
aggaaaaacttgtgttg

SEQ ID NO: 37730 - DNA, 17 bp, Arabidopsis thaliana
aggaaaaatgcggttcg

SEQ ID NO: 37731 - DNA, 17 bp, Arabidopsis thaliana
aggaaaacactgacgga

SEQ ID NO: 37732 - DNA, 17 bp, Arabidopsis thaliana
aggaaaacccaatgtct

SEQ ID NO: 37733 - DNA, 17 bp, Arabidopsis thaliana
aggaaaaccccattcat

SEQ ID NO: 37734 - DNA, 17 bp, Arabidopsis thaliana
aggaaaactccaggaaa

SEQ ID NO: 37735 - DNA, 17 bp, Arabidopsis thaliana
aggaaaactttgtccac

SEQ ID NO: 37736 - DNA, 17 bp, Arabidopsis thaliana
aggaaaactttgtccag

SEQ ID NO: 37737 - DNA, 17 bp, Arabidopsis thaliana
aggaaaagcgcctcatc

SEQ ID NO: 37738 - DNA, 17 bp, Arabidopsis thaliana
aggaaaagtcgttgggc

SEQ ID NO: 37739 - DNA, 17 bp, Arabidopsis thaliana
aggaaaagtgtctgggc

SEQ ID NO: 37740 - DNA, 17 bp, Arabidopsis thaliana
aggaaaataaccaactt

SEQ ID NO: 37741 - DNA, 17 bp, Arabidopsis thaliana
aggaaaatcatgggttt

SEQ ID NO: 37742 - DNA, 17 bp, Arabidopsis thaliana
aggaaaatcttcggatc

SEQ ID NO: 37743 - DNA, 17 bp, Arabidopsis thaliana
aggaaaatgatctttcc

SEQ ID NO: 37744 - DNA, 17 bp, Arabidopsis thaliana
aggaaaatgtatcttag

SEQ ID NO: 37745 - DNA, 17 bp, Arabidopsis thaliana
aggaaaatgtcacgctg

SEQ ID NO: 37746 - DNA, 17 bp, Arabidopsis thaliana
aggaaaattacaggttt

SEQ ID NO: 37747 - DNA, 17 bp, Arabidopsis thaliana
aggaaaattaccgaaag

SEQ ID NO: 37748 - DNA, 17 bp, Arabidopsis thaliana
aggaaaattacgggttt

SEQ ID NO: 37749 - DNA, 17 bp, Arabidopsis thaliana
aggaaaattatgatttg

SEQ ID NO: 37750 - DNA, 17 bp, Arabidopsis thaliana
aggaaaattcgttggcc

SEQ ID NO: 37751 - DNA, 17 bp, Arabidopsis thaliana
aggaaacaccaaacgat

SEQ ID NO: 37752 - DNA, 17 bp, Arabidopsis thaliana
aggaaacaccaaccgat

SEQ ID NO: 37753 - DNA, 17 bp, Arabidopsis thaliana
aggaaacaggcgatttg

SEQ ID NO: 37754 - DNA, 17 bp, Arabidopsis thaliana
aggaaaccattctggcg

SEQ ID NO: 37755 - DNA, 17 bp, Arabidopsis thaliana
aggaaaccattcttgcg

SEQ ID NO: 37756 - DNA, 17 bp, Arabidopsis thaliana
aggaaaccggaggtaag

SEQ ID NO: 37757 - DNA, 17 bp, Arabidopsis thaliana
aggaaaccgtgccgtcg

SEQ ID NO: 37758 - DNA, 17 bp, Arabidopsis thaliana
aggaaacctgcaatgcg

SEQ ID NO: 37759 - DNA, 17 bp, Arabidopsis thaliana
aggaaacgcgtttctgt

SEQ ID NO: 37760 - DNA, 17 bp, Arabidopsis thaliana
aggaaacggcccaagca

SEQ ID NO: 37761 - DNA, 17 bp, Arabidopsis thaliana
aggaaacggcccaagcc

SEQ ID NO: 37762 - DNA, 17 bp, Arabidopsis thaliana
aggaaacgggaggtaag

SEQ ID NO: 37763 - DNA, 17 bp, Arabidopsis thaliana
aggaaactcgaaattag

SEQ ID NO: 37764 - DNA, 17 bp, Arabidopsis thaliana
aggaaactgggctcttc

SEQ ID NO: 37765 - DNA, 17 bp, Arabidopsis thaliana
aggaaacttcgactcca

SEQ ID NO: 37766 - DNA, 17 bp, Arabidopsis thaliana
aggaaactttggtggct

SEQ ID NO: 37767 - DNA, 17 bp, Arabidopsis thaliana
aggaaacttttgatgtt

SEQ ID NO: 37768 - DNA, 17 bp, Arabidopsis thaliana
aggaaagacagcggatg

SEQ ID NO: 37769 - DNA, 17 bp, Arabidopsis thaliana
aggaaagacgaaagaca

SEQ ID NO: 37770 - DNA, 17 bp, Arabidopsis thaliana
aggaaagacgaaagacc

SEQ ID NO: 37771 - DNA, 17 bp, Arabidopsis thaliana
aggaaagacggttttcg

SEQ ID NO: 37772 - DNA, 17 bp, Arabidopsis thaliana
aggaaagagaacgccac

SEQ ID NO: 37773 - DNA, 17 bp, Arabidopsis thaliana
aggaaagaggacgccgg

SEQ ID NO: 37774 - DNA, 17 bp, Arabidopsis thaliana
aggaaagatcgtcatct

SEQ ID NO: 37775 - DNA, 17 bp, Arabidopsis thaliana
aggaaagatctctattg

SEQ ID NO: 37776 - DNA, 17 bp, Arabidopsis thaliana
aggaaagcccaaagaca

SEQ ID NO: 37777 - DNA, 17 bp, Arabidopsis thaliana
aggaaagcgatcgatcg

SEQ ID NO: 37778 - DNA, 17 bp, Arabidopsis thaliana
aggaaagcggtgagttc

SEQ ID NO: 37779 - DNA, 17 bp, Arabidopsis thaliana
aggaaaggattggctct

SEQ ID NO: 37780 - DNA, 17 bp, Arabidopsis thaliana
aggaaaggccccgaacc

SEQ ID NO: 37781 - DNA, 17 bp, Arabidopsis thaliana
aggaaaggcttacggtg

SEQ ID NO: 37782 - DNA, 17 bp, Arabidopsis thaliana
aggaaagggtaaaattg

SEQ ID NO: 37783 - DNA, 17 bp, Arabidopsis thaliana
aggaaagtcctcgtgtt

SEQ ID NO: 37784 - DNA, 17 bp, Arabidopsis thaliana
aggaaagtgtgcctcta

SEQ ID NO: 37785 - DNA, 17 bp, Arabidopsis thaliana
aggaaagttaggcgccc

SEQ ID NO: 37786 - DNA, 17 bp, Arabidopsis thaliana
aggaaagttcgccaaca

SEQ ID NO: 37787 - DNA, 17 bp, Arabidopsis thaliana
aggaaagttcggcaaga

SEQ ID NO: 37788 - DNA, 17 bp, Arabidopsis thaliana
aggaaatacttactggc

SEQ ID NO: 37789 - DNA, 17 bp, Arabidopsis thaliana
aggaaatagaccgtttt

SEQ ID NO: 37790 - DNA, 17 bp, Arabidopsis thaliana
aggaaataggagtggca

SEQ ID NO: 37791 - DNA, 17 bp, Arabidopsis thaliana
aggaaatagtcctggta

SEQ ID NO: 37792 - DNA, 17 bp, Arabidopsis thaliana
aggaaatcatcttcatt

SEQ ID NO: 37793 - DNA, 17 bp, Arabidopsis thaliana
aggaaatccttgcgggc

SEQ ID NO: 37794 - DNA, 17 bp, Arabidopsis thaliana
aggaaatctcaggtgac

SEQ ID NO: 37795 - DNA, 17 bp, Arabidopsis thaliana
aggaaatcttaggtgac

SEQ ID NO: 37796 - DNA, 17 bp, Arabidopsis thaliana
aggaaatctttgatgac

SEQ ID NO: 37797 - DNA, 17 bp, Arabidopsis thaliana
aggaaatgcggtaattt

SEQ ID NO: 37798 - DNA, 17 bp, Arabidopsis thaliana
aggaaatgcttcgatgc

SEQ ID NO: 37799 - DNA, 17 bp, Arabidopsis thaliana
aggaaatgcttcgttgc

SEQ ID NO: 37800 - DNA, 17 bp, Arabidopsis thaliana
aggaaatggaagagccc

SEQ ID NO: 37801 - DNA, 17 bp, Arabidopsis thaliana
aggaaatgtcgtctctg

SEQ ID NO: 37802 - DNA, 17 bp, Arabidopsis thaliana
aggaaatgtctcaggcg

SEQ ID NO: 37803 - DNA, 17 bp, Arabidopsis thaliana
aggaaatgtgtctttct

SEQ ID NO: 37804 - DNA, 17 bp, Arabidopsis thaliana
aggaaatgtttgatgac

SEQ ID NO: 37805 - DNA, 17 bp, Arabidopsis thaliana
aggaaattacaggcttc

SEQ ID NO: 37806 - DNA, 17 bp, Arabidopsis thaliana
aggaaattacgggcttc

SEQ ID NO: 37807 - DNA, 17 bp, Arabidopsis thaliana
aggaaattaggatcgaa

SEQ ID NO: 37808 - DNA, 17 bp, Arabidopsis thaliana
aggaaattcccgttgga

SEQ ID NO: 37809 - DNA, 17 bp, Arabidopsis thaliana
aggaaattcctgagttt

SEQ ID NO: 37810 - DNA, 17 bp, Arabidopsis thaliana
aggaaattcgttggcga

SEQ ID NO: 37811 - DNA, 17 bp, Arabidopsis thaliana
aggaaattgagctgcag

SEQ ID NO: 37812 - DNA, 17 bp, Arabidopsis thaliana
aggaaattgtgatagtg

SEQ ID NO: 37813 - DNA, 17 bp, Arabidopsis thaliana
aggaaatttccagatct

SEQ ID NO: 37814 - DNA, 17 bp, Arabidopsis thaliana
aggaaatttccattgct

SEQ ID NO: 37815 - DNA, 17 bp, Arabidopsis thaliana
aggaaatttgcagattg

SEQ ID NO: 37816 - DNA, 17 bp, Arabidopsis thaliana
aggaaattttggagatc

SEQ ID NO: 37817 - DNA, 17 bp, Arabidopsis thaliana
aggaacaaacgcacaca

SEQ ID NO: 37818 - DNA, 17 bp, Arabidopsis thaliana
aggaacaagcagccgta

SEQ ID NO: 37819 - DNA, 17 bp, Arabidopsis thaliana
aggaacaatcagttaac

SEQ ID NO: 37820 - DNA, 17 bp, Arabidopsis thaliana
aggaacaattagcttct

SEQ ID NO: 37821 - DNA, 17 bp, Arabidopsis thaliana
aggaacaggatggttct

SEQ ID NO: 37822 - DNA, 17 bp, Arabidopsis thaliana
aggaacaggcctcggta

SEQ ID NO: 37823 - DNA, 17 bp, Arabidopsis thaliana
aggaacagtggcgttac

SEQ ID NO: 37824 - DNA, 17 bp, Arabidopsis thaliana
aggaacatatttagggt

SEQ ID NO: 37825 - DNA, 17 bp, Arabidopsis thaliana
aggaacatcaacgcagc

SEQ ID NO: 37826 - DNA, 17 bp, Arabidopsis thaliana
aggaacatccgggatgt

SEQ ID NO: 37827 - DNA, 17 bp, Arabidopsis thaliana
aggaacatctcacagta

SEQ ID NO: 37828 - DNA, 17 bp, Arabidopsis thaliana
aggaacattgtgtgcaa

SEQ ID NO: 37829 - DNA, 17 bp, Arabidopsis thaliana
aggaaccaaggtttgaa

SEQ ID NO: 37830 - DNA, 17 bp, Arabidopsis thaliana
aggaaccagaagcttca

SEQ ID NO: 37831 - DNA, 17 bp, Arabidopsis thaliana
aggaaccagaggaggaa

SEQ ID NO: 37832 - DNA, 17 bp, Arabidopsis thaliana
aggaaccatcttctgct

SEQ ID NO: 37833 - DNA, 17 bp, Arabidopsis thaliana
aggaaccattgggcgtg

SEQ ID NO: 37834 - DNA, 17 bp, Arabidopsis thaliana
aggaaccccatggtagc

SEQ ID NO: 37835 - DNA, 17 bp, Arabidopsis thaliana
aggaaccccgtcactga

SEQ ID NO: 37836 - DNA, 17 bp, Arabidopsis thaliana
aggaacccttgactgat

SEQ ID NO: 37837 - DNA, 17 bp, Arabidopsis thaliana
aggaaccgaccaacgtt

SEQ ID NO: 37838 - DNA, 17 bp, Arabidopsis thaliana
aggaaccgacgtgctta

SEQ ID NO: 37839 - DNA, 17 bp, Arabidopsis thaliana
aggaaccgactcggccc

SEQ ID NO: 37840 - DNA, 17 bp, Arabidopsis thaliana
aggaaccgactctgccc

SEQ ID NO: 37841 - DNA, 17 bp, Arabidopsis thaliana
aggaaccgacttgctta

SEQ ID NO: 37842 - DNA, 17 bp, Arabidopsis thaliana
aggaaccgttgattcgc

SEQ ID NO: 37843 - DNA, 17 bp, Arabidopsis thaliana
aggaacctgcggaagaa

SEQ ID NO: 37844 - DNA, 17 bp, Arabidopsis thaliana
aggaacctgcggaagga

SEQ ID NO: 37845 - DNA, 17 bp, Arabidopsis thaliana
aggaacctgtggctgga

SEQ ID NO: 37846 - DNA, 17 bp, Arabidopsis thaliana
aggaacctttttccggg

SEQ ID NO: 37847 - DNA, 17 bp, Arabidopsis thaliana
aggaacctttttccgtg

SEQ ID NO: 37848 - DNA, 17 bp, Arabidopsis thaliana
aggaacgagaatgacgc

SEQ ID NO: 37849 - DNA, 17 bp, Arabidopsis thaliana
aggaacgagatctcagg

SEQ ID NO: 37850 - DNA, 17 bp, Arabidopsis thaliana
aggaacgatcacgacgg

SEQ ID NO: 37851 - DNA, 17 bp, Arabidopsis thaliana
aggaacgcaacgaaata

SEQ ID NO: 37852 - DNA, 17 bp, Arabidopsis thaliana
aggaacgcaccaaggtg

SEQ ID NO: 37853 - DNA, 17 bp, Arabidopsis thaliana
aggaacggcatggacta

SEQ ID NO: 37854 - DNA, 17 bp, Arabidopsis thaliana
aggaacggcctaggaga

SEQ ID NO: 37855 - DNA, 17 bp, Arabidopsis thaliana
aggaacggcttctctta

SEQ ID NO: 37856 - DNA, 17 bp, Arabidopsis thaliana
aggaacgtgatggtggc

SEQ ID NO: 37857 - DNA, 17 bp, Arabidopsis thaliana
aggaactagataaggcc

SEQ ID NO: 37858 - DNA, 17 bp, Arabidopsis thaliana
aggaactagggtttaac

SEQ ID NO: 37859 - DNA, 17 bp, Arabidopsis thaliana
aggaactatagctaatc

SEQ ID NO: 37860 - DNA, 17 bp, Arabidopsis thaliana
aggaactatcgggacct

SEQ ID NO: 37861 - DNA, 17 bp, Arabidopsis thaliana
aggaactattgggacct

SEQ ID NO: 37862 - DNA, 17 bp, Arabidopsis thaliana
aggaactcctaggattt

SEQ ID NO: 37863 - DNA, 17 bp, Arabidopsis thaliana
aggaactgactggaggc

SEQ ID NO: 37864 - DNA, 17 bp, Arabidopsis thaliana
aggaactgagacttccg

SEQ ID NO: 37865 - DNA, 17 bp, Arabidopsis thaliana
aggaactgaggcacagg

SEQ ID NO: 37866 - DNA, 17 bp, Arabidopsis thaliana
aggaactgaggcacggg

SEQ ID NO: 37867 - DNA, 17 bp, Arabidopsis thaliana
aggaactgattgaccgt

SEQ ID NO: 37868 - DNA, 17 bp, Arabidopsis thaliana
aggaactgcgtttccga

SEQ ID NO: 37869 - DNA, 17 bp, Arabidopsis thaliana
aggaactgctgcgagtt

SEQ ID NO: 37870 - DNA, 17 bp, Arabidopsis thaliana
aggaactggaacgagac

SEQ ID NO: 37871 - DNA, 17 bp, Arabidopsis thaliana
aggaacttagacggaca

SEQ ID NO: 37872 - DNA, 17 bp, Arabidopsis thaliana
aggaacttgggtcggat

SEQ ID NO: 37873 - DNA, 17 bp, Arabidopsis thaliana
aggaacttttgattggt

SEQ ID NO: 37874 - DNA, 17 bp, Arabidopsis thaliana
aggaagaatttgacctc

SEQ ID NO: 37875 - DNA, 17 bp, Arabidopsis thaliana
aggaagaatttgcctaa

SEQ ID NO: 37876 - DNA, 17 bp, Arabidopsis thaliana
aggaagacaaggctttt

SEQ ID NO: 37877 - DNA, 17 bp, Arabidopsis thaliana
aggaagaccaagtgtcg

SEQ ID NO: 37878 - DNA, 17 bp, Arabidopsis thaliana
aggaagacccagtatct

SEQ ID NO: 37879 - DNA, 17 bp, Arabidopsis thaliana
aggaagaccgcctacta

SEQ ID NO: 37880 - DNA, 17 bp, Arabidopsis thaliana
aggaagaccttagaggg

SEQ ID NO: 37881 - DNA, 17 bp, Arabidopsis thaliana
aggaagactctaaagtg

SEQ ID NO: 37882 - DNA, 17 bp, Arabidopsis thaliana
aggaagagtcattcggg

SEQ ID NO: 37883 - DNA, 17 bp, Arabidopsis thaliana
aggaagatagtttgcgt

SEQ ID NO: 37884 - DNA, 17 bp, Arabidopsis thaliana
aggaagatatgcaaaac

SEQ ID NO: 37885 - DNA, 17 bp, Arabidopsis thaliana
aggaagatcacaaattg

SEQ ID NO: 37886 - DNA, 17 bp, Arabidopsis thaliana
aggaagatggcggaatt

SEQ ID NO: 37887 - DNA, 17 bp, Arabidopsis thaliana
aggaagattatcctcct

SEQ ID NO: 37888 - DNA, 17 bp, Arabidopsis thaliana
aggaagattgaatttgt

SEQ ID NO: 37889 - DNA, 17 bp, Arabidopsis thaliana
aggaagattgctacgta

SEQ ID NO: 37890 - DNA, 17 bp, Arabidopsis thaliana
aggaagcaaaaccccgg

SEQ ID NO: 37891 - DNA, 17 bp, Arabidopsis thaliana
aggaagccaagaccccg

SEQ ID NO: 37892 - DNA, 17 bp, Arabidopsis thaliana
aggaagccgacccgcag

SEQ ID NO: 37893 - DNA, 17 bp, Arabidopsis thaliana
aggaagcctgcagtgcg

SEQ ID NO: 37894 - DNA, 17 bp, Arabidopsis thaliana
aggaagcgaatgatgat

SEQ ID NO: 37895 - DNA, 17 bp, Arabidopsis thaliana
aggaagcgacttcctta

SEQ ID NO: 37896 - DNA, 17 bp, Arabidopsis thaliana
aggaagcgttgcgaggg

SEQ ID NO: 37897 - DNA, 17 bp, Arabidopsis thaliana
aggaagctccgatggtc

SEQ ID NO: 37898 - DNA, 17 bp, Arabidopsis thaliana
aggaagctctataaacg

SEQ ID NO: 37899 - DNA, 17 bp, Arabidopsis thaliana
aggaagctgattggcgg

SEQ ID NO: 37900 - DNA, 17 bp, Arabidopsis thaliana
aggaagctggaccgatc

SEQ ID NO: 37901 - DNA, 17 bp, Arabidopsis thaliana
aggaagcttatactcgg

SEQ ID NO: 37902 - DNA, 17 bp, Arabidopsis thaliana
aggaagcttcatcttta

SEQ ID NO: 37903 - DNA, 17 bp, Arabidopsis thaliana
aggaagctttaggcgag

SEQ ID NO: 37904 - DNA, 17 bp, Arabidopsis thaliana
aggaaggaagttctact

SEQ ID NO: 37905 - DNA, 17 bp, Arabidopsis thaliana
aggaaggaagttttgtg

SEQ ID NO: 37906 - DNA, 17 bp, Arabidopsis thaliana
aggaaggaccactggac

SEQ ID NO: 37907 - DNA, 17 bp, Arabidopsis thaliana
aggaaggacctgtgtgc

SEQ ID NO: 37908 - DNA, 17 bp, Arabidopsis thaliana
aggaaggagtgacattc

SEQ ID NO: 37909 - DNA, 17 bp, Arabidopsis thaliana
aggaaggatttcgggct

SEQ ID NO: 37910 - DNA, 17 bp, Arabidopsis thaliana
aggaaggcgaccgaaga

SEQ ID NO: 37911 - DNA, 17 bp, Arabidopsis thaliana
aggaaggctaaccgtct

SEQ ID NO: 37912 - DNA, 17 bp, Arabidopsis thaliana
aggaaggctaagcctag

SEQ ID NO: 37913 - DNA, 17 bp, Arabidopsis thaliana
aggaaggctcgtccgct

SEQ ID NO: 37914 - DNA, 17 bp, Arabidopsis thaliana
aggaaggggcggagcca

SEQ ID NO: 37915 - DNA, 17 bp, Arabidopsis thaliana
aggaagggtgacctccc

SEQ ID NO: 37916 - DNA, 17 bp, Arabidopsis thaliana
aggaagggttgcgaggg

SEQ ID NO: 37917 - DNA, 17 bp, Arabidopsis thaliana
aggaaggtgaggatgac

SEQ ID NO: 37918 - DNA, 17 bp, Arabidopsis thaliana
aggaaggtgatataccc

SEQ ID NO: 37919 - DNA, 17 bp, Arabidopsis thaliana
aggaaggtgctgcagac

SEQ ID NO: 37920 - DNA, 17 bp, Arabidopsis thaliana
aggaagtcaagactcac

SEQ ID NO: 37921 - DNA, 17 bp, Arabidopsis thaliana
aggaagtcaagactcat

SEQ ID NO: 37922 - DNA, 17 bp, Arabidopsis thaliana
aggaagtcccatgccta

SEQ ID NO: 37923 - DNA, 17 bp, Arabidopsis thaliana
aggaagtcccatggtta

SEQ ID NO: 37924 - DNA, 17 bp, Arabidopsis thaliana
aggaagtcgccaaaatc

SEQ ID NO: 37925 - DNA, 17 bp, Arabidopsis thaliana
aggaagtcggctaggcg

SEQ ID NO: 37926 - DNA, 17 bp, Arabidopsis thaliana
aggaagtcggctgggcg

SEQ ID NO: 37927 - DNA, 17 bp, Arabidopsis thaliana
aggaagtctgtcaattg

SEQ ID NO: 37928 - DNA, 17 bp, Arabidopsis thaliana
aggaagtctgtcagttg

SEQ ID NO: 37929 - DNA, 17 bp, Arabidopsis thaliana
aggaagtgctacttgga

SEQ ID NO: 37930 - DNA, 17 bp, Arabidopsis thaliana
aggaagtgtcgtctgtc

SEQ ID NO: 37931 - DNA, 17 bp, Arabidopsis thaliana
aggaagtgttcatctat

SEQ ID NO: 37932 - DNA, 17 bp, Arabidopsis thaliana
aggaagtgttcatctcg

SEQ ID NO: 37933 - DNA, 17 bp, Arabidopsis thaliana
aggaagtgtttgcctgg

SEQ ID NO: 37934 - DNA, 17 bp, Arabidopsis thaliana
aggaagttccatgtcta

SEQ ID NO: 37935 - DNA, 17 bp, Arabidopsis thaliana
aggaagttctactcgac

SEQ ID NO: 37936 - DNA, 17 bp, Arabidopsis thaliana
aggaagttctgcgccga

SEQ ID NO: 37937 - DNA, 17 bp, Arabidopsis thaliana
aggaagttctggatcga

SEQ ID NO: 37938 - DNA, 17 bp, Arabidopsis thaliana
aggaagttctgggccaa

SEQ ID NO: 37939 - DNA, 17 bp, Arabidopsis thaliana
aggaagttctgggccga

SEQ ID NO: 37940 - DNA, 17 bp, Arabidopsis thaliana
aggaagttgtccttggc

SEQ ID NO: 37941 - DNA, 17 bp, Arabidopsis thaliana
aggaagttttgtgccga

SEQ ID NO: 37942 - DNA, 17 bp, Arabidopsis thaliana
aggaataatcctcgagg

SEQ ID NO: 37943 - DNA, 17 bp, Arabidopsis thaliana
aggaataatggctctgt

SEQ ID NO: 37944 - DNA, 17 bp, Arabidopsis thaliana
aggaatacatcacggtc

SEQ ID NO: 37945 - DNA, 17 bp, Arabidopsis thaliana
aggaataggattagcgt

SEQ ID NO: 37946 - DNA, 17 bp, Arabidopsis thaliana
aggaataggatttgcgt

SEQ ID NO: 37947 - DNA, 17 bp, Arabidopsis thaliana
aggaatagtgtgggatc

SEQ ID NO: 37948 - DNA, 17 bp, Arabidopsis thaliana
aggaatatccactgatc

SEQ ID NO: 37949 - DNA, 17 bp, Arabidopsis thaliana
aggaatatccatcacgg

SEQ ID NO: 37950 - DNA, 17 bp, Arabidopsis thaliana
aggaatatcggtcttgt

SEQ ID NO: 37951 - DNA, 17 bp, Arabidopsis thaliana
aggaatatctctgcggt

SEQ ID NO: 37952 - DNA, 17 bp, Arabidopsis thaliana
aggaatatgcggggatg

SEQ ID NO: 37953 - DNA, 17 bp, Arabidopsis thaliana
aggaatatgtggcagat

SEQ ID NO: 37954 - DNA, 17 bp, Arabidopsis thaliana
aggaatattgttcgact

SEQ ID NO: 37955 - DNA, 17 bp, Arabidopsis thaliana
aggaatattttacctcg

SEQ ID NO: 37956 - DNA, 17 bp, Arabidopsis thaliana
aggaatcaaactcataa

SEQ ID NO: 37957 - DNA, 17 bp, Arabidopsis thaliana
aggaatcaacgactgac

SEQ ID NO: 37958 - DNA, 17 bp, Arabidopsis thaliana
aggaatcaacggatgtc

SEQ ID NO: 37959 - DNA, 17 bp, Arabidopsis thaliana
aggaatcaacggctgac

SEQ ID NO: 37960 - DNA, 17 bp, Arabidopsis thaliana
aggaatcaactacttag

SEQ ID NO: 37961 - DNA, 17 bp, Arabidopsis thaliana
aggaatcaactacttgg

SEQ ID NO: 37962 - DNA, 17 bp, Arabidopsis thaliana
aggaatcaggcccaaca

SEQ ID NO: 37963 - DNA, 17 bp, Arabidopsis thaliana
aggaatcaggtggatca

SEQ ID NO: 37964 - DNA, 17 bp, Arabidopsis thaliana
aggaatcagttgcagga

SEQ ID NO: 37965 - DNA, 17 bp, Arabidopsis thaliana
aggaatccataggaatc

SEQ ID NO: 37966 - DNA, 17 bp, Arabidopsis thaliana
aggaatccatgtgtgga

SEQ ID NO: 37967 - DNA, 17 bp, Arabidopsis thaliana
aggaatccatgtgtggt

SEQ ID NO: 37968 - DNA, 17 bp, Arabidopsis thaliana
aggaatccgaggatggg

SEQ ID NO: 37969 - DNA, 17 bp, Arabidopsis thaliana
aggaatccgcccgagga

SEQ ID NO: 37970 - DNA, 17 bp, Arabidopsis thaliana
aggaatccggaggaccg

SEQ ID NO: 37971 - DNA, 17 bp, Arabidopsis thaliana
aggaatccgtgattcgg

SEQ ID NO: 37972 - DNA, 17 bp, Arabidopsis thaliana
aggaatccttggacaat

SEQ ID NO: 37973 - DNA, 17 bp, Arabidopsis thaliana
aggaatcgtcgaccagg

SEQ ID NO: 37974 - DNA, 17 bp, Arabidopsis thaliana
aggaatcgtcgaccgga

SEQ ID NO: 37975 - DNA, 17 bp, Arabidopsis thaliana
aggaatcgtcgaccggg

SEQ ID NO: 37976 - DNA, 17 bp, Arabidopsis thaliana
aggaatctcggcggcct

SEQ ID NO: 37977 - DNA, 17 bp, Arabidopsis thaliana
aggaatctgtcacggtg

SEQ ID NO: 37978 - DNA, 17 bp, Arabidopsis thaliana
aggaatcttctcattaa

SEQ ID NO: 37979 - DNA, 17 bp, Arabidopsis thaliana
aggaatcttctgcttgg

SEQ ID NO: 37980 - DNA, 17 bp, Arabidopsis thaliana
aggaatgaaaatttttg

SEQ ID NO: 37981 - DNA, 17 bp, Arabidopsis thaliana
aggaatgaagcctgcgg

SEQ ID NO: 37982 - DNA, 17 bp, Arabidopsis thaliana
aggaatgaatctcaacg

SEQ ID NO: 37983 - DNA, 17 bp, Arabidopsis thaliana
aggaatgaccgaccgtc

SEQ ID NO: 37984 - DNA, 17 bp, Arabidopsis thaliana
aggaatgacgaaaagtg

SEQ ID NO: 37985 - DNA, 17 bp, Arabidopsis thaliana
aggaatgacgaagagtg

SEQ ID NO: 37986 - DNA, 17 bp, Arabidopsis thaliana
aggaatgacgagaagtg

SEQ ID NO: 37987 - DNA, 17 bp, Arabidopsis thaliana
aggaatgactttccaat

SEQ ID NO: 37988 - DNA, 17 bp, Arabidopsis thaliana
aggaatgatcggccaat

SEQ ID NO: 37989 - DNA, 17 bp, Arabidopsis thaliana
aggaatgcagacctctg

SEQ ID NO: 37990 - DNA, 17 bp, Arabidopsis thaliana
aggaatgccattttctc

SEQ ID NO: 37991 - DNA, 17 bp, Arabidopsis thaliana
aggaatgccctttcaaa

SEQ ID NO: 37992 - DNA, 17 bp, Arabidopsis thaliana
aggaatgcgtcatgatt

SEQ ID NO: 37993 - DNA, 17 bp, Arabidopsis thaliana
aggaatggagcctgcgg

SEQ ID NO: 37994 - DNA, 17 bp, Arabidopsis thaliana
aggaatggcaatagcgg

SEQ ID NO: 37995 - DNA, 17 bp, Arabidopsis thaliana
aggaatggtagtgttga

SEQ ID NO: 37996 - DNA, 17 bp, Arabidopsis thaliana
aggaatgtagcgcagct

SEQ ID NO: 37997 - DNA, 17 bp, Arabidopsis thaliana
aggaatgtcactcttct

SEQ ID NO: 37998 - DNA, 17 bp, Arabidopsis thaliana
aggaatgtcaggatttg

SEQ ID NO: 37999 - DNA, 17 bp, Arabidopsis thaliana
aggaatgtccgttttgc

SEQ ID NO: 38000 - DNA, 17 bp, Arabidopsis thaliana
aggaatgtccttatgcg

SEQ ID NO: 38001 - DNA, 17 bp, Arabidopsis thaliana
aggaatgtcgatccatc

SEQ ID NO: 38002 - DNA, 17 bp, Arabidopsis thaliana
aggaattacggggtccc

SEQ ID NO: 38003 - DNA, 17 bp, Arabidopsis thaliana
aggaattacggggttcg

SEQ ID NO: 38004 - DNA, 17 bp, Arabidopsis thaliana
aggaattagtctggact

SEQ ID NO: 38005 - DNA, 17 bp, Arabidopsis thaliana
aggaattatggggttcg

SEQ ID NO: 38006 - DNA, 17 bp, Arabidopsis thaliana
aggaattcctactaacc

SEQ ID NO: 38007 - DNA, 17 bp, Arabidopsis thaliana
aggaattgacgggggcc

SEQ ID NO: 38008 - DNA, 17 bp, Arabidopsis thaliana
aggaattgatcagcgat

SEQ ID NO: 38009 - DNA, 17 bp, Arabidopsis thaliana
aggaattgtccgtagca

SEQ ID NO: 38010 - DNA, 17 bp, Arabidopsis thaliana
aggaattgtccgtagta

SEQ ID NO: 38011 - DNA, 17 bp, Arabidopsis thaliana
aggaattgtccgttgta

SEQ ID NO: 38012 - DNA, 17 bp, Arabidopsis thaliana
aggaattgtcgctaatg

SEQ ID NO: 38013 - DNA, 17 bp, Arabidopsis thaliana
aggaattgtgcgtagta

SEQ ID NO: 38014 - DNA, 17 bp, Arabidopsis thaliana
aggaatttgcgagagtg

SEQ ID NO: 38015 - DNA, 17 bp, Arabidopsis thaliana
aggaatttgtttgttgg

SEQ ID NO: 38016 - DNA, 17 bp, Arabidopsis thaliana
aggaattttgaccgtcc

SEQ ID NO: 38017 - DNA, 17 bp, Arabidopsis thaliana
aggaatttttccaagaa

SEQ ID NO: 38018 - DNA, 17 bp, Arabidopsis thaliana
aggacaaaaagcctaga

SEQ ID NO: 38019 - DNA, 17 bp, Arabidopsis thaliana
aggacaaaaccgtagct

SEQ ID NO: 38020 - DNA, 17 bp, Arabidopsis thaliana
aggacaaaactcatcct

SEQ ID NO: 38021 - DNA, 17 bp, Arabidopsis thaliana
aggacaaacagacagag

SEQ ID NO: 38022 - DNA, 17 bp, Arabidopsis thaliana
aggacaaagcattgcga

SEQ ID NO: 38023 - DNA, 17 bp, Arabidopsis thaliana
aggacaaagtagatttt

SEQ ID NO: 38024 - DNA, 17 bp, Arabidopsis thaliana
aggacaaagtggtttgg

SEQ ID NO: 38025 - DNA, 17 bp, Arabidopsis thaliana
aggacaaagtgtgttgg

SEQ ID NO: 38026 - DNA, 17 bp, Arabidopsis thaliana
aggacaaagtgttttgg

SEQ ID NO: 38027 - DNA, 17 bp, Arabidopsis thaliana
aggacaaatggcaatga

SEQ ID NO: 38028 - DNA, 17 bp, Arabidopsis thaliana
aggacaaatggcatatg

SEQ ID NO: 38029 - DNA, 17 bp, Arabidopsis thaliana
aggacaaattaatgtcg

SEQ ID NO: 38030 - DNA, 17 bp, Arabidopsis thaliana
aggacaacggaagtatg

SEQ ID NO: 38031 - DNA, 17 bp, Arabidopsis thaliana
aggacaacggatcctga

SEQ ID NO: 38032 - DNA, 17 bp, Arabidopsis thaliana
aggacaagaatatgacc

SEQ ID NO: 38033 - DNA, 17 bp, Arabidopsis thaliana
aggacaagataacctgc

SEQ ID NO: 38034 - DNA, 17 bp, Arabidopsis thaliana
aggacaagattgtcatt

SEQ ID NO: 38035 - DNA, 17 bp, Arabidopsis thaliana
aggacaagccagggttt

SEQ ID NO: 38036 - DNA, 17 bp, Arabidopsis thaliana
aggacaagcggggattg

SEQ ID NO: 38037 - DNA, 17 bp, Arabidopsis thaliana
aggacaagctgatcgcc

SEQ ID NO: 38038 - DNA, 17 bp, Arabidopsis thaliana
aggacaaggattatgct

SEQ ID NO: 38039 - DNA, 17 bp, Arabidopsis thaliana
aggacaaggcgatcttc

SEQ ID NO: 38040 - DNA, 17 bp, Arabidopsis thaliana
aggacaagtcctgctcc

SEQ ID NO: 38041 - DNA, 17 bp, Arabidopsis thaliana
aggacaatccgcatctt

SEQ ID NO: 38042 - DNA, 17 bp, Arabidopsis thaliana
aggacaatcgttccacg

SEQ ID NO: 38043 - DNA, 17 bp, Arabidopsis thaliana
aggacaatctgtgacgg

SEQ ID NO: 38044 - DNA, 17 bp, Arabidopsis thaliana
aggacaatcttggctta

SEQ ID NO: 38045 - DNA, 17 bp, Arabidopsis thaliana
aggacaatggatatcat

SEQ ID NO: 38046 - DNA, 17 bp, Arabidopsis thaliana
aggacaattcggcctga

SEQ ID NO: 38047 - DNA, 17 bp, Arabidopsis thaliana
aggacaattggtgacag

SEQ ID NO: 38048 - DNA, 17 bp, Arabidopsis thaliana
aggacaatttcaagcac

SEQ ID NO: 38049 - DNA, 17 bp, Arabidopsis thaliana
aggacaattttgcctga

SEQ ID NO: 38050 - DNA, 17 bp, Arabidopsis thaliana
aggacacaagtggaact

SEQ ID NO: 38051 - DNA, 17 bp, Arabidopsis thaliana
aggacacacctcgtcag

SEQ ID NO: 38052 - DNA, 17 bp, Arabidopsis thaliana
aggacacacggtaactg

SEQ ID NO: 38053 - DNA, 17 bp, Arabidopsis thaliana
aggacacagaaacgaac

SEQ ID NO: 38054 - DNA, 17 bp, Arabidopsis thaliana
aggacaccgctaaagga

SEQ ID NO: 38055 - DNA, 17 bp, Arabidopsis thaliana
aggacaccgcttagggg

SEQ ID NO: 38056 - DNA, 17 bp, Arabidopsis thaliana
aggacaccgttatgctg

SEQ ID NO: 38057 - DNA, 17 bp, Arabidopsis thaliana
aggacacctttttccac

SEQ ID NO: 38058 - DNA, 17 bp, Arabidopsis thaliana
aggacacgaggcaagta

SEQ ID NO: 38059 - DNA, 17 bp, Arabidopsis thaliana
aggacacggaactggcc

SEQ ID NO: 38060 - DNA, 17 bp, Arabidopsis thaliana
aggacacgtctgcctag

SEQ ID NO: 38061 - DNA, 17 bp, Arabidopsis thaliana
aggacacgtctgcctgg

SEQ ID NO: 38062 - DNA, 17 bp, Arabidopsis thaliana
aggacactgtgaagtat

SEQ ID NO: 38063 - DNA, 17 bp, Arabidopsis thaliana
aggacactgttatgctg

SEQ ID NO: 38064 - DNA, 17 bp, Arabidopsis thaliana
aggacagaagaaactac

SEQ ID NO: 38065 - DNA, 17 bp, Arabidopsis thaliana
aggacagaagccggagc

SEQ ID NO: 38066 - DNA, 17 bp, Arabidopsis thaliana
aggacagaagttgccaa

SEQ ID NO: 38067 - DNA, 17 bp, Arabidopsis thaliana
aggacagacagtgtggt

SEQ ID NO: 38068 - DNA, 17 bp, Arabidopsis thaliana
aggacagaccagaagga

SEQ ID NO: 38069 - DNA, 17 bp, Arabidopsis thaliana
aggacagaccgtcggtt

SEQ ID NO: 38070 - DNA, 17 bp, Arabidopsis thaliana
aggacagcagtcagttc

SEQ ID NO: 38071 - DNA, 17 bp, Arabidopsis thaliana
aggacagctcaatacag

SEQ ID NO: 38072 - DNA, 17 bp, Arabidopsis thaliana
aggacagctcagttttt

SEQ ID NO: 38073 - DNA, 17 bp, Arabidopsis thaliana
aggacagctgcacccga

SEQ ID NO: 38074 - DNA, 17 bp, Arabidopsis thaliana
aggacaggaagttgagc

SEQ ID NO: 38075 - DNA, 17 bp, Arabidopsis thaliana
aggacaggcctcgtgtt

SEQ ID NO: 38076 - DNA, 17 bp, Arabidopsis thaliana
aggacaggtcgagttgg

SEQ ID NO: 38077 - DNA, 17 bp, Arabidopsis thaliana
aggacaggtgtcagctc

SEQ ID NO: 38078 - DNA, 17 bp, Arabidopsis thaliana
aggacaggtttgcggga

SEQ ID NO: 38079 - DNA, 17 bp, Arabidopsis thaliana
aggacaggtttggcagg

SEQ ID NO: 38080 - DNA, 17 bp, Arabidopsis thaliana
aggacaggtttggcggg

SEQ ID NO: 38081 - DNA, 17 bp, Arabidopsis thaliana
aggacaggtttgggtcg

SEQ ID NO: 38082 - DNA, 17 bp, Arabidopsis thaliana
aggacaggttttgcggg

SEQ ID NO: 38083 - DNA, 17 bp, Arabidopsis thaliana
aggacagtgatgtcttt

SEQ ID NO: 38084 - DNA, 17 bp, Arabidopsis thaliana
aggacagtgatgttttt

SEQ ID NO: 38085 - DNA, 17 bp, Arabidopsis thaliana
aggacagttgggcaggg

SEQ ID NO: 38086 - DNA, 17 bp, Arabidopsis thaliana
aggacataaagtggtga

SEQ ID NO: 38087 - DNA, 17 bp, Arabidopsis thaliana
aggacatcaagtcatat

SEQ ID NO: 38088 - DNA, 17 bp, Arabidopsis thaliana
aggacatcaccactgat

SEQ ID NO: 38089 - DNA, 17 bp, Arabidopsis thaliana
aggacatcagatcgccc

SEQ ID NO: 38090 - DNA, 17 bp, Arabidopsis thaliana
aggacatcattcttctc

SEQ ID NO: 38091 - DNA, 17 bp, Arabidopsis thaliana
aggacatccagttgact

SEQ ID NO: 38092 - DNA, 17 bp, Arabidopsis thaliana
aggacatccctgatttg

SEQ ID NO: 38093 - DNA, 17 bp, Arabidopsis thaliana
aggacatccgtggtgct

SEQ ID NO: 38094 - DNA, 17 bp, Arabidopsis thaliana
aggacatcggaagttga

SEQ ID NO: 38095 - DNA, 17 bp, Arabidopsis thaliana
aggacatcgtcctattt

SEQ ID NO: 38096 - DNA, 17 bp, Arabidopsis thaliana
aggacatctccaatcgg

SEQ ID NO: 38097 - DNA, 17 bp, Arabidopsis thaliana
aggacatctccaatggt

SEQ ID NO: 38098 - DNA, 17 bp, Arabidopsis thaliana
aggacatctctaactct

SEQ ID NO: 38099 - DNA, 17 bp, Arabidopsis thaliana
aggacatgacgcagttt

SEQ ID NO: 38100 - DNA, 17 bp, Arabidopsis thaliana
aggacatgggcgtcagc

SEQ ID NO: 38101 - DNA, 17 bp, Arabidopsis thaliana
aggacatgtcggctgct

SEQ ID NO: 38102 - DNA, 17 bp, Arabidopsis thaliana
aggacatgtctcaagat

SEQ ID NO: 38103 - DNA, 17 bp, Arabidopsis thaliana
aggacattaggctgagg

SEQ ID NO: 38104 - DNA, 17 bp, Arabidopsis thaliana
aggacattcaggcaggg

SEQ ID NO: 38105 - DNA, 17 bp, Arabidopsis thaliana
aggacattcctacatgg

SEQ ID NO: 38106 - DNA, 17 bp, Arabidopsis thaliana
aggacattcgggtgtgc

SEQ ID NO: 38107 - DNA, 17 bp, Arabidopsis thaliana
aggacattctcgggtga

SEQ ID NO: 38108 - DNA, 17 bp, Arabidopsis thaliana
aggacattctggttagg

SEQ ID NO: 38109 - DNA, 17 bp, Arabidopsis thaliana
aggacattgtcaggtag

SEQ ID NO: 38110 - DNA, 17 bp, Arabidopsis thaliana
aggacattgtcaggtgg

SEQ ID NO: 38111 - DNA, 17 bp, Arabidopsis thaliana
aggacattgtcatcagt

SEQ ID NO: 38112 - DNA, 17 bp, Arabidopsis thaliana
aggacatttggccttga

SEQ ID NO: 38113 - DNA, 17 bp, Arabidopsis thaliana
aggacatttggcggtac

SEQ ID NO: 38114 - DNA, 17 bp, Arabidopsis thaliana
aggacatttggtggtac

SEQ ID NO: 38115 - DNA, 17 bp, Arabidopsis thaliana
aggaccaaaacctctcc

SEQ ID NO: 38116 - DNA, 17 bp, Arabidopsis thaliana
aggaccaaaagtggtgg

SEQ ID NO: 38117 - DNA, 17 bp, Arabidopsis thaliana
aggaccaaagcccaact

SEQ ID NO: 38118 - DNA, 17 bp, Arabidopsis thaliana
aggaccaaatatgacgg

SEQ ID NO: 38119 - DNA, 17 bp, Arabidopsis thaliana
aggaccaacacactgac

SEQ ID NO: 38120 - DNA, 17 bp, Arabidopsis thaliana
aggaccaacacactgcc

SEQ ID NO: 38121 - DNA, 17 bp, Arabidopsis thaliana
aggaccaacacactgtc

SEQ ID NO: 38122 - DNA, 17 bp, Arabidopsis thaliana
aggaccaacttcttcat

SEQ ID NO: 38123 - DNA, 17 bp, Arabidopsis thaliana
aggaccaagtggaaatt

SEQ ID NO: 38124 - DNA, 17 bp, Arabidopsis thaliana
aggaccaatggtccctc

SEQ ID NO: 38125 - DNA, 17 bp, Arabidopsis thaliana
aggaccacaacaactag

SEQ ID NO: 38126 - DNA, 17 bp, Arabidopsis thaliana
aggaccaccacactgac

SEQ ID NO: 38127 - DNA, 17 bp, Arabidopsis thaliana
aggaccaccacactgcc

SEQ ID NO: 38128 - DNA, 17 bp, Arabidopsis thaliana
aggaccaccacactgtc

SEQ ID NO: 38129 - DNA, 17 bp, Arabidopsis thaliana
aggaccaccacattgtc

SEQ ID NO: 38130 - DNA, 17 bp, Arabidopsis thaliana
aggaccacccgtcacct

SEQ ID NO: 38131 - DNA, 17 bp, Arabidopsis thaliana
aggaccaccttgcaagg

SEQ ID NO: 38132 - DNA, 17 bp, Arabidopsis thaliana
aggaccacgttgagatg

SEQ ID NO: 38133 - DNA, 17 bp, Arabidopsis thaliana
aggaccactcctttttc

SEQ ID NO: 38134 - DNA, 17 bp, Arabidopsis thaliana
aggaccactgaattcag

SEQ ID NO: 38135 - DNA, 17 bp, Arabidopsis thaliana
aggaccacttacagagt

SEQ ID NO: 38136 - DNA, 17 bp, Arabidopsis thaliana
aggaccacttgatctgc

SEQ ID NO: 38137 - DNA, 17 bp, Arabidopsis thaliana
aggaccagaatcgttag

SEQ ID NO: 38138 - DNA, 17 bp, Arabidopsis thaliana
aggaccagacactttgc

SEQ ID NO: 38139 - DNA, 17 bp, Arabidopsis thaliana
aggaccagagctacgga

SEQ ID NO: 38140 - DNA, 17 bp, Arabidopsis thaliana
aggaccagatagttcag

SEQ ID NO: 38141 - DNA, 17 bp, Arabidopsis thaliana
aggaccagattagtggc

SEQ ID NO: 38142 - DNA, 17 bp, Arabidopsis thaliana
aggaccagattcgagcg

SEQ ID NO: 38143 - DNA, 17 bp, Arabidopsis thaliana
aggaccagcagggattg

SEQ ID NO: 38144 - DNA, 17 bp, Arabidopsis thaliana
aggaccagcggaaattg

SEQ ID NO: 38145 - DNA, 17 bp, Arabidopsis thaliana
aggaccagcggggattg

SEQ ID NO: 38146 - DNA, 17 bp, Arabidopsis thaliana
aggaccagctcaaggat

SEQ ID NO: 38147 - DNA, 17 bp, Arabidopsis thaliana
aggaccagctccgttca

SEQ ID NO: 38148 - DNA, 17 bp, Arabidopsis thaliana
aggaccaggaggttcgg

SEQ ID NO: 38149 - DNA, 17 bp, Arabidopsis thaliana
aggaccaggtgaaaatt

SEQ ID NO: 38150 - DNA, 17 bp, Arabidopsis thaliana
aggaccaggtggaaatt

SEQ ID NO: 38151 - DNA, 17 bp, Arabidopsis thaliana
aggaccagttgaggagg

SEQ ID NO: 38152 - DNA, 17 bp, Arabidopsis thaliana
aggaccatgtgcttggc

SEQ ID NO: 38153 - DNA, 17 bp, Arabidopsis thaliana
aggaccattgcggttgt

SEQ ID NO: 38154 - DNA, 17 bp, Arabidopsis thaliana
aggaccattgcgtttgt

SEQ ID NO: 38155 - DNA, 17 bp, Arabidopsis thaliana
aggaccattgggcgtgt

SEQ ID NO: 38156 - DNA, 17 bp, Arabidopsis thaliana
aggacccaaccaacgct

SEQ ID NO: 38157 - DNA, 17 bp, Arabidopsis thaliana
aggacccagatgtctga

SEQ ID NO: 38158 - DNA, 17 bp, Arabidopsis thaliana
aggacccatcggctgtc

SEQ ID NO: 38159 - DNA, 17 bp, Arabidopsis thaliana
aggacccatgggggttg

SEQ ID NO: 38160 - DNA, 17 bp, Arabidopsis thaliana
aggacccgaaagagaag

SEQ ID NO: 38161 - DNA, 17 bp, Arabidopsis thaliana
aggacccgtaggatagg

SEQ ID NO: 38162 - DNA, 17 bp, Arabidopsis thaliana
aggacccgtaggatggg

SEQ ID NO: 38163 - DNA, 17 bp, Arabidopsis thaliana
aggacccgtgggatggg

SEQ ID NO: 38164 - DNA, 17 bp, Arabidopsis thaliana
aggacccgttccagtgt

SEQ ID NO: 38165 - DNA, 17 bp, Arabidopsis thaliana
aggacccgttgcggtga

SEQ ID NO: 38166 - DNA, 17 bp, Arabidopsis thaliana
aggacccgttggatggg

SEQ ID NO: 38167 - DNA, 17 bp, Arabidopsis thaliana
aggaccctcatgtccat

SEQ ID NO: 38168 - DNA, 17 bp, Arabidopsis thaliana
aggaccctccatttttt

SEQ ID NO: 38169 - DNA, 17 bp, Arabidopsis thaliana
aggaccctctttctcgt

SEQ ID NO: 38170 - DNA, 17 bp, Arabidopsis thaliana
aggaccctgttcccgag

SEQ ID NO: 38171 - DNA, 17 bp, Arabidopsis thaliana
aggaccctgttgagctt

SEQ ID NO: 38172 - DNA, 17 bp, Arabidopsis thaliana
aggaccgaatcaggcct

SEQ ID NO: 38173 - DNA, 17 bp, Arabidopsis thaliana
aggaccgacagagaaaa

SEQ ID NO: 38174 - DNA, 17 bp, Arabidopsis thaliana
aggaccgacattgtgat

SEQ ID NO: 38175 - DNA, 17 bp, Arabidopsis thaliana
aggaccgaccgtcatag

SEQ ID NO: 38176 - DNA, 17 bp, Arabidopsis thaliana
aggaccgacgcggatta

SEQ ID NO: 38177 - DNA, 17 bp, Arabidopsis thaliana
aggaccgagaatttctt

SEQ ID NO: 38178 - DNA, 17 bp, Arabidopsis thaliana
aggaccgaggccgctca

SEQ ID NO: 38179 - DNA, 17 bp, Arabidopsis thaliana
aggaccgagtgccactc

SEQ ID NO: 38180 - DNA, 17 bp, Arabidopsis thaliana
aggaccgagtgccgcac

SEQ ID NO: 38181 - DNA, 17 bp, Arabidopsis thaliana
aggaccgagtgccgcat

SEQ ID NO: 38182 - DNA, 17 bp, Arabidopsis thaliana
aggaccgagtgccgccc

SEQ ID NO: 38183 - DNA, 17 bp, Arabidopsis thaliana
aggaccgagtgccgcgc

SEQ ID NO: 38184 - DNA, 17 bp, Arabidopsis thaliana
aggaccgagtgccgcgg

SEQ ID NO: 38185 - DNA, 17 bp, Arabidopsis thaliana
aggaccgagtgccgctc

SEQ ID NO: 38186 - DNA, 17 bp, Arabidopsis thaliana
aggaccgagtgccgctt

SEQ ID NO: 38187 - DNA, 17 bp, Arabidopsis thaliana
aggaccgagtgccggtc

SEQ ID NO: 38188 - DNA, 17 bp, Arabidopsis thaliana
aggaccgagtgccgttc

SEQ ID NO: 38189 - DNA, 17 bp, Arabidopsis thaliana
aggaccgagtgcctcac

SEQ ID NO: 38190 - DNA, 17 bp, Arabidopsis thaliana
aggaccgagtgcctctc

SEQ ID NO: 38191 - DNA, 17 bp, Arabidopsis thaliana
aggaccgagtgtcgctc

SEQ ID NO: 38192 - DNA, 17 bp, Arabidopsis thaliana
aggaccgatcgtttgct

SEQ ID NO: 38193 - DNA, 17 bp, Arabidopsis thaliana
aggaccgattcgtaacg

SEQ ID NO: 38194 - DNA, 17 bp, Arabidopsis thaliana
aggaccgcccctctgcg

SEQ ID NO: 38195 - DNA, 17 bp, Arabidopsis thaliana
aggaccgcctcgtcatc

SEQ ID NO: 38196 - DNA, 17 bp, Arabidopsis thaliana
aggaccgcgaaatcttg

SEQ ID NO: 38197 - DNA, 17 bp, Arabidopsis thaliana
aggaccgcgggagtgat

SEQ ID NO: 38198 - DNA, 17 bp, Arabidopsis thaliana
aggaccgctcgtctgcg

SEQ ID NO: 38199 - DNA, 17 bp, Arabidopsis thaliana
aggaccgcttgatctgc

SEQ ID NO: 38200 - DNA, 17 bp, Arabidopsis thaliana
aggaccggacacgatat

SEQ ID NO: 38201 - DNA, 17 bp, Arabidopsis thaliana
aggaccggacctcgtcc

SEQ ID NO: 38202 - DNA, 17 bp, Arabidopsis thaliana
aggaccggagaacgcga

SEQ ID NO: 38203 - DNA, 17 bp, Arabidopsis thaliana
aggaccggataaggcct

SEQ ID NO: 38204 - DNA, 17 bp, Arabidopsis thaliana
aggaccggatcagagtg

SEQ ID NO: 38205 - DNA, 17 bp, Arabidopsis thaliana
aggaccggatcaggcct

SEQ ID NO: 38206 - DNA, 17 bp, Arabidopsis thaliana
aggaccggcagggacgc

SEQ ID NO: 38207 - DNA, 17 bp, Arabidopsis thaliana
aggaccggcccgccatg

SEQ ID NO: 38208 - DNA, 17 bp, Arabidopsis thaliana
aggaccggccctgtata

SEQ ID NO: 38209 - DNA, 17 bp, Arabidopsis thaliana
aggaccggccctgtatc

SEQ ID NO: 38210 - DNA, 17 bp, Arabidopsis thaliana
aggaccggcctggttgg

SEQ ID NO: 38211 - DNA, 17 bp, Arabidopsis thaliana
aggaccggcgggtctta

SEQ ID NO: 38212 - DNA, 17 bp, Arabidopsis thaliana
aggaccggctctgtata

SEQ ID NO: 38213 - DNA, 17 bp, Arabidopsis thaliana
aggaccggtagctctag

SEQ ID NO: 38214 - DNA, 17 bp, Arabidopsis thaliana
aggaccggtgtccgtat

SEQ ID NO: 38215 - DNA, 17 bp, Arabidopsis thaliana
aggaccggttagggttg

SEQ ID NO: 38216 - DNA, 17 bp, Arabidopsis thaliana
aggaccgtgtgacttca

SEQ ID NO: 38217 - DNA, 17 bp, Arabidopsis thaliana
aggaccgtttcacagtt

SEQ ID NO: 38218 - DNA, 17 bp, Arabidopsis thaliana
aggacctaacaccagcc

SEQ ID NO: 38219 - DNA, 17 bp, Arabidopsis thaliana
aggacctacgggccaag

SEQ ID NO: 38220 - DNA, 17 bp, Arabidopsis thaliana
aggacctccgtctgacc

SEQ ID NO: 38221 - DNA, 17 bp, Arabidopsis thaliana
aggacctcgagctgaaa

SEQ ID NO: 38222 - DNA, 17 bp, Arabidopsis thaliana
aggacctcggagatatt

SEQ ID NO: 38223 - DNA, 17 bp, Arabidopsis thaliana
aggacctgcagacaggc

SEQ ID NO: 38224 - DNA, 17 bp, Arabidopsis thaliana
aggacctggagcactgt

SEQ ID NO: 38225 - DNA, 17 bp, Arabidopsis thaliana
aggacctggatttagtc

SEQ ID NO: 38226 - DNA, 17 bp, Arabidopsis thaliana
aggacctggcgcactct

SEQ ID NO: 38227 - DNA, 17 bp, Arabidopsis thaliana
aggacctgggaggtcac

SEQ ID NO: 38228 - DNA, 17 bp, Arabidopsis thaliana
aggacctggtgaacttt

SEQ ID NO: 38229 - DNA, 17 bp, Arabidopsis thaliana
aggacctggtgacttct

SEQ ID NO: 38230 - DNA, 17 bp, Arabidopsis thaliana
aggacctgtccaacaaa

SEQ ID NO: 38231 - DNA, 17 bp, Arabidopsis thaliana
aggacctgtcctgagca

SEQ ID NO: 38232 - DNA, 17 bp, Arabidopsis thaliana
aggacctgtctcatgga

SEQ ID NO: 38233 - DNA, 17 bp, Arabidopsis thaliana
aggaccttagctcagtt

SEQ ID NO: 38234 - DNA, 17 bp, Arabidopsis thaliana
aggaccttcagacgcag

SEQ ID NO: 38235 - DNA, 17 bp, Arabidopsis thaliana
aggaccttcagaggcag

SEQ ID NO: 38236 - DNA, 17 bp, Arabidopsis thaliana
aggaccttcttatgacc

SEQ ID NO: 38237 - DNA, 17 bp, Arabidopsis thaliana
aggaccttcttatgact

SEQ ID NO: 38238 - DNA, 17 bp, Arabidopsis thaliana
aggaccttcttgaatag

SEQ ID NO: 38239 - DNA, 17 bp, Arabidopsis thaliana
aggaccttctttcgctc

SEQ ID NO: 38240 - DNA, 17 bp, Arabidopsis thaliana
aggaccttctttcgctt

SEQ ID NO: 38241 - DNA, 17 bp, Arabidopsis thaliana
aggaccttggatgatgt

SEQ ID NO: 38242 - DNA, 17 bp, Arabidopsis thaliana
aggaccttggtgttgct

SEQ ID NO: 38243 - DNA, 17 bp, Arabidopsis thaliana
aggaccttggttcttgc

SEQ ID NO: 38244 - DNA, 17 bp, Arabidopsis thaliana
aggaccttggttttgcg

SEQ ID NO: 38245 - DNA, 17 bp, Arabidopsis thaliana
aggacctttccctccgg

SEQ ID NO: 38246 - DNA, 17 bp, Arabidopsis thaliana
aggacctttggacttga

SEQ ID NO: 38247 - DNA, 17 bp, Arabidopsis thaliana
aggacctttggatctga

SEQ ID NO: 38248 - DNA, 17 bp, Arabidopsis thaliana
aggaccttttacagtga

SEQ ID NO: 38249 - DNA, 17 bp, Arabidopsis thaliana
aggacgaagattctcct

SEQ ID NO: 38250 - DNA, 17 bp, Arabidopsis thaliana
aggacgaatcaggttta

SEQ ID NO: 38251 - DNA, 17 bp, Arabidopsis thaliana
aggacgaattttgcggg

SEQ ID NO: 38252 - DNA, 17 bp, Arabidopsis thaliana
aggacgactctcggcaa

SEQ ID NO: 38253 - DNA, 17 bp, Arabidopsis thaliana
aggacgagaccgtcatg

SEQ ID NO: 38254 - DNA, 17 bp, Arabidopsis thaliana
aggacgagatgactgtt

SEQ ID NO: 38255 - DNA, 17 bp, Arabidopsis thaliana
aggacgagctccttgat

SEQ ID NO: 38256 - DNA, 17 bp, Arabidopsis thaliana
aggacgagctctttgat

SEQ ID NO: 38257 - DNA, 17 bp, Arabidopsis thaliana
aggacgaggaatcgtcg

SEQ ID NO: 38258 - DNA, 17 bp, Arabidopsis thaliana
aggacgaggtcttgacc

SEQ ID NO: 38259 - DNA, 17 bp, Arabidopsis thaliana
aggacgagttgacggga

SEQ ID NO: 38260 - DNA, 17 bp, Arabidopsis thaliana
aggacgagttggcccgg

SEQ ID NO: 38261 - DNA, 17 bp, Arabidopsis thaliana
aggacgagttggcccgt

SEQ ID NO: 38262 - DNA, 17 bp, Arabidopsis thaliana
aggacgagttggcggga

SEQ ID NO: 38263 - DNA, 17 bp, Arabidopsis thaliana
aggacgagtttggcagg

SEQ ID NO: 38264 - DNA, 17 bp, Arabidopsis thaliana
aggacgagtttggcgga

SEQ ID NO: 38265 - DNA, 17 bp, Arabidopsis thaliana
aggacgagtttggcggg

SEQ ID NO: 38266 - DNA, 17 bp, Arabidopsis thaliana
aggacgagtttgggtcg

SEQ ID NO: 38267 - DNA, 17 bp, Arabidopsis thaliana
aggacgagtttggtgga

SEQ ID NO: 38268 - DNA, 17 bp, Arabidopsis thaliana
aggacgagttttgctgg

SEQ ID NO: 38269 - DNA, 17 bp, Arabidopsis thaliana
aggacgatcgtcggcgg

SEQ ID NO: 38270 - DNA, 17 bp, Arabidopsis thaliana
aggacgatgttttccaa

SEQ ID NO: 38271 - DNA, 17 bp, Arabidopsis thaliana
aggacgattcaatcttg

SEQ ID NO: 38272 - DNA, 17 bp, Arabidopsis thaliana
aggacgattggatactg

SEQ ID NO: 38273 - DNA, 17 bp, Arabidopsis thaliana
aggacgattttgcgtta

SEQ ID NO: 38274 - DNA, 17 bp, Arabidopsis thaliana
aggacgcaatgttcaag

SEQ ID NO: 38275 - DNA, 17 bp, Arabidopsis thaliana
aggacgcacctccggtg

SEQ ID NO: 38276 - DNA, 17 bp, Arabidopsis thaliana
aggacgcacctctggct

SEQ ID NO: 38277 - DNA, 17 bp, Arabidopsis thaliana
aggacgcacctctgggt

SEQ ID NO: 38278 - DNA, 17 bp, Arabidopsis thaliana
aggacgcagattacggt

SEQ ID NO: 38279 - DNA, 17 bp, Arabidopsis thaliana
aggacgcaggaaatagt

SEQ ID NO: 38280 - DNA, 17 bp, Arabidopsis thaliana
aggacgccaaatgaact

SEQ ID NO: 38281 - DNA, 17 bp, Arabidopsis thaliana
aggacgccatctaccga

SEQ ID NO: 38282 - DNA, 17 bp, Arabidopsis thaliana
aggacgcccatgggctt

SEQ ID NO: 38283 - DNA, 17 bp, Arabidopsis thaliana
aggacgccttcggtatc

SEQ ID NO: 38284 - DNA, 17 bp, Arabidopsis thaliana
aggacgcggattacgct

SEQ ID NO: 38285 - DNA, 17 bp, Arabidopsis thaliana
aggacgcggattacggt

SEQ ID NO: 38286 - DNA, 17 bp, Arabidopsis thaliana
aggacgcttggcgaatt

SEQ ID NO: 38287 - DNA, 17 bp, Arabidopsis thaliana
aggacgctttcagaggc

SEQ ID NO: 38288 - DNA, 17 bp, Arabidopsis thaliana
aggacggaactgtcgag

SEQ ID NO: 38289 - DNA, 17 bp, Arabidopsis thaliana
aggacggactgcgaacg

SEQ ID NO: 38290 - DNA, 17 bp, Arabidopsis thaliana
aggacggacttctgcta

SEQ ID NO: 38291 - DNA, 17 bp, Arabidopsis thaliana
aggacggagttgtcgag

SEQ ID NO: 38292 - DNA, 17 bp, Arabidopsis thaliana
aggacggatgttctgta

SEQ ID NO: 38293 - DNA, 17 bp, Arabidopsis thaliana
aggacggattggcggga

SEQ ID NO: 38294 - DNA, 17 bp, Arabidopsis thaliana
aggacggatttggcaga

SEQ ID NO: 38295 - DNA, 17 bp, Arabidopsis thaliana
aggacggatttggcagg

SEQ ID NO: 38296 - DNA, 17 bp, Arabidopsis thaliana
aggacggatttgtcagg

SEQ ID NO: 38297 - DNA, 17 bp, Arabidopsis thaliana
aggacggcttcatttgt

SEQ ID NO: 38298 - DNA, 17 bp, Arabidopsis thaliana
aggacgggagtttccgc

SEQ ID NO: 38299 - DNA, 17 bp, Arabidopsis thaliana
aggacgggatgcctaga

SEQ ID NO: 38300 - DNA, 17 bp, Arabidopsis thaliana
aggacgggcttggcagg

SEQ ID NO: 38301 - DNA, 17 bp, Arabidopsis thaliana
aggacggggttgcggga

SEQ ID NO: 38302 - DNA, 17 bp, Arabidopsis thaliana
aggacgggttaggcagg

SEQ ID NO: 38303 - DNA, 17 bp, Arabidopsis thaliana
aggacgggttatgcggg

SEQ ID NO: 38304 - DNA, 17 bp, Arabidopsis thaliana
aggacgggttgacggga

SEQ ID NO: 38305 - DNA, 17 bp, Arabidopsis thaliana
aggacgggttggcatga

SEQ ID NO: 38306 - DNA, 17 bp, Arabidopsis thaliana
aggacgggttggcgaga

SEQ ID NO: 38307 - DNA, 17 bp, Arabidopsis thaliana
aggacgggttggcggga

SEQ ID NO: 38308 - DNA, 17 bp, Arabidopsis thaliana
aggacgggttggctgaa

SEQ ID NO: 38309 - DNA, 17 bp, Arabidopsis thaliana
aggacgggtttagcagg

SEQ ID NO: 38310 - DNA, 17 bp, Arabidopsis thaliana
aggacgggtttgacagg

SEQ ID NO: 38311 - DNA, 17 bp, Arabidopsis thaliana
aggacgggtttggaagg

SEQ ID NO: 38312 - DNA, 17 bp, Arabidopsis thaliana
aggacgggtttggatcg

SEQ ID NO: 38313 - DNA, 17 bp, Arabidopsis thaliana
aggacgggtttggcagc

SEQ ID NO: 38314 - DNA, 17 bp, Arabidopsis thaliana
aggacgggtttggcagg

SEQ ID NO: 38315 - DNA, 17 bp, Arabidopsis thaliana
aggacgggtttggcgag

SEQ ID NO: 38316 - DNA, 17 bp, Arabidopsis thaliana
aggacgggtttggcgga

SEQ ID NO: 38317 - DNA, 17 bp, Arabidopsis thaliana
aggacgggtttggcggg

SEQ ID NO: 38318 - DNA, 17 bp, Arabidopsis thaliana
aggacgggtttgggtcg

SEQ ID NO: 38319 - DNA, 17 bp, Arabidopsis thaliana
aggacgggtttgggtgg

SEQ ID NO: 38320 - DNA, 17 bp, Arabidopsis thaliana
aggacgggtttggtcga

SEQ ID NO: 38321 - DNA, 17 bp, Arabidopsis thaliana
aggacgggtttggtgga

SEQ ID NO: 38322 - DNA, 17 bp, Arabidopsis thaliana
aggacgggttttgcgga

SEQ ID NO: 38323 - DNA, 17 bp, Arabidopsis thaliana
aggacgggttttgcggg

SEQ ID NO: 38324 - DNA, 17 bp, Arabidopsis thaliana
aggacggtccgcagtta

SEQ ID NO: 38325 - DNA, 17 bp, Arabidopsis thaliana
aggacggtgcgacgcgg

SEQ ID NO: 38326 - DNA, 17 bp, Arabidopsis thaliana
aggacgtatcggctgct

SEQ ID NO: 38327 - DNA, 17 bp, Arabidopsis thaliana
aggacgtgtcggctgct

SEQ ID NO: 38328 - DNA, 17 bp, Arabidopsis thaliana
aggacgtttcttctttc

SEQ ID NO: 38329 - DNA, 17 bp, Arabidopsis thaliana
aggactaaagttttgtt

SEQ ID NO: 38330 - DNA, 17 bp, Arabidopsis thaliana
aggactaagcaattaag

SEQ ID NO: 38331 - DNA, 17 bp, Arabidopsis thaliana
aggactaagtagtgttt

SEQ ID NO: 38332 - DNA, 17 bp, Arabidopsis thaliana
aggactaagtgttttgg

SEQ ID NO: 38333 - DNA, 17 bp, Arabidopsis thaliana
aggactaattccatccg

SEQ ID NO: 38334 - DNA, 17 bp, Arabidopsis thaliana
aggactaattccgttgt

SEQ ID NO: 38335 - DNA, 17 bp, Arabidopsis thaliana
aggactaccaatggtat

SEQ ID NO: 38336 - DNA, 17 bp, Arabidopsis thaliana
aggactaccatactgtc

SEQ ID NO: 38337 - DNA, 17 bp, Arabidopsis thaliana
aggactaggtggacgct

SEQ ID NO: 38338 - DNA, 17 bp, Arabidopsis thaliana
aggactaggtgttggtg

SEQ ID NO: 38339 - DNA, 17 bp, Arabidopsis thaliana
aggactagttgcgttta

SEQ ID NO: 38340 - DNA, 17 bp, Arabidopsis thaliana
aggactatcatctgcaa

SEQ ID NO: 38341 - DNA, 17 bp, Arabidopsis thaliana
aggactatccctggcat

SEQ ID NO: 38342 - DNA, 17 bp, Arabidopsis thaliana
aggactatcctgattca

SEQ ID NO: 38343 - DNA, 17 bp, Arabidopsis thaliana
aggactatgccaactag

SEQ ID NO: 38344 - DNA, 17 bp, Arabidopsis thaliana
aggactcaaacaagcaa

SEQ ID NO: 38345 - DNA, 17 bp, Arabidopsis thaliana
aggactcaaacaagcca

SEQ ID NO: 38346 - DNA, 17 bp, Arabidopsis thaliana
aggactcaaacgagcca

SEQ ID NO: 38347 - DNA, 17 bp, Arabidopsis thaliana
aggactcactcttctcc

SEQ ID NO: 38348 - DNA, 17 bp, Arabidopsis thaliana
aggactcagcttcatcc

SEQ ID NO: 38349 - DNA, 17 bp, Arabidopsis thaliana
aggactcaggccagaga

SEQ ID NO: 38350 - DNA, 17 bp, Arabidopsis thaliana
aggactcataaaccgct

SEQ ID NO: 38351 - DNA, 17 bp, Arabidopsis thaliana
aggactcattctcggct

SEQ ID NO: 38352 - DNA, 17 bp, Arabidopsis thaliana
aggactccaccaatggg

SEQ ID NO: 38353 - DNA, 17 bp, Arabidopsis thaliana
aggactccactggcacc

SEQ ID NO: 38354 - DNA, 17 bp, Arabidopsis thaliana
aggactccgctggcacc

SEQ ID NO: 38355 - DNA, 17 bp, Arabidopsis thaliana
aggactcctaccgattg

SEQ ID NO: 38356 - DNA, 17 bp, Arabidopsis thaliana
aggactcctgagactag

SEQ ID NO: 38357 - DNA, 17 bp, Arabidopsis thaliana
aggactcgacgaattca

SEQ ID NO: 38358 - DNA, 17 bp, Arabidopsis thaliana
aggactcgcaactttct

SEQ ID NO: 38359 - DNA, 17 bp, Arabidopsis thaliana
aggactcgcagcattct

SEQ ID NO: 38360 - DNA, 17 bp, Arabidopsis thaliana
aggactcgcagctttct

SEQ ID NO: 38361 - DNA, 17 bp, Arabidopsis thaliana
aggactcggcaggctgt

SEQ ID NO: 38362 - DNA, 17 bp, Arabidopsis thaliana
aggactcgtagcttcct

SEQ ID NO: 38363 - DNA, 17 bp, Arabidopsis thaliana
aggactcgtcccctacc

SEQ ID NO: 38364 - DNA, 17 bp, Arabidopsis thaliana
aggactcgtgctgataa

SEQ ID NO: 38365 - DNA, 17 bp, Arabidopsis thaliana
aggactctccctcaaga

SEQ ID NO: 38366 - DNA, 17 bp, Arabidopsis thaliana
aggactctcgttccgcc

SEQ ID NO: 38367 - DNA, 17 bp, Arabidopsis thaliana
aggactctctctgaggt

SEQ ID NO: 38368 - DNA, 17 bp, Arabidopsis thaliana
aggactctcttcttttt

SEQ ID NO: 38369 - DNA, 17 bp, Arabidopsis thaliana
aggactctgctacacat

SEQ ID NO: 38370 - DNA, 17 bp, Arabidopsis thaliana
aggactctgctggttga

SEQ ID NO: 38371 - DNA, 17 bp, Arabidopsis thaliana
aggactctggtcagctt

SEQ ID NO: 38372 - DNA, 17 bp, Arabidopsis thaliana
aggactcttcaagatct

SEQ ID NO: 38373 - DNA, 17 bp, Arabidopsis thaliana
aggactcttgcccaaag

SEQ ID NO: 38374 - DNA, 17 bp, Arabidopsis thaliana
aggactcttgcccagta

SEQ ID NO: 38375 - DNA, 17 bp, Arabidopsis thaliana
aggactcttgtcagctt

SEQ ID NO: 38376 - DNA, 17 bp, Arabidopsis thaliana
aggactctttgctcgat

SEQ ID NO: 38377 - DNA, 17 bp, Arabidopsis thaliana
aggactgaacatctatg

SEQ ID NO: 38378 - DNA, 17 bp, Arabidopsis thaliana
aggactgacaaagtgaa

SEQ ID NO: 38379 - DNA, 17 bp, Arabidopsis thaliana
aggactgagagtgacgg

SEQ ID NO: 38380 - DNA, 17 bp, Arabidopsis thaliana
aggactgagggcagagt

SEQ ID NO: 38381 - DNA, 17 bp, Arabidopsis thaliana
aggactgagtgccgctc

SEQ ID NO: 38382 - DNA, 17 bp, Arabidopsis thaliana
aggactgagttctgtcg

SEQ ID NO: 38383 - DNA, 17 bp, Arabidopsis thaliana
aggactgatacatccct

SEQ ID NO: 38384 - DNA, 17 bp, Arabidopsis thaliana
aggactgattccatcgg

SEQ ID NO: 38385 - DNA, 17 bp, Arabidopsis thaliana
aggactgattttgctac

SEQ ID NO: 38386 - DNA, 17 bp, Arabidopsis thaliana
aggactgcctataggag

SEQ ID NO: 38387 - DNA, 17 bp, Arabidopsis thaliana
aggactgcctgtttgca

SEQ ID NO: 38388 - DNA, 17 bp, Arabidopsis thaliana
aggactgcggtgaaccg

SEQ ID NO: 38389 - DNA, 17 bp, Arabidopsis thaliana
aggactgcggttgctga

SEQ ID NO: 38390 - DNA, 17 bp, Arabidopsis thaliana
aggactgctacctcttc

SEQ ID NO: 38391 - DNA, 17 bp, Arabidopsis thaliana
aggactgctccgctcgg

SEQ ID NO: 38392 - DNA, 17 bp, Arabidopsis thaliana
aggactgctccggtcgg

SEQ ID NO: 38393 - DNA, 17 bp, Arabidopsis thaliana
aggactgctccggttgg

SEQ ID NO: 38394 - DNA, 17 bp, Arabidopsis thaliana
aggactggacagtccgt

SEQ ID NO: 38395 - DNA, 17 bp, Arabidopsis thaliana
aggactggataatccga

SEQ ID NO: 38396 - DNA, 17 bp, Arabidopsis thaliana
aggactggatagtctga

SEQ ID NO: 38397 - DNA, 17 bp, Arabidopsis thaliana
aggactggatccaacct

SEQ ID NO: 38398 - DNA, 17 bp, Arabidopsis thaliana
aggactggattgtgcca

SEQ ID NO: 38399 - DNA, 17 bp, Arabidopsis thaliana
aggactgggctcggggg

SEQ ID NO: 38400 - DNA, 17 bp, Arabidopsis thaliana
aggactggggcatgtgt

SEQ ID NO: 38401 - DNA, 17 bp, Arabidopsis thaliana
aggactggggcttatac

SEQ ID NO: 38402 - DNA, 17 bp, Arabidopsis thaliana
aggactgggtgcacctc

SEQ ID NO: 38403 - DNA, 17 bp, Arabidopsis thaliana
aggactggtcagtccgg

SEQ ID NO: 38404 - DNA, 17 bp, Arabidopsis thaliana
aggactggttagtccgg

SEQ ID NO: 38405 - DNA, 17 bp, Arabidopsis thaliana
aggactgtaactttttt

SEQ ID NO: 38406 - DNA, 17 bp, Arabidopsis thaliana
aggactgtcttggatca

SEQ ID NO: 38407 - DNA, 17 bp, Arabidopsis thaliana
aggactgtctttgggct

SEQ ID NO: 38408 - DNA, 17 bp, Arabidopsis thaliana
aggactgtgtattacgg

SEQ ID NO: 38409 - DNA, 17 bp, Arabidopsis thaliana
aggactgttaggatatc

SEQ ID NO: 38410 - DNA, 17 bp, Arabidopsis thaliana
aggacttaaaccgcaac

SEQ ID NO: 38411 - DNA, 17 bp, Arabidopsis thaliana
aggacttacccggttgt

SEQ ID NO: 38412 - DNA, 17 bp, Arabidopsis thaliana
aggacttactcgacctt

SEQ ID NO: 38413 - DNA, 17 bp, Arabidopsis thaliana
aggacttattccaacgt

SEQ ID NO: 38414 - DNA, 17 bp, Arabidopsis thaliana
aggacttcaggtgttcg

SEQ ID NO: 38415 - DNA, 17 bp, Arabidopsis thaliana
aggacttcccaggaggt

SEQ ID NO: 38416 - DNA, 17 bp, Arabidopsis thaliana
aggacttcccgggaagt

SEQ ID NO: 38417 - DNA, 17 bp, Arabidopsis thaliana
aggacttcccgggagat

SEQ ID NO: 38418 - DNA, 17 bp, Arabidopsis thaliana
aggacttcccgggagct

SEQ ID NO: 38419 - DNA, 17 bp, Arabidopsis thaliana
aggacttcccgggaggt

SEQ ID NO: 38420 - DNA, 17 bp, Arabidopsis thaliana
aggacttcccgggatgt

SEQ ID NO: 38421 - DNA, 17 bp, Arabidopsis thaliana
aggacttcgacaacgca

SEQ ID NO: 38422 - DNA, 17 bp, Arabidopsis thaliana
aggacttcggtctgcga

SEQ ID NO: 38423 - DNA, 17 bp, Arabidopsis thaliana
aggacttctcagttcct

SEQ ID NO: 38424 - DNA, 17 bp, Arabidopsis thaliana
aggacttctcgggaggt

SEQ ID NO: 38425 - DNA, 17 bp, Arabidopsis thaliana
aggacttctctgttcct

SEQ ID NO: 38426 - DNA, 17 bp, Arabidopsis thaliana
aggacttctcttgtcgg

SEQ ID NO: 38427 - DNA, 17 bp, Arabidopsis thaliana
aggacttctgaacagac

SEQ ID NO: 38428 - DNA, 17 bp, Arabidopsis thaliana
aggacttctgatttgcc

SEQ ID NO: 38429 - DNA, 17 bp, Arabidopsis thaliana
aggacttctggtttgcc

SEQ ID NO: 38430 - DNA, 17 bp, Arabidopsis thaliana
aggacttcttctcaacg

SEQ ID NO: 38431 - DNA, 17 bp, Arabidopsis thaliana
aggacttctttccgaag

SEQ ID NO: 38432 - DNA, 17 bp, Arabidopsis thaliana
aggacttgaccactcat

SEQ ID NO: 38433 - DNA, 17 bp, Arabidopsis thaliana
aggacttgatgaccctt

SEQ ID NO: 38434 - DNA, 17 bp, Arabidopsis thaliana
aggacttggaaaagacc

SEQ ID NO: 38435 - DNA, 17 bp, Arabidopsis thaliana
aggacttggccacgggc

SEQ ID NO: 38436 - DNA, 17 bp, Arabidopsis thaliana
aggacttgggctatgat

SEQ ID NO: 38437 - DNA, 17 bp, Arabidopsis thaliana
aggacttgggtcccttt

SEQ ID NO: 38438 - DNA, 17 bp, Arabidopsis thaliana
aggacttggtgatcttg

SEQ ID NO: 38439 - DNA, 17 bp, Arabidopsis thaliana
aggacttggtggtcttg

SEQ ID NO: 38440 - DNA, 17 bp, Arabidopsis thaliana
aggacttgtgctgataa

SEQ ID NO: 38441 - DNA, 17 bp, Arabidopsis thaliana
aggacttgttgacggcg

SEQ ID NO: 38442 - DNA, 17 bp, Arabidopsis thaliana
aggacttgttgtgtgaa

SEQ ID NO: 38443 - DNA, 17 bp, Arabidopsis thaliana
aggactttaaacaagct

SEQ ID NO: 38444 - DNA, 17 bp, Arabidopsis thaliana
aggactttcctggaggt

SEQ ID NO: 38445 - DNA, 17 bp, Arabidopsis thaliana
aggactttgatttcagc

SEQ ID NO: 38446 - DNA, 17 bp, Arabidopsis thaliana
aggactttgcttcttgg

SEQ ID NO: 38447 - DNA, 17 bp, Arabidopsis thaliana
aggactttggatttggt

SEQ ID NO: 38448 - DNA, 17 bp, Arabidopsis thaliana
aggactttgggttcgtc

SEQ ID NO: 38449 - DNA, 17 bp, Arabidopsis thaliana
aggactttgtggggggg

SEQ ID NO: 38450 - DNA, 17 bp, Arabidopsis thaliana
aggacttttccaagtta

SEQ ID NO: 38451 - DNA, 17 bp, Arabidopsis thaliana
aggacttttctggaggt

SEQ ID NO: 38452 - DNA, 17 bp, Arabidopsis thaliana
aggacttttctggagtt

SEQ ID NO: 38453 - DNA, 17 bp, Arabidopsis thaliana
aggacttttggggaatt

SEQ ID NO: 38454 - DNA, 17 bp, Arabidopsis thaliana
aggagaaacaattgatt

SEQ ID NO: 38455 - DNA, 17 bp, Arabidopsis thaliana
aggagaaaggtgattag

SEQ ID NO: 38456 - DNA, 17 bp, Arabidopsis thaliana
aggagaaattgtatttc

SEQ ID NO: 38457 - DNA, 17 bp, Arabidopsis thaliana
aggagaacatcgctaat

SEQ ID NO: 38458 - DNA, 17 bp, Arabidopsis thaliana
aggagaaccacagtcaa

SEQ ID NO: 38459 - DNA, 17 bp, Arabidopsis thaliana
aggagaacccatgtacg

SEQ ID NO: 38460 - DNA, 17 bp, Arabidopsis thaliana
aggagaacttcctcttg

SEQ ID NO: 38461 - DNA, 17 bp, Arabidopsis thaliana
aggagaagacggtgacg

SEQ ID NO: 38462 - DNA, 17 bp, Arabidopsis thaliana
aggagaagcagagggac

SEQ ID NO: 38463 - DNA, 17 bp, Arabidopsis thaliana
aggagaagcagcgacgc

SEQ ID NO: 38464 - DNA, 17 bp, Arabidopsis thaliana
aggagaagccgcgtcag

SEQ ID NO: 38465 - DNA, 17 bp, Arabidopsis thaliana
aggagaaggcaacaggg

SEQ ID NO: 38466 - DNA, 17 bp, Arabidopsis thaliana
aggagaagtaccgtatc

SEQ ID NO: 38467 - DNA, 17 bp, Arabidopsis thaliana
aggagaagtcgtaacaa

SEQ ID NO: 38468 - DNA, 17 bp, Arabidopsis thaliana
aggagaagtgattattg

SEQ ID NO: 38469 - DNA, 17 bp, Arabidopsis thaliana
aggagaagtgcggtgcg

SEQ ID NO: 38470 - DNA, 17 bp, Arabidopsis thaliana
aggagaagtgcggttcg

SEQ ID NO: 38471 - DNA, 17 bp, Arabidopsis thaliana
aggagaagttgtgaact

SEQ ID NO: 38472 - DNA, 17 bp, Arabidopsis thaliana
aggagaatgaggaggaa

SEQ ID NO: 38473 - DNA, 17 bp, Arabidopsis thaliana
aggagaatgattagtgt

SEQ ID NO: 38474 - DNA, 17 bp, Arabidopsis thaliana
aggagaatggtgtaagt

SEQ ID NO: 38475 - DNA, 17 bp, Arabidopsis thaliana
aggagaatgtaccatat

SEQ ID NO: 38476 - DNA, 17 bp, Arabidopsis thaliana
aggagaatgtaccctat

SEQ ID NO: 38477 - DNA, 17 bp, Arabidopsis thaliana
aggagaattctgctcgt

SEQ ID NO: 38478 - DNA, 17 bp, Arabidopsis thaliana
aggagacaaagccgcgt

SEQ ID NO: 38479 - DNA, 17 bp, Arabidopsis thaliana
aggagacacgggttcgt

SEQ ID NO: 38480 - DNA, 17 bp, Arabidopsis thaliana
aggagacatgtcggctt

SEQ ID NO: 38481 - DNA, 17 bp, Arabidopsis thaliana
aggagaccaaaccgacg

SEQ ID NO: 38482 - DNA, 17 bp, Arabidopsis thaliana
aggagaccacttccaat

SEQ ID NO: 38483 - DNA, 17 bp, Arabidopsis thaliana
aggagaccagttggtgc

SEQ ID NO: 38484 - DNA, 17 bp, Arabidopsis thaliana
aggagacccgggttcga

SEQ ID NO: 38485 - DNA, 17 bp, Arabidopsis thaliana
aggagacccgggttcgg

SEQ ID NO: 38486 - DNA, 17 bp, Arabidopsis thaliana
aggagacccgggttcgt

SEQ ID NO: 38487 - DNA, 17 bp, Arabidopsis thaliana
aggagacccgtgtcttc

SEQ ID NO: 38488 - DNA, 17 bp, Arabidopsis thaliana
aggagaccctggttcat

SEQ ID NO: 38489 - DNA, 17 bp, Arabidopsis thaliana
aggagaccgagtttttg

SEQ ID NO: 38490 - DNA, 17 bp, Arabidopsis thaliana
aggagaccgccgctacg

SEQ ID NO: 38491 - DNA, 17 bp, Arabidopsis thaliana
aggagaccggtcttttc

SEQ ID NO: 38492 - DNA, 17 bp, Arabidopsis thaliana
aggagaccgttctgctg

SEQ ID NO: 38493 - DNA, 17 bp, Arabidopsis thaliana
aggagacctccggggga

SEQ ID NO: 38494 - DNA, 17 bp, Arabidopsis thaliana
aggagacgagtcctcga

SEQ ID NO: 38495 - DNA, 17 bp, Arabidopsis thaliana
aggagacgcaaggatcg

SEQ ID NO: 38496 - DNA, 17 bp, Arabidopsis thaliana
aggagacgccactcgaa

SEQ ID NO: 38497 - DNA, 17 bp, Arabidopsis thaliana
aggagacgggttcatca

SEQ ID NO: 38498 - DNA, 17 bp, Arabidopsis thaliana
aggagacgtggggtagg

SEQ ID NO: 38499 - DNA, 17 bp, Arabidopsis thaliana
aggagactcacctactt

SEQ ID NO: 38500 - DNA, 17 bp, Arabidopsis thaliana
aggagactgcgccgacg

SEQ ID NO: 38501 - DNA, 17 bp, Arabidopsis thaliana
aggagactgtaacaacc

SEQ ID NO: 38502 - DNA, 17 bp, Arabidopsis thaliana
aggagactgtaccatat

SEQ ID NO: 38503 - DNA, 17 bp, Arabidopsis thaliana
aggagactgtaccatgt

SEQ ID NO: 38504 - DNA, 17 bp, Arabidopsis thaliana
aggagactgtggagctt

SEQ ID NO: 38505 - DNA, 17 bp, Arabidopsis thaliana
aggagacttgggagcca

SEQ ID NO: 38506 - DNA, 17 bp, Arabidopsis thaliana
aggagacttttcttttc

SEQ ID NO: 38507 - DNA, 17 bp, Arabidopsis thaliana
aggagagaaagagagaa

SEQ ID NO: 38508 - DNA, 17 bp, Arabidopsis thaliana
aggagagaacccgtgaa

SEQ ID NO: 38509 - DNA, 17 bp, Arabidopsis thaliana
aggagagactctccttg

SEQ ID NO: 38510 - DNA, 17 bp, Arabidopsis thaliana
aggagagactcttcttg

SEQ ID NO: 38511 - DNA, 17 bp, Arabidopsis thaliana
aggagagactgtgagac

SEQ ID NO: 38512 - DNA, 17 bp, Arabidopsis thaliana
aggagagatggctgagt

SEQ ID NO: 38513 - DNA, 17 bp, Arabidopsis thaliana
aggagagcagacagtgc

SEQ ID NO: 38514 - DNA, 17 bp, Arabidopsis thaliana
aggagaggatgacggaa

SEQ ID NO: 38515 - DNA, 17 bp, Arabidopsis thaliana
aggagaggcaaaggggc

SEQ ID NO: 38516 - DNA, 17 bp, Arabidopsis thaliana
aggagaggctatggtta

SEQ ID NO: 38517 - DNA, 17 bp, Arabidopsis thaliana
aggagaggctcacgcaa

SEQ ID NO: 38518 - DNA, 17 bp, Arabidopsis thaliana
aggagagggacacctcc

SEQ ID NO: 38519 - DNA, 17 bp, Arabidopsis thaliana
aggagaggggtcgggtg

SEQ ID NO: 38520 - DNA, 17 bp, Arabidopsis thaliana
aggagaggttacttgat

SEQ ID NO: 38521 - DNA, 17 bp, Arabidopsis thaliana
aggagagtatccacgct

SEQ ID NO: 38522 - DNA, 17 bp, Arabidopsis thaliana
aggagagtatggacgaa

SEQ ID NO: 38523 - DNA, 17 bp, Arabidopsis thaliana
aggagagtcaccaacca

SEQ ID NO: 38524 - DNA, 17 bp, Arabidopsis thaliana
aggagagtctcttcccg

SEQ ID NO: 38525 - DNA, 17 bp, Arabidopsis thaliana
aggagagttgtctgcga

SEQ ID NO: 38526 - DNA, 17 bp, Arabidopsis thaliana
aggagatacattgaggc

SEQ ID NO: 38527 - DNA, 17 bp, Arabidopsis thaliana
aggagataggctttgca

SEQ ID NO: 38528 - DNA, 17 bp, Arabidopsis thaliana
aggagatattcacggag

SEQ ID NO: 38529 - DNA, 17 bp, Arabidopsis thaliana
aggagatatttgtggcc

SEQ ID NO: 38530 - DNA, 17 bp, Arabidopsis thaliana
aggagatatttgtgggc

SEQ ID NO: 38531 - DNA, 17 bp, Arabidopsis thaliana
aggagatcaaactcacc

SEQ ID NO: 38532 - DNA, 17 bp, Arabidopsis thaliana
aggagatcaaagctttt

SEQ ID NO: 38533 - DNA, 17 bp, Arabidopsis thaliana
aggagatcactcgactg

SEQ ID NO: 38534 - DNA, 17 bp, Arabidopsis thaliana
aggagatcacttgacca

SEQ ID NO: 38535 - DNA, 17 bp, Arabidopsis thaliana
aggagatcacttgaccg

SEQ ID NO: 38536 - DNA, 17 bp, Arabidopsis thaliana
aggagatcatgttcgtt

SEQ ID NO: 38537 - DNA, 17 bp, Arabidopsis thaliana
aggagatcattggaaat

SEQ ID NO: 38538 - DNA, 17 bp, Arabidopsis thaliana
aggagatcctatggtga

SEQ ID NO: 38539 - DNA, 17 bp, Arabidopsis thaliana
aggagatcctttagggc

SEQ ID NO: 38540 - DNA, 17 bp, Arabidopsis thaliana
aggagatctacaacgat

SEQ ID NO: 38541 - DNA, 17 bp, Arabidopsis thaliana
aggagatctcagacgct

SEQ ID NO: 38542 - DNA, 17 bp, Arabidopsis thaliana
aggagatctgcaggttt

SEQ ID NO: 38543 - DNA, 17 bp, Arabidopsis thaliana
aggagatgacctagggt

SEQ ID NO: 38544 - DNA, 17 bp, Arabidopsis thaliana
aggagatgacgcccaat

SEQ ID NO: 38545 - DNA, 17 bp, Arabidopsis thaliana
aggagatggggaaccgc

SEQ ID NO: 38546 - DNA, 17 bp, Arabidopsis thaliana
aggagatgtccaggggg

SEQ ID NO: 38547 - DNA, 17 bp, Arabidopsis thaliana
aggagattaccaatgac

SEQ ID NO: 38548 - DNA, 17 bp, Arabidopsis thaliana
aggagattaccgggtta

SEQ ID NO: 38549 - DNA, 17 bp, Arabidopsis thaliana
aggagattaccgggttt

SEQ ID NO: 38550 - DNA, 17 bp, Arabidopsis thaliana
aggagattacgggattt

(The sequence listing continues in the following parts.)

What is claimed:

1. A method of identifying a full length small RNA from a signature sequence RNA molecule comprising:
a. providing a genomic DNA database;
b. identifying said signature sequence of said small RNA molecule from said database using MPSS method, wherein said signature sequence comprises a portion of a full sequence of said small RNA molecule, wherein said small RNA molecule comprises about 15 to about 30 nucleotides;
c. comparing said signature sequence to said genomic database;
d. identifying one or more genomic regions that indicate identity with said signature sequence; and
e. extending said signature sequence by a necessary number of nucleotides to obtain said full sequence of said small RNA molecule.

2. The method of claim 1 wherein said small RNA signature sequence comprises about 15 to about 20 nucleotides.

3. The method of claim 1 wherein said signature sequence is selected from the group consisting of SEQ ID NOs: 1-185,396.

4. The method of claim 1 wherein said signature sequence is extended by from about 1 to about 13 nucleotides.

5. The method of claim 1 wherein said signature sequence is extended in a 3′ direction.

6. The method of claim 1 wherein said signature sequence is extended in a 5′ direction.

7. The method of claim 1 wherein the small RNA molecule comprises a small interfering RNA or a microRNA.

8. A library of small RNA signature sequences from Arabidopsis thaliana comprising a plurality of sequences selected from the group consisting of SEQ ID NOs: 1-185,396.

9. The library of claim 8 wherein said plurality of sequences comprises all of SEQ ID NOs: 1-185,396.

10. An isolated small RNA molecule comprising a nucleic acid sequence having from about 15 to about 30 nucleotides, wherein the nucleic acid is sufficiently complementary to a plant gene to down-regulate the plant gene by RNA interference.

11. The isolated small RNA molecule of claim 10, wherein the nucleic acid sequence is at least 75% homologous to a member selected from the group consisting of SEQ ID NO. 1-185,413.

12. The isolated small RNA molecule of claim 10, wherein the plant gene is an Arabidopsis thaliana gene.

13. The isolated small RNA molecule of claim 10, wherein the nucleic acid is an siRNA, miRNA or combination thereof.

14. The isolated small RNA molecule of claim 10 wherein:
a) the small RNA molecule that down-regulates expression of an NBS-LRR disease resistance gene via RNA interference (RNAi);
b) the small RNA molecule is from about 15 to about 30 nucleotides in length; and
c) the small RNA molecule comprises a nucleotide sequence having sufficient complementarity to an RNA of said NBS-LRR disease resistance gene for the small RNA molecule to direct cleavage of said RNA via RNAi.

15. The isolated small RNA molecule of claim 14, comprising a nucleic acid having at least 75% homology to SEQ ID NO. 185,398.

16. The isolated small RNA molecule of claim 10 wherein:
a) the small RNA molecule down-regulates expression of an DNA (cytosine-5)-methyltransferase gene via RNA interference (RNAi);
b) the small RNA molecule is from about 15 to about 30 nucleotides in length; and
c) the small RNA molecule comprises a nucleotide sequence having sufficient complementarity to an RNA of said DNA (cytosine-5)-methyltransferase gene for the small RNA molecule to direct cleavage of said RNA via RNAi.

17. The isolated small RNA molecule of claim 16, comprising a nucleic acid having at least 75% homology to SEQ ID NO. 185,399.

18. The isolated small RNA molecule of claim 10 wherein:
a) the small RNA molecule down-regulates expression of an F-box family gene via RNA interference (RNAi);
b) the small RNA molecule is from about 15 to about 30 nucleotides in length; and
c) the small RNA molecule comprises a nucleotide sequence having sufficient complementarity to an RNA of said F-box family gene for the small RNA molecule to direct cleavage of said RNA via RNAi.

19. The isolated small RNA molecule of claim 18, comprising a nucleic acid having at least 75% homology to SEQ ID NO. 185,400.

20. The isolated small RNA molecule of claim 10 wherein:
a) the small RNA molecule down-regulates expression of an galactosidyltransferase gene via RNA interference (RNAi), wherein:
b) the small RNA molecule is from about 15 to about 30 nucleotides in length; and
c) the small RNA molecule comprises a nucleotide sequence having sufficient complementarity to an RNA of said galactosidyltransferase gene for the small RNA molecule to direct cleavage of said RNA via RNAi.

21. The isolated small RNA molecule of claim 20, comprising a nucleic acid having at least 75% homology to SEQ ID NO. 185,401.

22. The isolated small RNA molecule of claim 10 wherein:
a) the small RNA molecule down-regulates expression of an SET domain-containing gene via RNA interference (RNAi);
b) the small RNA molecule is from about 15 to about 30 nucleotides in length; and
c) the small RNA molecule comprises a nucleotide sequence having sufficient complementarity to an RNA of said SET domain-containing gene for the small RNA molecule to direct cleavage of said RNA via RNAi.

23. The isolated small RNA molecule of claim 22, comprising a nucleic acid having at least 75% homology to SEQ ID NO. 185,404.

24. The isolated small RNA molecule of claim 10 wherein:
a) the small RNA molecule down-regulates expression of an S-locus protein kinase gene via RNA interference (RNAi);
b) the small RNA molecule is from about 15 to about 30 nucleotides in length; and
c) the small RNA molecule comprises a nucleotide sequence having sufficient complementarity to an RNA of said S-locus protein kinase gene for the small RNA molecule to direct cleavage of said RNA via RNAi.

25. The isolated small RNA molecule of claim 24, comprising a nucleic acid having at least 75% homology to SEQ ID NO. 185,405.

26. The isolated small RNA molecule of claim 10 wherein:
a) the small RNA molecule down-regulates expression of an Extra-large G-Protein-related protein gene via RNA interference (RNAi);
a) the small RNA molecule is from about 15 to about 30 nucleotides in length; and
b) the small RNA molecule comprises a nucleotide sequence having sufficient complementarity to an RNA of said Extra-large G-Protein-related protein gene for the small RNA molecule to direct cleavage of said RNA via RNAi.

27. The isolated small RNA molecule of claim 26, comprising a nucleic acid having at least 75% homology to SEQ ID NO. 185,409.

28. The isolated small RNA molecule of claim 10 wherein
a) the small RNA molecule down-regulates a plant gene comprising a nucleic acid having at least 75% homology to a member selected from the group consisting of SEQ ID NOs. 185,397-185,409; and
b) the nucleic acid is sufficiently complementary to the plant gene to down-regulate the plant gene by RNA interference.

29. An expression vector comprising a nucleic acid sequence encoding a nucleic acid having at least 75% homology to a member selected from the group consisting of SEQ ID NO. 1-185,413, wherein the expression vector comprises a transcription initiation region; a transcription termination region; and wherein said nucleic acid sequence is operably linked to said initiation region and said termination region.

30. The expression vector of claim 29, wherein the nucleic acid is selected from the group consisting of SEQ ID NOs. 185,397-185,409.

31. A method for identifying small RNA molecules that are conserved across more than one species, the method comprising:
a) creation of a genome-wide small RNA library for a first species;
b) creation of a genomic library or genomic-wide small RNA library for a second species;
c) comparing the library of the first species to the library of the second species; and
d) identifying small RNA molecules found in both the first library and the second library.

32. The method of claim 31, wherein the first species is Arabidopsis thaliana.

33. The method of claim 32, wherein the second species is a member selected from the group consisting of a eukaryote, a plant, a fungi, a yeast, and a mammal.

34. A method for identifying small RNA molecules that are unique to a single species, the method comprising:
a) creation of a genome-wide small RNA library for a first species;
b) creation of a genomic library or genomic-wide small RNA library for a second species;
c) comparing the library of the first species to the library of the second species; and
d) identifying small RNA molecules found in only one of said libraries.

35. The method of claim 34, wherein the first species is Arabidopsis thaliana.

36. The method of claim 35, wherein the second species is a member selected from the group consisting of a eukaryote, a plant, a fungi, a yeast, and a mammal.
